(19) United States
(12) Patent Application Publication
(10) Pub. No.: US 2024/0101646 A1
(43) Pub. Date: Mar. 28, 2024

(54) SARS-COV-2 CORONAVIRUS ANTIBODIES AND USES THEREOF

(71) Applicant: VANDERBILT UNIVERSITY, Nashville, TN (US)

(72) Inventors: Ivelin Stefanov GEORGIEV, Nashville, TN (US); Andrea R. SHIAKOLAS, Nashville, TN (US); Kevin J. KRAMER, Nashville, TN (US)

(21) Appl. No.: 18/273,625

(22) PCT Filed: Jan. 21, 2022
(86) PCT No.: PCT/US2022/013291

§ 371 Date: Jul. 21, 2023

Related U.S. Application Data
(60) Provisional application No. 63/140,379, filed on Jan. 22, 2021.
(60) Provisional application No. 63/165,860, filed on Mar. 25, 2021.
(60) Provisional application No. 63/172,981, filed on Apr. 9, 2021.
(60) Provisional application No. 63/175,243, filed on Apr. 15, 2021.
(60) Provisional application No. 63/195,789, filed on Jun. 2, 2021.
(60) Provisional application No. 63/299,605, filed on Jan. 14, 2022.

(51) Int. Cl. C07K 16/10; A61P 31/14

(52) U.S. Cl. CPC C07K 16/1003; A61P 31/14; C07K 2317/76

(57) ABSTRACT

The present disclosure relates to antibodies and uses thereof for treating, preventing, and detecting coronavirus infection.

### CROSS REFERENCE TO RELATED APPLICATIONS

[0001] This application claims the priority benefit of U.S. Provisional Application No. 63/140,379, filed Jan. 22, 2021, U.S. Provisional Application No. 63/165,860, filed Mar. 25, 2021, U.S. Provisional Application No. 63/172,981, filed Apr. 9, 2021, U.S. Provisional Application No. 63/175,243, filed Apr. 15, 2021, U.S. Provisional Application No. 63/195,789, filed Jun. 2, 2021, and U.S. Provisional Application No. 63/299,605, filed Jan. 14, 2022, which are expressly incorporated herein by reference in their entireties.

### STATEMENT REGARDING FEDERALLY SPONSORED RESEARCH

[0002] This invention was made with government support under Grant No. 3 RO1 AI131722-04S1 by the National Institutes of Health. The government has certain rights in the invention.

### FIELD

[0003] The present disclosure relates to antibodies and uses thereof for treating, preventing, and detecting coronavirus infection.

### BACKGROUND

[0004] SARS-CoV-2, or the 2019 novel coronavirus (COVID-19), is a significant pandemic threat that has resulted in over 96,000,000 diagnosed cases including over 2,000,000 deaths as of Jan. 19, 2021. Initially detected in Wuhan, China, human-human transmission has resulted in confirmed cases all over the world. On Jan. 30, 2020, the World Health Organization declared a Public Health of International Concern due to the COVID-19 outbreak and pronounced it a global pandemic on Mar. 12, 2020. The development of preventive and therapeutic measures that can counteract the ongoing, and any future, coronavirus pandemics is therefore of utmost significance for public health worldwide. What is needed are novel compositions and methods for preventing, treating, and diagnosing SARS-CoV-2 infection.

### SUMMARY

[0005] Disclosed herein are recombinant antibodies and uses thereof for preventing, treating, and detecting coronavirus infection. Antibody sequences were obtained from an individual previously infected with a SARS-CoV-2 infection.

[0006] In some aspects, disclosed herein is a recombinant antibody, wherein the antibody comprises a light chain variable region (VL) that comprises a light chain complementarity determining region (CDRL)1, CDRL2, and CDRL3 and/or a heavy chain variable region (VH) that comprises a heavy chain complementarity determining region (CDRH)1, CDRH2, and CDRH3, wherein: CDRH3 comprises an amino acid sequence at least 60% identical to SEQ ID NOs: 4969-5796, 13255-14083, 21356-22312, 26193-26205, 26263-26275, or 26289-26318; and CDRL3 comprises an amino acid sequence at least 60% identical to SEQ ID NOs: 7453-8280, 25184-26140, 26232-26244, 26276-26288, or 26319-26348.

[0007] In some embodiments, CDRH3 comprises at least one amino acid substitution when compared to SEQ ID NOs: 4969-5796, 13255-14083, 21356-22312, 26193-26205, 26263-26275, or 26289-26318. In some embodiments, CDRL3 comprises at least one amino acid substitution when compared to SEQ ID NOs: 7453-8280, 15742-16570, 25184-26140, 26232-26244, 26276-26288, or 26319-26348.

[0008] In some embodiments, CDRH1 comprises an amino acid sequence at least 60% identical to SEQ ID NOs: 3313-4140, 11597-12425, 19442-20398, or 26167-26179; and/or CDRL1 comprises an amino acid sequence at least 60% identical to SEQ ID NOs: 5797-6624, 14084-14912, 23270-24226, or 26206-26218.

[0009] In some embodiments, CDRH1 comprises at least one amino acid substitution when compared to SEQ ID NOs: 3313-4140, 11597-12425, 19442-20398, or 26167-26179. In some embodiments, CDRL1 comprises at least one amino acid substitution when compared to SEQ ID NOs: 5797-6624, 14084-14912, 23270-24226, or 26206-26218.

[0010] In some embodiments, CDRH2 comprises an amino acid sequence at least 60% identical to SEQ ID NOs: 4141-4968, 12426-13254, 20399-21355, or 26180-26192; and/or CDRL2 comprises an amino acid sequence at least 60% identical to SEQ ID NOs: 6625-7452, 14913-15741, 24227-25183, or 26219-26231.

[0011] In some embodiments, CDRH2 comprises at least one amino acid substitution when compared to SEQ ID NOs: 4141-4968, 12426-13254, 20399-21355, or 26180-26192. In some embodiments, CDRL2 comprises at least one amino acid substitution when compared to SEQ ID NOs: 6625-7452, 14913-15741, 24227-25183, or 26219-26231.

[0012] In some embodiments, VH comprises an amino acid sequence selected from the group consisting of SEQ ID NOs: 1657-2484, 9939-10767, 18485-19441, and 26141-26153. In some embodiments, VL comprises an amino acid sequence selected from the group consisting of SEQ ID NOs: 2485-3312, 10768-11596, 22313-23269, and 26154-26166.

[0013] In some embodiments, the recombinant antibody is selected from Table 1. In some embodiments, the recombinant antibody is selected from Table 2. In some embodiments, the recombinant antibody is selected from Table 3.

[0014] In one aspect, disclosed herein is a nucleic acid encoding a recombinant antibody as disclosed herein.

[0015] In one aspect, disclosed herein is a recombinant expression cassette or plasmid comprising a sequence to express a recombinant antibody as disclosed herein.

[0016] In one aspect, disclosed herein is a host cell comprising an expression cassette or a plasmid as disclosed herein.

[0017] In one aspect, disclosed herein is a method of producing an antibody, comprising cultivating or maintaining a host cell under conditions to produce the antibody.

[0018] In one aspect, disclosed herein is a method of treating a coronavirus infection in a subject, comprising administering to the subject a therapeutically effective amount of a recombinant antibody as disclosed herein. In some embodiments, the coronavirus is SARS-CoV-2.

[0019] In some aspects, disclosed herein is a method for detecting a coronavirus infection in a subject, comprising: providing a biological sample from the subject, and detecting a coronavirus antigen in the biological sample with an antibody that specifically binds to the coronavirus antigen, wherein the antibody is from any aspect as disclosed herein, and wherein the presence of the coronavirus antigen in the biological sample indicates the subject is infected with a coronavirus. In some embodiments, the coronavirus is SARS-CoV-2.

### BRIEF DESCRIPTION OF DRAWINGS

[0020] The accompanying figures, which are incorporated in and constitute a part of this specification, illustrate aspects described below.

[0021] FIGS. 1A-1B show LIBRA-seq antigen titration for identification of potent antibodies. To create affinity-type measurements and identify high potency antibodies using the LIBRA-seq technology, an antigen screening library containing an antigen titration was applied. Six different amounts of oligo-labeled SARS-CoV-2 S protein were included in a screening library. Antibodies with high affinity for SARS-CoV-2 S showed reactivity for S protein added in lower amounts. FIG. 1A shows a schematic depicting the experimental set up—where a titration of oligo-labeled S protein was added to the antigen library and donor PBMCs were used as the cellular input. After incubation, cells with high affinity for the antigen would have many S proteins bound, including those added in low concentrations. FIG. 1B shows, after single cell processing and sequencing, antigen binding can be assessed bioinformatically and which cells have high LIBRA-seq scores for many or all of the Spike antigens included were determined.

[0022] FIG. 2 shows assessment of ligand blocking functionality using LIBRA-seq through identification of ACE2 blocking antibodies. For assessment of ligand blocking functionality using LIBRA-seq, an antigen and its ligand are included in the screening library. If an antibody does not disrupt the interaction between a protein and its receptor, then the LIBRA-seq scores for the protein and the receptor are high (left). If an antibody does block the interaction, then the score for the protein is high and the score for the receptor is low (right). This allows for identification of antibodies that block receptor binding. This can also indicate neutralization potential of the antibodies. This schematic depicts this experimental rationale using SARS-CoV-2 as an example—where oligo labeled spike and oligo-labeled ACE2 (the spike receptor) are included in the antigen screening library.

[0023] FIGS. 3A-3B show LIBRA-seq antigen titration with ligand blocking for identification of potent antibodies. In this schematic, an antigen titration along with the inclusion of the receptor are included to identify potent antibodies with ligand blocking functionality. FIG. 3A shows schematic depicting the experimental set up—where a titration of oligo-labeled S protein was added to the antigen library along with oligo-labeled ACE2 receptor, and donor PBMCs were used as the cellular input. After incubation, cells with high affinity for the antigen would have many S proteins bound, including those added in low concentrations. Antibodies that can block the receptor-protein interaction would not have ACE2 bound to the spike proteins. Antibodies that do not block the interaction would have ACE2 bound to the spike proteins. FIG. 3B shows, after single cell processing and sequencing, assessment of antigen binding bioinformatically and determination regarding which cells have high LIBRA-seq scores for many or all of the Spike antigens included. Additionally, which cells do or do not have ACE2 bound can be determined. In this example, ACE2 is not bound to spike and therefore has a low LIBRA-seq score, indicating that the antibody is able to block ligand binding.

[0024] FIG. 4 shows extending LIBRA-seq technology for identification of potent SARS-CoV-2 antibodies. To assess affinity measurements and ligand blocking functionality, three LIBRA-seq experiments were performed. To assess affinity measurements, in experiment 1, the antigen library consisted of an antigen titration of SARS-CoV-2 S protein along with control antigens influenza HA NC99 and HIV ZM197. To assess ligand blocking, in experiment 2, the antigen library consisted of SARS-CoV-2 S protein along with its receptor, ACE2, and control antigens influenza HA NC99 and HIV ZM197. To assess affinity measurements in combination with ligand blocking, in experiment 3, the antigen library consisted of an antigen titration of SARS-CoV-2 S protein, ACE2, and control antigens influenza HA NC99 and HIV ZM197. Each antigen library was incubated with SARS-CoV-2 convalescent donor PBMCs and LIBRA-seq was performed. After single cell processing, next generation sequencing, and bioinformatic analysis, antibody heavy chain and light chain sequence features and antigen LIBRA-seq scores for thousands of cells were assessed. For the antigen titration experiments, antibodies that showed high scores for S protein added in lower amounts were identified. For ligand blocking, antibodies that had high scores for S protein and low scores for ACE2 were identified—showing ligand blocking functionality of these antibodies. Antibodies were prioritized for expression and further testing based on these features (see FIG. 5).

[0025] FIGS. 5A-5C show LIBRA-seq enabled prioritization of antibodies with diverse sequence features and functional profiles using antigen titration and ligand blocking features. As described in FIG. 4, three experiments were performed to assess affinity measurements and ligand blocking in the context of SARS-CoV-2. Antibodies were prioritized for expression and characterization utilizing the genetic features of the heavy and light chain sequences (including clonal expansion, VH gene usage, VH identity, CDRH3 sequence and sequence length, VL gene usage, VL identity, CDRL3 sequence and sequence length) and the LIBRA-seq scores for the antigens used in each library. For each experiment, select prioritized antibodies are shown, with their genetic features and LIBRA-seq scores. Each row represents an antibody. LIBRA-seq scores for each antigen in the library are displayed as a heatmap, with LIBRA-seq score of −2 displayed as tan, a score of 0 displayed as white, and a score of 2 displayed as purple These antibodies were expressed, purified, and characterized for binding to SARS-CoV-2 S and SARS-CoV-1 S (shown as ELISA area under the curve (AUC)), and neutralization of SARS-CoV-2. ELISA binding data against the antigens are displayed as a heatmap of the AUC analysis, with AUC of 0 displayed as white, and maximum AUC as purple. Neutralization is shown as weak, partial or strong, as green, yellow and red respectively. Non-neutralizing antibodies are listed as white. Additionally, epitope mapping was performed by testing binding to a variety of S protein subdomains, and determined epitopes are listed. ND stands for not done. HP stands for hexapro and represents the SARS-CoV-2 hexapro S variant that was used in the screening library. FIG. 5A shows that nine antibodies were prioritized and tested from experiment 1 (assessment of affinity measurements using antigen titration). FIG. 5B shows that ten antibodies were prioritized and tested from experiment 2 (assessment of ligand blocking). FIG. 5C shows that eleven antibodies were prioritized and tested from experiment 3 (assessment of affinity measurements combined with ligand blocking). In addition to the select antibodies highlighted here, there are thousands of other antibodies present in the datasets. The sequences in FIG. 5A are CARDPASYYDFWSGYVDYYYYGMDVW (SEQ ID NO: 1), CARDPASYYDLWSGYVDYYYYGMDVW (SEQ ID NO: 2), CARSGGYRLWFGELW (SEQ ID NO: 3), CAREGAVGATSGLDYW (SEQ ID NO: 4), CARGFDYW (SEQ ID NO: 5), CARGAGEQRLVGGLFGVSHFYYYMDVW (SEQ ID NO: 6), CAKSATIVLMVSAIYW (SEQ ID NO: 7), CARVRGGEWVGDLGWYYYYGMDVW (SEQ ID NO: 8), CVKGATKIDYW (SEQ ID NO: 9), CQQYGNSRLTF (SEQ ID NO: 10), CHHYGSSRLTF (SEQ ID NO: 11), CQQYGGSPATF (SEQ ID NO: 12), CYSRDSSGNPLF (SEQ ID NO: 13), CQQYGSSPWTF (SEQ ID NO: 14), CQQYNSYPWTF (SEQ ID NO: 15), CSSYTSTSTLVF (SEQ ID NO: 16), CMQALQTPRTF (SEQ ID NO: 17), CFSYTSGGTRVF (SEQ ID NO: 18). The sequences in FIG. 5B are CAADPFADYW (SEQ ID NO: 19), CARGLWFGDSETVWFDPW (SEQ ID NO: 20), CVKGKIQLWLGADYW (SEQ ID NO: 21), CARKPLLHSSVNPGAFDIW (SEQ ID NO: 22), CAREKGYSSSSSATYYLDFW (SEQ ID NO: 23), CARRVPGDYYCLDVW (SEQ ID NO: 24), CARGGLWGTFDYW (SEQ ID NO: 25), CARAYGGNYYYGMDVW (SEQ ID NO: 26), CASLGGDSYISGTHYDRSGYDPW (SEQ ID NO: 27), CARVNRVGDGPDFW (SEQ ID NO: 28), CATWDDSLNAWVF (SEQ ID NO: 29), CQQSYSTPPTF (SEQ ID NO: 30), CQQSYNTPWTF (SEQ ID NO: 31), CQQYATSPRTF (SEQ ID NO: 32), CQSYDSSLTALVF (SEQ ID NO: 33), CQQSFSARVPTF (SEQ ID NO: 34), CQQFAYSLYTF (SEQ ID NO: 35), CQAWDSSTASFVF (SEQ ID NO: 36), CQRRSNWPPFTF (SEQ ID NO: 37), CMQALQTPWTF (SEQ ID NO: 38). Sequences in FIG. 5C shows CTRGGWPSGDTFDIW (SEQ ID NO: 39), CAREGGWYSVGWVDPW (SEQ ID NO: 40), CARDRRIIGYYFGMDVW (SEQ ID NO 41), CARLLIEHDAFDIW (SEQ ID NO: 42), CAREEGSGWWKHDYW (SEQ ID NO: 43), CVRDRRIVGYYFGLDVW (SEQ ID NO: 44), CAKDAFYYGSGSHFYYYYYMDVW (SEQ ID NO: 45), CARDRRGGGWTASFDFW (SEQ ID NO: 46), CARGGWPSGDTFDIW (SEQ ID NO: 47), CAHHTVPTIYDYW (SEQ ID NO: 48), CAKDIGRYDHYNIFGRVGGAFDIW (SEQ ID NO: 49), CQQYGSSRTF (SEQ ID NO: 50), CCPYADTWVF (SEQ ID NO: 51), CMQALHFPYTF (SEQ ID NO: 52), CQQLSGYPYTF (SEQ ID NO: 53), CCSYATTWVF (SEQ ID NO: 54), CQQYGSSPTF (SEQ ID NO: 55), CQQHYSTPGYTF (SEQ ID NO: 56), CQQLNSYPEITF (SEQ ID NO: 57), CSSYAGSNPLVF (SEQ ID NO: 58), CQHYDNLPRF (SEQ ID NO: 59),

[0026] FIGS. 6A-6C show identification of SARS-CoV-2 antibodies using LIBRA-seq antigen titration. Utilizing an antigen titration can lead to affinity-type measurements. By plotting the LIBRA-seq score for the S antigens against the amounts of antigen that were added to the library, a representative “binding curve” is created. FIG. 6A shows, from experiment 1 (assessment of affinity measurements using antigen titration), LIBRA-seq scores for one antibody identified from the SARS-CoV-2 convalescent sample using this method. FIG. 6B shows that these scores are plotted against the antigen amounts utilized in the screening library for the titration. FIG. 6C shows comparison of this example antibody (shown in black) compared a selection of other antibodies (colors) identified from this donor. There are a variety of LIBRA-seq score binding curves that can be used to estimate antigen affinity. Other measurements can be estimated from these curves, like EC50 for example.

[0027] FIG. 7 shows SARS-CoV-2 S titration with ligand blocking for identification of potent antibodies. For experiment 3 (assessment of affinity measurements combined with ligand blocking), all cells identified from the experiment are shown as dots, with LIBRA-seq score for ACE2 on the y-axis and LIBRA-seq Score for SARS-CoV-2 S on the X-axis. Each plot shows the LIBRA-seq scores for one of the SARS-CoV-2 S titration amounts added. These plots are shown from high to low, left to right respectively. With these plots, a SARS-CoV-2 S and ACE2 double positive population (shown with an arrow) can be identified, along with a SARS-CoV-2 S positive/ACE2 negative population (shown with an arrow). This population represents cells that have ligand blocking functionality. Further, since a titration of Spike was included, cells that show high scores for spike added in lower amounts and are also negative for ACE2 can be identified (shown in red circle). This population of cells can be highly potent, ACE2 blocking antibodies.

[0028] FIGS. 8A-8E show LIBRA-seq assay schematic. The assay consists of the following general steps: FIG. 8A. Antigens are recombinantly produced, biotinylated, and labeled with a DNA “barcode” oligonucleotide. The DNA-barcoded antigens are mixed with cells of interest and labeled with streptavidin fluorophores. FIG. 8B. Antigen positive B cells are bulk sorted and diluted to an appropriate concentration for single cell sequencing. FIG. 8C. Using the 10× Chromium controller, each cell (along with its bound antigens) is isolated in a single cell emulsion droplet along with a bead that has primers for downstream library preparation. FIG. 8D. Bead delivered oligos index both cellular BCR transcripts and antigen barcodes during reverse transcription. FIG. 8E. Library preparation results in amplification of transcripts for each cell that are indexed with the same cell barcode to enable direct mapping of BCR sequence to antigen specificity.

[0029] FIG. 9 shows LIBRA-seq with ligand blocking applied to a SARS-CoV-2 convalescent donor sample. An antigen screening library of oligonucleotide-labeled antigens was generated. This consisted of CoV antigens SARS-CoV-2 spike and negative controls. Additionally, oligolabeled ACE2 (the SARS-CoV-2 spike receptor) was also included. This allowed for assessment of ligand blocking functionality from the sequencing experiment. The antigen screening library was mixed with the donor PBMCs, and the LIBRA-seq workflow was executed.

[0030] FIGS. 10A-10B show that LIBRA-seq with ligand blocking confirms predicted SARS-CoV-2 neutralization by antibodies at high rates. FIG. 10A. IC50 values (ug/ml) for SARS-CoV-2 neutralization by real time cell analysis (RTCA) with VSV-SARS-CoV-2. Line shown is geometric mean. Non-neutralizing antibodies are shown as >10 ug/ml. FIG. 10B. Percent of confirmed predicted neutralizers (shown in FIG. 12D) are shown. 85.7% of predicted neutralizers were confirmed for 5317 experiment (LIBRA-seq with ligand blocking), whereas 22.2% of antibodies predicted to bind SARS-CoV-2 were neutralizing when no ACE2 was included, for experiment 5318-1. Furthermore, the two neutralizing antibodies were clonally related. 45.4% of predicted neutralizers were confirmed for 5318-2.

[0031] FIGS. 11A-11D show antibody discovery using LIBRA-seq with ligand blocking. FIG. 11A shows experimental setup of three LIBRA-seq experiments: experiment 1, LIBRA-seq with ligand blocking; experiment 2, LIBRA-seq with a SARS-CoV-2 S titration; and experiment 3, LIBRA-seq with a SARS-CoV-2 S titration and ligand blocking. For experiment 2 and 3, six different aliquots of S protein were added in a titration series (1-6). (FIGS. 11B-11D) (left) After next-generation sequencing, hundreds of B cells (dots) were recovered that had paired heavy/light chain sequencing information and antigen reactivity information for the three experiments. For experiment 1 (FIG. 11B), 2 (FIG. 11C), and 3 (FIG. 11D), select LIBRA-seq scores for all cells per experiment are shown as open circles (n=828, 829, 957, respectively). Antibodies selected for expression and validation are highlighted and numbered in light blue. (right) LIBRA-seq scores for the selected antibodies for all antigens from each experiment are shown as a heatmap from −2 to 2 (tan to purple); scores outside of this range are shown as the minimum and maximum values. For experiments 1 and 3, antibodies with negative scores for ACE2 are shown above the dotted line while antibodies with positive scores for ACE2 are shown below the dotted line and are controls. For experiment 2, all SARS-CoV-2 reactive antibodies are shown above the dotted line, whereas influenza specific antibody 53181-3 is shown as a control below the dotted line.

[0032] FIGS. 12A-12D show validation and characterization of selected antibodies. FIG. 12A. ELISA area under the curve (AUC) values for binding to SARS-CoV-2 recombinant antigen proteins and a negative control influenza hemagglutinin protein are shown for antibodies (rows) in each experiment, calculated from data in FIG. 18B. FIG. 12B. K_{D} (M) of antibodies for SARS-CoV-2 RBD or NTD (based on epitope shown in FIG. 14A) was determined by biolayer interferometry. ND, not done. FIG. 12C. Percent reduction in ACE2 binding by ELISA is shown as a heatmap from 0 to 100% (white to blue) reduction in binding compared to SARS-CoV-2 binding only. FIG. 12D. VSV SARS-CoV-2 neutralization IC₅₀ values are shown as a heatmap from high potency (red) to low potency (green). Non-neutralizing antibodies are shown as white.

[0033] FIGS. 13A-13C show assessment of LIBRA-seq with ligand blocking. FIG. 13A. “Predicted Neutralizing Antibodies” were defined as the subset of selected antibodies with negative ACE2 LIBRA-seq scores from experiments 1 (n=7 antibodies) and 3 (n=6 antibodies), and all antibodies with high LIBRA-seq scores (>1) for SARS-CoV-2 S from experiment 2 (n=7 antibodies). The percent of neutralizing antibodies from the set of predicted neutralizers is shown for each experiment. FIG. 13B. The IC₅₀ values (μg/mL) for SARS-CoV-2 neutralization by RTCA with VSV-SARS-CoV-2 (IC₅₀ value for each antibody shown as single dot) are plotted for the set of predicted neutralizers. Horizontal line shown is geometric mean for each experiment. Non-neutralizing antibodies are shown as >10 μg/mL. FIG. 13C. Spearman correlation of ACE2 LIBRA-seq score (x-axis) and % Reduction in ACE2 Binding to SARS-CoV-2 (y-axis) for antibodies from experiments 1 and 3. Spearman r=−0.54, p=0.017 (two-tailed, 95% confidence interval).

[0034] FIG. 14 shows antibody neutralization of SARS-CoV-2 variants. Authentic SARS-CoV-2 neutralization for a panel of antibodies is shown against USA-WA1 and variants (Alpha, Beta, Gamma, and Delta). Data represent the % neutralization as mean±SD. The IC₅₀ values calculated in GraphPad prism software by 4-parameter best-fit analysis are shown to the right of the panel.

[0035] FIGS. 15A-15B show structural characterization of antibodies 5317-4 and 5317-10. FIG. 15A. 9 Å-resolution cryo-EM structure of Fab-spike complex for 5317-4 Fab (orange) and 5317-10 Fab (pink). Spike protomers are shown in green, blue, and red. FIG. 15B. Fab-spike complex structure modeled with ACE2 (purple).

[0036] FIGS. 16A-16H show discovery of cross-reactive ACE2-blocking coronavirus antibodies using LIBRA-seq with ligand blocking. FIG. 16A. Schematic of LIBRA-seq with ligand blocking applied to cross-reactive antibody discovery. FIG. 16B. For identification of cross-reactive coronavirus antibodies with ligand blocking capability, all IgGs recovered from the LIBRA-seq experiment (n=2569) are shown, with LIBRA-seq scores for SARS-CoV (x-axis) and SARS-CoV-2 (y-axis). Each dot represents a cell, and the color of the dots shows the ACE2 LIBRA-seq score, with color heatmap shown on the right. FIG. 16C. Cells selected for expression and validation are shown in blue (ACE2 score <−1) or grey (ACE2 score ≥−1). Of these selected cells, 8 had high LIBRA-seq scores (>1) for SARS-CoV-2 and SARS-CoV and low scores (<−1) for ACE2. Additional candidates with a variety of scores for SARS-CoV-2, SARS-CoV and ACE2 were also selected for expression and validation as controls. FIG. 16D. The 8 IgGs with high LIBRA-seq scores for SARS-CoV-2 and SARS-CoV and low scores for ACE2 are shown above the dotted line. Control antibodies with other LIBRA-seq score patterns are shown below the dotted line. For each antibody, CDR sequences and lengths are shown at the amino acid level and V-gene and J-gene identity are shown at the nucleotide level. LIBRA-seq scores for antigens included in the screening library (SARS-CoV-2 spike, SARS-CoV spike, ACE2, HIV ZM197 Env, influenza hemagglutinin H1 NC99) are shown as a heatmap low (tan)-white-high (purple). Scores outside of this range are shown as the minimum and maximum values. FIG. 16E. ELISA area under the curve (AUC) values from binding to coronavirus spike proteins, influenza hemagglutinin H1 NC99 (negative control), and FIG. 16F. recombinant antigen domains, are shown as a heatmap from minimum (white) to maximum (purple) binding. FIG. 16G. Percent reduction in ACE2 binding by ELISA is shown for SARS-CoV-2 and SARS-CoV spikes, and displayed as a heatmap from 0% (white) to 100% (blue). FIG. 16H. For the 8 IgGs with high LIBRA-seq scores for SARS-CoV-2 and SARS-CoV and low scores for ACE2, the percent reduction in ACE2 binding due to antibody blocking by ELISA is shown for SARS-CoV (x-axis) and SARS-CoV-2 (y-axis). The sequences in FIG. 16D include CARYTSYYDRSGFRRVEYFQHW (SEQ ID NO: 26263), CANMRTNYDIFTGYYPDAFDIW (SEQ ID NO: 26264), CARDVTHAFDLW (SEQ ID NO: 26265), CAKEGARGRGATTSFYYYYMDVW (SEQ ID NO: 26266), CARSTYYYDRSGYSTSDGMDVW (SEQ ID NO: 26267), CAREYSSTVWDNW (SEQ ID NO: 26268), CARPPRGYYDRTGYYNVVHYFQHW (SEQ ID NO: 26269), CARPPRGYYDRSGYYNVLLYFQHW (SEQ ID NO: 26270), CAKSEYSYAYKVHFLDYW (SEQ ID NO: 26271), CAREDTFYFDYW (SEQ ID NO: 26272), CARGGFNYGHGLDYW (SEQ ID NO: 26273), CAKYGWGLLAAAGDAFDIW (SEQ ID NO: 26274), CARSGSYGDRTFDHW (SEQ ID NO: 26275), CQQYGSSPYTF (SEQ ID NO: 26276), CQQYYNWPPWTF (SEQ ID NO: 26277), CQQYNSDLYTF (SEQ ID NO: 26278), CQSYDISLNGWVL (SEQ ID NO: 26279), CQQYGSSPLTF (SEQ ID NO: 26280), CSSYTSSSAYVVF (SEQ ID NO: 26281), CQQYDNLSLTF (SEQ ID NO: 26282), CQQYVNLPLTF (SEQ ID NO: 26283), CQSYDSSNHVLF (SEQ ID NO: 26284), CQQYGTSPSF (SEQ ID NO: 26285), CSSYAGVTNNLIF (SEQ ID NO: 26286), CMQGTHWPRTF (SEQ ID NO: 26287), and CQAWGSSTAVF (SEQ ID NO: 26288).

[0037] FIGS. 17A-17C show a schematic representation of LIBRA-seq experiments. FIG. 17A. An antigen screening library of oligonucleotide-labeled antigens was generated. This library consisted of SARS-CoV-2 spike antigens and negative controls. Additionally, oligo-labeled ACE2 (the SARS-CoV-2 spike host cell receptor) was included. The antigen screening library was mixed with donor PBMCs. This approach allowed for assessment of B cell ligand blocking functionality from the sequencing experiment. FIG. 17B. An antigen screening library containing an antigen titration was generated, with a goal of identifying high affinity antibodies from LIBRA-seq. In this experiment, six different amounts of oligo-labeled SARS-CoV-2 S protein, each labeled with a different barcode, were included in a screening library. FIG. 17C. Schematic of LIBRA-seq with S titrations and ACE2 included for ligand blocking.

[0038] FIGS. 18A-18D show characterization of LIBRA-seq identified antibodies. FIG. 18A. Genetic characteristics for monoclonal antibodies prioritized for expression and validation. VH, JH, VL, JL inferred gene segment identity is shown at the nucleotide level. CDRH3 and CDRL3 amino acid sequence and length are also shown. FIG. 18B. ELISA binding of antibodies to SARS-CoV-2 spike, SARS-CoV-2 S1, SARS-CoV-2 RBD, SARS-CoV-2 NTD, SARS-CoV-2 S2 and influenza hemagglutinin H1 NC99. Data are represented as mean±SEM of technical duplicates and represent one of at least two independent experiments (n=2). FIG. 18C. ACE2 blocking ELISA. Antibodies were added to spike, and recombinant ACE2 was added and detected. Antibodies that block ACE2 binding show a reduction in absorbance compared to ACE2 binding without competitor (dotted line). ELISAs were performed at one antibody concentration, and data are represented as mean±SEM of technical triplicates and represent one of at least two independent experiments (n=2). FIG. 18D. Antibodies were tested in a VSV SARS-CoV-2 real time cell analysis (RTCA) neutralization assay. Neutralization curves and IC50 values are shown. Data are represented as mean±S.D. of technical triplicates, and represent one of two independent experiments (n=2).

[0039] FIGS. 19A-19C show characterization of selected cross-reactive antibodies. FIG. 19A. For the IgGs that showed high LIBRA-seq scores (>1) for both SARS-CoV-2 and SARS-CoV, the percent of cells with low ACE2 scores (<−1) is shown. FIG. 19B. ELISA binding of antibodies to SARS-CoV-2 spike, SARS-CoV spike, influenza hemagglutinin H1 NC99, SARS-CoV-2 S1, SARS-CoV-2 RBD, and SARS-CoV-2 S2. Data are represented as mean±SEM of technical duplicates and represent one of at least two independent experiments (n=2). FIG. 19C. ACE2 blocking ELISA. ACE2 binding without competitor is shown as a dotted line. ELISAs were performed at one antibody concentration, and data are represented as mean±SEM of technical triplicates and represent one of at least two independent experiments (n=2).

[0040] FIGS. 20A-20C show LIBRA-seq with antigen titrations for affinity predictions. To create affinity-type measurements and identify high potency antibodies using the LIBRA-seq technology, an antigen screening library containing an antigen titration was applied. FIG. 20A. In this experiment, six different amounts of oligo-labeled SARS-CoV-2 S protein were included in a screening library. Antibodies with high affinity for SARS-CoV-2 S show reactivity (high LIBRA-seq score) for S protein added in lower amounts. FIG. 20B. For 5317 experiment, SARS-CoV-2 spike was added in a single amount. The LIBRA-seq score for S is shown on the y-axis and the affinity is shown on the x axis. FIG. 20C. For 5318-2 experiment, SARS-CoV-2 spike was added in a titration along with ACE2. The area under the curve for the LIBRA-seq score titration curve for SARS-CoV-2 S is shown on the y-axis and the affinity is shown on the x axis. This experimental test highlights the potential to predict affinity from a sequencing experiment.

### DETAILED DESCRIPTION

[0041] Therefore, in some aspects, disclosed herein are recombinant antibodies that specifically bind a viral protein of a coronavirus and uses thereof for treating, preventing, inhibiting, reducing, and detecting coronavirus infection, wherein the coronavirus is SARS-CoV-2.

[0042] Reference will now be made in detail to the embodiments of the invention, examples of which are illustrated in the drawings and the examples. This invention may, however, be embodied in many different forms and should not be construed as limited to the embodiments set forth herein.

[0043] Unless defined otherwise, all technical and scientific terms used herein have the same meaning as commonly understood to one of ordinary skill in the art to which this disclosure belongs. The term “comprising” and variations thereof as used herein is used synonymously with the term “including” and variations thereof and are open, non-limiting terms. Although the terms “comprising” and “including” have been used herein to describe various embodiments, the terms “consisting essentially of” and “consisting of” can be used in place of “comprising” and “including” to provide for more specific embodiments and are also disclosed. As used in this disclosure and in the appended claims, the singular forms “a”, “an”, “the”, include plural referents unless the context clearly dictates otherwise.

[0044] The following definitions are provided for the full understanding of terms used in this specification.

### Terminology

[0045] The term “about” as used herein when referring to a measurable value such as an amount, a percentage, and the like, is meant to encompass variations of ±20%, ±10%, ±5%, or ±1% from the measurable value.

[0046] “Administration” to a subject or “administering” includes any route of introducing or delivering to a subject an agent. Administration can be carried out by any suitable route, including oral, intravenous, intraperitoneal, intranasal, inhalation and the like. Administration includes self-administration and the administration by another.

[0047] As used herein, the terms “may,” “optionally,” and “may optionally” are used interchangeably and are meant to include cases in which the condition occurs as well as cases in which the condition does not occur. Thus, for example, the statement that a formulation “may include an excipient” is meant to include cases in which the formulation includes an excipient as well as cases in which the formulation does not include an excipient.

[0048] As used herein, the term “subject” or “host” can refer to living organisms such as mammals, including, but not limited to humans, livestock, dogs, cats, and other mammals. Administration of the therapeutic agents can be carried out at dosages and for periods of time effective for treatment of a subject. In some embodiments, the subject is a human.

[0049] As used herein, the term “antigen” refers to a molecule that is capable of binding to an antibody. In some embodiments, the antigen stimulates an immune response such as by production of antibodies specific for the antigen.

[0050] In the present invention, “specific for” and “specificity” means a condition where one of the molecules is involved in selective binding. Accordingly, an antibody that is specific for one antigen selectively binds that antigen and not other antigens.

[0051] The term “antibodies” is used herein in a broad sense and includes both polyclonal and monoclonal antibodies. In addition to intact immunoglobulin molecules, also included in the term “antibodies” are fragments or polymers of those immunoglobulin molecules, and human or humanized versions of immunoglobulin molecules or fragments thereof. The antibodies can be tested for their desired activity using the in vitro assays described herein, or by analogous methods, after which their in vivo therapeutic and/or prophylactic activities are tested according to known clinical testing methods. Native antibodies are usually heterotetrameric glycoproteins of about 150,000 daltons, composed of two identical light (L) chains and two identical heavy (H) chains. Each heavy chain has at one end a variable domain (VH) followed by a number of constant domains. Each light chain has a variable domain at one end (VL) and a constant domain at its other end. There are five major classes of human immunoglobulins: IgA, IgD, IgE, IgG and IgM, and several of these may be further divided into subclasses (isotypes), e.g., IgG-1, IgG-2, IgG-3, and IgG-4; IgA-1 and IgA-2. One skilled in the art would recognize the comparable classes for mouse. The heavy chain constant domains that correspond to the different classes of immunoglobulins are called alpha, delta, epsilon, gamma, and mu, respectively.

[0052] Each antibody molecule is made up of the protein products of two genes: heavy-chain gene and light-chain gene. The heavy-chain gene is constructed through somatic recombination of V, D, and J gene segments. In human, there are 51 VH, 27 DH, 6 JH, 9 CH gene segments on human chromosome 14. The light-chain gene is constructed through somatic recombination of V and J gene segments. There are 40 Vκ, 31 Vλ, 5 Jκ, 4 Jλ gene segments on human chromosome 14 (80 VJ). The heavy-chain constant domains that correspond to the different classes of immunoglobulins are called a, 6, F, 7, and, respectively. The “light chains” of antibodies from any vertebrate species can be assigned to one of two clearly distinct types, called kappa (κ) and lambda (λ), based on the amino acid sequences of their constant domains.

[0053] The term “monoclonal antibody” as used herein refers to an antibody obtained from a substantially homogeneous population of antibodies, i.e., the individual antibodies within the population are identical except for possible naturally occurring mutations that may be present in a small subset of the antibody molecules. The monoclonal antibodies herein specifically include “chimeric” antibodies in which a portion of the heavy and/or light chain is identical with or homologous to corresponding sequences in antibodies derived from a particular species or belonging to a particular antibody class or subclass, while the remainder of the chain(s) is identical with or homologous to corresponding sequences in antibodies derived from another species or belonging to another antibody class or subclass, as well as fragments of such antibodies, as long as they exhibit the desired antagonistic activity.

[0054] The disclosed monoclonal antibodies can be made using any procedure which produces monoclonal antibodies. For example, disclosed monoclonal antibodies can be prepared using hybridoma methods, such as those described by Kohler and Milstein, Nature, 256:495 (1975). In a hybridoma method, a mouse or other appropriate host animal is typically immunized with an immunizing agent to elicit lymphocytes that produce or are capable of producing antibodies that will specifically bind to the immunizing agent. Alternatively, the lymphocytes may be immunized in vitro.

[0055] The monoclonal antibodies may also be made by recombinant DNA methods. DNA encoding the disclosed monoclonal antibodies can be readily isolated and sequenced using conventional procedures (e.g., by using oligonucleotide probes that are capable of binding specifically to genes encoding the heavy and light chains of murine antibodies). Libraries of antibodies or active antibody fragments can also be generated and screened using phage display techniques, e.g., as described in U.S. Pat. No. 5,804,440 to Burton et al. and U.S. Pat. No. 6,096,441 to Barbas et al.

[0056] In vitro methods are also suitable for preparing monovalent antibodies. Digestion of antibodies to produce fragments thereof, particularly, Fab fragments, can be accomplished using routine techniques known in the art. For instance, digestion can be performed using papain. Examples of papain digestion are described in WO 94/29348 published Dec. 22, 1994 and U.S. Pat. No. 4,342,566. Papain digestion of antibodies typically produces two identical antigen binding fragments, called Fab fragments, each with a single antigen binding site, and a residual Fc fragment. Pepsin treatment yields a fragment that has two antigen combining sites and is still capable of cross-linking antigen.

[0057] As used herein, the term “antibody or antigen binding fragment thereof” or “antibody or fragments thereof” encompasses chimeric antibodies and hybrid antibodies, with dual or multiple antigen or epitope specificities, and fragments, such as F(ab′)2, Fab′, Fab, Fv, sFv, scFv, nanoantibody and the like, including hybrid fragments. Thus, fragments of the antibodies that retain the ability to bind their specific antigens are provided. Such antibodies and fragments can be made by techniques known in the art and can be screened for specificity and activity according to the methods set forth in the Examples and in general methods for producing antibodies and screening antibodies for specificity and activity (See Harlow and Lane. Antibodies, A Laboratory Manual. Cold Spring Harbor Publications, New York, (1988)).

[0058] The fragments, whether attached to other sequences or not, can also include insertions, deletions, substitutions, or other selected modifications of particular regions or specific amino acids residues, provided the activity of the antibody or antibody fragment is not significantly altered or impaired compared to the non-modified antibody or antibody fragment. These modifications can provide for some additional property, such as to remove/add amino acids capable of disulfide bonding, to increase its bio-longevity, to alter its secretory characteristics, etc. In any case, the antibody or antibody fragment must possess a bioactive property, such as specific binding to its cognate antigen. Functional or active regions of the antibody or antibody fragment may be identified by mutagenesis of a specific region of the protein, followed by expression and testing of the expressed polypeptide. Such methods are readily apparent to a skilled practitioner in the art and can include site-specific mutagenesis of the nucleic acid encoding the antibody or antibody fragment. (Zoller, M. J. Curr. Opin. Biotechnol. 3:348-354, 1992).

[0059] As used herein, the term “antibody” or “antibodies” can also refer to a human antibody and/or a humanized antibody. Many non-human antibodies (e.g., those derived from mice, rats, or rabbits) are naturally antigenic in humans, and thus can give rise to undesirable immune responses when administered to humans. Therefore, the use of human or humanized antibodies in the methods serves to lessen the chance that an antibody administered to a human will evoke an undesirable immune response.

[0060] The terms “antigen binding site”, “binding site” and “binding domain” refer to the specific elements, parts or amino acid residues of a polypeptide, such as an antibody, that bind the antigenic determinant or epitope.

[0061] An “antibody heavy chain,” as used herein, refers to the larger of the two types of polypeptide chains present in all antibody molecules in their naturally occurring conformations.

[0062] An “antibody light chain,” as used herein, refers to the smaller of the two types of polypeptide chains present in all antibody molecules in their naturally occurring conformations, κ and λ light chains refer to the two major antibody light chain isotypes.

[0063] The term “CDR” as used herein refers to the “complementarity determining regions” of the antibody which consist of the antigen binding loops. (Kabat E. A. et al., (1991) Sequences of proteins of immunological interest. NIH Publication 91-3242). Each of the two variable domains of an antibody Fv fragment contain, for example, three CDRs.

[0064] The term “hypervariable region” or “HVR”, as used herein, refers to each of the regions of an antibody variable domain which are hypervariable in sequence and/or form structurally defined loops (“hypervariable loops”). Generally, native four-chain antibodies comprise six HVRs; three in the VH (H1, H2, H3), and three in the VL (L1, L2, L3). HVRs generally comprise amino acid residues from the hypervariable loops and/or from the complementarity determining regions (CDRs), the latter being of highest sequence variability and/or involved in antigen recognition. With the exception of CDR1 in VH, CDRs generally comprise the amino acid residues that form the hypervariable loops. Hypervariable regions (HVRs) are also referred to as “complementarity determining regions” (CDRs), and these terms are used herein interchangeably in reference to portions of the variable region that form the antigen-binding regions. The amino acid sequence boundaries of a CDR can be determined by one of skill in the art using any of a number of known numbering schemes, including those described by Kabat et al., supra (“Kabat” numbering scheme): Al-Lazikani et al., 1997. J. Mol. Biol., 273:927-948 (“Chothia” numbering scheme); MacCallum et al., 1996, J. Mol. Biol, 262:732-745 (“Contact” numbering scheme); Lefranc et al., Dev. Comp. Immunol., 2003, 27:55-77 (“IMGT” numbering scheme); and Honegge and Pluckthun, J. Mol. Biol., 2001, 309:657-70 (“AHo” numbering scheme); each of which is incorporated by reference in its entirety.

[0065] “Effective amount” encompasses, without limitation, an amount that can ameliorate, reverse, mitigate, prevent, or diagnose a symptom or sign of a medical condition or disorder. Unless dictated otherwise, explicitly or by context, an “effective amount” is not limited to a minimal amount sufficient to ameliorate a condition. The severity of a disease or disorder, as well as the ability of a treatment to prevent, treat, or mitigate, the disease or disorder can be measured, without implying any limitation, by a biomarker or by a clinical parameter. In some embodiments, the term “effective amount of a recombinant antibody” refers to an amount of a recombinant antibody sufficient to prevent, treat, or mitigate a coronavirus infection (e.g., SARS-CoV-2 infection).

[0066] The “fragments” or “functional fragments,” whether attached to other sequences or not, can include insertions, deletions, substitutions, or other selected modifications of particular regions or specific amino acids residues, provided the activity of the fragment is not significantly altered or impaired compared to the nonmodified peptide or protein. These modifications can provide for some additional property, such as to remove or add amino acids capable of disulfide bonding, to increase its bio-longevity, to alter its secretory characteristics, etc. In any case, the functional fragment must possess a bioactive property, such as binding to a coronavirus antigen (e.g., SARS-CoV-2 antigen), and/or ameliorating the viral infection.

[0067] The term “identity” or “homology” shall be construed to mean the percentage of nucleotide bases or amino acid residues in the candidate sequence that are identical with the bases or residues of a corresponding sequence to which it is compared, after aligning the sequences and introducing gaps, if necessary to achieve the maximum percent identity for the entire sequence, and not considering any conservative substitutions as part of the sequence identity. A polynucleotide or polynucleotide region (or a polypeptide or polypeptide region) that has a certain percentage (for example, 80%, 85%, 90%, or 95%) of “sequence identity” to another sequence means that, when aligned, that percentage of bases (or amino acids) are the same in comparing the two sequences. This alignment and the percent homology or sequence identity can be determined using software programs known in the art. Such alignment can be provided using, for instance, the method of Needleman et al. (1970) J. Mol. Biol. 48: 443-453, implemented conveniently by computer programs such as the Align program (DNAstar, Inc.).

[0068] The term “increased” or “increase” as used herein generally means an increase by a statically significant amount; for example, “increased” means an increase of at least 10% as compared to a reference level, for example an increase of at least about 20%, or at least about 30%, or at least about 40%, or at least about 50%, or at least about 60%, or at least about 70%, or at least about 80%, or at least about 90% or up to and including a 100% increase or any increase between 10-100% as compared to a reference level, or at least about a 2-fold, or at least about a 3-fold, or at least about a 4-fold, or at least about a 5-fold or at least about a 10-fold increase, or any increase between 2-fold and 10-fold or greater as compared to a reference level.

[0069] As used herein, the terms “nanobody”, “V_{H}H”, “V_{H}H antibody fragment” and “single domain antibody” are used indifferently and designate a variable domain of a single heavy chain of an antibody of the type found in Camelidae, which are without any light chains, such as those derived from Camelids as described in PCT Publication No. WO 94/04678, which is incorporated by reference in its entirety.

[0070] The term “reduced”, “reduce”, “reduction”, or “decrease” as used herein generally means a decrease by a statistically significant amount. However, for avoidance of doubt, “reduced” means a decrease by at least 10% as compared to a reference level, for example a decrease by at least about 20%, or at least about 30%, or at least about 40%, or at least about 50%, or at least about 60%, or at least about 70%, or at least about 80%, or at least about 90% or up to and including a 100% decrease (i.e. absent level as compared to a reference sample), or any decrease between 10-100% as compared to a reference level.

[0071] “Nucleotide,” “nucleoside,” “nucleotide residue,” and “nucleoside residue,” as used herein, can mean a deoxyribonucleotide, ribonucleotide residue, or another similar nucleoside analogue. A nucleotide is a molecule that contains a base moiety, a sugar moiety and a phosphate moiety. Nucleotides can be linked together through their phosphate moieties and sugar moieties creating an internucleoside linkage. The base moiety of a nucleotide can be adenin-9-yl (A), cytosin-1-yl (C), guanin-9-yl (G), uracil-1-yl (U), and thymin-1-yl (T). The sugar moiety of a nucleotide is a ribose or a deoxyribose. The phosphate moiety of a nucleotide is pentavalent phosphate. A non-limiting example of a nucleotide would be 3′-AMP (3′-adenosine monophosphate) or 5′-GMP (5′-guanosine monophosphate). There are many varieties of these types of molecules available in the art and available herein.

[0072] The method and the system disclosed here including the use of primers, which are capable of interacting with the disclosed nucleic acids, such as the antigen barcode as disclosed herein. In certain embodiments the primers are used to support DNA amplification reactions. Typically, the primers will be capable of being extended in a sequence specific manner. Extension of a primer in a sequence specific manner includes any methods wherein the sequence and/or composition of the nucleic acid molecule to which the primer is hybridized or otherwise associated directs or influences the composition or sequence of the product produced by the extension of the primer. Extension of the primer in a sequence specific manner therefore includes, but is not limited to, PCR, DNA sequencing, DNA extension, DNA polymerization, RNA transcription, or reverse transcription. Techniques and conditions that amplify the primer in a sequence specific manner are preferred. In certain embodiments the primers are used for the DNA amplification reactions, such as PCR or direct sequencing. It is understood that in certain embodiments the primers can also be extended using non-enzymatic techniques, where for example, the nucleotides or oligonucleotides used to extend the primer are modified such that they will chemically react to extend the primer in a sequence specific manner. Typically, the disclosed primers hybridize with the disclosed nucleic acids or region of the nucleic acids or they hybridize with the complement of the nucleic acids or complement of a region of the nucleic acids.

[0073] The term “amplification” refers to the production of one or more copies of a genetic fragment or target sequence, specifically the “amplicon”. As it refers to the product of an amplification reaction, amplicon is used interchangeably with common laboratory terms, such as “PCR product.”

[0074] The term “polypeptide” refers to a compound made up of a single chain of D- or L-amino acids or a mixture of D- and L-amino acids joined by peptide bonds.

[0075] “Encoding” refers to the inherent property of specific sequences of nucleotides in a polynucleotide, such as a gene, a cDNA, or an mRNA, to serve as templates for synthesis of other polymers and macromolecules in biological processes having either a defined sequence of nucleotides (i.e., rRNA, tRNA and mRNA) or a defined sequence of amino acids and the biological properties resulting therefrom. Thus, a gene encodes a protein if transcription and translation of mRNA.

[0076] An “expression cassette” refers to a DNA coding sequence or segment of DNA that code for an expression product that can be inserted into a vector at defined restriction sites. The cassette restriction sites are designed to ensure insertion of the cassette in the proper reading frame. Generally, foreign DNA is inserted at one or more restriction sites of the vector DNA, and then is carried by the vector into a host cell along with the transmissible vector DNA. A segment or sequence of DNA having inserted or added DNA, such as an expression vector, can also be called a “DNA construct”.

[0077] Expression vectors comprise the expression cassette and additionally usually comprise an origin for autonomous replication in the host cells or a genome integration site, one or more selectable markers (e.g. an amino acid synthesis gene or a gene conferring resistance to antibiotics such as zeocin, kanamycin, G418 or hygromycin), a number of restriction enzyme cleavage sites, a suitable promoter sequence and a transcription terminator, which components are operably linked together. The term “vector” as used herein includes autonomously replicating nucleotide sequences as well as genome integrating nucleotide sequences. A common type of vector is a “plasmid”, which generally is a self-contained molecule of double-stranded DNA that can readily accept additional (foreign) DNA and which can readily be introduced into a suitable host cell. A plasmid vector often contains coding DNA and promoter DNA and has one or more restriction sites suitable for inserting foreign DNA. Specifically, the term “vector” or “plasmid” refers to a vehicle by which a DNA or RNA sequence (e.g. a foreign gene) can be introduced into a host cell, so as to transform the host and promote expression (e.g. transcription and translation) of the introduced sequence.

[0078] The term “host cell” as used herein shall refer to primary subject cells trans-formed to produce a particular recombinant protein, such as an antibody as described herein, and any progeny thereof. It should be understood that not all progeny are exactly identical to the parental cell (due to deliberate or inadvertent mutations or differences in environment), however, such altered progeny are included in these terms, so long as the progeny retain the same functionality as that of the originally transformed cell. The term “host cell line” refers to a cell line of host cells as used for expressing a recombinant gene to produce recombinant polypeptides such as recombinant antibodies. The term “cell line” as used herein refers to an established clone of a particular cell type that has acquired the ability to proliferate over a prolonged period of time. Such host cell or host cell line may be maintained in cell culture and/or cultivated to produce a recombinant polypeptide.

[0079] The term “gene” or “gene sequence” refers to the coding sequence or control sequence, or fragments thereof. A gene may include any combination of coding sequence and control sequence, or fragments thereof. Thus, a “gene” as referred to herein may be all or part of a native gene. A polynucleotide sequence as referred to herein may be used interchangeably with the term “gene”, or may include any coding sequence, non-coding sequence or control sequence, fragments thereof, and combinations thereof. The term “gene” or “gene sequence” includes, for example, control sequences upstream of the coding sequence.

[0080] “Pharmaceutically acceptable carrier” (sometimes referred to as a “carrier”) means a carrier or excipient that is useful in preparing a pharmaceutical or therapeutic composition that is generally safe and non-toxic, and includes a carrier that is acceptable for veterinary and/or human pharmaceutical or therapeutic use. The terms “carrier” or “pharmaceutically acceptable carrier” can include, but are not limited to, phosphate buffered saline solution, water, emulsions (such as an oil/water or water/oil emulsion) and/or various types of wetting agents.

[0081] As used herein, the term “carrier” encompasses any excipient, diluent, filler, salt, buffer, stabilizer, solubilizer, lipid, stabilizer, or other material well known in the art for use in pharmaceutical formulations. The choice of a carrier for use in a composition will depend upon the intended route of administration for the composition. The preparation of pharmaceutically acceptable carriers and formulations containing these materials is described in, e.g., Remington's Pharmaceutical Sciences, 21st Edition, ed. University of the Sciences in Philadelphia, Lippincott, Williams & Wilkins, Philadelphia, P A, 2005. Examples of physiologically acceptable carriers include saline, glycerol, DMSO, buffers such as phosphate buffers, citrate buffer, and buffers with other organic acids; antioxidants including ascorbic acid; low molecular weight (less than about 10 residues) polypeptides; proteins, such as serum albumin, gelatin, or immunoglobulins; hydrophilic polymers such as polyvinylpyrrolidone; amino acids such as glycine, glutamine, asparagine, arginine or lysine; monosaccharides, disaccharides, and other carbohydrates including glucose, mannose, or dextrins; chelating agents such as EDTA; sugar alcohols such as mannitol or sorbitol; salt-forming counterions such as sodium; and/or nonionic surfactants such as TWEEN™ (ICI, Inc.; Bridgewater, New Jersey), polyethylene glycol (PEG), and PLURONICS™ (BASF; Florham Park, NJ). To provide for the administration of such dosages for the desired therapeutic treatment, compositions disclosed herein can advantageously comprise between about 0.1% and 99% by weight of the total of one or more of the subject compounds based on the weight of the total composition including carrier or diluent.

[0082] The term “specificity” refers to the number of different types of antigens or antigenic determinants to which a particular antigen-binding molecule (such as the recombinant antibody of the invention) can bind. As used herein, the term “specifically binds,” as used herein with respect to a recombinant antibody refers to the recombinant antibody's preferential binding to one or more epitopes as compared with other epitopes. Specific binding can depend upon binding affinity and the stringency of the conditions under which the binding is conducted. In one example, an antibody specifically binds an epitope when there is high affinity binding under stringent conditions.

[0083] It should be understood that the specificity of an antigen-binding molecule (e.g., the recombinant antibodies of the present invention) can be determined based on affinity and/or avidity. The affinity, represented by the equilibrium constant for the dissociation of an antigen with an antigen-binding molecule (K_{D}), is a measure for the binding strength between an antigenic determinant and an antigen-binding site on the antigen-binding molecule: the lesser the value of the K_{D}, the stronger the binding strength between an antigenic determinant and the antigen-binding molecule (alternatively, the affinity can also be expressed as the affinity constant (KA), which is 1/K_{D}). As will be clear to the skilled person (for example on the basis of the further disclosure herein), affinity can be determined in a manner known per se, depending on the specific antigen of interest. Avidity is the measure of the strength of binding between an antigen-binding molecule (such as the recombinant antibodies of the present invention) and the pertinent antigen. Avidity is related to both the affinity between an antigenic determinant and its antigen binding site on the antigen-binding molecule and the number of pertinent binding sites present on the antigen-binding molecule. Typically, antigen-binding proteins (such as the recombinant antibodies of the invention) will bind to their antigen with a dissociation constant (K_{D}) of 10⁵ to 10⁻¹² moles/liter or less, and preferably 10⁻⁷ to 10⁻¹² moles/liter or less, and more preferably 10⁻⁸ to 10⁻¹² moles/liter.

[0084] “Therapeutically effective amount” refers to the amount of a composition such as recombinant antibody that will elicit the biological or medical response of a tissue, system, animal, or human that is being sought by the researcher, veterinarian, medical doctor or other clinician over a generalized period of time. In some embodiments, a desired response is reduction of coronaviral titers in a subject. In some embodiments, the desired response is mitigation of coronavirus infection and/or related symptoms. In some instances, a desired biological or medical response is achieved following administration of multiple dosages of the composition to the subject over a period of days, weeks, or years. The therapeutically effective amount will vary depending on the composition, the disorder or conditions and its severity, the route of administration, time of administration, rate of excretion, drug combination, judgment of the treating physician, dosage form, and the age, weight, general health, sex and/or diet of the subject to be treated. The therapeutically effective amount of recombinant antibodies as described herein can be determined by one of ordinary skill in the art.

[0085] A therapeutically significant reduction in a symptom is, e.g. at least about 10%, at least about 20%, at least about 30%, at least about 40%, at least about 50%, at least about 60%, at least about 70%, at least about 80%, at least about 90%, at least about 100%, at least about 125%, at least about 150% or more in a measured parameter as compared to a control or non-treated subject. Measured or measurable parameters include clinically detectable markers of disease, for example, elevated or depressed levels of a biological marker, such as decreased viral titers, decreased viral RNA levels, increase in CD4 T lymphocyte counts, and/or prolonged survival of a subject. It will be understood, that the total daily usage of the compositions and formulations as disclosed herein will be decided by the attending physician within the scope of sound medical judgment. The exact amount required will vary depending on factors such as the type of disease being treated.

[0086] The terms “treat,” “treating,” “treatment,” and grammatical variations thereof as used herein, include partially or completely delaying, alleviating, mitigating or reducing the intensity of one or more attendant symptoms of infection. Treatments according to the invention may be applied preventively, prophylactically, palliatively or remedially. Prophylactic treatments are administered to a subject prior to onset (e.g., before obvious signs of an infection), during early onset (e.g., upon initial signs and symptoms of an infection), after an established development of an infection, or during chronic infection. Prophylactic administration can occur for several minutes to months prior to the manifestation of an infection.

[0087] As used herein, the term “preventing” a disorder or unwanted physiological event in a subject refers specifically to the prevention of the occurrence of symptoms and/or their underlying cause, wherein the subject may or may not exhibit heightened susceptibility to the disorder or event.

### Antibodies and Compositions

[0088] In some aspects, disclosed herein is a recombinant antibody, said antibody comprising a light chain variable region (VL) that comprises a light chain complementarity determining region (CDRL)1, CDRL2, and CDRL3 and a heavy chain variable region (VH) that comprises a heavy chain complementarity determining region (CDRH)1, CDRH2, and CDRH3, wherein
[0089] CDRH3 comprises an amino acid sequence at least 60% (for example, at least 60%, at least 65%, at least 70%, at least 75%, at least 80%, at least 85%, at least 90%, at least 95%, at least 96%, at least 97%, at least 98%, at least 99%) identical to SEQ ID NOs: 4969-5796, 13255-14083, 21356-22312, 26193-26205, 26263-26275, or 26289-26318; and
[0090] CDRL3 comprises an amino acid sequence at least 60% (for example, at least 60%, at least 65%, at least 70%, at least 75%, at least 80%, at least 85%, at least 90%, at least 95%, at least 96%, at least 97%, at least 98%, at least 99%) identical to SEQ ID NOs: 7453-8280, 15742-16570, 25184-26140, 26232-26244, 26276-26288, or 26319-26348.

[0091] In some embodiments, the CDRH3 comprises at least one amino acid substitution when compared to SEQ ID NOs: SEQ ID NOs: 4969-5796, 13255-14083, 21356-22312, 26193-26205, 26263-26275, or 26289-26318. In some embodiments, the CDRL3 comprises at least one amino acid substitution when compared to SEQ ID NOs: 7453-8280, 15742-16570, 25184-26140, 26232-26244, 26276-26288, or 26319-26348.

[0092] In some embodiments, the CDRH1 comprises an amino acid sequence at least 60% (for example, at least 60%, at least 65%, at least 70%, at least 75%, at least 80%, at least 85%, at least 90%, at least 95%, at least 96%, at least 97%, at least 98%, at least 99%) identical to SEQ ID NOs: 3313-4140, 11597-12425, 19442-20398, or 26167-26179; and CDRL1 comprises an amino acid sequence at least 60% (for example, at least 60%, at least 65%, at least 70%, at least 75%, at least 80%, at least 85%, at least 90%, at least 95%, at least 96%, at least 97%, at least 98%, at least 99%) identical to SEQ ID NOs: 5797-6624, 14084-14912, 23270-24226, or 26206-26218.

[0093] In some embodiments, the CDRH1 comprises at least one amino acid substitution when compared to SEQ ID NOs: 3313-4140, 11597-12425, 19442-20398, or 26167-26179. In some embodiments, the CDRH1 comprises at least 1, 2, 3, 4, 5, or 6 substitutions when compared to SEQ ID NOs: 3313-4140, 11597-12425, 19442-20398, or 26167-26179.

[0094] In some embodiments, the CDRL1 comprises at least one amino acid substitution when compared to SEQ ID NOs: 5797-6624, 14084-14912, 23270-24226, or 26206-26218. In some embodiments, the CDRL1 comprises at least 1, 2, 3, 4, 5, or 6 substitutions when compared to SEQ ID NOs: 5797-6624, 14084-14912, 23270-24226, or 26206-26218.

[0095] In some embodiments, the CDRH2 comprises an amino acid sequence at least 60% (for example, at least 60%, at least 65%, at least 70%, at least 75%, at least 80%, at least 85%, at least 90%, at least 95%, at least 96%, at least 97%, at least 98%, at least 99%) identical to SEQ ID NOs: 4141-4968, 12426-13254, 20399-21355, or 26180-26192; and CDRL2 comprises an amino acid sequence at least 60% (for example, at least 60%, at least 65%, at least 70%, at least 75%, at least 80%, at least 85%, at least 90%, at least 95%, at least 96%, at least 97%, at least 98%, at least 99%) identical to SEQ ID NOs: 6625-7452, 14913-15741, 24227-25183, or 26219-26231.

[0096] In some embodiments, the CDRH2 comprises at least one amino acid substitution when compared to SEQ ID NOs: 4141-4968, 12426-13254, 20399-21355, or 26180-26192. In some embodiments, the CDRH2 comprises at least 1, 2, 3, 4, 5, or 6 substitutions when compared to SEQ ID NOs: 4141-4968, 12426-13254, 20399-21355, or 26180-26192.

[0097] In some embodiments, the CDRL2 comprises at least one amino acid substitution when compared to SEQ ID NOs: 6625-7452, 14913-15741, 24227-25183, or 26219-26231. In some embodiments, the CDRL2 comprises at least 1, 2, 3, 4, 5, or 6 substitutions when compared to SEQ ID NOs: 6625-7452, 14913-15741, 24227-25183, or 26219-26231.

[0098] In some embodiments, VH comprises an amino acid sequence at least 60% (for example, at least 60%, at least 65%, at least 70%, at least 75%, at least 80%, at least 85%, at least 90%, at least 95%, at least 96%, at least 97%, at least 98%, at least 99%) identical to SEQ ID NOs: 1657-2484,9939-10767, 18485-19441, or 26141-26153. In some embodiments, VH comprises an amino acid sequence selected from the group consisting of SEQ ID NOs: 1657-2484, 9939-10767, 18485-19441, and 26141-26153.

[0099] In some embodiments, VL comprises an amino acid sequence at least 60% (for example, at least 60%, at least 65%, at least 70%, at least 75%, at least 80%, at least 85%, at least 90%, at least 95%, at least 96%, at least 97%, at least 98%, at least 99%) identical to SEQ ID NOs: 2485-3312, 10768-11596, 22313-23269, or 26154-26166. In some embodiments, VL comprises an amino acid sequence selected from the group consisting of SEQ ID NOs: 2485-3312, 10768-11596, 22313-23269, and 26154-26166.

[0100] In some embodiments, a CDR sequence (for example CDRL1, CDRL2, CDRL3, CDRH1, CDRH2, or CDRH3) comprises one amino acid mutation, two amino acid mutations, three amino acid mutations, four amino acid mutations, five amino acid mutations, etc. when compared to a CDR sequence as disclosed herein.

[0101] In some embodiments, the recombinant antibody is a monoclonal antibody. In some embodiments, the recombinant antibody is an isolated antibody. In some embodiments, the recombinant antibody is a non-naturally occurring antibody. In some embodiments, the recombinant antibody is an antibody or antigen binding fragment thereof. In some embodiments, combinations of antibodies or antigen binding fragments thereof disclosed herein are used for treating coronavirus infection.

[0102] In some embodiments, combinations of antibodies or antigen binding fragments thereof disclosed herein are used for treating SARS-CoV-2 infection.

[0103] In some embodiments, the antibody comprises a light chain variable region (VL) that comprises a light chain complementarity determining region (CDRL)1, CDRL2, and CDRL3 and a heavy chain variable region (VH) that comprises a heavy chain complementarity determining region (CDRH)1, CDRH2, and CDRH3, wherein:
[0104] CDRH1 is SEQ ID NO: 4056,
[0105] CDRH2 is SEQ ID NO: 4884,
[0106] CDRH3 is SEQ ID NO: 5712,
[0107] CDRL1 is SEQ ID NO: 6540,
[0108] CDRL2 is SEQ ID NO: 7368, and
[0109] CDRL3 is SEQ ID NO: 8196.

[0110] In some embodiments, the antibody comprises a light chain variable region (VL) that comprises a light chain complementarity determining region (CDRL)1, CDRL2, and CDRL3 and a heavy chain variable region (VH) that comprises a heavy chain complementarity determining region (CDRH)1, CDRH2, and CDRH3, wherein:
[0111] CDRH1 is SEQ ID NO: 3791,
[0112] CDRH2 is SEQ ID NO: 4619,
[0113] CDRH3 is SEQ ID NO: 5447,
[0114] CDRL1 is SEQ ID NO: 6275,
[0115] CDRL2 is SEQ ID NO: 7103, and
[0116] CDRL3 is SEQ ID NO: 7931.

[0117] In some embodiments, the antibody comprises a light chain variable region (VL) that comprises a light chain complementarity determining region (CDRL)1, CDRL2, and CDRL3 and a heavy chain variable region (VH) that comprises a heavy chain complementarity determining region (CDRH)1, CDRH2, and CDRH3, wherein:
[0118] CDRH1 is SEQ ID NO: 3858,
[0119] CDRH2 is SEQ ID NO: 4686,
[0120] CDRH3 is SEQ ID NO: 5514,
[0121] CDRL1 is SEQ ID NO: 6342,
[0122] CDRL2 is SEQ ID NO: 7170, and
[0123] CDRL3 is SEQ ID NO: 7998.

[0124] In some embodiments, the antibody comprises a light chain variable region (VL) that comprises a light chain complementarity determining region (CDRL)1, CDRL2, and CDRL3 and a heavy chain variable region (VH) that comprises a heavy chain complementarity determining region (CDRH)1, CDRH2, and CDRH3, wherein:
[0125] CDRH1 is SEQ ID NO: 3680,
[0126] CDRH2 is SEQ ID NO: 4508,
[0127] CDRH3 is SEQ ID NO: 5336,
[0128] CDRL1 is SEQ ID NO: 6164,
[0129] CDRL2 is SEQ ID NO: 6992, and
[0130] CDRL3 is SEQ ID NO: 7820.

[0131] In some embodiments, the antibody comprises a light chain variable region (VL) that comprises a light chain complementarity determining region (CDRL)1, CDRL2, and CDRL3 and a heavy chain variable region (VH) that comprises a heavy chain complementarity determining region (CDRH)1, CDRH2, and CDRH3, wherein:
[0132] CDRH1 is SEQ ID NO: 3856,
[0133] CDRH2 is SEQ ID NO: 4684,
[0134] CDRH3 is SEQ ID NO: 5512,
[0135] CDRL1 is SEQ ID NO: 6340,
[0136] CDRL2 is SEQ ID NO: 7168, and
[0137] CDRL3 is SEQ ID NO: 7996.

[0138] In some embodiments, the antibody comprises a light chain variable region (VL) that comprises a light chain complementarity determining region (CDRL)1, CDRL2, and CDRL3 and a heavy chain variable region (VH) that comprises a heavy chain complementarity determining region (CDRH)1, CDRH2, and CDRH3, wherein:
[0139] CDRH1 is SEQ ID NO: 3355,
[0140] CDRH2 is SEQ ID NO: 4183,
[0141] CDRH3 is SEQ ID NO: 5011,
[0142] CDRL1 is SEQ ID NO: 5839,
[0143] CDRL2 is SEQ ID NO: 6667, and
[0144] CDRL3 is SEQ ID NO: 7495.

[0145] In some embodiments, the antibody comprises a light chain variable region (VL) that comprises a light chain complementarity determining region (CDRL)1, CDRL2, and CDRL3 and a heavy chain variable region (VH) that comprises a heavy chain complementarity determining region (CDRH)1, CDRH2, and CDRH3, wherein:
[0146] CDRH1 is SEQ ID NO: 3697,
[0147] CDRH2 is SEQ ID NO: 4525,
[0148] CDRH3 is SEQ ID NO: 5353,
[0149] CDRL1 is SEQ ID NO: 6181,
[0150] CDRL2 is SEQ ID NO: 7009, and
[0151] CDRL3 is SEQ ID NO: 7837.

[0152] In some embodiments, the antibody comprises a light chain variable region (VL) that comprises a light chain complementarity determining region (CDRL)1, CDRL2, and CDRL3 and a heavy chain variable region (VH) that comprises a heavy chain complementarity determining region (CDRH)1, CDRH2, and CDRH3, wherein:
[0153] CDRH1 is SEQ ID NO: 3481,
[0154] CDRH2 is SEQ ID NO: 4309,
[0155] CDRH3 is SEQ ID NO: 5137,
[0156] CDRL1 is SEQ ID NO: 5965,
[0157] CDRL2 is SEQ ID NO: 6793, and
[0158] CDRL3 is SEQ ID NO: 7621.

[0159] In some embodiments, the antibody comprises a light chain variable region (VL) that comprises a light chain complementarity determining region (CDRL)1, CDRL2, and CDRL3 and a heavy chain variable region (VH) that comprises a heavy chain complementarity determining region (CDRH)1, CDRH2, and CDRH3, wherein:
[0160] CDRH1 is SEQ ID NO: 3896,
[0161] CDRH2 is SEQ ID NO: 4724,
[0162] CDRH3 is SEQ ID NO: 5552,
[0163] CDRL1 is SEQ ID NO: 6380,
[0164] CDRL2 is SEQ ID NO: 7208, and
[0165] CDRL3 is SEQ ID NO: 8036.

[0166] In some embodiments, the antibody comprises a light chain variable region (VL) that comprises a light chain complementarity determining region (CDRL)1, CDRL2, and CDRL3 and a heavy chain variable region (VH) that comprises a heavy chain complementarity determining region (CDRH)1, CDRH2, and CDRH3, wherein:
[0167] CDRH1 is SEQ ID NO: 3667,
[0168] CDRH2 is SEQ ID NO: 4495,
[0169] CDRH3 is SEQ ID NO: 5323,
[0170] CDRL1 is SEQ ID NO: 6151,
[0171] CDRL2 is SEQ ID NO: 6979, and
[0172] CDRL3 is SEQ ID NO: 7807.

[0173] In some embodiments, the antibody comprises a light chain variable region (VL) that comprises a light chain complementarity determining region (CDRL)1, CDRL2, and CDRL3 and a heavy chain variable region (VH) that comprises a heavy chain complementarity determining region (CDRH)1, CDRH2, and CDRH3, wherein:
[0174] CDRH1 is SEQ ID NO: 12368,
[0175] CDRH2 is SEQ ID NO: 13197,
[0176] CDRH3 is SEQ ID NO: 14026,
[0177] CDRL1 is SEQ ID NO: 14855,
[0178] CDRL2 is SEQ ID NO: 15684, and
[0179] CDRL3 is SEQ ID NO: 16513.

[0180] In some embodiments, the antibody comprises a light chain variable region (VL) that comprises a light chain complementarity determining region (CDRL)1, CDRL2, and CDRL3 and a heavy chain variable region (VH) that comprises a heavy chain complementarity determining region (CDRH)1, CDRH2, and CDRH3, wherein:
[0181] CDRH1 is SEQ ID NO: 11621,
[0182] CDRH2 is SEQ ID NO: 12450,
[0183] CDRH3 is SEQ ID NO: 13279,
[0184] CDRL1 is SEQ ID NO: 14108,
[0185] CDRL2 is SEQ ID NO: 14937, and
[0186] CDRL3 is SEQ ID NO: 15766.

[0187] In some embodiments, the antibody comprises a light chain variable region (VL) that comprises a light chain complementarity determining region (CDRL)1, CDRL2, and CDRL3 and a heavy chain variable region (VH) that comprises a heavy chain complementarity determining region (CDRH)1, CDRH2, and CDRH3, wherein:
[0188] CDRH1 is SEQ ID NO: 11742,
[0189] CDRH2 is SEQ ID NO: 12571,
[0190] CDRH3 is SEQ ID NO: 13400,
[0191] CDRL1 is SEQ ID NO: 14229,
[0192] CDRL2 is SEQ ID NO: 15058, and
[0193] CDRL3 is SEQ ID NO: 15887.

[0194] In some embodiments, the antibody comprises a light chain variable region (VL) that comprises a light chain complementarity determining region (CDRL)1, CDRL2, and CDRL3 and a heavy chain variable region (VH) that comprises a heavy chain complementarity determining region (CDRH)1, CDRH2, and CDRH3, wherein:
[0195] CDRH1 is SEQ ID NO: 11598,
[0196] CDRH2 is SEQ ID NO: 12427,
[0197] CDRH3 is SEQ ID NO: 13256,
[0198] CDRL1 is SEQ ID NO: 14085,
[0199] CDRL2 is SEQ ID NO: 14914, and
[0200] CDRL3 is SEQ ID NO: 15743.

[0201] In some embodiments, the antibody comprises a light chain variable region (VL) that comprises a light chain complementarity determining region (CDRL)1, CDRL2, and CDRL3 and a heavy chain variable region (VH) that comprises a heavy chain complementarity determining region (CDRH)1, CDRH2, and CDRH3, wherein:
[0202] CDRH1 is SEQ ID NO: 12262,
[0203] CDRH2 is SEQ ID NO: 13091,
[0204] CDRH3 is SEQ ID NO: 13920,
[0205] CDRL1 is SEQ ID NO: 14749,
[0206] CDRL2 is SEQ ID NO: 15578, and
[0207] CDRL3 is SEQ ID NO: 16407.

[0208] In some embodiments, the antibody comprises a light chain variable region (VL) that comprises a light chain complementarity determining region (CDRL)1, CDRL2, and CDRL3 and a heavy chain variable region (VH) that comprises a heavy chain complementarity determining region (CDRH)1, CDRH2, and CDRH3, wherein:
[0209] CDRH1 is SEQ ID NO: 11995,
[0210] CDRH2 is SEQ ID NO: 12824,
[0211] CDRH3 is SEQ ID NO: 13653,
[0212] CDRL1 is SEQ ID NO: 14482,
[0213] CDRL2 is SEQ ID NO: 15311, and
[0214] CDRL3 is SEQ ID NO: 16140.

[0215] In some embodiments, the antibody comprises a light chain variable region (VL) that comprises a light chain complementarity determining region (CDRL)1, CDRL2, and CDRL3 and a heavy chain variable region (VH) that comprises a heavy chain complementarity determining region (CDRH)1, CDRH2, and CDRH3, wherein:
[0216] CDRH1 is SEQ ID NO: 12164,
[0217] CDRH2 is SEQ ID NO: 12993,
[0218] CDRH3 is SEQ ID NO: 13822,
[0219] CDRL1 is SEQ ID NO: 14651,
[0220] CDRL2 is SEQ ID NO: 15480, and
[0221] CDRL3 is SEQ ID NO: 16309.

[0222] In some embodiments, the antibody comprises a light chain variable region (VL) that comprises a light chain complementarity determining region (CDRL)1, CDRL2, and CDRL3 and a heavy chain variable region (VH) that comprises a heavy chain complementarity determining region (CDRH)1, CDRH2, and CDRH3, wherein:
[0223] CDRH1 is SEQ ID NO: 11752,
[0224] CDRH2 is SEQ ID NO: 12581,
[0225] CDRH3 is SEQ ID NO: 13410,
[0226] CDRL1 is SEQ ID NO: 14239,
[0227] CDRL2 is SEQ ID NO: 15068, and
[0228] CDRL3 is SEQ ID NO: 15897.

[0229] In some embodiments, the antibody comprises a light chain variable region (VL) that comprises a light chain complementarity determining region (CDRL)1, CDRL2, and CDRL3 and a heavy chain variable region (VH) that comprises a heavy chain complementarity determining region (CDRH)1, CDRH2, and CDRH3, wherein:
[0230] CDRH1 is SEQ ID NO: 11888,
[0231] CDRH2 is SEQ ID NO: 12717,
[0232] CDRH3 is SEQ ID NO: 13546,
[0233] CDRL1 is SEQ ID NO: 14375,
[0234] CDRL2 is SEQ ID NO: 15204, and
[0235] CDRL3 is SEQ ID NO: 16033.

[0236] In some embodiments, the antibody comprises a light chain variable region (VL) that comprises a light chain complementarity determining region (CDRL)1, CDRL2, and CDRL3 and a heavy chain variable region (VH) that comprises a heavy chain complementarity determining region (CDRH)1, CDRH2, and CDRH3, wherein:
[0237] CDRH1 is SEQ ID NO: 20173,
[0238] CDRH2 is SEQ ID NO: 21130,
[0239] CDRH3 is SEQ ID NO: 22087,
[0240] CDRL1 is SEQ ID NO: 24001,
[0241] CDRL2 is SEQ ID NO: 24958, and
[0242] CDRL3 is SEQ ID NO: 25915.

[0243] In some embodiments, the antibody comprises a light chain variable region (VL) that comprises a light chain complementarity determining region (CDRL)1, CDRL2, and CDRL3 and a heavy chain variable region (VH) that comprises a heavy chain complementarity determining region (CDRH)1, CDRH2, and CDRH3, wherein:
[0244] CDRH1 is SEQ ID NO: 20065,
[0245] CDRH2 is SEQ ID NO: 21022,
[0246] CDRH3 is SEQ ID NO: 21979,
[0247] CDRL1 is SEQ ID NO: 23893,
[0248] CDRL2 is SEQ ID NO: 24850, and
[0249] CDRL3 is SEQ ID NO: 25807.

[0250] In some embodiments, the antibody comprises a light chain variable region (VL) that comprises a light chain complementarity determining region (CDRL)1, CDRL2, and CDRL3 and a heavy chain variable region (VH) that comprises a heavy chain complementarity determining region (CDRH)1, CDRH2, and CDRH3, wherein:
[0251] CDRH1 is SEQ ID NO: 20115,
[0252] CDRH2 is SEQ ID NO: 21072,
[0253] CDRH3 is SEQ ID NO: 22029,
[0254] CDRL1 is SEQ ID NO: 23943,
[0255] CDRL2 is SEQ ID NO: 24900, and
[0256] CDRL3 is SEQ ID NO: 25857.

[0257] In some embodiments, the antibody comprises a light chain variable region (VL) that comprises a light chain complementarity determining region (CDRL)1, CDRL2, and CDRL3 and a heavy chain variable region (VH) that comprises a heavy chain complementarity determining region (CDRH)1, CDRH2, and CDRH3, wherein:
[0258] CDRH1 is SEQ ID NO: 19873,
[0259] CDRH2 is SEQ ID NO: 20830,
[0260] CDRH3 is SEQ ID NO: 21787,
[0261] CDRL1 is SEQ ID NO: 23701,
[0262] CDRL2 is SEQ ID NO: 24658, and
[0263] CDRL3 is SEQ ID NO: 25615.

[0264] In some embodiments, the antibody comprises a light chain variable region (VL) that comprises a light chain complementarity determining region (CDRL)1, CDRL2, and CDRL3 and a heavy chain variable region (VH) that comprises a heavy chain complementarity determining region (CDRH)1, CDRH2, and CDRH3, wherein:
[0265] CDRH1 is SEQ ID NO: 19923,
[0266] CDRH2 is SEQ ID NO: 20880,
[0267] CDRH3 is SEQ ID NO: 21837,
[0268] CDRL1 is SEQ ID NO: 23751,
[0269] CDRL2 is SEQ ID NO: 24708, and
[0270] CDRL3 is SEQ ID NO: 25665.

[0271] In some embodiments, the antibody comprises a light chain variable region (VL) that comprises a light chain complementarity determining region (CDRL)1, CDRL2, and CDRL3 and a heavy chain variable region (VH) that comprises a heavy chain complementarity determining region (CDRH)1, CDRH2, and CDRH3, wherein:
[0272] CDRH1 is SEQ ID NO: 19458,
[0273] CDRH2 is SEQ ID NO: 20415,
[0274] CDRH3 is SEQ ID NO: 21372,
[0275] CDRL1 is SEQ ID NO: 23286,
[0276] CDRL2 is SEQ ID NO: 24243, and
[0277] CDRL3 is SEQ ID NO: 25200.

[0278] In some embodiments, the antibody comprises a light chain variable region (VL) that comprises a light chain complementarity determining region (CDRL)1, CDRL2, and CDRL3 and a heavy chain variable region (VH) that comprises a heavy chain complementarity determining region (CDRH)1, CDRH2, and CDRH3, wherein:
[0279] CDRH1 is SEQ ID NO: 20235,
[0280] CDRH2 is SEQ ID NO: 21192,
[0281] CDRH3 is SEQ ID NO: 22149,
[0282] CDRL1 is SEQ ID NO: 24063,
[0283] CDRL2 is SEQ ID NO: 25020, and
[0284] CDRL3 is SEQ ID NO: 25977.

[0285] In some embodiments, the antibody comprises a light chain variable region (VL) that comprises a light chain complementarity determining region (CDRL)1, CDRL2, and CDRL3 and a heavy chain variable region (VH) that comprises a heavy chain complementarity determining region (CDRH)1, CDRH2, and CDRH3, wherein:
[0286] CDRH1 is SEQ ID NO: 19858,
[0287] CDRH2 is SEQ ID NO: 20815,
[0288] CDRH3 is SEQ ID NO: 21772,
[0289] CDRL1 is SEQ ID NO: 23686,
[0290] CDRL2 is SEQ ID NO: 24643, and
[0291] CDRL3 is SEQ ID NO: 25600.

[0292] In some embodiments, the antibody comprises a light chain variable region (VL) that comprises a light chain complementarity determining region (CDRL)1, CDRL2, and CDRL3 and a heavy chain variable region (VH) that comprises a heavy chain complementarity determining region (CDRH)1, CDRH2, and CDRH3, wherein:
[0293] CDRH1 is SEQ ID NO: 19735,
[0294] CDRH2 is SEQ ID NO: 20692,
[0295] CDRH3 is SEQ ID NO: 21649,
[0296] CDRL1 is SEQ ID NO: 23563,
[0297] CDRL2 is SEQ ID NO: 24520, and
[0298] CDRL3 is SEQ ID NO: 25477.

[0299] In some embodiments, the antibody comprises a light chain variable region (VL) that comprises a light chain complementarity determining region (CDRL)1, CDRL2, and CDRL3 and a heavy chain variable region (VH) that comprises a heavy chain complementarity determining region (CDRH)1, CDRH2, and CDRH3, wherein:
[0300] CDRH1 is SEQ ID NO: 19887,
[0301] CDRH2 is SEQ ID NO: 20844,
[0302] CDRH3 is SEQ ID NO: 21801,
[0303] CDRL1 is SEQ ID NO: 23715,
[0304] CDRL2 is SEQ ID NO: 24672, and
[0305] CDRL3 is SEQ ID NO: 25356.

[0306] In some embodiments, the antibody comprises a light chain variable region (VL) that comprises a light chain complementarity determining region (CDRL)1, CDRL2, and CDRL3 and a heavy chain variable region (VH) that comprises a heavy chain complementarity determining region (CDRH)1, CDRH2, and CDRH3, wherein:
[0307] CDRH1 is SEQ ID NO: 19614,
[0308] CDRH2 is SEQ ID NO: 20571,
[0309] CDRH3 is SEQ ID NO: 21528,
[0310] CDRL1 is SEQ ID NO: 23442,
[0311] CDRL2 is SEQ ID NO: 24399, and
[0312] CDRL3 is SEQ ID NO: 25986.

[0313] In some embodiments, the antibody comprises a light chain variable region (VL) that comprises a light chain complementarity determining region (CDRL)1, CDRL2, and CDRL3 and a heavy chain variable region (VH) that comprises a heavy chain complementarity determining region (CDRH)1, CDRH2, and CDRH3, wherein:
[0314] CDRH1 is SEQ ID NO: 26167,
[0315] CDRH2 is SEQ ID NO: 26180,
[0316] CDRH3 is SEQ ID NO: 26193,
[0317] CDRL1 is SEQ ID NO: 26206,
[0318] CDRL2 is SEQ ID NO: 26219, and
[0319] CDRL3 is SEQ ID NO: 26232.

[0320] In some embodiments, the antibody comprises a light chain variable region (VL) that comprises a light chain complementarity determining region (CDRL)1, CDRL2, and CDRL3 and a heavy chain variable region (VH) that comprises a heavy chain complementarity determining region (CDRH)1, CDRH2, and CDRH3, wherein:
[0321] CDRH1 is SEQ ID NO: 26168,
[0322] CDRH2 is SEQ ID NO: 26181,
[0323] CDRH3 is SEQ ID NO: 26194,
[0324] CDRL1 is SEQ ID NO: 26207,
[0325] CDRL2 is SEQ ID NO: 26220, and
[0326] CDRL3 is SEQ ID NO: 26233.

[0327] In some embodiments, the antibody comprises a light chain variable region (VL) that comprises a light chain complementarity determining region (CDRL)1, CDRL2, and CDRL3 and a heavy chain variable region (VH) that comprises a heavy chain complementarity determining region (CDRH)1, CDRH2, and CDRH3, wherein:
[0328] CDRH1 is SEQ ID NO: 26169,
[0329] CDRH2 is SEQ ID NO: 26182,
[0330] CDRH3 is SEQ ID NO: 26195,
[0331] CDRL1 is SEQ ID NO: 26208,
[0332] CDRL2 is SEQ ID NO: 26221, and
[0333] CDRL3 is SEQ ID NO: 26234.

[0334] In some embodiments, the antibody comprises a light chain variable region (VL) that comprises a light chain complementarity determining region (CDRL)1, CDRL2, and CDRL3 and a heavy chain variable region (VH) that comprises a heavy chain complementarity determining region (CDRH)1, CDRH2, and CDRH3, wherein:
[0335] CDRH1 is SEQ ID NO: 26170,
[0336] CDRH2 is SEQ ID NO: 26183,
[0337] CDRH3 is SEQ ID NO: 26196,
[0338] CDRL1 is SEQ ID NO: 26209,
[0339] CDRL2 is SEQ ID NO: 26222, and
[0340] CDRL3 is SEQ ID NO: 26235.

[0341] In some embodiments, the antibody comprises a light chain variable region (VL) that comprises a light chain complementarity determining region (CDRL)1, CDRL2, and CDRL3 and a heavy chain variable region (VH) that comprises a heavy chain complementarity determining region (CDRH)1, CDRH2, and CDRH3, wherein:
[0342] CDRH1 is SEQ ID NO: 26171,
[0343] CDRH2 is SEQ ID NO: 26184,
[0344] CDRH3 is SEQ ID NO: 26197,
[0345] CDRL1 is SEQ ID NO: 26210,
[0346] CDRL2 is SEQ ID NO: 26223, and
[0347] CDRL3 is SEQ ID NO: 26236.

[0348] In some embodiments, the antibody comprises a light chain variable region (VL) that comprises a light chain complementarity determining region (CDRL)1, CDRL2, and CDRL3 and a heavy chain variable region (VH) that comprises a heavy chain complementarity determining region (CDRH)1, CDRH2, and CDRH3, wherein:
[0349] CDRH1 is SEQ ID NO: 26172,
[0350] CDRH2 is SEQ ID NO: 26185,
[0351] CDRH3 is SEQ ID NO: 26198,
[0352] CDRL1 is SEQ ID NO: 26211,
[0353] CDRL2 is SEQ ID NO: 26224, and
[0354] CDRL3 is SEQ ID NO: 26237.

[0355] In some embodiments, the antibody comprises a light chain variable region (VL) that comprises a light chain complementarity determining region (CDRL)1, CDRL2, and CDRL3 and a heavy chain variable region (VH) that comprises a heavy chain complementarity determining region (CDRH)1, CDRH2, and CDRH3, wherein:
[0356] CDRH1 is SEQ ID NO: 26173,
[0357] CDRH2 is SEQ ID NO: 26186,
[0358] CDRH3 is SEQ ID NO: 26199,
[0359] CDRL1 is SEQ ID NO: 26212,
[0360] CDRL2 is SEQ ID NO: 26225, and
[0361] CDRL3 is SEQ ID NO: 26238.

[0362] In some embodiments, the antibody comprises a light chain variable region (VL) that comprises a light chain complementarity determining region (CDRL)1, CDRL2, and CDRL3 and a heavy chain variable region (VH) that comprises a heavy chain complementarity determining region (CDRH)1, CDRH2, and CDRH3, wherein:
[0363] CDRH1 is SEQ ID NO: 26174,
[0364] CDRH2 is SEQ ID NO: 26187,
[0365] CDRH3 is SEQ ID NO: 26200,
[0366] CDRL1 is SEQ ID NO: 26213,
[0367] CDRL2 is SEQ ID NO: 26226, and
[0368] CDRL3 is SEQ ID NO: 26239.

[0369] In some embodiments, the antibody comprises a light chain variable region (VL) that comprises a light chain complementarity determining region (CDRL)1, CDRL2, and CDRL3 and a heavy chain variable region (VH) that comprises a heavy chain complementarity determining region (CDRH)1, CDRH2, and CDRH3, wherein:
[0370] CDRH1 is SEQ ID NO: 26175,
[0371] CDRH2 is SEQ ID NO: 26188,
[0372] CDRH3 is SEQ ID NO: 26201,
[0373] CDRL1 is SEQ ID NO: 26214,
[0374] CDRL2 is SEQ ID NO: 26227, and
[0375] CDRL3 is SEQ ID NO: 26240.

[0376] In some embodiments, the antibody comprises a light chain variable region (VL) that comprises a light chain complementarity determining region (CDRL)1, CDRL2, and CDRL3 and a heavy chain variable region (VH) that comprises a heavy chain complementarity determining region (CDRH)1, CDRH2, and CDRH3, wherein:
[0377] CDRH1 is SEQ ID NO: 26176,
[0378] CDRH2 is SEQ ID NO: 26189,
[0379] CDRH3 is SEQ ID NO: 26202,
[0380] CDRL1 is SEQ ID NO: 26215,
[0381] CDRL2 is SEQ ID NO: 26228, and
[0382] CDRL3 is SEQ ID NO: 26241.

[0383] In some embodiments, the antibody comprises a light chain variable region (VL) that comprises a light chain complementarity determining region (CDRL)1, CDRL2, and CDRL3 and a heavy chain variable region (VH) that comprises a heavy chain complementarity determining region (CDRH)1, CDRH2, and CDRH3, wherein:
[0384] CDRH1 is SEQ ID NO: 26177,
[0385] CDRH2 is SEQ ID NO: 26190,
[0386] CDRH3 is SEQ ID NO: 26203,
[0387] CDRL1 is SEQ ID NO: 26216,
[0388] CDRL2 is SEQ ID NO: 26229, and
[0389] CDRL3 is SEQ ID NO: 26242.

[0390] In some embodiments, the antibody comprises a light chain variable region (VL) that comprises a light chain complementarity determining region (CDRL)1, CDRL2, and CDRL3 and a heavy chain variable region (VH) that comprises a heavy chain complementarity determining region (CDRH)1, CDRH2, and CDRH3, wherein:
[0391] CDRH1 is SEQ ID NO: 26178,
[0392] CDRH2 is SEQ ID NO: 26191,
[0393] CDRH3 is SEQ ID NO: 26204,
[0394] CDRL1 is SEQ ID NO: 26217,
[0395] CDRL2 is SEQ ID NO: 26230, and
[0396] CDRL3 is SEQ ID NO: 26243.

[0397] In some embodiments, the antibody comprises a light chain variable region (VL) that comprises a light chain complementarity determining region (CDRL)1, CDRL2, and CDRL3 and a heavy chain variable region (VH) that comprises a heavy chain complementarity determining region (CDRH)1, CDRH2, and CDRH3, wherein:
[0398] CDRH1 is SEQ ID NO: 26179,
[0399] CDRH2 is SEQ ID NO: 26192,
[0400] CDRH3 is SEQ ID NO: 26205,
[0401] CDRL1 is SEQ ID NO: 26218,
[0402] CDRL2 is SEQ ID NO: 26231, and
[0403] CDRL3 is SEQ ID NO: 26244.

[0404] In some embodiments, the recombinant antibody or antigen binding fragment thereof of any preceding aspect comprises a VH comprising an amino acid sequence selected from SEQ ID NOs: 1657-2484, 9939-10767, 18485-19441, and 26141-26153.

[0405] In some embodiments, the recombinant antibody or antigen binding fragment thereof of any preceding aspect comprises a VL comprising an amino acid sequence selected from SEQ ID NOs: 2485-3312, 10768-11596, 22313-23269, and 26154-26166.

### Methods

[0406] Disclosed herein are methods for preventing, treating, inhibiting, reducing, or detecting coronavirus infection.

[0407] In some aspects, disclosed herein is a method of producing a recombinant antibody comprising cultivating or maintaining the host cell of any preceding aspect under conditions to produce a recombinant antibody as described herein.

[0408] In some aspects, disclosed herein is a method of treating, preventing, reducing, and/or inhibiting coronavirus infection, comprising administering to a subject a therapeutically effective amount of a recombinant antibody, wherein the recombinant antibody comprises a light chain variable region (VL) that comprises a light chain complementarity determining region (CDRL)1,
[0409] CDRL2, and CDRL3 and a heavy chain variable region (VH) that comprises a heavy chain complementarity determining region (CDRH)1, CDRH2, and CDRH3, wherein CDRH3 comprises an amino acid sequence at least 60% (for example, at least 60%, at least 65%, at least 70%, at least 75%, at least 80%, at least 85%, at least 90%, at least 95%, at least 96%, at least 97%, at least 98%, at least 99%) identical to SEQ ID NOs: 4969-5796, 13255-14083, 21356-22312, 26193-26205, 26263-26275, or 26289-26318; and
[0410] CDRL3 comprises an amino acid sequence at least 60% (for example, at least 60%, at least 65%, at least 70%, at least 75%, at least 80%, at least 85%, at least 90%, at least 95%, at least 96%, at least 97%, at least 98%, at least 99%) identical to SEQ ID NOs: 7453-8280, 15742-16570, 25184-26140, 26232-26244, 26276-26288, or 26319-26348.

[0411] In some aspects, disclosed herein is a method of treating, preventing, reducing, and/or inhibiting coronavirus infection, comprising administering to a subject a therapeutically effective amount of a recombinant antibody, wherein the recombinant antibody comprises a light chain variable region (VL) that comprises a light chain complementarity determining region (CDRL)1, CDRL2, and CDRL3 or a heavy chain variable region (VH) that comprises a heavy chain complementarity determining region (CDRH)1, CDRH2, and CDRH3, wherein
[0412] CDRH3 comprises an amino acid sequence at least 60% (for example, at least 60%, at least 65%, at least 70%, at least 75%, at least 80%, at least 85%, at least 90%, at least 95%, at least 96%, at least 97%, at least 98%, at least 99%) identical to SEQ ID NOs: 4969-5796, 13255-14083, 21356-22312, 26193-26205, 26263-26275, or 26289-26318 or; and
[0413] CDRL3 comprises an amino acid sequence at least 60% (for example, at least 60%, at least 65%, at least 70%, at least 75%, at least 80%, at least 85%, at least 90%, at least 95%, at least 96%, at least 97%, at least 98%, at least 99%) identical to SEQ ID NOs: 7453-8280, 15742-16570, 25184-26140, 26232-26244, 26276-26288, or 26319-26348.

[0414] In some embodiments, the CDRH3 comprises at least one amino acid substitution when compared to SEQ ID NOs: SEQ ID NOs: 4969-5796, 13255-14083, 21356-22312, 26193-26205, 26263-26275, or 26289-26318 or. In some embodiments, the CDRL3 comprises at least one amino acid substitution when compared to SEQ ID NOs: 7453-8280, 15742-16570, 25184-26140, 26232-26244, 26276-26288, or 26319-26348 or.

[0415] In some embodiments, the CDRH1 comprises an amino acid sequence at least 60% (for example, at least 60%, at least 65%, at least 70%, at least 75%, at least 80%, at least 85%, at least 90%, at least 95%, at least 96%, at least 97%, at least 98%, at least 99%) identical to SEQ ID NOs: 3313-4140, 11597-12425, 19442-20398, or 26167-26179; and CDRL1 comprises an amino acid sequence at least 60% (for example, at least 60%, at least 65%, at least 70%, at least 75%, at least 80%, at least 85%, at least 90%, at least 95%, at least 96%, at least 97%, at least 98%, at least 99%) identical to SEQ ID NOs: 5797-6624, 14084-14912, 23270-24226, or 26206-26218.

[0416] In some embodiments, the CDRH1 comprises at least one amino acid substitution when compared to SEQ ID NOs: 3313-4140, 11597-12425, 19442-20398, or 26167-26179. In some embodiments, the CDRH1 comprises at least 1, 2, 3, 4, 5, or 6 substitutions when compared to SEQ ID NOs: 3313-4140, 11597-12425, 19442-20398, or 26167-26179.

[0417] In some embodiments, the CDRL1 comprises at least one amino acid substitution when compared to SEQ ID NOs: 5797-6624, 14084-14912, 23270-24226, or 26206-26218. In some embodiments, the CDRL1 comprises at least 1, 2, 3, 4, 5, or 6 substitutions when compared to SEQ ID NOs: 5797-6624, 14084-14912, 23270-24226, or 26206-26218.

[0418] In some embodiments, the CDRH2 comprises an amino acid sequence at least 60% (for example, at least 60%, at least 65%, at least 70%, at least 75%, at least 80%, at least 85%, at least 90%, at least 95%, at least 96%, at least 97%, at least 98%, at least 99%) identical to SEQ ID NOs: 4141-4968, 12426-13254, 20399-21355, or 26180-26192; and CDRL2 comprises an amino acid sequence at least 60% (for example, at least 60%, at least 65%, at least 70%, at least 75%, at least 80%, at least 85%, at least 90%, at least 95%, at least 96%, at least 97%, at least 98%, at least 99%) identical to SEQ ID NOs: 6625-7452, 14913-15741, 24227-25183, or 26219-26231.

[0419] In some embodiments, the CDRH2 comprises at least one amino acid substitution when compared to SEQ ID NOs: 4141-4968, 12426-13254, 20399-21355, or 26180-26192. In some embodiments, the CDRH2 comprises at least 1, 2, 3, 4, 5, or 6 substitutions when compared to SEQ ID NOs: 4141-4968, 12426-13254, 20399-21355, or 26180-26192.

[0420] In some embodiments, the CDRL2 comprises at least one amino acid substitution when compared to SEQ ID NOs: 6625-7452, 14913-15741, 24227-25183, or 26219-26231. In some embodiments, the CDRL2 comprises at least 1, 2, 3, 4, 5, or 6 substitutions when compared to SEQ ID NOs: 6625-7452, 14913-15741, 24227-25183, or 26219-26231.

[0421] In some embodiments, VH comprises an amino acid sequence at least 60% (for example, at least 60%, at least 65%, at least 70%, at least 75%, at least 80%, at least 85%, at least 90%, at least 95%, at least 96%, at least 97%, at least 98%, at least 99%) identical to SEQ ID NOs: 1657-2484,9939-10767, 18485-19441, or 26141-26153. In some embodiments, VH comprises an amino acid sequence selected from the group consisting of SEQ ID NOs: 1657-2484, 9939-10767, 18485-19441, and 26141-26153.

[0422] In some embodiments, VL comprises an amino acid sequence at least 60% (for example, at least 60%, at least 65%, at least 70%, at least 75%, at least 80%, at least 85%, at least 90%, at least 95%, at least 96%, at least 97%, at least 98%, at least 99%) identical to SEQ ID NOs: 2485-3312, 10768-11596, 22313-23269, or 26154-26166. In some embodiments, VL comprises an amino acid sequence selected from the group consisting of SEQ ID NOs: 2485-3312, 10768-11596, 22313-23269, and 26154-26166.

[0423] In some embodiments, a CDR sequence (for example CDRL1, CDRL2, CDRL3, CDRH1, CDRH2, or CDRH3) comprises one amino acid mutation, two amino acid mutations, three amino acid mutations, four amino acid mutations, five amino acid mutations, etc. when compared to a CDR sequence as disclosed herein.

[0424] In some embodiments, the recombinant antibody is a monoclonal antibody. In some embodiments, the recombinant antibody is an isolated antibody. In some embodiments, the recombinant antibody is an antibody or antigen binding fragment thereof. In some embodiments, combinations of antibodies or antigen binding fragments thereof disclosed herein are used for treating coronavirus infection.

[0425] In some embodiments, combinations of antibodies or antigen binding fragments thereof disclosed herein are used for treating SARS-CoV-2 infection.

[0426] In some embodiments, the antibody comprises a light chain variable region (VL) that comprises a light chain complementarity determining region (CDRL)1, CDRL2, and CDRL3 and a heavy chain variable region (VH) that comprises a heavy chain complementarity determining region (CDRH)1, CDRH2, and CDRH3, wherein:
[0427] CDRH1 is SEQ ID NO: 4056,
[0428] CDRH2 is SEQ ID NO: 4884,
[0429] CDRH3 is SEQ ID NO: 5712,
[0430] CDRL1 is SEQ ID NO: 6540,
[0431] CDRL2 is SEQ ID NO: 7368, and
[0432] CDRL3 is SEQ ID NO: 8196.

[0433] In some embodiments, the antibody comprises a light chain variable region (VL) that comprises a light chain complementarity determining region (CDRL)1, CDRL2, and CDRL3 and a heavy chain variable region (VH) that comprises a heavy chain complementarity determining region (CDRH)1, CDRH2, and CDRH3, wherein:
[0434] CDRH1 is SEQ ID NO: 3791,
[0435] CDRH2 is SEQ ID NO: 4619,
[0436] CDRH3 is SEQ ID NO: 5447,
[0437] CDRL1 is SEQ ID NO: 6275,
[0438] CDRL2 is SEQ ID NO: 7103, and
[0439] CDRL3 is SEQ ID NO: 7931.

[0440] In some embodiments, the antibody comprises a light chain variable region (VL) that comprises a light chain complementarity determining region (CDRL)1, CDRL2, and CDRL3 and a heavy chain variable region (VH) that comprises a heavy chain complementarity determining region (CDRH)1, CDRH2, and CDRH3, wherein:
[0441] CDRH1 is SEQ ID NO: 3858,
[0442] CDRH2 is SEQ ID NO: 4686,
[0443] CDRH3 is SEQ ID NO: 5514,
[0444] CDRL1 is SEQ ID NO: 6342,
[0445] CDRL2 is SEQ ID NO: 7170, and
[0446] CDRL3 is SEQ ID NO: 7998.

[0447] In some embodiments, the antibody comprises a light chain variable region (VL) that comprises a light chain complementarity determining region (CDRL)1, CDRL2, and CDRL3 and a heavy chain variable region (VH) that comprises a heavy chain complementarity determining region (CDRH)1, CDRH2, and CDRH3, wherein:
[0448] CDRH1 is SEQ ID NO: 3680,
[0449] CDRH2 is SEQ ID NO: 4508,
[0450] CDRH3 is SEQ ID NO: 5336,
[0451] CDRL1 is SEQ ID NO: 6164,
[0452] CDRL2 is SEQ ID NO: 6992, and
[0453] CDRL3 is SEQ ID NO: 7820.

[0454] In some embodiments, the antibody comprises a light chain variable region (VL) that comprises a light chain complementarity determining region (CDRL)1, CDRL2, and CDRL3 and a heavy chain variable region (VH) that comprises a heavy chain complementarity determining region (CDRH)1, CDRH2, and CDRH3, wherein:
[0455] CDRH1 is SEQ ID NO: 3856,
[0456] CDRH2 is SEQ ID NO: 4684,
[0457] CDRH3 is SEQ ID NO: 5512,
[0458] CDRL1 is SEQ ID NO: 6340,
[0459] CDRL2 is SEQ ID NO: 7168, and
[0460] CDRL3 is SEQ ID NO: 7996.

[0461] In some embodiments, the antibody comprises a light chain variable region (VL) that comprises a light chain complementarity determining region (CDRL)1, CDRL2, and CDRL3 and a heavy chain variable region (VH) that comprises a heavy chain complementarity determining region (CDRH)1, CDRH2, and CDRH3, wherein:
[0462] CDRH1 is SEQ ID NO: 3355,
[0463] CDRH2 is SEQ ID NO: 4183,
[0464] CDRH3 is SEQ ID NO: 5011,
[0465] CDRL1 is SEQ ID NO: 5839,
[0466] CDRL2 is SEQ ID NO: 6667, and
[0467] CDRL3 is SEQ ID NO: 7495.

[0468] In some embodiments, the antibody comprises a light chain variable region (VL) that comprises a light chain complementarity determining region (CDRL)1, CDRL2, and CDRL3 and a heavy chain variable region (VH) that comprises a heavy chain complementarity determining region (CDRH)1, CDRH2, and CDRH3, wherein:
[0469] CDRH1 is SEQ ID NO: 3697,
[0470] CDRH2 is SEQ ID NO: 4525,
[0471] CDRH3 is SEQ ID NO: 5353,
[0472] CDRL1 is SEQ ID NO: 6181,
[0473] CDRL2 is SEQ ID NO: 7009, and
[0474] CDRL3 is SEQ ID NO: 7837.

[0475] In some embodiments, the antibody comprises a light chain variable region (VL) that comprises a light chain complementarity determining region (CDRL)1, CDRL2, and CDRL3 and a heavy chain variable region (VH) that comprises a heavy chain complementarity determining region (CDRH)1, CDRH2, and CDRH3, wherein:
[0476] CDRH1 is SEQ ID NO: 3481,
[0477] CDRH2 is SEQ ID NO: 4309,
[0478] CDRH3 is SEQ ID NO: 5137,
[0479] CDRL1 is SEQ ID NO: 5965,
[0480] CDRL2 is SEQ ID NO: 6793, and
[0481] CDRL3 is SEQ ID NO: 7621.

[0482] In some embodiments, the antibody comprises a light chain variable region (VL) that comprises a light chain complementarity determining region (CDRL)1, CDRL2, and CDRL3 and a heavy chain variable region (VH) that comprises a heavy chain complementarity determining region (CDRH)1, CDRH2, and CDRH3, wherein:
[0483] CDRH1 is SEQ ID NO: 3896,
[0484] CDRH2 is SEQ ID NO: 4724,
[0485] CDRH3 is SEQ ID NO: 5552,
[0486] CDRL1 is SEQ ID NO: 6380,
[0487] CDRL2 is SEQ ID NO: 7208, and
[0488] CDRL3 is SEQ ID NO: 8036.

[0489] In some embodiments, the antibody comprises a light chain variable region (VL) that comprises a light chain complementarity determining region (CDRL)1, CDRL2, and CDRL3 and a heavy chain variable region (VH) that comprises a heavy chain complementarity determining region (CDRH)1, CDRH2, and CDRH3, wherein:
[0490] CDRH1 is SEQ ID NO: 3667,
[0491] CDRH2 is SEQ ID NO: 4495,
[0492] CDRH3 is SEQ ID NO: 5323,
[0493] CDRL1 is SEQ ID NO: 6151,
[0494] CDRL2 is SEQ ID NO: 6979, and
[0495] CDRL3 is SEQ ID NO: 7807.

[0496] In some embodiments, the antibody comprises a light chain variable region (VL) that comprises a light chain complementarity determining region (CDRL)1, CDRL2, and CDRL3 and a heavy chain variable region (VH) that comprises a heavy chain complementarity determining region (CDRH)1, CDRH2, and CDRH3, wherein:
[0497] CDRH1 is SEQ ID NO: 12368,
[0498] CDRH2 is SEQ ID NO: 13197,
[0499] CDRH3 is SEQ ID NO: 14026,
[0500] CDRL1 is SEQ ID NO: 14855,
[0501] CDRL2 is SEQ ID NO: 15684, and
[0502] CDRL3 is SEQ ID NO: 16513.

[0503] In some embodiments, the antibody comprises a light chain variable region (VL) that comprises a light chain complementarity determining region (CDRL)1, CDRL2, and CDRL3 and a heavy chain variable region (VH) that comprises a heavy chain complementarity determining region (CDRH)1, CDRH2, and CDRH3, wherein:
[0504] CDRH1 is SEQ ID NO: 11621,
[0505] CDRH2 is SEQ ID NO: 12450,
[0506] CDRH3 is SEQ ID NO: 13279,
[0507] CDRL1 is SEQ ID NO: 14108,
[0508] CDRL2 is SEQ ID NO: 14937, and
[0509] CDRL3 is SEQ ID NO: 15766.

[0510] In some embodiments, the antibody comprises a light chain variable region (VL) that comprises a light chain complementarity determining region (CDRL)1, CDRL2, and CDRL3 and a heavy chain variable region (VH) that comprises a heavy chain complementarity determining region (CDRH)1, CDRH2, and CDRH3, wherein:
[0511] CDRH1 is SEQ ID NO: 11742,
[0512] CDRH2 is SEQ ID NO: 12571,
[0513] CDRH3 is SEQ ID NO: 13400,
[0514] CDRL1 is SEQ ID NO: 14229,
[0515] CDRL2 is SEQ ID NO: 15058, and
[0516] CDRL3 is SEQ ID NO: 15887.

[0517] In some embodiments, the antibody comprises a light chain variable region (VL) that comprises a light chain complementarity determining region (CDRL)1, CDRL2, and CDRL3 and a heavy chain variable region (VH) that comprises a heavy chain complementarity determining region (CDRH)1, CDRH2, and CDRH3, wherein:
[0518] CDRH1 is SEQ ID NO: 11598,
[0519] CDRH2 is SEQ ID NO: 12427,
[0520] CDRH3 is SEQ ID NO: 13256,
[0521] CDRL1 is SEQ ID NO: 14085,
[0522] CDRL2 is SEQ ID NO: 14914, and
[0523] CDRL3 is SEQ ID NO: 15743.

[0524] In some embodiments, the antibody comprises a light chain variable region (VL) that comprises a light chain complementarity determining region (CDRL)1, CDRL2, and CDRL3 and a heavy chain variable region (VH) that comprises a heavy chain complementarity determining region (CDRH)1, CDRH2, and CDRH3, wherein:
[0525] CDRH1 is SEQ ID NO: 12262,
[0526] CDRH2 is SEQ ID NO: 13091,
[0527] CDRH3 is SEQ ID NO: 13920,
[0528] CDRL1 is SEQ ID NO: 14749,
[0529] CDRL2 is SEQ ID NO: 15578, and
[0530] CDRL3 is SEQ ID NO: 16407.

[0531] In some embodiments, the antibody comprises a light chain variable region (VL) that comprises a light chain complementarity determining region (CDRL)1, CDRL2, and CDRL3 and a heavy chain variable region (VH) that comprises a heavy chain complementarity determining region (CDRH)1, CDRH2, and CDRH3, wherein:
[0532] CDRH1 is SEQ ID NO: 11995,
[0533] CDRH2 is SEQ ID NO: 12824,
[0534] CDRH3 is SEQ ID NO: 13653,
[0535] CDRL1 is SEQ ID NO: 14482,
[0536] CDRL2 is SEQ ID NO: 15311, and
[0537] CDRL3 is SEQ ID NO: 16140.

[0538] In some embodiments, the antibody comprises a light chain variable region (VL) that comprises a light chain complementarity determining region (CDRL)1, CDRL2, and CDRL3 and a heavy chain variable region (VH) that comprises a heavy chain complementarity determining region (CDRH)1, CDRH2, and CDRH3, wherein:
[0539] CDRH1 is SEQ ID NO: 12164,
[0540] CDRH2 is SEQ ID NO: 12993,
[0541] CDRH3 is SEQ ID NO: 13822,
[0542] CDRL1 is SEQ ID NO: 14651,
[0543] CDRL2 is SEQ ID NO: 15480, and
[0544] CDRL3 is SEQ ID NO: 16309.

[0545] In some embodiments, the antibody comprises a light chain variable region (VL) that comprises a light chain complementarity determining region (CDRL)1, CDRL2, and CDRL3 and a heavy chain variable region (VH) that comprises a heavy chain complementarity determining region (CDRH)1, CDRH2, and CDRH3, wherein:
[0546] CDRH1 is SEQ ID NO: 11752,
[0547] CDRH2 is SEQ ID NO: 12581,
[0548] CDRH3 is SEQ ID NO: 13410,
[0549] CDRL1 is SEQ ID NO: 14239,
[0550] CDRL2 is SEQ ID NO: 15068, and
[0551] CDRL3 is SEQ ID NO: 15897.

[0552] In some embodiments, the antibody comprises a light chain variable region (VL) that comprises a light chain complementarity determining region (CDRL)1, CDRL2, and CDRL3 and a heavy chain variable region (VH) that comprises a heavy chain complementarity determining region (CDRH)1, CDRH2, and CDRH3, wherein:
[0553] CDRH1 is SEQ ID NO: 11888,
[0554] CDRH2 is SEQ ID NO: 12717,
[0555] CDRH3 is SEQ ID NO: 13546,
[0556] CDRL1 is SEQ ID NO: 14375,
[0557] CDRL2 is SEQ ID NO: 15204, and
[0558] CDRL3 is SEQ ID NO: 16033.

[0559] In some embodiments, the antibody comprises a light chain variable region (VL) that comprises a light chain complementarity determining region (CDRL)1, CDRL2, and CDRL3 and a heavy chain variable region (VH) that comprises a heavy chain complementarity determining region (CDRH)1, CDRH2, and CDRH3, wherein:
[0560] CDRH1 is SEQ ID NO: 20173,
[0561] CDRH2 is SEQ ID NO: 21130,
[0562] CDRH3 is SEQ ID NO: 22087,
[0563] CDRL1 is SEQ ID NO: 24001,
[0564] CDRL2 is SEQ ID NO: 24958, and
[0565] CDRL3 is SEQ ID NO: 25915.

[0566] In some embodiments, the antibody comprises a light chain variable region (VL) that comprises a light chain complementarity determining region (CDRL)1, CDRL2, and CDRL3 and a heavy chain variable region (VH) that comprises a heavy chain complementarity determining region (CDRH)1, CDRH2, and CDRH3, wherein:
[0567] CDRH1 is SEQ ID NO: 20065,
[0568] CDRH2 is SEQ ID NO: 21022,
[0569] CDRH3 is SEQ ID NO: 21979,
[0570] CDRL1 is SEQ ID NO: 23893,
[0571] CDRL2 is SEQ ID NO: 24850, and
[0572] CDRL3 is SEQ ID NO: 25807.

[0573] In some embodiments, the antibody comprises a light chain variable region (VL) that comprises a light chain complementarity determining region (CDRL)1, CDRL2, and CDRL3 and a heavy chain variable region (VH) that comprises a heavy chain complementarity determining region (CDRH)1, CDRH2, and CDRH3, wherein:
[0574] CDRH1 is SEQ ID NO: 20115,
[0575] CDRH2 is SEQ ID NO: 21072,
[0576] CDRH3 is SEQ ID NO: 22029,
[0577] CDRL1 is SEQ ID NO: 23943,
[0578] CDRL2 is SEQ ID NO: 24900, and
[0579] CDRL3 is SEQ ID NO: 25857.

[0580] In some embodiments, the antibody comprises a light chain variable region (VL) that comprises a light chain complementarity determining region (CDRL)1, CDRL2, and CDRL3 and a heavy chain variable region (VH) that comprises a heavy chain complementarity determining region (CDRH)1, CDRH2, and CDRH3, wherein:
[0581] CDRH1 is SEQ ID NO: 19873,
[0582] CDRH2 is SEQ ID NO: 20830,
[0583] CDRH3 is SEQ ID NO: 21787,
[0584] CDRL1 is SEQ ID NO: 23701,
[0585] CDRL2 is SEQ ID NO: 24658, and
[0586] CDRL3 is SEQ ID NO: 25615.

[0587] In some embodiments, the antibody comprises a light chain variable region (VL) that comprises a light chain complementarity determining region (CDRL)1, CDRL2, and CDRL3 and a heavy chain variable region (VH) that comprises a heavy chain complementarity determining region (CDRH)1, CDRH2, and CDRH3, wherein:
[0588] CDRH1 is SEQ ID NO: 19923,
[0589] CDRH2 is SEQ ID NO: 20880,
[0590] CDRH3 is SEQ ID NO: 21837,
[0591] CDRL1 is SEQ ID NO: 23751,
[0592] CDRL2 is SEQ ID NO: 24708, and
[0593] CDRL3 is SEQ ID NO: 25665.

[0594] In some embodiments, the antibody comprises a light chain variable region (VL) that comprises a light chain complementarity determining region (CDRL)1, CDRL2, and CDRL3 and a heavy chain variable region (VH) that comprises a heavy chain complementarity determining region (CDRH)1, CDRH2, and CDRH3, wherein:
[0595] CDRH1 is SEQ ID NO: 19458,
[0596] CDRH2 is SEQ ID NO: 20415,
[0597] CDRH3 is SEQ ID NO: 21372,
[0598] CDRL1 is SEQ ID NO: 23286,
[0599] CDRL2 is SEQ ID NO: 24243, and
[0600] CDRL3 is SEQ ID NO: 25200.

[0601] In some embodiments, the antibody comprises a light chain variable region (VL) that comprises a light chain complementarity determining region (CDRL)1, CDRL2, and CDRL3 and a heavy chain variable region (VH) that comprises a heavy chain complementarity determining region (CDRH)1, CDRH2, and CDRH3, wherein:
[0602] CDRH1 is SEQ ID NO: 20235,
[0603] CDRH2 is SEQ ID NO: 21192,
[0604] CDRH3 is SEQ ID NO: 22149,
[0605] CDRL1 is SEQ ID NO: 24063,
[0606] CDRL2 is SEQ ID NO: 25020, and
[0607] CDRL3 is SEQ ID NO: 25977.

[0608] In some embodiments, the antibody comprises a light chain variable region (VL) that comprises a light chain complementarity determining region (CDRL)1, CDRL2, and CDRL3 and a heavy chain variable region (VH) that comprises a heavy chain complementarity determining region (CDRH)1, CDRH2, and CDRH3, wherein:
[0609] CDRH1 is SEQ ID NO: 19858,
[0610] CDRH2 is SEQ ID NO: 20815,
[0611] CDRH3 is SEQ ID NO: 21772,
[0612] CDRL1 is SEQ ID NO: 23686,
[0613] CDRL2 is SEQ ID NO: 24643, and
[0614] CDRL3 is SEQ ID NO: 25600.

[0615] In some embodiments, the antibody comprises a light chain variable region (VL) that comprises a light chain complementarity determining region (CDRL)1, CDRL2, and CDRL3 and a heavy chain variable region (VH) that comprises a heavy chain complementarity determining region (CDRH)1, CDRH2, and CDRH3, wherein:
[0616] CDRH1 is SEQ ID NO: 19735,
[0617] CDRH2 is SEQ ID NO: 20692,
[0618] CDRH3 is SEQ ID NO: 21649,
[0619] CDRL1 is SEQ ID NO: 23563,
[0620] CDRL2 is SEQ ID NO: 24520, and
[0621] CDRL3 is SEQ ID NO: 25477.

[0622] In some embodiments, the antibody comprises a light chain variable region (VL) that comprises a light chain complementarity determining region (CDRL)1, CDRL2, and CDRL3 and a heavy chain variable region (VH) that comprises a heavy chain complementarity determining region (CDRH)1, CDRH2, and CDRH3, wherein:
[0623] CDRH1 is SEQ ID NO: 19887,
[0624] CDRH2 is SEQ ID NO: 20844,
[0625] CDRH3 is SEQ ID NO: 21801,
[0626] CDRL1 is SEQ ID NO: 23715,
[0627] CDRL2 is SEQ ID NO: 24672, and
[0628] CDRL3 is SEQ ID NO: 25356.

[0629] In some embodiments, the antibody comprises a light chain variable region (VL) that comprises a light chain complementarity determining region (CDRL)1, CDRL2, and CDRL3 and a heavy chain variable region (VH) that comprises a heavy chain complementarity determining region (CDRH)1, CDRH2, and CDRH3, wherein:
[0630] CDRH1 is SEQ ID NO: 19614,
[0631] CDRH2 is SEQ ID NO: 20571,
[0632] CDRH3 is SEQ ID NO: 21528,
[0633] CDRL1 is SEQ ID NO: 23442,
[0634] CDRL2 is SEQ ID NO: 24399, and
[0635] CDRL3 is SEQ ID NO: 25986.

[0636] In some embodiments, the antibody comprises a light chain variable region (VL) that comprises a light chain complementarity determining region (CDRL)1, CDRL2, and CDRL3 and a heavy chain variable region (VH) that comprises a heavy chain complementarity determining region (CDRH)1, CDRH2, and CDRH3, wherein:
[0637] CDRH1 is SEQ ID NO: 26167,
[0638] CDRH2 is SEQ ID NO: 26180,
[0639] CDRH3 is SEQ ID NO: 26193,
[0640] CDRL1 is SEQ ID NO: 26206,
[0641] CDRL2 is SEQ ID NO: 26219, and
[0642] CDRL3 is SEQ ID NO: 26232.

[0643] In some embodiments, the antibody comprises a light chain variable region (VL) that comprises a light chain complementarity determining region (CDRL)1, CDRL2, and CDRL3 and a heavy chain variable region (VH) that comprises a heavy chain complementarity determining region (CDRH)1, CDRH2, and CDRH3, wherein:
[0644] CDRH1 is SEQ ID NO: 26168,
[0645] CDRH2 is SEQ ID NO: 26181,
[0646] CDRH3 is SEQ ID NO: 26194,
[0647] CDRL1 is SEQ ID NO: 26207,
[0648] CDRL2 is SEQ ID NO: 26220, and
[0649] CDRL3 is SEQ ID NO: 26233.

[0650] In some embodiments, the antibody comprises a light chain variable region (VL) that comprises a light chain complementarity determining region (CDRL)1, CDRL2, and CDRL3 and a heavy chain variable region (VH) that comprises a heavy chain complementarity determining region (CDRH)1, CDRH2, and CDRH3, wherein:
[0651] CDRH1 is SEQ ID NO: 26169,
[0652] CDRH2 is SEQ ID NO: 26182,
[0653] CDRH3 is SEQ ID NO: 26195,
[0654] CDRL1 is SEQ ID NO: 26208,
[0655] CDRL2 is SEQ ID NO: 26221, and
[0656] CDRL3 is SEQ ID NO: 26234.

[0657] In some embodiments, the antibody comprises a light chain variable region (VL) that comprises a light chain complementarity determining region (CDRL)1, CDRL2, and CDRL3 and a heavy chain variable region (VH) that comprises a heavy chain complementarity determining region (CDRH)1, CDRH2, and CDRH3, wherein:
[0658] CDRH1 is SEQ ID NO: 26170,
[0659] CDRH2 is SEQ ID NO: 26183,
[0660] CDRH3 is SEQ ID NO: 26196,
[0661] CDRL1 is SEQ ID NO: 26209,
[0662] CDRL2 is SEQ ID NO: 26222, and
[0663] CDRL3 is SEQ ID NO: 26235.

[0664] In some embodiments, the antibody comprises a light chain variable region (VL) that comprises a light chain complementarity determining region (CDRL)1, CDRL2, and CDRL3 and a heavy chain variable region (VH) that comprises a heavy chain complementarity determining region (CDRH)1, CDRH2, and CDRH3, wherein:
[0665] CDRH1 is SEQ ID NO: 26171,
[0666] CDRH2 is SEQ ID NO: 26184,
[0667] CDRH3 is SEQ ID NO: 26197,
[0668] CDRL1 is SEQ ID NO: 26210,
[0669] CDRL2 is SEQ ID NO: 26223, and
[0670] CDRL3 is SEQ ID NO: 26236.

[0671] In some embodiments, the antibody comprises a light chain variable region (VL) that comprises a light chain complementarity determining region (CDRL)1, CDRL2, and CDRL3 and a heavy chain variable region (VH) that comprises a heavy chain complementarity determining region (CDRH)1, CDRH2, and CDRH3, wherein:
[0672] CDRH1 is SEQ ID NO: 26172,
[0673] CDRH2 is SEQ ID NO: 26185,
[0674] CDRH3 is SEQ ID NO: 26198,
[0675] CDRL1 is SEQ ID NO: 26211,
[0676] CDRL2 is SEQ ID NO: 26224, and
[0677] CDRL3 is SEQ ID NO: 26237.

[0678] In some embodiments, the antibody comprises a light chain variable region (VL) that comprises a light chain complementarity determining region (CDRL)1, CDRL2, and CDRL3 and a heavy chain variable region (VH) that comprises a heavy chain complementarity determining region (CDRH)1, CDRH2, and CDRH3, wherein:
[0679] CDRH1 is SEQ ID NO: 26173,
[0680] CDRH2 is SEQ ID NO: 26186,
[0681] CDRH3 is SEQ ID NO: 26199,
[0682] CDRL1 is SEQ ID NO: 26212,
[0683] CDRL2 is SEQ ID NO: 26225, and
[0684] CDRL3 is SEQ ID NO: 26238.

[0685] In some embodiments, the antibody comprises a light chain variable region (VL) that comprises a light chain complementarity determining region (CDRL)1, CDRL2, and CDRL3 and a heavy chain variable region (VH) that comprises a heavy chain complementarity determining region (CDRH)1, CDRH2, and CDRH3, wherein:
[0686] CDRH1 is SEQ ID NO: 26174,
[0687] CDRH2 is SEQ ID NO: 26187,
[0688] CDRH3 is SEQ ID NO: 26200,
[0689] CDRL1 is SEQ ID NO: 26213,
[0690] CDRL2 is SEQ ID NO: 26226, and
[0691] CDRL3 is SEQ ID NO: 26239.

[0692] In some embodiments, the antibody comprises a light chain variable region (VL) that comprises a light chain complementarity determining region (CDRL)1, CDRL2, and CDRL3 and a heavy chain variable region (VH) that comprises a heavy chain complementarity determining region (CDRH)1, CDRH2, and CDRH3, wherein:
[0693] CDRH1 is SEQ ID NO: 26175,
[0694] CDRH2 is SEQ ID NO: 26188,
[0695] CDRH3 is SEQ ID NO: 26201,
[0696] CDRL1 is SEQ ID NO: 26214,
[0697] CDRL2 is SEQ ID NO: 26227, and
[0698] CDRL3 is SEQ ID NO: 26240.

[0699] In some embodiments, the antibody comprises a light chain variable region (VL) that comprises a light chain complementarity determining region (CDRL)1, CDRL2, and CDRL3 and a heavy chain variable region (VH) that comprises a heavy chain complementarity determining region (CDRH)1, CDRH2, and CDRH3, wherein:
[0700] CDRH1 is SEQ ID NO: 26176,
[0701] CDRH2 is SEQ ID NO: 26189,
[0702] CDRH3 is SEQ ID NO: 26202,
[0703] CDRL1 is SEQ ID NO: 26215,
[0704] CDRL2 is SEQ ID NO: 26228, and
[0705] CDRL3 is SEQ ID NO: 26241.

[0706] In some embodiments, the antibody comprises a light chain variable region (VL) that comprises a light chain complementarity determining region (CDRL)1, CDRL2, and CDRL3 and a heavy chain variable region (VH) that comprises a heavy chain complementarity determining region (CDRH)1, CDRH2, and CDRH3, wherein:
[0707] CDRH1 is SEQ ID NO: 26177,
[0708] CDRH2 is SEQ ID NO: 26190,
[0709] CDRH3 is SEQ ID NO: 26203,
[0710] CDRL1 is SEQ ID NO: 26216,
[0711] CDRL2 is SEQ ID NO: 26229, and
[0712] CDRL3 is SEQ ID NO: 26242.

[0713] In some embodiments, the antibody comprises a light chain variable region (VL) that comprises a light chain complementarity determining region (CDRL)1, CDRL2, and CDRL3 and a heavy chain variable region (VH) that comprises a heavy chain complementarity determining region (CDRH)1, CDRH2, and CDRH3, wherein:
[0714] CDRH1 is SEQ ID NO: 26178,
[0715] CDRH2 is SEQ ID NO: 26191,
[0716] CDRH3 is SEQ ID NO: 26204,
[0717] CDRL1 is SEQ ID NO: 26217,
[0718] CDRL2 is SEQ ID NO: 26230, and
[0719] CDRL3 is SEQ ID NO: 26243.

[0720] In some embodiments, the antibody comprises a light chain variable region (VL) that comprises a light chain complementarity determining region (CDRL)1, CDRL2, and CDRL3 and a heavy chain variable region (VH) that comprises a heavy chain complementarity determining region (CDRH)1, CDRH2, and CDRH3, wherein:
[0721] CDRH1 is SEQ ID NO: 26179,
[0722] CDRH2 is SEQ ID NO: 26192,
[0723] CDRH3 is SEQ ID NO: 26205,
[0724] CDRL1 is SEQ ID NO: 26218,
[0725] CDRL2 is SEQ ID NO: 26231, and
[0726] CDRL3 is SEQ ID NO: 26244.

[0727] In some embodiments, the recombinant antibody or antigen binding fragment thereof of any preceding aspect comprises a VH comprising an amino acid sequence selected from SEQ ID NOs: 1657-2484, 9939-10767, 18485-19441, and 26141-26153.

[0728] In some embodiments, the recombinant antibody or antigen binding fragment thereof of any preceding aspect comprises a VL comprising an amino acid sequence selected from SEQ ID NOs: 2485-3312, 10768-11596, 22313-23269, and 26154-26166.

[0729] In some embodiments, the recombinant antibody binds to at least one coronavirus antigen. In some embodiments, the recombinant antibody binds to at least one SARS-CoV-2 antigen.

[0730] In some embodiments, the target protein comprises a viral protein. In some embodiments, the viral protein is a coronavirus protein. Coronaviruses constitute the subfamily Orthocoronavirinae, in the family Coronaviridae, order Nidovirales, and realm Riboviria. They are enveloped viruses with a positive-sense single-stranded RNA genome and a nucleocapsid of helical symmetry. The genome size of coronaviruses ranges from approximately 27 to 34 kilobases. The structure of coronavirus generally consists of the following: spike protein, hemagglutinin-esterease dimer (HE), a membrane glycoprotein (M), an envelope protein (E) a nucleoclapid protein (N) and RNA. The coronavirus family comprises genera including, for example, alphacoronavius (e.g., Human coronavirus 229E, Human coronavirus NL63, Miniopterus bat coronavirus 1, Miniopterus bat coronavirus HKU8, Porcine epidemic diarrhea virus, Rhinolophus bat coronavirus HKU2, Scotophilus bat coronavirus 512), betacoronavirus (e.g., SARS-CoV-2, Betacoronavirus 1, Human coronavirus HKU1, Murine coronavirus, Pipistrellus bat coronavirus HKU5, Rousettus bat coronavirus HKU9, Severe acute respiratory syndrome-related coronavirus, Tylonycteris bat coronavirus HKU4, Middle East respiratory syndrome-related coronavirus (MERS), Human coronavirus OC43, Hedgehog coronavirus 1 (EriCoV)), gammacoronavirus (e.g., Beluga whale coronavirus SW1, Infectious bronchitis virus), and deltacoronavirus (e.g., Bulbul coronavirus HKU11, Porcine coronavirus HKU15). In some embodiments, the viral protein is a protein of Severe acute respiratory syndrome-related coronavirus. In some embodiments, the viral protein is a protein of MERS coronavirus.

[0731] In some embodiments, the viral protein is a SARS-CoV-2 protein, including, for example, SARS-CoV-2 spike protein, SARS-CoV-2 envelope protein, SARS-CoV-2 membrane protein, or SARS-CoV-2 nucleocapsid protein, or a fragment thereof. In some embodiments, the viral protein is a receptor binding domain of a SARS-CoV-2 spike protein.

[0732] In some aspects, disclosed herein is a method of producing a recombinant antibody comprising cultivating or maintaining the host cell of any preceding aspect under conditions to produce said recombinant antibody.

[0733] In some aspects, disclosed herein is a method of treating, preventing, reducing, and/or inhibiting coronavirus infection comprising administering to a subject a therapeutically effective amount of the recombinant antibody of any preceding aspect.

[0734] In some aspects, disclosed herein is a method of diagnosing a coronavirus infection comprising the use of the recombinant antibody of any preceding aspect. In some aspects, disclosed herein is a kit for diagnosing a coronavirus infection comprising the recombinant antibody of any preceding aspect.

[0735] The antibody repertoire characterization done herein is also readily generalizable to other pathogens, and as such, have a broad and lasting impact on the development of countermeasures for established and emerging infectious diseases.

[0736] Methods for determining antibody sequences and antigen-antibody specificities are known in the art. See, e.g., International Publication Number: WO 2020/033164, incorporated by reference.

[0737] In some aspects, disclosed herein is a method for detecting a coronavirus infection in a subject, comprising: providing a biological sample from the subject, and detecting a coronavirus antigen in the biological sample with an antibody that specifically binds to the coronavirus antigen, wherein the antibody is from any aspect as disclosed herein, and wherein the presence of the coronavirus antigen in the biological sample indicates the subject is infected with a coronavirus.

[0738] The biological sample can be from, for example, a throat swab, a nasal swab, a nasopharyngeal swab, an oropharyngeal swab, cells, blood, serum, plasma, saliva, urine, stool, sputum, or nasopharyngeal aspirates.

[0739] In some embodiments, the coronavirus infection is caused by SARS-CoV-2. In some embodiments, the method comprises contacting the biological sample with a SARS-CoV-2 antigen. In some embodiments, the SARS-CoV-2 antigen is directly immobilized on a substrate and is detected by an antibody disclosed herein directly or indirectly by a labeled heterologous anti-isotype antibody, wherein the bound antibody can be detected by a detection assay. The SARS-CoV-2 antigen can be selected from the spike (S), envelope (E), membrane (M), and nucleocapsid (N) proteins, or a fragment thereof.

[0740] The term “labeled”, with regard to the probe or antibody, is intended to encompass direct labeling of the probe or antibody by coupling (i.e., physically linking) a detectable substance to the probe or antibody, as well as indirect labeling of the probe or antibody by reactivity with another reagent that is directly labeled. Examples of indirect labeling include detection of a primary antibody using a secondary antibody that is labeled a fluorescent probe or with biotin for detection. In vitro techniques for detection of the antibodies of SARS-CoV-2 include enzyme linked immunosorbent assays (ELISAs), Western blots, immunoprecipitations and immunofluorescence, IgM antibody capture enzyme immunoassay (MAC-ELISA), indirect IgG ELISA, indirect fluorescent antibody assay (IFAT), hemagglutination inhibition (HIT), and serum dilution cross-species plaque reduction neutralization tests (PRNTs).

[0741] In some embodiments, in vitro techniques for detection of an antigen of SARS-CoV-2 include enzyme linked immunosorbent assays (ELISAs), Western blots, immunoprecipitations and immunofluorescence. Furthermore, in vivo techniques for detection of SARS-CoV-2 include introducing into a subject a labeled antibody directed against the polypeptide. For example, the antibody can be labeled with a radioactive marker whose presence and location can be detected by standard imaging techniques, including autoradiography.

[0742] In some embodiments, the levels of the antibodies are determined by immunoassay comprising Enzyme linked immunospot (ELISPOT), Enzyme-linked immunosorbent assay (ELISA), western blot, or a multiplex ELISA assay. In some embodiments, the multiplex ELISA assay is selected from the group consisting of Luminex, Veriplex, LEGENDplex, Bio-Plex, Milliplex MAP, and FirePlex.

[0743] The steps of various useful immunodetection methods have been described in the scientific literature, such as, e.g., Maggio et al., Enzyme-Immunoassay, (1987) and Nakamura, et al., Enzyme Immunoassays: Heterogeneous and Homogeneous Systems, Handbook of Experimental Immunology, Vol. 1: Immunochemistry, 27.1-27.20 (1986), each of which is incorporated herein by reference in its entirety and specifically for its teaching regarding immunodetection methods. Immunoassays, in their most simple and direct sense, are binding assays involving binding between antibodies and antigen. Many types and formats of immunoassays are known and all are suitable for detecting the disclosed biomarkers. Examples of immunoassays are enzyme linked immunosorbent assays (ELISAs), radioimmunoassays (RIA), radioimmune precipitation assays (RIPA), immunobead capture assays, Western blotting, dot blotting, gel-shift assays, Flow cytometry, protein arrays, multiplexed bead arrays, magnetic capture, in vivo imaging, fluorescence resonance energy transfer (FRET), and fluorescence recovery/localization after photobleaching (FRAP/FLAP).

[0744] The invention also encompasses kits for detecting the presence of SARS-CoV-2 or a polypeptide/antigen thereof in a biological sample. For antibody-based kits, the kit can comprise, for example: (1) a first antibody (e.g., attached to a solid support) which binds to a coronavirus antigen; and, optionally, (2) a second, different antibody which binds to either the coronavirus antigen or the first antibody and is conjugated to a detectable agent.

### EXAMPLES

[0745] The following examples are set forth below to illustrate the antibodies, methods, and results according to the disclosed subject matter. These examples are not intended to be inclusive of all aspects of the subject matter disclosed herein, but rather to illustrate representative methods and results. These examples are not intended to exclude equivalents and variations of the present invention which are apparent to one skilled in the art.

### Example 1. Introduction

[0746] The emergence of a novel coronavirus (CoV) SARS-CoV-2, the causative agent of COVID-19, has resulted in a worldwide pandemic, threatening the lives of billions and imposing an immense burden on healthcare systems and the global economy. SARS-CoV-2, the seventh coronavirus known to infect humans, is a member of the Betacoronavirus genus which includes the highly pathogenic SARS-CoV-1 and MERS-CoV, as well as endemic variants OC43-CoV and HKU1-CoV. Recent coronavirus outbreaks and the threat of future emerging zoonotic strains highlight the need for coronavirus therapeutic interventions and vaccine design.

[0747] Coronaviruses utilize the homotrimeric Spike (S) protein to engage with cell-surface receptors and gain entry into host cells. S consists of two functional subunits: S1 and S2. S1 facilitates attachment to target cells and is composed of the N-terminal domain (NTD) and the receptor-binding domain (RBD), whereas S2, which encodes the fusion peptide and heptad repeats, promotes viral fusion. To facilitate cell entry, human coronaviruses employ different host factors; however, SARS-CoV-1 and SARS-CoV-2 both utilize the cell-surface receptor, angiotensin converting enzyme 2 (ACE2). Additionally, SARS-CoV-2 S shares 76% amino acid identity with SARS-CoV-1 S. Furthermore, S serves as a dominant antibody target and is a focus of countermeasures for the treatment and prevention of COVID-19 infection. Neutralizing antibodies can be used as preventive or therapeutic treatments. Further, identifying coronavirus antibody epitopes can inform rational design strategies for vaccines and therapies that target highly pathogenic coronaviruses, which can be of value both for the current and potential future outbreaks.

[0748] A variety of potent neutralizing antibodies against SARS-CoV-2 have been identified, including multiple antibodies currently in clinical trials for prophylactic and acute treatment of COVID-19. Defining the genetic features, epitope targets, and function of antibodies can provide insights into current therapeutic strategies and can provide alternative approaches for the prevention and treatment of coronavirus infection.

[0749] In the examples below, antibody reactivity to SARS-CoV-2 is investigated at monoclonal resolution. To do this, LIBRA-seq (Linking B Cell receptor to antigen specificity through sequencing) is applied, a recently developed high-throughput antibody screening technology that allows for determination of B cell receptor sequence and antigen reactivity simultaneously for many single B cells. From convalescent SARS-CoV-2 donor samples, potent SARS-CoV-2-reactive human antibodies are identified and characterized that target multiple, distinct structural domains of S and demonstrate potent neutralization activity. A better understanding of the epitope specificities and functional characteristics of coronavirus antibodies can translate into strategies for current vaccine design efforts and additional measures to counteract potential future pandemic variants.

### Example 2. LIBRA-Seq Applied to a SARS-CoV-2 Convalescent Donor Sample

[0750] To identify SARS-CoV-2 reactive antibodies, LIBRA-seq was applied to a PBMC sample from a donor previously infected with SARS-CoV-2. Three experiments were performed to identify high-affinity coronavirus antibodies and ultra-potent neutralizing antibodies utilizing multiple features of LIBRA-seq: affinity measurements and ligand blocking functionality. To assess affinity measurements, in experiment 1, the antigen library consisted of an antigen titration of SARS-CoV-2 S protein along with control antigens influenza HA NC99 and HIV ZM197. To assess ligand blocking, in experiment 2, the antigen library consisted of SARS-CoV-2 S protein along with its receptor, ACE2, and control antigens influenza HA NC99 and HIV ZM197. To assess affinity measurements in combination with ligand blocking, in experiment 3, the antigen library consisted of an antigen titration of SARS-CoV-2 S protein, ACE2, and control antigens influenza HA NC99 and HIV ZM197. Each antigen library was incubated with SARS-CoV-2 convalescent donor PBMCs and LIBRA-seq was performed (FIG. 4).

[0751] After the antigen screening library was mixed with donor PBMCs, antigen positive B cells were enriched by fluorescence activated cell sorting and processed for single-cell sequencing. After bioinformatic processing, thousands of cells with paired heavy/light chain sequences and antigen reactivity information were recovered. Overall, LIBRA-seq allows rapid screening of PBMCs from a patient sample, with recovery of paired heavy/light chain sequences and antigen reactivity for thousands of single B cells.

### Example 3. Identification of SARS-CoV-2 and SARS-CoV-1 Cross-Reactive Antibodies and Ligand-Blocking Antibodies

[0752] In order to identify antibodies that were cross-reactive to multiple coronavirus S proteins, antibodies are prioritized based on their sequence features and LIBRA-seq scores. Antibodies that exhibit diverse sequence features are selected and a number of different variable genes are utilized for expression and characterization. For the antigen titration experiments, antibodies were identified that showed high scores for S protein added in lower amounts. For ligand blocking, antibodies were identified that had high scores for S protein and low scores for ACE2-suggesting ligand blocking functionality of these antibodies. Antibodies were prioritized for expression and further testing based on these features (FIG. 4).

[0753] Antibodies are tested for binding to SARS-CoV-1 S and SARS-CoV-2 S by ELISA. Overall, the application of the LIBRA-seq technology identifies a panel of coronavirus antibodies that recognize the coronavirus S antigen.

### Example 4. Coronavirus Antibodies Target Multiple Epitopes on S

[0754] To elucidate the epitopes targeted by the cross-reactive antibodies, binding assays to various structural domains of S are performed. Antibody binding to the S1 and S2 subdomains of SARS-CoV-2 is assessed. Additionally, antibody binding to the receptor binding domain (RBD) and N-terminal domain (NTD) is assessed. Many antibodies target the RBD. Some of the cross-reactive antibodies are coronavirus-specific and target multiple, diverse epitopes on the S protein.

### Example 5. Functional Characterization of Coronavirus Antibodies

[0755] Next, the antibody panel is characterized. Antibodies are tested for SARS-CoV-2 virus neutralization, and many antibodies exhibit neutralization. Some antibodies are ultra-potent.

[0756] In these examples, a set of SARS-CoV-2 antibodies isolated from convalescent SARS-CoV-2 convalescent donors are described.

[0757] Given the ongoing SARS-CoV-2 pandemic and for future zoonotic coronavirus pathogens to emerge, coronavirus vaccine and therapeutic development is of paramount importance. Antibodies that can neutralize SARS-CoV-2 can serve as therapies, preventive measures, diagnostic tools, and templates for rational vaccine design strategies.

### Example 6. Methods

[0758] Donor Information. Convalescent SARS-CoV-2 PBMC donor samples were purchased from Cellero.

[0759] Antigen Purification. A variety of recombinant soluble protein antigens were used in the LIBRA-seq experiment and other experimental assays. Plasmids encoding residues 1-1208 of the SARS-CoV-2 spike with a mutated S1/S2 cleavage site, as well as 6 stabilizing proline mutations at positions (817, 892, 899, 942, 986, 987), and a C-terminal T4-fibritin trimerization motif, an 8× HisTag, and a TwinStrepTag (SARS-CoV-2 HexaPro) and human ACE2 were transiently transfected into FreeStyle293F cells (Thermo Fisher) using polyethylenimine. The coronavirus trimer spike antigen was in a prefusion-stabilized conformation (HexaPro) that better represents neutralization-sensitive epitopes in comparison to their wild-type forms. Transfected supernatants were harvested after 6 days of expression. SARS-CoV-2 HexaPro was purified using StrepTactin resin (IBA). SARS-CoV-2 HexaPro was purified over a Superose6 Increase column (GE Life Sciences). ACE2 was purified in the same manner as SARS-CoV-2 HexaPro Sp using affinity chromatography and size exclusion chromatography.

[0760] For recombinant, soluble antigens HIV-1 gp140 SOSIP variant from strain ZM197 (clade C) and influenza hemagglutinin NC99 Y98F trimer, both contained an AviTag and were expressed in Expi293F cells using polyethylenimine (PEI) transfection reagent and cultured. FreeStyle F17 expression medium supplemented with pluronic acid and glutamine was used. The cells were cultured at 37° C. with 8% CO₂ saturation and shaking. After 5-7 days, cultures were centrifuged and supernatant was filtered and run over an affinity column of agarose bound Galanthus nivalis lectin. The column was washed with PBS and antigens were eluted with 30 mL of 1M methyl-a-D-mannopyranoside. Protein elutions were buffer exchanged into PBS, concentrated, and run on a Superdex 200 Increase 10/300 GL Sizing column on the AKTA FPLC system. Fractions corresponding to correctly folded protein were collected, analyzed by SDS-PAGE and antigenicity was characterized by ELISA using known monoclonal antibodies specific to each antigen. Avitagged antigens were biotinylated using BirA biotin ligase (Avidity LLC).

[0761] SARS-CoV-2 S1, S2, NTD truncated proteins were purchased from commercial vendor Sino Biological.

[0762] DNA-barcoding of Antigens. Oligos that possess 15 bp antigen barcode were used, a sequence capable of annealing to the template switch oligo that is part of the 10× bead-delivered oligos, and contain truncated TruSeq small RNA read 1 sequences in the following structure: 5′-CCTTGGCACCCGAGAATTCCANNNNNNNNNNNNNCCCATATAAGA*A*A-3′ (SEQ ID NO: 26262), where Ns represent the antigen barcode, * represents a phosphorothioate bond. Oligos were ordered from Sigma-Aldrich and IDT with a 5′ amino modification and HPLC purified.

[0763] For each antigen, a unique DNA barcode was directly conjugated to the antigen itself. In particular, 5′amino-oligonucleotides were conjugated directly to each antigen using the Solulink Protein-Oligonucleotide Conjugation Kit (TriLink cat no. S-9011) according to manufacturer's instructions. Briefly, the oligo and protein were desalted, and then the amino-oligo was modified with the 4FB crosslinker, and the biotinylated antigen protein was modified with S-HyNic. Then, the 4FB-oligo and the HyNic-antigen were mixed together. This causes a stable bond to form between the protein and the oligonucleotide. The concentration of the antigen-oligo conjugates was determined by a BCA assay, and the HyNic molar substitution ratio of the antigen-oligo conjugates was analyzed using the NanoDrop according to the Solulink protocol guidelines. AKTA FPLC was used to remove excess oligonucleotide from the protein-oligo conjugates, which were also verified using SDS-PAGE with a silver stain. Antigen-oligo conjugates were also used in flow cytometry titration experiments.

[0764] Antigen specific B cell sorting. Cells were stained and mixed with DNA-barcoded antigens and other antibodies, and then sorted using fluorescence activated cell sorting (FACS). First, cells were counted and viability was assessed using Trypan Blue. Then, cells were washed 3× with DPBS supplemented with 0.1% Bovine serum albumin (BSA). Cells were resuspended in DPBS-BSA and stained with cell markers including viability dye (Ghost Red 780), CD14-APCCy7, CD3-FITC, CD19-BV711, and IgG-PECy5. Additionally, antigen-oligo conjugates were added to the stain. After staining in the dark for 30 minutes at room temperature, cells were washed 3 times with PBS-BSA at 300 g for 5 minutes. Cells were then incubated for 15 minutes at room temperature with Streptavidin-PE to label cells with bound antigen. Cells were washed with DPBS-BSA, resuspended in DPBS, and sorted by FACS. Antigen positive cells were bulk sorted and delivered to the Vanderbilt Technologies for Advanced Genomics (VANTAGE) sequencing core at an appropriate target concentration for 10× Genomics library preparation and subsequent sequencing. FACS data were analyzed using FlowJo.

[0765] Sample preparation, library preparation, and sequencing. Single-cell suspensions were loaded onto the Chromium Controller microfluidics device (10× Genomics) and processed using the B-cell Single Cell V(D)J solution according to manufacturer's suggestions for a target capture of 10,000 B cells per ⅛ 10× cassette, with minor modifications in order to intercept, amplify and purify the antigen barcode libraries as previously described.

[0766] Sequence processing and bioinformatic analysis. The previously described pipeline was utilized and modified to use paired-end FASTQ files of oligo libraries as input, processes and annotates reads for cell barcode, UMI, and antigen barcode, and generates a cell barcode—antigen barcode UMI count matrix. BCR contigs were processed using Cell Ranger (10× Genomics) using GRCh38 as reference. Antigen barcode libraries were also processed using Cell Ranger (10× Genomics). The overlapping cell barcodes between the two libraries were used as the basis of the subsequent analysis. Cell barcodes that had only non-functional heavy chain sequences as well as cells with multiple functional heavy chain sequences and/or multiple functional light chain sequences were removed, reasoning that these can be multiplets. Additionally, the BCR contigs (filtered_contigs.fasta file output by Cell Ranger, 10× Genomics) was aligned to IMGT reference genes using HighV-Quest. The output of HighV-Quest was parsed using ChangeO, and merged with an antigen barcode UMI count matrix. Finally, it was determined the LIBRA-seq score for each antigen in the library for every cell.

[0767] Antibody Expression and Purification. For each antibody, variable genes were inserted into custom plasmids encoding the constant region for the IgG1 heavy chain as well as respective lambda and kappa light chains (pTwist CMV BetaGlobin WPRE Neo vector, Twist Bioscience). mAbs were expressed in Expi293F mammalian cells (ThermoFisher) by co-transfecting heavy chain and light chain expressing plasmids using PEI transfection reagent and cultured for 5-7 days. Cells were maintained in FreeStyle F17 expression medium supplemented at final concentrations of 0.1% Pluronic Acid F-68 and 20% 4 mM L-Glutamine. These cells were cultured at 37° C. with 8% CO₂ saturation and shaking. After transfection and 5-7 days of culture, cell cultures were centrifuged and supernatant was 0.45 m filtered with Nalgene Rapid Flow Disposable Filter Units with PES membrane. Filtered supernatant was run over a column containing Protein A agarose resin equilibrated with PBS. The column was washed with PBS, and then antibodies were eluted with 100 mM Glycine HCl at 2.7 pH directly into a 1:10 volume of 1M Tris-HCl pH 8.0. Eluted antibodies were buffer exchanged into PBS 3 times using Amicon Ultra centrifugal filter units and concentrated. Antibodies were analyzed by SDS-PAGE.

[0768] ELISA. To assess antibody binding, soluble protein was plated at 2 μg/ml overnight at 4° C. The next day, plates were washed three times with PBS supplemented with 0.05% Tween-20 (PBS-T) and coated with 5% milk powder in PBS-T. Plates were incubated for one hour at room temperature and then washed three times with PBS-T. Primary antibodies were diluted in 1% milk in PBS-T, starting at 10 μg/ml with a serial 1:5 dilution and then added to the plate. The plates were incubated at room temperature for one hour and then washed three times in PBS-T. The secondary antibody, goat anti-human IgG conjugated to peroxidase, was added at 1:10,000 dilution in 1% milk in PBS-T to the plates, which were incubated for one hour at room temperature. Plates were washed three times with PBS-T and then developed by adding TMB substrate to each well. The plates were incubated at room temperature for ten minutes, and then 1N sulfuric acid was added to stop the reaction. Plates were read at 450 nm.

### Example 7. Rapid and Efficient Discovery of Potently Neutralizing SARS-CoV-2 Antibodies Using LIBRA-Seq with Ligand Blocking

[0769] The emergence of a novel coronavirus (CoV), SARS-CoV-2, has resulted in a worldwide pandemic, threatening the lives of millions and imposing an immense burden on healthcare systems and the global economy. The devastating effects of the COVID-19 pandemic have highlighted the critical need for rapid, high-throughput screening tools for antibody discovery against viral pathogens. Antibodies can be utilized as therapeutic molecules, and studying antibody-antigen interactions can be exploited in vaccine design strategies during both pandemic emergencies and for other health concerns as well. With typical antibody screening tools, hundreds to thousands of antibodies must be screened, expressed, and tested to identify neutralizing antibody candidates for further characterization. In particular, though therapeutic antibody discovery efforts against SARS-CoV-2 have been generally successful, they have been associated with the production of large numbers of antibodies with low hit rates for the identification of lead candidates. Here, antibody-ligand blocking has been incorporated as part of LIBRA-seq, the high throughput sequencing platform for antibody discovery. By using SARS-CoV-2 spike (S) and its receptor ACE2, the LIBRA-seq with ligand blocking technology was applied to convalescent SARS-CoV-2 samples and high rates of neutralizing antibody identification was demonstrated (90% of predictions confirmed), including the discovery of several ultra-potent SARS-CoV-2 antibodies. The antibodies identified targeted diverse epitopes across the S protein and bound to several major circulating S variants. A better understanding of the sequence features, epitopes, and functional characteristics of potent, SARS-CoV-2 neutralizing antibodies can translate into strategies for current vaccine design efforts and additional measures to counteract potential future pandemic variants. Overall, leveraging LIBRA-seq with ligand blocking enables general antibody discovery targeting the disruption of antibody-ligand interactions and can facilitate the creation of better vaccines and therapies in a variety of disease settings.

[0770] LIBRA-seq turns antibody antigen interactions into “sequenceable events.” This occurs through the use of DNA-barcoded antigens that can be recovered in single cell sequencing data and then bioinformatically mapped to B-cell receptor sequences (FIGS. 8A-8E). LIBRA-seq with ligand blocking allows for rapid and efficient prioritization of lead neutralizing antibody candidates (FIG. 11). Validation and characterization of expressed antibodies is shown in FIG. 12. LIBRA-seq with ligand blocking confirms predicted SARS-CoV-2 neutralization by antibodies at high rates (FIG. 10). Utilizing an antigen titration in LIBRA-seq can lead to affinity predictions from a sequencing experiment (FIG. 20).

[0771] This study shows application of the LIBRA-seq with ligand blocking to a SARSCoV-2 convalescent donor PBMC sample led to the rapid identification of potently neutralizing antibodies with high hit rates. The study provides a better understanding of the sequence features, epitopes, and functional characteristics of potent, SARS-CoV-2 neutralizing antibodies may translate into strategies for current vaccine design efforts and additional measures to counteract potential future pandemic variants. Overall, leveraging LIBRA-seq with ligand blocking can enable general antibody discovery targeting the disruption of antibody-ligand interactions and can ultimately facilitate the creation of better vaccines and therapies in a variety of disease settings.

### Example 8. B-Cell Receptor Sequencing with Ligand Blocking Speeds Up Neutralizing Antibody Discovery

[0772] Technologies for developing preventive and therapeutic measures that can counteract potential pandemics are of utmost significance for public health. The COVID-19 pandemic has emphasized the importance of rapid countermeasure development. Through pandemic preparedness initiatives, effective SARS-CoV-2 neutralizing antibodies were discovered and validated within months, as were SARS-CoV-2 vaccine candidates. However, even with such unprecedented speed of vaccine and therapeutic development, the pandemic has inflicted devastating worldwide effects. Accelerating actions by weeks or months can make an enormous difference in an exponentially evolving pandemic. Therefore, efficient methods for discovery of effective countermeasures against emerging pathogens can play a critical role in pandemic preparedness for future infectious disease outbreaks.

[0773] Antibodies are a major modality for therapy and vaccine design strategies for a wide range of diseases; however, the functional antibody discovery process can be inefficient. Typically, at the screening step, B cells are prioritized based on antigen-recognition, but this often requires time-intensive subsequent monoclonal antibody validation steps for discovery of functional, neutralizing antibodies. This limitation was exemplified by SARS-CoV-2 antibody discovery initiatives, as testing of large numbers of antibodies (frequently hundreds to thousands) was generally required to identify a small fraction of neutralizing antibodies, with a wide range of hit rates when using Spike (S) as an antigen bait (about 2 to 23%) or when using RBD and/or S1 (about 2-55%) in various studies.

[0774] To overcome this limitation, LIBRA-seq with ligand blocking was developed, which is a second-generation LIBRA-seq technology that incorporates a functional readout into the antibody discovery process. LIBRA-seq (linking B cell receptor to antigen specificity through sequencing) uses DNA-barcoded antigens to map antibody sequence to antigen specificity using next-generation sequencing. For LIBRA-seq with ligand blocking, a ligand and its cognate target antigen(s) are each labeled with a unique oligonucleotide barcode (FIG. 17A), enabling the transformation of antigen-ligand interactions into sequence-able events. In these experiments, B cells that can block antigen-ligand interactions have high LIBRA-seq scores for the target antigen(s) and low LIBRA-seq scores for the ligand (FIG. 17A). Therefore, a single high-throughput LIBRA-seq with ligand blocking experiment provides both antigen recognition and ligand blocking information simultaneously for many B cells.

[0775] To evaluate this technology, SARS-CoV-2-specific antibodies from B cells from subjects with past SARS-CoV-2 infection were explored, since antibodies that block the interactions of the SARS-CoV-2 S protein with its host receptor angiotensin-converting enzyme 2 (ACE2) are among the most potently neutralizing identified to date. Three LIBRA-seq experiments were performed, with screening libraries that included: experiment 1, ACE2 and SARS-CoV-2 S; experiment 2, a titration series of different aliquots of SARS-CoV-2 S, each labeled with a unique barcode; and experiment 3, ACE2 and a titration series of S (FIG. 11A). The incorporation of a titration series of S antigen in the screening library for experiments 2 and 3 aimed to assess the strength of BCR-antigen interactions (FIGS. 11B and 11C).

[0776] The application of LIBRA-seq resulted in 828, 829, and 957 antigen-specific B cells for the three experiments, respectively. A set of B cells were prioritized for monoclonal antibody production and validation based on the following conditions: for experiments 1 and 3 (with ACE2 in the screening library), B cells with high LIBRA-seq scores for S and low scores for ACE2 were selected; and for experiment 2, B cells that had positive scores for multiple aliquots of S were selected (FIGS. 11B-11D). B cells with high S and high ACE2 scores were also selected as controls from experiments 1 and 3, along with an influenza-specific B cell from experiment 2 (FIGS. 11B-11D). Antibodies with diverse sequence features were prioritized, although some of the selected antibodies appeared to be clonally related (FIG. 18A).

[0777] The assay confirmed the predicted antigen specificity for 26/27 (96%) antibodies and mapped the general antibody epitope regions by testing antibodies for binding to recombinant SARS-CoV-2 subdomain proteins (FIG. 12A, FIG. 18B). The majority of antibodies from experiments 1 and 3 (but none from experiment 2) recognized the RBD (FIG. 12A, FIG. 18B). Further, the antibodies had a wide range of affinities for RBD or NTD, including several antibodies with KD<1 nM, although no correlation between LIBRA-seq spike score and affinity was observed (FIG. 12B). Next, the ability of the antibodies to block ACE2 binding to spike was tested. For antibodies predicted to block ACE2 by LIBRA-seq, 57% from experiment 1 and 67% from experiment 3 demonstrated ACE2 blocking via ELISA, whereas no antibodies from experiment 2 blocked ACE2 binding (FIG. 12C, FIG. 18C).

[0778] Next, the antibodies were tested in a VSV SARS-CoV-2 chimeric virus neutralization assay (FIG. 12D, FIG. 18D). For antibodies predicted to block ACE2 by LIBRA-seq, 86% from experiment 1 and 67% from experiment 3 were neutralizing, while only two clonally related antibodies (29%) from experiment 2 were neutralizing (FIGS. 13A-13B). For the antibodies from experiments 1 and 3, the ACE2 LIBRA-seq scores were correlated with the percent reduction in ACE2 binding (FIG. 13C, Spearman r=−0.54, p=0.017). Furthermore, several antibodies also showed potent neutralization against authentic SARS-CoV-2 virus in a plaque reduction assay, and in some cases against multiple SARS-CoV-2 variants (FIG. 14). Together, these results highlight the importance of including ligand blocking in LIBRA-seq for selectively identifying potent neutralizing antibodies.

[0779] To investigate antibody recognition of SARS-CoV-2 S, a 9 Å-resolution Cryo-EM structure was determined for the antigen-binding fragments of antibodies 5317-4 and 5317-10 bound to the SARS-CoV-2 S extracellular domain (FIG. 15A). 5317-4 was chosen based on its potent neutralization (IC50 value of 7.3 ng/mL against authentic SARS-CoV-2, FIG. 14) and ACE2 competition. The 3D reconstruction revealed that 5317-4 binds to RBD in the “up” and “down” conformations, and its epitope partially overlaps the ACE2 binding footprint (FIGS. 15A-15B). When bound to the RBD in the down conformation, 5317-4 competes with ACE2 binding to the adjacent up RBD (FIG. 15B). 5317-10 was investigated because of its inconclusive epitope, as it bound to S1 but not individual RBD or NTD constructs (FIG. 12A). The map revealed that 5317-10 binds a quaternary epitope that bridges an RBD in the down position and the NTD of an adjacent protomer (FIG. 15A). This mode of recognition can prevent the RBD from transitioning into an ACE2-accessible up position, thereby preventing binding by ACE2.

[0780] To further demonstrate the utility of LIBRA-seq with ligand blocking, the next experiment was performed to identified antibodies that show cross-reactivity between SARS-CoV-2 and SARS-CoV, and that are capable of blocking spike-ACE2 interactions. To that end, LIBRA-seq was applied to B cells from a subject with past SARS-CoV-2 infection, using an antigen library that included SARS-CoV-2 S, SARS-CoV S, and ACE2 (FIG. 16A). This resulted in 120 IgG+ B cells with high LIBRA-seq scores for both SARS-CoV-2 S and SARS-CoV S (FIG. 16B). Only 8% of these cells were associated with low LIBRA-seq scores for ACE2 (FIG. 19A, highlighting the advantage of including ligand blocking to screen for such rare cells (although also it was noted that information about B cells that show cross-reactivity but are not ACE2 blocking is also retained, enabling characterization of B cells with alternative phenotypes as well). Based on LIBRA-seq antigen and ligand blocking scores, a set of antibodies were produced and validated, including 8 with high scores for both S antigens and low scores for ACE2 (FIGS. 16C-16D). Of these, 100% bound SARS-CoV-2 S, 88% showed the predicted SARS-CoV-2/SARS-CoV cross-reactivity, and 63% demonstrated strong ACE2 blocking ability via ELISA (FIGS. 16E-16H, FIGS. 19B-19C), confirming that LIBRA-seq with ligand blocking efficiently identified ACE2-blocking antibodies with cross-reactivity between multiple coronaviruses.

[0781] Together, the results from the four LIBRA-seq experiments reported here showcase the advantages of including ligand blocking as part of the sequencing readout. As with most screening tools, there are limitations to the LIBRA-seq with ligand blocking approach, including the prerequisite for a defined antigen-ligand interaction, as well as the potential for identifying false positives. Nevertheless, through a single high-throughput sequencing experiment, LIBRA-seq with ligand blocking identified potent SARS-CoV-2 antibodies, requiring the subsequent production and validation of less than a dozen antibodies per experiment. The observed hit rates for the discovery of potently neutralizing antibodies are an improvement over what has been reported in the literature, which also typically required the screening of hundreds to thousands of antibody candidates isolated for their reactivity to antigen alone (recombinant S, S1, or RBD). Further, unlike RBD-only discovery efforts, LIBRA-seq with ligand blocking applied to spike antigens has the potential for more comprehensive coverage of antibody epitopes, as evidenced by the discovery of the RBD-NTD antibody in FIG. 15A. Overall, the application of LIBRA-seq with ligand blocking can provide critical advantages for rapid development of therapeutic and preventive countermeasures and presents a general platform with applications to virtually any area where targeting the disruption of antigen-ligand interaction is a prime therapeutic goal.

[0782] Methods

[0783] Data Availability Statement

[0784] All unique reagents generated in this study are available from the corresponding author with a completed Material Transfer Agreement. Sequences for antibodies identified and characterized in this study have been deposited to GenBank (MZ517191-MZ517250, OM001674-OM001699). Raw sequencing data has been deposited to Sequence Read Archive (PRJNA744567, SAMN24369247). Further information and requests for resources and reagents should be directed to the corresponding author, Ivelin Georgiev (Ivelin.Georgiev@Vanderbilt.edu).

[0785] Code Availability

[0786] Custom scripts used to analyze data in this manuscript are available upon request to the corresponding author.

[0787] Donor Information

[0788] PBMC samples were purchased from Cellero. The PBMCs were from subjects with past SARS-CoV-2 infection at least 14 days post symptom cessation. For experiment 1, three samples were pooled from donors 523, 527, and 528. For experiments 2 and 3, samples from donor 523 were used for LIBRA-seq. Donor 523 had a plaque reduction neutralization test titer of 1:2,560. For experiment 4 (cross-reactive antibody discovery with ligand blocking), a sample from donor 528 was used for LIBRA-seq.

[0789] Antigen Purification

[0790] A variety of recombinant soluble protein antigens were used in the LIBRA-seq experiment and other experimental assays.

[0791] Plasmids encoding residues 1-1208 of the SARS-CoV-2 spike with a mutated S1/S2 cleavage site, proline substitutions at positions 817, 892, 899, 942, 986 and 987, and a C-terminal T4-fibritin trimerization motif, an 8× HisTag, and a TwinStrepTag (SARS-CoV-2 spike HP); residues 1-1190 of the SARS-CoV spike with proline substitutions at positions 968 and 969, and a C-terminal T4-fibritin trimerization motif, an 8× HisTag, and a TwinStrepTag (SARS-CoV S-2P); and 1-615 of human ACE2 with a C-terminal HRV3C protease cleavage site, a TwinStrepTag and an 8×hisTag (ACE2) were transiently transfected in Expi293F cells using polyethylenimine. Transfected supernatants were harvested 5 days after expression and purified over a StrepTrap column (Cytiva Life Sciences). Both recombinant SARS-CoV-2 S HP and ACE2 were further purified to homogeneity using a Superose6 Increase column (Cytiva Life Sciences).

[0792] For the HIV-1 gp140 SOSIP variant from strain ZM197 (clade C) and hemagglutinin from strain A/New Caledonia/20/99 (H1N1) (GenBank ACF41878), recombinant, soluble antigens contained an AviTag and were expressed in Expi293F cells using polyethylenimine transfection reagent and cultured. FreeStyle F17 expression medium supplemented with pluronic acid and glutamine was used. The cells were cultured at 37° C. with 8% C02 saturation and shaking. After 5-7 days, cultures were centrifuged and supernatant was filtered and run over an affinity column of agarose-bound Galanthus nivalis lectin. The column was washed with PBS and antigens were eluted with 30 mL of 1M methyl-a-D-mannopyranoside. Protein elutions were buffer exchanged into PBS, concentrated, and run on a Superdex 200 Increase 10/300 GL Sizing column on the AKTA FPLC system. Fractions corresponding to correctly folded protein were collected, analyzed by SDS-PAGE and antigenicity was characterized by ELISA using known monoclonal antibodies specific to each antigen. AviTagged antigens were biotinylated using BirA biotin ligase (Avidity LLC).

[0793] SARS-CoV-2 S1, SARS-CoV-2 S2, SARS-CoV-2 RBD and SARS-CoV-2 NTD proteins were purchased from the commercial vendor, Sino Biological.

[0794] DNA-Barcoding of Antigens

[0795] This study used oligos that possess 15 bp antigen barcode, a sequence capable of annealing to the template switch oligo that is part of the 10× bead-delivered oligos and contain truncated TruSeq small RNA read 1 sequences in the following structure: 5′-CCTTGGCACCCGAGAATTCCANNNNNNNNNNNNNCCCATATAAGA*A*A-3′ (SEQ ID NO: 26262), where Ns represent the antigen barcode. For each antigen, a unique DNA barcode was directly conjugated to the antigen itself. For Experiment 1, the barcodes included SARS-CoV-2 S (GACAAGTGATCTGCA, SEQ ID NO: 26245), H1 NC99 (TCATTTCCTCCGATT, SEQ ID NO: 26246), ZM197 (TACGCCTATAACTTG; SEQ ID NO: 26247), and ACE2 (CTTCACTCTGTCAGG; SEQ ID NO: 26248). For Experiment 2, the barcodes included SARS-CoV-2 S aliquot 1 (GACAAGTGATCTGCA; SEQ ID NO: 26249), SARS-CoV-2 S aliquot 2 (TGTGTATTCCCTTGT; SEQ ID NO: 26250), SARS-CoV-2 S aliquot 3 (GCAGCGTATAAGTCA; SEQ ID NO: 26251), SARS-CoV-2 S aliquot 4 (GCTCCTTTACACGTA), SARS-CoV-2 S aliquot 5 (AGACTAATAGCTGAC; SEQ ID NO: 26252), SARS-CoV-2 S aliquot 6 (GGTAGCCCTAGAGTA; SEQ ID NO: 26253), H1 NC99 (TCATTTCCTCCGATT; SEQ ID NO: 26254), and ZM197 (TACGCCTATAACTTG; SEQ ID NO: 26255). For Experiment 3, the same barcodes were included as Experiment 2 and also included ACE2 (CTTCACTCTGTCAGG; SEQ ID NO: 26256). For Experiment 4, the barcodes included SARS-CoV-2 S (GCAGCGTATAAGTCA; SEQ ID NO: 26257), SARS-CoV S (GCTCCTTTACACGTA; SEQ ID NO: 26258), ACE2 (TACGCCTATAACTTG; SEQ ID NO: 26259), ZM197 (TCATTTCCTCCGATT; SEQ ID NO: 26260), and H1 NC99 (CTTCACTCTGTCAGG; SEQ ID NO: 26261). In particular, 5′-amino-oligonucleotides were conjugated directly to each antigen using the SoluLINK Protein-Oligonucleotide Conjugation Kit (TriLink cat no. S-9011) according to manufacturer's instructions. Briefly, the oligo and protein were desalted, and then the amino-oligo was modified with the 4FB crosslinker, and the biotinylated antigen protein was modified with S-HyNic. Then, the 4FB-oligo and the HyNic-antigen were mixed. This process causes a stable bond to form between the protein and the oligonucleotide. The concentration of the antigen-oligo conjugates was determined by a BCA assay, and the HyNic molar substitution ratio of the antigen-oligo conjugates was analyzed using the NanoDrop according to the SoluLINK protocol guidelines. AKTA FPLC was used to remove excess oligonucleotide from the protein-oligo conjugates, which were also verified using SDS-PAGE with a silver stain. Antigen-oligo conjugates were also used in flow cytometric titration experiments to determine optimal amounts for antigen-specific B cell sorting.

[0796] Antigen-Specific B Cell Sorting

[0797] Cells were stained and mixed with DNA-barcoded antigens and other antibodies, and then sorted using fluorescence activated cell sorting (FACS). First, cells were counted, and viability was assessed using trypan blue. Then, cells were washed three times with DPBS supplemented with 0.1% bovine serum albumin (BSA). Cells were resuspended in DPBS-BSA and stained with cell markers including viability dye (Ghost Red 780), CD14-APC-Cy7, CD3-FITC, CD19-BV711, and IgG-PE-Cy5. Additionally, antigen-oligo conjugates were added to the stain. For experiment 1, oligo-labeled SARS-CoV-2 S and three-fold molar excess of oligo-labeled ACE2 was added. For experiment 2, six aliquots of S protein that were each labeled with a unique DNA oligonucleotide were added in a titration series from 5 μg to 0.0016 μg (in 5-fold dilutions). For experiment 3, the same titration series of S was added along with three fold molar excess of ACE2. For experiment 4, SARS-CoV-2 S, SARS-CoV S and three-fold molar excess of oligo-labeled ACE2 was added. The antigen screening library for each of the four experiments also included an influenza virus hemagglutinin and an HIV-1 envelope variant protein as controls.

[0798] After staining in the dark for 30 minutes at room temperature, cells were washed three times with DPBS-BSA at 300×g for five minutes. Cells were then incubated for 15 minutes at room temperature with Streptavidin-PE to label cells with bound antigen. Cells were washed three times with DPBS-BSA, resuspended in DPBS, and sorted by FACS. Antigen positive cells were bulk sorted and delivered to the Vanderbilt Technologies for Advanced Genomics (VANTAGE) sequencing core at an appropriate target concentration for 10× Genomics library preparation and subsequent sequencing. Flow cytometry data were analyzed using FlowJo.

[0799] Sample Preparation, Library Preparation, and Sequencing

[0800] Single-cell suspensions were loaded onto the Chromium Controller microfluidics device (10× Genomics) and processed using the B-cell Single Cell V(D)J solution according to manufacturer's suggestions for a target capture of 10,000-20,000 B cells, with minor modifications to intercept, amplify and purify the antigen barcode libraries1. The 10× Genomics single cell VDJ human B cell assay and target enrichment protocol were completed. cDNA was amplified and additive primers were added to increase the yield of antigen derived transcript products. After cDNA amplification, the antigen derived transcript products were size separated from the mRNA-derived cDNA products using SPRI selection and further purification (per manufacturers protocol). The supernatant fraction contained the antigen-oligo derived cDNA whereas the beads fraction contained the full-length mRNA-derived cDNAs. After purification, the antigen-derived transcripts sequencing library was prepared using a PCR reaction and purified using SPRI purification. The antigen and VDJ libraries were then analyzed, quantified, and sequenced using the Illumina NovaSeq platform.

[0801] Sequence Processing and Bioinformatic Analysis

[0802] This study used the previously described pipeline to use paired-end FASTQ files of oligo libraries as input, process and annotate reads for cell barcode, UMI, and antigen barcode, and generate a cell barcode—antigen barcode UMI count matrix. BCR contigs were processed using Cell Ranger (10× Genomics) using GRCh38 as reference. Antigen barcode libraries were also processed using Cell Ranger (10× Genomics). The overlapping cell barcodes between the two libraries were used as the basis of the subsequent analysis. Cell barcodes were removed that had only non-functional heavy chain sequences as well as cells with multiple functional heavy chain sequences and/or multiple functional light chain sequences, reasoning that these may be multiplets. Additionally, the BCR contigs were aligned (filtered_contigs.fasta file output by Cell Ranger, 10× Genomics) to IMGT reference genes using HighV-Quest. The output of HighV-Quest was parsed using ChangeO and merged with an antigen barcode UMI count matrix. Finally, for experiments 1-3, the LIBRA-seq score was determined for each antigen in the library by calculating the centered-log ratios (CLR) of each antigen UMI count for each cell. A psedo-count of 1 was added to each UMI count and then the CLR was taken for each antigen for each cell. For experiment 4, the LIBRA-seq scores were calculated as previously described. Briefly, the CLR of each antigen UMI count for each cell was calculated and a Z-score transformation was also performed.

[0803] Antibody Expression and Purification

[0804] For each antibody, variable genes were inserted into custom plasmids encoding the constant region for the IgG1 heavy chain as well as respective lambda and kappa light chains (pTwist CMV BetaGlobin WPRE Neo vector, Twist Bioscience). Antibodies were expressed in Expi293F mammalian cells (Thermo Fisher Scientific) by co-transfecting heavy chain and light chain expressing plasmids using polyethylenimine transfection reagent and cultured for 5 to 7 days. Cells were maintained in FreeStyle F17 expression medium supplemented at final concentrations of 0.1% Pluronic Acid F-68 and 20% 4 mM L-Glutamine. These cells were cultured at 37° C. with 8% CO₂ saturation and shaking. After transfection and 5-7 days of culture, cell cultures were centrifuged and supernatant was 0.45 m filtered with Nalgene Rapid Flow Disposable Filter Units with PES membrane. Filtered supernatant was run over a column containing Protein A agarose resin equilibrated with PBS. The column was washed with PBS, and then antibodies were eluted with 100 mM Glycine HCl at 2.7 pH directly into a 1:10 volume of 1M Tris-HCl pH 8.0. Eluted antibodies were buffer exchanged into PBS 3 times using Amicon Ultra-centrifugal filter units and concentrated. Antibody plasmids were sequenced. If antibody sequences did not match expected heavy or light chain, antibody was excluded from downstream analysis.

[0805] Antibody Expression and Purification

[0806] For each antibody, variable genes were inserted into custom plasmids encoding the constant region for the IgG1 heavy chain as well as respective lambda and kappa light chains (pTwist CMV BetaGlobin WPRE Neo vector, Twist Bioscience). Antibodies were expressed in Expi293F mammalian cells (Thermo Fisher Scientific) by co-transfecting heavy chain and light chain expressing plasmids using polyethylenimine transfection reagent and cultured for 5 to 7 days. Cells were maintained in FreeStyle F17 expression medium supplemented at final concentrations of 0.1% Pluronic Acid F-68 and 20% 4 mM L-Glutamine. These cells were cultured at 37° C. with 8% CO₂ saturation and shaking. After transfection and 5-7 days of culture, cell cultures were centrifuged and supernatant was 0.45 m filtered with Nalgene Rapid Flow Disposable Filter Units with PES membrane. Filtered supernatant was run over a column containing Protein A agarose resin equilibrated with PBS. The column was washed with PBS, and then antibodies were eluted with 100 mM Glycine HCl at 2.7 pH directly into a 1:10 volume of 1M Tris-HCl pH 8.0. Eluted antibodies were buffer exchanged into PBS 3 times using Amicon Ultra-centrifugal filter units and concentrated. Antibody plasmids were sequenced. If antibody sequences did not match expected heavy or light chain, antibody was excluded from downstream analysis.

[0807] High-Throughput Antibody Expression

[0808] For high-throughput production of recombinant antibodies, approaches were used that are designated as microscale. For antibody expression, microscale transfection was performed (˜1 mL per antibody) of CHO cell cultures using the Gibco ExpiCHO Expression System and a protocol for deep 96-well blocks (Thermo Fisher Scientific). In brief, synthesized antibody-encoding DNA (˜2 μg per transfection) was added to OptiPro serum free medium (OptiPro SFM), incubated with ExpiFectamine CHO Reagent and added to 800 μL of ExpiCHO cell cultures into 96-deep-well blocks using a ViaFlo 384 liquid handler (Integra Biosciences). The plates were incubated on an orbital shaker at 1,000 r.p.m. with an orbital diameter of 3 mm at 37° C. in 8% CO₂. The next day after transfection, ExpiFectamine CHO Enhancer and ExpiCHO Feed reagents (Thermo Fisher Scientific) were added to the cells, followed by 4 d incubation for a total of 5 d at 37° C. in 8% CO₂. Culture supernatants were collected after centrifuging the blocks at 450×g for 5 min and were stored at 4° C. until use. For high-throughput microscale antibody purification, fritted deep-well plates were used containing 25 μL of settled protein G resin (GE Healthcare Life Sciences) per well. Clarified culture supernatants were incubated with protein G resin for antibody capturing, washed with PBS using a 96-well plate manifold base (Qiagen) connected to the vacuum and eluted into 96-well PCR plates using 86 μL of 0.1 M glycine-HCL buffer pH 2.7. After neutralization with 14 μL of 1 M Tris-HCl pH 8.0, purified antibodies were buffer-exchanged into PBS using Zeba Spin Desalting Plates (Thermo Fisher Scientific) and stored at 4° C. until use.

[0809] ELISA

[0810] To assess antibody binding, soluble protein was plated at 2 μg/mL overnight at 4° C. The next day, plates were washed three times with PBS supplemented with 0.05% Tween-20 (PBS-T) and coated with 5% milk powder in PBS-T. Plates were incubated for one hour at room temperature and then washed three times with PBS-T. Primary antibodies were diluted in 1% milk in PBS-T, starting at 10 μg/mL with a serial 1:5 dilution and then added to the plate. The plates were incubated at room temperature for one hour and then washed three times in PBS-T. The secondary antibody, goat anti-human IgG conjugated to peroxidase, was added at 1:10,000 dilution in 1% milk in PBS-T to the plates, which were incubated for one hour at room temperature. Plates were washed three times with PBS-T and then developed by adding TMB substrate to each well. The plates were incubated at room temperature for ten minutes, and then 1N sulfuric acid was added to stop the reaction. Plates were read at 450 nm.

[0811] Data are represented as mean±SEM for one ELISA experiment. ELISAs were repeated 2 or more times. If ELISA replicates were inconsistent over more than three experiments, antibody was excluded from in vitro characterization analysis. The area under the curve (AUC) was calculated using Prism software version 8.0.0 (GraphPad).

[0812] ACE2 Binding Inhibition Assay

[0813] 96-well plates were coated with 2 μg/mL purified recombinant SARS-CoV-2 at 4° C. overnight. The next day, plates were washed three times with PBS supplemented with 0.05% Tween-20 (PBS-T) and coated with 5% milk powder in PBS-T. Plates were incubated for one hour at room temperature and then washed three times with PBS-T. Purified anti were diluted in blocking buffer at 10 Ug/mL in triplicate, added to the wells, and incubated at room temperature. Without washing, recombinant human ACE2 protein with a mouse Fc tag was added to wells for a final 0.4 μg/mL concentration of ACE2 and incubated for 40 minutes at room temperature. Plates were washed three times with PBS-T, and bound ACE2 was detected using HRP-conjugated anti-mouse Fe antibody and TMB substrate. The plates were incubated at room temperature for ten minutes, and then 1N sulfuric acid was added to stop the reaction. Plates were read at 450 nm. ACE2 binding without antibody served as a control. Experiment was done in biological replicate and technical triplicates.

[0814] BioLayer Interferometry (BLI)

[0815] Purified antibodies were immobilized to AHC sensortips (FortdBio) to a response level of approximately 1.4 nm in a buffer composed of 10 mM HEPES pH 7.5, 150 mM NaCl, 3 mM EDTA, 0.05% Tween 20 and 0.1% (w/v) BSA. Immobilized antibodies were then dipped into wells containing two-fold dilutions of either SARS-CoV-2 RBD-SD1 (residues 306-577) or SARS-CoV-2 NTD, ranging in concentration from 10-0.156 nM, to measure association kinetics. Dissociation kinetics were measured by dipping sensortips into wells containing only buffer. Data were reference subtracted and kinetics were calculated in Octet Data Analysis software v10.0 using a 1:1 binding model.

[0816] RTCA Method for Initial Screening of Antibody Neutralizing Activity

[0817] To screen for neutralizing activity in the panel of recombinantly expressed antibodies, a high-throughput and quantitative RTCA assay and xCeligence RTCA HT Analyzer was used (ACEA Biosciences) that assesses kinetic changes in cell physiology, including virus-induced cytopathic effect (CPE). Twenty PL of cell culture medium (DMEM supplemented with 2% FBS) was added to each well of a 384-well E-plate using a ViaFlo384 liquid handler (Integra Biosciences) to obtain background reading. Six thousand (6,000) Vero-furin cells in 20 μL of cell culture medium were seeded per well, and the plate was placed on the analyzer. Sensograms were visualized using RTCA HT software version 1.0.1 (ACEA Biosciences). For a screening neutralization assay, equal amounts of virus were mixed with micro-scale purified antibodies in a total volume of 40 μL using DMEM supplemented with 2% FBS as a diluent and incubated for 1 h at 37° C. in 5% CO₂. At ˜17-20 h after seeding the cells, the virus-antibody mixtures were added to the cells in 384-well E-plates. Wells containing virus only (in the absence of antibody) and wells containing only Vero cells in medium were included as controls. Plates were measured every 8-12 h for 48-72 h to assess virus neutralization. Micro-scale antibodies were assessed in four 5-fold dilutions (starting from a 1:20 sample dilution), and their concentrations were not normalized. Neutralization was calculated as the percent of maximal cell index in control wells without virus minus cell index in control (virus-only) wells that exhibited maximal CPE at 40-48 h after applying virus—antibody mixture to the cells. An antibody was classified as fully neutralizing if it completely inhibited SARS-CoV-2-induced CPE at the highest tested concentration, while an antibody was classified as partially neutralizing if it delayed but did not fully prevent CPE at the highest tested concentration.

[0818] Real-Time Cell Analysis (RTCA) Neutralization Assay

[0819] To determine neutralizing activity of IgG, real-time cell analysis (RTCA) assay was used on an xCELLigence RTCA MP Analyzer (ACEA Biosciences Inc.) that measures virus-induced cytopathic effect (CPE). Briefly, 50 μL of cell culture medium (DMEM supplemented with 2% FBS) was added to each well of a 96-well E-plate using a ViaFlo384 liquid handler (Integra Biosciences) to obtain background reading. A suspension of 18,000 Vero-E6 cells in 50 μL of cell culture medium was seeded in each well, and the plate was placed on the analyzer. Measurements were taken automatically every 15 min, and the sensograms were visualized using RTCA software version 2.1.0 (ACEA Biosciences Inc). VSV-SARS-CoV-2 (0.01 MOI, ˜120 PFU per well) was mixed 1:1 with a dilution of antibody in a total volume of 100 μL using DMEM supplemented with 2% FBS as a diluent and incubated for 1 h at 37° C. in 5% CO₂. At 16 h after seeding the cells, the virus-antibody mixtures were added in replicates to the cells in 96-well E-plates. Triplicate wells containing virus only (maximal CPE in the absence of antibody) and wells containing only Vero cells in medium (no-CPE wells) were included as controls. Plates were measured continuously (every 15 min) for 48 h to assess virus neutralization. Normalized cellular index (CI) values at the endpoint (48 h after incubation with the virus) were determined using the RTCA software version 2.1.0 (ACEA Biosciences Inc.). Results are expressed as percent neutralization in a presence of respective antibody relative to control wells with no CPE minus CI values from control wells with maximum CPE. RTCA IC₅₀ values were determined by nonlinear regression analysis using Prism software.

[0820] Plaque Reduction Neutralization Test (PRNT)

[0821] The virus neutralization with live authentic SARS-CoV-2 virus (USA-WA1) was performed in the BSL-3 facility of the Galveston National Laboratory using Vero E6 cells (ATCC CRL-1586) following the standard procedure. Vero 1E6 cells were cultured in 96-well plates (10 cells/well). Next day, 4-fold serial dilutions of antibodies were made using MEM-2% FBS, as to get an initial concentration of 100 μg/mL. Equal volume of diluted antibodies (60 μL) were mixed gently with original SARS-CoV-2 (USA-WA1) (60 p L containing 200 pfu) and incubated for 1 h at 37° C./5% CO₂ atmosphere. The virus-serum mixture (100 μL) was added to cell monolayer in duplicates and incubated for 1 at h 37° C./5% CO₂ atmosphere. Later, the virus-serum mixture was discarded gently, and cell monolayer was overlaid with 0.6% methylcellulose and incubated for 2 days. The overlay was removed, and the plates were fixed in 4% paraformaldehyde twice following BSL-3 protocol. The plates were stained with 1% crystal violet and virus-induced plaques were counted. The percent neutralization and/or NT₅₀ of antibody was calculated by dividing the plaques counted at each dilution with plaques of virus-only control. For antibodies, the inhibitory concentration at 50% (IC₅₀) values were calculated in Prism software (GraphPad) by plotting the midway point between the upper and lower plateaus of the neutralization curve among dilutions. The Alpha variant virus incorporates the following substitutions: Del 69-70, Del 144, E484K, N501Y, A570D, D614G, P681H, T716I, S982A, D1118H. The Beta variant incorporates the following substitutions: Del 24, Del 242-243, D80A, D215G, K417N, E484K, N501Y, D614G, H665Y, T1027I. The Gamma variant incorporates the following substitutions: L18F, T20N, P26S, D138Y, R190S, K417T, E484K, N501Y, D614G, H655Y, T1027I. The Delta variant incorporates the following substitutions: T19R, G142D, Del 156-157, R158G, L452R, T478K, D614G, P681R, Del 689-691, D950N; the deletion at positions 689-691 has not been observed in nature, and was identified upon one passage of the virus.

[0822] Fab Preparation

[0823] To generate Fabs, IgGs were incubated with Lys-C at 1:4,000 (weight:weight) overnight at 37° C. EDTA free protease inhibitor (Roche) was dissolved to 25× and then added to the sample at a final 1× concentration. The sample was passed over a Protein A column. The flow-through was collected run on a Superdex 200 Increase 10/300 GL Sizing column on the AKTA FPLC system. Fabs were visualized on SDS-PAGE.

[0824] Biolayer Interferometry

[0825] Purified mAbs were immobilized to AHC sensortips (FortdBio) to a response level of approximately 1.4 nm in a buffer composed of 10 mM HEPES pH 7.5, 150 mM NaCl, 3 mM EDTA, 0.05% Tween 20 and 0.1% (w/v) BSA. Immobilized mAbs were then dipped into wells containing two-fold dilutions of either SARS-CoV-2 RBD-SD1 or SARS-CoV-2 NTD, ranging in concentration from 10-0.15625 nM, to measure association. Dissociation was measured by dipping sensortips into wells containing only running buffer. Data were reference subtracted and kinetics were calculated in Octet Data Analysis software v10.0 using a 1:1 binding model.

[0826] Electron Microscopy Sample Preparation and Data Collection

[0827] Purified SARS-CoV-2 S HexaPro ectodomain and Fabs 5317-4 and 5317-10 were combined at a final complex concentration of 0.4 mg/mL. Fab 5317-10 was added to spike and incubated on ice for 30 minutes before the addition of Fab 5317-4 immediately prior to grid deposition and freezing. The complex was deposited on Au-300 1.2/1.3 grids that had been plasma cleaned for 4 minutes in a Solarus 950 plasma cleaner (Gatan) with a 4:1 ratio of O₂/H₂. Excess liquid was blotted for 3 seconds with a force of −4 using a Vitrobot Mark IV (Thermo Fisher) and plunge frozen into liquid ethane. 2,655 micrographs were collected from a single grid with the stage at a 300 tilt using a Titan Krios (Thermo Fisher) equipped with a K3 detector (Gatan). Movies were collected using SerialEM at 29,000× magnification with a corresponding calibrated pixel size of 0.81 Å/pixel.

[0828] Cryogenic Electron Microscopy (Cryo-EM)

[0829] Motion correction, CTF estimation, particle picking, and 2D classification were performed using cryoSPARC v3.2.0. The final iteration of 2D class averaging distributed 17,710 particles into 50 classes using an uncertainty factor of 3. From that, 13,232 particles were selected and an ab into reconstruction was performed with four classes followed by heterogeneous refinement of those four classes. 6,803 particles from the highest-quality class were used for homogenous refinement of the best volume without imposed symmetry. The resulting volume was used for an additional round of homogenous refinement. To filter out additional junk particles, an ab initio reconstruction was performed with three classes followed by heterogeneous refinement of those three classes. 5,171 particles from the highest-quality class were used for homogenous refinement of the best volume without imposed symmetry, resulting in a final 9 Å map.

[0830] Quantification and Statistical Analysis

[0831] ELISA error bars (standard error of the mean) were calculated using GraphPad Prism version 8.0.0. Spearman r correlation was performed using GraphPad Prism 8.0.0. ANOVA analysis was performed for neutralization potency comparisons using GraphPad Prism version 8.0.0.

[0832] In the examples above, large numbers of antibody sequences were determined (see sequences provided below). The following paired heavy chain and light chain sequences are used herein for methods of treating, preventing, or detecting coronavirus infections.

TABLE 1
Paired heavy and light chains and the CDRs thereof.

| Ab of | Cell Barcode | V-D-J- | | | | Cell Barcode | V-J- | | | |
|---|---|---|---|---|---|---|---|---|---|---|
| Special | and Heavy | REGION | CDRH1 | CDRH2 | CDRH3 | and Light | REGION | CDRL1 | CDRL2 | CDRL3 |
| Interest | Chain (HC) | (HC) SEQ | SEQ | SEQ | SEQ | Chain (LC) | (LC) SEQ | SEQ | SEQ | SEQ |
| Name | designation | ID NO | ID NO | ID NO | ID NO | designation | ID NO | ID NO | ID NO | ID NO |
| 5317-1 | TGAGGGAGTT | 2400 | 4056 | 4884 | 5712 | TGAGGGAGTT | 3228 | 6540 | 7368 | 8196 |
| | GTGGCC.HC | | | | | GTGGCC.LC | | | | |
| 5317-2 | GAGCAGACA | 2135 | 3791 | 4619 | 5447 | GAGCAGACA | 2963 | 6275 | 7103 | 7931 |
| | CGGCGTT.HC | | | | | CGGCGTT.LC | | | | |
| 5317-3 | GCGCCAAAG | 2202 | 3858 | 4686 | 5514 | GCGCCAAAG | 3030 | 6342 | 7170 | 7998 |
| | GGCTTCC.HC | | | | | GGCTTCC.LC | | | | |
| 5317-4 | CTAATGGAGC | 2024 | 3680 | 4508 | 5336 | CTAATGGAGC | 2852 | 6164 | 6992 | 7820 |
| | TAACTC.HC | | | | | TAACTC.LC | | | | |
| 5317-5 | GCGCAGTTCA | 2200 | 3856 | 4684 | 5512 | GCGCAGTTCA | 3028 | 6340 | 7168 | 7996 |
| | GCTGGC.HC | | | | | GCTGGC.LC | | | | |
| 5317-6 | ACAGCCGAG | 1699 | 3355 | 4183 | 5011 | ACAGCCGAG | 2527 | 5839 | 6667 | 7495 |
| | AACAACT.HC | | | | | AACAACT.LC | | | | |
| 5317-7 | CTCACACGTA | 2041 | 3697 | 4525 | 5353 | CTCACACGTA | 2869 | 6181 | 7009 | 7837 |
| | AGGGCT.HC | | | | | AGGGCT.LC | | | | |
| 5317-8 | CAACTAGCAT | 1825 | 3481 | 4309 | 5137 | CAACTAGCAT | 2653 | 5965 | 6793 | 7621 |
| | ACGCTA.HC | | | | | ACGCTA.LC | | | | |
| 5317-9 | GGAGCAAGTT | 2240 | 3896 | 4724 | 5552 | GGAGCAAGTT | 3068 | 6380 | 7208 | 8036 |
| | ATCCGA.HC | | | | | ATCCGA.LC | | | | |
| 5317-10 | CGTCAGGAG | 2011 | 3667 | 4495 | 5323 | CGTCAGGAG | 2839 | 6151 | 6979 | 7807 |
| | ACTAGGC.HC | | | | | ACTAGGC.LC | | | | |
| 53181-1 | TGGACGCCAT | 10710 | 12368 | 13197 | 14026 | TGGACGCCAT | 11539 | 14855 | 15684 | 16513 |
| | GACGGA.HC | | | | | GACGGA.LC | | | | |
| 53181-2 | AAGGAGCAG | 9963 | 11621 | 12450 | 13279 | AAGGAGCAG | 10792 | 14108 | 14937 | 15766 |
| | GGATGGG.HC | | | | | GGATGGG.LC | | | | |
| 53181-3 | AGGTCATTCT | 10084 | 11742 | 12571 | 13400 | AGGTCATTCT | 10913 | 14229 | 15058 | 15887 |
| | GCTTGC.HC | | | | | GCTTGC.LC | | | | |
| 53181-4 | AAACCTGTCG | 9940 | 11598 | 12427 | 13256 | AAACCTGTCG | 10769 | 14085 | 14914 | 15743 |
| | GCGCAT.HC | | | | | GCGCAT.LC | | | | |
| 53181-5 | TACTTACAGT | 10604 | 12262 | 13091 | 13920 | TACTTACAGT | 11433 | 14749 | 15578 | 16407 |
| | GGAGAA.HC | | | | | GGAGAA.LC | | | | |
| 53181-6 | CTCGAGGTCG | 10337 | 11995 | 12824 | 13653 | CTCGAGGTCG | 11166 | 14482 | 15311 | 16140 |
| | CCCTTA.HC | | | | | CCCTTA.LC | | | | |
| 53181-7 | GGGAATGAG | 10506 | 12164 | 12993 | 13822 | GGGAATGAG | 11335 | 14651 | 15480 | 16309 |
| | GGCTTGA.HC | | | | | GGCTTGA.LC | | | | |
| 53181-8 | AGTGGGAAG | 10094 | 11752 | 12581 | 13410 | AGTGGGAAG | 10923 | 14239 | 15068 | 15897 |
| | TGACTCT.HC | | | | | TGACTCT.LC | | | | |
| 53181-9 | CCTACCAGTT | 10230 | 11888 | 12717 | 13546 | CCTACCAGTT | 11059 | 14375 | 15204 | 16033 |
| | CGTGAT.HC | | | | | CGTGAT.LC | | | | |
| 53182-1 | TAAGTGCTCA | 19216 | 20173 | 21130 | 22087 | TAAGTGCTCA | 23044 | 24001 | 24958 | 25915 |
| | CAATGC.HC | | | | | CAATGC.LC | | | | |
| 53182-2 | GGCTCGAAG | 19108 | 20065 | 21022 | 21979 | GGCTCGAAG | 22936 | 23893 | 24850 | 25807 |
| | AGTAATC.HC | | | | | AGTAATC.LC | | | | |
| 53182-3 | GTAGTCACAT | 19158 | 20115 | 21072 | 22029 | GTAGTCACAT | 22986 | 23943 | 24900 | 25857 |
| | GGAATA.HC | | | | | GGAATA.LC | | | | |
| 53182-4 | CTAAGACAGT | 18916 | 19873 | 20830 | 21787 | CTAAGACAGT | 22744 | 23701 | 24658 | 25615 |
| | GCAAGC.HC | | | | | GCAAGC.LC | | | | |
| 53182-5 | CTGCTGTGTC | 18966 | 19923 | 20880 | 21837 | CTGCTGTGTC | 22794 | 23751 | 24708 | 25665 |
| | TTGTCC.HC | | | | | TTGTCC.LC | | | | |
| 53182-6 | AACACGTGTG | 18501 | 19458 | 20415 | 21372 | AACACGTGTG | 22329 | 23286 | 24243 | 25200 |
| | ACCAAG.HC | | | | | ACCAAG.LC | | | | |
| 53182-7 | TCACGAATCA | 19278 | 20235 | 21192 | 22149 | TCACGAATCA | 23106 | 24063 | 25020 | 25977 |
| | GAGGTG.HC | | | | | GAGGTG.LC | | | | |
| 53182-8 | CGTCAGGCAG | 18901 | 19858 | 20815 | 21772 | CGTCAGGCAG | 22729 | 23686 | 24643 | 25600 |
| | GAACGT.HC | | | | | GAACGT.LC | | | | |
| 53182-9 | CATGCCTGTA | 18778 | 19735 | 20692 | 21649 | CATGCCTGTA | 22606 | 23563 | 24520 | 25477 |
| | CGACCC.HC | | | | | CGACCC.LC | | | | |
| 53182-10 | CTAGCCTAGA | 18930 | 19887 | 20844 | 21801 | CTAGCCTAGA | 22758 | 23715 | 24672 | 25629 |
| | AAGTGG.HC | | | | | AAGTGG.LC | | | | |
| 53182-11 | ATCATCTGTIT | 18657 | 19614 | 20571 | 21528 | ATCATCTGTTT | 22485 | 23442 | 24399 | 25356 |
| | GTGTG.HC | | | | | GTGTG.LC | | | | |

TABLE 2
Additional paired heavy and light chains and the CDRs thereof

| SEQ ID NO of | | | | | SEQ ID NO of | | | | |
|---|---|---|---|---|---|---|---|---|---|
| Cell Barcode | | | | | Cell Barcode | | | | |
| and Heavy | VH | CDRH1 | CDRH2 | CDRH3 | and Light | VL | CDRL1 | CDRL2 | CDRL3 |
| Chain (HC) | SEQ ID | SEQ ID | SEQ ID | SEQ ID | Chain (LC) | SEQ ID | SEQ ID | SEQ ID | SEQ ID |
| designation | NO | NO | NO | NO | designation | NO | NO | NO | NO |
| 1 | 1657 | 3313 | 4141 | 4969 | 2 | 2485 | 5797 | 6625 | 7453 |
| 3 | 1658 | 3314 | 4142 | 4970 | 4 | 2486 | 5798 | 6626 | 7454 |
| 5 | 1659 | 3315 | 4143 | 4971 | 6 | 2487 | 5799 | 6627 | 7455 |
| 7 | 1660 | 3316 | 4144 | 4972 | 8 | 2488 | 5800 | 6628 | 7456 |
| 9 | 1661 | 3317 | 4145 | 4973 | 10 | 2489 | 5801 | 6629 | 7457 |
| 11 | 1662 | 3318 | 4146 | 4974 | 12 | 2490 | 5802 | 6630 | 7458 |
| 13 | 1663 | 3319 | 4147 | 4975 | 14 | 2491 | 5803 | 6631 | 7459 |
| 15 | 1664 | 3320 | 4148 | 4976 | 16 | 2492 | 5804 | 6632 | 7460 |
| 17 | 1665 | 3321 | 4149 | 4977 | 18 | 2493 | 5805 | 6633 | 7461 |
| 19 | 1666 | 3322 | 4150 | 4978 | 20 | 2494 | 5806 | 6634 | 7462 |
| 21 | 1667 | 3323 | 4151 | 4979 | 22 | 2495 | 5807 | 6635 | 7463 |
| 23 | 1668 | 3324 | 4152 | 4980 | 24 | 2496 | 5808 | 6636 | 7464 |
| 25 | 1669 | 3325 | 4153 | 4981 | 26 | 2497 | 5809 | 6637 | 7465 |
| 27 | 1670 | 3326 | 4154 | 4982 | 28 | 2498 | 5810 | 6638 | 7466 |
| 29 | 1671 | 3327 | 4155 | 4983 | 30 | 2499 | 5811 | 6639 | 7467 |
| 31 | 1672 | 3328 | 4156 | 4984 | 32 | 2500 | 5812 | 6640 | 7468 |
| 33 | 1673 | 3329 | 4157 | 4985 | 34 | 2501 | 5813 | 6641 | 7469 |
| 35 | 1674 | 3330 | 4158 | 4986 | 36 | 2502 | 5814 | 6642 | 7470 |
| 37 | 1675 | 3331 | 4159 | 4987 | 38 | 2503 | 5815 | 6643 | 7471 |
| 39 | 1676 | 3332 | 4160 | 4988 | 40 | 2504 | 5816 | 6644 | 7472 |
| 41 | 1677 | 3333 | 4161 | 4989 | 42 | 2505 | 5817 | 6645 | 7473 |
| 43 | 1678 | 3334 | 4162 | 4990 | 44 | 2506 | 5818 | 6646 | 7474 |
| 45 | 1679 | 3335 | 4163 | 4991 | 46 | 2507 | 5819 | 6647 | 7475 |
| 47 | 1680 | 3336 | 4164 | 4992 | 48 | 2508 | 5820 | 6648 | 7476 |
| 49 | 1681 | 3337 | 4165 | 4993 | 50 | 2509 | 5821 | 6649 | 7477 |
| 51 | 1682 | 3338 | 4166 | 4994 | 52 | 2510 | 5822 | 6650 | 7478 |
| 53 | 1683 | 3339 | 4167 | 4995 | 54 | 2511 | 5823 | 6651 | 7479 |
| 55 | 1684 | 3340 | 4168 | 4996 | 56 | 2512 | 5824 | 6652 | 7480 |
| 57 | 1685 | 3341 | 4169 | 4997 | 58 | 2513 | 5825 | 6653 | 7481 |
| 59 | 1686 | 3342 | 4170 | 4998 | 60 | 2514 | 5826 | 6654 | 7482 |
| 61 | 1687 | 3343 | 4171 | 4999 | 62 | 2515 | 5827 | 6655 | 7483 |
| 63 | 1688 | 3344 | 4172 | 5000 | 64 | 2516 | 5828 | 6656 | 7484 |
| 65 | 1689 | 3345 | 4173 | 5001 | 66 | 2517 | 5829 | 6657 | 7485 |
| 67 | 1690 | 3346 | 4174 | 5002 | 68 | 2518 | 5830 | 6658 | 7486 |
| 69 | 1691 | 3347 | 4175 | 5003 | 70 | 2519 | 5831 | 6659 | 7487 |
| 71 | 1692 | 3348 | 4176 | 5004 | 72 | 2520 | 5832 | 6660 | 7488 |
| 73 | 1693 | 3349 | 4177 | 5005 | 74 | 2521 | 5833 | 6661 | 7489 |
| 75 | 1694 | 3350 | 4178 | 5006 | 76 | 2522 | 5834 | 6662 | 7490 |
| 77 | 1695 | 3351 | 4179 | 5007 | 78 | 2523 | 5835 | 6663 | 7491 |
| 79 | 1696 | 3352 | 4180 | 5008 | 80 | 2524 | 5836 | 6664 | 7492 |
| 81 | 1697 | 3353 | 4181 | 5009 | 82 | 2525 | 5837 | 6665 | 7493 |
| 83 | 1698 | 3354 | 4182 | 5010 | 84 | 2526 | 5838 | 6666 | 7494 |
| 85 | 1699 | 3355 | 4183 | 5011 | 86 | 2527 | 5839 | 6667 | 7495 |
| 87 | 1700 | 3356 | 4184 | 5012 | 88 | 2528 | 5840 | 6668 | 7496 |
| 89 | 1701 | 3357 | 4185 | 5013 | 90 | 2529 | 5841 | 6669 | 7497 |
| 91 | 1702 | 3358 | 4186 | 5014 | 92 | 2530 | 5842 | 6670 | 7498 |
| 93 | 1703 | 3359 | 4187 | 5015 | 94 | 2531 | 5843 | 6671 | 7499 |
| 95 | 1704 | 3360 | 4188 | 5016 | 96 | 2532 | 5844 | 6672 | 7500 |
| 97 | 1705 | 3361 | 4189 | 5017 | 98 | 2533 | 5845 | 6673 | 7501 |
| 99 | 1706 | 3362 | 4190 | 5018 | 100 | 2534 | 5846 | 6674 | 7502 |
| 101 | 1707 | 3363 | 4191 | 5019 | 102 | 2535 | 5847 | 6675 | 7503 |
| 103 | 1708 | 3364 | 4192 | 5020 | 104 | 2536 | 5848 | 6676 | 7504 |
| 105 | 1709 | 3365 | 4193 | 5021 | 106 | 2537 | 5849 | 6677 | 7505 |
| 107 | 1710 | 3366 | 4194 | 5022 | 108 | 2538 | 5850 | 6678 | 7506 |
| 109 | 1711 | 3367 | 4195 | 5023 | 110 | 2539 | 5851 | 6679 | 7507 |
| 111 | 1712 | 3368 | 4196 | 5024 | 112 | 2540 | 5852 | 6680 | 7508 |
| 113 | 1713 | 3369 | 4197 | 5025 | 114 | 2541 | 5853 | 6681 | 7509 |
| 115 | 1714 | 3370 | 4198 | 5026 | 116 | 2542 | 5854 | 6682 | 7510 |
| 117 | 1715 | 3371 | 4199 | 5027 | 118 | 2543 | 5855 | 6683 | 7511 |
| 119 | 1716 | 3372 | 4200 | 5028 | 120 | 2544 | 5856 | 6684 | 7512 |
| 121 | 1717 | 3373 | 4201 | 5029 | 122 | 2545 | 5857 | 6685 | 7513 |
| 123 | 1718 | 3374 | 4202 | 5030 | 124 | 2546 | 5858 | 6686 | 7514 |
| 125 | 1719 | 3375 | 4203 | 5031 | 126 | 2547 | 5859 | 6687 | 7515 |
| 127 | 1720 | 3376 | 4204 | 5032 | 128 | 2548 | 5860 | 6688 | 7516 |
| 129 | 1721 | 3377 | 4205 | 5033 | 130 | 2549 | 5861 | 6689 | 7517 |
| 131 | 1722 | 3378 | 4206 | 5034 | 132 | 2550 | 5862 | 6690 | 7518 |
| 133 | 1723 | 3379 | 4207 | 5035 | 134 | 2551 | 5863 | 6691 | 7519 |
| 135 | 1724 | 3380 | 4208 | 5036 | 136 | 2552 | 5864 | 6692 | 7520 |
| 137 | 1725 | 3381 | 4209 | 5037 | 138 | 2553 | 5865 | 6693 | 7521 |
| 139 | 1726 | 3382 | 4210 | 5038 | 140 | 2554 | 5866 | 6694 | 7522 |
| 141 | 1727 | 3383 | 4211 | 5039 | 142 | 2555 | 5867 | 6695 | 7523 |
| 143 | 1728 | 3384 | 4212 | 5040 | 144 | 2556 | 5868 | 6696 | 7524 |
| 145 | 1729 | 3385 | 4213 | 5041 | 146 | 2557 | 5869 | 6697 | 7525 |
| 147 | 1730 | 3386 | 4214 | 5042 | 148 | 2558 | 5870 | 6698 | 7526 |
| 149 | 1731 | 3387 | 4215 | 5043 | 150 | 2559 | 5871 | 6699 | 7527 |
| 151 | 1732 | 3388 | 4216 | 5044 | 152 | 2560 | 5872 | 6700 | 7528 |
| 153 | 1733 | 3389 | 4217 | 5045 | 154 | 2561 | 5873 | 6701 | 7529 |
| 155 | 1734 | 3390 | 4218 | 5046 | 156 | 2562 | 5874 | 6702 | 7530 |
| 157 | 1735 | 3391 | 4219 | 5047 | 158 | 2563 | 5875 | 6703 | 7531 |
| 159 | 1736 | 3392 | 4220 | 5048 | 160 | 2564 | 5876 | 6704 | 7532 |
| 161 | 1737 | 3393 | 4221 | 5049 | 162 | 2565 | 5877 | 6705 | 7533 |
| 163 | 1738 | 3394 | 4222 | 5050 | 164 | 2566 | 5878 | 6706 | 7534 |
| 165 | 1739 | 3395 | 4223 | 5051 | 166 | 2567 | 5879 | 6707 | 7535 |
| 167 | 1740 | 3396 | 4224 | 5052 | 168 | 2568 | 5880 | 6708 | 7536 |
| 169 | 1741 | 3397 | 4225 | 5053 | 170 | 2569 | 5881 | 6709 | 7537 |
| 171 | 1742 | 3398 | 4226 | 5054 | 172 | 2570 | 5882 | 6710 | 7538 |
| 173 | 1743 | 3399 | 4227 | 5055 | 174 | 2571 | 5883 | 6711 | 7539 |
| 175 | 1744 | 3400 | 4228 | 5056 | 176 | 2572 | 5884 | 6712 | 7540 |
| 177 | 1745 | 3401 | 4229 | 5057 | 178 | 2573 | 5885 | 6713 | 7541 |
| 179 | 1746 | 3402 | 4230 | 5058 | 180 | 2574 | 5886 | 6714 | 7542 |
| 181 | 1747 | 3403 | 4231 | 5059 | 182 | 2575 | 5887 | 6715 | 7543 |
| 183 | 1748 | 3404 | 4232 | 5060 | 184 | 2576 | 5888 | 6716 | 7544 |
| 185 | 1749 | 3405 | 4233 | 5061 | 186 | 2577 | 5889 | 6717 | 7545 |
| 187 | 1750 | 3406 | 4234 | 5062 | 188 | 2578 | 5890 | 6718 | 7546 |
| 189 | 1751 | 3407 | 4235 | 5063 | 190 | 2579 | 5891 | 6719 | 7547 |
| 191 | 1752 | 3408 | 4236 | 5064 | 192 | 2580 | 5892 | 6720 | 7548 |
| 193 | 1753 | 3409 | 4237 | 5065 | 194 | 2581 | 5893 | 6721 | 7549 |
| 195 | 1754 | 3410 | 4238 | 5066 | 196 | 2582 | 5894 | 6722 | 7550 |
| 197 | 1755 | 3411 | 4239 | 5067 | 198 | 2583 | 5895 | 6723 | 7551 |
| 199 | 1756 | 3412 | 4240 | 5068 | 200 | 2584 | 5896 | 6724 | 7552 |
| 201 | 1757 | 3413 | 4241 | 5069 | 202 | 2585 | 5897 | 6725 | 7553 |
| 203 | 1758 | 3414 | 4242 | 5070 | 204 | 2586 | 5898 | 6726 | 7554 |
| 205 | 1759 | 3415 | 4243 | 5071 | 206 | 2587 | 5899 | 6727 | 7555 |
| 207 | 1760 | 3416 | 4244 | 5072 | 208 | 2588 | 5900 | 6728 | 7556 |
| 209 | 1761 | 3417 | 4245 | 5073 | 210 | 2589 | 5901 | 6729 | 7557 |
| 211 | 1762 | 3418 | 4246 | 5074 | 212 | 2590 | 5902 | 6730 | 7558 |
| 213 | 1763 | 3419 | 4247 | 5075 | 214 | 2591 | 5903 | 6731 | 7559 |
| 215 | 1764 | 3420 | 4248 | 5076 | 216 | 2592 | 5904 | 6732 | 7560 |
| 217 | 1765 | 3421 | 4249 | 5077 | 218 | 2593 | 5905 | 6733 | 7561 |
| 219 | 1766 | 3422 | 4250 | 5078 | 220 | 2594 | 5906 | 6734 | 7562 |
| 221 | 1767 | 3423 | 4251 | 5079 | 222 | 2595 | 5907 | 6735 | 7563 |
| 223 | 1768 | 3424 | 4252 | 5080 | 224 | 2596 | 5908 | 6736 | 7564 |
| 225 | 1769 | 3425 | 4253 | 5081 | 226 | 2597 | 5909 | 6737 | 7565 |
| 227 | 1770 | 3426 | 4254 | 5082 | 228 | 2598 | 5910 | 6738 | 7566 |
| 229 | 1771 | 3427 | 4255 | 5083 | 230 | 2599 | 5911 | 6739 | 7567 |
| 231 | 1772 | 3428 | 4256 | 5084 | 232 | 2600 | 5912 | 6740 | 7568 |
| 233 | 1773 | 3429 | 4257 | 5085 | 234 | 2601 | 5913 | 6741 | 7569 |
| 235 | 1774 | 3430 | 4258 | 5086 | 236 | 2602 | 5914 | 6742 | 7570 |
| 237 | 1775 | 3431 | 4259 | 5087 | 238 | 2603 | 5915 | 6743 | 7571 |
| 239 | 1776 | 3432 | 4260 | 5088 | 240 | 2604 | 5916 | 6744 | 7572 |
| 241 | 1777 | 3433 | 4261 | 5089 | 242 | 2605 | 5917 | 6745 | 7573 |
| 243 | 1778 | 3434 | 4262 | 5090 | 244 | 2606 | 5918 | 6746 | 7574 |
| 245 | 1779 | 3435 | 4263 | 5091 | 246 | 2607 | 5919 | 6747 | 7575 |
| 247 | 1780 | 3436 | 4264 | 5092 | 248 | 2608 | 5920 | 6748 | 7576 |
| 249 | 1781 | 3437 | 4265 | 5093 | 250 | 2609 | 5921 | 6749 | 7577 |
| 251 | 1782 | 3438 | 4266 | 5094 | 252 | 2610 | 5922 | 6750 | 7578 |
| 253 | 1783 | 3439 | 4267 | 5095 | 254 | 2611 | 5923 | 6751 | 7579 |
| 255 | 1784 | 3440 | 4268 | 5096 | 256 | 2612 | 5924 | 6752 | 7580 |
| 257 | 1785 | 3441 | 4269 | 5097 | 258 | 2613 | 5925 | 6753 | 7581 |
| 259 | 1786 | 3442 | 4270 | 5098 | 260 | 2614 | 5926 | 6754 | 7582 |
| 261 | 1787 | 3443 | 4271 | 5099 | 262 | 2615 | 5927 | 6755 | 7583 |
| 263 | 1788 | 3444 | 4272 | 5100 | 264 | 2616 | 5928 | 6756 | 7584 |
| 265 | 1789 | 3445 | 4273 | 5101 | 266 | 2617 | 5929 | 6757 | 7585 |
| 267 | 1790 | 3446 | 4274 | 5102 | 268 | 2618 | 5930 | 6758 | 7586 |
| 269 | 1791 | 3447 | 4275 | 5103 | 270 | 2619 | 5931 | 6759 | 7587 |
| 271 | 1792 | 3448 | 4276 | 5104 | 272 | 2620 | 5932 | 6760 | 7588 |
| 273 | 1793 | 3449 | 4277 | 5105 | 274 | 2621 | 5933 | 6761 | 7589 |
| 275 | 1794 | 3450 | 4278 | 5106 | 276 | 2622 | 5934 | 6762 | 7590 |
| 277 | 1795 | 3451 | 4279 | 5107 | 278 | 2623 | 5935 | 6763 | 7591 |
| 279 | 1796 | 3452 | 4280 | 5108 | 280 | 2624 | 5936 | 6764 | 7592 |
| 281 | 1797 | 3453 | 4281 | 5109 | 282 | 2625 | 5937 | 6765 | 7593 |
| 283 | 1798 | 3454 | 4282 | 5110 | 284 | 2626 | 5938 | 6766 | 7594 |
| 285 | 1799 | 3455 | 4283 | 5111 | 286 | 2627 | 5939 | 6767 | 7595 |
| 287 | 1800 | 3456 | 4284 | 5112 | 288 | 2628 | 5940 | 6768 | 7596 |
| 289 | 1801 | 3457 | 4285 | 5113 | 290 | 2629 | 5941 | 6769 | 7597 |
| 291 | 1802 | 3458 | 4286 | 5114 | 292 | 2630 | 5942 | 6770 | 7598 |
| 293 | 1803 | 3459 | 4287 | 5115 | 294 | 2631 | 5943 | 6771 | 7599 |
| 295 | 1804 | 3460 | 4288 | 5116 | 296 | 2632 | 5944 | 6772 | 7600 |
| 297 | 1805 | 3461 | 4289 | 5117 | 298 | 2633 | 5945 | 6773 | 7601 |
| 299 | 1806 | 3462 | 4290 | 5118 | 300 | 2634 | 5946 | 6774 | 7602 |
| 301 | 1807 | 3463 | 4291 | 5119 | 302 | 2635 | 5947 | 6775 | 7603 |
| 303 | 1808 | 3464 | 4292 | 5120 | 304 | 2636 | 5948 | 6776 | 7604 |
| 305 | 1809 | 3465 | 4293 | 5121 | 306 | 2637 | 5949 | 6777 | 7605 |
| 307 | 1810 | 3466 | 4294 | 5122 | 308 | 2638 | 5950 | 6778 | 7606 |
| 309 | 1811 | 3467 | 4295 | 5123 | 310 | 2639 | 5951 | 6779 | 7607 |
| 311 | 1812 | 3468 | 4296 | 5124 | 312 | 2640 | 5952 | 6780 | 7608 |
| 313 | 1813 | 3469 | 4297 | 5125 | 314 | 2641 | 5953 | 6781 | 7609 |
| 315 | 1814 | 3470 | 4298 | 5126 | 316 | 2642 | 5954 | 6782 | 7610 |
| 317 | 1815 | 3471 | 4299 | 5127 | 318 | 2643 | 5955 | 6783 | 7611 |
| 319 | 1816 | 3472 | 4300 | 5128 | 320 | 2644 | 5956 | 6784 | 7612 |
| 321 | 1817 | 3473 | 4301 | 5129 | 322 | 2645 | 5957 | 6785 | 7613 |
| 323 | 1818 | 3474 | 4302 | 5130 | 324 | 2646 | 5958 | 6786 | 7614 |
| 325 | 1819 | 3475 | 4303 | 5131 | 326 | 2647 | 5959 | 6787 | 7615 |
| 327 | 1820 | 3476 | 4304 | 5132 | 328 | 2648 | 5960 | 6788 | 7616 |
| 329 | 1821 | 3477 | 4305 | 5133 | 330 | 2649 | 5961 | 6789 | 7617 |
| 331 | 1822 | 3478 | 4306 | 5134 | 332 | 2650 | 5962 | 6790 | 7618 |
| 333 | 1823 | 3479 | 4307 | 5135 | 334 | 2651 | 5963 | 6791 | 7619 |
| 335 | 1824 | 3480 | 4308 | 5136 | 336 | 2652 | 5964 | 6792 | 7620 |
| 337 | 1825 | 3481 | 4309 | 5137 | 338 | 2653 | 5965 | 6793 | 7621 |
| 339 | 1826 | 3482 | 4310 | 5138 | 340 | 2654 | 5966 | 6794 | 7622 |
| 341 | 1827 | 3483 | 4311 | 5139 | 342 | 2655 | 5967 | 6795 | 7623 |
| 343 | 1828 | 3484 | 4312 | 5140 | 344 | 2656 | 5968 | 6796 | 7624 |
| 345 | 1829 | 3485 | 4313 | 5141 | 346 | 2657 | 5969 | 6797 | 7625 |
| 347 | 1830 | 3486 | 4314 | 5142 | 348 | 2658 | 5970 | 6798 | 7626 |
| 349 | 1831 | 3487 | 4315 | 5143 | 350 | 2659 | 5971 | 6799 | 7627 |
| 351 | 1832 | 3488 | 4316 | 5144 | 352 | 2660 | 5972 | 6800 | 7628 |
| 353 | 1833 | 3489 | 4317 | 5145 | 354 | 2661 | 5973 | 6801 | 7629 |
| 355 | 1834 | 3490 | 4318 | 5146 | 356 | 2662 | 5974 | 6802 | 7630 |
| 357 | 1835 | 3491 | 4319 | 5147 | 358 | 2663 | 5975 | 6803 | 7631 |
| 359 | 1836 | 3492 | 4320 | 5148 | 360 | 2664 | 5976 | 6804 | 7632 |
| 361 | 1837 | 3493 | 4321 | 5149 | 362 | 2665 | 5977 | 6805 | 7633 |
| 363 | 1838 | 3494 | 4322 | 5150 | 364 | 2666 | 5978 | 6806 | 7634 |
| 365 | 1839 | 3495 | 4323 | 5151 | 366 | 2667 | 5979 | 6807 | 7635 |
| 367 | 1840 | 3496 | 4324 | 5152 | 368 | 2668 | 5980 | 6808 | 7636 |
| 369 | 1841 | 3497 | 4325 | 5153 | 370 | 2669 | 5981 | 6809 | 7637 |
| 371 | 1842 | 3498 | 4326 | 5154 | 372 | 2670 | 5982 | 6810 | 7638 |
| 373 | 1843 | 3499 | 4327 | 5155 | 374 | 2671 | 5983 | 6811 | 7639 |
| 375 | 1844 | 3500 | 4328 | 5156 | 376 | 2672 | 5984 | 6812 | 7640 |
| 377 | 1845 | 3501 | 4329 | 5157 | 378 | 2673 | 5985 | 6813 | 7641 |
| 379 | 1846 | 3502 | 4330 | 5158 | 380 | 2674 | 5986 | 6814 | 7642 |
| 381 | 1847 | 3503 | 4331 | 5159 | 382 | 2675 | 5987 | 6815 | 7643 |
| 383 | 1848 | 3504 | 4332 | 5160 | 384 | 2676 | 5988 | 6816 | 7644 |
| 385 | 1849 | 3505 | 4333 | 5161 | 386 | 2677 | 5989 | 6817 | 7645 |
| 387 | 1850 | 3506 | 4334 | 5162 | 388 | 2678 | 5990 | 6818 | 7646 |
| 389 | 1851 | 3507 | 4335 | 5163 | 390 | 2679 | 5991 | 6819 | 7647 |
| 391 | 1852 | 3508 | 4336 | 5164 | 392 | 2680 | 5992 | 6820 | 7648 |
| 393 | 1853 | 3509 | 4337 | 5165 | 394 | 2681 | 5993 | 6821 | 7649 |
| 395 | 1854 | 3510 | 4338 | 5166 | 396 | 2682 | 5994 | 6822 | 7650 |
| 397 | 1855 | 3511 | 4339 | 5167 | 398 | 2683 | 5995 | 6823 | 7651 |
| 399 | 1856 | 3512 | 4340 | 5168 | 400 | 2684 | 5996 | 6824 | 7652 |
| 401 | 1857 | 3513 | 4341 | 5169 | 402 | 2685 | 5997 | 6825 | 7653 |
| 403 | 1858 | 3514 | 4342 | 5170 | 404 | 2686 | 5998 | 6826 | 7654 |
| 405 | 1859 | 3515 | 4343 | 5171 | 406 | 2687 | 5999 | 6827 | 7655 |
| 407 | 1860 | 3516 | 4344 | 5172 | 408 | 2688 | 6000 | 6828 | 7656 |
| 409 | 1861 | 3517 | 4345 | 5173 | 410 | 2689 | 6001 | 6829 | 7657 |
| 411 | 1862 | 3518 | 4346 | 5174 | 412 | 2690 | 6002 | 6830 | 7658 |
| 413 | 1863 | 3519 | 4347 | 5175 | 414 | 2691 | 6003 | 6831 | 7659 |
| 415 | 1864 | 3520 | 4348 | 5176 | 416 | 2692 | 6004 | 6832 | 7660 |
| 417 | 1865 | 3521 | 4349 | 5177 | 418 | 2693 | 6005 | 6833 | 7661 |
| 419 | 1866 | 3522 | 4350 | 5178 | 420 | 2694 | 6006 | 6834 | 7662 |
| 421 | 1867 | 3523 | 4351 | 5179 | 422 | 2695 | 6007 | 6835 | 7663 |
| 423 | 1868 | 3524 | 4352 | 5180 | 424 | 2696 | 6008 | 6836 | 7664 |
| 425 | 1869 | 3525 | 4353 | 5181 | 426 | 2697 | 6009 | 6837 | 7665 |
| 427 | 1870 | 3526 | 4354 | 5182 | 428 | 2698 | 6010 | 6838 | 7666 |
| 429 | 1871 | 3527 | 4355 | 5183 | 430 | 2699 | 6011 | 6839 | 7667 |
| 431 | 1872 | 3528 | 4356 | 5184 | 432 | 2700 | 6012 | 6840 | 7668 |
| 433 | 1873 | 3529 | 4357 | 5185 | 434 | 2701 | 6013 | 6841 | 7669 |
| 435 | 1874 | 3530 | 4358 | 5186 | 436 | 2702 | 6014 | 6842 | 7670 |
| 437 | 1875 | 3531 | 4359 | 5187 | 438 | 2703 | 6015 | 6843 | 7671 |
| 439 | 1876 | 3532 | 4360 | 5188 | 440 | 2704 | 6016 | 6844 | 7672 |
| 441 | 1877 | 3533 | 4361 | 5189 | 442 | 2705 | 6017 | 6845 | 7673 |
| 443 | 1878 | 3534 | 4362 | 5190 | 444 | 2706 | 6018 | 6846 | 7674 |
| 445 | 1879 | 3535 | 4363 | 5191 | 446 | 2707 | 6019 | 6847 | 7675 |
| 447 | 1880 | 3536 | 4364 | 5192 | 448 | 2708 | 6020 | 6848 | 7676 |
| 449 | 1881 | 3537 | 4365 | 5193 | 450 | 2709 | 6021 | 6849 | 7677 |
| 451 | 1882 | 3538 | 4366 | 5194 | 452 | 2710 | 6022 | 6850 | 7678 |
| 453 | 1883 | 3539 | 4367 | 5195 | 454 | 2711 | 6023 | 6851 | 7679 |
| 455 | 1884 | 3540 | 4368 | 5196 | 456 | 2712 | 6024 | 6852 | 7680 |
| 457 | 1885 | 3541 | 4369 | 5197 | 458 | 2713 | 6025 | 6853 | 7681 |
| 459 | 1886 | 3542 | 4370 | 5198 | 460 | 2714 | 6026 | 6854 | 7682 |
| 461 | 1887 | 3543 | 4371 | 5199 | 462 | 2715 | 6027 | 6855 | 7683 |
| 463 | 1888 | 3544 | 4372 | 5200 | 464 | 2716 | 6028 | 6856 | 7684 |
| 465 | 1889 | 3545 | 4373 | 5201 | 466 | 2717 | 6029 | 6857 | 7685 |
| 467 | 1890 | 3546 | 4374 | 5202 | 468 | 2718 | 6030 | 6858 | 7686 |
| 469 | 1891 | 3547 | 4375 | 5203 | 470 | 2719 | 6031 | 6859 | 7687 |
| 471 | 1892 | 3548 | 4376 | 5204 | 472 | 2720 | 6032 | 6860 | 7688 |
| 473 | 1893 | 3549 | 4377 | 5205 | 474 | 2721 | 6033 | 6861 | 7689 |
| 475 | 1894 | 3550 | 4378 | 5206 | 476 | 2722 | 6034 | 6862 | 7690 |
| 477 | 1895 | 3551 | 4379 | 5207 | 478 | 2723 | 6035 | 6863 | 7691 |
| 479 | 1896 | 3552 | 4380 | 5208 | 480 | 2724 | 6036 | 6864 | 7692 |
| 481 | 1897 | 3553 | 4381 | 5209 | 482 | 2725 | 6037 | 6865 | 7693 |
| 483 | 1898 | 3554 | 4382 | 5210 | 484 | 2726 | 6038 | 6866 | 7694 |
| 485 | 1899 | 3555 | 4383 | 5211 | 486 | 2727 | 6039 | 6867 | 7695 |
| 487 | 1900 | 3556 | 4384 | 5212 | 488 | 2728 | 6040 | 6868 | 7696 |
| 489 | 1901 | 3557 | 4385 | 5213 | 490 | 2729 | 6041 | 6869 | 7697 |
| 491 | 1902 | 3558 | 4386 | 5214 | 492 | 2730 | 6042 | 6870 | 7698 |
| 493 | 1903 | 3559 | 4387 | 5215 | 494 | 2731 | 6043 | 6871 | 7699 |
| 495 | 1904 | 3560 | 4388 | 5216 | 496 | 2732 | 6044 | 6872 | 7700 |
| 497 | 1905 | 3561 | 4389 | 5217 | 498 | 2733 | 6045 | 6873 | 7701 |
| 499 | 1906 | 3562 | 4390 | 5218 | 500 | 2734 | 6046 | 6874 | 7702 |
| 501 | 1907 | 3563 | 4391 | 5219 | 502 | 2735 | 6047 | 6875 | 7703 |
| 503 | 1908 | 3564 | 4392 | 5220 | 504 | 2736 | 6048 | 6876 | 7704 |
| 505 | 1909 | 3565 | 4393 | 5221 | 506 | 2737 | 6049 | 6877 | 7705 |
| 507 | 1910 | 3566 | 4394 | 5222 | 508 | 2738 | 6050 | 6878 | 7706 |
| 509 | 1911 | 3567 | 4395 | 5223 | 510 | 2739 | 6051 | 6879 | 7707 |
| 511 | 1912 | 3568 | 4396 | 5224 | 512 | 2740 | 6052 | 6880 | 7708 |
| 513 | 1913 | 3569 | 4397 | 5225 | 514 | 2741 | 6053 | 6881 | 7709 |
| 515 | 1914 | 3570 | 4398 | 5226 | 516 | 2742 | 6054 | 6882 | 7710 |
| 517 | 1915 | 3571 | 4399 | 5227 | 518 | 2743 | 6055 | 6883 | 7711 |
| 519 | 1916 | 3572 | 4400 | 5228 | 520 | 2744 | 6056 | 6884 | 7712 |
| 521 | 1917 | 3573 | 4401 | 5229 | 522 | 2745 | 6057 | 6885 | 7713 |
| 523 | 1918 | 3574 | 4402 | 5230 | 524 | 2746 | 6058 | 6886 | 7714 |
| 525 | 1919 | 3575 | 4403 | 5231 | 526 | 2747 | 6059 | 6887 | 7715 |
| 527 | 1920 | 3576 | 4404 | 5232 | 528 | 2748 | 6060 | 6888 | 7716 |
| 529 | 1921 | 3577 | 4405 | 5233 | 530 | 2749 | 6061 | 6889 | 7717 |
| 531 | 1922 | 3578 | 4406 | 5234 | 532 | 2750 | 6062 | 6890 | 7718 |
| 533 | 1923 | 3579 | 4407 | 5235 | 534 | 2751 | 6063 | 6891 | 7719 |
| 535 | 1924 | 3580 | 4408 | 5236 | 536 | 2752 | 6064 | 6892 | 7720 |
| 537 | 1925 | 3581 | 4409 | 5237 | 538 | 2753 | 6065 | 6893 | 7721 |
| 539 | 1926 | 3582 | 4410 | 5238 | 540 | 2754 | 6066 | 6894 | 7722 |
| 541 | 1927 | 3583 | 4411 | 5239 | 542 | 2755 | 6067 | 6895 | 7723 |
| 543 | 1928 | 3584 | 4412 | 5240 | 544 | 2756 | 6068 | 6896 | 7724 |
| 545 | 1929 | 3585 | 4413 | 5241 | 546 | 2757 | 6069 | 6897 | 7725 |
| 547 | 1930 | 3586 | 4414 | 5242 | 548 | 2758 | 6070 | 6898 | 7726 |
| 549 | 1931 | 3587 | 4415 | 5243 | 550 | 2759 | 6071 | 6899 | 7727 |
| 551 | 1932 | 3588 | 4416 | 5244 | 552 | 2760 | 6072 | 6900 | 7728 |
| 553 | 1933 | 3589 | 4417 | 5245 | 554 | 2761 | 6073 | 6901 | 7729 |
| 555 | 1934 | 3590 | 4418 | 5246 | 556 | 2762 | 6074 | 6902 | 7730 |
| 557 | 1935 | 3591 | 4419 | 5247 | 558 | 2763 | 6075 | 6903 | 7731 |
| 559 | 1936 | 3592 | 4420 | 5248 | 560 | 2764 | 6076 | 6904 | 7732 |
| 561 | 1937 | 3593 | 4421 | 5249 | 562 | 2765 | 6077 | 6905 | 7733 |
| 563 | 1938 | 3594 | 4422 | 5250 | 564 | 2766 | 6078 | 6906 | 7734 |
| 565 | 1939 | 3595 | 4423 | 5251 | 566 | 2767 | 6079 | 6907 | 7735 |
| 567 | 1940 | 3596 | 4424 | 5252 | 568 | 2768 | 6080 | 6908 | 7736 |
| 569 | 1941 | 3597 | 4425 | 5253 | 570 | 2769 | 6081 | 6909 | 7737 |
| 571 | 1942 | 3598 | 4426 | 5254 | 572 | 2770 | 6082 | 6910 | 7738 |
| 573 | 1943 | 3599 | 4427 | 5255 | 574 | 2771 | 6083 | 6911 | 7739 |
| 575 | 1944 | 3600 | 4428 | 5256 | 576 | 2772 | 6084 | 6912 | 7740 |
| 577 | 1945 | 3601 | 4429 | 5257 | 578 | 2773 | 6085 | 6913 | 7741 |
| 579 | 1946 | 3602 | 4430 | 5258 | 580 | 2774 | 6086 | 6914 | 7742 |
| 581 | 1947 | 3603 | 4431 | 5259 | 582 | 2775 | 6087 | 6915 | 7743 |
| 583 | 1948 | 3604 | 4432 | 5260 | 584 | 2776 | 6088 | 6916 | 7744 |
| 585 | 1949 | 3605 | 4433 | 5261 | 586 | 2777 | 6089 | 6917 | 7745 |
| 587 | 1950 | 3606 | 4434 | 5262 | 588 | 2778 | 6090 | 6918 | 7746 |
| 589 | 1951 | 3607 | 4435 | 5263 | 590 | 2779 | 6091 | 6919 | 7747 |
| 591 | 1952 | 3608 | 4436 | 5264 | 592 | 2780 | 6092 | 6920 | 7748 |
| 593 | 1953 | 3609 | 4437 | 5265 | 594 | 2781 | 6093 | 6921 | 7749 |
| 595 | 1954 | 3610 | 4438 | 5266 | 596 | 2782 | 6094 | 6922 | 7750 |
| 597 | 1955 | 3611 | 4439 | 5267 | 598 | 2783 | 6095 | 6923 | 7751 |
| 599 | 1956 | 3612 | 4440 | 5268 | 600 | 2784 | 6096 | 6924 | 7752 |
| 601 | 1957 | 3613 | 4441 | 5269 | 602 | 2785 | 6097 | 6925 | 7753 |
| 603 | 1958 | 3614 | 4442 | 5270 | 604 | 2786 | 6098 | 6926 | 7754 |
| 605 | 1959 | 3615 | 4443 | 5271 | 606 | 2787 | 6099 | 6927 | 7755 |
| 607 | 1960 | 3616 | 4444 | 5272 | 608 | 2788 | 6100 | 6928 | 7756 |
| 609 | 1961 | 3617 | 4445 | 5273 | 610 | 2789 | 6101 | 6929 | 7757 |
| 611 | 1962 | 3618 | 4446 | 5274 | 612 | 2790 | 6102 | 6930 | 7758 |
| 613 | 1963 | 3619 | 4447 | 5275 | 614 | 2791 | 6103 | 6931 | 7759 |
| 615 | 1964 | 3620 | 4448 | 5276 | 616 | 2792 | 6104 | 6932 | 7760 |
| 617 | 1965 | 3621 | 4449 | 5277 | 618 | 2793 | 6105 | 6933 | 7761 |
| 619 | 1966 | 3622 | 4450 | 5278 | 620 | 2794 | 6106 | 6934 | 7762 |
| 621 | 1967 | 3623 | 4451 | 5279 | 622 | 2795 | 6107 | 6935 | 7763 |
| 623 | 1968 | 3624 | 4452 | 5280 | 624 | 2796 | 6108 | 6936 | 7764 |
| 625 | 1969 | 3625 | 4453 | 5281 | 626 | 2797 | 6109 | 6937 | 7765 |
| 627 | 1970 | 3626 | 4454 | 5282 | 628 | 2798 | 6110 | 6938 | 7766 |
| 629 | 1971 | 3627 | 4455 | 5283 | 630 | 2799 | 6111 | 6939 | 7767 |
| 631 | 1972 | 3628 | 4456 | 5284 | 632 | 2800 | 6112 | 6940 | 7768 |
| 633 | 1973 | 3629 | 4457 | 5285 | 634 | 2801 | 6113 | 6941 | 7769 |
| 635 | 1974 | 3630 | 4458 | 5286 | 636 | 2802 | 6114 | 6942 | 7770 |
| 637 | 1975 | 3631 | 4459 | 5287 | 638 | 2803 | 6115 | 6943 | 7771 |
| 639 | 1976 | 3632 | 4460 | 5288 | 640 | 2804 | 6116 | 6944 | 7772 |
| 641 | 1977 | 3633 | 4461 | 5289 | 642 | 2805 | 6117 | 6945 | 7773 |
| 643 | 1978 | 3634 | 4462 | 5290 | 644 | 2806 | 6118 | 6946 | 7774 |
| 645 | 1979 | 3635 | 4463 | 5291 | 646 | 2807 | 6119 | 6947 | 7775 |
| 647 | 1980 | 3636 | 4464 | 5292 | 648 | 2808 | 6120 | 6948 | 7776 |
| 649 | 1981 | 3637 | 4465 | 5293 | 650 | 2809 | 6121 | 6949 | 7777 |
| 651 | 1982 | 3638 | 4466 | 5294 | 652 | 2810 | 6122 | 6950 | 7778 |
| 653 | 1983 | 3639 | 4467 | 5295 | 654 | 2811 | 6123 | 6951 | 7779 |
| 655 | 1984 | 3640 | 4468 | 5296 | 656 | 2812 | 6124 | 6952 | 7780 |
| 657 | 1985 | 3641 | 4469 | 5297 | 658 | 2813 | 6125 | 6953 | 7781 |
| 659 | 1986 | 3642 | 4470 | 5298 | 660 | 2814 | 6126 | 6954 | 7782 |
| 661 | 1987 | 3643 | 4471 | 5299 | 662 | 2815 | 6127 | 6955 | 7783 |
| 663 | 1988 | 3644 | 4472 | 5300 | 664 | 2816 | 6128 | 6956 | 7784 |
| 665 | 1989 | 3645 | 4473 | 5301 | 666 | 2817 | 6129 | 6957 | 7785 |
| 667 | 1990 | 3646 | 4474 | 5302 | 668 | 2818 | 6130 | 6958 | 7786 |
| 669 | 1991 | 3647 | 4475 | 5303 | 670 | 2819 | 6131 | 6959 | 7787 |
| 671 | 1992 | 3648 | 4476 | 5304 | 672 | 2820 | 6132 | 6960 | 7788 |
| 673 | 1993 | 3649 | 4477 | 5305 | 674 | 2821 | 6133 | 6961 | 7789 |
| 675 | 1994 | 3650 | 4478 | 5306 | 676 | 2822 | 6134 | 6962 | 7790 |
| 677 | 1995 | 3651 | 4479 | 5307 | 678 | 2823 | 6135 | 6963 | 7791 |
| 679 | 1996 | 3652 | 4480 | 5308 | 680 | 2824 | 6136 | 6964 | 7792 |
| 681 | 1997 | 3653 | 4481 | 5309 | 682 | 2825 | 6137 | 6965 | 7793 |
| 683 | 1998 | 3654 | 4482 | 5310 | 684 | 2826 | 6138 | 6966 | 7794 |
| 685 | 1999 | 3655 | 4483 | 5311 | 686 | 2827 | 6139 | 6967 | 7795 |
| 687 | 2000 | 3656 | 4484 | 5312 | 688 | 2828 | 6140 | 6968 | 7796 |
| 689 | 2001 | 3657 | 4485 | 5313 | 690 | 2829 | 6141 | 6969 | 7797 |
| 691 | 2002 | 3658 | 4486 | 5314 | 692 | 2830 | 6142 | 6970 | 7798 |
| 693 | 2003 | 3659 | 4487 | 5315 | 694 | 2831 | 6143 | 6971 | 7799 |
| 695 | 2004 | 3660 | 4488 | 5316 | 696 | 2832 | 6144 | 6972 | 7800 |
| 697 | 2005 | 3661 | 4489 | 5317 | 698 | 2833 | 6145 | 6973 | 7801 |
| 699 | 2006 | 3662 | 4490 | 5318 | 700 | 2834 | 6146 | 6974 | 7802 |
| 701 | 2007 | 3663 | 4491 | 5319 | 702 | 2835 | 6147 | 6975 | 7803 |
| 703 | 2008 | 3664 | 4492 | 5320 | 704 | 2836 | 6148 | 6976 | 7804 |
| 705 | 2009 | 3665 | 4493 | 5321 | 706 | 2837 | 6149 | 6977 | 7805 |
| 707 | 2010 | 3666 | 4494 | 5322 | 708 | 2838 | 6150 | 6978 | 7806 |
| 709 | 2011 | 3667 | 4495 | 5323 | 710 | 2839 | 6151 | 6979 | 7807 |
| 711 | 2012 | 3668 | 4496 | 5324 | 712 | 2840 | 6152 | 6980 | 7808 |
| 713 | 2013 | 3669 | 4497 | 5325 | 714 | 2841 | 6153 | 6981 | 7809 |
| 715 | 2014 | 3670 | 4498 | 5326 | 716 | 2842 | 6154 | 6982 | 7810 |
| 717 | 2015 | 3671 | 4499 | 5327 | 718 | 2843 | 6155 | 6983 | 7811 |
| 719 | 2016 | 3672 | 4500 | 5328 | 720 | 2844 | 6156 | 6984 | 7812 |
| 721 | 2017 | 3673 | 4501 | 5329 | 722 | 2845 | 6157 | 6985 | 7813 |
| 723 | 2018 | 3674 | 4502 | 5330 | 724 | 2846 | 6158 | 6986 | 7814 |
| 725 | 2019 | 3675 | 4503 | 5331 | 726 | 2847 | 6159 | 6987 | 7815 |
| 727 | 2020 | 3676 | 4504 | 5332 | 728 | 2848 | 6160 | 6988 | 7816 |
| 729 | 2021 | 3677 | 4505 | 5333 | 730 | 2849 | 6161 | 6989 | 7817 |
| 731 | 2022 | 3678 | 4506 | 5334 | 732 | 2850 | 6162 | 6990 | 7818 |
| 733 | 2023 | 3679 | 4507 | 5335 | 734 | 2851 | 6163 | 6991 | 7819 |
| 735 | 2024 | 3680 | 4508 | 5336 | 736 | 2852 | 6164 | 6992 | 7820 |
| 737 | 2025 | 3681 | 4509 | 5337 | 738 | 2853 | 6165 | 6993 | 7821 |
| 739 | 2026 | 3682 | 4510 | 5338 | 740 | 2854 | 6166 | 6994 | 7822 |
| 741 | 2027 | 3683 | 4511 | 5339 | 742 | 2855 | 6167 | 6995 | 7823 |
| 743 | 2028 | 3684 | 4512 | 5340 | 744 | 2856 | 6168 | 6996 | 7824 |
| 745 | 2029 | 3685 | 4513 | 5341 | 746 | 2857 | 6169 | 6997 | 7825 |
| 747 | 2030 | 3686 | 4514 | 5342 | 748 | 2858 | 6170 | 6998 | 7826 |
| 749 | 2031 | 3687 | 4515 | 5343 | 750 | 2859 | 6171 | 6999 | 7827 |
| 751 | 2032 | 3688 | 4516 | 5344 | 752 | 2860 | 6172 | 7000 | 7828 |
| 753 | 2033 | 3689 | 4517 | 5345 | 754 | 2861 | 6173 | 7001 | 7829 |
| 755 | 2034 | 3690 | 4518 | 5346 | 756 | 2862 | 6174 | 7002 | 7830 |
| 757 | 2035 | 3691 | 4519 | 5347 | 758 | 2863 | 6175 | 7003 | 7831 |
| 759 | 2036 | 3692 | 4520 | 5348 | 760 | 2864 | 6176 | 7004 | 7832 |
| 761 | 2037 | 3693 | 4521 | 5349 | 762 | 2865 | 6177 | 7005 | 7833 |
| 763 | 2038 | 3694 | 4522 | 5350 | 764 | 2866 | 6178 | 7006 | 7834 |
| 765 | 2039 | 3695 | 4523 | 5351 | 766 | 2867 | 6179 | 7007 | 7835 |
| 767 | 2040 | 3696 | 4524 | 5352 | 768 | 2868 | 6180 | 7008 | 7836 |
| 769 | 2041 | 3697 | 4525 | 5353 | 770 | 2869 | 6181 | 7009 | 7837 |
| 771 | 2042 | 3698 | 4526 | 5354 | 772 | 2870 | 6182 | 7010 | 7838 |
| 773 | 2043 | 3699 | 4527 | 5355 | 774 | 2871 | 6183 | 7011 | 7839 |
| 775 | 2044 | 3700 | 4528 | 5356 | 776 | 2872 | 6184 | 7012 | 7840 |
| 777 | 2045 | 3701 | 4529 | 5357 | 778 | 2873 | 6185 | 7013 | 7841 |
| 779 | 2046 | 3702 | 4530 | 5358 | 780 | 2874 | 6186 | 7014 | 7842 |
| 781 | 2047 | 3703 | 4531 | 5359 | 782 | 2875 | 6187 | 7015 | 7843 |
| 783 | 2048 | 3704 | 4532 | 5360 | 784 | 2876 | 6188 | 7016 | 7844 |
| 785 | 2049 | 3705 | 4533 | 5361 | 786 | 2877 | 6189 | 7017 | 7845 |
| 787 | 2050 | 3706 | 4534 | 5362 | 788 | 2878 | 6190 | 7018 | 7846 |
| 789 | 2051 | 3707 | 4535 | 5363 | 790 | 2879 | 6191 | 7019 | 7847 |
| 791 | 2052 | 3708 | 4536 | 5364 | 792 | 2880 | 6192 | 7020 | 7848 |
| 793 | 2053 | 3709 | 4537 | 5365 | 794 | 2881 | 6193 | 7021 | 7849 |
| 795 | 2054 | 3710 | 4538 | 5366 | 796 | 2882 | 6194 | 7022 | 7850 |
| 797 | 2055 | 3711 | 4539 | 5367 | 798 | 2883 | 6195 | 7023 | 7851 |
| 799 | 2056 | 3712 | 4540 | 5368 | 800 | 2884 | 6196 | 7024 | 7852 |
| 801 | 2057 | 3713 | 4541 | 5369 | 802 | 2885 | 6197 | 7025 | 7853 |
| 803 | 2058 | 3714 | 4542 | 5370 | 804 | 2886 | 6198 | 7026 | 7854 |
| 805 | 2059 | 3715 | 4543 | 5371 | 806 | 2887 | 6199 | 7027 | 7855 |
| 807 | 2060 | 3716 | 4544 | 5372 | 808 | 2888 | 6200 | 7028 | 7856 |
| 809 | 2061 | 3717 | 4545 | 5373 | 810 | 2889 | 6201 | 7029 | 7857 |
| 811 | 2062 | 3718 | 4546 | 5374 | 812 | 2890 | 6202 | 7030 | 7858 |
| 813 | 2063 | 3719 | 4547 | 5375 | 814 | 2891 | 6203 | 7031 | 7859 |
| 815 | 2064 | 3720 | 4548 | 5376 | 816 | 2892 | 6204 | 7032 | 7860 |
| 817 | 2065 | 3721 | 4549 | 5377 | 818 | 2893 | 6205 | 7033 | 7861 |
| 819 | 2066 | 3722 | 4550 | 5378 | 820 | 2894 | 6206 | 7034 | 7862 |
| 821 | 2067 | 3723 | 4551 | 5379 | 822 | 2895 | 6207 | 7035 | 7863 |
| 823 | 2068 | 3724 | 4552 | 5380 | 824 | 2896 | 6208 | 7036 | 7864 |
| 825 | 2069 | 3725 | 4553 | 5381 | 826 | 2897 | 6209 | 7037 | 7865 |
| 827 | 2070 | 3726 | 4554 | 5382 | 828 | 2898 | 6210 | 7038 | 7866 |
| 829 | 2071 | 3727 | 4555 | 5383 | 830 | 2899 | 6211 | 7039 | 7867 |
| 831 | 2072 | 3728 | 4556 | 5384 | 832 | 2900 | 6212 | 7040 | 7868 |
| 833 | 2073 | 3729 | 4557 | 5385 | 834 | 2901 | 6213 | 7041 | 7869 |
| 835 | 2074 | 3730 | 4558 | 5386 | 836 | 2902 | 6214 | 7042 | 7870 |
| 837 | 2075 | 3731 | 4559 | 5387 | 838 | 2903 | 6215 | 7043 | 7871 |
| 839 | 2076 | 3732 | 4560 | 5388 | 840 | 2904 | 6216 | 7044 | 7872 |
| 841 | 2077 | 3733 | 4561 | 5389 | 842 | 2905 | 6217 | 7045 | 7873 |
| 843 | 2078 | 3734 | 4562 | 5390 | 844 | 2906 | 6218 | 7046 | 7874 |
| 845 | 2079 | 3735 | 4563 | 5391 | 846 | 2907 | 6219 | 7047 | 7875 |
| 847 | 2080 | 3736 | 4564 | 5392 | 848 | 2908 | 6220 | 7048 | 7876 |
| 849 | 2081 | 3737 | 4565 | 5393 | 850 | 2909 | 6221 | 7049 | 7877 |
| 851 | 2082 | 3738 | 4566 | 5394 | 852 | 2910 | 6222 | 7050 | 7878 |
| 853 | 2083 | 3739 | 4567 | 5395 | 854 | 2911 | 6223 | 7051 | 7879 |
| 855 | 2084 | 3740 | 4568 | 5396 | 856 | 2912 | 6224 | 7052 | 7880 |
| 857 | 2085 | 3741 | 4569 | 5397 | 858 | 2913 | 6225 | 7053 | 7881 |
| 859 | 2086 | 3742 | 4570 | 5398 | 860 | 2914 | 6226 | 7054 | 7882 |
| 861 | 2087 | 3743 | 4571 | 5399 | 862 | 2915 | 6227 | 7055 | 7883 |
| 863 | 2088 | 3744 | 4572 | 5400 | 864 | 2916 | 6228 | 7056 | 7884 |
| 865 | 2089 | 3745 | 4573 | 5401 | 866 | 2917 | 6229 | 7057 | 7885 |
| 867 | 2090 | 3746 | 4574 | 5402 | 868 | 2918 | 6230 | 7058 | 7886 |
| 869 | 2091 | 3747 | 4575 | 5403 | 870 | 2919 | 6231 | 7059 | 7887 |
| 871 | 2092 | 3748 | 4576 | 5404 | 872 | 2920 | 6232 | 7060 | 7888 |
| 873 | 2093 | 3749 | 4577 | 5405 | 874 | 2921 | 6233 | 7061 | 7889 |
| 875 | 2094 | 3750 | 4578 | 5406 | 876 | 2922 | 6234 | 7062 | 7890 |
| 877 | 2095 | 3751 | 4579 | 5407 | 878 | 2923 | 6235 | 7063 | 7891 |
| 879 | 2096 | 3752 | 4580 | 5408 | 880 | 2924 | 6236 | 7064 | 7892 |
| 881 | 2097 | 3753 | 4581 | 5409 | 882 | 2925 | 6237 | 7065 | 7893 |
| 883 | 2098 | 3754 | 4582 | 5410 | 884 | 2926 | 6238 | 7066 | 7894 |
| 885 | 2099 | 3755 | 4583 | 5411 | 886 | 2927 | 6239 | 7067 | 7895 |
| 887 | 2100 | 3756 | 4584 | 5412 | 888 | 2928 | 6240 | 7068 | 7896 |
| 889 | 2101 | 3757 | 4585 | 5413 | 890 | 2929 | 6241 | 7069 | 7897 |
| 891 | 2102 | 3758 | 4586 | 5414 | 892 | 2930 | 6242 | 7070 | 7898 |
| 893 | 2103 | 3759 | 4587 | 5415 | 894 | 2931 | 6243 | 7071 | 7899 |
| 895 | 2104 | 3760 | 4588 | 5416 | 896 | 2932 | 6244 | 7072 | 7900 |
| 897 | 2105 | 3761 | 4589 | 5417 | 898 | 2933 | 6245 | 7073 | 7901 |
| 899 | 2106 | 3762 | 4590 | 5418 | 900 | 2934 | 6246 | 7074 | 7902 |
| 901 | 2107 | 3763 | 4591 | 5419 | 902 | 2935 | 6247 | 7075 | 7903 |
| 903 | 2108 | 3764 | 4592 | 5420 | 904 | 2936 | 6248 | 7076 | 7904 |
| 905 | 2109 | 3765 | 4593 | 5421 | 906 | 2937 | 6249 | 7077 | 7905 |
| 907 | 2110 | 3766 | 4594 | 5422 | 908 | 2938 | 6250 | 7078 | 7906 |
| 909 | 2111 | 3767 | 4595 | 5423 | 910 | 2939 | 6251 | 7079 | 7907 |
| 911 | 2112 | 3768 | 4596 | 5424 | 912 | 2940 | 6252 | 7080 | 7908 |
| 913 | 2113 | 3769 | 4597 | 5425 | 914 | 2941 | 6253 | 7081 | 7909 |
| 915 | 2114 | 3770 | 4598 | 5426 | 916 | 2942 | 6254 | 7082 | 7910 |
| 917 | 2115 | 3771 | 4599 | 5427 | 918 | 2943 | 6255 | 7083 | 7911 |
| 919 | 2116 | 3772 | 4600 | 5428 | 920 | 2944 | 6256 | 7084 | 7912 |
| 921 | 2117 | 3773 | 4601 | 5429 | 922 | 2945 | 6257 | 7085 | 7913 |
| 923 | 2118 | 3774 | 4602 | 5430 | 924 | 2946 | 6258 | 7086 | 7914 |
| 925 | 2119 | 3775 | 4603 | 5431 | 926 | 2947 | 6259 | 7087 | 7915 |
| 927 | 2120 | 3776 | 4604 | 5432 | 928 | 2948 | 6260 | 7088 | 7916 |
| 929 | 2121 | 3777 | 4605 | 5433 | 930 | 2949 | 6261 | 7089 | 7917 |
| 931 | 2122 | 3778 | 4606 | 5434 | 932 | 2950 | 6262 | 7090 | 7918 |
| 933 | 2123 | 3779 | 4607 | 5435 | 934 | 2951 | 6263 | 7091 | 7919 |
| 935 | 2124 | 3780 | 4608 | 5436 | 936 | 2952 | 6264 | 7092 | 7920 |
| 937 | 2125 | 3781 | 4609 | 5437 | 938 | 2953 | 6265 | 7093 | 7921 |
| 939 | 2126 | 3782 | 4610 | 5438 | 940 | 2954 | 6266 | 7094 | 7922 |
| 941 | 2127 | 3783 | 4611 | 5439 | 942 | 2955 | 6267 | 7095 | 7923 |
| 943 | 2128 | 3784 | 4612 | 5440 | 944 | 2956 | 6268 | 7096 | 7924 |
| 945 | 2129 | 3785 | 4613 | 5441 | 946 | 2957 | 6269 | 7097 | 7925 |
| 947 | 2130 | 3786 | 4614 | 5442 | 948 | 2958 | 6270 | 7098 | 7926 |
| 949 | 2131 | 3787 | 4615 | 5443 | 950 | 2959 | 6271 | 7099 | 7927 |
| 951 | 2132 | 3788 | 4616 | 5444 | 952 | 2960 | 6272 | 7100 | 7928 |
| 953 | 2133 | 3789 | 4617 | 5445 | 954 | 2961 | 6273 | 7101 | 7929 |
| 955 | 2134 | 3790 | 4618 | 5446 | 956 | 2962 | 6274 | 7102 | 7930 |
| 957 | 2135 | 3791 | 4619 | 5447 | 958 | 2963 | 6275 | 7103 | 7931 |
| 959 | 2136 | 3792 | 4620 | 5448 | 960 | 2964 | 6276 | 7104 | 7932 |
| 961 | 2137 | 3793 | 4621 | 5449 | 962 | 2965 | 6277 | 7105 | 7933 |
| 963 | 2138 | 3794 | 4622 | 5450 | 964 | 2966 | 6278 | 7106 | 7934 |
| 965 | 2139 | 3795 | 4623 | 5451 | 966 | 2967 | 6279 | 7107 | 7935 |
| 967 | 2140 | 3796 | 4624 | 5452 | 968 | 2968 | 6280 | 7108 | 7936 |
| 969 | 2141 | 3797 | 4625 | 5453 | 970 | 2969 | 6281 | 7109 | 7937 |
| 971 | 2142 | 3798 | 4626 | 5454 | 972 | 2970 | 6282 | 7110 | 7938 |
| 973 | 2143 | 3799 | 4627 | 5455 | 974 | 2971 | 6283 | 7111 | 7939 |
| 975 | 2144 | 3800 | 4628 | 5456 | 976 | 2972 | 6284 | 7112 | 7940 |
| 977 | 2145 | 3801 | 4629 | 5457 | 978 | 2973 | 6285 | 7113 | 7941 |
| 979 | 2146 | 3802 | 4630 | 5458 | 980 | 2974 | 6286 | 7114 | 7942 |
| 981 | 2147 | 3803 | 4631 | 5459 | 982 | 2975 | 6287 | 7115 | 7943 |
| 983 | 2148 | 3804 | 4632 | 5460 | 984 | 2976 | 6288 | 7116 | 7944 |
| 985 | 2149 | 3805 | 4633 | 5461 | 986 | 2977 | 6289 | 7117 | 7945 |
| 987 | 2150 | 3806 | 4634 | 5462 | 988 | 2978 | 6290 | 7118 | 7946 |
| 989 | 2151 | 3807 | 4635 | 5463 | 990 | 2979 | 6291 | 7119 | 7947 |
| 991 | 2152 | 3808 | 4636 | 5464 | 992 | 2980 | 6292 | 7120 | 7948 |
| 993 | 2153 | 3809 | 4637 | 5465 | 994 | 2981 | 6293 | 7121 | 7949 |
| 995 | 2154 | 3810 | 4638 | 5466 | 996 | 2982 | 6294 | 7122 | 7950 |
| 997 | 2155 | 3811 | 4639 | 5467 | 998 | 2983 | 6295 | 7123 | 7951 |
| 999 | 2156 | 3812 | 4640 | 5468 | 1000 | 2984 | 6296 | 7124 | 7952 |
| 1001 | 2157 | 3813 | 4641 | 5469 | 1002 | 2985 | 6297 | 7125 | 7953 |
| 1003 | 2158 | 3814 | 4642 | 5470 | 1004 | 2986 | 6298 | 7126 | 7954 |
| 1005 | 2159 | 3815 | 4643 | 5471 | 1006 | 2987 | 6299 | 7127 | 7955 |
| 1007 | 2160 | 3816 | 4644 | 5472 | 1008 | 2988 | 6300 | 7128 | 7956 |
| 1009 | 2161 | 3817 | 4645 | 5473 | 1010 | 2989 | 6301 | 7129 | 7957 |
| 1011 | 2162 | 3818 | 4646 | 5474 | 1012 | 2990 | 6302 | 7130 | 7958 |
| 1013 | 2163 | 3819 | 4647 | 5475 | 1014 | 2991 | 6303 | 7131 | 7959 |
| 1015 | 2164 | 3820 | 4648 | 5476 | 1016 | 2992 | 6304 | 7132 | 7960 |
| 1017 | 2165 | 3821 | 4649 | 5477 | 1018 | 2993 | 6305 | 7133 | 7961 |
| 1019 | 2166 | 3822 | 4650 | 5478 | 1020 | 2994 | 6306 | 7134 | 7962 |
| 1021 | 2167 | 3823 | 4651 | 5479 | 1022 | 2995 | 6307 | 7135 | 7963 |
| 1023 | 2168 | 3824 | 4652 | 5480 | 1024 | 2996 | 6308 | 7136 | 7964 |
| 1025 | 2169 | 3825 | 4653 | 5481 | 1026 | 2997 | 6309 | 7137 | 7965 |
| 1027 | 2170 | 3826 | 4654 | 5482 | 1028 | 2998 | 6310 | 7138 | 7966 |
| 1029 | 2171 | 3827 | 4655 | 5483 | 1030 | 2999 | 6311 | 7139 | 7967 |
| 1031 | 2172 | 3828 | 4656 | 5484 | 1032 | 3000 | 6312 | 7140 | 7968 |
| 1033 | 2173 | 3829 | 4657 | 5485 | 1034 | 3001 | 6313 | 7141 | 7969 |
| 1035 | 2174 | 3830 | 4658 | 5486 | 1036 | 3002 | 6314 | 7142 | 7970 |
| 1037 | 2175 | 3831 | 4659 | 5487 | 1038 | 3003 | 6315 | 7143 | 7971 |
| 1039 | 2176 | 3832 | 4660 | 5488 | 1040 | 3004 | 6316 | 7144 | 7972 |
| 1041 | 2177 | 3833 | 4661 | 5489 | 1042 | 3005 | 6317 | 7145 | 7973 |
| 1043 | 2178 | 3834 | 4662 | 5490 | 1044 | 3006 | 6318 | 7146 | 7974 |
| 1045 | 2179 | 3835 | 4663 | 5491 | 1046 | 3007 | 6319 | 7147 | 7975 |
| 1047 | 2180 | 3836 | 4664 | 5492 | 1048 | 3008 | 6320 | 7148 | 7976 |
| 1049 | 2181 | 3837 | 4665 | 5493 | 1050 | 3009 | 6321 | 7149 | 7977 |
| 1051 | 2182 | 3838 | 4666 | 5494 | 1052 | 3010 | 6322 | 7150 | 7978 |
| 1053 | 2183 | 3839 | 4667 | 5495 | 1054 | 3011 | 6323 | 7151 | 7979 |
| 1055 | 2184 | 3840 | 4668 | 5496 | 1056 | 3012 | 6324 | 7152 | 7980 |
| 1057 | 2185 | 3841 | 4669 | 5497 | 1058 | 3013 | 6325 | 7153 | 7981 |
| 1059 | 2186 | 3842 | 4670 | 5498 | 1060 | 3014 | 6326 | 7154 | 7982 |
| 1061 | 2187 | 3843 | 4671 | 5499 | 1062 | 3015 | 6327 | 7155 | 7983 |
| 1063 | 2188 | 3844 | 4672 | 5500 | 1064 | 3016 | 6328 | 7156 | 7984 |
| 1065 | 2189 | 3845 | 4673 | 5501 | 1066 | 3017 | 6329 | 7157 | 7985 |
| 1067 | 2190 | 3846 | 4674 | 5502 | 1068 | 3018 | 6330 | 7158 | 7986 |
| 1069 | 2191 | 3847 | 4675 | 5503 | 1070 | 3019 | 6331 | 7159 | 7987 |
| 1071 | 2192 | 3848 | 4676 | 5504 | 1072 | 3020 | 6332 | 7160 | 7988 |
| 1073 | 2193 | 3849 | 4677 | 5505 | 1074 | 3021 | 6333 | 7161 | 7989 |
| 1075 | 2194 | 3850 | 4678 | 5506 | 1076 | 3022 | 6334 | 7162 | 7990 |
| 1077 | 2195 | 3851 | 4679 | 5507 | 1078 | 3023 | 6335 | 7163 | 7991 |
| 1079 | 2196 | 3852 | 4680 | 5508 | 1080 | 3024 | 6336 | 7164 | 7992 |
| 1081 | 2197 | 3853 | 4681 | 5509 | 1082 | 3025 | 6337 | 7165 | 7993 |
| 1083 | 2198 | 3854 | 4682 | 5510 | 1084 | 3026 | 6338 | 7166 | 7994 |
| 1085 | 2199 | 3855 | 4683 | 5511 | 1086 | 3027 | 6339 | 7167 | 7995 |
| 1087 | 2200 | 3856 | 4684 | 5512 | 1088 | 3028 | 6340 | 7168 | 7996 |
| 1089 | 2201 | 3857 | 4685 | 5513 | 1090 | 3029 | 6341 | 7169 | 7997 |
| 1091 | 2202 | 3858 | 4686 | 5514 | 1092 | 3030 | 6342 | 7170 | 7998 |
| 1093 | 2203 | 3859 | 4687 | 5515 | 1094 | 3031 | 6343 | 7171 | 7999 |
| 1095 | 2204 | 3860 | 4688 | 5516 | 1096 | 3032 | 6344 | 7172 | 8000 |
| 1097 | 2205 | 3861 | 4689 | 5517 | 1098 | 3033 | 6345 | 7173 | 8001 |
| 1099 | 2206 | 3862 | 4690 | 5518 | 1100 | 3034 | 6346 | 7174 | 8002 |
| 1101 | 2207 | 3863 | 4691 | 5519 | 1102 | 3035 | 6347 | 7175 | 8003 |
| 1103 | 2208 | 3864 | 4692 | 5520 | 1104 | 3036 | 6348 | 7176 | 8004 |
| 1105 | 2209 | 3865 | 4693 | 5521 | 1106 | 3037 | 6349 | 7177 | 8005 |
| 1107 | 2210 | 3866 | 4694 | 5522 | 1108 | 3038 | 6350 | 7178 | 8006 |
| 1109 | 2211 | 3867 | 4695 | 5523 | 1110 | 3039 | 6351 | 7179 | 8007 |
| 1111 | 2212 | 3868 | 4696 | 5524 | 1112 | 3040 | 6352 | 7180 | 8008 |
| 1113 | 2213 | 3869 | 4697 | 5525 | 1114 | 3041 | 6353 | 7181 | 8009 |
| 1115 | 2214 | 3870 | 4698 | 5526 | 1116 | 3042 | 6354 | 7182 | 8010 |
| 1117 | 2215 | 3871 | 4699 | 5527 | 1118 | 3043 | 6355 | 7183 | 8011 |
| 1119 | 2216 | 3872 | 4700 | 5528 | 1120 | 3044 | 6356 | 7184 | 8012 |
| 1121 | 2217 | 3873 | 4701 | 5529 | 1122 | 3045 | 6357 | 7185 | 8013 |
| 1123 | 2218 | 3874 | 4702 | 5530 | 1124 | 3046 | 6358 | 7186 | 8014 |
| 1125 | 2219 | 3875 | 4703 | 5531 | 1126 | 3047 | 6359 | 7187 | 8015 |
| 1127 | 2220 | 3876 | 4704 | 5532 | 1128 | 3048 | 6360 | 7188 | 8016 |
| 1129 | 2221 | 3877 | 4705 | 5533 | 1130 | 3049 | 6361 | 7189 | 8017 |
| 1131 | 2222 | 3878 | 4706 | 5534 | 1132 | 3050 | 6362 | 7190 | 8018 |
| 1133 | 2223 | 3879 | 4707 | 5535 | 1134 | 3051 | 6363 | 7191 | 8019 |
| 1135 | 2224 | 3880 | 4708 | 5536 | 1136 | 3052 | 6364 | 7192 | 8020 |
| 1137 | 2225 | 3881 | 4709 | 5537 | 1138 | 3053 | 6365 | 7193 | 8021 |
| 1139 | 2226 | 3882 | 4710 | 5538 | 1140 | 3054 | 6366 | 7194 | 8022 |
| 1141 | 2227 | 3883 | 4711 | 5539 | 1142 | 3055 | 6367 | 7195 | 8023 |
| 1143 | 2228 | 3884 | 4712 | 5540 | 1144 | 3056 | 6368 | 7196 | 8024 |
| 1145 | 2229 | 3885 | 4713 | 5541 | 1146 | 3057 | 6369 | 7197 | 8025 |
| 1147 | 2230 | 3886 | 4714 | 5542 | 1148 | 3058 | 6370 | 7198 | 8026 |
| 1149 | 2231 | 3887 | 4715 | 5543 | 1150 | 3059 | 6371 | 7199 | 8027 |
| 1151 | 2232 | 3888 | 4716 | 5544 | 1152 | 3060 | 6372 | 7200 | 8028 |
| 1153 | 2233 | 3889 | 4717 | 5545 | 1154 | 3061 | 6373 | 7201 | 8029 |
| 1155 | 2234 | 3890 | 4718 | 5546 | 1156 | 3062 | 6374 | 7202 | 8030 |
| 1157 | 2235 | 3891 | 4719 | 5547 | 1158 | 3063 | 6375 | 7203 | 8031 |
| 1159 | 2236 | 3892 | 4720 | 5548 | 1160 | 3064 | 6376 | 7204 | 8032 |
| 1161 | 2237 | 3893 | 4721 | 5549 | 1162 | 3065 | 6377 | 7205 | 8033 |
| 1163 | 2238 | 3894 | 4722 | 5550 | 1164 | 3066 | 6378 | 7206 | 8034 |
| 1165 | 2239 | 3895 | 4723 | 5551 | 1166 | 3067 | 6379 | 7207 | 8035 |
| 1167 | 2240 | 3896 | 4724 | 5552 | 1168 | 3068 | 6380 | 7208 | 8036 |
| 1169 | 2241 | 3897 | 4725 | 5553 | 1170 | 3069 | 6381 | 7209 | 8037 |
| 1171 | 2242 | 3898 | 4726 | 5554 | 1172 | 3070 | 6382 | 7210 | 8038 |
| 1173 | 2243 | 3899 | 4727 | 5555 | 1174 | 3071 | 6383 | 7211 | 8039 |
| 1175 | 2244 | 3900 | 4728 | 5556 | 1176 | 3072 | 6384 | 7212 | 8040 |
| 1177 | 2245 | 3901 | 4729 | 5557 | 1178 | 3073 | 6385 | 7213 | 8041 |
| 1179 | 2246 | 3902 | 4730 | 5558 | 1180 | 3074 | 6386 | 7214 | 8042 |
| 1181 | 2247 | 3903 | 4731 | 5559 | 1182 | 3075 | 6387 | 7215 | 8043 |
| 1183 | 2248 | 3904 | 4732 | 5560 | 1184 | 3076 | 6388 | 7216 | 8044 |
| 1185 | 2249 | 3905 | 4733 | 5561 | 1186 | 3077 | 6389 | 7217 | 8045 |
| 1187 | 2250 | 3906 | 4734 | 5562 | 1188 | 3078 | 6390 | 7218 | 8046 |
| 1189 | 2251 | 3907 | 4735 | 5563 | 1190 | 3079 | 6391 | 7219 | 8047 |
| 1191 | 2252 | 3908 | 4736 | 5564 | 1192 | 3080 | 6392 | 7220 | 8048 |
| 1193 | 2253 | 3909 | 4737 | 5565 | 1194 | 3081 | 6393 | 7221 | 8049 |
| 1195 | 2254 | 3910 | 4738 | 5566 | 1196 | 3082 | 6394 | 7222 | 8050 |
| 1197 | 2255 | 3911 | 4739 | 5567 | 1198 | 3083 | 6395 | 7223 | 8051 |
| 1199 | 2256 | 3912 | 4740 | 5568 | 1200 | 3084 | 6396 | 7224 | 8052 |
| 1201 | 2257 | 3913 | 4741 | 5569 | 1202 | 3085 | 6397 | 7225 | 8053 |
| 1203 | 2258 | 3914 | 4742 | 5570 | 1204 | 3086 | 6398 | 7226 | 8054 |
| 1205 | 2259 | 3915 | 4743 | 5571 | 1206 | 3087 | 6399 | 7227 | 8055 |
| 1207 | 2260 | 3916 | 4744 | 5572 | 1208 | 3088 | 6400 | 7228 | 8056 |
| 1209 | 2261 | 3917 | 4745 | 5573 | 1210 | 3089 | 6401 | 7229 | 8057 |
| 1211 | 2262 | 3918 | 4746 | 5574 | 1212 | 3090 | 6402 | 7230 | 8058 |
| 1213 | 2263 | 3919 | 4747 | 5575 | 1214 | 3091 | 6403 | 7231 | 8059 |
| 1215 | 2264 | 3920 | 4748 | 5576 | 1216 | 3092 | 6404 | 7232 | 8060 |
| 1217 | 2265 | 3921 | 4749 | 5577 | 1218 | 3093 | 6405 | 7233 | 8061 |
| 1219 | 2266 | 3922 | 4750 | 5578 | 1220 | 3094 | 6406 | 7234 | 8062 |
| 1221 | 2267 | 3923 | 4751 | 5579 | 1222 | 3095 | 6407 | 7235 | 8063 |
| 1223 | 2268 | 3924 | 4752 | 5580 | 1224 | 3096 | 6408 | 7236 | 8064 |
| 1225 | 2269 | 3925 | 4753 | 5581 | 1226 | 3097 | 6409 | 7237 | 8065 |
| 1227 | 2270 | 3926 | 4754 | 5582 | 1228 | 3098 | 6410 | 7238 | 8066 |
| 1229 | 2271 | 3927 | 4755 | 5583 | 1230 | 3099 | 6411 | 7239 | 8067 |
| 1231 | 2272 | 3928 | 4756 | 5584 | 1232 | 3100 | 6412 | 7240 | 8068 |
| 1233 | 2273 | 3929 | 4757 | 5585 | 1234 | 3101 | 6413 | 7241 | 8069 |
| 1235 | 2274 | 3930 | 4758 | 5586 | 1236 | 3102 | 6414 | 7242 | 8070 |
| 1237 | 2275 | 3931 | 4759 | 5587 | 1238 | 3103 | 6415 | 7243 | 8071 |
| 1239 | 2276 | 3932 | 4760 | 5588 | 1240 | 3104 | 6416 | 7244 | 8072 |
| 1241 | 2277 | 3933 | 4761 | 5589 | 1242 | 3105 | 6417 | 7245 | 8073 |
| 1243 | 2278 | 3934 | 4762 | 5590 | 1244 | 3106 | 6418 | 7246 | 8074 |
| 1245 | 2279 | 3935 | 4763 | 5591 | 1246 | 3107 | 6419 | 7247 | 8075 |
| 1247 | 2280 | 3936 | 4764 | 5592 | 1248 | 3108 | 6420 | 7248 | 8076 |
| 1249 | 2281 | 3937 | 4765 | 5593 | 1250 | 3109 | 6421 | 7249 | 8077 |
| 1251 | 2282 | 3938 | 4766 | 5594 | 1252 | 3110 | 6422 | 7250 | 8078 |
| 1253 | 2283 | 3939 | 4767 | 5595 | 1254 | 3111 | 6423 | 7251 | 8079 |
| 1255 | 2284 | 3940 | 4768 | 5596 | 1256 | 3112 | 6424 | 7252 | 8080 |
| 1257 | 2285 | 3941 | 4769 | 5597 | 1258 | 3113 | 6425 | 7253 | 8081 |
| 1259 | 2286 | 3942 | 4770 | 5598 | 1260 | 3114 | 6426 | 7254 | 8082 |
| 1261 | 2287 | 3943 | 4771 | 5599 | 1262 | 3115 | 6427 | 7255 | 8083 |
| 1263 | 2288 | 3944 | 4772 | 5600 | 1264 | 3116 | 6428 | 7256 | 8084 |
| 1265 | 2289 | 3945 | 4773 | 5601 | 1266 | 3117 | 6429 | 7257 | 8085 |
| 1267 | 2290 | 3946 | 4774 | 5602 | 1268 | 3118 | 6430 | 7258 | 8086 |
| 1269 | 2291 | 3947 | 4775 | 5603 | 1270 | 3119 | 6431 | 7259 | 8087 |
| 1271 | 2292 | 3948 | 4776 | 5604 | 1272 | 3120 | 6432 | 7260 | 8088 |
| 1273 | 2293 | 3949 | 4777 | 5605 | 1274 | 3121 | 6433 | 7261 | 8089 |
| 1275 | 2294 | 3950 | 4778 | 5606 | 1276 | 3122 | 6434 | 7262 | 8090 |
| 1277 | 2295 | 3951 | 4779 | 5607 | 1278 | 3123 | 6435 | 7263 | 8091 |
| 1279 | 2296 | 3952 | 4780 | 5608 | 1280 | 3124 | 6436 | 7264 | 8092 |
| 1281 | 2297 | 3953 | 4781 | 5609 | 1282 | 3125 | 6437 | 7265 | 8093 |
| 1283 | 2298 | 3954 | 4782 | 5610 | 1284 | 3126 | 6438 | 7266 | 8094 |
| 1285 | 2299 | 3955 | 4783 | 5611 | 1286 | 3127 | 6439 | 7267 | 8095 |
| 1287 | 2300 | 3956 | 4784 | 5612 | 1288 | 3128 | 6440 | 7268 | 8096 |
| 1289 | 2301 | 3957 | 4785 | 5613 | 1290 | 3129 | 6441 | 7269 | 8097 |
| 1291 | 2302 | 3958 | 4786 | 5614 | 1292 | 3130 | 6442 | 7270 | 8098 |
| 1293 | 2303 | 3959 | 4787 | 5615 | 1294 | 3131 | 6443 | 7271 | 8099 |
| 1295 | 2304 | 3960 | 4788 | 5616 | 1296 | 3132 | 6444 | 7272 | 8100 |
| 1297 | 2305 | 3961 | 4789 | 5617 | 1298 | 3133 | 6445 | 7273 | 8101 |
| 1299 | 2306 | 3962 | 4790 | 5618 | 1300 | 3134 | 6446 | 7274 | 8102 |
| 1301 | 2307 | 3963 | 4791 | 5619 | 1302 | 3135 | 6447 | 7275 | 8103 |
| 1303 | 2308 | 3964 | 4792 | 5620 | 1304 | 3136 | 6448 | 7276 | 8104 |
| 1305 | 2309 | 3965 | 4793 | 5621 | 1306 | 3137 | 6449 | 7277 | 8105 |
| 1307 | 2310 | 3966 | 4794 | 5622 | 1308 | 3138 | 6450 | 7278 | 8106 |
| 1309 | 2311 | 3967 | 4795 | 5623 | 1310 | 3139 | 6451 | 7279 | 8107 |
| 1311 | 2312 | 3968 | 4796 | 5624 | 1312 | 3140 | 6452 | 7280 | 8108 |
| 1313 | 2313 | 3969 | 4797 | 5625 | 1314 | 3141 | 6453 | 7281 | 8109 |
| 1315 | 2314 | 3970 | 4798 | 5626 | 1316 | 3142 | 6454 | 7282 | 8110 |
| 1317 | 2315 | 3971 | 4799 | 5627 | 1318 | 3143 | 6455 | 7283 | 8111 |
| 1319 | 2316 | 3972 | 4800 | 5628 | 1320 | 3144 | 6456 | 7284 | 8112 |
| 1321 | 2317 | 3973 | 4801 | 5629 | 1322 | 3145 | 6457 | 7285 | 8113 |
| 1323 | 2318 | 3974 | 4802 | 5630 | 1324 | 3146 | 6458 | 7286 | 8114 |
| 1325 | 2319 | 3975 | 4803 | 5631 | 1326 | 3147 | 6459 | 7287 | 8115 |
| 1327 | 2320 | 3976 | 4804 | 5632 | 1328 | 3148 | 6460 | 7288 | 8116 |
| 1329 | 2321 | 3977 | 4805 | 5633 | 1330 | 3149 | 6461 | 7289 | 8117 |
| 1331 | 2322 | 3978 | 4806 | 5634 | 1332 | 3150 | 6462 | 7290 | 8118 |
| 1333 | 2323 | 3979 | 4807 | 5635 | 1334 | 3151 | 6463 | 7291 | 8119 |
| 1335 | 2324 | 3980 | 4808 | 5636 | 1336 | 3152 | 6464 | 7292 | 8120 |
| 1337 | 2325 | 3981 | 4809 | 5637 | 1338 | 3153 | 6465 | 7293 | 8121 |
| 1339 | 2326 | 3982 | 4810 | 5638 | 1340 | 3154 | 6466 | 7294 | 8122 |
| 1341 | 2327 | 3983 | 4811 | 5639 | 1342 | 3155 | 6467 | 7295 | 8123 |
| 1343 | 2328 | 3984 | 4812 | 5640 | 1344 | 3156 | 6468 | 7296 | 8124 |
| 1345 | 2329 | 3985 | 4813 | 5641 | 1346 | 3157 | 6469 | 7297 | 8125 |
| 1347 | 2330 | 3986 | 4814 | 5642 | 1348 | 3158 | 6470 | 7298 | 8126 |
| 1349 | 2331 | 3987 | 4815 | 5643 | 1350 | 3159 | 6471 | 7299 | 8127 |
| 1351 | 2332 | 3988 | 4816 | 5644 | 1352 | 3160 | 6472 | 7300 | 8128 |
| 1353 | 2333 | 3989 | 4817 | 5645 | 1354 | 3161 | 6473 | 7301 | 8129 |
| 1355 | 2334 | 3990 | 4818 | 5646 | 1356 | 3162 | 6474 | 7302 | 8130 |
| 1357 | 2335 | 3991 | 4819 | 5647 | 1358 | 3163 | 6475 | 7303 | 8131 |
| 1359 | 2336 | 3992 | 4820 | 5648 | 1360 | 3164 | 6476 | 7304 | 8132 |
| 1361 | 2337 | 3993 | 4821 | 5649 | 1362 | 3165 | 6477 | 7305 | 8133 |
| 1363 | 2338 | 3994 | 4822 | 5650 | 1364 | 3166 | 6478 | 7306 | 8134 |
| 1365 | 2339 | 3995 | 4823 | 5651 | 1366 | 3167 | 6479 | 7307 | 8135 |
| 1367 | 2340 | 3996 | 4824 | 5652 | 1368 | 3168 | 6480 | 7308 | 8136 |
| 1369 | 2341 | 3997 | 4825 | 5653 | 1370 | 3169 | 6481 | 7309 | 8137 |
| 1371 | 2342 | 3998 | 4826 | 5654 | 1372 | 3170 | 6482 | 7310 | 8138 |
| 1373 | 2343 | 3999 | 4827 | 5655 | 1374 | 3171 | 6483 | 7311 | 8139 |
| 1375 | 2344 | 4000 | 4828 | 5656 | 1376 | 3172 | 6484 | 7312 | 8140 |
| 1377 | 2345 | 4001 | 4829 | 5657 | 1378 | 3173 | 6485 | 7313 | 8141 |
| 1379 | 2346 | 4002 | 4830 | 5658 | 1380 | 3174 | 6486 | 7314 | 8142 |
| 1381 | 2347 | 4003 | 4831 | 5659 | 1382 | 3175 | 6487 | 7315 | 8143 |
| 1383 | 2348 | 4004 | 4832 | 5660 | 1384 | 3176 | 6488 | 7316 | 8144 |
| 1385 | 2349 | 4005 | 4833 | 5661 | 1386 | 3177 | 6489 | 7317 | 8145 |
| 1387 | 2350 | 4006 | 4834 | 5662 | 1388 | 3178 | 6490 | 7318 | 8146 |
| 1389 | 2351 | 4007 | 4835 | 5663 | 1390 | 3179 | 6491 | 7319 | 8147 |
| 1391 | 2352 | 4008 | 4836 | 5664 | 1392 | 3180 | 6492 | 7320 | 8148 |
| 1393 | 2353 | 4009 | 4837 | 5665 | 1394 | 3181 | 6493 | 7321 | 8149 |
| 1395 | 2354 | 4010 | 4838 | 5666 | 1396 | 3182 | 6494 | 7322 | 8150 |
| 1397 | 2355 | 4011 | 4839 | 5667 | 1398 | 3183 | 6495 | 7323 | 8151 |
| 1399 | 2356 | 4012 | 4840 | 5668 | 1400 | 3184 | 6496 | 7324 | 8152 |
| 1401 | 2357 | 4013 | 4841 | 5669 | 1402 | 3185 | 6497 | 7325 | 8153 |
| 1403 | 2358 | 4014 | 4842 | 5670 | 1404 | 3186 | 6498 | 7326 | 8154 |
| 1405 | 2359 | 4015 | 4843 | 5671 | 1406 | 3187 | 6499 | 7327 | 8155 |
| 1407 | 2360 | 4016 | 4844 | 5672 | 1408 | 3188 | 6500 | 7328 | 8156 |
| 1409 | 2361 | 4017 | 4845 | 5673 | 1410 | 3189 | 6501 | 7329 | 8157 |
| 1411 | 2362 | 4018 | 4846 | 5674 | 1412 | 3190 | 6502 | 7330 | 8158 |
| 1413 | 2363 | 4019 | 4847 | 5675 | 1414 | 3191 | 6503 | 7331 | 8159 |
| 1415 | 2364 | 4020 | 4848 | 5676 | 1416 | 3192 | 6504 | 7332 | 8160 |
| 1417 | 2365 | 4021 | 4849 | 5677 | 1418 | 3193 | 6505 | 7333 | 8161 |
| 1419 | 2366 | 4022 | 4850 | 5678 | 1420 | 3194 | 6506 | 7334 | 8162 |
| 1421 | 2367 | 4023 | 4851 | 5679 | 1422 | 3195 | 6507 | 7335 | 8163 |
| 1423 | 2368 | 4024 | 4852 | 5680 | 1424 | 3196 | 6508 | 7336 | 8164 |
| 1425 | 2369 | 4025 | 4853 | 5681 | 1426 | 3197 | 6509 | 7337 | 8165 |
| 1427 | 2370 | 4026 | 4854 | 5682 | 1428 | 3198 | 6510 | 7338 | 8166 |
| 1429 | 2371 | 4027 | 4855 | 5683 | 1430 | 3199 | 6511 | 7339 | 8167 |
| 1431 | 2372 | 4028 | 4856 | 5684 | 1432 | 3200 | 6512 | 7340 | 8168 |
| 1433 | 2373 | 4029 | 4857 | 5685 | 1434 | 3201 | 6513 | 7341 | 8169 |
| 1435 | 2374 | 4030 | 4858 | 5686 | 1436 | 3202 | 6514 | 7342 | 8170 |
| 1437 | 2375 | 4031 | 4859 | 5687 | 1438 | 3203 | 6515 | 7343 | 8171 |
| 1439 | 2376 | 4032 | 4860 | 5688 | 1440 | 3204 | 6516 | 7344 | 8172 |
| 1441 | 2377 | 4033 | 4861 | 5689 | 1442 | 3205 | 6517 | 7345 | 8173 |
| 1443 | 2378 | 4034 | 4862 | 5690 | 1444 | 3206 | 6518 | 7346 | 8174 |
| 1445 | 2379 | 4035 | 4863 | 5691 | 1446 | 3207 | 6519 | 7347 | 8175 |
| 1447 | 2380 | 4036 | 4864 | 5692 | 1448 | 3208 | 6520 | 7348 | 8176 |
| 1449 | 2381 | 4037 | 4865 | 5693 | 1450 | 3209 | 6521 | 7349 | 8177 |
| 1451 | 2382 | 4038 | 4866 | 5694 | 1452 | 3210 | 6522 | 7350 | 8178 |
| 1453 | 2383 | 4039 | 4867 | 5695 | 1454 | 3211 | 6523 | 7351 | 8179 |
| 1455 | 2384 | 4040 | 4868 | 5696 | 1456 | 3212 | 6524 | 7352 | 8180 |
| 1457 | 2385 | 4041 | 4869 | 5697 | 1458 | 3213 | 6525 | 7353 | 8181 |
| 1459 | 2386 | 4042 | 4870 | 5698 | 1460 | 3214 | 6526 | 7354 | 8182 |
| 1461 | 2387 | 4043 | 4871 | 5699 | 1462 | 3215 | 6527 | 7355 | 8183 |
| 1463 | 2388 | 4044 | 4872 | 5700 | 1464 | 3216 | 6528 | 7356 | 8184 |
| 1465 | 2389 | 4045 | 4873 | 5701 | 1466 | 3217 | 6529 | 7357 | 8185 |
| 1467 | 2390 | 4046 | 4874 | 5702 | 1468 | 3218 | 6530 | 7358 | 8186 |
| 1469 | 2391 | 4047 | 4875 | 5703 | 1470 | 3219 | 6531 | 7359 | 8187 |
| 1471 | 2392 | 4048 | 4876 | 5704 | 1472 | 3220 | 6532 | 7360 | 8188 |
| 1473 | 2393 | 4049 | 4877 | 5705 | 1474 | 3221 | 6533 | 7361 | 8189 |
| 1475 | 2394 | 4050 | 4878 | 5706 | 1476 | 3222 | 6534 | 7362 | 8190 |
| 1477 | 2395 | 4051 | 4879 | 5707 | 1478 | 3223 | 6535 | 7363 | 8191 |
| 1479 | 2396 | 4052 | 4880 | 5708 | 1480 | 3224 | 6536 | 7364 | 8192 |
| 1481 | 2397 | 4053 | 4881 | 5709 | 1482 | 3225 | 6537 | 7365 | 8193 |
| 1483 | 2398 | 4054 | 4882 | 5710 | 1484 | 3226 | 6538 | 7366 | 8194 |
| 1485 | 2399 | 4055 | 4883 | 5711 | 1486 | 3227 | 6539 | 7367 | 8195 |
| 1487 | 2400 | 4056 | 4884 | 5712 | 1488 | 3228 | 6540 | 7368 | 8196 |
| 1489 | 2401 | 4057 | 4885 | 5713 | 1490 | 3229 | 6541 | 7369 | 8197 |
| 1491 | 2402 | 4058 | 4886 | 5714 | 1492 | 3230 | 6542 | 7370 | 8198 |
| 1493 | 2403 | 4059 | 4887 | 5715 | 1494 | 3231 | 6543 | 7371 | 8199 |
| 1495 | 2404 | 4060 | 4888 | 5716 | 1496 | 3232 | 6544 | 7372 | 8200 |
| 1497 | 2405 | 4061 | 4889 | 5717 | 1498 | 3233 | 6545 | 7373 | 8201 |
| 1499 | 2406 | 4062 | 4890 | 5718 | 1500 | 3234 | 6546 | 7374 | 8202 |
| 1501 | 2407 | 4063 | 4891 | 5719 | 1502 | 3235 | 6547 | 7375 | 8203 |
| 1503 | 2408 | 4064 | 4892 | 5720 | 1504 | 3236 | 6548 | 7376 | 8204 |
| 1505 | 2409 | 4065 | 4893 | 5721 | 1506 | 3237 | 6549 | 7377 | 8205 |
| 1507 | 2410 | 4066 | 4894 | 5722 | 1508 | 3238 | 6550 | 7378 | 8206 |
| 1509 | 2411 | 4067 | 4895 | 5723 | 1510 | 3239 | 6551 | 7379 | 8207 |
| 1511 | 2412 | 4068 | 4896 | 5724 | 1512 | 3240 | 6552 | 7380 | 8208 |
| 1513 | 2413 | 4069 | 4897 | 5725 | 1514 | 3241 | 6553 | 7381 | 8209 |
| 1515 | 2414 | 4070 | 4898 | 5726 | 1516 | 3242 | 6554 | 7382 | 8210 |
| 1517 | 2415 | 4071 | 4899 | 5727 | 1518 | 3243 | 6555 | 7383 | 8211 |
| 1519 | 2416 | 4072 | 4900 | 5728 | 1520 | 3244 | 6556 | 7384 | 8212 |
| 1521 | 2417 | 4073 | 4901 | 5729 | 1522 | 3245 | 6557 | 7385 | 8213 |
| 1523 | 2418 | 4074 | 4902 | 5730 | 1524 | 3246 | 6558 | 7386 | 8214 |
| 1525 | 2419 | 4075 | 4903 | 5731 | 1526 | 3247 | 6559 | 7387 | 8215 |
| 1527 | 2420 | 4076 | 4904 | 5732 | 1528 | 3248 | 6560 | 7388 | 8216 |
| 1529 | 2421 | 4077 | 4905 | 5733 | 1530 | 3249 | 6561 | 7389 | 8217 |
| 1531 | 2422 | 4078 | 4906 | 5734 | 1532 | 3250 | 6562 | 7390 | 8218 |
| 1533 | 2423 | 4079 | 4907 | 5735 | 1534 | 3251 | 6563 | 7391 | 8219 |
| 1535 | 2424 | 4080 | 4908 | 5736 | 1536 | 3252 | 6564 | 7392 | 8220 |
| 1537 | 2425 | 4081 | 4909 | 5737 | 1538 | 3253 | 6565 | 7393 | 8221 |
| 1539 | 2426 | 4082 | 4910 | 5738 | 1540 | 3254 | 6566 | 7394 | 8222 |
| 1541 | 2427 | 4083 | 4911 | 5739 | 1542 | 3255 | 6567 | 7395 | 8223 |
| 1543 | 2428 | 4084 | 4912 | 5740 | 1544 | 3256 | 6568 | 7396 | 8224 |
| 1545 | 2429 | 4085 | 4913 | 5741 | 1546 | 3257 | 6569 | 7397 | 8225 |
| 1547 | 2430 | 4086 | 4914 | 5742 | 1548 | 3258 | 6570 | 7398 | 8226 |
| 1549 | 2431 | 4087 | 4915 | 5743 | 1550 | 3259 | 6571 | 7399 | 8227 |
| 1551 | 2432 | 4088 | 4916 | 5744 | 1552 | 3260 | 6572 | 7400 | 8228 |
| 1553 | 2433 | 4089 | 4917 | 5745 | 1554 | 3261 | 6573 | 7401 | 8229 |
| 1555 | 2434 | 4090 | 4918 | 5746 | 1556 | 3262 | 6574 | 7402 | 8230 |
| 1557 | 2435 | 4091 | 4919 | 5747 | 1558 | 3263 | 6575 | 7403 | 8231 |
| 1559 | 2436 | 4092 | 4920 | 5748 | 1560 | 3264 | 6576 | 7404 | 8232 |
| 1561 | 2437 | 4093 | 4921 | 5749 | 1562 | 3265 | 6577 | 7405 | 8233 |
| 1563 | 2438 | 4094 | 4922 | 5750 | 1564 | 3266 | 6578 | 7406 | 8234 |
| 1565 | 2439 | 4095 | 4923 | 5751 | 1566 | 3267 | 6579 | 7407 | 8235 |
| 1567 | 2440 | 4096 | 4924 | 5752 | 1568 | 3268 | 6580 | 7408 | 8236 |
| 1569 | 2441 | 4097 | 4925 | 5753 | 1570 | 3269 | 6581 | 7409 | 8237 |
| 1571 | 2442 | 4098 | 4926 | 5754 | 1572 | 3270 | 6582 | 7410 | 8238 |
| 1573 | 2443 | 4099 | 4927 | 5755 | 1574 | 3271 | 6583 | 7411 | 8239 |
| 1575 | 2444 | 4100 | 4928 | 5756 | 1576 | 3272 | 6584 | 7412 | 8240 |
| 1577 | 2445 | 4101 | 4929 | 5757 | 1578 | 3273 | 6585 | 7413 | 8241 |
| 1579 | 2446 | 4102 | 4930 | 5758 | 1580 | 3274 | 6586 | 7414 | 8242 |
| 1581 | 2447 | 4103 | 4931 | 5759 | 1582 | 3275 | 6587 | 7415 | 8243 |
| 1583 | 2448 | 4104 | 4932 | 5760 | 1584 | 3276 | 6588 | 7416 | 8244 |
| 1585 | 2449 | 4105 | 4933 | 5761 | 1586 | 3277 | 6589 | 7417 | 8245 |
| 1587 | 2450 | 4106 | 4934 | 5762 | 1588 | 3278 | 6590 | 7418 | 8246 |
| 1589 | 2451 | 4107 | 4935 | 5763 | 1590 | 3279 | 6591 | 7419 | 8247 |
| 1591 | 2452 | 4108 | 4936 | 5764 | 1592 | 3280 | 6592 | 7420 | 8248 |
| 1593 | 2453 | 4109 | 4937 | 5765 | 1594 | 3281 | 6593 | 7421 | 8249 |
| 1595 | 2454 | 4110 | 4938 | 5766 | 1596 | 3282 | 6594 | 7422 | 8250 |
| 1597 | 2455 | 4111 | 4939 | 5767 | 1598 | 3283 | 6595 | 7423 | 8251 |
| 1599 | 2456 | 4112 | 4940 | 5768 | 1600 | 3284 | 6596 | 7424 | 8252 |
| 1601 | 2457 | 4113 | 4941 | 5769 | 1602 | 3285 | 6597 | 7425 | 8253 |
| 1603 | 2458 | 4114 | 4942 | 5770 | 1604 | 3286 | 6598 | 7426 | 8254 |
| 1605 | 2459 | 4115 | 4943 | 5771 | 1606 | 3287 | 6599 | 7427 | 8255 |
| 1607 | 2460 | 4116 | 4944 | 5772 | 1608 | 3288 | 6600 | 7428 | 8256 |
| 1609 | 2461 | 4117 | 4945 | 5773 | 1610 | 3289 | 6601 | 7429 | 8257 |
| 1611 | 2462 | 4118 | 4946 | 5774 | 1612 | 3290 | 6602 | 7430 | 8258 |
| 1613 | 2463 | 4119 | 4947 | 5775 | 1614 | 3291 | 6603 | 7431 | 8259 |
| 1615 | 2464 | 4120 | 4948 | 5776 | 1616 | 3292 | 6604 | 7432 | 8260 |
| 1617 | 2465 | 4121 | 4949 | 5777 | 1618 | 3293 | 6605 | 7433 | 8261 |
| 1619 | 2466 | 4122 | 4950 | 5778 | 1620 | 3294 | 6606 | 7434 | 8262 |
| 1621 | 2467 | 4123 | 4951 | 5779 | 1622 | 3295 | 6607 | 7435 | 8263 |
| 1623 | 2468 | 4124 | 4952 | 5780 | 1624 | 3296 | 6608 | 7436 | 8264 |
| 1625 | 2469 | 4125 | 4953 | 5781 | 1626 | 3297 | 6609 | 7437 | 8265 |
| 1627 | 2470 | 4126 | 4954 | 5782 | 1628 | 3298 | 6610 | 7438 | 8266 |
| 1629 | 2471 | 4127 | 4955 | 5783 | 1630 | 3299 | 6611 | 7439 | 8267 |
| 1631 | 2472 | 4128 | 4956 | 5784 | 1632 | 3300 | 6612 | 7440 | 8268 |
| 1633 | 2473 | 4129 | 4957 | 5785 | 1634 | 3301 | 6613 | 7441 | 8269 |
| 1635 | 2474 | 4130 | 4958 | 5786 | 1636 | 3302 | 6614 | 7442 | 8270 |
| 1637 | 2475 | 4131 | 4959 | 5787 | 1638 | 3303 | 6615 | 7443 | 8271 |
| 1639 | 2476 | 4132 | 4960 | 5788 | 1640 | 3304 | 6616 | 7444 | 8272 |
| 1641 | 2477 | 4133 | 4961 | 5789 | 1642 | 3305 | 6617 | 7445 | 8273 |
| 1643 | 2478 | 4134 | 4962 | 5790 | 1644 | 3306 | 6618 | 7446 | 8274 |
| 1645 | 2479 | 4135 | 4963 | 5791 | 1646 | 3307 | 6619 | 7447 | 8275 |
| 1647 | 2480 | 4136 | 4964 | 5792 | 1648 | 3308 | 6620 | 7448 | 8276 |
| 1649 | 2481 | 4137 | 4965 | 5793 | 1650 | 3309 | 6621 | 7449 | 8277 |
| 1651 | 2482 | 4138 | 4966 | 5794 | 1652 | 3310 | 6622 | 7450 | 8278 |
| 1653 | 2483 | 4139 | 4967 | 5795 | 1654 | 3311 | 6623 | 7451 | 8279 |
| 1655 | 2484 | 4140 | 4968 | 5796 | 1656 | 3312 | 6624 | 7452 | 8280 |
| 8281 | 9939 | 11597 | 12426 | 13255 | 8282 | 10768 | 14084 | 14913 | 15742 |
| 8283 | 9940 | 11598 | 12427 | 13256 | 8284 | 10769 | 14085 | 14914 | 15743 |
| 8285 | 9941 | 11599 | 12428 | 13257 | 8286 | 10770 | 14086 | 14915 | 15744 |
| 8287 | 9942 | 11600 | 12429 | 13258 | 8288 | 10771 | 14087 | 14916 | 15745 |
| 8289 | 9943 | 11601 | 12430 | 13259 | 8290 | 10772 | 14088 | 14917 | 15746 |
| 8291 | 9944 | 11602 | 12431 | 13260 | 8292 | 10773 | 14089 | 14918 | 15747 |
| 8293 | 9945 | 11603 | 12432 | 13261 | 8294 | 10774 | 14090 | 14919 | 15748 |
| 8295 | 9946 | 11604 | 12433 | 13262 | 8296 | 10775 | 14091 | 14920 | 15749 |
| 8297 | 9947 | 11605 | 12434 | 13263 | 8298 | 10776 | 14092 | 14921 | 15750 |
| 8299 | 9948 | 11606 | 12435 | 13264 | 8300 | 10777 | 14093 | 14922 | 15751 |
| 8301 | 9949 | 11607 | 12436 | 13265 | 8302 | 10778 | 14094 | 14923 | 15752 |
| 8303 | 9950 | 11608 | 12437 | 13266 | 8304 | 10779 | 14095 | 14924 | 15753 |
| 8305 | 9951 | 11609 | 12438 | 13267 | 8306 | 10780 | 14096 | 14925 | 15754 |
| 8307 | 9952 | 11610 | 12439 | 13268 | 8308 | 10781 | 14097 | 14926 | 15755 |
| 8309 | 9953 | 11611 | 12440 | 13269 | 8310 | 10782 | 14098 | 14927 | 15756 |
| 8311 | 9954 | 11612 | 12441 | 13270 | 8312 | 10783 | 14099 | 14928 | 15757 |
| 8313 | 9955 | 11613 | 12442 | 13271 | 8314 | 10784 | 14100 | 14929 | 15758 |
| 8315 | 9956 | 11614 | 12443 | 13272 | 8316 | 10785 | 14101 | 14930 | 15759 |
| 8317 | 9957 | 11615 | 12444 | 13273 | 8318 | 10786 | 14102 | 14931 | 15760 |
| 8319 | 9958 | 11616 | 12445 | 13274 | 8320 | 10787 | 14103 | 14932 | 15761 |
| 8321 | 9959 | 11617 | 12446 | 13275 | 8322 | 10788 | 14104 | 14933 | 15762 |
| 8323 | 9960 | 11618 | 12447 | 13276 | 8324 | 10789 | 14105 | 14934 | 15763 |
| 8325 | 9961 | 11619 | 12448 | 13277 | 8326 | 10790 | 14106 | 14935 | 15764 |
| 8327 | 9962 | 11620 | 12449 | 13278 | 8328 | 10791 | 14107 | 14936 | 15765 |
| 8329 | 9963 | 11621 | 12450 | 13279 | 8330 | 10792 | 14108 | 14937 | 15766 |
| 8331 | 9964 | 11622 | 12451 | 13280 | 8332 | 10793 | 14109 | 14938 | 15767 |
| 8333 | 9965 | 11623 | 12452 | 13281 | 8334 | 10794 | 14110 | 14939 | 15768 |
| 8335 | 9966 | 11624 | 12453 | 13282 | 8336 | 10795 | 14111 | 14940 | 15769 |
| 8337 | 9967 | 11625 | 12454 | 13283 | 8338 | 10796 | 14112 | 14941 | 15770 |
| 8339 | 9968 | 11626 | 12455 | 13284 | 8340 | 10797 | 14113 | 14942 | 15771 |
| 8341 | 9969 | 11627 | 12456 | 13285 | 8342 | 10798 | 14114 | 14943 | 15772 |
| 8343 | 9970 | 11628 | 12457 | 13286 | 8344 | 10799 | 14115 | 14944 | 15773 |
| 8345 | 9971 | 11629 | 12458 | 13287 | 8346 | 10800 | 14116 | 14945 | 15774 |
| 8347 | 9972 | 11630 | 12459 | 13288 | 8348 | 10801 | 14117 | 14946 | 15775 |
| 8349 | 9973 | 11631 | 12460 | 13289 | 8350 | 10802 | 14118 | 14947 | 15776 |
| 8351 | 9974 | 11632 | 12461 | 13290 | 8352 | 10803 | 14119 | 14948 | 15777 |
| 8353 | 9975 | 11633 | 12462 | 13291 | 8354 | 10804 | 14120 | 14949 | 15778 |
| 8355 | 9976 | 11634 | 12463 | 13292 | 8356 | 10805 | 14121 | 14950 | 15779 |
| 8357 | 9977 | 11635 | 12464 | 13293 | 8358 | 10806 | 14122 | 14951 | 15780 |
| 8359 | 9978 | 11636 | 12465 | 13294 | 8360 | 10807 | 14123 | 14952 | 15781 |
| 8361 | 9979 | 11637 | 12466 | 13295 | 8362 | 10808 | 14124 | 14953 | 15782 |
| 8363 | 9980 | 11638 | 12467 | 13296 | 8364 | 10809 | 14125 | 14954 | 15783 |
| 8365 | 9981 | 11639 | 12468 | 13297 | 8366 | 10810 | 14126 | 14955 | 15784 |
| 8367 | 9982 | 11640 | 12469 | 13298 | 8368 | 10811 | 14127 | 14956 | 15785 |
| 8369 | 9983 | 11641 | 12470 | 13299 | 8370 | 10812 | 14128 | 14957 | 15786 |
| 8371 | 9984 | 11642 | 12471 | 13300 | 8372 | 10813 | 14129 | 14958 | 15787 |
| 8373 | 9985 | 11643 | 12472 | 13301 | 8374 | 10814 | 14130 | 14959 | 15788 |
| 8375 | 9986 | 11644 | 12473 | 13302 | 8376 | 10815 | 14131 | 14960 | 15789 |
| 8377 | 9987 | 11645 | 12474 | 13303 | 8378 | 10816 | 14132 | 14961 | 15790 |
| 8379 | 9988 | 11646 | 12475 | 13304 | 8380 | 10817 | 14133 | 14962 | 15791 |
| 8381 | 9989 | 11647 | 12476 | 13305 | 8382 | 10818 | 14134 | 14963 | 15792 |
| 8383 | 9990 | 11648 | 12477 | 13306 | 8384 | 10819 | 14135 | 14964 | 15793 |
| 8385 | 9991 | 11649 | 12478 | 13307 | 8386 | 10820 | 14136 | 14965 | 15794 |
| 8387 | 9992 | 11650 | 12479 | 13308 | 8388 | 10821 | 14137 | 14966 | 15795 |
| 8389 | 9993 | 11651 | 12480 | 13309 | 8390 | 10822 | 14138 | 14967 | 15796 |
| 8391 | 9994 | 11652 | 12481 | 13310 | 8392 | 10823 | 14139 | 14968 | 15797 |
| 8393 | 9995 | 11653 | 12482 | 13311 | 8394 | 10824 | 14140 | 14969 | 15798 |
| 8395 | 9996 | 11654 | 12483 | 13312 | 8396 | 10825 | 14141 | 14970 | 15799 |
| 8397 | 9997 | 11655 | 12484 | 13313 | 8398 | 10826 | 14142 | 14971 | 15800 |
| 8399 | 9998 | 11656 | 12485 | 13314 | 8400 | 10827 | 14143 | 14972 | 15801 |
| 8401 | 9999 | 11657 | 12486 | 13315 | 8402 | 10828 | 14144 | 14973 | 15802 |
| 8403 | 10000 | 11658 | 12487 | 13316 | 8404 | 10829 | 14145 | 14974 | 15803 |
| 8405 | 10001 | 11659 | 12488 | 13317 | 8406 | 10830 | 14146 | 14975 | 15804 |
| 8407 | 10002 | 11660 | 12489 | 13318 | 8408 | 10831 | 14147 | 14976 | 15805 |
| 8409 | 10003 | 11661 | 12490 | 13319 | 8410 | 10832 | 14148 | 14977 | 15806 |
| 8411 | 10004 | 11662 | 12491 | 13320 | 8412 | 10833 | 14149 | 14978 | 15807 |
| 8413 | 10005 | 11663 | 12492 | 13321 | 8414 | 10834 | 14150 | 14979 | 15808 |
| 8415 | 10006 | 11664 | 12493 | 13322 | 8416 | 10835 | 14151 | 14980 | 15809 |
| 8417 | 10007 | 11665 | 12494 | 13323 | 8418 | 10836 | 14152 | 14981 | 15810 |
| 8419 | 10008 | 11666 | 12495 | 13324 | 8420 | 10837 | 14153 | 14982 | 15811 |
| 8421 | 10009 | 11667 | 12496 | 13325 | 8422 | 10838 | 14154 | 14983 | 15812 |
| 8423 | 10010 | 11668 | 12497 | 13326 | 8424 | 10839 | 14155 | 14984 | 15813 |
| 8425 | 10011 | 11669 | 12498 | 13327 | 8426 | 10840 | 14156 | 14985 | 15814 |
| 8427 | 10012 | 11670 | 12499 | 13328 | 8428 | 10841 | 14157 | 14986 | 15815 |
| 8429 | 10013 | 11671 | 12500 | 13329 | 8430 | 10842 | 14158 | 14987 | 15816 |
| 8431 | 10014 | 11672 | 12501 | 13330 | 8432 | 10843 | 14159 | 14988 | 15817 |
| 8433 | 10015 | 11673 | 12502 | 13331 | 8434 | 10844 | 14160 | 14989 | 15818 |
| 8435 | 10016 | 11674 | 12503 | 13332 | 8436 | 10845 | 14161 | 14990 | 15819 |
| 8437 | 10017 | 11675 | 12504 | 13333 | 8438 | 10846 | 14162 | 14991 | 15820 |
| 8439 | 10018 | 11676 | 12505 | 13334 | 8440 | 10847 | 14163 | 14992 | 15821 |
| 8441 | 10019 | 11677 | 12506 | 13335 | 8442 | 10848 | 14164 | 14993 | 15822 |
| 8443 | 10020 | 11678 | 12507 | 13336 | 8444 | 10849 | 14165 | 14994 | 15823 |
| 8445 | 10021 | 11679 | 12508 | 13337 | 8446 | 10850 | 14166 | 14995 | 15824 |
| 8447 | 10022 | 11680 | 12509 | 13338 | 8448 | 10851 | 14167 | 14996 | 15825 |
| 8449 | 10023 | 11681 | 12510 | 13339 | 8450 | 10852 | 14168 | 14997 | 15826 |
| 8451 | 10024 | 11682 | 12511 | 13340 | 8452 | 10853 | 14169 | 14998 | 15827 |
| 8453 | 10025 | 11683 | 12512 | 13341 | 8454 | 10854 | 14170 | 14999 | 15828 |
| 8455 | 10026 | 11684 | 12513 | 13342 | 8456 | 10855 | 14171 | 15000 | 15829 |
| 8457 | 10027 | 11685 | 12514 | 13343 | 8458 | 10856 | 14172 | 15001 | 15830 |
| 8459 | 10028 | 11686 | 12515 | 13344 | 8460 | 10857 | 14173 | 15002 | 15831 |
| 8461 | 10029 | 11687 | 12516 | 13345 | 8462 | 10858 | 14174 | 15003 | 15832 |
| 8463 | 10030 | 11688 | 12517 | 13346 | 8464 | 10859 | 14175 | 15004 | 15833 |
| 8465 | 10031 | 11689 | 12518 | 13347 | 8466 | 10860 | 14176 | 15005 | 15834 |
| 8467 | 10032 | 11690 | 12519 | 13348 | 8468 | 10861 | 14177 | 15006 | 15835 |
| 8469 | 10033 | 11691 | 12520 | 13349 | 8470 | 10862 | 14178 | 15007 | 15836 |
| 8471 | 10034 | 11692 | 12521 | 13350 | 8472 | 10863 | 14179 | 15008 | 15837 |
| 8473 | 10035 | 11693 | 12522 | 13351 | 8474 | 10864 | 14180 | 15009 | 15838 |
| 8475 | 10036 | 11694 | 12523 | 13352 | 8476 | 10865 | 14181 | 15010 | 15839 |
| 8477 | 10037 | 11695 | 12524 | 13353 | 8478 | 10866 | 14182 | 15011 | 15840 |
| 8479 | 10038 | 11696 | 12525 | 13354 | 8480 | 10867 | 14183 | 15012 | 15841 |
| 8481 | 10039 | 11697 | 12526 | 13355 | 8482 | 10868 | 14184 | 15013 | 15842 |
| 8483 | 10040 | 11698 | 12527 | 13356 | 8484 | 10869 | 14185 | 15014 | 15843 |
| 8485 | 10041 | 11699 | 12528 | 13357 | 8486 | 10870 | 14186 | 15015 | 15844 |
| 8487 | 10042 | 11700 | 12529 | 13358 | 8488 | 10871 | 14187 | 15016 | 15845 |
| 8489 | 10043 | 11701 | 12530 | 13359 | 8490 | 10872 | 14188 | 15017 | 15846 |
| 8491 | 10044 | 11702 | 12531 | 13360 | 8492 | 10873 | 14189 | 15018 | 15847 |
| 8493 | 10045 | 11703 | 12532 | 13361 | 8494 | 10874 | 14190 | 15019 | 15848 |
| 8495 | 10046 | 11704 | 12533 | 13362 | 8496 | 10875 | 14191 | 15020 | 15849 |
| 8497 | 10047 | 11705 | 12534 | 13363 | 8498 | 10876 | 14192 | 1502 | 15850 |
| 8499 | 10048 | 11706 | 12535 | 13364 | 8500 | 10877 | 14193 | 15022 | 15851 |
| 8501 | 10049 | 11707 | 12536 | 13365 | 8502 | 10878 | 14194 | 15023 | 15852 |
| 8503 | 10050 | 11708 | 12537 | 13366 | 8504 | 10879 | 14195 | 15024 | 15853 |
| 8505 | 10051 | 11709 | 12538 | 13367 | 8506 | 10880 | 14196 | 15025 | 15854 |
| 8507 | 10052 | 11710 | 12539 | 13368 | 8508 | 10881 | 14197 | 15026 | 15855 |
| 8509 | 10053 | 11711 | 12540 | 13369 | 8510 | 10882 | 14198 | 15027 | 15856 |
| 8511 | 10054 | 11712 | 12541 | 13370 | 8512 | 10883 | 14199 | 15028 | 15857 |
| 8513 | 10055 | 11713 | 12542 | 13371 | 8514 | 10884 | 14200 | 15029 | 15858 |
| 8515 | 10056 | 11714 | 12543 | 13372 | 8516 | 10885 | 14201 | 15030 | 15859 |
| 8517 | 10057 | 11715 | 12544 | 13373 | 8518 | 10886 | 14202 | 15031 | 15860 |
| 8519 | 10058 | 11716 | 12545 | 13374 | 8520 | 10887 | 14203 | 15032 | 15861 |
| 8521 | 10059 | 11717 | 12546 | 13375 | 8522 | 10888 | 14204 | 15033 | 15862 |
| 8523 | 10060 | 11718 | 12547 | 13376 | 8524 | 10889 | 14205 | 15034 | 15863 |
| 8525 | 10061 | 11719 | 12548 | 13377 | 8526 | 10890 | 14206 | 15035 | 15864 |
| 8527 | 10062 | 11720 | 12549 | 13378 | 8528 | 10891 | 14207 | 15036 | 15865 |
| 8529 | 10063 | 11721 | 12550 | 13379 | 8530 | 10892 | 14208 | 15037 | 15866 |
| 8531 | 10064 | 11722 | 12551 | 13380 | 8532 | 10893 | 14209 | 15038 | 15867 |
| 8533 | 10065 | 11723 | 12552 | 13381 | 8534 | 10894 | 14210 | 15039 | 15868 |
| 8535 | 10066 | 11724 | 12553 | 13382 | 8536 | 10895 | 14211 | 15040 | 15869 |
| 8537 | 10067 | 11725 | 12554 | 13383 | 8538 | 10896 | 14212 | 15041 | 15870 |
| 8539 | 10068 | 11726 | 12555 | 13384 | 8540 | 10897 | 14213 | 15042 | 15871 |
| 8541 | 10069 | 11727 | 12556 | 13385 | 8542 | 10898 | 14214 | 15043 | 15872 |
| 8543 | 10070 | 11728 | 12557 | 13386 | 8544 | 10899 | 14215 | 15044 | 15873 |
| 8545 | 10071 | 11729 | 12558 | 13387 | 8546 | 10900 | 14216 | 15045 | 15874 |
| 8547 | 10072 | 11730 | 12559 | 13388 | 8548 | 10901 | 14217 | 15046 | 15875 |
| 8549 | 10073 | 11731 | 12560 | 13389 | 8550 | 10902 | 14218 | 15047 | 15876 |
| 8551 | 10074 | 11732 | 12561 | 13390 | 8552 | 10903 | 14219 | 15048 | 15877 |
| 8553 | 10075 | 11733 | 12562 | 13391 | 8554 | 10904 | 14220 | 15049 | 15878 |
| 8555 | 10076 | 11734 | 12563 | 13392 | 8556 | 10905 | 14221 | 15050 | 15879 |
| 8557 | 10077 | 11735 | 12564 | 13393 | 8558 | 10906 | 14222 | 15051 | 15880 |
| 8559 | 10078 | 11736 | 12565 | 13394 | 8560 | 10907 | 14223 | 15052 | 15881 |
| 8561 | 10079 | 11737 | 12566 | 13395 | 8562 | 10908 | 14224 | 15053 | 15882 |
| 8563 | 10080 | 11738 | 12567 | 13396 | 8564 | 10909 | 14225 | 15054 | 15883 |
| 8565 | 10081 | 11739 | 12568 | 13397 | 8566 | 10910 | 14226 | 15055 | 15884 |
| 8567 | 10082 | 11740 | 12569 | 13398 | 8568 | 10911 | 14227 | 15056 | 15885 |
| 8569 | 10083 | 11741 | 12570 | 13399 | 8570 | 10912 | 14228 | 15057 | 15886 |
| 8571 | 10084 | 11742 | 12571 | 13400 | 8572 | 10913 | 14229 | 15058 | 15887 |
| 8573 | 10085 | 11743 | 12572 | 13401 | 8574 | 10914 | 14230 | 15059 | 15888 |
| 8575 | 10086 | 11744 | 12573 | 13402 | 8576 | 10915 | 14231 | 15060 | 15889 |
| 8577 | 10087 | 11745 | 12574 | 13403 | 8578 | 10916 | 14232 | 15061 | 15890 |
| 8579 | 10088 | 11746 | 12575 | 13404 | 8580 | 10917 | 14233 | 15062 | 15891 |
| 8581 | 10089 | 11747 | 12576 | 13405 | 8582 | 10918 | 14234 | 15063 | 15892 |
| 8583 | 10090 | 11748 | 12577 | 13406 | 8584 | 10919 | 14235 | 15064 | 15893 |
| 8585 | 10091 | 11749 | 12578 | 13407 | 8586 | 10920 | 14236 | 15065 | 15894 |
| 8587 | 10092 | 11750 | 12579 | 13408 | 8588 | 10921 | 14237 | 15066 | 15895 |
| 8589 | 10093 | 11751 | 12580 | 13409 | 8590 | 10922 | 14238 | 15067 | 15896 |
| 8591 | 10094 | 11752 | 12581 | 13410 | 8592 | 10923 | 14239 | 15068 | 15897 |
| 8593 | 10095 | 11753 | 12582 | 13411 | 8594 | 10924 | 14240 | 15069 | 15898 |
| 8595 | 10096 | 11754 | 12583 | 13412 | 8596 | 10925 | 14241 | 15070 | 15899 |
| 8597 | 10097 | 11755 | 12584 | 13413 | 8598 | 10926 | 14242 | 15071 | 15900 |
| 8599 | 10098 | 11756 | 12585 | 13414 | 8600 | 10927 | 14243 | 15072 | 15901 |
| 8601 | 10099 | 11757 | 12586 | 13415 | 8602 | 10928 | 14244 | 15073 | 15902 |
| 8603 | 10100 | 11758 | 12587 | 13416 | 8604 | 10929 | 14245 | 15074 | 15903 |
| 8605 | 10101 | 11759 | 12588 | 13417 | 8606 | 10930 | 14246 | 15075 | 15904 |
| 8607 | 10102 | 11760 | 12589 | 13418 | 8608 | 10931 | 14247 | 15076 | 15905 |
| 8609 | 10103 | 11761 | 12590 | 13419 | 8610 | 10932 | 14248 | 15077 | 15906 |
| 8611 | 10104 | 11762 | 12591 | 13420 | 8612 | 10933 | 14249 | 15078 | 15907 |
| 8613 | 10105 | 11763 | 12592 | 13421 | 8614 | 10934 | 14250 | 15079 | 15908 |
| 8615 | 10106 | 11764 | 12593 | 13422 | 8616 | 10935 | 14251 | 15080 | 15909 |
| 8617 | 10107 | 11765 | 12594 | 13423 | 8618 | 10936 | 14252 | 15081 | 15910 |
| 8619 | 10108 | 11766 | 12595 | 13424 | 8620 | 10937 | 14253 | 15082 | 15911 |
| 8621 | 10109 | 11767 | 12596 | 13425 | 8622 | 10938 | 14254 | 15083 | 15912 |
| 8623 | 10110 | 11768 | 12597 | 13426 | 8624 | 10939 | 14255 | 15084 | 15913 |
| 8625 | 10111 | 11769 | 12598 | 13427 | 8626 | 10940 | 14256 | 15085 | 15914 |
| 8627 | 10112 | 11770 | 12599 | 13428 | 8628 | 10941 | 14257 | 15086 | 15915 |
| 8629 | 10113 | 11771 | 12600 | 13429 | 8630 | 10942 | 14258 | 15087 | 15916 |
| 8631 | 10114 | 11772 | 12601 | 13430 | 8632 | 10943 | 14259 | 15088 | 15917 |
| 8633 | 10115 | 11773 | 12602 | 13431 | 8634 | 10944 | 14260 | 15089 | 15918 |
| 8635 | 10116 | 11774 | 12603 | 13432 | 8636 | 10945 | 14261 | 15090 | 15919 |
| 8637 | 10117 | 11775 | 12604 | 13433 | 8638 | 10946 | 14262 | 15091 | 15920 |
| 8639 | 10118 | 11776 | 12605 | 13434 | 8640 | 10947 | 14263 | 15092 | 15921 |
| 8641 | 10119 | 11777 | 12606 | 13435 | 8642 | 10948 | 14264 | 15093 | 15922 |
| 8643 | 10120 | 11778 | 12607 | 13436 | 8644 | 10949 | 14265 | 15094 | 15923 |
| 8645 | 10121 | 11779 | 12608 | 13437 | 8646 | 10950 | 14266 | 15095 | 15924 |
| 8647 | 10122 | 11780 | 12609 | 13438 | 8648 | 10951 | 14267 | 15096 | 15925 |
| 8649 | 10123 | 11781 | 12610 | 13439 | 8650 | 10952 | 14268 | 15097 | 15926 |
| 8651 | 10124 | 11782 | 12611 | 13440 | 8652 | 10953 | 14269 | 15098 | 15927 |
| 8653 | 10125 | 11783 | 12612 | 13441 | 8654 | 10954 | 14270 | 15099 | 15928 |
| 8655 | 10126 | 11784 | 12613 | 13442 | 8656 | 10955 | 14271 | 15100 | 15929 |
| 8657 | 10127 | 11785 | 12614 | 13443 | 8658 | 10956 | 14272 | 15101 | 15930 |
| 8659 | 10128 | 11786 | 12615 | 13444 | 8660 | 10957 | 14273 | 15102 | 15931 |
| 8661 | 10129 | 11787 | 12616 | 13445 | 8662 | 10958 | 14274 | 15103 | 15932 |
| 8663 | 10130 | 11788 | 12617 | 13446 | 8664 | 10959 | 14275 | 15104 | 15933 |
| 8665 | 10131 | 11789 | 12618 | 13447 | 8666 | 10960 | 14276 | 15105 | 15934 |
| 8667 | 10132 | 11790 | 12619 | 13448 | 8668 | 10961 | 14277 | 15106 | 15935 |
| 8669 | 10133 | 11791 | 12620 | 13449 | 8670 | 10962 | 14278 | 15107 | 15936 |
| 8671 | 10134 | 11792 | 12621 | 13450 | 8672 | 10963 | 14279 | 15108 | 15937 |
| 8673 | 10135 | 11793 | 12622 | 13451 | 8674 | 10964 | 14280 | 15109 | 15938 |
| 8675 | 10136 | 11794 | 12623 | 13452 | 8676 | 10965 | 14281 | 15110 | 15939 |
| 8677 | 10137 | 11795 | 12624 | 13453 | 8678 | 10966 | 14282 | 15111 | 15940 |
| 8679 | 10138 | 11796 | 12625 | 13454 | 8680 | 10967 | 14283 | 15112 | 15941 |
| 8681 | 10139 | 11797 | 12626 | 13455 | 8682 | 10968 | 14284 | 15113 | 15942 |
| 8683 | 10140 | 11798 | 12627 | 13456 | 8684 | 10969 | 14285 | 15114 | 15943 |
| 8685 | 10141 | 11799 | 12628 | 13457 | 8686 | 10970 | 14286 | 15115 | 15944 |
| 8687 | 10142 | 11800 | 12629 | 13458 | 8688 | 10971 | 14287 | 15116 | 15945 |
| 8689 | 10143 | 11801 | 12630 | 13459 | 8690 | 10972 | 14288 | 15117 | 15946 |
| 8691 | 10144 | 11802 | 12631 | 13460 | 8692 | 10973 | 14289 | 15118 | 15947 |
| 8693 | 10145 | 11803 | 12632 | 13461 | 8694 | 10974 | 14290 | 15119 | 15948 |
| 8695 | 10146 | 11804 | 12633 | 13462 | 8696 | 10975 | 14291 | 15120 | 15949 |
| 8697 | 10147 | 11805 | 12634 | 13463 | 8698 | 10976 | 14292 | 15121 | 15950 |
| 8699 | 10148 | 11806 | 12635 | 13464 | 8700 | 10977 | 14293 | 15122 | 15951 |
| 8701 | 10149 | 11807 | 12636 | 13465 | 8702 | 10978 | 14294 | 15123 | 15952 |
| 8703 | 10150 | 11808 | 12637 | 13466 | 8704 | 10979 | 14295 | 15124 | 15953 |
| 8705 | 10151 | 11809 | 12638 | 13467 | 8706 | 10980 | 14296 | 15125 | 15954 |
| 8707 | 10152 | 11810 | 12639 | 13468 | 8708 | 10981 | 14297 | 15126 | 15955 |
| 8709 | 10153 | 11811 | 12640 | 13469 | 8710 | 10982 | 14298 | 15127 | 15956 |
| 8711 | 10154 | 11812 | 12641 | 13470 | 8712 | 10983 | 14299 | 15128 | 15957 |
| 8713 | 10155 | 11813 | 12642 | 13471 | 8714 | 10984 | 14300 | 15129 | 15958 |
| 8715 | 10156 | 11814 | 12643 | 13472 | 8716 | 10985 | 14301 | 15130 | 15959 |
| 8717 | 10157 | 11815 | 12644 | 13473 | 8718 | 10986 | 14302 | 15131 | 15960 |
| 8719 | 10158 | 11816 | 12645 | 13474 | 8720 | 10987 | 14303 | 15132 | 15961 |
| 8721 | 10159 | 11817 | 12646 | 13475 | 8722 | 10988 | 14304 | 15133 | 15962 |
| 8723 | 10160 | 11818 | 12647 | 13476 | 8724 | 10989 | 14305 | 15134 | 15963 |
| 8725 | 10161 | 11819 | 12648 | 13477 | 8726 | 10990 | 14306 | 15135 | 15964 |
| 8727 | 10162 | 11820 | 12649 | 13478 | 8728 | 10991 | 14307 | 15136 | 15965 |
| 8729 | 10163 | 11821 | 12650 | 13479 | 8730 | 10992 | 14308 | 15137 | 15966 |
| 8731 | 10164 | 11822 | 12651 | 13480 | 8732 | 10993 | 14309 | 15138 | 15967 |
| 8733 | 10165 | 11823 | 12652 | 13481 | 8734 | 10994 | 14310 | 15139 | 15968 |
| 8735 | 10166 | 11824 | 12653 | 13482 | 8736 | 10995 | 14311 | 15140 | 15969 |
| 8737 | 10167 | 11825 | 12654 | 13483 | 8738 | 10996 | 14312 | 15141 | 15970 |
| 8739 | 10168 | 11826 | 12655 | 13484 | 8740 | 10997 | 14313 | 15142 | 15971 |
| 8741 | 10169 | 11827 | 12656 | 13485 | 8742 | 10998 | 14314 | 15143 | 15972 |
| 8743 | 10170 | 11828 | 12657 | 13486 | 8744 | 10999 | 14315 | 15144 | 15973 |
| 8745 | 10171 | 11829 | 12658 | 13487 | 8746 | 11000 | 14316 | 15145 | 15974 |
| 8747 | 10172 | 11830 | 12659 | 13488 | 8748 | 11001 | 14317 | 15146 | 15975 |
| 8749 | 10173 | 11831 | 12660 | 13489 | 8750 | 11002 | 14318 | 15147 | 15976 |
| 8751 | 10174 | 11832 | 12661 | 13490 | 8752 | 11003 | 14319 | 15148 | 15977 |
| 8753 | 10175 | 11833 | 12662 | 13491 | 8754 | 11004 | 14320 | 15149 | 15978 |
| 8755 | 10176 | 11834 | 12663 | 13492 | 8756 | 11005 | 14321 | 15150 | 15979 |
| 8757 | 10177 | 11835 | 12664 | 13493 | 8758 | 11006 | 14322 | 15151 | 15980 |
| 8759 | 10178 | 11836 | 12665 | 13494 | 8760 | 11007 | 14323 | 15152 | 15981 |
| 8761 | 10179 | 11837 | 12666 | 13495 | 8762 | 11008 | 14324 | 15153 | 15982 |
| 8763 | 10180 | 11838 | 12667 | 13496 | 8764 | 11009 | 14325 | 15154 | 15983 |
| 8765 | 10181 | 11839 | 12668 | 13497 | 8766 | 11010 | 14326 | 15155 | 15984 |
| 8767 | 10182 | 11840 | 12669 | 13498 | 8768 | 11011 | 14327 | 15156 | 15985 |
| 8769 | 10183 | 11841 | 12670 | 13499 | 8770 | 11012 | 14328 | 15157 | 15986 |
| 8771 | 10184 | 11842 | 12671 | 13500 | 8772 | 11013 | 14329 | 15158 | 15987 |
| 8773 | 10185 | 11843 | 12672 | 13501 | 8774 | 11014 | 14330 | 15159 | 15988 |
| 8775 | 10186 | 11844 | 12673 | 13502 | 8776 | 11015 | 14331 | 15160 | 15989 |
| 8777 | 10187 | 11845 | 12674 | 13503 | 8778 | 11016 | 14332 | 15161 | 15990 |
| 8779 | 10188 | 11846 | 12675 | 13504 | 8780 | 11017 | 14333 | 15162 | 15991 |
| 8781 | 10189 | 11847 | 12676 | 13505 | 8782 | 11018 | 14334 | 15163 | 15992 |
| 8783 | 10190 | 11848 | 12677 | 13506 | 8784 | 11019 | 14335 | 15164 | 15993 |
| 8785 | 10191 | 11849 | 12678 | 13507 | 8786 | 11020 | 14336 | 15165 | 15994 |
| 8787 | 10192 | 11850 | 12679 | 13508 | 8788 | 11021 | 14337 | 15166 | 15995 |
| 8789 | 10193 | 11851 | 12680 | 13509 | 8790 | 11022 | 14338 | 15167 | 15996 |
| 8791 | 10194 | 11852 | 12681 | 13510 | 8792 | 11023 | 14339 | 15168 | 15997 |
| 8793 | 10195 | 11853 | 12682 | 13511 | 8794 | 11024 | 14340 | 15169 | 15998 |
| 8795 | 10196 | 11854 | 12683 | 13512 | 8796 | 11025 | 14341 | 15170 | 15999 |
| 8797 | 10197 | 11855 | 12684 | 13513 | 8798 | 11026 | 14342 | 15171 | 16000 |
| 8799 | 10198 | 11856 | 12685 | 13514 | 8800 | 11027 | 14343 | 15172 | 16001 |
| 8801 | 10199 | 11857 | 12686 | 13515 | 8802 | 11028 | 14344 | 15173 | 16002 |
| 8803 | 10200 | 11858 | 12687 | 13516 | 8804 | 11029 | 14345 | 15174 | 16003 |
| 8805 | 10201 | 11859 | 12688 | 13517 | 8806 | 11030 | 14346 | 15175 | 16004 |
| 8807 | 10202 | 11860 | 12689 | 13518 | 8808 | 11031 | 14347 | 15176 | 16005 |
| 8809 | 10203 | 11861 | 12690 | 13519 | 8810 | 11032 | 14348 | 15177 | 16006 |
| 8811 | 10204 | 11862 | 12691 | 13520 | 8812 | 11033 | 14349 | 15178 | 16007 |
| 8813 | 10205 | 11863 | 12692 | 13521 | 8814 | 11034 | 14350 | 15179 | 16008 |
| 8815 | 10206 | 11864 | 12693 | 13522 | 8816 | 11035 | 14351 | 15180 | 16009 |
| 8817 | 10207 | 11865 | 12694 | 13523 | 8818 | 11036 | 14352 | 15181 | 16010 |
| 8819 | 10208 | 11866 | 12695 | 13524 | 8820 | 11037 | 14353 | 15182 | 16011 |
| 8821 | 10209 | 11867 | 12696 | 13525 | 8822 | 11038 | 14354 | 15183 | 16012 |
| 8823 | 10210 | 11868 | 12697 | 13526 | 8824 | 11039 | 14355 | 15184 | 16013 |
| 8825 | 10211 | 11869 | 12698 | 13527 | 8826 | 11040 | 14356 | 15185 | 16014 |
| 8827 | 10212 | 11870 | 12699 | 13528 | 8828 | 11041 | 14357 | 15186 | 16015 |
| 8829 | 10213 | 11871 | 12700 | 13529 | 8830 | 11042 | 14358 | 15187 | 16016 |
| 8831 | 10214 | 11872 | 12701 | 13530 | 8832 | 11043 | 14359 | 15188 | 16017 |
| 8833 | 10215 | 11873 | 12702 | 13531 | 8834 | 11044 | 14360 | 15189 | 16018 |
| 8835 | 10216 | 11874 | 12703 | 13532 | 8836 | 11045 | 14361 | 15190 | 16019 |
| 8837 | 10217 | 11875 | 12704 | 13533 | 8838 | 11046 | 14362 | 15191 | 16020 |
| 8839 | 10218 | 11876 | 12705 | 13534 | 8840 | 11047 | 14363 | 15192 | 16021 |
| 8841 | 10219 | 11877 | 12706 | 13535 | 8842 | 11048 | 14364 | 15193 | 16022 |
| 8843 | 10220 | 11878 | 12707 | 13536 | 8844 | 11049 | 14365 | 15194 | 16023 |
| 8845 | 10221 | 11879 | 12708 | 13537 | 8846 | 11050 | 14366 | 15195 | 16024 |
| 8847 | 10222 | 11880 | 12709 | 13538 | 8848 | 11051 | 14367 | 15196 | 16025 |
| 8849 | 10223 | 11881 | 12710 | 13539 | 8850 | 11052 | 14368 | 15197 | 16026 |
| 8851 | 10224 | 11882 | 12711 | 13540 | 8852 | 11053 | 14369 | 15198 | 16027 |
| 8853 | 10225 | 11883 | 12712 | 13541 | 8854 | 11054 | 14370 | 15199 | 16028 |
| 8855 | 10226 | 11884 | 12713 | 13542 | 8856 | 11055 | 14371 | 15200 | 16029 |
| 8857 | 10227 | 11885 | 12714 | 13543 | 8858 | 11056 | 14372 | 15201 | 16030 |
| 8859 | 10228 | 11886 | 12715 | 13544 | 8860 | 11057 | 14373 | 15202 | 16031 |
| 8861 | 10229 | 11887 | 12716 | 13545 | 8862 | 11058 | 14374 | 15203 | 16032 |
| 8863 | 10230 | 11888 | 12717 | 13546 | 8864 | 11059 | 14375 | 15204 | 16033 |
| 8865 | 10231 | 11889 | 12718 | 13547 | 8866 | 11060 | 14376 | 15205 | 16034 |
| 8867 | 10232 | 11890 | 12719 | 13548 | 8868 | 11061 | 14377 | 15206 | 16035 |
| 8869 | 10233 | 11891 | 12720 | 13549 | 8870 | 11062 | 14378 | 15207 | 16036 |
| 8871 | 10234 | 11892 | 12721 | 13550 | 8872 | 11063 | 14379 | 15208 | 16037 |
| 8873 | 10235 | 11893 | 12722 | 13551 | 8874 | 11064 | 14380 | 15209 | 16038 |
| 8875 | 10236 | 11894 | 12723 | 13552 | 8876 | 11065 | 14381 | 15210 | 16039 |
| 8877 | 10237 | 11895 | 12724 | 13553 | 8878 | 11066 | 14382 | 15211 | 16040 |
| 8879 | 10238 | 11896 | 12725 | 13554 | 8880 | 11067 | 14383 | 15212 | 16041 |
| 8881 | 10239 | 11897 | 12726 | 13555 | 8882 | 11068 | 14384 | 15213 | 16042 |
| 8883 | 10240 | 11898 | 12727 | 13556 | 8884 | 11069 | 14385 | 15214 | 16043 |
| 8885 | 10241 | 11899 | 12728 | 13557 | 8886 | 11070 | 14386 | 15215 | 16044 |
| 8887 | 10242 | 11900 | 12729 | 13558 | 8888 | 11071 | 14387 | 15216 | 16045 |
| 8889 | 10243 | 11901 | 12730 | 13559 | 8890 | 11072 | 14388 | 15217 | 16046 |
| 8891 | 10244 | 11902 | 12731 | 13560 | 8892 | 11073 | 14389 | 15218 | 16047 |
| 8893 | 10245 | 11903 | 12732 | 13561 | 8894 | 11074 | 14390 | 15219 | 16048 |
| 8895 | 10246 | 11904 | 12733 | 13562 | 8896 | 11075 | 14391 | 15220 | 16049 |
| 8897 | 10247 | 11905 | 12734 | 13563 | 8898 | 11076 | 14392 | 15221 | 16050 |
| 8899 | 10248 | 11906 | 12735 | 13564 | 8900 | 11077 | 14393 | 15222 | 16051 |
| 8901 | 10249 | 11907 | 12736 | 13565 | 8902 | 11078 | 14394 | 15223 | 16052 |
| 8903 | 10250 | 11908 | 12737 | 13566 | 8904 | 11079 | 14395 | 15224 | 16053 |
| 8905 | 10251 | 11909 | 12738 | 13567 | 8906 | 11080 | 14396 | 15225 | 16054 |
| 8907 | 10252 | 11910 | 12739 | 13568 | 8908 | 11081 | 14397 | 15226 | 16055 |
| 8909 | 10253 | 11911 | 12740 | 13569 | 8910 | 11082 | 14398 | 15227 | 16056 |
| 8911 | 10254 | 11912 | 12741 | 13570 | 8912 | 11083 | 14399 | 15228 | 16057 |
| 8913 | 10255 | 11913 | 12742 | 13571 | 8914 | 11084 | 14400 | 15229 | 16058 |
| 8915 | 10256 | 11914 | 12743 | 13572 | 8916 | 11085 | 14401 | 15230 | 16059 |
| 8917 | 10257 | 11915 | 12744 | 13573 | 8918 | 11086 | 14402 | 15231 | 16060 |
| 8919 | 10258 | 11916 | 12745 | 13574 | 8920 | 11087 | 14403 | 15232 | 16061 |
| 8921 | 10259 | 11917 | 12746 | 13575 | 8922 | 11088 | 14404 | 15233 | 16062 |
| 8923 | 10260 | 11918 | 12747 | 13576 | 8924 | 11089 | 14405 | 15234 | 16063 |
| 8925 | 10261 | 11919 | 12748 | 13577 | 8926 | 11090 | 14406 | 15235 | 16064 |
| 8927 | 10262 | 11920 | 12749 | 13578 | 8928 | 11091 | 14407 | 15236 | 16065 |
| 8929 | 10263 | 11921 | 12750 | 13579 | 8930 | 11092 | 14408 | 15237 | 16066 |
| 8931 | 10264 | 11922 | 12751 | 13580 | 8932 | 11093 | 14409 | 15238 | 16067 |
| 8933 | 10265 | 11923 | 12752 | 13581 | 8934 | 11094 | 14410 | 15239 | 16068 |
| 8935 | 10266 | 11924 | 12753 | 13582 | 8936 | 11095 | 14411 | 15240 | 16069 |
| 8937 | 10267 | 11925 | 12754 | 13583 | 8938 | 11096 | 14412 | 15241 | 16070 |
| 8939 | 10268 | 11926 | 12755 | 13584 | 8940 | 11097 | 14413 | 15242 | 16071 |
| 8941 | 10269 | 11927 | 12756 | 13585 | 8942 | 11098 | 14414 | 15243 | 16072 |
| 8943 | 10270 | 11928 | 12757 | 13586 | 8944 | 11099 | 14415 | 15244 | 16073 |
| 8945 | 10271 | 11929 | 12758 | 13587 | 8946 | 11100 | 14416 | 15245 | 16074 |
| 8947 | 10272 | 11930 | 12759 | 13588 | 8948 | 11101 | 14417 | 15246 | 16075 |
| 8949 | 10273 | 11931 | 12760 | 13589 | 8950 | 11102 | 14418 | 15247 | 16076 |
| 8951 | 10274 | 11932 | 12761 | 13590 | 8952 | 11103 | 14419 | 15248 | 16077 |
| 8953 | 10275 | 11933 | 12762 | 13591 | 8954 | 11104 | 14420 | 15249 | 16078 |
| 8955 | 10276 | 11934 | 12763 | 13592 | 8956 | 11105 | 14421 | 15250 | 16079 |
| 8957 | 10277 | 11935 | 12764 | 13593 | 8958 | 11106 | 14422 | 15251 | 16080 |
| 8959 | 10278 | 11936 | 12765 | 13594 | 8960 | 11107 | 14423 | 15252 | 16081 |
| 8961 | 10279 | 11937 | 12766 | 13595 | 8962 | 11108 | 14424 | 15253 | 16082 |
| 8963 | 10280 | 11938 | 12767 | 13596 | 8964 | 11109 | 14425 | 15254 | 16083 |
| 8965 | 10281 | 11939 | 12768 | 13597 | 8966 | 11110 | 14426 | 15255 | 16084 |
| 8967 | 10282 | 11940 | 12769 | 13598 | 8968 | 11111 | 14427 | 15256 | 16085 |
| 8969 | 10283 | 11941 | 12770 | 13599 | 8970 | 11112 | 14428 | 15257 | 16086 |
| 8971 | 10284 | 11942 | 12771 | 13600 | 8972 | 11113 | 14429 | 15258 | 16087 |
| 8973 | 10285 | 11943 | 12772 | 13601 | 8974 | 11114 | 14430 | 15259 | 16088 |
| 8975 | 10286 | 11944 | 12773 | 13602 | 8976 | 11115 | 14431 | 15260 | 16089 |
| 8977 | 10287 | 11945 | 12774 | 13603 | 8978 | 11116 | 14432 | 15261 | 16090 |
| 8979 | 10288 | 11946 | 12775 | 13604 | 8980 | 11117 | 14433 | 15262 | 16091 |
| 8981 | 10289 | 11947 | 12776 | 13605 | 8982 | 11118 | 14434 | 15263 | 16092 |
| 8983 | 10290 | 11948 | 12777 | 13606 | 8984 | 11119 | 14435 | 15264 | 16093 |
| 8985 | 10291 | 11949 | 12778 | 13607 | 8986 | 11120 | 14436 | 15265 | 16094 |
| 8987 | 10292 | 11950 | 12779 | 13608 | 8988 | 11121 | 14437 | 15266 | 16095 |
| 8989 | 10293 | 11951 | 12780 | 13609 | 8990 | 11122 | 14438 | 15267 | 16096 |
| 8991 | 10294 | 11952 | 12781 | 13610 | 8992 | 11123 | 14439 | 15268 | 16097 |
| 8993 | 10295 | 11953 | 12782 | 13611 | 8994 | 11124 | 14440 | 15269 | 16098 |
| 8995 | 10296 | 11954 | 12783 | 13612 | 8996 | 11125 | 14441 | 15270 | 16099 |
| 8997 | 10297 | 11955 | 12784 | 13613 | 8998 | 11126 | 14442 | 15271 | 16100 |
| 8999 | 10298 | 11956 | 12785 | 13614 | 9000 | 11127 | 14443 | 15272 | 16101 |
| 9001 | 10299 | 11957 | 12786 | 13615 | 9002 | 11128 | 14444 | 15273 | 16102 |
| 9003 | 10300 | 11958 | 12787 | 13616 | 9004 | 11129 | 14445 | 15274 | 16103 |
| 9005 | 10301 | 11959 | 12788 | 13617 | 9006 | 11130 | 14446 | 15275 | 16104 |
| 9007 | 10302 | 11960 | 12789 | 13618 | 9008 | 11131 | 14447 | 15276 | 16105 |
| 9009 | 10303 | 11961 | 12790 | 13619 | 9010 | 11132 | 14448 | 15277 | 16106 |
| 9011 | 10304 | 11962 | 12791 | 13620 | 9012 | 11133 | 14449 | 15278 | 16107 |
| 9013 | 10305 | 11963 | 12792 | 13621 | 9014 | 11134 | 14450 | 15279 | 16108 |
| 9015 | 10306 | 11964 | 12793 | 13622 | 9016 | 11135 | 14451 | 15280 | 16109 |
| 9017 | 10307 | 11965 | 12794 | 13623 | 9018 | 11136 | 14452 | 15281 | 16110 |
| 9019 | 10308 | 11966 | 12795 | 13624 | 9020 | 11137 | 14453 | 15282 | 16111 |
| 9021 | 10309 | 11967 | 12796 | 13625 | 9022 | 11138 | 14454 | 15283 | 16112 |
| 9023 | 10310 | 11968 | 12797 | 13626 | 9024 | 11139 | 14455 | 15284 | 16113 |
| 9025 | 10311 | 11969 | 12798 | 13627 | 9026 | 11140 | 14456 | 15285 | 16114 |
| 9027 | 10312 | 11970 | 12799 | 13628 | 9028 | 11141 | 14457 | 15286 | 16115 |
| 9029 | 10313 | 11971 | 12800 | 13629 | 9030 | 11142 | 14458 | 15287 | 16116 |
| 9031 | 10314 | 11972 | 12801 | 13630 | 9032 | 11143 | 14459 | 15288 | 16117 |
| 9033 | 10315 | 11973 | 12802 | 13631 | 9034 | 11144 | 14460 | 15289 | 16118 |
| 9035 | 10316 | 11974 | 12803 | 13632 | 9036 | 11145 | 14461 | 15290 | 16119 |
| 9037 | 10317 | 11975 | 12804 | 13633 | 9038 | 11146 | 14462 | 15291 | 16120 |
| 9039 | 10318 | 11976 | 12805 | 13634 | 9040 | 11147 | 14463 | 15292 | 16121 |
| 9041 | 10319 | 11977 | 12806 | 13635 | 9042 | 11148 | 14464 | 15293 | 16122 |
| 9043 | 10320 | 11978 | 12807 | 13636 | 9044 | 11149 | 14465 | 15294 | 16123 |
| 9045 | 10321 | 11979 | 12808 | 13637 | 9046 | 11150 | 14466 | 15295 | 16124 |
| 9047 | 10322 | 11980 | 12809 | 13638 | 9048 | 11151 | 14467 | 15296 | 16125 |
| 9049 | 10323 | 11981 | 12810 | 13639 | 9050 | 11152 | 14468 | 15297 | 16126 |
| 9051 | 10324 | 11982 | 12811 | 13640 | 9052 | 11153 | 14469 | 15298 | 16127 |
| 9053 | 10325 | 11983 | 12812 | 13641 | 9054 | 11154 | 14470 | 15299 | 16128 |
| 9055 | 10326 | 11984 | 12813 | 13642 | 9056 | 11155 | 14471 | 15300 | 16129 |
| 9057 | 10327 | 11985 | 12814 | 13643 | 9058 | 11156 | 14472 | 15301 | 16130 |
| 9059 | 10328 | 11986 | 12815 | 13644 | 9060 | 11157 | 14473 | 15302 | 16131 |
| 9061 | 10329 | 11987 | 12816 | 13645 | 9062 | 11158 | 14474 | 15303 | 16132 |
| 9063 | 10330 | 11988 | 12817 | 13646 | 9064 | 11159 | 14475 | 15304 | 16133 |
| 9065 | 10331 | 11989 | 12818 | 13647 | 9066 | 11160 | 14476 | 15305 | 16134 |
| 9067 | 10332 | 11990 | 12819 | 13648 | 9068 | 11161 | 14477 | 15306 | 16135 |
| 9069 | 10333 | 11991 | 12820 | 13649 | 9070 | 11162 | 14478 | 15307 | 16136 |
| 9071 | 10334 | 11992 | 12821 | 13650 | 9072 | 11163 | 14479 | 15308 | 16137 |
| 9073 | 10335 | 11993 | 12822 | 13651 | 9074 | 11164 | 14480 | 15309 | 16138 |
| 9075 | 10336 | 11994 | 12823 | 13652 | 9076 | 11165 | 14481 | 15310 | 16139 |
| 9077 | 10337 | 11995 | 12824 | 13653 | 9078 | 11166 | 14482 | 15311 | 16140 |
| 9079 | 10338 | 11996 | 12825 | 13654 | 9080 | 11167 | 14483 | 15312 | 16141 |
| 9081 | 10339 | 11997 | 12826 | 13655 | 9082 | 11168 | 14484 | 15313 | 16142 |
| 9083 | 10340 | 11998 | 12827 | 13656 | 9084 | 11169 | 14485 | 15314 | 16143 |
| 9085 | 10341 | 11999 | 12828 | 13657 | 9086 | 11170 | 14486 | 15315 | 16144 |
| 9087 | 10342 | 12000 | 12829 | 13658 | 9088 | 11171 | 14487 | 15316 | 16145 |
| 9089 | 10343 | 12001 | 12830 | 13659 | 9090 | 11172 | 14488 | 15317 | 16146 |
| 9091 | 10344 | 12002 | 12831 | 13660 | 9092 | 11173 | 14489 | 15318 | 16147 |
| 9093 | 10345 | 12003 | 12832 | 13661 | 9094 | 11174 | 14490 | 15319 | 16148 |
| 9095 | 10346 | 12004 | 12833 | 13662 | 9096 | 11175 | 14491 | 15320 | 16149 |
| 9097 | 10347 | 12005 | 12834 | 13663 | 9098 | 11176 | 14492 | 15321 | 16150 |
| 9099 | 10348 | 12006 | 12835 | 13664 | 9100 | 11177 | 14493 | 15322 | 16151 |
| 9101 | 10349 | 12007 | 12836 | 13665 | 9102 | 11178 | 14494 | 15323 | 16152 |
| 9103 | 10350 | 12008 | 12837 | 13666 | 9104 | 11179 | 14495 | 15324 | 16153 |
| 9105 | 10351 | 12009 | 12838 | 13667 | 9106 | 11180 | 14496 | 15325 | 16154 |
| 9107 | 10352 | 12010 | 12839 | 13668 | 9108 | 11181 | 14497 | 15326 | 16155 |
| 9109 | 10353 | 12011 | 12840 | 13669 | 9110 | 11182 | 14498 | 15327 | 16156 |
| 9111 | 10354 | 12012 | 12841 | 13670 | 9112 | 11183 | 14499 | 15328 | 16157 |
| 9113 | 10355 | 12013 | 12842 | 13671 | 9114 | 11184 | 14500 | 15329 | 16158 |
| 9115 | 10356 | 12014 | 12843 | 13672 | 9116 | 11185 | 14501 | 15330 | 16159 |
| 9117 | 10357 | 12015 | 12844 | 13673 | 9118 | 11186 | 14502 | 15331 | 16160 |
| 9119 | 10358 | 12016 | 12845 | 13674 | 9120 | 11187 | 14503 | 15332 | 16161 |
| 9121 | 10359 | 12017 | 12846 | 13675 | 9122 | 11188 | 14504 | 15333 | 16162 |
| 9123 | 10360 | 12018 | 12847 | 13676 | 9124 | 11189 | 14505 | 15334 | 16163 |
| 9125 | 10361 | 12019 | 12848 | 13677 | 9126 | 11190 | 14506 | 15335 | 16164 |
| 9127 | 10362 | 12020 | 12849 | 13678 | 9128 | 11191 | 14507 | 15336 | 16165 |
| 9129 | 10363 | 12021 | 12850 | 13679 | 9130 | 11192 | 14508 | 15337 | 16166 |
| 9131 | 10364 | 12022 | 12851 | 13680 | 9132 | 11193 | 14509 | 15338 | 16167 |
| 9133 | 10365 | 12023 | 12852 | 13681 | 9134 | 11194 | 14510 | 15339 | 16168 |
| 9135 | 10366 | 12024 | 12853 | 13682 | 9136 | 11195 | 14511 | 15340 | 16169 |
| 9137 | 10367 | 12025 | 12854 | 13683 | 9138 | 11196 | 14512 | 15341 | 16170 |
| 9139 | 10368 | 12026 | 12855 | 13684 | 9140 | 11197 | 14513 | 15342 | 16171 |
| 9141 | 10369 | 12027 | 12856 | 13685 | 9142 | 11198 | 14514 | 15343 | 16172 |
| 9143 | 10370 | 12028 | 12857 | 13686 | 9144 | 11199 | 14515 | 15344 | 16173 |
| 9145 | 10371 | 12029 | 12858 | 13687 | 9146 | 11200 | 14516 | 15345 | 16174 |
| 9147 | 10372 | 12030 | 12859 | 13688 | 9148 | 11201 | 14517 | 15346 | 16175 |
| 9149 | 10373 | 12031 | 12860 | 13689 | 9150 | 11202 | 14518 | 15347 | 16176 |
| 9151 | 10374 | 12032 | 12861 | 13690 | 9152 | 11203 | 14519 | 15348 | 16177 |
| 9153 | 10375 | 12033 | 12862 | 13691 | 9154 | 11204 | 14520 | 15349 | 16178 |
| 9155 | 10376 | 12034 | 12863 | 13692 | 9156 | 11205 | 14521 | 15350 | 16179 |
| 9157 | 10377 | 12035 | 12864 | 13693 | 9158 | 11206 | 14522 | 15351 | 16180 |
| 9159 | 10378 | 12036 | 12865 | 13694 | 9160 | 11207 | 14523 | 15352 | 16181 |
| 9161 | 10379 | 12037 | 12866 | 13695 | 9162 | 11208 | 14524 | 15353 | 16182 |
| 9163 | 10380 | 12038 | 12867 | 13696 | 9164 | 11209 | 14525 | 15354 | 16183 |
| 9165 | 10381 | 12039 | 12868 | 13697 | 9166 | 11210 | 14526 | 15355 | 16184 |
| 9167 | 10382 | 12040 | 12869 | 13698 | 9168 | 11211 | 14527 | 15356 | 16185 |
| 9169 | 10383 | 12041 | 12870 | 13699 | 9170 | 11212 | 14528 | 15357 | 16186 |
| 9171 | 10384 | 12042 | 12871 | 13700 | 9172 | 11213 | 14529 | 15358 | 16187 |
| 9173 | 10385 | 12043 | 12872 | 13701 | 9174 | 11214 | 14530 | 15359 | 16188 |
| 9175 | 10386 | 12044 | 12873 | 13702 | 9176 | 11215 | 14531 | 15360 | 16189 |
| 9177 | 10387 | 12045 | 12874 | 13703 | 9178 | 11216 | 14532 | 15361 | 16190 |
| 9179 | 10388 | 12046 | 12875 | 13704 | 9180 | 11217 | 14533 | 15362 | 16191 |
| 9181 | 10389 | 12047 | 12876 | 13705 | 9182 | 11218 | 14534 | 15363 | 16192 |
| 9183 | 10390 | 12048 | 12877 | 13706 | 9184 | 11219 | 14535 | 15364 | 16193 |
| 9185 | 10391 | 12049 | 12878 | 13707 | 9186 | 11220 | 14536 | 15365 | 16194 |
| 9187 | 10392 | 12050 | 12879 | 13708 | 9188 | 11221 | 14537 | 15366 | 16195 |
| 9189 | 10393 | 12051 | 12880 | 13709 | 9190 | 11222 | 14538 | 15367 | 16196 |
| 9191 | 10394 | 12052 | 12881 | 13710 | 9192 | 11223 | 14539 | 15368 | 16197 |
| 9193 | 10395 | 12053 | 12882 | 13711 | 9194 | 11224 | 14540 | 15369 | 16198 |
| 9195 | 10396 | 12054 | 12883 | 13712 | 9196 | 11225 | 14541 | 15370 | 16199 |
| 9197 | 10397 | 12055 | 12884 | 13713 | 9198 | 11226 | 14542 | 15371 | 16200 |
| 9199 | 10398 | 12056 | 12885 | 13714 | 9200 | 11227 | 14543 | 15372 | 16201 |
| 9201 | 10399 | 12057 | 12886 | 13715 | 9202 | 11228 | 14544 | 15373 | 16202 |
| 9203 | 10400 | 12058 | 12887 | 13716 | 9204 | 11229 | 14545 | 15374 | 16203 |
| 9205 | 10401 | 12059 | 12888 | 13717 | 9206 | 11230 | 14546 | 15375 | 16204 |
| 9207 | 10402 | 12060 | 12889 | 13718 | 9208 | 11231 | 14547 | 15376 | 16205 |
| 9209 | 10403 | 12061 | 12890 | 13719 | 9210 | 11232 | 14548 | 15377 | 16206 |
| 9211 | 10404 | 12062 | 12891 | 13720 | 9212 | 11233 | 14549 | 15378 | 16207 |
| 9213 | 10405 | 12063 | 12892 | 13721 | 9214 | 11234 | 14550 | 15379 | 16208 |
| 9215 | 10406 | 12064 | 12893 | 13722 | 9216 | 11235 | 14551 | 15380 | 16209 |
| 9217 | 10407 | 12065 | 12894 | 13723 | 9218 | 11236 | 14552 | 15381 | 16210 |
| 9219 | 10408 | 12066 | 12895 | 13724 | 9220 | 11237 | 14553 | 15382 | 16211 |
| 9221 | 10409 | 12067 | 12896 | 13725 | 9222 | 11238 | 14554 | 15383 | 16212 |
| 9223 | 10410 | 12068 | 12897 | 13726 | 9224 | 11239 | 14555 | 15384 | 16213 |
| 9225 | 10411 | 12069 | 12898 | 13727 | 9226 | 11240 | 14556 | 15385 | 16214 |
| 9227 | 10412 | 12070 | 12899 | 13728 | 9228 | 11241 | 14557 | 15386 | 16215 |
| 9229 | 10413 | 12071 | 12900 | 13729 | 9230 | 11242 | 14558 | 15387 | 16216 |
| 9231 | 10414 | 12072 | 12901 | 13730 | 9232 | 11243 | 14559 | 15388 | 16217 |
| 9233 | 10415 | 12073 | 12902 | 13731 | 9234 | 11244 | 14560 | 15389 | 16218 |
| 9235 | 10416 | 12074 | 12903 | 13732 | 9236 | 11245 | 14561 | 15390 | 16219 |
| 9237 | 10417 | 12075 | 12904 | 13733 | 9238 | 11246 | 14562 | 15391 | 16220 |
| 9239 | 10418 | 12076 | 12905 | 13734 | 9240 | 11247 | 14563 | 15392 | 16221 |
| 9241 | 10419 | 12077 | 12906 | 13735 | 9242 | 11248 | 14564 | 15393 | 16222 |
| 9243 | 10420 | 12078 | 12907 | 13736 | 9244 | 11249 | 14565 | 15394 | 16223 |
| 9245 | 10421 | 12079 | 12908 | 13737 | 9246 | 11250 | 14566 | 15395 | 16224 |
| 9247 | 10422 | 12080 | 12909 | 13738 | 9248 | 11251 | 14567 | 15396 | 16225 |
| 9249 | 10423 | 12081 | 12910 | 13739 | 9250 | 11252 | 14568 | 15397 | 16226 |
| 9251 | 10424 | 12082 | 12911 | 13740 | 9252 | 11253 | 14569 | 15398 | 16227 |
| 9253 | 10425 | 12083 | 12912 | 13741 | 9254 | 11254 | 14570 | 15399 | 16228 |
| 9255 | 10426 | 12084 | 12913 | 13742 | 9256 | 11255 | 14571 | 15400 | 16229 |
| 9257 | 10427 | 12085 | 12914 | 13743 | 9258 | 11256 | 14572 | 15401 | 16230 |
| 9259 | 10428 | 12086 | 12915 | 13744 | 9260 | 11257 | 14573 | 15402 | 16231 |
| 9261 | 10429 | 12087 | 12916 | 13745 | 9262 | 11258 | 14574 | 15403 | 16232 |
| 9263 | 10430 | 12088 | 12917 | 13746 | 9264 | 11259 | 14575 | 15404 | 16233 |
| 9265 | 10431 | 12089 | 12918 | 13747 | 9266 | 11260 | 14576 | 15405 | 16234 |
| 9267 | 10432 | 12090 | 12919 | 13748 | 9268 | 11261 | 14577 | 15406 | 16235 |
| 9269 | 10433 | 12091 | 12920 | 13749 | 9270 | 11262 | 14578 | 15407 | 16236 |
| 9271 | 10434 | 12092 | 12921 | 13750 | 9272 | 11263 | 14579 | 15408 | 16237 |
| 9273 | 10435 | 12093 | 12922 | 13751 | 9274 | 11264 | 14580 | 15409 | 16238 |
| 9275 | 10436 | 12094 | 12923 | 13752 | 9276 | 11265 | 14581 | 15410 | 16239 |
| 9277 | 10437 | 12095 | 12924 | 13753 | 9278 | 11266 | 14582 | 15411 | 16240 |
| 9279 | 10438 | 12096 | 12925 | 13754 | 9280 | 11267 | 14583 | 15412 | 16241 |
| 9281 | 10439 | 12097 | 12926 | 13755 | 9282 | 11268 | 14584 | 15413 | 16242 |
| 9283 | 10440 | 12098 | 12927 | 13756 | 9284 | 11269 | 14585 | 15414 | 16243 |
| 9285 | 10441 | 12099 | 12928 | 13757 | 9286 | 11270 | 14586 | 15415 | 16244 |
| 9287 | 10442 | 12100 | 12929 | 13758 | 9288 | 11271 | 14587 | 15416 | 16245 |
| 9289 | 10443 | 12101 | 12930 | 13759 | 9290 | 11272 | 14588 | 15417 | 16246 |
| 9291 | 10444 | 12102 | 12931 | 13760 | 9292 | 11273 | 14589 | 15418 | 16247 |
| 9293 | 10445 | 12103 | 12932 | 13761 | 9294 | 11274 | 14590 | 15419 | 16248 |
| 9295 | 10446 | 12104 | 12933 | 13762 | 9296 | 11275 | 14591 | 15420 | 16249 |
| 9297 | 10447 | 12105 | 12934 | 13763 | 9298 | 11276 | 14592 | 15421 | 16250 |
| 9299 | 10448 | 12106 | 12935 | 13764 | 9300 | 11277 | 14593 | 15422 | 16251 |
| 9301 | 10449 | 12107 | 12936 | 13765 | 9302 | 11278 | 14594 | 15423 | 16252 |
| 9303 | 10450 | 12108 | 12937 | 13766 | 9304 | 11279 | 14595 | 15424 | 16253 |
| 9305 | 10451 | 12109 | 12938 | 13767 | 9306 | 11280 | 14596 | 15425 | 16254 |
| 9307 | 10452 | 12110 | 12939 | 13768 | 9308 | 11281 | 14597 | 15426 | 16255 |
| 9309 | 10453 | 12111 | 12940 | 13769 | 9310 | 11282 | 14598 | 15427 | 16256 |
| 9311 | 10454 | 12112 | 12941 | 13770 | 9312 | 11283 | 14599 | 15428 | 16257 |
| 9313 | 10455 | 12113 | 12942 | 13771 | 9314 | 11284 | 14600 | 15429 | 16258 |
| 9315 | 10456 | 12114 | 12943 | 13772 | 9316 | 11285 | 14601 | 15430 | 16259 |
| 9317 | 10457 | 12115 | 12944 | 13773 | 9318 | 11286 | 14602 | 15431 | 16260 |
| 9319 | 10458 | 12116 | 12945 | 13774 | 9320 | 11287 | 14603 | 15432 | 16261 |
| 9321 | 10459 | 12117 | 12946 | 13775 | 9322 | 11288 | 14604 | 15433 | 16262 |
| 9323 | 10460 | 12118 | 12947 | 13776 | 9324 | 11289 | 14605 | 15434 | 16263 |
| 9325 | 10461 | 12119 | 12948 | 13777 | 9326 | 11290 | 14606 | 15435 | 16264 |
| 9327 | 10462 | 12120 | 12949 | 13778 | 9328 | 11291 | 14607 | 15436 | 16265 |
| 9329 | 10463 | 12121 | 12950 | 13779 | 9330 | 11292 | 14608 | 15437 | 16266 |
| 9331 | 10464 | 12122 | 12951 | 13780 | 9332 | 11293 | 14609 | 15438 | 16267 |
| 9333 | 10465 | 12123 | 12952 | 13781 | 9334 | 11294 | 14610 | 15439 | 16268 |
| 9335 | 10466 | 12124 | 12953 | 13782 | 9336 | 11295 | 14611 | 15440 | 16269 |
| 9337 | 10467 | 12125 | 12954 | 13783 | 9338 | 11296 | 14612 | 15441 | 16270 |
| 9339 | 10468 | 12126 | 12955 | 13784 | 9340 | 11297 | 14613 | 15442 | 16271 |
| 9341 | 10469 | 12127 | 12956 | 13785 | 9342 | 11298 | 14614 | 15443 | 16272 |
| 9343 | 10470 | 12128 | 12957 | 13786 | 9344 | 11299 | 14615 | 15444 | 16273 |
| 9345 | 10471 | 12129 | 12958 | 13787 | 9346 | 11300 | 14616 | 15445 | 16274 |
| 9347 | 10472 | 12130 | 12959 | 13788 | 9348 | 11301 | 14617 | 15446 | 16275 |
| 9349 | 10473 | 12131 | 12960 | 13789 | 9350 | 11302 | 14618 | 15447 | 16276 |
| 9351 | 10474 | 12132 | 12961 | 13790 | 9352 | 11303 | 14619 | 15448 | 16277 |
| 9353 | 10475 | 12133 | 12962 | 13791 | 9354 | 11304 | 14620 | 15449 | 16278 |
| 9355 | 10476 | 12134 | 12963 | 13792 | 9356 | 11305 | 14621 | 15450 | 16279 |
| 9357 | 10477 | 12135 | 12964 | 13793 | 9358 | 11306 | 14622 | 15451 | 16280 |
| 9359 | 10478 | 12136 | 12965 | 13794 | 9360 | 11307 | 14623 | 15452 | 16281 |
| 9361 | 10479 | 12137 | 12966 | 13795 | 9362 | 11308 | 14624 | 15453 | 16282 |
| 9363 | 10480 | 12138 | 12967 | 13796 | 9364 | 11309 | 14625 | 15454 | 16283 |
| 9365 | 10481 | 12139 | 12968 | 13797 | 9366 | 11310 | 14626 | 15455 | 16284 |
| 9367 | 10482 | 12140 | 12969 | 13798 | 9368 | 11311 | 14627 | 15456 | 16285 |
| 9369 | 10483 | 12141 | 12970 | 13799 | 9370 | 11312 | 14628 | 15457 | 16286 |
| 9371 | 10484 | 12142 | 12971 | 13800 | 9372 | 11313 | 14629 | 15458 | 16287 |
| 9373 | 10485 | 12143 | 12972 | 13801 | 9374 | 11314 | 14630 | 15459 | 16288 |
| 9375 | 10486 | 12144 | 12973 | 13802 | 9376 | 11315 | 14631 | 15460 | 16289 |
| 9377 | 10487 | 12145 | 12974 | 13803 | 9378 | 11316 | 14632 | 15461 | 16290 |
| 9379 | 10488 | 12146 | 12975 | 13804 | 9380 | 11317 | 14633 | 15462 | 16291 |
| 9381 | 10489 | 12147 | 12976 | 13805 | 9382 | 11318 | 14634 | 15463 | 16292 |
| 9383 | 10490 | 12148 | 12977 | 13806 | 9384 | 11319 | 14635 | 15464 | 16293 |
| 9385 | 10491 | 12149 | 12978 | 13807 | 9386 | 11320 | 14636 | 15465 | 16294 |
| 9387 | 10492 | 12150 | 12979 | 13808 | 9388 | 11321 | 14637 | 15466 | 16295 |
| 9389 | 10493 | 12151 | 12980 | 13809 | 9390 | 11322 | 14638 | 15467 | 16296 |
| 9391 | 10494 | 12152 | 12981 | 13810 | 9392 | 11323 | 14639 | 15468 | 16297 |
| 9393 | 10495 | 12153 | 12982 | 13811 | 9394 | 11324 | 14640 | 15469 | 16298 |
| 9395 | 10496 | 12154 | 12983 | 13812 | 9396 | 11325 | 14641 | 15470 | 16299 |
| 9397 | 10497 | 12155 | 12984 | 13813 | 9398 | 11326 | 14642 | 15471 | 16300 |
| 9399 | 10498 | 12156 | 12985 | 13814 | 9400 | 11327 | 14643 | 15472 | 16301 |
| 9401 | 10499 | 12157 | 12986 | 13815 | 9402 | 11328 | 14644 | 15473 | 16302 |
| 9403 | 10500 | 12158 | 12987 | 13816 | 9404 | 11329 | 14645 | 15474 | 16303 |
| 9405 | 10501 | 12159 | 12988 | 13817 | 9406 | 11330 | 14646 | 15475 | 16304 |
| 9407 | 10502 | 12160 | 12989 | 13818 | 9408 | 11331 | 14647 | 15476 | 16305 |
| 9409 | 10503 | 12161 | 12990 | 13819 | 9410 | 11332 | 14648 | 15477 | 16306 |
| 9411 | 10504 | 12162 | 12991 | 13820 | 9412 | 11333 | 14649 | 15478 | 16307 |
| 9413 | 10505 | 12163 | 12992 | 13821 | 9414 | 11334 | 14650 | 15479 | 16308 |
| 9415 | 10506 | 12164 | 12993 | 13822 | 9416 | 11335 | 14651 | 15480 | 16309 |
| 9417 | 10507 | 12165 | 12994 | 13823 | 9418 | 11336 | 14652 | 15481 | 16310 |
| 9419 | 10508 | 12166 | 12995 | 13824 | 9420 | 11337 | 14653 | 15482 | 16311 |
| 9421 | 10509 | 12167 | 12996 | 13825 | 9422 | 11338 | 14654 | 15483 | 16312 |
| 9423 | 10510 | 12168 | 12997 | 13826 | 9424 | 11339 | 14655 | 15484 | 16313 |
| 9425 | 10511 | 12169 | 12998 | 13827 | 9426 | 11340 | 14656 | 15485 | 16314 |
| 9427 | 10512 | 12170 | 12999 | 13828 | 9428 | 11341 | 14657 | 15486 | 16315 |
| 9429 | 10513 | 12171 | 13000 | 13829 | 9430 | 11342 | 14658 | 15487 | 16316 |
| 9431 | 10514 | 12172 | 13001 | 13830 | 9432 | 11343 | 14659 | 15488 | 16317 |
| 9433 | 10515 | 12173 | 13002 | 13831 | 9434 | 11344 | 14660 | 15489 | 16318 |
| 9435 | 10516 | 12174 | 13003 | 13832 | 9436 | 11345 | 14661 | 15490 | 16319 |
| 9437 | 10517 | 12175 | 13004 | 13833 | 9438 | 11346 | 14662 | 15491 | 16320 |
| 9439 | 10518 | 12176 | 13005 | 13834 | 9440 | 11347 | 14663 | 15492 | 16321 |
| 9441 | 10519 | 12177 | 13006 | 13835 | 9442 | 11348 | 14664 | 15493 | 16322 |
| 9443 | 10520 | 12178 | 13007 | 13836 | 9444 | 11349 | 14665 | 15494 | 16323 |
| 9445 | 10521 | 12179 | 13008 | 13837 | 9446 | 11350 | 14666 | 15495 | 16324 |
| 9447 | 10522 | 12180 | 13009 | 13838 | 9448 | 11351 | 14667 | 15496 | 16325 |
| 9449 | 10523 | 12181 | 13010 | 13839 | 9450 | 11352 | 14668 | 15497 | 16326 |
| 9451 | 10524 | 12182 | 13011 | 13840 | 9452 | 11353 | 14669 | 15498 | 16327 |
| 9453 | 10525 | 12183 | 13012 | 13841 | 9454 | 11354 | 14670 | 15499 | 16328 |
| 9455 | 10526 | 12184 | 13013 | 13842 | 9456 | 11355 | 14671 | 15500 | 16329 |
| 9457 | 10527 | 12185 | 13014 | 13843 | 9458 | 11356 | 14672 | 15501 | 16330 |
| 9459 | 10528 | 12186 | 13015 | 13844 | 9460 | 11357 | 14673 | 15502 | 16331 |
| 9461 | 10529 | 12187 | 13016 | 13845 | 9462 | 11358 | 14674 | 15503 | 16332 |
| 9463 | 10530 | 12188 | 13017 | 13846 | 9464 | 11359 | 14675 | 15504 | 16333 |
| 9465 | 10531 | 12189 | 13018 | 13847 | 9466 | 11360 | 14676 | 15505 | 16334 |
| 9467 | 10532 | 12190 | 13019 | 13848 | 9468 | 11361 | 14677 | 15506 | 16335 |
| 9469 | 10533 | 12191 | 13020 | 13849 | 9470 | 11362 | 14678 | 15507 | 16336 |
| 9471 | 10534 | 12192 | 13021 | 13850 | 9472 | 11363 | 14679 | 15508 | 16337 |
| 9473 | 10535 | 12193 | 13022 | 13851 | 9474 | 11364 | 14680 | 15509 | 16338 |
| 9475 | 10536 | 12194 | 13023 | 13852 | 9476 | 11365 | 14681 | 15510 | 16339 |
| 9477 | 10537 | 12195 | 13024 | 13853 | 9478 | 11366 | 14682 | 15511 | 16340 |
| 9479 | 10538 | 12196 | 13025 | 13854 | 9480 | 11367 | 14683 | 15512 | 16341 |
| 9481 | 10539 | 12197 | 13026 | 13855 | 9482 | 11368 | 14684 | 15513 | 16342 |
| 9483 | 10540 | 12198 | 13027 | 13856 | 9484 | 11369 | 14685 | 15514 | 16343 |
| 9485 | 10541 | 12199 | 13028 | 13857 | 9486 | 11370 | 14686 | 15515 | 16344 |
| 9487 | 10542 | 12200 | 13029 | 13858 | 9488 | 11371 | 14687 | 15516 | 16345 |
| 9489 | 10543 | 12201 | 13030 | 13859 | 9490 | 11372 | 14688 | 15517 | 16346 |
| 9491 | 10544 | 12202 | 13031 | 13860 | 9492 | 11373 | 14689 | 15518 | 16347 |
| 9493 | 10545 | 12203 | 13032 | 13861 | 9494 | 11374 | 14690 | 15519 | 16348 |
| 9495 | 10546 | 12204 | 13033 | 13862 | 9496 | 11375 | 14691 | 15520 | 16349 |
| 9497 | 10547 | 12205 | 13034 | 13863 | 9498 | 11376 | 14692 | 15521 | 16350 |
| 9499 | 10548 | 12206 | 13035 | 13864 | 9500 | 11377 | 14693 | 15522 | 16351 |
| 9501 | 10549 | 12207 | 13036 | 13865 | 9502 | 11378 | 14694 | 15523 | 16352 |
| 9503 | 10550 | 12208 | 13037 | 13866 | 9504 | 11379 | 14695 | 15524 | 16353 |
| 9505 | 10551 | 12209 | 13038 | 13867 | 9506 | 11380 | 14696 | 15525 | 16354 |
| 9507 | 10552 | 12210 | 13039 | 13868 | 9508 | 11381 | 14697 | 15526 | 16355 |
| 9509 | 10553 | 12211 | 13040 | 13869 | 9510 | 11382 | 14698 | 15527 | 16356 |
| 9511 | 10554 | 12212 | 13041 | 13870 | 9512 | 11383 | 14699 | 15528 | 16357 |
| 9513 | 10555 | 12213 | 13042 | 13871 | 9514 | 11384 | 14700 | 15529 | 16358 |
| 9515 | 10556 | 12214 | 13043 | 13872 | 9516 | 11385 | 14701 | 15530 | 16359 |
| 9517 | 10557 | 12215 | 13044 | 13873 | 9518 | 11386 | 14702 | 15531 | 16360 |
| 9519 | 10558 | 12216 | 13045 | 13874 | 9520 | 11387 | 14703 | 15532 | 16361 |
| 9521 | 10559 | 12217 | 13046 | 13875 | 9522 | 11388 | 14704 | 15533 | 16362 |
| 9523 | 10560 | 12218 | 13047 | 13876 | 9524 | 11389 | 14705 | 15534 | 16363 |
| 9525 | 10561 | 12219 | 13048 | 13877 | 9526 | 11390 | 14706 | 15535 | 16364 |
| 9527 | 10562 | 12220 | 13049 | 13878 | 9528 | 11391 | 14707 | 15536 | 16365 |
| 9529 | 10563 | 12221 | 13050 | 13879 | 9530 | 11392 | 14708 | 15537 | 16366 |
| 9531 | 10564 | 12222 | 13051 | 13880 | 9532 | 11393 | 14709 | 15538 | 16367 |
| 9533 | 10565 | 12223 | 13052 | 13881 | 9534 | 11394 | 14710 | 15539 | 16368 |
| 9535 | 10566 | 12224 | 13053 | 13882 | 9536 | 11395 | 14711 | 15540 | 16369 |
| 9537 | 10567 | 12225 | 13054 | 13883 | 9538 | 11396 | 14712 | 15541 | 16370 |
| 9539 | 10568 | 12226 | 13055 | 13884 | 9540 | 11397 | 14713 | 15542 | 16371 |
| 9541 | 10569 | 12227 | 13056 | 13885 | 9542 | 11398 | 14714 | 15543 | 16372 |
| 9543 | 10570 | 12228 | 13057 | 13886 | 9544 | 11399 | 14715 | 15544 | 16373 |
| 9545 | 10571 | 12229 | 13058 | 13887 | 9546 | 11400 | 14716 | 15545 | 16374 |
| 9547 | 10572 | 12230 | 13059 | 13888 | 9548 | 11401 | 14717 | 15546 | 16375 |
| 9549 | 10573 | 12231 | 13060 | 13889 | 9550 | 11402 | 14718 | 15547 | 16376 |
| 9551 | 10574 | 12232 | 13061 | 13890 | 9552 | 11403 | 14719 | 15548 | 16377 |
| 9553 | 10575 | 12233 | 13062 | 13891 | 9554 | 11404 | 14720 | 15549 | 16378 |
| 9555 | 10576 | 12234 | 13063 | 13892 | 9556 | 11405 | 14721 | 15550 | 16379 |
| 9557 | 10577 | 12235 | 13064 | 13893 | 9558 | 11406 | 14722 | 15551 | 16380 |
| 9559 | 10578 | 12236 | 13065 | 13894 | 9560 | 11407 | 14723 | 15552 | 16381 |
| 9561 | 10579 | 12237 | 13066 | 13895 | 9562 | 11408 | 14724 | 15553 | 16382 |
| 9563 | 10580 | 12238 | 13067 | 13896 | 9564 | 11409 | 14725 | 15554 | 16383 |
| 9565 | 10581 | 12239 | 13068 | 13897 | 9566 | 11410 | 14726 | 15555 | 16384 |
| 9567 | 10582 | 12240 | 13069 | 13898 | 9568 | 11411 | 14727 | 15556 | 16385 |
| 9569 | 10583 | 12241 | 13070 | 13899 | 9570 | 11412 | 14728 | 15557 | 16386 |
| 9571 | 10584 | 12242 | 13071 | 13900 | 9572 | 11413 | 14729 | 15558 | 16387 |
| 9573 | 10585 | 12243 | 13072 | 13901 | 9574 | 11414 | 14730 | 15559 | 16388 |
| 9575 | 10586 | 12244 | 13073 | 13902 | 9576 | 11415 | 14731 | 15560 | 16389 |
| 9577 | 10587 | 12245 | 13074 | 13903 | 9578 | 11416 | 14732 | 15561 | 16390 |
| 9579 | 10588 | 12246 | 13075 | 13904 | 9580 | 11417 | 14733 | 15562 | 16391 |
| 9581 | 10589 | 12247 | 13076 | 13905 | 9582 | 11418 | 14734 | 15563 | 16392 |
| 9583 | 10590 | 12248 | 13077 | 13906 | 9584 | 11419 | 14735 | 15564 | 16393 |
| 9585 | 10591 | 12249 | 13078 | 13907 | 9586 | 11420 | 14736 | 15565 | 16394 |
| 9587 | 10592 | 12250 | 13079 | 13908 | 9588 | 11421 | 14737 | 15566 | 16395 |
| 9589 | 10593 | 12251 | 13080 | 13909 | 9590 | 11422 | 14738 | 15567 | 16396 |
| 9591 | 10594 | 12252 | 13081 | 13910 | 9592 | 11423 | 14739 | 15568 | 16397 |
| 9593 | 10595 | 12253 | 13082 | 13911 | 9594 | 11424 | 14740 | 15569 | 16398 |
| 9595 | 10596 | 12254 | 13083 | 13912 | 9596 | 11425 | 14741 | 15570 | 16399 |
| 9597 | 10597 | 12255 | 13084 | 13913 | 9598 | 11426 | 14742 | 15571 | 16400 |
| 9599 | 10598 | 12256 | 13085 | 13914 | 9600 | 11427 | 14743 | 15572 | 16401 |
| 9601 | 10599 | 12257 | 13086 | 13915 | 9602 | 11428 | 14744 | 15573 | 16402 |
| 9603 | 10600 | 12258 | 13087 | 13916 | 9604 | 11429 | 14745 | 15574 | 16403 |
| 9605 | 10601 | 12259 | 13088 | 13917 | 9606 | 11430 | 14746 | 15575 | 16404 |
| 9607 | 10602 | 12260 | 13089 | 13918 | 9608 | 11431 | 14747 | 15576 | 16405 |
| 9609 | 10603 | 12261 | 13090 | 13919 | 9610 | 11432 | 14748 | 15577 | 16406 |
| 9611 | 10604 | 12262 | 13091 | 13920 | 9612 | 11433 | 14749 | 15578 | 16407 |
| 9613 | 10605 | 12263 | 13092 | 13921 | 9614 | 11434 | 14750 | 15579 | 16408 |
| 9615 | 10606 | 12264 | 13093 | 13922 | 9616 | 11435 | 14751 | 15580 | 16409 |
| 9617 | 10607 | 12265 | 13094 | 13923 | 9618 | 11436 | 14752 | 15581 | 16410 |
| 9619 | 10608 | 12266 | 13095 | 13924 | 9620 | 11437 | 14753 | 15582 | 16411 |
| 9621 | 10609 | 12267 | 13096 | 13925 | 9622 | 11438 | 14754 | 15583 | 16412 |
| 9623 | 10610 | 12268 | 13097 | 13926 | 9624 | 11439 | 14755 | 15584 | 16413 |
| 9625 | 10611 | 12269 | 13098 | 13927 | 9626 | 11440 | 14756 | 15585 | 16414 |
| 9627 | 10612 | 12270 | 13099 | 13928 | 9628 | 11441 | 14757 | 15586 | 16415 |
| 9629 | 10613 | 12271 | 13100 | 13929 | 9630 | 11442 | 14758 | 15587 | 16416 |
| 9631 | 10614 | 12272 | 13101 | 13930 | 9632 | 11443 | 14759 | 15588 | 16417 |
| 9633 | 10615 | 12273 | 13102 | 13931 | 9634 | 11444 | 14760 | 15589 | 16418 |
| 9635 | 10616 | 12274 | 13103 | 13932 | 9636 | 11445 | 14761 | 15590 | 16419 |
| 9637 | 10617 | 12275 | 13104 | 13933 | 9638 | 11446 | 14762 | 15591 | 16420 |
| 9639 | 10618 | 12276 | 13105 | 13934 | 9640 | 11447 | 14763 | 15592 | 16421 |
| 9641 | 10619 | 12277 | 13106 | 13935 | 9642 | 11448 | 14764 | 15593 | 16422 |
| 9643 | 10620 | 12278 | 13107 | 13936 | 9644 | 11449 | 14765 | 15594 | 16423 |
| 9645 | 10621 | 12279 | 13108 | 13937 | 9646 | 11450 | 14766 | 15595 | 16424 |
| 9647 | 10622 | 12280 | 13109 | 13938 | 9648 | 11451 | 14767 | 15596 | 16425 |
| 9649 | 10623 | 12281 | 13110 | 13939 | 9650 | 11452 | 14768 | 15597 | 16426 |
| 9651 | 10624 | 12282 | 13111 | 13940 | 9652 | 11453 | 14769 | 15598 | 16427 |
| 9653 | 10625 | 12283 | 13112 | 13941 | 9654 | 11454 | 14770 | 15599 | 16428 |
| 9655 | 10626 | 12284 | 13113 | 13942 | 9656 | 11455 | 14771 | 15600 | 16429 |
| 9657 | 10627 | 12285 | 13114 | 13943 | 9658 | 11456 | 14772 | 15601 | 16430 |
| 9659 | 10628 | 12286 | 13115 | 13944 | 9660 | 11457 | 14773 | 15602 | 16431 |
| 9661 | 10629 | 12287 | 13116 | 13945 | 9662 | 11458 | 14774 | 15603 | 16432 |
| 9663 | 10630 | 12288 | 13117 | 13946 | 9664 | 11459 | 14775 | 15604 | 16433 |
| 9665 | 10631 | 12289 | 13118 | 13947 | 9666 | 11460 | 14776 | 15605 | 16434 |
| 9667 | 10632 | 12290 | 13119 | 13948 | 9668 | 11461 | 14777 | 15606 | 16435 |
| 9669 | 10633 | 12291 | 13120 | 13949 | 9670 | 11462 | 14778 | 15607 | 16436 |
| 9671 | 10634 | 12292 | 13121 | 13950 | 9672 | 11463 | 14779 | 15608 | 16437 |
| 9673 | 10635 | 12293 | 13122 | 13951 | 9674 | 11464 | 14780 | 15609 | 16438 |
| 9675 | 10636 | 12294 | 13123 | 13952 | 9676 | 11465 | 14781 | 15610 | 16439 |
| 9677 | 10637 | 12295 | 13124 | 13953 | 9678 | 11466 | 14782 | 15611 | 16440 |
| 9679 | 10638 | 12296 | 13125 | 13954 | 9680 | 11467 | 14783 | 15612 | 16441 |
| 9681 | 10639 | 12297 | 13126 | 13955 | 9682 | 11468 | 14784 | 15613 | 16442 |
| 9683 | 10640 | 12298 | 13127 | 13956 | 9684 | 11469 | 14785 | 15614 | 16443 |
| 9685 | 10641 | 12299 | 13128 | 13957 | 9686 | 11470 | 14786 | 15615 | 16444 |
| 9687 | 10642 | 12300 | 13129 | 13958 | 9688 | 11471 | 14787 | 15616 | 16445 |
| 9689 | 10643 | 12301 | 13130 | 13959 | 9690 | 11472 | 14788 | 15617 | 16446 |
| 9691 | 10644 | 12302 | 13131 | 13960 | 9692 | 11473 | 14789 | 15618 | 16447 |
| 9693 | 10645 | 12303 | 13132 | 13961 | 9694 | 11474 | 14790 | 15619 | 16448 |
| 9695 | 10646 | 12304 | 13133 | 13962 | 9696 | 11475 | 14791 | 15620 | 16449 |
| 9697 | 10647 | 12305 | 13134 | 13963 | 9698 | 11476 | 14792 | 15621 | 16450 |
| 9699 | 10648 | 12306 | 13135 | 13964 | 9700 | 11477 | 14793 | 15622 | 16451 |
| 9701 | 10649 | 12307 | 13136 | 13965 | 9702 | 11478 | 14794 | 15623 | 16452 |
| 9703 | 10650 | 12308 | 13137 | 13966 | 9704 | 11479 | 14795 | 15624 | 16453 |
| 9705 | 10651 | 12309 | 13138 | 13967 | 9706 | 11480 | 14796 | 15625 | 16454 |
| 9707 | 10652 | 12310 | 13139 | 13968 | 9708 | 11481 | 14797 | 15626 | 16455 |
| 9709 | 10653 | 12311 | 13140 | 13969 | 9710 | 11482 | 14798 | 15627 | 16456 |
| 9711 | 10654 | 12312 | 13141 | 13970 | 9712 | 11483 | 14799 | 15628 | 16457 |
| 9713 | 10655 | 12313 | 13142 | 13971 | 9714 | 11484 | 14800 | 15629 | 16458 |
| 9715 | 10656 | 12314 | 13143 | 13972 | 9716 | 11485 | 14801 | 15630 | 16459 |
| 9717 | 10657 | 12315 | 13144 | 13973 | 9718 | 11486 | 14802 | 15631 | 16460 |
| 9719 | 10658 | 12316 | 13145 | 13974 | 9720 | 11487 | 14803 | 15632 | 16461 |
| 9721 | 10659 | 12317 | 13146 | 13975 | 9722 | 11488 | 14804 | 15633 | 16462 |
| 9723 | 10660 | 12318 | 13147 | 13976 | 9724 | 11489 | 14805 | 15634 | 16463 |
| 9725 | 10661 | 12319 | 13148 | 13977 | 9726 | 11490 | 14806 | 15635 | 16464 |
| 9727 | 10662 | 12320 | 13149 | 13978 | 9728 | 11491 | 14807 | 15636 | 16465 |
| 9729 | 10663 | 12321 | 13150 | 13979 | 9730 | 11492 | 14808 | 15637 | 16466 |
| 9731 | 10664 | 12322 | 13151 | 13980 | 9732 | 11493 | 14809 | 15638 | 16467 |
| 9733 | 10665 | 12323 | 13152 | 13981 | 9734 | 11494 | 14810 | 15639 | 16468 |
| 9735 | 10666 | 12324 | 13153 | 13982 | 9736 | 11495 | 14811 | 15640 | 16469 |
| 9737 | 10667 | 12325 | 13154 | 13983 | 9738 | 11496 | 14812 | 15641 | 16470 |
| 9739 | 10668 | 12326 | 13155 | 13984 | 9740 | 11497 | 14813 | 15642 | 16471 |
| 9741 | 10669 | 12327 | 13156 | 13985 | 9742 | 11498 | 14814 | 15643 | 16472 |
| 9743 | 10670 | 12328 | 13157 | 13986 | 9744 | 11499 | 14815 | 15644 | 16473 |
| 9745 | 10671 | 12329 | 13158 | 13987 | 9746 | 11500 | 14816 | 15645 | 16474 |
| 9747 | 10672 | 12330 | 13159 | 13988 | 9748 | 11501 | 14817 | 15646 | 16475 |
| 9749 | 10673 | 12331 | 13160 | 13989 | 9750 | 11502 | 14818 | 15647 | 16476 |
| 9751 | 10674 | 12332 | 13161 | 13990 | 9752 | 11503 | 14819 | 15648 | 16477 |
| 9753 | 10675 | 12333 | 13162 | 13991 | 9754 | 11504 | 14820 | 15649 | 16478 |
| 9755 | 10676 | 12334 | 13163 | 13992 | 9756 | 11505 | 14821 | 15650 | 16479 |
| 9757 | 10677 | 12335 | 13164 | 13993 | 9758 | 11506 | 14822 | 15651 | 16480 |
| 9759 | 10678 | 12336 | 13165 | 13994 | 9760 | 11507 | 14823 | 15652 | 16481 |
| 9761 | 10679 | 12337 | 13166 | 13995 | 9762 | 11508 | 14824 | 15653 | 16482 |
| 9763 | 10680 | 12338 | 13167 | 13996 | 9764 | 11509 | 14825 | 15654 | 16483 |
| 9765 | 10681 | 12339 | 13168 | 13997 | 9766 | 11510 | 14826 | 15655 | 16484 |
| 9767 | 10682 | 12340 | 13169 | 13998 | 9768 | 11511 | 14827 | 15656 | 16485 |
| 9769 | 10683 | 12341 | 13170 | 13999 | 9770 | 11512 | 14828 | 15657 | 16486 |
| 9771 | 10684 | 12342 | 13171 | 14000 | 9772 | 11513 | 14829 | 15658 | 16487 |
| 9773 | 10685 | 12343 | 13172 | 14001 | 9774 | 11514 | 14830 | 15659 | 16488 |
| 9775 | 10686 | 12344 | 13173 | 14002 | 9776 | 11515 | 14831 | 15660 | 16489 |
| 9777 | 10687 | 12345 | 13174 | 14003 | 9778 | 11516 | 14832 | 15661 | 16490 |
| 9779 | 10688 | 12346 | 13175 | 14004 | 9780 | 11517 | 14833 | 15662 | 16491 |
| 9781 | 10689 | 12347 | 13176 | 14005 | 9782 | 11518 | 14834 | 15663 | 16492 |
| 9783 | 10690 | 12348 | 13177 | 14006 | 9784 | 11519 | 14835 | 15664 | 16493 |
| 9785 | 10691 | 12349 | 13178 | 14007 | 9786 | 11520 | 14836 | 15665 | 16494 |
| 9787 | 10692 | 12350 | 13179 | 14008 | 9788 | 11521 | 14837 | 15666 | 16495 |
| 9789 | 10693 | 12351 | 13180 | 14009 | 9790 | 11522 | 14838 | 15667 | 16496 |
| 9791 | 10694 | 12352 | 13181 | 14010 | 9792 | 11523 | 14839 | 15668 | 16497 |
| 9793 | 10695 | 12353 | 13182 | 14011 | 9794 | 11524 | 14840 | 15669 | 16498 |
| 9795 | 10696 | 12354 | 13183 | 14012 | 9796 | 11525 | 14841 | 15670 | 16499 |
| 9797 | 10697 | 12355 | 13184 | 14013 | 9798 | 11526 | 14842 | 15671 | 16500 |
| 9799 | 10698 | 12356 | 13185 | 14014 | 9800 | 11527 | 14843 | 15672 | 16501 |
| 9801 | 10699 | 12357 | 13186 | 14015 | 9802 | 11528 | 14844 | 15673 | 16502 |
| 9803 | 10700 | 12358 | 13187 | 14016 | 9804 | 11529 | 14845 | 15674 | 16503 |
| 9805 | 10701 | 12359 | 13188 | 14017 | 9806 | 11530 | 14846 | 15675 | 16504 |
| 9807 | 10702 | 12360 | 13189 | 14018 | 9808 | 11531 | 14847 | 15676 | 16505 |
| 9809 | 10703 | 12361 | 13190 | 14019 | 9810 | 11532 | 14848 | 15677 | 16506 |
| 9811 | 10704 | 12362 | 13191 | 14020 | 9812 | 11533 | 14849 | 15678 | 16507 |
| 9813 | 10705 | 12363 | 13192 | 14021 | 9814 | 11534 | 14850 | 15679 | 16508 |
| 9815 | 10706 | 12364 | 13193 | 14022 | 9816 | 11535 | 14851 | 15680 | 16509 |
| 9817 | 10707 | 12365 | 13194 | 14023 | 9818 | 11536 | 14852 | 15681 | 16510 |
| 9819 | 10708 | 12366 | 13195 | 14024 | 9820 | 11537 | 14853 | 15682 | 16511 |
| 9821 | 10709 | 12367 | 13196 | 14025 | 9822 | 11538 | 14854 | 15683 | 16512 |
| 9823 | 10710 | 12368 | 13197 | 14026 | 9824 | 11539 | 14855 | 15684 | 16513 |
| 9825 | 10711 | 12369 | 13198 | 14027 | 9826 | 11540 | 14856 | 15685 | 16514 |
| 9827 | 10712 | 12370 | 13199 | 14028 | 9828 | 11541 | 14857 | 15686 | 16515 |
| 9829 | 10713 | 12371 | 13200 | 14029 | 9830 | 11542 | 14858 | 15687 | 16516 |
| 9831 | 10714 | 12372 | 13201 | 14030 | 9832 | 11543 | 14859 | 15688 | 16517 |
| 9833 | 10715 | 12373 | 13202 | 14031 | 9834 | 11544 | 14860 | 15689 | 16518 |
| 9835 | 10716 | 12374 | 13203 | 14032 | 9836 | 11545 | 14861 | 15690 | 16519 |
| 9837 | 10717 | 12375 | 13204 | 14033 | 9838 | 11546 | 14862 | 15691 | 16520 |
| 9839 | 10718 | 12376 | 13205 | 14034 | 9840 | 11547 | 14863 | 15692 | 16521 |
| 9841 | 10719 | 12377 | 13206 | 14035 | 9842 | 11548 | 14864 | 15693 | 16522 |
| 9843 | 10720 | 12378 | 13207 | 14036 | 9844 | 11549 | 14865 | 15694 | 16523 |
| 9845 | 10721 | 12379 | 13208 | 14037 | 9846 | 11550 | 14866 | 15695 | 16524 |
| 9847 | 10722 | 12380 | 13209 | 14038 | 9848 | 11551 | 14867 | 15696 | 16525 |
| 9849 | 10723 | 12381 | 13210 | 14039 | 9850 | 11552 | 14868 | 15697 | 16526 |
| 9851 | 10724 | 12382 | 13211 | 14040 | 9852 | 11553 | 14869 | 15698 | 16527 |
| 9853 | 10725 | 12383 | 13212 | 14041 | 9854 | 11554 | 14870 | 15699 | 16528 |
| 9855 | 10726 | 12384 | 13213 | 14042 | 9856 | 11555 | 14871 | 15700 | 16529 |
| 9857 | 10727 | 12385 | 13214 | 14043 | 9858 | 11556 | 14872 | 15701 | 16530 |
| 9859 | 10728 | 12386 | 13215 | 14044 | 9860 | 11557 | 14873 | 15702 | 16531 |
| 9861 | 10729 | 12387 | 13216 | 14045 | 9862 | 11558 | 14874 | 15703 | 16532 |
| 9863 | 10730 | 12388 | 13217 | 14046 | 9864 | 11559 | 14875 | 15704 | 16533 |
| 9865 | 10731 | 12389 | 13218 | 14047 | 9866 | 11560 | 14876 | 15705 | 16534 |
| 9867 | 10732 | 12390 | 13219 | 14048 | 9868 | 11561 | 14877 | 15706 | 16535 |
| 9869 | 10733 | 12391 | 13220 | 14049 | 9870 | 11562 | 14878 | 15707 | 16536 |
| 9871 | 10734 | 12392 | 13221 | 14050 | 9872 | 11563 | 14879 | 15708 | 16537 |
| 9873 | 10735 | 12393 | 13222 | 14051 | 9874 | 11564 | 14880 | 15709 | 16538 |
| 9875 | 10736 | 12394 | 13223 | 14052 | 9876 | 11565 | 14881 | 15710 | 16539 |
| 9877 | 10737 | 12395 | 13224 | 14053 | 9878 | 11566 | 14882 | 15711 | 16540 |
| 9879 | 10738 | 12396 | 13225 | 14054 | 9880 | 11567 | 14883 | 15712 | 16541 |
| 9881 | 10739 | 12397 | 13226 | 14055 | 9882 | 11568 | 14884 | 15713 | 16542 |
| 9883 | 10740 | 12398 | 13227 | 14056 | 9884 | 11569 | 14885 | 15714 | 16543 |
| 9885 | 10741 | 12399 | 13228 | 14057 | 9886 | 11570 | 14886 | 15715 | 16544 |
| 9887 | 10742 | 12400 | 13229 | 14058 | 9888 | 11571 | 14887 | 15716 | 16545 |
| 9889 | 10743 | 12401 | 13230 | 14059 | 9890 | 11572 | 14888 | 15717 | 16546 |
| 9891 | 10744 | 12402 | 13231 | 14060 | 9892 | 11573 | 14889 | 15718 | 16547 |
| 9893 | 10745 | 12403 | 13232 | 14061 | 9894 | 11574 | 14890 | 15719 | 16548 |
| 9895 | 10746 | 12404 | 13233 | 14062 | 9896 | 11575 | 14891 | 15720 | 16549 |
| 9897 | 10747 | 12405 | 13234 | 14063 | 9898 | 11576 | 14892 | 15721 | 16550 |
| 9899 | 10748 | 12406 | 13235 | 14064 | 9900 | 11577 | 14893 | 15722 | 16551 |
| 9901 | 10749 | 12407 | 13236 | 14065 | 9902 | 11578 | 14894 | 15723 | 16552 |
| 9903 | 10750 | 12408 | 13237 | 14066 | 9904 | 11579 | 14895 | 15724 | 16553 |
| 9905 | 10751 | 12409 | 13238 | 14067 | 9906 | 11580 | 14896 | 15725 | 16554 |
| 9907 | 10752 | 12410 | 13239 | 14068 | 9908 | 11581 | 14897 | 15726 | 16555 |
| 9909 | 10753 | 12411 | 13240 | 14069 | 9910 | 11582 | 14898 | 15727 | 16556 |
| 9911 | 10754 | 12412 | 13241 | 14070 | 9912 | 11583 | 14899 | 15728 | 16557 |
| 9913 | 10755 | 12413 | 13242 | 14071 | 9914 | 11584 | 14900 | 15729 | 16558 |
| 9915 | 10756 | 12414 | 13243 | 14072 | 9916 | 11585 | 14901 | 15730 | 16559 |
| 9917 | 10757 | 12415 | 13244 | 14073 | 9918 | 11586 | 14902 | 15731 | 16560 |
| 9919 | 10758 | 12416 | 13245 | 14074 | 9920 | 11587 | 14903 | 15732 | 16561 |
| 9921 | 10759 | 12417 | 13246 | 14075 | 9922 | 11588 | 14904 | 15733 | 16562 |
| 9923 | 10760 | 12418 | 13247 | 14076 | 9924 | 11589 | 14905 | 15734 | 16563 |
| 9925 | 10761 | 12419 | 13248 | 14077 | 9926 | 11590 | 14906 | 15735 | 16564 |
| 9927 | 10762 | 12420 | 13249 | 14078 | 9928 | 11591 | 14907 | 15736 | 16565 |
| 9929 | 10763 | 12421 | 13250 | 14079 | 9930 | 11592 | 14908 | 15737 | 16566 |
| 9931 | 10764 | 12422 | 13251 | 14080 | 9932 | 11593 | 14909 | 15738 | 16567 |
| 9933 | 10765 | 12423 | 13252 | 14081 | 9934 | 11594 | 14910 | 15739 | 16568 |
| 9935 | 10766 | 12424 | 13253 | 14082 | 9936 | 11595 | 14911 | 15740 | 16569 |
| 9937 | 10767 | 12425 | 13254 | 14083 | 9938 | 11596 | 14912 | 15741 | 16570 |
| 16571 | 18485 | 19442 | 20399 | 21356 | 16572 | 22313 | 23270 | 24227 | 25184 |
| 16573 | 18486 | 19443 | 20400 | 21357 | 16574 | 22314 | 23271 | 24228 | 25185 |
| 16575 | 18487 | 19444 | 20401 | 21358 | 16576 | 22315 | 23272 | 24229 | 25186 |
| 16577 | 18488 | 19445 | 20402 | 21359 | 16578 | 22316 | 23273 | 24230 | 25187 |
| 16579 | 18489 | 19446 | 20403 | 21360 | 16580 | 22317 | 23274 | 24231 | 25188 |
| 16581 | 18490 | 19447 | 20404 | 21361 | 16582 | 22318 | 23275 | 24232 | 25189 |
| 16583 | 18491 | 19448 | 20405 | 21362 | 16584 | 22319 | 23276 | 24233 | 25190 |
| 16585 | 18492 | 19449 | 20406 | 21363 | 16586 | 22320 | 23277 | 24234 | 25191 |
| 16587 | 18493 | 19450 | 20407 | 21364 | 16588 | 22321 | 23278 | 24235 | 25192 |
| 16589 | 18494 | 19451 | 20408 | 21365 | 16590 | 22322 | 23279 | 24236 | 25193 |
| 16591 | 18495 | 19452 | 20409 | 21366 | 16592 | 22323 | 23280 | 24237 | 25194 |
| 16593 | 18496 | 19453 | 20410 | 21367 | 16594 | 22324 | 23281 | 24238 | 25195 |
| 16595 | 18497 | 19454 | 20411 | 21368 | 16596 | 22325 | 23282 | 24239 | 25196 |
| 16597 | 18498 | 19455 | 20412 | 21369 | 16598 | 22326 | 23283 | 24240 | 25197 |
| 16599 | 18499 | 19456 | 20413 | 21370 | 16600 | 22327 | 23284 | 24241 | 25198 |
| 16601 | 18500 | 19457 | 20414 | 21371 | 16602 | 22328 | 23285 | 24242 | 25199 |
| 16603 | 18501 | 19458 | 20415 | 21372 | 16604 | 22329 | 23286 | 24243 | 25200 |
| 16605 | 18502 | 19459 | 20416 | 21373 | 16606 | 22330 | 23287 | 24244 | 25201 |
| 16607 | 18503 | 19460 | 20417 | 21374 | 16608 | 22331 | 23288 | 24245 | 25202 |
| 16609 | 18504 | 19461 | 20418 | 21375 | 16610 | 22332 | 23289 | 24246 | 25203 |
| 16611 | 18505 | 19462 | 20419 | 21376 | 16612 | 22333 | 23290 | 24247 | 25204 |
| 16613 | 18506 | 19463 | 20420 | 21377 | 16614 | 22334 | 23291 | 24248 | 25205 |
| 16615 | 18507 | 19464 | 20421 | 21378 | 16616 | 22335 | 23292 | 24249 | 25206 |
| 16617 | 18508 | 19465 | 20422 | 21379 | 16618 | 22336 | 23293 | 24250 | 25207 |
| 16619 | 18509 | 19466 | 20423 | 21380 | 16620 | 22337 | 23294 | 24251 | 25208 |
| 16621 | 18510 | 19467 | 20424 | 21381 | 16622 | 22338 | 23295 | 24252 | 25209 |
| 16623 | 18511 | 19468 | 20425 | 21382 | 16624 | 22339 | 23296 | 24253 | 25210 |
| 16625 | 18512 | 19469 | 20426 | 21383 | 16626 | 22340 | 23297 | 24254 | 25211 |
| 16627 | 18513 | 19470 | 20427 | 21384 | 16628 | 22341 | 23298 | 24255 | 25212 |
| 16629 | 18514 | 19471 | 20428 | 21385 | 16630 | 22342 | 23299 | 24256 | 25213 |
| 16631 | 18515 | 19472 | 20429 | 21386 | 16632 | 22343 | 23300 | 24257 | 25214 |
| 16633 | 18516 | 19473 | 20430 | 21387 | 16634 | 22344 | 23301 | 24258 | 25215 |
| 16635 | 18517 | 19474 | 20431 | 21388 | 16636 | 22345 | 23302 | 24259 | 25216 |
| 16637 | 18518 | 19475 | 20432 | 21389 | 16638 | 22346 | 23303 | 24260 | 25217 |
| 16639 | 18519 | 19476 | 20433 | 21390 | 16640 | 22347 | 23304 | 24261 | 25218 |
| 16641 | 18520 | 19477 | 20434 | 21391 | 16642 | 22348 | 23305 | 24262 | 25219 |
| 16643 | 18521 | 19478 | 20435 | 21392 | 16644 | 22349 | 23306 | 24263 | 25220 |
| 16645 | 18522 | 19479 | 20436 | 21393 | 16646 | 22350 | 23307 | 24264 | 25221 |
| 16647 | 18523 | 19480 | 20437 | 21394 | 16648 | 22351 | 23308 | 24265 | 25222 |
| 16649 | 18524 | 19481 | 20438 | 21395 | 16650 | 22352 | 23309 | 24266 | 25223 |
| 16651 | 18525 | 19482 | 20439 | 21396 | 16652 | 22353 | 23310 | 24267 | 25224 |
| 16653 | 18526 | 19483 | 20440 | 21397 | 16654 | 22354 | 23311 | 24268 | 25225 |
| 16655 | 18527 | 19484 | 20441 | 21398 | 16656 | 22355 | 23312 | 24269 | 25226 |
| 16657 | 18528 | 19485 | 20442 | 21399 | 16658 | 22356 | 23313 | 24270 | 25227 |
| 16659 | 18529 | 19486 | 20443 | 21400 | 16660 | 22357 | 23314 | 24271 | 25228 |
| 16661 | 18530 | 19487 | 20444 | 21401 | 16662 | 22358 | 23315 | 24272 | 25229 |
| 16663 | 18531 | 19488 | 20445 | 21402 | 16664 | 22359 | 23316 | 24273 | 25230 |
| 16665 | 18532 | 19489 | 20446 | 21403 | 16666 | 22360 | 23317 | 24274 | 25231 |
| 16667 | 18533 | 19490 | 20447 | 21404 | 16668 | 22361 | 23318 | 24275 | 25232 |
| 16669 | 18534 | 19491 | 20448 | 21405 | 16670 | 22362 | 23319 | 24276 | 25233 |
| 16671 | 18535 | 19492 | 20449 | 21406 | 16672 | 22363 | 23320 | 24277 | 25234 |
| 16673 | 18536 | 19493 | 20450 | 21407 | 16674 | 22364 | 23321 | 24278 | 25235 |
| 16675 | 18537 | 19494 | 20451 | 21408 | 16676 | 22365 | 23322 | 24279 | 25236 |
| 16677 | 18538 | 19495 | 20452 | 21409 | 16678 | 22366 | 23323 | 24280 | 25237 |
| 16679 | 18539 | 19496 | 20453 | 21410 | 16680 | 22367 | 23324 | 24281 | 25238 |
| 16681 | 18540 | 19497 | 20454 | 21411 | 16682 | 22368 | 23325 | 24282 | 25239 |
| 16683 | 18541 | 19498 | 20455 | 21412 | 16684 | 22369 | 23326 | 24283 | 25240 |
| 16685 | 18542 | 19499 | 20456 | 21413 | 16686 | 22370 | 23327 | 24284 | 25241 |
| 16687 | 18543 | 19500 | 20457 | 21414 | 16688 | 22371 | 23328 | 24285 | 25242 |
| 16689 | 18544 | 19501 | 20458 | 21415 | 16690 | 22372 | 23329 | 24286 | 25243 |
| 16691 | 18545 | 19502 | 20459 | 21416 | 16692 | 22373 | 23330 | 24287 | 25244 |
| 16693 | 18546 | 19503 | 20460 | 21417 | 16694 | 22374 | 23331 | 24288 | 25245 |
| 16695 | 18547 | 19504 | 20461 | 21418 | 16696 | 22375 | 23332 | 24289 | 25246 |
| 16697 | 18548 | 19505 | 20462 | 21419 | 16698 | 22376 | 23333 | 24290 | 25247 |
| 16699 | 18549 | 19506 | 20463 | 21420 | 16700 | 22377 | 23334 | 24291 | 25248 |
| 16701 | 18550 | 19507 | 20464 | 21421 | 16702 | 22378 | 23335 | 24292 | 25249 |
| 16703 | 18551 | 19508 | 20465 | 21422 | 16704 | 22379 | 23336 | 24293 | 25250 |
| 16705 | 18552 | 19509 | 20466 | 21423 | 16706 | 22380 | 23337 | 24294 | 25251 |
| 16707 | 18553 | 19510 | 20467 | 21424 | 16708 | 22381 | 23338 | 24295 | 25252 |
| 16709 | 18554 | 19511 | 20468 | 21425 | 16710 | 22382 | 23339 | 24296 | 25253 |
| 16711 | 18555 | 19512 | 20469 | 21426 | 16712 | 22383 | 23340 | 24297 | 25254 |
| 16713 | 18556 | 19513 | 20470 | 21427 | 16714 | 22384 | 23341 | 24298 | 25255 |
| 16715 | 18557 | 19514 | 20471 | 21428 | 16716 | 22385 | 23342 | 24299 | 25256 |
| 16717 | 18558 | 19515 | 20472 | 21429 | 16718 | 22386 | 23343 | 24300 | 25257 |
| 16719 | 18559 | 19516 | 20473 | 21430 | 16720 | 22387 | 23344 | 24301 | 25258 |
| 16721 | 18560 | 19517 | 20474 | 21431 | 16722 | 22388 | 23345 | 24302 | 25259 |
| 16723 | 18561 | 19518 | 20475 | 21432 | 16724 | 22389 | 23346 | 24303 | 25260 |
| 16725 | 18562 | 19519 | 20476 | 21433 | 16726 | 22390 | 23347 | 24304 | 25261 |
| 16727 | 18563 | 19520 | 20477 | 21434 | 16728 | 22391 | 23348 | 24305 | 25262 |
| 16729 | 18564 | 19521 | 20478 | 21435 | 16730 | 22392 | 23349 | 24306 | 25263 |
| 16731 | 18565 | 19522 | 20479 | 21436 | 16732 | 22393 | 23350 | 24307 | 25264 |
| 16733 | 18566 | 19523 | 20480 | 21437 | 16734 | 22394 | 23351 | 24308 | 25265 |
| 16735 | 18567 | 19524 | 20481 | 21438 | 16736 | 22395 | 23352 | 24309 | 25266 |
| 16737 | 18568 | 19525 | 20482 | 21439 | 16738 | 22396 | 23353 | 24310 | 25267 |
| 16739 | 18569 | 19526 | 20483 | 21440 | 16740 | 22397 | 23354 | 24311 | 25268 |
| 16741 | 18570 | 19527 | 20484 | 21441 | 16742 | 22398 | 23355 | 24312 | 25269 |
| 16743 | 18571 | 19528 | 20485 | 21442 | 16744 | 22399 | 23356 | 24313 | 25270 |
| 16745 | 18572 | 19529 | 20486 | 21443 | 16746 | 22400 | 23357 | 24314 | 25271 |
| 16747 | 18573 | 19530 | 20487 | 21444 | 16748 | 22401 | 23358 | 24315 | 25272 |
| 16749 | 18574 | 19531 | 20488 | 21445 | 16750 | 22402 | 23359 | 24316 | 25273 |
| 16751 | 18575 | 19532 | 20489 | 21446 | 16752 | 22403 | 23360 | 24317 | 25274 |
| 16753 | 18576 | 19533 | 20490 | 21447 | 16754 | 22404 | 23361 | 24318 | 25275 |
| 16755 | 18577 | 19534 | 20491 | 21448 | 16756 | 22405 | 23362 | 24319 | 25276 |
| 16757 | 18578 | 19535 | 20492 | 21449 | 16758 | 22406 | 23363 | 24320 | 25277 |
| 16759 | 18579 | 19536 | 20493 | 21450 | 16760 | 22407 | 23364 | 24321 | 25278 |
| 16761 | 18580 | 19537 | 20494 | 21451 | 16762 | 22408 | 23365 | 24322 | 25279 |
| 16763 | 18581 | 19538 | 20495 | 21452 | 16764 | 22409 | 23366 | 24323 | 25280 |
| 16765 | 18582 | 19539 | 20496 | 21453 | 16766 | 22410 | 23367 | 24324 | 25281 |
| 16767 | 18583 | 19540 | 20497 | 21454 | 16768 | 22411 | 23368 | 24325 | 25282 |
| 16769 | 18584 | 19541 | 20498 | 21455 | 16770 | 22412 | 23369 | 24326 | 25283 |
| 16771 | 18585 | 19542 | 20499 | 21456 | 16772 | 22413 | 23370 | 24327 | 25284 |
| 16773 | 18586 | 19543 | 20500 | 21457 | 16774 | 22414 | 23371 | 24328 | 25285 |
| 16775 | 18587 | 19544 | 20501 | 21458 | 16776 | 22415 | 23372 | 24329 | 25286 |
| 16777 | 18588 | 19545 | 20502 | 21459 | 16778 | 22416 | 23373 | 24330 | 25287 |
| 16779 | 18589 | 19546 | 20503 | 21460 | 16780 | 22417 | 23374 | 24331 | 25288 |
| 16781 | 18590 | 19547 | 20504 | 21461 | 16782 | 22418 | 23375 | 24332 | 25289 |
| 16783 | 18591 | 19548 | 20505 | 21462 | 16784 | 22419 | 23376 | 24333 | 25290 |
| 16785 | 18592 | 19549 | 20506 | 21463 | 16786 | 22420 | 23377 | 24334 | 25291 |
| 16787 | 18593 | 19550 | 20507 | 21464 | 16788 | 22421 | 23378 | 24335 | 25292 |
| 16789 | 18594 | 19551 | 20508 | 21465 | 16790 | 22422 | 23379 | 24336 | 25293 |
| 16791 | 18595 | 19552 | 20509 | 21466 | 16792 | 22423 | 23380 | 24337 | 25294 |
| 16793 | 18596 | 19553 | 20510 | 21467 | 16794 | 22424 | 23381 | 24338 | 25295 |
| 16795 | 18597 | 19554 | 20511 | 21468 | 16796 | 22425 | 23382 | 24339 | 25296 |
| 16797 | 18598 | 19555 | 20512 | 21469 | 16798 | 22426 | 23383 | 24340 | 25297 |
| 16799 | 18599 | 19556 | 20513 | 21470 | 16800 | 22427 | 23384 | 24341 | 25298 |
| 16801 | 18600 | 19557 | 20514 | 21471 | 16802 | 22428 | 23385 | 24342 | 25299 |
| 16803 | 18601 | 19558 | 20515 | 21472 | 16804 | 22429 | 23386 | 24343 | 25300 |
| 16805 | 18602 | 19559 | 20516 | 21473 | 16806 | 22430 | 23387 | 24344 | 25301 |
| 16807 | 18603 | 19560 | 20517 | 21474 | 16808 | 22431 | 23388 | 24345 | 25302 |
| 16809 | 18604 | 19561 | 20518 | 21475 | 16810 | 22432 | 23389 | 24346 | 25303 |
| 16811 | 18605 | 19562 | 20519 | 21476 | 16812 | 22433 | 23390 | 24347 | 25304 |
| 16813 | 18606 | 19563 | 20520 | 21477 | 16814 | 22434 | 23391 | 24348 | 25305 |
| 16815 | 18607 | 19564 | 20521 | 21478 | 16816 | 22435 | 23392 | 24349 | 25306 |
| 16817 | 18608 | 19565 | 20522 | 21479 | 16818 | 22436 | 23393 | 24350 | 25307 |
| 16819 | 18609 | 19566 | 20523 | 21480 | 16820 | 22437 | 23394 | 24351 | 25308 |
| 16821 | 18610 | 19567 | 20524 | 21481 | 16822 | 22438 | 23395 | 24352 | 25309 |
| 16823 | 18611 | 19568 | 20525 | 21482 | 16824 | 22439 | 23396 | 24353 | 25310 |
| 16825 | 18612 | 19569 | 20526 | 21483 | 16826 | 22440 | 23397 | 24354 | 25311 |
| 16827 | 18613 | 19570 | 20527 | 21484 | 16828 | 22441 | 23398 | 24355 | 25312 |
| 16829 | 18614 | 19571 | 20528 | 21485 | 16830 | 22442 | 23399 | 24356 | 25313 |
| 16831 | 18615 | 19572 | 20529 | 21486 | 16832 | 22443 | 23400 | 24357 | 25314 |
| 16833 | 18616 | 19573 | 20530 | 21487 | 16834 | 22444 | 23401 | 24358 | 25315 |
| 16835 | 18617 | 19574 | 20531 | 21488 | 16836 | 22445 | 23402 | 24359 | 25316 |
| 16837 | 18618 | 19575 | 20532 | 21489 | 16838 | 22446 | 23403 | 24360 | 25317 |
| 16839 | 18619 | 19576 | 20533 | 21490 | 16840 | 22447 | 23404 | 24361 | 25318 |
| 16841 | 18620 | 19577 | 20534 | 21491 | 16842 | 22448 | 23405 | 24362 | 25319 |
| 16843 | 18621 | 19578 | 20535 | 21492 | 16844 | 22449 | 23406 | 24363 | 25320 |
| 16845 | 18622 | 19579 | 20536 | 21493 | 16846 | 22450 | 23407 | 24364 | 25321 |
| 16847 | 18623 | 19580 | 20537 | 21494 | 16848 | 22451 | 23408 | 24365 | 25322 |
| 16849 | 18624 | 19581 | 20538 | 21495 | 16850 | 22452 | 23409 | 24366 | 25323 |
| 16851 | 18625 | 19582 | 20539 | 21496 | 16852 | 22453 | 23410 | 24367 | 25324 |
| 16853 | 18626 | 19583 | 20540 | 21497 | 16854 | 22454 | 23411 | 24368 | 25325 |
| 16855 | 18627 | 19584 | 20541 | 21498 | 16856 | 22455 | 23412 | 24369 | 25326 |
| 16857 | 18628 | 19585 | 20542 | 21499 | 16858 | 22456 | 23413 | 24370 | 25327 |
| 16859 | 18629 | 19586 | 20543 | 21500 | 16860 | 22457 | 23414 | 24371 | 25328 |
| 16861 | 18630 | 19587 | 20544 | 21501 | 16862 | 22458 | 23415 | 24372 | 25329 |
| 16863 | 18631 | 19588 | 20545 | 21502 | 16864 | 22459 | 23416 | 24373 | 25330 |
| 16865 | 18632 | 19589 | 20546 | 21503 | 16866 | 22460 | 23417 | 24374 | 25331 |
| 16867 | 18633 | 19590 | 20547 | 21504 | 16868 | 22461 | 23418 | 24375 | 25332 |
| 16869 | 18634 | 19591 | 20548 | 21505 | 16870 | 22462 | 23419 | 24376 | 25333 |
| 16871 | 18635 | 19592 | 20549 | 21506 | 16872 | 22463 | 23420 | 24377 | 25334 |
| 16873 | 18636 | 19593 | 20550 | 21507 | 16874 | 22464 | 23421 | 24378 | 25335 |
| 16875 | 18637 | 19594 | 20551 | 21508 | 16876 | 22465 | 23422 | 24379 | 25336 |
| 16877 | 18638 | 19595 | 20552 | 21509 | 16878 | 22466 | 23423 | 24380 | 25337 |
| 16879 | 18639 | 19596 | 20553 | 21510 | 16880 | 22467 | 23424 | 24381 | 25338 |
| 16881 | 18640 | 19597 | 20554 | 21511 | 16882 | 22468 | 23425 | 24382 | 25339 |
| 16883 | 18641 | 19598 | 20555 | 21512 | 16884 | 22469 | 23426 | 24383 | 25340 |
| 16885 | 18642 | 19599 | 20556 | 21513 | 16886 | 22470 | 23427 | 24384 | 25341 |
| 16887 | 18643 | 19600 | 20557 | 21514 | 16888 | 22471 | 23428 | 24385 | 25342 |
| 16889 | 18644 | 19601 | 20558 | 21515 | 16890 | 22472 | 23429 | 24386 | 25343 |
| 16891 | 18645 | 19602 | 20559 | 21516 | 16892 | 22473 | 23430 | 24387 | 25344 |
| 16893 | 18646 | 19603 | 20560 | 21517 | 16894 | 22474 | 23431 | 24388 | 25345 |
| 16895 | 18647 | 19604 | 20561 | 21518 | 16896 | 22475 | 23432 | 24389 | 25346 |
| 16897 | 18648 | 19605 | 20562 | 21519 | 16898 | 22476 | 23433 | 24390 | 25347 |
| 16899 | 18649 | 19606 | 20563 | 21520 | 16900 | 22477 | 23434 | 24391 | 25348 |
| 16901 | 18650 | 19607 | 20564 | 21521 | 16902 | 22478 | 23435 | 24392 | 25349 |
| 16903 | 18651 | 19608 | 20565 | 21522 | 16904 | 22479 | 23436 | 24393 | 25350 |
| 16905 | 18652 | 19609 | 20566 | 21523 | 16906 | 22480 | 23437 | 24394 | 25351 |
| 16907 | 18653 | 19610 | 20567 | 21524 | 16908 | 22481 | 23438 | 24395 | 25352 |
| 16909 | 18654 | 19611 | 20568 | 21525 | 16910 | 22482 | 23439 | 24396 | 25353 |
| 16911 | 18655 | 19612 | 20569 | 21526 | 16912 | 22483 | 23440 | 24397 | 25354 |
| 16913 | 18656 | 19613 | 20570 | 21527 | 16914 | 22484 | 23441 | 24398 | 25355 |
| 16915 | 18657 | 19614 | 20571 | 21528 | 16916 | 22485 | 23442 | 24399 | 25356 |
| 16917 | 18658 | 19615 | 20572 | 21529 | 16918 | 22486 | 23443 | 24400 | 25357 |
| 16919 | 18659 | 19616 | 20573 | 21530 | 16920 | 22487 | 23444 | 24401 | 25358 |
| 16921 | 18660 | 19617 | 20574 | 21531 | 16922 | 22488 | 23445 | 24402 | 25359 |
| 16923 | 18661 | 19618 | 20575 | 21532 | 16924 | 22489 | 23446 | 24403 | 25360 |
| 16925 | 18662 | 19619 | 20576 | 21533 | 16926 | 22490 | 23447 | 24404 | 25361 |
| 16927 | 18663 | 19620 | 20577 | 21534 | 16928 | 22491 | 23448 | 24405 | 25362 |
| 16929 | 18664 | 19621 | 20578 | 21535 | 16930 | 22492 | 23449 | 24406 | 25363 |
| 16931 | 18665 | 19622 | 20579 | 21536 | 16932 | 22493 | 23450 | 24407 | 25364 |
| 16933 | 18666 | 19623 | 20580 | 21537 | 16934 | 22494 | 23451 | 24408 | 25365 |
| 16935 | 18667 | 19624 | 20581 | 21538 | 16936 | 22495 | 23452 | 24409 | 25366 |
| 16937 | 18668 | 19625 | 20582 | 21539 | 16938 | 22496 | 23453 | 24410 | 25367 |
| 16939 | 18669 | 19626 | 20583 | 21540 | 16940 | 22497 | 23454 | 24411 | 25368 |
| 16941 | 18670 | 19627 | 20584 | 21541 | 16942 | 22498 | 23455 | 24412 | 25369 |
| 16943 | 18671 | 19628 | 20585 | 21542 | 16944 | 22499 | 23456 | 24413 | 25370 |
| 16945 | 18672 | 19629 | 20586 | 21543 | 16946 | 22500 | 23457 | 24414 | 25371 |
| 16947 | 18673 | 19630 | 20587 | 21544 | 16948 | 22501 | 23458 | 24415 | 25372 |
| 16949 | 18674 | 19631 | 20588 | 21545 | 16950 | 22502 | 23459 | 24416 | 25373 |
| 16951 | 18675 | 19632 | 20589 | 21546 | 16952 | 22503 | 23460 | 24417 | 25374 |
| 16953 | 18676 | 19633 | 20590 | 21547 | 16954 | 22504 | 23461 | 24418 | 25375 |
| 16955 | 18677 | 19634 | 20591 | 21548 | 16956 | 22505 | 23462 | 24419 | 25376 |
| 16957 | 18678 | 19635 | 20592 | 21549 | 16958 | 22506 | 23463 | 24420 | 25377 |
| 16959 | 18679 | 19636 | 20593 | 21550 | 16960 | 22507 | 23464 | 24421 | 25378 |
| 16961 | 18680 | 19637 | 20594 | 21551 | 16962 | 22508 | 23465 | 24422 | 25379 |
| 16963 | 18681 | 19638 | 20595 | 21552 | 16964 | 22509 | 23466 | 24423 | 25380 |
| 16965 | 18682 | 19639 | 20596 | 21553 | 16966 | 22510 | 23467 | 24424 | 25381 |
| 16967 | 18683 | 19640 | 20597 | 21554 | 16968 | 22511 | 23468 | 24425 | 25382 |
| 16969 | 18684 | 19641 | 20598 | 21555 | 16970 | 22512 | 23469 | 24426 | 25383 |
| 16971 | 18685 | 19642 | 20599 | 21556 | 16972 | 22513 | 23470 | 24427 | 25384 |
| 16973 | 18686 | 19643 | 20600 | 21557 | 16974 | 22514 | 23471 | 24428 | 25385 |
| 16975 | 18687 | 19644 | 20601 | 21558 | 16976 | 22515 | 23472 | 24429 | 25386 |
| 16977 | 18688 | 19645 | 20602 | 21559 | 16978 | 22516 | 23473 | 24430 | 25387 |
| 16979 | 18689 | 19646 | 20603 | 21560 | 16980 | 22517 | 23474 | 24431 | 25388 |
| 16981 | 18690 | 19647 | 20604 | 21561 | 16982 | 22518 | 23475 | 24432 | 25389 |
| 16983 | 18691 | 19648 | 20605 | 21562 | 16984 | 22519 | 23476 | 24433 | 25390 |
| 16985 | 18692 | 19649 | 20606 | 21563 | 16986 | 22520 | 23477 | 24434 | 25391 |
| 16987 | 18693 | 19650 | 20607 | 21564 | 16988 | 22521 | 23478 | 24435 | 25392 |
| 16989 | 18694 | 19651 | 20608 | 21565 | 16990 | 22522 | 23479 | 24436 | 25393 |
| 16991 | 18695 | 19652 | 20609 | 21566 | 16992 | 22523 | 23480 | 24437 | 25394 |
| 16993 | 18696 | 19653 | 20610 | 21567 | 16994 | 22524 | 23481 | 24438 | 25395 |
| 16995 | 18697 | 19654 | 20611 | 21568 | 16996 | 22525 | 23482 | 24439 | 25396 |
| 16997 | 18698 | 19655 | 20612 | 21569 | 16998 | 22526 | 23483 | 24440 | 25397 |
| 16999 | 18699 | 19656 | 20613 | 21570 | 17000 | 22527 | 23484 | 24441 | 25398 |
| 17001 | 18700 | 19657 | 20614 | 21571 | 17002 | 22528 | 23485 | 24442 | 25399 |
| 17003 | 18701 | 19658 | 20615 | 21572 | 17004 | 22529 | 23486 | 24443 | 25400 |
| 17005 | 18702 | 19659 | 20616 | 21573 | 17006 | 22530 | 23487 | 24444 | 25401 |
| 17007 | 18703 | 19660 | 20617 | 21574 | 17008 | 22531 | 23488 | 24445 | 25402 |
| 17009 | 18704 | 19661 | 20618 | 21575 | 17010 | 22532 | 23489 | 24446 | 25403 |
| 17011 | 18705 | 19662 | 20619 | 21576 | 17012 | 22533 | 23490 | 24447 | 25404 |
| 17013 | 18706 | 19663 | 20620 | 21577 | 17014 | 22534 | 23491 | 24448 | 25405 |
| 17015 | 18707 | 19664 | 20621 | 21578 | 17016 | 22535 | 23492 | 24449 | 25406 |
| 17017 | 18708 | 19665 | 20622 | 21579 | 17018 | 22536 | 23493 | 24450 | 25407 |
| 17019 | 18709 | 19666 | 20623 | 21580 | 17020 | 22537 | 23494 | 24451 | 25408 |
| 17021 | 18710 | 19667 | 20624 | 21581 | 17022 | 22538 | 23495 | 24452 | 25409 |
| 17023 | 18711 | 19668 | 20625 | 21582 | 17024 | 22539 | 23496 | 24453 | 25410 |
| 17025 | 18712 | 19669 | 20626 | 21583 | 17026 | 22540 | 23497 | 24454 | 25411 |
| 17027 | 18713 | 19670 | 20627 | 21584 | 17028 | 22541 | 23498 | 24455 | 25412 |
| 17029 | 18714 | 19671 | 20628 | 21585 | 17030 | 22542 | 23499 | 24456 | 25413 |
| 17031 | 18715 | 19672 | 20629 | 21586 | 17032 | 22543 | 23500 | 24457 | 25414 |
| 17033 | 18716 | 19673 | 20630 | 21587 | 17034 | 22544 | 23501 | 24458 | 25415 |
| 17035 | 18717 | 19674 | 20631 | 21588 | 17036 | 22545 | 23502 | 24459 | 25416 |
| 17037 | 18718 | 19675 | 20632 | 21589 | 17038 | 22546 | 23503 | 24460 | 25417 |
| 17039 | 18719 | 19676 | 20633 | 21590 | 17040 | 22547 | 23504 | 24461 | 25418 |
| 17041 | 18720 | 19677 | 20634 | 21591 | 17042 | 22548 | 23505 | 24462 | 25419 |
| 17043 | 18721 | 19678 | 20635 | 21592 | 17044 | 22549 | 23506 | 24463 | 25420 |
| 17045 | 18722 | 19679 | 20636 | 21593 | 17046 | 22550 | 23507 | 24464 | 25421 |
| 17047 | 18723 | 19680 | 20637 | 21594 | 17048 | 22551 | 23508 | 24465 | 25422 |
| 17049 | 18724 | 19681 | 20638 | 21595 | 17050 | 22552 | 23509 | 24466 | 25423 |
| 17051 | 18725 | 19682 | 20639 | 21596 | 17052 | 22553 | 23510 | 24467 | 25424 |
| 17053 | 18726 | 19683 | 20640 | 21597 | 17054 | 22554 | 23511 | 24468 | 25425 |
| 17055 | 18727 | 19684 | 20641 | 21598 | 17056 | 22555 | 23512 | 24469 | 25426 |
| 17057 | 18728 | 19685 | 20642 | 21599 | 17058 | 22556 | 23513 | 24470 | 25427 |
| 17059 | 18729 | 19686 | 20643 | 21600 | 17060 | 22557 | 23514 | 24471 | 25428 |
| 17061 | 18730 | 19687 | 20644 | 21601 | 17062 | 22558 | 23515 | 24472 | 25429 |
| 17063 | 18731 | 19688 | 20645 | 21602 | 17064 | 22559 | 23516 | 24473 | 25430 |
| 17065 | 18732 | 19689 | 20646 | 21603 | 17066 | 22560 | 23517 | 24474 | 25431 |
| 17067 | 18733 | 19690 | 20647 | 21604 | 17068 | 22561 | 23518 | 24475 | 25432 |
| 17069 | 18734 | 19691 | 20648 | 21605 | 17070 | 22562 | 23519 | 24476 | 25433 |
| 17071 | 18735 | 19692 | 20649 | 21606 | 17072 | 22563 | 23520 | 24477 | 25434 |
| 17073 | 18736 | 19693 | 20650 | 21607 | 17074 | 22564 | 23521 | 24478 | 25435 |
| 17075 | 18737 | 19694 | 20651 | 21608 | 17076 | 22565 | 23522 | 24479 | 25436 |
| 17077 | 18738 | 19695 | 20652 | 21609 | 17078 | 22566 | 23523 | 24480 | 25437 |
| 17079 | 18739 | 19696 | 20653 | 21610 | 17080 | 22567 | 23524 | 24481 | 25438 |
| 17081 | 18740 | 19697 | 20654 | 21611 | 17082 | 22568 | 23525 | 24482 | 25439 |
| 17083 | 18741 | 19698 | 20655 | 21612 | 17084 | 22569 | 23526 | 24483 | 25440 |
| 17085 | 18742 | 19699 | 20656 | 21613 | 17086 | 22570 | 23527 | 24484 | 25441 |
| 17087 | 18743 | 19700 | 20657 | 21614 | 17088 | 22571 | 23528 | 24485 | 25442 |
| 17089 | 18744 | 19701 | 20658 | 21615 | 17090 | 22572 | 23529 | 24486 | 25443 |
| 17091 | 18745 | 19702 | 20659 | 21616 | 17092 | 22573 | 23530 | 24487 | 25444 |
| 17093 | 18746 | 19703 | 20660 | 21617 | 17094 | 22574 | 23531 | 24488 | 25445 |
| 17095 | 18747 | 19704 | 20661 | 21618 | 17096 | 22575 | 23532 | 24489 | 25446 |
| 17097 | 18748 | 19705 | 20662 | 21619 | 17098 | 22576 | 23533 | 24490 | 25447 |
| 17099 | 18749 | 19706 | 20663 | 21620 | 17100 | 22577 | 23534 | 24491 | 25448 |
| 17101 | 18750 | 19707 | 20664 | 21621 | 17102 | 22578 | 23535 | 24492 | 25449 |
| 17103 | 18751 | 19708 | 20665 | 21622 | 17104 | 22579 | 23536 | 24493 | 25450 |
| 17105 | 18752 | 19709 | 20666 | 21623 | 17106 | 22580 | 23537 | 24494 | 25451 |
| 17107 | 18753 | 19710 | 20667 | 21624 | 17108 | 22581 | 23538 | 24495 | 25452 |
| 17109 | 18754 | 19711 | 20668 | 21625 | 17110 | 22582 | 23539 | 24496 | 25453 |
| 17111 | 18755 | 19712 | 20669 | 21626 | 17112 | 22583 | 23540 | 24497 | 25454 |
| 17113 | 18756 | 19713 | 20670 | 21627 | 17114 | 22584 | 23541 | 24498 | 25455 |
| 17115 | 18757 | 19714 | 20671 | 21628 | 17116 | 22585 | 23542 | 24499 | 25456 |
| 17117 | 18758 | 19715 | 20672 | 21629 | 17118 | 22586 | 23543 | 24500 | 25457 |
| 17119 | 18759 | 19716 | 20673 | 21630 | 17120 | 22587 | 23544 | 24501 | 25458 |
| 17121 | 18760 | 19717 | 20674 | 21631 | 17122 | 22588 | 23545 | 24502 | 25459 |
| 17123 | 18761 | 19718 | 20675 | 21632 | 17124 | 22589 | 23546 | 24503 | 25460 |
| 17125 | 18762 | 19719 | 20676 | 21633 | 17126 | 22590 | 23547 | 24504 | 25461 |
| 17127 | 18763 | 19720 | 20677 | 21634 | 17128 | 22591 | 23548 | 24505 | 25462 |
| 17129 | 18764 | 19721 | 20678 | 21635 | 17130 | 22592 | 23549 | 24506 | 25463 |
| 17131 | 18765 | 19722 | 20679 | 21636 | 17132 | 22593 | 23550 | 24507 | 25464 |
| 17133 | 18766 | 19723 | 20680 | 21637 | 17134 | 22594 | 23551 | 24508 | 25465 |
| 17135 | 18767 | 19724 | 20681 | 21638 | 17136 | 22595 | 23552 | 24509 | 25466 |
| 17137 | 18768 | 19725 | 20682 | 21639 | 17138 | 22596 | 23553 | 24510 | 25467 |
| 17139 | 18769 | 19726 | 20683 | 21640 | 17140 | 22597 | 23554 | 24511 | 25468 |
| 17141 | 18770 | 19727 | 20684 | 21641 | 17142 | 22598 | 23555 | 24512 | 25469 |
| 17143 | 18771 | 19728 | 20685 | 21642 | 17144 | 22599 | 23556 | 24513 | 25470 |
| 17145 | 18772 | 19729 | 20686 | 21643 | 17146 | 22600 | 23557 | 24514 | 25471 |
| 17147 | 18773 | 19730 | 20687 | 21644 | 17148 | 22601 | 23558 | 24515 | 25472 |
| 17149 | 18774 | 19731 | 20688 | 21645 | 17150 | 22602 | 23559 | 24516 | 25473 |
| 17151 | 18775 | 19732 | 20689 | 21646 | 17152 | 22603 | 23560 | 24517 | 25474 |
| 17153 | 18776 | 19733 | 20690 | 21647 | 17154 | 22604 | 23561 | 24518 | 25475 |
| 17155 | 18777 | 19734 | 20691 | 21648 | 17156 | 22605 | 23562 | 24519 | 25476 |
| 17157 | 18778 | 19735 | 20692 | 21649 | 17158 | 22606 | 23563 | 24520 | 25477 |
| 17159 | 18779 | 19736 | 20693 | 21650 | 17160 | 22607 | 23564 | 24521 | 25478 |
| 17161 | 18780 | 19737 | 20694 | 21651 | 17162 | 22608 | 23565 | 24522 | 25479 |
| 17163 | 18781 | 19738 | 20695 | 21652 | 17164 | 22609 | 23566 | 24523 | 25480 |
| 17165 | 18782 | 19739 | 20696 | 21653 | 17166 | 22610 | 23567 | 24524 | 25481 |
| 17167 | 18783 | 19740 | 20697 | 21654 | 17168 | 22611 | 23568 | 24525 | 25482 |
| 17169 | 18784 | 19741 | 20698 | 21655 | 17170 | 22612 | 23569 | 24526 | 25483 |
| 17171 | 18785 | 19742 | 20699 | 21656 | 17172 | 22613 | 23570 | 24527 | 25484 |
| 17173 | 18786 | 19743 | 20700 | 21657 | 17174 | 22614 | 23571 | 24528 | 25485 |
| 17175 | 18787 | 19744 | 20701 | 21658 | 17176 | 22615 | 23572 | 24529 | 25486 |
| 17177 | 18788 | 19745 | 20702 | 21659 | 17178 | 22616 | 23573 | 24530 | 25487 |
| 17179 | 18789 | 19746 | 20703 | 21660 | 17180 | 22617 | 23574 | 24531 | 25488 |
| 17181 | 18790 | 19747 | 20704 | 21661 | 17182 | 22618 | 23575 | 24532 | 25489 |
| 17183 | 18791 | 19748 | 20705 | 21662 | 17184 | 22619 | 23576 | 24533 | 25490 |
| 17185 | 18792 | 19749 | 20706 | 21663 | 17186 | 22620 | 23577 | 24534 | 25491 |
| 17187 | 18793 | 19750 | 20707 | 21664 | 17188 | 22621 | 23578 | 24535 | 25492 |
| 17189 | 18794 | 19751 | 20708 | 21665 | 17190 | 22622 | 23579 | 24536 | 25493 |
| 17191 | 18795 | 19752 | 20709 | 21666 | 17192 | 22623 | 23580 | 24537 | 25494 |
| 17193 | 18796 | 19753 | 20710 | 21667 | 17194 | 22624 | 23581 | 24538 | 25495 |
| 17195 | 18797 | 19754 | 20711 | 21668 | 17196 | 22625 | 23582 | 24539 | 25496 |
| 17197 | 18798 | 19755 | 20712 | 21669 | 17198 | 22626 | 23583 | 24540 | 25497 |
| 17199 | 18799 | 19756 | 20713 | 21670 | 17200 | 22627 | 23584 | 24541 | 25498 |
| 17201 | 18800 | 19757 | 20714 | 21671 | 17202 | 22628 | 23585 | 24542 | 25499 |
| 17203 | 18801 | 19758 | 20715 | 21672 | 17204 | 22629 | 23586 | 24543 | 25500 |
| 17205 | 18802 | 19759 | 20716 | 21673 | 17206 | 22630 | 23587 | 24544 | 25501 |
| 17207 | 18803 | 19760 | 20717 | 21674 | 17208 | 22631 | 23588 | 24545 | 25502 |
| 17209 | 18804 | 19761 | 20718 | 21675 | 17210 | 22632 | 23589 | 24546 | 25503 |
| 17211 | 18805 | 19762 | 20719 | 21676 | 17212 | 22633 | 23590 | 24547 | 25504 |
| 17213 | 18806 | 19763 | 20720 | 21677 | 17214 | 22634 | 23591 | 24548 | 25505 |
| 17215 | 18807 | 19764 | 20721 | 21678 | 17216 | 22635 | 23592 | 24549 | 25506 |
| 17217 | 18808 | 19765 | 20722 | 21679 | 17218 | 22636 | 23593 | 24550 | 25507 |
| 17219 | 18809 | 19766 | 20723 | 21680 | 17220 | 22637 | 23594 | 24551 | 25508 |
| 17221 | 18810 | 19767 | 20724 | 21681 | 17222 | 22638 | 23595 | 24552 | 25509 |
| 17223 | 18811 | 19768 | 20725 | 21682 | 17224 | 22639 | 23596 | 24553 | 25510 |
| 17225 | 18812 | 19769 | 20726 | 21683 | 17226 | 22640 | 23597 | 24554 | 25511 |
| 17227 | 18813 | 19770 | 20727 | 21684 | 17228 | 22641 | 23598 | 24555 | 25512 |
| 17229 | 18814 | 19771 | 20728 | 21685 | 17230 | 22642 | 23599 | 24556 | 25513 |
| 17231 | 18815 | 19772 | 20729 | 21686 | 17232 | 22643 | 23600 | 24557 | 25514 |
| 17233 | 18816 | 19773 | 20730 | 21687 | 17234 | 22644 | 23601 | 24558 | 25515 |
| 17235 | 18817 | 19774 | 20731 | 21688 | 17236 | 22645 | 23602 | 24559 | 25516 |
| 17237 | 18818 | 19775 | 20732 | 21689 | 17238 | 22646 | 23603 | 24560 | 25517 |
| 17239 | 18819 | 19776 | 20733 | 21690 | 17240 | 22647 | 23604 | 24561 | 25518 |
| 17241 | 18820 | 19777 | 20734 | 21691 | 17242 | 22648 | 23605 | 24562 | 25519 |
| 17243 | 18821 | 19778 | 20735 | 21692 | 17244 | 22649 | 23606 | 24563 | 25520 |
| 17245 | 18822 | 19779 | 20736 | 21693 | 17246 | 22650 | 23607 | 24564 | 25521 |
| 17247 | 18823 | 19780 | 20737 | 21694 | 17248 | 22651 | 23608 | 24565 | 25522 |
| 17249 | 18824 | 19781 | 20738 | 21695 | 17250 | 22652 | 23609 | 24566 | 25523 |
| 17251 | 18825 | 19782 | 20739 | 21696 | 17252 | 22653 | 23610 | 24567 | 25524 |
| 17253 | 18826 | 19783 | 20740 | 21697 | 17254 | 22654 | 23611 | 24568 | 25525 |
| 17255 | 18827 | 19784 | 20741 | 21698 | 17256 | 22655 | 23612 | 24569 | 25526 |
| 17257 | 18828 | 19785 | 20742 | 21699 | 17258 | 22656 | 23613 | 24570 | 25527 |
| 17259 | 18829 | 19786 | 20743 | 21700 | 17260 | 22657 | 23614 | 24571 | 25528 |
| 17261 | 18830 | 19787 | 20744 | 21701 | 17262 | 22658 | 23615 | 24572 | 25529 |
| 17263 | 18831 | 19788 | 20745 | 21702 | 17264 | 22659 | 23616 | 24573 | 25530 |
| 17265 | 18832 | 19789 | 20746 | 21703 | 17266 | 22660 | 23617 | 24574 | 25531 |
| 17267 | 18833 | 19790 | 20747 | 21704 | 17268 | 22661 | 23618 | 24575 | 25532 |
| 17269 | 18834 | 19791 | 20748 | 21705 | 17270 | 22662 | 23619 | 24576 | 25533 |
| 17271 | 18835 | 19792 | 20749 | 21706 | 17272 | 22663 | 23620 | 24577 | 25534 |
| 17273 | 18836 | 19793 | 20750 | 21707 | 17274 | 22664 | 23621 | 24578 | 25535 |
| 17275 | 18837 | 19794 | 20751 | 21708 | 17276 | 22665 | 23622 | 24579 | 25536 |
| 17277 | 18838 | 19795 | 20752 | 21709 | 17278 | 22666 | 23623 | 24580 | 25537 |
| 17279 | 18839 | 19796 | 20753 | 21710 | 17280 | 22667 | 23624 | 24581 | 25538 |
| 17281 | 18840 | 19797 | 20754 | 21711 | 17282 | 22668 | 23625 | 24582 | 25539 |
| 17283 | 18841 | 19798 | 20755 | 21712 | 17284 | 22669 | 23626 | 24583 | 25540 |
| 17285 | 18842 | 19799 | 20756 | 21713 | 17286 | 22670 | 23627 | 24584 | 25541 |
| 17287 | 18843 | 19800 | 20757 | 21714 | 17288 | 22671 | 23628 | 24585 | 25542 |
| 17289 | 18844 | 19801 | 20758 | 21715 | 17290 | 22672 | 23629 | 24586 | 25543 |
| 17291 | 18845 | 19802 | 20759 | 21716 | 17292 | 22673 | 23630 | 24587 | 25544 |
| 17293 | 18846 | 19803 | 20760 | 21717 | 17294 | 22674 | 23631 | 24588 | 25545 |
| 17295 | 18847 | 19804 | 20761 | 21718 | 17296 | 22675 | 23632 | 24589 | 25546 |
| 17297 | 18848 | 19805 | 20762 | 21719 | 17298 | 22676 | 23633 | 24590 | 25547 |
| 17299 | 18849 | 19806 | 20763 | 21720 | 17300 | 22677 | 23634 | 24591 | 25548 |
| 17301 | 18850 | 19807 | 20764 | 21721 | 17302 | 22678 | 23635 | 24592 | 25549 |
| 17303 | 18851 | 19808 | 20765 | 21722 | 17304 | 22679 | 23636 | 24593 | 25550 |
| 17305 | 18852 | 19809 | 20766 | 21723 | 17306 | 22680 | 23637 | 24594 | 25551 |
| 17307 | 18853 | 19810 | 20767 | 21724 | 17308 | 22681 | 23638 | 24595 | 25552 |
| 17309 | 18854 | 19811 | 20768 | 21725 | 17310 | 22682 | 23639 | 24596 | 25553 |
| 17311 | 18855 | 19812 | 20769 | 21726 | 17312 | 22683 | 23640 | 24597 | 25554 |
| 17313 | 18856 | 19813 | 20770 | 21727 | 17314 | 22684 | 23641 | 24598 | 25555 |
| 17315 | 18857 | 19814 | 20771 | 21728 | 17316 | 22685 | 23642 | 24599 | 25556 |
| 17317 | 18858 | 19815 | 20772 | 21729 | 17318 | 22686 | 23643 | 24600 | 25557 |
| 17319 | 18859 | 19816 | 20773 | 21730 | 17320 | 22687 | 23644 | 24601 | 25558 |
| 17321 | 18860 | 19817 | 20774 | 21731 | 17322 | 22688 | 23645 | 24602 | 25559 |
| 17323 | 18861 | 19818 | 20775 | 21732 | 17324 | 22689 | 23646 | 24603 | 25560 |
| 17325 | 18862 | 19819 | 20776 | 21733 | 17326 | 22690 | 23647 | 24604 | 25561 |
| 17327 | 18863 | 19820 | 20777 | 21734 | 17328 | 22691 | 23648 | 24605 | 25562 |
| 17329 | 18864 | 19821 | 20778 | 21735 | 17330 | 22692 | 23649 | 24606 | 25563 |
| 17331 | 18865 | 19822 | 20779 | 21736 | 17332 | 22693 | 23650 | 24607 | 25564 |
| 17333 | 18866 | 19823 | 20780 | 21737 | 17334 | 22694 | 23651 | 24608 | 25565 |
| 17335 | 18867 | 19824 | 20781 | 21738 | 17336 | 22695 | 23652 | 24609 | 25566 |
| 17337 | 18868 | 19825 | 20782 | 21739 | 17338 | 22696 | 23653 | 24610 | 25567 |
| 17339 | 18869 | 19826 | 20783 | 21740 | 17340 | 22697 | 23654 | 24611 | 25568 |
| 17341 | 18870 | 19827 | 20784 | 21741 | 17342 | 22698 | 23655 | 24612 | 25569 |
| 17343 | 18871 | 19828 | 20785 | 21742 | 17344 | 22699 | 23656 | 24613 | 25570 |
| 17345 | 18872 | 19829 | 20786 | 21743 | 17346 | 22700 | 23657 | 24614 | 25571 |
| 17347 | 18873 | 19830 | 20787 | 21744 | 17348 | 22701 | 23658 | 24615 | 25572 |
| 17349 | 18874 | 19831 | 20788 | 21745 | 17350 | 22702 | 23659 | 24616 | 25573 |
| 17351 | 18875 | 19832 | 20789 | 21746 | 17352 | 22703 | 23660 | 24617 | 25574 |
| 17353 | 18876 | 19833 | 20790 | 21747 | 17354 | 22704 | 23661 | 24618 | 25575 |
| 17355 | 18877 | 19834 | 20791 | 21748 | 17356 | 22705 | 23662 | 24619 | 25576 |
| 17357 | 18878 | 19835 | 20792 | 21749 | 17358 | 22706 | 23663 | 24620 | 25577 |
| 17359 | 18879 | 19836 | 20793 | 21750 | 17360 | 22707 | 23664 | 24621 | 25578 |
| 17361 | 18880 | 19837 | 20794 | 21751 | 17362 | 22708 | 23665 | 24622 | 25579 |
| 17363 | 18881 | 19838 | 20795 | 21752 | 17364 | 22709 | 23666 | 24623 | 25580 |
| 17365 | 18882 | 19839 | 20796 | 21753 | 17366 | 22710 | 23667 | 24624 | 25581 |
| 17367 | 18883 | 19840 | 20797 | 21754 | 17368 | 22711 | 23668 | 24625 | 25582 |
| 17369 | 18884 | 19841 | 20798 | 21755 | 17370 | 22712 | 23669 | 24626 | 25583 |
| 17371 | 18885 | 19842 | 20799 | 21756 | 17372 | 22713 | 23670 | 24627 | 25584 |
| 17373 | 18886 | 19843 | 20800 | 21757 | 17374 | 22714 | 23671 | 24628 | 25585 |
| 17375 | 18887 | 19844 | 20801 | 21758 | 17376 | 22715 | 23672 | 24629 | 25586 |
| 17377 | 18888 | 19845 | 20802 | 21759 | 17378 | 22716 | 23673 | 24630 | 25587 |
| 17379 | 18889 | 19846 | 20803 | 21760 | 17380 | 22717 | 23674 | 24631 | 25588 |
| 17381 | 18890 | 19847 | 20804 | 21761 | 17382 | 22718 | 23675 | 24632 | 25589 |
| 17383 | 18891 | 19848 | 20805 | 21762 | 17384 | 22719 | 23676 | 24633 | 25590 |
| 17385 | 18892 | 19849 | 20806 | 21763 | 17386 | 22720 | 23677 | 24634 | 25591 |
| 17387 | 18893 | 19850 | 20807 | 21764 | 17388 | 22721 | 23678 | 24635 | 25592 |
| 17389 | 18894 | 19851 | 20808 | 21765 | 17390 | 22722 | 23679 | 24636 | 25593 |
| 17391 | 18895 | 19852 | 20809 | 21766 | 17392 | 22723 | 23680 | 24637 | 25594 |
| 17393 | 18896 | 19853 | 20810 | 21767 | 17394 | 22724 | 23681 | 24638 | 25595 |
| 17395 | 18897 | 19854 | 20811 | 21768 | 17396 | 22725 | 23682 | 24639 | 25596 |
| 17397 | 18898 | 19855 | 20812 | 21769 | 17398 | 22726 | 23683 | 24640 | 25597 |
| 17399 | 18899 | 19856 | 20813 | 21770 | 17400 | 22727 | 23684 | 24641 | 25598 |
| 17401 | 18900 | 19857 | 20814 | 21771 | 17402 | 22728 | 23685 | 24642 | 25599 |
| 17403 | 18901 | 19858 | 20815 | 21772 | 17404 | 22729 | 23686 | 24643 | 25600 |
| 17405 | 18902 | 19859 | 20816 | 21773 | 17406 | 22730 | 23687 | 24644 | 25601 |
| 17407 | 18903 | 19860 | 20817 | 21774 | 17408 | 22731 | 23688 | 24645 | 25602 |
| 17409 | 18904 | 19861 | 20818 | 21775 | 17410 | 22732 | 23689 | 24646 | 25603 |
| 17411 | 18905 | 19862 | 20819 | 21776 | 17412 | 22733 | 23690 | 24647 | 25604 |
| 17413 | 18906 | 19863 | 20820 | 21777 | 17414 | 22734 | 23691 | 24648 | 25605 |
| 17415 | 18907 | 19864 | 20821 | 21778 | 17416 | 22735 | 23692 | 24649 | 25606 |
| 17417 | 18908 | 19865 | 20822 | 21779 | 17418 | 22736 | 23693 | 24650 | 25607 |
| 17419 | 18909 | 19866 | 20823 | 21780 | 17420 | 22737 | 23694 | 24651 | 25608 |
| 17421 | 18910 | 19867 | 20824 | 21781 | 17422 | 22738 | 23695 | 24652 | 25609 |
| 17423 | 18911 | 19868 | 20825 | 21782 | 17424 | 22739 | 23696 | 24653 | 25610 |
| 17425 | 18912 | 19869 | 20826 | 21783 | 17426 | 22740 | 23697 | 24654 | 25611 |
| 17427 | 18913 | 19870 | 20827 | 21784 | 17428 | 22741 | 23698 | 24655 | 25612 |
| 17429 | 18914 | 19871 | 20828 | 21785 | 17430 | 22742 | 23699 | 24656 | 25613 |
| 17431 | 18915 | 19872 | 20829 | 21786 | 17432 | 22743 | 23700 | 24657 | 25614 |
| 17433 | 18916 | 19873 | 20830 | 21787 | 17434 | 22744 | 23701 | 24658 | 25615 |
| 17435 | 18917 | 19874 | 20831 | 21788 | 17436 | 22745 | 23702 | 24659 | 25616 |
| 17437 | 18918 | 19875 | 20832 | 21789 | 17438 | 22746 | 23703 | 24660 | 25617 |
| 17439 | 18919 | 19876 | 20833 | 21790 | 17440 | 22747 | 23704 | 24661 | 25618 |
| 17441 | 18920 | 19877 | 20834 | 21791 | 17442 | 22748 | 23705 | 24662 | 25619 |
| 17443 | 18921 | 19878 | 20835 | 21792 | 17444 | 22749 | 23706 | 24663 | 25620 |
| 17445 | 18922 | 19879 | 20836 | 21793 | 17446 | 22750 | 23707 | 24664 | 25621 |
| 17447 | 18923 | 19880 | 20837 | 21794 | 17448 | 22751 | 23708 | 24665 | 25622 |
| 17449 | 18924 | 19881 | 20838 | 21795 | 17450 | 22752 | 23709 | 24666 | 25623 |
| 17451 | 18925 | 19882 | 20839 | 21796 | 17452 | 22753 | 23710 | 24667 | 25624 |
| 17453 | 18926 | 19883 | 20840 | 21797 | 17454 | 22754 | 23711 | 24668 | 25625 |
| 17455 | 18927 | 19884 | 20841 | 21798 | 17456 | 22755 | 23712 | 24669 | 25626 |
| 17457 | 18928 | 19885 | 20842 | 21799 | 17458 | 22756 | 23713 | 24670 | 25627 |
| 17459 | 18929 | 19886 | 20843 | 21800 | 17460 | 22757 | 23714 | 24671 | 25628 |
| 17461 | 18930 | 19887 | 20844 | 21801 | 17462 | 22758 | 23715 | 24672 | 25629 |
| 17463 | 18931 | 19888 | 20845 | 21802 | 17464 | 22759 | 23716 | 24673 | 25630 |
| 17465 | 18932 | 19889 | 20846 | 21803 | 17466 | 22760 | 23717 | 24674 | 25631 |
| 17467 | 18933 | 19890 | 20847 | 21804 | 17468 | 22761 | 23718 | 24675 | 25632 |
| 17469 | 18934 | 19891 | 20848 | 21805 | 17470 | 22762 | 23719 | 24676 | 25633 |
| 17471 | 18935 | 19892 | 20849 | 21806 | 17472 | 22763 | 23720 | 24677 | 25634 |
| 17473 | 18936 | 19893 | 20850 | 21807 | 17474 | 22764 | 23721 | 24678 | 25635 |
| 17475 | 18937 | 19894 | 20851 | 21808 | 17476 | 22765 | 23722 | 24679 | 25636 |
| 17477 | 18938 | 19895 | 20852 | 21809 | 17478 | 22766 | 23723 | 24680 | 25637 |
| 17479 | 18939 | 19896 | 20853 | 21810 | 17480 | 22767 | 23724 | 24681 | 25638 |
| 17481 | 18940 | 19897 | 20854 | 21811 | 17482 | 22768 | 23725 | 24682 | 25639 |
| 17483 | 18941 | 19898 | 20855 | 21812 | 17484 | 22769 | 23726 | 24683 | 25640 |
| 17485 | 18942 | 19899 | 20856 | 21813 | 17486 | 22770 | 23727 | 24684 | 25641 |
| 17487 | 18943 | 19900 | 20857 | 21814 | 17488 | 22771 | 23728 | 24685 | 25642 |
| 17489 | 18944 | 19901 | 20858 | 21815 | 17490 | 22772 | 23729 | 24686 | 25643 |
| 17491 | 18945 | 19902 | 20859 | 21816 | 17492 | 22773 | 23730 | 24687 | 25644 |
| 17493 | 18946 | 19903 | 20860 | 21817 | 17494 | 22774 | 23731 | 24688 | 25645 |
| 17495 | 18947 | 19904 | 20861 | 21818 | 17496 | 22775 | 23732 | 24689 | 25646 |
| 17497 | 18948 | 19905 | 20862 | 21819 | 17498 | 22776 | 23733 | 24690 | 25647 |
| 17499 | 18949 | 19906 | 20863 | 21820 | 17500 | 22777 | 23734 | 24691 | 25648 |
| 17501 | 18950 | 19907 | 20864 | 21821 | 17502 | 22778 | 23735 | 24692 | 25649 |
| 17503 | 18951 | 19908 | 20865 | 21822 | 17504 | 22779 | 23736 | 24693 | 25650 |
| 17505 | 18952 | 19909 | 20866 | 21823 | 17506 | 22780 | 23737 | 24694 | 25651 |
| 17507 | 18953 | 19910 | 20867 | 21824 | 17508 | 22781 | 23738 | 24695 | 25652 |
| 17509 | 18954 | 19911 | 20868 | 21825 | 17510 | 22782 | 23739 | 24696 | 25653 |
| 17511 | 18955 | 19912 | 20869 | 21826 | 17512 | 22783 | 23740 | 24697 | 25654 |
| 17513 | 18956 | 19913 | 20870 | 21827 | 17514 | 22784 | 23741 | 24698 | 25655 |
| 17515 | 18957 | 19914 | 20871 | 21828 | 17516 | 22785 | 23742 | 24699 | 25656 |
| 17517 | 18958 | 19915 | 20872 | 21829 | 17518 | 22786 | 23743 | 24700 | 25657 |
| 17519 | 18959 | 19916 | 20873 | 21830 | 17520 | 22787 | 23744 | 24701 | 25658 |
| 17521 | 18960 | 19917 | 20874 | 21831 | 17522 | 22788 | 23745 | 24702 | 25659 |
| 17523 | 18961 | 19918 | 20875 | 21832 | 17524 | 22789 | 23746 | 24703 | 25660 |
| 17525 | 18962 | 19919 | 20876 | 21833 | 17526 | 22790 | 23747 | 24704 | 25661 |
| 17527 | 18963 | 19920 | 20877 | 21834 | 17528 | 22791 | 23748 | 24705 | 25662 |
| 17529 | 18964 | 19921 | 20878 | 21835 | 17530 | 22792 | 23749 | 24706 | 25663 |
| 17531 | 18965 | 19922 | 20879 | 21836 | 17532 | 22793 | 23750 | 24707 | 25664 |
| 17533 | 18966 | 19923 | 20880 | 21837 | 17534 | 22794 | 23751 | 24708 | 25665 |
| 17535 | 18967 | 19924 | 20881 | 21838 | 17536 | 22795 | 23752 | 24709 | 25666 |
| 17537 | 18968 | 19925 | 20882 | 21839 | 17538 | 22796 | 23753 | 24710 | 25667 |
| 17539 | 18969 | 19926 | 20883 | 21840 | 17540 | 22797 | 23754 | 24711 | 25668 |
| 17541 | 18970 | 19927 | 20884 | 21841 | 17542 | 22798 | 23755 | 24712 | 25669 |
| 17543 | 18971 | 19928 | 20885 | 21842 | 17544 | 22799 | 23756 | 24713 | 25670 |
| 17545 | 18972 | 19929 | 20886 | 21843 | 17546 | 22800 | 23757 | 24714 | 25671 |
| 17547 | 18973 | 19930 | 20887 | 21844 | 17548 | 22801 | 23758 | 24715 | 25672 |
| 17549 | 18974 | 19931 | 20888 | 21845 | 17550 | 22802 | 23759 | 24716 | 25673 |
| 17551 | 18975 | 19932 | 20889 | 21846 | 17552 | 22803 | 23760 | 24717 | 25674 |
| 17553 | 18976 | 19933 | 20890 | 21847 | 17554 | 22804 | 23761 | 24718 | 25675 |
| 17555 | 18977 | 19934 | 20891 | 21848 | 17556 | 22805 | 23762 | 24719 | 25676 |
| 17557 | 18978 | 19935 | 20892 | 21849 | 17558 | 22806 | 23763 | 24720 | 25677 |
| 17559 | 18979 | 19936 | 20893 | 21850 | 17560 | 22807 | 23764 | 24721 | 25678 |
| 17561 | 18980 | 19937 | 20894 | 21851 | 17562 | 22808 | 23765 | 24722 | 25679 |
| 17563 | 18981 | 19938 | 20895 | 21852 | 17564 | 22809 | 23766 | 24723 | 25680 |
| 17565 | 18982 | 19939 | 20896 | 21853 | 17566 | 22810 | 23767 | 24724 | 25681 |
| 17567 | 18983 | 19940 | 20897 | 21854 | 17568 | 22811 | 23768 | 24725 | 25682 |
| 17569 | 18984 | 19941 | 20898 | 21855 | 17570 | 22812 | 23769 | 24726 | 25683 |
| 17571 | 18985 | 19942 | 20899 | 21856 | 17572 | 22813 | 23770 | 24727 | 25684 |
| 17573 | 18986 | 19943 | 20900 | 21857 | 17574 | 22814 | 23771 | 24728 | 25685 |
| 17575 | 18987 | 19944 | 20901 | 21858 | 17576 | 22815 | 23772 | 24729 | 25686 |
| 17577 | 18988 | 19945 | 20902 | 21859 | 17578 | 22816 | 23773 | 24730 | 25687 |
| 17579 | 18989 | 19946 | 20903 | 21860 | 17580 | 22817 | 23774 | 24731 | 25688 |
| 17581 | 18990 | 19947 | 20904 | 21861 | 17582 | 22818 | 23775 | 24732 | 25689 |
| 17583 | 18991 | 19948 | 20905 | 21862 | 17584 | 22819 | 23776 | 24733 | 25690 |
| 17585 | 18992 | 19949 | 20906 | 21863 | 17586 | 22820 | 23777 | 24734 | 25691 |
| 17587 | 18993 | 19950 | 20907 | 21864 | 17588 | 22821 | 23778 | 24735 | 25692 |
| 17589 | 18994 | 19951 | 20908 | 21865 | 17590 | 22822 | 23779 | 24736 | 25693 |
| 17591 | 18995 | 19952 | 20909 | 21866 | 17592 | 22823 | 23780 | 24737 | 25694 |
| 17593 | 18996 | 19953 | 20910 | 21867 | 17594 | 22824 | 23781 | 24738 | 25695 |
| 17595 | 18997 | 19954 | 20911 | 21868 | 17596 | 22825 | 23782 | 24739 | 25696 |
| 17597 | 18998 | 19955 | 20912 | 21869 | 17598 | 22826 | 23783 | 24740 | 25697 |
| 17599 | 18999 | 19956 | 20913 | 21870 | 17600 | 22827 | 23784 | 24741 | 25698 |
| 17601 | 19000 | 19957 | 20914 | 21871 | 17602 | 22828 | 23785 | 24742 | 25699 |
| 17603 | 19001 | 19958 | 20915 | 21872 | 17604 | 22829 | 23786 | 24743 | 25700 |
| 17605 | 19002 | 19959 | 20916 | 21873 | 17606 | 22830 | 23787 | 24744 | 25701 |
| 17607 | 19003 | 19960 | 20917 | 21874 | 17608 | 22831 | 23788 | 24745 | 25702 |
| 17609 | 19004 | 19961 | 20918 | 21875 | 17610 | 22832 | 23789 | 24746 | 25703 |
| 17611 | 19005 | 19962 | 20919 | 21876 | 17612 | 22833 | 23790 | 24747 | 25704 |
| 17613 | 19006 | 19963 | 20920 | 21877 | 17614 | 22834 | 23791 | 24748 | 25705 |
| 17615 | 19007 | 19964 | 20921 | 21878 | 17616 | 22835 | 23792 | 24749 | 25706 |
| 17617 | 19008 | 19965 | 20922 | 21879 | 17618 | 22836 | 23793 | 24750 | 25707 |
| 17619 | 19009 | 19966 | 20923 | 21880 | 17620 | 22837 | 23794 | 24751 | 25708 |
| 17621 | 19010 | 19967 | 20924 | 21881 | 17622 | 22838 | 23795 | 24752 | 25709 |
| 17623 | 19011 | 19968 | 20925 | 21882 | 17624 | 22839 | 23796 | 24753 | 25710 |
| 17625 | 19012 | 19969 | 20926 | 21883 | 17626 | 22840 | 23797 | 24754 | 25711 |
| 17627 | 19013 | 19970 | 20927 | 21884 | 17628 | 22841 | 23798 | 24755 | 25712 |
| 17629 | 19014 | 19971 | 20928 | 21885 | 17630 | 22842 | 23799 | 24756 | 25713 |
| 17631 | 19015 | 19972 | 20929 | 21886 | 17632 | 22843 | 23800 | 24757 | 25714 |
| 17633 | 19016 | 19973 | 20930 | 21887 | 17634 | 22844 | 23801 | 24758 | 25715 |
| 17635 | 19017 | 19974 | 20931 | 21888 | 17636 | 22845 | 23802 | 24759 | 25716 |
| 17637 | 19018 | 19975 | 20932 | 21889 | 17638 | 22846 | 23803 | 24760 | 25717 |
| 17639 | 19019 | 19976 | 20933 | 21890 | 17640 | 22847 | 23804 | 24761 | 25718 |
| 17641 | 19020 | 19977 | 20934 | 21891 | 17642 | 22848 | 23805 | 24762 | 25719 |
| 17643 | 19021 | 19978 | 20935 | 21892 | 17644 | 22849 | 23806 | 24763 | 25720 |
| 17645 | 19022 | 19979 | 20936 | 21893 | 17646 | 22850 | 23807 | 24764 | 25721 |
| 17647 | 19023 | 19980 | 20937 | 21894 | 17648 | 22851 | 23808 | 24765 | 25722 |
| 17649 | 19024 | 19981 | 20938 | 21895 | 17650 | 22852 | 23809 | 24766 | 25723 |
| 17651 | 19025 | 19982 | 20939 | 21896 | 17652 | 22853 | 23810 | 24767 | 25724 |
| 17653 | 19026 | 19983 | 20940 | 21897 | 17654 | 22854 | 23811 | 24768 | 25725 |
| 17655 | 19027 | 19984 | 20941 | 21898 | 17656 | 22855 | 23812 | 24769 | 25726 |
| 17657 | 19028 | 19985 | 20942 | 21899 | 17658 | 22856 | 23813 | 24770 | 25727 |
| 17659 | 19029 | 19986 | 20943 | 21900 | 17660 | 22857 | 23814 | 24771 | 25728 |
| 17661 | 19030 | 19987 | 20944 | 21901 | 17662 | 22858 | 23815 | 24772 | 25729 |
| 17663 | 19031 | 19988 | 20945 | 21902 | 17664 | 22859 | 23816 | 24773 | 25730 |
| 17665 | 19032 | 19989 | 20946 | 21903 | 17666 | 22860 | 23817 | 24774 | 25731 |
| 17667 | 19033 | 19990 | 20947 | 21904 | 17668 | 22861 | 23818 | 24775 | 25732 |
| 17669 | 19034 | 19991 | 20948 | 21905 | 17670 | 22862 | 23819 | 24776 | 25733 |
| 17671 | 19035 | 19992 | 20949 | 21906 | 17672 | 22863 | 23820 | 24777 | 25734 |
| 17673 | 19036 | 19993 | 20950 | 21907 | 17674 | 22864 | 23821 | 24778 | 25735 |
| 17675 | 19037 | 19994 | 20951 | 21908 | 17676 | 22865 | 23822 | 24779 | 25736 |
| 17677 | 19038 | 19995 | 20952 | 21909 | 17678 | 22866 | 23823 | 24780 | 25737 |
| 17679 | 19039 | 19996 | 20953 | 21910 | 17680 | 22867 | 23824 | 24781 | 25738 |
| 17681 | 19040 | 19997 | 20954 | 21911 | 17682 | 22868 | 23825 | 24782 | 25739 |
| 17683 | 19041 | 19998 | 20955 | 21912 | 17684 | 22869 | 23826 | 24783 | 25740 |
| 17685 | 19042 | 19999 | 20956 | 21913 | 17686 | 22870 | 23827 | 24784 | 25741 |
| 17687 | 19043 | 20000 | 20957 | 21914 | 17688 | 22871 | 23828 | 24785 | 25742 |
| 17689 | 19044 | 20001 | 20958 | 21915 | 17690 | 22872 | 23829 | 24786 | 25743 |
| 17691 | 19045 | 20002 | 20959 | 21916 | 17692 | 22873 | 23830 | 24787 | 25744 |
| 17693 | 19046 | 20003 | 20960 | 21917 | 17694 | 22874 | 23831 | 24788 | 25745 |
| 17695 | 19047 | 20004 | 20961 | 21918 | 17696 | 22875 | 23832 | 24789 | 25746 |
| 17697 | 19048 | 20005 | 20962 | 21919 | 17698 | 22876 | 23833 | 24790 | 25747 |
| 17699 | 19049 | 20006 | 20963 | 21920 | 17700 | 22877 | 23834 | 24791 | 25748 |
| 17701 | 19050 | 20007 | 20964 | 21921 | 17702 | 22878 | 23835 | 24792 | 25749 |
| 17703 | 19051 | 20008 | 20965 | 21922 | 17704 | 22879 | 23836 | 24793 | 25750 |
| 17705 | 19052 | 20009 | 20966 | 21923 | 17706 | 22880 | 23837 | 24794 | 25751 |
| 17707 | 19053 | 20010 | 20967 | 21924 | 17708 | 22881 | 23838 | 24795 | 25752 |
| 17709 | 19054 | 20011 | 20968 | 21925 | 17710 | 22882 | 23839 | 24796 | 25753 |
| 17711 | 19055 | 20012 | 20969 | 21926 | 17712 | 22883 | 23840 | 24797 | 25754 |
| 17713 | 19056 | 20013 | 20970 | 21927 | 17714 | 22884 | 23841 | 24798 | 25755 |
| 17715 | 19057 | 20014 | 20971 | 21928 | 17716 | 22885 | 23842 | 24799 | 25756 |
| 17717 | 19058 | 20015 | 20972 | 21929 | 17718 | 22886 | 23843 | 24800 | 25757 |
| 17719 | 19059 | 20016 | 20973 | 21930 | 17720 | 22887 | 23844 | 24801 | 25758 |
| 17721 | 19060 | 20017 | 20974 | 21931 | 17722 | 22888 | 23845 | 24802 | 25759 |
| 17723 | 19061 | 20018 | 20975 | 21932 | 17724 | 22889 | 23846 | 24803 | 25760 |
| 17725 | 19062 | 20019 | 20976 | 21933 | 17726 | 22890 | 23847 | 24804 | 25761 |
| 17727 | 19063 | 20020 | 20977 | 21934 | 17728 | 22891 | 23848 | 24805 | 25762 |
| 17729 | 19064 | 20021 | 20978 | 21935 | 17730 | 22892 | 23849 | 24806 | 25763 |
| 17731 | 19065 | 20022 | 20979 | 21936 | 17732 | 22893 | 23850 | 24807 | 25764 |
| 17733 | 19066 | 20023 | 20980 | 21937 | 17734 | 22894 | 23851 | 24808 | 25765 |
| 17735 | 19067 | 20024 | 20981 | 21938 | 17736 | 22895 | 23852 | 24809 | 25766 |
| 17737 | 19068 | 20025 | 20982 | 21939 | 17738 | 22896 | 23853 | 24810 | 25767 |
| 17739 | 19069 | 20026 | 20983 | 21940 | 17740 | 22897 | 23854 | 24811 | 25768 |
| 17741 | 19070 | 20027 | 20984 | 21941 | 17742 | 22898 | 23855 | 24812 | 25769 |
| 17743 | 19071 | 20028 | 20985 | 21942 | 17744 | 22899 | 23856 | 24813 | 25770 |
| 17745 | 19072 | 20029 | 20986 | 21943 | 17746 | 22900 | 23857 | 24814 | 25771 |
| 17747 | 19073 | 20030 | 20987 | 21944 | 17748 | 22901 | 23858 | 24815 | 25772 |
| 17749 | 19074 | 20031 | 20988 | 21945 | 17750 | 22902 | 23859 | 24816 | 25773 |
| 17751 | 19075 | 20032 | 20989 | 21946 | 17752 | 22903 | 23860 | 24817 | 25774 |
| 17753 | 19076 | 20033 | 20990 | 21947 | 17754 | 22904 | 23861 | 24818 | 25775 |
| 17755 | 19077 | 20034 | 20991 | 21948 | 17756 | 22905 | 23862 | 24819 | 25776 |
| 17757 | 19078 | 20035 | 20992 | 21949 | 17758 | 22906 | 23863 | 24820 | 25777 |
| 17759 | 19079 | 20036 | 20993 | 21950 | 17760 | 22907 | 23864 | 24821 | 25778 |
| 17761 | 19080 | 20037 | 20994 | 21951 | 17762 | 22908 | 23865 | 24822 | 25779 |
| 17763 | 19081 | 20038 | 20995 | 21952 | 17764 | 22909 | 23866 | 24823 | 25780 |
| 17765 | 19082 | 20039 | 20996 | 21953 | 17766 | 22910 | 23867 | 24824 | 25781 |
| 17767 | 19083 | 20040 | 20997 | 21954 | 17768 | 22911 | 23868 | 24825 | 25782 |
| 17769 | 19084 | 20041 | 20998 | 21955 | 17770 | 22912 | 23869 | 24826 | 25783 |
| 17771 | 19085 | 20042 | 20999 | 21956 | 17772 | 22913 | 23870 | 24827 | 25784 |
| 17773 | 19086 | 20043 | 21000 | 21957 | 17774 | 22914 | 23871 | 24828 | 25785 |
| 17775 | 19087 | 20044 | 21001 | 21958 | 17776 | 22915 | 23872 | 24829 | 25786 |
| 17777 | 19088 | 20045 | 21002 | 21959 | 17778 | 22916 | 23873 | 24830 | 25787 |
| 17779 | 19089 | 20046 | 21003 | 21960 | 17780 | 22917 | 23874 | 24831 | 25788 |
| 17781 | 19090 | 20047 | 21004 | 21961 | 17782 | 22918 | 23875 | 24832 | 25789 |
| 17783 | 19091 | 20048 | 21005 | 21962 | 17784 | 22919 | 23876 | 24833 | 25790 |
| 17785 | 19092 | 20049 | 21006 | 21963 | 17786 | 22920 | 23877 | 24834 | 25791 |
| 17787 | 19093 | 20050 | 21007 | 21964 | 17788 | 22921 | 23878 | 24835 | 25792 |
| 17789 | 19094 | 20051 | 21008 | 21965 | 17790 | 22922 | 23879 | 24836 | 25793 |
| 17791 | 19095 | 20052 | 21009 | 21966 | 17792 | 22923 | 23880 | 24837 | 25794 |
| 17793 | 19096 | 20053 | 21010 | 21967 | 17794 | 22924 | 23881 | 24838 | 25795 |
| 17795 | 19097 | 20054 | 21011 | 21968 | 17796 | 22925 | 23882 | 24839 | 25796 |
| 17797 | 19098 | 20055 | 21012 | 21969 | 17798 | 22926 | 23883 | 24840 | 25797 |
| 17799 | 19099 | 20056 | 21013 | 21970 | 17800 | 22927 | 23884 | 24841 | 25798 |
| 17801 | 19100 | 20057 | 21014 | 21971 | 17802 | 22928 | 23885 | 24842 | 25799 |
| 17803 | 19101 | 20058 | 21015 | 21972 | 17804 | 22929 | 23886 | 24843 | 25800 |
| 17805 | 19102 | 20059 | 21016 | 21973 | 17806 | 22930 | 23887 | 24844 | 25801 |
| 17807 | 19103 | 20060 | 21017 | 21974 | 17808 | 22931 | 23888 | 24845 | 25802 |
| 17809 | 19104 | 20061 | 21018 | 21975 | 17810 | 22932 | 23889 | 24846 | 25803 |
| 17811 | 19105 | 20062 | 21019 | 21976 | 17812 | 22933 | 23890 | 24847 | 25804 |
| 17813 | 19106 | 20063 | 21020 | 21977 | 17814 | 22934 | 23891 | 24848 | 25805 |
| 17815 | 19107 | 20064 | 21021 | 21978 | 17816 | 22935 | 23892 | 24849 | 25806 |
| 17817 | 19108 | 20065 | 21022 | 21979 | 17818 | 22936 | 23893 | 24850 | 25807 |
| 17819 | 19109 | 20066 | 21023 | 21980 | 17820 | 22937 | 23894 | 24851 | 25808 |
| 17821 | 19110 | 20067 | 21024 | 21981 | 17822 | 22938 | 23895 | 24852 | 25809 |
| 17823 | 19111 | 20068 | 21025 | 21982 | 17824 | 22939 | 23896 | 24853 | 25810 |
| 17825 | 19112 | 20069 | 21026 | 21983 | 17826 | 22940 | 23897 | 24854 | 25811 |
| 17827 | 19113 | 20070 | 21027 | 21984 | 17828 | 22941 | 23898 | 24855 | 25812 |
| 17829 | 19114 | 20071 | 21028 | 21985 | 17830 | 22942 | 23899 | 24856 | 25813 |
| 17831 | 19115 | 20072 | 21029 | 21986 | 17832 | 22943 | 23900 | 24857 | 25814 |
| 17833 | 19116 | 20073 | 21030 | 21987 | 17834 | 22944 | 23901 | 24858 | 25815 |
| 17835 | 19117 | 20074 | 21031 | 21988 | 17836 | 22945 | 23902 | 24859 | 25816 |
| 17837 | 19118 | 20075 | 21032 | 21989 | 17838 | 22946 | 23903 | 24860 | 25817 |
| 17839 | 19119 | 20076 | 21033 | 21990 | 17840 | 22947 | 23904 | 24861 | 25818 |
| 17841 | 19120 | 20077 | 21034 | 21991 | 17842 | 22948 | 23905 | 24862 | 25819 |
| 17843 | 19121 | 20078 | 21035 | 21992 | 17844 | 22949 | 23906 | 24863 | 25820 |
| 17845 | 19122 | 20079 | 21036 | 21993 | 17846 | 22950 | 23907 | 24864 | 25821 |
| 17847 | 19123 | 20080 | 21037 | 21994 | 17848 | 22951 | 23908 | 24865 | 25822 |
| 17849 | 19124 | 20081 | 21038 | 21995 | 17850 | 22952 | 23909 | 24866 | 25823 |
| 17851 | 19125 | 20082 | 21039 | 21996 | 17852 | 22953 | 23910 | 24867 | 25824 |
| 17853 | 19126 | 20083 | 21040 | 21997 | 17854 | 22954 | 23911 | 24868 | 25825 |
| 17855 | 19127 | 20084 | 21041 | 21998 | 17856 | 22955 | 23912 | 24869 | 25826 |
| 17857 | 19128 | 20085 | 21042 | 21999 | 17858 | 22956 | 23913 | 24870 | 25827 |
| 17859 | 19129 | 20086 | 21043 | 22000 | 17860 | 22957 | 23914 | 24871 | 25828 |
| 17861 | 19130 | 20087 | 21044 | 22001 | 17862 | 22958 | 23915 | 24872 | 25829 |
| 17863 | 19131 | 20088 | 21045 | 22002 | 17864 | 22959 | 23916 | 24873 | 25830 |
| 17865 | 19132 | 20089 | 21046 | 22003 | 17866 | 22960 | 23917 | 24874 | 25831 |
| 17867 | 19133 | 20090 | 21047 | 22004 | 17868 | 22961 | 23918 | 24875 | 25832 |
| 17869 | 19134 | 20091 | 21048 | 22005 | 17870 | 22962 | 23919 | 24876 | 25833 |
| 17871 | 19135 | 20092 | 21049 | 22006 | 17872 | 22963 | 23920 | 24877 | 25834 |
| 17873 | 19136 | 20093 | 21050 | 22007 | 17874 | 22964 | 23921 | 24878 | 25835 |
| 17875 | 19137 | 20094 | 21051 | 22008 | 17876 | 22965 | 23922 | 24879 | 25836 |
| 17877 | 19138 | 20095 | 21052 | 22009 | 17878 | 22966 | 23923 | 24880 | 25837 |
| 17879 | 19139 | 20096 | 21053 | 22010 | 17880 | 22967 | 23924 | 24881 | 25838 |
| 17881 | 19140 | 20097 | 21054 | 22011 | 17882 | 22968 | 23925 | 24882 | 25839 |
| 17883 | 19141 | 20098 | 21055 | 22012 | 17884 | 22969 | 23926 | 24883 | 25840 |
| 17885 | 19142 | 20099 | 21056 | 22013 | 17886 | 22970 | 23927 | 24884 | 25841 |
| 17887 | 19143 | 20100 | 21057 | 22014 | 17888 | 22971 | 23928 | 24885 | 25842 |
| 17889 | 19144 | 20101 | 21058 | 22015 | 17890 | 22972 | 23929 | 24886 | 25843 |
| 17891 | 19145 | 20102 | 21059 | 22016 | 17892 | 22973 | 23930 | 24887 | 25844 |
| 17893 | 19146 | 20103 | 21060 | 22017 | 17894 | 22974 | 23931 | 24888 | 25845 |
| 17895 | 19147 | 20104 | 21061 | 22018 | 17896 | 22975 | 23932 | 24889 | 25846 |
| 17897 | 19148 | 20105 | 21062 | 22019 | 17898 | 22976 | 23933 | 24890 | 25847 |
| 17899 | 19149 | 20106 | 21063 | 22020 | 17900 | 22977 | 23934 | 24891 | 25848 |
| 17901 | 19150 | 20107 | 21064 | 22021 | 17902 | 22978 | 23935 | 24892 | 25849 |
| 17903 | 19151 | 20108 | 21065 | 22022 | 17904 | 22979 | 23936 | 24893 | 25850 |
| 17905 | 19152 | 20109 | 21066 | 22023 | 17906 | 22980 | 23937 | 24894 | 25851 |
| 17907 | 19153 | 20110 | 21067 | 22024 | 17908 | 22981 | 23938 | 24895 | 25852 |
| 17909 | 19154 | 20111 | 21068 | 22025 | 17910 | 22982 | 23939 | 24896 | 25853 |
| 17911 | 19155 | 20112 | 21069 | 22026 | 17912 | 22983 | 23940 | 24897 | 25854 |
| 17913 | 19156 | 20113 | 21070 | 22027 | 17914 | 22984 | 23941 | 24898 | 25855 |
| 17915 | 19157 | 20114 | 21071 | 22028 | 17916 | 22985 | 23942 | 24899 | 25856 |
| 17917 | 19158 | 20115 | 21072 | 22029 | 17918 | 22986 | 23943 | 24900 | 25857 |
| 17919 | 19159 | 20116 | 21073 | 22030 | 17920 | 22987 | 23944 | 24901 | 25858 |
| 17921 | 19160 | 20117 | 21074 | 22031 | 17922 | 22988 | 23945 | 24902 | 25859 |
| 17923 | 19161 | 20118 | 21075 | 22032 | 17924 | 22989 | 23946 | 24903 | 25860 |
| 17925 | 19162 | 20119 | 21076 | 22033 | 17926 | 22990 | 23947 | 24904 | 25861 |
| 17927 | 19163 | 20120 | 21077 | 22034 | 17928 | 22991 | 23948 | 24905 | 25862 |
| 17929 | 19164 | 20121 | 21078 | 22035 | 17930 | 22992 | 23949 | 24906 | 25863 |
| 17931 | 19165 | 20122 | 21079 | 22036 | 17932 | 22993 | 23950 | 24907 | 25864 |
| 17933 | 19166 | 20123 | 21080 | 22037 | 17934 | 22994 | 23951 | 24908 | 25865 |
| 17935 | 19167 | 20124 | 21081 | 22038 | 17936 | 22995 | 23952 | 24909 | 25866 |
| 17937 | 19168 | 20125 | 21082 | 22039 | 17938 | 22996 | 23953 | 24910 | 25867 |
| 17939 | 19169 | 20126 | 21083 | 22040 | 17940 | 22997 | 23954 | 24911 | 25868 |
| 17941 | 19170 | 20127 | 21084 | 22041 | 17942 | 22998 | 23955 | 24912 | 25869 |
| 17943 | 19171 | 20128 | 21085 | 22042 | 17944 | 22999 | 23956 | 24913 | 25870 |
| 17945 | 19172 | 20129 | 21086 | 22043 | 17946 | 23000 | 23957 | 24914 | 25871 |
| 17947 | 19173 | 20130 | 21087 | 22044 | 17948 | 23001 | 23958 | 24915 | 25872 |
| 17949 | 19174 | 20131 | 21088 | 22045 | 17950 | 23002 | 23959 | 24916 | 25873 |
| 17951 | 19175 | 20132 | 21089 | 22046 | 17952 | 23003 | 23960 | 24917 | 25874 |
| 17953 | 19176 | 20133 | 21090 | 22047 | 17954 | 23004 | 23961 | 24918 | 25875 |
| 17955 | 19177 | 20134 | 21091 | 22048 | 17956 | 23005 | 23962 | 24919 | 25876 |
| 17957 | 19178 | 20135 | 21092 | 22049 | 17958 | 23006 | 23963 | 24920 | 25877 |
| 17959 | 19179 | 20136 | 21093 | 22050 | 17960 | 23007 | 23964 | 24921 | 25878 |
| 17961 | 19180 | 20137 | 21094 | 22051 | 17962 | 23008 | 23965 | 24922 | 25879 |
| 17963 | 19181 | 20138 | 21095 | 22052 | 17964 | 23009 | 23966 | 24923 | 25880 |
| 17965 | 19182 | 20139 | 21096 | 22053 | 17966 | 23010 | 23967 | 24924 | 25881 |
| 17967 | 19183 | 20140 | 21097 | 22054 | 17968 | 23011 | 23968 | 24925 | 25882 |
| 17969 | 19184 | 20141 | 21098 | 22055 | 17970 | 23012 | 23969 | 24926 | 25883 |
| 17971 | 19185 | 20142 | 21099 | 22056 | 17972 | 23013 | 23970 | 24927 | 25884 |
| 17973 | 19186 | 20143 | 21100 | 22057 | 17974 | 23014 | 23971 | 24928 | 25885 |
| 17975 | 19187 | 20144 | 21101 | 22058 | 17976 | 23015 | 23972 | 24929 | 25886 |
| 17977 | 19188 | 20145 | 21102 | 22059 | 17978 | 23016 | 23973 | 24930 | 25887 |
| 17979 | 19189 | 20146 | 21103 | 22060 | 17980 | 23017 | 23974 | 24931 | 25888 |
| 17981 | 19190 | 20147 | 21104 | 22061 | 17982 | 23018 | 23975 | 24932 | 25889 |
| 17983 | 19191 | 20148 | 21105 | 22062 | 17984 | 23019 | 23976 | 24933 | 25890 |
| 17985 | 19192 | 20149 | 21106 | 22063 | 17986 | 23020 | 23977 | 24934 | 25891 |
| 17987 | 19193 | 20150 | 21107 | 22064 | 17988 | 23021 | 23978 | 24935 | 25892 |
| 17989 | 19194 | 20151 | 21108 | 22065 | 17990 | 23022 | 23979 | 24936 | 25893 |
| 17991 | 19195 | 20152 | 21109 | 22066 | 17992 | 23023 | 23980 | 24937 | 25894 |
| 17993 | 19196 | 20153 | 21110 | 22067 | 17994 | 23024 | 23981 | 24938 | 25895 |
| 17995 | 19197 | 20154 | 21111 | 22068 | 17996 | 23025 | 23982 | 24939 | 25896 |
| 17997 | 19198 | 20155 | 21112 | 22069 | 17998 | 23026 | 23983 | 24940 | 25897 |
| 17999 | 19199 | 20156 | 21113 | 22070 | 18000 | 23027 | 23984 | 24941 | 25898 |
| 18001 | 19200 | 20157 | 21114 | 22071 | 18002 | 23028 | 23985 | 24942 | 25899 |
| 18003 | 19201 | 20158 | 21115 | 22072 | 18004 | 23029 | 23986 | 24943 | 25900 |
| 18005 | 19202 | 20159 | 21116 | 22073 | 18006 | 23030 | 23987 | 24944 | 25901 |
| 18007 | 19203 | 20160 | 21117 | 22074 | 18008 | 23031 | 23988 | 24945 | 25902 |
| 18009 | 19204 | 20161 | 21118 | 22075 | 18010 | 23032 | 23989 | 24946 | 25903 |
| 18011 | 19205 | 20162 | 21119 | 22076 | 18012 | 23033 | 23990 | 24947 | 25904 |
| 18013 | 19206 | 20163 | 21120 | 22077 | 18014 | 23034 | 23991 | 24948 | 25905 |
| 18015 | 19207 | 20164 | 21121 | 22078 | 18016 | 23035 | 23992 | 24949 | 25906 |
| 18017 | 19208 | 20165 | 21122 | 22079 | 18018 | 23036 | 23993 | 24950 | 25907 |
| 18019 | 19209 | 20166 | 21123 | 22080 | 18020 | 23037 | 23994 | 24951 | 25908 |
| 18021 | 19210 | 20167 | 21124 | 22081 | 18022 | 23038 | 23995 | 24952 | 25909 |
| 18023 | 19211 | 20168 | 21125 | 22082 | 18024 | 23039 | 23996 | 24953 | 25910 |
| 18025 | 19212 | 20169 | 21126 | 22083 | 18026 | 23040 | 23997 | 24954 | 25911 |
| 18027 | 19213 | 20170 | 21127 | 22084 | 18028 | 23041 | 23998 | 24955 | 25912 |
| 18029 | 19214 | 20171 | 21128 | 22085 | 18030 | 23042 | 23999 | 24956 | 25913 |
| 18031 | 19215 | 20172 | 21129 | 22086 | 18032 | 23043 | 24000 | 24957 | 25914 |
| 18033 | 19216 | 20173 | 21130 | 22087 | 18034 | 23044 | 24001 | 24958 | 25915 |
| 18035 | 19217 | 20174 | 21131 | 22088 | 18036 | 23045 | 24002 | 24959 | 25916 |
| 18037 | 19218 | 20175 | 21132 | 22089 | 18038 | 23046 | 24003 | 24960 | 25917 |
| 18039 | 19219 | 20176 | 21133 | 22090 | 18040 | 23047 | 24004 | 24961 | 25918 |
| 18041 | 19220 | 20177 | 21134 | 22091 | 18042 | 23048 | 24005 | 24962 | 25919 |
| 18043 | 19221 | 20178 | 21135 | 22092 | 18044 | 23049 | 24006 | 24963 | 25920 |
| 18045 | 19222 | 20179 | 21136 | 22093 | 18046 | 23050 | 24007 | 24964 | 25921 |
| 18047 | 19223 | 20180 | 21137 | 22094 | 18048 | 23051 | 24008 | 24965 | 25922 |
| 18049 | 19224 | 20181 | 21138 | 22095 | 18050 | 23052 | 24009 | 24966 | 25923 |
| 18051 | 19225 | 20182 | 21139 | 22096 | 18052 | 23053 | 24010 | 24967 | 25924 |
| 18053 | 19226 | 20183 | 21140 | 22097 | 18054 | 23054 | 24011 | 24968 | 25925 |
| 18055 | 19227 | 20184 | 21141 | 22098 | 18056 | 23055 | 24012 | 24969 | 25926 |
| 18057 | 19228 | 20185 | 21142 | 22099 | 18058 | 23056 | 24013 | 24970 | 25927 |
| 18059 | 19229 | 20186 | 21143 | 22100 | 18060 | 23057 | 24014 | 24971 | 25928 |
| 18061 | 19230 | 20187 | 21144 | 22101 | 18062 | 23058 | 24015 | 24972 | 25929 |
| 18063 | 19231 | 20188 | 21145 | 22102 | 18064 | 23059 | 24016 | 24973 | 25930 |
| 18065 | 19232 | 20189 | 21146 | 22103 | 18066 | 23060 | 24017 | 24974 | 25931 |
| 18067 | 19233 | 20190 | 21147 | 22104 | 18068 | 23061 | 24018 | 24975 | 25932 |
| 18069 | 19234 | 20191 | 21148 | 22105 | 18070 | 23062 | 24019 | 24976 | 25933 |
| 18071 | 19235 | 20192 | 21149 | 22106 | 18072 | 23063 | 24020 | 24977 | 25934 |
| 18073 | 19236 | 20193 | 21150 | 22107 | 18074 | 23064 | 24021 | 24978 | 25935 |
| 18075 | 19237 | 20194 | 21151 | 22108 | 18076 | 23065 | 24022 | 24979 | 25936 |
| 18077 | 19238 | 20195 | 21152 | 22109 | 18078 | 23066 | 24023 | 24980 | 25937 |
| 18079 | 19239 | 20196 | 21153 | 22110 | 18080 | 23067 | 24024 | 24981 | 25938 |
| 18081 | 19240 | 20197 | 21154 | 22111 | 18082 | 23068 | 24025 | 24982 | 25939 |
| 18083 | 19241 | 20198 | 21155 | 22112 | 18084 | 23069 | 24026 | 24983 | 25940 |
| 18085 | 19242 | 20199 | 21156 | 22113 | 18086 | 23070 | 24027 | 24984 | 25941 |
| 18087 | 19243 | 20200 | 21157 | 22114 | 18088 | 23071 | 24028 | 24985 | 25942 |
| 18089 | 19244 | 20201 | 21158 | 22115 | 18090 | 23072 | 24029 | 24986 | 25943 |
| 18091 | 19245 | 20202 | 21159 | 22116 | 18092 | 23073 | 24030 | 24987 | 25944 |
| 18093 | 19246 | 20203 | 21160 | 22117 | 18094 | 23074 | 24031 | 24988 | 25945 |
| 18095 | 19247 | 20204 | 21161 | 22118 | 18096 | 23075 | 24032 | 24989 | 25946 |
| 18097 | 19248 | 20205 | 21162 | 22119 | 18098 | 23076 | 24033 | 24990 | 25947 |
| 18099 | 19249 | 20206 | 21163 | 22120 | 18100 | 23077 | 24034 | 24991 | 25948 |
| 18101 | 19250 | 20207 | 21164 | 22121 | 18102 | 23078 | 24035 | 24992 | 25949 |
| 18103 | 19251 | 20208 | 21165 | 22122 | 18104 | 23079 | 24036 | 24993 | 25950 |
| 18105 | 19252 | 20209 | 21166 | 22123 | 18106 | 23080 | 24037 | 24994 | 25951 |
| 18107 | 19253 | 20210 | 21167 | 22124 | 18108 | 23081 | 24038 | 24995 | 25952 |
| 18109 | 19254 | 20211 | 21168 | 22125 | 18110 | 23082 | 24039 | 24996 | 25953 |
| 18111 | 19255 | 20212 | 21169 | 22126 | 18112 | 23083 | 24040 | 24997 | 25954 |
| 18113 | 19256 | 20213 | 21170 | 22127 | 18114 | 23084 | 24041 | 24998 | 25955 |
| 18115 | 19257 | 20214 | 21171 | 22128 | 18116 | 23085 | 24042 | 24999 | 25956 |
| 18117 | 19258 | 20215 | 21172 | 22129 | 18118 | 23086 | 24043 | 25000 | 25957 |
| 18119 | 19259 | 20216 | 21173 | 22130 | 18120 | 23087 | 24044 | 25001 | 25958 |
| 18121 | 19260 | 20217 | 21174 | 22131 | 18122 | 23088 | 24045 | 25002 | 25959 |
| 18123 | 19261 | 20218 | 21175 | 22132 | 18124 | 23089 | 24046 | 25003 | 25960 |
| 18125 | 19262 | 20219 | 21176 | 22133 | 18126 | 23090 | 24047 | 25004 | 25961 |
| 18127 | 19263 | 20220 | 21177 | 22134 | 18128 | 23091 | 24048 | 25005 | 25962 |
| 18129 | 19264 | 20221 | 21178 | 22135 | 18130 | 23092 | 24049 | 25006 | 25963 |
| 18131 | 19265 | 20222 | 21179 | 22136 | 18132 | 23093 | 24050 | 25007 | 25964 |
| 18133 | 19266 | 20223 | 21180 | 22137 | 18134 | 23094 | 24051 | 25008 | 25965 |
| 18135 | 19267 | 20224 | 21181 | 22138 | 18136 | 23095 | 24052 | 25009 | 25966 |
| 18137 | 19268 | 20225 | 21182 | 22139 | 18138 | 23096 | 24053 | 25010 | 25967 |
| 18139 | 19269 | 20226 | 21183 | 22140 | 18140 | 23097 | 24054 | 25011 | 25968 |
| 18141 | 19270 | 20227 | 21184 | 22141 | 18142 | 23098 | 24055 | 25012 | 25969 |
| 18143 | 19271 | 20228 | 21185 | 22142 | 18144 | 23099 | 24056 | 25013 | 25970 |
| 18145 | 19272 | 20229 | 21186 | 22143 | 18146 | 23100 | 24057 | 25014 | 25971 |
| 18147 | 19273 | 20230 | 21187 | 22144 | 18148 | 23101 | 24058 | 25015 | 25972 |
| 18149 | 19274 | 20231 | 21188 | 22145 | 18150 | 23102 | 24059 | 25016 | 25973 |
| 18151 | 19275 | 20232 | 21189 | 22146 | 18152 | 23103 | 24060 | 25017 | 25974 |
| 18153 | 19276 | 20233 | 21190 | 22147 | 18154 | 23104 | 24061 | 25018 | 25975 |
| 18155 | 19277 | 20234 | 21191 | 22148 | 18156 | 23105 | 24062 | 25019 | 25976 |
| 18157 | 19278 | 20235 | 21192 | 22149 | 18158 | 23106 | 24063 | 25020 | 25977 |
| 18159 | 19279 | 20236 | 21193 | 22150 | 18160 | 23107 | 24064 | 25021 | 25978 |
| 18161 | 19280 | 20237 | 21194 | 22151 | 18162 | 23108 | 24065 | 25022 | 25979 |
| 18163 | 19281 | 20238 | 21195 | 22152 | 18164 | 23109 | 24066 | 25023 | 25980 |
| 18165 | 19282 | 20239 | 21196 | 22153 | 18166 | 23110 | 24067 | 25024 | 25981 |
| 18167 | 19283 | 20240 | 21197 | 22154 | 18168 | 23111 | 24068 | 25025 | 25982 |
| 18169 | 19284 | 20241 | 21198 | 22155 | 18170 | 23112 | 24069 | 25026 | 25983 |
| 18171 | 19285 | 20242 | 21199 | 22156 | 18172 | 23113 | 24070 | 25027 | 25984 |
| 18173 | 19286 | 20243 | 21200 | 22157 | 18174 | 23114 | 24071 | 25028 | 25985 |
| 18175 | 19287 | 20244 | 21201 | 22158 | 18176 | 23115 | 24072 | 25029 | 25986 |
| 18177 | 19288 | 20245 | 21202 | 22159 | 18178 | 23116 | 24073 | 25030 | 25987 |
| 18179 | 19289 | 20246 | 21203 | 22160 | 18180 | 23117 | 24074 | 25031 | 25988 |
| 18181 | 19290 | 20247 | 21204 | 22161 | 18182 | 23118 | 24075 | 25032 | 25989 |
| 18183 | 19291 | 20248 | 21205 | 22162 | 18184 | 23119 | 24076 | 25033 | 25990 |
| 18185 | 19292 | 20249 | 21206 | 22163 | 18186 | 23120 | 24077 | 25034 | 25991 |
| 18187 | 19293 | 20250 | 21207 | 22164 | 18188 | 23121 | 24078 | 25035 | 25992 |
| 18189 | 19294 | 20251 | 21208 | 22165 | 18190 | 23122 | 24079 | 25036 | 25993 |
| 18191 | 19295 | 20252 | 21209 | 22166 | 18192 | 23123 | 24080 | 25037 | 25994 |
| 18193 | 19296 | 20253 | 21210 | 22167 | 18194 | 23124 | 24081 | 25038 | 25995 |
| 18195 | 19297 | 20254 | 21211 | 22168 | 18196 | 23125 | 24082 | 25039 | 25996 |
| 18197 | 19298 | 20255 | 21212 | 22169 | 18198 | 23126 | 24083 | 25040 | 25997 |
| 18199 | 19299 | 20256 | 21213 | 22170 | 18200 | 23127 | 24084 | 25041 | 25998 |
| 18201 | 19300 | 20257 | 21214 | 22171 | 18202 | 23128 | 24085 | 25042 | 25999 |
| 18203 | 19301 | 20258 | 21215 | 22172 | 18204 | 23129 | 24086 | 25043 | 26000 |
| 18205 | 19302 | 20259 | 21216 | 22173 | 18206 | 23130 | 24087 | 25044 | 26001 |
| 18207 | 19303 | 20260 | 21217 | 22174 | 18208 | 23131 | 24088 | 25045 | 26002 |
| 18209 | 19304 | 20261 | 21218 | 22175 | 18210 | 23132 | 24089 | 25046 | 26003 |
| 18211 | 19305 | 20262 | 21219 | 22176 | 18212 | 23133 | 24090 | 25047 | 26004 |
| 18213 | 19306 | 20263 | 21220 | 22177 | 18214 | 23134 | 24091 | 25048 | 26005 |
| 18215 | 19307 | 20264 | 21221 | 22178 | 18216 | 23135 | 24092 | 25049 | 26006 |
| 18217 | 19308 | 20265 | 21222 | 22179 | 18218 | 23136 | 24093 | 25050 | 26007 |
| 18219 | 19309 | 20266 | 21223 | 22180 | 18220 | 23137 | 24094 | 25051 | 26008 |
| 18221 | 19310 | 20267 | 21224 | 22181 | 18222 | 23138 | 24095 | 25052 | 26009 |
| 18223 | 19311 | 20268 | 21225 | 22182 | 18224 | 23139 | 24096 | 25053 | 26010 |
| 18225 | 19312 | 20269 | 21226 | 22183 | 18226 | 23140 | 24097 | 25054 | 26011 |
| 18227 | 19313 | 20270 | 21227 | 22184 | 18228 | 23141 | 24098 | 25055 | 26012 |
| 18229 | 19314 | 20271 | 21228 | 22185 | 18230 | 23142 | 24099 | 25056 | 26013 |
| 18231 | 19315 | 20272 | 21229 | 22186 | 18232 | 23143 | 24100 | 25057 | 26014 |
| 18233 | 19316 | 20273 | 21230 | 22187 | 18234 | 23144 | 24101 | 25058 | 26015 |
| 18235 | 19317 | 20274 | 21231 | 22188 | 18236 | 23145 | 24102 | 25059 | 26016 |
| 18237 | 19318 | 20275 | 21232 | 22189 | 18238 | 23146 | 24103 | 25060 | 26017 |
| 18239 | 19319 | 20276 | 21233 | 22190 | 18240 | 23147 | 24104 | 25061 | 26018 |
| 18241 | 19320 | 20277 | 21234 | 22191 | 18242 | 23148 | 24105 | 25062 | 26019 |
| 18243 | 19321 | 20278 | 21235 | 22192 | 18244 | 23149 | 24106 | 25063 | 26020 |
| 18245 | 19322 | 20279 | 21236 | 22193 | 18246 | 23150 | 24107 | 25064 | 26021 |
| 18247 | 19323 | 20280 | 21237 | 22194 | 18248 | 23151 | 24108 | 25065 | 26022 |
| 18249 | 19324 | 20281 | 21238 | 22195 | 18250 | 23152 | 24109 | 25066 | 26023 |
| 18251 | 19325 | 20282 | 21239 | 22196 | 18252 | 23153 | 24110 | 25067 | 26024 |
| 18253 | 19326 | 20283 | 21240 | 22197 | 18254 | 23154 | 24111 | 25068 | 26025 |
| 18255 | 19327 | 20284 | 21241 | 22198 | 18256 | 23155 | 24112 | 25069 | 26026 |
| 18257 | 19328 | 20285 | 21242 | 22199 | 18258 | 23156 | 24113 | 25070 | 26027 |
| 18259 | 19329 | 20286 | 21243 | 22200 | 18260 | 23157 | 24114 | 25071 | 26028 |
| 18261 | 19330 | 20287 | 21244 | 22201 | 18262 | 23158 | 24115 | 25072 | 26029 |
| 18263 | 19331 | 20288 | 21245 | 22202 | 18264 | 23159 | 24116 | 25073 | 26030 |
| 18265 | 19332 | 20289 | 21246 | 22203 | 18266 | 23160 | 24117 | 25074 | 26031 |
| 18267 | 19333 | 20290 | 21247 | 22204 | 18268 | 23161 | 24118 | 25075 | 26032 |
| 18269 | 19334 | 20291 | 21248 | 22205 | 18270 | 23162 | 24119 | 25076 | 26033 |
| 18271 | 19335 | 20292 | 21249 | 22206 | 18272 | 23163 | 24120 | 25077 | 26034 |
| 18273 | 19336 | 20293 | 21250 | 22207 | 18274 | 23164 | 24121 | 25078 | 26035 |
| 18275 | 19337 | 20294 | 21251 | 22208 | 18276 | 23165 | 24122 | 25079 | 26036 |
| 18277 | 19338 | 20295 | 21252 | 22209 | 18278 | 23166 | 24123 | 25080 | 26037 |
| 18279 | 19339 | 20296 | 21253 | 22210 | 18280 | 23167 | 24124 | 25081 | 26038 |
| 18281 | 19340 | 20297 | 21254 | 22211 | 18282 | 23168 | 24125 | 25082 | 26039 |
| 18283 | 19341 | 20298 | 21255 | 22212 | 18284 | 23169 | 24126 | 25083 | 26040 |
| 18285 | 19342 | 20299 | 21256 | 22213 | 18286 | 23170 | 24127 | 25084 | 26041 |
| 18287 | 19343 | 20300 | 21257 | 22214 | 18288 | 23171 | 24128 | 25085 | 26042 |
| 18289 | 19344 | 20301 | 21258 | 22215 | 18290 | 23172 | 24129 | 25086 | 26043 |
| 18291 | 19345 | 20302 | 21259 | 22216 | 18292 | 23173 | 24130 | 25087 | 26044 |
| 18293 | 19346 | 20303 | 21260 | 22217 | 18294 | 23174 | 24131 | 25088 | 26045 |
| 18295 | 19347 | 20304 | 21261 | 22218 | 18296 | 23175 | 24132 | 25089 | 26046 |
| 18297 | 19348 | 20305 | 21262 | 22219 | 18298 | 23176 | 24133 | 25090 | 26047 |
| 18299 | 19349 | 20306 | 21263 | 22220 | 18300 | 23177 | 24134 | 25091 | 26048 |
| 18301 | 19350 | 20307 | 21264 | 22221 | 18302 | 23178 | 24135 | 25092 | 26049 |
| 18303 | 19351 | 20308 | 21265 | 22222 | 18304 | 23179 | 24136 | 25093 | 26050 |
| 18305 | 19352 | 20309 | 21266 | 22223 | 18306 | 23180 | 24137 | 25094 | 26051 |
| 18307 | 19353 | 20310 | 21267 | 22224 | 18308 | 23181 | 24138 | 25095 | 26052 |
| 18309 | 19354 | 20311 | 21268 | 22225 | 18310 | 23182 | 24139 | 25096 | 26053 |
| 18311 | 19355 | 20312 | 21269 | 22226 | 18312 | 23183 | 24140 | 25097 | 26054 |
| 18313 | 19356 | 20313 | 21270 | 22227 | 18314 | 23184 | 24141 | 25098 | 26055 |
| 18315 | 19357 | 20314 | 21271 | 22228 | 18316 | 23185 | 24142 | 25099 | 26056 |
| 18317 | 19358 | 20315 | 21272 | 22229 | 18318 | 23186 | 24143 | 25100 | 26057 |
| 18319 | 19359 | 20316 | 21273 | 22230 | 18320 | 23187 | 24144 | 25101 | 26058 |
| 18321 | 19360 | 20317 | 21274 | 22231 | 18322 | 23188 | 24145 | 25102 | 26059 |
| 18323 | 19361 | 20318 | 21275 | 22232 | 18324 | 23189 | 24146 | 25103 | 26060 |
| 18325 | 19362 | 20319 | 21276 | 22233 | 18326 | 23190 | 24147 | 25104 | 26061 |
| 18327 | 19363 | 20320 | 21277 | 22234 | 18328 | 23191 | 24148 | 25105 | 26062 |
| 18329 | 19364 | 20321 | 21278 | 22235 | 18330 | 23192 | 24149 | 25106 | 26063 |
| 18331 | 19365 | 20322 | 21279 | 22236 | 18332 | 23193 | 24150 | 25107 | 26064 |
| 18333 | 19366 | 20323 | 21280 | 22237 | 18334 | 23194 | 24151 | 25108 | 26065 |
| 18335 | 19367 | 20324 | 21281 | 22238 | 18336 | 23195 | 24152 | 25109 | 26066 |
| 18337 | 19368 | 20325 | 21282 | 22239 | 18338 | 23196 | 24153 | 25110 | 26067 |
| 18339 | 19369 | 20326 | 21283 | 22240 | 18340 | 23197 | 24154 | 25111 | 26068 |
| 18341 | 19370 | 20327 | 21284 | 22241 | 18342 | 23198 | 24155 | 25112 | 26069 |
| 18343 | 19371 | 20328 | 21285 | 22242 | 18344 | 23199 | 24156 | 25113 | 26070 |
| 18345 | 19372 | 20329 | 21286 | 22243 | 18346 | 23200 | 24157 | 25114 | 26071 |
| 18347 | 19373 | 20330 | 21287 | 22244 | 18348 | 23201 | 24158 | 25115 | 26072 |
| 18349 | 19374 | 20331 | 21288 | 22245 | 18350 | 23202 | 24159 | 25116 | 26073 |
| 18351 | 19375 | 20332 | 21289 | 22246 | 18352 | 23203 | 24160 | 25117 | 26074 |
| 18353 | 19376 | 20333 | 21290 | 22247 | 18354 | 23204 | 24161 | 25118 | 26075 |
| 18355 | 19377 | 20334 | 21291 | 22248 | 18356 | 23205 | 24162 | 25119 | 26076 |
| 18357 | 19378 | 20335 | 21292 | 22249 | 18358 | 23206 | 24163 | 25120 | 26077 |
| 18359 | 19379 | 20336 | 21293 | 22250 | 18360 | 23207 | 24164 | 25121 | 26078 |
| 18361 | 19380 | 20337 | 21294 | 22251 | 18362 | 23208 | 24165 | 25122 | 26079 |
| 18363 | 19381 | 20338 | 21295 | 22252 | 18364 | 23209 | 24166 | 25123 | 26080 |
| 18365 | 19382 | 20339 | 21296 | 22253 | 18366 | 23210 | 24167 | 25124 | 26081 |
| 18367 | 19383 | 20340 | 21297 | 22254 | 18368 | 23211 | 24168 | 25125 | 26082 |
| 18369 | 19384 | 20341 | 21298 | 22255 | 18370 | 23212 | 24169 | 25126 | 26083 |
| 18371 | 19385 | 20342 | 21299 | 22256 | 18372 | 23213 | 24170 | 25127 | 26084 |
| 18373 | 19386 | 20343 | 21300 | 22257 | 18374 | 23214 | 24171 | 25128 | 26085 |
| 18375 | 19387 | 20344 | 21301 | 22258 | 18376 | 23215 | 24172 | 25129 | 26086 |
| 18377 | 19388 | 20345 | 21302 | 22259 | 18378 | 23216 | 24173 | 25130 | 26087 |
| 18379 | 19389 | 20346 | 21303 | 22260 | 18380 | 23217 | 24174 | 25131 | 26088 |
| 18381 | 19390 | 20347 | 21304 | 22261 | 18382 | 23218 | 24175 | 25132 | 26089 |
| 18383 | 19391 | 20348 | 21305 | 22262 | 18384 | 23219 | 24176 | 25133 | 26090 |
| 18385 | 19392 | 20349 | 21306 | 22263 | 18386 | 23220 | 24177 | 25134 | 26091 |
| 18387 | 19393 | 20350 | 21307 | 22264 | 18388 | 2322 | 24178 | 25135 | 26092 |
| 18389 | 19394 | 20351 | 21308 | 22265 | 18390 | 23222 | 24179 | 25136 | 26093 |
| 18391 | 19395 | 20352 | 21309 | 22266 | 18392 | 23223 | 24180 | 25137 | 26094 |
| 18393 | 19396 | 20353 | 21310 | 22267 | 18394 | 23224 | 24181 | 25138 | 26095 |
| 18395 | 19397 | 20354 | 21311 | 22268 | 18396 | 23225 | 24182 | 25139 | 26096 |
| 18397 | 19398 | 20355 | 21312 | 22269 | 18398 | 23226 | 24183 | 25140 | 26097 |
| 18399 | 19399 | 20356 | 21313 | 22270 | 18400 | 23227 | 24184 | 25141 | 26098 |
| 18401 | 19400 | 20357 | 21314 | 22271 | 18402 | 23228 | 24185 | 25142 | 26099 |
| 18403 | 19401 | 20358 | 21315 | 22272 | 18404 | 23229 | 24186 | 25143 | 26100 |
| 18405 | 19402 | 20359 | 21316 | 22273 | 18406 | 23230 | 24187 | 25144 | 26101 |
| 18407 | 19403 | 20360 | 21317 | 22274 | 18408 | 23231 | 24188 | 25145 | 26102 |
| 18409 | 19404 | 20361 | 21318 | 22275 | 18410 | 23232 | 24189 | 25146 | 26103 |
| 18411 | 19405 | 20362 | 21319 | 22276 | 18412 | 23233 | 24190 | 25147 | 26104 |
| 18413 | 19406 | 20363 | 21320 | 22277 | 18414 | 23234 | 24191 | 25148 | 26105 |
| 18415 | 19407 | 20364 | 21321 | 22278 | 18416 | 23235 | 24192 | 25149 | 26106 |
| 18417 | 19408 | 20365 | 21322 | 22279 | 18418 | 23236 | 24193 | 25150 | 26107 |
| 18419 | 19409 | 20366 | 21323 | 22280 | 18420 | 23237 | 24194 | 25151 | 26108 |
| 18421 | 19410 | 20367 | 21324 | 22281 | 18422 | 23238 | 24195 | 25152 | 26109 |
| 18423 | 19411 | 20368 | 21325 | 22282 | 18424 | 23239 | 24196 | 25153 | 26110 |
| 18425 | 19412 | 20369 | 21326 | 22283 | 18426 | 23240 | 24197 | 25154 | 26111 |
| 18427 | 19413 | 20370 | 21327 | 22284 | 18428 | 23241 | 24198 | 25155 | 26112 |
| 18429 | 19414 | 20371 | 21328 | 22285 | 18430 | 23242 | 24199 | 25156 | 26113 |
| 18431 | 19415 | 20372 | 21329 | 22286 | 18432 | 23243 | 24200 | 25157 | 26114 |
| 18433 | 19416 | 20373 | 21330 | 22287 | 18434 | 23244 | 24201 | 25158 | 26115 |
| 18435 | 19417 | 20374 | 21331 | 22288 | 18436 | 23245 | 24202 | 25159 | 26116 |
| 18437 | 19418 | 20375 | 21332 | 22289 | 18438 | 23246 | 24203 | 25160 | 26117 |
| 18439 | 19419 | 20376 | 21333 | 22290 | 18440 | 23247 | 24204 | 25161 | 26118 |
| 18441 | 19420 | 20377 | 21334 | 22291 | 18442 | 23248 | 24205 | 25162 | 26119 |
| 18443 | 19421 | 20378 | 21335 | 22292 | 18444 | 23249 | 24206 | 25163 | 26120 |
| 18445 | 19422 | 20379 | 21336 | 22293 | 18446 | 23250 | 24207 | 25164 | 26121 |
| 18447 | 19423 | 20380 | 21337 | 22294 | 18448 | 23251 | 24208 | 25165 | 26122 |
| 18449 | 19424 | 20381 | 21338 | 22295 | 18450 | 23252 | 24209 | 25166 | 26123 |
| 18451 | 19425 | 20382 | 21339 | 22296 | 18452 | 23253 | 24210 | 25167 | 26124 |
| 18453 | 19426 | 20383 | 21340 | 22297 | 18454 | 23254 | 24211 | 25168 | 26125 |
| 18455 | 19427 | 20384 | 21341 | 22298 | 18456 | 23255 | 24212 | 25169 | 26126 |
| 18457 | 19428 | 20385 | 21342 | 22299 | 18458 | 23256 | 24213 | 25170 | 26127 |
| 18459 | 19429 | 20386 | 21343 | 22300 | 18460 | 23257 | 24214 | 25171 | 26128 |
| 18461 | 19430 | 20387 | 21344 | 22301 | 18462 | 23258 | 24215 | 25172 | 26129 |
| 18463 | 19431 | 20388 | 21345 | 22302 | 18464 | 23259 | 24216 | 25173 | 26130 |
| 18465 | 19432 | 20389 | 21346 | 22303 | 18466 | 23260 | 24217 | 25174 | 26131 |
| 18467 | 19433 | 20390 | 21347 | 22304 | 18468 | 23261 | 24218 | 25175 | 26132 |
| 18469 | 19434 | 20391 | 21348 | 22305 | 18470 | 23262 | 24219 | 25176 | 26133 |
| 18471 | 19435 | 20392 | 21349 | 22306 | 18472 | 23263 | 24220 | 25177 | 26134 |
| 18473 | 19436 | 20393 | 21350 | 22307 | 18474 | 23264 | 24221 | 25178 | 26135 |
| 18475 | 19437 | 20394 | 21351 | 22308 | 18476 | 23265 | 24222 | 25179 | 26136 |
| 18477 | 19438 | 20395 | 21352 | 22309 | 18478 | 23266 | 24223 | 25180 | 26137 |
| 18479 | 19439 | 20396 | 21353 | 22310 | 18480 | 23267 | 24224 | 25181 | 26138 |
| 18481 | 19440 | 20397 | 21354 | 22311 | 18482 | 23268 | 24225 | 25182 | 26139 |
| 18483 | 19441 | 20398 | 21355 | 22312 | 18484 | 23269 | 24226 | 25183 | 26140 |

TABLE 3
5885 Antibodies

| Antibody | SEQ ID | | | | Antibody | SEQ ID | | | |
|---|---|---|---|---|---|---|---|---|---|
| Name and | NO of | | | | Name and | NO of | | | |
| Heavy Chain | V-D-J | SEQ ID | SEQ ID | SEQ ID | Light Chain | V-J | SEQ ID | SEQ ID | SEQ ID |
| (HC) | Region | NO of | NO of | NO of | (LC) | Region | NO of | NO of | NO of |
| designation | (HC) | CDRH1 | CDRH2 | CDRH3 | designation | (LC) | CDRL1 | CDRL2 | CDRL3 |
| 5885_1_HC | 26141 | 26167 | 26180 | 26193 | 5885_1_LC | 26154 | 26206 | 26219 | 26232 |
| 5885_2_HC | 26142 | 26168 | 26181 | 26194 | 5885_2_LC | 26155 | 26207 | 26220 | 26233 |
| 5885_3_HC | 26143 | 26169 | 26182 | 26195 | 5885_3_LC | 26156 | 26208 | 26221 | 26234 |
| 5885_4_HC | 26144 | 26170 | 26183 | 26196 | 5885_4_LC | 26157 | 26209 | 26222 | 26235 |
| 5885_5_HC | 26145 | 26171 | 26184 | 26197 | 5885_5_LC | 26158 | 26210 | 26223 | 26236 |
| 5885_6_HC | 26146 | 26172 | 26185 | 26198 | 5885_6_LC | 26159 | 26211 | 26224 | 26237 |
| 5885_7_HC | 26147 | 26173 | 26186 | 26199 | 5885_7_LC | 26160 | 26212 | 26225 | 26238 |
| 5885_8_HC | 26148 | 26174 | 26187 | 26200 | 5885_8_LC | 26161 | 26213 | 26226 | 26239 |
| 5885_9_HC | 26149 | 26175 | 26188 | 26201 | 5885_9_LC | 26162 | 26214 | 26227 | 26240 |
| 5885_10_HC | 26150 | 26176 | 26189 | 26202 | 5885_10_LC | 26163 | 26215 | 26228 | 26241 |
| 5885_11_HC | 26151 | 26177 | 26190 | 26203 | 5885_11_LC | 26164 | 26216 | 26229 | 26242 |
| 5885_12_HC | 26152 | 26178 | 26191 | 26204 | 5885_12_LC | 26165 | 26217 | 26230 | 26243 |
| 5885_13_HC | 26153 | 26179 | 26192 | 26205 | 5885_13_LC | 26166 | 26218 | 26231 | 26244 |

[0833] Unless defined otherwise, all technical and scientific terms used herein have the same meanings as commonly understood by one of skill in the art to which the disclosed invention belongs. Publications cited herein and the materials for which they are cited are specifically incorporated by reference.

[0834] Those skilled in the art will appreciate that numerous changes and modifications can be made to the preferred embodiments of the invention and that such changes and modifications can be made without departing from the spirit of the invention. It is, therefore, intended that the appended claims cover all such equivalent variations as fall within the true spirit and scope of the invention.

1. A recombinant antibody, wherein the antibody comprises a light chain variable region (VL) that comprises a light chain complementarity determining region (CDRL)1, CDRL2, and CDRL3 and/or a heavy chain variable region (VH) that comprises a heavy chain complementarity determining region (CDRH)1, CDRH2, and CDRH3, wherein:
CDRH3 comprises an amino acid sequence at least 60% identical to SEQ ID NOs: 4969-5796, 13255-14083, 21356-22312, 26193-26205, 26263-26275, or 26289-26318; and
CDRL3 comprises an amino acid sequence at least 60% identical to SEQ ID NOs: 7453-8280, 15742-16570, 25184-26140, 26232-26244, 26276-26288, or 26319-26348.

2. The recombinant antibody of claim 1, wherein CDRH3 comprises at least one amino acid substitution when compared to SEQ ID NOs: 4969-5796, 13255-14083, 21356-22312, 26193-26205, 26263-26275, or 26289-26318.

3. The recombinant antibody of claim 1, wherein CDRL3 comprises at least one amino acid substitution when compared to SEQ ID NOs: 7453-8280, 15742-16570, 25184-26140, 26232-26244, 26276-26288, or 26319-26348.

4. The recombinant antibody of claim 1, wherein:
CDRH1 comprises an amino acid sequence at least 60% identical to SEQ ID NOs: 3313-4140, 11597-12425, 19442-20398, or 26167-26179; and/or
CDRL1 comprises an amino acid sequence at least 60% identical to SEQ ID NOs: 5797-6624, 14084-14912, 23270-24226, or 26206-26218.

5. The recombinant antibody of claim 1, wherein CDRH1 comprises at least one amino acid substitution when compared to SEQ ID NOs: 3313-4140, 11597-12425, or 19442-20398, or 26167-26179.

6. The recombinant antibody of claim 1, wherein CDRL1 comprises at least one amino acid substitution when compared to SEQ ID NOs: 5797-6624, 14084-14912, or 23270-24226, or 26206-26218.

7. The recombinant antibody of claim 1, wherein:
CDRH2 comprises an amino acid sequence at least 60% identical to SEQ ID NOs: 4141-4968, 12426-13254, 20399-21355, or 26180-26192; and/or
CDRL2 comprises an amino acid sequence at least 60% identical to SEQ ID NOs: 6625-7452, 14913-15741, 24227-25183, or 26219-26231.

8. The recombinant antibody of claim 1, wherein CDRH2 comprises at least one amino acid substitution when compared to SEQ ID NOs: 4141-4968, 12426-13254, 20399-21355, or 26180-26192.

9. The recombinant antibody of claim 1, wherein CDRL2 comprises at least one amino acid substitution when compared to SEQ ID NOs: 6625-7452, 14913-15741, 24227-25183, or 26219-26231.

10. The recombinant antibody of claim 1, wherein VH comprises an amino acid sequence selected from the group consisting of SEQ ID NOs: 1657-2484, 9939-10767, 18485-19441, and 26141-26153.

11. The recombinant antibody of claim 1, wherein VL comprises an amino acid sequence selected from the group consisting of SEQ ID NOs: 2485-3312, 10768-11596, 22313-23269, and 26154-26166.

12. The recombinant antibody of claim 1, wherein the antibody comprises a light chain variable region (VL) that comprises a light chain complementarity determining region (CDRL)1, CDRL2, and CDRL3 and a heavy chain variable region (VH) that comprises a heavy chain complementarity determining region (CDRH)1, CDRH2, and CDRH3, wherein:
CDRH1 is SEQ ID NO: 4056,
CDRH2 is SEQ ID NO: 4884,
CDRH3 is SEQ ID NO: 5712,
CDRL1 is SEQ ID NO: 6540,
CDRL2 is SEQ ID NO: 7368, and
CDRL3 is SEQ ID NO: 8196;
or
CDRH1 is SEQ ID NO: 3791,
CDRH2 is SEQ ID NO: 4619,
CDRH3 is SEQ ID NO: 5447,
CDRL1 is SEQ ID NO: 6275,
CDRL2 is SEQ ID NO: 7103, and
CDRL3 is SEQ ID NO: 7931;
or
CDRH1 is SEQ ID NO: 3858,
CDRH2 is SEQ ID NO: 4686,
CDRH3 is SEQ ID NO: 5514,
CDRL1 is SEQ ID NO: 6342,
CDRL2 is SEQ ID NO: 7170, and
CDRL3 is SEQ ID NO: 7998;
or
CDRH1 is SEQ ID NO: 3680,
CDRH2 is SEQ ID NO: 4508,
CDRH3 is SEQ ID NO: 5336,
CDRL1 is SEQ ID NO: 6164,
CDRL2 is SEQ ID NO: 6992, and
CDRL3 is SEQ ID NO: 7820;
or
CDRH1 is SEQ ID NO: 3856,
CDRH2 is SEQ ID NO: 4684,
CDRH3 is SEQ ID NO: 5512,
CDRL1 is SEQ ID NO: 6340,
CDRL2 is SEQ ID NO: 7168, and
CDRL3 is SEQ ID NO: 7996;
or
CDRH1 is SEQ ID NO: 3355,
CDRH2 is SEQ ID NO: 4183,
CDRH3 is SEQ ID NO: 5011,
CDRL1 is SEQ ID NO: 5839,
CDRL2 is SEQ ID NO: 6667, and
CDRL3 is SEQ ID NO: 7495;
or
CDRH1 is SEQ ID NO: 3697,
CDRH2 is SEQ ID NO: 4525,
CDRH3 is SEQ ID NO: 5353,
CDRL1 is SEQ ID NO: 6181,
CDRL2 is SEQ ID NO: 7009, and
CDRL3 is SEQ ID NO: 7837;
or
CDRH1 is SEQ ID NO: 3481,
CDRH2 is SEQ ID NO: 4309,
CDRH3 is SEQ ID NO: 5137,
CDRL1 is SEQ ID NO: 5965,
CDRL2 is SEQ ID NO: 6793, and
CDRL3 is SEQ ID NO: 7621;
or
CDRH1 is SEQ ID NO: 3896,
CDRH2 is SEQ ID NO: 4724,
CDRH3 is SEQ ID NO: 5552,
CDRL1 is SEQ ID NO: 6380,
CDRL2 is SEQ ID NO: 7208, and
CDRL3 is SEQ ID NO: 8036;
or
CDRH1 is SEQ ID NO: 3667,
CDRH2 is SEQ ID NO: 4495,
CDRH3 is SEQ ID NO: 5323,
CDRL1 is SEQ ID NO: 6151,
CDRL2 is SEQ ID NO: 6979, and
CDRL3 is SEQ ID NO: 7807;
or
CDRH1 is SEQ ID NO: 12368,
CDRH2 is SEQ ID NO: 13197,
CDRH3 is SEQ ID NO: 14026,
CDRL1 is SEQ ID NO: 14855,
CDRL2 is SEQ ID NO: 15684, and
CDRL3 is SEQ ID NO: 16513;
or
CDRH1 is SEQ ID NO: 11621,
CDRH2 is SEQ ID NO: 12450,
CDRH3 is SEQ ID NO: 13279,
CDRL1 is SEQ ID NO: 14108,
CDRL2 is SEQ ID NO: 14937, and
CDRL3 is SEQ ID NO: 15766;
or
CDRH1 is SEQ ID NO: 11742,
CDRH2 is SEQ ID NO: 12571,
CDRH3 is SEQ ID NO: 13400,
CDRL1 is SEQ ID NO: 14229,
CDRL2 is SEQ ID NO: 15058, and
CDRL3 is SEQ ID NO: 15887;
or
CDRH1 is SEQ ID NO: 11598,
CDRH2 is SEQ ID NO: 12427,
CDRH3 is SEQ ID NO: 13256,
CDRL1 is SEQ ID NO: 14085,
CDRL2 is SEQ ID NO: 14914, and
CDRL3 is SEQ ID NO: 15743;
or
CDRH1 is SEQ ID NO: 12262,
CDRH2 is SEQ ID NO: 13091,
CDRH3 is SEQ ID NO: 13920,
CDRL1 is SEQ ID NO: 14749,
CDRL2 is SEQ ID NO: 15578, and
CDRL3 is SEQ ID NO: 16407;
or
CDRH1 is SEQ ID NO: 11995,
CDRH2 is SEQ ID NO: 12824,
CDRH3 is SEQ ID NO: 13653,
CDRL1 is SEQ ID NO: 14482,
CDRL2 is SEQ ID NO: 15311, and
CDRL3 is SEQ ID NO: 16140;
or
CDRH1 is SEQ ID NO: 12164,
CDRH2 is SEQ ID NO: 12993,
CDRH3 is SEQ ID NO: 13822,
CDRL1 is SEQ ID NO: 14651,
CDRL2 is SEQ ID NO: 15480, and
CDRL3 is SEQ ID NO: 16309;
or
CDRH1 is SEQ ID NO: 11752,
CDRH2 is SEQ ID NO: 12581,
CDRH3 is SEQ ID NO: 13410,
CDRL1 is SEQ ID NO: 14239,
CDRL2 is SEQ ID NO: 15068, and
CDRL3 is SEQ ID NO: 15897;
or
CDRH1 is SEQ ID NO: 11888,
CDRH2 is SEQ ID NO: 12717,
CDRH3 is SEQ ID NO: 13546,
CDRL1 is SEQ ID NO: 14375,
CDRL2 is SEQ ID NO: 15204, and
CDRL3 is SEQ ID NO: 16033;
or
CDRH1 is SEQ ID NO: 20173,
CDRH2 is SEQ ID NO: 21130,
CDRH3 is SEQ ID NO: 22087,
CDRL1 is SEQ ID NO: 24001,
CDRL2 is SEQ ID NO: 24958, and
CDRL3 is SEQ ID NO: 25915;
or
CDRH1 is SEQ ID NO: 20065,
CDRH2 is SEQ ID NO: 21022,
CDRH3 is SEQ ID NO: 21979,
CDRL1 is SEQ ID NO: 23893,
CDRL2 is SEQ ID NO: 24850, and
CDRL3 is SEQ ID NO: 25807;
or
CDRH1 is SEQ ID NO: 20115,
CDRH2 is SEQ ID NO: 21072,
CDRH3 is SEQ ID NO: 22029,
CDRL1 is SEQ ID NO: 23943,
CDRL2 is SEQ ID NO: 24900, and
CDRL3 is SEQ ID NO: 25857;
or
CDRH1 is SEQ ID NO: 19873,
CDRH2 is SEQ ID NO: 20830,
CDRH3 is SEQ ID NO: 21787,
CDRL1 is SEQ ID NO: 23701,
CDRL2 is SEQ ID NO: 24658, and
CDRL3 is SEQ ID NO: 25615;
or
CDRH1 is SEQ ID NO: 19923,
CDRH2 is SEQ ID NO: 20880,
CDRH3 is SEQ ID NO: 21837,
CDRL1 is SEQ ID NO: 23751,
CDRL2 is SEQ ID NO: 24708, and
CDRL3 is SEQ ID NO: 25665;
or
CDRH1 is SEQ ID NO: 19458,
CDRH2 is SEQ ID NO: 20415,
CDRH3 is SEQ ID NO: 21372,
CDRL1 is SEQ ID NO: 23286,
CDRL2 is SEQ ID NO: 24243, and
CDRL3 is SEQ ID NO: 25200;
or
CDRH1 is SEQ ID NO: 20235,
CDRH2 is SEQ ID NO: 21192,
CDRH3 is SEQ ID NO: 22149,
CDRL1 is SEQ ID NO: 24063,
CDRL2 is SEQ ID NO: 25020, and
CDRL3 is SEQ ID NO: 25977;
or
CDRH1 is SEQ ID NO: 19858,
CDRH2 is SEQ ID NO: 20815,
CDRH3 is SEQ ID NO: 21772,
CDRL1 is SEQ ID NO: 23686,
CDRL2 is SEQ ID NO: 24643, and
CDRL3 is SEQ ID NO: 25600;
or
CDRH1 is SEQ ID NO: 19735,
CDRH2 is SEQ ID NO: 20692,
CDRH3 is SEQ ID NO: 21649,
CDRL1 is SEQ ID NO: 23563,
CDRL2 is SEQ ID NO: 24520, and
CDRL3 is SEQ ID NO: 25477;
or
CDRH1 is SEQ ID NO: 19887,
CDRH2 is SEQ ID NO: 20844,
CDRH3 is SEQ ID NO: 21801,
CDRL1 is SEQ ID NO: 23715,
CDRL2 is SEQ ID NO: 24672, and
CDRL3 is SEQ ID NO: 25356;
or
CDRH1 is SEQ ID NO: 19614,
CDRH2 is SEQ ID NO: 20571,
CDRH3 is SEQ ID NO: 21528,
CDRL1 is SEQ ID NO: 23442,
CDRL2 is SEQ ID NO: 24399, and
CDRL3 is SEQ ID NO: 25986.

13.-41. (canceled)

42. The recombinant antibody of claim 1, wherein the antibody comprises a light chain variable region (VL) that comprises a light chain complementarity determining region (CDRL)1, CDRL2, and CDRL3 and a heavy chain variable region (VH) that comprises a heavy chain complementarity determining region (CDRH)1, CDRH2, and CDRH3, wherein:
CDRH1 is SEQ ID NO: 26167,
CDRH2 is SEQ ID NO: 26180,
CDRH3 is SEQ ID NO: 26193,
CDRL1 is SEQ ID NO: 26206,
CDRL2 is SEQ ID NO: 26219, and
CDRL3 is SEQ ID NO: 26232;
or
CDRH1 is SEQ ID NO: 26168,
CDRH2 is SEQ ID NO: 26181,
CDRH3 is SEQ ID NO: 26194,
CDRL1 is SEQ ID NO: 26207,
CDRL2 is SEQ TD NO: 26220, and
CDRL3 is SEQ ID NO: 26233;
or
CDRH1 is SEQ ID NO: 26169,
CDRH2 is SEQ ID NO: 26182,
CDRH3 is SEQ ID NO: 26195,
CDRL1 is SEQ ID NO: 26208,
CDRL2 is SEQ ID NO: 26221, and
CDRL3 is SEQ ID NO: 26234;
or
CDRH1 is SEQ ID NO: 26170,
CDRH2 is SEQ ID NO: 26183,
CDRH3 is SEQ ID NO: 26196,
CDRL1 is SEQ ID NO: 26209,
CDRL2 is SEQ ID NO: 26222; and
CDRL3 is SEQ ID NO: 26235,
or
CDRH1 is SEQ ID NO: 26171,
CDRH2 is SEQ ID NO: 26184,
CDRH3 is SEQ ID NO: 26197,
CDRL1 is SEQ ID NO: 26210;
CDRL2 is SEQ ID NO: 26223, and
CDRL3 is SEQ ID NO: 26236,
or
CDRH1 is SEQ ID NO: 26172,
CDRH2 is SEQ ID NO: 26185,
CDRH3 is SEQ ID NO: 26198,
CDRL1 is SEQ ID NO: 26211,
CDRL2 is SEQ ID NO: 26224; and
CDRL3 is SEQ ID NO: 26237,
or
CDRH1 is SEQ ID NO: 26173,
CDRH2 is SEQ ID NO: 26186,
CDRH3 is SEQ ID NO: 26199,
CDRL1 is SEQ ID NO: 26212,
CDRL2 is SEQ ID NO: 26225, and
CDRL3 is SEQ ID NO: 26238;
or
CDRH1 is SEQ ID NO: 26174,
CDRH2 is SEQ ID NO: 26187,
CDRH3 is SEQ ID NO: 26200,
CDRL1 is SEQ ID NO: 26213,
CDRL2 is SEQ ID NO: 26226, and
CDRL3 is SEQ ID NO: 26239;
or
CDRH1 is SEQ ID NO: 26175,
CDRH2 is SEQ ID NO: 26188,
CDRH3 is SEQ ID NO: 26201,
CDRL1 is SEQ ID NO: 26214,
CDRL2 is SEQ ID NO: 26227, and
CDRL3 is SEQ ID NO: 26240;
or
CDRH1 is SEQ ID NO: 26176,
CDRH2 is SEQ ID NO: 26189,
CDRH3 is SEQ ID NO: 26202,
CDRL1 is SEQ ID NO: 26215,
CDRL2 is SEQ ID NO: 26228; and
CDRL3 is SEQ TD NO: 26241,
or
CDRH1 is SEQ ID NO: 26177,
CDRH2 is SEQ ID NO: 26190,
CDRH3 is SEQ ID NO: 26203,
CDRL1 is SEQ ID NO: 26216,
CDRL2 is SEQ ID NO: 26229, and
CDRL3 is SEQ ID NO: 26242;
or
CDRH1 is SEQ ID NO: 26178,
CDRH2 is SEQ ID NO: 26191,
CDRH3 is SEQ ID NO: 26204,
CDRL1 is SEQ ID NO: 26217,
CDRL2 is SEQ ID NO: 26230; and
CDRL3 is SEQ ID NO: 26243;
or
CDRH1 is SEQ ID NO: 26179,
CDRH2 is SEQ ID NO: 26192,
CDRH3 is SEQ ID NO: 26205,
CDRL1 is SEQ ID NO: 26218,
CDRL2 is SEQ ID NO: 26231, and
CDRL3 is SEQ ID NO: 26244.

43.-54. (canceled)

55. A nucleic acid encoding the recombinant antibody of claim 1.

56. A recombinant expression cassette or plasmid comprising a sequence to express the recombinant antibody of claim 1.

57. A host cell comprising the expression cassette or the plasmid of claim 56.

58. A method of producing an antibody, comprising cultivating or maintaining the host cell of claim 57 under conditions to produce the antibody.

59. A method of preventing or treating a coronavirus infection in a subject, comprising administering to the subject a therapeutically effective amount of the recombinant antibody of claim 1.

60. The method of claim 59, where the coronavirus is SARS-CoV-2.

The application's sequence listing, which the Patent Office published only in electronic form, follows.

SEQUENCE LISTING (26348 sequences)

SEQ ID NO: 1 - DNA, 16 bp, Artificial Sequence
  Synthetic construct
aaacctgcatgctagt

SEQ ID NO: 2 - DNA, 16 bp, Artificial Sequence
  Synthetic construct
aaacctgcatgctagt

SEQ ID NO: 3 - DNA, 16 bp, Artificial Sequence
  Synthetic construct
aaagatggtactcgcg

SEQ ID NO: 4 - DNA, 16 bp, Artificial Sequence
  Synthetic construct
aaagatggtactcgcg

SEQ ID NO: 5 - DNA, 16 bp, Artificial Sequence
  Synthetic construct
aaagcaagtaccgctg

SEQ ID NO: 6 - DNA, 16 bp, Artificial Sequence
  Synthetic construct
aaagcaagtaccgctg

SEQ ID NO: 7 - DNA, 16 bp, Artificial Sequence
  Synthetic construct
aaagcaagtctcatcc

SEQ ID NO: 8 - DNA, 16 bp, Artificial Sequence
  Synthetic construct
aaagcaagtctcatcc

SEQ ID NO: 9 - DNA, 16 bp, Artificial Sequence
  Synthetic construct
aaagtagtcggcggtt

SEQ ID NO: 10 - DNA, 16 bp, Artificial Sequence
  Synthetic construct
aaagtagtcggcggtt

SEQ ID NO: 11 - DNA, 16 bp, Artificial Sequence
  Synthetic construct
aaatgccgtatagtag

SEQ ID NO: 12 - DNA, 16 bp, Artificial Sequence
  Synthetic construct
aaatgccgtatagtag

SEQ ID NO: 13 - DNA, 16 bp, Artificial Sequence
  Synthetic construct
aacacgtcatcagtca

SEQ ID NO: 14 - DNA, 16 bp, Artificial Sequence
  Synthetic construct
aacacgtcatcagtca

SEQ ID NO: 15 - DNA, 16 bp, Artificial Sequence
  Synthetic construct
aaccatgcacaggagt

SEQ ID NO: 16 - DNA, 16 bp, Artificial Sequence
  Synthetic construct
aaccatgcacaggagt

SEQ ID NO: 17 - DNA, 16 bp, Artificial Sequence
  Synthetic construct
aaccatggtccatgat

SEQ ID NO: 18 - DNA, 16 bp, Artificial Sequence
  Synthetic construct
aaccatggtccatgat

SEQ ID NO: 19 - DNA, 16 bp, Artificial Sequence
  Synthetic construct
aaccgcgagcagcgta

SEQ ID NO: 20 - DNA, 16 bp, Artificial Sequence
  Synthetic construct
aaccgcgagcagcgta

SEQ ID NO: 21 - DNA, 16 bp, Artificial Sequence
  Synthetic construct
aaccgcggtcatccct

SEQ ID NO: 22 - DNA, 16 bp, Artificial Sequence
  Synthetic construct
aaccgcggtcatccct

SEQ ID NO: 23 - DNA, 16 bp, Artificial Sequence
  Synthetic construct
aacgttgcaacttgac

SEQ ID NO: 24 - DNA, 16 bp, Artificial Sequence
  Synthetic construct
aacgttgcaacttgac

SEQ ID NO: 25 - DNA, 16 bp, Artificial Sequence
  Synthetic construct
aacgttggttatcacg

SEQ ID NO: 26 - DNA, 16 bp, Artificial Sequence
  Synthetic construct
aacgttggttatcacg

SEQ ID NO: 27 - DNA, 16 bp, Artificial Sequence
  Synthetic construct
aactcagcagacaggt

SEQ ID NO: 28 - DNA, 16 bp, Artificial Sequence
  Synthetic construct
aactcagcagacaggt

SEQ ID NO: 29 - DNA, 16 bp, Artificial Sequence
  Synthetic construct
aactcccagacacgac

SEQ ID NO: 30 - DNA, 16 bp, Artificial Sequence
  Synthetic construct
aactcccagacacgac

SEQ ID NO: 31 - DNA, 16 bp, Artificial Sequence
  Synthetic construct
aactccccaaagtgcg

SEQ ID NO: 32 - DNA, 16 bp, Artificial Sequence
  Synthetic construct
aactccccaaagtgcg

SEQ ID NO: 33 - DNA, 16 bp, Artificial Sequence
  Synthetic construct
aactccccagctgtta

SEQ ID NO: 34 - DNA, 16 bp, Artificial Sequence
  Synthetic construct
aactccccagctgtta

SEQ ID NO: 35 - DNA, 16 bp, Artificial Sequence
  Synthetic construct
aactcccgtccagtat

SEQ ID NO: 36 - DNA, 16 bp, Artificial Sequence
  Synthetic construct
aactcccgtccagtat

SEQ ID NO: 37 - DNA, 16 bp, Artificial Sequence
  Synthetic construct
aactcttcaccagtta

SEQ ID NO: 38 - DNA, 16 bp, Artificial Sequence
  Synthetic construct
aactcttcaccagtta

SEQ ID NO: 39 - DNA, 16 bp, Artificial Sequence
  Synthetic construct
aactctttctgtccgt

SEQ ID NO: 40 - DNA, 16 bp, Artificial Sequence
  Synthetic construct
aactctttctgtccgt

SEQ ID NO: 41 - DNA, 16 bp, Artificial Sequence
  Synthetic construct
aactctttcttgtcat

SEQ ID NO: 42 - DNA, 16 bp, Artificial Sequence
  Synthetic construct
aactctttcttgtcat

SEQ ID NO: 43 - DNA, 16 bp, Artificial Sequence
  Synthetic construct
aactggttcatcggat

SEQ ID NO: 44 - DNA, 16 bp, Artificial Sequence
  Synthetic construct
aactggttcatcggat

SEQ ID NO: 45 - DNA, 16 bp, Artificial Sequence
  Synthetic construct
aactttcagcgacgta

SEQ ID NO: 46 - DNA, 16 bp, Artificial Sequence
  Synthetic construct
aactttcagcgacgta

SEQ ID NO: 47 - DNA, 16 bp, Artificial Sequence
  Synthetic construct
aactttcgtatgaatg

SEQ ID NO: 48 - DNA, 16 bp, Artificial Sequence
  Synthetic construct
aactttcgtatgaatg

SEQ ID NO: 49 - DNA, 16 bp, Artificial Sequence
  Synthetic construct
aagccgcgtcgggtct

SEQ ID NO: 50 - DNA, 16 bp, Artificial Sequence
  Synthetic construct
aagccgcgtcgggtct

SEQ ID NO: 51 - DNA, 16 bp, Artificial Sequence
  Synthetic construct
aaggagccatgccttc

SEQ ID NO: 52 - DNA, 16 bp, Artificial Sequence
  Synthetic construct
aaggagccatgccttc

SEQ ID NO: 53 - DNA, 16 bp, Artificial Sequence
  Synthetic construct
aaggagctcagataag

SEQ ID NO: 54 - DNA, 16 bp, Artificial Sequence
  Synthetic construct
aaggagctcagataag

SEQ ID NO: 55 - DNA, 16 bp, Artificial Sequence
  Synthetic construct
aaggcagcactcaggc

SEQ ID NO: 56 - DNA, 16 bp, Artificial Sequence
  Synthetic construct
aaggcagcactcaggc

SEQ ID NO: 57 - DNA, 16 bp, Artificial Sequence
  Synthetic construct
aagtctgcactacagt

SEQ ID NO: 58 - DNA, 16 bp, Artificial Sequence
  Synthetic construct
aagtctgcactacagt

SEQ ID NO: 59 - DNA, 16 bp, Artificial Sequence
  Synthetic construct
aagtctgcatttgctt

SEQ ID NO: 60 - DNA, 16 bp, Artificial Sequence
  Synthetic construct
aagtctgcatttgctt

SEQ ID NO: 61 - DNA, 16 bp, Artificial Sequence
  Synthetic construct
aagtctggtaaggatt

SEQ ID NO: 62 - DNA, 16 bp, Artificial Sequence
  Synthetic construct
aagtctggtaaggatt

SEQ ID NO: 63 - DNA, 16 bp, Artificial Sequence
  Synthetic construct
aatccagcatatacgc

SEQ ID NO: 64 - DNA, 16 bp, Artificial Sequence
  Synthetic construct
aatccagcatatacgc

SEQ ID NO: 65 - DNA, 16 bp, Artificial Sequence
  Synthetic construct
aatccagtcctagaac

SEQ ID NO: 66 - DNA, 16 bp, Artificial Sequence
  Synthetic construct
aatccagtcctagaac

SEQ ID NO: 67 - DNA, 16 bp, Artificial Sequence
  Synthetic construct
aatccagtcgtctgaa

SEQ ID NO: 68 - DNA, 16 bp, Artificial Sequence
  Synthetic construct
aatccagtcgtctgaa

SEQ ID NO: 69 - DNA, 16 bp, Artificial Sequence
  Synthetic construct
aatcggtagaaggcct

SEQ ID NO: 70 - DNA, 16 bp, Artificial Sequence
  Synthetic construct
aatcggtagaaggcct

SEQ ID NO: 71 - DNA, 16 bp, Artificial Sequence
  Synthetic construct
aatcggtagttcgcgc

SEQ ID NO: 72 - DNA, 16 bp, Artificial Sequence
  Synthetic construct
aatcggtagttcgcgc

SEQ ID NO: 73 - DNA, 16 bp, Artificial Sequence
  Synthetic construct
aatcggtcaactgcgc

SEQ ID NO: 74 - DNA, 16 bp, Artificial Sequence
  Synthetic construct
aatcggtcaactgcgc

SEQ ID NO: 75 - DNA, 16 bp, Artificial Sequence
  Synthetic construct
acaccaagtccgagtc

SEQ ID NO: 76 - DNA, 16 bp, Artificial Sequence
  Synthetic construct
acaccaagtccgagtc

SEQ ID NO: 77 - DNA, 16 bp, Artificial Sequence
  Synthetic construct
acaccaatcaacacgt

SEQ ID NO: 78 - DNA, 16 bp, Artificial Sequence
  Synthetic construct
acaccaatcaacacgt

SEQ ID NO: 79 - DNA, 16 bp, Artificial Sequence
  Synthetic construct
acaccaatctcgtatt

SEQ ID NO: 80 - DNA, 16 bp, Artificial Sequence
  Synthetic construct
acaccaatctcgtatt

SEQ ID NO: 81 - DNA, 16 bp, Artificial Sequence
  Synthetic construct
acactgaagtacgtaa

SEQ ID NO: 82 - DNA, 16 bp, Artificial Sequence
  Synthetic construct
acactgaagtacgtaa

SEQ ID NO: 83 - DNA, 16 bp, Artificial Sequence
  Synthetic construct
acactgatcccacttg

SEQ ID NO: 84 - DNA, 16 bp, Artificial Sequence
  Synthetic construct
acactgatcccacttg

SEQ ID NO: 85 - DNA, 16 bp, Artificial Sequence
  Synthetic construct
acagccgagaacaact

SEQ ID NO: 86 - DNA, 16 bp, Artificial Sequence
  Synthetic construct
acagccgagaacaact

SEQ ID NO: 87 - DNA, 16 bp, Artificial Sequence
  Synthetic construct
acagccgagccgtcgt

SEQ ID NO: 88 - DNA, 16 bp, Artificial Sequence
  Synthetic construct
acagccgagccgtcgt

SEQ ID NO: 89 - DNA, 16 bp, Artificial Sequence
  Synthetic construct
acagctaagccctaat

SEQ ID NO: 90 - DNA, 16 bp, Artificial Sequence
  Synthetic construct
acagctaagccctaat

SEQ ID NO: 91 - DNA, 16 bp, Artificial Sequence
  Synthetic construct
acatacgagtgcgtga

SEQ ID NO: 92 - DNA, 16 bp, Artificial Sequence
  Synthetic construct
acatacgagtgcgtga

SEQ ID NO: 93 - DNA, 16 bp, Artificial Sequence
  Synthetic construct
acatcaggtaagtgta

SEQ ID NO: 94 - DNA, 16 bp, Artificial Sequence
  Synthetic construct
acatcaggtaagtgta

SEQ ID NO: 95 - DNA, 16 bp, Artificial Sequence
  Synthetic construct
acatggtagacaatac

SEQ ID NO: 96 - DNA, 16 bp, Artificial Sequence
  Synthetic construct
acatggtagacaatac

SEQ ID NO: 97 - DNA, 16 bp, Artificial Sequence
  Synthetic construct
acatggtcacagactt

SEQ ID NO: 98 - DNA, 16 bp, Artificial Sequence
  Synthetic construct
acatggtcacagactt

SEQ ID NO: 99 - DNA, 16 bp, Artificial Sequence
  Synthetic construct
acatggtgtagctaaa

SEQ ID NO: 100 - DNA, 16 bp, Artificial Sequence
  Synthetic construct
acatggtgtagctaaa

SEQ ID NO: 101 - DNA, 16 bp, Artificial Sequence
  Synthetic construct
accagtacacctcgtt

SEQ ID NO: 102 - DNA, 16 bp, Artificial Sequence
  Synthetic construct
accagtacacctcgtt

SEQ ID NO: 103 - DNA, 16 bp, Artificial Sequence
  Synthetic construct
acccactagaactcgg

SEQ ID NO: 104 - DNA, 16 bp, Artificial Sequence
  Synthetic construct
acccactagaactcgg

SEQ ID NO: 105 - DNA, 16 bp, Artificial Sequence
  Synthetic construct
acccactaggcaaaga

SEQ ID NO: 106 - DNA, 16 bp, Artificial Sequence
  Synthetic construct
acccactaggcaaaga

SEQ ID NO: 107 - DNA, 16 bp, Artificial Sequence
  Synthetic construct
acccactagtcttgca

SEQ ID NO: 108 - DNA, 16 bp, Artificial Sequence
  Synthetic construct
acccactagtcttgca

SEQ ID NO: 109 - DNA, 16 bp, Artificial Sequence
  Synthetic construct
acccactagtgaacgc

SEQ ID NO: 110 - DNA, 16 bp, Artificial Sequence
  Synthetic construct
acccactagtgaacgc

SEQ ID NO: 111 - DNA, 16 bp, Artificial Sequence
  Synthetic construct
accgtaacattggcgc

SEQ ID NO: 112 - DNA, 16 bp, Artificial Sequence
  Synthetic construct
accgtaacattggcgc

SEQ ID NO: 113 - DNA, 16 bp, Artificial Sequence
  Synthetic construct
acctttatcaaccatg

SEQ ID NO: 114 - DNA, 16 bp, Artificial Sequence
  Synthetic construct
acctttatcaaccatg

SEQ ID NO: 115 - DNA, 16 bp, Artificial Sequence
  Synthetic construct
acctttatctgccagg

SEQ ID NO: 116 - DNA, 16 bp, Artificial Sequence
  Synthetic construct
acctttatctgccagg

SEQ ID NO: 117 - DNA, 16 bp, Artificial Sequence
  Synthetic construct
acgagccagaagaagc

SEQ ID NO: 118 - DNA, 16 bp, Artificial Sequence
  Synthetic construct
acgagccagaagaagc

SEQ ID NO: 119 - DNA, 16 bp, Artificial Sequence
  Synthetic construct
acgaggaagtgaattg

SEQ ID NO: 120 - DNA, 16 bp, Artificial Sequence
  Synthetic construct
acgaggaagtgaattg

SEQ ID NO: 121 - DNA, 16 bp, Artificial Sequence
  Synthetic construct
acgatacgtcctcttg

SEQ ID NO: 122 - DNA, 16 bp, Artificial Sequence
  Synthetic construct
acgatacgtcctcttg

SEQ ID NO: 123 - DNA, 16 bp, Artificial Sequence
  Synthetic construct
acgatacgtgcaggta

SEQ ID NO: 124 - DNA, 16 bp, Artificial Sequence
  Synthetic construct
acgatacgtgcaggta

SEQ ID NO: 125 - DNA, 16 bp, Artificial Sequence
  Synthetic construct
acgatgttcttgcaag

SEQ ID NO: 126 - DNA, 16 bp, Artificial Sequence
  Synthetic construct
acgatgttcttgcaag

SEQ ID NO: 127 - DNA, 16 bp, Artificial Sequence
  Synthetic construct
acgcagcagcttatcg

SEQ ID NO: 128 - DNA, 16 bp, Artificial Sequence
  Synthetic construct
acgcagcagcttatcg

SEQ ID NO: 129 - DNA, 16 bp, Artificial Sequence
  Synthetic construct
acgcagccaacaccta

SEQ ID NO: 130 - DNA, 16 bp, Artificial Sequence
  Synthetic construct
acgcagccaacaccta

SEQ ID NO: 131 - DNA, 16 bp, Artificial Sequence
  Synthetic construct
acgcagcgtcaaagat

SEQ ID NO: 132 - DNA, 16 bp, Artificial Sequence
  Synthetic construct
acgcagcgtcaaagat

SEQ ID NO: 133 - DNA, 16 bp, Artificial Sequence
  Synthetic construct
acgccagcagtcagcc

SEQ ID NO: 134 - DNA, 16 bp, Artificial Sequence
  Synthetic construct
acgccagcagtcagcc

SEQ ID NO: 135 - DNA, 16 bp, Artificial Sequence
  Synthetic construct
acgccgaagggtgttg

SEQ ID NO: 136 - DNA, 16 bp, Artificial Sequence
  Synthetic construct
acgccgaagggtgttg

SEQ ID NO: 137 - DNA, 16 bp, Artificial Sequence
  Synthetic construct
acgccgacaagaggct

SEQ ID NO: 138 - DNA, 16 bp, Artificial Sequence
  Synthetic construct
acgccgacaagaggct

SEQ ID NO: 139 - DNA, 16 bp, Artificial Sequence
  Synthetic construct
acggccacagcgaaca

SEQ ID NO: 140 - DNA, 16 bp, Artificial Sequence
  Synthetic construct
acggccacagcgaaca

SEQ ID NO: 141 - DNA, 16 bp, Artificial Sequence
  Synthetic construct
acggccagttcggcac

SEQ ID NO: 142 - DNA, 16 bp, Artificial Sequence
  Synthetic construct
acggccagttcggcac

SEQ ID NO: 143 - DNA, 16 bp, Artificial Sequence
  Synthetic construct
acggccatctgcccta

SEQ ID NO: 144 - DNA, 16 bp, Artificial Sequence
  Synthetic construct
acggccatctgcccta

SEQ ID NO: 145 - DNA, 16 bp, Artificial Sequence
  Synthetic construct
acgggctgtggtacag

SEQ ID NO: 146 - DNA, 16 bp, Artificial Sequence
  Synthetic construct
acgggctgtggtacag

SEQ ID NO: 147 - DNA, 16 bp, Artificial Sequence
  Synthetic construct
acgggtctccagggct

SEQ ID NO: 148 - DNA, 16 bp, Artificial Sequence
  Synthetic construct
acgggtctccagggct

SEQ ID NO: 149 - DNA, 16 bp, Artificial Sequence
  Synthetic construct
acgtcaaagcaaatca

SEQ ID NO: 150 - DNA, 16 bp, Artificial Sequence
  Synthetic construct
acgtcaaagcaaatca

SEQ ID NO: 151 - DNA, 16 bp, Artificial Sequence
  Synthetic construct
acgtcaacacatgact

SEQ ID NO: 152 - DNA, 16 bp, Artificial Sequence
  Synthetic construct
acgtcaacacatgact

SEQ ID NO: 153 - DNA, 16 bp, Artificial Sequence
  Synthetic construct
acgtcaatcaggcgaa

SEQ ID NO: 154 - DNA, 16 bp, Artificial Sequence
  Synthetic construct
acgtcaatcaggcgaa

SEQ ID NO: 155 - DNA, 16 bp, Artificial Sequence
  Synthetic construct
actgaactctaacggt

SEQ ID NO: 156 - DNA, 16 bp, Artificial Sequence
  Synthetic construct
actgaactctaacggt

SEQ ID NO: 157 - DNA, 16 bp, Artificial Sequence
  Synthetic construct
actgagtcatttcact

SEQ ID NO: 158 - DNA, 16 bp, Artificial Sequence
  Synthetic construct
actgagtcatttcact

SEQ ID NO: 159 - DNA, 16 bp, Artificial Sequence
  Synthetic construct
actgagttccactggg

SEQ ID NO: 160 - DNA, 16 bp, Artificial Sequence
  Synthetic construct
actgagttccactggg

SEQ ID NO: 161 - DNA, 16 bp, Artificial Sequence
  Synthetic construct
actgatgagacagaga

SEQ ID NO: 162 - DNA, 16 bp, Artificial Sequence
  Synthetic construct
actgatgagacagaga

SEQ ID NO: 163 - DNA, 16 bp, Artificial Sequence
  Synthetic construct
actgatgaggtaaact

SEQ ID NO: 164 - DNA, 16 bp, Artificial Sequence
  Synthetic construct
actgatgaggtaaact

SEQ ID NO: 165 - DNA, 16 bp, Artificial Sequence
  Synthetic construct
actgatgtcgacagcc

SEQ ID NO: 166 - DNA, 16 bp, Artificial Sequence
  Synthetic construct
actgatgtcgacagcc

SEQ ID NO: 167 - DNA, 16 bp, Artificial Sequence
  Synthetic construct
actgctcagtacgcga

SEQ ID NO: 168 - DNA, 16 bp, Artificial Sequence
  Synthetic construct
actgctcagtacgcga

SEQ ID NO: 169 - DNA, 16 bp, Artificial Sequence
  Synthetic construct
actgctctcaggatct

SEQ ID NO: 170 - DNA, 16 bp, Artificial Sequence
  Synthetic construct
actgctctcaggatct

SEQ ID NO: 171 - DNA, 16 bp, Artificial Sequence
  Synthetic construct
actgtcccaaattgcc

SEQ ID NO: 172 - DNA, 16 bp, Artificial Sequence
  Synthetic construct
actgtcccaaattgcc

SEQ ID NO: 173 - DNA, 16 bp, Artificial Sequence
  Synthetic construct
acttgttagaaaccta

SEQ ID NO: 174 - DNA, 16 bp, Artificial Sequence
  Synthetic construct
acttgttagaaaccta

SEQ ID NO: 175 - DNA, 16 bp, Artificial Sequence
  Synthetic construct
acttgttagagactta

SEQ ID NO: 176 - DNA, 16 bp, Artificial Sequence
  Synthetic construct
acttgttagagactta

SEQ ID NO: 177 - DNA, 16 bp, Artificial Sequence
  Synthetic construct
acttgtttctcaactt

SEQ ID NO: 178 - DNA, 16 bp, Artificial Sequence
  Synthetic construct
acttgtttctcaactt

SEQ ID NO: 179 - DNA, 16 bp, Artificial Sequence
  Synthetic construct
agacgtttcaagaagt

SEQ ID NO: 180 - DNA, 16 bp, Artificial Sequence
  Synthetic construct
agacgtttcaagaagt

SEQ ID NO: 181 - DNA, 16 bp, Artificial Sequence
  Synthetic construct
agagcgagtacagttc

SEQ ID NO: 182 - DNA, 16 bp, Artificial Sequence
  Synthetic construct
agagcgagtacagttc

SEQ ID NO: 183 - DNA, 16 bp, Artificial Sequence
  Synthetic construct
agagcgagtccctact

SEQ ID NO: 184 - DNA, 16 bp, Artificial Sequence
  Synthetic construct
agagcgagtccctact

SEQ ID NO: 185 - DNA, 16 bp, Artificial Sequence
  Synthetic construct
agagctttcgcatggc

SEQ ID NO: 186 - DNA, 16 bp, Artificial Sequence
  Synthetic construct
agagctttcgcatggc

SEQ ID NO: 187 - DNA, 16 bp, Artificial Sequence
  Synthetic construct
agagtgggttatcacg

SEQ ID NO: 188 - DNA, 16 bp, Artificial Sequence
  Synthetic construct
agagtgggttatcacg

SEQ ID NO: 189 - DNA, 16 bp, Artificial Sequence
  Synthetic construct
agatctgtccgggtgt

SEQ ID NO: 190 - DNA, 16 bp, Artificial Sequence
  Synthetic construct
agatctgtccgggtgt

SEQ ID NO: 191 - DNA, 16 bp, Artificial Sequence
  Synthetic construct
agattgcgtctgccag

SEQ ID NO: 192 - DNA, 16 bp, Artificial Sequence
  Synthetic construct
agattgcgtctgccag

SEQ ID NO: 193 - DNA, 16 bp, Artificial Sequence
  Synthetic construct
agcagcctcgcgtagc

SEQ ID NO: 194 - DNA, 16 bp, Artificial Sequence
  Synthetic construct
agcagcctcgcgtagc

SEQ ID NO: 195 - DNA, 16 bp, Artificial Sequence
  Synthetic construct
agcctaaagaattgtg

SEQ ID NO: 196 - DNA, 16 bp, Artificial Sequence
  Synthetic construct
agcctaaagaattgtg

SEQ ID NO: 197 - DNA, 16 bp, Artificial Sequence
  Synthetic construct
agcctaagttgagttc

SEQ ID NO: 198 - DNA, 16 bp, Artificial Sequence
  Synthetic construct
agcctaagttgagttc

SEQ ID NO: 199 - DNA, 16 bp, Artificial Sequence
  Synthetic construct
agcgtatgtacatcca

SEQ ID NO: 200 - DNA, 16 bp, Artificial Sequence
  Synthetic construct
agcgtatgtacatcca

SEQ ID NO: 201 - DNA, 16 bp, Artificial Sequence
  Synthetic construct
agcgtatgtctccact

SEQ ID NO: 202 - DNA, 16 bp, Artificial Sequence
  Synthetic construct
agcgtatgtctccact

SEQ ID NO: 203 - DNA, 16 bp, Artificial Sequence
  Synthetic construct
agcgtcgcacaggagt

SEQ ID NO: 204 - DNA, 16 bp, Artificial Sequence
  Synthetic construct
agcgtcgcacaggagt

SEQ ID NO: 205 - DNA, 16 bp, Artificial Sequence
  Synthetic construct
agctcctaggtgctag

SEQ ID NO: 206 - DNA, 16 bp, Artificial Sequence
  Synthetic construct
agctcctaggtgctag

SEQ ID NO: 207 - DNA, 16 bp, Artificial Sequence
  Synthetic construct
agctcctcaatgtaag

SEQ ID NO: 208 - DNA, 16 bp, Artificial Sequence
  Synthetic construct
agctcctcaatgtaag

SEQ ID NO: 209 - DNA, 16 bp, Artificial Sequence
  Synthetic construct
agctcctgtcacacgc

SEQ ID NO: 210 - DNA, 16 bp, Artificial Sequence
  Synthetic construct
agctcctgtcacacgc

SEQ ID NO: 211 - DNA, 16 bp, Artificial Sequence
  Synthetic construct
agctctcaggctcaga

SEQ ID NO: 212 - DNA, 16 bp, Artificial Sequence
  Synthetic construct
agctctcaggctcaga

SEQ ID NO: 213 - DNA, 16 bp, Artificial Sequence
  Synthetic construct
agctctcgttacgtca

SEQ ID NO: 214 - DNA, 16 bp, Artificial Sequence
  Synthetic construct
agctctcgttacgtca

SEQ ID NO: 215 - DNA, 16 bp, Artificial Sequence
  Synthetic construct
agcttgagtaaacctc

SEQ ID NO: 216 - DNA, 16 bp, Artificial Sequence
  Synthetic construct
agcttgagtaaacctc

SEQ ID NO: 217 - DNA, 16 bp, Artificial Sequence
  Synthetic construct
agcttgagtcgattgt

SEQ ID NO: 218 - DNA, 16 bp, Artificial Sequence
  Synthetic construct
agcttgagtcgattgt

SEQ ID NO: 219 - DNA, 16 bp, Artificial Sequence
  Synthetic construct
aggccgtcacgttggc

SEQ ID NO: 220 - DNA, 16 bp, Artificial Sequence
  Synthetic construct
aggccgtcacgttggc

SEQ ID NO: 221 - DNA, 16 bp, Artificial Sequence
  Synthetic construct
aggccgtcattcgaca

SEQ ID NO: 222 - DNA, 16 bp, Artificial Sequence
  Synthetic construct
aggccgtcattcgaca

SEQ ID NO: 223 - DNA, 16 bp, Artificial Sequence
  Synthetic construct
agggagtcagtgagtg

SEQ ID NO: 224 - DNA, 16 bp, Artificial Sequence
  Synthetic construct
agggagtcagtgagtg

SEQ ID NO: 225 - DNA, 16 bp, Artificial Sequence
  Synthetic construct
agggtgagttaagaac

SEQ ID NO: 226 - DNA, 16 bp, Artificial Sequence
  Synthetic construct
agggtgagttaagaac

SEQ ID NO: 227 - DNA, 16 bp, Artificial Sequence
  Synthetic construct
aggtcatagctaagat

SEQ ID NO: 228 - DNA, 16 bp, Artificial Sequence
  Synthetic construct
aggtcatagctaagat

SEQ ID NO: 229 - DNA, 16 bp, Artificial Sequence
  Synthetic construct
aggtcatagctaccta

SEQ ID NO: 230 - DNA, 16 bp, Artificial Sequence
  Synthetic construct
aggtcatagctaccta

SEQ ID NO: 231 - DNA, 16 bp, Artificial Sequence
  Synthetic construct
aggtccgaggagttgc

SEQ ID NO: 232 - DNA, 16 bp, Artificial Sequence
  Synthetic construct
aggtccgaggagttgc

SEQ ID NO: 233 - DNA, 16 bp, Artificial Sequence
  Synthetic construct
aggtccgtcttgtact

SEQ ID NO: 234 - DNA, 16 bp, Artificial Sequence
  Synthetic construct
aggtccgtcttgtact

SEQ ID NO: 235 - DNA, 16 bp, Artificial Sequence
  Synthetic construct
agtagtcagacataac

SEQ ID NO: 236 - DNA, 16 bp, Artificial Sequence
  Synthetic construct
agtagtcagacataac

SEQ ID NO: 237 - DNA, 16 bp, Artificial Sequence
  Synthetic construct
agtagtcagtgtacgg

SEQ ID NO: 238 - DNA, 16 bp, Artificial Sequence
  Synthetic construct
agtagtcagtgtacgg

SEQ ID NO: 239 - DNA, 16 bp, Artificial Sequence
  Synthetic construct
agtagtccacttctgc

SEQ ID NO: 240 - DNA, 16 bp, Artificial Sequence
  Synthetic construct
agtagtccacttctgc

SEQ ID NO: 241 - DNA, 16 bp, Artificial Sequence
  Synthetic construct
agtagtctctccctga

SEQ ID NO: 242 - DNA, 16 bp, Artificial Sequence
  Synthetic construct
agtagtctctccctga

SEQ ID NO: 243 - DNA, 16 bp, Artificial Sequence
  Synthetic construct
agtctttgtctgattg

SEQ ID NO: 244 - DNA, 16 bp, Artificial Sequence
  Synthetic construct
agtctttgtctgattg

SEQ ID NO: 245 - DNA, 16 bp, Artificial Sequence
  Synthetic construct
agtcttttctggagcc

SEQ ID NO: 246 - DNA, 16 bp, Artificial Sequence
  Synthetic construct
agtcttttctggagcc

SEQ ID NO: 247 - DNA, 16 bp, Artificial Sequence
  Synthetic construct
agtgggaagtaggcca

SEQ ID NO: 248 - DNA, 16 bp, Artificial Sequence
  Synthetic construct
agtgggaagtaggcca

SEQ ID NO: 249 - DNA, 16 bp, Artificial Sequence
  Synthetic construct
agtgtcaagagcctag

SEQ ID NO: 250 - DNA, 16 bp, Artificial Sequence
  Synthetic construct
agtgtcaagagcctag

SEQ ID NO: 251 - DNA, 16 bp, Artificial Sequence
  Synthetic construct
agtgtcagtatgaaac

SEQ ID NO: 252 - DNA, 16 bp, Artificial Sequence
  Synthetic construct
agtgtcagtatgaaac

SEQ ID NO: 253 - DNA, 16 bp, Artificial Sequence
  Synthetic construct
agtgtcagttaaagac

SEQ ID NO: 254 - DNA, 16 bp, Artificial Sequence
  Synthetic construct
agtgtcagttaaagac

SEQ ID NO: 255 - DNA, 16 bp, Artificial Sequence
  Synthetic construct
agttggtgtgcgatag

SEQ ID NO: 256 - DNA, 16 bp, Artificial Sequence
  Synthetic construct
agttggtgtgcgatag

SEQ ID NO: 257 - DNA, 16 bp, Artificial Sequence
  Synthetic construct
agttggtgttcaacca

SEQ ID NO: 258 - DNA, 16 bp, Artificial Sequence
  Synthetic construct
agttggtgttcaacca

SEQ ID NO: 259 - DNA, 16 bp, Artificial Sequence
  Synthetic construct
ataacgcaggatggtc

SEQ ID NO: 260 - DNA, 16 bp, Artificial Sequence
  Synthetic construct
ataacgcaggatggtc

SEQ ID NO: 261 - DNA, 16 bp, Artificial Sequence
  Synthetic construct
ataagagcatatgaga

SEQ ID NO: 262 - DNA, 16 bp, Artificial Sequence
  Synthetic construct
ataagagcatatgaga

SEQ ID NO: 263 - DNA, 16 bp, Artificial Sequence
  Synthetic construct
atagacccatgcctaa

SEQ ID NO: 264 - DNA, 16 bp, Artificial Sequence
  Synthetic construct
atagacccatgcctaa

SEQ ID NO: 265 - DNA, 16 bp, Artificial Sequence
  Synthetic construct
atcacgaagtgtggca

SEQ ID NO: 266 - DNA, 16 bp, Artificial Sequence
  Synthetic construct
atcacgaagtgtggca

SEQ ID NO: 267 - DNA, 16 bp, Artificial Sequence
  Synthetic construct
atcacgatccagtatg

SEQ ID NO: 268 - DNA, 16 bp, Artificial Sequence
  Synthetic construct
atcacgatccagtatg

SEQ ID NO: 269 - DNA, 16 bp, Artificial Sequence
  Synthetic construct
atcacgatcctagaac

SEQ ID NO: 270 - DNA, 16 bp, Artificial Sequence
  Synthetic construct
atcacgatcctagaac

SEQ ID NO: 271 - DNA, 16 bp, Artificial Sequence
  Synthetic construct
atcatctgtggtctcg

SEQ ID NO: 272 - DNA, 16 bp, Artificial Sequence
  Synthetic construct
atcatctgtggtctcg

SEQ ID NO: 273 - DNA, 16 bp, Artificial Sequence
  Synthetic construct
atcatcttccgcgttt

SEQ ID NO: 274 - DNA, 16 bp, Artificial Sequence
  Synthetic construct
atcatcttccgcgttt

SEQ ID NO: 275 - DNA, 16 bp, Artificial Sequence
  Synthetic construct
atcatggtcgaactgt

SEQ ID NO: 276 - DNA, 16 bp, Artificial Sequence
  Synthetic construct
atcatggtcgaactgt

SEQ ID NO: 277 - DNA, 16 bp, Artificial Sequence
  Synthetic construct
atccaccagcgagaaa

SEQ ID NO: 278 - DNA, 16 bp, Artificial Sequence
  Synthetic construct
atccaccagcgagaaa

SEQ ID NO: 279 - DNA, 16 bp, Artificial Sequence
  Synthetic construct
atccacccactatctt

SEQ ID NO: 280 - DNA, 16 bp, Artificial Sequence
  Synthetic construct
atccacccactatctt

SEQ ID NO: 281 - DNA, 16 bp, Artificial Sequence
  Synthetic construct
atccacccatgaagta

SEQ ID NO: 282 - DNA, 16 bp, Artificial Sequence
  Synthetic construct
atccacccatgaagta

SEQ ID NO: 283 - DNA, 16 bp, Artificial Sequence
  Synthetic construct
atccacctcgctagcg

SEQ ID NO: 284 - DNA, 16 bp, Artificial Sequence
  Synthetic construct
atccacctcgctagcg

SEQ ID NO: 285 - DNA, 16 bp, Artificial Sequence
  Synthetic construct
atccacctcggatgtt

SEQ ID NO: 286 - DNA, 16 bp, Artificial Sequence
  Synthetic construct
atccacctcggatgtt

SEQ ID NO: 287 - DNA, 16 bp, Artificial Sequence
  Synthetic construct
atccgaaagatcctgt

SEQ ID NO: 288 - DNA, 16 bp, Artificial Sequence
  Synthetic construct
atccgaaagatcctgt

SEQ ID NO: 289 - DNA, 16 bp, Artificial Sequence
  Synthetic construct
atctactcaatccgat

SEQ ID NO: 290 - DNA, 16 bp, Artificial Sequence
  Synthetic construct
atctactcaatccgat

SEQ ID NO: 291 - DNA, 16 bp, Artificial Sequence
  Synthetic construct
atctactcacactgcg

SEQ ID NO: 292 - DNA, 16 bp, Artificial Sequence
  Synthetic construct
atctactcacactgcg

SEQ ID NO: 293 - DNA, 16 bp, Artificial Sequence
  Synthetic construct
atctacttcacctcgt

SEQ ID NO: 294 - DNA, 16 bp, Artificial Sequence
  Synthetic construct
atctacttcacctcgt

SEQ ID NO: 295 - DNA, 16 bp, Artificial Sequence
  Synthetic construct
atctgcccatgaacct

SEQ ID NO: 296 - DNA, 16 bp, Artificial Sequence
  Synthetic construct
atctgcccatgaacct

SEQ ID NO: 297 - DNA, 16 bp, Artificial Sequence
  Synthetic construct
atctgccgtgctcttc

SEQ ID NO: 298 - DNA, 16 bp, Artificial Sequence
  Synthetic construct
atctgccgtgctcttc

SEQ ID NO: 299 - DNA, 16 bp, Artificial Sequence
  Synthetic construct
atgcgatcattcctcg

SEQ ID NO: 300 - DNA, 16 bp, Artificial Sequence
  Synthetic construct
atgcgatcattcctcg

SEQ ID NO: 301 - DNA, 16 bp, Artificial Sequence
  Synthetic construct
atgcgatgtagctgcc

SEQ ID NO: 302 - DNA, 16 bp, Artificial Sequence
  Synthetic construct
atgcgatgtagctgcc

SEQ ID NO: 303 - DNA, 16 bp, Artificial Sequence
  Synthetic construct
atgggagagactcgga

SEQ ID NO: 304 - DNA, 16 bp, Artificial Sequence
  Synthetic construct
atgggagagactcgga

SEQ ID NO: 305 - DNA, 16 bp, Artificial Sequence
  Synthetic construct
atgggagagatatggt

SEQ ID NO: 306 - DNA, 16 bp, Artificial Sequence
  Synthetic construct
atgggagagatatggt

SEQ ID NO: 307 - DNA, 16 bp, Artificial Sequence
  Synthetic construct
atgggaggtctgcaat

SEQ ID NO: 308 - DNA, 16 bp, Artificial Sequence
  Synthetic construct
atgggaggtctgcaat

SEQ ID NO: 309 - DNA, 16 bp, Artificial Sequence
  Synthetic construct
atgtgtgagcgatagc

SEQ ID NO: 310 - DNA, 16 bp, Artificial Sequence
  Synthetic construct
atgtgtgagcgatagc

SEQ ID NO: 311 - DNA, 16 bp, Artificial Sequence
  Synthetic construct
attactccaaagtcaa

SEQ ID NO: 312 - DNA, 16 bp, Artificial Sequence
  Synthetic construct
attactccaaagtcaa

SEQ ID NO: 313 - DNA, 16 bp, Artificial Sequence
  Synthetic construct
attactcgtatggttc

SEQ ID NO: 314 - DNA, 16 bp, Artificial Sequence
  Synthetic construct
attactcgtatggttc

SEQ ID NO: 315 - DNA, 16 bp, Artificial Sequence
  Synthetic construct
attctacagaaacgag

SEQ ID NO: 316 - DNA, 16 bp, Artificial Sequence
  Synthetic construct
attctacagaaacgag

SEQ ID NO: 317 - DNA, 16 bp, Artificial Sequence
  Synthetic construct
attctacagcgacgta

SEQ ID NO: 318 - DNA, 16 bp, Artificial Sequence
  Synthetic construct
attctacagcgacgta

SEQ ID NO: 319 - DNA, 16 bp, Artificial Sequence
  Synthetic construct
attctaccaatcacac

SEQ ID NO: 320 - DNA, 16 bp, Artificial Sequence
  Synthetic construct
attctaccaatcacac

SEQ ID NO: 321 - DNA, 16 bp, Artificial Sequence
  Synthetic construct
attctacgtccatcct

SEQ ID NO: 322 - DNA, 16 bp, Artificial Sequence
  Synthetic construct
attctacgtccatcct

SEQ ID NO: 323 - DNA, 16 bp, Artificial Sequence
  Synthetic construct
attggaccagcatgag

SEQ ID NO: 324 - DNA, 16 bp, Artificial Sequence
  Synthetic construct
attggaccagcatgag

SEQ ID NO: 325 - DNA, 16 bp, Artificial Sequence
  Synthetic construct
attggactcctgcttg

SEQ ID NO: 326 - DNA, 16 bp, Artificial Sequence
  Synthetic construct
attggactcctgcttg

SEQ ID NO: 327 - DNA, 16 bp, Artificial Sequence
  Synthetic construct
attggtggtcgagttt

SEQ ID NO: 328 - DNA, 16 bp, Artificial Sequence
  Synthetic construct
attggtggtcgagttt

SEQ ID NO: 329 - DNA, 16 bp, Artificial Sequence
  Synthetic construct
atttctgaggcgacat

SEQ ID NO: 330 - DNA, 16 bp, Artificial Sequence
  Synthetic construct
atttctgaggcgacat

SEQ ID NO: 331 - DNA, 16 bp, Artificial Sequence
  Synthetic construct
caaccaaagatgggtc

SEQ ID NO: 332 - DNA, 16 bp, Artificial Sequence
  Synthetic construct
caaccaaagatgggtc

SEQ ID NO: 333 - DNA, 16 bp, Artificial Sequence
  Synthetic construct
caaccaagttgaggtg

SEQ ID NO: 334 - DNA, 16 bp, Artificial Sequence
  Synthetic construct
caaccaagttgaggtg

SEQ ID NO: 335 - DNA, 16 bp, Artificial Sequence
  Synthetic construct
caacctcagtcatcca

SEQ ID NO: 336 - DNA, 16 bp, Artificial Sequence
  Synthetic construct
caacctcagtcatcca

SEQ ID NO: 337 - DNA, 16 bp, Artificial Sequence
  Synthetic construct
caactagcatacgcta

SEQ ID NO: 338 - DNA, 16 bp, Artificial Sequence
  Synthetic construct
caactagcatacgcta

SEQ ID NO: 339 - DNA, 16 bp, Artificial Sequence
  Synthetic construct
caagaaaagtagcggt

SEQ ID NO: 340 - DNA, 16 bp, Artificial Sequence
  Synthetic construct
caagaaaagtagcggt

SEQ ID NO: 341 - DNA, 16 bp, Artificial Sequence
  Synthetic construct
caagaaacaggtctcg

SEQ ID NO: 342 - DNA, 16 bp, Artificial Sequence
  Synthetic construct
caagaaacaggtctcg

SEQ ID NO: 343 - DNA, 16 bp, Artificial Sequence
  Synthetic construct
caagaaatctcgcttg

SEQ ID NO: 344 - DNA, 16 bp, Artificial Sequence
  Synthetic construct
caagaaatctcgcttg

SEQ ID NO: 345 - DNA, 16 bp, Artificial Sequence
  Synthetic construct
caagatcagagtgacc

SEQ ID NO: 346 - DNA, 16 bp, Artificial Sequence
  Synthetic construct
caagatcagagtgacc

SEQ ID NO: 347 - DNA, 16 bp, Artificial Sequence
  Synthetic construct
caagatcgtaccgtat

SEQ ID NO: 348 - DNA, 16 bp, Artificial Sequence
  Synthetic construct
caagatcgtaccgtat

SEQ ID NO: 349 - DNA, 16 bp, Artificial Sequence
  Synthetic construct
caagatcgttggtaaa

SEQ ID NO: 350 - DNA, 16 bp, Artificial Sequence
  Synthetic construct
caagatcgttggtaaa

SEQ ID NO: 351 - DNA, 16 bp, Artificial Sequence
  Synthetic construct
caaggccgtctaaaga

SEQ ID NO: 352 - DNA, 16 bp, Artificial Sequence
  Synthetic construct
caaggccgtctaaaga

SEQ ID NO: 353 - DNA, 16 bp, Artificial Sequence
  Synthetic construct
caagttggtgttgagg

SEQ ID NO: 354 - DNA, 16 bp, Artificial Sequence
  Synthetic construct
caagttggtgttgagg

SEQ ID NO: 355 - DNA, 16 bp, Artificial Sequence
  Synthetic construct
caagttggttatcggt

SEQ ID NO: 356 - DNA, 16 bp, Artificial Sequence
  Synthetic construct
caagttggttatcggt

SEQ ID NO: 357 - DNA, 16 bp, Artificial Sequence
  Synthetic construct
cacaaacgtagggact

SEQ ID NO: 358 - DNA, 16 bp, Artificial Sequence
  Synthetic construct
cacaaacgtagggact

SEQ ID NO: 359 - DNA, 16 bp, Artificial Sequence
  Synthetic construct
cacaaacgttaccagt

SEQ ID NO: 360 - DNA, 16 bp, Artificial Sequence
  Synthetic construct
cacaaacgttaccagt

SEQ ID NO: 361 - DNA, 16 bp, Artificial Sequence
  Synthetic construct
cacacaaagtgggatc

SEQ ID NO: 362 - DNA, 16 bp, Artificial Sequence
  Synthetic construct
cacacaaagtgggatc

SEQ ID NO: 363 - DNA, 16 bp, Artificial Sequence
  Synthetic construct
cacacaacagtatctg

SEQ ID NO: 364 - DNA, 16 bp, Artificial Sequence
  Synthetic construct
cacacaacagtatctg

SEQ ID NO: 365 - DNA, 16 bp, Artificial Sequence
  Synthetic construct
cacacaagttatccga

SEQ ID NO: 366 - DNA, 16 bp, Artificial Sequence
  Synthetic construct
cacacaagttatccga

SEQ ID NO: 367 - DNA, 16 bp, Artificial Sequence
  Synthetic construct
cacactccacaccgac

SEQ ID NO: 368 - DNA, 16 bp, Artificial Sequence
  Synthetic construct
cacactccacaccgac

SEQ ID NO: 369 - DNA, 16 bp, Artificial Sequence
  Synthetic construct
cacaggcagaggttat

SEQ ID NO: 370 - DNA, 16 bp, Artificial Sequence
  Synthetic construct
cacaggcagaggttat

SEQ ID NO: 371 - DNA, 16 bp, Artificial Sequence
  Synthetic construct
cacaggcagtatgaca

SEQ ID NO: 372 - DNA, 16 bp, Artificial Sequence
  Synthetic construct
cacaggcagtatgaca

SEQ ID NO: 373 - DNA, 16 bp, Artificial Sequence
  Synthetic construct
cacaggccatgaagta

SEQ ID NO: 374 - DNA, 16 bp, Artificial Sequence
  Synthetic construct
cacaggccatgaagta

SEQ ID NO: 375 - DNA, 16 bp, Artificial Sequence
  Synthetic construct
cacaggctcgcttgtc

SEQ ID NO: 376 - DNA, 16 bp, Artificial Sequence
  Synthetic construct
cacaggctcgcttgtc

SEQ ID NO: 377 - DNA, 16 bp, Artificial Sequence
  Synthetic construct
cacagtacaatctacg

SEQ ID NO: 378 - DNA, 16 bp, Artificial Sequence
  Synthetic construct
cacagtacaatctacg

SEQ ID NO: 379 - DNA, 16 bp, Artificial Sequence
  Synthetic construct
cacagtacacggcgtt

SEQ ID NO: 380 - DNA, 16 bp, Artificial Sequence
  Synthetic construct
cacagtacacggcgtt

SEQ ID NO: 381 - DNA, 16 bp, Artificial Sequence
  Synthetic construct
cacagtacattaaccg

SEQ ID NO: 382 - DNA, 16 bp, Artificial Sequence
  Synthetic construct
cacagtacattaaccg

SEQ ID NO: 383 - DNA, 16 bp, Artificial Sequence
  Synthetic construct
cacagtagtcactggc

SEQ ID NO: 384 - DNA, 16 bp, Artificial Sequence
  Synthetic construct
cacagtagtcactggc

SEQ ID NO: 385 - DNA, 16 bp, Artificial Sequence
  Synthetic construct
cacatagagtttcctt

SEQ ID NO: 386 - DNA, 16 bp, Artificial Sequence
  Synthetic construct
cacatagagtttcctt

SEQ ID NO: 387 - DNA, 16 bp, Artificial Sequence
  Synthetic construct
cacataggtgctgtat

SEQ ID NO: 388 - DNA, 16 bp, Artificial Sequence
  Synthetic construct
cacataggtgctgtat

SEQ ID NO: 389 - DNA, 16 bp, Artificial Sequence
  Synthetic construct
cacataggttccactc

SEQ ID NO: 390 - DNA, 16 bp, Artificial Sequence
  Synthetic construct
cacataggttccactc

SEQ ID NO: 391 - DNA, 16 bp, Artificial Sequence
  Synthetic construct
cacatagtcacaggcc

SEQ ID NO: 392 - DNA, 16 bp, Artificial Sequence
  Synthetic construct
cacatagtcacaggcc

SEQ ID NO: 393 - DNA, 16 bp, Artificial Sequence
  Synthetic construct
cacatttagccatcgc

SEQ ID NO: 394 - DNA, 16 bp, Artificial Sequence
  Synthetic construct
cacatttagccatcgc

SEQ ID NO: 395 - DNA, 16 bp, Artificial Sequence
  Synthetic construct
cacatttgtgttcttt

SEQ ID NO: 396 - DNA, 16 bp, Artificial Sequence
  Synthetic construct
cacatttgtgttcttt

SEQ ID NO: 397 - DNA, 16 bp, Artificial Sequence
  Synthetic construct
cacattttcgcaggct

SEQ ID NO: 398 - DNA, 16 bp, Artificial Sequence
  Synthetic construct
cacattttcgcaggct

SEQ ID NO: 399 - DNA, 16 bp, Artificial Sequence
  Synthetic construct
caccactgtgcggtaa

SEQ ID NO: 400 - DNA, 16 bp, Artificial Sequence
  Synthetic construct
caccactgtgcggtaa

SEQ ID NO: 401 - DNA, 16 bp, Artificial Sequence
  Synthetic construct
caccacttcacagtac

SEQ ID NO: 402 - DNA, 16 bp, Artificial Sequence
  Synthetic construct
caccacttcacagtac

SEQ ID NO: 403 - DNA, 16 bp, Artificial Sequence
  Synthetic construct
caccagggtgctgtat

SEQ ID NO: 404 - DNA, 16 bp, Artificial Sequence
  Synthetic construct
caccagggtgctgtat

SEQ ID NO: 405 - DNA, 16 bp, Artificial Sequence
  Synthetic construct
caccagggtggtgtag

SEQ ID NO: 406 - DNA, 16 bp, Artificial Sequence
  Synthetic construct
caccagggtggtgtag

SEQ ID NO: 407 - DNA, 16 bp, Artificial Sequence
  Synthetic construct
cactccaagatctgaa

SEQ ID NO: 408 - DNA, 16 bp, Artificial Sequence
  Synthetic construct
cactccaagatctgaa

SEQ ID NO: 409 - DNA, 16 bp, Artificial Sequence
  Synthetic construct
cactccaagcgtgaac

SEQ ID NO: 410 - DNA, 16 bp, Artificial Sequence
  Synthetic construct
cactccaagcgtgaac

SEQ ID NO: 411 - DNA, 16 bp, Artificial Sequence
  Synthetic construct
cagaatcagaaacgag

SEQ ID NO: 412 - DNA, 16 bp, Artificial Sequence
  Synthetic construct
cagaatcagaaacgag

SEQ ID NO: 413 - DNA, 16 bp, Artificial Sequence
  Synthetic construct
cagaatccagtacact

SEQ ID NO: 414 - DNA, 16 bp, Artificial Sequence
  Synthetic construct
cagaatccagtacact

SEQ ID NO: 415 - DNA, 16 bp, Artificial Sequence
  Synthetic construct
cagaatcgtctaaaga

SEQ ID NO: 416 - DNA, 16 bp, Artificial Sequence
  Synthetic construct
cagaatcgtctaaaga

SEQ ID NO: 417 - DNA, 16 bp, Artificial Sequence
  Synthetic construct
cagagaggtggtacag

SEQ ID NO: 418 - DNA, 16 bp, Artificial Sequence
  Synthetic construct
cagagaggtggtacag

SEQ ID NO: 419 - DNA, 16 bp, Artificial Sequence
  Synthetic construct
cagcagcagcctcgtg

SEQ ID NO: 420 - DNA, 16 bp, Artificial Sequence
  Synthetic construct
cagcagcagcctcgtg

SEQ ID NO: 421 - DNA, 16 bp, Artificial Sequence
  Synthetic construct
cagcagcaggccatag

SEQ ID NO: 422 - DNA, 16 bp, Artificial Sequence
  Synthetic construct
cagcagcaggccatag

SEQ ID NO: 423 - DNA, 16 bp, Artificial Sequence
  Synthetic construct
cagcagcgtctgattg

SEQ ID NO: 424 - DNA, 16 bp, Artificial Sequence
  Synthetic construct
cagcagcgtctgattg

SEQ ID NO: 425 - DNA, 16 bp, Artificial Sequence
  Synthetic construct
cagcagctcaaacggg

SEQ ID NO: 426 - DNA, 16 bp, Artificial Sequence
  Synthetic construct
cagcagctcaaacggg

SEQ ID NO: 427 - DNA, 16 bp, Artificial Sequence
  Synthetic construct
cagcagctctgcttgc

SEQ ID NO: 428 - DNA, 16 bp, Artificial Sequence
  Synthetic construct
cagcagctctgcttgc

SEQ ID NO: 429 - DNA, 16 bp, Artificial Sequence
  Synthetic construct
cagccgaagtggcaca

SEQ ID NO: 430 - DNA, 16 bp, Artificial Sequence
  Synthetic construct
cagccgaagtggcaca

SEQ ID NO: 431 - DNA, 16 bp, Artificial Sequence
  Synthetic construct
cagccgatccgcgcaa

SEQ ID NO: 432 - DNA, 16 bp, Artificial Sequence
  Synthetic construct
cagccgatccgcgcaa

SEQ ID NO: 433 - DNA, 16 bp, Artificial Sequence
  Synthetic construct
cagcgacagacttgaa

SEQ ID NO: 434 - DNA, 16 bp, Artificial Sequence
  Synthetic construct
cagcgacagacttgaa

SEQ ID NO: 435 - DNA, 16 bp, Artificial Sequence
  Synthetic construct
cagcgaccacatgtgt

SEQ ID NO: 436 - DNA, 16 bp, Artificial Sequence
  Synthetic construct
cagcgaccacatgtgt

SEQ ID NO: 437 - DNA, 16 bp, Artificial Sequence
  Synthetic construct
cagcgacgtccagtta

SEQ ID NO: 438 - DNA, 16 bp, Artificial Sequence
  Synthetic construct
cagcgacgtccagtta

SEQ ID NO: 439 - DNA, 16 bp, Artificial Sequence
  Synthetic construct
cagcgacgtctgccag

SEQ ID NO: 440 - DNA, 16 bp, Artificial Sequence
  Synthetic construct
cagcgacgtctgccag

SEQ ID NO: 441 - DNA, 16 bp, Artificial Sequence
  Synthetic construct
cagctaacacggttta

SEQ ID NO: 442 - DNA, 16 bp, Artificial Sequence
  Synthetic construct
cagctaacacggttta

SEQ ID NO: 443 - DNA, 16 bp, Artificial Sequence
  Synthetic construct
cagctaacagctcgac

SEQ ID NO: 444 - DNA, 16 bp, Artificial Sequence
  Synthetic construct
cagctaacagctcgac

SEQ ID NO: 445 - DNA, 16 bp, Artificial Sequence
  Synthetic construct
cagctaagtaaaggag

SEQ ID NO: 446 - DNA, 16 bp, Artificial Sequence
  Synthetic construct
cagctaagtaaaggag

SEQ ID NO: 447 - DNA, 16 bp, Artificial Sequence
  Synthetic construct
cagctggcaagacacg

SEQ ID NO: 448 - DNA, 16 bp, Artificial Sequence
  Synthetic construct
cagctggcaagacacg

SEQ ID NO: 449 - DNA, 16 bp, Artificial Sequence
  Synthetic construct
cagctggcatgtaaga

SEQ ID NO: 450 - DNA, 16 bp, Artificial Sequence
  Synthetic construct
cagctggcatgtaaga

SEQ ID NO: 451 - DNA, 16 bp, Artificial Sequence
  Synthetic construct
cagctgggtgcaactt

SEQ ID NO: 452 - DNA, 16 bp, Artificial Sequence
  Synthetic construct
cagctgggtgcaactt

SEQ ID NO: 453 - DNA, 16 bp, Artificial Sequence
  Synthetic construct
caggtgcgtttggcgc

SEQ ID NO: 454 - DNA, 16 bp, Artificial Sequence
  Synthetic construct
caggtgcgtttggcgc

SEQ ID NO: 455 - DNA, 16 bp, Artificial Sequence
  Synthetic construct
caggtgctcaggccca

SEQ ID NO: 456 - DNA, 16 bp, Artificial Sequence
  Synthetic construct
caggtgctcaggccca

SEQ ID NO: 457 - DNA, 16 bp, Artificial Sequence
  Synthetic construct
cagtaacgtagctaaa

SEQ ID NO: 458 - DNA, 16 bp, Artificial Sequence
  Synthetic construct
cagtaacgtagctaaa

SEQ ID NO: 459 - DNA, 16 bp, Artificial Sequence
  Synthetic construct
cagtaacgtatgaatg

SEQ ID NO: 460 - DNA, 16 bp, Artificial Sequence
  Synthetic construct
cagtaacgtatgaatg

SEQ ID NO: 461 - DNA, 16 bp, Artificial Sequence
  Synthetic construct
catcaagaggccgaat

SEQ ID NO: 462 - DNA, 16 bp, Artificial Sequence
  Synthetic construct
catcaagaggccgaat

SEQ ID NO: 463 - DNA, 16 bp, Artificial Sequence
  Synthetic construct
catcaaggtccctact

SEQ ID NO: 464 - DNA, 16 bp, Artificial Sequence
  Synthetic construct
catcaaggtccctact

SEQ ID NO: 465 - DNA, 16 bp, Artificial Sequence
  Synthetic construct
catcaaggttgacgtt

SEQ ID NO: 466 - DNA, 16 bp, Artificial Sequence
  Synthetic construct
catcaaggttgacgtt

SEQ ID NO: 467 - DNA, 16 bp, Artificial Sequence
  Synthetic construct
catcagaaggactggt

SEQ ID NO: 468 - DNA, 16 bp, Artificial Sequence
  Synthetic construct
catcagaaggactggt

SEQ ID NO: 469 - DNA, 16 bp, Artificial Sequence
  Synthetic construct
catccaccatcgacgc

SEQ ID NO: 470 - DNA, 16 bp, Artificial Sequence
  Synthetic construct
catccaccatcgacgc

SEQ ID NO: 471 - DNA, 16 bp, Artificial Sequence
  Synthetic construct
catccacgtcgactgc

SEQ ID NO: 472 - DNA, 16 bp, Artificial Sequence
  Synthetic construct
catccacgtcgactgc

SEQ ID NO: 473 - DNA, 16 bp, Artificial Sequence
  Synthetic construct
catcgaagtaccgtta

SEQ ID NO: 474 - DNA, 16 bp, Artificial Sequence
  Synthetic construct
catcgaagtaccgtta

SEQ ID NO: 475 - DNA, 16 bp, Artificial Sequence
  Synthetic construct
catcgaatcggaaata

SEQ ID NO: 476 - DNA, 16 bp, Artificial Sequence
  Synthetic construct
catcgaatcggaaata

SEQ ID NO: 477 - DNA, 16 bp, Artificial Sequence
  Synthetic construct
catcgggtctgtctat

SEQ ID NO: 478 - DNA, 16 bp, Artificial Sequence
  Synthetic construct
catcgggtctgtctat

SEQ ID NO: 479 - DNA, 16 bp, Artificial Sequence
  Synthetic construct
catgacagttgtcttt

SEQ ID NO: 480 - DNA, 16 bp, Artificial Sequence
  Synthetic construct
catgacagttgtcttt

SEQ ID NO: 481 - DNA, 16 bp, Artificial Sequence
  Synthetic construct
catgacatcggcgcat

SEQ ID NO: 482 - DNA, 16 bp, Artificial Sequence
  Synthetic construct
catgacatcggcgcat

SEQ ID NO: 483 - DNA, 16 bp, Artificial Sequence
  Synthetic construct
catgcctagttcgatc

SEQ ID NO: 484 - DNA, 16 bp, Artificial Sequence
  Synthetic construct
catgcctagttcgatc

SEQ ID NO: 485 - DNA, 16 bp, Artificial Sequence
  Synthetic construct
catgcctcatccaaca

SEQ ID NO: 486 - DNA, 16 bp, Artificial Sequence
  Synthetic construct
catgcctcatccaaca

SEQ ID NO: 487 - DNA, 16 bp, Artificial Sequence
  Synthetic construct
catgccttccctgact

SEQ ID NO: 488 - DNA, 16 bp, Artificial Sequence
  Synthetic construct
catgccttccctgact

SEQ ID NO: 489 - DNA, 16 bp, Artificial Sequence
  Synthetic construct
catggcgagcgccttg

SEQ ID NO: 490 - DNA, 16 bp, Artificial Sequence
  Synthetic construct
catggcgagcgccttg

SEQ ID NO: 491 - DNA, 16 bp, Artificial Sequence
  Synthetic construct
catggcgcattaggct

SEQ ID NO: 492 - DNA, 16 bp, Artificial Sequence
  Synthetic construct
catggcgcattaggct

SEQ ID NO: 493 - DNA, 16 bp, Artificial Sequence
  Synthetic construct
cattatcagtcatcca

SEQ ID NO: 494 - DNA, 16 bp, Artificial Sequence
  Synthetic construct
cattatcagtcatcca

SEQ ID NO: 495 - DNA, 16 bp, Artificial Sequence
  Synthetic construct
cattcgctcaactctt

SEQ ID NO: 496 - DNA, 16 bp, Artificial Sequence
  Synthetic construct
cattcgctcaactctt

SEQ ID NO: 497 - DNA, 16 bp, Artificial Sequence
  Synthetic construct
cattcgctcttaacct

SEQ ID NO: 498 - DNA, 16 bp, Artificial Sequence
  Synthetic construct
cattcgctcttaacct

SEQ ID NO: 499 - DNA, 16 bp, Artificial Sequence
  Synthetic construct
ccaatccaggtgatat

SEQ ID NO: 500 - DNA, 16 bp, Artificial Sequence
  Synthetic construct
ccaatccaggtgatat

SEQ ID NO: 501 - DNA, 16 bp, Artificial Sequence
  Synthetic construct
ccaatccgtcagaggt

SEQ ID NO: 502 - DNA, 16 bp, Artificial Sequence
  Synthetic construct
ccaatccgtcagaggt

SEQ ID NO: 503 - DNA, 16 bp, Artificial Sequence
  Synthetic construct
ccacctagttctgaac

SEQ ID NO: 504 - DNA, 16 bp, Artificial Sequence
  Synthetic construct
ccacctagttctgaac

SEQ ID NO: 505 - DNA, 16 bp, Artificial Sequence
  Synthetic construct
ccacggaaggactggt

SEQ ID NO: 506 - DNA, 16 bp, Artificial Sequence
  Synthetic construct
ccacggaaggactggt

SEQ ID NO: 507 - DNA, 16 bp, Artificial Sequence
  Synthetic construct
ccacggacacgccagt

SEQ ID NO: 508 - DNA, 16 bp, Artificial Sequence
  Synthetic construct
ccacggacacgccagt

SEQ ID NO: 509 - DNA, 16 bp, Artificial Sequence
  Synthetic construct
ccacggatcatctgtt

SEQ ID NO: 510 - DNA, 16 bp, Artificial Sequence
  Synthetic construct
ccacggatcatctgtt

SEQ ID NO: 511 - DNA, 16 bp, Artificial Sequence
  Synthetic construct
ccactaccaagttgtc

SEQ ID NO: 512 - DNA, 16 bp, Artificial Sequence
  Synthetic construct
ccactaccaagttgtc

SEQ ID NO: 513 - DNA, 16 bp, Artificial Sequence
  Synthetic construct
ccactaccaccagtta

SEQ ID NO: 514 - DNA, 16 bp, Artificial Sequence
  Synthetic construct
ccactaccaccagtta

SEQ ID NO: 515 - DNA, 16 bp, Artificial Sequence
  Synthetic construct
ccactacgttcggcac

SEQ ID NO: 516 - DNA, 16 bp, Artificial Sequence
  Synthetic construct
ccactacgttcggcac

SEQ ID NO: 517 - DNA, 16 bp, Artificial Sequence
  Synthetic construct
ccagcgagttccatga

SEQ ID NO: 518 - DNA, 16 bp, Artificial Sequence
  Synthetic construct
ccagcgagttccatga

SEQ ID NO: 519 - DNA, 16 bp, Artificial Sequence
  Synthetic construct
ccatgtcagctagtct

SEQ ID NO: 520 - DNA, 16 bp, Artificial Sequence
  Synthetic construct
ccatgtcagctagtct

SEQ ID NO: 521 - DNA, 16 bp, Artificial Sequence
  Synthetic construct
ccatgtccaagccgct

SEQ ID NO: 522 - DNA, 16 bp, Artificial Sequence
  Synthetic construct
ccatgtccaagccgct

SEQ ID NO: 523 - DNA, 16 bp, Artificial Sequence
  Synthetic construct
ccatgtccaccttgtc

SEQ ID NO: 524 - DNA, 16 bp, Artificial Sequence
  Synthetic construct
ccatgtccaccttgtc

SEQ ID NO: 525 - DNA, 16 bp, Artificial Sequence
  Synthetic construct
ccatgtcgtgttcgat

SEQ ID NO: 526 - DNA, 16 bp, Artificial Sequence
  Synthetic construct
ccatgtcgtgttcgat

SEQ ID NO: 527 - DNA, 16 bp, Artificial Sequence
  Synthetic construct
ccatgtctccctaacc

SEQ ID NO: 528 - DNA, 16 bp, Artificial Sequence
  Synthetic construct
ccatgtctccctaacc

SEQ ID NO: 529 - DNA, 16 bp, Artificial Sequence
  Synthetic construct
ccatgtctcctagggc

SEQ ID NO: 530 - DNA, 16 bp, Artificial Sequence
  Synthetic construct
ccatgtctcctagggc

SEQ ID NO: 531 - DNA, 16 bp, Artificial Sequence
  Synthetic construct
ccatgtctcgtaggtt

SEQ ID NO: 532 - DNA, 16 bp, Artificial Sequence
  Synthetic construct
ccatgtctcgtaggtt

SEQ ID NO: 533 - DNA, 16 bp, Artificial Sequence
  Synthetic construct
ccattcgcacttcgaa

SEQ ID NO: 534 - DNA, 16 bp, Artificial Sequence
  Synthetic construct
ccattcgcacttcgaa

SEQ ID NO: 535 - DNA, 16 bp, Artificial Sequence
  Synthetic construct
cccaatcagactaggc

SEQ ID NO: 536 - DNA, 16 bp, Artificial Sequence
  Synthetic construct
cccaatcagactaggc

SEQ ID NO: 537 - DNA, 16 bp, Artificial Sequence
  Synthetic construct
cccaatcgtagcttgt

SEQ ID NO: 538 - DNA, 16 bp, Artificial Sequence
  Synthetic construct
cccaatcgtagcttgt

SEQ ID NO: 539 - DNA, 16 bp, Artificial Sequence
  Synthetic construct
cccagttagtgccaga

SEQ ID NO: 540 - DNA, 16 bp, Artificial Sequence
  Synthetic construct
cccagttagtgccaga

SEQ ID NO: 541 - DNA, 16 bp, Artificial Sequence
  Synthetic construct
cccagtttcccttgca

SEQ ID NO: 542 - DNA, 16 bp, Artificial Sequence
  Synthetic construct
cccagtttcccttgca

SEQ ID NO: 543 - DNA, 16 bp, Artificial Sequence
  Synthetic construct
ccctccttcatgtctt

SEQ ID NO: 544 - DNA, 16 bp, Artificial Sequence
  Synthetic construct
ccctccttcatgtctt

SEQ ID NO: 545 - DNA, 16 bp, Artificial Sequence
  Synthetic construct
ccctccttctctgaga

SEQ ID NO: 546 - DNA, 16 bp, Artificial Sequence
  Synthetic construct
ccctccttctctgaga

SEQ ID NO: 547 - DNA, 16 bp, Artificial Sequence
  Synthetic construct
ccgggatcaacacccg

SEQ ID NO: 548 - DNA, 16 bp, Artificial Sequence
  Synthetic construct
ccgggatcaacacccg

SEQ ID NO: 549 - DNA, 16 bp, Artificial Sequence
  Synthetic construct
ccggtagcatgacatc

SEQ ID NO: 550 - DNA, 16 bp, Artificial Sequence
  Synthetic construct
ccggtagcatgacatc

SEQ ID NO: 551 - DNA, 16 bp, Artificial Sequence
  Synthetic construct
ccggtagcattaggct

SEQ ID NO: 552 - DNA, 16 bp, Artificial Sequence
  Synthetic construct
ccggtagcattaggct

SEQ ID NO: 553 - DNA, 16 bp, Artificial Sequence
  Synthetic construct
ccgtacttcttgagac

SEQ ID NO: 554 - DNA, 16 bp, Artificial Sequence
  Synthetic construct
ccgtacttcttgagac

SEQ ID NO: 555 - DNA, 16 bp, Artificial Sequence
  Synthetic construct
ccgtggatcggcgcta

SEQ ID NO: 556 - DNA, 16 bp, Artificial Sequence
  Synthetic construct
ccgtggatcggcgcta

SEQ ID NO: 557 - DNA, 16 bp, Artificial Sequence
  Synthetic construct
ccgttcaagcccaatt

SEQ ID NO: 558 - DNA, 16 bp, Artificial Sequence
  Synthetic construct
ccgttcaagcccaatt

SEQ ID NO: 559 - DNA, 16 bp, Artificial Sequence
  Synthetic construct
ccgttcatcgtaggtt

SEQ ID NO: 560 - DNA, 16 bp, Artificial Sequence
  Synthetic construct
ccgttcatcgtaggtt

SEQ ID NO: 561 - DNA, 16 bp, Artificial Sequence
  Synthetic construct
cctaaaggtcgccatg

SEQ ID NO: 562 - DNA, 16 bp, Artificial Sequence
  Synthetic construct
cctaaaggtcgccatg

SEQ ID NO: 563 - DNA, 16 bp, Artificial Sequence
  Synthetic construct
cctaaagtcgcatggc

SEQ ID NO: 564 - DNA, 16 bp, Artificial Sequence
  Synthetic construct
cctaaagtcgcatggc

SEQ ID NO: 565 - DNA, 16 bp, Artificial Sequence
  Synthetic construct
cctacaccaacacccg

SEQ ID NO: 566 - DNA, 16 bp, Artificial Sequence
  Synthetic construct
cctacaccaacacccg

SEQ ID NO: 567 - DNA, 16 bp, Artificial Sequence
  Synthetic construct
cctacacgtctagagg

SEQ ID NO: 568 - DNA, 16 bp, Artificial Sequence
  Synthetic construct
cctacacgtctagagg

SEQ ID NO: 569 - DNA, 16 bp, Artificial Sequence
  Synthetic construct
cctaccatcgtttatc

SEQ ID NO: 570 - DNA, 16 bp, Artificial Sequence
  Synthetic construct
cctaccatcgtttatc

SEQ ID NO: 571 - DNA, 16 bp, Artificial Sequence
  Synthetic construct
cctagctcagtcttcc

SEQ ID NO: 572 - DNA, 16 bp, Artificial Sequence
  Synthetic construct
cctagctcagtcttcc

SEQ ID NO: 573 - DNA, 16 bp, Artificial Sequence
  Synthetic construct
cctagcttccaagccg

SEQ ID NO: 574 - DNA, 16 bp, Artificial Sequence
  Synthetic construct
cctagcttccaagccg

SEQ ID NO: 575 - DNA, 16 bp, Artificial Sequence
  Synthetic construct
cctattagtttgttgg

SEQ ID NO: 576 - DNA, 16 bp, Artificial Sequence
  Synthetic construct
cctattagtttgttgg

SEQ ID NO: 577 - DNA, 16 bp, Artificial Sequence
  Synthetic construct
cctctgaaggctacga

SEQ ID NO: 578 - DNA, 16 bp, Artificial Sequence
  Synthetic construct
cctctgaaggctacga

SEQ ID NO: 579 - DNA, 16 bp, Artificial Sequence
  Synthetic construct
ccttacggtatatgga

SEQ ID NO: 580 - DNA, 16 bp, Artificial Sequence
  Synthetic construct
ccttacggtatatgga

SEQ ID NO: 581 - DNA, 16 bp, Artificial Sequence
  Synthetic construct
ccttacgtcgacagcc

SEQ ID NO: 582 - DNA, 16 bp, Artificial Sequence
  Synthetic construct
ccttacgtcgacagcc

SEQ ID NO: 583 - DNA, 16 bp, Artificial Sequence
  Synthetic construct
ccttccccaaagtcaa

SEQ ID NO: 584 - DNA, 16 bp, Artificial Sequence
  Synthetic construct
ccttccccaaagtcaa

SEQ ID NO: 585 - DNA, 16 bp, Artificial Sequence
  Synthetic construct
ccttccctcgcttgtc

SEQ ID NO: 586 - DNA, 16 bp, Artificial Sequence
  Synthetic construct
ccttccctcgcttgtc

SEQ ID NO: 587 - DNA, 16 bp, Artificial Sequence
  Synthetic construct
cctttcttcacccgag

SEQ ID NO: 588 - DNA, 16 bp, Artificial Sequence
  Synthetic construct
cctttcttcacccgag

SEQ ID NO: 589 - DNA, 16 bp, Artificial Sequence
  Synthetic construct
cctttcttcagtccct

SEQ ID NO: 590 - DNA, 16 bp, Artificial Sequence
  Synthetic construct
cctttcttcagtccct

SEQ ID NO: 591 - DNA, 16 bp, Artificial Sequence
  Synthetic construct
cgaacataggtgctag

SEQ ID NO: 592 - DNA, 16 bp, Artificial Sequence
  Synthetic construct
cgaacataggtgctag

SEQ ID NO: 593 - DNA, 16 bp, Artificial Sequence
  Synthetic construct
cgaacatcaaattgcc

SEQ ID NO: 594 - DNA, 16 bp, Artificial Sequence
  Synthetic construct
cgaacatcaaattgcc

SEQ ID NO: 595 - DNA, 16 bp, Artificial Sequence
  Synthetic construct
cgaacatcattacctt

SEQ ID NO: 596 - DNA, 16 bp, Artificial Sequence
  Synthetic construct
cgaacatcattacctt

SEQ ID NO: 597 - DNA, 16 bp, Artificial Sequence
  Synthetic construct
cgaacatcatttcagg

SEQ ID NO: 598 - DNA, 16 bp, Artificial Sequence
  Synthetic construct
cgaacatcatttcagg

SEQ ID NO: 599 - DNA, 16 bp, Artificial Sequence
  Synthetic construct
cgaacattctacttac

SEQ ID NO: 600 - DNA, 16 bp, Artificial Sequence
  Synthetic construct
cgaacattctacttac

SEQ ID NO: 601 - DNA, 16 bp, Artificial Sequence
  Synthetic construct
cgacttcagactaggc

SEQ ID NO: 602 - DNA, 16 bp, Artificial Sequence
  Synthetic construct
cgacttcagactaggc

SEQ ID NO: 603 - DNA, 16 bp, Artificial Sequence
  Synthetic construct
cgacttcgtaaatgac

SEQ ID NO: 604 - DNA, 16 bp, Artificial Sequence
  Synthetic construct
cgacttcgtaaatgac

SEQ ID NO: 605 - DNA, 16 bp, Artificial Sequence
  Synthetic construct
cgagaaggtccgagtc

SEQ ID NO: 606 - DNA, 16 bp, Artificial Sequence
  Synthetic construct
cgagaaggtccgagtc

SEQ ID NO: 607 - DNA, 16 bp, Artificial Sequence
  Synthetic construct
cgagaagtcgtccagg

SEQ ID NO: 608 - DNA, 16 bp, Artificial Sequence
  Synthetic construct
cgagaagtcgtccagg

SEQ ID NO: 609 - DNA, 16 bp, Artificial Sequence
  Synthetic construct
cgagcacgtgtcaatc

SEQ ID NO: 610 - DNA, 16 bp, Artificial Sequence
  Synthetic construct
cgagcacgtgtcaatc

SEQ ID NO: 611 - DNA, 16 bp, Artificial Sequence
  Synthetic construct
cgagcactctggagcc

SEQ ID NO: 612 - DNA, 16 bp, Artificial Sequence
  Synthetic construct
cgagcactctggagcc

SEQ ID NO: 613 - DNA, 16 bp, Artificial Sequence
  Synthetic construct
cgagccaagtgcgtga

SEQ ID NO: 614 - DNA, 16 bp, Artificial Sequence
  Synthetic construct
cgagccaagtgcgtga

SEQ ID NO: 615 - DNA, 16 bp, Artificial Sequence
  Synthetic construct
cgagccacaaagcaat

SEQ ID NO: 616 - DNA, 16 bp, Artificial Sequence
  Synthetic construct
cgagccacaaagcaat

SEQ ID NO: 617 - DNA, 16 bp, Artificial Sequence
  Synthetic construct
cgagccagtaagagag

SEQ ID NO: 618 - DNA, 16 bp, Artificial Sequence
  Synthetic construct
cgagccagtaagagag

SEQ ID NO: 619 - DNA, 16 bp, Artificial Sequence
  Synthetic construct
cgagccagtgttgagg

SEQ ID NO: 620 - DNA, 16 bp, Artificial Sequence
  Synthetic construct
cgagccagtgttgagg

SEQ ID NO: 621 - DNA, 16 bp, Artificial Sequence
  Synthetic construct
cgatggcagtgtactc

SEQ ID NO: 622 - DNA, 16 bp, Artificial Sequence
  Synthetic construct
cgatggcagtgtactc

SEQ ID NO: 623 - DNA, 16 bp, Artificial Sequence
  Synthetic construct
cgatggcgttaagaca

SEQ ID NO: 624 - DNA, 16 bp, Artificial Sequence
  Synthetic construct
cgatggcgttaagaca

SEQ ID NO: 625 - DNA, 16 bp, Artificial Sequence
  Synthetic construct
cgatggcgtttgtgtg

SEQ ID NO: 626 - DNA, 16 bp, Artificial Sequence
  Synthetic construct
cgatggcgtttgtgtg

SEQ ID NO: 627 - DNA, 16 bp, Artificial Sequence
  Synthetic construct
cgatggctcgtttagg

SEQ ID NO: 628 - DNA, 16 bp, Artificial Sequence
  Synthetic construct
cgatggctcgtttagg

SEQ ID NO: 629 - DNA, 16 bp, Artificial Sequence
  Synthetic construct
cgatggctcttaacct

SEQ ID NO: 630 - DNA, 16 bp, Artificial Sequence
  Synthetic construct
cgatggctcttaacct

SEQ ID NO: 631 - DNA, 16 bp, Artificial Sequence
  Synthetic construct
cgatgtagtatagggc

SEQ ID NO: 632 - DNA, 16 bp, Artificial Sequence
  Synthetic construct
cgatgtagtatagggc

SEQ ID NO: 633 - DNA, 16 bp, Artificial Sequence
  Synthetic construct
cgatgtatcggcgcat

SEQ ID NO: 634 - DNA, 16 bp, Artificial Sequence
  Synthetic construct
cgatgtatcggcgcat

SEQ ID NO: 635 - DNA, 16 bp, Artificial Sequence
  Synthetic construct
cgattgagtaagggct

SEQ ID NO: 636 - DNA, 16 bp, Artificial Sequence
  Synthetic construct
cgattgagtaagggct

SEQ ID NO: 637 - DNA, 16 bp, Artificial Sequence
  Synthetic construct
cgattgatcttgacga

SEQ ID NO: 638 - DNA, 16 bp, Artificial Sequence
  Synthetic construct
cgattgatcttgacga

SEQ ID NO: 639 - DNA, 16 bp, Artificial Sequence
  Synthetic construct
cgcggtacagatgagc

SEQ ID NO: 640 - DNA, 16 bp, Artificial Sequence
  Synthetic construct
cgcggtacagatgagc

SEQ ID NO: 641 - DNA, 16 bp, Artificial Sequence
  Synthetic construct
cgcggtacatgagcga

SEQ ID NO: 642 - DNA, 16 bp, Artificial Sequence
  Synthetic construct
cgcggtacatgagcga

SEQ ID NO: 643 - DNA, 16 bp, Artificial Sequence
  Synthetic construct
cgcggtatcctagtga

SEQ ID NO: 644 - DNA, 16 bp, Artificial Sequence
  Synthetic construct
cgcggtatcctagtga

SEQ ID NO: 645 - DNA, 16 bp, Artificial Sequence
  Synthetic construct
cgcggtatcgcgtagc

SEQ ID NO: 646 - DNA, 16 bp, Artificial Sequence
  Synthetic construct
cgcggtatcgcgtagc

SEQ ID NO: 647 - DNA, 16 bp, Artificial Sequence
  Synthetic construct
cgcgtttaggcaaaga

SEQ ID NO: 648 - DNA, 16 bp, Artificial Sequence
  Synthetic construct
cgcgtttaggcaaaga

SEQ ID NO: 649 - DNA, 16 bp, Artificial Sequence
  Synthetic construct
cgcgtttgtctagtca

SEQ ID NO: 650 - DNA, 16 bp, Artificial Sequence
  Synthetic construct
cgcgtttgtctagtca

SEQ ID NO: 651 - DNA, 16 bp, Artificial Sequence
  Synthetic construct
cgcgtttgttgcgtta

SEQ ID NO: 652 - DNA, 16 bp, Artificial Sequence
  Synthetic construct
cgcgtttgttgcgtta

SEQ ID NO: 653 - DNA, 16 bp, Artificial Sequence
  Synthetic construct
cgctggatcagcttag

SEQ ID NO: 654 - DNA, 16 bp, Artificial Sequence
  Synthetic construct
cgctggatcagcttag

SEQ ID NO: 655 - DNA, 16 bp, Artificial Sequence
  Synthetic construct
cgctggatcggcggtt

SEQ ID NO: 656 - DNA, 16 bp, Artificial Sequence
  Synthetic construct
cgctggatcggcggtt

SEQ ID NO: 657 - DNA, 16 bp, Artificial Sequence
  Synthetic construct
cgcttcaagagtaatc

SEQ ID NO: 658 - DNA, 16 bp, Artificial Sequence
  Synthetic construct
cgcttcaagagtaatc

SEQ ID NO: 659 - DNA, 16 bp, Artificial Sequence
  Synthetic construct
cgcttcagtcaaagcg

SEQ ID NO: 660 - DNA, 16 bp, Artificial Sequence
  Synthetic construct
cgcttcagtcaaagcg

SEQ ID NO: 661 - DNA, 16 bp, Artificial Sequence
  Synthetic construct
cgcttcagttaagggc

SEQ ID NO: 662 - DNA, 16 bp, Artificial Sequence
  Synthetic construct
cgcttcagttaagggc

SEQ ID NO: 663 - DNA, 16 bp, Artificial Sequence
  Synthetic construct
cgcttcatccgaatgt

SEQ ID NO: 664 - DNA, 16 bp, Artificial Sequence
  Synthetic construct
cgcttcatccgaatgt

SEQ ID NO: 665 - DNA, 16 bp, Artificial Sequence
  Synthetic construct
cggacaccaaacaaca

SEQ ID NO: 666 - DNA, 16 bp, Artificial Sequence
  Synthetic construct
cggacaccaaacaaca

SEQ ID NO: 667 - DNA, 16 bp, Artificial Sequence
  Synthetic construct
cggacaccacagcgtc

SEQ ID NO: 668 - DNA, 16 bp, Artificial Sequence
  Synthetic construct
cggacaccacagcgtc

SEQ ID NO: 669 - DNA, 16 bp, Artificial Sequence
  Synthetic construct
cggacacgtccgtgac

SEQ ID NO: 670 - DNA, 16 bp, Artificial Sequence
  Synthetic construct
cggacacgtccgtgac

SEQ ID NO: 671 - DNA, 16 bp, Artificial Sequence
  Synthetic construct
cggacgtagccaggat

SEQ ID NO: 672 - DNA, 16 bp, Artificial Sequence
  Synthetic construct
cggacgtagccaggat

SEQ ID NO: 673 - DNA, 16 bp, Artificial Sequence
  Synthetic construct
cggactggtacctaca

SEQ ID NO: 674 - DNA, 16 bp, Artificial Sequence
  Synthetic construct
cggactggtacctaca

SEQ ID NO: 675 - DNA, 16 bp, Artificial Sequence
  Synthetic construct
cggagctagtggagaa

SEQ ID NO: 676 - DNA, 16 bp, Artificial Sequence
  Synthetic construct
cggagctagtggagaa

SEQ ID NO: 677 - DNA, 16 bp, Artificial Sequence
  Synthetic construct
cggagctcaccaggtc

SEQ ID NO: 678 - DNA, 16 bp, Artificial Sequence
  Synthetic construct
cggagctcaccaggtc

SEQ ID NO: 679 - DNA, 16 bp, Artificial Sequence
  Synthetic construct
cggagtcagacctttg

SEQ ID NO: 680 - DNA, 16 bp, Artificial Sequence
  Synthetic construct
cggagtcagacctttg

SEQ ID NO: 681 - DNA, 16 bp, Artificial Sequence
  Synthetic construct
cggagtcagccagaac

SEQ ID NO: 682 - DNA, 16 bp, Artificial Sequence
  Synthetic construct
cggagtcagccagaac

SEQ ID NO: 683 - DNA, 16 bp, Artificial Sequence
  Synthetic construct
cggagtcgtgcctgtg

SEQ ID NO: 684 - DNA, 16 bp, Artificial Sequence
  Synthetic construct
cggagtcgtgcctgtg

SEQ ID NO: 685 - DNA, 16 bp, Artificial Sequence
  Synthetic construct
cggctagagtgtctca

SEQ ID NO: 686 - DNA, 16 bp, Artificial Sequence
  Synthetic construct
cggctagagtgtctca

SEQ ID NO: 687 - DNA, 16 bp, Artificial Sequence
  Synthetic construct
cggctagtcaaaccac

SEQ ID NO: 688 - DNA, 16 bp, Artificial Sequence
  Synthetic construct
cggctagtcaaaccac

SEQ ID NO: 689 - DNA, 16 bp, Artificial Sequence
  Synthetic construct
cgggtcacacgacgaa

SEQ ID NO: 690 - DNA, 16 bp, Artificial Sequence
  Synthetic construct
cgggtcacacgacgaa

SEQ ID NO: 691 - DNA, 16 bp, Artificial Sequence
  Synthetic construct
cggttaaaggctatct

SEQ ID NO: 692 - DNA, 16 bp, Artificial Sequence
  Synthetic construct
cggttaaaggctatct

SEQ ID NO: 693 - DNA, 16 bp, Artificial Sequence
  Synthetic construct
cggttaacaattcctt

SEQ ID NO: 694 - DNA, 16 bp, Artificial Sequence
  Synthetic construct
cggttaacaattcctt

SEQ ID NO: 695 - DNA, 16 bp, Artificial Sequence
  Synthetic construct
cgtagcgcatttgctt

SEQ ID NO: 696 - DNA, 16 bp, Artificial Sequence
  Synthetic construct
cgtagcgcatttgctt

SEQ ID NO: 697 - DNA, 16 bp, Artificial Sequence
  Synthetic construct
cgtagcggttactgac

SEQ ID NO: 698 - DNA, 16 bp, Artificial Sequence
  Synthetic construct
cgtagcggttactgac

SEQ ID NO: 699 - DNA, 16 bp, Artificial Sequence
  Synthetic construct
cgtagcggttattctc

SEQ ID NO: 700 - DNA, 16 bp, Artificial Sequence
  Synthetic construct
cgtagcggttattctc

SEQ ID NO: 701 - DNA, 16 bp, Artificial Sequence
  Synthetic construct
cgtaggccacagacag

SEQ ID NO: 702 - DNA, 16 bp, Artificial Sequence
  Synthetic construct
cgtaggccacagacag

SEQ ID NO: 703 - DNA, 16 bp, Artificial Sequence
  Synthetic construct
cgtaggctcagtccct

SEQ ID NO: 704 - DNA, 16 bp, Artificial Sequence
  Synthetic construct
cgtaggctcagtccct

SEQ ID NO: 705 - DNA, 16 bp, Artificial Sequence
  Synthetic construct
cgtcactagatcgggt

SEQ ID NO: 706 - DNA, 16 bp, Artificial Sequence
  Synthetic construct
cgtcactagatcgggt

SEQ ID NO: 707 - DNA, 16 bp, Artificial Sequence
  Synthetic construct
cgtcacttctatccta

SEQ ID NO: 708 - DNA, 16 bp, Artificial Sequence
  Synthetic construct
cgtcacttctatccta

SEQ ID NO: 709 - DNA, 16 bp, Artificial Sequence
  Synthetic construct
cgtcaggagactaggc

SEQ ID NO: 710 - DNA, 16 bp, Artificial Sequence
  Synthetic construct
cgtcaggagactaggc

SEQ ID NO: 711 - DNA, 16 bp, Artificial Sequence
  Synthetic construct
cgtccatcatagactc

SEQ ID NO: 712 - DNA, 16 bp, Artificial Sequence
  Synthetic construct
cgtccatcatagactc

SEQ ID NO: 713 - DNA, 16 bp, Artificial Sequence
  Synthetic construct
cgtgagccagacactt

SEQ ID NO: 714 - DNA, 16 bp, Artificial Sequence
  Synthetic construct
cgtgagccagacactt

SEQ ID NO: 715 - DNA, 16 bp, Artificial Sequence
  Synthetic construct
cgtgagccatctacga

SEQ ID NO: 716 - DNA, 16 bp, Artificial Sequence
  Synthetic construct
cgtgagccatctacga

SEQ ID NO: 717 - DNA, 16 bp, Artificial Sequence
  Synthetic construct
cgtgtaacaatgtaag

SEQ ID NO: 718 - DNA, 16 bp, Artificial Sequence
  Synthetic construct
cgtgtaacaatgtaag

SEQ ID NO: 719 - DNA, 16 bp, Artificial Sequence
  Synthetic construct
cgtgtaagttatccga

SEQ ID NO: 720 - DNA, 16 bp, Artificial Sequence
  Synthetic construct
cgtgtaagttatccga

SEQ ID NO: 721 - DNA, 16 bp, Artificial Sequence
  Synthetic construct
cgttagagtagctgcc

SEQ ID NO: 722 - DNA, 16 bp, Artificial Sequence
  Synthetic construct
cgttagagtagctgcc

SEQ ID NO: 723 - DNA, 16 bp, Artificial Sequence
  Synthetic construct
cgttagatcaccgtaa

SEQ ID NO: 724 - DNA, 16 bp, Artificial Sequence
  Synthetic construct
cgttagatcaccgtaa

SEQ ID NO: 725 - DNA, 16 bp, Artificial Sequence
  Synthetic construct
cgttgggagcatcatc

SEQ ID NO: 726 - DNA, 16 bp, Artificial Sequence
  Synthetic construct
cgttgggagcatcatc

SEQ ID NO: 727 - DNA, 16 bp, Artificial Sequence
  Synthetic construct
cgttgggtcgttgaca

SEQ ID NO: 728 - DNA, 16 bp, Artificial Sequence
  Synthetic construct
cgttgggtcgttgaca

SEQ ID NO: 729 - DNA, 16 bp, Artificial Sequence
  Synthetic construct
ctaactttcccattta

SEQ ID NO: 730 - DNA, 16 bp, Artificial Sequence
  Synthetic construct
ctaactttcccattta

SEQ ID NO: 731 - DNA, 16 bp, Artificial Sequence
  Synthetic construct
ctaagaccatgcaatc

SEQ ID NO: 732 - DNA, 16 bp, Artificial Sequence
  Synthetic construct
ctaagaccatgcaatc

SEQ ID NO: 733 - DNA, 16 bp, Artificial Sequence
  Synthetic construct
ctaagactcctttaca

SEQ ID NO: 734 - DNA, 16 bp, Artificial Sequence
  Synthetic construct
ctaagactcctttaca

SEQ ID NO: 735 - DNA, 16 bp, Artificial Sequence
  Synthetic construct
ctaatggagctaactc

SEQ ID NO: 736 - DNA, 16 bp, Artificial Sequence
  Synthetic construct
ctaatggagctaactc

SEQ ID NO: 737 - DNA, 16 bp, Artificial Sequence
  Synthetic construct
ctaatggtccacgtgg

SEQ ID NO: 738 - DNA, 16 bp, Artificial Sequence
  Synthetic construct
ctaatggtccacgtgg

SEQ ID NO: 739 - DNA, 16 bp, Artificial Sequence
  Synthetic construct
ctaatggtctcgatga

SEQ ID NO: 740 - DNA, 16 bp, Artificial Sequence
  Synthetic construct
ctaatggtctcgatga

SEQ ID NO: 741 - DNA, 16 bp, Artificial Sequence
  Synthetic construct
ctacccaagacagaga

SEQ ID NO: 742 - DNA, 16 bp, Artificial Sequence
  Synthetic construct
ctacccaagacagaga

SEQ ID NO: 743 - DNA, 16 bp, Artificial Sequence
  Synthetic construct
ctacccaagagacgaa

SEQ ID NO: 744 - DNA, 16 bp, Artificial Sequence
  Synthetic construct
ctacccaagagacgaa

SEQ ID NO: 745 - DNA, 16 bp, Artificial Sequence
  Synthetic construct
ctacccaaggattcgg

SEQ ID NO: 746 - DNA, 16 bp, Artificial Sequence
  Synthetic construct
ctacccaaggattcgg

SEQ ID NO: 747 - DNA, 16 bp, Artificial Sequence
  Synthetic construct
ctacccagtacccaat

SEQ ID NO: 748 - DNA, 16 bp, Artificial Sequence
  Synthetic construct
ctacccagtacccaat

SEQ ID NO: 749 - DNA, 16 bp, Artificial Sequence
  Synthetic construct
ctagagtagccggtaa

SEQ ID NO: 750 - DNA, 16 bp, Artificial Sequence
  Synthetic construct
ctagagtagccggtaa

SEQ ID NO: 751 - DNA, 16 bp, Artificial Sequence
  Synthetic construct
ctagcctagcaggtca

SEQ ID NO: 752 - DNA, 16 bp, Artificial Sequence
  Synthetic construct
ctagcctagcaggtca

SEQ ID NO: 753 - DNA, 16 bp, Artificial Sequence
  Synthetic construct
ctagcctaggcccttg

SEQ ID NO: 754 - DNA, 16 bp, Artificial Sequence
  Synthetic construct
ctagcctaggcccttg

SEQ ID NO: 755 - DNA, 16 bp, Artificial Sequence
  Synthetic construct
ctagcctcaagttctg

SEQ ID NO: 756 - DNA, 16 bp, Artificial Sequence
  Synthetic construct
ctagcctcaagttctg

SEQ ID NO: 757 - DNA, 16 bp, Artificial Sequence
  Synthetic construct
ctagcctcactacagt

SEQ ID NO: 758 - DNA, 16 bp, Artificial Sequence
  Synthetic construct
ctagcctcactacagt

SEQ ID NO: 759 - DNA, 16 bp, Artificial Sequence
  Synthetic construct
ctagcctgtaaagtca

SEQ ID NO: 760 - DNA, 16 bp, Artificial Sequence
  Synthetic construct
ctagcctgtaaagtca

SEQ ID NO: 761 - DNA, 16 bp, Artificial Sequence
  Synthetic construct
ctagcctgtctctcgt

SEQ ID NO: 762 - DNA, 16 bp, Artificial Sequence
  Synthetic construct
ctagcctgtctctcgt

SEQ ID NO: 763 - DNA, 16 bp, Artificial Sequence
  Synthetic construct
ctagtgagtcttcgtc

SEQ ID NO: 764 - DNA, 16 bp, Artificial Sequence
  Synthetic construct
ctagtgagtcttcgtc

SEQ ID NO: 765 - DNA, 16 bp, Artificial Sequence
  Synthetic construct
ctcacacaggacacca

SEQ ID NO: 766 - DNA, 16 bp, Artificial Sequence
  Synthetic construct
ctcacacaggacacca

SEQ ID NO: 767 - DNA, 16 bp, Artificial Sequence
  Synthetic construct
ctcacaccatataccg

SEQ ID NO: 768 - DNA, 16 bp, Artificial Sequence
  Synthetic construct
ctcacaccatataccg

SEQ ID NO: 769 - DNA, 16 bp, Artificial Sequence
  Synthetic construct
ctcacacgtaagggct

SEQ ID NO: 770 - DNA, 16 bp, Artificial Sequence
  Synthetic construct
ctcacacgtaagggct

SEQ ID NO: 771 - DNA, 16 bp, Artificial Sequence
  Synthetic construct
ctcacacgtcatgccg

SEQ ID NO: 772 - DNA, 16 bp, Artificial Sequence
  Synthetic construct
ctcacacgtcatgccg

SEQ ID NO: 773 - DNA, 16 bp, Artificial Sequence
  Synthetic construct
ctcagaacaatagcaa

SEQ ID NO: 774 - DNA, 16 bp, Artificial Sequence
  Synthetic construct
ctcagaacaatagcaa

SEQ ID NO: 775 - DNA, 16 bp, Artificial Sequence
  Synthetic construct
ctcagaagttgagttc

SEQ ID NO: 776 - DNA, 16 bp, Artificial Sequence
  Synthetic construct
ctcagaagttgagttc

SEQ ID NO: 777 - DNA, 16 bp, Artificial Sequence
  Synthetic construct
ctcagaatcacgcata

SEQ ID NO: 778 - DNA, 16 bp, Artificial Sequence
  Synthetic construct
ctcagaatcacgcata

SEQ ID NO: 779 - DNA, 16 bp, Artificial Sequence
  Synthetic construct
ctcagaatcactattc

SEQ ID NO: 780 - DNA, 16 bp, Artificial Sequence
  Synthetic construct
ctcagaatcactattc

SEQ ID NO: 781 - DNA, 16 bp, Artificial Sequence
  Synthetic construct
ctcattaagtggagaa

SEQ ID NO: 782 - DNA, 16 bp, Artificial Sequence
  Synthetic construct
ctcattaagtggagaa

SEQ ID NO: 783 - DNA, 16 bp, Artificial Sequence
  Synthetic construct
ctcattacaccatcct

SEQ ID NO: 784 - DNA, 16 bp, Artificial Sequence
  Synthetic construct
ctcattacaccatcct

SEQ ID NO: 785 - DNA, 16 bp, Artificial Sequence
  Synthetic construct
ctcattacagctggct

SEQ ID NO: 786 - DNA, 16 bp, Artificial Sequence
  Synthetic construct
ctcattacagctggct

SEQ ID NO: 787 - DNA, 16 bp, Artificial Sequence
  Synthetic construct
ctcattacatcgattg

SEQ ID NO: 788 - DNA, 16 bp, Artificial Sequence
  Synthetic construct
ctcattacatcgattg

SEQ ID NO: 789 - DNA, 16 bp, Artificial Sequence
  Synthetic construct
ctcattatcaaagaca

SEQ ID NO: 790 - DNA, 16 bp, Artificial Sequence
  Synthetic construct
ctcattatcaaagaca

SEQ ID NO: 791 - DNA, 16 bp, Artificial Sequence
  Synthetic construct
ctcctagcatgttgac

SEQ ID NO: 792 - DNA, 16 bp, Artificial Sequence
  Synthetic construct
ctcctagcatgttgac

SEQ ID NO: 793 - DNA, 16 bp, Artificial Sequence
  Synthetic construct
ctcctaggtcaatgtc

SEQ ID NO: 794 - DNA, 16 bp, Artificial Sequence
  Synthetic construct
ctcctaggtcaatgtc

SEQ ID NO: 795 - DNA, 16 bp, Artificial Sequence
  Synthetic construct
ctcgaaagtaaacctc

SEQ ID NO: 796 - DNA, 16 bp, Artificial Sequence
  Synthetic construct
ctcgaaagtaaacctc

SEQ ID NO: 797 - DNA, 16 bp, Artificial Sequence
  Synthetic construct
ctcgaaatcaagccta

SEQ ID NO: 798 - DNA, 16 bp, Artificial Sequence
  Synthetic construct
ctcgaaatcaagccta

SEQ ID NO: 799 - DNA, 16 bp, Artificial Sequence
  Synthetic construct
ctcgaggagtcaatag

SEQ ID NO: 800 - DNA, 16 bp, Artificial Sequence
  Synthetic construct
ctcgaggagtcaatag

SEQ ID NO: 801 - DNA, 16 bp, Artificial Sequence
  Synthetic construct
ctcgaggagtgttgaa

SEQ ID NO: 802 - DNA, 16 bp, Artificial Sequence
  Synthetic construct
ctcgaggagtgttgaa

SEQ ID NO: 803 - DNA, 16 bp, Artificial Sequence
  Synthetic construct
ctcgggaagacccacc

SEQ ID NO: 804 - DNA, 16 bp, Artificial Sequence
  Synthetic construct
ctcgggaagacccacc

SEQ ID NO: 805 - DNA, 16 bp, Artificial Sequence
  Synthetic construct
ctcgggaaggcaggtt

SEQ ID NO: 806 - DNA, 16 bp, Artificial Sequence
  Synthetic construct
ctcgggaaggcaggtt

SEQ ID NO: 807 - DNA, 16 bp, Artificial Sequence
  Synthetic construct
ctcgggacagttaacc

SEQ ID NO: 808 - DNA, 16 bp, Artificial Sequence
  Synthetic construct
ctcgggacagttaacc

SEQ ID NO: 809 - DNA, 16 bp, Artificial Sequence
  Synthetic construct
ctcgggagttcccgag

SEQ ID NO: 810 - DNA, 16 bp, Artificial Sequence
  Synthetic construct
ctcgggagttcccgag

SEQ ID NO: 811 - DNA, 16 bp, Artificial Sequence
  Synthetic construct
ctcgtcacaatgtaag

SEQ ID NO: 812 - DNA, 16 bp, Artificial Sequence
  Synthetic construct
ctcgtcacaatgtaag

SEQ ID NO: 813 - DNA, 16 bp, Artificial Sequence
  Synthetic construct
ctcgtcagtgtcctct

SEQ ID NO: 814 - DNA, 16 bp, Artificial Sequence
  Synthetic construct
ctcgtcagtgtcctct

SEQ ID NO: 815 - DNA, 16 bp, Artificial Sequence
  Synthetic construct
ctcgtcatccgttgct

SEQ ID NO: 816 - DNA, 16 bp, Artificial Sequence
  Synthetic construct
ctcgtcatccgttgct

SEQ ID NO: 817 - DNA, 16 bp, Artificial Sequence
  Synthetic construct
ctctaatgtccgtcag

SEQ ID NO: 818 - DNA, 16 bp, Artificial Sequence
  Synthetic construct
ctctaatgtccgtcag

SEQ ID NO: 819 - DNA, 16 bp, Artificial Sequence
  Synthetic construct
ctctaatgtctcacct

SEQ ID NO: 820 - DNA, 16 bp, Artificial Sequence
  Synthetic construct
ctctaatgtctcacct

SEQ ID NO: 821 - DNA, 16 bp, Artificial Sequence
  Synthetic construct
ctctaattcgtttatc

SEQ ID NO: 822 - DNA, 16 bp, Artificial Sequence
  Synthetic construct
ctctaattcgtttatc

SEQ ID NO: 823 - DNA, 16 bp, Artificial Sequence
  Synthetic construct
ctctacgagtgcgatg

SEQ ID NO: 824 - DNA, 16 bp, Artificial Sequence
  Synthetic construct
ctctacgagtgcgatg

SEQ ID NO: 825 - DNA, 16 bp, Artificial Sequence
  Synthetic construct
ctctacgtcacgacta

SEQ ID NO: 826 - DNA, 16 bp, Artificial Sequence
  Synthetic construct
ctctacgtcacgacta

SEQ ID NO: 827 - DNA, 16 bp, Artificial Sequence
  Synthetic construct
ctctggtcacgtgaga

SEQ ID NO: 828 - DNA, 16 bp, Artificial Sequence
  Synthetic construct
ctctggtcacgtgaga

SEQ ID NO: 829 - DNA, 16 bp, Artificial Sequence
  Synthetic construct
ctgaaacgtccgaaga

SEQ ID NO: 830 - DNA, 16 bp, Artificial Sequence
  Synthetic construct
ctgaaacgtccgaaga

SEQ ID NO: 831 - DNA, 16 bp, Artificial Sequence
  Synthetic construct
ctgaaacgtctaaaga

SEQ ID NO: 832 - DNA, 16 bp, Artificial Sequence
  Synthetic construct
ctgaaacgtctaaaga

SEQ ID NO: 833 - DNA, 16 bp, Artificial Sequence
  Synthetic construct
ctgaaacgtggtctcg

SEQ ID NO: 834 - DNA, 16 bp, Artificial Sequence
  Synthetic construct
ctgaaacgtggtctcg

SEQ ID NO: 835 - DNA, 16 bp, Artificial Sequence
  Synthetic construct
ctgaagtaggctcaga

SEQ ID NO: 836 - DNA, 16 bp, Artificial Sequence
  Synthetic construct
ctgaagtaggctcaga

SEQ ID NO: 837 - DNA, 16 bp, Artificial Sequence
  Synthetic construct
ctgaagtgtgagggag

SEQ ID NO: 838 - DNA, 16 bp, Artificial Sequence
  Synthetic construct
ctgaagtgtgagggag

SEQ ID NO: 839 - DNA, 16 bp, Artificial Sequence
  Synthetic construct
ctgataggttccatga

SEQ ID NO: 840 - DNA, 16 bp, Artificial Sequence
  Synthetic construct
ctgataggttccatga

SEQ ID NO: 841 - DNA, 16 bp, Artificial Sequence
  Synthetic construct
ctgataggttctcatt

SEQ ID NO: 842 - DNA, 16 bp, Artificial Sequence
  Synthetic construct
ctgataggttctcatt

SEQ ID NO: 843 - DNA, 16 bp, Artificial Sequence
  Synthetic construct
ctgatccagcccaatt

SEQ ID NO: 844 - DNA, 16 bp, Artificial Sequence
  Synthetic construct
ctgatccagcccaatt

SEQ ID NO: 845 - DNA, 16 bp, Artificial Sequence
  Synthetic construct
ctgatcccagctccga

SEQ ID NO: 846 - DNA, 16 bp, Artificial Sequence
  Synthetic construct
ctgatcccagctccga

SEQ ID NO: 847 - DNA, 16 bp, Artificial Sequence
  Synthetic construct
ctgatccgtacgctgc

SEQ ID NO: 848 - DNA, 16 bp, Artificial Sequence
  Synthetic construct
ctgatccgtacgctgc

SEQ ID NO: 849 - DNA, 16 bp, Artificial Sequence
  Synthetic construct
ctgcctacaatggtct

SEQ ID NO: 850 - DNA, 16 bp, Artificial Sequence
  Synthetic construct
ctgcctacaatggtct

SEQ ID NO: 851 - DNA, 16 bp, Artificial Sequence
  Synthetic construct
ctgcctagtcttctcg

SEQ ID NO: 852 - DNA, 16 bp, Artificial Sequence
  Synthetic construct
ctgcctagtcttctcg

SEQ ID NO: 853 - DNA, 16 bp, Artificial Sequence
  Synthetic construct
ctgcctagtgggtatg

SEQ ID NO: 854 - DNA, 16 bp, Artificial Sequence
  Synthetic construct
ctgcctagtgggtatg

SEQ ID NO: 855 - DNA, 16 bp, Artificial Sequence
  Synthetic construct
ctgcctatcccttgtg

SEQ ID NO: 856 - DNA, 16 bp, Artificial Sequence
  Synthetic construct
ctgcctatcccttgtg

SEQ ID NO: 857 - DNA, 16 bp, Artificial Sequence
  Synthetic construct
ctgcggatccacgtgg

SEQ ID NO: 858 - DNA, 16 bp, Artificial Sequence
  Synthetic construct
ctgcggatccacgtgg

SEQ ID NO: 859 - DNA, 16 bp, Artificial Sequence
  Synthetic construct
ctgcggatcgagaacg

SEQ ID NO: 860 - DNA, 16 bp, Artificial Sequence
  Synthetic construct
ctgcggatcgagaacg

SEQ ID NO: 861 - DNA, 16 bp, Artificial Sequence
  Synthetic construct
ctgctgttctaacggt

SEQ ID NO: 862 - DNA, 16 bp, Artificial Sequence
  Synthetic construct
ctgctgttctaacggt

SEQ ID NO: 863 - DNA, 16 bp, Artificial Sequence
  Synthetic construct
ctgctgttcttctggc

SEQ ID NO: 864 - DNA, 16 bp, Artificial Sequence
  Synthetic construct
ctgctgttcttctggc

SEQ ID NO: 865 - DNA, 16 bp, Artificial Sequence
  Synthetic construct
ctggtctcacgaagca

SEQ ID NO: 866 - DNA, 16 bp, Artificial Sequence
  Synthetic construct
ctggtctcacgaagca

SEQ ID NO: 867 - DNA, 16 bp, Artificial Sequence
  Synthetic construct
ctggtctcagccaatt

SEQ ID NO: 868 - DNA, 16 bp, Artificial Sequence
  Synthetic construct
ctggtctcagccaatt

SEQ ID NO: 869 - DNA, 16 bp, Artificial Sequence
  Synthetic construct
ctggtcttcaacgcta

SEQ ID NO: 870 - DNA, 16 bp, Artificial Sequence
  Synthetic construct
ctggtcttcaacgcta

SEQ ID NO: 871 - DNA, 16 bp, Artificial Sequence
  Synthetic construct
ctgtgctgttcccgag

SEQ ID NO: 872 - DNA, 16 bp, Artificial Sequence
  Synthetic construct
ctgtgctgttcccgag

SEQ ID NO: 873 - DNA, 16 bp, Artificial Sequence
  Synthetic construct
ctgtgcttctacttac

SEQ ID NO: 874 - DNA, 16 bp, Artificial Sequence
  Synthetic construct
ctgtgcttctacttac

SEQ ID NO: 875 - DNA, 16 bp, Artificial Sequence
  Synthetic construct
ctgtttatcaaagaca

SEQ ID NO: 876 - DNA, 16 bp, Artificial Sequence
  Synthetic construct
ctgtttatcaaagaca

SEQ ID NO: 877 - DNA, 16 bp, Artificial Sequence
  Synthetic construct
cttaactcagcgaaca

SEQ ID NO: 878 - DNA, 16 bp, Artificial Sequence
  Synthetic construct
cttaactcagcgaaca

SEQ ID NO: 879 - DNA, 16 bp, Artificial Sequence
  Synthetic construct
cttaactcaggaatcg

SEQ ID NO: 880 - DNA, 16 bp, Artificial Sequence
  Synthetic construct
cttaactcaggaatcg

SEQ ID NO: 881 - DNA, 16 bp, Artificial Sequence
  Synthetic construct
cttaactgtgaccaag

SEQ ID NO: 882 - DNA, 16 bp, Artificial Sequence
  Synthetic construct
cttaactgtgaccaag

SEQ ID NO: 883 - DNA, 16 bp, Artificial Sequence
  Synthetic construct
cttaccgaggtaaact

SEQ ID NO: 884 - DNA, 16 bp, Artificial Sequence
  Synthetic construct
cttaccgaggtaaact

SEQ ID NO: 885 - DNA, 16 bp, Artificial Sequence
  Synthetic construct
cttaccggtacccaat

SEQ ID NO: 886 - DNA, 16 bp, Artificial Sequence
  Synthetic construct
cttaccggtacccaat

SEQ ID NO: 887 - DNA, 16 bp, Artificial Sequence
  Synthetic construct
cttaggaagtagatgt

SEQ ID NO: 888 - DNA, 16 bp, Artificial Sequence
  Synthetic construct
cttaggaagtagatgt

SEQ ID NO: 889 - DNA, 16 bp, Artificial Sequence
  Synthetic construct
cttaggacaaacaaca

SEQ ID NO: 890 - DNA, 16 bp, Artificial Sequence
  Synthetic construct
cttaggacaaacaaca

SEQ ID NO: 891 - DNA, 16 bp, Artificial Sequence
  Synthetic construct
cttctctagcttcgcg

SEQ ID NO: 892 - DNA, 16 bp, Artificial Sequence
  Synthetic construct
cttctctagcttcgcg

SEQ ID NO: 893 - DNA, 16 bp, Artificial Sequence
  Synthetic construct
cttctctgtgcgcttg

SEQ ID NO: 894 - DNA, 16 bp, Artificial Sequence
  Synthetic construct
cttctctgtgcgcttg

SEQ ID NO: 895 - DNA, 16 bp, Artificial Sequence
  Synthetic construct
cttggctcaagttaag

SEQ ID NO: 896 - DNA, 16 bp, Artificial Sequence
  Synthetic construct
cttggctcaagttaag

SEQ ID NO: 897 - DNA, 16 bp, Artificial Sequence
  Synthetic construct
cttggctgttacagaa

SEQ ID NO: 898 - DNA, 16 bp, Artificial Sequence
  Synthetic construct
cttggctgttacagaa

SEQ ID NO: 899 - DNA, 16 bp, Artificial Sequence
  Synthetic construct
ctttgcggtcagctat

SEQ ID NO: 900 - DNA, 16 bp, Artificial Sequence
  Synthetic construct
ctttgcggtcagctat

SEQ ID NO: 901 - DNA, 16 bp, Artificial Sequence
  Synthetic construct
gaaactcagtgtactc

SEQ ID NO: 902 - DNA, 16 bp, Artificial Sequence
  Synthetic construct
gaaactcagtgtactc

SEQ ID NO: 903 - DNA, 16 bp, Artificial Sequence
  Synthetic construct
gaaactcgtattcgtg

SEQ ID NO: 904 - DNA, 16 bp, Artificial Sequence
  Synthetic construct
gaaactcgtattcgtg

SEQ ID NO: 905 - DNA, 16 bp, Artificial Sequence
  Synthetic construct
gaaatgaagcatcatc

SEQ ID NO: 906 - DNA, 16 bp, Artificial Sequence
  Synthetic construct
gaaatgaagcatcatc

SEQ ID NO: 907 - DNA, 16 bp, Artificial Sequence
  Synthetic construct
gaacatccatggtagg

SEQ ID NO: 908 - DNA, 16 bp, Artificial Sequence
  Synthetic construct
gaacatccatggtagg

SEQ ID NO: 909 - DNA, 16 bp, Artificial Sequence
  Synthetic construct
gaataagagcacaggt

SEQ ID NO: 910 - DNA, 16 bp, Artificial Sequence
  Synthetic construct
gaataagagcacaggt

SEQ ID NO: 911 - DNA, 16 bp, Artificial Sequence
  Synthetic construct
gaataagagtcgataa

SEQ ID NO: 912 - DNA, 16 bp, Artificial Sequence
  Synthetic construct
gaataagagtcgataa

SEQ ID NO: 913 - DNA, 16 bp, Artificial Sequence
  Synthetic construct
gaatgaacattggtac

SEQ ID NO: 914 - DNA, 16 bp, Artificial Sequence
  Synthetic construct
gaatgaacattggtac

SEQ ID NO: 915 - DNA, 16 bp, Artificial Sequence
  Synthetic construct
gacacgccatggtcta

SEQ ID NO: 916 - DNA, 16 bp, Artificial Sequence
  Synthetic construct
gacacgccatggtcta

SEQ ID NO: 917 - DNA, 16 bp, Artificial Sequence
  Synthetic construct
gacagagagtacgcga

SEQ ID NO: 918 - DNA, 16 bp, Artificial Sequence
  Synthetic construct
gacagagagtacgcga

SEQ ID NO: 919 - DNA, 16 bp, Artificial Sequence
  Synthetic construct
gacagaggtcgattgt

SEQ ID NO: 920 - DNA, 16 bp, Artificial Sequence
  Synthetic construct
gacagaggtcgattgt

SEQ ID NO: 921 - DNA, 16 bp, Artificial Sequence
  Synthetic construct
gacagagtcctatgtt

SEQ ID NO: 922 - DNA, 16 bp, Artificial Sequence
  Synthetic construct
gacagagtcctatgtt

SEQ ID NO: 923 - DNA, 16 bp, Artificial Sequence
  Synthetic construct
gaccaataggcgctct

SEQ ID NO: 924 - DNA, 16 bp, Artificial Sequence
  Synthetic construct
gaccaataggcgctct

SEQ ID NO: 925 - DNA, 16 bp, Artificial Sequence
  Synthetic construct
gaccaatgtgctgtat

SEQ ID NO: 926 - DNA, 16 bp, Artificial Sequence
  Synthetic construct
gaccaatgtgctgtat

SEQ ID NO: 927 - DNA, 16 bp, Artificial Sequence
  Synthetic construct
gacctggtcgaatgct

SEQ ID NO: 928 - DNA, 16 bp, Artificial Sequence
  Synthetic construct
gacctggtcgaatgct

SEQ ID NO: 929 - DNA, 16 bp, Artificial Sequence
  Synthetic construct
gacgcgtcagcgtcca

SEQ ID NO: 930 - DNA, 16 bp, Artificial Sequence
  Synthetic construct
gacgcgtcagcgtcca

SEQ ID NO: 931 - DNA, 16 bp, Artificial Sequence
  Synthetic construct
gacggctgtacagttc

SEQ ID NO: 932 - DNA, 16 bp, Artificial Sequence
  Synthetic construct
gacggctgtacagttc

SEQ ID NO: 933 - DNA, 16 bp, Artificial Sequence
  Synthetic construct
gacggctgtagtgaat

SEQ ID NO: 934 - DNA, 16 bp, Artificial Sequence
  Synthetic construct
gacggctgtagtgaat

SEQ ID NO: 935 - DNA, 16 bp, Artificial Sequence
  Synthetic construct
gacgtgccagtgacag

SEQ ID NO: 936 - DNA, 16 bp, Artificial Sequence
  Synthetic construct
gacgtgccagtgacag

SEQ ID NO: 937 - DNA, 16 bp, Artificial Sequence
  Synthetic construct
gacgtgcgtgctcttc

SEQ ID NO: 938 - DNA, 16 bp, Artificial Sequence
  Synthetic construct
gacgtgcgtgctcttc

SEQ ID NO: 939 - DNA, 16 bp, Artificial Sequence
  Synthetic construct
gacgtgctcatcaccc

SEQ ID NO: 940 - DNA, 16 bp, Artificial Sequence
  Synthetic construct
gacgtgctcatcaccc

SEQ ID NO: 941 - DNA, 16 bp, Artificial Sequence
  Synthetic construct
gacgttatctcctata

SEQ ID NO: 942 - DNA, 16 bp, Artificial Sequence
  Synthetic construct
gacgttatctcctata

SEQ ID NO: 943 - DNA, 16 bp, Artificial Sequence
  Synthetic construct
gactaacgttaagaca

SEQ ID NO: 944 - DNA, 16 bp, Artificial Sequence
  Synthetic construct
gactaacgttaagaca

SEQ ID NO: 945 - DNA, 16 bp, Artificial Sequence
  Synthetic construct
gactaacgttctgttt

SEQ ID NO: 946 - DNA, 16 bp, Artificial Sequence
  Synthetic construct
gactaacgttctgttt

SEQ ID NO: 947 - DNA, 16 bp, Artificial Sequence
  Synthetic construct
gactaactcttagccc

SEQ ID NO: 948 - DNA, 16 bp, Artificial Sequence
  Synthetic construct
gactaactcttagccc

SEQ ID NO: 949 - DNA, 16 bp, Artificial Sequence
  Synthetic construct
gactgcgcataggata

SEQ ID NO: 950 - DNA, 16 bp, Artificial Sequence
  Synthetic construct
gactgcgcataggata

SEQ ID NO: 951 - DNA, 16 bp, Artificial Sequence
  Synthetic construct
gactgcggtagtacct

SEQ ID NO: 952 - DNA, 16 bp, Artificial Sequence
  Synthetic construct
gactgcggtagtacct

SEQ ID NO: 953 - DNA, 16 bp, Artificial Sequence
  Synthetic construct
gactgcgtctaagcca

SEQ ID NO: 954 - DNA, 16 bp, Artificial Sequence
  Synthetic construct
gactgcgtctaagcca

SEQ ID NO: 955 - DNA, 16 bp, Artificial Sequence
  Synthetic construct
gagcagacaccacgtg

SEQ ID NO: 956 - DNA, 16 bp, Artificial Sequence
  Synthetic construct
gagcagacaccacgtg

SEQ ID NO: 957 - DNA, 16 bp, Artificial Sequence
  Synthetic construct
gagcagacacggcgtt

SEQ ID NO: 958 - DNA, 16 bp, Artificial Sequence
  Synthetic construct
gagcagacacggcgtt

SEQ ID NO: 959 - DNA, 16 bp, Artificial Sequence
  Synthetic construct
gagcagagtacgaccc

SEQ ID NO: 960 - DNA, 16 bp, Artificial Sequence
  Synthetic construct
gagcagagtacgaccc

SEQ ID NO: 961 - DNA, 16 bp, Artificial Sequence
  Synthetic construct
gaggtgacaggctcac

SEQ ID NO: 962 - DNA, 16 bp, Artificial Sequence
  Synthetic construct
gaggtgacaggctcac

SEQ ID NO: 963 - DNA, 16 bp, Artificial Sequence
  Synthetic construct
gagtccgagactaagt

SEQ ID NO: 964 - DNA, 16 bp, Artificial Sequence
  Synthetic construct
gagtccgagactaagt

SEQ ID NO: 965 - DNA, 16 bp, Artificial Sequence
  Synthetic construct
gagtccgcatggtagg

SEQ ID NO: 966 - DNA, 16 bp, Artificial Sequence
  Synthetic construct
gagtccgcatggtagg

SEQ ID NO: 967 - DNA, 16 bp, Artificial Sequence
  Synthetic construct
gagtccggtaagtggc

SEQ ID NO: 968 - DNA, 16 bp, Artificial Sequence
  Synthetic construct
gagtccggtaagtggc

SEQ ID NO: 969 - DNA, 16 bp, Artificial Sequence
  Synthetic construct
gagtccggtctcaaca

SEQ ID NO: 970 - DNA, 16 bp, Artificial Sequence
  Synthetic construct
gagtccggtctcaaca

SEQ ID NO: 971 - DNA, 16 bp, Artificial Sequence
  Synthetic construct
gatcagtagacaggct

SEQ ID NO: 972 - DNA, 16 bp, Artificial Sequence
  Synthetic construct
gatcagtagacaggct

SEQ ID NO: 973 - DNA, 16 bp, Artificial Sequence
  Synthetic construct
gatcagtagctagccc

SEQ ID NO: 974 - DNA, 16 bp, Artificial Sequence
  Synthetic construct
gatcagtagctagccc

SEQ ID NO: 975 - DNA, 16 bp, Artificial Sequence
  Synthetic construct
gatcagtaggaccaca

SEQ ID NO: 976 - DNA, 16 bp, Artificial Sequence
  Synthetic construct
gatcagtaggaccaca

SEQ ID NO: 977 - DNA, 16 bp, Artificial Sequence
  Synthetic construct
gatcgatcacttacga

SEQ ID NO: 978 - DNA, 16 bp, Artificial Sequence
  Synthetic construct
gatcgatcacttacga

SEQ ID NO: 979 - DNA, 16 bp, Artificial Sequence
  Synthetic construct
gatcgtaagccagaac

SEQ ID NO: 980 - DNA, 16 bp, Artificial Sequence
  Synthetic construct
gatcgtaagccagaac

SEQ ID NO: 981 - DNA, 16 bp, Artificial Sequence
  Synthetic construct
gatcgtaaggtgcttt

SEQ ID NO: 982 - DNA, 16 bp, Artificial Sequence
  Synthetic construct
gatcgtaaggtgcttt

SEQ ID NO: 983 - DNA, 16 bp, Artificial Sequence
  Synthetic construct
gatcgtagtgagggtt

SEQ ID NO: 984 - DNA, 16 bp, Artificial Sequence
  Synthetic construct
gatcgtagtgagggtt

SEQ ID NO: 985 - DNA, 16 bp, Artificial Sequence
  Synthetic construct
gatcgtagtgtgcgtc

SEQ ID NO: 986 - DNA, 16 bp, Artificial Sequence
  Synthetic construct
gatcgtagtgtgcgtc

SEQ ID NO: 987 - DNA, 16 bp, Artificial Sequence
  Synthetic construct
gatcgtatcctcaatt

SEQ ID NO: 988 - DNA, 16 bp, Artificial Sequence
  Synthetic construct
gatcgtatcctcaatt

SEQ ID NO: 989 - DNA, 16 bp, Artificial Sequence
  Synthetic construct
gatctaggtcgaacag

SEQ ID NO: 990 - DNA, 16 bp, Artificial Sequence
  Synthetic construct
gatctaggtcgaacag

SEQ ID NO: 991 - DNA, 16 bp, Artificial Sequence
  Synthetic construct
gatctagtctgtccgt

SEQ ID NO: 992 - DNA, 16 bp, Artificial Sequence
  Synthetic construct
gatctagtctgtccgt

SEQ ID NO: 993 - DNA, 16 bp, Artificial Sequence
  Synthetic construct
gatgaaaagtacgtaa

SEQ ID NO: 994 - DNA, 16 bp, Artificial Sequence
  Synthetic construct
gatgaaaagtacgtaa

SEQ ID NO: 995 - DNA, 16 bp, Artificial Sequence
  Synthetic construct
gatgaaatcatacggt

SEQ ID NO: 996 - DNA, 16 bp, Artificial Sequence
  Synthetic construct
gatgaaatcatacggt

SEQ ID NO: 997 - DNA, 16 bp, Artificial Sequence
  Synthetic construct
gatgaggcaaacgcga

SEQ ID NO: 998 - DNA, 16 bp, Artificial Sequence
  Synthetic construct
gatgaggcaaacgcga

SEQ ID NO: 999 - DNA, 16 bp, Artificial Sequence
  Synthetic construct
gatgaggcaatggaat

SEQ ID NO: 1000 - DNA, 16 bp, Artificial Sequence
  Synthetic construct
gatgaggcaatggaat

SEQ ID NO: 1001 - DNA, 16 bp, Artificial Sequence
  Synthetic construct
gatgaggcatcgatgt

SEQ ID NO: 1002 - DNA, 16 bp, Artificial Sequence
  Synthetic construct
gatgaggcatcgatgt

SEQ ID NO: 1003 - DNA, 16 bp, Artificial Sequence
  Synthetic construct
gatgctacagatccat

SEQ ID NO: 1004 - DNA, 16 bp, Artificial Sequence
  Synthetic construct
gatgctacagatccat

SEQ ID NO: 1005 - DNA, 16 bp, Artificial Sequence
  Synthetic construct
gatgctagtgtgaata

SEQ ID NO: 1006 - DNA, 16 bp, Artificial Sequence
  Synthetic construct
gatgctagtgtgaata

SEQ ID NO: 1007 - DNA, 16 bp, Artificial Sequence
  Synthetic construct
gattcagcatactctt

SEQ ID NO: 1008 - DNA, 16 bp, Artificial Sequence
  Synthetic construct
gattcagcatactctt

SEQ ID NO: 1009 - DNA, 16 bp, Artificial Sequence
  Synthetic construct
gattcaggtctgcggt

SEQ ID NO: 1010 - DNA, 16 bp, Artificial Sequence
  Synthetic construct
gattcaggtctgcggt

SEQ ID NO: 1011 - DNA, 16 bp, Artificial Sequence
  Synthetic construct
gattcagtcgtacggc

SEQ ID NO: 1012 - DNA, 16 bp, Artificial Sequence
  Synthetic construct
gattcagtcgtacggc

SEQ ID NO: 1013 - DNA, 16 bp, Artificial Sequence
  Synthetic construct
gcaaactagggtttct

SEQ ID NO: 1014 - DNA, 16 bp, Artificial Sequence
  Synthetic construct
gcaaactagggtttct

SEQ ID NO: 1015 - DNA, 16 bp, Artificial Sequence
  Synthetic construct
gcaaacttcctcaatt

SEQ ID NO: 1016 - DNA, 16 bp, Artificial Sequence
  Synthetic construct
gcaaacttcctcaatt

SEQ ID NO: 1017 - DNA, 16 bp, Artificial Sequence
  Synthetic construct
gcaatcatctcgcttg

SEQ ID NO: 1018 - DNA, 16 bp, Artificial Sequence
  Synthetic construct
gcaatcatctcgcttg

SEQ ID NO: 1019 - DNA, 16 bp, Artificial Sequence
  Synthetic construct
gcacatacaactggcc

SEQ ID NO: 1020 - DNA, 16 bp, Artificial Sequence
  Synthetic construct
gcacatacaactggcc

SEQ ID NO: 1021 - DNA, 16 bp, Artificial Sequence
  Synthetic construct
gcacatacagtatctg

SEQ ID NO: 1022 - DNA, 16 bp, Artificial Sequence
  Synthetic construct
gcacatacagtatctg

SEQ ID NO: 1023 - DNA, 16 bp, Artificial Sequence
  Synthetic construct
gcacatacatacagct

SEQ ID NO: 1024 - DNA, 16 bp, Artificial Sequence
  Synthetic construct
gcacatacatacagct

SEQ ID NO: 1025 - DNA, 16 bp, Artificial Sequence
  Synthetic construct
gcacatagtgagggag

SEQ ID NO: 1026 - DNA, 16 bp, Artificial Sequence
  Synthetic construct
gcacatagtgagggag

SEQ ID NO: 1027 - DNA, 16 bp, Artificial Sequence
  Synthetic construct
gcactctgtagcgatg

SEQ ID NO: 1028 - DNA, 16 bp, Artificial Sequence
  Synthetic construct
gcactctgtagcgatg

SEQ ID NO: 1029 - DNA, 16 bp, Artificial Sequence
  Synthetic construct
gcactcttcaccgtaa

SEQ ID NO: 1030 - DNA, 16 bp, Artificial Sequence
  Synthetic construct
gcactcttcaccgtaa

SEQ ID NO: 1031 - DNA, 16 bp, Artificial Sequence
  Synthetic construct
gcactcttcgtttagg

SEQ ID NO: 1032 - DNA, 16 bp, Artificial Sequence
  Synthetic construct
gcactcttcgtttagg

SEQ ID NO: 1033 - DNA, 16 bp, Artificial Sequence
  Synthetic construct
gcagttaagtagcggt

SEQ ID NO: 1034 - DNA, 16 bp, Artificial Sequence
  Synthetic construct
gcagttaagtagcggt

SEQ ID NO: 1035 - DNA, 16 bp, Artificial Sequence
  Synthetic construct
gcagttacatgcgcac

SEQ ID NO: 1036 - DNA, 16 bp, Artificial Sequence
  Synthetic construct
gcagttacatgcgcac

SEQ ID NO: 1037 - DNA, 16 bp, Artificial Sequence
  Synthetic construct
gcagttacattcctgc

SEQ ID NO: 1038 - DNA, 16 bp, Artificial Sequence
  Synthetic construct
gcagttacattcctgc

SEQ ID NO: 1039 - DNA, 16 bp, Artificial Sequence
  Synthetic construct
gcagttagtcttgatg

SEQ ID NO: 1040 - DNA, 16 bp, Artificial Sequence
  Synthetic construct
gcagttagtcttgatg

SEQ ID NO: 1041 - DNA, 16 bp, Artificial Sequence
  Synthetic construct
gcagttagtgcctgca

SEQ ID NO: 1042 - DNA, 16 bp, Artificial Sequence
  Synthetic construct
gcagttagtgcctgca

SEQ ID NO: 1043 - DNA, 16 bp, Artificial Sequence
  Synthetic construct
gcagttagttagatga

SEQ ID NO: 1044 - DNA, 16 bp, Artificial Sequence
  Synthetic construct
gcagttagttagatga

SEQ ID NO: 1045 - DNA, 16 bp, Artificial Sequence
  Synthetic construct
gcatacacagagccaa

SEQ ID NO: 1046 - DNA, 16 bp, Artificial Sequence
  Synthetic construct
gcatacacagagccaa

SEQ ID NO: 1047 - DNA, 16 bp, Artificial Sequence
  Synthetic construct
gcatacagtcccgaca

SEQ ID NO: 1048 - DNA, 16 bp, Artificial Sequence
  Synthetic construct
gcatacagtcccgaca

SEQ ID NO: 1049 - DNA, 16 bp, Artificial Sequence
  Synthetic construct
gcatgatcaaggacac

SEQ ID NO: 1050 - DNA, 16 bp, Artificial Sequence
  Synthetic construct
gcatgatcaaggacac

SEQ ID NO: 1051 - DNA, 16 bp, Artificial Sequence
  Synthetic construct
gcatgatgtgtaagta

SEQ ID NO: 1052 - DNA, 16 bp, Artificial Sequence
  Synthetic construct
gcatgatgtgtaagta

SEQ ID NO: 1053 - DNA, 16 bp, Artificial Sequence
  Synthetic construct
gcatgcgagcacacag

SEQ ID NO: 1054 - DNA, 16 bp, Artificial Sequence
  Synthetic construct
gcatgcgagcacacag

SEQ ID NO: 1055 - DNA, 16 bp, Artificial Sequence
  Synthetic construct
gcatgcgcaatgacct

SEQ ID NO: 1056 - DNA, 16 bp, Artificial Sequence
  Synthetic construct
gcatgcgcaatgacct

SEQ ID NO: 1057 - DNA, 16 bp, Artificial Sequence
  Synthetic construct
gcatgcgcatcgattg

SEQ ID NO: 1058 - DNA, 16 bp, Artificial Sequence
  Synthetic construct
gcatgcgcatcgattg

SEQ ID NO: 1059 - DNA, 16 bp, Artificial Sequence
  Synthetic construct
gcatgcggtattcgtg

SEQ ID NO: 1060 - DNA, 16 bp, Artificial Sequence
  Synthetic construct
gcatgcggtattcgtg

SEQ ID NO: 1061 - DNA, 16 bp, Artificial Sequence
  Synthetic construct
gcatgtagtgtaacgg

SEQ ID NO: 1062 - DNA, 16 bp, Artificial Sequence
  Synthetic construct
gcatgtagtgtaacgg

SEQ ID NO: 1063 - DNA, 16 bp, Artificial Sequence
  Synthetic construct
gcatgtatccgcgttt

SEQ ID NO: 1064 - DNA, 16 bp, Artificial Sequence
  Synthetic construct
gcatgtatccgcgttt

SEQ ID NO: 1065 - DNA, 16 bp, Artificial Sequence
  Synthetic construct
gccaaatcaccagcac

SEQ ID NO: 1066 - DNA, 16 bp, Artificial Sequence
  Synthetic construct
gccaaatcaccagcac

SEQ ID NO: 1067 - DNA, 16 bp, Artificial Sequence
  Synthetic construct
gccaaattcaccacct

SEQ ID NO: 1068 - DNA, 16 bp, Artificial Sequence
  Synthetic construct
gccaaattcaccacct

SEQ ID NO: 1069 - DNA, 16 bp, Artificial Sequence
  Synthetic construct
gccaaattcttgtttg

SEQ ID NO: 1070 - DNA, 16 bp, Artificial Sequence
  Synthetic construct
gccaaattcttgtttg

SEQ ID NO: 1071 - DNA, 16 bp, Artificial Sequence
  Synthetic construct
gccaaattctttaggg

SEQ ID NO: 1072 - DNA, 16 bp, Artificial Sequence
  Synthetic construct
gccaaattctttaggg

SEQ ID NO: 1073 - DNA, 16 bp, Artificial Sequence
  Synthetic construct
gcctctaagcccagct

SEQ ID NO: 1074 - DNA, 16 bp, Artificial Sequence
  Synthetic construct
gcctctaagcccagct

SEQ ID NO: 1075 - DNA, 16 bp, Artificial Sequence
  Synthetic construct
gcctctacacagactt

SEQ ID NO: 1076 - DNA, 16 bp, Artificial Sequence
  Synthetic construct
gcctctacacagactt

SEQ ID NO: 1077 - DNA, 16 bp, Artificial Sequence
  Synthetic construct
gcgaccacacgaaacg

SEQ ID NO: 1078 - DNA, 16 bp, Artificial Sequence
  Synthetic construct
gcgaccacacgaaacg

SEQ ID NO: 1079 - DNA, 16 bp, Artificial Sequence
  Synthetic construct
gcgaccacatttgctt

SEQ ID NO: 1080 - DNA, 16 bp, Artificial Sequence
  Synthetic construct
gcgaccacatttgctt

SEQ ID NO: 1081 - DNA, 16 bp, Artificial Sequence
  Synthetic construct
gcgaccagtcatcggc

SEQ ID NO: 1082 - DNA, 16 bp, Artificial Sequence
  Synthetic construct
gcgaccagtcatcggc

SEQ ID NO: 1083 - DNA, 16 bp, Artificial Sequence
  Synthetic construct
gcgagaagtattctct

SEQ ID NO: 1084 - DNA, 16 bp, Artificial Sequence
  Synthetic construct
gcgagaagtattctct

SEQ ID NO: 1085 - DNA, 16 bp, Artificial Sequence
  Synthetic construct
gcgcaactcatcggat

SEQ ID NO: 1086 - DNA, 16 bp, Artificial Sequence
  Synthetic construct
gcgcaactcatcggat

SEQ ID NO: 1087 - DNA, 16 bp, Artificial Sequence
  Synthetic construct
gcgcagttcagctggc

SEQ ID NO: 1088 - DNA, 16 bp, Artificial Sequence
  Synthetic construct
gcgcagttcagctggc

SEQ ID NO: 1089 - DNA, 16 bp, Artificial Sequence
  Synthetic construct
gcgcagttccaagtac

SEQ ID NO: 1090 - DNA, 16 bp, Artificial Sequence
  Synthetic construct
gcgcagttccaagtac

SEQ ID NO: 1091 - DNA, 16 bp, Artificial Sequence
  Synthetic construct
gcgccaaagggcttcc

SEQ ID NO: 1092 - DNA, 16 bp, Artificial Sequence
  Synthetic construct
gcgccaaagggcttcc

SEQ ID NO: 1093 - DNA, 16 bp, Artificial Sequence
  Synthetic construct
gcgcgatagctgataa

SEQ ID NO: 1094 - DNA, 16 bp, Artificial Sequence
  Synthetic construct
gcgcgatagctgataa

SEQ ID NO: 1095 - DNA, 16 bp, Artificial Sequence
  Synthetic construct
gcgcgatcaccttgtc

SEQ ID NO: 1096 - DNA, 16 bp, Artificial Sequence
  Synthetic construct
gcgcgatcaccttgtc

SEQ ID NO: 1097 - DNA, 16 bp, Artificial Sequence
  Synthetic construct
gcgcgatcataacctg

SEQ ID NO: 1098 - DNA, 16 bp, Artificial Sequence
  Synthetic construct
gcgcgatcataacctg

SEQ ID NO: 1099 - DNA, 16 bp, Artificial Sequence
  Synthetic construct
gctctgtagcgatagc

SEQ ID NO: 1100 - DNA, 16 bp, Artificial Sequence
  Synthetic construct
gctctgtagcgatagc

SEQ ID NO: 1101 - DNA, 16 bp, Artificial Sequence
  Synthetic construct
gctctgtagtggtagc

SEQ ID NO: 1102 - DNA, 16 bp, Artificial Sequence
  Synthetic construct
gctctgtagtggtagc

SEQ ID NO: 1103 - DNA, 16 bp, Artificial Sequence
  Synthetic construct
gctctgtgtgaaagag

SEQ ID NO: 1104 - DNA, 16 bp, Artificial Sequence
  Synthetic construct
gctctgtgtgaaagag

SEQ ID NO: 1105 - DNA, 16 bp, Artificial Sequence
  Synthetic construct
gctgcagagacaatac

SEQ ID NO: 1106 - DNA, 16 bp, Artificial Sequence
  Synthetic construct
gctgcagagacaatac

SEQ ID NO: 1107 - DNA, 16 bp, Artificial Sequence
  Synthetic construct
gctgcgacagcagttt

SEQ ID NO: 1108 - DNA, 16 bp, Artificial Sequence
  Synthetic construct
gctgcgacagcagttt

SEQ ID NO: 1109 - DNA, 16 bp, Artificial Sequence
  Synthetic construct
gctgcgacagggttag

SEQ ID NO: 1110 - DNA, 16 bp, Artificial Sequence
  Synthetic construct
gctgcgacagggttag

SEQ ID NO: 1111 - DNA, 16 bp, Artificial Sequence
  Synthetic construct
gctgcgacatcgtcgg

SEQ ID NO: 1112 - DNA, 16 bp, Artificial Sequence
  Synthetic construct
gctgcgacatcgtcgg

SEQ ID NO: 1113 - DNA, 16 bp, Artificial Sequence
  Synthetic construct
gctgcgagtgcaccac

SEQ ID NO: 1114 - DNA, 16 bp, Artificial Sequence
  Synthetic construct
gctgcgagtgcaccac

SEQ ID NO: 1115 - DNA, 16 bp, Artificial Sequence
  Synthetic construct
gctgcgatcaacacgt

SEQ ID NO: 1116 - DNA, 16 bp, Artificial Sequence
  Synthetic construct
gctgcgatcaacacgt

SEQ ID NO: 1117 - DNA, 16 bp, Artificial Sequence
  Synthetic construct
gctgcgatccaaactg

SEQ ID NO: 1118 - DNA, 16 bp, Artificial Sequence
  Synthetic construct
gctgcgatccaaactg

SEQ ID NO: 1119 - DNA, 16 bp, Artificial Sequence
  Synthetic construct
gctgcgatcggaggta

SEQ ID NO: 1120 - DNA, 16 bp, Artificial Sequence
  Synthetic construct
gctgcgatcggaggta

SEQ ID NO: 1121 - DNA, 16 bp, Artificial Sequence
  Synthetic construct
gctgcttagatgtgta

SEQ ID NO: 1122 - DNA, 16 bp, Artificial Sequence
  Synthetic construct
gctgcttagatgtgta

SEQ ID NO: 1123 - DNA, 16 bp, Artificial Sequence
  Synthetic construct
gctgcttgtgcggtaa

SEQ ID NO: 1124 - DNA, 16 bp, Artificial Sequence
  Synthetic construct
gctgcttgtgcggtaa

SEQ ID NO: 1125 - DNA, 16 bp, Artificial Sequence
  Synthetic construct
gctgcttgtggcgaat

SEQ ID NO: 1126 - DNA, 16 bp, Artificial Sequence
  Synthetic construct
gctgcttgtggcgaat

SEQ ID NO: 1127 - DNA, 16 bp, Artificial Sequence
  Synthetic construct
gctgctttcagctcgg

SEQ ID NO: 1128 - DNA, 16 bp, Artificial Sequence
  Synthetic construct
gctgctttcagctcgg

SEQ ID NO: 1129 - DNA, 16 bp, Artificial Sequence
  Synthetic construct
gctgctttccctaacc

SEQ ID NO: 1130 - DNA, 16 bp, Artificial Sequence
  Synthetic construct
gctgctttccctaacc

SEQ ID NO: 1131 - DNA, 16 bp, Artificial Sequence
  Synthetic construct
gctgggtagagtacat

SEQ ID NO: 1132 - DNA, 16 bp, Artificial Sequence
  Synthetic construct
gctgggtagagtacat

SEQ ID NO: 1133 - DNA, 16 bp, Artificial Sequence
  Synthetic construct
gctgggtagctaccgc

SEQ ID NO: 1134 - DNA, 16 bp, Artificial Sequence
  Synthetic construct
gctgggtagctaccgc

SEQ ID NO: 1135 - DNA, 16 bp, Artificial Sequence
  Synthetic construct
gctgggtcaacgcacc

SEQ ID NO: 1136 - DNA, 16 bp, Artificial Sequence
  Synthetic construct
gctgggtcaacgcacc

SEQ ID NO: 1137 - DNA, 16 bp, Artificial Sequence
  Synthetic construct
gcttgaacaatgaatg

SEQ ID NO: 1138 - DNA, 16 bp, Artificial Sequence
  Synthetic construct
gcttgaacaatgaatg

SEQ ID NO: 1139 - DNA, 16 bp, Artificial Sequence
  Synthetic construct
gcttgaagtcaacatc

SEQ ID NO: 1140 - DNA, 16 bp, Artificial Sequence
  Synthetic construct
gcttgaagtcaacatc

SEQ ID NO: 1141 - DNA, 16 bp, Artificial Sequence
  Synthetic construct
ggaaagccaatcgaaa

SEQ ID NO: 1142 - DNA, 16 bp, Artificial Sequence
  Synthetic construct
ggaaagccaatcgaaa

SEQ ID NO: 1143 - DNA, 16 bp, Artificial Sequence
  Synthetic construct
ggaactttctcggacg

SEQ ID NO: 1144 - DNA, 16 bp, Artificial Sequence
  Synthetic construct
ggaactttctcggacg

SEQ ID NO: 1145 - DNA, 16 bp, Artificial Sequence
  Synthetic construct
ggacaaggtctgccag

SEQ ID NO: 1146 - DNA, 16 bp, Artificial Sequence
  Synthetic construct
ggacaaggtctgccag

SEQ ID NO: 1147 - DNA, 16 bp, Artificial Sequence
  Synthetic construct
ggacagacacgaaata

SEQ ID NO: 1148 - DNA, 16 bp, Artificial Sequence
  Synthetic construct
ggacagacacgaaata

SEQ ID NO: 1149 - DNA, 16 bp, Artificial Sequence
  Synthetic construct
ggacagagttatcacg

SEQ ID NO: 1150 - DNA, 16 bp, Artificial Sequence
  Synthetic construct
ggacagagttatcacg

SEQ ID NO: 1151 - DNA, 16 bp, Artificial Sequence
  Synthetic construct
ggacattaggcccttg

SEQ ID NO: 1152 - DNA, 16 bp, Artificial Sequence
  Synthetic construct
ggacattaggcccttg

SEQ ID NO: 1153 - DNA, 16 bp, Artificial Sequence
  Synthetic construct
ggacattcatggatgg

SEQ ID NO: 1154 - DNA, 16 bp, Artificial Sequence
  Synthetic construct
ggacattcatggatgg

SEQ ID NO: 1155 - DNA, 16 bp, Artificial Sequence
  Synthetic construct
ggacattgtcggctca

SEQ ID NO: 1156 - DNA, 16 bp, Artificial Sequence
  Synthetic construct
ggacattgtcggctca

SEQ ID NO: 1157 - DNA, 16 bp, Artificial Sequence
  Synthetic construct
ggacgtcagagtctgg

SEQ ID NO: 1158 - DNA, 16 bp, Artificial Sequence
  Synthetic construct
ggacgtcagagtctgg

SEQ ID NO: 1159 - DNA, 16 bp, Artificial Sequence
  Synthetic construct
ggacgtcgtatgcttg

SEQ ID NO: 1160 - DNA, 16 bp, Artificial Sequence
  Synthetic construct
ggacgtcgtatgcttg

SEQ ID NO: 1161 - DNA, 16 bp, Artificial Sequence
  Synthetic construct
ggacgtctcgggagta

SEQ ID NO: 1162 - DNA, 16 bp, Artificial Sequence
  Synthetic construct
ggacgtctcgggagta

SEQ ID NO: 1163 - DNA, 16 bp, Artificial Sequence
  Synthetic construct
ggagcaagtgcaggta

SEQ ID NO: 1164 - DNA, 16 bp, Artificial Sequence
  Synthetic construct
ggagcaagtgcaggta

SEQ ID NO: 1165 - DNA, 16 bp, Artificial Sequence
  Synthetic construct
ggagcaagtgcgatag

SEQ ID NO: 1166 - DNA, 16 bp, Artificial Sequence
  Synthetic construct
ggagcaagtgcgatag

SEQ ID NO: 1167 - DNA, 16 bp, Artificial Sequence
  Synthetic construct
ggagcaagttatccga

SEQ ID NO: 1168 - DNA, 16 bp, Artificial Sequence
  Synthetic construct
ggagcaagttatccga

SEQ ID NO: 1169 - DNA, 16 bp, Artificial Sequence
  Synthetic construct
ggagcaatcctgcagg

SEQ ID NO: 1170 - DNA, 16 bp, Artificial Sequence
  Synthetic construct
ggagcaatcctgcagg

SEQ ID NO: 1171 - DNA, 16 bp, Artificial Sequence
  Synthetic construct
ggattacagctctcgg

SEQ ID NO: 1172 - DNA, 16 bp, Artificial Sequence
  Synthetic construct
ggattacagctctcgg

SEQ ID NO: 1173 - DNA, 16 bp, Artificial Sequence
  Synthetic construct
ggattaccacctcgga

SEQ ID NO: 1174 - DNA, 16 bp, Artificial Sequence
  Synthetic construct
ggattaccacctcgga

SEQ ID NO: 1175 - DNA, 16 bp, Artificial Sequence
  Synthetic construct
ggattaccagtccttc

SEQ ID NO: 1176 - DNA, 16 bp, Artificial Sequence
  Synthetic construct
ggattaccagtccttc

SEQ ID NO: 1177 - DNA, 16 bp, Artificial Sequence
  Synthetic construct
ggattaccagtcgatt

SEQ ID NO: 1178 - DNA, 16 bp, Artificial Sequence
  Synthetic construct
ggattaccagtcgatt

SEQ ID NO: 1179 - DNA, 16 bp, Artificial Sequence
  Synthetic construct
ggcaattagctgttca

SEQ ID NO: 1180 - DNA, 16 bp, Artificial Sequence
  Synthetic construct
ggcaattagctgttca

SEQ ID NO: 1181 - DNA, 16 bp, Artificial Sequence
  Synthetic construct
ggcaattcagtcagcc

SEQ ID NO: 1182 - DNA, 16 bp, Artificial Sequence
  Synthetic construct
ggcaattcagtcagcc

SEQ ID NO: 1183 - DNA, 16 bp, Artificial Sequence
  Synthetic construct
ggcaattgtctggtcg

SEQ ID NO: 1184 - DNA, 16 bp, Artificial Sequence
  Synthetic construct
ggcaattgtctggtcg

SEQ ID NO: 1185 - DNA, 16 bp, Artificial Sequence
  Synthetic construct
ggctcgaagatctgct

SEQ ID NO: 1186 - DNA, 16 bp, Artificial Sequence
  Synthetic construct
ggctcgaagatctgct

SEQ ID NO: 1187 - DNA, 16 bp, Artificial Sequence
  Synthetic construct
ggctcgatctctaagg

SEQ ID NO: 1188 - DNA, 16 bp, Artificial Sequence
  Synthetic construct
ggctcgatctctaagg

SEQ ID NO: 1189 - DNA, 16 bp, Artificial Sequence
  Synthetic construct
gggaatgagctagttc

SEQ ID NO: 1190 - DNA, 16 bp, Artificial Sequence
  Synthetic construct
gggaatgagctagttc

SEQ ID NO: 1191 - DNA, 16 bp, Artificial Sequence
  Synthetic construct
gggaatgcagtcttcc

SEQ ID NO: 1192 - DNA, 16 bp, Artificial Sequence
  Synthetic construct
gggaatgcagtcttcc

SEQ ID NO: 1193 - DNA, 16 bp, Artificial Sequence
  Synthetic construct
gggacctgttggtaaa

SEQ ID NO: 1194 - DNA, 16 bp, Artificial Sequence
  Synthetic construct
gggacctgttggtaaa

SEQ ID NO: 1195 - DNA, 16 bp, Artificial Sequence
  Synthetic construct
gggaccttctgtacga

SEQ ID NO: 1196 - DNA, 16 bp, Artificial Sequence
  Synthetic construct
gggaccttctgtacga

SEQ ID NO: 1197 - DNA, 16 bp, Artificial Sequence
  Synthetic construct
gggcactcagtcttcc

SEQ ID NO: 1198 - DNA, 16 bp, Artificial Sequence
  Synthetic construct
gggcactcagtcttcc

SEQ ID NO: 1199 - DNA, 16 bp, Artificial Sequence
  Synthetic construct
gggcatccactaagtc

SEQ ID NO: 1200 - DNA, 16 bp, Artificial Sequence
  Synthetic construct
gggcatccactaagtc

SEQ ID NO: 1201 - DNA, 16 bp, Artificial Sequence
  Synthetic construct
gggcatctcagctctc

SEQ ID NO: 1202 - DNA, 16 bp, Artificial Sequence
  Synthetic construct
gggcatctcagctctc

SEQ ID NO: 1203 - DNA, 16 bp, Artificial Sequence
  Synthetic construct
gggcatctcatgtggt

SEQ ID NO: 1204 - DNA, 16 bp, Artificial Sequence
  Synthetic construct
gggcatctcatgtggt

SEQ ID NO: 1205 - DNA, 16 bp, Artificial Sequence
  Synthetic construct
gggtctgcagctgctg

SEQ ID NO: 1206 - DNA, 16 bp, Artificial Sequence
  Synthetic construct
gggtctgcagctgctg

SEQ ID NO: 1207 - DNA, 16 bp, Artificial Sequence
  Synthetic construct
gggttgcagtgaagag

SEQ ID NO: 1208 - DNA, 16 bp, Artificial Sequence
  Synthetic construct
gggttgcagtgaagag

SEQ ID NO: 1209 - DNA, 16 bp, Artificial Sequence
  Synthetic construct
gggttgcgttgtcgcg

SEQ ID NO: 1210 - DNA, 16 bp, Artificial Sequence
  Synthetic construct
gggttgcgttgtcgcg

SEQ ID NO: 1211 - DNA, 16 bp, Artificial Sequence
  Synthetic construct
ggtattgagcccagct

SEQ ID NO: 1212 - DNA, 16 bp, Artificial Sequence
  Synthetic construct
ggtattgagcccagct

SEQ ID NO: 1213 - DNA, 16 bp, Artificial Sequence
  Synthetic construct
ggtattgcagatgggt

SEQ ID NO: 1214 - DNA, 16 bp, Artificial Sequence
  Synthetic construct
ggtattgcagatgggt

SEQ ID NO: 1215 - DNA, 16 bp, Artificial Sequence
  Synthetic construct
ggtattgtcggctacg

SEQ ID NO: 1216 - DNA, 16 bp, Artificial Sequence
  Synthetic construct
ggtattgtcggctacg

SEQ ID NO: 1217 - DNA, 16 bp, Artificial Sequence
  Synthetic construct
ggtgcgtaggatggaa

SEQ ID NO: 1218 - DNA, 16 bp, Artificial Sequence
  Synthetic construct
ggtgcgtaggatggaa

SEQ ID NO: 1219 - DNA, 16 bp, Artificial Sequence
  Synthetic construct
ggtgcgttcgagaacg

SEQ ID NO: 1220 - DNA, 16 bp, Artificial Sequence
  Synthetic construct
ggtgcgttcgagaacg

SEQ ID NO: 1221 - DNA, 16 bp, Artificial Sequence
  Synthetic construct
ggtgttatctgggcca

SEQ ID NO: 1222 - DNA, 16 bp, Artificial Sequence
  Synthetic construct
ggtgttatctgggcca

SEQ ID NO: 1223 - DNA, 16 bp, Artificial Sequence
  Synthetic construct
gtacgtaagaggtacc

SEQ ID NO: 1224 - DNA, 16 bp, Artificial Sequence
  Synthetic construct
gtacgtaagaggtacc

SEQ ID NO: 1225 - DNA, 16 bp, Artificial Sequence
  Synthetic construct
gtacgtacacagcgtc

SEQ ID NO: 1226 - DNA, 16 bp, Artificial Sequence
  Synthetic construct
gtacgtacacagcgtc

SEQ ID NO: 1227 - DNA, 16 bp, Artificial Sequence
  Synthetic construct
gtacgtagtcaaagcg

SEQ ID NO: 1228 - DNA, 16 bp, Artificial Sequence
  Synthetic construct
gtacgtagtcaaagcg

SEQ ID NO: 1229 - DNA, 16 bp, Artificial Sequence
  Synthetic construct
gtactcctcgcatggc

SEQ ID NO: 1230 - DNA, 16 bp, Artificial Sequence
  Synthetic construct
gtactcctcgcatggc

SEQ ID NO: 1231 - DNA, 16 bp, Artificial Sequence
  Synthetic construct
gtactttagggcttga

SEQ ID NO: 1232 - DNA, 16 bp, Artificial Sequence
  Synthetic construct
gtactttagggcttga

SEQ ID NO: 1233 - DNA, 16 bp, Artificial Sequence
  Synthetic construct
gtactttgtcatatcg

SEQ ID NO: 1234 - DNA, 16 bp, Artificial Sequence
  Synthetic construct
gtactttgtcatatcg

SEQ ID NO: 1235 - DNA, 16 bp, Artificial Sequence
  Synthetic construct
gtaggcctcttccttc

SEQ ID NO: 1236 - DNA, 16 bp, Artificial Sequence
  Synthetic construct
gtaggcctcttccttc

SEQ ID NO: 1237 - DNA, 16 bp, Artificial Sequence
  Synthetic construct
gtagtcatctccaggg

SEQ ID NO: 1238 - DNA, 16 bp, Artificial Sequence
  Synthetic construct
gtagtcatctccaggg

SEQ ID NO: 1239 - DNA, 16 bp, Artificial Sequence
  Synthetic construct
gtatcttcacggtgtc

SEQ ID NO: 1240 - DNA, 16 bp, Artificial Sequence
  Synthetic construct
gtatcttcacggtgtc

SEQ ID NO: 1241 - DNA, 16 bp, Artificial Sequence
  Synthetic construct
gtattctcaattgctg

SEQ ID NO: 1242 - DNA, 16 bp, Artificial Sequence
  Synthetic construct
gtattctcaattgctg

SEQ ID NO: 1243 - DNA, 16 bp, Artificial Sequence
  Synthetic construct
gtattctcagtcgtgc

SEQ ID NO: 1244 - DNA, 16 bp, Artificial Sequence
  Synthetic construct
gtattctcagtcgtgc

SEQ ID NO: 1245 - DNA, 16 bp, Artificial Sequence
  Synthetic construct
gtcaagtaggcacatg

SEQ ID NO: 1246 - DNA, 16 bp, Artificial Sequence
  Synthetic construct
gtcaagtaggcacatg

SEQ ID NO: 1247 - DNA, 16 bp, Artificial Sequence
  Synthetic construct
gtcaagtcaacgatct

SEQ ID NO: 1248 - DNA, 16 bp, Artificial Sequence
  Synthetic construct
gtcaagtcaacgatct

SEQ ID NO: 1249 - DNA, 16 bp, Artificial Sequence
  Synthetic construct
gtcacaagtacaagta

SEQ ID NO: 1250 - DNA, 16 bp, Artificial Sequence
  Synthetic construct
gtcacaagtacaagta

SEQ ID NO: 1251 - DNA, 16 bp, Artificial Sequence
  Synthetic construct
gtcacaagtggcaaac

SEQ ID NO: 1252 - DNA, 16 bp, Artificial Sequence
  Synthetic construct
gtcacaagtggcaaac

SEQ ID NO: 1253 - DNA, 16 bp, Artificial Sequence
  Synthetic construct
gtcacaatcctcatta

SEQ ID NO: 1254 - DNA, 16 bp, Artificial Sequence
  Synthetic construct
gtcacaatcctcatta

SEQ ID NO: 1255 - DNA, 16 bp, Artificial Sequence
  Synthetic construct
gtcacggagctgtcta

SEQ ID NO: 1256 - DNA, 16 bp, Artificial Sequence
  Synthetic construct
gtcacggagctgtcta

SEQ ID NO: 1257 - DNA, 16 bp, Artificial Sequence
  Synthetic construct
gtcacggtctcgcttg

SEQ ID NO: 1258 - DNA, 16 bp, Artificial Sequence
  Synthetic construct
gtcacggtctcgcttg

SEQ ID NO: 1259 - DNA, 16 bp, Artificial Sequence
  Synthetic construct
gtcctcagtgcaggta

SEQ ID NO: 1260 - DNA, 16 bp, Artificial Sequence
  Synthetic construct
gtcctcagtgcaggta

SEQ ID NO: 1261 - DNA, 16 bp, Artificial Sequence
  Synthetic construct
gtctcgtagtgtctca

SEQ ID NO: 1262 - DNA, 16 bp, Artificial Sequence
  Synthetic construct
gtctcgtagtgtctca

SEQ ID NO: 1263 - DNA, 16 bp, Artificial Sequence
  Synthetic construct
gtctcgtagtgttaga

SEQ ID NO: 1264 - DNA, 16 bp, Artificial Sequence
  Synthetic construct
gtctcgtagtgttaga

SEQ ID NO: 1265 - DNA, 16 bp, Artificial Sequence
  Synthetic construct
gtctcgttctccaacc

SEQ ID NO: 1266 - DNA, 16 bp, Artificial Sequence
  Synthetic construct
gtctcgttctccaacc

SEQ ID NO: 1267 - DNA, 16 bp, Artificial Sequence
  Synthetic construct
gtcttcgagggctctc

SEQ ID NO: 1268 - DNA, 16 bp, Artificial Sequence
  Synthetic construct
gtcttcgagggctctc

SEQ ID NO: 1269 - DNA, 16 bp, Artificial Sequence
  Synthetic construct
gtgcagccaatggata

SEQ ID NO: 1270 - DNA, 16 bp, Artificial Sequence
  Synthetic construct
gtgcagccaatggata

SEQ ID NO: 1271 - DNA, 16 bp, Artificial Sequence
  Synthetic construct
gtgcagccagataatg

SEQ ID NO: 1272 - DNA, 16 bp, Artificial Sequence
  Synthetic construct
gtgcagccagataatg

SEQ ID NO: 1273 - DNA, 16 bp, Artificial Sequence
  Synthetic construct
gtgcagcgtctcatcc

SEQ ID NO: 1274 - DNA, 16 bp, Artificial Sequence
  Synthetic construct
gtgcagcgtctcatcc

SEQ ID NO: 1275 - DNA, 16 bp, Artificial Sequence
  Synthetic construct
gtgcttctctgttgag

SEQ ID NO: 1276 - DNA, 16 bp, Artificial Sequence
  Synthetic construct
gtgcttctctgttgag

SEQ ID NO: 1277 - DNA, 16 bp, Artificial Sequence
  Synthetic construct
gtgtgcgcagcttcgg

SEQ ID NO: 1278 - DNA, 16 bp, Artificial Sequence
  Synthetic construct
gtgtgcgcagcttcgg

SEQ ID NO: 1279 - DNA, 16 bp, Artificial Sequence
  Synthetic construct
gtgtgcggtcgcttct

SEQ ID NO: 1280 - DNA, 16 bp, Artificial Sequence
  Synthetic construct
gtgtgcggtcgcttct

SEQ ID NO: 1281 - DNA, 16 bp, Artificial Sequence
  Synthetic construct
gttaagcagcagcgta

SEQ ID NO: 1282 - DNA, 16 bp, Artificial Sequence
  Synthetic construct
gttaagcagcagcgta

SEQ ID NO: 1283 - DNA, 16 bp, Artificial Sequence
  Synthetic construct
gttaagcagtccagga

SEQ ID NO: 1284 - DNA, 16 bp, Artificial Sequence
  Synthetic construct
gttaagcagtccagga

SEQ ID NO: 1285 - DNA, 16 bp, Artificial Sequence
  Synthetic construct
gttaagcgtataaacg

SEQ ID NO: 1286 - DNA, 16 bp, Artificial Sequence
  Synthetic construct
gttaagcgtataaacg

SEQ ID NO: 1287 - DNA, 16 bp, Artificial Sequence
  Synthetic construct
gttaagctcaggccca

SEQ ID NO: 1288 - DNA, 16 bp, Artificial Sequence
  Synthetic construct
gttaagctcaggccca

SEQ ID NO: 1289 - DNA, 16 bp, Artificial Sequence
  Synthetic construct
gttacagcagggattg

SEQ ID NO: 1290 - DNA, 16 bp, Artificial Sequence
  Synthetic construct
gttacagcagggattg

SEQ ID NO: 1291 - DNA, 16 bp, Artificial Sequence
  Synthetic construct
gttacaggtataggta

SEQ ID NO: 1292 - DNA, 16 bp, Artificial Sequence
  Synthetic construct
gttacaggtataggta

SEQ ID NO: 1293 - DNA, 16 bp, Artificial Sequence
  Synthetic construct
gttacaggtatatccg

SEQ ID NO: 1294 - DNA, 16 bp, Artificial Sequence
  Synthetic construct
gttacaggtatatccg

SEQ ID NO: 1295 - DNA, 16 bp, Artificial Sequence
  Synthetic construct
gttcgggagaaggcct

SEQ ID NO: 1296 - DNA, 16 bp, Artificial Sequence
  Synthetic construct
gttcgggagaaggcct

SEQ ID NO: 1297 - DNA, 16 bp, Artificial Sequence
  Synthetic construct
gttcgggtcgtctgct

SEQ ID NO: 1298 - DNA, 16 bp, Artificial Sequence
  Synthetic construct
gttcgggtcgtctgct

SEQ ID NO: 1299 - DNA, 16 bp, Artificial Sequence
  Synthetic construct
taaaccgtcagtcagt

SEQ ID NO: 1300 - DNA, 16 bp, Artificial Sequence
  Synthetic construct
taaaccgtcagtcagt

SEQ ID NO: 1301 - DNA, 16 bp, Artificial Sequence
  Synthetic construct
taagagagtaatcgtc

SEQ ID NO: 1302 - DNA, 16 bp, Artificial Sequence
  Synthetic construct
taagagagtaatcgtc

SEQ ID NO: 1303 - DNA, 16 bp, Artificial Sequence
  Synthetic construct
taagtgcagccctaat

SEQ ID NO: 1304 - DNA, 16 bp, Artificial Sequence
  Synthetic construct
taagtgcagccctaat

SEQ ID NO: 1305 - DNA, 16 bp, Artificial Sequence
  Synthetic construct
taagtgcagtgggatc

SEQ ID NO: 1306 - DNA, 16 bp, Artificial Sequence
  Synthetic construct
taagtgcagtgggatc

SEQ ID NO: 1307 - DNA, 16 bp, Artificial Sequence
  Synthetic construct
taagtgccacggtaag

SEQ ID NO: 1308 - DNA, 16 bp, Artificial Sequence
  Synthetic construct
taagtgccacggtaag

SEQ ID NO: 1309 - DNA, 16 bp, Artificial Sequence
  Synthetic construct
tacacgacacttggat

SEQ ID NO: 1310 - DNA, 16 bp, Artificial Sequence
  Synthetic construct
tacacgacacttggat

SEQ ID NO: 1311 - DNA, 16 bp, Artificial Sequence
  Synthetic construct
tacacgatcactctta

SEQ ID NO: 1312 - DNA, 16 bp, Artificial Sequence
  Synthetic construct
tacacgatcactctta

SEQ ID NO: 1313 - DNA, 16 bp, Artificial Sequence
  Synthetic construct
tacagtgagatcctgt

SEQ ID NO: 1314 - DNA, 16 bp, Artificial Sequence
  Synthetic construct
tacagtgagatcctgt

SEQ ID NO: 1315 - DNA, 16 bp, Artificial Sequence
  Synthetic construct
tacagtggtaccatca

SEQ ID NO: 1316 - DNA, 16 bp, Artificial Sequence
  Synthetic construct
tacagtggtaccatca

SEQ ID NO: 1317 - DNA, 16 bp, Artificial Sequence
  Synthetic construct
tacagtgtcgcaaact

SEQ ID NO: 1318 - DNA, 16 bp, Artificial Sequence
  Synthetic construct
tacagtgtcgcaaact

SEQ ID NO: 1319 - DNA, 16 bp, Artificial Sequence
  Synthetic construct
tacctatcagccaatt

SEQ ID NO: 1320 - DNA, 16 bp, Artificial Sequence
  Synthetic construct
tacctatcagccaatt

SEQ ID NO: 1321 - DNA, 16 bp, Artificial Sequence
  Synthetic construct
taccttaagatcacgg

SEQ ID NO: 1322 - DNA, 16 bp, Artificial Sequence
  Synthetic construct
taccttaagatcacgg

SEQ ID NO: 1323 - DNA, 16 bp, Artificial Sequence
  Synthetic construct
taccttatctcaaacg

SEQ ID NO: 1324 - DNA, 16 bp, Artificial Sequence
  Synthetic construct
taccttatctcaaacg

SEQ ID NO: 1325 - DNA, 16 bp, Artificial Sequence
  Synthetic construct
taccttatctttaggg

SEQ ID NO: 1326 - DNA, 16 bp, Artificial Sequence
  Synthetic construct
taccttatctttaggg

SEQ ID NO: 1327 - DNA, 16 bp, Artificial Sequence
  Synthetic construct
tacggatgtgtttgtg

SEQ ID NO: 1328 - DNA, 16 bp, Artificial Sequence
  Synthetic construct
tacggatgtgtttgtg

SEQ ID NO: 1329 - DNA, 16 bp, Artificial Sequence
  Synthetic construct
tacggatgttagatga

SEQ ID NO: 1330 - DNA, 16 bp, Artificial Sequence
  Synthetic construct
tacggatgttagatga

SEQ ID NO: 1331 - DNA, 16 bp, Artificial Sequence
  Synthetic construct
tacgggcagggcttcc

SEQ ID NO: 1332 - DNA, 16 bp, Artificial Sequence
  Synthetic construct
tacgggcagggcttcc

SEQ ID NO: 1333 - DNA, 16 bp, Artificial Sequence
  Synthetic construct
tacggtagtaggcatg

SEQ ID NO: 1334 - DNA, 16 bp, Artificial Sequence
  Synthetic construct
tacggtagtaggcatg

SEQ ID NO: 1335 - DNA, 16 bp, Artificial Sequence
  Synthetic construct
tacggtagtctccact

SEQ ID NO: 1336 - DNA, 16 bp, Artificial Sequence
  Synthetic construct
tacggtagtctccact

SEQ ID NO: 1337 - DNA, 16 bp, Artificial Sequence
  Synthetic construct
tactcatagatgccag

SEQ ID NO: 1338 - DNA, 16 bp, Artificial Sequence
  Synthetic construct
tactcatagatgccag

SEQ ID NO: 1339 - DNA, 16 bp, Artificial Sequence
  Synthetic construct
tacttgtgtcggcact

SEQ ID NO: 1340 - DNA, 16 bp, Artificial Sequence
  Synthetic construct
tacttgtgtcggcact

SEQ ID NO: 1341 - DNA, 16 bp, Artificial Sequence
  Synthetic construct
tagaccagtgtatggg

SEQ ID NO: 1342 - DNA, 16 bp, Artificial Sequence
  Synthetic construct
tagaccagtgtatggg

SEQ ID NO: 1343 - DNA, 16 bp, Artificial Sequence
  Synthetic construct
tagagctcatgcaact

SEQ ID NO: 1344 - DNA, 16 bp, Artificial Sequence
  Synthetic construct
tagagctcatgcaact

SEQ ID NO: 1345 - DNA, 16 bp, Artificial Sequence
  Synthetic construct
tagagctgtgtaatga

SEQ ID NO: 1346 - DNA, 16 bp, Artificial Sequence
  Synthetic construct
tagagctgtgtaatga

SEQ ID NO: 1347 - DNA, 16 bp, Artificial Sequence
  Synthetic construct
taggcatagcgatagc

SEQ ID NO: 1348 - DNA, 16 bp, Artificial Sequence
  Synthetic construct
taggcatagcgatagc

SEQ ID NO: 1349 - DNA, 16 bp, Artificial Sequence
  Synthetic construct
taggcatcacttctgc

SEQ ID NO: 1350 - DNA, 16 bp, Artificial Sequence
  Synthetic construct
taggcatcacttctgc

SEQ ID NO: 1351 - DNA, 16 bp, Artificial Sequence
  Synthetic construct
tagttgggtcctcttg

SEQ ID NO: 1352 - DNA, 16 bp, Artificial Sequence
  Synthetic construct
tagttgggtcctcttg

SEQ ID NO: 1353 - DNA, 16 bp, Artificial Sequence
  Synthetic construct
tagttggtcagttcga

SEQ ID NO: 1354 - DNA, 16 bp, Artificial Sequence
  Synthetic construct
tagttggtcagttcga

SEQ ID NO: 1355 - DNA, 16 bp, Artificial Sequence
  Synthetic construct
tagttggtccatgagt

SEQ ID NO: 1356 - DNA, 16 bp, Artificial Sequence
  Synthetic construct
tagttggtccatgagt

SEQ ID NO: 1357 - DNA, 16 bp, Artificial Sequence
  Synthetic construct
tatctcacattacgac

SEQ ID NO: 1358 - DNA, 16 bp, Artificial Sequence
  Synthetic construct
tatctcacattacgac

SEQ ID NO: 1359 - DNA, 16 bp, Artificial Sequence
  Synthetic construct
tattacccattgcggc

SEQ ID NO: 1360 - DNA, 16 bp, Artificial Sequence
  Synthetic construct
tattacccattgcggc

SEQ ID NO: 1361 - DNA, 16 bp, Artificial Sequence
  Synthetic construct
tattaccgttgattcg

SEQ ID NO: 1362 - DNA, 16 bp, Artificial Sequence
  Synthetic construct
tattaccgttgattcg

SEQ ID NO: 1363 - DNA, 16 bp, Artificial Sequence
  Synthetic construct
tattacctccagaagg

SEQ ID NO: 1364 - DNA, 16 bp, Artificial Sequence
  Synthetic construct
tattacctccagaagg

SEQ ID NO: 1365 - DNA, 16 bp, Artificial Sequence
  Synthetic construct
tcaacgaaggcattgg

SEQ ID NO: 1366 - DNA, 16 bp, Artificial Sequence
  Synthetic construct
tcaacgaaggcattgg

SEQ ID NO: 1367 - DNA, 16 bp, Artificial Sequence
  Synthetic construct
tcaacgagtctacctc

SEQ ID NO: 1368 - DNA, 16 bp, Artificial Sequence
  Synthetic construct
tcaacgagtctacctc

SEQ ID NO: 1369 - DNA, 16 bp, Artificial Sequence
  Synthetic construct
tcaatctagatgggtc

SEQ ID NO: 1370 - DNA, 16 bp, Artificial Sequence
  Synthetic construct
tcaatctagatgggtc

SEQ ID NO: 1371 - DNA, 16 bp, Artificial Sequence
  Synthetic construct
tcaatctgtctagtgt

SEQ ID NO: 1372 - DNA, 16 bp, Artificial Sequence
  Synthetic construct
tcaatctgtctagtgt

SEQ ID NO: 1373 - DNA, 16 bp, Artificial Sequence
  Synthetic construct
tcacaaggtgtcctct

SEQ ID NO: 1374 - DNA, 16 bp, Artificial Sequence
  Synthetic construct
tcacaaggtgtcctct

SEQ ID NO: 1375 - DNA, 16 bp, Artificial Sequence
  Synthetic construct
tcacgaagtgtaagta

SEQ ID NO: 1376 - DNA, 16 bp, Artificial Sequence
  Synthetic construct
tcacgaagtgtaagta

SEQ ID NO: 1377 - DNA, 16 bp, Artificial Sequence
  Synthetic construct
tcacgaatcatcgatg

SEQ ID NO: 1378 - DNA, 16 bp, Artificial Sequence
  Synthetic construct
tcacgaatcatcgatg

SEQ ID NO: 1379 - DNA, 16 bp, Artificial Sequence
  Synthetic construct
tcagatgtctggcgtg

SEQ ID NO: 1380 - DNA, 16 bp, Artificial Sequence
  Synthetic construct
tcagatgtctggcgtg

SEQ ID NO: 1381 - DNA, 16 bp, Artificial Sequence
  Synthetic construct
tcagcaacaggctgaa

SEQ ID NO: 1382 - DNA, 16 bp, Artificial Sequence
  Synthetic construct
tcagcaacaggctgaa

SEQ ID NO: 1383 - DNA, 16 bp, Artificial Sequence
  Synthetic construct
tcagctcagaatgttg

SEQ ID NO: 1384 - DNA, 16 bp, Artificial Sequence
  Synthetic construct
tcagctcagaatgttg

SEQ ID NO: 1385 - DNA, 16 bp, Artificial Sequence
  Synthetic construct
tcagctcgtgatgata

SEQ ID NO: 1386 - DNA, 16 bp, Artificial Sequence
  Synthetic construct
tcagctcgtgatgata

SEQ ID NO: 1387 - DNA, 16 bp, Artificial Sequence
  Synthetic construct
tcagctctctatcgcc

SEQ ID NO: 1388 - DNA, 16 bp, Artificial Sequence
  Synthetic construct
tcagctctctatcgcc

SEQ ID NO: 1389 - DNA, 16 bp, Artificial Sequence
  Synthetic construct
tcaggatagcgtctat

SEQ ID NO: 1390 - DNA, 16 bp, Artificial Sequence
  Synthetic construct
tcaggatagcgtctat

SEQ ID NO: 1391 - DNA, 16 bp, Artificial Sequence
  Synthetic construct
tcaggataggtgcttt

SEQ ID NO: 1392 - DNA, 16 bp, Artificial Sequence
  Synthetic construct
tcaggataggtgcttt

SEQ ID NO: 1393 - DNA, 16 bp, Artificial Sequence
  Synthetic construct
tcaggtagtgtggttt

SEQ ID NO: 1394 - DNA, 16 bp, Artificial Sequence
  Synthetic construct
tcaggtagtgtggttt

SEQ ID NO: 1395 - DNA, 16 bp, Artificial Sequence
  Synthetic construct
tcattaccagcctttc

SEQ ID NO: 1396 - DNA, 16 bp, Artificial Sequence
  Synthetic construct
tcattaccagcctttc

SEQ ID NO: 1397 - DNA, 16 bp, Artificial Sequence
  Synthetic construct
tcattactcacaacgt

SEQ ID NO: 1398 - DNA, 16 bp, Artificial Sequence
  Synthetic construct
tcattactcacaacgt

SEQ ID NO: 1399 - DNA, 16 bp, Artificial Sequence
  Synthetic construct
tcattactctaagcca

SEQ ID NO: 1400 - DNA, 16 bp, Artificial Sequence
  Synthetic construct
tcattactctaagcca

SEQ ID NO: 1401 - DNA, 16 bp, Artificial Sequence
  Synthetic construct
tcatttgcaatccaac

SEQ ID NO: 1402 - DNA, 16 bp, Artificial Sequence
  Synthetic construct
tcatttgcaatccaac

SEQ ID NO: 1403 - DNA, 16 bp, Artificial Sequence
  Synthetic construct
tcatttgtcaataccg

SEQ ID NO: 1404 - DNA, 16 bp, Artificial Sequence
  Synthetic construct
tcatttgtcaataccg

SEQ ID NO: 1405 - DNA, 16 bp, Artificial Sequence
  Synthetic construct
tccacacaggcagtca

SEQ ID NO: 1406 - DNA, 16 bp, Artificial Sequence
  Synthetic construct
tccacacaggcagtca

SEQ ID NO: 1407 - DNA, 16 bp, Artificial Sequence
  Synthetic construct
tccacacgtcacaagg

SEQ ID NO: 1408 - DNA, 16 bp, Artificial Sequence
  Synthetic construct
tccacacgtcacaagg

SEQ ID NO: 1409 - DNA, 16 bp, Artificial Sequence
  Synthetic construct
tcccgatagggcacta

SEQ ID NO: 1410 - DNA, 16 bp, Artificial Sequence
  Synthetic construct
tcccgatagggcacta

SEQ ID NO: 1411 - DNA, 16 bp, Artificial Sequence
  Synthetic construct
tcgaggccacggtgtc

SEQ ID NO: 1412 - DNA, 16 bp, Artificial Sequence
  Synthetic construct
tcgaggccacggtgtc

SEQ ID NO: 1413 - DNA, 16 bp, Artificial Sequence
  Synthetic construct
tcgaggccagtcgtgc

SEQ ID NO: 1414 - DNA, 16 bp, Artificial Sequence
  Synthetic construct
tcgaggccagtcgtgc

SEQ ID NO: 1415 - DNA, 16 bp, Artificial Sequence
  Synthetic construct
tcgcgaggttcagtac

SEQ ID NO: 1416 - DNA, 16 bp, Artificial Sequence
  Synthetic construct
tcgcgaggttcagtac

SEQ ID NO: 1417 - DNA, 16 bp, Artificial Sequence
  Synthetic construct
tcgcgagtcagcttag

SEQ ID NO: 1418 - DNA, 16 bp, Artificial Sequence
  Synthetic construct
tcgcgagtcagcttag

SEQ ID NO: 1419 - DNA, 16 bp, Artificial Sequence
  Synthetic construct
tcgcgttagggaaaca

SEQ ID NO: 1420 - DNA, 16 bp, Artificial Sequence
  Synthetic construct
tcgcgttagggaaaca

SEQ ID NO: 1421 - DNA, 16 bp, Artificial Sequence
  Synthetic construct
tcgcgttcatgcccga

SEQ ID NO: 1422 - DNA, 16 bp, Artificial Sequence
  Synthetic construct
tcgcgttcatgcccga

SEQ ID NO: 1423 - DNA, 16 bp, Artificial Sequence
  Synthetic construct
tcgggacgtactctcc

SEQ ID NO: 1424 - DNA, 16 bp, Artificial Sequence
  Synthetic construct
tcgggacgtactctcc

SEQ ID NO: 1425 - DNA, 16 bp, Artificial Sequence
  Synthetic construct
tcgggacgtgctcttc

SEQ ID NO: 1426 - DNA, 16 bp, Artificial Sequence
  Synthetic construct
tcgggacgtgctcttc

SEQ ID NO: 1427 - DNA, 16 bp, Artificial Sequence
  Synthetic construct
tcggtaacaataagca

SEQ ID NO: 1428 - DNA, 16 bp, Artificial Sequence
  Synthetic construct
tcggtaacaataagca

SEQ ID NO: 1429 - DNA, 16 bp, Artificial Sequence
  Synthetic construct
tcggtaatcaccctca

SEQ ID NO: 1430 - DNA, 16 bp, Artificial Sequence
  Synthetic construct
tcggtaatcaccctca

SEQ ID NO: 1431 - DNA, 16 bp, Artificial Sequence
  Synthetic construct
tcggtaatcgaacgga

SEQ ID NO: 1432 - DNA, 16 bp, Artificial Sequence
  Synthetic construct
tcggtaatcgaacgga

SEQ ID NO: 1433 - DNA, 16 bp, Artificial Sequence
  Synthetic construct
tcgtacccaccgctag

SEQ ID NO: 1434 - DNA, 16 bp, Artificial Sequence
  Synthetic construct
tcgtacccaccgctag

SEQ ID NO: 1435 - DNA, 16 bp, Artificial Sequence
  Synthetic construct
tcgtacccagcctata

SEQ ID NO: 1436 - DNA, 16 bp, Artificial Sequence
  Synthetic construct
tcgtacccagcctata

SEQ ID NO: 1437 - DNA, 16 bp, Artificial Sequence
  Synthetic construct
tcgtacctcgtggacc

SEQ ID NO: 1438 - DNA, 16 bp, Artificial Sequence
  Synthetic construct
tcgtacctcgtggacc

SEQ ID NO: 1439 - DNA, 16 bp, Artificial Sequence
  Synthetic construct
tcgtagatcgacagcc

SEQ ID NO: 1440 - DNA, 16 bp, Artificial Sequence
  Synthetic construct
tcgtagatcgacagcc

SEQ ID NO: 1441 - DNA, 16 bp, Artificial Sequence
  Synthetic construct
tcgtagatcgccctta

SEQ ID NO: 1442 - DNA, 16 bp, Artificial Sequence
  Synthetic construct
tcgtagatcgccctta

SEQ ID NO: 1443 - DNA, 16 bp, Artificial Sequence
  Synthetic construct
tctattggtcgctttc

SEQ ID NO: 1444 - DNA, 16 bp, Artificial Sequence
  Synthetic construct
tctattggtcgctttc

SEQ ID NO: 1445 - DNA, 16 bp, Artificial Sequence
  Synthetic construct
tctcatagtcttcgtc

SEQ ID NO: 1446 - DNA, 16 bp, Artificial Sequence
  Synthetic construct
tctcatagtcttcgtc

SEQ ID NO: 1447 - DNA, 16 bp, Artificial Sequence
  Synthetic construct
tctggaacacaacgtt

SEQ ID NO: 1448 - DNA, 16 bp, Artificial Sequence
  Synthetic construct
tctggaacacaacgtt

SEQ ID NO: 1449 - DNA, 16 bp, Artificial Sequence
  Synthetic construct
tcttcggagagtacat

SEQ ID NO: 1450 - DNA, 16 bp, Artificial Sequence
  Synthetic construct
tcttcggagagtacat

SEQ ID NO: 1451 - DNA, 16 bp, Artificial Sequence
  Synthetic construct
tcttcggcaaaggtgc

SEQ ID NO: 1452 - DNA, 16 bp, Artificial Sequence
  Synthetic construct
tcttcggcaaaggtgc

SEQ ID NO: 1453 - DNA, 16 bp, Artificial Sequence
  Synthetic construct
tcttcggcaccacgtg

SEQ ID NO: 1454 - DNA, 16 bp, Artificial Sequence
  Synthetic construct
tcttcggcaccacgtg

SEQ ID NO: 1455 - DNA, 16 bp, Artificial Sequence
  Synthetic construct
tcttcggcaggtctcg

SEQ ID NO: 1456 - DNA, 16 bp, Artificial Sequence
  Synthetic construct
tcttcggcaggtctcg

SEQ ID NO: 1457 - DNA, 16 bp, Artificial Sequence
  Synthetic construct
tcttcggcatggatgg

SEQ ID NO: 1458 - DNA, 16 bp, Artificial Sequence
  Synthetic construct
tcttcggcatggatgg

SEQ ID NO: 1459 - DNA, 16 bp, Artificial Sequence
  Synthetic construct
tgaaagacaaaggcgt

SEQ ID NO: 1460 - DNA, 16 bp, Artificial Sequence
  Synthetic construct
tgaaagacaaaggcgt

SEQ ID NO: 1461 - DNA, 16 bp, Artificial Sequence
  Synthetic construct
tgaaagatcgtctgaa

SEQ ID NO: 1462 - DNA, 16 bp, Artificial Sequence
  Synthetic construct
tgaaagatcgtctgaa

SEQ ID NO: 1463 - DNA, 16 bp, Artificial Sequence
  Synthetic construct
tgacaacgtaaatgtg

SEQ ID NO: 1464 - DNA, 16 bp, Artificial Sequence
  Synthetic construct
tgacaacgtaaatgtg

SEQ ID NO: 1465 - DNA, 16 bp, Artificial Sequence
  Synthetic construct
tgacaactcaataccg

SEQ ID NO: 1466 - DNA, 16 bp, Artificial Sequence
  Synthetic construct
tgacaactcaataccg

SEQ ID NO: 1467 - DNA, 16 bp, Artificial Sequence
  Synthetic construct
tgacaactcaggcaag

SEQ ID NO: 1468 - DNA, 16 bp, Artificial Sequence
  Synthetic construct
tgacaactcaggcaag

SEQ ID NO: 1469 - DNA, 16 bp, Artificial Sequence
  Synthetic construct
tgacaactccatgctc

SEQ ID NO: 1470 - DNA, 16 bp, Artificial Sequence
  Synthetic construct
tgacaactccatgctc

SEQ ID NO: 1471 - DNA, 16 bp, Artificial Sequence
  Synthetic construct
tgacaactctaagcca

SEQ ID NO: 1472 - DNA, 16 bp, Artificial Sequence
  Synthetic construct
tgacaactctaagcca

SEQ ID NO: 1473 - DNA, 16 bp, Artificial Sequence
  Synthetic construct
tgacggccacatgact

SEQ ID NO: 1474 - DNA, 16 bp, Artificial Sequence
  Synthetic construct
tgacggccacatgact

SEQ ID NO: 1475 - DNA, 16 bp, Artificial Sequence
  Synthetic construct
tgacggcgttcccttg

SEQ ID NO: 1476 - DNA, 16 bp, Artificial Sequence
  Synthetic construct
tgacggcgttcccttg

SEQ ID NO: 1477 - DNA, 16 bp, Artificial Sequence
  Synthetic construct
tgactagcatccttgc

SEQ ID NO: 1478 - DNA, 16 bp, Artificial Sequence
  Synthetic construct
tgactagcatccttgc

SEQ ID NO: 1479 - DNA, 16 bp, Artificial Sequence
  Synthetic construct
tgactagtcggatgga

SEQ ID NO: 1480 - DNA, 16 bp, Artificial Sequence
  Synthetic construct
tgactagtcggatgga

SEQ ID NO: 1481 - DNA, 16 bp, Artificial Sequence
  Synthetic construct
tgactttgtaaaggag

SEQ ID NO: 1482 - DNA, 16 bp, Artificial Sequence
  Synthetic construct
tgactttgtaaaggag

SEQ ID NO: 1483 - DNA, 16 bp, Artificial Sequence
  Synthetic construct
tgagaggtctggtatg

SEQ ID NO: 1484 - DNA, 16 bp, Artificial Sequence
  Synthetic construct
tgagaggtctggtatg

SEQ ID NO: 1485 - DNA, 16 bp, Artificial Sequence
  Synthetic construct
tgagccggttgcgtta

SEQ ID NO: 1486 - DNA, 16 bp, Artificial Sequence
  Synthetic construct
tgagccggttgcgtta

SEQ ID NO: 1487 - DNA, 16 bp, Artificial Sequence
  Synthetic construct
tgagggagttgtggcc

SEQ ID NO: 1488 - DNA, 16 bp, Artificial Sequence
  Synthetic construct
tgagggagttgtggcc

SEQ ID NO: 1489 - DNA, 16 bp, Artificial Sequence
  Synthetic construct
tgagggatcgagagca

SEQ ID NO: 1490 - DNA, 16 bp, Artificial Sequence
  Synthetic construct
tgagggatcgagagca

SEQ ID NO: 1491 - DNA, 16 bp, Artificial Sequence
  Synthetic construct
tgatttcgtggtaacg

SEQ ID NO: 1492 - DNA, 16 bp, Artificial Sequence
  Synthetic construct
tgatttcgtggtaacg

SEQ ID NO: 1493 - DNA, 16 bp, Artificial Sequence
  Synthetic construct
tgatttctcgatccct

SEQ ID NO: 1494 - DNA, 16 bp, Artificial Sequence
  Synthetic construct
tgatttctcgatccct

SEQ ID NO: 1495 - DNA, 16 bp, Artificial Sequence
  Synthetic construct
tgcacctcaccggaaa

SEQ ID NO: 1496 - DNA, 16 bp, Artificial Sequence
  Synthetic construct
tgcacctcaccggaaa

SEQ ID NO: 1497 - DNA, 16 bp, Artificial Sequence
  Synthetic construct
tgcacctcagctattg

SEQ ID NO: 1498 - DNA, 16 bp, Artificial Sequence
  Synthetic construct
tgcacctcagctattg

SEQ ID NO: 1499 - DNA, 16 bp, Artificial Sequence
  Synthetic construct
tgcacctgtgactact

SEQ ID NO: 1500 - DNA, 16 bp, Artificial Sequence
  Synthetic construct
tgcacctgtgactact

SEQ ID NO: 1501 - DNA, 16 bp, Artificial Sequence
  Synthetic construct
tgccaaaagtatgaca

SEQ ID NO: 1502 - DNA, 16 bp, Artificial Sequence
  Synthetic construct
tgccaaaagtatgaca

SEQ ID NO: 1503 - DNA, 16 bp, Artificial Sequence
  Synthetic construct
tgccctacagttcatg

SEQ ID NO: 1504 - DNA, 16 bp, Artificial Sequence
  Synthetic construct
tgccctacagttcatg

SEQ ID NO: 1505 - DNA, 16 bp, Artificial Sequence
  Synthetic construct
tgccctagtaagtgta

SEQ ID NO: 1506 - DNA, 16 bp, Artificial Sequence
  Synthetic construct
tgccctagtaagtgta

SEQ ID NO: 1507 - DNA, 16 bp, Artificial Sequence
  Synthetic construct
tgccctagtgcgatag

SEQ ID NO: 1508 - DNA, 16 bp, Artificial Sequence
  Synthetic construct
tgccctagtgcgatag

SEQ ID NO: 1509 - DNA, 16 bp, Artificial Sequence
  Synthetic construct
tgcgggtcaaggttct

SEQ ID NO: 1510 - DNA, 16 bp, Artificial Sequence
  Synthetic construct
tgcgggtcaaggttct

SEQ ID NO: 1511 - DNA, 16 bp, Artificial Sequence
  Synthetic construct
tgcgggtcatgacatc

SEQ ID NO: 1512 - DNA, 16 bp, Artificial Sequence
  Synthetic construct
tgcgggtcatgacatc

SEQ ID NO: 1513 - DNA, 16 bp, Artificial Sequence
  Synthetic construct
tgctacccaagccgct

SEQ ID NO: 1514 - DNA, 16 bp, Artificial Sequence
  Synthetic construct
tgctacccaagccgct

SEQ ID NO: 1515 - DNA, 16 bp, Artificial Sequence
  Synthetic construct
tgctgctagagtaatc

SEQ ID NO: 1516 - DNA, 16 bp, Artificial Sequence
  Synthetic construct
tgctgctagagtaatc

SEQ ID NO: 1517 - DNA, 16 bp, Artificial Sequence
  Synthetic construct
tgctgctgttccgtct

SEQ ID NO: 1518 - DNA, 16 bp, Artificial Sequence
  Synthetic construct
tgctgctgttccgtct

SEQ ID NO: 1519 - DNA, 16 bp, Artificial Sequence
  Synthetic construct
tggacgccagtaagcg

SEQ ID NO: 1520 - DNA, 16 bp, Artificial Sequence
  Synthetic construct
tggacgccagtaagcg

SEQ ID NO: 1521 - DNA, 16 bp, Artificial Sequence
  Synthetic construct
tggccagagagactat

SEQ ID NO: 1522 - DNA, 16 bp, Artificial Sequence
  Synthetic construct
tggccagagagactat

SEQ ID NO: 1523 - DNA, 16 bp, Artificial Sequence
  Synthetic construct
tggccagcaaaggtgc

SEQ ID NO: 1524 - DNA, 16 bp, Artificial Sequence
  Synthetic construct
tggccagcaaaggtgc

SEQ ID NO: 1525 - DNA, 16 bp, Artificial Sequence
  Synthetic construct
tggcgcagtcaactgt

SEQ ID NO: 1526 - DNA, 16 bp, Artificial Sequence
  Synthetic construct
tggcgcagtcaactgt

SEQ ID NO: 1527 - DNA, 16 bp, Artificial Sequence
  Synthetic construct
tggcgcatcaggccca

SEQ ID NO: 1528 - DNA, 16 bp, Artificial Sequence
  Synthetic construct
tggcgcatcaggccca

SEQ ID NO: 1529 - DNA, 16 bp, Artificial Sequence
  Synthetic construct
tggctggagacgcaac

SEQ ID NO: 1530 - DNA, 16 bp, Artificial Sequence
  Synthetic construct
tggctggagacgcaac

SEQ ID NO: 1531 - DNA, 16 bp, Artificial Sequence
  Synthetic construct
tggctggcatgtcgat

SEQ ID NO: 1532 - DNA, 16 bp, Artificial Sequence
  Synthetic construct
tggctggcatgtcgat

SEQ ID NO: 1533 - DNA, 16 bp, Artificial Sequence
  Synthetic construct
tggctgggttggtaaa

SEQ ID NO: 1534 - DNA, 16 bp, Artificial Sequence
  Synthetic construct
tggctgggttggtaaa

SEQ ID NO: 1535 - DNA, 16 bp, Artificial Sequence
  Synthetic construct
tggctggtcgccctta

SEQ ID NO: 1536 - DNA, 16 bp, Artificial Sequence
  Synthetic construct
tggctggtcgccctta

SEQ ID NO: 1537 - DNA, 16 bp, Artificial Sequence
  Synthetic construct
tgggaagcagctccga

SEQ ID NO: 1538 - DNA, 16 bp, Artificial Sequence
  Synthetic construct
tgggaagcagctccga

SEQ ID NO: 1539 - DNA, 16 bp, Artificial Sequence
  Synthetic construct
tgggaaggtgaaatca

SEQ ID NO: 1540 - DNA, 16 bp, Artificial Sequence
  Synthetic construct
tgggaaggtgaaatca

SEQ ID NO: 1541 - DNA, 16 bp, Artificial Sequence
  Synthetic construct
tgggaagtccgttgtc

SEQ ID NO: 1542 - DNA, 16 bp, Artificial Sequence
  Synthetic construct
tgggaagtccgttgtc

SEQ ID NO: 1543 - DNA, 16 bp, Artificial Sequence
  Synthetic construct
tgggcgtcaagagtcg

SEQ ID NO: 1544 - DNA, 16 bp, Artificial Sequence
  Synthetic construct
tgggcgtcaagagtcg

SEQ ID NO: 1545 - DNA, 16 bp, Artificial Sequence
  Synthetic construct
tggttaggtccctact

SEQ ID NO: 1546 - DNA, 16 bp, Artificial Sequence
  Synthetic construct
tggttaggtccctact

SEQ ID NO: 1547 - DNA, 16 bp, Artificial Sequence
  Synthetic construct
tggttagtccaaatgc

SEQ ID NO: 1548 - DNA, 16 bp, Artificial Sequence
  Synthetic construct
tggttagtccaaatgc

SEQ ID NO: 1549 - DNA, 16 bp, Artificial Sequence
  Synthetic construct
tgtcccacaccagcac

SEQ ID NO: 1550 - DNA, 16 bp, Artificial Sequence
  Synthetic construct
tgtcccacaccagcac

SEQ ID NO: 1551 - DNA, 16 bp, Artificial Sequence
  Synthetic construct
tgtcccacatcgatgt

SEQ ID NO: 1552 - DNA, 16 bp, Artificial Sequence
  Synthetic construct
tgtcccacatcgatgt

SEQ ID NO: 1553 - DNA, 16 bp, Artificial Sequence
  Synthetic construct
tgtcccagtagaggaa

SEQ ID NO: 1554 - DNA, 16 bp, Artificial Sequence
  Synthetic construct
tgtcccagtagaggaa

SEQ ID NO: 1555 - DNA, 16 bp, Artificial Sequence
  Synthetic construct
tgtcccatcacaaacc

SEQ ID NO: 1556 - DNA, 16 bp, Artificial Sequence
  Synthetic construct
tgtcccatcacaaacc

SEQ ID NO: 1557 - DNA, 16 bp, Artificial Sequence
  Synthetic construct
tgtgtttagtatgaca

SEQ ID NO: 1558 - DNA, 16 bp, Artificial Sequence
  Synthetic construct
tgtgtttagtatgaca

SEQ ID NO: 1559 - DNA, 16 bp, Artificial Sequence
  Synthetic construct
tgttccggtacgaaat

SEQ ID NO: 1560 - DNA, 16 bp, Artificial Sequence
  Synthetic construct
tgttccggtacgaaat

SEQ ID NO: 1561 - DNA, 16 bp, Artificial Sequence
  Synthetic construct
ttaactcaggctatct

SEQ ID NO: 1562 - DNA, 16 bp, Artificial Sequence
  Synthetic construct
ttaactcaggctatct

SEQ ID NO: 1563 - DNA, 16 bp, Artificial Sequence
  Synthetic construct
ttaactccacccattc

SEQ ID NO: 1564 - DNA, 16 bp, Artificial Sequence
  Synthetic construct
ttaactccacccattc

SEQ ID NO: 1565 - DNA, 16 bp, Artificial Sequence
  Synthetic construct
ttaactccagacgctc

SEQ ID NO: 1566 - DNA, 16 bp, Artificial Sequence
  Synthetic construct
ttaactccagacgctc

SEQ ID NO: 1567 - DNA, 16 bp, Artificial Sequence
  Synthetic construct
ttaggcatcaccatag

SEQ ID NO: 1568 - DNA, 16 bp, Artificial Sequence
  Synthetic construct
ttaggcatcaccatag

SEQ ID NO: 1569 - DNA, 16 bp, Artificial Sequence
  Synthetic construct
ttagttctcggttcgg

SEQ ID NO: 1570 - DNA, 16 bp, Artificial Sequence
  Synthetic construct
ttagttctcggttcgg

SEQ ID NO: 1571 - DNA, 16 bp, Artificial Sequence
  Synthetic construct
ttatgctcatgcccga

SEQ ID NO: 1572 - DNA, 16 bp, Artificial Sequence
  Synthetic construct
ttatgctcatgcccga

SEQ ID NO: 1573 - DNA, 16 bp, Artificial Sequence
  Synthetic construct
ttcccagagacgacgt

SEQ ID NO: 1574 - DNA, 16 bp, Artificial Sequence
  Synthetic construct
ttcccagagacgacgt

SEQ ID NO: 1575 - DNA, 16 bp, Artificial Sequence
  Synthetic construct
ttcccagagcccagct

SEQ ID NO: 1576 - DNA, 16 bp, Artificial Sequence
  Synthetic construct
ttcccagagcccagct

SEQ ID NO: 1577 - DNA, 16 bp, Artificial Sequence
  Synthetic construct
ttcccagcatgcaatc

SEQ ID NO: 1578 - DNA, 16 bp, Artificial Sequence
  Synthetic construct
ttcccagcatgcaatc

SEQ ID NO: 1579 - DNA, 16 bp, Artificial Sequence
  Synthetic construct
ttcccagtcggtccga

SEQ ID NO: 1580 - DNA, 16 bp, Artificial Sequence
  Synthetic construct
ttcccagtcggtccga

SEQ ID NO: 1581 - DNA, 16 bp, Artificial Sequence
  Synthetic construct
ttcgaagagcgtgaac

SEQ ID NO: 1582 - DNA, 16 bp, Artificial Sequence
  Synthetic construct
ttcgaagagcgtgaac

SEQ ID NO: 1583 - DNA, 16 bp, Artificial Sequence
  Synthetic construct
ttcgaagcaagaagag

SEQ ID NO: 1584 - DNA, 16 bp, Artificial Sequence
  Synthetic construct
ttcgaagcaagaagag

SEQ ID NO: 1585 - DNA, 16 bp, Artificial Sequence
  Synthetic construct
ttcggtcagggcacta

SEQ ID NO: 1586 - DNA, 16 bp, Artificial Sequence
  Synthetic construct
ttcggtcagggcacta

SEQ ID NO: 1587 - DNA, 16 bp, Artificial Sequence
  Synthetic construct
ttcggtcaggtgcttt

SEQ ID NO: 1588 - DNA, 16 bp, Artificial Sequence
  Synthetic construct
ttcggtcaggtgcttt

SEQ ID NO: 1589 - DNA, 16 bp, Artificial Sequence
  Synthetic construct
ttcggtcagtggagaa

SEQ ID NO: 1590 - DNA, 16 bp, Artificial Sequence
  Synthetic construct
ttcggtcagtggagaa

SEQ ID NO: 1591 - DNA, 16 bp, Artificial Sequence
  Synthetic construct
ttctacaaggatatac

SEQ ID NO: 1592 - DNA, 16 bp, Artificial Sequence
  Synthetic construct
ttctacaaggatatac

SEQ ID NO: 1593 - DNA, 16 bp, Artificial Sequence
  Synthetic construct
ttctacacacggctac

SEQ ID NO: 1594 - DNA, 16 bp, Artificial Sequence
  Synthetic construct
ttctacacacggctac

SEQ ID NO: 1595 - DNA, 16 bp, Artificial Sequence
  Synthetic construct
ttctacacagcctttc

SEQ ID NO: 1596 - DNA, 16 bp, Artificial Sequence
  Synthetic construct
ttctacacagcctttc

SEQ ID NO: 1597 - DNA, 16 bp, Artificial Sequence
  Synthetic construct
ttctacagtgtgaccc

SEQ ID NO: 1598 - DNA, 16 bp, Artificial Sequence
  Synthetic construct
ttctacagtgtgaccc

SEQ ID NO: 1599 - DNA, 16 bp, Artificial Sequence
  Synthetic construct
ttctcaaagaggtacc

SEQ ID NO: 1600 - DNA, 16 bp, Artificial Sequence
  Synthetic construct
ttctcaaagaggtacc

SEQ ID NO: 1601 - DNA, 16 bp, Artificial Sequence
  Synthetic construct
ttctcaacaactgcta

SEQ ID NO: 1602 - DNA, 16 bp, Artificial Sequence
  Synthetic construct
ttctcaacaactgcta

SEQ ID NO: 1603 - DNA, 16 bp, Artificial Sequence
  Synthetic construct
ttctcctagcgttgcc

SEQ ID NO: 1604 - DNA, 16 bp, Artificial Sequence
  Synthetic construct
ttctcctagcgttgcc

SEQ ID NO: 1605 - DNA, 16 bp, Artificial Sequence
  Synthetic construct
ttcttagagtggacgt

SEQ ID NO: 1606 - DNA, 16 bp, Artificial Sequence
  Synthetic construct
ttcttagagtggacgt

SEQ ID NO: 1607 - DNA, 16 bp, Artificial Sequence
  Synthetic construct
ttcttagcacatccgg

SEQ ID NO: 1608 - DNA, 16 bp, Artificial Sequence
  Synthetic construct
ttcttagcacatccgg

SEQ ID NO: 1609 - DNA, 16 bp, Artificial Sequence
  Synthetic construct
ttcttagtcatgctcc

SEQ ID NO: 1610 - DNA, 16 bp, Artificial Sequence
  Synthetic construct
ttcttagtcatgctcc

SEQ ID NO: 1611 - DNA, 16 bp, Artificial Sequence
  Synthetic construct
ttgaacgcatatgctg

SEQ ID NO: 1612 - DNA, 16 bp, Artificial Sequence
  Synthetic construct
ttgaacgcatatgctg

SEQ ID NO: 1613 - DNA, 16 bp, Artificial Sequence
  Synthetic construct
ttgaacggtttagctg

SEQ ID NO: 1614 - DNA, 16 bp, Artificial Sequence
  Synthetic construct
ttgaacggtttagctg

SEQ ID NO: 1615 - DNA, 16 bp, Artificial Sequence
  Synthetic construct
ttgacttcagacactt

SEQ ID NO: 1616 - DNA, 16 bp, Artificial Sequence
  Synthetic construct
ttgacttcagacactt

SEQ ID NO: 1617 - DNA, 16 bp, Artificial Sequence
  Synthetic construct
ttgacttgtgcaccac

SEQ ID NO: 1618 - DNA, 16 bp, Artificial Sequence
  Synthetic construct
ttgacttgtgcaccac

SEQ ID NO: 1619 - DNA, 16 bp, Artificial Sequence
  Synthetic construct
ttgccgtcaagacacg

SEQ ID NO: 1620 - DNA, 16 bp, Artificial Sequence
  Synthetic construct
ttgccgtcaagacacg

SEQ ID NO: 1621 - DNA, 16 bp, Artificial Sequence
  Synthetic construct
ttgccgtgtctcacct

SEQ ID NO: 1622 - DNA, 16 bp, Artificial Sequence
  Synthetic construct
ttgccgtgtctcacct

SEQ ID NO: 1623 - DNA, 16 bp, Artificial Sequence
  Synthetic construct
ttgcgtcaggcgatac

SEQ ID NO: 1624 - DNA, 16 bp, Artificial Sequence
  Synthetic construct
ttgcgtcaggcgatac

SEQ ID NO: 1625 - DNA, 16 bp, Artificial Sequence
  Synthetic construct
ttggcaaaggccctca

SEQ ID NO: 1626 - DNA, 16 bp, Artificial Sequence
  Synthetic construct
ttggcaaaggccctca

SEQ ID NO: 1627 - DNA, 16 bp, Artificial Sequence
  Synthetic construct
ttggcaacattctcat

SEQ ID NO: 1628 - DNA, 16 bp, Artificial Sequence
  Synthetic construct
ttggcaacattctcat

SEQ ID NO: 1629 - DNA, 16 bp, Artificial Sequence
  Synthetic construct
ttggcaatcccgactt

SEQ ID NO: 1630 - DNA, 16 bp, Artificial Sequence
  Synthetic construct
ttggcaatcccgactt

SEQ ID NO: 1631 - DNA, 16 bp, Artificial Sequence
  Synthetic construct
ttgtaggagcggatca

SEQ ID NO: 1632 - DNA, 16 bp, Artificial Sequence
  Synthetic construct
ttgtaggagcggatca

SEQ ID NO: 1633 - DNA, 16 bp, Artificial Sequence
  Synthetic construct
ttgtaggtcagcatgt

SEQ ID NO: 1634 - DNA, 16 bp, Artificial Sequence
  Synthetic construct
ttgtaggtcagcatgt

SEQ ID NO: 1635 - DNA, 16 bp, Artificial Sequence
  Synthetic construct
tttactgagaggttat

SEQ ID NO: 1636 - DNA, 16 bp, Artificial Sequence
  Synthetic construct
tttactgagaggttat

SEQ ID NO: 1637 - DNA, 16 bp, Artificial Sequence
  Synthetic construct
tttatgccacaagacg

SEQ ID NO: 1638 - DNA, 16 bp, Artificial Sequence
  Synthetic construct
tttatgccacaagacg

SEQ ID NO: 1639 - DNA, 16 bp, Artificial Sequence
  Synthetic construct
tttatgctctcgttta

SEQ ID NO: 1640 - DNA, 16 bp, Artificial Sequence
  Synthetic construct
tttatgctctcgttta

SEQ ID NO: 1641 - DNA, 16 bp, Artificial Sequence
  Synthetic construct
tttcctccagggtatg

SEQ ID NO: 1642 - DNA, 16 bp, Artificial Sequence
  Synthetic construct
tttcctccagggtatg

SEQ ID NO: 1643 - DNA, 16 bp, Artificial Sequence
  Synthetic construct
tttcctcgtatcgcat

SEQ ID NO: 1644 - DNA, 16 bp, Artificial Sequence
  Synthetic construct
tttcctcgtatcgcat

SEQ ID NO: 1645 - DNA, 16 bp, Artificial Sequence
  Synthetic construct
tttgcgcagctgttca

SEQ ID NO: 1646 - DNA, 16 bp, Artificial Sequence
  Synthetic construct
tttgcgcagctgttca

SEQ ID NO: 1647 - DNA, 16 bp, Artificial Sequence
  Synthetic construct
tttgcgccaagccgct

SEQ ID NO: 1648 - DNA, 16 bp, Artificial Sequence
  Synthetic construct
tttgcgccaagccgct

SEQ ID NO: 1649 - DNA, 16 bp, Artificial Sequence
  Synthetic construct
tttgcgccaggtccac

SEQ ID NO: 1650 - DNA, 16 bp, Artificial Sequence
  Synthetic construct
tttgcgccaggtccac

SEQ ID NO: 1651 - DNA, 16 bp, Artificial Sequence
  Synthetic construct
tttgcgccatctcgct

SEQ ID NO: 1652 - DNA, 16 bp, Artificial Sequence
  Synthetic construct
tttgcgccatctcgct

SEQ ID NO: 1653 - DNA, 16 bp, Artificial Sequence
  Synthetic construct
tttggttgttgcctct

SEQ ID NO: 1654 - DNA, 16 bp, Artificial Sequence
  Synthetic construct
tttggttgttgcctct

SEQ ID NO: 1655 - DNA, 16 bp, Artificial Sequence
  Synthetic construct
tttgtcacaggctcac

SEQ ID NO: 1656 - DNA, 16 bp, Artificial Sequence
  Synthetic construct
tttgtcacaggctcac

SEQ ID NO: 1657 - protein, 123 aa, Artificial Sequence
  Synthetic construct
QVQLQESGPGLVKASQTLSLTCTVSGGSISSGAYYWSWIRQHPGKGLEWIGYIYHSGSTYYNPSLKSRVTISVDTSKNQFSLKLSSVTAADTAVYYCARDPYMNGWYYGMDVWGQGTTVTVSS

SEQ ID NO: 1658 - protein, 120 aa, Artificial Sequence
  Synthetic construct
QVQLQQWGAGLLKPSETLSLTCGVYGGSFSGYYWSWIRQPPGKGLEWIGEIYHSGSTNYNPSLKSRVTISVDTSKNQFSLKLSSVTAADTAVYYCARGWGSGSYTLYDYWGQGTLVTVSS

SEQ ID NO: 1659 - protein, 91 aa, Artificial Sequence
  Synthetic construct
SSFAMHWVRQAPGTGLEWVAVISYDGSNKYYADSVKGRFTISRDNSKNTLYLQMNSLRTEDTAVFYCARAKGGNYYYFDYWGQGTLVTVSS

SEQ ID NO: 1660 - protein, 127 aa, Artificial Sequence
  Synthetic construct
EVQLVQSGPEVKKPGQSLKISCQGSGYSFSNYWIAWVRHMPGKGLEWMGIVYPGDSDTRYSPSFQGLVTISVDKSINTAYLQRSNLRASDTAIYYCARGAMEEIGKTRFSYNYFDRWGQGTLVTVSS

SEQ ID NO: 1661 - protein, 126 aa, Artificial Sequence
  Synthetic construct
QVQLVQSGAEVKKLGASVKVSCKASGYTFTTYGISWVRQAPGQGLEWMGWISAYNSNTSYAQKVQGRVTMTTDTSTSTAYMELRSLRSDDTAVYYCARSMYPSLRFAAAGGAFDYWGQGTLVTVSS

SEQ ID NO: 1662 - protein, 131 aa, Artificial Sequence
  Synthetic construct
QVQLQESGPGLVKPSETLSLTCTVSGGSISDHYWSWIRQPPGKGLEWIGYIYNSGSTNYNPSLKSRVAISLDTSKNQFSLKLTSVTAADTAVYYCARDLRETGDCSGPNCYVGKFTWFDPWGQGALVTVSS

SEQ ID NO: 1663 - protein, 121 aa, Artificial Sequence
  Synthetic construct
QVQLVESGGGVVQPGRSLRLSCAASGFTFSVYAMHWVRQAPGRGLEWVALISYDGNNKYYADSVKGRFTISRDNSKNTLYLQVNSLRVEDTAVYYCARGYGGHYYYGMDVWGQGTTVTVSS

SEQ ID NO: 1664 - protein, 127 aa, Artificial Sequence
  Synthetic construct
EVQLVESGGGLVKPGGSLRLSCAASGFTFSNYSMNWVRQAPGEGLEWVSSIRSSSYIYYADSVKGRFTISRDNAKNSLYLQMNGLRAEDTAVYYCARDNRLGELWLGELLGGDFDYWGQGTLVTVSS

SEQ ID NO: 1665 - protein, 124 aa, Artificial Sequence
  Synthetic construct
QVQLVQSGAEVKTPGASVKVSCKASGYTFTSFYMHWVRQAPGQGLEYMGIINPSGGTTAYAQKFQGRVTMTRDTSTSTVYMELRSLRSEDTAVYYCARGQGYVWGSFRHHLDYWGQGTLVTVSS

SEQ ID NO: 1666 - protein, 128 aa, Artificial Sequence
  Synthetic construct
QVQVVQSGTEVKKPGASVKVSCKVSGYTLTELSMHWVRQAPGKGLEWMGGFDPEDAETIYAQKFRGRVTMTEDTSTDTAYLELSSLRSEDTAVYYCATAPAIAGNVTIYYYYYGMDVWGQGTTVTVSS

SEQ ID NO: 1667 - protein, 124 aa, Artificial Sequence
  Synthetic construct
EVQLLESGGGLVQPGGSLRLSCAASGFTFSNYAMSWVRQAPGKGLEWVSGISGSGGNTYYADSVKGRFTVSRDNSKNTLYLQMNSLRAEDTAVYYCAKGERIMILVVITLFDYWGQGTLVTVSA

SEQ ID NO: 1668 - protein, 119 aa, Artificial Sequence
  Synthetic construct
QVQLVESGGGVVQPGRSLRLSCAASGFTFSSYAMHWVRQAPGKGLEWVAVISYDGSNKYYADSVKGRFSISRDNSKNTLYLQMNSLRAEDTAVYYCARGSGSYHLQRYWGQGTLVTVSS

SEQ ID NO: 1669 - protein, 118 aa, Artificial Sequence
  Synthetic construct
QVQLQESGPGLVKPSGTLSLTCAVSGGSITSNNWWSWVRQPPGKGLEWIGEIYHSGNTNYNPSLKSRVTISIDKSNNLFSLRLTSVTAADTAVYYCAPRGWRNLFDYWGQGTLVTVSS

SEQ ID NO: 1670 - protein, 126 aa, Artificial Sequence
  Synthetic construct
QVQLQESGPGLVKPSQTLSLTCTVSGGSISSGDYYWSWIRQPPGKGLEWIGYIYYSGSTHYNPSLKSRLTISLDTSKNQFSLKLRSVSAADTAVYYCVREVGLLDYYYYYHGMDVWGQGTTVTVSS

SEQ ID NO: 1671 - protein, 119 aa, Artificial Sequence
  Synthetic construct
EVQLVQSGAEVKKPGESLTISCKASGYSFISNWIGWVRQMPGKGLEWMGIIYPGDSDTRYSPSFQGQVTISADKSISTAYLQWSSLKASDTAMYYCTLDSSGSSGWDVWGQGTTVTVSS

SEQ ID NO: 1672 - protein, 124 aa, Artificial Sequence
  Synthetic construct
QVQLVQSGAEVKKPGSSVKVSCKASGGNFSRYAISWVRQAPGQGLEWMGGIIPIIGTANYPQKFQGRVTITADESTSTAYMELSSLRSEDTAIYYCARENSAYIGGGPSGFDYWGQGTLVTVSS

SEQ ID NO: 1673 - protein, 118 aa, Artificial Sequence
  Synthetic construct
EVRLVESGGGLVQPGGSLRLSCAASGFTFSNYWMSWVRQPPGKGLEWVADIKQDGSEKYSVDSVKGRFTISRDNAKNSLFLQMNTLRVEDTAVYYCTRGGLWGTFDYWGRGTLVTVSS

SEQ ID NO: 1674 - protein, 122 aa, Artificial Sequence
  Synthetic construct
QVQLVESGGGVVQPGRSLRLSCAASGFTFSSYGMHWVRQAPGKGLEWVTVIWFDGSNKYYADSVKGRFTISRDNSKNTMYLQMNSLRAEDTAVYYCAREGSFGSDPTCPDYWGQGTLVTVSS

SEQ ID NO: 1675 - protein, 121 aa, Artificial Sequence
  Synthetic construct
QIQLVQSGAEVKKPGASVKVSCKASGYTFTSYGISWVRQAPGQGLEWMGWISVHNGNTNYAQKVQDRVTMTTDISTTTAYMELRNLRSDDTAVYFCARVIVVVPQLLLSPWGQGTLVTVSP

SEQ ID NO: 1676 - protein, 120 aa, Artificial Sequence
  Synthetic construct
QVQLVESGGGVVQPGRSLRLSCAASGFTFSSNAMHWVRQAPGKGLEWVAVISYDGINKYYADSVRGRFTIFRDNSKNTLSLQMNGLRAEDMAVYYCAKGRGGYYSYFDYWGQGTLVTVSS

SEQ ID NO: 1677 - protein, 121 aa, Artificial Sequence
  Synthetic construct
QVQLVESGGGVVQPGRSLRLSCEASGFTFSTYAMHWVRQAPGKGLEWVAVISYDGNNKYYADSRKGRFTISRDNSKNTVYLQMNSLRGEDTAVYYCARSFRGNYYYGMDVWGQGTTVTVSS

SEQ ID NO: 1678 - protein, 121 aa, Artificial Sequence
  Synthetic construct
QVQLVESGGGVVQPGRSLRLSCAASGFIFSNYGMHWVRQAPGKGLEWVAVIWYDGSKKYYADSVKGRFTISRDKSKNTLYLEMNSLRAEDTAVYYCARDGAVGDTTGLDQWGQGTLVTVSS

SEQ ID NO: 1679 - protein, 120 aa, Artificial Sequence
  Synthetic construct
QVQLVQSGAEVKKPGSSVKVSCKASGGTFSSYSISWVRQAPGQGLEWMGRIIPIFGTALYAQKFQGRVTITADESTTTAYVELTSLRSEDTAVYYCARGPVYYNSEERYWGQGTLVTVSS

SEQ ID NO: 1680 - protein, 120 aa, Artificial Sequence
  Synthetic construct
QVQVAESGGGVVQPGRSLRLSCVASGLTFSSYAMHWVRQAPGKGLEWVAVISYDGGNKYHADSVKGRFTISRDNSKNTLYLQMNSLRVEDTAVYYCARGGWVEGDALDIWGQGTMVSVSS

SEQ ID NO: 1681 - protein, 121 aa, Artificial Sequence
  Synthetic construct
QVQLVESGGGVVQPGRSLRLSCAASGFTFSSYAMHWVRQAPGKGLEWVAVISYDGNNKYYADSVKGRFTISRDNSKNTLFLQMHSLRAGDTAVYYCARAGSGSYFFGFDIWGQGTMVTVSS

SEQ ID NO: 1682 - protein, 123 aa, Artificial Sequence
  Synthetic construct
QITLKESGPTQVKPTQTLTLTCTFSGFSFSTSRGGVGWIRQPPGKALEWLALIYWDDDKRYSPSLKSRLTITTDTSRNQVVLTMTNMDPVDTATYYCAHRTPSNWFGDWFDPWGQGTLVTVSS

SEQ ID NO: 1683 - protein, 132 aa, Artificial Sequence
  Synthetic construct
EVQLVESGGGLVQPGGTLRLSCVASGFTFSSYDMHWVRQITGKGLEWVSTIGTAGDTYYPDSVKGRFTISRENAMNSLYLQMNSLRAGDTAVYYCVRVNASEYYGSEGPKIKYYYYYYMDVWGKGTTVTVSS

SEQ ID NO: 1684 - protein, 121 aa, Artificial Sequence
  Synthetic construct
QVQLVQSGAEVKKPGSSVKVSCKASGGPFSSYAIIWVRQAPGQGLDWLGGIVPIFGTTNYAHKFQGRITITADQFSGTTYMELSTLTSEDTAVYYCARSGAYLTRSWFDPWGQGTLVTVSS

SEQ ID NO: 1685 - protein, 125 aa, Artificial Sequence
  Synthetic construct
QLQLQESGPGLAKPSETLSLTCSVSGGSISSSTYYWGWIRQPPGKGLEWLGHIFYSGITYNNPSLKSRVTISIDTSKNQFSLRLSSVTAADTAVYYCARFAYNSVQTFIGGFDIWGQGTMVTVSS

SEQ ID NO: 1686 - protein, 131 aa, Artificial Sequence
  Synthetic construct
QVQLVQSGPEVKKPGASVKVSCKASGYTFSNYIISWVRQAPGQGLEWMGWISAYNGKTNYAQKLQGRVTMTTDTSTSTVYMELRSLRSDDTAVYYCARDPASYYDFWSGYVDHYYYGMDVWGQGTTVTVSS

SEQ ID NO: 1687 - protein, 120 aa, Artificial Sequence
  Synthetic construct
QVQLVQSGAEVKKPGSSVKVSCKASGGTFSSYAFSWVRQAPGQGLEWMGGIVGMFGTTNYAQNFQGRITITADEFTSTAYMELSSLRSEDTAVYFCARSGGYRLWFGELWGQGTQVIVSS

SEQ ID NO: 1688 - protein, 125 aa, Artificial Sequence
  Synthetic construct
QVQLQESGPGLVRPSQTLSLTCTVSGGSITSGIYYWSWVRQPAGKGLEWIGRIYTSGRTHYNPSLESRVTISLDTSKNQFSLKLSSVTAADTAIYFCARVGSGTYYTDYYGMGIWGQGTTVTVSS

SEQ ID NO: 1689 - protein, 126 aa, Artificial Sequence
  Synthetic construct
QVQLVQSGSELKQPGASVKVSCKASGYIFTSYGMNWVRQAPGQGLEWMGWINTNTGTPTYAQGFTGRLVFSLDTSVNTAYLQISSLKAEDTAVYYCAREFGGMLSLGRYYYYMDVWGKGTTVTVSS

SEQ ID NO: 1690 - protein, 122 aa, Artificial Sequence
  Synthetic construct
EVQLVESGGGLVKPGGSLRLSCAASGFIFSNTWMSWVRQAPGKGLEWVGRIKSHTDGGTTDYAAPVKGRFTISREDSKKTLYLQMNSLKSEDTGVYHCSTDFGYSASGSYLWGLGTVVTVSS

SEQ ID NO: 1691 - protein, 126 aa, Artificial Sequence
  Synthetic construct
QVQLVQSGSELKKPGASVKVSCKASGYTFTSYAMNWVRQAPGQGLEWMGWINTNTGNPTYAQGFTGRFVFSLDTSVTTAYLQISSLKAEDTAVYYCARDFDTMHRGGYYYYYMDVWGKGTTVTVSS

SEQ ID NO: 1692 - protein, 124 aa, Artificial Sequence
  Synthetic construct
EVQLVESGGGLVKPGGSLRLSCAASGFTFSSYSMNWVRQAPGKGLEWVSSISSSSSYIYYADSVKGRFTISRDNAKNSLYLQMNSLRAEDTAVYYCARPNGALEWLYYYGMDVWGQGTTVTVSS

SEQ ID NO: 1693 - protein, 123 aa, Artificial Sequence
  Synthetic construct
AVQLVESGGGLVQPGRSLRLSCAASGFTFDDYAMYWVRQAPGKGLEWVSGISWNSGSIGYADSVRGRFTISRDNANNSLDLQMNSLRAEDTALYYCAKGSTVARFLWNAFDIWGQGTMVAVSS

SEQ ID NO: 1694 - protein, 129 aa, Artificial Sequence
  Synthetic construct
EVQLVESGGGLVQPGGSLRLSCVASGFIFSSYSMNWVRQAPGKGLEWVSHIRSSSGTIYYAESVKGRFTISRDNAKNSLYLQMNSLRAEDTAVYYCARDIADSKYSGGWYYYHYYMDVWGKGTTVTVSS

SEQ ID NO: 1695 - protein, 121 aa, Artificial Sequence
  Synthetic construct
QVQLVESGGGVVQPGRSLRLSCAASGFTFSNYGMHWVRQAPGKGLEWVAVIWYDGSKKYYGDSVKGRFTISRDNSKNTLHLQMNSLRVEDTAVYYCAREGEVGATTGVDYWGQGTLVTVSS

SEQ ID NO: 1696 - protein, 126 aa, Artificial Sequence
  Synthetic construct
QVQLVQSGSELKKPGASVKVSCKASGYTFTSYAMNWVRQAPGQGLEWMGWINTDTGNPTYAQGFTGRFVFSLDTSVNTAYLQISSLKAEDTAVYYCARDFDTMVRGGYYYYYMDVWGKGTTVTVSS

SEQ ID NO: 1697 - protein, 123 aa, Artificial Sequence
  Synthetic construct
QVQLVESGGGLVKPGGSLRLSCAASGFTFSDYYMSWIRQAPGKGLEWVSYISNSGSDIYHADSVKGRFTISRDNAKNSLYLQMNSLRAEDTAVYYCARDRGLTQLDENWFDPWGQGTLVTVSS

SEQ ID NO: 1698 - protein, 122 aa, Artificial Sequence
  Synthetic construct
QVQLVESGGGVVQPGRSLRLSCAASGFTFSAYSTLWVRQAPGKGLEWVALISYDGNNKFYADSVKGRFTISRDNSKNTLYLQMNSLRAEDTAVYYCARGENFDWSPWYFDYWGQGTQVTVSS

SEQ ID NO: 1699 - protein, 121 aa, Artificial Sequence
  Synthetic construct
QLQLQESGPGLVKPSETLSLTCTVSGASISSSSYYWGWIRQPPGKGLEWIGTMYYRGSTDYNPSLKSRVTISVDTSKNQFSLRLSSVTAADTAVYYCARRVPGDYYCLDVWGKGTTVTVSS

SEQ ID NO: 1700 - protein, 118 aa, Artificial Sequence
  Synthetic construct
EVQLLESGGGLVQPGGSLRLSCAASGFTLSTYDMTWVRQAPGKGLEWVSALSSDGHGTTYADSVKGRFTISRDNPKNTLYLQMNTMRDEDTAIYFCAKSRGNWYLDLWGRGTLVIVSS

SEQ ID NO: 1701 - protein, 123 aa, Artificial Sequence
  Synthetic construct
QMQLVQSGPEVKKPGTSVKVSCKASGFTFTTSAVQWVRQARGQRLQWIGWIAVGSGKTYSAQTFQERVTITRDMSTSTAYLELNSLRFEDTAVYYCAAPYCSGGTCHDAFDIWGQGTMVTVSS

SEQ ID NO: 1702 - protein, 126 aa, Artificial Sequence
  Synthetic construct
EVQLLESGGGLVQPGGSLRLSCVASGFPFTTYAMTWVRQAPGKGLEWVSSISGSGGSTYYAASVKGRFTISRDNDENTLNLQMNSLRAEDTAVYYCAKFALRSAIDVIVVVYFDYWGQGSLVTVSS

SEQ ID NO: 1703 - protein, 124 aa, Artificial Sequence
  Synthetic construct
EVQLLESGGGWVQPGESLRLSCTTSGFSFSTYAMSWVRQAPGKGLEWISGISGSGGDTYYADSVKGRFTISRDNSKNTLYLQMNSLRAEDTAVYFCAKGDRIIMLVVVTLIDYWGQGTLVTVSS

SEQ ID NO: 1704 - protein, 121 aa, Artificial Sequence
  Synthetic construct
QVQLVQSGAEVKKPGSSVKVSCKASGDTFSSYTITWVRQAPGQGLEWMGRITPILGIPNYAQKFQGRVTITADKSTSTAYMELSSLRSEDTAVYYCAKGSAAVIAGGFDPWGQGTLVTVSS

SEQ ID NO: 1705 - protein, 118 aa, Artificial Sequence
  Synthetic construct
QVQLQESGPGLVKASQTLSLTCTVSGDSISIGDYYWSWIRQPPGKGLEWIGYVSDSGSTYYTPSLKSRFSISIDTSKNQFSLNVSSVTVADTAVYFCARDHDLGIRYWGQGTLVTVSS

SEQ ID NO: 1706 - protein, 123 aa, Artificial Sequence
  Synthetic construct
EVHLLESGGGLVQPGGSLRLSCAASGFTFNNYAMTWVRQAPGKGLEWVSGITGTASNTYYADSVKGRFTISRDNSKNTLYLQMNSLRAEDTAIYYCAKEMGARVYYNGSEFTWGQGTPVTVSS

SEQ ID NO: 1707 - protein, 121 aa, Artificial Sequence
  Synthetic construct
QITLKESGPTLVKPTQTLTLTCALSGFSLTSTGVGVGWIRQPPGKALEWLALIYWDDDQRYSPSLKSRLTITKDTSENQVVLTMTNMDPVDTATYYCAQIEYDFGVKFDYWGQGTLVTVSS

SEQ ID NO: 1708 - protein, 124 aa, Artificial Sequence
  Synthetic construct
QVQLQESGPGLVKPSQTLSLTCTVSGDSISGGDYYWSWIRQHPGKGLEWIGYISYSGDTYYNPSLKSRLIISVDTSKNQFSLKLSSVTAADTAVYYCARDNGVQSYHYYGIDVWGQGTTVTVSS

SEQ ID NO: 1709 - protein, 119 aa, Artificial Sequence
  Synthetic construct
EEQLLESGGGLVQPGGSLRLSCAASGFTFSTFTLTWVRQAPGKGLEWVASFRVSGGSTYYADSVKGRFTISSDNSRNTVYLQMNSLRADDTAVYYCAKTYGSGWYSGPWGQGTLVTVSS

SEQ ID NO: 1710 - protein, 123 aa, Artificial Sequence
  Synthetic construct
QIHLVQSAAEVQKPGASVKVSCKASGYTFNTYVINWVRQAPGQGLEWMGWISVSNGNTNFAQDLQGRVTMTTDTSTSTAYMELRSLRSDDTAVYYCAGTLYYDSSPFHAFHIWGQGTMVTVSS

SEQ ID NO: 1711 - protein, 121 aa, Artificial Sequence
  Synthetic construct
EVQLLESGGGLVQPGGSLRLSCAASGFSFSNFGMTWVRQAPGKGLEWVSGISGGGGSTNYADSVKGRFTISRDNSKNTLYLQMSSLRAEDTAVYYCASEDRYSGSYYFDYWGQGTLVTVSS

SEQ ID NO: 1712 - protein, 125 aa, Artificial Sequence
  Synthetic construct
QVQLQESGPGLVKASETLSLTCTVSGGSISPYYWTWIRQPPGKGLEWIGDIYYSGSTNYNPSLKSRVSISVDTSKNQFSLKLRSVTAADTAVYYCARAYRYCSGTTCHPEYFPHWGQGTLVTVSS

SEQ ID NO: 1713 - protein, 126 aa, Artificial Sequence
  Synthetic construct
QVQLQESGPGLVKPSQTLSLTCTVSGGSVSSGDYYWNWIRQHPGKGLEWIGYIYYSGSTYYNPSLKSRVTISVDTSKNQFSLKLSSVTAADTAVYYCATGRRRILTGFLDIMNDYWGQGTQVTVSP

SEQ ID NO: 1714 - protein, 122 aa, Artificial Sequence
  Synthetic construct
EVQLVESGGGLVKPGGSLRLSCAASGFTFSSYSMNWVRQAPGKGLEWVSSISSSSSYIYYADSVKGRFTISRDNAKNSLYLQMNSLRAEDTAVYYCARDETVYYYYYYMDVWGKGTTVTVSS

SEQ ID NO: 1715 - protein, 120 aa, Artificial Sequence
  Synthetic construct
QVQLVQSGAEVKKPGSSVKVSCKASGGTFSSYTITWVRQAPGQGLEWMGRIIPFLGIADYSPKFQGRVTITADKSTNTAYMELSSLRSEDTAVYYCARDRGNFTYWFDPWGQGTLVTVSA

SEQ ID NO: 1716 - protein, 121 aa, Artificial Sequence
  Synthetic construct
QVQLVESGGGVVQPGRSLRLSCAASGFTFSSYGMHWVRQAPGKGLEWVAVMYYDGTNNYHADSVKGRFTVSRDNSKNTLFLQMNSLRADDTAVYYCAREGMVGTTTGLDYWGQGTPVTVSS

SEQ ID NO: 1717 - protein, 120 aa, Artificial Sequence
  Synthetic construct
EVQLVQSGAEVKKPGESLKISCKGSGYSFATNWIGWVRQMPGKGLEWMGIIYPIDSDTRYSPSFQGQVTISADKSISTAYLQWSNLKASDTAMYYCAVFYGSGSYRFDPWGQGTLVTVSS

SEQ ID NO: 1718 - protein, 122 aa, Artificial Sequence
  Synthetic construct
QVQLVESGGGVVQPGRSLTLSCAASGFTFSTYGMHWVRQAPGKGLEWVAVIWYDGSNKYYVDSVKGRFTISRDNSKNTLYLQMNSLRVEDTAVYYCAREGSFGSGASCPDYWGQGTLVTVSS

SEQ ID NO: 1719 - protein, 126 aa, Artificial Sequence
  Synthetic construct
QVQLVQSGAEVKKPGASVKVSCKASGYTFTSYPLHWVRQAPGQRLEWMGWINAGHGNTKYSQEFKGRVTIAGDTPASTAYMELSSLRSEDSAVYYCARGSGGPAPNYFYYYYMDVWGKGTTVTVSS

SEQ ID NO: 1720 - protein, 112 aa, Artificial Sequence
  Synthetic construct
QVQLQESGPGLVRPSETLSLTCAVSGDSISSYYWSWIRQPPGKGLEFIGYIYNSGSTNYNPSLKSRVTISVDTSKNQFSLKLRSVTAADTAVYYCARGFDLWGQGTLVTVSS

SEQ ID NO: 1721 - protein, 119 aa, Artificial Sequence
  Synthetic construct
QLQLQESGPGLVKPSETLSLTCTVSGGSISSNGYYWGWIRQPPGKGLEWIGSIYYSGSTYCKPSLKSRVTISVDTSKNQFYLKLNSVTAADTAVYYCARLPLWGAFDIWGQGTMVTFSS

SEQ ID NO: 1722 - protein, 125 aa, Artificial Sequence
  Synthetic construct
QIHLQESGPGLVRPSETLSLTCSVSGYSIRSGYFWGWIRQPPGKGPQWIGSVYQDGNTFYNPSLKSRITVSVDTAKNQFSLRLTSVSAADTAFYYCVRDRGAIHVRNPPREFDIWGQGILVTVSS

SEQ ID NO: 1723 - protein, 126 aa, Artificial Sequence
  Synthetic construct
QVQLQESGPGLVKPSETLSLTCTVSGGSITSYYWSWIRQSPGKGLEWIGYISHNGRNTYNPSLMSRVTISVDTSKKQFSLKLSSVTAADTAVYYCARQVFDFWSGYSEGEYWFDTWGQGTLVTVSP

SEQ ID NO: 1724 - protein, 119 aa, Artificial Sequence
  Synthetic construct
QVQLVVSGGGVVQPGRSLRLSCAASGFTFSNFPMHWVRQAPGEGLEWVAVISYDESHKYYADSVKGRFTISRDKSKNTLYLQMSSLRIEDTAVYYCARDGGGDYGPDYWGQGTLVTVSS

SEQ ID NO: 1725 - protein, 127 aa, Artificial Sequence
  Synthetic construct
EVQLVESGGGLVQPGGSLRLSCAASGFSFSSFWLSWVRQAPGKGLEWVANIDQDGSEKYYVDSVRGRFTISRDNAKNSLYLYMNSLRAEDTAVYYCAKSGRYYYDTSGYYFDAFDIWGQGTMVTVSS

SEQ ID NO: 1726 - protein, 120 aa, Artificial Sequence
  Synthetic construct
EVQLVESGGGLVQPGGSLRLSCAASGFTFSIYWMSWVRQAPGKGLEWVANIKQDGSGKYYLDSVRGRFTISRDNAKNSVYLQMNRLRVEDTAVYYCVREGIAVAGGMDVWGPGATVTVSP

SEQ ID NO: 1727 - protein, 120 aa, Artificial Sequence
  Synthetic construct
EMQLVQSGAEVKKPGESLRISCKGSGSSFTSYWIGWVRQMPGQGLEWMGVIYPGDSDTRYSPSFRGHVSFSVDYFRSTAYLQWSSLKASDTAMYYCARHGTGTVGAPDYWGQGTLVTVSS

SEQ ID NO: 1728 - protein, 124 aa, Artificial Sequence
  Synthetic construct
EVQLVQTGAEVKKPGESLKISCETSGYSFTKYWIGWVRQMPGKGLEWMGIIFPGDSDTRYNPSFQGQVTISADKSISTAYLQWSGLKASDSAIYYCATSYCTGGVCYWGQFDYWGQGTLVTVSS

SEQ ID NO: 1729 - protein, 121 aa, Artificial Sequence
  Synthetic construct
QVQLVESGGGVVQPGRSLRLSCAASGFTFSNYAMHWVRQAPGKGLEWVTIISYDGSEKFYADSVKGRFTISRDNSKNMLYLQMSSLRTDDTAIYYCARDESLFGEYTFDYWGQGALVTVSS

SEQ ID NO: 1730 - protein, 120 aa, Artificial Sequence
  Synthetic construct
QVQLVESGGGVVQPGRSLRLACAASGFTFSSYAMHWVRQAPGKGLEWVAGISYEGSGSSYSESVKGRFTISRDNSKNTLYLQMNSLRPEDTAVYYCARQQYSSSDGFDIWGPGTMVSVSS

SEQ ID NO: 1731 - protein, 125 aa, Artificial Sequence
  Synthetic construct
QVQLVQSGSELKKPGASVKVSCRASGYTFTDYAMNWVRQAPGQGLEWMGWIHTRSGNPTYAQGFTGRFVFSLDTSVSTAYLQITSLKAEDTAIYYCARAPPLYDVSDYYISPYSWGQGTLVTVSS

SEQ ID NO: 1732 - protein, 128 aa, Artificial Sequence
  Synthetic construct
EVQLVESGGGLVQPGRSLRLSCAASGFTFADYAMHWVRQAPGKGLEWVSSISWNSATIGYADSVKGRFTISRDNAQNSLYLQMTSLRAEDTALYYCAKDGGHGDWGRKGYYYYGLDVWGQGATVTVSS

SEQ ID NO: 1733 - protein, 130 aa, Artificial Sequence
  Synthetic construct
QITLKESGPTLVRPTQTLRLTCTFSGFSLSTSGEGVGWIRQPPGRALEWLALVFWDDDKLYNPSLKTRLTIAKDSSKDQVFLTVTNVDPADSATYYCAHRRRDAVWNLFSTKGFGRFDPWGQGILVIVSS

SEQ ID NO: 1734 - protein, 119 aa, Artificial Sequence
  Synthetic construct
EVQLVETGGGLIQPGGSLRLSCAVSGFTVSNNYMTWVRQAPGKGLDWVSFIYTDGSTSSADSVKGRITISRDKSKNSLFLQMNSLRAEDTAVYYCARVILWFGGAVDVWGKGTTVTVSS

SEQ ID NO: 1735 - protein, 117 aa, Artificial Sequence
  Synthetic construct
QVQLVESGGGVVQPGRSLRLSCTASGFTFSSYGMHWVRQAPGKGLEWAAVISSDGSNKYYADSVKGRFSISRDNSKNTLYLQMNSLRAEDTAVYYCAKDSSGIPDYWGQGTLVTVSS

SEQ ID NO: 1736 - protein, 122 aa, Artificial Sequence
  Synthetic construct
QVHLVQSGAEVKKPGSSVKVSCKASGGTFSSYAITWVRQAPGQGLEWMGGIIPIFGAAKYSQKFQGRVTITADESTSTAYMELNSLTSEDTAVYYCARNFAYDSSGYSWDYWGQGTLVTVSS

SEQ ID NO: 1737 - protein, 117 aa, Artificial Sequence
  Synthetic construct
QVQLVESGGGVVQPGRSLRLSCAASGFTFSSYGMHWVRQAPGKGLEWVAVMSYDGSHIYYAESVKGRFTISRDNSKNTLYLQMNSLRAEDTAVYYCATDSDGVHSVWGQGTTVTISS

SEQ ID NO: 1738 - protein, 120 aa, Artificial Sequence
  Synthetic construct
QVQLVESGGGVVQPGRSLRFSCAASGFTFNTYAMHWVRQAPGKGLEWVAVISYDGSNKYYADSVKGRFTISRDNSKNTLYLQMNSLRAGDTAVYYCARGMSMIRGVPDYWGQGTLVTVSS

SEQ ID NO: 1739 - protein, 124 aa, Artificial Sequence
  Synthetic construct
QVHLYQSGPGLLKSSQTLSLACGISGDSVSSNSAVWNWIRQSPSRGLEWLGRTYYRSKWYNDYAGSVRSRITISPDTSKNQFSLQLKSLTPEDTAVYYCARDPEGQWLGNFDSWGPGTLVTVSS

SEQ ID NO: 1740 - protein, 121 aa, Artificial Sequence
  Synthetic construct
QVTLKESGPVLVKPTETLTLTCTVSGLSLNNGKIHVSWIRQPPGKALEWLAHIFSNDEKSYNTSLKNRLSISKDASKNQVVLTMTHMDPVDTGTYYCARPAVDYSVYFDFWGQGILVTVSS

SEQ ID NO: 1741 - protein, 125 aa, Artificial Sequence
  Synthetic construct
EVQLVESGGGLLQPGGSLRLSCAASGITVTTNFMSWVRQAPGKGLEWVSTIHSWGTTFYADSVKGRFTISRDNSKNTLYLQMNNLRAEDTSVYYCVRPIQYCSDGSCSACGFEMWGQGTMVTVSS

SEQ ID NO: 1742 - protein, 129 aa, Artificial Sequence
  Synthetic construct
EVQLVESGGGLVQPGGSLRLSCAASGFTFSSYWMSWVRQAPGKGLEWVANIKQDGSEKYYVDSVKGRFTISRDNAKNSLYLQMNSLRAEDTAVYYCASEKTTYYYDSSGYYYEYYFDYWGQGTLVTVSS

SEQ ID NO: 1743 - protein, 126 aa, Artificial Sequence
  Synthetic construct
EVQLVESGGGLVQPGGSLRLSCAASGFTFSSYAMHWVRQAPGKGLDYVSGISSNGGGTYYANSVKGRFTISRDNSKNTLYLQMGSLRVEDMALYYCARDSVVVAAQNSVFYGMDVWGQGTTVTVSS

SEQ ID NO: 1744 - protein, 117 aa, Artificial Sequence
  Synthetic construct
QVQLAQSGAEVKKPGASVKVSCKASGYTFTSSTMHWVRQAPGQSLEWMGWINAGNGNLKYSQKFRGRVAITMDTSASTAYMELSSLKSEDTAVYYCVRENDWLLGLWGQGTLVTVSS

SEQ ID NO: 1745 - protein, 123 aa, Artificial Sequence
  Synthetic construct
QVQLVESGGDVVQPGRSLRLSCVASGFTFSSYAMHWVRQAPGKGLEWVAVISYDGINKYYADSVRGRFTISRDNSVNTVYLQMNTLRAEDTAVYYCVTDPDDFRSAGDYFDYWGLGTLVTVSS

SEQ ID NO: 1746 - protein, 114 aa, Artificial Sequence
  Synthetic construct
EVQLLESGGGLVQPGGSLRLSCAASGFTFSSYAMSWVRQAPGKGLEWVSAISGSGGSTYYADSVKGRFTISRDNSKNTLYLQMNSLRAEDTAVYYCAKRAGRYWGQGTLVTVSS

SEQ ID NO: 1747 - protein, 120 aa, Artificial Sequence
  Synthetic construct
QMQLQESGPGLVKPSETLSLTCTVSGGSISSSSYYWGWIRQPPGKGLEWIGSIYYSGSTYYNPSLKSRVTISVDTSKNQFSLKLNSVTAADTAVYYCARASTVTPDFDYWGQGTLVTVSS

SEQ ID NO: 1748 - protein, 118 aa, Artificial Sequence
  Synthetic construct
QEQVVESGGGVVQPGRSLSLSCAASGFTFSNFPIHWVRQAPGKGLEWVAVVSYDGTLKSYADSVRGRFTIFRDNSKNIVNLQMKSLRVEDTAVYYCARGFGNWHFDLWGRGTLVTVSS

SEQ ID NO: 1749 - protein, 122 aa, Artificial Sequence
  Synthetic construct
QVQLVQSGAEVKKPGASVKVSCKVSGYTLTELAMHWVRQAPGKGLEWMGGFDPEDGERIYAEKFQGRVTMTEDTSTDTAYMELSSLRSEDTAVYYCATEGKEYADYQPFDYWGQGTLVTVSS

SEQ ID NO: 1750 - protein, 127 aa, Artificial Sequence
  Synthetic construct
EVQLVQSGTEVKKPGESLRISCKGSGYSFSSSWVSWVRQKPGKGLEWMGRIDPSDSYTNYSPSFQGHVTISVDKSISTAYLQWSSLKASDTAMYYCAREKIVVVTGTRFLGYGMDVWGQGTTVTVSS

SEQ ID NO: 1751 - protein, 125 aa, Artificial Sequence
  Synthetic construct
QVQLVQSGSELKKPGASVKLSCKASGYTFTSYAMNWVRQAPGQGLEWMGWINTNTGNPTYAPGFTGRFVFTLDTSVSTAYVQISSLKAEDTAVYYCARDYASGSPRYSYYYMDVWGKGTTVTVSS

SEQ ID NO: 1752 - protein, 122 aa, Artificial Sequence
  Synthetic construct
QVQLVESGGGVVQPGRSLRLSCAASGFTFSTYAMHWVRQAPGKGLEWVALISYDGSNKYYADSVKGRFTISRDNSKNTLYLQMNSLRAEDTAVYYCARPSGSYNYYYGMDVWGQGTTVTVSS

SEQ ID NO: 1753 - protein, 126 aa, Artificial Sequence
  Synthetic construct
EVQLVESGGGLVQPGGSLRLSCAASGFTFSSYAMSWVRQAPGKGLEWVSAISDSGYSTYYADSVKGRFTISRDNSRNTLYLQMNSLKAEDTAVYYCAKWGSSLLWFGEVYNWFDPWGQGTLVTVSS

SEQ ID NO: 1754 - protein, 120 aa, Artificial Sequence
  Synthetic construct
QVQLQESGPGLVKPSQTLSLTCTVSGDSIKSVSYYWSWIRQPAGRGLEWIGRIYSSGATNYNPSLESRLTISVDTSKNQFSLKMTSVTATDTAVYFCARGRARSSGVDQWGQGTLVTVSS

SEQ ID NO: 1755 - protein, 117 aa, Artificial Sequence
  Synthetic construct
QVQLVESGGGVVQPQRSLRLSCAASGFTFSSYAMHWVRQAPGKGLEWVALISYDGSNEYYADSVKGRFTISRDNSKNTLYLQMNSLRAEDTAVYYCARDQGAYMDVWGRGTTVTVSS

SEQ ID NO: 1756 - protein, 123 aa, Artificial Sequence
  Synthetic construct
QVQVQESGPGLVKSSETLSLTCFVSGGSIGSSSYYWGWLRQPPGKGLEWIGTIYYTGSTYYNPSLKSRVTISADTSKNQFSLRVTSVTAADTAVYYCASLPSPARRYNWFDPWGQGTLVTVSS

SEQ ID NO: 1757 - protein, 119 aa, Artificial Sequence
  Synthetic construct
EVQLVESGGGLIQPGGSLRLSCAVSEIIVSRNYMNWVRQAPGKGLEWVSVIYSGGTTYYADSVKGRFTISRDNSKNTLDLQMNSLRAEDTAVYYCARGGWPSGDAFDFWGQGTMVTVSS

SEQ ID NO: 1758 - protein, 124 aa, Artificial Sequence
  Synthetic construct
QVQLVESGGGVVQPERSLRLSCAASGFMFSSYAMHWVRQVPGKGLEWVAVVSYDGSDEYYAGSVKGRFTISRDNSKNTLYLQINSLRPEDTALYYCAKDTGAIPAAPSVGFDYWGQGTLVTVSS

SEQ ID NO: 1759 - protein, 127 aa, Artificial Sequence
  Synthetic construct
QVQLVESGGGLVKPGGSLRLSCAASGFTFSVHYMTWIRQAPGKGLEWVSYIGSSDSIIYYADSVKGRFTISRDNAKNSLYLQMNSLRAEDTAVYYCARDGGYFYDSNGPLPDAFDIWGQGTMVTVSS

SEQ ID NO: 1760 - protein, 121 aa, Artificial Sequence
  Synthetic construct
QVQLQESGPGLVKPSQTLSLTCTVSGGSINSASYYWSWVRQPAGKGLEWIGHIYASGGTKYNPSLKSRVTMSVDTSKNQFSLKLNSVNAEDTAVYYCAREEGSGWWKHDYWGQGTLVTVSS

SEQ ID NO: 1761 - protein, 127 aa, Artificial Sequence
  Synthetic construct
QITLKESGPTLVKPTQTLTLTCTFSGFSLSTRGVGVGWVRQAPGKAPEWLALIYWDDDKEYSPSLRDRLTITKDTSKNLVVLSATNMDPVDTGTYYCAHINVAAQQYSEWFPLLDSWGQGILVSVSS

SEQ ID NO: 1762 - protein, 121 aa, Artificial Sequence
  Synthetic construct
QVQLVESGGGVVQPGRSLRLSCIASGFTFSRYGMHWVRQAPGKGLEWVAVISYDGSNKYYADSVKGRFTISRDTSKNTLYLQMDSLRAEDTAVYYCAKEVGYDEFDGFDIWGRGTMVTVSS

SEQ ID NO: 1763 - protein, 123 aa, Artificial Sequence
  Synthetic construct
QLQLQESGPGLVKPSETLSLTCTVSGGSISSGSYFWGWIRQSPEKGLEWIGTIYYSGSTYYNPSLKSRVTISVDTSTNQFSLRLSSVTAADTSMYYCARYTRDWSRDDGFDIWGQGTLVTVSS

SEQ ID NO: 1764 - protein, 122 aa, Artificial Sequence
  Synthetic construct
QVHLVESGGGVVQPGRSLRLSCAASGFTFSSSAMHWVRQAPGKGLEWVAVISYDGRNKYYADSVKGRFTFSRDNSNNTLYLQMNSLRTEDTAVYYCASGGSSGWYNGAFDIWGQGTMVTVSS

SEQ ID NO: 1765 - protein, 121 aa, Artificial Sequence
  Synthetic construct
QVQLVQSGAEVKKPGASVKVSCKASGYNFSNYYMHWVRQAPGQGLEWVGIINPSGGSTSYAQKLQGRVTMTRDTSTSTVYMELSSLKSEDTAVYYCAREGRLQQLAPFDYWGQGTLVTVSS

SEQ ID NO: 1766 - protein, 128 aa, Artificial Sequence
  Synthetic construct
QVQLVESGGGVVQPGRSLRLSCVASGFIFSPYNIQWVRQAPGKGLEWVALIRYDGSNKYYADSVKGRFTISRDNGRNTVYLQMNSLRVEDTAIYFCARDAGYCSGSKCPQYYYSMDVWGQGTTVTVSS

SEQ ID NO: 1767 - protein, 127 aa, Artificial Sequence
  Synthetic construct
QVQLVQSGAEVKKPGASVKVSCKASGYTFTGYYIHWVRQAPGQGLEWMGWINPNSGVTNSAQKFQAWLTMTRDTSISTAYMELSRLRSDDTAVYYCAREQYYYGSGSYHSPGGMDVWGQGTTVTVSS

SEQ ID NO: 1768 - protein, 123 aa, Artificial Sequence
  Synthetic construct
EVQLVESGGGLVQVGGSLRLSCAASGFTFSNYAIHWVRQAPGKGLEYVSAISSHGGSTYYADSVKGRFTVSRDNSRNTLFLQMSSLRPEDTAVYYCVKIGTGAYGSRNYFDCWGQGTLVTVSS

SEQ ID NO: 1769 - protein, 130 aa, Artificial Sequence
  Synthetic construct
DVQLVESGGGLVQPGGSLRLSCAGSGFAFSSSWMGWVRQAPGKGLEWVANIKQDGSDKSYLDSVKGRFTISRDNGKNSLYLQMNSLRAEDTAVYYCARVRGVGDFWSGYFFVSSTYFDSWGQGTLVTVSS

SEQ ID NO: 1770 - protein, 120 aa, Artificial Sequence
  Synthetic construct
EVQLVESGGIVVQPGGSLRLSCAASGFTFDDYTMHWVRQAAGKGLEWVSLITWDGGITYYGDSVEGRFTISRDNRKKSLYLQMNSLRTEDTAFYYCAALVGPSEYSDVGWGQGTLVTVSS

SEQ ID NO: 1771 - protein, 132 aa, Artificial Sequence
  Synthetic construct
QVQLVQSGADIKKPGASVKVSCKASGYTFTTYDLHWVRQAPGQGLEWMGKINPGGGSTSYAQKFQGRVTLTRDTSTTTVYMELRSLKSEDTAVYYCARGAALKVDPLMIAFGGVYVYGHDYWGQGTLVTVSS

SEQ ID NO: 1772 - protein, 120 aa, Artificial Sequence
  Synthetic construct
EVQLVESGGGLVQPGGSLRLSCAASGFTFSNYDMHWVRQVTGKGLEWVSLIGTAGDTYYPGSVKGRFTISRENAKNSLYLQMNSLRAGDTAMYYCARVSYSGYFGYFDLWGRGTLVTVSS

SEQ ID NO: 1773 - protein, 127 aa, Artificial Sequence
  Synthetic construct
QLQLQESGPGLVKPSETLSLTCTVSGVSINSTDSYWGWVRQPPGKGLEWIGSMSYGGSAHYNPSLKSRLTISVDTSKNQFSLKLTSVTAADTAVYYCARHSNYYDSSAYVNTSPDFWGQGTLVTVSS

SEQ ID NO: 1774 - protein, 115 aa, Artificial Sequence
  Synthetic construct
AVQLVESGGGLIQPGGSLRLSCAASGLIVSSNYMSWVRQAPGKGLEWVSIIYPGGSTYYADSVKGRFTISRDNSKNTLYLQMNSLRAEDTAVYYCARVETIDSYWGQGTLVTVSS

SEQ ID NO: 1775 - protein, 123 aa, Artificial Sequence
  Synthetic construct
QVQLVESGGGVVQPGRSLRLSCAASGFNFSTYALHWVRQAPGKGLEWVALISSDGSNENYAASVKGRFTISRDNSKNTLYLQMNSLRPEDTAVYFCARGGKGQLWVYSSFDYWGQGTLVTVSS

SEQ ID NO: 1776 - protein, 128 aa, Artificial Sequence
  Synthetic construct
QVQLVQSGAEVKKPGASVKVSCKVSGYTISEVSVHWVRQVPGKGLEWMGGFDPELAETIYAQKFQGRVTMTEDTPTDTAYMELSSLGSEDTAVYYCATAPAIAEAATGYYYYYGMDVWGQGTTVTVSS

SEQ ID NO: 1777 - protein, 118 aa, Artificial Sequence
  Synthetic construct
QVQLVESGGGVVQPGRSLRLSCAASGFIFSTYTMHWVRQAPGKGLEWVALISYDGYNKYYADSVKGRFTISRDNSKNTVYLQMNSLRAEDTAVYYCARGDGYNYFDYWGQGTLVTVSS

SEQ ID NO: 1778 - protein, 125 aa, Artificial Sequence
  Synthetic construct
QVQLVESGGGVVQPGRSLRLSCAASGFTFSSYAMHWVRQGPGKGLEWVALISYDGINKYYADSVKGRFTISRDNSKNTLYLQINSLRTEDTALYYCARAGDYYGSGSYYRPFDFWGQGTLVTVSS

SEQ ID NO: 1779 - protein, 122 aa, Artificial Sequence
  Synthetic construct
QVQLQESGPGLVKPSQTLSLTCTVSGGSISSGDYYWSWIRQPPGKGLEWIGYIYYSGSTYYNPSLKSRVTISVDTSKNQFSLKLSSVTAADTAVYYCARARGSVLISEFDYWGQGTLVTVSS

SEQ ID NO: 1780 - protein, 128 aa, Artificial Sequence
  Synthetic construct
QVQLQQSGPGLVKPSQTLSLTCAISGDSVASNSAAWNWIRQSPSRGLEWLGRTYYRSKWYNDYAVSVKSRISINSDTSKNQFSLQLNSVTPEDTAVYYCARGRDSSGLDLYYYGMDVWGQGTTVTVSS

SEQ ID NO: 1781 - protein, 126 aa, Artificial Sequence
  Synthetic construct
QVQLQESGPGLVKPAETLSLTCAVSGGSFGLYYWAWIRQSPGKGLECMGNIFYNGDTDYNPSLKSRVTISIDTSKNQFSLKLTSVTAADTAVYYCARSWEGIKQLPGYYYFGMDVWGQGTTVTVSS

SEQ ID NO: 1782 - protein, 123 aa, Artificial Sequence
  Synthetic construct
QVQLVQSGAEVKKPGSSVKVSCKASGDTFSNYAITWVRQAPGQGLEWMGGSIPIFGTANYAQRFQGRLTITADESASTAYMELSSLTSEDTAVYYCVRASFVAASPVFGVDVWGQGTTVTVSS

SEQ ID NO: 1783 - protein, 127 aa, Artificial Sequence
  Synthetic construct
QVQLVESGGGVVQPGRSLRVSCAASGFTFRTYGMHWVRQAPGKGLEWVAVISYDGSDKYYADSVKGRFTISRDNAKNTLYLQMNTLRAEDTAVYYCAKADGGYYDSSAYYSTAIDFWGQGTPVTVSS

SEQ ID NO: 1784 - protein, 120 aa, Artificial Sequence
  Synthetic construct
QVQLVQSGAEVKKPGSSVKVSCKASGGTFSSFAISWVRQAPGQGLEWMGGIIGMFGTTKYAQNFQGRVTITADEFTSSAYMELSSLKSEDTAMYYCARSGGYRLWFGELWGQGTLVTVSS

SEQ ID NO: 1785 - protein, 127 aa, Artificial Sequence
  Synthetic construct
EVQLVESGGGLVKPGGSLRLSCAASGFTFSSYSMNWVRQAPGKGLEWVSSISSSSSYIYYADSVKGRFTISRDNAKNSLYLQMNSLRAEDTAVYYCARDLRRWWELPTASIEYFQHWGQGTLVTVSS

SEQ ID NO: 1786 - protein, 125 aa, Artificial Sequence
  Synthetic construct
QVQLVQSGAEVKKPGSSVKVSCKASGGTFSTYTVTWVRQAPGQGLEWMGRIIPILDIGNYAQKFQGRLTITADESTSTAYMELSSLRSEDTAVYYCARASVGLSYSENYIPLDHWGQGTLVTVSS

SEQ ID NO: 1787 - protein, 127 aa, Artificial Sequence
  Synthetic construct
QVQLVQSGAEVKEPGASVKISCKASGYTFSSCAFTWMRQAPGQGLEWLGWISASIGRRSYAQNLQGRLTLTTNTSTSTAYMELRSLRSDDTAVYYCAMNPPQYDILTGYYHNWFDPWGQGSVVTVSS

SEQ ID NO: 1788 - protein, 120 aa, Artificial Sequence
  Synthetic construct
QVQLVESGGGVVQPGRSLRLSCAASGFTFSTYAMHWVRQAPGKGLEWVAVISYGGSHKYYGDSVKGRFTISRDNSKNTLYLQMNSLRAEDTAVYYCARDWGDYQYYMNVWGKGTTVTVSS

SEQ ID NO: 1789 - protein, 121 aa, Artificial Sequence
  Synthetic construct
QVQLVQSGAEVKKPGSSVNVSCKASGGTFSSYAINWMRQAPGQGLEWMGRIIPFLDVSYYAQNFQGRVTITADKSTSTAYMELSSLRSEDTAVYYCARAIVGPTPNWFDPWGQGTLVTVSS

SEQ ID NO: 1790 - protein, 121 aa, Artificial Sequence
  Synthetic construct
QVQLVESGGGVVQPGRSLRLSCAASGFAFNNYGIHWVRQAPGKGLEWAAVIWHDGSKEYYADSVKGRFTISRDNSKNTVYLEMNSLRAEDTALYYCAREGIVGETTGLDYWGQGTLVTVSS

SEQ ID NO: 1791 - protein, 121 aa, Artificial Sequence
  Synthetic construct
QVQLVESGGGVVQPGRSLRLSCAASGFTFNTYAMHWIRQAPGKGLEWVAVISYDGTNKYYADFVKGRFTISRDNSKNALYLQMDSLRAEDTAAYYCARALGGGYYYGMDVWGQGTTVTVSS

SEQ ID NO: 1792 - protein, 122 aa, Artificial Sequence
  Synthetic construct
EVLLLEAGGALVQPGGSLRLSCEASGFNFRSYAMSWVRQAPGKGLEWISAIGGSDDSTHYADSVRGRFTISRDHSKTLYLQMNSLRVDDTAVYYCAKDWGTWHYSQSLLEAWGRGTHVTVSS

SEQ ID NO: 1793 - protein, 129 aa, Artificial Sequence
  Synthetic construct
ELQVVEFGGGLVQPGRSLRLSCSASGFTFEDFAMHWVRQAPGKGLEWVSGSTWNSATIGYADSVKGRFTTSRDNAKNSLYLQMINLRHEDTALYYCVKDIGRYDPYEGFGRVGGAFDLWGQGTMVTVSS

SEQ ID NO: 1794 - protein, 120 aa, Artificial Sequence
  Synthetic construct
QVQLQESGPGLVKPSETLSLTCSVSGGSISDYYWNWIRQPPGKGLEWIGYINYSGTTNYNPSLKSRVTISVDTSKNQFSLNLTSVTAADTAVYYCARDPPNLRGSAIDIWGQGRMVIVSP

SEQ ID NO: 1795 - protein, 123 aa, Artificial Sequence
  Synthetic construct
QVQLVQSGAEVKKPGASVKISCTGSGYTLTSYYVHWVRQAPGQGLEWMGIINPSGDYTTFAQNFQGRVTMTRDTSTSTVYMELSSLRSEDTAVYYCARGVTYSSAWYSGINPWGQGTLVTVSS

SEQ ID NO: 1796 - protein, 130 aa, Artificial Sequence
  Synthetic construct
QVQLVQSGGGVVQPGRSLRLSCAASGFTFGSYGMHWVRQAPGKGLEWVAVIWYDGSDQYYADSVKGRFIISRDNSENTLYLQMNSLRVEDTAVYYCARGGPRKLFFGVIREGSWQCFDIWGQGTMVTVSS

SEQ ID NO: 1797 - protein, 122 aa, Artificial Sequence
  Synthetic construct
QVQLVQSGAEVKKPGASVKVSCKASGYTFTNYYIHWVRQAPGQGLEWMGIINPSGGSTSYAQKLQGRVTMTSDTSTSTVYMELSSLRSEDTALYYCARGGIVPAASEVFDIWGQGTMVTVSS

SEQ ID NO: 1798 - protein, 119 aa, Artificial Sequence
  Synthetic construct
EVQVVESGGGLVQPGGSLTLSCAASGFTFSSYWMSWVRQAPGKGLEWVANIKQDGSEKYYVDSVKGRFTISRDNAKKSLYLQMNSLRAEDTAVYYCARLGSSSWYFDYWGQGTLVTVSS

SEQ ID NO: 1799 - protein, 120 aa, Artificial Sequence
  Synthetic construct
QVQLVQSGAEVKKPGSSVKVSCKVSGGTFSSFTVSWVRQAPGQGLEWMGGIVPIFGSTNYAQRFQGRVTITADESTSTAYMELSSLRSEDTAVYYCARQSTLFIGELDPWGQGTLVTVSS

SEQ ID NO: 1800 - protein, 129 aa, Artificial Sequence
  Synthetic construct
EVQLLESGGALVQPGESLRLSCVASGFTFAAYAFNWVRQAPGKGLEWVSTISGSGHSTYYADSVKGRFTISRDNSMSTLYLQMTSLRAEDTAVYYCAKALGYCSSDSCSPGYFYGMDVWGQGTTATVSS

SEQ ID NO: 1801 - protein, 121 aa, Artificial Sequence
  Synthetic construct
QVQLQESGPGLVKPSGTLSLTCAVSGGSISSSNWWSWVRQPPGKGLEWIGEIYHSGSTNYNPSLKSRVTISVDKSKNQFSLKLSSVTAADTAVYYCARKSTYYYYYGMDVWGQGTTVTVSS

SEQ ID NO: 1802 - protein, 123 aa, Artificial Sequence
  Synthetic construct
QVQLVQSGAEVKKPGSSVKVSCKASGGTFSSYAISWVRQAPGQGLEWMGGIIPIFGTANYAQKFQGRVTITADESTSTAYMELSSLRSEDTAVYYCARGNYGDYYYYYGMDVWGQGTTVTVSS

SEQ ID NO: 1803 - protein, 121 aa, Artificial Sequence
  Synthetic construct
QVQLVQSGSELKKPGASVRVSCKASGYTFTNYAMNWVRQAPGQGLEWMGWISTTTGNPTYAQGFTGRFVFSLDTSVSTAYLQISSLKTEDTAVYYCARGAGLWFGELLDSWGQGTLVTVSS

SEQ ID NO: 1804 - protein, 119 aa, Artificial Sequence
  Synthetic construct
EVQLVESGRGLVQPGGSLRLSCAASGFTFSFYWMSWVRQAPGKGLEWVANIKQDGSEKFYVDSVKGRFTISRDNAKNSLYLQMNSLRAEDTAVYYCARLGSSSWYFDYWGQGTLVTVSS

SEQ ID NO: 1805 - protein, 120 aa, Artificial Sequence
  Synthetic construct
EVQLLESGGGLVQPGGSLRLSCAASGFTFSSYAMSWVRQAPGKGLEWVSAISGAGGSTYYADSVKGRFTISRDNSKNTLYLQMSTLRAEDTAVYYCAKAQGGYSYGFDYWGQGTLVTVSS

SEQ ID NO: 1806 - protein, 123 aa, Artificial Sequence
  Synthetic construct
QVQLVQSGTEVKKPGASVKVSCKVSGYTLTEISMHWVRQAPGKGLEWMGGFDPGTGETIYAQTLQGRVTMTEDTGTDTAYMELSNLRSEDSAMYYCATVQITSGATGGYFDYWGQGTLVTVSS

SEQ ID NO: 1807 - protein, 122 aa, Artificial Sequence
  Synthetic construct
QVQLMQSGAEVKKPGASVRIFCQASGYRFTNYVIHWVRQAPGQTFEWMGWINAANGDKKYSEKLQGRVTMTTDTSAATAYMEMRSLTFEDTAIYYCARGKRVVHYYYQMDVWGEGTTIIVSS

SEQ ID NO: 1808 - protein, 121 aa, Artificial Sequence
  Synthetic construct
QVQLVESGGGVVQPGRSLRLSCAASGFTFSSYAMHWVRQAPGKGLEWVVVISYDGINKYYADSVKGRFAISRENSKNMLYLQMNSLRAEDTAVYYCARAKSGAYRTPWDYWGQGALVTVSS

SEQ ID NO: 1809 - protein, 122 aa, Artificial Sequence
  Synthetic construct
QVQLVQSGAEVKKPGASVKVSCRASGDTFTSHYMHWVRQAPGQGLEWMGIINPDAGSTTYTQKLQGRVTMTRDTSTRTVYMELSSLRSEDTAVYFCARDLYYVPHRGAFDIWGQGTMVTVSS

SEQ ID NO: 1810 - protein, 131 aa, Artificial Sequence
  Synthetic construct
EVQLVQSGAEVKKPGESLKISCKGSGYTFNTYWIAWVRQMPGKGLEWMGIIYPGDSDTRYSPSFQGQVTISADKSITTAYLQWSSLKASDTAMYYCARPMRPSYASDWSFGAGYTYAMDVWGQGTSVTVSS

SEQ ID NO: 1811 - protein, 121 aa, Artificial Sequence
  Synthetic construct
QVQLQQWGAGLLKPSETLSLTCAVYGGSFSGYYWSWIRQPPGKGLEWIGEINHSGNTDYNPSLKSRVTISIDTSNNQFSLKLSSVTAADTAVYYCVRDDGSGTQNYYMDVWGKGTTVTVSS

SEQ ID NO: 1812 - protein, 119 aa, Artificial Sequence
  Synthetic construct
QVQLVQSGAEVKKPGASVRVSCKVSGYTLDELPMHWVRQAPGKGLEWMGGFDPEDTKTVYAQKFQGRVTMTEDTSTDTAYMELSSLRSEDTAVYYCATVTLRIQVFADWGQGTLVTVSS

SEQ ID NO: 1813 - protein, 126 aa, Artificial Sequence
  Synthetic construct
QVQLVESEGGFVKPGGSLRLSCAASEFTFSDYYMSWIRQAPGKGLEWVSYISGRGNTKYYADSVKGRFTISRDNAKNALYLQMNSLRAEDTAVYYCARLLGACTSGRCSSFWFDSWGQGALVTVSS

SEQ ID NO: 1814 - protein, 128 aa, Artificial Sequence
  Synthetic construct
QVQLQESGPGLVKPSQTLSLTCIVSGASISSDNYYWSWIRQPAGKGLEWIGRIYTSGSTNSNPSLKSRVIISLDTSKNQLSLKLNSVTAADTAVYYCAREVYYYDRSGYYSSDAFDVWGQGTMVTVSS

SEQ ID NO: 1815 - protein, 125 aa, Artificial Sequence
  Synthetic construct
EVQLVESGGGLVQPGGSLRLSCAASGFTFSSYWMHWVRQAPGKGLVWVSRINSDGSSTSYADSVKGRFTISRDNAKNTLYLQMNSLRAEDTAVYYCASAGPYYDYVWGSYCFDYWGQGTLVTVSS

SEQ ID NO: 1816 - protein, 121 aa, Artificial Sequence
  Synthetic construct
QVQLVESGGGVVQPGRSLRLSCAASGFTFSTYAMHWVRQAPGKGLEWVAVVSYDGSNKYFADSVKGRFTISRDNSKNTLYVEMNSLRGEDTAVYYCARARGGNYFDAFDIWGQGTLVTVSS

SEQ ID NO: 1817 - protein, 125 aa, Artificial Sequence
  Synthetic construct
QVQLVQSGAEVKRPGSSVKVSCKASGGTFSSYGISWVRQAPGQGLEWMGGIIPMLGTRRYAQRFRGRVTITADESTSTAYMELSSLRSEDTAVYYCARVGWSTATGGGYNAFDIWGQGTVVTVSS

SEQ ID NO: 1818 - protein, 127 aa, Artificial Sequence
  Synthetic construct
QVQLQESGPGLVKPSQTLSLTCTVSGGSVSSGDYYWSWIRQPPGKGLEWIGYIYYSGSTYYNPSLKSRVTISIDTSMNQFSLRLNSVTAADTAVYFCARDPHPYYFDGGGPSPVDYWGQGTLVTISS

SEQ ID NO: 1819 - protein, 126 aa, Artificial Sequence
  Synthetic construct
QVQLQESGPGLVRPSQTLSLTCTVSGGSISSGGHYWTWIRQHPIKGLEFVGYIYYTGSTYYKPSLKSRLIISVDTSKNQFSLNLTSVTAADTAVYYCARVGRFGESGVNYYAMDVWGQGTTVTVSS

SEQ ID NO: 1820 - protein, 131 aa, Artificial Sequence
  Synthetic construct
QVQLVQSGAEVKKPGAAVKVSCKASGYTFTSYYIHWVRQAPGQGLEWMGIINPSGGSASYAQKFQGRVTMTRDTSTSTVYMELSSLRSEDTAVFYCARETGTRNYDILAGSYYYYYYMDVWGEGTAVTVSS

SEQ ID NO: 1821 - protein, 127 aa, Artificial Sequence
  Synthetic construct
QLQLQESGPGLVKPSETLSLTCTVSGVSINSSDSYWGWVRQPPGKGLEWIGSMYYGGSTNYNPSLKSRLTISVDTSKNQFSLKLTSVTAADTAVYYCARHSNYYDSSGYVNTSPDYWGQGTLVTVSS

SEQ ID NO: 1822 - protein, 119 aa, Artificial Sequence
  Synthetic construct
QVQLVQSGGEVKKPGASVKVSCKASGYTFNRFGVNWVRLAPGQGLEWLGWVSAYNGATHYAQKVQGRVTMTTDTSTSTAYMELRSLRPDDTAMYYCARTDAYTNYADYWGQGTLVTVSS

SEQ ID NO: 1823 - protein, 121 aa, Artificial Sequence
  Synthetic construct
QVQLVESGGGVVQPGRSLRLSCAASGFTFSSYAMYWVRQAPGKGLKWVALISYDGGNKYYADSVKGRFTISRDNSNNTLYLLLNSLRADDTSMYYCARSTRGGYYYGMDVWGQGTTVTVSS

SEQ ID NO: 1824 - protein, 120 aa, Artificial Sequence
  Synthetic construct
EVQLLESGGGLVRPGGSLRLSCAASGFTFSSSVVSWVRQAPGKGLEWVSAVSGSGGSTYYADFVKGRFTISRDNSKNTLYLQMSSLRAEDTAIYYCAKPKGAGGWHFDNWGQGTLVTVSS

SEQ ID NO: 1825 - protein, 121 aa, Artificial Sequence
  Synthetic construct
QVQLVESGGGVVQPGRSLRLSCAASGFTFSTYAMHWVRQAPGKGLEWLTLISYDGINKYYGDSVKGRFTISRDNSKNTLYIQMNSLRPEDTAVYYCARAYGGNYYYGMDVWGHGTTVTVSS

SEQ ID NO: 1826 - protein, 127 aa, Artificial Sequence
  Synthetic construct
QVQLVESGGGVVQPGRSLRLSCAASGFTFSSYGLHWVRQAPGKGLEWVAVISYDGSKKYYVDSVKGRFTISRDNSKNTLYLQMNSLRAEDTAVYYCAKIVGDYCSGGSCYGGPLDYWGQGTLVTVSS

SEQ ID NO: 1827 - protein, 122 aa, Artificial Sequence
  Synthetic construct
QVQLQQWGAGLLKPSETLSRTCAVYGGSFSGYYWTWIRQPPGKGLEWIGEINPSGRTTYNPSLKSRVSMSIDTSKNQFSLQLSSVTAADTALYYCARANGNYERGGWYFDLWGRGTLVTVSS

SEQ ID NO: 1828 - protein, 120 aa, Artificial Sequence
  Synthetic construct
QMQLVQSGPEVKKPGTSVKVSCKASGFTFTSSAVQWVRQARGQRLEWIGWIVVGSGNTNYAQKFQERVTITRDMSTSTAYMELSSLRSEDTAVYYCAADRVSGLYGGGYWGQGTLVTVSS

SEQ ID NO: 1829 - protein, 125 aa, Artificial Sequence
  Synthetic construct
QLQLQESGPGLVKPSETLSLTCTVSGGSISSSSYYWGWIRQPPGKGLEWIGSIYYSGSTYYNPSLKSRVTISVDTSKNQFSLKLSSVTAADTAVYYCARDRVVLWFREGDYFDYWGQGTLVTVSS

SEQ ID NO: 1830 - protein, 126 aa, Artificial Sequence
  Synthetic construct
EVQLVESGGGLVQPGGSLKLSCAASGFTFSGSAMHWVRQASGKGLEWVGHIRSKANSYATAYGASVKGRFTISRDDSKNTAYLQMNSLKTEDTAVYYCTSTWQWLRGYYYYGMDVWGQGTTVTVSS

SEQ ID NO: 1831 - protein, 111 aa, Artificial Sequence
  Synthetic construct
EMQLVESGGGLVQPGGSLRLSCAASGFTFSVHWMSWVRQAPGKGLEWVANINQYGTEKYYVDSVKGRFTISRDNAKNSLDLQMNSLRAEDTAVYYCASVGLGQGTLVTVSS

SEQ ID NO: 1832 - protein, 124 aa, Artificial Sequence
  Synthetic construct
EVQLVESGGGLVQPGGSLRLSCAASGFTFSSYDMHWVRQPTGKGLEWVSAIGTAGDTYYPDSVKGRFTISRENAKNSLYLQMNSLRAGDTAVYYCTRATDTTMDLKHYYYMDVWGKGTTVTVSS

SEQ ID NO: 1833 - protein, 119 aa, Artificial Sequence
  Synthetic construct
EVQLVQSGAEVKKPGESLRISCKGSGYTFTSNWITWVRQMPGKGLEWMGRIDPGDPYSNSSPSFQGHATLSLDRPINTAYLLWSSLKASDTAIYYCARVNPMGGGPDYWGQGTLVTVSS

SEQ ID NO: 1834 - protein, 122 aa, Artificial Sequence
  Synthetic construct
QVQLVESGGGVVQPGRSLRLSCVASGFTFRGYAMHWVRQAPGKGLEWVAVISYDGRNKYYADSVQGRFTISRDNSNNTLYLQMNSLRTEDTAVYYCASGGSSGWYNGAFDIWGQGTMVTVSS

SEQ ID NO: 1835 - protein, 123 aa, Artificial Sequence
  Synthetic construct
EVQLVESGGGLVKPGGSLRLSCAASGFTFSSYSMNWVRQAPGKGLEWVSSISSSSSYIYYADSVKGRFTISRDNAKNSLYLQMNSLRAEDTAVYYCARDPLTWFGDRDGMDVWGQGTTVTVSS

SEQ ID NO: 1836 - protein, 123 aa, Artificial Sequence
  Synthetic construct
QVQLVESGGGVVQPGRSLRLSCAASGFTFRSYGMHWVRQAPGKGLEWVAVISFDGSNKHYADSVKGRFAISRDNSKNTLYLQMNSLRGEDTAVYYCARDHDDGYYFYYYMDVWGKGTTVTVSP

SEQ ID NO: 1837 - protein, 126 aa, Artificial Sequence
  Synthetic construct
QVQLQQWGAGLLKPSETLSLTCDVYGASFSDFYCSWIRQSPGKGLEWLGEISHSGSTNYNPSLRGRLTISVDTSKSQVSLRVTSVTAADTAVYFCAWNTGFPFGHYSTSGSYYPDWGQGTLVTVSS

SEQ ID NO: 1838 - protein, 117 aa, Artificial Sequence
  Synthetic construct
QVQLQESGPGLVKPSETLSLTCAVSGGSFGTYYWSWVRQPPGQGLEWIGYIYYSGTTNYTPSLKSRVSISIDTSKNQFSLKLTSVTAADTAMYFCARNTNLEYFDFWGRGTLVTISS

SEQ ID NO: 1839 - protein, 129 aa, Artificial Sequence
  Synthetic construct
EVQVVEFGGGLVQPGRSLRLSCTTSGFTFEDFDMHWVRQAPGKGLEWVSGSTWNSGTIGYADSVKGRFITSRDNAKNSLYLQMINLRDEDTALYYCAKDIGRYDHYYTFGSVGGAFDIWGQGTMVTVSS

SEQ ID NO: 1840 - protein, 118 aa, Artificial Sequence
  Synthetic construct
QVQLQESGPGLVKPSGTLSLTCIVSGGSISSINWWSWVRQPPGKGLEWIGEIFHSGSINYNPSLKSRVTISVDKSKNQFSLKLSSVTAADTAVYYCARIQQWRAFDPWGQGTLVTVSS

SEQ ID NO: 1841 - protein, 125 aa, Artificial Sequence
  Synthetic construct
QVQLVQSGAEVKKPGASVTVSCKGSGYTFTSYYIHWVRQAPGQGLEWVGMINPSGGSTTYAQTFQGRVSMSRDRSTSTVYMYLSNLRSDDTAVYYCARDRDAYANYVYYYGMDVWGQGTTVTVSS

SEQ ID NO: 1842 - protein, 130 aa, Artificial Sequence
  Synthetic construct
QVQLVQSGAEVKKPGASVKVSCKASGYTFTSYGISWVRQAPGQGLEWMGWISAYNGNTNYAQKLQGRVTMTTDTSTSTAYMELRSLRSDDTAVYYCARATPYCSGGSCLIYYYYYGMDVWGQGTTVTVSS

SEQ ID NO: 1843 - protein, 126 aa, Artificial Sequence
  Synthetic construct
EVQLLESGGGLVQPGGSLRLSCAASGFTFSSYAMSWVRQAPGKGLEWVSAISGSGGSTYYADSVKGRFTISRDNSKNTLYLQMNSLRAEDTAVYYCASAPPLVITKGLYYYGMDVWGQGTTVTVSS

SEQ ID NO: 1844 - protein, 124 aa, Artificial Sequence
  Synthetic construct
EVQLLESGGGLVQPGGSLRLSCAASGFTFSSYAMNWVRQAPGKGLEWVSGISGSGGSTYYADSVKGRFSISRDNSKNTLYLQMSSLRAEDTAIYYCAKDVGNYGGDKYNWFDPWGQGTLVTVSS

SEQ ID NO: 1845 - protein, 122 aa, Artificial Sequence
  Synthetic construct
QVQVVQSGAEVKKPGASVKISCQASGYTFTTYAIHWMRQAPGQRLEWMGWINAANGDTEPSQSFQGRVTITTDTSARTVYMELSSLRSEDTAVYYCAKKNYDNSGCHYFQSWGQGTLVTVSS

SEQ ID NO: 1846 - protein, 118 aa, Artificial Sequence
  Synthetic construct
EVHLVESGGVLVRPGESLRLSCAASGFTFSNYWMTWVRQAPGKGLEWVADIKQDGSEKYYVDSLKGRITISRDNAKNSLYLQMNSLRVEDTAVYYCVRGGLWGTFDYWGRGTLVTVSS

SEQ ID NO: 1847 - protein, 130 aa, Artificial Sequence
  Synthetic construct
EVQLVQSGAEVKEPGESLRISCKGSGYSFASYWIGWVRQMPGKGLEWMGIIYPGNSDTRYSPSFQGQVTISADKSISTAYLQWSSLKASDTAIYYCAKHIVVAPTTASWVISLNYFMDVWGKGTTVTVSS

SEQ ID NO: 1848 - protein, 120 aa, Artificial Sequence
  Synthetic construct
QVQLQESGPGLVKPSQTLSLTCTVSGGSISSGSYYWSWIRQPAGKGLEWIGRIYTSGSTNYNPSLKSRVTISVDTSKNQFSLKLSSVTAADTAVYYCAREGSWKYIFDYWGQGTLVNVSS

SEQ ID NO: 1849 - protein, 126 aa, Artificial Sequence
  Synthetic construct
QLQLKESGPGLVKPSETLSLICTVSGGSISSSSDYWGWIRQPPGKGLEWIGNIYYSGSTYYNPSLKSRVTISVDTSKNQFFLRLTSVTAADTAVYYCARRRSMIVVVPKGDWFDPWGQGTLVTVSS

SEQ ID NO: 1850 - protein, 131 aa, Artificial Sequence
  Synthetic construct
QVQLVQSGAEVKKPGASVKVSCKASGYPFPNYALTWVRQAPGQGLEWMGWINPYNGNTSYAQNLRGRVTMTTDTSTSTAYMELRSLRSDDTAVYYCARDPASYYDLWSGYVDYYYYGMDVWGQGTTVTVSS

SEQ ID NO: 1851 - protein, 117 aa, Artificial Sequence
  Synthetic construct
EVQLVETGGVLIQPGGSLRLSCAASGLNVSNSYMSWVRQAPGEGLDWLSVIYSDGSTSYAESVKGRFTISRDKSKNTLYFQMNSLKAEDTAVYYCARFYGAKYFDHWGQGTLVTVSS

SEQ ID NO: 1852 - protein, 124 aa, Artificial Sequence
  Synthetic construct
QVQLVQSGAEVKKPGASVKVSCKASGYTFTDYYIHWVRQAPGQGLEWMGIISPSNGGTSYAQNWQGRVSMTRDTSTSTVYMELSSLRSDDTAVYYCARDPSRPSYGDHDAFDIWGHGTMLTVSS

SEQ ID NO: 1853 - protein, 125 aa, Artificial Sequence
  Synthetic construct
QVQLVQSGAEVKKPGSSVKVSCKASGGTFSTYAFNWVRQAPGQGLEWMGRIIPIFGTANYAQKFQGRVTITADESTSTAFVELSSLRSEDTAVYYCARGPVQLSSSWPPDAFDIWGQGTMVTVSS

SEQ ID NO: 1854 - protein, 129 aa, Artificial Sequence
  Synthetic construct
QVQLVQSGAEVKKPGASVKVSCKASGYIFTSYDMHWVRQAPGQRLEWMGWINVGNGNTKYSQKFLGRVTFTSDTSASTVYMELSSLRSEDTAMFYCARPPRGYYDRTGYYNVVHYFHHWGQGTLVTVSS

SEQ ID NO: 1855 - protein, 129 aa, Artificial Sequence
  Synthetic construct
EVQLVQSGAEVKKPGDSLKISCKGSGYSFTSYWIGWVRQMPGKGLEWMGIIYPDDSYTRYRPSFQGQVTISADKSISTAYLQWSSLKASDTAMYYCARPRFGGSGNYYNVPGAGAFDMWGQGTLVIVSS

SEQ ID NO: 1856 - protein, 121 aa, Artificial Sequence
  Synthetic construct
QVQLVQSGAEVKKPGSSVKVSCKASGGTFSSYTINWLRQAPGQGLEWMGRSIPMLDIAKYAQKFQGRVTMTADKSTSTAYMELSSLRSEDTAVYYCARGVVAATPGYFDYWGQGTLVTVSS

SEQ ID NO: 1857 - protein, 99 aa, Artificial Sequence
  Synthetic construct
GGFTFSRYGMHWVRQAPGKGLEWIITISNDGSDKYYADSVKGRFTISRDNSKNTLNLQMISLRVEDTAVYYCAKERSMYYYDSSGIDYWGQGTLVTVSS

SEQ ID NO: 1858 - protein, 124 aa, Artificial Sequence
  Synthetic construct
QVQVVQSGAEVKKPGASVKVSCKVSGYTLPELSIHWMRQAPGKGLEWMGGFDPEKGETVYAQKFQGRVTMTEDTSTDTAYMELSSLRSEDTAVYYCATGPAYCDGYCRRWLDPWGQGTLVTVSS

SEQ ID NO: 1859 - protein, 127 aa, Artificial Sequence
  Synthetic construct
QVQLVQSGAEVKKPGASVKVSCKASGYTFTSYGISWVRQAPGQGLEWMGWISAYNGNTNYAQKLQGRVTMTTDTSTSTAYMELRSLRSDDTAVYYCARDPDPDIVVVVAADASLDYWGQGTLVTVSS

SEQ ID NO: 1860 - protein, 119 aa, Artificial Sequence
  Synthetic construct
QMQLVESGGGVVQPGRSLRLSCAASGFTFSRYGMHWVRQAPGKGLEWVALIWYDGSNEFYGDSVKGRFTISRDNSRNTLFLQMNSLRVEDTAVYYCARDYGDDNWFDPWGQGTLVTVSS

SEQ ID NO: 1861 - protein, 121 aa, Artificial Sequence
  Synthetic construct
QVQLVESGGGVVQPGRSLRLSCAASGFSFSTYGMHWVRQAPGKGLEWVAVIYYDGNNKYYADSVKGRFTISRDTSKNTLYLQMNSLRAEDTAMYYCAREGQVGATTGADYWGQGTLVTVSS

SEQ ID NO: 1862 - protein, 127 aa, Artificial Sequence
  Synthetic construct
EVQLVESGGALVQPGGSLRLSCVASGFDFTSYWLHWVRHVPGKGLEWVSRLNSVGSVRRYSDSVRGRFIISKDLARSTVFLQMDSLTVEDTAIYYCARDRGFCTASHCPGVDAFDVWGPGTTVTVSS

SEQ ID NO: 1863 - protein, 120 aa, Artificial Sequence
  Synthetic construct
QVHLVESGGGVVQPGRSLRLSCAASGFTFSTYAIHWVRQAPGKGLEWVAVISYDGTDKYYADSVKGRFTISRDNSKNTLYLQTNSLRTEDTAVYYCARGRGGYYTYFDYWGQGTLVTVSS

SEQ ID NO: 1864 - protein, 121 aa, Artificial Sequence
  Synthetic construct
QVQLQESGPGLVRPSQTLSLTCTVSGGSISSGSYYWSWIRQPAGEGLEWIGRVYSSGSTDYNPSLKSRVTISVDTSKNQFSLKLSSVTAADTAVYYCARTYFYDTDTFNIWGQGTMVTVSS

SEQ ID NO: 1865 - protein, 125 aa, Artificial Sequence
  Synthetic construct
QVHLVQSGAEVKKPGASVKVSCKASGYTFTSYTIHWVRQAPGQRLEWMGWINAGNDNTKYSQKFQGRVTITRDTSATTAYMELSSLRSEDTAVYYCARSWNNNESSTYTTPFDYWGQGTLVTVSS

SEQ ID NO: 1866 - protein, 129 aa, Artificial Sequence
  Synthetic construct
QITLKESGPTLVKPTQTLTLTCTFSGFSLSTGGVGVGWIRQPPGKALEWLALIYWDDEKRYSPSLKSRLTITKDTSKNQVVLIMTNMDPVDTATYYCAHRPLSGSWHIGPNPENWFDPWGQGTLVTVSS

SEQ ID NO: 1867 - protein, 124 aa, Artificial Sequence
  Synthetic construct
QVQLVESGGGVVQPGRSLRLACAASGFTFSSYGMHWVRQAPGKGLEWVAVIWYDGSNKYYADSVKGRFTISRDNSKNTLYLQMNSLRAEDTAVYYCARDSGNWNDGDGGHFDSWGQGSLVTVSS

SEQ ID NO: 1868 - protein, 119 aa, Artificial Sequence
  Synthetic construct
AEQLVESGGGLVQPGGSLRLSCVASGITFSGYWMHWVRQVPGKGLVWVSRINSAESTIDYADPVKGRFTISRDNARNTIHLQMNSLTDEDTAVYYCAGGRSPGRTFEIWGQGTMVTVSS

SEQ ID NO: 1869 - protein, 125 aa, Artificial Sequence
  Synthetic construct
AVQVVETGGKLIQPGGSLRLSCAASGFSVRSNYINWVRQAPGKGLEWVSVIYINGSTNYADSVKGRFTISRDTYKNTVSLQMNNLRGDDTAVYHCARDPQALAAGPRYYYYMDVWGKGTTVIVSS

SEQ ID NO: 1870 - protein, 129 aa, Artificial Sequence
  Synthetic construct
QVQLVESGGGVVQPGRSLRLSCAASGFTFSSNAMHWVRQAPGKGLEWVAVISYDGSTIYYAASVKGRFTISRDNSKNALYLQMNSLRAEDTAVYYCARDGAYCSDGWCYTDIVFIMDVWGTGTTVTVSS

SEQ ID NO: 1871 - protein, 112 aa, Artificial Sequence
  Synthetic construct
QVQLQESGPGLVKPSETLSLTCSVSGGSISSYYWSWIRQPPGKGLEYIGYIYYGGSTNYNPSLRSRVTISVDTSKNQFSLKLSSVTAADTAVYYCARGFDYWGQGTLVTVSS

SEQ ID NO: 1872 - protein, 124 aa, Artificial Sequence; identical to SEQ ID NO: 1852
  Synthetic construct

SEQ ID NO: 1873 - protein, 120 aa, Artificial Sequence
  Synthetic construct
QVQLVQSGAEVKKPGSSVKVSCKASGGTLSNFAISWVRQTPGQGLDWMGGTIPIFGTANYAQNFHGKVTITADESTSTAYMELTSLRSEDTAVYYCVRWGDDYDDYVDYWGQGTLVTVSS

SEQ ID NO: 1874 - protein, 123 aa, Artificial Sequence
  Synthetic construct
EVQLVESGGGLVKPGGSLRLSCAASGFTFSNYSMNWVRQAPGKGLEWVSSISTSSSYIYYADSVRGRFTISRDNAKNSLYLQMNSLRAEDTAVYYCARDPVRGFFYYYYMDVWGKGTTVTVSS

SEQ ID NO: 1875 - protein, 125 aa, Artificial Sequence
  Synthetic construct
EVQLVESGGGLVKPGGSLRLSCAASGFTLSSYSMNWVRQAPGKGLEWVSSISSSGSDIYYADSVKGRFTISRDNAKNSLYLQMNSLRAEDTAVYYCATQPGAVAITYHYYGMDVWGQGTTVTVSS

SEQ ID NO: 1876 - protein, 129 aa, Artificial Sequence
  Synthetic construct
EVQLLESGGGLVQPGGSLRLSCAASGFTFSSYAMSWVRQAPGKGLEWVSALSGNGGRIFYADSVKGRFTISRDNSMDTLYLQMNSLRGEDTAVYYCAKDLMSSGGSGQGYYYHYGMDVWGQGTTVTVSS

SEQ ID NO: 1877 - protein, 121 aa, Artificial Sequence
  Synthetic construct
QVQLVQSGAEVKKPGSSVKVSCKASGGTFSSYIISWVRQAPGQGLEWMGRIIPNFGVANYAQKFQGRVTITADKSTSTAYMELSSLRSEDTAVYYCARPVLRRDYYGMDVWGPGTTVTVSS

SEQ ID NO: 1878 - protein, 114 aa, Artificial Sequence
  Synthetic construct
EVQLVESGGGLVKPGGSLRLSCTASGVIFRNAWMSWVRQAPGKGLEWVGRLKSNSAGATTDYAAPVKGRFTISRDDSRNALYLQMNSLKTDDTAVYYCTTWWFWGQGTLVTVSS

SEQ ID NO: 1879 - protein, 121 aa, Artificial Sequence
  Synthetic construct
QVQLVQSGAEVKKPGASVKVSCKVSGFTLTELSVHWVRQAPGRGLEWMGGFDPEDGETIYAQKFQGRVTMTEDTSTDTAYMELSSLRSEDTAVYYCATSPAIVRQNWFDPWGQGTLVTVSS

SEQ ID NO: 1880 - protein, 121 aa, Artificial Sequence
  Synthetic construct
QVQLVQSGSELKKPGASVKVSCKASGNTFTNFAVNWVRQAPGQGLEWMGWINANTGIPTYAQGFTGRFVFSLDTSASTAYLQISSLKAEDTAVYYCARAAMIIMVGAFDFWGQGTMVTVSS

SEQ ID NO: 1881 - protein, 122 aa, Artificial Sequence
  Synthetic construct
QVQLVQSGAEVKKPGASVKVSCSVSGYTLPELSIHWVRQAPGKGFEWMGGFDPEDVETIYAQKFQGRVTMTEDTSTDTAYMELRSLTSEDTAVYYCVTGPVIVAAGSWLAPWGQGTLVTVSS

SEQ ID NO: 1882 - protein, 119 aa, Artificial Sequence
  Synthetic construct
QVTLKESGPVLVKPTHTLTLTCSVSGFSLSNAIMGVSWIRQPPGKALEWLGHIFSNDEKAYSTSLKSRLTISKDTSKGQVVLTMTNMDPVDTATYYCARLAGRIPFDSWGQGTLVTVSS

SEQ ID NO: 1883 - protein, 129 aa, Artificial Sequence
  Synthetic construct
QVQLQESGPGLVKPSETLSLTCAVSGVPIVNYYWSWIRQPPGKGPEWIGYIYHSGNTNYNPYLKSRVTLSIDTSDNQFSLELSSVTSADTAVYYCAGAPTSEYYDDSGYYRPTWHFDLWGRGTLVTVSS

SEQ ID NO: 1884 - protein, 123 aa, Artificial Sequence
  Synthetic construct
QLQLQESGPGLVKPSETLSLICTVSGVSISSSSSFWGWVRQPPGKGLEWIGSIQYSGSPYYNPSLKSRLTMSVDTSKNHFSLKVTSVAAVDTAVYYCGRLVVRGGWNDAFDLWGQGTMVIISA

SEQ ID NO: 1885 - protein, 121 aa, Artificial Sequence
  Synthetic construct
EVQLVESGGGLVQPGRSLRLSCAASGFTFDDYAMHWVRQAPGKGLEWVSGISWNSGSIGYADSVKGRFTISRDNAKNSLYLQMNSLRAEDTALYYCAKDTVGPDYYGMDVWGQGTTVTVSS

SEQ ID NO: 1886 - protein, 120 aa, Artificial Sequence
  Synthetic construct
QVQLQQLGAGLLKPSETLSLTCDVYGGSFSGYYWSWIRQPPGKGLEWIGEINHSGNTDYNPSLKSRVTISLDTSKNQFSLRLSSVTAADTAVYYCARDDGSSWQTVFDIWGQGSMVTVSS

SEQ ID NO: 1887 - protein, 127 aa, Artificial Sequence
  Synthetic construct
QVQLVESGGGVVQPGRSLRLSCAASGFTFSTYGMHWVRQAPGKGLEWVAFISDDSSNKYYADSVKGRFTISRDNTKNTVFLQMNTLRAEDTAVYYCAKADGGYYDSSAYHSTAIDYWGQGTLVTVSS

SEQ ID NO: 1888 - protein, 125 aa, Artificial Sequence
  Synthetic construct
QVQLVQSGAEVKKPGASVKVSCNASGYTFTSYGITWVRQAPGQGLEWLGLISAYNGNTNYAQKLQGRVTMTSDTSTSTAYMELRSLRSDDTAVYYCARAYSSGWRTYYYYGMDVWGQGTTVTVSS

SEQ ID NO: 1889 - protein, 123 aa, Artificial Sequence
  Synthetic construct
QVQLQESGPGLVKPSQTLSLTCTVSGGSISGGSFYWSWIRQHPGKGLEWIGNIYHSGSTYYNPSLKSRVTISVDTSKNQFSLRLSSVTAADTAVYYCARDPYSSGWYYGMDVWGQGTTVTVSS

SEQ ID NO: 1890 - protein, 121 aa, Artificial Sequence
  Synthetic construct
QVQLVESGGGVVQPGRSLRLSCAASGFTFSTYAMHWVRQTPGRGLEWVALISYDGFNKYYSDSVKGRFTISRDNSKNTLFLQMNTLRADDTAVYYCARGGGGSYWGPFDYWGQGTLVTVSS

SEQ ID NO: 1891 - protein, 119 aa, Artificial Sequence
  Synthetic construct
EVHLVASGGGLVKPGGSLRLSCAASGFTFSSYSMNWVRQAPGRGLEWVSSISSSSSYIYYADSVKGRFTISRDNAKNSLYLQMNSLRAEDTAAYYCAREGYSYYGMDVWGQGTTVTVSS

SEQ ID NO: 1892 - protein, 122 aa, Artificial Sequence
  Synthetic construct
QVQLQESGPGLVKPSETLSLTCTVSGGSISTYYWSWIRQSPGKGLEWIGYVFYSGGTNYNPSLRSRVTISVDTSKNQFSLKLRSVTAADTAVYYCARDRGHDYGSPDAFDIWGQGTMVTVSS

SEQ ID NO: 1893 - protein, 117 aa, Artificial Sequence
  Synthetic construct
EVQLVESGGGLIQPGGSLRLSCAASGLTVSSNYMSWVRQAPGKGLEWVSVIYSGGSKFYADSVKGRFTISRDSSNNTLYLQMNSLSAEDTAVYFCARELYGGAFDIWGQGTMVTVSS

SEQ ID NO: 1894 - protein, 122 aa, Artificial Sequence
  Synthetic construct
QVQLVQSGAEVKKPGSSVKVSCRASGGTFSTYAISWVRQAPGQGLEWMGGIIPIFDTAKYAQRFQGRVTITADESTSTAYMELSSLRSEDTAVFYCASTGHYDSSGFYSDYWGQGTLVTVSS

SEQ ID NO: 1895 - protein, 128 aa, Artificial Sequence
  Synthetic construct
QVQLVQSGAEVKKPGASVKVSCKVSGYTLIELSMHWVRQAPGKGLEWMGGFDPEDAETIYAQKFQGRVTMTEDTSTDTAYMELSSLRSEDTAVYYCVAAPAVAGTPQVYHHYYGMDVWGQGTTVTVSS

SEQ ID NO: 1896 - protein, 123 aa, Artificial Sequence
  Synthetic construct
QVQLQESGPGLVKPSQTLSLTCTVSGGSISGGGHYWSWIRQHPGKGLEWIGYIYYSGSTYYNPSLKSRVTISIETSKNQFSLKLSSVTAADTALYYCARDTYDPPDYYGMDVWGQGTTVTVSS

SEQ ID NO: 1897 - protein, 124 aa, Artificial Sequence
  Synthetic construct
QVQLVESGGGVVQPGRSLRLSCAASGFTFSNYAMHWVRQAPGKGLEWVALISYDGSNEDYADSVKGRITISRDNSKNTLYLQMNSLRAEDTAVYYCARSLWFGELRSIHHFDYWGQGTLVTVSS

SEQ ID NO: 1898 - protein, 122 aa, Artificial Sequence
  Synthetic construct
EVQLLESGGGLVQPGGSLRLSCAASGFTFNSFAMTWVRQAPGKGLEWVSAIGSTGGSTYYADSVKGRFTISRDNSRNTLYLQMNSLRVEDTAVYYCTKCDTALAPYNWFDPWGRGTLVTVSS

SEQ ID NO: 1899 - protein, 121 aa, Artificial Sequence
  Synthetic construct
QVQLVESGGGVVQPGRSLRLSCAASGFIFSDFAMSWVRQAPGKGLEWVATISYDGSQKYHADSVKGRFTISRDNSKNTLYLQMNSLRAEDTTVYYCARSHSGWFWSGMDVWGQGTTVTVSS

SEQ ID NO: 1900 - protein, 123 aa, Artificial Sequence
  Synthetic construct
QLQLQESGPGLVKPSETLSLTCTVSGVSISSSNYYWGWIRQPPGKGLEWIGSIYYSGSTSYNPSLKSRVTMSVNTSKNQFSLKLTSVTAADTAVYYCAREDPVPSSYDAFDIWGQGTMVTVSS

SEQ ID NO: 1901 - protein, 116 aa, Artificial Sequence
  Synthetic construct
QVQLVESGGGVVQPERSLRLSCAASGITFNEYAMHWVRQAPGRGLEWLAFISYDGSVQHYGDSVKGRFTISRDDLKNTLFLQMNSLRADDTAVYYCAKGATKVDYWGQGTLVTVSS

SEQ ID NO: 1902 - protein, 125 aa, Artificial Sequence
  Synthetic construct
QVQLVQAGSELKKPGASVKVSCKASGYTFTKYAMNWVRQAPGQGLEWMGWINTDTGNPTYAQGFTGRFVFSLDTSVSTAYLQISSLKTEDTAVYYCARDGGLTMPMFDYYYMDVWGKGTTVIVSS

SEQ ID NO: 1903 - protein, 119 aa, Artificial Sequence
  Synthetic construct
EVQLVESGGGLVQPGGSLRLSCAASGFTFSLYWMSWVRQTPGKGLEWVANIKQDGSEKYYVDSVKGRFSISRDNAKNSLYLQMNSLRVEDTAVYYCAGLPPSSWNFDYWGQGTLVTVSS

SEQ ID NO: 1904 - protein, 126 aa, Artificial Sequence
  Synthetic construct
QVQLVQSGSELKKPGASVKVSCKASGYTFTSYAMNWVRQAPGQGLEWMGWINTNTGDPTYARDFTGRFVFSLDTSVSTAYLQISSLKAEDTAVYYCARDFDKIAAAEYYYYYMDVWGKGTTVTVSS

SEQ ID NO: 1905 - protein, 125 aa, Artificial Sequence
  Synthetic construct
QLQLQESGPGLVKPSGTLSLTCAVSGGSISSSHWWSWVRQPPGKGLEWIGEIYHSGSTNYNSSLKSRVTISVDKSKNQFSLKLSSVTAADTAVYYCARASSGTQWELLSRYFYYWGQGTLVTVSS

SEQ ID NO: 1906 - protein, 128 aa, Artificial Sequence
  Synthetic construct
LVQLVESGGGVVQPGRSLRLSCAASGFTFISYSMHWVRQAPGKGLEWVAVISDDGINTKHADSVKGRFTISRDNSKNTLYLQMNSLRVEDTAVYYCAREGPYSTGWYTWGDYYYMDVWGKGTTVTVSS

SEQ ID NO: 1907 - protein, 125 aa, Artificial Sequence
  Synthetic construct
QVELVESGGGVVQPGRSLRLSCAASGFTFINYAMHWVRQAPGKGLEWVAVTSFDGNNKQYADSVKGRFTISRDNSKNTLYLQMNSLRAEDTAVYYCARAVTTFESYSFFYAMDVWGQGTTVTVSS

SEQ ID NO: 1908 - protein, 120 aa, Artificial Sequence
  Synthetic construct
QLQLQESGPGLVRPSETLSLTCTVSGGSISSSSYYWGWIRQPPGKGLEWIGTIFYTGRTYYNPSLKSRVSISVDTSKSQFSLNLSSVTAADTAVYYCARYASGRGGFDPWGQGTLVTVSS

SEQ ID NO: 1909 - protein, 119 aa, Artificial Sequence
  Synthetic construct
QVQLVQSGSELKKPGASVKVSCKASGYTFTSYALNWVRQAPGQGLEWMGWINTNTGNPTYAQGFTGRFVFSLDTSVSTAYLQISSLKADDTAVYYCVREYGPGNYLPYWGQGTLVTVSS

SEQ ID NO: 1910 - protein, 118 aa, Artificial Sequence
  Synthetic construct
QVQLQESGPGLVNPSGTLSLTCVVSGGSISSSHWWSWVRQPPGKGLEWIGEIYHSGNTNYNPSLKSRGTISVDKSKNQFSLKLSSVTAADTAVYYCARHILPPRFDPWGQGTLVTVSS

SEQ ID NO: 1911 - protein, 130 aa, Artificial Sequence
  Synthetic construct
QVHLVESGGGVVQPGRSLRLSCAASGFTFSTYAIHWVRQAPGKGLEWVAVISSDGTNKYYADSVKGRFTISRDNSRNTINLQLNSLRPEDTAVYYCARENDPPPRIWFGELLSLDAFDIWGQGTMVTVSS

SEQ ID NO: 1912 - protein, 122 aa, Artificial Sequence
  Synthetic construct
QVQLVQSGAEVKKPGSSVKVSCKASGGTFSSYAITWVRQAPGQGLEWMGGIIPIFGTANFAQKFQGRVTITADESTSTAYMELSSLRSEDTAVYYCARVETYDSSGYHFDYWGQGTLVAVSS

SEQ ID NO: 1913 - protein, 117 aa, Artificial Sequence
  Synthetic construct
QVQLVQSGVEVKKPGASVKVSCKASGYSFTSYGIGWVRQAPGQGLEWMGWINVNTDERNYAQEFQGRVTMTTDTSTSTAYMELRSLRSDDTAVYYCARDWNFIYDYWGQGTLVTVSS

SEQ ID NO: 1914 - protein, 123 aa, Artificial Sequence
  Synthetic construct
QVQLVESGGGVVQPGRSLRLSCAASGFTFSSYGMYWVRQAPGKGLEWVAVISYDGSNKYYADSVKGRFTISRDNSKNTLYLQMNSLRAEDTAVYSCAKDRLGYDFWSGYFDLWGRGTLVTVSS

SEQ ID NO: 1915 - protein, 123 aa, Artificial Sequence
  Synthetic construct
QVQLVESGGGLVKPGGSLRLSCTASQFIFSDYYMSWIRQAPGKGLEWISYISSSGSSTYYADSVKGRFTISRDNAKKSLYLEMSSLRVEDTAVYYCARDLRSSNYLGDTFDLWGQGTMVTVSS

SEQ ID NO: 1916 - protein, 119 aa, Artificial Sequence
  Synthetic construct
QVQLVQSGAEVRKPGASVKVSCKVSGYTLSELPMHWVRQAPGKGLEWMGGFDPADVKTVYAQNFQGRVTMTEDTSTDTAFMELSSLRSEDTAVYYCAAVPLMIQVFADWGQGTLVTVSS

SEQ ID NO: 1917 - protein, 118 aa, Artificial Sequence
  Synthetic construct
EVQLVESGGGLIQPGGSLRLSCAASGFTVSSNYMNWVRQAPGKGLQWVSLIYSGGSTFYADSVKGRFTISRDNSKNTLYLQMNSLRAEDTAVYYCARGPYCGGNCGAWGQGTLVTVSS

SEQ ID NO: 1918 - protein, 120 aa, Artificial Sequence
  Synthetic construct
EVQLVESGGGLVQPGGSLRLSCAASGLTVSRNYMNWVRRAPGKGLEWVSIIYSGGSTFYAASVKGRFTISRDSSKNTLYLQMNSLRAEDSAVYYCARETATQAGSAFDIWGQGTMVTVSS

SEQ ID NO: 1919 - protein, 122 aa, Artificial Sequence
  Synthetic construct
QVQLVQSGAEVKKPGASVKVSCKASGYTFTNYAIHWVRQDPRQRLEWMGWINAGTGKTKYSQKFQDRVTITRDTSASIVYMELSSLRSEDTAVYYCARDYPRNSGGSCYSYWAQGTLVTVSS

SEQ ID NO: 1920 - protein, 120 aa, Artificial Sequence
  Synthetic construct
QVQLVQSGAEVKKPGSSVKVSCKASGGSFSSPAVSWVRQAPGQGLEWVGGVIPIFGTVRYAQKFQGRVTISADKGTSTAYMEFHSLRSDDTAVYYCARKTSDYSYSIDPWGQGTLVIVSA

SEQ ID NO: 1921 - protein, 127 aa, Artificial Sequence
  Synthetic construct
QVQLVQSGAEVKKPGASVKVSCKASGYTFTNYDITWVRQAPGQGLEWMGWISTYKGNTNYAQKVQGRVSMTTDTSTSTAYMELRSLRSDDTAVYYCARITIVRGADDYYYRYGMDVWGQGTTVTVSS

SEQ ID NO: 1922 - protein, 124 aa, Artificial Sequence
  Synthetic construct
QVQLVESGGGLVKPGGSLRLSCAASGFTFSDYYMSWIRQAPGKGLEWVSYISSSGSTIYYADSVKGRFTISRDNAKNSLYLQMNSLRAEDTAVYYCARDRYSSSWYVGYGMDVWGQGTTVTVSS

SEQ ID NO: 1923 - protein, 125 aa, Artificial Sequence
  Synthetic construct
QVQLMESGGGLVKPGGSLRLSCAASGFTFSDYYMSWIRQPPGRGLECVSYMSSSGSVISYADSVKGRFTISRDDAKNSLYLQMNSLTVEDTAVYFCARVDGPPLGYYHYYYMDVWGKGTTVTVSS

SEQ ID NO: 1924 - protein, 130 aa, Artificial Sequence
  Synthetic construct
QVQLVQSGAEVKKPGASVKVSCKASGHTLIRHAIHWVRQAPGQRLEWMGWINAGNGNTKYSQKFQGRVTITRDTSANTAYMELSSLRSEDTALYYCARDTPYYDSSGHYYEGGNDAFEIWGQGTMVIVSS

SEQ ID NO: 1925 - protein, 121 aa, Artificial Sequence
  Synthetic construct
QVHLVQSGAEVKKPGSSVKVSCKASGGIFSVSAICWVRQAPGQGLQWMGSIIPTFGTTKYAQKFQGRVTITADESTGIVYMDLHSLRSEDTAVYYCARPREFGSAYSADDWGQGTRITVSS

SEQ ID NO: 1926 - protein, 123 aa, Artificial Sequence
  Synthetic construct
QVQLVESGGGVVQPGRSLRLSCAASGFTFSNYGMHWVRQAPGKGLEWMAVIWYDGSNENYADSVKGRFTISRDNSKNTLYLQMNSLRAEDTAVYYCARWGAGSGWDEGEFDYWGQGTLVTVSS

SEQ ID NO: 1927 - protein, 129 aa, Artificial Sequence
  Synthetic construct
QVQLQESGPGLVKPSETLSLTCTVSGYSISSGYYWGWVRQPPGKGLEWIGSIYHSGSTYYNPSLKSRVTISIDMSKNQFSLKLSFVTASDTAMYFCARAIPPSGSYWHRYYEYYYMDVWGKGTTVSASS

SEQ ID NO: 1928 - protein, 126 aa, Artificial Sequence
  Synthetic construct
QVQLQESGPGLVKPSQTLSLTCTVSGGSIINGGYYWSWIRQHPGKGLEWIAYIYYSGNTYYNPSLKSRVTISVDTSKNQFSLKLSSVTAADTAVYYCASGHYCSGGSCYSGWLDPWGQGTLVTVSS

SEQ ID NO: 1929 - protein, 123 aa, Artificial Sequence
  Synthetic construct
QVQLQESGPGLVKPSQTLSLTCTLSGGSITSGGYYWSWIRQLPGKGLEWIGYIYYSGSTYYNPSLKSRGTISLDTSKNQFSLKLTSVTAADTAVYYCARERAGIPTNDAFDIWGQGTMVTVSS

SEQ ID NO: 1930 - protein, 130 aa, Artificial Sequence
  Synthetic construct
EVQLVQSGAEVKKPGESLKISCKSSGYSYTNYWIGWVRQKPGKGLECMGIIYPDDSDTRYSPSFQGQVTISADKSITTAYLQWSSLKASDTAMYYCARFSVASMYTSGWYKYHYYGMDVWGQGTTVTVSS

SEQ ID NO: 1931 - protein, 127 aa, Artificial Sequence
  Synthetic construct
QVQMVQSGAEVKKPGASVKVSCKASGYTFTNYGISWVRQAPGQGLEWMGWISAYNGDTNYAQKFQGRVTMTTDTSTSTVYMELRSLRSGDTAVYYCARDRQYYDTSGYYFNYGMDVWGQGTTVTVSS

SEQ ID NO: 1932 - protein, 119 aa, Artificial Sequence
  Synthetic construct
EVQLVESGGGLVQPGGSLRLSCAATGFTFRSYAMNWVRQAPGKGLEWVSAISGGGGSTYYADSVKGRFTISRDNSKNTLYLQMNSLRGEDTAVYYCAKVGPSGNAFDIWGQGTMVTVSS

SEQ ID NO: 1933 - protein, 122 aa, Artificial Sequence
  Synthetic construct
QVQLVQSGAEVKKPASSVKVSCKASGGTFSSHAITWVRQAPGQGLEWMGGIIPIFDSTNYAQKFQGRVTITADESTSTAYMELSSLRSEDTALYYCARSEGFDSSGYYRDYWGQGTLVTVSS

SEQ ID NO: 1934 - protein, 123 aa, Artificial Sequence
  Synthetic construct
QVQLVQSGSELKKPGASVKVSCKASGYTFTGHAMNWVRQAPGQGLEWMGWINTNTGIPTYAQGFTGRFVFSLDTSGTTAYLHINSLKPADTAVYYCARETHPSPTFDSSSDYWGQGTLVTVSS

SEQ ID NO: 1935 - protein, 124 aa, Artificial Sequence
  Synthetic construct
EVQVVESGGGLVQPGGSLRLSCAASGFFFSNYDMHWVRQPTGKGLEWVSVVGTAGDTYYPDSVKGRFTISRENAKNSLFLQMNSLRAEDTAVYYCARAGEVDTGDYYGWYFDLWGRGTLVTVSS

SEQ ID NO: 1936 - protein, 124 aa, Artificial Sequence
  Synthetic construct
EVQLVQSGAEVKKPGESLKISCKGSGYTFSSYWIGWVRQMPGKGLEWMGIIYPGDSDIRYSPSFQGQVTFSADKSISTAYLQWSSLKASDTAMYYCARRERVPTGGFGYGMDVWGQGTTVTVSS

SEQ ID NO: 1937 - protein, 117 aa, Artificial Sequence
  Synthetic construct
EVQLVESGGGLVQPGGSLRLSCVTSVFTVSRNYMSWVRQAPGKGLEWVSVIYSGGSTFYADSVKGRFTISRDNSKNTLYLQMNSLRAEDTAVYYCARDYGDLYFDYWGQGTLVTVSS

SEQ ID NO: 1938 - protein, 121 aa, Artificial Sequence
  Synthetic construct
EVQLLESGGGLVQPGGSLRLSCAASGFTFSNYAMSWVRQAPGKGLEWVSSISDIGGSTFYADSVKGRFTISRDNSKNTVYLHMNSLRAEDTAVYYCAKELTIQLWFQFDYWGQGTLLTVSS

SEQ ID NO: 1939 - protein, 119 aa, Artificial Sequence
  Synthetic construct
EVQLVESGGGLVQSGGSLRLSCAASGFIFSSNWMSWVRQAPGKGLEWVANINREGSEKYYVDSVKGRFTISRDNAKTSVSLQMNSLRAEDTAVYYCARVIQGGGGMDVWGQGTTVSVSS

SEQ ID NO: 1940 - protein, 123 aa, Artificial Sequence
  Synthetic construct
EVQLVQSGAEVKKPGESLKISCKASGYSFTSYWIGWVRQMPGKGLEWMGIIYPGDSDTRYSPSCQGQVTISADKSISTAYLQWSSLKASDTAIYYCATISVRDSSGPTAFDIWGQGTMVTVSS

SEQ ID NO: 1941 - protein, 131 aa, Artificial Sequence
  Synthetic construct
EVQLLQSGGGLVNPGGSLRLSCAASGFSFSDFAMSWVRQTPGKGLEWVSSIGGSGDATHYADSVKGRFTISRDFSKNTLYLQLNSLRAEDTAVYYCTKDIKRGSGSYFSRYPYYYYGLDVWGQGTTVTVSS

SEQ ID NO: 1942 - protein, 127 aa, Artificial Sequence
  Synthetic construct
QLQLQESGPGLVKPSETLSLTCTVSGGSISSSSYYWGWIRQPPGKGLEWIGSIYYSGSTYYNPSLKSRVTISVDTSKNQFSLKLNSVTAADTAVYYCARAAPQNILWFRELSWFDPWGQGTLVTVSS

SEQ ID NO: 1943 - protein, 116 aa, Artificial Sequence
  Synthetic construct
EVQLVETGGGLIQPGGSLRLSCAASGVTVSANYMNWVRQAPGKGLEWVSVIYPGGSTFYADSVKGRFTISRDNSKNTLFLQMNSLRDDDTAMYYCARDRGGPHDCWGQGTLVTVSS

SEQ ID NO: 1944 - protein, 126 aa, Artificial Sequence
  Synthetic construct
DVQLVQSGAEVKKPGESLRISCKASGYSFTDYWIGWVRQMPGKGLEWMGIIYPGDSDTRYSPSFQGQVTISADTSISTAYLQWSSLKASDTAIYYCARESVVVVGTTQYLRAFDIWGQGTMVTVSS

SEQ ID NO: 1945 - protein, 126 aa, Artificial Sequence
  Synthetic construct
EVQLVESGGGLVQPGGSLRLSCEASGFTFSSYWMTWVRQAPGKGLEWVAKIKQDGRERSYVDSVKGRFTISRDNAKNSLYLQMNSLRPEDTAVYYCARIRFSLWFERLFPSFMDVWAKGTTVTVSS

SEQ ID NO: 1946 - protein, 124 aa, Artificial Sequence
  Synthetic construct
QVQLVQSGAEVKKPGASVKVSCKASGYTFMSYGIHWVRQAPGQGLEWMGWISDDNGNTNYAQKLQGRVTMTTDTSTTTAYMELRSLRSDDTAVYYCALWIAARENYYYYGMDVWGQGTTVTVSS

SEQ ID NO: 1947 - protein, 128 aa, Artificial Sequence
  Synthetic construct
QVQLVQSGAEVKRPGASVKVSCKASGYTLPNYGITWVRQAPGQGLEWMGWITPYNGNTTYAQKLQGRVTMTTDTSTSTAYMELRSLRSDDTAVYYCASTGFYSFWTGFQGETNWFDPWGQGTLVTVSS

SEQ ID NO: 1948 - protein, 121 aa, Artificial Sequence
  Synthetic construct
QVQLVQSGAEVKKPGASVKVSCKASGYTFTSYDINWLRQATGQGLEWVGSMNPNSGNTEFSQRFQDRVTMTRNTSITTAYLELTGLRSEDTAVYYCARLGYNWNYGGFDPWGQGTLVTVSS

SEQ ID NO: 1949 - protein, 121 aa, Artificial Sequence
  Synthetic construct
EVQVVESGGGLVQPGGSLRLSCAASGFTFSAYWMNWVRQAPGKGLEWVANIEMNGDERDYVDSVKGRFTISRDNAKKSLYLQMNSLRAEDTAVYYCAREQQVSKWDGLDVWGQGTTVTVSS

SEQ ID NO: 1950 - protein, 114 aa, Artificial Sequence; identical to SEQ ID NO: 1878
  Synthetic construct

SEQ ID NO: 1951 - protein, 119 aa, Artificial Sequence
  Synthetic construct
EMQLVESGGGLVQPGGSLRLSCAASGFSFNIYWMSWVRQAPGKGLEWVASIKEDGTKKKCVDSVKGRFTVSRDNDKNSLYLQMNSLRAEDTAVYYCARLRGWPNYFDPWGRGTLVSVSS

SEQ ID NO: 1952 - protein, 132 aa, Artificial Sequence
  Synthetic construct
QVQLVQSGAEVKKPGASVKVSCKASGYTFTNYYIHWVRQAPGQGLEWMGIINPSGGSTNYAESFQGRVTMTRDTSTSTVYMELSSLRSEDTAVFYCARDQENYRSAWYLGDDYYYYYGMDVWGQGTTVTVSS

SEQ ID NO: 1953 - protein, 121 aa, Artificial Sequence
  Synthetic construct
QVLLQQWGAGVLKPSETLSLTCAVYGGSFSGYHWTWIRQPPGKGLEWIGENSHRGDTNYNPSLKSRVTISVDTSKNQFSLKLSSVTAADTAVYYCARRDSHGYKSDAFDNWGQGALVIVSS

SEQ ID NO: 1954 - protein, 127 aa, Artificial Sequence
  Synthetic construct
QLQLQESGPGLVKPSETLSLTCAVSGASINWGSYYWGWIRQPPGKGLEWIGNIYYSGSTFYNPSLKSRVAISVDTSKKQFSLKLSSVTAADAAVYYCGRLSLLLSFGELLPDAFDIWGQGTMVIVSS

SEQ ID NO: 1955 - protein, 121 aa, Artificial Sequence
  Synthetic construct
QVQLQQWGAGLLKPSETLSLTCAVYRGAFSGYFWTWIRQPPGKGLEWIGDINHSGSTNYNPSLNSRVTISMDTSKIQFSLNLSSVTAADTAVYYCARGLPIVGPTGGFDPWGQGTLVTVSS

SEQ ID NO: 1956 - protein, 126 aa, Artificial Sequence
  Synthetic construct
QVQLQESGPGLVKPSETLSLTCSVSGGAISNSYWNWLRQSPGKGLEWIGYVYYTGSTNYSPSFKGRVAISVDRARTHFSLNLSSVTAADTAMYYCARGQGQGLEWLTTFAWYFDLWGRGTLVTVSS

SEQ ID NO: 1957 - protein, 123 aa, Artificial Sequence
  Synthetic construct
QVQLVESGGGVVQPGRSLRLSCAASGFSLSSCAVHWVRQAPGKGLEWVGVISYDATYKYYADSVKGRLTISRDNSKNTLYLQMNSLRAEDTAVYYCVRDQHMTIIRGYYMDVWGKGTTVTVSS

SEQ ID NO: 1958 - protein, 126 aa, Artificial Sequence
  Synthetic construct
QLHLQESGPGLVNPSETLSLTCSVSGGSIYHYYWNWIRQSPGRGLEWIGYTDSSGSTSFNPSLTGRVAISADVSKNQFFLKVRSPTAADTAVYFCVRSIMYRGLFRAPTRPVFDHWGQGILVTVSA

SEQ ID NO: 1959 - protein, 118 aa, Artificial Sequence
  Synthetic construct
QMQLVQSGPEVKKPGTSVKVSCKTSGFTFPSSAMQWVRQARGQRLEWIGWIVVGSGNTNYAQNFQERVTITRDMSTHTAYMELSSLRSEDTAVYYCAGVGLLGWLDPWGQGTLVTVSS

SEQ ID NO: 1960 - protein, 125 aa, Artificial Sequence
  Synthetic construct
EVQLVESGGGLAKPGGSLRLSCAASGFTFTSYTMNWVRQAPGKGLQWVASISSSSSYIYYADSLKGRLTISRHNARNSVFLQINGLKAEDTAVYYCARDGDPHCSGGGCSFFDSWGRGTLVAVSS

SEQ ID NO: 1961 - protein, 121 aa, Artificial Sequence
  Synthetic construct
EVQLLESGGDLVQPGGSLRLSCAASGFTFSRHAMSWVRQAPGKGLEWVSAISGSGGSTYYADSVKGRFTISRDSSKNTLYLQMDSLRAEDTAVYYCAKDNFAAGYNWFDHWGQGTLVTVSS

SEQ ID NO: 1962 - protein, 120 aa, Artificial Sequence; identical to SEQ ID NO: 1687
  Synthetic construct

SEQ ID NO: 1963 - protein, 122 aa, Artificial Sequence
  Synthetic construct
QVQLVESGGGVVQPGRSLRLSCAASGFTFSNYAMHWVRQAPGKGLEWVAVISYDGTNKYYADSVKGRFTISRDNSKDTLYLQMNSLRAEDTAVYYCARPLYSGSYSFYFDYWGRGTLVTVSS

SEQ ID NO: 1964 - protein, 120 aa, Artificial Sequence
  Synthetic construct
QITLKESGPTLVTPTQTLTLTCSFSGFSLDTIGVAVGWIRQPPGKALEWLGVVFWDGDKRYSPPLSSRLTVTGDTSKNHVVFRLTNMDSADTATYYCARLLIEHDAFDVWGQGVMVSVSS

SEQ ID NO: 1965 - protein, 120 aa, Artificial Sequence
  Synthetic construct
QVQLVQSGAEVKKPGASVKVSCKASGYTFTGHYMYWVRQAPGQGIEWMGWINPNDGDTNYAQKFQGWVTMTRDTSISTAYMELSRLTSDDTAMYYCARVGVVGSRAFDIWGQGTMVTVSS

SEQ ID NO: 1966 - protein, 128 aa, Artificial Sequence
  Synthetic construct
QITLKESGPTLVKPTQTLTLTCTFSGFSLTSRGVGVGWIRQPPGKALEWLALIYWDDDKAYSPSLKSRLTITKDTSKNQVVLTMTNMDPVDTATYYCAHFQRAHDYVWGTFPGDFDHWGQGTLVIVSS

SEQ ID NO: 1967 - protein, 121 aa, Artificial Sequence
  Synthetic construct
QAQLVESGGGVVQPGRSLRLSCAASGFRFSIYAMHWVRQAPGKGLEWVAVVSYDGSNKYFADSVRGRFTISRDNSKNTLYVELNTLRGEDTAVYYCARARGGNYFDAFDIWGQGTLVTVSS

SEQ ID NO: 1968 - protein, 120 aa, Artificial Sequence
  Synthetic construct
QVELQQSGPGLVQPSQTLSLTCAISGDSVSSSSVSWNWIRQSPSRGLEWLGRTNYRSRWSADYAASVKSRISINADTSKNQFSLQLNSVTPEDTAVYYCARDSGWLVGDWGQGTLVIVSS

SEQ ID NO: 1969 - protein, 130 aa, Artificial Sequence
  Synthetic construct
EVQLVESGGGLVKPGGSLRLSCAASGFTFNSYSMNWVRQAPGRGLEWVSSITSTSTYIYYADSVKGRFTISRDNAKNSLFLQMSSLRDEDTAVYYCARDRDEVGFGDLLMGSYYYYMDVWGKGTTVTVSS

SEQ ID NO: 1970 - protein, 123 aa, Artificial Sequence
  Synthetic construct
EVQLLESGGGLVQPGGSLRLSCAASGFTFSNYAMSWVRQAPGKGLVWVSIISGSGATTDYAASVKGRFTISRDNSKNTLYLQMNSLRADDTAVYYCASPREYYYDSSGAFDYWGQGTLVTVSS

SEQ ID NO: 1971 - protein, 123 aa, Artificial Sequence
  Synthetic construct
QVQVQESGPGLVKPSDTLSLTCAVSGDSIRSSNWWGWIRQPPGKGLEWIGYIYHSGSTYYNPSLKSRVTMSVDTSKNQFSLKLSSVTAVDTAVYYCARKVGPSGPATNAMDVWGQGTTVTVSS

SEQ ID NO: 1972 - protein, 123 aa, Artificial Sequence
  Synthetic construct
EVQLVESGGGLVQPGGSLRLSCAASGFTFNTYNMNWVRQAPGKGLEWVSYISSSSSTIYYADSVKGRFTISRDNARNSLYLQMDSLRDEDTAVYYCARGVGPTSYYYYGMDVWGQGTTVTVSS

SEQ ID NO: 1973 - protein, 129 aa, Artificial Sequence
  Synthetic construct
EVQLVESGGGLVQPGGSLRLSCAASGFTFSDYSMNWVRQAPGKGLEWVSHIRSGSGTIYYADSVKGRFTISRDNAKNSLYLQMNSLRAEDTAVYYCARDIADSKYSSGWYKYYYYMDVWGKGTTVTVSS

SEQ ID NO: 1974 - protein, 118 aa, Artificial Sequence
  Synthetic construct
QVQLQESGPGLVKPSGTLSLTCVVSGGSISSSNWWSWVRQPPGKGLEWIGEVYHSGNNNYTPSLKSRVTISVDKSKNQFSLKLSSVTAADTAVYYCASRNREPRFDSWGQGTLVTVSS

SEQ ID NO: 1975 - protein, 121 aa, Artificial Sequence
  Synthetic construct
EVQLLESGGGLVQPGGSLRLSCAASGFTVSSYAMSWVRQAPGKGLEWVSAISGSGGSTYYADSVKGRFIISRDNSKNTLYLQMSSLRAEDTAVYYCAQAPTMVRGVYFDYWGQGTLVTVSS

SEQ ID NO: 1976 - protein, 122 aa, Artificial Sequence
  Synthetic construct
QVQLVQSGAEVKKPGASVKVSCKASGYTFTTYDLSWVRQASGQGLEWVGWMNPNSGNTGYAQKFQGRVTMTRDTSISTAYMELISLRSEDTALYFCARVHPYTSGWYMFDYWGQGTLVTVSS

SEQ ID NO: 1977 - protein, 125 aa, Artificial Sequence
  Synthetic construct
QVQLVQSGAEVKKPGSSVKVSCKASGGTFSSYSISWVRQAPGQGLEWMGKIMPILGITDYAQNFQGRVTITADKSTSTAYMQLSSLRSEDTAVYYCAREKGYSSSSSATYYFDYWGPGTLVTVSS

SEQ ID NO: 1978 - protein, 123 aa, Artificial Sequence
  Synthetic construct
QVQLVQSGSELKKPGASVRVSCKASGYSLTYYAMNWVRQAPGQGLEWLGWINTNTGTPTYAQGFTGRFVFSLDASVNTAYLEISSLKAEDTAIYFCARDSGHGSNWYRGFDYWGQGTLVTVSS

SEQ ID NO: 1979 - protein, 129 aa, Artificial Sequence
  Synthetic construct
QVQLQESGPGLVKPSQTLSLTCTVSGGSISSGDYYWSWIRQPPGKGLEWIGYMYDSGSTHYNPSLKSRVTISVDTSKNQFSLKLSSVTAADTAVYYCARDQVVAGAMLGSFYFYGMDVWGQGTTVTVSS

SEQ ID NO: 1980 - protein, 122 aa, Artificial Sequence
  Synthetic construct
QITLKESGPTLVKATQTLTLTCSFSGFSLSTNGVGVGWIRQPPGKALEWLALIYWDDDKLYSPSLKSRLTITKHTSKNQVVLTVTNMDPVDTATYYCAHRSPRWFGESFDSWGQGALVTVSS

SEQ ID NO: 1981 - protein, 126 aa, Artificial Sequence
  Synthetic construct
EVQLVESGGGLVKPGGSLRLSCAASGFRFRSYSMNWVRQAPGKGLEWVSYISSSSGYIYYADSVRGRFTISRDNAKNSLFLQMNSLRDEDTAVYFCARVPPYYDSGDSDYYAMDVWGQGTTVTVSS

SEQ ID NO: 1982 - protein, 118 aa, Artificial Sequence
  Synthetic construct
QVQLVQSGAEVKKPGSSVKVSCKASGGTFTSYAISWVRQAPGQGLEWMGGVIPVFGTANYAQKFQGRVTVTADESTSTAYMDLSSLTSEDTAVYYCARETVVGGTDSWGQGTLVTVSS

SEQ ID NO: 1983 - protein, 123 aa, Artificial Sequence
  Synthetic construct
QVQLVQSGAEVKKPGASVKVSCKASGYTFTSYEMHWVRQAPGQRLEWMGWINAGNGNTKYSQKFQGRVTISRDTSASTAYMELSSLRSEDTAVYYCARDVYSNYEFRYGMDVWGQGTTVTVSS

SEQ ID NO: 1984 - protein, 120 aa, Artificial Sequence; identical to SEQ ID NO: 1687
  Synthetic construct

SEQ ID NO: 1985 - protein, 119 aa, Artificial Sequence
  Synthetic construct
QVQLVESGGGVVQPGRSLRLSCAASGFTFSTYAIHWVRQAPGKGLEWVAVISYDGSNKYFADSVKGRFTISRDNSKNTLYLQMNSLSVEDTAVYYCARAQNYLAPFDYWGQGALVTVSS

SEQ ID NO: 1986 - protein, 125 aa, Artificial Sequence
  Synthetic construct
EVQLVQSGAEVKKPGESLKISCKGSGYSFSSYWIGWVRQMPGKGLEWMGIFYPGDSETRYSPSFEGQVTISADKSISTAYLQWGSLKASDTAMYYCARHGGYYYGSGSPHYFDYWGQGTLVTVSS

SEQ ID NO: 1987 - protein, 121 aa, Artificial Sequence; identical to SEQ ID NO: 1729
  Synthetic construct

SEQ ID NO: 1988 - protein, 129 aa, Artificial Sequence
  Synthetic construct
EVQLVESGGGLVKPGGSLRLSCAASGFTFSRYSMNWVRQAPGKGLEWVSSISSGSNYIYYADSMKGRFTISRDNAKNSLSLQMNSLRAEDTAVYYCARAPPVETAMIEGYYYNYYMDVWGKGTTVTVSS

SEQ ID NO: 1989 - protein, 119 aa, Artificial Sequence
  Synthetic construct
QVQLVESGGGVVQPGRSLRLSCAASGFTFSSYGMHWVRQAPGKGLEWVAVISYDGSNKYYADSVKGRFTISRDNSKNTLYLQMNSLRAEDTAVYYCAKCVGGYNSFDYWGQGTLVTVSS

SEQ ID NO: 1990 - protein, 124 aa, Artificial Sequence
  Synthetic construct
QEQLVESGGGVDQPGRSLRLSCAASGFTFSSHAMHWVRQAPGKGLEWVTIISYDGSNTYYAESVKGRFTISRDNSKNTLYLQMNSLRAEDTAVYYCARGHDFWSGYYSYGMDVWGQGTTVTVSS

SEQ ID NO: 1991 - protein, 118 aa, Artificial Sequence
  Synthetic construct
QVQLQESGPGLVKSSETLSLTCTISGGSINTFYWSWIRQSPGKGLEWIGYVYYSGSTSYNPSLKSRLSISMDTSRKQFSLKLTSVTAADTAVYYCARLDSVMGFLRHWGRGMLVTVYS

SEQ ID NO: 1992 - protein, 120 aa, Artificial Sequence
  Synthetic construct
QVQLQESGPGLVKPSETLSLICTVSGDSISNYYWSWIRQPPGKGLEWIGYIYYTGAANYSPSLKSRVTLSVDTSKNHFSLKLSSVTAADTAVYYCARHGAAAYYNAMDVWGQGTTVTVSS

SEQ ID NO: 1993 - protein, 127 aa, Artificial Sequence
  Synthetic construct
QVQLVQSGAEVKKPGASVKVSCKVSGYTLTEISMHWVRQAPGKGLEWMGGFDPEDGETIYAQKFQGRVTMTEDTSTDTGYMELNSLRSEDTAVYYCATVGFPNYYDSSDYYTSLDYWGQGTLVTVSS

SEQ ID NO: 1994 - protein, 125 aa, Artificial Sequence
  Synthetic construct
QVQLQESGPGLVKPSQTLSLTCTVSGGSISSADYYWSWIRQPPGKGLEWIGYISYSGSTYYNPSLKSRVTISIDTSKNQFSLKLSSVTAADTAVYYCARGEVLIAVAYWGWFDLWGLGTLVTVSS

SEQ ID NO: 1995 - protein, 128 aa, Artificial Sequence
  Synthetic construct
QVQLVESGGGLVKPGGSLRLSCEASGFSISDYYMSWIRQAPGKGLQWISYISDSRSYTNNADSVKGRFTISRDNAKNSLYLQMNSLRAEDTAVYYCARGYYYGSGSYYNPDPNWFDPWGQGTLVTVSS

SEQ ID NO: 1996 - protein, 117 aa, Artificial Sequence
  Synthetic construct
EVQLVESGGGLIQPGGSLRLSCAASGFTVTSNYMTWVRQAPGKGLEWVSAIYSDGNTYYADSVKGRFTIFRGNSKNTLYLQMNSLRAEDTAVYYCARGAPGPPPGDWGQGTLVTVSS

SEQ ID NO: 1997 - protein, 121 aa, Artificial Sequence
  Synthetic construct
QVQLVESGGGVVQPGRSLRLSCAASGFTFSTYAMHWVRQAPGKGLEWVAVISYDGSNKYYADSVKGRFTISRDNSKNTLYLQMNSLRAEDTAVYYCAREMGIAASHPVDLWGRGTLVTVSS

SEQ ID NO: 1998 - protein, 120 aa, Artificial Sequence
  Synthetic construct
QVQLVQSGAEVKKPGASVKVSCKASGYTFTSYAISWVRQAPGQGLEWMGWISPYNGDANYAQKVQGRVTMTTDTSTSTAYMELRSLRSDDTAVYYCAREVGTTNYGMDVWGQGTTVTVSS

SEQ ID NO: 1999 - protein, 120 aa, Artificial Sequence
  Synthetic construct
EVQLVQSGAEVKKPGESLKISCKASGYTFSTYWIGWVRQMPGRGLEWMAIIYPGDSDARYSPSFQGQVTISGDVSFSTAYLQWTSLRASDTAMYYCARTRVGSTSAFEIWGQGTLVTVSS

SEQ ID NO: 2000 - protein, 132 aa, Artificial Sequence
  Synthetic construct
QVQLVESGGGVVQPGRSLRLSCAASGFTFSGYSMHWVRQAPGKGLEWVALISYDVSKKYYADSVKGRFTISRDNSKNTLYLQMNSLRAEDTAVYYCARDEGPFYYDTRGYYPYYYYFGMDVWGQGTTVTVSS

SEQ ID NO: 2001 - protein, 118 aa, Artificial Sequence
  Synthetic construct
QVQLVESGGGVVQPGGSLRLSCATSGFNFLTSSMHWVRQAPGKGLEWVAVAASDGARKHYADSVKGRFTISRDISKKALYLQMNSLRADDTAVYFCASDSGDYKIDYWGQGTLVTVSS

SEQ ID NO: 2002 - protein, 121 aa, Artificial Sequence
  Synthetic construct
QVHLQESGPGLVKPSGTLSLTCAVSGGSMSNSNWWSWVRQPPGKGLEWIGEIHHSGSTNYNPSLKSRVIMSLDKSKNQFSLKLTSVTAADTAVYYCARDYEVVGEGGFDIWGQGTMVTVSS

SEQ ID NO: 2003 - protein, 124 aa, Artificial Sequence
  Synthetic construct
QVQLVESGGGVVQPGKSLRLSCAVSGFTFSNYGMHWVRQAPGKGLDWVAVVWFDGSNKYYADSVRGRFTISMDNSKNTLFLQMNSLRVEDTAVYYCARELPSDNWNDVGAFDIWGQGTLVTVSP

SEQ ID NO: 2004 - protein, 113 aa, Artificial Sequence
  Synthetic construct
QVQLQESGPGLVKPSETLSLTCTVSGDSISSYYWSWIRQPPGKGLEWIGYISPSGSSIYNPSLKSRVTISVDTSQNQIFLKLTSVTAADTAVYYCARGMGDVWGQGTTVTVSS

SEQ ID NO: 2005 - protein, 125 aa, Artificial Sequence
  Synthetic construct
QVQLVQSGAEVRKPGSSVKVSCRASGGTFSTYTISWVRQAHGQGLEWMGRIIPTLGIADHAQKFQGRVTVTADKSTSTAYMELSSLRSDDTAVYYCAREKGYSSLSSATYYFDNWGQGTLVTVSS

SEQ ID NO: 2006 - protein, 132 aa, Artificial Sequence
  Synthetic construct
QVQLVQSGAEVKKPGSSVKVSCKASGGTLSSYTISWVRQAPGQGLEWMGRIIPIVGLADYAQKLQGRVTITADKSTNTAYMELSSLRPEDTALYYCAGALGYCIDGACFGYGQYFYYAMDVWGQGTTVTVSS

SEQ ID NO: 2007 - protein, 125 aa, Artificial Sequence
  Synthetic construct
EVQLVESGGGLVKPGGSLRLSCAASGFTFSTYSMNWVRQAPGKGLEWVSSISSSSSKIYYADSVKGRFTISRDNAKNSLDLQMHSLRAEDTALYYCARTDVGAISVSDQDAFDIWGQGTMVTVSS

SEQ ID NO: 2008 - protein, 120 aa, Artificial Sequence
  Synthetic construct
QVQLVQSGAEVKKPGSSVKVSCKASGGSFSSYAFSWVRQAPGQGLEWMGGIVGMFGTTSYSQKFQGRLIITADELTSTAYMELSSLRSEDTAVYFCARSGGYRLWFGELWGPGTQVIVSS

SEQ ID NO: 2009 - protein, 121 aa, Artificial Sequence
  Synthetic construct
QVQLQESGPGLVKPSQTLSLTCTVSGGSISSGGYYWSWIRQHPGKGLEWIGYIYYSGSTYYNPSLESRVTISVDTSKNQFSLKLSSVIAADTAVYYCARAHSRGYWYFDLWGRGTLVTVSS

SEQ ID NO: 2010 - protein, 125 aa, Artificial Sequence
  Synthetic construct
QVQLVQSGAEVKKPGSSVKVSCKASGGTVSSYTFSWVRQAPGQGLEWMGRIIPVLGIADYAQKFQGRVTITADKSTTTAYMELSSLKSEDTAVYYCAREKGYSSSASATYYFDYWGQGTVVTVSS

SEQ ID NO: 2011 - protein, 119 aa, Artificial Sequence
  Synthetic construct
EVQLVQSGAEVKKPGESLTISCKASGYRFTSNWITWVRQMPGKGLEWMGRIDPDDPYSNSSPSFQGHATLSLDKAINTAYLHWSSLKASDTAMYYCARVNRVGDGPDFWGQGTLVTVSS

SEQ ID NO: 2012 - protein, 123 aa, Artificial Sequence
  Synthetic construct
QLQLQESGPGLVKPSETLSLTCTVSGGSISSSSSYWGWIRQPPGKGLEWIGSIYYSGSTYYNPSLKSRVTISVDTSKNQFSLKLSSMTAADTAVYYCARFVSGYSFDDGFDIWGQGTMVTVSS

SEQ ID NO: 2013 - protein, 120 aa, Artificial Sequence
  Synthetic construct
QVQLVQSGAEVKKPGASVKVSCKASAKTFTNYSIHWVRQAPGQGLEWMGIINPSGASTGYARDFQGRVTLTRDTSTSTVYMELSSLRSEDTAMYYCATTIGNPQDYFDYWGQGTLVTVSS

SEQ ID NO: 2014 - protein, 123 aa, Artificial Sequence
  Synthetic construct
QVQLQESGPGLVRPSETLSLTCTVSGGSISTYYWSWIRQPPGKGLEWIGYIYYSGSTNYNPSLKSRLTISVDTSKNQFSLKLSSVTAADTAVYYCAREGGLRQIPKNDAFDIWGQGTMVTVSS

SEQ ID NO: 2015 - protein, 121 aa, Artificial Sequence
  Synthetic construct
EVQLVESGGGLVQPGGSLRLSCAASGFIVSANYMSWVRQAPGKGLEWVSVIYSGGDTYYADSVKGRFTISRDNSKNTLYLQMNSLRPEDTAVYYCARDRRIVGYYFAMDVWGQGTTVTVSS

SEQ ID NO: 2016 - protein, 124 aa, Artificial Sequence
  Synthetic construct
QVQLVESGGGVVQPGRSLRLSCAASGFTFSTYAMHWVRQAPGKGLEWVAVISYDGSNKYYVDSVKGRFTISRDNSKNTLYLQMNNLRPEDTAIYYCARGGYYDFLTGPGYFDYWGQGTLVTVSS

SEQ ID NO: 2017 - protein, 123 aa, Artificial Sequence
  Synthetic construct
QVKLVESGGGVVQPGRSLRLSCAASGFTFSNYGLHWVRQPPGKGLEWVAVIWFDGRNKYYADSVRGRFTISRDDSKNTLYLQMNSLRIEDTAVYYCVRDLPWGEEVTRDMDVWGQGTTVTVSS

SEQ ID NO: 2018 - protein, 120 aa, Artificial Sequence
  Synthetic construct
EVQLLESGGGLVQPGGSVRLSCVVSGVTFSSYAMSWVRQAPGKGLEWVSGLSTSGASTYYAESVQGRFTISRDNAKNTLFLQMNSLRAGDTAIYYCATYYRGYGSGSHHWGQGTLVTVSS

SEQ ID NO: 2019 - protein, 122 aa, Artificial Sequence
  Synthetic construct
EVQLVESGGGLVQPGGSLRLSCAASGFTFSSYDMHWVRQATGKGLEWVSTIGTAGDTYYPGSVKGRFTISRENAKNSLYLQMNSLRAGDTAVYYCARARFTVTNVYWYFDLWGRGTLVTVSS

SEQ ID NO: 2020 - protein, 121 aa, Artificial Sequence
  Synthetic construct
QVQLVQSGAEVKKPGASVKVSCKASGYTFTNYAFSWVRQAPGQGLEWMGWISAYNGDTIYAQNLQGRVTMTTDTSTNTAYMELRSLRSDDTAVYYCAREDYYDGGGYADYWGQGSLVTVSS

SEQ ID NO: 2021 - protein, 121 aa, Artificial Sequence
  Synthetic construct
QVQLVESGGGVVQPGRSLRLSCAASGFTFSSYAMHWVRQAPGKGLDWVAVISYDGNNKYYADSVKGRFTISRDNSKDTLYLQMNSLRAEDTAVYYCARASSGTYYNAFDSWGQGTLVTVSS

SEQ ID NO: 2022 - protein, 131 aa, Artificial Sequence
  Synthetic construct
EVQLVESGGGLVQPGGSLRLSCAASGFTFSSYEMNWVRQAPGKGLEWVSYISSSGSTIYYADSVKGRFTISRDNAKNSLYLQMNSLRAEDTAVYYCARVFGNSDYDSSGYRFHYYYGMDVWGQGTTVTVSS

SEQ ID NO: 2023 - protein, 121 aa, Artificial Sequence
  Synthetic construct
QITLKESGPTLVKPTQTLTLTCTFSGFALSSSGVGVGWIRQSPGKALEWLALIYWDDDKRYSPSLQSRLTMTKDTSKNQVVLTMTNVDPVDTATYYCAYRSPLRPNAFDIWGQGTMVTVSS

SEQ ID NO: 2024 - protein, 123 aa, Artificial Sequence
  Synthetic construct
QVQLRLWGAGLLKPSETLSLTCAVSGGSFIDYYWTWIRQPPGKGLEWIGEINHFGGSGYNPSLKSRVSISVDTSKNQFSLRLNSVTAADTAIYYCARKPLLHSSVNPGAFDIWGQGTMLTVSS

SEQ ID NO: 2025 - protein, 121 aa, Artificial Sequence
  Synthetic construct
QVQLVQSGAEVKKPGASVKVSCKVSGYTLIELSMHWVRQAPGKGLEWMGGFDSEDVETIYAQQFQGRVTMTEDTSTDTAYMELSSLRSEDTAIYYCATALAHLPYYGMDVWGQGTTVTVSS

SEQ ID NO: 2026 - protein, 121 aa, Artificial Sequence
  Synthetic construct
QVQLVESGGGVVQPGRSLRISCAASGFPFITYAMHWVRQAPGKGLEWVAVVSYDGRNQYYADSVRGRFTISRDSSKNTLYLQMNSLRAEDTAVYYCARPRGGNYYGAFDIWGRGTMVTVSS

SEQ ID NO: 2027 - protein, 123 aa, Artificial Sequence
  Synthetic construct
QVQLQLWGAGLLKPSETLSLTCAVYGGSFSGYFWSWIRQPPGKGLEWIGEINHSGSTNYNPSLKSRVTISVDTSKNQFSLKLSSVTAADTAVYYCARVQIQLPLYSYYGMDVWGQGTTVTVSS

SEQ ID NO: 2028 - protein, 119 aa, Artificial Sequence
  Synthetic construct
EVQLVETGGGLIQPGGSLRLSCAVSGFTVSDNYMTWVRQAPGKGLDWVSFIYTDGSASYADSVKGRITISRDRSKNMLFLQMNSLRAEDTAVYYCARVILWFGGALDVWGKGTTVTVSS

SEQ ID NO: 2029 - protein, 120 aa, Artificial Sequence
  Synthetic construct
QVQLVQSGAEVKKPGSSVKVSCKASGGTFSTYAISWVRQAPGQGPEWMGGITPIFGATNYAQKFQGRVTITADESTSTAYMELNSLRSEDTAVYYCARQTTLFIGEFDPWGQGTLVTVSS

SEQ ID NO: 2030 - protein, 126 aa, Artificial Sequence
  Synthetic construct
QVQLVQSGSELKKPGASVKVSCKASGYTFTSYAMNWVRQAPGQGLEWMGWIDTNTGNPTYAQGFTGRFVFSLDTSVSTAYLQISSLKAEDTAVYYCARDFDGMFRGGYYYYYMDVWGKGTTVTVSS

SEQ ID NO: 2031 - protein, 117 aa, Artificial Sequence
  Synthetic construct
EVRLVQSGAEVKKPGESLRISCKGSGYNFTTYWISWVRQMPGKGLEWMGRIDPDDSYTNYSPSFQGHVTISADKSINTAYLQWSSLKASDTAMYYCASHSLSGSFFWGQGTLVTVSS

SEQ ID NO: 2032 - protein, 123 aa, Artificial Sequence
  Synthetic construct
QVQLQESGPGLVKPSQTLSLTCTVSGGSISSGVSYWSWIRQPPGKGLEWIGHIYYIGSTYYNPSLKSRVTMSVDTSNNQFSLKLSSVTAADTAVYYCARASYYDPSPNWIDPWGQGTLVTVSS

SEQ ID NO: 2033 - protein, 128 aa, Artificial Sequence
  Synthetic construct
QVQLQESGPGLVKPSGTLSLTCTVSGDSISSSDWWSWVRQPPGKGLEWIGEIYHSGNTNYNPSLKSRVTISVDKSKNQFSLKLSSVTAADTAVYYCARGYLVTTVAVGVGPRHWFDPWGQGTLVTVSS

SEQ ID NO: 2034 - protein, 125 aa, Artificial Sequence
  Synthetic construct
QVQLVESGGDLVKPGGSLRLSCAASGFTFSDHYMSWIRQAPGKALEWISYIDAPGSSTYYADSVKGRFTVSRDNAKKSLYLQVDGLRAADTAIYYCARVGYRLLLGSYYYYLDVWGKGTTVTVSS

SEQ ID NO: 2035 - protein, 112 aa, Artificial Sequence
  Synthetic construct
QVQLQESGPGLVKPSETLSLTCTVSGDSISNYYWSWIRQPPGKGLEWIGYIYYSGSSNYNPSLKNRVTMSVDTSKNQFSLKLTSVTAADTAVYYCARGFDLWGQGTRVTVSS

SEQ ID NO: 2036 - protein, 115 aa, Artificial Sequence
  Synthetic construct
QVQLQESGPGLMKPSETLSLTCTVSGDSITGSYWTWIRQPPGKGLEYIGYIYKNEDTYYSPSLRSRVTISLDTSKSQISLTLSSVTAADTAVYYCASEPRSLFHWGQGILVTVSS

SEQ ID NO: 2037 - protein, 121 aa, Artificial Sequence
  Synthetic construct
QVQLVESGGGVVQPGRSLRLSCAASGFTFSSHGMHWVRQAPGKGLVWVAVIWFDGSNKYYADSVKGRFTISRDNSKNKLYLQMNSLRAEDTAVYYCARDGAVGTTTGLDYWGQGTLVTVSS

SEQ ID NO: 2038 - protein, 122 aa, Artificial Sequence
  Synthetic construct
QVQLVESGGGVVQPGRSLRLSCAASGFTFSSYGMHWVRQAPGKGLEWVAVISYDGSNKYYADSVKGRFTISRDNSKNTLYLQMNSLRAEDTAVYYCAKVPAPGPPTYGMDVWGQGTTVTVSS

SEQ ID NO: 2039 - protein, 126 aa, Artificial Sequence
  Synthetic construct
QVQLVQSGAEVRKPGASVMVSCQTSGYSFTNYAMHWVRQAPGQRLEWMGWINTGSGHTKYSQKFQGRLTITRDTSATTAYMQLSSLRSDDTATYYCARDFTPLLWFGVGQGYFDFWGQGTLVTVSS

SEQ ID NO: 2040 - protein, 124 aa, Artificial Sequence
  Synthetic construct
QVQLVQSGAEVKKPGASVKVSCKASGYTFTNYYIHWVRQAPGQGLEWMGILNVSGGGTSYAQKLQGRVTMTRDTSTSTVFMELSSLTSEDTAVYYCARDPTRPSNGDPDGFDIWGQGTLLTVSA

SEQ ID NO: 2041 - protein, 118 aa, Artificial Sequence
  Synthetic construct
EVQLVGSGGGLVQPGGSLRLSCAASGFTFSTYWMSWVRQAPGKGLEWVADIKQDGSEKYYVDSVKGRFTISRDNAKNSLYLQMNSLRVEDTALYYCARGGLWGTFDYWGQGTLVTVSS

SEQ ID NO: 2042 - protein, 123 aa, Artificial Sequence
  Synthetic construct
QVQLQESGPGLVKPSQTLSLTCTVSGGSISSGGYYWSWIRQHPGKGLEWIGYIYYSGSTYYNPSLKSRVTISVDTSKNQFSLKLSSVTAADTAVYYCARSYGDYNYYYGMDVWGQGTTVTVSS

SEQ ID NO: 2043 - protein, 119 aa, Artificial Sequence
  Synthetic construct
EVQLLESGGGLVQPGGSLRLSCAASGFTFSSYAMSWVRQAPGKGLEWVSAISGNGVSAYYADSVKGRFTISRDNSKNTLFLQMNSLRAEDSAVYYCAKGFDAFWSGPTWGQGTPLSVSS

SEQ ID NO: 2044 - protein, 118 aa, Artificial Sequence
  Synthetic construct
QVQLQESGPGLVKPSGTLSLTCAVTGGSISSSNWWSWVRQPPGKGLEWIGEIYQTGSTKYNPSLKSRVTISVDKSKNQFSLELTSVTAADTAVYYCASSSWHLDFDYWGQGTLVSVSS

SEQ ID NO: 2045 - protein, 124 aa, Artificial Sequence
  Synthetic construct
QVQLVHSGAEVKKPGASVKVSCKASGYTFTNYYMHWVRQAPGQGLEWMGIINPIVGSTTYAQKFQGRVTMTRDTSTSTVYMELSSLRSEDTAVYYCARVFYSSSSHYYYGMDVWGQGTTVTVSS

SEQ ID NO: 2046 - protein, 119 aa, Artificial Sequence
  Synthetic construct
QVQLVQSGSELKKPGASVKVSCKASGYTFRTYSINWVRQAPGRGLEWMGWINTNTESPTYAQGFTGRFVFSLDTSVNTAYLQIDGLKAEDTAMYYCVRDYGHPYFIDVWGKGTMVTVSS

SEQ ID NO: 2047 - protein, 124 aa, Artificial Sequence
  Synthetic construct
EVQLVQSGAEVKKPGESLKISCKDSGYSFTNYWIGWVRQMPEKGLEWMGIIYPGDSDTRYSPSFQGQVTISADKSISTAYLQWSSLKASDTAMYYCASQTVLTGSAFGDAFDIWGQGTMVTVSS

SEQ ID NO: 2048 - protein, 121 aa, Artificial Sequence
  Synthetic construct
EVQLVESGGGLVQPGGSLRLSCVVSGFTLSRYWMSWVRQAPGKGLQWVANIKQDASEKYYVDSVKGRFTISRDNAKNSLYLQMNSLRAEDTAVYYCASHANWNYGLGFDYWGQGTLVTVSS

SEQ ID NO: 2049 - protein, 121 aa, Artificial Sequence
  Synthetic construct
QVQLVESGGGAVQPGRSLRLSCAASGFTFSSFGMHWVRQAPGKGLEWVSVIWFDGTNKNYADSVKGRFTISRDNSKNTVYLQMNGLRGEDTAVYFCAREGTVGATTGFDYWGQGTQVTVSS

SEQ ID NO: 2050 - protein, 134 aa, Artificial Sequence
  Synthetic construct
QVQLVQSGAEVKKPGASVKVSCKASGYTFTSYGISWVRQAPGQGLEWMGWISAYNGNTNYAQKLQGRVTMTTDTSTSTAYMELRSLRSDDTAVYYCARGDCSSTSCYPFWRRPLDYYYYGMDVWGQGTTVTVSS

SEQ ID NO: 2051 - protein, 127 aa, Artificial Sequence
  Synthetic construct
EVQLVESGGGLVQPGGSLRLSCAASGFTSRTFWMSWVRQAPGKGLEWVANINEDGSEKYYVDSVKGRFTISRDNTKNSLYLQMNSLRAEDTAVYYCARGGLHYYDSSAYYISAFDIWGLGTMVTVAS

SEQ ID NO: 2052 - protein, 118 aa, Artificial Sequence
  Synthetic construct
QVQLVESGGGVVQPGRSLRLSCAASGFIFSTYTLHWVRQAPGKGLEWVAVISYDGYNQYYADSVRGRFTISRDNSKNTVYLQMNSLRDEDTAVYYCARGDGYNYFDYWGQGTLITVSS

SEQ ID NO: 2053 - protein, 125 aa, Artificial Sequence
  Synthetic construct
QVQLVQSGAEVKKPGASVKVSCKASGYTFTNYAIHWLRQAPGQRLEWMGWITGGNGNTKYSQKFQGRVTINRDTSASTAYMELSSLRSEDTAVYYCARSPQFTAMVNFSYYFDYWGQGTLVTVSS

SEQ ID NO: 2054 - protein, 121 aa, Artificial Sequence
  Synthetic construct
QVQLQQWGAGLLKPSETLSLTCAVHGGSFSGYYWSWIRQPPGKGLEWIGEINHSGSTSYNPSLKSRVTISIDTSKNQFSLKLSSVTAADTAVYYCARDDGSGVHNYYMDVWDKGTTVTVSS

SEQ ID NO: 2055 - protein, 118 aa, Artificial Sequence
  Synthetic construct
QVQLVQSGAEVKKSGSSVRVSCKASGGAFSSYAFSWVRQAPGQGLEWMGGIIPRFGTANYAHKFHDRVTITADESTSTAYMEVSSLRSEDTAVYFCARVDHGYYFEYWGQGTLVTVSS

SEQ ID NO: 2056 - protein, 126 aa, Artificial Sequence
  Synthetic construct
QVQLVQSGSELKKPGASVKVSCKASGYTFTTYAMNWVRQAPGQGLEWMGWIDTNTGNPTYAQGFTGRFVFSLDTSVSTAYLQISSLKAEDTAVYYCARDFDSMVRGGYYYYYMDVWGKGTTVTVSS

SEQ ID NO: 2057 - protein, 112 aa, Artificial Sequence
  Synthetic construct
QVQLQESGPGLVKPSETLSLTCTVSGGSISNYYWSWIRQPPGKGLEWIGYIYYSGSTNYNPSLKSRVTISGDTSKNQFSLKLSSVTAADTAVYYCARGFDPWGQGTLVTVSS

SEQ ID NO: 2058 - protein, 121 aa, Artificial Sequence
  Synthetic construct
EVQLVESGGGLVQPGRSLRLSCAASGFTFDDYAMHWVRQAPGKGLEWVSHINWNSGSIGYADSVKGRFTISRDNAKNSLYLQMNSLRAEDTALYYCAKGGLYGDRDGFDIWGQGTMVTVSS

SEQ ID NO: 2059 - protein, 112 aa, Artificial Sequence
  Synthetic construct
QVQLQESGPGLVRPSETLSLTCTVSGDSISSYYWSWIRQPPGKGLEFIGYIYYSGSTNYNPSLKSRVTISVDTSKNQFSLKVGSVTAADTAVYYCARGFDLWGQGTLVTVSS

SEQ ID NO: 2060 - protein, 130 aa, Artificial Sequence
  Synthetic construct
QVQLVQSGAEVKKPGASVKVSCKASGYTFTSYDISWVRQAPGQGLEWMGRISAYNGDTNYAQKFRGRVTMTTDTSTTTAYMELRSLRSDDTAVYYCAKDGAPQGGYYDLWSGYLSWFDPWGQGTLVTVSS

SEQ ID NO: 2061 - protein, 126 aa, Artificial Sequence
  Synthetic construct
EVQLVQSGPEVKKPGESLKISCKGSGYSFSDYWIGWVRQMPGKGLEWMGIIYPGDSDTRYSPSFQGRVTISADESISTASLQWSSLKASDTAIYYCARESVVVVGTTQYLRAFDIWGQGTVVTVSS

SEQ ID NO: 2062 - protein, 123 aa, Artificial Sequence
  Synthetic construct
QVQLVQSGAEVKKPGASVKVSCKGSGYSFTGRYMHWVRQAPGQGLEWMGRMNPISGGTTYAQKFQARVTMTRDTAISTAYMELRRLRSDDTAVYYCATEDYYDKAYHHAMDVWGQGTTVTVSS

SEQ ID NO: 2063 - protein, 119 aa, Artificial Sequence
  Synthetic construct
QVQLVQSGAEVKKPGSSVRVSCKASGGTFSSYAISWVRQAPGQGLEWMGVIIPISATTNYAQKFQGRVTITADDSTSTAYMELSGLRSEDRAVYYCASPDYESSGYYYWGQGTLVTVSA

SEQ ID NO: 2064 - protein, 123 aa, Artificial Sequence
  Synthetic construct
QVQLVESGGGLVKPGGSLRLSCATSGFRFTDFYMSWIRQAPGKGLELVSYISSSGSTIYYGDSVKGRFTISRDSAKNSLYLQMNSLRAEDTAVYYCARRMGQWLAPTSGMDVWGQGTTVTVSS

SEQ ID NO: 2065 - protein, 123 aa, Artificial Sequence
  Synthetic construct
QVQLQQSGPGLVKPSQTLSLTCAISGDSVSSSSAAWNWIRQSPSRGLEWLGRTYYGSKWGYDYALSVKSRISINPDTSKNQFSLQLNSVTPEDTAVYYCAREAQGATYYMDVWGKGTTVTVSS

SEQ ID NO: 2066 - protein, 120 aa, Artificial Sequence
  Synthetic construct
QVQLVESGGGVVQPGRSLRLSCAASGFTFSYYGMHWVRQAPGKGLEWVAVIWFDGSHKYYADSVKGRFTVSRDNSKNTLYLQMDSLRAEDTAVYYCAREGQVGATGLDYWGQGTLVTVSS

SEQ ID NO: 2067 - protein, 120 aa, Artificial Sequence
  Synthetic construct
QVQLVQSGAEVKKPGSSVKVSCKASGGSFSSPAVSWVRQAPGQGLEWVGGVIPIFGTVRYAQKFQGRVTITADKVTSTAYMEFHSLRSDDTAVYYCARKTSDYSYSIDPWGQGTLVIVSA

SEQ ID NO: 2068 - protein, 130 aa, Artificial Sequence
  Synthetic construct
QVQLVQSGSELKKPGASVKVSCKASGYPFTSYALNWVRQAPGQGLEWMGWINTNTGNPTYAQGFTGRFVFSLDTSVSTAYLQISSLKAEDTAVYYCARVPLLLRQFDWLSPNGFYYMDVWGKGTTVTVSS

SEQ ID NO: 2069 - protein, 125 aa, Artificial Sequence
  Synthetic construct
QVQLVESGGGLVKPRGSLRLSCAASGFILSDYYMNWIRQAPGKGLEWVSFISTTGSSIYYADSVKGRFTISRDNAKNSLYLQMSSLRAEDTAVYYCARLEVEMPTPDYYYGLDVWGLGTTVTVSS

SEQ ID NO: 2070 - protein, 125 aa, Artificial Sequence
  Synthetic construct
QVQLVQSGSELKKPGASVKVSCKASGYIFTSYAMNWVRQAPGHGLEWMGWIHTNTGYPTYAQGFTGRFLFSLDTSVSTAYLQISSLKAEDTAVYYCARAPPLYDISDYYVSPYYWGQGTLVTVSS

SEQ ID NO: 2071 - protein, 125 aa, Artificial Sequence
  Synthetic construct
QITLKESGPTLVKPTQTLTLTCTFSGFSLSTSGVGVGWIRQSPGKALEWLALIYWDDDKSYTSSLKSRLTITKDTSKNQVVLTMTNMDPVDTATYYCSHISYDILSATILPFDYWGQGTLVTVSS

SEQ ID NO: 2072 - protein, 122 aa, Artificial Sequence
  Synthetic construct
QVQLMQSGPEVKKPGSSVKVSCKASGGTFSHYGTSWVRQAAGQGLEWMGGIVPMLGSENYAQNFQGRVTITADESTTTVYMELRSLRSEDTAVYYCARYSSSVQGIGWFGPWGQGTLVTVSS

SEQ ID NO: 2073 - protein, 120 aa, Artificial Sequence
  Synthetic construct
QVQLVESGGGVVQPGRSLRLSCAASGFTFSSYAMHWVRQAPGKGLEWVALISYDGSKKNYADSVKGRFTTSRDNSEKTLYVQMNSLRAEDTALYYCARGYYEAPGYFDLWGRGTLVAVSS

SEQ ID NO: 2074 - protein, 126 aa, Artificial Sequence
  Synthetic construct
DVQLEESGGGLVQPGGSLRLSCAASGFTFSSYWMTWVRQAPGKGLEWVANIKQDGSEKYYVDSVKGRFTISRDNAKNSLYLQMNSLRGEDTAVYYCARLHSYSFRFYSYYYGMDVWGQGTTVTVSS

SEQ ID NO: 2075 - protein, 121 aa, Artificial Sequence
  Synthetic construct
QLQLVESGGGVVRPGRSLRLSCAASGFTFSSYAMHWVRQAPGKGLEWVVVISYDGDNKYYADSVKGRFTISRDNSKNTVHLQMNSLRAEDTAVYYCARARSGTYRASFDYWGQGALVTVSS

SEQ ID NO: 2076 - protein, 120 aa, Artificial Sequence
  Synthetic construct
QLQLRESGPGLVKPSETLSLTCSVSDGSITTTSYFWDWIRQPPGKGLEWIGALDYSGITSYNPSLKSRLTMSLDTSTNQFSLKLSSMTASDTAVYYCARRRGASSLRDFWGQGILVTVSS

SEQ ID NO: 2077 - protein, 130 aa, Artificial Sequence
  Synthetic construct
EVQLVESGGGLVQPGGSLRLSCAASGFTFSSYNMNWVRQAPGKGLEWISYISSSSSTIYYADSVKGRFTISRDNAKNSLYLQMNSLRDEDTAVYYCARDLYYDYVWGSYRYSSEGANDYWGQGTLVTVSS

SEQ ID NO: 2078 - protein, 121 aa, Artificial Sequence
  Synthetic construct
EVQLLESGGGLVQPGGSLRLSCAASGFTFSSYAMSWVRQAPGKGLEWVSAISGSGGSTYYADSVKGRFTISRDNSKNTLYLQMNSLRAEDTAVYYCAEGSTIALMVYATRWGQGTLVTVSS

SEQ ID NO: 2079 - protein, 121 aa, Artificial Sequence
  Synthetic construct
EGLLVESGGGLVKPGGSLRLSCAASGFTFSSQSMNWVRQAPGKGPEWVSTISSSSSYKFYADSVKGRFTISRDNAKNSLYLQMDNLRAEDTAVYYCAKMFGGYFDYYMDVWGKGTTVTVSS

SEQ ID NO: 2080 - protein, 124 aa, Artificial Sequence
  Synthetic construct
QVQLVESGGGVVQPGRSLRLSCAASGFAFSNYGMHWVRQAPGKGLEWVAVIWNVGSNKFYSDSVKGRFSISRDESKNTLYLQMNSLRAEDTAVYYCARDLPSDNWSDVGAFDIWGQGTMVTVSS

SEQ ID NO: 2081 - protein, 123 aa, Artificial Sequence
  Synthetic construct
EVQLVQSGAEVKKPGESLKISCKGSGYSFTKYWIGWVRQMPGKGLEWMGIIYPGDSDTTYSPSFQGQVTISADKSITTAYLQWNSLKASDTAMYYCARRSNYDTSGFYYVDYWGQGTLVTVSS

SEQ ID NO: 2082 - protein, 118 aa, Artificial Sequence
  Synthetic construct
EVQLVESGGGLVQPGGSLRLSCVASGFTFSDRRMHWVRQAPGEGLSWVSRIEYDGSGARYAGSVNGRFIISRDNAKNTLYLQMNSLTFKDTAVYYCKFYDPSQRVDYWGQGTLVTVST

SEQ ID NO: 2083 - protein, 130 aa, Artificial Sequence
  Synthetic construct
QVQLVQSGAEVKKPGASVKVSCKASGYTFISYGISWVRQAPGQGLEWMGWISAYNGNTNYAQKLQGRVTMTTDTSTSTAYMELRSLRSDDTAVYYCARVLSYYDSSGYLGYYYYYGMDVWGQGTTVTVSS

SEQ ID NO: 2084 - protein, 119 aa, Artificial Sequence
  Synthetic construct
EVQLVESGGGLIQPGGSLRLSCAASGVTVSSNYMSWVRQAPGKGLEWVSVIYSGGSTFYADSVKGRFTISRDNSKNTLYLQMNSLRAEDTAIYYCARGGWPSGDTFDIWGQGTMVTVSS

SEQ ID NO: 2085 - protein, 125 aa, Artificial Sequence
  Synthetic construct
EVQLLESGGGLVQPGGSLRLSCAASGFTFSTYAMSWVRQAPGKGLEWVSTVSDSGGNTYYADSVRGRFTISRDNSRNTLYLQMNSLRAEDTAVYYCASLQLPYYCSGGRCYPIPWGQGTLVTVSS

SEQ ID NO: 2086 - protein, 131 aa, Artificial Sequence
  Synthetic construct
AGVLVQSGAEVKKPGESLKVSCKGSGQYFGGYWIGWVRQMPGKGLEWMGLIYPGDSDTKYSPSFQGQVTISVDTSIRTAFLQWSSLKTSDTAMYYCGQLKRHCTGDNCYSGGDWGYYFDSWGQGTLVTVSS

SEQ ID NO: 2087 - protein, 126 aa, Artificial Sequence
  Synthetic construct
QLQLVQSGAEVKKPGSSVKVSCKASGDTLSSYAISWVRQAPGQGLEWMGLIIPIFGTAHHAQKFQGRVTITADESTSTVYMELSSLRSEDTAVYYCANQDYDTLTGPTYYYYMDVWGRGTTVTVSS

SEQ ID NO: 2088 - protein, 117 aa, Artificial Sequence
  Synthetic construct
EVQLVESGGNLVQPGGSLRLSCAASGFPFSNFWMLWVRQAPGKGLEWVANIKQDGSEKNYVDSVKGRFTISRDNTKNSVYLQMNSLRVEDTAVYYCAKYHLYHFDYWGQGSLVTVSS

SEQ ID NO: 2089 - protein, 125 aa, Artificial Sequence
  Synthetic construct
QVQLVQSGAEVKKPGSSVKVSCKVSGGRFSSNAISWVRQAPGQGLEWIGGIIPNFGTPNYAQNFQDRVAISADDYTNTAYMELISLKSEDTAVYFCARNADNSAFHGGVYYFASWGQGTLVTVSS

SEQ ID NO: 2090 - protein, 123 aa, Artificial Sequence
  Synthetic construct
QVQLVQSGAEVKKPGASVKVSCKASGYTFASYYVHWVRQAPGQGLEWMGIINPTGGSTMYAQTFQGRVAMTGDTSTSTVYMELSSLRSKDTAVYYCARGSGPIPSKWYFFDYWGQGTLVTVSS

SEQ ID NO: 2091 - protein, 125 aa, Artificial Sequence
  Synthetic construct
QVQLVQSGSELKKPGASVMVSCKASGYTFTYYAMNWVRQAPGQGLEWMGWIHTNTGNPTYAQAFTGRFVFSLDTSVTTAYLQISSLKAEDTAVYYCARAPPLYNISDYYISPYFWGQGTLVTVSS

SEQ ID NO: 2092 - protein, 129 aa, Artificial Sequence
  Synthetic construct
EVQLVESGGGLVKPGGSLRLSCTASGFTFTNAWMSWVRQAPGKGLEWVGRIKSNIDGGTTDYAAPVKGRFTISRDDSKNKLYLQMDSLKTEDTAVYYCTTDLYYDYFWGSPMNSWFDPWGQGTLVTVSS

SEQ ID NO: 2093 - protein, 124 aa, Artificial Sequence
  Synthetic construct
QITLKESGPTLVKPTQTLTLTCTFSGFSLSTSGVGVGWIRQPPGKALEWLALIYWDADKRYSPSLKNRLTITKDTSKNQVVLTMTNMDPVDTATYYCAHTGSVPAAMVGAFDVWGQGTMVTVSS

SEQ ID NO: 2094 - protein, 121 aa, Artificial Sequence
  Synthetic construct
QVQLVESGGGVVQPGRSLRLSCVASGFTFSTYAVHWVRQAPGKGLEWVALISYDGINKYYADSVKGRFSISRDNPKNTLHLQMNSLGAEDTAVYYCARARGGSYYYGMDVWGQGTTVTVSS

SEQ ID NO: 2095 - protein, 128 aa, Artificial Sequence
  Synthetic construct
QVQLQQSGPGLVKPSQTLSLTCAISGDSVSSNSAAWNWIRRSPSRGLEWLGRTYYRSKWYKDYAESVKSRITINPDTSKNQVSLQFNSVTPEDTAVYYCARGRDSSGLDLYYYGLDVWGQGTTVTVSS

SEQ ID NO: 2096 - protein, 124 aa, Artificial Sequence
  Synthetic construct
EEQLVESGGGLVQPGGSLRLSCAASGLTFSNDDMHWVRQATGKGLEWVSGIGTAGDTYYLGSVKGRFTISRENAKKSLYLQMNSLRAEDTAVYYCARGIQYSSRWPKYYYAMDVWGQGTTVTVS

SEQ ID NO: 2097 - protein, 124 aa, Artificial Sequence
  Synthetic construct
QVQLQESGPGLVKPSQTLSLTCTVSGGSISSGSYYWSWIRQPAGKGLEWIGRIYTSGSTNYNPSLKSRVTMSVDTTKNQFSLNLSSVTAADTAVYYCARGGGWLAPTLHAMDVWGQGTTVIVSS

SEQ ID NO: 2098 - protein, 120 aa, Artificial Sequence
  Synthetic construct
QVQLVESGGGVVQPGRSLRLSCAASGFTFSSYGMHWVRQAPGKGLEWVAVVWHDGVNKYCIDSVKGRFTISRDNSNKTLYLQMNSLRAEDTAAYYCAREGQFPNNGLDVWGQGTTVTVSS

SEQ ID NO: 2099 - protein, 129 aa, Artificial Sequence
  Synthetic construct
QLQLQESGPGLVKPSETLSLTCTVSRGSISSSTSSWGWIRQPPGKGLEWIGSIHYSGSSYYNPSFKSRVIISVDTSKNQFSLKLSSVTAADTAVYYCARRATSYNDSSGYYSIPIFDHWGQGTLVTVSS

SEQ ID NO: 2100 - protein, 122 aa, Artificial Sequence
  Synthetic construct
QVTLKESGPALVRPTQTLTLTCSFSGFSMSTRGLCVTWVRQPPGQALEWLALIDWDDETFFATSLEHRLTISKDTSKNQVVLTMTNMGPADTATYFCARLHCYGSVSGVDYWGQGTLVTVSS

SEQ ID NO: 2101 - protein, 128 aa, Artificial Sequence
  Synthetic construct
QVQLVESGGGVVQPGRSLRLSCAASGFTFRSYAMYWVRQAPGKGLEWVAVIAYDGSKKYYGDSVKGRFTISRDNSKNTLYLQMNSLRPEDTAVYYCARGWAWGAIKDSSWYSDTFDMWGQGTLVTVSS

SEQ ID NO: 2102 - protein, 120 aa, Artificial Sequence
  Synthetic construct
QVQLQESGPGLVKPSQTLSLTCTVSGGSISSGSYYWSWIRQQPGKGLEWIGYIYYSGGTYYNPSLKTRVTISVDTSKNQFSLKLGSVTAADTAVYYCAREATANIVFDIWGQGTTVTVSL

SEQ ID NO: 2103 - protein, 118 aa, Artificial Sequence
  Synthetic construct
QVQLEQSGGGVVQPGRSLRLSCAASGFTFNIYAMHWVRQAPGKGLEWVALISYDGSNKYYADSVKGRFTISRDNSKNTLYLQMNSLRAEDTAVFYCTRAPNYYYMDVWGTGTTVTVSS

SEQ ID NO: 2104 - protein, 123 aa, Artificial Sequence
  Synthetic construct
QVQLVQSGAEVKKPGASVKVSCKISEYTLPEISVHWVRQALGKGLEWMGGFDPEDGETIYAQKFQGRVTMTEDTSTDTAYMELSSLRSDDTAVYYCAITTPLLGVVANWLDPWGQGTLVTVSS

SEQ ID NO: 2105 - protein, 120 aa, Artificial Sequence
  Synthetic construct
QVQLQESGPGLVKPSQTLSLTCTVSGGSISTGDYYWSWIRQHPGKGLEWIGFIYYSGSTNYSPSLKSRVTISLDTSNNQFSLRVSSVTAADTAVYYCASLLRYQYYFDNWGQGALVTVSS

SEQ ID NO: 2106 - protein, 127 aa, Artificial Sequence
  Synthetic construct
QVQLQESGPGLVKPLETLSLTCTVSGGSVSSGAYYWSWIRQPPGKGLEWIGYLHNSGGANYNPSLRSRVTISADTSRKQISLNLTSLTAADTAVYYCARVPRYFDWLGAPVSYMDVWGKGTTVTVSS

SEQ ID NO: 2107 - protein, 121 aa, Artificial Sequence
  Synthetic construct
QVLLVESGGGVVQPGRSLRLSCAASGFTFSTYALHWVRQAPGKGLEWVAVISYDGNNKYYADSVKGRFSISRDNSKNTLFLQMNSLRAEDSAVYYCARPNSGSYYSWFDYWGQGTLVTVSS

SEQ ID NO: 2108 - protein, 123 aa, Artificial Sequence
  Synthetic construct
QVQLHESGPGLVKPSQTLSLTCGISGDSVSSNSAAWNWIRQTPSRGLEWLGRTYYTPKWYYDFAESVKSRISINADTSKNHLSLQLKSVTPDDTAMYYCARDDKNWYAAFDIWGPGTMVTVPS

SEQ ID NO: 2109 - protein, 127 aa, Artificial Sequence
  Synthetic construct
QVQLVQSGAEVKKPGASVKVSCKASGYPLIEYHIHWVRQAPGQGLEWVAVIDPSDGTTYDAQNLQGRVTMTRDTSTNTVYMELSDLRSEDTAVYYCGRGRHYGSGTNSIIAHSVDVWGQGTTVTVSS

SEQ ID NO: 2110 - protein, 118 aa, Artificial Sequence
  Synthetic construct
QVQLVQSGAEVKKPGASVKVSCKASGYTFTTYGISWVRQAPGQGLEWMGWISAHYGNTNYAQKFQGRVTMTTDTSTNTAYMDLRSLRSDDTAVYYCAREYSSGWPDYWGQGTLVTVSS

SEQ ID NO: 2111 - protein, 119 aa, Artificial Sequence
  Synthetic construct
EVHLVESGGGLVQPGGSLRLSCAASGFTFRIYWMSWVRQAPGKGLECVANIKQDGSEKYYVDSVKGRFTISRDNAKNSLYLQMNSLRAEDTAVYYCVSVGASSWYFQYWGQGTLVTVSS

SEQ ID NO: 2112 - protein, 131 aa, Artificial Sequence
  Synthetic construct
EVQLVESGGALVQPGGSLRLSCAASGFIFSDHYMDWVRQAPGKGLEWVGRIRDKANNYTTEYAASVKGRFIISRDDSENSLYLQMNSLKTEDTAVYYCARVRGGEWFGELGWYYYYGMDVWGQGTTVTVSP

SEQ ID NO: 2113 - protein, 121 aa, Artificial Sequence
  Synthetic construct
QVQLVESGGGVVQPGKSLRLSCAASGFTSSIYALHWVRQAPGKGLGWVAVISYDGVNRYYADSVKGRFTISRDNSKNTLYLQMNSLRAEDTAVYYCARSRGGNYFDSFNIWGQGTMVTVSS

SEQ ID NO: 2114 - protein, 122 aa, Artificial Sequence
  Synthetic construct
QVQLLQSGAEMKKPGSSVTVSCRASGGTFTTYTITWLRQAPGLGLEWMGSIIPLFGTTDYAQQFQGRVTITADESSTSAYMELSGLRSEDTAVYYCARARGDGFGVYYMDVWGKGTTVIVSS

SEQ ID NO: 2115 - protein, 128 aa, Artificial Sequence
  Synthetic construct
QVQLVQSGAEVKKPGSSVKVSCKASGGTFSSYGISWVRQAPGRGLEWMGGIIPIFGTANYAQKFQGRVTLTADESTNTAYMELSSLRSEDTAVYYCASLGGDYYGSGIYYNSSEFDPWGQGTLVTVSS

SEQ ID NO: 2116 - protein, 121 aa, Artificial Sequence
  Synthetic construct
QVQLQESGPGLVKPSQTLSLTCTVSGGSISSGSYYWSWIRQPAGKGLEWIGRIYTSGSTNYNPSLKSRVTISVDTSKNQFSLKLSSVTAADTAVYYCARVFTTLDWYFDLWGRGTLVIVSS

SEQ ID NO: 2117 - protein, 124 aa, Artificial Sequence
  Synthetic construct
QVQLQESGPGLVKPSQTLSLTCTVSGGSISSGGYYWTWIRQHPGKGLEWIGYIYYSGSTYYNPSLKSRVTISIDTSKNQFSLKLSSVTAADTAVYYCARQTEYSSGWPAEFDYWGQGTLVTVSS

SEQ ID NO: 2118 - protein, 126 aa, Artificial Sequence
  Synthetic construct
DVQLVESGGGLVQPGRSLRLSCTASGFTFGDYAMSWFRQAPGKGLEWVGFIRSKTFGGTTEYAASVKGRFTVSRDDSKSIAYLQMNSLKTEDTAVYYCAREYYGSGSYYLQPLGYWGQGTLVTVSS

SEQ ID NO: 2119 - protein, 126 aa, Artificial Sequence
  Synthetic construct
EVQLVESGGGLVKPGGSLRLSCAASGFAFSNYSMNWVRQAPGKGLEWVSSISSSRNYIYYADSVRGRFTISRDNAKNALYLQMNSLRAEDTAVYYCAKDVVATIFSSYYYYGMDVWGQGTTVTVSS

SEQ ID NO: 2120 - protein, 120 aa, Artificial Sequence
  Synthetic construct
QVQLVESGGGVVQPGRSLRLSCAASGFTFSSYGMHWVRQAPGKGLEWVAIITYDGSKKYYADSVKGRVTISRDNSKNTLYLQMNSLRAEDTAVYYCAKDGGGYNSEFDYWGQGTLVTVSS

SEQ ID NO: 2121 - protein, 124 aa, Artificial Sequence
  Synthetic construct
EVQLVQSGAEVKKPGESLRISCKGSGYSFTSYWITWVRQMPGKGLEWMGRIDPSDSYTNYSPSFQGHVTISADKSISTAYLQWSSLKASDTAMYYCARRYCTSTSCFQGWFDPWGQGTLVTVSS

SEQ ID NO: 2122 - protein, 119 aa, Artificial Sequence
  Synthetic construct
QVQLQQWGAGLLKPSETLSLTCAVYGGSFSGYYWSWIRQPPGKGLEWIGEINHSGSTNYNPSLKSRVTISVGTSKNQFSLKLSSVTAADTAVYYCARGGGHSYGAIDYWGQGTLVTVSS

SEQ ID NO: 2123 - protein, 124 aa, Artificial Sequence
  Synthetic construct
QITLKESGPTLVKPTQTLTLTCTFSGFSLRNSGVGVGWIRQPPGKAPEWLALIYWDDDKRYSPSLKSRLTITKDTSKNQVVLTMTNMDPVDTATYYCAHTGSVPPAMVGAFDIWGQGTMVTVSS

SEQ ID NO: 2124 - protein, 126 aa, Artificial Sequence
  Synthetic construct
QVQLQESGPGLVKPSQTLSLTCTVSGGSIISGGYYWSWIRQHPGKGLEWIAYIYYSGNTYYNPSLKSRLTISIDTSKNQFSLKLNSVTAADTAVYYCASGHYCSGGSCYSGWLDPWGQGTLVTVSS

SEQ ID NO: 2125 - protein, 128 aa, Artificial Sequence
  Synthetic construct
QVTLRESGPPLVNPTQTLTLTCTFSGFSLSTTGMSMSWIRQPPGKALEWLALIDWADDKFYSPSLETRLTISADTSKNQVVLTMTNTDPVDTATYYCVRGGALFSVSTDMSYDAFDIWGQGTVVTVSS

SEQ ID NO: 2126 - protein, 118 aa, Artificial Sequence
  Synthetic construct
EVQLVETGGGLIQPGGSLRLSCAASGFTVSSNYMSWVRQAPGKGLEWVSIIYSGGKTHYTDSVKGRFTISRDNSNNTLYLQMNSLRVDDTAVYYCARVGTGGRAFDIWGQGTMVTVSS

SEQ ID NO: 2127 - protein, 119 aa, Artificial Sequence
  Synthetic construct
QVQLQESGPGLVKPSETLSLTCTVSGGSLSSYYWSWIRQPPGKGLEWIGYIYYSVNTNYNPSLKSRVTISADTSKNQISLKLSSVTAADTAVYYCARRYASNYYGFDYWGQGTLVTVSS

SEQ ID NO: 2128 - protein, 118 aa, Artificial Sequence
  Synthetic construct
EMQLVESGGGLVQPGGSLRLSCVVSGFTVSDTYLTWVRQPPGRGLEWVSVIYRGGSTYYADSVKGRFTISRDGSKNTLYLQMNSLRPDDTAIYYCARRPSTSWGLDYWGQGTLVTVSS

SEQ ID NO: 2129 - protein, 124 aa, Artificial Sequence
  Synthetic construct
QVQLVQSGAEVKKPGASVKISCKASGYTFTGYYMHWVRQAPGQGLEWMGWINPHSGGTKYAQNFQGWVTMTRDTSISTAYMELSRLRSDDTAIYYCARGVGTVVTRHNYTMDVWGQGTTVTVSS

SEQ ID NO: 2130 - protein, 129 aa, Artificial Sequence
  Synthetic construct
QVQLQESGPGLVKPSETLSLTCSVSGGSISSYYWSWIRQPPGKGLEWIGYIYYSETTNYNPSLKSRVTISGDTSKNQFSLKMSSVTAADTAVYYCARLLITSEYSSGWYKYQYYGMDVWGQGTTVTVSS

SEQ ID NO: 2131 - protein, 125 aa, Artificial Sequence
  Synthetic construct
QGQLVQSGAEVKKPGASVKVSCKASGYTFTSYGINWVRQAPGQGLEWMGWINVYNGYTNYAQKLQGRVTLTTDTSTSTAYMELRSLRSDDTAVYFCARGYYYDRSGYYPGGSDIWGQGTMVTVSS

SEQ ID NO: 2132 - protein, 124 aa, Artificial Sequence
  Synthetic construct
QVQLIQSGAEVEKPGASVKVSCKVSGYTLIELSMHWVRQAPGKGLEWMGGFDPENVETIYAQKFQGRVTMTEDTSTDTAYMELSSLRSDDTAVYYCATAFAYCGGDCYGRFDYWGQGTLVTVSS

SEQ ID NO: 2133 - protein, 125 aa, Artificial Sequence
  Synthetic construct
QVQLVESGGGVVQPGRSLRLSCAASGFTFSTYGMHWVRQAPGKGLEWVAVISYDGFNKYYGDFVKGRFSISRDNSKNTLYLQMNSLRGEDTAVYYCAKAPADSSGWYTPGTFEIWGQGTKVTVSS

SEQ ID NO: 2134 - protein, 127 aa, Artificial Sequence
  Synthetic construct
QVQLQESGPGLVKPSETLSLTCTVSGGSVSSGSHYWSWIRQPPGKGLEWIGYIYYSGSTNYNPSLKSRVTISVDTSKDQFSLKLRSVTAADTAVFYCARIAWAAAAGSGYYYYMDVWGKGITVTVSS

SEQ ID NO: 2135 - protein, 123 aa, Artificial Sequence
  Synthetic construct
QVQLVQSGAEVKKPGSSVKVSCKVSGGTFSSYTIIWVRQAPGQGLEWMGRVIPVVHITHYAQRFRGRVTISADKSTSTAYMELSSLRSEDTAVYYCARGLWFGDSETVWFDPWGQGTLVTVSS

SEQ ID NO: 2136 - protein, 120 aa, Artificial Sequence
  Synthetic construct
QITLKESGPTLVKPTQTLTLTCTFSGFSLSTSGVAVGWIRQPPGKALEWLALIYWDDEKRYSPSLKSRLTITKDTSKNQVVLTMTNMDPVDTATYFCAHYSSSWYLFDYWGQGTLVTVSS

SEQ ID NO: 2137 - protein, 125 aa, Artificial Sequence
  Synthetic construct
QVHLVQSGAEVKSPGSSVKVSCKASGGTFSSYAISWVRQAPGQGLEWMGGIIPIFASANYAQKLQGRVTITADESTSTAYMELSSLRSEDTAVYFCARDKPLDPITGIAYGMDVWGQGTTVTVSS

SEQ ID NO: 2138 - protein, 128 aa, Artificial Sequence
  Synthetic construct
QVQLVQSGAEVKKPGASVKVSCRPSAYTFPISGISWVRQAPGQGLEWMGWISADSGNTNYAQKFQGRVTVTTDKSTRTAYMELRSLRSDDTAVYYCARMWFGDLSSLTNYNYYGMDVWGQGTTVTVSS

SEQ ID NO: 2139 - protein, 118 aa, Artificial Sequence
  Synthetic construct
QVQLVESGGGVVQPGRSLRVSCAASAFTFNNYAMHWVRQAPGKGLEWVALISYDGSNKYYADSVKGRFTVSRDNSENTLYLQMNSVRAEDAAVYYCARGPNYYYMDVWGKGTTVTVSS

SEQ ID NO: 2140 - protein, 123 aa, Artificial Sequence
  Synthetic construct
QVQLQESGPGLVKPSETLSLTCTVSGGSISTYYWSWIRQPPGKGLEWIGYIYYSGSTNYNPSLKSRLTISVDTSKNQFSLRLSSVTAADTAVYYCAREGGLRQIPKNDAFDVWGQGTVVTVSS

SEQ ID NO: 2141 - protein, 116 aa, Artificial Sequence
  Synthetic construct
QMQLVQSGAEVKKTGSSVKVSCKASGNTFTYRYLHWVRQAPGQALEWMGWITPFNGNTNYAQKFQDRVTITRDTSMSTAYMELSSLRSEDTAMYYCATGLDRFDYWGQGTLVTVSS

SEQ ID NO: 2142 - protein, 114 aa, Artificial Sequence
  Synthetic construct
EVQLVESGGGWVHPGGSLRLSCAVSGFTVSEQKMNWVRQAPGKGLEWISHIRPGSSGIYYADSVKGRFTISRDDAKNSLYLQMDHLRAEDTAMYYCAREPWLNWGQGTLVTVSS

SEQ ID NO: 2143 - protein, 119 aa, Artificial Sequence
  Synthetic construct
EVQLVQSGGGLVQPGGSLRLSCAASGFTFSSYSMNWVRQAPGKGLDWVSYISSSGTTIYYADSVKGRFTISRDNAKNSLYLQMNSLRDEDTAVYYCARESLGDRDFDYWGQGTLVTVSS

SEQ ID NO: 2144 - protein, 121 aa, Artificial Sequence
  Synthetic construct
QVQLVESGGGVVQPGRSLRLSCAASGFTFSTYSMHWVRQAPGKGLEWVAVISYDGTNKYYAVSVKGRFTISRDNSKNTLYLQMNSLRAEDSAVYFCARSRGGNYLDAFDVWGQGTMLTVSS

SEQ ID NO: 2145 - protein, 127 aa, Artificial Sequence
  Synthetic construct
QLQLQESGPGLVKPSETLSLTCTVSGVSMNSSDSYWGWVRQPPGKGLEWIGSVHYAGSTDYNPSLKSRLTISVDTSKNQFSLKLTSVTAADTAVYYCARHSTYYDISAYVNTSPDHWGQGTLVTVSS

SEQ ID NO: 2146 - protein, 123 aa, Artificial Sequence
  Synthetic construct
QITLKESGPAQVKPTQTLTLTCTFSGFSFNTSRVGVGWIRQPPGKALEWLALIYWDDDKRYSPSLRSRLTITKDTSKNQVVLTVTNMDPVDTATYYCAQRTPSNWFGDWFDPWGQGTLVTVSS

SEQ ID NO: 2147 - protein, 116 aa, Artificial Sequence
  Synthetic construct
QVQLVESGGGVVQPGRSLRLSCAASGITLKDYGMHWVRQAPGRGLEWVAFISYDGSVQHYGDSVKGRFTISRDDLKNTLFLQMNSLRADDTAVYYCAKGATKVDYWGQGTLVTVSS

SEQ ID NO: 2148 - protein, 118 aa, Artificial Sequence
  Synthetic construct
EVQLVESGGGLVKPGGSLRLSCAASGFIFSSYSMNWVRQAPGKGLEWVSSISSSSSYIYYADSVKGRFTISRDNAKNSLYLQMNSLRAEDTAVYYCAREGTDEAFDIWGQGTMVTVSS

SEQ ID NO: 2149 - protein, 125 aa, Artificial Sequence
  Synthetic construct
EVQLVESGGGLVQPGGSLKLSCAASGFTFSASSVHWVRQASGKGLEWVGRIRDKRNDYATQYTGSLRGRFTISRDDSKSTAYLQMNSLKAEDTAVYYCARVNPSSGSYYDALDIWGQGTTVTVSP

SEQ ID NO: 2150 - protein, 119 aa, Artificial Sequence; identical to SEQ ID NO: 1812
  Synthetic construct

SEQ ID NO: 2151 - protein, 120 aa, Artificial Sequence
  Synthetic construct
EMQLVQSGAEVKKPGESLRISCKGSGSSFTNYWIGWVRQMPGQGLEWMGVIYPGNSDTRYSPSFRGHVSFSVDYFRNTAYLQWSSLKASDTAMYYCARHGTGTVGAPDYWGQGTLVTVSS

SEQ ID NO: 2152 - protein, 118 aa, Artificial Sequence
  Synthetic construct
QVQLVQSGAEVKKPGSSVKVSCKASGGTFSNYDLSWVRQAPGQGLEWMGDIIPIFSTPNYAQKFQGRVTITADESTSTAYMELSSLRSEDTAVYYCARWFGESGDDYWGQGTLVTVSS

SEQ ID NO: 2153 - protein, 120 aa, Artificial Sequence
  Synthetic construct
EVQLVESGGGLVQPGRSLRLSCVASGFTFDDYAVHWVRQPPGKGLEWVSGATWNSGTIGYADSVKGRFIISRENARKSLYLQMNRLRDEDTALYYCAKGSRRGEDAFDIWGQGTMVTVSS

SEQ ID NO: 2154 - protein, 118 aa, Artificial Sequence
  Synthetic construct
QITLKESGPTLVKPTQTLTLTCAFSGFSLSTNGVGVGWIRQPPGKALEWLGIIYWDDDKRYSPSLKSRLTITKDTSKNQVVLTMTNMDPVDTAIYYCAHISAYDREYWGQGTLVTVSS

SEQ ID NO: 2155 - protein, 121 aa, Artificial Sequence
  Synthetic construct
QVQVVQSGAEVKKPGASVKVSCKVSGFTLIELSLHWVRQAPGKGLEWMGGFDPEDGETIYAQKFKGRVTMTEDTSTDTAYMELSSLRSEDTAMYYCAVSPAIVRKNWFDPWGQGTLVTVSS

SEQ ID NO: 2156 - protein, 125 aa, Artificial Sequence
  Synthetic construct
QLQLQESGPGLVKPSETLSLTCNVSGGSIKTSYYWGWVRQPPGKGLEWIGSIYYTGSPYYNPSLKSRLTISVDTSKNQFSLKLTSVTAADTAVYYCARPPTSIYDSNGYDAFEIWGQGTMVTVSS

SEQ ID NO: 2157 - protein, 126 aa, Artificial Sequence
  Synthetic construct
EEQLVQSGAEVKKPGESLKISCKGSGYRFADYWIGWVRQMPGKGLEWMGIIYPGDSDTRYSPSFQGHVTISADKSISTAYLQWRSLKASDTAMYYCARESVVVVGTTQYLRAFDIWGHGTIVTVSS

SEQ ID NO: 2158 - protein, 117 aa, Artificial Sequence
  Synthetic construct
EVQLVESGGGLVQPGGSLRLSCAASGFTFSSYWMHWVRQAPGKGLMWVSRINNDGSITNYADSVKGRFTISRDNAKNTLYLQMNSLRAEDTAVYYCVRDRLATLDYWGQGTLVTVSS

SEQ ID NO: 2159 - protein, 125 aa, Artificial Sequence
  Synthetic construct
QVQLQQSGAGLLKPSETLSLTCAVSGGSFSDYYWSWIRQPPAKGLEWIGEIFHTESANYNPSLKSRVTISVDTSKNQFSLKLTSVTAADTAVYYCARRVVSSSPLVEGRNAFDIWGQGTMVTVSS

SEQ ID NO: 2160 - protein, 123 aa, Artificial Sequence
  Synthetic construct
QVQLVESGGGVVQPGRSLRLSCAASGFVFSSYAMHWVRQAPGKGLEWVAVISYDGSKKYYADSVKGRFTISRDNPKSTLYLQMNSLRAEDTAVYYCARGPSGQNFWSGYLDYWGQGTLVTVSS

SEQ ID NO: 2161 - protein, 119 aa, Artificial Sequence
  Synthetic construct
QVQLQQWGAGLLKPSETLSLSCTLYGGSFSGYYWTWIRQPPGKGLEWIGEIDHSGSTNYNPSLKSRITISIDTSENQFSLGLNSVTAADTAVYYCARAVWIWGSQIDYWGQGALVTVSS

SEQ ID NO: 2162 - protein, 121 aa, Artificial Sequence
  Synthetic construct
QAHLVESGGGVVQPGRSLRLSCAASGFPFNTYAIHWVRQAPGKGLEWVAVISYDGNNKYYADSVKGRFTISRDNPKNTMFLQMNSLRPEDAAVYYCARARGGSYRAPHDYWGQGTLVTVSS

SEQ ID NO: 2163 - protein, 123 aa, Artificial Sequence
  Synthetic construct
QVQLQESGPGLVKPSETLSLTCTVSGGSISSYYWSWIRQPPGKGLEWIGYIYSSGTTNYNPSLKSRVTISVDTSKDQFSLKLSSVTAADTAFYYCAREAANWSDYYNGPFDYWGQGTLVTVSS

SEQ ID NO: 2164 - protein, 121 aa, Artificial Sequence
  Synthetic construct
QVQLVESGGGVVQPGRSLRLSCAASAFTFSTYAMHWVRQAPGKGLEWVAVISYDGDNKYYADSVRGRFTISRDNSKNTLYLQMNSLRAEDTAVYYCARAQSGSYYGGFDYWGQGTLVTVSS

SEQ ID NO: 2165 - protein, 115 aa, Artificial Sequence
  Synthetic construct
EVHLVESGGGFVQPGGSLRVSCAASGFTFSSYWMHWIRQAPGKGLEWVSRINSDGTSTRYADSVKGRFTISRDNAKNTLYLQMNSLRAEDTAVYYCVRDHRNDYWGQGTLVTVSS

SEQ ID NO: 2166 - protein, 123 aa, Artificial Sequence
  Synthetic construct
QVHLVQSGAEVKKPGSSVRVSCKASGGTFSNYAISWVRQAPGQGLEWMGGTVPIFGTPNYAQKFQGRVTVTADESTSTAYMDLSSLRSEDTAVYYCARFGDDMDMLNGDFDYWGQGTLVTVSS

SEQ ID NO: 2167 - protein, 127 aa, Artificial Sequence
  Synthetic construct
EVQLVESGGALVQPGGSLRLSCVASGFDFTSYWLHWVRHVSGKGLEWVSRLNSVGSDRRYSDSVRGRFIISKDLARSTVFLQMDSLTVEDTAVYYCARDRGFCTASHCPGVDAFDVWGPGTTVTVSS

SEQ ID NO: 2168 - protein, 129 aa, Artificial Sequence
  Synthetic construct
EVQLVQSGAEVKKPGESLKISCKGSGYSFTSSWIGWVRQMPGKGLEWMGIIYPGDSDTRYSPSFQGQVTISADKSIRTAYLQWSSLKASDTAMYYCARHLPTYSNYFRRNYYYYGVDVWGQGTAVTVSS

SEQ ID NO: 2169 - protein, 119 aa, Artificial Sequence
  Synthetic construct
QVQLVQSGSELKKPGASVKVSCKASGYTFTNFAMNWVRQAPGQGLKWMGWIDTNTGNPTYAQGFTGRFVFSVDTSVSTAHLQISSLKAEDTAVYYCASSPCTSCPLDYWGQGTLVTVSS

SEQ ID NO: 2170 - protein, 121 aa, Artificial Sequence
  Synthetic construct
QVTLRESGPALVKPTQTLTLTCSLSGFSVSTTGMCVSWIRQPPGKALEWLALIDWYDDKYYSTSLKTRLTISKDTSKNHVVLTMTNMDPADTATYYCARTREYTNYYMDVWGKGTTLTVSS

SEQ ID NO: 2171 - protein, 127 aa, Artificial Sequence
  Synthetic construct
QVQLVQSGAEVKKPGSSVKVSCKASGGTFSSYSITWVRQAPGQGLEWMGRIIPILGITNYAQKFQDRVTITADKSTSTANMELSSLRSEDTAVYYCARDFSSADSSDYGGLGPPDSWGQGTLVTVSS

SEQ ID NO: 2172 - protein, 126 aa, Artificial Sequence
  Synthetic construct
QVQLVQSGSELQRPGASVRVSCKASGYTFTTYAINWVRQAPGQGLEWMGWINTNTGNPTYAQDFTGRFVFSLDTSVNTAYLQISSLKAEDTAVYYCARDFDSWVRGGYYYYYMDVWGKGTTVTVSS

SEQ ID NO: 2173 - protein, 126 aa, Artificial Sequence
  Synthetic construct
QVQLQESGPGLVKPSQTLSLTCTVSGGSISSGSYYWSWIRQPAGKGLEWIGRIYTSGGTNYNPSFKSRVTISVDTSRNQFSLKLSSVTAADTAVYYCARGGPYCNGYSCYSVVSYWGQGTLVTVSS

SEQ ID NO: 2174 - protein, 128 aa, Artificial Sequence
  Synthetic construct
QVQLQESGPGLVKPSGTLSLTCAVSGASISSTNWWSWVRQPPGKGLEWIGEIYHSGSTNYNPSLKSRVTISVDKSKNQFSLKLSSVTAADTAVYYCARGYLVATVAVGVGPRHWFDPWGQGTLVTVSS

SEQ ID NO: 2175 - protein, 130 aa, Artificial Sequence
  Synthetic construct
EVQLVESGGGLVQPGVSLTLSCAASGFTFSSYPMNWVRQAPGKGLEWVSAISGSGGSTYYADSVKGRFTISRDNSKNTLYLQMTSLRAEDTAVYYCAKTDITHYDSSGYYYLPSAYFDHWGQGTLVTVSS

SEQ ID NO: 2176 - protein, 122 aa, Artificial Sequence
  Synthetic construct
QVQLQESGPGLVKPSGTLSLTCAVSGGSISSSNWWSWVRQPPGKGLEWIGEIDQSGSTNYNPSLKSRVTISVDKSKNQFSLNLTSVTAADTAVYYCARERSFWSGYYGMDVWGQGTTVTVSS

SEQ ID NO: 2177 - protein, 126 aa, Artificial Sequence
  Synthetic construct
QVQLVESGGGVVQSGRSLRLSCVASGFTFSSYGMHWVRQAPGKGLEWVAVISPDASNKYYADSVKGRLNISRDNSKNTLYVQMNSLRAEDTAVYYCAKDRPYHSGSYYRPRYLDYWGQGTPVIVSS

SEQ ID NO: 2178 - protein, 123 aa, Artificial Sequence
  Synthetic construct
QVQLVESGGGVVQPGRSLRLPCEASGFTFSDYAMHWVRQAPGKGLEWVAVISYDGTYKYYADSVKGRFTISRDSSKNTLYLHMNSLRAEDTAVYYCARAGADNSGYYYDFDYWGQGTLVTVSS

SEQ ID NO: 2179 - protein, 120 aa, Artificial Sequence
  Synthetic construct
QVQLQESGPGLVKPSETLSLSCSVSGVSISSYYWSWIRQPPGKGLEWIGYVYYTGGTNYNPSLKSRLTISVDTSKNQFSLNLSSVTAADTAVYFCARGVAVTAANWFDPWGQGTLVTVSS

SEQ ID NO: 2180 - protein, 120 aa, Artificial Sequence
  Synthetic construct
QVQLVESGGGVVQPGRSLRLSCAASGFTFSNYGMHWVRQAPGKGLEWVAVIWFDGSNKYYADSVKGRFTISRDNSKNTLYLQMNSLRAEDTAVYYCARDYGFTFGGEDYWGQGTLVTVSS

SEQ ID NO: 2181 - protein, 119 aa, Artificial Sequence
  Synthetic construct
QVQLQESGPGLVKPSGTLSLTCGVSGGSISSSNWWSWVRQPPGKGLEWIGEISHSGSTNYNPSLKSRVTISVDKSRNQFSLKVNSVTAADTAVYYCARGFLPARALDYWGPGTLVTVSS

SEQ ID NO: 2182 - protein, 125 aa, Artificial Sequence
  Synthetic construct
EVHLVESGGGLVKPGGSLRLSCAASGFRFSIYAINWVRQAPGKGLEWVSLISGSSDVISYAESVKGRFTISRDNDKNSLYLQMNSLRADDTAVYYCARISAGGLGSSGSYGFDYWGQGTLVTVSS

SEQ ID NO: 2183 - protein, 112 aa, Artificial Sequence
  Synthetic construct
QVQLQESGPGLVKPSETLSLTCTVSGDSITNYYWSWIRQPPGKGLEWIGYIYYSGSTSYNPSLKSRLTMSVDTSKNQLSLRLSSLTAADTAVYYCARGFDYWGQGTLVTVSS

SEQ ID NO: 2184 - protein, 118 aa, Artificial Sequence
  Synthetic construct
QVQLVQSGAEVKKPGSSVKVSCKASGGTFSSYVISWVRQAPGQGLEWMGGIIPIFGTPNYAQKFQGRVTITADESTSTAYMELSSLRSEDTAVYYCARWFGEDNFDYWGQGTLVTVSS

SEQ ID NO: 2185 - protein, 124 aa, Artificial Sequence
  Synthetic construct
QVQLVQSGAEVKRPGASVMVSCKASGYSLTNYYMHWVRQAPGQGLEWVGAVHPRGDTTYAPEFQGRVTMTRDTSTNTVYMELISLRSEDTAVYFCAREATPFCNYGSCWTFDSWGQGTLVAVSS

SEQ ID NO: 2186 - protein, 124 aa, Artificial Sequence
  Synthetic construct
QQQLQESGPGMVKPSETLSLTCSVSGGAITSSSYYWGWIRQPPGKGLEWIASIHYGGHSFYNPSLKSRVIVSVDTSKNQFSLKMTSVTAADTAVFYCARWLNSSGWGYNWFDPWGQGTLVTVSS

SEQ ID NO: 2187 - protein, 123 aa, Artificial Sequence
  Synthetic construct
QVQLVQSGAEVKKPGSSVKVSCKASGVTFTSSAITWVRQAPGQGLEWMGGIIPIFGTVNYAQKFQGRVTITADESTSTAYMELSSLRSEDTAVYFCALLLYDTTSRLVLDDSWGQGTLVTVSS

SEQ ID NO: 2188 - protein, 112 aa, Artificial Sequence
  Synthetic construct
QVQLQESGPGLVKPSETLSLTCTVSGDSINNYYWSWIRQPPGKGLEWIGYIYYTGNTNYNPSLKSRVTMSVDTSKNQFSLKLNSVTAADTAVYYCARGFDCWGQGTLVTVSS

SEQ ID NO: 2189 - protein, 125 aa, Artificial Sequence
  Synthetic construct
QVQLQESGPGLVKPSQTLSLTCTVSGASISSNGHYWSWIRQHPGKGLEWIGYIYFTGDTYYNPSLKSRITISIDTSKNHFSLKLSSVTAADTAVYYCSRVFIRYDTVTTYSFDYWGQGTLVTVSS

SEQ ID NO: 2190 - protein, 129 aa, Artificial Sequence
  Synthetic construct
EVQLVESGGGLVQPGGSLRLSCAASGFTFSTYSMNWVRQAPGKGLEWVSHIRGSSGNVYYVDSVKGRFTISRDNAKNSLYLQMNSLRAEDTAVYYCARDIADSKYSSGWYHYYYYMDVWGKGTTVTVSS

SEQ ID NO: 2191 - protein, 122 aa, Artificial Sequence
  Synthetic construct
DVQLLESGGDLVQPGGSLRLSCATSGFTFINYAMSWVRQAPGKGLEWVSGISGGGDRTYYADSVKGRFSISRGNSKDTLYLQMNSLRAEDTAVYYCAKEALNIVMVTAPRYWGQGTLVTVSS

SEQ ID NO: 2192 - protein, 120 aa, Artificial Sequence
  Synthetic construct
QVQLVESGGGVVQPGRSLRLSCAASGFTFSSYGMHWVRQAPGKGLEWVTVIWYDGSNKYYADSVKGRFTISRDNSKNTLYLEMNSLRAEDTAVYYCAREGVLGETGLDYWGQGTPVTVSS

SEQ ID NO: 2193 - protein, 122 aa, Artificial Sequence
  Synthetic construct
QVQLVQSGAEVKKPGSSVKVSCKASGGTFSSYAISWVRQAPGQGLEWMGGIIPIFGTTAYAQKFQGRVTVTADDSTSTAYMELSSLRSEDTAVYYCARVNQYEGSGSYGDYWGQGTLVTVSS

SEQ ID NO: 2194 - protein, 124 aa, Artificial Sequence
  Synthetic construct
QVQLVESGGGVVQPGRSLRLSCTASGFTFNNYGMHWVRQAPGKGLEWVTIISYDGSNKYYADSVKGRFTISRDNSKNTVYLQMNSLRVEDTGVYYCAKVDNSGWYHGVYDMDVWGQGTTVTVSS

SEQ ID NO: 2195 - protein, 121 aa, Artificial Sequence
  Synthetic construct
QVQLVESGGGVVQPGRSLRLSCAASGFTFSSYAMHWVRQPPGKGLEWVTLISYDGNNQYYADSVKGRFTFSRDNSKNTVYLQMNSLRAEDTALYYCARAHSGSYFGPFDYWGQGTLVTVSS

SEQ ID NO: 2196 - protein, 119 aa, Artificial Sequence
  Synthetic construct
EVQLVQSGAEVKKPGESLRISCKASGYTFTSNWITWVRQMPGKGLEWMGRIDPSDPYSNSSPSFQGHATISIDRSISTAYLQWSSLKASDTAIYYCARVNLVGGGPEYWGQGTLVTVSS

SEQ ID NO: 2197 - protein, 125 aa, Artificial Sequence
  Synthetic construct
QVQLVESGGGVVQPGRSLRLSCAASGFSFSSYAMHWVRQAPHKGLEWVAVISYHGNDKYYADSVKGRFTISRDNSKNTLFLQMNSLRPEDTAVYYCAKVAFDYVSGSPENWFDPWGQGTLVTVSS

SEQ ID NO: 2198 - protein, 130 aa, Artificial Sequence
  Synthetic construct
QVQLVESGGGVVQPGRSLKLSCAASGFTLSGYAMHWVRQAPGKGLEWVAVISYDGSNKYYADSVKGRFTISRDNSKNTLYLQMNSLRAEDTAVYYCAKSIRGYYDRSGNYYGSDWYFDLWGRGTLVTVSS

SEQ ID NO: 2199 - protein, 125 aa, Artificial Sequence
  Synthetic construct
EVQLVESGGGLVQPGRSLRLSCTASGFTFGDYAMSWFRQAPGKGLEWVGFIRSKAYGGTTEYAASVKGRFTISRDDSKSIAYLQMSSLQTEDTAVYYCTRVAESEIGGGDWFDPWGQGTLVTVSS

SEQ ID NO: 2200 - protein, 125 aa, Artificial Sequence
  Synthetic construct
QVQLVQSGAEVKKPGSSVKVSCKASGGTFSSYPITWVRQAPGQGFEWMGKIIPILGIADYAQSFQGRVTITADKSTTTAYMELSSLRSEDTAVYYCAREKGYSSSSSATYYLDFWGQGTLVTVSS

SEQ ID NO: 2201 - protein, 122 aa, Artificial Sequence
  Synthetic construct
EVQLVQSGAEVKKPGESLKISCKASGYIFTNYWIGWVRQMPGKGLEWMGIIQPRDSDIRYSPSFQGQVTISADKSINTAYLQWSSLKASDTAMYYCARHVNSGLPNWYFDLWGRGTLLTVSS

SEQ ID NO: 2202 - protein, 120 aa, Artificial Sequence
  Synthetic construct
EVQLVESGGGLVQPGGSLRLSCSASGFTFSSYPMYWVRQAPGIGLEYVSGITDNGGSTYYGDSVKGRFTISRDNSKNTLNLQMNNLRTEDTAVYYCVKGKIQLWLGADYWGQGTLVTVSS

SEQ ID NO: 2203 - protein, 119 aa, Artificial Sequence
  Synthetic construct
QLQLQESGPGLVKPSETLSLTCTVSGGPISSSSYHWGWIRQPPGKGLEWIGSIYYSGSTYYNPSLKSRVTMSVDTSKNHFSLYLSSVTAADTAVYYCARHPRWWGFDPWGQGTLVTVSS

SEQ ID NO: 2204 - protein, 120 aa, Artificial Sequence
  Synthetic construct
QITLKESGPTLVTPTQTLTLTCSFSGFSLDTIGVAVGWIRQPPGKALEWLGIVFWDGDKRYSPPLSSRLTVTKDTSKNDVVLRLTNMDSADTATYYCARLLIEHDAFDVWGQGAMVTVSS

SEQ ID NO: 2205 - protein, 129 aa, Artificial Sequence
  Synthetic construct
QVQVVQSGAEVKKPGASVKVSCKVSGYTLTELSIHWVRQAPGKGLEWMGGFDPEDAETIYAQKFQGRVTMTEDTSTDTAYMELSSLRSEDTAVYYCATATAVVLVATGGYGYHYGMDVWGQGTTVTVSS

SEQ ID NO: 2206 - protein, 124 aa, Artificial Sequence
  Synthetic construct
QVQLVQSGAEVKKPGSSVKVSCKASGGTFSNYAVSWVRQAPGQGLEWMGGIIPIFGSASYAQKFQGRVTLTADESTSTAYMELSSLRSEDTALYYCARMYYSESSGHYSLFDYWGQGTLVTVSP

SEQ ID NO: 2207 - protein, 114 aa, Artificial Sequence
  Synthetic construct
QVQLVQSGAEVKRPGASVKVSCKASGYTFITYGISWVRQAPGQGLEWMGWISAYNGSTNYAQKLQGRVTMTTDTSTSTAYMELRSLRSDDTAVYYCARGGGDSWGQGTLVTVSS

SEQ ID NO: 2208 - protein, 126 aa, Artificial Sequence
  Synthetic construct
QVQLVQSGSELKKPGASVKVSCKASGYTFTSYAMNWVRQAPGQGLEWMGWINTNTGNPTYAQGFTGRFVFSLDTSVSTAYLQISSLKAEDTAVYYCARDGEQQFSTISYYYYMDVWGKGTTVTVSS

SEQ ID NO: 2209 - protein, 126 aa, Artificial Sequence
  Synthetic construct
EVQLVQSGAEVKKPGESLKISCEGSGYRFTDYWIGWVRQMPGKGLEWLGMIYPGDSDTRYGPSFQGLVTISADKSISTAYLQWSSLKASDTAMYYCARESVVEVGSTEFLRAFDVWGQGTRVTVSS

SEQ ID NO: 2210 - protein, 124 aa, Artificial Sequence
  Synthetic construct
QVQLVESGGGVVQPGRSLRLSCAASGFSLNTYAMHWVRQAPGKGLEWVAVISYDASEKYHAESVTGRFAISRDNSKNTLYLQMHSLRPEDTAVYYCARDRLIDVIAISGAFDIWGQGTMVTVSS

SEQ ID NO: 2211 - protein, 120 aa, Artificial Sequence
  Synthetic construct
QVQLVESGGGVVQPGRSLRLSCVASGFTLSSHGFHWVRQTPGKGLQWVATISYDGSIKYYADSVTGRFTVSRDDSNNTLFVQMNSLRSEDTAVYYCARGAIASRHSFDVWGQGTVVTVSP

SEQ ID NO: 2212 - protein, 49 aa, Artificial Sequence
  Synthetic construct
GEFSLKLSSVTAADTAVYHCARVHCSRTSCYSDRAMDVWGQGTTVTVSS

SEQ ID NO: 2213 - protein, 119 aa, Artificial Sequence
  Synthetic construct
EVQLVQSGAEVKKPGESLKISCKGSGYTFTGKWIGWVRQVSGRGLEWMGSHYPGDSDTKYNPSFEGQVTISADTSIKTAYLRWNSLKASDTAMYYCVLSRAAGGWFEAWGQGTLVTVSS

SEQ ID NO: 2214 - protein, 132 aa, Artificial Sequence
  Synthetic construct
EVQLVESGGGLVQPGGSLRLSCVASGFTFNNYSVNWVRQAPGKGLEWVSYISSSGSAKYYADSVKGRFTISRDNAKNSLYLQLSSLRDEDTAVYYCATPGGDSGTLQFLERSHYHYYGMDVWGQGTTVTVSS

SEQ ID NO: 2215 - protein, 122 aa, Artificial Sequence
  Synthetic construct
QLQLQESGPGLVKPSETLSLTCTVSGGSISTSIYYWGWIRQPPGKGLEWIGSIYYSGSTHYNPSLKSRVTISVDTSKNQFSLRLTSVTAADTAVYYCARRGYDSGGYALGYWGQGTLVTVSS

SEQ ID NO: 2216 - protein, 122 aa, Artificial Sequence
  Synthetic construct
QVQLVQSGAEVTKPGSSVKVSCKASGGTFSSYAFSWVRQAPGQGLEWMGGIIPIFDTTNYAQKFQGRVTITADESTSTAYMELSSLRSEDTAVYYCASMGPYDSSGYYSDYWGQGTLVTVSS

SEQ ID NO: 2217 - protein, 124 aa, Artificial Sequence
  Synthetic construct
QVQLVESGGGVVQPGRSLRLSCAASGFTFNNYALHWVRQAPGKGLEWVAIISYDGSNKFYADPVRGRFSISRDNSKNTLYLQMNSLRAEDTAVYYCARDKLFYYGSETCYFDYWGQGTLVTVSS

SEQ ID NO: 2218 - protein, 125 aa, Artificial Sequence
  Synthetic construct
EVQLLESGGGLVQPGGSLRLSCAASGFTFSSYAMTWVRQAPGKGLEWVSTISGSGGSKYYADSVKGRFTISRDNSKNTLYLQMNSLRAEDTAVYYCAKRVREDSVWGSYSSMDVWGQGTTVTVSS

SEQ ID NO: 2219 - protein, 121 aa, Artificial Sequence
  Synthetic construct
QVHLVQSGAEVKEPGASVKVSCKVSGYTLPELSIHWVRQAPGKGLEWMGGFDPEDGETIYAQKFQGRVTMTEDTSTDTAYMELSSLRSEDTAVYYCATSPAIVRQNWFDPWGQGTLVTVSS

SEQ ID NO: 2220 - protein, 122 aa, Artificial Sequence
  Synthetic construct
EVQLLESGGGLVQPGGSLRLSCAASGFTFTNYAVSWVRQAPGKGLEWVSTISGSGDSSYYADSVKGRFTISRDNSKNTLYLQMNSLRAEDTAVYYCAKDKGEAGEGEYFHHWGLGTRVTVSS

SEQ ID NO: 2221 - protein, 118 aa, Artificial Sequence
  Synthetic construct
QVQLVQSGAEVKKPGASVKVSCKASGYTFTSYYMHWVRQAPGQGLEWMGIINPSGGSTSYAQKFQGRVTMTRDTSTSTAYMELSSLRSEDTAMYYCAGTVFGGGLDYWGQGTLVTVSS

SEQ ID NO: 2222 - protein, 119 aa, Artificial Sequence
  Synthetic construct
QITLKESGPTLVKPTQTLTLTCTFSGFSLSTSAVGVGWIRQPPGKALEWLALIYWDDDKRYSPSLESRLTITRDTSKNQVVLTMTNMDPVDTATYYCVRLTTVTIFDLWGQGTLVTVSS

SEQ ID NO: 2223 - protein, 121 aa, Artificial Sequence
  Synthetic construct
QVQLVESGGGVIQPGRSLRLSCAASGFTFSIFTIHWVRQAPGKGLEWVALISYDGSNKYYADSVRGRFTISRDSSKNTLYLQMSSLRAEDTAVYYCARGLSGGYYYGMDVWGQGTTVTVSS

SEQ ID NO: 2224 - protein, 112 aa, Artificial Sequence
  Synthetic construct
QVQLQESGPGLVKPSETLSLTCTVSGGSISGYYWSWIRQPPGRGLEWIGYTYYLGSTNYNPSLKSRVTISIHTSKNQFSLRLSSVTAADTAVYYCARGFDYWGQGTLVTVSS

SEQ ID NO: 2225 - protein, 120 aa, Artificial Sequence
  Synthetic construct
QVQLVQSGAEVKKPGASVKVSCKVSGYTLTELSMHWVRQAPGKGLEWMGGFDPEDEETIYAQKFQGRVTMTEDTSTDTAYMELSSLRSEDTAVYYCATSAPIRRSWFDPWGQGTLVTVSS

SEQ ID NO: 2226 - protein, 123 aa, Artificial Sequence
  Synthetic construct
QVTLRESGPALVKPTQTLTLTCTFSGFSLSTSGMCVGWIRQPPGKALEWLALIDWEDDKYYSTSLKTRLTISKDPSKNQVVLTMANMDPVDTARYYCARMPGIASAGGSFDFWGQGTMVSVSS

SEQ ID NO: 2227 - protein, 125 aa, Artificial Sequence
  Synthetic construct
QVHLVQSGAEVKKPGASVKVSCKVSGYTLIELSIHWVRQAPGNGLEWMGGFDPEDAETIYAQKFQGRVTMTEDTSTDTAYMELSSLRSDDTAVYYCATAPAYYDRSAYYRIFDYWGQGTLVTVSS

SEQ ID NO: 2228 - protein, 121 aa, Artificial Sequence
  Synthetic construct
EVQLVQSGGEVKKPGESLKISCKGSGYSFTNYWIGWVRQVAGKGPEWMGIIYPGDSDTRYSPSFQGQVTFSADKSISTAYLQWSSLKASDTAIYYCARHYDRGLAPRLDYWGQGTLVTVSS

SEQ ID NO: 2229 - protein, 123 aa, Artificial Sequence
  Synthetic construct
EVQLVQSGAEVKKPGESLKISCKGSGYRFISYWIVWVRQVPGKGLEWMGIIYPGDSDTRYSPSFQGQVTISADKSISTAYLQWSSLKASDTAMYYCARHLDWNAPTGGVMDVWGQGTTVTVSS

SEQ ID NO: 2230 - protein, 118 aa, Artificial Sequence
  Synthetic construct
QVQVVESGGGVVQPGRSLRLSCAASGFTFSNFPIHWVRQAPGKGLEWVAVVSYDGIHKYYADSVKGRFTIFRDNSKNMLNLQMNSLRVEDTAVYYCARGFGNWHFDLWGRGTLVTVSS

SEQ ID NO: 2231 - protein, 127 aa, Artificial Sequence
  Synthetic construct
QITLKESGPTLVKPTQTLTLTCTFSGFSLSTSGVGVGWIRQPPGKALEWLALIYWDDDKRSSPSLKSRLTITKDTSKNQVVLTMTNMDPVDTATYYCAQASGYSGYFERAFSAFDMWGQGTMVIVSS

SEQ ID NO: 2232 - protein, 123 aa, Artificial Sequence
  Synthetic construct
EVQLLESGGGLVQPGESLRLSCAASGFPFGTYAMSWVRQAPGKGLEWVSGVTDNGYSVYYADSVKGRFTISRDNTENTLHLEMNSLRAEDTAVYYCAKPRLRSTGTLYFFDYWGRGILVTVSS

SEQ ID NO: 2233 - protein, 121 aa, Artificial Sequence
  Synthetic construct
LGQLLESGGGVVQPGTSLKLSCAVSGFSFRHYAMHWVRQGPGKGLEWVAVISYDGNSQFYADSVKGRFTISRDNSKNMVSLQMNSLTSEDTALYYCVKGRQWLVREMCESWGQGTLVTVTS

SEQ ID NO: 2234 - protein, 118 aa, Artificial Sequence
  Synthetic construct
QVQLVQSGAEVKKPGSSVKVSCKASGGTFSSYGISWVRQAPGQGLEWMGGTIPIFGTPNYAQKFQGRVTITADESTSTAYMEVSSLRSEDTAVYYCYINFGESGFDIWGQGTWVTVSS

SEQ ID NO: 2235 - protein, 123 aa, Artificial Sequence
  Synthetic construct
QVQVVQSGAEVKKPGASMKVSCKTSGFSFIDYYIHWVRQAPGQGLEWMAWINPKNGGTKYAQKFQGRVTTTRDASITTAHLELASLTLDDTAVYYCARGGPIGAYAGRLLDYWGQGTLVTVSS

SEQ ID NO: 2236 - protein, 124 aa, Artificial Sequence
  Synthetic construct
QVQLVESGGGVVQPGRSLRLSCAASGFTFSVYSMHWVRQAPGKGLEWVAFISYDGSNKYYADSVKGRFTISRDNSKSTLYLQMNSLRAEDTAVYYCARDRGNDYGDEMFYFDYWGQGTLVTVSS

SEQ ID NO: 2237 - protein, 126 aa, Artificial Sequence
  Synthetic construct
QVQLQDSGPGLVKPSETLSLTCTVSGDSISSYFWSWIRQPPGKGLEWIGSIYYGGRTSYNPSLKSRVTISVDTSNNQFSLKLSSVTAADTAVYYCARQVFDLWSGYSEGEYWFDPWGQGTLVTVSS

SEQ ID NO: 2238 - protein, 121 aa, Artificial Sequence
  Synthetic construct
QVQLVQSGAEVKKPGASVKVSCKVSGYTLPELSMHWVRQAPGKGLEWMGGFDPEDGETIYAQKFQGRVTMTEDTSTDTAYMELSSLTSDDTAVYYCATAPVVVTADWFDPWGQGTLVTVSS

SEQ ID NO: 2239 - protein, 119 aa, Artificial Sequence
  Synthetic construct
EVQLVESGGGLVQPGGSLRLSCAASGFTFSDYDMHWVRQVVGKGLEWVSTIGIADDTYYPDSVKGRFTISRENGKNSLYLQMNGLRAGDTALYFCARGGFGSYFYFDCWGRGTLVTVSS

SEQ ID NO: 2240 - protein, 128 aa, Artificial Sequence
  Synthetic construct
QVQLVQSGAEVKKPGSSVKVSCKASGGTFNDYGVSWVRQAPGQGLEWMGGIIAIFGTANYAQKFQGRVAITADESTSTAYMELSGLRSEDTAVYFCASLGGDSYISGTHYDRSGYDPWGQGTLVIVSS

SEQ ID NO: 2241 - protein, 120 aa, Artificial Sequence
  Synthetic construct
EVQLVESGGGLVQPGGSLRLSCAASGFTFSSYWMNWVRQAPGKGLEWVANIKQDASEKYYVDSVKGRFTISRDNARNSLYLRMNSLRADDTAVYFCARGYYGYILPFDLWGQGTLVTVSS

SEQ ID NO: 2242 - protein, 123 aa, Artificial Sequence
  Synthetic construct
QVTLRESGPALVKPTQTLTLTCTFSGFSLSTSGMCVSWIRQPPGKALEWLALIDWDDDKYYSTFLKTRLTISKDTSKNQVVLTMTNMDPVDTATYYCARMPGIITAGAAFDFWGQGTMVTVSS

SEQ ID NO: 2243 - protein, 122 aa, Artificial Sequence
  Synthetic construct
QITLRESGPTLVKPTQTLTLTCTFSGFSLSTSGEAVGWIRQPPGKALEWLALIYWDDEKRNSPSLKSRLTLTKDTPRNQVVLTMTNVDPVDTATYYCAHKSLYDSGSYYDYWGQGTLVTVSS

SEQ ID NO: 2244 - protein, 117 aa, Artificial Sequence
  Synthetic construct
QVQLVESGGGVVQPGRSLRLSCVASGFAFSSYAMHWVRQAPGKGLEWVSFISYDGNNKYYADSVKGRFTISRDDSKNTLYLQMNRLRAEDTAVYYCARARPSTWLNWGQGTLVTVSS

SEQ ID NO: 2245 - protein, 122 aa, Artificial Sequence
  Synthetic construct
QVQLVQSGAEVKKPGSSVRVSCKASGGTFSSYAISWVRQAPGQGLEWLGGIIPIFGTAKYAQRFQGRVRITADESTRTAHMELSRLTSEDTAVYYCVRTEGYDSSGYYIDYWGQGTLVTVSS

SEQ ID NO: 2246 - protein, 125 aa, Artificial Sequence
  Synthetic construct
EVQLVESGGGLVQPGRSLRLSCAASGFTFDDYAMHWVRQAPGRGLEWVSGITWNSGTIGYADSVKGRFIISRDNAKNSLYLQMIRLRAEDTALYYCAKDMSLRDYGSGPGASDIWGQGTMVTVSS

SEQ ID NO: 2247 - protein, 102 aa, Artificial Sequence
  Synthetic construct
GFTFSAYGMHWVRQAPGTGLEWVAVISYDGSIEYYADSVKGRFTISRDNSKNTLFLQMNSLRADDTAVYYCAKMLGLYCSGGNCYSGYFDYWGQGTLVTVSS

SEQ ID NO: 2248 - protein, 118 aa, Artificial Sequence
  Synthetic construct
QVQVVESGGGVVQPGRSLRLSCAASGFTFSNFPMHWVRQAPGKGLEWVAVVSYDGPHKYYADSVTGRFTIFRDNSKNMLNLQMNSLRVEDTAVYYCARGSGNWHFDLWGRGTLVIVSS

SEQ ID NO: 2249 - protein, 117 aa, Artificial Sequence
  Synthetic construct
QVQLQQWGAGLLKPSETLSLTCAVSGGSFSGYYWSWIRQPPGKGLEWIGEINHTGIINYNPSLKSRVTISVDTSKIQFSLKLTSVTAADTAVYYCARGGRWVESHFWGQGTLVTVSS

SEQ ID NO: 2250 - protein, 120 aa, Artificial Sequence
  Synthetic construct
QVQLVESGGGVVQPGRSLRLSCAASGFTFSTYAMHWVRQAPGKGLEWVALISYDGDNKYYADSVKGRFTISRDNSKNTLYLQMNSLRAEDTAIYFCARGLGGNYYYFHHWGQGTLVTVSS

SEQ ID NO: 2251 - protein, 118 aa, Artificial Sequence
  Synthetic construct
QVQLVQSGAEVKKPGASVKVSCKASGYTFSSYGISWVRQAPGQGLEWMGWISAYNGNTNYAQKDQDRVTMTTDTSTSTAYMELRSLRSDDTAVYYCVLFGGGSHYDYWGQGTLVTVSS

SEQ ID NO: 2252 - protein, 119 aa, Artificial Sequence
  Synthetic construct
EVQLVESGGGLVQPGGSLRLSCAASGFTLSSYWMHWVRQAPGKGLAWVSRINSDGSSTYYADSVKGRFTISRDNAKNTLYLQMNSLRAEDTAVYYCARVAWGSWGMDVWGQGTTVAVSS

SEQ ID NO: 2253 - protein, 118 aa, Artificial Sequence
  Synthetic construct
QVQLVQSGTEVKKPGASVKVSCKASGYTFTSYGISWVRQAPGQGLEWMGWISAYNGNTNYAQKLQGRVTMTTDTSTSTAYMELRSLRSDDTAVYYCARGQDFGWFDPWGQGTQVTVSS

SEQ ID NO: 2254 - protein, 132 aa, Artificial Sequence
  Synthetic construct
QVQLQQWGAGLLKPSETLSLTCAVYGGSFSGYYWGWIRQPPGKGLEWIGDVIHSGTTNYNPSLKSRVTISLDTSKNLFSLKLSSVTAADTAVFYCARGMGGAARILSGGSGWPFYYHYMDVWGKGTTVTVSS

SEQ ID NO: 2255 - protein, 129 aa, Artificial Sequence
  Synthetic construct
QVQLVQSGAEVKKPGSSVKVSCKASGGTFSSSGISWVRQAPGQRLEWMGGIIPILGTPYYAQKFQGRVTITADGSTSTAYMELSSLRSEDTAVYFCARDPRAYYDILTGSKNYYYMDVWGNGTTVAVSS

SEQ ID NO: 2256 - protein, 117 aa, Artificial Sequence
  Synthetic construct
EVQLVQSGAEVKKPGESLRISCKGSGYTFTSNWITWVRQMPGKGLEWMGRIDPGDPYSNSSPSFQGHATLSLDKPSNTAYLHWSSLKASDTAMYYCARVNNGGPDYWGQGTLVTVSS

SEQ ID NO: 2257 - protein, 123 aa, Artificial Sequence
  Synthetic construct
QLQLQESGPGLVKPSETLSLTCTVSGGSISSSNYYWGWIRQPPGKGLEWIGSIYYSGITYYNPSLKSRVTMSVDTSKNQFSLNLSSVTAADTAVYYCAREDYNFSYYYGMDVWGQGTTLTVSS

SEQ ID NO: 2258 - protein, 120 aa, Artificial Sequence
  Synthetic construct
QVQLVESGGGVVQPGRSLRLSCAASGFTFSNYGMNWVRQAPGKGLEWVAIIWYGGSNTYYADSVKGRFTISRDNSKNTLYLQMNSLRAEDTAVYYCARVDSSGYYATDYWGQGTLVTVSS

SEQ ID NO: 2259 - protein, 130 aa, Artificial Sequence
  Synthetic construct
DVQLVESGGGLVQPGGSLRLSCTGSGFTFSSSWMGWVRQAPGKGLEWVANIKQDGGDKSYLDSVKGRFTISRDNAKNSLFLQMNSLRAEDTAVYYCARIRGVGDFWSGYFFVSSTYFDSWGQGTLVTVSS

SEQ ID NO: 2260 - protein, 126 aa, Artificial Sequence
  Synthetic construct
EVQLVESGGGLVQPGGSLRLSCAASGFTFSSYWMSWVRQAPGKGLEWVANIKQDGSEKYYVDSVKGRFTISRDNAKNSLYLQMNSLRAEDTAVYYCARLHSNSFRFYSYYYGLDVWGQGTTVIVSS

SEQ ID NO: 2261 - protein, 120 aa, Artificial Sequence
  Synthetic construct
QVQLVESGGGVVQPGKSLRLSCAASGITFSSYGMHWVRQAPGKGLEWVAVIWFDGSNKYYAASVKGRFTISRDNSKNTLYLQMNSLRAEDTAVYYCARDREAVAGPLDNWGQGTLVTVSS

SEQ ID NO: 2262 - protein, 124 aa, Artificial Sequence
  Synthetic construct
QITLKESGPTLVKATQTLTLTCTFSGFSLSTSGVGVGWIRQPPGKALEWLALIYWDDDKRYSPSLKRRLTITKDTSKNQVVLTMTNMDPVDTATYYCAHTGAVPPAMVGTFDIWGQGTLVTVSS

SEQ ID NO: 2263 - protein, 119 aa, Artificial Sequence
  Synthetic construct
EVQLVETGGGLIQPGGSLRLSCAASGFTITSNYMSWVRQAPGKGLEWVSILYTDGSTSYADSVKGRFTVSRDTSKNTVYLQMSSLRAEDTAIYYCARVGRGDGYRFDFWGQGTLVTVSS

SEQ ID NO: 2264 - protein, 128 aa, Artificial Sequence
  Synthetic construct
QVQLVQSGAEVRKPGASVKVSCKASGYTFTSYYIHWVRQAPGQGLEWMGVINPSGGGTSYAQQFQGRVTMTRDTSTTTVYMELSSLRSGDTAVYYCARDTSVENDTSIYLPTGDFDHWGQGTLVTVSS

SEQ ID NO: 2265 - protein, 120 aa, Artificial Sequence
  Synthetic construct
QITLKESGPTLVKPTQTLTLTCTFSGFSLSTSGVGVGWIRQPPGKALEWLALIYWDDDKRYSPSLKSRLTITKDTSKNQVVLTMTNMDPVDTATYYCAHSLGWNPKFDYWGQGTLVTVSS

SEQ ID NO: 2266 - protein, 130 aa, Artificial Sequence
  Synthetic construct
EVQLVESGGGLVQPGGSLRLSCGASGFTFSSYWMSWVRQAPGKGLEWVANIKEDGSARNYVDSVKGRFTISRDNAKNSLYLQMNSLRAEDTAVYYCARDQGSSSWYLGGEYYYYYGMDVWGQGTTVTVSS

SEQ ID NO: 2267 - protein, 120 aa, Artificial Sequence
  Synthetic construct
EVQLVESGGGLAQPGGSLRLSCAASGFTFSSFPMHWVRQAPGKGLEYVSAISSNGGSTYYADSVKGRFTISRDNSKNTLFLQMGGLRPEDMGVYYCARVPDSGDYVFDLWGRGTLVTVSS

SEQ ID NO: 2268 - protein, 126 aa, Artificial Sequence
  Synthetic construct
QITLKESGPTLVKPTQTLTLTCTFSGFSLSTSGVGVGWIRQPPGKALEWLALIYWNDDKRYSPSLKSRLTITKDTSKNQVVLTMTNMDPVDTATYYCARGRYHSSGYFHSWYFDLWGRGTLVTVSS

SEQ ID NO: 2269 - protein, 121 aa, Artificial Sequence
  Synthetic construct
EVQLVESGGGLVQPGGSLRLSCAASGFTVSSNYMSWVRQAPGKGLEWVSVIYSGGSTYYADSVKGRFTISRDNSKNTLYLQMNSLRAEDTAVYYCARDRRIVGYYYGMDVWGQGTTVTVSS

SEQ ID NO: 2270 - protein, 120 aa, Artificial Sequence
  Synthetic construct
QVQLQQWGAGLLKPSETLSLTCAVYGGSFSGYYWSWIRQPPGKGLEWIGEINHSGSTNYNPSLKSRVTISVDTSKIQFSLKLSSVTAADTAVYYCARVANWYGSSWSVNWGQGTLVTVSS

SEQ ID NO: 2271 - protein, 122 aa, Artificial Sequence
  Synthetic construct
QVQLVQSGAEVKKPGASVKVSCKASGYTFARYGINWVRQAPGQGLEWMGWISAFNGNTNYAQKFQGRVTMTTDTSTSTAYMELRSLRSDDTAVYYCARDPQVYSGHGSVDYWGQGTLVTVSS

SEQ ID NO: 2272 - protein, 121 aa, Artificial Sequence
  Synthetic construct
QVQLVESGGGVVQPGRSLRLSCAASGFTFNNYAMHWVRQAPGKGLEWVAVISYDGYNKYYADSVKGRFTISRDNSKNTLYLQMNSLRAEDTAVYYCARAYGGSYRGYFDYWGQGTLVTVSS

SEQ ID NO: 2273 - protein, 129 aa, Artificial Sequence
  Synthetic construct
QVQLVESGGGVVQPGKPLRLSCAASGFTFNNYGMHWVRQAPGKGLEWVSLIWYDGSNKYYADSLKGRFTISRDNSKNTLYLQMNSLRAEDTAVYYCARDWGYYDFWRDGGRYYSGMDVWGLGTTVTVSS

SEQ ID NO: 2274 - protein, 126 aa, Artificial Sequence
  Synthetic construct
QMQLVQSGPEVKKPGTSVKVSCKASGFTFTNSAMQWVRQARGQRLEWIGWIVVGSDNTNYAQKFQERVTITSDMSTSTAYMELSSLRSEDTAVYYCAAGGLFQVLDSGTDDGFDIWGQGTMVTVSS

SEQ ID NO: 2275 - protein, 123 aa, Artificial Sequence
  Synthetic construct
RVQLQESGPGLVKSPGTLSLSCTVSGASVTDYYWTWIRQSPGKGLEWIGYIYYTGIIDYNPSLKSRVTLSIDTVNNQVSLTLSSVTAADTAMYYCARVYSSGWRLYYSGIDVWGQGTAVNVSS

SEQ ID NO: 2276 - protein, 122 aa, Artificial Sequence; identical to SEQ ID NO: 1912
  Synthetic construct

SEQ ID NO: 2277 - protein, 112 aa, Artificial Sequence
  Synthetic construct
QVQLQESGPGLVKPSETLSLACTVSGGSISSYYWTWIRQPPGKGLEWIGYVYDSDNTNYNPSLKSRVTISVDTSKNQFSLKLSSVTAADTAVYYCARGFDSWGQGTLVTVSS

SEQ ID NO: 2278 - protein, 121 aa, Artificial Sequence
  Synthetic construct
QVQLVQSGAEVRKPGASVKVSCKASGHTFSAYYIHWVRQAPGQGLEWMGWINGNSGGTQYAQKFQGWVTMTRDTSIYTAYMELSRLTSDDTAVYYCARENIAARPYGMDVWGQGTPVTVSS

SEQ ID NO: 2279 - protein, 127 aa, Artificial Sequence
  Synthetic construct
EEQLVESGGGLVQPGGSLRLSCAASGFSFSTYETSWVRQAPGKGLEWVSSISASGGSTYYADSVRGRFTISRDNSKNTLYLQMNSLRAEDTAVYYCAKEMVRGAYGGRTYNYYMDVWGKGTTVTVSS

SEQ ID NO: 2280 - protein, 122 aa, Artificial Sequence
  Synthetic construct
QVQLVESGGGVVQPGRSLRLSCAASGFTFSNYGMHWVRQAPGKGLEWVAVIWYDGSNKYCADSVKGRVTISRDNSKNMLYLEMNSLRVEDTAVYYCAREGAGTDFYNGVDVWGQGTTVTVSS

SEQ ID NO: 2281 - protein, 129 aa, Artificial Sequence
  Synthetic construct
ELQLVESGGGLVKPGGSLRLSCAASGFFFNSYIMNWVRQAPGKGLEWVSSISSVNGSIYYADSVKGRFTISRDNAKNSLYLQMNSLSAEDTAVYYCARDSFRGVGVTAMDYYFYGMDVWGQGTTVTVSS

SEQ ID NO: 2282 - protein, 126 aa, Artificial Sequence
  Synthetic construct
QVQLVQSGAEVKKPGASVKVSCKASGYTFIGYYIHWVRRAPGQGLEWMGWINPNSGRTNYAQNFQGWVTMARDTSISTAYMELSSLRSDDTAVYYCAREMGIGGGDLYYNYGMDVWGQGTTVTVSS

SEQ ID NO: 2283 - protein, 127 aa, Artificial Sequence
  Synthetic construct
EVQLVQSGAEVKKPGESLKISCKGSGYNFSSYWIGWVRQKPGKGLEWMGIIYPGDSNIRYSPSFQGQVTISADKSINTAYLQWSSLKASDTALYYCARGRISYVLRFLEWLPDFDYWGQGTLVTVSS

SEQ ID NO: 2284 - protein, 128 aa, Artificial Sequence
  Synthetic construct
QVQLQESGPGLVKPSETLSLTCIVSGYSISSGYYWGWIRQPPGKGLEWIGSIHHSGSTYNNPSLKSRVTISVDTSKNQFSLKLSSVTAADTAVYYCAREAGLRYFDRFRYLYNWFDPWGQGTLVTVSS

SEQ ID NO: 2285 - protein, 122 aa, Artificial Sequence
  Synthetic construct
QMVLAESGGGVVQPGGSLRLSCAASGLPIGVYSMVWVRQAPGKGLEWVAVIQHNGNDKFYADSVKGRYTISRDNSKNTLYLQMNSLRFEDTALYYCVRVGFGWSYGSGFDPWGQGTLVIVSS

SEQ ID NO: 2286 - protein, 122 aa, Artificial Sequence; identical to SEQ ID NO: 2215
  Synthetic construct

SEQ ID NO: 2287 - protein, 124 aa, Artificial Sequence
  Synthetic construct
QVQLVQSGGDVKKPGSSVKVSCKASGGVFRSHAISWVRQAPGQGLEWMGGIIAIFGTAHYAQKFQGRVTITADESTNTAYMELSSLTSEDTAVYYCARGGGYHIVGATSSLGYWGQGTLVIVSS

SEQ ID NO: 2288 - protein, 127 aa, Artificial Sequence
  Synthetic construct
QLQLQESGPGLLKPSETLSLTCFVSGGSISSSSYYWGWIRQPPGKGLEWIGNIYYNVSTNYNPSLKSRVTISLDTSKNQLSLRLSSVTAADTAVYFCARVPLITIFGVVFPYGMDVWGLGTTVTVSS

SEQ ID NO: 2289 - protein, 117 aa, Artificial Sequence
  Synthetic construct
QVHLQESGPGLVKPSGTLSLTCAVSGGSISSGHWWGWVRQPPGKGLEWLGEIYYSGNINYNPSLRSRVSISVDRSKTHFSLKLTSVTAADTAVYYCARDSSGNFDYWGQGILVTVSS

SEQ ID NO: 2290 - protein, 122 aa, Artificial Sequence
  Synthetic construct
EVQLVESGGGLVQPGGSLRLSCAASGFPLSDYWVQWVRQAPGKGLVWVSRINSDGSSTTYADSVKGRFIISRDNAKNTVYLQMNSLRGEDTAVYYCGRRGNSYYYYYGMDVWGQGTTVIVPS

SEQ ID NO: 2291 - protein, 129 aa, Artificial Sequence
  Synthetic construct
QITLKESGPTLVRPTQTLTLTCTFSGFSLTTTGVGVGLIRQPPGKALEWLALIYWDDDKRYNPSLKSRLTITKDTSKNQVVLTMTNMDPEDTATYYCAHIPPKITFFGVVAVEVFFDQWGQGTLVTVSS

SEQ ID NO: 2292 - protein, 121 aa, Artificial Sequence
  Synthetic construct
QVQLVESGGGVVQPGRSLRLSCVASGLTFSNYGMHWVRQAPGKGLEWVAVIWFDGSNKYYADSVKGRFTISRDNSKNTLYLQMDSLRAEDTAVYYCAREDAYDLLGTLDYWGQGTPVTVSS

SEQ ID NO: 2293 - protein, 117 aa, Artificial Sequence
  Synthetic construct
EVQLVESGGDLVQPGGSLRLSCAASGFSFRIYSMNWVRQAPGKGLEWISYIRGGSSVTHYADSVKGRFTISRDDAKSSLYLQMDSLRDEDTAVYYCARGVQYASDVWGQGTLVTVSS

SEQ ID NO: 2294 - protein, 118 aa, Artificial Sequence
  Synthetic construct
EVQLEQSGAEVKKPGESLKISCKVSGYSFISNWIGWVRQMPGKGLEWMGIIYPGDSDTRYSPAFQGQVTISADKSISTAYLQWSSLKASDTAMYYCARRGSSWEIDYWGQGTLVTVSS

SEQ ID NO: 2295 - protein, 128 aa, Artificial Sequence
  Synthetic construct
QVQLVQSGAEVKKPGSSVNVSCKASGGTFSRYAFSWVRQAPGQGLEWMGGIIPIFGTANYAQKFQDRVTITADESTSTVYMELSSLRSEDTAVYYCTRVPWYYDRSGHYQADEYFQHWGQGTLVTVSS

SEQ ID NO: 2296 - protein, 126 aa, Artificial Sequence
  Synthetic construct
EVQLLESGGGLVQPGGSLRLSCAASGFTFSSYAMTWVRQAPGKGLEWVSTMTGSGGGAYYADSLRGRFTISRDNSKNTLYLQMKSLRAEDTAVYYCAKDMLSYYDSRGYSYYFDLWGLGTLVTVSS

SEQ ID NO: 2297 - protein, 122 aa, Artificial Sequence
  Synthetic construct
QVQLVQSGAEVKKPGSSVKVSCKASGGTLSSYTISWVRQAPGQGLEWMGRIIPILGIANYAHKFQGRVTITADKSTSTAYMDLGSLRYEDTAVYYCAREGGCSGADCHCDIWGQGTMVTVSS

SEQ ID NO: 2298 - protein, 126 aa, Artificial Sequence
  Synthetic construct
EAQLWESGGGLAQPGGSLRLSCAASGFTFKSYAMSWVRQAPGKGLEWVAAISDSGGSTFYADSVKGRFTISRDNSKNTLYLQMNSLRAEDTAIYFCAKDFGLLWFGKLFSGVFDIWGQGTMVTVSS

SEQ ID NO: 2299 - protein, 121 aa, Artificial Sequence
  Synthetic construct
QVQLVEAGGGVVQPGRSLRLSCAASGFPFSNYGMHWVRQAPGKGLEWVAVIWYDGSNKDYADSVKGRFTISRDNSKNTLYLQMNSLRAEDTAVYYCASATYTPGGDYFDYWGQGTLVTVSS

SEQ ID NO: 2300 - protein, 122 aa, Artificial Sequence
  Synthetic construct
QVQLVQSGAEVKKPGSSVKVSCKASGGTFTSYAISWVRQAPGQGLEWMGGIIPIFGTTNHAQKFQGRVTFTADESTSTAYMELSSLRSEDTAVYYCARVTGYDSSGYWGDYWGQGTLVTVSS

SEQ ID NO: 2301 - protein, 124 aa, Artificial Sequence
  Synthetic construct
QVQLVESGGGVVQPGRSLRLSCAASGFTFSSYAMHWVRQAPGKGLEWVAVISYDGSNKYYADSVKGRFTISRDNSKNTLYLQMNSLRAEDTAVYYCASNYIVVVVAAMSMDDYWGQGTLVTVSS

SEQ ID NO: 2302 - protein, 125 aa, Artificial Sequence
  Synthetic construct
EVQLVESGGGLVQPGRSLRLSCAASGFTFDDYAMHWVRQAPGKGLEWVSGISWNSGTIGYADSVKGRFTISRDNAKNSLYLQMNSLRAEDTALYYCARAPCGGDCYEDYYYMDVWGKGTTVTVSS

SEQ ID NO: 2303 - protein, 118 aa, Artificial Sequence; identical to SEQ ID NO: 2234
  Synthetic construct

SEQ ID NO: 2304 - protein, 123 aa, Artificial Sequence
  Synthetic construct
QVQLVQSGAEVKKPGASVKISCKASGYSFSDYYIHWLRQAPGQGLEWMGIINSRGGSTSYRNNFQGRVTMTTDTSTSTVYMQLSGLRSEDTAMYFCARPSRQSRFSSGAFQHWGQGTRVTVSS

SEQ ID NO: 2305 - protein, 121 aa, Artificial Sequence
  Synthetic construct
QVQLVQSGAEVKKPGASVRVSCKVSGYTLPELSIHWVRQAPGKGLEWMGGFHPEDGETVYAQKFQGRVTMTEDTSTDTAYMDLSSLRVEDTAVYYCATGPPIGVVNWLDPWGQGTLVTVSS

SEQ ID NO: 2306 - protein, 120 aa, Artificial Sequence
  Synthetic construct
QVQLQESGPGLVKPSETLSLTCTVSAYSINSGYYWGWIRQPPGKGLEWIGSINHSGSTYYNPSLKSRVTISVDTSKNQFSLKLSSVTAADTAVYYCARVKTTSGGYMDVWGKGTTVTVSS

SEQ ID NO: 2307 - protein, 121 aa, Artificial Sequence
  Synthetic construct
QVQLVESGGGVVQPGRSLRLSCAASRFTFSLYGMHWVRQAPGKGLEWVALIWHDGTNKYYADSVKGRFTISRDNSENTVYLQMNSLRAEDTAFYFCAREGIVATITGLDVWGQGTTVSVSS

SEQ ID NO: 2308 - protein, 128 aa, Artificial Sequence
  Synthetic construct
QVQLVQSGAEVKKPGSSVKVSCTASGGTFSDYPISWVRQAPGQGLEWMGGLIPMFGTPNYAQKFQGRVTITADESTSTAYMELSSLRYEDTAVYYCASLGGDYYDSGTYYNNSDFDPWGQGTLVTVSS

SEQ ID NO: 2309 - protein, 122 aa, Artificial Sequence
  Synthetic construct
EVQLLESGGDLVQPGGSLRLSCTVSGFIFSRSAMSWVRQAPGKGLEWVSAISGTGDTTYYADSVKGRFSISRDNSKNTLYLQMNSLRAEDTAVFYCAKDLFSGPGGSVLEFWGQGTLVTVSS

SEQ ID NO: 2310 - protein, 128 aa, Artificial Sequence
  Synthetic construct
QVQLQESGPGLVKPSETLSLTCTVSGYSISSGYYWGWIRQPPGKGLEWIGSIYHSGSTYYIPSLKSRVTISVDTSKNQFSLRLSSLTAADTAVYYCARSLISYSYDSSGYINWYFDLWGRGTLVTVSS

SEQ ID NO: 2311 - protein, 123 aa, Artificial Sequence
  Synthetic construct
QLQLQESGPGLVKPSETLSLTCTVSGASISSSSYYWGWIRQPPGRGLEWIGSIYYSGSTYYIPSLESRVTISVDTSKNQFSLKVSSVTAADTAVYYCARRPLAAVGYWYFDLWGRGTLVTVSS

SEQ ID NO: 2312 - protein, 124 aa, Artificial Sequence
  Synthetic construct
HVQLVQSGAEVKKPGASVNVSCKASGYTFTDYYIHWVRQAPGQGLEWMGIISPSYGGTSYAQKWQGRVSMTRDTSTSTLYMELSSLRSDDTAVYYCARDPSRPSYGDNDAFDVWGHGTMLTVSS

SEQ ID NO: 2313 - protein, 127 aa, Artificial Sequence
  Synthetic construct
QVTLKESGPVLVKPTETLTLTCTVSGFSISSARMGVSWIRQPPGKALQWLTHIFSNDEKSYNTSLKSRLTISKDTSRSQVVLTMTNMDPVDTASYYCARILAVHYDSSGRTYYLDYWGQGTPVTVSS

SEQ ID NO: 2314 - protein, 123 aa, Artificial Sequence
  Synthetic construct
EVQLLESGGGLVQPGGSLRLSCAASGFTFNRHAMSWVRQAPGKGLEWVSGITGSGGSTYYADSVKGRFTISRDNSKNTLFLQMNSLRVEDTAVYYCAKDRSLYGDYDSVFDYWGQGILVTVSS

SEQ ID NO: 2315 - protein, 125 aa, Artificial Sequence
  Synthetic construct
QVQLVQSGSELKKPGASVKVSCKASGYTFTNYAMNWVRQAPGQGLEWMGWINTNTGNPTYAQGFTGRFVFSLDTSVRTAYLQITSLKPEDTAVYYCARDGGLTMPTFDYYYMDVWGRGTTVTVSS

SEQ ID NO: 2316 - protein, 126 aa, Artificial Sequence
  Synthetic construct
QVQLVQSGAEVKKPGASVKVSCKASGYTFTSYGISWVRQAPGQGLEWMGWISPYNAKTNYAQKLQGRVTMTTDTSTSTAYMELRSLSSDDTAVYYCASGTSLVWFGDPYIPNLDYWGQGSLVTVSS

SEQ ID NO: 2317 - protein, 120 aa, Artificial Sequence
  Synthetic construct
QVQLVESGGGVVQPGRSLRLSCAASGFTFSSYGMHWVRQAPGKGLEWVAVISYDGSNKYYADSVKGRFTISRDNSKNTLYLQMNSLRAEDTAVYYCAKGLVVGATYFDYWGQGTLVTVSS

SEQ ID NO: 2318 - protein, 120 aa, Artificial Sequence
  Synthetic construct
QVQLVESGGGVVQPGKSLRLSCAASGFTFSSYAMHWVRQAPGKGLEWLAVISYDGEKKYYADSVKGRFTISRDNSKNTVYLQMNSLRAEDTAVYYCAADSSGYYGVLGKWGQGTLVTVSS

SEQ ID NO: 2319 - protein, 119 aa, Artificial Sequence
  Synthetic construct
QVQLVESGGGVVQPGRSLRLSCAASGFTFSNFAMHWVRQAPGKGLEWVAVISYDGNNKYYADSVKGRFIISRDNSRNTLHLQMNSLRADDAAVYYCAAVTGITLGMDVWGQGTTVTASS

SEQ ID NO: 2320 - protein, 125 aa, Artificial Sequence
  Synthetic construct
QVQLVQSGAEVKKSGSSVKVSCKASGGTFSTYPISWVRQAPGQGLEWMGKIIPILGVADYTQKFQGRVTITADKSTSTAYMELSSLRSEDTAMYYCAREKGYSSLSSATYFFDYWGQGTLVTVSS

SEQ ID NO: 2321 - protein, 116 aa, Artificial Sequence
  Synthetic construct
EVQLVESGGGLVQPGGSLRLSCAASGFTVSSNYMSWVRQAPGKGLEWVSVIYGGGSTYYADSVKSRFTMSRDNSKNTLYLQMNSLRPEDTAVYYCARVVSDAFDIWGQGTVVTVSS

SEQ ID NO: 2322 - protein, 123 aa, Artificial Sequence
  Synthetic construct
EVQLLESGGGLVQPGGSLRLSCAASGFTFSSYAMNWVRQAPGKGLEWVSAISGSGGSTYYTDSVKGRFTISRDNSKNTLYLQMNSLRAEDTAVYYCAKDLSGVTAASDAFDVWGQGTMVTVSS

SEQ ID NO: 2323 - protein, 120 aa, Artificial Sequence
  Synthetic construct
QVQLQESGPGLVKPSETLSLTCTVSGDSMRNYYWSWIRQSPGKGLEWIGYILYSGSTDYNPSLKGRVTISVDTSKKQFSLKLSSVTAADTAVYYCAREVPWFGDGGMDVWGQGTTVTVSS

SEQ ID NO: 2324 - protein, 129 aa, Artificial Sequence
  Synthetic construct
QVQLVQSGSELKKPGASVKVSCKASGYTFTSYAMNWVRQAPGQGLEWMGWINTNTGNPTYAQGFTGRFVFSLDTSVSTAYLQISSLKAEDTAVYYCARKFDSSNWYALSGYYYYYMDVWGKGTTVTVSS

SEQ ID NO: 2325 - protein, 130 aa, Artificial Sequence
  Synthetic construct
QMQLVQSGAEVKKPGSSVKVSCKASGGTFSTFAITWVRQAPGQGLEWMGGIIPIFGTANYAQKFQGRVTITADESTSTAYMELSSLRSDDTAVYYCARGGFGVPAASAYDRYHYYYMDVWGKGTTVIVSS

SEQ ID NO: 2326 - protein, 121 aa, Artificial Sequence
  Synthetic construct
QVQLVQSGAEVKKPGASVKVSCKVSGYTLPELSIHWVRQAPGKGLEWMGGFDPEDGETIYAQKFQGRVTMTEDTSTDTAYMELSSLRSDDTAVYYCATSPALVRQNWFDPWGQGTLVTVSS

SEQ ID NO: 2327 - protein, 120 aa, Artificial Sequence
  Synthetic construct
EVQLVESGGGLVQPGRSLRLSCAASGFTLGNYGMHWVRQAPGKGLEWVSGISWDSVSIGYADSVRGRFTISRDKAKNSLYLQMNSLSAEDTALYYCAKGGDQWLATLDHWGQGTLVSVSS

SEQ ID NO: 2328 - protein, 119 aa, Artificial Sequence
  Synthetic construct
EVQLVESGGGLIQPGGSLRLSCAASGFIVSNNYMSWVRQAPGKGLEWVSIIYSGGTTYYADSVKGRFTVSRDNSKNTLYLQMNSLRAEDTAVYYCASLLEWSSYGMDVWGQGTTVTVSS

SEQ ID NO: 2329 - protein, 120 aa, Artificial Sequence
  Synthetic construct
QVQLVESGGGVVQPGRSLRFSCAASGFIFSSYAMHWVRQAPGKGLEWVAVISYDGSNKYYADSVKGRFIISRDNSKNTLFLQMSSLRVEDTAVYYCARVNGGGYDLPDYWGQGTLVTVSS

SEQ ID NO: 2330 - protein, 120 aa, Artificial Sequence
  Synthetic construct
QVQLRQWGAGLLKPSETLSLTCAVYGGSFSDYYWTWIRQPPGKGPEWIGDVNHSGSTNDNPSLRSRVTISVDTSKNQFSLDLRSVTAADTAVYYCARGGPRFLRTHFDLWGQGILVSVSS

SEQ ID NO: 2331 - protein, 120 aa, Artificial Sequence
  Synthetic construct
QVQLVQSGGAVVQPGRSLRLSCAASGFTLSSHGFHWVRQTPGKGLQWVATISFDGSIKYYADSVTGRFTISRDDSNNTLFLQMNSLRSEDTAVYYCARGAIASRHAFDVWGQGTVVTVSP

SEQ ID NO: 2332 - protein, 125 aa, Artificial Sequence
  Synthetic construct
QVQLVESGGGLVKPGGSLRLSCAASGFTFSDYYMSWIRQAPGKGLEWVSYISSSGSTIYYADSVKGRFTISRDNAKNSLYLQMNSLRAEDTAVYYCAREGYSNSGWYETYYFDYWGQGTLVTVSS

SEQ ID NO: 2333 - protein, 119 aa, Artificial Sequence
  Synthetic construct
EVQLVESGGGLVQPGGSLRLSCAASGFTFSFYWMSWVRQAPGKGLEWVANIKQDGSEKYYVDSVKGRFAVSRDNAKNSLYLQMNSLRGEDTAVYYCATLGSSSWSFDYWGQGTLVTVSS

SEQ ID NO: 2334 - protein, 123 aa, Artificial Sequence
  Synthetic construct
EVQLVQSGAEVKKPGESLKISCKASGYSFTSYWIGWVRQMPGKGLEWMGIIYPGDSDTRYSPSFQGQVTISADKSISTAYLQWSSLKASDTAIYYCATISVRDSSGPTAFDIWGQGTMVTVSS

SEQ ID NO: 2335 - protein, 129 aa, Artificial Sequence
  Synthetic construct
QVQLVQSGSELKKPGASVKVSCKASGYTFISYGMHWVRQAPGQGLEYMGWINTNTGNPTYAQGFTGRFVFSLDTSVSTAYLQISSLKAEDTAVYYCARAERDIVVVGTAIDYFYYMDVWGKGTTVTVSS

SEQ ID NO: 2336 - protein, 121 aa, Artificial Sequence
  Synthetic construct
QLQLQESGPGLVKPSETLSLTCTVSGDSISSSIYYWGWIRQAPGKGLEWIGSFYYYGNTYYNPSLKSRVSMSVDTSKNQFSLNLTSVTAAETAVYYCAATSDIVTAIGNYWGQGTLVTVSS

SEQ ID NO: 2337 - protein, 127 aa, Artificial Sequence
  Synthetic construct
QLQLQESGSGLVKPSQTLSLTCTVSGGSISGGGYCWSWIRQPPGKGLEWIGYIYDSGSTDYNPSLKSRVTISVDRSKRQFSLKLSSVTAADTAVYYCARGGYYDSSAYFYVAGFDYWGQGALVTVSS

SEQ ID NO: 2338 - protein, 124 aa, Artificial Sequence
  Synthetic construct
QVQVVESGGGVVQPGRSLRLSCAASGFTFSSYAMHWVRQAPGKGLEWVTVISYDGSNKYYADSVKGRFTISRDSSKNTLYLQMNSLRAEDTALYYCARGGYFDLLIGPGYFDYWGQGTLVTVSS

SEQ ID NO: 2339 - protein, 122 aa, Artificial Sequence
  Synthetic construct
QVQLVESGGGVVQPGRSLRLSCAASGFTFRTYAMHWVRQAPGKGLEWVALISYDGNHKYYAGSVKARFTISRDNSRNTLYLQMSSLRPEDTALYYCASGHCPAGSCPNFDYWGQGTLVTVSS

SEQ ID NO: 2340 - protein, 120 aa, Artificial Sequence
  Synthetic construct
QVQLQESGPGLVKPSETLSLTCTVSGGSISSDYWSWIRQPSGKGLEWIGYIYYTGSTNYNPSLRSRVTMSVDTSKNQFSLKLRSVTAADTAVYYCARHGAEGYYYAMDVWGQGTTVTVSS

SEQ ID NO: 2341 - protein, 124 aa, Artificial Sequence
  Synthetic construct
QVQLVESGGGVVQPGRSLRLSCAASGFTFSSYAMHWVRQAPGKGLQWVAIISYDGSTYYYADSVKGRFTISRDNSKNTLYLQMNSLGAEDTAVYYCAREKQWLVSNYYYYMNVWGRGTTVTVSS

SEQ ID NO: 2342 - protein, 124 aa, Artificial Sequence
  Synthetic construct
DMQVVESGGGLVQPGGSLRLSCAASGFTVSTNHMSWVRQAPGKGLEWVSVIYSGDSTYYEDSVKGRFTISRDYSKNTLFLQMNSLRAEDTAVYYCARVGHNSGRGWHYYYMDVWGKGTTVAVSS

SEQ ID NO: 2343 - protein, 127 aa, Artificial Sequence
  Synthetic construct
EVQLVESGGGLVKPGGSLRLSCAASGFTFSNAWMSWVRQAPGKGLEWVGRIKSKTDGGTTDYAAPVKGRFTISRDDSKNTLYLQMNSLKTEDTAVYYCTTERLYDYVWGSYRTFDYWGQGTLVTVSS

SEQ ID NO: 2344 - protein, 120 aa, Artificial Sequence
  Synthetic construct
QVQLVESGGGVVQPGRSLRLSCAASGFTFNSYAMHWVRQAPGKGLEWVAVISYDGSNKYYADSVKGRFTISRDNSKSTLYLQMNSLRAEDTAVYYCAKGGGSYYYYFDLWGRGTLVTVSS

SEQ ID NO: 2345 - protein, 122 aa, Artificial Sequence
  Synthetic construct
EVQLVESGGGLVKPGGSLRLSCAASGFTFSSYSMNWVRQAPGKGLEWVSSLSSSSNFIYYSDSVKGRFTISRDNAKNSLYLQMNSLRAEDTAVYYCARDSASGWYVDALDIWGQGTMVTVSS

SEQ ID NO: 2346 - protein, 126 aa, Artificial Sequence
  Synthetic construct
EVQLVQSGAEVKKPGESLRISCKGSGYRFTNYWIGWVRQMPGKGLEWMGIIYPGDSDTRYSPSFQGQVIFSADKSISTAYLHWSSLKATDIAMYYCARKTGPSYYDFSGKDAFDIWGQGTLVTVSS

SEQ ID NO: 2347 - protein, 122 aa, Artificial Sequence
  Synthetic construct
QVQLVESGGGVVQPGRSLRLSCAASGFTFSSYAMHWVRQAPGKGLEWVAVISYDGSNKYSADSVKGRFTISRDNSKNTLYLQMNSLRAEDTAVYYCARESSGDYPLYYFDYWGQGTLVTVSS

SEQ ID NO: 2348 - protein, 117 aa, Artificial Sequence
  Synthetic construct
EVQLLESGGGLVQPGGSLRLSCAASGFTFSSYAMTWVRQAPGKGLEWVAAITSGSSSTYFADSVKGRFTISRDNSKNTLYLQMNSLRVEDTALYYCAKGVLRYLDYWGQGTLVTVSS

SEQ ID NO: 2349 - protein, 123 aa, Artificial Sequence
  Synthetic construct
QLQLQESGPGLVKPSETLSLTCSVSGDAIGSSSSYWGWIRQPPGKGLEWIGSIYYSGTTYYNPSLKSRVTISVASSKNQFSLKLSSVTAADTAVYYCARHWGGSFFGVWFDPWGQGILVTVSS

SEQ ID NO: 2350 - protein, 116 aa, Artificial Sequence
  Synthetic construct
QVQLVQSGAEVKKPGASVKVSCRASGDTFSRYYMHWVRQAPGQGLEWMGIVNPSGESTGYAQKFQGRLTMTRDTSTRTAYMELSSLTSEDTAVYYCFLVASPFECWGQGTLVTVSS

SEQ ID NO: 2351 - protein, 128 aa, Artificial Sequence
  Synthetic construct
EVQLVESGGGLVKPGGSLRLSCAASGFNFSNYNMNWVRQAPGKGLEWVSSISSRSSFIYYADSVTGRFTISRDNAKNSLYLQMNSLRAEDTAVYYCARDPGHDFWSTLAYYYYGMDVWGQGTTVTVSS

SEQ ID NO: 2352 - protein, 121 aa, Artificial Sequence
  Synthetic construct
EVQLVQSGAEVIQPGESLKISCKGSGYSFTNYYIAWVRQMPGKGLEWMGVTYPGDSETRYSPSFEGQVTISADKSISTVYLQWSSLKASDTAVYYCARLFVVVTEIVFDIWGQGTVVTVSS

SEQ ID NO: 2353 - protein, 123 aa, Artificial Sequence
  Synthetic construct
QVRLQQWGAGLLRPSETLSRTCAVYGGSFSGYFWSWVRQPPGKGLEWIAEINHSGSANYNPSLKSRVTISIDTSKNQFSLRLNSLTAADTAVYYCARGTGGSSWFANYYFDYWDQGTLVTVSS

SEQ ID NO: 2354 - protein, 124 aa, Artificial Sequence
  Synthetic construct
EVQLVQSGAEVKKPGESLKISCEASGFSLANFWIAWVRQMPGLGLEWMGMQYPGDSDTRYSPSFQDQVTITADKSINTAYLQWRRLKASDTATYFCARLSSYGTGTYSYALDVWGQGTTVTVSS

SEQ ID NO: 2355 - protein, 125 aa, Artificial Sequence
  Synthetic construct
QVQLVQSGAEVKKPGSSVKVSCKASGGTFSSYTITWVRQAPGQGLEWMGGIIPIFGTVNYAQRLQGRVTISADESTSTAYMELSSLRSEDTAVYYCARSQAIRVSYYYYYGMDVWGQGTTVTVSS

SEQ ID NO: 2356 - protein, 120 aa, Artificial Sequence
  Synthetic construct
QVQLVESGGGVVQPGRSLRLSCAASGFTFSAYVMHWVRQAPGKGLEWVAVISSDGSSTYHADSVKGRFSISRDNSKSTLYLEMNSLRAEDTAVYYCARNHYDRSDAFDMWGQGTMVTVSL

SEQ ID NO: 2357 - protein, 127 aa, Artificial Sequence
  Synthetic construct
QVQLVQSGAEVKKPGSSVKVSCKASGDTFSSHSISWVRQAPGQGLEWMGRIIPILGTANYAQKFQGRVTITADKSTSTAYMELSSLRFEDTAVYYCARDGTYGAAGEVSLPYYFDYWGQGTLVTVSS

SEQ ID NO: 2358 - protein, 122 aa, Artificial Sequence
  Synthetic construct
EVQLLESGGGLVQPGGSLRLSCAASGFTFSSYAMSWVRQGPGKGLDWASSISGGGGSTYYADSVKGRFTMSRDNSKNTLYLQMNSLRAEDTAVYYCAKTRSWSGYPRYFDLWGRGTLVTVSS

SEQ ID NO: 2359 - protein, 119 aa, Artificial Sequence
  Synthetic construct
EVQLVESGGGLVQPGGSLRLSCAASGFRFSYYWMRWVRQAPGKGLEWVANIKQDGSEKYYVDSVKGRFTISRDNAKNSLYLQMNSLRAEDTAVYYCARDRGGSYHFDYWGQGILVTVSS

SEQ ID NO: 2360 - protein, 122 aa, Artificial Sequence
  Synthetic construct
QLQLQESGPGLVKPSETLSLTCTVSGGSISTSIYYWGWIRQPPGKGLEWIGSIYYSGSTHYNPSLKSRLTISVDTSKNQFSLRLTSVTAADTAVYYCARRGYDSGGYALGYWGQGTLVTVSS

SEQ ID NO: 2361 - protein, 119 aa, Artificial Sequence
  Synthetic construct
QVQLVQSGAEVKKPGASVKVSCKASGYTFTSYAMHWVRQAPGQRLEWMGWINAGNGNTKYSQKFQGRVTITRDTSASTAYMELSSLRSEDTAVYYCAREGYYGSGPDYWGQGTLVTVSS

SEQ ID NO: 2362 - protein, 122 aa, Artificial Sequence
  Synthetic construct
EVQLVESGGGLVKPGGSLRLSCAASGFSFSSYHMNWVRQAPGKGLEWVSSISSSRSFIYYSDSVKGRFTISRDNAKNSLYLQMNSLRAEDTAVYFCARDRDRTTVIDAFDIWGQGTLVTVSS

SEQ ID NO: 2363 - protein, 117 aa, Artificial Sequence
  Synthetic construct
EVQLVESGGGLIQPGGSLRLSCAASGVIVSRNYMSWVRQAPGKGLEWVSVIYSGGSTFYADSVKGRFTISRDNSKNTLYLQMSSLRAEDTAVYYCARDLDVGGMDVWGQGTTVSVSS

SEQ ID NO: 2364 - protein, 95 aa, Artificial Sequence
  Synthetic construct
GFSFSNYNMNWVRQAPGKGLEWVSYISSSSSTIFYADSVMGRFTISRDNAKNSLYLQLNSLRDEDTAVYYCARDDVVAALKFDFWGQGTLVTVSP

SEQ ID NO: 2365 - protein, 122 aa, Artificial Sequence
  Synthetic construct
QVQLVQSGAEVKKPGASVKVSCKASGYTFTNYAIHWVRQAPGQRLEWMGWISTGNGNTKYSQKFQGRVTFTRDTSASTAYMELSSLRSEDTAVYYCARDRRGRYSSDYFDYWGQGTLVTVSS

SEQ ID NO: 2366 - protein, 124 aa, Artificial Sequence
  Synthetic construct
QVQLVQSGAEVKKPGASVKVSCKTSGYTFTSFGINWVRQAPGQGLEWMGWISGYNGNTNYEQKLQGRVTMTTDASTSTAYMELRSLRSDDTAMYYCAKSTPGIAAGGANWFDPWGQGTLVIVSS

SEQ ID NO: 2367 - protein, 124 aa, Artificial Sequence
  Synthetic construct
EVHLVESGGGLVQPGRSLRLSCAASGFTFDDYAIHWVRQAPGKGLEWVSGSTWNSGTIGYADSVKGRFTISRDNAKNSLYLQMNSLRAEDTALYYCAKDIASVRLGDDYVFDIWGRGTMVTVSS

SEQ ID NO: 2368 - protein, 121 aa, Artificial Sequence
  Synthetic construct
EVQLLESGGGLVQPGGSLRLSCADSGFTFSGYAMSWVRQAPGKGLEWVSGISGSGGSSYYADSVKGRFTISRDNSKNTLYLQMNSLRVEDTAVYYCAKGSTIVLMVYATRWGQGTLVTVSS

SEQ ID NO: 2369 - protein, 118 aa, Artificial Sequence
  Synthetic construct
EVQLVQSGAEVKKPGESLKISCKGSGYSFTSYWIAWVRQMPGKGLEWMGIIYPGDSDIRYRPSFQGQVTISADKSISTAYLQWNSLKASDTALYYCARGGSGSYIDYWGQGALVTVSS

SEQ ID NO: 2370 - protein, 120 aa, Artificial Sequence
  Synthetic construct
HVRLVESGGGVVQPGRSLRLSCTASGFTFSSHGLHWVRQAPGKGLEWMAVIWYDGSNKYYADSVKDRFTISRDNSENTLYLEMNSLRAEDTAVYYCAREGVVGATGIDYWGQGTLVTVSS

SEQ ID NO: 2371 - protein, 121 aa, Artificial Sequence; identical to SEQ ID NO: 2116
  Synthetic construct

SEQ ID NO: 2372 - protein, 117 aa, Artificial Sequence
  Synthetic construct
QVQLVESGGGVVQPGKSLRLSCTASGFTFRSYGMHWVRQAPGKGLEWAAVISSDGTYKHYADSVKGRFSVSRDNSKNTLYLHMNSLGAEDTAVYYCAKDSSGIPEYWGQGTLVTVSS

SEQ ID NO: 2373 - protein, 129 aa, Artificial Sequence
  Synthetic construct
EVQLVETGGRLIQPGGSLRLSCAASGISVSTNYMSWVRQAPGKGLEWVSSIYSGGLTHYAESVKGRFTISRDSSKNTLYLQIKTLRAEDTAVYYCARDRFGSGNSYKSDQYFNYYMDVWGKGTTVAVSL

SEQ ID NO: 2374 - protein, 124 aa, Artificial Sequence
  Synthetic construct
EVQLVQSGAEVKKPGESLKISCKGSGYSFTSNWIGWVRQMPGKGLEWMGIIHPGDSDTRYSPSFQGQVTISADKSISTAYLQWSSLKASDTAMYYCARTYDFWSGYYYYGMDVWGQGTTVTVSS

SEQ ID NO: 2375 - protein, 120 aa, Artificial Sequence
  Synthetic construct
QVQLVESGGGVVQPGRSLRLSCAASGFTFSSYAMHWVRQAPGKGLEWVAVISYDGSNKYYADSVKGRFTISRDNSKNTLYLQMNSLRAEDTAVYYCARVMGGYGTAFDYWGQGTLVTVSS

SEQ ID NO: 2376 - protein, 123 aa, Artificial Sequence
  Synthetic construct
EVQLLESGGGLVQPGGSLRLSCAASGFTFSSYAMSWVRQAPGKGLEWVSAISGSGGSTYYADSVKGRFTISRDNSKNTLYLQMNSLRAEDTAVYYCAKVSLYYYDSSGYYGYWGQGTLVTVSS

SEQ ID NO: 2377 - protein, 123 aa, Artificial Sequence
  Synthetic construct
QVQLVQSGAEVKKPGSTVKVYCKASGGSFSNYVITWVRQAPGQGLEWMGGIIPMFGTTNYAQKFQGRATITADESTDTAYMELSRLRSEDTAVYYCARGPYCGGDCYSLADHWGQGTLVTVSS

SEQ ID NO: 2378 - protein, 120 aa, Artificial Sequence
  Synthetic construct
QIQLVQSGAEVKKPGSSVKVSCKASGGIFSGYSISWVRQAPGQGLEWMGRIIPIFRTTLYAQKFQGRVTITADESTHTGYMELTSLGSEDTAVYFCVRGPVYYNSEDRYWGQGTLVIVSS

SEQ ID NO: 2379 - protein, 122 aa, Artificial Sequence
  Synthetic construct
QVQLVESGGGVVQPGRSRRLSCAASGFTFSSHSMHWVRQAPGKGLEWVAVISYDGSEKYDADSVRGRFTISRDNSKNTLYLQMNSLRAEDTAVYYCARGGLLRYLEWPGDYWGQGTLVSVSS

SEQ ID NO: 2380 - protein, 119 aa, Artificial Sequence
  Synthetic construct
QITLKESGPTLVKPTQTLTLTCTFSGFSVNTSGVGVGWIRQPPGKALEWLALIYWDADKRYSPSLKSRLTITKDTSKNQMVLKMTNMDPVDTGTYYCARLTTVTIFDYWGQGTLVTVSS

SEQ ID NO: 2381 - protein, 123 aa, Artificial Sequence
  Synthetic construct
EVQLVQSGAEVKKPGESLKISCKASGYIFTNHWIGWVRQMPGKGLEWMGIIYPDDSDARYSPSFQGQVTISADKSISTAYLQWSSLKASDTAIYYCARLVSSGWFKYWYFDLWGRGTLVTVSS

SEQ ID NO: 2382 - protein, 121 aa, Artificial Sequence; identical to SEQ ID NO: 2116
  Synthetic construct

SEQ ID NO: 2383 - protein, 125 aa, Artificial Sequence
  Synthetic construct
QLQLQESGPGLVKPSETLSLTCTVSGGSISSSDYYWGWIRQFPGKGLEWIGSMYYSGSTYYNPSLKSRVTISLNTSKNQFSLKLSSVTAADTAVYYCVRDPRVTTATNYFGMDVWGQGTAVTVSS

SEQ ID NO: 2384 - protein, 122 aa, Artificial Sequence
  Synthetic construct
QVQLVQSGAEVKKPGSSVKVSCKASGGTFTSHAISWVRQAPGQGLEWMGGIIPIFGTANYAQKLQGRVTITADESTSTAYMELSSLRSEDTAVYYCVRTFPYDSSGYYVEDWGQGTLVTVSP

SEQ ID NO: 2385 - protein, 121 aa, Artificial Sequence
  Synthetic construct
QVQLVQSGSELKKPGASVKVSCKASGYTFTRYPMNWVRQAPGQGLEWMGWIDTNTGNPTYAQGFTGRFVFSLDTSVSTAYLQISSLKAEDTAVYYCARDGRITVGRGLVYWGQGTLVTVSS

SEQ ID NO: 2386 - protein, 121 aa, Artificial Sequence
  Synthetic construct
QVQLQESGPGLVRPSQTLSLTCTVSGGSISSSSYYWSWIRQPAGKGLEWIGRIYTSGSTNYNPSLKSRVTIPVDTSKNQFSLNLSSVTAADTAVYYCARVNDILTGYVDFWGQGTLVTVSS

SEQ ID NO: 2387 - protein, 118 aa, Artificial Sequence
  Synthetic construct
EVQLVESGGGLIQPGGSLRLSCAASGFTVSSNYMSWVRQAPGKGLEWVSVIYGGGSTYYADSVKGRFTISRDNSKNTLYLQMNSLRAEDTAVYYCARDQCSDCGMDVWGQGTTVTVSS

SEQ ID NO: 2388 - protein, 123 aa, Artificial Sequence
  Synthetic construct
EVQLLESGGGLVQPGGSLRLSCVASGFTLRNYAMNWVRQAPGKGLEWVSGISGSGASTYYADSVKGRFTISRDNSKNTLYLQMNSLRAEDTAVYYCTKSGWGYDFWSGYFDYWGQGTLVTVSS

SEQ ID NO: 2389 - protein, 115 aa, Artificial Sequence
  Synthetic construct
EVQLVESGGGLIQPGGSLRLSCAASGFTVSRNYMSWVRQAPGKGLEWVSIIYSGGSTYYADSVKGRFTISRDNSKNTLYLQMNSLRGEDTAIYYCASGYYDSLYWGQGTLVTVSS

SEQ ID NO: 2390 - protein, 123 aa, Artificial Sequence
  Synthetic construct
EVQVVQSGGGLVQPGGSLRVSCAASGFIFSDHYIDWVRQAPGKGLEWVGRSRTKPRGYTTEYAASVKGRFTFSRDDSKNSVYLQMNSLKTEDTAVYYCTRVSRYNGNDYFDYWGQGTQVTVSS

SEQ ID NO: 2391 - protein, 122 aa, Artificial Sequence
  Synthetic construct
QVQLVQSGAEVKKPGSSVKVSCKASGGTVSSNAFIWVRQAPGQGLEWMGGIIPIFGTTNYAQKFQGKVTITADESTSTAYMELSSLRSEDAAVYYCARVYQYESSGYYYQAWGQGTLVTVSS

SEQ ID NO: 2392 - protein, 127 aa, Artificial Sequence
  Synthetic construct
EVQLVEFGGGLVQPGKSLRLSCVTSGFTFEDFAMHWVRQAPGKGLEWVSGSTWNSGTIGYADSVKGRFTTSRDNAKNSLYLQMNNLRDEDTALYYCAKDIGRYDHYDTFHGGAFDIWGQGTLVTVSS

SEQ ID NO: 2393 - protein, 123 aa, Artificial Sequence
  Synthetic construct
QVQLVESGGGVVQPGRSLRLSCAASGFTFRNYGMHWVRQAPGKGLEWVAVIWYDGSNKYYGDSVKGRFTISRDNSKNTLYLQMNSLRVEDTAVYYCARDWSSSSWYYHGMDVWGQGTTVTVSS

SEQ ID NO: 2394 - protein, 129 aa, Artificial Sequence
  Synthetic construct
EVQLVESGGGLVQPGGSLRLSCAASGFTFSSYWMSWVRQAPGKGLEWVANIKQDGSEKYYVDSVKGRFTISRDNAKNSLYLQMNSLRAEDTAVYYCARDSDYDYIWGSYRYNQDAFDIWGQGTMVTVSS

SEQ ID NO: 2395 - protein, 125 aa, Artificial Sequence
  Synthetic construct
QVQLVQSGSELKKPGASVKVSCKASGYTFTKHAMNWVRQAPGQGLEWMGWINTNTGNPTYAQGFTGRFVFSLDTSVSTAYLQISSLKAEDTAVYYCARDFSGSYYMYYYYYMDVWGKGTTVTVSS

SEQ ID NO: 2396 - protein, 114 aa, Artificial Sequence; identical to SEQ ID NO: 1878
  Synthetic construct

SEQ ID NO: 2397 - protein, 128 aa, Artificial Sequence
  Synthetic construct
QVQLVESGGGLVKPGGSLRLSCAASGFSFSDYYMSWIRQAPGKGLEWVSYISNSRSYTNNADSVKGRFTISRDTAKNSLYLQMNSLRVEDTAVYYCARGYYYGSGSYYNPDPNWFDPWGQGTLVTVSS

SEQ ID NO: 2398 - protein, 123 aa, Artificial Sequence
  Synthetic construct
QVQLQQWGAGLLKPSETLSLTCAVYGGALSGYYWTWIRQPPGKGLEWIGEINHSGSSDYNASLKSRVSISVDTSKNQFSLKLSSVTAADTAVYYCARKPLLHSSVNPGAFDVWGQGTMVTVSS

SEQ ID NO: 2399 - protein, 121 aa, Artificial Sequence
  Synthetic construct
EVQLVESGGGLVQPGGSLRLSCAASGFTFSYFGMNWVRQAPGKGLEWVSYISTSSGTIYSADSVKGRFTISRDNAKDSLYLQMNSLRDEDTAVYYCAREGIAAAGSGNDYWGQGTLVTVSS

SEQ ID NO: 2400 - protein, 115 aa, Artificial Sequence
  Synthetic construct
QMQLVQSGPEVKKPGTSVKVSCKASGFTFSTSVVQWVRQPRGQRLEWIGGIVVGRGNTKYAQNFQERVTITRDMSTSTAYMELSNLRSEDTAVYYCAADPFADYWGQGTLVTVSS

SEQ ID NO: 2401 - protein, 126 aa, Artificial Sequence; identical to SEQ ID NO: 2260
  Synthetic construct

SEQ ID NO: 2402 - protein, 119 aa, Artificial Sequence
  Synthetic construct
QITLKESGPTLLKPTQTLTLTCTFSGLSLTTSGVSVGWIRQPPGKALEWLALIYWDDGERYTPSLKNRLSITKDTSKNQVVLTMTNVDPVDTATYYCARRGAFDSFDYWGQGTLVTVSS

SEQ ID NO: 2403 - protein, 118 aa, Artificial Sequence
  Synthetic construct
EVQLVESGGGLVQPGGSLRLSCAASGFTFSSYSMNWVRQAPGKGLEWVSYISSSSSTIYYADSVKGRFTISRDNAKNSLYLQMNSLRDEDTAVYYCARDATGGGGDYWGQGTLVTVSS

SEQ ID NO: 2404 - protein, 120 aa, Artificial Sequence
  Synthetic construct
QVQLVQSGAEVKRPGASVKVSCKATGYSFTSNAMHWVRQAPGQALEWMGWINAGTGGTKYSQKFQGRVTITRDTYASTAYMELSSLTSEDTAVYYCARPLVPHRDWFDPWGQGTLVTVSS

SEQ ID NO: 2405 - protein, 123 aa, Artificial Sequence
  Synthetic construct
QLQLQESGPGLVKPSETLSLTCTVSRGSISSSSYYWVWIRQPPGKGLEWIGSVYYSGNTYYNPSLKSRVTISVDTSKNQFSLKLSSVTAADTAVYYCANYNIGYSRDDAFDIWGQGTMVTVSS

SEQ ID NO: 2406 - protein, 129 aa, Artificial Sequence
  Synthetic construct
QVQLVESGGGVVQPGRSLRLSCAASGFSFNSYATHWVRQAPGKGLEWVAVISYDGSNKYYADSVKGRFTMSRDTSKNTLFLQMNSLRAEDTAVYYCARDGANCSGDWCYTDIVFTMDVWGKGTTVTVSS

SEQ ID NO: 2407 - protein, 121 aa, Artificial Sequence
  Synthetic construct
QVQLVESGGGVVQPGRSLRLSCAASGFTFSTYAMHWVRQAPGTGLEWVAVISYDGMNKYYADSVKGRFTISRDNSKNTLSLQMNSLRVEDTAVYYCARARGAGYVSSFEPWGQGTLVTVSS

SEQ ID NO: 2408 - protein, 98 aa, Artificial Sequence
  Synthetic construct
QVQLVESGGGVVQPGRSLRLSCAASGFTFSSYDSVEGRFTISRDSSKSTLHLQMNSLRAEDTAVYYCARDARTITMVRGVFGDAFDIWGQGTMVTVSS

SEQ ID NO: 2409 - protein, 118 aa, Artificial Sequence
  Synthetic construct
QIQLVQSGTEVKKPGASVKVSCKASGYDFTTFGLNWVRQAPAQGPEWMGWISTYSGDTNYAPKFQGRVTMTTDTSTSTVYMELRSLRSDDTAIYYCARGLYFDTTDSWGQGTLVIISS

SEQ ID NO: 2410 - protein, 111 aa, Artificial Sequence
  Synthetic construct
EMQLVESGGGLVQPGGSLRLSCAASGFTFKDKWMNWVRQAPGKGLEWVANIKADGSGKFYADSVKGRFTISRDNAKSILYLQMNSLRAEDTAVYYCSGARLGQGTLVTVSS

SEQ ID NO: 2411 - protein, 120 aa, Artificial Sequence
  Synthetic construct
EVQLVQSGAEVKKPGESLKISCKRSGYSFTTNWIAWVRQMPGKGLEWMGIIYPGDSDTRYSPSFQGQVTISADKSTSTAHLQWSSLKASDTAMYYCASVRVAAWNAYDIWGQGTMVTVSS

SEQ ID NO: 2412 - protein, 126 aa, Artificial Sequence
  Synthetic construct
EVQLLESGGGLVQPGGSLRLSCAASRFTFSSYAMSWVRQAPGKGLEWVSAISGSGDSTYYADSVKGRFTISRDNSENTLYLQMNSLRAEETAVYYCAKDQYYDFWSGFPNRGMDVWGQGTAVTVSS

SEQ ID NO: 2413 - protein, 124 aa, Artificial Sequence
  Synthetic construct
QVQLVESGGGVVQPGRSLRLSCVASGFTFSTYAMHWVRQAPGKGLEWVAFISYDGSNKYYADSVKGRFTISRDNSKKTLYLQMNSLRAEDTAVYYCARSEDLESSYHYYGIDVWGQGTTVTVSS

SEQ ID NO: 2414 - protein, 121 aa, Artificial Sequence
  Synthetic construct
QVQLVESGGGVVQSGRSLRLSCGASGFTFSSYAMHWVRQAPGKGLEWVALISYDGSNKYYADSVRGRFTISRDNSKNTLYLQMNSLRAEDTAAYHCARARGGSYSAPFDFWGQGTLVTVSS

SEQ ID NO: 2415 - protein, 131 aa, Artificial Sequence
  Synthetic construct
EVQLVESGGGLVKPGGSLRLSCAASGFTFSSYSMNWVRQAPGKGLEWVSSISSSSSYIYYADSVKGRFTISRDNAKNSLYLQMNSLRAEDTAVYYCARAGGGDFWSGYYTGDYYYYGMDVWGQGTTVTVSS

SEQ ID NO: 2416 - protein, 125 aa, Artificial Sequence
  Synthetic construct
QVQLVESGGGVVQPGRSLRLSCAASGFTFSNYPMHWVRQAPGKGLEWVAVISYDRSNKYYADSVKGRFTISRDNSKNTLYLQMNSLRAEDTAMYYCARENSGYDYGSYSYYMDVWGKGTTVTVSS

SEQ ID NO: 2417 - protein, 119 aa, Artificial Sequence
  Synthetic construct
EVQLVESGGGLVKPGGSLRLSCAASGFTFSSYSMNWVRQAPGKGLEWVSSISSSSSYIYYADSVKGRFTISRDNAKNSLYLQMNSLRAEDTAVYYCASLRYFDWLHIPWGQGTLVTVSS

SEQ ID NO: 2418 - protein, 125 aa, Artificial Sequence
  Synthetic construct
QVQLQESGPGLVKPAQTLSLTCTVSGGSISTGGFYWSWIRQHPGKGLEWIGNIYHSGSTYYNPSLKSRVTISLDTSKNQFSLKLSSVTAADTAEYYCASERIFMVRGVMYGMDVWGQGTTVTVSS

SEQ ID NO: 2419 - protein, 123 aa, Artificial Sequence
  Synthetic construct
QLQLQESGPGLVKPSETLSLTCTVSGGSIRGSSYYWGWIRQPPGKGLEWIGNIFYSGDTYYNPSLKSRVTISVDTSKNQFSLKLSSVTAADTAVYYCARLWDTYSYRYGMDVWGQGATVTVSS

SEQ ID NO: 2420 - protein, 122 aa, Artificial Sequence
  Synthetic construct
QLQLVQSGAEVKKPGASVKVSCKASGYMFTSYGITWVRQAPGQGLEWMGWISAYNGDTNYAQKFQGRVTMTTDTSTSTAYMELRSLRSDDTAVYYCARDSDYGDYANWFDPWGQGTLVTVSS

SEQ ID NO: 2421 - protein, 119 aa, Artificial Sequence
  Synthetic construct
QLQLQESGPGLVKPSETLSLTCTVSGGSISSSSYYWGWIRQPPGKGLEWIGSIYYSGSTYYDPSLKSRVTISVDTSKNQFSLKLSSVTATDTAVYYCAAGLGHWYFDLWGRGTLVTVSS

SEQ ID NO: 2422 - protein, 125 aa, Artificial Sequence
  Synthetic construct
QLQLQESGPGLVKPSETLSLTCTVSGGSISSSSYYWGWIRQPPGKGLEWIGNIYYSGSTYYNPSLKSRVTISVDTSKNQFSLKLSSVTAADTAVFYCATEVVGELRLASNGMDVWGQGTTVTVSS

SEQ ID NO: 2423 - protein, 128 aa, Artificial Sequence
  Synthetic construct
EVQLVESGGGLVKPGGSLRLSCAASGFTFSTYNMNWVRQAPGKGLEWVSSISSSSNYIYYADSLRGRFTISRDNAKNSLYLQMNSLRAEDTAVYYCAKTGVHHSKFLSSWYNYYLDVWGKGTTVTVSS

SEQ ID NO: 2424 - protein, 120 aa, Artificial Sequence
  Synthetic construct
QITLKESGPTLVKPTQTLTLTCTFSGFSLSTSGVGVGWIRQPPGKALEWLALIYWDDDKRYSPSLKSRLTITKDTSKNQVVLTMTNMDPVDTATYYCAHRDPRFDAFDIWGQGTMVTVSS

SEQ ID NO: 2425 - protein, 121 aa, Artificial Sequence
  Synthetic construct
QVQLAESGGGVVQPGRSLRLSCAASGFTFNIYGMHWVRQAPGKGLEWVAVISYDGSNKYYADSVKGRFTISRDNSKNTLYLQMNSLKTDDTAVYYCARGRGGNYYYGMDVWGQGTTVTVSS

SEQ ID NO: 2426 - protein, 126 aa, Artificial Sequence
  Synthetic construct
QVQLQQSGPGLVKPSQTLSLTCAISGDSVSSNSAAWSWIRQSPSRGLEWLGRTFYRSKWYNDYAVSVKSRISINPDTSKNQFSLQLNSVTPEDTAVYYCARVLGVAVPGDYQVDYWGQGTLVTVSS

SEQ ID NO: 2427 - protein, 115 aa, Artificial Sequence
  Synthetic construct
ELQLVEAGGGLMQPGGSLRLSCTASGSFVSTNYMSWARQAPGKGLEWVSILYVNGNTYYADSVKDRFTFSRDTSKKLLFLQMNSLRVEDTAVYYCVWEDLGLDFWGQGTLVAVSS

SEQ ID NO: 2428 - protein, 119 aa, Artificial Sequence
  Synthetic construct
QVQLVQSGAEVKKPGASVKVSCKVSGYTLIEVPMHWVRQVPGKGLEWMGGFDPEEAETIYARKFQGRVTMTEDTSTDTAYMELSSLRSEDTAVYYCATVTFMIHVFADWGQGTLVTVSP

SEQ ID NO: 2429 - protein, 121 aa, Artificial Sequence
  Synthetic construct
QVQLVESGGGVVQPGRSLRLSCAASGFTFNTYAMHWVRQAPGKGLDWVAVISYDGSNTYYADFVKGRFTFSRDNSKNTLFLQMNSLRADDTAVYYCARGYGGNYRTYFDYWGQGTLVTVSS

SEQ ID NO: 2430 - protein, 128 aa, Artificial Sequence
  Synthetic construct
QVQLQESGPGLVKPSQTLSLTCTVSGGSIRSGNFYWNWIRLPAGKGLEWIGRGHSSGSTNYNPSLKSRLAISLDTSKDQFSLKLTSVTAADTAVYYCARSTHYYDRSGYSTSDGMDVWGQGTTVVVSS

SEQ ID NO: 2431 - protein, 128 aa, Artificial Sequence
  Synthetic construct
QVQLQESGPGLVKPSETLSLTCTVSGDSVSSGSYYWSWIRQPPGKGLEWIGYIYYSGSTNYYPSLKSRVTISVDTSKNQFSLKLSSVTATDTAVYYCARDRRYYDSSGYPVGGAFDIWGQGTMVTVSS

SEQ ID NO: 2432 - protein, 121 aa, Artificial Sequence
  Synthetic construct
QVQLVESGGGVVQPGRSLRLSCAASGFTFSSSAMYWVRQAPGKGLEWVAVISYDGVNKYYADSVKGRFTISRDNSKNTLYLQMNSLRPEDTALYYCAKIRGGNYRGIFDIWGQGTIVTVSS

SEQ ID NO: 2433 - protein, 119 aa, Artificial Sequence
  Synthetic construct
EVQLVESGGGLVQPGGSLRLSCSASGFTFSSYAMHWVRQAPGKGLEYVSEISTDGGTTYYADSVKGRFTVSRDSSKNTLYLQMSSLRVEDTAVYYCVKGSSSWFSFDSWGQGTLVTVSS

SEQ ID NO: 2434 - protein, 124 aa, Artificial Sequence
  Synthetic construct
QVQLVQSGAEVKKPGSSVKVSCKASGGSFSSYTISWVRQAPGQGLEWMGRIIPFLGIADYAQMFQGRVTITADKSTSTAYMDLSSLSSEDTAVYYCAREYGVSGIGANYCMDVWGQGTTVTVSS

SEQ ID NO: 2435 - protein, 125 aa, Artificial Sequence
  Synthetic construct
QVQLVESGGGVVQPGRSLRLSCVASGFTFSSYGIHWVRQAPGKGLEWVAIIWYDGSNKYYADSVKGRFTISRDNSKNTVYLQMNSLRAEDTAVYYCARDNWAVTVGTGNGAFDIWGQGTMVTVSL

SEQ ID NO: 2436 - protein, 120 aa, Artificial Sequence
  Synthetic construct
QVQLVESGGGVVQPGRSLRLSCVASGFTLSSHGFHWVRQTPGKGLQWVATISYDGSIKYYADSVTGRFSISRDDSNNTLFVQMNSLRSEDTAVYYCARGAIASRHAFDVWGQGTVVTVSP

SEQ ID NO: 2437 - protein, 124 aa, Artificial Sequence
  Synthetic construct
QVQLVQSGAEVKKPGSSVKVSCKASGGTFSSYTISWVRQAPGQGLEWMGGIIPIFGTAKYAQKFQGRVTITADESTSAAYMELSSLRSEDTAVYYCASIKCTNGLCSYLVFDYWGQGTLVTVSS

SEQ ID NO: 2438 - protein, 118 aa, Artificial Sequence
  Synthetic construct
QVQLVQSGAEVKKPGASVKVSCKASGYTFTTYGISWVRQAPGQGLEWMGWISGYNGNTKYAQKFQGRVTMTTDTSTNTAYMDLRSLRSDDTAVYYCAREYSSGWPDYWGQGTLVTVSS

SEQ ID NO: 2439 - protein, 120 aa, Artificial Sequence
  Synthetic construct
QVRLVESGGGVVQPGRSLRLSCAASGFTFSNYGMHWVRQAPGKGLEWVAVIWFDGTNKYYADSVRGRFTISRDNSKNTLYLQMNSLRAEDTAVYYCARDLEFASPGEDYWGQGTLVTVSS

SEQ ID NO: 2440 - protein, 123 aa, Artificial Sequence
  Synthetic construct
QVHLVESGGGLVKPGGSLRLSCAASGFTFSDHYMTWIRQAPGKGLEWLSYISNSGSDIYHADSVKGRFTISRDNAKNSLYLQMNSLRAEDTAIYYCARDRGLTQLDENCFDSWGQGTLVTVSS

SEQ ID NO: 2441 - protein, 129 aa, Artificial Sequence
  Synthetic construct
QITLKESGPTLVKPTQTLTLTCTFSGFSFTTTGVAVGWIRQPPGKALEWLALIYWDDDKRYSPSLKTRLTITKDTSKNQVVLTMTNMDPVDSATYYCALNSPIPASSSRDYYYFVMDVWGQGTTVTVSS

SEQ ID NO: 2442 - protein, 126 aa, Artificial Sequence
  Synthetic construct
EVQLVESGGGLVQPGGSLRLSCAVSGFTFSNYSMNWVRQAPGKGLEWISYISSSSSTIYYADSVKGRFTISRDNAKNSLYLQMNSLRAEDTAVYYCARHLKLAPLRFLEWAYWGYWGQGTLVTVSS

SEQ ID NO: 2443 - protein, 116 aa, Artificial Sequence
  Synthetic construct
QVQLVQSGAEVKKPGASVKVSCKASGYTFTSYDINWVRQATGQGLEWMGWMNPNSGNTGYAQKFQGRVTMTRNTSITTAYMELSSLTSEDTAVYYCARGLRVPDDWGQGTLVTVSS

SEQ ID NO: 2444 - protein, 124 aa, Artificial Sequence
  Synthetic construct
EVQLLESGGGLVQPGGSLRLSCAASGFTFRSYAMNWVRQAPGKGLEWVSTISGSGGSTYYADSVKGRFTISRDNSKNTLYLQMNSLRAEDTAVYYCAKDPSEYNFWSGYYFDYWGQGTLVTVSS

SEQ ID NO: 2445 - protein, 127 aa, Artificial Sequence
  Synthetic construct
EVQLVESGGGLVQPGESLRLSCTASEFTFSSYSMNWVRQAPGKGLEWISYISDSSNTIYYADSVKGRFTISRDNAKNSLYLQMNSLRAEDTAVYYCAKDLIKFGELFDLGGNYMDVWGKGTTVSVSS

SEQ ID NO: 2446 - protein, 123 aa, Artificial Sequence
  Synthetic construct
QVQLQESGPGLVKPSETLSLTCTVSGGSISSYYWSWIRQPPGKGLEWIGYIYYSGSTNYNPSLKSRVTISVDTSKNQFSLKLSSVTAADTAVYYCARHGHYDLLTGYGRFDFWGQGTLVTVSS

SEQ ID NO: 2447 - protein, 129 aa, Artificial Sequence
  Synthetic construct
QITLKESGPTLMRPTQTLTLTCTFSGFSLSTTGVGVGLIRQPPGKALEWLALIYWDDDKRYSPSLSGRLTITKDTSKNQVILTMTNMDPVDTATYYCAHIPPKITFFGVVAVEVYFDYWGQGTLVTVSS

SEQ ID NO: 2448 - protein, 126 aa, Artificial Sequence
  Synthetic construct
QGQLVESGGGVVQPGRSLRLSCTASGFSFSSYGMHWVRQAPGKGLEWVAVIWYDGSNTYYGDSVKGRFTISRDNSKNTVYLQMNSLRAEDTAVYFCARDPVVVIAASLFYHGMDVWGQGTAVTVSS

SEQ ID NO: 2449 - protein, 123 aa, Artificial Sequence
  Synthetic construct
QVQLVQSGAEVKKPGSSVKVSCKASGGTFSKYTISWVRQAPGQGLEWMGRIIPILGIANHAQKFQGRVTITADKSTTTVYMDLSRLRSEDTAVYYCASCSGSGTSLPWYFDLWGRGTLVTVSS

SEQ ID NO: 2450 - protein, 129 aa, Artificial Sequence
  Synthetic construct
QVQLQESGPGLVKPSETLSLTCTVSNYSINSNSYWGWIRQPPGKGLEWIGSINHSGSTYYNPSLKSRVTISVDTSGNQFSLRLGSVTAADSAVYYCARAIPPSGSYYHRYYYYYYMDVWGKGTTVSASS

SEQ ID NO: 2451 - protein, 120 aa, Artificial Sequence
  Synthetic construct
QVQLVESGGGVVHPGRSLRLACTASGFIFGKYGMHWVRQAPGKGLEWVALISYDGSQKKYGDSVKGRFTISRDNSKNTLTLLMNSLTPDDTAVYFCVSGAVAGNEALAAWGQGTSVTVSS

SEQ ID NO: 2452 - protein, 126 aa, Artificial Sequence
  Synthetic construct
QLHLQESGPGLVKPSETLSLTCSVSGGSISSSSYYWGWIRQPPGKGLEWIGTIYYSGSTYYNPSLKSRVTISVDTSKTQFSLNLNSMTAADTAVYYCAGSLVSSDWNLAGYWFDPWGQGTLVTVSS

SEQ ID NO: 2453 - protein, 121 aa, Artificial Sequence
  Synthetic construct
QVQVVESGGGVVQPGRSLRLSCAASGFTFSNYGMHWVRQAPGKGLEWVAVIWYDGSKKNYADSVKGRFTISRDNSNNTVYLQMNSLRAEDTAVYYCARDGAVGVTTGLDYWGQGTLVTVSS

SEQ ID NO: 2454 - protein, 127 aa, Artificial Sequence; identical to SEQ ID NO: 1859
  Synthetic construct

SEQ ID NO: 2455 - protein, 133 aa, Artificial Sequence
  Synthetic construct
QVQLVESGGGVVQPGRSLRLSCAASGFTFSSYGMHWVRQAPGKGLEWAAVISYDGSNKYYADSVKGRFTISRDNSKNTLYLQMNSLRAEDTALYYCAKSNNLYYDILTGYPSTYYYYYGMDVWGQGTTVTVSS

SEQ ID NO: 2456 - protein, 121 aa, Artificial Sequence
  Synthetic construct
EVQLVESGGGLVQPGGSLRLSCAASGFTFSSYSMNWVRQAPGKGLEWVSYISSTSSSIFYADSVKGRFSISRDNAKNSLYLQMNSLRDEDTAVYYCARGRGWLTTDLFDYWGQGTLVTVSS

SEQ ID NO: 2457 - protein, 120 aa, Artificial Sequence
  Synthetic construct
QVQLVESGGGVVQPGRSLRLSCAASGFTFSSFAMHWVRQAPGKGLEWVAVISYDGDNKYYADSVKGRFTISRDNSKNTLYVQMNSLTTEDTAVYFCARAKGGNYYYFDYWGQGALVTVSS

SEQ ID NO: 2458 - protein, 119 aa, Artificial Sequence
  Synthetic construct
EVQLVQSGADVRKPGESLRISCKASGYTFTSNWITWVRQMPGKGLEWMGRIDPSDPYSNSSPSFQGHATMSVDKPSSTAYLQWSSLKASDTAIYYCATINLVRGGPEYWGQGTLVTVSS

SEQ ID NO: 2459 - protein, 121 aa, Artificial Sequence
  Synthetic construct
EVQLVESGGVVVQPGGSLRLSCAASGFTFDDYTMHWVRQAPGKGLEWVSLISWDGGSTYYADSVKGRFTISRDNSKNSLYLQMNSLRTEDTALYYCAKDSRRLLETLVDYWGQGTLVTVSS

SEQ ID NO: 2460 - protein, 122 aa, Artificial Sequence
  Synthetic construct
QVQLVESGGGVVQPGGSLRLSCAASGFTFSDYAMRWVRQGPGKGLEWVAIISYDGRNEHYASSVKGRFSISRDNSKNILFLQMNSLRPEDTALYFCARDPYIVPTPLPLDYWGQGTLVTVSS

SEQ ID NO: 2461 - protein, 124 aa, Artificial Sequence
  Synthetic construct
EVELLESGGGLVQPGGSLRLSCAASGFTFNMYAMSWVRQAPGKGLEWVSAISGSGDSTYYADSVKGRFTLSRDNSKNTLYLQMNSLRAEDTAVYYCAKVRYYDFWSGRDAFDIWGQGTMVTVSS

SEQ ID NO: 2462 - protein, 121 aa, Artificial Sequence
  Synthetic construct
QITLKESGPTLVKPTQTLTLTCTFSGFSLNTSGVAVGWIRQPPGKALEWLALIHWDDDKRYSPSLRSRLTITKDTSKNQVVLTMTNMDPVDTATYYYTHVRYDSSGYYEYWGQGTLVTVSS

SEQ ID NO: 2463 - protein, 124 aa, Artificial Sequence
  Synthetic construct
QVQLIQSGAEVRKPGASVKVSCEVSGYTLPELSIHWVRQAPGKGLEWMGGFDPENLETIYAQKFQGRVTMTEDTSTDTAYMELSSLRSEDTAVYYCATAFAYCRGDCYGRFDYWGQGTLVTVSS

SEQ ID NO: 2464 - protein, 121 aa, Artificial Sequence
  Synthetic construct
QLQLQESGPGLVKPPETLSLTCTVSGGSISSSPYYWGWIRQPPGMGLEWIGNIYYSGSTYYNPSLKSRVTISIDTSKNHFSLKLTSVTAADTAVYYCARGVGGYFFPFDYWGLGTLVTVSS

SEQ ID NO: 2465 - protein, 122 aa, Artificial Sequence
  Synthetic construct
EVQLVESGGGLVQPGRSLRLSCAAAGFTFEDYAMHWVRQAPGKGLEWVSGISWNSGTIGYADSVKGRFIISRDNAKNSLYLQMNSLRAEDTALYYCAKDLATRPLYYSMDVWGQGTTVTVSS

SEQ ID NO: 2466 - protein, 120 aa, Artificial Sequence
  Synthetic construct
QLQLQESGPGLVKPSETLSLTCTVSGGSISSNSYYWGWIRQPPGKGLEWIGSIYYSGSTYCNPSLKSRVTISVDTSKNQFSLKLSSVTAADTAVYYCATYYYGSGSYHDWGQGNLVTVSS

SEQ ID NO: 2467 - protein, 119 aa, Artificial Sequence
  Synthetic construct
EVQLVESGGGLVQPGGSLRLSCAASGFIFRTYAMSWVRQAPGKGLECVSAISGSGDRTYYADSVKGRFTMSRDNSKNTVYLQMNSLRADDTAVYFCACGYSGYDYEAPWGQGTLVTVSS

SEQ ID NO: 2468 - protein, 128 aa, Artificial Sequence
  Synthetic construct
QVQLVQSGAEVKKPGASVKVSCKVSGYTLVELSMHWVRQAPGKGLEWMGGFDPENAETLYAQKFQGRVTLTEDTSTDTAYMELSSLRSEDTAVYYCSTGFSIVPANVGYNYYYGMDVWGQGTTVTVSS

SEQ ID NO: 2469 - protein, 121 aa, Artificial Sequence
  Synthetic construct
QVQLVESGGGVVQPGRSLRLSCAASGFIFSTFAMHWVRQAPGKGLEWVGVISYDGNNKYYADSMKGRFTISRDNSKNTLYLQMNSLRTEDTAIYYCARSGSGSYYGDFGYWGQGTLVTVSS

SEQ ID NO: 2470 - protein, 127 aa, Artificial Sequence
  Synthetic construct
QVQLVQSGAELKKPGASVKVSCKASGYIFNNYDISWVRQAPGQGLEWMGWISAFNGDTNYAQKLQGRVTMTTDTSTSTAYMELRSLRSDDTAVYYCARVFVVRGDDDYRYYYYMDVWGKGTTVTVSS

SEQ ID NO: 2471 - protein, 124 aa, Artificial Sequence
  Synthetic construct
QVQLQESGPGLVEPSGTLSLSCAVSGGSISSSDWWSWVRQPPGKGLEWIGEIYHSENTNYNPSLKSRVTMSVDKSRNQFSLRLSSVTAADTAMYYCARRLAVAGTIGFNGFDIWGQGTMVTVSP

SEQ ID NO: 2472 - protein, 127 aa, Artificial Sequence
  Synthetic construct
QVQLVESGGGVVQPGRSLRLSCAASGFIFSTYGMHWVRQAPGKGLEWVAVVSNDGSDRYYADSVKGRVTISRDNSKNTLYLQMNTLRAEDTAVYYCAKADGGYYDSSAYYSTAIDYWGQGTLVTVSS

SEQ ID NO: 2473 - protein, 123 aa, Artificial Sequence
  Synthetic construct
QLQLVQSGAEVKKPGASVKVSCKGSGYTFTGYFMHWLRQAPGQGLEWMGRMNPISGGTTYAQKFQGRVTMTRDTAISTVYMDLSRLTSDDTAVYYCAAEDYYDKAYHHAMDVWGQGTTVTVSV

SEQ ID NO: 2474 - protein, 121 aa, Artificial Sequence
  Synthetic construct
QVYLVESGGGVVQPGRSLRLSCAASGFTFSTYAMHWVRQAPGKGLEWVAVISYDGINKYYADSVKGRFTISRDNSKNTLYLQMNSLSAEDTAVYYCAKGRGGNYFDAFDIWGQGTMVTVSS

SEQ ID NO: 2475 - protein, 123 aa, Artificial Sequence
  Synthetic construct
EVQLVESGGGLVKPGGSLRLSCAASGFTLSSYTLTWVRQAPGKGLEWVSSISTSDDYIYYADSVRGRFTISRDNARNSLYLQMNSLRADDTAFYYCARDHTYGDYEVGWFAPWGQGTLVTVSS

SEQ ID NO: 2476 - protein, 121 aa, Artificial Sequence
  Synthetic construct
QVQLVESGGGVVQPGKSLRLSCAASGFAFNTFGMHWVRQAPGKGLEWVAVIWYDTSNENYADSVKGRFTISRDNSRNILYLQMNSLRAEDTAVYYCARQYTDGSPRDMGIWGQGTMVTVSS

SEQ ID NO: 2477 - protein, 125 aa, Artificial Sequence
  Synthetic construct
EVQLVESGGGLVQPGGSLRLSCAASGFTFSRYWMSWVRQAPGKGLEWVANIKQDGSEKYYVDSVKGRFIISRDNAKNSLYLQMNSLRVEDTAVYYCARYYYYGSGSYSQNWFDPWGQGTLVTVSS

SEQ ID NO: 2478 - protein, 123 aa, Artificial Sequence; identical to SEQ ID NO: 2334
  Synthetic construct

SEQ ID NO: 2479 - protein, 121 aa, Artificial Sequence
  Synthetic construct
QVQLVESGGGVVQPGRSLRLSCAASGFNFSSYVMHWVRQAPGKGLEWVAVISSDGNNKYYADSVKGRFTISRDNSKNTLYLQMNSLRVDDTAVYYCAKVKGGHSYAHFDSWGQGTLVTVSS

SEQ ID NO: 2480 - protein, 123 aa, Artificial Sequence
  Synthetic construct
QITLKESGPTQVKPTQTLTLTCTFSGFSFNTSRVAVGWIRQPPGKALEWLALIYWDDDKRYSPSLKSRLTITKDTSKNQVVLAMTNMDPVDTGTYYCAHRTPSNWFGDWFDPWGQGTLVTVSS

SEQ ID NO: 2481 - protein, 118 aa, Artificial Sequence
  Synthetic construct
QVQLVESGGGVVQPGRSLRLSCAASGFTFSTYALHWVRQAPGTGLEWVAVISYDGSNKYYVDSVKGRFTISRDNSKNTLYLQMNSLRAEDTAVYYCARSANYYYMDVWGKGTTVTVSS

SEQ ID NO: 2482 - protein, 127 aa, Artificial Sequence
  Synthetic construct
EVQLLESGGGLVHPGGSLRLSCAASGFTFSDYWMHWVRQVPGKGLVWVSRINGDGTNTHYADSVKGRFTVSRDNAKNTLFLHMDSLRVEDTGLYYCTRVDCGSTTCHYARERWFGPWGQGTLVAVSS

SEQ ID NO: 2483 - protein, 127 aa, Artificial Sequence
  Synthetic construct
EVKLVESGGGLVKPGGSLRLSCAASGFTFSNYSINWVRQAPGKGLEWVSSISSRSNFIYYADSVKGRFTVSRDNAKNSLYLQMDSLRAEDTAVYYCARDPSGLRYFDWLLGDGMDVWGQGTTVTVSS

SEQ ID NO: 2484 - protein, 120 aa, Artificial Sequence
  Synthetic construct
QVQLVESGGGVVQPGRSLRLSCAASGFTFSNYGMHWVRQAPGKGLEWVAVIWYDGTNKYYADSVKGRFTISRDSSNNTLYLQMNSLRAEDTAVYYCARDLAVADSDAAYWGQGTLVTVSS

SEQ ID NO: 2485 - protein, 108 aa, Artificial Sequence
  Synthetic construct
SYELTQPPSVSVSPGQTARITCSADALPKQYGYWYQQKPGQAPVLVMSKDTERPSGIPERFSGSSSGTTVTLTISGVQAEDEADYYCQSVDSSGTYVVFGGGTKLTVL

SEQ ID NO: 2486 - protein, 110 aa, Artificial Sequence
  Synthetic construct
QSALTQPASVSGSPGQSITISCTGTSSDVGSYNLVSWYQQHPGKAPKLMIYEGSKRPSGVSNRFSGSKSGNTASLTISGLQAEDEADYYCCSYAGSRTWVFGGGTKLTVL

SEQ ID NO: 2487 - protein, 107 aa, Artificial Sequence
  Synthetic construct
EIVLTQSPATLSLSPGERATLSCRASQSISSYLAWYQQKPGQAPRLLFYDASNRATGIPARFSGSGSGTDFTLTISSLEPEDFAVYYCQQRGNWPQTFGQGTKLEIK

SEQ ID NO: 2488 - protein, 113 aa, Artificial Sequence
  Synthetic construct
DIVMTQSPDSLAVSLGERATINCKSSQSVLYRSNNKNYLAWYQQKPGQPPKLLISWASIREPGVPDRFSGSGSGTEFTLTISSLRAEDVAVYHCQQYHFTPYTFGQGTKLEIK

SEQ ID NO: 2489 - protein, 110 aa, Artificial Sequence
  Synthetic construct
QSALTQPASVSGSPGQSITISCTGTSSDVGDYNFVSWYQQHPGKAPKLMIYDVINRPSGVSNRFSGSKSGNTASLTISGLQAEDEADYYCSSYTSSSTLVFGGGTKLTVL

SEQ ID NO: 2490 - protein, 107 aa, Artificial Sequence
  Synthetic construct
EIVMTQSPATLSVSPGERATLSCRASQSVTSNLAWYQQKPGQAPRLLIYGASTRATGIPARFSGSGSGTEFTLTISSLQSEDFAVYYCQQYNNWPRAFGQGTKVEIK

SEQ ID NO: 2491 - protein, 108 aa, Artificial Sequence
  Synthetic construct
EIVLTQSPGTLSLSPGERATLSCRASQSVSSTYLAWYRQKPGQAPRLLIYGASNRAPGIPDRLSGSGSGTDFTLTISRLEPEDFAVYYCQQYGSSRYTFGQGTKLEIK

SEQ ID NO: 2492 - protein, 107 aa, Artificial Sequence
  Synthetic construct
DIQMTQSPSSLSASVGDRVTITCWASQSISSYLNWYQQKPGKAPKLLIYAASSLQSGVPSRFSGSGSGTDFTLTISSLQHEDFASYYCQQSYSTPVTFGQGTKLEIK

SEQ ID NO: 2493 - protein, 114 aa, Artificial Sequence
  Synthetic construct
DIVMTQSPDSLAVSLGERATINCKSSQSVLFSSNNKNCLAWYQQKPGQPPKLLIYWASTRESGVPDRFSGSGSGTDFTLTISSLQAEDVAVYYCQQYYSTPSGTFGQGTKLEIK

SEQ ID NO: 2494 - protein, 110 aa, Artificial Sequence
  Synthetic construct
QSALTQPPSASGSPGQSVTISCTGTSSDVGGYNYVSWYQQHPGKAPKLMIYEVSKRPSGVPARFSGSKSGNTASLTVSGLQAEDEADYYCSSYAGSNGHVFGAGTKVTVL

SEQ ID NO: 2495 - protein, 110 aa, Artificial Sequence
  Synthetic construct
QSVLTQPPSVSAAPGQKVTISCSGSSSNIGNNYVSWYQQLPGTAPKLLIYDNNKRPSGIPDRFSGSKSGTSATLGITGLQTGDEADYYCGTWDSSLSVWVFGGGSKLTVL

SEQ ID NO: 2496 - protein, 106 aa, Artificial Sequence
  Synthetic construct
DIQMTQSPSTLSASVGDRVTITCRASQSISSWLAWYQQKPGKAPKLLIYKASSLESGVPSRFSGSGSGTEFTLTISSLQPDDFAAYYCQQYNSYSTFGQGTKVEIK

SEQ ID NO: 2497 - protein, 110 aa, Artificial Sequence
  Synthetic construct
QSALTQPASVSGSPGQSITISCTGTSSDVGSYNLVSWYQQHPGKAPKLMIYEGSKRPSGISDRFSGSKSGNTASLTIFGLQTEDEADYYCCSYAGFSTYVFGTGTRVTVL

SEQ ID NO: 2498 - protein, 111 aa, Artificial Sequence
  Synthetic construct
QSALTQPPSASGSPGQSVTISCTGTSSDVGGYNYVSWYQQHPGKAPELMIYEVSKRPSGVPDRFSGSKSGKTASLTVSGLQAEDEADYYCSSYAGSNIHVVFGGGTRLTVL

SEQ ID NO: 2499 - protein, 108 aa, Artificial Sequence
  Synthetic construct
SSELTQDPAVSVALGQTVRITCQGDSLRSYYASWYQQKPGQAPVLVIYDKNKRPSGIPDRFSGSSSGNTASLTITGAQAEDEADYYCNSRDSSGNHYVFGTGTKVTVL

SEQ ID NO: 2500 - protein, 106 aa, Artificial Sequence
  Synthetic construct
DIQMTQSPSTLSASVGDRVTITCRASQSIRTWLAWYQQKPGKAPKLLIYKASSLEGGVPSRFSGSGSGTEFTLTISSLQPDDFATYYCQQYNSHYTFGQGTKLEIK

SEQ ID NO: 2501 - protein, 108 aa, Artificial Sequence
  Synthetic construct
EIVLTQSPGTLSLSPGERATLSCRASQSVSSNYLAWYQQKPGQAPRLLIYGASSRATGIPDRFSGSGSGTDFTLTISRLEPEDFAVYCCQQFGSSVYTFGQGTKLEIK

SEQ ID NO: 2502 - protein, 108 aa, Artificial Sequence
  Synthetic construct
SYELTQPPSVSVSPGQTARITCSGDALPKKYAYWYQQKSGQAPVLVIYEDSKRPSGIPERFSGSSSGTMATLTISGAQVEDEADYYCYSTDSSGNRRVFGGGTKLTVL

SEQ ID NO: 2503 - protein, 110 aa, Artificial Sequence
  Synthetic construct
QSALTQPPSASGSPGQSVTISCTGTSSDVGVYNFVSWYQQHPGKAPKLIIHDVTKRPSGVPDRFSGSKSGNTASLTVSGLQAEDEADYYCSSYAGSNNVVFGGGTKLTVL

SEQ ID NO: 2504 - protein, 108 aa, Artificial Sequence
  Synthetic construct
EIVLTQSPGTLSLSPGERATLSCRASQSVSSSYLAWYQQKPGQAPRLLIYGASSRATGIPDRFSGSGSGTDFTLTISRLEPEDFAVYFCQQYGSSPITFGQGTRLEIE

SEQ ID NO: 2505 - protein, 107 aa, Artificial Sequence
  Synthetic construct
DIQVTQSPSSLSASVGDRVTITCRASQNISSYLNWYQHKPGKAPNLLIYAASSLQSGVPSRLSGSGSGTDFALTISSLQPEDFATYYCQQSYTIPQTFGQGTKLEIK

SEQ ID NO: 2506 - protein, 107 aa, Artificial Sequence
  Synthetic construct
SYELTQPPSVSVSPGQTARITCSGDALPKKYAYWYQQKSGQAPVLVIYEDSKRPSGIPERFSGSNSGTMATLTISGALVEDEADYYCYSRDSSGNPLFGGGTKLTVL

SEQ ID NO: 2507 - protein, 111 aa, Artificial Sequence
  Synthetic construct
DIVMTQSPVSLPVTPGEPASISCRSSQSLLHSNGYNYLDWYLQKPGQSPQLLIYLGSNRASGVPDRFSGSGSGTDFTLKISRVEAEDVGVYYCMQALQTHTFGQGTKLEIK

SEQ ID NO: 2508 - protein, 110 aa, Artificial Sequence
  Synthetic construct
QSVLTQPPSVSAAPGQKVTISCSGSSSNIGNNYVSWYQQLPGTAPKLLIYDNNKRPSGIPDRFSGSKSGTSATLGITGLQTGDEADYYCGTWDSSLSSWVFGGGTKLTVL

SEQ ID NO: 2509 - protein, 108 aa, Artificial Sequence
  Synthetic construct
DIQLTQSPSFLSASVGDRVTITCRASQGISSYLAWYQQKPGKAPKLLIYAASTLQSGVPSRFSGSGSGTEFTLTISSLQPEDFATYYCQQLNSYPSFTFGPGTKVDIK

SEQ ID NO: 2510 - protein, 110 aa, Artificial Sequence
  Synthetic construct
QSMLTQPPSASGTPGQRVTIFCSGSSSNIGSNTVNWYQLLPGTAPKLLIYSNDQRPSGVPDRFSGSKSGTSASLAISGLQSEDEADYYCAAWDDSLNGPVFGTGTKVTVL

SEQ ID NO: 2511 - protein, 108 aa, Artificial Sequence
  Synthetic construct
DIQMTQSPSSLSASVGDRVTITCRASQTISSYLNWYQQKPGRAPKLLIYATSSLQSGVPSRFSGSGSGTDFTLTISNLQPEDFATYYCQQSYSTPLYTFGQGTKLEIK

SEQ ID NO: 2512 - protein, 106 aa, Artificial Sequence
  Synthetic construct
EIVMTQSPATLSVSPGERVTLSCRASQSVSSDLAWYQQKPGQAPRLLIHGASTRATGIPATFSGSGSGTEFTLTISSLQSEDFAVYYCQQYNNWPTFGQGTKVEIK

SEQ ID NO: 2513 - protein, 107 aa, Artificial Sequence
  Synthetic construct
DIQMTQSPSSLSASVGDRVTITCRASQGIRNDLGWYQQKPGKAPKRLIYAASSLQSGVPSRFSGSGSGTEFTLTISSLQPEDFATYYCLQHNSYPLTFGGGTKVEIK

SEQ ID NO: 2514 - protein, 108 aa, Artificial Sequence
  Synthetic construct
EIVLTQSPGTLSLSPGERATLSCRASQSFSSSYLAWYQQNPGQAPRLLIYNASSRATGIPDRFSGSGSGTDFTLTISRLEPEDFAVYYCQQYGNSRLTFGPGTKVDIK

SEQ ID NO: 2515 - protein, 108 aa, Artificial Sequence
  Synthetic construct
EIVLTQSPGTLSLSPGERATLSCRASQSVSNNYLAWYQQKPGQAPRLLTFGASSRATGIPDRFSGSGSGTDFTLTISRLESEDFAVYYCQQYGSSPATFGQGTRLEIK

SEQ ID NO: 2516 - protein, 106 aa, Artificial Sequence
  Synthetic construct
DIQMTQSPSSLSASVGDTVTITCRTSQNINIYLNWYQQKPGKAPKLLIYAASTLQDGVPSRFSGSGSGTDFTLTISSLQPDDFATFYCQQGYGTPTFGQGTKVESK

SEQ ID NO: 2517 - protein, 110 aa, Artificial Sequence
  Synthetic construct
QSVVTQPPSASGTPGQRVTISCSGSSSNIGSNTVNWYQQLPGTAPKLLIYSNNQRPSGVPDRFSGSKSGTSASLAISGLQSEDEAEYYCAVWDDSLNGWVFGGGTKQTVL

SEQ ID NO: 2518 - protein, 110 aa, Artificial Sequence
  Synthetic construct
QSVLTQPPSASGTPGQRVTISCSGSSSNIGSNTVNWYQQVPGTAPKLLIYSNNQRPSGVPDRFSDSKSGTSASLAISGLQSEDEADYYCAAWDDSLNGWVFGGGTKLTVL

SEQ ID NO: 2519 - protein, 112 aa, Artificial Sequence
  Synthetic construct
DIVMTQTPLSLSVTPGQPASISCKSSQSLLNSDGKTYLHWYLQKPGQPPQLLIYEVSYRFSGVPDRFSGSGSGTDFTLKISRVEAEDVGLYYCMQSIELPYTFGQGTKLEIK

SEQ ID NO: 2520 - protein, 108 aa, Artificial Sequence
  Synthetic construct
EIVLTQSPGTLSLSPGERATLSCRASQSVSSSYLAWYQQKPGQAPRLLIYGASSRATGIPDRFSGSGSGTDFTLTISRLEPEDFAVYYCQQYGSSPKTFGQGTKVEIK

SEQ ID NO: 2521 - protein, 109 aa, Artificial Sequence
  Synthetic construct
EIVMTQSPAALSVSPGERATLSCRASQSVSGNLAWYQQKPGLAPRLLIYGASTRATGIPARFSGSGSGTEFTLTISSLQSEDFAIYYCQQYNNWPPGITFGQGTRLEIK

SEQ ID NO: 2522 - protein, 108 aa, Artificial Sequence
  Synthetic construct
EIVLTQSPATLSLSPGERATLSCRASQSVSSYLAWYQQKPGQAPRLLIYDASNRATGIPARFSGSGSGTDFTLTISSLEPEDFAVYYCQQRSNWPPFTFGPGTKVDIK

SEQ ID NO: 2523 - protein, 108 aa, Artificial Sequence
  Synthetic construct
SYELTQPPSVSVSPGQTARITCSGDALPKKYSYWYQQKSGQAPVLVIYEDNKRPSGIPERFSGSSSGTMATLTISGAQVEDEADYYCYSTDSSGNHRVFGGGTKLTVL

SEQ ID NO: 2524 - protein, 112 aa, Artificial Sequence
  Synthetic construct
DIVMTQTPLSLSVTPGQPASISCKSSQSLLHSDGKTYLYWYLQKPGQPPQLLIYEVSNRFSGVPDRFSGSGSGTDFTLKISRVEAEDVGVYYCMQSIQLPYTFGQGTKLEIK

SEQ ID NO: 2525 - protein, 107 aa, Artificial Sequence
  Synthetic construct
DIQMTQSPSSVSASVGDRVTITCRASQGISTWLAWYQQKPGKAPKLLIYAASSLQSGVPSRFSGSGSGTDFTLTISSLQPEDFATYYCQQANSFPPTFGGGTKVEIK

SEQ ID NO: 2526 - protein, 107 aa, Artificial Sequence
  Synthetic construct
DIQMTQSPSTLSASVGERVTITCRASQSISSWLAWYQQKPGKAPKILIYKASSLESGVPSRFSGSGSGTEFTLTISSLQPDDFATYYCQQYNSYSITFGQGTRLEIK

SEQ ID NO: 2527 - protein, 108 aa, Artificial Sequence
  Synthetic construct
DIQLTQSPSSLSASVGDRVTVTCRASQSISDYLNWYQQKPGKAPKLLIYAASSLQTGVPPRFSGSGSGTDFTLTISSLQPEDFATYYCQQSFSARVPTFGGGTKVESK

SEQ ID NO: 2528 - protein, 107 aa, Artificial Sequence
  Synthetic construct
ETVLTQSPATLSLSPGERATLSCRASQSVSSYLAWYQQKPGQTPRLLIYDASNRATGIPARFSGSGSGTDFTLTISSLEPEDFAVYYCQHRSNWPLTFGGGTKVEVK

SEQ ID NO: 2529 - protein, 109 aa, Artificial Sequence
  Synthetic construct
EIVLTQSPGTLSLSPGERATLSCRASQTINSNYLAWYQQKPGQAPRLLIYGASSRATGIPDRFSGSGSGTDFTLTISRLEPEDFAVYYCQHYGRSPTWTFGQGTKVEIK

SEQ ID NO: 2530 - protein, 113 aa, Artificial Sequence
  Synthetic construct
DILMTQSPDSLAVALGERATINCKSSQSVLHSSTNKNYLAWYQQNPGQPPKLLIYWASARESGVPDRFSGSGSGTDFTLTISSLQAEDVAVYYCQQYYTSPLTFGGGTKVEIK

SEQ ID NO: 2531 - protein, 111 aa, Artificial Sequence
  Synthetic construct
QSVLTQPPSVSAAPGQKVTISCSGSSSNIGNNYVSWYQQLPGTAPKLLIYDNNKRPSGIPDRFSGSKSGTSATLGITGLQTGDEADYYCGTWDSSLSGFYVFGTGTKVTVL

SEQ ID NO: 2532 - protein, 112 aa, Artificial Sequence
  Synthetic construct
QSALTQPASVSGSPGQSITISCTGTSSDVGDYNFVSWYQQHPGKAPKLIIYDVSNRPSGISNRFSGSKSGNTASLTISGLQAEDEADYYCSSYTSSSTLEGVFGTGTKVTVL

SEQ ID NO: 2533 - protein, 107 aa, Artificial Sequence
  Synthetic construct
DIQMTQSPSPLSASVGDRVTITCRASQSINSWLAWYQQKPGKAPKLLIYKASSLESGVPSRFSGSGSGTEFTLTISSLQPDDFATYYCQQYNSYPVTFGPGTKVDIK

SEQ ID NO: 2534 - protein, 109 aa, Artificial Sequence
  Synthetic construct
EIVLTQSPATLSLSPGERATLSCRASQSLDTYLAWYQQKPGQAPRLLIYDASKRATGIPARFSGSGSGTDFTLTISSLEPEDFAVYYCQQRSNWLRVFTFGPGTKVDIK

SEQ ID NO: 2535 - protein, 106 aa, Artificial Sequence
  Synthetic construct
SYELSQPPSVSVSPGQTASITCSADRLGDKYASWYQQKPGQSPVLVIFQDTKRPSGIPERFSGSNSGSTATLTISGTQAMDEADYYCQAWDSSAVVFGGGTRLTVL

SEQ ID NO: 2536 - protein, 107 aa, Artificial Sequence
  Synthetic construct
DIQMTQSPSSLSASVGDRVTITCRASQGINNYLAWFQQKPGKAPKSLIYAASSLQSGVPSKFSGGVSGTDFTLTISSLQPEDCATYYCQQYHSYPLTFGGGTKVEIK

SEQ ID NO: 2537 - protein, 108 aa, Artificial Sequence
  Synthetic construct
SYVLTQPPSVSVAPGKTATISCGGNNIGSKSVHWYQQRPGQAPVLVIYYDSDRPSGIPERFSGSNSGNTATLTISRVEAGDEADYYCQVWDSSSDHMLFGGGTRLTVL

SEQ ID NO: 2538 - protein, 109 aa, Artificial Sequence
  Synthetic construct
EIVLTQSPGTLSLSPGERATLSCRASQSVSRSYLAWYQHKPGQAPRLLIYGASSRATGIPDRFSGSGSGTDFTLTISRLEPEDFAVYYCQQYGSSPPFSFGPGTKVDIK

SEQ ID NO: 2539 - protein, 111 aa, Artificial Sequence
  Synthetic construct
QSVLTQPASVSGSPGQSITISCSGTSGDIGDYDFVSWYQQHPGKAPKLMIYDVTYRPSGVSNRFSGSKSANTASLTISGLQAEDEADYYCSSYRSRSNSLLFGGGTKLTVL

SEQ ID NO: 2540 - protein, 106 aa, Artificial Sequence
  Synthetic construct
SYELTQPPSVSVSPGQTARITCSGDALSKQFAYWYQQKPGQAPVLVIFKHTERPSGIPERFSGSSSGTTVTLTISGVQAEDEADYSCQTADSSGFVFGGGTKLTVL

SEQ ID NO: 2541 - protein, 107 aa, Artificial Sequence
  Synthetic construct
DIQMTQSPSSLSASVGDRVTITCQANQDISNYLNWYQQKPGKAPKLLISDASNLETGVPSRFSGSGSGTDFTFTISTLQPEDIATYFCQQYDNLPITFGQGTRLEIT

SEQ ID NO: 2542 - protein, 108 aa, Artificial Sequence
  Synthetic construct
SSELTQDPAVSVALGQTVRITCQGDSLRSYYASWYQQKPGQAPVLVIYGKNNRPSGIPDRFSGSSSGNTASLTITGAQAEDEADYYCNSRDSSGNHYVFGTGTKVTVL

SEQ ID NO: 2543 - protein, 111 aa, Artificial Sequence
  Synthetic construct
QSVLTQPPSVSGAPGQRVTISCTGSSSNIGAGYDVHWYQQLPGTAPKLLIYGNSNRPSGVPDRFSGSKSDTSASLAITGLQAEDEADYYCQSYDSSLTGSLFGGGTKLTVL

SEQ ID NO: 2544 - protein, 108 aa, Artificial Sequence
  Synthetic construct
SYELTQPPSVSVSPGQTARITCSGDALPRKYAYWYQQKSGQAPVLVIYEDSKRPSGIPARLSGSSSGTMATLTISGAQVEDEADYYCYSTDSSGNHRVFGGGTKLTVL

SEQ ID NO: 2545 - protein, 110 aa, Artificial Sequence
  Synthetic construct
QSVLTQPPSVSAAPGQKVTISCSGSSSNIGNNYVSWYQQLPGTVPKLLIYENNKRPSGIPDRFSGSKSGTSATLGITGLQTGDEADYYCGTWDRSLSAVVFGGGTKLTVL

SEQ ID NO: 2546 - protein, 108 aa, Artificial Sequence
  Synthetic construct
SYELTQPPSVSVSPGQTARITCSGDALPKKYAYWYQQKSGQAPVLVIYEDNKRPSGIPERFSGSSSGTMATLTISGAQVEDEADFYCYSTGSSGHQRVFGGGTKLTVL

SEQ ID NO: 2547 - protein, 107 aa, Artificial Sequence
  Synthetic construct
DIQMTQSPSFVSASVGDRVTITCRASQGISSWLAWYQQKPGKAPKLLIYAASSLQSGVPSRFSGSGSGTDYTLTISSLQAEDFATYYCQQANSFPFTFGPGTKVDIK

SEQ ID NO: 2548 - protein, 109 aa, Artificial Sequence
  Synthetic construct
EIVLTQSPGTLSLSPGERATLSCRASERVSSSYLAWYQQKPGQAPRLLIYSTSSRAIGIPDRFSGSGSETDFTLTISRLEPEDFAVYYCQQYGSSLTWTFGQGTKVEIK

SEQ ID NO: 2549 - protein, 108 aa, Artificial Sequence
  Synthetic construct
DIQMTQSPSSLSASVRDRVTITCQASQDISNYLNWYQQKPGKAPKLLIYDASNLETGVPSRFSGSGSGTNFTFTISSLQPEDIATYYCQQYDNLFIYTFGQGTKLEIR

SEQ ID NO: 2550 - protein, 108 aa, Artificial Sequence
  Synthetic construct
DIQLIQSPSILSASVGDRVTITCRATQSVSTWLAWYQQKPGKAPKLLIYQASRLESEVPSRFSGTGSGTEFTLTISSLQPDDFATYYCQHHIINSPYTFAQGTKVDQK

SEQ ID NO: 2551 - protein, 113 aa, Artificial Sequence
  Synthetic construct
QSVLTQPPSVSGAPGQRVTISCTGSSSNIGAGYDVHWYQQLPGTAPKLLIYGKNNRPSGVPDRFSGSKSGTSASLAITGLQAEDEADYYCQSYDSSLSGPNYVFGTGTKVTVL

SEQ ID NO: 2552 - protein, 110 aa, Artificial Sequence
  Synthetic construct
QSVLTQPPSVSAAPGQKVTISCSGGSSDIGSNYVSWYQQLPGTAPKLLLFDNNKRPSGIPDRFSGSKSGTSATLGITGLQTGDEADYYCGTWDSSLRSYVFGTGTKVTVL

SEQ ID NO: 2553 - protein, 107 aa, Artificial Sequence
  Synthetic construct
DIQMTQSPSSLSASIGDRVTITCRASQDISNYLAWFQQKPGKAPKSLIYAASSLQSGVPSEFSGSGSGTDFTLTISNLQPEDFATYYCQQYHSYPLTFGGGTKVEIK

SEQ ID NO: 2554 - protein, 106 aa, Artificial Sequence
  Synthetic construct
SYDLTQPPSVSVSPGQTASITCSGDKLEVIYTCWYQQKPGQSPVLVIYQDTKRPSGIPERFSGSNSGNTATLTISGTQAIDEADYYCQAWDSSTVVFGGGTKLTVL

SEQ ID NO: 2555 - protein, 109 aa, Artificial Sequence
  Synthetic construct
QAVVTQEPSVTVSPGGTVTLTCGSSTGAVTSGHYPYWFQQKPGQAPRTLIYDTNNKHSWTPARFSGSLLGGKAALTLSGAQPEDEAEYYCLVSYGGARVFGGGTKLTVL

SEQ ID NO: 2556 - protein, 112 aa, Artificial Sequence
  Synthetic construct
DVVLTQSPLSLSVTLGQPASISCRSSQSLVHRDGNTYLNWFQERPGQSPRRLIYQVSNRDSGVPDRFSGSGSGTDFTLKISRVEAEDVGIYYCMQGTHWLFTFGQGTKLEIK

SEQ ID NO: 2557 - protein, 107 aa, Artificial Sequence
  Synthetic construct
DIQMTQSPSSLSASVGGRVIITCRASQGISNSLAWFQQKPGKAPKSLIYAASTLQSGVPSKFSGSGSGTDFTLTISSLQPEDFATYFCQQYNSYPPTFGQGTRLEIR

SEQ ID NO: 2558 - protein, 107 aa, Artificial Sequence
  Synthetic construct
SYELTQPPSVSVSPGQTAKITCSGDALPKQYGYWYQQKPRQAPVLVIYKDSERPSGIPERFSGSSSGTTVTLTISGVQAEDEGDYWCQSTDSSGAWVFGGGTKLTVL

SEQ ID NO: 2559 - protein, 110 aa, Artificial Sequence
  Synthetic construct
QSVLTQPPSASGTPGQRVTISCSGSSSNIGSNTVNWYQQLPGTAPKVLIYSNNQWPSGVPDRFSGSKSGTSASLAISGLQSEDEADYYCATWDDSLNGWVFGGGTKLTVL

SEQ ID NO: 2560 - protein, 111 aa, Artificial Sequence
  Synthetic construct
QSALTQPASVSGSLGQSITISCTGSSSDVGGYNYVSWYQQHPGKAPKLMIYDVSNRPSGVSNRFSGSKSGNTASLTISGLQAEDEADYYCSSYTSRTTLVVFGTGTKVTVL

SEQ ID NO: 2561 - protein, 110 aa, Artificial Sequence
  Synthetic construct
QSVLTQPPSASGTPGQRVTISCSGTSSSIGSNTVNWYQQLPLTAPKLIIYNNDRRPSGVPDRFSGSKSGTSASLAISGLQSDDEGHYYCASWDDSLIGPVFGGGTELTVL

SEQ ID NO: 2562 - protein, 108 aa, Artificial Sequence
  Synthetic construct
ESVLTQSPGTLSLSPGERATLSCRASQSVSSNYLAWYQQKPGQAPRLLIYAASSRATGIPDRFSGSGSGTDFTLTISRLEPEDFAVYYCQLYGSSQLTFGGGTKVEIK

SEQ ID NO: 2563 - protein, 106 aa, Artificial Sequence
  Synthetic construct
SYELTQPPSVSVSPGQTASITCSGDKLGDKNPWWYQQKPGQSPVLVIYQDNKRPSGIPERFSGSNSGNTATLTIRGTQVIDEADYYCQAWDSSTWVFGGGTKLTVL

SEQ ID NO: 2564 - protein, 109 aa, Artificial Sequence
  Synthetic construct
EIVLTQSPATLSLSPGERASLSCRASQSVSNFLAWYQQKPGQAPRLLIYDASNRASGIPARFSGSGSGTDFTLTISSLEPEDFAVYYCQQRSNWPPALTFGGGTKVEIK

SEQ ID NO: 2565 - protein, 112 aa, Artificial Sequence
  Synthetic construct
DIVLTQSPDSLAVSLGERATINCQSSQSVLYSSNNKNYLAWYQQKPGQPPKLLIYWASTRESGVPDRFSGSGSGTVFTLTISSLQAEDVAVYYCQQYYSSWTFGQGTKVEIK

SEQ ID NO: 2566 - protein, 111 aa, Artificial Sequence
  Synthetic construct
QSALTQPASVSGSPGQSITISCTGTSSDVGSYNLVSWYQQHPGKAPKFMIYDGSKRPSGVSNRFSGSKSGNTASLTISGLQAEDEADYYCCSYANSSTHWVFGGGTKLTVL

SEQ ID NO: 2567 - protein, 115 aa, Artificial Sequence
  Synthetic construct
QAVLTQPSSLSAPPGVSARLTCTLHSGVNVGTYRIYWYQQKPGSPPQYLLRYKSDSDKHRGSGVPSRFSGSKDASANAGILLISGLQSEDEADYFCMIWHSSAWVFGGGTKLTVL

SEQ ID NO: 2568 - protein, 108 aa, Artificial Sequence
  Synthetic construct
EIVLTQSPGTLSLSPGEGATLSCRASQSVYGDYVGWYQQKPGQAPRLLIYGASNRAAGIPDRFSASGSGTDFTLTISRLEPEDFAVYYCQQYGNSRFSFGPGTKVDIR

SEQ ID NO: 2569 - protein, 112 aa, Artificial Sequence
  Synthetic construct
DIVMTQSPVSLPVTPGEPASISCRSSQSLLHRNGHNYLDWYLQRPGQSPQLLIYLGSNRASGVPDRFSGSASGTDFTLKISRVEAEDVGVYYCMQGLQTPPTFGQGTKVEIK

SEQ ID NO: 2570 - protein, 108 aa, Artificial Sequence
  Synthetic construct
SYELTQPPSVSVSPGQTARITCSGDALPKKYAYWYQQKSGQAPVLVIYEDSKRPSGIPERFSGSSSGTMATLTISGAQVEDEADYYCYSTDSSGNHRVFGGGTKLTVL

SEQ ID NO: 2571 - protein, 107 aa, Artificial Sequence
  Synthetic construct
SYELTQPPSVSVSPGQTARITCSGDALPKKYAYWYQQKSGQAPVLVIYEDNKRPSGIPERFSGSSSGTMATLTISGAQVEDDADYYCYSTDSSGNPFFGTGTKVTVL

SEQ ID NO: 2572 - protein, 110 aa, Artificial Sequence
  Synthetic construct
QSALTQPRSVSGSPGQSVTISCTGTSSDVGGYNYVSWYQQHPGKAPKLMIYDVTKRPSGVPDRFSGSKSGNTASLTISGLQAEDESDYYCCSYAGDYTWVFGGGTKLTVL

SEQ ID NO: 2573 - protein, 113 aa, Artificial Sequence
  Synthetic construct
AVVMTQSPLSLPVTLGQPASISCRSSQSLVHSDGNTYFNWFHQRPGQSPRRLIYKVSKRASGVPDRFSGSGSGTDFTLKISRVEAEDVGVYYCMQGTHWPPITFGQGTRLEIK

SEQ ID NO: 2574 - protein, 110 aa, Artificial Sequence
  Synthetic construct
NFMLTQPHSVSESPGKTVTISCTRSSGSIASNYVQWYQQRPGSAPTTVIYEDNQRPSGVPDRFSGSIDSSSNSASLTISGLKTEDEADYYCQSYDSSNVVFGGGTKLTVL

SEQ ID NO: 2575 - protein, 109 aa, Artificial Sequence
  Synthetic construct
EIVLTQSPATLSLSPGERATLSCRASQSVSSYLAWYQQKLGQAPRLLIYDASNRATGIPARFSGSGSGTDFTLTISSLEPEDFAVYYCQQRGKWPPAYTFGQGTKLEIK

SEQ ID NO: 2576 - protein, 110 aa, Artificial Sequence
  Synthetic construct
QSALTQPASVSGSPGQSITISCTGTSSDVGAYNYVSWYQQYPGKAPKLMIYDVSDRPSGVSNRFSGSKSGNTASLTISGLQAEDEADYYCSSYTSSRSGVFGGGTKLTVL

SEQ ID NO: 2577 - protein, 109 aa, Artificial Sequence
  Synthetic construct
SYVLTQPPSVSVAPGKTAWITCGGNNIGSKSVHWYQQRPGQAPVLVIYYDNDRPSGIPERFSGSNSGNTATLTISRVEAGDEADYYCQVWDSISDHSRVFGGGTKLTVL

SEQ ID NO: 2578 - protein, 111 aa, Artificial Sequence
  Synthetic construct
DIVMTQSPLSLPVTPGEPASISCRSSQSLLHTKGYNYLDWYLQRPGQSPQLLIYLVSNRASGVPDRFSGSGSGTDFTLKISRVEAEDVGVYYCMQALQTPTFGQGTKVEIK

SEQ ID NO: 2579 - protein, 112 aa, Artificial Sequence
  Synthetic construct
DIVMTQTPLSLSVTPGQPASISCKSSQSLLHSDGKTYLYWYLQKSGQPPQLLIYELSDRFSGVPDRFSGSGSGTDFTLKISRVEAEDVGVYFCMQTIQPPYTFGRGTKLEIK

SEQ ID NO: 2580 - protein, 109 aa, Artificial Sequence
  Synthetic construct
EIVLTQSPGTLSLSPGERATLSCRASQSVSSSYLAWYQQKPGQAPRLLIYGASSRATGIPDRFSGSGSGTDFTLTISRLEPEDFAVYYCQQFGSSPLYTFGQGTKLEIK

SEQ ID NO: 2581 - protein, 112 aa, Artificial Sequence
  Synthetic construct
QSALTQPASVSGSPGQSITISCTGTSSDVGSYNLVSWYQQHPGKAPKLMIYEGSKRPSGVSNRFSGSKSGNTASLTISGLQAEDEADYYCCSYAGSSTVYVIFGGGTKLTVL

SEQ ID NO: 2582 - protein, 112 aa, Artificial Sequence
  Synthetic construct
DIVMTQFPLSLPVTPGEPASISCRSSQSLLHSNGYNHLDWYLQKPGQSPQLLIYLGSNRASGVPDKFSGSGSGTDFTLKISRVEAEDVGVYYCMQTLQTFFTFGPGTTVDIK

SEQ ID NO: 2583 - protein, 106 aa, Artificial Sequence
  Synthetic construct
SYELTQPPSVSVSPGQTASITCSGDKLGDKYACWYQQRPGQSPVVVIYQDSKRPSGIPERFSGSNFGNTATLTISGTQAMDEAEYFCQAWDSRTVIFGGGTMLTVL

SEQ ID NO: 2584 - protein, 112 aa, Artificial Sequence
  Synthetic construct
QSVLTQPPSVSGAPGQRVTISCTGSSSNIGAGYDVHWYQQLPGTAPKLLIYDNGNRPSGVPDRFSGSKSGTSASLAITGLQADDEADYYCQSFDSSMSGYVVFGGGTKLTVL

SEQ ID NO: 2585 - protein, 108 aa, Artificial Sequence
  Synthetic construct
DIQLTQSPSFLSASVGDRVTITCRASQGISSYLAWYQQKPGKAPKLLIYAASTLQSGVPSRFSGSGSGTEFTLTISSLQPEDFATYYCQQLNSYPEITFGPGTKVDIK

SEQ ID NO: 2586 - protein, 109 aa, Artificial Sequence
  Synthetic construct
SYVLTQPPSVSVAPGQTARITCGGKNIGSKSVHWYQQRPGQAPALIVHSDTDRPSGIPERFSGSKSANTATLTINRVEAGDEADYYCQVWDHSNGPNWVFGGATKLTVL

SEQ ID NO: 2587 - protein, 113 aa, Artificial Sequence
  Synthetic construct
QSALTQPASVSGSPGQSITISCTGTSSDFGSYNLVSWYQQHPGKAPKLMIYEVTKRPSGVSNRFSGSRSGNTASLTISGLQADDEADYYCCSYAGTGTSRRVVFGGGTKLTVL

SEQ ID NO: 2588 - protein, 107 aa, Artificial Sequence
  Synthetic construct
DIQLTQSPSFLSASVGDRVTITCRASQGISDYLAWYQEKPGKAPKLLIYAASTLQSGVPSRFSGSGSGTEFTLTISSLQPEDFATYYCQQLSGYPYTFGQGTKLEIK

SEQ ID NO: 2589 - protein, 107 aa, Artificial Sequence
  Synthetic construct
DIQMTQSPSALSASVGDRVTITCRASQTINTWLAWYQQVPGKAPKILIYRASTLQTGVPSRFSGSGSGTDFTLTISGLQPDDFATYFCHQYNTYPLTFGGGTRVDVK

SEQ ID NO: 2590 - protein, 107 aa, Artificial Sequence
  Synthetic construct
DIQMTQSPSSLSASVGDRVTITCQASHDIGNYLNWYQQKPGKAPKLLIYDASNLDTGVPSRFSGSGSGTDFTFTISSLQPEDIATYYCQQYNNLPLTFGGGTKVEIK

SEQ ID NO: 2591 - protein, 107 aa, Artificial Sequence
  Synthetic construct
DIQMTQSPSSLSASVGDRVTITCRASQGIRNDLGWYQQKPGKAPKRLIYAASSLQSGVPSRFGGSGSGTEFTLTISSLQPEDFATYYCLQYDSYPLTFGGGTKVEIK

SEQ ID NO: 2592 - protein, 108 aa, Artificial Sequence
  Synthetic construct
SYELTQPPSVSVSPGQTARITCSGDALPKQYAYWYQQKPGQAPVLVIYEDSERPSGIPERFSGSSSGTTVTLTISGVQAEDEADYYCQSADSSGTYEVFGGGTKLTVL

SEQ ID NO: 2593 - protein, 113 aa, Artificial Sequence
  Synthetic construct
DIVMTQSPDSLAVSLGERATINCKSSQSVLYSSNNKNYLAWYQQKPGQPPKLLIYWASTRESGVPDRFSGSGSGTDFTLTISSLQAEDVAVYYCQQYYSTPRTFGQGTKVEIK

SEQ ID NO: 2594 - protein, 107 aa, Artificial Sequence
  Synthetic construct
DIQMTQSPSSLSASVGDRVTITCRASQGISNYLAWYQQKPGKVPKLLIDAASTLHSGVPSRFSGSGSGTDFTLTISSLQPEDVATYYCQKYNSAPLTFGGGTRVEIK

SEQ ID NO: 2595 - protein, 110 aa, Artificial Sequence
  Synthetic construct
QSALTQPASVSGSPGQSITISCTRANSDVGGYNYVSWYQQHPGKAPKLIIYDVSNRPSGVSNRFSGSKSGNTASLTISGLQAEDEADYYCTSYTSSSTLVFGTGTKVTVL

SEQ ID NO: 2596 - protein, 107 aa, Artificial Sequence
  Synthetic construct
EIVMTQSPATLSVSPGERATLSCRASQSVSSDLAWYQQKPGQAPSLLIYGTSTRATGIPARFSGSGSGTEFTLTISSLQSEDFALYYCQQYDNWPQTFGQGTKVEIK

SEQ ID NO: 2597 - protein, 111 aa, Artificial Sequence
  Synthetic construct
QSVLTQPPSVSGAPGQRVTISCTGSGSNIGAGYDVHWYQQLPGTAPKLLIFGNTNRPSGVPDRFSGSNSGTSASLAISGLQAEDEADYYCQSYDSSLSGNVFGTGTKVTVL

SEQ ID NO: 2598 - protein, 106 aa, Artificial Sequence
  Synthetic construct
SYELTQPSSVSVSPGQTVRITCSGDLLAKYSARWFHQKPGQAPVMVIYKDSERPSGIPDRFSGSRSGTTVTLTISGAQVDDEADYYCFSAADNKRVFGGGTKLTVL

SEQ ID NO: 2599 - protein, 108 aa, Artificial Sequence
  Synthetic construct
DIVLTQSPGTLSLSPGERATLSCRASQSVSSSYLAWYQQKPGQAPRLLIYGASSRATGIPDRFSGSGSGTDFTLTISRLEPEDFAVYYCQQYGSSPYTFGHGTKVEIK

SEQ ID NO: 2600 - protein, 108 aa, Artificial Sequence
  Synthetic construct
DIQMTQSPSSLSASVGDRVTITCRASQTINNYLNWYQQKSGKAPKLLIYAASTLQSGVPSRFSGSGSGTDFTLTISSLQPEDFATYFCQQTYSTLGLTFGGGTKVEIK

SEQ ID NO: 2601 - protein, 109 aa, Artificial Sequence
  Synthetic construct
SYELTQPPSVSVSPGQTARITCSGDALPKKYAYWYQQKSGQAPVLIIYEDIRRPSGIPGRFSGSSSGTMATLTISGAQVGDEGDYYCYSTDSSADPRGVFGGGTKLTVL

SEQ ID NO: 2602 - protein, 108 aa, Artificial Sequence
  Synthetic construct
SYVLTQPPSVSVAPGKTARITCGGNNFGSKSVHWYQQRPGQAPVLVIYYDSDRPSGIPERFSGSNSGNTATLTISRVEAGDEADYYCQVWDSSSDHYVFGTGTKVTVL

SEQ ID NO: 2603 - protein, 108 aa, Artificial Sequence
  Synthetic construct
DIQMTQSPSTLSASVGDRVIITCRASQSISSWLAWYQQKPGKAPKLLIYKASSLESGVPSRFSGSGSGTEFTLTISSLQPDDFATYYCQQYNSYFPYTFGQGTKLEIK

SEQ ID NO: 2604 - protein, 110 aa, Artificial Sequence
  Synthetic construct
QSALTQPPSASGSPGQSVTVSCTGTSRDVGGYNFVSWYQQHPGKAPKLMIYEVTKRPSGVPDRFSGSKSGNTASLTVSGLQAEDEADYYCCSYGGSNGYVFGTGTKVTVL

SEQ ID NO: 2605 - protein, 107 aa, Artificial Sequence
  Synthetic construct
EIVLTQSPGTLSLSPGERATLSCRASQSVSSRYLAWYQQKPGQAPRLLIYGASSRATGIPGRFSGSGSGADFALTINRLEPEDFAVYYCQHYGSSWTFGQGTKVEIK

SEQ ID NO: 2606 - protein, 110 aa, Artificial Sequence
  Synthetic construct
EIVLTQSPGTLSLSPGERATLSCRASQSVSNSYLAWYQQKPGQAPRLLMYGTSSRATGIPDRFSGSGSGTDFTLTISRLEPEDFAVYYCQQYGNSLPMYTFGQGTKLEIK

SEQ ID NO: 2607 - protein, 106 aa, Artificial Sequence
  Synthetic construct
SYELTQPPSVSVSPGQTASITCSGDKLGDKYACWYQQKPGQSPVLVIYQDSKRPSGIPERFSGSNSGNTATLTISGTQAMDEADYYCQAWDSSTVVFGGGTKLTVL

SEQ ID NO: 2608 - protein, 110 aa, Artificial Sequence
  Synthetic construct
QSVLTQPPSASGTPGQRVTISCSGSSSNIGINYVYWYQQLPGTAPKLLIYRNNQRPSGVPDRFSASKSGTSASLAISGLRSEDEADYYCAAWDDSLSGEVFGGGTKLTVL

SEQ ID NO: 2609 - protein, 106 aa, Artificial Sequence
  Synthetic construct
EIVLTQSPATLSLSPGERATLSCRASQSVSTYLAWYQQKPGQAPRLVIYGASNRATGIPARFSASGSGTDFTLTISSLQPEDFAVYYCQQRGSWYTFGQGTKLQIK

SEQ ID NO: 2610 - protein, 109 aa, Artificial Sequence
  Synthetic construct
EIVLTQSPATLSLSPGERATLSCRASQSVSSFLAWYQHKPGQAPRLLIYDASNRATGIPARFSGSGSGTDFTLTISSLEPEDFAVYYCQQRSNWPPLITFGQGTRLEIK

SEQ ID NO: 2611 - protein, 108 aa, Artificial Sequence
  Synthetic construct
SYELTQPPSVSVSPGQTARITCSGDALPKKYAYWYQQKSGQAPVLLIYEDSKRPSGIPERFSGSSSGTMATLTISGAQVEDEADYYCFSTDSSGNSGVFGGGTKLTVL

SEQ ID NO: 2612 - protein, 108 aa, Artificial Sequence
  Synthetic construct
EIVLTQSPGTLSLSPGERATLSCRASQSVASNYLAWYLQIPGQAPRLLISGASSRATGVPDRFSGGGSGTDFTLTISRLEPEDFAVYYCQQYGTSPATFGQGTRLGIK

SEQ ID NO: 2613 - protein, 107 aa, Artificial Sequence
  Synthetic construct
DIQMTQSPSTLSASVGDRVTITCRASQSISSWLAWYQQKPGKAPKLLIYKASSLESGVPSRFSGSGSGTEFTLTISSLQPDDFATYYCQQYNSYSVTFGQGTKVEIK

SEQ ID NO: 2614 - protein, 112 aa, Artificial Sequence
  Synthetic construct
DIVMTQSPLSLPVTPGEPASISCNSSQSLLHNNGYNYLDWYLQKPGQSPQLLIYLGSNRASGVPDRFSGSGSGTDFTLKISRVEAEDVGVYSCMQPLQTPWTFGQGTKVEIK

SEQ ID NO: 2615 - protein, 110 aa, Artificial Sequence
  Synthetic construct
QSALTQPRSVSGSPGQSVTISCTGTSSDVGGYNSVSWYQQHPGKAPKLMIYDVSKRPSGVPDRFSGSKSGNTASLTISGLQADDEADYYCCSNAGSHSYVFGSGTKVTVL

SEQ ID NO: 2616 - protein, 110 aa, Artificial Sequence
  Synthetic construct
QSVLTQPPSASGTPGQRVTISCSGSTSNIGSNYVYWYQQLPGTAPELLMYRNNQRPSGVPDRFSGSKSGTSASLAISGLRSEDEADYYCAAWDDSLSGVVFGGGTKLTVL

SEQ ID NO: 2617 - protein, 106 aa, Artificial Sequence
  Synthetic construct
EIVMTQSPATLSVSPGERATLSCRASQSVSSNLAWYQQKPGQAPRLLFYGASTRATGIPARFSGSGSGTEFTLTISSLQSEDFAVYYCQQYDNWLTFGGGTKVEIK

SEQ ID NO: 2618 - protein, 109 aa, Artificial Sequence
  Synthetic construct
SYELTQPPSVSVSPGQTARITCSGDALPKKYVYWYQQKSGQAPVLVIYEDNKRPSGIPERFSGSSSGTMATLTISGAHVDDEGDYYCYSTDNSGNHRGVFGTGTKVTVL

SEQ ID NO: 2619 - protein, 107 aa, Artificial Sequence
  Synthetic construct
DIQMTQSPSSVSASVGDRVTITCRASQGISSWLAWYQQKPGKAPNLLIYAASSVQSGVPSRFSGSGSGTDFTLTISSLQPEDFATYFCQQTKTFPLSFGGGTKVGIK

SEQ ID NO: 2620 - protein, 110 aa, Artificial Sequence
  Synthetic construct
QSVLTQPSSASGTPGQRVTIPCSGRDSNIGDNTVQWFQQFPGMAPKLLIHSNDRRPSGVPARFSGSKSGTSASLAISDLQSDDEADYFCAAWDDNLSGPVFGGGTKVTVL

SEQ ID NO: 2621 - protein, 106 aa, Artificial Sequence
  Synthetic construct
DIQMTQSPSSLSASVGDRVTISCQTSQDISIYLNWYQQKPGKAPKLLIYDASNLEAGAPSRFSGSGSGTDFTFTISSLQPEDIATYYCQHYDDVPRFGPGTKVDLK

SEQ ID NO: 2622 - protein, 108 aa, Artificial Sequence
  Synthetic construct
SSELTQDPAVSVALGQTVRITCQGDSLRTYYASWYQQKPGQAPTLVIYGKTNRPSGIPVRFSGSFSGNTASLTITGAQAEDEADYYCNSRDSSGNHVVFGGGTKLTVL

SEQ ID NO: 2623 - protein, 113 aa, Artificial Sequence
  Synthetic construct
DVVMTQSPLSLPVTPGEPASISCRSSQSLLHGNGYNYLDWYLQRPGQSPQLLIYLGSTRASGVPDRFSGSGSGTDFTLKISRVEAEDVGVYFCMQALQTPPWTFGQGTKVEIK

SEQ ID NO: 2624 - protein, 107 aa, Artificial Sequence
  Synthetic construct
DIQMTQSPSSVSASVGDRVTITCRASQDISSWLAWYQQKPGKAPQLLIYGASSLQSGVPSRFSGSGSGTDFTLTISSLQPEDFATYYCLQANSFPHTFGQGTRLEIK

SEQ ID NO: 2625 - protein, 106 aa, Artificial Sequence
  Synthetic construct
DIQMTQSPSTLSASVGDRVTITCRASQSISRWLAWYQQKPGKAPKLLIYKASSLESGVPSRFSGSGSGTEFTLTISSLQPDDFATYYCQQYNSPWTFGQGTKVEIK

SEQ ID NO: 2626 - protein, 106 aa, Artificial Sequence
  Synthetic construct
SYELTQPPSVSVSPGQTASITCSGDNLGDKFICWYHQKPGQSPVLVIYEDNKRPSGIPERFSGSNSGNTATLTISGTQTMDEADYFCQAWASGTGVFGGGTKLTVL

SEQ ID NO: 2627 - protein, 111 aa, Artificial Sequence
  Synthetic construct
QSVLTQPPSVSGAPGQRVTISCTGSSSNIGAGYDVHWYQQLPGTAPKLLIYGNSNRPSGVPDRVSGSKSGTSASLAITGLQAEDEADYYCQSYDSSLSGYVFGSGTKVTVL

SEQ ID NO: 2628 - protein, 110 aa, Artificial Sequence
  Synthetic construct
QSVLTQPPSASGTPGQTVTISCSGSRSNIGNEYVHWYQRLPGTAPKLLIYRNNQRPSEVPDRFSGSKSGTSASLVISGLRSEDEADYYCAAWDDSLSGWVFGGATKLTVL

SEQ ID NO: 2629 - protein, 107 aa, Artificial Sequence
  Synthetic construct
EIVLTQSPATLSLSPGERATLSCRASQSVSSYLAWYQQKPGQAPRLLIYDASNRATGIPARFSGSGSGTDFTLTISSLEPEDFAVYYCQQRSNWPLTFGGGTKVEIK

SEQ ID NO: 2630 - protein, 110 aa, Artificial Sequence
  Synthetic construct
QSALTQPASVSGSPGQSITISCTGTSSDVGSYNLVSWYQQHPGKAPKLMIYEVSKRPSGVSNRFSGSKSGNTASLTISGLQAEDEADYYCCSYAGSSTLVFGGGTKLTVL

SEQ ID NO: 2631 - protein, 110 aa, Artificial Sequence
  Synthetic construct
QSALTQPPSASGSPGQSVTISCTGTSSDVGGYKYVSWYQQHPGKAPKHMIYEVSKRPSGVPDRFSGSKSGNTASLTVSGLQAEDEADYYCSSYAGSNKFVFGGGTKLTVL

SEQ ID NO: 2632 - protein, 106 aa, Artificial Sequence
  Synthetic construct
SYELTQPPSVSVSPGQTVSITCSGDKLGDKYTCWYQQKPGQPPVLVIYQDNKRPSGIPERLSGSNSGNTAILTISGAQAMDEADYYCQAWDSSTGVFGGGTKLTVL

SEQ ID NO: 2633 - protein, 106 aa, Artificial Sequence
  Synthetic construct
SYELTQPPSVSVSPGQTASITCSGDKLGDKYTCWYQQKPGQSPVLVIYQDNKRPSGIPERFSGSNSGNTATLTISGTQAMDEADYYCQAWDSSTAVFGGGTKVTVL

SEQ ID NO: 2634 - protein, 109 aa, Artificial Sequence
  Synthetic construct
EIVMTQSPATLSVSPGERATLSCRASHSISSNLAWYQQKPGQAPRLLMYGASIRATGFPARFRGSGSGTEFTLTITSLQSEDFAVYYCQRYNNWPPEGTFGQGTKVEIK

SEQ ID NO: 2635 - protein, 109 aa, Artificial Sequence
  Synthetic construct
EIVLTQSPGTLSLSPGESATLSCRASQSVDRTYLTWYQQKPGQAPRLLMSGASTRASGVPDRFSGSGSETDFTLTITRLQPEDFAVYYCQQYGRTPPYSFGQGTKLDMK

SEQ ID NO: 2636 - protein, 108 aa, Artificial Sequence
  Synthetic construct
EIVMTQSPATLSVSPGETATLSCRASQSVSSNLAWYQQKPGQAPRLLIYGASTRATGIPARFSGSGSGTEFTLTISSLQSEDFAVYYCQQYNNWPPATFGQGTKLEIK

SEQ ID NO: 2637 - protein, 109 aa, Artificial Sequence
  Synthetic construct
EIVLTQSPGTLSLSPGERATLSCRASQSVSSSYLAWYQQKPGQAPRLLIYGASSRATAIPDRFSGSGSGTDFTLTISRLEPEDFAVYYCQQYGSSPMYTFGQGTKLEIK

SEQ ID NO: 2638 - protein, 107 aa, Artificial Sequence
  Synthetic construct
EIVLTQSPGTLSLSPGERATLSCRASQSVSSSYLAWYQQNPGQAPRLLIYAASSRATGIPDRFSGSGSGADFTLTISRLEPEDFAVYYCQHCGSSITFGQGTRLEIK

SEQ ID NO: 2639 - protein, 110 aa, Artificial Sequence
  Synthetic construct
QSVLTQPPSVSAAPGQKVTISCSGSSSNIGNNYVSWYQQLPGTAPQLLIYENNKRPSEIPDRFSGSKSGTSATLGISGLQTGDEADYYCGTWDSSLSAVVFGGGTKLTVL

SEQ ID NO: 2640 - protein, 108 aa, Artificial Sequence
  Synthetic construct
EIVMTQSPATLSVSPGERVTLSCRASQSVRSNLAWYQQKPGQAPRLLIYEASTRATGIPARFSGRGSGTEFTLTISSLQSEDFAVYYCQQYNNWPFWTFGQGTKLEFK

SEQ ID NO: 2641 - protein, 110 aa, Artificial Sequence
  Synthetic construct
QSVLTQPPSPSGTPGQRVTISCSGSSSNIGSNTVNWYQQLPGTAPKLLIYSNDQRPSGVPDRFSGSKSGTSASLAISGLQSEDEADYHCATWDDSLNGPVFGGGTKLTVL

SEQ ID NO: 2642 - protein, 113 aa, Artificial Sequence
  Synthetic construct
DIVMTQSPDSLAVSLGERATINCKSSQSVLYSSNSKNSLAWYQQKPGQPPKLLIYWASTRESGVPDRFRGSGSGTDFTLTISSLQAEDVAVYYCQQYYSTPYTFGQGTKLETK

SEQ ID NO: 2643 - protein, 112 aa, Artificial Sequence
  Synthetic construct
DIVMTQSPLSLPVTPGEPASISCRSSQSLLHSNGYNYLDWYLQKPGQSPQLLIYLGSNRASGVPDRFSGSGSGTDFTLKISRVEAEDVGVYYCMQALQTPWTFGQGTKVEIK

SEQ ID NO: 2644 - protein, 108 aa, Artificial Sequence
  Synthetic construct
ERVMTQSPATLSVSPGERATLSCRASQSVHSNLAWYQQKPGQAPRLLIYGASTRATGIPARFSGSGSGTEFTLTISSLQSEDFAVYYCQQYNDWPPYTFGQGTKLEIK

SEQ ID NO: 2645 - protein, 110 aa, Artificial Sequence
  Synthetic construct
QSVLTQPPSVSAAPGQKVTISCSGSSSNIGNNYVSWYQQVPGTAPKLLIYDSNKRPSGIPDRFSGSKSGTSATLAITGLQTGDEADYYCGAWDSSLSSVVFGGGTKLTVL

SEQ ID NO: 2646 - protein, 107 aa, Artificial Sequence
  Synthetic construct
DIQLTQSPSFLSASVGDRVTITCRASQGISSDLAWYQQKPGKAPKVLIYAASTFQSAVPSRFSGSGSGTEFTLTISSLQPEDFATYYCQQLNSYPITFGQGTRLEIR

SEQ ID NO: 2647 - protein, 107 aa, Artificial Sequence
  Synthetic construct
DIQMTQSPSSLSASVGDRVTITCRASQNIGIYLNWYQVKPGKAPKLLIYAASNLQGGVPSRFSGSGSRTDFTLTITSLQPEDFATYSCQQTYTTPWTFGQGIKVEIK

SEQ ID NO: 2648 - protein, 111 aa, Artificial Sequence
  Synthetic construct
QSALTQPRSVSGSPGQSVTISCTGTSSDVGGYNYVSWYQQHPGKAPKFLIYDVSKRPSGVPDRFSGSKSGNTASLTISGLQAEDEADYYCCSYAGSSTLGVFGTGTKVTVL

SEQ ID NO: 2649 - protein, 109 aa, Artificial Sequence
  Synthetic construct
SYELTQPPSVSVSPGQTARITCSGDALPKKYAYWYQQKSGQAPVLIIYEDSRRPSGIPGRFSGSSSGTMATLTISGAQVEDEADYYCYSTDSSADHRGVFGGGTKLTVL

SEQ ID NO: 2650 - protein, 107 aa, Artificial Sequence
  Synthetic construct
EIVMTQSPATLSLSPGERATLSCRASQSVSSNLAWYQQKPGQAPRLLIYGASTRATGIPARFSGSGSGTEFTLTISSLQSEDFAVYYCHQYNDWPFTFGPGTKVETK

SEQ ID NO: 2651 - protein, 107 aa, Artificial Sequence
  Synthetic construct
DIQMTQSPSSLSASVGDRVTLTCRASQSINSYLNWYQQKPGKAPNLLIYGSSSLQSGVPSRFSGSGSGTEFTLTISSLQPEDFATYYCQQSYTTPYTFGQGTKLEIK

SEQ ID NO: 2652 - protein, 112 aa, Artificial Sequence
  Synthetic construct
QSALTQPASVSGSPGQSITISCTETSSDIGRYNYVSWYQQYPGKAPRLIIYDVSNRPSGVSNRFSGSRSGNTASLTISGLQAEDEADYYCSSYISGYTLVWVFGGGTRLTVI

SEQ ID NO: 2653 - protein, 108 aa, Artificial Sequence
  Synthetic construct
SYELTQPPSVSVSPGQTATITCSADKLGKKYVCWYQQKPGQSPVLVIYQNNRRPSGIPERFSGSNSGNTATLTISGTQPMDEADYYCQAWDSSTASFVFGTGTKVTVL

SEQ ID NO: 2654 - protein, 107 aa, Artificial Sequence
  Synthetic construct
DIQMTQSPSSLSASVGDRVTITCQASQDISNYLNWYQQKPGKAPKLLIYDASNLETGVPSRFSGSGSGTDFTFTISSLQPEDIATYYCQQYDNLPSTFGQGTNLEIK

SEQ ID NO: 2655 - protein, 107 aa, Artificial Sequence
  Synthetic construct
DIQMTQSPSSLSASVGDRVTITCRAAQSIGTYLNWYQQKPGKAPELLIYTASSLQSGVPSRFSGGGSGTDFTLTITTLQPEDFATYSCQQSYTVPYTFGQGTKVEIK

SEQ ID NO: 2656 - protein, 107 aa, Artificial Sequence
  Synthetic construct
EIVLTQSPATLSLSPGERATLSCRASQSVSSYLAWYQQKPGQAPRLLIYDASNRATGIPARFSGSGSGTDFTLTISSLEPEDFAVYYCQQRSNWPPSFGPGTKVDIK

SEQ ID NO: 2657 - protein, 106 aa, Artificial Sequence
  Synthetic construct
DIQMTQSPSTLSASVGDRVTITCRASQSISSWLAWYQQKPGKAPKLLIYKASSLESGVPSRFSGSGSGTEFTLTISSLQPDDFATYYCQQYNSLYTFGQGTKLEIK

SEQ ID NO: 2658 - protein, 107 aa, Artificial Sequence
  Synthetic construct
DIQMTQSPSSLSASVGDRVTITCQASQDISNSLNWYQQKPGKAPYLLIYDASTLEAGVPSRFSGGGSGTDFTFTISSLQPEDIATYYCQHYHNLPPTFGPGTKVDIK

SEQ ID NO: 2659 - protein, 104 aa, Artificial Sequence
  Synthetic construct
DIQMTQSPSTLSASVGDRVTITCRASQSINNWLAWFQQKPGKAPKLLIYEASSLKSGVPSRFSGSGSGTEFTLTISSLQPDDFATYYCRQYDNHFGGGTRVEIK

SEQ ID NO: 2660 - protein, 108 aa, Artificial Sequence
  Synthetic construct
DIQMTQSPSSLSASVGDRVNMTCRASQSISTYLNWYQQKPGKAPKLLIYAASSLQSGVPSRFSGSGSGTDFTLTISSLQPEDFATYCCQQSYSTPPWTFGQGTKVEIK

SEQ ID NO: 2661 - protein, 112 aa, Artificial Sequence
  Synthetic construct
DIVMTQSPLSLPVTPGEPASISCRSSQSLLFSNGYTYLNWYLQKPGQSPQLLIYLGSNRASGVPDRFSVSGSGTDFTLIISRVEAEDVGVYFCMQALQTPWTFGQGTKVEIK

SEQ ID NO: 2662 - protein, 108 aa, Artificial Sequence
  Synthetic construct
SYELTQPLSVSVSPGQTARITCSGDALPKQYAYWYQQKPGQAPVLVIYEDSERPSGIPERFSGSSSGTTVTLTISGVQAEDEADYYCQSADSSGTYEVFGGGTKLTVL

SEQ ID NO: 2663 - protein, 110 aa, Artificial Sequence
  Synthetic construct
QSVLTQPPSASGTPGQWVTISCFGSSSNIGSNNVNWYQQLPGTAPKVLIHSNNQRSSGVPGRFSASRSGTSASLVIAGLQSEDEADYHCSAWDVILNGWVFGGGTKLTVL

SEQ ID NO: 2664 - protein, 109 aa, Artificial Sequence
  Synthetic construct
EIVLTQSPGTLSLSPGERAALSCRASQSVTSSYLAWYQQKPGQAPRLLIYGASSRATGIPDRFSGSGSGTDFTLTISRLEPEDFAVYYCQQYGSSPQLTFGGGTKVEIK

SEQ ID NO: 2665 - protein, 108 aa, Artificial Sequence
  Synthetic construct
DIQMTQSPSSLSASAGDRVTITCRASQGIVNYVAWYQQKPGKVPKLLIYAASILQSGVPFRFSGSGSGTDFTLTIGSLQPEDVATYYCQNYYNAPQISFGGGTKVDIK

SEQ ID NO: 2666 - protein, 111 aa, Artificial Sequence
  Synthetic construct
QSALTQPASVSGSPGQSITISCTGSSSDVGGYKYVSWYQQHPGKAPKLIIYEVSNRPSGVPHRFSGSKSGNTASLTISGLQAEDEADYYCSAYTSGSILLLFGGGTKLTVL

SEQ ID NO: 2667 - protein, 106 aa, Artificial Sequence
  Synthetic construct
DIQMTQSPSSLSASVGDRVTISCQTSQDINIYLNWYQQKPGKAPKLLIYDASNLEAGAPSRFSGSGSGTDFTFTISSLQPEDIATYYCQHYDNLPRFGPGTKVDIK

SEQ ID NO: 2668 - protein, 107 aa, Artificial Sequence
  Synthetic construct
SYELTQPPSVSVSPGQTASITCSGDKLGAKYAYWYQQKPGQSPVLVISQDTKRPSGIPERFSGSNSGNTATLTISGTQAMDEADYYCQTWDSNIFYVFGTGTKVTVL

SEQ ID NO: 2669 - protein, 110 aa, Artificial Sequence
  Synthetic construct
QSVLTQPPSVSAALGQKVTISCSGSSSNIGKYYVSWYQQLPGTEPRLLIYDNNKRPSGIPDRFSGSKSGTSVTLGITGLQTGDEADYYCGTWDSSLGVGVFGGGTKLTVL

SEQ ID NO: 2670 - protein, 107 aa, Artificial Sequence
  Synthetic construct
DIQMTQSPSSLSASVGDRVTITCRASQGISNYLAWYQQKPGKVPKLLIYAASTLQSGVPSRFSGSGSGTDFTLTISSLQPEDVATYYCQKYNSAPLTFGGGTKVEIK

SEQ ID NO: 2671 - protein, 106 aa, Artificial Sequence
  Synthetic construct
DIQMTQSPSSLSASVGDRVTITCRASQSISSYLNWYQQKPGKAPKLLIYAASSLQSGVPSRFSGSGSGTDFTLTISSLQPEDFATYYCQQSYSTGTFGQGTKVEIK

SEQ ID NO: 2672 - protein, 107 aa, Artificial Sequence
  Synthetic construct
EIVLTQSPATLSLSPGERAALSCRASQSVRSYLAWYQQRPGQAPRLLIYDASNRATGIPARFSGSGSGTDFTLTINSLEPEDFAVYYCQQRSSWPLTFGGGTKVEIK

SEQ ID NO: 2673 - protein, 110 aa, Artificial Sequence
  Synthetic construct
QSALTQPRSVSGSPGQSVTISCTGTSSDIGAYNYVSWYQHHPGKVPKLMIYDVSKRPSGVPDRFSGSKSGNTASLTISGLQAEDEADYYCCSDAGRHTYVFGAGTGVTVL

SEQ ID NO: 2674 - protein, 108 aa, Artificial Sequence
  Synthetic construct
EIVLTQSPGTLSLSPGERATLSCRASQSISSSYLAWYQQKPGQAPRLLIYGASSRATDIPDRFSGSGSGTDFTLTISRLEPEDFALYWCQQYSFSLYTFGQGTKLEIK

SEQ ID NO: 2675 - protein, 110 aa, Artificial Sequence
  Synthetic construct
QSVLTQPPSVSAAPGQKVTISCSGGSSNIGSNYVSWYQQVPGTAPKLLIYEDNERPSGIPDRFSGSKSGTSATLGITGLQTGDEADYYCGTWDRSRSTVVLGGGTKLTVL

SEQ ID NO: 2676 - protein, 106 aa, Artificial Sequence
  Synthetic construct
SYELTQPPSVSVSPGQTASITCSGDKLGDKYACWYQQKPGQSPILVIYQDNKRPSGIPERFSGSNSGNTATLTISGTQTMDEADYYCQAWDSSNVVFGGGTKLTVL

SEQ ID NO: 2677 - protein, 111 aa, Artificial Sequence
  Synthetic construct
QSVLTQSPSVSGAPGRRVTISCTGSSSNIGAGFDVHWYQQFPGTAPKLLIYANSNRPSGVPDRFSGSKSGTSASLAITGLQAEDEADYYCQSYDNSLSGSVFGGGTKLTVL

SEQ ID NO: 2678 - protein, 108 aa, Artificial Sequence
  Synthetic construct
EIVLTQSPGTLSLSPGERATLSCRASQSVSSSYLAWYQQKPGQAPRLLIYGASSRATGIPDRFSGSASGTDFTLTISRLEPEDFAVYYCHHYDSSRLTFGPGTKVDIK

SEQ ID NO: 2679 - protein, 107 aa, Artificial Sequence
  Synthetic construct
EIVLTQSPATLSLSPGERATLSCRASQSVSIYLAWYQQKPGQAPRLLVYDASSRATGIPARFSGSGSGTDFTLTISSLEPEDFAVYYCQQRTNWPLTFGGGTKVEIK

SEQ ID NO: 2680 - protein, 109 aa, Artificial Sequence
  Synthetic construct
EIVLTQSPATVSLSPGERATLSCRASHIVSNYLAWYQQKPGQAPRLLIYDASKRATGIPARFSGSGSGTDFSLTISSLEPEDFAVYYCQQRSNRPPTWTFGQGTKVEIK

SEQ ID NO: 2681 - protein, 113 aa, Artificial Sequence
  Synthetic construct
DIVMTQTPLSLSVTPGQPASISCKSSQSLLHSDGKTYLYWYLQKPGQPPQLLIYEVSNRFSGVPDRFSGSGSGTDFTLKISRVEAEDVGLYYCMQSIQLPGLTFGGGTKVEIK

SEQ ID NO: 2682 - protein, 107 aa, Artificial Sequence
  Synthetic construct
DIQMTQSPSSLSASVGDRVTITCQASQDISNYLNWYQQKPGKAPKLLIYDASNLETGVPSRFSGSGSGTDFTFTISSLQPEDVATYYCQQYDNLSLTFGGGTKVEIK

SEQ ID NO: 2683 - protein, 111 aa, Artificial Sequence
  Synthetic construct
QSALTQPASVSGSPGQSITISCTGTSSDVGSYNLVSWYQHHPGKAPKLMISEDSKRPSGVSSRFSGSKSGNTASLTISGLQAEDEADYYCCSYAGSTTYWVFGGGTKLTVL

SEQ ID NO: 2684 - protein, 106 aa, Artificial Sequence
  Synthetic construct
EIVMTQSPATLSVSPGERATLSCRASQSVSSNLAWYQQKPGQAPRLLIYGASTRATGIPARFSGSGSGTEFTLTISSLQSDDFAVYYCQQYNNWLTFGGGTKVEIK

SEQ ID NO: 2685 - protein, 111 aa, Artificial Sequence
  Synthetic construct
NFMLTQPHSVSESPGETVTISCTRSSGSIASNSVQWYQQRPGSAPTTVIYENNQRPSGVPDRFSGSIDSSSNSASLTISGLKTGDEADYYCQSYDRSNLAVFGGGTQLTVL

SEQ ID NO: 2686 - protein, 110 aa, Artificial Sequence
  Synthetic construct
QSVLTQPPSVSAAPGQKVTISCSGSSSNIGINHVSWYQQLPGTAPKLLIYDNNKRPSGIPDRFSGSKSGTSATLGINGLQSGDEADYYCGTWDSSLRAVVFGGGTTLTVL

SEQ ID NO: 2687 - protein, 107 aa, Artificial Sequence
  Synthetic construct
DIQMTQSPSTLSASVGDRVTITCRASQSISSWLAWYQQKPGKAPKLLIYKASSLESGVPSRFSGSGSGTEFTLTISSLQPDDFATYYCQQYNSYSYTFGQGTKLEIK

SEQ ID NO: 2688 - protein, 108 aa, Artificial Sequence
  Synthetic construct
DIQMTQSPSSLSASVGDRVTITCRASQSISTYVHWYQQKPGEAPKLLIYAASSLQSGVPSRFSGSGSGTDFTLTISSLQPEDFATYYCQQSYSTLVYSFGQGTKLEIK

SEQ ID NO: 2689 - protein, 108 aa, Artificial Sequence
  Synthetic construct
SYELTQPPSVSVSPGQTARITCSGDALPKKYAYWYQQKSGQAPVLVIYEDNKRPSGIPERFSGSSSGTMATLTISGAQVEDEADYYCYSTDSSGNHRLFGGGTKLTVV

SEQ ID NO: 2690 - protein, 111 aa, Artificial Sequence
  Synthetic construct
QSALTQPRSVSGSPGQSVSISCTGSSSDVGGSDHVSWYQLHPDRAPKLILYDVSRRPSGVSDRFSGSKSGDRASLTISGLQSEDEADYYCCSYAGDDVYVIFGGGTKLTVL

SEQ ID NO: 2691 - protein, 108 aa, Artificial Sequence
  Synthetic construct
EIVLTQSPGTLSLSPGERATLSCRASQSVTNSYLAWYQQKPGQAPRLLIYGASSRATGIPDRFSGSGSGTDFTLTISRLEPEDFAVFYCQQYGYSPYTFGQGTKLEIK

SEQ ID NO: 2692 - protein, 107 aa, Artificial Sequence
  Synthetic construct
DIQMTQSPSSLSASVGDRVTITCQASQDISNYLNWYQQRPGKAPKLLVYDASNLETGVPSRFSGGGSGTEFTFTINSLQPGDIATYYCQQYDNLPFTFGPGTKVDFE

SEQ ID NO: 2693 - protein, 107 aa, Artificial Sequence
  Synthetic construct
DIQLTQSPSFLSASVGDRVTITCRASQGISSFLAWYQQKPGKAPNLLIYAASTLQSGVPSRFSGSGSGTEFTLTISSLQPEDFATYYCQQLNSYPFTFGPGTKVDIK

SEQ ID NO: 2694 - protein, 108 aa, Artificial Sequence
  Synthetic construct
SYELTQPPSVSVSPGQTARITCSGDALPKQYAYWYQQKPGQAPVLVIYKDSERPSGIPERFSGSSSGTTVTLTISGVQAEDEGDYYCQSADSSGTYYVFGTGTKVTVL

SEQ ID NO: 2695 - protein, 107 aa, Artificial Sequence
  Synthetic construct
DIQMTQSPSSLSASVGDRVTITCRASQSISSYLNWYQQKPGKAPNLLIYAASSLQSGVPSRFSGSGSGTDFTLTISSLQPEDFATYYCQQSFSTPRTFGQGTKVEIK

SEQ ID NO: 2696 - protein, 111 aa, Artificial Sequence
  Synthetic construct
QSALTQPASVSGSPGQSITISCTGTSSDIGGYNFVSWYQQRPGKAPKLMIYDLTYRPSGVSDRFSGSKSGNTASLTIAGLQAEDEADYYCSSFTRGSAPVLFGGGTKLTVL

SEQ ID NO: 2697 - protein, 111 aa, Artificial Sequence
  Synthetic construct
QSVLTQPPSVSGAPGQRVAISCHGSSSNIGADYDVHWYQKFPETGPELLIYGNTNRPSGVPDRFSGSKSGTSASLAISGLQAEDEAEYYCQSFDNTLSSYVFGTGTKVTVL

SEQ ID NO: 2698 - protein, 107 aa, Artificial Sequence
  Synthetic construct
DIQMTQSPSSLSASVGDRVTITCRASQGISNYLAWFQQRPGKAPKSLISGAFTLQSGVPSKFSGSGSGTDFTLTISSLQPEDFATYYCQQYHSYPPTFGQGTRLEIK

SEQ ID NO: 2699 - protein, 108 aa, Artificial Sequence
  Synthetic construct
ETVLTQSPGTLSLSPGERATLSCRASQSVSSIYLAWYQQKPGQAPRLLIYGASSRALGIPDRFSGSGSGTDFTLTISRLEPEDFAVYYCHQYSSPTWTFGQGTKVEFK

SEQ ID NO: 2700 - protein, 109 aa, Artificial Sequence; identical to SEQ ID NO: 2680
  Synthetic construct

SEQ ID NO: 2701 - protein, 108 aa, Artificial Sequence
  Synthetic construct
EIVLTQSPATLSLSPGERATLSCRASQSVSSYLAWYQQKPGQAPRLLIYDASNRATGIPARFSGSGSGTDFTLTISSLEPEDFAVYYCQHRSNWPPYTFGQGTKLEIK

SEQ ID NO: 2702 - protein, 112 aa, Artificial Sequence
  Synthetic construct
QSVLTQPPSVSGAPGQWVTISCTGSSSNIGAGYDVHWYQHLPGAAPKLLIHGNNNRPSGVPDRFSGSKSGTSASLAIAGLQAEDEADYYCQSYDSSLSGSWVFGGGTKLTVL

SEQ ID NO: 2703 - protein, 106 aa, Artificial Sequence
  Synthetic construct
SYELTQPPSVSVSPGQTASITCSGDKLGDKYACWYQQKPGQSPLLVIYQDIKRPSGVPERFSGSNSGNTATLTISGTQAMDEADYYCQAWVSSTVVFGGGTKLTVL

SEQ ID NO: 2704 - protein, 110 aa, Artificial Sequence
  Synthetic construct
QSVLTQPPSVSEAPRQRVTISCSGSSSNIGNNAVNWYQQLPGKAPKLLVYYDDLLPSGVSDRFSGSRSDTSASLAISGLQSDDEAVYYCAAWDDSLNGQVFGGGTKLTVL

SEQ ID NO: 2705 - protein, 111 aa, Artificial Sequence
  Synthetic construct
QSVLTQSPSVSGAPGQRVTISCTGSDSNIGAGYDVHWYQQLPGTAPKLLIYDNNNRPSGVPDRFSGSKSDTSASLAITRLQAEDEADYYCQSYDSSLSGLLFGGGTKLTVL

SEQ ID NO: 2706 - protein, 108 aa, Artificial Sequence
  Synthetic construct
SSDLTQDHAVSVALGQTVRITCHGDSLRSYYVSWYQQKSGQAPVLVIYDENKRPSGIPDRFSGSYSGNTASLTITGAQAEDEADYYCHSRDSSGNNLLFGTGTKVTVL

SEQ ID NO: 2707 - protein, 106 aa, Artificial Sequence
  Synthetic construct
SYELTQPPSVSVSPGQTASITCSGDKLGDKDACWYQQKPGQTPVLVIYQDSKRPSGIPERFSGSNSGNTATLTISGTQAMDEADYYCQAWDSSTYVFGTGTKVTVL

SEQ ID NO: 2708 - protein, 108 aa, Artificial Sequence
  Synthetic construct
SYVLTQPPSVSVAPGETARITCGGNNIGSESVHWYQQKPGQAPVLVIYYDSDRPSGIPERFSGSNSGNTATLTISRVEAGDEADYYCQVWDSNSDHPVFGTGTEVTVL

SEQ ID NO: 2709 - protein, 106 aa, Artificial Sequence
  Synthetic construct
SFRLTQPPSVSVSPGQTASITCSGDDWGEKDASWYQQKPGQSPILLIYQDTKRPSGIPERFSASNSGNTATLTISGTQAMDEADYYCQARDSSFVVFGGGTKLTVL

SEQ ID NO: 2710 - protein, 111 aa, Artificial Sequence
  Synthetic construct
DIVMTQTPLSLSVTPGQPASISCKSSQSLLHDNGKTYLSWYLQKSGQSPQLLIYEVSTRFSGVPDRFSGSGSGTHFTLKISRVEAEDIGIYYCMQGVHLITFGQGTRLEIK

SEQ ID NO: 2711 - protein, 110 aa, Artificial Sequence
  Synthetic construct
QSALTQPASVSGSPGQSITFSCTGTSSDVGAYNFVSWYQHHPGKAPKLIIYDVTNRPSGVSNRFSGYKSGNTASLTIAGLQAEDEADYYCFSYRAGRILVFGGGTKLTVL

SEQ ID NO: 2712 - protein, 106 aa, Artificial Sequence
  Synthetic construct
EIVMTQSPATLSVSPGERATLSCRASHSVSDNLAWYQQKPGQAPRLLIYGASTRATGFPARFSGSGSGTEFTLTISSLQSEDFAVYYCQQYNYWPTFGQGTKVEIK

SEQ ID NO: 2713 - protein, 110 aa, Artificial Sequence
  Synthetic construct
QSVLTQPPSVSGAPGQRVTISCTGSSSNIGAGYDVHWYQQLPGTAPKLLIYGNSNRPSGVPDRFSGSKSGTSASLAITGLQAEDEADYYCQSYDSSLSRVFGTGTKVTVL

SEQ ID NO: 2714 - protein, 109 aa, Artificial Sequence
  Synthetic construct
QSVLTQPPSVSAAPGQRVTISCSGSSSNIGNNYVSWYQQLPGAAPKLLIYDNNKRPSGIPDRFSGSKSGTSATLGITGLQTGDEADYYCGTWDSSLKGVFGTGTKVTVL

SEQ ID NO: 2715 - protein, 108 aa, Artificial Sequence
  Synthetic construct
SYELTQPPSVSVSPGQTARITCSGDALPKKYAYWYQQKSGQAPVLLIYEDSKRPSGIPERFSGSSSGTMATLTISGAQVEDEGDYYCYSTDSSGNSGVFGGGTKLAVL

SEQ ID NO: 2716 - protein, 112 aa, Artificial Sequence
  Synthetic construct
DIVVTQSPLSLPVTPGEPASISCRSSQSLLHSNGYNYLDWYLQKPGQSPQLLIYLGSNRASGVPDRFSGSGSGTDFTLKISRVEAEDVGIYYCMQALQTRYTFGQGTKLEIK

SEQ ID NO: 2717 - protein, 108 aa, Artificial Sequence
  Synthetic construct
SSELTQPPSMSVSPGQTARITCSADALPKQYAYWYQQKPGQAPVLVIYKDIERPSGIPERFSGSSSGTTVTLTISGVQAEDEADYYCQSVDTSGTYVLFGGGTKLTVL

SEQ ID NO: 2718 - protein, 107 aa, Artificial Sequence
  Synthetic construct
DMQMTQSPSSLSASVGDRVTITCRASQSINSYLNWYQQKPGKAPKLLIYAASSLQSGVPSRFSGSGSGTDFSLTISSLQPEDFATYYCQQSYNSPYTFGQGTILEIK

SEQ ID NO: 2719 - protein, 107 aa, Artificial Sequence
  Synthetic construct
DIQMTQSPSSLSASVGDRVTITCRAGQSIGNYLNWYQQKPGKAPKLLIYAASSLQSGVPSRFSGSGSGTDFTLTISSLQPEDFATYYCQQSHSTPYTFGQGTKVKIK

SEQ ID NO: 2720 - protein, 107 aa, Artificial Sequence
  Synthetic construct
EIVLTQSPATLSLSPGERATLSCRASQSVSSYLAWYQQKPGQAPRLLIYDASNRATGIPARFSGSGSGTDFTLTISSLEPEDFAVYYCQQRSNWPGTFGQGTKVEIK

SEQ ID NO: 2721 - protein, 106 aa, Artificial Sequence
  Synthetic construct
DVQLTQSPSFLSASVGDRVTITCRASQGISSYLAWYQQKPGKAPKLLIYGASTVQSGVPSRFSGTGSGTEFTLTISSLQPEDFATYYCQHLNSYPLFGPGTKVDIK

SEQ ID NO: 2722 - protein, 109 aa, Artificial Sequence
  Synthetic construct
EIVLTQSPATLSLSPGERATLSCRASQSVSNFLAWYQQKPGQAPRLLIYDASNRATGIPARFSGSGSGTDFTLTISSLEPEDFAVYYCQQRSNWPPVLTFGGGTKVEIK

SEQ ID NO: 2723 - protein, 110 aa, Artificial Sequence
  Synthetic construct
QSALTQPPSVSGSPGQSVTISCTGTSSDVGSYNRVSWYQQPPGTAPKLMIYEVSNRPSGVPDRFSGSKSGNTASLTISGLQAEDEADYYCSSYTSSSTYVFGTGTKVTVL

SEQ ID NO: 2724 - protein, 109 aa, Artificial Sequence
  Synthetic construct
EVVLTQSPATLSLSPGERATLSCRASQSLSSYLAWYQQKPGQAPRLLIYDASNRATGIPARFSGSGSGTDFTLTISSLEPEDFAVYYCQQRSLWPPVFTFGPGTRVDIK

SEQ ID NO: 2725 - protein, 108 aa, Artificial Sequence
  Synthetic construct
QSALTQPASVSGSPGQSITISCTGASSDVGSYNLVSWYQQHPGKAPKLMIYEGSKRPSGVSNRFSGSKSGDTASLTISGLQAEDEADYYCCSYAGSYVFGTGTKVTVL

SEQ ID NO: 2726 - protein, 107 aa, Artificial Sequence
  Synthetic construct
EIVLTQSPATLSLSPGERATLSCRASQSVSSYLAWYQQKPGQAPRLLIYDVSYRATGIPARFSGSGSGTDFTLTISSLEPEDFAVYYCQQRGNWPGTFGQGTKVEIK

SEQ ID NO: 2727 - protein, 110 aa, Artificial Sequence
  Synthetic construct
QSVLTQPPSASGTPGQRVTISCSGSSSNIGTNTVNWYQQLPGTAPKLLIYSNNQRPSGVPDRFSGSKSGTSASLAISGPQSEDEADYYCATWDDSLNVWVFGGGTKVTVL

SEQ ID NO: 2728 - protein, 108 aa, Artificial Sequence
  Synthetic construct
EIVLTQSPATLSLSPGERATLSCRASQSVGSYLAWYQQKPGQAPRLLIYDASNRATGIPARFSGSGSGTDFTLTISSLEPEDFAVYYCQQRSNWRGFTFGPGTKVDFK

SEQ ID NO: 2729 - protein, 110 aa, Artificial Sequence
  Synthetic construct
QPALTQPASVSGSPGQSITISCTGTSDNVGSYDHVSWFQQHAGKGPNLVIFDVNSRPSGVSNRFSGSKSGNTASLTISGLQAEDEADYYCFSYTSRGTRVFGTGTTVTVV

SEQ ID NO: 2730 - protein, 112 aa, Artificial Sequence
  Synthetic construct
DIVMTQTPLSLSVTPGQPASISCKSDQSLLHSDGKTYLYWYLQKPGQPPQLLIYEVSNRFSGVPDRFSGSGSGTDFTLKISRVEAEDVGVYYCLQSIELPLTFGPGTKVDIK

SEQ ID NO: 2731 - protein, 106 aa, Artificial Sequence
  Synthetic construct
SYEVTQPPSVSVSPGQTATITCSGDKLGDKYVCWYQQKSGQSPVLVIYQDSKRPSGIPERFSGSNSGNTATLTISGTQAMDEADYYCQAWDSSTAVFGTGTKVTVL

SEQ ID NO: 2732 - protein, 112 aa, Artificial Sequence
  Synthetic construct
DTVMTQTPLSLSVTPGQPASISCKSSQSLLHSDGKTYLYWYLQKPGQPPQLLIYEVSDRFSGVPDRFSGSGSGTDFTLKISRVAAEDVGIYYCMQSIELPLTFGQGTRLEIK

SEQ ID NO: 2733 - protein, 108 aa, Artificial Sequence
  Synthetic construct
EIVLTQSPATLSLSPGERATLSCRASQSVSSFLAWYQQRPGQAPRLLIYDASKRATGIPARFSGSGSGTDFTLTISSLEPEDFAVYYCQQRSNWPIFTFGPGTKVDIK

SEQ ID NO: 2734 - protein, 110 aa, Artificial Sequence
  Synthetic construct
QSVLTQPPSVSAAPGQKVTISCSGSSSNIGNNYVSWYQQFPGTAPKLLIYDNNKRPSGIPDRFSGSKSGTSATLGITGLQTGDEADYHCGTWDTSLSAVVFGGGTKLTVL

SEQ ID NO: 2735 - protein, 112 aa, Artificial Sequence
  Synthetic construct
QSVLTQPPSASGTPGQRVTISCSGSSSNLGSNSVNWYQQLPGTAPKLLIYSNNQRPSGVPDRFSGSKSGTSASLAISGLQSEDEADYYCAGWDDSLNDRNYVFGTGTKVTVL

SEQ ID NO: 2736 - protein, 109 aa, Artificial Sequence
  Synthetic construct
SYELTQPPSVSVSPGQTARITCSADALPKQYASWYQQKPGQAPVLVIYKDNERPSGIPERFSGSSSGTTVTLTISGVQAEDEADYFCQSADSSGTYYWVFGGGTKLTVL

SEQ ID NO: 2737 - protein, 107 aa, Artificial Sequence
  Synthetic construct
SYELTQPPSVSVSPGQTARITCTGDALSNQYVYWYQQKPGQAPVLVIYKDSERPSGIPERISGSSSGTTVMLTISGVQAEDEADYYCQSADISGTWVFGGGTKLTVL

SEQ ID NO: 2738 - protein, 110 aa, Artificial Sequence
  Synthetic construct
QSALTQPASVSGSPGQSITISCTGTSSDVGSYNLVSWYQQHPGKAPKLMIYEAIKRPSGVSNRFSGSKSGNAASLTISGLQAEDEADYHCCSYAGFSTYVFGTGTKVTVL

SEQ ID NO: 2739 - protein, 107 aa, Artificial Sequence
  Synthetic construct
DIQMTQSPSTLSASVGDRVTITCRASQSINSWLAWYQQKPGKAPKLLIYKASSLESGVPSRFSGSGSGTEFTLTISSLQPDDFATYYCQQYNSYSITFGQGTRLEIK

SEQ ID NO: 2740 - protein, 109 aa, Artificial Sequence
  Synthetic construct
EIVLTQSPATLSLSPGERATLSCRASQSVSSFLAWYQQKPGQAPRLLIYDASNRATGIPARFSGSGSGTDFTLTISSLEPEDFAVYYCQHRSNWPPLFTFGPGTKVDIK

SEQ ID NO: 2741 - protein, 109 aa, Artificial Sequence
  Synthetic construct
QTVVTQEPSLTVSPGGTVTLTCASSTGAVTSGYYPNWFQQKPGQAPRTLIYTTTNKHSWTPARFSGSLLGGKAALTLSGAQPEDEADYYCLVLYGGEWVFGGGTKLTVL

SEQ ID NO: 2742 - protein, 109 aa, Artificial Sequence
  Synthetic construct
EIVLTQSPATLSLSPGERATLSCRASQSVSSYLAWYQQKPGQAPRLLIYDASNRATGIPARFSGSGSGTDFTLTISSLEPEDFAVYYCQQRSNWPLVITFGQGTRLDIK

SEQ ID NO: 2743 - protein, 107 aa, Artificial Sequence
  Synthetic construct
DFQMTQSPSSLSASVGDRVTITCQASQDIRNHLNWYQHKPGKAPKLLIYDASNLAAGVPSRFSGGGFRTDFTFTISSLQPDDTATYYCQQYHNLPWTFGQGTRVEIK

SEQ ID NO: 2744 - protein, 108 aa, Artificial Sequence
  Synthetic construct
EILMTQSPATLSVSPGERATLSCRASQTVSSNLAWYQQKPGQAPRLLIYGASTRATATPARFSGRGSGTEFTLTISSLQSEDFAVYYCQQYNKWPFWTFGQGTKLEIK

SEQ ID NO: 2745 - protein, 107 aa, Artificial Sequence
  Synthetic construct
DIQMTQSPSSLSASVGDRVTLTCQASQDIRNYLNWYQQKPGKAPKLLIYDASNLETGVPSRFSGSGSGTNFTFTISSLQPEDIATYYCQQYDNLPITFGQGTRLEIK

SEQ ID NO: 2746 - protein, 108 aa, Artificial Sequence
  Synthetic construct
DIQMTQSPSSLSASVGDRVTITCQASQDISNYLNWYQQKPGKAPKLLIYDASNLETGVPSRFSGSGSGTDFTFTISSLQPEDIATYYCQHYDNLPMYTFGQGTKLEIK

SEQ ID NO: 2747 - protein, 112 aa, Artificial Sequence
  Synthetic construct
QSVLTQPPSVSGAPGQRVTISCTGGSSNIGAGYDVHWYQQLPGTAPKLLIYGNSNRPSGVPDRFSGSKSGTSASLAITGLQSEDEADYYCQSYDTSLSAFYVFGTGTKVTVL

SEQ ID NO: 2748 - protein, 107 aa, Artificial Sequence
  Synthetic construct
DIQMTQSPSTVSASVGDTVTITCRASESISTWLAWYQQKPGKAPQVLIYRASTLQSGVPSRFSGSGSGTDFTLTISGLQPDDSATYYCQEYTNYSWTFGQGTRVEIK

SEQ ID NO: 2749 - protein, 108 aa, Artificial Sequence
  Synthetic construct
SYELTQPPSVSVSPGQTARITCSGDALPKQYAYWYQQKPGQAPVMVIYKDSERPSGIPERFSGSTSGTTVTLTISGVQAEDEADYYCQSADSSGTYGVFGGGTKLTVL

SEQ ID NO: 2750 - protein, 104 aa, Artificial Sequence
  Synthetic construct
DIQMTQSPSSLSASVGDRVTITCRASQSISSYLNWYQQKPGKAPKLLIYAASSLQSGVPSRFSGSGSGTDFTLTISSLQPEDFATYYCQQSYSTFGQGTKVEIK

SEQ ID NO: 2751 - protein, 111 aa, Artificial Sequence
  Synthetic construct
QSVLTQPPSVSGAPGQRVTISCTGSSSNIGARYDVHWYQQLPGTVPKLLIYGNSNRPSGVPDRFSGSKSGTSASLAITGLQAEDEADYYCQSYDSSLSGYVFGTGTKVTVL

SEQ ID NO: 2752 - protein, 107 aa, Artificial Sequence
  Synthetic construct
DIQMTQSPSSLSASVGDRVTITCRASQGINNYLAWYQQKPGKVPKLLIYAASTLQSGVPSRFSGSGSGTDFTLTISSLQPEDVATYYCQQYNSAPRTFGQGTKVEIK

SEQ ID NO: 2753 - protein, 109 aa, Artificial Sequence
  Synthetic construct
EIVLTQSPGTLSLSPGERATLSCRASQTVTTFLAWYQKKPGQPPRLLIYDASNRATGIPARFSGSGSGTDFTLTISGLEPEDFAIYYCQHRRNWPPELTFGGGTKVEIK

SEQ ID NO: 2754 - protein, 107 aa, Artificial Sequence
  Synthetic construct
DIQLTQSPSFLSASVGDRVTITCRASQGISSNLAWYQQKPGKAPTLLIYAASTLQSGVPSRFSGSGSGTDFTLTISSLQPEDFATYYCQQLSSYPVTFGGGTKVEIK

SEQ ID NO: 2755 - protein, 111 aa, Artificial Sequence
  Synthetic construct
QSVLTQPPSVSGAPGQRVTISCAGSGSNIGAGYDVHWYQQLPGTAPKLLIFGNSNRPSGVPDRFSGSRSGTSASLAITGLQAEDEADYYCQSFDSSLSGSVFGGGTKLTVL

SEQ ID NO: 2756 - protein, 107 aa, Artificial Sequence
  Synthetic construct
EIVLTQSPATLSLSPGERATLSCRASQSVSSFLAWYQQKPGQAPRLLIYDASNRATGIPARFSGSGSGTDFTLTISTLEPEDFAVYYCQQRRNWPQTFGQGTRLEIK

SEQ ID NO: 2757 - protein, 112 aa, Artificial Sequence
  Synthetic construct
DIVMTQSPDSLAVSLGERATINCKSSQSVLYSSNNKNYLAWYQQKPGQPPKLLIYWASTRESGVPDRFSGSGSGTDFTLTISSLQAEDVAIYYCQQYYSIRTFGQGTKVEIK

SEQ ID NO: 2758 - protein, 110 aa, Artificial Sequence
  Synthetic construct
EIVLTQSPGTLSLSPGERATLSCRASQSVSSSYLAWYQQKPGQAPRLLIYAASSRATGIPDRFSGSGSGTDFTLAISRLEPEDFAVYYCQQYNTSPPSITFGPGTKVEIK

SEQ ID NO: 2759 - protein, 111 aa, Artificial Sequence
  Synthetic construct
QSVLTQPPSASGTPGQRVTISCSGSSSNIGSTYVYWYQQVPGTAPKLLIERSNQRPSGVPDRFSGSKSGTSASLAISGLRSEDEADYYCAAWDDSLSGHWVFGGGTKLTVL

SEQ ID NO: 2760 - protein, 106 aa, Artificial Sequence
  Synthetic construct
SYELTQPPSVSVSPGQTASITCSGDKLGDKYACWYQQKPGQSPVLVIYQDSKRPSGIPERFSGSNSGNTATLTISGTQAMDEADYYCQAWDTSTVIFGGGTQLTVL

SEQ ID NO: 2761 - protein, 109 aa, Artificial Sequence
  Synthetic construct
EIVLTQSPATLSLSPGERATLSCRASQSVGTFLAWYQQNPGQAPRLLIYDASNRAAGIPARFSGSGSGTDFTLTISSLEPEDFAVYYCHHRTNWPPKLTFGGGTKVEIK

SEQ ID NO: 2762 - protein, 108 aa, Artificial Sequence
  Synthetic construct
SYEVTQPPSVSVSPGQTARITCSGEALSRQYGYWYQQKPGQAPVLVIHKDTERPSGIPERFSGSSSGTTVTLTISGVQADDEADYYCQSTDSSDTYRVFGGGTKLTVL

SEQ ID NO: 2763 - protein, 108 aa, Artificial Sequence
  Synthetic construct
DIQMTQSPSSLSASVGDRVTITCRASQSIGSYLNWYQQKAGKAPKLLIYAASSLQSGVPSTFSGSGSGTDFTLTISSLQPEDFATYYCQQSYSTPPITFGQGTRLEIK

SEQ ID NO: 2764 - protein, 107 aa, Artificial Sequence
  Synthetic construct
AIQMTQSPSALSASVGDRVTITCRASQGIRVDLGWYQQKPGKAPKLLIYAASTLQSGVPSRFSGSGSGTHFTLTISSLQPEDFATYYCLQDYTYPWTFGQGTKVEIK

SEQ ID NO: 2765 - protein, 107 aa, Artificial Sequence
  Synthetic construct
AIRMTQSPSSFSASTGDRVTIPCRASQGISSYLAWYQQKPGKAPKLLIYGASTLQSGVPSRFSGSGSGTDFTLTISRLQSEDFATYFCQQYYNYPRTFGGGTKVEIK

SEQ ID NO: 2766 - protein, 107 aa, Artificial Sequence
  Synthetic construct
DIQMTQSPSSVSASVGDRVTITCRASQGISSWLAWYQQKPGKAPKLLIYDASSLQSGVPSRFSGSGSGTDFTLTISSLQPEDFATYFCQQAHSFPPTFGGGTKVEIK

SEQ ID NO: 2767 - protein, 110 aa, Artificial Sequence
  Synthetic construct
QSALTQPASVSGSPGQSITISCTGTSSDVGSYDLVSWYQQHPGKAPKLMIYEVSKWPSGVSNRFSGSKSGNTASLTISGLQAEDEADYYCCSHGVSSTFVFGGGTKLTVL

SEQ ID NO: 2768 - protein, 106 aa, Artificial Sequence
  Synthetic construct
SYELTQPPSVSVSPGQTASITCSGDKLGDNYACWYQQKPGQSPVLVIYQDSKRPSGIPERFSGSNSGNTATLTISGTQAMDEADYYCQAWDSSTGVFGGGTKLTVL

SEQ ID NO: 2769 - protein, 107 aa, Artificial Sequence
  Synthetic construct
DIQMTQSPSSLSASVGDRVTITCRASQAISNYLAWIQQKPGKAPKYLIYAASSLESGVPSKFSGSGSGTDFTLTISSLQPEDFATYYCQQYNSYPYTFGQGTKLEIK

SEQ ID NO: 2770 - protein, 108 aa, Artificial Sequence
  Synthetic construct
ENVLTQSPGTLSLSPGERATLSCRASQSDSSSYLAWYQQKPGQAPRLLIYGASSRATGIPDRVRGSGSGTDFTLTISRLEPEDSAVYYCQQYGSSPATFGQGTKVEIK

SEQ ID NO: 2771 - protein, 107 aa, Artificial Sequence
  Synthetic construct
DIQMTQSPSSLSASVGDRVTITCQASHDINNYLNWYQQKPGKAPNLLIYDASNLETGAPSRFSGSGSGTDFTFTISSLQPEDIATYYCQQYDTLRWTFGQGTKVEIK

SEQ ID NO: 2772 - protein, 108 aa, Artificial Sequence
  Synthetic construct
EIVLTQSPGTLSLSPGERATLSCRASQSIRSSQLAWYQQKPGQAPRLLIYGASSRATGTPDRFSGGGSGTDFTLTISRLDPEDFAVYYCQQYGGSLRTFGQGTKLELK

SEQ ID NO: 2773 - protein, 109 aa, Artificial Sequence
  Synthetic construct
QSVLTQPPSVSAAPGQKVTISCSGSTSNIGDNYVSWYQQFPGTAPKLLIYEDNKRPSGIPDRFSGSKSGTSATLDITGLQTEDEADYYCGTWDSSLSPMFGGGTRLAVL

SEQ ID NO: 2774 - protein, 110 aa, Artificial Sequence
  Synthetic construct
QSVLTQPPSASGTPGQRVTISCSGSSSNIGSNYVYWYQQLPGTAPKLLIYRNNQRPSGVPDRFSGSKSGTSASLAISGLRSEDEADYYCAAWDDSLSGVVFGGGTKLTVL

SEQ ID NO: 2775 - protein, 109 aa, Artificial Sequence
  Synthetic construct
EIVMTQSPATLSVSPGERATLFCRASQSISSNLAWYQQKPGQAPRLLIYGASTRATGIPARFSGSGSGTEFTLTISSLQSEDFVVYYCQQYNKWPPEYTFGQGTKLEIK

SEQ ID NO: 2776 - protein, 108 aa, Artificial Sequence
  Synthetic construct
SYELTQPPSVSVSPGQTARITCSGDALPKQYAYWYQQKPGQAPVLVIYKDSERPSGIPERFSGSSSGTTVTLTISGVQAEDEADYFCQSADSSGTYYVFGIGTKVTVL

SEQ ID NO: 2777 - protein, 110 aa, Artificial Sequence
  Synthetic construct
QSVVTQPPSASGTPGQRVTISCSGSASNIGSNAVSWYQHLPGTAPKLLVSGNNQRLSGVPDRFSGSKSGTSASLAISGLQSEDEADYYCAAWDDSLTGRVFGGGTKLTVL

SEQ ID NO: 2778 - protein, 108 aa, Artificial Sequence; identical to SEQ ID NO: 2706
  Synthetic construct

SEQ ID NO: 2779 - protein, 110 aa, Artificial Sequence
  Synthetic construct
QSALTQPPSASGSPGQSVTIFCTGTSSDVGGYNFVSWYRQHPGKAPEVMIYEVNKRPSGVPDRFSGSKSGNTASLTVSGLQAEDEADYYCSSYIGSDNLVFGGGTKLTVL

SEQ ID NO: 2780 - protein, 107 aa, Artificial Sequence
  Synthetic construct
SYELTQPPSVSVSPGQTARITCSGHALSKQYAYWYQQRPGQAPVLVIYKDSESPSGIPERFSGSSSGTTVTLTISGVQAEDEADYYCQSAASSGPVVFGGGTKLTVL

SEQ ID NO: 2781 - protein, 113 aa, Artificial Sequence
  Synthetic construct
DIVMTQSPDSLAVSLGERATINCKSSQTVLSRSNSKNYLAWYQQKPGQPPKVLFYWASTRESGVPDRFSGGGSGTDFTLTISSLQAEDVAVYYCQQYYSTPYTFGQGTKLELK

SEQ ID NO: 2782 - protein, 110 aa, Artificial Sequence
  Synthetic construct
QSALTQPASVSGSPGQSITISCTGTSSDIGAYNYVSWYQQHPGKAPKLMIYDVSNRPSGVSNRFSGSKSGNTASLTISGLQAEDEADYYCSSYTSSSTLVFGGGTKLTVL

SEQ ID NO: 2783 - protein, 107 aa, Artificial Sequence
  Synthetic construct
EIVMTQSPATLSVSPGERATLSCRASQSVSSNLAWYQQKPGQAPRLLITGASTRATGIPARFSGSGSGTEFTLTISSLQSEDFVVYYCQQYRYWPWTFGQGTKVQVK

SEQ ID NO: 2784 - protein, 111 aa, Artificial Sequence
  Synthetic construct
QSALTQPASVSGSPGQSITISCAATSSDVGSFNLVSWYQQHPAKAPKLIIFEVSKRPSGVSNRFSGSKSRNTASLTISGLQAEDEADYYCCSYVGGITLGVFGGGTKLTVL

SEQ ID NO: 2785 - protein, 110 aa, Artificial Sequence
  Synthetic construct
QSVLTQPPSVSAAPGQKVTISCSGSSSNIGNNYVSWYQPLPGTAPKLLIYDNNKRPSGIPDRFSGSKSGTSATLGITGLQTGDEADYYCGTWDSSLSAVVFGGGTKLTVL

SEQ ID NO: 2786 - protein, 107 aa, Artificial Sequence
  Synthetic construct
DIRLTQSPSFLSASVGDRVAITCRASQAIGTDLSWFLQKPGKAPKLLIRAASTLHDGVPTRFSGRASGTDFTLSISSLQPEDFGTYYCQQIAASPFTFGPGTMVDLK

SEQ ID NO: 2787 - protein, 108 aa, Artificial Sequence
  Synthetic construct
EIVLTQSPGTLSLSPGERATLSCRASQSVSSSYLAWYQQKPGQAPRLLIYGASSRATGIPDRFSGSGSGTDFTLTISRLEPEDFAVYYCQQYGSSPRTFGQGTKVEIK

SEQ ID NO: 2788 - protein, 108 aa, Artificial Sequence
  Synthetic construct
SYVLTQPPSVSVAPGQTARITCGGNDIGSKSVHWYQQKPGQAPVLVVDDYSDRPSAIPERFSGSKSENTASLTISRVAAGDEAAYYCQVWDSLTDHVVFGGGTKLTVL

SEQ ID NO: 2789 - protein, 107 aa, Artificial Sequence
  Synthetic construct
AIVMTQSPATLSVSSGERATLSCRASQSVSSNLAWYQQKPGQAPRLLIYGASTRATGIPARFSGSGSGTEFTLTISSLQSEDFAVYYCQQYNNWPITFGQGTRLEIK

SEQ ID NO: 2790 - protein, 108 aa, Artificial Sequence; identical to SEQ ID NO: 2515
  Synthetic construct

SEQ ID NO: 2791 - protein, 107 aa, Artificial Sequence
  Synthetic construct
DIQMTQSPSSLSASVGDRVTITCRASQSITSYLNWYQQKPGKAPKLLIYAASSLHTGVPSRFSGSGSGTDFTLTISSLQPEDFATYYCQQSYITPSTFGQGTKVEIK

SEQ ID NO: 2792 - protein, 112 aa, Artificial Sequence
  Synthetic construct
DVVVTQSPVSLPATPGKPASISCRASQSLLHSNGNHYLHWYLQRPGQSPQLLIYLGSNRASGVPDRFSGSGSGSVFSLKISRVEAEDVGMYYCMQALHFPYTFGQGTKLELK

SEQ ID NO: 2793 - protein, 110 aa, Artificial Sequence
  Synthetic construct
QSALTQPPSASGSPGQSVTISCTGTSSDVGGYNYVSWYQQHPGKVPKLMIYEVSQRPSGVPDRFSGSKSGNTASLTVSGLQAEDEADYYCSSSAGNYKLIFGGGTKLTVL

SEQ ID NO: 2794 - protein, 108 aa, Artificial Sequence
  Synthetic construct
DIQLTQSPSSLSASVGDRVTITCRASQTISTFLNWYQQKPGKAPKLLIYDASSLQSGVPSRFSGSGSGTDFTLTISSLQPEDFAIYYCQQSYSMRAFTFGGGTKVEIK

SEQ ID NO: 2795 - protein, 108 aa, Artificial Sequence
  Synthetic construct
DRVMTQSPATLSVSPGERATLSCRASQSVHSNLAWYQQKPGQAPRLLIYGASTRATGIPARFSGSGSGTEFTLTISSLQSEDFAVYYCQQYNDWPPFTFGQGTKLEIK

SEQ ID NO: 2796 - protein, 115 aa, Artificial Sequence
  Synthetic construct
QAVLTQPSSLSASPGASASLTCTLRSGINVDTYIIFWYQQKPGSPPQYLLKYKSDSDKHQGSGVPSRFSGSKDASANAGILLISGLQSEDEADYYCMIWHSSAWVFGGGTKLTVL

SEQ ID NO: 2797 - protein, 111 aa, Artificial Sequence
  Synthetic construct
QSALTQPASVSGSPGQSITISCSGTSSDIGGYNYVSWYQQHPGKAPKLMIYDVNNRPSGVSHRFSGSKSDNTASLTISGLQAEDEADYFCSSYAGSTTRYVFGTATKVTVL

SEQ ID NO: 2798 - protein, 107 aa, Artificial Sequence
  Synthetic construct
DIQMTQSPSSLSASVGDRVTITCQASQDIRNYLNWYQQKPGKAPMLLIYDASNLETGVPLRFSGSGSGTDFTFTISSLQPEDIATYYCQQYDNLPLTFGGGTKVEIK

SEQ ID NO: 2799 - protein, 112 aa, Artificial Sequence
  Synthetic construct
QSALTQPPSASGSPGQSVTISCTGSSSDVGGYNYVSWYQQHPGKAPKLMIYEVTKRPSGVPDRFSGSKSGNTASLTVSGLQAEDEADYYCSSYAGSNNFDVLFGGGTKLTVL

SEQ ID NO: 2800 - protein, 107 aa, Artificial Sequence
  Synthetic construct
DIQMTQSPSSLSASVGDRVTITCRASQSISNYLNWYQLNPGKAPKLLIYAASSLQSGVPSRFSGSGSGTDFTLTISSLQPEDFATYYCQQSYSTPPTFGQGTKLEIK

SEQ ID NO: 2801 - protein, 108 aa, Artificial Sequence
  Synthetic construct
EIVLTQSPASLSLSPGERATLSCRASQSVSSYLAWYQQKPGQAPRLLIYDASNRATGIPARFSGSGSGTDFTLTISSLEPEDFATYYCQQRSNWPPFTFGPGTKVDIK

SEQ ID NO: 2802 - protein, 110 aa, Artificial Sequence
  Synthetic construct
QSALTQPASVSGSPGQSITVSCTGTSSDVGSYNLVSWYQQHPGKAPKLMIYEATRRPSGVSNRFSGSKSGNTASLTISGLQAEDEADYYCCSYAGSSTYVFGNGTKVNVL

SEQ ID NO: 2803 - protein, 110 aa, Artificial Sequence
  Synthetic construct
QSALTQPASVSGSPGQSITISCTGTSSDVGTYNYVSWYQHHPGKAPKLMIYDVTNRPSGVSNRFSGSKSGNTASLTISGLQAEDEADYYCSSYTSSSTLVFGGGTKLTVL

SEQ ID NO: 2804 - protein, 107 aa, Artificial Sequence
  Synthetic construct
EIVMAQSPATLSVSPGERATLSCRASQSVSSNLAWYQQKPGQAPRLLIYDASTRATDIPARFSGSGSGTEFTLTISSLQSEDFAVYYCQQFNNWPVTFGGGTKVEIK

SEQ ID NO: 2805 - protein, 111 aa, Artificial Sequence
  Synthetic construct
QSVLTQPPSVSGAPGQRVTISCTGSSSSIGAGYDVHWYQQLPGTAPKLLIYRNTNRPSGVPDRFSGSKSGTSASLAISGLQAEDEADYYCQSYDSSLSALVFGGGTKVTVL

SEQ ID NO: 2806 - protein, 110 aa, Artificial Sequence
  Synthetic construct
NFMLTQPHSVSESPGKTVTISCTGSSGSIASNYVQWYQQRPGSAPTTVIYEDNQRPSGVPDRFSGSIDSTSNSASLTISGLRTEDEADYYCQSYDWTNVVFGGGTKLTVL

SEQ ID NO: 2807 - protein, 110 aa, Artificial Sequence
  Synthetic construct
QSVLTQPPSASVTPGQRVSISCSGNSSNIGSNYVYWYQQLPGTAPKLLIYRNNQRPSGVTDRFSGSKSGTSASLAISGLRSEDEADYYCSTWDDSLSGWVFGGGTKLTVL

SEQ ID NO: 2808 - protein, 110 aa, Artificial Sequence
  Synthetic construct
QSVLTQPPSVSAAPGQKVTISCSGSSFNIGKNYVSWYQQLPGTAPKLLIYDNNKRPSGIPDRFSGSKSGTSATLGITGLQTGDEADYYCGTWDGSLSAGVFGGGTKLTVL

SEQ ID NO: 2809 - protein, 107 aa, Artificial Sequence
  Synthetic construct
DIQMTQSPSTLSASVGDRVTITCRASQSISIWLAWYQQKAGKAPKLLIYKASSLESGVPSRFSGSGSGTEFTLTISSLQPDDFATYYCQQYNSNSRTFGQGTKVEIR

SEQ ID NO: 2810 - protein, 109 aa, Artificial Sequence
  Synthetic construct
EIVLTQSPATLSLSPGERATLSCRASQSVSNFLAWYQQKPGQAPRLLIYDASNRATGIPARFSGSGSGTDFTLTISSLEPEDFAVYYCQQRYNWPPRGTFGGGTKVEIK

SEQ ID NO: 2811 - protein, 107 aa, Artificial Sequence
  Synthetic construct
SYELIQPPSVSVSPGQIASITCSGDKLGDRYACWYQQKPGQSPVLVIYEDDKRPSGIPERFSGSNSGNTATLTISGTQAMDEADYYCQAWDSSIPVVFGGGTKLTVL

SEQ ID NO: 2812 - protein, 108 aa, Artificial Sequence; identical to SEQ ID NO: 2515
  Synthetic construct

SEQ ID NO: 2813 - protein, 107 aa, Artificial Sequence
  Synthetic construct
EMVMTQSPATLSVSPGERATLSCRASQSVSSNLAWYRQKPGQAPRLLIYGASTRATGIPARFSGSGSGTEFTLTISSLQSEDFAVYYCQQYNSWPGTFGQGTKVEIK

SEQ ID NO: 2814 - protein, 112 aa, Artificial Sequence
  Synthetic construct
QSALTQPASVSGSPGQSITISCTGTRTDVGGYNYVSWYQQHPGKAPKLMIYDVTNRPSGVSNRFSGSKSGNTASLTISGLQAEDEADYYCSSYTSTTTAIWVFGGGTKLTVL

SEQ ID NO: 2815 - protein, 107 aa, Artificial Sequence; identical to SEQ ID NO: 2557
  Synthetic construct

SEQ ID NO: 2816 - protein, 108 aa, Artificial Sequence
  Synthetic construct
EIVMTQSPATLSVSPGERATLSCRASQSVSSNLAWYQQKPGQAPRLLIYGASTRATGIPARFSGSGSGTEFTLTISSLQSEDFAVYYCQQYNDWPPLTFGGGTKVEIK

SEQ ID NO: 2817 - protein, 108 aa, Artificial Sequence
  Synthetic construct
QAVVTQEPSLTVSPGGTVTLTCGSSTGAVTSGHYPYWFQQKPGQAPRTLIYDTSNKHSWTPARFSGSLLGGKAALTLSGAQPEDEAEYYCLLSYSGGGFGGGTKLTVL

SEQ ID NO: 2818 - protein, 107 aa, Artificial Sequence
  Synthetic construct
EIVLTQSPGTLSLSPGERATLSCRASQSVSSTYLAWYQQKPGQAPRLLIYGASSRATGIPDRFSGSGSGTDFTLTISRLEPEDFAVYYCQQYGSTYTFGQGTKLEIK

SEQ ID NO: 2819 - protein, 107 aa, Artificial Sequence
  Synthetic construct
SFELTQPPSVSVSPGQTARITCSGDALAKQYTHWYQQKPGQAPVLIIYKDSERPSGIPERFSASSSGTIVTLTIIAVQAEDEADYFCQSSDSSGNCVFGTGTQVTVL

SEQ ID NO: 2820 - protein, 112 aa, Artificial Sequence
  Synthetic construct
QSVLTQPPSVSGAPGQRVTISCSGSSSNIGAGFDVHWYQQLPGTAPKLLIFGNSNRPSGVPDRISGSKSGTSASLAITGLRAEDEADYYCQSYDNSLSGSYVFGTGTKVTVL

SEQ ID NO: 2821 - protein, 113 aa, Artificial Sequence
  Synthetic construct
QSVLTQPPSVSGAPGQRVTISCTGSSSNIGTGYDVHWYQQLPGTAPKLLIFGNNNRPSGVPARFSGSKSGTSASLAITGLQAEDEADYYCQSYDSSLTGPNWVFGGGTKLTVL

SEQ ID NO: 2822 - protein, 109 aa, Artificial Sequence
  Synthetic construct
QSVLTQPPSASGTPGQRVTISCSGSDSNIGSNYVYWYQQLPGTAPKLLIYRNNQRPSGVPDRFSGSKSGTSASLAISGLRSEDEADYYCAAWDDSLSGRFGTGTKVTVL

SEQ ID NO: 2823 - protein, 111 aa, Artificial Sequence
  Synthetic construct
QSVLTQPPSVSGAPGQRVTISCTGSSSNIGAGYDVHWYQQLPGTAPKLLIYVNSNRPSGVPDRFSGSKSGTSASLAISGLQAEDEADYHCQSYDSSLSGYVFGTGTKVTVL

SEQ ID NO: 2824 - protein, 107 aa, Artificial Sequence
  Synthetic construct
SYELTQPPSVSVSPGQTARITCSGDALPKKYAYWYQQKSGQAPVLVIYEDSQRPSGIPERFSGSSSGTMATLTISGAQVEDEADYYCYSIDSSGNPPFGGGTKLTVL

SEQ ID NO: 2825 - protein, 109 aa, Artificial Sequence
  Synthetic construct
QSVLTQPPSASGTPGQRVTISCSGSSSNIGSSTVNWYQHLPGTAPKLLIYSNNQRPSGVPDRFSGSKSGTSASLAISGLQSEDEADYYCAAWDDSLNVVFGGGTKLTVL

SEQ ID NO: 2826 - protein, 111 aa, Artificial Sequence
  Synthetic construct
QSVLTQPPSVSGAPGQRVTISCTGSSSNIGAGFDVHWYQHLPGTAPKLLIYGNNNRPSGVPDRFSGSMSGTSASLAITGLQAEDEADYYCQSYDSSLSGWVFGGGTRLTVL

SEQ ID NO: 2827 - protein, 111 aa, Artificial Sequence
  Synthetic construct
QSVLTQPPSVSGAPGQSVTISCTGSSSNIGAGFDVHWYEQLPGRAPKLLIYADINRPSGVPDRFSGSKSGTSASLAISGLQAEDEADYYCQSYDSTLRDVVFGGGTKLTVL

SEQ ID NO: 2828 - protein, 113 aa, Artificial Sequence
  Synthetic construct
DVVMTQSPLSLPVTLGQPASISCRSSQSLVHTDGNTYLNWFQQRPGQSPRRLIYKVSHRDSGVPDRFSGSGSGTDFTLKISTVEAEDVGVYYCMQGTHWPPYTFGQGTKLEIK

SEQ ID NO: 2829 - protein, 110 aa, Artificial Sequence
  Synthetic construct
RTVVTQEPSFSVSPGGTVTLTCGLTSGSVSTSYYPSWYQQTPGQAPRTLVYSTNTRSSGVPDRFSGSILGNKAALTITGAQADDESDYYCVLYMGSGIWVFGGGTKLTVL

SEQ ID NO: 2830 - protein, 110 aa, Artificial Sequence
  Synthetic construct
QAGLTQPPSVSKGLRQTATLTCTGNSNNVGNQGAAWLQQHQGHPPKLLSYRNDNRPSGISERLSASRSGNTASLTIAGLQPGDEADYYCSAWDSSLSVWVFGGGTKLTVL

SEQ ID NO: 2831 - protein, 107 aa, Artificial Sequence
  Synthetic construct
SYELTQPPSVSVSPGQTARITCSGDALPKKYAYWYQQKSGQAPVLVIYEDSKRPSGIPERFSASSSGTMATLTISGAQVEDEADYYCYSPDSSGKGVFGGGTKLTVL

SEQ ID NO: 2832 - protein, 108 aa, Artificial Sequence
  Synthetic construct
EIVLTQSPGTLSLSPGERATLSCWASQSVSSSYLAWYQQKPGQAPRFLLYGASSRAIGIPDRFSGSGSGTDFTLTISRLEPEDFAVYYCQQYGSSPWTFGQGTKVEIK

SEQ ID NO: 2833 - protein, 111 aa, Artificial Sequence
  Synthetic construct
QSVLTQPPSVSGAPGQRVTISCTGSNSNIGAGYDVHWYQQLPGTAPKLLIYRNSHRPSGVPDRFSGSKSGTSASLAISGLQAEDEADYYCQSYDSSLSALVFGGGTKLSVL

SEQ ID NO: 2834 - protein, 108 aa, Artificial Sequence
  Synthetic construct
GNVLTQSPSTLSLSPGERATLSCRASQSVSSSYLAWYQQKPGQAPRLLIYGASSRATGIPDRFSGSGSGTDFTLTISRLEPEDFAVYYCQQYGDSPWTFGQGTKVEIK

SEQ ID NO: 2835 - protein, 106 aa, Artificial Sequence
  Synthetic construct
SYELTQPPSVSVSPGQTASITCTGDKLGNKYVCWYQQKPGQSPVLVIYQDNKRPSGIPERFSGSNSGNTATLTISGTQAMDEADYYCQAWDSSSVTFGGGAKLTVL

SEQ ID NO: 2836 - protein, 108 aa, Artificial Sequence
  Synthetic construct
EIVLTQSPGTLSLSPGERATFSCRASQSVNNNYLAWYQQKPGQAPRLLTSGTFTRATGIPDRFSGSGSGTDFTLTISRVESEDFAVYYCQQYGGSPATFGQGTRLEIK

SEQ ID NO: 2837 - protein, 110 aa, Artificial Sequence
  Synthetic construct
QSALTQPRSVSGSPGQSVTISCTGTSSAVGGYNYVSWYQQHPGKAPKLIIYDVNKRPSGVPDRFSGSKSGNTASLTISGLQAEDEADYFCCSYAGNYTWVFGGGTKLTVL

SEQ ID NO: 2838 - protein, 111 aa, Artificial Sequence
  Synthetic construct
QSVLTQPPSVSGAPGQRVTISCTGSNSNIGAGYDVHWYQELPGTAPKLLIYVNSNRPSGVPDRFSGYKSGTSASLAISGLQAEDEADYYCQSYDSSLSALVFGGGTKLTVL

SEQ ID NO: 2839 - protein, 112 aa, Artificial Sequence
  Synthetic construct
DIVMTQSPLSLPVTPGEPASISCRSSQSLLFGNGYTYLNWYLQKPGQSPQLLIYLGSNRASGVPDRFSVSGSGTDFTLIISRVEAEDVGVYFCMQALQTPWTFGQGTKVEIK

SEQ ID NO: 2840 - protein, 107 aa, Artificial Sequence
  Synthetic construct
DIQMTQSPSSLSASVGDRVTITCRASQGIRNDLGWYQQKSGKAPKRLIYGASSLQSGVPSRFSGSGSGTEFTLTISSLQPEDFATYYCLQYNSYPLTFGGGTKVEIK

SEQ ID NO: 2841 - protein, 109 aa, Artificial Sequence
  Synthetic construct
SYVLTQPPSVSVAPGKTARITCGGNDIGSKSVHWYQQKPGQAPVLVIYYDIDRPSGIPERFSGSNSGNTATLAISRVEAGDEADYYCQVWDGSSDRHYVFGSGTKVTVL

SEQ ID NO: 2842 - protein, 113 aa, Artificial Sequence
  Synthetic construct
DIVMTQSPDSLAVSLGERATINCKSSQSVLYSSNNKNYLAWYQQKAGQPPKLLIYWASTRESGVPDRFSGSGSGTDFTLTISSLQAEDVAVYYCQQYYNTPRTFGQGTKLEIK

SEQ ID NO: 2843 - protein, 111 aa, Artificial Sequence
  Synthetic construct
QSALTQPASVSGSPGQSITISCTGTSSDVGSYNLVSWYQQHPGKAPKLMIYEGNKRPSGVSNRFSGSKSGNTASLTISGLQAEDEADYYCCSCCSYEGGWVFGGGTKLTVL

SEQ ID NO: 2844 - protein, 111 aa, Artificial Sequence
  Synthetic construct
QSALTQPASVSGSPGHSITISCTGTSSDVGGYNSVSWYQHHPGKAPKIMIYDVSNRPSGVSNRFSGSKSGNTASLTISGLQAEDEADYYCSSYTTNITPYVFGTGTKVTVL

SEQ ID NO: 2845 - protein, 108 aa, Artificial Sequence
  Synthetic construct
SYELTQPPSVSVSPGQTARITCSGDALPNKYVYWYQQKSGQAPVLVIYEDNKRPSGIPERFSGSSSGTMATLTISGAQVEDEADYYCYSTDTSGNQRVFGGGTKLTVL

SEQ ID NO: 2846 - protein, 111 aa, Artificial Sequence
  Synthetic construct
QSALTQPASVSGSPGQSITISCTGTSSDIGAFNYVSWYLQHPGKAPKLMIYDVTNRPSGVSNRFSGSKSGNTASLTISGLQAEDEADYYCSSYTTSSTLEVFGTGTKVTVL

SEQ ID NO: 2847 - protein, 108 aa, Artificial Sequence
  Synthetic construct
DIQMTQSPSSLSASVGDRVTITCRASQSISSYLNWYQQKPGKAPKLLIYAASNLQSGVPSRFSGSGSGTDFTLTISSLQPEDFATYYCQQSYSTPPFTFGPGTKVDIK

SEQ ID NO: 2848 - protein, 107 aa, Artificial Sequence
  Synthetic construct
DIQMTQSPSTLSASVGDRVTITCRASQSISRWLAWYQQKPGKAPNLLIYKASSLQSGVPSRFSGSGSGTEFTLTISSLQPDDFATYYCQQFHSYPYTFGQGTKVDIK

SEQ ID NO: 2849 - protein, 109 aa, Artificial Sequence
  Synthetic construct
EIVLAQSPGTLSLSPGERATLSCRASQSLSTSYLAWYQQKPGQAPRLLIYGASNRATGIPDRFSGSGSGTDFTLTISRLEPEDFALYYCQQYGSSPMYTFGQGTKLEIK

SEQ ID NO: 2850 - protein, 107 aa, Artificial Sequence
  Synthetic construct
VIWMTQSPSLLSASTGDRVTISCRMSQGISSYLAWYQQKPGKAPELLIYAASTLQSGVPSRFSGSGSGTDFTLTISCLQSEDFATYYCQQYYSFPWTFGQGTKVEIK

SEQ ID NO: 2851 - protein, 106 aa, Artificial Sequence
  Synthetic construct
SYELTQPPSVSVSPGQTASITCSGDKLGDKYTCWYQQKPGQSPVLVIYQDTKRPSGIPEHFSGSNSGNTATLTISGTQAMDEADYYCQAWDSNTPIFGGGTKLTVL

SEQ ID NO: 2852 - protein, 108 aa, Artificial Sequence
  Synthetic construct
EIVLTQSPGTLSLSPGERAALSCRASQSVAGTYLAWYQQKPGQAPRLLIYGASSRATGIPDRFSGSGSGTDFTLTISRLEPEDFAVYYCQQYATSPRTFGQGTQLEIR

SEQ ID NO: 2853 - protein, 107 aa, Artificial Sequence
  Synthetic construct
EIVMTQSPATLSVSPGERASLSCRASQSINSNLAWYQQRPGQAPRLLIYGASTRATGIPARFSGSGSGTEFTLTISSLQSEDFAIYYCQQYNNWLRTFGQGTKVEIK

SEQ ID NO: 2854 - protein, 113 aa, Artificial Sequence
  Synthetic construct
DIVMTQSPDSLAVSLGERATINCKSSQSVLYSSNNNNYLAWYQQKPGQPPKLLIYWASTRESGVPDRFSGSASGTDFTLTISSLQAEDVAVYYCHQYYSSPWTFGQGTKVEIK

SEQ ID NO: 2855 - protein, 107 aa, Artificial Sequence
  Synthetic construct
EIVMTQSPATLSVSPGERATLSCRASQSISSNLAWYQQKPGQAPRLLIYGASTRATGIPARFSGSGSGTEFTLTISSLQSEDFAVYFCQQYNNWPYTFGQGTKLEIK

SEQ ID NO: 2856 - protein, 108 aa, Artificial Sequence
  Synthetic construct
DSVLTQSPGTLSLSPGERATLSCRASQSVSSSYLAWYQQKPGQAPRLLIYGASSRATGIPDRFSGSGSGTDFTLTITRLEPEDFAVYYCQLYGFSQLTFGGGTKVEIN

SEQ ID NO: 2857 - protein, 111 aa, Artificial Sequence
  Synthetic construct
QSVLTQPPSVSGAPGQRVTISCTGSTSNIGASYDVHWYQQLPGTAPELLIFGNSNRPSGVPDRFSGSKSGTSASLAITGLQAEDEADYYCQSYDSSLNDYVFGTGTKVTVL

SEQ ID NO: 2858 - protein, 112 aa, Artificial Sequence
  Synthetic construct
GILMTQTPLSLSVTPGQPASFSCKSSQSLLHGDGKTYLYWYLQRPGQPPQLLIYEVSYRFSGVADRFSGSGSGTDFTLKISRVEAEDVGVYYCMQSIQPPYTFGQGTKLEIK

SEQ ID NO: 2859 - protein, 105 aa, Artificial Sequence
  Synthetic construct
EIVLTQSPGTLSLSPGKRATLSCRASQSISSSYLAWYQQKPGQAPRLLIYGASSRATGIPDRFSGSGSGTDFTLTISRLEPEDFAVYYCQQYGTTFGQGTKLEIK

SEQ ID NO: 2860 - protein, 112 aa, Artificial Sequence
  Synthetic construct
QSVLTQPPSVSGAPGQRVTISCTGSRSNIGAGYDVHWYQQLPGTAPKLLIYGSSNRPSGVPDRFSGSKSGTSASLAITGLQADDEADYYCQSYDSSLSGWEVFGGGTKLTVL

SEQ ID NO: 2861 - protein, 110 aa, Artificial Sequence
  Synthetic construct
QSALTQPASVSGSPGQSITISCTGSSSDVGSYNLVSWYQQHPGKVPKLMIYEGSKRPSGVSNRFSGSKSGNTASLTISGLQAEDEADYYCCSYAGSSTYVFGTGTKVTVL

SEQ ID NO: 2862 - protein, 108 aa, Artificial Sequence
  Synthetic construct
DIQLTQSPSFLSASVGDRVTITCRASQDISSYLAWYRQKPGEAPKLLIFAASTLQSGVPSRFSGSGSGTDFTLTISSLQPEDFATYFCQQVNSFFRVTFGGGTKVEVK

SEQ ID NO: 2863 - protein, 109 aa, Artificial Sequence
  Synthetic construct
EIVLTQSPGTLSLSPGERATLSCRASQSVNSNYFAWFQQKPGQAPRLLIYAASSRATGIPDRFSGRGSGTDFTLTISRLEPEDFAVYYCQQYGSSLTWTFGQGTKVEIK

SEQ ID NO: 2864 - protein, 112 aa, Artificial Sequence
  Synthetic construct
DVVMTQSPPSLPVTLGQPASISCRSSQSLVYSDGNTYLNWFQQRPGQSPRRLIYEISNRDSGVPDRFSGSGSGTDFTLKISRVEAEDVGVYYCMQGVHWPFTFGGGTKVEIK

SEQ ID NO: 2865 - protein, 107 aa, Artificial Sequence
  Synthetic construct
SYELTQPPSVSVSPGQTARITCSGDALPKKYAYWYQQKSGQAPVLVIYEDSKRPSGIPERFSGSSSGTMATLTISGAQVEDEADYYCYSTDSSGKPLFGGGTKLTVL

SEQ ID NO: 2866 - protein, 108 aa, Artificial Sequence
  Synthetic construct
SYELTQPPSVSVSPGQTARITCSGDALPKKYAYWYQQKSGQAPVLVIYEDSKRPSGIPERFSGSSSGTMATLTISGAQVEDEADYYCYSTDSSGNHGVFGGGTKLTVL

SEQ ID NO: 2867 - protein, 107 aa, Artificial Sequence
  Synthetic construct
DIQMTQSPSTLSASVGDRVTITCRASQSISASLAWYQQKPGKAPKLLIYKASSLESGVPSTFSGGGSGTEFTLTISSLQPDDFATYYCQHYNSNSGTFGQGTKVEIK

SEQ ID NO: 2868 - protein, 109 aa, Artificial Sequence
  Synthetic construct
EIVLTQSPATLSLSPGERATLSCRASQSVSNYLAWYQQKPGQAPRLLIYDASKRAPGVPARFRGSGSGPDFTLTISSLEPEDFAVYYCQQRSNRPPTWTFGQGTKVEIK

SEQ ID NO: 2869 - protein, 108 aa, Artificial Sequence
  Synthetic construct
EIVLTQSPGTLSLSPGERASLSCRASQSVSSSYLAWYQQKPGQAPRLLIYGASSRATGIPDRFSGSGSGTDFTLTISRLEPEDFAVYWCQQFAYSLYTFGQGTKLEIK

SEQ ID NO: 2870 - protein, 106 aa, Artificial Sequence; identical to SEQ ID NO: 2607
  Synthetic construct

SEQ ID NO: 2871 - protein, 107 aa, Artificial Sequence
  Synthetic construct
DIQMTQSPSTLSASVGDRVTITCRASQSISSWLAWYQQKPGKAPKLLIYKASSLESGVPSRFSGSGSGTEFTLTISSLQPDDFATYYCQQYNSYPYTFGQGTKLEIK

SEQ ID NO: 2872 - protein, 107 aa, Artificial Sequence
  Synthetic construct
DIQMTQSPSSLSASVGDRVTITCRASQDIRNDLGWYQQKPGKAPKRLIFAAFSLQSGVPSRFSGSGSGTEFTLTISSLRPEDFATYYCLQHNSYPHTFGPGTKLEIK

SEQ ID NO: 2873 - protein, 109 aa, Artificial Sequence
  Synthetic construct
QTVVTQEPSLTVSPGGTVTLTCASSTGAVPSGYYPNWFQQKPGQAPRALIYSINNKHSWTPARFSGSLLGGKAALTLSGVQPEDEAEYYCLLYYGVIGVFGGGTKLTVL

SEQ ID NO: 2874 - protein, 110 aa, Artificial Sequence
  Synthetic construct
QSVVTQPPSASGTPGQRVTISCSGSTSNIGSHTVNWYQQLPGTAPKLLIYSGEKRPSGVPDRFSGSESGTSASLAITGLQSEDEADYYCLVWDGSLSGWVFGGGTKLTVL

SEQ ID NO: 2875 - protein, 110 aa, Artificial Sequence
  Synthetic construct
QSALTQPASVSGSPGQSITISCTGTSSDVGGYNYVSWYQQHPGKAPKLMIYEVTDRPSGVSNRFSGSKSGNTASLTISGLQAEDEADYYCSSYTSSTTLVFGGGTKLTVL

SEQ ID NO: 2876 - protein, 107 aa, Artificial Sequence
  Synthetic construct
SYELTQPPSVSVSPGQTASITCSGDKLGDKYACWYQQKPGQSPVLVIYQDNKRPSGIPERFSGSNSGNTATLTISGTQAMDEADYYCQAWDSSTAGVFGGGTKLTVL

SEQ ID NO: 2877 - protein, 109 aa, Artificial Sequence
  Synthetic construct
SYELTQPPSVSVSPGQTARITCSGDALPKKYAYWYQQKSGQAPVLVIYEDSKRPSGIPERFSGSSSGTMATLTISGAQVEDEADYYCYSTDTSGDHRGVFGAGTKVTVL

SEQ ID NO: 2878 - protein, 112 aa, Artificial Sequence
  Synthetic construct
DIVMTQTPLSLSVTPGQPASISCKSSQSLLHSDGKTYLYWYLQKPGQSPQLLIYEVSSRFSGVPDRFSGSGSGTDFTLKISRVEAEDVGVYYCMQGIHLPITFGQGTRLEIK

SEQ ID NO: 2879 - protein, 108 aa, Artificial Sequence
  Synthetic construct
SYELTQPPSVSVSPGQTARITCSGDALPRKYAYWYQQKSGQAPVLVIYEDTKRPSGIPERFSGSTSGTMATLTVSGAQVEDEADYYCYSTDSSGKQGVFGGGTKLTVL

SEQ ID NO: 2880 - protein, 107 aa, Artificial Sequence
  Synthetic construct
EIVLTQSPGTLALSPGERATLSCRASQSVRSSYLAWYQQKPGQAPRLLIYGASRRATGIPDRFSGSGSGADFTLTISRLEPEDFAVYYCQHYGTSWTFGQGTKVEIK

SEQ ID NO: 2881 - protein, 113 aa, Artificial Sequence
  Synthetic construct
DIVMTQSPLSLPVTPGEPASISCRSSQSLLHSNGNNYLDWYLQKPGQSPQLLIYLGSNRASGVPDRFSGSGSGTDFTLKISRVEAEDVGVYYCMQALQTPGVSFGGGTKVEIK

SEQ ID NO: 2882 - protein, 110 aa, Artificial Sequence
  Synthetic construct
QSVLTQSPSVSAAPGQKVTISCSGSSSNIGNNFVSWYQQLPGTAPKLLLYENNKRPSGIPDRFSGSKSGTSATLGITGLQTGDEADYYCGAWDSSLSSVVFGGGTKLTVL

SEQ ID NO: 2883 - protein, 106 aa, Artificial Sequence
  Synthetic construct
EIVLTQSPATLSLSPGERATLSCRASQSVSSYLAWYQQKPGQAPRLLIYDASNRATGIPSRFSGSGSGTDFTLTISSLEPEDFAVYYCQQRSNWPTFGPGTKVDIK

SEQ ID NO: 2884 - protein, 112 aa, Artificial Sequence
  Synthetic construct
DIVMTQTPLSLSVTPGQPASITCKSSQSLLHSDGKTYLYWYLQKPGQPPHLLMYEVSNRFSGVPDRFSGSGSGTDFTLKISRVEAEDVGLYYCMQFIELPYTFGQGTKLEIK

SEQ ID NO: 2885 - protein, 108 aa, Artificial Sequence
  Synthetic construct
EIVLTQSPGTLSLSPGERATLSCRASQSVSSIYLAWYQQKPGQAPRLLIYGASSRAIGIPDRFSGSGSGTDFTLTISRLEPEDFAVYFCQQYGSSPWTFGQGTKVEIK

SEQ ID NO: 2886 - protein, 113 aa, Artificial Sequence
  Synthetic construct
DIVMTQSPDSLAVSLGERATINCKSSQSVLYSFNNKNYLAWYQQKPGQPPKLLIYWASTRESGVPDRFSGSGSGTDFTLTISSLQAEDVAVYYCQQYYSTPITFGQGTRLEIK

SEQ ID NO: 2887 - protein, 109 aa, Artificial Sequence
  Synthetic construct
EIVLTQSPGTLSLSPGERATLSCRASERVSSSYLAWYQQKPGQAPRLLIYSTSSRAIGIPDRFSGSGSGTDFTLTISRLEPEDFAVYYCQQYGSSLTWTFGQGTKVEIK

SEQ ID NO: 2888 - protein, 107 aa, Artificial Sequence
  Synthetic construct
DIQMTQSPSSLSASVGDRVTITCRASQTISNYLNWYQQKPGKAPKLLIYGASSLQSGVPSRFSGSGSGTGFTLTISSLQPEDFATYYCQQSYSSPWTFGQGTKVEIK

SEQ ID NO: 2889 - protein, 108 aa, Artificial Sequence
  Synthetic construct
EIVLTQSPGTLSLSPGERATLSCRASQSVSSGHLAWYQQKPGQAPRLLIYGASTRAAGIPDRFSGGGSGTDFTLTISRLDPEDFAVYYCQQYGGSFRTFGRGTKLELK

SEQ ID NO: 2890 - protein, 110 aa, Artificial Sequence
  Synthetic construct
QSALTQPPSASGSPGQSVTISCTGTSSDVGGYNFVSWYQQHPGKAPQLIIYEVTKRPSGVPDRFSGSKSGSTASLTVSGLQAEDEADYYCSSYAGTNIYVFGPGTKVTVL

SEQ ID NO: 2891 - protein, 110 aa, Artificial Sequence
  Synthetic construct
RSALTQPASVSGSPGQSITISCTGTSSDVGSYDLVSWYQQHPGKAPKLMIYEVTKRPSGVSNRFSGSKSGNTASLTIFGLQAEDEADYHCCSYADSSSLVFGGGTKLTVL

SEQ ID NO: 2892 - protein, 108 aa, Artificial Sequence
  Synthetic construct
EIVLTQSPGTLSLSPGERATLSCRASQSVSSRYLAWYQQKPGQAPRLLIYGASSRATGIPDRFSGSGSGTDFTLTISRLEPEDFAVYYCQQYDSSFWTFGQGTKVEIK

SEQ ID NO: 2893 - protein, 111 aa, Artificial Sequence
  Synthetic construct
QSALTQPASVSGSPGQSITISCTGTSSDVGSYNYVSWYQQHPGKAPKLMIYDVSNRPSGVSNRFSGSKSGNTASLTISGLQAEDEADYYCSSATRSGTLYVFGTGTKVTVL

SEQ ID NO: 2894 - protein, 108 aa, Artificial Sequence
  Synthetic construct
SYELTQPPSVSVSPGQTARITCSGDALPKKYAYWYQQKSGQAPVLVIYEDNKRPSGIPERFSGSSSGTMATLTLSGAQVEDEADYYCYSTDSSGNHRVFGGGTKLTVL

SEQ ID NO: 2895 - protein, 107 aa, Artificial Sequence
  Synthetic construct
DIQMTQSPSTVSASVGDTVTISCRASESISTWLAWYQQKPGKAPQVLIYRASTLQSGVPSRFSGSGSGTDFTLTISGLQPDDSATYYCQEYTNYSWTFGQGTRVEIK

SEQ ID NO: 2896 - protein, 111 aa, Artificial Sequence
  Synthetic construct
QSVLTQPPSVSGAPGQRVTIPCTGSSSNIGAGYGVHWYQQLPGTAPKLLIYGNTNRPSGVPDRFSGSKSGTSASLAISELQAEDEADYYCQSYDSSLSVYVFGTGTKVTVL

SEQ ID NO: 2897 - protein, 107 aa, Artificial Sequence
  Synthetic construct
SYELTQPPSVSVSPGQTASITCSGDKLGDKYVCWYQQKPGQSPVLVIYQDIKRPSGIPERFSGSNSGNTATLTISGTQAMDEADYYCQAWDSSTGGVFGTGTKVTVL

SEQ ID NO: 2898 - protein, 110 aa, Artificial Sequence
  Synthetic construct
QSVLTQPPSASGTPGQRVTISCSGSSSNIGSNSVNWYQQLPGTAPKVLIYSNNQRPSGVPDRFSGSKSGTSASLAISGLQSEDEADYYCAAWDDSLNGWVFGGGTKVTGL

SEQ ID NO: 2899 - protein, 110 aa, Artificial Sequence
  Synthetic construct
QSVLTQPPSASGTPGQRVTISCSGSSSNIGSNYVYWYQQLPGTAPKLLMYRNNQRPSGVPDRFSGSKSGTSASLAISGLRSEDEADYYCAAWDDSLSGWVFGGGTKLTVL

SEQ ID NO: 2900 - protein, 109 aa, Artificial Sequence
  Synthetic construct
EIVLTQSPATLSLSPGERATFSCRASQSVSSYLAWYQQKPGQAPRLLIYDASNRATGIPARFSGSGSGTDFTLTISSLEPEDFAVYYCQQRSNWPPRYTFGQGTKLEIK

SEQ ID NO: 2901 - protein, 108 aa, Artificial Sequence
  Synthetic construct
SYVLTQPPSVSVAPGQTARITCGGNNIGGESVHWYQQKPGQAPMLVVYDDRDRPSGIPERFSGSNSGNTATLTISRVEAGDEADYYCQVYDSSTDPWVFGGGTTLTVL

SEQ ID NO: 2902 - protein, 107 aa, Artificial Sequence
  Synthetic construct
DIQLTQSPSFLSASVGDRVTITCRASQGISSYLAWYQQKPGKAPKLLIYAASTLQSGVPSRFSGSGSATEFTLTISSLQPEDFATYYCQQLNSYPRTFGQGTKVEIK

SEQ ID NO: 2903 - protein, 108 aa, Artificial Sequence
  Synthetic construct
EVVMTQSPATLSVSPGERATLSCRASQSVSSNLAWYQQKPGQAPRLLIYGASTRATGIPARFSGSGSGTEFTLTISSLQSEDFAVYYCQQYENWPPCTFGQGTKLEIK

SEQ ID NO: 2904 - protein, 110 aa, Artificial Sequence
  Synthetic construct
QSALTQPASVSGSPGQSITISCTGTSTDIGIYSYVSWYQQHPGKAPKLIIYDVSNRPSGPSNRFSGSKSGNTASLTISGLQAEDEADYYCNSYTITGTWVFGGGTKLTVL

SEQ ID NO: 2905 - protein, 107 aa, Artificial Sequence
  Synthetic construct
EIVMTQSPATLSVSPGERATLSCRASQSVSSNLAWYQQKPGQAPRLLIYGASTRATGIPARFSGSGSGTEFTLTISSLQSEDFAVYYCQQYNNWPRTFGQGTKVEIK

SEQ ID NO: 2906 - protein, 110 aa, Artificial Sequence
  Synthetic construct
QSALTQPASVSGSPGQSITISCTGTSSDVGGYNYVSWYQQHPGKAPKLMIYDVSNRPSGVSNRFSGSKSGNTASLTISGLQAEDEADYYCSSYTSSSTLVFGTGTKVTVL

SEQ ID NO: 2907 - protein, 107 aa, Artificial Sequence
  Synthetic construct
DIQMTQSPSSLSASVGDRVTITCRASQGISTYLAWYQLKPGKVPKLLIYAASTLQSGVPSRFSGSGSGTDFTLTISSLQPEDVATYYCQKYKGVPVTFGGGTKVEIK

SEQ ID NO: 2908 - protein, 107 aa, Artificial Sequence
  Synthetic construct
SYELTQPPSVSVSPGQTARITCSGDALPKKYAYWYQQKSGQAPVLVIYEDSKRPSGIPERFSGSSSGTMATLTISGAQVEDETDYYCYSTDSSGKGVFGGGTKLTVL

SEQ ID NO: 2909 - protein, 108 aa, Artificial Sequence
  Synthetic construct
DIQMTQSPSSLSASVGDRVTITCRASQSISSYLNWYQQKPGQAPKVLIYAASSLQSGVPSRFSGSGSGTDFTLTISSLQPEDFATYYCQQSYSTLALTFGGGTKVEVR

SEQ ID NO: 2910 - protein, 108 aa, Artificial Sequence
  Synthetic construct
EVVLTQSPGTLSLSPGERATISCRASQTITSNFLSWYQQKPGQAPRLLIYGASSRATGIPDRFSGSGSGTDFTLTISRLEPEDFVVYYCHQYVILPLTFGGGTKVEIK

SEQ ID NO: 2911 - protein, 108 aa, Artificial Sequence
  Synthetic construct
EIVLTQSPGTLSLSPGERATLSCRASQSVSSSYLAWYQQKPGQAPRLLIYGASSRATGIPDRFSGSGSGTDFTLTISRLEPEDFAVYYCQQYGSSPFTFGPGTKVDIK

SEQ ID NO: 2912 - protein, 108 aa, Artificial Sequence
  Synthetic construct
DIQLTQSPSFLSASVGDRVTITCRASQGISSYLAWYQQKPGKAPKLLIYAASTLQSGVPSRFSGSGSGTEFTLTISSLQPEDFATYYCQQLNSYPEITFGPGTKVDVK

SEQ ID NO: 2913 - protein, 109 aa, Artificial Sequence
  Synthetic construct
SYELTQPPSVSVSPGQTARITCSGDALPKKYAYWYQQKSGQAPVLVIYEDSKRPSGIPERFSGSSSGTMATLTISGAQVEDEADYYCYSTDSSGNHRRVFGGGTKLTVL

SEQ ID NO: 2914 - protein, 112 aa, Artificial Sequence
  Synthetic construct
QSVLTQPPSVSGAPGQRVTISCTGSSSNIGAGYDVHWYQQLPGTAPKLLIFGNNNRPSGVPDRFSGSKSGTSASLAITGLQAEDEADYYCQSYDSSLSGSNVFGTGTKVTVL

SEQ ID NO: 2915 - protein, 112 aa, Artificial Sequence
  Synthetic construct
QSVLTQPPSVSGAPGQRVTISCTGSSSNIGAGYDVHWYQQLPGTAPKLLIYGNTNRPSGVPDRFSGSKSGTSASLAITGLQAEDEADYYCQSYDSSLSGHVVFGGGTKLTVL

SEQ ID NO: 2916 - protein, 110 aa, Artificial Sequence
  Synthetic construct
QSALTQPASVSGSPGQSITISCTGTSSDVGDYDSVSWYQQYPGKAPKLVIYGVRDRPSGVSNRFSGSKSGNTASLTISGLQAEDEADYYCCSHVTGGTYVFGTGTEVTVL

SEQ ID NO: 2917 - protein, 113 aa, Artificial Sequence
  Synthetic construct
DIVMTQSPDSLPVSLGERATINCKSSQSVLYSSDNKNYLAWYQQKAGQPPKLLIYWASTRESGVPDRFSGSGSGTDFTLTISSLQAEDVAVYYCQQYFGIPRTFGQGTRLEIK

SEQ ID NO: 2918 - protein, 112 aa, Artificial Sequence
  Synthetic construct
DIVLTQSPDSLAVSLGERATINCKSSQSVLSNSSNKNYLAWYQQKPGQPPKLLIYWSSTRESGVPDRFSGSGSGTDFTLTISSLQAEDVAIYFCQQYYRAPTFGQGTRLEIK

SEQ ID NO: 2919 - protein, 110 aa, Artificial Sequence
  Synthetic construct
QSVLTQPPSASGTPGQRVTISCSGSGSNIGSNTVNWYQQLPGTAPKLLIYSNNQRPSGVPDRFSGSKSGTSASLAISGLQSEDEADYYCAAWDDSLNGWVFGGGTKLTVL

SEQ ID NO: 2920 - protein, 108 aa, Artificial Sequence
  Synthetic construct
EIVMTQSPATLSVSPGERATLSCRASQSVSSNLAWYQQKPGQAPRLLIYGASTRATGIPGRFSGSGSGTEFTLTISSLQSEDFAVYYCQHYNNWPPWTFGQGTKVEIK

SEQ ID NO: 2921 - protein, 108 aa, Artificial Sequence
  Synthetic construct
SYELTQPPSVSVSPGQTARITCSADALPNQYAYWYQQKPGQAPVLMIYKDSERPSGIPERFSGSSSGTTVTLTISGVQAEDEADYYCQSPDRSGTYWVFGTGTRVTVL

SEQ ID NO: 2922 - protein, 109 aa, Artificial Sequence
  Synthetic construct
EIVLTQSPGTLSLSPGERATLSCRASHSVSNSYLAWYQQKPGQAPRLLIYGASSRATGIPDRFSGSGSGTDFTLTISRLEPEDFAVYYCQQSGSSPPYTFGQGTKLEIK

SEQ ID NO: 2923 - protein, 110 aa, Artificial Sequence
  Synthetic construct
QSVLTQPPSASGTPGQRVTISCSGSSSNIGINYVYWYQQLPGTAPKLLIYRNNQRPSGVPDRFSGSKSGTSASLAISGLRSEDEADYYCAAWDDSLSGEVFGGGTKLTVL

SEQ ID NO: 2924 - protein, 108 aa, Artificial Sequence
  Synthetic construct
DIQMTQSPFSLAASVGDRVTITCRASQSISSHLNWYQQKPGKAPNLLIYAASSLQNGVPSRFSGSGSGTDFTLTISSLQPEDFATYYCQQSYSFPPWTFGQGTKVEVK

SEQ ID NO: 2925 - protein, 110 aa, Artificial Sequence
  Synthetic construct
QSVLTQPPSASGTPGQRVTISCSGSSSNIGSNTVNWYQLLPGTAPKLLIYNNNQRPSGVPDRFSGSKSGTSASLAISGLQSEDEADYYCAPWDDSLNGPVFGGGTKLTVL

SEQ ID NO: 2926 - protein, 108 aa, Artificial Sequence
  Synthetic construct
SYELTQPPSVSVSPGQTARITCSGDALPKKYSYWYQQKSGQAPLLVIYEDSKRPSGIPERFSGSSSGTMATLTISGAQVEDEADYYCYSTDSSGNHRVFGGGTKLTVL

SEQ ID NO: 2927 - protein, 107 aa, Artificial Sequence
  Synthetic construct
DIQMTQSPSSVSASVGDRVTITCRASQGVSSWLAWYQQKPGKAPKLLISAASNLQSGVPSRFSGSGSGTDFTLTISSLQPEDFATYYCQQANGFPITFGQGTRLEIK

SEQ ID NO: 2928 - protein, 108 aa, Artificial Sequence
  Synthetic construct
ETIVTQSPATLSVSPGERATLSCRASQSISNNLAWYQQKPGQVPRLLIHGASTRATGIPARFSGSRSGTQFSLTISTVQSEDFAIYYCLQYNNRPPYTFGQGTKLEIK

SEQ ID NO: 2929 - protein, 112 aa, Artificial Sequence
  Synthetic construct
QSVLTQPPSVSGAPGQRVTISCTGSSSNIGGDYDVHWYQQLPGTAPKLLIYGNINRPSGVPDRFSGSKSGTSASLAITGLQAEDEANYYCQSYDSSLSGSWVFGGGTKLTVL

SEQ ID NO: 2930 - protein, 110 aa, Artificial Sequence
  Synthetic construct
QSALTQPPSASGSPGQSVTISCTGTSSDVGGYTYVSWYQQHPGKAPKLMISEVSKRPSGVPDRFAGSKSGNTASLTVSGLQTEDEADYYCCSYAGNNNFVFGTGTKVTVL

SEQ ID NO: 2931 - protein, 109 aa, Artificial Sequence
  Synthetic construct
EIVLTQSPDTLSLSPGERATLSCRASQSVSSTYSSWYQQKPGQAPRLLIYAASSRATGVPDRFSGSASGTDFTLTISRLEPEDFAVYYCQQYGSSPPVVFGGGTKVEIK

SEQ ID NO: 2932 - protein, 111 aa, Artificial Sequence
  Synthetic construct
QSALTQPPSASGSPGQSVTISCTGTSSDVGGYNYVSWYQQHPGKAPKLMIYEVTKRPSGVPDRFSGSKSGNTASLTVSGLLAEDEADYHCSSYAGSNNRLVFGGGTKLTVL

SEQ ID NO: 2933 - protein, 107 aa, Artificial Sequence
  Synthetic construct
DIQMTQSPSALSASVGDRVAITCRASRTISTWLAWYQQKPGKAPKVLIYKASTLQSGVPSRFSGSGSGTEFTLTISSLQPDDFATYYCQHYDSYSFTFGPGTRVDIK

SEQ ID NO: 2934 - protein, 111 aa, Artificial Sequence
  Synthetic construct
QSVLTQPPSVSGAPGQRVTISCTGSSSNIGAGYDVHWYQHLPGTAPKLLIHGNTNRPSGVPDRFSGSKSGTSASLAISGLQAEDEADYYCQSYDSSLSGCVFGTGTKVTVL

SEQ ID NO: 2935 - protein, 113 aa, Artificial Sequence
  Synthetic construct
DIVLTQSPDSLAVSLGERATINCKSSQSVLYSSNNKDYLAWYQQKPGQPPKLLIYWASTRESGVPDRFSGSGSGTDFTLTISSLQAEDVAVYYCQQHYSPPPTFGQGTKVEIK

SEQ ID NO: 2936 - protein, 110 aa, Artificial Sequence
  Synthetic construct
QSALTQPPSASGSPGQSVAISCTGTSSDIGHYNFVSWYQQHPGKAPKLIIYEVSKRSSGVPDRFSGSKSGNTASLTVSGLQAEDEADYYCSSYVGIDNWVFGGGTKLTVL

SEQ ID NO: 2937 - protein, 110 aa, Artificial Sequence
  Synthetic construct
QSALTQPPSASGSPGQSVTISCTGTSNDVGAYNYVSWYQHHPGKAPKLMIYEVNKRPSGVPDRFSGSKSGNTASLTVSGLQADDEADYWCSSYGGSNNLVFGGGTKLTVL

SEQ ID NO: 2938 - protein, 107 aa, Artificial Sequence
  Synthetic construct
SYELTQSPSVSVSPGQTARITCSGDALPKQYAYWYQQRPGQAPMLVIYKDSERPSGIPERFSGSSSGTTVTLTISGVQAEDEADYYCQSTDSSGAWVFGGGTKLTVL

SEQ ID NO: 2939 - protein, 106 aa, Artificial Sequence
  Synthetic construct
SYELTQPPSVSVSPGQTASITCSGDKLGDKYTCWYQQKPGQSPLLVIYEDTKRPSGIPERFSGSNSGNTATLTISGTQAMDEADYYCQAWYSSTGVFGGGTKLTVL

SEQ ID NO: 2940 - protein, 112 aa, Artificial Sequence
  Synthetic construct
DIVMTQSPLSLPVTPGEPASISCRSSQSLLHSNGYNFLDWYLQKPGQSPQLLIYLGSNRASGVPDRFSGSGSGTDFTLKISRVEAEDVGVYYCMQALQTPRTFGQGTKLEIK

SEQ ID NO: 2941 - protein, 105 aa, Artificial Sequence
  Synthetic construct
DIQMTQSPSTLSASVGDRVTITCRASQSISSWLAWYQQKPGKAPKLLIYKASSLESGVPSRFSGSGSGTEFTLTISSLQADDFATYYCQQYNSWTFGQGTKVEIK

SEQ ID NO: 2942 - protein, 110 aa, Artificial Sequence
  Synthetic construct
QSALTQPPSLSGSPGQSVTISCTGTSSNVGGYNHVSWYQQHPGEAPKLIIYDVAERPSGVPDRFSGSKSGNTASLTISGLQTDDESDYYCSSFAGTDPVVFGGGTKLTVL

SEQ ID NO: 2943 - protein, 108 aa, Artificial Sequence
  Synthetic construct
EIVLTQSPATLSLSPGERATLSCRASQTISSFLAWYQQKPGQAPRLLIYDASNRATGIPARFSGSGSGTDFTLTISSLEPEDFAVYYCQQRSNWPPFTFGGGTKVEIK

SEQ ID NO: 2944 - protein, 113 aa, Artificial Sequence
  Synthetic construct
DIVMTQSPDSLAVSLGERATINCKSSQSVLYSSNNKNFLAWYQQKPGQPPKLLIYWASTRESGVPDRFSGSGSGTDFTLTISSLQAEDVAVYYCQQYYNTPPTFGLGTKVEIK

SEQ ID NO: 2945 - protein, 111 aa, Artificial Sequence
  Synthetic construct
QSALTQPASVSGSPGQSITISCTGTSSDVGGYNYVSWYQHYPGKAPKLMIHDVSNRPSGVSNRFSGSKSGNTASLTISGLQAEDEADYYCSSYTSSSTRYVFGTGTKVTVL

SEQ ID NO: 2946 - protein, 108 aa, Artificial Sequence
  Synthetic construct
EIVLTQSPGTLSLSPGERATLSCRASQSVSSSYLAWYQQKPGQAPRLLIYGAASRATGIPDRFSGSGSGTDFTLTISRLEPEDFAVYYCQHFGSSRGTFGQGTKVEIK

SEQ ID NO: 2947 - protein, 108 aa, Artificial Sequence
  Synthetic construct
EIVMTQSPASLSVSPGERATLSCRASQSVGSNLAWYQQKPGQAPRLLIYGASTRATGIPARFSGSGSGTEFTLTISSLQSEDFAVYYCQQCYNWPPWTFGQGTKVEVK

SEQ ID NO: 2948 - protein, 110 aa, Artificial Sequence
  Synthetic construct
QSALTQPRSVSGSPGQSVTISCTGTSSDVGAYDSVSWYQQHPGKAPKLMIYDVTKRPSGVPDRFSGSKSGNTASLTISGLQAEDEADYYCCSYAGSYTNVFGTGTKVTVL

SEQ ID NO: 2949 - protein, 110 aa, Artificial Sequence
  Synthetic construct
QSVLTQPPSASGTPGQRVTISCSGSSSNIGSNTVNWYQQLPGTAPKLLIYSNNQRPSGVPDRFSGSKSGTSASLAISGLQSEDEVDYYCAAWDDSLNGPVFGGGTKLTVL

SEQ ID NO: 2950 - protein, 111 aa, Artificial Sequence
  Synthetic construct
QSVLTQPPSASGTPGQRVTISCSGSSSNIGSNFVYWYQQLPGTAPKLLIYRNNQRPSGVPDRFSGSKSGTSASLAISGLRSEDEADYFCAAWDDSLTTYVIFGGGTKLTVL

SEQ ID NO: 2951 - protein, 108 aa, Artificial Sequence
  Synthetic construct
SYELTQPPSVSVSPGQTARITCSADALPKQYAYWFQQKSGQAPVLVIYKDSERPSGIPERFSGSSSGTTVTLTISGVQAEDEADYYCQSTDSSGAYWVFGTGTKVTVL

SEQ ID NO: 2952 - protein, 107 aa, Artificial Sequence
  Synthetic construct
EIVLTQSPATLSLSPGERATLSCRASQSVSSYLAWYQQKPGQAPRLLIYDASNRATGIPARFSGSGSGTDFTLTISTLEPEDFAVYYCQQRRNWPQTFGQGTRLEIK

SEQ ID NO: 2953 - protein, 109 aa, Artificial Sequence
  Synthetic construct
EIVLTQSPGTLTLSPGERATLSCRASQSVRGTFLAWYQQKPGQAPRLLIYGASTRATGIPDRFSGSGSGTDFTLTISRVEPEDFAVYYCQQYGDSPPITFGQGTRLETK

SEQ ID NO: 2954 - protein, 107 aa, Artificial Sequence
  Synthetic construct
DIQMTQSPSSVSASVGDRVNITCRASQGISSWLAWYQQKPGKAPKLLIYAASSLQSGVPSRFSGSGSGTDFTLTISSLQPEDFATYYCQQANSFPRTFGQGTKLEIK

SEQ ID NO: 2955 - protein, 107 aa, Artificial Sequence
  Synthetic construct
DIQMTQSPSSLSASIGDRVTITCRASQTIISYLHWYQQKPGKAPQLLISAATSLESGVPSRFSGSGSGTDFTLTISSLQPEDSATYYCQQSSSTPFTFGPGTKVDIK

SEQ ID NO: 2956 - protein, 110 aa, Artificial Sequence
  Synthetic construct
QSALTQPPSASGSPGQSVTISCTGTSSDVGGYDYVSWYQQHPGKAPKLIIFDVDKRPSGVPDRFSASKSGNTASLTVSGLQAEDEADYYCNSYAGSDNLVFGGGTKLTVL

SEQ ID NO: 2957 - protein, 110 aa, Artificial Sequence
  Synthetic construct
QSVLTQPPSASGTPGQRVTISCSGSSSNIGSNTVNWYQQLPGTAPKLLIYTNNQRPSGVPDRFSGSKSGTSASLAISGLQSEDEADYYCAAWGDSLNGVVFGGGTKLTVL

SEQ ID NO: 2958 - protein, 108 aa, Artificial Sequence
  Synthetic construct
DIVLTQSPGTLSLSPGERATLSCRASQSVSSSHLAWYQQRPGQAPRLLIYGASSRATGIPDRFTGSGSGTDFTLTISRLEPEDFAVYYCQQYGSSLWTFGQGTKVEIK

SEQ ID NO: 2959 - protein, 107 aa, Artificial Sequence
  Synthetic construct
EIVMTQSPGTLSVSPGERATLSCRASQSVSSNLAWYQQKPSQAPRLLIYGASTRATSIPARFSGSGSGTEFTLTISSLQSEDFALYYCQQYNNWPFTFGPGTKVDIK

SEQ ID NO: 2960 - protein, 106 aa, Artificial Sequence
  Synthetic construct
SYELTQPPSMSVSPGQTASMTCSGDKLGDKNTCWYQQKPGQSPLVVIYQDSRRPSGIPERFSGSTSGNTATLTISGAQAMDEADYYCQAWDSSTVIFGGGTKLTVL

SEQ ID NO: 2961 - protein, 107 aa, Artificial Sequence
  Synthetic construct
DIQMTQSPSSLSASVGDRVTITCRASQSVSSYLNWYQQKPGKAPKLLIYAASSLQSGVPSRFSGSGSGTDFTLTISSLQPEDFAAYYCQHSHATPWTFGQGTTVEIK

SEQ ID NO: 2962 - protein, 107 aa, Artificial Sequence
  Synthetic construct
DIQMTQSPSSLSASVGDRVTITCRASQSISSYLNWYQEKPGKAPNLLIYGASSLQSGVPSRFSGSGSGTDFTLTISSLKPEDSASYFCQQSYSTPWTFGQGTKVEIK

SEQ ID NO: 2963 - protein, 107 aa, Artificial Sequence
  Synthetic construct
DIQMTQSPSSLSASVGDRVTITCRASQNITYYLNWYQQKPGKAPNLLIYTASSLQSGVPSRFIGSGSGTDFTLTISSLQPEDFATYCCQQSYSTPPTFGQGTKVEIR

SEQ ID NO: 2964 - protein, 106 aa, Artificial Sequence
  Synthetic construct
DIQMTQSPSTLSASVGDRVTITCRASQIISRWLAWYQQKPGKAPKLLIYRASNLESGVPSRFSGSGSGTEFTLTISSLQPDDIATYYCQQYNNYFTFGPGTKVDIK

SEQ ID NO: 2965 - protein, 113 aa, Artificial Sequence
  Synthetic construct
GIVMTQSPDSLAVSLGERATINCKSSQSVLFSSNNKNYLAWYQQKPGQPPKLLIYWASTRESGVPDRFSGSGSGTDFTLTISSLQAEDVAVYYCQQCYGTPRTFGQGTKVEIK

SEQ ID NO: 2966 - protein, 108 aa, Artificial Sequence
  Synthetic construct
SDELTQPPSVSVSPGQTARITCSGDALSNQYAYWYQRRPGQAPVLVIYKDSERPSGIPERFSGSSSGTTVTLTISGVQADDEADYYCQSSDSSGTYMIFGGGTKLTAL

SEQ ID NO: 2967 - protein, 108 aa, Artificial Sequence
  Synthetic construct
EIVLTQSPGTLSLSPGERATLSCRASQSVSSTYLAWYQQKPGQPPRLLIYGASNRATGIPDRFSGSGSGTDFTLTISRLEPEDFAVYYCQQYGSLFLTFGGGTRVEIK

SEQ ID NO: 2968 - protein, 113 aa, Artificial Sequence
  Synthetic construct
DIVMTQSPESLAVSLGERATINCKSSQSVLYSSNNKNYLAWYQQKPGQPPKLLIYWASTRESGVPDRFSGSGSGTDFTLTISSLQAEDVAVYYCQQYYNSPRTFGQGTKLEIK

SEQ ID NO: 2969 - protein, 108 aa, Artificial Sequence
  Synthetic construct
EIVLTQSPGTLSLSPGERATLSCRASQSVSSTYLAWYQQKPGQAPRLLIYGASSRATGIPDRFSGSGSGTDFTLTISRLEPEDFAVYSCQQYRYSPYTFGQGTKLEIK

SEQ ID NO: 2970 - protein, 109 aa, Artificial Sequence
  Synthetic construct
QAVVTQEPSLTVSPGGTVTLTCGSSTGAVTNDHYSYWFQQKPGQAPRTLIYDTSGRHSWTPARFSGSLLGGKAALTLSGAQPEDEAEFYCLLHYSGARVFGGGTKLTVL

SEQ ID NO: 2971 - protein, 109 aa, Artificial Sequence
  Synthetic construct
SSELTQDPAVSVALGQTVRITCQGDSLRSYYASWYQQKPGQAPVLVIFGKNNRPSGIPDRFSGSNSGNTASLTITGAQAEDEADYYCNSRDNSGIHVGVFGTGTKVTVL

SEQ ID NO: 2972 - protein, 113 aa, Artificial Sequence
  Synthetic construct
DIVMTQSPDPLAVSLGERATINCKSSQSVLYTSNNKNYLAWYQQKPGQPPKLLINWASTRQSGVPDRFSGSGSGTDFTLTISSLQAEDVAVYYCQQYFSTPYTFGQGTKLEIK

SEQ ID NO: 2973 - protein, 109 aa, Artificial Sequence; identical to SEQ ID NO: 2649
  Synthetic construct

SEQ ID NO: 2974 - protein, 110 aa, Artificial Sequence
  Synthetic construct
QSVLTQPPSASGTPGQRVTIFCSGSSSNIGANTVNWYQLLPGTAPKLLIYSNDQRPSGVPDRFSGSKSGTSASLAISGLQSEDEADYYCAAWDDSLNGPVFGTGTKVTVL

SEQ ID NO: 2975 - protein, 110 aa, Artificial Sequence
  Synthetic construct
QSALTQPASVSGSPGQSITISCTGTSSDVGSYDHVSWFQQHAGKGPNLVIFDVNSRPSGVSNRFSGSKSGNTASLTISGLQAEDEADYYCFSYTSRGTRVFGTGTTVTVV

SEQ ID NO: 2976 - protein, 110 aa, Artificial Sequence
  Synthetic construct
QSALTQPRSVSGSPGQSVTISCTGTSSDVGGYNYVSWYQQHPGKAPKLMICDVSKRPSGVPDRFSGSKSGNTASLTISGLQAEDEADYYCCSYAGSYSWVFGGGTKLTVL

SEQ ID NO: 2977 - protein, 110 aa, Artificial Sequence
  Synthetic construct
QSVLTQPPSVSAAPGQKVTISCSGSSSNIGNHYVSWYQQLPGTAPKLLIYDNNERPSGIPDRFSGSKSATSATLGITGLQTGDEADYHCGTWDSSLSAYVFGSGTKVTVL

SEQ ID NO: 2978 - protein, 108 aa, Artificial Sequence; identical to SEQ ID NO: 2640
  Synthetic construct

SEQ ID NO: 2979 - protein, 109 aa, Artificial Sequence
  Synthetic construct
QAVVTQEPSVTVSPGGTVTLTCGSSTGAVTSGHYPYWFQQKPGQAPRTLIYETNNKHSWTPARFSGSLLGGKAALTLSGAQPEDEAEYYCLVSYGGARVFGGGTKLTVL

SEQ ID NO: 2980 - protein, 108 aa, Artificial Sequence
  Synthetic construct
ETVLTQSPATLSLSPGERATLSCRASQSISTFLAWYQQKPGQAPRLLIYDASNRATGIPARFSGSGSGTDFTLTISSLEPEDFAVYYCQQRSNWPPYTFGQGTKLEIK

SEQ ID NO: 2981 - protein, 108 aa, Artificial Sequence
  Synthetic construct
SYELTQPPSVSVSPGQTASITCSGDKLGDKYACWYQQRPGQSPVLVIYQDSKRPSGIPERFSGSNSGNTATLAISGTQAMDEADYYCQAWDSSTENVVFGGGTKLTVL

SEQ ID NO: 2982 - protein, 107 aa, Artificial Sequence
  Synthetic construct
EIVMTQSPATLSVSPGERATLSCRASQSVSSNLAWYQQKPGQAPRLLIYGASARATAFPARFSGSGSGTEFTLTISSLQSEDFALYYCHQYNNWPWTFGQGTKVEIK

SEQ ID NO: 2983 - protein, 106 aa, Artificial Sequence
  Synthetic construct
SYELTQPPSVSVSPGQTASITCSGDKLGDKNPCWYQQKPGQSPVLVIYEDGKRPSGIPERFSGSNSGNTATLAISGTRAMDEADYYCQAWDSSTYVFGTGTRVTVL

SEQ ID NO: 2984 - protein, 109 aa, Artificial Sequence
  Synthetic construct
EIVVTQSPATLSVSPGERATLSCRASQSVSSNLAWYQQTPGQAPRLLIYGASTRATGIPARFSGSGSGTEFTLTISSLQSEDFAVYYCQQYNNWPPVYTFGQGTKLEIK

SEQ ID NO: 2985 - protein, 108 aa, Artificial Sequence
  Synthetic construct
EIVLAQSPGTLSLSPGERATLSCRASQTISSNSLAWYQQKPGQAPRLLIYGASSRATGIPDRFIAGGSGTDFTLTISRLDPEDFAVYYCQQYGGSRRTFGQGTKLEFK

SEQ ID NO: 2986 - protein, 109 aa, Artificial Sequence
  Synthetic construct
QSALTQPASVSGSPGQSITISCTGTSSDVGGYNYVSWYQQHPGKAPKLMIYDVSNRPSGVSNRFSGSKSGNTASLTISGLQAEDEADYYCISYTSRSTAFGGGTKLTVL

SEQ ID NO: 2987 - protein, 110 aa, Artificial Sequence
  Synthetic construct
QSALTQPASVSGSPGQSITISCTGTSSDVGSYNLVSWYQQHPGKAPKLMIYEVNKRPSGVSNRFSGSKSGNTASLTISGLQAEDEADYYCFSYAGFSTWVFGGGTKLTVV

SEQ ID NO: 2988 - protein, 111 aa, Artificial Sequence
  Synthetic construct
QSVLTQPPSVSGAPGQRVTISCTGSSSNIGAGYDVHWYQQLPGTAPKLLIFDNSNRPSGVPDRFSGSKSGTSASLAITGLQAEDEADYYCQSYDSSLSAWLFGGGTKLTVL

SEQ ID NO: 2989 - protein, 107 aa, Artificial Sequence
  Synthetic construct
DMQMTQSPSSLSASVGDRVTITCRASQSISSYLNWYQQKSGKAPELLIYAASSLRSGVPSRFSGSGSGTDFTLTISSLQPGDFATYYCQQSYSTPLTFGGGTKVEIK

SEQ ID NO: 2990 - protein, 108 aa, Artificial Sequence
  Synthetic construct
DIQMTQSPSTLSASVGDRVTITCRASQSISDWLAWYQQKPGKAPKLLIYQASSLEGGVPSRFSGSGSGTEFTLTISSLLPDDFATYYCQQYNSYSPLTFGGGTKVEIK

SEQ ID NO: 2991 - protein, 113 aa, Artificial Sequence
  Synthetic construct
DIVMTQSPDSLAVSLGERATLNCKSSQSVLFSSNNKNYLAWYQQKPGQPPKLLIYWASTRESGVPDRFSGSGSGTHFTLTISSLQAEDVAVYYCQQYFSAPRTFGQGTKLEIQ

SEQ ID NO: 2992 - protein, 106 aa, Artificial Sequence
  Synthetic construct
DIQMTQSPSSVSASVGDRVSITCRASQGISSWLAWYQQKPGRAPKLLISAASTLQSGVPSRFSGSGSGTDFTLTISSLQPEDSATYYCQQANSFWTFGQGTKVEIK

SEQ ID NO: 2993 - protein, 110 aa, Artificial Sequence
  Synthetic construct
QAVVTQEPSLTVSPGGTVTLTCGSSTGAVTSGHYPYWFQQKPGQAPRTLIYDTNNKHSWTPARFSGSLLGGKAALTLSGAQPEDEADYYCLVSYSAARVVFGGGTKLTVL

SEQ ID NO: 2994 - protein, 108 aa, Artificial Sequence
  Synthetic construct
EIVLTQSPATLSLSPGERATLSCRASQSVSSYLAWYQQKPGQAPRLLIYDASNRATGIPARFSGSGSGTDFTLTINNLEPEDFAVYYCQQRSNWPPYTFGQGTKLEIK

SEQ ID NO: 2995 - protein, 111 aa, Artificial Sequence
  Synthetic construct
QSALTQPRSVSGSPGQSVSISCTGSSSDVGGSDHVSWYQLHPDRAPRLILYDVSRRPSGVSDRFSGSKSGDRASLTISGLQSEDEADYYCCSYAGDDVYVVFGGGTKLTVL

SEQ ID NO: 2996 - protein, 110 aa, Artificial Sequence
  Synthetic construct
QSALTQPASVSGSPGQSITISCTGTSSDIGGYNYVSWYQQYPGSAPKLMIYDVNNRPSGVSNRFSGSKSGNTASLTISGLQAEDEADYYCSSYTSSGTLVFGGGTKLTVL

SEQ ID NO: 2997 - protein, 108 aa, Artificial Sequence
  Synthetic construct
EIVLTQSPATLSLSPGERATLSCGASQSVSSSFLAWYQQKPGLAPRLLIYDASNRATGIPDRFSGSGSGTDFTLTISRLEPEDFAVYYCQQYGSSPFTFGPGTKVAIK

SEQ ID NO: 2998 - protein, 110 aa, Artificial Sequence
  Synthetic construct
QSALTQPPSVSGSPGQSVTISCTGTISDVGSYNRVSWYQQPPGTAPKLMIYEVTNRPSGVPDRFSGSKSGNTASLTISGLQAEDEADYYCSSYTSTSTYVFGTGTKVTVL

SEQ ID NO: 2999 - protein, 110 aa, Artificial Sequence
  Synthetic construct
QSALTQPASVSGSPGQSITISCTGTNSDIGSYNLVSWYQQHPGKAPKLMVYEGSKRPSGVSNRFSGSKSGNTASLTISGLQAEDEADYYCCSYAGISTWVFGGGTKLTVL

SEQ ID NO: 3000 - protein, 112 aa, Artificial Sequence
  Synthetic construct
DIVMTQTPLSLSVTPGQPASISCKSSESLLHGDGKTYLYWYLQNPGQPPQLLIYEVFNRFSGVPDRFSGSGSGTDFTLKISRVEAEDVGVYYCMQSIQPPYTFGQGTKLEIK

SEQ ID NO: 3001 - protein, 107 aa, Artificial Sequence
  Synthetic construct
EIVLTQSPGTLSLSPGERATLSCRASRSVSGIYLAWYQQNPGQAPRLLIYAASSRATGIPDRFSGSGSGTDFTLTISRLEPEDFAVYYCHQYGSSPSFGGGTKVEIK

SEQ ID NO: 3002 - protein, 110 aa, Artificial Sequence
  Synthetic construct
QSALTQPASVSGSPGQSITISCTGTSSDVGSYNLVSWYQQHPGKAPKLMIYEGSKRPSGVSNRFAGSKSGNTASLTISGVQAEDEADYYCCSYAGSSTYVFGSGTKVTVL

SEQ ID NO: 3003 - protein, 111 aa, Artificial Sequence
  Synthetic construct
QSALTQPASVSGSPGQSITISCTGTSSDVGSYNLVSWYQQHPGKAPKLMIYEGSKRPSGVSNRFSASKSGNTASLTISGLQAEDEADYYCCSYAGSSTPWVFGGGTRLTVL

SEQ ID NO: 3004 - protein, 108 aa, Artificial Sequence
  Synthetic construct
EIVLTQSPGTLSLSPGERATLSCRASQSVSSSYLAWYQQKPGQAPRLLIYGASNRATGIPDRFSGSGSGTDFTLSISRLEPEDFAVYYCQQYGSSLWTFGQGTKVEIK

SEQ ID NO: 3005 - protein, 107 aa, Artificial Sequence
  Synthetic construct
DIQMTQSPSSLSASVGDRVTITCRAGQTISSYLNWYQQKPGKAPKLLIYGASSLQSGVPSRFSGGGSGTDFTLTINSLQPEDFATYYCQQSYITPPTFGPGTKVEIK

SEQ ID NO: 3006 - protein, 111 aa, Artificial Sequence
  Synthetic construct
DVVMTQSPLSLPVTLGQPASISCRSSQSLVYSDGNTYLNWFQQRPGQSPRRLIYKVSNRDSGVPDRFSGSGSGTDFTLKISRVEAEDVGVYYCMQGTHFYTFGQGTKLEIK

SEQ ID NO: 3007 - protein, 110 aa, Artificial Sequence
  Synthetic construct
QSVLTQPPSASGTPGQRVTISCSGSTSNIGSNAVNWYQQLPGAAPKLLIYFNNQRPSGVPDRFSGSKSGTSASLAISGLQSEDEADYFCAAWDDSLNGYVFGTGTQVTVL

SEQ ID NO: 3008 - protein, 108 aa, Artificial Sequence
  Synthetic construct
SYELTQPPSVSVSPGQTARITCSGDALPKKYAYWYQQKSGQAPVLVIYEDSKRPSGIPERFSGSNSGTLATLTISGAQVEDEADYYCYSTASSGNRWVFGGGTTLTVL

SEQ ID NO: 3009 - protein, 110 aa, Artificial Sequence
  Synthetic construct
QSALTQPASVSGSPGQSITISCTGTSSDIGSYNLVSWYQQHPGKAPKLLLYEGSKRPSGVSNRFSGSKSGNTASLTISGLQAEDEADYYCCSYAGSSIWVFGGGTKLTVL

SEQ ID NO: 3010 - protein, 112 aa, Artificial Sequence
  Synthetic construct
DIVMTQSPLSLPVTPGEPASISCRSSQSLLHFNGYTYLDWYLQKPGQSPQLLIYLGSNRASGVPDRFSGSGSGTDFTLKISRVEAEDVGVYYCMQALQTPWTFGQGTKVEIK

SEQ ID NO: 3011 - protein, 108 aa, Artificial Sequence
  Synthetic construct
ETVLTQSPGTLSMSPGERVTLSCRASQSVTSIYLAWYQQKPGQAPRLLIYGTSSRAIGIPDRFSGSGSGTDFTLTITRLEPEDFAVYYCHQYGTSPWTFGQGTKVEIK

SEQ ID NO: 3012 - protein, 108 aa, Artificial Sequence
  Synthetic construct
EIVLTQSPATLSLSPGERATLSCRASQSVSSFLAWYQQKPGQAPRLLIYDASNRATGVPARFSGSGSGTDFTLTISSLEPEDFAVYYCQQRSNWPPYTFGQGTKLEIK

SEQ ID NO: 3013 - protein, 111 aa, Artificial Sequence
  Synthetic construct
QSALTQPASVSGSLGQSITISCTGSSRDVGAYNFVSWFQQYPGKAPKLMIYDVYNRPSGVSTRFSGSKSANTASLSISGLQAEDEAHYYCSSYTGSSPPWVFGGGTKVTVL

SEQ ID NO: 3014 - protein, 111 aa, Artificial Sequence
  Synthetic construct
QSVLTQPPSVSGAPGQRVTISCTGRSSNIGAGYDVHWYQQLPGTAPKLLIYNNNNRPSGVPDRFSGSKSGTSASLAITGLQPEDEADYYCQSYDTSLSGVIFGGGTKLTVL

SEQ ID NO: 3015 - protein, 109 aa, Artificial Sequence
  Synthetic construct
ELVLTQSPATLSLSPGERATLSCRASQSVSSYLAWYQQKPGQAPRLLIYDASNRATGIPTRFSGSGSGTDFTLTISSLEPEDFAVYYCQQRSNWPPKITFGQGTRLEIK

SEQ ID NO: 3016 - protein, 108 aa, Artificial Sequence
  Synthetic construct
EIVLTQSPGTLSLSPGERATLSCRATQSVSSSYLAWYQQKPGQAPRLLIFAASSRATGIPDRFSGSGSGTDFTLTISRLEPEDFAVYYCQQYGSSPWTFGQGTKVEIK

SEQ ID NO: 3017 - protein, 106 aa, Artificial Sequence
  Synthetic construct
DIQMTQSPSSLSASVGERVTITCRASQNISTFLNWYQQKPGKSPNPLIYDASSLQTGVPSRFSGSGSGTHFSLIISGLLPEDFATYYCQQSNSALTFGQGTRLEIK

SEQ ID NO: 3018 - protein, 108 aa, Artificial Sequence
  Synthetic construct
EIVLTQSPATLSLSPGERATLSCRASQNINTYLAWYQQKPGQAPRLLIYDASNRATGIPARFSGSGSGTDFTLTISSLDPEDFAVYYCQQRSNWPPFTFGPGTKVDIK

SEQ ID NO: 3019 - protein, 110 aa, Artificial Sequence
  Synthetic construct
QSALTQPASVSGSPGQSITISCTGTGSDVGGYNYVSWYQQHPAKAPKLMIYDVTNRPSGVSNRFSGSKSGNTASLTISGLQAEDEADYYCSSFTSSSTLVFGGGTKLTVL

SEQ ID NO: 3020 - protein, 107 aa, Artificial Sequence
  Synthetic construct
SYELTQPPSVSVSPGQTARITCSGDALPQKYAYWYQQKSGQAPVLVIYEDSKRPSGIPERFSGSSSGTMATLTISGAQVEDEADYYCYSRDNSGKGVFGTGTTVTVQ

SEQ ID NO: 3021 - protein, 109 aa, Artificial Sequence
  Synthetic construct
EIVLTQSPATLSLSPGERATLSCRASQSVSSFLAWYQQKPGQAPRLLIYDASNRATGIPARFSGSGSGTDFTLTISSLEPEDFAVYYCHQRSNWPPRSTFGGGTKVEIR

SEQ ID NO: 3022 - protein, 112 aa, Artificial Sequence
  Synthetic construct
DVVMTQSPPSLPVTPGQPASISCRSSQSLVYSDGNTYLNWFHQRPGQCPRRLIYKVSNRDSGVPDRFSGSGSGTDFTLKISRVEAEDVGVYYCMEGTHWPPTFGQGTKVEIK

SEQ ID NO: 3023 - protein, 107 aa, Artificial Sequence
  Synthetic construct
DIQMTQSPSSLSASVGDRLTITCRASQTIGKYLNWYQQKPGKAPKLLIHAASSLQSGVPSRFSGSGSGTDFTLTISSLQPEDFAAYYCQQSYSAPYTFGQGTKLEIK

SEQ ID NO: 3024 - protein, 112 aa, Artificial Sequence
  Synthetic construct
DIVMIQSPLSLPVTPGEPASISCRSSQSLLFTNGYTYLNWYLQKPGQSPQLLIYLGSNRASGVPDRFSVSGSGTDFTLIISRVEAEDVGVYYCMQALQTPWTFGQGTKVEIK

SEQ ID NO: 3025 - protein, 111 aa, Artificial Sequence
  Synthetic construct
QSALTQPASVSGSPGQSITISCTGTSSDIGGYNYVSWYQQHPGKAPKLMIYDVTNRPSGVSNRFSGSKSGNTASLTISGLQAEDEADYYCSSWRSGSNPYVFGSGTKVTVL

SEQ ID NO: 3026 - protein, 110 aa, Artificial Sequence
  Synthetic construct
QSVLTQPPSVSAAPGQKVTISCSGSSSNIGNNYVSWYQQLPGTAPKLLIYDNNKRPSGIPDRFSGSKSGTSATLGITGLQTGDEAEYYCGIWDSSLSAWVFGGGTKLTVL

SEQ ID NO: 3027 - protein, 112 aa, Artificial Sequence
  Synthetic construct
DIVMTQSPLSLPVTPGEPASISCRSSQSLLHSNGYNYLDWYLQKPGQTPQLLIYLGSNRASGVPDRFSGSGSGTDFTLKINRVEAEDVGVYYCMQALQTPLTFGGGTKVEIK

SEQ ID NO: 3028 - protein, 111 aa, Artificial Sequence
  Synthetic construct
QSVLTQPPSVSGAPGQRVTISCTGSNSNIGAGYDVHWYQQLPGTAPRLLIYRNSNRPSGVPDRFSGSKSGTAASLAISGLQAEDEADYYCQSYDSSLTALVFGGGTKLTVL

SEQ ID NO: 3029 - protein, 110 aa, Artificial Sequence
  Synthetic construct
QSVLTQPPSASGTPGQRVSVSCSGGSSNIGSNFVYWYQQLPGAAPKLLIYRSNQRPSGVPDRFSGSKSGTSASLAISGLRSEDEADYYCAAWDDSLSVVVFGGGTKVTVL

SEQ ID NO: 3030 - protein, 107 aa, Artificial Sequence
  Synthetic construct
DIQMTQSPSSLSASVGDRVTITCRANQTISSYLNWYQQKPGKAPKVLIFAASSLEGGVPSRFSGSGSGTDFTLTISSLQPEDFATYSCQQSYNTPWTFGQGTKVEIK

SEQ ID NO: 3031 - protein, 112 aa, Artificial Sequence
  Synthetic construct
DVVMTQSPLSLPVTLGQPASISCRSSQSLVYSDGDTYLNWFQQRPGQSPRRLIYKVSNRDSGVPDRFSGSGSGTDFTLKISRVEAEDVGVYYCMQGTHWPPTFGGGTKVEIK

SEQ ID NO: 3032 - protein, 112 aa, Artificial Sequence
  Synthetic construct
DVVVTQSPVSLPATPGKPASISCRASQSLLHSNGNHYLHWYLQRPGQSPQLLIYLGSNRASGVPDRFSGSGSGTVFSLKISRVEAEDVGMYYCMQALHFPYTFGQGTKLEIK

SEQ ID NO: 3033 - protein, 112 aa, Artificial Sequence
  Synthetic construct
DIVMTQTPLSSPVTLGQPASISCRSSQSLVHSDGNTYLSWLQQRPGQPPRLLIYKISNRFSGVPDRFSGSGAGTDFTLKISRVEAEDVGVYYCTQATQFPYTFGQGTKLEIK

SEQ ID NO: 3034 - protein, 109 aa, Artificial Sequence
  Synthetic construct
EILLTQSPATLSLSPGERATLSCRASQSVSTFLAWYQHKPGQAPRLLIYDASNGATGIPARFSGSGSGTDFTLTISSLEPEDFAIYYCQHRSNWPPRLTFGGGTKVELK

SEQ ID NO: 3035 - protein, 108 aa, Artificial Sequence
  Synthetic construct
EIVLTQSPGTLSLSPGERATLSCRASQSVSSSYLAWYQQKPGQAPRLLIYGASSRATGIPDRFSGSGSGTDFTLTISRLEPEDFAVYYCQQYGSSPYTFGQGTKLEIK

SEQ ID NO: 3036 - protein, 112 aa, Artificial Sequence
  Synthetic construct
DIVMTQSPLSLSVTPGQPASISCKSSQSLLHSDGKTYLYWYLQRPGQPPQLLIYELSDRFSGVPDRFSGSGSGTDFTLKISRVEAEDVGVYYCMQSIQPPYTFGQGTKLEIK

SEQ ID NO: 3037 - protein, 108 aa, Artificial Sequence
  Synthetic construct
EIVLTQSPGTLSLSPGDRAALSCRASQSVSSSKLAWYQQKPGQAPRLLIYGASRRATGIPDRFSGSGSGTDFTLTISRLDPEDFALYYCQQYGGSRRSFGQGTKLELK

SEQ ID NO: 3038 - protein, 107 aa, Artificial Sequence
  Synthetic construct
DIQMTQSPSTLSASVGDRVTITCRASQSITRWLAWYQQKPGKAPKLLIYTTSSLESGVPSRFSGSGSGTEFSLTISSLQPEDFATYYCQQYNSYSLTFGGGTQVEIK

SEQ ID NO: 3039 - protein, 112 aa, Artificial Sequence
  Synthetic construct
DVAMTQSPLSLSVTLGQPASISCRSSESLVYSDGNNYLNWFQQRPGQSPRRLIYRVSKRDSGVPDRFSGSGSGTDFTLKISRVEAEDVGVYYCMQGTHWPLTFGQGTRLEIK

SEQ ID NO: 3040 - protein, 110 aa, Artificial Sequence
  Synthetic construct
QSVLTQPPSVSGAPGQKVTISCSGSSSNIGNHYLSWYQHLPGTAPKLLLYDNNKRPSGIPDRFSGSKSGTSATLGITGLQTGDEADYYCGTWDSSLSVVVFGGGTRLTVL

SEQ ID NO: 3041 - protein, 111 aa, Artificial Sequence
  Synthetic construct
QSALTQPRSVSGSPGQSITISCTGTNSDVGDFNYVSWYQHHPGKAPKLIIFDVTQRPSGVPDRFSGSKSGNTPSLTISGLQAEDEAEYYCCSYAGTYTSYVFGTGTKVTVL

SEQ ID NO: 3042 - protein, 112 aa, Artificial Sequence
  Synthetic construct
EVVMTQSPLSLPVTLGQPASISCRSGQSLVYSDGNTYLNWFQQRPGQSPRRLIYKVSNRDSGVPDRFSGSGSGTDFTLKISRVEAEDVGVYSCMQGTHWPYTFGQGTKLEIK

SEQ ID NO: 3043 - protein, 108 aa, Artificial Sequence
  Synthetic construct
SSELTQDPAVSVALGQTVRITCQGDSLRKYYASWYQQKPGQAPVLVIYGENNRPSGIPDRFSGSSSGNTASLTITGAQAEDEADYYCNSRDSSGNHLVFGGGTKLTVL

SEQ ID NO: 3044 - protein, 109 aa, Artificial Sequence
  Synthetic construct
EVVLTQSPATLSLSPGERATLSCRASQSVSNFLAWYQQKPGQAPRLLIYDASNRATGIPARFSGSGSGTDFTLTISSLEPEDFAVYYCQQRSNWPPRLTFGGGTKVEIK

SEQ ID NO: 3045 - protein, 107 aa, Artificial Sequence
  Synthetic construct
DIQMTQSPSTLSASVGDRVTITCRASQSISSWLAWYQQKPGKAPKLLIYKASSLESGVPSRFSGSGSGTEFTLTISSLQPDDFATYYCQQYNSYPCTFGQGTKLEIK

SEQ ID NO: 3046 - protein, 110 aa, Artificial Sequence
  Synthetic construct
QSALTQPASVSGSPGQSITISCTGTSSDVGGYNYVSWYQQHPGKAPQLMIYDVSDRPSGVSNRFSGSKSGNTASLTISGLQAEDEADYYCSSYTSSSTVLFGGGTKLTVL

SEQ ID NO: 3047 - protein, 106 aa, Artificial Sequence
  Synthetic construct
SYELAQPPSLSVSPGQTASITCSGDKLGDKYASWYQQQPGQSPVLVIYQGTRRPSGIPERFSGSNSGNTATLTISGTQAMDEADYYCQAWDSSAYVFGTGTKVTVL

SEQ ID NO: 3048 - protein, 107 aa, Artificial Sequence
  Synthetic construct
SYGLTQPPSVSVSPGQTASITCSGNKLGDKYTCWYQQKPGQSPVLVIYQDNKRPSGIPERFSGSNSGNTATLTISGTQAMDEADYYCQAWDSNTPYVFGTGTKVTVL

SEQ ID NO: 3049 - protein, 107 aa, Artificial Sequence
  Synthetic construct
DIQMTQSPSSLSASVGDRVTITCRASQSISSSLNWYQQKPGKAPKLLIYAASSLQSGVPSRFSGSGSGTDFTLTISSLQPEDFATYYCQQSYSSPLTFGGGTKVEIK

SEQ ID NO: 3050 - protein, 109 aa, Artificial Sequence
  Synthetic construct
QSALTQPASVSGSPGQSITISCTGASSDVGAYNYVSWYQQHPGKAPKLMIYDVSNRPSGVSNRFSGSKSGYTASLTISGLQAEDEADYYCSSYTSSSVVFGGGTKLTVL

SEQ ID NO: 3051 - protein, 107 aa, Artificial Sequence
  Synthetic construct
DIQMTQSPSSLSASVGDSVTISCRASQSISSYLNWYQQKPGKAPKLLIYAASSFQSGVPSRFSGSGSGTDFTLTISSLQPEDFATYYCQQSYNTPQTFGQGTKVEIK

SEQ ID NO: 3052 - protein, 108 aa, Artificial Sequence
  Synthetic construct
EIVLTQSPGTLSLSPGERATLSCRASQSVTSIYLGWFQQKPGQAPRLLIFGASSRATGIPDRFSGSGSGTDFTLTISRLEPEDFAVYYCQQYGSSPWTFGQGTKVEIK

SEQ ID NO: 3053 - protein, 110 aa, Artificial Sequence
  Synthetic construct
QSVLTQPPSVSAAPGQKVTISCSGSSSNIGNNYVSWYQQLPGTAPKLLIYDNNKRPSGIPDRFSGSKSGTSATLGITGLQTGDEADYSCGTWDSSLTAGVFGGGTKLTVL

SEQ ID NO: 3054 - protein, 110 aa, Artificial Sequence
  Synthetic construct
QSVLTQPPSVSEAPRQRVTISCSGSSSNIGNNAVNWYQQLPGKAPKLLIYYDDMLPSGVSDRFSGSKSGTSASLAISGLQSEDEADYYCAAWDGSLNAYVFGTGTKVTVL

SEQ ID NO: 3055 - protein, 110 aa, Artificial Sequence
  Synthetic construct
QAVVTQEPSLTVSPGGTVTLTCGSSTGAVTSGLYPYWFQQRPGQAPRTLIYHTSNRHSWTPARFSGSLLGGKAALTLSGAQPEDEAEYYCLLSYSGARVVFGGGTKLTVL

SEQ ID NO: 3056 - protein, 107 aa, Artificial Sequence
  Synthetic construct
DIQMTQSPSSLSASVGDRVTITCRASQTISRNLNWYQRKPGKAPNLLIYAASSLQSGVPSRFSGSGSGTDFTLTINSLLPEDFATYYCQQSYSTPHTFGQGTKLDIK

SEQ ID NO: 3057 - protein, 111 aa, Artificial Sequence
  Synthetic construct
QSVLTQPPSASGTPGQRVTISCSGSSSNIGSNTVNWYQQLPGTAPKLLIYSNNQRPSGVPDRFSGSKSGTSASLAISGLQSEDEADYYCAAWDDSLNGHVVFGGGTKLTVL

SEQ ID NO: 3058 - protein, 110 aa, Artificial Sequence
  Synthetic construct
QSALTQPASVSGSPGQSITISCTGSSSDIGAYNYVSWYQQHPGKAPKLMIYDVSDRPSGVSNRFSGSKSGNTASLTISGLQAEDEADYYCSSYTNSRSGVFGGGTKLTVL

SEQ ID NO: 3059 - protein, 111 aa, Artificial Sequence
  Synthetic construct
QSALTQPASVSGSPGQSITISCTGTSSDVGGYIYVSWYQQRPGETPKLMIFDVMNRPSGVSNRFSGSKSGNTASLTISGLQAEDEADYYCTSYTSSSTYVVFGGGTKLTVL

SEQ ID NO: 3060 - protein, 113 aa, Artificial Sequence
  Synthetic construct
DIVMTQSPDSLAVSLGERATISCKSSQSVLYSSNNKNYLAWYQQKPGQPPKLLIYWASTRESGVPDRFSGSGSGTDFTLTISSLQAEDVAVYYCQQYYSTPWTFGQGTKVEIK

SEQ ID NO: 3061 - protein, 108 aa, Artificial Sequence
  Synthetic construct
SYVLTQPPSVSVAPGQTARVTCEGSNFGSERAHWYQQRPGQAPVLVMYDNTDRPTGIPERFSGSNSGNTATLTISRVEAGDEADYYCQVWDTTTNHVIFGGGTKLTVL

SEQ ID NO: 3062 - protein, 108 aa, Artificial Sequence
  Synthetic construct
EIVLTQSPATLSLSPGESATLSCRASQSVSSFLAWYQQKRGQAPRLLIYDASNRATGIPARFSGSGSGTDFTLTISSLEPEDFAVYYCQRRSNWPPFTFGQGTKLEIK

SEQ ID NO: 3063 - protein, 107 aa, Artificial Sequence
  Synthetic construct
DIQMTQSPSSLSASVGDSVTITCQASEDINNYLNWYQQQPGKAPKLLIYDASNLETGVPSRFSGSGSGTDFIFTINNVQPEDAATFYCQQYDNTPLTFGGGTKVEIK

SEQ ID NO: 3064 - protein, 107 aa, Artificial Sequence
  Synthetic construct
DIQMTQSPSSLSASVGDRVTITCRASQSISSYLNWYQQKPGKAPKLLIYDASSLQSGVPSSFSGSGSGTDFTLTISSLQPEDFATYYCQQSYSTPPAFGQGTKVEIK

SEQ ID NO: 3065 - protein, 113 aa, Artificial Sequence
  Synthetic construct
QSVLTQPPSVSGAPGQRVTISCTGGTSNIGAGYDVHWYQQLPGTAPKLLIYTNFNRPSGVPDRFSGSKSGTSASLAITGLQAEDEADYYCQSYDSTLSGPNYVFGTGTKVTVL

SEQ ID NO: 3066 - protein, 109 aa, Artificial Sequence
  Synthetic construct
QSALTQPPSASGSPGQSVTISCTGTSSDVGGYKYVSWYQQHPGKAPKLVIYEVSKRPSGVPDRFSGSKSGNTASLTVSGLQAEDEADYYCGSYAGTNTLFGGGTTLTVL

SEQ ID NO: 3067 - protein, 113 aa, Artificial Sequence
  Synthetic construct
DIVMTQSPDSLAVSLGERATINCKSSQSVLLSSNNKNYLAWYQQKPRQPPKLLIYWSSTRESGVPDRFSGSGSGTDFTLTISSLQAEDVAVYYCQQYYTTPFTFGGGTKVEIK

SEQ ID NO: 3068 - protein, 108 aa, Artificial Sequence
  Synthetic construct
EIVLTQSPATLSLSPGDRATLSCRASQSISSFLAWYQQKPGQAPRLLIYDASNRATGVPARFSGSGSGTDFTLTISSLEPEDFAVYYCQRRSNWPPFTFGGGTKVEIK

SEQ ID NO: 3069 - protein, 106 aa, Artificial Sequence
  Synthetic construct
SYELTQPPSLSVSPGQTASITCSGDKLGDKYVCWYQQKPGQSPVVVIYQDNKRPSGIPERFSGSNSGNIATLTISGAQPMDEADYYCQAWDSSTGGFGTGTKVTVL

SEQ ID NO: 3070 - protein, 110 aa, Artificial Sequence
  Synthetic construct
QSVLTQPPSVSEAPRQRVTISCSGSSSNIGNNAVNWYQQLPGKAPKLLIYYDDMLPSGVSDRFSGSKSGTSASLAISGLQSEDEADYYCAAWDGSLNGFVFGTGTKVTVL

SEQ ID NO: 3071 - protein, 110 aa, Artificial Sequence
  Synthetic construct
QSALTQPASVSGSPGQSITISCTGTSSDVGGYNYVSWYQQHPSKAPKLIIYDVSNRPSGVSNRFSGSKSTNTASLTISGLRAEDEADYYCSSYASSNTFVFGTGTKVTVL

SEQ ID NO: 3072 - protein, 107 aa, Artificial Sequence
  Synthetic construct
DIQMTQSPSSLSASVGDRVTITCQASQDIYNYLNWYQQKPGKAPKLLIYDASSLETGVPSGFSGSGSGTDFSFTISSLQPEDIATYYCQQYDTLPYTFGQGTKLEIK

SEQ ID NO: 3073 - protein, 109 aa, Artificial Sequence
  Synthetic construct
EIVLTQSPATLSLSPGERATLSCRASQSVSNFLAWYQQKPGQAPRLLIYDASNRATGIPARFSGSGSGTDFTLTISSLEPEDFAVYYCHQRSNWPPLFTFGPGTKVDIK

SEQ ID NO: 3074 - protein, 108 aa, Artificial Sequence
  Synthetic construct
SYVLTQPPSVSEAPGKTAKITCGGNNIGRKSVHWYQQKPGQAPVLVIDYDSDRPSGIPERFSGSNSGNTATLTISRVEAGDEADYYCQVWDSSSDLVLFGGGTKLTVL

SEQ ID NO: 3075 - protein, 108 aa, Artificial Sequence
  Synthetic construct
DIQMTQSPSTLSASVGDRVTITCRASQGISSWLAWYQQKPGKAPKLLIYEASSLESGVPSRFSGSGSGTEFTLAISSLQPEDFATYYCQQYNPYSRLTFGGGTKVEIK

SEQ ID NO: 3076 - protein, 110 aa, Artificial Sequence
  Synthetic construct
QSVLTQPASVSGSPGQSITISCTGTSSDVGAFNYVSWYQQHPGKAPKLMIYDVSDRPSGVSNRFSGSKSGNTASLTISGLQAEDEADYYCSSYTSSRSGVFGGGTKLTVL

SEQ ID NO: 3077 - protein, 107 aa, Artificial Sequence
  Synthetic construct
DIQMTQSPASLAASVGDRVTITCRASQSISRYLNWYQQKPGKAPKLLIYAASSLQSGVPSKFSGSGSGTDFTLTISSLQPEDLATYYCQQSYSTPLTFGGGTKVEIK

SEQ ID NO: 3078 - protein, 104 aa, Artificial Sequence
  Synthetic construct
EIVLTQSPGTLSLSPGERATLSCRASQSVSSSYLAWYQQKPGQAPRLLIYGASSRATGIPDRFSGSGSGTDFTLTINRLEPEDFAVYFCQQYGTFGGGTKVEIK

SEQ ID NO: 3079 - protein, 110 aa, Artificial Sequence
  Synthetic construct
QSALTQPASVSGSPGQSITISCTGTSSDVGIFNLVSWYQQQPGKAPKLIIYEVTRRPSGVSNRFSGSKSGNTASLTVSGLQAEDEADYYCCSYAGSSSWVFGGGTKLTVL

SEQ ID NO: 3080 - protein, 107 aa, Artificial Sequence
  Synthetic construct
DIQMTQSPSSVSASVGDRVTITCRASQGISSWLAWYQQKPGKAPKVLIYAASSLQSGVPSRFSGSGSGTDFTLTISSLQPEDFATYYCQQANSFPWTFGQGTKVEIK

SEQ ID NO: 3081 - protein, 112 aa, Artificial Sequence
  Synthetic construct
DIVMAQSPDSLAVSLGERATINCKSSQSVLYSSNNKNFLAWYQQKPGQPPKLLIYWASTRESGVPDRFSGSGSGTDFTLTISSLQAEDVAVYYCQQYYSTPTFGPGTKVDIK

SEQ ID NO: 3082 - protein, 108 aa, Artificial Sequence
  Synthetic construct
SSELTQDPAVSVALGQPVRITCQGDSLRSYYASWYQQKPGQAPVLVIFGKNNRPSGIPDRFSGSSSGNTASLTITGAQAEDEADYYCNSRDSSANLVLFGGGTKLTVL

SEQ ID NO: 3083 - protein, 108 aa, Artificial Sequence
  Synthetic construct
EIVLTQSPGTLSLSPGERATLSCRASQSVSSSYLAWYQQKPGQAPRLLIYGASSRATGIPDRFSGSGSGTDFTLTISRLEPEDFAVYYCQQYGSSPGTFGQGTKVEIK

SEQ ID NO: 3084 - protein, 112 aa, Artificial Sequence
  Synthetic construct
DIVMTQSPLSLPVTPGEPASISCRSSQSLLFSNGYTYLHWYLQKPGQSPQLLIYLGSNRASGVPDRFSVSGSGTDFTLIISRVEAEDVGVYFCMQALQTPWTFGQGTKVEIK

SEQ ID NO: 3085 - protein, 107 aa, Artificial Sequence
  Synthetic construct
DIQMTQSPSSLSASVGDRVTITCRASQGIRNDLGWYQQKPGKAPKRLIYAASSLQSGVPSRFSGSGSGTEFTLTVSSLQPEDFATYYCLQHNSYPLTFGGGTKVEIK

SEQ ID NO: 3086 - protein, 107 aa, Artificial Sequence
  Synthetic construct
DIQMTQSPSSLSASVGDRVTITCRASQTISTSLNWYQQKPGRVPKLLIYGASSLQSGVPSRFSGSGSGTDFTLTISSLQPEDFATYYCQQTYSTPHTFGQGTKLEIK

SEQ ID NO: 3087 - protein, 111 aa, Artificial Sequence
  Synthetic construct
QSVLTQPPSVSGAPGQRVTISCTGSGSNIGVGYDVHWYQQLPGTAPKLLIFGNTNRPSGVPDRFSGSKSGTSASLGISGLQAEDEADYYCQSYDSSLSGNVFGTGTKVTVL

SEQ ID NO: 3088 - protein, 107 aa, Artificial Sequence
  Synthetic construct
DIQLTQSPSFLSASVGDRVTITCRASQGISGYLAWYQQKSGKAPKLLIYGTSTLQSGVPSRFSGSGSGTEFTLTISSLQPEDFATYYCQQLNSYPRTFGQGTKVEIK

SEQ ID NO: 3089 - protein, 106 aa, Artificial Sequence
  Synthetic construct
SYDLTQPPSMSVSPRQTASITCSGDKLGNRYASWYQQKPGQSPVLVIYQDTKRPSGIPERFSGSSSGNTATLTISGTQAMDEADYYCQAWDSSTVVFGGGTKLTVL

SEQ ID NO: 3090 - protein, 108 aa, Artificial Sequence
  Synthetic construct
SYELTQPPSVSVSPGQTARITCSAEALPNQYAKWYQQKPGQAPVLVIYKDSERPSGIPERFSGSSSGTTVTLTISGVQAEDEADYYCQSADSRGTDWVFGTGTKVTVL

SEQ ID NO: 3091 - protein, 107 aa, Artificial Sequence
  Synthetic construct
DIQMTQSPSSLSASVGDRVTITCRTSQSISNYLNWYQHKPGKAPKLVIYAASTLQTGVPSTFSGSGSGTDFTLTISSLQAEDFATYYCQQTYSLPWTFGQGTKVEIK

SEQ ID NO: 3092 - protein, 112 aa, Artificial Sequence
  Synthetic construct
DVVMTQSPLSLPVTLGQPASISCRSSQSLVHSDGDTYLTWFQQRPGQSPRRLIYKVSNRDSGVPDRFSGSGSGTDFTLKISRVEAEDVGIYYCMQTTHWAYTFGQGTKLEIK

SEQ ID NO: 3093 - protein, 106 aa, Artificial Sequence
  Synthetic construct
SYELTQPPSVSVSPGQTASITCSGDKLGDKYACWYQQKPGQSPVLVIYQDSKRPSGIPERFSGSNSGNTATLTISGTQAMDEADYYCQAWDSSLVVFGGGTKLTVL

SEQ ID NO: 3094 - protein, 107 aa, Artificial Sequence
  Synthetic construct
DIQMTQSPSSLSASVGDRVTITCRAGQSISRYLNWYQQKPGKAPSLLIYGASSLQSGVPSRFSGSRSGTDFTLTISSLQPEDFATYYCQQSYSTPQTFGQGTRVEIK

SEQ ID NO: 3095 - protein, 106 aa, Artificial Sequence
  Synthetic construct
ETVMTQSPATLSVSPGESATLSCRASQSVGSYLAWYQQKPGQAPRLLIYAASTRATGIPARFSGSGSGTDFTLTITSLQSEDFAVYYCQHYNNWLTFGGGTKVEIR

SEQ ID NO: 3096 - protein, 108 aa, Artificial Sequence
  Synthetic construct
DIQMTQSPSSVSASVGDRVTITCRASQGISSWLAWYQQKPGKAPKLLIYAASSLQSGVPSRFSGSGSGTDFTLTISSLQPEDFATYYCHQANSFLALTFGGGTKVEIK

SEQ ID NO: 3097 - protein, 108 aa, Artificial Sequence
  Synthetic construct
QSALTQPASVSGSPGQSITISCTGTSSDVGSYNLVSWYQQHPGKAPKLMIYEGSKRPSGVSNRFSGSKSGNTASLTISGLQAEDEADYYCCSYAGSWVFGGGTKLTVL

SEQ ID NO: 3098 - protein, 107 aa, Artificial Sequence
  Synthetic construct
EIVMTQSPATLSVSPGERATLSCRASQSVRSNLAWYQQKPGQAPRLLIYGASTRATGIPARFSGSGSGTEFTLTISSLQSEDFAVYYCQQYNYWPYTFGQGTKLEIK

SEQ ID NO: 3099 - protein, 109 aa, Artificial Sequence
  Synthetic construct
EIVLTQSPGTLSLSPGERATLSCRASQSVSSSYLAWYQQKPGQAPRLLIYGASSRATGIPDRFSGSGSGTDFTLTISRLEPEDFAVYYCQQYGSSPPYTFGQGTKLEIK

SEQ ID NO: 3100 - protein, 106 aa, Artificial Sequence
  Synthetic construct
DIQMTQSPSTLSASVGDRVTITCRASQSISSWLAWYQQKPGKAPKVLIYKASNLESGVPSRFSGSGSGTEFTLTISSLQPDDFATYYCQQYNSYWTFGQGTKVEIK

SEQ ID NO: 3101 - protein, 112 aa, Artificial Sequence
  Synthetic construct
DIVMTQAPLSLPVTPGEPASISCRSSQSLLHSNGYNYLDWYLQKPGQSPQLLIYLGSNRASGVPDRFSGSGSGTDFTLKISRVEAEDVGIYYCMQALQTPWTFGQGTKVEIK

SEQ ID NO: 3102 - protein, 107 aa, Artificial Sequence
  Synthetic construct
SYELTQPPSVSVSPGQTARITCSGDALPKQYAYWYQQKPGQAPVLVIYKDTERPSGIPERFSGSSSGTTVTLTISGVQAEDEADYYCQSADSNTTGVFGGGTKLTVL

SEQ ID NO: 3103 - protein, 108 aa, Artificial Sequence
  Synthetic construct
EIVLTQSPGTLSLSPGDRATLSCRASQPVGNNYLGWYQQKGGQAPRLLIYGASNRATGIPDRFSGSGSGTDFTLTISSLEPEDFAVYYCQQYSSSVWTFGQGTKVGTK

SEQ ID NO: 3104 - protein, 109 aa, Artificial Sequence; identical to SEQ ID NO: 2740
  Synthetic construct

SEQ ID NO: 3105 - protein, 108 aa, Artificial Sequence
  Synthetic construct
EIVLTQSPGTLSLSPGERATLSCRASQSVGSIYLAWYQQRPGQAPRLLIYATSSRATGIPDRFSGSGSGTDFTLTISRLEPEDFAVYYCHQYGTSPWTFGQGTKVEIK

SEQ ID NO: 3106 - protein, 111 aa, Artificial Sequence
  Synthetic construct
NFMLTQPHSVSESPGKTVTISCTRGSGSIDSNSVQWYQQRPGSAPTIVIYEDNQRPSGVPDRFSGSIDSSSNSASLTISGLRTEDEADYHCQSYDNTNERIFGGGTKLTVL

SEQ ID NO: 3107 - protein, 103 aa, Artificial Sequence
  Synthetic construct
EFVLTQSPATLSLSPGERATLSCRASQSISGYLAWYQQKPGQAPRLLMYDASNRATGIPARFSGSGSGTDFTLTISSLEPEDFAVYYCQQRRTFGQGTKVEIK

SEQ ID NO: 3108 - protein, 108 aa, Artificial Sequence
  Synthetic construct
SYELTQPPSVSVSPGQTARITCSGDALPKKYAYWYQQKSGQAPVLVIYEDSKRPSGIPERISGSSSGTTATLTISGAQVEDEADYYCYSTDSSGNHRVFGGGTKLTVL

SEQ ID NO: 3109 - protein, 111 aa, Artificial Sequence
  Synthetic construct
DIVMTQSPLSLPVTPGEPASISCRSSQSLLHSNGYNYLDWYLQKPGQSPQLLIYLGSNRASGVPDRFSGGGSGTDFTLKISRVEAEDVGVYYCMQGLQTRTFGQGTKLAIK

SEQ ID NO: 3110 - protein, 110 aa, Artificial Sequence
  Synthetic construct
QSALTQPRSVSGSPGQSVTISCTGTSSDAGGYKCVSWYQQHPGKAPKLMIYDVSKRPSGVPDRFSGSKSGNTASLSISGLQAEDEADYYCCSCAGSYKVIFGGGTKLTVL

SEQ ID NO: 3111 - protein, 107 aa, Artificial Sequence
  Synthetic construct
DIQVTQSPSTLSASVGDRVTITCRASQSINNWLAWYQQKPGKAPKLLIYKASSLESGVPSRFSGSGSGTEFTLTISSLQPDDFATYYCQQYNSYSGAFGQGTKVEIK

SEQ ID NO: 3112 - protein, 112 aa, Artificial Sequence
  Synthetic construct
QSVLTQPPSVSGAPGQRVTISCTGSSSSIGAGYDVHWYQQLPRTAPKLLIYGNTNRPSGVPDRFSGSKSGTSASLAITGLQAEDEADYYCQSYDSSLSGSGVFGGGTKLTVL

SEQ ID NO: 3113 - protein, 110 aa, Artificial Sequence
  Synthetic construct
QSVLTQPPSVSAAPGQKVSISCSGSTSNIGYNPVSWYRQFPGTAPKLLIYDSTKRPSGIPERFSGSKSGTSATLDITGLQTGDEADYYCGTWDSSLSVGVFGGGTQLTVL

SEQ ID NO: 3114 - protein, 108 aa, Artificial Sequence; identical to SEQ ID NO: 3043
  Synthetic construct

SEQ ID NO: 3115 - protein, 108 aa, Artificial Sequence
  Synthetic construct
EIVLMQSPGTLSLSPGERATISCRASQSISSSYLAWYQQKPGQSPRLLISGASSRATGIPDRFSGSGSGTDFSLTISRLEPEDFAVYYCQQYGSSPLTFGQGTKLEIK

SEQ ID NO: 3116 - protein, 115 aa, Artificial Sequence
  Synthetic construct
QAVLTQPSSLSASPGASASLTCTLRSGINVGTYRIYWYQQKPGSPPQFLLRYKSDSDKQQGSGVPSRFSGSKDASANAGILLISGLQSEDEADYYCMICHSSAWVFGGGTKLTVL

SEQ ID NO: 3117 - protein, 110 aa, Artificial Sequence
  Synthetic construct
QSALTQPASVSGSPGQSITISCTGTSSDVGFYNYVSWYQHVPGKAPKLMIHNVNNRPSGVSNRFSGSKSGNTASLTISGLQAEDEGDYYCSSFTTSSTRVFGTGTKVTVI

SEQ ID NO: 3118 - protein, 110 aa, Artificial Sequence
  Synthetic construct
QSALTQPASVSGSPGQSVTISCTGTSSDVGGYNYVSWYQQHPGKAPKLMIYDVANRPSGVSHRFSGSKSGNTASLTISGLQAEDEADYYCSSYTSSNTEVFGTGTEITVL

SEQ ID NO: 3119 - protein, 107 aa, Artificial Sequence
  Synthetic construct
DIQMIQSPSTLSASVGDRVTITCRASQRVSTWLAWYQQKPGKAPRLLIYQASSLQSGVPSRFSGGGSGTEFTLTISNLQPDDFATYYCQQYNEYWYTFGQGTKLEIN

SEQ ID NO: 3120 - protein, 108 aa, Artificial Sequence
  Synthetic construct
SYELTQPPSVSVSPGQTARITCSGDALPKKYAYWYQQKSGQAPVLVIYEDSKRPSGIPERFSGSSSGTMATLTISGAQVEDEADYYCFSTDSSSNRRVFGGGTKLTVL

SEQ ID NO: 3121 - protein, 110 aa, Artificial Sequence
  Synthetic construct
QSALTQPPSASGSPGQSVTISCTGTSSDIGGYDYVSWYQQHPGKAPKLMIYEVNKRPSGVPDRFSGSKSANTASLTVSGLQAEDEAEYFCLSYGDINNRVFGGGTKLTVL

SEQ ID NO: 3122 - protein, 110 aa, Artificial Sequence
  Synthetic construct
QSVLTQPPSASGTPGQRVTISCSGSSSNIGSNTVNWYQQLPGTAPKLLIYSNSQRPSGVPDRISGSKSGTSASLAISGLQSEDEADYYCAAWDDSLNGYVFGTGTKVTVL

SEQ ID NO: 3123 - protein, 110 aa, Artificial Sequence
  Synthetic construct
QSLLTQPPSVSGAPGQRVTISCTGSSSNIGAGHDVHWYQQLPGTAPKLLIYGNTNRPSGVPDRFSGSRSGTSASLAITGLQAEDEADYYCQSYDSSLSYVFGTGTKVTVL

SEQ ID NO: 3124 - protein, 109 aa, Artificial Sequence
  Synthetic construct
SYVLTQPPSESVAPGKTARITCGGNNIGGHSVHWYQQKPGQAPVLVIYYDSDRPSGIPERFSGSNSGNTATLTISGVEAGDEADYYCQVWATGDDHAVVFGGGTKLTVL

SEQ ID NO: 3125 - protein, 111 aa, Artificial Sequence
  Synthetic construct
QSVLTQPPSVSGAPGQRVTISCTGSGSNIGAGYDVHWYQLLPGTAPKLLIYANSNRPSGVPDRFSGSKSDTSASLAITGLQADDEADYYCQSYDSGLSDSVFGGGTKLTVL

SEQ ID NO: 3126 - protein, 111 aa, Artificial Sequence
  Synthetic construct
QSALTQPASVSGSPGQSITISCTGTSSDVGDYNYVSWYQQHPGKAPKLMIYDVSNRPSGVSNRFSGSKSGNTASLTISGLQTEDEANYYCISYTSSSTQVVFGGGTTLTVL

SEQ ID NO: 3127 - protein, 108 aa, Artificial Sequence
  Synthetic construct
EIVMTQSPATLSVSPGERATLSCRASQSINSKLAWYQQKPGQAPRLLISGASSRATGIPARFSGSGSGTEFTLTISSLQSEDFAVYYCQQYSYWPPLTFGGGTKVEIK

SEQ ID NO: 3128 - protein, 109 aa, Artificial Sequence
  Synthetic construct
EIVLTQSPATLSLSPGERATLSCRASQSVSNFLAWYQQKPGQAPRLLIYDASHRATGIPARFSGSGSGTDFTLTISSLEPEDFAVYYCQQRSNWPPIFTFGPGTKVDIK

SEQ ID NO: 3129 - protein, 111 aa, Artificial Sequence
  Synthetic construct
QSALTQPRSVSGSPGQSVTISCTGTSSDVGGYNYVSWYQQHPGKAPKLMIYDVSKRPSGVPDRFSGSKSGNTASLTISGLQAEDEADYYCCSYAGSYTLGVFGGGTKLTVL

SEQ ID NO: 3130 - protein, 113 aa, Artificial Sequence
  Synthetic construct
DIVMTQSPNSLAVSLGERATINCKSSQSVLYSSNKKNYLAWYQQKPGQPPKLLIYWASTRESGVPDRFSGSGSGTDFTLTISSLQAEDVAVYYCQQYYSSPYTFGQGTKLEIK

SEQ ID NO: 3131 - protein, 108 aa, Artificial Sequence; identical to SEQ ID NO: 3062
  Synthetic construct

SEQ ID NO: 3132 - protein, 107 aa, Artificial Sequence
  Synthetic construct
DIQLTQSPSSLSASVGDSITITCRAGQDISNSLIWYQHKAGKAPLLLIYDASILEAGVPSRFSGSGSGTDFTLNINGLQPEDFATYYCQQSGNLPYTFGLGTKVDLK

SEQ ID NO: 3133 - protein, 111 aa, Artificial Sequence
  Synthetic construct
QSALTQPPAASGSPGQSVTISCTGTSSDVGGYHYVSWYQQHPGKAPKLMIYEVTKRPSGVPDRFSGSKSGNTASLTVSGLQAEDEADYYCTSYAGSNNLVVFGGGTKLTVL

SEQ ID NO: 3134 - protein, 106 aa, Artificial Sequence
  Synthetic construct
SYELTQPPSVSVSPGQTASITCSGDKLGDKYACWYQQKPGQSPVLVIYQDSKRPSGIPERFSGSNSGNTATLTISGTQAMDEADYYCQAWDSTTVVFGGGTKLTVL

SEQ ID NO: 3135 - protein, 108 aa, Artificial Sequence
  Synthetic construct
SYELTQPPSVSVSPGQTARITCSGDALPKKYAYWYQQKSGQAPVLVIYEDSKRPSGIPERFSGSSSGTMATLTISGAQVEDEADYYCHSTDSSGNHHVFGTGTKVTVL

SEQ ID NO: 3136 - protein, 108 aa, Artificial Sequence
  Synthetic construct
EIVLTQSPATLSLSPGERATLSCRASQSISSFLAWYQQKPGQAPRLLVYDASNRVSGIPARFSGSGSGTDFTLTISSLEPEDFAVYYCQRRSNWPPFTFGGGTKVEIK

SEQ ID NO: 3137 - protein, 107 aa, Artificial Sequence
  Synthetic construct
DIQMTQSPSSLSASVGDRVTITCQASQDISNYLNWYQQKPGKAPKLLIYDASNLETGVPSRFSGSGSGTDFTFTISSLQPEDFATYFCQQYDHLRITFGPGTKVDIK

SEQ ID NO: 3138 - protein, 110 aa, Artificial Sequence
  Synthetic construct
QSVLTQPPSASGTPGQRVTISCSGSSSDIGSNTVNWYQQLPGTAPKLLIYNNNQRPSGVPDRFSGSKSGTSASLAISGLQSEDEADYYCAAWHDSLNGSVFGTGTKVTVL

SEQ ID NO: 3139 - protein, 111 aa, Artificial Sequence
  Synthetic construct
QSVLTQPPSASGTPGQRVTISCSGSSSNIGSNAINWYQQLPGTAPKLLIYGNDQRPSGVPDRFSGSKSGTSASLAISGLQSEDEADYYCAAWDDSLIGFYVFGTGTKVTVL

SEQ ID NO: 3140 - protein, 109 aa, Artificial Sequence
  Synthetic construct
EIVLTQSPATVSLSPGERATLSCRASHFVSNYLAWYQQRPGQAPRLLIYDASKRATGIPARFSGSGSGTDFSLTISSLEPEDFAVYYCQQRSNRPPTWTFGQGTKVEIK

SEQ ID NO: 3141 - protein, 108 aa, Artificial Sequence
  Synthetic construct
EIVMTQSPATLSVSPGESATLFCRASQSVSINLAWYQQKPGQAPRLLIYGASTRATGIPARFSGSGSGTEFTLTISSLQSEDFAVYYCQQYDNWPPVTFGQGTRLEIK

SEQ ID NO: 3142 - protein, 107 aa, Artificial Sequence
  Synthetic construct
EIVLTQSPATLSLSPGERATLSCRASQSVSSYLAWYQQRPGQAPRLLIYDASNRATGIPARFSGSGSGTDFTLTISSLEPEDFAVYYCQQRSNWPLTFGGGTKVDIK

SEQ ID NO: 3143 - protein, 112 aa, Artificial Sequence
  Synthetic construct
DIVMTQTPLSLSVTPGQPASISCKSSQSLLHSDGKTYLYWYLQKPGQPPHLLIYEVSNRFSGVPDRFSGSGSGTDFTLKISRVEAEDVGVYYCMQSIQLPLTFGPGTKVDIK

SEQ ID NO: 3144 - protein, 111 aa, Artificial Sequence
  Synthetic construct
QSVLTQPPSVSAAPGQKVTISCSGSRSNIGNNYVSWYQQLPGTAPKLLIYENNKRPSGIPDRFSGSKSGTSATLGITGLQTGDEADYYCGTWDNSLSTFWVFGGGTKLTVL

SEQ ID NO: 3145 - protein, 107 aa, Artificial Sequence
  Synthetic construct
DIQMTQSPSTLSASVGDRVTITCRASQSISSWLAWYQQKPGKAPKLLIYKASSLESGVPSRFSGSGSGTEFTLTISSLQPDDFATYYCQQYNSYSLTFGGGTKVEIK

SEQ ID NO: 3146 - protein, 107 aa, Artificial Sequence
  Synthetic construct
DIQMTQSPSSLSASVGDSVTITCRASQSISTYLNWYQQKPGKAPKLLIYAASSLQSGVPSRFSGSGSGTDFTLTISSLQPEDFATYYCQQSYNSPRTFGQGTKVEIK

SEQ ID NO: 3147 - protein, 105 aa, Artificial Sequence
  Synthetic construct
SYVLTQPPSVSVAPGKTATITCGGNNIGSKSVHWYQQRPGQAPVMVIYSDSDRPSGIPERFSGSNSGNTASLTISRVEAGDEADYYCQVWDIGVVFGGGTRLTVL

SEQ ID NO: 3148 - protein, 111 aa, Artificial Sequence
  Synthetic construct
QSVLTQPPSVSGAPGQRVTISCTGSSSNIGAGYDVHWYQQLPGTAPKLLIYANSNRPSGVPVRVSGTKSGTSASLAISGLQAEDEADYYCQSYDSSLSALVFGAGTKLTVL

SEQ ID NO: 3149 - protein, 109 aa, Artificial Sequence
  Synthetic construct
DIQMTQSPSTLSASVGDRVTITCRASQSISSWLAWYQQKPGKAPKLLIYMASRLESGVPSRFSGSASGTEFTLTISSLQPDDFATYYCQQYNSYSSMYTFGQGTKLEIK

SEQ ID NO: 3150 - protein, 107 aa, Artificial Sequence
  Synthetic construct
DIQMTQSPSSLSASVGDRVTITCRASQSISTYLNWYQQKPGKAPKLLIYATSSLQGGVPSSFSGSGSGTDFTLTISSLQPEDFATYYCQQSYSTPRTFGQGTKVEIR

SEQ ID NO: 3151 - protein, 108 aa, Artificial Sequence
  Synthetic construct
EIVLTQSPGTLSLSPGERATLSCRASQSVSSSYLAWYQQKPGQAPRLLIYGASSRATGIPDRFSGSGSGTDFTLTISRLEPEDFAVYYCQQYGSSPRTFGQGTKAEIK

SEQ ID NO: 3152 - protein, 111 aa, Artificial Sequence
  Synthetic construct
QSALTQPASVSGSPGQSITISCTGTSSDVGGYNYVSWYQQHPGKAPKLMIYDVSNRPSGVSNRFSGSKSGNTASLTISGLQAEDEADYYCSSYTSSSTSLVFGTGTKVTVL

SEQ ID NO: 3153 - protein, 112 aa, Artificial Sequence
  Synthetic construct
DIVMTQSPLSLPVTPGEPASISCRSSQSLLHSNGYNYLDWYLQKPGQSPQLLIYLGSNRASGVPDRFSGSGSGTDFTLKISRVEAEDVGVYYCMQALQTPLTFGGGTKVEIK

SEQ ID NO: 3154 - protein, 106 aa, Artificial Sequence
  Synthetic construct
SYELTQPPSVSVSPGQTASITCSGDKWGDKDACWYQQKPGQSPVLVIYQDYKRPSGIPERFSGSNSGNTATLTISGTQAMDEADYYCQAWDSGTYVFGTGTKLTVL

SEQ ID NO: 3155 - protein, 110 aa, Artificial Sequence
  Synthetic construct
QSALTQPPSASGSPGQSVTISCTGTSSDVGGYIYVSWYQRHPGKAPKLMIYEVTKRPSGVPDRFSGSKSGSTASLTVSGLQAEDEADYYCTSYAGSNRVLFGGGTKLTVL

SEQ ID NO: 3156 - protein, 110 aa, Artificial Sequence
  Synthetic construct
QSVLTQPPSASGTPGQRVTISCSGSSSNIGSNPVNWYQQLPGTAPQLLIYSNNQRPSGVPDRFSGSKSGTSASLAISGLQSEDEADFYCATWDHSLNGWVFGGGTKVTVL

SEQ ID NO: 3157 - protein, 110 aa, Artificial Sequence
  Synthetic construct
QSVLTQPPSASGTPGQRVTISCSGSSSHIGSNYVYWYQQLPGTAPKLLIYRNNQRPSGVPERFSGSKSGTSASLAISGLRSEDEADYYCATWDDSLSGPVFGGGTKLTVL

SEQ ID NO: 3158 - protein, 113 aa, Artificial Sequence
  Synthetic construct
DIVLTQSIDSLAVSLGERATISCKSSQSVLYSSTNRNYLAWYQQKPGQPPKLLIYWASTRESGVPDRFTGSGSGTDFTLTINNLQAEDVAVYYCQQYYGTPPTFGQGTKVEIK

SEQ ID NO: 3159 - protein, 112 aa, Artificial Sequence
  Synthetic construct
DVAMTQSPLSLPVTLGQPASISCRSSQSLVYSDGNSHLSWFQQRPGQSPRRLIYRVSKRDSGVPDRFSGSGSGTDFTLKISRVEAEDVGVYYCMQGTHWPLTFGQGTRLEIK

SEQ ID NO: 3160 - protein, 107 aa, Artificial Sequence
  Synthetic construct
EIVMTQSPATLSVSPGERATLSCRASQSVSSNLAWYQQKPGQAPRLLIYGASTRATGIPARFSGSGSGTEFTLTISSLQSEDFAVYYCQQYNNWPPTFGQGTKLEIK

SEQ ID NO: 3161 - protein, 106 aa, Artificial Sequence
  Synthetic construct
SYELTQPPSVSVSPGQTANITCSGDKLGDKFVCWYQQRPGQSPVLVIHQDTKRPSGIPERFSGSNSGNTATLTISGTQAMDEADYYCQAWGSSTGVFGTGTKVTVL

SEQ ID NO: 3162 - protein, 106 aa, Artificial Sequence; identical to SEQ ID NO: 2768
  Synthetic construct

SEQ ID NO: 3163 - protein, 107 aa, Artificial Sequence
  Synthetic construct
EIVMTQSPATLSVSPGERATLSCGASQSVSSNLAWFQQKPGQAPRLLIYGASSRATGIPATFSGSGSGTEFTLTISSLQSEDFAVYYCQQYNHWPYTFGQGTKLEIK

SEQ ID NO: 3164 - protein, 106 aa, Artificial Sequence
  Synthetic construct
SYELTQPPSVSVSPGQTASITCSGDKLDTKYACWYQQRPGQSPLLVIYEDTKRPSGIPERFSGSNSGNTATLTISGTQAVDEADYYCQAWDSSTVVFGGGTKLAVL

SEQ ID NO: 3165 - protein, 113 aa, Artificial Sequence
  Synthetic construct
DIVMTQSPDSLAVSLGERATINCKSSQSVLYSSNNRNYLAWYQQKPGQSPKLLIYWSSTRESGVPDRFSGSGSGTDFSLTISSLQAEDVAVYYCQQYYSTPWTFGQGTKVEIK

SEQ ID NO: 3166 - protein, 111 aa, Artificial Sequence
  Synthetic construct
QSALTQPASVSGSPGQSITISCTGTSSDVGGYNSVSWYQQHPGKAPKLLIYDVSNRPSGVSNRFSGSKSGNTASLTISGLQAEDEADYYCSSYTSSITPYVFGTGTTVTVL

SEQ ID NO: 3167 - protein, 110 aa, Artificial Sequence
  Synthetic construct
QSVLTQPPSASGTPGQRVTISCSGSSSNIGTNTVMWYQQLPGTAPKLLIYDNNQRPSGVPDRFSGSKSGTSASLAISGLQSEDEADYYCAAWDDSLNGYVFGTGTEVTVL

SEQ ID NO: 3168 - protein, 112 aa, Artificial Sequence
  Synthetic construct
QSVLTQPPSVSGAPGLRVTISCTGSSSNIGAGYDVHWYQHLPGTAPKLLIYSNTNRPSGVPDRFSGSKSGTSASLAITGLQAEDEADYYCQSYDNSLSGSYVFGTGTKVTVL

SEQ ID NO: 3169 - protein, 107 aa, Artificial Sequence
  Synthetic construct
EIVLTQSPATLSLSPGERATLSCRASQSVSSYLAWFQQKPGQPPRLLIYDASNRATGIPARFSGSGSGTDFTLTISSLEPEDFAVYYCQQRNNWPITFGQGTRLEIK

SEQ ID NO: 3170 - protein, 111 aa, Artificial Sequence
  Synthetic construct
QPVLTQSSSASASLGSSVKLTCTLSSGHSSYIIAWHQQQPGKAPRYLMKVEYTGIYNKGSGVPDRFSGSSSGADRYLTISNLQSEDEADYYCETWDSNTWVFGGGTKLTVL

SEQ ID NO: 3171 - protein, 108 aa, Artificial Sequence
  Synthetic construct
DIQMTQSPSSLSASVGDRVTITCRASQGISNYLAWYQQKPGKVPKLLIYAASTLQSGVPSRFSGSGSGTDFTLTISSLQPEDVATYYCQKYNSAPPLTFGGGTKVEIK

SEQ ID NO: 3172 - protein, 113 aa, Artificial Sequence
  Synthetic construct
DIVMTQSPDSLAVSLGERATINCRSSQSVLYSSDNKNYLVWYQQKPGQPPKLLIYWASTRESGVPDRFSGSGSGTDFTLTISSLQAEDVAVYYCQQYYSTPYTFGQGTKLEIK

SEQ ID NO: 3173 - protein, 111 aa, Artificial Sequence
  Synthetic construct
QSALTQPASVSGSPGQSITISCSGTSSDVGSNNLVSWYQQYPGKAPKLMIYEGSKRPSGVSNRFSGSKSGNTASLTISGLQTEDEADYYCCSYAGSRIFYVFGTGTKLTVL

SEQ ID NO: 3174 - protein, 108 aa, Artificial Sequence
  Synthetic construct
SYELTQPPSVSVSPGQTANITCSGDKLGDKYVCWYQQKPGQSPVLVIYQDNKRPSGIPERFSGSNSGNTATLTIGGSQAMDEADYYCQARDSSTTSYIFGTGTKVTVL

SEQ ID NO: 3175 - protein, 111 aa, Artificial Sequence
  Synthetic construct
QSALTQPASVSGSPGQSITISCTGTSSDVGGYNYVSWYQQHPGKAPKLMIYEVSNRPSGVSNRFSGSKSGNTASLTISGLQAEDEADYYCSSYTSSSTFYVFGTGTKVTVL

SEQ ID NO: 3176 - protein, 110 aa, Artificial Sequence
  Synthetic construct
QSALTQPASVSGSPGQSITISCTGTSSDVGGYNYVSWYQQHPGKAPKLMIYDVSNRPSGVSNRFSGSKSGNTASLTISGLQAEDEADYYCSSYTSSRTVVFGGGTKLTVL

SEQ ID NO: 3177 - protein, 109 aa, Artificial Sequence
  Synthetic construct
EIVLTQSPATLSLSPGERATLSCRASQSVSSYLAWYQQKPGQAPRLLIYDASNRATGIPARFSGSGSGTDFTLTISSLEPEDFALYYCQQRSNWPPEVTFGPGTKVDIK

SEQ ID NO: 3178 - protein, 107 aa, Artificial Sequence
  Synthetic construct
EIVLTQSPATLSLSPGERATLSCRASQSVSRYLAWYQQKPGQAPRLLIYDASDRATGIPARFSGSGSGTDFTLTISSLEPEDFAVYYCQQRSNWLITFGQGTRLEIK

SEQ ID NO: 3179 - protein, 109 aa, Artificial Sequence
  Synthetic construct
SSELTQDPAVSVALGQTVRITCQGDSLSNYFANWYQQKPRQAPKLVIYGKNNRPSGIPDRFSGSSSGNTASLTITGAQAEDEADYYCNSRDTSGNHLGVFGTGTKVTVL

SEQ ID NO: 3180 - protein, 107 aa, Artificial Sequence
  Synthetic construct
EIVMTQSPATLSVSPGERATLSCRASQSVSSNLAWYQQKPGQAPRLLIYGASTRATAIPARFSGSGSGTEFTLTISSLQSEDFAVYYCQQCNSWPLTFGGGTKVEIK

SEQ ID NO: 3181 - protein, 109 aa, Artificial Sequence
  Synthetic construct
EVVLTQSPGTLTLSPGERATLSCRVSQSVSSNYLAWYQQKPGQAPRLLIYSASSRATGIPDRFSGSGSGTDFALTISGLEPEDFAVYYCQHYGGSPLWTFGQGTKVEIK

SEQ ID NO: 3182 - protein, 110 aa, Artificial Sequence
  Synthetic construct
EIVLTQSPGTLSLSLGETATLSCRASQTVSSRYLVWYQQKPGQAPRLLIFGGSIRATGVSDRFSGSGSGTDFTLTISRLEPEDFAVYYCQQYGGSPSSSTFGQGTKLAIK

SEQ ID NO: 3183 - protein, 111 aa, Artificial Sequence
  Synthetic construct
QSVLTQPPSVSGAPGQRVTISCTGSSSNIGAGFDVHWYHQLPGTAPKLLIYGSDNRPSGVPDRFTGSKSGTSASLAITGLQAEDEADYYCQSYDSSLSVVVFGGGTKLTVL

SEQ ID NO: 3184 - protein, 107 aa, Artificial Sequence
  Synthetic construct
SYELTQPPSVSVSPGQTARITCSADALPKQYSYWYQQKPGQAPVLVIYKDTKRPSGIPERFSGSSSGPTVTLTISGVQAEDEADYYCQSADSSGTWVFGGGTKLTVL

SEQ ID NO: 3185 - protein, 107 aa, Artificial Sequence
  Synthetic construct
DIQMTQSPSTLSASVGDRVTITCRASTSISTWLAWYQQKPGKAPKLLIYKASSLESGVPSRFSGSGSGTEFTLTISSLQTDDFATYFCQQYNTYSGTFGQGTKVEIK

SEQ ID NO: 3186 - protein, 112 aa, Artificial Sequence
  Synthetic construct
DIVMTQTPLSLSVTPGQPASISCKSSQSLLHSDGKTYLYWYLQKPGQSPQLLIYEVSNRFSGVPDRFSGSGSGTDFTLKISRVEAEDVGVYYCMQSIQLPLTFGGGTKVEIK

SEQ ID NO: 3187 - protein, 111 aa, Artificial Sequence
  Synthetic construct
QSVLTQPPSVSGAPGQRVTISCTGNSSNIGAGFDVHWYQQLPGTAPKLLIYGNTNRPSGVPDRFSGSKSGTSASLAISGLQAEDEADYYCQSYDTGSGDVVFGGGTKLTVL

SEQ ID NO: 3188 - protein, 108 aa, Artificial Sequence
  Synthetic construct
SSELTQDPAVSVALGQTVRITCQGDSLRKYYASWYQQKPGQAPVLVIYGENNRPSGIPARFSGSSSGNTASLTITGAQAEDEADYYCNSRDSSGNHLVFGGGTKLTVL

SEQ ID NO: 3189 - protein, 112 aa, Artificial Sequence
  Synthetic construct
DIVMTQTPLSSPVTLGQPASISCRSSQSLVHSDGNTYLSWLQQRPGQPPRLLIYKISNRFSGVPDRFSGSGAGTDFTLKISRVEAEDVGVYYCMQATQFPHTFGPGTKVDIK

SEQ ID NO: 3190 - protein, 108 aa, Artificial Sequence
  Synthetic construct
DIQMTQAPSSLSASVGDRVTITCRASQSITTYLNWYQKKPGKAPKLLIYAASSLQSGVPSRFSGSGSGTDFTLTISSLQPEDFATYYCQQTYSTPLFTFGPGTKVDLK

SEQ ID NO: 3191 - protein, 106 aa, Artificial Sequence
  Synthetic construct
DIQMTQSPSSVSASVGDRVTITCRASQGISSWLAWYQQKPGKAPKLLIYAASSLQSGVPSRFSGSGSGTDFTLTISSLQPEDFATYFCQQTNSFPVFGGGTKVEMK

SEQ ID NO: 3192 - protein, 108 aa, Artificial Sequence
  Synthetic construct
DIQMTQSPSSLSASVGDRVTLTCRASQGIRNDLGWYQQKPGKAPKRLIYAASSLQSGVPSRFSGSGSGTEFTLTISSLQPEDFATYYCLQYNYYPLVTFGQGTRLEIK

SEQ ID NO: 3193 - protein, 111 aa, Artificial Sequence
  Synthetic construct
QSVLTQPPSVSGAPGQRVTISCTGSSSNIGAGYDVHWYQQLPGTAPKLLISGNSNRPSGVPDRFSGSKSGTSASLAITGLQAEDEADYYCQSYDSSLSGSVFGGGTKLTVL

SEQ ID NO: 3194 - protein, 113 aa, Artificial Sequence
  Synthetic construct
DIVMTQSPDSLAVSLGERATINCKSSQSVLYSSNNKNYLAWYQQKPGQPPKLLIYWASTRESGVPDRFSGGGSGTDFTLTISSLQAEDVAVYSCQQYYSTPLTFGGGTKVEIK

SEQ ID NO: 3195 - protein, 108 aa, Artificial Sequence
  Synthetic construct
SYVLTQPPSVSVAPGKTARITCGGNNIGSKSVHWYQQKAGQAPVLLIFYNSDRPSGIPERFSGSNSGNTATLTISRVEAGDEADYFCQVWDSSSDHVVFGGGTKLTVL

SEQ ID NO: 3196 - protein, 110 aa, Artificial Sequence
  Synthetic construct
QSALTQPASVSGSPGQSITISCTGSSSDVGGYNYVSWYQHHPGKAPKLMIYDVSNRPSGVSIRFSGSKSGNTASLTISGLQAEDEADYYCSSYTSSSTLVFGTGTKVTVL

SEQ ID NO: 3197 - protein, 106 aa, Artificial Sequence
  Synthetic construct
SYELTQPPSVSVSPGQTASITCSGDKLGDKYASWYQQKPGQSPVLVIFEDTRRPSGIPERFSGSNSGNTATLTISGTQAMDEADYYCQAWDSSSGMFGGGTQLTVL

SEQ ID NO: 3198 - protein, 109 aa, Artificial Sequence
  Synthetic construct
SYELTQPPSVSVSPGQTARITCSGDALPKKYAYWYQQKSGQAPVLVIYEDSKRPSGIPERFSGSSSGTMATLTISGAQVEDEGDYYCYSTDSSGNPKWVFGGGTKLTVL

SEQ ID NO: 3199 - protein, 113 aa, Artificial Sequence; identical to SEQ ID NO: 2944
  Synthetic construct

SEQ ID NO: 3200 - protein, 106 aa, Artificial Sequence
  Synthetic construct
SYELTQPPSVSVSPGQTASITCSGDKLGDKNPWWYQQKPGQSPVLVMYQDNKRPSGIPERFSGSNSGNTATLTIRGTQVIDEADYYCQTWDSITWVFGGGTKLTVL

SEQ ID NO: 3201 - protein, 107 aa, Artificial Sequence
  Synthetic construct
SYVLTQPPSVSVAPGETAMITCGGDNIGSKNVYWYQQKPGQAPLLIIYYDRERPSGIPERFSGSNSENTATLTISRVEAGDEADFYCQVWDSRSDRVFGGGTTLTVL

SEQ ID NO: 3202 - protein, 106 aa, Artificial Sequence
  Synthetic construct
EIVLTQSPATLSLSPGERATLSCRASQSVSSYLAWYQHKPGQAPRLLIYDASNRATGIPARFSGSGSGTDFTLTISSLEPEDFAVYYCQQRSNWPTFGQGTKVEIK

SEQ ID NO: 3203 - protein, 106 aa, Artificial Sequence
  Synthetic construct
DIQMTQSPSSLSASVGDRVTITCRASQSISSYLNWYQQKPGKAPKLLIYAASSLQSGVPSRFSGSGSGTDFTLTISSLQPEDFATYYCQQSYSPYTFGQGTKLEIK

SEQ ID NO: 3204 - protein, 108 aa, Artificial Sequence
  Synthetic construct
EIVMTQSPATLSVSPGERATLSCRASQSVSSNLAWYQQKPGQAPRLLIYGASTRATGIPARFSGSGSGTEFTLTISSLQSEDFAVYYCQQYNNWPPVTFGQGTKLEIK

SEQ ID NO: 3205 - protein, 113 aa, Artificial Sequence
  Synthetic construct
DIVMTQSPDSLAVSLGERATINCRSSQSVLYSFNNKNYLAWYQQTPGQPPKLLIYWASTRESGVPDRFSGSGSGTDFTLTISSLQAEDVAVYYCQQYYSTPYTFGQGTKLEIK

SEQ ID NO: 3206 - protein, 111 aa, Artificial Sequence
  Synthetic construct
DIVMTQSPVSLAVTPGEPASISCKSSQSLLHYSGYNYLDWYLQKPGQSPQLLIYLGSNRASGVPDRFSGSGSGTDFTLKISRVEAEDVGIYYCMQALQTHTFGQGTKLEIK

SEQ ID NO: 3207 - protein, 107 aa, Artificial Sequence
  Synthetic construct
DIQMTQSPSTLSASVGDRVTITCRASQSVNTWLAWYQQKAGKAPKLLIYKASSLESGVPSRFSGSGSGAEFTLTISSLQPDDFATYYCQQYKTYGWTFGQGTKVEVK

SEQ ID NO: 3208 - protein, 109 aa, Artificial Sequence
  Synthetic construct
QSALTQPASVSGSPGQSITISCTGASSDVGAFNYVSWYQHHPGKAPKLMIYDVSDRPSGISNRFSGSKSGNTASLTISGLQAEDEAYYYCSSYTTSSVVFGGGTKLTVL

SEQ ID NO: 3209 - protein, 108 aa, Artificial Sequence
  Synthetic construct
EIVLTQSPDTLSLSPGERATLSCRASQSVGSIYLAWYQQKPGQAPRLLIYGASSRATGIPDRFRGSGSGTDFTLTISRLEPEDFAVYYCQQYGSSLGTFGQGTKVEIK

SEQ ID NO: 3210 - protein, 113 aa, Artificial Sequence; identical to SEQ ID NO: 2944
  Synthetic construct

SEQ ID NO: 3211 - protein, 110 aa, Artificial Sequence
  Synthetic construct
QSALTQPASVSGSPGQSITISCTGTSSDVGSYNLVSWYQQYPGKAPKLMIYEVSKWPSGVSNRFSGSKSGNTASLTISGLQAEDEADYFCSSYAGASTLVFGGGTKLTVL

SEQ ID NO: 3212 - protein, 109 aa, Artificial Sequence
  Synthetic construct
EIVLTQSPATLSLSPGERATLSCRASQSVSSYLAWYQHKPGQAPRLLIYDASNRATDIPARFSGSGSGTDFTLTISSLEPEDFAVYYCQHRSHWPPVVTFGRGTKVEVK

SEQ ID NO: 3213 - protein, 110 aa, Artificial Sequence
  Synthetic construct
NFMLTQPHSVSESPGKTVTISCTGSSGNIASNYVQWYQQRPGSAPTTVIYEDNQRPSGVPDRFSGSIDSSSNSASLTISGLKTEDEADYYCQSYDSSNLVFGGGTKLTVL

SEQ ID NO: 3214 - protein, 108 aa, Artificial Sequence
  Synthetic construct
SYVLTQPPSVSVAPGKTARISCGGNTIGGKSVHWYQQKPGQAPILVIYYDSDRPSGIPERFSGSNSGNTATLTISRVEAGDEADYFCQVWDNYSDQPVFGGGTKLTVL

SEQ ID NO: 3215 - protein, 107 aa, Artificial Sequence
  Synthetic construct
DIQLTQSPSFLSASVGDRVTITCRASQGISSYLAWYQQKPGKAPKLLIYAASTLQSGVPSRFSGSGSGTEFTLTISSLQPEDFATYYCQQLNSYPYTFGQGTKLEIK

SEQ ID NO: 3216 - protein, 108 aa, Artificial Sequence
  Synthetic construct
DIQMTQSPSSLSASVGDRVTITCQASQDISKYLNWYQQKPGKAPKLLIYDASNLETGVPSRFSGSGSGTDFTFTISSLQPEDIATYYCQQYDNLPPYTFGQGTKVQIK

SEQ ID NO: 3217 - protein, 107 aa, Artificial Sequence
  Synthetic construct
DIQMTQSPSTLSASVGDRVTITCRASQSISNWLAWYQQKPGKAPKLLIYKASSLESGVPSRFSGSGSGTEFTLTISSLQPDDFATYYCQQYNIYSWTFGQGTKVEIK

SEQ ID NO: 3218 - protein, 110 aa, Artificial Sequence
  Synthetic construct
QSVLTQPPSASGTPGQRVTISCSESSTNIGSADVNWYLQLPGTAPKLLIHTNNQRPSGVPDRFSGSKSGTSASLAISGLQSEDEADYYCAVWDNSLKNVLFGGGTKLTVL

SEQ ID NO: 3219 - protein, 109 aa, Artificial Sequence
  Synthetic construct
EIVLTQSPATLSLSPGDRATLSCRASQSVSNFLAWYQQRPGQAPRLLIYDASNRATGIPARFSGSGSGTDFTLTISSLEPEDFAVYYCQQRSNWPPIFSFGPGTKVDIK

SEQ ID NO: 3220 - protein, 106 aa, Artificial Sequence
  Synthetic construct
DIQMTQSPSSLSASVGDRVTISCQTSQDISIYLNWYQQKPGKAPKLLIYDGSNLEAGAPSRFSGSGSGTDFTFTISSLQPEDIATYYCQHYDDLPRFGPGTKVDFK

SEQ ID NO: 3221 - protein, 107 aa, Artificial Sequence
  Synthetic construct
DIQLTQSPSFLSASVGDRVTITCRASQGISSYLAWYQQRPGKAPKLLIYAASTLQSGVPSSFSGSGSGTEFTLTISSLQPEDFATYYCQQLKSFPPTFGQGTRLDIK

SEQ ID NO: 3222 - protein, 107 aa, Artificial Sequence
  Synthetic construct
DIQMTQSPSSLSASVGDRVTITCRASQSISSYLNWYQQKPGKAPKLLIYAASSLQSGVPSRFSGSGSGTDFTLTISSLQPEDFATYYCQQSYSTPRTFGQGTKVEIK

SEQ ID NO: 3223 - protein, 112 aa, Artificial Sequence
  Synthetic construct
DIVMTQTPLSLSVTPGQAASISCKSSQSLLHSDGKTYLYWYLQKPGQPPQLLIYELSDRFSGVPDRFSGSGSGTDFTLKISRVEAEDVGVYYCMQTIQFPYTFGQGTKLEIK

SEQ ID NO: 3224 - protein, 108 aa, Artificial Sequence; identical to SEQ ID NO: 2706
  Synthetic construct

SEQ ID NO: 3225 - protein, 111 aa, Artificial Sequence
  Synthetic construct
QSVLTQPPSVSGAPGQRVTISCTGSSSNIGAGYDVHWYQHFPGTAPKLLIYVNSNRPSGVPDRFSGSKSGTSASLAISGLQAEDEADYYCQSYDSSLSGYVFGTGTKVTVL

SEQ ID NO: 3226 - protein, 108 aa, Artificial Sequence
  Synthetic construct
EIVLTQSPGTLSLSPGERATLSCRASQRVSSPYLAWYQQKPGQAPRLLIYGASSRATGIPDRFSGSGSGTDFTLTISRLEPEDFAVYYCQQYGSSPRTFGRGTKLEIR

SEQ ID NO: 3227 - protein, 106 aa, Artificial Sequence
  Synthetic construct
SYELTQPPSVSVSPGQTATISCSGDKLGNKYTCWYQQKPGQSPVLVIYQDNKRPSGIPERFSGSNSGNTATLTISGTQAMDEADYYCQAWVSSAVVFGGGTKLTVL

SEQ ID NO: 3228 - protein, 110 aa, Artificial Sequence
  Synthetic construct
QSVLTQPPSASGTPGQRVTISCSGSSSNIGNNTVNWNHQVPGTAPKLLIYNNNQRPSGVPDRFSGSKSGTSASLAISGLQSEDEADYYCATWDDSLNAWVFGGGTKLTVL

SEQ ID NO: 3229 - protein, 107 aa, Artificial Sequence; identical to SEQ ID NO: 3088
  Synthetic construct

SEQ ID NO: 3230 - protein, 107 aa, Artificial Sequence
  Synthetic construct
DIQLTQSPSSVSASVGDRVTITCRASQGLTRWLAWYQQKPGKAPKLLIYSVSSLQSGVPSRFSGSESGTDFTLTITRLQPEDFATYYCQQGSSFPWTFGQGTKVEVK

SEQ ID NO: 3231 - protein, 108 aa, Artificial Sequence
  Synthetic construct
SYELTQPPSVSVSPGQTARITCSGDALPKQYAYWYQQKPGQAPVLVIYKDSERPSGIPERFSGSSSGTTVTLTISGVQAEDEADYYCQSADSSGTSWVFGGGTKLTVL

SEQ ID NO: 3232 - protein, 111 aa, Artificial Sequence
  Synthetic construct
QSALTQPPSASGSPGQSVAISCTGTSGDVGAYNFVSWYQQHPGEAPKIMIYEVSKRPSGVPDRFSGSKSGNTASLTVSGLQAEDEAEYYCSSYAGDNNPVVFGGGTRLTVL

SEQ ID NO: 3233 - protein, 107 aa, Artificial Sequence
  Synthetic construct
DIQMTQSPSSLSASVGDRVTITCRASQGIRNDLGWYQQKPGKAPKRLIYAASSLQSGVPSRFSGSGSGTEFTLTISSLQPEDFATYYCLQHNTYPLTFGGGTKVEIK

SEQ ID NO: 3234 - protein, 107 aa, Artificial Sequence
  Synthetic construct
DIQMTQSPSSLSASVGDKVTITCRASQGISNYLAWFQQKPGEAPKSLIYAASSLQSGVPSKFSGSGSGTDFTLTISSLQPEDFATYYCQQYNTFPPTFGQGTRLEIK

SEQ ID NO: 3235 - protein, 108 aa, Artificial Sequence
  Synthetic construct
EIVLTQSPGTLSLSPGERATLSCRASQSVSSSYLAWYQQKPGQAPRLLMYGASSRATGIPDRFSGSGSGTDFTLTISRLEPEDFAVYYCQQYGSSPYTFGQGTKLEIK

SEQ ID NO: 3236 - protein, 107 aa, Artificial Sequence
  Synthetic construct
DIQMTQSPSSLSASVGDRVTITCQASQDISNYLNWYQQKPGKAPKLLIYDASYLKTGVPSRFSGSGSGIDFTFTISSLQPEDIATYYCQQYDILPFTFGPGTKVDIK

SEQ ID NO: 3237 - protein, 107 aa, Artificial Sequence
  Synthetic construct
EIVLTQSPATLSLSPGERATLSCRASQSVGLYLAWYQQKPGQAPRLLIYDASYRATGIPARFSGSGSGTDFTLTISSLEPEDFAIYYCQQRSNRPLTFGGGTKVDFK

SEQ ID NO: 3238 - protein, 109 aa, Artificial Sequence
  Synthetic construct
QAVVTQEPSLTVSPGGTVTLTCASSTGDVTSGHWPFWFQQRPGQVPRTLVFDTNKKHSWTPARFSGSLIGGKAALTLSGAQPEDEADYYCLLSYSGPRVFGGGTKLTVL

SEQ ID NO: 3239 - protein, 108 aa, Artificial Sequence
  Synthetic construct
SYELTQPPSVSVSPGQTARITCSGDALPKQHAYWYQQKPGQAPAVVIYKDSERPSGIPERFSGSSSGTTVTLTISGVQAEDEADYYCQSSDSSASYVVFGGGTKLTVL

SEQ ID NO: 3240 - protein, 110 aa, Artificial Sequence
  Synthetic construct
QSVLTQPPSASGAPGQRVTISCSGSSSNIGTNNVDWYQHLPGTAPKLLIYSTDQRLSGVPDRFSGSRSGTSGSLAISGLQSEDEADYYCAAWDDSLNGPVFGGGTKLTVL

SEQ ID NO: 3241 - protein, 107 aa, Artificial Sequence
  Synthetic construct
EIVMTQSPATLSVSPGERATLSCRASQSVNSNLAWYQQKPGQVPRLLIYGASTRATGIPARFSGSGSGTEFTLTISSLQSEDFAVYYCHQYNNWPLTFGGGTKVEIQ

SEQ ID NO: 3242 - protein, 109 aa, Artificial Sequence; identical to SEQ ID NO: 3099
  Synthetic construct

SEQ ID NO: 3243 - protein, 109 aa, Artificial Sequence
  Synthetic construct
QAVVTQEPSLTVSPGGTVTLTCGSSTGAVTSGHYPYWFQQKPGQAPRTLIYDTSNKHSWTPARFSGSLLGGKAALTLSGAQPEDEAEYYCLLSYSGAYVFGTGTKVTVL

SEQ ID NO: 3244 - protein, 109 aa, Artificial Sequence
  Synthetic construct
EIVLTQSPGTLSLSPGERATLSCRASQSVSSSYLAWYQQKPGQAPRLLIYGASTRATGIPDRFSGSGSGTDFTLTISRLEPEDFAVYYCQQYGSSPWVTFGPGTKVDIK

SEQ ID NO: 3245 - protein, 107 aa, Artificial Sequence; identical to SEQ ID NO: 2905
  Synthetic construct

SEQ ID NO: 3246 - protein, 110 aa, Artificial Sequence
  Synthetic construct
QSALTQPASVSGSPGQSITISCTGTSSDVGKYNFVSWYQQHPGKAPKLLIFDVSNRPSGVSDRFSGSKSGNTASLTISGLQAEDEADYYCSSFTSISTLVFGGGTKLTVL

SEQ ID NO: 3247 - protein, 107 aa, Artificial Sequence
  Synthetic construct
DIQMTQSPSSLSASVGDRVTITCRASQGISNDLAWFQQKPGKAPKSLIYAASSLQSGVPSKFSGSGSGTDFTLTISSLQPEDFATYYCQQYNSYPVTFGQGTRLEIK

SEQ ID NO: 3248 - protein, 107 aa, Artificial Sequence
  Synthetic construct
EIVLTQSPATLSLSPGERATLSCRASQSVSSYLGWYQQKPGQAPRLLIYDASNRATGIPARFSGSGSGTDFTLTISSLEPEDFAVYYCQQRSNWLWTFGQGTKVDFK

SEQ ID NO: 3249 - protein, 106 aa, Artificial Sequence
  Synthetic construct
SYELTQPPSVSVSPGQTASVTCSGDKLGDKYACWYQQKPGQSPVLVIYQDTKRPSGIPERFSGSNSGNTATLTISGTQAMDEADYYCQAWASSTAIFGGGTKLTVL

SEQ ID NO: 3250 - protein, 110 aa, Artificial Sequence
  Synthetic construct
QSALTQPASVSGSPGQSITISCTGTSSDVGGYNYVSWYQQHPGKAPKIMIYDVSNRPSGVSNRFSGSKSGNTASLTISGLQAEDEADYYCSSFTSISTLIFGGGTRLTVL

SEQ ID NO: 3251 - protein, 108 aa, Artificial Sequence
  Synthetic construct
EIVLTQSPGTLSLSPGERATLSCRASQSVSGSYLAWYQQKPGQAPRLLIYGASSRATDIPDRFSGSGSGTDFTLTINRLEPEDFAVYYCQQYGSSLYTFGQGTKLEIK

SEQ ID NO: 3252 - protein, 107 aa, Artificial Sequence
  Synthetic construct
SYELTQPPSVSVSPGQTASITCSGDKLGDKYACWYQQKPGQSPVLVIYQDSKRPSGIPERFSGSNSGNTATLTISGTQAMDEADYYCQAWDSSTLRVFGGGTKLTVL

SEQ ID NO: 3253 - protein, 107 aa, Artificial Sequence
  Synthetic construct
DIQMTQSPSSLSASVGDRVIITCRASQSIAGYLNWYQRKPGKAPNLLIYAASSLQSGVPSRFSGSGSGTDFTLTISSLQPEDFATYYCQQSYSTPFTFGGGTKVEIK

SEQ ID NO: 3254 - protein, 110 aa, Artificial Sequence
  Synthetic construct
QTVVTQEPSLTVSPGGTVTLTCASSTGAVTSGYYPNWFQQKPGQAPRALIYSTTNKHSWTPARFSGSLLGGKAALTLSGVQPEDEADYYCLLYHRGAQLVFGGGTKLTVL

SEQ ID NO: 3255 - protein, 110 aa, Artificial Sequence
  Synthetic construct
QSALTQPASVSGSPGQSITISCTGASSDIGAYNFVSWYQQHPGKAPKVVIYDVRKRPSGVSIRFSGSKSGNTASLTISGLQVEDEADYYCSSYRSGTTYVFGTGTRVTVL

SEQ ID NO: 3256 - protein, 108 aa, Artificial Sequence
  Synthetic construct
EIVMTQSPATLSVSPGERATLSCRASQSVSSNLAWYLQKPGQAPRLLIYGASTRATGIPARFSGSGSGTEFTLTISSLQSEDFAVYFCQQYNDWPFWTFGQGTKLEIK

SEQ ID NO: 3257 - protein, 113 aa, Artificial Sequence
  Synthetic construct
DIVMTQSPDSLAVSLGERATINCKSSQSVLYSSNNKNYLAWYQQKPGQPPKVLIYWASTRESGVPDRFSGSGSGTDFTLTISSLQAEDVAVYYCQQYFTTPPTFGQGTKLEIK

SEQ ID NO: 3258 - protein, 108 aa, Artificial Sequence
  Synthetic construct
EIVLTQSPGTLSLSPGERVTLSCRASQSVSSSSLAWYQQKPGQAPRLLIDGASSRATGIPDRFSGSGSETDFTLTISRLEPEDFALYYCQQYGSLPLTFGGGTKVEIK

SEQ ID NO: 3259 - protein, 108 aa, Artificial Sequence
  Synthetic construct
SYELTQPPSVSVSPGQTARITCSADALSKQYAYWYQQKPGQAPVLVIYKDSERPSGIPERLSGSSSGTTVTLTISGVQAEDEADYYCQSADSSGTYVIFGGGTKLTVL

SEQ ID NO: 3260 - protein, 107 aa, Artificial Sequence
  Synthetic construct
DIQMTQSPSSLSASVGDRVTITCQASQDISNYLNWYQQKPGKAPKVLIYDASDLETGVPSRFSGSGSGTDFTFTISSLQPEDIATYYCQQYDILPLTFGPGTKVDIK

SEQ ID NO: 3261 - protein, 112 aa, Artificial Sequence
  Synthetic construct
DVVMTQSPLSLPVTLGQPASISCRSSQSLVYSDGNTYLTWFQQRPGQSPRRLIYKVSNRDSGVPDRFSGSGSGTDFTLKISRVEAEDVGVYYCMQGTHWPPAFGQGTKVEIK

SEQ ID NO: 3262 - protein, 111 aa, Artificial Sequence
  Synthetic construct
QSVLTQPPSVSGAPGQRVTISCTGSSSNIGAGYDVHWYQQLPGAAPKLLIYGNNNRPSGVPDRFSGSKSGPSASLAITGLQAEDEADFYCQSYDSSLTGSVFGGGTKLTVL

SEQ ID NO: 3263 - protein, 108 aa, Artificial Sequence
  Synthetic construct
SYELTQPPSVSVSPGQTARITCFGDAMPKQYAYWYQQKPGQAPVLVIYKDSARPSGIPERFSGSSSGTTVTLTITGVQAEDEADYYCQSADSSVTSRVFGGGTKLTVL

SEQ ID NO: 3264 - protein, 112 aa, Artificial Sequence
  Synthetic construct
DVAMTQSPLSLSVTLGQPASISCRSSQSLVYSDGNNYLNWFQQRPGQSPRRLIYRVSKRDSGVPDRFSGSGSGTDFTLKISRVEAEDVGVYYCMQGTHWPLTFGQGTRLEIK

SEQ ID NO: 3265 - protein, 107 aa, Artificial Sequence
  Synthetic construct
DIQMTQSPSTLSASVGDRVTITCRASQSISSWLAWYQQKPGKAPKLLIYKASSLESGVPSRFSGSGSGTEFTLTISSLQPDDFATYYCQQYNSYSGTFGQGTKLEIK

SEQ ID NO: 3266 - protein, 107 aa, Artificial Sequence
  Synthetic construct
SYELTQSPSVSVSPGQTARITCSGDALPKQFAYWYQQKPGQAPVLVIYKDTERPSGIPERFSGSSSGTTVTLTISGVQAEDEADYYCQSTDSSGSWVFGGGTKLTVL

SEQ ID NO: 3267 - protein, 108 aa, Artificial Sequence
  Synthetic construct
SYELTQPPSVSVSPGQTARITCSGDALPKKYAYWYQQKSGQAPVLVIYEDTKRPSGIPERFSGSSSGTMATLTISGAQVEDEADYYCYSTDSSGNHRVFGGGTKVTVL

SEQ ID NO: 3268 - protein, 107 aa, Artificial Sequence
  Synthetic construct
DIQMTQSPSSVSAFVGDRVTITCRASQGIRSWLAWYQQKPGKAPKLLIYDASSLQSGVPSRFSGSGSGTDFTLTISSLQPEDFATYYCQQAHSFPPTFGGGTRVEIK

SEQ ID NO: 3269 - protein, 108 aa, Artificial Sequence
  Synthetic construct
DIQMTQSPSSLSASVGDRVSITCRASQSISSSLNWYQQKPGKAPKPLIYGASSLQSGVPSRFSGSGSGTDFTLTISSLQPEDFATYYCQQSYSSAPYTFGQGTKLEIK

SEQ ID NO: 3270 - protein, 108 aa, Artificial Sequence
  Synthetic construct
EIVMTQSPATLSVSPGERATLSCRTSQSVSSYLAWYQQKPGQAPRLLIYGASTRATGIPARFSGSGSGTEFTLTISSLQSEDFAFYYCQQYNNWPPLTFGGGTKVEIK

SEQ ID NO: 3271 - protein, 107 aa, Artificial Sequence
  Synthetic construct
DIQMTQSPSTLSASVGDRVTITCRASQSISSWLAWYQQKPGKAPKLLIYKASSLESGVPSRFSGSGSGTEFTLTISSLQPDDFATYYCQQYDSFLWTFGQGTKVDIK

SEQ ID NO: 3272 - protein, 112 aa, Artificial Sequence
  Synthetic construct
QSALTQPASVSGSPGQSITISCTGTSSDVGSYNLVSWYQQNPGKAPKLMIHEGSKRPSGVSNRFSGSKSGNTASLTISGLQAEDEADYYCCSYAGSVTSHVIFGGGTKLTVL

SEQ ID NO: 3273 - protein, 107 aa, Artificial Sequence
  Synthetic construct
EIVLTQSPATLSLSPGERATLSCRASQSLSSSLAWYQRKPGQAPRLLIYDASNRATGIPARFSGSGSGSDFTLTISSLQPEDFAVYYCQQRSNWPLTFGGGTKVEIK

SEQ ID NO: 3274 - protein, 107 aa, Artificial Sequence
  Synthetic construct
EIVMTQSPATLSVSPGERATLSCRASQSVSSNLAWYQQKPGQAPRLLIYGASTRATGIPARFSGSGSGTEFTLTISSLQSEDFAVYYCQQYNNWPCTFGGGTKVEIK

SEQ ID NO: 3275 - protein, 107 aa, Artificial Sequence
  Synthetic construct
DIQMTQSPSTLSASVGDRVTITCRASQRISSWLAWYQQKPGKAPTLLIYKASNLHSGVPSRFSGSGSGTEFTLTISGLQPDDFATYYCQQYDTYSYTFGQGTKLEIK

SEQ ID NO: 3276 - protein, 115 aa, Artificial Sequence
  Synthetic construct
QAVLTQPSSLSASPGASASLTCTLRSGINVGTYRIYWYQQKPGSPPQFLLRYKSDSDYQRGSGVPSRFSGSKDASVNAGILVISGVQSEDEADYYCMIWHSSAVVFGGGTKLTVL

SEQ ID NO: 3277 - protein, 106 aa, Artificial Sequence
  Synthetic construct
SYELTQPPSVSVSPGQTANITCSGDELGDKYACWYQQKPGQSPVLVIHQDTRRPSGIPERFAGSNSGNTATLTISGTQAMDEADYYCQAWDSSNVVFGGGTKLTVL

SEQ ID NO: 3278 - protein, 111 aa, Artificial Sequence
  Synthetic construct
QSVLTQPPSVSGAPGQRVTISCTGSSSNIGAGYDVHWFQQLPGTAPKLLIYGNSNRPSGVPDRFSGSRSGTSASLAITGLQGEDEADYYCQSYDRSLSGSVFGGGTKLTVL

SEQ ID NO: 3279 - protein, 112 aa, Artificial Sequence
  Synthetic construct
AVVMTQSPLSLSVTRGQPASISCRSSQNLEYTDGITYLMWFHQRPGQSPRRLIYKGSNRDSGVPDRFSGSGSGTDFTLKISRVEAEDVGVYYCLQGTHWPLTFGGGTKVEIN

SEQ ID NO: 3280 - protein, 110 aa, Artificial Sequence
  Synthetic construct
QSALTQPASVSGSPGQSITISCTGTSSEVGGYNYVSWYQQHPGKAPKLMIYEVSNRPSGVAHRFSGSKSGNTASLTISGLQAEDEADYYCSSFTSISTWVFGGGTRLTVL

SEQ ID NO: 3281 - protein, 107 aa, Artificial Sequence
  Synthetic construct
SYELTQPPSVSVSPGQTARITCSGDALPKKYAYWYQQKSGQAPVLVIYEDTKRPSGIHGRFSGSSSGTMATLTISGAQVEDEADYYCHSRDSSGNPLFGGGTKLTVL

SEQ ID NO: 3282 - protein, 107 aa, Artificial Sequence; identical to SEQ ID NO: 2687
  Synthetic construct

SEQ ID NO: 3283 - protein, 114 aa, Artificial Sequence
  Synthetic construct
DIVMTQSPLSLPVTPGEPASISCRSSQSLLHSNAYNYLDWYLQKPGQSPQLLIYLGSNRASGVPDRFSGSGSGTDFTLKISRVEAEDVGVYYCMQALQTPPWYTFGQGTKLEIK

SEQ ID NO: 3284 - protein, 108 aa, Artificial Sequence
  Synthetic construct
EIVMTQSPATLSVSPGERATLSCRASQSVSSNLAWYQQKPGQAPRLLIYGASTRATGIPARFSGSGSGTEFTLTISSLQSEDFAVYYCQQYNKWPPLTFGGGTKVEIK

SEQ ID NO: 3285 - protein, 107 aa, Artificial Sequence
  Synthetic construct
EIVLTQSPATLSLSPGERATLSCRASQSVSSYLAWYQQKPGQAPRLLIYDASNRATGIPARFSGSGSGTDFTLTISSLEPEDFAVYYCQQRSNWPQTFGQGTNLEIK

SEQ ID NO: 3286 - protein, 112 aa, Artificial Sequence
  Synthetic construct
DIVMTQSPLSLPVTPGEPASISCRSSQSLLFSNGYTYLNWYLQKPGQSPQLLIYLGSNRASGVPDRFSVSGSGTDFTLIISRVEAEDVGLYYCMQALQTPWTFGQGTKVEIK

SEQ ID NO: 3287 - protein, 107 aa, Artificial Sequence; identical to SEQ ID NO: 2687
  Synthetic construct

SEQ ID NO: 3288 - protein, 108 aa, Artificial Sequence
  Synthetic construct
EIVMTQSPVTLSVSPGERATLSCRASQSVSSNLAWYQQKPGQVPRLLIHGASTRATDIPARFSGSGSGTEFTLTISSLQSDDFAIYYCQQYDDWPLITFGPGTRLEIK

SEQ ID NO: 3289 - protein, 110 aa, Artificial Sequence
  Synthetic construct
QSVLTQPPSVSEAPRQRVTISCSGSSSNFGNNAVNWYQQVPGKAPKLLIYYDDLLPSGVSDRFSGSKSGTSASLAISGLQSEDEAAYYCAAWDDSLNGWVFGGGTKLTVL

SEQ ID NO: 3290 - protein, 106 aa, Artificial Sequence
  Synthetic construct
EIVLTQSPATLSLSPGERATLSCRASQSVSSNLAWYQQKAGQAPRLLIYDASNRATGIPARFSGSGSGTDFTLTISSLEAEDFAVYYCQQRSNWLTFGGGTKVEIK

SEQ ID NO: 3291 - protein, 106 aa, Artificial Sequence
  Synthetic construct
SYELTQPPSVSVSPGQTASITCSGDKLGDKYGCWFQQKPGQSPVVVICQDRKRPSGIPERFSGSNSGTTATLTITGTQAVDEADYYCQAWDSGTVVFGGGTKLTVL

SEQ ID NO: 3292 - protein, 111 aa, Artificial Sequence
  Synthetic construct
QSALTQPRSVTGSPGQSVTISCTGTSSDVGGYNYVSWFQQHPGKAPKLMIYDVSKRPSGVPDRFSGSKSGNTASLSISGLQAEDEAGYYCCSFAGTYTFVVFGGGTKLTVL

SEQ ID NO: 3293 - protein, 110 aa, Artificial Sequence
  Synthetic construct
QSALTQPASVSGSPGQSITISCSGTSSDVGGYNYVSWYQQHPGKAPKLMIYEVSNRPSGVSTRFSGSKSGNTASLTISGLQAEDEADYYCSSYTSSSTVFFGGGTKLTVL

SEQ ID NO: 3294 - protein, 109 aa, Artificial Sequence
  Synthetic construct
SYELTQPPSVSVSPGQTARITCSADALPKQYASWYQQKPGQAPVLVIYKDSERPSGIPERFSGSSSGTTVTLTISGVQAEDEADYYCQSVDSSGTYHWVFGGGTMLTVL

SEQ ID NO: 3295 - protein, 107 aa, Artificial Sequence
  Synthetic construct
EIVMTQSPATLSVSPGERATLSCRASQSVSSSLAWYQQKPGQAPRLLIYGASIRATGIPARFSGSGSGTEFTLTISSLQSEDFAVYYCQKYDDWPPTFGQGTKLEIK

SEQ ID NO: 3296 - protein, 112 aa, Artificial Sequence
  Synthetic construct
DIVMTQTPLSSPVTLGQPASISCRSSQSLVHSDGNTYLSWLQQRPGQPPRLLIYKISNRFSGVPDRFSGSGAGTDFTLKISRVEAEDVGVYYCMQATQFPWTFGQGTRVEIR

SEQ ID NO: 3297 - protein, 109 aa, Artificial Sequence
  Synthetic construct
QSVLTQPPSASGTPGQRVTISCSGSSSNIGSNYVYWYQQLPGTAPKLLIYRNNERPSGVPDRFSGSKSGTSASLAISGLRSEDEGDYYCAAWDDSLRGVFGGGTKLTVI

SEQ ID NO: 3298 - protein, 108 aa, Artificial Sequence
  Synthetic construct
SYELTQPPSVSVSPGQTARFTCSGDAFPKQYAYWYQQKPGQAPVLVIYKDSERPSGIPERFSGSSSGPTVALTISGVQAEDEADYYCQSLDRSGTYVLFGGGTKLTVL

SEQ ID NO: 3299 - protein, 110 aa, Artificial Sequence
  Synthetic construct
QSALTQPASVSASPGQSITISCTGTSSDVGSYNLVSWYQQHPAKAPKLMIYEGIKRPSGVSNRFSGSKSGNTASLTISGLQAEDEADYFCCSYAGFSTFVFGGGTKLTVL

SEQ ID NO: 3300 - protein, 108 aa, Artificial Sequence
  Synthetic construct
SYELTQPPSVSVSPGQTARITCSGDALPKKYAYWYQQKSGQAPVLLIYEDSKRPSGIPERFSGSSSGTMATLTISGAQVEDEADYYCYSTDSSGNSGVFGGGTKLTVL

SEQ ID NO: 3301 - protein, 110 aa, Artificial Sequence
  Synthetic construct
QSALTQPPSASGSPGQSVTISCTGTGSDVGGYNFVSWYQQHPGKAPQLIIYEVTKRPSGVPDRFSGSKSGSTASLTVSGLQAEDEADYYCSSYAGANIYVFGPGTKVTVL

SEQ ID NO: 3302 - protein, 105 aa, Artificial Sequence
  Synthetic construct
DIQMTQSPSTLSASVGDRVTITCRASQSISSRLAWYQQKPGKAPKLLIYKASSLEGGVPSRFSGSGSGTEFTLTISSLQPDDFASYYCQQYNSWTFGRGTKVEFK

SEQ ID NO: 3303 - protein, 107 aa, Artificial Sequence
  Synthetic construct
DIQMTQSPSTLSASVGDRVTITCRARQTISSWLAWYQQKPGKAPKLLIYKASSLESGVPPRFSGSGSGTEFTLTISSLQPDDFATYYCQQYNSYPLTFGGGTKVEIE

SEQ ID NO: 3304 - protein, 110 aa, Artificial Sequence
  Synthetic construct
QSALTQPPSASGSPGQSVTISCTGTSSDVGGYNFVSWYQHHPGKAPKLMISEVTKRPSGVPDRFSGSKSGNTASLTVSGLQVEDEADYYCSSYAGSNNVVFGGGTKLTVL

SEQ ID NO: 3305 - protein, 106 aa, Artificial Sequence
  Synthetic construct
SYELTQPLSVSVALGQTARISCGGNDIGSKSVHWYQQKPGQAPVLVIYRDSIRPSGIPERCSGSNSGNTATLTISRAQDGDEADYYCQVWDSSNWVFGGGTRLTVL

SEQ ID NO: 3306 - protein, 106 aa, Artificial Sequence; identical to SEQ ID NO: 2768
  Synthetic construct

SEQ ID NO: 3307 - protein, 107 aa, Artificial Sequence
  Synthetic construct
SYVLTQPPSVSVAPGQTARITCGGNNIGTKSVHWYQQKPGQAPVLVVYADSDRPSGIPERFSGSNSGNTATLTISRVEAGDEADYYCQVWDSSSDWVFGGGAKLTVL

SEQ ID NO: 3308 - protein, 110 aa, Artificial Sequence
  Synthetic construct
QSMLTQPTSASGTPGQRVTIFCSGSSSNIGSNIVNWYQLLPGTAPKLLIYSDDQRPSGVPDRFSGSKSGTSASLAISGLQSEDEADYYCAAWDDSLNGPVFGTGTKVTVL

SEQ ID NO: 3309 - protein, 103 aa, Artificial Sequence
  Synthetic construct
DIQLTQSPSFLSASVGDRVTITCRASQGIRSNLAWYQQKPGKAPKLLIYAASTLQSGVPSRFSGSGSGTEFTLTISSLQPEDFATYYCQQLGAFGPGTKVDIK

SEQ ID NO: 3310 - protein, 107 aa, Artificial Sequence
  Synthetic construct
DIQMTQSPSSLSASVGDRVTITCQASQVINDYLNWFQQKPGKAPKLLIYDASTLATGVPSRFSGSASGTLFTFTINNLQPEDIATYYCQQYGNLPRSFGPGTKVDVK

SEQ ID NO: 3311 - protein, 112 aa, Artificial Sequence
  Synthetic construct
QSALTQPPSASGSPGQSVTISCTGTSSDVGAYNYVSWYQQHPGKAPKLMIYEVSKRPSGVPDRFSGSKSGNTASLTVSGLQAEDEADYYCSSYAGSNNVNWVFGGGTKLTVL

SEQ ID NO: 3312 - protein, 108 aa, Artificial Sequence
  Synthetic construct
SYELTQPPSVSVSPGQTARITCSGDALPKKFAYWFQQKSGQAPVLVIYEDNKRASGIRERFSGSSSGTVATLTISGAQVEDEGDYYCYSTDSSGNQRVFGGGTKLTVL

SEQ ID NO: 3313 - protein, 10 aa, Artificial Sequence
  Synthetic construct
GGSISSGAYY

SEQ ID NO: 3314 - protein, 8 aa, Artificial Sequence
  Synthetic construct
GGSFSGYY

SEQ ID NO: 3315 - protein, 4 aa, Artificial Sequence
  Synthetic construct
SSFA

SEQ ID NO: 3316 - protein, 8 aa, Artificial Sequence
  Synthetic construct
GYSFSNYW

SEQ ID NO: 3317 - protein, 8 aa, Artificial Sequence
  Synthetic construct
GYTFTTYG

SEQ ID NO: 3318 - protein, 8 aa, Artificial Sequence
  Synthetic construct
GGSISDHY

SEQ ID NO: 3319 - protein, 8 aa, Artificial Sequence
  Synthetic construct
GFTFSVYA

SEQ ID NO: 3320 - protein, 8 aa, Artificial Sequence
  Synthetic construct
GFTFSNYS

SEQ ID NO: 3321 - protein, 8 aa, Artificial Sequence
  Synthetic construct
GYTFTSFY

SEQ ID NO: 3322 - protein, 8 aa, Artificial Sequence
  Synthetic construct
GYTLTELS

SEQ ID NO: 3323 - protein, 8 aa, Artificial Sequence
  Synthetic construct
GFTFSNYA

SEQ ID NO: 3324 - protein, 8 aa, Artificial Sequence
  Synthetic construct
GFTFSSYA

SEQ ID NO: 3325 - protein, 9 aa, Artificial Sequence
  Synthetic construct
GGSITSNNW

SEQ ID NO: 3326 - protein, 10 aa, Artificial Sequence
  Synthetic construct
GGSISSGDYY

SEQ ID NO: 3327 - protein, 8 aa, Artificial Sequence
  Synthetic construct
GYSFISNW

SEQ ID NO: 3328 - protein, 8 aa, Artificial Sequence
  Synthetic construct
GGNFSRYA

SEQ ID NO: 3329 - protein, 8 aa, Artificial Sequence
  Synthetic construct
GFTFSNYW

SEQ ID NO: 3330 - protein, 8 aa, Artificial Sequence
  Synthetic construct
GFTFSSYG

SEQ ID NO: 3331 - protein, 8 aa, Artificial Sequence
  Synthetic construct
GYTFTSYG

SEQ ID NO: 3332 - protein, 8 aa, Artificial Sequence
  Synthetic construct
GFTFSSNA

SEQ ID NO: 3333 - protein, 8 aa, Artificial Sequence
  Synthetic construct
GFTFSTYA

SEQ ID NO: 3334 - protein, 8 aa, Artificial Sequence
  Synthetic construct
GFIFSNYG

SEQ ID NO: 3335 - protein, 8 aa, Artificial Sequence
  Synthetic construct
GGTFSSYS

SEQ ID NO: 3336 - protein, 8 aa, Artificial Sequence
  Synthetic construct
GLTFSSYA

SEQ ID NO: 3337 - protein, 8 aa, Artificial Sequence
  Synthetic construct
GFTFSSYA

SEQ ID NO: 3338 - protein, 10 aa, Artificial Sequence
  Synthetic construct
GFSFSTSRGG

SEQ ID NO: 3339 - protein, 8 aa, Artificial Sequence
  Synthetic construct
GFTFSSYD

SEQ ID NO: 3340 - protein, 8 aa, Artificial Sequence
  Synthetic construct
GGPFSSYA

SEQ ID NO: 3341 - protein, 10 aa, Artificial Sequence
  Synthetic construct
GGSISSSTYY

SEQ ID NO: 3342 - protein, 8 aa, Artificial Sequence
  Synthetic construct
GYTFSNYI

SEQ ID NO: 3343 - protein, 8 aa, Artificial Sequence
  Synthetic construct
GGTFSSYA

SEQ ID NO: 3344 - protein, 10 aa, Artificial Sequence
  Synthetic construct
GGSITSGIYY

SEQ ID NO: 3345 - protein, 8 aa, Artificial Sequence
  Synthetic construct
GYIFTSYG

SEQ ID NO: 3346 - protein, 8 aa, Artificial Sequence
  Synthetic construct
GFIFSNTW

SEQ ID NO: 3347 - protein, 8 aa, Artificial Sequence
  Synthetic construct
GYTFTSYA

SEQ ID NO: 3348 - protein, 8 aa, Artificial Sequence
  Synthetic construct
GFTFSSYS

SEQ ID NO: 3349 - protein, 8 aa, Artificial Sequence
  Synthetic construct
GFTFDDYA

SEQ ID NO: 3350 - protein, 8 aa, Artificial Sequence
  Synthetic construct
GFIFSSYS

SEQ ID NO: 3351 - protein, 8 aa, Artificial Sequence
  Synthetic construct
GFTFSNYG

SEQ ID NO: 3352 - protein, 8 aa, Artificial Sequence
  Synthetic construct
GYTFTSYA

SEQ ID NO: 3353 - protein, 8 aa, Artificial Sequence
  Synthetic construct
GFTFSDYY

SEQ ID NO: 3354 - protein, 8 aa, Artificial Sequence
  Synthetic construct
GFTFSAYS

SEQ ID NO: 3355 - protein, 10 aa, Artificial Sequence
  Synthetic construct
GASISSSSYY

SEQ ID NO: 3356 - protein, 8 aa, Artificial Sequence
  Synthetic construct
GFTLSTYD

SEQ ID NO: 3357 - protein, 8 aa, Artificial Sequence
  Synthetic construct
GFTFTTSA

SEQ ID NO: 3358 - protein, 8 aa, Artificial Sequence
  Synthetic construct
GFPFTTYA

SEQ ID NO: 3359 - protein, 8 aa, Artificial Sequence
  Synthetic construct
GFSFSTYA

SEQ ID NO: 3360 - protein, 8 aa, Artificial Sequence
  Synthetic construct
GDTFSSYT

SEQ ID NO: 3361 - protein, 10 aa, Artificial Sequence
  Synthetic construct
GDSISIGDYY

SEQ ID NO: 3362 - protein, 8 aa, Artificial Sequence
  Synthetic construct
GFTFNNYA

SEQ ID NO: 3363 - protein, 10 aa, Artificial Sequence
  Synthetic construct
GFSLTSTGVG

SEQ ID NO: 3364 - protein, 10 aa, Artificial Sequence
  Synthetic construct
GDSISGGDYY

SEQ ID NO: 3365 - protein, 8 aa, Artificial Sequence
  Synthetic construct
GFTFSTFT

SEQ ID NO: 3366 - protein, 8 aa, Artificial Sequence
  Synthetic construct
GYTFNTYV

SEQ ID NO: 3367 - protein, 8 aa, Artificial Sequence
  Synthetic construct
GFSFSNFG

SEQ ID NO: 3368 - protein, 8 aa, Artificial Sequence
  Synthetic construct
GGSISPYY

SEQ ID NO: 3369 - protein, 10 aa, Artificial Sequence
  Synthetic construct
GGSVSSGDYY

SEQ ID NO: 3370 - protein, 8 aa, Artificial Sequence
  Synthetic construct
GFTFSSYS

SEQ ID NO: 3371 - protein, 8 aa, Artificial Sequence
  Synthetic construct
GGTFSSYT

SEQ ID NO: 3372 - protein, 8 aa, Artificial Sequence
  Synthetic construct
GFTFSSYG

SEQ ID NO: 3373 - protein, 8 aa, Artificial Sequence
  Synthetic construct
GYSFATNW

SEQ ID NO: 3374 - protein, 8 aa, Artificial Sequence
  Synthetic construct
GFTFSTYG

SEQ ID NO: 3375 - protein, 8 aa, Artificial Sequence
  Synthetic construct
GYTFTSYP

SEQ ID NO: 3376 - protein, 8 aa, Artificial Sequence
  Synthetic construct
GDSISSYY

SEQ ID NO: 3377 - protein, 10 aa, Artificial Sequence
  Synthetic construct
GGSISSNGYY

SEQ ID NO: 3378 - protein, 9 aa, Artificial Sequence
  Synthetic construct
GYSIRSGYF

SEQ ID NO: 3379 - protein, 8 aa, Artificial Sequence
  Synthetic construct
GGSITSYY

SEQ ID NO: 3380 - protein, 8 aa, Artificial Sequence
  Synthetic construct
GFTFSNFP

SEQ ID NO: 3381 - protein, 8 aa, Artificial Sequence
  Synthetic construct
GFSFSSFW

SEQ ID NO: 3382 - protein, 8 aa, Artificial Sequence
  Synthetic construct
GFTFSIYW

SEQ ID NO: 3383 - protein, 8 aa, Artificial Sequence
  Synthetic construct
GSSFTSYW

SEQ ID NO: 3384 - protein, 8 aa, Artificial Sequence
  Synthetic construct
GYSFTKYW

SEQ ID NO: 3385 - protein, 8 aa, Artificial Sequence
  Synthetic construct
GFTFSNYA

SEQ ID NO: 3386 - protein, 8 aa, Artificial Sequence
  Synthetic construct
GFTFSSYA

SEQ ID NO: 3387 - protein, 8 aa, Artificial Sequence
  Synthetic construct
GYTFTDYA

SEQ ID NO: 3388 - protein, 8 aa, Artificial Sequence
  Synthetic construct
GFTFADYA

SEQ ID NO: 3389 - protein, 10 aa, Artificial Sequence
  Synthetic construct
GFSLSTSGEG

SEQ ID NO: 3390 - protein, 8 aa, Artificial Sequence
  Synthetic construct
GFTVSNNY

SEQ ID NO: 3391 - protein, 8 aa, Artificial Sequence
  Synthetic construct
GFTFSSYG

SEQ ID NO: 3392 - protein, 8 aa, Artificial Sequence
  Synthetic construct
GGTFSSYA

SEQ ID NO: 3393 - protein, 8 aa, Artificial Sequence
  Synthetic construct
GFTFSSYG

SEQ ID NO: 3394 - protein, 8 aa, Artificial Sequence
  Synthetic construct
GFTFNTYA

SEQ ID NO: 3395 - protein, 10 aa, Artificial Sequence
  Synthetic construct
GDSVSSNSAV

SEQ ID NO: 3396 - protein, 10 aa, Artificial Sequence
  Synthetic construct
GLSLNNGKIH

SEQ ID NO: 3397 - protein, 8 aa, Artificial Sequence
  Synthetic construct
GITVTTNF

SEQ ID NO: 3398 - protein, 8 aa, Artificial Sequence
  Synthetic construct
GFTFSSYW

SEQ ID NO: 3399 - protein, 8 aa, Artificial Sequence
  Synthetic construct
GFTFSSYA

SEQ ID NO: 3400 - protein, 8 aa, Artificial Sequence
  Synthetic construct
GYTFTSST

SEQ ID NO: 3401 - protein, 8 aa, Artificial Sequence
  Synthetic construct
GFTFSSYA

SEQ ID NO: 3402 - protein, 8 aa, Artificial Sequence
  Synthetic construct
GFTFSSYA

SEQ ID NO: 3403 - protein, 10 aa, Artificial Sequence
  Synthetic construct
GGSISSSSYY

SEQ ID NO: 3404 - protein, 8 aa, Artificial Sequence
  Synthetic construct
GFTFSNFP

SEQ ID NO: 3405 - protein, 8 aa, Artificial Sequence
  Synthetic construct
GYTLTELA

SEQ ID NO: 3406 - protein, 8 aa, Artificial Sequence
  Synthetic construct
GYSFSSSW

SEQ ID NO: 3407 - protein, 8 aa, Artificial Sequence
  Synthetic construct
GYTFTSYA

SEQ ID NO: 3408 - protein, 8 aa, Artificial Sequence
  Synthetic construct
GFTFSTYA

SEQ ID NO: 3409 - protein, 8 aa, Artificial Sequence
  Synthetic construct
GFTFSSYA

SEQ ID NO: 3410 - protein, 10 aa, Artificial Sequence
  Synthetic construct
GDSIKSVSYY

SEQ ID NO: 3411 - protein, 8 aa, Artificial Sequence
  Synthetic construct
GFTFSSYA

SEQ ID NO: 3412 - protein, 10 aa, Artificial Sequence
  Synthetic construct
GGSIGSSSYY

SEQ ID NO: 3413 - protein, 8 aa, Artificial Sequence
  Synthetic construct
EIIVSRNY

SEQ ID NO: 3414 - protein, 8 aa, Artificial Sequence
  Synthetic construct
GFMFSSYA

SEQ ID NO: 3415 - protein, 8 aa, Artificial Sequence
  Synthetic construct
GFTFSVHY

SEQ ID NO: 3416 - protein, 10 aa, Artificial Sequence
  Synthetic construct
GGSINSASYY

SEQ ID NO: 3417 - protein, 10 aa, Artificial Sequence
  Synthetic construct
GFSLSTRGVG

SEQ ID NO: 3418 - protein, 8 aa, Artificial Sequence
  Synthetic construct
GFTFSRYG

SEQ ID NO: 3419 - protein, 10 aa, Artificial Sequence
  Synthetic construct
GGSISSGSYF

SEQ ID NO: 3420 - protein, 8 aa, Artificial Sequence
  Synthetic construct
GFTFSSSA

SEQ ID NO: 3421 - protein, 8 aa, Artificial Sequence
  Synthetic construct
GYNFSNYY

SEQ ID NO: 3422 - protein, 8 aa, Artificial Sequence
  Synthetic construct
GFIFSPYN

SEQ ID NO: 3423 - protein, 8 aa, Artificial Sequence
  Synthetic construct
GYTFTGYY

SEQ ID NO: 3424 - protein, 8 aa, Artificial Sequence
  Synthetic construct
GFTFSNYA

SEQ ID NO: 3425 - protein, 8 aa, Artificial Sequence
  Synthetic construct
GFAFSSSW

SEQ ID NO: 3426 - protein, 8 aa, Artificial Sequence
  Synthetic construct
GFTFDDYT

SEQ ID NO: 3427 - protein, 8 aa, Artificial Sequence
  Synthetic construct
GYTFTTYD

SEQ ID NO: 3428 - protein, 8 aa, Artificial Sequence
  Synthetic construct
GFTFSNYD

SEQ ID NO: 3429 - protein, 10 aa, Artificial Sequence
  Synthetic construct
GVSINSTDSY

SEQ ID NO: 3430 - protein, 8 aa, Artificial Sequence
  Synthetic construct
GLIVSSNY

SEQ ID NO: 3431 - protein, 8 aa, Artificial Sequence
  Synthetic construct
GFNFSTYA

SEQ ID NO: 3432 - protein, 8 aa, Artificial Sequence
  Synthetic construct
GYTISEVS

SEQ ID NO: 3433 - protein, 8 aa, Artificial Sequence
  Synthetic construct
GFIFSTYT

SEQ ID NO: 3434 - protein, 8 aa, Artificial Sequence
  Synthetic construct
GFTFSSYA

SEQ ID NO: 3435 - protein, 10 aa, Artificial Sequence
  Synthetic construct
GGSISSGDYY

SEQ ID NO: 3436 - protein, 10 aa, Artificial Sequence
  Synthetic construct
GDSVASNSAA

SEQ ID NO: 3437 - protein, 8 aa, Artificial Sequence
  Synthetic construct
GGSFGLYY

SEQ ID NO: 3438 - protein, 8 aa, Artificial Sequence
  Synthetic construct
GDTFSNYA

SEQ ID NO: 3439 - protein, 8 aa, Artificial Sequence
  Synthetic construct
GFTFRTYG

SEQ ID NO: 3440 - protein, 8 aa, Artificial Sequence
  Synthetic construct
GGTFSSFA

SEQ ID NO: 3441 - protein, 8 aa, Artificial Sequence
  Synthetic construct
GFTFSSYS

SEQ ID NO: 3442 - protein, 8 aa, Artificial Sequence
  Synthetic construct
GGTFSTYT

SEQ ID NO: 3443 - protein, 8 aa, Artificial Sequence
  Synthetic construct
GYTFSSCA

SEQ ID NO: 3444 - protein, 8 aa, Artificial Sequence
  Synthetic construct
GFTFSTYA

SEQ ID NO: 3445 - protein, 8 aa, Artificial Sequence
  Synthetic construct
GGTFSSYA

SEQ ID NO: 3446 - protein, 8 aa, Artificial Sequence
  Synthetic construct
GFAFNNYG

SEQ ID NO: 3447 - protein, 8 aa, Artificial Sequence
  Synthetic construct
GFTFNTYA

SEQ ID NO: 3448 - protein, 8 aa, Artificial Sequence
  Synthetic construct
GFNFRSYA

SEQ ID NO: 3449 - protein, 8 aa, Artificial Sequence
  Synthetic construct
GFTFEDFA

SEQ ID NO: 3450 - protein, 8 aa, Artificial Sequence
  Synthetic construct
GGSISDYY

SEQ ID NO: 3451 - protein, 8 aa, Artificial Sequence
  Synthetic construct
GYTLTSYY

SEQ ID NO: 3452 - protein, 8 aa, Artificial Sequence
  Synthetic construct
GFTFGSYG

SEQ ID NO: 3453 - protein, 8 aa, Artificial Sequence
  Synthetic construct
GYTFTNYY

SEQ ID NO: 3454 - protein, 8 aa, Artificial Sequence
  Synthetic construct
GFTFSSYW

SEQ ID NO: 3455 - protein, 8 aa, Artificial Sequence
  Synthetic construct
GGTFSSFT

SEQ ID NO: 3456 - protein, 8 aa, Artificial Sequence
  Synthetic construct
GFTFAAYA

SEQ ID NO: 3457 - protein, 9 aa, Artificial Sequence
  Synthetic construct
GGSISSSNW

SEQ ID NO: 3458 - protein, 8 aa, Artificial Sequence
  Synthetic construct
GGTFSSYA

SEQ ID NO: 3459 - protein, 8 aa, Artificial Sequence
  Synthetic construct
GYTFTNYA

SEQ ID NO: 3460 - protein, 8 aa, Artificial Sequence
  Synthetic construct
GFTFSFYW

SEQ ID NO: 3461 - protein, 8 aa, Artificial Sequence
  Synthetic construct
GFTFSSYA

SEQ ID NO: 3462 - protein, 8 aa, Artificial Sequence
  Synthetic construct
GYTLTEIS

SEQ ID NO: 3463 - protein, 8 aa, Artificial Sequence
  Synthetic construct
GYRFTNYV

SEQ ID NO: 3464 - protein, 8 aa, Artificial Sequence
  Synthetic construct
GFTFSSYA

SEQ ID NO: 3465 - protein, 8 aa, Artificial Sequence
  Synthetic construct
GDTFTSHY

SEQ ID NO: 3466 - protein, 8 aa, Artificial Sequence
  Synthetic construct
GYTFNTYW

SEQ ID NO: 3467 - protein, 8 aa, Artificial Sequence
  Synthetic construct
GGSFSGYY

SEQ ID NO: 3468 - protein, 8 aa, Artificial Sequence
  Synthetic construct
GYTLDELP

SEQ ID NO: 3469 - protein, 8 aa, Artificial Sequence
  Synthetic construct
EFTFSDYY

SEQ ID NO: 3470 - protein, 10 aa, Artificial Sequence
  Synthetic construct
GASISSDNYY

SEQ ID NO: 3471 - protein, 8 aa, Artificial Sequence
  Synthetic construct
GFTFSSYW

SEQ ID NO: 3472 - protein, 8 aa, Artificial Sequence
  Synthetic construct
GFTFSTYA

SEQ ID NO: 3473 - protein, 8 aa, Artificial Sequence
  Synthetic construct
GGTFSSYG

SEQ ID NO: 3474 - protein, 10 aa, Artificial Sequence
  Synthetic construct
GGSVSSGDYY

SEQ ID NO: 3475 - protein, 10 aa, Artificial Sequence
  Synthetic construct
GGSISSGGHY

SEQ ID NO: 3476 - protein, 8 aa, Artificial Sequence
  Synthetic construct
GYTFTSYY

SEQ ID NO: 3477 - protein, 10 aa, Artificial Sequence
  Synthetic construct
GVSINSSDSY

SEQ ID NO: 3478 - protein, 8 aa, Artificial Sequence
  Synthetic construct
GYTFNRFG

SEQ ID NO: 3479 - protein, 8 aa, Artificial Sequence
  Synthetic construct
GFTFSSYA

SEQ ID NO: 3480 - protein, 8 aa, Artificial Sequence
  Synthetic construct
GFTFSSSV

SEQ ID NO: 3481 - protein, 8 aa, Artificial Sequence
  Synthetic construct
GFTFSTYA

SEQ ID NO: 3482 - protein, 8 aa, Artificial Sequence
  Synthetic construct
GFTFSSYG

SEQ ID NO: 3483 - protein, 8 aa, Artificial Sequence
  Synthetic construct
GGSFSGYY

SEQ ID NO: 3484 - protein, 8 aa, Artificial Sequence
  Synthetic construct
GFTFTSSA

SEQ ID NO: 3485 - protein, 10 aa, Artificial Sequence
  Synthetic construct
GGSISSSSYY

SEQ ID NO: 3486 - protein, 8 aa, Artificial Sequence
  Synthetic construct
GFTFSGSA

SEQ ID NO: 3487 - protein, 8 aa, Artificial Sequence
  Synthetic construct
GFTFSVHW

SEQ ID NO: 3488 - protein, 8 aa, Artificial Sequence
  Synthetic construct
GFTFSSYD

SEQ ID NO: 3489 - protein, 8 aa, Artificial Sequence
  Synthetic construct
GYTFTSNW

SEQ ID NO: 3490 - protein, 8 aa, Artificial Sequence
  Synthetic construct
GFTFRGYA

SEQ ID NO: 3491 - protein, 8 aa, Artificial Sequence
  Synthetic construct
GFTFSSYS

SEQ ID NO: 3492 - protein, 8 aa, Artificial Sequence
  Synthetic construct
GFTFRSYG

SEQ ID NO: 3493 - protein, 8 aa, Artificial Sequence
  Synthetic construct
GASFSDFY

SEQ ID NO: 3494 - protein, 8 aa, Artificial Sequence
  Synthetic construct
GGSFGTYY

SEQ ID NO: 3495 - protein, 8 aa, Artificial Sequence
  Synthetic construct
GFTFEDFD

SEQ ID NO: 3496 - protein, 9 aa, Artificial Sequence
  Synthetic construct
GGSISSINW

SEQ ID NO: 3497 - protein, 8 aa, Artificial Sequence
  Synthetic construct
GYTFTSYY

SEQ ID NO: 3498 - protein, 8 aa, Artificial Sequence
  Synthetic construct
GYTFTSYG

SEQ ID NO: 3499 - protein, 8 aa, Artificial Sequence
  Synthetic construct
GFTFSSYA

SEQ ID NO: 3500 - protein, 8 aa, Artificial Sequence
  Synthetic construct
GFTFSSYA

SEQ ID NO: 3501 - protein, 8 aa, Artificial Sequence
  Synthetic construct
GYTFTTYA

SEQ ID NO: 3502 - protein, 8 aa, Artificial Sequence
  Synthetic construct
GFTFSNYW

SEQ ID NO: 3503 - protein, 8 aa, Artificial Sequence
  Synthetic construct
GYSFASYW

SEQ ID NO: 3504 - protein, 10 aa, Artificial Sequence
  Synthetic construct
GGSISSGSYY

SEQ ID NO: 3505 - protein, 10 aa, Artificial Sequence
  Synthetic construct
GGSISSSSDY

SEQ ID NO: 3506 - protein, 8 aa, Artificial Sequence
  Synthetic construct
GYPFPNYA

SEQ ID NO: 3507 - protein, 8 aa, Artificial Sequence
  Synthetic construct
GLNVSNSY

SEQ ID NO: 3508 - protein, 8 aa, Artificial Sequence
  Synthetic construct
GYTFTDYY

SEQ ID NO: 3509 - protein, 8 aa, Artificial Sequence
  Synthetic construct
GGTFSTYA

SEQ ID NO: 3510 - protein, 8 aa, Artificial Sequence
  Synthetic construct
GYIFTSYD

SEQ ID NO: 3511 - protein, 8 aa, Artificial Sequence
  Synthetic construct
GYSFTSYW

SEQ ID NO: 3512 - protein, 8 aa, Artificial Sequence
  Synthetic construct
GGTFSSYT

SEQ ID NO: 3513 - protein, 8 aa, Artificial Sequence
  Synthetic construct
GFTFSRYG

SEQ ID NO: 3514 - protein, 8 aa, Artificial Sequence
  Synthetic construct
GYTLPELS

SEQ ID NO: 3515 - protein, 8 aa, Artificial Sequence
  Synthetic construct
GYTFTSYG

SEQ ID NO: 3516 - protein, 8 aa, Artificial Sequence
  Synthetic construct
GFTFSRYG

SEQ ID NO: 3517 - protein, 8 aa, Artificial Sequence
  Synthetic construct
GFSFSTYG

SEQ ID NO: 3518 - protein, 8 aa, Artificial Sequence
  Synthetic construct
GFDFTSYW

SEQ ID NO: 3519 - protein, 8 aa, Artificial Sequence
  Synthetic construct
GFTFSTYA

SEQ ID NO: 3520 - protein, 10 aa, Artificial Sequence
  Synthetic construct
GGSISSGSYY

SEQ ID NO: 3521 - protein, 8 aa, Artificial Sequence
  Synthetic construct
GYTFTSYT

SEQ ID NO: 3522 - protein, 10 aa, Artificial Sequence
  Synthetic construct
GFSLSTGGVG

SEQ ID NO: 3523 - protein, 8 aa, Artificial Sequence
  Synthetic construct
GFTFSSYG

SEQ ID NO: 3524 - protein, 8 aa, Artificial Sequence
  Synthetic construct
GITFSGYW

SEQ ID NO: 3525 - protein, 8 aa, Artificial Sequence
  Synthetic construct
GFSVRSNY

SEQ ID NO: 3526 - protein, 8 aa, Artificial Sequence
  Synthetic construct
GFTFSSNA

SEQ ID NO: 3527 - protein, 8 aa, Artificial Sequence
  Synthetic construct
GGSISSYY

SEQ ID NO: 3528 - protein, 8 aa, Artificial Sequence
  Synthetic construct
GYTFTDYY

SEQ ID NO: 3529 - protein, 8 aa, Artificial Sequence
  Synthetic construct
GGTLSNFA

SEQ ID NO: 3530 - protein, 8 aa, Artificial Sequence
  Synthetic construct
GFTFSNYS

SEQ ID NO: 3531 - protein, 8 aa, Artificial Sequence
  Synthetic construct
GFTLSSYS

SEQ ID NO: 3532 - protein, 8 aa, Artificial Sequence
  Synthetic construct
GFTFSSYA

SEQ ID NO: 3533 - protein, 8 aa, Artificial Sequence
  Synthetic construct
GGTFSSYI

SEQ ID NO: 3534 - protein, 8 aa, Artificial Sequence
  Synthetic construct
GVIFRNAW

SEQ ID NO: 3535 - protein, 8 aa, Artificial Sequence
  Synthetic construct
GFTLTELS

SEQ ID NO: 3536 - protein, 8 aa, Artificial Sequence
  Synthetic construct
GNTFTNFA

SEQ ID NO: 3537 - protein, 8 aa, Artificial Sequence
  Synthetic construct
GYTLPELS

SEQ ID NO: 3538 - protein, 10 aa, Artificial Sequence
  Synthetic construct
GFSLSNAIMG

SEQ ID NO: 3539 - protein, 8 aa, Artificial Sequence
  Synthetic construct
GVPIVNYY

SEQ ID NO: 3540 - protein, 10 aa, Artificial Sequence
  Synthetic construct
GVSISSSSSF

SEQ ID NO: 3541 - protein, 8 aa, Artificial Sequence
  Synthetic construct
GFTFDDYA

SEQ ID NO: 3542 - protein, 8 aa, Artificial Sequence
  Synthetic construct
GGSFSGYY

SEQ ID NO: 3543 - protein, 8 aa, Artificial Sequence
  Synthetic construct
GFTFSTYG

SEQ ID NO: 3544 - protein, 8 aa, Artificial Sequence
  Synthetic construct
GYTFTSYG

SEQ ID NO: 3545 - protein, 10 aa, Artificial Sequence
  Synthetic construct
GGSISGGSFY

SEQ ID NO: 3546 - protein, 8 aa, Artificial Sequence
  Synthetic construct
GFTFSTYA

SEQ ID NO: 3547 - protein, 8 aa, Artificial Sequence
  Synthetic construct
GFTFSSYS

SEQ ID NO: 3548 - protein, 8 aa, Artificial Sequence
  Synthetic construct
GGSISTYY

SEQ ID NO: 3549 - protein, 8 aa, Artificial Sequence
  Synthetic construct
GLTVSSNY

SEQ ID NO: 3550 - protein, 8 aa, Artificial Sequence
  Synthetic construct
GGTFSTYA

SEQ ID NO: 3551 - protein, 8 aa, Artificial Sequence
  Synthetic construct
GYTLIELS

SEQ ID NO: 3552 - protein, 10 aa, Artificial Sequence
  Synthetic construct
GGSISGGGHY

SEQ ID NO: 3553 - protein, 8 aa, Artificial Sequence
  Synthetic construct
GFTFSNYA

SEQ ID NO: 3554 - protein, 8 aa, Artificial Sequence
  Synthetic construct
GFTFNSFA

SEQ ID NO: 3555 - protein, 8 aa, Artificial Sequence
  Synthetic construct
GFIFSDFA

SEQ ID NO: 3556 - protein, 10 aa, Artificial Sequence
  Synthetic construct
GVSISSSNYY

SEQ ID NO: 3557 - protein, 8 aa, Artificial Sequence
  Synthetic construct
GITFNEYA

SEQ ID NO: 3558 - protein, 8 aa, Artificial Sequence
  Synthetic construct
GYTFTKYA

SEQ ID NO: 3559 - protein, 8 aa, Artificial Sequence
  Synthetic construct
GFTFSLYW

SEQ ID NO: 3560 - protein, 8 aa, Artificial Sequence
  Synthetic construct
GYTFTSYA

SEQ ID NO: 3561 - protein, 9 aa, Artificial Sequence
  Synthetic construct
GGSISSSHW

SEQ ID NO: 3562 - protein, 8 aa, Artificial Sequence
  Synthetic construct
GFTFISYS

SEQ ID NO: 3563 - protein, 8 aa, Artificial Sequence
  Synthetic construct
GFTFINYA

SEQ ID NO: 3564 - protein, 10 aa, Artificial Sequence
  Synthetic construct
GGSISSSSYY

SEQ ID NO: 3565 - protein, 8 aa, Artificial Sequence
  Synthetic construct
GYTFTSYA

SEQ ID NO: 3566 - protein, 9 aa, Artificial Sequence
  Synthetic construct
GGSISSSHW

SEQ ID NO: 3567 - protein, 8 aa, Artificial Sequence
  Synthetic construct
GFTFSTYA

SEQ ID NO: 3568 - protein, 8 aa, Artificial Sequence
  Synthetic construct
GGTFSSYA

SEQ ID NO: 3569 - protein, 8 aa, Artificial Sequence
  Synthetic construct
GYSFTSYG

SEQ ID NO: 3570 - protein, 8 aa, Artificial Sequence
  Synthetic construct
GFTFSSYG

SEQ ID NO: 3571 - protein, 8 aa, Artificial Sequence
  Synthetic construct
QFIFSDYY

SEQ ID NO: 3572 - protein, 8 aa, Artificial Sequence
  Synthetic construct
GYTLSELP

SEQ ID NO: 3573 - protein, 8 aa, Artificial Sequence
  Synthetic construct
GFTVSSNY

SEQ ID NO: 3574 - protein, 8 aa, Artificial Sequence
  Synthetic construct
GLTVSRNY

SEQ ID NO: 3575 - protein, 8 aa, Artificial Sequence
  Synthetic construct
GYTFTNYA

SEQ ID NO: 3576 - protein, 8 aa, Artificial Sequence
  Synthetic construct
GGSFSSPA

SEQ ID NO: 3577 - protein, 8 aa, Artificial Sequence
  Synthetic construct
GYTFTNYD

SEQ ID NO: 3578 - protein, 8 aa, Artificial Sequence
  Synthetic construct
GFTFSDYY

SEQ ID NO: 3579 - protein, 8 aa, Artificial Sequence
  Synthetic construct
GFTFSDYY

SEQ ID NO: 3580 - protein, 8 aa, Artificial Sequence
  Synthetic construct
GHTLIRHA

SEQ ID NO: 3581 - protein, 8 aa, Artificial Sequence
  Synthetic construct
GGIFSVSA

SEQ ID NO: 3582 - protein, 8 aa, Artificial Sequence
  Synthetic construct
GFTFSNYG

SEQ ID NO: 3583 - protein, 9 aa, Artificial Sequence
  Synthetic construct
GYSISSGYY

SEQ ID NO: 3584 - protein, 10 aa, Artificial Sequence
  Synthetic construct
GGSIINGGYY

SEQ ID NO: 3585 - protein, 10 aa, Artificial Sequence
  Synthetic construct
GGSITSGGYY

SEQ ID NO: 3586 - protein, 8 aa, Artificial Sequence
  Synthetic construct
GYSYTNYW

SEQ ID NO: 3587 - protein, 8 aa, Artificial Sequence
  Synthetic construct
GYTFTNYG

SEQ ID NO: 3588 - protein, 8 aa, Artificial Sequence
  Synthetic construct
GFTFRSYA

SEQ ID NO: 3589 - protein, 8 aa, Artificial Sequence
  Synthetic construct
GGTFSSHA

SEQ ID NO: 3590 - protein, 8 aa, Artificial Sequence
  Synthetic construct
GYTFTGHA

SEQ ID NO: 3591 - protein, 8 aa, Artificial Sequence
  Synthetic construct
GFFFSNYD

SEQ ID NO: 3592 - protein, 8 aa, Artificial Sequence
  Synthetic construct
GYTFSSYW

SEQ ID NO: 3593 - protein, 8 aa, Artificial Sequence
  Synthetic construct
VFTVSRNY

SEQ ID NO: 3594 - protein, 8 aa, Artificial Sequence
  Synthetic construct
GFTFSNYA

SEQ ID NO: 3595 - protein, 8 aa, Artificial Sequence
  Synthetic construct
GFIFSSNW

SEQ ID NO: 3596 - protein, 8 aa, Artificial Sequence
  Synthetic construct
GYSFTSYW

SEQ ID NO: 3597 - protein, 8 aa, Artificial Sequence
  Synthetic construct
GFSFSDFA

SEQ ID NO: 3598 - protein, 10 aa, Artificial Sequence
  Synthetic construct
GGSISSSSYY

SEQ ID NO: 3599 - protein, 8 aa, Artificial Sequence
  Synthetic construct
GVTVSANY

SEQ ID NO: 3600 - protein, 8 aa, Artificial Sequence
  Synthetic construct
GYSFTDYW

SEQ ID NO: 3601 - protein, 8 aa, Artificial Sequence
  Synthetic construct
GFTFSSYW

SEQ ID NO: 3602 - protein, 8 aa, Artificial Sequence
  Synthetic construct
GYTFMSYG

SEQ ID NO: 3603 - protein, 8 aa, Artificial Sequence
  Synthetic construct
GYTLPNYG

SEQ ID NO: 3604 - protein, 8 aa, Artificial Sequence
  Synthetic construct
GYTFTSYD

SEQ ID NO: 3605 - protein, 8 aa, Artificial Sequence
  Synthetic construct
GFTFSAYW

SEQ ID NO: 3606 - protein, 8 aa, Artificial Sequence
  Synthetic construct
GVIFRNAW

SEQ ID NO: 3607 - protein, 8 aa, Artificial Sequence
  Synthetic construct
GFSFNIYW

SEQ ID NO: 3608 - protein, 8 aa, Artificial Sequence
  Synthetic construct
GYTFTNYY

SEQ ID NO: 3609 - protein, 8 aa, Artificial Sequence
  Synthetic construct
GGSFSGYH

SEQ ID NO: 3610 - protein, 10 aa, Artificial Sequence
  Synthetic construct
GASINWGSYY

SEQ ID NO: 3611 - protein, 8 aa, Artificial Sequence
  Synthetic construct
RGAFSGYF

SEQ ID NO: 3612 - protein, 8 aa, Artificial Sequence
  Synthetic construct
GGAISNSY

SEQ ID NO: 3613 - protein, 8 aa, Artificial Sequence
  Synthetic construct
GFSLSSCA

SEQ ID NO: 3614 - protein, 8 aa, Artificial Sequence
  Synthetic construct
GGSIYHYY

SEQ ID NO: 3615 - protein, 8 aa, Artificial Sequence
  Synthetic construct
GFTFPSSA

SEQ ID NO: 3616 - protein, 8 aa, Artificial Sequence
  Synthetic construct
GFTFTSYT

SEQ ID NO: 3617 - protein, 8 aa, Artificial Sequence
  Synthetic construct
GFTFSRHA

SEQ ID NO: 3618 - protein, 8 aa, Artificial Sequence
  Synthetic construct
GGTFSSYA

SEQ ID NO: 3619 - protein, 8 aa, Artificial Sequence
  Synthetic construct
GFTFSNYA

SEQ ID NO: 3620 - protein, 10 aa, Artificial Sequence
  Synthetic construct
GFSLDTIGVA

SEQ ID NO: 3621 - protein, 8 aa, Artificial Sequence
  Synthetic construct
GYTFTGHY

SEQ ID NO: 3622 - protein, 10 aa, Artificial Sequence
  Synthetic construct
GFSLTSRGVG

SEQ ID NO: 3623 - protein, 8 aa, Artificial Sequence
  Synthetic construct
GFRFSIYA

SEQ ID NO: 3624 - protein, 10 aa, Artificial Sequence
  Synthetic construct
GDSVSSSSVS

SEQ ID NO: 3625 - protein, 8 aa, Artificial Sequence
  Synthetic construct
GFTFNSYS

SEQ ID NO: 3626 - protein, 8 aa, Artificial Sequence
  Synthetic construct
GFTFSNYA

SEQ ID NO: 3627 - protein, 9 aa, Artificial Sequence
  Synthetic construct
GDSIRSSNW

SEQ ID NO: 3628 - protein, 8 aa, Artificial Sequence
  Synthetic construct
GFTFNTYN

SEQ ID NO: 3629 - protein, 8 aa, Artificial Sequence
  Synthetic construct
GFTFSDYS

SEQ ID NO: 3630 - protein, 9 aa, Artificial Sequence
  Synthetic construct
GGSISSSNW

SEQ ID NO: 3631 - protein, 8 aa, Artificial Sequence
  Synthetic construct
GFTVSSYA

SEQ ID NO: 3632 - protein, 8 aa, Artificial Sequence
  Synthetic construct
GYTFTTYD

SEQ ID NO: 3633 - protein, 8 aa, Artificial Sequence
  Synthetic construct
GGTFSSYS

SEQ ID NO: 3634 - protein, 8 aa, Artificial Sequence
  Synthetic construct
GYSLTYYA

SEQ ID NO: 3635 - protein, 10 aa, Artificial Sequence
  Synthetic construct
GGSISSGDYY

SEQ ID NO: 3636 - protein, 10 aa, Artificial Sequence
  Synthetic construct
GFSLSTNGVG

SEQ ID NO: 3637 - protein, 8 aa, Artificial Sequence
  Synthetic construct
GFRFRSYS

SEQ ID NO: 3638 - protein, 8 aa, Artificial Sequence
  Synthetic construct
GGTFTSYA

SEQ ID NO: 3639 - protein, 8 aa, Artificial Sequence
  Synthetic construct
GYTFTSYE

SEQ ID NO: 3640 - protein, 8 aa, Artificial Sequence
  Synthetic construct
GGTFSSYA

SEQ ID NO: 3641 - protein, 8 aa, Artificial Sequence
  Synthetic construct
GFTFSTYA

SEQ ID NO: 3642 - protein, 8 aa, Artificial Sequence
  Synthetic construct
GYSFSSYW

SEQ ID NO: 3643 - protein, 8 aa, Artificial Sequence
  Synthetic construct
GFTFSNYA

SEQ ID NO: 3644 - protein, 8 aa, Artificial Sequence
  Synthetic construct
GFTFSRYS

SEQ ID NO: 3645 - protein, 8 aa, Artificial Sequence
  Synthetic construct
GFTFSSYG

SEQ ID NO: 3646 - protein, 8 aa, Artificial Sequence
  Synthetic construct
GFTFSSHA

SEQ ID NO: 3647 - protein, 8 aa, Artificial Sequence
  Synthetic construct
GGSINTFY

SEQ ID NO: 3648 - protein, 8 aa, Artificial Sequence
  Synthetic construct
GDSISNYY

SEQ ID NO: 3649 - protein, 8 aa, Artificial Sequence
  Synthetic construct
GYTLTEIS

SEQ ID NO: 3650 - protein, 10 aa, Artificial Sequence
  Synthetic construct
GGSISSADYY

SEQ ID NO: 3651 - protein, 8 aa, Artificial Sequence
  Synthetic construct
GFSISDYY

SEQ ID NO: 3652 - protein, 8 aa, Artificial Sequence
  Synthetic construct
GFTVTSNY

SEQ ID NO: 3653 - protein, 8 aa, Artificial Sequence
  Synthetic construct
GFTFSTYA

SEQ ID NO: 3654 - protein, 8 aa, Artificial Sequence
  Synthetic construct
GYTFTSYA

SEQ ID NO: 3655 - protein, 8 aa, Artificial Sequence
  Synthetic construct
GYTFSTYW

SEQ ID NO: 3656 - protein, 8 aa, Artificial Sequence
  Synthetic construct
GFTFSGYS

SEQ ID NO: 3657 - protein, 8 aa, Artificial Sequence
  Synthetic construct
GFNFLTSS

SEQ ID NO: 3658 - protein, 9 aa, Artificial Sequence
  Synthetic construct
GGSMSNSNW

SEQ ID NO: 3659 - protein, 8 aa, Artificial Sequence
  Synthetic construct
GFTFSNYG

SEQ ID NO: 3660 - protein, 8 aa, Artificial Sequence
  Synthetic construct
GDSISSYY

SEQ ID NO: 3661 - protein, 8 aa, Artificial Sequence
  Synthetic construct
GGTFSTYT

SEQ ID NO: 3662 - protein, 8 aa, Artificial Sequence
  Synthetic construct
GGTLSSYT

SEQ ID NO: 3663 - protein, 8 aa, Artificial Sequence
  Synthetic construct
GFTFSTYS

SEQ ID NO: 3664 - protein, 8 aa, Artificial Sequence
  Synthetic construct
GGSFSSYA

SEQ ID NO: 3665 - protein, 10 aa, Artificial Sequence
  Synthetic construct
GGSISSGGYY

SEQ ID NO: 3666 - protein, 8 aa, Artificial Sequence
  Synthetic construct
GGTVSSYT

SEQ ID NO: 3667 - protein, 8 aa, Artificial Sequence
  Synthetic construct
GYRFTSNW

SEQ ID NO: 3668 - protein, 10 aa, Artificial Sequence
  Synthetic construct
GGSISSSSSY

SEQ ID NO: 3669 - protein, 8 aa, Artificial Sequence
  Synthetic construct
AKTFTNYS

SEQ ID NO: 3670 - protein, 8 aa, Artificial Sequence
  Synthetic construct
GGSISTYY

SEQ ID NO: 3671 - protein, 8 aa, Artificial Sequence
  Synthetic construct
GFIVSANY

SEQ ID NO: 3672 - protein, 8 aa, Artificial Sequence
  Synthetic construct
GFTFSTYA

SEQ ID NO: 3673 - protein, 8 aa, Artificial Sequence
  Synthetic construct
GFTFSNYG

SEQ ID NO: 3674 - protein, 8 aa, Artificial Sequence
  Synthetic construct
GVTFSSYA

SEQ ID NO: 3675 - protein, 8 aa, Artificial Sequence
  Synthetic construct
GFTFSSYD

SEQ ID NO: 3676 - protein, 8 aa, Artificial Sequence
  Synthetic construct
GYTFTNYA

SEQ ID NO: 3677 - protein, 8 aa, Artificial Sequence
  Synthetic construct
GFTFSSYA

SEQ ID NO: 3678 - protein, 8 aa, Artificial Sequence
  Synthetic construct
GFTFSSYE

SEQ ID NO: 3679 - protein, 10 aa, Artificial Sequence
  Synthetic construct
GFALSSSGVG

SEQ ID NO: 3680 - protein, 8 aa, Artificial Sequence
  Synthetic construct
GGSFIDYY

SEQ ID NO: 3681 - protein, 8 aa, Artificial Sequence
  Synthetic construct
GYTLIELS

SEQ ID NO: 3682 - protein, 8 aa, Artificial Sequence
  Synthetic construct
GFPFITYA

SEQ ID NO: 3683 - protein, 8 aa, Artificial Sequence
  Synthetic construct
GGSFSGYF

SEQ ID NO: 3684 - protein, 8 aa, Artificial Sequence
  Synthetic construct
GFTVSDNY

SEQ ID NO: 3685 - protein, 8 aa, Artificial Sequence
  Synthetic construct
GGTFSTYA

SEQ ID NO: 3686 - protein, 8 aa, Artificial Sequence
  Synthetic construct
GYTFTSYA

SEQ ID NO: 3687 - protein, 8 aa, Artificial Sequence
  Synthetic construct
GYNFTTYW

SEQ ID NO: 3688 - protein, 10 aa, Artificial Sequence
  Synthetic construct
GGSISSGVSY

SEQ ID NO: 3689 - protein, 9 aa, Artificial Sequence
  Synthetic construct
GDSISSSDW

SEQ ID NO: 3690 - protein, 8 aa, Artificial Sequence
  Synthetic construct
GFTFSDHY

SEQ ID NO: 3691 - protein, 8 aa, Artificial Sequence
  Synthetic construct
GDSISNYY

SEQ ID NO: 3692 - protein, 8 aa, Artificial Sequence
  Synthetic construct
GDSITGSY

SEQ ID NO: 3693 - protein, 8 aa, Artificial Sequence
  Synthetic construct
GFTFSSHG

SEQ ID NO: 3694 - protein, 8 aa, Artificial Sequence
  Synthetic construct
GFTFSSYG

SEQ ID NO: 3695 - protein, 8 aa, Artificial Sequence
  Synthetic construct
GYSFTNYA

SEQ ID NO: 3696 - protein, 8 aa, Artificial Sequence
  Synthetic construct
GYTFTNYY

SEQ ID NO: 3697 - protein, 8 aa, Artificial Sequence
  Synthetic construct
GFTFSTYW

SEQ ID NO: 3698 - protein, 10 aa, Artificial Sequence
  Synthetic construct
GGSISSGGYY

SEQ ID NO: 3699 - protein, 8 aa, Artificial Sequence
  Synthetic construct
GFTFSSYA

SEQ ID NO: 3700 - protein, 9 aa, Artificial Sequence
  Synthetic construct
GGSISSSNW

SEQ ID NO: 3701 - protein, 8 aa, Artificial Sequence
  Synthetic construct
GYTFTNYY

SEQ ID NO: 3702 - protein, 8 aa, Artificial Sequence
  Synthetic construct
GYTFRTYS

SEQ ID NO: 3703 - protein, 8 aa, Artificial Sequence
  Synthetic construct
GYSFTNYW

SEQ ID NO: 3704 - protein, 8 aa, Artificial Sequence
  Synthetic construct
GFTLSRYW

SEQ ID NO: 3705 - protein, 8 aa, Artificial Sequence
  Synthetic construct
GFTFSSFG

SEQ ID NO: 3706 - protein, 8 aa, Artificial Sequence
  Synthetic construct
GYTFTSYG

SEQ ID NO: 3707 - protein, 8 aa, Artificial Sequence
  Synthetic construct
GFTSRTFW

SEQ ID NO: 3708 - protein, 8 aa, Artificial Sequence
  Synthetic construct
GFIFSTYT

SEQ ID NO: 3709 - protein, 8 aa, Artificial Sequence
  Synthetic construct
GYTFTNYA

SEQ ID NO: 3710 - protein, 8 aa, Artificial Sequence
  Synthetic construct
GGSFSGYY

SEQ ID NO: 3711 - protein, 8 aa, Artificial Sequence
  Synthetic construct
GGAFSSYA

SEQ ID NO: 3712 - protein, 8 aa, Artificial Sequence
  Synthetic construct
GYTFTTYA

SEQ ID NO: 3713 - protein, 8 aa, Artificial Sequence
  Synthetic construct
GGSISNYY

SEQ ID NO: 3714 - protein, 8 aa, Artificial Sequence
  Synthetic construct
GFTFDDYA

SEQ ID NO: 3715 - protein, 8 aa, Artificial Sequence
  Synthetic construct
GDSISSYY

SEQ ID NO: 3716 - protein, 8 aa, Artificial Sequence
  Synthetic construct
GYTFTSYD

SEQ ID NO: 3717 - protein, 8 aa, Artificial Sequence
  Synthetic construct
GYSFSDYW

SEQ ID NO: 3718 - protein, 8 aa, Artificial Sequence
  Synthetic construct
GYSFTGRY

SEQ ID NO: 3719 - protein, 8 aa, Artificial Sequence
  Synthetic construct
GGTFSSYA

SEQ ID NO: 3720 - protein, 8 aa, Artificial Sequence
  Synthetic construct
GFRFTDFY

SEQ ID NO: 3721 - protein, 10 aa, Artificial Sequence
  Synthetic construct
GDSVSSSSAA

SEQ ID NO: 3722 - protein, 8 aa, Artificial Sequence
  Synthetic construct
GFTFSYYG

SEQ ID NO: 3723 - protein, 8 aa, Artificial Sequence
  Synthetic construct
GGSFSSPA

SEQ ID NO: 3724 - protein, 8 aa, Artificial Sequence
  Synthetic construct
GYPFTSYA

SEQ ID NO: 3725 - protein, 8 aa, Artificial Sequence
  Synthetic construct
GFILSDYY

SEQ ID NO: 3726 - protein, 8 aa, Artificial Sequence
  Synthetic construct
GYIFTSYA

SEQ ID NO: 3727 - protein, 10 aa, Artificial Sequence
  Synthetic construct
GFSLSTSGVG

SEQ ID NO: 3728 - protein, 8 aa, Artificial Sequence
  Synthetic construct
GGTFSHYG

SEQ ID NO: 3729 - protein, 8 aa, Artificial Sequence
  Synthetic construct
GFTFSSYA

SEQ ID NO: 3730 - protein, 8 aa, Artificial Sequence
  Synthetic construct
GFTFSSYW

SEQ ID NO: 3731 - protein, 8 aa, Artificial Sequence
  Synthetic construct
GFTFSSYA

SEQ ID NO: 3732 - protein, 10 aa, Artificial Sequence
  Synthetic construct
DGSITTTSYF

SEQ ID NO: 3733 - protein, 8 aa, Artificial Sequence
  Synthetic construct
GFTFSSYN

SEQ ID NO: 3734 - protein, 8 aa, Artificial Sequence
  Synthetic construct
GFTFSSYA

SEQ ID NO: 3735 - protein, 8 aa, Artificial Sequence
  Synthetic construct
GFTFSSQS

SEQ ID NO: 3736 - protein, 8 aa, Artificial Sequence
  Synthetic construct
GFAFSNYG

SEQ ID NO: 3737 - protein, 8 aa, Artificial Sequence
  Synthetic construct
GYSFTKYW

SEQ ID NO: 3738 - protein, 8 aa, Artificial Sequence
  Synthetic construct
GFTFSDRR

SEQ ID NO: 3739 - protein, 8 aa, Artificial Sequence
  Synthetic construct
GYTFISYG

SEQ ID NO: 3740 - protein, 8 aa, Artificial Sequence
  Synthetic construct
GVTVSSNY

SEQ ID NO: 3741 - protein, 8 aa, Artificial Sequence
  Synthetic construct
GFTFSTYA

SEQ ID NO: 3742 - protein, 8 aa, Artificial Sequence
  Synthetic construct
GQYFGGYW

SEQ ID NO: 3743 - protein, 8 aa, Artificial Sequence
  Synthetic construct
GDTLSSYA

SEQ ID NO: 3744 - protein, 8 aa, Artificial Sequence
  Synthetic construct
GFPFSNFW

SEQ ID NO: 3745 - protein, 8 aa, Artificial Sequence
  Synthetic construct
GGRFSSNA

SEQ ID NO: 3746 - protein, 8 aa, Artificial Sequence
  Synthetic construct
GYTFASYY

SEQ ID NO: 3747 - protein, 8 aa, Artificial Sequence
  Synthetic construct
GYTFTYYA

SEQ ID NO: 3748 - protein, 8 aa, Artificial Sequence
  Synthetic construct
GFTFTNAW

SEQ ID NO: 3749 - protein, 10 aa, Artificial Sequence
  Synthetic construct
GFSLSTSGVG

SEQ ID NO: 3750 - protein, 8 aa, Artificial Sequence
  Synthetic construct
GFTFSTYA

SEQ ID NO: 3751 - protein, 10 aa, Artificial Sequence
  Synthetic construct
GDSVSSNSAA

SEQ ID NO: 3752 - protein, 8 aa, Artificial Sequence
  Synthetic construct
GLTFSNDD

SEQ ID NO: 3753 - protein, 10 aa, Artificial Sequence
  Synthetic construct
GGSISSGSYY

SEQ ID NO: 3754 - protein, 8 aa, Artificial Sequence
  Synthetic construct
GFTFSSYG

SEQ ID NO: 3755 - protein, 10 aa, Artificial Sequence
  Synthetic construct
RGSISSSTSS

SEQ ID NO: 3756 - protein, 10 aa, Artificial Sequence
  Synthetic construct
GFSMSTRGLC

SEQ ID NO: 3757 - protein, 8 aa, Artificial Sequence
  Synthetic construct
GFTFRSYA

SEQ ID NO: 3758 - protein, 10 aa, Artificial Sequence
  Synthetic construct
GGSISSGSYY

SEQ ID NO: 3759 - protein, 8 aa, Artificial Sequence
  Synthetic construct
GFTFNIYA

SEQ ID NO: 3760 - protein, 8 aa, Artificial Sequence
  Synthetic construct
EYTLPEIS

SEQ ID NO: 3761 - protein, 10 aa, Artificial Sequence
  Synthetic construct
GGSISTGDYY

SEQ ID NO: 3762 - protein, 10 aa, Artificial Sequence
  Synthetic construct
GGSVSSGAYY

SEQ ID NO: 3763 - protein, 8 aa, Artificial Sequence
  Synthetic construct
GFTFSTYA

SEQ ID NO: 3764 - protein, 10 aa, Artificial Sequence
  Synthetic construct
GDSVSSNSAA

SEQ ID NO: 3765 - protein, 8 aa, Artificial Sequence
  Synthetic construct
GYPLIEYH

SEQ ID NO: 3766 - protein, 8 aa, Artificial Sequence
  Synthetic construct
GYTFTTYG

SEQ ID NO: 3767 - protein, 8 aa, Artificial Sequence
  Synthetic construct
GFTFRIYW

SEQ ID NO: 3768 - protein, 8 aa, Artificial Sequence
  Synthetic construct
GFIFSDHY

SEQ ID NO: 3769 - protein, 8 aa, Artificial Sequence
  Synthetic construct
GFTSSIYA

SEQ ID NO: 3770 - protein, 8 aa, Artificial Sequence
  Synthetic construct
GGTFTTYT

SEQ ID NO: 3771 - protein, 8 aa, Artificial Sequence
  Synthetic construct
GGTFSSYG

SEQ ID NO: 3772 - protein, 10 aa, Artificial Sequence
  Synthetic construct
GGSISSGSYY

SEQ ID NO: 3773 - protein, 10 aa, Artificial Sequence
  Synthetic construct
GGSISSGGYY

SEQ ID NO: 3774 - protein, 8 aa, Artificial Sequence
  Synthetic construct
GFTFGDYA

SEQ ID NO: 3775 - protein, 8 aa, Artificial Sequence
  Synthetic construct
GFAFSNYS

SEQ ID NO: 3776 - protein, 8 aa, Artificial Sequence
  Synthetic construct
GFTFSSYG

SEQ ID NO: 3777 - protein, 8 aa, Artificial Sequence
  Synthetic construct
GYSFTSYW

SEQ ID NO: 3778 - protein, 8 aa, Artificial Sequence
  Synthetic construct
GGSFSGYY

SEQ ID NO: 3779 - protein, 10 aa, Artificial Sequence
  Synthetic construct
GFSLRNSGVG

SEQ ID NO: 3780 - protein, 10 aa, Artificial Sequence
  Synthetic construct
GGSIISGGYY

SEQ ID NO: 3781 - protein, 10 aa, Artificial Sequence
  Synthetic construct
GFSLSTTGMS

SEQ ID NO: 3782 - protein, 8 aa, Artificial Sequence
  Synthetic construct
GFTVSSNY

SEQ ID NO: 3783 - protein, 8 aa, Artificial Sequence
  Synthetic construct
GGSLSSYY

SEQ ID NO: 3784 - protein, 8 aa, Artificial Sequence
  Synthetic construct
GFTVSDTY

SEQ ID NO: 3785 - protein, 8 aa, Artificial Sequence
  Synthetic construct
GYTFTGYY

SEQ ID NO: 3786 - protein, 8 aa, Artificial Sequence
  Synthetic construct
GGSISSYY

SEQ ID NO: 3787 - protein, 8 aa, Artificial Sequence
  Synthetic construct
GYTFTSYG

SEQ ID NO: 3788 - protein, 8 aa, Artificial Sequence
  Synthetic construct
GYTLIELS

SEQ ID NO: 3789 - protein, 8 aa, Artificial Sequence
  Synthetic construct
GFTFSTYG

SEQ ID NO: 3790 - protein, 10 aa, Artificial Sequence
  Synthetic construct
GGSVSSGSHY

SEQ ID NO: 3791 - protein, 8 aa, Artificial Sequence
  Synthetic construct
GGTFSSYT

SEQ ID NO: 3792 - protein, 10 aa, Artificial Sequence
  Synthetic construct
GFSLSTSGVA

SEQ ID NO: 3793 - protein, 8 aa, Artificial Sequence
  Synthetic construct
GGTFSSYA

SEQ ID NO: 3794 - protein, 8 aa, Artificial Sequence
  Synthetic construct
AYTFPISG

SEQ ID NO: 3795 - protein, 8 aa, Artificial Sequence
  Synthetic construct
AFTFNNYA

SEQ ID NO: 3796 - protein, 8 aa, Artificial Sequence
  Synthetic construct
GGSISTYY

SEQ ID NO: 3797 - protein, 8 aa, Artificial Sequence
  Synthetic construct
GNTFTYRY

SEQ ID NO: 3798 - protein, 8 aa, Artificial Sequence
  Synthetic construct
GFTVSEQK

SEQ ID NO: 3799 - protein, 8 aa, Artificial Sequence
  Synthetic construct
GFTFSSYS

SEQ ID NO: 3800 - protein, 8 aa, Artificial Sequence
  Synthetic construct
GFTFSTYS

SEQ ID NO: 3801 - protein, 10 aa, Artificial Sequence
  Synthetic construct
GVSMNSSDSY

SEQ ID NO: 3802 - protein, 10 aa, Artificial Sequence
  Synthetic construct
GFSFNTSRVG

SEQ ID NO: 3803 - protein, 8 aa, Artificial Sequence
  Synthetic construct
GITLKDYG

SEQ ID NO: 3804 - protein, 8 aa, Artificial Sequence
  Synthetic construct
GFIFSSYS

SEQ ID NO: 3805 - protein, 8 aa, Artificial Sequence
  Synthetic construct
GFTFSASS

SEQ ID NO: 3806 - protein, 8 aa, Artificial Sequence
  Synthetic construct
GYTLDELP

SEQ ID NO: 3807 - protein, 8 aa, Artificial Sequence
  Synthetic construct
GSSFTNYW

SEQ ID NO: 3808 - protein, 8 aa, Artificial Sequence
  Synthetic construct
GGTFSNYD

SEQ ID NO: 3809 - protein, 8 aa, Artificial Sequence
  Synthetic construct
GFTFDDYA

SEQ ID NO: 3810 - protein, 10 aa, Artificial Sequence
  Synthetic construct
GFSLSTNGVG

SEQ ID NO: 3811 - protein, 8 aa, Artificial Sequence
  Synthetic construct
GFTLIELS

SEQ ID NO: 3812 - protein, 9 aa, Artificial Sequence
  Synthetic construct
GGSIKTSYY

SEQ ID NO: 3813 - protein, 8 aa, Artificial Sequence
  Synthetic construct
GYRFADYW

SEQ ID NO: 3814 - protein, 8 aa, Artificial Sequence
  Synthetic construct
GFTFSSYW

SEQ ID NO: 3815 - protein, 8 aa, Artificial Sequence
  Synthetic construct
GGSFSDYY

SEQ ID NO: 3816 - protein, 8 aa, Artificial Sequence
  Synthetic construct
GFVFSSYA

SEQ ID NO: 3817 - protein, 8 aa, Artificial Sequence
  Synthetic construct
GGSFSGYY

SEQ ID NO: 3818 - protein, 8 aa, Artificial Sequence
  Synthetic construct
GFPFNTYA

SEQ ID NO: 3819 - protein, 8 aa, Artificial Sequence
  Synthetic construct
GGSISSYY

SEQ ID NO: 3820 - protein, 8 aa, Artificial Sequence
  Synthetic construct
AFTFSTYA

SEQ ID NO: 3821 - protein, 8 aa, Artificial Sequence
  Synthetic construct
GFTFSSYW

SEQ ID NO: 3822 - protein, 8 aa, Artificial Sequence
  Synthetic construct
GGTFSNYA

SEQ ID NO: 3823 - protein, 8 aa, Artificial Sequence
  Synthetic construct
GFDFTSYW

SEQ ID NO: 3824 - protein, 8 aa, Artificial Sequence
  Synthetic construct
GYSFTSSW

SEQ ID NO: 3825 - protein, 8 aa, Artificial Sequence
  Synthetic construct
GYTFTNFA

SEQ ID NO: 3826 - protein, 10 aa, Artificial Sequence
  Synthetic construct
GFSVSTTGMC

SEQ ID NO: 3827 - protein, 8 aa, Artificial Sequence
  Synthetic construct
GGTFSSYS

SEQ ID NO: 3828 - protein, 8 aa, Artificial Sequence
  Synthetic construct
GYTFTTYA

SEQ ID NO: 3829 - protein, 10 aa, Artificial Sequence
  Synthetic construct
GGSISSGSYY

SEQ ID NO: 3830 - protein, 9 aa, Artificial Sequence
  Synthetic construct
GASISSTNW

SEQ ID NO: 3831 - protein, 8 aa, Artificial Sequence
  Synthetic construct
GFTFSSYP

SEQ ID NO: 3832 - protein, 9 aa, Artificial Sequence
  Synthetic construct
GGSISSSNW

SEQ ID NO: 3833 - protein, 8 aa, Artificial Sequence
  Synthetic construct
GFTFSSYG

SEQ ID NO: 3834 - protein, 8 aa, Artificial Sequence
  Synthetic construct
GFTFSDYA

SEQ ID NO: 3835 - protein, 8 aa, Artificial Sequence
  Synthetic construct
GVSISSYY

SEQ ID NO: 3836 - protein, 8 aa, Artificial Sequence
  Synthetic construct
GFTFSNYG

SEQ ID NO: 3837 - protein, 9 aa, Artificial Sequence
  Synthetic construct
GGSISSSNW

SEQ ID NO: 3838 - protein, 8 aa, Artificial Sequence
  Synthetic construct
GFRFSIYA

SEQ ID NO: 3839 - protein, 8 aa, Artificial Sequence
  Synthetic construct
GDSITNYY

SEQ ID NO: 3840 - protein, 8 aa, Artificial Sequence
  Synthetic construct
GGTFSSYV

SEQ ID NO: 3841 - protein, 8 aa, Artificial Sequence
  Synthetic construct
GYSLTNYY

SEQ ID NO: 3842 - protein, 10 aa, Artificial Sequence
  Synthetic construct
GGAITSSSYY

SEQ ID NO: 3843 - protein, 8 aa, Artificial Sequence
  Synthetic construct
GVTFTSSA

SEQ ID NO: 3844 - protein, 8 aa, Artificial Sequence
  Synthetic construct
GDSINNYY

SEQ ID NO: 3845 - protein, 10 aa, Artificial Sequence
  Synthetic construct
GASISSNGHY

SEQ ID NO: 3846 - protein, 8 aa, Artificial Sequence
  Synthetic construct
GFTFSTYS

SEQ ID NO: 3847 - protein, 8 aa, Artificial Sequence
  Synthetic construct
GFTFINYA

SEQ ID NO: 3848 - protein, 8 aa, Artificial Sequence
  Synthetic construct
GFTFSSYG

SEQ ID NO: 3849 - protein, 8 aa, Artificial Sequence
  Synthetic construct
GGTFSSYA

SEQ ID NO: 3850 - protein, 8 aa, Artificial Sequence
  Synthetic construct
GFTFNNYG

SEQ ID NO: 3851 - protein, 8 aa, Artificial Sequence
  Synthetic construct
GFTFSSYA

SEQ ID NO: 3852 - protein, 8 aa, Artificial Sequence
  Synthetic construct
GYTFTSNW

SEQ ID NO: 3853 - protein, 8 aa, Artificial Sequence
  Synthetic construct
GFSFSSYA

SEQ ID NO: 3854 - protein, 8 aa, Artificial Sequence
  Synthetic construct
GFTLSGYA

SEQ ID NO: 3855 - protein, 8 aa, Artificial Sequence
  Synthetic construct
GFTFGDYA

SEQ ID NO: 3856 - protein, 8 aa, Artificial Sequence
  Synthetic construct
GGTFSSYP

SEQ ID NO: 3857 - protein, 8 aa, Artificial Sequence
  Synthetic construct
GYIFTNYW

SEQ ID NO: 3858 - protein, 8 aa, Artificial Sequence
  Synthetic construct
GFTFSSYP

SEQ ID NO: 3859 - protein, 10 aa, Artificial Sequence
  Synthetic construct
GGPISSSSYH

SEQ ID NO: 3860 - protein, 10 aa, Artificial Sequence
  Synthetic construct
GFSLDTIGVA

SEQ ID NO: 3861 - protein, 8 aa, Artificial Sequence
  Synthetic construct
GYTLTELS

SEQ ID NO: 3862 - protein, 8 aa, Artificial Sequence
  Synthetic construct
GGTFSNYA

SEQ ID NO: 3863 - protein, 8 aa, Artificial Sequence
  Synthetic construct
GYTFITYG

SEQ ID NO: 3864 - protein, 8 aa, Artificial Sequence
  Synthetic construct
GYTFTSYA

SEQ ID NO: 3865 - protein, 8 aa, Artificial Sequence
  Synthetic construct
GYRFTDYW

SEQ ID NO: 3866 - protein, 8 aa, Artificial Sequence
  Synthetic construct
GFSLNTYA

SEQ ID NO: 3867 - protein, 8 aa, Artificial Sequence
  Synthetic construct
GFTLSSHG

SEQ ID NO: 3868 - protein, 3 aa, Artificial Sequence
  Synthetic construct
  MISC_FEATURE (1)..(3): X can be any amino acid
XXX

SEQ ID NO: 3869 - protein, 8 aa, Artificial Sequence
  Synthetic construct
GYTFTGKW

SEQ ID NO: 3870 - protein, 8 aa, Artificial Sequence
  Synthetic construct
GFTFNNYS

SEQ ID NO: 3871 - protein, 10 aa, Artificial Sequence
  Synthetic construct
GGSISTSIYY

SEQ ID NO: 3872 - protein, 8 aa, Artificial Sequence
  Synthetic construct
GGTFSSYA

SEQ ID NO: 3873 - protein, 8 aa, Artificial Sequence
  Synthetic construct
GFTFNNYA

SEQ ID NO: 3874 - protein, 8 aa, Artificial Sequence
  Synthetic construct
GFTFSSYA

SEQ ID NO: 3875 - protein, 8 aa, Artificial Sequence
  Synthetic construct
GYTLPELS

SEQ ID NO: 3876 - protein, 8 aa, Artificial Sequence
  Synthetic construct
GFTFTNYA

SEQ ID NO: 3877 - protein, 8 aa, Artificial Sequence
  Synthetic construct
GYTFTSYY

SEQ ID NO: 3878 - protein, 10 aa, Artificial Sequence
  Synthetic construct
GFSLSTSAVG

SEQ ID NO: 3879 - protein, 8 aa, Artificial Sequence
  Synthetic construct
GFTFSIFT

SEQ ID NO: 3880 - protein, 8 aa, Artificial Sequence
  Synthetic construct
GGSISGYY

SEQ ID NO: 3881 - protein, 8 aa, Artificial Sequence
  Synthetic construct
GYTLTELS

SEQ ID NO: 3882 - protein, 10 aa, Artificial Sequence
  Synthetic construct
GFSLSTSGMC

SEQ ID NO: 3883 - protein, 8 aa, Artificial Sequence
  Synthetic construct
GYTLIELS

SEQ ID NO: 3884 - protein, 8 aa, Artificial Sequence
  Synthetic construct
GYSFTNYW

SEQ ID NO: 3885 - protein, 8 aa, Artificial Sequence
  Synthetic construct
GYRFISYW

SEQ ID NO: 3886 - protein, 8 aa, Artificial Sequence
  Synthetic construct
GFTFSNFP

SEQ ID NO: 3887 - protein, 10 aa, Artificial Sequence
  Synthetic construct
GFSLSTSGVG

SEQ ID NO: 3888 - protein, 8 aa, Artificial Sequence
  Synthetic construct
GFPFGTYA

SEQ ID NO: 3889 - protein, 8 aa, Artificial Sequence
  Synthetic construct
GFSFRHYA

SEQ ID NO: 3890 - protein, 8 aa, Artificial Sequence
  Synthetic construct
GGTFSSYG

SEQ ID NO: 3891 - protein, 8 aa, Artificial Sequence
  Synthetic construct
GFSFIDYY

SEQ ID NO: 3892 - protein, 8 aa, Artificial Sequence
  Synthetic construct
GFTFSVYS

SEQ ID NO: 3893 - protein, 8 aa, Artificial Sequence
  Synthetic construct
GDSISSYF

SEQ ID NO: 3894 - protein, 8 aa, Artificial Sequence
  Synthetic construct
GYTLPELS

SEQ ID NO: 3895 - protein, 8 aa, Artificial Sequence
  Synthetic construct
GFTFSDYD

SEQ ID NO: 3896 - protein, 8 aa, Artificial Sequence
  Synthetic construct
GGTFNDYG

SEQ ID NO: 3897 - protein, 8 aa, Artificial Sequence
  Synthetic construct
GFTFSSYW

SEQ ID NO: 3898 - protein, 10 aa, Artificial Sequence
  Synthetic construct
GFSLSTSGMC

SEQ ID NO: 3899 - protein, 10 aa, Artificial Sequence
  Synthetic construct
GFSLSTSGEA

SEQ ID NO: 3900 - protein, 8 aa, Artificial Sequence
  Synthetic construct
GFAFSSYA

SEQ ID NO: 3901 - protein, 8 aa, Artificial Sequence
  Synthetic construct
GGTFSSYA

SEQ ID NO: 3902 - protein, 8 aa, Artificial Sequence
  Synthetic construct
GFTFDDYA

SEQ ID NO: 3903 - protein, 8 aa, Artificial Sequence
  Synthetic construct
GFTFSAYG

SEQ ID NO: 3904 - protein, 8 aa, Artificial Sequence
  Synthetic construct
GFTFSNFP

SEQ ID NO: 3905 - protein, 8 aa, Artificial Sequence
  Synthetic construct
GGSFSGYY

SEQ ID NO: 3906 - protein, 8 aa, Artificial Sequence
  Synthetic construct
GFTFSTYA

SEQ ID NO: 3907 - protein, 8 aa, Artificial Sequence
  Synthetic construct
GYTFSSYG

SEQ ID NO: 3908 - protein, 8 aa, Artificial Sequence
  Synthetic construct
GFTLSSYW

SEQ ID NO: 3909 - protein, 8 aa, Artificial Sequence
  Synthetic construct
GYTFTSYG

SEQ ID NO: 3910 - protein, 8 aa, Artificial Sequence
  Synthetic construct
GGSFSGYY

SEQ ID NO: 3911 - protein, 8 aa, Artificial Sequence
  Synthetic construct
GGTFSSSG

SEQ ID NO: 3912 - protein, 8 aa, Artificial Sequence
  Synthetic construct
GYTFTSNW

SEQ ID NO: 3913 - protein, 10 aa, Artificial Sequence
  Synthetic construct
GGSISSSNYY

SEQ ID NO: 3914 - protein, 8 aa, Artificial Sequence
  Synthetic construct
GFTFSNYG

SEQ ID NO: 3915 - protein, 8 aa, Artificial Sequence
  Synthetic construct
GFTFSSSW

SEQ ID NO: 3916 - protein, 8 aa, Artificial Sequence
  Synthetic construct
GFTFSSYW

SEQ ID NO: 3917 - protein, 8 aa, Artificial Sequence
  Synthetic construct
GITFSSYG

SEQ ID NO: 3918 - protein, 10 aa, Artificial Sequence
  Synthetic construct
GFSLSTSGVG

SEQ ID NO: 3919 - protein, 8 aa, Artificial Sequence
  Synthetic construct
GFTITSNY

SEQ ID NO: 3920 - protein, 8 aa, Artificial Sequence
  Synthetic construct
GYTFTSYY

SEQ ID NO: 3921 - protein, 10 aa, Artificial Sequence
  Synthetic construct
GFSLSTSGVG

SEQ ID NO: 3922 - protein, 8 aa, Artificial Sequence
  Synthetic construct
GFTFSSYW

SEQ ID NO: 3923 - protein, 8 aa, Artificial Sequence
  Synthetic construct
GFTFSSFP

SEQ ID NO: 3924 - protein, 10 aa, Artificial Sequence
  Synthetic construct
GFSLSTSGVG

SEQ ID NO: 3925 - protein, 8 aa, Artificial Sequence
  Synthetic construct
GFTVSSNY

SEQ ID NO: 3926 - protein, 8 aa, Artificial Sequence
  Synthetic construct
GGSFSGYY

SEQ ID NO: 3927 - protein, 8 aa, Artificial Sequence
  Synthetic construct
GYTFARYG

SEQ ID NO: 3928 - protein, 8 aa, Artificial Sequence
  Synthetic construct
GFTFNNYA

SEQ ID NO: 3929 - protein, 8 aa, Artificial Sequence
  Synthetic construct
GFTFNNYG

SEQ ID NO: 3930 - protein, 8 aa, Artificial Sequence
  Synthetic construct
GFTFTNSA

SEQ ID NO: 3931 - protein, 8 aa, Artificial Sequence
  Synthetic construct
GASVTDYY

SEQ ID NO: 3932 - protein, 8 aa, Artificial Sequence
  Synthetic construct
GGTFSSYA

SEQ ID NO: 3933 - protein, 8 aa, Artificial Sequence
  Synthetic construct
GGSISSYY

SEQ ID NO: 3934 - protein, 8 aa, Artificial Sequence
  Synthetic construct
GHTFSAYY

SEQ ID NO: 3935 - protein, 8 aa, Artificial Sequence
  Synthetic construct
GFSFSTYE

SEQ ID NO: 3936 - protein, 8 aa, Artificial Sequence
  Synthetic construct
GFTFSNYG

SEQ ID NO: 3937 - protein, 8 aa, Artificial Sequence
  Synthetic construct
GFFFNSYI

SEQ ID NO: 3938 - protein, 8 aa, Artificial Sequence
  Synthetic construct
GYTFIGYY

SEQ ID NO: 3939 - protein, 8 aa, Artificial Sequence
  Synthetic construct
GYNFSSYW

SEQ ID NO: 3940 - protein, 9 aa, Artificial Sequence
  Synthetic construct
GYSISSGYY

SEQ ID NO: 3941 - protein, 8 aa, Artificial Sequence
  Synthetic construct
GLPIGVYS

SEQ ID NO: 3942 - protein, 10 aa, Artificial Sequence
  Synthetic construct
GGSISTSIYY

SEQ ID NO: 3943 - protein, 8 aa, Artificial Sequence
  Synthetic construct
GGVFRSHA

SEQ ID NO: 3944 - protein, 10 aa, Artificial Sequence
  Synthetic construct
GGSISSSSYY

SEQ ID NO: 3945 - protein, 9 aa, Artificial Sequence
  Synthetic construct
GGSISSGHW

SEQ ID NO: 3946 - protein, 8 aa, Artificial Sequence
  Synthetic construct
GFPLSDYW

SEQ ID NO: 3947 - protein, 10 aa, Artificial Sequence
  Synthetic construct
GFSLTTTGVG

SEQ ID NO: 3948 - protein, 8 aa, Artificial Sequence
  Synthetic construct
GLTFSNYG

SEQ ID NO: 3949 - protein, 8 aa, Artificial Sequence
  Synthetic construct
GFSFRIYS

SEQ ID NO: 3950 - protein, 8 aa, Artificial Sequence
  Synthetic construct
GYSFISNW

SEQ ID NO: 3951 - protein, 8 aa, Artificial Sequence
  Synthetic construct
GGTFSRYA

SEQ ID NO: 3952 - protein, 8 aa, Artificial Sequence
  Synthetic construct
GFTFSSYA

SEQ ID NO: 3953 - protein, 8 aa, Artificial Sequence
  Synthetic construct
GGTLSSYT

SEQ ID NO: 3954 - protein, 8 aa, Artificial Sequence
  Synthetic construct
GFTFKSYA

SEQ ID NO: 3955 - protein, 8 aa, Artificial Sequence
  Synthetic construct
GFPFSNYG

SEQ ID NO: 3956 - protein, 8 aa, Artificial Sequence
  Synthetic construct
GGTFTSYA

SEQ ID NO: 3957 - protein, 8 aa, Artificial Sequence
  Synthetic construct
GFTFSSYA

SEQ ID NO: 3958 - protein, 8 aa, Artificial Sequence
  Synthetic construct
GFTFDDYA

SEQ ID NO: 3959 - protein, 8 aa, Artificial Sequence
  Synthetic construct
GGTFSSYG

SEQ ID NO: 3960 - protein, 8 aa, Artificial Sequence
  Synthetic construct
GYSFSDYY

SEQ ID NO: 3961 - protein, 8 aa, Artificial Sequence
  Synthetic construct
GYTLPELS

SEQ ID NO: 3962 - protein, 9 aa, Artificial Sequence
  Synthetic construct
AYSINSGYY

SEQ ID NO: 3963 - protein, 8 aa, Artificial Sequence
  Synthetic construct
RFTFSLYG

SEQ ID NO: 3964 - protein, 8 aa, Artificial Sequence
  Synthetic construct
GGTFSDYP

SEQ ID NO: 3965 - protein, 8 aa, Artificial Sequence
  Synthetic construct
GFIFSRSA

SEQ ID NO: 3966 - protein, 9 aa, Artificial Sequence
  Synthetic construct
GYSISSGYY

SEQ ID NO: 3967 - protein, 10 aa, Artificial Sequence
  Synthetic construct
GASISSSSYY

SEQ ID NO: 3968 - protein, 8 aa, Artificial Sequence
  Synthetic construct
GYTFTDYY

SEQ ID NO: 3969 - protein, 10 aa, Artificial Sequence
  Synthetic construct
GFSISSARMG

SEQ ID NO: 3970 - protein, 8 aa, Artificial Sequence
  Synthetic construct
GFTFNRHA

SEQ ID NO: 3971 - protein, 8 aa, Artificial Sequence
  Synthetic construct
GYTFTNYA

SEQ ID NO: 3972 - protein, 8 aa, Artificial Sequence
  Synthetic construct
GYTFTSYG

SEQ ID NO: 3973 - protein, 8 aa, Artificial Sequence
  Synthetic construct
GFTFSSYG

SEQ ID NO: 3974 - protein, 8 aa, Artificial Sequence
  Synthetic construct
GFTFSSYA

SEQ ID NO: 3975 - protein, 8 aa, Artificial Sequence
  Synthetic construct
GFTFSNFA

SEQ ID NO: 3976 - protein, 8 aa, Artificial Sequence
  Synthetic construct
GGTFSTYP

SEQ ID NO: 3977 - protein, 8 aa, Artificial Sequence
  Synthetic construct
GFTVSSNY

SEQ ID NO: 3978 - protein, 8 aa, Artificial Sequence
  Synthetic construct
GFTFSSYA

SEQ ID NO: 3979 - protein, 8 aa, Artificial Sequence
  Synthetic construct
GDSMRNYY

SEQ ID NO: 3980 - protein, 8 aa, Artificial Sequence
  Synthetic construct
GYTFTSYA

SEQ ID NO: 3981 - protein, 8 aa, Artificial Sequence
  Synthetic construct
GGTFSTFA

SEQ ID NO: 3982 - protein, 8 aa, Artificial Sequence
  Synthetic construct
GYTLPELS

SEQ ID NO: 3983 - protein, 8 aa, Artificial Sequence
  Synthetic construct
GFTLGNYG

SEQ ID NO: 3984 - protein, 8 aa, Artificial Sequence
  Synthetic construct
GFIVSNNY

SEQ ID NO: 3985 - protein, 8 aa, Artificial Sequence
  Synthetic construct
GFIFSSYA

SEQ ID NO: 3986 - protein, 8 aa, Artificial Sequence
  Synthetic construct
GGSFSDYY

SEQ ID NO: 3987 - protein, 8 aa, Artificial Sequence
  Synthetic construct
GFTLSSHG

SEQ ID NO: 3988 - protein, 8 aa, Artificial Sequence
  Synthetic construct
GFTFSDYY

SEQ ID NO: 3989 - protein, 8 aa, Artificial Sequence
  Synthetic construct
GFTFSFYW

SEQ ID NO: 3990 - protein, 8 aa, Artificial Sequence
  Synthetic construct
GYSFTSYW

SEQ ID NO: 3991 - protein, 8 aa, Artificial Sequence
  Synthetic construct
GYTFISYG

SEQ ID NO: 3992 - protein, 10 aa, Artificial Sequence
  Synthetic construct
GDSISSSIYY

SEQ ID NO: 3993 - protein, 10 aa, Artificial Sequence
  Synthetic construct
GGSISGGGYC

SEQ ID NO: 3994 - protein, 8 aa, Artificial Sequence
  Synthetic construct
GFTFSSYA

SEQ ID NO: 3995 - protein, 8 aa, Artificial Sequence
  Synthetic construct
GFTFRTYA

SEQ ID NO: 3996 - protein, 8 aa, Artificial Sequence
  Synthetic construct
GGSISSDY

SEQ ID NO: 3997 - protein, 8 aa, Artificial Sequence
  Synthetic construct
GFTFSSYA

SEQ ID NO: 3998 - protein, 8 aa, Artificial Sequence
  Synthetic construct
GFTVSTNH

SEQ ID NO: 3999 - protein, 8 aa, Artificial Sequence
  Synthetic construct
GFTFSNAW

SEQ ID NO: 4000 - protein, 8 aa, Artificial Sequence
  Synthetic construct
GFTFNSYA

SEQ ID NO: 4001 - protein, 8 aa, Artificial Sequence
  Synthetic construct
GFTFSSYS

SEQ ID NO: 4002 - protein, 8 aa, Artificial Sequence
  Synthetic construct
GYRFTNYW

SEQ ID NO: 4003 - protein, 8 aa, Artificial Sequence
  Synthetic construct
GFTFSSYA

SEQ ID NO: 4004 - protein, 8 aa, Artificial Sequence
  Synthetic construct
GFTFSSYA

SEQ ID NO: 4005 - protein, 10 aa, Artificial Sequence
  Synthetic construct
GDAIGSSSSY

SEQ ID NO: 4006 - protein, 8 aa, Artificial Sequence
  Synthetic construct
GDTFSRYY

SEQ ID NO: 4007 - protein, 8 aa, Artificial Sequence
  Synthetic construct
GFNFSNYN

SEQ ID NO: 4008 - protein, 8 aa, Artificial Sequence
  Synthetic construct
GYSFTNYY

SEQ ID NO: 4009 - protein, 8 aa, Artificial Sequence
  Synthetic construct
GGSFSGYF

SEQ ID NO: 4010 - protein, 8 aa, Artificial Sequence
  Synthetic construct
GFSLANFW

SEQ ID NO: 4011 - protein, 8 aa, Artificial Sequence
  Synthetic construct
GGTFSSYT

SEQ ID NO: 4012 - protein, 8 aa, Artificial Sequence
  Synthetic construct
GFTFSAYV

SEQ ID NO: 4013 - protein, 8 aa, Artificial Sequence
  Synthetic construct
GDTFSSHS

SEQ ID NO: 4014 - protein, 8 aa, Artificial Sequence
  Synthetic construct
GFTFSSYA

SEQ ID NO: 4015 - protein, 8 aa, Artificial Sequence
  Synthetic construct
GFRFSYYW

SEQ ID NO: 4016 - protein, 10 aa, Artificial Sequence
  Synthetic construct
GGSISTSIYY

SEQ ID NO: 4017 - protein, 8 aa, Artificial Sequence
  Synthetic construct
GYTFTSYA

SEQ ID NO: 4018 - protein, 8 aa, Artificial Sequence
  Synthetic construct
GFSFSSYH

SEQ ID NO: 4019 - protein, 8 aa, Artificial Sequence
  Synthetic construct
GVIVSRNY

SEQ ID NO: 4020 - protein, 8 aa, Artificial Sequence
  Synthetic construct
GFSFSNYN

SEQ ID NO: 4021 - protein, 8 aa, Artificial Sequence
  Synthetic construct
GYTFTNYA

SEQ ID NO: 4022 - protein, 8 aa, Artificial Sequence
  Synthetic construct
GYTFTSFG

SEQ ID NO: 4023 - protein, 8 aa, Artificial Sequence
  Synthetic construct
GFTFDDYA

SEQ ID NO: 4024 - protein, 8 aa, Artificial Sequence
  Synthetic construct
GFTFSGYA

SEQ ID NO: 4025 - protein, 8 aa, Artificial Sequence
  Synthetic construct
GYSFTSYW

SEQ ID NO: 4026 - protein, 8 aa, Artificial Sequence
  Synthetic construct
GFTFSSHG

SEQ ID NO: 4027 - protein, 10 aa, Artificial Sequence
  Synthetic construct
GGSISSGSYY

SEQ ID NO: 4028 - protein, 8 aa, Artificial Sequence
  Synthetic construct
GFTFRSYG

SEQ ID NO: 4029 - protein, 8 aa, Artificial Sequence
  Synthetic construct
GISVSTNY

SEQ ID NO: 4030 - protein, 8 aa, Artificial Sequence
  Synthetic construct
GYSFTSNW

SEQ ID NO: 4031 - protein, 8 aa, Artificial Sequence
  Synthetic construct
GFTFSSYA

SEQ ID NO: 4032 - protein, 8 aa, Artificial Sequence
  Synthetic construct
GFTFSSYA

SEQ ID NO: 4033 - protein, 8 aa, Artificial Sequence
  Synthetic construct
GGSFSNYV

SEQ ID NO: 4034 - protein, 8 aa, Artificial Sequence
  Synthetic construct
GGIFSGYS

SEQ ID NO: 4035 - protein, 8 aa, Artificial Sequence
  Synthetic construct
GFTFSSHS

SEQ ID NO: 4036 - protein, 10 aa, Artificial Sequence
  Synthetic construct
GFSVNTSGVG

SEQ ID NO: 4037 - protein, 8 aa, Artificial Sequence
  Synthetic construct
GYIFTNHW

SEQ ID NO: 4038 - protein, 10 aa, Artificial Sequence
  Synthetic construct
GGSISSGSYY

SEQ ID NO: 4039 - protein, 10 aa, Artificial Sequence
  Synthetic construct
GGSISSSDYY

SEQ ID NO: 4040 - protein, 8 aa, Artificial Sequence
  Synthetic construct
GGTFTSHA

SEQ ID NO: 4041 - protein, 8 aa, Artificial Sequence
  Synthetic construct
GYTFTRYP

SEQ ID NO: 4042 - protein, 10 aa, Artificial Sequence
  Synthetic construct
GGSISSSSYY

SEQ ID NO: 4043 - protein, 8 aa, Artificial Sequence
  Synthetic construct
GFTVSSNY

SEQ ID NO: 4044 - protein, 8 aa, Artificial Sequence
  Synthetic construct
GFTLRNYA

SEQ ID NO: 4045 - protein, 8 aa, Artificial Sequence
  Synthetic construct
GFTVSRNY

SEQ ID NO: 4046 - protein, 8 aa, Artificial Sequence
  Synthetic construct
GFIFSDHY

SEQ ID NO: 4047 - protein, 8 aa, Artificial Sequence
  Synthetic construct
GGTVSSNA

SEQ ID NO: 4048 - protein, 8 aa, Artificial Sequence
  Synthetic construct
GFTFEDFA

SEQ ID NO: 4049 - protein, 8 aa, Artificial Sequence
  Synthetic construct
GFTFRNYG

SEQ ID NO: 4050 - protein, 8 aa, Artificial Sequence
  Synthetic construct
GFTFSSYW

SEQ ID NO: 4051 - protein, 8 aa, Artificial Sequence
  Synthetic construct
GYTFTKHA

SEQ ID NO: 4052 - protein, 8 aa, Artificial Sequence
  Synthetic construct
GVIFRNAW

SEQ ID NO: 4053 - protein, 8 aa, Artificial Sequence
  Synthetic construct
GFSFSDYY

SEQ ID NO: 4054 - protein, 8 aa, Artificial Sequence
  Synthetic construct
GGALSGYY

SEQ ID NO: 4055 - protein, 8 aa, Artificial Sequence
  Synthetic construct
GFTFSYFG

SEQ ID NO: 4056 - protein, 8 aa, Artificial Sequence
  Synthetic construct
GFTFSTSV

SEQ ID NO: 4057 - protein, 8 aa, Artificial Sequence
  Synthetic construct
GFTFSSYW

SEQ ID NO: 4058 - protein, 10 aa, Artificial Sequence
  Synthetic construct
GLSLTTSGVS

SEQ ID NO: 4059 - protein, 8 aa, Artificial Sequence
  Synthetic construct
GFTFSSYS

SEQ ID NO: 4060 - protein, 8 aa, Artificial Sequence
  Synthetic construct
GYSFTSNA

SEQ ID NO: 4061 - protein, 10 aa, Artificial Sequence
  Synthetic construct
RGSISSSSYY

SEQ ID NO: 4062 - protein, 8 aa, Artificial Sequence
  Synthetic construct
GFSFNSYA

SEQ ID NO: 4063 - protein, 8 aa, Artificial Sequence
  Synthetic construct
GFTFSTYA

SEQ ID NO: 4064 - protein, 7 aa, Artificial Sequence
  Synthetic construct
GFTFSSY

SEQ ID NO: 4065 - protein, 8 aa, Artificial Sequence
  Synthetic construct
GYDFTTFG

SEQ ID NO: 4066 - protein, 8 aa, Artificial Sequence
  Synthetic construct
GFTFKDKW

SEQ ID NO: 4067 - protein, 8 aa, Artificial Sequence
  Synthetic construct
GYSFTTNW

SEQ ID NO: 4068 - protein, 8 aa, Artificial Sequence
  Synthetic construct
RFTFSSYA

SEQ ID NO: 4069 - protein, 8 aa, Artificial Sequence
  Synthetic construct
GFTFSTYA

SEQ ID NO: 4070 - protein, 8 aa, Artificial Sequence
  Synthetic construct
GFTFSSYA

SEQ ID NO: 4071 - protein, 8 aa, Artificial Sequence
  Synthetic construct
GFTFSSYS

SEQ ID NO: 4072 - protein, 8 aa, Artificial Sequence
  Synthetic construct
GFTFSNYP

SEQ ID NO: 4073 - protein, 8 aa, Artificial Sequence
  Synthetic construct
GFTFSSYS

SEQ ID NO: 4074 - protein, 10 aa, Artificial Sequence
  Synthetic construct
GGSISTGGFY

SEQ ID NO: 4075 - protein, 10 aa, Artificial Sequence
  Synthetic construct
GGSIRGSSYY

SEQ ID NO: 4076 - protein, 8 aa, Artificial Sequence
  Synthetic construct
GYMFTSYG

SEQ ID NO: 4077 - protein, 10 aa, Artificial Sequence
  Synthetic construct
GGSISSSSYY

SEQ ID NO: 4078 - protein, 10 aa, Artificial Sequence
  Synthetic construct
GGSISSSSYY

SEQ ID NO: 4079 - protein, 8 aa, Artificial Sequence
  Synthetic construct
GFTFSTYN

SEQ ID NO: 4080 - protein, 10 aa, Artificial Sequence
  Synthetic construct
GFSLSTSGVG

SEQ ID NO: 4081 - protein, 8 aa, Artificial Sequence
  Synthetic construct
GFTFNIYG

SEQ ID NO: 4082 - protein, 10 aa, Artificial Sequence
  Synthetic construct
GDSVSSNSAA

SEQ ID NO: 4083 - protein, 8 aa, Artificial Sequence
  Synthetic construct
GSFVSTNY

SEQ ID NO: 4084 - protein, 8 aa, Artificial Sequence
  Synthetic construct
GYTLIEVP

SEQ ID NO: 4085 - protein, 8 aa, Artificial Sequence
  Synthetic construct
GFTFNTYA

SEQ ID NO: 4086 - protein, 10 aa, Artificial Sequence
  Synthetic construct
GGSIRSGNFY

SEQ ID NO: 4087 - protein, 10 aa, Artificial Sequence
  Synthetic construct
GDSVSSGSYY

SEQ ID NO: 4088 - protein, 8 aa, Artificial Sequence
  Synthetic construct
GFTFSSSA

SEQ ID NO: 4089 - protein, 8 aa, Artificial Sequence
  Synthetic construct
GFTFSSYA

SEQ ID NO: 4090 - protein, 8 aa, Artificial Sequence
  Synthetic construct
GGSFSSYT

SEQ ID NO: 4091 - protein, 8 aa, Artificial Sequence
  Synthetic construct
GFTFSSYG

SEQ ID NO: 4092 - protein, 8 aa, Artificial Sequence
  Synthetic construct
GFTLSSHG

SEQ ID NO: 4093 - protein, 8 aa, Artificial Sequence
  Synthetic construct
GGTFSSYT

SEQ ID NO: 4094 - protein, 8 aa, Artificial Sequence
  Synthetic construct
GYTFTTYG

SEQ ID NO: 4095 - protein, 8 aa, Artificial Sequence
  Synthetic construct
GFTFSNYG

SEQ ID NO: 4096 - protein, 8 aa, Artificial Sequence
  Synthetic construct
GFTFSDHY

SEQ ID NO: 4097 - protein, 10 aa, Artificial Sequence
  Synthetic construct
GFSFTTTGVA

SEQ ID NO: 4098 - protein, 8 aa, Artificial Sequence
  Synthetic construct
GFTFSNYS

SEQ ID NO: 4099 - protein, 8 aa, Artificial Sequence
  Synthetic construct
GYTFTSYD

SEQ ID NO: 4100 - protein, 8 aa, Artificial Sequence
  Synthetic construct
GFTFRSYA

SEQ ID NO: 4101 - protein, 8 aa, Artificial Sequence
  Synthetic construct
EFTFSSYS

SEQ ID NO: 4102 - protein, 8 aa, Artificial Sequence
  Synthetic construct
GGSISSYY

SEQ ID NO: 4103 - protein, 10 aa, Artificial Sequence
  Synthetic construct
GFSLSTTGVG

SEQ ID NO: 4104 - protein, 8 aa, Artificial Sequence
  Synthetic construct
GFSFSSYG

SEQ ID NO: 4105 - protein, 8 aa, Artificial Sequence
  Synthetic construct
GGTFSKYT

SEQ ID NO: 4106 - protein, 9 aa, Artificial Sequence
  Synthetic construct
NYSINSNSY

SEQ ID NO: 4107 - protein, 8 aa, Artificial Sequence
  Synthetic construct
GFIFGKYG

SEQ ID NO: 4108 - protein, 10 aa, Artificial Sequence
  Synthetic construct
GGSISSSSYY

SEQ ID NO: 4109 - protein, 8 aa, Artificial Sequence
  Synthetic construct
GFTFSNYG

SEQ ID NO: 4110 - protein, 8 aa, Artificial Sequence
  Synthetic construct
GYTFTSYG

SEQ ID NO: 4111 - protein, 8 aa, Artificial Sequence
  Synthetic construct
GFTFSSYG

SEQ ID NO: 4112 - protein, 8 aa, Artificial Sequence
  Synthetic construct
GFTFSSYS

SEQ ID NO: 4113 - protein, 8 aa, Artificial Sequence
  Synthetic construct
GFTFSSFA

SEQ ID NO: 4114 - protein, 8 aa, Artificial Sequence
  Synthetic construct
GYTFTSNW

SEQ ID NO: 4115 - protein, 8 aa, Artificial Sequence
  Synthetic construct
GFTFDDYT

SEQ ID NO: 4116 - protein, 8 aa, Artificial Sequence
  Synthetic construct
GFTFSDYA

SEQ ID NO: 4117 - protein, 8 aa, Artificial Sequence
  Synthetic construct
GFTFNMYA

SEQ ID NO: 4118 - protein, 10 aa, Artificial Sequence
  Synthetic construct
GFSLNTSGVA

SEQ ID NO: 4119 - protein, 8 aa, Artificial Sequence
  Synthetic construct
GYTLPELS

SEQ ID NO: 4120 - protein, 10 aa, Artificial Sequence
  Synthetic construct
GGSISSSPYY

SEQ ID NO: 4121 - protein, 8 aa, Artificial Sequence
  Synthetic construct
GFTFEDYA

SEQ ID NO: 4122 - protein, 10 aa, Artificial Sequence
  Synthetic construct
GGSISSNSYY

SEQ ID NO: 4123 - protein, 8 aa, Artificial Sequence
  Synthetic construct
GFIFRTYA

SEQ ID NO: 4124 - protein, 8 aa, Artificial Sequence
  Synthetic construct
GYTLVELS

SEQ ID NO: 4125 - protein, 8 aa, Artificial Sequence
  Synthetic construct
GFIFSTFA

SEQ ID NO: 4126 - protein, 8 aa, Artificial Sequence
  Synthetic construct
GYIFNNYD

SEQ ID NO: 4127 - protein, 9 aa, Artificial Sequence
  Synthetic construct
GGSISSSDW

SEQ ID NO: 4128 - protein, 8 aa, Artificial Sequence
  Synthetic construct
GFIFSTYG

SEQ ID NO: 4129 - protein, 8 aa, Artificial Sequence
  Synthetic construct
GYTFTGYF

SEQ ID NO: 4130 - protein, 8 aa, Artificial Sequence
  Synthetic construct
GFTFSTYA

SEQ ID NO: 4131 - protein, 8 aa, Artificial Sequence
  Synthetic construct
GFTLSSYT

SEQ ID NO: 4132 - protein, 8 aa, Artificial Sequence
  Synthetic construct
GFAFNTFG

SEQ ID NO: 4133 - protein, 8 aa, Artificial Sequence
  Synthetic construct
GFTFSRYW

SEQ ID NO: 4134 - protein, 8 aa, Artificial Sequence
  Synthetic construct
GYSFTSYW

SEQ ID NO: 4135 - protein, 8 aa, Artificial Sequence
  Synthetic construct
GFNFSSYV

SEQ ID NO: 4136 - protein, 10 aa, Artificial Sequence
  Synthetic construct
GFSFNTSRVA

SEQ ID NO: 4137 - protein, 8 aa, Artificial Sequence
  Synthetic construct
GFTFSTYA

SEQ ID NO: 4138 - protein, 8 aa, Artificial Sequence
  Synthetic construct
GFTFSDYW

SEQ ID NO: 4139 - protein, 8 aa, Artificial Sequence
  Synthetic construct
GFTFSNYS

SEQ ID NO: 4140 - protein, 8 aa, Artificial Sequence
  Synthetic construct
GFTFSNYG

SEQ ID NO: 4141 - protein, 7 aa, Artificial Sequence
  Synthetic construct
IYHSGST

SEQ ID NO: 4142 - protein, 7 aa, Artificial Sequence
  Synthetic construct
IYHSGST

SEQ ID NO: 4143 - protein, 8 aa, Artificial Sequence
  Synthetic construct
ISYDGSNK

SEQ ID NO: 4144 - protein, 8 aa, Artificial Sequence
  Synthetic construct
VYPGDSDT

SEQ ID NO: 4145 - protein, 8 aa, Artificial Sequence
  Synthetic construct
ISAYNSNT

SEQ ID NO: 4146 - protein, 7 aa, Artificial Sequence
  Synthetic construct
IYNSGST

SEQ ID NO: 4147 - protein, 8 aa, Artificial Sequence
  Synthetic construct
ISYDGNNK

SEQ ID NO: 4148 - protein, 7 aa, Artificial Sequence
  Synthetic construct
IRSSSYI

SEQ ID NO: 4149 - protein, 8 aa, Artificial Sequence
  Synthetic construct
INPSGGTT

SEQ ID NO: 4150 - protein, 8 aa, Artificial Sequence
  Synthetic construct
FDPEDAET

SEQ ID NO: 4151 - protein, 8 aa, Artificial Sequence
  Synthetic construct
ISGSGGNT

SEQ ID NO: 4152 - protein, 8 aa, Artificial Sequence
  Synthetic construct
ISYDGSNK

SEQ ID NO: 4153 - protein, 7 aa, Artificial Sequence
  Synthetic construct
IYHSGNT

SEQ ID NO: 4154 - protein, 7 aa, Artificial Sequence
  Synthetic construct
IYYSGST

SEQ ID NO: 4155 - protein, 8 aa, Artificial Sequence
  Synthetic construct
IYPGDSDT

SEQ ID NO: 4156 - protein, 8 aa, Artificial Sequence
  Synthetic construct
IIPIIGTA

SEQ ID NO: 4157 - protein, 8 aa, Artificial Sequence
  Synthetic construct
IKQDGSEK

SEQ ID NO: 4158 - protein, 8 aa, Artificial Sequence
  Synthetic construct
IWFDGSNK

SEQ ID NO: 4159 - protein, 8 aa, Artificial Sequence
  Synthetic construct
ISVHNGNT

SEQ ID NO: 4160 - protein, 8 aa, Artificial Sequence
  Synthetic construct
ISYDGINK

SEQ ID NO: 4161 - protein, 8 aa, Artificial Sequence
  Synthetic construct
ISYDGNNK

SEQ ID NO: 4162 - protein, 8 aa, Artificial Sequence
  Synthetic construct
IWYDGSKK

SEQ ID NO: 4163 - protein, 8 aa, Artificial Sequence
  Synthetic construct
IIPIFGTA

SEQ ID NO: 4164 - protein, 8 aa, Artificial Sequence
  Synthetic construct
ISYDGGNK

SEQ ID NO: 4165 - protein, 8 aa, Artificial Sequence
  Synthetic construct
ISYDGNNK

SEQ ID NO: 4166 - protein, 7 aa, Artificial Sequence
  Synthetic construct
IYWDDDK

SEQ ID NO: 4167 - protein, 7 aa, Artificial Sequence
  Synthetic construct
IGTAGDT

SEQ ID NO: 4168 - protein, 8 aa, Artificial Sequence
  Synthetic construct
IVPIFGTT

SEQ ID NO: 4169 - protein, 7 aa, Artificial Sequence
  Synthetic construct
IFYSGIT

SEQ ID NO: 4170 - protein, 8 aa, Artificial Sequence
  Synthetic construct
ISAYNGKT

SEQ ID NO: 4171 - protein, 8 aa, Artificial Sequence
  Synthetic construct
IVGMFGTT

SEQ ID NO: 4172 - protein, 7 aa, Artificial Sequence
  Synthetic construct
IYTSGRT

SEQ ID NO: 4173 - protein, 8 aa, Artificial Sequence
  Synthetic construct
INTNTGTP

SEQ ID NO: 4174 - protein, 10 aa, Artificial Sequence
  Synthetic construct
IKSHTDGGTT

SEQ ID NO: 4175 - protein, 8 aa, Artificial Sequence
  Synthetic construct
INTNTGNP

SEQ ID NO: 4176 - protein, 8 aa, Artificial Sequence
  Synthetic construct
ISSSSSYI

SEQ ID NO: 4177 - protein, 8 aa, Artificial Sequence
  Synthetic construct
ISWNSGSI

SEQ ID NO: 4178 - protein, 8 aa, Artificial Sequence
  Synthetic construct
IRSSSGTI

SEQ ID NO: 4179 - protein, 8 aa, Artificial Sequence
  Synthetic construct
IWYDGSKK

SEQ ID NO: 4180 - protein, 8 aa, Artificial Sequence
  Synthetic construct
INTDTGNP

SEQ ID NO: 4181 - protein, 8 aa, Artificial Sequence
  Synthetic construct
ISNSGSDI

SEQ ID NO: 4182 - protein, 8 aa, Artificial Sequence
  Synthetic construct
ISYDGNNK

SEQ ID NO: 4183 - protein, 7 aa, Artificial Sequence
  Synthetic construct
MYYRGST

SEQ ID NO: 4184 - protein, 8 aa, Artificial Sequence
  Synthetic construct
LSSDGHGT

SEQ ID NO: 4185 - protein, 8 aa, Artificial Sequence
  Synthetic construct
IAVGSGKT

SEQ ID NO: 4186 - protein, 8 aa, Artificial Sequence
  Synthetic construct
ISGSGGST

SEQ ID NO: 4187 - protein, 8 aa, Artificial Sequence
  Synthetic construct
ISGSGGDT

SEQ ID NO: 4188 - protein, 8 aa, Artificial Sequence
  Synthetic construct
ITPILGIP

SEQ ID NO: 4189 - protein, 7 aa, Artificial Sequence
  Synthetic construct
VSDSGST

SEQ ID NO: 4190 - protein, 8 aa, Artificial Sequence
  Synthetic construct
ITGTASNT

SEQ ID NO: 4191 - protein, 7 aa, Artificial Sequence
  Synthetic construct
IYWDDDQ

SEQ ID NO: 4192 - protein, 7 aa, Artificial Sequence
  Synthetic construct
ISYSGDT

SEQ ID NO: 4193 - protein, 8 aa, Artificial Sequence
  Synthetic construct
FRVSGGST

SEQ ID NO: 4194 - protein, 8 aa, Artificial Sequence
  Synthetic construct
ISVSNGNT

SEQ ID NO: 4195 - protein, 8 aa, Artificial Sequence
  Synthetic construct
ISGGGGST

SEQ ID NO: 4196 - protein, 7 aa, Artificial Sequence
  Synthetic construct
IYYSGST

SEQ ID NO: 4197 - protein, 7 aa, Artificial Sequence
  Synthetic construct
IYYSGST

SEQ ID NO: 4198 - protein, 8 aa, Artificial Sequence
  Synthetic construct
ISSSSSYI

SEQ ID NO: 4199 - protein, 8 aa, Artificial Sequence
  Synthetic construct
IIPFLGIA

SEQ ID NO: 4200 - protein, 8 aa, Artificial Sequence
  Synthetic construct
MYYDGTNN

SEQ ID NO: 4201 - protein, 8 aa, Artificial Sequence
  Synthetic construct
IYPIDSDT

SEQ ID NO: 4202 - protein, 8 aa, Artificial Sequence
  Synthetic construct
IWYDGSNK

SEQ ID NO: 4203 - protein, 8 aa, Artificial Sequence
  Synthetic construct
INAGHGNT

SEQ ID NO: 4204 - protein, 7 aa, Artificial Sequence
  Synthetic construct
IYNSGST

SEQ ID NO: 4205 - protein, 7 aa, Artificial Sequence
  Synthetic construct
IYYSGST

SEQ ID NO: 4206 - protein, 7 aa, Artificial Sequence
  Synthetic construct
VYQDGNT

SEQ ID NO: 4207 - protein, 7 aa, Artificial Sequence
  Synthetic construct
ISHNGRN

SEQ ID NO: 4208 - protein, 8 aa, Artificial Sequence
  Synthetic construct
ISYDESHK

SEQ ID NO: 4209 - protein, 8 aa, Artificial Sequence
  Synthetic construct
IDQDGSEK

SEQ ID NO: 4210 - protein, 8 aa, Artificial Sequence
  Synthetic construct
IKQDGSGK

SEQ ID NO: 4211 - protein, 8 aa, Artificial Sequence
  Synthetic construct
IYPGDSDT

SEQ ID NO: 4212 - protein, 8 aa, Artificial Sequence
  Synthetic construct
IFPGDSDT

SEQ ID NO: 4213 - protein, 8 aa, Artificial Sequence
  Synthetic construct
ISYDGSEK

SEQ ID NO: 4214 - protein, 8 aa, Artificial Sequence
  Synthetic construct
ISYEGSGS

SEQ ID NO: 4215 - protein, 8 aa, Artificial Sequence
  Synthetic construct
IHTRSGNP

SEQ ID NO: 4216 - protein, 8 aa, Artificial Sequence
  Synthetic construct
ISWNSATI

SEQ ID NO: 4217 - protein, 7 aa, Artificial Sequence
  Synthetic construct
VFWDDDK

SEQ ID NO: 4218 - protein, 7 aa, Artificial Sequence
  Synthetic construct
IYTDGST

SEQ ID NO: 4219 - protein, 8 aa, Artificial Sequence
  Synthetic construct
ISSDGSNK

SEQ ID NO: 4220 - protein, 8 aa, Artificial Sequence
  Synthetic construct
IIPIFGAA

SEQ ID NO: 4221 - protein, 8 aa, Artificial Sequence
  Synthetic construct
MSYDGSHI

SEQ ID NO: 4222 - protein, 8 aa, Artificial Sequence
  Synthetic construct
ISYDGSNK

SEQ ID NO: 4223 - protein, 9 aa, Artificial Sequence
  Synthetic construct
TYYRSKWYN

SEQ ID NO: 4224 - protein, 7 aa, Artificial Sequence
  Synthetic construct
IFSNDEK

SEQ ID NO: 4225 - protein, 7 aa, Artificial Sequence
  Synthetic construct
IHSWGTT

SEQ ID NO: 4226 - protein, 8 aa, Artificial Sequence
  Synthetic construct
IKQDGSEK

SEQ ID NO: 4227 - protein, 8 aa, Artificial Sequence
  Synthetic construct
ISSNGGGT

SEQ ID NO: 4228 - protein, 8 aa, Artificial Sequence
  Synthetic construct
INAGNGNL

SEQ ID NO: 4229 - protein, 8 aa, Artificial Sequence
  Synthetic construct
ISYDGINK

SEQ ID NO: 4230 - protein, 8 aa, Artificial Sequence
  Synthetic construct
ISGSGGST

SEQ ID NO: 4231 - protein, 7 aa, Artificial Sequence
  Synthetic construct
IYYSGST

SEQ ID NO: 4232 - protein, 8 aa, Artificial Sequence
  Synthetic construct
VSYDGTLK

SEQ ID NO: 4233 - protein, 8 aa, Artificial Sequence
  Synthetic construct
FDPEDGER

SEQ ID NO: 4234 - protein, 8 aa, Artificial Sequence
  Synthetic construct
IDPSDSYT

SEQ ID NO: 4235 - protein, 8 aa, Artificial Sequence
  Synthetic construct
INTNTGNP

SEQ ID NO: 4236 - protein, 8 aa, Artificial Sequence
  Synthetic construct
ISYDGSNK

SEQ ID NO: 4237 - protein, 8 aa, Artificial Sequence
  Synthetic construct
ISDSGYST

SEQ ID NO: 4238 - protein, 7 aa, Artificial Sequence
  Synthetic construct
IYSSGAT

SEQ ID NO: 4239 - protein, 8 aa, Artificial Sequence
  Synthetic construct
ISYDGSNE

SEQ ID NO: 4240 - protein, 7 aa, Artificial Sequence
  Synthetic construct
IYYTGST

SEQ ID NO: 4241 - protein, 7 aa, Artificial Sequence
  Synthetic construct
IYSGGTT

SEQ ID NO: 4242 - protein, 8 aa, Artificial Sequence
  Synthetic construct
VSYDGSDE

SEQ ID NO: 4243 - protein, 8 aa, Artificial Sequence
  Synthetic construct
IGSSDSII

SEQ ID NO: 4244 - protein, 7 aa, Artificial Sequence
  Synthetic construct
IYASGGT

SEQ ID NO: 4245 - protein, 7 aa, Artificial Sequence
  Synthetic construct
IYWDDDK

SEQ ID NO: 4246 - protein, 8 aa, Artificial Sequence
  Synthetic construct
ISYDGSNK

SEQ ID NO: 4247 - protein, 7 aa, Artificial Sequence
  Synthetic construct
IYYSGST

SEQ ID NO: 4248 - protein, 8 aa, Artificial Sequence
  Synthetic construct
ISYDGRNK

SEQ ID NO: 4249 - protein, 8 aa, Artificial Sequence
  Synthetic construct
INPSGGST

SEQ ID NO: 4250 - protein, 8 aa, Artificial Sequence
  Synthetic construct
IRYDGSNK

SEQ ID NO: 4251 - protein, 8 aa, Artificial Sequence
  Synthetic construct
INPNSGVT

SEQ ID NO: 4252 - protein, 8 aa, Artificial Sequence
  Synthetic construct
ISSHGGST

SEQ ID NO: 4253 - protein, 8 aa, Artificial Sequence
  Synthetic construct
IKQDGSDK

SEQ ID NO: 4254 - protein, 8 aa, Artificial Sequence
  Synthetic construct
ITWDGGIT

SEQ ID NO: 4255 - protein, 8 aa, Artificial Sequence
  Synthetic construct
INPGGGST

SEQ ID NO: 4256 - protein, 7 aa, Artificial Sequence
  Synthetic construct
IGTAGDT

SEQ ID NO: 4257 - protein, 7 aa, Artificial Sequence
  Synthetic construct
MSYGGSA

SEQ ID NO: 4258 - protein, 7 aa, Artificial Sequence
  Synthetic construct
IYPGGST

SEQ ID NO: 4259 - protein, 8 aa, Artificial Sequence
  Synthetic construct
ISSDGSNE

SEQ ID NO: 4260 - protein, 8 aa, Artificial Sequence
  Synthetic construct
FDPELAET

SEQ ID NO: 4261 - protein, 8 aa, Artificial Sequence
  Synthetic construct
ISYDGYNK

SEQ ID NO: 4262 - protein, 8 aa, Artificial Sequence
  Synthetic construct
ISYDGINK

SEQ ID NO: 4263 - protein, 7 aa, Artificial Sequence
  Synthetic construct
IYYSGST

SEQ ID NO: 4264 - protein, 9 aa, Artificial Sequence
  Synthetic construct
TYYRSKWYN

SEQ ID NO: 4265 - protein, 7 aa, Artificial Sequence
  Synthetic construct
IFYNGDT

SEQ ID NO: 4266 - protein, 8 aa, Artificial Sequence
  Synthetic construct
SIPIFGTA

SEQ ID NO: 4267 - protein, 8 aa, Artificial Sequence
  Synthetic construct
ISYDGSDK

SEQ ID NO: 4268 - protein, 8 aa, Artificial Sequence
  Synthetic construct
IIGMFGTT

SEQ ID NO: 4269 - protein, 8 aa, Artificial Sequence
  Synthetic construct
ISSSSSYI

SEQ ID NO: 4270 - protein, 8 aa, Artificial Sequence
  Synthetic construct
IIPILDIG

SEQ ID NO: 4271 - protein, 8 aa, Artificial Sequence
  Synthetic construct
ISASIGRR

SEQ ID NO: 4272 - protein, 8 aa, Artificial Sequence
  Synthetic construct
ISYGGSHK

SEQ ID NO: 4273 - protein, 8 aa, Artificial Sequence
  Synthetic construct
IIPFLDVS

SEQ ID NO: 4274 - protein, 8 aa, Artificial Sequence
  Synthetic construct
IWHDGSKE

SEQ ID NO: 4275 - protein, 8 aa, Artificial Sequence
  Synthetic construct
ISYDGTNK

SEQ ID NO: 4276 - protein, 8 aa, Artificial Sequence
  Synthetic construct
IGGSDDST

SEQ ID NO: 4277 - protein, 8 aa, Artificial Sequence
  Synthetic construct
STWNSATI

SEQ ID NO: 4278 - protein, 7 aa, Artificial Sequence
  Synthetic construct
INYSGTT

SEQ ID NO: 4279 - protein, 8 aa, Artificial Sequence
  Synthetic construct
INPSGDYT

SEQ ID NO: 4280 - protein, 8 aa, Artificial Sequence
  Synthetic construct
IWYDGSDQ

SEQ ID NO: 4281 - protein, 8 aa, Artificial Sequence
  Synthetic construct
INPSGGST

SEQ ID NO: 4282 - protein, 8 aa, Artificial Sequence
  Synthetic construct
IKQDGSEK

SEQ ID NO: 4283 - protein, 8 aa, Artificial Sequence
  Synthetic construct
IVPIFGST

SEQ ID NO: 4284 - protein, 8 aa, Artificial Sequence
  Synthetic construct
ISGSGHST

SEQ ID NO: 4285 - protein, 7 aa, Artificial Sequence
  Synthetic construct
IYHSGST

SEQ ID NO: 4286 - protein, 8 aa, Artificial Sequence
  Synthetic construct
IIPIFGTA

SEQ ID NO: 4287 - protein, 8 aa, Artificial Sequence
  Synthetic construct
ISTTTGNP

SEQ ID NO: 4288 - protein, 8 aa, Artificial Sequence
  Synthetic construct
IKQDGSEK

SEQ ID NO: 4289 - protein, 8 aa, Artificial Sequence
  Synthetic construct
ISGAGGST

SEQ ID NO: 4290 - protein, 8 aa, Artificial Sequence
  Synthetic construct
FDPGTGET

SEQ ID NO: 4291 - protein, 8 aa, Artificial Sequence
  Synthetic construct
INAANGDK

SEQ ID NO: 4292 - protein, 8 aa, Artificial Sequence
  Synthetic construct
ISYDGINK

SEQ ID NO: 4293 - protein, 8 aa, Artificial Sequence
  Synthetic construct
INPDAGST

SEQ ID NO: 4294 - protein, 8 aa, Artificial Sequence
  Synthetic construct
IYPGDSDT

SEQ ID NO: 4295 - protein, 7 aa, Artificial Sequence
  Synthetic construct
INHSGNT

SEQ ID NO: 4296 - protein, 8 aa, Artificial Sequence
  Synthetic construct
FDPEDTKT

SEQ ID NO: 4297 - protein, 8 aa, Artificial Sequence
  Synthetic construct
ISGRGNTK

SEQ ID NO: 4298 - protein, 7 aa, Artificial Sequence
  Synthetic construct
IYTSGST

SEQ ID NO: 4299 - protein, 8 aa, Artificial Sequence
  Synthetic construct
INSDGSST

SEQ ID NO: 4300 - protein, 8 aa, Artificial Sequence
  Synthetic construct
VSYDGSNK

SEQ ID NO: 4301 - protein, 8 aa, Artificial Sequence
  Synthetic construct
IIPMLGTR

SEQ ID NO: 4302 - protein, 7 aa, Artificial Sequence
  Synthetic construct
IYYSGST

SEQ ID NO: 4303 - protein, 7 aa, Artificial Sequence
  Synthetic construct
IYYTGST

SEQ ID NO: 4304 - protein, 8 aa, Artificial Sequence
  Synthetic construct
INPSGGSA

SEQ ID NO: 4305 - protein, 7 aa, Artificial Sequence
  Synthetic construct
MYYGGST

SEQ ID NO: 4306 - protein, 8 aa, Artificial Sequence
  Synthetic construct
VSAYNGAT

SEQ ID NO: 4307 - protein, 8 aa, Artificial Sequence
  Synthetic construct
ISYDGGNK

SEQ ID NO: 4308 - protein, 8 aa, Artificial Sequence
  Synthetic construct
VSGSGGST

SEQ ID NO: 4309 - protein, 8 aa, Artificial Sequence
  Synthetic construct
ISYDGINK

SEQ ID NO: 4310 - protein, 8 aa, Artificial Sequence
  Synthetic construct
ISYDGSKK

SEQ ID NO: 4311 - protein, 7 aa, Artificial Sequence
  Synthetic construct
INPSGRT

SEQ ID NO: 4312 - protein, 8 aa, Artificial Sequence
  Synthetic construct
IVVGSGNT

SEQ ID NO: 4313 - protein, 7 aa, Artificial Sequence
  Synthetic construct
IYYSGST

SEQ ID NO: 4314 - protein, 10 aa, Artificial Sequence
  Synthetic construct
IRSKANSYAT

SEQ ID NO: 4315 - protein, 8 aa, Artificial Sequence
  Synthetic construct
INQYGTEK

SEQ ID NO: 4316 - protein, 7 aa, Artificial Sequence
  Synthetic construct
IGTAGDT

SEQ ID NO: 4317 - protein, 8 aa, Artificial Sequence
  Synthetic construct
IDPGDPYS

SEQ ID NO: 4318 - protein, 8 aa, Artificial Sequence
  Synthetic construct
ISYDGRNK

SEQ ID NO: 4319 - protein, 8 aa, Artificial Sequence
  Synthetic construct
ISSSSSYI

SEQ ID NO: 4320 - protein, 8 aa, Artificial Sequence
  Synthetic construct
ISFDGSNK

SEQ ID NO: 4321 - protein, 7 aa, Artificial Sequence
  Synthetic construct
ISHSGST

SEQ ID NO: 4322 - protein, 7 aa, Artificial Sequence
  Synthetic construct
IYYSGTT

SEQ ID NO: 4323 - protein, 8 aa, Artificial Sequence
  Synthetic construct
STWNSGTI

SEQ ID NO: 4324 - protein, 7 aa, Artificial Sequence
  Synthetic construct
IFHSGSI

SEQ ID NO: 4325 - protein, 8 aa, Artificial Sequence
  Synthetic construct
INPSGGST

SEQ ID NO: 4326 - protein, 8 aa, Artificial Sequence
  Synthetic construct
ISAYNGNT

SEQ ID NO: 4327 - protein, 8 aa, Artificial Sequence
  Synthetic construct
ISGSGGST

SEQ ID NO: 4328 - protein, 8 aa, Artificial Sequence
  Synthetic construct
ISGSGGST

SEQ ID NO: 4329 - protein, 8 aa, Artificial Sequence
  Synthetic construct
INAANGDT

SEQ ID NO: 4330 - protein, 8 aa, Artificial Sequence
  Synthetic construct
IKQDGSEK

SEQ ID NO: 4331 - protein, 8 aa, Artificial Sequence
  Synthetic construct
IYPGNSDT

SEQ ID NO: 4332 - protein, 7 aa, Artificial Sequence
  Synthetic construct
IYTSGST

SEQ ID NO: 4333 - protein, 7 aa, Artificial Sequence
  Synthetic construct
IYYSGST

SEQ ID NO: 4334 - protein, 8 aa, Artificial Sequence
  Synthetic construct
INPYNGNT

SEQ ID NO: 4335 - protein, 7 aa, Artificial Sequence
  Synthetic construct
IYSDGST

SEQ ID NO: 4336 - protein, 8 aa, Artificial Sequence
  Synthetic construct
ISPSNGGT

SEQ ID NO: 4337 - protein, 8 aa, Artificial Sequence
  Synthetic construct
IIPIFGTA

SEQ ID NO: 4338 - protein, 8 aa, Artificial Sequence
  Synthetic construct
INVGNGNT

SEQ ID NO: 4339 - protein, 8 aa, Artificial Sequence
  Synthetic construct
IYPDDSYT

SEQ ID NO: 4340 - protein, 8 aa, Artificial Sequence
  Synthetic construct
SIPMLDIA

SEQ ID NO: 4341 - protein, 8 aa, Artificial Sequence
  Synthetic construct
ISNDGSDK

SEQ ID NO: 4342 - protein, 8 aa, Artificial Sequence
  Synthetic construct
FDPEKGET

SEQ ID NO: 4343 - protein, 8 aa, Artificial Sequence
  Synthetic construct
ISAYNGNT

SEQ ID NO: 4344 - protein, 8 aa, Artificial Sequence
  Synthetic construct
IWYDGSNE

SEQ ID NO: 4345 - protein, 8 aa, Artificial Sequence
  Synthetic construct
IYYDGNNK

SEQ ID NO: 4346 - protein, 8 aa, Artificial Sequence
  Synthetic construct
LNSVGSVR

SEQ ID NO: 4347 - protein, 8 aa, Artificial Sequence
  Synthetic construct
ISYDGTDK

SEQ ID NO: 4348 - protein, 7 aa, Artificial Sequence
  Synthetic construct
VYSSGST

SEQ ID NO: 4349 - protein, 8 aa, Artificial Sequence
  Synthetic construct
INAGNDNT

SEQ ID NO: 4350 - protein, 7 aa, Artificial Sequence
  Synthetic construct
IYWDDEK

SEQ ID NO: 4351 - protein, 8 aa, Artificial Sequence
  Synthetic construct
IWYDGSNK

SEQ ID NO: 4352 - protein, 8 aa, Artificial Sequence
  Synthetic construct
INSAESTI

SEQ ID NO: 4353 - protein, 7 aa, Artificial Sequence
  Synthetic construct
IYINGST

SEQ ID NO: 4354 - protein, 8 aa, Artificial Sequence
  Synthetic construct
ISYDGSTI

SEQ ID NO: 4355 - protein, 7 aa, Artificial Sequence
  Synthetic construct
IYYGGST

SEQ ID NO: 4356 - protein, 8 aa, Artificial Sequence
  Synthetic construct
ISPSNGGT

SEQ ID NO: 4357 - protein, 8 aa, Artificial Sequence
  Synthetic construct
TIPIFGTA

SEQ ID NO: 4358 - protein, 8 aa, Artificial Sequence
  Synthetic construct
ISTSSSYI

SEQ ID NO: 4359 - protein, 8 aa, Artificial Sequence
  Synthetic construct
ISSSGSDI

SEQ ID NO: 4360 - protein, 8 aa, Artificial Sequence
  Synthetic construct
LSGNGGRI

SEQ ID NO: 4361 - protein, 8 aa, Artificial Sequence
  Synthetic construct
IIPNFGVA

SEQ ID NO: 4362 - protein, 10 aa, Artificial Sequence
  Synthetic construct
LKSNSAGATT

SEQ ID NO: 4363 - protein, 8 aa, Artificial Sequence
  Synthetic construct
FDPEDGET

SEQ ID NO: 4364 - protein, 8 aa, Artificial Sequence
  Synthetic construct
INANTGIP

SEQ ID NO: 4365 - protein, 8 aa, Artificial Sequence
  Synthetic construct
FDPEDVET

SEQ ID NO: 4366 - protein, 7 aa, Artificial Sequence
  Synthetic construct
IFSNDEK

SEQ ID NO: 4367 - protein, 7 aa, Artificial Sequence
  Synthetic construct
IYHSGNT

SEQ ID NO: 4368 - protein, 7 aa, Artificial Sequence
  Synthetic construct
IQYSGSP

SEQ ID NO: 4369 - protein, 8 aa, Artificial Sequence
  Synthetic construct
ISWNSGSI

SEQ ID NO: 4370 - protein, 7 aa, Artificial Sequence
  Synthetic construct
INHSGNT

SEQ ID NO: 4371 - protein, 8 aa, Artificial Sequence
  Synthetic construct
ISDDSSNK

SEQ ID NO: 4372 - protein, 8 aa, Artificial Sequence
  Synthetic construct
ISAYNGNT

SEQ ID NO: 4373 - protein, 7 aa, Artificial Sequence
  Synthetic construct
IYHSGST

SEQ ID NO: 4374 - protein, 8 aa, Artificial Sequence
  Synthetic construct
ISYDGFNK

SEQ ID NO: 4375 - protein, 8 aa, Artificial Sequence
  Synthetic construct
ISSSSSYI

SEQ ID NO: 4376 - protein, 7 aa, Artificial Sequence
  Synthetic construct
VFYSGGT

SEQ ID NO: 4377 - protein, 7 aa, Artificial Sequence
  Synthetic construct
IYSGGSK

SEQ ID NO: 4378 - protein, 8 aa, Artificial Sequence
  Synthetic construct
IIPIFDTA

SEQ ID NO: 4379 - protein, 8 aa, Artificial Sequence
  Synthetic construct
FDPEDAET

SEQ ID NO: 4380 - protein, 7 aa, Artificial Sequence
  Synthetic construct
IYYSGST

SEQ ID NO: 4381 - protein, 8 aa, Artificial Sequence
  Synthetic construct
ISYDGSNE

SEQ ID NO: 4382 - protein, 8 aa, Artificial Sequence
  Synthetic construct
IGSTGGST

SEQ ID NO: 4383 - protein, 8 aa, Artificial Sequence
  Synthetic construct
ISYDGSQK

SEQ ID NO: 4384 - protein, 7 aa, Artificial Sequence
  Synthetic construct
IYYSGST

SEQ ID NO: 4385 - protein, 8 aa, Artificial Sequence
  Synthetic construct
ISYDGSVQ

SEQ ID NO: 4386 - protein, 8 aa, Artificial Sequence
  Synthetic construct
INTDTGNP

SEQ ID NO: 4387 - protein, 8 aa, Artificial Sequence
  Synthetic construct
IKQDGSEK

SEQ ID NO: 4388 - protein, 8 aa, Artificial Sequence
  Synthetic construct
INTNTGDP

SEQ ID NO: 4389 - protein, 7 aa, Artificial Sequence
  Synthetic construct
IYHSGST

SEQ ID NO: 4390 - protein, 8 aa, Artificial Sequence
  Synthetic construct
ISDDGINT

SEQ ID NO: 4391 - protein, 8 aa, Artificial Sequence
  Synthetic construct
TSFDGNNK

SEQ ID NO: 4392 - protein, 7 aa, Artificial Sequence
  Synthetic construct
IFYTGRT

SEQ ID NO: 4393 - protein, 8 aa, Artificial Sequence
  Synthetic construct
INTNTGNP

SEQ ID NO: 4394 - protein, 7 aa, Artificial Sequence
  Synthetic construct
IYHSGNT

SEQ ID NO: 4395 - protein, 8 aa, Artificial Sequence
  Synthetic construct
ISSDGTNK

SEQ ID NO: 4396 - protein, 8 aa, Artificial Sequence
  Synthetic construct
IIPIFGTA

SEQ ID NO: 4397 - protein, 8 aa, Artificial Sequence
  Synthetic construct
INVNTDER

SEQ ID NO: 4398 - protein, 8 aa, Artificial Sequence
  Synthetic construct
ISYDGSNK

SEQ ID NO: 4399 - protein, 8 aa, Artificial Sequence
  Synthetic construct
ISSSGSST

SEQ ID NO: 4400 - protein, 8 aa, Artificial Sequence
  Synthetic construct
FDPADVKT

SEQ ID NO: 4401 - protein, 7 aa, Artificial Sequence
  Synthetic construct
IYSGGST

SEQ ID NO: 4402 - protein, 7 aa, Artificial Sequence
  Synthetic construct
IYSGGST

SEQ ID NO: 4403 - protein, 8 aa, Artificial Sequence
  Synthetic construct
INAGTGKT

SEQ ID NO: 4404 - protein, 8 aa, Artificial Sequence
  Synthetic construct
VIPIFGTV

SEQ ID NO: 4405 - protein, 8 aa, Artificial Sequence
  Synthetic construct
ISTYKGNT

SEQ ID NO: 4406 - protein, 8 aa, Artificial Sequence
  Synthetic construct
ISSSGSTI

SEQ ID NO: 4407 - protein, 8 aa, Artificial Sequence
  Synthetic construct
MSSSGSVI

SEQ ID NO: 4408 - protein, 8 aa, Artificial Sequence
  Synthetic construct
INAGNGNT

SEQ ID NO: 4409 - protein, 8 aa, Artificial Sequence
  Synthetic construct
IIPTFGTT

SEQ ID NO: 4410 - protein, 8 aa, Artificial Sequence
  Synthetic construct
IWYDGSNE

SEQ ID NO: 4411 - protein, 7 aa, Artificial Sequence
  Synthetic construct
IYHSGST

SEQ ID NO: 4412 - protein, 7 aa, Artificial Sequence
  Synthetic construct
IYYSGNT

SEQ ID NO: 4413 - protein, 7 aa, Artificial Sequence
  Synthetic construct
IYYSGST

SEQ ID NO: 4414 - protein, 8 aa, Artificial Sequence
  Synthetic construct
IYPDDSDT

SEQ ID NO: 4415 - protein, 8 aa, Artificial Sequence
  Synthetic construct
ISAYNGDT

SEQ ID NO: 4416 - protein, 8 aa, Artificial Sequence
  Synthetic construct
ISGGGGST

SEQ ID NO: 4417 - protein, 8 aa, Artificial Sequence
  Synthetic construct
IIPIFDST

SEQ ID NO: 4418 - protein, 8 aa, Artificial Sequence
  Synthetic construct
INTNTGIP

SEQ ID NO: 4419 - protein, 7 aa, Artificial Sequence
  Synthetic construct
VGTAGDT

SEQ ID NO: 4420 - protein, 8 aa, Artificial Sequence
  Synthetic construct
IYPGDSDI

SEQ ID NO: 4421 - protein, 7 aa, Artificial Sequence
  Synthetic construct
IYSGGST

SEQ ID NO: 4422 - protein, 8 aa, Artificial Sequence
  Synthetic construct
ISDIGGST

SEQ ID NO: 4423 - protein, 8 aa, Artificial Sequence
  Synthetic construct
INREGSEK

SEQ ID NO: 4424 - protein, 8 aa, Artificial Sequence
  Synthetic construct
IYPGDSDT

SEQ ID NO: 4425 - protein, 8 aa, Artificial Sequence
  Synthetic construct
IGGSGDAT

SEQ ID NO: 4426 - protein, 7 aa, Artificial Sequence
  Synthetic construct
IYYSGST

SEQ ID NO: 4427 - protein, 7 aa, Artificial Sequence
  Synthetic construct
IYPGGST

SEQ ID NO: 4428 - protein, 8 aa, Artificial Sequence
  Synthetic construct
IYPGDSDT

SEQ ID NO: 4429 - protein, 8 aa, Artificial Sequence
  Synthetic construct
IKQDGRER

SEQ ID NO: 4430 - protein, 8 aa, Artificial Sequence
  Synthetic construct
ISDDNGNT

SEQ ID NO: 4431 - protein, 8 aa, Artificial Sequence
  Synthetic construct
ITPYNGNT

SEQ ID NO: 4432 - protein, 8 aa, Artificial Sequence
  Synthetic construct
MNPNSGNT

SEQ ID NO: 4433 - protein, 8 aa, Artificial Sequence
  Synthetic construct
IEMNGDER

SEQ ID NO: 4434 - protein, 10 aa, Artificial Sequence
  Synthetic construct
LKSNSAGATT

SEQ ID NO: 4435 - protein, 8 aa, Artificial Sequence
  Synthetic construct
IKEDGTKK

SEQ ID NO: 4436 - protein, 8 aa, Artificial Sequence
  Synthetic construct
INPSGGST

SEQ ID NO: 4437 - protein, 7 aa, Artificial Sequence
  Synthetic construct
NSHRGDT

SEQ ID NO: 4438 - protein, 7 aa, Artificial Sequence
  Synthetic construct
IYYSGST

SEQ ID NO: 4439 - protein, 7 aa, Artificial Sequence
  Synthetic construct
INHSGST

SEQ ID NO: 4440 - protein, 7 aa, Artificial Sequence
  Synthetic construct
VYYTGST

SEQ ID NO: 4441 - protein, 8 aa, Artificial Sequence
  Synthetic construct
ISYDATYK

SEQ ID NO: 4442 - protein, 7 aa, Artificial Sequence
  Synthetic construct
TDSSGST

SEQ ID NO: 4443 - protein, 8 aa, Artificial Sequence
  Synthetic construct
IVVGSGNT

SEQ ID NO: 4444 - protein, 8 aa, Artificial Sequence
  Synthetic construct
ISSSSSYI

SEQ ID NO: 4445 - protein, 8 aa, Artificial Sequence
  Synthetic construct
ISGSGGST

SEQ ID NO: 4446 - protein, 8 aa, Artificial Sequence
  Synthetic construct
IVGMFGTT

SEQ ID NO: 4447 - protein, 8 aa, Artificial Sequence
  Synthetic construct
ISYDGTNK

SEQ ID NO: 4448 - protein, 7 aa, Artificial Sequence
  Synthetic construct
VFWDGDK

SEQ ID NO: 4449 - protein, 8 aa, Artificial Sequence
  Synthetic construct
INPNDGDT

SEQ ID NO: 4450 - protein, 7 aa, Artificial Sequence
  Synthetic construct
IYWDDDK

SEQ ID NO: 4451 - protein, 8 aa, Artificial Sequence
  Synthetic construct
VSYDGSNK

SEQ ID NO: 4452 - protein, 9 aa, Artificial Sequence
  Synthetic construct
TNYRSRWSA

SEQ ID NO: 4453 - protein, 8 aa, Artificial Sequence
  Synthetic construct
ITSTSTYI

SEQ ID NO: 4454 - protein, 8 aa, Artificial Sequence
  Synthetic construct
ISGSGATT

SEQ ID NO: 4455 - protein, 7 aa, Artificial Sequence
  Synthetic construct
IYHSGST

SEQ ID NO: 4456 - protein, 8 aa, Artificial Sequence
  Synthetic construct
ISSSSSTI

SEQ ID NO: 4457 - protein, 8 aa, Artificial Sequence
  Synthetic construct
IRSGSGTI

SEQ ID NO: 4458 - protein, 7 aa, Artificial Sequence
  Synthetic construct
VYHSGNN

SEQ ID NO: 4459 - protein, 8 aa, Artificial Sequence
  Synthetic construct
ISGSGGST

SEQ ID NO: 4460 - protein, 8 aa, Artificial Sequence
  Synthetic construct
MNPNSGNT

SEQ ID NO: 4461 - protein, 8 aa, Artificial Sequence
  Synthetic construct
IMPILGIT

SEQ ID NO: 4462 - protein, 8 aa, Artificial Sequence
  Synthetic construct
INTNTGTP

SEQ ID NO: 4463 - protein, 7 aa, Artificial Sequence
  Synthetic construct
MYDSGST

SEQ ID NO: 4464 - protein, 7 aa, Artificial Sequence
  Synthetic construct
IYWDDDK

SEQ ID NO: 4465 - protein, 8 aa, Artificial Sequence
  Synthetic construct
ISSSSGYI

SEQ ID NO: 4466 - protein, 8 aa, Artificial Sequence
  Synthetic construct
VIPVFGTA

SEQ ID NO: 4467 - protein, 8 aa, Artificial Sequence
  Synthetic construct
INAGNGNT

SEQ ID NO: 4468 - protein, 8 aa, Artificial Sequence
  Synthetic construct
IVGMFGTT

SEQ ID NO: 4469 - protein, 8 aa, Artificial Sequence
  Synthetic construct
ISYDGSNK

SEQ ID NO: 4470 - protein, 8 aa, Artificial Sequence
  Synthetic construct
FYPGDSET

SEQ ID NO: 4471 - protein, 8 aa, Artificial Sequence
  Synthetic construct
ISYDGSEK

SEQ ID NO: 4472 - protein, 8 aa, Artificial Sequence
  Synthetic construct
ISSGSNYI

SEQ ID NO: 4473 - protein, 8 aa, Artificial Sequence
  Synthetic construct
ISYDGSNK

SEQ ID NO: 4474 - protein, 8 aa, Artificial Sequence
  Synthetic construct
ISYDGSNT

SEQ ID NO: 4475 - protein, 7 aa, Artificial Sequence
  Synthetic construct
VYYSGST

SEQ ID NO: 4476 - protein, 7 aa, Artificial Sequence
  Synthetic construct
IYYTGAA

SEQ ID NO: 4477 - protein, 8 aa, Artificial Sequence
  Synthetic construct
FDPEDGET

SEQ ID NO: 4478 - protein, 7 aa, Artificial Sequence
  Synthetic construct
ISYSGST

SEQ ID NO: 4479 - protein, 8 aa, Artificial Sequence
  Synthetic construct
ISDSRSYT

SEQ ID NO: 4480 - protein, 7 aa, Artificial Sequence
  Synthetic construct
IYSDGNT

SEQ ID NO: 4481 - protein, 8 aa, Artificial Sequence
  Synthetic construct
ISYDGSNK

SEQ ID NO: 4482 - protein, 8 aa, Artificial Sequence
  Synthetic construct
ISPYNGDA

SEQ ID NO: 4483 - protein, 8 aa, Artificial Sequence
  Synthetic construct
IYPGDSDA

SEQ ID NO: 4484 - protein, 8 aa, Artificial Sequence
  Synthetic construct
ISYDVSKK

SEQ ID NO: 4485 - protein, 8 aa, Artificial Sequence
  Synthetic construct
AASDGARK

SEQ ID NO: 4486 - protein, 7 aa, Artificial Sequence
  Synthetic construct
IHHSGST

SEQ ID NO: 4487 - protein, 8 aa, Artificial Sequence
  Synthetic construct
VWFDGSNK

SEQ ID NO: 4488 - protein, 7 aa, Artificial Sequence
  Synthetic construct
ISPSGSS

SEQ ID NO: 4489 - protein, 8 aa, Artificial Sequence
  Synthetic construct
IIPTLGIA

SEQ ID NO: 4490 - protein, 8 aa, Artificial Sequence
  Synthetic construct
IIPIVGLA

SEQ ID NO: 4491 - protein, 8 aa, Artificial Sequence
  Synthetic construct
ISSSSSKI

SEQ ID NO: 4492 - protein, 8 aa, Artificial Sequence
  Synthetic construct
IVGMFGTT

SEQ ID NO: 4493 - protein, 7 aa, Artificial Sequence
  Synthetic construct
IYYSGST

SEQ ID NO: 4494 - protein, 8 aa, Artificial Sequence
  Synthetic construct
IIPVLGIA

SEQ ID NO: 4495 - protein, 8 aa, Artificial Sequence
  Synthetic construct
IDPDDPYS

SEQ ID NO: 4496 - protein, 7 aa, Artificial Sequence
  Synthetic construct
IYYSGST

SEQ ID NO: 4497 - protein, 8 aa, Artificial Sequence
  Synthetic construct
INPSGAST

SEQ ID NO: 4498 - protein, 7 aa, Artificial Sequence
  Synthetic construct
IYYSGST

SEQ ID NO: 4499 - protein, 7 aa, Artificial Sequence
  Synthetic construct
IYSGGDT

SEQ ID NO: 4500 - protein, 8 aa, Artificial Sequence
  Synthetic construct
ISYDGSNK

SEQ ID NO: 4501 - protein, 8 aa, Artificial Sequence
  Synthetic construct
IWFDGRNK

SEQ ID NO: 4502 - protein, 8 aa, Artificial Sequence
  Synthetic construct
LSTSGAST

SEQ ID NO: 4503 - protein, 7 aa, Artificial Sequence
  Synthetic construct
IGTAGDT

SEQ ID NO: 4504 - protein, 8 aa, Artificial Sequence
  Synthetic construct
ISAYNGDT

SEQ ID NO: 4505 - protein, 8 aa, Artificial Sequence
  Synthetic construct
ISYDGNNK

SEQ ID NO: 4506 - protein, 8 aa, Artificial Sequence
  Synthetic construct
ISSSGSTI

SEQ ID NO: 4507 - protein, 7 aa, Artificial Sequence
  Synthetic construct
IYWDDDK

SEQ ID NO: 4508 - protein, 7 aa, Artificial Sequence
  Synthetic construct
INHFGGS

SEQ ID NO: 4509 - protein, 8 aa, Artificial Sequence
  Synthetic construct
FDSEDVET

SEQ ID NO: 4510 - protein, 8 aa, Artificial Sequence
  Synthetic construct
VSYDGRNQ

SEQ ID NO: 4511 - protein, 7 aa, Artificial Sequence
  Synthetic construct
INHSGST

SEQ ID NO: 4512 - protein, 7 aa, Artificial Sequence
  Synthetic construct
IYTDGSA

SEQ ID NO: 4513 - protein, 8 aa, Artificial Sequence
  Synthetic construct
ITPIFGAT

SEQ ID NO: 4514 - protein, 8 aa, Artificial Sequence
  Synthetic construct
IDTNTGNP

SEQ ID NO: 4515 - protein, 8 aa, Artificial Sequence
  Synthetic construct
IDPDDSYT

SEQ ID NO: 4516 - protein, 7 aa, Artificial Sequence
  Synthetic construct
IYYIGST

SEQ ID NO: 4517 - protein, 7 aa, Artificial Sequence
  Synthetic construct
IYHSGNT

SEQ ID NO: 4518 - protein, 8 aa, Artificial Sequence
  Synthetic construct
IDAPGSST

SEQ ID NO: 4519 - protein, 7 aa, Artificial Sequence
  Synthetic construct
IYYSGSS

SEQ ID NO: 4520 - protein, 7 aa, Artificial Sequence
  Synthetic construct
IYKNEDT

SEQ ID NO: 4521 - protein, 8 aa, Artificial Sequence
  Synthetic construct
IWFDGSNK

SEQ ID NO: 4522 - protein, 8 aa, Artificial Sequence
  Synthetic construct
ISYDGSNK

SEQ ID NO: 4523 - protein, 8 aa, Artificial Sequence
  Synthetic construct
INTGSGHT

SEQ ID NO: 4524 - protein, 8 aa, Artificial Sequence
  Synthetic construct
LNVSGGGT

SEQ ID NO: 4525 - protein, 8 aa, Artificial Sequence
  Synthetic construct
IKQDGSEK

SEQ ID NO: 4526 - protein, 7 aa, Artificial Sequence
  Synthetic construct
IYYSGST

SEQ ID NO: 4527 - protein, 8 aa, Artificial Sequence
  Synthetic construct
ISGNGVSA

SEQ ID NO: 4528 - protein, 7 aa, Artificial Sequence
  Synthetic construct
IYQTGST

SEQ ID NO: 4529 - protein, 8 aa, Artificial Sequence
  Synthetic construct
INPIVGST

SEQ ID NO: 4530 - protein, 8 aa, Artificial Sequence
  Synthetic construct
INTNTESP

SEQ ID NO: 4531 - protein, 8 aa, Artificial Sequence
  Synthetic construct
IYPGDSDT

SEQ ID NO: 4532 - protein, 8 aa, Artificial Sequence
  Synthetic construct
IKQDASEK

SEQ ID NO: 4533 - protein, 8 aa, Artificial Sequence
  Synthetic construct
IWFDGTNK

SEQ ID NO: 4534 - protein, 8 aa, Artificial Sequence
  Synthetic construct
ISAYNGNT

SEQ ID NO: 4535 - protein, 8 aa, Artificial Sequence
  Synthetic construct
INEDGSEK

SEQ ID NO: 4536 - protein, 8 aa, Artificial Sequence
  Synthetic construct
ISYDGYNQ

SEQ ID NO: 4537 - protein, 8 aa, Artificial Sequence
  Synthetic construct
ITGGNGNT

SEQ ID NO: 4538 - protein, 7 aa, Artificial Sequence
  Synthetic construct
INHSGST

SEQ ID NO: 4539 - protein, 8 aa, Artificial Sequence
  Synthetic construct
IIPRFGTA

SEQ ID NO: 4540 - protein, 8 aa, Artificial Sequence
  Synthetic construct
IDTNTGNP

SEQ ID NO: 4541 - protein, 7 aa, Artificial Sequence
  Synthetic construct
IYYSGST

SEQ ID NO: 4542 - protein, 8 aa, Artificial Sequence
  Synthetic construct
INWNSGSI

SEQ ID NO: 4543 - protein, 7 aa, Artificial Sequence
  Synthetic construct
IYYSGST

SEQ ID NO: 4544 - protein, 8 aa, Artificial Sequence
  Synthetic construct
ISAYNGDT

SEQ ID NO: 4545 - protein, 8 aa, Artificial Sequence
  Synthetic construct
IYPGDSDT

SEQ ID NO: 4546 - protein, 8 aa, Artificial Sequence
  Synthetic construct
MNPISGGT

SEQ ID NO: 4547 - protein, 8 aa, Artificial Sequence
  Synthetic construct
IIPISATT

SEQ ID NO: 4548 - protein, 8 aa, Artificial Sequence
  Synthetic construct
ISSSGSTI

SEQ ID NO: 4549 - protein, 9 aa, Artificial Sequence
  Synthetic construct
TYYGSKWGY

SEQ ID NO: 4550 - protein, 8 aa, Artificial Sequence
  Synthetic construct
IWFDGSHK

SEQ ID NO: 4551 - protein, 8 aa, Artificial Sequence
  Synthetic construct
VIPIFGTV

SEQ ID NO: 4552 - protein, 8 aa, Artificial Sequence
  Synthetic construct
INTNTGNP

SEQ ID NO: 4553 - protein, 8 aa, Artificial Sequence
  Synthetic construct
ISTTGSSI

SEQ ID NO: 4554 - protein, 8 aa, Artificial Sequence
  Synthetic construct
IHTNTGYP

SEQ ID NO: 4555 - protein, 7 aa, Artificial Sequence
  Synthetic construct
IYWDDDK

SEQ ID NO: 4556 - protein, 8 aa, Artificial Sequence
  Synthetic construct
IVPMLGSE

SEQ ID NO: 4557 - protein, 8 aa, Artificial Sequence
  Synthetic construct
ISYDGSKK

SEQ ID NO: 4558 - protein, 8 aa, Artificial Sequence
  Synthetic construct
IKQDGSEK

SEQ ID NO: 4559 - protein, 8 aa, Artificial Sequence
  Synthetic construct
ISYDGDNK

SEQ ID NO: 4560 - protein, 7 aa, Artificial Sequence
  Synthetic construct
LDYSGIT

SEQ ID NO: 4561 - protein, 8 aa, Artificial Sequence
  Synthetic construct
ISSSSSTI

SEQ ID NO: 4562 - protein, 8 aa, Artificial Sequence
  Synthetic construct
ISGSGGST

SEQ ID NO: 4563 - protein, 8 aa, Artificial Sequence
  Synthetic construct
ISSSSSYK

SEQ ID NO: 4564 - protein, 8 aa, Artificial Sequence
  Synthetic construct
IWNVGSNK

SEQ ID NO: 4565 - protein, 8 aa, Artificial Sequence
  Synthetic construct
IYPGDSDT

SEQ ID NO: 4566 - protein, 8 aa, Artificial Sequence
  Synthetic construct
IEYDGSGA

SEQ ID NO: 4567 - protein, 8 aa, Artificial Sequence
  Synthetic construct
ISAYNGNT

SEQ ID NO: 4568 - protein, 7 aa, Artificial Sequence
  Synthetic construct
IYSGGST

SEQ ID NO: 4569 - protein, 8 aa, Artificial Sequence
  Synthetic construct
VSDSGGNT

SEQ ID NO: 4570 - protein, 8 aa, Artificial Sequence
  Synthetic construct
IYPGDSDT

SEQ ID NO: 4571 - protein, 8 aa, Artificial Sequence
  Synthetic construct
IIPIFGTA

SEQ ID NO: 4572 - protein, 8 aa, Artificial Sequence
  Synthetic construct
IKQDGSEK

SEQ ID NO: 4573 - protein, 8 aa, Artificial Sequence
  Synthetic construct
IIPNFGTP

SEQ ID NO: 4574 - protein, 8 aa, Artificial Sequence
  Synthetic construct
INPTGGST

SEQ ID NO: 4575 - protein, 8 aa, Artificial Sequence
  Synthetic construct
IHTNTGNP

SEQ ID NO: 4576 - protein, 10 aa, Artificial Sequence
  Synthetic construct
IKSNIDGGTT

SEQ ID NO: 4577 - protein, 7 aa, Artificial Sequence
  Synthetic construct
IYWDADK

SEQ ID NO: 4578 - protein, 8 aa, Artificial Sequence
  Synthetic construct
ISYDGINK

SEQ ID NO: 4579 - protein, 9 aa, Artificial Sequence
  Synthetic construct
TYYRSKWYK

SEQ ID NO: 4580 - protein, 7 aa, Artificial Sequence
  Synthetic construct
IGTAGDT

SEQ ID NO: 4581 - protein, 7 aa, Artificial Sequence
  Synthetic construct
IYTSGST

SEQ ID NO: 4582 - protein, 8 aa, Artificial Sequence
  Synthetic construct
VWHDGVNK

SEQ ID NO: 4583 - protein, 7 aa, Artificial Sequence
  Synthetic construct
IHYSGSS

SEQ ID NO: 4584 - protein, 7 aa, Artificial Sequence
  Synthetic construct
IDWDDET

SEQ ID NO: 4585 - protein, 8 aa, Artificial Sequence
  Synthetic construct
IAYDGSKK

SEQ ID NO: 4586 - protein, 7 aa, Artificial Sequence
  Synthetic construct
IYYSGGT

SEQ ID NO: 4587 - protein, 8 aa, Artificial Sequence
  Synthetic construct
ISYDGSNK

SEQ ID NO: 4588 - protein, 8 aa, Artificial Sequence
  Synthetic construct
FDPEDGET

SEQ ID NO: 4589 - protein, 7 aa, Artificial Sequence
  Synthetic construct
IYYSGST

SEQ ID NO: 4590 - protein, 7 aa, Artificial Sequence
  Synthetic construct
LHNSGGA

SEQ ID NO: 4591 - protein, 8 aa, Artificial Sequence
  Synthetic construct
ISYDGNNK

SEQ ID NO: 4592 - protein, 9 aa, Artificial Sequence
  Synthetic construct
TYYTPKWYY

SEQ ID NO: 4593 - protein, 8 aa, Artificial Sequence
  Synthetic construct
IDPSDGTT

SEQ ID NO: 4594 - protein, 8 aa, Artificial Sequence
  Synthetic construct
ISAHYGNT

SEQ ID NO: 4595 - protein, 8 aa, Artificial Sequence
  Synthetic construct
IKQDGSEK

SEQ ID NO: 4596 - protein, 10 aa, Artificial Sequence
  Synthetic construct
IRDKANNYTT

SEQ ID NO: 4597 - protein, 8 aa, Artificial Sequence
  Synthetic construct
ISYDGVNR

SEQ ID NO: 4598 - protein, 8 aa, Artificial Sequence
  Synthetic construct
IIPLFGTT

SEQ ID NO: 4599 - protein, 8 aa, Artificial Sequence
  Synthetic construct
IIPIFGTA

SEQ ID NO: 4600 - protein, 7 aa, Artificial Sequence
  Synthetic construct
IYTSGST

SEQ ID NO: 4601 - protein, 7 aa, Artificial Sequence
  Synthetic construct
IYYSGST

SEQ ID NO: 4602 - protein, 10 aa, Artificial Sequence
  Synthetic construct
IRSKTFGGTT

SEQ ID NO: 4603 - protein, 8 aa, Artificial Sequence
  Synthetic construct
ISSSRNYI

SEQ ID NO: 4604 - protein, 8 aa, Artificial Sequence
  Synthetic construct
ITYDGSKK

SEQ ID NO: 4605 - protein, 8 aa, Artificial Sequence
  Synthetic construct
IDPSDSYT

SEQ ID NO: 4606 - protein, 7 aa, Artificial Sequence
  Synthetic construct
INHSGST

SEQ ID NO: 4607 - protein, 7 aa, Artificial Sequence
  Synthetic construct
IYWDDDK

SEQ ID NO: 4608 - protein, 7 aa, Artificial Sequence
  Synthetic construct
IYYSGNT

SEQ ID NO: 4609 - protein, 7 aa, Artificial Sequence
  Synthetic construct
IDWADDK

SEQ ID NO: 4610 - protein, 7 aa, Artificial Sequence
  Synthetic construct
IYSGGKT

SEQ ID NO: 4611 - protein, 7 aa, Artificial Sequence
  Synthetic construct
IYYSVNT

SEQ ID NO: 4612 - protein, 7 aa, Artificial Sequence
  Synthetic construct
IYRGGST

SEQ ID NO: 4613 - protein, 8 aa, Artificial Sequence
  Synthetic construct
INPHSGGT

SEQ ID NO: 4614 - protein, 7 aa, Artificial Sequence
  Synthetic construct
IYYSETT

SEQ ID NO: 4615 - protein, 8 aa, Artificial Sequence
  Synthetic construct
INVYNGYT

SEQ ID NO: 4616 - protein, 8 aa, Artificial Sequence
  Synthetic construct
FDPENVET

SEQ ID NO: 4617 - protein, 8 aa, Artificial Sequence
  Synthetic construct
ISYDGFNK

SEQ ID NO: 4618 - protein, 7 aa, Artificial Sequence
  Synthetic construct
IYYSGST

SEQ ID NO: 4619 - protein, 8 aa, Artificial Sequence
  Synthetic construct
VIPVVHIT

SEQ ID NO: 4620 - protein, 7 aa, Artificial Sequence
  Synthetic construct
IYWDDEK

SEQ ID NO: 4621 - protein, 8 aa, Artificial Sequence
  Synthetic construct
IIPIFASA

SEQ ID NO: 4622 - protein, 8 aa, Artificial Sequence
  Synthetic construct
ISADSGNT

SEQ ID NO: 4623 - protein, 8 aa, Artificial Sequence
  Synthetic construct
ISYDGSNK

SEQ ID NO: 4624 - protein, 7 aa, Artificial Sequence
  Synthetic construct
IYYSGST

SEQ ID NO: 4625 - protein, 8 aa, Artificial Sequence
  Synthetic construct
ITPFNGNT

SEQ ID NO: 4626 - protein, 8 aa, Artificial Sequence
  Synthetic construct
IRPGSSGI

SEQ ID NO: 4627 - protein, 8 aa, Artificial Sequence
  Synthetic construct
ISSSGTTI

SEQ ID NO: 4628 - protein, 8 aa, Artificial Sequence
  Synthetic construct
ISYDGTNK

SEQ ID NO: 4629 - protein, 7 aa, Artificial Sequence
  Synthetic construct
VHYAGST

SEQ ID NO: 4630 - protein, 7 aa, Artificial Sequence
  Synthetic construct
IYWDDDK

SEQ ID NO: 4631 - protein, 8 aa, Artificial Sequence
  Synthetic construct
ISYDGSVQ

SEQ ID NO: 4632 - protein, 8 aa, Artificial Sequence
  Synthetic construct
ISSSSSYI

SEQ ID NO: 4633 - protein, 10 aa, Artificial Sequence
  Synthetic construct
IRDKRNDYAT

SEQ ID NO: 4634 - protein, 8 aa, Artificial Sequence
  Synthetic construct
FDPEDTKT

SEQ ID NO: 4635 - protein, 8 aa, Artificial Sequence
  Synthetic construct
IYPGNSDT

SEQ ID NO: 4636 - protein, 8 aa, Artificial Sequence
  Synthetic construct
IIPIFSTP

SEQ ID NO: 4637 - protein, 8 aa, Artificial Sequence
  Synthetic construct
ATWNSGTI

SEQ ID NO: 4638 - protein, 7 aa, Artificial Sequence
  Synthetic construct
IYWDDDK

SEQ ID NO: 4639 - protein, 8 aa, Artificial Sequence
  Synthetic construct
FDPEDGET

SEQ ID NO: 4640 - protein, 7 aa, Artificial Sequence
  Synthetic construct
IYYTGSP

SEQ ID NO: 4641 - protein, 8 aa, Artificial Sequence
  Synthetic construct
IYPGDSDT

SEQ ID NO: 4642 - protein, 8 aa, Artificial Sequence
  Synthetic construct
INNDGSIT

SEQ ID NO: 4643 - protein, 7 aa, Artificial Sequence
  Synthetic construct
IFHTESA

SEQ ID NO: 4644 - protein, 8 aa, Artificial Sequence
  Synthetic construct
ISYDGSKK

SEQ ID NO: 4645 - protein, 7 aa, Artificial Sequence
  Synthetic construct
IDHSGST

SEQ ID NO: 4646 - protein, 8 aa, Artificial Sequence
  Synthetic construct
ISYDGNNK

SEQ ID NO: 4647 - protein, 7 aa, Artificial Sequence
  Synthetic construct
IYSSGTT

SEQ ID NO: 4648 - protein, 8 aa, Artificial Sequence
  Synthetic construct
ISYDGDNK

SEQ ID NO: 4649 - protein, 8 aa, Artificial Sequence
  Synthetic construct
INSDGTST

SEQ ID NO: 4650 - protein, 8 aa, Artificial Sequence
  Synthetic construct
TVPIFGTP

SEQ ID NO: 4651 - protein, 8 aa, Artificial Sequence
  Synthetic construct
LNSVGSDR

SEQ ID NO: 4652 - protein, 8 aa, Artificial Sequence
  Synthetic construct
IYPGDSDT

SEQ ID NO: 4653 - protein, 8 aa, Artificial Sequence
  Synthetic construct
IDTNTGNP

SEQ ID NO: 4654 - protein, 7 aa, Artificial Sequence
  Synthetic construct
IDWYDDK

SEQ ID NO: 4655 - protein, 8 aa, Artificial Sequence
  Synthetic construct
IIPILGIT

SEQ ID NO: 4656 - protein, 8 aa, Artificial Sequence
  Synthetic construct
INTNTGNP

SEQ ID NO: 4657 - protein, 7 aa, Artificial Sequence
  Synthetic construct
IYTSGGT

SEQ ID NO: 4658 - protein, 7 aa, Artificial Sequence
  Synthetic construct
IYHSGST

SEQ ID NO: 4659 - protein, 8 aa, Artificial Sequence
  Synthetic construct
ISGSGGST

SEQ ID NO: 4660 - protein, 7 aa, Artificial Sequence
  Synthetic construct
IDQSGST

SEQ ID NO: 4661 - protein, 8 aa, Artificial Sequence
  Synthetic construct
ISPDASNK

SEQ ID NO: 4662 - protein, 8 aa, Artificial Sequence
  Synthetic construct
ISYDGTYK

SEQ ID NO: 4663 - protein, 7 aa, Artificial Sequence
  Synthetic construct
VYYTGGT

SEQ ID NO: 4664 - protein, 8 aa, Artificial Sequence
  Synthetic construct
IWFDGSNK

SEQ ID NO: 4665 - protein, 7 aa, Artificial Sequence
  Synthetic construct
ISHSGST

SEQ ID NO: 4666 - protein, 8 aa, Artificial Sequence
  Synthetic construct
ISGSSDVI

SEQ ID NO: 4667 - protein, 7 aa, Artificial Sequence
  Synthetic construct
IYYSGST

SEQ ID NO: 4668 - protein, 8 aa, Artificial Sequence
  Synthetic construct
IIPIFGTP

SEQ ID NO: 4669 - protein, 7 aa, Artificial Sequence
  Synthetic construct
VHPRGDT

SEQ ID NO: 4670 - protein, 7 aa, Artificial Sequence
  Synthetic construct
IHYGGHS

SEQ ID NO: 4671 - protein, 8 aa, Artificial Sequence
  Synthetic construct
IIPIFGTV

SEQ ID NO: 4672 - protein, 7 aa, Artificial Sequence
  Synthetic construct
IYYTGNT

SEQ ID NO: 4673 - protein, 7 aa, Artificial Sequence
  Synthetic construct
IYFTGDT

SEQ ID NO: 4674 - protein, 8 aa, Artificial Sequence
  Synthetic construct
IRGSSGNV

SEQ ID NO: 4675 - protein, 8 aa, Artificial Sequence
  Synthetic construct
ISGGGDRT

SEQ ID NO: 4676 - protein, 8 aa, Artificial Sequence
  Synthetic construct
IWYDGSNK

SEQ ID NO: 4677 - protein, 8 aa, Artificial Sequence
  Synthetic construct
IIPIFGTT

SEQ ID NO: 4678 - protein, 8 aa, Artificial Sequence
  Synthetic construct
ISYDGSNK

SEQ ID NO: 4679 - protein, 8 aa, Artificial Sequence
  Synthetic construct
ISYDGNNQ

SEQ ID NO: 4680 - protein, 8 aa, Artificial Sequence
  Synthetic construct
IDPSDPYS

SEQ ID NO: 4681 - protein, 8 aa, Artificial Sequence
  Synthetic construct
ISYHGNDK

SEQ ID NO: 4682 - protein, 8 aa, Artificial Sequence
  Synthetic construct
ISYDGSNK

SEQ ID NO: 4683 - protein, 10 aa, Artificial Sequence
  Synthetic construct
IRSKAYGGTT

SEQ ID NO: 4684 - protein, 8 aa, Artificial Sequence
  Synthetic construct
IIPILGIA

SEQ ID NO: 4685 - protein, 8 aa, Artificial Sequence
  Synthetic construct
IQPRDSDI

SEQ ID NO: 4686 - protein, 8 aa, Artificial Sequence
  Synthetic construct
ITDNGGST

SEQ ID NO: 4687 - protein, 7 aa, Artificial Sequence
  Synthetic construct
IYYSGST

SEQ ID NO: 4688 - protein, 7 aa, Artificial Sequence
  Synthetic construct
VFWDGDK

SEQ ID NO: 4689 - protein, 8 aa, Artificial Sequence
  Synthetic construct
FDPEDAET

SEQ ID NO: 4690 - protein, 8 aa, Artificial Sequence
  Synthetic construct
IIPIFGSA

SEQ ID NO: 4691 - protein, 8 aa, Artificial Sequence
  Synthetic construct
ISAYNGST

SEQ ID NO: 4692 - protein, 8 aa, Artificial Sequence
  Synthetic construct
INTNTGNP

SEQ ID NO: 4693 - protein, 8 aa, Artificial Sequence
  Synthetic construct
IYPGDSDT

SEQ ID NO: 4694 - protein, 8 aa, Artificial Sequence
  Synthetic construct
ISYDASEK

SEQ ID NO: 4695 - protein, 8 aa, Artificial Sequence
  Synthetic construct
ISYDGSIK

SEQ ID NO: 4696 - protein, 3 aa, Artificial Sequence
  Synthetic construct
  MISC_FEATURE (1)..(3): X can be any amino acid
XXX

SEQ ID NO: 4697 - protein, 8 aa, Artificial Sequence
  Synthetic construct
HYPGDSDT

SEQ ID NO: 4698 - protein, 8 aa, Artificial Sequence
  Synthetic construct
ISSSGSAK

SEQ ID NO: 4699 - protein, 7 aa, Artificial Sequence
  Synthetic construct
IYYSGST

SEQ ID NO: 4700 - protein, 8 aa, Artificial Sequence
  Synthetic construct
IIPIFDTT

SEQ ID NO: 4701 - protein, 8 aa, Artificial Sequence
  Synthetic construct
ISYDGSNK

SEQ ID NO: 4702 - protein, 8 aa, Artificial Sequence
  Synthetic construct
ISGSGGSK

SEQ ID NO: 4703 - protein, 8 aa, Artificial Sequence
  Synthetic construct
FDPEDGET

SEQ ID NO: 4704 - protein, 8 aa, Artificial Sequence
  Synthetic construct
ISGSGDSS

SEQ ID NO: 4705 - protein, 8 aa, Artificial Sequence
  Synthetic construct
INPSGGST

SEQ ID NO: 4706 - protein, 7 aa, Artificial Sequence
  Synthetic construct
IYWDDDK

SEQ ID NO: 4707 - protein, 8 aa, Artificial Sequence
  Synthetic construct
ISYDGSNK

SEQ ID NO: 4708 - protein, 7 aa, Artificial Sequence
  Synthetic construct
TYYLGST

SEQ ID NO: 4709 - protein, 8 aa, Artificial Sequence
  Synthetic construct
FDPEDEET

SEQ ID NO: 4710 - protein, 7 aa, Artificial Sequence
  Synthetic construct
IDWEDDK

SEQ ID NO: 4711 - protein, 8 aa, Artificial Sequence
  Synthetic construct
FDPEDAET

SEQ ID NO: 4712 - protein, 8 aa, Artificial Sequence
  Synthetic construct
IYPGDSDT

SEQ ID NO: 4713 - protein, 8 aa, Artificial Sequence
  Synthetic construct
IYPGDSDT

SEQ ID NO: 4714 - protein, 8 aa, Artificial Sequence
  Synthetic construct
VSYDGIHK

SEQ ID NO: 4715 - protein, 7 aa, Artificial Sequence
  Synthetic construct
IYWDDDK

SEQ ID NO: 4716 - protein, 8 aa, Artificial Sequence
  Synthetic construct
VTDNGYSV

SEQ ID NO: 4717 - protein, 8 aa, Artificial Sequence
  Synthetic construct
ISYDGNSQ

SEQ ID NO: 4718 - protein, 8 aa, Artificial Sequence
  Synthetic construct
TIPIFGTP

SEQ ID NO: 4719 - protein, 8 aa, Artificial Sequence
  Synthetic construct
INPKNGGT

SEQ ID NO: 4720 - protein, 8 aa, Artificial Sequence
  Synthetic construct
ISYDGSNK

SEQ ID NO: 4721 - protein, 7 aa, Artificial Sequence
  Synthetic construct
IYYGGRT

SEQ ID NO: 4722 - protein, 8 aa, Artificial Sequence
  Synthetic construct
FDPEDGET

SEQ ID NO: 4723 - protein, 7 aa, Artificial Sequence
  Synthetic construct
IGIADDT

SEQ ID NO: 4724 - protein, 8 aa, Artificial Sequence
  Synthetic construct
IIAIFGTA

SEQ ID NO: 4725 - protein, 8 aa, Artificial Sequence
  Synthetic construct
IKQDASEK

SEQ ID NO: 4726 - protein, 7 aa, Artificial Sequence
  Synthetic construct
IDWDDDK

SEQ ID NO: 4727 - protein, 7 aa, Artificial Sequence
  Synthetic construct
IYWDDEK

SEQ ID NO: 4728 - protein, 8 aa, Artificial Sequence
  Synthetic construct
ISYDGNNK

SEQ ID NO: 4729 - protein, 8 aa, Artificial Sequence
  Synthetic construct
IIPIFGTA

SEQ ID NO: 4730 - protein, 8 aa, Artificial Sequence
  Synthetic construct
ITWNSGTI

SEQ ID NO: 4731 - protein, 8 aa, Artificial Sequence
  Synthetic construct
ISYDGSIE

SEQ ID NO: 4732 - protein, 8 aa, Artificial Sequence
  Synthetic construct
VSYDGPHK

SEQ ID NO: 4733 - protein, 7 aa, Artificial Sequence
  Synthetic construct
INHTGII

SEQ ID NO: 4734 - protein, 8 aa, Artificial Sequence
  Synthetic construct
ISYDGDNK

SEQ ID NO: 4735 - protein, 8 aa, Artificial Sequence
  Synthetic construct
ISAYNGNT

SEQ ID NO: 4736 - protein, 8 aa, Artificial Sequence
  Synthetic construct
INSDGSST

SEQ ID NO: 4737 - protein, 8 aa, Artificial Sequence
  Synthetic construct
ISAYNGNT

SEQ ID NO: 4738 - protein, 7 aa, Artificial Sequence
  Synthetic construct
VIHSGTT

SEQ ID NO: 4739 - protein, 8 aa, Artificial Sequence
  Synthetic construct
IIPILGTP

SEQ ID NO: 4740 - protein, 8 aa, Artificial Sequence
  Synthetic construct
IDPGDPYS

SEQ ID NO: 4741 - protein, 7 aa, Artificial Sequence
  Synthetic construct
IYYSGIT

SEQ ID NO: 4742 - protein, 8 aa, Artificial Sequence
  Synthetic construct
IWYGGSNT

SEQ ID NO: 4743 - protein, 8 aa, Artificial Sequence
  Synthetic construct
IKQDGGDK

SEQ ID NO: 4744 - protein, 8 aa, Artificial Sequence
  Synthetic construct
IKQDGSEK

SEQ ID NO: 4745 - protein, 8 aa, Artificial Sequence
  Synthetic construct
IWFDGSNK

SEQ ID NO: 4746 - protein, 7 aa, Artificial Sequence
  Synthetic construct
IYWDDDK

SEQ ID NO: 4747 - protein, 7 aa, Artificial Sequence
  Synthetic construct
LYTDGST

SEQ ID NO: 4748 - protein, 8 aa, Artificial Sequence
  Synthetic construct
INPSGGGT

SEQ ID NO: 4749 - protein, 7 aa, Artificial Sequence
  Synthetic construct
IYWDDDK

SEQ ID NO: 4750 - protein, 8 aa, Artificial Sequence
  Synthetic construct
IKEDGSAR

SEQ ID NO: 4751 - protein, 8 aa, Artificial Sequence
  Synthetic construct
ISSNGGST

SEQ ID NO: 4752 - protein, 7 aa, Artificial Sequence
  Synthetic construct
IYWNDDK

SEQ ID NO: 4753 - protein, 7 aa, Artificial Sequence
  Synthetic construct
IYSGGST

SEQ ID NO: 4754 - protein, 7 aa, Artificial Sequence
  Synthetic construct
INHSGST

SEQ ID NO: 4755 - protein, 8 aa, Artificial Sequence
  Synthetic construct
ISAFNGNT

SEQ ID NO: 4756 - protein, 8 aa, Artificial Sequence
  Synthetic construct
ISYDGYNK

SEQ ID NO: 4757 - protein, 8 aa, Artificial Sequence
  Synthetic construct
IWYDGSNK

SEQ ID NO: 4758 - protein, 8 aa, Artificial Sequence
  Synthetic construct
IVVGSDNT

SEQ ID NO: 4759 - protein, 7 aa, Artificial Sequence
  Synthetic construct
IYYTGII

SEQ ID NO: 4760 - protein, 8 aa, Artificial Sequence
  Synthetic construct
IIPIFGTA

SEQ ID NO: 4761 - protein, 7 aa, Artificial Sequence
  Synthetic construct
VYDSDNT

SEQ ID NO: 4762 - protein, 8 aa, Artificial Sequence
  Synthetic construct
INGNSGGT

SEQ ID NO: 4763 - protein, 8 aa, Artificial Sequence
  Synthetic construct
ISASGGST

SEQ ID NO: 4764 - protein, 8 aa, Artificial Sequence
  Synthetic construct
IWYDGSNK

SEQ ID NO: 4765 - protein, 8 aa, Artificial Sequence
  Synthetic construct
ISSVNGSI

SEQ ID NO: 4766 - protein, 8 aa, Artificial Sequence
  Synthetic construct
INPNSGRT

SEQ ID NO: 4767 - protein, 8 aa, Artificial Sequence
  Synthetic construct
IYPGDSNI

SEQ ID NO: 4768 - protein, 7 aa, Artificial Sequence
  Synthetic construct
IHHSGST

SEQ ID NO: 4769 - protein, 8 aa, Artificial Sequence
  Synthetic construct
IQHNGNDK

SEQ ID NO: 4770 - protein, 7 aa, Artificial Sequence
  Synthetic construct
IYYSGST

SEQ ID NO: 4771 - protein, 8 aa, Artificial Sequence
  Synthetic construct
IIAIFGTA

SEQ ID NO: 4772 - protein, 7 aa, Artificial Sequence
  Synthetic construct
IYYNVST

SEQ ID NO: 4773 - protein, 7 aa, Artificial Sequence
  Synthetic construct
IYYSGNI

SEQ ID NO: 4774 - protein, 8 aa, Artificial Sequence
  Synthetic construct
INSDGSST

SEQ ID NO: 4775 - protein, 7 aa, Artificial Sequence
  Synthetic construct
IYWDDDK

SEQ ID NO: 4776 - protein, 8 aa, Artificial Sequence
  Synthetic construct
IWFDGSNK

SEQ ID NO: 4777 - protein, 8 aa, Artificial Sequence
  Synthetic construct
IRGGSSVT

SEQ ID NO: 4778 - protein, 8 aa, Artificial Sequence
  Synthetic construct
IYPGDSDT

SEQ ID NO: 4779 - protein, 8 aa, Artificial Sequence
  Synthetic construct
IIPIFGTA

SEQ ID NO: 4780 - protein, 8 aa, Artificial Sequence
  Synthetic construct
MTGSGGGA

SEQ ID NO: 4781 - protein, 8 aa, Artificial Sequence
  Synthetic construct
IIPILGIA

SEQ ID NO: 4782 - protein, 8 aa, Artificial Sequence
  Synthetic construct
ISDSGGST

SEQ ID NO: 4783 - protein, 8 aa, Artificial Sequence
  Synthetic construct
IWYDGSNK

SEQ ID NO: 4784 - protein, 8 aa, Artificial Sequence
  Synthetic construct
IIPIFGTT

SEQ ID NO: 4785 - protein, 8 aa, Artificial Sequence
  Synthetic construct
ISYDGSNK

SEQ ID NO: 4786 - protein, 8 aa, Artificial Sequence
  Synthetic construct
ISWNSGTI

SEQ ID NO: 4787 - protein, 8 aa, Artificial Sequence
  Synthetic construct
TIPIFGTP

SEQ ID NO: 4788 - protein, 8 aa, Artificial Sequence
  Synthetic construct
INSRGGST

SEQ ID NO: 4789 - protein, 8 aa, Artificial Sequence
  Synthetic construct
FHPEDGET

SEQ ID NO: 4790 - protein, 7 aa, Artificial Sequence
  Synthetic construct
INHSGST

SEQ ID NO: 4791 - protein, 8 aa, Artificial Sequence
  Synthetic construct
IWHDGTNK

SEQ ID NO: 4792 - protein, 8 aa, Artificial Sequence
  Synthetic construct
LIPMFGTP

SEQ ID NO: 4793 - protein, 8 aa, Artificial Sequence
  Synthetic construct
ISGTGDTT

SEQ ID NO: 4794 - protein, 7 aa, Artificial Sequence
  Synthetic construct
IYHSGST

SEQ ID NO: 4795 - protein, 7 aa, Artificial Sequence
  Synthetic construct
IYYSGST

SEQ ID NO: 4796 - protein, 8 aa, Artificial Sequence
  Synthetic construct
ISPSYGGT

SEQ ID NO: 4797 - protein, 7 aa, Artificial Sequence
  Synthetic construct
IFSNDEK

SEQ ID NO: 4798 - protein, 8 aa, Artificial Sequence
  Synthetic construct
ITGSGGST

SEQ ID NO: 4799 - protein, 8 aa, Artificial Sequence
  Synthetic construct
INTNTGNP

SEQ ID NO: 4800 - protein, 8 aa, Artificial Sequence
  Synthetic construct
ISPYNAKT

SEQ ID NO: 4801 - protein, 8 aa, Artificial Sequence
  Synthetic construct
ISYDGSNK

SEQ ID NO: 4802 - protein, 8 aa, Artificial Sequence
  Synthetic construct
ISYDGEKK

SEQ ID NO: 4803 - protein, 8 aa, Artificial Sequence
  Synthetic construct
ISYDGNNK

SEQ ID NO: 4804 - protein, 8 aa, Artificial Sequence
  Synthetic construct
IIPILGVA

SEQ ID NO: 4805 - protein, 7 aa, Artificial Sequence
  Synthetic construct
IYGGGST

SEQ ID NO: 4806 - protein, 8 aa, Artificial Sequence
  Synthetic construct
ISGSGGST

SEQ ID NO: 4807 - protein, 7 aa, Artificial Sequence
  Synthetic construct
ILYSGST

SEQ ID NO: 4808 - protein, 8 aa, Artificial Sequence
  Synthetic construct
INTNTGNP

SEQ ID NO: 4809 - protein, 8 aa, Artificial Sequence
  Synthetic construct
IIPIFGTA

SEQ ID NO: 4810 - protein, 8 aa, Artificial Sequence
  Synthetic construct
FDPEDGET

SEQ ID NO: 4811 - protein, 8 aa, Artificial Sequence
  Synthetic construct
ISWDSVSI

SEQ ID NO: 4812 - protein, 7 aa, Artificial Sequence
  Synthetic construct
IYSGGTT

SEQ ID NO: 4813 - protein, 8 aa, Artificial Sequence
  Synthetic construct
ISYDGSNK

SEQ ID NO: 4814 - protein, 7 aa, Artificial Sequence
  Synthetic construct
VNHSGST

SEQ ID NO: 4815 - protein, 8 aa, Artificial Sequence
  Synthetic construct
ISFDGSIK

SEQ ID NO: 4816 - protein, 8 aa, Artificial Sequence
  Synthetic construct
ISSSGSTI

SEQ ID NO: 4817 - protein, 8 aa, Artificial Sequence
  Synthetic construct
IKQDGSEK

SEQ ID NO: 4818 - protein, 8 aa, Artificial Sequence
  Synthetic construct
IYPGDSDT

SEQ ID NO: 4819 - protein, 8 aa, Artificial Sequence
  Synthetic construct
INTNTGNP

SEQ ID NO: 4820 - protein, 7 aa, Artificial Sequence
  Synthetic construct
FYYYGNT

SEQ ID NO: 4821 - protein, 7 aa, Artificial Sequence
  Synthetic construct
IYDSGST

SEQ ID NO: 4822 - protein, 8 aa, Artificial Sequence
  Synthetic construct
ISYDGSNK

SEQ ID NO: 4823 - protein, 8 aa, Artificial Sequence
  Synthetic construct
ISYDGNHK

SEQ ID NO: 4824 - protein, 7 aa, Artificial Sequence
  Synthetic construct
IYYTGST

SEQ ID NO: 4825 - protein, 8 aa, Artificial Sequence
  Synthetic construct
ISYDGSTY

SEQ ID NO: 4826 - protein, 7 aa, Artificial Sequence
  Synthetic construct
IYSGDST

SEQ ID NO: 4827 - protein, 10 aa, Artificial Sequence
  Synthetic construct
IKSKTDGGTT

SEQ ID NO: 4828 - protein, 8 aa, Artificial Sequence
  Synthetic construct
ISYDGSNK

SEQ ID NO: 4829 - protein, 8 aa, Artificial Sequence
  Synthetic construct
LSSSSNFI

SEQ ID NO: 4830 - protein, 8 aa, Artificial Sequence
  Synthetic construct
IYPGDSDT

SEQ ID NO: 4831 - protein, 8 aa, Artificial Sequence
  Synthetic construct
ISYDGSNK

SEQ ID NO: 4832 - protein, 8 aa, Artificial Sequence
  Synthetic construct
ITSGSSST

SEQ ID NO: 4833 - protein, 7 aa, Artificial Sequence
  Synthetic construct
IYYSGTT

SEQ ID NO: 4834 - protein, 8 aa, Artificial Sequence
  Synthetic construct
VNPSGEST

SEQ ID NO: 4835 - protein, 8 aa, Artificial Sequence
  Synthetic construct
ISSRSSFI

SEQ ID NO: 4836 - protein, 8 aa, Artificial Sequence
  Synthetic construct
TYPGDSET

SEQ ID NO: 4837 - protein, 7 aa, Artificial Sequence
  Synthetic construct
INHSGSA

SEQ ID NO: 4838 - protein, 8 aa, Artificial Sequence
  Synthetic construct
QYPGDSDT

SEQ ID NO: 4839 - protein, 8 aa, Artificial Sequence
  Synthetic construct
IIPIFGTV

SEQ ID NO: 4840 - protein, 8 aa, Artificial Sequence
  Synthetic construct
ISSDGSST

SEQ ID NO: 4841 - protein, 8 aa, Artificial Sequence
  Synthetic construct
IIPILGTA

SEQ ID NO: 4842 - protein, 8 aa, Artificial Sequence
  Synthetic construct
ISGGGGST

SEQ ID NO: 4843 - protein, 8 aa, Artificial Sequence
  Synthetic construct
IKQDGSEK

SEQ ID NO: 4844 - protein, 7 aa, Artificial Sequence
  Synthetic construct
IYYSGST

SEQ ID NO: 4845 - protein, 8 aa, Artificial Sequence
  Synthetic construct
INAGNGNT

SEQ ID NO: 4846 - protein, 8 aa, Artificial Sequence
  Synthetic construct
ISSSRSFI

SEQ ID NO: 4847 - protein, 7 aa, Artificial Sequence
  Synthetic construct
IYSGGST

SEQ ID NO: 4848 - protein, 8 aa, Artificial Sequence
  Synthetic construct
ISSSSSTI

SEQ ID NO: 4849 - protein, 8 aa, Artificial Sequence
  Synthetic construct
ISTGNGNT

SEQ ID NO: 4850 - protein, 8 aa, Artificial Sequence
  Synthetic construct
ISGYNGNT

SEQ ID NO: 4851 - protein, 8 aa, Artificial Sequence
  Synthetic construct
STWNSGTI

SEQ ID NO: 4852 - protein, 8 aa, Artificial Sequence
  Synthetic construct
ISGSGGSS

SEQ ID NO: 4853 - protein, 8 aa, Artificial Sequence
  Synthetic construct
IYPGDSDI

SEQ ID NO: 4854 - protein, 8 aa, Artificial Sequence
  Synthetic construct
IWYDGSNK

SEQ ID NO: 4855 - protein, 7 aa, Artificial Sequence
  Synthetic construct
IYTSGST

SEQ ID NO: 4856 - protein, 8 aa, Artificial Sequence
  Synthetic construct
ISSDGTYK

SEQ ID NO: 4857 - protein, 7 aa, Artificial Sequence
  Synthetic construct
IYSGGLT

SEQ ID NO: 4858 - protein, 8 aa, Artificial Sequence
  Synthetic construct
IHPGDSDT

SEQ ID NO: 4859 - protein, 8 aa, Artificial Sequence
  Synthetic construct
ISYDGSNK

SEQ ID NO: 4860 - protein, 8 aa, Artificial Sequence
  Synthetic construct
ISGSGGST

SEQ ID NO: 4861 - protein, 8 aa, Artificial Sequence
  Synthetic construct
IIPMFGTT

SEQ ID NO: 4862 - protein, 8 aa, Artificial Sequence
  Synthetic construct
IIPIFRTT

SEQ ID NO: 4863 - protein, 8 aa, Artificial Sequence
  Synthetic construct
ISYDGSEK

SEQ ID NO: 4864 - protein, 7 aa, Artificial Sequence
  Synthetic construct
IYWDADK

SEQ ID NO: 4865 - protein, 8 aa, Artificial Sequence
  Synthetic construct
IYPDDSDA

SEQ ID NO: 4866 - protein, 7 aa, Artificial Sequence
  Synthetic construct
IYTSGST

SEQ ID NO: 4867 - protein, 7 aa, Artificial Sequence
  Synthetic construct
MYYSGST

SEQ ID NO: 4868 - protein, 8 aa, Artificial Sequence
  Synthetic construct
IIPIFGTA

SEQ ID NO: 4869 - protein, 8 aa, Artificial Sequence
  Synthetic construct
IDTNTGNP

SEQ ID NO: 4870 - protein, 7 aa, Artificial Sequence
  Synthetic construct
IYTSGST

SEQ ID NO: 4871 - protein, 7 aa, Artificial Sequence
  Synthetic construct
IYGGGST

SEQ ID NO: 4872 - protein, 8 aa, Artificial Sequence
  Synthetic construct
ISGSGAST

SEQ ID NO: 4873 - protein, 7 aa, Artificial Sequence
  Synthetic construct
IYSGGST

SEQ ID NO: 4874 - protein, 10 aa, Artificial Sequence
  Synthetic construct
SRTKPRGYTT

SEQ ID NO: 4875 - protein, 8 aa, Artificial Sequence
  Synthetic construct
IIPIFGTT

SEQ ID NO: 4876 - protein, 8 aa, Artificial Sequence
  Synthetic construct
STWNSGTI

SEQ ID NO: 4877 - protein, 8 aa, Artificial Sequence
  Synthetic construct
IWYDGSNK

SEQ ID NO: 4878 - protein, 8 aa, Artificial Sequence
  Synthetic construct
IKQDGSEK

SEQ ID NO: 4879 - protein, 8 aa, Artificial Sequence
  Synthetic construct
INTNTGNP

SEQ ID NO: 4880 - protein, 10 aa, Artificial Sequence
  Synthetic construct
LKSNSAGATT

SEQ ID NO: 4881 - protein, 8 aa, Artificial Sequence
  Synthetic construct
ISNSRSYT

SEQ ID NO: 4882 - protein, 7 aa, Artificial Sequence
  Synthetic construct
INHSGSS

SEQ ID NO: 4883 - protein, 8 aa, Artificial Sequence
  Synthetic construct
ISTSSGTI

SEQ ID NO: 4884 - protein, 8 aa, Artificial Sequence
  Synthetic construct
IVVGRGNT

SEQ ID NO: 4885 - protein, 8 aa, Artificial Sequence
  Synthetic construct
IKQDGSEK

SEQ ID NO: 4886 - protein, 7 aa, Artificial Sequence
  Synthetic construct
IYWDDGE

SEQ ID NO: 4887 - protein, 8 aa, Artificial Sequence
  Synthetic construct
ISSSSSTI

SEQ ID NO: 4888 - protein, 8 aa, Artificial Sequence
  Synthetic construct
INAGTGGT

SEQ ID NO: 4889 - protein, 7 aa, Artificial Sequence
  Synthetic construct
VYYSGNT

SEQ ID NO: 4890 - protein, 8 aa, Artificial Sequence
  Synthetic construct
ISYDGSNK

SEQ ID NO: 4891 - protein, 8 aa, Artificial Sequence
  Synthetic construct
ISYDGMNK

SEQ ID NO: 4892 - protein, 3 aa, Artificial Sequence
  Synthetic construct
  MISC_FEATURE (1)..(3): X can be any amino acid
XXX

SEQ ID NO: 4893 - protein, 8 aa, Artificial Sequence
  Synthetic construct
ISTYSGDT

SEQ ID NO: 4894 - protein, 8 aa, Artificial Sequence
  Synthetic construct
IKADGSGK

SEQ ID NO: 4895 - protein, 8 aa, Artificial Sequence
  Synthetic construct
IYPGDSDT

SEQ ID NO: 4896 - protein, 8 aa, Artificial Sequence
  Synthetic construct
ISGSGDST

SEQ ID NO: 4897 - protein, 8 aa, Artificial Sequence
  Synthetic construct
ISYDGSNK

SEQ ID NO: 4898 - protein, 8 aa, Artificial Sequence
  Synthetic construct
ISYDGSNK

SEQ ID NO: 4899 - protein, 8 aa, Artificial Sequence
  Synthetic construct
ISSSSSYI

SEQ ID NO: 4900 - protein, 8 aa, Artificial Sequence
  Synthetic construct
ISYDRSNK

SEQ ID NO: 4901 - protein, 8 aa, Artificial Sequence
  Synthetic construct
ISSSSSYI

SEQ ID NO: 4902 - protein, 7 aa, Artificial Sequence
  Synthetic construct
IYHSGST

SEQ ID NO: 4903 - protein, 7 aa, Artificial Sequence
  Synthetic construct
IFYSGDT

SEQ ID NO: 4904 - protein, 8 aa, Artificial Sequence
  Synthetic construct
ISAYNGDT

SEQ ID NO: 4905 - protein, 7 aa, Artificial Sequence
  Synthetic construct
IYYSGST

SEQ ID NO: 4906 - protein, 7 aa, Artificial Sequence
  Synthetic construct
IYYSGST

SEQ ID NO: 4907 - protein, 8 aa, Artificial Sequence
  Synthetic construct
ISSSSNYI

SEQ ID NO: 4908 - protein, 7 aa, Artificial Sequence
  Synthetic construct
IYWDDDK

SEQ ID NO: 4909 - protein, 8 aa, Artificial Sequence
  Synthetic construct
ISYDGSNK

SEQ ID NO: 4910 - protein, 9 aa, Artificial Sequence
  Synthetic construct
TFYRSKWYN

SEQ ID NO: 4911 - protein, 7 aa, Artificial Sequence
  Synthetic construct
LYVNGNT

SEQ ID NO: 4912 - protein, 8 aa, Artificial Sequence
  Synthetic construct
FDPEEAET

SEQ ID NO: 4913 - protein, 8 aa, Artificial Sequence
  Synthetic construct
ISYDGSNT

SEQ ID NO: 4914 - protein, 7 aa, Artificial Sequence
  Synthetic construct
GHSSGST

SEQ ID NO: 4915 - protein, 7 aa, Artificial Sequence
  Synthetic construct
IYYSGST

SEQ ID NO: 4916 - protein, 8 aa, Artificial Sequence
  Synthetic construct
ISYDGVNK

SEQ ID NO: 4917 - protein, 8 aa, Artificial Sequence
  Synthetic construct
ISTDGGTT

SEQ ID NO: 4918 - protein, 8 aa, Artificial Sequence
  Synthetic construct
IIPFLGIA

SEQ ID NO: 4919 - protein, 8 aa, Artificial Sequence
  Synthetic construct
IWYDGSNK

SEQ ID NO: 4920 - protein, 8 aa, Artificial Sequence
  Synthetic construct
ISYDGSIK

SEQ ID NO: 4921 - protein, 8 aa, Artificial Sequence
  Synthetic construct
IIPIFGTA

SEQ ID NO: 4922 - protein, 8 aa, Artificial Sequence
  Synthetic construct
ISGYNGNT

SEQ ID NO: 4923 - protein, 8 aa, Artificial Sequence
  Synthetic construct
IWFDGTNK

SEQ ID NO: 4924 - protein, 8 aa, Artificial Sequence
  Synthetic construct
ISNSGSDI

SEQ ID NO: 4925 - protein, 7 aa, Artificial Sequence
  Synthetic construct
IYWDDDK

SEQ ID NO: 4926 - protein, 8 aa, Artificial Sequence
  Synthetic construct
ISSSSSTI

SEQ ID NO: 4927 - protein, 8 aa, Artificial Sequence
  Synthetic construct
MNPNSGNT

SEQ ID NO: 4928 - protein, 8 aa, Artificial Sequence
  Synthetic construct
ISGSGGST

SEQ ID NO: 4929 - protein, 8 aa, Artificial Sequence
  Synthetic construct
ISDSSNTI

SEQ ID NO: 4930 - protein, 7 aa, Artificial Sequence
  Synthetic construct
IYYSGST

SEQ ID NO: 4931 - protein, 7 aa, Artificial Sequence
  Synthetic construct
IYWDDDK

SEQ ID NO: 4932 - protein, 8 aa, Artificial Sequence
  Synthetic construct
IWYDGSNT

SEQ ID NO: 4933 - protein, 8 aa, Artificial Sequence
  Synthetic construct
IIPILGIA

SEQ ID NO: 4934 - protein, 7 aa, Artificial Sequence
  Synthetic construct
INHSGST

SEQ ID NO: 4935 - protein, 8 aa, Artificial Sequence
  Synthetic construct
ISYDGSQK

SEQ ID NO: 4936 - protein, 7 aa, Artificial Sequence
  Synthetic construct
IYYSGST

SEQ ID NO: 4937 - protein, 8 aa, Artificial Sequence
  Synthetic construct
IWYDGSKK

SEQ ID NO: 4938 - protein, 8 aa, Artificial Sequence
  Synthetic construct
ISAYNGNT

SEQ ID NO: 4939 - protein, 8 aa, Artificial Sequence
  Synthetic construct
ISYDGSNK

SEQ ID NO: 4940 - protein, 8 aa, Artificial Sequence
  Synthetic construct
ISSTSSSI

SEQ ID NO: 4941 - protein, 8 aa, Artificial Sequence
  Synthetic construct
ISYDGDNK

SEQ ID NO: 4942 - protein, 8 aa, Artificial Sequence
  Synthetic construct
IDPSDPYS

SEQ ID NO: 4943 - protein, 8 aa, Artificial Sequence
  Synthetic construct
ISWDGGST

SEQ ID NO: 4944 - protein, 8 aa, Artificial Sequence
  Synthetic construct
ISYDGRNE

SEQ ID NO: 4945 - protein, 8 aa, Artificial Sequence
  Synthetic construct
ISGSGDST

SEQ ID NO: 4946 - protein, 7 aa, Artificial Sequence
  Synthetic construct
IHWDDDK

SEQ ID NO: 4947 - protein, 8 aa, Artificial Sequence
  Synthetic construct
FDPENLET

SEQ ID NO: 4948 - protein, 7 aa, Artificial Sequence
  Synthetic construct
IYYSGST

SEQ ID NO: 4949 - protein, 8 aa, Artificial Sequence
  Synthetic construct
ISWNSGTI

SEQ ID NO: 4950 - protein, 7 aa, Artificial Sequence
  Synthetic construct
IYYSGST

SEQ ID NO: 4951 - protein, 8 aa, Artificial Sequence
  Synthetic construct
ISGSGDRT

SEQ ID NO: 4952 - protein, 8 aa, Artificial Sequence
  Synthetic construct
FDPENAET

SEQ ID NO: 4953 - protein, 8 aa, Artificial Sequence
  Synthetic construct
ISYDGNNK

SEQ ID NO: 4954 - protein, 8 aa, Artificial Sequence
  Synthetic construct
ISAFNGDT

SEQ ID NO: 4955 - protein, 7 aa, Artificial Sequence
  Synthetic construct
IYHSENT

SEQ ID NO: 4956 - protein, 8 aa, Artificial Sequence
  Synthetic construct
VSNDGSDR

SEQ ID NO: 4957 - protein, 8 aa, Artificial Sequence
  Synthetic construct
MNPISGGT

SEQ ID NO: 4958 - protein, 8 aa, Artificial Sequence
  Synthetic construct
ISYDGINK

SEQ ID NO: 4959 - protein, 8 aa, Artificial Sequence
  Synthetic construct
ISTSDDYI

SEQ ID NO: 4960 - protein, 8 aa, Artificial Sequence
  Synthetic construct
IWYDTSNE

SEQ ID NO: 4961 - protein, 8 aa, Artificial Sequence
  Synthetic construct
IKQDGSEK

SEQ ID NO: 4962 - protein, 8 aa, Artificial Sequence
  Synthetic construct
IYPGDSDT

SEQ ID NO: 4963 - protein, 8 aa, Artificial Sequence
  Synthetic construct
ISSDGNNK

SEQ ID NO: 4964 - protein, 7 aa, Artificial Sequence
  Synthetic construct
IYWDDDK

SEQ ID NO: 4965 - protein, 8 aa, Artificial Sequence
  Synthetic construct
ISYDGSNK

SEQ ID NO: 4966 - protein, 8 aa, Artificial Sequence
  Synthetic construct
INGDGTNT

SEQ ID NO: 4967 - protein, 8 aa, Artificial Sequence
  Synthetic construct
ISSRSNFI

SEQ ID NO: 4968 - protein, 8 aa, Artificial Sequence
  Synthetic construct
IWYDGTNK

SEQ ID NO: 4969 - protein, 15 aa, Artificial Sequence
  Synthetic construct
ARDPYMNGWYYGMDV

SEQ ID NO: 4970 - protein, 14 aa, Artificial Sequence
  Synthetic construct
ARGWGSGSYTLYDY

SEQ ID NO: 4971 - protein, 13 aa, Artificial Sequence
  Synthetic construct
ARAKGGNYYYFDY

SEQ ID NO: 4972 - protein, 20 aa, Artificial Sequence
  Synthetic construct
ARGAMEEIGKTRFSYNYFDR

SEQ ID NO: 4973 - protein, 19 aa, Artificial Sequence
  Synthetic construct
ARSMYPSLRFAAAGGAFDY

SEQ ID NO: 4974 - protein, 25 aa, Artificial Sequence
  Synthetic construct
ARDLRETGDCSGPNCYVGKFTWFDP

SEQ ID NO: 4975 - protein, 14 aa, Artificial Sequence
  Synthetic construct
ARGYGGHYYYGMDV

SEQ ID NO: 4976 - protein, 21 aa, Artificial Sequence
  Synthetic construct
ARDNRLGELWLGELLGGDFDY

SEQ ID NO: 4977 - protein, 17 aa, Artificial Sequence
  Synthetic construct
ARGQGYVWGSFRHHLDY

SEQ ID NO: 4978 - protein, 21 aa, Artificial Sequence
  Synthetic construct
ATAPAIAGNVTIYYYYYGMDV

SEQ ID NO: 4979 - protein, 17 aa, Artificial Sequence
  Synthetic construct
AKGERIMILVVITLFDY

SEQ ID NO: 4980 - protein, 12 aa, Artificial Sequence
  Synthetic construct
ARGSGSYHLQRY

SEQ ID NO: 4981 - protein, 11 aa, Artificial Sequence
  Synthetic construct
APRGWRNLFDY

SEQ ID NO: 4982 - protein, 18 aa, Artificial Sequence
  Synthetic construct
VREVGLLDYYYYYHGMDV

SEQ ID NO: 4983 - protein, 12 aa, Artificial Sequence
  Synthetic construct
TLDSSGSSGWDV

SEQ ID NO: 4984 - protein, 17 aa, Artificial Sequence
  Synthetic construct
ARENSAYIGGGPSGFDY

SEQ ID NO: 4985 - protein, 11 aa, Artificial Sequence
  Synthetic construct
TRGGLWGTFDY

SEQ ID NO: 4986 - protein, 15 aa, Artificial Sequence
  Synthetic construct
AREGSFGSDPTCPDY

SEQ ID NO: 4987 - protein, 14 aa, Artificial Sequence
  Synthetic construct
ARVIVVVPQLLLSP

SEQ ID NO: 4988 - protein, 13 aa, Artificial Sequence
  Synthetic construct
AKGRGGYYSYFDY

SEQ ID NO: 4989 - protein, 14 aa, Artificial Sequence
  Synthetic construct
ARSFRGNYYYGMDV

SEQ ID NO: 4990 - protein, 14 aa, Artificial Sequence
  Synthetic construct
ARDGAVGDTTGLDQ

SEQ ID NO: 4991 - protein, 13 aa, Artificial Sequence
  Synthetic construct
ARGPVYYNSEERY

SEQ ID NO: 4992 - protein, 13 aa, Artificial Sequence
  Synthetic construct
ARGGWVEGDALDI

SEQ ID NO: 4993 - protein, 14 aa, Artificial Sequence
  Synthetic construct
ARAGSGSYFFGFDI

SEQ ID NO: 4994 - protein, 15 aa, Artificial Sequence
  Synthetic construct
AHRTPSNWFGDWFDP

SEQ ID NO: 4995 - protein, 26 aa, Artificial Sequence
  Synthetic construct
VRVNASEYYGSEGPKIKYYYYYYMDV

SEQ ID NO: 4996 - protein, 14 aa, Artificial Sequence
  Synthetic construct
ARSGAYLTRSWFDP

SEQ ID NO: 4997 - protein, 17 aa, Artificial Sequence
  Synthetic construct
ARFAYNSVQTFIGGFDI

SEQ ID NO: 4998 - protein, 24 aa, Artificial Sequence
  Synthetic construct
ARDPASYYDFWSGYVDHYYYGMDV

SEQ ID NO: 4999 - protein, 13 aa, Artificial Sequence
  Synthetic construct
ARSGGYRLWFGEL

SEQ ID NO: 5000 - protein, 17 aa, Artificial Sequence
  Synthetic construct
ARVGSGTYYTDYYGMGI

SEQ ID NO: 5001 - protein, 19 aa, Artificial Sequence
  Synthetic construct
AREFGGMLSLGRYYYYMDV

SEQ ID NO: 5002 - protein, 13 aa, Artificial Sequence
  Synthetic construct
STDFGYSASGSYL

SEQ ID NO: 5003 - protein, 19 aa, Artificial Sequence
  Synthetic construct
ARDFDTMHRGGYYYYYMDV

SEQ ID NO: 5004 - protein, 17 aa, Artificial Sequence
  Synthetic construct
ARPNGALEWLYYYGMDV

SEQ ID NO: 5005 - protein, 16 aa, Artificial Sequence
  Synthetic construct
AKGSTVARFLWNAFDI

SEQ ID NO: 5006 - protein, 22 aa, Artificial Sequence
  Synthetic construct
ARDIADSKYSGGWYYYHYYMDV

SEQ ID NO: 5007 - protein, 14 aa, Artificial Sequence
  Synthetic construct
AREGEVGATTGVDY

SEQ ID NO: 5008 - protein, 19 aa, Artificial Sequence
  Synthetic construct
ARDFDTMVRGGYYYYYMDV

SEQ ID NO: 5009 - protein, 16 aa, Artificial Sequence
  Synthetic construct
ARDRGLTQLDENWFDP

SEQ ID NO: 5010 - protein, 15 aa, Artificial Sequence
  Synthetic construct
ARGENFDWSPWYFDY

SEQ ID NO: 5011 - protein, 13 aa, Artificial Sequence
  Synthetic construct
ARRVPGDYYCLDV

SEQ ID NO: 5012 - protein, 11 aa, Artificial Sequence
  Synthetic construct
AKSRGNWYLDL

SEQ ID NO: 5013 - protein, 16 aa, Artificial Sequence
  Synthetic construct
AAPYCSGGTCHDAFDI

SEQ ID NO: 5014 - protein, 19 aa, Artificial Sequence
  Synthetic construct
AKFALRSAIDVIVVVYFDY

SEQ ID NO: 5015 - protein, 17 aa, Artificial Sequence
  Synthetic construct
AKGDRIIMLVVVTLIDY

SEQ ID NO: 5016 - protein, 14 aa, Artificial Sequence
  Synthetic construct
AKGSAAVIAGGFDP

SEQ ID NO: 5017 - protein, 10 aa, Artificial Sequence
  Synthetic construct
ARDHDLGIRY

SEQ ID NO: 5018 - protein, 16 aa, Artificial Sequence
  Synthetic construct
AKEMGARVYYNGSEFT

SEQ ID NO: 5019 - protein, 13 aa, Artificial Sequence
  Synthetic construct
AQIEYDFGVKFDY

SEQ ID NO: 5020 - protein, 16 aa, Artificial Sequence
  Synthetic construct
ARDNGVQSYHYYGIDV

SEQ ID NO: 5021 - protein, 12 aa, Artificial Sequence
  Synthetic construct
AKTYGSGWYSGP

SEQ ID NO: 5022 - protein, 16 aa, Artificial Sequence
  Synthetic construct
AGTLYYDSSPFHAFHI

SEQ ID NO: 5023 - protein, 14 aa, Artificial Sequence
  Synthetic construct
ASEDRYSGSYYFDY

SEQ ID NO: 5024 - protein, 19 aa, Artificial Sequence
  Synthetic construct
ARAYRYCSGTTCHPEYFPH

SEQ ID NO: 5025 - protein, 18 aa, Artificial Sequence
  Synthetic construct
ATGRRRILTGFLDIMNDY

SEQ ID NO: 5026 - protein, 15 aa, Artificial Sequence
  Synthetic construct
ARDETVYYYYYYMDV

SEQ ID NO: 5027 - protein, 13 aa, Artificial Sequence
  Synthetic construct
ARDRGNFTYWFDP

SEQ ID NO: 5028 - protein, 14 aa, Artificial Sequence
  Synthetic construct
AREGMVGTTTGLDY

SEQ ID NO: 5029 - protein, 13 aa, Artificial Sequence
  Synthetic construct
AVFYGSGSYRFDP

SEQ ID NO: 5030 - protein, 15 aa, Artificial Sequence
  Synthetic construct
AREGSFGSGASCPDY

SEQ ID NO: 5031 - protein, 19 aa, Artificial Sequence
  Synthetic construct
ARGSGGPAPNYFYYYYMDV

SEQ ID NO: 5032 - protein, 6 aa, Artificial Sequence
  Synthetic construct
ARGFDL

SEQ ID NO: 5033 - protein, 11 aa, Artificial Sequence
  Synthetic construct
ARLPLWGAFDI

SEQ ID NO: 5034 - protein, 18 aa, Artificial Sequence
  Synthetic construct
VRDRGAIHVRNPPREFDI

SEQ ID NO: 5035 - protein, 20 aa, Artificial Sequence
  Synthetic construct
ARQVFDFWSGYSEGEYWFDT

SEQ ID NO: 5036 - protein, 12 aa, Artificial Sequence
  Synthetic construct
ARDGGGDYGPDY

SEQ ID NO: 5037 - protein, 20 aa, Artificial Sequence
  Synthetic construct
AKSGRYYYDTSGYYFDAFDI

SEQ ID NO: 5038 - protein, 13 aa, Artificial Sequence
  Synthetic construct
VREGIAVAGGMDV

SEQ ID NO: 5039 - protein, 13 aa, Artificial Sequence
  Synthetic construct
ARHGTGTVGAPDY

SEQ ID NO: 5040 - protein, 17 aa, Artificial Sequence
  Synthetic construct
ATSYCTGGVCYWGQFDY

SEQ ID NO: 5041 - protein, 14 aa, Artificial Sequence
  Synthetic construct
ARDESLFGEYTFDY

SEQ ID NO: 5042 - protein, 13 aa, Artificial Sequence
  Synthetic construct
ARQQYSSSDGFDI

SEQ ID NO: 5043 - protein, 18 aa, Artificial Sequence
  Synthetic construct
ARAPPLYDVSDYYISPYS

SEQ ID NO: 5044 - protein, 21 aa, Artificial Sequence
  Synthetic construct
AKDGGHGDWGRKGYYYYGLDV

SEQ ID NO: 5045 - protein, 22 aa, Artificial Sequence
  Synthetic construct
AHRRRDAVWNLFSTKGFGRFDP

SEQ ID NO: 5046 - protein, 13 aa, Artificial Sequence
  Synthetic construct
ARVILWFGGAVDV

SEQ ID NO: 5047 - protein, 10 aa, Artificial Sequence
  Synthetic construct
AKDSSGIPDY

SEQ ID NO: 5048 - protein, 15 aa, Artificial Sequence
  Synthetic construct
ARNFAYDSSGYSWDY

SEQ ID NO: 5049 - protein, 10 aa, Artificial Sequence
  Synthetic construct
ATDSDGVHSV

SEQ ID NO: 5050 - protein, 13 aa, Artificial Sequence
  Synthetic construct
ARGMSMIRGVPDY

SEQ ID NO: 5051 - protein, 14 aa, Artificial Sequence
  Synthetic construct
ARDPEGQWLGNFDS

SEQ ID NO: 5052 - protein, 13 aa, Artificial Sequence
  Synthetic construct
ARPAVDYSVYFDF

SEQ ID NO: 5053 - protein, 19 aa, Artificial Sequence
  Synthetic construct
VRPIQYCSDGSCSACGFEM

SEQ ID NO: 5054 - protein, 22 aa, Artificial Sequence
  Synthetic construct
ASEKTTYYYDSSGYYYEYYFDY

SEQ ID NO: 5055 - protein, 19 aa, Artificial Sequence
  Synthetic construct
ARDSVVVAAQNSVFYGMDV

SEQ ID NO: 5056 - protein, 10 aa, Artificial Sequence
  Synthetic construct
VRENDWLLGL

SEQ ID NO: 5057 - protein, 16 aa, Artificial Sequence
  Synthetic construct
VTDPDDFRSAGDYFDY

SEQ ID NO: 5058 - protein, 7 aa, Artificial Sequence
  Synthetic construct
AKRAGRY

SEQ ID NO: 5059 - protein, 12 aa, Artificial Sequence
  Synthetic construct
ARASTVTPDFDY

SEQ ID NO: 5060 - protein, 11 aa, Artificial Sequence
  Synthetic construct
ARGFGNWHFDL

SEQ ID NO: 5061 - protein, 15 aa, Artificial Sequence
  Synthetic construct
ATEGKEYADYQPFDY

SEQ ID NO: 5062 - protein, 20 aa, Artificial Sequence
  Synthetic construct
AREKIVVVTGTRFLGYGMDV

SEQ ID NO: 5063 - protein, 18 aa, Artificial Sequence
  Synthetic construct
ARDYASGSPRYSYYYMDV

SEQ ID NO: 5064 - protein, 15 aa, Artificial Sequence
  Synthetic construct
ARPSGSYNYYYGMDV

SEQ ID NO: 5065 - protein, 19 aa, Artificial Sequence
  Synthetic construct
AKWGSSLLWFGEVYNWFDP

SEQ ID NO: 5066 - protein, 12 aa, Artificial Sequence
  Synthetic construct
ARGRARSSGVDQ

SEQ ID NO: 5067 - protein, 10 aa, Artificial Sequence
  Synthetic construct
ARDQGAYMDV

SEQ ID NO: 5068 - protein, 15 aa, Artificial Sequence
  Synthetic construct
ASLPSPARRYNWFDP

SEQ ID NO: 5069 - protein, 13 aa, Artificial Sequence
  Synthetic construct
ARGGWPSGDAFDF

SEQ ID NO: 5070 - protein, 17 aa, Artificial Sequence
  Synthetic construct
AKDTGAIPAAPSVGFDY

SEQ ID NO: 5071 - protein, 20 aa, Artificial Sequence
  Synthetic construct
ARDGGYFYDSNGPLPDAFDI

SEQ ID NO: 5072 - protein, 13 aa, Artificial Sequence
  Synthetic construct
AREEGSGWWKHDY

SEQ ID NO: 5073 - protein, 19 aa, Artificial Sequence
  Synthetic construct
AHINVAAQQYSEWFPLLDS

SEQ ID NO: 5074 - protein, 14 aa, Artificial Sequence
  Synthetic construct
AKEVGYDEFDGFDI

SEQ ID NO: 5075 - protein, 15 aa, Artificial Sequence
  Synthetic construct
ARYTRDWSRDDGFDI

SEQ ID NO: 5076 - protein, 15 aa, Artificial Sequence
  Synthetic construct
ASGGSSGWYNGAFDI

SEQ ID NO: 5077 - protein, 14 aa, Artificial Sequence
  Synthetic construct
AREGRLQQLAPFDY

SEQ ID NO: 5078 - protein, 21 aa, Artificial Sequence
  Synthetic construct
ARDAGYCSGSKCPQYYYSMDV

SEQ ID NO: 5079 - protein, 20 aa, Artificial Sequence
  Synthetic construct
AREQYYYGSGSYHSPGGMDV

SEQ ID NO: 5080 - protein, 16 aa, Artificial Sequence
  Synthetic construct
VKIGTGAYGSRNYFDC

SEQ ID NO: 5081 - protein, 23 aa, Artificial Sequence
  Synthetic construct
ARVRGVGDFWSGYFFVSSTYFDS

SEQ ID NO: 5082 - protein, 13 aa, Artificial Sequence
  Synthetic construct
AALVGPSEYSDVG

SEQ ID NO: 5083 - protein, 25 aa, Artificial Sequence
  Synthetic construct
ARGAALKVDPLMIAFGGVYVYGHDY

SEQ ID NO: 5084 - protein, 14 aa, Artificial Sequence
  Synthetic construct
ARVSYSGYFGYFDL

SEQ ID NO: 5085 - protein, 19 aa, Artificial Sequence
  Synthetic construct
ARHSNYYDSSAYVNTSPDF

SEQ ID NO: 5086 - protein, 9 aa, Artificial Sequence
  Synthetic construct
ARVETIDSY

SEQ ID NO: 5087 - protein, 16 aa, Artificial Sequence
  Synthetic construct
ARGGKGQLWVYSSFDY

SEQ ID NO: 5088 - protein, 21 aa, Artificial Sequence
  Synthetic construct
ATAPAIAEAATGYYYYYGMDV

SEQ ID NO: 5089 - protein, 11 aa, Artificial Sequence
  Synthetic construct
ARGDGYNYFDY

SEQ ID NO: 5090 - protein, 18 aa, Artificial Sequence
  Synthetic construct
ARAGDYYGSGSYYRPFDF

SEQ ID NO: 5091 - protein, 14 aa, Artificial Sequence
  Synthetic construct
ARARGSVLISEFDY

SEQ ID NO: 5092 - protein, 18 aa, Artificial Sequence
  Synthetic construct
ARGRDSSGLDLYYYGMDV

SEQ ID NO: 5093 - protein, 20 aa, Artificial Sequence
  Synthetic construct
ARSWEGIKQLPGYYYFGMDV

SEQ ID NO: 5094 - protein, 16 aa, Artificial Sequence
  Synthetic construct
VRASFVAASPVFGVDV

SEQ ID NO: 5095 - protein, 20 aa, Artificial Sequence
  Synthetic construct
AKADGGYYDSSAYYSTAIDF

SEQ ID NO: 5096 - protein, 13 aa, Artificial Sequence
  Synthetic construct
ARSGGYRLWFGEL

SEQ ID NO: 5097 - protein, 20 aa, Artificial Sequence
  Synthetic construct
ARDLRRWWELPTASIEYFQH

SEQ ID NO: 5098 - protein, 18 aa, Artificial Sequence
  Synthetic construct
ARASVGLSYSENYIPLDH

SEQ ID NO: 5099 - protein, 20 aa, Artificial Sequence
  Synthetic construct
AMNPPQYDILTGYYHNWFDP

SEQ ID NO: 5100 - protein, 13 aa, Artificial Sequence
  Synthetic construct
ARDWGDYQYYMNV

SEQ ID NO: 5101 - protein, 14 aa, Artificial Sequence
  Synthetic construct
ARAIVGPTPNWFDP

SEQ ID NO: 5102 - protein, 14 aa, Artificial Sequence
  Synthetic construct
AREGIVGETTGLDY

SEQ ID NO: 5103 - protein, 14 aa, Artificial Sequence
  Synthetic construct
ARALGGGYYYGMDV

SEQ ID NO: 5104 - protein, 16 aa, Artificial Sequence
  Synthetic construct
AKDWGTWHYSQSLLEA

SEQ ID NO: 5105 - protein, 22 aa, Artificial Sequence
  Synthetic construct
VKDIGRYDPYEGFGRVGGAFDL

SEQ ID NO: 5106 - protein, 14 aa, Artificial Sequence
  Synthetic construct
ARDPPNLRGSAIDI

SEQ ID NO: 5107 - protein, 16 aa, Artificial Sequence
  Synthetic construct
ARGVTYSSAWYSGINP

SEQ ID NO: 5108 - protein, 23 aa, Artificial Sequence
  Synthetic construct
ARGGPRKLFFGVIREGSWQCFDI

SEQ ID NO: 5109 - protein, 15 aa, Artificial Sequence
  Synthetic construct
ARGGIVPAASEVFDI

SEQ ID NO: 5110 - protein, 12 aa, Artificial Sequence
  Synthetic construct
ARLGSSSWYFDY

SEQ ID NO: 5111 - protein, 13 aa, Artificial Sequence
  Synthetic construct
ARQSTLFIGELDP

SEQ ID NO: 5112 - protein, 22 aa, Artificial Sequence
  Synthetic construct
AKALGYCSSDSCSPGYFYGMDV

SEQ ID NO: 5113 - protein, 14 aa, Artificial Sequence
  Synthetic construct
ARKSTYYYYYGMDV

SEQ ID NO: 5114 - protein, 16 aa, Artificial Sequence
  Synthetic construct
ARGNYGDYYYYYGMDV

SEQ ID NO: 5115 - protein, 14 aa, Artificial Sequence
  Synthetic construct
ARGAGLWFGELLDS

SEQ ID NO: 5116 - protein, 12 aa, Artificial Sequence
  Synthetic construct
ARLGSSSWYFDY

SEQ ID NO: 5117 - protein, 13 aa, Artificial Sequence
  Synthetic construct
AKAQGGYSYGFDY

SEQ ID NO: 5118 - protein, 16 aa, Artificial Sequence
  Synthetic construct
ATVQITSGATGGYFDY

SEQ ID NO: 5119 - protein, 15 aa, Artificial Sequence
  Synthetic construct
ARGKRVVHYYYQMDV

SEQ ID NO: 5120 - protein, 14 aa, Artificial Sequence
  Synthetic construct
ARAKSGAYRTPWDY

SEQ ID NO: 5121 - protein, 15 aa, Artificial Sequence
  Synthetic construct
ARDLYYVPHRGAFDI

SEQ ID NO: 5122 - protein, 24 aa, Artificial Sequence
  Synthetic construct
ARPMRPSYASDWSFGAGYTYAMDV

SEQ ID NO: 5123 - protein, 15 aa, Artificial Sequence
  Synthetic construct
VRDDGSGTQNYYMDV

SEQ ID NO: 5124 - protein, 12 aa, Artificial Sequence
  Synthetic construct
ATVTLRIQVFAD

SEQ ID NO: 5125 - protein, 19 aa, Artificial Sequence
  Synthetic construct
ARLLGACTSGRCSSFWFDS

SEQ ID NO: 5126 - protein, 20 aa, Artificial Sequence
  Synthetic construct
AREVYYYDRSGYYSSDAFDV

SEQ ID NO: 5127 - protein, 18 aa, Artificial Sequence
  Synthetic construct
ASAGPYYDYVWGSYCFDY

SEQ ID NO: 5128 - protein, 14 aa, Artificial Sequence
  Synthetic construct
ARARGGNYFDAFDI

SEQ ID NO: 5129 - protein, 18 aa, Artificial Sequence
  Synthetic construct
ARVGWSTATGGGYNAFDI

SEQ ID NO: 5130 - protein, 19 aa, Artificial Sequence
  Synthetic construct
ARDPHPYYFDGGGPSPVDY

SEQ ID NO: 5131 - protein, 18 aa, Artificial Sequence
  Synthetic construct
ARVGRFGESGVNYYAMDV

SEQ ID NO: 5132 - protein, 24 aa, Artificial Sequence
  Synthetic construct
ARETGTRNYDILAGSYYYYYYMDV

SEQ ID NO: 5133 - protein, 19 aa, Artificial Sequence
  Synthetic construct
ARHSNYYDSSGYVNTSPDY

SEQ ID NO: 5134 - protein, 12 aa, Artificial Sequence
  Synthetic construct
ARTDAYTNYADY

SEQ ID NO: 5135 - protein, 14 aa, Artificial Sequence
  Synthetic construct
ARSTRGGYYYGMDV

SEQ ID NO: 5136 - protein, 13 aa, Artificial Sequence
  Synthetic construct
AKPKGAGGWHFDN

SEQ ID NO: 5137 - protein, 14 aa, Artificial Sequence
  Synthetic construct
ARAYGGNYYYGMDV

SEQ ID NO: 5138 - protein, 20 aa, Artificial Sequence
  Synthetic construct
AKIVGDYCSGGSCYGGPLDY

SEQ ID NO: 5139 - protein, 16 aa, Artificial Sequence
  Synthetic construct
ARANGNYERGGWYFDL

SEQ ID NO: 5140 - protein, 13 aa, Artificial Sequence
  Synthetic construct
AADRVSGLYGGGY

SEQ ID NO: 5141 - protein, 17 aa, Artificial Sequence
  Synthetic construct
ARDRVVLWFREGDYFDY

SEQ ID NO: 5142 - protein, 17 aa, Artificial Sequence
  Synthetic construct
TSTWQWLRGYYYYGMDV

SEQ ID NO: 5143 - protein, 4 aa, Artificial Sequence
  Synthetic construct
ASVG

SEQ ID NO: 5144 - protein, 18 aa, Artificial Sequence
  Synthetic construct
TRATDTTMDLKHYYYMDV

SEQ ID NO: 5145 - protein, 12 aa, Artificial Sequence
  Synthetic construct
ARVNPMGGGPDY

SEQ ID NO: 5146 - protein, 15 aa, Artificial Sequence
  Synthetic construct
ASGGSSGWYNGAFDI

SEQ ID NO: 5147 - protein, 16 aa, Artificial Sequence
  Synthetic construct
ARDPLTWFGDRDGMDV

SEQ ID NO: 5148 - protein, 16 aa, Artificial Sequence
  Synthetic construct
ARDHDDGYYFYYYMDV

SEQ ID NO: 5149 - protein, 20 aa, Artificial Sequence
  Synthetic construct
AWNTGFPFGHYSTSGSYYPD

SEQ ID NO: 5150 - protein, 11 aa, Artificial Sequence
  Synthetic construct
ARNTNLEYFDF

SEQ ID NO: 5151 - protein, 22 aa, Artificial Sequence
  Synthetic construct
AKDIGRYDHYYTFGSVGGAFDI

SEQ ID NO: 5152 - protein, 11 aa, Artificial Sequence
  Synthetic construct
ARIQQWRAFDP

SEQ ID NO: 5153 - protein, 18 aa, Artificial Sequence
  Synthetic construct
ARDRDAYANYVYYYGMDV

SEQ ID NO: 5154 - protein, 23 aa, Artificial Sequence
  Synthetic construct
ARATPYCSGGSCLIYYYYYGMDV

SEQ ID NO: 5155 - protein, 19 aa, Artificial Sequence
  Synthetic construct
ASAPPLVITKGLYYYGMDV

SEQ ID NO: 5156 - protein, 17 aa, Artificial Sequence
  Synthetic construct
AKDVGNYGGDKYNWFDP

SEQ ID NO: 5157 - protein, 15 aa, Artificial Sequence
  Synthetic construct
AKKNYDNSGCHYFQS

SEQ ID NO: 5158 - protein, 11 aa, Artificial Sequence
  Synthetic construct
VRGGLWGTFDY

SEQ ID NO: 5159 - protein, 23 aa, Artificial Sequence
  Synthetic construct
AKHIVVAPTTASWVISLNYFMDV

SEQ ID NO: 5160 - protein, 12 aa, Artificial Sequence
  Synthetic construct
AREGSWKYIFDY

SEQ ID NO: 5161 - protein, 18 aa, Artificial Sequence
  Synthetic construct
ARRRSMIVVVPKGDWFDP

SEQ ID NO: 5162 - protein, 24 aa, Artificial Sequence
  Synthetic construct
ARDPASYYDLWSGYVDYYYYGMDV

SEQ ID NO: 5163 - protein, 11 aa, Artificial Sequence
  Synthetic construct
ARFYGAKYFDH

SEQ ID NO: 5164 - protein, 17 aa, Artificial Sequence
  Synthetic construct
ARDPSRPSYGDHDAFDI

SEQ ID NO: 5165 - protein, 18 aa, Artificial Sequence
  Synthetic construct
ARGPVQLSSSWPPDAFDI

SEQ ID NO: 5166 - protein, 22 aa, Artificial Sequence
  Synthetic construct
ARPPRGYYDRTGYYNVVHYFHH

SEQ ID NO: 5167 - protein, 22 aa, Artificial Sequence
  Synthetic construct
ARPRFGGSGNYYNVPGAGAFDM

SEQ ID NO: 5168 - protein, 14 aa, Artificial Sequence
  Synthetic construct
ARGVVAATPGYFDY

SEQ ID NO: 5169 - protein, 16 aa, Artificial Sequence
  Synthetic construct
AKERSMYYYDSSGIDY

SEQ ID NO: 5170 - protein, 17 aa, Artificial Sequence
  Synthetic construct
ATGPAYCDGYCRRWLDP

SEQ ID NO: 5171 - protein, 20 aa, Artificial Sequence
  Synthetic construct
ARDPDPDIVVVVAADASLDY

SEQ ID NO: 5172 - protein, 12 aa, Artificial Sequence
  Synthetic construct
ARDYGDDNWFDP

SEQ ID NO: 5173 - protein, 14 aa, Artificial Sequence
  Synthetic construct
AREGQVGATTGADY

SEQ ID NO: 5174 - protein, 20 aa, Artificial Sequence
  Synthetic construct
ARDRGFCTASHCPGVDAFDV

SEQ ID NO: 5175 - protein, 13 aa, Artificial Sequence
  Synthetic construct
ARGRGGYYTYFDY

SEQ ID NO: 5176 - protein, 13 aa, Artificial Sequence
  Synthetic construct
ARTYFYDTDTFNI

SEQ ID NO: 5177 - protein, 18 aa, Artificial Sequence
  Synthetic construct
ARSWNNNESSTYTTPFDY

SEQ ID NO: 5178 - protein, 21 aa, Artificial Sequence
  Synthetic construct
AHRPLSGSWHIGPNPENWFDP

SEQ ID NO: 5179 - protein, 17 aa, Artificial Sequence
  Synthetic construct
ARDSGNWNDGDGGHFDS

SEQ ID NO: 5180 - protein, 12 aa, Artificial Sequence
  Synthetic construct
AGGRSPGRTFEI

SEQ ID NO: 5181 - protein, 19 aa, Artificial Sequence
  Synthetic construct
ARDPQALAAGPRYYYYMDV

SEQ ID NO: 5182 - protein, 22 aa, Artificial Sequence
  Synthetic construct
ARDGAYCSDGWCYTDIVFIMDV

SEQ ID NO: 5183 - protein, 6 aa, Artificial Sequence
  Synthetic construct
ARGFDY

SEQ ID NO: 5184 - protein, 17 aa, Artificial Sequence
  Synthetic construct
ARDPSRPSYGDHDAFDI

SEQ ID NO: 5185 - protein, 13 aa, Artificial Sequence
  Synthetic construct
VRWGDDYDDYVDY

SEQ ID NO: 5186 - protein, 16 aa, Artificial Sequence
  Synthetic construct
ARDPVRGFFYYYYMDV

SEQ ID NO: 5187 - protein, 18 aa, Artificial Sequence
  Synthetic construct
ATQPGAVAITYHYYGMDV

SEQ ID NO: 5188 - protein, 22 aa, Artificial Sequence
  Synthetic construct
AKDLMSSGGSGQGYYYHYGMDV

SEQ ID NO: 5189 - protein, 14 aa, Artificial Sequence
  Synthetic construct
ARPVLRRDYYGMDV

SEQ ID NO: 5190 - protein, 5 aa, Artificial Sequence
  Synthetic construct
TTWWF

SEQ ID NO: 5191 - protein, 14 aa, Artificial Sequence
  Synthetic construct
ATSPAIVRQNWFDP

SEQ ID NO: 5192 - protein, 14 aa, Artificial Sequence
  Synthetic construct
ARAAMIIMVGAFDF

SEQ ID NO: 5193 - protein, 15 aa, Artificial Sequence
  Synthetic construct
VTGPVIVAAGSWLAP

SEQ ID NO: 5194 - protein, 11 aa, Artificial Sequence
  Synthetic construct
ARLAGRIPFDS

SEQ ID NO: 5195 - protein, 23 aa, Artificial Sequence
  Synthetic construct
AGAPTSEYYDDSGYYRPTWHFDL

SEQ ID NO: 5196 - protein, 15 aa, Artificial Sequence
  Synthetic construct
GRLVVRGGWNDAFDL

SEQ ID NO: 5197 - protein, 14 aa, Artificial Sequence
  Synthetic construct
AKDTVGPDYYGMDV

SEQ ID NO: 5198 - protein, 14 aa, Artificial Sequence
  Synthetic construct
ARDDGSSWQTVFDI

SEQ ID NO: 5199 - protein, 20 aa, Artificial Sequence
  Synthetic construct
AKADGGYYDSSAYHSTAIDY

SEQ ID NO: 5200 - protein, 18 aa, Artificial Sequence
  Synthetic construct
ARAYSSGWRTYYYYGMDV

SEQ ID NO: 5201 - protein, 15 aa, Artificial Sequence
  Synthetic construct
ARDPYSSGWYYGMDV

SEQ ID NO: 5202 - protein, 14 aa, Artificial Sequence
  Synthetic construct
ARGGGGSYWGPFDY

SEQ ID NO: 5203 - protein, 12 aa, Artificial Sequence
  Synthetic construct
AREGYSYYGMDV

SEQ ID NO: 5204 - protein, 16 aa, Artificial Sequence
  Synthetic construct
ARDRGHDYGSPDAFDI

SEQ ID NO: 5205 - protein, 11 aa, Artificial Sequence
  Synthetic construct
ARELYGGAFDI

SEQ ID NO: 5206 - protein, 15 aa, Artificial Sequence
  Synthetic construct
ASTGHYDSSGFYSDY

SEQ ID NO: 5207 - protein, 21 aa, Artificial Sequence
  Synthetic construct
VAAPAVAGTPQVYHHYYGMDV

SEQ ID NO: 5208 - protein, 15 aa, Artificial Sequence
  Synthetic construct
ARDTYDPPDYYGMDV

SEQ ID NO: 5209 - protein, 17 aa, Artificial Sequence
  Synthetic construct
ARSLWFGELRSIHHFDY

SEQ ID NO: 5210 - protein, 15 aa, Artificial Sequence
  Synthetic construct
TKCDTALAPYNWFDP

SEQ ID NO: 5211 - protein, 14 aa, Artificial Sequence
  Synthetic construct
ARSHSGWFWSGMDV

SEQ ID NO: 5212 - protein, 15 aa, Artificial Sequence
  Synthetic construct
AREDPVPSSYDAFDI

SEQ ID NO: 5213 - protein, 9 aa, Artificial Sequence
  Synthetic construct
AKGATKVDY

SEQ ID NO: 5214 - protein, 18 aa, Artificial Sequence
  Synthetic construct
ARDGGLTMPMFDYYYMDV

SEQ ID NO: 5215 - protein, 12 aa, Artificial Sequence
  Synthetic construct
AGLPPSSWNFDY

SEQ ID NO: 5216 - protein, 19 aa, Artificial Sequence
  Synthetic construct
ARDFDKIAAAEYYYYYMDV

SEQ ID NO: 5217 - protein, 18 aa, Artificial Sequence
  Synthetic construct
ARASSGTQWELLSRYFYY

SEQ ID NO: 5218 - protein, 21 aa, Artificial Sequence
  Synthetic construct
AREGPYSTGWYTWGDYYYMDV

SEQ ID NO: 5219 - protein, 18 aa, Artificial Sequence
  Synthetic construct
ARAVTTFESYSFFYAMDV

SEQ ID NO: 5220 - protein, 12 aa, Artificial Sequence
  Synthetic construct
ARYASGRGGFDP

SEQ ID NO: 5221 - protein, 12 aa, Artificial Sequence
  Synthetic construct
VREYGPGNYLPY

SEQ ID NO: 5222 - protein, 11 aa, Artificial Sequence
  Synthetic construct
ARHILPPRFDP

SEQ ID NO: 5223 - protein, 23 aa, Artificial Sequence
  Synthetic construct
ARENDPPPRIWFGELLSLDAFDI

SEQ ID NO: 5224 - protein, 15 aa, Artificial Sequence
  Synthetic construct
ARVETYDSSGYHFDY

SEQ ID NO: 5225 - protein, 10 aa, Artificial Sequence
  Synthetic construct
ARDWNFIYDY

SEQ ID NO: 5226 - protein, 16 aa, Artificial Sequence
  Synthetic construct
AKDRLGYDFWSGYFDL

SEQ ID NO: 5227 - protein, 16 aa, Artificial Sequence
  Synthetic construct
ARDLRSSNYLGDTFDL

SEQ ID NO: 5228 - protein, 12 aa, Artificial Sequence
  Synthetic construct
AAVPLMIQVFAD

SEQ ID NO: 5229 - protein, 12 aa, Artificial Sequence
  Synthetic construct
ARGPYCGGNCGA

SEQ ID NO: 5230 - protein, 14 aa, Artificial Sequence
  Synthetic construct
ARETATQAGSAFDI

SEQ ID NO: 5231 - protein, 15 aa, Artificial Sequence
  Synthetic construct
ARDYPRNSGGSCYSY

SEQ ID NO: 5232 - protein, 13 aa, Artificial Sequence
  Synthetic construct
ARKTSDYSYSIDP

SEQ ID NO: 5233 - protein, 20 aa, Artificial Sequence
  Synthetic construct
ARITIVRGADDYYYRYGMDV

SEQ ID NO: 5234 - protein, 17 aa, Artificial Sequence
  Synthetic construct
ARDRYSSSWYVGYGMDV

SEQ ID NO: 5235 - protein, 18 aa, Artificial Sequence
  Synthetic construct
ARVDGPPLGYYHYYYMDV

SEQ ID NO: 5236 - protein, 23 aa, Artificial Sequence
  Synthetic construct
ARDTPYYDSSGHYYEGGNDAFEI

SEQ ID NO: 5237 - protein, 14 aa, Artificial Sequence
  Synthetic construct
ARPREFGSAYSADD

SEQ ID NO: 5238 - protein, 16 aa, Artificial Sequence
  Synthetic construct
ARWGAGSGWDEGEFDY

SEQ ID NO: 5239 - protein, 22 aa, Artificial Sequence
  Synthetic construct
ARAIPPSGSYWHRYYEYYYMDV

SEQ ID NO: 5240 - protein, 18 aa, Artificial Sequence
  Synthetic construct
ASGHYCSGGSCYSGWLDP

SEQ ID NO: 5241 - protein, 15 aa, Artificial Sequence
  Synthetic construct
ARERAGIPTNDAFDI

SEQ ID NO: 5242 - protein, 23 aa, Artificial Sequence
  Synthetic construct
ARFSVASMYTSGWYKYHYYGMDV

SEQ ID NO: 5243 - protein, 20 aa, Artificial Sequence
  Synthetic construct
ARDRQYYDTSGYYFNYGMDV

SEQ ID NO: 5244 - protein, 12 aa, Artificial Sequence
  Synthetic construct
AKVGPSGNAFDI

SEQ ID NO: 5245 - protein, 15 aa, Artificial Sequence
  Synthetic construct
ARSEGFDSSGYYRDY

SEQ ID NO: 5246 - protein, 16 aa, Artificial Sequence
  Synthetic construct
ARETHPSPTFDSSSDY

SEQ ID NO: 5247 - protein, 18 aa, Artificial Sequence
  Synthetic construct
ARAGEVDTGDYYGWYFDL

SEQ ID NO: 5248 - protein, 17 aa, Artificial Sequence
  Synthetic construct
ARRERVPTGGFGYGMDV

SEQ ID NO: 5249 - protein, 11 aa, Artificial Sequence
  Synthetic construct
ARDYGDLYFDY

SEQ ID NO: 5250 - protein, 14 aa, Artificial Sequence
  Synthetic construct
AKELTIQLWFQFDY

SEQ ID NO: 5251 - protein, 12 aa, Artificial Sequence
  Synthetic construct
ARVIQGGGGMDV

SEQ ID NO: 5252 - protein, 16 aa, Artificial Sequence
  Synthetic construct
ATISVRDSSGPTAFDI

SEQ ID NO: 5253 - protein, 24 aa, Artificial Sequence
  Synthetic construct
TKDIKRGSGSYFSRYPYYYYGLDV

SEQ ID NO: 5254 - protein, 19 aa, Artificial Sequence
  Synthetic construct
ARAAPQNILWFRELSWFDP

SEQ ID NO: 5255 - protein, 10 aa, Artificial Sequence
  Synthetic construct
ARDRGGPHDC

SEQ ID NO: 5256 - protein, 19 aa, Artificial Sequence
  Synthetic construct
ARESVVVVGTTQYLRAFDI

SEQ ID NO: 5257 - protein, 19 aa, Artificial Sequence
  Synthetic construct
ARIRFSLWFERLFPSFMDV

SEQ ID NO: 5258 - protein, 17 aa, Artificial Sequence
  Synthetic construct
ALWIAARENYYYYGMDV

SEQ ID NO: 5259 - protein, 21 aa, Artificial Sequence
  Synthetic construct
ASTGFYSFWTGFQGETNWFDP

SEQ ID NO: 5260 - protein, 14 aa, Artificial Sequence
  Synthetic construct
ARLGYNWNYGGFDP

SEQ ID NO: 5261 - protein, 14 aa, Artificial Sequence
  Synthetic construct
AREQQVSKWDGLDV

SEQ ID NO: 5262 - protein, 5 aa, Artificial Sequence
  Synthetic construct
TTWWF

SEQ ID NO: 5263 - protein, 12 aa, Artificial Sequence
  Synthetic construct
ARLRGWPNYFDP

SEQ ID NO: 5264 - protein, 25 aa, Artificial Sequence
  Synthetic construct
ARDQENYRSAWYLGDDYYYYYGMDV

SEQ ID NO: 5265 - protein, 15 aa, Artificial Sequence
  Synthetic construct
ARRDSHGYKSDAFDN

SEQ ID NO: 5266 - protein, 19 aa, Artificial Sequence
  Synthetic construct
GRLSLLLSFGELLPDAFDI

SEQ ID NO: 5267 - protein, 15 aa, Artificial Sequence
  Synthetic construct
ARGLPIVGPTGGFDP

SEQ ID NO: 5268 - protein, 20 aa, Artificial Sequence
  Synthetic construct
ARGQGQGLEWLTTFAWYFDL

SEQ ID NO: 5269 - protein, 16 aa, Artificial Sequence
  Synthetic construct
VRDQHMTIIRGYYMDV

SEQ ID NO: 5270 - protein, 20 aa, Artificial Sequence
  Synthetic construct
VRSIMYRGLFRAPTRPVFDH

SEQ ID NO: 5271 - protein, 11 aa, Artificial Sequence
  Synthetic construct
AGVGLLGWLDP

SEQ ID NO: 5272 - protein, 18 aa, Artificial Sequence
  Synthetic construct
ARDGDPHCSGGGCSFFDS

SEQ ID NO: 5273 - protein, 14 aa, Artificial Sequence
  Synthetic construct
AKDNFAAGYNWFDH

SEQ ID NO: 5274 - protein, 13 aa, Artificial Sequence
  Synthetic construct
ARSGGYRLWFGEL

SEQ ID NO: 5275 - protein, 15 aa, Artificial Sequence
  Synthetic construct
ARPLYSGSYSFYFDY

SEQ ID NO: 5276 - protein, 12 aa, Artificial Sequence
  Synthetic construct
ARLLIEHDAFDV

SEQ ID NO: 5277 - protein, 13 aa, Artificial Sequence
  Synthetic construct
ARVGVVGSRAFDI

SEQ ID NO: 5278 - protein, 20 aa, Artificial Sequence
  Synthetic construct
AHFQRAHDYVWGTFPGDFDH

SEQ ID NO: 5279 - protein, 14 aa, Artificial Sequence
  Synthetic construct
ARARGGNYFDAFDI

SEQ ID NO: 5280 - protein, 10 aa, Artificial Sequence
  Synthetic construct
ARDSGWLVGD

SEQ ID NO: 5281 - protein, 23 aa, Artificial Sequence
  Synthetic construct
ARDRDEVGFGDLLMGSYYYYMDV

SEQ ID NO: 5282 - protein, 16 aa, Artificial Sequence
  Synthetic construct
ASPREYYYDSSGAFDY

SEQ ID NO: 5283 - protein, 16 aa, Artificial Sequence
  Synthetic construct
ARKVGPSGPATNAMDV

SEQ ID NO: 5284 - protein, 16 aa, Artificial Sequence
  Synthetic construct
ARGVGPTSYYYYGMDV

SEQ ID NO: 5285 - protein, 22 aa, Artificial Sequence
  Synthetic construct
ARDIADSKYSSGWYKYYYYMDV

SEQ ID NO: 5286 - protein, 11 aa, Artificial Sequence
  Synthetic construct
ASRNREPRFDS

SEQ ID NO: 5287 - protein, 14 aa, Artificial Sequence
  Synthetic construct
AQAPTMVRGVYFDY

SEQ ID NO: 5288 - protein, 15 aa, Artificial Sequence
  Synthetic construct
ARVHPYTSGWYMFDY

SEQ ID NO: 5289 - protein, 18 aa, Artificial Sequence
  Synthetic construct
AREKGYSSSSSATYYFDY

SEQ ID NO: 5290 - protein, 16 aa, Artificial Sequence
  Synthetic construct
ARDSGHGSNWYRGFDY

SEQ ID NO: 5291 - protein, 21 aa, Artificial Sequence
  Synthetic construct
ARDQVVAGAMLGSFYFYGMDV

SEQ ID NO: 5292 - protein, 14 aa, Artificial Sequence
  Synthetic construct
AHRSPRWFGESFDS

SEQ ID NO: 5293 - protein, 19 aa, Artificial Sequence
  Synthetic construct
ARVPPYYDSGDSDYYAMDV

SEQ ID NO: 5294 - protein, 11 aa, Artificial Sequence
  Synthetic construct
ARETVVGGTDS

SEQ ID NO: 5295 - protein, 16 aa, Artificial Sequence
  Synthetic construct
ARDVYSNYEFRYGMDV

SEQ ID NO: 5296 - protein, 13 aa, Artificial Sequence
  Synthetic construct
ARSGGYRLWFGEL

SEQ ID NO: 5297 - protein, 12 aa, Artificial Sequence
  Synthetic construct
ARAQNYLAPFDY

SEQ ID NO: 5298 - protein, 18 aa, Artificial Sequence
  Synthetic construct
ARHGGYYYGSGSPHYFDY

SEQ ID NO: 5299 - protein, 14 aa, Artificial Sequence
  Synthetic construct
ARDESLFGEYTFDY

SEQ ID NO: 5300 - protein, 22 aa, Artificial Sequence
  Synthetic construct
ARAPPVETAMIEGYYYNYYMDV

SEQ ID NO: 5301 - protein, 12 aa, Artificial Sequence
  Synthetic construct
AKCVGGYNSFDY

SEQ ID NO: 5302 - protein, 17 aa, Artificial Sequence
  Synthetic construct
ARGHDFWSGYYSYGMDV

SEQ ID NO: 5303 - protein, 12 aa, Artificial Sequence
  Synthetic construct
ARLDSVMGFLRH

SEQ ID NO: 5304 - protein, 14 aa, Artificial Sequence
  Synthetic construct
ARHGAAAYYNAMDV

SEQ ID NO: 5305 - protein, 20 aa, Artificial Sequence
  Synthetic construct
ATVGFPNYYDSSDYYTSLDY

SEQ ID NO: 5306 - protein, 17 aa, Artificial Sequence
  Synthetic construct
ARGEVLIAVAYWGWFDL

SEQ ID NO: 5307 - protein, 21 aa, Artificial Sequence
  Synthetic construct
ARGYYYGSGSYYNPDPNWFDP

SEQ ID NO: 5308 - protein, 11 aa, Artificial Sequence
  Synthetic construct
ARGAPGPPPGD

SEQ ID NO: 5309 - protein, 14 aa, Artificial Sequence
  Synthetic construct
AREMGIAASHPVDL

SEQ ID NO: 5310 - protein, 13 aa, Artificial Sequence
  Synthetic construct
AREVGTTNYGMDV

SEQ ID NO: 5311 - protein, 13 aa, Artificial Sequence
  Synthetic construct
ARTRVGSTSAFEI

SEQ ID NO: 5312 - protein, 25 aa, Artificial Sequence
  Synthetic construct
ARDEGPFYYDTRGYYPYYYYFGMDV

SEQ ID NO: 5313 - protein, 11 aa, Artificial Sequence
  Synthetic construct
ASDSGDYKIDY

SEQ ID NO: 5314 - protein, 14 aa, Artificial Sequence
  Synthetic construct
ARDYEVVGEGGFDI

SEQ ID NO: 5315 - protein, 17 aa, Artificial Sequence
  Synthetic construct
ARELPSDNWNDVGAFDI

SEQ ID NO: 5316 - protein, 7 aa, Artificial Sequence
  Synthetic construct
ARGMGDV

SEQ ID NO: 5317 - protein, 18 aa, Artificial Sequence
  Synthetic construct
AREKGYSSLSSATYYFDN

SEQ ID NO: 5318 - protein, 25 aa, Artificial Sequence
  Synthetic construct
AGALGYCIDGACFGYGQYFYYAMDV

SEQ ID NO: 5319 - protein, 18 aa, Artificial Sequence
  Synthetic construct
ARTDVGAISVSDQDAFDI

SEQ ID NO: 5320 - protein, 13 aa, Artificial Sequence
  Synthetic construct
ARSGGYRLWFGEL

SEQ ID NO: 5321 - protein, 13 aa, Artificial Sequence
  Synthetic construct
ARAHSRGYWYFDL

SEQ ID NO: 5322 - protein, 18 aa, Artificial Sequence
  Synthetic construct
AREKGYSSSASATYYFDY

SEQ ID NO: 5323 - protein, 12 aa, Artificial Sequence
  Synthetic construct
ARVNRVGDGPDF

SEQ ID NO: 5324 - protein, 15 aa, Artificial Sequence
  Synthetic construct
ARFVSGYSFDDGFDI

SEQ ID NO: 5325 - protein, 13 aa, Artificial Sequence
  Synthetic construct
ATTIGNPQDYFDY

SEQ ID NO: 5326 - protein, 17 aa, Artificial Sequence
  Synthetic construct
AREGGLRQIPKNDAFDI

SEQ ID NO: 5327 - protein, 15 aa, Artificial Sequence
  Synthetic construct
ARDRRIVGYYFAMDV

SEQ ID NO: 5328 - protein, 17 aa, Artificial Sequence
  Synthetic construct
ARGGYYDFLTGPGYFDY

SEQ ID NO: 5329 - protein, 16 aa, Artificial Sequence
  Synthetic construct
VRDLPWGEEVTRDMDV

SEQ ID NO: 5330 - protein, 13 aa, Artificial Sequence
  Synthetic construct
ATYYRGYGSGSHH

SEQ ID NO: 5331 - protein, 16 aa, Artificial Sequence
  Synthetic construct
ARARFTVTNVYWYFDL

SEQ ID NO: 5332 - protein, 14 aa, Artificial Sequence
  Synthetic construct
AREDYYDGGGYADY

SEQ ID NO: 5333 - protein, 14 aa, Artificial Sequence
  Synthetic construct
ARASSGTYYNAFDS

SEQ ID NO: 5334 - protein, 24 aa, Artificial Sequence
  Synthetic construct
ARVFGNSDYDSSGYRFHYYYGMDV

SEQ ID NO: 5335 - protein, 13 aa, Artificial Sequence
  Synthetic construct
AYRSPLRPNAFDI

SEQ ID NO: 5336 - protein, 17 aa, Artificial Sequence
  Synthetic construct
ARKPLLHSSVNPGAFDI

SEQ ID NO: 5337 - protein, 14 aa, Artificial Sequence
  Synthetic construct
ATALAHLPYYGMDV

SEQ ID NO: 5338 - protein, 14 aa, Artificial Sequence
  Synthetic construct
ARPRGGNYYGAFDI

SEQ ID NO: 5339 - protein, 17 aa, Artificial Sequence
  Synthetic construct
ARVQIQLPLYSYYGMDV

SEQ ID NO: 5340 - protein, 13 aa, Artificial Sequence
  Synthetic construct
ARVILWFGGALDV

SEQ ID NO: 5341 - protein, 13 aa, Artificial Sequence
  Synthetic construct
ARQTTLFIGEFDP

SEQ ID NO: 5342 - protein, 19 aa, Artificial Sequence
  Synthetic construct
ARDFDGMFRGGYYYYYMDV

SEQ ID NO: 5343 - protein, 10 aa, Artificial Sequence
  Synthetic construct
ASHSLSGSFF

SEQ ID NO: 5344 - protein, 15 aa, Artificial Sequence
  Synthetic construct
ARASYYDPSPNWIDP

SEQ ID NO: 5345 - protein, 21 aa, Artificial Sequence
  Synthetic construct
ARGYLVTTVAVGVGPRHWFDP

SEQ ID NO: 5346 - protein, 18 aa, Artificial Sequence
  Synthetic construct
ARVGYRLLLGSYYYYLDV

SEQ ID NO: 5347 - protein, 6 aa, Artificial Sequence
  Synthetic construct
ARGFDL

SEQ ID NO: 5348 - protein, 9 aa, Artificial Sequence
  Synthetic construct
ASEPRSLFH

SEQ ID NO: 5349 - protein, 14 aa, Artificial Sequence
  Synthetic construct
ARDGAVGTTTGLDY

SEQ ID NO: 5350 - protein, 15 aa, Artificial Sequence
  Synthetic construct
AKVPAPGPPTYGMDV

SEQ ID NO: 5351 - protein, 19 aa, Artificial Sequence
  Synthetic construct
ARDFTPLLWFGVGQGYFDF

SEQ ID NO: 5352 - protein, 17 aa, Artificial Sequence
  Synthetic construct
ARDPTRPSNGDPDGFDI

SEQ ID NO: 5353 - protein, 11 aa, Artificial Sequence
  Synthetic construct
ARGGLWGTFDY

SEQ ID NO: 5354 - protein, 15 aa, Artificial Sequence
  Synthetic construct
ARSYGDYNYYYGMDV

SEQ ID NO: 5355 - protein, 12 aa, Artificial Sequence
  Synthetic construct
AKGFDAFWSGPT

SEQ ID NO: 5356 - protein, 11 aa, Artificial Sequence
  Synthetic construct
ASSSWHLDFDY

SEQ ID NO: 5357 - protein, 17 aa, Artificial Sequence
  Synthetic construct
ARVFYSSSSHYYYGMDV

SEQ ID NO: 5358 - protein, 12 aa, Artificial Sequence
  Synthetic construct
VRDYGHPYFIDV

SEQ ID NO: 5359 - protein, 17 aa, Artificial Sequence
  Synthetic construct
ASQTVLTGSAFGDAFDI

SEQ ID NO: 5360 - protein, 14 aa, Artificial Sequence
  Synthetic construct
ASHANWNYGLGFDY

SEQ ID NO: 5361 - protein, 14 aa, Artificial Sequence
  Synthetic construct
AREGTVGATTGFDY

SEQ ID NO: 5362 - protein, 27 aa, Artificial Sequence
  Synthetic construct
ARGDCSSTSCYPFWRRPLDYYYYGMDV

SEQ ID NO: 5363 - protein, 20 aa, Artificial Sequence
  Synthetic construct
ARGGLHYYDSSAYYISAFDI

SEQ ID NO: 5364 - protein, 11 aa, Artificial Sequence
  Synthetic construct
ARGDGYNYFDY

SEQ ID NO: 5365 - protein, 18 aa, Artificial Sequence
  Synthetic construct
ARSPQFTAMVNFSYYFDY

SEQ ID NO: 5366 - protein, 15 aa, Artificial Sequence
  Synthetic construct
ARDDGSGVHNYYMDV

SEQ ID NO: 5367 - protein, 11 aa, Artificial Sequence
  Synthetic construct
ARVDHGYYFEY

SEQ ID NO: 5368 - protein, 19 aa, Artificial Sequence
  Synthetic construct
ARDFDSMVRGGYYYYYMDV

SEQ ID NO: 5369 - protein, 6 aa, Artificial Sequence
  Synthetic construct
ARGFDP

SEQ ID NO: 5370 - protein, 14 aa, Artificial Sequence
  Synthetic construct
AKGGLYGDRDGFDI

SEQ ID NO: 5371 - protein, 6 aa, Artificial Sequence
  Synthetic construct
ARGFDL

SEQ ID NO: 5372 - protein, 23 aa, Artificial Sequence
  Synthetic construct
AKDGAPQGGYYDLWSGYLSWFDP

SEQ ID NO: 5373 - protein, 19 aa, Artificial Sequence
  Synthetic construct
ARESVVVVGTTQYLRAFDI

SEQ ID NO: 5374 - protein, 16 aa, Artificial Sequence
  Synthetic construct
ATEDYYDKAYHHAMDV

SEQ ID NO: 5375 - protein, 12 aa, Artificial Sequence
  Synthetic construct
ASPDYESSGYYY

SEQ ID NO: 5376 - protein, 16 aa, Artificial Sequence
  Synthetic construct
ARRMGQWLAPTSGMDV

SEQ ID NO: 5377 - protein, 13 aa, Artificial Sequence
  Synthetic construct
AREAQGATYYMDV

SEQ ID NO: 5378 - protein, 13 aa, Artificial Sequence
  Synthetic construct
AREGQVGATGLDY

SEQ ID NO: 5379 - protein, 13 aa, Artificial Sequence
  Synthetic construct
ARKTSDYSYSIDP

SEQ ID NO: 5380 - protein, 23 aa, Artificial Sequence
  Synthetic construct
ARVPLLLRQFDWLSPNGFYYMDV

SEQ ID NO: 5381 - protein, 18 aa, Artificial Sequence
  Synthetic construct
ARLEVEMPTPDYYYGLDV

SEQ ID NO: 5382 - protein, 18 aa, Artificial Sequence
  Synthetic construct
ARAPPLYDISDYYVSPYY

SEQ ID NO: 5383 - protein, 17 aa, Artificial Sequence
  Synthetic construct
SHISYDILSATILPFDY

SEQ ID NO: 5384 - protein, 15 aa, Artificial Sequence
  Synthetic construct
ARYSSSVQGIGWFGP

SEQ ID NO: 5385 - protein, 13 aa, Artificial Sequence
  Synthetic construct
ARGYYEAPGYFDL

SEQ ID NO: 5386 - protein, 19 aa, Artificial Sequence
  Synthetic construct
ARLHSYSFRFYSYYYGMDV

SEQ ID NO: 5387 - protein, 14 aa, Artificial Sequence
  Synthetic construct
ARARSGTYRASFDY

SEQ ID NO: 5388 - protein, 12 aa, Artificial Sequence
  Synthetic construct
ARRRGASSLRDF

SEQ ID NO: 5389 - protein, 23 aa, Artificial Sequence
  Synthetic construct
ARDLYYDYVWGSYRYSSEGANDY

SEQ ID NO: 5390 - protein, 14 aa, Artificial Sequence
  Synthetic construct
AEGSTIALMVYATR

SEQ ID NO: 5391 - protein, 14 aa, Artificial Sequence
  Synthetic construct
AKMFGGYFDYYMDV

SEQ ID NO: 5392 - protein, 17 aa, Artificial Sequence
  Synthetic construct
ARDLPSDNWSDVGAFDI

SEQ ID NO: 5393 - protein, 16 aa, Artificial Sequence
  Synthetic construct
ARRSNYDTSGFYYVDY

SEQ ID NO: 5394 - protein, 11 aa, Artificial Sequence
  Synthetic construct
KFYDPSQRVDY

SEQ ID NO: 5395 - protein, 23 aa, Artificial Sequence
  Synthetic construct
ARVLSYYDSSGYLGYYYYYGMDV

SEQ ID NO: 5396 - protein, 13 aa, Artificial Sequence
  Synthetic construct
ARGGWPSGDTFDI

SEQ ID NO: 5397 - protein, 18 aa, Artificial Sequence
  Synthetic construct
ASLQLPYYCSGGRCYPIP

SEQ ID NO: 5398 - protein, 24 aa, Artificial Sequence
  Synthetic construct
GQLKRHCTGDNCYSGGDWGYYFDS

SEQ ID NO: 5399 - protein, 19 aa, Artificial Sequence
  Synthetic construct
ANQDYDTLTGPTYYYYMDV

SEQ ID NO: 5400 - protein, 10 aa, Artificial Sequence
  Synthetic construct
AKYHLYHFDY

SEQ ID NO: 5401 - protein, 18 aa, Artificial Sequence
  Synthetic construct
ARNADNSAFHGGVYYFAS

SEQ ID NO: 5402 - protein, 16 aa, Artificial Sequence
  Synthetic construct
ARGSGPIPSKWYFFDY

SEQ ID NO: 5403 - protein, 18 aa, Artificial Sequence
  Synthetic construct
ARAPPLYNISDYYISPYF

SEQ ID NO: 5404 - protein, 20 aa, Artificial Sequence
  Synthetic construct
TTDLYYDYFWGSPMNSWFDP

SEQ ID NO: 5405 - protein, 16 aa, Artificial Sequence
  Synthetic construct
AHTGSVPAAMVGAFDV

SEQ ID NO: 5406 - protein, 14 aa, Artificial Sequence
  Synthetic construct
ARARGGSYYYGMDV

SEQ ID NO: 5407 - protein, 18 aa, Artificial Sequence
  Synthetic construct
ARGRDSSGLDLYYYGLDV

SEQ ID NO: 5408 - protein, 19 aa, Artificial Sequence
  Synthetic construct
ARGIQYSSRWPKYYYAMDV

SEQ ID NO: 5409 - protein, 16 aa, Artificial Sequence
  Synthetic construct
ARGGGWLAPTLHAMDV

SEQ ID NO: 5410 - protein, 13 aa, Artificial Sequence
  Synthetic construct
AREGQFPNNGLDV

SEQ ID NO: 5411 - protein, 21 aa, Artificial Sequence
  Synthetic construct
ARRATSYNDSSGYYSIPIFDH

SEQ ID NO: 5412 - protein, 14 aa, Artificial Sequence
  Synthetic construct
ARLHCYGSVSGVDY

SEQ ID NO: 5413 - protein, 21 aa, Artificial Sequence
  Synthetic construct
ARGWAWGAIKDSSWYSDTFDM

SEQ ID NO: 5414 - protein, 12 aa, Artificial Sequence
  Synthetic construct
AREATANIVFDI

SEQ ID NO: 5415 - protein, 11 aa, Artificial Sequence
  Synthetic construct
TRAPNYYYMDV

SEQ ID NO: 5416 - protein, 16 aa, Artificial Sequence
  Synthetic construct
AITTPLLGVVANWLDP

SEQ ID NO: 5417 - protein, 12 aa, Artificial Sequence
  Synthetic construct
ASLLRYQYYFDN

SEQ ID NO: 5418 - protein, 19 aa, Artificial Sequence
  Synthetic construct
ARVPRYFDWLGAPVSYMDV

SEQ ID NO: 5419 - protein, 14 aa, Artificial Sequence
  Synthetic construct
ARPNSGSYYSWFDY

SEQ ID NO: 5420 - protein, 13 aa, Artificial Sequence
  Synthetic construct
ARDDKNWYAAFDI

SEQ ID NO: 5421 - protein, 20 aa, Artificial Sequence
  Synthetic construct
GRGRHYGSGTNSIIAHSVDV

SEQ ID NO: 5422 - protein, 11 aa, Artificial Sequence
  Synthetic construct
AREYSSGWPDY

SEQ ID NO: 5423 - protein, 12 aa, Artificial Sequence
  Synthetic construct
VSVGASSWYFQY

SEQ ID NO: 5424 - protein, 22 aa, Artificial Sequence
  Synthetic construct
ARVRGGEWFGELGWYYYYGMDV

SEQ ID NO: 5425 - protein, 14 aa, Artificial Sequence
  Synthetic construct
ARSRGGNYFDSFNI

SEQ ID NO: 5426 - protein, 15 aa, Artificial Sequence
  Synthetic construct
ARARGDGFGVYYMDV

SEQ ID NO: 5427 - protein, 21 aa, Artificial Sequence
  Synthetic construct
ASLGGDYYGSGIYYNSSEFDP

SEQ ID NO: 5428 - protein, 13 aa, Artificial Sequence
  Synthetic construct
ARVFTTLDWYFDL

SEQ ID NO: 5429 - protein, 16 aa, Artificial Sequence
  Synthetic construct
ARQTEYSSGWPAEFDY

SEQ ID NO: 5430 - protein, 17 aa, Artificial Sequence
  Synthetic construct
AREYYGSGSYYLQPLGY

SEQ ID NO: 5431 - protein, 19 aa, Artificial Sequence
  Synthetic construct
AKDVVATIFSSYYYYGMDV

SEQ ID NO: 5432 - protein, 13 aa, Artificial Sequence
  Synthetic construct
AKDGGGYNSEFDY

SEQ ID NO: 5433 - protein, 17 aa, Artificial Sequence
  Synthetic construct
ARRYCTSTSCFQGWFDP

SEQ ID NO: 5434 - protein, 13 aa, Artificial Sequence
  Synthetic construct
ARGGGHSYGAIDY

SEQ ID NO: 5435 - protein, 16 aa, Artificial Sequence
  Synthetic construct
AHTGSVPPAMVGAFDI

SEQ ID NO: 5436 - protein, 18 aa, Artificial Sequence
  Synthetic construct
ASGHYCSGGSCYSGWLDP

SEQ ID NO: 5437 - protein, 20 aa, Artificial Sequence
  Synthetic construct
VRGGALFSVSTDMSYDAFDI

SEQ ID NO: 5438 - protein, 12 aa, Artificial Sequence
  Synthetic construct
ARVGTGGRAFDI

SEQ ID NO: 5439 - protein, 13 aa, Artificial Sequence
  Synthetic construct
ARRYASNYYGFDY

SEQ ID NO: 5440 - protein, 12 aa, Artificial Sequence
  Synthetic construct
ARRPSTSWGLDY

SEQ ID NO: 5441 - protein, 17 aa, Artificial Sequence
  Synthetic construct
ARGVGTVVTRHNYTMDV

SEQ ID NO: 5442 - protein, 23 aa, Artificial Sequence
  Synthetic construct
ARLLITSEYSSGWYKYQYYGMDV

SEQ ID NO: 5443 - protein, 18 aa, Artificial Sequence
  Synthetic construct
ARGYYYDRSGYYPGGSDI

SEQ ID NO: 5444 - protein, 17 aa, Artificial Sequence
  Synthetic construct
ATAFAYCGGDCYGRFDY

SEQ ID NO: 5445 - protein, 18 aa, Artificial Sequence
  Synthetic construct
AKAPADSSGWYTPGTFEI

SEQ ID NO: 5446 - protein, 19 aa, Artificial Sequence
  Synthetic construct
ARIAWAAAAGSGYYYYMDV

SEQ ID NO: 5447 - protein, 16 aa, Artificial Sequence
  Synthetic construct
ARGLWFGDSETVWFDP

SEQ ID NO: 5448 - protein, 12 aa, Artificial Sequence
  Synthetic construct
AHYSSSWYLFDY

SEQ ID NO: 5449 - protein, 18 aa, Artificial Sequence
  Synthetic construct
ARDKPLDPITGIAYGMDV

SEQ ID NO: 5450 - protein, 21 aa, Artificial Sequence
  Synthetic construct
ARMWFGDLSSLTNYNYYGMDV

SEQ ID NO: 5451 - protein, 11 aa, Artificial Sequence
  Synthetic construct
ARGPNYYYMDV

SEQ ID NO: 5452 - protein, 17 aa, Artificial Sequence
  Synthetic construct
AREGGLRQIPKNDAFDV

SEQ ID NO: 5453 - protein, 9 aa, Artificial Sequence
  Synthetic construct
ATGLDRFDY

SEQ ID NO: 5454 - protein, 7 aa, Artificial Sequence
  Synthetic construct
AREPWLN

SEQ ID NO: 5455 - protein, 12 aa, Artificial Sequence
  Synthetic construct
ARESLGDRDFDY

SEQ ID NO: 5456 - protein, 14 aa, Artificial Sequence
  Synthetic construct
ARSRGGNYLDAFDV

SEQ ID NO: 5457 - protein, 19 aa, Artificial Sequence
  Synthetic construct
ARHSTYYDISAYVNTSPDH

SEQ ID NO: 5458 - protein, 15 aa, Artificial Sequence
  Synthetic construct
AQRTPSNWFGDWFDP

SEQ ID NO: 5459 - protein, 9 aa, Artificial Sequence
  Synthetic construct
AKGATKVDY

SEQ ID NO: 5460 - protein, 11 aa, Artificial Sequence
  Synthetic construct
AREGTDEAFDI

SEQ ID NO: 5461 - protein, 16 aa, Artificial Sequence
  Synthetic construct
ARVNPSSGSYYDALDI

SEQ ID NO: 5462 - protein, 12 aa, Artificial Sequence
  Synthetic construct
ATVTLRIQVFAD

SEQ ID NO: 5463 - protein, 13 aa, Artificial Sequence
  Synthetic construct
ARHGTGTVGAPDY

SEQ ID NO: 5464 - protein, 11 aa, Artificial Sequence
  Synthetic construct
ARWFGESGDDY

SEQ ID NO: 5465 - protein, 13 aa, Artificial Sequence
  Synthetic construct
AKGSRRGEDAFDI

SEQ ID NO: 5466 - protein, 10 aa, Artificial Sequence
  Synthetic construct
AHISAYDREY

SEQ ID NO: 5467 - protein, 14 aa, Artificial Sequence
  Synthetic construct
AVSPAIVRKNWFDP

SEQ ID NO: 5468 - protein, 18 aa, Artificial Sequence
  Synthetic construct
ARPPTSIYDSNGYDAFEI

SEQ ID NO: 5469 - protein, 19 aa, Artificial Sequence
  Synthetic construct
ARESVVVVGTTQYLRAFDI

SEQ ID NO: 5470 - protein, 10 aa, Artificial Sequence
  Synthetic construct
VRDRLATLDY

SEQ ID NO: 5471 - protein, 19 aa, Artificial Sequence
  Synthetic construct
ARRVVSSSPLVEGRNAFDI

SEQ ID NO: 5472 - protein, 16 aa, Artificial Sequence
  Synthetic construct
ARGPSGQNFWSGYLDY

SEQ ID NO: 5473 - protein, 13 aa, Artificial Sequence
  Synthetic construct
ARAVWIWGSQIDY

SEQ ID NO: 5474 - protein, 14 aa, Artificial Sequence
  Synthetic construct
ARARGGSYRAPHDY

SEQ ID NO: 5475 - protein, 17 aa, Artificial Sequence
  Synthetic construct
AREAANWSDYYNGPFDY

SEQ ID NO: 5476 - protein, 14 aa, Artificial Sequence
  Synthetic construct
ARAQSGSYYGGFDY

SEQ ID NO: 5477 - protein, 8 aa, Artificial Sequence
  Synthetic construct
VRDHRNDY

SEQ ID NO: 5478 - protein, 16 aa, Artificial Sequence
  Synthetic construct
ARFGDDMDMLNGDFDY

SEQ ID NO: 5479 - protein, 20 aa, Artificial Sequence
  Synthetic construct
ARDRGFCTASHCPGVDAFDV

SEQ ID NO: 5480 - protein, 22 aa, Artificial Sequence
  Synthetic construct
ARHLPTYSNYFRRNYYYYGVDV

SEQ ID NO: 5481 - protein, 12 aa, Artificial Sequence
  Synthetic construct
ASSPCTSCPLDY

SEQ ID NO: 5482 - protein, 13 aa, Artificial Sequence
  Synthetic construct
ARTREYTNYYMDV

SEQ ID NO: 5483 - protein, 20 aa, Artificial Sequence
  Synthetic construct
ARDFSSADSSDYGGLGPPDS

SEQ ID NO: 5484 - protein, 19 aa, Artificial Sequence
  Synthetic construct
ARDFDSWVRGGYYYYYMDV

SEQ ID NO: 5485 - protein, 18 aa, Artificial Sequence
  Synthetic construct
ARGGPYCNGYSCYSVVSY

SEQ ID NO: 5486 - protein, 21 aa, Artificial Sequence
  Synthetic construct
ARGYLVATVAVGVGPRHWFDP

SEQ ID NO: 5487 - protein, 23 aa, Artificial Sequence
  Synthetic construct
AKTDITHYDSSGYYYLPSAYFDH

SEQ ID NO: 5488 - protein, 15 aa, Artificial Sequence
  Synthetic construct
ARERSFWSGYYGMDV

SEQ ID NO: 5489 - protein, 19 aa, Artificial Sequence
  Synthetic construct
AKDRPYHSGSYYRPRYLDY

SEQ ID NO: 5490 - protein, 16 aa, Artificial Sequence
  Synthetic construct
ARAGADNSGYYYDFDY

SEQ ID NO: 5491 - protein, 14 aa, Artificial Sequence
  Synthetic construct
ARGVAVTAANWFDP

SEQ ID NO: 5492 - protein, 13 aa, Artificial Sequence
  Synthetic construct
ARDYGFTFGGEDY

SEQ ID NO: 5493 - protein, 12 aa, Artificial Sequence
  Synthetic construct
ARGFLPARALDY

SEQ ID NO: 5494 - protein, 18 aa, Artificial Sequence
  Synthetic construct
ARISAGGLGSSGSYGFDY

SEQ ID NO: 5495 - protein, 6 aa, Artificial Sequence
  Synthetic construct
ARGFDY

SEQ ID NO: 5496 - protein, 11 aa, Artificial Sequence
  Synthetic construct
ARWFGEDNFDY

SEQ ID NO: 5497 - protein, 18 aa, Artificial Sequence
  Synthetic construct
AREATPFCNYGSCWTFDS

SEQ ID NO: 5498 - protein, 16 aa, Artificial Sequence
  Synthetic construct
ARWLNSSGWGYNWFDP

SEQ ID NO: 5499 - protein, 16 aa, Artificial Sequence
  Synthetic construct
ALLLYDTTSRLVLDDS

SEQ ID NO: 5500 - protein, 6 aa, Artificial Sequence
  Synthetic construct
ARGFDC

SEQ ID NO: 5501 - protein, 17 aa, Artificial Sequence
  Synthetic construct
SRVFIRYDTVTTYSFDY

SEQ ID NO: 5502 - protein, 22 aa, Artificial Sequence
  Synthetic construct
ARDIADSKYSSGWYHYYYYMDV

SEQ ID NO: 5503 - protein, 15 aa, Artificial Sequence
  Synthetic construct
AKEALNIVMVTAPRY

SEQ ID NO: 5504 - protein, 13 aa, Artificial Sequence
  Synthetic construct
AREGVLGETGLDY

SEQ ID NO: 5505 - protein, 15 aa, Artificial Sequence
  Synthetic construct
ARVNQYEGSGSYGDY

SEQ ID NO: 5506 - protein, 17 aa, Artificial Sequence
  Synthetic construct
AKVDNSGWYHGVYDMDV

SEQ ID NO: 5507 - protein, 14 aa, Artificial Sequence
  Synthetic construct
ARAHSGSYFGPFDY

SEQ ID NO: 5508 - protein, 12 aa, Artificial Sequence
  Synthetic construct
ARVNLVGGGPEY

SEQ ID NO: 5509 - protein, 18 aa, Artificial Sequence
  Synthetic construct
AKVAFDYVSGSPENWFDP

SEQ ID NO: 5510 - protein, 23 aa, Artificial Sequence
  Synthetic construct
AKSIRGYYDRSGNYYGSDWYFDL

SEQ ID NO: 5511 - protein, 16 aa, Artificial Sequence
  Synthetic construct
TRVAESEIGGGDWFDP

SEQ ID NO: 5512 - protein, 18 aa, Artificial Sequence
  Synthetic construct
AREKGYSSSSSATYYLDF

SEQ ID NO: 5513 - protein, 15 aa, Artificial Sequence
  Synthetic construct
ARHVNSGLPNWYFDL

SEQ ID NO: 5514 - protein, 13 aa, Artificial Sequence
  Synthetic construct
VKGKIQLWLGADY

SEQ ID NO: 5515 - protein, 11 aa, Artificial Sequence
  Synthetic construct
ARHPRWWGFDP

SEQ ID NO: 5516 - protein, 12 aa, Artificial Sequence
  Synthetic construct
ARLLIEHDAFDV

SEQ ID NO: 5517 - protein, 22 aa, Artificial Sequence
  Synthetic construct
ATATAVVLVATGGYGYHYGMDV

SEQ ID NO: 5518 - protein, 17 aa, Artificial Sequence
  Synthetic construct
ARMYYSESSGHYSLFDY

SEQ ID NO: 5519 - protein, 7 aa, Artificial Sequence
  Synthetic construct
ARGGGDS

SEQ ID NO: 5520 - protein, 19 aa, Artificial Sequence
  Synthetic construct
ARDGEQQFSTISYYYYMDV

SEQ ID NO: 5521 - protein, 19 aa, Artificial Sequence
  Synthetic construct
ARESVVEVGSTEFLRAFDV

SEQ ID NO: 5522 - protein, 17 aa, Artificial Sequence
  Synthetic construct
ARDRLIDVIAISGAFDI

SEQ ID NO: 5523 - protein, 13 aa, Artificial Sequence
  Synthetic construct
ARGAIASRHSFDV

SEQ ID NO: 5524 - protein, 18 aa, Artificial Sequence
  Synthetic construct
ARVHCSRTSCYSDRAMDV

SEQ ID NO: 5525 - protein, 12 aa, Artificial Sequence
  Synthetic construct
VLSRAAGGWFEA

SEQ ID NO: 5526 - protein, 25 aa, Artificial Sequence
  Synthetic construct
ATPGGDSGTLQFLERSHYHYYGMDV

SEQ ID NO: 5527 - protein, 14 aa, Artificial Sequence
  Synthetic construct
ARRGYDSGGYALGY

SEQ ID NO: 5528 - protein, 15 aa, Artificial Sequence
  Synthetic construct
ASMGPYDSSGYYSDY

SEQ ID NO: 5529 - protein, 17 aa, Artificial Sequence
  Synthetic construct
ARDKLFYYGSETCYFDY

SEQ ID NO: 5530 - protein, 18 aa, Artificial Sequence
  Synthetic construct
AKRVREDSVWGSYSSMDV

SEQ ID NO: 5531 - protein, 14 aa, Artificial Sequence
  Synthetic construct
ATSPAIVRQNWFDP

SEQ ID NO: 5532 - protein, 15 aa, Artificial Sequence
  Synthetic construct
AKDKGEAGEGEYFHH

SEQ ID NO: 5533 - protein, 11 aa, Artificial Sequence
  Synthetic construct
AGTVFGGGLDY

SEQ ID NO: 5534 - protein, 11 aa, Artificial Sequence
  Synthetic construct
VRLTTVTIFDL

SEQ ID NO: 5535 - protein, 14 aa, Artificial Sequence
  Synthetic construct
ARGLSGGYYYGMDV

SEQ ID NO: 5536 - protein, 6 aa, Artificial Sequence
  Synthetic construct
ARGFDY

SEQ ID NO: 5537 - protein, 13 aa, Artificial Sequence
  Synthetic construct
ATSAPIRRSWFDP

SEQ ID NO: 5538 - protein, 15 aa, Artificial Sequence
  Synthetic construct
ARMPGIASAGGSFDF

SEQ ID NO: 5539 - protein, 18 aa, Artificial Sequence
  Synthetic construct
ATAPAYYDRSAYYRIFDY

SEQ ID NO: 5540 - protein, 14 aa, Artificial Sequence
  Synthetic construct
ARHYDRGLAPRLDY

SEQ ID NO: 5541 - protein, 16 aa, Artificial Sequence
  Synthetic construct
ARHLDWNAPTGGVMDV

SEQ ID NO: 5542 - protein, 11 aa, Artificial Sequence
  Synthetic construct
ARGFGNWHFDL

SEQ ID NO: 5543 - protein, 19 aa, Artificial Sequence
  Synthetic construct
AQASGYSGYFERAFSAFDM

SEQ ID NO: 5544 - protein, 16 aa, Artificial Sequence
  Synthetic construct
AKPRLRSTGTLYFFDY

SEQ ID NO: 5545 - protein, 14 aa, Artificial Sequence
  Synthetic construct
VKGRQWLVREMCES

SEQ ID NO: 5546 - protein, 11 aa, Artificial Sequence
  Synthetic construct
YINFGESGFDI

SEQ ID NO: 5547 - protein, 16 aa, Artificial Sequence
  Synthetic construct
ARGGPIGAYAGRLLDY

SEQ ID NO: 5548 - protein, 17 aa, Artificial Sequence
  Synthetic construct
ARDRGNDYGDEMFYFDY

SEQ ID NO: 5549 - protein, 20 aa, Artificial Sequence
  Synthetic construct
ARQVFDLWSGYSEGEYWFDP

SEQ ID NO: 5550 - protein, 14 aa, Artificial Sequence
  Synthetic construct
ATAPVVVTADWFDP

SEQ ID NO: 5551 - protein, 13 aa, Artificial Sequence
  Synthetic construct
ARGGFGSYFYFDC

SEQ ID NO: 5552 - protein, 21 aa, Artificial Sequence
  Synthetic construct
ASLGGDSYISGTHYDRSGYDP

SEQ ID NO: 5553 - protein, 13 aa, Artificial Sequence
  Synthetic construct
ARGYYGYILPFDL

SEQ ID NO: 5554 - protein, 15 aa, Artificial Sequence
  Synthetic construct
ARMPGIITAGAAFDF

SEQ ID NO: 5555 - protein, 14 aa, Artificial Sequence
  Synthetic construct
AHKSLYDSGSYYDY

SEQ ID NO: 5556 - protein, 10 aa, Artificial Sequence
  Synthetic construct
ARARPSTWLN

SEQ ID NO: 5557 - protein, 15 aa, Artificial Sequence
  Synthetic construct
VRTEGYDSSGYYIDY

SEQ ID NO: 5558 - protein, 18 aa, Artificial Sequence
  Synthetic construct
AKDMSLRDYGSGPGASDI

SEQ ID NO: 5559 - protein, 20 aa, Artificial Sequence
  Synthetic construct
AKMLGLYCSGGNCYSGYFDY

SEQ ID NO: 5560 - protein, 11 aa, Artificial Sequence
  Synthetic construct
ARGSGNWHFDL

SEQ ID NO: 5561 - protein, 11 aa, Artificial Sequence
  Synthetic construct
ARGGRWVESHF

SEQ ID NO: 5562 - protein, 13 aa, Artificial Sequence
  Synthetic construct
ARGLGGNYYYFHH

SEQ ID NO: 5563 - protein, 11 aa, Artificial Sequence
  Synthetic construct
VLFGGGSHYDY

SEQ ID NO: 5564 - protein, 12 aa, Artificial Sequence
  Synthetic construct
ARVAWGSWGMDV

SEQ ID NO: 5565 - protein, 11 aa, Artificial Sequence
  Synthetic construct
ARGQDFGWFDP

SEQ ID NO: 5566 - protein, 26 aa, Artificial Sequence
  Synthetic construct
ARGMGGAARILSGGSGWPFYYHYMDV

SEQ ID NO: 5567 - protein, 22 aa, Artificial Sequence
  Synthetic construct
ARDPRAYYDILTGSKNYYYMDV

SEQ ID NO: 5568 - protein, 10 aa, Artificial Sequence
  Synthetic construct
ARVNNGGPDY

SEQ ID NO: 5569 - protein, 15 aa, Artificial Sequence
  Synthetic construct
AREDYNFSYYYGMDV

SEQ ID NO: 5570 - protein, 13 aa, Artificial Sequence
  Synthetic construct
ARVDSSGYYATDY

SEQ ID NO: 5571 - protein, 23 aa, Artificial Sequence
  Synthetic construct
ARIRGVGDFWSGYFFVSSTYFDS

SEQ ID NO: 5572 - protein, 19 aa, Artificial Sequence
  Synthetic construct
ARLHSNSFRFYSYYYGLDV

SEQ ID NO: 5573 - protein, 13 aa, Artificial Sequence
  Synthetic construct
ARDREAVAGPLDN

SEQ ID NO: 5574 - protein, 16 aa, Artificial Sequence
  Synthetic construct
AHTGAVPPAMVGTFDI

SEQ ID NO: 5575 - protein, 13 aa, Artificial Sequence
  Synthetic construct
ARVGRGDGYRFDF

SEQ ID NO: 5576 - protein, 21 aa, Artificial Sequence
  Synthetic construct
ARDTSVENDTSIYLPTGDFDH

SEQ ID NO: 5577 - protein, 12 aa, Artificial Sequence
  Synthetic construct
AHSLGWNPKFDY

SEQ ID NO: 5578 - protein, 23 aa, Artificial Sequence
  Synthetic construct
ARDQGSSSWYLGGEYYYYYGMDV

SEQ ID NO: 5579 - protein, 13 aa, Artificial Sequence
  Synthetic construct
ARVPDSGDYVFDL

SEQ ID NO: 5580 - protein, 18 aa, Artificial Sequence
  Synthetic construct
ARGRYHSSGYFHSWYFDL

SEQ ID NO: 5581 - protein, 15 aa, Artificial Sequence
  Synthetic construct
ARDRRIVGYYYGMDV

SEQ ID NO: 5582 - protein, 14 aa, Artificial Sequence
  Synthetic construct
ARVANWYGSSWSVN

SEQ ID NO: 5583 - protein, 15 aa, Artificial Sequence
  Synthetic construct
ARDPQVYSGHGSVDY

SEQ ID NO: 5584 - protein, 14 aa, Artificial Sequence
  Synthetic construct
ARAYGGSYRGYFDY

SEQ ID NO: 5585 - protein, 22 aa, Artificial Sequence
  Synthetic construct
ARDWGYYDFWRDGGRYYSGMDV

SEQ ID NO: 5586 - protein, 19 aa, Artificial Sequence
  Synthetic construct
AAGGLFQVLDSGTDDGFDI

SEQ ID NO: 5587 - protein, 17 aa, Artificial Sequence
  Synthetic construct
ARVYSSGWRLYYSGIDV

SEQ ID NO: 5588 - protein, 15 aa, Artificial Sequence
  Synthetic construct
ARVETYDSSGYHFDY

SEQ ID NO: 5589 - protein, 6 aa, Artificial Sequence
  Synthetic construct
ARGFDS

SEQ ID NO: 5590 - protein, 14 aa, Artificial Sequence
  Synthetic construct
ARENIAARPYGMDV

SEQ ID NO: 5591 - protein, 20 aa, Artificial Sequence
  Synthetic construct
AKEMVRGAYGGRTYNYYMDV

SEQ ID NO: 5592 - protein, 15 aa, Artificial Sequence
  Synthetic construct
AREGAGTDFYNGVDV

SEQ ID NO: 5593 - protein, 22 aa, Artificial Sequence
  Synthetic construct
ARDSFRGVGVTAMDYYFYGMDV

SEQ ID NO: 5594 - protein, 19 aa, Artificial Sequence
  Synthetic construct
AREMGIGGGDLYYNYGMDV

SEQ ID NO: 5595 - protein, 20 aa, Artificial Sequence
  Synthetic construct
ARGRISYVLRFLEWLPDFDY

SEQ ID NO: 5596 - protein, 21 aa, Artificial Sequence
  Synthetic construct
AREAGLRYFDRFRYLYNWFDP

SEQ ID NO: 5597 - protein, 15 aa, Artificial Sequence
  Synthetic construct
VRVGFGWSYGSGFDP

SEQ ID NO: 5598 - protein, 14 aa, Artificial Sequence
  Synthetic construct
ARRGYDSGGYALGY

SEQ ID NO: 5599 - protein, 17 aa, Artificial Sequence
  Synthetic construct
ARGGGYHIVGATSSLGY

SEQ ID NO: 5600 - protein, 19 aa, Artificial Sequence
  Synthetic construct
ARVPLITIFGVVFPYGMDV

SEQ ID NO: 5601 - protein, 10 aa, Artificial Sequence
  Synthetic construct
ARDSSGNFDY

SEQ ID NO: 5602 - protein, 15 aa, Artificial Sequence
  Synthetic construct
GRRGNSYYYYYGMDV

SEQ ID NO: 5603 - protein, 21 aa, Artificial Sequence
  Synthetic construct
AHIPPKITFFGVVAVEVFFDQ

SEQ ID NO: 5604 - protein, 14 aa, Artificial Sequence
  Synthetic construct
AREDAYDLLGTLDY

SEQ ID NO: 5605 - protein, 10 aa, Artificial Sequence
  Synthetic construct
ARGVQYASDV

SEQ ID NO: 5606 - protein, 11 aa, Artificial Sequence
  Synthetic construct
ARRGSSWEIDY

SEQ ID NO: 5607 - protein, 21 aa, Artificial Sequence
  Synthetic construct
TRVPWYYDRSGHYQADEYFQH

SEQ ID NO: 5608 - protein, 19 aa, Artificial Sequence
  Synthetic construct
AKDMLSYYDSRGYSYYFDL

SEQ ID NO: 5609 - protein, 15 aa, Artificial Sequence
  Synthetic construct
AREGGCSGADCHCDI

SEQ ID NO: 5610 - protein, 19 aa, Artificial Sequence
  Synthetic construct
AKDFGLLWFGKLFSGVFDI

SEQ ID NO: 5611 - protein, 14 aa, Artificial Sequence
  Synthetic construct
ASATYTPGGDYFDY

SEQ ID NO: 5612 - protein, 15 aa, Artificial Sequence
  Synthetic construct
ARVTGYDSSGYWGDY

SEQ ID NO: 5613 - protein, 17 aa, Artificial Sequence
  Synthetic construct
ASNYIVVVVAAMSMDDY

SEQ ID NO: 5614 - protein, 18 aa, Artificial Sequence
  Synthetic construct
ARAPCGGDCYEDYYYMDV

SEQ ID NO: 5615 - protein, 11 aa, Artificial Sequence
  Synthetic construct
YINFGESGFDI

SEQ ID NO: 5616 - protein, 16 aa, Artificial Sequence
  Synthetic construct
ARPSRQSRFSSGAFQH

SEQ ID NO: 5617 - protein, 14 aa, Artificial Sequence
  Synthetic construct
ATGPPIGVVNWLDP

SEQ ID NO: 5618 - protein, 13 aa, Artificial Sequence
  Synthetic construct
ARVKTTSGGYMDV

SEQ ID NO: 5619 - protein, 14 aa, Artificial Sequence
  Synthetic construct
AREGIVATITGLDV

SEQ ID NO: 5620 - protein, 21 aa, Artificial Sequence
  Synthetic construct
ASLGGDYYDSGTYYNNSDFDP

SEQ ID NO: 5621 - protein, 15 aa, Artificial Sequence
  Synthetic construct
AKDLFSGPGGSVLEF

SEQ ID NO: 5622 - protein, 21 aa, Artificial Sequence
  Synthetic construct
ARSLISYSYDSSGYINWYFDL

SEQ ID NO: 5623 - protein, 15 aa, Artificial Sequence
  Synthetic construct
ARRPLAAVGYWYFDL

SEQ ID NO: 5624 - protein, 17 aa, Artificial Sequence
  Synthetic construct
ARDPSRPSYGDNDAFDV

SEQ ID NO: 5625 - protein, 19 aa, Artificial Sequence
  Synthetic construct
ARILAVHYDSSGRTYYLDY

SEQ ID NO: 5626 - protein, 16 aa, Artificial Sequence
  Synthetic construct
AKDRSLYGDYDSVFDY

SEQ ID NO: 5627 - protein, 18 aa, Artificial Sequence
  Synthetic construct
ARDGGLTMPTFDYYYMDV

SEQ ID NO: 5628 - protein, 19 aa, Artificial Sequence
  Synthetic construct
ASGTSLVWFGDPYIPNLDY

SEQ ID NO: 5629 - protein, 13 aa, Artificial Sequence
  Synthetic construct
AKGLVVGATYFDY

SEQ ID NO: 5630 - protein, 13 aa, Artificial Sequence
  Synthetic construct
AADSSGYYGVLGK

SEQ ID NO: 5631 - protein, 12 aa, Artificial Sequence
  Synthetic construct
AAVTGITLGMDV

SEQ ID NO: 5632 - protein, 18 aa, Artificial Sequence
  Synthetic construct
AREKGYSSLSSATYFFDY

SEQ ID NO: 5633 - protein, 10 aa, Artificial Sequence
  Synthetic construct
ARVVSDAFDI

SEQ ID NO: 5634 - protein, 16 aa, Artificial Sequence
  Synthetic construct
AKDLSGVTAASDAFDV

SEQ ID NO: 5635 - protein, 14 aa, Artificial Sequence
  Synthetic construct
AREVPWFGDGGMDV

SEQ ID NO: 5636 - protein, 22 aa, Artificial Sequence
  Synthetic construct
ARKFDSSNWYALSGYYYYYMDV

SEQ ID NO: 5637 - protein, 23 aa, Artificial Sequence
  Synthetic construct
ARGGFGVPAASAYDRYHYYYMDV

SEQ ID NO: 5638 - protein, 14 aa, Artificial Sequence
  Synthetic construct
ATSPALVRQNWFDP

SEQ ID NO: 5639 - protein, 13 aa, Artificial Sequence
  Synthetic construct
AKGGDQWLATLDH

SEQ ID NO: 5640 - protein, 13 aa, Artificial Sequence
  Synthetic construct
ASLLEWSSYGMDV

SEQ ID NO: 5641 - protein, 13 aa, Artificial Sequence
  Synthetic construct
ARVNGGGYDLPDY

SEQ ID NO: 5642 - protein, 14 aa, Artificial Sequence
  Synthetic construct
ARGGPRFLRTHFDL

SEQ ID NO: 5643 - protein, 13 aa, Artificial Sequence
  Synthetic construct
ARGAIASRHAFDV

SEQ ID NO: 5644 - protein, 18 aa, Artificial Sequence
  Synthetic construct
AREGYSNSGWYETYYFDY

SEQ ID NO: 5645 - protein, 12 aa, Artificial Sequence
  Synthetic construct
ATLGSSSWSFDY

SEQ ID NO: 5646 - protein, 16 aa, Artificial Sequence
  Synthetic construct
ATISVRDSSGPTAFDI

SEQ ID NO: 5647 - protein, 22 aa, Artificial Sequence
  Synthetic construct
ARAERDIVVVGTAIDYFYYMDV

SEQ ID NO: 5648 - protein, 13 aa, Artificial Sequence
  Synthetic construct
AATSDIVTAIGNY

SEQ ID NO: 5649 - protein, 19 aa, Artificial Sequence
  Synthetic construct
ARGGYYDSSAYFYVAGFDY

SEQ ID NO: 5650 - protein, 17 aa, Artificial Sequence
  Synthetic construct
ARGGYFDLLIGPGYFDY

SEQ ID NO: 5651 - protein, 15 aa, Artificial Sequence
  Synthetic construct
ASGHCPAGSCPNFDY

SEQ ID NO: 5652 - protein, 14 aa, Artificial Sequence
  Synthetic construct
ARHGAEGYYYAMDV

SEQ ID NO: 5653 - protein, 17 aa, Artificial Sequence
  Synthetic construct
AREKQWLVSNYYYYMNV

SEQ ID NO: 5654 - protein, 18 aa, Artificial Sequence
  Synthetic construct
ARVGHNSGRGWHYYYMDV

SEQ ID NO: 5655 - protein, 18 aa, Artificial Sequence
  Synthetic construct
TTERLYDYVWGSYRTFDY

SEQ ID NO: 5656 - protein, 13 aa, Artificial Sequence
  Synthetic construct
AKGGGSYYYYFDL

SEQ ID NO: 5657 - protein, 15 aa, Artificial Sequence
  Synthetic construct
ARDSASGWYVDALDI

SEQ ID NO: 5658 - protein, 19 aa, Artificial Sequence
  Synthetic construct
ARKTGPSYYDFSGKDAFDI

SEQ ID NO: 5659 - protein, 15 aa, Artificial Sequence
  Synthetic construct
ARESSGDYPLYYFDY

SEQ ID NO: 5660 - protein, 10 aa, Artificial Sequence
  Synthetic construct
AKGVLRYLDY

SEQ ID NO: 5661 - protein, 15 aa, Artificial Sequence
  Synthetic construct
ARHWGGSFFGVWFDP

SEQ ID NO: 5662 - protein, 9 aa, Artificial Sequence
  Synthetic construct
FLVASPFEC

SEQ ID NO: 5663 - protein, 21 aa, Artificial Sequence
  Synthetic construct
ARDPGHDFWSTLAYYYYGMDV

SEQ ID NO: 5664 - protein, 14 aa, Artificial Sequence
  Synthetic construct
ARLFVVVTEIVFDI

SEQ ID NO: 5665 - protein, 17 aa, Artificial Sequence
  Synthetic construct
ARGTGGSSWFANYYFDY

SEQ ID NO: 5666 - protein, 17 aa, Artificial Sequence
  Synthetic construct
ARLSSYGTGTYSYALDV

SEQ ID NO: 5667 - protein, 18 aa, Artificial Sequence
  Synthetic construct
ARSQAIRVSYYYYYGMDV

SEQ ID NO: 5668 - protein, 13 aa, Artificial Sequence
  Synthetic construct
ARNHYDRSDAFDM

SEQ ID NO: 5669 - protein, 20 aa, Artificial Sequence
  Synthetic construct
ARDGTYGAAGEVSLPYYFDY

SEQ ID NO: 5670 - protein, 15 aa, Artificial Sequence
  Synthetic construct
AKTRSWSGYPRYFDL

SEQ ID NO: 5671 - protein, 12 aa, Artificial Sequence
  Synthetic construct
ARDRGGSYHFDY

SEQ ID NO: 5672 - protein, 14 aa, Artificial Sequence
  Synthetic construct
ARRGYDSGGYALGY

SEQ ID NO: 5673 - protein, 12 aa, Artificial Sequence
  Synthetic construct
AREGYYGSGPDY

SEQ ID NO: 5674 - protein, 15 aa, Artificial Sequence
  Synthetic construct
ARDRDRTTVIDAFDI

SEQ ID NO: 5675 - protein, 11 aa, Artificial Sequence
  Synthetic construct
ARDLDVGGMDV

SEQ ID NO: 5676 - protein, 13 aa, Artificial Sequence
  Synthetic construct
ARDDVVAALKFDF

SEQ ID NO: 5677 - protein, 15 aa, Artificial Sequence
  Synthetic construct
ARDRRGRYSSDYFDY

SEQ ID NO: 5678 - protein, 17 aa, Artificial Sequence
  Synthetic construct
AKSTPGIAAGGANWFDP

SEQ ID NO: 5679 - protein, 17 aa, Artificial Sequence
  Synthetic construct
AKDIASVRLGDDYVFDI

SEQ ID NO: 5680 - protein, 14 aa, Artificial Sequence
  Synthetic construct
AKGSTIVLMVYATR

SEQ ID NO: 5681 - protein, 11 aa, Artificial Sequence
  Synthetic construct
ARGGSGSYIDY

SEQ ID NO: 5682 - protein, 13 aa, Artificial Sequence
  Synthetic construct
AREGVVGATGIDY

SEQ ID NO: 5683 - protein, 13 aa, Artificial Sequence
  Synthetic construct
ARVFTTLDWYFDL

SEQ ID NO: 5684 - protein, 10 aa, Artificial Sequence
  Synthetic construct
AKDSSGIPEY

SEQ ID NO: 5685 - protein, 23 aa, Artificial Sequence
  Synthetic construct
ARDRFGSGNSYKSDQYFNYYMDV

SEQ ID NO: 5686 - protein, 17 aa, Artificial Sequence
  Synthetic construct
ARTYDFWSGYYYYGMDV

SEQ ID NO: 5687 - protein, 13 aa, Artificial Sequence
  Synthetic construct
ARVMGGYGTAFDY

SEQ ID NO: 5688 - protein, 16 aa, Artificial Sequence
  Synthetic construct
AKVSLYYYDSSGYYGY

SEQ ID NO: 5689 - protein, 16 aa, Artificial Sequence
  Synthetic construct
ARGPYCGGDCYSLADH

SEQ ID NO: 5690 - protein, 13 aa, Artificial Sequence
  Synthetic construct
VRGPVYYNSEDRY

SEQ ID NO: 5691 - protein, 15 aa, Artificial Sequence
  Synthetic construct
ARGGLLRYLEWPGDY

SEQ ID NO: 5692 - protein, 11 aa, Artificial Sequence
  Synthetic construct
ARLTTVTIFDY

SEQ ID NO: 5693 - protein, 16 aa, Artificial Sequence
  Synthetic construct
ARLVSSGWFKYWYFDL

SEQ ID NO: 5694 - protein, 13 aa, Artificial Sequence
  Synthetic construct
ARVFTTLDWYFDL

SEQ ID NO: 5695 - protein, 17 aa, Artificial Sequence
  Synthetic construct
VRDPRVTTATNYFGMDV

SEQ ID NO: 5696 - protein, 15 aa, Artificial Sequence
  Synthetic construct
VRTFPYDSSGYYVED

SEQ ID NO: 5697 - protein, 14 aa, Artificial Sequence
  Synthetic construct
ARDGRITVGRGLVY

SEQ ID NO: 5698 - protein, 13 aa, Artificial Sequence
  Synthetic construct
ARVNDILTGYVDF

SEQ ID NO: 5699 - protein, 12 aa, Artificial Sequence
  Synthetic construct
ARDQCSDCGMDV

SEQ ID NO: 5700 - protein, 16 aa, Artificial Sequence
  Synthetic construct
TKSGWGYDFWSGYFDY

SEQ ID NO: 5701 - protein, 9 aa, Artificial Sequence
  Synthetic construct
ASGYYDSLY

SEQ ID NO: 5702 - protein, 14 aa, Artificial Sequence
  Synthetic construct
TRVSRYNGNDYFDY

SEQ ID NO: 5703 - protein, 15 aa, Artificial Sequence
  Synthetic construct
ARVYQYESSGYYYQA

SEQ ID NO: 5704 - protein, 20 aa, Artificial Sequence
  Synthetic construct
AKDIGRYDHYDTFHGGAFDI

SEQ ID NO: 5705 - protein, 16 aa, Artificial Sequence
  Synthetic construct
ARDWSSSSWYYHGMDV

SEQ ID NO: 5706 - protein, 22 aa, Artificial Sequence
  Synthetic construct
ARDSDYDYIWGSYRYNQDAFDI

SEQ ID NO: 5707 - protein, 18 aa, Artificial Sequence
  Synthetic construct
ARDFSGSYYMYYYYYMDV

SEQ ID NO: 5708 - protein, 5 aa, Artificial Sequence
  Synthetic construct
TTWWF

SEQ ID NO: 5709 - protein, 21 aa, Artificial Sequence
  Synthetic construct
ARGYYYGSGSYYNPDPNWFDP

SEQ ID NO: 5710 - protein, 17 aa, Artificial Sequence
  Synthetic construct
ARKPLLHSSVNPGAFDV

SEQ ID NO: 5711 - protein, 14 aa, Artificial Sequence
  Synthetic construct
AREGIAAAGSGNDY

SEQ ID NO: 5712 - protein, 8 aa, Artificial Sequence
  Synthetic construct
AADPFADY

SEQ ID NO: 5713 - protein, 19 aa, Artificial Sequence
  Synthetic construct
ARLHSNSFRFYSYYYGLDV

SEQ ID NO: 5714 - protein, 11 aa, Artificial Sequence
  Synthetic construct
ARRGAFDSFDY

SEQ ID NO: 5715 - protein, 11 aa, Artificial Sequence
  Synthetic construct
ARDATGGGGDY

SEQ ID NO: 5716 - protein, 13 aa, Artificial Sequence
  Synthetic construct
ARPLVPHRDWFDP

SEQ ID NO: 5717 - protein, 15 aa, Artificial Sequence
  Synthetic construct
ANYNIGYSRDDAFDI

SEQ ID NO: 5718 - protein, 22 aa, Artificial Sequence
  Synthetic construct
ARDGANCSGDWCYTDIVFTMDV

SEQ ID NO: 5719 - protein, 14 aa, Artificial Sequence
  Synthetic construct
ARARGAGYVSSFEP

SEQ ID NO: 5720 - protein, 20 aa, Artificial Sequence
  Synthetic construct
ARDARTITMVRGVFGDAFDI

SEQ ID NO: 5721 - protein, 11 aa, Artificial Sequence
  Synthetic construct
ARGLYFDTTDS

SEQ ID NO: 5722 - protein, 4 aa, Artificial Sequence
  Synthetic construct
SGAR

SEQ ID NO: 5723 - protein, 13 aa, Artificial Sequence
  Synthetic construct
ASVRVAAWNAYDI

SEQ ID NO: 5724 - protein, 19 aa, Artificial Sequence
  Synthetic construct
AKDQYYDFWSGFPNRGMDV

SEQ ID NO: 5725 - protein, 17 aa, Artificial Sequence
  Synthetic construct
ARSEDLESSYHYYGIDV

SEQ ID NO: 5726 - protein, 14 aa, Artificial Sequence
  Synthetic construct
ARARGGSYSAPFDF

SEQ ID NO: 5727 - protein, 24 aa, Artificial Sequence
  Synthetic construct
ARAGGGDFWSGYYTGDYYYYGMDV

SEQ ID NO: 5728 - protein, 18 aa, Artificial Sequence
  Synthetic construct
ARENSGYDYGSYSYYMDV

SEQ ID NO: 5729 - protein, 12 aa, Artificial Sequence
  Synthetic construct
ASLRYFDWLHIP

SEQ ID NO: 5730 - protein, 17 aa, Artificial Sequence
  Synthetic construct
ASERIFMVRGVMYGMDV

SEQ ID NO: 5731 - protein, 15 aa, Artificial Sequence
  Synthetic construct
ARLWDTYSYRYGMDV

SEQ ID NO: 5732 - protein, 15 aa, Artificial Sequence
  Synthetic construct
ARDSDYGDYANWFDP

SEQ ID NO: 5733 - protein, 11 aa, Artificial Sequence
  Synthetic construct
AAGLGHWYFDL

SEQ ID NO: 5734 - protein, 17 aa, Artificial Sequence
  Synthetic construct
ATEVVGELRLASNGMDV

SEQ ID NO: 5735 - protein, 21 aa, Artificial Sequence
  Synthetic construct
AKTGVHHSKFLSSWYNYYLDV

SEQ ID NO: 5736 - protein, 12 aa, Artificial Sequence
  Synthetic construct
AHRDPRFDAFDI

SEQ ID NO: 5737 - protein, 14 aa, Artificial Sequence
  Synthetic construct
ARGRGGNYYYGMDV

SEQ ID NO: 5738 - protein, 16 aa, Artificial Sequence
  Synthetic construct
ARVLGVAVPGDYQVDY

SEQ ID NO: 5739 - protein, 9 aa, Artificial Sequence
  Synthetic construct
VWEDLGLDF

SEQ ID NO: 5740 - protein, 12 aa, Artificial Sequence
  Synthetic construct
ATVTFMIHVFAD

SEQ ID NO: 5741 - protein, 14 aa, Artificial Sequence
  Synthetic construct
ARGYGGNYRTYFDY

SEQ ID NO: 5742 - protein, 20 aa, Artificial Sequence
  Synthetic construct
ARSTHYYDRSGYSTSDGMDV

SEQ ID NO: 5743 - protein, 20 aa, Artificial Sequence
  Synthetic construct
ARDRRYYDSSGYPVGGAFDI

SEQ ID NO: 5744 - protein, 14 aa, Artificial Sequence
  Synthetic construct
AKIRGGNYRGIFDI

SEQ ID NO: 5745 - protein, 12 aa, Artificial Sequence
  Synthetic construct
VKGSSSWFSFDS

SEQ ID NO: 5746 - protein, 17 aa, Artificial Sequence
  Synthetic construct
AREYGVSGIGANYCMDV

SEQ ID NO: 5747 - protein, 18 aa, Artificial Sequence
  Synthetic construct
ARDNWAVTVGTGNGAFDI

SEQ ID NO: 5748 - protein, 13 aa, Artificial Sequence
  Synthetic construct
ARGAIASRHAFDV

SEQ ID NO: 5749 - protein, 17 aa, Artificial Sequence
  Synthetic construct
ASIKCTNGLCSYLVFDY

SEQ ID NO: 5750 - protein, 11 aa, Artificial Sequence
  Synthetic construct
AREYSSGWPDY

SEQ ID NO: 5751 - protein, 13 aa, Artificial Sequence
  Synthetic construct
ARDLEFASPGEDY

SEQ ID NO: 5752 - protein, 16 aa, Artificial Sequence
  Synthetic construct
ARDRGLTQLDENCFDS

SEQ ID NO: 5753 - protein, 21 aa, Artificial Sequence
  Synthetic construct
ALNSPIPASSSRDYYYFVMDV

SEQ ID NO: 5754 - protein, 19 aa, Artificial Sequence
  Synthetic construct
ARHLKLAPLRFLEWAYWGY

SEQ ID NO: 5755 - protein, 9 aa, Artificial Sequence
  Synthetic construct
ARGLRVPDD

SEQ ID NO: 5756 - protein, 17 aa, Artificial Sequence
  Synthetic construct
AKDPSEYNFWSGYYFDY

SEQ ID NO: 5757 - protein, 20 aa, Artificial Sequence
  Synthetic construct
AKDLIKFGELFDLGGNYMDV

SEQ ID NO: 5758 - protein, 17 aa, Artificial Sequence
  Synthetic construct
ARHGHYDLLTGYGRFDF

SEQ ID NO: 5759 - protein, 21 aa, Artificial Sequence
  Synthetic construct
AHIPPKITFFGVVAVEVYFDY

SEQ ID NO: 5760 - protein, 19 aa, Artificial Sequence
  Synthetic construct
ARDPVVVIAASLFYHGMDV

SEQ ID NO: 5761 - protein, 16 aa, Artificial Sequence
  Synthetic construct
ASCSGSGTSLPWYFDL

SEQ ID NO: 5762 - protein, 22 aa, Artificial Sequence
  Synthetic construct
ARAIPPSGSYYHRYYYYYYMDV

SEQ ID NO: 5763 - protein, 13 aa, Artificial Sequence
  Synthetic construct
VSGAVAGNEALAA

SEQ ID NO: 5764 - protein, 18 aa, Artificial Sequence
  Synthetic construct
AGSLVSSDWNLAGYWFDP

SEQ ID NO: 5765 - protein, 14 aa, Artificial Sequence
  Synthetic construct
ARDGAVGVTTGLDY

SEQ ID NO: 5766 - protein, 20 aa, Artificial Sequence
  Synthetic construct
ARDPDPDIVVVVAADASLDY

SEQ ID NO: 5767 - protein, 26 aa, Artificial Sequence
  Synthetic construct
AKSNNLYYDILTGYPSTYYYYYGMDV

SEQ ID NO: 5768 - protein, 14 aa, Artificial Sequence
  Synthetic construct
ARGRGWLTTDLFDY

SEQ ID NO: 5769 - protein, 13 aa, Artificial Sequence
  Synthetic construct
ARAKGGNYYYFDY

SEQ ID NO: 5770 - protein, 12 aa, Artificial Sequence
  Synthetic construct
ATINLVRGGPEY

SEQ ID NO: 5771 - protein, 14 aa, Artificial Sequence
  Synthetic construct
AKDSRRLLETLVDY

SEQ ID NO: 5772 - protein, 15 aa, Artificial Sequence
  Synthetic construct
ARDPYIVPTPLPLDY

SEQ ID NO: 5773 - protein, 17 aa, Artificial Sequence
  Synthetic construct
AKVRYYDFWSGRDAFDI

SEQ ID NO: 5774 - protein, 13 aa, Artificial Sequence
  Synthetic construct
THVRYDSSGYYEY

SEQ ID NO: 5775 - protein, 17 aa, Artificial Sequence
  Synthetic construct
ATAFAYCRGDCYGRFDY

SEQ ID NO: 5776 - protein, 13 aa, Artificial Sequence
  Synthetic construct
ARGVGGYFFPFDY

SEQ ID NO: 5777 - protein, 15 aa, Artificial Sequence
  Synthetic construct
AKDLATRPLYYSMDV

SEQ ID NO: 5778 - protein, 12 aa, Artificial Sequence
  Synthetic construct
ATYYYGSGSYHD

SEQ ID NO: 5779 - protein, 12 aa, Artificial Sequence
  Synthetic construct
ACGYSGYDYEAP

SEQ ID NO: 5780 - protein, 21 aa, Artificial Sequence
  Synthetic construct
STGFSIVPANVGYNYYYGMDV

SEQ ID NO: 5781 - protein, 14 aa, Artificial Sequence
  Synthetic construct
ARSGSGSYYGDFGY

SEQ ID NO: 5782 - protein, 20 aa, Artificial Sequence
  Synthetic construct
ARVFVVRGDDDYRYYYYMDV

SEQ ID NO: 5783 - protein, 17 aa, Artificial Sequence
  Synthetic construct
ARRLAVAGTIGFNGFDI

SEQ ID NO: 5784 - protein, 20 aa, Artificial Sequence
  Synthetic construct
AKADGGYYDSSAYYSTAIDY

SEQ ID NO: 5785 - protein, 16 aa, Artificial Sequence
  Synthetic construct
AAEDYYDKAYHHAMDV

SEQ ID NO: 5786 - protein, 14 aa, Artificial Sequence
  Synthetic construct
AKGRGGNYFDAFDI

SEQ ID NO: 5787 - protein, 16 aa, Artificial Sequence
  Synthetic construct
ARDHTYGDYEVGWFAP

SEQ ID NO: 5788 - protein, 14 aa, Artificial Sequence
  Synthetic construct
ARQYTDGSPRDMGI

SEQ ID NO: 5789 - protein, 18 aa, Artificial Sequence
  Synthetic construct
ARYYYYGSGSYSQNWFDP

SEQ ID NO: 5790 - protein, 16 aa, Artificial Sequence
  Synthetic construct
ATISVRDSSGPTAFDI

SEQ ID NO: 5791 - protein, 14 aa, Artificial Sequence
  Synthetic construct
AKVKGGHSYAHFDS

SEQ ID NO: 5792 - protein, 15 aa, Artificial Sequence
  Synthetic construct
AHRTPSNWFGDWFDP

SEQ ID NO: 5793 - protein, 11 aa, Artificial Sequence
  Synthetic construct
ARSANYYYMDV

SEQ ID NO: 5794 - protein, 20 aa, Artificial Sequence
  Synthetic construct
TRVDCGSTTCHYARERWFGP

SEQ ID NO: 5795 - protein, 20 aa, Artificial Sequence
  Synthetic construct
ARDPSGLRYFDWLLGDGMDV

SEQ ID NO: 5796 - protein, 13 aa, Artificial Sequence
  Synthetic construct
ARDLAVADSDAAY

SEQ ID NO: 5797 - protein, 6 aa, Artificial Sequence
  Synthetic construct
ALPKQY

SEQ ID NO: 5798 - protein, 9 aa, Artificial Sequence
  Synthetic construct
SSDVGSYNL

SEQ ID NO: 5799 - protein, 6 aa, Artificial Sequence
  Synthetic construct
QSISSY

SEQ ID NO: 5800 - protein, 12 aa, Artificial Sequence
  Synthetic construct
QSVLYRSNNKNY

SEQ ID NO: 5801 - protein, 9 aa, Artificial Sequence
  Synthetic construct
SSDVGDYNF

SEQ ID NO: 5802 - protein, 6 aa, Artificial Sequence
  Synthetic construct
QSVTSN

SEQ ID NO: 5803 - protein, 7 aa, Artificial Sequence
  Synthetic construct
QSVSSTY

SEQ ID NO: 5804 - protein, 6 aa, Artificial Sequence
  Synthetic construct
QSISSY

SEQ ID NO: 5805 - protein, 12 aa, Artificial Sequence
  Synthetic construct
QSVLFSSNNKNC

SEQ ID NO: 5806 - protein, 9 aa, Artificial Sequence
  Synthetic construct
SSDVGGYNY

SEQ ID NO: 5807 - protein, 8 aa, Artificial Sequence
  Synthetic construct
SSNIGNNY

SEQ ID NO: 5808 - protein, 6 aa, Artificial Sequence
  Synthetic construct
QSISSW

SEQ ID NO: 5809 - protein, 9 aa, Artificial Sequence
  Synthetic construct
SSDVGSYNL

SEQ ID NO: 5810 - protein, 9 aa, Artificial Sequence
  Synthetic construct
SSDVGGYNY

SEQ ID NO: 5811 - protein, 6 aa, Artificial Sequence
  Synthetic construct
SLRSYY

SEQ ID NO: 5812 - protein, 6 aa, Artificial Sequence
  Synthetic construct
QSIRTW

SEQ ID NO: 5813 - protein, 7 aa, Artificial Sequence
  Synthetic construct
QSVSSNY

SEQ ID NO: 5814 - protein, 6 aa, Artificial Sequence
  Synthetic construct
ALPKKY

SEQ ID NO: 5815 - protein, 9 aa, Artificial Sequence
  Synthetic construct
SSDVGVYNF

SEQ ID NO: 5816 - protein, 7 aa, Artificial Sequence
  Synthetic construct
QSVSSSY

SEQ ID NO: 5817 - protein, 6 aa, Artificial Sequence
  Synthetic construct
QNISSY

SEQ ID NO: 5818 - protein, 6 aa, Artificial Sequence
  Synthetic construct
ALPKKY

SEQ ID NO: 5819 - protein, 11 aa, Artificial Sequence
  Synthetic construct
QSLLHSNGYNY

SEQ ID NO: 5820 - protein, 8 aa, Artificial Sequence
  Synthetic construct
SSNIGNNY

SEQ ID NO: 5821 - protein, 6 aa, Artificial Sequence
  Synthetic construct
QGISSY

SEQ ID NO: 5822 - protein, 8 aa, Artificial Sequence
  Synthetic construct
SSNIGSNT

SEQ ID NO: 5823 - protein, 6 aa, Artificial Sequence
  Synthetic construct
QTISSY

SEQ ID NO: 5824 - protein, 6 aa, Artificial Sequence
  Synthetic construct
QSVSSD

SEQ ID NO: 5825 - protein, 6 aa, Artificial Sequence
  Synthetic construct
QGIRND

SEQ ID NO: 5826 - protein, 7 aa, Artificial Sequence
  Synthetic construct
QSFSSSY

SEQ ID NO: 5827 - protein, 7 aa, Artificial Sequence
  Synthetic construct
QSVSNNY

SEQ ID NO: 5828 - protein, 6 aa, Artificial Sequence
  Synthetic construct
QNINIY

SEQ ID NO: 5829 - protein, 8 aa, Artificial Sequence
  Synthetic construct
SSNIGSNT

SEQ ID NO: 5830 - protein, 8 aa, Artificial Sequence
  Synthetic construct
SSNIGSNT

SEQ ID NO: 5831 - protein, 11 aa, Artificial Sequence
  Synthetic construct
QSLLNSDGKTY

SEQ ID NO: 5832 - protein, 7 aa, Artificial Sequence
  Synthetic construct
QSVSSSY

SEQ ID NO: 5833 - protein, 6 aa, Artificial Sequence
  Synthetic construct
QSVSGN

SEQ ID NO: 5834 - protein, 6 aa, Artificial Sequence
  Synthetic construct
QSVSSY

SEQ ID NO: 5835 - protein, 6 aa, Artificial Sequence
  Synthetic construct
ALPKKY

SEQ ID NO: 5836 - protein, 11 aa, Artificial Sequence
  Synthetic construct
QSLLHSDGKTY

SEQ ID NO: 5837 - protein, 6 aa, Artificial Sequence
  Synthetic construct
QGISTW

SEQ ID NO: 5838 - protein, 6 aa, Artificial Sequence
  Synthetic construct
QSISSW

SEQ ID NO: 5839 - protein, 6 aa, Artificial Sequence
  Synthetic construct
QSISDY

SEQ ID NO: 5840 - protein, 6 aa, Artificial Sequence
  Synthetic construct
QSVSSY

SEQ ID NO: 5841 - protein, 7 aa, Artificial Sequence
  Synthetic construct
QTINSNY

SEQ ID NO: 5842 - protein, 12 aa, Artificial Sequence
  Synthetic construct
QSVLHSSTNKNY

SEQ ID NO: 5843 - protein, 8 aa, Artificial Sequence
  Synthetic construct
SSNIGNNY

SEQ ID NO: 5844 - protein, 9 aa, Artificial Sequence
  Synthetic construct
SSDVGDYNF

SEQ ID NO: 5845 - protein, 6 aa, Artificial Sequence
  Synthetic construct
QSINSW

SEQ ID NO: 5846 - protein, 6 aa, Artificial Sequence
  Synthetic construct
QSLDTY

SEQ ID NO: 5847 - protein, 6 aa, Artificial Sequence
  Synthetic construct
RLGDKY

SEQ ID NO: 5848 - protein, 6 aa, Artificial Sequence
  Synthetic construct
QGINNY

SEQ ID NO: 5849 - protein, 6 aa, Artificial Sequence
  Synthetic construct
NIGSKS

SEQ ID NO: 5850 - protein, 7 aa, Artificial Sequence
  Synthetic construct
QSVSRSY

SEQ ID NO: 5851 - protein, 9 aa, Artificial Sequence
  Synthetic construct
SGDIGDYDF

SEQ ID NO: 5852 - protein, 6 aa, Artificial Sequence
  Synthetic construct
ALSKQF

SEQ ID NO: 5853 - protein, 6 aa, Artificial Sequence
  Synthetic construct
QDISNY

SEQ ID NO: 5854 - protein, 6 aa, Artificial Sequence
  Synthetic construct
SLRSYY

SEQ ID NO: 5855 - protein, 9 aa, Artificial Sequence
  Synthetic construct
SSNIGAGYD

SEQ ID NO: 5856 - protein, 6 aa, Artificial Sequence
  Synthetic construct
ALPRKY

SEQ ID NO: 5857 - protein, 8 aa, Artificial Sequence
  Synthetic construct
SSNIGNNY

SEQ ID NO: 5858 - protein, 6 aa, Artificial Sequence
  Synthetic construct
ALPKKY

SEQ ID NO: 5859 - protein, 6 aa, Artificial Sequence
  Synthetic construct
QGISSW

SEQ ID NO: 5860 - protein, 7 aa, Artificial Sequence
  Synthetic construct
ERVSSSY

SEQ ID NO: 5861 - protein, 6 aa, Artificial Sequence
  Synthetic construct
QDISNY

SEQ ID NO: 5862 - protein, 6 aa, Artificial Sequence
  Synthetic construct
QSVSTW

SEQ ID NO: 5863 - protein, 9 aa, Artificial Sequence
  Synthetic construct
SSNIGAGYD

SEQ ID NO: 5864 - protein, 8 aa, Artificial Sequence
  Synthetic construct
SSDIGSNY

SEQ ID NO: 5865 - protein, 6 aa, Artificial Sequence
  Synthetic construct
QDISNY

SEQ ID NO: 5866 - protein, 6 aa, Artificial Sequence
  Synthetic construct
KLEVIY

SEQ ID NO: 5867 - protein, 9 aa, Artificial Sequence
  Synthetic construct
TGAVTSGHY

SEQ ID NO: 5868 - protein, 11 aa, Artificial Sequence
  Synthetic construct
QSLVHRDGNTY

SEQ ID NO: 5869 - protein, 6 aa, Artificial Sequence
  Synthetic construct
QGISNS

SEQ ID NO: 5870 - protein, 6 aa, Artificial Sequence
  Synthetic construct
ALPKQY

SEQ ID NO: 5871 - protein, 8 aa, Artificial Sequence
  Synthetic construct
SSNIGSNT

SEQ ID NO: 5872 - protein, 9 aa, Artificial Sequence
  Synthetic construct
SSDVGGYNY

SEQ ID NO: 5873 - protein, 8 aa, Artificial Sequence
  Synthetic construct
SSSIGSNT

SEQ ID NO: 5874 - protein, 7 aa, Artificial Sequence
  Synthetic construct
QSVSSNY

SEQ ID NO: 5875 - protein, 6 aa, Artificial Sequence
  Synthetic construct
KLGDKN

SEQ ID NO: 5876 - protein, 6 aa, Artificial Sequence
  Synthetic construct
QSVSNF

SEQ ID NO: 5877 - protein, 12 aa, Artificial Sequence
  Synthetic construct
QSVLYSSNNKNY

SEQ ID NO: 5878 - protein, 9 aa, Artificial Sequence
  Synthetic construct
SSDVGSYNL

SEQ ID NO: 5879 - protein, 9 aa, Artificial Sequence
  Synthetic construct
SGVNVGTYR

SEQ ID NO: 5880 - protein, 7 aa, Artificial Sequence
  Synthetic construct
QSVYGDY

SEQ ID NO: 5881 - protein, 11 aa, Artificial Sequence
  Synthetic construct
QSLLHRNGHNY

SEQ ID NO: 5882 - protein, 6 aa, Artificial Sequence
  Synthetic construct
ALPKKY

SEQ ID NO: 5883 - protein, 6 aa, Artificial Sequence
  Synthetic construct
ALPKKY

SEQ ID NO: 5884 - protein, 9 aa, Artificial Sequence
  Synthetic construct
SSDVGGYNY

SEQ ID NO: 5885 - protein, 11 aa, Artificial Sequence
  Synthetic construct
QSLVHSDGNTY

SEQ ID NO: 5886 - protein, 8 aa, Artificial Sequence
  Synthetic construct
SGSIASNY

SEQ ID NO: 5887 - protein, 6 aa, Artificial Sequence
  Synthetic construct
QSVSSY

SEQ ID NO: 5888 - protein, 9 aa, Artificial Sequence
  Synthetic construct
SSDVGAYNY

SEQ ID NO: 5889 - protein, 6 aa, Artificial Sequence
  Synthetic construct
NIGSKS

SEQ ID NO: 5890 - protein, 11 aa, Artificial Sequence
  Synthetic construct
QSLLHTKGYNY

SEQ ID NO: 5891 - protein, 11 aa, Artificial Sequence
  Synthetic construct
QSLLHSDGKTY

SEQ ID NO: 5892 - protein, 7 aa, Artificial Sequence
  Synthetic construct
QSVSSSY

SEQ ID NO: 5893 - protein, 9 aa, Artificial Sequence
  Synthetic construct
SSDVGSYNL

SEQ ID NO: 5894 - protein, 11 aa, Artificial Sequence
  Synthetic construct
QSLLHSNGYNH

SEQ ID NO: 5895 - protein, 6 aa, Artificial Sequence
  Synthetic construct
KLGDKY

SEQ ID NO: 5896 - protein, 9 aa, Artificial Sequence
  Synthetic construct
SSNIGAGYD

SEQ ID NO: 5897 - protein, 6 aa, Artificial Sequence
  Synthetic construct
QGISSY

SEQ ID NO: 5898 - protein, 6 aa, Artificial Sequence
  Synthetic construct
NIGSKS

SEQ ID NO: 5899 - protein, 9 aa, Artificial Sequence
  Synthetic construct
SSDFGSYNL

SEQ ID NO: 5900 - protein, 6 aa, Artificial Sequence
  Synthetic construct
QGISDY

SEQ ID NO: 5901 - protein, 6 aa, Artificial Sequence
  Synthetic construct
QTINTW

SEQ ID NO: 5902 - protein, 6 aa, Artificial Sequence
  Synthetic construct
HDIGNY

SEQ ID NO: 5903 - protein, 6 aa, Artificial Sequence
  Synthetic construct
QGIRND

SEQ ID NO: 5904 - protein, 6 aa, Artificial Sequence
  Synthetic construct
ALPKQY

SEQ ID NO: 5905 - protein, 12 aa, Artificial Sequence
  Synthetic construct
QSVLYSSNNKNY

SEQ ID NO: 5906 - protein, 6 aa, Artificial Sequence
  Synthetic construct
QGISNY

SEQ ID NO: 5907 - protein, 9 aa, Artificial Sequence
  Synthetic construct
NSDVGGYNY

SEQ ID NO: 5908 - protein, 6 aa, Artificial Sequence
  Synthetic construct
QSVSSD

SEQ ID NO: 5909 - protein, 9 aa, Artificial Sequence
  Synthetic construct
GSNIGAGYD

SEQ ID NO: 5910 - protein, 6 aa, Artificial Sequence
  Synthetic construct
LLAKYS

SEQ ID NO: 5911 - protein, 7 aa, Artificial Sequence
  Synthetic construct
QSVSSSY

SEQ ID NO: 5912 - protein, 6 aa, Artificial Sequence
  Synthetic construct
QTINNY

SEQ ID NO: 5913 - protein, 6 aa, Artificial Sequence
  Synthetic construct
ALPKKY

SEQ ID NO: 5914 - protein, 6 aa, Artificial Sequence
  Synthetic construct
NFGSKS

SEQ ID NO: 5915 - protein, 6 aa, Artificial Sequence
  Synthetic construct
QSISSW

SEQ ID NO: 5916 - protein, 9 aa, Artificial Sequence
  Synthetic construct
SRDVGGYNF

SEQ ID NO: 5917 - protein, 7 aa, Artificial Sequence
  Synthetic construct
QSVSSRY

SEQ ID NO: 5918 - protein, 7 aa, Artificial Sequence
  Synthetic construct
QSVSNSY

SEQ ID NO: 5919 - protein, 6 aa, Artificial Sequence
  Synthetic construct
KLGDKY

SEQ ID NO: 5920 - protein, 8 aa, Artificial Sequence
  Synthetic construct
SSNIGINY

SEQ ID NO: 5921 - protein, 6 aa, Artificial Sequence
  Synthetic construct
QSVSTY

SEQ ID NO: 5922 - protein, 6 aa, Artificial Sequence
  Synthetic construct
QSVSSF

SEQ ID NO: 5923 - protein, 6 aa, Artificial Sequence
  Synthetic construct
ALPKKY

SEQ ID NO: 5924 - protein, 7 aa, Artificial Sequence
  Synthetic construct
QSVASNY

SEQ ID NO: 5925 - protein, 6 aa, Artificial Sequence
  Synthetic construct
QSISSW

SEQ ID NO: 5926 - protein, 11 aa, Artificial Sequence
  Synthetic construct
QSLLHNNGYNY

SEQ ID NO: 5927 - protein, 9 aa, Artificial Sequence
  Synthetic construct
SSDVGGYNS

SEQ ID NO: 5928 - protein, 8 aa, Artificial Sequence
  Synthetic construct
TSNIGSNY

SEQ ID NO: 5929 - protein, 6 aa, Artificial Sequence
  Synthetic construct
QSVSSN

SEQ ID NO: 5930 - protein, 6 aa, Artificial Sequence
  Synthetic construct
ALPKKY

SEQ ID NO: 5931 - protein, 6 aa, Artificial Sequence
  Synthetic construct
QGISSW

SEQ ID NO: 5932 - protein, 8 aa, Artificial Sequence
  Synthetic construct
DSNIGDNT

SEQ ID NO: 5933 - protein, 6 aa, Artificial Sequence
  Synthetic construct
QDISIY

SEQ ID NO: 5934 - protein, 6 aa, Artificial Sequence
  Synthetic construct
SLRTYY

SEQ ID NO: 5935 - protein, 11 aa, Artificial Sequence
  Synthetic construct
QSLLHGNGYNY

SEQ ID NO: 5936 - protein, 6 aa, Artificial Sequence
  Synthetic construct
QDISSW

SEQ ID NO: 5937 - protein, 6 aa, Artificial Sequence
  Synthetic construct
QSISRW

SEQ ID NO: 5938 - protein, 6 aa, Artificial Sequence
  Synthetic construct
NLGDKF

SEQ ID NO: 5939 - protein, 9 aa, Artificial Sequence
  Synthetic construct
SSNIGAGYD

SEQ ID NO: 5940 - protein, 8 aa, Artificial Sequence
  Synthetic construct
RSNIGNEY

SEQ ID NO: 5941 - protein, 6 aa, Artificial Sequence
  Synthetic construct
QSVSSY

SEQ ID NO: 5942 - protein, 9 aa, Artificial Sequence
  Synthetic construct
SSDVGSYNL

SEQ ID NO: 5943 - protein, 9 aa, Artificial Sequence
  Synthetic construct
SSDVGGYKY

SEQ ID NO: 5944 - protein, 6 aa, Artificial Sequence
  Synthetic construct
KLGDKY

SEQ ID NO: 5945 - protein, 6 aa, Artificial Sequence
  Synthetic construct
KLGDKY

SEQ ID NO: 5946 - protein, 6 aa, Artificial Sequence
  Synthetic construct
HSISSN

SEQ ID NO: 5947 - protein, 7 aa, Artificial Sequence
  Synthetic construct
QSVDRTY

SEQ ID NO: 5948 - protein, 6 aa, Artificial Sequence
  Synthetic construct
QSVSSN

SEQ ID NO: 5949 - protein, 7 aa, Artificial Sequence
  Synthetic construct
QSVSSSY

SEQ ID NO: 5950 - protein, 7 aa, Artificial Sequence
  Synthetic construct
QSVSSSY

SEQ ID NO: 5951 - protein, 8 aa, Artificial Sequence
  Synthetic construct
SSNIGNNY

SEQ ID NO: 5952 - protein, 6 aa, Artificial Sequence
  Synthetic construct
QSVRSN

SEQ ID NO: 5953 - protein, 8 aa, Artificial Sequence
  Synthetic construct
SSNIGSNT

SEQ ID NO: 5954 - protein, 12 aa, Artificial Sequence
  Synthetic construct
QSVLYSSNSKNS

SEQ ID NO: 5955 - protein, 11 aa, Artificial Sequence
  Synthetic construct
QSLLHSNGYNY

SEQ ID NO: 5956 - protein, 6 aa, Artificial Sequence
  Synthetic construct
QSVHSN

SEQ ID NO: 5957 - protein, 8 aa, Artificial Sequence
  Synthetic construct
SSNIGNNY

SEQ ID NO: 5958 - protein, 6 aa, Artificial Sequence
  Synthetic construct
QGISSD

SEQ ID NO: 5959 - protein, 6 aa, Artificial Sequence
  Synthetic construct
QNIGIY

SEQ ID NO: 5960 - protein, 9 aa, Artificial Sequence
  Synthetic construct
SSDVGGYNY

SEQ ID NO: 5961 - protein, 6 aa, Artificial Sequence
  Synthetic construct
ALPKKY

SEQ ID NO: 5962 - protein, 6 aa, Artificial Sequence
  Synthetic construct
QSVSSN

SEQ ID NO: 5963 - protein, 6 aa, Artificial Sequence
  Synthetic construct
QSINSY

SEQ ID NO: 5964 - protein, 9 aa, Artificial Sequence
  Synthetic construct
SSDIGRYNY

SEQ ID NO: 5965 - protein, 6 aa, Artificial Sequence
  Synthetic construct
KLGKKY

SEQ ID NO: 5966 - protein, 6 aa, Artificial Sequence
  Synthetic construct
QDISNY

SEQ ID NO: 5967 - protein, 6 aa, Artificial Sequence
  Synthetic construct
QSIGTY

SEQ ID NO: 5968 - protein, 6 aa, Artificial Sequence
  Synthetic construct
QSVSSY

SEQ ID NO: 5969 - protein, 6 aa, Artificial Sequence
  Synthetic construct
QSISSW

SEQ ID NO: 5970 - protein, 6 aa, Artificial Sequence
  Synthetic construct
QDISNS

SEQ ID NO: 5971 - protein, 6 aa, Artificial Sequence
  Synthetic construct
QSINNW

SEQ ID NO: 5972 - protein, 6 aa, Artificial Sequence
  Synthetic construct
QSISTY

SEQ ID NO: 5973 - protein, 11 aa, Artificial Sequence
  Synthetic construct
QSLLFSNGYTY

SEQ ID NO: 5974 - protein, 6 aa, Artificial Sequence
  Synthetic construct
ALPKQY

SEQ ID NO: 5975 - protein, 8 aa, Artificial Sequence
  Synthetic construct
SSNIGSNN

SEQ ID NO: 5976 - protein, 7 aa, Artificial Sequence
  Synthetic construct
QSVTSSY

SEQ ID NO: 5977 - protein, 6 aa, Artificial Sequence
  Synthetic construct
QGIVNY

SEQ ID NO: 5978 - protein, 9 aa, Artificial Sequence
  Synthetic construct
SSDVGGYKY

SEQ ID NO: 5979 - protein, 6 aa, Artificial Sequence
  Synthetic construct
QDINIY

SEQ ID NO: 5980 - protein, 6 aa, Artificial Sequence
  Synthetic construct
KLGAKY

SEQ ID NO: 5981 - protein, 8 aa, Artificial Sequence
  Synthetic construct
SSNIGKYY

SEQ ID NO: 5982 - protein, 6 aa, Artificial Sequence
  Synthetic construct
QGISNY

SEQ ID NO: 5983 - protein, 6 aa, Artificial Sequence
  Synthetic construct
QSISSY

SEQ ID NO: 5984 - protein, 6 aa, Artificial Sequence
  Synthetic construct
QSVRSY

SEQ ID NO: 5985 - protein, 9 aa, Artificial Sequence
  Synthetic construct
SSDIGAYNY

SEQ ID NO: 5986 - protein, 7 aa, Artificial Sequence
  Synthetic construct
QSISSSY

SEQ ID NO: 5987 - protein, 8 aa, Artificial Sequence
  Synthetic construct
SSNIGSNY

SEQ ID NO: 5988 - protein, 6 aa, Artificial Sequence
  Synthetic construct
KLGDKY

SEQ ID NO: 5989 - protein, 9 aa, Artificial Sequence
  Synthetic construct
SSNIGAGFD

SEQ ID NO: 5990 - protein, 7 aa, Artificial Sequence
  Synthetic construct
QSVSSSY

SEQ ID NO: 5991 - protein, 6 aa, Artificial Sequence
  Synthetic construct
QSVSIY

SEQ ID NO: 5992 - protein, 6 aa, Artificial Sequence
  Synthetic construct
HIVSNY

SEQ ID NO: 5993 - protein, 11 aa, Artificial Sequence
  Synthetic construct
QSLLHSDGKTY

SEQ ID NO: 5994 - protein, 6 aa, Artificial Sequence
  Synthetic construct
QDISNY

SEQ ID NO: 5995 - protein, 9 aa, Artificial Sequence
  Synthetic construct
SSDVGSYNL

SEQ ID NO: 5996 - protein, 6 aa, Artificial Sequence
  Synthetic construct
QSVSSN

SEQ ID NO: 5997 - protein, 8 aa, Artificial Sequence
  Synthetic construct
SGSIASNS

SEQ ID NO: 5998 - protein, 8 aa, Artificial Sequence
  Synthetic construct
SSNIGINH

SEQ ID NO: 5999 - protein, 6 aa, Artificial Sequence
  Synthetic construct
QSISSW

SEQ ID NO: 6000 - protein, 6 aa, Artificial Sequence
  Synthetic construct
QSISTY

SEQ ID NO: 6001 - protein, 6 aa, Artificial Sequence
  Synthetic construct
ALPKKY

SEQ ID NO: 6002 - protein, 9 aa, Artificial Sequence
  Synthetic construct
SSDVGGSDH

SEQ ID NO: 6003 - protein, 7 aa, Artificial Sequence
  Synthetic construct
QSVTNSY

SEQ ID NO: 6004 - protein, 6 aa, Artificial Sequence
  Synthetic construct
QDISNY

SEQ ID NO: 6005 - protein, 6 aa, Artificial Sequence
  Synthetic construct
QGISSF

SEQ ID NO: 6006 - protein, 6 aa, Artificial Sequence
  Synthetic construct
ALPKQY

SEQ ID NO: 6007 - protein, 6 aa, Artificial Sequence
  Synthetic construct
QSISSY

SEQ ID NO: 6008 - protein, 9 aa, Artificial Sequence
  Synthetic construct
SSDIGGYNF

SEQ ID NO: 6009 - protein, 9 aa, Artificial Sequence
  Synthetic construct
SSNIGADYD

SEQ ID NO: 6010 - protein, 6 aa, Artificial Sequence
  Synthetic construct
QGISNY

SEQ ID NO: 6011 - protein, 7 aa, Artificial Sequence
  Synthetic construct
QSVSSIY

SEQ ID NO: 6012 - protein, 6 aa, Artificial Sequence
  Synthetic construct
HIVSNY

SEQ ID NO: 6013 - protein, 6 aa, Artificial Sequence
  Synthetic construct
QSVSSY

SEQ ID NO: 6014 - protein, 9 aa, Artificial Sequence
  Synthetic construct
SSNIGAGYD

SEQ ID NO: 6015 - protein, 6 aa, Artificial Sequence
  Synthetic construct
KLGDKY

SEQ ID NO: 6016 - protein, 8 aa, Artificial Sequence
  Synthetic construct
SSNIGNNA

SEQ ID NO: 6017 - protein, 9 aa, Artificial Sequence
  Synthetic construct
DSNIGAGYD

SEQ ID NO: 6018 - protein, 6 aa, Artificial Sequence
  Synthetic construct
SLRSYY

SEQ ID NO: 6019 - protein, 6 aa, Artificial Sequence
  Synthetic construct
KLGDKD

SEQ ID NO: 6020 - protein, 6 aa, Artificial Sequence
  Synthetic construct
NIGSES

SEQ ID NO: 6021 - protein, 6 aa, Artificial Sequence
  Synthetic construct
DWGEKD

SEQ ID NO: 6022 - protein, 11 aa, Artificial Sequence
  Synthetic construct
QSLLHDNGKTY

SEQ ID NO: 6023 - protein, 9 aa, Artificial Sequence
  Synthetic construct
SSDVGAYNF

SEQ ID NO: 6024 - protein, 6 aa, Artificial Sequence
  Synthetic construct
HSVSDN

SEQ ID NO: 6025 - protein, 9 aa, Artificial Sequence
  Synthetic construct
SSNIGAGYD

SEQ ID NO: 6026 - protein, 8 aa, Artificial Sequence
  Synthetic construct
SSNIGNNY

SEQ ID NO: 6027 - protein, 6 aa, Artificial Sequence
  Synthetic construct
ALPKKY

SEQ ID NO: 6028 - protein, 11 aa, Artificial Sequence
  Synthetic construct
QSLLHSNGYNY

SEQ ID NO: 6029 - protein, 6 aa, Artificial Sequence
  Synthetic construct
ALPKQY

SEQ ID NO: 6030 - protein, 6 aa, Artificial Sequence
  Synthetic construct
QSINSY

SEQ ID NO: 6031 - protein, 6 aa, Artificial Sequence
  Synthetic construct
QSIGNY

SEQ ID NO: 6032 - protein, 6 aa, Artificial Sequence
  Synthetic construct
QSVSSY

SEQ ID NO: 6033 - protein, 6 aa, Artificial Sequence
  Synthetic construct
QGISSY

SEQ ID NO: 6034 - protein, 6 aa, Artificial Sequence
  Synthetic construct
QSVSNF

SEQ ID NO: 6035 - protein, 9 aa, Artificial Sequence
  Synthetic construct
SSDVGSYNR

SEQ ID NO: 6036 - protein, 6 aa, Artificial Sequence
  Synthetic construct
QSLSSY

SEQ ID NO: 6037 - protein, 9 aa, Artificial Sequence
  Synthetic construct
SSDVGSYNL

SEQ ID NO: 6038 - protein, 6 aa, Artificial Sequence
  Synthetic construct
QSVSSY

SEQ ID NO: 6039 - protein, 8 aa, Artificial Sequence
  Synthetic construct
SSNIGTNT

SEQ ID NO: 6040 - protein, 6 aa, Artificial Sequence
  Synthetic construct
QSVGSY

SEQ ID NO: 6041 - protein, 9 aa, Artificial Sequence
  Synthetic construct
SDNVGSYDH

SEQ ID NO: 6042 - protein, 11 aa, Artificial Sequence
  Synthetic construct
QSLLHSDGKTY

SEQ ID NO: 6043 - protein, 6 aa, Artificial Sequence
  Synthetic construct
KLGDKY

SEQ ID NO: 6044 - protein, 11 aa, Artificial Sequence
  Synthetic construct
QSLLHSDGKTY

SEQ ID NO: 6045 - protein, 6 aa, Artificial Sequence
  Synthetic construct
QSVSSF

SEQ ID NO: 6046 - protein, 8 aa, Artificial Sequence
  Synthetic construct
SSNIGNNY

SEQ ID NO: 6047 - protein, 8 aa, Artificial Sequence
  Synthetic construct
SSNLGSNS

SEQ ID NO: 6048 - protein, 6 aa, Artificial Sequence
  Synthetic construct
ALPKQY

SEQ ID NO: 6049 - protein, 6 aa, Artificial Sequence
  Synthetic construct
ALSNQY

SEQ ID NO: 6050 - protein, 9 aa, Artificial Sequence
  Synthetic construct
SSDVGSYNL

SEQ ID NO: 6051 - protein, 6 aa, Artificial Sequence
  Synthetic construct
QSINSW

SEQ ID NO: 6052 - protein, 6 aa, Artificial Sequence
  Synthetic construct
QSVSSF

SEQ ID NO: 6053 - protein, 9 aa, Artificial Sequence
  Synthetic construct
TGAVTSGYY

SEQ ID NO: 6054 - protein, 6 aa, Artificial Sequence
  Synthetic construct
QSVSSY

SEQ ID NO: 6055 - protein, 6 aa, Artificial Sequence
  Synthetic construct
QDIRNH

SEQ ID NO: 6056 - protein, 6 aa, Artificial Sequence
  Synthetic construct
QTVSSN

SEQ ID NO: 6057 - protein, 6 aa, Artificial Sequence
  Synthetic construct
QDIRNY

SEQ ID NO: 6058 - protein, 6 aa, Artificial Sequence
  Synthetic construct
QDISNY

SEQ ID NO: 6059 - protein, 9 aa, Artificial Sequence
  Synthetic construct
SSNIGAGYD

SEQ ID NO: 6060 - protein, 6 aa, Artificial Sequence
  Synthetic construct
ESISTW

SEQ ID NO: 6061 - protein, 6 aa, Artificial Sequence
  Synthetic construct
ALPKQY

SEQ ID NO: 6062 - protein, 6 aa, Artificial Sequence
  Synthetic construct
QSISSY

SEQ ID NO: 6063 - protein, 9 aa, Artificial Sequence
  Synthetic construct
SSNIGARYD

SEQ ID NO: 6064 - protein, 6 aa, Artificial Sequence
  Synthetic construct
QGINNY

SEQ ID NO: 6065 - protein, 6 aa, Artificial Sequence
  Synthetic construct
QTVTTF

SEQ ID NO: 6066 - protein, 6 aa, Artificial Sequence
  Synthetic construct
QGISSN

SEQ ID NO: 6067 - protein, 9 aa, Artificial Sequence
  Synthetic construct
GSNIGAGYD

SEQ ID NO: 6068 - protein, 6 aa, Artificial Sequence
  Synthetic construct
QSVSSF

SEQ ID NO: 6069 - protein, 12 aa, Artificial Sequence
  Synthetic construct
QSVLYSSNNKNY

SEQ ID NO: 6070 - protein, 7 aa, Artificial Sequence
  Synthetic construct
QSVSSSY

SEQ ID NO: 6071 - protein, 8 aa, Artificial Sequence
  Synthetic construct
SSNIGSTY

SEQ ID NO: 6072 - protein, 6 aa, Artificial Sequence
  Synthetic construct
KLGDKY

SEQ ID NO: 6073 - protein, 6 aa, Artificial Sequence
  Synthetic construct
QSVGTF

SEQ ID NO: 6074 - protein, 6 aa, Artificial Sequence
  Synthetic construct
ALSRQY

SEQ ID NO: 6075 - protein, 6 aa, Artificial Sequence
  Synthetic construct
QSIGSY

SEQ ID NO: 6076 - protein, 6 aa, Artificial Sequence
  Synthetic construct
QGIRVD

SEQ ID NO: 6077 - protein, 6 aa, Artificial Sequence
  Synthetic construct
QGISSY

SEQ ID NO: 6078 - protein, 6 aa, Artificial Sequence
  Synthetic construct
QGISSW

SEQ ID NO: 6079 - protein, 9 aa, Artificial Sequence
  Synthetic construct
SSDVGSYDL

SEQ ID NO: 6080 - protein, 6 aa, Artificial Sequence
  Synthetic construct
KLGDNY

SEQ ID NO: 6081 - protein, 6 aa, Artificial Sequence
  Synthetic construct
QAISNY

SEQ ID NO: 6082 - protein, 7 aa, Artificial Sequence
  Synthetic construct
QSDSSSY

SEQ ID NO: 6083 - protein, 6 aa, Artificial Sequence
  Synthetic construct
HDINNY

SEQ ID NO: 6084 - protein, 7 aa, Artificial Sequence
  Synthetic construct
QSIRSSQ

SEQ ID NO: 6085 - protein, 8 aa, Artificial Sequence
  Synthetic construct
TSNIGDNY

SEQ ID NO: 6086 - protein, 8 aa, Artificial Sequence
  Synthetic construct
SSNIGSNY

SEQ ID NO: 6087 - protein, 6 aa, Artificial Sequence
  Synthetic construct
QSISSN

SEQ ID NO: 6088 - protein, 6 aa, Artificial Sequence
  Synthetic construct
ALPKQY

SEQ ID NO: 6089 - protein, 8 aa, Artificial Sequence
  Synthetic construct
ASNIGSNA

SEQ ID NO: 6090 - protein, 6 aa, Artificial Sequence
  Synthetic construct
SLRSYY

SEQ ID NO: 6091 - protein, 9 aa, Artificial Sequence
  Synthetic construct
SSDVGGYNF

SEQ ID NO: 6092 - protein, 6 aa, Artificial Sequence
  Synthetic construct
ALSKQY

SEQ ID NO: 6093 - protein, 12 aa, Artificial Sequence
  Synthetic construct
QTVLSRSNSKNY

SEQ ID NO: 6094 - protein, 9 aa, Artificial Sequence
  Synthetic construct
SSDIGAYNY

SEQ ID NO: 6095 - protein, 6 aa, Artificial Sequence
  Synthetic construct
QSVSSN

SEQ ID NO: 6096 - protein, 9 aa, Artificial Sequence
  Synthetic construct
SSDVGSFNL

SEQ ID NO: 6097 - protein, 8 aa, Artificial Sequence
  Synthetic construct
SSNIGNNY

SEQ ID NO: 6098 - protein, 6 aa, Artificial Sequence
  Synthetic construct
QAIGTD

SEQ ID NO: 6099 - protein, 7 aa, Artificial Sequence
  Synthetic construct
QSVSSSY

SEQ ID NO: 6100 - protein, 6 aa, Artificial Sequence
  Synthetic construct
DIGSKS

SEQ ID NO: 6101 - protein, 6 aa, Artificial Sequence
  Synthetic construct
QSVSSN

SEQ ID NO: 6102 - protein, 7 aa, Artificial Sequence
  Synthetic construct
QSVSNNY

SEQ ID NO: 6103 - protein, 6 aa, Artificial Sequence
  Synthetic construct
QSITSY

SEQ ID NO: 6104 - protein, 11 aa, Artificial Sequence
  Synthetic construct
QSLLHSNGNHY

SEQ ID NO: 6105 - protein, 9 aa, Artificial Sequence
  Synthetic construct
SSDVGGYNY

SEQ ID NO: 6106 - protein, 6 aa, Artificial Sequence
  Synthetic construct
QTISTF

SEQ ID NO: 6107 - protein, 6 aa, Artificial Sequence
  Synthetic construct
QSVHSN

SEQ ID NO: 6108 - protein, 9 aa, Artificial Sequence
  Synthetic construct
SGINVDTYI

SEQ ID NO: 6109 - protein, 9 aa, Artificial Sequence
  Synthetic construct
SSDIGGYNY

SEQ ID NO: 6110 - protein, 6 aa, Artificial Sequence
  Synthetic construct
QDIRNY

SEQ ID NO: 6111 - protein, 9 aa, Artificial Sequence
  Synthetic construct
SSDVGGYNY

SEQ ID NO: 6112 - protein, 6 aa, Artificial Sequence
  Synthetic construct
QSISNY

SEQ ID NO: 6113 - protein, 6 aa, Artificial Sequence
  Synthetic construct
QSVSSY

SEQ ID NO: 6114 - protein, 9 aa, Artificial Sequence
  Synthetic construct
SSDVGSYNL

SEQ ID NO: 6115 - protein, 9 aa, Artificial Sequence
  Synthetic construct
SSDVGTYNY

SEQ ID NO: 6116 - protein, 6 aa, Artificial Sequence
  Synthetic construct
QSVSSN

SEQ ID NO: 6117 - protein, 9 aa, Artificial Sequence
  Synthetic construct
SSSIGAGYD

SEQ ID NO: 6118 - protein, 8 aa, Artificial Sequence
  Synthetic construct
SGSIASNY

SEQ ID NO: 6119 - protein, 8 aa, Artificial Sequence
  Synthetic construct
SSNIGSNY

SEQ ID NO: 6120 - protein, 8 aa, Artificial Sequence
  Synthetic construct
SFNIGKNY

SEQ ID NO: 6121 - protein, 6 aa, Artificial Sequence
  Synthetic construct
QSISIW

SEQ ID NO: 6122 - protein, 6 aa, Artificial Sequence
  Synthetic construct
QSVSNF

SEQ ID NO: 6123 - protein, 6 aa, Artificial Sequence
  Synthetic construct
KLGDRY

SEQ ID NO: 6124 - protein, 7 aa, Artificial Sequence
  Synthetic construct
QSVSNNY

SEQ ID NO: 6125 - protein, 6 aa, Artificial Sequence
  Synthetic construct
QSVSSN

SEQ ID NO: 6126 - protein, 9 aa, Artificial Sequence
  Synthetic construct
RTDVGGYNY

SEQ ID NO: 6127 - protein, 6 aa, Artificial Sequence
  Synthetic construct
QGISNS

SEQ ID NO: 6128 - protein, 6 aa, Artificial Sequence
  Synthetic construct
QSVSSN

SEQ ID NO: 6129 - protein, 9 aa, Artificial Sequence
  Synthetic construct
TGAVTSGHY

SEQ ID NO: 6130 - protein, 7 aa, Artificial Sequence
  Synthetic construct
QSVSSTY

SEQ ID NO: 6131 - protein, 6 aa, Artificial Sequence
  Synthetic construct
ALAKQY

SEQ ID NO: 6132 - protein, 9 aa, Artificial Sequence
  Synthetic construct
SSNIGAGFD

SEQ ID NO: 6133 - protein, 9 aa, Artificial Sequence
  Synthetic construct
SSNIGTGYD

SEQ ID NO: 6134 - protein, 8 aa, Artificial Sequence
  Synthetic construct
DSNIGSNY

SEQ ID NO: 6135 - protein, 9 aa, Artificial Sequence
  Synthetic construct
SSNIGAGYD

SEQ ID NO: 6136 - protein, 6 aa, Artificial Sequence
  Synthetic construct
ALPKKY

SEQ ID NO: 6137 - protein, 8 aa, Artificial Sequence
  Synthetic construct
SSNIGSST

SEQ ID NO: 6138 - protein, 9 aa, Artificial Sequence
  Synthetic construct
SSNIGAGFD

SEQ ID NO: 6139 - protein, 9 aa, Artificial Sequence
  Synthetic construct
SSNIGAGFD

SEQ ID NO: 6140 - protein, 11 aa, Artificial Sequence
  Synthetic construct
QSLVHTDGNTY

SEQ ID NO: 6141 - protein, 9 aa, Artificial Sequence
  Synthetic construct
SGSVSTSYY

SEQ ID NO: 6142 - protein, 8 aa, Artificial Sequence
  Synthetic construct
SNNVGNQG

SEQ ID NO: 6143 - protein, 6 aa, Artificial Sequence
  Synthetic construct
ALPKKY

SEQ ID NO: 6144 - protein, 7 aa, Artificial Sequence
  Synthetic construct
QSVSSSY

SEQ ID NO: 6145 - protein, 9 aa, Artificial Sequence
  Synthetic construct
NSNIGAGYD

SEQ ID NO: 6146 - protein, 7 aa, Artificial Sequence
  Synthetic construct
QSVSSSY

SEQ ID NO: 6147 - protein, 6 aa, Artificial Sequence
  Synthetic construct
KLGNKY

SEQ ID NO: 6148 - protein, 7 aa, Artificial Sequence
  Synthetic construct
QSVNNNY

SEQ ID NO: 6149 - protein, 9 aa, Artificial Sequence
  Synthetic construct
SSAVGGYNY

SEQ ID NO: 6150 - protein, 9 aa, Artificial Sequence
  Synthetic construct
NSNIGAGYD

SEQ ID NO: 6151 - protein, 11 aa, Artificial Sequence
  Synthetic construct
QSLLFGNGYTY

SEQ ID NO: 6152 - protein, 6 aa, Artificial Sequence
  Synthetic construct
QGIRND

SEQ ID NO: 6153 - protein, 6 aa, Artificial Sequence
  Synthetic construct
DIGSKS

SEQ ID NO: 6154 - protein, 12 aa, Artificial Sequence
  Synthetic construct
QSVLYSSNNKNY

SEQ ID NO: 6155 - protein, 9 aa, Artificial Sequence
  Synthetic construct
SSDVGSYNL

SEQ ID NO: 6156 - protein, 9 aa, Artificial Sequence
  Synthetic construct
SSDVGGYNS

SEQ ID NO: 6157 - protein, 6 aa, Artificial Sequence
  Synthetic construct
ALPNKY

SEQ ID NO: 6158 - protein, 9 aa, Artificial Sequence
  Synthetic construct
SSDIGAFNY

SEQ ID NO: 6159 - protein, 6 aa, Artificial Sequence
  Synthetic construct
QSISSY

SEQ ID NO: 6160 - protein, 6 aa, Artificial Sequence
  Synthetic construct
QSISRW

SEQ ID NO: 6161 - protein, 7 aa, Artificial Sequence
  Synthetic construct
QSLSTSY

SEQ ID NO: 6162 - protein, 6 aa, Artificial Sequence
  Synthetic construct
QGISSY

SEQ ID NO: 6163 - protein, 6 aa, Artificial Sequence
  Synthetic construct
KLGDKY

SEQ ID NO: 6164 - protein, 7 aa, Artificial Sequence
  Synthetic construct
QSVAGTY

SEQ ID NO: 6165 - protein, 6 aa, Artificial Sequence
  Synthetic construct
QSINSN

SEQ ID NO: 6166 - protein, 12 aa, Artificial Sequence
  Synthetic construct
QSVLYSSNNNNY

SEQ ID NO: 6167 - protein, 6 aa, Artificial Sequence
  Synthetic construct
QSISSN

SEQ ID NO: 6168 - protein, 7 aa, Artificial Sequence
  Synthetic construct
QSVSSSY

SEQ ID NO: 6169 - protein, 9 aa, Artificial Sequence
  Synthetic construct
TSNIGASYD

SEQ ID NO: 6170 - protein, 11 aa, Artificial Sequence
  Synthetic construct
QSLLHGDGKTY

SEQ ID NO: 6171 - protein, 7 aa, Artificial Sequence
  Synthetic construct
QSISSSY

SEQ ID NO: 6172 - protein, 9 aa, Artificial Sequence
  Synthetic construct
RSNIGAGYD

SEQ ID NO: 6173 - protein, 9 aa, Artificial Sequence
  Synthetic construct
SSDVGSYNL

SEQ ID NO: 6174 - protein, 6 aa, Artificial Sequence
  Synthetic construct
QDISSY

SEQ ID NO: 6175 - protein, 7 aa, Artificial Sequence
  Synthetic construct
QSVNSNY

SEQ ID NO: 6176 - protein, 11 aa, Artificial Sequence
  Synthetic construct
QSLVYSDGNTY

SEQ ID NO: 6177 - protein, 6 aa, Artificial Sequence
  Synthetic construct
ALPKKY

SEQ ID NO: 6178 - protein, 6 aa, Artificial Sequence
  Synthetic construct
ALPKKY

SEQ ID NO: 6179 - protein, 6 aa, Artificial Sequence
  Synthetic construct
QSISAS

SEQ ID NO: 6180 - protein, 6 aa, Artificial Sequence
  Synthetic construct
QSVSNY

SEQ ID NO: 6181 - protein, 7 aa, Artificial Sequence
  Synthetic construct
QSVSSSY

SEQ ID NO: 6182 - protein, 6 aa, Artificial Sequence
  Synthetic construct
KLGDKY

SEQ ID NO: 6183 - protein, 6 aa, Artificial Sequence
  Synthetic construct
QSISSW

SEQ ID NO: 6184 - protein, 6 aa, Artificial Sequence
  Synthetic construct
QDIRND

SEQ ID NO: 6185 - protein, 9 aa, Artificial Sequence
  Synthetic construct
TGAVPSGYY

SEQ ID NO: 6186 - protein, 8 aa, Artificial Sequence
  Synthetic construct
TSNIGSHT

SEQ ID NO: 6187 - protein, 9 aa, Artificial Sequence
  Synthetic construct
SSDVGGYNY

SEQ ID NO: 6188 - protein, 6 aa, Artificial Sequence
  Synthetic construct
KLGDKY

SEQ ID NO: 6189 - protein, 6 aa, Artificial Sequence
  Synthetic construct
ALPKKY

SEQ ID NO: 6190 - protein, 11 aa, Artificial Sequence
  Synthetic construct
QSLLHSDGKTY

SEQ ID NO: 6191 - protein, 6 aa, Artificial Sequence
  Synthetic construct
ALPRKY

SEQ ID NO: 6192 - protein, 7 aa, Artificial Sequence
  Synthetic construct
QSVRSSY

SEQ ID NO: 6193 - protein, 11 aa, Artificial Sequence
  Synthetic construct
QSLLHSNGNNY

SEQ ID NO: 6194 - protein, 8 aa, Artificial Sequence
  Synthetic construct
SSNIGNNF

SEQ ID NO: 6195 - protein, 6 aa, Artificial Sequence
  Synthetic construct
QSVSSY

SEQ ID NO: 6196 - protein, 11 aa, Artificial Sequence
  Synthetic construct
QSLLHSDGKTY

SEQ ID NO: 6197 - protein, 7 aa, Artificial Sequence
  Synthetic construct
QSVSSIY

SEQ ID NO: 6198 - protein, 12 aa, Artificial Sequence
  Synthetic construct
QSVLYSFNNKNY

SEQ ID NO: 6199 - protein, 7 aa, Artificial Sequence
  Synthetic construct
ERVSSSY

SEQ ID NO: 6200 - protein, 6 aa, Artificial Sequence
  Synthetic construct
QTISNY

SEQ ID NO: 6201 - protein, 7 aa, Artificial Sequence
  Synthetic construct
QSVSSGH

SEQ ID NO: 6202 - protein, 9 aa, Artificial Sequence
  Synthetic construct
SSDVGGYNF

SEQ ID NO: 6203 - protein, 9 aa, Artificial Sequence
  Synthetic construct
SSDVGSYDL

SEQ ID NO: 6204 - protein, 7 aa, Artificial Sequence
  Synthetic construct
QSVSSRY

SEQ ID NO: 6205 - protein, 9 aa, Artificial Sequence
  Synthetic construct
SSDVGSYNY

SEQ ID NO: 6206 - protein, 6 aa, Artificial Sequence
  Synthetic construct
ALPKKY

SEQ ID NO: 6207 - protein, 6 aa, Artificial Sequence
  Synthetic construct
ESISTW

SEQ ID NO: 6208 - protein, 9 aa, Artificial Sequence
  Synthetic construct
SSNIGAGYG

SEQ ID NO: 6209 - protein, 6 aa, Artificial Sequence
  Synthetic construct
KLGDKY

SEQ ID NO: 6210 - protein, 8 aa, Artificial Sequence
  Synthetic construct
SSNIGSNS

SEQ ID NO: 6211 - protein, 8 aa, Artificial Sequence
  Synthetic construct
SSNIGSNY

SEQ ID NO: 6212 - protein, 6 aa, Artificial Sequence
  Synthetic construct
QSVSSY

SEQ ID NO: 6213 - protein, 6 aa, Artificial Sequence
  Synthetic construct
NIGGES

SEQ ID NO: 6214 - protein, 6 aa, Artificial Sequence
  Synthetic construct
QGISSY

SEQ ID NO: 6215 - protein, 6 aa, Artificial Sequence
  Synthetic construct
QSVSSN

SEQ ID NO: 6216 - protein, 9 aa, Artificial Sequence
  Synthetic construct
STDIGIYSY

SEQ ID NO: 6217 - protein, 6 aa, Artificial Sequence
  Synthetic construct
QSVSSN

SEQ ID NO: 6218 - protein, 9 aa, Artificial Sequence
  Synthetic construct
SSDVGGYNY

SEQ ID NO: 6219 - protein, 6 aa, Artificial Sequence
  Synthetic construct
QGISTY

SEQ ID NO: 6220 - protein, 6 aa, Artificial Sequence
  Synthetic construct
ALPKKY

SEQ ID NO: 6221 - protein, 6 aa, Artificial Sequence
  Synthetic construct
QSISSY

SEQ ID NO: 6222 - protein, 7 aa, Artificial Sequence
  Synthetic construct
QTITSNF

SEQ ID NO: 6223 - protein, 7 aa, Artificial Sequence
  Synthetic construct
QSVSSSY

SEQ ID NO: 6224 - protein, 6 aa, Artificial Sequence
  Synthetic construct
QGISSY

SEQ ID NO: 6225 - protein, 6 aa, Artificial Sequence
  Synthetic construct
ALPKKY

SEQ ID NO: 6226 - protein, 9 aa, Artificial Sequence
  Synthetic construct
SSNIGAGYD

SEQ ID NO: 6227 - protein, 9 aa, Artificial Sequence
  Synthetic construct
SSNIGAGYD

SEQ ID NO: 6228 - protein, 9 aa, Artificial Sequence
  Synthetic construct
SSDVGDYDS

SEQ ID NO: 6229 - protein, 12 aa, Artificial Sequence
  Synthetic construct
QSVLYSSDNKNY

SEQ ID NO: 6230 - protein, 12 aa, Artificial Sequence
  Synthetic construct
QSVLSNSSNKNY

SEQ ID NO: 6231 - protein, 8 aa, Artificial Sequence
  Synthetic construct
GSNIGSNT

SEQ ID NO: 6232 - protein, 6 aa, Artificial Sequence
  Synthetic construct
QSVSSN

SEQ ID NO: 6233 - protein, 6 aa, Artificial Sequence
  Synthetic construct
ALPNQY

SEQ ID NO: 6234 - protein, 7 aa, Artificial Sequence
  Synthetic construct
HSVSNSY

SEQ ID NO: 6235 - protein, 8 aa, Artificial Sequence
  Synthetic construct
SSNIGINY

SEQ ID NO: 6236 - protein, 6 aa, Artificial Sequence
  Synthetic construct
QSISSH

SEQ ID NO: 6237 - protein, 8 aa, Artificial Sequence
  Synthetic construct
SSNIGSNT

SEQ ID NO: 6238 - protein, 6 aa, Artificial Sequence
  Synthetic construct
ALPKKY

SEQ ID NO: 6239 - protein, 6 aa, Artificial Sequence
  Synthetic construct
QGVSSW

SEQ ID NO: 6240 - protein, 6 aa, Artificial Sequence
  Synthetic construct
QSISNN

SEQ ID NO: 6241 - protein, 9 aa, Artificial Sequence
  Synthetic construct
SSNIGGDYD

SEQ ID NO: 6242 - protein, 9 aa, Artificial Sequence
  Synthetic construct
SSDVGGYTY

SEQ ID NO: 6243 - protein, 7 aa, Artificial Sequence
  Synthetic construct
QSVSSTY

SEQ ID NO: 6244 - protein, 9 aa, Artificial Sequence
  Synthetic construct
SSDVGGYNY

SEQ ID NO: 6245 - protein, 6 aa, Artificial Sequence
  Synthetic construct
RTISTW

SEQ ID NO: 6246 - protein, 9 aa, Artificial Sequence
  Synthetic construct
SSNIGAGYD

SEQ ID NO: 6247 - protein, 12 aa, Artificial Sequence
  Synthetic construct
QSVLYSSNNKDY

SEQ ID NO: 6248 - protein, 9 aa, Artificial Sequence
  Synthetic construct
SSDIGHYNF

SEQ ID NO: 6249 - protein, 9 aa, Artificial Sequence
  Synthetic construct
SNDVGAYNY

SEQ ID NO: 6250 - protein, 6 aa, Artificial Sequence
  Synthetic construct
ALPKQY

SEQ ID NO: 6251 - protein, 6 aa, Artificial Sequence
  Synthetic construct
KLGDKY

SEQ ID NO: 6252 - protein, 11 aa, Artificial Sequence
  Synthetic construct
QSLLHSNGYNF

SEQ ID NO: 6253 - protein, 6 aa, Artificial Sequence
  Synthetic construct
QSISSW

SEQ ID NO: 6254 - protein, 9 aa, Artificial Sequence
  Synthetic construct
SSNVGGYNH

SEQ ID NO: 6255 - protein, 6 aa, Artificial Sequence
  Synthetic construct
QTISSF

SEQ ID NO: 6256 - protein, 12 aa, Artificial Sequence
  Synthetic construct
QSVLYSSNNKNF

SEQ ID NO: 6257 - protein, 9 aa, Artificial Sequence
  Synthetic construct
SSDVGGYNY

SEQ ID NO: 6258 - protein, 7 aa, Artificial Sequence
  Synthetic construct
QSVSSSY

SEQ ID NO: 6259 - protein, 6 aa, Artificial Sequence
  Synthetic construct
QSVGSN

SEQ ID NO: 6260 - protein, 9 aa, Artificial Sequence
  Synthetic construct
SSDVGAYDS

SEQ ID NO: 6261 - protein, 8 aa, Artificial Sequence
  Synthetic construct
SSNIGSNT

SEQ ID NO: 6262 - protein, 8 aa, Artificial Sequence
  Synthetic construct
SSNIGSNF

SEQ ID NO: 6263 - protein, 6 aa, Artificial Sequence
  Synthetic construct
ALPKQY

SEQ ID NO: 6264 - protein, 6 aa, Artificial Sequence
  Synthetic construct
QSVSSY

SEQ ID NO: 6265 - protein, 7 aa, Artificial Sequence
  Synthetic construct
QSVRGTF

SEQ ID NO: 6266 - protein, 6 aa, Artificial Sequence
  Synthetic construct
QGISSW

SEQ ID NO: 6267 - protein, 6 aa, Artificial Sequence
  Synthetic construct
QTIISY

SEQ ID NO: 6268 - protein, 9 aa, Artificial Sequence
  Synthetic construct
SSDVGGYDY

SEQ ID NO: 6269 - protein, 8 aa, Artificial Sequence
  Synthetic construct
SSNIGSNT

SEQ ID NO: 6270 - protein, 7 aa, Artificial Sequence
  Synthetic construct
QSVSSSH

SEQ ID NO: 6271 - protein, 6 aa, Artificial Sequence
  Synthetic construct
QSVSSN

SEQ ID NO: 6272 - protein, 6 aa, Artificial Sequence
  Synthetic construct
KLGDKN

SEQ ID NO: 6273 - protein, 6 aa, Artificial Sequence
  Synthetic construct
QSVSSY

SEQ ID NO: 6274 - protein, 6 aa, Artificial Sequence
  Synthetic construct
QSISSY

SEQ ID NO: 6275 - protein, 6 aa, Artificial Sequence
  Synthetic construct
QNITYY

SEQ ID NO: 6276 - protein, 6 aa, Artificial Sequence
  Synthetic construct
QIISRW

SEQ ID NO: 6277 - protein, 12 aa, Artificial Sequence
  Synthetic construct
QSVLFSSNNKNY

SEQ ID NO: 6278 - protein, 6 aa, Artificial Sequence
  Synthetic construct
ALSNQY

SEQ ID NO: 6279 - protein, 7 aa, Artificial Sequence
  Synthetic construct
QSVSSTY

SEQ ID NO: 6280 - protein, 12 aa, Artificial Sequence
  Synthetic construct
QSVLYSSNNKNY

SEQ ID NO: 6281 - protein, 7 aa, Artificial Sequence
  Synthetic construct
QSVSSTY

SEQ ID NO: 6282 - protein, 9 aa, Artificial Sequence
  Synthetic construct
TGAVTNDHY

SEQ ID NO: 6283 - protein, 6 aa, Artificial Sequence
  Synthetic construct
SLRSYY

SEQ ID NO: 6284 - protein, 12 aa, Artificial Sequence
  Synthetic construct
QSVLYTSNNKNY

SEQ ID NO: 6285 - protein, 6 aa, Artificial Sequence
  Synthetic construct
ALPKKY

SEQ ID NO: 6286 - protein, 8 aa, Artificial Sequence
  Synthetic construct
SSNIGANT

SEQ ID NO: 6287 - protein, 9 aa, Artificial Sequence
  Synthetic construct
SSDVGSYDH

SEQ ID NO: 6288 - protein, 9 aa, Artificial Sequence
  Synthetic construct
SSDVGGYNY

SEQ ID NO: 6289 - protein, 8 aa, Artificial Sequence
  Synthetic construct
SSNIGNHY

SEQ ID NO: 6290 - protein, 6 aa, Artificial Sequence
  Synthetic construct
QSVRSN

SEQ ID NO: 6291 - protein, 9 aa, Artificial Sequence
  Synthetic construct
TGAVTSGHY

SEQ ID NO: 6292 - protein, 6 aa, Artificial Sequence
  Synthetic construct
QSISTF

SEQ ID NO: 6293 - protein, 6 aa, Artificial Sequence
  Synthetic construct
KLGDKY

SEQ ID NO: 6294 - protein, 6 aa, Artificial Sequence
  Synthetic construct
QSVSSN

SEQ ID NO: 6295 - protein, 6 aa, Artificial Sequence
  Synthetic construct
KLGDKN

SEQ ID NO: 6296 - protein, 6 aa, Artificial Sequence
  Synthetic construct
QSVSSN

SEQ ID NO: 6297 - protein, 7 aa, Artificial Sequence
  Synthetic construct
QTISSNS

SEQ ID NO: 6298 - protein, 9 aa, Artificial Sequence
  Synthetic construct
SSDVGGYNY

SEQ ID NO: 6299 - protein, 9 aa, Artificial Sequence
  Synthetic construct
SSDVGSYNL

SEQ ID NO: 6300 - protein, 9 aa, Artificial Sequence
  Synthetic construct
SSNIGAGYD

SEQ ID NO: 6301 - protein, 6 aa, Artificial Sequence
  Synthetic construct
QSISSY

SEQ ID NO: 6302 - protein, 6 aa, Artificial Sequence
  Synthetic construct
QSISDW

SEQ ID NO: 6303 - protein, 12 aa, Artificial Sequence
  Synthetic construct
QSVLFSSNNKNY

SEQ ID NO: 6304 - protein, 6 aa, Artificial Sequence
  Synthetic construct
QGISSW

SEQ ID NO: 6305 - protein, 9 aa, Artificial Sequence
  Synthetic construct
TGAVTSGHY

SEQ ID NO: 6306 - protein, 6 aa, Artificial Sequence
  Synthetic construct
QSVSSY

SEQ ID NO: 6307 - protein, 9 aa, Artificial Sequence
  Synthetic construct
SSDVGGSDH

SEQ ID NO: 6308 - protein, 9 aa, Artificial Sequence
  Synthetic construct
SSDIGGYNY

SEQ ID NO: 6309 - protein, 7 aa, Artificial Sequence
  Synthetic construct
QSVSSSF

SEQ ID NO: 6310 - protein, 9 aa, Artificial Sequence
  Synthetic construct
ISDVGSYNR

SEQ ID NO: 6311 - protein, 9 aa, Artificial Sequence
  Synthetic construct
NSDIGSYNL

SEQ ID NO: 6312 - protein, 11 aa, Artificial Sequence
  Synthetic construct
ESLLHGDGKTY

SEQ ID NO: 6313 - protein, 7 aa, Artificial Sequence
  Synthetic construct
RSVSGIY

SEQ ID NO: 6314 - protein, 9 aa, Artificial Sequence
  Synthetic construct
SSDVGSYNL

SEQ ID NO: 6315 - protein, 9 aa, Artificial Sequence
  Synthetic construct
SSDVGSYNL

SEQ ID NO: 6316 - protein, 7 aa, Artificial Sequence
  Synthetic construct
QSVSSSY

SEQ ID NO: 6317 - protein, 6 aa, Artificial Sequence
  Synthetic construct
QTISSY

SEQ ID NO: 6318 - protein, 11 aa, Artificial Sequence
  Synthetic construct
QSLVYSDGNTY

SEQ ID NO: 6319 - protein, 8 aa, Artificial Sequence
  Synthetic construct
TSNIGSNA

SEQ ID NO: 6320 - protein, 6 aa, Artificial Sequence
  Synthetic construct
ALPKKY

SEQ ID NO: 6321 - protein, 9 aa, Artificial Sequence
  Synthetic construct
SSDIGSYNL

SEQ ID NO: 6322 - protein, 11 aa, Artificial Sequence
  Synthetic construct
QSLLHFNGYTY

SEQ ID NO: 6323 - protein, 7 aa, Artificial Sequence
  Synthetic construct
QSVTSIY

SEQ ID NO: 6324 - protein, 6 aa, Artificial Sequence
  Synthetic construct
QSVSSF

SEQ ID NO: 6325 - protein, 9 aa, Artificial Sequence
  Synthetic construct
SRDVGAYNF

SEQ ID NO: 6326 - protein, 9 aa, Artificial Sequence
  Synthetic construct
SSNIGAGYD

SEQ ID NO: 6327 - protein, 6 aa, Artificial Sequence
  Synthetic construct
QSVSSY

SEQ ID NO: 6328 - protein, 7 aa, Artificial Sequence
  Synthetic construct
QSVSSSY

SEQ ID NO: 6329 - protein, 6 aa, Artificial Sequence
  Synthetic construct
QNISTF

SEQ ID NO: 6330 - protein, 6 aa, Artificial Sequence
  Synthetic construct
QNINTY

SEQ ID NO: 6331 - protein, 9 aa, Artificial Sequence
  Synthetic construct
GSDVGGYNY

SEQ ID NO: 6332 - protein, 6 aa, Artificial Sequence
  Synthetic construct
ALPQKY

SEQ ID NO: 6333 - protein, 6 aa, Artificial Sequence
  Synthetic construct
QSVSSF

SEQ ID NO: 6334 - protein, 11 aa, Artificial Sequence
  Synthetic construct
QSLVYSDGNTY

SEQ ID NO: 6335 - protein, 6 aa, Artificial Sequence
  Synthetic construct
QTIGKY

SEQ ID NO: 6336 - protein, 11 aa, Artificial Sequence
  Synthetic construct
QSLLFTNGYTY

SEQ ID NO: 6337 - protein, 9 aa, Artificial Sequence
  Synthetic construct
SSDIGGYNY

SEQ ID NO: 6338 - protein, 8 aa, Artificial Sequence
  Synthetic construct
SSNIGNNY

SEQ ID NO: 6339 - protein, 11 aa, Artificial Sequence
  Synthetic construct
QSLLHSNGYNY

SEQ ID NO: 6340 - protein, 9 aa, Artificial Sequence
  Synthetic construct
NSNIGAGYD

SEQ ID NO: 6341 - protein, 8 aa, Artificial Sequence
  Synthetic construct
SSNIGSNF

SEQ ID NO: 6342 - protein, 6 aa, Artificial Sequence
  Synthetic construct
QTISSY

SEQ ID NO: 6343 - protein, 11 aa, Artificial Sequence
  Synthetic construct
QSLVYSDGDTY

SEQ ID NO: 6344 - protein, 11 aa, Artificial Sequence
  Synthetic construct
QSLLHSNGNHY

SEQ ID NO: 6345 - protein, 11 aa, Artificial Sequence
  Synthetic construct
QSLVHSDGNTY

SEQ ID NO: 6346 - protein, 6 aa, Artificial Sequence
  Synthetic construct
QSVSTF

SEQ ID NO: 6347 - protein, 7 aa, Artificial Sequence
  Synthetic construct
QSVSSSY

SEQ ID NO: 6348 - protein, 11 aa, Artificial Sequence
  Synthetic construct
QSLLHSDGKTY

SEQ ID NO: 6349 - protein, 7 aa, Artificial Sequence
  Synthetic construct
QSVSSSK

SEQ ID NO: 6350 - protein, 6 aa, Artificial Sequence
  Synthetic construct
QSITRW

SEQ ID NO: 6351 - protein, 11 aa, Artificial Sequence
  Synthetic construct
ESLVYSDGNNY

SEQ ID NO: 6352 - protein, 8 aa, Artificial Sequence
  Synthetic construct
SSNIGNHY

SEQ ID NO: 6353 - protein, 9 aa, Artificial Sequence
  Synthetic construct
NSDVGDFNY

SEQ ID NO: 6354 - protein, 11 aa, Artificial Sequence
  Synthetic construct
QSLVYSDGNTY

SEQ ID NO: 6355 - protein, 6 aa, Artificial Sequence
  Synthetic construct
SLRKYY

SEQ ID NO: 6356 - protein, 6 aa, Artificial Sequence
  Synthetic construct
QSVSNF

SEQ ID NO: 6357 - protein, 6 aa, Artificial Sequence
  Synthetic construct
QSISSW

SEQ ID NO: 6358 - protein, 9 aa, Artificial Sequence
  Synthetic construct
SSDVGGYNY

SEQ ID NO: 6359 - protein, 6 aa, Artificial Sequence
  Synthetic construct
KLGDKY

SEQ ID NO: 6360 - protein, 6 aa, Artificial Sequence
  Synthetic construct
KLGDKY

SEQ ID NO: 6361 - protein, 6 aa, Artificial Sequence
  Synthetic construct
QSISSS

SEQ ID NO: 6362 - protein, 9 aa, Artificial Sequence
  Synthetic construct
SSDVGAYNY

SEQ ID NO: 6363 - protein, 6 aa, Artificial Sequence
  Synthetic construct
QSISSY

SEQ ID NO: 6364 - protein, 7 aa, Artificial Sequence
  Synthetic construct
QSVTSIY

SEQ ID NO: 6365 - protein, 8 aa, Artificial Sequence
  Synthetic construct
SSNIGNNY

SEQ ID NO: 6366 - protein, 8 aa, Artificial Sequence
  Synthetic construct
SSNIGNNA

SEQ ID NO: 6367 - protein, 9 aa, Artificial Sequence
  Synthetic construct
TGAVTSGLY

SEQ ID NO: 6368 - protein, 6 aa, Artificial Sequence
  Synthetic construct
QTISRN

SEQ ID NO: 6369 - protein, 8 aa, Artificial Sequence
  Synthetic construct
SSNIGSNT

SEQ ID NO: 6370 - protein, 9 aa, Artificial Sequence
  Synthetic construct
SSDIGAYNY

SEQ ID NO: 6371 - protein, 9 aa, Artificial Sequence
  Synthetic construct
SSDVGGYIY

SEQ ID NO: 6372 - protein, 12 aa, Artificial Sequence
  Synthetic construct
QSVLYSSNNKNY

SEQ ID NO: 6373 - protein, 6 aa, Artificial Sequence
  Synthetic construct
NFGSER

SEQ ID NO: 6374 - protein, 6 aa, Artificial Sequence
  Synthetic construct
QSVSSF

SEQ ID NO: 6375 - protein, 6 aa, Artificial Sequence
  Synthetic construct
EDINNY

SEQ ID NO: 6376 - protein, 6 aa, Artificial Sequence
  Synthetic construct
QSISSY

SEQ ID NO: 6377 - protein, 9 aa, Artificial Sequence
  Synthetic construct
TSNIGAGYD

SEQ ID NO: 6378 - protein, 9 aa, Artificial Sequence
  Synthetic construct
SSDVGGYKY

SEQ ID NO: 6379 - protein, 12 aa, Artificial Sequence
  Synthetic construct
QSVLLSSNNKNY

SEQ ID NO: 6380 - protein, 6 aa, Artificial Sequence
  Synthetic construct
QSISSF

SEQ ID NO: 6381 - protein, 6 aa, Artificial Sequence
  Synthetic construct
KLGDKY

SEQ ID NO: 6382 - protein, 8 aa, Artificial Sequence
  Synthetic construct
SSNIGNNA

SEQ ID NO: 6383 - protein, 9 aa, Artificial Sequence
  Synthetic construct
SSDVGGYNY

SEQ ID NO: 6384 - protein, 6 aa, Artificial Sequence
  Synthetic construct
QDIYNY

SEQ ID NO: 6385 - protein, 6 aa, Artificial Sequence
  Synthetic construct
QSVSNF

SEQ ID NO: 6386 - protein, 6 aa, Artificial Sequence
  Synthetic construct
NIGRKS

SEQ ID NO: 6387 - protein, 6 aa, Artificial Sequence
  Synthetic construct
QGISSW

SEQ ID NO: 6388 - protein, 9 aa, Artificial Sequence
  Synthetic construct
SSDVGAFNY

SEQ ID NO: 6389 - protein, 6 aa, Artificial Sequence
  Synthetic construct
QSISRY

SEQ ID NO: 6390 - protein, 7 aa, Artificial Sequence
  Synthetic construct
QSVSSSY

SEQ ID NO: 6391 - protein, 9 aa, Artificial Sequence
  Synthetic construct
SSDVGIFNL

SEQ ID NO: 6392 - protein, 6 aa, Artificial Sequence
  Synthetic construct
QGISSW

SEQ ID NO: 6393 - protein, 12 aa, Artificial Sequence
  Synthetic construct
QSVLYSSNNKNF

SEQ ID NO: 6394 - protein, 6 aa, Artificial Sequence
  Synthetic construct
SLRSYY

SEQ ID NO: 6395 - protein, 7 aa, Artificial Sequence
  Synthetic construct
QSVSSSY

SEQ ID NO: 6396 - protein, 11 aa, Artificial Sequence
  Synthetic construct
QSLLFSNGYTY

SEQ ID NO: 6397 - protein, 6 aa, Artificial Sequence
  Synthetic construct
QGIRND

SEQ ID NO: 6398 - protein, 6 aa, Artificial Sequence
  Synthetic construct
QTISTS

SEQ ID NO: 6399 - protein, 9 aa, Artificial Sequence
  Synthetic construct
GSNIGVGYD

SEQ ID NO: 6400 - protein, 6 aa, Artificial Sequence
  Synthetic construct
QGISGY

SEQ ID NO: 6401 - protein, 6 aa, Artificial Sequence
  Synthetic construct
KLGNRY

SEQ ID NO: 6402 - protein, 6 aa, Artificial Sequence
  Synthetic construct
ALPNQY

SEQ ID NO: 6403 - protein, 6 aa, Artificial Sequence
  Synthetic construct
QSISNY

SEQ ID NO: 6404 - protein, 11 aa, Artificial Sequence
  Synthetic construct
QSLVHSDGDTY

SEQ ID NO: 6405 - protein, 6 aa, Artificial Sequence
  Synthetic construct
KLGDKY

SEQ ID NO: 6406 - protein, 6 aa, Artificial Sequence
  Synthetic construct
QSISRY

SEQ ID NO: 6407 - protein, 6 aa, Artificial Sequence
  Synthetic construct
QSVGSY

SEQ ID NO: 6408 - protein, 6 aa, Artificial Sequence
  Synthetic construct
QGISSW

SEQ ID NO: 6409 - protein, 9 aa, Artificial Sequence
  Synthetic construct
SSDVGSYNL

SEQ ID NO: 6410 - protein, 6 aa, Artificial Sequence
  Synthetic construct
QSVRSN

SEQ ID NO: 6411 - protein, 7 aa, Artificial Sequence
  Synthetic construct
QSVSSSY

SEQ ID NO: 6412 - protein, 6 aa, Artificial Sequence
  Synthetic construct
QSISSW

SEQ ID NO: 6413 - protein, 11 aa, Artificial Sequence
  Synthetic construct
QSLLHSNGYNY

SEQ ID NO: 6414 - protein, 6 aa, Artificial Sequence
  Synthetic construct
ALPKQY

SEQ ID NO: 6415 - protein, 7 aa, Artificial Sequence
  Synthetic construct
QPVGNNY

SEQ ID NO: 6416 - protein, 6 aa, Artificial Sequence
  Synthetic construct
QSVSSF

SEQ ID NO: 6417 - protein, 7 aa, Artificial Sequence
  Synthetic construct
QSVGSIY

SEQ ID NO: 6418 - protein, 8 aa, Artificial Sequence
  Synthetic construct
SGSIDSNS

SEQ ID NO: 6419 - protein, 6 aa, Artificial Sequence
  Synthetic construct
QSISGY

SEQ ID NO: 6420 - protein, 6 aa, Artificial Sequence
  Synthetic construct
ALPKKY

SEQ ID NO: 6421 - protein, 11 aa, Artificial Sequence
  Synthetic construct
QSLLHSNGYNY

SEQ ID NO: 6422 - protein, 9 aa, Artificial Sequence
  Synthetic construct
SSDAGGYKC

SEQ ID NO: 6423 - protein, 6 aa, Artificial Sequence
  Synthetic construct
QSINNW

SEQ ID NO: 6424 - protein, 9 aa, Artificial Sequence
  Synthetic construct
SSSIGAGYD

SEQ ID NO: 6425 - protein, 8 aa, Artificial Sequence
  Synthetic construct
TSNIGYNP

SEQ ID NO: 6426 - protein, 6 aa, Artificial Sequence
  Synthetic construct
SLRKYY

SEQ ID NO: 6427 - protein, 7 aa, Artificial Sequence
  Synthetic construct
QSISSSY

SEQ ID NO: 6428 - protein, 9 aa, Artificial Sequence
  Synthetic construct
SGINVGTYR

SEQ ID NO: 6429 - protein, 9 aa, Artificial Sequence
  Synthetic construct
SSDVGFYNY

SEQ ID NO: 6430 - protein, 9 aa, Artificial Sequence
  Synthetic construct
SSDVGGYNY

SEQ ID NO: 6431 - protein, 6 aa, Artificial Sequence
  Synthetic construct
QRVSTW

SEQ ID NO: 6432 - protein, 6 aa, Artificial Sequence
  Synthetic construct
ALPKKY

SEQ ID NO: 6433 - protein, 9 aa, Artificial Sequence
  Synthetic construct
SSDIGGYDY

SEQ ID NO: 6434 - protein, 8 aa, Artificial Sequence
  Synthetic construct
SSNIGSNT

SEQ ID NO: 6435 - protein, 9 aa, Artificial Sequence
  Synthetic construct
SSNIGAGHD

SEQ ID NO: 6436 - protein, 6 aa, Artificial Sequence
  Synthetic construct
NIGGHS

SEQ ID NO: 6437 - protein, 9 aa, Artificial Sequence
  Synthetic construct
GSNIGAGYD

SEQ ID NO: 6438 - protein, 9 aa, Artificial Sequence
  Synthetic construct
SSDVGDYNY

SEQ ID NO: 6439 - protein, 6 aa, Artificial Sequence
  Synthetic construct
QSINSK

SEQ ID NO: 6440 - protein, 6 aa, Artificial Sequence
  Synthetic construct
QSVSNF

SEQ ID NO: 6441 - protein, 9 aa, Artificial Sequence
  Synthetic construct
SSDVGGYNY

SEQ ID NO: 6442 - protein, 12 aa, Artificial Sequence
  Synthetic construct
QSVLYSSNKKNY

SEQ ID NO: 6443 - protein, 6 aa, Artificial Sequence
  Synthetic construct
QSVSSF

SEQ ID NO: 6444 - protein, 6 aa, Artificial Sequence
  Synthetic construct
QDISNS

SEQ ID NO: 6445 - protein, 9 aa, Artificial Sequence
  Synthetic construct
SSDVGGYHY

SEQ ID NO: 6446 - protein, 6 aa, Artificial Sequence
  Synthetic construct
KLGDKY

SEQ ID NO: 6447 - protein, 6 aa, Artificial Sequence
  Synthetic construct
ALPKKY

SEQ ID NO: 6448 - protein, 6 aa, Artificial Sequence
  Synthetic construct
QSISSF

SEQ ID NO: 6449 - protein, 6 aa, Artificial Sequence
  Synthetic construct
QDISNY

SEQ ID NO: 6450 - protein, 8 aa, Artificial Sequence
  Synthetic construct
SSDIGSNT

SEQ ID NO: 6451 - protein, 8 aa, Artificial Sequence
  Synthetic construct
SSNIGSNA

SEQ ID NO: 6452 - protein, 6 aa, Artificial Sequence
  Synthetic construct
HFVSNY

SEQ ID NO: 6453 - protein, 6 aa, Artificial Sequence
  Synthetic construct
QSVSIN

SEQ ID NO: 6454 - protein, 6 aa, Artificial Sequence
  Synthetic construct
QSVSSY

SEQ ID NO: 6455 - protein, 11 aa, Artificial Sequence
  Synthetic construct
QSLLHSDGKTY

SEQ ID NO: 6456 - protein, 8 aa, Artificial Sequence
  Synthetic construct
RSNIGNNY

SEQ ID NO: 6457 - protein, 6 aa, Artificial Sequence
  Synthetic construct
QSISSW

SEQ ID NO: 6458 - protein, 6 aa, Artificial Sequence
  Synthetic construct
QSISTY

SEQ ID NO: 6459 - protein, 6 aa, Artificial Sequence
  Synthetic construct
NIGSKS

SEQ ID NO: 6460 - protein, 9 aa, Artificial Sequence
  Synthetic construct
SSNIGAGYD

SEQ ID NO: 6461 - protein, 6 aa, Artificial Sequence
  Synthetic construct
QSISSW

SEQ ID NO: 6462 - protein, 6 aa, Artificial Sequence
  Synthetic construct
QSISTY

SEQ ID NO: 6463 - protein, 7 aa, Artificial Sequence
  Synthetic construct
QSVSSSY

SEQ ID NO: 6464 - protein, 9 aa, Artificial Sequence
  Synthetic construct
SSDVGGYNY

SEQ ID NO: 6465 - protein, 11 aa, Artificial Sequence
  Synthetic construct
QSLLHSNGYNY

SEQ ID NO: 6466 - protein, 6 aa, Artificial Sequence
  Synthetic construct
KWGDKD

SEQ ID NO: 6467 - protein, 9 aa, Artificial Sequence
  Synthetic construct
SSDVGGYIY

SEQ ID NO: 6468 - protein, 8 aa, Artificial Sequence
  Synthetic construct
SSNIGSNP

SEQ ID NO: 6469 - protein, 8 aa, Artificial Sequence
  Synthetic construct
SSHIGSNY

SEQ ID NO: 6470 - protein, 12 aa, Artificial Sequence
  Synthetic construct
QSVLYSSTNRNY

SEQ ID NO: 6471 - protein, 11 aa, Artificial Sequence
  Synthetic construct
QSLVYSDGNSH

SEQ ID NO: 6472 - protein, 6 aa, Artificial Sequence
  Synthetic construct
QSVSSN

SEQ ID NO: 6473 - protein, 6 aa, Artificial Sequence
  Synthetic construct
KLGDKF

SEQ ID NO: 6474 - protein, 6 aa, Artificial Sequence
  Synthetic construct
KLGDNY

SEQ ID NO: 6475 - protein, 6 aa, Artificial Sequence
  Synthetic construct
QSVSSN

SEQ ID NO: 6476 - protein, 6 aa, Artificial Sequence
  Synthetic construct
KLDTKY

SEQ ID NO: 6477 - protein, 12 aa, Artificial Sequence
  Synthetic construct
QSVLYSSNNRNY

SEQ ID NO: 6478 - protein, 9 aa, Artificial Sequence
  Synthetic construct
SSDVGGYNS

SEQ ID NO: 6479 - protein, 8 aa, Artificial Sequence
  Synthetic construct
SSNIGTNT

SEQ ID NO: 6480 - protein, 9 aa, Artificial Sequence
  Synthetic construct
SSNIGAGYD

SEQ ID NO: 6481 - protein, 6 aa, Artificial Sequence
  Synthetic construct
QSVSSY

SEQ ID NO: 6482 - protein, 7 aa, Artificial Sequence
  Synthetic construct
SGHSSYI

SEQ ID NO: 6483 - protein, 6 aa, Artificial Sequence
  Synthetic construct
QGISNY

SEQ ID NO: 6484 - protein, 12 aa, Artificial Sequence
  Synthetic construct
QSVLYSSDNKNY

SEQ ID NO: 6485 - protein, 9 aa, Artificial Sequence
  Synthetic construct
SSDVGSNNL

SEQ ID NO: 6486 - protein, 6 aa, Artificial Sequence
  Synthetic construct
KLGDKY

SEQ ID NO: 6487 - protein, 9 aa, Artificial Sequence
  Synthetic construct
SSDVGGYNY

SEQ ID NO: 6488 - protein, 9 aa, Artificial Sequence
  Synthetic construct
SSDVGGYNY

SEQ ID NO: 6489 - protein, 6 aa, Artificial Sequence
  Synthetic construct
QSVSSY

SEQ ID NO: 6490 - protein, 6 aa, Artificial Sequence
  Synthetic construct
QSVSRY

SEQ ID NO: 6491 - protein, 6 aa, Artificial Sequence
  Synthetic construct
SLSNYF

SEQ ID NO: 6492 - protein, 6 aa, Artificial Sequence
  Synthetic construct
QSVSSN

SEQ ID NO: 6493 - protein, 7 aa, Artificial Sequence
  Synthetic construct
QSVSSNY

SEQ ID NO: 6494 - protein, 7 aa, Artificial Sequence
  Synthetic construct
QTVSSRY

SEQ ID NO: 6495 - protein, 9 aa, Artificial Sequence
  Synthetic construct
SSNIGAGFD

SEQ ID NO: 6496 - protein, 6 aa, Artificial Sequence
  Synthetic construct
ALPKQY

SEQ ID NO: 6497 - protein, 6 aa, Artificial Sequence
  Synthetic construct
TSISTW

SEQ ID NO: 6498 - protein, 11 aa, Artificial Sequence
  Synthetic construct
QSLLHSDGKTY

SEQ ID NO: 6499 - protein, 9 aa, Artificial Sequence
  Synthetic construct
SSNIGAGFD

SEQ ID NO: 6500 - protein, 6 aa, Artificial Sequence
  Synthetic construct
SLRKYY

SEQ ID NO: 6501 - protein, 11 aa, Artificial Sequence
  Synthetic construct
QSLVHSDGNTY

SEQ ID NO: 6502 - protein, 6 aa, Artificial Sequence
  Synthetic construct
QSITTY

SEQ ID NO: 6503 - protein, 6 aa, Artificial Sequence
  Synthetic construct
QGISSW

SEQ ID NO: 6504 - protein, 6 aa, Artificial Sequence
  Synthetic construct
QGIRND

SEQ ID NO: 6505 - protein, 9 aa, Artificial Sequence
  Synthetic construct
SSNIGAGYD

SEQ ID NO: 6506 - protein, 12 aa, Artificial Sequence
  Synthetic construct
QSVLYSSNNKNY

SEQ ID NO: 6507 - protein, 6 aa, Artificial Sequence
  Synthetic construct
NIGSKS

SEQ ID NO: 6508 - protein, 9 aa, Artificial Sequence
  Synthetic construct
SSDVGGYNY

SEQ ID NO: 6509 - protein, 6 aa, Artificial Sequence
  Synthetic construct
KLGDKY

SEQ ID NO: 6510 - protein, 6 aa, Artificial Sequence
  Synthetic construct
ALPKKY

SEQ ID NO: 6511 - protein, 12 aa, Artificial Sequence
  Synthetic construct
QSVLYSSNNKNF

SEQ ID NO: 6512 - protein, 6 aa, Artificial Sequence
  Synthetic construct
KLGDKN

SEQ ID NO: 6513 - protein, 6 aa, Artificial Sequence
  Synthetic construct
NIGSKN

SEQ ID NO: 6514 - protein, 6 aa, Artificial Sequence
  Synthetic construct
QSVSSY

SEQ ID NO: 6515 - protein, 6 aa, Artificial Sequence
  Synthetic construct
QSISSY

SEQ ID NO: 6516 - protein, 6 aa, Artificial Sequence
  Synthetic construct
QSVSSN

SEQ ID NO: 6517 - protein, 12 aa, Artificial Sequence
  Synthetic construct
QSVLYSFNNKNY

SEQ ID NO: 6518 - protein, 11 aa, Artificial Sequence
  Synthetic construct
QSLLHYSGYNY

SEQ ID NO: 6519 - protein, 6 aa, Artificial Sequence
  Synthetic construct
QSVNTW

SEQ ID NO: 6520 - protein, 9 aa, Artificial Sequence
  Synthetic construct
SSDVGAFNY

SEQ ID NO: 6521 - protein, 7 aa, Artificial Sequence
  Synthetic construct
QSVGSIY

SEQ ID NO: 6522 - protein, 12 aa, Artificial Sequence
  Synthetic construct
QSVLYSSNNKNF

SEQ ID NO: 6523 - protein, 9 aa, Artificial Sequence
  Synthetic construct
SSDVGSYNL

SEQ ID NO: 6524 - protein, 6 aa, Artificial Sequence
  Synthetic construct
QSVSSY

SEQ ID NO: 6525 - protein, 8 aa, Artificial Sequence
  Synthetic construct
SGNIASNY

SEQ ID NO: 6526 - protein, 6 aa, Artificial Sequence
  Synthetic construct
TIGGKS

SEQ ID NO: 6527 - protein, 6 aa, Artificial Sequence
  Synthetic construct
QGISSY

SEQ ID NO: 6528 - protein, 6 aa, Artificial Sequence
  Synthetic construct
QDISKY

SEQ ID NO: 6529 - protein, 6 aa, Artificial Sequence
  Synthetic construct
QSISNW

SEQ ID NO: 6530 - protein, 8 aa, Artificial Sequence
  Synthetic construct
STNIGSAD

SEQ ID NO: 6531 - protein, 6 aa, Artificial Sequence
  Synthetic construct
QSVSNF

SEQ ID NO: 6532 - protein, 6 aa, Artificial Sequence
  Synthetic construct
QDISIY

SEQ ID NO: 6533 - protein, 6 aa, Artificial Sequence
  Synthetic construct
QGISSY

SEQ ID NO: 6534 - protein, 6 aa, Artificial Sequence
  Synthetic construct
QSISSY

SEQ ID NO: 6535 - protein, 11 aa, Artificial Sequence
  Synthetic construct
QSLLHSDGKTY

SEQ ID NO: 6536 - protein, 6 aa, Artificial Sequence
  Synthetic construct
SLRSYY

SEQ ID NO: 6537 - protein, 9 aa, Artificial Sequence
  Synthetic construct
SSNIGAGYD

SEQ ID NO: 6538 - protein, 7 aa, Artificial Sequence
  Synthetic construct
QRVSSPY

SEQ ID NO: 6539 - protein, 6 aa, Artificial Sequence
  Synthetic construct
KLGNKY

SEQ ID NO: 6540 - protein, 8 aa, Artificial Sequence
  Synthetic construct
SSNIGNNT

SEQ ID NO: 6541 - protein, 6 aa, Artificial Sequence
  Synthetic construct
QGISGY

SEQ ID NO: 6542 - protein, 6 aa, Artificial Sequence
  Synthetic construct
QGLTRW

SEQ ID NO: 6543 - protein, 6 aa, Artificial Sequence
  Synthetic construct
ALPKQY

SEQ ID NO: 6544 - protein, 9 aa, Artificial Sequence
  Synthetic construct
SGDVGAYNF

SEQ ID NO: 6545 - protein, 6 aa, Artificial Sequence
  Synthetic construct
QGIRND

SEQ ID NO: 6546 - protein, 6 aa, Artificial Sequence
  Synthetic construct
QGISNY

SEQ ID NO: 6547 - protein, 7 aa, Artificial Sequence
  Synthetic construct
QSVSSSY

SEQ ID NO: 6548 - protein, 6 aa, Artificial Sequence
  Synthetic construct
QDISNY

SEQ ID NO: 6549 - protein, 6 aa, Artificial Sequence
  Synthetic construct
QSVGLY

SEQ ID NO: 6550 - protein, 9 aa, Artificial Sequence
  Synthetic construct
TGDVTSGHW

SEQ ID NO: 6551 - protein, 6 aa, Artificial Sequence
  Synthetic construct
ALPKQH

SEQ ID NO: 6552 - protein, 8 aa, Artificial Sequence
  Synthetic construct
SSNIGTNN

SEQ ID NO: 6553 - protein, 6 aa, Artificial Sequence
  Synthetic construct
QSVNSN

SEQ ID NO: 6554 - protein, 7 aa, Artificial Sequence
  Synthetic construct
QSVSSSY

SEQ ID NO: 6555 - protein, 9 aa, Artificial Sequence
  Synthetic construct
TGAVTSGHY

SEQ ID NO: 6556 - protein, 7 aa, Artificial Sequence
  Synthetic construct
QSVSSSY

SEQ ID NO: 6557 - protein, 6 aa, Artificial Sequence
  Synthetic construct
QSVSSN

SEQ ID NO: 6558 - protein, 9 aa, Artificial Sequence
  Synthetic construct
SSDVGKYNF

SEQ ID NO: 6559 - protein, 6 aa, Artificial Sequence
  Synthetic construct
QGISND

SEQ ID NO: 6560 - protein, 6 aa, Artificial Sequence
  Synthetic construct
QSVSSY

SEQ ID NO: 6561 - protein, 6 aa, Artificial Sequence
  Synthetic construct
KLGDKY

SEQ ID NO: 6562 - protein, 9 aa, Artificial Sequence
  Synthetic construct
SSDVGGYNY

SEQ ID NO: 6563 - protein, 7 aa, Artificial Sequence
  Synthetic construct
QSVSGSY

SEQ ID NO: 6564 - protein, 6 aa, Artificial Sequence
  Synthetic construct
KLGDKY

SEQ ID NO: 6565 - protein, 6 aa, Artificial Sequence
  Synthetic construct
QSIAGY

SEQ ID NO: 6566 - protein, 9 aa, Artificial Sequence
  Synthetic construct
TGAVTSGYY

SEQ ID NO: 6567 - protein, 9 aa, Artificial Sequence
  Synthetic construct
SSDIGAYNF

SEQ ID NO: 6568 - protein, 6 aa, Artificial Sequence
  Synthetic construct
QSVSSN

SEQ ID NO: 6569 - protein, 12 aa, Artificial Sequence
  Synthetic construct
QSVLYSSNNKNY

SEQ ID NO: 6570 - protein, 7 aa, Artificial Sequence
  Synthetic construct
QSVSSSS

SEQ ID NO: 6571 - protein, 6 aa, Artificial Sequence
  Synthetic construct
ALSKQY

SEQ ID NO: 6572 - protein, 6 aa, Artificial Sequence
  Synthetic construct
QDISNY

SEQ ID NO: 6573 - protein, 11 aa, Artificial Sequence
  Synthetic construct
QSLVYSDGNTY

SEQ ID NO: 6574 - protein, 9 aa, Artificial Sequence
  Synthetic construct
SSNIGAGYD

SEQ ID NO: 6575 - protein, 6 aa, Artificial Sequence
  Synthetic construct
AMPKQY

SEQ ID NO: 6576 - protein, 11 aa, Artificial Sequence
  Synthetic construct
QSLVYSDGNNY

SEQ ID NO: 6577 - protein, 6 aa, Artificial Sequence
  Synthetic construct
QSISSW

SEQ ID NO: 6578 - protein, 6 aa, Artificial Sequence
  Synthetic construct
ALPKQF

SEQ ID NO: 6579 - protein, 6 aa, Artificial Sequence
  Synthetic construct
ALPKKY

SEQ ID NO: 6580 - protein, 6 aa, Artificial Sequence
  Synthetic construct
QGIRSW

SEQ ID NO: 6581 - protein, 6 aa, Artificial Sequence
  Synthetic construct
QSISSS

SEQ ID NO: 6582 - protein, 6 aa, Artificial Sequence
  Synthetic construct
QSVSSY

SEQ ID NO: 6583 - protein, 6 aa, Artificial Sequence
  Synthetic construct
QSISSW

SEQ ID NO: 6584 - protein, 9 aa, Artificial Sequence
  Synthetic construct
SSDVGSYNL

SEQ ID NO: 6585 - protein, 6 aa, Artificial Sequence
  Synthetic construct
QSLSSS

SEQ ID NO: 6586 - protein, 6 aa, Artificial Sequence
  Synthetic construct
QSVSSN

SEQ ID NO: 6587 - protein, 6 aa, Artificial Sequence
  Synthetic construct
QRISSW

SEQ ID NO: 6588 - protein, 9 aa, Artificial Sequence
  Synthetic construct
SGINVGTYR

SEQ ID NO: 6589 - protein, 6 aa, Artificial Sequence
  Synthetic construct
ELGDKY

SEQ ID NO: 6590 - protein, 9 aa, Artificial Sequence
  Synthetic construct
SSNIGAGYD

SEQ ID NO: 6591 - protein, 11 aa, Artificial Sequence
  Synthetic construct
QNLEYTDGITY

SEQ ID NO: 6592 - protein, 9 aa, Artificial Sequence
  Synthetic construct
SSEVGGYNY

SEQ ID NO: 6593 - protein, 6 aa, Artificial Sequence
  Synthetic construct
ALPKKY

SEQ ID NO: 6594 - protein, 6 aa, Artificial Sequence
  Synthetic construct
QSISSW

SEQ ID NO: 6595 - protein, 11 aa, Artificial Sequence
  Synthetic construct
QSLLHSNAYNY

SEQ ID NO: 6596 - protein, 6 aa, Artificial Sequence
  Synthetic construct
QSVSSN

SEQ ID NO: 6597 - protein, 6 aa, Artificial Sequence
  Synthetic construct
QSVSSY

SEQ ID NO: 6598 - protein, 11 aa, Artificial Sequence
  Synthetic construct
QSLLFSNGYTY

SEQ ID NO: 6599 - protein, 6 aa, Artificial Sequence
  Synthetic construct
QSISSW

SEQ ID NO: 6600 - protein, 6 aa, Artificial Sequence
  Synthetic construct
QSVSSN

SEQ ID NO: 6601 - protein, 8 aa, Artificial Sequence
  Synthetic construct
SSNFGNNA

SEQ ID NO: 6602 - protein, 6 aa, Artificial Sequence
  Synthetic construct
QSVSSN

SEQ ID NO: 6603 - protein, 6 aa, Artificial Sequence
  Synthetic construct
KLGDKY

SEQ ID NO: 6604 - protein, 9 aa, Artificial Sequence
  Synthetic construct
SSDVGGYNY

SEQ ID NO: 6605 - protein, 9 aa, Artificial Sequence
  Synthetic construct
SSDVGGYNY

SEQ ID NO: 6606 - protein, 6 aa, Artificial Sequence
  Synthetic construct
ALPKQY

SEQ ID NO: 6607 - protein, 6 aa, Artificial Sequence
  Synthetic construct
QSVSSS

SEQ ID NO: 6608 - protein, 11 aa, Artificial Sequence
  Synthetic construct
QSLVHSDGNTY

SEQ ID NO: 6609 - protein, 8 aa, Artificial Sequence
  Synthetic construct
SSNIGSNY

SEQ ID NO: 6610 - protein, 6 aa, Artificial Sequence
  Synthetic construct
AFPKQY

SEQ ID NO: 6611 - protein, 9 aa, Artificial Sequence
  Synthetic construct
SSDVGSYNL

SEQ ID NO: 6612 - protein, 6 aa, Artificial Sequence
  Synthetic construct
ALPKKY

SEQ ID NO: 6613 - protein, 9 aa, Artificial Sequence
  Synthetic construct
GSDVGGYNF

SEQ ID NO: 6614 - protein, 6 aa, Artificial Sequence
  Synthetic construct
QSISSR

SEQ ID NO: 6615 - protein, 6 aa, Artificial Sequence
  Synthetic construct
QTISSW

SEQ ID NO: 6616 - protein, 9 aa, Artificial Sequence
  Synthetic construct
SSDVGGYNF

SEQ ID NO: 6617 - protein, 6 aa, Artificial Sequence
  Synthetic construct
DIGSKS

SEQ ID NO: 6618 - protein, 6 aa, Artificial Sequence
  Synthetic construct
KLGDNY

SEQ ID NO: 6619 - protein, 6 aa, Artificial Sequence
  Synthetic construct
NIGTKS

SEQ ID NO: 6620 - protein, 8 aa, Artificial Sequence
  Synthetic construct
SSNIGSNI

SEQ ID NO: 6621 - protein, 6 aa, Artificial Sequence
  Synthetic construct
QGIRSN

SEQ ID NO: 6622 - protein, 6 aa, Artificial Sequence
  Synthetic construct
QVINDY

SEQ ID NO: 6623 - protein, 9 aa, Artificial Sequence
  Synthetic construct
SSDVGAYNY

SEQ ID NO: 6624 - protein, 6 aa, Artificial Sequence
  Synthetic construct
ALPKKF

SEQ ID NO: 6625 - protein, 3 aa, Artificial Sequence
  Synthetic construct
KDT

SEQ ID NO: 6626 - protein, 3 aa, Artificial Sequence
  Synthetic construct
EGS

SEQ ID NO: 6627 - protein, 3 aa, Artificial Sequence
  Synthetic construct
DAS

SEQ ID NO: 6628 - protein, 3 aa, Artificial Sequence
  Synthetic construct
WAS

SEQ ID NO: 6629 - protein, 3 aa, Artificial Sequence
  Synthetic construct
DVI

SEQ ID NO: 6630 - protein, 3 aa, Artificial Sequence
  Synthetic construct
GAS

SEQ ID NO: 6631 - protein, 3 aa, Artificial Sequence
  Synthetic construct
GAS

SEQ ID NO: 6632 - protein, 3 aa, Artificial Sequence
  Synthetic construct
AAS

SEQ ID NO: 6633 - protein, 3 aa, Artificial Sequence
  Synthetic construct
WAS

SEQ ID NO: 6634 - protein, 3 aa, Artificial Sequence
  Synthetic construct
EVS

SEQ ID NO: 6635 - protein, 3 aa, Artificial Sequence
  Synthetic construct
DNN

SEQ ID NO: 6636 - protein, 3 aa, Artificial Sequence
  Synthetic construct
KAS

SEQ ID NO: 6637 - protein, 3 aa, Artificial Sequence
  Synthetic construct
EGS

SEQ ID NO: 6638 - protein, 3 aa, Artificial Sequence
  Synthetic construct
EVS

SEQ ID NO: 6639 - protein, 3 aa, Artificial Sequence
  Synthetic construct
DKN

SEQ ID NO: 6640 - protein, 3 aa, Artificial Sequence
  Synthetic construct
KAS

SEQ ID NO: 6641 - protein, 3 aa, Artificial Sequence
  Synthetic construct
GAS

SEQ ID NO: 6642 - protein, 3 aa, Artificial Sequence
  Synthetic construct
EDS

SEQ ID NO: 6643 - protein, 3 aa, Artificial Sequence
  Synthetic construct
DVT

SEQ ID NO: 6644 - protein, 3 aa, Artificial Sequence
  Synthetic construct
GAS

SEQ ID NO: 6645 - protein, 3 aa, Artificial Sequence
  Synthetic construct
AAS

SEQ ID NO: 6646 - protein, 3 aa, Artificial Sequence
  Synthetic construct
EDS

SEQ ID NO: 6647 - protein, 3 aa, Artificial Sequence
  Synthetic construct
LGS

SEQ ID NO: 6648 - protein, 3 aa, Artificial Sequence
  Synthetic construct
DNN

SEQ ID NO: 6649 - protein, 3 aa, Artificial Sequence
  Synthetic construct
AAS

SEQ ID NO: 6650 - protein, 3 aa, Artificial Sequence
  Synthetic construct
SND

SEQ ID NO: 6651 - protein, 3 aa, Artificial Sequence
  Synthetic construct
ATS

SEQ ID NO: 6652 - protein, 3 aa, Artificial Sequence
  Synthetic construct
GAS

SEQ ID NO: 6653 - protein, 3 aa, Artificial Sequence
  Synthetic construct
AAS

SEQ ID NO: 6654 - protein, 3 aa, Artificial Sequence
  Synthetic construct
NAS

SEQ ID NO: 6655 - protein, 3 aa, Artificial Sequence
  Synthetic construct
GAS

SEQ ID NO: 6656 - protein, 3 aa, Artificial Sequence
  Synthetic construct
AAS

SEQ ID NO: 6657 - protein, 3 aa, Artificial Sequence
  Synthetic construct
SNN

SEQ ID NO: 6658 - protein, 3 aa, Artificial Sequence
  Synthetic construct
SNN

SEQ ID NO: 6659 - protein, 3 aa, Artificial Sequence
  Synthetic construct
EVS

SEQ ID NO: 6660 - protein, 3 aa, Artificial Sequence
  Synthetic construct
GAS

SEQ ID NO: 6661 - protein, 3 aa, Artificial Sequence
  Synthetic construct
GAS

SEQ ID NO: 6662 - protein, 3 aa, Artificial Sequence
  Synthetic construct
DAS

SEQ ID NO: 6663 - protein, 3 aa, Artificial Sequence
  Synthetic construct
EDN

SEQ ID NO: 6664 - protein, 3 aa, Artificial Sequence
  Synthetic construct
EVS

SEQ ID NO: 6665 - protein, 3 aa, Artificial Sequence
  Synthetic construct
AAS

SEQ ID NO: 6666 - protein, 3 aa, Artificial Sequence
  Synthetic construct
KAS

SEQ ID NO: 6667 - protein, 3 aa, Artificial Sequence
  Synthetic construct
AAS

SEQ ID NO: 6668 - protein, 3 aa, Artificial Sequence
  Synthetic construct
DAS

SEQ ID NO: 6669 - protein, 3 aa, Artificial Sequence
  Synthetic construct
GAS

SEQ ID NO: 6670 - protein, 3 aa, Artificial Sequence
  Synthetic construct
WAS

SEQ ID NO: 6671 - protein, 3 aa, Artificial Sequence
  Synthetic construct
DNN

SEQ ID NO: 6672 - protein, 3 aa, Artificial Sequence
  Synthetic construct
DVS

SEQ ID NO: 6673 - protein, 3 aa, Artificial Sequence
  Synthetic construct
KAS

SEQ ID NO: 6674 - protein, 3 aa, Artificial Sequence
  Synthetic construct
DAS

SEQ ID NO: 6675 - protein, 3 aa, Artificial Sequence
  Synthetic construct
QDT

SEQ ID NO: 6676 - protein, 3 aa, Artificial Sequence
  Synthetic construct
AAS

SEQ ID NO: 6677 - protein, 3 aa, Artificial Sequence
  Synthetic construct
YDS

SEQ ID NO: 6678 - protein, 3 aa, Artificial Sequence
  Synthetic construct
GAS

SEQ ID NO: 6679 - protein, 3 aa, Artificial Sequence
  Synthetic construct
DVT

SEQ ID NO: 6680 - protein, 3 aa, Artificial Sequence
  Synthetic construct
KHT

SEQ ID NO: 6681 - protein, 3 aa, Artificial Sequence
  Synthetic construct
DAS

SEQ ID NO: 6682 - protein, 3 aa, Artificial Sequence
  Synthetic construct
GKN

SEQ ID NO: 6683 - protein, 3 aa, Artificial Sequence
  Synthetic construct
GNS

SEQ ID NO: 6684 - protein, 3 aa, Artificial Sequence
  Synthetic construct
EDS

SEQ ID NO: 6685 - protein, 3 aa, Artificial Sequence
  Synthetic construct
ENN

SEQ ID NO: 6686 - protein, 3 aa, Artificial Sequence
  Synthetic construct
EDN

SEQ ID NO: 6687 - protein, 3 aa, Artificial Sequence
  Synthetic construct
AAS

SEQ ID NO: 6688 - protein, 3 aa, Artificial Sequence
  Synthetic construct
STS

SEQ ID NO: 6689 - protein, 3 aa, Artificial Sequence
  Synthetic construct
DAS

SEQ ID NO: 6690 - protein, 3 aa, Artificial Sequence
  Synthetic construct
QAS

SEQ ID NO: 6691 - protein, 3 aa, Artificial Sequence
  Synthetic construct
GKN

SEQ ID NO: 6692 - protein, 3 aa, Artificial Sequence
  Synthetic construct
DNN

SEQ ID NO: 6693 - protein, 3 aa, Artificial Sequence
  Synthetic construct
AAS

SEQ ID NO: 6694 - protein, 3 aa, Artificial Sequence
  Synthetic construct
QDT

SEQ ID NO: 6695 - protein, 3 aa, Artificial Sequence
  Synthetic construct
DTN

SEQ ID NO: 6696 - protein, 3 aa, Artificial Sequence
  Synthetic construct
QVS

SEQ ID NO: 6697 - protein, 3 aa, Artificial Sequence
  Synthetic construct
AAS

SEQ ID NO: 6698 - protein, 3 aa, Artificial Sequence
  Synthetic construct
KDS

SEQ ID NO: 6699 - protein, 3 aa, Artificial Sequence
  Synthetic construct
SNN

SEQ ID NO: 6700 - protein, 3 aa, Artificial Sequence
  Synthetic construct
DVS

SEQ ID NO: 6701 - protein, 3 aa, Artificial Sequence
  Synthetic construct
NND

SEQ ID NO: 6702 - protein, 3 aa, Artificial Sequence
  Synthetic construct
AAS

SEQ ID NO: 6703 - protein, 3 aa, Artificial Sequence
  Synthetic construct
QDN

SEQ ID NO: 6704 - protein, 3 aa, Artificial Sequence
  Synthetic construct
DAS

SEQ ID NO: 6705 - protein, 3 aa, Artificial Sequence
  Synthetic construct
WAS

SEQ ID NO: 6706 - protein, 3 aa, Artificial Sequence
  Synthetic construct
DGS

SEQ ID NO: 6707 - protein, 7 aa, Artificial Sequence
  Synthetic construct
YKSDSDK

SEQ ID NO: 6708 - protein, 3 aa, Artificial Sequence
  Synthetic construct
GAS

SEQ ID NO: 6709 - protein, 3 aa, Artificial Sequence
  Synthetic construct
LGS

SEQ ID NO: 6710 - protein, 3 aa, Artificial Sequence
  Synthetic construct
EDS

SEQ ID NO: 6711 - protein, 3 aa, Artificial Sequence
  Synthetic construct
EDN

SEQ ID NO: 6712 - protein, 3 aa, Artificial Sequence
  Synthetic construct
DVT

SEQ ID NO: 6713 - protein, 3 aa, Artificial Sequence
  Synthetic construct
KVS

SEQ ID NO: 6714 - protein, 3 aa, Artificial Sequence
  Synthetic construct
EDN

SEQ ID NO: 6715 - protein, 3 aa, Artificial Sequence
  Synthetic construct
DAS

SEQ ID NO: 6716 - protein, 3 aa, Artificial Sequence
  Synthetic construct
DVS

SEQ ID NO: 6717 - protein, 3 aa, Artificial Sequence
  Synthetic construct
YDN

SEQ ID NO: 6718 - protein, 3 aa, Artificial Sequence
  Synthetic construct
LVS

SEQ ID NO: 6719 - protein, 3 aa, Artificial Sequence
  Synthetic construct
ELS

SEQ ID NO: 6720 - protein, 3 aa, Artificial Sequence
  Synthetic construct
GAS

SEQ ID NO: 6721 - protein, 3 aa, Artificial Sequence
  Synthetic construct
EGS

SEQ ID NO: 6722 - protein, 3 aa, Artificial Sequence
  Synthetic construct
LGS

SEQ ID NO: 6723 - protein, 3 aa, Artificial Sequence
  Synthetic construct
QDS

SEQ ID NO: 6724 - protein, 3 aa, Artificial Sequence
  Synthetic construct
DNG

SEQ ID NO: 6725 - protein, 3 aa, Artificial Sequence
  Synthetic construct
AAS

SEQ ID NO: 6726 - protein, 3 aa, Artificial Sequence
  Synthetic construct
SDT

SEQ ID NO: 6727 - protein, 3 aa, Artificial Sequence
  Synthetic construct
EVT

SEQ ID NO: 6728 - protein, 3 aa, Artificial Sequence
  Synthetic construct
AAS

SEQ ID NO: 6729 - protein, 3 aa, Artificial Sequence
  Synthetic construct
RAS

SEQ ID NO: 6730 - protein, 3 aa, Artificial Sequence
  Synthetic construct
DAS

SEQ ID NO: 6731 - protein, 3 aa, Artificial Sequence
  Synthetic construct
AAS

SEQ ID NO: 6732 - protein, 3 aa, Artificial Sequence
  Synthetic construct
EDS

SEQ ID NO: 6733 - protein, 3 aa, Artificial Sequence
  Synthetic construct
WAS

SEQ ID NO: 6734 - protein, 3 aa, Artificial Sequence
  Synthetic construct
AAS

SEQ ID NO: 6735 - protein, 3 aa, Artificial Sequence
  Synthetic construct
DVS

SEQ ID NO: 6736 - protein, 3 aa, Artificial Sequence
  Synthetic construct
GTS

SEQ ID NO: 6737 - protein, 3 aa, Artificial Sequence
  Synthetic construct
GNT

SEQ ID NO: 6738 - protein, 3 aa, Artificial Sequence
  Synthetic construct
KDS

SEQ ID NO: 6739 - protein, 3 aa, Artificial Sequence
  Synthetic construct
GAS

SEQ ID NO: 6740 - protein, 3 aa, Artificial Sequence
  Synthetic construct
AAS

SEQ ID NO: 6741 - protein, 3 aa, Artificial Sequence
  Synthetic construct
EDI

SEQ ID NO: 6742 - protein, 3 aa, Artificial Sequence
  Synthetic construct
YDS

SEQ ID NO: 6743 - protein, 3 aa, Artificial Sequence
  Synthetic construct
KAS

SEQ ID NO: 6744 - protein, 3 aa, Artificial Sequence
  Synthetic construct
EVT

SEQ ID NO: 6745 - protein, 3 aa, Artificial Sequence
  Synthetic construct
GAS

SEQ ID NO: 6746 - protein, 3 aa, Artificial Sequence
  Synthetic construct
GTS

SEQ ID NO: 6747 - protein, 3 aa, Artificial Sequence
  Synthetic construct
QDS

SEQ ID NO: 6748 - protein, 3 aa, Artificial Sequence
  Synthetic construct
RNN

SEQ ID NO: 6749 - protein, 3 aa, Artificial Sequence
  Synthetic construct
GAS

SEQ ID NO: 6750 - protein, 3 aa, Artificial Sequence
  Synthetic construct
DAS

SEQ ID NO: 6751 - protein, 3 aa, Artificial Sequence
  Synthetic construct
EDS

SEQ ID NO: 6752 - protein, 3 aa, Artificial Sequence
  Synthetic construct
GAS

SEQ ID NO: 6753 - protein, 3 aa, Artificial Sequence
  Synthetic construct
KAS

SEQ ID NO: 6754 - protein, 3 aa, Artificial Sequence
  Synthetic construct
LGS

SEQ ID NO: 6755 - protein, 3 aa, Artificial Sequence
  Synthetic construct
DVS

SEQ ID NO: 6756 - protein, 3 aa, Artificial Sequence
  Synthetic construct
RNN

SEQ ID NO: 6757 - protein, 3 aa, Artificial Sequence
  Synthetic construct
GAS

SEQ ID NO: 6758 - protein, 3 aa, Artificial Sequence
  Synthetic construct
EDN

SEQ ID NO: 6759 - protein, 3 aa, Artificial Sequence
  Synthetic construct
AAS

SEQ ID NO: 6760 - protein, 3 aa, Artificial Sequence
  Synthetic construct
SND

SEQ ID NO: 6761 - protein, 3 aa, Artificial Sequence
  Synthetic construct
DAS

SEQ ID NO: 6762 - protein, 3 aa, Artificial Sequence
  Synthetic construct
GKT

SEQ ID NO: 6763 - protein, 3 aa, Artificial Sequence
  Synthetic construct
LGS

SEQ ID NO: 6764 - protein, 3 aa, Artificial Sequence
  Synthetic construct
GAS

SEQ ID NO: 6765 - protein, 3 aa, Artificial Sequence
  Synthetic construct
KAS

SEQ ID NO: 6766 - protein, 3 aa, Artificial Sequence
  Synthetic construct
EDN

SEQ ID NO: 6767 - protein, 3 aa, Artificial Sequence
  Synthetic construct
GNS

SEQ ID NO: 6768 - protein, 3 aa, Artificial Sequence
  Synthetic construct
RNN

SEQ ID NO: 6769 - protein, 3 aa, Artificial Sequence
  Synthetic construct
DAS

SEQ ID NO: 6770 - protein, 3 aa, Artificial Sequence
  Synthetic construct
EVS

SEQ ID NO: 6771 - protein, 3 aa, Artificial Sequence
  Synthetic construct
EVS

SEQ ID NO: 6772 - protein, 3 aa, Artificial Sequence
  Synthetic construct
QDN

SEQ ID NO: 6773 - protein, 3 aa, Artificial Sequence
  Synthetic construct
QDN

SEQ ID NO: 6774 - protein, 3 aa, Artificial Sequence
  Synthetic construct
GAS

SEQ ID NO: 6775 - protein, 3 aa, Artificial Sequence
  Synthetic construct
GAS

SEQ ID NO: 6776 - protein, 3 aa, Artificial Sequence
  Synthetic construct
GAS

SEQ ID NO: 6777 - protein, 3 aa, Artificial Sequence
  Synthetic construct
GAS

SEQ ID NO: 6778 - protein, 3 aa, Artificial Sequence
  Synthetic construct
AAS

SEQ ID NO: 6779 - protein, 3 aa, Artificial Sequence
  Synthetic construct
ENN

SEQ ID NO: 6780 - protein, 3 aa, Artificial Sequence
  Synthetic construct
EAS

SEQ ID NO: 6781 - protein, 3 aa, Artificial Sequence
  Synthetic construct
SND

SEQ ID NO: 6782 - protein, 3 aa, Artificial Sequence
  Synthetic construct
WAS

SEQ ID NO: 6783 - protein, 3 aa, Artificial Sequence
  Synthetic construct
LGS

SEQ ID NO: 6784 - protein, 3 aa, Artificial Sequence
  Synthetic construct
GAS

SEQ ID NO: 6785 - protein, 3 aa, Artificial Sequence
  Synthetic construct
DSN

SEQ ID NO: 6786 - protein, 3 aa, Artificial Sequence
  Synthetic construct
AAS

SEQ ID NO: 6787 - protein, 3 aa, Artificial Sequence
  Synthetic construct
AAS

SEQ ID NO: 6788 - protein, 3 aa, Artificial Sequence
  Synthetic construct
DVS

SEQ ID NO: 6789 - protein, 3 aa, Artificial Sequence
  Synthetic construct
EDS

SEQ ID NO: 6790 - protein, 3 aa, Artificial Sequence
  Synthetic construct
GAS

SEQ ID NO: 6791 - protein, 3 aa, Artificial Sequence
  Synthetic construct
GSS

SEQ ID NO: 6792 - protein, 3 aa, Artificial Sequence
  Synthetic construct
DVS

SEQ ID NO: 6793 - protein, 3 aa, Artificial Sequence
  Synthetic construct
QNN

SEQ ID NO: 6794 - protein, 3 aa, Artificial Sequence
  Synthetic construct
DAS

SEQ ID NO: 6795 - protein, 3 aa, Artificial Sequence
  Synthetic construct
TAS

SEQ ID NO: 6796 - protein, 3 aa, Artificial Sequence
  Synthetic construct
DAS

SEQ ID NO: 6797 - protein, 3 aa, Artificial Sequence
  Synthetic construct
KAS

SEQ ID NO: 6798 - protein, 3 aa, Artificial Sequence
  Synthetic construct
DAS

SEQ ID NO: 6799 - protein, 3 aa, Artificial Sequence
  Synthetic construct
EAS

SEQ ID NO: 6800 - protein, 3 aa, Artificial Sequence
  Synthetic construct
AAS

SEQ ID NO: 6801 - protein, 3 aa, Artificial Sequence
  Synthetic construct
LGS

SEQ ID NO: 6802 - protein, 3 aa, Artificial Sequence
  Synthetic construct
EDS

SEQ ID NO: 6803 - protein, 3 aa, Artificial Sequence
  Synthetic construct
SNN

SEQ ID NO: 6804 - protein, 3 aa, Artificial Sequence
  Synthetic construct
GAS

SEQ ID NO: 6805 - protein, 3 aa, Artificial Sequence
  Synthetic construct
AAS

SEQ ID NO: 6806 - protein, 3 aa, Artificial Sequence
  Synthetic construct
EVS

SEQ ID NO: 6807 - protein, 3 aa, Artificial Sequence
  Synthetic construct
DAS

SEQ ID NO: 6808 - protein, 3 aa, Artificial Sequence
  Synthetic construct
QDT

SEQ ID NO: 6809 - protein, 3 aa, Artificial Sequence
  Synthetic construct
DNN

SEQ ID NO: 6810 - protein, 3 aa, Artificial Sequence
  Synthetic construct
AAS

SEQ ID NO: 6811 - protein, 3 aa, Artificial Sequence
  Synthetic construct
AAS

SEQ ID NO: 6812 - protein, 3 aa, Artificial Sequence
  Synthetic construct
DAS

SEQ ID NO: 6813 - protein, 3 aa, Artificial Sequence
  Synthetic construct
DVS

SEQ ID NO: 6814 - protein, 3 aa, Artificial Sequence
  Synthetic construct
GAS

SEQ ID NO: 6815 - protein, 3 aa, Artificial Sequence
  Synthetic construct
EDN

SEQ ID NO: 6816 - protein, 3 aa, Artificial Sequence
  Synthetic construct
QDN

SEQ ID NO: 6817 - protein, 3 aa, Artificial Sequence
  Synthetic construct
ANS

SEQ ID NO: 6818 - protein, 3 aa, Artificial Sequence
  Synthetic construct
GAS

SEQ ID NO: 6819 - protein, 3 aa, Artificial Sequence
  Synthetic construct
DAS

SEQ ID NO: 6820 - protein, 3 aa, Artificial Sequence
  Synthetic construct
DAS

SEQ ID NO: 6821 - protein, 3 aa, Artificial Sequence
  Synthetic construct
EVS

SEQ ID NO: 6822 - protein, 3 aa, Artificial Sequence
  Synthetic construct
DAS

SEQ ID NO: 6823 - protein, 3 aa, Artificial Sequence
  Synthetic construct
EDS

SEQ ID NO: 6824 - protein, 3 aa, Artificial Sequence
  Synthetic construct
GAS

SEQ ID NO: 6825 - protein, 3 aa, Artificial Sequence
  Synthetic construct
ENN

SEQ ID NO: 6826 - protein, 3 aa, Artificial Sequence
  Synthetic construct
DNN

SEQ ID NO: 6827 - protein, 3 aa, Artificial Sequence
  Synthetic construct
KAS

SEQ ID NO: 6828 - protein, 3 aa, Artificial Sequence
  Synthetic construct
AAS

SEQ ID NO: 6829 - protein, 3 aa, Artificial Sequence
  Synthetic construct
EDN

SEQ ID NO: 6830 - protein, 3 aa, Artificial Sequence
  Synthetic construct
DVS

SEQ ID NO: 6831 - protein, 3 aa, Artificial Sequence
  Synthetic construct
GAS

SEQ ID NO: 6832 - protein, 3 aa, Artificial Sequence
  Synthetic construct
DAS

SEQ ID NO: 6833 - protein, 3 aa, Artificial Sequence
  Synthetic construct
AAS

SEQ ID NO: 6834 - protein, 3 aa, Artificial Sequence
  Synthetic construct
KDS

SEQ ID NO: 6835 - protein, 3 aa, Artificial Sequence
  Synthetic construct
AAS

SEQ ID NO: 6836 - protein, 3 aa, Artificial Sequence
  Synthetic construct
DLT

SEQ ID NO: 6837 - protein, 3 aa, Artificial Sequence
  Synthetic construct
GNT

SEQ ID NO: 6838 - protein, 3 aa, Artificial Sequence
  Synthetic construct
GAF

SEQ ID NO: 6839 - protein, 3 aa, Artificial Sequence
  Synthetic construct
GAS

SEQ ID NO: 6840 - protein, 3 aa, Artificial Sequence
  Synthetic construct
DAS

SEQ ID NO: 6841 - protein, 3 aa, Artificial Sequence
  Synthetic construct
DAS

SEQ ID NO: 6842 - protein, 3 aa, Artificial Sequence
  Synthetic construct
GNN

SEQ ID NO: 6843 - protein, 3 aa, Artificial Sequence
  Synthetic construct
QDI

SEQ ID NO: 6844 - protein, 3 aa, Artificial Sequence
  Synthetic construct
YDD

SEQ ID NO: 6845 - protein, 3 aa, Artificial Sequence
  Synthetic construct
DNN

SEQ ID NO: 6846 - protein, 3 aa, Artificial Sequence
  Synthetic construct
DEN

SEQ ID NO: 6847 - protein, 3 aa, Artificial Sequence
  Synthetic construct
QDS

SEQ ID NO: 6848 - protein, 3 aa, Artificial Sequence
  Synthetic construct
YDS

SEQ ID NO: 6849 - protein, 3 aa, Artificial Sequence
  Synthetic construct
QDT

SEQ ID NO: 6850 - protein, 3 aa, Artificial Sequence
  Synthetic construct
EVS

SEQ ID NO: 6851 - protein, 3 aa, Artificial Sequence
  Synthetic construct
DVT

SEQ ID NO: 6852 - protein, 3 aa, Artificial Sequence
  Synthetic construct
GAS

SEQ ID NO: 6853 - protein, 3 aa, Artificial Sequence
  Synthetic construct
GNS

SEQ ID NO: 6854 - protein, 3 aa, Artificial Sequence
  Synthetic construct
DNN

SEQ ID NO: 6855 - protein, 3 aa, Artificial Sequence
  Synthetic construct
EDS

SEQ ID NO: 6856 - protein, 3 aa, Artificial Sequence
  Synthetic construct
LGS

SEQ ID NO: 6857 - protein, 3 aa, Artificial Sequence
  Synthetic construct
KDI

SEQ ID NO: 6858 - protein, 3 aa, Artificial Sequence
  Synthetic construct
AAS

SEQ ID NO: 6859 - protein, 3 aa, Artificial Sequence
  Synthetic construct
AAS

SEQ ID NO: 6860 - protein, 3 aa, Artificial Sequence
  Synthetic construct
DAS

SEQ ID NO: 6861 - protein, 3 aa, Artificial Sequence
  Synthetic construct
GAS

SEQ ID NO: 6862 - protein, 3 aa, Artificial Sequence
  Synthetic construct
DAS

SEQ ID NO: 6863 - protein, 3 aa, Artificial Sequence
  Synthetic construct
EVS

SEQ ID NO: 6864 - protein, 3 aa, Artificial Sequence
  Synthetic construct
DAS

SEQ ID NO: 6865 - protein, 3 aa, Artificial Sequence
  Synthetic construct
EGS

SEQ ID NO: 6866 - protein, 3 aa, Artificial Sequence
  Synthetic construct
DVS

SEQ ID NO: 6867 - protein, 3 aa, Artificial Sequence
  Synthetic construct
SNN

SEQ ID NO: 6868 - protein, 3 aa, Artificial Sequence
  Synthetic construct
DAS

SEQ ID NO: 6869 - protein, 3 aa, Artificial Sequence
  Synthetic construct
DVN

SEQ ID NO: 6870 - protein, 3 aa, Artificial Sequence
  Synthetic construct
EVS

SEQ ID NO: 6871 - protein, 3 aa, Artificial Sequence
  Synthetic construct
QDS

SEQ ID NO: 6872 - protein, 3 aa, Artificial Sequence
  Synthetic construct
EVS

SEQ ID NO: 6873 - protein, 3 aa, Artificial Sequence
  Synthetic construct
DAS

SEQ ID NO: 6874 - protein, 3 aa, Artificial Sequence
  Synthetic construct
DNN

SEQ ID NO: 6875 - protein, 3 aa, Artificial Sequence
  Synthetic construct
SNN

SEQ ID NO: 6876 - protein, 3 aa, Artificial Sequence
  Synthetic construct
KDN

SEQ ID NO: 6877 - protein, 3 aa, Artificial Sequence
  Synthetic construct
KDS

SEQ ID NO: 6878 - protein, 3 aa, Artificial Sequence
  Synthetic construct
EAI

SEQ ID NO: 6879 - protein, 3 aa, Artificial Sequence
  Synthetic construct
KAS

SEQ ID NO: 6880 - protein, 3 aa, Artificial Sequence
  Synthetic construct
DAS

SEQ ID NO: 6881 - protein, 3 aa, Artificial Sequence
  Synthetic construct
TTT

SEQ ID NO: 6882 - protein, 3 aa, Artificial Sequence
  Synthetic construct
DAS

SEQ ID NO: 6883 - protein, 3 aa, Artificial Sequence
  Synthetic construct
DAS

SEQ ID NO: 6884 - protein, 3 aa, Artificial Sequence
  Synthetic construct
GAS

SEQ ID NO: 6885 - protein, 3 aa, Artificial Sequence
  Synthetic construct
DAS

SEQ ID NO: 6886 - protein, 3 aa, Artificial Sequence
  Synthetic construct
DAS

SEQ ID NO: 6887 - protein, 3 aa, Artificial Sequence
  Synthetic construct
GNS

SEQ ID NO: 6888 - protein, 3 aa, Artificial Sequence
  Synthetic construct
RAS

SEQ ID NO: 6889 - protein, 3 aa, Artificial Sequence
  Synthetic construct
KDS

SEQ ID NO: 6890 - protein, 3 aa, Artificial Sequence
  Synthetic construct
AAS

SEQ ID NO: 6891 - protein, 3 aa, Artificial Sequence
  Synthetic construct
GNS

SEQ ID NO: 6892 - protein, 3 aa, Artificial Sequence
  Synthetic construct
AAS

SEQ ID NO: 6893 - protein, 3 aa, Artificial Sequence
  Synthetic construct
DAS

SEQ ID NO: 6894 - protein, 3 aa, Artificial Sequence
  Synthetic construct
AAS

SEQ ID NO: 6895 - protein, 3 aa, Artificial Sequence
  Synthetic construct
GNS

SEQ ID NO: 6896 - protein, 3 aa, Artificial Sequence
  Synthetic construct
DAS

SEQ ID NO: 6897 - protein, 3 aa, Artificial Sequence
  Synthetic construct
WAS

SEQ ID NO: 6898 - protein, 3 aa, Artificial Sequence
  Synthetic construct
AAS

SEQ ID NO: 6899 - protein, 3 aa, Artificial Sequence
  Synthetic construct
RSN

SEQ ID NO: 6900 - protein, 3 aa, Artificial Sequence
  Synthetic construct
QDS

SEQ ID NO: 6901 - protein, 3 aa, Artificial Sequence
  Synthetic construct
DAS

SEQ ID NO: 6902 - protein, 3 aa, Artificial Sequence
  Synthetic construct
KDT

SEQ ID NO: 6903 - protein, 3 aa, Artificial Sequence
  Synthetic construct
AAS

SEQ ID NO: 6904 - protein, 3 aa, Artificial Sequence
  Synthetic construct
AAS

SEQ ID NO: 6905 - protein, 3 aa, Artificial Sequence
  Synthetic construct
GAS

SEQ ID NO: 6906 - protein, 3 aa, Artificial Sequence
  Synthetic construct
DAS

SEQ ID NO: 6907 - protein, 3 aa, Artificial Sequence
  Synthetic construct
EVS

SEQ ID NO: 6908 - protein, 3 aa, Artificial Sequence
  Synthetic construct
QDS

SEQ ID NO: 6909 - protein, 3 aa, Artificial Sequence
  Synthetic construct
AAS

SEQ ID NO: 6910 - protein, 3 aa, Artificial Sequence
  Synthetic construct
GAS

SEQ ID NO: 6911 - protein, 3 aa, Artificial Sequence
  Synthetic construct
DAS

SEQ ID NO: 6912 - protein, 3 aa, Artificial Sequence
  Synthetic construct
GAS

SEQ ID NO: 6913 - protein, 3 aa, Artificial Sequence
  Synthetic construct
EDN

SEQ ID NO: 6914 - protein, 3 aa, Artificial Sequence
  Synthetic construct
RNN

SEQ ID NO: 6915 - protein, 3 aa, Artificial Sequence
  Synthetic construct
GAS

SEQ ID NO: 6916 - protein, 3 aa, Artificial Sequence
  Synthetic construct
KDS

SEQ ID NO: 6917 - protein, 3 aa, Artificial Sequence
  Synthetic construct
GNN

SEQ ID NO: 6918 - protein, 3 aa, Artificial Sequence
  Synthetic construct
DEN

SEQ ID NO: 6919 - protein, 3 aa, Artificial Sequence
  Synthetic construct
EVN

SEQ ID NO: 6920 - protein, 3 aa, Artificial Sequence
  Synthetic construct
KDS

SEQ ID NO: 6921 - protein, 3 aa, Artificial Sequence
  Synthetic construct
WAS

SEQ ID NO: 6922 - protein, 3 aa, Artificial Sequence
  Synthetic construct
DVS

SEQ ID NO: 6923 - protein, 3 aa, Artificial Sequence
  Synthetic construct
GAS

SEQ ID NO: 6924 - protein, 3 aa, Artificial Sequence
  Synthetic construct
EVS

SEQ ID NO: 6925 - protein, 3 aa, Artificial Sequence
  Synthetic construct
DNN

SEQ ID NO: 6926 - protein, 3 aa, Artificial Sequence
  Synthetic construct
AAS

SEQ ID NO: 6927 - protein, 3 aa, Artificial Sequence
  Synthetic construct
GAS

SEQ ID NO: 6928 - protein, 3 aa, Artificial Sequence
  Synthetic construct
DYS

SEQ ID NO: 6929 - protein, 3 aa, Artificial Sequence
  Synthetic construct
GAS

SEQ ID NO: 6930 - protein, 3 aa, Artificial Sequence
  Synthetic construct
GAS

SEQ ID NO: 6931 - protein, 3 aa, Artificial Sequence
  Synthetic construct
AAS

SEQ ID NO: 6932 - protein, 3 aa, Artificial Sequence
  Synthetic construct
LGS

SEQ ID NO: 6933 - protein, 3 aa, Artificial Sequence
  Synthetic construct
EVS

SEQ ID NO: 6934 - protein, 3 aa, Artificial Sequence
  Synthetic construct
DAS

SEQ ID NO: 6935 - protein, 3 aa, Artificial Sequence
  Synthetic construct
GAS

SEQ ID NO: 6936 - protein, 7 aa, Artificial Sequence
  Synthetic construct
YKSDSDK

SEQ ID NO: 6937 - protein, 3 aa, Artificial Sequence
  Synthetic construct
DVN

SEQ ID NO: 6938 - protein, 3 aa, Artificial Sequence
  Synthetic construct
DAS

SEQ ID NO: 6939 - protein, 3 aa, Artificial Sequence
  Synthetic construct
EVT

SEQ ID NO: 6940 - protein, 3 aa, Artificial Sequence
  Synthetic construct
AAS

SEQ ID NO: 6941 - protein, 3 aa, Artificial Sequence
  Synthetic construct
DAS

SEQ ID NO: 6942 - protein, 3 aa, Artificial Sequence
  Synthetic construct
EAT

SEQ ID NO: 6943 - protein, 3 aa, Artificial Sequence
  Synthetic construct
DVT

SEQ ID NO: 6944 - protein, 3 aa, Artificial Sequence
  Synthetic construct
DAS

SEQ ID NO: 6945 - protein, 3 aa, Artificial Sequence
  Synthetic construct
RNT

SEQ ID NO: 6946 - protein, 3 aa, Artificial Sequence
  Synthetic construct
EDN

SEQ ID NO: 6947 - protein, 3 aa, Artificial Sequence
  Synthetic construct
RNN

SEQ ID NO: 6948 - protein, 3 aa, Artificial Sequence
  Synthetic construct
DNN

SEQ ID NO: 6949 - protein, 3 aa, Artificial Sequence
  Synthetic construct
KAS

SEQ ID NO: 6950 - protein, 3 aa, Artificial Sequence
  Synthetic construct
DAS

SEQ ID NO: 6951 - protein, 3 aa, Artificial Sequence
  Synthetic construct
EDD

SEQ ID NO: 6952 - protein, 3 aa, Artificial Sequence
  Synthetic construct
GAS

SEQ ID NO: 6953 - protein, 3 aa, Artificial Sequence
  Synthetic construct
GAS

SEQ ID NO: 6954 - protein, 3 aa, Artificial Sequence
  Synthetic construct
DVT

SEQ ID NO: 6955 - protein, 3 aa, Artificial Sequence
  Synthetic construct
AAS

SEQ ID NO: 6956 - protein, 3 aa, Artificial Sequence
  Synthetic construct
GAS

SEQ ID NO: 6957 - protein, 3 aa, Artificial Sequence
  Synthetic construct
DTS

SEQ ID NO: 6958 - protein, 3 aa, Artificial Sequence
  Synthetic construct
GAS

SEQ ID NO: 6959 - protein, 3 aa, Artificial Sequence
  Synthetic construct
KDS

SEQ ID NO: 6960 - protein, 3 aa, Artificial Sequence
  Synthetic construct
GNS

SEQ ID NO: 6961 - protein, 3 aa, Artificial Sequence
  Synthetic construct
GNN

SEQ ID NO: 6962 - protein, 3 aa, Artificial Sequence
  Synthetic construct
RNN

SEQ ID NO: 6963 - protein, 3 aa, Artificial Sequence
  Synthetic construct
VNS

SEQ ID NO: 6964 - protein, 3 aa, Artificial Sequence
  Synthetic construct
EDS

SEQ ID NO: 6965 - protein, 3 aa, Artificial Sequence
  Synthetic construct
SNN

SEQ ID NO: 6966 - protein, 3 aa, Artificial Sequence
  Synthetic construct
GNN

SEQ ID NO: 6967 - protein, 3 aa, Artificial Sequence
  Synthetic construct
ADI

SEQ ID NO: 6968 - protein, 3 aa, Artificial Sequence
  Synthetic construct
KVS

SEQ ID NO: 6969 - protein, 3 aa, Artificial Sequence
  Synthetic construct
STN

SEQ ID NO: 6970 - protein, 3 aa, Artificial Sequence
  Synthetic construct
RND

SEQ ID NO: 6971 - protein, 3 aa, Artificial Sequence
  Synthetic construct
EDS

SEQ ID NO: 6972 - protein, 3 aa, Artificial Sequence
  Synthetic construct
GAS

SEQ ID NO: 6973 - protein, 3 aa, Artificial Sequence
  Synthetic construct
RNS

SEQ ID NO: 6974 - protein, 3 aa, Artificial Sequence
  Synthetic construct
GAS

SEQ ID NO: 6975 - protein, 3 aa, Artificial Sequence
  Synthetic construct
QDN

SEQ ID NO: 6976 - protein, 3 aa, Artificial Sequence
  Synthetic construct
GTF

SEQ ID NO: 6977 - protein, 3 aa, Artificial Sequence
  Synthetic construct
DVN

SEQ ID NO: 6978 - protein, 3 aa, Artificial Sequence
  Synthetic construct
VNS

SEQ ID NO: 6979 - protein, 3 aa, Artificial Sequence
  Synthetic construct
LGS

SEQ ID NO: 6980 - protein, 3 aa, Artificial Sequence
  Synthetic construct
GAS

SEQ ID NO: 6981 - protein, 3 aa, Artificial Sequence
  Synthetic construct
YDI

SEQ ID NO: 6982 - protein, 3 aa, Artificial Sequence
  Synthetic construct
WAS

SEQ ID NO: 6983 - protein, 3 aa, Artificial Sequence
  Synthetic construct
EGN

SEQ ID NO: 6984 - protein, 3 aa, Artificial Sequence
  Synthetic construct
DVS

SEQ ID NO: 6985 - protein, 3 aa, Artificial Sequence
  Synthetic construct
EDN

SEQ ID NO: 6986 - protein, 3 aa, Artificial Sequence
  Synthetic construct
DVT

SEQ ID NO: 6987 - protein, 3 aa, Artificial Sequence
  Synthetic construct
AAS

SEQ ID NO: 6988 - protein, 3 aa, Artificial Sequence
  Synthetic construct
KAS

SEQ ID NO: 6989 - protein, 3 aa, Artificial Sequence
  Synthetic construct
GAS

SEQ ID NO: 6990 - protein, 3 aa, Artificial Sequence
  Synthetic construct
AAS

SEQ ID NO: 6991 - protein, 3 aa, Artificial Sequence
  Synthetic construct
QDT

SEQ ID NO: 6992 - protein, 3 aa, Artificial Sequence
  Synthetic construct
GAS

SEQ ID NO: 6993 - protein, 3 aa, Artificial Sequence
  Synthetic construct
GAS

SEQ ID NO: 6994 - protein, 3 aa, Artificial Sequence
  Synthetic construct
WAS

SEQ ID NO: 6995 - protein, 3 aa, Artificial Sequence
  Synthetic construct
GAS

SEQ ID NO: 6996 - protein, 3 aa, Artificial Sequence
  Synthetic construct
GAS

SEQ ID NO: 6997 - protein, 3 aa, Artificial Sequence
  Synthetic construct
GNS

SEQ ID NO: 6998 - protein, 3 aa, Artificial Sequence
  Synthetic construct
EVS

SEQ ID NO: 6999 - protein, 3 aa, Artificial Sequence
  Synthetic construct
GAS

SEQ ID NO: 7000 - protein, 3 aa, Artificial Sequence
  Synthetic construct
GSS

SEQ ID NO: 7001 - protein, 3 aa, Artificial Sequence
  Synthetic construct
EGS

SEQ ID NO: 7002 - protein, 3 aa, Artificial Sequence
  Synthetic construct
AAS

SEQ ID NO: 7003 - protein, 3 aa, Artificial Sequence
  Synthetic construct
AAS

SEQ ID NO: 7004 - protein, 3 aa, Artificial Sequence
  Synthetic construct
EIS

SEQ ID NO: 7005 - protein, 3 aa, Artificial Sequence
  Synthetic construct
EDS

SEQ ID NO: 7006 - protein, 3 aa, Artificial Sequence
  Synthetic construct
EDS

SEQ ID NO: 7007 - protein, 3 aa, Artificial Sequence
  Synthetic construct
KAS

SEQ ID NO: 7008 - protein, 3 aa, Artificial Sequence
  Synthetic construct
DAS

SEQ ID NO: 7009 - protein, 3 aa, Artificial Sequence
  Synthetic construct
GAS

SEQ ID NO: 7010 - protein, 3 aa, Artificial Sequence
  Synthetic construct
QDS

SEQ ID NO: 7011 - protein, 3 aa, Artificial Sequence
  Synthetic construct
KAS

SEQ ID NO: 7012 - protein, 3 aa, Artificial Sequence
  Synthetic construct
AAF

SEQ ID NO: 7013 - protein, 3 aa, Artificial Sequence
  Synthetic construct
SIN

SEQ ID NO: 7014 - protein, 3 aa, Artificial Sequence
  Synthetic construct
SGE

SEQ ID NO: 7015 - protein, 3 aa, Artificial Sequence
  Synthetic construct
EVT

SEQ ID NO: 7016 - protein, 3 aa, Artificial Sequence
  Synthetic construct
QDN

SEQ ID NO: 7017 - protein, 3 aa, Artificial Sequence
  Synthetic construct
EDS

SEQ ID NO: 7018 - protein, 3 aa, Artificial Sequence
  Synthetic construct
EVS

SEQ ID NO: 7019 - protein, 3 aa, Artificial Sequence
  Synthetic construct
EDT

SEQ ID NO: 7020 - protein, 3 aa, Artificial Sequence
  Synthetic construct
GAS

SEQ ID NO: 7021 - protein, 3 aa, Artificial Sequence
  Synthetic construct
LGS

SEQ ID NO: 7022 - protein, 3 aa, Artificial Sequence
  Synthetic construct
ENN

SEQ ID NO: 7023 - protein, 3 aa, Artificial Sequence
  Synthetic construct
DAS

SEQ ID NO: 7024 - protein, 3 aa, Artificial Sequence
  Synthetic construct
EVS

SEQ ID NO: 7025 - protein, 3 aa, Artificial Sequence
  Synthetic construct
GAS

SEQ ID NO: 7026 - protein, 3 aa, Artificial Sequence
  Synthetic construct
WAS

SEQ ID NO: 7027 - protein, 3 aa, Artificial Sequence
  Synthetic construct
STS

SEQ ID NO: 7028 - protein, 3 aa, Artificial Sequence
  Synthetic construct
GAS

SEQ ID NO: 7029 - protein, 3 aa, Artificial Sequence
  Synthetic construct
GAS

SEQ ID NO: 7030 - protein, 3 aa, Artificial Sequence
  Synthetic construct
EVT

SEQ ID NO: 7031 - protein, 3 aa, Artificial Sequence
  Synthetic construct
EVT

SEQ ID NO: 7032 - protein, 3 aa, Artificial Sequence
  Synthetic construct
GAS

SEQ ID NO: 7033 - protein, 3 aa, Artificial Sequence
  Synthetic construct
DVS

SEQ ID NO: 7034 - protein, 3 aa, Artificial Sequence
  Synthetic construct
EDN

SEQ ID NO: 7035 - protein, 3 aa, Artificial Sequence
  Synthetic construct
RAS

SEQ ID NO: 7036 - protein, 3 aa, Artificial Sequence
  Synthetic construct
GNT

SEQ ID NO: 7037 - protein, 3 aa, Artificial Sequence
  Synthetic construct
QDI

SEQ ID NO: 7038 - protein, 3 aa, Artificial Sequence
  Synthetic construct
SNN

SEQ ID NO: 7039 - protein, 3 aa, Artificial Sequence
  Synthetic construct
RNN

SEQ ID NO: 7040 - protein, 3 aa, Artificial Sequence
  Synthetic construct
DAS

SEQ ID NO: 7041 - protein, 3 aa, Artificial Sequence
  Synthetic construct
DDR

SEQ ID NO: 7042 - protein, 3 aa, Artificial Sequence
  Synthetic construct
AAS

SEQ ID NO: 7043 - protein, 3 aa, Artificial Sequence
  Synthetic construct
GAS

SEQ ID NO: 7044 - protein, 3 aa, Artificial Sequence
  Synthetic construct
DVS

SEQ ID NO: 7045 - protein, 3 aa, Artificial Sequence
  Synthetic construct
GAS

SEQ ID NO: 7046 - protein, 3 aa, Artificial Sequence
  Synthetic construct
DVS

SEQ ID NO: 7047 - protein, 3 aa, Artificial Sequence
  Synthetic construct
AAS

SEQ ID NO: 7048 - protein, 3 aa, Artificial Sequence
  Synthetic construct
EDS

SEQ ID NO: 7049 - protein, 3 aa, Artificial Sequence
  Synthetic construct
AAS

SEQ ID NO: 7050 - protein, 3 aa, Artificial Sequence
  Synthetic construct
GAS

SEQ ID NO: 7051 - protein, 3 aa, Artificial Sequence
  Synthetic construct
GAS

SEQ ID NO: 7052 - protein, 3 aa, Artificial Sequence
  Synthetic construct
AAS

SEQ ID NO: 7053 - protein, 3 aa, Artificial Sequence
  Synthetic construct
EDS

SEQ ID NO: 7054 - protein, 3 aa, Artificial Sequence
  Synthetic construct
GNN

SEQ ID NO: 7055 - protein, 3 aa, Artificial Sequence
  Synthetic construct
GNT

SEQ ID NO: 7056 - protein, 3 aa, Artificial Sequence
  Synthetic construct
GVR

SEQ ID NO: 7057 - protein, 3 aa, Artificial Sequence
  Synthetic construct
WAS

SEQ ID NO: 7058 - protein, 3 aa, Artificial Sequence
  Synthetic construct
WSS

SEQ ID NO: 7059 - protein, 3 aa, Artificial Sequence
  Synthetic construct
SNN

SEQ ID NO: 7060 - protein, 3 aa, Artificial Sequence
  Synthetic construct
GAS

SEQ ID NO: 7061 - protein, 3 aa, Artificial Sequence
  Synthetic construct
KDS

SEQ ID NO: 7062 - protein, 3 aa, Artificial Sequence
  Synthetic construct
GAS

SEQ ID NO: 7063 - protein, 3 aa, Artificial Sequence
  Synthetic construct
RNN

SEQ ID NO: 7064 - protein, 3 aa, Artificial Sequence
  Synthetic construct
AAS

SEQ ID NO: 7065 - protein, 3 aa, Artificial Sequence
  Synthetic construct
NNN

SEQ ID NO: 7066 - protein, 3 aa, Artificial Sequence
  Synthetic construct
EDS

SEQ ID NO: 7067 - protein, 3 aa, Artificial Sequence
  Synthetic construct
AAS

SEQ ID NO: 7068 - protein, 3 aa, Artificial Sequence
  Synthetic construct
GAS

SEQ ID NO: 7069 - protein, 3 aa, Artificial Sequence
  Synthetic construct
GNI

SEQ ID NO: 7070 - protein, 3 aa, Artificial Sequence
  Synthetic construct
EVS

SEQ ID NO: 7071 - protein, 3 aa, Artificial Sequence
  Synthetic construct
AAS

SEQ ID NO: 7072 - protein, 3 aa, Artificial Sequence
  Synthetic construct
EVT

SEQ ID NO: 7073 - protein, 3 aa, Artificial Sequence
  Synthetic construct
KAS

SEQ ID NO: 7074 - protein, 3 aa, Artificial Sequence
  Synthetic construct
GNT

SEQ ID NO: 7075 - protein, 3 aa, Artificial Sequence
  Synthetic construct
WAS

SEQ ID NO: 7076 - protein, 3 aa, Artificial Sequence
  Synthetic construct
EVS

SEQ ID NO: 7077 - protein, 3 aa, Artificial Sequence
  Synthetic construct
EVN

SEQ ID NO: 7078 - protein, 3 aa, Artificial Sequence
  Synthetic construct
KDS

SEQ ID NO: 7079 - protein, 3 aa, Artificial Sequence
  Synthetic construct
EDT

SEQ ID NO: 7080 - protein, 3 aa, Artificial Sequence
  Synthetic construct
LGS

SEQ ID NO: 7081 - protein, 3 aa, Artificial Sequence
  Synthetic construct
KAS

SEQ ID NO: 7082 - protein, 3 aa, Artificial Sequence
  Synthetic construct
DVA

SEQ ID NO: 7083 - protein, 3 aa, Artificial Sequence
  Synthetic construct
DAS

SEQ ID NO: 7084 - protein, 3 aa, Artificial Sequence
  Synthetic construct
WAS

SEQ ID NO: 7085 - protein, 3 aa, Artificial Sequence
  Synthetic construct
DVS

SEQ ID NO: 7086 - protein, 3 aa, Artificial Sequence
  Synthetic construct
GAA

SEQ ID NO: 7087 - protein, 3 aa, Artificial Sequence
  Synthetic construct
GAS

SEQ ID NO: 7088 - protein, 3 aa, Artificial Sequence
  Synthetic construct
DVT

SEQ ID NO: 7089 - protein, 3 aa, Artificial Sequence
  Synthetic construct
SNN

SEQ ID NO: 7090 - protein, 3 aa, Artificial Sequence
  Synthetic construct
RNN

SEQ ID NO: 7091 - protein, 3 aa, Artificial Sequence
  Synthetic construct
KDS

SEQ ID NO: 7092 - protein, 3 aa, Artificial Sequence
  Synthetic construct
DAS

SEQ ID NO: 7093 - protein, 3 aa, Artificial Sequence
  Synthetic construct
GAS

SEQ ID NO: 7094 - protein, 3 aa, Artificial Sequence
  Synthetic construct
AAS

SEQ ID NO: 7095 - protein, 3 aa, Artificial Sequence
  Synthetic construct
AAT

SEQ ID NO: 7096 - protein, 3 aa, Artificial Sequence
  Synthetic construct
DVD

SEQ ID NO: 7097 - protein, 3 aa, Artificial Sequence
  Synthetic construct
TNN

SEQ ID NO: 7098 - protein, 3 aa, Artificial Sequence
  Synthetic construct
GAS

SEQ ID NO: 7099 - protein, 3 aa, Artificial Sequence
  Synthetic construct
GAS

SEQ ID NO: 7100 - protein, 3 aa, Artificial Sequence
  Synthetic construct
QDS

SEQ ID NO: 7101 - protein, 3 aa, Artificial Sequence
  Synthetic construct
AAS

SEQ ID NO: 7102 - protein, 3 aa, Artificial Sequence
  Synthetic construct
GAS

SEQ ID NO: 7103 - protein, 3 aa, Artificial Sequence
  Synthetic construct
TAS

SEQ ID NO: 7104 - protein, 3 aa, Artificial Sequence
  Synthetic construct
RAS

SEQ ID NO: 7105 - protein, 3 aa, Artificial Sequence
  Synthetic construct
WAS

SEQ ID NO: 7106 - protein, 3 aa, Artificial Sequence
  Synthetic construct
KDS

SEQ ID NO: 7107 - protein, 3 aa, Artificial Sequence
  Synthetic construct
GAS

SEQ ID NO: 7108 - protein, 3 aa, Artificial Sequence
  Synthetic construct
WAS

SEQ ID NO: 7109 - protein, 3 aa, Artificial Sequence
  Synthetic construct
GAS

SEQ ID NO: 7110 - protein, 3 aa, Artificial Sequence
  Synthetic construct
DTS

SEQ ID NO: 7111 - protein, 3 aa, Artificial Sequence
  Synthetic construct
GKN

SEQ ID NO: 7112 - protein, 3 aa, Artificial Sequence
  Synthetic construct
WAS

SEQ ID NO: 7113 - protein, 3 aa, Artificial Sequence
  Synthetic construct
EDS

SEQ ID NO: 7114 - protein, 3 aa, Artificial Sequence
  Synthetic construct
SND

SEQ ID NO: 7115 - protein, 3 aa, Artificial Sequence
  Synthetic construct
DVN

SEQ ID NO: 7116 - protein, 3 aa, Artificial Sequence
  Synthetic construct
DVS

SEQ ID NO: 7117 - protein, 3 aa, Artificial Sequence
  Synthetic construct
DNN

SEQ ID NO: 7118 - protein, 3 aa, Artificial Sequence
  Synthetic construct
EAS

SEQ ID NO: 7119 - protein, 3 aa, Artificial Sequence
  Synthetic construct
ETN

SEQ ID NO: 7120 - protein, 3 aa, Artificial Sequence
  Synthetic construct
DAS

SEQ ID NO: 7121 - protein, 3 aa, Artificial Sequence
  Synthetic construct
QDS

SEQ ID NO: 7122 - protein, 3 aa, Artificial Sequence
  Synthetic construct
GAS

SEQ ID NO: 7123 - protein, 3 aa, Artificial Sequence
  Synthetic construct
EDG

SEQ ID NO: 7124 - protein, 3 aa, Artificial Sequence
  Synthetic construct
GAS

SEQ ID NO: 7125 - protein, 3 aa, Artificial Sequence
  Synthetic construct
GAS

SEQ ID NO: 7126 - protein, 3 aa, Artificial Sequence
  Synthetic construct
DVS

SEQ ID NO: 7127 - protein, 3 aa, Artificial Sequence
  Synthetic construct
EVN

SEQ ID NO: 7128 - protein, 3 aa, Artificial Sequence
  Synthetic construct
DNS

SEQ ID NO: 7129 - protein, 3 aa, Artificial Sequence
  Synthetic construct
AAS

SEQ ID NO: 7130 - protein, 3 aa, Artificial Sequence
  Synthetic construct
QAS

SEQ ID NO: 7131 - protein, 3 aa, Artificial Sequence
  Synthetic construct
WAS

SEQ ID NO: 7132 - protein, 3 aa, Artificial Sequence
  Synthetic construct
AAS

SEQ ID NO: 7133 - protein, 3 aa, Artificial Sequence
  Synthetic construct
DTN

SEQ ID NO: 7134 - protein, 3 aa, Artificial Sequence
  Synthetic construct
DAS

SEQ ID NO: 7135 - protein, 3 aa, Artificial Sequence
  Synthetic construct
DVS

SEQ ID NO: 7136 - protein, 3 aa, Artificial Sequence
  Synthetic construct
DVN

SEQ ID NO: 7137 - protein, 3 aa, Artificial Sequence
  Synthetic construct
DAS

SEQ ID NO: 7138 - protein, 3 aa, Artificial Sequence
  Synthetic construct
EVT

SEQ ID NO: 7139 - protein, 3 aa, Artificial Sequence
  Synthetic construct
EGS

SEQ ID NO: 7140 - protein, 3 aa, Artificial Sequence
  Synthetic construct
EVF

SEQ ID NO: 7141 - protein, 3 aa, Artificial Sequence
  Synthetic construct
AAS

SEQ ID NO: 7142 - protein, 3 aa, Artificial Sequence
  Synthetic construct
EGS

SEQ ID NO: 7143 - protein, 3 aa, Artificial Sequence
  Synthetic construct
EGS

SEQ ID NO: 7144 - protein, 3 aa, Artificial Sequence
  Synthetic construct
GAS

SEQ ID NO: 7145 - protein, 3 aa, Artificial Sequence
  Synthetic construct
GAS

SEQ ID NO: 7146 - protein, 3 aa, Artificial Sequence
  Synthetic construct
KVS

SEQ ID NO: 7147 - protein, 3 aa, Artificial Sequence
  Synthetic construct
FNN

SEQ ID NO: 7148 - protein, 3 aa, Artificial Sequence
  Synthetic construct
EDS

SEQ ID NO: 7149 - protein, 3 aa, Artificial Sequence
  Synthetic construct
EGS

SEQ ID NO: 7150 - protein, 3 aa, Artificial Sequence
  Synthetic construct
LGS

SEQ ID NO: 7151 - protein, 3 aa, Artificial Sequence
  Synthetic construct
GTS

SEQ ID NO: 7152 - protein, 3 aa, Artificial Sequence
  Synthetic construct
DAS

SEQ ID NO: 7153 - protein, 3 aa, Artificial Sequence
  Synthetic construct
DVY

SEQ ID NO: 7154 - protein, 3 aa, Artificial Sequence
  Synthetic construct
NNN

SEQ ID NO: 7155 - protein, 3 aa, Artificial Sequence
  Synthetic construct
DAS

SEQ ID NO: 7156 - protein, 3 aa, Artificial Sequence
  Synthetic construct
AAS

SEQ ID NO: 7157 - protein, 3 aa, Artificial Sequence
  Synthetic construct
DAS

SEQ ID NO: 7158 - protein, 3 aa, Artificial Sequence
  Synthetic construct
DAS

SEQ ID NO: 7159 - protein, 3 aa, Artificial Sequence
  Synthetic construct
DVT

SEQ ID NO: 7160 - protein, 3 aa, Artificial Sequence
  Synthetic construct
EDS

SEQ ID NO: 7161 - protein, 3 aa, Artificial Sequence
  Synthetic construct
DAS

SEQ ID NO: 7162 - protein, 3 aa, Artificial Sequence
  Synthetic construct
KVS

SEQ ID NO: 7163 - protein, 3 aa, Artificial Sequence
  Synthetic construct
AAS

SEQ ID NO: 7164 - protein, 3 aa, Artificial Sequence
  Synthetic construct
LGS

SEQ ID NO: 7165 - protein, 3 aa, Artificial Sequence
  Synthetic construct
DVT

SEQ ID NO: 7166 - protein, 3 aa, Artificial Sequence
  Synthetic construct
DNN

SEQ ID NO: 7167 - protein, 3 aa, Artificial Sequence
  Synthetic construct
LGS

SEQ ID NO: 7168 - protein, 3 aa, Artificial Sequence
  Synthetic construct
RNS

SEQ ID NO: 7169 - protein, 3 aa, Artificial Sequence
  Synthetic construct
RSN

SEQ ID NO: 7170 - protein, 3 aa, Artificial Sequence
  Synthetic construct
AAS

SEQ ID NO: 7171 - protein, 3 aa, Artificial Sequence
  Synthetic construct
KVS

SEQ ID NO: 7172 - protein, 3 aa, Artificial Sequence
  Synthetic construct
LGS

SEQ ID NO: 7173 - protein, 3 aa, Artificial Sequence
  Synthetic construct
KIS

SEQ ID NO: 7174 - protein, 3 aa, Artificial Sequence
  Synthetic construct
DAS

SEQ ID NO: 7175 - protein, 3 aa, Artificial Sequence
  Synthetic construct
GAS

SEQ ID NO: 7176 - protein, 3 aa, Artificial Sequence
  Synthetic construct
ELS

SEQ ID NO: 7177 - protein, 3 aa, Artificial Sequence
  Synthetic construct
GAS

SEQ ID NO: 7178 - protein, 3 aa, Artificial Sequence
  Synthetic construct
TTS

SEQ ID NO: 7179 - protein, 3 aa, Artificial Sequence
  Synthetic construct
RVS

SEQ ID NO: 7180 - protein, 3 aa, Artificial Sequence
  Synthetic construct
DNN

SEQ ID NO: 7181 - protein, 3 aa, Artificial Sequence
  Synthetic construct
DVT

SEQ ID NO: 7182 - protein, 3 aa, Artificial Sequence
  Synthetic construct
KVS

SEQ ID NO: 7183 - protein, 3 aa, Artificial Sequence
  Synthetic construct
GEN

SEQ ID NO: 7184 - protein, 3 aa, Artificial Sequence
  Synthetic construct
DAS

SEQ ID NO: 7185 - protein, 3 aa, Artificial Sequence
  Synthetic construct
KAS

SEQ ID NO: 7186 - protein, 3 aa, Artificial Sequence
  Synthetic construct
DVS

SEQ ID NO: 7187 - protein, 3 aa, Artificial Sequence
  Synthetic construct
QGT

SEQ ID NO: 7188 - protein, 3 aa, Artificial Sequence
  Synthetic construct
QDN

SEQ ID NO: 7189 - protein, 3 aa, Artificial Sequence
  Synthetic construct
AAS

SEQ ID NO: 7190 - protein, 3 aa, Artificial Sequence
  Synthetic construct
DVS

SEQ ID NO: 7191 - protein, 3 aa, Artificial Sequence
  Synthetic construct
AAS

SEQ ID NO: 7192 - protein, 3 aa, Artificial Sequence
  Synthetic construct
GAS

SEQ ID NO: 7193 - protein, 3 aa, Artificial Sequence
  Synthetic construct
DNN

SEQ ID NO: 7194 - protein, 3 aa, Artificial Sequence
  Synthetic construct
YDD

SEQ ID NO: 7195 - protein, 3 aa, Artificial Sequence
  Synthetic construct
HTS

SEQ ID NO: 7196 - protein, 3 aa, Artificial Sequence
  Synthetic construct
AAS

SEQ ID NO: 7197 - protein, 3 aa, Artificial Sequence
  Synthetic construct
SNN

SEQ ID NO: 7198 - protein, 3 aa, Artificial Sequence
  Synthetic construct
DVS

SEQ ID NO: 7199 - protein, 3 aa, Artificial Sequence
  Synthetic construct
DVM

SEQ ID NO: 7200 - protein, 3 aa, Artificial Sequence
  Synthetic construct
WAS

SEQ ID NO: 7201 - protein, 3 aa, Artificial Sequence
  Synthetic construct
DNT

SEQ ID NO: 7202 - protein, 3 aa, Artificial Sequence
  Synthetic construct
DAS

SEQ ID NO: 7203 - protein, 3 aa, Artificial Sequence
  Synthetic construct
DAS

SEQ ID NO: 7204 - protein, 3 aa, Artificial Sequence
  Synthetic construct
DAS

SEQ ID NO: 7205 - protein, 3 aa, Artificial Sequence
  Synthetic construct
TNF

SEQ ID NO: 7206 - protein, 3 aa, Artificial Sequence
  Synthetic construct
EVS

SEQ ID NO: 7207 - protein, 3 aa, Artificial Sequence
  Synthetic construct
WSS

SEQ ID NO: 7208 - protein, 3 aa, Artificial Sequence
  Synthetic construct
DAS

SEQ ID NO: 7209 - protein, 3 aa, Artificial Sequence
  Synthetic construct
QDN

SEQ ID NO: 7210 - protein, 3 aa, Artificial Sequence
  Synthetic construct
YDD

SEQ ID NO: 7211 - protein, 3 aa, Artificial Sequence
  Synthetic construct
DVS

SEQ ID NO: 7212 - protein, 3 aa, Artificial Sequence
  Synthetic construct
DAS

SEQ ID NO: 7213 - protein, 3 aa, Artificial Sequence
  Synthetic construct
DAS

SEQ ID NO: 7214 - protein, 3 aa, Artificial Sequence
  Synthetic construct
YDS

SEQ ID NO: 7215 - protein, 3 aa, Artificial Sequence
  Synthetic construct
EAS

SEQ ID NO: 7216 - protein, 3 aa, Artificial Sequence
  Synthetic construct
DVS

SEQ ID NO: 7217 - protein, 3 aa, Artificial Sequence
  Synthetic construct
AAS

SEQ ID NO: 7218 - protein, 3 aa, Artificial Sequence
  Synthetic construct
GAS

SEQ ID NO: 7219 - protein, 3 aa, Artificial Sequence
  Synthetic construct
EVT

SEQ ID NO: 7220 - protein, 3 aa, Artificial Sequence
  Synthetic construct
AAS

SEQ ID NO: 7221 - protein, 3 aa, Artificial Sequence
  Synthetic construct
WAS

SEQ ID NO: 7222 - protein, 3 aa, Artificial Sequence
  Synthetic construct
GKN

SEQ ID NO: 7223 - protein, 3 aa, Artificial Sequence
  Synthetic construct
GAS

SEQ ID NO: 7224 - protein, 3 aa, Artificial Sequence
  Synthetic construct
LGS

SEQ ID NO: 7225 - protein, 3 aa, Artificial Sequence
  Synthetic construct
AAS

SEQ ID NO: 7226 - protein, 3 aa, Artificial Sequence
  Synthetic construct
GAS

SEQ ID NO: 7227 - protein, 3 aa, Artificial Sequence
  Synthetic construct
GNT

SEQ ID NO: 7228 - protein, 3 aa, Artificial Sequence
  Synthetic construct
GTS

SEQ ID NO: 7229 - protein, 3 aa, Artificial Sequence
  Synthetic construct
QDT

SEQ ID NO: 7230 - protein, 3 aa, Artificial Sequence
  Synthetic construct
KDS

SEQ ID NO: 7231 - protein, 3 aa, Artificial Sequence
  Synthetic construct
AAS

SEQ ID NO: 7232 - protein, 3 aa, Artificial Sequence
  Synthetic construct
KVS

SEQ ID NO: 7233 - protein, 3 aa, Artificial Sequence
  Synthetic construct
QDS

SEQ ID NO: 7234 - protein, 3 aa, Artificial Sequence
  Synthetic construct
GAS

SEQ ID NO: 7235 - protein, 3 aa, Artificial Sequence
  Synthetic construct
AAS

SEQ ID NO: 7236 - protein, 3 aa, Artificial Sequence
  Synthetic construct
AAS

SEQ ID NO: 7237 - protein, 3 aa, Artificial Sequence
  Synthetic construct
EGS

SEQ ID NO: 7238 - protein, 3 aa, Artificial Sequence
  Synthetic construct
GAS

SEQ ID NO: 7239 - protein, 3 aa, Artificial Sequence
  Synthetic construct
GAS

SEQ ID NO: 7240 - protein, 3 aa, Artificial Sequence
  Synthetic construct
KAS

SEQ ID NO: 7241 - protein, 3 aa, Artificial Sequence
  Synthetic construct
LGS

SEQ ID NO: 7242 - protein, 3 aa, Artificial Sequence
  Synthetic construct
KDT

SEQ ID NO: 7243 - protein, 3 aa, Artificial Sequence
  Synthetic construct
GAS

SEQ ID NO: 7244 - protein, 3 aa, Artificial Sequence
  Synthetic construct
DAS

SEQ ID NO: 7245 - protein, 3 aa, Artificial Sequence
  Synthetic construct
ATS

SEQ ID NO: 7246 - protein, 3 aa, Artificial Sequence
  Synthetic construct
EDN

SEQ ID NO: 7247 - protein, 3 aa, Artificial Sequence
  Synthetic construct
DAS

SEQ ID NO: 7248 - protein, 3 aa, Artificial Sequence
  Synthetic construct
EDS

SEQ ID NO: 7249 - protein, 3 aa, Artificial Sequence
  Synthetic construct
LGS

SEQ ID NO: 7250 - protein, 3 aa, Artificial Sequence
  Synthetic construct
DVS

SEQ ID NO: 7251 - protein, 3 aa, Artificial Sequence
  Synthetic construct
KAS

SEQ ID NO: 7252 - protein, 3 aa, Artificial Sequence
  Synthetic construct
GNT

SEQ ID NO: 7253 - protein, 3 aa, Artificial Sequence
  Synthetic construct
DST

SEQ ID NO: 7254 - protein, 3 aa, Artificial Sequence
  Synthetic construct
GEN

SEQ ID NO: 7255 - protein, 3 aa, Artificial Sequence
  Synthetic construct
GAS

SEQ ID NO: 7256 - protein, 7 aa, Artificial Sequence
  Synthetic construct
YKSDSDK

SEQ ID NO: 7257 - protein, 3 aa, Artificial Sequence
  Synthetic construct
NVN

SEQ ID NO: 7258 - protein, 3 aa, Artificial Sequence
  Synthetic construct
DVA

SEQ ID NO: 7259 - protein, 3 aa, Artificial Sequence
  Synthetic construct
QAS

SEQ ID NO: 7260 - protein, 3 aa, Artificial Sequence
  Synthetic construct
EDS

SEQ ID NO: 7261 - protein, 3 aa, Artificial Sequence
  Synthetic construct
EVN

SEQ ID NO: 7262 - protein, 3 aa, Artificial Sequence
  Synthetic construct
SNS

SEQ ID NO: 7263 - protein, 3 aa, Artificial Sequence
  Synthetic construct
GNT

SEQ ID NO: 7264 - protein, 3 aa, Artificial Sequence
  Synthetic construct
YDS

SEQ ID NO: 7265 - protein, 3 aa, Artificial Sequence
  Synthetic construct
ANS

SEQ ID NO: 7266 - protein, 3 aa, Artificial Sequence
  Synthetic construct
DVS

SEQ ID NO: 7267 - protein, 3 aa, Artificial Sequence
  Synthetic construct
GAS

SEQ ID NO: 7268 - protein, 3 aa, Artificial Sequence
  Synthetic construct
DAS

SEQ ID NO: 7269 - protein, 3 aa, Artificial Sequence
  Synthetic construct
DVS

SEQ ID NO: 7270 - protein, 3 aa, Artificial Sequence
  Synthetic construct
WAS

SEQ ID NO: 7271 - protein, 3 aa, Artificial Sequence
  Synthetic construct
DAS

SEQ ID NO: 7272 - protein, 3 aa, Artificial Sequence
  Synthetic construct
DAS

SEQ ID NO: 7273 - protein, 3 aa, Artificial Sequence
  Synthetic construct
EVT

SEQ ID NO: 7274 - protein, 3 aa, Artificial Sequence
  Synthetic construct
QDS

SEQ ID NO: 7275 - protein, 3 aa, Artificial Sequence
  Synthetic construct
EDS

SEQ ID NO: 7276 - protein, 3 aa, Artificial Sequence
  Synthetic construct
DAS

SEQ ID NO: 7277 - protein, 3 aa, Artificial Sequence
  Synthetic construct
DAS

SEQ ID NO: 7278 - protein, 3 aa, Artificial Sequence
  Synthetic construct
NNN

SEQ ID NO: 7279 - protein, 3 aa, Artificial Sequence
  Synthetic construct
GND

SEQ ID NO: 7280 - protein, 3 aa, Artificial Sequence
  Synthetic construct
DAS

SEQ ID NO: 7281 - protein, 3 aa, Artificial Sequence
  Synthetic construct
GAS

SEQ ID NO: 7282 - protein, 3 aa, Artificial Sequence
  Synthetic construct
DAS

SEQ ID NO: 7283 - protein, 3 aa, Artificial Sequence
  Synthetic construct
EVS

SEQ ID NO: 7284 - protein, 3 aa, Artificial Sequence
  Synthetic construct
ENN

SEQ ID NO: 7285 - protein, 3 aa, Artificial Sequence
  Synthetic construct
KAS

SEQ ID NO: 7286 - protein, 3 aa, Artificial Sequence
  Synthetic construct
AAS

SEQ ID NO: 7287 - protein, 3 aa, Artificial Sequence
  Synthetic construct
SDS

SEQ ID NO: 7288 - protein, 3 aa, Artificial Sequence
  Synthetic construct
ANS

SEQ ID NO: 7289 - protein, 3 aa, Artificial Sequence
  Synthetic construct
MAS

SEQ ID NO: 7290 - protein, 3 aa, Artificial Sequence
  Synthetic construct
ATS

SEQ ID NO: 7291 - protein, 3 aa, Artificial Sequence
  Synthetic construct
GAS

SEQ ID NO: 7292 - protein, 3 aa, Artificial Sequence
  Synthetic construct
DVS

SEQ ID NO: 7293 - protein, 3 aa, Artificial Sequence
  Synthetic construct
LGS

SEQ ID NO: 7294 - protein, 3 aa, Artificial Sequence
  Synthetic construct
QDY

SEQ ID NO: 7295 - protein, 3 aa, Artificial Sequence
  Synthetic construct
EVT

SEQ ID NO: 7296 - protein, 3 aa, Artificial Sequence
  Synthetic construct
SNN

SEQ ID NO: 7297 - protein, 3 aa, Artificial Sequence
  Synthetic construct
RNN

SEQ ID NO: 7298 - protein, 3 aa, Artificial Sequence
  Synthetic construct
WAS

SEQ ID NO: 7299 - protein, 3 aa, Artificial Sequence
  Synthetic construct
RVS

SEQ ID NO: 7300 - protein, 3 aa, Artificial Sequence
  Synthetic construct
GAS

SEQ ID NO: 7301 - protein, 3 aa, Artificial Sequence
  Synthetic construct
QDT

SEQ ID NO: 7302 - protein, 3 aa, Artificial Sequence
  Synthetic construct
QDS

SEQ ID NO: 7303 - protein, 3 aa, Artificial Sequence
  Synthetic construct
GAS

SEQ ID NO: 7304 - protein, 3 aa, Artificial Sequence
  Synthetic construct
EDT

SEQ ID NO: 7305 - protein, 3 aa, Artificial Sequence
  Synthetic construct
WSS

SEQ ID NO: 7306 - protein, 3 aa, Artificial Sequence
  Synthetic construct
DVS

SEQ ID NO: 7307 - protein, 3 aa, Artificial Sequence
  Synthetic construct
DNN

SEQ ID NO: 7308 - protein, 3 aa, Artificial Sequence
  Synthetic construct
SNT

SEQ ID NO: 7309 - protein, 3 aa, Artificial Sequence
  Synthetic construct
DAS

SEQ ID NO: 7310 - protein, 7 aa, Artificial Sequence
  Synthetic construct
VEYTGIY

SEQ ID NO: 7311 - protein, 3 aa, Artificial Sequence
  Synthetic construct
AAS

SEQ ID NO: 7312 - protein, 3 aa, Artificial Sequence
  Synthetic construct
WAS

SEQ ID NO: 7313 - protein, 3 aa, Artificial Sequence
  Synthetic construct
EGS

SEQ ID NO: 7314 - protein, 3 aa, Artificial Sequence
  Synthetic construct
QDN

SEQ ID NO: 7315 - protein, 3 aa, Artificial Sequence
  Synthetic construct
EVS

SEQ ID NO: 7316 - protein, 3 aa, Artificial Sequence
  Synthetic construct
DVS

SEQ ID NO: 7317 - protein, 3 aa, Artificial Sequence
  Synthetic construct
DAS

SEQ ID NO: 7318 - protein, 3 aa, Artificial Sequence
  Synthetic construct
DAS

SEQ ID NO: 7319 - protein, 3 aa, Artificial Sequence
  Synthetic construct
GKN

SEQ ID NO: 7320 - protein, 3 aa, Artificial Sequence
  Synthetic construct
GAS

SEQ ID NO: 7321 - protein, 3 aa, Artificial Sequence
  Synthetic construct
SAS

SEQ ID NO: 7322 - protein, 3 aa, Artificial Sequence
  Synthetic construct
GGS

SEQ ID NO: 7323 - protein, 3 aa, Artificial Sequence
  Synthetic construct
GSD

SEQ ID NO: 7324 - protein, 3 aa, Artificial Sequence
  Synthetic construct
KDT

SEQ ID NO: 7325 - protein, 3 aa, Artificial Sequence
  Synthetic construct
KAS

SEQ ID NO: 7326 - protein, 3 aa, Artificial Sequence
  Synthetic construct
EVS

SEQ ID NO: 7327 - protein, 3 aa, Artificial Sequence
  Synthetic construct
GNT

SEQ ID NO: 7328 - protein, 3 aa, Artificial Sequence
  Synthetic construct
GEN

SEQ ID NO: 7329 - protein, 3 aa, Artificial Sequence
  Synthetic construct
KIS

SEQ ID NO: 7330 - protein, 3 aa, Artificial Sequence
  Synthetic construct
AAS

SEQ ID NO: 7331 - protein, 3 aa, Artificial Sequence
  Synthetic construct
AAS

SEQ ID NO: 7332 - protein, 3 aa, Artificial Sequence
  Synthetic construct
AAS

SEQ ID NO: 7333 - protein, 3 aa, Artificial Sequence
  Synthetic construct
GNS

SEQ ID NO: 7334 - protein, 3 aa, Artificial Sequence
  Synthetic construct
WAS

SEQ ID NO: 7335 - protein, 3 aa, Artificial Sequence
  Synthetic construct
YNS

SEQ ID NO: 7336 - protein, 3 aa, Artificial Sequence
  Synthetic construct
DVS

SEQ ID NO: 7337 - protein, 3 aa, Artificial Sequence
  Synthetic construct
EDT

SEQ ID NO: 7338 - protein, 3 aa, Artificial Sequence
  Synthetic construct
EDS

SEQ ID NO: 7339 - protein, 3 aa, Artificial Sequence
  Synthetic construct
WAS

SEQ ID NO: 7340 - protein, 3 aa, Artificial Sequence
  Synthetic construct
QDN

SEQ ID NO: 7341 - protein, 3 aa, Artificial Sequence
  Synthetic construct
YDR

SEQ ID NO: 7342 - protein, 3 aa, Artificial Sequence
  Synthetic construct
DAS

SEQ ID NO: 7343 - protein, 3 aa, Artificial Sequence
  Synthetic construct
AAS

SEQ ID NO: 7344 - protein, 3 aa, Artificial Sequence
  Synthetic construct
GAS

SEQ ID NO: 7345 - protein, 3 aa, Artificial Sequence
  Synthetic construct
WAS

SEQ ID NO: 7346 - protein, 3 aa, Artificial Sequence
  Synthetic construct
LGS

SEQ ID NO: 7347 - protein, 3 aa, Artificial Sequence
  Synthetic construct
KAS

SEQ ID NO: 7348 - protein, 3 aa, Artificial Sequence
  Synthetic construct
DVS

SEQ ID NO: 7349 - protein, 3 aa, Artificial Sequence
  Synthetic construct
GAS

SEQ ID NO: 7350 - protein, 3 aa, Artificial Sequence
  Synthetic construct
WAS

SEQ ID NO: 7351 - protein, 3 aa, Artificial Sequence
  Synthetic construct
EVS

SEQ ID NO: 7352 - protein, 3 aa, Artificial Sequence
  Synthetic construct
DAS

SEQ ID NO: 7353 - protein, 3 aa, Artificial Sequence
  Synthetic construct
EDN

SEQ ID NO: 7354 - protein, 3 aa, Artificial Sequence
  Synthetic construct
YDS

SEQ ID NO: 7355 - protein, 3 aa, Artificial Sequence
  Synthetic construct
AAS

SEQ ID NO: 7356 - protein, 3 aa, Artificial Sequence
  Synthetic construct
DAS

SEQ ID NO: 7357 - protein, 3 aa, Artificial Sequence
  Synthetic construct
KAS

SEQ ID NO: 7358 - protein, 3 aa, Artificial Sequence
  Synthetic construct
TNN

SEQ ID NO: 7359 - protein, 3 aa, Artificial Sequence
  Synthetic construct
DAS

SEQ ID NO: 7360 - protein, 3 aa, Artificial Sequence
  Synthetic construct
DGS

SEQ ID NO: 7361 - protein, 3 aa, Artificial Sequence
  Synthetic construct
AAS

SEQ ID NO: 7362 - protein, 3 aa, Artificial Sequence
  Synthetic construct
AAS

SEQ ID NO: 7363 - protein, 3 aa, Artificial Sequence
  Synthetic construct
ELS

SEQ ID NO: 7364 - protein, 3 aa, Artificial Sequence
  Synthetic construct
DEN

SEQ ID NO: 7365 - protein, 3 aa, Artificial Sequence
  Synthetic construct
VNS

SEQ ID NO: 7366 - protein, 3 aa, Artificial Sequence
  Synthetic construct
GAS

SEQ ID NO: 7367 - protein, 3 aa, Artificial Sequence
  Synthetic construct
QDN

SEQ ID NO: 7368 - protein, 3 aa, Artificial Sequence
  Synthetic construct
NNN

SEQ ID NO: 7369 - protein, 3 aa, Artificial Sequence
  Synthetic construct
GTS

SEQ ID NO: 7370 - protein, 3 aa, Artificial Sequence
  Synthetic construct
SVS

SEQ ID NO: 7371 - protein, 3 aa, Artificial Sequence
  Synthetic construct
KDS

SEQ ID NO: 7372 - protein, 3 aa, Artificial Sequence
  Synthetic construct
EVS

SEQ ID NO: 7373 - protein, 3 aa, Artificial Sequence
  Synthetic construct
AAS

SEQ ID NO: 7374 - protein, 3 aa, Artificial Sequence
  Synthetic construct
AAS

SEQ ID NO: 7375 - protein, 3 aa, Artificial Sequence
  Synthetic construct
GAS

SEQ ID NO: 7376 - protein, 3 aa, Artificial Sequence
  Synthetic construct
DAS

SEQ ID NO: 7377 - protein, 3 aa, Artificial Sequence
  Synthetic construct
DAS

SEQ ID NO: 7378 - protein, 3 aa, Artificial Sequence
  Synthetic construct
DTN

SEQ ID NO: 7379 - protein, 3 aa, Artificial Sequence
  Synthetic construct
KDS

SEQ ID NO: 7380 - protein, 3 aa, Artificial Sequence
  Synthetic construct
STD

SEQ ID NO: 7381 - protein, 3 aa, Artificial Sequence
  Synthetic construct
GAS

SEQ ID NO: 7382 - protein, 3 aa, Artificial Sequence
  Synthetic construct
GAS

SEQ ID NO: 7383 - protein, 3 aa, Artificial Sequence
  Synthetic construct
DTS

SEQ ID NO: 7384 - protein, 3 aa, Artificial Sequence
  Synthetic construct
GAS

SEQ ID NO: 7385 - protein, 3 aa, Artificial Sequence
  Synthetic construct
GAS

SEQ ID NO: 7386 - protein, 3 aa, Artificial Sequence
  Synthetic construct
DVS

SEQ ID NO: 7387 - protein, 3 aa, Artificial Sequence
  Synthetic construct
AAS

SEQ ID NO: 7388 - protein, 3 aa, Artificial Sequence
  Synthetic construct
DAS

SEQ ID NO: 7389 - protein, 3 aa, Artificial Sequence
  Synthetic construct
QDT

SEQ ID NO: 7390 - protein, 3 aa, Artificial Sequence
  Synthetic construct
DVS

SEQ ID NO: 7391 - protein, 3 aa, Artificial Sequence
  Synthetic construct
GAS

SEQ ID NO: 7392 - protein, 3 aa, Artificial Sequence
  Synthetic construct
QDS

SEQ ID NO: 7393 - protein, 3 aa, Artificial Sequence
  Synthetic construct
AAS

SEQ ID NO: 7394 - protein, 3 aa, Artificial Sequence
  Synthetic construct
STT

SEQ ID NO: 7395 - protein, 3 aa, Artificial Sequence
  Synthetic construct
DVR

SEQ ID NO: 7396 - protein, 3 aa, Artificial Sequence
  Synthetic construct
GAS

SEQ ID NO: 7397 - protein, 3 aa, Artificial Sequence
  Synthetic construct
WAS

SEQ ID NO: 7398 - protein, 3 aa, Artificial Sequence
  Synthetic construct
GAS

SEQ ID NO: 7399 - protein, 3 aa, Artificial Sequence
  Synthetic construct
KDS

SEQ ID NO: 7400 - protein, 3 aa, Artificial Sequence
  Synthetic construct
DAS

SEQ ID NO: 7401 - protein, 3 aa, Artificial Sequence
  Synthetic construct
KVS

SEQ ID NO: 7402 - protein, 3 aa, Artificial Sequence
  Synthetic construct
GNN

SEQ ID NO: 7403 - protein, 3 aa, Artificial Sequence
  Synthetic construct
KDS

SEQ ID NO: 7404 - protein, 3 aa, Artificial Sequence
  Synthetic construct
RVS

SEQ ID NO: 7405 - protein, 3 aa, Artificial Sequence
  Synthetic construct
KAS

SEQ ID NO: 7406 - protein, 3 aa, Artificial Sequence
  Synthetic construct
KDT

SEQ ID NO: 7407 - protein, 3 aa, Artificial Sequence
  Synthetic construct
EDT

SEQ ID NO: 7408 - protein, 3 aa, Artificial Sequence
  Synthetic construct
DAS

SEQ ID NO: 7409 - protein, 3 aa, Artificial Sequence
  Synthetic construct
GAS

SEQ ID NO: 7410 - protein, 3 aa, Artificial Sequence
  Synthetic construct
GAS

SEQ ID NO: 7411 - protein, 3 aa, Artificial Sequence
  Synthetic construct
KAS

SEQ ID NO: 7412 - protein, 3 aa, Artificial Sequence
  Synthetic construct
EGS

SEQ ID NO: 7413 - protein, 3 aa, Artificial Sequence
  Synthetic construct
DAS

SEQ ID NO: 7414 - protein, 3 aa, Artificial Sequence
  Synthetic construct
GAS

SEQ ID NO: 7415 - protein, 3 aa, Artificial Sequence
  Synthetic construct
KAS

SEQ ID NO: 7416 - protein, 7 aa, Artificial Sequence
  Synthetic construct
YKSDSDY

SEQ ID NO: 7417 - protein, 3 aa, Artificial Sequence
  Synthetic construct
QDT

SEQ ID NO: 7418 - protein, 3 aa, Artificial Sequence
  Synthetic construct
GNS

SEQ ID NO: 7419 - protein, 3 aa, Artificial Sequence
  Synthetic construct
KGS

SEQ ID NO: 7420 - protein, 3 aa, Artificial Sequence
  Synthetic construct
EVS

SEQ ID NO: 7421 - protein, 3 aa, Artificial Sequence
  Synthetic construct
EDT

SEQ ID NO: 7422 - protein, 3 aa, Artificial Sequence
  Synthetic construct
KAS

SEQ ID NO: 7423 - protein, 3 aa, Artificial Sequence
  Synthetic construct
LGS

SEQ ID NO: 7424 - protein, 3 aa, Artificial Sequence
  Synthetic construct
GAS

SEQ ID NO: 7425 - protein, 3 aa, Artificial Sequence
  Synthetic construct
DAS

SEQ ID NO: 7426 - protein, 3 aa, Artificial Sequence
  Synthetic construct
LGS

SEQ ID NO: 7427 - protein, 3 aa, Artificial Sequence
  Synthetic construct
KAS

SEQ ID NO: 7428 - protein, 3 aa, Artificial Sequence
  Synthetic construct
GAS

SEQ ID NO: 7429 - protein, 3 aa, Artificial Sequence
  Synthetic construct
YDD

SEQ ID NO: 7430 - protein, 3 aa, Artificial Sequence
  Synthetic construct
DAS

SEQ ID NO: 7431 - protein, 3 aa, Artificial Sequence
  Synthetic construct
QDR

SEQ ID NO: 7432 - protein, 3 aa, Artificial Sequence
  Synthetic construct
DVS

SEQ ID NO: 7433 - protein, 3 aa, Artificial Sequence
  Synthetic construct
EVS

SEQ ID NO: 7434 - protein, 3 aa, Artificial Sequence
  Synthetic construct
KDS

SEQ ID NO: 7435 - protein, 3 aa, Artificial Sequence
  Synthetic construct
GAS

SEQ ID NO: 7436 - protein, 3 aa, Artificial Sequence
  Synthetic construct
KIS

SEQ ID NO: 7437 - protein, 3 aa, Artificial Sequence
  Synthetic construct
RNN

SEQ ID NO: 7438 - protein, 3 aa, Artificial Sequence
  Synthetic construct
KDS

SEQ ID NO: 7439 - protein, 3 aa, Artificial Sequence
  Synthetic construct
EGI

SEQ ID NO: 7440 - protein, 3 aa, Artificial Sequence
  Synthetic construct
EDS

SEQ ID NO: 7441 - protein, 3 aa, Artificial Sequence
  Synthetic construct
EVT

SEQ ID NO: 7442 - protein, 3 aa, Artificial Sequence
  Synthetic construct
KAS

SEQ ID NO: 7443 - protein, 3 aa, Artificial Sequence
  Synthetic construct
KAS

SEQ ID NO: 7444 - protein, 3 aa, Artificial Sequence
  Synthetic construct
EVT

SEQ ID NO: 7445 - protein, 3 aa, Artificial Sequence
  Synthetic construct
RDS

SEQ ID NO: 7446 - protein, 3 aa, Artificial Sequence
  Synthetic construct
QDS

SEQ ID NO: 7447 - protein, 3 aa, Artificial Sequence
  Synthetic construct
ADS

SEQ ID NO: 7448 - protein, 3 aa, Artificial Sequence
  Synthetic construct
SDD

SEQ ID NO: 7449 - protein, 3 aa, Artificial Sequence
  Synthetic construct
AAS

SEQ ID NO: 7450 - protein, 3 aa, Artificial Sequence
  Synthetic construct
DAS

SEQ ID NO: 7451 - protein, 3 aa, Artificial Sequence
  Synthetic construct
EVS

SEQ ID NO: 7452 - protein, 3 aa, Artificial Sequence
  Synthetic construct
EDN

SEQ ID NO: 7453 - protein, 11 aa, Artificial Sequence
  Synthetic construct
QSVDSSGTYVV

SEQ ID NO: 7454 - protein, 10 aa, Artificial Sequence
  Synthetic construct
CSYAGSRTWV

SEQ ID NO: 7455 - protein, 9 aa, Artificial Sequence
  Synthetic construct
QQRGNWPQT

SEQ ID NO: 7456 - protein, 9 aa, Artificial Sequence
  Synthetic construct
QQYHFTPYT

SEQ ID NO: 7457 - protein, 10 aa, Artificial Sequence
  Synthetic construct
SSYTSSSTLV

SEQ ID NO: 7458 - protein, 9 aa, Artificial Sequence
  Synthetic construct
QQYNNWPRA

SEQ ID NO: 7459 - protein, 9 aa, Artificial Sequence
  Synthetic construct
QQYGSSRYT

SEQ ID NO: 7460 - protein, 9 aa, Artificial Sequence
  Synthetic construct
QQSYSTPVT

SEQ ID NO: 7461 - protein, 10 aa, Artificial Sequence
  Synthetic construct
QQYYSTPSGT

SEQ ID NO: 7462 - protein, 10 aa, Artificial Sequence
  Synthetic construct
SSYAGSNGHV

SEQ ID NO: 7463 - protein, 11 aa, Artificial Sequence
  Synthetic construct
GTWDSSLSVWV

SEQ ID NO: 7464 - protein, 8 aa, Artificial Sequence
  Synthetic construct
QQYNSYST

SEQ ID NO: 7465 - protein, 10 aa, Artificial Sequence
  Synthetic construct
CSYAGFSTYV

SEQ ID NO: 7466 - protein, 11 aa, Artificial Sequence
  Synthetic construct
SSYAGSNIHVV

SEQ ID NO: 7467 - protein, 11 aa, Artificial Sequence
  Synthetic construct
NSRDSSGNHYV

SEQ ID NO: 7468 - protein, 8 aa, Artificial Sequence
  Synthetic construct
QQYNSHYT

SEQ ID NO: 7469 - protein, 9 aa, Artificial Sequence
  Synthetic construct
QQFGSSVYT

SEQ ID NO: 7470 - protein, 11 aa, Artificial Sequence
  Synthetic construct
YSTDSSGNRRV

SEQ ID NO: 7471 - protein, 10 aa, Artificial Sequence
  Synthetic construct
SSYAGSNNVV

SEQ ID NO: 7472 - protein, 9 aa, Artificial Sequence
  Synthetic construct
QQYGSSPIT

SEQ ID NO: 7473 - protein, 9 aa, Artificial Sequence
  Synthetic construct
QQSYTIPQT

SEQ ID NO: 7474 - protein, 10 aa, Artificial Sequence
  Synthetic construct
YSRDSSGNPL

SEQ ID NO: 7475 - protein, 8 aa, Artificial Sequence
  Synthetic construct
MQALQTHT

SEQ ID NO: 7476 - protein, 11 aa, Artificial Sequence
  Synthetic construct
GTWDSSLSSWV

SEQ ID NO: 7477 - protein, 10 aa, Artificial Sequence
  Synthetic construct
QQLNSYPSFT

SEQ ID NO: 7478 - protein, 11 aa, Artificial Sequence
  Synthetic construct
AAWDDSLNGPV

SEQ ID NO: 7479 - protein, 10 aa, Artificial Sequence
  Synthetic construct
QQSYSTPLYT

SEQ ID NO: 7480 - protein, 8 aa, Artificial Sequence
  Synthetic construct
QQYNNWPT

SEQ ID NO: 7481 - protein, 9 aa, Artificial Sequence
  Synthetic construct
LQHNSYPLT

SEQ ID NO: 7482 - protein, 9 aa, Artificial Sequence
  Synthetic construct
QQYGNSRLT

SEQ ID NO: 7483 - protein, 9 aa, Artificial Sequence
  Synthetic construct
QQYGSSPAT

SEQ ID NO: 7484 - protein, 8 aa, Artificial Sequence
  Synthetic construct
QQGYGTPT

SEQ ID NO: 7485 - protein, 11 aa, Artificial Sequence
  Synthetic construct
AVWDDSLNGWV

SEQ ID NO: 7486 - protein, 11 aa, Artificial Sequence
  Synthetic construct
AAWDDSLNGWV

SEQ ID NO: 7487 - protein, 9 aa, Artificial Sequence
  Synthetic construct
MQSIELPYT

SEQ ID NO: 7488 - protein, 9 aa, Artificial Sequence
  Synthetic construct
QQYGSSPKT

SEQ ID NO: 7489 - protein, 11 aa, Artificial Sequence
  Synthetic construct
QQYNNWPPGIT

SEQ ID NO: 7490 - protein, 10 aa, Artificial Sequence
  Synthetic construct
QQRSNWPPFT

SEQ ID NO: 7491 - protein, 11 aa, Artificial Sequence
  Synthetic construct
YSTDSSGNHRV

SEQ ID NO: 7492 - protein, 9 aa, Artificial Sequence
  Synthetic construct
MQSIQLPYT

SEQ ID NO: 7493 - protein, 9 aa, Artificial Sequence
  Synthetic construct
QQANSFPPT

SEQ ID NO: 7494 - protein, 9 aa, Artificial Sequence
  Synthetic construct
QQYNSYSIT

SEQ ID NO: 7495 - protein, 10 aa, Artificial Sequence
  Synthetic construct
QQSFSARVPT

SEQ ID NO: 7496 - protein, 9 aa, Artificial Sequence
  Synthetic construct
QHRSNWPLT

SEQ ID NO: 7497 - protein, 10 aa, Artificial Sequence
  Synthetic construct
QHYGRSPTWT

SEQ ID NO: 7498 - protein, 9 aa, Artificial Sequence
  Synthetic construct
QQYYTSPLT

SEQ ID NO: 7499 - protein, 12 aa, Artificial Sequence
  Synthetic construct
GTWDSSLSGFYV

SEQ ID NO: 7500 - protein, 12 aa, Artificial Sequence
  Synthetic construct
SSYTSSSTLEGV

SEQ ID NO: 7501 - protein, 9 aa, Artificial Sequence
  Synthetic construct
QQYNSYPVT

SEQ ID NO: 7502 - protein, 11 aa, Artificial Sequence
  Synthetic construct
QQRSNWLRVFT

SEQ ID NO: 7503 - protein, 9 aa, Artificial Sequence
  Synthetic construct
QAWDSSAVV

SEQ ID NO: 7504 - protein, 9 aa, Artificial Sequence
  Synthetic construct
QQYHSYPLT

SEQ ID NO: 7505 - protein, 11 aa, Artificial Sequence
  Synthetic construct
QVWDSSSDHML

SEQ ID NO: 7506 - protein, 10 aa, Artificial Sequence
  Synthetic construct
QQYGSSPPFS

SEQ ID NO: 7507 - protein, 11 aa, Artificial Sequence
  Synthetic construct
SSYRSRSNSLL

SEQ ID NO: 7508 - protein, 9 aa, Artificial Sequence
  Synthetic construct
QTADSSGFV

SEQ ID NO: 7509 - protein, 9 aa, Artificial Sequence
  Synthetic construct
QQYDNLPIT

SEQ ID NO: 7510 - protein, 11 aa, Artificial Sequence
  Synthetic construct
NSRDSSGNHYV

SEQ ID NO: 7511 - protein, 11 aa, Artificial Sequence
  Synthetic construct
QSYDSSLTGSL

SEQ ID NO: 7512 - protein, 11 aa, Artificial Sequence
  Synthetic construct
YSTDSSGNHRV

SEQ ID NO: 7513 - protein, 11 aa, Artificial Sequence
  Synthetic construct
GTWDRSLSAVV

SEQ ID NO: 7514 - protein, 11 aa, Artificial Sequence
  Synthetic construct
YSTGSSGHQRV

SEQ ID NO: 7515 - protein, 9 aa, Artificial Sequence
  Synthetic construct
QQANSFPFT

SEQ ID NO: 7516 - protein, 10 aa, Artificial Sequence
  Synthetic construct
QQYGSSLTWT

SEQ ID NO: 7517 - protein, 10 aa, Artificial Sequence
  Synthetic construct
QQYDNLFIYT

SEQ ID NO: 7518 - protein, 10 aa, Artificial Sequence
  Synthetic construct
QHHIINSPYT

SEQ ID NO: 7519 - protein, 13 aa, Artificial Sequence
  Synthetic construct
QSYDSSLSGPNYV

SEQ ID NO: 7520 - protein, 11 aa, Artificial Sequence
  Synthetic construct
GTWDSSLRSYV

SEQ ID NO: 7521 - protein, 9 aa, Artificial Sequence
  Synthetic construct
QQYHSYPLT

SEQ ID NO: 7522 - protein, 9 aa, Artificial Sequence
  Synthetic construct
QAWDSSTVV

SEQ ID NO: 7523 - protein, 9 aa, Artificial Sequence
  Synthetic construct
LVSYGGARV

SEQ ID NO: 7524 - protein, 9 aa, Artificial Sequence
  Synthetic construct
MQGTHWLFT

SEQ ID NO: 7525 - protein, 9 aa, Artificial Sequence
  Synthetic construct
QQYNSYPPT

SEQ ID NO: 7526 - protein, 10 aa, Artificial Sequence
  Synthetic construct
QSTDSSGAWV

SEQ ID NO: 7527 - protein, 11 aa, Artificial Sequence
  Synthetic construct
ATWDDSLNGWV

SEQ ID NO: 7528 - protein, 11 aa, Artificial Sequence
  Synthetic construct
SSYTSRTTLVV

SEQ ID NO: 7529 - protein, 11 aa, Artificial Sequence
  Synthetic construct
ASWDDSLIGPV

SEQ ID NO: 7530 - protein, 9 aa, Artificial Sequence
  Synthetic construct
QLYGSSQLT

SEQ ID NO: 7531 - protein, 9 aa, Artificial Sequence
  Synthetic construct
QAWDSSTWV

SEQ ID NO: 7532 - protein, 11 aa, Artificial Sequence
  Synthetic construct
QQRSNWPPALT

SEQ ID NO: 7533 - protein, 8 aa, Artificial Sequence
  Synthetic construct
QQYYSSWT

SEQ ID NO: 7534 - protein, 11 aa, Artificial Sequence
  Synthetic construct
CSYANSSTHWV

SEQ ID NO: 7535 - protein, 9 aa, Artificial Sequence
  Synthetic construct
MIWHSSAWV

SEQ ID NO: 7536 - protein, 9 aa, Artificial Sequence
  Synthetic construct
QQYGNSRFS

SEQ ID NO: 7537 - protein, 9 aa, Artificial Sequence
  Synthetic construct
MQGLQTPPT

SEQ ID NO: 7538 - protein, 11 aa, Artificial Sequence
  Synthetic construct
YSTDSSGNHRV

SEQ ID NO: 7539 - protein, 10 aa, Artificial Sequence
  Synthetic construct
YSTDSSGNPF

SEQ ID NO: 7540 - protein, 10 aa, Artificial Sequence
  Synthetic construct
CSYAGDYTWV

SEQ ID NO: 7541 - protein, 10 aa, Artificial Sequence
  Synthetic construct
MQGTHWPPIT

SEQ ID NO: 7542 - protein, 9 aa, Artificial Sequence
  Synthetic construct
QSYDSSNVV

SEQ ID NO: 7543 - protein, 11 aa, Artificial Sequence
  Synthetic construct
QQRGKWPPAYT

SEQ ID NO: 7544 - protein, 10 aa, Artificial Sequence
  Synthetic construct
SSYTSSRSGV

SEQ ID NO: 7545 - protein, 12 aa, Artificial Sequence
  Synthetic construct
QVWDSISDHSRV

SEQ ID NO: 7546 - protein, 8 aa, Artificial Sequence
  Synthetic construct
MQALQTPT

SEQ ID NO: 7547 - protein, 9 aa, Artificial Sequence
  Synthetic construct
MQTIQPPYT

SEQ ID NO: 7548 - protein, 10 aa, Artificial Sequence
  Synthetic construct
QQFGSSPLYT

SEQ ID NO: 7549 - protein, 12 aa, Artificial Sequence
  Synthetic construct
CSYAGSSTVYVI

SEQ ID NO: 7550 - protein, 9 aa, Artificial Sequence
  Synthetic construct
MQTLQTFFT

SEQ ID NO: 7551 - protein, 9 aa, Artificial Sequence
  Synthetic construct
QAWDSRTVI

SEQ ID NO: 7552 - protein, 12 aa, Artificial Sequence
  Synthetic construct
QSFDSSMSGYVV

SEQ ID NO: 7553 - protein, 10 aa, Artificial Sequence
  Synthetic construct
QQLNSYPEIT

SEQ ID NO: 7554 - protein, 12 aa, Artificial Sequence
  Synthetic construct
QVWDHSNGPNWV

SEQ ID NO: 7555 - protein, 13 aa, Artificial Sequence
  Synthetic construct
CSYAGTGTSRRVV

SEQ ID NO: 7556 - protein, 9 aa, Artificial Sequence
  Synthetic construct
QQLSGYPYT

SEQ ID NO: 7557 - protein, 9 aa, Artificial Sequence
  Synthetic construct
HQYNTYPLT

SEQ ID NO: 7558 - protein, 9 aa, Artificial Sequence
  Synthetic construct
QQYNNLPLT

SEQ ID NO: 7559 - protein, 9 aa, Artificial Sequence
  Synthetic construct
LQYDSYPLT

SEQ ID NO: 7560 - protein, 11 aa, Artificial Sequence
  Synthetic construct
QSADSSGTYEV

SEQ ID NO: 7561 - protein, 9 aa, Artificial Sequence
  Synthetic construct
QQYYSTPRT

SEQ ID NO: 7562 - protein, 9 aa, Artificial Sequence
  Synthetic construct
QKYNSAPLT

SEQ ID NO: 7563 - protein, 10 aa, Artificial Sequence
  Synthetic construct
TSYTSSSTLV

SEQ ID NO: 7564 - protein, 9 aa, Artificial Sequence
  Synthetic construct
QQYDNWPQT

SEQ ID NO: 7565 - protein, 11 aa, Artificial Sequence
  Synthetic construct
QSYDSSLSGNV

SEQ ID NO: 7566 - protein, 9 aa, Artificial Sequence
  Synthetic construct
FSAADNKRV

SEQ ID NO: 7567 - protein, 9 aa, Artificial Sequence
  Synthetic construct
QQYGSSPYT

SEQ ID NO: 7568 - protein, 10 aa, Artificial Sequence
  Synthetic construct
QQTYSTLGLT

SEQ ID NO: 7569 - protein, 12 aa, Artificial Sequence
  Synthetic construct
YSTDSSADPRGV

SEQ ID NO: 7570 - protein, 11 aa, Artificial Sequence
  Synthetic construct
QVWDSSSDHYV

SEQ ID NO: 7571 - protein, 10 aa, Artificial Sequence
  Synthetic construct
QQYNSYFPYT

SEQ ID NO: 7572 - protein, 10 aa, Artificial Sequence
  Synthetic construct
CSYGGSNGYV

SEQ ID NO: 7573 - protein, 8 aa, Artificial Sequence
  Synthetic construct
QHYGSSWT

SEQ ID NO: 7574 - protein, 11 aa, Artificial Sequence
  Synthetic construct
QQYGNSLPMYT

SEQ ID NO: 7575 - protein, 9 aa, Artificial Sequence
  Synthetic construct
QAWDSSTVV

SEQ ID NO: 7576 - protein, 11 aa, Artificial Sequence
  Synthetic construct
AAWDDSLSGEV

SEQ ID NO: 7577 - protein, 8 aa, Artificial Sequence
  Synthetic construct
QQRGSWYT

SEQ ID NO: 7578 - protein, 11 aa, Artificial Sequence
  Synthetic construct
QQRSNWPPLIT

SEQ ID NO: 7579 - protein, 11 aa, Artificial Sequence
  Synthetic construct
FSTDSSGNSGV

SEQ ID NO: 7580 - protein, 9 aa, Artificial Sequence
  Synthetic construct
QQYGTSPAT

SEQ ID NO: 7581 - protein, 9 aa, Artificial Sequence
  Synthetic construct
QQYNSYSVT

SEQ ID NO: 7582 - protein, 9 aa, Artificial Sequence
  Synthetic construct
MQPLQTPWT

SEQ ID NO: 7583 - protein, 10 aa, Artificial Sequence
  Synthetic construct
CSNAGSHSYV

SEQ ID NO: 7584 - protein, 11 aa, Artificial Sequence
  Synthetic construct
AAWDDSLSGVV

SEQ ID NO: 7585 - protein, 8 aa, Artificial Sequence
  Synthetic construct
QQYDNWLT

SEQ ID NO: 7586 - protein, 12 aa, Artificial Sequence
  Synthetic construct
YSTDNSGNHRGV

SEQ ID NO: 7587 - protein, 9 aa, Artificial Sequence
  Synthetic construct
QQTKTFPLS

SEQ ID NO: 7588 - protein, 11 aa, Artificial Sequence
  Synthetic construct
AAWDDNLSGPV

SEQ ID NO: 7589 - protein, 8 aa, Artificial Sequence
  Synthetic construct
QHYDDVPR

SEQ ID NO: 7590 - protein, 11 aa, Artificial Sequence
  Synthetic construct
NSRDSSGNHVV

SEQ ID NO: 7591 - protein, 10 aa, Artificial Sequence
  Synthetic construct
MQALQTPPWT

SEQ ID NO: 7592 - protein, 9 aa, Artificial Sequence
  Synthetic construct
LQANSFPHT

SEQ ID NO: 7593 - protein, 8 aa, Artificial Sequence
  Synthetic construct
QQYNSPWT

SEQ ID NO: 7594 - protein, 9 aa, Artificial Sequence
  Synthetic construct
QAWASGTGV

SEQ ID NO: 7595 - protein, 11 aa, Artificial Sequence
  Synthetic construct
QSYDSSLSGYV

SEQ ID NO: 7596 - protein, 11 aa, Artificial Sequence
  Synthetic construct
AAWDDSLSGWV

SEQ ID NO: 7597 - protein, 9 aa, Artificial Sequence
  Synthetic construct
QQRSNWPLT

SEQ ID NO: 7598 - protein, 10 aa, Artificial Sequence
  Synthetic construct
CSYAGSSTLV

SEQ ID NO: 7599 - protein, 10 aa, Artificial Sequence
  Synthetic construct
SSYAGSNKFV

SEQ ID NO: 7600 - protein, 9 aa, Artificial Sequence
  Synthetic construct
QAWDSSTGV

SEQ ID NO: 7601 - protein, 9 aa, Artificial Sequence
  Synthetic construct
QAWDSSTAV

SEQ ID NO: 7602 - protein, 11 aa, Artificial Sequence
  Synthetic construct
QRYNNWPPEGT

SEQ ID NO: 7603 - protein, 10 aa, Artificial Sequence
  Synthetic construct
QQYGRTPPYS

SEQ ID NO: 7604 - protein, 10 aa, Artificial Sequence
  Synthetic construct
QQYNNWPPAT

SEQ ID NO: 7605 - protein, 10 aa, Artificial Sequence
  Synthetic construct
QQYGSSPMYT

SEQ ID NO: 7606 - protein, 8 aa, Artificial Sequence
  Synthetic construct
QHCGSSIT

SEQ ID NO: 7607 - protein, 11 aa, Artificial Sequence
  Synthetic construct
GTWDSSLSAVV

SEQ ID NO: 7608 - protein, 10 aa, Artificial Sequence
  Synthetic construct
QQYNNWPFWT

SEQ ID NO: 7609 - protein, 11 aa, Artificial Sequence
  Synthetic construct
ATWDDSLNGPV

SEQ ID NO: 7610 - protein, 9 aa, Artificial Sequence
  Synthetic construct
QQYYSTPYT

SEQ ID NO: 7611 - protein, 9 aa, Artificial Sequence
  Synthetic construct
MQALQTPWT

SEQ ID NO: 7612 - protein, 10 aa, Artificial Sequence
  Synthetic construct
QQYNDWPPYT

SEQ ID NO: 7613 - protein, 11 aa, Artificial Sequence
  Synthetic construct
GAWDSSLSSVV

SEQ ID NO: 7614 - protein, 9 aa, Artificial Sequence
  Synthetic construct
QQLNSYPIT

SEQ ID NO: 7615 - protein, 9 aa, Artificial Sequence
  Synthetic construct
QQTYTTPWT

SEQ ID NO: 7616 - protein, 11 aa, Artificial Sequence
  Synthetic construct
CSYAGSSTLGV

SEQ ID NO: 7617 - protein, 12 aa, Artificial Sequence
  Synthetic construct
YSTDSSADHRGV

SEQ ID NO: 7618 - protein, 9 aa, Artificial Sequence
  Synthetic construct
HQYNDWPFT

SEQ ID NO: 7619 - protein, 9 aa, Artificial Sequence
  Synthetic construct
QQSYTTPYT

SEQ ID NO: 7620 - protein, 12 aa, Artificial Sequence
  Synthetic construct
SSYISGYTLVWV

SEQ ID NO: 7621 - protein, 11 aa, Artificial Sequence
  Synthetic construct
QAWDSSTASFV

SEQ ID NO: 7622 - protein, 9 aa, Artificial Sequence
  Synthetic construct
QQYDNLPST

SEQ ID NO: 7623 - protein, 9 aa, Artificial Sequence
  Synthetic construct
QQSYTVPYT

SEQ ID NO: 7624 - protein, 9 aa, Artificial Sequence
  Synthetic construct
QQRSNWPPS

SEQ ID NO: 7625 - protein, 8 aa, Artificial Sequence
  Synthetic construct
QQYNSLYT

SEQ ID NO: 7626 - protein, 9 aa, Artificial Sequence
  Synthetic construct
QHYHNLPPT

SEQ ID NO: 7627 - protein, 6 aa, Artificial Sequence
  Synthetic construct
RQYDNH

SEQ ID NO: 7628 - protein, 10 aa, Artificial Sequence
  Synthetic construct
QQSYSTPPWT

SEQ ID NO: 7629 - protein, 9 aa, Artificial Sequence
  Synthetic construct
MQALQTPWT

SEQ ID NO: 7630 - protein, 11 aa, Artificial Sequence
  Synthetic construct
QSADSSGTYEV

SEQ ID NO: 7631 - protein, 11 aa, Artificial Sequence
  Synthetic construct
SAWDVILNGWV

SEQ ID NO: 7632 - protein, 10 aa, Artificial Sequence
  Synthetic construct
QQYGSSPQLT

SEQ ID NO: 7633 - protein, 10 aa, Artificial Sequence
  Synthetic construct
QNYYNAPQIS

SEQ ID NO: 7634 - protein, 11 aa, Artificial Sequence
  Synthetic construct
SAYTSGSILLL

SEQ ID NO: 7635 - protein, 8 aa, Artificial Sequence
  Synthetic construct
QHYDNLPR

SEQ ID NO: 7636 - protein, 10 aa, Artificial Sequence
  Synthetic construct
QTWDSNIFYV

SEQ ID NO: 7637 - protein, 11 aa, Artificial Sequence
  Synthetic construct
GTWDSSLGVGV

SEQ ID NO: 7638 - protein, 9 aa, Artificial Sequence
  Synthetic construct
QKYNSAPLT

SEQ ID NO: 7639 - protein, 8 aa, Artificial Sequence
  Synthetic construct
QQSYSTGT

SEQ ID NO: 7640 - protein, 9 aa, Artificial Sequence
  Synthetic construct
QQRSSWPLT

SEQ ID NO: 7641 - protein, 10 aa, Artificial Sequence
  Synthetic construct
CSDAGRHTYV

SEQ ID NO: 7642 - protein, 9 aa, Artificial Sequence
  Synthetic construct
QQYSFSLYT

SEQ ID NO: 7643 - protein, 11 aa, Artificial Sequence
  Synthetic construct
GTWDRSRSTVV

SEQ ID NO: 7644 - protein, 9 aa, Artificial Sequence
  Synthetic construct
QAWDSSNVV

SEQ ID NO: 7645 - protein, 11 aa, Artificial Sequence
  Synthetic construct
QSYDNSLSGSV

SEQ ID NO: 7646 - protein, 9 aa, Artificial Sequence
  Synthetic construct
HHYDSSRLT

SEQ ID NO: 7647 - protein, 9 aa, Artificial Sequence
  Synthetic construct
QQRTNWPLT

SEQ ID NO: 7648 - protein, 11 aa, Artificial Sequence
  Synthetic construct
QQRSNRPPTWT

SEQ ID NO: 7649 - protein, 10 aa, Artificial Sequence
  Synthetic construct
MQSIQLPGLT

SEQ ID NO: 7650 - protein, 9 aa, Artificial Sequence
  Synthetic construct
QQYDNLSLT

SEQ ID NO: 7651 - protein, 11 aa, Artificial Sequence
  Synthetic construct
CSYAGSTTYWV

SEQ ID NO: 7652 - protein, 8 aa, Artificial Sequence
  Synthetic construct
QQYNNWLT

SEQ ID NO: 7653 - protein, 10 aa, Artificial Sequence
  Synthetic construct
QSYDRSNLAV

SEQ ID NO: 7654 - protein, 11 aa, Artificial Sequence
  Synthetic construct
GTWDSSLRAVV

SEQ ID NO: 7655 - protein, 9 aa, Artificial Sequence
  Synthetic construct
QQYNSYSYT

SEQ ID NO: 7656 - protein, 10 aa, Artificial Sequence
  Synthetic construct
QQSYSTLVYS

SEQ ID NO: 7657 - protein, 11 aa, Artificial Sequence
  Synthetic construct
YSTDSSGNHRL

SEQ ID NO: 7658 - protein, 11 aa, Artificial Sequence
  Synthetic construct
CSYAGDDVYVI

SEQ ID NO: 7659 - protein, 9 aa, Artificial Sequence
  Synthetic construct
QQYGYSPYT

SEQ ID NO: 7660 - protein, 9 aa, Artificial Sequence
  Synthetic construct
QQYDNLPFT

SEQ ID NO: 7661 - protein, 9 aa, Artificial Sequence
  Synthetic construct
QQLNSYPFT

SEQ ID NO: 7662 - protein, 11 aa, Artificial Sequence
  Synthetic construct
QSADSSGTYYV

SEQ ID NO: 7663 - protein, 9 aa, Artificial Sequence
  Synthetic construct
QQSFSTPRT

SEQ ID NO: 7664 - protein, 11 aa, Artificial Sequence
  Synthetic construct
SSFTRGSAPVL

SEQ ID NO: 7665 - protein, 11 aa, Artificial Sequence
  Synthetic construct
QSFDNTLSSYV

SEQ ID NO: 7666 - protein, 9 aa, Artificial Sequence
  Synthetic construct
QQYHSYPPT

SEQ ID NO: 7667 - protein, 9 aa, Artificial Sequence
  Synthetic construct
HQYSSPTWT

SEQ ID NO: 7668 - protein, 11 aa, Artificial Sequence
  Synthetic construct
QQRSNRPPTWT

SEQ ID NO: 7669 - protein, 10 aa, Artificial Sequence
  Synthetic construct
QHRSNWPPYT

SEQ ID NO: 7670 - protein, 12 aa, Artificial Sequence
  Synthetic construct
QSYDSSLSGSWV

SEQ ID NO: 7671 - protein, 9 aa, Artificial Sequence
  Synthetic construct
QAWVSSTVV

SEQ ID NO: 7672 - protein, 11 aa, Artificial Sequence
  Synthetic construct
AAWDDSLNGQV

SEQ ID NO: 7673 - protein, 11 aa, Artificial Sequence
  Synthetic construct
QSYDSSLSGLL

SEQ ID NO: 7674 - protein, 11 aa, Artificial Sequence
  Synthetic construct
HSRDSSGNNLL

SEQ ID NO: 7675 - protein, 9 aa, Artificial Sequence
  Synthetic construct
QAWDSSTYV

SEQ ID NO: 7676 - protein, 11 aa, Artificial Sequence
  Synthetic construct
QVWDSNSDHPV

SEQ ID NO: 7677 - protein, 9 aa, Artificial Sequence
  Synthetic construct
QARDSSFVV

SEQ ID NO: 7678 - protein, 8 aa, Artificial Sequence
  Synthetic construct
MQGVHLIT

SEQ ID NO: 7679 - protein, 10 aa, Artificial Sequence
  Synthetic construct
FSYRAGRILV

SEQ ID NO: 7680 - protein, 8 aa, Artificial Sequence
  Synthetic construct
QQYNYWPT

SEQ ID NO: 7681 - protein, 10 aa, Artificial Sequence
  Synthetic construct
QSYDSSLSRV

SEQ ID NO: 7682 - protein, 10 aa, Artificial Sequence
  Synthetic construct
GTWDSSLKGV

SEQ ID NO: 7683 - protein, 11 aa, Artificial Sequence
  Synthetic construct
YSTDSSGNSGV

SEQ ID NO: 7684 - protein, 9 aa, Artificial Sequence
  Synthetic construct
MQALQTRYT

SEQ ID NO: 7685 - protein, 11 aa, Artificial Sequence
  Synthetic construct
QSVDTSGTYVL

SEQ ID NO: 7686 - protein, 9 aa, Artificial Sequence
  Synthetic construct
QQSYNSPYT

SEQ ID NO: 7687 - protein, 9 aa, Artificial Sequence
  Synthetic construct
QQSHSTPYT

SEQ ID NO: 7688 - protein, 9 aa, Artificial Sequence
  Synthetic construct
QQRSNWPGT

SEQ ID NO: 7689 - protein, 8 aa, Artificial Sequence
  Synthetic construct
QHLNSYPL

SEQ ID NO: 7690 - protein, 11 aa, Artificial Sequence
  Synthetic construct
QQRSNWPPVLT

SEQ ID NO: 7691 - protein, 10 aa, Artificial Sequence
  Synthetic construct
SSYTSSSTYV

SEQ ID NO: 7692 - protein, 11 aa, Artificial Sequence
  Synthetic construct
QQRSLWPPVFT

SEQ ID NO: 7693 - protein, 8 aa, Artificial Sequence
  Synthetic construct
CSYAGSYV

SEQ ID NO: 7694 - protein, 9 aa, Artificial Sequence
  Synthetic construct
QQRGNWPGT

SEQ ID NO: 7695 - protein, 11 aa, Artificial Sequence
  Synthetic construct
ATWDDSLNVWV

SEQ ID NO: 7696 - protein, 10 aa, Artificial Sequence
  Synthetic construct
QQRSNWRGFT

SEQ ID NO: 7697 - protein, 10 aa, Artificial Sequence
  Synthetic construct
FSYTSRGTRV

SEQ ID NO: 7698 - protein, 9 aa, Artificial Sequence
  Synthetic construct
LQSIELPLT

SEQ ID NO: 7699 - protein, 9 aa, Artificial Sequence
  Synthetic construct
QAWDSSTAV

SEQ ID NO: 7700 - protein, 9 aa, Artificial Sequence
  Synthetic construct
MQSIELPLT

SEQ ID NO: 7701 - protein, 10 aa, Artificial Sequence
  Synthetic construct
QQRSNWPIFT

SEQ ID NO: 7702 - protein, 11 aa, Artificial Sequence
  Synthetic construct
GTWDTSLSAVV

SEQ ID NO: 7703 - protein, 13 aa, Artificial Sequence
  Synthetic construct
AGWDDSLNDRNYV

SEQ ID NO: 7704 - protein, 12 aa, Artificial Sequence
  Synthetic construct
QSADSSGTYYWV

SEQ ID NO: 7705 - protein, 10 aa, Artificial Sequence
  Synthetic construct
QSADISGTWV

SEQ ID NO: 7706 - protein, 10 aa, Artificial Sequence
  Synthetic construct
CSYAGFSTYV

SEQ ID NO: 7707 - protein, 9 aa, Artificial Sequence
  Synthetic construct
QQYNSYSIT

SEQ ID NO: 7708 - protein, 11 aa, Artificial Sequence
  Synthetic construct
QHRSNWPPLFT

SEQ ID NO: 7709 - protein, 9 aa, Artificial Sequence
  Synthetic construct
LVLYGGEWV

SEQ ID NO: 7710 - protein, 11 aa, Artificial Sequence
  Synthetic construct
QQRSNWPLVIT

SEQ ID NO: 7711 - protein, 9 aa, Artificial Sequence
  Synthetic construct
QQYHNLPWT

SEQ ID NO: 7712 - protein, 10 aa, Artificial Sequence
  Synthetic construct
QQYNKWPFWT

SEQ ID NO: 7713 - protein, 9 aa, Artificial Sequence
  Synthetic construct
QQYDNLPIT

SEQ ID NO: 7714 - protein, 10 aa, Artificial Sequence
  Synthetic construct
QHYDNLPMYT

SEQ ID NO: 7715 - protein, 12 aa, Artificial Sequence
  Synthetic construct
QSYDTSLSAFYV

SEQ ID NO: 7716 - protein, 9 aa, Artificial Sequence
  Synthetic construct
QEYTNYSWT

SEQ ID NO: 7717 - protein, 11 aa, Artificial Sequence
  Synthetic construct
QSADSSGTYGV

SEQ ID NO: 7718 - protein, 6 aa, Artificial Sequence
  Synthetic construct
QQSYST

SEQ ID NO: 7719 - protein, 11 aa, Artificial Sequence
  Synthetic construct
QSYDSSLSGYV

SEQ ID NO: 7720 - protein, 9 aa, Artificial Sequence
  Synthetic construct
QQYNSAPRT

SEQ ID NO: 7721 - protein, 11 aa, Artificial Sequence
  Synthetic construct
QHRRNWPPELT

SEQ ID NO: 7722 - protein, 9 aa, Artificial Sequence
  Synthetic construct
QQLSSYPVT

SEQ ID NO: 7723 - protein, 11 aa, Artificial Sequence
  Synthetic construct
QSFDSSLSGSV

SEQ ID NO: 7724 - protein, 9 aa, Artificial Sequence
  Synthetic construct
QQRRNWPQT

SEQ ID NO: 7725 - protein, 8 aa, Artificial Sequence
  Synthetic construct
QQYYSIRT

SEQ ID NO: 7726 - protein, 11 aa, Artificial Sequence
  Synthetic construct
QQYNTSPPSIT

SEQ ID NO: 7727 - protein, 12 aa, Artificial Sequence
  Synthetic construct
AAWDDSLSGHWV

SEQ ID NO: 7728 - protein, 9 aa, Artificial Sequence
  Synthetic construct
QAWDTSTVI

SEQ ID NO: 7729 - protein, 11 aa, Artificial Sequence
  Synthetic construct
HHRTNWPPKLT

SEQ ID NO: 7730 - protein, 11 aa, Artificial Sequence
  Synthetic construct
QSTDSSDTYRV

SEQ ID NO: 7731 - protein, 10 aa, Artificial Sequence
  Synthetic construct
QQSYSTPPIT

SEQ ID NO: 7732 - protein, 9 aa, Artificial Sequence
  Synthetic construct
LQDYTYPWT

SEQ ID NO: 7733 - protein, 9 aa, Artificial Sequence
  Synthetic construct
QQYYNYPRT

SEQ ID NO: 7734 - protein, 9 aa, Artificial Sequence
  Synthetic construct
QQAHSFPPT

SEQ ID NO: 7735 - protein, 10 aa, Artificial Sequence
  Synthetic construct
CSHGVSSTFV

SEQ ID NO: 7736 - protein, 9 aa, Artificial Sequence
  Synthetic construct
QAWDSSTGV

SEQ ID NO: 7737 - protein, 9 aa, Artificial Sequence
  Synthetic construct
QQYNSYPYT

SEQ ID NO: 7738 - protein, 9 aa, Artificial Sequence
  Synthetic construct
QQYGSSPAT

SEQ ID NO: 7739 - protein, 9 aa, Artificial Sequence
  Synthetic construct
QQYDTLRWT

SEQ ID NO: 7740 - protein, 9 aa, Artificial Sequence
  Synthetic construct
QQYGGSLRT

SEQ ID NO: 7741 - protein, 10 aa, Artificial Sequence
  Synthetic construct
GTWDSSLSPM

SEQ ID NO: 7742 - protein, 11 aa, Artificial Sequence
  Synthetic construct
AAWDDSLSGVV

SEQ ID NO: 7743 - protein, 11 aa, Artificial Sequence
  Synthetic construct
QQYNKWPPEYT

SEQ ID NO: 7744 - protein, 11 aa, Artificial Sequence
  Synthetic construct
QSADSSGTYYV

SEQ ID NO: 7745 - protein, 11 aa, Artificial Sequence
  Synthetic construct
AAWDDSLTGRV

SEQ ID NO: 7746 - protein, 11 aa, Artificial Sequence
  Synthetic construct
HSRDSSGNNLL

SEQ ID NO: 7747 - protein, 10 aa, Artificial Sequence
  Synthetic construct
SSYIGSDNLV

SEQ ID NO: 7748 - protein, 10 aa, Artificial Sequence
  Synthetic construct
QSAASSGPVV

SEQ ID NO: 7749 - protein, 9 aa, Artificial Sequence
  Synthetic construct
QQYYSTPYT

SEQ ID NO: 7750 - protein, 10 aa, Artificial Sequence
  Synthetic construct
SSYTSSSTLV

SEQ ID NO: 7751 - protein, 9 aa, Artificial Sequence
  Synthetic construct
QQYRYWPWT

SEQ ID NO: 7752 - protein, 11 aa, Artificial Sequence
  Synthetic construct
CSYVGGITLGV

SEQ ID NO: 7753 - protein, 11 aa, Artificial Sequence
  Synthetic construct
GTWDSSLSAVV

SEQ ID NO: 7754 - protein, 9 aa, Artificial Sequence
  Synthetic construct
QQIAASPFT

SEQ ID NO: 7755 - protein, 9 aa, Artificial Sequence
  Synthetic construct
QQYGSSPRT

SEQ ID NO: 7756 - protein, 11 aa, Artificial Sequence
  Synthetic construct
QVWDSLTDHVV

SEQ ID NO: 7757 - protein, 9 aa, Artificial Sequence
  Synthetic construct
QQYNNWPIT

SEQ ID NO: 7758 - protein, 9 aa, Artificial Sequence
  Synthetic construct
QQYGSSPAT

SEQ ID NO: 7759 - protein, 9 aa, Artificial Sequence
  Synthetic construct
QQSYITPST

SEQ ID NO: 7760 - protein, 9 aa, Artificial Sequence
  Synthetic construct
MQALHFPYT

SEQ ID NO: 7761 - protein, 10 aa, Artificial Sequence
  Synthetic construct
SSSAGNYKLI

SEQ ID NO: 7762 - protein, 10 aa, Artificial Sequence
  Synthetic construct
QQSYSMRAFT

SEQ ID NO: 7763 - protein, 10 aa, Artificial Sequence
  Synthetic construct
QQYNDWPPFT

SEQ ID NO: 7764 - protein, 9 aa, Artificial Sequence
  Synthetic construct
MIWHSSAWV

SEQ ID NO: 7765 - protein, 11 aa, Artificial Sequence
  Synthetic construct
SSYAGSTTRYV

SEQ ID NO: 7766 - protein, 9 aa, Artificial Sequence
  Synthetic construct
QQYDNLPLT

SEQ ID NO: 7767 - protein, 12 aa, Artificial Sequence
  Synthetic construct
SSYAGSNNFDVL

SEQ ID NO: 7768 - protein, 9 aa, Artificial Sequence
  Synthetic construct
QQSYSTPPT

SEQ ID NO: 7769 - protein, 10 aa, Artificial Sequence
  Synthetic construct
QQRSNWPPFT

SEQ ID NO: 7770 - protein, 10 aa, Artificial Sequence
  Synthetic construct
CSYAGSSTYV

SEQ ID NO: 7771 - protein, 10 aa, Artificial Sequence
  Synthetic construct
SSYTSSSTLV

SEQ ID NO: 7772 - protein, 9 aa, Artificial Sequence
  Synthetic construct
QQFNNWPVT

SEQ ID NO: 7773 - protein, 11 aa, Artificial Sequence
  Synthetic construct
QSYDSSLSALV

SEQ ID NO: 7774 - protein, 9 aa, Artificial Sequence
  Synthetic construct
QSYDWTNVV

SEQ ID NO: 7775 - protein, 11 aa, Artificial Sequence
  Synthetic construct
STWDDSLSGWV

SEQ ID NO: 7776 - protein, 11 aa, Artificial Sequence
  Synthetic construct
GTWDGSLSAGV

SEQ ID NO: 7777 - protein, 9 aa, Artificial Sequence
  Synthetic construct
QQYNSNSRT

SEQ ID NO: 7778 - protein, 11 aa, Artificial Sequence
  Synthetic construct
QQRYNWPPRGT

SEQ ID NO: 7779 - protein, 10 aa, Artificial Sequence
  Synthetic construct
QAWDSSIPVV

SEQ ID NO: 7780 - protein, 9 aa, Artificial Sequence
  Synthetic construct
QQYGSSPAT

SEQ ID NO: 7781 - protein, 9 aa, Artificial Sequence
  Synthetic construct
QQYNSWPGT

SEQ ID NO: 7782 - protein, 12 aa, Artificial Sequence
  Synthetic construct
SSYTSTTTAIWV

SEQ ID NO: 7783 - protein, 9 aa, Artificial Sequence
  Synthetic construct
QQYNSYPPT

SEQ ID NO: 7784 - protein, 10 aa, Artificial Sequence
  Synthetic construct
QQYNDWPPLT

SEQ ID NO: 7785 - protein, 8 aa, Artificial Sequence
  Synthetic construct
LLSYSGGG

SEQ ID NO: 7786 - protein, 8 aa, Artificial Sequence
  Synthetic construct
QQYGSTYT

SEQ ID NO: 7787 - protein, 10 aa, Artificial Sequence
  Synthetic construct
QSSDSSGNCV

SEQ ID NO: 7788 - protein, 12 aa, Artificial Sequence
  Synthetic construct
QSYDNSLSGSYV

SEQ ID NO: 7789 - protein, 13 aa, Artificial Sequence
  Synthetic construct
QSYDSSLTGPNWV

SEQ ID NO: 7790 - protein, 10 aa, Artificial Sequence
  Synthetic construct
AAWDDSLSGR

SEQ ID NO: 7791 - protein, 11 aa, Artificial Sequence
  Synthetic construct
QSYDSSLSGYV

SEQ ID NO: 7792 - protein, 10 aa, Artificial Sequence
  Synthetic construct
YSIDSSGNPP

SEQ ID NO: 7793 - protein, 10 aa, Artificial Sequence
  Synthetic construct
AAWDDSLNVV

SEQ ID NO: 7794 - protein, 11 aa, Artificial Sequence
  Synthetic construct
QSYDSSLSGWV

SEQ ID NO: 7795 - protein, 11 aa, Artificial Sequence
  Synthetic construct
QSYDSTLRDVV

SEQ ID NO: 7796 - protein, 10 aa, Artificial Sequence
  Synthetic construct
MQGTHWPPYT

SEQ ID NO: 7797 - protein, 10 aa, Artificial Sequence
  Synthetic construct
VLYMGSGIWV

SEQ ID NO: 7798 - protein, 11 aa, Artificial Sequence
  Synthetic construct
SAWDSSLSVWV

SEQ ID NO: 7799 - protein, 10 aa, Artificial Sequence
  Synthetic construct
YSPDSSGKGV

SEQ ID NO: 7800 - protein, 9 aa, Artificial Sequence
  Synthetic construct
QQYGSSPWT

SEQ ID NO: 7801 - protein, 11 aa, Artificial Sequence
  Synthetic construct
QSYDSSLSALV

SEQ ID NO: 7802 - protein, 9 aa, Artificial Sequence
  Synthetic construct
QQYGDSPWT

SEQ ID NO: 7803 - protein, 9 aa, Artificial Sequence
  Synthetic construct
QAWDSSSVT

SEQ ID NO: 7804 - protein, 9 aa, Artificial Sequence
  Synthetic construct
QQYGGSPAT

SEQ ID NO: 7805 - protein, 10 aa, Artificial Sequence
  Synthetic construct
CSYAGNYTWV

SEQ ID NO: 7806 - protein, 11 aa, Artificial Sequence
  Synthetic construct
QSYDSSLSALV

SEQ ID NO: 7807 - protein, 9 aa, Artificial Sequence
  Synthetic construct
MQALQTPWT

SEQ ID NO: 7808 - protein, 9 aa, Artificial Sequence
  Synthetic construct
LQYNSYPLT

SEQ ID NO: 7809 - protein, 12 aa, Artificial Sequence
  Synthetic construct
QVWDGSSDRHYV

SEQ ID NO: 7810 - protein, 9 aa, Artificial Sequence
  Synthetic construct
QQYYNTPRT

SEQ ID NO: 7811 - protein, 11 aa, Artificial Sequence
  Synthetic construct
CSCCSYEGGWV

SEQ ID NO: 7812 - protein, 11 aa, Artificial Sequence
  Synthetic construct
SSYTTNITPYV

SEQ ID NO: 7813 - protein, 11 aa, Artificial Sequence
  Synthetic construct
YSTDTSGNQRV

SEQ ID NO: 7814 - protein, 11 aa, Artificial Sequence
  Synthetic construct
SSYTTSSTLEV

SEQ ID NO: 7815 - protein, 10 aa, Artificial Sequence
  Synthetic construct
QQSYSTPPFT

SEQ ID NO: 7816 - protein, 9 aa, Artificial Sequence
  Synthetic construct
QQFHSYPYT

SEQ ID NO: 7817 - protein, 10 aa, Artificial Sequence
  Synthetic construct
QQYGSSPMYT

SEQ ID NO: 7818 - protein, 9 aa, Artificial Sequence
  Synthetic construct
QQYYSFPWT

SEQ ID NO: 7819 - protein, 9 aa, Artificial Sequence
  Synthetic construct
QAWDSNTPI

SEQ ID NO: 7820 - protein, 9 aa, Artificial Sequence
  Synthetic construct
QQYATSPRT

SEQ ID NO: 7821 - protein, 9 aa, Artificial Sequence
  Synthetic construct
QQYNNWLRT

SEQ ID NO: 7822 - protein, 9 aa, Artificial Sequence
  Synthetic construct
HQYYSSPWT

SEQ ID NO: 7823 - protein, 9 aa, Artificial Sequence
  Synthetic construct
QQYNNWPYT

SEQ ID NO: 7824 - protein, 9 aa, Artificial Sequence
  Synthetic construct
QLYGFSQLT

SEQ ID NO: 7825 - protein, 11 aa, Artificial Sequence
  Synthetic construct
QSYDSSLNDYV

SEQ ID NO: 7826 - protein, 9 aa, Artificial Sequence
  Synthetic construct
MQSIQPPYT

SEQ ID NO: 7827 - protein, 6 aa, Artificial Sequence
  Synthetic construct
QQYGTT

SEQ ID NO: 7828 - protein, 12 aa, Artificial Sequence
  Synthetic construct
QSYDSSLSGWEV

SEQ ID NO: 7829 - protein, 10 aa, Artificial Sequence
  Synthetic construct
CSYAGSSTYV

SEQ ID NO: 7830 - protein, 10 aa, Artificial Sequence
  Synthetic construct
QQVNSFFRVT

SEQ ID NO: 7831 - protein, 10 aa, Artificial Sequence
  Synthetic construct
QQYGSSLTWT

SEQ ID NO: 7832 - protein, 9 aa, Artificial Sequence
  Synthetic construct
MQGVHWPFT

SEQ ID NO: 7833 - protein, 10 aa, Artificial Sequence
  Synthetic construct
YSTDSSGKPL

SEQ ID NO: 7834 - protein, 11 aa, Artificial Sequence
  Synthetic construct
YSTDSSGNHGV

SEQ ID NO: 7835 - protein, 9 aa, Artificial Sequence
  Synthetic construct
QHYNSNSGT

SEQ ID NO: 7836 - protein, 11 aa, Artificial Sequence
  Synthetic construct
QQRSNRPPTWT

SEQ ID NO: 7837 - protein, 9 aa, Artificial Sequence
  Synthetic construct
QQFAYSLYT

SEQ ID NO: 7838 - protein, 9 aa, Artificial Sequence
  Synthetic construct
QAWDSSTVV

SEQ ID NO: 7839 - protein, 9 aa, Artificial Sequence
  Synthetic construct
QQYNSYPYT

SEQ ID NO: 7840 - protein, 9 aa, Artificial Sequence
  Synthetic construct
LQHNSYPHT

SEQ ID NO: 7841 - protein, 9 aa, Artificial Sequence
  Synthetic construct
LLYYGVIGV

SEQ ID NO: 7842 - protein, 11 aa, Artificial Sequence
  Synthetic construct
LVWDGSLSGWV

SEQ ID NO: 7843 - protein, 10 aa, Artificial Sequence
  Synthetic construct
SSYTSSTTLV

SEQ ID NO: 7844 - protein, 10 aa, Artificial Sequence
  Synthetic construct
QAWDSSTAGV

SEQ ID NO: 7845 - protein, 12 aa, Artificial Sequence
  Synthetic construct
YSTDTSGDHRGV

SEQ ID NO: 7846 - protein, 9 aa, Artificial Sequence
  Synthetic construct
MQGIHLPIT

SEQ ID NO: 7847 - protein, 11 aa, Artificial Sequence
  Synthetic construct
YSTDSSGKQGV

SEQ ID NO: 7848 - protein, 8 aa, Artificial Sequence
  Synthetic construct
QHYGTSWT

SEQ ID NO: 7849 - protein, 10 aa, Artificial Sequence
  Synthetic construct
MQALQTPGVS

SEQ ID NO: 7850 - protein, 11 aa, Artificial Sequence
  Synthetic construct
GAWDSSLSSVV

SEQ ID NO: 7851 - protein, 8 aa, Artificial Sequence
  Synthetic construct
QQRSNWPT

SEQ ID NO: 7852 - protein, 9 aa, Artificial Sequence
  Synthetic construct
MQFIELPYT

SEQ ID NO: 7853 - protein, 9 aa, Artificial Sequence
  Synthetic construct
QQYGSSPWT

SEQ ID NO: 7854 - protein, 9 aa, Artificial Sequence
  Synthetic construct
QQYYSTPIT

SEQ ID NO: 7855 - protein, 10 aa, Artificial Sequence
  Synthetic construct
QQYGSSLTWT

SEQ ID NO: 7856 - protein, 9 aa, Artificial Sequence
  Synthetic construct
QQSYSSPWT

SEQ ID NO: 7857 - protein, 9 aa, Artificial Sequence
  Synthetic construct
QQYGGSFRT

SEQ ID NO: 7858 - protein, 10 aa, Artificial Sequence
  Synthetic construct
SSYAGTNIYV

SEQ ID NO: 7859 - protein, 10 aa, Artificial Sequence
  Synthetic construct
CSYADSSSLV

SEQ ID NO: 7860 - protein, 9 aa, Artificial Sequence
  Synthetic construct
QQYDSSFWT

SEQ ID NO: 7861 - protein, 11 aa, Artificial Sequence
  Synthetic construct
SSATRSGTLYV

SEQ ID NO: 7862 - protein, 11 aa, Artificial Sequence
  Synthetic construct
YSTDSSGNHRV

SEQ ID NO: 7863 - protein, 9 aa, Artificial Sequence
  Synthetic construct
QEYTNYSWT

SEQ ID NO: 7864 - protein, 11 aa, Artificial Sequence
  Synthetic construct
QSYDSSLSVYV

SEQ ID NO: 7865 - protein, 10 aa, Artificial Sequence
  Synthetic construct
QAWDSSTGGV

SEQ ID NO: 7866 - protein, 11 aa, Artificial Sequence
  Synthetic construct
AAWDDSLNGWV

SEQ ID NO: 7867 - protein, 11 aa, Artificial Sequence
  Synthetic construct
AAWDDSLSGWV

SEQ ID NO: 7868 - protein, 11 aa, Artificial Sequence
  Synthetic construct
QQRSNWPPRYT

SEQ ID NO: 7869 - protein, 11 aa, Artificial Sequence
  Synthetic construct
QVYDSSTDPWV

SEQ ID NO: 7870 - protein, 9 aa, Artificial Sequence
  Synthetic construct
QQLNSYPRT

SEQ ID NO: 7871 - protein, 10 aa, Artificial Sequence
  Synthetic construct
QQYENWPPCT

SEQ ID NO: 7872 - protein, 10 aa, Artificial Sequence
  Synthetic construct
NSYTITGTWV

SEQ ID NO: 7873 - protein, 9 aa, Artificial Sequence
  Synthetic construct
QQYNNWPRT

SEQ ID NO: 7874 - protein, 10 aa, Artificial Sequence
  Synthetic construct
SSYTSSSTLV

SEQ ID NO: 7875 - protein, 9 aa, Artificial Sequence
  Synthetic construct
QKYKGVPVT

SEQ ID NO: 7876 - protein, 10 aa, Artificial Sequence
  Synthetic construct
YSTDSSGKGV

SEQ ID NO: 7877 - protein, 10 aa, Artificial Sequence
  Synthetic construct
QQSYSTLALT

SEQ ID NO: 7878 - protein, 9 aa, Artificial Sequence
  Synthetic construct
HQYVILPLT

SEQ ID NO: 7879 - protein, 9 aa, Artificial Sequence
  Synthetic construct
QQYGSSPFT

SEQ ID NO: 7880 - protein, 10 aa, Artificial Sequence
  Synthetic construct
QQLNSYPEIT

SEQ ID NO: 7881 - protein, 12 aa, Artificial Sequence
  Synthetic construct
YSTDSSGNHRRV

SEQ ID NO: 7882 - protein, 12 aa, Artificial Sequence
  Synthetic construct
QSYDSSLSGSNV

SEQ ID NO: 7883 - protein, 12 aa, Artificial Sequence
  Synthetic construct
QSYDSSLSGHVV

SEQ ID NO: 7884 - protein, 10 aa, Artificial Sequence
  Synthetic construct
CSHVTGGTYV

SEQ ID NO: 7885 - protein, 9 aa, Artificial Sequence
  Synthetic construct
QQYFGIPRT

SEQ ID NO: 7886 - protein, 8 aa, Artificial Sequence
  Synthetic construct
QQYYRAPT

SEQ ID NO: 7887 - protein, 11 aa, Artificial Sequence
  Synthetic construct
AAWDDSLNGWV

SEQ ID NO: 7888 - protein, 10 aa, Artificial Sequence
  Synthetic construct
QHYNNWPPWT

SEQ ID NO: 7889 - protein, 11 aa, Artificial Sequence
  Synthetic construct
QSPDRSGTYWV

SEQ ID NO: 7890 - protein, 10 aa, Artificial Sequence
  Synthetic construct
QQSGSSPPYT

SEQ ID NO: 7891 - protein, 11 aa, Artificial Sequence
  Synthetic construct
AAWDDSLSGEV

SEQ ID NO: 7892 - protein, 10 aa, Artificial Sequence
  Synthetic construct
QQSYSFPPWT

SEQ ID NO: 7893 - protein, 11 aa, Artificial Sequence
  Synthetic construct
APWDDSLNGPV

SEQ ID NO: 7894 - protein, 11 aa, Artificial Sequence
  Synthetic construct
YSTDSSGNHRV

SEQ ID NO: 7895 - protein, 9 aa, Artificial Sequence
  Synthetic construct
QQANGFPIT

SEQ ID NO: 7896 - protein, 10 aa, Artificial Sequence
  Synthetic construct
LQYNNRPPYT

SEQ ID NO: 7897 - protein, 12 aa, Artificial Sequence
  Synthetic construct
QSYDSSLSGSWV

SEQ ID NO: 7898 - protein, 10 aa, Artificial Sequence
  Synthetic construct
CSYAGNNNFV

SEQ ID NO: 7899 - protein, 10 aa, Artificial Sequence
  Synthetic construct
QQYGSSPPVV

SEQ ID NO: 7900 - protein, 11 aa, Artificial Sequence
  Synthetic construct
SSYAGSNNRLV

SEQ ID NO: 7901 - protein, 9 aa, Artificial Sequence
  Synthetic construct
QHYDSYSFT

SEQ ID NO: 7902 - protein, 11 aa, Artificial Sequence
  Synthetic construct
QSYDSSLSGCV

SEQ ID NO: 7903 - protein, 9 aa, Artificial Sequence
  Synthetic construct
QQHYSPPPT

SEQ ID NO: 7904 - protein, 10 aa, Artificial Sequence
  Synthetic construct
SSYVGIDNWV

SEQ ID NO: 7905 - protein, 10 aa, Artificial Sequence
  Synthetic construct
SSYGGSNNLV

SEQ ID NO: 7906 - protein, 10 aa, Artificial Sequence
  Synthetic construct
QSTDSSGAWV

SEQ ID NO: 7907 - protein, 9 aa, Artificial Sequence
  Synthetic construct
QAWYSSTGV

SEQ ID NO: 7908 - protein, 9 aa, Artificial Sequence
  Synthetic construct
MQALQTPRT

SEQ ID NO: 7909 - protein, 7 aa, Artificial Sequence
  Synthetic construct
QQYNSWT

SEQ ID NO: 7910 - protein, 10 aa, Artificial Sequence
  Synthetic construct
SSFAGTDPVV

SEQ ID NO: 7911 - protein, 10 aa, Artificial Sequence
  Synthetic construct
QQRSNWPPFT

SEQ ID NO: 7912 - protein, 9 aa, Artificial Sequence
  Synthetic construct
QQYYNTPPT

SEQ ID NO: 7913 - protein, 11 aa, Artificial Sequence
  Synthetic construct
SSYTSSSTRYV

SEQ ID NO: 7914 - protein, 9 aa, Artificial Sequence
  Synthetic construct
QHFGSSRGT

SEQ ID NO: 7915 - protein, 10 aa, Artificial Sequence
  Synthetic construct
QQCYNWPPWT

SEQ ID NO: 7916 - protein, 10 aa, Artificial Sequence
  Synthetic construct
CSYAGSYTNV

SEQ ID NO: 7917 - protein, 11 aa, Artificial Sequence
  Synthetic construct
AAWDDSLNGPV

SEQ ID NO: 7918 - protein, 12 aa, Artificial Sequence
  Synthetic construct
AAWDDSLTTYVI

SEQ ID NO: 7919 - protein, 11 aa, Artificial Sequence
  Synthetic construct
QSTDSSGAYWV

SEQ ID NO: 7920 - protein, 9 aa, Artificial Sequence
  Synthetic construct
QQRRNWPQT

SEQ ID NO: 7921 - protein, 10 aa, Artificial Sequence
  Synthetic construct
QQYGDSPPIT

SEQ ID NO: 7922 - protein, 9 aa, Artificial Sequence
  Synthetic construct
QQANSFPRT

SEQ ID NO: 7923 - protein, 9 aa, Artificial Sequence
  Synthetic construct
QQSSSTPFT

SEQ ID NO: 7924 - protein, 10 aa, Artificial Sequence
  Synthetic construct
NSYAGSDNLV

SEQ ID NO: 7925 - protein, 11 aa, Artificial Sequence
  Synthetic construct
AAWGDSLNGVV

SEQ ID NO: 7926 - protein, 9 aa, Artificial Sequence
  Synthetic construct
QQYGSSLWT

SEQ ID NO: 7927 - protein, 9 aa, Artificial Sequence
  Synthetic construct
QQYNNWPFT

SEQ ID NO: 7928 - protein, 9 aa, Artificial Sequence
  Synthetic construct
QAWDSSTVI

SEQ ID NO: 7929 - protein, 9 aa, Artificial Sequence
  Synthetic construct
QHSHATPWT

SEQ ID NO: 7930 - protein, 9 aa, Artificial Sequence
  Synthetic construct
QQSYSTPWT

SEQ ID NO: 7931 - protein, 9 aa, Artificial Sequence
  Synthetic construct
QQSYSTPPT

SEQ ID NO: 7932 - protein, 8 aa, Artificial Sequence
  Synthetic construct
QQYNNYFT

SEQ ID NO: 7933 - protein, 9 aa, Artificial Sequence
  Synthetic construct
QQCYGTPRT

SEQ ID NO: 7934 - protein, 11 aa, Artificial Sequence
  Synthetic construct
QSSDSSGTYMI

SEQ ID NO: 7935 - protein, 9 aa, Artificial Sequence
  Synthetic construct
QQYGSLFLT

SEQ ID NO: 7936 - protein, 9 aa, Artificial Sequence
  Synthetic construct
QQYYNSPRT

SEQ ID NO: 7937 - protein, 9 aa, Artificial Sequence
  Synthetic construct
QQYRYSPYT

SEQ ID NO: 7938 - protein, 9 aa, Artificial Sequence
  Synthetic construct
LLHYSGARV

SEQ ID NO: 7939 - protein, 12 aa, Artificial Sequence
  Synthetic construct
NSRDNSGIHVGV

SEQ ID NO: 7940 - protein, 9 aa, Artificial Sequence
  Synthetic construct
QQYFSTPYT

SEQ ID NO: 7941 - protein, 12 aa, Artificial Sequence
  Synthetic construct
YSTDSSADHRGV

SEQ ID NO: 7942 - protein, 11 aa, Artificial Sequence
  Synthetic construct
AAWDDSLNGPV

SEQ ID NO: 7943 - protein, 10 aa, Artificial Sequence
  Synthetic construct
FSYTSRGTRV

SEQ ID NO: 7944 - protein, 10 aa, Artificial Sequence
  Synthetic construct
CSYAGSYSWV

SEQ ID NO: 7945 - protein, 11 aa, Artificial Sequence
  Synthetic construct
GTWDSSLSAYV

SEQ ID NO: 7946 - protein, 10 aa, Artificial Sequence
  Synthetic construct
QQYNNWPFWT

SEQ ID NO: 7947 - protein, 9 aa, Artificial Sequence
  Synthetic construct
LVSYGGARV

SEQ ID NO: 7948 - protein, 10 aa, Artificial Sequence
  Synthetic construct
QQRSNWPPYT

SEQ ID NO: 7949 - protein, 11 aa, Artificial Sequence
  Synthetic construct
QAWDSSTENVV

SEQ ID NO: 7950 - protein, 9 aa, Artificial Sequence
  Synthetic construct
HQYNNWPWT

SEQ ID NO: 7951 - protein, 9 aa, Artificial Sequence
  Synthetic construct
QAWDSSTYV

SEQ ID NO: 7952 - protein, 11 aa, Artificial Sequence
  Synthetic construct
QQYNNWPPVYT

SEQ ID NO: 7953 - protein, 9 aa, Artificial Sequence
  Synthetic construct
QQYGGSRRT

SEQ ID NO: 7954 - protein, 9 aa, Artificial Sequence
  Synthetic construct
ISYTSRSTA

SEQ ID NO: 7955 - protein, 10 aa, Artificial Sequence
  Synthetic construct
FSYAGFSTWV

SEQ ID NO: 7956 - protein, 11 aa, Artificial Sequence
  Synthetic construct
QSYDSSLSAWL

SEQ ID NO: 7957 - protein, 9 aa, Artificial Sequence
  Synthetic construct
QQSYSTPLT

SEQ ID NO: 7958 - protein, 10 aa, Artificial Sequence
  Synthetic construct
QQYNSYSPLT

SEQ ID NO: 7959 - protein, 9 aa, Artificial Sequence
  Synthetic construct
QQYFSAPRT

SEQ ID NO: 7960 - protein, 8 aa, Artificial Sequence
  Synthetic construct
QQANSFWT

SEQ ID NO: 7961 - protein, 10 aa, Artificial Sequence
  Synthetic construct
LVSYSAARVV

SEQ ID NO: 7962 - protein, 10 aa, Artificial Sequence
  Synthetic construct
QQRSNWPPYT

SEQ ID NO: 7963 - protein, 11 aa, Artificial Sequence
  Synthetic construct
CSYAGDDVYVV

SEQ ID NO: 7964 - protein, 10 aa, Artificial Sequence
  Synthetic construct
SSYTSSGTLV

SEQ ID NO: 7965 - protein, 9 aa, Artificial Sequence
  Synthetic construct
QQYGSSPFT

SEQ ID NO: 7966 - protein, 10 aa, Artificial Sequence
  Synthetic construct
SSYTSTSTYV

SEQ ID NO: 7967 - protein, 10 aa, Artificial Sequence
  Synthetic construct
CSYAGISTWV

SEQ ID NO: 7968 - protein, 9 aa, Artificial Sequence
  Synthetic construct
MQSIQPPYT

SEQ ID NO: 7969 - protein, 8 aa, Artificial Sequence
  Synthetic construct
HQYGSSPS

SEQ ID NO: 7970 - protein, 10 aa, Artificial Sequence
  Synthetic construct
CSYAGSSTYV

SEQ ID NO: 7971 - protein, 11 aa, Artificial Sequence
  Synthetic construct
CSYAGSSTPWV

SEQ ID NO: 7972 - protein, 9 aa, Artificial Sequence
  Synthetic construct
QQYGSSLWT

SEQ ID NO: 7973 - protein, 9 aa, Artificial Sequence
  Synthetic construct
QQSYITPPT

SEQ ID NO: 7974 - protein, 8 aa, Artificial Sequence
  Synthetic construct
MQGTHFYT

SEQ ID NO: 7975 - protein, 11 aa, Artificial Sequence
  Synthetic construct
AAWDDSLNGYV

SEQ ID NO: 7976 - protein, 11 aa, Artificial Sequence
  Synthetic construct
YSTASSGNRWV

SEQ ID NO: 7977 - protein, 10 aa, Artificial Sequence
  Synthetic construct
CSYAGSSIWV

SEQ ID NO: 7978 - protein, 9 aa, Artificial Sequence
  Synthetic construct
MQALQTPWT

SEQ ID NO: 7979 - protein, 9 aa, Artificial Sequence
  Synthetic construct
HQYGTSPWT

SEQ ID NO: 7980 - protein, 10 aa, Artificial Sequence
  Synthetic construct
QQRSNWPPYT

SEQ ID NO: 7981 - protein, 11 aa, Artificial Sequence
  Synthetic construct
SSYTGSSPPWV

SEQ ID NO: 7982 - protein, 11 aa, Artificial Sequence
  Synthetic construct
QSYDTSLSGVI

SEQ ID NO: 7983 - protein, 11 aa, Artificial Sequence
  Synthetic construct
QQRSNWPPKIT

SEQ ID NO: 7984 - protein, 9 aa, Artificial Sequence
  Synthetic construct
QQYGSSPWT

SEQ ID NO: 7985 - protein, 8 aa, Artificial Sequence
  Synthetic construct
QQSNSALT

SEQ ID NO: 7986 - protein, 10 aa, Artificial Sequence
  Synthetic construct
QQRSNWPPFT

SEQ ID NO: 7987 - protein, 10 aa, Artificial Sequence
  Synthetic construct
SSFTSSSTLV

SEQ ID NO: 7988 - protein, 10 aa, Artificial Sequence
  Synthetic construct
YSRDNSGKGV

SEQ ID NO: 7989 - protein, 11 aa, Artificial Sequence
  Synthetic construct
HQRSNWPPRST

SEQ ID NO: 7990 - protein, 9 aa, Artificial Sequence
  Synthetic construct
MEGTHWPPT

SEQ ID NO: 7991 - protein, 9 aa, Artificial Sequence
  Synthetic construct
QQSYSAPYT

SEQ ID NO: 7992 - protein, 9 aa, Artificial Sequence
  Synthetic construct
MQALQTPWT

SEQ ID NO: 7993 - protein, 11 aa, Artificial Sequence
  Synthetic construct
SSWRSGSNPYV

SEQ ID NO: 7994 - protein, 11 aa, Artificial Sequence
  Synthetic construct
GIWDSSLSAWV

SEQ ID NO: 7995 - protein, 9 aa, Artificial Sequence
  Synthetic construct
MQALQTPLT

SEQ ID NO: 7996 - protein, 11 aa, Artificial Sequence
  Synthetic construct
QSYDSSLTALV

SEQ ID NO: 7997 - protein, 11 aa, Artificial Sequence
  Synthetic construct
AAWDDSLSVVV

SEQ ID NO: 7998 - protein, 9 aa, Artificial Sequence
  Synthetic construct
QQSYNTPWT

SEQ ID NO: 7999 - protein, 9 aa, Artificial Sequence
  Synthetic construct
MQGTHWPPT

SEQ ID NO: 8000 - protein, 9 aa, Artificial Sequence
  Synthetic construct
MQALHFPYT

SEQ ID NO: 8001 - protein, 9 aa, Artificial Sequence
  Synthetic construct
TQATQFPYT

SEQ ID NO: 8002 - protein, 11 aa, Artificial Sequence
  Synthetic construct
QHRSNWPPRLT

SEQ ID NO: 8003 - protein, 9 aa, Artificial Sequence
  Synthetic construct
QQYGSSPYT

SEQ ID NO: 8004 - protein, 9 aa, Artificial Sequence
  Synthetic construct
MQSIQPPYT

SEQ ID NO: 8005 - protein, 9 aa, Artificial Sequence
  Synthetic construct
QQYGGSRRS

SEQ ID NO: 8006 - protein, 9 aa, Artificial Sequence
  Synthetic construct
QQYNSYSLT

SEQ ID NO: 8007 - protein, 9 aa, Artificial Sequence
  Synthetic construct
MQGTHWPLT

SEQ ID NO: 8008 - protein, 11 aa, Artificial Sequence
  Synthetic construct
GTWDSSLSVVV

SEQ ID NO: 8009 - protein, 11 aa, Artificial Sequence
  Synthetic construct
CSYAGTYTSYV

SEQ ID NO: 8010 - protein, 9 aa, Artificial Sequence
  Synthetic construct
MQGTHWPYT

SEQ ID NO: 8011 - protein, 11 aa, Artificial Sequence
  Synthetic construct
NSRDSSGNHLV

SEQ ID NO: 8012 - protein, 11 aa, Artificial Sequence
  Synthetic construct
QQRSNWPPRLT

SEQ ID NO: 8013 - protein, 9 aa, Artificial Sequence
  Synthetic construct
QQYNSYPCT

SEQ ID NO: 8014 - protein, 10 aa, Artificial Sequence
  Synthetic construct
SSYTSSSTVL

SEQ ID NO: 8015 - protein, 9 aa, Artificial Sequence
  Synthetic construct
QAWDSSAYV

SEQ ID NO: 8016 - protein, 10 aa, Artificial Sequence
  Synthetic construct
QAWDSNTPYV

SEQ ID NO: 8017 - protein, 9 aa, Artificial Sequence
  Synthetic construct
QQSYSSPLT

SEQ ID NO: 8018 - protein, 9 aa, Artificial Sequence
  Synthetic construct
SSYTSSSVV

SEQ ID NO: 8019 - protein, 9 aa, Artificial Sequence
  Synthetic construct
QQSYNTPQT

SEQ ID NO: 8020 - protein, 9 aa, Artificial Sequence
  Synthetic construct
QQYGSSPWT

SEQ ID NO: 8021 - protein, 11 aa, Artificial Sequence
  Synthetic construct
GTWDSSLTAGV

SEQ ID NO: 8022 - protein, 11 aa, Artificial Sequence
  Synthetic construct
AAWDGSLNAYV

SEQ ID NO: 8023 - protein, 10 aa, Artificial Sequence
  Synthetic construct
LLSYSGARVV

SEQ ID NO: 8024 - protein, 9 aa, Artificial Sequence
  Synthetic construct
QQSYSTPHT

SEQ ID NO: 8025 - protein, 12 aa, Artificial Sequence
  Synthetic construct
AAWDDSLNGHVV

SEQ ID NO: 8026 - protein, 10 aa, Artificial Sequence
  Synthetic construct
SSYTNSRSGV

SEQ ID NO: 8027 - protein, 11 aa, Artificial Sequence
  Synthetic construct
TSYTSSSTYVV

SEQ ID NO: 8028 - protein, 9 aa, Artificial Sequence
  Synthetic construct
QQYYSTPWT

SEQ ID NO: 8029 - protein, 11 aa, Artificial Sequence
  Synthetic construct
QVWDTTTNHVI

SEQ ID NO: 8030 - protein, 10 aa, Artificial Sequence
  Synthetic construct
QRRSNWPPFT

SEQ ID NO: 8031 - protein, 9 aa, Artificial Sequence
  Synthetic construct
QQYDNTPLT

SEQ ID NO: 8032 - protein, 9 aa, Artificial Sequence
  Synthetic construct
QQSYSTPPA

SEQ ID NO: 8033 - protein, 13 aa, Artificial Sequence
  Synthetic construct
QSYDSTLSGPNYV

SEQ ID NO: 8034 - protein, 9 aa, Artificial Sequence
  Synthetic construct
GSYAGTNTL

SEQ ID NO: 8035 - protein, 9 aa, Artificial Sequence
  Synthetic construct
QQYYTTPFT

SEQ ID NO: 8036 - protein, 10 aa, Artificial Sequence
  Synthetic construct
QRRSNWPPFT

SEQ ID NO: 8037 - protein, 9 aa, Artificial Sequence
  Synthetic construct
QAWDSSTGG

SEQ ID NO: 8038 - protein, 11 aa, Artificial Sequence
  Synthetic construct
AAWDGSLNGFV

SEQ ID NO: 8039 - protein, 10 aa, Artificial Sequence
  Synthetic construct
SSYASSNTFV

SEQ ID NO: 8040 - protein, 9 aa, Artificial Sequence
  Synthetic construct
QQYDTLPYT

SEQ ID NO: 8041 - protein, 11 aa, Artificial Sequence
  Synthetic construct
HQRSNWPPLFT

SEQ ID NO: 8042 - protein, 11 aa, Artificial Sequence
  Synthetic construct
QVWDSSSDLVL

SEQ ID NO: 8043 - protein, 10 aa, Artificial Sequence
  Synthetic construct
QQYNPYSRLT

SEQ ID NO: 8044 - protein, 10 aa, Artificial Sequence
  Synthetic construct
SSYTSSRSGV

SEQ ID NO: 8045 - protein, 9 aa, Artificial Sequence
  Synthetic construct
QQSYSTPLT

SEQ ID NO: 8046 - protein, 5 aa, Artificial Sequence
  Synthetic construct
QQYGT

SEQ ID NO: 8047 - protein, 10 aa, Artificial Sequence
  Synthetic construct
CSYAGSSSWV

SEQ ID NO: 8048 - protein, 9 aa, Artificial Sequence
  Synthetic construct
QQANSFPWT

SEQ ID NO: 8049 - protein, 8 aa, Artificial Sequence
  Synthetic construct
QQYYSTPT

SEQ ID NO: 8050 - protein, 11 aa, Artificial Sequence
  Synthetic construct
NSRDSSANLVL

SEQ ID NO: 8051 - protein, 9 aa, Artificial Sequence
  Synthetic construct
QQYGSSPGT

SEQ ID NO: 8052 - protein, 9 aa, Artificial Sequence
  Synthetic construct
MQALQTPWT

SEQ ID NO: 8053 - protein, 9 aa, Artificial Sequence
  Synthetic construct
LQHNSYPLT

SEQ ID NO: 8054 - protein, 9 aa, Artificial Sequence
  Synthetic construct
QQTYSTPHT

SEQ ID NO: 8055 - protein, 11 aa, Artificial Sequence
  Synthetic construct
QSYDSSLSGNV

SEQ ID NO: 8056 - protein, 9 aa, Artificial Sequence
  Synthetic construct
QQLNSYPRT

SEQ ID NO: 8057 - protein, 9 aa, Artificial Sequence
  Synthetic construct
QAWDSSTVV

SEQ ID NO: 8058 - protein, 11 aa, Artificial Sequence
  Synthetic construct
QSADSRGTDWV

SEQ ID NO: 8059 - protein, 9 aa, Artificial Sequence
  Synthetic construct
QQTYSLPWT

SEQ ID NO: 8060 - protein, 9 aa, Artificial Sequence
  Synthetic construct
MQTTHWAYT

SEQ ID NO: 8061 - protein, 9 aa, Artificial Sequence
  Synthetic construct
QAWDSSLVV

SEQ ID NO: 8062 - protein, 9 aa, Artificial Sequence
  Synthetic construct
QQSYSTPQT

SEQ ID NO: 8063 - protein, 8 aa, Artificial Sequence
  Synthetic construct
QHYNNWLT

SEQ ID NO: 8064 - protein, 10 aa, Artificial Sequence
  Synthetic construct
HQANSFLALT

SEQ ID NO: 8065 - protein, 8 aa, Artificial Sequence
  Synthetic construct
CSYAGSWV

SEQ ID NO: 8066 - protein, 9 aa, Artificial Sequence
  Synthetic construct
QQYNYWPYT

SEQ ID NO: 8067 - protein, 10 aa, Artificial Sequence
  Synthetic construct
QQYGSSPPYT

SEQ ID NO: 8068 - protein, 8 aa, Artificial Sequence
  Synthetic construct
QQYNSYWT

SEQ ID NO: 8069 - protein, 9 aa, Artificial Sequence
  Synthetic construct
MQALQTPWT

SEQ ID NO: 8070 - protein, 10 aa, Artificial Sequence
  Synthetic construct
QSADSNTTGV

SEQ ID NO: 8071 - protein, 9 aa, Artificial Sequence
  Synthetic construct
QQYSSSVWT

SEQ ID NO: 8072 - protein, 11 aa, Artificial Sequence
  Synthetic construct
QHRSNWPPLFT

SEQ ID NO: 8073 - protein, 9 aa, Artificial Sequence
  Synthetic construct
HQYGTSPWT

SEQ ID NO: 8074 - protein, 10 aa, Artificial Sequence
  Synthetic construct
QSYDNTNERI

SEQ ID NO: 8075 - protein, 5 aa, Artificial Sequence
  Synthetic construct
QQRRT

SEQ ID NO: 8076 - protein, 11 aa, Artificial Sequence
  Synthetic construct
YSTDSSGNHRV

SEQ ID NO: 8077 - protein, 8 aa, Artificial Sequence
  Synthetic construct
MQGLQTRT

SEQ ID NO: 8078 - protein, 10 aa, Artificial Sequence
  Synthetic construct
CSCAGSYKVI

SEQ ID NO: 8079 - protein, 9 aa, Artificial Sequence
  Synthetic construct
QQYNSYSGA

SEQ ID NO: 8080 - protein, 12 aa, Artificial Sequence
  Synthetic construct
QSYDSSLSGSGV

SEQ ID NO: 8081 - protein, 11 aa, Artificial Sequence
  Synthetic construct
GTWDSSLSVGV

SEQ ID NO: 8082 - protein, 11 aa, Artificial Sequence
  Synthetic construct
NSRDSSGNHLV

SEQ ID NO: 8083 - protein, 9 aa, Artificial Sequence
  Synthetic construct
QQYGSSPLT

SEQ ID NO: 8084 - protein, 9 aa, Artificial Sequence
  Synthetic construct
MICHSSAWV

SEQ ID NO: 8085 - protein, 10 aa, Artificial Sequence
  Synthetic construct
SSFTTSSTRV

SEQ ID NO: 8086 - protein, 10 aa, Artificial Sequence
  Synthetic construct
SSYTSSNTEV

SEQ ID NO: 8087 - protein, 9 aa, Artificial Sequence
  Synthetic construct
QQYNEYWYT

SEQ ID NO: 8088 - protein, 11 aa, Artificial Sequence
  Synthetic construct
FSTDSSSNRRV

SEQ ID NO: 8089 - protein, 10 aa, Artificial Sequence
  Synthetic construct
LSYGDINNRV

SEQ ID NO: 8090 - protein, 11 aa, Artificial Sequence
  Synthetic construct
AAWDDSLNGYV

SEQ ID NO: 8091 - protein, 10 aa, Artificial Sequence
  Synthetic construct
QSYDSSLSYV

SEQ ID NO: 8092 - protein, 12 aa, Artificial Sequence
  Synthetic construct
QVWATGDDHAVV

SEQ ID NO: 8093 - protein, 11 aa, Artificial Sequence
  Synthetic construct
QSYDSGLSDSV

SEQ ID NO: 8094 - protein, 11 aa, Artificial Sequence
  Synthetic construct
ISYTSSSTQVV

SEQ ID NO: 8095 - protein, 10 aa, Artificial Sequence
  Synthetic construct
QQYSYWPPLT

SEQ ID NO: 8096 - protein, 11 aa, Artificial Sequence
  Synthetic construct
QQRSNWPPIFT

SEQ ID NO: 8097 - protein, 11 aa, Artificial Sequence
  Synthetic construct
CSYAGSYTLGV

SEQ ID NO: 8098 - protein, 9 aa, Artificial Sequence
  Synthetic construct
QQYYSSPYT

SEQ ID NO: 8099 - protein, 10 aa, Artificial Sequence
  Synthetic construct
QRRSNWPPFT

SEQ ID NO: 8100 - protein, 9 aa, Artificial Sequence
  Synthetic construct
QQSGNLPYT

SEQ ID NO: 8101 - protein, 11 aa, Artificial Sequence
  Synthetic construct
TSYAGSNNLVV

SEQ ID NO: 8102 - protein, 9 aa, Artificial Sequence
  Synthetic construct
QAWDSTTVV

SEQ ID NO: 8103 - protein, 11 aa, Artificial Sequence
  Synthetic construct
HSTDSSGNHHV

SEQ ID NO: 8104 - protein, 10 aa, Artificial Sequence
  Synthetic construct
QRRSNWPPFT

SEQ ID NO: 8105 - protein, 9 aa, Artificial Sequence
  Synthetic construct
QQYDHLRIT

SEQ ID NO: 8106 - protein, 11 aa, Artificial Sequence
  Synthetic construct
AAWHDSLNGSV

SEQ ID NO: 8107 - protein, 12 aa, Artificial Sequence
  Synthetic construct
AAWDDSLIGFYV

SEQ ID NO: 8108 - protein, 11 aa, Artificial Sequence
  Synthetic construct
QQRSNRPPTWT

SEQ ID NO: 8109 - protein, 10 aa, Artificial Sequence
  Synthetic construct
QQYDNWPPVT

SEQ ID NO: 8110 - protein, 9 aa, Artificial Sequence
  Synthetic construct
QQRSNWPLT

SEQ ID NO: 8111 - protein, 9 aa, Artificial Sequence
  Synthetic construct
MQSIQLPLT

SEQ ID NO: 8112 - protein, 12 aa, Artificial Sequence
  Synthetic construct
GTWDNSLSTFWV

SEQ ID NO: 8113 - protein, 9 aa, Artificial Sequence
  Synthetic construct
QQYNSYSLT

SEQ ID NO: 8114 - protein, 9 aa, Artificial Sequence
  Synthetic construct
QQSYNSPRT

SEQ ID NO: 8115 - protein, 8 aa, Artificial Sequence
  Synthetic construct
QVWDIGVV

SEQ ID NO: 8116 - protein, 11 aa, Artificial Sequence
  Synthetic construct
QSYDSSLSALV

SEQ ID NO: 8117 - protein, 11 aa, Artificial Sequence
  Synthetic construct
QQYNSYSSMYT

SEQ ID NO: 8118 - protein, 9 aa, Artificial Sequence
  Synthetic construct
QQSYSTPRT

SEQ ID NO: 8119 - protein, 9 aa, Artificial Sequence
  Synthetic construct
QQYGSSPRT

SEQ ID NO: 8120 - protein, 11 aa, Artificial Sequence
  Synthetic construct
SSYTSSSTSLV

SEQ ID NO: 8121 - protein, 9 aa, Artificial Sequence
  Synthetic construct
MQALQTPLT

SEQ ID NO: 8122 - protein, 9 aa, Artificial Sequence
  Synthetic construct
QAWDSGTYV

SEQ ID NO: 8123 - protein, 10 aa, Artificial Sequence
  Synthetic construct
TSYAGSNRVL

SEQ ID NO: 8124 - protein, 11 aa, Artificial Sequence
  Synthetic construct
ATWDHSLNGWV

SEQ ID NO: 8125 - protein, 11 aa, Artificial Sequence
  Synthetic construct
ATWDDSLSGPV

SEQ ID NO: 8126 - protein, 9 aa, Artificial Sequence
  Synthetic construct
QQYYGTPPT

SEQ ID NO: 8127 - protein, 9 aa, Artificial Sequence
  Synthetic construct
MQGTHWPLT

SEQ ID NO: 8128 - protein, 9 aa, Artificial Sequence
  Synthetic construct
QQYNNWPPT

SEQ ID NO: 8129 - protein, 9 aa, Artificial Sequence
  Synthetic construct
QAWGSSTGV

SEQ ID NO: 8130 - protein, 9 aa, Artificial Sequence
  Synthetic construct
QAWDSSTGV

SEQ ID NO: 8131 - protein, 9 aa, Artificial Sequence
  Synthetic construct
QQYNHWPYT

SEQ ID NO: 8132 - protein, 9 aa, Artificial Sequence
  Synthetic construct
QAWDSSTVV

SEQ ID NO: 8133 - protein, 9 aa, Artificial Sequence
  Synthetic construct
QQYYSTPWT

SEQ ID NO: 8134 - protein, 11 aa, Artificial Sequence
  Synthetic construct
SSYTSSITPYV

SEQ ID NO: 8135 - protein, 11 aa, Artificial Sequence
  Synthetic construct
AAWDDSLNGYV

SEQ ID NO: 8136 - protein, 12 aa, Artificial Sequence
  Synthetic construct
QSYDNSLSGSYV

SEQ ID NO: 8137 - protein, 9 aa, Artificial Sequence
  Synthetic construct
QQRNNWPIT

SEQ ID NO: 8138 - protein, 9 aa, Artificial Sequence
  Synthetic construct
ETWDSNTWV

SEQ ID NO: 8139 - protein, 10 aa, Artificial Sequence
  Synthetic construct
QKYNSAPPLT

SEQ ID NO: 8140 - protein, 9 aa, Artificial Sequence
  Synthetic construct
QQYYSTPYT

SEQ ID NO: 8141 - protein, 11 aa, Artificial Sequence
  Synthetic construct
CSYAGSRIFYV

SEQ ID NO: 8142 - protein, 11 aa, Artificial Sequence
  Synthetic construct
QARDSSTTSYI

SEQ ID NO: 8143 - protein, 11 aa, Artificial Sequence
  Synthetic construct
SSYTSSSTFYV

SEQ ID NO: 8144 - protein, 10 aa, Artificial Sequence
  Synthetic construct
SSYTSSRTVV

SEQ ID NO: 8145 - protein, 11 aa, Artificial Sequence
  Synthetic construct
QQRSNWPPEVT

SEQ ID NO: 8146 - protein, 9 aa, Artificial Sequence
  Synthetic construct
QQRSNWLIT

SEQ ID NO: 8147 - protein, 12 aa, Artificial Sequence
  Synthetic construct
NSRDTSGNHLGV

SEQ ID NO: 8148 - protein, 9 aa, Artificial Sequence
  Synthetic construct
QQCNSWPLT

SEQ ID NO: 8149 - protein, 10 aa, Artificial Sequence
  Synthetic construct
QHYGGSPLWT

SEQ ID NO: 8150 - protein, 11 aa, Artificial Sequence
  Synthetic construct
QQYGGSPSSST

SEQ ID NO: 8151 - protein, 11 aa, Artificial Sequence
  Synthetic construct
QSYDSSLSVVV

SEQ ID NO: 8152 - protein, 10 aa, Artificial Sequence
  Synthetic construct
QSADSSGTWV

SEQ ID NO: 8153 - protein, 9 aa, Artificial Sequence
  Synthetic construct
QQYNTYSGT

SEQ ID NO: 8154 - protein, 9 aa, Artificial Sequence
  Synthetic construct
MQSIQLPLT

SEQ ID NO: 8155 - protein, 11 aa, Artificial Sequence
  Synthetic construct
QSYDTGSGDVV

SEQ ID NO: 8156 - protein, 11 aa, Artificial Sequence
  Synthetic construct
NSRDSSGNHLV

SEQ ID NO: 8157 - protein, 9 aa, Artificial Sequence
  Synthetic construct
MQATQFPHT

SEQ ID NO: 8158 - protein, 10 aa, Artificial Sequence
  Synthetic construct
QQTYSTPLFT

SEQ ID NO: 8159 - protein, 8 aa, Artificial Sequence
  Synthetic construct
QQTNSFPV

SEQ ID NO: 8160 - protein, 10 aa, Artificial Sequence
  Synthetic construct
LQYNYYPLVT

SEQ ID NO: 8161 - protein, 11 aa, Artificial Sequence
  Synthetic construct
QSYDSSLSGSV

SEQ ID NO: 8162 - protein, 9 aa, Artificial Sequence
  Synthetic construct
QQYYSTPLT

SEQ ID NO: 8163 - protein, 11 aa, Artificial Sequence
  Synthetic construct
QVWDSSSDHVV

SEQ ID NO: 8164 - protein, 10 aa, Artificial Sequence
  Synthetic construct
SSYTSSSTLV

SEQ ID NO: 8165 - protein, 9 aa, Artificial Sequence
  Synthetic construct
QAWDSSSGM

SEQ ID NO: 8166 - protein, 12 aa, Artificial Sequence
  Synthetic construct
YSTDSSGNPKWV

SEQ ID NO: 8167 - protein, 9 aa, Artificial Sequence
  Synthetic construct
QQYYNTPPT

SEQ ID NO: 8168 - protein, 9 aa, Artificial Sequence
  Synthetic construct
QTWDSITWV

SEQ ID NO: 8169 - protein, 10 aa, Artificial Sequence
  Synthetic construct
QVWDSRSDRV

SEQ ID NO: 8170 - protein, 8 aa, Artificial Sequence
  Synthetic construct
QQRSNWPT

SEQ ID NO: 8171 - protein, 8 aa, Artificial Sequence
  Synthetic construct
QQSYSPYT

SEQ ID NO: 8172 - protein, 10 aa, Artificial Sequence
  Synthetic construct
QQYNNWPPVT

SEQ ID NO: 8173 - protein, 9 aa, Artificial Sequence
  Synthetic construct
QQYYSTPYT

SEQ ID NO: 8174 - protein, 8 aa, Artificial Sequence
  Synthetic construct
MQALQTHT

SEQ ID NO: 8175 - protein, 9 aa, Artificial Sequence
  Synthetic construct
QQYKTYGWT

SEQ ID NO: 8176 - protein, 9 aa, Artificial Sequence
  Synthetic construct
SSYTTSSVV

SEQ ID NO: 8177 - protein, 9 aa, Artificial Sequence
  Synthetic construct
QQYGSSLGT

SEQ ID NO: 8178 - protein, 9 aa, Artificial Sequence
  Synthetic construct
QQYYNTPPT

SEQ ID NO: 8179 - protein, 10 aa, Artificial Sequence
  Synthetic construct
SSYAGASTLV

SEQ ID NO: 8180 - protein, 11 aa, Artificial Sequence
  Synthetic construct
QHRSHWPPVVT

SEQ ID NO: 8181 - protein, 9 aa, Artificial Sequence
  Synthetic construct
QSYDSSNLV

SEQ ID NO: 8182 - protein, 11 aa, Artificial Sequence
  Synthetic construct
QVWDNYSDQPV

SEQ ID NO: 8183 - protein, 9 aa, Artificial Sequence
  Synthetic construct
QQLNSYPYT

SEQ ID NO: 8184 - protein, 10 aa, Artificial Sequence
  Synthetic construct
QQYDNLPPYT

SEQ ID NO: 8185 - protein, 9 aa, Artificial Sequence
  Synthetic construct
QQYNIYSWT

SEQ ID NO: 8186 - protein, 11 aa, Artificial Sequence
  Synthetic construct
AVWDNSLKNVL

SEQ ID NO: 8187 - protein, 11 aa, Artificial Sequence
  Synthetic construct
QQRSNWPPIFS

SEQ ID NO: 8188 - protein, 8 aa, Artificial Sequence
  Synthetic construct
QHYDDLPR

SEQ ID NO: 8189 - protein, 9 aa, Artificial Sequence
  Synthetic construct
QQLKSFPPT

SEQ ID NO: 8190 - protein, 9 aa, Artificial Sequence
  Synthetic construct
QQSYSTPRT

SEQ ID NO: 8191 - protein, 9 aa, Artificial Sequence
  Synthetic construct
MQTIQFPYT

SEQ ID NO: 8192 - protein, 11 aa, Artificial Sequence
  Synthetic construct
HSRDSSGNNLL

SEQ ID NO: 8193 - protein, 11 aa, Artificial Sequence
  Synthetic construct
QSYDSSLSGYV

SEQ ID NO: 8194 - protein, 9 aa, Artificial Sequence
  Synthetic construct
QQYGSSPRT

SEQ ID NO: 8195 - protein, 9 aa, Artificial Sequence
  Synthetic construct
QAWVSSAVV

SEQ ID NO: 8196 - protein, 11 aa, Artificial Sequence
  Synthetic construct
ATWDDSLNAWV

SEQ ID NO: 8197 - protein, 9 aa, Artificial Sequence
  Synthetic construct
QQLNSYPRT

SEQ ID NO: 8198 - protein, 9 aa, Artificial Sequence
  Synthetic construct
QQGSSFPWT

SEQ ID NO: 8199 - protein, 11 aa, Artificial Sequence
  Synthetic construct
QSADSSGTSWV

SEQ ID NO: 8200 - protein, 11 aa, Artificial Sequence
  Synthetic construct
SSYAGDNNPVV

SEQ ID NO: 8201 - protein, 9 aa, Artificial Sequence
  Synthetic construct
LQHNTYPLT

SEQ ID NO: 8202 - protein, 9 aa, Artificial Sequence
  Synthetic construct
QQYNTFPPT

SEQ ID NO: 8203 - protein, 9 aa, Artificial Sequence
  Synthetic construct
QQYGSSPYT

SEQ ID NO: 8204 - protein, 9 aa, Artificial Sequence
  Synthetic construct
QQYDILPFT

SEQ ID NO: 8205 - protein, 9 aa, Artificial Sequence
  Synthetic construct
QQRSNRPLT

SEQ ID NO: 8206 - protein, 9 aa, Artificial Sequence
  Synthetic construct
LLSYSGPRV

SEQ ID NO: 8207 - protein, 11 aa, Artificial Sequence
  Synthetic construct
QSSDSSASYVV

SEQ ID NO: 8208 - protein, 11 aa, Artificial Sequence
  Synthetic construct
AAWDDSLNGPV

SEQ ID NO: 8209 - protein, 9 aa, Artificial Sequence
  Synthetic construct
HQYNNWPLT

SEQ ID NO: 8210 - protein, 10 aa, Artificial Sequence
  Synthetic construct
QQYGSSPPYT

SEQ ID NO: 8211 - protein, 9 aa, Artificial Sequence
  Synthetic construct
LLSYSGAYV

SEQ ID NO: 8212 - protein, 10 aa, Artificial Sequence
  Synthetic construct
QQYGSSPWVT

SEQ ID NO: 8213 - protein, 9 aa, Artificial Sequence
  Synthetic construct
QQYNNWPRT

SEQ ID NO: 8214 - protein, 10 aa, Artificial Sequence
  Synthetic construct
SSFTSISTLV

SEQ ID NO: 8215 - protein, 9 aa, Artificial Sequence
  Synthetic construct
QQYNSYPVT

SEQ ID NO: 8216 - protein, 9 aa, Artificial Sequence
  Synthetic construct
QQRSNWLWT

SEQ ID NO: 8217 - protein, 9 aa, Artificial Sequence
  Synthetic construct
QAWASSTAI

SEQ ID NO: 8218 - protein, 10 aa, Artificial Sequence
  Synthetic construct
SSFTSISTLI

SEQ ID NO: 8219 - protein, 9 aa, Artificial Sequence
  Synthetic construct
QQYGSSLYT

SEQ ID NO: 8220 - protein, 10 aa, Artificial Sequence
  Synthetic construct
QAWDSSTLRV

SEQ ID NO: 8221 - protein, 9 aa, Artificial Sequence
  Synthetic construct
QQSYSTPFT

SEQ ID NO: 8222 - protein, 10 aa, Artificial Sequence
  Synthetic construct
LLYHRGAQLV

SEQ ID NO: 8223 - protein, 10 aa, Artificial Sequence
  Synthetic construct
SSYRSGTTYV

SEQ ID NO: 8224 - protein, 10 aa, Artificial Sequence
  Synthetic construct
QQYNDWPFWT

SEQ ID NO: 8225 - protein, 9 aa, Artificial Sequence
  Synthetic construct
QQYFTTPPT

SEQ ID NO: 8226 - protein, 9 aa, Artificial Sequence
  Synthetic construct
QQYGSLPLT

SEQ ID NO: 8227 - protein, 11 aa, Artificial Sequence
  Synthetic construct
QSADSSGTYVI

SEQ ID NO: 8228 - protein, 9 aa, Artificial Sequence
  Synthetic construct
QQYDILPLT

SEQ ID NO: 8229 - protein, 9 aa, Artificial Sequence
  Synthetic construct
MQGTHWPPA

SEQ ID NO: 8230 - protein, 11 aa, Artificial Sequence
  Synthetic construct
QSYDSSLTGSV

SEQ ID NO: 8231 - protein, 11 aa, Artificial Sequence
  Synthetic construct
QSADSSVTSRV

SEQ ID NO: 8232 - protein, 9 aa, Artificial Sequence
  Synthetic construct
MQGTHWPLT

SEQ ID NO: 8233 - protein, 9 aa, Artificial Sequence
  Synthetic construct
QQYNSYSGT

SEQ ID NO: 8234 - protein, 10 aa, Artificial Sequence
  Synthetic construct
QSTDSSGSWV

SEQ ID NO: 8235 - protein, 11 aa, Artificial Sequence
  Synthetic construct
YSTDSSGNHRV

SEQ ID NO: 8236 - protein, 9 aa, Artificial Sequence
  Synthetic construct
QQAHSFPPT

SEQ ID NO: 8237 - protein, 10 aa, Artificial Sequence
  Synthetic construct
QQSYSSAPYT

SEQ ID NO: 8238 - protein, 10 aa, Artificial Sequence
  Synthetic construct
QQYNNWPPLT

SEQ ID NO: 8239 - protein, 9 aa, Artificial Sequence
  Synthetic construct
QQYDSFLWT

SEQ ID NO: 8240 - protein, 12 aa, Artificial Sequence
  Synthetic construct
CSYAGSVTSHVI

SEQ ID NO: 8241 - protein, 9 aa, Artificial Sequence
  Synthetic construct
QQRSNWPLT

SEQ ID NO: 8242 - protein, 9 aa, Artificial Sequence
  Synthetic construct
QQYNNWPCT

SEQ ID NO: 8243 - protein, 9 aa, Artificial Sequence
  Synthetic construct
QQYDTYSYT

SEQ ID NO: 8244 - protein, 9 aa, Artificial Sequence
  Synthetic construct
MIWHSSAVV

SEQ ID NO: 8245 - protein, 9 aa, Artificial Sequence
  Synthetic construct
QAWDSSNVV

SEQ ID NO: 8246 - protein, 11 aa, Artificial Sequence
  Synthetic construct
QSYDRSLSGSV

SEQ ID NO: 8247 - protein, 9 aa, Artificial Sequence
  Synthetic construct
LQGTHWPLT

SEQ ID NO: 8248 - protein, 10 aa, Artificial Sequence
  Synthetic construct
SSFTSISTWV

SEQ ID NO: 8249 - protein, 10 aa, Artificial Sequence
  Synthetic construct
HSRDSSGNPL

SEQ ID NO: 8250 - protein, 9 aa, Artificial Sequence
  Synthetic construct
QQYNSYSYT

SEQ ID NO: 8251 - protein, 11 aa, Artificial Sequence
  Synthetic construct
MQALQTPPWYT

SEQ ID NO: 8252 - protein, 10 aa, Artificial Sequence
  Synthetic construct
QQYNKWPPLT

SEQ ID NO: 8253 - protein, 9 aa, Artificial Sequence
  Synthetic construct
QQRSNWPQT

SEQ ID NO: 8254 - protein, 9 aa, Artificial Sequence
  Synthetic construct
MQALQTPWT

SEQ ID NO: 8255 - protein, 9 aa, Artificial Sequence
  Synthetic construct
QQYNSYSYT

SEQ ID NO: 8256 - protein, 10 aa, Artificial Sequence
  Synthetic construct
QQYDDWPLIT

SEQ ID NO: 8257 - protein, 11 aa, Artificial Sequence
  Synthetic construct
AAWDDSLNGWV

SEQ ID NO: 8258 - protein, 8 aa, Artificial Sequence
  Synthetic construct
QQRSNWLT

SEQ ID NO: 8259 - protein, 9 aa, Artificial Sequence
  Synthetic construct
QAWDSGTVV

SEQ ID NO: 8260 - protein, 11 aa, Artificial Sequence
  Synthetic construct
CSFAGTYTFVV

SEQ ID NO: 8261 - protein, 10 aa, Artificial Sequence
  Synthetic construct
SSYTSSSTVF

SEQ ID NO: 8262 - protein, 12 aa, Artificial Sequence
  Synthetic construct
QSVDSSGTYHWV

SEQ ID NO: 8263 - protein, 9 aa, Artificial Sequence
  Synthetic construct
QKYDDWPPT

SEQ ID NO: 8264 - protein, 9 aa, Artificial Sequence
  Synthetic construct
MQATQFPWT

SEQ ID NO: 8265 - protein, 10 aa, Artificial Sequence
  Synthetic construct
AAWDDSLRGV

SEQ ID NO: 8266 - protein, 11 aa, Artificial Sequence
  Synthetic construct
QSLDRSGTYVL

SEQ ID NO: 8267 - protein, 10 aa, Artificial Sequence
  Synthetic construct
CSYAGFSTFV

SEQ ID NO: 8268 - protein, 11 aa, Artificial Sequence
  Synthetic construct
YSTDSSGNSGV

SEQ ID NO: 8269 - protein, 10 aa, Artificial Sequence
  Synthetic construct
SSYAGANIYV

SEQ ID NO: 8270 - protein, 7 aa, Artificial Sequence
  Synthetic construct
QQYNSWT

SEQ ID NO: 8271 - protein, 9 aa, Artificial Sequence
  Synthetic construct
QQYNSYPLT

SEQ ID NO: 8272 - protein, 10 aa, Artificial Sequence
  Synthetic construct
SSYAGSNNVV

SEQ ID NO: 8273 - protein, 9 aa, Artificial Sequence
  Synthetic construct
QVWDSSNWV

SEQ ID NO: 8274 - protein, 9 aa, Artificial Sequence
  Synthetic construct
QAWDSSTGV

SEQ ID NO: 8275 - protein, 10 aa, Artificial Sequence
  Synthetic construct
QVWDSSSDWV

SEQ ID NO: 8276 - protein, 11 aa, Artificial Sequence
  Synthetic construct
AAWDDSLNGPV

SEQ ID NO: 8277 - protein, 5 aa, Artificial Sequence
  Synthetic construct
QQLGA

SEQ ID NO: 8278 - protein, 9 aa, Artificial Sequence
  Synthetic construct
QQYGNLPRS

SEQ ID NO: 8279 - protein, 12 aa, Artificial Sequence
  Synthetic construct
SSYAGSNNVNWV

SEQ ID NO: 8280 - protein, 11 aa, Artificial Sequence
  Synthetic construct
YSTDSSGNQRV

SEQ ID NO: 8281 - DNA, 16 bp, Artificial Sequence
  Synthetic construct
aaacctgtcgaatggg

SEQ ID NO: 8282 - DNA, 16 bp, Artificial Sequence
  Synthetic construct
aaacctgtcgaatggg

SEQ ID NO: 8283 - DNA, 16 bp, Artificial Sequence
  Synthetic construct
aaacctgtcggcgcat

SEQ ID NO: 8284 - DNA, 16 bp, Artificial Sequence
  Synthetic construct
aaacctgtcggcgcat

SEQ ID NO: 8285 - DNA, 16 bp, Artificial Sequence
  Synthetic construct
aaacgggcaactggcc

SEQ ID NO: 8286 - DNA, 16 bp, Artificial Sequence
  Synthetic construct
aaacgggcaactggcc

SEQ ID NO: 8287 - DNA, 16 bp, Artificial Sequence
  Synthetic construct
aaagatgagaggacgg

SEQ ID NO: 8288 - DNA, 16 bp, Artificial Sequence
  Synthetic construct
aaagatgagaggacgg

SEQ ID NO: 8289 - DNA, 16 bp, Artificial Sequence
  Synthetic construct
aaagatgagcccagct

SEQ ID NO: 8290 - DNA, 16 bp, Artificial Sequence
  Synthetic construct
aaagatgagcccagct

SEQ ID NO: 8291 - DNA, 16 bp, Artificial Sequence
  Synthetic construct
aaagcaacaagtacct

SEQ ID NO: 8292 - DNA, 16 bp, Artificial Sequence
  Synthetic construct
aaagcaacaagtacct

SEQ ID NO: 8293 - DNA, 16 bp, Artificial Sequence
  Synthetic construct
aaagcaacatatgaga

SEQ ID NO: 8294 - DNA, 16 bp, Artificial Sequence
  Synthetic construct
aaagcaacatatgaga

SEQ ID NO: 8295 - DNA, 16 bp, Artificial Sequence
  Synthetic construct
aaagcaatccgcaagc

SEQ ID NO: 8296 - DNA, 16 bp, Artificial Sequence
  Synthetic construct
aaagcaatccgcaagc

SEQ ID NO: 8297 - DNA, 16 bp, Artificial Sequence
  Synthetic construct
aacacgtcacattagc

SEQ ID NO: 8298 - DNA, 16 bp, Artificial Sequence
  Synthetic construct
aacacgtcacattagc

SEQ ID NO: 8299 - DNA, 16 bp, Artificial Sequence
  Synthetic construct
aacacgtgtagggtac

SEQ ID NO: 8300 - DNA, 16 bp, Artificial Sequence
  Synthetic construct
aacacgtgtagggtac

SEQ ID NO: 8301 - DNA, 16 bp, Artificial Sequence
  Synthetic construct
aacacgtgtttgactg

SEQ ID NO: 8302 - DNA, 16 bp, Artificial Sequence
  Synthetic construct
aacacgtgtttgactg

SEQ ID NO: 8303 - DNA, 16 bp, Artificial Sequence
  Synthetic construct
aaccgcgagcccgaaa

SEQ ID NO: 8304 - DNA, 16 bp, Artificial Sequence
  Synthetic construct
aaccgcgagcccgaaa

SEQ ID NO: 8305 - DNA, 16 bp, Artificial Sequence
  Synthetic construct
aaccgcggtcctcttg

SEQ ID NO: 8306 - DNA, 16 bp, Artificial Sequence
  Synthetic construct
aaccgcggtcctcttg

SEQ ID NO: 8307 - DNA, 16 bp, Artificial Sequence
  Synthetic construct
aaccgcggtctcttat

SEQ ID NO: 8308 - DNA, 16 bp, Artificial Sequence
  Synthetic construct
aaccgcggtctcttat

SEQ ID NO: 8309 - DNA, 16 bp, Artificial Sequence
  Synthetic construct
aaccgcgtcgtaggtt

SEQ ID NO: 8310 - DNA, 16 bp, Artificial Sequence
  Synthetic construct
aaccgcgtcgtaggtt

SEQ ID NO: 8311 - DNA, 16 bp, Artificial Sequence
  Synthetic construct
aacgttgaggtgggtt

SEQ ID NO: 8312 - DNA, 16 bp, Artificial Sequence
  Synthetic construct
aacgttgaggtgggtt

SEQ ID NO: 8313 - DNA, 16 bp, Artificial Sequence
  Synthetic construct
aacgttgcatgcatgt

SEQ ID NO: 8314 - DNA, 16 bp, Artificial Sequence
  Synthetic construct
aacgttgcatgcatgt

SEQ ID NO: 8315 - DNA, 16 bp, Artificial Sequence
  Synthetic construct
aacgttgtcggtctaa

SEQ ID NO: 8316 - DNA, 16 bp, Artificial Sequence
  Synthetic construct
aacgttgtcggtctaa

SEQ ID NO: 8317 - DNA, 16 bp, Artificial Sequence
  Synthetic construct
aactcagcacttggat

SEQ ID NO: 8318 - DNA, 16 bp, Artificial Sequence
  Synthetic construct
aactcagcacttggat

SEQ ID NO: 8319 - DNA, 16 bp, Artificial Sequence
  Synthetic construct
aactcaggtccaacta

SEQ ID NO: 8320 - DNA, 16 bp, Artificial Sequence
  Synthetic construct
aactcaggtccaacta

SEQ ID NO: 8321 - DNA, 16 bp, Artificial Sequence
  Synthetic construct
aactccccaataacga

SEQ ID NO: 8322 - DNA, 16 bp, Artificial Sequence
  Synthetic construct
aactccccaataacga

SEQ ID NO: 8323 - DNA, 16 bp, Artificial Sequence
  Synthetic construct
aactcttagaaagtgg

SEQ ID NO: 8324 - DNA, 16 bp, Artificial Sequence
  Synthetic construct
aactcttagaaagtgg

SEQ ID NO: 8325 - DNA, 16 bp, Artificial Sequence
  Synthetic construct
aactttctcgtgacat

SEQ ID NO: 8326 - DNA, 16 bp, Artificial Sequence
  Synthetic construct
aactttctcgtgacat

SEQ ID NO: 8327 - DNA, 16 bp, Artificial Sequence
  Synthetic construct
aagccgcagctgtcta

SEQ ID NO: 8328 - DNA, 16 bp, Artificial Sequence
  Synthetic construct
aagccgcagctgtcta

SEQ ID NO: 8329 - DNA, 16 bp, Artificial Sequence
  Synthetic construct
aaggagcagggatggg

SEQ ID NO: 8330 - DNA, 16 bp, Artificial Sequence
  Synthetic construct
aaggagcagggatggg

SEQ ID NO: 8331 - DNA, 16 bp, Artificial Sequence
  Synthetic construct
aaggcagagagcaatt

SEQ ID NO: 8332 - DNA, 16 bp, Artificial Sequence
  Synthetic construct
aaggcagagagcaatt

SEQ ID NO: 8333 - DNA, 16 bp, Artificial Sequence
  Synthetic construct
aaggttcagaaggtga

SEQ ID NO: 8334 - DNA, 16 bp, Artificial Sequence
  Synthetic construct
aaggttcagaaggtga

SEQ ID NO: 8335 - DNA, 16 bp, Artificial Sequence
  Synthetic construct
aaggttcagtcccacg

SEQ ID NO: 8336 - DNA, 16 bp, Artificial Sequence
  Synthetic construct
aaggttcagtcccacg

SEQ ID NO: 8337 - DNA, 16 bp, Artificial Sequence
  Synthetic construct
aagtctgaggtgtggt

SEQ ID NO: 8338 - DNA, 16 bp, Artificial Sequence
  Synthetic construct
aagtctgaggtgtggt

SEQ ID NO: 8339 - DNA, 16 bp, Artificial Sequence
  Synthetic construct
aagtctgagttatcgc

SEQ ID NO: 8340 - DNA, 16 bp, Artificial Sequence
  Synthetic construct
aagtctgagttatcgc

SEQ ID NO: 8341 - DNA, 16 bp, Artificial Sequence
  Synthetic construct
aagtctggtaatcacc

SEQ ID NO: 8342 - DNA, 16 bp, Artificial Sequence
  Synthetic construct
aagtctggtaatcacc

SEQ ID NO: 8343 - DNA, 16 bp, Artificial Sequence
  Synthetic construct
aatccagaggctagac

SEQ ID NO: 8344 - DNA, 16 bp, Artificial Sequence
  Synthetic construct
aatccagaggctagac

SEQ ID NO: 8345 - DNA, 16 bp, Artificial Sequence
  Synthetic construct
aatccaggtttagctg

SEQ ID NO: 8346 - DNA, 16 bp, Artificial Sequence
  Synthetic construct
aatccaggtttagctg

SEQ ID NO: 8347 - DNA, 16 bp, Artificial Sequence
  Synthetic construct
aatcggttcttaacct

SEQ ID NO: 8348 - DNA, 16 bp, Artificial Sequence
  Synthetic construct
aatcggttcttaacct

SEQ ID NO: 8349 - DNA, 16 bp, Artificial Sequence
  Synthetic construct
acaccaaaggcaatta

SEQ ID NO: 8350 - DNA, 16 bp, Artificial Sequence
  Synthetic construct
acaccaaaggcaatta

SEQ ID NO: 8351 - DNA, 16 bp, Artificial Sequence
  Synthetic construct
acaccgggttagggtg

SEQ ID NO: 8352 - DNA, 16 bp, Artificial Sequence
  Synthetic construct
acaccgggttagggtg

SEQ ID NO: 8353 - DNA, 16 bp, Artificial Sequence
  Synthetic construct
acaccgggttcaacca

SEQ ID NO: 8354 - DNA, 16 bp, Artificial Sequence
  Synthetic construct
acaccgggttcaacca

SEQ ID NO: 8355 - DNA, 16 bp, Artificial Sequence
  Synthetic construct
acaccgggttccaaca

SEQ ID NO: 8356 - DNA, 16 bp, Artificial Sequence
  Synthetic construct
acaccgggttccaaca

SEQ ID NO: 8357 - DNA, 16 bp, Artificial Sequence
  Synthetic construct
acactgagttcgctaa

SEQ ID NO: 8358 - DNA, 16 bp, Artificial Sequence
  Synthetic construct
acactgagttcgctaa

SEQ ID NO: 8359 - DNA, 16 bp, Artificial Sequence
  Synthetic construct
acagctagtacgcacc

SEQ ID NO: 8360 - DNA, 16 bp, Artificial Sequence
  Synthetic construct
acagctagtacgcacc

SEQ ID NO: 8361 - DNA, 16 bp, Artificial Sequence
  Synthetic construct
acagctatctaactct

SEQ ID NO: 8362 - DNA, 16 bp, Artificial Sequence
  Synthetic construct
acagctatctaactct

SEQ ID NO: 8363 - DNA, 16 bp, Artificial Sequence
  Synthetic construct
acatacgtccacgttc

SEQ ID NO: 8364 - DNA, 16 bp, Artificial Sequence
  Synthetic construct
acatacgtccacgttc

SEQ ID NO: 8365 - DNA, 16 bp, Artificial Sequence
  Synthetic construct
acatcagcaccgctag

SEQ ID NO: 8366 - DNA, 16 bp, Artificial Sequence
  Synthetic construct
acatcagcaccgctag

SEQ ID NO: 8367 - DNA, 16 bp, Artificial Sequence
  Synthetic construct
acatcaggtcgattgt

SEQ ID NO: 8368 - DNA, 16 bp, Artificial Sequence
  Synthetic construct
acatcaggtcgattgt

SEQ ID NO: 8369 - DNA, 16 bp, Artificial Sequence
  Synthetic construct
acatggtagaacaatc

SEQ ID NO: 8370 - DNA, 16 bp, Artificial Sequence
  Synthetic construct
acatggtagaacaatc

SEQ ID NO: 8371 - DNA, 16 bp, Artificial Sequence
  Synthetic construct
acatggtgtctacctc

SEQ ID NO: 8372 - DNA, 16 bp, Artificial Sequence
  Synthetic construct
acatggtgtctacctc

SEQ ID NO: 8373 - DNA, 16 bp, Artificial Sequence
  Synthetic construct
acatggttctgcaagt

SEQ ID NO: 8374 - DNA, 16 bp, Artificial Sequence
  Synthetic construct
acatggttctgcaagt

SEQ ID NO: 8375 - DNA, 16 bp, Artificial Sequence
  Synthetic construct
accagtaaggctaggt

SEQ ID NO: 8376 - DNA, 16 bp, Artificial Sequence
  Synthetic construct
accagtaaggctaggt

SEQ ID NO: 8377 - DNA, 16 bp, Artificial Sequence
  Synthetic construct
accagtacaatagagt

SEQ ID NO: 8378 - DNA, 16 bp, Artificial Sequence
  Synthetic construct
accagtacaatagagt

SEQ ID NO: 8379 - DNA, 16 bp, Artificial Sequence
  Synthetic construct
acccactagccctaat

SEQ ID NO: 8380 - DNA, 16 bp, Artificial Sequence
  Synthetic construct
acccactagccctaat

SEQ ID NO: 8381 - DNA, 16 bp, Artificial Sequence
  Synthetic construct
acccactcagtcagcc

SEQ ID NO: 8382 - DNA, 16 bp, Artificial Sequence
  Synthetic construct
acccactcagtcagcc

SEQ ID NO: 8383 - DNA, 16 bp, Artificial Sequence
  Synthetic construct
acccacttctatcccg

SEQ ID NO: 8384 - DNA, 16 bp, Artificial Sequence
  Synthetic construct
acccacttctatcccg

SEQ ID NO: 8385 - DNA, 16 bp, Artificial Sequence
  Synthetic construct
accgtaatctgggcca

SEQ ID NO: 8386 - DNA, 16 bp, Artificial Sequence
  Synthetic construct
accgtaatctgggcca

SEQ ID NO: 8387 - DNA, 16 bp, Artificial Sequence
  Synthetic construct
acctttaagtggagaa

SEQ ID NO: 8388 - DNA, 16 bp, Artificial Sequence
  Synthetic construct
acctttaagtggagaa

SEQ ID NO: 8389 - DNA, 16 bp, Artificial Sequence
  Synthetic construct
acctttacaggtggat

SEQ ID NO: 8390 - DNA, 16 bp, Artificial Sequence
  Synthetic construct
acctttacaggtggat

SEQ ID NO: 8391 - DNA, 16 bp, Artificial Sequence
  Synthetic construct
acctttacagtagagc

SEQ ID NO: 8392 - DNA, 16 bp, Artificial Sequence
  Synthetic construct
acctttacagtagagc

SEQ ID NO: 8393 - DNA, 16 bp, Artificial Sequence
  Synthetic construct
acctttagtccaagtt

SEQ ID NO: 8394 - DNA, 16 bp, Artificial Sequence
  Synthetic construct
acctttagtccaagtt

SEQ ID NO: 8395 - DNA, 16 bp, Artificial Sequence
  Synthetic construct
acctttagtgaacctt

SEQ ID NO: 8396 - DNA, 16 bp, Artificial Sequence
  Synthetic construct
acctttagtgaacctt

SEQ ID NO: 8397 - DNA, 16 bp, Artificial Sequence
  Synthetic construct
acgagccagatcacgg

SEQ ID NO: 8398 - DNA, 16 bp, Artificial Sequence
  Synthetic construct
acgagccagatcacgg

SEQ ID NO: 8399 - DNA, 16 bp, Artificial Sequence
  Synthetic construct
acgaggatcctattca

SEQ ID NO: 8400 - DNA, 16 bp, Artificial Sequence
  Synthetic construct
acgaggatcctattca

SEQ ID NO: 8401 - DNA, 16 bp, Artificial Sequence
  Synthetic construct
acgaggatctccaggg

SEQ ID NO: 8402 - DNA, 16 bp, Artificial Sequence
  Synthetic construct
acgaggatctccaggg

SEQ ID NO: 8403 - DNA, 16 bp, Artificial Sequence
  Synthetic construct
acgatacaggcatgtg

SEQ ID NO: 8404 - DNA, 16 bp, Artificial Sequence
  Synthetic construct
acgatacaggcatgtg

SEQ ID NO: 8405 - DNA, 16 bp, Artificial Sequence
  Synthetic construct
acgataccactacagt

SEQ ID NO: 8406 - DNA, 16 bp, Artificial Sequence
  Synthetic construct
acgataccactacagt

SEQ ID NO: 8407 - DNA, 16 bp, Artificial Sequence
  Synthetic construct
acgatacgtgagtata

SEQ ID NO: 8408 - DNA, 16 bp, Artificial Sequence
  Synthetic construct
acgatacgtgagtata

SEQ ID NO: 8409 - DNA, 16 bp, Artificial Sequence
  Synthetic construct
acgatgtagcgagaaa

SEQ ID NO: 8410 - DNA, 16 bp, Artificial Sequence
  Synthetic construct
acgatgtagcgagaaa

SEQ ID NO: 8411 - DNA, 16 bp, Artificial Sequence
  Synthetic construct
acgcagcaggtgctag

SEQ ID NO: 8412 - DNA, 16 bp, Artificial Sequence
  Synthetic construct
acgcagcaggtgctag

SEQ ID NO: 8413 - DNA, 16 bp, Artificial Sequence
  Synthetic construct
acgcagcgtcaaactc

SEQ ID NO: 8414 - DNA, 16 bp, Artificial Sequence
  Synthetic construct
acgcagcgtcaaactc

SEQ ID NO: 8415 - DNA, 16 bp, Artificial Sequence
  Synthetic construct
acgcagctccgcgcaa

SEQ ID NO: 8416 - DNA, 16 bp, Artificial Sequence
  Synthetic construct
acgcagctccgcgcaa

SEQ ID NO: 8417 - DNA, 16 bp, Artificial Sequence
  Synthetic construct
acgccagcataacctg

SEQ ID NO: 8418 - DNA, 16 bp, Artificial Sequence
  Synthetic construct
acgccagcataacctg

SEQ ID NO: 8419 - DNA, 16 bp, Artificial Sequence
  Synthetic construct
acgccaggttaagaac

SEQ ID NO: 8420 - DNA, 16 bp, Artificial Sequence
  Synthetic construct
acgccaggttaagaac

SEQ ID NO: 8421 - DNA, 16 bp, Artificial Sequence
  Synthetic construct
acgccgagttaagaac

SEQ ID NO: 8422 - DNA, 16 bp, Artificial Sequence
  Synthetic construct
acgccgagttaagaac

SEQ ID NO: 8423 - DNA, 16 bp, Artificial Sequence
  Synthetic construct
acgccgatcagcacat

SEQ ID NO: 8424 - DNA, 16 bp, Artificial Sequence
  Synthetic construct
acgccgatcagcacat

SEQ ID NO: 8425 - DNA, 16 bp, Artificial Sequence
  Synthetic construct
acggagaagatagcat

SEQ ID NO: 8426 - DNA, 16 bp, Artificial Sequence
  Synthetic construct
acggagaagatagcat

SEQ ID NO: 8427 - DNA, 16 bp, Artificial Sequence
  Synthetic construct
acggagagtggtccgt

SEQ ID NO: 8428 - DNA, 16 bp, Artificial Sequence
  Synthetic construct
acggagagtggtccgt

SEQ ID NO: 8429 - DNA, 16 bp, Artificial Sequence
  Synthetic construct
acggccatcagataag

SEQ ID NO: 8430 - DNA, 16 bp, Artificial Sequence
  Synthetic construct
acggccatcagataag

SEQ ID NO: 8431 - DNA, 16 bp, Artificial Sequence
  Synthetic construct
acgggctcaataacga

SEQ ID NO: 8432 - DNA, 16 bp, Artificial Sequence
  Synthetic construct
acgggctcaataacga

SEQ ID NO: 8433 - DNA, 16 bp, Artificial Sequence
  Synthetic construct
acgggctgtacccaat

SEQ ID NO: 8434 - DNA, 16 bp, Artificial Sequence
  Synthetic construct
acgggctgtacccaat

SEQ ID NO: 8435 - DNA, 16 bp, Artificial Sequence
  Synthetic construct
acgggcttcggaaacg

SEQ ID NO: 8436 - DNA, 16 bp, Artificial Sequence
  Synthetic construct
acgggcttcggaaacg

SEQ ID NO: 8437 - DNA, 16 bp, Artificial Sequence
  Synthetic construct
acgggtcagcagactg

SEQ ID NO: 8438 - DNA, 16 bp, Artificial Sequence
  Synthetic construct
acgggtcagcagactg

SEQ ID NO: 8439 - DNA, 16 bp, Artificial Sequence
  Synthetic construct
acgggtctcaacactg

SEQ ID NO: 8440 - DNA, 16 bp, Artificial Sequence
  Synthetic construct
acgggtctcaacactg

SEQ ID NO: 8441 - DNA, 16 bp, Artificial Sequence
  Synthetic construct
acgggtctccctcttt

SEQ ID NO: 8442 - DNA, 16 bp, Artificial Sequence
  Synthetic construct
acgggtctccctcttt

SEQ ID NO: 8443 - DNA, 16 bp, Artificial Sequence
  Synthetic construct
actatctagatcgata

SEQ ID NO: 8444 - DNA, 16 bp, Artificial Sequence
  Synthetic construct
actatctagatcgata

SEQ ID NO: 8445 - DNA, 16 bp, Artificial Sequence
  Synthetic construct
actatctcagtcgtgc

SEQ ID NO: 8446 - DNA, 16 bp, Artificial Sequence
  Synthetic construct
actatctcagtcgtgc

SEQ ID NO: 8447 - DNA, 16 bp, Artificial Sequence
  Synthetic construct
actgaacgtttgacac

SEQ ID NO: 8448 - DNA, 16 bp, Artificial Sequence
  Synthetic construct
actgaacgtttgacac

SEQ ID NO: 8449 - DNA, 16 bp, Artificial Sequence
  Synthetic construct
actgaactccgttgtc

SEQ ID NO: 8450 - DNA, 16 bp, Artificial Sequence
  Synthetic construct
actgaactccgttgtc

SEQ ID NO: 8451 - DNA, 16 bp, Artificial Sequence
  Synthetic construct
actgaactcttaacct

SEQ ID NO: 8452 - DNA, 16 bp, Artificial Sequence
  Synthetic construct
actgaactcttaacct

SEQ ID NO: 8453 - DNA, 16 bp, Artificial Sequence
  Synthetic construct
actgaactcttatctg

SEQ ID NO: 8454 - DNA, 16 bp, Artificial Sequence
  Synthetic construct
actgaactcttatctg

SEQ ID NO: 8455 - DNA, 16 bp, Artificial Sequence
  Synthetic construct
actgagttcgaactgt

SEQ ID NO: 8456 - DNA, 16 bp, Artificial Sequence
  Synthetic construct
actgagttcgaactgt

SEQ ID NO: 8457 - DNA, 16 bp, Artificial Sequence
  Synthetic construct
actgatggtcatcggc

SEQ ID NO: 8458 - DNA, 16 bp, Artificial Sequence
  Synthetic construct
actgatggtcatcggc

SEQ ID NO: 8459 - DNA, 16 bp, Artificial Sequence
  Synthetic construct
actgtccagccagaac

SEQ ID NO: 8460 - DNA, 16 bp, Artificial Sequence
  Synthetic construct
actgtccagccagaac

SEQ ID NO: 8461 - DNA, 16 bp, Artificial Sequence
  Synthetic construct
actgtcccagccagaa

SEQ ID NO: 8462 - DNA, 16 bp, Artificial Sequence
  Synthetic construct
actgtcccagccagaa

SEQ ID NO: 8463 - DNA, 16 bp, Artificial Sequence
  Synthetic construct
actgtccgtgagggag

SEQ ID NO: 8464 - DNA, 16 bp, Artificial Sequence
  Synthetic construct
actgtccgtgagggag

SEQ ID NO: 8465 - DNA, 16 bp, Artificial Sequence
  Synthetic construct
acttactcactgttag

SEQ ID NO: 8466 - DNA, 16 bp, Artificial Sequence
  Synthetic construct
acttactcactgttag

SEQ ID NO: 8467 - DNA, 16 bp, Artificial Sequence
  Synthetic construct
acttactcagcttcgg

SEQ ID NO: 8468 - DNA, 16 bp, Artificial Sequence
  Synthetic construct
acttactcagcttcgg

SEQ ID NO: 8469 - DNA, 16 bp, Artificial Sequence
  Synthetic construct
acttactcattagcca

SEQ ID NO: 8470 - DNA, 16 bp, Artificial Sequence
  Synthetic construct
acttactcattagcca

SEQ ID NO: 8471 - DNA, 16 bp, Artificial Sequence
  Synthetic construct
acttgttgttggaggt

SEQ ID NO: 8472 - DNA, 16 bp, Artificial Sequence
  Synthetic construct
acttgttgttggaggt

SEQ ID NO: 8473 - DNA, 16 bp, Artificial Sequence
  Synthetic construct
acttgttgttgtacac

SEQ ID NO: 8474 - DNA, 16 bp, Artificial Sequence
  Synthetic construct
acttgttgttgtacac

SEQ ID NO: 8475 - DNA, 16 bp, Artificial Sequence
  Synthetic construct
acttgtttcagtcagt

SEQ ID NO: 8476 - DNA, 16 bp, Artificial Sequence
  Synthetic construct
acttgtttcagtcagt

SEQ ID NO: 8477 - DNA, 16 bp, Artificial Sequence
  Synthetic construct
acttgtttcgatagaa

SEQ ID NO: 8478 - DNA, 16 bp, Artificial Sequence
  Synthetic construct
acttgtttcgatagaa

SEQ ID NO: 8479 - DNA, 16 bp, Artificial Sequence
  Synthetic construct
actttcatcaaggtaa

SEQ ID NO: 8480 - DNA, 16 bp, Artificial Sequence
  Synthetic construct
actttcatcaaggtaa

SEQ ID NO: 8481 - DNA, 16 bp, Artificial Sequence
  Synthetic construct
actttcatcatacggt

SEQ ID NO: 8482 - DNA, 16 bp, Artificial Sequence
  Synthetic construct
actttcatcatacggt

SEQ ID NO: 8483 - DNA, 16 bp, Artificial Sequence
  Synthetic construct
agaatagaggacgaaa

SEQ ID NO: 8484 - DNA, 16 bp, Artificial Sequence
  Synthetic construct
agaatagaggacgaaa

SEQ ID NO: 8485 - DNA, 16 bp, Artificial Sequence
  Synthetic construct
agaataggtagctaaa

SEQ ID NO: 8486 - DNA, 16 bp, Artificial Sequence
  Synthetic construct
agaataggtagctaaa

SEQ ID NO: 8487 - DNA, 16 bp, Artificial Sequence
  Synthetic construct
agacgttgttagtggg

SEQ ID NO: 8488 - DNA, 16 bp, Artificial Sequence
  Synthetic construct
agacgttgttagtggg

SEQ ID NO: 8489 - DNA, 16 bp, Artificial Sequence
  Synthetic construct
agagcgaaggcgatac

SEQ ID NO: 8490 - DNA, 16 bp, Artificial Sequence
  Synthetic construct
agagcgaaggcgatac

SEQ ID NO: 8491 - DNA, 16 bp, Artificial Sequence
  Synthetic construct
agagcgaagtgtccat

SEQ ID NO: 8492 - DNA, 16 bp, Artificial Sequence
  Synthetic construct
agagcgaagtgtccat

SEQ ID NO: 8493 - DNA, 16 bp, Artificial Sequence
  Synthetic construct
agagcgagtgtgaccc

SEQ ID NO: 8494 - DNA, 16 bp, Artificial Sequence
  Synthetic construct
agagcgagtgtgaccc

SEQ ID NO: 8495 - DNA, 16 bp, Artificial Sequence
  Synthetic construct
agagcttcacaactgt

SEQ ID NO: 8496 - DNA, 16 bp, Artificial Sequence
  Synthetic construct
agagcttcacaactgt

SEQ ID NO: 8497 - DNA, 16 bp, Artificial Sequence
  Synthetic construct
agagtggtctccaggg

SEQ ID NO: 8498 - DNA, 16 bp, Artificial Sequence
  Synthetic construct
agagtggtctccaggg

SEQ ID NO: 8499 - DNA, 16 bp, Artificial Sequence
  Synthetic construct
agatctgagaacaatc

SEQ ID NO: 8500 - DNA, 16 bp, Artificial Sequence
  Synthetic construct
agatctgagaacaatc

SEQ ID NO: 8501 - DNA, 16 bp, Artificial Sequence
  Synthetic construct
agatctgagaattgtg

SEQ ID NO: 8502 - DNA, 16 bp, Artificial Sequence
  Synthetic construct
agatctgagaattgtg

SEQ ID NO: 8503 - DNA, 16 bp, Artificial Sequence
  Synthetic construct
agcagccagtaagtac

SEQ ID NO: 8504 - DNA, 16 bp, Artificial Sequence
  Synthetic construct
agcagccagtaagtac

SEQ ID NO: 8505 - DNA, 16 bp, Artificial Sequence
  Synthetic construct
agcagcccacttcgaa

SEQ ID NO: 8506 - DNA, 16 bp, Artificial Sequence
  Synthetic construct
agcagcccacttcgaa

SEQ ID NO: 8507 - DNA, 16 bp, Artificial Sequence
  Synthetic construct
agcagcctcatcattc

SEQ ID NO: 8508 - DNA, 16 bp, Artificial Sequence
  Synthetic construct
agcagcctcatcattc

SEQ ID NO: 8509 - DNA, 16 bp, Artificial Sequence
  Synthetic construct
agcataccactgtcgg

SEQ ID NO: 8510 - DNA, 16 bp, Artificial Sequence
  Synthetic construct
agcataccactgtcgg

SEQ ID NO: 8511 - DNA, 16 bp, Artificial Sequence
  Synthetic construct
agcctaaagtgtggca

SEQ ID NO: 8512 - DNA, 16 bp, Artificial Sequence
  Synthetic construct
agcctaaagtgtggca

SEQ ID NO: 8513 - DNA, 16 bp, Artificial Sequence
  Synthetic construct
agcctaacatgggaac

SEQ ID NO: 8514 - DNA, 16 bp, Artificial Sequence
  Synthetic construct
agcctaacatgggaac

SEQ ID NO: 8515 - DNA, 16 bp, Artificial Sequence
  Synthetic construct
agcctaatctgccagg

SEQ ID NO: 8516 - DNA, 16 bp, Artificial Sequence
  Synthetic construct
agcctaatctgccagg

SEQ ID NO: 8517 - DNA, 16 bp, Artificial Sequence
  Synthetic construct
agcggtcagccaacag

SEQ ID NO: 8518 - DNA, 16 bp, Artificial Sequence
  Synthetic construct
agcggtcagccaacag

SEQ ID NO: 8519 - DNA, 16 bp, Artificial Sequence
  Synthetic construct
agcggtcgtatcagtc

SEQ ID NO: 8520 - DNA, 16 bp, Artificial Sequence
  Synthetic construct
agcggtcgtatcagtc

SEQ ID NO: 8521 - DNA, 16 bp, Artificial Sequence
  Synthetic construct
agcgtatagccatcgc

SEQ ID NO: 8522 - DNA, 16 bp, Artificial Sequence
  Synthetic construct
agcgtatagccatcgc

SEQ ID NO: 8523 - DNA, 16 bp, Artificial Sequence
  Synthetic construct
agcgtatcatcgacgc

SEQ ID NO: 8524 - DNA, 16 bp, Artificial Sequence
  Synthetic construct
agcgtatcatcgacgc

SEQ ID NO: 8525 - DNA, 16 bp, Artificial Sequence
  Synthetic construct
agcgtatgtatgaaac

SEQ ID NO: 8526 - DNA, 16 bp, Artificial Sequence
  Synthetic construct
agcgtatgtatgaaac

SEQ ID NO: 8527 - DNA, 16 bp, Artificial Sequence
  Synthetic construct
agcgtcgaggcatgtg

SEQ ID NO: 8528 - DNA, 16 bp, Artificial Sequence
  Synthetic construct
agcgtcgaggcatgtg

SEQ ID NO: 8529 - DNA, 16 bp, Artificial Sequence
  Synthetic construct
agcgtcgaggctagac

SEQ ID NO: 8530 - DNA, 16 bp, Artificial Sequence
  Synthetic construct
agcgtcgaggctagac

SEQ ID NO: 8531 - DNA, 16 bp, Artificial Sequence
  Synthetic construct
agctcctagactcgga

SEQ ID NO: 8532 - DNA, 16 bp, Artificial Sequence
  Synthetic construct
agctcctagactcgga

SEQ ID NO: 8533 - DNA, 16 bp, Artificial Sequence
  Synthetic construct
agctcctaggtgtggt

SEQ ID NO: 8534 - DNA, 16 bp, Artificial Sequence
  Synthetic construct
agctcctaggtgtggt

SEQ ID NO: 8535 - DNA, 16 bp, Artificial Sequence
  Synthetic construct
agctcctgtagcgtga

SEQ ID NO: 8536 - DNA, 16 bp, Artificial Sequence
  Synthetic construct
agctcctgtagcgtga

SEQ ID NO: 8537 - DNA, 16 bp, Artificial Sequence
  Synthetic construct
agctctcgttgacgtt

SEQ ID NO: 8538 - DNA, 16 bp, Artificial Sequence
  Synthetic construct
agctctcgttgacgtt

SEQ ID NO: 8539 - DNA, 16 bp, Artificial Sequence
  Synthetic construct
aggccacagatagtca

SEQ ID NO: 8540 - DNA, 16 bp, Artificial Sequence
  Synthetic construct
aggccacagatagtca

SEQ ID NO: 8541 - DNA, 16 bp, Artificial Sequence
  Synthetic construct
aggccacagtcaagcg

SEQ ID NO: 8542 - DNA, 16 bp, Artificial Sequence
  Synthetic construct
aggccacagtcaagcg

SEQ ID NO: 8543 - DNA, 16 bp, Artificial Sequence
  Synthetic construct
aggccacgtaccgtat

SEQ ID NO: 8544 - DNA, 16 bp, Artificial Sequence
  Synthetic construct
aggccacgtaccgtat

SEQ ID NO: 8545 - DNA, 16 bp, Artificial Sequence
  Synthetic construct
aggccgtaggctatct

SEQ ID NO: 8546 - DNA, 16 bp, Artificial Sequence
  Synthetic construct
aggccgtaggctatct

SEQ ID NO: 8547 - DNA, 16 bp, Artificial Sequence
  Synthetic construct
aggccgtagtgaagag

SEQ ID NO: 8548 - DNA, 16 bp, Artificial Sequence
  Synthetic construct
aggccgtagtgaagag

SEQ ID NO: 8549 - DNA, 16 bp, Artificial Sequence
  Synthetic construct
aggccgttcaaggtaa

SEQ ID NO: 8550 - DNA, 16 bp, Artificial Sequence
  Synthetic construct
aggccgttcaaggtaa

SEQ ID NO: 8551 - DNA, 16 bp, Artificial Sequence
  Synthetic construct
agggagtagacataac

SEQ ID NO: 8552 - DNA, 16 bp, Artificial Sequence
  Synthetic construct
agggagtagacataac

SEQ ID NO: 8553 - DNA, 16 bp, Artificial Sequence
  Synthetic construct
agggagtcagacgtag

SEQ ID NO: 8554 - DNA, 16 bp, Artificial Sequence
  Synthetic construct
agggagtcagacgtag

SEQ ID NO: 8555 - DNA, 16 bp, Artificial Sequence
  Synthetic construct
agggatgagagtcggt

SEQ ID NO: 8556 - DNA, 16 bp, Artificial Sequence
  Synthetic construct
agggatgagagtcggt

SEQ ID NO: 8557 - DNA, 16 bp, Artificial Sequence
  Synthetic construct
agggatgcaaacctac

SEQ ID NO: 8558 - DNA, 16 bp, Artificial Sequence
  Synthetic construct
agggatgcaaacctac

SEQ ID NO: 8559 - DNA, 16 bp, Artificial Sequence
  Synthetic construct
agggtgaagtcaagcg

SEQ ID NO: 8560 - DNA, 16 bp, Artificial Sequence
  Synthetic construct
agggtgaagtcaagcg

SEQ ID NO: 8561 - DNA, 16 bp, Artificial Sequence
  Synthetic construct
agggtgaagtgaagtt

SEQ ID NO: 8562 - DNA, 16 bp, Artificial Sequence
  Synthetic construct
agggtgaagtgaagtt

SEQ ID NO: 8563 - DNA, 16 bp, Artificial Sequence
  Synthetic construct
agggtgacagataatg

SEQ ID NO: 8564 - DNA, 16 bp, Artificial Sequence
  Synthetic construct
agggtgacagataatg

SEQ ID NO: 8565 - DNA, 16 bp, Artificial Sequence
  Synthetic construct
aggtcatagagactat

SEQ ID NO: 8566 - DNA, 16 bp, Artificial Sequence
  Synthetic construct
aggtcatagagactat

SEQ ID NO: 8567 - DNA, 16 bp, Artificial Sequence
  Synthetic construct
aggtcatagctgcaag

SEQ ID NO: 8568 - DNA, 16 bp, Artificial Sequence
  Synthetic construct
aggtcatagctgcaag

SEQ ID NO: 8569 - DNA, 16 bp, Artificial Sequence
  Synthetic construct
aggtcattcacaggcc

SEQ ID NO: 8570 - DNA, 16 bp, Artificial Sequence
  Synthetic construct
aggtcattcacaggcc

SEQ ID NO: 8571 - DNA, 16 bp, Artificial Sequence
  Synthetic construct
aggtcattctgcttgc

SEQ ID NO: 8572 - DNA, 16 bp, Artificial Sequence
  Synthetic construct
aggtcattctgcttgc

SEQ ID NO: 8573 - DNA, 16 bp, Artificial Sequence
  Synthetic construct
aggtcattctgtccgt

SEQ ID NO: 8574 - DNA, 16 bp, Artificial Sequence
  Synthetic construct
aggtcattctgtccgt

SEQ ID NO: 8575 - DNA, 16 bp, Artificial Sequence
  Synthetic construct
aggtccgtcagagctt

SEQ ID NO: 8576 - DNA, 16 bp, Artificial Sequence
  Synthetic construct
aggtccgtcagagctt

SEQ ID NO: 8577 - DNA, 16 bp, Artificial Sequence
  Synthetic construct
agtagtctccgtcaaa

SEQ ID NO: 8578 - DNA, 16 bp, Artificial Sequence
  Synthetic construct
agtagtctccgtcaaa

SEQ ID NO: 8579 - DNA, 16 bp, Artificial Sequence
  Synthetic construct
agtctttgtaaacctc

SEQ ID NO: 8580 - DNA, 16 bp, Artificial Sequence
  Synthetic construct
agtctttgtaaacctc

SEQ ID NO: 8581 - DNA, 16 bp, Artificial Sequence
  Synthetic construct
agtgaggcagtcagcc

SEQ ID NO: 8582 - DNA, 16 bp, Artificial Sequence
  Synthetic construct
agtgaggcagtcagcc

SEQ ID NO: 8583 - DNA, 16 bp, Artificial Sequence
  Synthetic construct
agtgagggtctctctg

SEQ ID NO: 8584 - DNA, 16 bp, Artificial Sequence
  Synthetic construct
agtgagggtctctctg

SEQ ID NO: 8585 - DNA, 16 bp, Artificial Sequence
  Synthetic construct
agtgaggtcatgcatg

SEQ ID NO: 8586 - DNA, 16 bp, Artificial Sequence
  Synthetic construct
agtgaggtcatgcatg

SEQ ID NO: 8587 - DNA, 16 bp, Artificial Sequence
  Synthetic construct
agtgaggtcttgacga

SEQ ID NO: 8588 - DNA, 16 bp, Artificial Sequence
  Synthetic construct
agtgaggtcttgacga

SEQ ID NO: 8589 - DNA, 16 bp, Artificial Sequence
  Synthetic construct
agtgggaagatgcgac

SEQ ID NO: 8590 - DNA, 16 bp, Artificial Sequence
  Synthetic construct
agtgggaagatgcgac

SEQ ID NO: 8591 - DNA, 16 bp, Artificial Sequence
  Synthetic construct
agtgggaagtgactct

SEQ ID NO: 8592 - DNA, 16 bp, Artificial Sequence
  Synthetic construct
agtgggaagtgactct

SEQ ID NO: 8593 - DNA, 16 bp, Artificial Sequence
  Synthetic construct
agtgggacacaggagt

SEQ ID NO: 8594 - DNA, 16 bp, Artificial Sequence
  Synthetic construct
agtgggacacaggagt

SEQ ID NO: 8595 - DNA, 16 bp, Artificial Sequence
  Synthetic construct
ataacgccaggaccct

SEQ ID NO: 8596 - DNA, 16 bp, Artificial Sequence
  Synthetic construct
ataacgccaggaccct

SEQ ID NO: 8597 - DNA, 16 bp, Artificial Sequence
  Synthetic construct
ataacgctccaaagtc

SEQ ID NO: 8598 - DNA, 16 bp, Artificial Sequence
  Synthetic construct
ataacgctccaaagtc

SEQ ID NO: 8599 - DNA, 16 bp, Artificial Sequence
  Synthetic construct
ataacgctcctgtacc

SEQ ID NO: 8600 - DNA, 16 bp, Artificial Sequence
  Synthetic construct
ataacgctcctgtacc

SEQ ID NO: 8601 - DNA, 16 bp, Artificial Sequence
  Synthetic construct
ataagagaggatcgca

SEQ ID NO: 8602 - DNA, 16 bp, Artificial Sequence
  Synthetic construct
ataagagaggatcgca

SEQ ID NO: 8603 - DNA, 16 bp, Artificial Sequence
  Synthetic construct
ataagagcacgagagt

SEQ ID NO: 8604 - DNA, 16 bp, Artificial Sequence
  Synthetic construct
ataagagcacgagagt

SEQ ID NO: 8605 - DNA, 16 bp, Artificial Sequence
  Synthetic construct
ataagaggtgagtata

SEQ ID NO: 8606 - DNA, 16 bp, Artificial Sequence
  Synthetic construct
ataagaggtgagtata

SEQ ID NO: 8607 - DNA, 16 bp, Artificial Sequence
  Synthetic construct
atagacccaaagaatc

SEQ ID NO: 8608 - DNA, 16 bp, Artificial Sequence
  Synthetic construct
atagacccaaagaatc

SEQ ID NO: 8609 - DNA, 16 bp, Artificial Sequence
  Synthetic construct
atcacgagttaaagac

SEQ ID NO: 8610 - DNA, 16 bp, Artificial Sequence
  Synthetic construct
atcacgagttaaagac

SEQ ID NO: 8611 - DNA, 16 bp, Artificial Sequence
  Synthetic construct
atcacgatcaaagtag

SEQ ID NO: 8612 - DNA, 16 bp, Artificial Sequence
  Synthetic construct
atcacgatcaaagtag

SEQ ID NO: 8613 - DNA, 16 bp, Artificial Sequence
  Synthetic construct
atcatcttcatctgtt

SEQ ID NO: 8614 - DNA, 16 bp, Artificial Sequence
  Synthetic construct
atcatcttcatctgtt

SEQ ID NO: 8615 - DNA, 16 bp, Artificial Sequence
  Synthetic construct
atcatggagtaatccc

SEQ ID NO: 8616 - DNA, 16 bp, Artificial Sequence
  Synthetic construct
atcatggagtaatccc

SEQ ID NO: 8617 - DNA, 16 bp, Artificial Sequence
  Synthetic construct
atcatggagttaacga

SEQ ID NO: 8618 - DNA, 16 bp, Artificial Sequence
  Synthetic construct
atcatggagttaacga

SEQ ID NO: 8619 - DNA, 16 bp, Artificial Sequence
  Synthetic construct
atcatggtcattgcga

SEQ ID NO: 8620 - DNA, 16 bp, Artificial Sequence
  Synthetic construct
atcatggtcattgcga

SEQ ID NO: 8621 - DNA, 16 bp, Artificial Sequence
  Synthetic construct
atccacccatgacgga

SEQ ID NO: 8622 - DNA, 16 bp, Artificial Sequence
  Synthetic construct
atccacccatgacgga

SEQ ID NO: 8623 - DNA, 16 bp, Artificial Sequence
  Synthetic construct
atccgaatccgtagta

SEQ ID NO: 8624 - DNA, 16 bp, Artificial Sequence
  Synthetic construct
atccgaatccgtagta

SEQ ID NO: 8625 - DNA, 16 bp, Artificial Sequence
  Synthetic construct
atcgagttcgcaagcc

SEQ ID NO: 8626 - DNA, 16 bp, Artificial Sequence
  Synthetic construct
atcgagttcgcaagcc

SEQ ID NO: 8627 - DNA, 16 bp, Artificial Sequence
  Synthetic construct
atctactcaagcgagt

SEQ ID NO: 8628 - DNA, 16 bp, Artificial Sequence
  Synthetic construct
atctactcaagcgagt

SEQ ID NO: 8629 - DNA, 16 bp, Artificial Sequence
  Synthetic construct
atctgccgtacaagta

SEQ ID NO: 8630 - DNA, 16 bp, Artificial Sequence
  Synthetic construct
atctgccgtacaagta

SEQ ID NO: 8631 - DNA, 16 bp, Artificial Sequence
  Synthetic construct
atctgccgttccaaca

SEQ ID NO: 8632 - DNA, 16 bp, Artificial Sequence
  Synthetic construct
atctgccgttccaaca

SEQ ID NO: 8633 - DNA, 16 bp, Artificial Sequence
  Synthetic construct
atgaggggtgactact

SEQ ID NO: 8634 - DNA, 16 bp, Artificial Sequence
  Synthetic construct
atgaggggtgactact

SEQ ID NO: 8635 - DNA, 16 bp, Artificial Sequence
  Synthetic construct
atgagggtcggtgtta

SEQ ID NO: 8636 - DNA, 16 bp, Artificial Sequence
  Synthetic construct
atgagggtcggtgtta

SEQ ID NO: 8637 - DNA, 16 bp, Artificial Sequence
  Synthetic construct
atgggagtcgtccagg

SEQ ID NO: 8638 - DNA, 16 bp, Artificial Sequence
  Synthetic construct
atgggagtcgtccagg

SEQ ID NO: 8639 - DNA, 16 bp, Artificial Sequence
  Synthetic construct
atgtgtgcagagccaa

SEQ ID NO: 8640 - DNA, 16 bp, Artificial Sequence
  Synthetic construct
atgtgtgcagagccaa

SEQ ID NO: 8641 - DNA, 16 bp, Artificial Sequence
  Synthetic construct
atgtgtggtcggatcc

SEQ ID NO: 8642 - DNA, 16 bp, Artificial Sequence
  Synthetic construct
atgtgtggtcggatcc

SEQ ID NO: 8643 - DNA, 16 bp, Artificial Sequence
  Synthetic construct
attatccagccacgct

SEQ ID NO: 8644 - DNA, 16 bp, Artificial Sequence
  Synthetic construct
attatccagccacgct

SEQ ID NO: 8645 - DNA, 16 bp, Artificial Sequence
  Synthetic construct
attatccagggtctcc

SEQ ID NO: 8646 - DNA, 16 bp, Artificial Sequence
  Synthetic construct
attatccagggtctcc

SEQ ID NO: 8647 - DNA, 16 bp, Artificial Sequence
  Synthetic construct
attatccgtaaaggag

SEQ ID NO: 8648 - DNA, 16 bp, Artificial Sequence
  Synthetic construct
attatccgtaaaggag

SEQ ID NO: 8649 - DNA, 16 bp, Artificial Sequence
  Synthetic construct
attatcctcatttggg

SEQ ID NO: 8650 - DNA, 16 bp, Artificial Sequence
  Synthetic construct
attatcctcatttggg

SEQ ID NO: 8651 - DNA, 16 bp, Artificial Sequence
  Synthetic construct
attctacagacttgaa

SEQ ID NO: 8652 - DNA, 16 bp, Artificial Sequence
  Synthetic construct
attctacagacttgaa

SEQ ID NO: 8653 - DNA, 16 bp, Artificial Sequence
  Synthetic construct
attggacgtctggtcg

SEQ ID NO: 8654 - DNA, 16 bp, Artificial Sequence
  Synthetic construct
attggacgtctggtcg

SEQ ID NO: 8655 - DNA, 16 bp, Artificial Sequence
  Synthetic construct
attggactcagtttgg

SEQ ID NO: 8656 - DNA, 16 bp, Artificial Sequence
  Synthetic construct
attggactcagtttgg

SEQ ID NO: 8657 - DNA, 16 bp, Artificial Sequence
  Synthetic construct
attggtgaggagttta

SEQ ID NO: 8658 - DNA, 16 bp, Artificial Sequence
  Synthetic construct
attggtgaggagttta

SEQ ID NO: 8659 - DNA, 16 bp, Artificial Sequence
  Synthetic construct
attggtgtctgcgtaa

SEQ ID NO: 8660 - DNA, 16 bp, Artificial Sequence
  Synthetic construct
attggtgtctgcgtaa

SEQ ID NO: 8661 - DNA, 16 bp, Artificial Sequence
  Synthetic construct
atttctgcacgaaagc

SEQ ID NO: 8662 - DNA, 16 bp, Artificial Sequence
  Synthetic construct
atttctgcacgaaagc

SEQ ID NO: 8663 - DNA, 16 bp, Artificial Sequence
  Synthetic construct
atttctgcatcgggtc

SEQ ID NO: 8664 - DNA, 16 bp, Artificial Sequence
  Synthetic construct
atttctgcatcgggtc

SEQ ID NO: 8665 - DNA, 16 bp, Artificial Sequence
  Synthetic construct
atttctggtcacacgc

SEQ ID NO: 8666 - DNA, 16 bp, Artificial Sequence
  Synthetic construct
atttctggtcacacgc

SEQ ID NO: 8667 - DNA, 16 bp, Artificial Sequence
  Synthetic construct
caaccaacaatgtaag

SEQ ID NO: 8668 - DNA, 16 bp, Artificial Sequence
  Synthetic construct
caaccaacaatgtaag

SEQ ID NO: 8669 - DNA, 16 bp, Artificial Sequence
  Synthetic construct
caacctcagatgcgac

SEQ ID NO: 8670 - DNA, 16 bp, Artificial Sequence
  Synthetic construct
caacctcagatgcgac

SEQ ID NO: 8671 - DNA, 16 bp, Artificial Sequence
  Synthetic construct
caacctcgtatgaatg

SEQ ID NO: 8672 - DNA, 16 bp, Artificial Sequence
  Synthetic construct
caacctcgtatgaatg

SEQ ID NO: 8673 - DNA, 16 bp, Artificial Sequence
  Synthetic construct
caactagaggaattac

SEQ ID NO: 8674 - DNA, 16 bp, Artificial Sequence
  Synthetic construct
caactagaggaattac

SEQ ID NO: 8675 - DNA, 16 bp, Artificial Sequence
  Synthetic construct
caactaggtacaccgc

SEQ ID NO: 8676 - DNA, 16 bp, Artificial Sequence
  Synthetic construct
caactaggtacaccgc

SEQ ID NO: 8677 - DNA, 16 bp, Artificial Sequence
  Synthetic construct
caagaaaagccacgct

SEQ ID NO: 8678 - DNA, 16 bp, Artificial Sequence
  Synthetic construct
caagaaaagccacgct

SEQ ID NO: 8679 - DNA, 16 bp, Artificial Sequence
  Synthetic construct
caagatctcttgcaag

SEQ ID NO: 8680 - DNA, 16 bp, Artificial Sequence
  Synthetic construct
caagatctcttgcaag

SEQ ID NO: 8681 - DNA, 16 bp, Artificial Sequence
  Synthetic construct
caaggccagtacacct

SEQ ID NO: 8682 - DNA, 16 bp, Artificial Sequence
  Synthetic construct
caaggccagtacacct

SEQ ID NO: 8683 - DNA, 16 bp, Artificial Sequence
  Synthetic construct
caagttgagggcttga

SEQ ID NO: 8684 - DNA, 16 bp, Artificial Sequence
  Synthetic construct
caagttgagggcttga

SEQ ID NO: 8685 - DNA, 16 bp, Artificial Sequence
  Synthetic construct
caagttgcacttcgaa

SEQ ID NO: 8686 - DNA, 16 bp, Artificial Sequence
  Synthetic construct
caagttgcacttcgaa

SEQ ID NO: 8687 - DNA, 16 bp, Artificial Sequence
  Synthetic construct
cacacaaagacgcttt

SEQ ID NO: 8688 - DNA, 16 bp, Artificial Sequence
  Synthetic construct
cacacaaagacgcttt

SEQ ID NO: 8689 - DNA, 16 bp, Artificial Sequence
  Synthetic construct
cacacaaagtacgata

SEQ ID NO: 8690 - DNA, 16 bp, Artificial Sequence
  Synthetic construct
cacacaaagtacgata

SEQ ID NO: 8691 - DNA, 16 bp, Artificial Sequence
  Synthetic construct
cacacaacaagacgtg

SEQ ID NO: 8692 - DNA, 16 bp, Artificial Sequence
  Synthetic construct
cacacaacaagacgtg

SEQ ID NO: 8693 - DNA, 16 bp, Artificial Sequence
  Synthetic construct
cacacaagtctagagg

SEQ ID NO: 8694 - DNA, 16 bp, Artificial Sequence
  Synthetic construct
cacacaagtctagagg

SEQ ID NO: 8695 - DNA, 16 bp, Artificial Sequence
  Synthetic construct
cacacaatcgctagcg

SEQ ID NO: 8696 - DNA, 16 bp, Artificial Sequence
  Synthetic construct
cacacaatcgctagcg

SEQ ID NO: 8697 - DNA, 16 bp, Artificial Sequence
  Synthetic construct
cacacaatcttgtatc

SEQ ID NO: 8698 - DNA, 16 bp, Artificial Sequence
  Synthetic construct
cacacaatcttgtatc

SEQ ID NO: 8699 - DNA, 16 bp, Artificial Sequence
  Synthetic construct
cacacctagatctgaa

SEQ ID NO: 8700 - DNA, 16 bp, Artificial Sequence
  Synthetic construct
cacacctagatctgaa

SEQ ID NO: 8701 - DNA, 16 bp, Artificial Sequence
  Synthetic construct
cacacctaggcaatta

SEQ ID NO: 8702 - DNA, 16 bp, Artificial Sequence
  Synthetic construct
cacacctaggcaatta

SEQ ID NO: 8703 - DNA, 16 bp, Artificial Sequence
  Synthetic construct
cacaccttcttagccc

SEQ ID NO: 8704 - DNA, 16 bp, Artificial Sequence
  Synthetic construct
cacaccttcttagccc

SEQ ID NO: 8705 - DNA, 16 bp, Artificial Sequence
  Synthetic construct
cacactcaggaattac

SEQ ID NO: 8706 - DNA, 16 bp, Artificial Sequence
  Synthetic construct
cacactcaggaattac

SEQ ID NO: 8707 - DNA, 16 bp, Artificial Sequence
  Synthetic construct
cacactccaatagcaa

SEQ ID NO: 8708 - DNA, 16 bp, Artificial Sequence
  Synthetic construct
cacactccaatagcaa

SEQ ID NO: 8709 - DNA, 16 bp, Artificial Sequence
  Synthetic construct
cacactctctgcccta

SEQ ID NO: 8710 - DNA, 16 bp, Artificial Sequence
  Synthetic construct
cacactctctgcccta

SEQ ID NO: 8711 - DNA, 16 bp, Artificial Sequence
  Synthetic construct
cacaggcaggagtacc

SEQ ID NO: 8712 - DNA, 16 bp, Artificial Sequence
  Synthetic construct
cacaggcaggagtacc

SEQ ID NO: 8713 - DNA, 16 bp, Artificial Sequence
  Synthetic construct
cacaggcagtccgtat

SEQ ID NO: 8714 - DNA, 16 bp, Artificial Sequence
  Synthetic construct
cacaggcagtccgtat

SEQ ID NO: 8715 - DNA, 16 bp, Artificial Sequence
  Synthetic construct
cacagtaagttgcagg

SEQ ID NO: 8716 - DNA, 16 bp, Artificial Sequence
  Synthetic construct
cacagtaagttgcagg

SEQ ID NO: 8717 - DNA, 16 bp, Artificial Sequence
  Synthetic construct
cacatagcaaacctac

SEQ ID NO: 8718 - DNA, 16 bp, Artificial Sequence
  Synthetic construct
cacatagcaaacctac

SEQ ID NO: 8719 - DNA, 16 bp, Artificial Sequence
  Synthetic construct
cacatagcacgaaata

SEQ ID NO: 8720 - DNA, 16 bp, Artificial Sequence
  Synthetic construct
cacatagcacgaaata

SEQ ID NO: 8721 - DNA, 16 bp, Artificial Sequence
  Synthetic construct
cacatagtcggtccga

SEQ ID NO: 8722 - DNA, 16 bp, Artificial Sequence
  Synthetic construct
cacatagtcggtccga

SEQ ID NO: 8723 - DNA, 16 bp, Artificial Sequence
  Synthetic construct
cacatttgtatagtag

SEQ ID NO: 8724 - DNA, 16 bp, Artificial Sequence
  Synthetic construct
cacatttgtatagtag

SEQ ID NO: 8725 - DNA, 16 bp, Artificial Sequence
  Synthetic construct
cacatttgtcagaata

SEQ ID NO: 8726 - DNA, 16 bp, Artificial Sequence
  Synthetic construct
cacatttgtcagaata

SEQ ID NO: 8727 - DNA, 16 bp, Artificial Sequence
  Synthetic construct
caccactcatataccg

SEQ ID NO: 8728 - DNA, 16 bp, Artificial Sequence
  Synthetic construct
caccactcatataccg

SEQ ID NO: 8729 - DNA, 16 bp, Artificial Sequence
  Synthetic construct
caccaggcagtcagag

SEQ ID NO: 8730 - DNA, 16 bp, Artificial Sequence
  Synthetic construct
caccaggcagtcagag

SEQ ID NO: 8731 - DNA, 16 bp, Artificial Sequence
  Synthetic construct
cagaatctcagaggtg

SEQ ID NO: 8732 - DNA, 16 bp, Artificial Sequence
  Synthetic construct
cagaatctcagaggtg

SEQ ID NO: 8733 - DNA, 16 bp, Artificial Sequence
  Synthetic construct
cagatcaagaaggtga

SEQ ID NO: 8734 - DNA, 16 bp, Artificial Sequence
  Synthetic construct
cagatcaagaaggtga

SEQ ID NO: 8735 - DNA, 16 bp, Artificial Sequence
  Synthetic construct
cagatcaagtggcaca

SEQ ID NO: 8736 - DNA, 16 bp, Artificial Sequence
  Synthetic construct
cagatcaagtggcaca

SEQ ID NO: 8737 - DNA, 16 bp, Artificial Sequence
  Synthetic construct
cagatcacaagaaagg

SEQ ID NO: 8738 - DNA, 16 bp, Artificial Sequence
  Synthetic construct
cagatcacaagaaagg

SEQ ID NO: 8739 - DNA, 16 bp, Artificial Sequence
  Synthetic construct
cagatcacatcggaag

SEQ ID NO: 8740 - DNA, 16 bp, Artificial Sequence
  Synthetic construct
cagatcacatcggaag

SEQ ID NO: 8741 - DNA, 16 bp, Artificial Sequence
  Synthetic construct
cagcatagtctcgttc

SEQ ID NO: 8742 - DNA, 16 bp, Artificial Sequence
  Synthetic construct
cagcatagtctcgttc

SEQ ID NO: 8743 - DNA, 16 bp, Artificial Sequence
  Synthetic construct
cagcgacagtcgccgt

SEQ ID NO: 8744 - DNA, 16 bp, Artificial Sequence
  Synthetic construct
cagcgacagtcgccgt

SEQ ID NO: 8745 - DNA, 16 bp, Artificial Sequence
  Synthetic construct
cagcgaccaggctcac

SEQ ID NO: 8746 - DNA, 16 bp, Artificial Sequence
  Synthetic construct
cagcgaccaggctcac

SEQ ID NO: 8747 - DNA, 16 bp, Artificial Sequence
  Synthetic construct
cagctaatcgcctgag

SEQ ID NO: 8748 - DNA, 16 bp, Artificial Sequence
  Synthetic construct
cagctaatcgcctgag

SEQ ID NO: 8749 - DNA, 16 bp, Artificial Sequence
  Synthetic construct
cagctggaggaccaca

SEQ ID NO: 8750 - DNA, 16 bp, Artificial Sequence
  Synthetic construct
cagctggaggaccaca

SEQ ID NO: 8751 - DNA, 16 bp, Artificial Sequence
  Synthetic construct
cagctgggtccctact

SEQ ID NO: 8752 - DNA, 16 bp, Artificial Sequence
  Synthetic construct
cagctgggtccctact

SEQ ID NO: 8753 - DNA, 16 bp, Artificial Sequence
  Synthetic construct
cagctggtcgcctgtt

SEQ ID NO: 8754 - DNA, 16 bp, Artificial Sequence
  Synthetic construct
cagctggtcgcctgtt

SEQ ID NO: 8755 - DNA, 16 bp, Artificial Sequence
  Synthetic construct
cagctggtcttgtatc

SEQ ID NO: 8756 - DNA, 16 bp, Artificial Sequence
  Synthetic construct
cagctggtcttgtatc

SEQ ID NO: 8757 - DNA, 16 bp, Artificial Sequence
  Synthetic construct
caggtgcagttcgatc

SEQ ID NO: 8758 - DNA, 16 bp, Artificial Sequence
  Synthetic construct
caggtgcagttcgatc

SEQ ID NO: 8759 - DNA, 16 bp, Artificial Sequence
  Synthetic construct
cagtaacagcgtctat

SEQ ID NO: 8760 - DNA, 16 bp, Artificial Sequence
  Synthetic construct
cagtaacagcgtctat

SEQ ID NO: 8761 - DNA, 16 bp, Artificial Sequence
  Synthetic construct
cagtcctagtggtccc

SEQ ID NO: 8762 - DNA, 16 bp, Artificial Sequence
  Synthetic construct
cagtcctagtggtccc

SEQ ID NO: 8763 - DNA, 16 bp, Artificial Sequence
  Synthetic construct
cagtcctcaaatccgt

SEQ ID NO: 8764 - DNA, 16 bp, Artificial Sequence
  Synthetic construct
cagtcctcaaatccgt

SEQ ID NO: 8765 - DNA, 16 bp, Artificial Sequence
  Synthetic construct
catatggagagactta

SEQ ID NO: 8766 - DNA, 16 bp, Artificial Sequence
  Synthetic construct
catatggagagactta

SEQ ID NO: 8767 - DNA, 16 bp, Artificial Sequence
  Synthetic construct
catatggcaatggaat

SEQ ID NO: 8768 - DNA, 16 bp, Artificial Sequence
  Synthetic construct
catatggcaatggaat

SEQ ID NO: 8769 - DNA, 16 bp, Artificial Sequence
  Synthetic construct
catattcagttgagat

SEQ ID NO: 8770 - DNA, 16 bp, Artificial Sequence
  Synthetic construct
catattcagttgagat

SEQ ID NO: 8771 - DNA, 16 bp, Artificial Sequence
  Synthetic construct
catattctcgtacggc

SEQ ID NO: 8772 - DNA, 16 bp, Artificial Sequence
  Synthetic construct
catattctcgtacggc

SEQ ID NO: 8773 - DNA, 16 bp, Artificial Sequence
  Synthetic construct
catcagaagtttcctt

SEQ ID NO: 8774 - DNA, 16 bp, Artificial Sequence
  Synthetic construct
catcagaagtttcctt

SEQ ID NO: 8775 - DNA, 16 bp, Artificial Sequence
  Synthetic construct
catccactcgcgtttc

SEQ ID NO: 8776 - DNA, 16 bp, Artificial Sequence
  Synthetic construct
catccactcgcgtttc

SEQ ID NO: 8777 - DNA, 16 bp, Artificial Sequence
  Synthetic construct
catcgaatccagatca

SEQ ID NO: 8778 - DNA, 16 bp, Artificial Sequence
  Synthetic construct
catcgaatccagatca

SEQ ID NO: 8779 - DNA, 16 bp, Artificial Sequence
  Synthetic construct
catcgggagcaggcta

SEQ ID NO: 8780 - DNA, 16 bp, Artificial Sequence
  Synthetic construct
catcgggagcaggcta

SEQ ID NO: 8781 - DNA, 16 bp, Artificial Sequence
  Synthetic construct
catcgggcaatggtct

SEQ ID NO: 8782 - DNA, 16 bp, Artificial Sequence
  Synthetic construct
catcgggcaatggtct

SEQ ID NO: 8783 - DNA, 16 bp, Artificial Sequence
  Synthetic construct
catcggggtccgtcag

SEQ ID NO: 8784 - DNA, 16 bp, Artificial Sequence
  Synthetic construct
catcggggtccgtcag

SEQ ID NO: 8785 - DNA, 16 bp, Artificial Sequence
  Synthetic construct
catcgggtccttaatc

SEQ ID NO: 8786 - DNA, 16 bp, Artificial Sequence
  Synthetic construct
catcgggtccttaatc

SEQ ID NO: 8787 - DNA, 16 bp, Artificial Sequence
  Synthetic construct
cattatcagccgattt

SEQ ID NO: 8788 - DNA, 16 bp, Artificial Sequence
  Synthetic construct
cattatcagccgattt

SEQ ID NO: 8789 - DNA, 16 bp, Artificial Sequence
  Synthetic construct
cattatcgttcctcca

SEQ ID NO: 8790 - DNA, 16 bp, Artificial Sequence
  Synthetic construct
cattatcgttcctcca

SEQ ID NO: 8791 - DNA, 16 bp, Artificial Sequence
  Synthetic construct
ccaatccgtctcccta

SEQ ID NO: 8792 - DNA, 16 bp, Artificial Sequence
  Synthetic construct
ccaatccgtctcccta

SEQ ID NO: 8793 - DNA, 16 bp, Artificial Sequence
  Synthetic construct
ccacctatcagcacat

SEQ ID NO: 8794 - DNA, 16 bp, Artificial Sequence
  Synthetic construct
ccacctatcagcacat

SEQ ID NO: 8795 - DNA, 16 bp, Artificial Sequence
  Synthetic construct
ccacggacagtagagc

SEQ ID NO: 8796 - DNA, 16 bp, Artificial Sequence
  Synthetic construct
ccacggacagtagagc

SEQ ID NO: 8797 - DNA, 16 bp, Artificial Sequence
  Synthetic construct
ccacggatcagttagc

SEQ ID NO: 8798 - DNA, 16 bp, Artificial Sequence
  Synthetic construct
ccacggatcagttagc

SEQ ID NO: 8799 - DNA, 16 bp, Artificial Sequence
  Synthetic construct
ccactaccagctcgca

SEQ ID NO: 8800 - DNA, 16 bp, Artificial Sequence
  Synthetic construct
ccactaccagctcgca

SEQ ID NO: 8801 - DNA, 16 bp, Artificial Sequence
  Synthetic construct
ccactacgttaagaac

SEQ ID NO: 8802 - DNA, 16 bp, Artificial Sequence
  Synthetic construct
ccactacgttaagaac

SEQ ID NO: 8803 - DNA, 16 bp, Artificial Sequence
  Synthetic construct
ccagcgatccagaagg

SEQ ID NO: 8804 - DNA, 16 bp, Artificial Sequence
  Synthetic construct
ccagcgatccagaagg

SEQ ID NO: 8805 - DNA, 16 bp, Artificial Sequence
  Synthetic construct
ccatgtcgtgagtgac

SEQ ID NO: 8806 - DNA, 16 bp, Artificial Sequence
  Synthetic construct
ccatgtcgtgagtgac

SEQ ID NO: 8807 - DNA, 16 bp, Artificial Sequence
  Synthetic construct
ccattcgagcgctcca

SEQ ID NO: 8808 - DNA, 16 bp, Artificial Sequence
  Synthetic construct
ccattcgagcgctcca

SEQ ID NO: 8809 - DNA, 16 bp, Artificial Sequence
  Synthetic construct
ccattcgcacaagtaa

SEQ ID NO: 8810 - DNA, 16 bp, Artificial Sequence
  Synthetic construct
ccattcgcacaagtaa

SEQ ID NO: 8811 - DNA, 16 bp, Artificial Sequence
  Synthetic construct
ccattcgcagcgatcc

SEQ ID NO: 8812 - DNA, 16 bp, Artificial Sequence
  Synthetic construct
ccattcgcagcgatcc

SEQ ID NO: 8813 - DNA, 16 bp, Artificial Sequence
  Synthetic construct
ccattcgtcgtacggc

SEQ ID NO: 8814 - DNA, 16 bp, Artificial Sequence
  Synthetic construct
ccattcgtcgtacggc

SEQ ID NO: 8815 - DNA, 16 bp, Artificial Sequence
  Synthetic construct
cccaatcaggaatgga

SEQ ID NO: 8816 - DNA, 16 bp, Artificial Sequence
  Synthetic construct
cccaatcaggaatgga

SEQ ID NO: 8817 - DNA, 16 bp, Artificial Sequence
  Synthetic construct
cccaatcgtagggtac

SEQ ID NO: 8818 - DNA, 16 bp, Artificial Sequence
  Synthetic construct
cccaatcgtagggtac

SEQ ID NO: 8819 - DNA, 16 bp, Artificial Sequence
  Synthetic construct
cccagttcacaggttt

SEQ ID NO: 8820 - DNA, 16 bp, Artificial Sequence
  Synthetic construct
cccagttcacaggttt

SEQ ID NO: 8821 - DNA, 16 bp, Artificial Sequence
  Synthetic construct
cccagttgttgaactc

SEQ ID NO: 8822 - DNA, 16 bp, Artificial Sequence
  Synthetic construct
cccagttgttgaactc

SEQ ID NO: 8823 - DNA, 16 bp, Artificial Sequence
  Synthetic construct
cccatacagtcttgca

SEQ ID NO: 8824 - DNA, 16 bp, Artificial Sequence
  Synthetic construct
cccatacagtcttgca

SEQ ID NO: 8825 - DNA, 16 bp, Artificial Sequence
  Synthetic construct
cccatacgtaacgacg

SEQ ID NO: 8826 - DNA, 16 bp, Artificial Sequence
  Synthetic construct
cccatacgtaacgacg

SEQ ID NO: 8827 - DNA, 16 bp, Artificial Sequence
  Synthetic construct
cccatactcacttcat

SEQ ID NO: 8828 - DNA, 16 bp, Artificial Sequence
  Synthetic construct
cccatactcacttcat

SEQ ID NO: 8829 - DNA, 16 bp, Artificial Sequence
  Synthetic construct
ccctccttcagtacgt

SEQ ID NO: 8830 - DNA, 16 bp, Artificial Sequence
  Synthetic construct
ccctccttcagtacgt

SEQ ID NO: 8831 - DNA, 16 bp, Artificial Sequence
  Synthetic construct
ccgggattcgtggtcg

SEQ ID NO: 8832 - DNA, 16 bp, Artificial Sequence
  Synthetic construct
ccgggattcgtggtcg

SEQ ID NO: 8833 - DNA, 16 bp, Artificial Sequence
  Synthetic construct
ccgtactgtccagtgc

SEQ ID NO: 8834 - DNA, 16 bp, Artificial Sequence
  Synthetic construct
ccgtactgtccagtgc

SEQ ID NO: 8835 - DNA, 16 bp, Artificial Sequence
  Synthetic construct
ccgtacttcagaggtg

SEQ ID NO: 8836 - DNA, 16 bp, Artificial Sequence
  Synthetic construct
ccgtacttcagaggtg

SEQ ID NO: 8837 - DNA, 16 bp, Artificial Sequence
  Synthetic construct
ccgtacttctgcggca

SEQ ID NO: 8838 - DNA, 16 bp, Artificial Sequence
  Synthetic construct
ccgtacttctgcggca

SEQ ID NO: 8839 - DNA, 16 bp, Artificial Sequence
  Synthetic construct
ccgtggagtaaacaca

SEQ ID NO: 8840 - DNA, 16 bp, Artificial Sequence
  Synthetic construct
ccgtggagtaaacaca

SEQ ID NO: 8841 - DNA, 16 bp, Artificial Sequence
  Synthetic construct
ccgtggagtccgacgt

SEQ ID NO: 8842 - DNA, 16 bp, Artificial Sequence
  Synthetic construct
ccgtggagtccgacgt

SEQ ID NO: 8843 - DNA, 16 bp, Artificial Sequence
  Synthetic construct
ccgttcaagcgttgcc

SEQ ID NO: 8844 - DNA, 16 bp, Artificial Sequence
  Synthetic construct
ccgttcaagcgttgcc

SEQ ID NO: 8845 - DNA, 16 bp, Artificial Sequence
  Synthetic construct
ccgttcacatttcact

SEQ ID NO: 8846 - DNA, 16 bp, Artificial Sequence
  Synthetic construct
ccgttcacatttcact

SEQ ID NO: 8847 - DNA, 16 bp, Artificial Sequence
  Synthetic construct
ccgttcatctgagtgt

SEQ ID NO: 8848 - DNA, 16 bp, Artificial Sequence
  Synthetic construct
ccgttcatctgagtgt

SEQ ID NO: 8849 - DNA, 16 bp, Artificial Sequence
  Synthetic construct
cctaaagagccaggat

SEQ ID NO: 8850 - DNA, 16 bp, Artificial Sequence
  Synthetic construct
cctaaagagccaggat

SEQ ID NO: 8851 - DNA, 16 bp, Artificial Sequence
  Synthetic construct
cctaaagagggaacgg

SEQ ID NO: 8852 - DNA, 16 bp, Artificial Sequence
  Synthetic construct
cctaaagagggaacgg

SEQ ID NO: 8853 - DNA, 16 bp, Artificial Sequence
  Synthetic construct
cctaaagcaacaacct

SEQ ID NO: 8854 - DNA, 16 bp, Artificial Sequence
  Synthetic construct
cctaaagcaacaacct

SEQ ID NO: 8855 - DNA, 16 bp, Artificial Sequence
  Synthetic construct
cctacacagaaagtgg

SEQ ID NO: 8856 - DNA, 16 bp, Artificial Sequence
  Synthetic construct
cctacacagaaagtgg

SEQ ID NO: 8857 - DNA, 16 bp, Artificial Sequence
  Synthetic construct
cctacaccagggttag

SEQ ID NO: 8858 - DNA, 16 bp, Artificial Sequence
  Synthetic construct
cctacaccagggttag

SEQ ID NO: 8859 - DNA, 16 bp, Artificial Sequence
  Synthetic construct
cctacacgtgagggag

SEQ ID NO: 8860 - DNA, 16 bp, Artificial Sequence
  Synthetic construct
cctacacgtgagggag

SEQ ID NO: 8861 - DNA, 16 bp, Artificial Sequence
  Synthetic construct
cctaccaagccaggat

SEQ ID NO: 8862 - DNA, 16 bp, Artificial Sequence
  Synthetic construct
cctaccaagccaggat

SEQ ID NO: 8863 - DNA, 16 bp, Artificial Sequence
  Synthetic construct
cctaccagttcgtgat

SEQ ID NO: 8864 - DNA, 16 bp, Artificial Sequence
  Synthetic construct
cctaccagttcgtgat

SEQ ID NO: 8865 - DNA, 16 bp, Artificial Sequence
  Synthetic construct
cctaccatcgccagca

SEQ ID NO: 8866 - DNA, 16 bp, Artificial Sequence
  Synthetic construct
cctaccatcgccagca

SEQ ID NO: 8867 - DNA, 16 bp, Artificial Sequence
  Synthetic construct
cctagctagagtaatc

SEQ ID NO: 8868 - DNA, 16 bp, Artificial Sequence
  Synthetic construct
cctagctagagtaatc

SEQ ID NO: 8869 - DNA, 16 bp, Artificial Sequence
  Synthetic construct
cctagctgtgtctgat

SEQ ID NO: 8870 - DNA, 16 bp, Artificial Sequence
  Synthetic construct
cctagctgtgtctgat

SEQ ID NO: 8871 - DNA, 16 bp, Artificial Sequence
  Synthetic construct
cctcagtcattcctgc

SEQ ID NO: 8872 - DNA, 16 bp, Artificial Sequence
  Synthetic construct
cctcagtcattcctgc

SEQ ID NO: 8873 - DNA, 16 bp, Artificial Sequence
  Synthetic construct
cctcagtgtagagtgc

SEQ ID NO: 8874 - DNA, 16 bp, Artificial Sequence
  Synthetic construct
cctcagtgtagagtgc

SEQ ID NO: 8875 - DNA, 16 bp, Artificial Sequence
  Synthetic construct
ccttacgaggtagcca

SEQ ID NO: 8876 - DNA, 16 bp, Artificial Sequence
  Synthetic construct
ccttacgaggtagcca

SEQ ID NO: 8877 - DNA, 16 bp, Artificial Sequence
  Synthetic construct
ccttacggtggtttca

SEQ ID NO: 8878 - DNA, 16 bp, Artificial Sequence
  Synthetic construct
ccttacggtggtttca

SEQ ID NO: 8879 - DNA, 16 bp, Artificial Sequence
  Synthetic construct
ccttcgacatgaagta

SEQ ID NO: 8880 - DNA, 16 bp, Artificial Sequence
  Synthetic construct
ccttcgacatgaagta

SEQ ID NO: 8881 - DNA, 16 bp, Artificial Sequence
  Synthetic construct
ccttcgacatggaata

SEQ ID NO: 8882 - DNA, 16 bp, Artificial Sequence
  Synthetic construct
ccttcgacatggaata

SEQ ID NO: 8883 - DNA, 16 bp, Artificial Sequence
  Synthetic construct
ccttcgatcgacggaa

SEQ ID NO: 8884 - DNA, 16 bp, Artificial Sequence
  Synthetic construct
ccttcgatcgacggaa

SEQ ID NO: 8885 - DNA, 16 bp, Artificial Sequence
  Synthetic construct
ccttcgatcgcttgtc

SEQ ID NO: 8886 - DNA, 16 bp, Artificial Sequence
  Synthetic construct
ccttcgatcgcttgtc

SEQ ID NO: 8887 - DNA, 16 bp, Artificial Sequence
  Synthetic construct
cctttctcaatagagt

SEQ ID NO: 8888 - DNA, 16 bp, Artificial Sequence
  Synthetic construct
cctttctcaatagagt

SEQ ID NO: 8889 - DNA, 16 bp, Artificial Sequence
  Synthetic construct
cctttcttcaatctct

SEQ ID NO: 8890 - DNA, 16 bp, Artificial Sequence
  Synthetic construct
cctttcttcaatctct

SEQ ID NO: 8891 - DNA, 16 bp, Artificial Sequence
  Synthetic construct
cctttcttcagtgttg

SEQ ID NO: 8892 - DNA, 16 bp, Artificial Sequence
  Synthetic construct
cctttcttcagtgttg

SEQ ID NO: 8893 - DNA, 16 bp, Artificial Sequence
  Synthetic construct
cgaatgtgtagaaagg

SEQ ID NO: 8894 - DNA, 16 bp, Artificial Sequence
  Synthetic construct
cgaatgtgtagaaagg

SEQ ID NO: 8895 - DNA, 16 bp, Artificial Sequence
  Synthetic construct
cgaccttagattaccc

SEQ ID NO: 8896 - DNA, 16 bp, Artificial Sequence
  Synthetic construct
cgaccttagattaccc

SEQ ID NO: 8897 - DNA, 16 bp, Artificial Sequence
  Synthetic construct
cgaccttaggtgacca

SEQ ID NO: 8898 - DNA, 16 bp, Artificial Sequence
  Synthetic construct
cgaccttaggtgacca

SEQ ID NO: 8899 - DNA, 16 bp, Artificial Sequence
  Synthetic construct
cgacttcgtagcgtag

SEQ ID NO: 8900 - DNA, 16 bp, Artificial Sequence
  Synthetic construct
cgacttcgtagcgtag

SEQ ID NO: 8901 - DNA, 16 bp, Artificial Sequence
  Synthetic construct
cgagaaggtctaacgt

SEQ ID NO: 8902 - DNA, 16 bp, Artificial Sequence
  Synthetic construct
cgagaaggtctaacgt

SEQ ID NO: 8903 - DNA, 16 bp, Artificial Sequence
  Synthetic construct
cgagaagtctttcctc

SEQ ID NO: 8904 - DNA, 16 bp, Artificial Sequence
  Synthetic construct
cgagaagtctttcctc

SEQ ID NO: 8905 - DNA, 16 bp, Artificial Sequence
  Synthetic construct
cgagcactctgaaaga

SEQ ID NO: 8906 - DNA, 16 bp, Artificial Sequence
  Synthetic construct
cgagcactctgaaaga

SEQ ID NO: 8907 - DNA, 16 bp, Artificial Sequence
  Synthetic construct
cgagccatccatgctc

SEQ ID NO: 8908 - DNA, 16 bp, Artificial Sequence
  Synthetic construct
cgagccatccatgctc

SEQ ID NO: 8909 - DNA, 16 bp, Artificial Sequence
  Synthetic construct
cgagccatcgttacga

SEQ ID NO: 8910 - DNA, 16 bp, Artificial Sequence
  Synthetic construct
cgagccatcgttacga

SEQ ID NO: 8911 - DNA, 16 bp, Artificial Sequence
  Synthetic construct
cgatggccagcatact

SEQ ID NO: 8912 - DNA, 16 bp, Artificial Sequence
  Synthetic construct
cgatggccagcatact

SEQ ID NO: 8913 - DNA, 16 bp, Artificial Sequence
  Synthetic construct
cgatggctcctcgcat

SEQ ID NO: 8914 - DNA, 16 bp, Artificial Sequence
  Synthetic construct
cgatggctcctcgcat

SEQ ID NO: 8915 - DNA, 16 bp, Artificial Sequence
  Synthetic construct
cgatggctctccggtt

SEQ ID NO: 8916 - DNA, 16 bp, Artificial Sequence
  Synthetic construct
cgatggctctccggtt

SEQ ID NO: 8917 - DNA, 16 bp, Artificial Sequence
  Synthetic construct
cgatggctctgccagg

SEQ ID NO: 8918 - DNA, 16 bp, Artificial Sequence
  Synthetic construct
cgatggctctgccagg

SEQ ID NO: 8919 - DNA, 16 bp, Artificial Sequence
  Synthetic construct
cgatgtacacaacgcc

SEQ ID NO: 8920 - DNA, 16 bp, Artificial Sequence
  Synthetic construct
cgatgtacacaacgcc

SEQ ID NO: 8921 - DNA, 16 bp, Artificial Sequence
  Synthetic construct
cgatgtagtacaccgc

SEQ ID NO: 8922 - DNA, 16 bp, Artificial Sequence
  Synthetic construct
cgatgtagtacaccgc

SEQ ID NO: 8923 - DNA, 16 bp, Artificial Sequence
  Synthetic construct
cgatgtagtctgccag

SEQ ID NO: 8924 - DNA, 16 bp, Artificial Sequence
  Synthetic construct
cgatgtagtctgccag

SEQ ID NO: 8925 - DNA, 16 bp, Artificial Sequence
  Synthetic construct
cgatgtagttgggaca

SEQ ID NO: 8926 - DNA, 16 bp, Artificial Sequence
  Synthetic construct
cgatgtagttgggaca

SEQ ID NO: 8927 - DNA, 16 bp, Artificial Sequence
  Synthetic construct
cgattgatctcacatt

SEQ ID NO: 8928 - DNA, 16 bp, Artificial Sequence
  Synthetic construct
cgattgatctcacatt

SEQ ID NO: 8929 - DNA, 16 bp, Artificial Sequence
  Synthetic construct
cgccaagcaagtctgt

SEQ ID NO: 8930 - DNA, 16 bp, Artificial Sequence
  Synthetic construct
cgccaagcaagtctgt

SEQ ID NO: 8931 - DNA, 16 bp, Artificial Sequence
  Synthetic construct
cgccaagtcgtccagg

SEQ ID NO: 8932 - DNA, 16 bp, Artificial Sequence
  Synthetic construct
cgccaagtcgtccagg

SEQ ID NO: 8933 - DNA, 16 bp, Artificial Sequence
  Synthetic construct
cgcggtacagcatact

SEQ ID NO: 8934 - DNA, 16 bp, Artificial Sequence
  Synthetic construct
cgcggtacagcatact

SEQ ID NO: 8935 - DNA, 16 bp, Artificial Sequence
  Synthetic construct
cgcggtatcgtgggaa

SEQ ID NO: 8936 - DNA, 16 bp, Artificial Sequence
  Synthetic construct
cgcggtatcgtgggaa

SEQ ID NO: 8937 - DNA, 16 bp, Artificial Sequence
  Synthetic construct
cgcgtttagcaggcta

SEQ ID NO: 8938 - DNA, 16 bp, Artificial Sequence
  Synthetic construct
cgcgtttagcaggcta

SEQ ID NO: 8939 - DNA, 16 bp, Artificial Sequence
  Synthetic construct
cgcgtttagcgattct

SEQ ID NO: 8940 - DNA, 16 bp, Artificial Sequence
  Synthetic construct
cgcgtttagcgattct

SEQ ID NO: 8941 - DNA, 16 bp, Artificial Sequence
  Synthetic construct
cgcgtttcacttaagc

SEQ ID NO: 8942 - DNA, 16 bp, Artificial Sequence
  Synthetic construct
cgcgtttcacttaagc

SEQ ID NO: 8943 - DNA, 16 bp, Artificial Sequence
  Synthetic construct
cgcgtttcatctatgg

SEQ ID NO: 8944 - DNA, 16 bp, Artificial Sequence
  Synthetic construct
cgcgtttcatctatgg

SEQ ID NO: 8945 - DNA, 16 bp, Artificial Sequence
  Synthetic construct
cgcgttttcgaggtag

SEQ ID NO: 8946 - DNA, 16 bp, Artificial Sequence
  Synthetic construct
cgcgttttcgaggtag

SEQ ID NO: 8947 - DNA, 16 bp, Artificial Sequence
  Synthetic construct
cgcttcacagcctgtg

SEQ ID NO: 8948 - DNA, 16 bp, Artificial Sequence
  Synthetic construct
cgcttcacagcctgtg

SEQ ID NO: 8949 - DNA, 16 bp, Artificial Sequence
  Synthetic construct
cgcttcacataacctg

SEQ ID NO: 8950 - DNA, 16 bp, Artificial Sequence
  Synthetic construct
cgcttcacataacctg

SEQ ID NO: 8951 - DNA, 16 bp, Artificial Sequence
  Synthetic construct
cgcttcatccagtagt

SEQ ID NO: 8952 - DNA, 16 bp, Artificial Sequence
  Synthetic construct
cgcttcatccagtagt

SEQ ID NO: 8953 - DNA, 16 bp, Artificial Sequence
  Synthetic construct
cgcttcatccgtcatc

SEQ ID NO: 8954 - DNA, 16 bp, Artificial Sequence
  Synthetic construct
cgcttcatccgtcatc

SEQ ID NO: 8955 - DNA, 16 bp, Artificial Sequence
  Synthetic construct
cggacaccacccagtg

SEQ ID NO: 8956 - DNA, 16 bp, Artificial Sequence
  Synthetic construct
cggacaccacccagtg

SEQ ID NO: 8957 - DNA, 16 bp, Artificial Sequence
  Synthetic construct
cggacgtgtttggcgc

SEQ ID NO: 8958 - DNA, 16 bp, Artificial Sequence
  Synthetic construct
cggacgtgtttggcgc

SEQ ID NO: 8959 - DNA, 16 bp, Artificial Sequence
  Synthetic construct
cggacgtgtttgttgg

SEQ ID NO: 8960 - DNA, 16 bp, Artificial Sequence
  Synthetic construct
cggacgtgtttgttgg

SEQ ID NO: 8961 - DNA, 16 bp, Artificial Sequence
  Synthetic construct
cggactgcaagctgtt

SEQ ID NO: 8962 - DNA, 16 bp, Artificial Sequence
  Synthetic construct
cggactgcaagctgtt

SEQ ID NO: 8963 - DNA, 16 bp, Artificial Sequence
  Synthetic construct
cggagctcacagactt

SEQ ID NO: 8964 - DNA, 16 bp, Artificial Sequence
  Synthetic construct
cggagctcacagactt

SEQ ID NO: 8965 - DNA, 16 bp, Artificial Sequence
  Synthetic construct
cggagctcacggacaa

SEQ ID NO: 8966 - DNA, 16 bp, Artificial Sequence
  Synthetic construct
cggagctcacggacaa

SEQ ID NO: 8967 - DNA, 16 bp, Artificial Sequence
  Synthetic construct
cggagcttcgcatggc

SEQ ID NO: 8968 - DNA, 16 bp, Artificial Sequence
  Synthetic construct
cggagcttcgcatggc

SEQ ID NO: 8969 - DNA, 16 bp, Artificial Sequence
  Synthetic construct
cggagtcagtcgtttg

SEQ ID NO: 8970 - DNA, 16 bp, Artificial Sequence
  Synthetic construct
cggagtcagtcgtttg

SEQ ID NO: 8971 - DNA, 16 bp, Artificial Sequence
  Synthetic construct
cggctagcatcagtca

SEQ ID NO: 8972 - DNA, 16 bp, Artificial Sequence
  Synthetic construct
cggctagcatcagtca

SEQ ID NO: 8973 - DNA, 16 bp, Artificial Sequence
  Synthetic construct
cggctaggtctaaacc

SEQ ID NO: 8974 - DNA, 16 bp, Artificial Sequence
  Synthetic construct
cggctaggtctaaacc

SEQ ID NO: 8975 - DNA, 16 bp, Artificial Sequence
  Synthetic construct
cggctaggttctgttt

SEQ ID NO: 8976 - DNA, 16 bp, Artificial Sequence
  Synthetic construct
cggctaggttctgttt

SEQ ID NO: 8977 - DNA, 16 bp, Artificial Sequence
  Synthetic construct
cgggtcaagctagtgg

SEQ ID NO: 8978 - DNA, 16 bp, Artificial Sequence
  Synthetic construct
cgggtcaagctagtgg

SEQ ID NO: 8979 - DNA, 16 bp, Artificial Sequence
  Synthetic construct
cggttaaaggcgtaca

SEQ ID NO: 8980 - DNA, 16 bp, Artificial Sequence
  Synthetic construct
cggttaaaggcgtaca

SEQ ID NO: 8981 - DNA, 16 bp, Artificial Sequence
  Synthetic construct
cggttaacaccacgtg

SEQ ID NO: 8982 - DNA, 16 bp, Artificial Sequence
  Synthetic construct
cggttaacaccacgtg

SEQ ID NO: 8983 - DNA, 16 bp, Artificial Sequence
  Synthetic construct
cggttaacagatggca

SEQ ID NO: 8984 - DNA, 16 bp, Artificial Sequence
  Synthetic construct
cggttaacagatggca

SEQ ID NO: 8985 - DNA, 16 bp, Artificial Sequence
  Synthetic construct
cggttaacatactctt

SEQ ID NO: 8986 - DNA, 16 bp, Artificial Sequence
  Synthetic construct
cggttaacatactctt

SEQ ID NO: 8987 - DNA, 16 bp, Artificial Sequence
  Synthetic construct
cggttaatctttacac

SEQ ID NO: 8988 - DNA, 16 bp, Artificial Sequence
  Synthetic construct
cggttaatctttacac

SEQ ID NO: 8989 - DNA, 16 bp, Artificial Sequence
  Synthetic construct
cgtagcgtccgcgttt

SEQ ID NO: 8990 - DNA, 16 bp, Artificial Sequence
  Synthetic construct
cgtagcgtccgcgttt

SEQ ID NO: 8991 - DNA, 16 bp, Artificial Sequence
  Synthetic construct
cgtaggcaggaccaca

SEQ ID NO: 8992 - DNA, 16 bp, Artificial Sequence
  Synthetic construct
cgtaggcaggaccaca

SEQ ID NO: 8993 - DNA, 16 bp, Artificial Sequence
  Synthetic construct
cgtaggccagacaagc

SEQ ID NO: 8994 - DNA, 16 bp, Artificial Sequence
  Synthetic construct
cgtaggccagacaagc

SEQ ID NO: 8995 - DNA, 16 bp, Artificial Sequence
  Synthetic construct
cgtaggctcgcgtttc

SEQ ID NO: 8996 - DNA, 16 bp, Artificial Sequence
  Synthetic construct
cgtaggctcgcgtttc

SEQ ID NO: 8997 - DNA, 16 bp, Artificial Sequence
  Synthetic construct
cgtcactgtaagggaa

SEQ ID NO: 8998 - DNA, 16 bp, Artificial Sequence
  Synthetic construct
cgtcactgtaagggaa

SEQ ID NO: 8999 - DNA, 16 bp, Artificial Sequence
  Synthetic construct
cgtgagcagcaatctc

SEQ ID NO: 9000 - DNA, 16 bp, Artificial Sequence
  Synthetic construct
cgtgagcagcaatctc

SEQ ID NO: 9001 - DNA, 16 bp, Artificial Sequence
  Synthetic construct
cgtgagccattcttac

SEQ ID NO: 9002 - DNA, 16 bp, Artificial Sequence
  Synthetic construct
cgtgagccattcttac

SEQ ID NO: 9003 - DNA, 16 bp, Artificial Sequence
  Synthetic construct
cgtgtaaagatcacgg

SEQ ID NO: 9004 - DNA, 16 bp, Artificial Sequence
  Synthetic construct
cgtgtaaagatcacgg

SEQ ID NO: 9005 - DNA, 16 bp, Artificial Sequence
  Synthetic construct
cgtgtaacaccggaaa

SEQ ID NO: 9006 - DNA, 16 bp, Artificial Sequence
  Synthetic construct
cgtgtaacaccggaaa

SEQ ID NO: 9007 - DNA, 16 bp, Artificial Sequence
  Synthetic construct
cgtgtaagtaatcgtc

SEQ ID NO: 9008 - DNA, 16 bp, Artificial Sequence
  Synthetic construct
cgtgtaagtaatcgtc

SEQ ID NO: 9009 - DNA, 16 bp, Artificial Sequence
  Synthetic construct
cgtgtaatccgcgcaa

SEQ ID NO: 9010 - DNA, 16 bp, Artificial Sequence
  Synthetic construct
cgtgtaatccgcgcaa

SEQ ID NO: 9011 - DNA, 16 bp, Artificial Sequence
  Synthetic construct
cgtgtaatcgtaggtt

SEQ ID NO: 9012 - DNA, 16 bp, Artificial Sequence
  Synthetic construct
cgtgtaatcgtaggtt

SEQ ID NO: 9013 - DNA, 16 bp, Artificial Sequence
  Synthetic construct
cgtgtctaggcgatac

SEQ ID NO: 9014 - DNA, 16 bp, Artificial Sequence
  Synthetic construct
cgtgtctaggcgatac

SEQ ID NO: 9015 - DNA, 16 bp, Artificial Sequence
  Synthetic construct
cgtgtctagttgtcgt

SEQ ID NO: 9016 - DNA, 16 bp, Artificial Sequence
  Synthetic construct
cgtgtctagttgtcgt

SEQ ID NO: 9017 - DNA, 16 bp, Artificial Sequence
  Synthetic construct
cgttagaagggaaaca

SEQ ID NO: 9018 - DNA, 16 bp, Artificial Sequence
  Synthetic construct
cgttagaagggaaaca

SEQ ID NO: 9019 - DNA, 16 bp, Artificial Sequence
  Synthetic construct
cgttgggagtgactct

SEQ ID NO: 9020 - DNA, 16 bp, Artificial Sequence
  Synthetic construct
cgttgggagtgactct

SEQ ID NO: 9021 - DNA, 16 bp, Artificial Sequence
  Synthetic construct
cgttgggtcggaatct

SEQ ID NO: 9022 - DNA, 16 bp, Artificial Sequence
  Synthetic construct
cgttgggtcggaatct

SEQ ID NO: 9023 - DNA, 16 bp, Artificial Sequence
  Synthetic construct
ctaacttagccaggat

SEQ ID NO: 9024 - DNA, 16 bp, Artificial Sequence
  Synthetic construct
ctaacttagccaggat

SEQ ID NO: 9025 - DNA, 16 bp, Artificial Sequence
  Synthetic construct
ctaatggagccagttt

SEQ ID NO: 9026 - DNA, 16 bp, Artificial Sequence
  Synthetic construct
ctaatggagccagttt

SEQ ID NO: 9027 - DNA, 16 bp, Artificial Sequence
  Synthetic construct
ctacaccagacactaa

SEQ ID NO: 9028 - DNA, 16 bp, Artificial Sequence
  Synthetic construct
ctacaccagacactaa

SEQ ID NO: 9029 - DNA, 16 bp, Artificial Sequence
  Synthetic construct
ctacaccagatgggtc

SEQ ID NO: 9030 - DNA, 16 bp, Artificial Sequence
  Synthetic construct
ctacaccagatgggtc

SEQ ID NO: 9031 - DNA, 16 bp, Artificial Sequence
  Synthetic construct
ctacacctccagggct

SEQ ID NO: 9032 - DNA, 16 bp, Artificial Sequence
  Synthetic construct
ctacacctccagggct

SEQ ID NO: 9033 - DNA, 16 bp, Artificial Sequence
  Synthetic construct
ctacacctccttgcca

SEQ ID NO: 9034 - DNA, 16 bp, Artificial Sequence
  Synthetic construct
ctacacctccttgcca

SEQ ID NO: 9035 - DNA, 16 bp, Artificial Sequence
  Synthetic construct
ctacattcagacgcaa

SEQ ID NO: 9036 - DNA, 16 bp, Artificial Sequence
  Synthetic construct
ctacattcagacgcaa

SEQ ID NO: 9037 - DNA, 16 bp, Artificial Sequence
  Synthetic construct
ctacattgttgggaca

SEQ ID NO: 9038 - DNA, 16 bp, Artificial Sequence
  Synthetic construct
ctacattgttgggaca

SEQ ID NO: 9039 - DNA, 16 bp, Artificial Sequence
  Synthetic construct
ctacatttccttgcca

SEQ ID NO: 9040 - DNA, 16 bp, Artificial Sequence
  Synthetic construct
ctacatttccttgcca

SEQ ID NO: 9041 - DNA, 16 bp, Artificial Sequence
  Synthetic construct
ctacccacaaaggtgc

SEQ ID NO: 9042 - DNA, 16 bp, Artificial Sequence
  Synthetic construct
ctacccacaaaggtgc

SEQ ID NO: 9043 - DNA, 16 bp, Artificial Sequence
  Synthetic construct
ctacgtcagacgcttt

SEQ ID NO: 9044 - DNA, 16 bp, Artificial Sequence
  Synthetic construct
ctacgtcagacgcttt

SEQ ID NO: 9045 - DNA, 16 bp, Artificial Sequence
  Synthetic construct
ctagagtcaaaggaag

SEQ ID NO: 9046 - DNA, 16 bp, Artificial Sequence
  Synthetic construct
ctagagtcaaaggaag

SEQ ID NO: 9047 - DNA, 16 bp, Artificial Sequence
  Synthetic construct
ctagagttcaaccaac

SEQ ID NO: 9048 - DNA, 16 bp, Artificial Sequence
  Synthetic construct
ctagagttcaaccaac

SEQ ID NO: 9049 - DNA, 16 bp, Artificial Sequence
  Synthetic construct
ctagcctagcgtttac

SEQ ID NO: 9050 - DNA, 16 bp, Artificial Sequence
  Synthetic construct
ctagcctagcgtttac

SEQ ID NO: 9051 - DNA, 16 bp, Artificial Sequence
  Synthetic construct
ctagcctgttcagact

SEQ ID NO: 9052 - DNA, 16 bp, Artificial Sequence
  Synthetic construct
ctagcctgttcagact

SEQ ID NO: 9053 - DNA, 16 bp, Artificial Sequence
  Synthetic construct
ctagccttcctctagc

SEQ ID NO: 9054 - DNA, 16 bp, Artificial Sequence
  Synthetic construct
ctagccttcctctagc

SEQ ID NO: 9055 - DNA, 16 bp, Artificial Sequence
  Synthetic construct
ctagtgagtcgcgtgt

SEQ ID NO: 9056 - DNA, 16 bp, Artificial Sequence
  Synthetic construct
ctagtgagtcgcgtgt

SEQ ID NO: 9057 - DNA, 16 bp, Artificial Sequence
  Synthetic construct
ctcacacagagatgag

SEQ ID NO: 9058 - DNA, 16 bp, Artificial Sequence
  Synthetic construct
ctcacacagagatgag

SEQ ID NO: 9059 - DNA, 16 bp, Artificial Sequence
  Synthetic construct
ctcacacagcctatgt

SEQ ID NO: 9060 - DNA, 16 bp, Artificial Sequence
  Synthetic construct
ctcacacagcctatgt

SEQ ID NO: 9061 - DNA, 16 bp, Artificial Sequence
  Synthetic construct
ctcagaatcgtaggtt

SEQ ID NO: 9062 - DNA, 16 bp, Artificial Sequence
  Synthetic construct
ctcagaatcgtaggtt

SEQ ID NO: 9063 - DNA, 16 bp, Artificial Sequence
  Synthetic construct
ctcattagtattaccg

SEQ ID NO: 9064 - DNA, 16 bp, Artificial Sequence
  Synthetic construct
ctcattagtattaccg

SEQ ID NO: 9065 - DNA, 16 bp, Artificial Sequence
  Synthetic construct
ctcattagttcacggc

SEQ ID NO: 9066 - DNA, 16 bp, Artificial Sequence
  Synthetic construct
ctcattagttcacggc

SEQ ID NO: 9067 - DNA, 16 bp, Artificial Sequence
  Synthetic construct
ctcctagtcaaagtag

SEQ ID NO: 9068 - DNA, 16 bp, Artificial Sequence
  Synthetic construct
ctcctagtcaaagtag

SEQ ID NO: 9069 - DNA, 16 bp, Artificial Sequence
  Synthetic construct
ctcgaaaagcgcttat

SEQ ID NO: 9070 - DNA, 16 bp, Artificial Sequence
  Synthetic construct
ctcgaaaagcgcttat

SEQ ID NO: 9071 - DNA, 16 bp, Artificial Sequence
  Synthetic construct
ctcgaggagtgaacat

SEQ ID NO: 9072 - DNA, 16 bp, Artificial Sequence
  Synthetic construct
ctcgaggagtgaacat

SEQ ID NO: 9073 - DNA, 16 bp, Artificial Sequence
  Synthetic construct
ctcgaggagttagcgg

SEQ ID NO: 9074 - DNA, 16 bp, Artificial Sequence
  Synthetic construct
ctcgaggagttagcgg

SEQ ID NO: 9075 - DNA, 16 bp, Artificial Sequence
  Synthetic construct
ctcgaggtccgcaagc

SEQ ID NO: 9076 - DNA, 16 bp, Artificial Sequence
  Synthetic construct
ctcgaggtccgcaagc

SEQ ID NO: 9077 - DNA, 16 bp, Artificial Sequence
  Synthetic construct
ctcgaggtcgccctta

SEQ ID NO: 9078 - DNA, 16 bp, Artificial Sequence
  Synthetic construct
ctcgaggtcgccctta

SEQ ID NO: 9079 - DNA, 16 bp, Artificial Sequence
  Synthetic construct
ctcggagagggtgttg

SEQ ID NO: 9080 - DNA, 16 bp, Artificial Sequence
  Synthetic construct
ctcggagagggtgttg

SEQ ID NO: 9081 - DNA, 16 bp, Artificial Sequence
  Synthetic construct
ctcggagcaccgctag

SEQ ID NO: 9082 - DNA, 16 bp, Artificial Sequence
  Synthetic construct
ctcggagcaccgctag

SEQ ID NO: 9083 - DNA, 16 bp, Artificial Sequence
  Synthetic construct
ctcggaggtgactcat

SEQ ID NO: 9084 - DNA, 16 bp, Artificial Sequence
  Synthetic construct
ctcggaggtgactcat

SEQ ID NO: 9085 - DNA, 16 bp, Artificial Sequence
  Synthetic construct
ctcggagtcatgtagc

SEQ ID NO: 9086 - DNA, 16 bp, Artificial Sequence
  Synthetic construct
ctcggagtcatgtagc

SEQ ID NO: 9087 - DNA, 16 bp, Artificial Sequence
  Synthetic construct
ctcgggaaggaattac

SEQ ID NO: 9088 - DNA, 16 bp, Artificial Sequence
  Synthetic construct
ctcgggaaggaattac

SEQ ID NO: 9089 - DNA, 16 bp, Artificial Sequence
  Synthetic construct
ctcgggacacagtcgc

SEQ ID NO: 9090 - DNA, 16 bp, Artificial Sequence
  Synthetic construct
ctcgggacacagtcgc

SEQ ID NO: 9091 - DNA, 16 bp, Artificial Sequence
  Synthetic construct
ctcgggagtcgctttc

SEQ ID NO: 9092 - DNA, 16 bp, Artificial Sequence
  Synthetic construct
ctcgggagtcgctttc

SEQ ID NO: 9093 - DNA, 16 bp, Artificial Sequence
  Synthetic construct
ctcgtacagtatgaca

SEQ ID NO: 9094 - DNA, 16 bp, Artificial Sequence
  Synthetic construct
ctcgtacagtatgaca

SEQ ID NO: 9095 - DNA, 16 bp, Artificial Sequence
  Synthetic construct
ctcgtacgtctggtcg

SEQ ID NO: 9096 - DNA, 16 bp, Artificial Sequence
  Synthetic construct
ctcgtacgtctggtcg

SEQ ID NO: 9097 - DNA, 16 bp, Artificial Sequence
  Synthetic construct
ctcgtcagtcaatgtc

SEQ ID NO: 9098 - DNA, 16 bp, Artificial Sequence
  Synthetic construct
ctcgtcagtcaatgtc

SEQ ID NO: 9099 - DNA, 16 bp, Artificial Sequence
  Synthetic construct
ctctaatagtcttgca

SEQ ID NO: 9100 - DNA, 16 bp, Artificial Sequence
  Synthetic construct
ctctaatagtcttgca

SEQ ID NO: 9101 - DNA, 16 bp, Artificial Sequence
  Synthetic construct
ctctaatcagggcata

SEQ ID NO: 9102 - DNA, 16 bp, Artificial Sequence
  Synthetic construct
ctctaatcagggcata

SEQ ID NO: 9103 - DNA, 16 bp, Artificial Sequence
  Synthetic construct
ctctacggtcaaagat

SEQ ID NO: 9104 - DNA, 16 bp, Artificial Sequence
  Synthetic construct
ctctacggtcaaagat

SEQ ID NO: 9105 - DNA, 16 bp, Artificial Sequence
  Synthetic construct
ctctacgtcagaaatg

SEQ ID NO: 9106 - DNA, 16 bp, Artificial Sequence
  Synthetic construct
ctctacgtcagaaatg

SEQ ID NO: 9107 - DNA, 16 bp, Artificial Sequence
  Synthetic construct
ctctacgtcgcatggc

SEQ ID NO: 9108 - DNA, 16 bp, Artificial Sequence
  Synthetic construct
ctctacgtcgcatggc

SEQ ID NO: 9109 - DNA, 16 bp, Artificial Sequence
  Synthetic construct
ctctggtcaatggaat

SEQ ID NO: 9110 - DNA, 16 bp, Artificial Sequence
  Synthetic construct
ctctggtcaatggaat

SEQ ID NO: 9111 - DNA, 16 bp, Artificial Sequence
  Synthetic construct
ctctggtgtccgctga

SEQ ID NO: 9112 - DNA, 16 bp, Artificial Sequence
  Synthetic construct
ctctggtgtccgctga

SEQ ID NO: 9113 - DNA, 16 bp, Artificial Sequence
  Synthetic construct
ctgaaaccagctcgca

SEQ ID NO: 9114 - DNA, 16 bp, Artificial Sequence
  Synthetic construct
ctgaaaccagctcgca

SEQ ID NO: 9115 - DNA, 16 bp, Artificial Sequence
  Synthetic construct
ctgaaactcaataccg

SEQ ID NO: 9116 - DNA, 16 bp, Artificial Sequence
  Synthetic construct
ctgaaactcaataccg

SEQ ID NO: 9117 - DNA, 16 bp, Artificial Sequence
  Synthetic construct
ctgaaactcctttctc

SEQ ID NO: 9118 - DNA, 16 bp, Artificial Sequence
  Synthetic construct
ctgaaactcctttctc

SEQ ID NO: 9119 - DNA, 16 bp, Artificial Sequence
  Synthetic construct
ctgaagtgtagcctcg

SEQ ID NO: 9120 - DNA, 16 bp, Artificial Sequence
  Synthetic construct
ctgaagtgtagcctcg

SEQ ID NO: 9121 - DNA, 16 bp, Artificial Sequence
  Synthetic construct
ctgaagtgtgcacgaa

SEQ ID NO: 9122 - DNA, 16 bp, Artificial Sequence
  Synthetic construct
ctgaagtgtgcacgaa

SEQ ID NO: 9123 - DNA, 16 bp, Artificial Sequence
  Synthetic construct
ctgaagttcttcaact

SEQ ID NO: 9124 - DNA, 16 bp, Artificial Sequence
  Synthetic construct
ctgaagttcttcaact

SEQ ID NO: 9125 - DNA, 16 bp, Artificial Sequence
  Synthetic construct
ctgatagcacttggat

SEQ ID NO: 9126 - DNA, 16 bp, Artificial Sequence
  Synthetic construct
ctgatagcacttggat

SEQ ID NO: 9127 - DNA, 16 bp, Artificial Sequence
  Synthetic construct
ctgatagcattgggcc

SEQ ID NO: 9128 - DNA, 16 bp, Artificial Sequence
  Synthetic construct
ctgatagcattgggcc

SEQ ID NO: 9129 - DNA, 16 bp, Artificial Sequence
  Synthetic construct
ctgataggtgctcttc

SEQ ID NO: 9130 - DNA, 16 bp, Artificial Sequence
  Synthetic construct
ctgataggtgctcttc

SEQ ID NO: 9131 - DNA, 16 bp, Artificial Sequence
  Synthetic construct
ctgatagtctttagtc

SEQ ID NO: 9132 - DNA, 16 bp, Artificial Sequence
  Synthetic construct
ctgatagtctttagtc

SEQ ID NO: 9133 - DNA, 16 bp, Artificial Sequence
  Synthetic construct
ctgatccgttatgcgt

SEQ ID NO: 9134 - DNA, 16 bp, Artificial Sequence
  Synthetic construct
ctgatccgttatgcgt

SEQ ID NO: 9135 - DNA, 16 bp, Artificial Sequence
  Synthetic construct
ctgcctatcgccagca

SEQ ID NO: 9136 - DNA, 16 bp, Artificial Sequence
  Synthetic construct
ctgcctatcgccagca

SEQ ID NO: 9137 - DNA, 16 bp, Artificial Sequence
  Synthetic construct
ctgcggaagttgtaga

SEQ ID NO: 9138 - DNA, 16 bp, Artificial Sequence
  Synthetic construct
ctgcggaagttgtaga

SEQ ID NO: 9139 - DNA, 16 bp, Artificial Sequence
  Synthetic construct
ctgcggacatactacg

SEQ ID NO: 9140 - DNA, 16 bp, Artificial Sequence
  Synthetic construct
ctgcggacatactacg

SEQ ID NO: 9141 - DNA, 16 bp, Artificial Sequence
  Synthetic construct
ctgctgtcattcctgc

SEQ ID NO: 9142 - DNA, 16 bp, Artificial Sequence
  Synthetic construct
ctgctgtcattcctgc

SEQ ID NO: 9143 - DNA, 16 bp, Artificial Sequence
  Synthetic construct
ctggtctagtacgccc

SEQ ID NO: 9144 - DNA, 16 bp, Artificial Sequence
  Synthetic construct
ctggtctagtacgccc

SEQ ID NO: 9145 - DNA, 16 bp, Artificial Sequence
  Synthetic construct
ctgtgctagtatcgaa

SEQ ID NO: 9146 - DNA, 16 bp, Artificial Sequence
  Synthetic construct
ctgtgctagtatcgaa

SEQ ID NO: 9147 - DNA, 16 bp, Artificial Sequence
  Synthetic construct
ctgtgctcatcaccct

SEQ ID NO: 9148 - DNA, 16 bp, Artificial Sequence
  Synthetic construct
ctgtgctcatcaccct

SEQ ID NO: 9149 - DNA, 16 bp, Artificial Sequence
  Synthetic construct
ctgtgcttccgcataa

SEQ ID NO: 9150 - DNA, 16 bp, Artificial Sequence
  Synthetic construct
ctgtgcttccgcataa

SEQ ID NO: 9151 - DNA, 16 bp, Artificial Sequence
  Synthetic construct
cttaactagccagtag

SEQ ID NO: 9152 - DNA, 16 bp, Artificial Sequence
  Synthetic construct
cttaactagccagtag

SEQ ID NO: 9153 - DNA, 16 bp, Artificial Sequence
  Synthetic construct
cttaactgtcgaacag

SEQ ID NO: 9154 - DNA, 16 bp, Artificial Sequence
  Synthetic construct
cttaactgtcgaacag

SEQ ID NO: 9155 - DNA, 16 bp, Artificial Sequence
  Synthetic construct
cttaacttccatgagt

SEQ ID NO: 9156 - DNA, 16 bp, Artificial Sequence
  Synthetic construct
cttaacttccatgagt

SEQ ID NO: 9157 - DNA, 16 bp, Artificial Sequence
  Synthetic construct
cttaccgaggctctta

SEQ ID NO: 9158 - DNA, 16 bp, Artificial Sequence
  Synthetic construct
cttaccgaggctctta

SEQ ID NO: 9159 - DNA, 16 bp, Artificial Sequence
  Synthetic construct
cttaccgcacttacga

SEQ ID NO: 9160 - DNA, 16 bp, Artificial Sequence
  Synthetic construct
cttaccgcacttacga

SEQ ID NO: 9161 - DNA, 16 bp, Artificial Sequence
  Synthetic construct
cttggctcacaggcct

SEQ ID NO: 9162 - DNA, 16 bp, Artificial Sequence
  Synthetic construct
cttggctcacaggcct

SEQ ID NO: 9163 - DNA, 16 bp, Artificial Sequence
  Synthetic construct
cttggctcagtatgct

SEQ ID NO: 9164 - DNA, 16 bp, Artificial Sequence
  Synthetic construct
cttggctcagtatgct

SEQ ID NO: 9165 - DNA, 16 bp, Artificial Sequence
  Synthetic construct
ctttgcgagggtttct

SEQ ID NO: 9166 - DNA, 16 bp, Artificial Sequence
  Synthetic construct
ctttgcgagggtttct

SEQ ID NO: 9167 - DNA, 16 bp, Artificial Sequence
  Synthetic construct
ctttgcgcagattgct

SEQ ID NO: 9168 - DNA, 16 bp, Artificial Sequence
  Synthetic construct
ctttgcgcagattgct

SEQ ID NO: 9169 - DNA, 16 bp, Artificial Sequence
  Synthetic construct
gaaactcgtatagggc

SEQ ID NO: 9170 - DNA, 16 bp, Artificial Sequence
  Synthetic construct
gaaactcgtatagggc

SEQ ID NO: 9171 - DNA, 16 bp, Artificial Sequence
  Synthetic construct
gaacatcagtagtgcg

SEQ ID NO: 9172 - DNA, 16 bp, Artificial Sequence
  Synthetic construct
gaacatcagtagtgcg

SEQ ID NO: 9173 - DNA, 16 bp, Artificial Sequence
  Synthetic construct
gaacatccaggtgcct

SEQ ID NO: 9174 - DNA, 16 bp, Artificial Sequence
  Synthetic construct
gaacatccaggtgcct

SEQ ID NO: 9175 - DNA, 16 bp, Artificial Sequence
  Synthetic construct
gaacatctcattcact

SEQ ID NO: 9176 - DNA, 16 bp, Artificial Sequence
  Synthetic construct
gaacatctcattcact

SEQ ID NO: 9177 - DNA, 16 bp, Artificial Sequence
  Synthetic construct
gaacctaagtccggtc

SEQ ID NO: 9178 - DNA, 16 bp, Artificial Sequence
  Synthetic construct
gaacctaagtccggtc

SEQ ID NO: 9179 - DNA, 16 bp, Artificial Sequence
  Synthetic construct
gaacggacacgaaagc

SEQ ID NO: 9180 - DNA, 16 bp, Artificial Sequence
  Synthetic construct
gaacggacacgaaagc

SEQ ID NO: 9181 - DNA, 16 bp, Artificial Sequence
  Synthetic construct
gaacggatccaagtac

SEQ ID NO: 9182 - DNA, 16 bp, Artificial Sequence
  Synthetic construct
gaacggatccaagtac

SEQ ID NO: 9183 - DNA, 16 bp, Artificial Sequence
  Synthetic construct
gaagcagcacgaggta

SEQ ID NO: 9184 - DNA, 16 bp, Artificial Sequence
  Synthetic construct
gaagcagcacgaggta

SEQ ID NO: 9185 - DNA, 16 bp, Artificial Sequence
  Synthetic construct
gaagcagtcagagctt

SEQ ID NO: 9186 - DNA, 16 bp, Artificial Sequence
  Synthetic construct
gaagcagtcagagctt

SEQ ID NO: 9187 - DNA, 16 bp, Artificial Sequence
  Synthetic construct
gaataagagagctggt

SEQ ID NO: 9188 - DNA, 16 bp, Artificial Sequence
  Synthetic construct
gaataagagagctggt

SEQ ID NO: 9189 - DNA, 16 bp, Artificial Sequence
  Synthetic construct
gaataagagcgtgaac

SEQ ID NO: 9190 - DNA, 16 bp, Artificial Sequence
  Synthetic construct
gaataagagcgtgaac

SEQ ID NO: 9191 - DNA, 16 bp, Artificial Sequence
  Synthetic construct
gaatgaaagaaaccta

SEQ ID NO: 9192 - DNA, 16 bp, Artificial Sequence
  Synthetic construct
gaatgaaagaaaccta

SEQ ID NO: 9193 - DNA, 16 bp, Artificial Sequence
  Synthetic construct
gaatgaagtttgacac

SEQ ID NO: 9194 - DNA, 16 bp, Artificial Sequence
  Synthetic construct
gaatgaagtttgacac

SEQ ID NO: 9195 - DNA, 16 bp, Artificial Sequence
  Synthetic construct
gacacgccacggttta

SEQ ID NO: 9196 - DNA, 16 bp, Artificial Sequence
  Synthetic construct
gacacgccacggttta

SEQ ID NO: 9197 - DNA, 16 bp, Artificial Sequence
  Synthetic construct
gacacgcgtaaatacg

SEQ ID NO: 9198 - DNA, 16 bp, Artificial Sequence
  Synthetic construct
gacacgcgtaaatacg

SEQ ID NO: 9199 - DNA, 16 bp, Artificial Sequence
  Synthetic construct
gacacgctcgcatgat

SEQ ID NO: 9200 - DNA, 16 bp, Artificial Sequence
  Synthetic construct
gacacgctcgcatgat

SEQ ID NO: 9201 - DNA, 16 bp, Artificial Sequence
  Synthetic construct
gaccaatcatgcatgt

SEQ ID NO: 9202 - DNA, 16 bp, Artificial Sequence
  Synthetic construct
gaccaatcatgcatgt

SEQ ID NO: 9203 - DNA, 16 bp, Artificial Sequence
  Synthetic construct
gaccaatgtcttcaag

SEQ ID NO: 9204 - DNA, 16 bp, Artificial Sequence
  Synthetic construct
gaccaatgtcttcaag

SEQ ID NO: 9205 - DNA, 16 bp, Artificial Sequence
  Synthetic construct
gacgcgtagtgccaga

SEQ ID NO: 9206 - DNA, 16 bp, Artificial Sequence
  Synthetic construct
gacgcgtagtgccaga

SEQ ID NO: 9207 - DNA, 16 bp, Artificial Sequence
  Synthetic construct
gacgcgtgttagggtg

SEQ ID NO: 9208 - DNA, 16 bp, Artificial Sequence
  Synthetic construct
gacgcgtgttagggtg

SEQ ID NO: 9209 - DNA, 16 bp, Artificial Sequence
  Synthetic construct
gacggctcaaattgcc

SEQ ID NO: 9210 - DNA, 16 bp, Artificial Sequence
  Synthetic construct
gacggctcaaattgcc

SEQ ID NO: 9211 - DNA, 16 bp, Artificial Sequence
  Synthetic construct
gacggctcaattcctt

SEQ ID NO: 9212 - DNA, 16 bp, Artificial Sequence
  Synthetic construct
gacggctcaattcctt

SEQ ID NO: 9213 - DNA, 16 bp, Artificial Sequence
  Synthetic construct
gacggctcacatgact

SEQ ID NO: 9214 - DNA, 16 bp, Artificial Sequence
  Synthetic construct
gacggctcacatgact

SEQ ID NO: 9215 - DNA, 16 bp, Artificial Sequence
  Synthetic construct
gacggcttcaagatcc

SEQ ID NO: 9216 - DNA, 16 bp, Artificial Sequence
  Synthetic construct
gacggcttcaagatcc

SEQ ID NO: 9217 - DNA, 16 bp, Artificial Sequence
  Synthetic construct
gacggcttcaccgtaa

SEQ ID NO: 9218 - DNA, 16 bp, Artificial Sequence
  Synthetic construct
gacggcttcaccgtaa

SEQ ID NO: 9219 - DNA, 16 bp, Artificial Sequence
  Synthetic construct
gacgtgctctttcctc

SEQ ID NO: 9220 - DNA, 16 bp, Artificial Sequence
  Synthetic construct
gacgtgctctttcctc

SEQ ID NO: 9221 - DNA, 16 bp, Artificial Sequence
  Synthetic construct
gacgttatcgatccct

SEQ ID NO: 9222 - DNA, 16 bp, Artificial Sequence
  Synthetic construct
gacgttatcgatccct

SEQ ID NO: 9223 - DNA, 16 bp, Artificial Sequence
  Synthetic construct
gactacagtagctaaa

SEQ ID NO: 9224 - DNA, 16 bp, Artificial Sequence
  Synthetic construct
gactacagtagctaaa

SEQ ID NO: 9225 - DNA, 16 bp, Artificial Sequence
  Synthetic construct
gactacagtcggcatc

SEQ ID NO: 9226 - DNA, 16 bp, Artificial Sequence
  Synthetic construct
gactacagtcggcatc

SEQ ID NO: 9227 - DNA, 16 bp, Artificial Sequence
  Synthetic construct
gactacatcagtgcat

SEQ ID NO: 9228 - DNA, 16 bp, Artificial Sequence
  Synthetic construct
gactacatcagtgcat

SEQ ID NO: 9229 - DNA, 16 bp, Artificial Sequence
  Synthetic construct
gactgcgagccagtag

SEQ ID NO: 9230 - DNA, 16 bp, Artificial Sequence
  Synthetic construct
gactgcgagccagtag

SEQ ID NO: 9231 - DNA, 16 bp, Artificial Sequence
  Synthetic construct
gactgcgtccaaacac

SEQ ID NO: 9232 - DNA, 16 bp, Artificial Sequence
  Synthetic construct
gactgcgtccaaacac

SEQ ID NO: 9233 - DNA, 16 bp, Artificial Sequence
  Synthetic construct
gagcagaagggcttga

SEQ ID NO: 9234 - DNA, 16 bp, Artificial Sequence
  Synthetic construct
gagcagaagggcttga

SEQ ID NO: 9235 - DNA, 16 bp, Artificial Sequence
  Synthetic construct
gagcagatctgtcaag

SEQ ID NO: 9236 - DNA, 16 bp, Artificial Sequence
  Synthetic construct
gagcagatctgtcaag

SEQ ID NO: 9237 - DNA, 16 bp, Artificial Sequence
  Synthetic construct
gaggtgacatacgccg

SEQ ID NO: 9238 - DNA, 16 bp, Artificial Sequence
  Synthetic construct
gaggtgacatacgccg

SEQ ID NO: 9239 - DNA, 16 bp, Artificial Sequence
  Synthetic construct
gaggtgacattaggct

SEQ ID NO: 9240 - DNA, 16 bp, Artificial Sequence
  Synthetic construct
gaggtgacattaggct

SEQ ID NO: 9241 - DNA, 16 bp, Artificial Sequence
  Synthetic construct
gaggtgagttaccagt

SEQ ID NO: 9242 - DNA, 16 bp, Artificial Sequence
  Synthetic construct
gaggtgagttaccagt

SEQ ID NO: 9243 - DNA, 16 bp, Artificial Sequence
  Synthetic construct
gatcagtgtaagggaa

SEQ ID NO: 9244 - DNA, 16 bp, Artificial Sequence
  Synthetic construct
gatcagtgtaagggaa

SEQ ID NO: 9245 - DNA, 16 bp, Artificial Sequence
  Synthetic construct
gatcagtgtgttgagg

SEQ ID NO: 9246 - DNA, 16 bp, Artificial Sequence
  Synthetic construct
gatcagtgtgttgagg

SEQ ID NO: 9247 - DNA, 16 bp, Artificial Sequence
  Synthetic construct
gatcgatcatgccacg

SEQ ID NO: 9248 - DNA, 16 bp, Artificial Sequence
  Synthetic construct
gatcgatcatgccacg

SEQ ID NO: 9249 - DNA, 16 bp, Artificial Sequence
  Synthetic construct
gatcgatgtcggctca

SEQ ID NO: 9250 - DNA, 16 bp, Artificial Sequence
  Synthetic construct
gatcgatgtcggctca

SEQ ID NO: 9251 - DNA, 16 bp, Artificial Sequence
  Synthetic construct
gatcgcgtctggcgac

SEQ ID NO: 9252 - DNA, 16 bp, Artificial Sequence
  Synthetic construct
gatcgcgtctggcgac

SEQ ID NO: 9253 - DNA, 16 bp, Artificial Sequence
  Synthetic construct
gatcgtaagcgttccg

SEQ ID NO: 9254 - DNA, 16 bp, Artificial Sequence
  Synthetic construct
gatcgtaagcgttccg

SEQ ID NO: 9255 - DNA, 16 bp, Artificial Sequence
  Synthetic construct
gatcgtacagtccttc

SEQ ID NO: 9256 - DNA, 16 bp, Artificial Sequence
  Synthetic construct
gatcgtacagtccttc

SEQ ID NO: 9257 - DNA, 16 bp, Artificial Sequence
  Synthetic construct
gatctagagcgccttg

SEQ ID NO: 9258 - DNA, 16 bp, Artificial Sequence
  Synthetic construct
gatctagagcgccttg

SEQ ID NO: 9259 - DNA, 16 bp, Artificial Sequence
  Synthetic construct
gatctagtcgttgaca

SEQ ID NO: 9260 - DNA, 16 bp, Artificial Sequence
  Synthetic construct
gatctagtcgttgaca

SEQ ID NO: 9261 - DNA, 16 bp, Artificial Sequence
  Synthetic construct
gatgaaaaggtgatat

SEQ ID NO: 9262 - DNA, 16 bp, Artificial Sequence
  Synthetic construct
gatgaaaaggtgatat

SEQ ID NO: 9263 - DNA, 16 bp, Artificial Sequence
  Synthetic construct
gatgaaacacgaggta

SEQ ID NO: 9264 - DNA, 16 bp, Artificial Sequence
  Synthetic construct
gatgaaacacgaggta

SEQ ID NO: 9265 - DNA, 16 bp, Artificial Sequence
  Synthetic construct
gatgaggcaggtcgtc

SEQ ID NO: 9266 - DNA, 16 bp, Artificial Sequence
  Synthetic construct
gatgaggcaggtcgtc

SEQ ID NO: 9267 - DNA, 16 bp, Artificial Sequence
  Synthetic construct
gatgaggtctgacctc

SEQ ID NO: 9268 - DNA, 16 bp, Artificial Sequence
  Synthetic construct
gatgaggtctgacctc

SEQ ID NO: 9269 - DNA, 16 bp, Artificial Sequence
  Synthetic construct
gatgctatcgcaggct

SEQ ID NO: 9270 - DNA, 16 bp, Artificial Sequence
  Synthetic construct
gatgctatcgcaggct

SEQ ID NO: 9271 - DNA, 16 bp, Artificial Sequence
  Synthetic construct
gattcagcaagtacct

SEQ ID NO: 9272 - DNA, 16 bp, Artificial Sequence
  Synthetic construct
gattcagcaagtacct

SEQ ID NO: 9273 - DNA, 16 bp, Artificial Sequence
  Synthetic construct
gattcagcattcgaca

SEQ ID NO: 9274 - DNA, 16 bp, Artificial Sequence
  Synthetic construct
gattcagcattcgaca

SEQ ID NO: 9275 - DNA, 16 bp, Artificial Sequence
  Synthetic construct
gattcagcattgcggc

SEQ ID NO: 9276 - DNA, 16 bp, Artificial Sequence
  Synthetic construct
gattcagcattgcggc

SEQ ID NO: 9277 - DNA, 16 bp, Artificial Sequence
  Synthetic construct
gattcaggtatatgga

SEQ ID NO: 9278 - DNA, 16 bp, Artificial Sequence
  Synthetic construct
gattcaggtatatgga

SEQ ID NO: 9279 - DNA, 16 bp, Artificial Sequence
  Synthetic construct
gattcagtccagatca

SEQ ID NO: 9280 - DNA, 16 bp, Artificial Sequence
  Synthetic construct
gattcagtccagatca

SEQ ID NO: 9281 - DNA, 16 bp, Artificial Sequence
  Synthetic construct
gattcagtcggagcaa

SEQ ID NO: 9282 - DNA, 16 bp, Artificial Sequence
  Synthetic construct
gattcagtcggagcaa

SEQ ID NO: 9283 - DNA, 16 bp, Artificial Sequence
  Synthetic construct
gcaaactgtaccatca

SEQ ID NO: 9284 - DNA, 16 bp, Artificial Sequence
  Synthetic construct
gcaaactgtaccatca

SEQ ID NO: 9285 - DNA, 16 bp, Artificial Sequence
  Synthetic construct
gcaaactgtcactggc

SEQ ID NO: 9286 - DNA, 16 bp, Artificial Sequence
  Synthetic construct
gcaaactgtcactggc

SEQ ID NO: 9287 - DNA, 16 bp, Artificial Sequence
  Synthetic construct
gcaaacttcaaccaac

SEQ ID NO: 9288 - DNA, 16 bp, Artificial Sequence
  Synthetic construct
gcaaacttcaaccaac

SEQ ID NO: 9289 - DNA, 16 bp, Artificial Sequence
  Synthetic construct
gcaatcacaaacgcga

SEQ ID NO: 9290 - DNA, 16 bp, Artificial Sequence
  Synthetic construct
gcaatcacaaacgcga

SEQ ID NO: 9291 - DNA, 16 bp, Artificial Sequence
  Synthetic construct
gcaatcagttgaactc

SEQ ID NO: 9292 - DNA, 16 bp, Artificial Sequence
  Synthetic construct
gcaatcagttgaactc

SEQ ID NO: 9293 - DNA, 16 bp, Artificial Sequence
  Synthetic construct
gcacatacacaagtaa

SEQ ID NO: 9294 - DNA, 16 bp, Artificial Sequence
  Synthetic construct
gcacatacacaagtaa

SEQ ID NO: 9295 - DNA, 16 bp, Artificial Sequence
  Synthetic construct
gcacatagtctaaacc

SEQ ID NO: 9296 - DNA, 16 bp, Artificial Sequence
  Synthetic construct
gcacatagtctaaacc

SEQ ID NO: 9297 - DNA, 16 bp, Artificial Sequence
  Synthetic construct
gcacatatcgaatgct

SEQ ID NO: 9298 - DNA, 16 bp, Artificial Sequence
  Synthetic construct
gcacatatcgaatgct

SEQ ID NO: 9299 - DNA, 16 bp, Artificial Sequence
  Synthetic construct
gcactctagaccacga

SEQ ID NO: 9300 - DNA, 16 bp, Artificial Sequence
  Synthetic construct
gcactctagaccacga

SEQ ID NO: 9301 - DNA, 16 bp, Artificial Sequence
  Synthetic construct
gcactctgtgcagaca

SEQ ID NO: 9302 - DNA, 16 bp, Artificial Sequence
  Synthetic construct
gcactctgtgcagaca

SEQ ID NO: 9303 - DNA, 16 bp, Artificial Sequence
  Synthetic construct
gcagccagtacctaca

SEQ ID NO: 9304 - DNA, 16 bp, Artificial Sequence
  Synthetic construct
gcagccagtacctaca

SEQ ID NO: 9305 - DNA, 16 bp, Artificial Sequence
  Synthetic construct
gcagttacagtcagag

SEQ ID NO: 9306 - DNA, 16 bp, Artificial Sequence
  Synthetic construct
gcagttacagtcagag

SEQ ID NO: 9307 - DNA, 16 bp, Artificial Sequence
  Synthetic construct
gcagttagtaaggatt

SEQ ID NO: 9308 - DNA, 16 bp, Artificial Sequence
  Synthetic construct
gcagttagtaaggatt

SEQ ID NO: 9309 - DNA, 16 bp, Artificial Sequence
  Synthetic construct
gcagttatcgtctgct

SEQ ID NO: 9310 - DNA, 16 bp, Artificial Sequence
  Synthetic construct
gcagttatcgtctgct

SEQ ID NO: 9311 - DNA, 16 bp, Artificial Sequence
  Synthetic construct
gcatacagtaagagag

SEQ ID NO: 9312 - DNA, 16 bp, Artificial Sequence
  Synthetic construct
gcatacagtaagagag

SEQ ID NO: 9313 - DNA, 16 bp, Artificial Sequence
  Synthetic construct
gcatgatcaggctgaa

SEQ ID NO: 9314 - DNA, 16 bp, Artificial Sequence
  Synthetic construct
gcatgatcaggctgaa

SEQ ID NO: 9315 - DNA, 16 bp, Artificial Sequence
  Synthetic construct
gcatgcggtgtgaata

SEQ ID NO: 9316 - DNA, 16 bp, Artificial Sequence
  Synthetic construct
gcatgcggtgtgaata

SEQ ID NO: 9317 - DNA, 16 bp, Artificial Sequence
  Synthetic construct
gcctctacaaagtgcg

SEQ ID NO: 9318 - DNA, 16 bp, Artificial Sequence
  Synthetic construct
gcctctacaaagtgcg

SEQ ID NO: 9319 - DNA, 16 bp, Artificial Sequence
  Synthetic construct
gcctctagtagagctg

SEQ ID NO: 9320 - DNA, 16 bp, Artificial Sequence
  Synthetic construct
gcctctagtagagctg

SEQ ID NO: 9321 - DNA, 16 bp, Artificial Sequence
  Synthetic construct
gcctctatcacagtac

SEQ ID NO: 9322 - DNA, 16 bp, Artificial Sequence
  Synthetic construct
gcctctatcacagtac

SEQ ID NO: 9323 - DNA, 16 bp, Artificial Sequence
  Synthetic construct
gcgaccacatccgcga

SEQ ID NO: 9324 - DNA, 16 bp, Artificial Sequence
  Synthetic construct
gcgaccacatccgcga

SEQ ID NO: 9325 - DNA, 16 bp, Artificial Sequence
  Synthetic construct
gcgcaaccatggtcat

SEQ ID NO: 9326 - DNA, 16 bp, Artificial Sequence
  Synthetic construct
gcgcaaccatggtcat

SEQ ID NO: 9327 - DNA, 16 bp, Artificial Sequence
  Synthetic construct
gcgcaacgtaggctga

SEQ ID NO: 9328 - DNA, 16 bp, Artificial Sequence
  Synthetic construct
gcgcaacgtaggctga

SEQ ID NO: 9329 - DNA, 16 bp, Artificial Sequence
  Synthetic construct
gcgcagtcaagggtca

SEQ ID NO: 9330 - DNA, 16 bp, Artificial Sequence
  Synthetic construct
gcgcagtcaagggtca

SEQ ID NO: 9331 - DNA, 16 bp, Artificial Sequence
  Synthetic construct
gcgcagtgttgtggag

SEQ ID NO: 9332 - DNA, 16 bp, Artificial Sequence
  Synthetic construct
gcgcagtgttgtggag

SEQ ID NO: 9333 - DNA, 16 bp, Artificial Sequence
  Synthetic construct
gcgccaagtgtcgctg

SEQ ID NO: 9334 - DNA, 16 bp, Artificial Sequence
  Synthetic construct
gcgccaagtgtcgctg

SEQ ID NO: 9335 - DNA, 16 bp, Artificial Sequence
  Synthetic construct
gcgccaatcatcattc

SEQ ID NO: 9336 - DNA, 16 bp, Artificial Sequence
  Synthetic construct
gcgccaatcatcattc

SEQ ID NO: 9337 - DNA, 16 bp, Artificial Sequence
  Synthetic construct
gcgccaatcctcgcat

SEQ ID NO: 9338 - DNA, 16 bp, Artificial Sequence
  Synthetic construct
gcgccaatcctcgcat

SEQ ID NO: 9339 - DNA, 16 bp, Artificial Sequence
  Synthetic construct
gcgccaatcttatctg

SEQ ID NO: 9340 - DNA, 16 bp, Artificial Sequence
  Synthetic construct
gcgccaatcttatctg

SEQ ID NO: 9341 - DNA, 16 bp, Artificial Sequence
  Synthetic construct
gcgggttcatactctt

SEQ ID NO: 9342 - DNA, 16 bp, Artificial Sequence
  Synthetic construct
gcgggttcatactctt

SEQ ID NO: 9343 - DNA, 16 bp, Artificial Sequence
  Synthetic construct
gcgggttgtgcctgtg

SEQ ID NO: 9344 - DNA, 16 bp, Artificial Sequence
  Synthetic construct
gcgggttgtgcctgtg

SEQ ID NO: 9345 - DNA, 16 bp, Artificial Sequence
  Synthetic construct
gctcctatccactcca

SEQ ID NO: 9346 - DNA, 16 bp, Artificial Sequence
  Synthetic construct
gctcctatccactcca

SEQ ID NO: 9347 - DNA, 16 bp, Artificial Sequence
  Synthetic construct
gctctgtgttacgtca

SEQ ID NO: 9348 - DNA, 16 bp, Artificial Sequence
  Synthetic construct
gctctgtgttacgtca

SEQ ID NO: 9349 - DNA, 16 bp, Artificial Sequence
  Synthetic construct
gctgcagagataggag

SEQ ID NO: 9350 - DNA, 16 bp, Artificial Sequence
  Synthetic construct
gctgcagagataggag

SEQ ID NO: 9351 - DNA, 16 bp, Artificial Sequence
  Synthetic construct
gctgcagtcatgtggt

SEQ ID NO: 9352 - DNA, 16 bp, Artificial Sequence
  Synthetic construct
gctgcagtcatgtggt

SEQ ID NO: 9353 - DNA, 16 bp, Artificial Sequence
  Synthetic construct
gctgcagtccgcaagc

SEQ ID NO: 9354 - DNA, 16 bp, Artificial Sequence
  Synthetic construct
gctgcagtccgcaagc

SEQ ID NO: 9355 - DNA, 16 bp, Artificial Sequence
  Synthetic construct
gctgcgaagttaacga

SEQ ID NO: 9356 - DNA, 16 bp, Artificial Sequence
  Synthetic construct
gctgcgaagttaacga

SEQ ID NO: 9357 - DNA, 16 bp, Artificial Sequence
  Synthetic construct
gctgcttagcaaatca

SEQ ID NO: 9358 - DNA, 16 bp, Artificial Sequence
  Synthetic construct
gctgcttagcaaatca

SEQ ID NO: 9359 - DNA, 16 bp, Artificial Sequence
  Synthetic construct
gctgggtagccaacag

SEQ ID NO: 9360 - DNA, 16 bp, Artificial Sequence
  Synthetic construct
gctgggtagccaacag

SEQ ID NO: 9361 - DNA, 16 bp, Artificial Sequence
  Synthetic construct
gctgggtgtgatgata

SEQ ID NO: 9362 - DNA, 16 bp, Artificial Sequence
  Synthetic construct
gctgggtgtgatgata

SEQ ID NO: 9363 - DNA, 16 bp, Artificial Sequence
  Synthetic construct
gcttgaaagttaacga

SEQ ID NO: 9364 - DNA, 16 bp, Artificial Sequence
  Synthetic construct
gcttgaaagttaacga

SEQ ID NO: 9365 - DNA, 16 bp, Artificial Sequence
  Synthetic construct
ggaaagcagacagaga

SEQ ID NO: 9366 - DNA, 16 bp, Artificial Sequence
  Synthetic construct
ggaaagcagacagaga

SEQ ID NO: 9367 - DNA, 16 bp, Artificial Sequence
  Synthetic construct
ggaaagccagctgcac

SEQ ID NO: 9368 - DNA, 16 bp, Artificial Sequence
  Synthetic construct
ggaaagccagctgcac

SEQ ID NO: 9369 - DNA, 16 bp, Artificial Sequence
  Synthetic construct
ggaaagcgtgatgtgg

SEQ ID NO: 9370 - DNA, 16 bp, Artificial Sequence
  Synthetic construct
ggaaagcgtgatgtgg

SEQ ID NO: 9371 - DNA, 16 bp, Artificial Sequence
  Synthetic construct
ggaacttcaaacgtgg

SEQ ID NO: 9372 - DNA, 16 bp, Artificial Sequence
  Synthetic construct
ggaacttcaaacgtgg

SEQ ID NO: 9373 - DNA, 16 bp, Artificial Sequence
  Synthetic construct
ggaacttcatttgctt

SEQ ID NO: 9374 - DNA, 16 bp, Artificial Sequence
  Synthetic construct
ggaacttcatttgctt

SEQ ID NO: 9375 - DNA, 16 bp, Artificial Sequence
  Synthetic construct
ggaacttgtcttcaag

SEQ ID NO: 9376 - DNA, 16 bp, Artificial Sequence
  Synthetic construct
ggaacttgtcttcaag

SEQ ID NO: 9377 - DNA, 16 bp, Artificial Sequence
  Synthetic construct
ggaataatccactggg

SEQ ID NO: 9378 - DNA, 16 bp, Artificial Sequence
  Synthetic construct
ggaataatccactggg

SEQ ID NO: 9379 - DNA, 16 bp, Artificial Sequence
  Synthetic construct
ggacaagagggtctcc

SEQ ID NO: 9380 - DNA, 16 bp, Artificial Sequence
  Synthetic construct
ggacaagagggtctcc

SEQ ID NO: 9381 - DNA, 16 bp, Artificial Sequence
  Synthetic construct
ggacaagtcctagaac

SEQ ID NO: 9382 - DNA, 16 bp, Artificial Sequence
  Synthetic construct
ggacaagtcctagaac

SEQ ID NO: 9383 - DNA, 16 bp, Artificial Sequence
  Synthetic construct
ggacagaagtgtgaat

SEQ ID NO: 9384 - DNA, 16 bp, Artificial Sequence
  Synthetic construct
ggacagaagtgtgaat

SEQ ID NO: 9385 - DNA, 16 bp, Artificial Sequence
  Synthetic construct
ggacattaggcgacat

SEQ ID NO: 9386 - DNA, 16 bp, Artificial Sequence
  Synthetic construct
ggacattaggcgacat

SEQ ID NO: 9387 - DNA, 16 bp, Artificial Sequence
  Synthetic construct
ggacattgtacttgac

SEQ ID NO: 9388 - DNA, 16 bp, Artificial Sequence
  Synthetic construct
ggacattgtacttgac

SEQ ID NO: 9389 - DNA, 16 bp, Artificial Sequence
  Synthetic construct
ggacgtcagctagccc

SEQ ID NO: 9390 - DNA, 16 bp, Artificial Sequence
  Synthetic construct
ggacgtcagctagccc

SEQ ID NO: 9391 - DNA, 16 bp, Artificial Sequence
  Synthetic construct
ggacgtctcggctacg

SEQ ID NO: 9392 - DNA, 16 bp, Artificial Sequence
  Synthetic construct
ggacgtctcggctacg

SEQ ID NO: 9393 - DNA, 16 bp, Artificial Sequence
  Synthetic construct
ggagcaatcgccaaat

SEQ ID NO: 9394 - DNA, 16 bp, Artificial Sequence
  Synthetic construct
ggagcaatcgccaaat

SEQ ID NO: 9395 - DNA, 16 bp, Artificial Sequence
  Synthetic construct
ggatgttaggatgtat

SEQ ID NO: 9396 - DNA, 16 bp, Artificial Sequence
  Synthetic construct
ggatgttaggatgtat

SEQ ID NO: 9397 - DNA, 16 bp, Artificial Sequence
  Synthetic construct
ggatgtttcactctta

SEQ ID NO: 9398 - DNA, 16 bp, Artificial Sequence
  Synthetic construct
ggatgtttcactctta

SEQ ID NO: 9399 - DNA, 16 bp, Artificial Sequence
  Synthetic construct
ggattacgtcaactgt

SEQ ID NO: 9400 - DNA, 16 bp, Artificial Sequence
  Synthetic construct
ggattacgtcaactgt

SEQ ID NO: 9401 - DNA, 16 bp, Artificial Sequence
  Synthetic construct
ggattactcgaggtag

SEQ ID NO: 9402 - DNA, 16 bp, Artificial Sequence
  Synthetic construct
ggattactcgaggtag

SEQ ID NO: 9403 - DNA, 16 bp, Artificial Sequence
  Synthetic construct
ggcaattagcacacag

SEQ ID NO: 9404 - DNA, 16 bp, Artificial Sequence
  Synthetic construct
ggcaattagcacacag

SEQ ID NO: 9405 - DNA, 16 bp, Artificial Sequence
  Synthetic construct
ggctcgaagctgccca

SEQ ID NO: 9406 - DNA, 16 bp, Artificial Sequence
  Synthetic construct
ggctcgaagctgccca

SEQ ID NO: 9407 - DNA, 16 bp, Artificial Sequence
  Synthetic construct
ggctggtagtaggtgc

SEQ ID NO: 9408 - DNA, 16 bp, Artificial Sequence
  Synthetic construct
ggctggtagtaggtgc

SEQ ID NO: 9409 - DNA, 16 bp, Artificial Sequence
  Synthetic construct
ggctggtcaaatacag

SEQ ID NO: 9410 - DNA, 16 bp, Artificial Sequence
  Synthetic construct
ggctggtcaaatacag

SEQ ID NO: 9411 - DNA, 16 bp, Artificial Sequence
  Synthetic construct
ggctggtcacataacc

SEQ ID NO: 9412 - DNA, 16 bp, Artificial Sequence
  Synthetic construct
ggctggtcacataacc

SEQ ID NO: 9413 - DNA, 16 bp, Artificial Sequence
  Synthetic construct
gggaatgagcaggtca

SEQ ID NO: 9414 - DNA, 16 bp, Artificial Sequence
  Synthetic construct
gggaatgagcaggtca

SEQ ID NO: 9415 - DNA, 16 bp, Artificial Sequence
  Synthetic construct
gggaatgagggcttga

SEQ ID NO: 9416 - DNA, 16 bp, Artificial Sequence
  Synthetic construct
gggaatgagggcttga

SEQ ID NO: 9417 - DNA, 16 bp, Artificial Sequence
  Synthetic construct
gggaatggtgacgcct

SEQ ID NO: 9418 - DNA, 16 bp, Artificial Sequence
  Synthetic construct
gggaatggtgacgcct

SEQ ID NO: 9419 - DNA, 16 bp, Artificial Sequence
  Synthetic construct
gggacctagcctatgt

SEQ ID NO: 9420 - DNA, 16 bp, Artificial Sequence
  Synthetic construct
gggacctagcctatgt

SEQ ID NO: 9421 - DNA, 16 bp, Artificial Sequence
  Synthetic construct
gggaccttccagagga

SEQ ID NO: 9422 - DNA, 16 bp, Artificial Sequence
  Synthetic construct
gggaccttccagagga

SEQ ID NO: 9423 - DNA, 16 bp, Artificial Sequence
  Synthetic construct
gggatgagttaagtag

SEQ ID NO: 9424 - DNA, 16 bp, Artificial Sequence
  Synthetic construct
gggatgagttaagtag

SEQ ID NO: 9425 - DNA, 16 bp, Artificial Sequence
  Synthetic construct
gggatgatctgtgcaa

SEQ ID NO: 9426 - DNA, 16 bp, Artificial Sequence
  Synthetic construct
gggatgatctgtgcaa

SEQ ID NO: 9427 - DNA, 16 bp, Artificial Sequence
  Synthetic construct
gggatgatctttacgt

SEQ ID NO: 9428 - DNA, 16 bp, Artificial Sequence
  Synthetic construct
gggatgatctttacgt

SEQ ID NO: 9429 - DNA, 16 bp, Artificial Sequence
  Synthetic construct
gggcactcacatttct

SEQ ID NO: 9430 - DNA, 16 bp, Artificial Sequence
  Synthetic construct
gggcactcacatttct

SEQ ID NO: 9431 - DNA, 16 bp, Artificial Sequence
  Synthetic construct
gggcactcagcgtaag

SEQ ID NO: 9432 - DNA, 16 bp, Artificial Sequence
  Synthetic construct
gggcactcagcgtaag

SEQ ID NO: 9433 - DNA, 16 bp, Artificial Sequence
  Synthetic construct
gggcactcagttcatg

SEQ ID NO: 9434 - DNA, 16 bp, Artificial Sequence
  Synthetic construct
gggcactcagttcatg

SEQ ID NO: 9435 - DNA, 16 bp, Artificial Sequence
  Synthetic construct
gggcactgttaaagac

SEQ ID NO: 9436 - DNA, 16 bp, Artificial Sequence
  Synthetic construct
gggcactgttaaagac

SEQ ID NO: 9437 - DNA, 16 bp, Artificial Sequence
  Synthetic construct
gggcacttccgatatg

SEQ ID NO: 9438 - DNA, 16 bp, Artificial Sequence
  Synthetic construct
gggcacttccgatatg

SEQ ID NO: 9439 - DNA, 16 bp, Artificial Sequence
  Synthetic construct
gggcacttcggtctaa

SEQ ID NO: 9440 - DNA, 16 bp, Artificial Sequence
  Synthetic construct
gggcacttcggtctaa

SEQ ID NO: 9441 - DNA, 16 bp, Artificial Sequence
  Synthetic construct
gggcatccaggtccac

SEQ ID NO: 9442 - DNA, 16 bp, Artificial Sequence
  Synthetic construct
gggcatccaggtccac

SEQ ID NO: 9443 - DNA, 16 bp, Artificial Sequence
  Synthetic construct
gggcatccattaggct

SEQ ID NO: 9444 - DNA, 16 bp, Artificial Sequence
  Synthetic construct
gggcatccattaggct

SEQ ID NO: 9445 - DNA, 16 bp, Artificial Sequence
  Synthetic construct
gggtctgcatatgctg

SEQ ID NO: 9446 - DNA, 16 bp, Artificial Sequence
  Synthetic construct
gggtctgcatatgctg

SEQ ID NO: 9447 - DNA, 16 bp, Artificial Sequence
  Synthetic construct
gggtctggtgtctgat

SEQ ID NO: 9448 - DNA, 16 bp, Artificial Sequence
  Synthetic construct
gggtctggtgtctgat

SEQ ID NO: 9449 - DNA, 16 bp, Artificial Sequence
  Synthetic construct
gggtctgtctggtgta

SEQ ID NO: 9450 - DNA, 16 bp, Artificial Sequence
  Synthetic construct
gggtctgtctggtgta

SEQ ID NO: 9451 - DNA, 16 bp, Artificial Sequence
  Synthetic construct
ggtattgaggcgtaca

SEQ ID NO: 9452 - DNA, 16 bp, Artificial Sequence
  Synthetic construct
ggtattgaggcgtaca

SEQ ID NO: 9453 - DNA, 16 bp, Artificial Sequence
  Synthetic construct
ggtattgagtaatccc

SEQ ID NO: 9454 - DNA, 16 bp, Artificial Sequence
  Synthetic construct
ggtattgagtaatccc

SEQ ID NO: 9455 - DNA, 16 bp, Artificial Sequence
  Synthetic construct
ggtgaagaggtgacca

SEQ ID NO: 9456 - DNA, 16 bp, Artificial Sequence
  Synthetic construct
ggtgaagaggtgacca

SEQ ID NO: 9457 - DNA, 16 bp, Artificial Sequence
  Synthetic construct
ggtgaagagtacgccc

SEQ ID NO: 9458 - DNA, 16 bp, Artificial Sequence
  Synthetic construct
ggtgaagagtacgccc

SEQ ID NO: 9459 - DNA, 16 bp, Artificial Sequence
  Synthetic construct
ggtgcgtcaccacgtg

SEQ ID NO: 9460 - DNA, 16 bp, Artificial Sequence
  Synthetic construct
ggtgcgtcaccacgtg

SEQ ID NO: 9461 - DNA, 16 bp, Artificial Sequence
  Synthetic construct
ggtgttacatggttgt

SEQ ID NO: 9462 - DNA, 16 bp, Artificial Sequence
  Synthetic construct
ggtgttacatggttgt

SEQ ID NO: 9463 - DNA, 16 bp, Artificial Sequence
  Synthetic construct
ggtgttagttcgttga

SEQ ID NO: 9464 - DNA, 16 bp, Artificial Sequence
  Synthetic construct
ggtgttagttcgttga

SEQ ID NO: 9465 - DNA, 16 bp, Artificial Sequence
  Synthetic construct
gtaacgtagacctagg

SEQ ID NO: 9466 - DNA, 16 bp, Artificial Sequence
  Synthetic construct
gtaacgtagacctagg

SEQ ID NO: 9467 - DNA, 16 bp, Artificial Sequence
  Synthetic construct
gtaacgtgttcacctc

SEQ ID NO: 9468 - DNA, 16 bp, Artificial Sequence
  Synthetic construct
gtaacgtgttcacctc

SEQ ID NO: 9469 - DNA, 16 bp, Artificial Sequence
  Synthetic construct
gtaactgcacagattc

SEQ ID NO: 9470 - DNA, 16 bp, Artificial Sequence
  Synthetic construct
gtaactgcacagattc

SEQ ID NO: 9471 - DNA, 16 bp, Artificial Sequence
  Synthetic construct
gtaactgcagcctgtg

SEQ ID NO: 9472 - DNA, 16 bp, Artificial Sequence
  Synthetic construct
gtaactgcagcctgtg

SEQ ID NO: 9473 - DNA, 16 bp, Artificial Sequence
  Synthetic construct
gtaactgcagctgctg

SEQ ID NO: 9474 - DNA, 16 bp, Artificial Sequence
  Synthetic construct
gtaactgcagctgctg

SEQ ID NO: 9475 - DNA, 16 bp, Artificial Sequence
  Synthetic construct
gtaactgcatttcact

SEQ ID NO: 9476 - DNA, 16 bp, Artificial Sequence
  Synthetic construct
gtaactgcatttcact

SEQ ID NO: 9477 - DNA, 16 bp, Artificial Sequence
  Synthetic construct
gtaactggtaccatca

SEQ ID NO: 9478 - DNA, 16 bp, Artificial Sequence
  Synthetic construct
gtaactggtaccatca

SEQ ID NO: 9479 - DNA, 16 bp, Artificial Sequence
  Synthetic construct
gtacgtagtcaaagcg

SEQ ID NO: 9480 - DNA, 16 bp, Artificial Sequence
  Synthetic construct
gtacgtagtcaaagcg

SEQ ID NO: 9481 - DNA, 16 bp, Artificial Sequence
  Synthetic construct
gtactcctcgcctgtt

SEQ ID NO: 9482 - DNA, 16 bp, Artificial Sequence
  Synthetic construct
gtactcctcgcctgtt

SEQ ID NO: 9483 - DNA, 16 bp, Artificial Sequence
  Synthetic construct
gtaggccaggtcatct

SEQ ID NO: 9484 - DNA, 16 bp, Artificial Sequence
  Synthetic construct
gtaggccaggtcatct

SEQ ID NO: 9485 - DNA, 16 bp, Artificial Sequence
  Synthetic construct
gtaggccgtaaacaca

SEQ ID NO: 9486 - DNA, 16 bp, Artificial Sequence
  Synthetic construct
gtaggccgtaaacaca

SEQ ID NO: 9487 - DNA, 16 bp, Artificial Sequence
  Synthetic construct
gtaggcctcgagaacg

SEQ ID NO: 9488 - DNA, 16 bp, Artificial Sequence
  Synthetic construct
gtaggcctcgagaacg

SEQ ID NO: 9489 - DNA, 16 bp, Artificial Sequence
  Synthetic construct
gtagtcatccaaacac

SEQ ID NO: 9490 - DNA, 16 bp, Artificial Sequence
  Synthetic construct
gtagtcatccaaacac

SEQ ID NO: 9491 - DNA, 16 bp, Artificial Sequence
  Synthetic construct
gtatcttgtaacgttc

SEQ ID NO: 9492 - DNA, 16 bp, Artificial Sequence
  Synthetic construct
gtatcttgtaacgttc

SEQ ID NO: 9493 - DNA, 16 bp, Artificial Sequence
  Synthetic construct
gtcaagtagtcacgcc

SEQ ID NO: 9494 - DNA, 16 bp, Artificial Sequence
  Synthetic construct
gtcaagtagtcacgcc

SEQ ID NO: 9495 - DNA, 16 bp, Artificial Sequence
  Synthetic construct
gtcaagtcacggttta

SEQ ID NO: 9496 - DNA, 16 bp, Artificial Sequence
  Synthetic construct
gtcaagtcacggttta

SEQ ID NO: 9497 - DNA, 16 bp, Artificial Sequence
  Synthetic construct
gtcacggtcaaaccgt

SEQ ID NO: 9498 - DNA, 16 bp, Artificial Sequence
  Synthetic construct
gtcacggtcaaaccgt

SEQ ID NO: 9499 - DNA, 16 bp, Artificial Sequence
  Synthetic construct
gtcatttgtagtgaat

SEQ ID NO: 9500 - DNA, 16 bp, Artificial Sequence
  Synthetic construct
gtcatttgtagtgaat

SEQ ID NO: 9501 - DNA, 16 bp, Artificial Sequence
  Synthetic construct
gtcattttcaccacct

SEQ ID NO: 9502 - DNA, 16 bp, Artificial Sequence
  Synthetic construct
gtcattttcaccacct

SEQ ID NO: 9503 - DNA, 16 bp, Artificial Sequence
  Synthetic construct
gtcattttccatgagt

SEQ ID NO: 9504 - DNA, 16 bp, Artificial Sequence
  Synthetic construct
gtcattttccatgagt

SEQ ID NO: 9505 - DNA, 16 bp, Artificial Sequence
  Synthetic construct
gtcattttcctaagtg

SEQ ID NO: 9506 - DNA, 16 bp, Artificial Sequence
  Synthetic construct
gtcattttcctaagtg

SEQ ID NO: 9507 - DNA, 16 bp, Artificial Sequence
  Synthetic construct
gtcattttcttgccgt

SEQ ID NO: 9508 - DNA, 16 bp, Artificial Sequence
  Synthetic construct
gtcattttcttgccgt

SEQ ID NO: 9509 - DNA, 16 bp, Artificial Sequence
  Synthetic construct
gtcctcaagtgaagtt

SEQ ID NO: 9510 - DNA, 16 bp, Artificial Sequence
  Synthetic construct
gtcctcaagtgaagtt

SEQ ID NO: 9511 - DNA, 16 bp, Artificial Sequence
  Synthetic construct
gtcctcacaagtctac

SEQ ID NO: 9512 - DNA, 16 bp, Artificial Sequence
  Synthetic construct
gtcctcacaagtctac

SEQ ID NO: 9513 - DNA, 16 bp, Artificial Sequence
  Synthetic construct
gtcctcagtcaactgt

SEQ ID NO: 9514 - DNA, 16 bp, Artificial Sequence
  Synthetic construct
gtcctcagtcaactgt

SEQ ID NO: 9515 - DNA, 16 bp, Artificial Sequence
  Synthetic construct
gtcgtaatcgcgccaa

SEQ ID NO: 9516 - DNA, 16 bp, Artificial Sequence
  Synthetic construct
gtcgtaatcgcgccaa

SEQ ID NO: 9517 - DNA, 16 bp, Artificial Sequence
  Synthetic construct
gtctcgtcaacacgcc

SEQ ID NO: 9518 - DNA, 16 bp, Artificial Sequence
  Synthetic construct
gtctcgtcaacacgcc

SEQ ID NO: 9519 - DNA, 16 bp, Artificial Sequence
  Synthetic construct
gtcttcgcagtgagtg

SEQ ID NO: 9520 - DNA, 16 bp, Artificial Sequence
  Synthetic construct
gtcttcgcagtgagtg

SEQ ID NO: 9521 - DNA, 16 bp, Artificial Sequence
  Synthetic construct
gtcttcggtcgaaagc

SEQ ID NO: 9522 - DNA, 16 bp, Artificial Sequence
  Synthetic construct
gtcttcggtcgaaagc

SEQ ID NO: 9523 - DNA, 16 bp, Artificial Sequence
  Synthetic construct
gtcttcggttaaagtg

SEQ ID NO: 9524 - DNA, 16 bp, Artificial Sequence
  Synthetic construct
gtcttcggttaaagtg

SEQ ID NO: 9525 - DNA, 16 bp, Artificial Sequence
  Synthetic construct
gtgaaggagtcaaggc

SEQ ID NO: 9526 - DNA, 16 bp, Artificial Sequence
  Synthetic construct
gtgaaggagtcaaggc

SEQ ID NO: 9527 - DNA, 16 bp, Artificial Sequence
  Synthetic construct
gtgcagctcttgagac

SEQ ID NO: 9528 - DNA, 16 bp, Artificial Sequence
  Synthetic construct
gtgcagctcttgagac

SEQ ID NO: 9529 - DNA, 16 bp, Artificial Sequence
  Synthetic construct
gtgcggtcagccttgg

SEQ ID NO: 9530 - DNA, 16 bp, Artificial Sequence
  Synthetic construct
gtgcggtcagccttgg

SEQ ID NO: 9531 - DNA, 16 bp, Artificial Sequence
  Synthetic construct
gtgcggttcggacaag

SEQ ID NO: 9532 - DNA, 16 bp, Artificial Sequence
  Synthetic construct
gtgcggttcggacaag

SEQ ID NO: 9533 - DNA, 16 bp, Artificial Sequence
  Synthetic construct
gtgcttccacacatgt

SEQ ID NO: 9534 - DNA, 16 bp, Artificial Sequence
  Synthetic construct
gtgcttccacacatgt

SEQ ID NO: 9535 - DNA, 16 bp, Artificial Sequence
  Synthetic construct
gtgcttcgtcgactat

SEQ ID NO: 9536 - DNA, 16 bp, Artificial Sequence
  Synthetic construct
gtgcttcgtcgactat

SEQ ID NO: 9537 - DNA, 16 bp, Artificial Sequence
  Synthetic construct
gtgcttcgtggacgat

SEQ ID NO: 9538 - DNA, 16 bp, Artificial Sequence
  Synthetic construct
gtgcttcgtggacgat

SEQ ID NO: 9539 - DNA, 16 bp, Artificial Sequence
  Synthetic construct
gtgggtcgtcttgatg

SEQ ID NO: 9540 - DNA, 16 bp, Artificial Sequence
  Synthetic construct
gtgggtcgtcttgatg

SEQ ID NO: 9541 - DNA, 16 bp, Artificial Sequence
  Synthetic construct
gtgggtctctttaggg

SEQ ID NO: 9542 - DNA, 16 bp, Artificial Sequence
  Synthetic construct
gtgggtctctttaggg

SEQ ID NO: 9543 - DNA, 16 bp, Artificial Sequence
  Synthetic construct
gtgtgcgagtgccaga

SEQ ID NO: 9544 - DNA, 16 bp, Artificial Sequence
  Synthetic construct
gtgtgcgagtgccaga

SEQ ID NO: 9545 - DNA, 16 bp, Artificial Sequence
  Synthetic construct
gtgtgcgtcctagaac

SEQ ID NO: 9546 - DNA, 16 bp, Artificial Sequence
  Synthetic construct
gtgtgcgtcctagaac

SEQ ID NO: 9547 - DNA, 16 bp, Artificial Sequence
  Synthetic construct
gtgttagaggccctca

SEQ ID NO: 9548 - DNA, 16 bp, Artificial Sequence
  Synthetic construct
gtgttagaggccctca

SEQ ID NO: 9549 - DNA, 16 bp, Artificial Sequence
  Synthetic construct
gtgttaggtaccgtat

SEQ ID NO: 9550 - DNA, 16 bp, Artificial Sequence
  Synthetic construct
gtgttaggtaccgtat

SEQ ID NO: 9551 - DNA, 16 bp, Artificial Sequence
  Synthetic construct
gttaagctcatttggg

SEQ ID NO: 9552 - DNA, 16 bp, Artificial Sequence
  Synthetic construct
gttaagctcatttggg

SEQ ID NO: 9553 - DNA, 16 bp, Artificial Sequence
  Synthetic construct
gttacagtcaggcgaa

SEQ ID NO: 9554 - DNA, 16 bp, Artificial Sequence
  Synthetic construct
gttacagtcaggcgaa

SEQ ID NO: 9555 - DNA, 16 bp, Artificial Sequence
  Synthetic construct
gttacagtcattcact

SEQ ID NO: 9556 - DNA, 16 bp, Artificial Sequence
  Synthetic construct
gttacagtcattcact

SEQ ID NO: 9557 - DNA, 16 bp, Artificial Sequence
  Synthetic construct
gttcattcaatggata

SEQ ID NO: 9558 - DNA, 16 bp, Artificial Sequence
  Synthetic construct
gttcattcaatggata

SEQ ID NO: 9559 - DNA, 16 bp, Artificial Sequence
  Synthetic construct
gttcattcagtttacg

SEQ ID NO: 9560 - DNA, 16 bp, Artificial Sequence
  Synthetic construct
gttcattcagtttacg

SEQ ID NO: 9561 - DNA, 16 bp, Artificial Sequence
  Synthetic construct
gttcatttcggcgcta

SEQ ID NO: 9562 - DNA, 16 bp, Artificial Sequence
  Synthetic construct
gttcatttcggcgcta

SEQ ID NO: 9563 - DNA, 16 bp, Artificial Sequence
  Synthetic construct
gttcatttctctgctg

SEQ ID NO: 9564 - DNA, 16 bp, Artificial Sequence
  Synthetic construct
gttcatttctctgctg

SEQ ID NO: 9565 - DNA, 16 bp, Artificial Sequence
  Synthetic construct
gttcgggagatctgct

SEQ ID NO: 9566 - DNA, 16 bp, Artificial Sequence
  Synthetic construct
gttcgggagatctgct

SEQ ID NO: 9567 - DNA, 16 bp, Artificial Sequence
  Synthetic construct
gttcgggagggttccc

SEQ ID NO: 9568 - DNA, 16 bp, Artificial Sequence
  Synthetic construct
gttcgggagggttccc

SEQ ID NO: 9569 - DNA, 16 bp, Artificial Sequence
  Synthetic construct
gttctcgcactcgacg

SEQ ID NO: 9570 - DNA, 16 bp, Artificial Sequence
  Synthetic construct
gttctcgcactcgacg

SEQ ID NO: 9571 - DNA, 16 bp, Artificial Sequence
  Synthetic construct
gtttctagtgtaacgg

SEQ ID NO: 9572 - DNA, 16 bp, Artificial Sequence
  Synthetic construct
gtttctagtgtaacgg

SEQ ID NO: 9573 - DNA, 16 bp, Artificial Sequence
  Synthetic construct
taaaccggtaacgttc

SEQ ID NO: 9574 - DNA, 16 bp, Artificial Sequence
  Synthetic construct
taaaccggtaacgttc

SEQ ID NO: 9575 - DNA, 16 bp, Artificial Sequence
  Synthetic construct
taaaccggttacgtca

SEQ ID NO: 9576 - DNA, 16 bp, Artificial Sequence
  Synthetic construct
taaaccggttacgtca

SEQ ID NO: 9577 - DNA, 16 bp, Artificial Sequence
  Synthetic construct
taagagacaggtcgtc

SEQ ID NO: 9578 - DNA, 16 bp, Artificial Sequence
  Synthetic construct
taagagacaggtcgtc

SEQ ID NO: 9579 - DNA, 16 bp, Artificial Sequence
  Synthetic construct
taagagatcgtccagg

SEQ ID NO: 9580 - DNA, 16 bp, Artificial Sequence
  Synthetic construct
taagagatcgtccagg

SEQ ID NO: 9581 - DNA, 16 bp, Artificial Sequence
  Synthetic construct
taagtgccaatcggtt

SEQ ID NO: 9582 - DNA, 16 bp, Artificial Sequence
  Synthetic construct
taagtgccaatcggtt

SEQ ID NO: 9583 - DNA, 16 bp, Artificial Sequence
  Synthetic construct
taagtgcgtgtggctc

SEQ ID NO: 9584 - DNA, 16 bp, Artificial Sequence
  Synthetic construct
taagtgcgtgtggctc

SEQ ID NO: 9585 - DNA, 16 bp, Artificial Sequence
  Synthetic construct
tacacgaagcgtgagt

SEQ ID NO: 9586 - DNA, 16 bp, Artificial Sequence
  Synthetic construct
tacacgaagcgtgagt

SEQ ID NO: 9587 - DNA, 16 bp, Artificial Sequence
  Synthetic construct
tacacgaagtgtggca

SEQ ID NO: 9588 - DNA, 16 bp, Artificial Sequence
  Synthetic construct
tacacgaagtgtggca

SEQ ID NO: 9589 - DNA, 16 bp, Artificial Sequence
  Synthetic construct
tacacgagtcaacatc

SEQ ID NO: 9590 - DNA, 16 bp, Artificial Sequence
  Synthetic construct
tacacgagtcaacatc

SEQ ID NO: 9591 - DNA, 16 bp, Artificial Sequence
  Synthetic construct
tacagtgagagctata

SEQ ID NO: 9592 - DNA, 16 bp, Artificial Sequence
  Synthetic construct
tacagtgagagctata

SEQ ID NO: 9593 - DNA, 16 bp, Artificial Sequence
  Synthetic construct
tacagtgcacaccgac

SEQ ID NO: 9594 - DNA, 16 bp, Artificial Sequence
  Synthetic construct
tacagtgcacaccgac

SEQ ID NO: 9595 - DNA, 16 bp, Artificial Sequence
  Synthetic construct
tacctatcaatgaaac

SEQ ID NO: 9596 - DNA, 16 bp, Artificial Sequence
  Synthetic construct
tacctatcaatgaaac

SEQ ID NO: 9597 - DNA, 16 bp, Artificial Sequence
  Synthetic construct
tacctattccaaatgc

SEQ ID NO: 9598 - DNA, 16 bp, Artificial Sequence
  Synthetic construct
tacctattccaaatgc

SEQ ID NO: 9599 - DNA, 16 bp, Artificial Sequence
  Synthetic construct
taccttatctgcgtaa

SEQ ID NO: 9600 - DNA, 16 bp, Artificial Sequence
  Synthetic construct
taccttatctgcgtaa

SEQ ID NO: 9601 - DNA, 16 bp, Artificial Sequence
  Synthetic construct
tacggatcaggtggat

SEQ ID NO: 9602 - DNA, 16 bp, Artificial Sequence
  Synthetic construct
tacggatcaggtggat

SEQ ID NO: 9603 - DNA, 16 bp, Artificial Sequence
  Synthetic construct
tacggattcttgcaag

SEQ ID NO: 9604 - DNA, 16 bp, Artificial Sequence
  Synthetic construct
tacggattcttgcaag

SEQ ID NO: 9605 - DNA, 16 bp, Artificial Sequence
  Synthetic construct
tacggtatcacaatgc

SEQ ID NO: 9606 - DNA, 16 bp, Artificial Sequence
  Synthetic construct
tacggtatcacaatgc

SEQ ID NO: 9607 - DNA, 16 bp, Artificial Sequence
  Synthetic construct
tactcattcattatcc

SEQ ID NO: 9608 - DNA, 16 bp, Artificial Sequence
  Synthetic construct
tactcattcattatcc

SEQ ID NO: 9609 - DNA, 16 bp, Artificial Sequence
  Synthetic construct
tactcgcagggaaaca

SEQ ID NO: 9610 - DNA, 16 bp, Artificial Sequence
  Synthetic construct
tactcgcagggaaaca

SEQ ID NO: 9611 - DNA, 16 bp, Artificial Sequence
  Synthetic construct
tacttacagtggagaa

SEQ ID NO: 9612 - DNA, 16 bp, Artificial Sequence
  Synthetic construct
tacttacagtggagaa

SEQ ID NO: 9613 - DNA, 16 bp, Artificial Sequence
  Synthetic construct
tacttgtcaagttaag

SEQ ID NO: 9614 - DNA, 16 bp, Artificial Sequence
  Synthetic construct
tacttgtcaagttaag

SEQ ID NO: 9615 - DNA, 16 bp, Artificial Sequence
  Synthetic construct
tacttgtgttcaacca

SEQ ID NO: 9616 - DNA, 16 bp, Artificial Sequence
  Synthetic construct
tacttgtgttcaacca

SEQ ID NO: 9617 - DNA, 16 bp, Artificial Sequence
  Synthetic construct
tacttgttcacggtta

SEQ ID NO: 9618 - DNA, 16 bp, Artificial Sequence
  Synthetic construct
tacttgttcacggtta

SEQ ID NO: 9619 - DNA, 16 bp, Artificial Sequence
  Synthetic construct
tacttgttctgccagg

SEQ ID NO: 9620 - DNA, 16 bp, Artificial Sequence
  Synthetic construct
tacttgttctgccagg

SEQ ID NO: 9621 - DNA, 16 bp, Artificial Sequence
  Synthetic construct
tagaccaagcgtgagt

SEQ ID NO: 9622 - DNA, 16 bp, Artificial Sequence
  Synthetic construct
tagaccaagcgtgagt

SEQ ID NO: 9623 - DNA, 16 bp, Artificial Sequence
  Synthetic construct
tagaccatcaagaagt

SEQ ID NO: 9624 - DNA, 16 bp, Artificial Sequence
  Synthetic construct
tagaccatcaagaagt

SEQ ID NO: 9625 - DNA, 16 bp, Artificial Sequence
  Synthetic construct
tagagctagatcgggt

SEQ ID NO: 9626 - DNA, 16 bp, Artificial Sequence
  Synthetic construct
tagagctagatcgggt

SEQ ID NO: 9627 - DNA, 16 bp, Artificial Sequence
  Synthetic construct
tagccggagctgcgaa

SEQ ID NO: 9628 - DNA, 16 bp, Artificial Sequence
  Synthetic construct
tagccggagctgcgaa

SEQ ID NO: 9629 - DNA, 16 bp, Artificial Sequence
  Synthetic construct
tagccggcacgaaata

SEQ ID NO: 9630 - DNA, 16 bp, Artificial Sequence
  Synthetic construct
tagccggcacgaaata

SEQ ID NO: 9631 - DNA, 16 bp, Artificial Sequence
  Synthetic construct
taggcatagcaccgct

SEQ ID NO: 9632 - DNA, 16 bp, Artificial Sequence
  Synthetic construct
taggcatagcaccgct

SEQ ID NO: 9633 - DNA, 16 bp, Artificial Sequence
  Synthetic construct
taggcattcagcacat

SEQ ID NO: 9634 - DNA, 16 bp, Artificial Sequence
  Synthetic construct
taggcattcagcacat

SEQ ID NO: 9635 - DNA, 16 bp, Artificial Sequence
  Synthetic construct
taggcattcataaccg

SEQ ID NO: 9636 - DNA, 16 bp, Artificial Sequence
  Synthetic construct
taggcattcataaccg

SEQ ID NO: 9637 - DNA, 16 bp, Artificial Sequence
  Synthetic construct
taggcattcggaggta

SEQ ID NO: 9638 - DNA, 16 bp, Artificial Sequence
  Synthetic construct
taggcattcggaggta

SEQ ID NO: 9639 - DNA, 16 bp, Artificial Sequence
  Synthetic construct
tagtggtcattctcat

SEQ ID NO: 9640 - DNA, 16 bp, Artificial Sequence
  Synthetic construct
tagtggtcattctcat

SEQ ID NO: 9641 - DNA, 16 bp, Artificial Sequence
  Synthetic construct
tagttggtcctattca

SEQ ID NO: 9642 - DNA, 16 bp, Artificial Sequence
  Synthetic construct
tagttggtcctattca

SEQ ID NO: 9643 - DNA, 16 bp, Artificial Sequence
  Synthetic construct
tagttggtcgtaccgg

SEQ ID NO: 9644 - DNA, 16 bp, Artificial Sequence
  Synthetic construct
tagttggtcgtaccgg

SEQ ID NO: 9645 - DNA, 16 bp, Artificial Sequence
  Synthetic construct
tagttggtcttgtcat

SEQ ID NO: 9646 - DNA, 16 bp, Artificial Sequence
  Synthetic construct
tagttggtcttgtcat

SEQ ID NO: 9647 - DNA, 16 bp, Artificial Sequence
  Synthetic construct
tatcaggcacattagc

SEQ ID NO: 9648 - DNA, 16 bp, Artificial Sequence
  Synthetic construct
tatcaggcacattagc

SEQ ID NO: 9649 - DNA, 16 bp, Artificial Sequence
  Synthetic construct
tatcaggcacgagagt

SEQ ID NO: 9650 - DNA, 16 bp, Artificial Sequence
  Synthetic construct
tatcaggcacgagagt

SEQ ID NO: 9651 - DNA, 16 bp, Artificial Sequence
  Synthetic construct
tatcaggcagaagcac

SEQ ID NO: 9652 - DNA, 16 bp, Artificial Sequence
  Synthetic construct
tatcaggcagaagcac

SEQ ID NO: 9653 - DNA, 16 bp, Artificial Sequence
  Synthetic construct
tatcaggcagtgagtg

SEQ ID NO: 9654 - DNA, 16 bp, Artificial Sequence
  Synthetic construct
tatcaggcagtgagtg

SEQ ID NO: 9655 - DNA, 16 bp, Artificial Sequence
  Synthetic construct
tatcaggtcccaacgg

SEQ ID NO: 9656 - DNA, 16 bp, Artificial Sequence
  Synthetic construct
tatcaggtcccaacgg

SEQ ID NO: 9657 - DNA, 16 bp, Artificial Sequence
  Synthetic construct
tatcaggtcgtcacgg

SEQ ID NO: 9658 - DNA, 16 bp, Artificial Sequence
  Synthetic construct
tatcaggtcgtcacgg

SEQ ID NO: 9659 - DNA, 16 bp, Artificial Sequence
  Synthetic construct
tatcaggtctgaggga

SEQ ID NO: 9660 - DNA, 16 bp, Artificial Sequence
  Synthetic construct
tatcaggtctgaggga

SEQ ID NO: 9661 - DNA, 16 bp, Artificial Sequence
  Synthetic construct
tatgcccagagcaatt

SEQ ID NO: 9662 - DNA, 16 bp, Artificial Sequence
  Synthetic construct
tatgcccagagcaatt

SEQ ID NO: 9663 - DNA, 16 bp, Artificial Sequence
  Synthetic construct
tatgcccagttgagta

SEQ ID NO: 9664 - DNA, 16 bp, Artificial Sequence
  Synthetic construct
tatgcccagttgagta

SEQ ID NO: 9665 - DNA, 16 bp, Artificial Sequence
  Synthetic construct
tcaacgaagcgtaata

SEQ ID NO: 9666 - DNA, 16 bp, Artificial Sequence
  Synthetic construct
tcaacgaagcgtaata

SEQ ID NO: 9667 - DNA, 16 bp, Artificial Sequence
  Synthetic construct
tcaacgatcactctta

SEQ ID NO: 9668 - DNA, 16 bp, Artificial Sequence
  Synthetic construct
tcaacgatcactctta

SEQ ID NO: 9669 - DNA, 16 bp, Artificial Sequence
  Synthetic construct
tcacaagtcccaagta

SEQ ID NO: 9670 - DNA, 16 bp, Artificial Sequence
  Synthetic construct
tcacaagtcccaagta

SEQ ID NO: 9671 - DNA, 16 bp, Artificial Sequence
  Synthetic construct
tcacgaatcgcctgag

SEQ ID NO: 9672 - DNA, 16 bp, Artificial Sequence
  Synthetic construct
tcacgaatcgcctgag

SEQ ID NO: 9673 - DNA, 16 bp, Artificial Sequence
  Synthetic construct
tcagatgagtacgacg

SEQ ID NO: 9674 - DNA, 16 bp, Artificial Sequence
  Synthetic construct
tcagatgagtacgacg

SEQ ID NO: 9675 - DNA, 16 bp, Artificial Sequence
  Synthetic construct
tcagatggtaccggct

SEQ ID NO: 9676 - DNA, 16 bp, Artificial Sequence
  Synthetic construct
tcagatggtaccggct

SEQ ID NO: 9677 - DNA, 16 bp, Artificial Sequence
  Synthetic construct
tcagatggtcaggaca

SEQ ID NO: 9678 - DNA, 16 bp, Artificial Sequence
  Synthetic construct
tcagatggtcaggaca

SEQ ID NO: 9679 - DNA, 16 bp, Artificial Sequence
  Synthetic construct
tcagcaaagactttcg

SEQ ID NO: 9680 - DNA, 16 bp, Artificial Sequence
  Synthetic construct
tcagcaaagactttcg

SEQ ID NO: 9681 - DNA, 16 bp, Artificial Sequence
  Synthetic construct
tcagcaatccgcgttt

SEQ ID NO: 9682 - DNA, 16 bp, Artificial Sequence
  Synthetic construct
tcagcaatccgcgttt

SEQ ID NO: 9683 - DNA, 16 bp, Artificial Sequence
  Synthetic construct
tcagctccatacagct

SEQ ID NO: 9684 - DNA, 16 bp, Artificial Sequence
  Synthetic construct
tcagctccatacagct

SEQ ID NO: 9685 - DNA, 16 bp, Artificial Sequence
  Synthetic construct
tcagctcgtcttgtcc

SEQ ID NO: 9686 - DNA, 16 bp, Artificial Sequence
  Synthetic construct
tcagctcgtcttgtcc

SEQ ID NO: 9687 - DNA, 16 bp, Artificial Sequence
  Synthetic construct
tcagctctcacggtta

SEQ ID NO: 9688 - DNA, 16 bp, Artificial Sequence
  Synthetic construct
tcagctctcacggtta

SEQ ID NO: 9689 - DNA, 16 bp, Artificial Sequence
  Synthetic construct
tcaggataggatggtc

SEQ ID NO: 9690 - DNA, 16 bp, Artificial Sequence
  Synthetic construct
tcaggataggatggtc

SEQ ID NO: 9691 - DNA, 16 bp, Artificial Sequence
  Synthetic construct
tcaggatcacccagtg

SEQ ID NO: 9692 - DNA, 16 bp, Artificial Sequence
  Synthetic construct
tcaggatcacccagtg

SEQ ID NO: 9693 - DNA, 16 bp, Artificial Sequence
  Synthetic construct
tcaggtagtgggtcaa

SEQ ID NO: 9694 - DNA, 16 bp, Artificial Sequence
  Synthetic construct
tcaggtagtgggtcaa

SEQ ID NO: 9695 - DNA, 16 bp, Artificial Sequence
  Synthetic construct
tcaggtatctggtgta

SEQ ID NO: 9696 - DNA, 16 bp, Artificial Sequence
  Synthetic construct
tcaggtatctggtgta

SEQ ID NO: 9697 - DNA, 16 bp, Artificial Sequence
  Synthetic construct
tcaggtatcttccttc

SEQ ID NO: 9698 - DNA, 16 bp, Artificial Sequence
  Synthetic construct
tcaggtatcttccttc

SEQ ID NO: 9699 - DNA, 16 bp, Artificial Sequence
  Synthetic construct
tcatttgaggctatct

SEQ ID NO: 9700 - DNA, 16 bp, Artificial Sequence
  Synthetic construct
tcatttgaggctatct

SEQ ID NO: 9701 - DNA, 16 bp, Artificial Sequence
  Synthetic construct
tcatttgcaccaccag

SEQ ID NO: 9702 - DNA, 16 bp, Artificial Sequence
  Synthetic construct
tcatttgcaccaccag

SEQ ID NO: 9703 - DNA, 16 bp, Artificial Sequence
  Synthetic construct
tcatttgtcagcgacc

SEQ ID NO: 9704 - DNA, 16 bp, Artificial Sequence
  Synthetic construct
tcatttgtcagcgacc

SEQ ID NO: 9705 - DNA, 16 bp, Artificial Sequence
  Synthetic construct
tcatttgtccgggtgt

SEQ ID NO: 9706 - DNA, 16 bp, Artificial Sequence
  Synthetic construct
tcatttgtccgggtgt

SEQ ID NO: 9707 - DNA, 16 bp, Artificial Sequence
  Synthetic construct
tccacacagggtgtgt

SEQ ID NO: 9708 - DNA, 16 bp, Artificial Sequence
  Synthetic construct
tccacacagggtgtgt

SEQ ID NO: 9709 - DNA, 16 bp, Artificial Sequence
  Synthetic construct
tcccgatcacgtgaga

SEQ ID NO: 9710 - DNA, 16 bp, Artificial Sequence
  Synthetic construct
tcccgatcacgtgaga

SEQ ID NO: 9711 - DNA, 16 bp, Artificial Sequence
  Synthetic construct
tcccgatcagacgtag

SEQ ID NO: 9712 - DNA, 16 bp, Artificial Sequence
  Synthetic construct
tcccgatcagacgtag

SEQ ID NO: 9713 - DNA, 16 bp, Artificial Sequence
  Synthetic construct
tcccgatgttcccttg

SEQ ID NO: 9714 - DNA, 16 bp, Artificial Sequence
  Synthetic construct
tcccgatgttcccttg

SEQ ID NO: 9715 - DNA, 16 bp, Artificial Sequence
  Synthetic construct
tcccgattctaaccga

SEQ ID NO: 9716 - DNA, 16 bp, Artificial Sequence
  Synthetic construct
tcccgattctaaccga

SEQ ID NO: 9717 - DNA, 16 bp, Artificial Sequence
  Synthetic construct
tcgaggcgtattaccg

SEQ ID NO: 9718 - DNA, 16 bp, Artificial Sequence
  Synthetic construct
tcgaggcgtattaccg

SEQ ID NO: 9719 - DNA, 16 bp, Artificial Sequence
  Synthetic construct
tcgcgagcatggatgg

SEQ ID NO: 9720 - DNA, 16 bp, Artificial Sequence
  Synthetic construct
tcgcgagcatggatgg

SEQ ID NO: 9721 - DNA, 16 bp, Artificial Sequence
  Synthetic construct
tcgcgttagactacaa

SEQ ID NO: 9722 - DNA, 16 bp, Artificial Sequence
  Synthetic construct
tcgcgttagactacaa

SEQ ID NO: 9723 - DNA, 16 bp, Artificial Sequence
  Synthetic construct
tcgcgttagtctcggc

SEQ ID NO: 9724 - DNA, 16 bp, Artificial Sequence
  Synthetic construct
tcgcgttagtctcggc

SEQ ID NO: 9725 - DNA, 16 bp, Artificial Sequence
  Synthetic construct
tcgcgttgtgggtcaa

SEQ ID NO: 9726 - DNA, 16 bp, Artificial Sequence
  Synthetic construct
tcgcgttgtgggtcaa

SEQ ID NO: 9727 - DNA, 16 bp, Artificial Sequence
  Synthetic construct
tcgcgtttcaggccca

SEQ ID NO: 9728 - DNA, 16 bp, Artificial Sequence
  Synthetic construct
tcgcgtttcaggccca

SEQ ID NO: 9729 - DNA, 16 bp, Artificial Sequence
  Synthetic construct
tcgcgtttctgcaagt

SEQ ID NO: 9730 - DNA, 16 bp, Artificial Sequence
  Synthetic construct
tcgcgtttctgcaagt

SEQ ID NO: 9731 - DNA, 16 bp, Artificial Sequence
  Synthetic construct
tcgggacgtaccggct

SEQ ID NO: 9732 - DNA, 16 bp, Artificial Sequence
  Synthetic construct
tcgggacgtaccggct

SEQ ID NO: 9733 - DNA, 16 bp, Artificial Sequence
  Synthetic construct
tcgggactcgcttgtc

SEQ ID NO: 9734 - DNA, 16 bp, Artificial Sequence
  Synthetic construct
tcgggactcgcttgtc

SEQ ID NO: 9735 - DNA, 16 bp, Artificial Sequence
  Synthetic construct
tcggtaagtaccatca

SEQ ID NO: 9736 - DNA, 16 bp, Artificial Sequence
  Synthetic construct
tcggtaagtaccatca

SEQ ID NO: 9737 - DNA, 16 bp, Artificial Sequence
  Synthetic construct
tcgtacccaaagtcaa

SEQ ID NO: 9738 - DNA, 16 bp, Artificial Sequence
  Synthetic construct
tcgtacccaaagtcaa

SEQ ID NO: 9739 - DNA, 16 bp, Artificial Sequence
  Synthetic construct
tcgtagacagcctata

SEQ ID NO: 9740 - DNA, 16 bp, Artificial Sequence
  Synthetic construct
tcgtagacagcctata

SEQ ID NO: 9741 - DNA, 16 bp, Artificial Sequence
  Synthetic construct
tctcatagtgaaagag

SEQ ID NO: 9742 - DNA, 16 bp, Artificial Sequence
  Synthetic construct
tctcatagtgaaagag

SEQ ID NO: 9743 - DNA, 16 bp, Artificial Sequence
  Synthetic construct
tctctaagtaattgga

SEQ ID NO: 9744 - DNA, 16 bp, Artificial Sequence
  Synthetic construct
tctctaagtaattgga

SEQ ID NO: 9745 - DNA, 16 bp, Artificial Sequence
  Synthetic construct
tctctaatccacgacg

SEQ ID NO: 9746 - DNA, 16 bp, Artificial Sequence
  Synthetic construct
tctctaatccacgacg

SEQ ID NO: 9747 - DNA, 16 bp, Artificial Sequence
  Synthetic construct
tctgagaagagactta

SEQ ID NO: 9748 - DNA, 16 bp, Artificial Sequence
  Synthetic construct
tctgagaagagactta

SEQ ID NO: 9749 - DNA, 16 bp, Artificial Sequence
  Synthetic construct
tctgagatcgcatgat

SEQ ID NO: 9750 - DNA, 16 bp, Artificial Sequence
  Synthetic construct
tctgagatcgcatgat

SEQ ID NO: 9751 - DNA, 16 bp, Artificial Sequence
  Synthetic construct
tctggaatcagaaatg

SEQ ID NO: 9752 - DNA, 16 bp, Artificial Sequence
  Synthetic construct
tctggaatcagaaatg

SEQ ID NO: 9753 - DNA, 16 bp, Artificial Sequence
  Synthetic construct
tctttccagctaactc

SEQ ID NO: 9754 - DNA, 16 bp, Artificial Sequence
  Synthetic construct
tctttccagctaactc

SEQ ID NO: 9755 - DNA, 16 bp, Artificial Sequence
  Synthetic construct
tgaaagaaggcagtca

SEQ ID NO: 9756 - DNA, 16 bp, Artificial Sequence
  Synthetic construct
tgaaagaaggcagtca

SEQ ID NO: 9757 - DNA, 16 bp, Artificial Sequence
  Synthetic construct
tgaaagacagggagag

SEQ ID NO: 9758 - DNA, 16 bp, Artificial Sequence
  Synthetic construct
tgaaagacagggagag

SEQ ID NO: 9759 - DNA, 16 bp, Artificial Sequence
  Synthetic construct
tgaaagatcttcaact

SEQ ID NO: 9760 - DNA, 16 bp, Artificial Sequence
  Synthetic construct
tgaaagatcttcaact

SEQ ID NO: 9761 - DNA, 16 bp, Artificial Sequence
  Synthetic construct
tgacaactcagttagc

SEQ ID NO: 9762 - DNA, 16 bp, Artificial Sequence
  Synthetic construct
tgacaactcagttagc

SEQ ID NO: 9763 - DNA, 16 bp, Artificial Sequence
  Synthetic construct
tgacaactctaactct

SEQ ID NO: 9764 - DNA, 16 bp, Artificial Sequence
  Synthetic construct
tgacaactctaactct

SEQ ID NO: 9765 - DNA, 16 bp, Artificial Sequence
  Synthetic construct
tgacggcagctggaac

SEQ ID NO: 9766 - DNA, 16 bp, Artificial Sequence
  Synthetic construct
tgacggcagctggaac

SEQ ID NO: 9767 - DNA, 16 bp, Artificial Sequence
  Synthetic construct
tgactagagctagccc

SEQ ID NO: 9768 - DNA, 16 bp, Artificial Sequence
  Synthetic construct
tgactagagctagccc

SEQ ID NO: 9769 - DNA, 16 bp, Artificial Sequence
  Synthetic construct
tgactaggtagctaaa

SEQ ID NO: 9770 - DNA, 16 bp, Artificial Sequence
  Synthetic construct
tgactaggtagctaaa

SEQ ID NO: 9771 - DNA, 16 bp, Artificial Sequence
  Synthetic construct
tgacttttcgttgaca

SEQ ID NO: 9772 - DNA, 16 bp, Artificial Sequence
  Synthetic construct
tgacttttcgttgaca

SEQ ID NO: 9773 - DNA, 16 bp, Artificial Sequence
  Synthetic construct
tgagagggttctggta

SEQ ID NO: 9774 - DNA, 16 bp, Artificial Sequence
  Synthetic construct
tgagagggttctggta

SEQ ID NO: 9775 - DNA, 16 bp, Artificial Sequence
  Synthetic construct
tgagccgcaagcccac

SEQ ID NO: 9776 - DNA, 16 bp, Artificial Sequence
  Synthetic construct
tgagccgcaagcccac

SEQ ID NO: 9777 - DNA, 16 bp, Artificial Sequence
  Synthetic construct
tgagccgtctccggtt

SEQ ID NO: 9778 - DNA, 16 bp, Artificial Sequence
  Synthetic construct
tgagccgtctccggtt

SEQ ID NO: 9779 - DNA, 16 bp, Artificial Sequence
  Synthetic construct
tgagggacatagaaac

SEQ ID NO: 9780 - DNA, 16 bp, Artificial Sequence
  Synthetic construct
tgagggacatagaaac

SEQ ID NO: 9781 - DNA, 16 bp, Artificial Sequence
  Synthetic construct
tgagggatcactattc

SEQ ID NO: 9782 - DNA, 16 bp, Artificial Sequence
  Synthetic construct
tgagggatcactattc

SEQ ID NO: 9783 - DNA, 16 bp, Artificial Sequence
  Synthetic construct
tgatttcagaaagtgg

SEQ ID NO: 9784 - DNA, 16 bp, Artificial Sequence
  Synthetic construct
tgatttcagaaagtgg

SEQ ID NO: 9785 - DNA, 16 bp, Artificial Sequence
  Synthetic construct
tgatttcgtcagaagc

SEQ ID NO: 9786 - DNA, 16 bp, Artificial Sequence
  Synthetic construct
tgatttcgtcagaagc

SEQ ID NO: 9787 - DNA, 16 bp, Artificial Sequence
  Synthetic construct
tgatttctccacgcag

SEQ ID NO: 9788 - DNA, 16 bp, Artificial Sequence
  Synthetic construct
tgatttctccacgcag

SEQ ID NO: 9789 - DNA, 16 bp, Artificial Sequence
  Synthetic construct
tgatttctcccacttg

SEQ ID NO: 9790 - DNA, 16 bp, Artificial Sequence
  Synthetic construct
tgatttctcccacttg

SEQ ID NO: 9791 - DNA, 16 bp, Artificial Sequence
  Synthetic construct
tgcacctgtaaaggag

SEQ ID NO: 9792 - DNA, 16 bp, Artificial Sequence
  Synthetic construct
tgcacctgtaaaggag

SEQ ID NO: 9793 - DNA, 16 bp, Artificial Sequence
  Synthetic construct
tgccaaatcaatcacg

SEQ ID NO: 9794 - DNA, 16 bp, Artificial Sequence
  Synthetic construct
tgccaaatcaatcacg

SEQ ID NO: 9795 - DNA, 16 bp, Artificial Sequence
  Synthetic construct
tgccaaatcggttcgg

SEQ ID NO: 9796 - DNA, 16 bp, Artificial Sequence
  Synthetic construct
tgccaaatcggttcgg

SEQ ID NO: 9797 - DNA, 16 bp, Artificial Sequence
  Synthetic construct
tgcccataggtcatct

SEQ ID NO: 9798 - DNA, 16 bp, Artificial Sequence
  Synthetic construct
tgcccataggtcatct

SEQ ID NO: 9799 - DNA, 16 bp, Artificial Sequence
  Synthetic construct
tgcccatcagtcgtgc

SEQ ID NO: 9800 - DNA, 16 bp, Artificial Sequence
  Synthetic construct
tgcccatcagtcgtgc

SEQ ID NO: 9801 - DNA, 16 bp, Artificial Sequence
  Synthetic construct
tgcccatgtctcttta

SEQ ID NO: 9802 - DNA, 16 bp, Artificial Sequence
  Synthetic construct
tgcccatgtctcttta

SEQ ID NO: 9803 - DNA, 16 bp, Artificial Sequence
  Synthetic construct
tgccctaaggtaaact

SEQ ID NO: 9804 - DNA, 16 bp, Artificial Sequence
  Synthetic construct
tgccctaaggtaaact

SEQ ID NO: 9805 - DNA, 16 bp, Artificial Sequence
  Synthetic construct
tgccctacatatgctg

SEQ ID NO: 9806 - DNA, 16 bp, Artificial Sequence
  Synthetic construct
tgccctacatatgctg

SEQ ID NO: 9807 - DNA, 16 bp, Artificial Sequence
  Synthetic construct
tgccctagtgcactta

SEQ ID NO: 9808 - DNA, 16 bp, Artificial Sequence
  Synthetic construct
tgccctagtgcactta

SEQ ID NO: 9809 - DNA, 16 bp, Artificial Sequence
  Synthetic construct
tgcgggttcgatagaa

SEQ ID NO: 9810 - DNA, 16 bp, Artificial Sequence
  Synthetic construct
tgcgggttcgatagaa

SEQ ID NO: 9811 - DNA, 16 bp, Artificial Sequence
  Synthetic construct
tgcgtggagcgcctca

SEQ ID NO: 9812 - DNA, 16 bp, Artificial Sequence
  Synthetic construct
tgcgtggagcgcctca

SEQ ID NO: 9813 - DNA, 16 bp, Artificial Sequence
  Synthetic construct
tgcgtggtcacaaacc

SEQ ID NO: 9814 - DNA, 16 bp, Artificial Sequence
  Synthetic construct
tgcgtggtcacaaacc

SEQ ID NO: 9815 - DNA, 16 bp, Artificial Sequence
  Synthetic construct
tgcgtggtcttgtatc

SEQ ID NO: 9816 - DNA, 16 bp, Artificial Sequence
  Synthetic construct
tgcgtggtcttgtatc

SEQ ID NO: 9817 - DNA, 16 bp, Artificial Sequence
  Synthetic construct
tgctacccactaagtc

SEQ ID NO: 9818 - DNA, 16 bp, Artificial Sequence
  Synthetic construct
tgctacccactaagtc

SEQ ID NO: 9819 - DNA, 16 bp, Artificial Sequence
  Synthetic construct
tgctgctcagctgtgc

SEQ ID NO: 9820 - DNA, 16 bp, Artificial Sequence
  Synthetic construct
tgctgctcagctgtgc

SEQ ID NO: 9821 - DNA, 16 bp, Artificial Sequence
  Synthetic construct
tggacgccaagttgtc

SEQ ID NO: 9822 - DNA, 16 bp, Artificial Sequence
  Synthetic construct
tggacgccaagttgtc

SEQ ID NO: 9823 - DNA, 16 bp, Artificial Sequence
  Synthetic construct
tggacgccatgacgga

SEQ ID NO: 9824 - DNA, 16 bp, Artificial Sequence
  Synthetic construct
tggacgccatgacgga

SEQ ID NO: 9825 - DNA, 16 bp, Artificial Sequence
  Synthetic construct
tggacgctcaaccaac

SEQ ID NO: 9826 - DNA, 16 bp, Artificial Sequence
  Synthetic construct
tggacgctcaaccaac

SEQ ID NO: 9827 - DNA, 16 bp, Artificial Sequence
  Synthetic construct
tggacgctcggaggta

SEQ ID NO: 9828 - DNA, 16 bp, Artificial Sequence
  Synthetic construct
tggacgctcggaggta

SEQ ID NO: 9829 - DNA, 16 bp, Artificial Sequence
  Synthetic construct
tggcgcaagatgagag

SEQ ID NO: 9830 - DNA, 16 bp, Artificial Sequence
  Synthetic construct
tggcgcaagatgagag

SEQ ID NO: 9831 - DNA, 16 bp, Artificial Sequence
  Synthetic construct
tggcgcacattgcggc

SEQ ID NO: 9832 - DNA, 16 bp, Artificial Sequence
  Synthetic construct
tggcgcacattgcggc

SEQ ID NO: 9833 - DNA, 16 bp, Artificial Sequence
  Synthetic construct
tggcgcatcagcacat

SEQ ID NO: 9834 - DNA, 16 bp, Artificial Sequence
  Synthetic construct
tggcgcatcagcacat

SEQ ID NO: 9835 - DNA, 16 bp, Artificial Sequence
  Synthetic construct
tggctgggtccgaatt

SEQ ID NO: 9836 - DNA, 16 bp, Artificial Sequence
  Synthetic construct
tggctgggtccgaatt

SEQ ID NO: 9837 - DNA, 16 bp, Artificial Sequence
  Synthetic construct
tgggcgtagcttatcg

SEQ ID NO: 9838 - DNA, 16 bp, Artificial Sequence
  Synthetic construct
tgggcgtagcttatcg

SEQ ID NO: 9839 - DNA, 16 bp, Artificial Sequence
  Synthetic construct
tgggcgttctctgctg

SEQ ID NO: 9840 - DNA, 16 bp, Artificial Sequence
  Synthetic construct
tgggcgttctctgctg

SEQ ID NO: 9841 - DNA, 16 bp, Artificial Sequence
  Synthetic construct
tggttaggtcacttcc

SEQ ID NO: 9842 - DNA, 16 bp, Artificial Sequence
  Synthetic construct
tggttaggtcacttcc

SEQ ID NO: 9843 - DNA, 16 bp, Artificial Sequence
  Synthetic construct
tggttccgttccgtct

SEQ ID NO: 9844 - DNA, 16 bp, Artificial Sequence
  Synthetic construct
tggttccgttccgtct

SEQ ID NO: 9845 - DNA, 16 bp, Artificial Sequence
  Synthetic construct
tgtattccatgcgcac

SEQ ID NO: 9846 - DNA, 16 bp, Artificial Sequence
  Synthetic construct
tgtattccatgcgcac

SEQ ID NO: 9847 - DNA, 16 bp, Artificial Sequence
  Synthetic construct
tgtattcgtcgtcttc

SEQ ID NO: 9848 - DNA, 16 bp, Artificial Sequence
  Synthetic construct
tgtattcgtcgtcttc

SEQ ID NO: 9849 - DNA, 16 bp, Artificial Sequence
  Synthetic construct
tgtcccagtagcgctc

SEQ ID NO: 9850 - DNA, 16 bp, Artificial Sequence
  Synthetic construct
tgtcccagtagcgctc

SEQ ID NO: 9851 - DNA, 16 bp, Artificial Sequence
  Synthetic construct
tgtcccagtcgtggct

SEQ ID NO: 9852 - DNA, 16 bp, Artificial Sequence
  Synthetic construct
tgtcccagtcgtggct

SEQ ID NO: 9853 - DNA, 16 bp, Artificial Sequence
  Synthetic construct
tgtggtaagtggacgt

SEQ ID NO: 9854 - DNA, 16 bp, Artificial Sequence
  Synthetic construct
tgtggtaagtggacgt

SEQ ID NO: 9855 - DNA, 16 bp, Artificial Sequence
  Synthetic construct
tgtggtagttgtcgcg

SEQ ID NO: 9856 - DNA, 16 bp, Artificial Sequence
  Synthetic construct
tgtggtagttgtcgcg

SEQ ID NO: 9857 - DNA, 16 bp, Artificial Sequence
  Synthetic construct
tgtggtatccacgttc

SEQ ID NO: 9858 - DNA, 16 bp, Artificial Sequence
  Synthetic construct
tgtggtatccacgttc

SEQ ID NO: 9859 - DNA, 16 bp, Artificial Sequence
  Synthetic construct
tgtgtttcaaaggcgt

SEQ ID NO: 9860 - DNA, 16 bp, Artificial Sequence
  Synthetic construct
tgtgtttcaaaggcgt

SEQ ID NO: 9861 - DNA, 16 bp, Artificial Sequence
  Synthetic construct
tgttccggtagtacct

SEQ ID NO: 9862 - DNA, 16 bp, Artificial Sequence
  Synthetic construct
tgttccggtagtacct

SEQ ID NO: 9863 - DNA, 16 bp, Artificial Sequence
  Synthetic construct
tgttccggtatcacca

SEQ ID NO: 9864 - DNA, 16 bp, Artificial Sequence
  Synthetic construct
tgttccggtatcacca

SEQ ID NO: 9865 - DNA, 16 bp, Artificial Sequence
  Synthetic construct
ttaactcagcaaatca

SEQ ID NO: 9866 - DNA, 16 bp, Artificial Sequence
  Synthetic construct
ttaactcagcaaatca

SEQ ID NO: 9867 - DNA, 16 bp, Artificial Sequence
  Synthetic construct
ttaggacgttccacaa

SEQ ID NO: 9868 - DNA, 16 bp, Artificial Sequence
  Synthetic construct
ttaggacgttccacaa

SEQ ID NO: 9869 - DNA, 16 bp, Artificial Sequence
  Synthetic construct
ttaggcacagcgtcca

SEQ ID NO: 9870 - DNA, 16 bp, Artificial Sequence
  Synthetic construct
ttaggcacagcgtcca

SEQ ID NO: 9871 - DNA, 16 bp, Artificial Sequence
  Synthetic construct
ttatgctagatgtaac

SEQ ID NO: 9872 - DNA, 16 bp, Artificial Sequence
  Synthetic construct
ttatgctagatgtaac

SEQ ID NO: 9873 - DNA, 16 bp, Artificial Sequence
  Synthetic construct
ttatgctagtgggttg

SEQ ID NO: 9874 - DNA, 16 bp, Artificial Sequence
  Synthetic construct
ttatgctagtgggttg

SEQ ID NO: 9875 - DNA, 16 bp, Artificial Sequence
  Synthetic construct
ttatgcttctggcgtg

SEQ ID NO: 9876 - DNA, 16 bp, Artificial Sequence
  Synthetic construct
ttatgcttctggcgtg

SEQ ID NO: 9877 - DNA, 16 bp, Artificial Sequence
  Synthetic construct
ttcccagagagtaccg

SEQ ID NO: 9878 - DNA, 16 bp, Artificial Sequence
  Synthetic construct
ttcccagagagtaccg

SEQ ID NO: 9879 - DNA, 16 bp, Artificial Sequence
  Synthetic construct
ttcccagagtacgccc

SEQ ID NO: 9880 - DNA, 16 bp, Artificial Sequence
  Synthetic construct
ttcccagagtacgccc

SEQ ID NO: 9881 - DNA, 16 bp, Artificial Sequence
  Synthetic construct
ttcccagcaaactgtc

SEQ ID NO: 9882 - DNA, 16 bp, Artificial Sequence
  Synthetic construct
ttcccagcaaactgtc

SEQ ID NO: 9883 - DNA, 16 bp, Artificial Sequence
  Synthetic construct
ttcgaaggtcgactgc

SEQ ID NO: 9884 - DNA, 16 bp, Artificial Sequence
  Synthetic construct
ttcgaaggtcgactgc

SEQ ID NO: 9885 - DNA, 16 bp, Artificial Sequence
  Synthetic construct
ttcggtccagtcgatt

SEQ ID NO: 9886 - DNA, 16 bp, Artificial Sequence
  Synthetic construct
ttcggtccagtcgatt

SEQ ID NO: 9887 - DNA, 16 bp, Artificial Sequence
  Synthetic construct
ttcggtcgtgaggcta

SEQ ID NO: 9888 - DNA, 16 bp, Artificial Sequence
  Synthetic construct
ttcggtcgtgaggcta

SEQ ID NO: 9889 - DNA, 16 bp, Artificial Sequence
  Synthetic construct
ttctcaacaagtctgt

SEQ ID NO: 9890 - DNA, 16 bp, Artificial Sequence
  Synthetic construct
ttctcaacaagtctgt

SEQ ID NO: 9891 - DNA, 16 bp, Artificial Sequence
  Synthetic construct
ttctcaacatgttgac

SEQ ID NO: 9892 - DNA, 16 bp, Artificial Sequence
  Synthetic construct
ttctcaacatgttgac

SEQ ID NO: 9893 - DNA, 16 bp, Artificial Sequence
  Synthetic construct
ttctcctcatacgccg

SEQ ID NO: 9894 - DNA, 16 bp, Artificial Sequence
  Synthetic construct
ttctcctcatacgccg

SEQ ID NO: 9895 - DNA, 16 bp, Artificial Sequence
  Synthetic construct
ttcttagaggcatgtg

SEQ ID NO: 9896 - DNA, 16 bp, Artificial Sequence
  Synthetic construct
ttcttagaggcatgtg

SEQ ID NO: 9897 - DNA, 16 bp, Artificial Sequence
  Synthetic construct
ttcttagcagacaaat

SEQ ID NO: 9898 - DNA, 16 bp, Artificial Sequence
  Synthetic construct
ttcttagcagacaaat

SEQ ID NO: 9899 - DNA, 16 bp, Artificial Sequence
  Synthetic construct
ttcttagcatgcaact

SEQ ID NO: 9900 - DNA, 16 bp, Artificial Sequence
  Synthetic construct
ttcttagcatgcaact

SEQ ID NO: 9901 - DNA, 16 bp, Artificial Sequence
  Synthetic construct
ttcttaggtaccggct

SEQ ID NO: 9902 - DNA, 16 bp, Artificial Sequence
  Synthetic construct
ttcttaggtaccggct

SEQ ID NO: 9903 - DNA, 16 bp, Artificial Sequence
  Synthetic construct
ttgaacggtttccacc

SEQ ID NO: 9904 - DNA, 16 bp, Artificial Sequence
  Synthetic construct
ttgaacggtttccacc

SEQ ID NO: 9905 - DNA, 16 bp, Artificial Sequence
  Synthetic construct
ttgaacgtcaacggga

SEQ ID NO: 9906 - DNA, 16 bp, Artificial Sequence
  Synthetic construct
ttgaacgtcaacggga

SEQ ID NO: 9907 - DNA, 16 bp, Artificial Sequence
  Synthetic construct
ttgaacgtcggacaag

SEQ ID NO: 9908 - DNA, 16 bp, Artificial Sequence
  Synthetic construct
ttgaacgtcggacaag

SEQ ID NO: 9909 - DNA, 16 bp, Artificial Sequence
  Synthetic construct
ttgacttgtcatcggc

SEQ ID NO: 9910 - DNA, 16 bp, Artificial Sequence
  Synthetic construct
ttgacttgtcatcggc

SEQ ID NO: 9911 - DNA, 16 bp, Artificial Sequence
  Synthetic construct
ttgccgtagcagcgta

SEQ ID NO: 9912 - DNA, 16 bp, Artificial Sequence
  Synthetic construct
ttgccgtagcagcgta

SEQ ID NO: 9913 - DNA, 16 bp, Artificial Sequence
  Synthetic construct
ttgccgtagggagtaa

SEQ ID NO: 9914 - DNA, 16 bp, Artificial Sequence
  Synthetic construct
ttgccgtagggagtaa

SEQ ID NO: 9915 - DNA, 16 bp, Artificial Sequence
  Synthetic construct
ttgccgtcagtccttc

SEQ ID NO: 9916 - DNA, 16 bp, Artificial Sequence
  Synthetic construct
ttgccgtcagtccttc

SEQ ID NO: 9917 - DNA, 16 bp, Artificial Sequence
  Synthetic construct
ttgcgtcagtcttgca

SEQ ID NO: 9918 - DNA, 16 bp, Artificial Sequence
  Synthetic construct
ttgcgtcagtcttgca

SEQ ID NO: 9919 - DNA, 16 bp, Artificial Sequence
  Synthetic construct
ttggaacagtctcaac

SEQ ID NO: 9920 - DNA, 16 bp, Artificial Sequence
  Synthetic construct
ttggaacagtctcaac

SEQ ID NO: 9921 - DNA, 16 bp, Artificial Sequence
  Synthetic construct
ttggaacgttcggcac

SEQ ID NO: 9922 - DNA, 16 bp, Artificial Sequence
  Synthetic construct
ttggaacgttcggcac

SEQ ID NO: 9923 - DNA, 16 bp, Artificial Sequence
  Synthetic construct
ttggcaatcgttacag

SEQ ID NO: 9924 - DNA, 16 bp, Artificial Sequence
  Synthetic construct
ttggcaatcgttacag

SEQ ID NO: 9925 - DNA, 16 bp, Artificial Sequence
  Synthetic construct
ttgtaggagtcttgca

SEQ ID NO: 9926 - DNA, 16 bp, Artificial Sequence
  Synthetic construct
ttgtaggagtcttgca

SEQ ID NO: 9927 - DNA, 16 bp, Artificial Sequence
  Synthetic construct
tttatgcagctgataa

SEQ ID NO: 9928 - DNA, 16 bp, Artificial Sequence
  Synthetic construct
tttatgcagctgataa

SEQ ID NO: 9929 - DNA, 16 bp, Artificial Sequence
  Synthetic construct
tttgcgcagctgcaag

SEQ ID NO: 9930 - DNA, 16 bp, Artificial Sequence
  Synthetic construct
tttgcgcagctgcaag

SEQ ID NO: 9931 - DNA, 16 bp, Artificial Sequence
  Synthetic construct
tttgtcaaggtgctag

SEQ ID NO: 9932 - DNA, 16 bp, Artificial Sequence
  Synthetic construct
tttgtcaaggtgctag

SEQ ID NO: 9933 - DNA, 16 bp, Artificial Sequence
  Synthetic construct
tttgtcaaggtgcttt

SEQ ID NO: 9934 - DNA, 16 bp, Artificial Sequence
  Synthetic construct
tttgtcaaggtgcttt

SEQ ID NO: 9935 - DNA, 16 bp, Artificial Sequence
  Synthetic construct
tttgtcagtgataagt

SEQ ID NO: 9936 - DNA, 16 bp, Artificial Sequence
  Synthetic construct
tttgtcagtgataagt

SEQ ID NO: 9937 - DNA, 16 bp, Artificial Sequence
  Synthetic construct
tttgtcagttgaactc

SEQ ID NO: 9938 - DNA, 16 bp, Artificial Sequence
  Synthetic construct
tttgtcagttgaactc

SEQ ID NO: 9939 - protein, 122 aa, Artificial Sequence
  Synthetic construct
QVQLVQSGAEVKKPGASVKVSCQTSGYTFTSYYMHWVRQAPGQGLEWMGIINPSGGSTSYTQKFQGRVTMTRDTSTSTVYMELSSLRSEDTAMYYCARELVRSEGTAGFDYWGQGTLVTVSS

SEQ ID NO: 9940 - protein, 121 aa, Artificial Sequence
  Synthetic construct
QVQLVESGGGVVQPGRSLRLSCAASGFSFSSYGMHWVRQAPGKGLEWVTLIWFDGSNQYYADSVKGRFTISRDNSKNTLYLQMNSLRGEDTAVYYCAREGAVGATSGLDYWGQGTLVTVSS

SEQ ID NO: 9941 - protein, 117 aa, Artificial Sequence
  Synthetic construct
QVQLVESGGGVVQPGRSLRLSCAASGFIFSTYAMHWVRQAPGKGLEWVALISYDGTNKYHADSVKGRFTISRDNSKNTVYLQMNSLRPEDTAVYYCARGPGDNLDYWGQGTLVTVSS

SEQ ID NO: 9942 - protein, 125 aa, Artificial Sequence
  Synthetic construct
QLQMQESGPGLVKPSETLSLTCTVSGGSISSSNYYWDWIRQPPGKGLEWIGSIYYSGITYYNPSLKSRVTISVDTSKNQFSLKLSSVTAADTALYYCARRGRYCSSTSCLEIDYWGQGTLVTVSS

SEQ ID NO: 9943 - protein, 119 aa, Artificial Sequence
  Synthetic construct
EVQLVQSGAEVKKPGESLRISCKGSGYTFTSNWITWVRQMPGRGLEWMGRIDPGDPYSNSSPSFQGHATLSLDRPINTAYLHWSSLKASDTAMYYCARVNPVGGGPDYWGQGTLVTVSS

SEQ ID NO: 9944 - protein, 120 aa, Artificial Sequence
  Synthetic construct
QVQLVQSGAEVKKPGASVKVSCKASGYTFTSYDINWVRQATGQGLEWMGWMNPNSGHTVFAQKFQGRVTMTTDTSLSTAYMELSSLRSEDTAVYYCARGWIGYQLICAYWGQGTLVTVSS

SEQ ID NO: 9945 - protein, 130 aa, Artificial Sequence
  Synthetic construct
QVQLVQSGSELKKPGASVQVSCKASGYIFTTYGMNWVRQAPGQGLEWMGWINTNTGNPTYAQGFTGRFVFSLDTSVSTAYLQISSLKAEDTAVYYCARDHRDYYDSGTSYYIGENGLDPWGQGTLVTVSS

SEQ ID NO: 9946 - protein, 128 aa, Artificial Sequence
  Synthetic construct
QVQLVESGGGVVQPGRSLRLSCAASGFSFSSYGMHWVRQAPGKGLEWVAVISYDGSNEYYGDSVKGRFTISRDNSKNTLYLQMNSLRAEETAVYYCAKAHSSSWYNPLFHPSDAFDIWGQGTTVTVSS

SEQ ID NO: 9947 - protein, 127 aa, Artificial Sequence
  Synthetic construct
EVQLVESGGGLVQPGRSLRLSCAASGFTFDDYAMHWVRQAPGKGLEWVSGISWNSGSIGYADSVKGRFTISRDNAKNSLYLQMNSLRAEDTALYYCAKEGAAAGQKTYYYYYYMDVWGKGTTVTVSS

SEQ ID NO: 9948 - protein, 115 aa, Artificial Sequence
  Synthetic construct
EVQLVESGGGLVQPGGSLRLSCAASGLTVSSNYMSWVRQAPGKGLEWVSLIFAGGSTFYADSVRGRFTISRDNSNNTLYLQMSSLRPEDTAVYYCARVIQHLDSWGQGTQVTVSS

SEQ ID NO: 9949 - protein, 119 aa, Artificial Sequence
  Synthetic construct
QVQLQESGPGLVKPSETLSLTCTVSNGSISRYYWSWIRQPPGKGLEWIGYIFYSGSTNYNASLKSRVTISLDTSKNQFSLKLNSVTAADTALYYCARVAASVGYCFDYWGQGTLVTVSS

SEQ ID NO: 9950 - protein, 127 aa, Artificial Sequence
  Synthetic construct
EVQLVDSGGGLVQPGGSLRLSCAASGFTFSSYSMNWVRQAPGKGLEWVSYISSSSTTVYYADSVKGRFTISRDNAKNSLYLQMNSLRDEDTAVYYCARDALPYYDFWNGPQGAFDIWGQGTMVTVSA

SEQ ID NO: 9951 - protein, 119 aa, Artificial Sequence
  Synthetic construct
QVQVVQSGAEVKKPGASVKVSCEASGYTFTNYGISWVRQAPGQGLEWMGWISPYNGNTHYAQKLQGRVTMTTDTSTSTAYMELRSLTSDDTAVYYCARDGEQRGWLDPWGQGTLVTVSS

SEQ ID NO: 9952 - protein, 122 aa, Artificial Sequence
  Synthetic construct
EVQLVESGGAMVQPGGSLRLSCAASGFTFDDHAMHWVRQTPGKGLEWVSLISWDGDDTYYADSVRGRFTISRDNSKSSLYLQMNSLRAEDTALYYCVKDRNPYDILSGLDYWGQGTLVTVSS

SEQ ID NO: 9953 - protein, 122 aa, Artificial Sequence
  Synthetic construct
EVQLVESGGGLVKPGGSLRLSCAASGFTFSSYTMNWVRQAPGKGLEWVSSISSSGSYMSYADSVKGRFTISRDSAENSLYLQMNSLRAEDTAVYYCARDAISYGDYVSGDYWGQGTLVTVSS

SEQ ID NO: 9954 - protein, 122 aa, Artificial Sequence
  Synthetic construct
QVQLQESGPGLVKPSETLSLTCTVSGGSISSYYWSWIRQPPGKGLEWIGYIYYSGSTNYNPSLKSRVTISVDTSKNQFSLKLSSVTAADTAVYYCARDRRDSSSRYAGFDPWGQGTLVTVSS

SEQ ID NO: 9955 - protein, 130 aa, Artificial Sequence
  Synthetic construct
QVQLQESGPGLVKPSQTLSLTCTVSGGSTSSAFSYWSWIRQPAGKGLEWIGHIYTSGSTNYNPSLKSRVTISVDTSKKQFSLKLSSLTAADTAVYYCARAPGGGYCTNGVCYDAEYFQNWGQGTLVTVSS

SEQ ID NO: 9956 - protein, 119 aa, Artificial Sequence
  Synthetic construct
QVQLVQSGGEVKKPGASVKVSCKTSGYTFNRYGVNWVRQAPGQGLEWMGWISGYSGQTYYAQNLQGRVTLTTDTPTTTAYMELRSLRSDDTAVYYCARGEAYDNYEDYWGQGTLVTVSS

SEQ ID NO: 9957 - protein, 120 aa, Artificial Sequence
  Synthetic construct
EVQLVESGGGLVQPGGSLRLSCAASGFTFSHYWMSWVRQAPGKGLEWVANIKLDGSERYYVDSVKGRFTISRDNAKDSLYLQMNSLRAEDTAVYYCARVSFGEILPADYWGQGTLVTVSS

SEQ ID NO: 9958 - protein, 123 aa, Artificial Sequence
  Synthetic construct
QVQLVESGGGVVQPGRSLRLSCAASGFTFSNYGMHWVRQAPGKGLEWVAVISYDGSNKYYADSVKGRFTISRDNSKNTLYLQMNSLRAEDTAVYYCAKTSGSYGYYYSGMDVWGQGTTVTVSS

SEQ ID NO: 9959 - protein, 122 aa, Artificial Sequence
  Synthetic construct
QVQLVQSGAEVKKPGASVKVSCKASGYTFTRHGISWVRQAPGQGLEWMGWISAYNGNTNYAQKLQGRVTMTTDTSTSTGYMELRSLRSDDTAVYYCARGLAVAGTGAAFDIWGQGTMVTVSS

SEQ ID NO: 9960 - protein, 116 aa, Artificial Sequence
  Synthetic construct
QVQLVESGGGVVQPGRSLRLSCAASGFTFSSFVMHWVRQAPGKGLEWVAVISYDGANKYYADSVKGRFTISRDNSKNTLYLQMNSLRVEDTAVYYCARDSGDFDYWGQGTLVTVSS

SEQ ID NO: 9961 - protein, 125 aa, Artificial Sequence
  Synthetic construct
QVQLVESGGGVVQPGRSLRLSCTASGFTFSSYGMHWVRQAPGKGLEWVAVISYDGYNKYYADSLKGRFTISRDNSKNTLYLQMNSLRVEDTAVYYCAKAPTDSSGWYTPGTFESWGQGTKVTVSS

SEQ ID NO: 9962 - protein, 124 aa, Artificial Sequence
  Synthetic construct
QVQLVQSGAEVKKPGASVKVSCKVSGYTLIELAMHWVRQAPGKGLEWMGGFDPEDGETIYAQKFQGRVTMTEDTSTDTAYMELSSLTSEDTAVYYCATGPPYYSESSGGWFDPWGQGTLVTVSS

SEQ ID NO: 9963 - protein, 131 aa, Artificial Sequence
  Synthetic construct
QVQLVQSGAEVKKPGASVKVSCKASGYTFTSYSINWVRQAPGQGLEWMGWISAYNGSTNYAQKLQGRVTMTTDTSTSTAYMELRSLRSDDTAVYYCARDPASYYDLWSGYVDYYYYGMDVWGQGTTVTVSS

SEQ ID NO: 9964 - protein, 118 aa, Artificial Sequence
  Synthetic construct
QVQLVESGGGVVQPGRSLRLSCAASGFTFSSYGLHWVRQAPGKGLEWVAVIWFDGSSKDYADSVKGRFTISRDNSKNTLYLQMNSLRAEDTAVYYCAREGLLQRIDYWGQGTLVTVSS

SEQ ID NO: 9965 - protein, 124 aa, Artificial Sequence
  Synthetic construct
QVQLVQSGAAVKKPGASVKVSCKVSGYTLSEKSMHWVRQVPGKGLEWMGSFDREDGERIYAQTFQGRVSMTEDTSSDTAYMELRSLRSEDTAVYYCATDIGSAHSGTSFYMDVWGKGTTVTVSS

SEQ ID NO: 9966 - protein, 119 aa, Artificial Sequence
  Synthetic construct
EVQLVESGGGLVKPGGSLRLSCAASGFTFSNAWMSWVRQAPGKGLEWVGRIKSKTDGGTTDYAAPVKGRFTISRDDSKNTLYLQMNSLKTEDTAVYYCTHYSNYVFWYWGQGTLVTVSS

SEQ ID NO: 9967 - protein, 123 aa, Artificial Sequence
  Synthetic construct
QVQLQQWGAGLLKPSETLSLICAVYGGSFSGYYWSWIRQPPGKGLEWIGEINHSGSTNYNPSLKSRVTISVDTSKNQFSLKLSSVTAADTAVYYCARVRMQLPLYHYYGMDVWGQGTTVTVSS

SEQ ID NO: 9968 - protein, 124 aa, Artificial Sequence
  Synthetic construct
QVQLVESGGGVVQPGNSLRLSCAASGFTFSSYGMHWVRQAPGKGLEWVAVIWSDGSNKYYIDSVKGRFTISRDNSKNTLHLQMNSLRAEDTAVYYCAREHVTAVAGTTYTMDVWGQGTAVTVSS

SEQ ID NO: 9969 - protein, 121 aa, Artificial Sequence
  Synthetic construct
QVQLQQWGAGLLKPSETLSLTCAVYGGSFSGYYWSWIRQSPGKGLEWIGEINHSGSTSYNPSLKSRVTLSLDTSKSQFSLKLTSVTAADTAVYYCARDDGSGLHNYYMDVWGTGTTVAVSS

SEQ ID NO: 9970 - protein, 116 aa, Artificial Sequence
  Synthetic construct
QVQLVESGGGVVQPGRSLRLSCAASGITLKDYGMHWVRQAPGRGLEWVAFISYDGSVQHYADSVKGRFTISRDDLKNTLFLQMNSLRADDAAVYYCAKGATKIDFWGQGTLVTVSS

SEQ ID NO: 9971 - protein, 127 aa, Artificial Sequence
  Synthetic construct
QVQLQESGPGLVKPSQTLSLTCTVSGGSISSGSYYWSWVRQPAGKGLEWIGRVYISGSTNYNPSLKSRVTISVDTSNNQFSLQLSSVTAADTAVYYCARAELGLVPATIGSNAFDIWGQGTMVTVSS

SEQ ID NO: 9972 - protein, 118 aa, Artificial Sequence
  Synthetic construct
QVQLQESGPGLVKPAETLSLTCTVSGGSISSYYWSWIRQPPGKGLEWIGYIYYSGSTNYNPSLKSRVTISVDTSKNQFSLNLTSVTAADTAVYYCARDRLGNAPFDIWGQGTMVTVSS

SEQ ID NO: 9973 - protein, 120 aa, Artificial Sequence
  Synthetic construct
QVQLVQSGAEVKKPGSSVKVSCKASGGSFSSYTISWVRQAPGQGLEWMGRIIPFLGIANYAQRFQGTVTVTADKSTNTAYMEVSSLRSEDTAVYYCARDRGNNTYWFDPWGQGTLVTVSS

SEQ ID NO: 9974 - protein, 123 aa, Artificial Sequence
  Synthetic construct
QVQLVESGGGVVQPGRSLRLSCAASGFTFSSYGMHWVRQAPGKGLEWVAVISYDGSNKYYADSVKGRFTISRDNSKNTLYLQMNSLRAEDTAVYYCAKDRGSYSGKYFGLGKWGQGTLVTVSS

SEQ ID NO: 9975 - protein, 123 aa, Artificial Sequence
  Synthetic construct
QLQLQESGPGLVKPSETLSLTCTVSGGSISSGSYYWGWIRQPPGKGLEWIGSIYYSGSTYYNPSLKSRVTIFVDTSQNHFFLKLSSVTAADTAVYYCARYVTGYSRDDAFDIWGQGTMVTVSS

SEQ ID NO: 9976 - protein, 124 aa, Artificial Sequence
  Synthetic construct
EVQLVESGGGLVKPGGSLRLSCAASGFTFNTYSMNWVRQAPGKGLEWVSSISRNSDIYYADSVKGRFTISRDNAKNSLYLQMNSLRAEDTALYYCARGDLLLWFGELSPNFDYWGQGTLVTVSS

SEQ ID NO: 9977 - protein, 127 aa, Artificial Sequence
  Synthetic construct
EVQLVESGGGLVQPGGSLRLSCAASGFSFSRYNMNWVRQAPGKGLEWLSYISSSSSSIYYADSVKGRFTIFRDNVKNSLYLQMISLRAEDTAVYYCARETIWERHFDWLLSPFFDYWGQGTLVTVSS

SEQ ID NO: 9978 - protein, 126 aa, Artificial Sequence
  Synthetic construct
QVQLQESGPGLVKPAETLSLTCAVSGGSFGLYYWAWIRQSPGKGLECMGNIFYNGDTNYNPSLKSRVTILIDTSKNQFSLKLTSVTAADTAIYYCARIWEGIEQLPGYYYFGMDVWGQGTTVTVSS

SEQ ID NO: 9979 - protein, 125 aa, Artificial Sequence
  Synthetic construct
EVQLVESGGGLVKPGGSLRLSCAASGFTFSSYSMNWVRQAPGKGLEWVSSISSSSSYIYYADSVKGRFTISRDNAKNSLYLQMNSLRAEDTAVYYCATQPGAVTITYYYYGMDVWGQGTTVTVSS

SEQ ID NO: 9980 - protein, 126 aa, Artificial Sequence
  Synthetic construct
EVQLVESGGGLVQPGGSLRLSCAASGFTFSSYAMHWVRQAPGKGLDYVSGISSNGGGTYYANSVKGRFTISRDNSKNTLYLQMGSLRVEDMAVYYCARDSVVVAAQNSVFYGMDVWGQGTTVTVSS

SEQ ID NO: 9981 - protein, 120 aa, Artificial Sequence
  Synthetic construct
EVQLLESGGGLVRPGGSLRLSCAASGFTFSNYAMTWVRLAPGKGLAWVSVISGSGGTSYYADSVSGRFSISRDNSGNMVYLQMNSLRAEDTAVYYCTKGPAFSESYSEVWGQGTLVTVSS

SEQ ID NO: 9982 - protein, 121 aa, Artificial Sequence
  Synthetic construct
QVQLVESGGGVVQPGRSLRLSCAASGFTFSSYAMHWVRQAPGKGLEWVVVISYDGSNKYYADSVKGRFTISRDNSKNTLYMQMNSLRAEDTAVYYCARPRGHTYGTRFDYWGQGTLVTVSS

SEQ ID NO: 9983 - protein, 114 aa, Artificial Sequence
  Synthetic construct
EVQLVESGGGLIQPGGSLRLSCAVSGLTVSYNYMIWVRQAPGKGLEWVSVLYTDDRTYYADSVKGRFTISRDDSKNTLFLQMNSLRAEDTAMYYCASTYKGAYWGQGTMVTVSS

SEQ ID NO: 9984 - protein, 125 aa, Artificial Sequence
  Synthetic construct
QVQLVESGGGLVKPGGSLRLSCAASGFTFSDYYMSWIRQAPGKALEWISYIDTTGSTTYNADSVKGRFTVSRDNAKNSLYLQVDGLRAADTAIYSCARVGYRLLLGSYYYYLDVWGKGTTVTVSS

SEQ ID NO: 9985 - protein, 120 aa, Artificial Sequence
  Synthetic construct
QVQLVQSGAEVRKPGSSVKVSCKASGGTFSSYTISWVRQAPGQGLEWMGRIIPFLGVANYAQTFQGRVTITADKSTSTAYIDLSSLRSEDTAVYYCARDRGNNTYWFDPWGQGTLVTVSS

SEQ ID NO: 9986 - protein, 118 aa, Artificial Sequence
  Synthetic construct
QVQLQQWGAGLLKPSETLSLTCAVYGGSFSGYYWTWIRQPPGKGLEWIGEINHGESTNYNPSLKSRVTISVDTSKNQFSLRLSSVTAADTAVYYCARAIWALWYFDLWGRGTLVTVSS

SEQ ID NO: 9987 - protein, 125 aa, Artificial Sequence
  Synthetic construct
QVQLVQSGAEVKKPGSSVKVSCKASGGTFSSYPITWVRQAPGQGLEWMGRIIPILGIADYPQKFQGRVTITADKSTSTAYMELSSLRSEDTAIYYCAREMGYSSSSSATYYFDYWGQGTLVTVSS

SEQ ID NO: 9988 - protein, 121 aa, Artificial Sequence
  Synthetic construct
QVQLQESGPGLVKPSGTLSLTCTVSGGSISSLNWWSWVRQPPGKGLEWIGEIYHGGSTNYNPSLQSRVTISVDRSKNQFSLKLNSVTAADTAVYYCARDLGLGVGCGMDVWGQGTTVTVSS

SEQ ID NO: 9989 - protein, 121 aa, Artificial Sequence
  Synthetic construct
QVQLVQSGAEVKKPGASVKVSCRVSGYTLIELPIHWVRQAPGEGLEWMGGFDPEDAETIYAQKFQGRVTMTEDTSTDTAYMELSSLRSEDTAVYYCTTTSPLTTPAWFDPWGQGTLVTVSS

SEQ ID NO: 9990 - protein, 126 aa, Artificial Sequence
  Synthetic construct
QVQLHLSGPGLVKPSQTLSLTCTVSGDSISSGDYYWSWIRQHPGKGLEWIGYIYYSGSSYYTPSLKSRVTISVDTSKNQFSLKLRSVTAADTAVYYCATGRRRLLTGYLDIMNDYWGQGTLVTVSS

SEQ ID NO: 9991 - protein, 125 aa, Artificial Sequence
  Synthetic construct
QVQLVESGGGVVQPGRSLRLSCAASGFTFSSYGMHWVRQAPGKGLEWVALISFDGSNEDYADSVKGRFTISRDNSNKTLYLQMNSLRAEDTAVYYCAKVAAWYGYESSGYYYDYWGQGTLVTVSS

SEQ ID NO: 9992 - protein, 125 aa, Artificial Sequence
  Synthetic construct
QVQLVQSGAEVKKPGASVKVSCKVSGYTLTTYAMHWVRQAPGQRLEWMGWINGGNGNTEYSQKFQGRVTITRDTSASTAYMELSSLRSEDTAVYYCARDHEGSRPVYYYYAMDVWGQGTTVTVSS

SEQ ID NO: 9993 - protein, 119 aa, Artificial Sequence
  Synthetic construct
QVQLVQSGAEVKKPGASVKVSCKASGYTFTNYGLSWVRQAPGQGLEWMGWISPYNDNTNYAQKLQGRVTMTTDTSTSTAYMELRSLRSDDTAVYYCAATYYYLGSLDIWGKGTTVTVSS

SEQ ID NO: 9994 - protein, 121 aa, Artificial Sequence
  Synthetic construct
QVQLQQWGAGLLKPSETLSLTCAVYGGSFSGYYWSWIRQPPGKGLEWIGEINHSGSTNYNPSLKSRVTISLDTSRTQFSLKMYSVTAADTAVYYCARGQGSGWKAYAFDIWDQGAMVAVSS

SEQ ID NO: 9995 - protein, 121 aa, Artificial Sequence
  Synthetic construct
EVQLLESGGGLVQPGGSLRLSCAASGFTFSKFAVNWVRQAPGKGLEWVSTMSGSGGNAYYADFVKGRFTISRDNSKNTLDLQMTSLRTEDTAIYYCARGRIMGATFSFDPWGQGTLVTVSS

SEQ ID NO: 9996 - protein, 128 aa, Artificial Sequence
  Synthetic construct
QVQLQQSGPGLVKPSQTLSLTCAVSGDYVSSNSAAWNWIRQSPSRGLEWLGRTYYRSEWYNDYAVSVKSRITINPDTSKNQFSLHLNSVTPEDTAVYYCARGRDSSGLDFYYSGLDVWGQGTTVTVSS

SEQ ID NO: 9997 - protein, 129 aa, Artificial Sequence; identical to SEQ ID NO: 2281
  Synthetic construct

SEQ ID NO: 9998 - protein, 124 aa, Artificial Sequence
  Synthetic construct
EVQLVESGGGLVQPGGSLRLSCAASGFTFSSYDMHWVRQVTGEGLEWVSGIGTAGDAYYSDSVKGRFTISRENAQNSLHLQMNSLRAGDTAVYYCVRAEGVNLVRAVIGAFDIWGQGTMVTVSS

SEQ ID NO: 9999 - protein, 122 aa, Artificial Sequence
  Synthetic construct
QLQLQESGPGLVKPSETLSLTCTVSGGSISSDNYYWGWIRQPPGRGLEWIGIIYYSGSTYYNPSLKSRVTISVDTSKNQFSLKVSSVTAADTAVYYCARHRYNNGHYYMDVWGKGTTVTVSS

SEQ ID NO: 10000 - protein, 124 aa, Artificial Sequence
  Synthetic construct
QVQLQQWGAGLLRPSETLSRTCAVYGGSFSDFFWSWVRQAPGKGLEWIGEINHRRTTNFNRSLKGRVSMSVDPSKNQFSLMVSSVSRADTAVYYCARGRPNYGADLDLLAFDVWGQGALVTVST

SEQ ID NO: 10001 - protein, 117 aa, Artificial Sequence
  Synthetic construct
QVQLVESGGGVVQPGRSLRLSCTASGFTFSSYGMHWVRQAPGKGLEWAAVISSDGTYKSYADSVKGRFPISRDNSKNTLYLQMNNLRVEDTAVYYCAKDSSGIPDYWGQGTLVTVSS

SEQ ID NO: 10002 - protein, 122 aa, Artificial Sequence
  Synthetic construct
QVQLVQSGSELKKPGASVRVSCKASGYTFIDYAMNWVRQAPGQGLEWMGWINTNTGNPTYAQGFTGRFVFSLDTSVSTAYLQISSLKAEDTAVYYCARDFEEMATIRPFDYWGQGTLVTVSS

SEQ ID NO: 10003 - protein, 119 aa, Artificial Sequence
  Synthetic construct
QLQLQESGPGLVKPSETLSLTCTVSGGSISSSSYYWGWIRQPPGKGLEWIGSIYYSGSTYYNPSLKSRVIISVDTSKNQFSLKLSSVTAADTAVYYCAAGLGHWYFDLWGRGTLVTVSS

SEQ ID NO: 10004 - protein, 123 aa, Artificial Sequence
  Synthetic construct
QVQLVQSGAEVKKPGASVKVSCKISEYTLTELSMHWVRQAPGKGLEWMGGFDPEDGETIYAQKFQGRVTMTEDTSTDTAYMELSSLRSEDTAVYYCATVPPLVSASYNWFDPWGQGTLVTVSS

SEQ ID NO: 10005 - protein, 125 aa, Artificial Sequence
  Synthetic construct
QVQLQESGPGLVRPSQTLSLTCTVSGGSITSGLYYWSWIRQPAGKGLEWIGRVYTSGTTNYNPSLESRVTVSVDTSKNQFSLKLNSVTAADTAVYFCARVGSGTYYTDYYGMGVWGQGTTVTVSS

SEQ ID NO: 10006 - protein, 120 aa, Artificial Sequence
  Synthetic construct
QVQLVESGGGLVQPGRSLRLSCAASGFSFDDFAMHWVRQPPGKGLEWVSGITWNGGILGHADSVKGRFIISRDNARNSLYLQMNSLRDEDTALYYCVKDSSRDYGGSDFWGQGTLVTVSS

SEQ ID NO: 10007 - protein, 126 aa, Artificial Sequence
  Synthetic construct
EVQLVESGGGLIQPGGSLRLSCAASGFTVSDKYMNWVRQAPGKGLEWVSVISSGGDTFYADSVKGRFTVSRDNSKNTLFLQMNSLRVEDTAVYYCAKDWGRSGTTWAYYYYGMDVWGQGTTVTVSS

SEQ ID NO: 10008 - protein, 125 aa, Artificial Sequence
  Synthetic construct
EVQLVQSGAEAKKPGESLKISCQGFGYTFASNWIGWVRQMPGKGLEWMGIIYPGDSDTRYSPSFQGQVTISADKSISTAYLQWSSLKASDTAIYYCARLNSGYDFYSYYYYMDVWGKGTTVTVSS

SEQ ID NO: 10009 - protein, 116 aa, Artificial Sequence
  Synthetic construct
QVQLVESGGGVVQPGRSLRLSCAASGFTFNKYGMHWVRQAPGRGLEWMAFISYDGSVQHYVDSVKGRFTISRDDFKNTLFLQMTSLRVDDTAVYYCAKGATKMDYWGQGTLVTVSS

SEQ ID NO: 10010 - protein, 121 aa, Artificial Sequence
  Synthetic construct
QAMLEESGGDVVQPGGSLRLSCVASGFSVFNYAFNWVRQAPGKGLEWVSHISSSSGNIYYAESVKGRFTVSRDNAKKSLYLHMDNLRAEDMGVYFCARAGAAAYYFFMDVWGIGTTVIVSS

SEQ ID NO: 10011 - protein, 119 aa, Artificial Sequence
  Synthetic construct
EVQLVQSGAEVKKPGESLRISCKGSGYTFTNNWITWVRQMPGKGLEWMGRIDPGDPYSNSSPSFQGHATLSLDKPINTAYLHWSSLKASDTAMYYCARVNLVGGGPDYWGQGTLVTVSS

SEQ ID NO: 10012 - protein, 122 aa, Artificial Sequence
  Synthetic construct
QVQVVESGGGVVQPGRSLRLSCVASGFTFSSYGMHWVRQAPGKGLEWAAVIWFDGSNKYYADSVKGRFTISRDNSKNTVYLQMNSLRAEDTAVYYCARESVADTLIGAFDIWGQGTMVTVSS

SEQ ID NO: 10013 - protein, 127 aa, Artificial Sequence
  Synthetic construct
QVHLVQSGAEVKKPGASVRISCRASGYNFNNSAIHWVRQAPGQGLEWMGWINGGSGHTRYSETFQGRATITRDTSATTIYMELSGLRSDDTAVYYCARGNGAALAAVADGYNWFGPWGQGSLVTVSS

SEQ ID NO: 10014 - protein, 130 aa, Artificial Sequence
  Synthetic construct
EVQLVESGGGLVQPGGSLRLSCAASGFTFSSYWMSWVRQAPGKGLEWVANIKQDGSEKYYVDSVKGRFTISRDNAKNSLYLQMNSLRAEDTAVYYCARVQNGYFDWLFNAGYHYYYMDVWGKGTTVTVSS

SEQ ID NO: 10015 - protein, 119 aa, Artificial Sequence
  Synthetic construct
EVQLVESGGGLVQPGGSLRLSCAASRFTFSTYAMSWVRQAPGKGLEWVSTISGSGESTYYADSVRGRLTLSRDNSKNTLYLQMNSLRAEDTAVYYCVKDLGNFGSGSYVGQGTLVTVSS

SEQ ID NO: 10016 - protein, 121 aa, Artificial Sequence
  Synthetic construct
QVQLVESGGDVVQPGGSLRLSCAASGFTLSTYDINWVRQAPGKGLEWVAVIWSDGDNKYYADSVRGRFTISRDTSKNTLYLQMNTLRAEDTAVYFCARRRRDGYNFYLDYWGQGTLVTVSS

SEQ ID NO: 10017 - protein, 122 aa, Artificial Sequence
  Synthetic construct
QVQLVQSGAEVKKPGSSVKVSCKASGGTFSSYAITWVRQAPGQGLEWMGGIIPIFGTANYAQQFQGRVTITADESTRTAYMELSSLRSEDTAVYYCARWDHYDSSGHYFDYWGQGTLVTVSS

SEQ ID NO: 10018 - protein, 128 aa, Artificial Sequence
  Synthetic construct
QVQLVQSGAEVKKPGASVKVSCKVSGYTLTELSMHWVRQAPGKGLEWMGGFDPEDGETIYAQKFQGRVTMTEDTSTDTAYMELSSLRSEDTAVYYCATGFSIVPANVGYYYYYGMDVWGQGTTVTVSS

SEQ ID NO: 10019 - protein, 112 aa, Artificial Sequence
  Synthetic construct
QVQLQESGPGLVKPSETLSLTCTVSGGSVSGYYWSWIRQPPGKGLEWIGYIYYSGSTNYNPSLKSRVTISVDTSKNQFSLNLSSVTAADTAVYYCARGFDPWGQGTLVTVSS

SEQ ID NO: 10020 - protein, 126 aa, Artificial Sequence
  Synthetic construct
EVQLVQSGTEVKKPGESLRISCKGSGYSFTNYWITWVRQMPGKGLEWMGRIDPSDSYTDYSPSFQGHVTISADKSISTAYLQWSSLRASDTAMYYCARHLEGYCTSGSCLNWFDPWGQGTLVTVSA

SEQ ID NO: 10021 - protein, 121 aa, Artificial Sequence
  Synthetic construct
QVQLVESGGGLVKPGGSLRLSCAASGFTFNDYYMSWIRQAPGKGLEWVSYISNSGNIIHYGDSVKGRFTISRDNAKNSLFLQMSSLRAEDTAVYYCVRGGSDYYLSAFDTWGQGTMVTVSS

SEQ ID NO: 10022 - protein, 130 aa, Artificial Sequence
  Synthetic construct
QVQLVQSGAEVKKPGSSVKVSCKASGDTFSSYTIGWVRQAPGQGLEWMGAIIPIFGATNYAQKFQGRVTMTADESTSTAYMELSSLRSDDTAVYYCARDQYTMWVTGPPPPDFFYNMDVWGKGTTVTVSS

SEQ ID NO: 10023 - protein, 122 aa, Artificial Sequence
  Synthetic construct
EVQLVQSGAEVKKPGESLKISCKGSGYSFTTYWIAWVRQMPGKGLEWMGIIYPGDSDTRYSPSFQGQVTISADKSVSTAYLQWSSLKASDTAMYYCARQGMATITGVGFDPWGQGTLVTVSS

SEQ ID NO: 10024 - protein, 121 aa, Artificial Sequence
  Synthetic construct
QVQLVESGGGVVQPGRSLRLSCAASGFTFSSYGMHWVRQAPGKGLEWVAVIWYDGSKKDYADSVKGRFTISRDNSKNTLDLHMNSLRVEDTAVYYCAREGAVGSTTGLDYWGQGTLVTVSS

SEQ ID NO: 10025 - protein, 122 aa, Artificial Sequence
  Synthetic construct
QVQLVQSGAEVKKPGSSVKVSCKASGGTFTSYAFSWVRQAPGQGLEWMGGIIPIFGTANYAQKFQGRVTITADESTGTAYMELSSLRSEDTAVYFCARVGAYESSGYFQDSWGQGTLVTVSS

SEQ ID NO: 10026 - protein, 127 aa, Artificial Sequence
  Synthetic construct
QVQLVESGGGVVQPGRSLRLSCAASGITVNYFGMHWVRQAPGKGLEWVAFISYDGGNVYYSDSVKGRFTISRDTAKNTAYLEMNSLRTEDTAVYYCAKDHLQEWELLMNNYYGLDVWGQGTAVTVSS

SEQ ID NO: 10027 - protein, 124 aa, Artificial Sequence
  Synthetic construct
QVQLVESGGGLVKPGGSLRLSCAASGFTFNDYYMSWIRQAPGKGLEWISYISSSGNYTKYADSVKGRFTISRDNARNSLYLQMSSLRAEDTAVYYCVRDQYSSLYYYYYGMDVWGQGTTVTVSS

SEQ ID NO: 10028 - protein, 125 aa, Artificial Sequence
  Synthetic construct
DVQLVESGGRLVQPGGSLRLSCSASGFNFNSFSMGWVRQAPGKGLEWVSSVSASGNIKYYADSVRGRFSISRDNSKNTLFLQLNSLRVEDTAVYYCAKGKGTSQGEWLVNTFDPRGQGSRVSVSP

SEQ ID NO: 10029 - protein, 124 aa, Artificial Sequence
  Synthetic construct
EVQLVESGGALVQPGGSLRLSCAASAFTFSSYWMSWVRQAPGKGLEWVANIKEDGSEEYYVDSVKGRFTISRDNAKRSLYLQMNSLRAEDSAVYYCAREHGFRFYYYYYYMDVWGKGTTVTVSS

SEQ ID NO: 10030 - protein, 122 aa, Artificial Sequence
  Synthetic construct
QVQLVQSGAEVKRPGASVKVSCKASGYTFTNYGINWVRQAPGQGLEWMGWITTYTGYTNYAQKFQGRVTLTTDTSTTTAYMELSSLRSDDTAVYYCAREGSWRFGEYNIDYWGQGSLVTVSS

SEQ ID NO: 10031 - protein, 124 aa, Artificial Sequence
  Synthetic construct
EVQLVESGGGLVKPGGSLRLSCAASGFTFSNYSMNWVRQAPGKGLEWVSSISSGSNFIYYTDSVKGRFSISRDNARNSVYLQMNSLRVEDTAVYYCARDPMVRGLFYFYYMDVWGKGTTVTVSS

SEQ ID NO: 10032 - protein, 120 aa, Artificial Sequence
  Synthetic construct
DEQLVESGGGLVKPGGSLRLSCKGSGFTFRVAWLTWVRQAPGKGLEWVARIKNKNDGGTTDYAAAVKGRFTISSDESENTLYLQMNSLKTEDTAVYYCATVGMVWANDHWGQGTLVTVSS

SEQ ID NO: 10033 - protein, 125 aa, Artificial Sequence
  Synthetic construct
EVQLLESGGGLVQPGGSLRLSCAASGFTFSSYAMSWVRQAPGKGLEWVSGMSGSGGSIYYADSVKGRFTISRDNSKNTLYLQMNSLRAEDTAVYYCAKDKTKNQLLYYYHAMDVWGQGTTVTVSS

SEQ ID NO: 10034 - protein, 125 aa, Artificial Sequence
  Synthetic construct
QITLKESGPTLLKPTQTLTLTCTFSGFSISTPGVGVGWLRQPPGKALEWLALIYWDDDERYSPPLKNRLTITKATSKNQVVFTMTYMDPLDTATYYCAHSRDSVWTSRKLFFDSWGQGVLVTVSS

SEQ ID NO: 10035 - protein, 122 aa, Artificial Sequence
  Synthetic construct
EVQLVESGGGLVQPGGSLRLSCAASGFTFSSYWMSWVRQAPGKGLEWVANIKQDGSEKYYVDSVKGRFTISRDNAKNSMYLQMNSLRAEDTAVYYCARRRIVAADDNWFDPWGQGTLVTVSS

SEQ ID NO: 10036 - protein, 122 aa, Artificial Sequence
  Synthetic construct
EVQLLESGGGLVQPGGSLRLSCAASGFTFTSYAMNWVRQAPGKGLEWVSAIDSSGGGTFYADSVKGRFTVSRDNSKSTVYLQMNSLRAEDTALYHCAKDIGSVWAADAFDIWGQGTMVTVSL

SEQ ID NO: 10037 - protein, 121 aa, Artificial Sequence
  Synthetic construct
EVQLVESGGGLIQPGGSLRLSCAASGFTVSSNYMSWVRQAPGKGLEWVSVIYSGGSTYYADSVKGRFTISRDNSKNTLYLQMNSLRAEDTAVYYCASTSSSSSGGHAFYIWGQGTMVTVSS

SEQ ID NO: 10038 - protein, 121 aa, Artificial Sequence
  Synthetic construct
QVQLVQSGSELKQPGASVKVSCKASGYTFTNYAMNWVRQAPGQGLEWMGWINTNTGNPTYAQGFTGRFVFSLDTSVSTAFLLISSLEADDTAVYYCARVSDDFGIPAADYWGQGTPVTVSS

SEQ ID NO: 10039 - protein, 120 aa, Artificial Sequence
  Synthetic construct
QVQLVESGGGVVQPGRSLRLSCAASGFTFSAYAMHWVRQAPGKGLEWVALISYDGSNNYCADSVKGRFTISRDNSKNTLYLQMNSLRVEDTGVFYCAKIVGALWGPVDYWGQGTLVTVSS

SEQ ID NO: 10040 - protein, 120 aa, Artificial Sequence; identical to SEQ ID NO: 2008
  Synthetic construct

SEQ ID NO: 10041 - protein, 116 aa, Artificial Sequence
  Synthetic construct
EVQLLESGGGLVQPGGSLRLACAVSGFTFRTYAMSWVRQAPGKGLEWVSGISGSGGSTYYADSVKGRFTISRDNSKNTLYLQLNSLRAEDTAVYYCAKGGDTFDPWGQGTLVTVSS

SEQ ID NO: 10042 - protein, 117 aa, Artificial Sequence
  Synthetic construct
QVQLVESGGGVVQPGRSLRLSCAASGFTFSDYAMHWVRQAPGKGLEWVAVISYDGSNKFYADSVKGRFTISRDNSKSTLYLRMSSLRTEDTAVFYCAREKTRASDSWGQGTLVTVSS

SEQ ID NO: 10043 - protein, 122 aa, Artificial Sequence
  Synthetic construct
EVQLVESGGGLVQPGGSLRLSCAASGFTFNTYAMSWVRQAPGKGLEWVSAISGSGASTYYADSVKGRFTISRDNSKNTLYLQMNSLRAEDTAVYYCAKVDTAMVTFGYFDYWGQGTLVTVSS

SEQ ID NO: 10044 - protein, 127 aa, Artificial Sequence
  Synthetic construct
QLQLQESGPGLVKPSETLSLTCSVSGATISNTSHYWGWIRQPPGKGLEWLGSAHYDGTTFYNPSLKSRLTISVDTSKTQFSLRLTSVTAADTAVFYCARHSSYYDSSGYVKTSPDYWGPGTPVTVSS

SEQ ID NO: 10045 - protein, 118 aa, Artificial Sequence
  Synthetic construct
EVQLVQSGAEVKKPGESLKISCKGSGYSFTSYWIGWVRQMPGKGLEWMGIINPRDSDTSYSPSFQGQVTISVDKANSTAYLQWSSLKASDTAMYYCGGSYSGDYFDYWGQGTLVTVSS

SEQ ID NO: 10046 - protein, 124 aa, Artificial Sequence
  Synthetic construct
QVQLVESGGGVVPPGRSLRLSCAASGFTFSSYAMHWVRQAPGKGLEWVAVISYDGSNKYYVNSVKGRFTISRDNSKNTLYLLMNSLRAEDTAVYYCARGGYYDFLTGPGYFDYWGQGTLVTVSS

SEQ ID NO: 10047 - protein, 121 aa, Artificial Sequence
  Synthetic construct
QVQLQQWGAGLLKPSETLSLTCAVYGGSFSGYYWSWIRQPPGKGLEWIGEINHSGSTNYNPSLKSRVTISIDTSKNQFSLKVRSVTAADTAVYYCARDDGSSLHNYYMDVWGKGTTVTVSS

SEQ ID NO: 10048 - protein, 130 aa, Artificial Sequence
  Synthetic construct
QVQLQQWGAGLLKPSETLSLTCAVYGGSFSGYYWSWIRQPPGKGLEWIGEINHSGSTNYNPSLKSRVTISVDTSKNQFSLKLSSVTAADTAVYYCARGVRYFDWATVLGGKEPTYYMDVWGKGTTVTVSS

SEQ ID NO: 10049 - protein, 120 aa, Artificial Sequence
  Synthetic construct
QVQLVESGGGLVKPGGSLRLSCAASGFTFSDYYMSWIRQAPGKGLEWVSYISSSDSIIYHADSVKGRFTVSRDNAKSSLYLQMNSLRAEDTAVYYCARDESAVLGAFDIWGQGTMVTVSS

SEQ ID NO: 10050 - protein, 128 aa, Artificial Sequence
  Synthetic construct
EVQLVESGGGLVQPGGSLRLSCAASGFTFSSYDMHWVRQAPGKGLEWVSAIGTSGDTYYPGSVKGRFTISRENAKNSLYLQMNSLRAGDTAVYYCARGEVDSSGWYRLGYYYYYMDVWGKGTTVTVSS

SEQ ID NO: 10051 - protein, 120 aa, Artificial Sequence
  Synthetic construct
EVQLVESGGGLVQPGGSLRLSCAASGFTFSSYDMHWVRQATGKGLEWVSAIATTGDTHYPGSVKGRFTISRENAKSSLYLQMNSLRAGDTAVYYCARALRPFYYYYMDVWGKGTPVTVSS

SEQ ID NO: 10052 - protein, 118 aa, Artificial Sequence
  Synthetic construct
EAQLVESGGGLVQPGGSLRLSCAASGFTVRSSYMAWVRQAPGKGLDWVSVIYTDGSTYYGHSVRGRFIISRDTSTNTVYLQMDSLRLEDTAVYYCARADYNLRGYDSWGQGTLVTVSS

SEQ ID NO: 10053 - protein, 121 aa, Artificial Sequence
  Synthetic construct
QVQLQESGPGLVKPSETLSLTCTVSGDSISNFYWSWIRQPPGKGLEWVGYIYYSGNTNYSPSLKSRVTISVDTSKNQFSLKLRSVTAADTAVYYCARIPNGWIGEFLFDYWGQGSLVTVSS

SEQ ID NO: 10054 - protein, 118 aa, Artificial Sequence
  Synthetic construct
EVQLLESGGTLVRPGGSLRLSCAASGFTFSNYAMSWVRQAPGKGLEWVSAITGSGALTYYADSVKGRFTISRDNSKTTLYLQMNGLRAEDTAVYYCAQDAYIAALYPWGQGTLVTVSS

SEQ ID NO: 10055 - protein, 131 aa, Artificial Sequence
  Synthetic construct
QVQLVQSGAEVKKPGASVKVSCKASGYTFTSYTISWVRQAPGQGLEWMGWISAYNGSTHYAQKLQGRVTMTTDTSTSTAYMELRSLRSDDTAVYYCARDPASYYDLWSGYVDNYYYGLDVWGQGTTVTVSS

SEQ ID NO: 10056 - protein, 124 aa, Artificial Sequence
  Synthetic construct
QVQLVQSGPEVKKPGASVKLSCKASGYTFTTYYIHWVRQAPGQGLEWVGIVDVSGGGTSYPQKLQGRVTMTRDTSTSTVFMELSSLTSEDTAVYYCARDPTRPSSGDPDGFDIWGQGTLLTVSA

SEQ ID NO: 10057 - protein, 125 aa, Artificial Sequence
  Synthetic construct
EVQLVQSGAEVKKPGESLKISCQGFGYTFTRYWIGWVRQMPGKGLEWMGIIYPGDSDTKYSPSFQGQVTISADRSISTAYLQWSSLKASDTAMYYCARTVDTVMVTDRAGAFDIWGQGTMVTVSS

SEQ ID NO: 10058 - protein, 126 aa, Artificial Sequence
  Synthetic construct
QVQLQESGPGLVKPSETLSLTCTVSGGSISSSTYYWGWIRQPPGKGLEWIGSIYYSGSTYYNPSLKSRVTVSVDTSENQFSLKLSSVTAADTAVYYCARLLGEWELLWQGGAPDYWGQGTLVTVSS

SEQ ID NO: 10059 - protein, 128 aa, Artificial Sequence
  Synthetic construct
QVQLVESGGGVVQPGGSLRLSCAASRFTFSGFGMHWVRQAPGKGLEWVAVVSYDGSNKYYADSVKGRFTISRDNSKNTLYLQVHSLRGEDTAVYYCAKAHSSSWYSPLFHPTDAFDIWGQGTMVTVSS

SEQ ID NO: 10060 - protein, 124 aa, Artificial Sequence
  Synthetic construct
QVQLQQWGAGLLKPSETLSLTCAVYGGSFSGYYWNWIRQTPGKGLEWIGQINHSGATNYNPSLKSRFTISVDTSKNQISLRLSSVTAADTAVYYCARGEYTSSFYGVHNWFDPWGQGTLVTVSS

SEQ ID NO: 10061 - protein, 130 aa, Artificial Sequence
  Synthetic construct
QVQLQESGPGLVEPSETLSLTCTVSGDSISSNSHYWGWIRQPPGKGLEWIGSVYYDGTTQYNPSLKTQITISADTSKDEFSLNLSSVTDADTAVYYCAREDYHDASGYLGERYDYYIDVWGKGIMVTVSS

SEQ ID NO: 10062 - protein, 129 aa, Artificial Sequence
  Synthetic construct
QLQLVQSGGGVVQPGMSLRLSCAASGFSLSRHGVHWVRQAPGKGLEWVALLWRDGSKQYYADSVKGRFSLSRDISKNTLYLEMSSLRADDTAVYYCARAKDFWNDAPYSLSRDNWFDVWGQGTLVTVSS

SEQ ID NO: 10063 - protein, 126 aa, Artificial Sequence
  Synthetic construct
QVQLQESGPGLVKPSQTLSLTCTVSGGSISSGSYYWSWIRQPAGKGLEWIGRVYTSGSTNYNPSLKSRVTISVDTSKNQFSLKLSSVTAADTAVYYCARVFWEASWGSESYYFDYWGQGTLVTVSS

SEQ ID NO: 10064 - protein, 129 aa, Artificial Sequence
  Synthetic construct
QVQLVQSGSELKKPGASVKVSCKASGYTFTSYAMNWVRQAPGQGLEWMGWINTNTGNPTYAQGFTGRFVFSLDTSVSTAYLQISSLKAEDTAVYYCAREGRGGYSGYDDYYYYYYMDVWGKGTTVTVSS

SEQ ID NO: 10065 - protein, 123 aa, Artificial Sequence
  Synthetic construct
QVQLVESGGGVVQPGGSLKLSCVTSGFTFNSYGMHWVRQAPGKGLEWVAVIWYDGSNKYYADSVKGRFTVSRDNSKNTVYLQMNSLRAEDTAVYYCAIDLGWSRNAEDAGGTWGQGTLVTVSS

SEQ ID NO: 10066 - protein, 131 aa, Artificial Sequence
  Synthetic construct
QLQLLESGPGLVKPSETLSLTCTVSGDSISSSGYYWGWIRQPPGKGLEWIGIIYYTGSTYYKPSLKSRITISVDTSKNQFSLRLSSVTATDTAVYYCARHVEAYGGYDSKSFYGDYVPADWGQGTQVTVSS

SEQ ID NO: 10067 - protein, 126 aa, Artificial Sequence
  Synthetic construct
EVQLLESGGGLVQPGGSLRLSCAASGFTFSSYAMSWVRQAPGKGLEWVSGISGRGSPTYYSDSVKGRFTISRDNSKNTLHLQMYSLRAEDTAVYYCAKGALKLGDDFWSGYYFDYWGQGTLVTVSS

SEQ ID NO: 10068 - protein, 119 aa, Artificial Sequence
  Synthetic construct
QVQLVQSGAEVKKPGASVKVSCKASGYTFSSYYLHWVRQAPGQGLEWMGIVNPSGGSTGYAEKFQGRVTVTGDTSTSTVYMELSSLRFEDTAVYYCARIGTLGGGMDVWGQGTTVTVSS

SEQ ID NO: 10069 - protein, 121 aa, Artificial Sequence
  Synthetic construct
QVQLQESGPGLEKPSGTLSLTCDVSGGSISSNNWWSWVRQPPGKGLEWIGEIHHSGSTNYNPSLKSRVTISADKSKNQFSLKLNSVTAADTAVYFCARDLGLGVGCGMDVWGQGTTVSVSS

SEQ ID NO: 10070 - protein, 118 aa, Artificial Sequence
  Synthetic construct
EVQLVQSGAEVKKPGESLKISCKGSGYRFTSYWIGWVRQMPGKGLEWMGIIYPDDSDTRYSPSFQGQVSISADKSISTAYLQWSSLKASDSAMYYCARLQSGHPFDPWGQGTLVTVSS

SEQ ID NO: 10071 - protein, 119 aa, Artificial Sequence
  Synthetic construct
QITLKESGPTLVKPTQTLTLTCTFSGFSLSTGGVGVGWIRQPPGKALEWLALIYWDGDKRYSPSLKSRLTITKDTSKNQVVLVMTNMDPVDSATYYCAHHTVPTIYDYWGQGTLVTVSS

SEQ ID NO: 10072 - protein, 120 aa, Artificial Sequence
  Synthetic construct
QVQLVESGGGLVKPGGSLRLSCAASGFIFSDYYMNWIRQAPGKGLEWVSYISGSGNTIYYADSVKGRFTISRDNAKNSLYLQMNSLRAEDTAVYYCARGGWFGEDAFDIWGQGTMVTVSS

SEQ ID NO: 10073 - protein, 129 aa, Artificial Sequence
  Synthetic construct
QVQLVQSGSELKKPGASVKVSCKASGYTFTSFAMNWVRQAPGQGLEWMGWINTNTGNPTYAQGFTGRFVFSLDTSVSTAYLQISSLKAEDTAVYYCARDYSGYDTEGSGAYYYYYMDVWGKGTTVTVSS

SEQ ID NO: 10074 - protein, 118 aa, Artificial Sequence
  Synthetic construct
EVQLVESGGGLIQPGGSLRLTCAASGFIVSSNYMNWVRQAPGKGLESVSVIYSGGSTYYTDSVKGRFTISRDNSKNTLYLQMNSLRAEDTAVYYCARAWALGYAFDIWGQGTVVTVSS

SEQ ID NO: 10075 - protein, 119 aa, Artificial Sequence
  Synthetic construct
EVQLVESGGGLIQPGGSLRLSCAASGVTVSSNYMNWVRQGPGKGLEWVSVIYSGGSTFYADSVKGRFTISRDNSKNKVYLQMNSLRVEDTAVYYCARGGWPSGDVFDVWGQGTMVTVSS

SEQ ID NO: 10076 - protein, 121 aa, Artificial Sequence
  Synthetic construct
QVQLQGSGPGLVKPSETLSLTCTVSNYSISSAYYWGWIRQPPGKGLEWIGSIYHSGSTYYNPSLKSRVTISVDTSKNQFSLTLNSVTAADTAVYFCASGEWAVAATPRDYWGQGALVTVSS

SEQ ID NO: 10077 - protein, 125 aa, Artificial Sequence
  Synthetic construct
QVQLVQSGSELKKPGASVKVSCKASGYTFTKFAMNWVRQAPGQGLEWMGWINTNTGNPTYAQGFTGRFVFSLDTSVSTAYLQISSLKGEDSAVYYCARDRDTGMPDYSYYYMDVWGKGTAVTVSS

SEQ ID NO: 10078 - protein, 119 aa, Artificial Sequence
  Synthetic construct
QVQLVESGGGVVQPGRSLRLSCAASIFTFSSYAMHWVRQAPGKGLEWVAVISYDGSNKYYADSVKGRFTISRDNSKNTLYLQMNSLRAEDTAVYYCARATRGYYYMDVWGKGTTVTVSS

SEQ ID NO: 10079 - protein, 121 aa, Artificial Sequence
  Synthetic construct
QVQLVQSGAEVKKPGASVKVSCKVSGYTLIELSIYWVRQAPGKGLEWMGGFDPEDGETIYAQKFQGRVTMTEDTSTDTAYMELSSLRSEDTAVYFCATASPVTKPAWLDPWGQGTLVTVFS

SEQ ID NO: 10080 - protein, 125 aa, Artificial Sequence
  Synthetic construct
EVQVVESGGGLVKPGGSLRLSCTASGFIFSSYSMNWVRQAPGKGLEWVSSTSSSSSYKYYADSVKGRFTISRDNAKNSLYLQMNSLRAEDTAVYYCARMAGDDNSGYYPYAFDIWGQGTMVTVSS

SEQ ID NO: 10081 - protein, 123 aa, Artificial Sequence
  Synthetic construct
EVQLVGSGGGLVKPGGSLRLSCAASGFTFSNYSMNWVRQAPGKGLEWVSSISTSSSYIYYADSVRGRFTISRDNAKNSLYLQMNSLRAEDTAVYYCARDPVRGFFYYYYMDVWGKGTTVTVSS

SEQ ID NO: 10082 - protein, 120 aa, Artificial Sequence
  Synthetic construct
QVQLVQSGSELKKPGASVKVSCKAPGDTFTIYAMNWVRQAPGQGLEWMGWINTNTGNPTYAQGFTGRFVFSVDTSVSTAYLQINSLKAEDTAIYFCARASYGSAWDLYYWGQGTLVTVSA

SEQ ID NO: 10083 - protein, 124 aa, Artificial Sequence
  Synthetic construct
QVQLQQWGAGLLKPSETLSLTCAVVGGSFSGYYWSWIRQPPGKGLEWIGEINHSGSTNYNPSLRSRVTISVDTSKKQFSLKLSSVTAADTAVYYCARVDLSFTPYYYYYGMDVWGQGTTVTVSS

SEQ ID NO: 10084 - protein, 120 aa, Artificial Sequence; identical to SEQ ID NO: 2008
  Synthetic construct

SEQ ID NO: 10085 - protein, 125 aa, Artificial Sequence
  Synthetic construct
QVQLQESGPGLVKPSQTLSLTCTVSGGSISSGDYYWSWIRQHPGKGLEWIAYIYYSGSTYYNPSLKGRITISVHTSKNQFSLKLSSVTAADTAVYYCARFNRVFGSSSGLAFDIWGQGTVVTVSS

SEQ ID NO: 10086 - protein, 123 aa, Artificial Sequence
  Synthetic construct
EVQLLESGGGLVQPGGSLRLSCAASGFTFSSYAMSWVRQAPGKGLEWVSEISGSGGSTYYADSVRGRFTISRDNSKNTLYLQVNSLRAEDTAVYYCAKGGGVYGDYPEYFDYWGQGTLVTVSS

SEQ ID NO: 10087 - protein, 121 aa, Artificial Sequence; identical to SEQ ID NO: 10053
  Synthetic construct

SEQ ID NO: 10088 - protein, 123 aa, Artificial Sequence
  Synthetic construct
EVQVLESGGGLVQPGGSLRLSCAASGFTFSRYAMSWVRQAPGKGLEWVSGISGSGTSTYYADSVKGRFSISRDNSKNTLYVQMNSLRAEDTAVYYCAKSGWGYDFWSGYFDYWGQGTLVTVSS

SEQ ID NO: 10089 - protein, 129 aa, Artificial Sequence
  Synthetic construct
EVHLVESGGGLVQPGGSLRLSCAASGFTFSSYSMDWVRQAPGKGLEWVSYISSSSSSIYYADSVKGRFTISRDNAKNLVYLQMNSLRAEDTAVYYCARDIADSKYSSGWYKYYYYMDVWGKGTTVTVSS

SEQ ID NO: 10090 - protein, 120 aa, Artificial Sequence
  Synthetic construct
EVLLVESGGGLVKPGGSLRLSCAASGFTFSNAWMTWVRQAPGKGLEWVGRIKSKIDGGTTDYAAAVKGRFTISRDDSKNTLYLQMNSLKTEDTAVYYCTTDSGNWNVPEWGQGTLVTVSS

SEQ ID NO: 10091 - protein, 125 aa, Artificial Sequence
  Synthetic construct
EVQLVESGGGLVQPGGSLRLSCAASGFTFSSYAMSWVRQAPGKGLEWVSAISGSGGSTYYADSVKGRFTISRDNSKNTLYLQMNSLRAEDTAVYYCAKGMGYCSGGSCLRAFDIWGQGTMVTVSS

SEQ ID NO: 10092 - protein, 126 aa, Artificial Sequence
  Synthetic construct
QVQLQESGPGLVKPAETLSLTCAVSGGSFGLYYWAWIRQSPGKGLECMGNVFYNGDTDYNPSLKSRVTISIDTSKNQFSLKLTSVTAADTAVYYCARSWEGIKQLPGYYYFGMDVWGQGTTVTVSS

SEQ ID NO: 10093 - protein, 122 aa, Artificial Sequence
  Synthetic construct
QVQLVESGGGVVQPGRSLRLSCAASGFTFNNFGMHWVRQAPGKGLEWVAVISYDGSNKYYADSVKGRFTISRDNSKNTLFLQMNSLRAEDTAVYYCAREGMVGEAGRSLDHWGQGTLVTVSS

SEQ ID NO: 10094 - protein, 131 aa, Artificial Sequence
  Synthetic construct
EVQLVESGGGLVQPGGSLRLSCAASGFTFSDHYMDWVRQAPGKGLEWVGRTRNKANSYITEYAASVKGRFTISRDDSKNSLYLQMNSLKTEDTAVYYCARVRGGEWVGDLGWYYYYGMDVWGQGTTVTVSS

SEQ ID NO: 10095 - protein, 122 aa, Artificial Sequence
  Synthetic construct
AVQLVQSGAEVKKPGESLRISCQGSGYNFSTFWIAWVRQMPGKGLEWMAIIYPGDSGTRYSPSFQGQVTVSADKSISTAYLHWSTLKASDTGMYYCARPKRGSGSWFPFEYWGQGTLVTVSS

SEQ ID NO: 10096 - protein, 122 aa, Artificial Sequence
  Synthetic construct
QVQLVESGGGVVQPGRSLRLSCAASAFTFSSYAIHWVRQTPGKGLEWVATISHDGTNKYYADSVRGRFTISRDNSRKTVYLQMNSLRADDTAVYKCARPLEDAYYFFYMDVWGKGTTVTVSS

SEQ ID NO: 10097 - protein, 119 aa, Artificial Sequence
  Synthetic construct
QLQLQESGPGLVKPSETLSLTCTVSGASISSSSYWWGWIRQPPGKGLEWIGSIYYSGSTYYNPSLKSRVTISVDTPKEQFSLKLSSVTAADTAVYYCARHPRWWGFDPWGQGTLVTVSS

SEQ ID NO: 10098 - protein, 131 aa, Artificial Sequence
  Synthetic construct
QVQLVESGGGVVQPGRSLRLSCAASGFTFSSYGMHWVRQAPGKGLEWVAVISYDGSNKYYADSVKGRFTISRDNSKNTLYLQMNSLRAEDTAVYYCAKDSYYYDSSGYYYGVYYYYGMDVWGQGTTVTVSS

SEQ ID NO: 10099 - protein, 124 aa, Artificial Sequence
  Synthetic construct
QITLKESGPTLVRPTQTLTLTCTFSGFSLGTSGVGVGWIRQPPGKALEWLALIYWDDDKRYSPSLKSRLTITKDTSKNQVVLTMTNLDPVDTATYYCAHEYIAGVGSGGGFDSWGQGTLVTVSS

SEQ ID NO: 10100 - protein, 125 aa, Artificial Sequence
  Synthetic construct
QLQLQESGPGLVKPSETLSLTCTVSGGSISSGYYYWGWIRQPPGKGLEWIGNVFHSGSTYYNPSLKGRGTISMDTSKNQFSLKLNSVTATDTAVYYCARPTLYGSGSYESYFDSWGQGTLVTVSS

SEQ ID NO: 10101 - protein, 120 aa, Artificial Sequence
  Synthetic construct
EVQLAESGGGLVQPGGSLRLSCVASGFTFSNYAMSWVRQAPGKGLEWVSGISGRAGSTYYADSVKGRFTISRDNSRNTLYLQINSLRAEDSALYYCAKDQESSGGWYDYWGQGTLVTVSS

SEQ ID NO: 10102 - protein, 119 aa, Artificial Sequence
  Synthetic construct
QVQLVQSGAEVKKPGASVKVSCKVSGYTLIELPMHWVRQAPGKGLEWMGGFDPANAETIYAQQLQGRVTMTEDTSTDTAYMELSRLTSEDTAVYYCATVTLMIQVFADWGQGTLVTVSS

SEQ ID NO: 10103 - protein, 120 aa, Artificial Sequence
  Synthetic construct
QVQLVESGGGVVQPGRSLRLSCAASGFTFSSYAMHWVRQAPGKGLEWVAVISYDGSNKYYADSVKGRFTISRDSSKNTLYLQMNSLRAEDTAVYYCARGKGGNYYYFDYWGQGTLVTVSS

SEQ ID NO: 10104 - protein, 125 aa, Artificial Sequence
  Synthetic construct
EVQLVESGGGLVQSGGSLRLSCAASRFTFSGFAMAWVRQAPGKGLEWVSGISGGGGATYYADSVKGRFTISRDNFQNTLYLQMSSLRAEDTAVYYCAKEALAGQMYYYFYYMDVWGKGTTVTVSS

SEQ ID NO: 10105 - protein, 132 aa, Artificial Sequence
  Synthetic construct
EVQLVQSGAEVKKPGQSLKISCEASGYSFPTYWIGWVRQMPGKGLEWMGIINPDDSDTRYSPSFQGQVTISADKSISTAYLQWSSLKASDTAMYFCARTSRTFRYFDWSPQRRLYSYGIDVWGQGTTVTVSS

SEQ ID NO: 10106 - protein, 119 aa, Artificial Sequence
  Synthetic construct
EVQLVETGGGLIQPGGSLRLSCAVSGFTVSNNYMTWVRQAPGKGLDWVSFIYSDGSTSNADAVKGRIIISRDKSKNTLFLQMNSLRAEDTAVYYCGRVILWWGGAVDVWGKGTTVTVSS

SEQ ID NO: 10107 - protein, 121 aa, Artificial Sequence
  Synthetic construct
QVQLVESGGGVVQPGRSLRLSCAASGFTFRLYGMHWVRQAPGKGLEWMAVIWFDGSNRYYGDSVKGRFTISRDNSKNTLYLQMNSLRAEDTAVYYCAREGTVGDQTGLDVWGQGTTVTVSS

SEQ ID NO: 10108 - protein, 121 aa, Artificial Sequence
  Synthetic construct
QVQLVESGGGVVQPGKSLRLSCAASGFTFSNYGMHWVRQAPGKGLEWVSVIWFDGSQKNYADSVKGRFTISRDNSQNTVYLQMNSLRGEDTAVYYCAREGIVGTTTGLDYWGQGAQATVSS

SEQ ID NO: 10109 - protein, 115 aa, Artificial Sequence
  Synthetic construct
EVQLLESGGGLVQPGGSLRLSCAASGFTFSSDAMSWVRQVPGKGLEWVSAISGGGASTYYADSVKGRFTISRDNAKNTLYLQMYSLRADDTAVYYCAKGYSPDVWGQGTTVTVSS

SEQ ID NO: 10110 - protein, 123 aa, Artificial Sequence
  Synthetic construct
QVQLVQSGAEVKKPGSSVKVSCKASGGSFSSYTISWVRQAPGQGLEWMGRIIPMLGIANYAQKFQGRVTLTADKVTSTAFMELSSLRSEDTAVYYCARDGSGDGYNSYWFDPWGPGTLVTVSS

SEQ ID NO: 10111 - protein, 121 aa, Artificial Sequence
  Synthetic construct
QLQLQESGPGLVKPSETLSLTCTVSGGSISGSSYYWGWIRQPPGKGLEWLGHIYYSGRTYYNPSLKSRVTISVDTSKNQFSLKLSSVTAADTAVYHCARVPGGRGWDFDYWGQGTLVTVSS

SEQ ID NO: 10112 - protein, 124 aa, Artificial Sequence
  Synthetic construct
EVQLVESGGGLVKPGRSLRLSCTASGFTFGDYAMSWFRQAPGKGLEWVGFIRSKTYGGTTEYAASVKGRFTLSRDDSKSVAYLQTNSLKTEDTAVYYCTRVDEYTTSSGWFDPWGQGTLVTVSS

SEQ ID NO: 10113 - protein, 126 aa, Artificial Sequence
  Synthetic construct
EVQLVESGGGLVKPGGSLRLSCVASGFTFSSYSMNWVRRAPGKGLEWVSSIRSSSSYIYYADSVKGRITISRDNAKNSLYLQMNSLRAEDTAVYYCARSPLSYGDFFFYSYYMDVWGKGTTVTVSS

SEQ ID NO: 10114 - protein, 121 aa, Artificial Sequence
  Synthetic construct
QVQLVQSGSELKKPGASVKVSCKASGYTFTSYAMNWVRQAPGQGLEWMGWINTNTGNPTYAQGFTGRFVFSLDTSVSTAYLQISSLKAEDTAVYYCARGASSWYVGAPDYWGQGTQVTVSS

SEQ ID NO: 10115 - protein, 118 aa, Artificial Sequence; identical to SEQ ID NO: 9964
  Synthetic construct

SEQ ID NO: 10116 - protein, 125 aa, Artificial Sequence
  Synthetic construct
QVQLVQSGAEVKKPGASVKVSCKASGYSFNTYGISWVRQAPGQGLEWMGWISAYNGHTNYPQKLQGRVTMTTDTSTSTAYMDLRSLRSDDTAVYYCARDRVRGVAAYYYSGMDVWGQGTTVTVSS

SEQ ID NO: 10117 - protein, 116 aa, Artificial Sequence
  Synthetic construct
LVQLQESGPGLVKPSETLSLTCTVSGASVTSNYWSWIRQPPGKGLEWIGYIHKNGGPNYNPSLKSRVTMSVDTSKNQISLKLGSVTAADTAVYYCAREVFGYFDYWGQGALVTVSP

SEQ ID NO: 10118 - protein, 122 aa, Artificial Sequence
  Synthetic construct
QVQLVQSGAEVKKPGSSVKVSCKASGGTFSSYTIIWVRQAPGQGLEWMGRIIPILGVADYAQKFQGRVTITADKSTSTAYMELSSLRSEDTAVYYCARVYDSSGYDWYFDLWGRGTLVTVSS

SEQ ID NO: 10119 - protein, 117 aa, Artificial Sequence
  Synthetic construct
QVQLVESGGGVVQPGRSLRLSCAASGFTFSSYSMHWVRQAPGKGLEWVALISYDGSNKYYADSVKGRFTISRDNSKNTLYLQMNSLRADDTAVYYCARDGGGWFDPWGQGTLVTVSS

SEQ ID NO: 10120 - protein, 132 aa, Artificial Sequence
  Synthetic construct
EVQLVQSGAEVKKPGESLKISCKGSGYNFTTDWIGWVRQMPGKGLEWMGIIYPGDSDTRYSPSFQGQVTISADKSISTAYLQWSSLKASDTAIYYCARTSRTLRYFDWSPQRRLYSYGMDVWGQGTTVTVSS

SEQ ID NO: 10121 - protein, 125 aa, Artificial Sequence
  Synthetic construct
EVQLVQSGAEVKKPGESLNISCQGSGYSFTSYWIAWVRQMPGKGLEWMGSIYPGDSDTRYSPSFQGQVTISADKSTSTAYLQWSSLKASDTAMYYCARLSSGWSYSGYYYGLDVWGQGTTVTVSS

SEQ ID NO: 10122 - protein, 117 aa, Artificial Sequence
  Synthetic construct
QVRPEQWGAGLLKPSETLSLTCGVYGGSFSGFYWSWIRQSPGKGLEWIGEINHSGSTNYNPSLKSRVTMSVDASKNQFSLRLDSVTAADTAVYYCARGRPQPGFDPWGQGTLVTVSS

SEQ ID NO: 10123 - protein, 117 aa, Artificial Sequence
  Synthetic construct
EVQLVESGGGLVQPGGSLRLSCAASGFTFSSYTMNWVRQAPGKGLEWVSYISSTSGSIYYADSVKGRFTISRDNARNSLYLQMNSLRDEDTAVYYCARDGGGGYRLWGQGTLVTVSS

SEQ ID NO: 10124 - protein, 123 aa, Artificial Sequence
  Synthetic construct
QVQLVESGGGLVKPGGSLRLSCAASGFIFSDHYMSWIRQAPGKGLEWVSYISNSGSDIYYADSVKGRFTVSRDNAKKSLYLQMSSLRAEDTAVYYCARDRGLMQLDENWFDPWGQGTLVTVSS

SEQ ID NO: 10125 - protein, 128 aa, Artificial Sequence
  Synthetic construct
EVQLVESGGGLVQPGGALRLSCAASGFTFSIYAMSWVRQAPGKGLEWVSTIRGSDGSAYYADSVKGRFTISRDNSKNTLYLQVNSLRAEDTAVYYCARTPFLALGFGELLPHLNFDYWGQGTLVTVSS

SEQ ID NO: 10126 - protein, 120 aa, Artificial Sequence; identical to SEQ ID NO: 2076
  Synthetic construct

SEQ ID NO: 10127 - protein, 120 aa, Artificial Sequence
  Synthetic construct
QVQLVESGGGLVKPGGSLRLSCAASGFTFSDYYMSWIRQAPGKGLEWVSYITFSGTTKYYADSVKGRFTISRDNAKISLYLQMNSLRAEDTAVYFCARSYNSGSPSLDYWGQGTLVTVSS

SEQ ID NO: 10128 - protein, 136 aa, Artificial Sequence
  Synthetic construct
QITLKESGPALVKPTQTLTLTCTFSGFSLSSNGVGVGWIRQPPGKALEWLALIYWDDDKRYSPSLKSRLTITKDTSKHQVVLTMTNMDPGDTATYYCAHAYDHLTGYYNVRADGAEDHYFWYLDVWGEGTTITVSS

SEQ ID NO: 10129 - protein, 122 aa, Artificial Sequence
  Synthetic construct
QVQLVQSGAEVKKPGSSVKVSCKASGGTFSSYAIIWVRQAPGQGLEWMGGIIPIFDTTKFPQKFQGRVTITADESTSTAYMELSSLRSEDTAVYYCARVDPYDSSGAFTDYWGQGTLVTVSS

SEQ ID NO: 10130 - protein, 121 aa, Artificial Sequence
  Synthetic construct
QVQLVESGGGAVQPGRSLRLSCAASGFTFRNYGMHWVRQAPGKGLEWVAVIWYDGSNTYYADSVKGRFTISRDKSKNTLFLHMNSLRVEDTAVYYCAREGAVGATTGLDYWGQGTLVTVSS

SEQ ID NO: 10131 - protein, 120 aa, Artificial Sequence
  Synthetic construct
QVTLRESGPALVKPTQTLTLTCTFSGFSLSTTGMSVSWIRQPPGKALEWLALIDWDDDKYYSTSLRTRLTISKDTSKNQVVLTMSNMDPVDTATYFCARMLFGSGWYDYWGQGTLVTVSS

SEQ ID NO: 10132 - protein, 134 aa, Artificial Sequence
  Synthetic construct
EVQMVESGGRLVRPGGSLRLSCEASGFSFQYYSVNWVRQAPGKGLEWVAKINQDGRDKYYLDSVKGRFTISRDNAKNSVYLQMNSLRVEDTAVYFCARNPSYAPRRPSDAYTVPWDFNYIMDVWGQGTTVAVSS

SEQ ID NO: 10133 - protein, 122 aa, Artificial Sequence
  Synthetic construct
QLQLQESGPGLVKPSETLSLTCTVSGGSVSSHFYYWGWIRQPPGKGLEWIGSIYYSGVTYYNPSLKSRVTISVDTSKNQFSLKLSSVTAADTAIYYCARHQIRPPLPLFEFWGQGTLVTVSS

SEQ ID NO: 10134 - protein, 122 aa, Artificial Sequence
  Synthetic construct
QVLLVESGGGVVQPGRSLRLSCAASGFTFSSYGMHWVRQAPGKGLEWVAVIWFDGTKKYYADSVKGRFTISRDNSKNTLYLQLNSLRAEDTAVYYCVRDFAWSSGSAEVGYWGQGTLVTVSS

SEQ ID NO: 10135 - protein, 127 aa, Artificial Sequence
  Synthetic construct
QVQLVQSGAEVKKPGASVKVSCMASGYTFTNYYVHWVRQAPGQGLEWMGIINPSGGSTDYTQKLQGRVTMTRDTSTSTVYMELSSLRSEDTAVYYCAREEYSSSHPLGYYYYGMDVWGQGTTVTVSS

SEQ ID NO: 10136 - protein, 124 aa, Artificial Sequence
  Synthetic construct
QITLKESGPTLVKPTQTLTLTCTFSGFSLSTSGVGVGWIRQPPGKALEWLALIYWDDDKRYSPSLKSRLTITKDTSKNQVVLIMTNMDPVDTATYYCAHTGSVPVAMVGAFDIWGQGTMVTVSS

SEQ ID NO: 10137 - protein, 125 aa, Artificial Sequence
  Synthetic construct
QVQLVESGGGVVQPGRSLRLSCAASGFTFSSYTMHWVRQAPGKGLEWVAVISFDGSNKYYADSVKGRFTISRDNSKNTLYLQMNSLRTEDSAVFYCARDWGLGQAPYFYFYMDVWGKGTTVTVSS

SEQ ID NO: 10138 - protein, 129 aa, Artificial Sequence
  Synthetic construct
EVQLVESGGGLVKPGGSLRLSCAASGFTFSNSSMSWVRQAPGKGLEWVSSISSSSSYVYYADSLKGRFTISRDNAKNSLYLQMHSLRAEDTAVYYCAREYLYHDFWSGYYTGTGGLDYWGQGTLVTVSS

SEQ ID NO: 10139 - protein, 121 aa, Artificial Sequence
  Synthetic construct
QVQLVESGGGVVQPGRSLRLSCAASGFIFSNYGIHWVRQAPGKGLEWVAVIWHDGHNKFYADSVKGRITISRDNSKNTLHLQMNSVMVEDTAMYYCAREGMVGATTGLDYWGQGTLVTVSS

SEQ ID NO: 10140 - protein, 126 aa, Artificial Sequence
  Synthetic construct
QVQLQESGPGLVKPSETLSLTCTVSGGSVSSDSYYWSWIRQPPGKGLEWIAYIYYSGSSNYSPSLESRATISVDTSKNQFSLKLSSVTAADTAVYYCARDRIAPIDSYYHYYTDVWGKGTTVIVSS

SEQ ID NO: 10141 - protein, 127 aa, Artificial Sequence
  Synthetic construct
EVQLVESGGGLVKPGGSLRLSCAASGFTFSNAWMSWVRQAPGKGLEWVGRIKSKTDGGTTDYAAPVKGRFTISRDDSKNTLYLQMNSLKSEDTAVYHCTTDGAVFRFLEWLSDFDYWGQGNLVTVSS

SEQ ID NO: 10142 - protein, 123 aa, Artificial Sequence
  Synthetic construct
QVQLQESGPGLVKSPGTLSLSCTVSGASVTSYYWTWIRQSPGKGLEWIGYIFYTGIINYNPSLKSRVTMSVDTFNNQVSLTLSSVTAADTAVYYCARVYSSGWRLYNTGFDVWGQGTAVTVSS

SEQ ID NO: 10143 - protein, 119 aa, Artificial Sequence
  Synthetic construct
QVQLVQSGSELKKPGASVKVSCKASGYTFTSFAMNWVRQAPGQGLEWMGWIITNTGNPTYAQGFTGRFVFSLDTSVSTTYLQISSLKAEDTAVYYCATSPCISCPLDYWGQGTLVTVSS

SEQ ID NO: 10144 - protein, 121 aa, Artificial Sequence
  Synthetic construct
EVQLVESGGGLVQPGGSLRLSCAASGFTFSSYSMNWVRQAPGKGLEWVSYISSSSDTVYYADSVQGRFTISRDNAKNSLYLQMNSLRAEDTAVYYCARSTTTNYYDSSGHWGQGTLVTVSS

SEQ ID NO: 10145 - protein, 121 aa, Artificial Sequence
  Synthetic construct
QVQLVESGGGVVQPGRSLRLSCAASGFTFSTYAMYWVRQAPGKGLEWVAVISYDGSSKYYADSVKGRFTISRDNSKNTLYLQMNSLRPEDTAVYYCARVYGGSYRGYFDYWGQGTLVTVSS

SEQ ID NO: 10146 - protein, 125 aa, Artificial Sequence
  Synthetic construct
QVQLQESGPGLVRPSQTLSLTCTVSGASITSGIYYWSWIRQPAGKELEWLGRVYTSGLTNYSPSLESRVTISVDTSKNQFSLKLSSVTAADTAVYYCARVGSGTYYTDYYGMGVWGQGTTVTVSS

SEQ ID NO: 10147 - protein, 121 aa, Artificial Sequence
  Synthetic construct
QVQLVQSGAEVKKPGSSVNVSCKASGGTFSSYGINWVRQAPGQGLEWVGGTIAIFGTAKYAQKFRGRVTITADEFTSTAYMKLSSLRSEDTAVYYCARDLSVGATDGFDIWGQGTMVTVSS

SEQ ID NO: 10148 - protein, 121 aa, Artificial Sequence
  Synthetic construct
QVQLVESGGGVVQPGRSLRLSCAASGFTFSTYAMHWVRQAPGKGLEWVAVVSYDGDNTYFADSVKGRFTLSRDNSKNTLYVEMNSLRGDDTAVYYCARARGGNYFDAFDIWGQGTLVTVSS

SEQ ID NO: 10149 - protein, 115 aa, Artificial Sequence
  Synthetic construct
EVQLVESGGGLIQPGGSLRLSCAASGFTVSSNYMSWVRQAPGRGLEWVSVIYSGGSTFYADSVKGRFTISRDNSKNTLYLQMNSLRAEDTAVYYCARSNNWFDPWGQGTLVTVSS

SEQ ID NO: 10150 - protein, 127 aa, Artificial Sequence
  Synthetic construct
EVQLVESGGGLVQPGGSLRLSCAASGFTFSNYWMSWVRQAAGKGLEWVATIKQDGSEKYYVDSVKGRFTISRDNSKNSLYLQMNSLRAGDTAVFYCARHLPTCSGGPCYSFSWFDPWGQGTLVTVSS

SEQ ID NO: 10151 - protein, 133 aa, Artificial Sequence
  Synthetic construct
QLQLQESGPGLVKPSETLSLTCTVSGGSISSNSYYWGWIRQPPGKGLEWIGTIYYSGSTYYNPSLKSRVTISVDTSKNQFSLNLSSVTAADTAVYYCARLRGYIQWLLGYGPDNGGNYYFDLWGRGTLVTVSS

SEQ ID NO: 10152 - protein, 123 aa, Artificial Sequence
  Synthetic construct
QVQLVQSGSELKKPGASVKVSCRASGYTLTNYALNWVRQAPGQGLEWVGWINTNTGDPTYAQGFTGRFVFSLDASVNTAHLQISGLKTEDTAVYYCARDSGHGSSWYRGFDYWGQGSLLTVSS

SEQ ID NO: 10153 - protein, 128 aa, Artificial Sequence
  Synthetic construct
QVQLVQSGAEVKKPGSSVKVSCKASGGTFSSNSISWVRQAPGQGLEWMGRIIPMLVLANYAQKFQGRVTITADKSTSTAYMELSSLRSEDTAVYYCARDGEGITIFGVENYYYGMDVWGQGTTVTVSS

SEQ ID NO: 10154 - protein, 120 aa, Artificial Sequence
  Synthetic construct
EVQLVESGGGLVQPGRSLRLSCAASGFTFDEFAMHWVRQAPGKGLEWVSGITWNGGILGYADSVKGRFTISRDNARNSLYLQMIRLRPEDTALYYCAKDYSRDYGGCDFWGQGTLVTVSS

SEQ ID NO: 10155 - protein, 127 aa, Artificial Sequence
  Synthetic construct
QVQLVQSGAEVKKPGSSVKVSCKASGGTFSNYTISWVRQAPGQGLEWMGGIIPIFGTTNYAQKFQGTVTITADESTSTAYMELSSLRSEDTAVYYCARDRGYYGSGSEYYYYYMDVWGKGTTVTVSS

SEQ ID NO: 10156 - protein, 126 aa, Artificial Sequence
  Synthetic construct
QVQVQESGPGLVKPSQTLSLTCTVSGGPVNFAIYYWSWIRQPAGKGLEWIGHIYTSGSISYNPSLKSRVTISVDTSKNQFSLKLSSVTAADTAVYYCARGTRHCGSTSCWPWFDPWGQGTLVTVSS

SEQ ID NO: 10157 - protein, 116 aa, Artificial Sequence
  Synthetic construct
QVQLVESGGGVVQPGRSLRLSCAASGITLKDYGMHWVRQAPGRGLEWVAFISYDGSVQHYGDSVKGRFTISRDDLKNTLFLQMNSLRGDDTAVYYCAKGATKVDYWGQGTLVTVSS

SEQ ID NO: 10158 - protein, 124 aa, Artificial Sequence
  Synthetic construct
QVQLQESGPGLVKPSQTLSLTCTVSGGSISSDNYYWSWIRQPAGKGLEWIGRIYISGSTYYNPSLKSRVTISVDMSKNQFSLKLSSVTAADTAVYYCTKFSYYSATYYAWFDPWGPGTLVTVSS

SEQ ID NO: 10159 - protein, 117 aa, Artificial Sequence
  Synthetic construct
QVQLQESGPGLVKPSGTLSLTCAVSGGSISSSNWWSWVRQPPGKGLEWIGEIYHSENTNYNPSLQSRVTMSVDKSKNQFSLKLSSVTAADTAIYYCARTISGTIDYWGQGTLVTVSS

SEQ ID NO: 10160 - protein, 120 aa, Artificial Sequence
  Synthetic construct
EVQLVESGGGLVKPGESLRLSCAASGISFSDAWLSWVRQAPGKGLEWVGRIKSRSDGGTADYAAPVKGRFTISRDDSKAMLYLQMDSLKTEDTAVYYCTTLGNHPPEFFWGQGTLVTVSS

SEQ ID NO: 10161 - protein, 125 aa, Artificial Sequence
  Synthetic construct
QLQLQESGPGLVKPSETLSLTCTVSGGSISRSSYYWGWIRQPPGKGLEWIGSIYYSGSTYYNPSLKSRVSISVDTSKNHFSLMLSSVTAADTAVYYCASFVRYCSSTSCYSFDYWGQGTLVTVSS

SEQ ID NO: 10162 - protein, 130 aa, Artificial Sequence
  Synthetic construct
EVQLVQSGAEVKKPGESLKISCKGSGYSFTNYWIGWVRQMPGKGLEWMGIIYPGDSDIRYSPSFQGQVTISADKSISTAYLQWSSLKASDTAMYYCARHGFDGYSDYEYWVSAGYGMDVWGQGTTVTVSS

SEQ ID NO: 10163 - protein, 128 aa, Artificial Sequence
  Synthetic construct
QVQLVQSGAEVKKPGASVKVSCKASGYTFTNYYMHWVRQAPGQGLEWMGIINPSGGSTSYAQMFQGRVTMTRDTSTSTVYMVLSSLRSDDTAVYYCARGGTGTTFPTLYNYYYGMDVWGQGTTVTVSS

SEQ ID NO: 10164 - protein, 119 aa, Artificial Sequence
  Synthetic construct
QVQLVESGGGVVQPGRSLRLSCVVSGFTFSSYGMHWVRQAPGKGLEWVAGIWYDGSDKYYSNSVKGRFTISRDNSKNTLFLQMNSLRAEDTAVYYCARAEVVLGEFESWGQGTLVTVSS

SEQ ID NO: 10165 - protein, 123 aa, Artificial Sequence
  Synthetic construct
QLQLQESGPGLLRPSETLSLTCTVSGGSISSSTYYWGWIRQPPGKGLEWLGSIYYSGITYYNPSLKSRVTISVDTSKNQFSLKLSSVTAADTAVYYCARLWDSYSYYSGMDVWGQGTTVTVSS

SEQ ID NO: 10166 - protein, 131 aa, Artificial Sequence
  Synthetic construct
QVQLVQSGAEVKKPGASVKVSCKASGYTFSNYRITWVRQAPGQGLEWMGWLSTYNGSTNYAQKLQGRVTMTTDTSTTTAYMELRSLRSDDTAVYYCARDPASYFDVWSGYVDYYYYGLDVWGQGTTVTVSS

SEQ ID NO: 10167 - protein, 123 aa, Artificial Sequence
  Synthetic construct
QVQLVQSGSELKKPGASVRVSCQASGYSLTYYAINWVRQAPGQGLEWLGWINTNTATPTYAQGFTGRFVFSLDASVNTAYLEISSLKAEDTAIYFCARDSGHGSNWYRGFDYWGQGALVTVSS

SEQ ID NO: 10168 - protein, 122 aa, Artificial Sequence
  Synthetic construct
QVQLQESGPGLVKPSETLSLTCSVSGGSISSYYWTWIRQPPGKGLEWIGYMSYSGSTNYNPSLKSRVTISVDTSKNQFSLKLSSVTAADTAVYYCSGYYYDSSGYNYGMDVWGQGTTVTVSS

SEQ ID NO: 10169 - protein, 127 aa, Artificial Sequence
  Synthetic construct
QITLKESGPTLVKPTQTLTLTCTFSGFSLSTGGVGVGWIRQPPGKALEWLALIYWDDDKRYSPSLKSRLTITKDTSKNQVVLTMTNMDPVDTATYYCSQASGYSGYFERAFSAFDVWGQGTMVTVSS

SEQ ID NO: 10170 - protein, 121 aa, Artificial Sequence
  Synthetic construct
QVKLQESGPGLVKPSETLSLTCTVSGGSISSYYWSWIRQSPGKGLEWIGCIYYSGYTKYNPSLKSRVTMSVDTSKNQFSLRLSSVTSADTAVYYCARGESHYDFWSGWSYWGLGTLVTVSS

SEQ ID NO: 10171 - protein, 119 aa, Artificial Sequence
  Synthetic construct
EVQLLESGGGLVQPGGSLRLSCAASGFTFTIYAMSWVRQAPGKGLEWVSGFSGSGGSTYYADSVKGRFTVSRDNSKNTLFLQMNSLRVEDTAVYYCAKARWDGGGSDYWGQGTLVTVSS

SEQ ID NO: 10172 - protein, 121 aa, Artificial Sequence
  Synthetic construct
QVQLQESGPGLVKPSGTLSLTCAVSGGSISSSNWWSWVRQPPGKGLEWIGEIYHSGSTNYNPSLKSRVTISVDKSKNQFSLKLSSVTAADTAVYYCARDLGFGVGCGMDVWGQGTTVTVSS

SEQ ID NO: 10173 - protein, 121 aa, Artificial Sequence
  Synthetic construct
EVHLVESGGDLIQPGGSLRLSCAASGVTFSYSWMTWVRQAPGKGLEWVATIKEDGSEKYYVDSVKGRFTISRDNARNSLYLQMNSLRAEDTAVYYCARDLRAVTGHYFDYWGQGTLVTVSS

SEQ ID NO: 10174 - protein, 126 aa, Artificial Sequence
  Synthetic construct
EVQLVESGGGLVQPGGSLRLSCAASGFTVSSNYMTWVRQAPGKGLEWVSVIYSGGSAYYADSVKGRFTISRDNSKNTLYLQMNSLRAEDTAVYYCARDPQRMAAAGGYSYYGMDVWGQGTTVTVSS

SEQ ID NO: 10175 - protein, 124 aa, Artificial Sequence
  Synthetic construct
QVQLVQSGAEVKKPGASVKVSCKASGYSFISFGISWVRQAPGQGLEWMGWISGYNGNTIYAQKFQGRVAMTTDTSTSTAYMELRSLRSDDTGVYYCARDPLPSPFDPYNWFDPWGQGTLVTVSS

SEQ ID NO: 10176 - protein, 127 aa, Artificial Sequence
  Synthetic construct
QVQLVESGGGVVQPGRSLRLSCAASGFTFSSYAMHWVRQAPGKGLEWVAVIWYDGSDKYYADSVKGRFTISRDNSKNTLYLQMNSLRANDTAVYYCARDHPDIAAAGIYYYFGMDVWGQGTTVTVSS

SEQ ID NO: 10177 - protein, 121 aa, Artificial Sequence
  Synthetic construct
EVQLVESGGGLVQPGGSLRLSCAASGFTFSSYDMHWVRQATGKGLEWVSAIGTAGDTYYPDSVKGRFTISRENAKNSLYLHMNSLRAGDTAVYYCTRGGAAAGIYYYMDVWGKGTTVTVSS

SEQ ID NO: 10178 - protein, 127 aa, Artificial Sequence
  Synthetic construct
EVQLVQSGAEVKKPGEPLKIFCKGSGYSFTTYWIGWVRQMPGKGLEWMGIIYPGDSETRYSPSFQGQVTIAADKSISTAYLQWSSLKASDTAMYYCARHWAYSDILTGYSDYYMDVWGKGTTVTVSS

SEQ ID NO: 10179 - protein, 120 aa, Artificial Sequence
  Synthetic construct
EVQLVESGGGLVQPGGSLRLSCAASGFIFSSYSMNWVRQAPGKGLEWLSFMSSSSRTIYYADSVKGRFTISRDNAKNSLYLQMNSLRDEDTAVYYCASLYGIVGGSADYWGQGTLVTVSS

SEQ ID NO: 10180 - protein, 125 aa, Artificial Sequence
  Synthetic construct
QVQLVQSGAEVKKPGSSVKVSCKASGGTFSSYPISWVRQAPGQGLEWMGRIIPILGIADYAQRFQGRVTITADKSTSAAYMEVSSLRSEDTAVYYCAREKGYSSLSSATYYFDSWGQGTLVTVSP

SEQ ID NO: 10181 - protein, 124 aa, Artificial Sequence
  Synthetic construct
QVQLVESGGGVVQPGRSLRLSCAASGFTFSSYGMHWVRQAPGKGLEWVAVIWYDGRNIFYADSVKGRFTISRDNSKNTLYLQMNSLRAEDTAVYYCARDRLGSSGYYGGVFDIWGPGTKVTASS

SEQ ID NO: 10182 - protein, 124 aa, Artificial Sequence
  Synthetic construct
QVDLVQSGAEVKKPGASVKISCKASGYTFTNYYIHWVRQAPGQGLEWMGIIDVRGGGTSYPQKLQGRVTMTRDTSTSTVYMELDSLMSEDTAKYYCARDPTRPSNGDHDAFDVWGQGTVVIVSS

SEQ ID NO: 10183 - protein, 128 aa, Artificial Sequence
  Synthetic construct
QVQLVQSGAEVKKPGASVKVSCKVSGYSLTELSMHWVRQAPGKGLEWMGGFDPEDAETLYAQEFQGRVTMTEDTSTDTAYMEVSSLRSEDTAVYYCAAGFSIMPANVGYHYYYGLDVWGQGTTVTVSS

SEQ ID NO: 10184 - protein, 124 aa, Artificial Sequence; identical to SEQ ID NO: 10175
  Synthetic construct

SEQ ID NO: 10185 - protein, 124 aa, Artificial Sequence
  Synthetic construct
EVQLVQSETAVKEPGESLKISCEGLGYSFSNYWIAWVRQTPGKGLEWMGIVHPGDSETRYSPAFQGQVTISADKSASAAYLQWFSLKASDSAMYYCARVRYESRDYYGDGFDIWGLGTMVIVSL

SEQ ID NO: 10186 - protein, 126 aa, Artificial Sequence
  Synthetic construct
QVQLVESGGGVVQPGRSLRLSCAASGFTFSIYAMHWVRQAPGKGLEWVAVISYDGSNKYYADSVKGRCTISRDNSKNTVYLQMNSLRAEDTAVYYCARVGHILRGVPNYYYYMDVWGKGTTVTVSS

SEQ ID NO: 10187 - protein, 123 aa, Artificial Sequence
  Synthetic construct
QVQLVESGGGVVQPGKSLRLSCAASGFSFSSYVMHWVRQAPGKGLEWVAVISYDGGYEYYADSVKGRFTITRDNSKNTLYLDMKSLRSEDTAVYYCARDFFYGDYAYWYFDLWGRGTLVTVSS

SEQ ID NO: 10188 - protein, 126 aa, Artificial Sequence
  Synthetic construct
QVQLVQSGAEVKKPGSSVKVSCKASGGTFNSYAINWVRQAPGQGLEWMGGIFPILGRANYAQKFQGRVTITADEPTSTAYMELSRLRFEDTAVYYCARGQWELKLAVPYYYYMDVWGKGTTVTVSS

SEQ ID NO: 10189 - protein, 126 aa, Artificial Sequence
  Synthetic construct
EVQLVESGGGLVQPGGSLRLSCAASGFTFSSYSMNWVRQAPGKGLEWISYISSSSNTKYYADSVKGRITISRDNAKNSLYLQMNSLRDEDTAVYYCARDFGMFGELLSFYYGMDVWGQGTTVTVSS

SEQ ID NO: 10190 - protein, 124 aa, Artificial Sequence
  Synthetic construct
QVQLVQTGSELKKPGASVKVSCKASGYTFTSYAMNWVRQAPGQGLEWMGWINTNTGNPTYAQGFTGRFVFSLDTSVSTAYLQISSLKAEDTAVYYCARLYYYDSSGYYPAFDIWGQGTMVTVSS

SEQ ID NO: 10191 - protein, 128 aa, Artificial Sequence
  Synthetic construct
EVQLAESGGGLVQPGASLRLSCEASGFIFSNYAMNWVRQSPGKGLQWLSYISSRSNTMYYADSVKGRFTVSRDNAKNSLFLQLSSLSDEDTAIYYCARDGEVDSLMAPPGRTPPLDSWGPGTLVSVSS

SEQ ID NO: 10192 - protein, 112 aa, Artificial Sequence
  Synthetic construct
QVQLQESGPGLVKPSETLSLTCTVSGDSISSYYWSWIRQPPGKGLEWIGYIYYSGSTNYNPSLKSRVTISVDTSKNQFSLKLSSVTAADTAVYYCARGFDYWGQGTLVTVSS

SEQ ID NO: 10193 - protein, 124 aa, Artificial Sequence
  Synthetic construct
QVQLVQSGAEMKKPGSSVKVSCKASGGTFSSYGVSWVRQAPGQGLEWVGGIIPVFGAANYAQKFQGRVTLTADESTNTAYMELSSLRSEDTAVYYCATGRDTSSWHAAYYFDYWGQGTLVTVSS

SEQ ID NO: 10194 - protein, 116 aa, Artificial Sequence
  Synthetic construct
QVQLVESGGGVVQPGRSLRLSCAASGFTFNKFGMHWVRQAPGRGLEWVAFISYDGSVQHYVDSVKGRFTISRDDFKNTLFLQMTSLRVDDTAVYYCAKGATKMDYWGQGTLVTVSS

SEQ ID NO: 10195 - protein, 116 aa, Artificial Sequence
  Synthetic construct
EVQLLESGGGLEQPGGSLRLSCAASGFTFSSYAMSWVRQAPGKGLEWVSGVSASGGNTYYADSVKGRFTISRDNPKSTLFLQMNSLRAEDTAVYYCAKNGDYFDYWGQGALVTVSS

SEQ ID NO: 10196 - protein, 123 aa, Artificial Sequence
  Synthetic construct
QVQLVESGGGVVQPGRSLRLSCAASGFTFSNFAMHWVRQAPGKGLEWMTVISYDGGDNYYADSVKGRFTISRDNSKNTLYLQMNSLRAEDTAVYYCARDLSRWGWFGFQADYWGQGTLVTVSS

SEQ ID NO: 10197 - protein, 120 aa, Artificial Sequence
  Synthetic construct
QVQLVESGGGVVQPGRSLRLSCAASGFTFSSYAMHWVRQAPGKGLEWVTVISYDGSNRYYADSVRGRFTISRDNSKNTVYLQMNSLRPEDTAVYYCASGSGNYLTWFDPWGQGTLVTVSS

SEQ ID NO: 10198 - protein, 121 aa, Artificial Sequence
  Synthetic construct
QVQLVESGGGVVQPGRSLRLSCAASGFTFSSYGIHWVRQAPGKGLEWVAVIWYDGSNKYYADSVKGRFTISRDNSKNTLYLQMNSLRAEDTAVYYCARDGQVGATTGADYWGQGTLVTVSS

SEQ ID NO: 10199 - protein, 121 aa, Artificial Sequence
  Synthetic construct
QVQLVQSGVEVKNPGASVKVSCKASGYTFTSYGITWVRQAPGQGLEWMGWISAYNGNTNYAQKFQDRVTLTTDTSTNTAYMELRSLRSDDTAMFYCARDYKWNGHTCFDSWGQGTLVTVSS

SEQ ID NO: 10200 - protein, 116 aa, Artificial Sequence
  Synthetic construct
QVQLVQSGAEVKKPGASVKVSCKASGHTFSSYYMHWVRQAPGQGLEWMGIISPSGASTSYAQKLQGRVTMTRDTSTSTVYMELSSLRSEDTALYYCASGMSYMDVWGKGTTVTVSS

SEQ ID NO: 10201 - protein, 127 aa, Artificial Sequence
  Synthetic construct
EVQLVESGGGLVKPGGSLRLSCAASGFTFSSYSMNWVRQAPGKGLEWVSSISSSSSYIYYADSVKGRFTISRDNAKNSLYLQMNSLRAEDTAVYYCARDLTILSAHWGGASRAFDIWGQGTMVTVSS

SEQ ID NO: 10202 - protein, 116 aa, Artificial Sequence
  Synthetic construct
EVQLVESGGGLVQPGGSLRLSCAASGFTFSNYAMHWVRQAPGKGLEYVSAISTNGASTYYANSVKGRFTISRDNSKNTLYLQMGSLRTEDMAVYYCARDYTATEHWGQGTLVTVSS

SEQ ID NO: 10203 - protein, 126 aa, Artificial Sequence
  Synthetic construct
EVQLVESGGGLVQPGGSLRLSCAASGFTLSSYAMSWVRQAPGKGLEWVSIIRGSGGSTYYADSVKGRFTISRDNSKNTLYLQMNSLRAEDTAVYYCAKDPTEISFGALLTDLMDPWGQGTLVTVSS

SEQ ID NO: 10204 - protein, 121 aa, Artificial Sequence
  Synthetic construct
QVQLVESGGGVVQPGRSLRLSCGASGFTFSSYGMHWVRQAPGKGLEWVAVIWYDGRDKNYADSVKGRFTISRDNSKNTLYLQMNSLSTGDTAVYFCAREGAVGATTGLDYWGQGTLVTVSS

SEQ ID NO: 10205 - protein, 119 aa, Artificial Sequence
  Synthetic construct
EVQLVESGGGLVKPGGSLRLSCAASGFTFNNAWMSWVRQAPGKGLEWVGRIKSKSDGGTTDYAAPVKGRFTISRDDSKNTLYLQMNSLKTEDTAVYYCTTDLLWPPCYWGQGTLVTVSS

SEQ ID NO: 10206 - protein, 123 aa, Artificial Sequence
  Synthetic construct
QVQLVESGGGVVQPGRSLRLSCAASGFSFSSYAMHWVRQAPGKGLEWVAVISYDGSDKYYADSVKGRFTISRDNSKNTLYLQMNSLRAEDTAVYYCARDRFYGDYAYWFFDLWGRGTLVTVSS

SEQ ID NO: 10207 - protein, 119 aa, Artificial Sequence
  Synthetic construct
QVQLVESGGGLVKPGGSLRLSCAASGFTFSDYYMNWIRQAPGKGLEWVSYMSSSGRTIYYADSVKGRFTISRDNAKNSLYLQMNSLRAEDTAVYYCARALLTAPPLDYWGQGTLVTVSS

SEQ ID NO: 10208 - protein, 129 aa, Artificial Sequence
  Synthetic construct
QVQLQESGPGLVKPSQTLSLTCTVSGGSISSGNYYWSWIRQHPGKGLEWIGYIYYSGSTYYNPSLKSRVTISVDTSKNQFSLKLSSVTAADTAVYYCAREQIKVFGVVKTPTYYGMDVWGQGTTVTVSS

SEQ ID NO: 10209 - protein, 126 aa, Artificial Sequence
  Synthetic construct
QVQLVQSGAEVKKPGSSVKVSCKVSGGTFSSYAISWVRQAPGQGLEWMGGIIPIFDTANNAQKFQGRVTITADESTNTAYMELSSLRSEDTAVYYCARGGWFGESRMYYYHYMDVWGKGTTVTVSS

SEQ ID NO: 10210 - protein, 126 aa, Artificial Sequence
  Synthetic construct
QVQLVQSGSELKKPGASVKVSCKASGYTFTSYAMIWVRQAPGQGLEWMGWINTDTGNPTYAQGFTGRFVFSLDTSVSTAYLQISSLKAEDTAVYYCARDFDSMIRGGYYYYYMDVWGKGTTVTVSS

SEQ ID NO: 10211 - protein, 126 aa, Artificial Sequence
  Synthetic construct
QVQLVQSGSELKKPGASVKVSCQASGYTFTSYAVNWVRQAPGQGLEWMGWINTNTGDPTYAQGFTGRFVFSLDTSVSTAYLQISSLKAEDTAVYYCARDFDAMVRGGYYYYYMDVWGKGTTVTVSS

SEQ ID NO: 10212 - protein, 112 aa, Artificial Sequence
  Synthetic construct
QVQLQESGPGLVKPSETLSLTCTVSGGSISSHYWSWIRQPPGKGLEWIGYIYSSGSTNYNPSLKSRVTISVDTSKNQFSLKLSSVTAADTAVYYCARGFDYWGQGTLVTVSS

SEQ ID NO: 10213 - protein, 121 aa, Artificial Sequence
  Synthetic construct
QVQLVQSGAEVKKPGSSAKVSCKPSGGTFSSFTISWLRQAPGQGLEWMGRIIPILGVATYAQKFQGRVTITADKSTSTAYMELTSLTSEDTAVYFCARGVVAATPGYFDSWGQGALVTVSS

SEQ ID NO: 10214 - protein, 122 aa, Artificial Sequence
  Synthetic construct
EVQLLESGGGFVQPGGSLRLSCTASGLTFITYAMSWVRQAPGKGLEWVAAISGSGGGAYYADSVKGRFTISRNNSKNTLYLQMNSLRAEDTAVYYCAKEALNIVVVTAPRYWGQGTLVAVSS

SEQ ID NO: 10215 - protein, 129 aa, Artificial Sequence
  Synthetic construct
QVQLVQSGAEVKKPGASVKVSCKASGYTFTIYAIHWVRQAPGQRLEWMGWINAGSGNTKYSQRFQGRVTITRDTSASTAYMELSSLRSEDTAVYYCARVDYLPAALFGVSATGYYFDYWGQGTLVTVSS

SEQ ID NO: 10216 - protein, 125 aa, Artificial Sequence
  Synthetic construct
QVQMQESGPGLVKPSETLSLTCTVSGGSISTYYWSWIRQSPGKGLEWIGYINYAGSTTYNPSLESRLTISVDTSKNQFSLRLSSVTAADTAAYFCARGPLRYFEWKYYYNGMDVWGRGTTVTVSS

SEQ ID NO: 10217 - protein, 126 aa, Artificial Sequence
  Synthetic construct
QVQLVQSGAEVKKPGASVKVSCKASGYTFITYAMHWVRQAPGQRLEWMGWINAGNGDTKYSQKFQGRVTITRDTSASTAYMDLSSLRSEDTAVYYCARGGTWIQLTTYYYYAMDVWGQGTTVTVSS

SEQ ID NO: 10218 - protein, 124 aa, Artificial Sequence
  Synthetic construct
QVQLQQWGAGLLKPSETLSLTCAVYGGSFSGYYWSWIRQPPGRGLEWIGDIIHGGTTNYNPSLKSRITISVDTSKNQFSLKLSSVTAADTAVYYCARGLYSSNWYGGGCWFDPWGQGTLVTVSS

SEQ ID NO: 10219 - protein, 126 aa, Artificial Sequence; identical to SEQ ID NO: 10092
  Synthetic construct

SEQ ID NO: 10220 - protein, 128 aa, Artificial Sequence
  Synthetic construct
QVQLQESGPGLVKPSETLSLTCTVSGYSISSGYYWDWIRQPPGRGLEWIGSIYHGGNTYHSPSLKSRVTISTDASKNQLSLRMSSVTAADTAVYYCARSGGGDLTGDYRSHVYYMDVWGKGTTVTVSS

SEQ ID NO: 10221 - protein, 119 aa, Artificial Sequence
  Synthetic construct
EVQLVESGGGLVQPGGSLRLSCAASGFTFSRNWMSWVRQAPGKGLEWVANIKQDGSEKYYVDSVKGRFTISRDNAKNSLYLQMNSLRAEDTAMYYCARLSSSSWHWDYWGQGILVSVSS

SEQ ID NO: 10222 - protein, 124 aa, Artificial Sequence
  Synthetic construct
EVQLVESGGGLVQPGGSLRLSCAASGFIFTTYVMSWVRQAPGKGLEWVSALDGSGRSTAYADSVKGRFTISRDTSKNTVYLQMTSLRADDTAVYYCARNSRYGGSGTADAFDIWGQGTMVTVSS

SEQ ID NO: 10223 - protein, 119 aa, Artificial Sequence
  Synthetic construct
EVQLVESGGGLIQPGGSLRLSCAASGLTVSSNYMSWVRQAPGKGLEWVSVIYSGGSTFYADSVKGRFTISRDNSKNTLYLQMNSLRAEDTAVYYCARGGWPTGDTFDIWGQGTMVTVSS

SEQ ID NO: 10224 - protein, 122 aa, Artificial Sequence
  Synthetic construct
EVQLVQSGAEVKKPGDSLKISCKGSGYSFTSYWIGWVRQMPGKGLEWMGIIYPGDSDTRYSPSFQGQVTISADKSISTAYLQWSSLKASDTAIYYCARQGMATITGVGFDPWGQGTLVTVSS

SEQ ID NO: 10225 - protein, 132 aa, Artificial Sequence
  Synthetic construct
EVQLVESGGGLVKPGGSLRLSCAASGFTFSNAWMAWVRQSPGKGLEWVGRIKSKTDGGTTDYAAPVQGRFTISRDDSKNSLYLQMNSLKTEDTAVYYCTTLGGGSGSYYLPHYYYYYYVDVWGKGTTVTVSS

SEQ ID NO: 10226 - protein, 118 aa, Artificial Sequence
  Synthetic construct
EVQLVESGGGLIQPGGSLRLSCAASGLTVSSNYMTWVRQAPGKGLEWVSVIYSGGSTFYADSVKGRFIISRDTSKNTLYLQMNSLRAEDTAVYYCARFLEAAGGMDVWGQGTTVSVSS

SEQ ID NO: 10227 - protein, 125 aa, Artificial Sequence
  Synthetic construct
QVQLVQSGAEVRKPGASVRVSCMASGYTFTSYAISWVRQAPGQGLEWMGWISAYNGNTNYAQKLQGRVTMTTDTSTSTTYMELRSLRSDDTAVYYCATTSGYYDYVWGTELLDYWGQGTLVTVSS

SEQ ID NO: 10228 - protein, 122 aa, Artificial Sequence
  Synthetic construct
QITLKESGPTLVKPTQTLTLTCTFSGFSFTTGGEGVAWIRQPPGKALEWLALIYWDEDVRYRPSLKSRVTITKDTTKNQVVLRMTNMDPVDTATYFCAHISGFEGTLHFDNWSQGTLFTVSS

SEQ ID NO: 10229 - protein, 120 aa, Artificial Sequence
  Synthetic construct
QVQLQESGPGLVKPSETLSLTCTVSGGSISRYYWTWIRQPPGKGLEWIGYIYYSGSTNYNPSLKSRVTISVDTSKNQFSLKLSSVTAADTAVYYCAREWGVAENGYFDYWGQGTLVTVSS

SEQ ID NO: 10230 - protein, 116 aa, Artificial Sequence
  Synthetic construct
QVQLVESGGGVVQPGRSLRLSCAASGITFKDYGMHWVRQAPGRGLEWVAFISYDGSVQHYGDSVKGRFTISRDDLKSTLFLQMNSLRGDDTAVYYCVKGATKIDYWGQGTLVTVSS

SEQ ID NO: 10231 - protein, 126 aa, Artificial Sequence
  Synthetic construct
EVQLVESGGGLVQAGGSLKLSCAASGFTFSGSAMHWVRQASGKGLEWVGRIRSKANSYATAYGASVKGRFTISRDDSKNTAYLQMNSLKTEDTAVYYCTSTWQWLRGYYYYGMDVWGQGTTVTVSS

SEQ ID NO: 10232 - protein, 121 aa, Artificial Sequence
  Synthetic construct
EVHLVESGGGLIQPGGSLRLSCAASGLSVGGNHMTWVRQAPGKGLEWVSVIYSGGSTYYADSVKGRFTISRDSSENTLYLQMNNLRAEDTAVYYCARVFTDSFGWYQFDYWGQGTLVTVSS

SEQ ID NO: 10233 - protein, 119 aa, Artificial Sequence
  Synthetic construct
QVQLQESGPGLVKPSETLSLTCTVSGYSISSGYYWGWIRQPPGKGLEWIGNIYHSGSTHYNPSLKSRVTISVDTSKNQFSLNLNSVTAADTAVYYCASTYGSGNWFDPWGQGTLVTVSS

SEQ ID NO: 10234 - protein, 126 aa, Artificial Sequence
  Synthetic construct
QVQLVQSGAEVKKPGASVKVSCKASGYTFTSYAMHWVRQAPGQRLEWMGWINAGNGNTKYSQKFQGRVTITRDTSASTAYMDLSSLRSEDTAVYYCARGGTWIQLTTYYYYAMDVWGQGTTVTVSS

SEQ ID NO: 10235 - protein, 120 aa, Artificial Sequence
  Synthetic construct
QVQLVQSGTEVKKPGSSVKVSCKASGGKFSSYAVSWVRQAPGQGLEWMGGIIGMFGTTHYAQKFQGRVTITADEMTSSSYMELSGLTSEDTAVYFCARGQFYHFSYMDLWGTGTTVIVSS

SEQ ID NO: 10236 - protein, 120 aa, Artificial Sequence; identical to SEQ ID NO: 1658
  Synthetic construct

SEQ ID NO: 10237 - protein, 121 aa, Artificial Sequence
  Synthetic construct
QVQLVQSGAEVKKPGSSVKVSCKASGGTFSSYTINWVRQAPGQGLEWMGRVIPMLGIAKNAQKFQGRVTITADKSTSTAYMELSSLRSEDTAVYYCARGVVAATPGYFDPWGQGTLVTVSS

SEQ ID NO: 10238 - protein, 129 aa, Artificial Sequence
  Synthetic construct
EVQLLEFGGGLVQPGRSLRLSCATSGFTFEDFDMHWVRQAPGKGLEWVSGSTWNSGTIGYADSVKGRFITSRDNAKNSLYLQMNNLRNEDTALYYCAKDIGRYDHYYIFGRVGGAFDIWGQGTMVTVSS

SEQ ID NO: 10239 - protein, 125 aa, Artificial Sequence
  Synthetic construct
QVQLQQSGPGLVKPSQTLSLTCAISGDSVSSDSAAWNWIRQSPSRGLEWLGRTYYRSKWYYDYAVSVKSRITINPDTSKNQFSLQLNSVTPEDTAVYYCARGGLWFGVDYYFDYWGQGTLVTVSS

SEQ ID NO: 10240 - protein, 120 aa, Artificial Sequence
  Synthetic construct
EVQLVESGGGLVQPGGSLRLSCAASGFIFSTYWMHWVRQAPGKGLVWVSRINSDGSRTSYADSVKGRFTISRDNAKNTLYLQMNSLRAEDTAVYYCARDGIQATSYLDYWGQGTLVTVSS

SEQ ID NO: 10241 - protein, 124 aa, Artificial Sequence
  Synthetic construct
QVQLVESGGGLVKPGGSLRLSCAASGFTFSDYYMSWIRQAPGKGLEWVSYISSRGSSIYYADSVKGRFAISRDNAKNSLYLQMNSLRAEDTAIYYCARADREEVWLRYWYFDLWGRGTLVTVSS

SEQ ID NO: 10242 - protein, 122 aa, Artificial Sequence
  Synthetic construct
EVQVVESGGGLVQPGGSLRLSCAASGFTFDSFVMSWVRQAPGRGLEWVSGLSGSGNSAYYGDSVKGRFTISRDNSKNTLYLQMNSLRGDDTAVYYCAKPVSSSWYEGAFHSWGQGTKVTVSS

SEQ ID NO: 10243 - protein, 120 aa, Artificial Sequence
  Synthetic construct
QVQLQESGPGLVKPSGTLSLTCAVSGGSISSSIWWSWVRQPPGKGLEWIGEIYHSGNTNCNPSLKSRVTISVDQSKNQFSLKLSSVTAADTAVYYCFSRSSGYHNWFDPWGQGTLVTVSS

SEQ ID NO: 10244 - protein, 119 aa, Artificial Sequence
  Synthetic construct
QVQLQESGPGLVKPSGTLSLTCGVSGGSISSSSWWSWVRQPPGRGLEWIGEIYHSGSTNYGPSLKSRITISIDKSKNQFSLKLSSVTAADTAVYYCARRDPILNWFDPWGQGTLVTVSS

SEQ ID NO: 10245 - protein, 119 aa, Artificial Sequence
  Synthetic construct
EVQLVESGGGLVQPGGSLRLSCAASGSTFSSYWMSWVRQAPGKGLEWVANIKQDGSEKYYVDPVKGRFSISRDNAKNSLYLQMNSLRAEDTAVYYCARMGGDPYYMDVWGKGTTVTVSS

SEQ ID NO: 10246 - protein, 128 aa, Artificial Sequence; identical to SEQ ID NO: 10018
  Synthetic construct

SEQ ID NO: 10247 - protein, 117 aa, Artificial Sequence
  Synthetic construct
QVQLQESGPGLVKPSETLSLTCTVSGYSISSGYYWGWIRQPPGKGLEWIGNISRGWSTYYNPSLKSRVTISVDTSKNQFSLKLNSVTAADTAVYYCARVRPLDFDYWGQGTLVTASS

SEQ ID NO: 10248 - protein, 120 aa, Artificial Sequence
  Synthetic construct
QVQVVQSGAEVRKPGASVKVSCKASGYTLSSYYIHWVRQAPGQGLEWMGIINPSGDITNYAQRLQGRVTMTRDTSTSTVYMQLSSLRSEDTAVYYCASGYYGSGSSVALWGQGTLVTVSS

SEQ ID NO: 10249 - protein, 126 aa, Artificial Sequence
  Synthetic construct
QITLKESGPTLVKPTQTLTLTCTFSGFSLSTSGVGVGWIRQPPGKALEWLAFIYWDDDKRYSPSLKSRLTITKDTSKNQVVLTMTNMDPVDTATYYCAHSRYDMLTGYDRAPFDYWGQGTLVTVSS

SEQ ID NO: 10250 - protein, 119 aa, Artificial Sequence
  Synthetic construct
QVQLQQWGAGLLKPSETLSLTCAVYGGSFRSYYWSWIRQPPGKGLEWIGEINHDGTTNYSPSLKGRVAISVDTSKNQFSLELTSMTAADTAVYYCATSPWGGYGEVDYWGQGILVTVSS

SEQ ID NO: 10251 - protein, 120 aa, Artificial Sequence
  Synthetic construct
QLQLQESGPGLVKPSETLSLTCSVSDDSITTTSYFWDWIRQPPGKGLEWIGALDYSGITSYNPSLKSRLTMSLGTSTNQFSLKLSSVTASDTAVYYCARRRGASSLRDFWGQGILVTVSS

SEQ ID NO: 10252 - protein, 116 aa, Artificial Sequence
  Synthetic construct
QVQLVESGGGVVQPGRSLRLSCAASGFTFNKYGMHWVRQAPGRGLEWVAFISYDGSVQHYVDSVKGRFTISRDDFKNTLFLQMTSLRVDDTAVYYCAKGATKMDYWGQGTLVTVSS

SEQ ID NO: 10253 - protein, 122 aa, Artificial Sequence
  Synthetic construct
EVQLLESGGGLVQPGGSLRLSCAASAFTFTDYAMSWVRQAPGKGLEWVSGISGNGGGTYYADSVKGRFTISRDTSKNTVYLQMNSLRAEDTAVYYCAKEALNIVVVTAPRYWGQGTLVTVSS

SEQ ID NO: 10254 - protein, 127 aa, Artificial Sequence
  Synthetic construct
QVQLVQSGAEVKKPGSSVKVSCKASGGTFSSYAISWVRQAPGQGLEWMGGIIPIFGTAKYAQRFQGRATMTADDSTSTAYLELSSLRSEDTAVYYCAREAPWHDYYSSGSLNWFDPWGQGTLVTVSS

SEQ ID NO: 10255 - protein, 121 aa, Artificial Sequence
  Synthetic construct
EVQLAQSGAEVKKPGESLKISCKGSGYSFTSHWMGWVRQMPGKGLEWMGIIYPGDSDTRYGPSFQGQVTISADKSISTAYLQWSSLKASDTAMYYCATTITLDGTSGFDIWGQGTMVTVSS

SEQ ID NO: 10256 - protein, 122 aa, Artificial Sequence
  Synthetic construct
QVQLVQSGAEVKKPGSSVKVSCKASGGTFSSYAISWVRQAPGQGLEWMGGIIPIFDTTDYAQRFQGRVTITADESTNTAYMELSSLRSEDTAVYYCARVSGYDSSGHWGDYWGQGTLVTVSS

SEQ ID NO: 10257 - protein, 116 aa, Artificial Sequence
  Synthetic construct
QVQLVESGGGVVQPGRSLRLSCAASGITLKDYGMHWVRQAPGRGLEWVAFISYEGSVQHYRDSVKGRFTISKDDLKSTLFLQMNSLRPDDTAVYYCAKGATKVDYWGQGTLVTVSS

SEQ ID NO: 10258 - protein, 119 aa, Artificial Sequence
  Synthetic construct
QVQLVQSGSELKRPGASVQVSCKASGNTFTKSILNWVRQAPGQGLEWMGWIATDTGKPTYAQGFRGRFVFSLDTSVTTAYVQISSLQAEDTAVYYCATGVGNYYYMDVWGQGTAVTVSS

SEQ ID NO: 10259 - protein, 124 aa, Artificial Sequence
  Synthetic construct
QVQLVESGGGVVQPGKSLTLSCAASGFSFSNYGFHWVRQAPGKGLEWVAVIWYVGNNRYYADSVKGRFTISRDNSKNTLSLQMNSLRAEDTAVYYCARDLPSDNWNDVGAFDIWGQGTMVTVSS

SEQ ID NO: 10260 - protein, 124 aa, Artificial Sequence
  Synthetic construct
QVQLVQSGAEVKKPGASVKVSCKASGYTFTTYAMHWVRQAPGQRLEWMGWINADNGHTEHSQKFQGRVTITRDTSASTAYMELSSLRSEDTAVYFCARGPIVLMVYPRYYFDYWGQGTLVTVSS

SEQ ID NO: 10261 - protein, 121 aa, Artificial Sequence
  Synthetic construct
QVQLVESGGGVVQPGRSLRLSCAASGFTFSSYAMHWVRQAPGKGLEWVAVISYDGSNKYYGDSVKGRFTISRDNSKNTLFLQMNSLRAEDTAVFYCSRDSSGGYWGSFDYWGQGTLVTVSP

SEQ ID NO: 10262 - protein, 124 aa, Artificial Sequence
  Synthetic construct
QVQLVQSGAEVKKPGSSVKVSCKASGGTFSSYAISWVRQAPGQGLEWMGGIIPIFGTANYAQKFQGRVTITADESTSTAYMELSSLRSEDTAVYYCAGSGSYYHHYYYYYMDVWGKGTTVTVSS

SEQ ID NO: 10263 - protein, 124 aa, Artificial Sequence
  Synthetic construct
QVQLVQSGAEVKKPGSSVKVSCKASGGTFSSYSISWVRQAPGQGLEWMGGIIPFLGIAHDAQRFQGRVTITADKSTSTAYMELSTLRSEDTAVYYCAREKGYSSSSSATYFDLWGQGTLVTVSS

SEQ ID NO: 10264 - protein, 125 aa, Artificial Sequence
  Synthetic construct
QITLKESGPTLVKPTQTLTLTCGLSGFLISTYGVGVGWIRQPPGKALEWLALIYWDDDKDYRPSLQSRLTIAKDTSKNQVVLTMTNMDPADTATYYCAHFTYSHSGIYSRTFDYWGQGILVTVSS

SEQ ID NO: 10265 - protein, 130 aa, Artificial Sequence
  Synthetic construct
QVQLVESGGGVVQPGKSLRLSCAASGFSFSSYGMHWVRQAPGKGLEWVAVIWYDGSNKYYADSVKGRFTISRDEPKNTLYLQMNSLRAEDTAVYYCAMGGYCSGGSCRGGEYYYYGMDVWGQGTTVTVSS

SEQ ID NO: 10266 - protein, 121 aa, Artificial Sequence
  Synthetic construct
EVQLVESGGGLVQPGGSLRLSCAASGFSVSSNYMSWVRQAPGKGLEWVSVIYSDGPTYYADSVKGRFTISRDDSKNTLFLQMSSLRSEDTAVYYCARDRRIVGYYFGMDVWGQGTTVTVSA

SEQ ID NO: 10267 - protein, 118 aa, Artificial Sequence
  Synthetic construct
QVQLVQSGGEVKKPGASVKVSCKASGYTFISYGISWVRQAPGQGLEWMGWISVYNGKTNYAQKLQGRVTMTTDTSTSTAYMELRSLRSDDTAVYYCARAIDFGWFDPWGQGTLVTVSS

SEQ ID NO: 10268 - protein, 125 aa, Artificial Sequence
  Synthetic construct
QVQLQESGPGLVKPSQTLSLTCTVSGGSISSGDYYWSWIRQHPGKGLEWIAYIYYSGSTYYNPSLKSRVTISVHTSKNQFSLKLSSVTAADTAVYYCARFNKVFGSSSGLAFDIWGQGTMVTVSS

SEQ ID NO: 10269 - protein, 122 aa, Artificial Sequence
  Synthetic construct
EAQLVESGGGLVQPGGSLRLSCAASGFTFSSYDIHWVRQTTGRRLEWVTAIDGAGGTYYSGSAKGRFTISRENAKNSLYLQMNSLRDGDTAVYYCARRKGGLGSYSDAFDLWGQGTMVTVSS

SEQ ID NO: 10270 - protein, 125 aa, Artificial Sequence
  Synthetic construct
QVQLVQSGTEVKKPGSSVKVSCKASGGTFSNYALSWVRQAPGQGLEWMGGIIPIFGTPNYAQKFQGRVTITADESRSTAYMEVSSLRSEDTAVYYCARVRESYSSGLYYYYMDVWGKGTTVTVSS

SEQ ID NO: 10271 - protein, 122 aa, Artificial Sequence
  Synthetic construct
QVQLVESGGGVVQPGRSLRLSCAASGFTFSSYGMHWVRQAPGKGLEWVALISYDGSNKYNADSVKGRFTISRDNSKNTLYLQMNSLRGEDTAVYYCAREGMVGAAGRSLDFWGQGTLVTVSS

SEQ ID NO: 10272 - protein, 121 aa, Artificial Sequence
  Synthetic construct
QVQLVESGGGVVQPGRSLRLSCAASGFTFSSFAMHWVRQAPGKGLEWVAVISYDGSNKYYGDSVRGRFTLSRDNSKNTLYVQMTSLRTEDTAVYYCARAGGGSYRSSFDYWGQGALVTVSS

SEQ ID NO: 10273 - protein, 127 aa, Artificial Sequence
  Synthetic construct
EVQLVESGGGLVQPGGSLRLSCAASGFTVSSNYMSWVRQAPGKGLEWVSVIYSGGSTYYADSVKGRFTISRDNSKNTLYLQMNSLRAEDTAVYYCARDRETSNPWGFYYYYYGMDVWGQGTTVTVSS

SEQ ID NO: 10274 - protein, 127 aa, Artificial Sequence
  Synthetic construct
EVQLVESGGGLVQPGGSLRLSCAASGFTFSNYNMNWVRQAPGKGLEWLSHISSSGNFIYYADSVKGRFTISRDNAKNSLYLQMNSLRAEDTAVYYCARETIWERYFDWLLSPFFDYWGQGTLVTVSS

SEQ ID NO: 10275 - protein, 128 aa, Artificial Sequence
  Synthetic construct
QVQLVQSGAEVKKPGSSVKVSCKASGGTYAISWVRQAPGQGLEWMGGIIPIFGTANYAQKFQGRVTITADESTSTAYMELSSLRSEDTAVYYCASWTPIHRKTTVVEDSYYYYYMDVWGKGTTVTVSS

SEQ ID NO: 10276 - protein, 119 aa, Artificial Sequence
  Synthetic construct
EVLLVQSGAEVKKPGESLKISCQTSGFTFVSQWIGWVRQVPGEGLEWMGIIHPEDSRTQYSQSFQGQVTISADKSISTAYLQWDSLKASDTAIYYCTASGYSRDWYYYWGQGTQVTVSS

SEQ ID NO: 10277 - protein, 129 aa, Artificial Sequence
  Synthetic construct
QLQLQESGPGLVKPSETLSLTCTVSGGSISSSSYYWGWIRQPPGKGLEWLGSIYYSGSTYYSPSLKSRVTISVDTSKNQLSLRLSSVTAADTAVYYCARRSALDMATIMSFGLDYFDYWGQGSLVTVSS

SEQ ID NO: 10278 - protein, 128 aa, Artificial Sequence
  Synthetic construct
QVQLVQSGAEVKKPGASVKVSCKASGYTFTIYGMHWVRQAPGQRLEWMGWINAGNGNTQYSQKFQGRVIITRDTSASTAYMELSSLRSEDTAVYYCARVDFLPAALFGVAAGYHFDSWGQGTLVTVSS

SEQ ID NO: 10279 - protein, 124 aa, Artificial Sequence
  Synthetic construct
QVQLVQSGAEVKKPGASVKVSCKVSGYTLTELSMHWVRQAPGKGLEWMGGFDPEDGETIYAQKFQGRVTMTEDTSTDTAYMELSSLRSEDTAVYYCATGSPLLWFGDGYWFDPWGQGTLVTVSS

SEQ ID NO: 10280 - protein, 122 aa, Artificial Sequence
  Synthetic construct
QVQLQQWGAGLLKPSETLSLTCAVYGGSFSGYYWSWIRQPPGKGLEWIGEINHSGSTNYNPSLKSRVTISVDTSKNQFSLKLSSVTAADTAVYYCARGWGRAAAGKYYMDVWGKGTTVTVSS

SEQ ID NO: 10281 - protein, 116 aa, Artificial Sequence
  Synthetic construct
QVQLVESGGGVVQPGTSLRLSCAASGITFKDYGMHWVRQAPGRGLEWVAFISYDGSVQHYGDSVKGRFTISRDNLKNTLFLQMNTLRADDSAVYYCAKGATKVDNWGQGTLVTVSS

SEQ ID NO: 10282 - protein, 120 aa, Artificial Sequence
  Synthetic construct
QVQLVESGGGVVQPGRSLRLSCAVSGFSFSSYAIHWVRQAPGKGLEWVAVISYDGSNKYYADSVKGRFTISRDNSKNTLYLQLNSLRAEDTALYYCARDRESVAGPLDYWGQGTLVTVSS

SEQ ID NO: 10283 - protein, 122 aa, Artificial Sequence
  Synthetic construct
QVRLVQSGAEVKKPGASVKVSCKVSGYTLTELSMHWVRQPPGTGLEWMGGFDPEDGETIYAQKFQGRVTMTEDTSTDTAYMELSSLKSEDTAVYYCGTTSPHPGWGGWFDPWGQGTLVTVSS

SEQ ID NO: 10284 - protein, 122 aa, Artificial Sequence
  Synthetic construct
EVQLLESGGGLVQPGGSLRLSCAASGFTFSTYAMNWVRQAPGKGLEWVSVISGSGGTTNSADSVKGRFTISRDNSKNTLYLQMDSLRAEDTAVYYCAKPRGIHYPYYALDVWGQGTTVTVSS

SEQ ID NO: 10285 - protein, 121 aa, Artificial Sequence
  Synthetic construct
QVQLVQSGAEVKKPGASVKVSCKVSGYTLIELSMHWVRQAPGKGLEWMGGFDPENGETIYAQKFQGRVTLTEDTSTDTAYMELSSLRSDDTAVYYCAISPAIVRQNWFDPWGQGTLVTVSS

SEQ ID NO: 10286 - protein, 121 aa, Artificial Sequence
  Synthetic construct
EVQLVQSGAEVKKPGESLRISCEGSGYSFNTYWIAWVRQMPGKGLEWMGIIYPGDSDTRYSPSFQGQVTISADKSITTAFVQWSSLKASDTAIYYCARQGPSWSHDAFDIWGQGTMVTVSS

SEQ ID NO: 10287 - protein, 125 aa, Artificial Sequence
  Synthetic construct
QVQLVESGGGVVQPGRSLRLSCAASGFTFSSYGMHWVRQAPGKGLEWVAVIWYDGSNKYYADSVKGRFTISRDNSKNTLYLQMNSLRAEDTAVYYCARDEVTIFGVVYSFAMDVWGQGTTVTVSS

SEQ ID NO: 10288 - protein, 119 aa, Artificial Sequence
  Synthetic construct
QITLKESGPTLLKPTQTLTLTCTFSGFSLSNSGVGVGWIRQPPGKALEWLALIYWDDDKRYSPSLKSRLTITRDTSKNQVVLTMTNMDPVDTATYYCARLTTETIFDSWGQGTLVTVSS

SEQ ID NO: 10289 - protein, 128 aa, Artificial Sequence
  Synthetic construct
EVQLVESGGGLVQPGGSLRLSCAASGFTFSSYAMTWVRQAPGKGLEWVSVISGSGGSTYYAESVKGRFTISRDNSKNTLYLQMKSLRAEDTAVYYCARDAFYYGSGSHFYYYYYMDVWGKGTTVTVSS

SEQ ID NO: 10290 - protein, 121 aa, Artificial Sequence
  Synthetic construct
QVQLQESGPGLVKPSQTLSVTCTVSGASINSGSFYWNWVRQPAGRGLEWIGRIYSSGTTSYNPSLKSRITVSLDTSNNRFSLRLTSVTAADTAVYFCAREVGSGWFYLDTWGQGTRVTVSS

SEQ ID NO: 10291 - protein, 121 aa, Artificial Sequence
  Synthetic construct
QVQLQESGPGLVKPSETLSLTCTVSGGSISSYYWNWIRQPPGKGLEWIGYIFYNGSTNYNPYLKSRVTISVDTSKNQISLRLTSVTAADMAVYYCAGDYGDSYYYYGLDVWGQGTTVTVSS

SEQ ID NO: 10292 - protein, 123 aa, Artificial Sequence
  Synthetic construct
QVQLVESGGGVVRPGRSLRLSCAASGFTFSSFGMHWVRQAPGKGLEWVAVIWYDGSNENYGDSVKGRFIISRDNSKNTLFLQMNSLRAEDTAIYYCARWGAGSGWDEGEFDYWGQGTLVTVSS

SEQ ID NO: 10293 - protein, 128 aa, Artificial Sequence
  Synthetic construct
QVQLVQSGAEVKKPGSSVKVSCKASGGTFSSHGISWVRQAPGQGPEWMGGTVPIFGTANYAQKFQGRVTITADESTSTAYMELRSLRSEDTAVYYCASLGGDYYDSGSFYNSSGFDPWGQGTLVTVSS

SEQ ID NO: 10294 - protein, 122 aa, Artificial Sequence
  Synthetic construct
EVQLVESGGGLVQPGGSLRLSCAASGFTFSSYSMNWVRQAPGKGLEWLSYISSSSSTIYYADSVKGRFTISRDNAKSSLYLQMNSLRDEDTAVYYCARALSYNGIYPNGDYWGQGTLVTVSS

SEQ ID NO: 10295 - protein, 126 aa, Artificial Sequence
  Synthetic construct
QVQLVQSGSELKKPGASVKVSCKASGYTFTSYAMNWVRQAPGQGLEWMGWINTNNGNPTYAQGFTGRFVFSLDTSVSTAYLQIRSLKSEDTAVYFCARDFMVRGVLDYYYYYMDVWGKGTTVTVSS

SEQ ID NO: 10296 - protein, 122 aa, Artificial Sequence
  Synthetic construct
EVQLVESGGGLVQPGGSLRLSCAASGFTFSSYSMNWVRQAPGKGLEWVSYISSSSTTIYYADSVKGRFTISRDNAKNSLYLQMNSLGDDDTAVYYCARALSYNGIYPNGDCWGQGTLVTVSS

SEQ ID NO: 10297 - protein, 127 aa, Artificial Sequence
  Synthetic construct
EVQLVESGGGLVQPGGSLRLSCAASGFTSRTYWMSWVRQAPGKGLEWVANIKEDGSEKYYVESVKGRFTISRDNTKNSLFLQMNSLRAEDTAVYYCARGGLYYYDSSAYYISAFDIWGRGTMVTVAS

SEQ ID NO: 10298 - protein, 125 aa, Artificial Sequence
  Synthetic construct
QVQLVQSGSELKKPGASVKVSCKASGYTFTGYAMNWVRQAPGQGLEWIGWINTDTGIPTYAQGFTERILFSLDTSVSTAFLQISSLEAEDTAVYYCARLSYRVSGEDYHYYMDVWGKGTTVTVSS

SEQ ID NO: 10299 - protein, 120 aa, Artificial Sequence
  Synthetic construct
EVQLVESGGGLVQPGGSLRLSCAASGFTFSSYAMTWVRQAPGKGLEWVSAISASGGNTYYADSVKGRFTISRDNSKKTLYAQMNSLRAEDTAVYYCALSTSSAVEGGNYWGQGTLVTVSS

SEQ ID NO: 10300 - protein, 121 aa, Artificial Sequence
  Synthetic construct
QVQLQESGPRLVKPSETLSLTCTVSGGSISSDYWSWIRQPPGKGLEWIGYIYYQVSTNYNPSLKSRVTISGDTSKNHFSLKLNSVTAADTAVYYCARDNNSTWRRGWFDPWGQGILVTVSS

SEQ ID NO: 10301 - protein, 123 aa, Artificial Sequence
  Synthetic construct
QLQLQESGPGLVKPSETLSLICTVSGVSISSSSSFWGWVRQPPGKGLEWIGSMQYSGSPYYNPSLKSRLTMSVDTSKNQFSLKLTSVAAVDTAVYFCGRLVLRGGWNDAFDLWGQGTVVTVSA

SEQ ID NO: 10302 - protein, 127 aa, Artificial Sequence
  Synthetic construct
QVQLVQSGAEVMKPGASVKVSCKASGYTFTSYGITWVRQAPGQGLEWMGWISAYNGNTNYAQKLQGRVTMTTDTSTSTAYMELRSLRSDDTAVYYCARDYLGYCTSTSCYGGVAAYWGQGTLVTVSS

SEQ ID NO: 10303 - protein, 128 aa, Artificial Sequence
  Synthetic construct
EVKLVESGGGLVQPGRSLRLSCAASGFTFDDYAMHWVRQAPGKGLEWVSGTSWNSGIVGYADSVKGRFTISRDNAKNSLYLQMNSLRAEDTAFYYCAKLSGYSVFDFSGTDFRDFDYWGQGTQVTVSS

SEQ ID NO: 10304 - protein, 130 aa, Artificial Sequence
  Synthetic construct
EVQLVESGGGLVQPGGSLRLSCAASGFTFSSYWMSWVRQAPGKGLEWVANIKQDGSEKYYVDSVKGRFTISRDNAKNSLYLQMNSLRAEDTAVYYCARVQNGYFDWLLNAGYYYYYMDVWGKGTTVTVSS

SEQ ID NO: 10305 - protein, 125 aa, Artificial Sequence
  Synthetic construct
QVQLLQSGAEVKKPGASVKVSCKVSGYTLTDLSMHWVRQAPGKGLEWMGNFDPEDGETIYAQKFQGRVSLTEDTSTDTVYMELSSLRYEDTAVYYCATDRSSGYPHYHYYGMDVWGQGTTVTVSS

SEQ ID NO: 10306 - protein, 131 aa, Artificial Sequence
  Synthetic construct
QVQLVQSGAEVKKPGASVKVSCKASGYTFTSYSISWVRQAPGQGLEWMGWISAYNGSTNYAQRLQGRVTMTTDTSTSTAYMELRSLRSDDTAVYYCARDPASYYDLWSGYVDYYYYGMDVWGQGTTVTVSS

SEQ ID NO: 10307 - protein, 120 aa, Artificial Sequence
  Synthetic construct
EVQLVQSGAEVKKPGESLKISCKGSGYSFTRYWIGWVRQMPGEGLEWMGIIYPGDSDTRYSPSFQGQVTISADKSISTAYLQWSSLKASDTAMYYCARLDTTIPYYFDYWGQGTLVTVSS

SEQ ID NO: 10308 - protein, 128 aa, Artificial Sequence
  Synthetic construct
QVQLVQSGAEVKKPGSSVKVSCKASRGTFSSYAISWVRQAPGQGLEWMGGIIPIFGSANYAQKFQGRVTITADESTSTAYMELSSLRSEDTAVYYCARDRGASSGWLGGYYYYYMDVWGKGTTVTVSS

SEQ ID NO: 10309 - protein, 123 aa, Artificial Sequence
  Synthetic construct
QVQLVQSGAEVKKPGASVKVSCKASGYTFTGYYMHWVRQAPGQGLEWMGWINPISGVTNYAQKFQGWVTMTRDTSISTAYMELSRLRSDDTAVYYCARDLLGHSSGWYAWGYWGQGTLVTVSS

SEQ ID NO: 10310 - protein, 122 aa, Artificial Sequence
  Synthetic construct
QLQLQESGPGLVKPSETLSLTCIVSGGSISSRNYYWGWVRQPPGKGLEWIGSVYYSGSTYYNPSLKSRVTISADTSKNQFSLKLNSVTAADTAVFYCARGTENRGYYYMDVWGKGTTVTVSS

SEQ ID NO: 10311 - protein, 124 aa, Artificial Sequence
  Synthetic construct
QVQLVESGGGVVQPGRSLRLSCAASGFTFSNYGMHWVRQAPAKGLEWVAVIWYVGDNKYYADSVKGRFTISRDNSKNTLYLQMNSLRAEDTAVYYCARDLPSDNWNDVGAFDIWGQGTMVTVSS

SEQ ID NO: 10312 - protein, 126 aa, Artificial Sequence
  Synthetic construct
EVQLVESGGGLVKPGGSLRLSCAASGFPFSNYNMNWVRQAPGKGLEWVSSISSSGNYIYYADSVKGRFTISRDNAKNSLYLQMNSLRAEDTAAYYCASAEEDFAVAEKYFYGMDVWGQGTTVTVSS

SEQ ID NO: 10313 - protein, 124 aa, Artificial Sequence
  Synthetic construct
EVQLVESGGVVVQPGGSLRLSCAASGFTFDDYAMHWVRQAPGKGLEWVSLIRWDGGNTYYADSVKGRFTISRDNGKKSLFLQMNSLKAEDTALYYCAKDRSFYGSGKLHAFDIWGQGTMVTVSS

SEQ ID NO: 10314 - protein, 130 aa, Artificial Sequence
  Synthetic construct
QVQLVQAGTEVKKPGASVKVSCKASGYTFISYGISWVRQAAGQGLEWMGWISAYNGNTYYAQKFQGRVTMTTDTSTSTAYMELRSLRSDDTAVYYCARDLGGRFSSTYYYDGSAYDWDYWGQGTLVTVSS

SEQ ID NO: 10315 - protein, 122 aa, Artificial Sequence
  Synthetic construct
VVQLAESGGGLVQPGRSLRLSCAASGFTFDDYAMHWVRQAPGKGLEWVSGSSWNSGTIGYADSVKGRFTIIRDNAKNSLYLQMNSLRPEDTALYYCAKDLRSDGDYWAFDIWGQGTMVTVSS

SEQ ID NO: 10316 - protein, 121 aa, Artificial Sequence
  Synthetic construct
QVQLQESGPGLVKPSETLSLTCTVSGGSVASDGFYWTWIRQPPGKGLEWIGYISWTGRTKYNPSLKSRLTLSADTSKNQLSLKLSSVTAADTAVYFCARLPDIDGWPFDYWGQGTLVSVSS

SEQ ID NO: 10317 - protein, 116 aa, Artificial Sequence
  Synthetic construct
EVQLLESGGGLVQPGGSLRLSCAASGFTFSSYAMNWVRQAPGKGLEWVSSISGSGGSTYYTDSMKGRFTISRDNSKNTLYLQMNSLRAEDTAVYYCAHFYTAPGWWGQGTLVTVSS

SEQ ID NO: 10318 - protein, 121 aa, Artificial Sequence
  Synthetic construct
QVQLVESGGGVVQPGRSLRLSCAASGFTFSTYAIHWVRQAPGKGLQWVAVISFDGNNKYYADSVKGRFTVSRDNSKNTLYLQMNSLRAEDTAVYYCAKGRGGNYFDAFDMWGQGTMVTVSS

SEQ ID NO: 10319 - protein, 127 aa, Artificial Sequence
  Synthetic construct
QVQLVQSGAEVKKPGASVKVSCKASGYTFTNYDITWVRQAPGQGLEWMGWISTYKGNTNFAQKLQGRVSMTTDTSTSTAYMELRSLRSDDTAVYYCARITIVRGADDYYYRYGMDVWGQGTTVTVSS

SEQ ID NO: 10320 - protein, 117 aa, Artificial Sequence
  Synthetic construct
EMQLVESGGGLVQPGGSLRLSCAASGFTFSSYWMTWVRQAPGKGLEWVANINQHGSESYYVDSVKGRFTISRDNAQNSLFLQMNSLRAEDTAVYYCAGRWYSTMDVWGQGTTVTVSS

SEQ ID NO: 10321 - protein, 123 aa, Artificial Sequence
  Synthetic construct
QVQLQESGPGLVKPSQTLSLTCTVSGGSISSGDYYWSWIRQPAGKGLEWIGHIYTSGSTNYNPSLKSRVTISLDTSKNHFSLKMSSVTAADTAVYYCARTGDFWSGLVYFQHWGQGTLVTVSS

SEQ ID NO: 10322 - protein, 121 aa, Artificial Sequence
  Synthetic construct
QVQLVESGGGVVQPGRSLRLSCAASGFTFSTYGMHWVRQAPGKGLEWVAVIWYDGSNKYYVDSVKGRFTISRDNSKNTLYLQMNSLRAEDTAVYYCAREGVVGATTGLDYWGQGTLVTVSS

SEQ ID NO: 10323 - protein, 120 aa, Artificial Sequence
  Synthetic construct
QVQLVQSGAEVKKPGSSVKVSCKASGGTFSSYTISWVRQAPGQGLDWMGGIIPLFGTADYAQKFQGRVTITADESTRTAYMELSSLRSEDTAVYYCARIAAAGLSYLDYWGQGTLVTVSS

SEQ ID NO: 10324 - protein, 121 aa, Artificial Sequence
  Synthetic construct
QVQLVESGGGVVQPGRSLRLSCAASGFTFSNYGIHWVRQAPGKGLQWVAVIWYDGSKKYYADSVRGRFTISRDSSKNTLFLQMNSLRAEDTAVYYCAREGQISGTTGLDYWGQGTLVTVSS

SEQ ID NO: 10325 - protein, 126 aa, Artificial Sequence
  Synthetic construct
EVQVVESGGGLVQPGRSLRLSCTTSGFTLGDYAMSWFRQAPGKGLEWVGFIRSKAYGGTTQYAASVKGRFTISRDDSKSTAYLQMNSLNTDDTSVYYCSRVIAGAAPGTVNWFDPWGQGTLVTVSS

SEQ ID NO: 10326 - protein, 121 aa, Artificial Sequence
  Synthetic construct
QVQLVESGGGVVQPGRSLRLSCAASGFSFSIYGMHWVRQAPGKGLEWVAVSSSDGTNKYYADSVKGRFTISRDNSKNTLFVQMNSLRPEDTAVYYCAKDLYGGNSGAIDVWGQGTTVTVSS

SEQ ID NO: 10327 - protein, 126 aa, Artificial Sequence
  Synthetic construct
QVQLVQSGAEVKKPGASVKVSCKVSEYTLTELSMHWVRQAPGKGLEWMGGFDPEDAETIYAQKFQGRVTMTEDTSTDTAYMELSSLRSEDTAVYYCATAFALRYGEPGYYYGMDVWGQGTTVTVSS

SEQ ID NO: 10328 - protein, 136 aa, Artificial Sequence
  Synthetic construct
QLQLQESGPGLVKTSETLSLTCTVSGGSISNSPYYWAWIRQPPGKGLEWIGNIFYSGSTKYNPSLKSRVNISVDKFKNQFSLKVTAVTAADTAVYYCVRVPGSEDLLTGYLGRRSDPRGKAWFDPWGQGTLVIVSS

SEQ ID NO: 10329 - protein, 125 aa, Artificial Sequence
  Synthetic construct
QVQLVQSGAEVKKPGASVKVSCKASGYTFSSYGISWVRQAPGQGLEWMGWISAYNGNTNYAQKLQGRVTMTTDTSTSTAYMELRSLRSDDTAVYYCARDPRIVGASIYYYYMDVWGKGTTVTVSS

SEQ ID NO: 10330 - protein, 129 aa, Artificial Sequence
  Synthetic construct
EVQLVESGGGLVHPGGSLRLSCAASGFTLSSFSMNWVRQAPGKGLEWVSHIRASSGTTYYADSVKGRFTISRDNARNSLHLQMNSLRAEDTAVYYCARDIADSKYSSGWYHYYYYMDVWGKGTTVTVSS

SEQ ID NO: 10331 - protein, 121 aa, Artificial Sequence
  Synthetic construct
EVQLLESGGDLVQPGGSLRLSCAASGFTFINYAMTWVRQAPGKGLEWVSSISGSGDNTYYADSVKGRFTISRDNSKNTLFLQMNSLRAEDTAVYYCAEGSTIVLMVYATRWGQGTLVTVSS

SEQ ID NO: 10332 - protein, 125 aa, Artificial Sequence
  Synthetic construct
QVQLVQSGSELKKPGGSVKVSCKASGYSFTSNAMNWVRQAPGQGLEWMGWIDTNTGNPTYAQGFTGRFVFSLDTSVSTAYLQISSLKAEDTAVYYCARDGEPAYPSFYYYYMDVWGKGTTVTVSS

SEQ ID NO: 10333 - protein, 122 aa, Artificial Sequence
  Synthetic construct
QVQLQESGPGLVKPSETLSLTCTVSGGSISSYYWSWIRQPPGKGLEWIGYIYYSGSTNYNPSLKSRVTISVDTSKNQFSLKLSSVTAADTAVYYCARRVPLWFGEFYAFDIWGQGTMVTVSS

SEQ ID NO: 10334 - protein, 125 aa, Artificial Sequence
  Synthetic construct
QVQLVQSGSELKKPGASVKVSCKASGYTFTNYAINWVRQAPGQGLEWMGWINTNTGNPTYAQGFTGRFAFSLDTSVSTAYLQISSLKAEDTAVYYCARDSAGDHPYYNYYYMDVWGKGTTVTVSS

SEQ ID NO: 10335 - protein, 125 aa, Artificial Sequence
  Synthetic construct
EVQLVESGGGLVQPGGSLRLSCAASGFTFSSYSMSWVRQAPGKGLEWVANINQDGSEKYYVDSVKGRFTISRDNAMNSLYLQMNSLRGDDTAVYYCARVSRYCNGGNCADAFDIWGQGTMVTVSS

SEQ ID NO: 10336 - protein, 129 aa, Artificial Sequence
  Synthetic construct
EVQLVESGGGLVQPGRSLRLSCTTSGFNFEDFAMHWVRQAPGKGLEWVSGSTWNSGTIGYADSVKGRFTTSRDNAKNSLYLHMRNLRHEDTALYYCAKDIGRFDQSDTLGRVGGAFDIWGQGTMVSVFS

SEQ ID NO: 10337 - protein, 131 aa, Artificial Sequence
  Synthetic construct
QVQLQESGPGLVKPSETLSLTCTVSGGSISSYSWSWIRQSPGTGLEWVGDIYSTGSTNYNPSLKSRLTMSLDTSKSHFSLKLSSVAAADTAVYYCARGAGEQRLVGGLFGVSHFYYYMDVWGKGTTVTVSS

SEQ ID NO: 10338 - protein, 127 aa, Artificial Sequence
  Synthetic construct
EVQLVESGGGLVKPGGSLRLSCAASGFTFSNAWMSWVRQAPGKGLEWVGRIKSKTDGGTTDYAAPVKGRFTISRDDSKNTLYLQMNSLKTEDTAVYYCTTERLYDYIWGSYRIFDYWGQGTLVTVSS

SEQ ID NO: 10339 - protein, 127 aa, Artificial Sequence
  Synthetic construct
QVQLVQSGAEVKKPGASVKVSCKASGYTFTSYGISWVRQAPGQGLEWMGWISGYNGNTDYAQKLQGRVIMTTDTSTSTAYMELRSLRSDDTAVYYCARDYDPSLHYESGGSDTLDIWGQGTMVTVSS

SEQ ID NO: 10340 - protein, 118 aa, Artificial Sequence
  Synthetic construct
QVHLVESGGGVVQPGRSLRLSCVASGFPFSSYPMHWVRQAPGKGLEWVSLISFDGHNKFYAYSVTGRFTISRDNSKNTLYLQMNSLRDEDTAVYYCAKIVGALGGDFWGQGTLVTVSS

SEQ ID NO: 10341 - protein, 123 aa, Artificial Sequence; identical to SEQ ID NO: 1926
  Synthetic construct

SEQ ID NO: 10342 - protein, 130 aa, Artificial Sequence
  Synthetic construct
EVQLVESGGGVARPGGSLRLSCVGSGFNFEDYGMSWVRQAPGRGLEWVSGINWNGISTAYGDSVKGRFTISRDNAKNSLYLDVNSLRAEDTAFYYCAREGPTYFIDGGSYWGGPHYMDVWGTGTTVTVSS

SEQ ID NO: 10343 - protein, 124 aa, Artificial Sequence
  Synthetic construct
QVQLVESGGGVVQPGRSLRLSCAASGFTFSSYAMHWVRQAPGKGLEWVAVISYDGTNKYYADSVKGRFTISRDNPKNTLYLQMNSLRTEDTAVYYCAREKQWLAPPYYYYMNVWGKGTTVTVSS

SEQ ID NO: 10344 - protein, 122 aa, Artificial Sequence
  Synthetic construct
EVQLVESGGGLVKPGGSLRLSCAASGFTFSSYSMNWVRQAPGKGLEWVSAISSSSSYIYYADSVKGRFTISRDNTENSLYLQMNSLRAEDTAVYYCARNPSSWYGTSTLDYWGQGTLVTVSS

SEQ ID NO: 10345 - protein, 129 aa, Artificial Sequence
  Synthetic construct
EVQLVEFGGGLVQPGRSLRLSCATSGFTFEDFDMHWVRQVPGKGLEWVSGSTWNSGTIGYAESVKGRFTTIRDNAKNSLYLQMNNLRDEDTALYYCAKDIGRFDYYKILGRGGGAFDIWGQGTMVTVSS

SEQ ID NO: 10346 - protein, 120 aa, Artificial Sequence
  Synthetic construct
QVQLQQWGAGLLKPSETLSLTCAVSGGSFSGYYWSWVRQPPGRGLEWIGEVNHSGSTDYNPSLKSRVTISIDTSRNQFSLKLSSVTAADTAVYYCARGDGGYDLYYFDFWGLGTLVTVSS

SEQ ID NO: 10347 - protein, 123 aa, Artificial Sequence
  Synthetic construct
EVELVESGGGLVHPGGSLRLSCGASGFNLRTHDMHWVRQATGKSLEWVGASGTGSDSYYADSVKGRFTIARENAKNSMYLQMDSLQAGDTAVYFCARGYDISTGSSTGAFDIWGQGTMVTVSS

SEQ ID NO: 10348 - protein, 123 aa, Artificial Sequence
  Synthetic construct
DVQLVESGGGLVKPGGSLRLSCAASGFTFSGYTMSWVRQAPGKGLEWVASVSGSSGFIYYADSVRGRFTIFRDNAKNSLSLQMNSLRAEDTAIYYCARDRGAGDLIFGVFDSWGQGSRVTVSW

SEQ ID NO: 10349 - protein, 125 aa, Artificial Sequence
  Synthetic construct
QVQLQESGPGLVKPSGTLSLTCGVSGGSITSSNWWSWVRQPPGKGLEWIGEIYHSGSTNYNPSLKSRVSISVDKSKNQFSLNLSSVTAADTAVYYCARWGRDQWEPALTNAFDIWGQGTMVTVSS

SEQ ID NO: 10350 - protein, 121 aa, Artificial Sequence
  Synthetic construct
QVQLVQSGAEVKKPGASVKVSCKASGYTFIKYGISWVRQAPGQGLEWIGWISAYDGHTKYSQKVQGRVTMTTDTSTSTAYMELRSLRSDDTAVYYCATSSGRYYNGHDSNWGQGTLVTVSS

SEQ ID NO: 10351 - protein, 129 aa, Artificial Sequence
  Synthetic construct
EVQLVESGGGLVQPGGSLRLSCAASGFTFSHYSMNWVRQAPGKGLEWVSHIRSSSSTINYADSVKGRFTISRDNDKNSLYLQMNSLRAEDTGVYYCARDIADSKYRSGWYHYYYYMDVWGKGTTVTVSS

SEQ ID NO: 10352 - protein, 117 aa, Artificial Sequence
  Synthetic construct
EVQLVESGGGLIQPGGSLRLSCAASGVTVSSNYMSWVRQAPGKGLEWLSVIYSGGSTFYADSVKGRFTISRDNSKNTLYLQMNTLRAEDTAVYYCARDLQEHGLDVWGQGTTVTVSS

SEQ ID NO: 10353 - protein, 128 aa, Artificial Sequence
  Synthetic construct
EVQLVESGGGLVRPGGSLRLSCAASGFTFSSYAMSWVRQAPGKGLEWVSAISGSGGSTYHADSVKGRFTIPRDNSKSTLYLQMNSLRAEDTAVYYCAKGGDYYGSGSYYNGYYYMDVWGKGTTVTVSS

SEQ ID NO: 10354 - protein, 129 aa, Artificial Sequence
  Synthetic construct
EVQLVESGGGLVQPGGSLRLSCVASGFAISGYSMDWVRQAPGKGLEWVSHIRGSSGAIYYTDSVKGRFTISRDDAKNSLYLQMNSLRAEDTAVYYCARDIADSKYSSGWYNYYYYMDVWGKGTTVTVSS

SEQ ID NO: 10355 - protein, 117 aa, Artificial Sequence
  Synthetic construct
QVQLVESGGGVVQPGRSLRLSCTASGFTFSGFGMHWVRQAPGKGLEWAAVISSDSSSKYYADSVKGRFSISRDNSKNTLYLQMNSLRPEDTAVYYCAKDSSGIPDYWGQGTLVTVSS

SEQ ID NO: 10356 - protein, 120 aa, Artificial Sequence
  Synthetic construct
QVQLVQSGAEVKKPGSSVKVSCKASGGTFSSFAISWVRQAPGQGLEWVGGIIGMFGTTNYAQKFQGRVTITADELTSTAHMELSSLRSEDTAVYYCARGTYYYYSYLDVWGQGTTVTVSS

SEQ ID NO: 10357 - protein, 121 aa, Artificial Sequence
  Synthetic construct
QVQLVESGGGVVQPGRSLRLSCAASGFTFSTYAMHWVRQAPGKGLEWVALISYDGSNKYYADSVKGRFTISRDNSKNTLHLQMNSLRAEDTAVYYCARARGGSYYYGLDVWGQGATVSVSS

SEQ ID NO: 10358 - protein, 126 aa, Artificial Sequence
  Synthetic construct
QVQLVQSGAEVKKPGASVKVSCKASGYTFIGYYIHWVRQAPGQGLEWMGWINPNSGVTNYAQKFQGWVTMTRDTSINTAYMELSRLRSDDTAVYYCAREMGIGGGDLYYHYGMDVWGQGTTVTVPS

SEQ ID NO: 10359 - protein, 121 aa, Artificial Sequence
  Synthetic construct
QVQLVESGGGVVQPGRSLRLSCAASGFTFSTYAMHWVRQAPVKGLEWVALISYDGNNKYYSNSVKGRFTISRDNSKNTLYLQMNSLRADDTAVYWCARSLGGNYFDAFNIWGQGTMVTVSS

SEQ ID NO: 10360 - protein, 128 aa, Artificial Sequence
  Synthetic construct
EVQLVESGGGLVKPGGSLRLSCAASGFTFTNAWMSWVRQVPGKGLDWVGRIKSKSDGGTIDLAAPVKGRFIISRDDSKNTLYLQMNSLKTEDTAMYYCSTVDYYYDSSAYVNDAFDIWGQGTMVTVSS

SEQ ID NO: 10361 - protein, 120 aa, Artificial Sequence
  Synthetic construct
QVQLVESGGGVVQPGRSLRLSCAASGFTFSSYAMHWVRQAPGKGLEWVAVISYDGSNKYYADSLKGRFTISRDNSKNTLFLQGNSLRAEDTAIYYCARSRGGGYGPPDYWGQGTLVTVSS

SEQ ID NO: 10362 - protein, 129 aa, Artificial Sequence
  Synthetic construct
QLQLQESGPGLVKPSETLSLTCTVSGGSISSSSYYWGWIRQPPGMRLEWIGSIYYSGGTYYNPSLKSRVTIFVDTSKNQFSLKLSSVTAADTAVYYCARLTARVAMIVVIRGSYYFDYWGQGTLVTVSS

SEQ ID NO: 10363 - protein, 128 aa, Artificial Sequence
  Synthetic construct
QVQLVQSGAEVKKPGSSVKVSCKASGGTFSDYGISWVRQAPGQGLEWMGGIIPIFGTANYAQRFQGRVTITADDSTSTAYMELSSLRSEDTAVYYCASLGGDYYGSGSYYNSSVFDPWGQGTLVTVSS

SEQ ID NO: 10364 - protein, 117 aa, Artificial Sequence
  Synthetic construct
QVQLQESGPGLVKPSETLSLTCTISGGSISSVFWTWIRQPPGKGLEWIGNIYDSGSTNYNPSLRSRLTISVDTSKNQFSLKLTSVTAADTAVYYCARGQYSTGYDSWGQGTRVTVSS

SEQ ID NO: 10365 - protein, 120 aa, Artificial Sequence
  Synthetic construct
QVQLQESGPGLVKPSGPLSLTCAVSGGSISSSNWWSWVRQPPGKGLEWIGEIYHSGNTNYNPSLKSRVTISVDRSKNQFSLKVGSVTAADTAVYYCLSRSSGYHNWFDPWGQGTLVTVSS

SEQ ID NO: 10366 - protein, 130 aa, Artificial Sequence
  Synthetic construct
QVQLQQWGAGLLKPSETLSLTCAVYGGSFSGYYWSWIRQPPGKGLEWIGEINHSGSTNYNPSLKSRVTISVDTSKNQFSLKLSSVTAADTAVYYCARIRLFSINPGPLQTFYYYYGMDVWGQGTTVTVSS

SEQ ID NO: 10367 - protein, 123 aa, Artificial Sequence
  Synthetic construct
QVQLVESGGGLVKPGGSLRLSCAASGFTFSDYYMSWIRQAPGKGLEWVSYITNSGDTIYYADSVKGRFTVSRDNAKNSLYLQMSSLRAEDTAVYYCARDRGLTQLDENWFDPWGQGTLVTVSS

SEQ ID NO: 10368 - protein, 127 aa, Artificial Sequence
  Synthetic construct
EVQLVQSGAEVKKPGESLKISCKASGYIFTSYWIGWVRQMPGKGLEWMGIIYPDDSDTRYSPSFQGQVTISADKSISSAYLQWSSLKASDTAMYYCARPGGSGSSFTYYYYYYMDVWGKGTTVTVSS

SEQ ID NO: 10369 - protein, 118 aa, Artificial Sequence
  Synthetic construct
QVQLQESGPGLVKPSGTLSLTCAVSGGSISSYSWWSWVRQPPGKGLEWIGEVYYSGSTNYNPSLKSRLTISVDESKNQFSLKLNSVTAADTAVYYCANKRISGDFNYWGQGTLVTVSS

SEQ ID NO: 10370 - protein, 119 aa, Artificial Sequence
  Synthetic construct
EVQLVESGGDLVKPGGSLRLSCAASGLTFTSAWMSWVRQAPGRGPEWVGRMKSKADGGTTDYATTVEGRFFISRDDSRNTLYLHMNGLKTEDTAVYYCITDPGEYRPYWGQGTLVTVSS

SEQ ID NO: 10371 - protein, 119 aa, Artificial Sequence
  Synthetic construct
QVQLQESGPGLVKPSETLSLTCTVSGVSISSYYWTWIRQPPGKGLEWIGYLYYSGSTNYNPSLKSRVTMSEDTSKNQFSLKLTSVTAADTAVYYCARMRGWRGRAFDIWGQGTMVTVSS

SEQ ID NO: 10372 - protein, 118 aa, Artificial Sequence
  Synthetic construct
EVQLVESGGGLVQPGGSLRLSCAASGFSFSNYWMSWVRQAPGKGLEWVADIKQDGSEKYYVDSVKGRFTISRDNAKNSLYLQMNSLRVEDTAVYYCARGGLWGTFDYWGQGTLVTVSS

SEQ ID NO: 10373 - protein, 117 aa, Artificial Sequence
  Synthetic construct
EVQLVESGGGLVQPGGSLRLSCAASGITVSSNYMTWVRQAPGKGLEWVSIIYSGGSTFYSDSVKGRFTVSRDNSKNTLYLQMNSLRAEDTAVYYCARHLDYYGTDVWGQGTTVTVSS

SEQ ID NO: 10374 - protein, 124 aa, Artificial Sequence
  Synthetic construct
QVRLAQSGAEVRVPGASVKVSCKSSGYNFTSYYIHWVRQAPGQGLEWMGIIQPTSGVTSYAQTLKGRVTMTRDTSTSTVYMELSGLRSDDTGMYYCARDPLRPSAGDDDGFDVWGRGTMVIVSS

SEQ ID NO: 10375 - protein, 130 aa, Artificial Sequence
  Synthetic construct
DVQLVESGGGLVQPGGSLRLSCAGSAFTFSTSWMGWVRQAPGKGLEWVANIKEDGSDKSYLDSVKGRFTISRDNTKNSMYLQMNSLRAEDTAVYYCARVRGVGDFWSGYFFVSSTYFDSWGQGTLVTVSS

SEQ ID NO: 10376 - protein, 116 aa, Artificial Sequence
  Synthetic construct
QVQLVESGGGVVQPGRSLRLSCAASGIAFKDYGMHWVRQAPGRGLEWVAFISYDGSVQHYGDSVKGRFTISRDDLKNTLFLQMNGLRAGDTAVYYCAKGATKVDYWGQGTLVTVSS

SEQ ID NO: 10377 - protein, 122 aa, Artificial Sequence
  Synthetic construct
QVQLVQSGAEVKKPGASVKVSCKASGYTFTSYGISWVRQAPGQGLEWMGWISGYNGNTNYAQKVQGRVTMTTDTSTSTAYMELRSLRSDDTAVYYCTRDSSGYYYYYHMDVWGKGTTVTVSS

SEQ ID NO: 10378 - protein, 125 aa, Artificial Sequence
  Synthetic construct
QVQLQESGPGLVKPSQTLSLTCTVPGGSISSGSYYWSWIRQPAGKGLEWIGRIQTSGSSNYNPSLKSRVTMSLDTSKNQFSLKLNSVTAADTAVYYCAREANYDFWRAYYVIDYWGQGTLVTVSS

SEQ ID NO: 10379 - protein, 130 aa, Artificial Sequence; identical to SEQ ID NO: 9955
  Synthetic construct

SEQ ID NO: 10380 - protein, 118 aa, Artificial Sequence
  Synthetic construct
EVQLVESGGGLVQPGGSLRLSCAASGFTVSSNYMSWVRQAPGKGLEWVSLIYSGGSTFYADSVKGRFTISRDNSKNTLYLQMSSLRAEDTAVYYCARDFIGIPGVDHWGQGALVTVSS

SEQ ID NO: 10381 - protein, 132 aa, Artificial Sequence
  Synthetic construct
QVQLVQSGAEVKKPGASVKVSCKASGYTFSSYGISWVRQAPGQGPEWMGWISAYNGNTNYAQKVQGRVTMTTDTSTSTVYMELRSLRSDDTAVYYCARDGGLVEVIPAAMFGVKYYYYMDVWGKGTTVTVSS

SEQ ID NO: 10382 - protein, 121 aa, Artificial Sequence
  Synthetic construct
QVQLVESGGGVVQPGKSLKLSCAASGFAFNNYGIHWVRQAPGKGLEWVAVIWHDGNNKYYADSVKGRFTISRDNSKNTLYLHMNSLRAEDTAIYYCAREGIVGATTGLDYWGQGTLVSVSS

SEQ ID NO: 10383 - protein, 119 aa, Artificial Sequence
  Synthetic construct
EVQLVQSGAEVKKPGESLRISCKASGYTFTSNWITWVRQMPGKGLEWMGRIDPGDPYSSSSPSYQGHATISVDRTITTAYLQWSSLRASDTAIYYCARVNPVGGGPDFWGQGTLVSVSS

SEQ ID NO: 10384 - protein, 125 aa, Artificial Sequence
  Synthetic construct
QVQLQESGPGLVKPSGTLSLTCAVSGGSINSSNWWSWVRQPPGKGLEWIGELHHSGSTNYNPSLKSRVTISLDKSKNEFSLKLSSVTAADTAVYLCARVAVGYAPWYYYYGMDVWGQGTTVTVSS

SEQ ID NO: 10385 - protein, 120 aa, Artificial Sequence
  Synthetic construct
QVQLVQSGAEVKKPGSSVKVSCKASGGTFSTYAISWVRQAPGQGPEWMGGITPIFGATNYAQKFQGRVTITADESTSTAYMELSSLRSEDTAVYYCARQTTLFIGEFDPWGQGTLVTVSS

SEQ ID NO: 10386 - protein, 120 aa, Artificial Sequence
  Synthetic construct
QVQLVQSGGGVVQPERSLRLSCAASGFTFTGYAIHWVRQAPGKGLEWVAVISFDGLNKYYADSVKGRFTISRDNSKNTLYLQMNSLRAEDTAVYYCARGGGNYFGGFDYWGQGTLVTVSS

SEQ ID NO: 10387 - protein, 124 aa, Artificial Sequence; identical to SEQ ID NO: 10260
  Synthetic construct

SEQ ID NO: 10388 - protein, 120 aa, Artificial Sequence
  Synthetic construct
EVQLVESGGTLVQPGGSLRLSCAASGFSFSNYNMNWVRQAPGKGLEWVSYISSSSSTIFYADSVMGRFTISRDNAKNSLYLQLNSLRDEDTAVYYCARDDVVAALKFDFWGQGTLVTVSP

SEQ ID NO: 10389 - protein, 119 aa, Artificial Sequence
  Synthetic construct
QVHLVESGGGVVQPGRSLRLSCAASGFTFSNSAMHWVRQAPGKGLEWVAVISYDGYNKYYADSVKGRFTISRDDSQNTLYLQMNSLRREDTAVYYCARGGGGYKYFDYWGQGTLVAVSS

SEQ ID NO: 10390 - protein, 129 aa, Artificial Sequence
  Synthetic construct
EVQLVESGGGLVQPGGSLRLTCAASGFTFSSYDMHWVRQATGKGLEWVSVIGTGGDTYYPGSVKGRFTISRENAKNSLYLQMNSLRAGDTAVYYCARVLSSSQLGSEGRYYYYYYMDVWGKGTTVTVSS

SEQ ID NO: 10391 - protein, 122 aa, Artificial Sequence
  Synthetic construct
EVQLLESGGALVQPGGSLRLSCAASGFNFRSYAMSWVRQAPGKGLEWVSAIDESGGFTSYADSVKGRFTISRDISKSTLYLQMSSLGAEDTAAYYCAKGAGSVSYKFFFDNWGQGTLVTVSS

SEQ ID NO: 10392 - protein, 126 aa, Artificial Sequence
  Synthetic construct
QVQLQESGPGLVKPSQTLSLTCTVSGGSVNFGSYYWSWIRQPAGKGLEWIGHIYTSGSISYNPSLKSRVTISVDTSKNQFSLKLSSVTAADTAVYYCARGTRHCGSTSCWPWFDPWGQGTLVTVSS

SEQ ID NO: 10393 - protein, 127 aa, Artificial Sequence
  Synthetic construct
QVQLQESGPGLVKPSETLSLTCTVSGGSISRNYWSWIRQPPGKGLEWIGYIHYTGSTNYNPSLKSRVTTSVDTSKNQFSLRLSSVTAADTAVYYCARFPPDTSGSFPHASNYYMDVWGKGTTVTVSS

SEQ ID NO: 10394 - protein, 116 aa, Artificial Sequence
  Synthetic construct
QVQLVESGGGVVQPGTSLRLSCAASGITLKDYGMHWVRQAPGRGLEWVAFISYDGSVQHYGDSVKGRFTISRDDLKNTLFLQMNSLRPDDTAVYYCAKGATKVDYWGQGTLVTVSS

SEQ ID NO: 10395 - protein, 117 aa, Artificial Sequence
  Synthetic construct
EVQLVESGGGLVQPGGSLRLSCAASGFTFSSYYMNWVRQAPGKGLEWVANIKQDGSEEFYLGSVKGRFTISRDNAKNSLHLQVNSLRVDDTAVYYCARGWNYHFDSWGQGTLVTVSS

SEQ ID NO: 10396 - protein, 120 aa, Artificial Sequence
  Synthetic construct
EVQVVESGGTLVQAGGSLRLSCVGSGFTFSSHNMNWVRQAPGKGLEWVSYISSSSRTIFYADSVKGRFTISRDNSKNSLYLQLDSLRDEDTAVYYCARDDVVGAFKFDYWGPGTLVTVSS

SEQ ID NO: 10397 - protein, 119 aa, Artificial Sequence
  Synthetic construct
EVQLVESGGGLVQPGGSLRLSCAASEFTLSNYWMNWVRQAPGKGLEWVANIKRDGSEKYYVDSVEGRFTISRDNAKNSLYLQMNSLRDEDTAVYYCASEFLWFAEVDYWGQGTLVTVSS

SEQ ID NO: 10398 - protein, 119 aa, Artificial Sequence
  Synthetic construct
QVQLVQSGAEVKKPGASVRVSCKASGYTFTRYGFTWVRQAPGQGLEWMGWISAYNGNTHYAQNLQGRVTMTTDTSTSTAYMELRSLRSDDTAVYYCARAEAYSNYEDYWGQGTLVTVSS

SEQ ID NO: 10399 - protein, 127 aa, Artificial Sequence
  Synthetic construct
QLQLQESGPGLVKPSETLSLTCTVSGGSISGSSYYWGWFRQPPGKGLEWIGSIYYTGTTYYNPSLKSRVTISVDTSKNQFSLKVNSVTAADTALYYCAKTYSDGSGTYRGHGWFDPWGLGTLVTVSS

SEQ ID NO: 10400 - protein, 121 aa, Artificial Sequence
  Synthetic construct
QVQLVESGGGVVQPGRSLRLSCAASGFTFNIYGLHWVRQAPGKGLEWVTVISYDGSNKYYADSVKGRFTISRDNSQNTLYLQMNSLRAEDTAVYYCARGYGGNYRAYFDYWGQGTLVTVSS

SEQ ID NO: 10401 - protein, 119 aa, Artificial Sequence
  Synthetic construct
QVQLVQSGGEVKKPGASVRVSCKASGYTFNRYGFTWVRQAPGQGLEWMGWISAYNGNTHYAQNFQGRVTMTTDTSTTTAYMELRSLRSDDTAVYYCARAEAYSNYEDYWGQGSLVTVSS

SEQ ID NO: 10402 - protein, 124 aa, Artificial Sequence
  Synthetic construct
QVQLVQSGAEVKKPGASVKVSCKVSGYTLTELSMHWVRQAPGKGLEWMGGFDPEDGKTIYAQRFQGRVTMTEDTSTDTAYMELNSLRSEDTAVYYCATGDPYYHAPGRDAFDIWGQGTMVTVSS

SEQ ID NO: 10403 - protein, 124 aa, Artificial Sequence
  Synthetic construct
QLQLQESGPGLVKPSETLSLTCTVSGGSISSSTYYWDWIRQPPGKGLEWIGSIFYSGSTYYNPSLKSRVTISVDTSKNHFSLKLSSVTAADTAVFYCARRHRPFTLLRGAIDYWGQGTLVTVSS

SEQ ID NO: 10404 - protein, 121 aa, Artificial Sequence
  Synthetic construct
QVQLQQWGAGLLKPSETLTLTCAVYGGSFSGYYWTWIRQPPGKGLEWIGEINHSGNTNYNPPLKSRVTISIDTSRNQFSLKLTSVTAADTAVYYCARDDGSGLHNYYMDVWGTGTTVTVSS

SEQ ID NO: 10405 - protein, 122 aa, Artificial Sequence
  Synthetic construct
QVQLMQSGAEVKKPGSSVKVSCKASGGTFGTYAITWVRQAPGHGLEWMGGIIPIFGKGKYAQKFQGRVTITADESTNTAYMELSSLRSEDTAVYYCARYFAYEGSGYSWDSWGQGTLVTVSS

SEQ ID NO: 10406 - protein, 129 aa, Artificial Sequence
  Synthetic construct
EVQLVETGGGLIQPGGSLRLSCAASGFTVSSNYMSWVRQAPGKGLEWVSVIYSGGSTYYADSVKGRFTISRDNSKNTLYLQMNSLRAEDTAVYYCARGSVHCSSTSCYERSGYWYFDLWGRGTLVTVSS

SEQ ID NO: 10407 - protein, 119 aa, Artificial Sequence
  Synthetic construct
QVQLVQSGAEVKKPGASVKVSCKVSGYTLTELPMHWLRQAPGKGLEWMGGFDPEDAETIYAQKFQGRVTMTEDTSTDTAYMELSSLGSEDTAVYYCATVPLMIQVFADWGQGTLVTVSS

SEQ ID NO: 10408 - protein, 128 aa, Artificial Sequence
  Synthetic construct
QVQLVESGGGVVQPGRSLRLSCAASGFTFSSYGMHWVRQAPGKGLEWVAVVSFDGSNKNYADSVKGRFTISRDNSKNTLYLQMNSLRAEDTAVYYCAKDMPKGARSGWYYYYYGMDVWGQGTTVTVSS

SEQ ID NO: 10409 - protein, 124 aa, Artificial Sequence
  Synthetic construct
QITLKESGPTLVKPTQTLTLTCTFSGFSLRSSGVGVGWIRQPPGKALEWLALIYWDGDKRYSPSLKRRLTITKDTSKNQVVLTLTSLDPVDTATYYCVHTGAVPPAMVGAFDIWGQGTMVTVSS

SEQ ID NO: 10410 - protein, 124 aa, Artificial Sequence
  Synthetic construct
QLQLQESGPGLVKPSETLSLTCTVSGGSISSSSYYWGWIRQPPGKGLEWIGSIYHSGSTYYNPSLKSRVTISVDTSKNQFSLKLSSVTAADTAVFYCARFSRTYYDKSYAFDIWGQGTKVTVSS

SEQ ID NO: 10411 - protein, 119 aa, Artificial Sequence
  Synthetic construct
QITLKESGPTLVKPTQTLTLTCTFFGVSLSTSGVNVGWIRQPPGKALEWLALIYWDDDKRYSPSLESRLTITKDTSKNQVVLTMTHMDPVDTATYYCARLTTVTIFDSWGQGTLVTVSS

SEQ ID NO: 10412 - protein, 119 aa, Artificial Sequence; identical to SEQ ID NO: 2467
  Synthetic construct

SEQ ID NO: 10413 - protein, 133 aa, Artificial Sequence
  Synthetic construct
QVQLQESGPGLVKPSETLSLTCTVSGGSINSSDYQWGWIRQPPGKGLEWIGNIYYSGSTYYNPSLKSRLTISVDTSKNQISLKLSSVTAADTAMYYCARQVRVFGYDFWSGSQPYYYNAMDVWGQGTTVTVSS

SEQ ID NO: 10414 - protein, 118 aa, Artificial Sequence
  Synthetic construct
QVQLQESGPRLVKPSETLSLTCTVSGGSMSGYYWTWIRQPPGKGLEWIGYIYHDGSTSYNPSLKSRVTASGDTSKNQFSLELTSVTAADTAVYYCVRVGGATRAFDIWGQGTLVTVSS

SEQ ID NO: 10415 - protein, 121 aa, Artificial Sequence
  Synthetic construct
EVQLLESGGGLVQPGGSLRLSCAASGFTFNNFAMNWVRQAPGKGLEWVSSISGTGGATYYADSVKGRFTISRDNPKNTLYLQMNSLRAEDTAVYFCAVPPQALVTADVDYWGQGTLVAVSS

SEQ ID NO: 10416 - protein, 125 aa, Artificial Sequence
  Synthetic construct
QVTLRESGPALVKPTQTLTLTCTFSGFSLYTSGLGVSWIRQPPGKALEWLALIDWDDDKYYNTSLKTRLTISKDTSKSQVVLALTNVDPVDTATYYCARIKYDILAGYYIGFDYWGQGTLVTVSS

SEQ ID NO: 10417 - protein, 128 aa, Artificial Sequence
  Synthetic construct
QVQLVQSGAEVKKPGSSVKVSCKASGGTFNKYAISWVRQAPGQGLEWMGGIIPIFGTTNSAQRFLGRVTITADESTSTASMELSSLRSEDTALYYCATINRPRENLAYFDSTDYSAYWGQGTLVTVSS

SEQ ID NO: 10418 - protein, 117 aa, Artificial Sequence
  Synthetic construct
EVQLVESGGGLVHPGGSLRLSCVASGFTFSDYWMNWVRQAPGKGLEWVANIKWDGSQINYVDSVKGRFTISRDNAKNSVYLQMDSLRGEDTALYYCARDNVRLAYLWGQGTLVTVSS

SEQ ID NO: 10419 - protein, 126 aa, Artificial Sequence
  Synthetic construct
QVQLQQWGPGLLKLSETLSLTCAVYGGSLSGHFWGWIRQSPGRGLEWIGDLNDSGRTNYNPSLRDRVTMSVDMSKNQFSLSLNSVTVADTAVYYCARVSRRSGLDFSTFRGAFDIWGQGTTIAVSS

SEQ ID NO: 10420 - protein, 121 aa, Artificial Sequence
  Synthetic construct
QLQLQESGPGLVKPSETLSLTCTVSGGSISSSSYYWGWIRQPPGKGLEWIGTMYYRGSTDYNPSLKSRVTISVDTSKNQFSLKLSSVTAADTAVYYCARRVPGDYYCLDVWGKGTTVTVSS

SEQ ID NO: 10421 - protein, 119 aa, Artificial Sequence
  Synthetic construct
EVQLVESGGGLIQPGGSLRLSCAASGFTVSSNYMSWVRQAPGKGLEWVSVIYSGGSTFYADSVKGRFTISRDNSKNTLYLQMNSLRAEDTAVYYCARMDYYHSWYFDLWGRGTLVTLSS

SEQ ID NO: 10422 - protein, 126 aa, Artificial Sequence
  Synthetic construct
QVQLVQSGSELKKPGASVKVSCKASGYTFTTYAMNWVRQAPGQGLEWMGWINTDTGNPTYAQGFTGRFVFSLDTSVSTAFLQISSLTAEDTAVYYCARDFDSMVRGGYYYYYMDVWGKGTTVTVSS

SEQ ID NO: 10423 - protein, 120 aa, Artificial Sequence
  Synthetic construct
QVQLQESGPGLVKPSETLSLTCTVSGGSISNYYWSWIRQPPGKGLEWIGYIYYSGSTNYNPSLKSRVTISIDTSKSQFSLKLTSVTAADTAVYYCAREVPWFGENGIDYWGQGTLVTVSS

SEQ ID NO: 10424 - protein, 128 aa, Artificial Sequence
  Synthetic construct
EVQLVESGGGLVQPGGSLRLSCAASGFTFSSYSMNWVRQAPGKGLEWVSYISSSSSTIYYADSVKGRFTISRDNAKNSLYLQMNSLRAEDTAVYYCARDIADSKYSSGWYYYYYMDVWGKGTTVTVSS

SEQ ID NO: 10425 - protein, 119 aa, Artificial Sequence
  Synthetic construct
QVQLQESGPGLVKPSQTLSLTCTVSGGSINSEGYHWSWIRQHPGKGLEWIGNIYYTGSTDYNPSLESRVTVSVDTSNSQFSLRLTSATAADAAVYYCARARGLYHFDCWGQGTLVTVSS

SEQ ID NO: 10426 - protein, 123 aa, Artificial Sequence
  Synthetic construct
EVQLVESGGGLVQPGGSLRLSCAASGFTFSNYWISWVRQAPGKGLEWVANIEPDGSEKNYVDSVKGRFTISRDNAENSLYLQMNSLRAEDTAVYYCARDWGILTGYLGLMDYWGQGTLVTVSS

SEQ ID NO: 10427 - protein, 125 aa, Artificial Sequence
  Synthetic construct
QLQLQESGPGLVKPSETLSLTCTVSGGSISSSSYYWGWIRQPPGKGLEWIGNIYYSGSTYYNPSLKSRVTISVDTSKNQFSLKLSSVTAADTAVFYCATEVVGELRLAYNGMDVWGQGTTVTVSS

SEQ ID NO: 10428 - protein, 121 aa, Artificial Sequence
  Synthetic construct
QVQLQQWGAGLLKPSETLSLTCAVYGGSFSGYFWSWIRQPPGKGLEWIGEVNHSGSTSYNPSLKSRVTISIDTSKKYFSLKLNSVTAADTAVYYCARDDGSSLHNYYMDVWGKGTTVTVSS

SEQ ID NO: 10429 - protein, 125 aa, Artificial Sequence
  Synthetic construct
QITLKESGPPLVNPPQTLTLTCTFSGFSLNTSGVGVGWIRQPPGKALEWLALIYWDDDKRYSPSLKSRLTITKDTSNNQVVLTMTNMDPVDTATYYCAHSRHDYVWGSYRSFDYWGQGTLVTVSS

SEQ ID NO: 10430 - protein, 119 aa, Artificial Sequence
  Synthetic construct
EVQLLESGGGLVQPGGSLRLSCAASGFTFSSYAMSWVRQAPGKGLEWVSAISGSGGSTYYADSVKGRFTISRDNSKNTLWLQMNSLRAEDTATYYCAKGFDAFWSGPTWGQGTLVTVSS

SEQ ID NO: 10431 - protein, 123 aa, Artificial Sequence
  Synthetic construct
EVQLVESGGGLVQPGRSLRLSCAASGFSFDDYAMHWVRQVPGKGLEWVSGISWNSGSIGYAGSVKGRFTISRDNAKNSLYLQMNSLRAEDTAFYYCARVFRSSVMVRGPTDYWGQGTLVTVSS

SEQ ID NO: 10432 - protein, 127 aa, Artificial Sequence
  Synthetic construct
QVQLVQSGAEVRKPGASVKVSCKASGYTFTDYGITWVRQAPGQGLEWMGWISAYNGNTNYAQRLQGRVTMTTDTSTSTAYMELRSLRSDDTAVYYCARELKIVATTGHYYYYYMDVWGKGTTVIVSS

SEQ ID NO: 10433 - protein, 118 aa, Artificial Sequence
  Synthetic construct
EVQLVQSGAEVKKPGESLKISCKGSGYSFTSFWIGWVRQMPGKGLEWMGIVYPGDSNTRYSPSFQGQVTISADKSISTAYLQWSSLKASDTAMYYCAGGGSSTSIDYWGQGTLVTVSS

SEQ ID NO: 10434 - protein, 119 aa, Artificial Sequence
  Synthetic construct
QVQLQESGPGLVKPSGTLSLTCAVSGGSITSTNWWSWFRQPPGKGLEWIGEIYHGGSTTYIPSLRSRVTISVDKSKNQFSLRLSSVTAADTAVYYCARYTSSGREFDPWGQGTLVTVSS

SEQ ID NO: 10435 - protein, 121 aa, Artificial Sequence
  Synthetic construct
QVQLVQSGAEVKKPGASVKVSCKVSGYTLSEFSIHWVRQAPGKGLEWMGGFDPEDGETIYAQKFQGRVTMTEDTSTDTAYMELSSLRSEDTAVYYCAAEHSDLWVRAFEIWGQGTMVTVSS

SEQ ID NO: 10436 - protein, 121 aa, Artificial Sequence
  Synthetic construct
QVQLQESGPGLVKPSQTLSLTCTVSGGSISTGSYYWSWLRQPAGKGLEWIGRIYPSGSTNYNPSLKSRVTMSVDTSKNQFSLKLSSVTAADTAVYYCARTYYYDTDAFDIWGQGTMVTVSS

SEQ ID NO: 10437 - protein, 120 aa, Artificial Sequence
  Synthetic construct
QVQLQESGPGLVKPSGTLSLTCTVSGASISNNNWWSWVRQPPGKGLEWIGEIYHSGSTNYNPSLKSRVTMSIDKSKKYFSLKLTSVTAADTAVYYCARAWGAGIPSFDYWGQGTLVTVSS

SEQ ID NO: 10438 - protein, 128 aa, Artificial Sequence
  Synthetic construct
QVQLQESGPGLVKPSETLSLTCTVSGGSISSSSYYWGWIRQPPGKGLEWIGSIYYSGSTYYKPSLKSRVTISVDTSKNQFSLKLSSVTAADTAVYYCARHPRGYYDSSGYYSHAFDYWGQGTLVTVSS

SEQ ID NO: 10439 - protein, 127 aa, Artificial Sequence
  Synthetic construct
QVQLQESGPGLVKPSQTLSLTCTVSGGSISSGSYYWSWIRQPAGKGLEWIGRMYTSGSTNYNPSLKSRVTISVDTSKNQFSLKLSSVTAADTAVYYCARGGAVAEGDYYYYYGMDVWGQGTTVTVSS

SEQ ID NO: 10440 - protein, 123 aa, Artificial Sequence
  Synthetic construct
QLQLQESGPGLVKPSETLSLTCTVSGGSISSNNYYWGWIRQPPGKGLEWIGSIFYSGSAYYNPSLKSRVTMSVDTSKNQFSLKLTSVTAADTAVYYCARVWDILTYTDAFDIWGQGTMVTVSS

SEQ ID NO: 10441 - protein, 126 aa, Artificial Sequence
  Synthetic construct
QVQLQESGPGLVKPSETLSLTCTVSGGSINNTSYFWGWIRQPPGKGLEWLGSIYHSGDTYYNPSLKSRVTISVDTSKVQFSLKLSSVTAADTAVYYCAREPFLEHGFQSYSWFDPWGQGTLVTVSS

SEQ ID NO: 10442 - protein, 119 aa, Artificial Sequence
  Synthetic construct
QVQLVESGGGLVKPGGSLRLSCAASGFPLSDYYMSWIRQAPGKGLEWVSYISSSGSTIYDADSVKGRFTISRDNAKNSLYLQMNSLRAEDTAVYYCTRHEWLGGTWVYWGQGTLVTVSS

SEQ ID NO: 10443 - protein, 126 aa, Artificial Sequence
  Synthetic construct
QVQLQESGPGLVKPSETLSLTCTVAGVSLNTRYWGWIRQAPGKGLEWIGFIYSSGTTSYNPSLESRITISLDTSKNQFSLTLTSVTAADTAMYYCARADTYYDLLTGHLGALFDYWGQGTLVTVSS

SEQ ID NO: 10444 - protein, 120 aa, Artificial Sequence
  Synthetic construct
QVQLVQSGAEVKKPGSSVKVSCKASGGTFSSYTISWVRQAPGQGLDWMGGIIPLFGTADYAQKFQGRVTITADESTRTAYMELSSLGSEDTAVYYCARIAAAGLSYLDYWGQGTLVTVSS

SEQ ID NO: 10445 - protein, 122 aa, Artificial Sequence
  Synthetic construct
EVQLVESGGGLVQPGGSLRLSCATSGFTFSTYVMNWVRQAPGKGLEWVSYISVGSTTIYYADSVKGRFTISRDNAKNSLYLQMNSLRAEDTAVYFCATGPPRGSGSYGPDYWGQGALVTVSS

SEQ ID NO: 10446 - protein, 127 aa, Artificial Sequence
  Synthetic construct
EVQLVESGGGLVQPGRSLRLSCAASGFTFDDCAMHWVRQAPGKGLEWVSGISWNSGNKVYADSVKGRFTISRDNAKNSLYLQMNSLRAEDTAFYYCAKAGEWGYDILTGHGPPFDFWGQGTLVTVSS

SEQ ID NO: 10447 - protein, 129 aa, Artificial Sequence
  Synthetic construct
EVQLVESGGGLVKPGGSLRLSCAASGFSFSSYFMNWVRQAPGKGLEWVSSISGSNGYIYYADSVKGRFTISRDNAKNALFLHMNSLRAEDTAVYYCARDSFRGVGVTAMDYYYYGMDVWGQGTTVTVSS

SEQ ID NO: 10448 - protein, 123 aa, Artificial Sequence
  Synthetic construct
QVQLVESGGGVVQPGRSLRLSCAASGFTFSSYAMHWVRQAPGKGLEWVAVISYDGDNKYYADSVKGRFTISRDNSKNTLYLQMNSLRGDDTAVYYCARGPEGGGSYYVPLGHWGQGTQATVSS

SEQ ID NO: 10449 - protein, 115 aa, Artificial Sequence
  Synthetic construct
QVQVQQWGAGLLKPSETLSLTCVVYGGSFSGYYWSWIRQPPGKGLEWIGEINHSGGTKYNPSLKRRVSISVDTSKNQFSLKLSSVTAADTAVYYCAHNKGRFDPWGQGTLVTVSS

SEQ ID NO: 10450 - protein, 128 aa, Artificial Sequence
  Synthetic construct
QVQLVQSGAEVKKPGSSVKVSCKASGGTFSSDAISWVRQAPGQGLEWMGGIIPFFGTANYAQNFQGRVTFTADESTTTAYMELSSLRSEDTAVYYCARDPGYCSGGSCNNSYYYMDVWGKGTTVTVSS

SEQ ID NO: 10451 - protein, 132 aa, Artificial Sequence
  Synthetic construct
QVQLVESGGGVGQPGRSLRLSCAASGFTFSSYSMHWVRQAPGKGLEWVAIISYDGSNKYYADSVKGRFTISRDNSKNTLYLQMNSLRAEDTAVYYCARGRFRPDFDWLRSALYDQSLDFDIWGQGTMVTVSS

SEQ ID NO: 10452 - protein, 118 aa, Artificial Sequence
  Synthetic construct
QVQLEESGPGLVKASETLSLTCTVSGGSINYYYWTWVRQPPGKGLEWIGYISYSGNTNYNPSLRSRVTMSLKASNNQFFLKLNSLTTADTAVYYCARGRGLGWWFDPWGQGTPVIISP

SEQ ID NO: 10453 - protein, 129 aa, Artificial Sequence
  Synthetic construct
QVQLQESGPGLVKPSQTLSLTCTVSGGSISSGSYYWSWIRQPAGKGLEWIGRVFTSGSTNYNPSLKSRVTISVDTSKNQFSLKLRSVTAADTAVYYCARMQGYCSGGSCYSGYYGMDVWGQGTTVTVSS

SEQ ID NO: 10454 - protein, 119 aa, Artificial Sequence
  Synthetic construct
QVQLQESGPGLVKPSETVSLTCTVSGGSISSYYWSWIRQPPGKGLEWIGYIYYSGSTKYNPSLKSRVTISEDTSKNQFSLKLNSVTAADTAVYYCARMRGWRGRAFDIWGQGTMVTVSS

SEQ ID NO: 10455 - protein, 130 aa, Artificial Sequence
  Synthetic construct
EVQLVESGGGLVQPGGSLRLSCAASGFTFSSFWMSWVRQAPGKGLEWVANIKQDGSEKNYVDSVKGRFTISRDNAKNSLYLQMNSLRAEDTAVYYCARVENGNFDWLFNAGYYYYYMDVWGKGTTVTVSS

SEQ ID NO: 10456 - protein, 125 aa, Artificial Sequence
  Synthetic construct
QVQLQESGPGLVKPSGTLSLTCTVSGGSISSSNWWSWVRQPPGKGLEWIGEISHSGSTNYNPSLRSRVTISVDKSKNDFSLKVSSVTAADTAVYYCARLVVGYAPWYYYHGMDVWGQGTTVTVSS

SEQ ID NO: 10457 - protein, 126 aa, Artificial Sequence
  Synthetic construct
EAQLWESGGGLVQPGGSLRLSCAASGFTFNNYAMSWVRQAPGKGLEWVAAISGSGGSTFYADSVKGHFTISRDNSKNTLYLQMNTLRAEDTAVYFCAKDFGLLWFGKLFSGVFDIWGQGTMVTVSS

SEQ ID NO: 10458 - protein, 128 aa, Artificial Sequence
  Synthetic construct
EVQLVQSGAEVKKPGESLKISCKGSGYSFAYYWIGWVRQMPGKGLEWMGIIYPGDSDTKYSPSLQGQVTISADKSINTAYLQWASLKASDTAVYYCARRPSSYYYGSGSYVSDAFDIWGQGTMVTVSS

SEQ ID NO: 10459 - protein, 125 aa, Artificial Sequence
  Synthetic construct
QVQLVQSGAEVKKPGASVKVSCKASGYTFTSYTMHWVRQAPGQRLEWMGWINAGNGNTKSSQKFQGRVTITTDTSASTAYMELTSLRSEDTAVYYCATVFYYGSDNLYNGAFDYWGLGTLVTVSS

SEQ ID NO: 10460 - protein, 120 aa, Artificial Sequence
  Synthetic construct
QVQLRQSGPGLVKPSETLSLTCSISGGSITSGNYYWSWIRQPPGKGLEWIGYIYYNGRTNYSPSLKSRVAISLDPSRNQFSLEMTSVTSADTAVYYCARRGIMIRWFDPWGQGTLVTVSS

SEQ ID NO: 10461 - protein, 124 aa, Artificial Sequence
  Synthetic construct
QMQLVESGGGVVQPGGSLRLSCAASGFTFSDYGMHWVRQAPGKGLEWVAIISFHGRTKYQVDSVKGRFIISRDDSKNTLFLEMSSLRTEDTAMYYCARGRHLRNNYHRVHMDVWGKGTTVAVSA

SEQ ID NO: 10462 - protein, 121 aa, Artificial Sequence
  Synthetic construct
QVTLRESGPALVKPTQTLTLTCTISGFSLSTTGMCVSWIRQSPGKALEWLALIDWDGDKYYSTSLKTRLTISQDTSKTQVFLTMTNMDPVDTATYYCARTREYTNYYMDVWGKGTTVTVSS

SEQ ID NO: 10463 - protein, 121 aa, Artificial Sequence
  Synthetic construct
QITLKESGPTLVKPTQTLTLTCTFSGFSLTTKAVTVAWIRQPPGKALEWLALTYGDNELRYNPSLRNRLTITKDISKSQVVLTMTNLDPLDTATYYCAHTNGAGRNYMDVWGKGTTVTVSS

SEQ ID NO: 10464 - protein, 121 aa, Artificial Sequence
  Synthetic construct
QVQLVESGGGVVQPGRSLRLSCTASGFTFSSYGMHWVRQAPGRGLEWVAVIWYDGSNKYYADSVKGRFTISRDNSKNTLYVQMNSLRAEDTAVYYCARGQGATLRYGMDVWGQGTTVTVSS

SEQ ID NO: 10465 - protein, 120 aa, Artificial Sequence
  Synthetic construct
EVQLLESGGGLVQPGGSLRLSCAASGFTFSSYAMTWVRQAPGKGLEWVSGISASGSATYYADSMKGRFTISRDNPKNTLFLQMNGLRADDTAVYYCAIASGRTYYGMNVWGQGTTVTVSS

SEQ ID NO: 10466 - protein, 126 aa, Artificial Sequence
  Synthetic construct
QVQLVQSGAEVKKPGASVKVSCKASGYTFTGYGISWVRQAPGQGLEWMGWISAYNGNTNYAQKLQGRVTMTTDTSTTTAYMELRSLRSDDTAIYYCARGTSLVWFGELYIPNLDYWGQGTLVTVSS

SEQ ID NO: 10467 - protein, 121 aa, Artificial Sequence
  Synthetic construct
QVQLVESGGGVVQPGRSLRLSCAASGFTFSVYAMHWVRQAPGKGLEWVALISYDGNNKYYADSVKGRFTVSRDNSKNTVYLQMNSLRAEDTAVYYCAKSYRGGYYDPLDIWGQGTLVTVSS

SEQ ID NO: 10468 - protein, 122 aa, Artificial Sequence
  Synthetic construct
QVQLVQSGSEFKKPGAAVKVSCKTSGYSFTDYAINWVRQAPGQGLEWMGWINTYTGNPTYAQGFTGRFVFSLDTSVSTAYLQISGLEAVDTAVYYCARDFEEMASIRPFDYWGQGTLVTVSS

SEQ ID NO: 10469 - protein, 126 aa, Artificial Sequence
  Synthetic construct
EVQLVESGGGLVKPGGSLRLSCAASGFTFINYNMNWVRQAPGKGLECVSAISSSGSYIYYADSVKGRFTISRDNAKNSLYLEMNSLRAEDTAVYYCASAEEDFGVIENYFYGMDVWGQGTTVTVSS

SEQ ID NO: 10470 - protein, 118 aa, Artificial Sequence
  Synthetic construct
QVQLVQSGAEVKKPGSSLKVSCKASGGTLSSYAISWVRQAPGQGLEWIGGIIPVFGTVNYSQRFQGRVTIMADESTSTAYMELSSLRTEDTAVYYCAPSGTHHPVGGWGQGTLLTVSS

SEQ ID NO: 10471 - protein, 119 aa, Artificial Sequence
  Synthetic construct
EVQLLESGGGLVQPGGSLRLSCAASGFTFSSYAMNWVRQAPGKGLEWVSAVSGTGATTYYADSVKGRFTISRDNSKNTLYLQMNSLRGEDTAVYYCAKVSGIGSALDYWGQGTLVTVSS

SEQ ID NO: 10472 - protein, 120 aa, Artificial Sequence
  Synthetic construct
EVQLVESGGALVKPGGSLTLSCAVSGFAFADAGMSWVRQAPGKGLEWVGRIQRELDGGTTYYTAPVKGRFTITRDDSKNMLYVQMNSLKIEDTAVYYCASQGGAGEAHHWGQGTLVIVSS

SEQ ID NO: 10473 - protein, 128 aa, Artificial Sequence
  Synthetic construct
QPQLQESGPQLVKPSETLSLTCTVSGGSIISSSYYWAWIRQPPGKGLEWIGNIYDSGSTNYNPSLKSRVTMSVDTSKSQFSLKLTSVTAADTAVYYCARLNIAEAGLGNYFYYGFDVWGQGTTVTVSS

SEQ ID NO: 10474 - protein, 124 aa, Artificial Sequence
  Synthetic construct
QITLKESGPTLVKPTQTLTLTCSFSEFSLSTSGVGVGWIRQPPGKALEWLALIYWDDDKRYSPSLKSRLTITKDTSKNLVVLTMTNMDPVDTATYYCAHTGSVPPGMVGAFDIWGQGTVVTVSS

SEQ ID NO: 10475 - protein, 129 aa, Artificial Sequence
  Synthetic construct
EVQLVESGGGLVKPGGSLRLSCAASGFTFSSYSMNWVRQAPGKGLEWVSSISSSSSYIYYADSVKGRFTISRDNAKNSLYLQMNSLRAEDTAVYYCARVSEWIYSGYDWGYYYYYMDVWGKGTTVTVSS

SEQ ID NO: 10476 - protein, 127 aa, Artificial Sequence
  Synthetic construct
QVQLVESGGGVVQPGRSLRLSCVASGFSFSNYAMHWVRQAPGKGLEWVAVISYDGDIFYADSVKGRFTISRDNSKNTLYLQMNSLRAEDTAVYYCARGAHLRGTITFGGVFSIFDSWGQGTLVTVSS

SEQ ID NO: 10477 - protein, 121 aa, Artificial Sequence
  Synthetic construct
QVQLVESGGGVVQPGRSLRLSCAASGFTFSTYAMYWVRQAPGKGPEWVAVISYDGSNKYYADSVKGRFAISRDNSKSTVFLQMNSLRGEDMAVYYCARTYSGSYYGPFDFWGQGTLVTVSS

SEQ ID NO: 10478 - protein, 121 aa, Artificial Sequence
  Synthetic construct
QVQLVESGGGVVQPGRSLRLSCAASGFTFSSYAMYWIRQAPGKGLEWVAVISYDGSNKYHADSVKGRFTISRDNSKNTLFVQMNSLRAEDTAVYYCARGFGGSYRGYFDYWGQGTLVTVSS

SEQ ID NO: 10479 - protein, 114 aa, Artificial Sequence
  Synthetic construct
EVQLVESGGGLVKPGGSLRLSCAASGLTFSNVWMSWVRQAPGKGLEWVGRIKSQTAGGARDYAASVKGRFTISRDDSENMLYLEMNSLKTEDTAVYYCTTWWFWGQGTMMIVSS

SEQ ID NO: 10480 - protein, 121 aa, Artificial Sequence
  Synthetic construct
EEQLLQSGGGLVQPGGSLRLSCAASGFTFSSYAMSWVRRAPGKGLEWVSAMTGSGTTTYYARSVEGRFTMSRDNSKNMVYLQMNSLRAEDTAIYYCAKESVTTSGGWLDPWGQGSLVTVSS

SEQ ID NO: 10481 - protein, 119 aa, Artificial Sequence
  Synthetic construct
EVQLVESGGGLVQPGGSLRLSCSASGFTFSSYAMHWVRQAPGKRLEYVSVISSNGVSTNYADSVKGRFTISRDNSKNTLYLQMSSLRAEDTAVYYCVKGSSSWFSFDYWGQGSLVTVSS

SEQ ID NO: 10482 - protein, 117 aa, Artificial Sequence
  Synthetic construct
EVQLVESGGGLVQPGGSLRLSCAASGVTVSSNYMNWVRQAPGKGLEWVSIIYSGGSTFYADSVKGRFTISRDNSKNTLYLQMNSLRVEDTAVYYCARDLWDYGMDVWGQGTTVTVSS

SEQ ID NO: 10483 - protein, 122 aa, Artificial Sequence
  Synthetic construct
EVQLVESGGGLVQPGGSLRLSCAASGFTFSSYSMNWVRQAPGKGLEWVSYISSSSSTIYYADSVKGRFTISRDNAKNSLYLQMNSLGDEDTAVYYCARALSYNGIYPNGDYWGQGTLVTVSS

SEQ ID NO: 10484 - protein, 131 aa, Artificial Sequence
  Synthetic construct
EVQLVQSGAEVKKPGESLRISCKGSGYSFTSYWISWVRQMPGKGLEWMGRIDPSDSYTNYSPSFQGQVTISADKSISTAYLQWSSLKASDTAMYYCARQWQPGAWVIPYYSDSILNWFDPWGQGTLVTVSS

SEQ ID NO: 10485 - protein, 119 aa, Artificial Sequence; identical to SEQ ID NO: 2467
  Synthetic construct

SEQ ID NO: 10486 - protein, 116 aa, Artificial Sequence
  Synthetic construct
EVQLVQSGAEVKKPGESLRISCKASGYTFTSNWITWVRQMPGKGLEWMGRIDPSDPYSNSSPSFQGHATISVDKSISTAYLQWSSLKASDTAIYYCARVGGGPEYWGQGTLVTVSS

SEQ ID NO: 10487 - protein, 120 aa, Artificial Sequence
  Synthetic construct
EVLLVQSEAEMKKPGESLKISCKTSGYAFSDHWIAWVRQMPGKGLEWMGIIWPGGSEARYSPSFQGQVTFSVDRSINTAYLHWASLGTSDTAMFWCARHAKEAARHPDYWGQGTLVTVSS

SEQ ID NO: 10488 - protein, 126 aa, Artificial Sequence
  Synthetic construct
QVQLVQSGSELKKPGASVKVSCKASGYTFSSYAMNWVRQAPGQGLEWMGWINTNTGNPTYAQGFTGRFVFSLDTSLSTAYLQIDSLKAEDTAVYYCARDGQQSFGNIYYYYYMDVWGKGTTVTVSS

SEQ ID NO: 10489 - protein, 112 aa, Artificial Sequence
  Synthetic construct
QVQLQESGPGLVKPSETLSLTCTVSGDSIRTYYWSWIRQPPGKGLEWIGYIYYSGSLQYNPSLKSRVTISVDTSKNQYSLKLSSVTAADTAVYYCVRGFDYWGQGTLVTVSS

SEQ ID NO: 10490 - protein, 121 aa, Artificial Sequence
  Synthetic construct
QVQLVESGGGVVQPGRSLRLSCAASGFTFSNFGMHWVRQAPGKGLEWVAVIWFDGSNKYYADSVKGRFTISRDESKNTLFLQMNSLRADDTAVYYCARDGAVGSTTGLDYWGQGTLVTVSS

SEQ ID NO: 10491 - protein, 119 aa, Artificial Sequence; identical to SEQ ID NO: 2046
  Synthetic construct

SEQ ID NO: 10492 - protein, 121 aa, Artificial Sequence
  Synthetic construct
EVHLLESGGGLVQPGGSLRLSCAASGFTFSRYAMSWVRQAPGKGLEWVSTISGSDGRTNYADSVKGRFTISRDNSKNTLYLQMNSLRAEDTAVYYCAKDVVFWSAYYYDYWGQGTLVTVSS

SEQ ID NO: 10493 - protein, 122 aa, Artificial Sequence
  Synthetic construct
EVQLVESGGGLVQPGGSLRLSCAASGFTFSRYWMSWVRQAPGKGLEWVASINQDETEKYYVDSVRGRFTISRDNAKNSLYLQMNSLRAEDTAVYFCVRDPNTYSWTEYFQDWGQGTLVTVSS

SEQ ID NO: 10494 - protein, 85 aa, Artificial Sequence
  Synthetic construct
VRQAPGQGLEWMGLINPSGGSASFAQKFRGRASLTRDTSTDTVYMELSSLKSDDTGVYYCARDGGGYGDYGCDHWGQGTQVTVSS

SEQ ID NO: 10495 - protein, 131 aa, Artificial Sequence
  Synthetic construct
QVQLQESGPGLVKPSQTLSLTCTVSGGSISSGSYYWSWIRQPAGKGLEWIGRIFTSGSTNYNPSLKSRVTISGDTSKNQFSLKLTSVTAADTAVYYCARAEYSRIAAAFGAVAGTDSFDIWGQGTMVTVSL

SEQ ID NO: 10496 - protein, 120 aa, Artificial Sequence
  Synthetic construct
EVQLVESGGGLVKPGESLRLSCAASGISFTNAWLSWVRQAPGKGLEWVGRIKARSDGGTVDYAAPVKGRFTISRNDSEATLYLQMDSLKTEDTAVYFCTTLGNHPPEFFWGQGTLVTVSS

SEQ ID NO: 10497 - protein, 127 aa, Artificial Sequence
  Synthetic construct
QVQLVQSGAEVKKPGASVKVSCKASGYTFTSYGISWVRQAPGQGLEWMGWISAYNGNTNYAQKLQGRVTMTTDTSTSTAYMELRSLRSDDTAVYYCARDRYSSGWYRDSNNYWFDPWGQGTLVTVSS

SEQ ID NO: 10498 - protein, 120 aa, Artificial Sequence
  Synthetic construct
EVQLVESGGGLVQPGGSLRLSCAASGFTFPTFWMAWVRQAPGKGLEWVANIQPDGAAQYYLDSVKGRFTISRDNAKDSLYLQMISLRAEDTAVYYCARYPSPNPYYFDYWGQGALVTVSS

SEQ ID NO: 10499 - protein, 122 aa, Artificial Sequence
  Synthetic construct
EVQLVESGGGLVKPGGSLRLSCAASGFTFSSYNMNWVRQAPGKGLEWVSSISGSANYIYYADSLKGRFTISRDNAKNSLYLQMISLRAEDTAVYYCARDADTTLVTGVMDVWGQGTTVTVSS

SEQ ID NO: 10500 - protein, 117 aa, Artificial Sequence; identical to SEQ ID NO: 10159
  Synthetic construct

SEQ ID NO: 10501 - protein, 126 aa, Artificial Sequence
  Synthetic construct
EVQLVESGGGLVQPGGSLRLSCTASGFTFSSYAMHWVRQAPGKGLDYVSGISSNGGGTYYANSVKGRFTISRDNSKNTLYLQMGSLRVEDMAVYYCARDSVVVGAQNSVFYGMDVWGQGTTVTVSS

SEQ ID NO: 10502 - protein, 126 aa, Artificial Sequence
  Synthetic construct
QVQLQQWGAGLLKPSETLSLTCAVYGGSFSGYYWNWIRQPPGKGLEWIGEINHSGSTNYNPSLKSRVTISVDTSKNQFSLKLTSVTAADTAVYYCARGGIFVVVPPAHKNWYFDLWGRGTLVTVSS

SEQ ID NO: 10503 - protein, 121 aa, Artificial Sequence
  Synthetic construct
QLQLQESGPGLVKPSETLSLTCTVSGTSIRSSSYYWVWIRQPPGKGLEWIGNIYYSGSTDYNPSLMSRVTISVDTSKNQFSLKLSSVTAADTAVYYCARRPLTDYYYMDVWGKGTTVTVSS

SEQ ID NO: 10504 - protein, 125 aa, Artificial Sequence
  Synthetic construct
QVQLQESGPGLVRPSETLSLTCTVSGGSISTYWWSWIRQPPGKGLEWIGYIYYIGSHNYNPSLESRVTMSLDTSKNQFSLKLSSVTAADTAVYYCARDGRYYDNSGYSIHASDIWGQGTVVTVSS

SEQ ID NO: 10505 - protein, 122 aa, Artificial Sequence
  Synthetic construct
QVQLVESGGGVVQPGRSLRLSCTASGFTFSSYAIHWVRQAPGKGPEWVGVISYDGSNKYYTDSVKGRFTISRDNSKNTLYLQMNSLRAEDTAMYYCARGHGSGSYYGAFAYWGQGTLVTVSS

SEQ ID NO: 10506 - protein, 121 aa, Artificial Sequence
  Synthetic construct
EVQLLESGGGLVQPGGSLRLSCVDSEFTFITYAMSWVRQAPGKGLEWVSTISGSGDSTSYADSVKGRFTISRDSSKNTLFLQMHSLRAEDTALYYCAKSATIVLMVSAIYWGQGTLVTVSS

SEQ ID NO: 10507 - protein, 121 aa, Artificial Sequence
  Synthetic construct
EVQLVESGGGLVQPGRSLRLSCAASGFTFDDYAMHWVRQAPGKGLEWVSGISWYSGRIGYADSVKGRFTISRDNAKNSLYLQMNSLRAEDTALYYCAKGDTSSWLGAMDVWGKGTTVTVSS

SEQ ID NO: 10508 - protein, 125 aa, Artificial Sequence
  Synthetic construct
QLQLQESGPGLVKPSETLSLTCTVSGGSISSYNYYWGWIRQPPGKGLEWIGSIYYIGSTFYNPSLKSRVTISVDTSKNQFSLKLSSVTAADTAVYYCARFGYNSVETFIDAFDIWGQGTMVTVSS

SEQ ID NO: 10509 - protein, 122 aa, Artificial Sequence; identical to SEQ ID NO: 10242
  Synthetic construct

SEQ ID NO: 10510 - protein, 120 aa, Artificial Sequence
  Synthetic construct
QVQLKQWGAGLLKPSEALSLTCAIYGGSFNDDYWSWIRQSPGKGLEWIGEITLGGGAYYSPSLRSRATISLDTSKNQFSLKLNSVTAADTATYFCARYSPGGYGDYEGDWGQGTPVTVSS

SEQ ID NO: 10511 - protein, 125 aa, Artificial Sequence
  Synthetic construct
EVQLEQSGAEVKKPGESLKISCKGSGYSFTSYWIGWVRQMPGEGLEWMGIIYPGDSDTRYSPSFKGQVTISADKSISTAYLQWNSLRASDTAMYYCARHGGTGNRKYYYFYMDVWGKGTTVTVSS

SEQ ID NO: 10512 - protein, 128 aa, Artificial Sequence
  Synthetic construct
QVQLVESGGGLVKPGGSLRLSCAASGFSFSDYYMSWIRQAPGKGLEWVSYISSSRSYINNADSVKGRFTISRDTAKNSLYLQMNSLRVEDTAVYYCARGYYYGSGSYYNPDPNWFDPWGQGTLVTVSS

SEQ ID NO: 10513 - protein, 120 aa, Artificial Sequence
  Synthetic construct
QVQLQQWGAGLLKPSETLSLTCAVYGGSFSGYYWTWIRQPPGKGLEWIGEINHSGGTNYNPSLKSRVTISVDTSKNQFSLKLSSVTAADTAVYYCARGHGVYHYYGMDVWGQGTTVTVSS

SEQ ID NO: 10514 - protein, 122 aa, Artificial Sequence
  Synthetic construct
QVQLVQSGAEVKKPGASVKVSCKASGYMFTSYGIGWVRQAPGQGLEWMGWISAYNGDTRYAQKLQGRVTMTTDTSTTTVYMELRSLRYDDTAVYYCARDSDYGDYANWFDPWGQGTLVTVSS

SEQ ID NO: 10515 - protein, 118 aa, Artificial Sequence
  Synthetic construct
QVQLLESGGGVVQPGRSLRLSCAASGFTFSNYGIHWVRQAPGKGLEWVAVISYDGGDIYYADSVKGRFTISRDSSKNTLYLQMNSLRPEDTAVYYCAKDLSTGVIDYWGQGTLVTVSS

SEQ ID NO: 10516 - protein, 126 aa, Artificial Sequence
  Synthetic construct
QVQLQESGPGLVKPSQTLSLTCTVSGGSISTDTYYWNWIRQPAGKGLEWIGRVSSVSTTCNPSLKSRVTISVDTSKNQFSLKLSSVTAADTAVYYCARGQLVVDGDYYYFYGMDVWGQGTTVTVSS

SEQ ID NO: 10517 - protein, 123 aa, Artificial Sequence
  Synthetic construct
QVQLVESGGGVVQPGRSLRLSCAGSGFTFSSYGMHWVRQAPGKGLKWVAVISYDGSNKYYADSVKGRFTISRDNSKNTLYLQMNSLRAEDTAVYYCAKGGMYASTWYGVFDYWGQGTLVTVSS

SEQ ID NO: 10518 - protein, 122 aa, Artificial Sequence
  Synthetic construct
QEQLVESGGGVVQPERSLRLSCAASGFTFSSYVLHWVRQAPGKGLEWVAVISYDGSSNSYADSVKGRFTISRDNSQNTVYLQMNSLIPEDTAVYYCARDGDYGSGVWALDPWGQGTLVTVSS

SEQ ID NO: 10519 - protein, 131 aa, Artificial Sequence
  Synthetic construct
QVQLQESGPGLVKPSETLSLTCTVSGGSISSYSWSWIRQSPGTGLEWVGDIYSTGSTNYNPSLKSRLTMSLDTSKSHFSLKLSSVTAADTAVYYCARGAGEQRLVGGLFGVSHFYYYMDVWGKGTTVTVSS

SEQ ID NO: 10520 - protein, 126 aa, Artificial Sequence
  Synthetic construct
EVQLVESGGGLVKPGGSLRLSCAASGFTFNSYSMNWVRQAPGKGLEWVSSISSSSSDKKYAGSVKGRFIISRDNAKNSLYLQMKSLRAEDTAVYYCASAEEDFAVVEKYYYGMDVWGQGTTVTVSS

SEQ ID NO: 10521 - protein, 122 aa, Artificial Sequence
  Synthetic construct
QVQLVQSGAEVKKPGASVKISCKASGYTFTDSYVHWVRQAPGQGLEWMGIINPSAGSTSYAQKLQDRVTMTSDTSTSTVYMELSGLRSDDTAVYFCARGLFIPAAMGWFDPWGQGTLVTVSS

SEQ ID NO: 10522 - protein, 121 aa, Artificial Sequence
  Synthetic construct
EVQLVESGGGLVQPGGSLRLSCVAAGFTFNNHWMTWVRQAPGKGLEWLANIRFDATEKYYVDSVKGRFTVSRDNAMNSVYLHMASLRAEDTAVYYCARSNRRWVYQGVDVWGQGTTVTVSP

SEQ ID NO: 10523 - protein, 120 aa, Artificial Sequence
  Synthetic construct
QLQLQESGPGLVKPSETLSLTCTVSGGSISISDYYWGCIRQPPGKGLEWIGIIYYSGSTYYNPSLKSRVTISVDTSKNQFSLRLSSVTAADTAVYYCARLNNNNWAFDYWGQGTLVTVSS

SEQ ID NO: 10524 - protein, 123 aa, Artificial Sequence
  Synthetic construct
EVLLVESGGGLVQVGGSLRLSCSASGFTFSNYAIHWVRQAPGKGLEYVSAISSHGGSTYYADSVKGRFTISRDNSKNKVFLQMSSLRAEDTAVYYCVKIGTGGYGSRNYFDFWGQGTLVTVSS

SEQ ID NO: 10525 - protein, 123 aa, Artificial Sequence
  Synthetic construct
QVQLVQSGAEVKKPGASVKVSCKASGYTFTSYDINWVRQATGEGLEWMGWMNPNSGDTGYVQKFQGRVTMTRNTSISTAYMELSSLRSEDTAVYYCARGFGQQWLVPMKIDYWGQGTLVTVSS

SEQ ID NO: 10526 - protein, 123 aa, Artificial Sequence
  Synthetic construct
QLQLQESGPGLVKPSETLSLTCSVSGGSISSSTYYWGWIRQPPGKGLEWIGSIYYSGSTYYNSSLKSRVTISVDTSKNQFSLNLSSVTAADTAVYYCARQLKWFGELHRFDPWGPGTLVTVSS

SEQ ID NO: 10527 - protein, 126 aa, Artificial Sequence
  Synthetic construct
QLQLQESGPGLVKPSETLSLTCTVSGGSISRNNFYWGWIRQPPGKGLEWIGTIYYSGATYYNPSLKSRVIISVDTSKSQFSLKLSSVTAADTAVYYCARLTYYFDTSGHLYYFDYWGQGTLVTVSS

SEQ ID NO: 10528 - protein, 127 aa, Artificial Sequence
  Synthetic construct
QLQLQESGPGLVKPSETLSLTCTVSGGSISSNSYYWGWLRQPPGEGLEWIGTIYYSGSTYYNPSLRSRVTISVDTSKNQFSLKLTSVTAADTAVYYCARRGNCSGASCYLDWHFDLWGRGTLVTVSS

SEQ ID NO: 10529 - protein, 130 aa, Artificial Sequence
  Synthetic construct
DVQLVESGGGLVQPGGSLRLSCAGSGFTFSSSWMGWVRQAPGKGLEWVANIKQDGSDKSYLDSVKGRFTISRDNAKNSLYLQMNSLRAEDTAVYYCARVRGVGDFWSGYFFVSSTYFDSWGQGTLVTVSS

SEQ ID NO: 10530 - protein, 120 aa, Artificial Sequence
  Synthetic construct
QVQLQESGPGLVKPSQTLSLTCTVSGGSISSGSYYWSWIRQPAGKGLEWIGRIYTTGSTNYNPSLKSRVTISVDTSKNQFSLKLTSVTAADTAVYFCATEGQWLYYFEYWGQGTLVTVSS

SEQ ID NO: 10531 - protein, 123 aa, Artificial Sequence
  Synthetic construct
QVQLVESGGGVVQPGRSLRLSCAASGFTFSSYAMHWVRQAPGKGLEWVAVISNDGSIKYYADSVKGRFTISRDNSKNTLYLQMDSLRADDTAVYYCARDGAGGYSLYDWFDPWGQGTLVIVSS

SEQ ID NO: 10532 - protein, 127 aa, Artificial Sequence
  Synthetic construct
QVQLVESGGGVVQPGRSLRLSCAASGFTFNSYGMHWVRQAPGKGLEWVALISNDGTDKYYADSVKGRFTISRDNSKNTLSLQMNTLRTEDTAVYYCAKADGGYYDSSAFYSTAIDYWGQGTLVTVSS

SEQ ID NO: 10533 - protein, 124 aa, Artificial Sequence
  Synthetic construct
QLQLQESGPGLVKPSETLSLTCSVSGGSISTSGYYWVWIRQPPGKGLEWIGSIHHSGSTNYNPSLKSRVTISADRSKNQFSLNLNSVTAADTAVYYCARDGYDTGGYYVCVDYWGQGTLVTVSS

SEQ ID NO: 10534 - protein, 125 aa, Artificial Sequence
  Synthetic construct
QVQLVQSGSELKKAGASVTVSCKASGYTFTSYAMTWVRQAPGQGLEWMGWINSNTGNPTYAQGFTGRFVFSLDTSVSTAYLQISSLKAEDTAVYNCARLNWVVNGDNYYYYMDVWGKGTTVTVSS

SEQ ID NO: 10535 - protein, 126 aa, Artificial Sequence
  Synthetic construct
EVQLVESGGGLVQPGGSLRLSCAASGFTFSSHWMSWVRQAPGKGLEWVANIKQDGSEKYYVDSVKGRFTISRDNVKNSLYLQMNSLRAEDTAVYYCATGPLRYFDWLFGPYYMDVWGKGTTVTVSS

SEQ ID NO: 10536 - protein, 123 aa, Artificial Sequence
  Synthetic construct
QVQLVESGGGVVQPGRSLRLSCAASGFTFSSFGMHWVRQAPGKGLEWVAVIWYDGSNENYADSVKGRFTISRDNSKNNLYLQMNSLRAEDTAVYYCARWGAGSGWDEGEFDYWGQGTLVTVSS

SEQ ID NO: 10537 - protein, 124 aa, Artificial Sequence
  Synthetic construct
QMQLVQSGPEVKKPGTSVTVSCKASGFTFTRSALQWVRQARGQRPEWIGWIVLGSGNTNYAPNFQQRVTITRDMSTSTVYMELSSLKSEDSAVYYCGGGGHGLGDNYYYGTDVWGQGTTVTVSS

SEQ ID NO: 10538 - protein, 112 aa, Artificial Sequence
  Synthetic construct
QVQLQESGPGLVKPSETLSLTCTVSGGSISSYYWSWIRQPPGKGLEWIGYIYYSGSTNYNPSLKSRVTISVDTSKTQFSLKLTSVTAADTAVYYCARGFDYWGQGSLVTVSS

SEQ ID NO: 10539 - protein, 121 aa, Artificial Sequence
  Synthetic construct
QVQLEESGGGVVQPGRSLRLSCAASGFTFNSYAMDWVRQAPGKGLEWVAVISYDGSNTYYADSVRGRFTISRDNSKNTLYLQMNSLRAEDTALYYCARPGSGSYYSYFDYWGQGTLVTVSS

SEQ ID NO: 10540 - protein, 119 aa, Artificial Sequence
  Synthetic construct
QVQLQESGPGLVKPSETLSLTCTVSGGSISSYYWSWIRQPPGKGLEWIGYLYDSGRTIYNPSLKSRVTISVDTSKNQFSLKLSSVAAADTAVYYCSRMRGWRGRAFDIWGQGTMVTVSS

SEQ ID NO: 10541 - protein, 125 aa, Artificial Sequence
  Synthetic construct
QVQLVESGGGVVQPGRSLRLSCAASGFTFSSYVMHWVRQAPGKGLEWVAVTSYDGSDKYYADSVKGRFTISRDNSKNTLYLQINSLRAEDTAVYYCARDNYSSGWYYYFFYMDVWGKGTTVTVSS

SEQ ID NO: 10542 - protein, 113 aa, Artificial Sequence
  Synthetic construct
EVDLVEFGGGLVQPGGSLRLSCTTSGLRFSTYDMSWVRQAPGKGLECVSSISGSRGWTFYADSVKGRFTISRDNSKSTLYLQMNSLRAEDTAIYYCAKNWDYWGQGTLVTVSS

SEQ ID NO: 10543 - protein, 126 aa, Artificial Sequence
  Synthetic construct
QLQLQESGPGLVKPSETLSLTCTVSGGSISSSSDYWGWIRQPPGKGLEWIGNIYYSGSTYYNPSLKSRVTISVDTSKKQFSLKLSSVTAADTAVYYCARRRTMIVVVPKGDWFDPWGQGTLVTVSS

SEQ ID NO: 10544 - protein, 119 aa, Artificial Sequence
  Synthetic construct
EVQLVESGGGLIQAGGSLRLSCAASGFIVSNNYMSWVRQAPGKGLEWVSIIYSGGTTYYADSVKGRFTISRDNSKNTLYLQMNSLRAEDTAVYYCASLLEWSHYGMDVWGQGTTVTVSS

SEQ ID NO: 10545 - protein, 129 aa, Artificial Sequence
  Synthetic construct
EVQLVEFGGGLVQPGRSLRLSCATSGFTFEDFAMHWVRQAPGKGLEWVSGSTWNSGTIGYADSVKGRFTTSRDNAKNSLYLQMNNLRDEDTALYYCAKDIGRYDHYDTFGRVGGAFDIWGQGTMVTVSS

SEQ ID NO: 10546 - protein, 127 aa, Artificial Sequence
  Synthetic construct
EVQLVESGGGLVQPGGSLRLYCAASGFSFSSYWMSWVRQAPGKGLEWVANIKGDEIETYYVDSVRGRFTISRDDAKNSVYLQMSNLRAEDTGVYYCARVNNYPDSSGHHSGEHFDHWGQGTLVTVSS

SEQ ID NO: 10547 - protein, 125 aa, Artificial Sequence
  Synthetic construct
QVQLVQSGAEVKKPGSSVRVSCKASGGTFSSYSISWVRQAPGQGLEWMGRVIPMLGVANNAQKFQGRFTVTADKSTSTAYMELSSLRSVDTAVYFCARERGYSSSSSATYYFDYWGQGTLVTVSS

SEQ ID NO: 10548 - protein, 121 aa, Artificial Sequence
  Synthetic construct
QVHLQQWGAGLLKPSETLSLTCAVYGGSFSGYYWSWVRQPPGKGLEWIGEINHSGSTSYNPSLKSRVTISVDTSKNQFSLKLSSVTAADTAVYYCARDDGSGVHNYYMDVWGKGTTVTVSS

SEQ ID NO: 10549 - protein, 124 aa, Artificial Sequence
  Synthetic construct
EVQLLESGGGLVQPGGSLRLSCAASGFTFSSYAMSWVRQAPGKGLEWVSAISGSGGSTYYADSVKGRFTISRDNSKNTLYLQMNSLRAEDTAVYYCAKSVLEWLLGYYYGMDVWGQGTTVTVSS

SEQ ID NO: 10550 - protein, 120 aa, Artificial Sequence
  Synthetic construct
EVQLVESGGALVKPGGSLTLSCAVSGFTFADAWMIWVRQAPGKGLEWVGRIEREGDGGTTYYSAPVKGRFTITRDDSKNTLYVQMNSLKIEDTAVYYCASQGGAGEAHHWGQGTLVIVSS

SEQ ID NO: 10551 - protein, 119 aa, Artificial Sequence
  Synthetic construct
QVQLVESGGGVVQPGRSLRLSCAASGFTFNTYTMHWVRQAPGKGLEWVALISYDGSNEYYAASVKGRFTISRDNSKNTMYIQMNSLRAEDTAVYYCIGSGAGWGSFDYWGQGTLVTVSS

SEQ ID NO: 10552 - protein, 130 aa, Artificial Sequence
  Synthetic construct
QVQLQESGPGLVKPSETLSLTCTVSGGSISSYYWSWVRQSPGKGLEWIGYIYFTGNTNYNPSLKGRVTISVDTSKNQFSLELNSVTAADTAVYYCARAPRTSMLRGIIITALEPLRFDYRGQGTLVTVSS

SEQ ID NO: 10553 - protein, 124 aa, Artificial Sequence
  Synthetic construct
QVHLVQSGAEVKKPGSSVKVSCKASGGTFSSYAINWVRQAPGQGLEWMGGIISIFGIAKNAQKFQGRVTITADESTSTAYMELSSLRSEDTAVYYCARTLTTYYYESNTYLDVWGQGTMVTVSS

SEQ ID NO: 10554 - protein, 127 aa, Artificial Sequence
  Synthetic construct
QVQLVQSGAELKKPGSSVKVSCKASGGTFSSYVISWVRQAPGQGLEWMGGIMPLFGTTNYAQKFQDRVTITADESTSTAYMELSSLRSEDTAVYYCARWAPTMAAAGDSYYYYMDVWGKGTTVTVSS

SEQ ID NO: 10555 - protein, 127 aa, Artificial Sequence
  Synthetic construct
QVQLQESGPGLVKPSQTLSLTCIVSGGSISSGSYYWSWIRQPAGKGLEWIGRIYTSGSTNYNPSLKSRVTISVDTSKNEFSLKLSSVTAADTAVYYCARAELVLVPAAIGSNAFDIWGQGTMVTVSS

SEQ ID NO: 10556 - protein, 127 aa, Artificial Sequence
  Synthetic construct
QLQLQESGPGLVKPSETLSLTCTVSGGSISSSSYYWGWIRQPPGKGLEWIGTVFHSGSTYSNPSLRSRVTVSVDTSKNQFSLKLSSVTAADTAVYYCARPVQIVLLPGAASSWFDPWGQGTLVTVSS

SEQ ID NO: 10557 - protein, 122 aa, Artificial Sequence
  Synthetic construct
QVHLVESGGGVVQPGGSLRLSCTASGFTFSDFAMRWVRQGPGKGLEWVAIVSYDGRNEHYPGSVRGRFSISRDNSRNKVFLQMSRLTPEDTGLYFCVRDPYIVPTALPLDYWGQGTHVTVSS

SEQ ID NO: 10558 - protein, 116 aa, Artificial Sequence
  Synthetic construct
QVQLMESGGGVVQPGRSLRLSCAASGFTFSNYPFHWVRQAPGKGLEWVAVISYDGFDKYYADSVKGRFTISRDNSKNTLYLQMNSLRGADTAVYFCARDEEGPDYWGQGTLVTVSS

SEQ ID NO: 10559 - protein, 122 aa, Artificial Sequence
  Synthetic construct
QLQLQESGPGLVKPSETLSLTCTVSGGSISSSSSYWGWIRQPPGKGLEWIGSIYYSGSTDYNPSLKSRVTIFVDTSENQFSLTLSSVTAADMAVYYCARRGYSFGYIGFDIWGQGAMVTVSS

SEQ ID NO: 10560 - protein, 128 aa, Artificial Sequence
  Synthetic construct
QVQLVQSGAEVKKPGASVKVSCKVSGYTLTELSMHWVRQAPGKGLEWMGGFDPEDAETIYAQEFQGRVTMTEDTSTDTAYMELSSLRSEDTAVYYCATASATPDYYDSSSFYYQLDYWGQGTLLTVSS

SEQ ID NO: 10561 - protein, 128 aa, Artificial Sequence
  Synthetic construct
QVQLVESGGGLVKPGGSLRLSCAASGFSFSDYYMSWIRQAPGKGLEWVSYIGSSRSYTNNADSVKGRFTVSRDTAKNSLYLQMNSLRVEDTAVYYCARGYYYGSGSYYNPDPNWFDPWGQGTLVTVSS

SEQ ID NO: 10562 - protein, 127 aa, Artificial Sequence; identical to SEQ ID NO: 10399
  Synthetic construct

SEQ ID NO: 10563 - protein, 121 aa, Artificial Sequence
  Synthetic construct
EVQLLESGGGLVQPGGSLRLSCAASGFTFSKYAMSWVRQAPGKGLECVSVIGGSGGKTYYADSVKGRFTISRDNSKNTLYLQMNSLRAEDTAVYYCAKLSPTTAEDYFDYWGQGTLVTVSS

SEQ ID NO: 10564 - protein, 122 aa, Artificial Sequence
  Synthetic construct
QVQLVQSGAEVKRSGSSVKVSCTASGGTFSSYAVCWVRQAPGQGLEWMGGIIPAFGTTNYAQRFQGRVTITADESTSTAYMELSSLRSEDTAVYYCAGHSPYDSSGYYKVDWGQGTLVTVSS

SEQ ID NO: 10565 - protein, 125 aa, Artificial Sequence
  Synthetic construct
QVQLVQSGSELKKPGASVKVSCKASGYTFTTYAMNWVRQAPGQGLEWMGWINTNTGNPTYAQAFTGRFVFSLDTSVSTAYLQISSLKAEDTAVYFCARDRHTAMPDYSYYYMDVWGKGTTVTVSS

SEQ ID NO: 10566 - protein, 125 aa, Artificial Sequence
  Synthetic construct
RVQLVQSGSELKKPGASVKVSCKASGYTFSRYAMHWVRQAPGQGLQWMGWINTHTGNPTYAQGFTGRFVFSLDTSVSTAYLQIGSLKAEDTALYYCVRDPRGEMSLRSDDAFDIWGQGTMVTVSS

SEQ ID NO: 10567 - protein, 126 aa, Artificial Sequence
  Synthetic construct
EVQLVESGGGLVQPGRSLRLSCTASGFTFGDYAMSWFRQAPGKGLEWVGFIRSKAYGGTTEYAASVKGRFIISRDDSKSIAYLQMNSLKTEDTAVYYCTRDRLIWEGDYHYYMDVWGKGTTVTVSS

SEQ ID NO: 10568 - protein, 116 aa, Artificial Sequence
  Synthetic construct
QVQLVESGGGVVQPGRSLRLSCAASGFTFNKYGMHWVRQAPGRGLEWMAFISYDGSIQHYVDSVKGRFTISRDDFKNTLFLQMTSLKIDDTAVYYCAKGATKMDYWGQGTLVTVSS

SEQ ID NO: 10569 - protein, 120 aa, Artificial Sequence
  Synthetic construct
EVQLVESGGGLVQPGRSLRLSCAASGFTFEDFAMHWVRQAPGKGLEWVSGITWNGGILGYADSVKGRFTISRDNAKNSLYLQMIRLRTDDTALYYCAKDSSRDYGGSDFWGQGTLVTVSS

SEQ ID NO: 10570 - protein, 120 aa, Artificial Sequence
  Synthetic construct
QVQLVESGGGVVQPGRSLRLSCAASGFTFSSYAMHWVRQAPGKGLEWVAVISYDGSNKYYADSVKGRFTISRDNSRNTLYLQMSSLRAEDTAVYKCATGGGSYYNLFDIWGQGTMVTVSS

SEQ ID NO: 10571 - protein, 118 aa, Artificial Sequence
  Synthetic construct
EVKLLESGGGLVQPGGSLRLSCAASGFRFNTHGMTWVRQAPGMGLEWVSSIGSTNGDTHYGDSVRGRFTISRDNSESTVYLQMDSLTPDDTGMYFCAKSPGSWAHDYWGQGTPVTVSS

SEQ ID NO: 10572 - protein, 121 aa, Artificial Sequence
  Synthetic construct
QVQLVESGGGVVQPGRSLRLSCAASGFTFSTYAMHWVRQAPGKGLEWVALISYDGINKYYTDSLKGRFTISRDNSNNTLYLQMNSLRAEDTAVFFCARAYGGSYWGAFDIWGQGTMVTVSS

SEQ ID NO: 10573 - protein, 122 aa, Artificial Sequence
  Synthetic construct
QVQLQESGPGLVKPSETLSLTCTVSGGSISSYYWSWVRQPPGKGLEWIGYIFYSGSTNYNPSLKSRVTISVDTSKNQFSLKVRSVTAADTAVYYCARVVPMIRGVVRWFDPWGQGTLVTVSS

SEQ ID NO: 10574 - protein, 119 aa, Artificial Sequence
  Synthetic construct
QVQLVQSGAEVKKPGSSVRVSCKASGGNFKTYSFYWVRQAPGQGLEWMGRVIPIIGMTNYAQKFQGRVTITADIFTETPSMELSGLRPEDTAIYYCAGRSSDDPGEDVWGQGTIVTVSS

SEQ ID NO: 10575 - protein, 117 aa, Artificial Sequence
  Synthetic construct
EVQLVESGGGLVQPGGSLRLSCAASGIVVNANYMSWVRQAPGKGLEWVSTIYAGGSTFYADSVKGRFSISRDNSKNTLYLQMNSLKTEDTAVYYCARDWGEFYFDYWGQGTLVTVSS

SEQ ID NO: 10576 - protein, 131 aa, Artificial Sequence
  Synthetic construct
QIQLVQSGAEVKKPGASVKVSCKASGYTFSNYGVSWVRQAPGQGLEWMGWISAYNGNTKYAQKFQGRVTMTTDTSTSTAYMELRSLRSDDTAVYYCARDPVSYYDFWSGHVDYYRYGMDVWGQGTTVTVSS

SEQ ID NO: 10577 - protein, 125 aa, Artificial Sequence
  Synthetic construct
EVQLVESGGGLVKPGGSLRLSCAASGFTFSSYSMNWVRQAPGKGLEWVSSISSSSSYIYYADSVKGRFTISRDNAKNSLYLQMNSLRAEDTAVYYCARDPISGWYRPGVYYMDVWGKGTTVTVSS

SEQ ID NO: 10578 - protein, 116 aa, Artificial Sequence
  Synthetic construct
QVQLVESGGGVVQPGRSLRLSCAASGISLKDYGMHWVRQAPGRGLEWVAFMSYDGSVQHYGDSVKGRFTISRDDLNNTFFLQMNSLRADDTAVYYCAKGATKVDYWGQGTLVTVSS

SEQ ID NO: 10579 - protein, 119 aa, Artificial Sequence
  Synthetic construct
QVQLMESGGGLVKPGGSLRLSCTGSGFTLSDYYITWIRQAPGKGLEWVSFINSRGYTMTYADSVRGRFTISRDNAKNSVYLQLNSLRVEDTAVYYCARDQNNWNWIDTWGQGTLVTVSS

SEQ ID NO: 10580 - protein, 120 aa, Artificial Sequence
  Synthetic construct
EVQLVESGGVLIQPGGSLRLSCAASGFSVGSNYMAWVRQAPGKGLEWVSVIYTSGRTYYADSVKGRFSISRDNSKNTLYLQMNSLRAEDTAVYYCAFTQRGYYYYGMDVWGQGTTVTVSS

SEQ ID NO: 10581 - protein, 123 aa, Artificial Sequence
  Synthetic construct
QVQLQESGPGLVKSPGTLSLSCTVSGASVTSYYWTWIRQSPGKGLEWIGYIYYTGIIDYNPSLKSRVTMSVDTFNNQVSLTLNSVTAADTAVYYCARVYSSGWRLYDNGIDVWGQGTAVTVSS

SEQ ID NO: 10582 - protein, 116 aa, Artificial Sequence; identical to SEQ ID NO: 10486
  Synthetic construct

SEQ ID NO: 10583 - protein, 133 aa, Artificial Sequence
  Synthetic construct
QVQLVQSGAEVKKPGASVKVSCMASGYTFTSYYMHWVRQAPGQGLEWMGIINPSGGSTSYAQKFQGRVTMTRDTSTSTVYMELSSLRSEDTAVYYCARSPYYDFWSGYYFGAGQYYYYGMDVWGQGTTVTVSS

SEQ ID NO: 10584 - protein, 128 aa, Artificial Sequence
  Synthetic construct
QMQLQESGPGLVKPSETLSLTCTVSGASISIITYYWGWIRQPPGKGLEWIGSVSYSGSTYYNPSLKSRVTISVDTSKNQFSLRLNSVTAADTAVYYCARHGKMVRGPIYRKPHWLDPWGQGTLVTVSS

SEQ ID NO: 10585 - protein, 123 aa, Artificial Sequence
  Synthetic construct
QVQLVQSGAEVKKPGSSVKVSCRTSGGTFSSYAVTWVRQAPGQGLEWMGGIIPIFGATNYAQKFQGRVTITADESTSTAYMEVSSLRSEDTAVYYCARVGSYDDSSGEYSDNWGQGTLVTVSS

SEQ ID NO: 10586 - protein, 122 aa, Artificial Sequence
  Synthetic construct
QVQLQESGPGLVKPSETLSLTCTVSGYSINSGYYWGWIRQPPGKGLEWIGNIYRSGGTYHNPSLGSRVAISVDTSKNQFSLRLTSVTAADTAVYYCARAMDTYNYDSTFDYWGQGTLVTVSS

SEQ ID NO: 10587 - protein, 121 aa, Artificial Sequence
  Synthetic construct
QVQLVQSGAEVKKPGASVKVSCKASGYTFTSYGIFWVRQAPGQGLEWMGWISGYNGKTNHAQKLQGRVTMTTDTSTSTAYMELRSLRSDDTAVYYCARGYLQVWSTKFDSWGQGTLVTVSS

SEQ ID NO: 10588 - protein, 126 aa, Artificial Sequence
  Synthetic construct
EMQLAESGGGLVQPGGSLRLSCVASGFTFGTYWMSWVRQAPGKGLEWVANINQDGSEKYYVDSVKGRFTISRDNAKNSVYLEVNSLRDEDTAVYYCARDAGYNYGWGSYRHGFDVWGQGTTVTVSS

SEQ ID NO: 10589 - protein, 124 aa, Artificial Sequence
  Synthetic construct
EVQLVESGGGLVQPGGSLRLSCAASGFTFSSYSMNWVRQAPGKGLEWVSYISSSRSTIYYADSVKGRFTISRDNAKNSLYLQMNSLRAEDTSVYYCARERVMVTTQYYYYMDVWGKGTTVTVSS

SEQ ID NO: 10590 - protein, 124 aa, Artificial Sequence
  Synthetic construct
QITLKESGPTLVKPTQTLTLTCTFSGFSLSTSGVGVGWIRQPPGKALEWLALIYWDDDERYSPSLKTRLTITKDTSKNQVVLTMTNMDPVDTGTYYCARKQYTSSWYGNWFDPWGQGTLVTVSS

SEQ ID NO: 10591 - protein, 131 aa, Artificial Sequence; identical to SEQ ID NO: 10519
  Synthetic construct

SEQ ID NO: 10592 - protein, 122 aa, Artificial Sequence
  Synthetic construct
EVQLLESGGGLVQPGGSLRLSCAASASTFSGYAMSWVRQAPGKGLEWVSGISGTGTSTYYADSVKGRFTISRGNSENTLYLQMNSLRAEDTAVYYCAKEALNIVVVTAPRYWGQGTLVTVSS

SEQ ID NO: 10593 - protein, 122 aa, Artificial Sequence; identical to SEQ ID NO: 2215
  Synthetic construct

SEQ ID NO: 10594 - protein, 122 aa, Artificial Sequence
  Synthetic construct
QVQLQESGPGLVKPSQTLSLTCTVSGASITSDTIYWSWIRQPVGKGLEWIGRVHGSGITDYNPSLKSRVTVSVDPSKNKFSLKLTSVTTADTAVYYCARDFEAGFSGWFDYWGQGILVTVSS

SEQ ID NO: 10595 - protein, 116 aa, Artificial Sequence
  Synthetic construct
QVQLVESGGGVVQPGRSLRLSCAASGFTFNKYGMHWVRQAPGRGLEWVAFISYDGSVQHYVDSVKGRFTISRDDFKNTLFLQMTNLRVDDTAVYYCAKGATKMDYWGQGTLVTVSS

SEQ ID NO: 10596 - protein, 121 aa, Artificial Sequence
  Synthetic construct
QVQLVESGGGVVQPGRSLRLSCAASGFTFSTYAMHWVRQAPGKGLEWVTLISYDGSNKYYADSVKGRFTISRDNSKNTLYLQMDSLRAEDTAVYYCASTSSGSYYGPFDYWGQGTLVTVSS

SEQ ID NO: 10597 - protein, 121 aa, Artificial Sequence
  Synthetic construct
QVQLVESGGGVVQPGRSLRLSCAASGFTFSTYAMHWVRQAPGKGLEWVAVISYDGSDKYYADSVKGRFTISRDNSKNTLYLQLNSLRVEDTAVYFCAKGGSYAYYYYMDVWGKGTTVTVSS

SEQ ID NO: 10598 - protein, 117 aa, Artificial Sequence
  Synthetic construct
EVQLLESGGGLVQPGGSLRLSCAASGFTFRSYAMTWVRQAPGKGLEWVSEIGGSGDNTYYADSVKGRFSISRDNSKNTLYLQMNSLRAEDTALYYCAKLSSSWESSWGQGTLVIVSS

SEQ ID NO: 10599 - protein, 120 aa, Artificial Sequence
  Synthetic construct
QLQLQESGPGLVKPSETLSLTCSVSDDSITTTGYFWDWIRQPPGKGLEWIGALDYSGITSYNPSLKSRLTMSLDTSTNQFSLKLSSMTASDTAVYYCARRRGASSLRDFWGQGILVTVSS

SEQ ID NO: 10600 - protein, 123 aa, Artificial Sequence; identical to SEQ ID NO: 10321
  Synthetic construct

SEQ ID NO: 10601 - protein, 116 aa, Artificial Sequence
  Synthetic construct
QVQLVQSGSELKKPGASVKISCKTSGYSFTNHGLNWVRQAPGQGLEWVAWINTKTGNPTYAQGFAGRFVFSLDTAVTTAYLQISSLKPEDTAVYYCARDSVYFDYWGQGTLVTVSS

SEQ ID NO: 10602 - protein, 118 aa, Artificial Sequence
  Synthetic construct
QITLKESGPTLVKPTQTLTLTCTFSGFSLSTSGVGVGWIRQPPGKALEWLALIYWDDDKRYSPSLKSRLTITKDTSKNQVVLTMTNMDPVDTATYYCAHETAMAANYWGQGTLVTVSS

SEQ ID NO: 10603 - protein, 123 aa, Artificial Sequence
  Synthetic construct
QVHLVESGGGVVQPGRSLRLSCAASGFSFSNFAMHWVRQAPGKGLEWVALISHDGSNKNHADSVKGRFTISRDNSKNTLYLQMNSLRAEDTAVYCCARDQVLWFGDLSPLGVWGKGTTVTVSS

SEQ ID NO: 10604 - protein, 112 aa, Artificial Sequence
  Synthetic construct
QVQLQVSGPGLLKPSETLSLTCIVSGGSISSHYWSWFRQPPGKGLEWIGYIYYSGSTNYNPSLKSRVAISVDTSKNHFSLNLTSVTAADTAVYYCARGFDYWGQGTLVTVSS

SEQ ID NO: 10605 - protein, 124 aa, Artificial Sequence
  Synthetic construct
EEQLVESGGGLVQPGGSLRLSCAASEITFSSYWMSWVRQAPGKGLEWVANIKHDGSEKYYVDSVKGRFTISRDNAKNSLYLQMSSLRVEDTAVYYCARSPYGLKFYFYYGMDVWGQGTTVTVSS

SEQ ID NO: 10606 - protein, 118 aa, Artificial Sequence
  Synthetic construct
EVQLVESGGTLIQPGRSLRLSCAASGLTVSTNHMTWVRQAPGKGLEWVSIIYSGGSTYYADSVKGRFTISRDNSKNTMYLQMHSLRPEDTALYYCATTTTAAAPFDFWGQGTLVTVSS

SEQ ID NO: 10607 - protein, 125 aa, Artificial Sequence
  Synthetic construct
EVQLVESGGGLVQPGGSLRLSCAASGFTLSSHSMNWVRQAPGKGLEWVSYISSSSSTIYYADSVKGRFTISRDNAKNSLYLQMNSLRAEDTAVYYCARDPTGDYGLLLYNWFDPWGQGTLVTVSS

SEQ ID NO: 10608 - protein, 119 aa, Artificial Sequence
  Synthetic construct
QLQLQESGPGLVSPSETLSVTCTVSGDSVGSKCCFWGWIRQPPGKGLEWIASTHYDGSTYYNPSLESRATISADTSKNQISLRLSSVTAPDTAVYYCARHGHGYGFDYWGQGTLVAVSS

SEQ ID NO: 10609 - protein, 121 aa, Artificial Sequence
  Synthetic construct
QVQLVESGGGVVQPGRSLRLSCAASGFTFSSFAMHWVRQAPGKGLEWVAVISYDGSTKYYADSVKGRFTISRDNSRNTLYLQMNSLRAEDTAVYYCARDGGNSESWEIDYWGQGILVTVSS

SEQ ID NO: 10610 - protein, 131 aa, Artificial Sequence
  Synthetic construct
QVQLVQSGSELKKPGASVKVSCKASGYTFTNYAMNWVRQAPGQGLEWMGWINTNTGDPTYAQRFTGRFVFSLDTSVSTAYLQISSLKAEDTAVYYCARLSYFDSGDYTPGVGEYYYYMDVWGEGTTVTVSS

SEQ ID NO: 10611 - protein, 115 aa, Artificial Sequence
  Synthetic construct
EVQLVESGGGLIQPGGSLRLSCAASGLIVSSNYMSWVRQAPGKGLEWVSVIYPGGSTYYADSVKGRFTISRDNSKNTLYLQMNSLRAEDTAVYYCARVETIDSYWGQGTLVTVSS

SEQ ID NO: 10612 - protein, 121 aa, Artificial Sequence
  Synthetic construct
QVQLVESGGGVVQPGRSLRLSCAASGFTFSSHAMHWVRQAPGKGLEWVAVISYDGSNKYYADSVKGRFTISRDNSKNTLYLQMNSLRAEDTAVYFCARPYSGSYLFYFDYWGQGTLVTVSS

SEQ ID NO: 10613 - protein, 120 aa, Artificial Sequence
  Synthetic construct
QITLKESGPTLVTPTQTLTLTCSFSGFSLDTIGVAVGWIRQPPGKALEWLGIVFWDGDKRYSPPLSSRLTVSKDTSKSHVVLRLTNMDSADTATYYCARLLIEHDAFDVWGQGAMVSVSS

SEQ ID NO: 10614 - protein, 120 aa, Artificial Sequence; identical to SEQ ID NO: 1687
  Synthetic construct

SEQ ID NO: 10615 - protein, 123 aa, Artificial Sequence
  Synthetic construct
QLQLQESGPGLVKPSETLSLICTVSGVSISSSSSFWGWVRQPPGKGLEWIGSIHYSGSPYYNPSLKSRLTMSVDTSKNQFSLKLTSVAAVDTAVYYCGRLVVRGGWNDAFDLWGQGTMVTVSA

SEQ ID NO: 10616 - protein, 124 aa, Artificial Sequence
  Synthetic construct
QVQLVESGGGVVQPGRSLRLSCAASGFTFSNYGMHWVRQAPGKGLEWVAIISYDGPNKSYADSVKGRFTISRDNSKNTLYLQMNSLKTDDTAVYYCAKGRWYSSSWPTAHFDYWGQGTLVTVSS

SEQ ID NO: 10617 - protein, 117 aa, Artificial Sequence
  Synthetic construct
QAQLVESGGGVVQPGKSLRLSCAASVFTLSNYGIKWVRQAPGKGLEWVAAISHDARNKYYGDSVKGRFTVSRDNSKNTVDLLMNSLRTEDTAVYYCAKGAMGGLDVWGQGTTVTVSS

SEQ ID NO: 10618 - protein, 119 aa, Artificial Sequence
  Synthetic construct
EVQLVESGGGLVQPGGSLRLSCAASGFTFSVYWMSWVRQAPGKGLEWVANIKQDGSEKYYVDSVKGRFTISRDNAKNSLFLQMNSLRAEDTAVYYCASLSSSSWYWDYWGQGTLVTVSS

SEQ ID NO: 10619 - protein, 122 aa, Artificial Sequence
  Synthetic construct
QVQLQESGPGLVKPSETLSLTCTVSGGSISSYYWSWIRQSPGKGLEWIGYIYYSGSTNYNPSLKSRVTISVDPSKNQFSLRLSSVTAADTAVYYCATYYYDTSGYNYGFEYWGQGTLVTVSS

SEQ ID NO: 10620 - protein, 122 aa, Artificial Sequence
  Synthetic construct
QVQLVESGGGVVQPGRSLRLSCAASGFTFSSYGMHWVRQAPGKGLEWVAVIWNDGRNKYYADSVKGRFTISRDNSKNTLYLQMNSLRAEDTAVYYCARGPPLMIGYDYLDYWGQGTLVTVSS

SEQ ID NO: 10621 - protein, 123 aa, Artificial Sequence
  Synthetic construct
EVQLVESGGGLVQPGGSLRLSCAASGFTFSSYAMSWVRLAPGKGLEWVSAISGSGGSTYYADSVTGRFTLSRDNSKDTLSLQMNSLRAEDTAVYYCAKDHSGVAGSADAFDIWGQGTMVTVSS

SEQ ID NO: 10622 - protein, 121 aa, Artificial Sequence
  Synthetic construct
EVQLLESGGGLVQPGGSLRLSCAASGFTFSSYAMNWVRQAPGKGLEWVSTISGSGNSTYYADSVKGRFTISRDNSKNTLFLQMNSLRAEDTAVYYCATERGIAAAGIFDYWGQGTLVTVSS

SEQ ID NO: 10623 - protein, 124 aa, Artificial Sequence; identical to SEQ ID NO: 1692
  Synthetic construct

SEQ ID NO: 10624 - protein, 123 aa, Artificial Sequence
  Synthetic construct
QVQLVESGGGLVKPGGSLRLSCAASGFTFSDYYMSWIRQAPGKGLEWVSYISNSGSDTYYADSLKGRFTISRDNAKNSLYLQMNSLRAEDTAVYYCARDRGLTQLDENWFDPWGQGTLVTVSS

SEQ ID NO: 10625 - protein, 122 aa, Artificial Sequence
  Synthetic construct
EVQLVESGGGLVQPGGSLRLSCSASGFTFSNYIMHWVRQAPGKGLEYVSALSSNGNSAYHADSVKGRFTISRDNSKNTLYLQMSSLRAEDTAVYYCVKDHSTVTTGEYFDYWGQGTLVIVSS

SEQ ID NO: 10626 - protein, 119 aa, Artificial Sequence
  Synthetic construct
QVQLQQWGAGLLKPSETLSLSCAVFGGSFSGYYWSWVRQPPGKGLEWIGEVNHSGSTNYNPSLKSRVIISADTSKNQFSLKLSSVTVADTAVYYCARGGGYSYGALDFWGQGTLVTVSS

SEQ ID NO: 10627 - protein, 129 aa, Artificial Sequence
  Synthetic construct
QVQLVESGGGVVQPGGSRRLSCAAFRFTFSSYAMHWVRQAPGKRPEWVAVMSYDGTSKYYADSVKGRFTISRDNSKNTLYLQMNSLRAEDTAVYYCAKDGPTVRRELLGYYYYYYLDVWGKGTTVTVSS

SEQ ID NO: 10628 - protein, 127 aa, Artificial Sequence
  Synthetic construct
EVQLVESGGGLVQPGGSLRLSCAASGFNFSKYDMHWVRQVTGRGLEWVSVIGTSGDTFYAGSVKGRFTISRENAKNSLDLQMNSLRAGDTAVYYCVRGDDYYDRSGYGIDYYYMDVWGKGTTVTVSS

SEQ ID NO: 10629 - protein, 123 aa, Artificial Sequence
  Synthetic construct
QLQLQESGPGLVKPSETLSLTCTVSGGSISGSSYYWGWIRQPPGKGLEWIGSIYYSGTTYYKPSLKSRVTIYVDTSKNEFSLKLSSVTAADTAVYYCARLWDTNDYYSGMDVWGQGTTVTVSS

SEQ ID NO: 10630 - protein, 117 aa, Artificial Sequence
  Synthetic construct
EVQLVESGGGLVQPGGSLRLSCTVSGFTFSSYAMNWVRQAPGKGLKWVSNISGSGGSRYYADYVKGRFTISRDNSKNTLYLQMNSLRAEDTAVYYCAKDLGGYFDSWGQGTLVTVSS

SEQ ID NO: 10631 - protein, 118 aa, Artificial Sequence
  Synthetic construct
EVQLVQSGAEVKKPGESLKISCEGSGYTFTNYWIAWVRQMPGKGLEWMGIIYPGDSDTRYSPSFQGQVTISADKSMNTAYLQWSSLKASDTAMYYCARRETTMGMDVWGQGTTVTVSS

SEQ ID NO: 10632 - protein, 116 aa, Artificial Sequence
  Synthetic construct
QVQLVESGGGVVQPGRSLRLSCAASGITFKDYGMHWVRQAPGRGLEWVAFISYDGSVQHYGDSVKGRFTISRDDLKNTLFLQMNSLRAEDTAVYYCAKGATKVDYWGQGTLVTVSS

SEQ ID NO: 10633 - protein, 118 aa, Artificial Sequence
  Synthetic construct
QVQLVQSGSELKKPGASVKVSCKASGYSFTSYAINWVRQAPGQGLEWMGWINTNTGNPTYAQGFTGRFVFSLDTSVSTAYLQISSLKAEDTAMYYCAREEGRGRGPVWGKGTTVTVSS

SEQ ID NO: 10634 - protein, 122 aa, Artificial Sequence
  Synthetic construct
QVQLVQSGAEVKRPGSSVKVSCKASGDTLSSYAISWVRQAPGQGLEWMGGIIPIFGSTNHAQRFQGRVTISADESTSTAYMELSSLRSEDTAVYYCARSEGFESSGHYWDYWGQGTVVTVSS

SEQ ID NO: 10635 - protein, 122 aa, Artificial Sequence
  Synthetic construct
EVQLVQSGAEVKKPGESLTISCKISGYSITNYWIAWVRQRPGKGLEWMGIVFPGDSDTRYGPAFQGRVTFSADKSTSTAYLHWNTLSASDTAMYYCARDRGEPGLGDWFDPWGQGTLVIVSS

SEQ ID NO: 10636 - protein, 123 aa, Artificial Sequence
  Synthetic construct
QVQLQESGPGLVKPSGTLSLTCAVSGGSISNNNWWSWVRQPPGKGLEWIGEIYHSGSTNYNPSLKSRVTISVDKSRNQFSLRLNSLTAADTALYYCARGPGQWLMGGYFFDSWGQGALVTVSS

SEQ ID NO: 10637 - protein, 124 aa, Artificial Sequence
  Synthetic construct
QVQLVESGGGVVQPGRSLRLSCAASGFTFSSYGMHWVRQAPGKGLEWVAVIWSDGSNKYYIDSVKGRFTISRDNSKNTLYLQMNSLRAEDTAVYYCAREHVTAVAGTTYTMDVWGQGTAVTVSS

SEQ ID NO: 10638 - protein, 121 aa, Artificial Sequence
  Synthetic construct
QVQLVQSGSELKKPGASVKISCKASGYTFTNYPINWVRQAPGQGLEWMGWINPDTGNPTYAQGFTGHFVFSLDTSVRTAYLQISSLKAVDTALYYCARGSSGFEGDAFDIWGQGTMVTVSS

SEQ ID NO: 10639 - protein, 126 aa, Artificial Sequence
  Synthetic construct
EVQLVESGGGLVQPGGSLRLSCAASGFTVSYSYMSWVRQAPGKGLEWVSIIYSGGSTYYADSVKGRFTISRDISKNTLYLQMNSLRTEDTAVYYCARNFCGADCFNHVGEIDFQFWGQGTLVSVSS

SEQ ID NO: 10640 - protein, 120 aa, Artificial Sequence
  Synthetic construct
QVQLVESGGGVVQPGRSLRLSCAASGFTFSTYGMHWVRQAPGKGLEWVAVIWFDGSNKYYADSVKGRFTISRDNSKNTLYLQMNSLGAEDTAVYYCAREGVVGATGIDYWGQGTLVSVSS

SEQ ID NO: 10641 - protein, 119 aa, Artificial Sequence
  Synthetic construct
EVQLLETGGGLIQPGGSLRLSCAVSGFTVSNSYMTWVRQAPGKGLDWVSFIYTDGSASYADSVKGRISIFRDRSRNTLFLQMNSLRAEDTAVYYCARVTLWFGGAVDVWGRGTTVTVSS

SEQ ID NO: 10642 - protein, 122 aa, Artificial Sequence
  Synthetic construct
EVQLVESGGGLVKPGGSLRLSCAASGFTFSSYTINWVRQAPGKGLEWVSSISSSSSFIYYADSVRGRFTISRDNAKNSLYLQMNSLRAEDTAVYYCARDSASGWYVDAFDIWGQGTMVTVSS

SEQ ID NO: 10643 - protein, 120 aa, Artificial Sequence
  Synthetic construct
EVQLVESGGGLVQPGRSLRLSCAASGFTFDDYAMHWVRQAPGKGLEWVSGITWNGGILGYADSVKGRFTISRDNARNSLYLQMNSLRPEDTALYYCAKDSSRDYGGSDFWGQGTLVTVSS

SEQ ID NO: 10644 - protein, 116 aa, Artificial Sequence; identical to SEQ ID NO: 10486
  Synthetic construct

SEQ ID NO: 10645 - protein, 128 aa, Artificial Sequence
  Synthetic construct
QLQLQESGPGLVKPSETLSLICTVSGGSISSSGYYWGWIRQPPGKGLEWIGSIYYSGDTYYNPSLKGRVTISVDTSKNQFSLKRSSVTAADTAVYFCARHGVVRYFDWVSGRSPFDIWGQGTMVTVSS

SEQ ID NO: 10646 - protein, 118 aa, Artificial Sequence
  Synthetic construct
QVQLVESGGGVVQVGRSLRLSCAASGFTFSTYAMNWVRQAPGKGLEWVAVISYDGSNKYYADSVKGRFTISRDNSKNTLYLQMNSLRVEDTAVYYCARSANYYYMDVWGKGTTVTVSS

SEQ ID NO: 10647 - protein, 122 aa, Artificial Sequence
  Synthetic construct
QVQLVESGGGVVQPGMSLRLSCAASGLTFNSYAMHWVRQAPGKGLQWVAVISFDGSNKYYADSVKGRFTISRDNSKRSLFLQMNSLRLEDTAVYYCVKGRVMATKKDYFDYWGQGTLVTVSP

SEQ ID NO: 10648 - protein, 120 aa, Artificial Sequence
  Synthetic construct
QVQLVQSGAEVKKPGSSVKVSCKASGGTFSSYAFSWVRQAPGQGLEWMGGIVGMFGTTSYAQKFQGRLIITADELTSTAYMELSSLRSEDTAVYFCARSGGYRLWFGELWGPGTQVIVSS

SEQ ID NO: 10649 - protein, 116 aa, Artificial Sequence
  Synthetic construct
EMQLVESGGGLVQPGGSLRLSCVASGFDFGQSWMSWVRLAPGTGLEWVANINVHGSEKNYVDSVRGRFSTSRDNAKDSLYLQMNSLRVEDTAVYYCARGHYGMDVWGQGTTVTVSS

SEQ ID NO: 10650 - protein, 125 aa, Artificial Sequence; identical to SEQ ID NO: 10137
  Synthetic construct

SEQ ID NO: 10651 - protein, 122 aa, Artificial Sequence
  Synthetic construct
QLQLQESGPGLVKPSETLSLTCSVSGGSFSSSNYYWGWIRQAPGKGLEWIGSIYYSGTTYYNPSLKSRVTISLDTSKNQFSLKLTSVTAADTAVYYCARPPGQLLFDAFGIWGQGTMVTVSS

SEQ ID NO: 10652 - protein, 122 aa, Artificial Sequence; identical to SEQ ID NO: 10228
  Synthetic construct

SEQ ID NO: 10653 - protein, 119 aa, Artificial Sequence
  Synthetic construct
QVQLQQWGAGLLKPSETLSRTCAVYGGSFSDHYWSWIRQPPGKGLEWIGEINHSGSTTYNPSLESRVTISVDTSKNQFSLELTSVTAADTAVYYCARGGGSSGYYFDYWGRGTLVTVSS

SEQ ID NO: 10654 - protein, 119 aa, Artificial Sequence
  Synthetic construct
QVQLVESGGGVVQPGRSLRLSCAASGFTFSAYAMHWVRQAPGKGLEWVAVISYDGSDKNYADSVKGRFTISRDNSKNTLYLQMNSLRAEDTAVYYCARSQIAFYYFDYWGRGTLVTVSS

SEQ ID NO: 10655 - protein, 121 aa, Artificial Sequence
  Synthetic construct
QVQLVQSGSELKKPGASVKVSCKASGYTFTNYPMNWVRQAPGQGLEWMGWINPDTGNPTYAQGFTGHYVFSLDTSVRTTYLQISSLKTVDTAVYYCARGSSGVEGDAFDIWGQGTMVTVSS

SEQ ID NO: 10656 - protein, 128 aa, Artificial Sequence
  Synthetic construct
QVQLQQSGPGLVKPSQTLSLTCDISGDSVSSNSAAWNWIRQSPSRGLEWLGRTYYRSKWYNDYAVSVKSRLKINPDTSRNQFSLHLNSVTPEDTAVYYCARGRDSSGLDLYYYGMDVWGQGTTVTVSS

SEQ ID NO: 10657 - protein, 118 aa, Artificial Sequence
  Synthetic construct
QVQLVQSGAEVKKPGSSVKVSCKASGGTFSSYAISWVRQAPGQGLEWMGGIIPIFGAANYAQKFQGRVTITADESTSTAYMDLSSLRSDDTAVYYCARETVVEATDYWGQGTLVTVSS

SEQ ID NO: 10658 - protein, 122 aa, Artificial Sequence
  Synthetic construct
QVHLVQSGAEVKKPGASVKVSCKVSGYTLPELSIHWVRQAPGKGLEWMGGFDPEDGETIYAQKFQGRVTLTEDTSTDTAYMKLSSLRSEDTAVYYCATTSVHPGWGGWFDPWGQGTLVTVSS

SEQ ID NO: 10659 - protein, 119 aa, Artificial Sequence
  Synthetic construct
EVQLVESGGGLIQPGGSLRLSCAASGFIVSNNYMSWVRQAPGKGLEWVSIIYSGGTTYYADPVKGRFTISRDNSKNTLYLQMNSLRAEDTAVYYCASLLEWSYYGMDVWGQGTTVTVSS

SEQ ID NO: 10660 - protein, 123 aa, Artificial Sequence
  Synthetic construct
QVQLVESGGGVVQPGRSLRLSCAASGFTFSIYGMHWVRQAPGKGLEWVAVISYDGSNKYYADSVKGRFTISRDNSKNTLYLQMNSLRAEDTAVYYCAKDQEIVVVAATWFDPWGQGTLVTVSS

SEQ ID NO: 10661 - protein, 130 aa, Artificial Sequence
  Synthetic construct
QVQLVQSGAEVKKPGASVKVSCKASGYTFTDYAIQWVRQAPGQRLEWMGWINAGNGNTKYSQKFQGRVTITRDTSASTAYMELSSLRSEDTAVYFCARNSCGDDCYSVLGAGGGDTLDIWGQGTTVTVSS

SEQ ID NO: 10662 - protein, 117 aa, Artificial Sequence
  Synthetic construct
QVQLQESGPGLVKPSGTLSLTCAVSGGSISSSNWWSWVRQPPGKGLEWIGEIYHSGNTNYNPSLQSRVTISVDKSKNQFSLKLSSVTAADTAVYYCARTISGTIDYWGQGTLVTVSS

SEQ ID NO: 10663 - protein, 119 aa, Artificial Sequence
  Synthetic construct
EVQLVESGGGLVQPGGSLRLSCSASGFTFSSYAMHWVRQAPGKGLEYVSVISSNGGSTNYADSVKGRFTISRDNPKNTLYLQMSSLRSEDTAVYHCVRGSSSWFSFDYWGQGTLVTVSS

SEQ ID NO: 10664 - protein, 124 aa, Artificial Sequence; identical to SEQ ID NO: 10182
  Synthetic construct

SEQ ID NO: 10665 - protein, 122 aa, Artificial Sequence
  Synthetic construct
QVQLVQSGAEVKKPGASVKVSCKASGYTFTSYVISWVRQAPGQGLEWMGWISPYNGNTNYAQKLQGRVTMTADTSTSTAYMELRSLRSDDTAVYYCARQNLIAVAGTPWINWGQGTLVTVSS

SEQ ID NO: 10666 - protein, 121 aa, Artificial Sequence
  Synthetic construct
QVQLVESGGGVVQPGRSLRLSCAASGFTFSNYAMHWVRQAPGKGLEWVAVISYDGNNKYYTDSVRGRLTISRDNSKNTLYLQLNSLRAEDTAMYYCAKSSGGSYLDAFDIWGQGTMVTVSS

SEQ ID NO: 10667 - protein, 126 aa, Artificial Sequence
  Synthetic construct
QLQLQESGPGLVKPSETLSLTCAVSGGSISSDSAYWGWVRQPPGKGPEWIGTLHSSGRTNYNPSLKTRVTMSAHTSKNQFSLQLSSVTAADTAVYYCARLFRRTMWNRGNSWFDFWGQGTLVTVSS

SEQ ID NO: 10668 - protein, 124 aa, Artificial Sequence
  Synthetic construct
QVQLVQSGAEVRIPGASVRVSCKTSGYTFTNYYIHWVRQAPGQGLEWMGIIQPSGGITSYAQKLQGRVTMTRDTSTSTVYMELRSLRSEDTAIYFCARDPSRPSAGDDDGFDVWGRGTMVTVSS

SEQ ID NO: 10669 - protein, 125 aa, Artificial Sequence
  Synthetic construct
QVQLVQSGAEVKKPGSSMKVSCKASGGTFSSFGVNWVRQAPGQGLEWMGGIIPIFGTPNYAQKFQGRVTITADESTSTAYMELSSLRSDDTAVYYCASLMETGSPQEDYYNMDVWGEGTTVIVSS

SEQ ID NO: 10670 - protein, 121 aa, Artificial Sequence
  Synthetic construct
QVQLVESGGGVVQPGRSLRLSCAASGFTFSSYGMHWVRQAPGKGLEWVAVIWYDGRNKYYADSVKGRFTISRDNPKNTLYLQMNSLRADDTAVYYCAREGAVGVTTGLDYWGRGTLVSVSA

SEQ ID NO: 10671 - protein, 119 aa, Artificial Sequence; identical to SEQ ID NO: 1822
  Synthetic construct

SEQ ID NO: 10672 - protein, 125 aa, Artificial Sequence
  Synthetic construct
QVQLVQSGSELKKPGASVKVSCKASGYTFTRYAMNWVRQAPGQGLEWMGWIDTNTGNPTYAQGFTGRFVFSLDTSVSTAYLQITSLKAEDTAVYYCARDFSLHQSYLYYYYMDVWGKGTTVTVSS

SEQ ID NO: 10673 - protein, 126 aa, Artificial Sequence
  Synthetic construct
QVQLQESGPGLVKPSQTLSLTCTVSGGSISSKNYYWSWIRQPAGRGLEWIGRIYTSGSTNYNPSLKSRVTISVDTSKNQFSLKLSSVTAADTAVYYCAREALHYDFWIGLGWFDPWGQGTLVTVSS

SEQ ID NO: 10674 - protein, 118 aa, Artificial Sequence
  Synthetic construct
EVQLVQSGAEVKKPGESLRISCKGSEYNFTNYWISWVRQMPGKGLEWMGSIDPSDSFTNYSPSFQGHVTISADKSIRTAYLQWTSLRASDTAIYYCARQQRPWSIDYWGQGTLVTVSS

SEQ ID NO: 10675 - protein, 119 aa, Artificial Sequence
  Synthetic construct
EVQLVESGGGLVQPGGSLGLSCVASGFTLSSYWMHWVRQAPGKGLVWVSRINSDGSSTYYADSVKGRFTISRDNAKNTLYLQMNSLRAEDTAVYYCARVAWGSWGMDVWGQGTTVTVSS

SEQ ID NO: 10676 - protein, 123 aa, Artificial Sequence
  Synthetic construct
QITLKESGPTLVKPTQTLTLTCTFSNFSLNTSGVGVGWIRQPPGKALEWLALIYWDDDKRYSPSLRNRLTITKDSSKNHVVLVMTNMDPMDTATYYCAHRTPSGWYGDWFDPWGQGTLVTVSS

SEQ ID NO: 10677 - protein, 117 aa, Artificial Sequence
  Synthetic construct
QVQLQESGPGLVKPSETLSLTCIVSGYSISSGYFWGWIRQPPGKGLEWIGNISRGGTTYCNPSLKSRVTISVDTSKNQFSLKLSSVTAADTAVYYCARVRPLDFDYWGQGTLVTASS

SEQ ID NO: 10678 - protein, 123 aa, Artificial Sequence
  Synthetic construct
EVQLVQSGAEVKKLGESLQISCKGSGYNFSTYWIGWVRQMSGEGLDWMGIIYPADSNTKYSPSFQGQVTISADKSITTAYLQWSSLKASDSAMYYCARSYCFNGVCDQHFQNWGQGTLVTVSS

SEQ ID NO: 10679 - protein, 121 aa, Artificial Sequence
  Synthetic construct
QVQLVESGGGVVQPGRSLRLSCAASGFTFSTYAMHWVRQAPGKGLEWVAIISYDGTIKYYADSVKGRFTISRDNSKNTLHLQMNSLRADDTALFFCARAGGGSYYGPFDYWGQGTLVTVSS

SEQ ID NO: 10680 - protein, 122 aa, Artificial Sequence
  Synthetic construct
QVQLVQSGAEVKKPGASVKVSCKASGYTFTSYGISWVRQAPGQGLEWMGWISAYNGNTNYAQKLQGRVTMTTDTSTSTAYMELRSLRSDDTAVYYCARDSDYGDYANWFDPWGQGTLVTVSS

SEQ ID NO: 10681 - protein, 120 aa, Artificial Sequence
  Synthetic construct
QVQLVESGGGVVQPGRSLRLSCAASGFTFSSYAMHWVRQAPGKGLEWVAVISYDGSNKYYADSVKGRFTISRDNSKNTLYLQMNSLRAEDTAVYYCARGGGSYYWYFDLWGRGTLVTVSS

SEQ ID NO: 10682 - protein, 129 aa, Artificial Sequence
  Synthetic construct
QVQLQESGPGLVKPSETLSLTCTVSGYSISRGYYWGWIRQPPGKGLEWIGSIYHSGSTYYNPSLKSRVTISVDTSNNQFSLNLSSVTAADTAVYYCARAIPPSGSYFYLYYYYYYMDVWGKGTTVSASS

SEQ ID NO: 10683 - protein, 124 aa, Artificial Sequence
  Synthetic construct
QVQLVQSGPEVKKPGASVKVSCQASGYTFNRYGITWVRQAPGQGLEWVGWIATYSASANSAQKFQDRVTMTTDISTNTAYLELRRLRYDDTAVYYCARRQSSSWPKINNWFDPWGQGTLVTVSS

SEQ ID NO: 10684 - protein, 124 aa, Artificial Sequence
  Synthetic construct
QLQLQESGPGLVKPSETLSLTCTVSGGSISSSNYYWGWIRQPPGKGLEWIGSIFYTGTTYYNSSLKSRVTFSVDTSKNQFSLNLSSVTAADTAVYYCARHDRHSDGYYHTLDYWGQGTLVTVSS

SEQ ID NO: 10685 - protein, 124 aa, Artificial Sequence
  Synthetic construct
EVQLVESGGDLVQPGGSLRLSCAASGFIFSTYSLSWVRQAPGKGLEWVSYIDYGSNIIHYADSVKGRFTISRDNAKNSLYLQMNSLRGEDTAVYYCVGENDYSWGNYRDLMEVWGKGTTVTVSS

SEQ ID NO: 10686 - protein, 124 aa, Artificial Sequence
  Synthetic construct
QVHLVQSGAEVKKPGSSVKVSCKASGGTFSSYAINWVRQAPGQGLEWMGGIISIFGIAKNAQKFQGRVTITADESTSTAYMELSSLRSEDTAVYYCARTLTTYYYESNTYLEVWGQGTMVTVSS

SEQ ID NO: 10687 - protein, 125 aa, Artificial Sequence
  Synthetic construct
QVQLVQSGSELKKPGASVKVSCKASGYTFNSHAMNWVRQAPGQGLEWVGWINTNTGDPTYAQGFTGRFVFSLDTSVSTAYLQISSLKADDTAVYYCARDFRGSESYYYYYYMDVWGKGTTVTVSS

SEQ ID NO: 10688 - protein, 117 aa, Artificial Sequence
  Synthetic construct
QVQLVQSGSELRKPGASVKISCKASRYTFSTYAIHWVRQAPGQGLEWMGWINTNTGNPMYAQGFTGRFVFSLATSVSTAYLLIRSLKAEDTAVYYCAREDTFYFDFWGQGTLVTVSS

SEQ ID NO: 10689 - protein, 120 aa, Artificial Sequence
  Synthetic construct
EVQLVESGGGLVKPGGSLRLSCAASGFTFSSYSMNWVRQTPGKGLEWVSSISNSGSSIYYADSVKGRFTISRDNAKNSLYLQMNSLRAEDTAVFYCARDLRVRGVPFDYWGQGTLVTVSS

SEQ ID NO: 10690 - protein, 119 aa, Artificial Sequence
  Synthetic construct
QVQLVQSGAEVKRPGSSVKVSCKASGGTFTSYAISWVRQAPGQGLEWMGGIIPIFGTATYTQTFQGRVTIIADESTSTAYMELSSLRSEDTAVYYCARPAAAGTSFDYWGQGTLVTVSS

SEQ ID NO: 10691 - protein, 130 aa, Artificial Sequence
  Synthetic construct
EVQLVESGGGLVQPGGSLKLSCAASGFTFSGSAMHWVRQASGKGLEWVGRIRSKANSDATEYAASVKGRFTISRDDSKNTAYLQMNSLKTEDTAVYFCTSLLSYSSSWSGVWDYFGLDVWGQGTTVTVSS

SEQ ID NO: 10692 - protein, 120 aa, Artificial Sequence
  Synthetic construct
EVQLVESGGGLVQPGGSLRLSCAASGFTFGTYNLNWVRQAPGKGLEWVSYISSSSSTIYYADSVKGRFTISRDNAKNSLYLQMNSLRDEDTAVYYCARDDVMGAFKFDYWGQGTLVTVSS

SEQ ID NO: 10693 - protein, 129 aa, Artificial Sequence
  Synthetic construct
QVHLVQSGTEVKRPGTSVKVSCKASGYTFTNYYVHWVRQAPGRGLEWMGVINPSGGSTTYAQNLQDRVALTRDTPASTVYMELSSLRFDDTAVYYCARARGYAGGGFYSDPLNYGLDVWGQGTTVAVSS

SEQ ID NO: 10694 - protein, 121 aa, Artificial Sequence
  Synthetic construct
QVQLVESGGGVVHPGRSLRLSCAASGFTFSSYGMHWVRQAPGKGLEWVAVIWFDGSNKYYADSVKGRFTISRDNSKNTLYLQMNSLRAEDTAVYYCAREGAVGGTTGCDYWGQGTLVTVSS

SEQ ID NO: 10695 - protein, 125 aa, Artificial Sequence
  Synthetic construct
QVQLVESGGDLVKPGGSLRLSCAASGFTFSDYYMSWIRQAPGKALEWISYIDAPGSSTYYADSVKGRFTVSRDNAKNSLYLQVDGLRAADTAIYYCARVGYRLLLGSYYYYLDVWGKGTTVTVSS

SEQ ID NO: 10696 - protein, 121 aa, Artificial Sequence
  Synthetic construct
QVQLQQWGAGLLKPSETLSLTCAVSGGSFSGSQWSWIRQSPGKGLEWIGEINHIGNTNYNPSLKSRVTISVDTSKNQFSLKVTSVTAADTAVYFCARDDGSSLHNYYMDVWGKGTTVTVSS

SEQ ID NO: 10697 - protein, 120 aa, Artificial Sequence
  Synthetic construct
QVQLQESGPGLVKPSGTLSLTCAVSGGSISSNNWWSWVRQPPGKGLEWIGEIYHSGNTNYNPSLKSRVTISVDKSKNQFSLKLSSVTAADTAVYYCAAGWSYSNWYFDYWGQGTLVTVSS

SEQ ID NO: 10698 - protein, 120 aa, Artificial Sequence
  Synthetic construct
QLQLQESGPGLVKPSETLSLICSVSDDSITTTSYFWDWIRQPPGKGLEWIGALDYSGITSYNPSLKSRLTMSLETSTNQFSLKLSSMTASDTAVYYCARRRGASSLRDFWGQGILVTVSS

SEQ ID NO: 10699 - protein, 119 aa, Artificial Sequence
  Synthetic construct
EVQLVESGGGLIQPGGSLRLSCAASEFIVSTNLMSWVRQAPGKGLEWVSVIFGGGSTYYADSVKGRFTISRDNSKNTLYLQMNSLRAEDTALYYCARGMGTSGSALDYWGQGTLVTVSS

SEQ ID NO: 10700 - protein, 116 aa, Artificial Sequence
  Synthetic construct
QVQLVQSGAEVKKPGASVKVSCKASGYTFSSYYMHWVRQAPGQGLEWMGIISPSGASTSYAQKLQGRVTMTRDTSTSTVYMELSSLTSEDTALYYCASGMSYMDVWGKGTTVTVSS

SEQ ID NO: 10701 - protein, 119 aa, Artificial Sequence
  Synthetic construct
QVQLQESGPGLVQPSQTLSLTCTVSGGSVSSASYYWSWIRQPAGKGLEWIGRGYSSGTTNYNPSLKSRVTISVDTSKNQFSLDLSSVTAADTAVYYCARAINPYGMDVWGQGTTVTVSS

SEQ ID NO: 10702 - protein, 121 aa, Artificial Sequence
  Synthetic construct
QVQLVQSGAEVKKPGSSVKVSCKASGGTLSGYTISWVRQAPGQGLEWLGRIIPTLDVPKYAPKFQGRVTITADRSTSTAYMDLSSLRSDDTAVYYCVRDLEIFGVASPPPWGQGTLVTVSS

SEQ ID NO: 10703 - protein, 128 aa, Artificial Sequence
  Synthetic construct
QVQLVESGGGVVQPGRSLRLSCAASGFIFSSYTMHWVRQAPGKGLEWVAVISSDGSNKYYADSVKGRFTLSRDNSKNTLYLQMNSLRPEDTAVYYCAKDGGWAGRYQLLFGPNYFDYWGQGTLVTVSS

SEQ ID NO: 10704 - protein, 112 aa, Artificial Sequence
  Synthetic construct
QVQLQESGPGLVKPSETLSLTCTVSGDSVSSYYWSWIRQPPGKGLEFIGYIYYSGSTNYNPSLKSRVTMSVDTSKNQFSLRLSSVTAADTAVYYCARGFDLWGRGTLVTVSS

SEQ ID NO: 10705 - protein, 124 aa, Artificial Sequence; identical to SEQ ID NO: 10637
  Synthetic construct

SEQ ID NO: 10706 - protein, 128 aa, Artificial Sequence
  Synthetic construct
QVKLVQSGAEVKKPGSSVKVSCKASGGSFSSHAVSWVRQAPGQGLEWMGGIIPMFGTTKYAQKFQGRVTITADESTSTVYMVLSSLRSEDTAIYYCARDQGYCSGGSCHSYYHYMDVWGKGTTVTVSS

SEQ ID NO: 10707 - protein, 112 aa, Artificial Sequence
  Synthetic construct
QVQLQESGPGLVKPSETLSLTCTVSGGSISSYYWSWIRQPPGKGLEWIGYIYSSGSTNYNPSLKSRVTISVDTSNNQFSLKLSSVTAADTALYYCARDFSLWGRGTLVTVSS

SEQ ID NO: 10708 - protein, 125 aa, Artificial Sequence
  Synthetic construct
QVQLVQSGSELKKPGASVKVSCKASGYTFTSYAMNWVRQAPGQGLEWMGWINTNTGNPTYAQGFTGRFVFSLDTSVSTAYLQISSLKAEDTAVYYCARDFSLHQYYYYYYYMDVWGKGTTVTVSS

SEQ ID NO: 10709 - protein, 125 aa, Artificial Sequence
  Synthetic construct
QVQLVQSGAEVKKPGSSVKVSCKASGGTFSSYSISWVRQAPGQGLEWMGRIIPILGIPNYAQKFQGRVTITADKSTSTAYMELSSLRSEDTAVYYCAREKGYSSLSSATFYFDYWGQGTLVTVSS

SEQ ID NO: 10710 - protein, 131 aa, Artificial Sequence
  Synthetic construct
QVQLVQSGAEVKKPGASVKVSCKASGYTFTNYVLTWVRQAPGQGLEWMGWISAYNGSTNYAQNLQGRVTMTTDTSTSTAYMELRSLRSDDTAVYYCARDPASYYDFWSGYVDYYYYGMDVWGQGTTVTVSS

SEQ ID NO: 10711 - protein, 118 aa, Artificial Sequence
  Synthetic construct
EVQLVESGGGLVKPGGSLRLSCAVSGFTFGSYSMNWVRQAPGKGLEWVSSISDSSSYVYYADSVKGRFTISRDNAKNSLYLQMNSLRAEDTALYYCARWGWNDAFDIWGQGTVVTVSS

SEQ ID NO: 10712 - protein, 119 aa, Artificial Sequence
  Synthetic construct
QVQLVQSGAEVKKPGASVKVSCKASGYSFTNYAVHWVRQSPGQGLEWMGWVSGGNGDTRYSQSFQGRVTITRDTSAGTAYMDLSSLRSEDTAVYYCARDWGKSAYFDYWGQGTLVIVSS

SEQ ID NO: 10713 - protein, 133 aa, Artificial Sequence
  Synthetic construct
EVQLVESGGGLVKPGGSLRLSCAASGFTFSSYSMNWVRQAPGKGLEWVSSISSSNYYIYYADSLKGRFTISRDNAKNSLYLQMNSLRADDTAVYYCARDEGPLGSCSGDSCNSGFHYYGLDVWGQGTTVTVSS

SEQ ID NO: 10714 - protein, 124 aa, Artificial Sequence
  Synthetic construct
QVQVVQSGAEVKKPGASVKVSCKVSGYTLTELSMHWVRQVRGKGLEWMGGFDPEDGERIYSQKFQGRVTMTEDTSTDTAFMELRNLRSEDTAIYYCVTGARGGLWFGEILPHYWGQGTLVTVSS

SEQ ID NO: 10715 - protein, 125 aa, Artificial Sequence
  Synthetic construct
EEQLVESGGGLVQPGGSLRLSCAASGFTFSSYDMHWVRQTTGKGLEWVSTIGTAGDAYYPGSVKGRFTISRENAKSSLYLQMNSLRAGDTAVYYCARGSMVRGVSLYYFYYMDVWGKGTTVTVSS

SEQ ID NO: 10716 - protein, 121 aa, Artificial Sequence
  Synthetic construct
QVQLVESGGGVVQPGRSLRLSCAASGLTFSTYAMHWVRQTPGKGLEWVAVISYDGSNKYYADSVKGRFTFSRDNSKNTLYLQMNSLRAEDTAVYYCAKSSGGNYLDAFDIWGQGTMVIVSS

SEQ ID NO: 10717 - protein, 124 aa, Artificial Sequence; identical to SEQ ID NO: 10685
  Synthetic construct

SEQ ID NO: 10718 - protein, 121 aa, Artificial Sequence
  Synthetic construct
QVQLVESGGGVVQPGRSLRLSCAASGFTFNIYAMYWVRQAPGKGLEWVAVISYDGTNKYYADSVKGRFTISRDNSKNTLYLQMNSLRAEDTAVYYCAKCASGSYKSWFDPWGQGTLVTVSS

SEQ ID NO: 10719 - protein, 124 aa, Artificial Sequence
  Synthetic construct
QVQLVQSGAEVKKPGASLKVSCKASGYTFSSYAIHWVRQAPGQRLEWMGWINAGNDNTKDSQKFQGRVTITRDTSASTAYMELSSLRSEDTAVYYCARGFWSSYSQDYSGMDVWGQGATVTVSS

SEQ ID NO: 10720 - protein, 129 aa, Artificial Sequence
  Synthetic construct
EVQLVEFGGGLVQPGRSLRLSCATSGFTFEDFDMHWVRQAPGKGLEWVSGSTWNSGTIGYADSVKGRFITSRDNAKNSLYLQMRNLRDEDTALYYCAKDIGRYDHFGTFGRVGGAFDIWGQGTMVTVSS

SEQ ID NO: 10721 - protein, 112 aa, Artificial Sequence
  Synthetic construct
QVQLQESGPGLVKPSETLSLTCTVSGGSISSYYWSWIRQPPGKGLEWIGYMYYSGSPKYNPSLKSRVTISVDTSKNQFSLKLSSVTAADTAMYYCARGFDYWGQGTLVTVSS

SEQ ID NO: 10722 - protein, 129 aa, Artificial Sequence
  Synthetic construct
EVQLVESGGGLVQPGRSLRLSCATSGFTFEDFDMHWVRQAPGKGLEWVSGSTWNSGTIDYADSVKGRFITSRDNAKNSLYLQMINLRDEDTALYYCAKDIGRYDHYDTFDRVGGAFDIWGHGTMVIVSS

SEQ ID NO: 10723 - protein, 122 aa, Artificial Sequence
  Synthetic construct
QITLKESGPTLVKPTQTLTLTCTFSGFSLNTSGVGVVWIRQPPGKALEWLALIYWDDDKRYSPSLRSRLTVTRDTSKNQVVLTMTNMDPVDTATYYCAHRSPRWFGESLDYWGQGTLVTVSS

SEQ ID NO: 10724 - protein, 125 aa, Artificial Sequence
  Synthetic construct
QVQMQESGPGLVKPSETLSLTCTVSSGSISTYYWSWIRQSPGKGLEWIGYINYAGSTTYNPSLESRLTISVDTSKNQFSLRLSSVAAADTAVYFCARGPLRYFEWKYYYIGLDVWGRGTTVTVSS

SEQ ID NO: 10725 - protein, 125 aa, Artificial Sequence
  Synthetic construct
QVQLVQSGSELKKPGASVKISCKASGYTFTSYAMNWVRQAPGQGLEWMGWINTNTGNPTYAQGFTGRFVFSLDTSVSTAYLQISSLKAEDTAVYYCARDFSGTYYNNYYYYMDVWGRGTTVIVSS

SEQ ID NO: 10726 - protein, 129 aa, Artificial Sequence
  Synthetic construct
QVQLVESGGGAVQSGRSLRLSCAASGFTFSSYGMHWVRQPPGRGLEWVAVIWYDGSNEYYADSVKGRFTISRDNSKNTLYLRLNSLRAEDTAVYYCARSGGWGSSVSFPYYHYYGLDVWGQGTTVTVSS

SEQ ID NO: 10727 - protein, 126 aa, Artificial Sequence
  Synthetic construct
QVQLVQSGSELRKPGASVKVSCKASGYTFTTYAINWVRQAPGQGLEWMGWINTNTGDPTYAQGFTGRFVFSLDTSVSTAYLQISSLNAEDTAVYYCARDFDTMLPGGYYYYYMDVWGKGTTVTVSS

SEQ ID NO: 10728 - protein, 120 aa, Artificial Sequence
  Synthetic construct
QVQLQESGPGLVKPSQTLSLTCTVSGGSINSGDYYWSWIRQPAGKGLEWIGRIYTSGSTNYNPSLKSRVTISVDTSKNQFSLKLSSVTVADTAVYYCAREGSWKYVLDYWGQGTLVNVSS

SEQ ID NO: 10729 - protein, 126 aa, Artificial Sequence
  Synthetic construct
EVQLVESGGGLVQPGRSLRLSCTASGFTFGDYAMSWFRQAPGKGLEWVGFIRSKAYGGTTEYAASVKGRLSISRDDSKSIAYLQMNSLRTEDTAVYYCTRDRLIWEGDYHYYMDVWGKGTTVTVSS

SEQ ID NO: 10730 - protein, 119 aa, Artificial Sequence
  Synthetic construct
EVQLLESGGALVQPGGSLRLSCAASGFTFSMYDMTWIRQTPGKGLEWVSAFSARTGGTTYADSVKGRFTISRDNSQNRMYLQMDSVRADDTALYYCAREGYNYWYFDLWGRGTLVTVSS

SEQ ID NO: 10731 - protein, 125 aa, Artificial Sequence
  Synthetic construct
QVQLVQSGSELKKPGASVKVSCKASGYTFTSYAMNWVRQAPGQGLEWMGWINTNTGNPTYAQGFTGRFVFSLDTSVSTAYLQISSLKAEDTAVYFCARDRDTGMPDYYYYYMDVWGKGTTVTVSS

SEQ ID NO: 10732 - protein, 126 aa, Artificial Sequence
  Synthetic construct
QVQLVQSGSELKKPGASVKVSCKASGYTFTSYALNWVRQAPGQGLEWMGWINTNTGNPTYAQGFTGRFVFSLDTSVSTAYLQISSLKAEDTAVYFCARDFDKIAAAEYYYFYMDVWGKGTTVTVSS

SEQ ID NO: 10733 - protein, 133 aa, Artificial Sequence; identical to SEQ ID NO: 10713
  Synthetic construct

SEQ ID NO: 10734 - protein, 122 aa, Artificial Sequence
  Synthetic construct
EVQLVESGGGLVQPGGSLRLSCAASGLTFSAYAMHWVRQAPGKGLEYVSGISSSGGSTYYANSVKGRFTISRDNSKNTLYLQMGSLRVEDMAVYYCARETSGSYTLDAFDIWGQGTMVTVSS

SEQ ID NO: 10735 - protein, 119 aa, Artificial Sequence
  Synthetic construct
EVQLVESGGGLVQPGGSLRLSCAASGFTFRSYWMHWVRQAPGKGLVWVSRISTDGIRTNYADSVKGRFTVSRDNAKSTLYLQMNSLRVEDTAVYYCVTWSIVGATNGYWGQGTLVAVSS

SEQ ID NO: 10736 - protein, 120 aa, Artificial Sequence
  Synthetic construct
QVQLVESGGGVVQPGRSLRLSCAASGFTFSSYGMHWVRQAPGKGLEWVAVISYDGSNKYYADSVKGRFTISRDNSKNTLYLQMNSLRAEDTAVYYCAKDSIAVAGPFDYWGQGTLVTVSS

SEQ ID NO: 10737 - protein, 119 aa, Artificial Sequence
  Synthetic construct
QVQLQESGPGLVKPSQTLSLTCTVSGGSVSSASYYWSWIRQPAGKGLEWIGRVYSSGTTNYNPSLKSRVTISVDTSKNQFSLDLSSVTAADTAVYYCARAINPYGMDVWGQGTTVTVSS

SEQ ID NO: 10738 - protein, 123 aa, Artificial Sequence
  Synthetic construct
QVQLQESGPGLGKPSETLSLTCTVSGGSISSDYWSWIRQPPGKGLEWIGYIYYSGSTNYNPSLKSRVTISVDTSKNQFSLKLSSVTAADTAVYYCARGQVGYSYGYDNWFDPWGQGTLVTVSS

SEQ ID NO: 10739 - protein, 131 aa, Artificial Sequence
  Synthetic construct
QVQLVQSGAEVKKPGASVKVSCKASGYTFSNYPISWVRQAPGQGLQWMGWISAYNGNTSYAQHLQGRITMTTDTSTSTAYMELRSLRSDDTAVYYCARDPASYYDFWSGYVDYYYYGMDVWGQGTTVTVSS

SEQ ID NO: 10740 - protein, 126 aa, Artificial Sequence
  Synthetic construct
QVHLVQSGAEVKKPGASVKVSCKASGYTFTIYAMHWVRQAPGQRLEWMGWINAGNGDTKYSQKFQGRVTITRDTSASTAYMDLSSLRSEDTAVYYCARGGTLMQLTTYYYYAMDVWGQGTTVTVSS

SEQ ID NO: 10741 - protein, 123 aa, Artificial Sequence
  Synthetic construct
QVQLVESGGGVVQPGRSLRLSCAASGFTFSSYGMHWVRQAPGKGLEWVALISYDGSNKYYGDSVKGRFTISRDNSKNTLYLQMSSLRAEDTAVYYCAKDLEFPYSSSWPPTHWGQGTLVTVSS

SEQ ID NO: 10742 - protein, 132 aa, Artificial Sequence
  Synthetic construct
EVQLVESGGGLVKPGGSLRLSCAASGFTFSNAWMSWVRQAPGKGLEWVGRIKSKTDGGTTDYAAPVKGRFTISRDDSENTLYLHMNSLKTEDTAVYYCGTLGGGSASYYLSYYYYYYYMDVWGRGTTVTVSS

SEQ ID NO: 10743 - protein, 120 aa, Artificial Sequence
  Synthetic construct
QITLKESGPTLVKPTQTLTLTCTFSGFSLSTSGVAVGWIRQPPGKALECLALIYWDDDKRYSPSLKSRLTITKDTSKNQVVLTMTNMDPVDTATYYCAHRRTLYDAFDIWGQGTMVTVSS

SEQ ID NO: 10744 - protein, 122 aa, Artificial Sequence
  Synthetic construct
EVQLVESGGGLVLPGGSLRLSCAASGFTFSSYAMHWVRQAPGKGLEYVSGISTNGGGTYYANSVKGRFTISRDNSKNTLYLQMGSLRGEDMAVYYCARETGGSYTLEPFDIWGQGTMVTVSS

SEQ ID NO: 10745 - protein, 120 aa, Artificial Sequence
  Synthetic construct
QVQLQESGPGLVKPSQTLSLTCTVSGGSISSGNYYWSWIRQPAGKGLEWIGRLHSSGRTYFSPSLKSRVTISVDTSRNQFSLKLSSVTAADTAVYYCARAGFGEPAFNYWGQGILVTVSS

SEQ ID NO: 10746 - protein, 122 aa, Artificial Sequence
  Synthetic construct
QVQLVESGGGVVQPGRSLRLSCAASGFTFSSYGIHWVRQAPGKGLEWVAVISYDGSNKYYADSVKGRFTISRDNSKNTLYLQMNSLRAEDTSVYYCAREGMVGEAGRSLDYWGQGTLVTVSS

SEQ ID NO: 10747 - protein, 121 aa, Artificial Sequence
  Synthetic construct
QVQLQQWGAGLLKPSETLSLTCVVYGGSFSGYYWSWIRQPPGKGLEWIGEINHSGSTNYNPSLKSRVTISVDTSKNQFSLKLSSVTAADTAVYYCARWDTVVVPVASFDPWGQGTLVTVSS

SEQ ID NO: 10748 - protein, 127 aa, Artificial Sequence
  Synthetic construct
QVQLVQSGAEVKKPGASVKVSCKASGYTFTGYYMHWVRQAPGQGLEWMGWINPNSGVTNYAQKFQGWVTMTRDTSISTAYMELSRLRSDDTAVYYCAREQYYYGSGSYYSPGGLDVWGQGTTVTVSS

SEQ ID NO: 10749 - protein, 119 aa, Artificial Sequence
  Synthetic construct
EVHLLESGGGLVQPGGSLRLSCAASGFRFSSYAMTWVRQAPGKGLEWVSGISGRGDSTYYADSVKGRFTISRDNSKNMVFLQMSGLRAEDTAVYYCARDLFDDEGFDYWGQGTLVTVSS

SEQ ID NO: 10750 - protein, 120 aa, Artificial Sequence
  Synthetic construct
DVQLVESGGGLVQPGGSLRLSCAASGFTFNTYNMNWVRQAPGKGLEWVSYISSSSTTIYYADSVKGRFTISRDNAKNSLYLQMNSLRDEDTAVYYCARDDVVRAFKFDFWGQGTLVTVSS

SEQ ID NO: 10751 - protein, 120 aa, Artificial Sequence
  Synthetic construct
QLQLQESGPGLVKPSETLSLTCTVSDGSISSSTYYWGWIRQPPGKGLEWIGNIYYSGSTYYNPSLKSRVTISVDTSKNQFSLKLNSVTAADTAVYYCARRGWGELHWAYWGQGTLVTVSS

SEQ ID NO: 10752 - protein, 122 aa, Artificial Sequence
  Synthetic construct
EVQLLESGGGVVQPGGSLRLSCTASGFTFLSYAMSWVRQAPGKGLEWVSGISGSGDITYYADSVKGRFTISRGNSKNTLYLQMNSLRAEDTAVYYCAKEALNIVVVTAPRYWGQGTLVTVSS

SEQ ID NO: 10753 - protein, 122 aa, Artificial Sequence
  Synthetic construct
EVQLVQSGAEVKKPGESLKISCKGSGYSFTNYWIGWVRQMPGKGLEWMGIIYPGDSDTRYSPSFQGQVTFSADKSISTAYLQWSSLKASDTAMYYCARQAMATITGVGFDPWGQGTMVTVSS

SEQ ID NO: 10754 - protein, 128 aa, Artificial Sequence
  Synthetic construct
QVQLVQSGAEVKKPGSSVKVSCKASGGTFNNYAISWVRQAPGQGLEWMGGIIPIFGTANYAQKFQGRVTITADESTSTAYMELSSLRSDDTAVYYCARTGYSSSWNLGDYYYYYMDVWGKGTTVTVSS

SEQ ID NO: 10755 - protein, 131 aa, Artificial Sequence
  Synthetic construct
PVQLVQSGAEVKKPGASVKVSCKASGYTFSNYVITWVRQAPGQGLDWMGWISPHNGNTNYAQNLQGRVTMTTDTSTSTASMELRSLRSDDTAVYYCARDPASYYDFWSGYVDYYQYGMDVWGQGTTVTVSS

SEQ ID NO: 10756 - protein, 123 aa, Artificial Sequence
  Synthetic construct
EVQLLESGGGLVQPGGSLRLSCAASGFTFTSYAMNWVRQAPGKGLEWVSTISISGGSTYYADSVKGRFTISRDNSKNTLYLQTNSLRAEDTAVYYCAKDFSSGIVGASSFDCWGQGTLVTVSS

SEQ ID NO: 10757 - protein, 117 aa, Artificial Sequence
  Synthetic construct
QVQLVESGGGVVQPGRSLRLSCAASRFTFSNYAMHWVRQAPGKGLEWVAVVSYDGSNEFYTDSVKGRFTISRDNSKNTLYLQMNSLRAEDTAVYYCARERMRTADYWGQGTLVTVSS

SEQ ID NO: 10758 - protein, 116 aa, Artificial Sequence
  Synthetic construct
QVQLVQSGAEVKKPGASVKVSCKASGYPFTSLYMHWVRQAPGQGLEWVGIINPSGSITSYAQKFQGRVTMTRDTSTSTDYMELSSLRSEDTAVYYCARQGGAFDIWGQGTMVTVSS

SEQ ID NO: 10759 - protein, 119 aa, Artificial Sequence
  Synthetic construct
EVQLLESGGGLVQPGGSLRLSCAASGFTFSSYAMTWVRQAPGKGLEWVSGISGSSDSTIYVDSVKGRFTISRDNSKNTVYLQMNSLRAEDTAIYYCAKDRDNWGFVDYWGQGTLVTVSS

SEQ ID NO: 10760 - protein, 130 aa, Artificial Sequence; identical to SEQ ID NO: 9945
  Synthetic construct

SEQ ID NO: 10761 - protein, 125 aa, Artificial Sequence
  Synthetic construct
QVQLVQSGSELKKPGASVKVSCKASGYTFNSYAMNWVRQAPGQGLEWMGWIDTNTGNPTYAQGFTGRFVLSSDTSVSTAYLQISGLKTEDTAVYYCAREGGFTGKLGPGDWFDPWGQGTLVTVSS

SEQ ID NO: 10762 - protein, 121 aa, Artificial Sequence; identical to SEQ ID NO: 10464
  Synthetic construct

SEQ ID NO: 10763 - protein, 128 aa, Artificial Sequence
  Synthetic construct
QLQLRESGPGVVKPSETLSLSCTVSGDSISRTNYYWGWIRQPPGKGLDWIGNIFYAGSTHYNPSLKSRVTISVDTSKNQFSLKLTSVTAADTAMYYCARGVRYFDWLLSRELYYFDYWGQGTLVTVSS

SEQ ID NO: 10764 - protein, 126 aa, Artificial Sequence; identical to SEQ ID NO: 1781
  Synthetic construct

SEQ ID NO: 10765 - protein, 121 aa, Artificial Sequence; identical to SEQ ID NO: 10261
  Synthetic construct

SEQ ID NO: 10766 - protein, 119 aa, Artificial Sequence
  Synthetic construct
QVHLVESGGGVVQPGRSLRLSCAASGFTFSNYAIHWVRQAPGKRLEWVAVISFDGINKYYTESVKGRFTISRDDSQNTLYLQMISLRAEDTALYYCARGGGGYKYFDYWGQGTLVTVSS

SEQ ID NO: 10767 - protein, 123 aa, Artificial Sequence
  Synthetic construct
QVQLQQWGAGLLKPSETLSLTCAVYGGSLTGYYWTWIRQSPGKGLEWVGESNHSGGTDYNPSLKSRVTISVDTSKNQFSLKLDSVTAADTAVYYCARKPLLYSSVNPGAFDIWGQGTMVTVSS

SEQ ID NO: 10768 - protein, 107 aa, Artificial Sequence
  Synthetic construct
EIVLTQSPATLSLSPGERATLSCRASQSVSSYLAWYQQKPGQAPRLLIYDASNRATGIPARFSGSGSGTDFTLTISSLEPEDFAIYYCQQGSNWPLTFGQGTRLEIK

SEQ ID NO: 10769 - protein, 107 aa, Artificial Sequence
  Synthetic construct
SYELTQPPSVSVSPGQTARITCSGDALPKKYAYWYQQKSGQAPVLVIYEDTKRPSGIPERFSGSSSGTMATLTISGAQVEDEADYYCYSRDSSGNPLFGGGTKLTVL

SEQ ID NO: 10770 - protein, 106 aa, Artificial Sequence
  Synthetic construct
SYELTQPPSVSVSPGQTASITCSGDNLGDKYTCWYQQKPGQSPVLVIYQDTKRPSGIPERFSGSNSGNTATLTISGTQAMDEADYYCQAWDSRTVVFGGGTKLTVL

SEQ ID NO: 10771 - protein, 110 aa, Artificial Sequence
  Synthetic construct
QSALTQPPSASGSPGQSVTISCTGTSSDVGSYNYVSWYQQHPGKAPKLMIYEVSKWPSGVPDRFSGSKSGNTASLTVSGLQAEDEADYYCSSYAGSNQVIFGGGTKLTVL

SEQ ID NO: 10772 - protein, 112 aa, Artificial Sequence
  Synthetic construct
DIVMTQSPLSLPVTPGEPASISCRSSQSLLYSNGYTYLNWYLQKPGQSPQLLIYLGSDRASGVPDRFSVSGSGTDFTLIISRVEAEDVGVYFCMQALQTPWTFGQGTKVEIK

SEQ ID NO: 10773 - protein, 107 aa, Artificial Sequence
  Synthetic construct
EIVLTQSPATLSLSPGERATLSCRASQSVSSYLAWYQQKPGQAPRLLIYDASNRATGIPARFSGSGSGTDFTLTISSLEPEDFAVYYCQQRSDWPLTFGGGTKVEIK

SEQ ID NO: 10774 - protein, 108 aa, Artificial Sequence
  Synthetic construct
SYELTQPPSVSVSPGQTARITCSGDALPRKYAYWYQQKSGQGPVLVIYEDTKRPSGIPERFSGSSSGTMATLTISGAQVEDEADYYCYSTDSSDNHRVFGGGTKLTVL

SEQ ID NO: 10775 - protein, 112 aa, Artificial Sequence
  Synthetic construct
QSVLTQPPSVSGAPGQRVTISCTGSSSNIGAGYDVHWYQQLPGTAPKLLIYGKSNRPSGVPDRFSGSKSGTSASLAITGLQAEDEADYYCQSYDSSLSGPYVFGTGTKVTVL

SEQ ID NO: 10776 - protein, 106 aa, Artificial Sequence
  Synthetic construct
EIVMTQSPATLSVSPGERATLSCRASQSVSSNLAWYQQKPGQAPRLLIYGASTRATGIPARFSGSGSGTEFTLTISSLQSEDFAVYYCQQYNNWWTFGQGTKVEIK

SEQ ID NO: 10777 - protein, 108 aa, Artificial Sequence
  Synthetic construct
EIVMTQSPATLSVSPGERATLSCRASQSVSSNLAWYQQRPGQAPRLLIYGASTRATGIPARFSGSGSGTEFSLTISSLQSEDFAVYYCQHYDNWPPITFGQGTRLEIK

SEQ ID NO: 10778 - protein, 105 aa, Artificial Sequence
  Synthetic construct
SYELTQPPSVSVSPGQTASITCSGDNLGDKYACWYQQKPGQSPIVVIYQDNKRPSGIPERFSGSNSGNTATLTISGTQPMDEADYYCQAWDGTVVFGGGTKLTVL

SEQ ID NO: 10779 - protein, 112 aa, Artificial Sequence
  Synthetic construct
DIVMTQSPDSLAVSLGERATINCKSSQSVLYSSNNKNYLAWYQQKAGQPPKLLIYWASTRESGVPDRFSGSGSGTDFTLTISSLQAEDVAVYYCQQYYITWTFGQGTKVEIK

SEQ ID NO: 10780 - protein, 110 aa, Artificial Sequence
  Synthetic construct
QSALTQPASVSGSPGQSITISCTGTSSDIGSYNLVSWYQQHPGKAPKLMIYVGSKRPSGVSNRFSGSKSGNTASLTISGLQAEDEADYYCCSYAGSSTWVFGGGTKLTVL

SEQ ID NO: 10781 - protein, 107 aa, Artificial Sequence
  Synthetic construct
DIQMTQSPSTLSASVGDRVTITCRASQSISGWLAWYQQKPGKAPNLLIYKASILESGVPSRFSGSGSGTEFTLTISSLQSDDFATYYCHQYHTYSCTFGQGTKVEIK

SEQ ID NO: 10782 - protein, 108 aa, Artificial Sequence
  Synthetic construct
EIVMTQSPATLSVSPGERATLSCRASQSVSSNLAWYQQKPGQAPRLLIYGASTRATGIPARFSGSGSGTEFTLTISSLQSEDFAVYYCQQYNNWPPRTFGQGTKLEIK

SEQ ID NO: 10783 - protein, 113 aa, Artificial Sequence
  Synthetic construct
DIVMTQSPDSLAVSLGERATINCKSSQSVLYSSNNKNYLAWYQQKPGQPPKLLIYWASTRESGVPDRFSGSGSGTDFTLTISSLQAEDVAVYYCQQYYSTPFTFGPGTKVDIK

SEQ ID NO: 10784 - protein, 108 aa, Artificial Sequence
  Synthetic construct
EIVLTQSPGTLSLSPGERATLSCRASQSVSSDSLAWYQQKPGQAPRLLIFGASSRATGIPDRFSGSGSGTDFTLTISRLEPEDFAVYYCQQYGSSPRTFGQGTKVEIK

SEQ ID NO: 10785 - protein, 108 aa, Artificial Sequence
  Synthetic construct
EIVLTQSPGTLSLSPGERATLSCRASQSISSSHLTWYQQKPGQAPRLLIYGTSSRATGIPDRFSGSGSGTDFTLTVSRLEPEDFAVYYCQQFGSSPWTFGQGTKVEIK

SEQ ID NO: 10786 - protein, 106 aa, Artificial Sequence
  Synthetic construct
SYELTQPPSVSVSPGQTASITCSGDKLGDKYACWYQQKPGQSPVLVVYQDSRRPSGIPERFSGSNSGNTATLTISGTQAMDESDYYCQAWDSSAAVFGGGTKLTVL

SEQ ID NO: 10787 - protein, 107 aa, Artificial Sequence
  Synthetic construct
DIQMTQSPSSLSASVGDRVTITCQASQDISNYLNWYQQKPGKAPKLLIYDASNLETGVPSRFSGGGSGTDFTFTISSLQPEDIATYYCQQYDNSLFTFGPGTKVDIK

SEQ ID NO: 10788 - protein, 110 aa, Artificial Sequence
  Synthetic construct
QSVLTQPPSASGTPGQRVTISCSGSSSNIGSNTVNWYQQLPGTAPKLLIYSTNQRPSGVPDRFSGSKSGTSASLAISGLQSEDEADYYCAAWDDSLNGAVFGGGTQLTVL

SEQ ID NO: 10789 - protein, 107 aa, Artificial Sequence
  Synthetic construct
EIVLTQSPATLSLSPGERATLSCRASQSFSSYLAWYQQKPGQAPRLLIYDASNRATGIPARFSGSGSGTDFTLTISSLEPEDFAVYYCQQRTNWVFTFGPGTKVDIK

SEQ ID NO: 10790 - protein, 107 aa, Artificial Sequence
  Synthetic construct
DIQMTQSPSSLSASVGDRVTITCRASQSISSYLNWYQQKPGKAPKLLIYAASSLQSGVPSRFSGSGSGTDFTLTINSLQFEDFATYYCQHSYSTPWTFGQGTKVEIK

SEQ ID NO: 10791 - protein, 110 aa, Artificial Sequence
  Synthetic construct
QSALTQPASVSGSPGQSITISCTGTSSDVGGYNYVSWYQQHPGKAPKLVIYDVSNRPSGVSNRFSGSKSVNTASLTISGLQAEDEADYYCSSYTSSSTYVFGTGTKVTVL

SEQ ID NO: 10792 - protein, 108 aa, Artificial Sequence
  Synthetic construct
EIVLTQSPGTLSLSPGERATLSCRASQSVSSSYLAWYQQKPGQAPRLLIYGASSRATGIPDRFSGSGSGTDFTLTISRLEPEDFAVYYCHHYGSSRLTFGPGTKVDIK

SEQ ID NO: 10793 - protein, 116 aa, Artificial Sequence
  Synthetic construct
QPVLTQPPSASASLGASVTLTCTLSSGYSNYKVDWYQQRPGKGPQFVMRVGTSGIVGSKGDGIPDRFSVLGSGLNRYLTIKNIQEEDESDYHCGADHDSGSNFVRVFGGGTKLTVL

SEQ ID NO: 10794 - protein, 106 aa, Artificial Sequence
  Synthetic construct
EIVLTQSPATLSLSPGERATLTCRASQSVSSYLAWYQQKPGQAPRLLIYDASNRATDIPARFSGSGSGTDFTLTISSLEPEDFAVYYCQQRANWLTFGGGTKVEIK

SEQ ID NO: 10795 - protein, 111 aa, Artificial Sequence
  Synthetic construct
QSALTQPRSVSGSPGQSVTISCTGTSSDVGGYNYVSWYQQHPGKAPKLMIYDVSKRPSGVPDRFSGSKSGNTASLTISGLQAEDEADYYCCSYAGSYTWGVFGGGTKLTVL

SEQ ID NO: 10796 - protein, 107 aa, Artificial Sequence
  Synthetic construct
EIVMTQSPATLSVSPGERATLSCRASQSVNSNLAWYQQKPGQAPRLLIYDASTRATGIPARFSGSGSGTEFTLTISSLQSEDFAVYYCQQYNNWPYTFGQGTKLEIK

SEQ ID NO: 10797 - protein, 111 aa, Artificial Sequence
  Synthetic construct
QSALTQPASVSGSPGQSITISCTGTSSDVGGYDFVSWYQQHPGKAPKLMIYDVSNRPSGVSNRFSGSKSGNTASLTISGLQAEDEADYYCSSYTSSSTLDVFGTGTKVTVL

SEQ ID NO: 10798 - protein, 110 aa, Artificial Sequence
  Synthetic construct
QSVLTQPPSVSAAPGQKVTISCSGSSSNIGNNYVSWYQQVPGTAPKLLIYENNKRPSGIPDRISGSKSGTSATLGITGLQTGDEADYYCGTWDSSLSTVVFGGGTKLTVL

SEQ ID NO: 10799 - protein, 110 aa, Artificial Sequence
  Synthetic construct
HSALTQPASVSGSPGQSITISCTGTSSDVGSYDHVSWFQQHAGKGPNLVIFDVNRRPSGVSNRFSGSKSGNTASLTISGLQAEDEADYYCLSYTSRGTRVFGTGTTLTVV

SEQ ID NO: 10800 - protein, 113 aa, Artificial Sequence
  Synthetic construct
DIVMTQSPDSLAVSLGERATINCKSSQSVLYSSNNKNYLAWYQQKPGQPPKLLFYWASTRESGVPDRFSGSGSGTDFTLTISSLQAADVAVYYCQQYYTTPLAFGQGTKVEIK

SEQ ID NO: 10801 - protein, 113 aa, Artificial Sequence
  Synthetic construct
DIVMTQSPDSLAVSLGERATINCKSSQSVLYSSNNKNYLAWYQQKPGQPPKLLIYWASTRESGVPDRFSGSGSGTDFTLTISSLQAEDVAVYYCQQYYSAPRTFGQGTKVEIK

SEQ ID NO: 10802 - protein, 111 aa, Artificial Sequence
  Synthetic construct
QSVLTQPPSVSGAPGQRVTISCTGSNSNIGAGYDVHWYQQLPGTAPKLLIYDNTNRPSGVPDRFSGSKSGTSASLAITGLQAEDEAHYYCQSYDSSLSGSVFGGGTKLTVL

SEQ ID NO: 10803 - protein, 113 aa, Artificial Sequence
  Synthetic construct
DIVMTQSPDSLAVSLGERATINCKSSQSVLYSSNNKNYLAWYQQKPGQPPKLLIYWASTRESGVPDRFSGSGSGTDFTLTISSLRAEDVAVYYCQQYYTTPYTFGQGTKLEIK

SEQ ID NO: 10804 - protein, 107 aa, Artificial Sequence
  Synthetic construct
DIQMTQSPSSLSASVGDRVTFTCRASQGIRDDLGWYQQKPGKAPKRLIYAASSLQSGVPSRFSGSGSGTEFTLTISSLQPEDFATYYCLQYNSYPFTFGPGTKVDIK

SEQ ID NO: 10805 - protein, 107 aa, Artificial Sequence
  Synthetic construct
EIVLTQSPATLSLSPGERATLSCRASQSVSSYLAWYQQKPGQAPRLLIYDTSNRATGIPARFSGSGSGTDFTLTISSLQPEDFAVYYCQQRSNWPPGFGQGTRLEIK

SEQ ID NO: 10806 - protein, 112 aa, Artificial Sequence
  Synthetic construct
QSALTQPPSASGSPGQSVTISCTGTSSDVGGYNYVSWYQQHPGRAPKLMIYEVSKRPSGVPDRFSGSKSGNTASLTVSGLQGEDEADYYCSSYAGSNNFYVLFGGGTKLTVL

SEQ ID NO: 10807 - protein, 106 aa, Artificial Sequence
  Synthetic construct
EIVLTQSPATLSLSPGERATLSCRASQSVSTYLAWYQQKPGQAPRLVIYGASNRATGIPARFSGSGSGTDFTLIISSLEPEDFAVYYCQQRGGWYTFGQGTKLQIK

SEQ ID NO: 10808 - protein, 106 aa, Artificial Sequence; identical to SEQ ID NO: 2607
  Synthetic construct

SEQ ID NO: 10809 - protein, 107 aa, Artificial Sequence; identical to SEQ ID NO: 2571
  Synthetic construct

SEQ ID NO: 10810 - protein, 113 aa, Artificial Sequence
  Synthetic construct
DIVMTQSPDSLAVSLGERATINCKSSQSVLYRYGKKNYLAWYQQKPGQPPKLLIYWASTRGSGVPDRFSGSGSETDFTLTISSLQAEDVAVYHCQQYYTTPFTFGPGTKVDIK

SEQ ID NO: 10811 - protein, 107 aa, Artificial Sequence
  Synthetic construct
DIQMTQSPSSLSASVGDRVTITCQASQDISNFLNWYQQKPGKAPKLLIYDASNLETGVPSRFSGSGSGTDFTFTISSLQPEDIATYYCQHYDSLRYTFGQGTKLEIK

SEQ ID NO: 10812 - protein, 110 aa, Artificial Sequence
  Synthetic construct
QAVVTQEPSLTVSPGGTVILTCGSSTGAVTSGHYPYWFQQTPGQAPRTLIYDTSNKHSWTPARFSGSLLGGKAALTLSGAQPEDEAEYYCLLSYSATYWVFGGGTKLTVL

SEQ ID NO: 10813 - protein, 108 aa, Artificial Sequence
  Synthetic construct
DIQLTQSPSFLSASVGDRVTITCRASQDISSYLAWYQQKPGEAPKLLIFAASTLQSGVPSRFSGSGSGTDFTLTISSLQPEDFATYFCQQLNSFFRVTFGGGTKVEVK

SEQ ID NO: 10814 - protein, 111 aa, Artificial Sequence
  Synthetic construct
QSVLTQPPSVSGAPGQRVTISCTGSGSNIGAGYDVHWYQQLPGSAPKLLIYGYTNRPSGVPDRFSGSKSGTSASLAITGLQAEDEADYYCQSYDSSLSDSVFGGGTKLTVL

SEQ ID NO: 10815 - protein, 108 aa, Artificial Sequence
  Synthetic construct
EIVLTQSPGTLSLSPGERATLSCRASQSVSSSYLAWYQQKPGQAPRLLIYGASSRATGIPDRFTGSGSGTDFTLTISRLEPEDFAVYYCQQYGSSPLTFGGGTKVEVK

SEQ ID NO: 10816 - protein, 111 aa, Artificial Sequence
  Synthetic construct
QSVLTQPPSVSGAPGQRVTISCTGSSSNIGAGYDVHWYQQLPGTAPKLLIYASSNRPSGVPDRFSGSKSGTSASLAISGLQAEDEADYYCQSYDSSLSALVFGGGTKLTVL

SEQ ID NO: 10817 - protein, 110 aa, Artificial Sequence
  Synthetic construct
QSALTQPASVSGSPGQSITISCTGTSSDVGGYNYVSWYQQHPGKAPKLMIYDVNNRPSGVSNRFSGSKSGNTASLTISGLQAEDEADYYCSSYTNSSTVLFGGGAKLTVL

SEQ ID NO: 10818 - protein, 110 aa, Artificial Sequence
  Synthetic construct
QSVLTQPPSVSAAPGQKVTISCSGSSSNIANNYVSWYQLLPGTAPKLLIYDNNKRPSGIPDRFSGSKSGTSATLGITGLQTGDEADYYCGTWDSSLRAGVFGGGTKLTVL

SEQ ID NO: 10819 - protein, 107 aa, Artificial Sequence
  Synthetic construct
DIQMTQSPSSLSASAGDRVTITCQASQDISHYLNWYQQKPGKAPKLLIYDASNLETGVPSRFSGGGSGTDFSFTISNLQPEDIATYYCQQYENLPITFGQGTRLEIK

SEQ ID NO: 10820 - protein, 109 aa, Artificial Sequence
  Synthetic construct
DIQMTQSPSSQSASVGDRVTITCQASQDISNYLNWYQQKPGKAPKVLIYDASNLETGVPSRFSGSGSGTDFTFTISSLQPEDIATYYCQQYDTLLRIFTFGPGTKVDIK

SEQ ID NO: 10821 - protein, 105 aa, Artificial Sequence
  Synthetic construct
SYELTQPPSVSVSPGQTASITCSGDKLGAKYACWYQQKPGQSPVLVIYQDNKRPSGIPERFSGSNSGDTATLTISGTQAMDEADYYCQAWDSSAVFGGGTKLTVL

SEQ ID NO: 10822 - protein, 109 aa, Artificial Sequence
  Synthetic construct
SYELTQPPSVSVSPGQTARITCSGEALPKQYAYWYQQKPGQAPVLVIYKDSERPSGIPERFSGSSSGTTVTLTIIGVQAEDEADYYCQSSDNSGTYNYVFGTGTKVTVL

SEQ ID NO: 10823 - protein, 106 aa, Artificial Sequence
  Synthetic construct
DIQMTQSPSSLSASVGDRVTITCRASQSINSYLNWYQQNPGKAPKLLIYAASSLQSGVPSRFSGSGSGTDFTLTISSLQPEDFATYYCQQTHSTFTFGPGTKVDVK

SEQ ID NO: 10824 - protein, 110 aa, Artificial Sequence
  Synthetic construct
QSVLTQPPSVSAAPGQKVTISCSGSSSNIGDNYVSWYQHLPGTAPKLLIYENDRRPSGIPDRFSGSKSGTSATLGITGLQTGDEADYYCGTWDSSLSAGVFGGGTLLTVL

SEQ ID NO: 10825 - protein, 110 aa, Artificial Sequence
  Synthetic construct
QSVLMQPPSASGTPGQRVTISCSGSSSNIGSNYVYWYQQLPGTAPKLLINRNNQRPSGVPDRFSGSKSGTSASLAISGLRSEDEADYYCAAWDDSLSGEVFGGGTKLTVP

SEQ ID NO: 10826 - protein, 111 aa, Artificial Sequence; identical to SEQ ID NO: 3109
  Synthetic construct

SEQ ID NO: 10827 - protein, 111 aa, Artificial Sequence
  Synthetic construct
DVVMTQSPLSLPVTLGQPASISCRSSQSLVYSDGNTYLNWFQQRPGQSPRRLIYKVSNRDSGVPDRFSGSGSGTNFTLKISRVEAEDVGVYYCMQGTHWPTFGQGTKVEIK

SEQ ID NO: 10828 - protein, 108 aa, Artificial Sequence
  Synthetic construct
SYELTQPPSVSVSPGQTARITCSGDALPKKYAYWYQQKSGQAPVLVIFEDNNRPSGIPKRFSGSSSGTMATLTISGAQVEDEAAYYCYSTDSSANEGVFGGGTKLTVL

SEQ ID NO: 10829 - protein, 108 aa, Artificial Sequence
  Synthetic construct
QSALTQPASVSGSRGQSTTISCTGTTNDIGNFNLVSWYQQRPNQAPKLIIYEVNKRPSGVSSRFSGSKSGNTASLTVSGLQPEDEADYYCCSYAGDVLFGGGTRLTVL

SEQ ID NO: 10830 - protein, 106 aa, Artificial Sequence
  Synthetic construct
SYELTQPPSVSVSPGQTASITCSGDKLGDNNPWWYQQKPGQSPVLVIYQDNGRPSGIPERFSGSNSGNTATLTIRGTQLIDEADYYCQAWDTSTWVFGGGTKLTVL

SEQ ID NO: 10831 - protein, 110 aa, Artificial Sequence
  Synthetic construct
QSVLTQPPSASGTPGQRVTISCSGSSSNIGSNYVSWYQRLPGTAPKLLIFRNKQRPSGVPDRFSGSKSGTSASLAISGLRSEDEADYYCAAWDDSLSGYVFGTGTKVTVL

SEQ ID NO: 10832 - protein, 106 aa, Artificial Sequence
  Synthetic construct
SYELTQPPSVSVSPGQTASITCSGDKLGDKYACWYQQKPGQSPVLVIYQDTKRPSGIPERFSGSNSGNTATLTISGTQAMDEADYYCQAWASSTAVFGGGTKLTVL

SEQ ID NO: 10833 - protein, 110 aa, Artificial Sequence
  Synthetic construct
QSVLTQPPSASGTPGQGVTISCSGSSSNIGSNIVNWYQHLPGTAPKLLIYSNNQRPSGVPDRFSGSKSGTSASLAISGLQSEDEADYYCAAWDDSLSGYVFGTGTKVTVL

SEQ ID NO: 10834 - protein, 106 aa, Artificial Sequence
  Synthetic construct
DIQMTQSPSSLSASVGDTVTITCRTSQNINIYLNWYQQKPGKAPKLLIYGASTLQDGVPSRFSGSGSGTDFTLTISSLQPEDFATFYCQQGYSTPTFGQGTKVENK

SEQ ID NO: 10835 - protein, 108 aa, Artificial Sequence
  Synthetic construct
SYVLTQPPSVSVAPGQTARITCGGNNIGSKSVHWYQQKPGQAPVLVIYYDSDRPSGIPERFSGSNSGNMATLTISRVEAGDEADYYCQVWDGSGDYCVFGSGTKVTVL

SEQ ID NO: 10836 - protein, 108 aa, Artificial Sequence
  Synthetic construct
EIVLTQSPGTLSLSPGERATLSCRASQSVNNNHLAWYQHKPGQAPRLLIYGTSGRATGIPDRFSGSGSGTDFTLTVNRLEPEDFAVYYCQQYGTSPGTFGQGTKLEIN

SEQ ID NO: 10837 - protein, 108 aa, Artificial Sequence
  Synthetic construct
EIVLTQSPGTLSLSPGERATLSCRASQSVSSSQLAWYQQKPGQAPRLLIYGASSRATGIPDRFSGGGSGTDFTLTISRLEPEDFALYYCQQYGSSQGTFGQGTKLEIK

SEQ ID NO: 10838 - protein, 110 aa, Artificial Sequence
  Synthetic construct
QSALTQPASVSGSPGQSITISCTGTNSDVGSYDHVSWFQQRAGRAPELLIYDVTNRPSGVSNRFSGSKSGNTASLTISGLQAEDEADYYCSSYTSSGTRVFGTGTTVTVL

SEQ ID NO: 10839 - protein, 110 aa, Artificial Sequence
  Synthetic construct
QSVLTQPPSVSAAPGQKVIISCSGSDSNIGNNYVSWYQQFPRGAPTLLIYENSKRPSGTPDRFSGSRSGTSATLAITGVQSADEAEYYCGTWDSSLNTGVFGPGTQVSVL

SEQ ID NO: 10840 - protein, 112 aa, Artificial Sequence
  Synthetic construct
DIVMSQSPLSLPVTPGEPASISCRSSQSLLYSNGYTYLNWYLQKPGQSPQLLIYLGSNRASGVPDRFSVSGSGTDFTLIISRVEAEDVGVYFCMQALQIPWTFGQGTKVEIK

SEQ ID NO: 10841 - protein, 110 aa, Artificial Sequence
  Synthetic construct
SYDLTQPPSVSVSPGQTARITCSGDALPKKYAYWYQQKSGQAPVLVISEDSKRPSGIPERFSGSSSGTMATLTISGAQVEDEADYYCCSTDSSSNHPNWVFGGGTKLTVL

SEQ ID NO: 10842 - protein, 113 aa, Artificial Sequence
  Synthetic construct
DIVMTQSPDSLAVSLGERATINCKSSQTVLYRSNNQNYLAWYQQKPGQPPKVLIYWASTRQSGVPDRFTGSGSGTDFTLTISSLQAEDVAVYYCQQYLTSPITFGQGTRLEIK

SEQ ID NO: 10843 - protein, 107 aa, Artificial Sequence
  Synthetic construct
DIQMTQSPSSLSASVGDRVTITCRASQSISSYLNWYQQKPGKAPKLLIYAASSLQSGVPSRFSGSGSGTDFTLTISSLQPEDFATYYCQKSYSSPQTFGQGTKLEIK

SEQ ID NO: 10844 - protein, 106 aa, Artificial Sequence
  Synthetic construct
SYALTQPPSVSVSPGQTASITCSGDKLGDKYTCWYQQKPGQSPVVVIYQDTKRPSGIPERFSGSNSGNTATLTISGTQAMDEADYYCQTWDSTTVVFGGGTKLTVL

SEQ ID NO: 10845 - protein, 111 aa, Artificial Sequence
  Synthetic construct
QSVLTQPPSVSGAPGQRVTISCTGSSSDIGAGYDVHWYQQLPGTAPKLLIYANINRPSGVPDRFSGSKSGTSASLAISGLQAEDEADYYCQSYDSSLSCEVFGTGTKVTVL

SEQ ID NO: 10846 - protein, 109 aa, Artificial Sequence
  Synthetic construct
EIVLTQSPATLSLSPGERATLSCRASQSVSSFLAWYQQKPGQAPRLLIYDASNRATGIPARFSGSGSGTDFTLTISSLEPEDFAVYYCHHRSNWPPRITFGPGTKVDIK

SEQ ID NO: 10847 - protein, 112 aa, Artificial Sequence
  Synthetic construct
DIVMTQTPLSSPVTLGQPASISCRSSQSLVHSDGNTYLSWLQQRPGQPPRLLIYKISNRFSGVPDRFSGSGAGTDFTLKISRVEAEDVGVYYCMQATQFPWTFGQGTKVEIK

SEQ ID NO: 10848 - protein, 109 aa, Artificial Sequence
  Synthetic construct
EIVLTQSPGTLSLSPGERATLSCRASQSVSSSYLAWYQQKPGQAPRLLIYGASSRAIGIPDRFSGSGSGTDFTLTISTLEPEDFAVYYCQQYGSSLLWTFGQGTKVEIK

SEQ ID NO: 10849 - protein, 112 aa, Artificial Sequence
  Synthetic construct
QSVLTQPPSVSGAPGQRVTISCTGSSSNIGADYDVHWYQQLPGTAPKLLIYGNSNRPSGVPDRFSGSKSGTSASLAITGLQAEDEADYYCQSYDSSLSGGGVFGTGTKVTVL

SEQ ID NO: 10850 - protein, 113 aa, Artificial Sequence
  Synthetic construct
DIVMTQAPDSLAVSLGERATINCKSSQSVLYSSNNKNYLAWYQQKPGQPPKLLIYWASTRESGVPDRFSGSGSGTDFTLTISSLQAEDVAIYYCQQYYSTPLTFGGGTKVEIK

SEQ ID NO: 10851 - protein, 110 aa, Artificial Sequence
  Synthetic construct
QPALTQPASVSGSPGQSITISCNGFSSDIGSHNLVSWYQQLPGSVPKLILYEDIKRPSGVPDRFSGSKSGSTASLTISGLQAEDEADYYCCSYAGGRNLVFGGGTKLTVL

SEQ ID NO: 10852 - protein, 112 aa, Artificial Sequence
  Synthetic construct
DIVMTQSPLSLPVTPGEPASISCRSSQSLLHSNGHNYLDWYLQKPGQSPQLLIFLASNRASGVPDRFSGSGSGTDFTLKISRVEAEDVGVYYCMQALQTPYTFGQGTKLEIK

SEQ ID NO: 10853 - protein, 107 aa, Artificial Sequence
  Synthetic construct
SYELTQPPSVSVSPGQTARITCSGDALPKKYAYWYQQKSGQAPVLVIYEDSKRPSGIPERFSGSSSGTLATLTINGAQVEDEADYYCSSRDSSGNPLFGGGTKLTVL

SEQ ID NO: 10854 - protein, 109 aa, Artificial Sequence
  Synthetic construct
EIVLTQSPATLSLSPGERATLSCRASQSVSSFLAWYQQKPGQAPRLLIYDASNRATGIPARFSGSGSGTDFTLTISSLEPEDFAVYYCQQRSNWPPALTFGGGTKVEIK

SEQ ID NO: 10855 - protein, 109 aa, Artificial Sequence
  Synthetic construct
QTVVTQEPSLSVPPGGTVTLTCASSTGAVTNNYYANWFQQKPGQAPRALIHSTSNKYSWTPGRFSGSLLGDKAALTLSGAQPEDEADYYCLLYYGGSYVFGTGTKVTVL

SEQ ID NO: 10856 - protein, 108 aa, Artificial Sequence
  Synthetic construct
EIVLTQSPGTLSLSPGERATLSCRASQSVISNYLAWYQQKPGQSPRLLIYGASGRTTGIPDRFSGSGSGTDFTLTISRLEPEDFAVYYCQQYGSPPYTFGQGTKLEIK

SEQ ID NO: 10857 - protein, 107 aa, Artificial Sequence
  Synthetic construct
DIQLTQSPSSLSASVGDRVTITCLTSQSINNNLNWYQHKPGQAPILLIYSTSTLESGVPSRFSGSGSGTDFTLTISTLQPEDFATYYCQQSYSVPLTFGGGTKVESK

SEQ ID NO: 10858 - protein, 110 aa, Artificial Sequence
  Synthetic construct
QSVLTQPPSVSAAPGQKVTISCSGSSSNIGNNYVSWYQQLPGTAPKLLMYEDKERPSGIPDRFSGSKSGTSATLGITGLQTGDEADYYCGTWDSSLSARVFGGGTKLTVL

SEQ ID NO: 10859 - protein, 110 aa, Artificial Sequence
  Synthetic construct
QSVLTQPPSASGTPGQRVTISCSGNNSNIGSNTVNWYQQVPGTAPKLLIYINNQRPSGVPDRFSGSKSGTSASLAISGLRSEDEADYYCAAWDDGLSGSVFGTGTTVTVL

SEQ ID NO: 10860 - protein, 108 aa, Artificial Sequence
  Synthetic construct
SYELTQPPSVSVSPGQTASITCSGDKLGDKYVSWYQQKPGQSPVLVIYQDNKRPSGIPERFSGSKSGNTATLTLSGTQAMDEADYYCQAWGSSTAHYVFGTGTKVTVL

SEQ ID NO: 10861 - protein, 107 aa, Artificial Sequence
  Synthetic construct
EIVLTQSPGTLSLSPGERATLSCRASQSVGGNFLAWYQQKPGQAPRLLFYRASTRASGVPDRFSGSGSGTDFTLTISRLEPEDFAVYHCQQYSSLYSFGQGTTLEMK

SEQ ID NO: 10862 - protein, 107 aa, Artificial Sequence
  Synthetic construct
AIQMTQSPSSLSASVGDRVTITCQASQDISNYLNWYQQKPGKAPKLLIYDASTLEIGVPSSFSGSGSGTDFTFTISSLQPEDFATYYCQQYDSLPLTFGGGTKVEIK

SEQ ID NO: 10863 - protein, 108 aa, Artificial Sequence
  Synthetic construct
DIQMTQSPSTLSASVGDRVTLTCRTSQSLTDCLAWYQQKPGQAPKLLIYKASILENGVPSRFSGRGSGTEFTLTISSLQPDDFATYYCQQYCIFSQWAFGQGTKVDIK

SEQ ID NO: 10864 - protein, 106 aa, Artificial Sequence
  Synthetic construct
SYELTQPPSVSVSPGQTARITCSGDAFPKQYAYWYRQKPGQAPVVVIYKDSERPSGIPERFSGSSSGTTVTLTISGVQAEDEADYYCQSADSSGTVFGGGTKLTVL

SEQ ID NO: 10865 - protein, 108 aa, Artificial Sequence
  Synthetic construct
DIQMTQSPSSLSASVGDRVTITCRASQSISSYLNWYQQKPGKAPKLLIYAASSLQSGVPSRFTGSGSGTDFTLTISSLQPEDFATYYCQQSYSTPPLTFGGGTKVEIK

SEQ ID NO: 10866 - protein, 106 aa, Artificial Sequence
  Synthetic construct
DIQMTQSPSSLSASVGDRVTITCQASQDISNYLNWYQQKPGKAPKLLIYDASNLKTGVPSRFSGSGSGTDFTFTISSLQPEDIATYYCQQYDNLITFGQGTRLEIK

SEQ ID NO: 10867 - protein, 110 aa, Artificial Sequence
  Synthetic construct
QSLLTQPPSASGTPGQRVTISCSGSSSNIGSNYVYWYQQFPGTAPELLIYWNNQRPSGVPDRFSGSKSGTSASLAISGLRSEDEADYYCATWDDSLSGVVFGGGTKLAVL

SEQ ID NO: 10868 - protein, 107 aa, Artificial Sequence
  Synthetic construct
DIQMTQSPSTLSASVGDRVTITCRANESISSWLAWYQQKVGKAPKLLIYRASSLESGVPSRFSGSGSGTEFTLTISSLQPDDFATYYCQQYNLYSGTFGQGTKVEIK

SEQ ID NO: 10869 - protein, 108 aa, Artificial Sequence; identical to SEQ ID NO: 2836
  Synthetic construct

SEQ ID NO: 10870 - protein, 105 aa, Artificial Sequence
  Synthetic construct
SYELTQPPSVSVSPGQTARITCSGDALAKQYAYWYQQKPGQAPLLVIYKDSARPSGIPERFSGSSSGTTVTLTISGVQAEDEADYYCQSADSSVVFGGGTKLTVL

SEQ ID NO: 10871 - protein, 107 aa, Artificial Sequence
  Synthetic construct
DIQMTQSPSSLSASVGDRVTITCRASQSISSYLNWYQQKPGKAPKLLIYAASNLQSGVPSRFSGSGSGTDFTLTISSLQPEDFATYVCQQGYSPIWTFGQGTKVEII

SEQ ID NO: 10872 - protein, 108 aa, Artificial Sequence
  Synthetic construct
SYVLTQPPSVSVAPGQTARITCGGNNIGSKNVHWYQQKPGQAPVLVIYYDRDRPSGIPERFSGSNSGNTATLTISRVEAGDEADYYCQVWDSSSDHWVFGGGTKLTVL

SEQ ID NO: 10873 - protein, 109 aa, Artificial Sequence
  Synthetic construct
SYELTQPPSVSVSPGQTARITCSGDALPQKYAYWYQQKSGLAPVLVIFEDTRRPSGIPLRFSGSSSGTLATLTISGAQVEDEADYYCYSTDNGVNHEAVFGGGTKLTVL

SEQ ID NO: 10874 - protein, 107 aa, Artificial Sequence
  Synthetic construct
DIQMTQSPSTLSASVGDRVTITCRASQSISSWLAWYQQKPGKAPNLLIYQASKLESGVPSRFSGSGSGTEFTLTISSLQPDDFATYYCQHYNAYSWTFGQGTKVEIK

SEQ ID NO: 10875 - protein, 111 aa, Artificial Sequence
  Synthetic construct
QSALTQPASVSGSPGQSITISCTGTSSDVGGYNSVSWYQHHPGKAPKIMIYDVSNRPSGVSNRFSGSKSGNTASLTISGLQAEDEADYYCSSYTTSITPYVFGTGTKVTVL

SEQ ID NO: 10876 - protein, 110 aa, Artificial Sequence
  Synthetic construct
QSVLTQPPSVSAAPGQTVTISCSGGSSNIGNNYVSWYQQLPGTAPKLLIYENNKRPSGIPDRFSGSKSGTSATLGITGLQTGDEADYYCGTWDSSLSAVVFGGGTKLTVL

SEQ ID NO: 10877 - protein, 113 aa, Artificial Sequence
  Synthetic construct
DIVMTQSPDSLAVSLGERATINCKSSQSVLYSSNNKNYLAWYQQKPGQPPKLLIYWASTRESGVPDRFSGSGSGTDFTLTISSLQAEDVAVYYCQQYYSTPQTFGQGTKVEIK

SEQ ID NO: 10878 - protein, 105 aa, Artificial Sequence
  Synthetic construct
SYVLTQPPSVSVAPGKTARITCGGNNIGSKSVHWYQQRPGQAPVMVIYYDSDRPSGIPERFSGSKSGNTATLTISRVEAGDEADYYCQVWDTSVVFGGGTKLTVL

SEQ ID NO: 10879 - protein, 108 aa, Artificial Sequence
  Synthetic construct
DIQMTQSPSSLSASVGDRVTITCRASQTISSYLNWYQQKPGKAPKLLIFGASSLQSGVPSRFSGSGSGTDFTLTISSLQPDDFATYHCQQSYSTPPWTFGQGTKVEIK

SEQ ID NO: 10880 - protein, 110 aa, Artificial Sequence
  Synthetic construct
QSALTQSRSVSGSPGQSVTISCTGTSSDVGGYNYVSWYQQHPGKAPKLMIYDVSKRPSGVPDRFSGSKSGNTASLTISGLQAEDEADYYCCSYAGSFTFVFGTGTKVTVL

SEQ ID NO: 10881 - protein, 112 aa, Artificial Sequence
  Synthetic construct
DIVVTQSPLSLPVTPGEPASMSCRSSQSLLHSDGKNYLDWYMQKPGQSPQLLIYFGSNRASGVPDRFSGDGSGTDFTLKISRVEAEDVGVYYCMQALRTPLTFGGGTKVEIK

SEQ ID NO: 10882 - protein, 108 aa, Artificial Sequence
  Synthetic construct
EIVLTQSPGTLSLSPGERATLSCRASQSVSSNYLAWYQQKPGQAPRLLIYGASSRAIGIPDRFSGSGSGTDFTLTISRLEPEDFAVYYCQQYGSSVLTFGGGTKVEIK

SEQ ID NO: 10883 - protein, 108 aa, Artificial Sequence
  Synthetic construct
DIQMTQSPSSLSASVGDRVTITCRASETIGNYLNWYQQRPGKAPKLLIYGVSTLHSGVPSRFSGSGSGTDFTLTISSLQPEDFATYFCQQSYTTPRKTFGQGTKVEIT

SEQ ID NO: 10884 - protein, 108 aa, Artificial Sequence
  Synthetic construct
EIVLTQSPGTLSLSPGERATLSCRASQSVSSSYLAWYQQKPGQAPRLLIYGASSRATGIPDRFSGSGSGTDFTLTISRLEPEDFAVYYCHQYGSSRLTFGPGTKVDIK

SEQ ID NO: 10885 - protein, 109 aa, Artificial Sequence
  Synthetic construct
EIVLTQSPATLSLSPGERATLSCRASQSVSDYLAWYQHTPGQAPRLLIYDASKRAPGVPARFRGSGSGPDFTLTISSLEPEDFAVYYCQQRSIRPPTWTFGQGTKVEIK

SEQ ID NO: 10886 - protein, 108 aa, Artificial Sequence
  Synthetic construct
SYVLTQPPSVSVAPGKTARITCGGNNIGTKTVHWYQQKPGQAPVLVIYYDSDRPSGIPERFSGSNSGNTATLTISRVEAGDEADYYCQVWDSSSDHGVFGTGTKVTVL

SEQ ID NO: 10887 - protein, 108 aa, Artificial Sequence
  Synthetic construct
SSELTQDPAVSVALGQTVRITCQGDSLRSYYASWYQQKPGQAPVLVIYGKNNRPSGIPDRFSGSSSGNTASLTITGAQAEDEADYYCNSRDSSGDHLVFGGGTKLTVL

SEQ ID NO: 10888 - protein, 112 aa, Artificial Sequence
  Synthetic construct
QSVLTQPPSVSGAPGQRVTISCTGSSSNIGAGYDVHWYQHLPGTAPKLLIYGNSNRPSGVPDRFSGSKSGTSASLAITGLQAEDEADYYCQSYDTSLSGPYVFGTGTKVTVL

SEQ ID NO: 10889 - protein, 112 aa, Artificial Sequence
  Synthetic construct
QSALTQPRSVSGSPGQSVTISCTGASSDVGGYNYVSWYQQHPGKAPKLMISDVSERPSGVPDRFSGSKSGNTASLTIAGLQAEDEADYYCCSYAGSFTPLFVFGTGTKVTVL

SEQ ID NO: 10890 - protein, 108 aa, Artificial Sequence
  Synthetic construct
SYELTQPPSVSVSPGQTARITCSGDTLSTKYAAWYQQRSGQAPVLVIYEDNKRPSGIPERFSGLSSGTMATLTISGAQVDDEADYYCYSTDKSDDHRVFGGGTKLTVL

SEQ ID NO: 10891 - protein, 111 aa, Artificial Sequence
  Synthetic construct
QSVLTQPPSVSGAPGQRVTISCTGSSSNIGANFDVHWYQQLPGAAPKLLIYRNTNRPSGVPDRFSGSKSGTSASLAVSGLQAEDEADYYCQSYDRSLDAYVFGTGTKVTVL

SEQ ID NO: 10892 - protein, 107 aa, Artificial Sequence
  Synthetic construct
DIQMTQSPSSVSAFVGDRVTITCRASQGISSWLAWYQQKPGKAPKLLIYAASSLESGVPSRFSGSGSGTDFTLTISSLQPEDFATYYCQQANSFPLTFGPGTKVDIK

SEQ ID NO: 10893 - protein, 108 aa, Artificial Sequence
  Synthetic construct
SYELTQPPSVSVSPGQTARITCSGDALPKQYAYWYQQKPGQAPVLVIYKDSERPSGIPERFSGSSSGTTVTLTISGVQAEDEADYYCQSADSSGTYLVFGGGTKLTVL

SEQ ID NO: 10894 - protein, 108 aa, Artificial Sequence
  Synthetic construct
SYELTQPPSVSVSPGQTARITCSGDALPKKFAYWYQQKSGQAPVLVIYEDNKRPSGIPERFSGSSSGTMATLTISGAQVDDEADYYCSSTDNTANHWVFGGGTKLTVL

SEQ ID NO: 10895 - protein, 110 aa, Artificial Sequence
  Synthetic construct
QSVLTQPPSASGTPGQRVTISCSGSSSNIGSNHVYWYQQLPGTAPKLLIYRNNERPSGVPDRFSGSKSGTSAALAISGLRSEDEADYYCAAWDDSLSAWVFGGGTKLTVL

SEQ ID NO: 10896 - protein, 108 aa, Artificial Sequence
  Synthetic construct
EIVMTQSPATLSVSPGERVTLSCRASQSVNSNLAWYQQKPGQPPRLLIYGASTRATGIPARFSGSGSGTEFTLTISSLQSEDFAVFYCQQYNDWPPKTFGQGTKVEIK

SEQ ID NO: 10897 - protein, 106 aa, Artificial Sequence
  Synthetic construct
DIQMTQSPSSLSASVGDRVTITCRASQSISTYLNWYQHKPGKAPQLLIYDASNLQSGVPSRFSGSGSGTDFTLTISSLQPEDFAAYYCHQSYSTPTFGQGTKVEIK

SEQ ID NO: 10898 - protein, 110 aa, Artificial Sequence
  Synthetic construct
QSALTQPASVSGSPGQSITISCTGASSDVGAYNYVSWYQQHPGKAPKLMIYDVNDRPSGVSNRFSGSKSGNTASLTISGLQAEDEAFYYCSSFTNISTVVFGGGTKLTVL

SEQ ID NO: 10899 - protein, 111 aa, Artificial Sequence
  Synthetic construct
QSALTQPASVSGSPGQSITISCTGTSSDVGDYDFVSWYQQHPGKAPKLLIYDVNNRPSGVSHRFSGSKSGTTASLTISGLQAEDEADYYCSSSTSTSTLYVFGTGTKVTVL

SEQ ID NO: 10900 - protein, 110 aa, Artificial Sequence
  Synthetic construct
QSALTQPPSASGSPGQSVSISCTATSGDVGDYNYVSWYQQHPGKAPKLMIYEVNKRPSGVPDRFSGSKSGNTASLTVSGLQAADEADYFCSSYAGSNPLIFGGGTKLTVL

SEQ ID NO: 10901 - protein, 111 aa, Artificial Sequence
  Synthetic construct
QLELTQSPSASASLGASVKLTCTLSSGHSRHPIAWHQQQPEKGPRFLMKLNSDGSHNKGDGIPERFSGSSSGAERYLTISRLHSEDEAEYYCQTWGTGIQVFGGGTKLTVL

SEQ ID NO: 10902 - protein, 111 aa, Artificial Sequence
  Synthetic construct
DIVMTQTPLSLSVTPGQPASISCKSGQSLLHSDGKTYLYWYLQKPGQPPQLLIYEAYNRFSGVPDRFSGSGSGTDFTLKISRVEAEDVGVYYCMQSMQLLFFGQGTKLEIK

SEQ ID NO: 10903 - protein, 110 aa, Artificial Sequence
  Synthetic construct
HSALTQPRSVSGSPGQSVTISCTGTSSDVGGYDYVSWYQLHPGKAPKLMIYDVTKRPSGVPDRFSGSKSGNTASLTISGLQAEDEADYYCCSYAGSYTPVFGGGTKLTIL

SEQ ID NO: 10904 - protein, 108 aa, Artificial Sequence
  Synthetic construct
DIQLTQSPSFLSASVGDRVTITCRASQGISSYLAWYQQKPGKAPKLLIYAASTLQSGVPSRFSGSGSGTEFTLTISSLQPEDFATYFCQQLDSYPEITFGPGTKVDIK

SEQ ID NO: 10905 - protein, 113 aa, Artificial Sequence
  Synthetic construct
DIVMTQTPLSLPVTPGEPASISCRSSQSLLDSDDGNTYLDWYLQKPGQSPQLLIYMLSYRASGVPDRFSGSGSGTDFTLKISRVEAEDVGVYYCMQRIEFPLTFGGGTKVEIK

SEQ ID NO: 10906 - protein, 112 aa, Artificial Sequence
  Synthetic construct
DIVMTQTPLSLSVTPGQPASMSCKSSQSLLHSDGKTYLYWYLQKPGQPPQLLIYEVSDRFSGVPDRFSGSGSGTDFTLKISRVEAEDVGVYYCMQSIQLPLTFGGGTKVEIK

SEQ ID NO: 10907 - protein, 106 aa, Artificial Sequence
  Synthetic construct
DIQMTQSPSSVSASVGDRVTIACRASQGISSWLAWYQQKPGKAPKLLIYAASSLQSGVPSRFSGSGSGTDFTLTISSLQPEDIATYFCQQANSPWTFGQGTKVEIK

SEQ ID NO: 10908 - protein, 110 aa, Artificial Sequence
  Synthetic construct
QSVLTQPPSVSAAPGQKVTISCSGSSSNIGNNYVSWYQQLPGTAPKLLIYDNNKRPSGIPDRFSGSKSGTSATLGITGLQTGDEADYYCGTWDSSLSAGVFGGGTKLTVL

SEQ ID NO: 10909 - protein, 110 aa, Artificial Sequence
  Synthetic construct
QSVLTQPPSASGTPGQRVTISCSGSSSNIGSNYVYWYQQLPGTAPKLLIYRNNQRPSGVPDRFSASKSGTSASLAISGLRSEDEADYYCAAWDDRLSGYVFGTGTKVTVL

SEQ ID NO: 10910 - protein, 112 aa, Artificial Sequence; identical to SEQ ID NO: 2702
  Synthetic construct

SEQ ID NO: 10911 - protein, 108 aa, Artificial Sequence
  Synthetic construct
QSALTQPASVSGSPGQSITISCTGTSSDVGSFNLVSWYQQHPDKAPKLMIYEGSKRPSGVSSRFSGSKSGNTASLTISGLQAEDEADYYCCSYAGGVVFGRGTRLTVL

SEQ ID NO: 10912 - protein, 107 aa, Artificial Sequence
  Synthetic construct
DIQMTQSPSSVSASVGDRVTITCRASQGISSWLAWYQQKPGKAPKLLIYAASSLQSGVPSRFSGSGSGTDFTLTISSLQPEDFATYYCQQANSFPFTFGPGTKVDIK

SEQ ID NO: 10913 - protein, 108 aa, Artificial Sequence; identical to SEQ ID NO: 2836
  Synthetic construct

SEQ ID NO: 10914 - protein, 110 aa, Artificial Sequence
  Synthetic construct
QSALTQPPSASGSPGQSVTISCTGTSSDVGGYNYVSWYQHHPGKAPKLMIYEVTKRPSGVPDRFSGSKSGYTASLTVSGLLAEDEADYYCFSYAGSNGVLFGGGTKLTVL

SEQ ID NO: 10915 - protein, 107 aa, Artificial Sequence
  Synthetic construct
DIQLTQSPSFLSASVGDRVTITCRASQGISSYLAWYQQKPGKAPKLLIYAASTLQSGVPSRFSGSGSGTEFTLTFSSLQPEDFATYYCQQLHSYPFTFGQGTKLEIK

SEQ ID NO: 10916 - protein, 108 aa, Artificial Sequence; identical to SEQ ID NO: 10882
  Synthetic construct

SEQ ID NO: 10917 - protein, 108 aa, Artificial Sequence
  Synthetic construct
DIQMTQSPSSLSASVGDSVTITCQASQDISNYLNWYQQKPGKAPKLLIYDASNLETGVPSRFSGSGSGTDFTFTISSLQPEDIATYYCQQYDNLPPYSFGQGTKVDIK

SEQ ID NO: 10918 - protein, 108 aa, Artificial Sequence
  Synthetic construct
EIVLTQSPATLSLSPGERATLSCRASQSVNSYLAWYQQKPGQAPRLLIYDASNRATGIPARFSGSGSGTDFTLTISSLEPEDFAVYYCQQRSNWPPFTFGPGTKVDIK

SEQ ID NO: 10919 - protein, 111 aa, Artificial Sequence
  Synthetic construct
NFMLTQPHSVSESPGKTVTISCTGSSGIIASNYVQWYQQRPGSAPTTVIYEDYQRPSGVPDRFSGSIDSSSNSASLTISGLKTEDEADYYCQSYDSSNRWVFGGGTKLTVL

SEQ ID NO: 10920 - protein, 107 aa, Artificial Sequence
  Synthetic construct
DIQMTQSPSTLSASVGDRVTITCRASQSISSWLAWYQQKPGKAPKLLIYKASSLESGVPSRFSGSGSGTEFTLTISSLQPDDFATYYCQQYNSYPFTFGPGTKVDIK

SEQ ID NO: 10921 - protein, 106 aa, Artificial Sequence; identical to SEQ ID NO: 2609
  Synthetic construct

SEQ ID NO: 10922 - protein, 108 aa, Artificial Sequence
  Synthetic construct
SYELTQPPSVSVSPGQTARITCSGDALPKKYVYWFQQRSGQAPVLVIYEDSKRPSGIPARFSGSSSGTVATLTISGAQVEDEADYYCHSTDGSGNLWVFGGGTKLTVL

SEQ ID NO: 10923 - protein, 112 aa, Artificial Sequence
  Synthetic construct
DIVMTQSPLSLPVTPGEPASISCRSSQSLLHSNGHNFLDWYLQKPGQSPQLLIYLGSNRASGVPDRFSGSGSGTDFTLKISRVEAEDVGVYYCMQALQTPRTFGQGTKLEIK

SEQ ID NO: 10924 - protein, 114 aa, Artificial Sequence
  Synthetic construct
DFVMTQSPDSLAVSLGERATITCKSSHSVFYSSNHKNYLAWYQQKPGQPPKLLISWASTRESGVPDRFSGSGSGTDFTLTISNLQAEDVAVYYCQQYYSTPLFTFGPGTKVDIK

SEQ ID NO: 10925 - protein, 108 aa, Artificial Sequence
  Synthetic construct
EFVLTQSPGTLSLSPGERATLSCRASQSVSGPYLAWYQQKPGQAPRLLIYGASSRATGIPDRFSGSGSGTDFTLTISRLEPEDFAVYYCQQYGRSRWTFGQGTKVEIK

SEQ ID NO: 10926 - protein, 112 aa, Artificial Sequence
  Synthetic construct
DVVMTQSPVSLPVTLGQPASISCRSSQSLVYSDGNTYLTWFQQRPGQSPRRLIYKVSNRDSGVPDRFTGSGSGTDFTLKISRVEAEDVGVYYCMQGTHWPPTFGGGTKVEIK

SEQ ID NO: 10927 - protein, 107 aa, Artificial Sequence
  Synthetic construct
SYELTQPPSVSVSPGQTASITCSGDKLGDKYACWYQQKPGQSPVLVIYQDSKRPSGIPERFSGSNSGNTATLTISGTQAMDEADYYCQAWDSSTLYVFGTGTKVTVL

SEQ ID NO: 10928 - protein, 111 aa, Artificial Sequence
  Synthetic construct
QLVLTQSPSASASLGASVKLTCTLSSGHSNYAIAWHQQQPAKGPRFLMRLNSGGGHSKGDGIPDRFSGSSSGAERYLTISSLQSEDEADYYCQTWGTGIRVFGGGTKLTVL

SEQ ID NO: 10929 - protein, 109 aa, Artificial Sequence
  Synthetic construct
EIVLTQSPATLSLSPGERATLSCRASQSVSNYLAWYQQKPGQAPRLLIYDASNRAPGVPARFSGSGSGTDFTLTISSLEPEDFAVYYCQQRSKWPPVLTFGGGTKVEIK

SEQ ID NO: 10930 - protein, 110 aa, Artificial Sequence
  Synthetic construct
QSVLTQPPSASGTPGQRVTISCSGSSSNIGKNSVYWYQQLPGTAPKLLIYRSNQRPSGVPDRFSGSKSSTSGSLAISGLQSEDEADYYCAAWDDSLNGPVFGGGTKLTVL

SEQ ID NO: 10931 - protein, 108 aa, Artificial Sequence
  Synthetic construct
EILMTQSPATLSVSPGERATLSCRASQSVRSNLAWYQQKPGQAPRLLIYGASTRATGIPARFSGSGSGTEFTLTISSLQSEDFAVYFCQQYNDWPFWTFGQGTKLEIK

SEQ ID NO: 10932 - protein, 107 aa, Artificial Sequence
  Synthetic construct
DIQMTQSPSTLSASVGDRVTITCRASQTISSWLAWYQQKPGKAPKLLIYKASSLETGVPSRFSGSGSGTEFTLTISSLQPDDFATYYCQQYNDYPWTFGQGTKVEIK

SEQ ID NO: 10933 - protein, 108 aa, Artificial Sequence
  Synthetic construct
EIVLTQSPGALSLSPGERATLSCRASQSVSSSYLAWYQHKRGQAPRLLIYDASSRATGIPDRFSGSGSGTDFTLTISRLEPEDFAVYYCQQYGTSSFTFGGGTKVEIK

SEQ ID NO: 10934 - protein, 109 aa, Artificial Sequence
  Synthetic construct
QAVVTQEPSLTVSPGGTVTLTCGSSTGGVTSGHYPYWFQQKPDQAPRTLIYDTNNKYSWTPARFSGSLLGGKAALTLSGAQPEDEAEYYCLLSYSGAAVFGGGTQLTVL

SEQ ID NO: 10935 - protein, 108 aa, Artificial Sequence
  Synthetic construct
ESVLTQSPGTLSLSPGERATLSCRASESVSSTYLAWYQQKPGQAPRLLIYAASSRATGIPDRFSGSGSGTDFTLTISRLEPEDFAVYYCQLYGSSQLTFGGGTKVEIK

SEQ ID NO: 10936 - protein, 108 aa, Artificial Sequence
  Synthetic construct
SYELTQPPSVSVSPGQTARITCSGDALPKKYAYWYQQKSGQAPVLVIYEDNKRPSGIPERFSGSSSGTMATLTISGAQVEDEADYYCYSTGTSGYHWVFGGGTKLTVL

SEQ ID NO: 10937 - protein, 109 aa, Artificial Sequence
  Synthetic construct
SYDLTQPPSVSVSPGQTARITCSGDALPKKYAYWYQQKSGQAPVLVIYEDSKRPSGIPERFSGSSSGTMATLTISGAQVEDEADYYCYSTDNSGDHRGVFGTGTKVTVL

SEQ ID NO: 10938 - protein, 108 aa, Artificial Sequence
  Synthetic construct
EIVMTQSPATLSVSPGDRATLSCRASQSVSSNLAWYQQKPGQAPRLLIFGASTRATGIPARFSGSGSGTDFTLTISSLQSEDFAVYYCQQYNNWPPYTFGQGTKLEIK

SEQ ID NO: 10939 - protein, 111 aa, Artificial Sequence
  Synthetic construct
QSVLTQPPSVSGAPGQRVTISCTGDNSNIGAGYDVHWYQQLPGRAPKLLIFGNSNRPSGVPDRFSGSKSGTSASLAITGLQAEDEADYYCQSYDSSLIGSVFGTGTKVTVP

SEQ ID NO: 10940 - protein, 110 aa, Artificial Sequence
  Synthetic construct
QSALTQPASVSGSPGQSITISCTGTSSDIGRYNYVSWYQQHPGKAPKLMIYDVSNRPSGVSNRFSGSKSGNTASLTISGLQAEDEAGYYCTSYTSSSTVVFGGGTQLTVL

SEQ ID NO: 10941 - protein, 112 aa, Artificial Sequence
  Synthetic construct
DIVMTQSPLSLPVTPGEPASISCRSSQSLLHSTGYNYVDWYLQKPGQSPQLLIYLGSNRASGVPDRFSGSGSGTDFTLKISRVEAEDVGVYYCMQALQTPLTFGGGTKVEIK

SEQ ID NO: 10942 - protein, 108 aa, Artificial Sequence
  Synthetic construct
EIVLTQSPGTLSLSPGERATLSCRASQSVSSSYLAWYQQKPGQAPRLLIYGGSSRATGIPDRFSGSGSGTDFTLTISRLEPEDLAVYYCQQYGSSLLTFGGGTKVEIK

SEQ ID NO: 10943 - protein, 108 aa, Artificial Sequence
  Synthetic construct
EIVLTQSPGTLSLSPGERATLSCRASQSVSSSYLAWYQQKPGQAPRLLIYAASTRATGIPDRFSGSGSGTDFTLTISRLEPEDFAVYYCQQYGRSPLTFGPGTKVDIK

SEQ ID NO: 10944 - protein, 116 aa, Artificial Sequence; identical to SEQ ID NO: 10793
  Synthetic construct

SEQ ID NO: 10945 - protein, 112 aa, Artificial Sequence
  Synthetic construct
QSVLTQPPSVSGAPGQRVTISCTGSSSNIGAGYDVHWYQHLPGTAPKLLIYGNTNRPSGVPDRFSGSKSGTSASLAISGLQAEDEADYYCQSYDTNLSGSRVFGTGTKVTVL

SEQ ID NO: 10946 - protein, 106 aa, Artificial Sequence
  Synthetic construct
EIVMTQSPATLSASPGERVTLSCRASQSVSTNLAWYQQRPGQAPRLLIYGASTRATGIPARFSGSGSGAEFTLTISSLQSEDYAVYYCQQYEYWYTSGQGTKLDIK

SEQ ID NO: 10947 - protein, 111 aa, Artificial Sequence
  Synthetic construct
QSVLTQPPSVSGAPGQRVTISCTGSSSNIEAGYDVNWYQQLPGTAPKLLIYGNTNRPSGVPDRFSGSKSGTSASLAISGLQAEDEADYYCQSYDSSLSGYVFGTGTKVTVL

SEQ ID NO: 10948 - protein, 106 aa, Artificial Sequence
  Synthetic construct
SYELTQPPSVSVSPGQTASITCSGDKLGDKYACWYQQKPGQSPVLVIYQDTKRPSGIPERFSGSNSGNTATLTISGTQAMDEADYYCQAWDSSTVVFGGGTKLTVL

SEQ ID NO: 10949 - protein, 109 aa, Artificial Sequence
  Synthetic construct
QAVVTQEPSLTVSPGGTVTLTCGSSTGAVTSGHYPYWFQQKPGQAPRTLIYDTSNKYSWTPARFSGSLLGGKAALTLSGAQPEDEAEYYCLLSYSGAAVFGGGTQLTVL

SEQ ID NO: 10950 - protein, 108 aa, Artificial Sequence
  Synthetic construct
SSELTQDPTVSVALGQTVRITCQGDSLRGYYGSWYQQKPGQAPVLVIYGINNRPSGIPDRFSGSTSGNTASLTITGAQAEDEADYYCLSRDRSGNHYVFGGGTKVTVL

SEQ ID NO: 10951 - protein, 108 aa, Artificial Sequence
  Synthetic construct
SYVLTQPPSVSVAPGETARITCGGNNIGSKSVHWYQQKPGQAPVLVIYYDTARPSGIPERFSGSNSGNTATLTISWVEAGDEADYYCQVWDSSSDHVVFGGGTKLTVL

SEQ ID NO: 10952 - protein, 109 aa, Artificial Sequence
  Synthetic construct
SYELTQPPSVSVSPGQTARITCSADALPKQYAYWYQQKPGQAPVLVIYKDSERPSGIPERFSGSSSGTTVTLIISGVQAEDEADYYCQSADSGTTPHVVFGGGTKLTVL

SEQ ID NO: 10953 - protein, 107 aa, Artificial Sequence
  Synthetic construct
DIQMTQSPSSVSASVGDRVIITCRASQGISIWLAWYQQKPGKAPKLLIYAASSLQSGVPSRFSGSGSGTDFTLTISSLQPEDFATYYCQQASSFPPTFGGGTKLEIK

SEQ ID NO: 10954 - protein, 110 aa, Artificial Sequence
  Synthetic construct
QSALTQPASVSGSPGQSITISCTGTSSDVGSYNLVSWYQQHPGKAPKLMIYEGSKRPSGVSNRLSGSKSGNTASLTISGLQAEDEADYYCCSYAGPTTWVFGGGTKLTVL

SEQ ID NO: 10955 - protein, 110 aa, Artificial Sequence; identical to SEQ ID NO: 2904
  Synthetic construct

SEQ ID NO: 10956 - protein, 110 aa, Artificial Sequence
  Synthetic construct
QSALTQPASVSGPPGQSITISCTGTSSDVGAYKYVSWYQQYPGKAPKLMIYDVSNRPSGVSNRFSGSKSGNTASLTISGLQADDEADYYCSSYTSTRTLVFGTGTRVTVL

SEQ ID NO: 10957 - protein, 106 aa, Artificial Sequence
  Synthetic construct
DIRMTQSPSTLSASVGDRVTITCRASQTINNWLAWYQQKPGKAPKLLIYKASTLESGVPSRFSGSGSGAEYTLTISSLQPDDFATYYCQQYHSYSTFGQGTKVDIK

SEQ ID NO: 10958 - protein, 109 aa, Artificial Sequence
  Synthetic construct
EIVLTQSPATLSLSPGERATLSCRASQSVSNYLAWYQQKPGQAPRLLIYDASNRATGIPARFSGSGSGTDFTLTISSLEPEDFAVYYCQQRSNWPPVYTFGQGTKLEIK

SEQ ID NO: 10959 - protein, 107 aa, Artificial Sequence
  Synthetic construct
SYELTQPPSVSVSPGQTARITCSGDALPKKYASWYQQKSGQAPVLVIYEDSERPSGIPERISGSSSGTMATLTISGAQVEDEADYYCYSRDSSGNPLFGGGTKLTVL

SEQ ID NO: 10960 - protein, 110 aa, Artificial Sequence
  Synthetic construct
QTVVTQEPSFSVSPGGTVTLTCGLSSGSVSISHYPSWYQQTPGQAPRTLIYSTNTRSSGVPDRFSGSILVNKAALTITGAQADDESDYYCVLYMGSGISVFGGGTKLTVL

SEQ ID NO: 10961 - protein, 107 aa, Artificial Sequence
  Synthetic construct
DIQMTQSPSSVSASVGDRVTITCRASQGIGSWLAWYQQKPGSAPKLLIYGASRLQSGVPLRFSGSGSGTDFTLSISSLQPEDFATYYCQQATSFPLTFGGGTKVEIK

SEQ ID NO: 10962 - protein, 116 aa, Artificial Sequence
  Synthetic construct
QPVLTQPPSASASLGASVTLTCTLSSGYINYKVDWYQQRPGKGPRFVMRVGTGGIVGSKGDGIPDRFSVLGSGLNRSLTIKNIQEEDESDYHCGADHGSGSNFFVVFGGGTKLTVL

SEQ ID NO: 10963 - protein, 108 aa, Artificial Sequence
  Synthetic construct
SYELTQPPSVSVSPGQTARITCSGDALPKKYAYWYKQKSGQAPVLVIYEDSKRPSGIPERFSGSSSGTMATLTISGAQVEDEADYYCYSTDTSGNNWVFGGGTKLTVL

SEQ ID NO: 10964 - protein, 107 aa, Artificial Sequence
  Synthetic construct
DIQMTQSPSSLSASVGDRVTITCRASQSISSYLYWYQQKPGKAPKLLIYAASSLQSGVPSRFSGSGSGTDFTLTISSLQPEDFATYYCQQSYSTPYTFGQGTKLEIK

SEQ ID NO: 10965 - protein, 108 aa, Artificial Sequence
  Synthetic construct
SYELTQPPSVSVSPGQTARITCSADALPKQYAYWYQQKPGQAPVLVIYKDSERPSGIPERFSGSSSGTTVTLTISGVQAEDEADYYCQSADSSGTYWVFGTGTKVTVL

SEQ ID NO: 10966 - protein, 110 aa, Artificial Sequence
  Synthetic construct
QSVLTQPPSVSAAPGQKVTISCSGSSSNIGNNYVSWYQHLPGTAPKLLIYENNKRPSGIPDRFSGSKSGTSATLGITGLQTGDEADYYCGTWDSSLSAYVFGTGTKVTVL

SEQ ID NO: 10967 - protein, 110 aa, Artificial Sequence
  Synthetic construct
QSVLTQPPSVSGAPGQRVTISCTGSSSNIGAGYDVHWYQQLPGKAPKVLIYNNINRPSGVPDRFSGSKSGTSASLAITGLQAEDEADYYCQSYDNSLKVVFGGGTKLTVL

SEQ ID NO: 10968 - protein, 109 aa, Artificial Sequence
  Synthetic construct
SYELTQPPSVSVSPGQTARITCSGDALPKKYVYWYQQKSGQAPVLVIFEDSKRPSGIPERFSGSSSGTMATLTISGAQVEDEADYYCYSTDSSDNNRRVFGTGTKVTVL

SEQ ID NO: 10969 - protein, 112 aa, Artificial Sequence
  Synthetic construct
DVVLTQSPLSLPVTPGEPASISCRSSQSLLHSNGYNYLAWFLQRPGQSPQILIYLGSNRASGVPARFSGSGSGTDFTLKISRVEAGDVGVYYCRQVLQTPWTFGQGTRVEIK

SEQ ID NO: 10970 - protein, 110 aa, Artificial Sequence
  Synthetic construct
QSVLTQPPSVSEAPRQRVTISCSGSSSNIGNNGVNWYQQLPGKAPKLLIYYDDLLPSGVSDRFSGSKSGTSASLAISGLQSEDEADYYCAAWDDSLNAVVFGGGTKLTVL

SEQ ID NO: 10971 - protein, 108 aa, Artificial Sequence
  Synthetic construct
EIVLTQSPDTLSLSPGEGAILSCRASQPVGDTFLGWYQQRAGQAPRLLIYGASNRATGIPDRFSGSGSGTDFTLTISRLEPEDFAVYYCQQHSSSVWTFGQGTKVETK

SEQ ID NO: 10972 - protein, 108 aa, Artificial Sequence
  Synthetic construct
EIVLTQSPATLSLSPGERATLSCGASQSVSSSYLAWYQQKPGLAPRLLIYDASSRATGIPDRFSGSGSGTDFTLTISRLEPEDFAVYYCHQYGSSSFTFGPGTKVDIK

SEQ ID NO: 10973 - protein, 106 aa, Artificial Sequence
  Synthetic construct
DIQMTQSPSTLSASVGDRVTITCRASQSISSWLAWYQQKPGKAPKLLIYKASSLESGVPSRFSGSGSGTEFTLTISSLQPDDFATYYCQQYNSLWTFGQGTKVEIK

SEQ ID NO: 10974 - protein, 113 aa, Artificial Sequence
  Synthetic construct
DIVMTQSPDSLAVSLGERATINCKSSQSVLYSSNSKNYLGWYQQKPGQPPKLLFYWASTRESGVPDRFSGSGSGTDFTLTISSLQAEDVAVYYCQQYYSTPPTFGQGTKVEIK

SEQ ID NO: 10975 - protein, 106 aa, Artificial Sequence
  Synthetic construct
DIQMTQSPSSLSASVGDRVTITCRASQNINVYLNWYRQKPGKAPKLLIYAASTLEDGVPSRFSGSGSGTDFTLTISGLQPEDFATFYCQQGYSTPTFGQGTKVEMK

SEQ ID NO: 10976 - protein, 113 aa, Artificial Sequence
  Synthetic construct
DVVMTQSPLSLPVTLGQPASISCRSSQSLVYSDGNTYLNWFQQRPGQSPRRLIYKVSNRDSGVPDRFSGSGSGTDFTLKISRVEAEDVGVYYCMQGTHWPRYTFGQGTKLEIK

SEQ ID NO: 10977 - protein, 108 aa, Artificial Sequence
  Synthetic construct
EGVMTQSPATLSVSPGERATLSCRASQSVHSNLAWYQQKPGQAPRLLIYGASTRATGIPARFSGSGSGTEFTLTISSLQSEDFAVYYCQQYKDWPPNTFGQGTKLEIK

SEQ ID NO: 10978 - protein, 108 aa, Artificial Sequence
  Synthetic construct
EIVMTQSPATLSVSPGERATLSCRASQSVSSNLAWYQQKPGQAPRLLIYGASARATGIPARFSGSGSGTEFTLTISSLQSEDFAVYYCQQYTNWPPYTFGQGTKLEIK

SEQ ID NO: 10979 - protein, 106 aa, Artificial Sequence
  Synthetic construct
SYELTQPPSVSVSPGQTVTITCSGDKLGEKYACWYRQKPGQSPVLVIYEDNKRPSGIPERFSGSNSGNTATLTISGTQPMDEADYYCQAWDSSTAVFGGGTKLTVL

SEQ ID NO: 10980 - protein, 113 aa, Artificial Sequence
  Synthetic construct
DIVMTQSPDSLAVSLGERATINCKSSQSVLNSSNNKNYLAWYQHKPGQPPKLLIYWASTRESGVPDRFSGSGSGTDFTLNISSLQAEDVAVYYCQQYYSSPPTFGQGTKVEIK

SEQ ID NO: 10981 - protein, 110 aa, Artificial Sequence
  Synthetic construct
NFMLTQPHSVSESPGGTVTISCTGSGGSIASNYVQWYQQRPGSAPTTVIYEDNRRPSGVPDRFSGSIDSASNSASLTISGLKTDDEADYYCQSYDWTDVVFGGGTKLTVL

SEQ ID NO: 10982 - protein, 110 aa, Artificial Sequence
  Synthetic construct
QSVLTQPPSASGTPGQRVTISCSGSSSNIGSKTVKWYQQLPGTAPKLLIFGNNQRPSGVPDRFSGSKSGTSASLAISGLQSEDEADYYCAAWDDSLNGVVFGGGTKLTVL

SEQ ID NO: 10983 - protein, 108 aa, Artificial Sequence
  Synthetic construct
SYVLTLPPSVSVAPGQTARITCGGNNIGSQSVHWYQQKPGQAPVLIIYYDSDRPSGIPERFSGSNSGNTATLTISRVEAGDEADYYCQVWDSTSDNIVFGNGTKVTVL

SEQ ID NO: 10984 - protein, 109 aa, Artificial Sequence
  Synthetic construct
EIVLTQSPATLSLSPGERATLSCRASQSVSSYLAWYQQKPGQAPRLLIYDASNRATGIPARFSGSGSGTDFTLTISSLEPEDFAVYYCQQRSNWPPRYTFGQGTKLEIK

SEQ ID NO: 10985 - protein, 107 aa, Artificial Sequence
  Synthetic construct
DIQMTQSPSSLSASVGDRVTITCRASQSISNYLNWYQLKPGKAPKVLIYAASGLQSGVPSRFSGGGSGTDFTLTISSLQPEDLATYYCQQSYGAPWTFGQGTKVGMK

SEQ ID NO: 10986 - protein, 110 aa, Artificial Sequence
  Synthetic construct
QSALTQPASVAGSPGQSITISCTGTSSDVGSYDHVSWFQQHAGKGPNLVIFDVNSRPSGVSNRFSGSKSGNTASLTISGLQAEDEADYYCFSYTTRGTRVFGSGTTVIVV

SEQ ID NO: 10987 - protein, 111 aa, Artificial Sequence
  Synthetic construct
QSVLTQPPSVSGAPGQRVTISCTGSSSNIGAGYDVHWYQQLPGTAPKLLIYADSNRPSGVPDRFSGSKSGTSASLAITGLQAEDEADYYCQSYDSSLSVWVFGGGTQLTVL

SEQ ID NO: 10988 - protein, 110 aa, Artificial Sequence
  Synthetic construct
QSALTQPASVSGSPGQSITISCTGTSSDVGSYNLVSWYQQHPGKAPKLMIYEANKRPSGVSNRFSGSKSGNRASLTISGLQAEDESDYYCCSYAGSSTWVFGGGTKVTVV

SEQ ID NO: 10989 - protein, 113 aa, Artificial Sequence
  Synthetic construct
DIVMTQSPDSLVVSLGERATINCRSSQSILYNSDNKNYLAWYQQKPGQPPHLLIYWASARQSGVPDRFSGSGSGTDFTLTISSLQAEDVAIYYCQQYYSAPYTFGQGTKLEIK

SEQ ID NO: 10990 - protein, 109 aa, Artificial Sequence
  Synthetic construct
QSALTQPPSASGSPGQSVTISCTGTSSDVGGYNYVSWYQQHPGKAPKLMIYEVSKRPSGVPDRFSGSKSGNTASLTVSGLQAEDEADYYCSSYVGSNNLFGGGTKLTVL

SEQ ID NO: 10991 - protein, 112 aa, Artificial Sequence
  Synthetic construct
DIVMTQSPLSLPVTPGEPASISCRSSQSLLHSNGYNYLDWYLQKPGQSPQLLIYLGSTRASGVPDRFSGSGSGTDFTLKISRVEAEDVGVYYCMQPLQTPRTFGQGTKVEIK

SEQ ID NO: 10992 - protein, 107 aa, Artificial Sequence; identical to SEQ ID NO: 3215
  Synthetic construct

SEQ ID NO: 10993 - protein, 107 aa, Artificial Sequence
  Synthetic construct
DIQMTQSPSTLSASVGDRVTITCRASQSISSWLAWYQQKPGKAPKLLIYKASSLESGVPSRFSGSGSGTEFTLTISSLQPDDFASYYCQQYHSYPRTFGQGTKVEIK

SEQ ID NO: 10994 - protein, 107 aa, Artificial Sequence
  Synthetic construct
DIQMTQSPSSLSASVGDRVTITCRASQGISNFLAWFQQKPGKAPKSLIYAASSLQSGVTSKFSGSGSGTDFTLTISSLQPEDFATYYCQQYNSYPITFGQGTRLEIK

SEQ ID NO: 10995 - protein, 108 aa, Artificial Sequence
  Synthetic construct
EIVLTQSPGTLSLSPGERATLSCRASQSISGSYLAWYLQKPGQAPRLLIYGASNRATGIPDRFSGSGSGTDFTLTISRLEPEDFAVYYCQQYGSSRLTFGPGTKVDIK

SEQ ID NO: 10996 - protein, 110 aa, Artificial Sequence
  Synthetic construct
NFMLTQPHSVSESPGKTVTISCTGSSGSIASNYVQWYQQRPGSAPTTVIYEDTQRASGVPDRFSGSIDSTSNSASLTISGLRAEDEADYYCQSYDWTNVVFGGGTKLTVL

SEQ ID NO: 10997 - protein, 107 aa, Artificial Sequence
  Synthetic construct
DIQLTQSPSFLSAAVGDRATITCRASQGISSYLAWYQQKPGKAPKLLIYAASTLQSGVPSRFSGGGSGTEFTLTISSLQPEDFATYYCQQLNSYPITFGQGTRLEIK

SEQ ID NO: 10998 - protein, 111 aa, Artificial Sequence
  Synthetic construct
QSALTQPASVSGSPGQSITISCTGSSSDIGGYNYVSWYQQHPGKAPKLILYDVRNRPSGVSNRFSGSKSGNTASLTISGLQAEDEADYYCSSYISSSTYVVFGGGTKLTVL

SEQ ID NO: 10999 - protein, 110 aa, Artificial Sequence
  Synthetic construct
QSALTQPASVSGSPGQSITISCTGTSSDVGAYNYVSWYQQHPGKAPKFMIYDVSNRPSGVSNRFSGSKSANTASLTISGLQAEDEADYYCSSYTSDNTLVFGGGTKLTVL

SEQ ID NO: 11000 - protein, 107 aa, Artificial Sequence
  Synthetic construct
DIQLTQSPSFLSASVGDRVTITCRASQGISSYLAWYQQKPGKAPKLLIYAASTLQSGVPSRFSGSGSGTEFTLTISSLQPEDFATYYCQQLNSYPITFGQGTRLEIK

SEQ ID NO: 11001 - protein, 110 aa, Artificial Sequence
  Synthetic construct
QSALTQPASVSGSPGQSITISCTGTSSDVGGYNYVSWYQQHPGKAPKLMIYDVSNRPSGVSNRFSGSKSGNTASLTISGLQAEDEADYYCSSYTSSSTVVFGGGTKLTVL

SEQ ID NO: 11002 - protein, 107 aa, Artificial Sequence
  Synthetic construct
EIVLTQSPATLSLSLGERATLSCRASQSVNTYLAWYQQKPGQAPRLLIYDAFNRATGIPARFSGSGSETDFTLTISSLEPEDFAVYFCQHRRSWPLTFGPGTRVDIK

SEQ ID NO: 11003 - protein, 108 aa, Artificial Sequence
  Synthetic construct
EIVMTQSPATLSVSPGERATLSCRASQSVNNNLAWYQQKPGQAPRLLIYGASTRATGIPARFSGSGSGTEFTLTISSLQSEDFAVYYCQQYSIWPPYTFGQGTKLEIK

SEQ ID NO: 11004 - protein, 108 aa, Artificial Sequence
  Synthetic construct
EIVMTQSPATLSVSPGERATLSCRASQSVSRDLAWYQQKPGQAPRLLIYGASTRATGIPARFSGSGSGTEFTLTISSLQSEDFAVYYCQQYNNWPPLTFGGGTKVEIK

SEQ ID NO: 11005 - protein, 106 aa, Artificial Sequence
  Synthetic construct
SYELTQPPSVSVSPGQTARITCSGDALPKQYAYWYQQKPGQAPVLVIYKDSERPSGIPERFSGSSSGTTVTLTISGVQAEDEADYYCQSADSSYVVFGGGTKLTVL

SEQ ID NO: 11006 - protein, 108 aa, Artificial Sequence
  Synthetic construct
DIQMTQSPSSLSASVGDRVTFTCRASQTISSYLNWYQQKPGKAPKLLIYAASNLQGGVPSRFSGSGSGTDFTLTISSLQPEDFATYYCQQSYSSPPWTFGQGTKVEIK

SEQ ID NO: 11007 - protein, 109 aa, Artificial Sequence
  Synthetic construct
QSVLTQPPSASGTPGQRVTISCSGSSSNIGSNYVYWYQQLPGTAPKLLIYRNNQRPSGVPDRFSGSKSGTSASLAISGLRSEDEADYYCATWDDSLSGVFGGGTKLTVL

SEQ ID NO: 11008 - protein, 108 aa, Artificial Sequence
  Synthetic construct
SYVLTQPPSVSVAPGKTARITCGGNNIGSYSVHWYQQKPGQAPVVVIHYDSDRPSGIPERFSGSNSGNTATLTISRVEAGDEADYYCQVWDSSSDHYVFGIGTKVTVL

SEQ ID NO: 11009 - protein, 111 aa, Artificial Sequence
  Synthetic construct
QSVLTQPPSVSGAPGQRVTISCTGSNSNIGAGYDVHWYQQLPGTAPKLLIYVNSNRPSGVPDRFSGSKSGTSASLAISGLQAEDEADYYCQSYDSSLSALVFGGGTKLTVL

SEQ ID NO: 11010 - protein, 106 aa, Artificial Sequence
  Synthetic construct
DIQMTQSPSSLSASVGDRVTITCQASQDISNYLNWYQQKPGKAPKLLIYDASNLETGVPSRFSGSGSGTDFTFTISSLQPEDIATFYCQQYDNLPTFGGGTKVEIK

SEQ ID NO: 11011 - protein, 109 aa, Artificial Sequence
  Synthetic construct
EVVLTQSPATLSLSPGESATLSCRASQSVSTYLAWYQQKPGQAPRLLIYDASKRATGIPARFRGSGSGPDFTLTISSLEPEDFAVYYCQQRSTRPPTWTFGPGTTVEVK

SEQ ID NO: 11012 - protein, 112 aa, Artificial Sequence
  Synthetic construct
DIVMTQTPLSSPVTLGQPASITCRSSQSLAHSDGNTYLSWLQQRPGQPPRLLIYKISKRFSGVPDRFSGSGAGTDFTLKINRVEAEDVGVYYCMQATQFPWTFGQGTKVEIK

SEQ ID NO: 11013 - protein, 108 aa, Artificial Sequence; identical to SEQ ID NO: 11004
  Synthetic construct

SEQ ID NO: 11014 - protein, 110 aa, Artificial Sequence
  Synthetic construct
QSALTQPASVSGSPGQTITISCTGTSSDIGSYNYDSWYQLHPGKSPKLLIYEVSNRPSGVSNRFSGSKSGNTASLTISGLQAEDEADYYCGSYSRVSTHVFGSGTKVTVL

SEQ ID NO: 11015 - protein, 112 aa, Artificial Sequence; identical to SEQ ID NO: 3153
  Synthetic construct

SEQ ID NO: 11016 - protein, 107 aa, Artificial Sequence
  Synthetic construct
DIQMTQSPSSLSASVGDRITITCRASQGISNYLAWYQQKPGKVPKLLIYAASTLQSGVPSRFSGSGSGTDFTLTISSLQPEDVATYYCQKYNIVPPTFGQGTKVEIK

SEQ ID NO: 11017 - protein, 108 aa, Artificial Sequence
  Synthetic construct
EIVLTQSPATLSLSPGERATLSCGASQTVSSSYLAWYQQKPGLAPRLLIYDASSRATGIPDRFSGSGSGTDFTLTISRLEPEDFAVYYCQQYGSAPRTFGQGTTLEIK

SEQ ID NO: 11018 - protein, 107 aa, Artificial Sequence
  Synthetic construct
DIQMTQSPSSLSASVGDRVTITCRASQSISSYLNWYQQKPGKAPNLLIYAASSLQSGVPSRFSGSGSGTDFTLTISSLQPEDFATYYCQQSYNTPPGFGGGTKVVIR

SEQ ID NO: 11019 - protein, 110 aa, Artificial Sequence
  Synthetic construct
QTVVTQEPSFSVSPGGTVTLTCGLSSGSVSTTYYPCWYQQTPGQAPRTLIYSTNTRASGVPDRFSGSILGNKAALTITGAQADDESDYYCVLFMGSGIWVFGGGTKLTVL

SEQ ID NO: 11020 - protein, 108 aa, Artificial Sequence
  Synthetic construct
SYVLTQPPSVSVAPGETAVITCGGKNIGRKSVHWYQQKSGQAPLLIIFYNSDRPSGIPERFSGSNSGNTATLTISRVEAGDEADFYCQVWDSFSDQAVFGPGTTVTVL

SEQ ID NO: 11021 - protein, 108 aa, Artificial Sequence
  Synthetic construct
EIVLTQSPGTLSLSPGERATLSCRASQSVGSSYLAWYQQKPGQAPRLLIYAASSRATGIPDRFSGSGSGTDFTLTISRLEPEDFAVYYCQQYGSSPWTFGQGTKVEFK

SEQ ID NO: 11022 - protein, 108 aa, Artificial Sequence
  Synthetic construct
DTVMTQSPATLSVSPGERATLSCRASQSVSSNLAWYQQKPGQPPRLLIYGASSRATGIPARFSGSGSGTEFTLTISSLQSEDFAVYYCQQYNNWPLITFGQGTRLEIK

SEQ ID NO: 11023 - protein, 110 aa, Artificial Sequence
  Synthetic construct
QSALTQPASVSGSPGQSITISCTGGNSDIGSYDHVSWFQQHAGRAPKLMIYDVTNRPSGVSNRFSGSKSGNTASLTISGLQAEDEADYYCSSYTSSGTRVFGSGTTVTVL

SEQ ID NO: 11024 - protein, 106 aa, Artificial Sequence
  Synthetic construct
SYELTQPPSVSVSPGQTARIPCSGDALPNRYAHWYQQKPGQAPVLVIYKDTERPSGIPERFSGSSSGTIVTLTISGVQAEDEADYYCQSADSSGVVFGGGTKLTVL

SEQ ID NO: 11025 - protein, 111 aa, Artificial Sequence
  Synthetic construct
QSALTQPPSASGSPRQSVTISCTGTSSDVGGYNYVSWYQQHPGKAPKLMIYEVTKRPSGVPDRFSGSKSGNTASLTVSGLQAEDEADYYCSSYAGTYNFVVFGGGTRLTVL

SEQ ID NO: 11026 - protein, 107 aa, Artificial Sequence
  Synthetic construct
EIVMTQSPATLSVSPGERATLSCRASQSVSSKLAWYQQKPGQAPRLLIYGASNRATGIPARFSGSGSGTEFTLTISSLQSEDFAVYYCQQYSNWPLTFGGGTKVEVK

SEQ ID NO: 11027 - protein, 108 aa, Artificial Sequence
  Synthetic construct
SYELTQPPSVSVSPGQTARITCSGDALPTKYAYWYQQRSGQAPVLVIYEDNKRPSGIPERFSGSSSGTMATLTISGAQVEDEADYYCYSTDNSGNGRVFGGGTKLTVL

SEQ ID NO: 11028 - protein, 107 aa, Artificial Sequence
  Synthetic construct
EIVLTQSPATLSLSPGERATLSCRASQSVSSYLAWYQQKPGQAPRLLIYDASNRATGIPARFSGSGSGTDFTLTISSLEPEDFAVYYCQQRNNWPLTFGGGTKVEIK

SEQ ID NO: 11029 - protein, 109 aa, Artificial Sequence
  Synthetic construct
QSALTQPRSVSGSPGQSVTIACTGTSSDIGAYNYVSWYQQHPGTAPKLMIYDVSRRPSGVPDRFSGSKSDNTASLTISGLRAEDSADYYCCSYAGSYVVFGGGTKLTVL

SEQ ID NO: 11030 - protein, 107 aa, Artificial Sequence
  Synthetic construct
EIVMTQSPATLSVSPGERATLSCRASQSVSSNLAWYQQKPGQAPRLLIYGASTRATGIPARFSGSGSGTEFTLTISSLQSEDFAVYYCQQYNNWPLTFGGGTKVEIK

SEQ ID NO: 11031 - protein, 108 aa, Artificial Sequence
  Synthetic construct
EIVMTQSPATLSVSPGERATLSCRASQSVSSNLAWYQQKAGQAPRLLIYGASTRATGIPARFSGSGSGTEFTLTISSLQSEDFAVYYCQHYNNWPPYTFGQGTKLEIK

SEQ ID NO: 11032 - protein, 107 aa, Artificial Sequence
  Synthetic construct
DIQMTQSPSSLSASVGDRVTITCRASQGISNYLAWVQQKPGTAPRSLIYAASSLLSGVPSRFSGSGSGTDFTLTISSLQPEDFATYYCQQYNSYPRTFGQGTKVEIK

SEQ ID NO: 11033 - protein, 107 aa, Artificial Sequence
  Synthetic construct
SYELTQPPSVSVSPGQTARITCSGDALPKKYAYWYQQKSGQAPVLVIYEDNKRPSGIPERFSGSSSGTMATLTISGAQVEDEADYYCYSTDSSGNPLFGGGTNLTVL

SEQ ID NO: 11034 - protein, 109 aa, Artificial Sequence
  Synthetic construct
SSELTQDPAVSVALGQTVRITCQGDSLRSYYASWYQQKPGQAPVLVIYGKNKRPSGIPDRFSGSTSGNTASLTITGAQAEDEADYYCNSRDSSGNHYVVFGGGTKLTVL

SEQ ID NO: 11035 - protein, 107 aa, Artificial Sequence
  Synthetic construct
DIQMTQSPSSLSASVGDRVTFTCRASQGISNYLAWYQQKPGKVPNLLIYAASTLQSGVPSRFSGSGSGTDFTLTISSLQPEDVATYYCQKYNSAPPTFGQGTKVEIK

SEQ ID NO: 11036 - protein, 110 aa, Artificial Sequence
  Synthetic construct
QSALTQPASVSGSPGQSITISCTGTSSDVGSYNLVSWYQQHPDKAPKLMIFEGSKRPSGVSNRFSGSKSGNTASLTISGLQAEDEADYYCCSYAGFSTWVFGGGTKLTVL

SEQ ID NO: 11037 - protein, 108 aa, Artificial Sequence
  Synthetic construct
EIVMTQSPATLSVSPGERATLSCRASQSVSSNLAWYQQKPGQAPRLLIYGASTRATGIPARFSGSGSGTEFTLTISSLQSEDFAVYYCQQYNNWPPWTFGQGTKVDIK

SEQ ID NO: 11038 - protein, 112 aa, Artificial Sequence
  Synthetic construct
DIVMTQTPLSSPVTLGQPASISCRSNQSLVHSAGNTFLSWLQQRPGQPPRLLIYKISNRLSGVPDRFSGSGAGTDFTLKISRVEAEDVGVYYCMQATQFPHTFGQGTRLEIK

SEQ ID NO: 11039 - protein, 112 aa, Artificial Sequence
  Synthetic construct
DIVMTQTPLSLSVTPGQPASISCKSSQSLLHSDGKTYLYWYLQKPGQPPQLLMYEVSYRFSGVPDRFSGSGSGTGFTLKISRVEAEDVGVYYCMQSIQLPYTFGQGTKLEIK

SEQ ID NO: 11040 - protein, 112 aa, Artificial Sequence
  Synthetic construct
GIVMTQTPLSLSVTPGQPASISCKSSQSLLHGDGKTYLYWYLQKAGQPPRLLMYEVSYRFSGVPDRFSGSGSRTDFTLKISRVEAEDVGVYYCMQSIQLPYTFGQGTKLEIK

SEQ ID NO: 11041 - protein, 108 aa, Artificial Sequence
  Synthetic construct
EIVLTQSPGTLSLSPGERATLSCRASQSVSSLYLAWFQQKPGQAPRLLIYGASSRATGIPDRFSGSGSGTDFTLTISRLEPEDFAVYYCQQYGSSPWTFGQGTKVEIK

SEQ ID NO: 11042 - protein, 106 aa, Artificial Sequence
  Synthetic construct
EIVMTQSPATLSVSPGERVTLSCRASQSVSSNLAWYKQKPGQAPRLLIYGASIRATGIPARFSGSGSGTEFTLTISSLQSEDFAVYYCQQYNNWLTFGGGTKVDIK

SEQ ID NO: 11043 - protein, 110 aa, Artificial Sequence
  Synthetic construct
QSALTQPASVSGSPGQSITISCTGTSSDVGGYNYVSWYQQHPGKAPKLMIYDVSDRPSGVSNRFSGSKSGNTASLTISGLQAEDEADYYCSSYTSSSTLVFGGGTKLTVL

SEQ ID NO: 11044 - protein, 109 aa, Artificial Sequence
  Synthetic construct
EIVLTQSPGTLSLSPGERATLSCRASQSVSSSYLAWYQQRPGQAPRLLIYGASSRATGIPDRFSGSGSGTDFTLTISRLEPEDFAVYSCQQYGGSTGYTFGQGTKLEIK

SEQ ID NO: 11045 - protein, 109 aa, Artificial Sequence
  Synthetic construct
EIVLTQSPSTLSLSPGERAALSCRASQSVSNNYLAWYQQKPGQAPRLLMYGASTRATGIPERFSGSGSGTDFTLIINKVEPEDLAVYYCHQYGYSLPNTFGQGTKLEIK

SEQ ID NO: 11046 - protein, 112 aa, Artificial Sequence
  Synthetic construct
DIVMTQFPLSLPVTPGEPASISCRSSQSLLHSNGYNYLDWYLQKPGQSPQLLIYLGSNRASGVPDRFSGSGSGTDFTLKISRVDAEDVGVYYCMQALQTPITFGQGTRLEIK

SEQ ID NO: 11047 - protein, 109 aa, Artificial Sequence
  Synthetic construct
QSALTQPASVSGSPGQSISISCTGTSSDVGNYNLVSWYQQHPGKAPKLMIYEGSKRPSGVSNRFSGSTSGNTASLTISGLQAEDEADYYCCSYAGSSPVFGGGTKLTVL

SEQ ID NO: 11048 - protein, 106 aa, Artificial Sequence; identical to SEQ ID NO: 2609
  Synthetic construct

SEQ ID NO: 11049 - protein, 112 aa, Artificial Sequence
  Synthetic construct
DIVMTQSPDYLAVSLGERATINCKSSQTVLYSSNNLNYLAWYQQKAGQPPKLLIYWASTRESGVPDRFSGSGSGTDFTLTISSLRAEDVAVYYCQQYYTTVTFGQGTKVEIK

SEQ ID NO: 11050 - protein, 106 aa, Artificial Sequence
  Synthetic construct
SYELTQPPSVSVSPGQTASITCSGDKLGDKYACWYQQKPGQSPVLVIYEDSKRPSGIPERFSGSNSGNTAALTISGTQAMDEADYYCQAWGSSTAVFGTGTKVTVL

SEQ ID NO: 11051 - protein, 107 aa, Artificial Sequence
  Synthetic construct
EIVLTQSPATLSLSPGERATLSCRASQSVTNYLAWYQQKVGQAPRLLIYDASNRATGIPARFSGSGSGTDFTLIISSLEPGDSAVYYCQQRSNWPPTFGQGTKVEIK

SEQ ID NO: 11052 - protein, 108 aa, Artificial Sequence
  Synthetic construct
DIQLTQSPSFLSASVGDRVTITCRASQGISTYLAWYQQKPGKAPKLLISAASTLQSGVPSRFSGSGSGTEFTLTISSLQPEDFATYYCQQLNSYPEITFGPGTKVDIK

SEQ ID NO: 11053 - protein, 112 aa, Artificial Sequence
  Synthetic construct
DIVMTQSPLSLPVTPGEPASISCRSSQSLLHSNGYKYLDWYLQKPGQSPQLLIFLGSNRASGVPDRFSGSGSGTDFTLKISRVEAEDVGVYYCMQALQTPYTFGQGTKLEIK

SEQ ID NO: 11054 - protein, 107 aa, Artificial Sequence
  Synthetic construct
EIVMTQSPATLSVSPGERATLPCRASQSVTSSLAWYQQKPGQAPRLLIYGASTRATGIPARFSGSGSGTEFTLTISSLQSEDFAVYYCQQYNDWPGTFGQGTKVEIK

SEQ ID NO: 11055 - protein, 108 aa, Artificial Sequence
  Synthetic construct
EIVLTQSPGTLSLSPGERATLSCRASQGVSSSYLAWYQQKPGQAPRLLIYGASSRATGIPDRFSGSGSGTDFTLTISRLEPEDFAVYYCQQYGSSPGTFGQGTKVEIK

SEQ ID NO: 11056 - protein, 107 aa, Artificial Sequence
  Synthetic construct
DIQMTQSPSPLSASVGDRVTITCRASQSISNYLNWYQQKPGKAPKVLIYAASRVQSGVPSRFSGSGSGTDFTLTISSLQPEDFATYYCQQSYSTPLTFGGGTKVEIK

SEQ ID NO: 11057 - protein, 107 aa, Artificial Sequence
  Synthetic construct
SYELTQPPSVSVSPGQTATITCSGEKLGNKYTSWYQQKPGQSPLVVIYEDRKRPSGIPERFSGSTSANTATLTITGTQAVDEADYYCQAWDTSTFYVFGPGTKLTVL

SEQ ID NO: 11058 - protein, 113 aa, Artificial Sequence
  Synthetic construct
DIVMTQSPDSLAVSLGERATINCKSSQSVLYSSNNKNYLAWYQQKPGQPPKLLIYWASTRESGVPDRFSGSGSGTDFTLTISSLQAEDVAVYFCQQYYSAPRTFGQGTKVEIK

SEQ ID NO: 11059 - protein, 110 aa, Artificial Sequence
  Synthetic construct
QSALTQPASVSGSPGQSITISCTGTSSDVGSYDHVSWFQQHAGKGPNVVIFDVNSRPSGVSNRFSGSKSGNTASLTISGLQAEDEADYYCFSYTSGGTRVFGSGTTVTVV

SEQ ID NO: 11060 - protein, 107 aa, Artificial Sequence
  Synthetic construct
DIQMTQSPSSLSASVGDRVTITCQASQDISNSLNWYQQKPGKAPNLLIYDASTLETGVPSRFSGSGSGTDFTFTISSLQPEDIATYYCQHYDNLPPTFGPGTKVDIK

SEQ ID NO: 11061 - protein, 107 aa, Artificial Sequence
  Synthetic construct
EIVMTQSPATLSVSPGERATLSCRAGQSVSRNLAWYQQKPGQAPRLLIYGASTRATGIPARFSASGSGTEFTLTISSLQPEDSAVYYCQHYHNWPSMFGQGTKVEIK

SEQ ID NO: 11062 - protein, 111 aa, Artificial Sequence
  Synthetic construct
QSVLTQPPSVSGAPGQRVTISCTGSSSNIGAGYDVHWYQRLPGTAPKLLIYGNSNRPSGVPDRFSGSKSGTSASLAISGLQAEDEADYYCQSYDSSLSGVLFGGGTKLTVL

SEQ ID NO: 11063 - protein, 112 aa, Artificial Sequence
  Synthetic construct
DIVMTQFPLSLPVTPGEPASISCRSSQSLLHSNGYNYLDWYLQKPGQSPQLLIYLGSNRASGVPDRFSGSGSGTDFTLKISRVEAEDVGVYYCMQALQTPITFGQGTRLEIK

SEQ ID NO: 11064 - protein, 107 aa, Artificial Sequence
  Synthetic construct
DIQMTQSPSSLSASVGDRVTITCRASQGISNSLAWFQQKPGKVPKLLIYDASALQSGVPSRFSGSGSGTDFTLTISSLQPEDVATYYCQKYNSAPLTFGQGTKVDIK

SEQ ID NO: 11065 - protein, 110 aa, Artificial Sequence; identical to SEQ ID NO: 2486
  Synthetic construct

SEQ ID NO: 11066 - protein, 106 aa, Artificial Sequence
  Synthetic construct
EIVMTQSPATLSVSPGERATLSCRASQSVSSNLAWYQQKPGQAPRLLIYGASTRATGIPARFSGSGSGTEFTLTISSLQSEDFAVYYCQQYDNWLTFGGGTKVEIK

SEQ ID NO: 11067 - protein, 106 aa, Artificial Sequence
  Synthetic construct
DIQMTQSPSSLSASVGDGVTISCQTSKDISIHLNWYQHKPGKAPKLLIYDASNLEAGAPSRFSGSGSGTDFTFTISSLQPEDFATYYCQHYDDLPRFGPGTKVDIK

SEQ ID NO: 11068 - protein, 113 aa, Artificial Sequence
  Synthetic construct
DIVMTQSPESLPVSLGERATINCKSSQSILDSSNNKNYLAWYQQTPGQPPQMIIYWASTRESGVPDRFSGSGSGTDFTLTISSLQAEDVAVYYCQQYYSTPYTFGQGTKLEIK

SEQ ID NO: 11069 - protein, 106 aa, Artificial Sequence
  Synthetic construct
SYELTQPPSVSVSPGQTASITCSGDKLGDKYACWYQQKPGQSPVLVIYQDSKRPSGIPERFSGSNSGNTATLTISGTQAMDEADYYCQAWDSSTAVFGGGTKLTVL

SEQ ID NO: 11070 - protein, 112 aa, Artificial Sequence
  Synthetic construct
QSALTQPASVSGSPGQSITISCTGTSGDVGSYNLVSWYQQHPGKAPKLIIYEGDRRPSGVSSRFSGSKSGNTASLRISGLQAEDEADYHCCSYARRSSPYVVFGGGTKLTVL

SEQ ID NO: 11071 - protein, 107 aa, Artificial Sequence
  Synthetic construct
DIQMTQSPSTLSASVGDRVTITCRASQSISNWLAWYQQKPGKAPKLLIYEASSLQSAVPSRFSGSGSGTEFTLTINSLQPDDFATYYCQQYNSYPLSFGGGTKVEIK

SEQ ID NO: 11072 - protein, 110 aa, Artificial Sequence
  Synthetic construct
QSALTQPASVSGSPGQSITISCTGTSSDVGSYNLVSWYQQHPGKAPKLMIYEASKRPSGVSNRFSASKSGNTASLTISGLQAEDEAGYYCCSYAGSSTWVFGGGTKLTVL

SEQ ID NO: 11073 - protein, 110 aa, Artificial Sequence
  Synthetic construct
QSALTQPASVSGSPGQSITISCTGTSGDVGSYNLVSWYQQHPGKAPKLMIYGVSKRPSGVSNHFSGSKSGNTASLTISGLQAEDEADYYCCSYAGSSTWVFGGGTKLTVL

SEQ ID NO: 11074 - protein, 106 aa, Artificial Sequence
  Synthetic construct
SYELTQPPSVSVSPGQTASVTCSGDKLGDKYVCWYQQKPGQSPVLVIYQDNKRPSGIPERFSGSNSENTASLTISGTQAMDEADYYCQAWDSSTVVFGGGTKLTVL

SEQ ID NO: 11075 - protein, 112 aa, Artificial Sequence; identical to SEQ ID NO: 10847
  Synthetic construct

SEQ ID NO: 11076 - protein, 110 aa, Artificial Sequence
  Synthetic construct
QSVLTQPPSVSAAPGQKVTISCSGSSSNIGDNYVSWYQLLPGTAPRLLIYENNKGPSGIPDRFSGSKSGTSATLGITGLQTGDEADYYCGTWDSSLSAWVFGGGTKLTVL

SEQ ID NO: 11077 - protein, 107 aa, Artificial Sequence
  Synthetic construct
DIQMTQSPSSLSTSVGDRVTITCQASQDISKYLNWYQQKPGKAPKLLISDASNLETGVPSRFSGSGSGTDFSFTISSLQPEDIATYYCQQYDNLPLTFGGGTKVEIR

SEQ ID NO: 11078 - protein, 110 aa, Artificial Sequence
  Synthetic construct
QSVLTQPPSVSEAPRQRVTISCSGSSSNIENNAVNWYQQFPEKAPKLLIFHDDLLPSGVSDRFSGSKSGTSASLAISGLQSEDEADYYCAAWDDSLNGPVFGGGTKVTVL

SEQ ID NO: 11079 - protein, 112 aa, Artificial Sequence
  Synthetic construct
YIVMTQSPLSLPVTPGEPASISCRSSQSLLNSNGNNNLHWYLQKAGQSPHLLIYLGSNRASGVPDRFSGSGSGTDFTLKISRVEAEDVGVYYCMHAVHAPYTFGQGTKLEIK

SEQ ID NO: 11080 - protein, 110 aa, Artificial Sequence
  Synthetic construct
QSALTQPASVSGSPGQSITISCTGTSTDIGIYSYVSWYQQHPGKAPKLIIYDVSNRPSGPSNRFSGSKSGNTASLTISGLQAEDEAVYYCNSYTITGTWVFGGGTKLTVL

SEQ ID NO: 11081 - protein, 110 aa, Artificial Sequence
  Synthetic construct
QSALTQPASVSGSPGQSITISCTGSNSDIGSYDHVSWFQQHAGRAPKLMIYDVTNRPSGVSNRFSGSKSGNTASLTISGLQAEDEADYYCSSYTSSATRVFGSGTAVTVL

SEQ ID NO: 11082 - protein, 110 aa, Artificial Sequence
  Synthetic construct
QSALTQPASVSGSPGQSITISCTGTSSDVGGYNYVSWYQQHPGKAPKLMIYDVSNRPSGVSNRFSGSKSGNTASLTISGLQAEDEADYYCSSYTSSSTLVFGGGTKLTVL

SEQ ID NO: 11083 - protein, 109 aa, Artificial Sequence
  Synthetic construct
EIVLTQSPATLSLSPGERATLSCRASQSVTNFLAWYQHKPGQAPRLLIYDASNRATGIPARFSGSGSGTDFTLTISSLEPEDFAVYYCQHRSNWPPVLTFGGGTKVEIK

SEQ ID NO: 11084 - protein, 108 aa, Artificial Sequence
  Synthetic construct
SSELTQDPAVSVALGQTFRITCQGDSLRRYYASWYQQKPGQAPVLVIYDKNNRPSGIPDRFSGSSSRDTASLTITGAQAEDEADYYCNSRDSSGNHFVFGTGTKVSVL

SEQ ID NO: 11085 - protein, 109 aa, Artificial Sequence
  Synthetic construct
EIVLTQSPATLSLSPGERATLSCRASQTVSSFLAWYQQKPGQAPRLLIYDASNRATGIPARFSGSGSGTDFTLTISSLEPEDFAVYYCQQRSNWPPIFTFGPGTKVDIK

SEQ ID NO: 11086 - protein, 110 aa, Artificial Sequence
  Synthetic construct
QSALTQPASVSGSPGQSITISCSGTSSDVGSYDHVSWFQQHAGKGPNLVIFDVNSRPSGVSNRFSGSKSGNTASLTISGLQAEDEADYYCFSYTSRGTRVFGTGTTVTVV

SEQ ID NO: 11087 - protein, 112 aa, Artificial Sequence
  Synthetic construct
DIVMTQSPDSLAVSLGERATINCKSSQSLFYNSNNKNYLAWYQQKAGQPPKLLISWASTRESGVPDRFSGGGSGTDFTLTISSLQPEDVAVYYCQQYYDSPHFGPGTKVEIK

SEQ ID NO: 11088 - protein, 107 aa, Artificial Sequence
  Synthetic construct
SYELTQPPSVSVSPGQTARIACSGDALPKKYAYWYQQKSGQAPVLVIYEDSKRPSGIPERFSGSSSGTMATLTVTGAQVEDEADYYCYSTDSSGKGVFGGGTKLTVL

SEQ ID NO: 11089 - protein, 111 aa, Artificial Sequence
  Synthetic construct
QSVLTQPPSVSGAPGQRVTISCTGSSSNIGADYDVHWYQQLPGTAPKLLIYGNSNRPSGVPDRFSGSQSGTSASLAITGLQAEDEADYYCQSYDSSLSGAVFGGGTKLTVL

SEQ ID NO: 11090 - protein, 105 aa, Artificial Sequence
  Synthetic construct
SYELTQPLSVSVALGQTARITCGANSIGSKNVHWYQQKPGQAPVVVIYRDSNRPSGIPERFSGSNSGNTATLTISRAQVGDEADYYCQVWDSGVLFGGGTKLTVL

SEQ ID NO: 11091 - protein, 109 aa, Artificial Sequence
  Synthetic construct
EIVLTQSPGTLSLSPGERATLSCRASQSVSSSYLAWYQQKPGQAPRLLIYGASSRATGIPDRFSGSGSGTDFTLTISRLEPEDFAVYYCQQYGSSPPITFGQGTRLEIK

SEQ ID NO: 11092 - protein, 111 aa, Artificial Sequence
  Synthetic construct
QSVLTQPPSVSGAPGQRVTISCTGSSSNIGARYDVHWYQQLPGTAPKLLIYANNNRPSGVPDRFSGSKSGTSASLAISGLQAEDEADYYCQSYDSSLTALVFGGGTKLTVL

SEQ ID NO: 11093 - protein, 111 aa, Artificial Sequence
  Synthetic construct
QSVLTQPPSVSAAPGQKVTISCSGNTSNIGNNYVCWYQQFPGTAPKLLIYENNKRPSGIPDRFSGSKSGTSATLAISGLQTGDEADYYCGSWDTSLSSGQAFGGGTKLTVL

SEQ ID NO: 11094 - protein, 113 aa, Artificial Sequence
  Synthetic construct
DIVMTQSPLSLPVTPGEPASISCRSSQSLLHSNGYNYLDWYLQKPGQSPQLLIYLGSNRASGVPDRFSGSGSGTDFTLKISRVEAEDVGVYYCMQALQTPRYTFGQGTKLEIK

SEQ ID NO: 11095 - protein, 108 aa, Artificial Sequence
  Synthetic construct
QSALTQPASVSGSPGQSITISCTGTSSDVGSYNLVSWYQQHPGKAPKLIIYEGSKRPSGVSHRFSGSKSANTASLTISGLQAEDEADYYCCSYTETWVFGGGTKLTVL

SEQ ID NO: 11096 - protein, 113 aa, Artificial Sequence
  Synthetic construct
DIVMTQSPDSLAVSLGERATINCKSSQSVLYTSNNKNFLAWYQQKPGQPPKLLIYWASSRESGVPDRFSGSGSGTDFTLTISSLQAEDVAVYYCQQYYSTPETFGQGTKVEIK

SEQ ID NO: 11097 - protein, 110 aa, Artificial Sequence
  Synthetic construct
QSALTQPPSASGSPGQSVTISCTGTSSDVGGYNYVSWYQHHPGKAPKLMIYEVTKRPSGVPDRFSGSKSGYTASLTVSGLQAEDEADYYCFSYAGSDGVLFGGGTKLTVL

SEQ ID NO: 11098 - protein, 111 aa, Artificial Sequence
  Synthetic construct
QSVLTQPPSVSGAPGQRVTISCTGSSSSIGAGYDVHWYQQLPGTAPKLLIYTNNNRPSGVPDRFSGSRSGTSASLAITGLQAEDEADYYCQSWDNSLSGSVFGGGTKLTVL

SEQ ID NO: 11099 - protein, 112 aa, Artificial Sequence
  Synthetic construct
QSVLTQPPSVSGAPGQRVTISCTGSSSNIGAGYDVHWYQQIAGTAPKLLIYVNTNRPSGVPDRFSGSKSGTSASLAITGLQAEDEADYFCQSYDNSLSGPVVFGGGTKLTVL

SEQ ID NO: 11100 - protein, 108 aa, Artificial Sequence
  Synthetic construct
SYELTQPPSVSVSPGQTARITCSGDALPKKYAYWYQQKSGQAPVLVIYEDSKRPSGIPERFSGSSSGTMATLTISGAQVEDEADYYCYSTDSSGNLWVFGGGTKLTVL

SEQ ID NO: 11101 - protein, 106 aa, Artificial Sequence
  Synthetic construct
DIQMTQSPSTLSASVGDRVTITCRASQSISSWLAWYQQKPGRAPKLLIYKASSLESGVPSRFSGSGSGTEFTLTISSLQPDDFATYYCQQYNSYWTFGQGTKVEIK

SEQ ID NO: 11102 - protein, 111 aa, Artificial Sequence
  Synthetic construct
QSVLTQPPSVSGAPGQRVTISCTGSSSNIGAGYDVHWYQQLPGTAPKLLIYGNSNRPSGVPDQFSGSKSGTSASLAITGLQAEDEADYYCQSYDSSLSGVVFGGGTKLTVL

SEQ ID NO: 11103 - protein, 112 aa, Artificial Sequence
  Synthetic construct
QSALTQPPSASGSPGQSVTISCTGTSSDVGGYNYVSWYQQHPGKAPKLMIYEVTKRPSGVPDRFSGSKSGNTASLTVSGLQAEDEAEYYCSSYAGSNNFYVVFGGGTELTVL

SEQ ID NO: 11104 - protein, 109 aa, Artificial Sequence
  Synthetic construct
EIVLTQSPATLSLSPGERATLSCRASQSVSSYLAWYQQKPGQAPRLLIYDASNRATGIPARFSGSGSGTDFTLTISSLEPEDFAVYYCQQRSNWPPRITFGQGTRLEIK

SEQ ID NO: 11105 - protein, 107 aa, Artificial Sequence
  Synthetic construct
EIVLTQSPATLSLSPGERVTLSCRASQSVNSDLNWYQQKPGRAPRLLLYDVSKRATDIPPRISGTGSGTDFTLTISSLEPGDAAIYYCQHRVSWPWAFGQGTRVDIK

SEQ ID NO: 11106 - protein, 110 aa, Artificial Sequence
  Synthetic construct
QSALTQPASVSGSPGQSITISCTGTSTDFGNFNYVSWYQQHPGKAPKLMIYDVSNRPSGVSNRFSGSKSGNTASLTISGLQAEDEADYYCSSYTSISTVVFGGGTKVTVL

SEQ ID NO: 11107 - protein, 109 aa, Artificial Sequence
  Synthetic construct
EFVLTQSPGTLSLSPGERATLSCRASQSVSSSYLAWYQQRPGQAPRLLIYGASSRATGIPDRFSGSGSGTDFTLTISRLEPEDFAVYYCQQYGSSTGYTFGQGTKLEIK

SEQ ID NO: 11108 - protein, 111 aa, Artificial Sequence
  Synthetic construct
QSVLTQPPSASGTPGQRVTISCSGSSSNIGSNTVNWYQQLPGTAPKLLIYSNNQRPSGVPDRFSGSKSGTSASLAISGLQSEDEADYYCAAWDDSLNGNWVFGGGTKLTVL

SEQ ID NO: 11109 - protein, 109 aa, Artificial Sequence
  Synthetic construct
QSALTQPRSVSGSPGQSVTISCTGTSSDVGGYNYVSWYQQHPGKAPKLMIYDVSKRPSGVPDRFSGSKSGNTASLTISGLQAEDEADYYCCSYAGSYTVFGGGTKLTVL

SEQ ID NO: 11110 - protein, 110 aa, Artificial Sequence
  Synthetic construct
QSALTQPASVSGSPGQSITISCTGTSSDIGTYDHVSWFQQHAGKGPNLVIFDVKSRPSGVSNRFSGSKSGNTASLTISGLQAEDEADYYCFSYRGRGTRVFGTGTTVTVV

SEQ ID NO: 11111 - protein, 106 aa, Artificial Sequence
  Synthetic construct
SYELTQPPSVSVSPGQTASITCSGVKLGNRYASWYQQKPGQSPVLVIYQDTKRPSGIPERFSGSNSGNTVTLTISGTQAMDEAEYYCQAWDSSTVVFGGGTKLTVL

SEQ ID NO: 11112 - protein, 107 aa, Artificial Sequence
  Synthetic construct
EIVMTQSPDTLSVSPGERATLSCRASQSVSSNLAWYQQKPGQAPRLLLYGASTRATGIPARFTGSGSGTEFTLTISSLQSEDFAVYYCQQYNNWPYTFGQGTKLEIK

SEQ ID NO: 11113 - protein, 110 aa, Artificial Sequence
  Synthetic construct
QSALTQPASVSGSPGQSITISCTGTTSDVGVYDYVSWYQQNPGKAPKLMIYDVSNRPSGVSSRFSGSKSGNTASLTISGLQAEDEADYYCSSYTSSSTVVFGGGTKLTVL

SEQ ID NO: 11114 - protein, 106 aa, Artificial Sequence
  Synthetic construct
SYELTQPPSVSVSPGQTASITCSGDKLGSKSASWYQQKPGQSPILVIYQATKRPSGIPERFSGSNSGNTASLTISGTQAMDEADYYCQAWDSSTYVFGTGTKVTVL

SEQ ID NO: 11115 - protein, 107 aa, Artificial Sequence
  Synthetic construct
DIQLTQSPSFLSASVGDRVTITCRASQGISSYLAWYQQKPGKAPKLLIYAASTFQSGVPSRFSGSGSGTEFTLTISSLQPEDFATYYCQQLKSYPRTFGQGTKVEIK

SEQ ID NO: 11116 - protein, 107 aa, Artificial Sequence
  Synthetic construct
EIVMTQSPATLSVSPGERATLSCRASQSLSSNLAWYQQKPGQAPRLLIYGASTRATGIPARFSGSGSGTEFTLTISSLQSEDFAVYYCQQYNNWPRTFGQGTKVEIK

SEQ ID NO: 11117 - protein, 109 aa, Artificial Sequence
  Synthetic construct
QSALTQPASVSGSPGQSITISCTGTSSDVGAFNYVSWYQQHPGKAPKLMIYDVTYRPSGVSDRFSGSKSGNTASLTISGLQAEDEADYYCSSYTSNSVVFGGGTKLTVL

SEQ ID NO: 11118 - protein, 107 aa, Artificial Sequence
  Synthetic construct
EIVLTQSPGTLSLSQGERATLSCRASQSVSSSYLAWYQQKLGQAPSLLIYDASSRATGIPDRFSGSGSGTDFTLTISRLEPEDFAVYYCQQYGSSPTFGQGTRLEIK

SEQ ID NO: 11119 - protein, 111 aa, Artificial Sequence
  Synthetic construct
QSVLTQPPSVSGAPGQRVTISCTGSSSNIGANYDVHWYQLLPGVAPRLLIYAKTNRPSGVPDRFSGSKSGTSASLAITGLQTEDEADYYCQSYDNSLGGKVFGGGTKLTVL

SEQ ID NO: 11120 - protein, 107 aa, Artificial Sequence
  Synthetic construct
EIVLTQSPGTLSLSPGEGATLSCRASQSVYSSYLAWYQQKPGQPPRLLIYAASTRATGIPDRFSGSGSGTDFTLTISRLEPEDFAVYYCHQYGGSRTFGQGTKLEIK

SEQ ID NO: 11121 - protein, 107 aa, Artificial Sequence
  Synthetic construct
DIQLTQSPSFLSTSVGARVTITCRASQGISRNLAWYQQRPGKAPKLLIYASSTLQSGVPSRFSGSGSGTEFTLTISSLQPEDFATYYCQQLSSYPVTFGGGTKVEIK

SEQ ID NO: 11122 - protein, 108 aa, Artificial Sequence
  Synthetic construct
EIVLTQSPATLSFSPGERATLSCRASQSISSFLAWYQQKPGQAPRLLIYDASNRATGIPARFSGSGSGTDFTLTISSLEPEDFAVYYCQQRSNWPPFTFGGGTKVEIK

SEQ ID NO: 11123 - protein, 110 aa, Artificial Sequence
  Synthetic construct
QSVLTQPPSASGTPGQRVTISCSGSSSNIGRNTVNWYQQLPGTAPKLLIYSNNQRPSGVPDRFSGSKSGTSASLAISGLQSEDEADYYCAAWDDSLNGWVFGGGTKLTVL

SEQ ID NO: 11124 - protein, 112 aa, Artificial Sequence
  Synthetic construct
DVVMTQTPLSLSVTPGQPASVSCKSSESLLGSDGKTYLHWYLQKSGQPPQLLIYEVFSRFAGVPDRFSGSGSGTDFTLKISRVEAEDVGVYYCMQSIQLPYTFGQGTKLEIK

SEQ ID NO: 11125 - protein, 110 aa, Artificial Sequence
  Synthetic construct
QSVLTQPPSASGTPGQRVTISCSGSSSNVGSNTVNWFQQLPGTAPKLVMYSNNQRPSGVPDRFSGSKSGTSASLAISGLQSADEADYYCAAWDDSLNGWVFGGGTKLTVL

SEQ ID NO: 11126 - protein, 108 aa, Artificial Sequence
  Synthetic construct
SYELTQPPSVSVSPGQTARITCSGDALPKKYAYWYQQKSGQAPVLVIYEDTKRPSGIPGRFSGSSSGTVATLTISGAQVDDEADYYCYSADSSANQGVFGGGTKLTVL

SEQ ID NO: 11127 - protein, 107 aa, Artificial Sequence
  Synthetic construct
DIQMTQSPSSLSASVGDRVTITCRASQSISSYLNWYQQKPGKAPKLLIYAASSLQSGVPSRFSGSGSGTDFTLTISSLQPEDFATYYCQQSYSTPPTFGQGTKVEIK

SEQ ID NO: 11128 - protein, 109 aa, Artificial Sequence
  Synthetic construct
QAVVTQEPSLTVSPGGTVTLTCGSSTGAVTSGHFPYWFQQKPGQAPRTLIYDTSNKHSWTPARFSGSLLGGKAALTLSGAQPEDEAEYYCLLSYSGAGVFGGGTKLTVL

SEQ ID NO: 11129 - protein, 107 aa, Artificial Sequence
  Synthetic construct
EIVMTQSPATLSVSPGERATLSCRASQSVSSNLAWYQQKPGQAPRLLIYGASTRATGIPARFSGSGSGTEFTLTISSLQSEDFAVYYCQQYNNWPRTVGQGTKVEIK

SEQ ID NO: 11130 - protein, 106 aa, Artificial Sequence
  Synthetic construct
EIVMTQSPATLSVSPGERATLSCRASHSVSSSLAWYQQKPGQAPRLLIYGASTRATGFPARFSGSGSGTEFTLTISSLQSEDFAVYYCQQYNYWPTFGQGTKVEIK

SEQ ID NO: 11131 - protein, 108 aa, Artificial Sequence
  Synthetic construct
EIVLTQSPGTLSLSPGERATLSCRASQSVSSSYLAWYQQKPGPAPRLLIYGASSRATGIPDRFSGSGSGTDFTLTISRLEPEDFAVYYCQQYGTSPLTFGPGTKVDIK

SEQ ID NO: 11132 - protein, 110 aa, Artificial Sequence
  Synthetic construct
QSVLTQPPSVSAAPGQKVTISCSGSSSNIGDNYVSWYQQLPGTAPKLVIYDNNKRPSGIPDRFSGSKSGTSATLGITGLQTGDEADYYCGTWDSSLSAGVFGGGTKLTVL

SEQ ID NO: 11133 - protein, 107 aa, Artificial Sequence
  Synthetic construct
DIQMTQSPSSLSASVGDRVTITCRASQSISSYLNWYQQKPGKAPKLLIYAASSLQSGVPSRFSGSGSGTDFTLTISSLQPEDFATYYCQQSYSTPQTFGQGTKLEIK

SEQ ID NO: 11134 - protein, 111 aa, Artificial Sequence
  Synthetic construct
QSVLSQPPSASGTPGQRVTISCSGSSSNIGTNYVFWYQQLPGTAPKLLIYRNNQRPSGVPDRFSASKSGTSASLAISGLRSEDEADYYCAAWDDSLSGFWVFGGGTKLTVL

SEQ ID NO: 11135 - protein, 108 aa, Artificial Sequence; identical to SEQ ID NO: 10884
  Synthetic construct

SEQ ID NO: 11136 - protein, 108 aa, Artificial Sequence
  Synthetic construct
SYVLTQPPSVSVAPGKTARITCEGNNIGSTSVHWYQQKPGQAPVVVMYYDGDRPSGTPERFSGSNSGNTATLTISRVEAGDEADYYCQVWESNTDHLIFGTGTKVTVL

SEQ ID NO: 11137 - protein, 113 aa, Artificial Sequence
  Synthetic construct
DIVMTQSPDSLAVSLGERATINCKSSQSVLYNSNNKNYLAWYQQKPGQPPKLLTYWASTRESGVPDRFSGSGSGTDFTLTISSLQAEDVAVYYCQQYYSAPFTFGPGTKVDIK

SEQ ID NO: 11138 - protein, 110 aa, Artificial Sequence
  Synthetic construct
QSALTQPRSVSGSPGQSVTVSCTGTSSDVGGYNYVSWYQQHPGKAPKLMIYDVSERPSGVPDRFSGSKSGNTASLTISGLQAEDEADYYCCSYAGTYTWVFGGGTKLTVL

SEQ ID NO: 11139 - protein, 110 aa, Artificial Sequence
  Synthetic construct
QSALTQPASVSGSPGQSITISCTGTSSDVGGYNYVSWYQRHPGKAPKLMIYDVSTRPSGVSYRFSGSKSGNTASLTISGLQAEDEADYFCASYTSSNPVIFGGGTRLTVL

SEQ ID NO: 11140 - protein, 107 aa, Artificial Sequence
  Synthetic construct
SYELTQPPSVSVSPGQTARITCSGDALPKKYAYWYQRKSGQAPVLVIYEDSKRPSGIPERFSGSTSGTMATLTISGAQVEDEADYYCYSTDSSGKGVFGGGTKLTVL

SEQ ID NO: 11141 - protein, 105 aa, Artificial Sequence
  Synthetic construct
SYDLTQPPSVSVSPGQTASITCSGDKLGNKYVCWYQLKPGQSPVLVIYQDDKRPSGIPERFSGSNSGNTATLTISGTHAMDEADYYCQAWDNSVVFGGGTKLTVL

SEQ ID NO: 11142 - protein, 108 aa, Artificial Sequence
  Synthetic construct
SYVLTQPPSVSVAPGKTANITCGGNNIGSESIHWYQQKPGQAPVLVIYFDTDRPSGIPERFSGSNSGNTATLTISRVEAGDEADYYCQVWDSSSDFWVFGGGTKLTVL

SEQ ID NO: 11143 - protein, 106 aa, Artificial Sequence
  Synthetic construct
SYELTQPSSVSVSPGQTARITCSGDVLAKKFARWFQQKPGQAPVLVIYKDNERPSGVPERFSGSSSGTTVTLTISGAQVEDEADYYCYSAADNNQVFGGGTKLTVL

SEQ ID NO: 11144 - protein, 108 aa, Artificial Sequence
  Synthetic construct
SYVLTQSFSVSVAPGKTARITCGGNNIGSKSVHWYQQKPGQAPVLVIYNDSDRPSGISERFSGSNSGNMATLTISRVEAGDEADYYCQVWDSSSDHQVFGGGTKLTVL

SEQ ID NO: 11145 - protein, 107 aa, Artificial Sequence
  Synthetic construct
DIQMTQSPSSLSASVGDTVTITCRAGQTISRSLNWYQQKPGSAPELLIHTVSTLHSGVPSRFSGSGSGTDFTLTITSLQPEDVGTYYCQQSHGFPYTFGQGTKLEIK

SEQ ID NO: 11146 - protein, 106 aa, Artificial Sequence
  Synthetic construct
SYELTQPPSVSVSPGQTASITCSGYKLGDKYVYWYQQKPGQSPVLVIYQDNKRPSGIPERFSGSNSGNTATLTISGTQAMDEADYYCQAWDSSTVVFGGGTKLTVL

SEQ ID NO: 11147 - protein, 105 aa, Artificial Sequence
  Synthetic construct
DIQMTQSPSTLSASVGDRVTITCRASQSISSWLAWYQQKPGRAPKLLIYKASTLESGVPSRFSGSGSGTEFTLTISSLQPDDFATYYCQQYNTWTFGQGTKVEIK

SEQ ID NO: 11148 - protein, 108 aa, Artificial Sequence
  Synthetic construct
SYELTQPPSVSVSPGQTARITCSGDALPKQYAYWYQQKPGQAPVMVIYKDSERPSGIPERFSGSSSGTTVTLTISGVQAEDEADYYCQSADSSGTYGVFGGGTKLTVL

SEQ ID NO: 11149 - protein, 109 aa, Artificial Sequence
  Synthetic construct
EFVLTQSPGTLSLSPGDRATLSCRASQSISSKSLAWYQQKPGQPPRILIFDASTRATGIPDRFSGTGSGTDFSLTVSRLEPEDFAVYYCQQYGGTPPWAFGQGTKVEIK

SEQ ID NO: 11150 - protein, 113 aa, Artificial Sequence
  Synthetic construct
DIVMTQSPDSLAVSLGERATINCKSSQSVLYSSNNKNYLAWYQQKPGRPPKLLIYWASTRESGVPDRFSGSGSGTDFTLTISSLQAEDVAVYYCQQYYSSPRTFGQGTKVEIK

SEQ ID NO: 11151 - protein, 108 aa, Artificial Sequence
  Synthetic construct
SYELTQPPSVSVPPGQTARITCSGDALPKKYAYWYQQKSGQAPVLVIYEDSKRPSGIPERFSGSSSGTMATLTISGAQVEDEADYYCYSRDSSANHWVFGGGTKLTVL

SEQ ID NO: 11152 - protein, 107 aa, Artificial Sequence
  Synthetic construct
DIQMTQSPSTLSASVGDRVTITCRASQSMSSWLAWYQQKAGKAPKVLIYKASSLESGVPSRFSGSGSGTEFTLTISSLQPDDFATYYCQQYNSYPYTFGQGTNLEIK

SEQ ID NO: 11153 - protein, 109 aa, Artificial Sequence
  Synthetic construct
SYELTQPPSVSVSPGQTARITCSGDALPKKYAYWYQQKSGQAPVLVIYEDNKRPSGIPGRFSGSSSGTMATLTISGAQVEDEADYYCYSTDSSDNHRRVFGGGTKLTVL

SEQ ID NO: 11154 - protein, 106 aa, Artificial Sequence
  Synthetic construct
EIVMTQSPATLSVSPGERATLSCRASQSVSSNLAWYQHKPGQAPRLLIYGGSTRATGIPARFSGSGSGTEFTLTISSLQSEDFAVYYCQQYNNWWTFGQGTKVEIK

SEQ ID NO: 11155 - protein, 107 aa, Artificial Sequence
  Synthetic construct
SYELTQPPSVSVSPGQTARITCSGDALPKKFASWYQQKSGQAPVLVIYEDSKRPSGIPERFSGSSSGTMATLTISGAQVEDEADYYCYSPDSSGNPPFGGGTTLTVL

SEQ ID NO: 11156 - protein, 112 aa, Artificial Sequence
  Synthetic construct
DIVMTQTPLSSPVTLGQPASISCRSSQSLVHTDGNTYLSWLQQRPGQPPRLLIYKISTRFSGVPDRFSGSGAGTDFTLKISRVEAEDVGVYYCMQASQFPYTFGQGTKLEIK

SEQ ID NO: 11157 - protein, 107 aa, Artificial Sequence
  Synthetic construct
DIQMTQSPSSLSASVGDRVTITCRASESISNYLNWYQQKPGRAPKLLIFTASNLQSGVPSRFSGSGSGTDFTLSISNLQPEDFATYYCQQGYGSPLTFGGGTKVEIK

SEQ ID NO: 11158 - protein, 109 aa, Artificial Sequence
  Synthetic construct
QSVLTQPPSVSAAPGQKVTISCSGSSSNIGNTYVSWYQQLPGTAPKLLIYENNKRPSGIPDRFSGSKSGTSATLGITGLQTGDEADYYCGTWDSSLSGVFGGGTKLTVL

SEQ ID NO: 11159 - protein, 108 aa, Artificial Sequence
  Synthetic construct
EIVMTQSPATLSLSPGERATLSCRASQSVSSYLAWYQQKPGQAPRLLIYDASNRATGIPARFSGSGSGTDFTLTISSLEPEDFAVYYCQQRSNWPPFTFGPGTKVDIK

SEQ ID NO: 11160 - protein, 110 aa, Artificial Sequence
  Synthetic construct
QSALTQPASVSGSPGQSITISCTGTSSDVGDYNYVSWYRQHPGKAPKLMIYDVSNRPSGVSNRFSGSKSGNTASLTISGLQAEDEADYFCSSYSSSSTLVFGTGTKVTVL

SEQ ID NO: 11161 - protein, 111 aa, Artificial Sequence
  Synthetic construct
DIVLTQTPLSLSVTPGQPASISCKSSQSLLHSDGKTYLSWYLQKPGQPPQLLISEISNRFSGLPDRFSGSGSGTDFTLKISRVDAEDVGVYYCMQSIQLITFGQGTRLEIK

SEQ ID NO: 11162 - protein, 106 aa, Artificial Sequence
  Synthetic construct
DIQMTQSPSSLSASVGDRVTITCRASQSISSYLNWYQQKPGKAPKLLIYAASSLQSGVPSRFSGSGSGTDFTLTISSLQPEDFATYYCQQSYSTLAFGQGTRLEIK

SEQ ID NO: 11163 - protein, 112 aa, Artificial Sequence
  Synthetic construct
EIVMTQTPLSLSVTPGQPASISCKSSESLLHSDGKTYLYWYLQKPGQPPQLLIYELSDRFSGVPDRFSGSGSGTDFTLKISRVEAEDVGVYYCLQTIQLPYTFGQGTKLEIK

SEQ ID NO: 11164 - protein, 107 aa, Artificial Sequence
  Synthetic construct
DIQMTQLPSSLSASVGDRVTITCRASQSITRFLNWYQQKPGKAPKALIYGATSLQSGVPSRFSGSGSGTEFTLIISSLQPEDFATYYCQQSHSTPRTFGQGTKLEIK

SEQ ID NO: 11165 - protein, 106 aa, Artificial Sequence
  Synthetic construct
DIQMTQSPSSLSASVGDRVTISCQTSQDITIYLNWYQQKPGKAPKLLIYDASNLEAGAPSRFSGSGSGTDFTFTISSLQPEDIATYYCQHYDDLPRFGPGTKVDLK

SEQ ID NO: 11166 - protein, 107 aa, Artificial Sequence
  Synthetic construct
DIQMTQSPSTLSASVGDRVTITCRASQTISSWLAWYQQKPGKAPKLLIYKASSLESGVPSRFSGSGSGTEFTLTISSLQPDDFATYYCQQYNSYPWTFGQGTKVEIK

SEQ ID NO: 11167 - protein, 108 aa, Artificial Sequence
  Synthetic construct
DIQMTQSPSSLSATVGDRVTITCRASQGISNYLAWYQQKPGKVPKLLIYAASTLQSGVPSRFSGSGSGTDFTLTISSLQPEDVATYYCQKYNSDPPLTFGGGTKVEIK

SEQ ID NO: 11168 - protein, 107 aa, Artificial Sequence
  Synthetic construct
DIQMTQSPSTLSASVGDRVTITCRASQSISSWLAWYQQKPGKAPKLLIYKASSLESGVPSRFSGSGSGTEFTLIISSLQPDDFATYYCQQYNSYPYTFGQGTKLEIK

SEQ ID NO: 11169 - protein, 107 aa, Artificial Sequence
  Synthetic construct
AIQMTQSPSSLSASVGDRVSITCRASQDIRNDLGWYQQKPGRAPKLLIYAASSLQNGVPSRFSGSGSGTDFTLTISSLQPEDFATYYCLQDNNFPLTFGQGTKVEIK

SEQ ID NO: 11170 - protein, 107 aa, Artificial Sequence; identical to SEQ ID NO: 2754
  Synthetic construct

SEQ ID NO: 11171 - protein, 108 aa, Artificial Sequence
  Synthetic construct
EIVLTQSPATLSLSPGERATLSCGASHRVSSSFLAWYQKKPGLAPRLLIYDGSSRATGVPDRFSGSGSGTDFTLSISRLEPEDFAVYYCQQYGSSSITFGQGTRLEIK

SEQ ID NO: 11172 - protein, 107 aa, Artificial Sequence
  Synthetic construct
EIVLTQSPATLSLSPGERATLSCRASQSVSTSLAWYQQMPGQAPRLLIYDASNRATGIPGRFSGSGSGTDFTLTISSLEPEDFAVYYCQQRTNWPITFGQGTKLEIR

SEQ ID NO: 11173 - protein, 110 aa, Artificial Sequence
  Synthetic construct
QSVLTQPPSASGTPGQRVTISCSGGSSNIGGNTVNWYQQLPGTAPKLLIYINNQRPSGVPDRLSGSKSGTSASLAISGLQSEDEADYYCAAWDDSLNGPVFGGGTKLTVL

SEQ ID NO: 11174 - protein, 106 aa, Artificial Sequence
  Synthetic construct
DIQMTQSPSSLSASVGDRVTISCQASQDINIFLNWYQQKPGKAPKLLIYDASNLEAGAPSRFSGSGSGTDFTFTISGLQPEDFATYYCQHYDNLPRFGPGTKVDIK

SEQ ID NO: 11175 - protein, 106 aa, Artificial Sequence
  Synthetic construct
SYELTQPPSVSVSPGQTASITCSGDKLGDKYVSWYQQKPGQSPILLIYRSSKRPSGIPERFSGSNSGNTATLTISGTQAMDEADFCCQAWDSNTVVFGGGTKLTVL

SEQ ID NO: 11176 - protein, 109 aa, Artificial Sequence
  Synthetic construct
DIQMTQSPSSLSASVGDRVTIICRASQVISNNLAWYQQKPGKVPKLLIFGASTLQSGVPSRFSGSGSGTDFTLTISSLQPEDVATYYCQKYHTAPPGGTFGQGTKVEIK

SEQ ID NO: 11177 - protein, 110 aa, Artificial Sequence
  Synthetic construct
QSVLTQPPSVSAAPGQKVTISCSGSSSNIGNNFVSWYQHLPGAAPKLLIYDNDQRPSGIPDRFSGSKSGTSATLAITGLQTGDEADYYCGTWDSSLSPGIFGGGTKLTVL

SEQ ID NO: 11178 - protein, 107 aa, Artificial Sequence
  Synthetic construct
DIQMTQSPSSLSASVGDRVTITCQASQDISNYLNWYQQKPGKAPKVLIYDASNLETGVPSRFSGSGSGTNFTFTISSLQPEDIATYFCQQYDNLPYTFGQGTKLEIK

SEQ ID NO: 11179 - protein, 107 aa, Artificial Sequence
  Synthetic construct
EIVMTQSPATLSVSPGERAALSCRASQSISSNLAWYQQKPGQAPRLLIYGASTRATGIPARFSGSGSGTEFTLTISSLQSEDFAVYFCQQYDNWPKTFGQGTKVEIK

SEQ ID NO: 11180 - protein, 108 aa, Artificial Sequence
  Synthetic construct
EIVLTQSPATLSLSPGERATLSCRASQTVSSYLAWYQQKPGQAPRLLIYDASTRATGIPARFSGSGSGTDFTLTISSLEPEDFAVYYCQQRSDWPPFTFGPGTKVDIK

SEQ ID NO: 11181 - protein, 106 aa, Artificial Sequence
  Synthetic construct
DIQMTQSPSSVSASVGDRVTITCRASQGISSWLAWYQQKPGKAPKLLIYAASSLQSGVPSRFSGSGSGTDFTLTISSLQPEDFATYYCQQANSFPLFGPGTKVDIK

SEQ ID NO: 11182 - protein, 109 aa, Artificial Sequence
  Synthetic construct
QSVLTQPPSVSGAPGQRVTISCTGSSSSIGAGYDVHWYQQLPGTAPKLLIYGNSNRPSGVPDRFSGSKSGTSASLAISGLQAEDEADYFCQSYDSSLQVFGTGTKVTVL

SEQ ID NO: 11183 - protein, 108 aa, Artificial Sequence; identical to SEQ ID NO: 2522
  Synthetic construct

SEQ ID NO: 11184 - protein, 106 aa, Artificial Sequence
  Synthetic construct
SDELTQPPSVSVSPGQTASITCSGDKLGDKNPWWYQQKPGQSPVLVIYQDHKRPSGIPERFSGSNSGNTATLTIRGTQVIDEADYYCQAWDSSTWVFGGGTKLTVL

SEQ ID NO: 11185 - protein, 107 aa, Artificial Sequence
  Synthetic construct
DIQMTQSPSSLSASVGDRITITCRASQDIRNSLAWYQQKPGKVPKLLIHAASTSQSGVPSRFSGSGSGTDFTLTISSLQPEDVATYYCQKYNSAPLTFGGGTKVEIK

SEQ ID NO: 11186 - protein, 108 aa, Artificial Sequence
  Synthetic construct
DIQMTQSPSSLSASVGDRVTITCRASQSISSYLNWYQQKAGKAPKLLIYSASSLQSGVPSRFSGSGSGTDFTLTISSLQPEDFATYYCQQSYSTPRLTFGGGTKVEIK

SEQ ID NO: 11187 - protein, 110 aa, Artificial Sequence
  Synthetic construct
QSALTQPRSVSGSPGQSVTISCTGTSSDVGGYNYVSWYQQHPGKAPKLMIYDVNTRPSGVPDRFSGSKSGNTASLTISGLQAEDEADYYCCSYAGSFKGIFGGGTKLTVL

SEQ ID NO: 11188 - protein, 105 aa, Artificial Sequence
  Synthetic construct
DIQMTQSPSTLSASVGDRVTITCRASQSISSWLAWYQQKPGRAPKLLIYKASSLESGVPLRFSGSGSGTDFTLTISSLQPDDFATYYCQQYYTWTFGQGTKVEIK

SEQ ID NO: 11189 - protein, 108 aa, Artificial Sequence
  Synthetic construct
SYELTQPPSVSVSPGQTARITCSGDALPKKYAYWYQQKSGQAPVRVIYEDSKRPSGIPERFSGSSSGTMATLTISGAQVADEADYYCYSTDSSGNHRVFGGGTKLTVL

SEQ ID NO: 11190 - protein, 106 aa, Artificial Sequence
  Synthetic construct
DIQMTQSPATLSASVGDRVTITCRASQSISDWLAWYQQKPGKAPKLLIYKASSLESGVPSRFSGSGSGTEFTLTISSLQPDDFATYYCQQYNSYWTFGQGTKVEIK

SEQ ID NO: 11191 - protein, 107 aa, Artificial Sequence
  Synthetic construct
DIQMTQSPSYVSASVGDRVTITCRASQGISSWLAWYQQKPGKAPKLLIYAASSLQSGVTSRFSGTGSGTDFTLTISSLQPEDFATYYCQQANTFPLTFGGGTKVEIK

SEQ ID NO: 11192 - protein, 108 aa, Artificial Sequence
  Synthetic construct
EIVLTQSPATLSLSPGERATLSCRASQSVSSFLAWYQQKPGQAPRLLIYDASTRATGIPARFSGSGSGTDFTLTISSLEPEDFAVYYCQQRSNWPPFTFGGGTKVEIK

SEQ ID NO: 11193 - protein, 107 aa, Artificial Sequence
  Synthetic construct
DVQMTQSPSSLSASVGDRVTITCRASQGINNWLAWYQQKPEKAPKSLIYAASSLQSGVPSRFSGSGSGTDFTLTINSLQPEDFATYYCQQYNYYPHTFGQGTKLEIK

SEQ ID NO: 11194 - protein, 110 aa, Artificial Sequence
  Synthetic construct
QSALTQPASVSGSPGQSITISCTGTSSDVGSYNLVSWYQQHPGKAPKVMIYEASKRPSGVSNRFSGSKSGNTASLTISWLQAEDEADYYCSSYAGSSTWVFGGGTKLTVL

SEQ ID NO: 11195 - protein, 109 aa, Artificial Sequence
  Synthetic construct
EIVMTQSPATLSVSPGERATLSCRASQSVSSNLAWYQQKPGQAPRLLIYGASTRATGIPARFSGSGSGTEFTLTISSLQSEDFAVYYCQQYNNWPPLFTFGPGTKVDIK

SEQ ID NO: 11196 - protein, 107 aa, Artificial Sequence
  Synthetic construct
DIQMTQSPSSVSASVGDRVTITCRASQGISSWLAWYQQKPGKAPKLLIADASSLQSGVPSRFSGSGSGTDFTLTISSLQPEDFATYYCQQAHTFPPTFGGGTKVGIK

SEQ ID NO: 11197 - protein, 110 aa, Artificial Sequence
  Synthetic construct
QSALTQPASVSGSPGQSITISCTGTRSDIGGYNYVSWYQQHPGKAPKLMIYDVTNRPSGVSNRFSGSKSGNTASLTISGLQAEDEGDYYCSSYTNTITWVFGGGTKLTVL

SEQ ID NO: 11198 - protein, 108 aa, Artificial Sequence
  Synthetic construct
DIQMTQSPSSLSASVGDRVTITCQASQDISNHLNWYQQKPGKAPKLLIYDASNLETGVPSRFSGSGSGTDFTFTISSLRPEDIATYFCQQYDSLPPVTFGQGTRLDIK

SEQ ID NO: 11199 - protein, 114 aa, Artificial Sequence
  Synthetic construct
DIVMTQSPDSLAVSLGERATINCKSSQSVLYSSKNKNYLAWYQQKPGQPPKLLISWASTRESGVPDRFSGSGSGTDFTLTISSLQAEDVAVYYCQQYYRSPPWTFGQGTKVEIR

SEQ ID NO: 11200 - protein, 110 aa, Artificial Sequence
  Synthetic construct
QSALTQPASVSGSPGQSITISCTGTGSDVGGYNYVSWYQHHPGKAPKLVIYDVSDRPSGVSNRFSGSKSGNTASLIISGLQAEDEADYYCSSYTSSFTYVFGSRTKVTVL

SEQ ID NO: 11201 - protein, 108 aa, Artificial Sequence
  Synthetic construct
EIVLTQSPGTLSLSPGERATLSCRASQSVSSGYLAWYQQKPGQAPRLLIYGASTRATGIPDRFSGSGSGTDFTLTISRLEPEDFAVYCCQQYGYSLYTFGQGTKLEIK

SEQ ID NO: 11202 - protein, 108 aa, Artificial Sequence
  Synthetic construct
DIQLTQSPSFLSASVGDRVTITCRASQGISSYLAWYQQKPGKAPKLLIYAASTLQSGVPSRFSGSGSGTEFTLTISSLQPEDFATYYCQQLNSYPPFTFGPGTKVDIK

SEQ ID NO: 11203 - protein, 109 aa, Artificial Sequence
  Synthetic construct
EAVLTQSPGTLSLSPGERATLSCRTSQSARISLAWFQQKPGQAPKLLIYDTSKRATGIPVRFSGSGSGTDFALTITSLEPDDFAVYYCQQRSTAPPTWTFGQGTKVDFK

SEQ ID NO: 11204 - protein, 111 aa, Artificial Sequence
  Synthetic construct
QSVLTQPPSVSGAPGQRVTISCTGSGSNIGVGYDVHWYKQLPGTAPKLLIHGNTNRPSGVPDRFSGSKSGTSASLAISGLQAEDEADYYCQSYDSSLSGNVFGTGTKVTVL

SEQ ID NO: 11205 - protein, 110 aa, Artificial Sequence
  Synthetic construct
QSALTQPASVSGSPGQSITISCTGTSSDVGSYDHVSWFQQHAGKGPNLVIFDVNSRPSGVSNRFSGSKSGNTASLTISGLQPEDEADYYCLSYTSRGTRVFGTGTAVTVV

SEQ ID NO: 11206 - protein, 110 aa, Artificial Sequence
  Synthetic construct
QSVLTQPPSVSAAPGQRVTISCSGSSSDIGNNYVSWFQQLPGTAPKLLIYDNNKRPSGIPDRFSGSKSGTSATLDITGLQTGDEADYYCGTWDSSLSVVVFGGGTKVTVL

SEQ ID NO: 11207 - protein, 113 aa, Artificial Sequence
  Synthetic construct
DIVMTQSPDSLAVSLGERASINCKSSQSIFYSSNKKSYLAWYQQKPGQPPRLLIYWASTRESGVPDRFIGSGSGTDFTLTISSLQAEDVAVYYCQQYYTLPITFGQGTRLEIE

SEQ ID NO: 11208 - protein, 108 aa, Artificial Sequence; identical to SEQ ID NO: 10784
  Synthetic construct

SEQ ID NO: 11209 - protein, 107 aa, Artificial Sequence
  Synthetic construct
DIQMTQSPSSLSASVGDRVTITCQASQDINKYLNWYQQKPGKAPKLLIYDASNLETGVPSRFSGSGSGTYFTFTVSSLQPEDNATYYCLQYDNLPRTFGQGTKLEIK

SEQ ID NO: 11210 - protein, 113 aa, Artificial Sequence
  Synthetic construct
DIVMTQSPDSLAVSLGERATINCKSSQSVLHSSNNKNSLAWYQQKPGQPPKLLMYWASTRESGVSDRISGSGSGTDFTLTISSLQAEDVAVYYCQQYYSTPLTFGPGTKVDIK

SEQ ID NO: 11211 - protein, 109 aa, Artificial Sequence
  Synthetic construct
SYELTQPPSVSVSPGQTARITCSGDALPKKYVYWYQQKSGQAPVLVIYEDSKRPSGIPERFSGSSSGTMATLTISGAQVDDEAGYYCYSTDNSGNHRGVFGTGTKVTVL

SEQ ID NO: 11212 - protein, 112 aa, Artificial Sequence
  Synthetic construct
DMVMTQSPLSLPVTPGEPASISCRSSQSLLYSNGYTYLNWYLQKPGQSPQLLIYLGSNRASGVPDRFSVSGSGTDFTLLISRVEAEDVGVYYCMQALQTPWTFGQGTRVEIQ

SEQ ID NO: 11213 - protein, 107 aa, Artificial Sequence
  Synthetic construct
DIQMTQSPSSVSASVGDRVTITCRASQDISSWLAWYQQKPGKAPKLLIYAASSLQSGVPSRFSGSGSGTDFTLTVSSLQPEDFATYYCQQANSFPWTFGQGTKVEIK

SEQ ID NO: 11214 - protein, 111 aa, Artificial Sequence; identical to SEQ ID NO: 2857
  Synthetic construct

SEQ ID NO: 11215 - protein, 112 aa, Artificial Sequence
  Synthetic construct
DVVMTQSPLSLPVTLGQPASISCRSSQSLVYSDGNTYLNWFQQRPGQSPRRLIYKVSNRDSGVPDRFSGSGSGTDFTLKISRVEAEDVGVYYCMQGTHWPPAFGGGTKVEIK

SEQ ID NO: 11216 - protein, 111 aa, Artificial Sequence; identical to SEQ ID NO: 11089
  Synthetic construct

SEQ ID NO: 11217 - protein, 108 aa, Artificial Sequence; identical to SEQ ID NO: 3192
  Synthetic construct

SEQ ID NO: 11218 - protein, 109 aa, Artificial Sequence
  Synthetic construct
EIVLTQSPGTLSLSPGDRATLSCRASQSVSSSSLAWYQQKPGQAPRLLIYGASSRAAGIPDRFSGSGSGTDFTLSISRLEPEDFAVYYCQQYGTSPGYTFGPGTKMEIR

SEQ ID NO: 11219 - protein, 108 aa, Artificial Sequence
  Synthetic construct
DIQMTQSPSSLSASVGDRVTITCRASQSISSYLNWYQQKPGKAPKLLIYAASTLQSGVPSRFSGSGSGTDFTLTISSLQPEDFATYYCQQSYTAPGYTFGQGTKLEIK

SEQ ID NO: 11220 - protein, 107 aa, Artificial Sequence
  Synthetic construct
EIVMTQSPATLSVSPGERATLTCRASQSVSSNLAWYQQKPGQAPTLLIYGASTRATGIPARFSGSGSGTDFTLTISSLLSEEFAVYYCQQYNNWPLTFGGGTKVEIK

SEQ ID NO: 11221 - protein, 107 aa, Artificial Sequence
  Synthetic construct
DIQMTQSPSSLSASVGDRVTITCRASQSISSYLNWYQQKPGKAPKVLIYAASGLQSGVPSRFSGGGSGTDFTLTISSLQPEDLATYYCQQSYGTPWTFGQGTKVEIK

SEQ ID NO: 11222 - protein, 110 aa, Artificial Sequence
  Synthetic construct
QSALTQPASVSGSPGQSITISCTGSSSDLGGFNYVSWYQHHPGKAPKLMIYDVSHRPSGVSNRFSGSKSGTTASLTISGLQPEDEADYYCSSFTSGSTYVFGTGTKVTVL

SEQ ID NO: 11223 - protein, 110 aa, Artificial Sequence
  Synthetic construct
QSALTQPASVSGSPGQSITISCTGTSSDVGSYDHVSWFQQHAGKGPNLVIFDVNSRPSGVSHRFSGSKSGNTASLTISGLQAEDEADYYCFSYTSRGTRVFGTGTTVTVV

SEQ ID NO: 11224 - protein, 112 aa, Artificial Sequence
  Synthetic construct
QTVVTQEPSFSVSPGGTVTLTCGLSSGSVSTSHYPSWYQQTPGQAPRTLMYSTNIRSSGVPDRFSGSILGNKAALTITGAQADDESDYYCVLFMGRGGDIVVFGGGTKLTVL

SEQ ID NO: 11225 - protein, 108 aa, Artificial Sequence
  Synthetic construct
DIQMTQSPSSLSASVGDRVTITCRASQGIRNDLGWYQQKPGKAPKRLIYAASTLQSGVPSRFSGSGSGTEFTLTISSLQPEDFATYYCLQYNSYPLVTFGQGTRLEIK

SEQ ID NO: 11226 - protein, 110 aa, Artificial Sequence
  Synthetic construct
EIVLTQSPGTLSLFPGERATLSCRASHSVSSSSLAWYQQKPGQAPRLLIYGASSRATGIPDRFSGSGSGTDFTLTISRLEPEDFAVYYCQHYGSSPPLYTFGQGTKLEIK

SEQ ID NO: 11227 - protein, 107 aa, Artificial Sequence
  Synthetic construct
DIQMTQSPSSLSASVGDRVTFTCRASQGISNSLAWYQQKPGKVPKLLIYGASTLQSGVPSRFSGSGSGTDFTLTISSLQPEDVATYYCQKYNSAPFTFGPGTKVDIK

SEQ ID NO: 11228 - protein, 108 aa, Artificial Sequence
  Synthetic construct
EIVLTQSPATLSLSPGERATLSCRASQSVSSYLAWYQQKPGQAPRLLIYDATTRATGIPARFSGSGSGTDFTLTISSLEPEDFAVYYCQQRSNWRRLTFGGGTKVEIK

SEQ ID NO: 11229 - protein, 113 aa, Artificial Sequence
  Synthetic construct
DIVMTQSPDSLAVSLGERATINCKSSQSVLYSSNNKNYLAWYQQKPGQPPKLLIYWASTRESGVPDRFSGSGSGTDFTLTISSLQAEDVAVYYCQQYYSSPPTFGQGTKVEIK

SEQ ID NO: 11230 - protein, 107 aa, Artificial Sequence; identical to SEQ ID NO: 11227
  Synthetic construct

SEQ ID NO: 11231 - protein, 107 aa, Artificial Sequence
  Synthetic construct
DIQMTQSPSSLSASVGDRVTITCRASQSISNYLNWYQQKPGKAPKLLIYAASSLQSGVPSRFSGSGSGTDFTLTISSLQPEDFATYYCQQNYNAPWTFGQGTKVEIK

SEQ ID NO: 11232 - protein, 109 aa, Artificial Sequence
  Synthetic construct
QSALTQPASVSGSPGQSITISCTGTSSDVGSYNLVSWYQQHPGKAPKLMIYEGSKRPSGVSNRFSGSKSGNTASLTISGLQAEDEADYYCSSYAGSSLVFGGGTKLTVL

SEQ ID NO: 11233 - protein, 110 aa, Artificial Sequence
  Synthetic construct
QSVLTQPPSVSAAPGQKVTISCSGSSSNIENNYVSWYQQLPGTAPKLLIYDNNKRPSGIPDRFSGSKSGTSATLGITGLQTGDEADYYCGTWDSSLSAVVFGGGTKLTVL

SEQ ID NO: 11234 - protein, 109 aa, Artificial Sequence
  Synthetic construct
EVVLTQSPATLSLSPGERATLSCRASQSVSTFLAWYQQKPGQAPRLLIYDASNRATGIPARFSGSGSGTDFTLTISSLEPEDFVVYYCQHRSNWPPALTFGGGTKVEIN

SEQ ID NO: 11235 - protein, 107 aa, Artificial Sequence
  Synthetic construct
DIQMTQSPSTLSASVGDRVTITCRASQSISSWLAWYQQKPGKAPKLLIYKASSLESGVPSRFSGSGSGTEFTLTISSLQPDDFATYYCQQYNSYSRTFGQGTKLEIK

SEQ ID NO: 11236 - protein, 108 aa, Artificial Sequence
  Synthetic construct
EIVMTQSPATLSVSPGERASLSCRASQIVSSNLAWYQQKPGQAPRLLIYGASIRATNIPARFSGTGSGTEFTLTISSLQSEDFAVYYCQQYYNWPFWTFGQGTKLEIK

SEQ ID NO: 11237 - protein, 112 aa, Artificial Sequence
  Synthetic construct
DIVMTQTPLSSPVTLGQPASISCRSSQSLVHSDGNTYLSWLHQRPGQPPRLLIYKISNRFSGVPDRFSGSGAGTDFTLKISRVEAEDVGVYYCMQATQFPLTFGGGTKVEIK

SEQ ID NO: 11238 - protein, 108 aa, Artificial Sequence
  Synthetic construct
SYELTQPPSVSVSPGQTARITCSAEALPNQYAYWYQQKPGQAPVLLIYKDSERPSGIPERFSGSSSGTTVTLTISGVQAEDEAGYYCQSVDSSGSNWVFGTGTQVTVL

SEQ ID NO: 11239 - protein, 108 aa, Artificial Sequence
  Synthetic construct
QSALTQPASVSGSPGQSITISCTGTSSDVGSYNLVSWYQHHPGKAPKLMIYEGSKRPSGVSNRFSGSKSGNTASLTISGLQAEDEADYYCCSYAGTVLFGGGTKLTVL

SEQ ID NO: 11240 - protein, 109 aa, Artificial Sequence
  Synthetic construct
QSALTQPASVSGSPGQSITISCTGASRDVGAFNYVSWYQQHPGKAPKLMIYDVSNRPSGVSNRFSGSKSGNTASLTISGLQAEDEADYYCSSYTTSSVVFGGGTQLTVL

SEQ ID NO: 11241 - protein, 107 aa, Artificial Sequence; identical to SEQ ID NO: 3295
  Synthetic construct

SEQ ID NO: 11242 - protein, 111 aa, Artificial Sequence
  Synthetic construct
QSVLTQPPSASGTPGQRVTISCSGSSSNIGSNTVNWYQQLPGTAPKLLIYSDNQRPSGVPDRFSGSKSGTSASLAISGLQSEDEADYYCAAWDDSLNGCYVFGTGTKVTVL

SEQ ID NO: 11243 - protein, 109 aa, Artificial Sequence
  Synthetic construct
QIVVTQEPSLTVSPGGTVTLTCASSAGAVTIANIPNWFQQRPGQAPRELIYATSNKHSWTPARFSGSLLGGKTALTLSAVQPEDEAVYYCLLYYGGAWVFGGGTKLTVL

SEQ ID NO: 11244 - protein, 108 aa, Artificial Sequence
  Synthetic construct
SYELTQPPSVSVSPGQTARITCSGDALPQKYAYWYQQKSGQAPVLVIYEDSKRPSGIPERFSGSSSGTMATLTISGAQVEDEADYYCYSTDSSGKGYVFGTGTKVTVL

SEQ ID NO: 11245 - protein, 110 aa, Artificial Sequence
  Synthetic construct
QSVLTQPPSASGTPGQRVTISCSGSSSNIGSNYVYWYQHLPGAAPKLLIYRNNQRPSGVRDRFSGSKSGTSASLAIGGLRSEDEADYFCATWDDSLSGWVFGGGTKLTVL

SEQ ID NO: 11246 - protein, 107 aa, Artificial Sequence
  Synthetic construct
DIQMTQSPSSLSASVGDRVTITCRASQGISNYLAWFQQKPGKAPKSLIYAASSLQSGVPSKFSGSGSGTDFTLTISSLQPEDFATYYCQQYKSYPITFGQGTRLEIK

SEQ ID NO: 11247 - protein, 110 aa, Artificial Sequence
  Synthetic construct
QSALTQPASVSGSPGQSITISCTGTSSDIGNYNQVSWYQQHPGKVPKLMIYDVNNRPSGVSNRFSGSKSGITASLTISGLQAEDEADYYCSSYTSSSTWVFGGGTKLTVL

SEQ ID NO: 11248 - protein, 107 aa, Artificial Sequence
  Synthetic construct
DIQMTQSPSSLSASAGDRVTITCRASSGIGKYLAWYQQKPGKVPKLLIYDASILQSGVPSRFSGSGSGTDFTLTINSLQPEDVGTYYCQRYSSAPRTFGRGTRVEIK

SEQ ID NO: 11249 - protein, 108 aa, Artificial Sequence
  Synthetic construct
DIQMTQSPSSLSASVGDRVTITCRASQSISDYLNWYQQKPGKAPKLLIYAASSLQSGVPSRFSGSGSGTDFTLTISSLQPEDFATYYCQQSYSTRALTFGGGTKVEIR

SEQ ID NO: 11250 - protein, 108 aa, Artificial Sequence
  Synthetic construct
SSELTQDPAVSVALGQTVRITCQGDSLRSYYASWYQQKPGQAPVLVIYGKNNRPSGIPDRFSGSSSGNTASLTITGAQAEDEADYYCNSRDSSDIPWVFGGGTKLTVL

SEQ ID NO: 11251 - protein, 108 aa, Artificial Sequence
  Synthetic construct
DIVMTQTPLSLSVTPGQPASISCKSSQSLLHGDGKTYLYWYLQKPGQPPQLLIYEVSNRFSGVPDRFSGSGSGTDFTLKISRVEAEDIGVYYCMHPYTFGQGTKLEIK

SEQ ID NO: 11252 - protein, 107 aa, Artificial Sequence
  Synthetic construct
DIQMTQSPSSLSASVGDRVTITCRASQSISSYLNWYQQKPGKAPKLLIYAASSLQSGVPSRFSGSGSGTDFTLTISSLQPEDFAAYYCQQSYSTPHSFGQGTRLEIK

SEQ ID NO: 11253 - protein, 108 aa, Artificial Sequence; identical to SEQ ID NO: 2522
  Synthetic construct

SEQ ID NO: 11254 - protein, 112 aa, Artificial Sequence
  Synthetic construct
QSVLPQPPSVSGAPGQRVTISCTGSSSNIGAGFDVHWYQQLPGTAPKLLIFGNINRPSGVPVRFSASRSGTSASLAISGLQAEDEADYYCQSYDNSLSVPYVFGTGTKVTVL

SEQ ID NO: 11255 - protein, 113 aa, Artificial Sequence
  Synthetic construct
DIVMTQSPDSLAVSLGERATINCKSSQSVLYSSINKNFLAWYQQKPGQPPKLLIYWASTRESGVPDRFSGSGSGTDFTLTISSLQAEDVAVYYCQQYYSTPRTFGQGTKLEIK

SEQ ID NO: 11256 - protein, 110 aa, Artificial Sequence
  Synthetic construct
QSALTQPASVSGSPGQSITISCTGTSSDVGGYNYVSWYQQHPGKAPKIMIYDVSNRPSGVSNRFSGSKSGNTASLTISGLQAEDEADYYCSSYTSISTVIFGGGTRLTVL

SEQ ID NO: 11257 - protein, 110 aa, Artificial Sequence
  Synthetic construct
QSVLTQPPSVSAAPGQKVTISCSGSSSNIGNNFVSWYQQLPGTAPKLLIYDNNKRPSGIPERFSGSKSGTSATLGITGLQTGDEADYYCGTWDSSLSAVVFGGGTKLTVL

SEQ ID NO: 11258 - protein, 106 aa, Artificial Sequence
  Synthetic construct
DIQMTQSPSSLSASVGDRVTITCRASRSISTYLNWYQQKPGKAPKLLIFATSSLQSGVPSRFSGSGSGTDFTLTISSLQPEDFATYYCQQSYSTYTFGQGTKLEIR

SEQ ID NO: 11259 - protein, 107 aa, Artificial Sequence
  Synthetic construct
DIQMTQSPSTLSASVGDRVTITCRASQSISSWLAWYQQKPGKAPKLLIYKASSLEGGVPSRFSGSGSGTEFTLTITSLQPEDFATYYCQQYNSYPYTFGQGTKLEIK

SEQ ID NO: 11260 - protein, 108 aa, Artificial Sequence
  Synthetic construct
EIVLTQSPGTLSLSPGESATLSCRASQSVSSTYLAWYQKKPGQAPRLLIYGASSRATGIPDRFSGSGSGTDFTLTISRLEPEDFAVYYCQQYGSSPLTFGGGTKVEIK

SEQ ID NO: 11261 - protein, 109 aa, Artificial Sequence
  Synthetic construct
EIVLTQSPGTLSLSPGERATLSCRASQSVTSSYLAWYQQKPGQAPRLLIYGASNRATGIPDRFSGSGSGTDFTLTISRLEPEDFAVYYCQRYGGSPRFTFGPGTKVDIR

SEQ ID NO: 11262 - protein, 105 aa, Artificial Sequence
  Synthetic construct
SYELTQPPSVSVSPGQTVSITCSGDKLGDKYASWYQQRPGQSPVVVIYQDSKRPSGIPERFSGSNSGNTATLTISGTQAMDEADYYCQAWDSSVVFGGGTRLTVL

SEQ ID NO: 11263 - protein, 107 aa, Artificial Sequence
  Synthetic construct
DIQMIQSPSSLSASVGDRVTITCRASQSIANYLNWYQQKPGRAPKLLIYTASSLQSGVSSRFSGSGSGTDFTLTISSLQPEDFATYWCQQSYSTPYTFGQGTKLEIK

SEQ ID NO: 11264 - protein, 104 aa, Artificial Sequence
  Synthetic construct
EIVLTQSPATLSLSPGERATLSCRASQSVSSSLAWYQQKPGQAPRLLIYDASNRATGIPARFSGSGSGTDFTLTISSLEPEDFAVYYCQQRSNSFGGGTKVEIK

SEQ ID NO: 11265 - protein, 107 aa, Artificial Sequence
  Synthetic construct
DIQMTQSPSSLSASVGDRVTITCQASHDISNYLNWYQQKSGKAPKLLINDASNLETGVPSRFSGSGSGTDFTFTISSLQPEDIATYYCQQYDNLPFTFGPGTKVDIK

SEQ ID NO: 11266 - protein, 110 aa, Artificial Sequence
  Synthetic construct
QSALTQPASVSGSPGQSITISCTGTSGDVGSYNLVSWYQQHPGKAPKLIIYEGSKRPSGVSNRFSGSKSGNTASLTISGLQAEDEADYYCCSYAGSSTWVFGGGTKLTVL

SEQ ID NO: 11267 - protein, 110 aa, Artificial Sequence
  Synthetic construct
QSDLTQPASVSGSPGQSITISCTGTSSDVGSYNLVSWYQQHPGKAPKVMIYEVRKRPSGVSHRFSGSKSGNTASLTISGLQSEDEADYYCFSYAGSSPWLFGGGTKLTVL

SEQ ID NO: 11268 - protein, 108 aa, Artificial Sequence
  Synthetic construct
SYELTQPPSVSVSPGQTARITCSGDALPKQYAYWFQQKPGLAPVLVIYKDSERPSGIPERFSGSSSGTTVTLTISGVQAEDEADYYCQSADSSATYVVFGGGTKLTVL

SEQ ID NO: 11269 - protein, 107 aa, Artificial Sequence
  Synthetic construct
DIQMTQSPSSLSASVGDRVTITCRASQGIRTDLGWYQQKPGKAPKRLIYAASSLHSGVPSRFSGSGSGTDFTLTISSLQPEDSATYYCLQHNSYPPTFGGGTKVEIK

SEQ ID NO: 11270 - protein, 108 aa, Artificial Sequence
  Synthetic construct
DIQLTQSPSFLSASVGDRVTLTCRASQGITSFLAWYQQKPGKAPKLLIYAASTLQSGVPSRFSGSGSGTEFTLTITSLQPEDFATYYCQQLNSYPALTFGGGTKVEIK

SEQ ID NO: 11271 - protein, 107 aa, Artificial Sequence
  Synthetic construct
DIQMTQSPSSLSASVGDRVTITCQASQDINNYLNWFQQKPGKAPKLLIFDASNLETGVPSRFSGSGSGTDFTFTISSLQPGDIATYYCQQYDNLPWTFGQGTKVEIK

SEQ ID NO: 11272 - protein, 108 aa, Artificial Sequence
  Synthetic construct
EIVLTQSPGTLSLSPGDSATLSCRASQTVSNDYLAWYQQKPGRAPRLLISDASTRAAGIPDRFSGSGSGTDFTLIISRLESEDFAVYYCQQYSDSPLTFGPGTKVDFK

SEQ ID NO: 11273 - protein, 107 aa, Artificial Sequence; identical to SEQ ID NO: 11152
  Synthetic construct

SEQ ID NO: 11274 - protein, 115 aa, Artificial Sequence
  Synthetic construct
QAVLTQPPSLSASPGASVSLTCTLRSGINVGTYRIYWYQQKTGSPPQYVLRYMSDSDQHQGSGVPSRFSGSKDASANAGILLISGLQSEDEADYYCMIWHSSAWVFGGGTKLTVL

SEQ ID NO: 11275 - protein, 109 aa, Artificial Sequence
  Synthetic construct
EIVLTQSPGTLSLSPGERVTLSCRASQSVSSTYLAWYQQKPGQAPRLLIYGASSRATGIPDRFSGSGSGTDFTLTISRLEPEDFAVYFCQQYGSSPVYSFGQGTKLEIK

SEQ ID NO: 11276 - protein, 111 aa, Artificial Sequence
  Synthetic construct
DIVMTQSPLSLPVTPGEPASISCRSSQSLLHSNGYNYLDWYLQKPGQSPQLLIHLGSNRASGVPDRFSGSGSGTDFTLKISRVEAADVGVYYCMQALQTRTFGQGTKLEIK

SEQ ID NO: 11277 - protein, 113 aa, Artificial Sequence
  Synthetic construct
DIVMTQSPDSLAVSLGERATINCKSTQSVLYSSNNKNYLAWYQHKPGQSPNLLIYWASTRESGVPDRFSGSGSGTDFTLTISSLQAEDVAVYFCQQYYSIPHTFGQGTKLEIK

SEQ ID NO: 11278 - protein, 110 aa, Artificial Sequence
  Synthetic construct
QSALTQPASVSGSPGQSITIYCTGTSSDVGNYNLVSWYQQHSGKAPRLMIFEGTKRPSGVSNRFSGSKSGNTASLTISGLQAEDEADYYCCSYAYSSTFVFGTGTKVTVL

SEQ ID NO: 11279 - protein, 109 aa, Artificial Sequence
  Synthetic construct
EIVLTQSPVTLSLSPGERATLSCRASQSVSSYLAWYQQKPGQAPRLLIYDASNRATGIPARFSGSGSGTDFTLTISSLEPEDFAVYYCQQRRNWPPRYTFGQGTKLEIK

SEQ ID NO: 11280 - protein, 113 aa, Artificial Sequence
  Synthetic construct
DVVMTQSPLSLPVTLGQPASISCTSSQSLVYSDGNTYLNWFQQRPGQSPRRLIYKVSNRDSGVPDRFSGSGSGTDFTLKISRVEAEDVGVYYCMQGTHWPPWTFGQGTKVEIK

SEQ ID NO: 11281 - protein, 110 aa, Artificial Sequence
  Synthetic construct
RSALTQPASVSESPGQSITISCTGTSTDVGGSNYVSWYQQKPGKAPKLLIFDVTNRPSGISNRFSGSKSGNTASLTISGLQPADESDYYCSSFISDNTLVFGSGTKVTVL

SEQ ID NO: 11282 - protein, 107 aa, Artificial Sequence
  Synthetic construct
DIQLTQSPSSLSASVGDRFTITCRASQSISSYLNWYQQKPGKAPKLLIYAASSLQSGVPSRFSGSGSGTDFTLTISSLQPEDFATYYCQQSFNTPWTFGQGTKVDIR

SEQ ID NO: 11283 - protein, 110 aa, Artificial Sequence
  Synthetic construct
QSALTQPASVSGSPGQSITISCTGTSSDVGTYNYVSWYQQHPGKAPKVIIYDVSDRPSGVSNRFSGSKSGNTASLTISGLQAEDEADYYCSSYTSSNTYVFGPGTKVTVL

SEQ ID NO: 11284 - protein, 107 aa, Artificial Sequence; identical to SEQ ID NO: 11133
  Synthetic construct

SEQ ID NO: 11285 - protein, 107 aa, Artificial Sequence
  Synthetic construct
DIQMTQSPSSVSASVGDRVTITCRASQGISSWLAWYQQKPGKAPKLLIYSASSLQSGVPSRFSGSGSGTDFTLTISSLQPEDFATYYCQQANSFPWTFGQGTKVEIK

SEQ ID NO: 11286 - protein, 111 aa, Artificial Sequence
  Synthetic construct
QSALTQPASVSGSPGQSITISCTGTSSDVGDYNYVSWYQQHPGKAPKLMIYDVSNRPSGVSTRFSGSKSGNTASLTISGLQAEDEADYYCISYTSSSTQVVFGGGTKLTVL

SEQ ID NO: 11287 - protein, 107 aa, Artificial Sequence
  Synthetic construct
DIQMTQSPSTLSASVGDRVTITCRASQSISSWLAWYQQRPGKAPKLLIYKASSLESGVPSRFSGSGSGTEFTLTISSLQPDDFATYYCQQYNSYPWTFGQGTKVEIK

SEQ ID NO: 11288 - protein, 112 aa, Artificial Sequence
  Synthetic construct
DIVMTQSPLSLPVTPGEPASISCRSNQSLLHSNGYNYLDWYLQKPGQSPQLLIYLGSYRASGVPDRFSGSGSGTDFTLKISRVEAEDVGVYYCMQALQTPPAFGGGTKVEIK

SEQ ID NO: 11289 - protein, 108 aa, Artificial Sequence
  Synthetic construct
SYVLTQPTSVSVAPGKTARVTCGGINVGSDGVHWYQQKPGQAPVLVIFYNSDRPSGIPERFSGSSSGNTATLTISRAEAGDEADYYCQVWDRSNDQGVFGGGTKLTVL

SEQ ID NO: 11290 - protein, 108 aa, Artificial Sequence
  Synthetic construct
DIQMTQSPSSLSASLGDRVTITCQASQDIGDYLNWYQQKSGQAPKLLIYDASNLESGVPSRFSGSGSGTDFILTINGLQSDDFGTYYCQHYDYPIVFTFGPGTKVEIR

SEQ ID NO: 11291 - protein, 110 aa, Artificial Sequence
  Synthetic construct
QSALTQPPSVSGSPGQSVTISCTGTSSDVGSYNRVSWYQQVPGIAPKLMIYEVINRPSGVPDRFSGSKSGNTASLTISGLQAEDEADYYCSSYTSSSTYVFGTGTKVTVL

SEQ ID NO: 11292 - protein, 107 aa, Artificial Sequence
  Synthetic construct
DIVMSQSPDSLAVSLGERATINCKSSQSVDNNLAWYQQKPGLPPKVLIYWASTRESGVPDRFSGSGAGTDYTLTISSLQAEDVAVYHCQQYDAFPLTLGGGTRVEIK

SEQ ID NO: 11293 - protein, 106 aa, Artificial Sequence
  Synthetic construct
EIVMTQSPATLSVSPGERATLSCRASQSVSSYLAWYQQKPGQAPRLLIYGASTRATGIPARFSGSGSGTEFTLTISSLQSEDFALYYCQQYNNWWTFGQGTKVEIK

SEQ ID NO: 11294 - protein, 110 aa, Artificial Sequence
  Synthetic construct
QAVVTQEPSVTVSPGGTVTLTCGSSTGAVTSGHYPYWFQQKPGQAPRTLIYDTINKHSWTPARFSGSLLGGKAALTLSGAQPEDEADYYCLLSYSDTRRLFGGGTKLTVL

SEQ ID NO: 11295 - protein, 111 aa, Artificial Sequence
  Synthetic construct
QSVLTQPPSVSAAPGQKVTISCSGSRSNIGNNYVSWYQQLPGTAPKLLIYENNKRPSGIPDRFSGSKSGTSATLGITGLQTGDEADYYCGTWDSSLSPYWVFGGGTKLTVL

SEQ ID NO: 11296 - protein, 108 aa, Artificial Sequence
  Synthetic construct
DIQLTQSPSFLSASVGDRVTITCRASQGISSYLAWYQQKPGKAPNLLIYAASTLQSGVPSRFSGSGSGTEFTLTISSLQPEDFATYYCQQLNSYPMYTFGQGTKVEIK

SEQ ID NO: 11297 - protein, 110 aa, Artificial Sequence
  Synthetic construct
QSVLTQPPSASGTPGQRVTISCSGSSSNIGSNYVSWYQHLPGTAPKLLIYRNNQRPSGVPDRFSGSKSGTSASLAISGLRSEDEADYYCAAWDDSLSGYVFGTGTKVTVL

SEQ ID NO: 11298 - protein, 105 aa, Artificial Sequence
  Synthetic construct
SYELTQSPSVSVSPGQTASISCSGNKLGDKYVCWYQQKPGQSPLLVIYQDNKRPSGIPERFSGSNSGNTATLTISGTQAVDEADYYCQAWDSSVVFGGGTKLTVL

SEQ ID NO: 11299 - protein, 107 aa, Artificial Sequence
  Synthetic construct
EIVMTQSPATLSVSPGERATLSCRASQSVSSNLAWYQQKPGQAPRLLIYGASTRDTGIPARFSGSGSGTEFTLTISSLQFEDFAVYYCQQHNKWPLTFGGGTKVEIK

SEQ ID NO: 11300 - protein, 106 aa, Artificial Sequence
  Synthetic construct
SYELTQPPSVSVSPGQTASITCSGDKLGDKYACWYQQKPGQSPVLVIYQDTKRPSGIPERFSGSNSGNTATLTISGPQAMDEADYYCQAWDSSTVVFGGGTRLTVL

SEQ ID NO: 11301 - protein, 108 aa, Artificial Sequence
  Synthetic construct
QSALTQPRSVSGSPGQSVTISCTGTSSDVGGNDYVSWYQQHPGKAPKLLIYLLYRRPSGVPDRFSGSKSGNTASLTISGLQAEDEADYYCFSYVGAYLFGGGTKLTVL

SEQ ID NO: 11302 - protein, 110 aa, Artificial Sequence
  Synthetic construct
QSVLTQPPSASGTPGQRVTISCSGSSSNIGSNYVYWYQQFPGTAPKLLIYRNDRRPSGVPDRFSGSKSGTSASLAISGLRSEDEADYYCATWDDSLSGWVFGGGTKVTVL

SEQ ID NO: 11303 - protein, 108 aa, Artificial Sequence
  Synthetic construct
SYELTQPPSVSVSPGQTARITCSADALPNQYAYWYQQKPGQAPVLVIYKDSERPSGIPERFSGSSSGTTVTLTISGVQAEDEADYYCQSTDSSGPYWVFGTGTKVTVL

SEQ ID NO: 11304 - protein, 108 aa, Artificial Sequence
  Synthetic construct
DIQMTQSPSSLSASVGDRVTITCRASQSISSYLNWYQQKPGKAPKLLIYAASSLQSGVPSRFSGSGSGTDFTLTISSLQPEDFATYYCQQSYSTPPYTFGQGTKLEIK

SEQ ID NO: 11305 - protein, 107 aa, Artificial Sequence
  Synthetic construct
DIQMTQSPSSLSASVGDRVTITCRASQGISDYLAWYQQKPGKVPKVLIYAASTLQSGVPSRFSGSGSGTDFTLTISSLQPEDVATYYCQKYNSAPLTFGGGTKVEIK

SEQ ID NO: 11306 - protein, 107 aa, Artificial Sequence
  Synthetic construct
EIVLTQSPDFQSVTPKEKVTITCRASQSIGTKLHWYQQKPDQSPKLLIKYASQSFSGVPSRFSGSGSGTDFTLTINSLEAEDAATYYCHQSSSLPLTFGGGTKVEIK

SEQ ID NO: 11307 - protein, 113 aa, Artificial Sequence
  Synthetic construct
DIVMTQSPDSLAVSLGERATINCKSSQSVLYSSNNKNYLAWYQQKPGQPPKLLIYWASTRESGVPDRFSGSGSGTDFTLTISSLQAEDVAVYYCQQYYSTPPTFGQGTKVEIK

SEQ ID NO: 11308 - protein, 108 aa, Artificial Sequence
  Synthetic construct
SSELTQDPAVSVALGQTVRVTCQGDSLTKYYASWYQQKPGQAPRLVIYDNNNRPTGIPDRFSGSSSGNTASLIITGAQAEDEADYYCQSRSASGSHLVFGGGTKVTVL

SEQ ID NO: 11309 - protein, 113 aa, Artificial Sequence
  Synthetic construct
DIVMTQSPDSLAVSLGERATVNCKSSQDILYSANNKNYLAWYQQKPGQPPKLLIYWASTRESGVPDRFSGSGSGTDFTLTISSLQAEDVALYYCHQYYSIPYTFGQGTKLEIR

SEQ ID NO: 11310 - protein, 112 aa, Artificial Sequence
  Synthetic construct
DVVMTQSPLSLPVTLGQPASISCRSSQSLVYSDGNTYLTWFQQRPGQSPRRLIYKVSNRESGVPDRFSGSGSGTDFTLKISRVEAEDVGVYYCMQGTHWPPAFGQGTKVEIK

SEQ ID NO: 11311 - protein, 108 aa, Artificial Sequence
  Synthetic construct
DIQLTQSPSFLSASVGDRVTITCRASQGISSYLAWYQQKPGKAPKLLIYAASTLQSGVPSRFSGSGSGTEFSLTISSLQPEDFATYYCQQLNSYPPATFGPGTTVDIK

SEQ ID NO: 11312 - protein, 110 aa, Artificial Sequence; identical to SEQ ID NO: 11125
  Synthetic construct

SEQ ID NO: 11313 - protein, 107 aa, Artificial Sequence
  Synthetic construct
EIVLTQSPGTLSLSPGERATLSCRASQSVSSSYLAWYQQKPGQAPRLLIYGASSRATGIPDRISGSGSGTDFTLTISGLEPEDFAVYYCQQYGSSPTFGQGTKVEIK

SEQ ID NO: 11314 - protein, 107 aa, Artificial Sequence; identical to SEQ ID NO: 3295
  Synthetic construct

SEQ ID NO: 11315 - protein, 112 aa, Artificial Sequence
  Synthetic construct
DIVMTQSPLSLPVTPGEPASISCRSSQSLLFGNGYTYLNWYLQKPGQSPQLLIYLGSNRASGVPDRFSVNGSGTDFTLIISRVEAEDVGVYYCMQALQTPWTFGQGTKVEIK

SEQ ID NO: 11316 - protein, 110 aa, Artificial Sequence
  Synthetic construct
QSVLSQPPSASGTPGQKITISCSGSYSNIGGNSVNWYRQVPGTAPQVLIHFDDERPSGVPDRISGSKSGASGALVITGLQSEDEADYYCASYDDNLKGWVFGGGTKLTVL

SEQ ID NO: 11317 - protein, 112 aa, Artificial Sequence
  Synthetic construct
DIVMTQTPLSLSVTPGQPASISCKSSQSLLHSDGKTYLYWFLHKPGQPPQLLIYDLSSRFSGVPDRFSGSGSGTDFTLKISRVEAEDVGLYYCMQSIQPPFTFGQGTKLEIK

SEQ ID NO: 11318 - protein, 108 aa, Artificial Sequence
  Synthetic construct
EIVLTQSPGTLSLSPGERATLSCRASQSLSSSDLAWFQQKPGQAPRLLIFGASSRAIGIPDRFSGSGSGTDFTLTISRLEPEDFAVYYCQQYGSSPWTFGQGTKVEIK

SEQ ID NO: 11319 - protein, 107 aa, Artificial Sequence
  Synthetic construct
SYELTQPPSVSVSPGQTARITCSGDALPKKYAYWYQQKSGQAPVLVIYEDSKRPSGIPERFSGSSSGTMATLTISGAQVEDEGDYYCYSRDSSANPLFGGGTKLTVL

SEQ ID NO: 11320 - protein, 110 aa, Artificial Sequence; identical to SEQ ID NO: 2874
  Synthetic construct

SEQ ID NO: 11321 - protein, 107 aa, Artificial Sequence
  Synthetic construct
DIQMTQSPSSLSASVGDRVTITCQASQDISNYLNWYQQKPGKAPKLLIYDASNLETGVPSRFSGSGSGTDFTFTISSLQPEDIATYYCQQYDNVPYTFGQGTKLEIK

SEQ ID NO: 11322 - protein, 107 aa, Artificial Sequence
  Synthetic construct
DIQMTQSPSTLSASVGDRVTITCRASQSVTNWLAWYQQKPGKAPKLLIYTASSLESGVPSRFSGSGSGTEFILTISSLQPDDFATYYCQQYSTYSKTFGQGTKLEIK

SEQ ID NO: 11323 - protein, 107 aa, Artificial Sequence
  Synthetic construct
DIQMTQSPSSLSAYVGDRVTISCRASQSVSTYVTWYQQKPGKPPTLLISGASGLQSGVPSRFSGSGSGTDFTLTISSLQPEDFATYYCQQNYHTPRTFGQGTKVEFK

SEQ ID NO: 11324 - protein, 111 aa, Artificial Sequence
  Synthetic construct
QSVLTQPPSVSGAPGQRVTISCTGSSSNIGAGYDVHWYQQLPGTAPKLLIYGSTNRPSGVPDRFSGSKSGTSASLAISGLQAEDEADYYCQSYDSSLSGSVFGTGTKVTVL

SEQ ID NO: 11325 - protein, 113 aa, Artificial Sequence
  Synthetic construct
DIVMTQSPDSLTVSLGERATINCRSSQRVLYSSDNKNYLAWYQQKPGQPPHLLIYWASTRQSGVPDRFSGSGSGTDFTLTINSLQAEDVAIYYCQQYYSAPYTFGQGTKLEIK

SEQ ID NO: 11326 - protein, 110 aa, Artificial Sequence
  Synthetic construct
QSALTQPASVSGSPGQSITISCTGTSSDVGGYNYVSWYQQHPGKAPKLMIYDVSNRPSGVSNRFSGSKSGNTASLTISGLQAEDEADYYCSSYTSSSTWVFGGGTKLTVL

SEQ ID NO: 11327 - protein, 110 aa, Artificial Sequence
  Synthetic construct
QSALTQPASVSGSPGQSIAISCIGTSRDVGNYKLVSWYQQYPGKAPKVIISDDTKRPSGVSDRFSGSKSGNTASLTISGLQAEDEADYYCCSFAGSGTWVFGGGTKVTVL

SEQ ID NO: 11328 - protein, 107 aa, Artificial Sequence
  Synthetic construct
EIVLTQSPATLSLSPGERATLSCRASQSVSTFLAWYQQKPGQAPRLLIYDASNRATGVPARFSGSGSGTDFTLTISSLEPEDFAVYFCQQRSIWPPLFGQGTKLEIK

SEQ ID NO: 11329 - protein, 110 aa, Artificial Sequence; identical to SEQ ID NO: 10988
  Synthetic construct

SEQ ID NO: 11330 - protein, 107 aa, Artificial Sequence
  Synthetic construct
SYELTQPPSVSVSPGQTARITCSGDALPKKYAYWYQQKSGQAPVLVIYEDSKRPSGIPERFSGSSSGTMATLTISGAQVEDEADYYCYSTDSSGNPFFGTGTKVTVL

SEQ ID NO: 11331 - protein, 109 aa, Artificial Sequence
  Synthetic construct
QSALTQPASVSGSPGQSITISCTGISSDVGDYNYVSWYQHHPGKAPKVMIYDVSNRPSGVSNRFSGSKSGNTASLTISGLQAEDEADYYCSSYRSTTRVFGGGTKLTVL

SEQ ID NO: 11332 - protein, 107 aa, Artificial Sequence
  Synthetic construct
DIQMTQSPSSLSASVGDRVTITCRASQSISSYLNWYQQKPGKAPNLLIYAASSLQSGVPSRFSGSGSATDFTLTISSLQPEDFATYYCQQSYSTLLTFGGGTKVEIK

SEQ ID NO: 11333 - protein, 112 aa, Artificial Sequence
  Synthetic construct
DIVMTQSPLSLPVTPGEPASISCRSSHSLLHSNGYNYLDWYLQKPGQSPQLLIYLGSNRASGVPDRFSGSGSGTDFTLKISRVEAEDFGIYYCMQALQTPLTFGGGTKVEIK

SEQ ID NO: 11334 - protein, 106 aa, Artificial Sequence
  Synthetic construct
EIVLTQSPGTLSLSPGERATLSCRASESLSSRYLAWYQQKPGQAPRLLIYGASSRATGIPDRFSGSGSGTDFTLTISRLESEDFAVYYCQQYGSFTFGQGTRLEIK

SEQ ID NO: 11335 - protein, 110 aa, Artificial Sequence
  Synthetic construct
QSALTQPASVSGSPGQSITISCTGTSSDVGGYNYVSWYQQHPGKAPRLMIYDVSDRPSGVSNRFSGSKSGNTASLTISGLRTEDEADYYCSSYTSTSTLVFGGGTKLTVL

SEQ ID NO: 11336 - protein, 106 aa, Artificial Sequence
  Synthetic construct
EIVLTQSPDFQSVTPKEKVTITCRASQSIGSSLHWYQQKPDQSPKLLIKYASQSFSGVPSRFSGSGSGTDFTLTISSLEAEDAATYYCHQSSSLPSFGQGTKLEIK

SEQ ID NO: 11337 - protein, 107 aa, Artificial Sequence
  Synthetic construct
DIQMTQSPSSLSASVGDRVTITCRTSQGIRNDLGWYQQKPGKAPKRLIFAVSSLQSGVPSRFSGSGSGTEFTLTISSLQPEDFATYYCLQYHTYPLTFGGGTKVEIK

SEQ ID NO: 11338 - protein, 107 aa, Artificial Sequence; identical to SEQ ID NO: 11071
  Synthetic construct

SEQ ID NO: 11339 - protein, 110 aa, Artificial Sequence
  Synthetic construct
QSTLTQSPSASGTPGQRITVSCSGSSSNIGRNYVYWYQQIPGTAPKLLIFRNNQRPSGVPDRFSGSKSGASASLAISGLRSEDEADYYCAAWDDSLSGRVFGGGTKVTVL

SEQ ID NO: 11340 - protein, 110 aa, Artificial Sequence
  Synthetic construct
QSALTQPPSASGSPGQSVTISCTGTSSDIGDYNYVSWYQQHPGKVPKLMIYEVSKRPSGVPDRFSGSKSGNTASLTVSGLQAEDEADYYCSSYAGSNIMVFGTGTKVTVL

SEQ ID NO: 11341 - protein, 111 aa, Artificial Sequence
  Synthetic construct
QSVLTQPPSVSGAPGQRVTISCTGSSSNIGAGYDVHWYQQFPGTAPKLLIYVNSNRPSGVPDRFSGSKSGTSASLAISGLQAEDEADYYCQSYDSSLSGYVFGTGTKVTVL

SEQ ID NO: 11342 - protein, 106 aa, Artificial Sequence
  Synthetic construct
QSALTQPRSVSGSPGQSVTISCTGTSSDVGGYNYVSWYQQHPGKAPKLMIYDVSKRPSGVPDRFSGSKSGTLTISGLQAEDEADYYCLSYAGSNTLFGGGTKLTVL

SEQ ID NO: 11343 - protein, 107 aa, Artificial Sequence
  Synthetic construct
EIVLTQSPATLSLSPGERATLSCRASQSVSSYLGWYQQKPGQAPRLLIYDASNRATGIPARFSGSGSGTDFTLTISSLEPEDFAVYYCQQRSNWLWTFGQGTKVEIK

SEQ ID NO: 11344 - protein, 107 aa, Artificial Sequence
  Synthetic construct
DIQMTQSPSSVSASVGDRVTITCRASQGISSWLAWYQQKPGKAPNLLIYAASSLQSGVPSRFSGSGSGTDFTLTISSLQPEDFATYYCQQANSFPLTFGGGTKVEIK

SEQ ID NO: 11345 - protein, 108 aa, Artificial Sequence
  Synthetic construct
SYELTQPPSVSVSPGQTARITCSGDALPKQYAYWFQQKPGEAPVVVIYKDSERPSGIPERFSGSSSGTTVTLAISGVQAEDETDYYCQSADSSGTYLVFGGGTKLTVL

SEQ ID NO: 11346 - protein, 107 aa, Artificial Sequence
  Synthetic construct
DIQMTQSPSSLSASVGDSVTITCQASQDISYYLNWYQQKPGKAPKLLIYDASSLEAGVPSRFSGSGSGTDFTFTISSLQPEDIATYYCQHYDNLPPTFGQGTKVEIK

SEQ ID NO: 11347 - protein, 108 aa, Artificial Sequence
  Synthetic construct
EIVMTQSPATLSVSPGERATLSCRASQSVSSSLAWYQQKPGQAPRLLIYGASTRATGIPARFSGSGSGTEFTLTISSLQSEDFAVYYCQQYNNWPPLTFGGGTKVEIK

SEQ ID NO: 11348 - protein, 107 aa, Artificial Sequence
  Synthetic construct
DIQMTQSPFTLSASVGDRVTITCRASQSISSWLAWYQQKPGKAPKLLIYKASSLESGVPSRFSGSGSGTEFTLTISSLQPDDFATYYCQQYNSYPWTFGQGTKVEIK

SEQ ID NO: 11349 - protein, 105 aa, Artificial Sequence
  Synthetic construct
SYELTQPPSVSVSPGQTASITCSGDKLGDKYACWYQLKPGQSPVLVIYQDSKRPSGIPERFSGSNSGNTATLTISGTQAMDEADYYCQAWDSSVVFGGGTKLTVL

SEQ ID NO: 11350 - protein, 103 aa, Artificial Sequence
  Synthetic construct
DIQMTQSPSSLSASVGDRVTITCRASQSISSYLNWYQQKPGKAPNLLIYAASSLQSGVPSRFSGSGSGTDFTLTISSLQPEDFATYYCQQSYSFGPGTKVDIK

SEQ ID NO: 11351 - protein, 112 aa, Artificial Sequence
  Synthetic construct
DIVMTQSPLSLPVTPGEPASISCRSSQSLLHSNGYNYLDWYLQKPGQSPQLLIYLGSNRASGVPDRFSGSGSGTDFTLKISRVEAEDVGVYYCMQPLQTPWTFGQGTKVEMK

SEQ ID NO: 11352 - protein, 109 aa, Artificial Sequence
  Synthetic construct
SYELTQPPSVSVSPGQTARITCSGDALPKQYAYWYQQKPGQAPAVVIYKDSERPSGIPERFSGSTSGTTVTLTISGVQAEDEADYYCQSADSSGTYPVVFGGGTKLTVL

SEQ ID NO: 11353 - protein, 107 aa, Artificial Sequence
  Synthetic construct
EIVMTQSPATLSVSPGERATLSCRASQSVSSDLAWYQQKPGQAPRLLIYGTSTRATGIPARFSGSGSGTEFTLTISSLQSEDFAVYYCQQYDNWPQTFGQGTKVEIK

SEQ ID NO: 11354 - protein, 112 aa, Artificial Sequence
  Synthetic construct
DIVMTQSPLSLPVTPGEPASISCRSSQSLLHSNGFNYLHWFLQKPGQSPQLLIYLGSNRASGVPDRFSGSGSGTDFTLKISRVEADDVGVYYCMQALQTPWTFGQGTKVEIK

SEQ ID NO: 11355 - protein, 110 aa, Artificial Sequence
  Synthetic construct
QSVLTQPPSVSAAPGQKVTISCSGSSSNIGNNYVSWYQHLPGTAPRLLIYEDNERPSGIPDRFSGSKSGTSATLGITGLQAGDEADYYCGTRDSSLSIYVFGPGTKVTVL

SEQ ID NO: 11356 - protein, 108 aa, Artificial Sequence
  Synthetic construct
SYELTQPPSVSVSPGQTARITCFGDALPKQYAYWYQQKPGQAPVVVIYKDSERPSGIPERFSGSSSGTTVTLTISGVRAEDEADYYCQSADTSGSFVLFGGGTKLTVL

SEQ ID NO: 11357 - protein, 107 aa, Artificial Sequence
  Synthetic construct
SYELTQPPSVSVSPGQTARITCSGDALPNQYAYWYQLRPGQAPVLVIYKDSERPSGIPERFSGSGSGTTVTLTISGVQAEDEADYYCQSADSSGTYVFGTGTKVTVL

SEQ ID NO: 11358 - protein, 111 aa, Artificial Sequence
  Synthetic construct
QSVLTQPPSVSGAPGQRVTISCTGSSSNIGAGYDVHWYQQLPGTAPKLLIYGNSNRPSGVPDRFSGSKSGTSASLAISGLQAEDEADYYCQSYDSSLSGNVFGTGTKVTVL

SEQ ID NO: 11359 - protein, 106 aa, Artificial Sequence
  Synthetic construct
SYELTQPPSVSVSPGQTASITCSGDKLGDKYACWYQLKPGQSPVLVIYQDTKRPSGIPERFSGSNSGNTATLTISGTQAMDEADFYCQAWDSSTVVFGGGTKLTVL

SEQ ID NO: 11360 - protein, 108 aa, Artificial Sequence
  Synthetic construct
DIQMTQSPSSLSASVGDRVTITCRASQSISSYLNWYQQKPGKAPKVLIYAASNLQSGVPSRFSGSGSGTDFTLTISSLQPEDIGTYYCQQSYSTSMYTFGQGTKLEIK

SEQ ID NO: 11361 - protein, 108 aa, Artificial Sequence
  Synthetic construct
SYELTQPPSVSVSPGQTARITCSGDALPKKYAYWYQQKSGQAPVLLISEDSKRPSGIPERFSGSSSGTMATLTISGAQVEDEADYYCYSTDSSANSGVFGGGTKLTVL

SEQ ID NO: 11362 - protein, 110 aa, Artificial Sequence
  Synthetic construct
QTVVTQEPSFSVSPGGTITLTCGLSSGSVSTNYYPTWYQQTPGRTPRTLIYSTNTRSSGVPDRFSGSILGNKAALTITGAQADDESDYYCVLYMGSGSFVFGTGTKVTVL

SEQ ID NO: 11363 - protein, 107 aa, Artificial Sequence
  Synthetic construct
DIQMTQSPSSLSASVGDRVTITCRASQSISNYLNWYQQRPGNAPDLLIYAASTLQSGVSSRFSGSGSGTEFSLTISSLQPEDFATYYCQQSYSTPHTFGQGTKLEIK

SEQ ID NO: 11364 - protein, 107 aa, Artificial Sequence
  Synthetic construct
DIQMTQSPSPLSASVGDRVTITCRASQSISSYLNWYQQKPGKAPKLLIYAASSLQSGVPSRFSGSGSGTDFTLTISSLQPEDFATYYCQQSYSTLWTFGQGTKVEIK

SEQ ID NO: 11365 - protein, 107 aa, Artificial Sequence
  Synthetic construct
DIQLTQSPTFLSTSVGDRVTITCRASQGISRNLAWYQQNPGKAPKLLIYAASTLQSGVPSRFSGSGSGTEFTLTISSLQPEDFATYYCQQLSSYPVTFGGGTKVEIK

SEQ ID NO: 11366 - protein, 107 aa, Artificial Sequence
  Synthetic construct
DIQMTQSPSTLSASVGDRVTITCRASQSLSSWLAWYQQKPGKAPKLLIYKASSLESGVPSRFSGSGSGTEFLLTINSLQPDDFATYYCQQYNSYPWTFGQGTKVDIA

SEQ ID NO: 11367 - protein, 108 aa, Artificial Sequence
  Synthetic construct
EIVLTQSPGTLSLSPGERATLSCRASQTVSSSYLAWFQQKPGQAPRLLIYATSSRAIGIPDRFSGSGSGTDFTLTISRLEPEDFAVYYCQQYGSSPWTFGQGTKVEIK

SEQ ID NO: 11368 - protein, 114 aa, Artificial Sequence
  Synthetic construct
DIVMTQSPDSLAVSLGERATINCKSSQSVLYSSNNKNYLAWYQQKPGQPPKLLIYWASTRESGVPDRFSGSGSGTDFTLTISSLQAEDVAVYYCQQYYIPPPGTFGQGTKVEIK

SEQ ID NO: 11369 - protein, 110 aa, Artificial Sequence
  Synthetic construct
QSALTQPASVSGSPGQSITISCTGTSSDVGYYNYVSWYQRHPGKAPKLMIYDVTDRPSGVSNRFSGSKSGNTASLTISGLQAEDEADYYCNSYTTSSTYVFGTGTKVTVL

SEQ ID NO: 11370 - protein, 110 aa, Artificial Sequence
  Synthetic construct
QSALTQPPSASGSPGQSVTISCTGTSSDVGGYDYVSWYQQHPGKAPKLMIYDVSKRPSGVPDRFSGSKSGNTASLTVSGLQAGDEADYYCSSYAGSNNLVFGGGTKVTVL

SEQ ID NO: 11371 - protein, 110 aa, Artificial Sequence
  Synthetic construct
QSVLTQPPSASGTPGQRVTISCSGSRSNIGSQIVNWFQQLPGTAPKLLIYNNNQRPSGVPDRFSGSKSGTSASLAISGLQSEDEADYFCEAWDDSLPGNVFGTGTKVTVL

SEQ ID NO: 11372 - protein, 111 aa, Artificial Sequence
  Synthetic construct
QSVLTQPPSVSGAPGQRVTISCTGSSSNIGAGYDVHWYQQLPGTAPKVLIYANSNRPSGVPDRFSGSKSGISASLAITGLQAEDEAEYYCQSYDSSLSGSVFGGGTKLTVL

SEQ ID NO: 11373 - protein, 110 aa, Artificial Sequence
  Synthetic construct
QSVLTQPPSASGTPGQRVAISCSGSSSNIGSKPVNWYQQLPGTAPKVVIYTDNQRPSGVPDRFSGSKSGTSASLAISGLQSEDEADYYCAAWDDSLNGWVFGGGTRLTVL

SEQ ID NO: 11374 - protein, 106 aa, Artificial Sequence
  Synthetic construct
DIQMTQSPSSLSASVGDRVTISCQTSQDISIYLNWYQQKPGKAPKLLIYDASNLEAGAPSRFSGSGSGTDFTFTISSLQPEDIATYYCQHYDNLPRFGPGTKVDIK

SEQ ID NO: 11375 - protein, 107 aa, Artificial Sequence
  Synthetic construct
DIQMTQSPSSLSASVGDRVTITCRASQSIRTYLSWYQQKRGQAPSLLIYATSTLRGGVPSRFSGSGSGTDFSLTISNLQPEDFATYYCQQSYDVPRTFGQGTKVEVK

SEQ ID NO: 11376 - protein, 111 aa, Artificial Sequence
  Synthetic construct
QSVLTQPPSVSGAPGQRVTISCTGSSSNIGAGYDVHWYQQLPGTAPKLLIYRSSNRPSGVPDRFSGSKSGTSASLAISGLQAEDEGDYYCQSYDSGLSDLVFGGGTRLTVV

SEQ ID NO: 11377 - protein, 110 aa, Artificial Sequence
  Synthetic construct
QSVLTQPPSVSAAPGQKVTISCSGSSSNIGNNYVSWYQQLPGTAPKLLICENNKRPSGIPDRFSGSKSGTSATLGITGLQTGDEADYYCGTWDSSLSAVVFGGGTKLTVL

SEQ ID NO: 11378 - protein, 104 aa, Artificial Sequence
  Synthetic construct
EIVLTQSPATLSLSPGERATLSCRASQSVSSYLAWYQQKPGQAPRLLIYDASNRATGIPARFSGSGSGTDFTLTISSLEPEDFAVYYCQQRSSVFGGGTKVEIK

SEQ ID NO: 11379 - protein, 56 aa, Artificial Sequence
  Synthetic construct
SKKATDIPARFSGRGSGTDFTLTISSLEAEDFALYYCQQRKYWPWTFGQGTKVEIK

SEQ ID NO: 11380 - protein, 107 aa, Artificial Sequence
  Synthetic construct
EIVLTQSPGTLSLSPGERATLSCRASQSVSSSYLAWYQQKPGQAPRLLIYGASRRATGIPDRFSGSGSGTDFTLTISRLEPEDFAVYYCQQYGSSITFGQGTRLEIK

SEQ ID NO: 11381 - protein, 107 aa, Artificial Sequence
  Synthetic construct
DTQLTQSPSSLSASVGDRVTITCQASQDINNYLNWYQQKPGKPPKLVIHDASNLETGVPSRFSGTGSGTDLSLTISSLQPEDIATYYCQQFHSLPLTFGGGTKVEIK

SEQ ID NO: 11382 - protein, 108 aa, Artificial Sequence
  Synthetic construct
EIVLTQSPGTLSLSPGERATLSCRASQSVSSSYLAWYQQRPGQAPRVIIYGASTRAAGIPDRFSGSGSGSDFTLTISRLEPEDFAVYYCQQYGSSPQTFGQGTKVEIK

SEQ ID NO: 11383 - protein, 109 aa, Artificial Sequence
  Synthetic construct
DIVLTQSPATLSLSPGERATLSCRASQSVGSYLAWYQHKPGQAPRLLIYDASNRATGIPARFSGSGSGTDFTLTISSLEPEDFAIYYCHQRSNWPPRITFGQGTRLEIK

SEQ ID NO: 11384 - protein, 113 aa, Artificial Sequence
  Synthetic construct
DIVMTQSPDSLAVSLGERATINCKSSQSVLYSSNNKNYLAWYQQKPGQPPKLLIYWASTRESGVPDRFSGSGSGTDFTLTISSLQAEDVAVYYCQQYYITPLAFGQGTKVEIK

SEQ ID NO: 11385 - protein, 111 aa, Artificial Sequence
  Synthetic construct
QSVLTQPPSVSGAPGQRVTISCTGSSSNIGAGYDVHWYQQLPGTAPKLLIYGNNNRPSGVPDRFSGSKSGTSASLAISGLQAEDEVDYYCQSYDSSLSGSVFGGGTKLTVL

SEQ ID NO: 11386 - protein, 108 aa, Artificial Sequence
  Synthetic construct
EIVMTQSPVTLSASPGERATLSCRASQSVRRNLAWYQQNPGQVPRLLIHGASTRATDIPPRFSGSGSGTEFTLTISSLQSDDVAIYYCQQYDDWPLITFGPGTRLEIK

SEQ ID NO: 11387 - protein, 110 aa, Artificial Sequence
  Synthetic construct
QSALTQPASVSGSPGQSITISCTGTSGDVGGYNYVSWYQQHPGTAPKLMIYDVSNRPSGVSYRFSGSKSGNTASLTISGLQAEDEADYFCSSYTSSSTYVFGTGTKVTVL

SEQ ID NO: 11388 - protein, 109 aa, Artificial Sequence
  Synthetic construct
EIVMTQSPATLSVSPGERATLSCRASQSISSNLAWYQQKPGQAPRLLIYGASTRASGIPARFSGSGSGTEFTLTISSLQSEDFAVYFCQQYSNWPPALTFGGGTKVEIK

SEQ ID NO: 11389 - protein, 107 aa, Artificial Sequence
  Synthetic construct
EIVMTQSPATLSVSPGERATLSCRASQSVSSNLAWYQQKPGQAPRLLIYGASTRAIGIPARFSGSGSGTEFTLTISSLQSEDFAVYYCLQYNNWPRTFGQGTKVEIK

SEQ ID NO: 11390 - protein, 111 aa, Artificial Sequence; identical to SEQ ID NO: 11341
  Synthetic construct

SEQ ID NO: 11391 - protein, 108 aa, Artificial Sequence; identical to SEQ ID NO: 11228
  Synthetic construct

SEQ ID NO: 11392 - protein, 105 aa, Artificial Sequence
  Synthetic construct
SYVLTQPPSVSVAPGKTARITCGENNIGSKSVHWYQQEPGQAPVLVIYYDSDRPSGIPERFSGSNSGNTATLTISRVEAGDEADYYCQVWDSGWVFGGGTKLTVL

SEQ ID NO: 11393 - protein, 109 aa, Artificial Sequence
  Synthetic construct
EVVLTQSPATLSLSPGERATLSCRASQSVSSFLAWYQQKSGQAPRLLIYDASNRATGIPARFSGNGSGTDFTLTISSLEPEDFAVYYCQQRSHWPPVITFGQGTRLEIK

SEQ ID NO: 11394 - protein, 112 aa, Artificial Sequence
  Synthetic construct
DIVMTQTPLSLSVTPGQPASISCKSSQSLLHSDGKTYLYWYLQKPGQPPQLLIYEVSNRFSGVPDRFSGGGSGSDFTLKISRVEAEDVGVYYCMQSIQLPLTFGGGTKVEIK

SEQ ID NO: 11395 - protein, 107 aa, Artificial Sequence
  Synthetic construct
SFELTQPPSVSVSPGQTARITCSGDALPKYYVYWYQQKPGQAPVLVIYKDSERPSGIPERFSGSSSGTTVTLTVSGVQAEDEADYYCQSADSSGSWVFGGGTKLTVL

SEQ ID NO: 11396 - protein, 107 aa, Artificial Sequence
  Synthetic construct
DIQMTQSPSSLSASVGDRVTIACRASQSIATYLNWYQQKPGKAPKLLIYDASSLQSGVPSRFSGSGSGTDFTLTISSLQPEDFAIYYCQQSYSTPWTFGQGSKVEIK

SEQ ID NO: 11397 - protein, 110 aa, Artificial Sequence
  Synthetic construct
QSALTQPASVSGSPGQSITISCTGTNSDVGSYDHVSWFQQRAGRAPELLIYDVTNRPSGVSNRFSGSKSGNTASLTISGLQAEDEADYYCSSYTSSSTRVFGTGTTVTVL

SEQ ID NO: 11398 - protein, 108 aa, Artificial Sequence
  Synthetic construct
SYVLTQPPSVSVAPGKTARITCGGNNIGSKSVHWYQQKPGQAPVLVIYYDSDRPSGIPERFSGSNSGNTATLTISRVEAGDEADFYCQVWDNISDDFVFGTGTKVTVL

SEQ ID NO: 11399 - protein, 107 aa, Artificial Sequence
  Synthetic construct
EIVLTQSPDFQSVTPKEKVTITCRASQSIGSRLHWYQQKPDQSPKLLIKYASQSFSGVPSRFSGSGSGTDFTLTINSLEAEDAATYYCHQSTSLPLTFGGGTKVEIK

SEQ ID NO: 11400 - protein, 110 aa, Artificial Sequence
  Synthetic construct
QSALTQPASVSGSPGQSITISCIGSSSDIGTYNYVSWYQQHPDKAPKLIISDVTNRPSGVSNRFSGSKSGNTASLTVSGLQAEDEADYYCTSYTTRRTLVFGTGTKVTVL

SEQ ID NO: 11401 - protein, 107 aa, Artificial Sequence
  Synthetic construct
EIVLTQSPGTLSLSPGERATLSCRASQSVSSSYLAWYQQKPGQAPRLVIYGASSRATGIPDRFSGSGSGTDFTLTISRLESEDFAVYYCQQYGSSFTFGPGTKVDIK

SEQ ID NO: 11402 - protein, 110 aa, Artificial Sequence
  Synthetic construct
QSVLTQPPSVSAAPGQRVTISCSGSSSNIGNSFVSWYQQLPGTAPKLLIYDNNQRPSGIPDRFSGSKSGTSATLGITGLQTGDEADYYCATWDSSLSAVVFGGGTKLTVL

SEQ ID NO: 11403 - protein, 108 aa, Artificial Sequence
  Synthetic construct
EIVLTQSPGTLSLSPGERATLSCRASQSVTSTYLAWYQQRPGQSPRLLIYGASTRATGIPDRFTGSGSGTDFTLTISRLEPEDFAVYYCQQYGTFLWTFGQGTKVEIK

SEQ ID NO: 11404 - protein, 107 aa, Artificial Sequence
  Synthetic construct
DIQMTQSPSSLSASVGDRVTITCRASQTINNYLNWYQQKPGKAPKLLIYTASSLQSGVPSRFSGSGSGTHFALTISSLQPEDFATYYCQQYYSSPRTFGPGTKVDIK

SEQ ID NO: 11405 - protein, 108 aa, Artificial Sequence
  Synthetic construct
EIVLTQSPGTLSLSPGERATLSCRASQSVSSSYLAWYQQKPGQAPRLLIYGASSRATGIPDRFSGSGSGTDFTLTISRLEPEDFAVYYCQQYGSSRLSFGPGTKVDIK

SEQ ID NO: 11406 - protein, 107 aa, Artificial Sequence [sequence omitted]

SEQ ID NO: 11407 - protein, 110 aa, Artificial Sequence
  Synthetic construct
QSALTQPASVSGSPGQSITISCTGTSSDVGSYDHVSWFQQHAGKGPNLVIFDVNSRPSGVSNRFSGSKSGNTASLTISGLQAEDEADYYCLSYTSRGSRVFGTGTTVTVE

SEQ ID NO: 11408 - protein, 111 aa, Artificial Sequence
  Synthetic construct
QSALTQPPSASGSPGQSVTISCTGTSSDVGGYKYVSWYQQHTGKAPKLMIYEVSKRPSGVPDRFSGSKSDNTASLTVSGLQAEDEADYYCSSYAGSNRPYVFGTGTKVTVL

SEQ ID NO: 11409 - protein, 111 aa, Artificial Sequence
  Synthetic construct
QSALTQPASVSGSPGQSITISCTGTSSDVGGYNYVSWYQQHPGKAPKLMIYDVSNRPSGVSNRFSGSKSDITASLTISGLQAEDEGDYYCGSFTSTTTSYVFGTGTKVTVL

SEQ ID NO: 11410 - protein, 108 aa, Artificial Sequence
  Synthetic construct
EIVLTQSPGTLSLSPGERATLSCRASQPVSNNYLVWYQQKAGQAPRLLMYGVSNRATGIPDRFSGSGSGTDFTLTISRLEPEDFAVYYCQQYSSSVWTFGQGTKVETK

SEQ ID NO: 11411 - protein, 112 aa, Artificial Sequence; identical to SEQ ID NO: 11315
  Synthetic construct

SEQ ID NO: 11412 - protein, 107 aa, Artificial Sequence
  Synthetic construct
DIQMTQSPSTLSASVGDRVTISCRASQNISNWLAWYQQKPGKAPNLLIYKASTLESGVPSRFSGSGSGTEFTLTISSLQPDDFATYYCQQYNTYPLTFGGGTKVEIK

SEQ ID NO: 11413 - protein, 111 aa, Artificial Sequence
  Synthetic construct
QSALTQPPSASGSPGQSVTISCTGTSSDVGGYNYVSWYQQHPGKAPKLIIYEVTKRPSGVPDRFSGSKSGNTASLTVSGLQAEDEADYYCSSYAGSNDFYVFGTGTQVTVL

SEQ ID NO: 11414 - protein, 109 aa, Artificial Sequence
  Synthetic construct
EIVLTQSPATLSLSPGERATLSCRASQSVSNFLAWYQQKPGQAPRLLIYDASNRATGIPARFSGSGSGTDFTLTINSLEPEDFAVYYCQQRRNWPPRITFGPGTKVDIR

SEQ ID NO: 11415 - protein, 107 aa, Artificial Sequence
  Synthetic construct
DIQMTQSPSSLSASVGDRVTITCRASQGIRNDLGWYQQKPGAAPKRLIYAASSLQSGVPSRFSGSGSGTEFTLTISSLQPEDFATYYCLQHNSYPLTFGGGTKVEIK

SEQ ID NO: 11416 - protein, 110 aa, Artificial Sequence
  Synthetic construct
QSALTQPASVSGSPGQSITISCTGTSSDIGSYNLVSWYQQHPGRAPKVMIYEGSKRPSGVSNRFSGSKSGNTASLTISGLQAEDEADYYCCSYAGSSTSVFGGGTTLTVL

SEQ ID NO: 11417 - protein, 110 aa, Artificial Sequence
  Synthetic construct
QSALTQPASVSGSPGQSITISCTGTSSDIGGYNYVSWYQQHPGKAPKLMIYDVITRPSGVSNRFSGSKSGNTASLTISGLQAEDEAYYYCSSYTSSTALIFGGGTKLTVL

SEQ ID NO: 11418 - protein, 109 aa, Artificial Sequence
  Synthetic construct
EIVLTQSPGTLSLSPGERATLSCRASQSVSSSYLAWYQQKPGQAPRLLIYGASSRATGIPDRFSGSGSGTDFTLTISRLEPEDFAVYYCQQYGYSPPYTFGQGTKLEIK

SEQ ID NO: 11419 - protein, 110 aa, Artificial Sequence
  Synthetic construct
QSVLTQPPSVSEAPRQRVTISCSGSSSNIGHNGVNWYQQLPGKAPKLLIYNDDLLPSGGSDRFSGSKSGTSASLAISGLQSEDEADYYCAAWDDSLNGPVFGGGTKLTVL

SEQ ID NO: 11420 - protein, 107 aa, Artificial Sequence; identical to SEQ ID NO: 11348
  Synthetic construct

SEQ ID NO: 11421 - protein, 110 aa, Artificial Sequence
  Synthetic construct
QSALTQPASVSGSPGQSITISCTGTSSDVGGFNYVSWYQHHPGKAPKLMIYDVSNRPSGVSNRFSGSKSGNMASLTISGLQAEDEADYYCSSYTSSSTLVFGGGTKLTVL

SEQ ID NO: 11422 - protein, 108 aa, Artificial Sequence; identical to SEQ ID NO: 3043
  Synthetic construct

SEQ ID NO: 11423 - protein, 109 aa, Artificial Sequence
  Synthetic construct
DVQMTQSPSFVSASVGDRVTITCRASQDITTWLAWYQQKPGKAPNLLIYAASELQTGVPSRFSGSGSGTDFTLTISSLQPEDFATYYCQQANSFPRMYTFGQGTKLEIK

SEQ ID NO: 11424 - protein, 110 aa, Artificial Sequence
  Synthetic construct
QSALTQPASVSGSPGQSITISCTGSISDIGSYDHVSWFQQHAGRAPKLMIYDVSDRPSGVSNRFSGSKSGNTASLTISGLQAEDEADYYCSSYTNSGTRLFGSGTAVTVL

SEQ ID NO: 11425 - protein, 113 aa, Artificial Sequence
  Synthetic construct
DIVMTQSPDSLAVSLGERATINCKSSQSVLYSSNNKNYLAWYQQKPGQPPKLLIYWASTRESGVPARFSGSGSGTDFTLTISSLQAEDVAVYYCQQYYSTMYTFGQGTKLEIK

SEQ ID NO: 11426 - protein, 107 aa, Artificial Sequence
  Synthetic construct
DIQMTQSPSSLSASVGDRVTITCQASQGISNYLNWYQQKPGKAPKLLIYDASDLETGVPSRFSGSGSGTDFTFTINSLQPEDIATYYCQQYDNLPLTFGGGTKVDIK

SEQ ID NO: 11427 - protein, 106 aa, Artificial Sequence
  Synthetic construct
SYELTQPSSVSVSPGQTARITCSGDVLAKKYARWFQQKPGQAPVLVIYKDDERPSGIPERFSGSSSGTTVTLTISGAQVEDEADYYCYSAADNAWVFGGGTKLTVL

SEQ ID NO: 11428 - protein, 110 aa, Artificial Sequence
  Synthetic construct
QSALTQPASVSGSPGQSITISCTGTSTDIGIYSYVSWYQQHPGKAPKLIIYDVSNRPSGPSNRFSGSKSGNTASLTISGLQAEDEAVYFCNSYTITGTWVFGGGTKLTVL

SEQ ID NO: 11429 - protein, 113 aa, Artificial Sequence; identical to SEQ ID NO: 11150
  Synthetic construct

SEQ ID NO: 11430 - protein, 106 aa, Artificial Sequence
  Synthetic construct
EIVMTQSPATVSVSPGESVTLSCRASQSVSNNLAWYQQKPGQPPRLLMYSAFTRAAGVPARFRGTVSGTEFTLTISSLQSEDFAVYYCQQYHNWYTFGQGTKLEIR

SEQ ID NO: 11431 - protein, 113 aa, Artificial Sequence
  Synthetic construct
DIVMTQSPDSLAVSLGERATINCKSSQSVLYSSNNKNYLAWYQQKPGQPPKLLIYWASTRESGVPDRFSGSGSGTDFTLTISSLQAEDVAVYYCQQYYSTPYTFGQGTKLEIK

SEQ ID NO: 11432 - protein, 107 aa, Artificial Sequence
  Synthetic construct
DIQMTQSPSTLSASVGDRVTITCRASQSISRWLAWYQQKPGKAPKVLIYKASSLESGVPSRFSGSGSGTEFTLTISSLQPDDFATYYCQQYNSYSRTFGQGTKVEIK

SEQ ID NO: 11433 - protein, 108 aa, Artificial Sequence
  Synthetic construct
EIVLTQSPGTLSLSPGERATLSCRASQSVGSIYLAWYQQKPGQAPRLLIFGASSRAIGIPDRFSGSGSGTDFTLTISRLEPEDFAVYYCQQYGSSPWTFGQGTKVEIK

SEQ ID NO: 11434 - protein, 107 aa, Artificial Sequence
  Synthetic construct
DIQMTQSPSSLSASVGDRVTITCRASQSISSYLNWYQQKSGKAPKLLIYAASSLQSGVPSRFSGSGSGTDFTLTISSLQPEDFATYYCQQSHSTPWTFGRGTKVEIN

SEQ ID NO: 11435 - protein, 106 aa, Artificial Sequence
  Synthetic construct
DIQMTQSPSTLSASVGDTVTISCRASQSISMWLAWYQQKPGKAPKLLIYKASSLKSGVPSRFSGGGSGTEFTLTISSLQPDDFATYYCQQYNSYWTFGQGTKVDFK

SEQ ID NO: 11436 - protein, 107 aa, Artificial Sequence
  Synthetic construct
DIQLTQSPSFLSASVGDRVTITCRASQGISSYLAWYQQKPGKAPKLLIYAASTLQSGVPSRFSGSGSGTEFTLTISSLQPEDFATYYCQQLNSYPRTFGGGTKVEIK

SEQ ID NO: 11437 - protein, 110 aa, Artificial Sequence
  Synthetic construct
QTAVTQEPSVSVSPGGTVTLTCGLTSASVSSSHTPGWYQQTPGQAPRTLIYRTDTRSSGVPDRFSGSILGNKAALTITGAQTDDESDYYCVLFMGSGIWVFGGGTKLTVV

SEQ ID NO: 11438 - protein, 108 aa, Artificial Sequence
  Synthetic construct
EIVMTQSPATLSVSPGERATLSCRASQSISSNLAWYQQKPGQAPRLLIYGASTRATGIPARFSGSGSGTEFSLTISSLQSEDFAVYYCQQYNNWPPLTFGGGTKVEIK

SEQ ID NO: 11439 - protein, 107 aa, Artificial Sequence
  Synthetic construct
GIQMTQSPSSLSASVGDKVTVTCRASQSISSYLNWFQQKPGKAPKFLIYAASSLQSGVPSRFSGSGSGTDFTLTITSLQPEDFATYYCQQSYGTPPTFGQGTKVEVR

SEQ ID NO: 11440 - protein, 108 aa, Artificial Sequence; identical to SEQ ID NO: 2602
  Synthetic construct

SEQ ID NO: 11441 - protein, 112 aa, Artificial Sequence
  Synthetic construct
DIVMTQSPDSLAVSLGERATINCKSSQSVLNSSNNKNYLAWYQQKPGQPPKMLIYWASTRESGVPDRFSGSGSGTDFTLTISSLQAEDVAVYYCQQYNSSLTFGGGTKVEIK

SEQ ID NO: 11442 - protein, 112 aa, Artificial Sequence
  Synthetic construct
DVVVTQSPVSLPATPGKPASISCRASQSLLHSNGNHYLHWYLQRPGQSPQLLIYLGSNRASGVPDRFSGSGSGTVFSLKISRVQAEDVGMYYCMQALHFPYTFGQGTKLEIK

SEQ ID NO: 11443 - protein, 108 aa, Artificial Sequence; identical to SEQ ID NO: 2515
  Synthetic construct

SEQ ID NO: 11444 - protein, 106 aa, Artificial Sequence
  Synthetic construct
EIVMTQSPATLSVSPGERATLSCRASQSVSSNLAWYQQKPGQAPRLLIYGASTRATGFPARFSGSGSGTEFTLTISSLQSEDFAVYYCQQYNYWPTFGQGTKVEIK

SEQ ID NO: 11445 - protein, 107 aa, Artificial Sequence
  Synthetic construct
DIQMTQSPSSLSASVGDRVTITCQASQDINNHLNWYQQKPGKAPKVLIYDASNLETGVPSRFSGSGSGTDFTFTISSLQPEDIATYYCQRNDNVPFTFGGGTKVEIK

SEQ ID NO: 11446 - protein, 107 aa, Artificial Sequence
  Synthetic construct
DIQMTQSPSSVSASLGDRVTITCRASQDITRWLAWYQQKPGKAPDLLIYGASNLQSGVPSRFSGSGSGTVFTLTISSLQPEDFATYYCQQSKNFPLSFGGGTKVEIK

SEQ ID NO: 11447 - protein, 106 aa, Artificial Sequence
  Synthetic construct
SYELTQPPSVSVSPGQTASITCSGDKLGDKYVCWYKQKPGQSPVLVIYEDNKRPSGITERFSGSNSGNTATLTISGTQPMDEADYYCQAWDSSTAVFGTGTKVTVL

SEQ ID NO: 11448 - protein, 107 aa, Artificial Sequence
  Synthetic construct
DIQMTQSPSSVSASVGDRVTITCRASQGFSSWLAWYQQKPGKAPKLLIYAASSLQSGVPSRFSGSGSGTDFTLTINSLQPEDFATYYCQQANSFPLTFGQGTKVDIK

SEQ ID NO: 11449 - protein, 107 aa, Artificial Sequence
  Synthetic construct
DIQMTQSPSSLSASVGDRVTITCRASQGIRNDLGWYQQKPGNAPKRLIYAASSLQSGVPSRFSGSGSGTEFTLTISSLQPEDFATYYCLQHNSYPYTFGQGTKLEIK

SEQ ID NO: 11450 - protein, 107 aa, Artificial Sequence
  Synthetic construct
DIQMTQSPSSLSASVGDRVTITCRASQSISSYLNWYQQKPGKAPKFLMYAASSLQRGVPSRFSGSGSGTDFTLTISSLQPEDFATYYCQQSYSTPRTFGQGTKVEIK

SEQ ID NO: 11451 - protein, 107 aa, Artificial Sequence
  Synthetic construct
DIQMTQSPSSLSASVGDRVTITCQASQDISNYLNWYQQKPGKAPKLLMYDASNLETGVPSRFSGSGYGTDFTFTISSLQPEDIATYYCQQYDNLPITFGQGTRLEIK

SEQ ID NO: 11452 - protein, 108 aa, Artificial Sequence; identical to SEQ ID NO: 2520
  Synthetic construct

SEQ ID NO: 11453 - protein, 107 aa, Artificial Sequence
  Synthetic construct
DIQMTQSPSSVSASVGDRVTITCRASQGISRWLAWYQQKPGKAPKLLISDASSLQGGVPSRFSGSGSGTDFTLTISSLQPEDFATYYCQQAHSFPPTFGGGTKVEIK

SEQ ID NO: 11454 - protein, 108 aa, Artificial Sequence
  Synthetic construct
SYVLTQPPSVSVAPGKTARITCGGNNIGSKSVHWYQQKPGQAPVLVIYYDSDRPSGIPERFSGSNSGNTATLTISRVEAGDEADYSCQVWDSSSVYVVFGGGTKLTVL

SEQ ID NO: 11455 - protein, 111 aa, Artificial Sequence
  Synthetic construct
QSVLTQPPSASGTPGQGVTISCSGSSSNIGTNYVYWYQQLPGTAPKLLIYRNNQRPSGVPDRFSGSKSGTSASLAISGLRSEDEADYYCAAWDDSFSAHVVFGGGTKLTVL

SEQ ID NO: 11456 - protein, 108 aa, Artificial Sequence
  Synthetic construct
EIVLTQSPATLSLSPGERATLSCRASQSVGTYLAWYQQKPGQAPRLLIYDASNRATGIPARFSGSGSGTDFTLTISSLEPEDFAVYYCQQRSSWPPGAFGQGTKVDIK

SEQ ID NO: 11457 - protein, 108 aa, Artificial Sequence
  Synthetic construct
DIQMTQSPSSLSASVGDRVTITCRASQSISRYLNWYQQKPGKAPKLLIYGGSNLQSGVPSRFSGSGSGTDFTLTISSLQPEDFATYYCQQSYSMPPWTFGQGTKVAIK

SEQ ID NO: 11458 - protein, 107 aa, Artificial Sequence
  Synthetic construct
DIQLTQSPSSLSASVGDRVTITCRASQAISNYLAWFQQKPGKAPKSLIYAASSLQSGVPSKFSGSGSGTDFTLTISSLQPEDFATYYCQQYNSYPITFGQGTRLEIK

SEQ ID NO: 11459 - protein, 107 aa, Artificial Sequence
  Synthetic construct
SYELTQPPSVSVSPGQTASITCSGDKLGDKYASWYQQKPGQSPVLVIYQDNKRPSGIPERFSGSNSGNTATLTISETQAMDEADYYCQAWDRSANYVFGTGTQVTVL

SEQ ID NO: 11460 - protein, 108 aa, Artificial Sequence
  Synthetic construct
EIVLAQSPATLSLSPGERATLSCRASQSVRKFLSWYQQKPGQAPRLLIYDASNRATGIPARFSGSGSGTDFTLTISSLEPEDFAVYYCQQRSIWPSITFGQGTRLEIK

SEQ ID NO: 11461 - protein, 110 aa, Artificial Sequence
  Synthetic construct
QSALTQPASVSGSPGQSITISCTGTSSDVGSYDHVSWFQQYAGKGPNLVIFDVNNRPSGVSNRFSGSKSGNTASLTISGLQAEDEADYYCLSYTSRGTRVFGTGTTVTVV

SEQ ID NO: 11462 - protein, 108 aa, Artificial Sequence
  Synthetic construct
SYEVTQPPSVSVSPGQTARITCSGDALSNQYAYWYQQKPGQAPLLVIYQDAERPSGIPERFSGSSSGTTVTLTISGVQAEDEADYYCQSADNSGSLWVFGGGTKLTVL

SEQ ID NO: 11463 - protein, 109 aa, Artificial Sequence
  Synthetic construct
EIVLTQSPATLSLSPGERATLSCRASQSVSNFLAWYQQKPGQAPRLLIYDASNRATGIPARFSGSGSGTDFTLTISSLEPEDFAVYYCQQRSNWPPKLTFGGGTKVEIK

SEQ ID NO: 11464 - protein, 109 aa, Artificial Sequence
  Synthetic construct
EIVLTQSPGTLSLSPGERATLSCRASESVTSRSLVWYQQKPGQAPRLLIYGTFTRATGIPDRFSGSGSGTDFTLTISRLEPEDFAVYYCQQYGSSPMFTFGQGTKLEIR

SEQ ID NO: 11465 - protein, 107 aa, Artificial Sequence
  Synthetic construct
DIQMTQSPSSLSASVGDRVTITCRASQSIKNYLNWYQQKPGKAPNVLIYAASSLQRGVPSRFSGSGSGTDFTLTISSLQPEDFATYYCQQSYSTPRTFGQGTKVEMK

SEQ ID NO: 11466 - protein, 111 aa, Artificial Sequence; identical to SEQ ID NO: 10797
  Synthetic construct

SEQ ID NO: 11467 - protein, 107 aa, Artificial Sequence
  Synthetic construct
SYELTQPPSVSVSPGQTARITCSADALPKRYAYWYQRKPGQAPVLLIYKDSERPSGIPERFSGSSSGTTVTLTIRGVQAEDEADYYCQSADGSGTWVFGGGTKLTVL

SEQ ID NO: 11468 - protein, 113 aa, Artificial Sequence
  Synthetic construct
DIVMTQSPDSLAVSLGERATVNCKSSQSILYRSNNRNYLAWYQQKPGQPPKLLIYWASTRASGVPDRFSGSGSGTDFTLTISSLQTEDVAVYYCLHYYTIPYTFGQGTKLEIK

SEQ ID NO: 11469 - protein, 106 aa, Artificial Sequence
  Synthetic construct
SYELTQSPSVSVSPGQTARITCSGDALPKKYAYWYRQKSGQAPVLVIYEDSKRPSGIPERFSGSSSGTMATLTISGAQVEDEADYYCYSTDSSGKRFGGGTKLTVL

SEQ ID NO: 11470 - protein, 108 aa, Artificial Sequence
  Synthetic construct
ESVLTQSPGTLSLSPGERATLSCRASQSVSSSYLAWYQQKPGQAPRLLIYAASSRATDIPDRFSGSGSGTDFTLTISRLEPEDFAVYYCQLYGYSQLTFGGGTKVEIK

SEQ ID NO: 11471 - protein, 111 aa, Artificial Sequence
  Synthetic construct
QSALTQPASVSGSPGQSITISCTGTSSDIGSYNLVSWYQQHPGKAPKLMIYEGSKRPSGVSNRFSGSKSGNTASLTISGLQAEDEADYYCCSYAGSRTFYVFGTGTKVTVL

SEQ ID NO: 11472 - protein, 108 aa, Artificial Sequence
  Synthetic construct
SSVLAQPPSVSVAPGQTARLTCGGNNIGSKSVHWYQQKPGQAPLLVIYYDGDRPSGIPERFSGSNSGNTATLTISRVEAGDEADYYCQVWHSSSDNFVFGTGTKVTVL

SEQ ID NO: 11473 - protein, 112 aa, Artificial Sequence; identical to SEQ ID NO: 11315
  Synthetic construct

SEQ ID NO: 11474 - protein, 108 aa, Artificial Sequence
  Synthetic construct
EIVLTQSPGTLSLSPGERATLSCRASQSVSSSYLAWYQQKPGQAPRLLIYGASSRATGIPDRFSGSGSGTDFTLTISRLEPEDFAVYCCQQYGSSPETFGQGTKVEIK

SEQ ID NO: 11475 - protein, 103 aa, Artificial Sequence
  Synthetic construct
DIQLTQSPSFLSASVGDRVTITCRASQGISSYLAWYQQNPGKAPKLLIYAASTLQSGVPSRFSGSGSGTEFTLTIGSLQPEDFAAYYCQHLGAFGPGTKVGIK

SEQ ID NO: 11476 - protein, 110 aa, Artificial Sequence
  Synthetic construct
QSVLTQPPSVSAAPGQMVNISCSGSSSNIGNNHVSWYQQLPGTAPKVLIYDNNRRPSGIPDRFSGSKSGTSATLGITGLQTGDEADYYCATWDSSLSGVVFGGGTKLTVL

SEQ ID NO: 11477 - protein, 108 aa, Artificial Sequence
  Synthetic construct
EIVLTQSPGTLSLSPGERATFSCRASQSVSNNYLAWYQQKPGQAPRLLTSGTFTRATGIPDRFSGSGSGTDFTLTISRVESEDFAVYYCQQYGGSPATFGQGTRLEIK

SEQ ID NO: 11478 - protein, 113 aa, Artificial Sequence
  Synthetic construct
DIVMTQSPDSLAVSLGERATINCKSSRSVLNSSDNKNYLGWYQRKPGQPPKLLFYWASTRASGVPDRFSGGGSGTEFTLTISSLQAEDVAVFYCQQYYATPRTFGRGTNLEIK

SEQ ID NO: 11479 - protein, 110 aa, Artificial Sequence; identical to SEQ ID NO: 10966
  Synthetic construct

SEQ ID NO: 11480 - protein, 110 aa, Artificial Sequence
  Synthetic construct
QSALTQPASVSGSPGQSITISCTGTSSDVGGYDYVSWYQQHPGKVPKLMIYDVTNRPSGVSNRFSGSKSGNTASLTISGLRAEDEADYYCSSYTSSYTLVFGGGTKLTVL

SEQ ID NO: 11481 - protein, 107 aa, Artificial Sequence; identical to SEQ ID NO: 11057
  Synthetic construct

SEQ ID NO: 11482 - protein, 108 aa, Artificial Sequence
  Synthetic construct
EIVLTQSPATLSLSPGERATLACRASQSVSSSLAWYQQKPGQAPRLLIYDASNRATGIPARFSGSGSGTDFTLTISSLEPEDFAVYYCQQRSNWPPGTFGQGTKVEIK

SEQ ID NO: 11483 - protein, 107 aa, Artificial Sequence
  Synthetic construct
DIQMTQSPSTLSASVGDRVTITCRASQSISSWLAWYQQKPGKAPKLLIYKASSLESGVPSRFSGSGSGTEFTLTISSLQPDDFATYYCQQYNSYSFTFGPGTKVDIK

SEQ ID NO: 11484 - protein, 107 aa, Artificial Sequence
  Synthetic construct
SFELTQPPSVSVSPGQTARITCSADALPKRYAYWYQQKPGQAPVLLIYKDTERPSGIPERFSGSSSGTTVTLTITGVQAEDEADFYCQSADGSGTWVFGGGTKLTVL

SEQ ID NO: 11485 - protein, 110 aa, Artificial Sequence
  Synthetic construct
QSVLTQPPSASGTPGQRVSISCSGSSSNIGINYVYWYQQLPGTAPKLLIYRNSQRPSGVPDRFSGSKSGASASLAISGLRSEDEADYYCAAWDDSLSGEVFGGGTKLTVL

SEQ ID NO: 11486 - protein, 109 aa, Artificial Sequence
  Synthetic construct
EIVLTQSPATLSLSPGERATLSCRASQSVSSFLAWYQQKPGQAPRLLIYDASNRATGVPARFSGSGSGTDFTLTISSLEPEDFAVYYCQQRSSWPPRGTFGGGTKVEIK

SEQ ID NO: 11487 - protein, 107 aa, Artificial Sequence
  Synthetic construct
EIVMAQSPASLSVSPGERATLSCRASQSVSSNLAWYQQKRGQAPRLLIYGASTRATGIPARFSGSGSGTEFTLTISSLQSEDFVIYYCQQYNNWPYTFGQGTKLEIK

SEQ ID NO: 11488 - protein, 110 aa, Artificial Sequence
  Synthetic construct
QSVLTQPPSASGTPGQRVTFSCSGSSSNIGSNPVNWYQQLPGTAPKLLIYGNNQRSSGVPDRISGSKSGTSASLAISGLQSEDEADYYCAAWDASLKGWVFGGGTKLTVL

SEQ ID NO: 11489 - protein, 108 aa, Artificial Sequence
  Synthetic construct
EIVMTQSPATLSVSPGERATLSCRASQSVSSNLAWYQQKPGQAPRLLIYGASTRATGIPARFSGSGSGTEFTLTISSLQSEDFAVYYCQQYHNWPPYTFGQGTKLEIK

SEQ ID NO: 11490 - protein, 106 aa, Artificial Sequence
  Synthetic construct
SYEVTQPPSVSVSPGQTASITCSGDKLGDKYTCWYQQKPGQSPVLVIYEDDKRPSGIPERFSGSNSGNTATLTISGTQAMDEADYYCQAWDTSTAVFGGGTKLTVL

SEQ ID NO: 11491 - protein, 110 aa, Artificial Sequence
  Synthetic construct
QSALTQPASVSGSPGQSITISCTGTSSDVGSYNLVSWYQQHPGKAPKLMIYEGNKRPSGVSNRFSGSKSGNRASLTISGLQAEDEADYYCCSYAGSSTWVFGGGTKLTVV

SEQ ID NO: 11492 - protein, 112 aa, Artificial Sequence
  Synthetic construct
DVVMTQSPLSLPVTLGQPASISCRSSQSLVYSDGNTYLTWFQQRPGQSPRRLIYKVSNRDSGVPDRFSGSGSGTDFTLKIGRVEAEDVGLYYCMQGAHWPPAFGQGTKVEIK

SEQ ID NO: 11493 - protein, 109 aa, Artificial Sequence; identical to SEQ ID NO: 11011
  Synthetic construct

SEQ ID NO: 11494 - protein, 113 aa, Artificial Sequence
  Synthetic construct
DIVMTQSPDSLAVSLGERATINCKSSQSVLYSSNNKNYLGWYQQKPGQPPKLLIYWASTRESGVPDRFTGSGSGTDFTLTVSSLQAEDVAVYYCQQYYNTPRTFGQGTKLEIK

SEQ ID NO: 11495 - protein, 113 aa, Artificial Sequence
  Synthetic construct
DIVMTQSPDSLAVSLGERATINCKSSQSVLYSSNNKNYLAWYQQKPGQPPKLLIYWASTRESGVPDRFGGSGSGTDFTLTITSLQAEDVAVYYCQQYYSTPYTFGQGTKLEIK

SEQ ID NO: 11496 - protein, 111 aa, Artificial Sequence
  Synthetic construct
QSVLTQPPSVSGAPGQRVTVSCTGSSSNIGADYDVQWYQHVPGGAPKLLIYNNNHRPSGVPERFSGSKSGTSASLAISGLQTEDEAGYYCQSYDNSLSGYVFGAGTKVIVL

SEQ ID NO: 11497 - protein, 109 aa, Artificial Sequence
  Synthetic construct
EIVLTQSPATLSLSPGERATLSCRASQSVRISLAWYQQKPGQAPRLLIYDASNRATGIPVRFSGSGSGTDFTLTISSLEPDDFAVYYCQQRSNGPPTWTFGPGTKVEIK

SEQ ID NO: 11498 - protein, 108 aa, Artificial Sequence
  Synthetic construct
EIVLTQSPATLSLSPGERATLSCRASQSVNIYLAWYQQKPGQAPRLLIYDASNRATGIPARFSGSGSGTDFTLTISSLEPEDFAVYYCQQRSNWPPYTFGQGTKLEIK

SEQ ID NO: 11499 - protein, 107 aa, Artificial Sequence
  Synthetic construct
SYELTQPPSVSVSPGQTARITCSGDALAKKYVSWYQQKSGQAPVLVIYEDSKRPSGIPERFSGSSSGTMATLTISGAQVEDEADYYCYSTDSSAYPLFGGGTKLTVL

SEQ ID NO: 11500 - protein, 107 aa, Artificial Sequence; identical to SEQ ID NO: 2650
  Synthetic construct

SEQ ID NO: 11501 - protein, 112 aa, Artificial Sequence
  Synthetic construct
DIVMTQTPLSLSVTPGQPASISCKSSQSLLHSDGKTYLYWYLQKPGQPPQLLIYELSERFSGVPDRFTGSGSGTDFTLKISRVEAEDVGIYYCMQTIQLPYTFGQGTKLEIK

SEQ ID NO: 11502 - protein, 108 aa, Artificial Sequence
  Synthetic construct
EIVLTQSPGTLSLSPGERATLSCRASQSIRTYYLAWYQQKPGQAPRLLIYGASSRATGIPDRFSGSGSGADFTLTISRLEPVDFAVYYCQQYGSSPHTFGQGTKLEIK

SEQ ID NO: 11503 - protein, 110 aa, Artificial Sequence
  Synthetic construct
NFMLTQPHSVSESPGKTVTISCTGSSGSIASNYVQWYQQRPGSAPTTVIYEDNQRPSGVPDRFSGSIDSSSNSASLTISGLKTEDEADYYCQSYESTNWVFGGGTKLTVL

SEQ ID NO: 11504 - protein, 107 aa, Artificial Sequence; identical to SEQ ID NO: 3080
  Synthetic construct

SEQ ID NO: 11505 - protein, 110 aa, Artificial Sequence
  Synthetic construct
QSVLTQPPSASGTPGQRVIISCTGSSSNIESNFVNWYQQLPGTAPHILMYSNDQRPSGVPDRFSGSKSGTSASLAISGLQSEDEADYYCATWDDRLDGPVFGTGTKVTVL

SEQ ID NO: 11506 - protein, 110 aa, Artificial Sequence
  Synthetic construct
QSVLTQPPSVSAAPGQKVTISCSGSSSNIENNYVSWYQQLPGTAPKLLIYENNKGPSGIPDRFSGSKSGTSATLGITGLQTGDEADYYCGTWDSSLSAWVFGGGTKLTVL

SEQ ID NO: 11507 - protein, 107 aa, Artificial Sequence
  Synthetic construct
EIVMTQSPATLSVSPGERATLSCRASQSVSSNLAWYQQKPGQAPRLLIYSASTRAAGILARFSGSGSGTDFTLTISSLQSEDFAFYYCQQYNNWPLTFGGGTKVEIK

SEQ ID NO: 11508 - protein, 111 aa, Artificial Sequence
  Synthetic construct
QSALTQPASVSGSPGQSITISCTGTSSDVGGYNYVSWYQQHPGKAPKLMIYGVSNRPSGVSNRFSGSKSGNTASLTISGLQAEDEADYYCSSYTSSSTLVVFGGGTKLTVL

SEQ ID NO: 11509 - protein, 107 aa, Artificial Sequence
  Synthetic construct
EIVLTQSPATLSLSPGERATLSCRASQSVSSYLAWYQQKPGQAPRLLIYDASNRATGIPARFSGSGSGTDFTLTISSLEPEDFAVYYCQQRSNWLWTFGQGTKVEIK

SEQ ID NO: 11510 - protein, 113 aa, Artificial Sequence; identical to SEQ ID NO: 11431
  Synthetic construct

SEQ ID NO: 11511 - protein, 111 aa, Artificial Sequence
  Synthetic construct
QSVLTQPPSVSGAPGQRVTISCTGNSSNIGAGYDVHWYQQVPGTAPKLLIYGNSNRPSGVPDRFSGSRSGTSASLAITGLQAEDEADYYCQSYDSSLSGSVFGGGTKLTVL

SEQ ID NO: 11512 - protein, 110 aa, Artificial Sequence
  Synthetic construct
QSVLTQPPSASGTPGQRVTISCSGSSSNVGGHAVNWYQQLPGTAPKLLIHTDNQRPSGVPDRFSGSKSGTSASLAVSGLQSEDEADYFCAAWDDNLNGVIFGGGTKLSVL

SEQ ID NO: 11513 - protein, 108 aa, Artificial Sequence
  Synthetic construct
QSALTQPASVSGSPGQSITISCTGTSSDVGSYNLVSWYQQHPGKAPKLMIYEDTKRPSGVSNRFSGSKSGNTASLTISGLQAEDEADYYCCSYAGLWVFGGGTKLTVL

SEQ ID NO: 11514 - protein, 112 aa, Artificial Sequence
  Synthetic construct
EVVMTQSPHSLPVTLGQSASISCRPSQSLVFRDGNTYLNWFQQRPGQSPRRLIYKVSYRDSGVPDRFSGSGSGTDFTLKISRVEAEDVGIYYCMQGTHWPITFGGGTRVEIK

SEQ ID NO: 11515 - protein, 108 aa, Artificial Sequence; identical to SEQ ID NO: 11382
  Synthetic construct

SEQ ID NO: 11516 - protein, 112 aa, Artificial Sequence
  Synthetic construct
DIVMTQTPLSLSVTPGQSASISCKSSESLLHSDGKTYLYWYLQKPGQPPQLLIYEVSDRFSGVPDRFTGSGSGTDFTLKISRVEAEDVGFYYCMQSLQYPLTFGGGTKVEIK

SEQ ID NO: 11517 - protein, 107 aa, Artificial Sequence
  Synthetic construct
EIVLTQSPGTLSLSPGERATLSCRASQSVGSRFLAWYQQKPGQAPRVLIYGASSRATGIPDRFSGSGSGTDFTLTISSLEPEDFAVYYCQQYGTSPSFGQGTRLEIK

SEQ ID NO: 11518 - protein, 108 aa, Artificial Sequence
  Synthetic construct
EIVMTQSPATLSVSPGERATLSCRASQSVSSNLAWYQQKPGQAPRLLIYGASTRATGIPARFSGSGSGTEFTLTISSLQSEDFAVYYCQQYNNWPPLTFGGGTKVEIK

SEQ ID NO: 11519 - protein, 108 aa, Artificial Sequence
  Synthetic construct
DIVMTQSPATLSLSPGERATLSCRASPSVSSNYLSWYQQKPGQAPRLLIYGAATRATGIPARFSGSGSGTDFTLTISSLQPEDFAVYYCQQDYNLPYTFGQGTKLEIK

SEQ ID NO: 11520 - protein, 109 aa, Artificial Sequence
  Synthetic construct
QSVLTQPPSASGTPGQRVTISCSGSSSNIGSNTVNWYQQLPGTAPKLLIYDNNQRPSGVPDRFSGSKSGTSASLAISGLQSEDEADYYCAAWDDSLNALFGGGTKLTVL

SEQ ID NO: 11521 - protein, 108 aa, Artificial Sequence
  Synthetic construct
DIQMTQSPSSLSASVGDRVTITCRASQGIRNDLGWYQQKPGKAPKRLIYAAFRLQSGVPSRFSGSGSGTEFTLTISSLHPEDFATYYCLQHNNYPLVTFGQGTRLEIK

SEQ ID NO: 11522 - protein, 108 aa, Artificial Sequence
  Synthetic construct
SYVLTQPPSVSVAPGKTARITCEGDNLRSKDVLWYQQRPGQAPVLVIYYDSDRPSGIPERFSGSNSGNTATLTISRVEAGDEADYYCQVWHANSDHVVFGGGTKLTVL

SEQ ID NO: 11523 - protein, 108 aa, Artificial Sequence
  Synthetic construct
SYELTQPPSVSVSPGHTARITCSGDALPTKYAYWYQQKSGQAPVLVIYEDNKRPSGIPERFSGSSSGTMATLTISGAQVDDEADYYCYSTDTSGNHRVFGGGTKLTVL

SEQ ID NO: 11524 - protein, 108 aa, Artificial Sequence; identical to SEQ ID NO: 2862
  Synthetic construct

SEQ ID NO: 11525 - protein, 110 aa, Artificial Sequence
  Synthetic construct
QSVLTQPPSVSAAPGQKVTISCSGNNSNIGNNYVSWYHQLPGTAPKLLIYDNNKRPSRIPDRFSGSKSGTSATLGITGLQTGDEADYYCGTWDSSLSAVVFGGGTKLTVL

SEQ ID NO: 11526 - protein, 110 aa, Artificial Sequence
  Synthetic construct
QSALTQPASVSGSPGQSITISCTGTSSDVGSYNLVSWYQHHPGKAPKLMIYEGSKRPSRVSNRFSGSKSGNTASLTISGLQAEDEADYYCCSYAGSSTWVFGGGTKLTVL

SEQ ID NO: 11527 - protein, 110 aa, Artificial Sequence; identical to SEQ ID NO: 11080
  Synthetic construct

SEQ ID NO: 11528 - protein, 107 aa, Artificial Sequence
  Synthetic construct
DIQMTQSPSTLSASVGDRVTITCRASQSISNWLAWYQQKPGKAPKVLIYKASNLESGVPSRFSGSGSGTEFTLTISSLQPDDFATYYCQQYNSYSYTFGQGTKLEIK

SEQ ID NO: 11529 - protein, 109 aa, Artificial Sequence
  Synthetic construct
QSALTQPRSVSGSPGQSVTIACTGTSSDIGAYNYVSWYQQHPGTAPKLMIYDVSRRPSGVPDRFSASKSDNTASLTISGLRPEDSADYSCCSYAGSYVVFGGGTKLTVL

SEQ ID NO: 11530 - protein, 115 aa, Artificial Sequence
  Synthetic construct
QAVLTQPSSLSASPGASASLTCTLRSGINVGTYRIYWYQQKPGSPPQYLLRYKSDSDKQQGSGVPSRFSGSKDASANAGILLISGLQSEDEADYYCMIWHTSAWVFGGGTKLTVL

SEQ ID NO: 11531 - protein, 107 aa, Artificial Sequence
  Synthetic construct
DIQITQSPSSLSASVGDRVTITCRASQDIRNNLAWLQQKPGKAPKSLIYAASSLQSGVPSRFSGSGSGTDFTLTISSLQPEDFATYYCQQYNDYPVTFGGGTKVEIK

SEQ ID NO: 11532 - protein, 111 aa, Artificial Sequence
  Synthetic construct
QSALTQPASVSGSPGQSITISCTGTSSDVGGYNSVSWYQQHPGKAPKLMIYDVSNRPSGVSNRFSGSKSGNTASLTISGLQAEDEADYYCSSYTTSTTPYVFGTGTKVTVV

SEQ ID NO: 11533 - protein, 108 aa, Artificial Sequence
  Synthetic construct
EIVLTQSPGTLSLSPGERATLSCRASQSVSSSYLAWYQQKPGQAPRLLMYATSSRATGIPDRFSGRGSGTDFTLTISRLEPEDFAVYYCQQYGSSPWTFGQGTKVEIK

SEQ ID NO: 11534 - protein, 111 aa, Artificial Sequence; identical to SEQ ID NO: 10797
  Synthetic construct

SEQ ID NO: 11535 - protein, 109 aa, Artificial Sequence
  Synthetic construct
EIVLTQSPATLSLSPGERATLSCRASQSVSSFLAWYQQKPGQAPRLLIYDASNRATGIPARFSGSGSGTDFTLTISSLEPEDFAVYYCQQRSNWPPMYTFGQGTKLEIK

SEQ ID NO: 11536 - protein, 108 aa, Artificial Sequence
  Synthetic construct
EIVLTQSPGTLSLSPGERATLSCRASQSVSSIYLAWYQQKPGQAPRLLVFAASSRATGIPDRFSGSGSETDFTLTISRLEPEDFAVYYCQQYGSSPWTFGQGTKVEIK

SEQ ID NO: 11537 - protein, 112 aa, Artificial Sequence; identical to SEQ ID NO: 2524
  Synthetic construct

SEQ ID NO: 11538 - protein, 111 aa, Artificial Sequence
  Synthetic construct
QSVLTQPPSVSGAPGQRVTISCTGSNSNIGAGYDVHWYQHLPGTAPKLLIYANINRPSGVPDRFSGSKSGTSASLAISGLQAEDEADYYCQSYDSSLSALVFGGGTKLTVL

SEQ ID NO: 11539 - protein, 108 aa, Artificial Sequence
  Synthetic construct
ELVLTQSPGTLSLSPGERATLSCRASQSVSSSYLAWYQQKPGQAPRLLIYSASSRATGIPDRFSGSGSGTDFTLTISRLEPEDFAVYYCQQYGNSRLTFGPGTKVDIK

SEQ ID NO: 11540 - protein, 107 aa, Artificial Sequence
  Synthetic construct
EIVLTQSPGTLSLSPGERATLSCRASQSVSSSYLAWYQQKPGQAPRLLIYGASRRATGIPDRFSGSGSGTDFTLTISRLEPEDFAVYYCQQYGSPWTFGQGTKVEIK

SEQ ID NO: 11541 - protein, 111 aa, Artificial Sequence
  Synthetic construct
QSVLTQPPSVSGAPGQRVTISCTGSSSNLGAGYAVHWYQQLPGSAPKLLIYGDNNRPSGVPDRFSGSKSGTSASLAISGLQAEDEADYYCQSYDSRLSAYVFATGTKVTVL

SEQ ID NO: 11542 - protein, 107 aa, Artificial Sequence
  Synthetic construct
DIQMTQSPSSLSASVGDRVTITCRASQSISRYLNWYQQKPGKAPKLLIYAASSLQSGVPSRFSGSGSGTDFTLTISSLQPEDFGTYYCQQSYSTPPTFGQGTRLDIK

SEQ ID NO: 11543 - protein, 108 aa, Artificial Sequence
  Synthetic construct
EIVLTQSPGTLSLSPGERATLSCWASQSVSSSFLAWSQQKPGQAPRLLIYGTSSRATGIPDRFSGSGSGTDFTLTISRLEPEDFAVYFCHHYGSSRIAFGPGTKVHIK

SEQ ID NO: 11544 - protein, 108 aa, Artificial Sequence
  Synthetic construct
DIQMTQSPSSLSASVGDRVTITCRASQSISSYLNWYQQKPGKAPKVLIYAASSLQSGVPSRFSGSGSGTDFTLTISSLQPEDFATYYCQQTYTMPTWTFGQGTKVEIK

SEQ ID NO: 11545 - protein, 113 aa, Artificial Sequence
  Synthetic construct
DIVMTQSPDSLAVSLGERATINCKSSQTVLYRSNNKNYLAWYQQKPGQPPKLLINWASTRESGVPDRFSGSGSGTDFTLTISGLQAEDVAVYYCQQYYTTPYTFGQGTKLEIK

SEQ ID NO: 11546 - protein, 112 aa, Artificial Sequence; identical to SEQ ID NO: 11514
  Synthetic construct

SEQ ID NO: 11547 - protein, 110 aa, Artificial Sequence
  Synthetic construct
QSVLTQPPSASGTPGQRVTISCSGSSSNIGSNYVHWYQQLPGTAPKLLLYKNNQRPSGVPDRFSGSESGTSASLAISGLRSEDESIYYCATWDDSLSGPVFGGGTKVTVL

SEQ ID NO: 11548 - protein, 111 aa, Artificial Sequence
  Synthetic construct
QSVLTQPPSVSGAPGQRVTISCTGSTSNIGAGYDLHWYQQLPGTAPKLLIYGFTNRPSGVPDRFSGSKSGTSASLAISGLQAEDEADYYCQSYDSSLSSVVFGGGTKLTVL

SEQ ID NO: 11549 - protein, 106 aa, Artificial Sequence; identical to SEQ ID NO: 2667
  Synthetic construct

SEQ ID NO: 11550 - protein, 108 aa, Artificial Sequence
  Synthetic construct
EIVLTQSPGTLSLSPGERAALSCRASQSVGSLYVAWYQQKPGQAPRLLIFGASSRATGIPDRFSGSGSGTDFTLTISKLEPEDFAVYYCLQYGSPTWTFGQGTKVEIK

SEQ ID NO: 11551 - protein, 106 aa, Artificial Sequence
  Synthetic construct
DIQMTQSPSSLSASVGDRVTISCQTSQDINFSLNWYQQKPGKAPKLLIYDASNLEAGAPSRFSGSGSGTDFTFTISSLQPEDFATYYCQHYHNVPRFGPGTKVDIR

SEQ ID NO: 11552 - protein, 110 aa, Artificial Sequence
  Synthetic construct
LSVLTQPPSVSAAPGQKVTISCSGSNFNIGKNFVSWYQQLPGTAPKLLIYDNDKRPSGIPDRFSGSKSGTSATLDITGLQTGDEADYHCGTWDGSLSAGVFGGGTKLTVL

SEQ ID NO: 11553 - protein, 109 aa, Artificial Sequence
  Synthetic construct
EIVLTQSPSTLSLSPGERAALSCRASQSVSNNYLAWYQQKPGQAPRLLIYGASTRATGIPERFSGSGSGTDFTLIINKVEPEDLAVYYCHQYGYSLPNTFGQGTKLEIK

SEQ ID NO: 11554 - protein, 112 aa, Artificial Sequence
  Synthetic construct
DIVMTQTSLSLSVTPGQPASISCKSSQSLLHSDGKTYLFWYLQKAGQPPQLLIYEVFSRFSGVPDRFSGSGSGTDFTLKISRVEAEDVGVYYCMQSIQFPYTFGQGTKLEIK

SEQ ID NO: 11555 - protein, 112 aa, Artificial Sequence
  Synthetic construct
DIVMTQSPLSLPVTPGEPASISCRSSQSLLHSNGYNYLDWYVQKPGQSPQVLIYLGSNRASGVPDRFSGSGSGTDFTLKISRVEAEDVGVYYCMQALQTPLTFGPGTKVDIK

SEQ ID NO: 11556 - protein, 112 aa, Artificial Sequence
  Synthetic construct
DIVMTQTPLSLSVAPGQPASISCKSSQSLLHGDGKTYLYWYLQRPGQPPQLLIYEVFDRLSGVPDRFTGSGSGTDFTLKISRVEAEDVGVYYCMQSIQVPYTFGQGTKLEIK

SEQ ID NO: 11557 - protein, 106 aa, Artificial Sequence
  Synthetic construct
SYELTQPPSVSVSPGQTASITCSGDKLGDKYACWYQQKPGQSPFLVIYQDNKRPSGIPERFSGSNSGNTATLTISGTQAMDEADYYCQAWDSSNVVFGGGTKLTVL

SEQ ID NO: 11558 - protein, 107 aa, Artificial Sequence
  Synthetic construct
DIQMTQSPPSLSASVGDRITITCRANQSISSYLNWYHQKPGKGPKLQIYDASSLQSGVPSRFSGSGSGTDFTLTITSLQPEDFATYYCQQTYNIPWTFGQGTKVAFK

SEQ ID NO: 11559 - protein, 107 aa, Artificial Sequence
  Synthetic construct
EIVLTQSPATLCLSPGERATLSCRASQSVSSYLAWYQQKPGQAPRLLIYDASNRATGIPARFSGSGSGTDFTLTISSLEPEDFAVYYCQHRANWPLTFGGGTRVEIK

SEQ ID NO: 11560 - protein, 112 aa, Artificial Sequence
  Synthetic construct
DIVMTQTPLSLSVTPGQPASISCKSSQSLLHSDGKTYLYWYLQKPGQPPQLLIYEVSNRFSGVPDRFSGSGSGTDFTLKISRVEAEDVGVYYCMQSIKLPLTFGGGTKVEIK

SEQ ID NO: 11561 - protein, 112 aa, Artificial Sequence
  Synthetic construct
DIVMTQTPLSLSVTPGQPASISCKSSQSLLHSDGKTYLYWYLQKPGQPPQLLIYELSDRFSRVPDRFSGSGSGTDFTLNIKRVEAEDVGVYYCMQSIQLPLTFGQGTRLEIK

SEQ ID NO: 11562 - protein, 107 aa, Artificial Sequence; identical to SEQ ID NO: 11542
  Synthetic construct

SEQ ID NO: 11563 - protein, 105 aa, Artificial Sequence
  Synthetic construct
SYVLTQPPSVSVAPGKTARITCGGISIGSKSVHWYQQKPGQAPVLVIYYDSDRPSGIPERISGSNSGNTATLTISRVEAGDEADYYCQVWDTSSEFGGGTKLTVL

SEQ ID NO: 11564 - protein, 107 aa, Artificial Sequence
  Synthetic construct
DTQMTQSPSSLSASVGDRVTITCQASQDISNYLNWYHQKPGKAPKLLIYDASSLEAGVPSRFSGSGSGTDFTLTISSLQPEDFATYYCQQYDNLPLTFGPGTTVDIK

SEQ ID NO: 11565 - protein, 106 aa, Artificial Sequence; identical to SEQ ID NO: 2607
  Synthetic construct

SEQ ID NO: 11566 - protein, 115 aa, Artificial Sequence; identical to SEQ ID NO: 11530
  Synthetic construct

SEQ ID NO: 11567 - protein, 110 aa, Artificial Sequence
  Synthetic construct
QSVLTQPPSASGTPGQRVTISCSGSSSNIGSNTVNWYQQLPGTAPKLLIYSSNQRPSGVPDRFSGSKSGTSASLAISGLQSEDEADYYCATWDDSLNGPVFGGGTKLTVL

SEQ ID NO: 11568 - protein, 108 aa, Artificial Sequence
  Synthetic construct
EIVLTQSPGTLSLSPGERATLSCRASQSVSSNYLAWYQQKPGQAPRLLIYGASSRATGIPDRFSGSGSGTDFTLTISRLEPEDFAVYYCQQYVNSRLTFGPGTKVDIK

SEQ ID NO: 11569 - protein, 112 aa, Artificial Sequence
  Synthetic construct
DIVMTQFPLSLPVTPGEPASISCRSSQSLLHNNGYNYLDWYLQKPGQSPQLLIYLGSNRASGVPDRFSGSGSGTDFTLTISRVEAEDVGVYYCMQALQTPITFGQGTRLEIK

SEQ ID NO: 11570 - protein, 108 aa, Artificial Sequence
  Synthetic construct
SYELTQPPSVSVSPGQTARITCSGDALPKKYAYWYQQKSGQAPVLVIYEDSERPSGIPERFSGSSSGTMATLTISGAQVEDEADYYCYSRDSSGNHYVFGTGTKVTVL

SEQ ID NO: 11571 - protein, 107 aa, Artificial Sequence
  Synthetic construct
EIVMTQSPATLSVSPGERATLSCRASQSVSSNLAWYQQKPGQVPRLLIYGASTRATGIPARFSGSGSGTEFTLTISSLQSEDFAVYYCQQYNNWPGTFGQGTKVEIK

SEQ ID NO: 11572 - protein, 107 aa, Artificial Sequence
  Synthetic construct
SYELTQPPSVSVSPGQTASITCSGDDLGDKYASWYQQKPGQSPVLVIYQDTKRPAGIPERFAGSNSGNTATLTISGTQAMDEADYYCQAWDSSTAYVFGTGTKVTVL

SEQ ID NO: 11573 - protein, 105 aa, Artificial Sequence
  Synthetic construct
SYELTQPPSVSVAPGKTARITCGGDSIGSKSVHWYQQKPGQAPVVVIYYDSDRPSGIPERFSGSNSGNTATLTISGVEAGDEADYYCQVWDTSSEFGGGTKLTVL

SEQ ID NO: 11574 - protein, 111 aa, Artificial Sequence
  Synthetic construct
QSALTQPASVSGSPGQSITISCAGTSADVGSYDLVSWYQQHPGKAPKLMIYEDTKRPSGVSSRFSGSKSGNTAFLTISGLQAEDEADYYCCSYAGTNTPYVFGTGTEVTVL

SEQ ID NO: 11575 - protein, 108 aa, Artificial Sequence
  Synthetic construct
SYELTQPPSVSVSPGQTARIACSGDALPKKYTYWYQQKSGQAPVLVIYEDNKRPSGIPERFSGSSSGTMATLTISGAQVEDEADYYCHSTDSSGNVWLFGGGTKLTVL

SEQ ID NO: 11576 - protein, 107 aa, Artificial Sequence
  Synthetic construct
DIQMTQSPSSLSASVGDRLTITCRASQGIRNDLGWYQQKPGKAPKRLIYATSSLQSGVPSRFSGSGSGTEFTLTISSLQPEDFATYYCLQHNYYPYTFGQGTKLEIK

SEQ ID NO: 11577 - protein, 110 aa, Artificial Sequence
  Synthetic construct
QSALTQPASVSGSPGQSVTISCTGSSSDVGGYNYVSWYQQHPGKAPKLMINDVSNRPSGVSDRFSGSKSGNTASLTISGLQAEDEADYYCTSYTSSSTLVFGTGTKVTVL

SEQ ID NO: 11578 - protein, 115 aa, Artificial Sequence
  Synthetic construct
QAVLTQPSSLSASPGASASLTCTLRSGINVGTYRIYWYQQKPGSPPQFLLRYRSDSDKQQGSGVPSRFSGSKDASANAGILLISGLQSEDEADYYCMIRHSSAYVFGSGTKVTVQ

SEQ ID NO: 11579 - protein, 108 aa, Artificial Sequence
  Synthetic construct
DIQMTQSPSSLSASVGDRVTITCRASQGIRNDLGWYQQKPGKAPKRLISAASSLQSGVPSRFSGSGSGTEFTLTISSLQPEDFATYYCLQYNSYPLVTFGQGTRLEIK

SEQ ID NO: 11580 - protein, 110 aa, Artificial Sequence
  Synthetic construct
QSALTQPPSASGSPGQSVTISCTGTSSDVGGYKHVSWYQQHPGKAPKLMIYEVSERPSGVPDRFSGSKSGNTASLTVSGLQAEDEADYYCSSYAGSNNFVFGTGTKVTVL

SEQ ID NO: 11581 - protein, 110 aa, Artificial Sequence
  Synthetic construct
QSALTQPASVSESPGQSITISCTGTSSDVGGYNYVSWYQQHPGKAPKLMIYDVSDRPSGVSHRFSGSKSDNMASLTISGLQAEDEADYYCSSYTSNSTLVFGGGTKLTVL

SEQ ID NO: 11582 - protein, 112 aa, Artificial Sequence
  Synthetic construct
DIVMTQSPLSLPVTPGEPASISCRSSQSLLHNNGHNYLDWYLQKPGQSPQLLIYLGSNRASGVPDRFSGSGSGTDFTLKISRVEAEDVGVYYCMQALQTPYTFGQGTKLEIK

SEQ ID NO: 11583 - protein, 106 aa, Artificial Sequence
  Synthetic construct
EIVLTQSPATLSLSPGERATLSCRASQSVSSYLAWYQQKPGQAPRLLIFDASNRATGIPARFSGSGSGTDFTLTISSLEPEDFAVYYCQHRSNWPLFGPGTKVDIK

SEQ ID NO: 11584 - protein, 108 aa, Artificial Sequence
  Synthetic construct
EIVLTQSPGTLSLSPGERATLSCRASQSVSSSYLAWYQQKPGQAPRLLIYGASSRATGIPDRFSGSGSGTDFTLTISRLEPEDFAVYYCQQSGNSRLTFGPGTKVDIK

SEQ ID NO: 11585 - protein, 107 aa, Artificial Sequence
  Synthetic construct
DIQMTQSPSSLSASVGDRVTITCQASQDISNYLNWYQQKPGKAPKLLIYDASNLQTGVPSRFSGSGSGTDFTFTISSLQPEDIAAYYCQQYANLPITFGPGTKVDIK

SEQ ID NO: 11586 - protein, 107 aa, Artificial Sequence
  Synthetic construct
DIQMTQSPSSLSASVGDRVTITCRASQNIASYLNWYQQKPGKAPKLLIYAASGLQSGVPSRFSGSGSGTDFTLTISSLQPEDFATYYCQQTYSPLWTFGQGTKVEIK

SEQ ID NO: 11587 - protein, 108 aa, Artificial Sequence
  Synthetic construct
EIVLTQSPGTLSLSPGERATLSCRASQSVSSNYLAWYQQKPGRAPRLLIYGASSRATGIPDRFSGSGSGTDFTLTISRLEPEDFAVYYCQQYGGSPVTFGQGTKVEIK

SEQ ID NO: 11588 - protein, 107 aa, Artificial Sequence; identical to SEQ ID NO: 2687
  Synthetic construct

SEQ ID NO: 11589 - protein, 108 aa, Artificial Sequence; identical to SEQ ID NO: 10774
  Synthetic construct

SEQ ID NO: 11590 - protein, 110 aa, Artificial Sequence
  Synthetic construct
SYVLTQPPSVSVAPGKTARITCGGNNIGSKSVHWYQQKPGQAPLLVIYYDSDRPSGIPERFSGSNSGNTATLTISRVEAGDEADYYCQVWDGTSDHPAYVFGTGTKVTVL

SEQ ID NO: 11591 - protein, 106 aa, Artificial Sequence; identical to SEQ ID NO: 11293
  Synthetic construct

SEQ ID NO: 11592 - protein, 111 aa, Artificial Sequence
  Synthetic construct
QSALTQPPSASGSPGQSVTISCTGTNSDVGGYNSVSWYQQNPGKAPKVMIYEVSKRPSGVPDRFSGSKSGNTASLTVSGLQAEDEADYYCSSYAGYSNYVIFGGGTMLTVL

SEQ ID NO: 11593 - protein, 106 aa, Artificial Sequence; identical to SEQ ID NO: 2609
  Synthetic construct

SEQ ID NO: 11594 - protein, 105 aa, Artificial Sequence; identical to SEQ ID NO: 11090
  Synthetic construct

SEQ ID NO: 11595 - protein, 109 aa, Artificial Sequence
  Synthetic construct
EIVLTQSPGTLSLSPGERATLSCRASQSVSSSSLAWYQQKPGQAPRLLIYGASNRATGIPGRFSGSGSGTDFTLSITRLEPEDFAVYYCQQYGASPGYTFGQGTKLEIK

SEQ ID NO: 11596 - protein, 108 aa, Artificial Sequence
  Synthetic construct
EIVLTQSPGTLSLSPGERVTLSCRASQSVTGSYLAWYQQKPGQAPRLLIYGASSRATGIPDRFSGSGSGTDFTLTISRLEPEDFAVYYCQQYGSSPRTFGQGTKLEIK

SEQ ID NO: 11597 - protein, 8 aa, Artificial Sequence
  Synthetic construct
GYTFTSYY

SEQ ID NO: 11598 - protein, 8 aa, Artificial Sequence
  Synthetic construct
GFSFSSYG

SEQ ID NO: 11599 - protein, 8 aa, Artificial Sequence
  Synthetic construct
GFIFSTYA

SEQ ID NO: 11600 - protein, 10 aa, Artificial Sequence
  Synthetic construct
GGSISSSNYY

SEQ ID NO: 11601 - protein, 8 aa, Artificial Sequence
  Synthetic construct
GYTFTSNW

SEQ ID NO: 11602 - protein, 8 aa, Artificial Sequence
  Synthetic construct
GYTFTSYD

SEQ ID NO: 11603 - protein, 8 aa, Artificial Sequence
  Synthetic construct
GYIFTTYG

SEQ ID NO: 11604 - protein, 8 aa, Artificial Sequence
  Synthetic construct
GFSFSSYG

SEQ ID NO: 11605 - protein, 8 aa, Artificial Sequence
  Synthetic construct
GFTFDDYA

SEQ ID NO: 11606 - protein, 8 aa, Artificial Sequence
  Synthetic construct
GLTVSSNY

SEQ ID NO: 11607 - protein, 8 aa, Artificial Sequence
  Synthetic construct
NGSISRYY

SEQ ID NO: 11608 - protein, 8 aa, Artificial Sequence
  Synthetic construct
GFTFSSYS

SEQ ID NO: 11609 - protein, 8 aa, Artificial Sequence
  Synthetic construct
GYTFTNYG

SEQ ID NO: 11610 - protein, 8 aa, Artificial Sequence
  Synthetic construct
GFTFDDHA

SEQ ID NO: 11611 - protein, 8 aa, Artificial Sequence
  Synthetic construct
GFTFSSYT

SEQ ID NO: 11612 - protein, 8 aa, Artificial Sequence
  Synthetic construct
GGSISSYY

SEQ ID NO: 11613 - protein, 10 aa, Artificial Sequence
  Synthetic construct
GGSTSSAFSY

SEQ ID NO: 11614 - protein, 8 aa, Artificial Sequence
  Synthetic construct
GYTFNRYG

SEQ ID NO: 11615 - protein, 8 aa, Artificial Sequence
  Synthetic construct
GFTFSHYW

SEQ ID NO: 11616 - protein, 8 aa, Artificial Sequence
  Synthetic construct
GFTFSNYG

SEQ ID NO: 11617 - protein, 8 aa, Artificial Sequence
  Synthetic construct
GYTFTRHG

SEQ ID NO: 11618 - protein, 8 aa, Artificial Sequence
  Synthetic construct
GFTFSSFV

SEQ ID NO: 11619 - protein, 8 aa, Artificial Sequence
  Synthetic construct
GFTFSSYG

SEQ ID NO: 11620 - protein, 8 aa, Artificial Sequence
  Synthetic construct
GYTLIELA

SEQ ID NO: 11621 - protein, 8 aa, Artificial Sequence
  Synthetic construct
GYTFTSYS

SEQ ID NO: 11622 - protein, 8 aa, Artificial Sequence
  Synthetic construct
GFTFSSYG

SEQ ID NO: 11623 - protein, 8 aa, Artificial Sequence
  Synthetic construct
GYTLSEKS

SEQ ID NO: 11624 - protein, 8 aa, Artificial Sequence
  Synthetic construct
GFTFSNAW

SEQ ID NO: 11625 - protein, 8 aa, Artificial Sequence
  Synthetic construct
GGSFSGYY

SEQ ID NO: 11626 - protein, 8 aa, Artificial Sequence
  Synthetic construct
GFTFSSYG

SEQ ID NO: 11627 - protein, 8 aa, Artificial Sequence
  Synthetic construct
GGSFSGYY

SEQ ID NO: 11628 - protein, 8 aa, Artificial Sequence
  Synthetic construct
GITLKDYG

SEQ ID NO: 11629 - protein, 10 aa, Artificial Sequence
  Synthetic construct
GGSISSGSYY

SEQ ID NO: 11630 - protein, 8 aa, Artificial Sequence
  Synthetic construct
GGSISSYY

SEQ ID NO: 11631 - protein, 8 aa, Artificial Sequence
  Synthetic construct
GGSFSSYT

SEQ ID NO: 11632 - protein, 8 aa, Artificial Sequence
  Synthetic construct
GFTFSSYG

SEQ ID NO: 11633 - protein, 10 aa, Artificial Sequence
  Synthetic construct
GGSISSGSYY

SEQ ID NO: 11634 - protein, 8 aa, Artificial Sequence
  Synthetic construct
GFTFNTYS

SEQ ID NO: 11635 - protein, 8 aa, Artificial Sequence
  Synthetic construct
GFSFSRYN

SEQ ID NO: 11636 - protein, 8 aa, Artificial Sequence
  Synthetic construct
GGSFGLYY

SEQ ID NO: 11637 - protein, 8 aa, Artificial Sequence
  Synthetic construct
GFTFSSYS

SEQ ID NO: 11638 - protein, 8 aa, Artificial Sequence
  Synthetic construct
GFTFSSYA

SEQ ID NO: 11639 - protein, 8 aa, Artificial Sequence
  Synthetic construct
GFTFSNYA

SEQ ID NO: 11640 - protein, 8 aa, Artificial Sequence
  Synthetic construct
GFTFSSYA

SEQ ID NO: 11641 - protein, 8 aa, Artificial Sequence
  Synthetic construct
GLTVSYNY

SEQ ID NO: 11642 - protein, 8 aa, Artificial Sequence
  Synthetic construct
GFTFSDYY

SEQ ID NO: 11643 - protein, 8 aa, Artificial Sequence
  Synthetic construct
GGTFSSYT

SEQ ID NO: 11644 - protein, 8 aa, Artificial Sequence
  Synthetic construct
GGSFSGYY

SEQ ID NO: 11645 - protein, 8 aa, Artificial Sequence
  Synthetic construct
GGTFSSYP

SEQ ID NO: 11646 - protein, 9 aa, Artificial Sequence
  Synthetic construct
GGSISSLNW

SEQ ID NO: 11647 - protein, 8 aa, Artificial Sequence
  Synthetic construct
GYTLIELP

SEQ ID NO: 11648 - protein, 10 aa, Artificial Sequence
  Synthetic construct
GDSISSGDYY

SEQ ID NO: 11649 - protein, 8 aa, Artificial Sequence
  Synthetic construct
GFTFSSYG

SEQ ID NO: 11650 - protein, 8 aa, Artificial Sequence
  Synthetic construct
GYTLTTYA

SEQ ID NO: 11651 - protein, 8 aa, Artificial Sequence
  Synthetic construct
GYTFTNYG

SEQ ID NO: 11652 - protein, 8 aa, Artificial Sequence
  Synthetic construct
GGSFSGYY

SEQ ID NO: 11653 - protein, 8 aa, Artificial Sequence
  Synthetic construct
GFTFSKFA

SEQ ID NO: 11654 - protein, 10 aa, Artificial Sequence
  Synthetic construct
GDYVSSNSAA

SEQ ID NO: 11655 - protein, 8 aa, Artificial Sequence
  Synthetic construct
GFFFNSYI

SEQ ID NO: 11656 - protein, 8 aa, Artificial Sequence
  Synthetic construct
GFTFSSYD

SEQ ID NO: 11657 - protein, 10 aa, Artificial Sequence
  Synthetic construct
GGSISSDNYY

SEQ ID NO: 11658 - protein, 8 aa, Artificial Sequence
  Synthetic construct
GGSFSDFF

SEQ ID NO: 11659 - protein, 8 aa, Artificial Sequence
  Synthetic construct
GFTFSSYG

SEQ ID NO: 11660 - protein, 8 aa, Artificial Sequence
  Synthetic construct
GYTFIDYA

SEQ ID NO: 11661 - protein, 10 aa, Artificial Sequence
  Synthetic construct
GGSISSSSYY

SEQ ID NO: 11662 - protein, 8 aa, Artificial Sequence
  Synthetic construct
EYTLTELS

SEQ ID NO: 11663 - protein, 10 aa, Artificial Sequence
  Synthetic construct
GGSITSGLYY

SEQ ID NO: 11664 - protein, 8 aa, Artificial Sequence
  Synthetic construct
GFSFDDFA

SEQ ID NO: 11665 - protein, 8 aa, Artificial Sequence
  Synthetic construct
GFTVSDKY

SEQ ID NO: 11666 - protein, 8 aa, Artificial Sequence
  Synthetic construct
GYTFASNW

SEQ ID NO: 11667 - protein, 8 aa, Artificial Sequence
  Synthetic construct
GFTFNKYG

SEQ ID NO: 11668 - protein, 8 aa, Artificial Sequence
  Synthetic construct
GFSVFNYA

SEQ ID NO: 11669 - protein, 8 aa, Artificial Sequence
  Synthetic construct
GYTFTNNW

SEQ ID NO: 11670 - protein, 8 aa, Artificial Sequence
  Synthetic construct
GFTFSSYG

SEQ ID NO: 11671 - protein, 8 aa, Artificial Sequence
  Synthetic construct
GYNFNNSA

SEQ ID NO: 11672 - protein, 8 aa, Artificial Sequence
  Synthetic construct
GFTFSSYW

SEQ ID NO: 11673 - protein, 8 aa, Artificial Sequence
  Synthetic construct
RFTFSTYA

SEQ ID NO: 11674 - protein, 8 aa, Artificial Sequence
  Synthetic construct
GFTLSTYD

SEQ ID NO: 11675 - protein, 8 aa, Artificial Sequence
  Synthetic construct
GGTFSSYA

SEQ ID NO: 11676 - protein, 8 aa, Artificial Sequence
  Synthetic construct
GYTLTELS

SEQ ID NO: 11677 - protein, 8 aa, Artificial Sequence
  Synthetic construct
GGSVSGYY

SEQ ID NO: 11678 - protein, 8 aa, Artificial Sequence
  Synthetic construct
GYSFTNYW

SEQ ID NO: 11679 - protein, 8 aa, Artificial Sequence
  Synthetic construct
GFTFNDYY

SEQ ID NO: 11680 - protein, 8 aa, Artificial Sequence
  Synthetic construct
GDTFSSYT

SEQ ID NO: 11681 - protein, 8 aa, Artificial Sequence
  Synthetic construct
GYSFTTYW

SEQ ID NO: 11682 - protein, 8 aa, Artificial Sequence
  Synthetic construct
GFTFSSYG

SEQ ID NO: 11683 - protein, 8 aa, Artificial Sequence
  Synthetic construct
GGTFTSYA

SEQ ID NO: 11684 - protein, 8 aa, Artificial Sequence
  Synthetic construct
GITVNYFG

SEQ ID NO: 11685 - protein, 8 aa, Artificial Sequence
  Synthetic construct
GFTFNDYY

SEQ ID NO: 11686 - protein, 8 aa, Artificial Sequence
  Synthetic construct
GFNFNSFS

SEQ ID NO: 11687 - protein, 8 aa, Artificial Sequence
  Synthetic construct
AFTFSSYW

SEQ ID NO: 11688 - protein, 8 aa, Artificial Sequence
  Synthetic construct
GYTFTNYG

SEQ ID NO: 11689 - protein, 8 aa, Artificial Sequence
  Synthetic construct
GFTFSNYS

SEQ ID NO: 11690 - protein, 8 aa, Artificial Sequence
  Synthetic construct
GFTFRVAW

SEQ ID NO: 11691 - protein, 8 aa, Artificial Sequence
  Synthetic construct
GFTFSSYA

SEQ ID NO: 11692 - protein, 10 aa, Artificial Sequence
  Synthetic construct
GFSISTPGVG

SEQ ID NO: 11693 - protein, 8 aa, Artificial Sequence
  Synthetic construct
GFTFSSYW

SEQ ID NO: 11694 - protein, 8 aa, Artificial Sequence
  Synthetic construct
GFTFTSYA

SEQ ID NO: 11695 - protein, 8 aa, Artificial Sequence
  Synthetic construct
GFTVSSNY

SEQ ID NO: 11696 - protein, 8 aa, Artificial Sequence
  Synthetic construct
GYTFTNYA

SEQ ID NO: 11697 - protein, 8 aa, Artificial Sequence
  Synthetic construct
GFTFSAYA

SEQ ID NO: 11698 - protein, 8 aa, Artificial Sequence
  Synthetic construct
GGSFSSYA

SEQ ID NO: 11699 - protein, 8 aa, Artificial Sequence
  Synthetic construct
GFTFRTYA

SEQ ID NO: 11700 - protein, 8 aa, Artificial Sequence
  Synthetic construct
GFTFSDYA

SEQ ID NO: 11701 - protein, 8 aa, Artificial Sequence
  Synthetic construct
GFTFNTYA

SEQ ID NO: 11702 - protein, 10 aa, Artificial Sequence
  Synthetic construct
GATISNTSHY

SEQ ID NO: 11703 - protein, 8 aa, Artificial Sequence
  Synthetic construct
GYSFTSYW

SEQ ID NO: 11704 - protein, 8 aa, Artificial Sequence
  Synthetic construct
GFTFSSYA

SEQ ID NO: 11705 - protein, 8 aa, Artificial Sequence
  Synthetic construct
GGSFSGYY

SEQ ID NO: 11706 - protein, 8 aa, Artificial Sequence
  Synthetic construct
GGSFSGYY

SEQ ID NO: 11707 - protein, 8 aa, Artificial Sequence
  Synthetic construct
GFTFSDYY

SEQ ID NO: 11708 - protein, 8 aa, Artificial Sequence
  Synthetic construct
GFTFSSYD

SEQ ID NO: 11709 - protein, 8 aa, Artificial Sequence
  Synthetic construct
GFTFSSYD

SEQ ID NO: 11710 - protein, 8 aa, Artificial Sequence
  Synthetic construct
GFTVRSSY

SEQ ID NO: 11711 - protein, 8 aa, Artificial Sequence
  Synthetic construct
GDSISNFY

SEQ ID NO: 11712 - protein, 8 aa, Artificial Sequence
  Synthetic construct
GFTFSNYA

SEQ ID NO: 11713 - protein, 8 aa, Artificial Sequence
  Synthetic construct
GYTFTSYT

SEQ ID NO: 11714 - protein, 8 aa, Artificial Sequence
  Synthetic construct
GYTFTTYY

SEQ ID NO: 11715 - protein, 8 aa, Artificial Sequence
  Synthetic construct
GYTFTRYW

SEQ ID NO: 11716 - protein, 10 aa, Artificial Sequence
  Synthetic construct
GGSISSSTYY

SEQ ID NO: 11717 - protein, 8 aa, Artificial Sequence
  Synthetic construct
RFTFSGFG

SEQ ID NO: 11718 - protein, 8 aa, Artificial Sequence
  Synthetic construct
GGSFSGYY

SEQ ID NO: 11719 - protein, 10 aa, Artificial Sequence
  Synthetic construct
GDSISSNSHY

SEQ ID NO: 11720 - protein, 8 aa, Artificial Sequence
  Synthetic construct
GFSLSRHG

SEQ ID NO: 11721 - protein, 10 aa, Artificial Sequence
  Synthetic construct
GGSISSGSYY

SEQ ID NO: 11722 - protein, 8 aa, Artificial Sequence
  Synthetic construct
GYTFTSYA

SEQ ID NO: 11723 - protein, 8 aa, Artificial Sequence
  Synthetic construct
GFTFNSYG

SEQ ID NO: 11724 - protein, 10 aa, Artificial Sequence
  Synthetic construct
GDSISSSGYY

SEQ ID NO: 11725 - protein, 8 aa, Artificial Sequence
  Synthetic construct
GFTFSSYA

SEQ ID NO: 11726 - protein, 8 aa, Artificial Sequence
  Synthetic construct
GYTFSSYY

SEQ ID NO: 11727 - protein, 9 aa, Artificial Sequence
  Synthetic construct
GGSISSNNW

SEQ ID NO: 11728 - protein, 8 aa, Artificial Sequence
  Synthetic construct
GYRFTSYW

SEQ ID NO: 11729 - protein, 10 aa, Artificial Sequence
  Synthetic construct
GFSLSTGGVG

SEQ ID NO: 11730 - protein, 8 aa, Artificial Sequence
  Synthetic construct
GFIFSDYY

SEQ ID NO: 11731 - protein, 8 aa, Artificial Sequence
  Synthetic construct
GYTFTSFA

SEQ ID NO: 11732 - protein, 8 aa, Artificial Sequence
  Synthetic construct
GFIVSSNY

SEQ ID NO: 11733 - protein, 8 aa, Artificial Sequence
  Synthetic construct
GVTVSSNY

SEQ ID NO: 11734 - protein, 9 aa, Artificial Sequence
  Synthetic construct
NYSISSAYY

SEQ ID NO: 11735 - protein, 8 aa, Artificial Sequence
  Synthetic construct
GYTFTKFA

SEQ ID NO: 11736 - protein, 8 aa, Artificial Sequence
  Synthetic construct
IFTFSSYA

SEQ ID NO: 11737 - protein, 8 aa, Artificial Sequence
  Synthetic construct
GYTLIELS

SEQ ID NO: 11738 - protein, 8 aa, Artificial Sequence
  Synthetic construct
GFIFSSYS

SEQ ID NO: 11739 - protein, 8 aa, Artificial Sequence
  Synthetic construct
GFTFSNYS

SEQ ID NO: 11740 - protein, 8 aa, Artificial Sequence
  Synthetic construct
GDTFTIYA

SEQ ID NO: 11741 - protein, 8 aa, Artificial Sequence
  Synthetic construct
GGSFSGYY

SEQ ID NO: 11742 - protein, 8 aa, Artificial Sequence
  Synthetic construct
GGSFSSYA

SEQ ID NO: 11743 - protein, 10 aa, Artificial Sequence
  Synthetic construct
GGSISSGDYY

SEQ ID NO: 11744 - protein, 8 aa, Artificial Sequence
  Synthetic construct
GFTFSSYA

SEQ ID NO: 11745 - protein, 8 aa, Artificial Sequence
  Synthetic construct
GDSISNFY

SEQ ID NO: 11746 - protein, 8 aa, Artificial Sequence
  Synthetic construct
GFTFSRYA

SEQ ID NO: 11747 - protein, 8 aa, Artificial Sequence
  Synthetic construct
GFTFSSYS

SEQ ID NO: 11748 - protein, 8 aa, Artificial Sequence
  Synthetic construct
GFTFSNAW

SEQ ID NO: 11749 - protein, 8 aa, Artificial Sequence
  Synthetic construct
GFTFSSYA

SEQ ID NO: 11750 - protein, 8 aa, Artificial Sequence
  Synthetic construct
GGSFGLYY

SEQ ID NO: 11751 - protein, 8 aa, Artificial Sequence
  Synthetic construct
GFTFNNFG

SEQ ID NO: 11752 - protein, 8 aa, Artificial Sequence
  Synthetic construct
GFTFSDHY

SEQ ID NO: 11753 - protein, 8 aa, Artificial Sequence
  Synthetic construct
GYNFSTFW

SEQ ID NO: 11754 - protein, 8 aa, Artificial Sequence
  Synthetic construct
AFTFSSYA

SEQ ID NO: 11755 - protein, 10 aa, Artificial Sequence
  Synthetic construct
GASISSSSYW

SEQ ID NO: 11756 - protein, 8 aa, Artificial Sequence
  Synthetic construct
GFTFSSYG

SEQ ID NO: 11757 - protein, 10 aa, Artificial Sequence
  Synthetic construct
GFSLGTSGVG

SEQ ID NO: 11758 - protein, 10 aa, Artificial Sequence
  Synthetic construct
GGSISSGYYY

SEQ ID NO: 11759 - protein, 8 aa, Artificial Sequence
  Synthetic construct
GFTFSNYA

SEQ ID NO: 11760 - protein, 8 aa, Artificial Sequence
  Synthetic construct
GYTLIELP

SEQ ID NO: 11761 - protein, 8 aa, Artificial Sequence
  Synthetic construct
GFTFSSYA

SEQ ID NO: 11762 - protein, 8 aa, Artificial Sequence
  Synthetic construct
RFTFSGFA

SEQ ID NO: 11763 - protein, 8 aa, Artificial Sequence
  Synthetic construct
GYSFPTYW

SEQ ID NO: 11764 - protein, 8 aa, Artificial Sequence
  Synthetic construct
GFTVSNNY

SEQ ID NO: 11765 - protein, 8 aa, Artificial Sequence
  Synthetic construct
GFTFRLYG

SEQ ID NO: 11766 - protein, 8 aa, Artificial Sequence
  Synthetic construct
GFTFSNYG

SEQ ID NO: 11767 - protein, 8 aa, Artificial Sequence
  Synthetic construct
GFTFSSDA

SEQ ID NO: 11768 - protein, 8 aa, Artificial Sequence
  Synthetic construct
GGSFSSYT

SEQ ID NO: 11769 - protein, 10 aa, Artificial Sequence
  Synthetic construct
GGSISGSSYY

SEQ ID NO: 11770 - protein, 8 aa, Artificial Sequence
  Synthetic construct
GFTFGDYA

SEQ ID NO: 11771 - protein, 8 aa, Artificial Sequence
  Synthetic construct
GFTFSSYS

SEQ ID NO: 11772 - protein, 8 aa, Artificial Sequence
  Synthetic construct
GYTFTSYA

SEQ ID NO: 11773 - protein, 8 aa, Artificial Sequence
  Synthetic construct
GFTFSSYG

SEQ ID NO: 11774 - protein, 8 aa, Artificial Sequence
  Synthetic construct
GYSFNTYG

SEQ ID NO: 11775 - protein, 8 aa, Artificial Sequence
  Synthetic construct
GASVTSNY

SEQ ID NO: 11776 - protein, 8 aa, Artificial Sequence
  Synthetic construct
GGTFSSYT

SEQ ID NO: 11777 - protein, 8 aa, Artificial Sequence
  Synthetic construct
GFTFSSYS

SEQ ID NO: 11778 - protein, 8 aa, Artificial Sequence
  Synthetic construct
GYNFTTDW

SEQ ID NO: 11779 - protein, 8 aa, Artificial Sequence
  Synthetic construct
GYSFTSYW

SEQ ID NO: 11780 - protein, 8 aa, Artificial Sequence
  Synthetic construct
GGSFSGFY

SEQ ID NO: 11781 - protein, 8 aa, Artificial Sequence
  Synthetic construct
GFTFSSYT

SEQ ID NO: 11782 - protein, 8 aa, Artificial Sequence
  Synthetic construct
GFIFSDHY

SEQ ID NO: 11783 - protein, 8 aa, Artificial Sequence
  Synthetic construct
GFTFSIYA

SEQ ID NO: 11784 - protein, 10 aa, Artificial Sequence
  Synthetic construct
DGSITTTSYF

SEQ ID NO: 11785 - protein, 8 aa, Artificial Sequence
  Synthetic construct
GFTFSDYY

SEQ ID NO: 11786 - protein, 10 aa, Artificial Sequence
  Synthetic construct
GFSLSSNGVG

SEQ ID NO: 11787 - protein, 8 aa, Artificial Sequence
  Synthetic construct
GGTFSSYA

SEQ ID NO: 11788 - protein, 8 aa, Artificial Sequence
  Synthetic construct
GFTFRNYG

SEQ ID NO: 11789 - protein, 10 aa, Artificial Sequence
  Synthetic construct
GFSLSTTGMS

SEQ ID NO: 11790 - protein, 8 aa, Artificial Sequence
  Synthetic construct
GFSFQYYS

SEQ ID NO: 11791 - protein, 10 aa, Artificial Sequence
  Synthetic construct
GGSVSSHFYY

SEQ ID NO: 11792 - protein, 8 aa, Artificial Sequence
  Synthetic construct
GFTFSSYG

SEQ ID NO: 11793 - protein, 8 aa, Artificial Sequence
  Synthetic construct
GYTFTNYY

SEQ ID NO: 11794 - protein, 10 aa, Artificial Sequence
  Synthetic construct
GFSLSTSGVG

SEQ ID NO: 11795 - protein, 8 aa, Artificial Sequence
  Synthetic construct
GFTFSSYT

SEQ ID NO: 11796 - protein, 8 aa, Artificial Sequence
  Synthetic construct
GFTFSNSS

SEQ ID NO: 11797 - protein, 8 aa, Artificial Sequence
  Synthetic construct
GFIFSNYG

SEQ ID NO: 11798 - protein, 10 aa, Artificial Sequence
  Synthetic construct
GGSVSSDSYY

SEQ ID NO: 11799 - protein, 8 aa, Artificial Sequence
  Synthetic construct
GFTFSNAW

SEQ ID NO: 11800 - protein, 8 aa, Artificial Sequence
  Synthetic construct
GASVTSYY

SEQ ID NO: 11801 - protein, 8 aa, Artificial Sequence
  Synthetic construct
GYTFTSFA

SEQ ID NO: 11802 - protein, 8 aa, Artificial Sequence
  Synthetic construct
GFTFSSYS

SEQ ID NO: 11803 - protein, 8 aa, Artificial Sequence
  Synthetic construct
GFTFSTYA

SEQ ID NO: 11804 - protein, 10 aa, Artificial Sequence
  Synthetic construct
GASITSGIYY

SEQ ID NO: 11805 - protein, 8 aa, Artificial Sequence
  Synthetic construct
GGTFSSYG

SEQ ID NO: 11806 - protein, 8 aa, Artificial Sequence
  Synthetic construct
GFTFSTYA

SEQ ID NO: 11807 - protein, 8 aa, Artificial Sequence
  Synthetic construct
GFTVSSNY

SEQ ID NO: 11808 - protein, 8 aa, Artificial Sequence
  Synthetic construct
GFTFSNYW

SEQ ID NO: 11809 - protein, 10 aa, Artificial Sequence
  Synthetic construct
GGSISSNSYY

SEQ ID NO: 11810 - protein, 8 aa, Artificial Sequence
  Synthetic construct
GYTLTNYA

SEQ ID NO: 11811 - protein, 8 aa, Artificial Sequence
  Synthetic construct
GGTFSSNS

SEQ ID NO: 11812 - protein, 8 aa, Artificial Sequence
  Synthetic construct
GFTFDEFA

SEQ ID NO: 11813 - protein, 8 aa, Artificial Sequence
  Synthetic construct
GGTFSNYT

SEQ ID NO: 11814 - protein, 10 aa, Artificial Sequence
  Synthetic construct
GGPVNFAIYY

SEQ ID NO: 11815 - protein, 8 aa, Artificial Sequence
  Synthetic construct
GITLKDYG

SEQ ID NO: 11816 - protein, 10 aa, Artificial Sequence
  Synthetic construct
GGSISSDNYY

SEQ ID NO: 11817 - protein, 9 aa, Artificial Sequence
  Synthetic construct
GGSISSSNW

SEQ ID NO: 11818 - protein, 8 aa, Artificial Sequence
  Synthetic construct
GISFSDAW

SEQ ID NO: 11819 - protein, 10 aa, Artificial Sequence
  Synthetic construct
GGSISRSSYY

SEQ ID NO: 11820 - protein, 8 aa, Artificial Sequence
  Synthetic construct
GYSFTNYW

SEQ ID NO: 11821 - protein, 8 aa, Artificial Sequence
  Synthetic construct
GYTFTNYY

SEQ ID NO: 11822 - protein, 8 aa, Artificial Sequence
  Synthetic construct
GFTFSSYG

SEQ ID NO: 11823 - protein, 10 aa, Artificial Sequence
  Synthetic construct
GGSISSSTYY

SEQ ID NO: 11824 - protein, 8 aa, Artificial Sequence
  Synthetic construct
GYTFSNYR

SEQ ID NO: 11825 - protein, 8 aa, Artificial Sequence
  Synthetic construct
GYSLTYYA

SEQ ID NO: 11826 - protein, 8 aa, Artificial Sequence
  Synthetic construct
GGSISSYY

SEQ ID NO: 11827 - protein, 10 aa, Artificial Sequence
  Synthetic construct
GFSLSTGGVG

SEQ ID NO: 11828 - protein, 8 aa, Artificial Sequence
  Synthetic construct
GGSISSYY

SEQ ID NO: 11829 - protein, 8 aa, Artificial Sequence
  Synthetic construct
GFTFTIYA

SEQ ID NO: 11830 - protein, 9 aa, Artificial Sequence
  Synthetic construct
GGSISSSNW

SEQ ID NO: 11831 - protein, 8 aa, Artificial Sequence
  Synthetic construct
GVTFSYSW

SEQ ID NO: 11832 - protein, 8 aa, Artificial Sequence
  Synthetic construct
GFTVSSNY

SEQ ID NO: 11833 - protein, 8 aa, Artificial Sequence
  Synthetic construct
GYSFISFG

SEQ ID NO: 11834 - protein, 8 aa, Artificial Sequence
  Synthetic construct
GFTFSSYA

SEQ ID NO: 11835 - protein, 8 aa, Artificial Sequence
  Synthetic construct
GFTFSSYD

SEQ ID NO: 11836 - protein, 8 aa, Artificial Sequence
  Synthetic construct
GYSFTTYW

SEQ ID NO: 11837 - protein, 8 aa, Artificial Sequence
  Synthetic construct
GFIFSSYS

SEQ ID NO: 11838 - protein, 8 aa, Artificial Sequence
  Synthetic construct
GGTFSSYP

SEQ ID NO: 11839 - protein, 8 aa, Artificial Sequence
  Synthetic construct
GFTFSSYG

SEQ ID NO: 11840 - protein, 8 aa, Artificial Sequence
  Synthetic construct
GYTFTNYY

SEQ ID NO: 11841 - protein, 8 aa, Artificial Sequence
  Synthetic construct
GYSLTELS

SEQ ID NO: 11842 - protein, 8 aa, Artificial Sequence
  Synthetic construct
GYSFISFG

SEQ ID NO: 11843 - protein, 8 aa, Artificial Sequence
  Synthetic construct
GYSFSNYW

SEQ ID NO: 11844 - protein, 8 aa, Artificial Sequence
  Synthetic construct
GFTFSIYA

SEQ ID NO: 11845 - protein, 8 aa, Artificial Sequence
  Synthetic construct
GFSFSSYV

SEQ ID NO: 11846 - protein, 8 aa, Artificial Sequence
  Synthetic construct
GGTFNSYA

SEQ ID NO: 11847 - protein, 8 aa, Artificial Sequence
  Synthetic construct
GFTFSSYS

SEQ ID NO: 11848 - protein, 8 aa, Artificial Sequence
  Synthetic construct
GYTFTSYA

SEQ ID NO: 11849 - protein, 8 aa, Artificial Sequence
  Synthetic construct
GFIFSNYA

SEQ ID NO: 11850 - protein, 8 aa, Artificial Sequence
  Synthetic construct
GDSISSYY

SEQ ID NO: 11851 - protein, 8 aa, Artificial Sequence
  Synthetic construct
GGTFSSYG

SEQ ID NO: 11852 - protein, 8 aa, Artificial Sequence
  Synthetic construct
GFTFNKFG

SEQ ID NO: 11853 - protein, 8 aa, Artificial Sequence
  Synthetic construct
GFTFSSYA

SEQ ID NO: 11854 - protein, 8 aa, Artificial Sequence
  Synthetic construct
GFTFSNFA

SEQ ID NO: 11855 - protein, 8 aa, Artificial Sequence
  Synthetic construct
GFTFSSYA

SEQ ID NO: 11856 - protein, 8 aa, Artificial Sequence
  Synthetic construct
GFTFSSYG

SEQ ID NO: 11857 - protein, 8 aa, Artificial Sequence
  Synthetic construct
GYTFTSYG

SEQ ID NO: 11858 - protein, 8 aa, Artificial Sequence
  Synthetic construct
GHTFSSYY

SEQ ID NO: 11859 - protein, 8 aa, Artificial Sequence
  Synthetic construct
GFTFSSYS

SEQ ID NO: 11860 - protein, 8 aa, Artificial Sequence
  Synthetic construct
GFTFSNYA

SEQ ID NO: 11861 - protein, 8 aa, Artificial Sequence
  Synthetic construct
GFTLSSYA

SEQ ID NO: 11862 - protein, 8 aa, Artificial Sequence
  Synthetic construct
GFTFSSYG

SEQ ID NO: 11863 - protein, 8 aa, Artificial Sequence
  Synthetic construct
GFTFNNAW

SEQ ID NO: 11864 - protein, 8 aa, Artificial Sequence
  Synthetic construct
GFSFSSYA

SEQ ID NO: 11865 - protein, 8 aa, Artificial Sequence
  Synthetic construct
GFTFSDYY

SEQ ID NO: 11866 - protein, 10 aa, Artificial Sequence
  Synthetic construct
GGSISSGNYY

SEQ ID NO: 11867 - protein, 8 aa, Artificial Sequence
  Synthetic construct
GGTFSSYA

SEQ ID NO: 11868 - protein, 8 aa, Artificial Sequence
  Synthetic construct
GYTFTSYA

SEQ ID NO: 11869 - protein, 8 aa, Artificial Sequence
  Synthetic construct
GYTFTSYA

SEQ ID NO: 11870 - protein, 8 aa, Artificial Sequence
  Synthetic construct
GGSISSHY

SEQ ID NO: 11871 - protein, 8 aa, Artificial Sequence
  Synthetic construct
GGTFSSFT

SEQ ID NO: 11872 - protein, 8 aa, Artificial Sequence
  Synthetic construct
GLTFITYA

SEQ ID NO: 11873 - protein, 8 aa, Artificial Sequence
  Synthetic construct
GYTFTIYA

SEQ ID NO: 11874 - protein, 8 aa, Artificial Sequence
  Synthetic construct
GGSISTYY

SEQ ID NO: 11875 - protein, 8 aa, Artificial Sequence
  Synthetic construct
GYTFITYA

SEQ ID NO: 11876 - protein, 8 aa, Artificial Sequence
  Synthetic construct
GGSFSGYY

SEQ ID NO: 11877 - protein, 8 aa, Artificial Sequence
  Synthetic construct
GGSFGLYY

SEQ ID NO: 11878 - protein, 9 aa, Artificial Sequence
  Synthetic construct
GYSISSGYY

SEQ ID NO: 11879 - protein, 8 aa, Artificial Sequence
  Synthetic construct
GFTFSRNW

SEQ ID NO: 11880 - protein, 8 aa, Artificial Sequence
  Synthetic construct
GFIFTTYV

SEQ ID NO: 11881 - protein, 8 aa, Artificial Sequence
  Synthetic construct
GLTVSSNY

SEQ ID NO: 11882 - protein, 8 aa, Artificial Sequence
  Synthetic construct
GYSFTSYW

SEQ ID NO: 11883 - protein, 8 aa, Artificial Sequence
  Synthetic construct
GFTFSNAW

SEQ ID NO: 11884 - protein, 8 aa, Artificial Sequence
  Synthetic construct
GLTVSSNY

SEQ ID NO: 11885 - protein, 8 aa, Artificial Sequence
  Synthetic construct
GYTFTSYA

SEQ ID NO: 11886 - protein, 10 aa, Artificial Sequence
  Synthetic construct
GFSFTTGGEG

SEQ ID NO: 11887 - protein, 8 aa, Artificial Sequence
  Synthetic construct
GGSISRYY

SEQ ID NO: 11888 - protein, 8 aa, Artificial Sequence
  Synthetic construct
GITFKDYG

SEQ ID NO: 11889 - protein, 8 aa, Artificial Sequence
  Synthetic construct
GFTFSGSA

SEQ ID NO: 11890 - protein, 8 aa, Artificial Sequence
  Synthetic construct
GLSVGGNH

SEQ ID NO: 11891 - protein, 9 aa, Artificial Sequence
  Synthetic construct
GYSISSGYY

SEQ ID NO: 11892 - protein, 8 aa, Artificial Sequence
  Synthetic construct
GYTFTSYA

SEQ ID NO: 11893 - protein, 8 aa, Artificial Sequence
  Synthetic construct
GGKFSSYA

SEQ ID NO: 11894 - protein, 8 aa, Artificial Sequence
  Synthetic construct
GGSFSGYY

SEQ ID NO: 11895 - protein, 8 aa, Artificial Sequence
  Synthetic construct
GGTFSSYT

SEQ ID NO: 11896 - protein, 8 aa, Artificial Sequence
  Synthetic construct
GFTFEDFD

SEQ ID NO: 11897 - protein, 10 aa, Artificial Sequence
  Synthetic construct
GDSVSSDSAA

SEQ ID NO: 11898 - protein, 8 aa, Artificial Sequence
  Synthetic construct
GFIFSTYW

SEQ ID NO: 11899 - protein, 8 aa, Artificial Sequence
  Synthetic construct
GFTFSDYY

SEQ ID NO: 11900 - protein, 8 aa, Artificial Sequence
  Synthetic construct
GFTFDSFV

SEQ ID NO: 11901 - protein, 9 aa, Artificial Sequence
  Synthetic construct
GGSISSSIW

SEQ ID NO: 11902 - protein, 9 aa, Artificial Sequence
  Synthetic construct
GGSISSSSW

SEQ ID NO: 11903 - protein, 8 aa, Artificial Sequence
  Synthetic construct
GSTFSSYW

SEQ ID NO: 11904 - protein, 8 aa, Artificial Sequence
  Synthetic construct
GYTLTELS

SEQ ID NO: 11905 - protein, 9 aa, Artificial Sequence
  Synthetic construct
GYSISSGYY

SEQ ID NO: 11906 - protein, 8 aa, Artificial Sequence
  Synthetic construct
GYTLSSYY

SEQ ID NO: 11907 - protein, 10 aa, Artificial Sequence
  Synthetic construct
GFSLSTSGVG

SEQ ID NO: 11908 - protein, 8 aa, Artificial Sequence
  Synthetic construct
GGSFRSYY

SEQ ID NO: 11909 - protein, 10 aa, Artificial Sequence
  Synthetic construct
DDSITTTSYF

SEQ ID NO: 11910 - protein, 8 aa, Artificial Sequence
  Synthetic construct
GFTFNKYG

SEQ ID NO: 11911 - protein, 8 aa, Artificial Sequence
  Synthetic construct
AFTFTDYA

SEQ ID NO: 11912 - protein, 8 aa, Artificial Sequence
  Synthetic construct
GGTFSSYA

SEQ ID NO: 11913 - protein, 8 aa, Artificial Sequence
  Synthetic construct
GYSFTSHW

SEQ ID NO: 11914 - protein, 8 aa, Artificial Sequence
  Synthetic construct
GGTFSSYA

SEQ ID NO: 11915 - protein, 8 aa, Artificial Sequence
  Synthetic construct
GITLKDYG

SEQ ID NO: 11916 - protein, 8 aa, Artificial Sequence
  Synthetic construct
GNTFTKSI

SEQ ID NO: 11917 - protein, 8 aa, Artificial Sequence
  Synthetic construct
GFSFSNYG

SEQ ID NO: 11918 - protein, 8 aa, Artificial Sequence
  Synthetic construct
GYTFTTYA

SEQ ID NO: 11919 - protein, 8 aa, Artificial Sequence
  Synthetic construct
GFTFSSYA

SEQ ID NO: 11920 - protein, 8 aa, Artificial Sequence
  Synthetic construct
GGTFSSYA

SEQ ID NO: 11921 - protein, 8 aa, Artificial Sequence
  Synthetic construct
GGTFSSYS

SEQ ID NO: 11922 - protein, 10 aa, Artificial Sequence
  Synthetic construct
GFLISTYGVG

SEQ ID NO: 11923 - protein, 8 aa, Artificial Sequence
  Synthetic construct
GFSFSSYG

SEQ ID NO: 11924 - protein, 8 aa, Artificial Sequence
  Synthetic construct
GFSVSSNY

SEQ ID NO: 11925 - protein, 8 aa, Artificial Sequence
  Synthetic construct
GYTFISYG

SEQ ID NO: 11926 - protein, 10 aa, Artificial Sequence
  Synthetic construct
GGSISSGDYY

SEQ ID NO: 11927 - protein, 8 aa, Artificial Sequence
  Synthetic construct
GFTFSSYD

SEQ ID NO: 11928 - protein, 8 aa, Artificial Sequence
  Synthetic construct
GGTFSNYA

SEQ ID NO: 11929 - protein, 8 aa, Artificial Sequence
  Synthetic construct
GFTFSSYG

SEQ ID NO: 11930 - protein, 8 aa, Artificial Sequence
  Synthetic construct
GFTFSSFA

SEQ ID NO: 11931 - protein, 8 aa, Artificial Sequence
  Synthetic construct
GFTVSSNY

SEQ ID NO: 11932 - protein, 8 aa, Artificial Sequence
  Synthetic construct
GFTFSNYN

SEQ ID NO: 11933 - protein, 5 aa, Artificial Sequence
  Synthetic construct
GGTYA

SEQ ID NO: 11934 - protein, 8 aa, Artificial Sequence
  Synthetic construct
GFTFVSQW

SEQ ID NO: 11935 - protein, 10 aa, Artificial Sequence
  Synthetic construct
GGSISSSSYY

SEQ ID NO: 11936 - protein, 8 aa, Artificial Sequence
  Synthetic construct
GYTFTIYG

SEQ ID NO: 11937 - protein, 8 aa, Artificial Sequence
  Synthetic construct
GYTLTELS

SEQ ID NO: 11938 - protein, 8 aa, Artificial Sequence
  Synthetic construct
GGSFSGYY

SEQ ID NO: 11939 - protein, 8 aa, Artificial Sequence
  Synthetic construct
GITFKDYG

SEQ ID NO: 11940 - protein, 8 aa, Artificial Sequence
  Synthetic construct
GFSFSSYA

SEQ ID NO: 11941 - protein, 8 aa, Artificial Sequence
  Synthetic construct
GYTLTELS

SEQ ID NO: 11942 - protein, 8 aa, Artificial Sequence
  Synthetic construct
GFTFSTYA

SEQ ID NO: 11943 - protein, 8 aa, Artificial Sequence
  Synthetic construct
GYTLIELS

SEQ ID NO: 11944 - protein, 8 aa, Artificial Sequence
  Synthetic construct
GYSFNTYW

SEQ ID NO: 11945 - protein, 8 aa, Artificial Sequence
  Synthetic construct
GFTFSSYG

SEQ ID NO: 11946 - protein, 10 aa, Artificial Sequence
  Synthetic construct
GFSLSNSGVG

SEQ ID NO: 11947 - protein, 8 aa, Artificial Sequence
  Synthetic construct
GFTFSSYA

SEQ ID NO: 11948 - protein, 10 aa, Artificial Sequence
  Synthetic construct
GASINSGSFY

SEQ ID NO: 11949 - protein, 8 aa, Artificial Sequence
  Synthetic construct
GGSISSYY

SEQ ID NO: 11950 - protein, 8 aa, Artificial Sequence
  Synthetic construct
GFTFSSFG

SEQ ID NO: 11951 - protein, 8 aa, Artificial Sequence
  Synthetic construct
GGTFSSHG

SEQ ID NO: 11952 - protein, 8 aa, Artificial Sequence
  Synthetic construct
GFTFSSYS

SEQ ID NO: 11953 - protein, 8 aa, Artificial Sequence
  Synthetic construct
GYTFTSYA

SEQ ID NO: 11954 - protein, 8 aa, Artificial Sequence
  Synthetic construct
GFTFSSYS

SEQ ID NO: 11955 - protein, 8 aa, Artificial Sequence
  Synthetic construct
GFTSRTYW

SEQ ID NO: 11956 - protein, 8 aa, Artificial Sequence
  Synthetic construct
GYTFTGYA

SEQ ID NO: 11957 - protein, 8 aa, Artificial Sequence
  Synthetic construct
GFTFSSYA

SEQ ID NO: 11958 - protein, 8 aa, Artificial Sequence
  Synthetic construct
GGSISSDY

SEQ ID NO: 11959 - protein, 10 aa, Artificial Sequence
  Synthetic construct
GVSISSSSSF

SEQ ID NO: 11960 - protein, 8 aa, Artificial Sequence
  Synthetic construct
GYTFTSYG

SEQ ID NO: 11961 - protein, 8 aa, Artificial Sequence
  Synthetic construct
GFTFDDYA

SEQ ID NO: 11962 - protein, 8 aa, Artificial Sequence
  Synthetic construct
GFTFSSYW

SEQ ID NO: 11963 - protein, 8 aa, Artificial Sequence
  Synthetic construct
GYTLTDLS

SEQ ID NO: 11964 - protein, 8 aa, Artificial Sequence
  Synthetic construct
GYTFTSYS

SEQ ID NO: 11965 - protein, 8 aa, Artificial Sequence
  Synthetic construct
GYSFTRYW

SEQ ID NO: 11966 - protein, 8 aa, Artificial Sequence
  Synthetic construct
RGTFSSYA

SEQ ID NO: 11967 - protein, 8 aa, Artificial Sequence
  Synthetic construct
GYTFTGYY

SEQ ID NO: 11968 - protein, 10 aa, Artificial Sequence
  Synthetic construct
GGSISSRNYY

SEQ ID NO: 11969 - protein, 8 aa, Artificial Sequence
  Synthetic construct
GFTFSNYG

SEQ ID NO: 11970 - protein, 8 aa, Artificial Sequence
  Synthetic construct
GFPFSNYN

SEQ ID NO: 11971 - protein, 8 aa, Artificial Sequence
  Synthetic construct
GFTFDDYA

SEQ ID NO: 11972 - protein, 8 aa, Artificial Sequence
  Synthetic construct
GYTFISYG

SEQ ID NO: 11973 - protein, 8 aa, Artificial Sequence
  Synthetic construct
GFTFDDYA

SEQ ID NO: 11974 - protein, 10 aa, Artificial Sequence
  Synthetic construct
GGSVASDGFY

SEQ ID NO: 11975 - protein, 8 aa, Artificial Sequence
  Synthetic construct
GFTFSSYA

SEQ ID NO: 11976 - protein, 8 aa, Artificial Sequence
  Synthetic construct
GFTFSTYA

SEQ ID NO: 11977 - protein, 8 aa, Artificial Sequence
  Synthetic construct
GYTFTNYD

SEQ ID NO: 11978 - protein, 8 aa, Artificial Sequence
  Synthetic construct
GFTFSSYW

SEQ ID NO: 11979 - protein, 10 aa, Artificial Sequence
  Synthetic construct
GGSISSGDYY

SEQ ID NO: 11980 - protein, 8 aa, Artificial Sequence
  Synthetic construct
GFTFSTYG

SEQ ID NO: 11981 - protein, 8 aa, Artificial Sequence
  Synthetic construct
GGTFSSYT

SEQ ID NO: 11982 - protein, 8 aa, Artificial Sequence
  Synthetic construct
GFTFSNYG

SEQ ID NO: 11983 - protein, 8 aa, Artificial Sequence
  Synthetic construct
GFTLGDYA

SEQ ID NO: 11984 - protein, 8 aa, Artificial Sequence
  Synthetic construct
GFSFSIYG

SEQ ID NO: 11985 - protein, 8 aa, Artificial Sequence
  Synthetic construct
EYTLTELS

SEQ ID NO: 11986 - protein, 10 aa, Artificial Sequence
  Synthetic construct
GGSISNSPYY

SEQ ID NO: 11987 - protein, 8 aa, Artificial Sequence
  Synthetic construct
GYTFSSYG

SEQ ID NO: 11988 - protein, 8 aa, Artificial Sequence
  Synthetic construct
GFTLSSFS

SEQ ID NO: 11989 - protein, 8 aa, Artificial Sequence
  Synthetic construct
GFTFINYA

SEQ ID NO: 11990 - protein, 8 aa, Artificial Sequence
  Synthetic construct
GYSFTSNA

SEQ ID NO: 11991 - protein, 8 aa, Artificial Sequence
  Synthetic construct
GGSISSYY

SEQ ID NO: 11992 - protein, 8 aa, Artificial Sequence
  Synthetic construct
GYTFTNYA

SEQ ID NO: 11993 - protein, 8 aa, Artificial Sequence
  Synthetic construct
GFTFSSYS

SEQ ID NO: 11994 - protein, 8 aa, Artificial Sequence
  Synthetic construct
GFNFEDFA

SEQ ID NO: 11995 - protein, 8 aa, Artificial Sequence
  Synthetic construct
GGSISSYS

SEQ ID NO: 11996 - protein, 8 aa, Artificial Sequence
  Synthetic construct
GFTFSNAW

SEQ ID NO: 11997 - protein, 8 aa, Artificial Sequence
  Synthetic construct
GYTFTSYG

SEQ ID NO: 11998 - protein, 8 aa, Artificial Sequence
  Synthetic construct
GFPFSSYP

SEQ ID NO: 11999 - protein, 8 aa, Artificial Sequence
  Synthetic construct
GFTFSNYG

SEQ ID NO: 12000 - protein, 8 aa, Artificial Sequence
  Synthetic construct
GFNFEDYG

SEQ ID NO: 12001 - protein, 8 aa, Artificial Sequence
  Synthetic construct
GFTFSSYA

SEQ ID NO: 12002 - protein, 8 aa, Artificial Sequence
  Synthetic construct
GFTFSSYS

SEQ ID NO: 12003 - protein, 8 aa, Artificial Sequence
  Synthetic construct
GFTFEDFD

SEQ ID NO: 12004 - protein, 8 aa, Artificial Sequence
  Synthetic construct
GGSFSGYY

SEQ ID NO: 12005 - protein, 8 aa, Artificial Sequence
  Synthetic construct
GFNLRTHD

SEQ ID NO: 12006 - protein, 8 aa, Artificial Sequence
  Synthetic construct
GFTFSGYT

SEQ ID NO: 12007 - protein, 9 aa, Artificial Sequence
  Synthetic construct
GGSITSSNW

SEQ ID NO: 12008 - protein, 8 aa, Artificial Sequence
  Synthetic construct
GYTFIKYG

SEQ ID NO: 12009 - protein, 8 aa, Artificial Sequence
  Synthetic construct
GFTFSHYS

SEQ ID NO: 12010 - protein, 8 aa, Artificial Sequence
  Synthetic construct
GVTVSSNY

SEQ ID NO: 12011 - protein, 8 aa, Artificial Sequence
  Synthetic construct
GFTFSSYA

SEQ ID NO: 12012 - protein, 8 aa, Artificial Sequence
  Synthetic construct
GFAISGYS

SEQ ID NO: 12013 - protein, 8 aa, Artificial Sequence
  Synthetic construct
GFTFSGFG

SEQ ID NO: 12014 - protein, 8 aa, Artificial Sequence
  Synthetic construct
GGTFSSFA

SEQ ID NO: 12015 - protein, 8 aa, Artificial Sequence
  Synthetic construct
GFTFSTYA

SEQ ID NO: 12016 - protein, 8 aa, Artificial Sequence
  Synthetic construct
GYTFIGYY

SEQ ID NO: 12017 - protein, 8 aa, Artificial Sequence
  Synthetic construct
GFTFSTYA

SEQ ID NO: 12018 - protein, 8 aa, Artificial Sequence
  Synthetic construct
GFTFTNAW

SEQ ID NO: 12019 - protein, 8 aa, Artificial Sequence
  Synthetic construct
GFTFSSYA

SEQ ID NO: 12020 - protein, 10 aa, Artificial Sequence
  Synthetic construct
GGSISSSSYY

SEQ ID NO: 12021 - protein, 8 aa, Artificial Sequence
  Synthetic construct
GGTFSDYG

SEQ ID NO: 12022 - protein, 8 aa, Artificial Sequence
  Synthetic construct
GGSISSVF

SEQ ID NO: 12023 - protein, 9 aa, Artificial Sequence
  Synthetic construct
GGSISSSNW

SEQ ID NO: 12024 - protein, 8 aa, Artificial Sequence
  Synthetic construct
GGSFSGYY

SEQ ID NO: 12025 - protein, 8 aa, Artificial Sequence
  Synthetic construct
GFTFSDYY

SEQ ID NO: 12026 - protein, 8 aa, Artificial Sequence
  Synthetic construct
GYIFTSYW

SEQ ID NO: 12027 - protein, 9 aa, Artificial Sequence
  Synthetic construct
GGSISSYSW

SEQ ID NO: 12028 - protein, 8 aa, Artificial Sequence
  Synthetic construct
GLTFTSAW

SEQ ID NO: 12029 - protein, 8 aa, Artificial Sequence
  Synthetic construct
GVSISSYY

SEQ ID NO: 12030 - protein, 8 aa, Artificial Sequence
  Synthetic construct
GFSFSNYW

SEQ ID NO: 12031 - protein, 8 aa, Artificial Sequence
  Synthetic construct
GITVSSNY

SEQ ID NO: 12032 - protein, 8 aa, Artificial Sequence
  Synthetic construct
GYNFTSYY

SEQ ID NO: 12033 - protein, 8 aa, Artificial Sequence
  Synthetic construct
AFTFSTSW

SEQ ID NO: 12034 - protein, 8 aa, Artificial Sequence
  Synthetic construct
GIAFKDYG

SEQ ID NO: 12035 - protein, 8 aa, Artificial Sequence
  Synthetic construct
GYTFTSYG

SEQ ID NO: 12036 - protein, 10 aa, Artificial Sequence
  Synthetic construct
GGSISSGSYY

SEQ ID NO: 12037 - protein, 10 aa, Artificial Sequence
  Synthetic construct
GGSTSSAFSY

SEQ ID NO: 12038 - protein, 8 aa, Artificial Sequence
  Synthetic construct
GFTVSSNY

SEQ ID NO: 12039 - protein, 8 aa, Artificial Sequence
  Synthetic construct
GYTFSSYG

SEQ ID NO: 12040 - protein, 8 aa, Artificial Sequence
  Synthetic construct
GFAFNNYG

SEQ ID NO: 12041 - protein, 8 aa, Artificial Sequence
  Synthetic construct
GYTFTSNW

SEQ ID NO: 12042 - protein, 9 aa, Artificial Sequence
  Synthetic construct
GGSINSSNW

SEQ ID NO: 12043 - protein, 8 aa, Artificial Sequence
  Synthetic construct
GGTFSTYA

SEQ ID NO: 12044 - protein, 8 aa, Artificial Sequence
  Synthetic construct
GFTFTGYA

SEQ ID NO: 12045 - protein, 8 aa, Artificial Sequence
  Synthetic construct
GYTFTTYA

SEQ ID NO: 12046 - protein, 8 aa, Artificial Sequence
  Synthetic construct
GFSFSNYN

SEQ ID NO: 12047 - protein, 8 aa, Artificial Sequence
  Synthetic construct
GFTFSNSA

SEQ ID NO: 12048 - protein, 8 aa, Artificial Sequence
  Synthetic construct
GFTFSSYD

SEQ ID NO: 12049 - protein, 8 aa, Artificial Sequence
  Synthetic construct
GFNFRSYA

SEQ ID NO: 12050 - protein, 10 aa, Artificial Sequence
  Synthetic construct
GGSVNFGSYY

SEQ ID NO: 12051 - protein, 8 aa, Artificial Sequence
  Synthetic construct
GGSISRNY

SEQ ID NO: 12052 - protein, 8 aa, Artificial Sequence
  Synthetic construct
GITLKDYG

SEQ ID NO: 12053 - protein, 8 aa, Artificial Sequence
  Synthetic construct
GFTFSSYY

SEQ ID NO: 12054 - protein, 8 aa, Artificial Sequence
  Synthetic construct
GFTFSSHN

SEQ ID NO: 12055 - protein, 8 aa, Artificial Sequence
  Synthetic construct
EFTLSNYW

SEQ ID NO: 12056 - protein, 8 aa, Artificial Sequence
  Synthetic construct
GYTFTRYG

SEQ ID NO: 12057 - protein, 10 aa, Artificial Sequence
  Synthetic construct
GGSISGSSYY

SEQ ID NO: 12058 - protein, 8 aa, Artificial Sequence
  Synthetic construct
GFTFNIYG

SEQ ID NO: 12059 - protein, 8 aa, Artificial Sequence
  Synthetic construct
GYTFNRYG

SEQ ID NO: 12060 - protein, 8 aa, Artificial Sequence
  Synthetic construct
GYTLTELS

SEQ ID NO: 12061 - protein, 10 aa, Artificial Sequence
  Synthetic construct
GGSISSSTYY

SEQ ID NO: 12062 - protein, 8 aa, Artificial Sequence
  Synthetic construct
GGSFSGYY

SEQ ID NO: 12063 - protein, 8 aa, Artificial Sequence
  Synthetic construct
GGTFGTYA

SEQ ID NO: 12064 - protein, 8 aa, Artificial Sequence
  Synthetic construct
GFTVSSNY

SEQ ID NO: 12065 - protein, 8 aa, Artificial Sequence
  Synthetic construct
GYTLTELP

SEQ ID NO: 12066 - protein, 8 aa, Artificial Sequence
  Synthetic construct
GFTFSSYG

SEQ ID NO: 12067 - protein, 10 aa, Artificial Sequence
  Synthetic construct
GFSLRSSGVG

SEQ ID NO: 12068 - protein, 10 aa, Artificial Sequence
  Synthetic construct
GGSISSSSYY

SEQ ID NO: 12069 - protein, 10 aa, Artificial Sequence
  Synthetic construct
GVSLSTSGVN

SEQ ID NO: 12070 - protein, 8 aa, Artificial Sequence
  Synthetic construct
GFIFRTYA

SEQ ID NO: 12071 - protein, 10 aa, Artificial Sequence
  Synthetic construct
GGSINSSDYQ

SEQ ID NO: 12072 - protein, 8 aa, Artificial Sequence
  Synthetic construct
GGSMSGYY

SEQ ID NO: 12073 - protein, 8 aa, Artificial Sequence
  Synthetic construct
GFTFNNFA

SEQ ID NO: 12074 - protein, 10 aa, Artificial Sequence
  Synthetic construct
GFSLYTSGLG

SEQ ID NO: 12075 - protein, 8 aa, Artificial Sequence
  Synthetic construct
GGTFNKYA

SEQ ID NO: 12076 - protein, 8 aa, Artificial Sequence
  Synthetic construct
GFTFSDYW

SEQ ID NO: 12077 - protein, 8 aa, Artificial Sequence
  Synthetic construct
GGSLSGHF

SEQ ID NO: 12078 - protein, 10 aa, Artificial Sequence
  Synthetic construct
GGSISSSSYY

SEQ ID NO: 12079 - protein, 8 aa, Artificial Sequence
  Synthetic construct
GFTVSSNY

SEQ ID NO: 12080 - protein, 8 aa, Artificial Sequence
  Synthetic construct
GYTFTTYA

SEQ ID NO: 12081 - protein, 8 aa, Artificial Sequence
  Synthetic construct
GGSISNYY

SEQ ID NO: 12082 - protein, 8 aa, Artificial Sequence
  Synthetic construct
GFTFSSYS

SEQ ID NO: 12083 - protein, 10 aa, Artificial Sequence
  Synthetic construct
GGSINSEGYH

SEQ ID NO: 12084 - protein, 8 aa, Artificial Sequence
  Synthetic construct
GFTFSNYW

SEQ ID NO: 12085 - protein, 10 aa, Artificial Sequence
  Synthetic construct
GGSISSSSYY

SEQ ID NO: 12086 - protein, 8 aa, Artificial Sequence
  Synthetic construct
GGSFSGYF

SEQ ID NO: 12087 - protein, 10 aa, Artificial Sequence
  Synthetic construct
GFSLNTSGVG

SEQ ID NO: 12088 - protein, 8 aa, Artificial Sequence
  Synthetic construct
GFTFSSYA

SEQ ID NO: 12089 - protein, 8 aa, Artificial Sequence
  Synthetic construct
GFSFDDYA

SEQ ID NO: 12090 - protein, 8 aa, Artificial Sequence
  Synthetic construct
GYTFTDYG

SEQ ID NO: 12091 - protein, 8 aa, Artificial Sequence
  Synthetic construct
GYSFTSFW

SEQ ID NO: 12092 - protein, 9 aa, Artificial Sequence
  Synthetic construct
GGSITSTNW

SEQ ID NO: 12093 - protein, 8 aa, Artificial Sequence
  Synthetic construct
GYTLSEFS

SEQ ID NO: 12094 - protein, 10 aa, Artificial Sequence
  Synthetic construct
GGSISTGSYY

SEQ ID NO: 12095 - protein, 9 aa, Artificial Sequence
  Synthetic construct
GASISNNNW

SEQ ID NO: 12096 - protein, 10 aa, Artificial Sequence
  Synthetic construct
GGSISSSSYY

SEQ ID NO: 12097 - protein, 10 aa, Artificial Sequence
  Synthetic construct
GGSISSGSYY

SEQ ID NO: 12098 - protein, 10 aa, Artificial Sequence
  Synthetic construct
GGSISSNNYY

SEQ ID NO: 12099 - protein, 10 aa, Artificial Sequence
  Synthetic construct
GGSINNTSYF

SEQ ID NO: 12100 - protein, 8 aa, Artificial Sequence
  Synthetic construct
GFPLSDYY

SEQ ID NO: 12101 - protein, 8 aa, Artificial Sequence
  Synthetic construct
GVSLNTRY

SEQ ID NO: 12102 - protein, 8 aa, Artificial Sequence
  Synthetic construct
GGTFSSYT

SEQ ID NO: 12103 - protein, 8 aa, Artificial Sequence
  Synthetic construct
GFTFSTYV

SEQ ID NO: 12104 - protein, 8 aa, Artificial Sequence
  Synthetic construct
GFTFDDCA

SEQ ID NO: 12105 - protein, 8 aa, Artificial Sequence
  Synthetic construct
GFSFSSYF

SEQ ID NO: 12106 - protein, 8 aa, Artificial Sequence
  Synthetic construct
GFTFSSYA

SEQ ID NO: 12107 - protein, 8 aa, Artificial Sequence
  Synthetic construct
GGSFSGYY

SEQ ID NO: 12108 - protein, 8 aa, Artificial Sequence
  Synthetic construct
GGTFSSDA

SEQ ID NO: 12109 - protein, 8 aa, Artificial Sequence
  Synthetic construct
GFTFSSYS

SEQ ID NO: 12110 - protein, 8 aa, Artificial Sequence
  Synthetic construct
GGSINYYY

SEQ ID NO: 12111 - protein, 10 aa, Artificial Sequence
  Synthetic construct
GGSISSGSYY

SEQ ID NO: 12112 - protein, 8 aa, Artificial Sequence
  Synthetic construct
GGSISSYY

SEQ ID NO: 12113 - protein, 8 aa, Artificial Sequence
  Synthetic construct
GFTFSSFW

SEQ ID NO: 12114 - protein, 9 aa, Artificial Sequence
  Synthetic construct
GGSISSSNW

SEQ ID NO: 12115 - protein, 8 aa, Artificial Sequence
  Synthetic construct
GFTFNNYA

SEQ ID NO: 12116 - protein, 8 aa, Artificial Sequence
  Synthetic construct
GYSFAYYW

SEQ ID NO: 12117 - protein, 8 aa, Artificial Sequence
  Synthetic construct
GYTFTSYT

SEQ ID NO: 12118 - protein, 10 aa, Artificial Sequence
  Synthetic construct
GGSITSGNYY

SEQ ID NO: 12119 - protein, 8 aa, Artificial Sequence
  Synthetic construct
GFTFSDYG

SEQ ID NO: 12120 - protein, 10 aa, Artificial Sequence
  Synthetic construct
GFSLSTTGMC

SEQ ID NO: 12121 - protein, 10 aa, Artificial Sequence
  Synthetic construct
GFSLTTKAVT

SEQ ID NO: 12122 - protein, 8 aa, Artificial Sequence
  Synthetic construct
GFTFSSYG

SEQ ID NO: 12123 - protein, 8 aa, Artificial Sequence
  Synthetic construct
GFTFSSYA

SEQ ID NO: 12124 - protein, 8 aa, Artificial Sequence
  Synthetic construct
GYTFTGYG

SEQ ID NO: 12125 - protein, 8 aa, Artificial Sequence
  Synthetic construct
GFTFSVYA

SEQ ID NO: 12126 - protein, 8 aa, Artificial Sequence
  Synthetic construct
GYSFTDYA

SEQ ID NO: 12127 - protein, 8 aa, Artificial Sequence
  Synthetic construct
GFTFINYN

SEQ ID NO: 12128 - protein, 8 aa, Artificial Sequence
  Synthetic construct
GGTLSSYA

SEQ ID NO: 12129 - protein, 8 aa, Artificial Sequence
  Synthetic construct
GFTFSSYA

SEQ ID NO: 12130 - protein, 8 aa, Artificial Sequence
  Synthetic construct
GFAFADAG

SEQ ID NO: 12131 - protein, 10 aa, Artificial Sequence
  Synthetic construct
GGSIISSSYY

SEQ ID NO: 12132 - protein, 10 aa, Artificial Sequence
  Synthetic construct
EFSLSTSGVG

SEQ ID NO: 12133 - protein, 8 aa, Artificial Sequence
  Synthetic construct
GFTFSSYS

SEQ ID NO: 12134 - protein, 8 aa, Artificial Sequence
  Synthetic construct
GFSFSNYA

SEQ ID NO: 12135 - protein, 8 aa, Artificial Sequence
  Synthetic construct
GFTFSTYA

SEQ ID NO: 12136 - protein, 8 aa, Artificial Sequence
  Synthetic construct
GFTFSSYA

SEQ ID NO: 12137 - protein, 8 aa, Artificial Sequence
  Synthetic construct
GLTFSNVW

SEQ ID NO: 12138 - protein, 8 aa, Artificial Sequence
  Synthetic construct
GFTFSSYA

SEQ ID NO: 12139 - protein, 8 aa, Artificial Sequence
  Synthetic construct
GFTFSSYA

SEQ ID NO: 12140 - protein, 8 aa, Artificial Sequence
  Synthetic construct
GVTVSSNY

SEQ ID NO: 12141 - protein, 8 aa, Artificial Sequence
  Synthetic construct
GFTFSSYS

SEQ ID NO: 12142 - protein, 8 aa, Artificial Sequence
  Synthetic construct
GYSFTSYW

SEQ ID NO: 12143 - protein, 8 aa, Artificial Sequence
  Synthetic construct
GFIFRTYA

SEQ ID NO: 12144 - protein, 8 aa, Artificial Sequence
  Synthetic construct
GYTFTSNW

SEQ ID NO: 12145 - protein, 8 aa, Artificial Sequence
  Synthetic construct
GYAFSDHW

SEQ ID NO: 12146 - protein, 8 aa, Artificial Sequence
  Synthetic construct
GYTFSSYA

SEQ ID NO: 12147 - protein, 8 aa, Artificial Sequence
  Synthetic construct
GDSIRTYY

SEQ ID NO: 12148 - protein, 8 aa, Artificial Sequence
  Synthetic construct
GFTFSNFG

SEQ ID NO: 12149 - protein, 8 aa, Artificial Sequence
  Synthetic construct
GYTFRTYS

SEQ ID NO: 12150 - protein, 8 aa, Artificial Sequence
  Synthetic construct
GFTFSRYA

SEQ ID NO: 12151 - protein, 8 aa, Artificial Sequence
  Synthetic construct
GFTFSRYW

SEQ ID NO: 12152 - protein, 3 aa, Artificial Sequence
  Synthetic construct
  MISC_FEATURE (1)..(3): X can be any amino acid
XXX

SEQ ID NO: 12153 - protein, 10 aa, Artificial Sequence
  Synthetic construct
GGSISSGSYY

SEQ ID NO: 12154 - protein, 8 aa, Artificial Sequence
  Synthetic construct
GISFTNAW

SEQ ID NO: 12155 - protein, 8 aa, Artificial Sequence
  Synthetic construct
GYTFTSYG

SEQ ID NO: 12156 - protein, 8 aa, Artificial Sequence
  Synthetic construct
GFTFPTFW

SEQ ID NO: 12157 - protein, 8 aa, Artificial Sequence
  Synthetic construct
GFTFSSYN

SEQ ID NO: 12158 - protein, 9 aa, Artificial Sequence
  Synthetic construct
GGSISSSNW

SEQ ID NO: 12159 - protein, 8 aa, Artificial Sequence
  Synthetic construct
GFTFSSYA

SEQ ID NO: 12160 - protein, 8 aa, Artificial Sequence
  Synthetic construct
GGSFSGYY

SEQ ID NO: 12161 - protein, 10 aa, Artificial Sequence
  Synthetic construct
GTSIRSSSYY

SEQ ID NO: 12162 - protein, 8 aa, Artificial Sequence
  Synthetic construct
GGSISTYW

SEQ ID NO: 12163 - protein, 8 aa, Artificial Sequence
  Synthetic construct
GFTFSSYA

SEQ ID NO: 12164 - protein, 8 aa, Artificial Sequence
  Synthetic construct
EFTFITYA

SEQ ID NO: 12165 - protein, 8 aa, Artificial Sequence
  Synthetic construct
GFTFDDYA

SEQ ID NO: 12166 - protein, 10 aa, Artificial Sequence
  Synthetic construct
GGSISSYNYY

SEQ ID NO: 12167 - protein, 8 aa, Artificial Sequence
  Synthetic construct
GFTFDSFV

SEQ ID NO: 12168 - protein, 8 aa, Artificial Sequence
  Synthetic construct
GGSFNDDY

SEQ ID NO: 12169 - protein, 8 aa, Artificial Sequence
  Synthetic construct
GYSFTSYW

SEQ ID NO: 12170 - protein, 8 aa, Artificial Sequence
  Synthetic construct
GFSFSDYY

SEQ ID NO: 12171 - protein, 8 aa, Artificial Sequence
  Synthetic construct
GGSFSGYY

SEQ ID NO: 12172 - protein, 8 aa, Artificial Sequence
  Synthetic construct
GYMFTSYG

SEQ ID NO: 12173 - protein, 8 aa, Artificial Sequence
  Synthetic construct
GFTFSNYG

SEQ ID NO: 12174 - protein, 10 aa, Artificial Sequence
  Synthetic construct
GGSISTDTYY

SEQ ID NO: 12175 - protein, 8 aa, Artificial Sequence
  Synthetic construct
GFTFSSYG

SEQ ID NO: 12176 - protein, 8 aa, Artificial Sequence
  Synthetic construct
GFTFSSYV

SEQ ID NO: 12177 - protein, 8 aa, Artificial Sequence
  Synthetic construct
GGSISSYS

SEQ ID NO: 12178 - protein, 8 aa, Artificial Sequence
  Synthetic construct
GFTFNSYS

SEQ ID NO: 12179 - protein, 8 aa, Artificial Sequence
  Synthetic construct
GYTFTDSY

SEQ ID NO: 12180 - protein, 8 aa, Artificial Sequence
  Synthetic construct
GFTFNNHW

SEQ ID NO: 12181 - protein, 10 aa, Artificial Sequence
  Synthetic construct
GGSISISDYY

SEQ ID NO: 12182 - protein, 8 aa, Artificial Sequence
  Synthetic construct
GFTFSNYA

SEQ ID NO: 12183 - protein, 8 aa, Artificial Sequence
  Synthetic construct
GYTFTSYD

SEQ ID NO: 12184 - protein, 10 aa, Artificial Sequence
  Synthetic construct
GGSISSSTYY

SEQ ID NO: 12185 - protein, 10 aa, Artificial Sequence
  Synthetic construct
GGSISRNNFY

SEQ ID NO: 12186 - protein, 10 aa, Artificial Sequence
  Synthetic construct
GGSISSNSYY

SEQ ID NO: 12187 - protein, 8 aa, Artificial Sequence
  Synthetic construct
GFTFSSSW

SEQ ID NO: 12188 - protein, 10 aa, Artificial Sequence
  Synthetic construct
GGSISSGSYY

SEQ ID NO: 12189 - protein, 8 aa, Artificial Sequence
  Synthetic construct
GFTFSSYA

SEQ ID NO: 12190 - protein, 8 aa, Artificial Sequence
  Synthetic construct
GFTFNSYG

SEQ ID NO: 12191 - protein, 10 aa, Artificial Sequence
  Synthetic construct
GGSISTSGYY

SEQ ID NO: 12192 - protein, 8 aa, Artificial Sequence
  Synthetic construct
GYTFTSYA

SEQ ID NO: 12193 - protein, 8 aa, Artificial Sequence
  Synthetic construct
GFTFSSHW

SEQ ID NO: 12194 - protein, 8 aa, Artificial Sequence
  Synthetic construct
GFTFSSFG

SEQ ID NO: 12195 - protein, 8 aa, Artificial Sequence
  Synthetic construct
GFTFTRSA

SEQ ID NO: 12196 - protein, 8 aa, Artificial Sequence
  Synthetic construct
GGSISSYY

SEQ ID NO: 12197 - protein, 8 aa, Artificial Sequence
  Synthetic construct
GFTFNSYA

SEQ ID NO: 12198 - protein, 8 aa, Artificial Sequence
  Synthetic construct
GGSISSYY

SEQ ID NO: 12199 - protein, 8 aa, Artificial Sequence
  Synthetic construct
GFTFSSYV

SEQ ID NO: 12200 - protein, 8 aa, Artificial Sequence
  Synthetic construct
GLRFSTYD

SEQ ID NO: 12201 - protein, 10 aa, Artificial Sequence
  Synthetic construct
GGSISSSSDY

SEQ ID NO: 12202 - protein, 8 aa, Artificial Sequence
  Synthetic construct
GFIVSNNY

SEQ ID NO: 12203 - protein, 8 aa, Artificial Sequence
  Synthetic construct
GFTFEDFA

SEQ ID NO: 12204 - protein, 8 aa, Artificial Sequence
  Synthetic construct
GFSFSSYW

SEQ ID NO: 12205 - protein, 8 aa, Artificial Sequence
  Synthetic construct
GGTFSSYS

SEQ ID NO: 12206 - protein, 8 aa, Artificial Sequence
  Synthetic construct
GGSFSGYY

SEQ ID NO: 12207 - protein, 8 aa, Artificial Sequence
  Synthetic construct
GFTFSSYA

SEQ ID NO: 12208 - protein, 8 aa, Artificial Sequence
  Synthetic construct
GFTFADAW

SEQ ID NO: 12209 - protein, 8 aa, Artificial Sequence
  Synthetic construct
GFTFNTYT

SEQ ID NO: 12210 - protein, 8 aa, Artificial Sequence
  Synthetic construct
GGSISSYY

SEQ ID NO: 12211 - protein, 8 aa, Artificial Sequence
  Synthetic construct
GGTFSSYA

SEQ ID NO: 12212 - protein, 8 aa, Artificial Sequence
  Synthetic construct
GGTFSSYV

SEQ ID NO: 12213 - protein, 10 aa, Artificial Sequence
  Synthetic construct
GGSISSGSYY

SEQ ID NO: 12214 - protein, 10 aa, Artificial Sequence
  Synthetic construct
GGSISSSSYY

SEQ ID NO: 12215 - protein, 8 aa, Artificial Sequence
  Synthetic construct
GFTFSDFA

SEQ ID NO: 12216 - protein, 8 aa, Artificial Sequence
  Synthetic construct
GFTFSNYP

SEQ ID NO: 12217 - protein, 10 aa, Artificial Sequence
  Synthetic construct
GGSISSSSSY

SEQ ID NO: 12218 - protein, 8 aa, Artificial Sequence
  Synthetic construct
GYTLTELS

SEQ ID NO: 12219 - protein, 8 aa, Artificial Sequence
  Synthetic construct
GFSFSDYY

SEQ ID NO: 12220 - protein, 10 aa, Artificial Sequence
  Synthetic construct
GGSISGSSYY

SEQ ID NO: 12221 - protein, 8 aa, Artificial Sequence
  Synthetic construct
GFTFSKYA

SEQ ID NO: 12222 - protein, 8 aa, Artificial Sequence
  Synthetic construct
GGTFSSYA

SEQ ID NO: 12223 - protein, 8 aa, Artificial Sequence
  Synthetic construct
GYTFTTYA

SEQ ID NO: 12224 - protein, 8 aa, Artificial Sequence
  Synthetic construct
GYTFSRYA

SEQ ID NO: 12225 - protein, 8 aa, Artificial Sequence
  Synthetic construct
GFTFGDYA

SEQ ID NO: 12226 - protein, 8 aa, Artificial Sequence
  Synthetic construct
GFTFNKYG

SEQ ID NO: 12227 - protein, 8 aa, Artificial Sequence
  Synthetic construct
GFTFEDFA

SEQ ID NO: 12228 - protein, 8 aa, Artificial Sequence
  Synthetic construct
GFTFSSYA

SEQ ID NO: 12229 - protein, 8 aa, Artificial Sequence
  Synthetic construct
GFRFNTHG

SEQ ID NO: 12230 - protein, 8 aa, Artificial Sequence
  Synthetic construct
GFTFSTYA

SEQ ID NO: 12231 - protein, 8 aa, Artificial Sequence
  Synthetic construct
GGSISSYY

SEQ ID NO: 12232 - protein, 8 aa, Artificial Sequence
  Synthetic construct
GGNFKTYS

SEQ ID NO: 12233 - protein, 8 aa, Artificial Sequence
  Synthetic construct
GIVVNANY

SEQ ID NO: 12234 - protein, 8 aa, Artificial Sequence
  Synthetic construct
GYTFSNYG

SEQ ID NO: 12235 - protein, 8 aa, Artificial Sequence
  Synthetic construct
GFTFSSYS

SEQ ID NO: 12236 - protein, 8 aa, Artificial Sequence
  Synthetic construct
GISLKDYG

SEQ ID NO: 12237 - protein, 8 aa, Artificial Sequence
  Synthetic construct
GFTLSDYY

SEQ ID NO: 12238 - protein, 8 aa, Artificial Sequence
  Synthetic construct
GFSVGSNY

SEQ ID NO: 12239 - protein, 8 aa, Artificial Sequence
  Synthetic construct
GASVTSYY

SEQ ID NO: 12240 - protein, 8 aa, Artificial Sequence
  Synthetic construct
GYTFTSNW

SEQ ID NO: 12241 - protein, 8 aa, Artificial Sequence
  Synthetic construct
GYTFTSYY

SEQ ID NO: 12242 - protein, 10 aa, Artificial Sequence
  Synthetic construct
GASISIITYY

SEQ ID NO: 12243 - protein, 8 aa, Artificial Sequence
  Synthetic construct
GGTFSSYA

SEQ ID NO: 12244 - protein, 9 aa, Artificial Sequence
  Synthetic construct
GYSINSGYY

SEQ ID NO: 12245 - protein, 8 aa, Artificial Sequence
  Synthetic construct
GYTFTSYG

SEQ ID NO: 12246 - protein, 8 aa, Artificial Sequence
  Synthetic construct
GFTFGTYW

SEQ ID NO: 12247 - protein, 8 aa, Artificial Sequence
  Synthetic construct
GFTFSSYS

SEQ ID NO: 12248 - protein, 10 aa, Artificial Sequence
  Synthetic construct
GFSLSTSGVG

SEQ ID NO: 12249 - protein, 8 aa, Artificial Sequence
  Synthetic construct
GGSISSYS

SEQ ID NO: 12250 - protein, 8 aa, Artificial Sequence
  Synthetic construct
ASTFSGYA

SEQ ID NO: 12251 - protein, 10 aa, Artificial Sequence
  Synthetic construct
GGSISTSIYY

SEQ ID NO: 12252 - protein, 10 aa, Artificial Sequence
  Synthetic construct
GASITSDTIY

SEQ ID NO: 12253 - protein, 8 aa, Artificial Sequence
  Synthetic construct
GFTFNKYG

SEQ ID NO: 12254 - protein, 8 aa, Artificial Sequence
  Synthetic construct
GFTFSTYA

SEQ ID NO: 12255 - protein, 8 aa, Artificial Sequence
  Synthetic construct
GFTFSTYA

SEQ ID NO: 12256 - protein, 8 aa, Artificial Sequence
  Synthetic construct
GFTFRSYA

SEQ ID NO: 12257 - protein, 10 aa, Artificial Sequence
  Synthetic construct
DDSITTTGYF

SEQ ID NO: 12258 - protein, 10 aa, Artificial Sequence
  Synthetic construct
GGSISSGDYY

SEQ ID NO: 12259 - protein, 8 aa, Artificial Sequence
  Synthetic construct
GYSFTNHG

SEQ ID NO: 12260 - protein, 10 aa, Artificial Sequence
  Synthetic construct
GFSLSTSGVG

SEQ ID NO: 12261 - protein, 8 aa, Artificial Sequence
  Synthetic construct
GFSFSNFA

SEQ ID NO: 12262 - protein, 8 aa, Artificial Sequence
  Synthetic construct
GGSISSHY

SEQ ID NO: 12263 - protein, 8 aa, Artificial Sequence
  Synthetic construct
EITFSSYW

SEQ ID NO: 12264 - protein, 8 aa, Artificial Sequence
  Synthetic construct
GLTVSTNH

SEQ ID NO: 12265 - protein, 8 aa, Artificial Sequence
  Synthetic construct
GFTLSSHS

SEQ ID NO: 12266 - protein, 10 aa, Artificial Sequence
  Synthetic construct
GDSVGSKCCF

SEQ ID NO: 12267 - protein, 8 aa, Artificial Sequence
  Synthetic construct
GFTFSSFA

SEQ ID NO: 12268 - protein, 8 aa, Artificial Sequence
  Synthetic construct
GYTFTNYA

SEQ ID NO: 12269 - protein, 8 aa, Artificial Sequence
  Synthetic construct
GLIVSSNY

SEQ ID NO: 12270 - protein, 8 aa, Artificial Sequence
  Synthetic construct
GFTFSSHA

SEQ ID NO: 12271 - protein, 10 aa, Artificial Sequence
  Synthetic construct
GFSLDTIGVA

SEQ ID NO: 12272 - protein, 8 aa, Artificial Sequence
  Synthetic construct
GGTFSSYA

SEQ ID NO: 12273 - protein, 10 aa, Artificial Sequence
  Synthetic construct
GVSISSSSSF

SEQ ID NO: 12274 - protein, 8 aa, Artificial Sequence
  Synthetic construct
GFTFSNYG

SEQ ID NO: 12275 - protein, 8 aa, Artificial Sequence
  Synthetic construct
VFTLSNYG

SEQ ID NO: 12276 - protein, 8 aa, Artificial Sequence
  Synthetic construct
GFTFSVYW

SEQ ID NO: 12277 - protein, 8 aa, Artificial Sequence
  Synthetic construct
GGSISSYY

SEQ ID NO: 12278 - protein, 8 aa, Artificial Sequence
  Synthetic construct
GFTFSSYG

SEQ ID NO: 12279 - protein, 8 aa, Artificial Sequence
  Synthetic construct
GFTFSSYA

SEQ ID NO: 12280 - protein, 8 aa, Artificial Sequence
  Synthetic construct
GFTFSSYA

SEQ ID NO: 12281 - protein, 8 aa, Artificial Sequence
  Synthetic construct
GFTFSSYS

SEQ ID NO: 12282 - protein, 8 aa, Artificial Sequence
  Synthetic construct
GFTFSDYY

SEQ ID NO: 12283 - protein, 8 aa, Artificial Sequence
  Synthetic construct
GFTFSNYI

SEQ ID NO: 12284 - protein, 8 aa, Artificial Sequence
  Synthetic construct
GGSFSGYY

SEQ ID NO: 12285 - protein, 8 aa, Artificial Sequence
  Synthetic construct
RFTFSSYA

SEQ ID NO: 12286 - protein, 8 aa, Artificial Sequence
  Synthetic construct
GFNFSKYD

SEQ ID NO: 12287 - protein, 10 aa, Artificial Sequence
  Synthetic construct
GGSISGSSYY

SEQ ID NO: 12288 - protein, 8 aa, Artificial Sequence
  Synthetic construct
GFTFSSYA

SEQ ID NO: 12289 - protein, 8 aa, Artificial Sequence
  Synthetic construct
GYTFTNYW

SEQ ID NO: 12290 - protein, 8 aa, Artificial Sequence
  Synthetic construct
GITFKDYG

SEQ ID NO: 12291 - protein, 8 aa, Artificial Sequence
  Synthetic construct
GYSFTSYA

SEQ ID NO: 12292 - protein, 8 aa, Artificial Sequence
  Synthetic construct
GDTLSSYA

SEQ ID NO: 12293 - protein, 8 aa, Artificial Sequence
  Synthetic construct
GYSITNYW

SEQ ID NO: 12294 - protein, 9 aa, Artificial Sequence
  Synthetic construct
GGSISNNNW

SEQ ID NO: 12295 - protein, 8 aa, Artificial Sequence
  Synthetic construct
GFTFSSYG

SEQ ID NO: 12296 - protein, 8 aa, Artificial Sequence
  Synthetic construct
GYTFTNYP

SEQ ID NO: 12297 - protein, 8 aa, Artificial Sequence
  Synthetic construct
GFTVSYSY

SEQ ID NO: 12298 - protein, 8 aa, Artificial Sequence
  Synthetic construct
GFTFSTYG

SEQ ID NO: 12299 - protein, 8 aa, Artificial Sequence
  Synthetic construct
GFTVSNSY

SEQ ID NO: 12300 - protein, 8 aa, Artificial Sequence
  Synthetic construct
GFTFSSYT

SEQ ID NO: 12301 - protein, 8 aa, Artificial Sequence
  Synthetic construct
GFTFDDYA

SEQ ID NO: 12302 - protein, 8 aa, Artificial Sequence
  Synthetic construct
GYTFTSNW

SEQ ID NO: 12303 - protein, 10 aa, Artificial Sequence
  Synthetic construct
GGSISSSGYY

SEQ ID NO: 12304 - protein, 8 aa, Artificial Sequence
  Synthetic construct
GFTFSTYA

SEQ ID NO: 12305 - protein, 8 aa, Artificial Sequence
  Synthetic construct
GLTFNSYA

SEQ ID NO: 12306 - protein, 8 aa, Artificial Sequence
  Synthetic construct
GGTFSSYA

SEQ ID NO: 12307 - protein, 8 aa, Artificial Sequence
  Synthetic construct
GFDFGQSW

SEQ ID NO: 12308 - protein, 8 aa, Artificial Sequence
  Synthetic construct
GFTFSSYT

SEQ ID NO: 12309 - protein, 10 aa, Artificial Sequence
  Synthetic construct
GGSFSSSNYY

SEQ ID NO: 12310 - protein, 10 aa, Artificial Sequence
  Synthetic construct
GFSFTTGGEG

SEQ ID NO: 12311 - protein, 8 aa, Artificial Sequence
  Synthetic construct
GGSFSDHY

SEQ ID NO: 12312 - protein, 8 aa, Artificial Sequence
  Synthetic construct
GFTFSAYA

SEQ ID NO: 12313 - protein, 8 aa, Artificial Sequence
  Synthetic construct
GYTFTNYP

SEQ ID NO: 12314 - protein, 10 aa, Artificial Sequence
  Synthetic construct
GDSVSSNSAA

SEQ ID NO: 12315 - protein, 8 aa, Artificial Sequence
  Synthetic construct
GGTFSSYA

SEQ ID NO: 12316 - protein, 8 aa, Artificial Sequence
  Synthetic construct
GYTLPELS

SEQ ID NO: 12317 - protein, 8 aa, Artificial Sequence
  Synthetic construct
GFIVSNNY

SEQ ID NO: 12318 - protein, 8 aa, Artificial Sequence
  Synthetic construct
GFTFSIYG

SEQ ID NO: 12319 - protein, 8 aa, Artificial Sequence
  Synthetic construct
GYTFTDYA

SEQ ID NO: 12320 - protein, 9 aa, Artificial Sequence
  Synthetic construct
GGSISSSNW

SEQ ID NO: 12321 - protein, 8 aa, Artificial Sequence
  Synthetic construct
GFTFSSYA

SEQ ID NO: 12322 - protein, 8 aa, Artificial Sequence
  Synthetic construct
GYTFTNYY

SEQ ID NO: 12323 - protein, 8 aa, Artificial Sequence
  Synthetic construct
GYTFTSYV

SEQ ID NO: 12324 - protein, 8 aa, Artificial Sequence
  Synthetic construct
GFTFSNYA

SEQ ID NO: 12325 - protein, 10 aa, Artificial Sequence
  Synthetic construct
GGSISSDSAY

SEQ ID NO: 12326 - protein, 8 aa, Artificial Sequence
  Synthetic construct
GYTFTNYY

SEQ ID NO: 12327 - protein, 8 aa, Artificial Sequence
  Synthetic construct
GGTFSSFG

SEQ ID NO: 12328 - protein, 8 aa, Artificial Sequence
  Synthetic construct
GFTFSSYG

SEQ ID NO: 12329 - protein, 8 aa, Artificial Sequence
  Synthetic construct
GYTFNRFG

SEQ ID NO: 12330 - protein, 8 aa, Artificial Sequence
  Synthetic construct
GYTFTRYA

SEQ ID NO: 12331 - protein, 10 aa, Artificial Sequence
  Synthetic construct
GGSISSKNYY

SEQ ID NO: 12332 - protein, 8 aa, Artificial Sequence
  Synthetic construct
EYNFTNYW

SEQ ID NO: 12333 - protein, 8 aa, Artificial Sequence
  Synthetic construct
GFTLSSYW

SEQ ID NO: 12334 - protein, 10 aa, Artificial Sequence
  Synthetic construct
NFSLNTSGVG

SEQ ID NO: 12335 - protein, 9 aa, Artificial Sequence
  Synthetic construct
GYSISSGYF

SEQ ID NO: 12336 - protein, 8 aa, Artificial Sequence
  Synthetic construct
GYNFSTYW

SEQ ID NO: 12337 - protein, 8 aa, Artificial Sequence
  Synthetic construct
GFTFSTYA

SEQ ID NO: 12338 - protein, 8 aa, Artificial Sequence
  Synthetic construct
GYTFTSYG

SEQ ID NO: 12339 - protein, 8 aa, Artificial Sequence
  Synthetic construct
GFTFSSYA

SEQ ID NO: 12340 - protein, 9 aa, Artificial Sequence
  Synthetic construct
GYSISRGYY

SEQ ID NO: 12341 - protein, 8 aa, Artificial Sequence
  Synthetic construct
GYTFNRYG

SEQ ID NO: 12342 - protein, 10 aa, Artificial Sequence
  Synthetic construct
GGSISSSNYY

SEQ ID NO: 12343 - protein, 8 aa, Artificial Sequence
  Synthetic construct
GFIFSTYS

SEQ ID NO: 12344 - protein, 8 aa, Artificial Sequence
  Synthetic construct
GGTFSSYA

SEQ ID NO: 12345 - protein, 8 aa, Artificial Sequence
  Synthetic construct
GYTFNSHA

SEQ ID NO: 12346 - protein, 8 aa, Artificial Sequence
  Synthetic construct
RYTFSTYA

SEQ ID NO: 12347 - protein, 8 aa, Artificial Sequence
  Synthetic construct
GFTFSSYS

SEQ ID NO: 12348 - protein, 8 aa, Artificial Sequence
  Synthetic construct
GGTFTSYA

SEQ ID NO: 12349 - protein, 8 aa, Artificial Sequence
  Synthetic construct
GFTFSGSA

SEQ ID NO: 12350 - protein, 8 aa, Artificial Sequence
  Synthetic construct
GFTFGTYN

SEQ ID NO: 12351 - protein, 8 aa, Artificial Sequence
  Synthetic construct
GYTFTNYY

SEQ ID NO: 12352 - protein, 8 aa, Artificial Sequence
  Synthetic construct
GFTFSSYG

SEQ ID NO: 12353 - protein, 8 aa, Artificial Sequence
  Synthetic construct
GFTFSDYY

SEQ ID NO: 12354 - protein, 8 aa, Artificial Sequence
  Synthetic construct
GGSFSGSQ

SEQ ID NO: 12355 - protein, 9 aa, Artificial Sequence
  Synthetic construct
GGSISSNNW

SEQ ID NO: 12356 - protein, 10 aa, Artificial Sequence
  Synthetic construct
DDSITTTSYF

SEQ ID NO: 12357 - protein, 8 aa, Artificial Sequence
  Synthetic construct
EFIVSTNL

SEQ ID NO: 12358 - protein, 8 aa, Artificial Sequence
  Synthetic construct
GYTFSSYY

SEQ ID NO: 12359 - protein, 10 aa, Artificial Sequence
  Synthetic construct
GGSVSSASYY

SEQ ID NO: 12360 - protein, 8 aa, Artificial Sequence
  Synthetic construct
GGTLSGYT

SEQ ID NO: 12361 - protein, 8 aa, Artificial Sequence
  Synthetic construct
GFIFSSYT

SEQ ID NO: 12362 - protein, 8 aa, Artificial Sequence
  Synthetic construct
GDSVSSYY

SEQ ID NO: 12363 - protein, 8 aa, Artificial Sequence
  Synthetic construct
GFTFSSYG

SEQ ID NO: 12364 - protein, 8 aa, Artificial Sequence
  Synthetic construct
GGSFSSHA

SEQ ID NO: 12365 - protein, 8 aa, Artificial Sequence
  Synthetic construct
GGSISSYY

SEQ ID NO: 12366 - protein, 8 aa, Artificial Sequence
  Synthetic construct
GYTFTSYA

SEQ ID NO: 12367 - protein, 8 aa, Artificial Sequence
  Synthetic construct
GGTFSSYS

SEQ ID NO: 12368 - protein, 8 aa, Artificial Sequence
  Synthetic construct
GYTFTNYV

SEQ ID NO: 12369 - protein, 8 aa, Artificial Sequence
  Synthetic construct
GFTFGSYS

SEQ ID NO: 12370 - protein, 8 aa, Artificial Sequence
  Synthetic construct
GYSFTNYA

SEQ ID NO: 12371 - protein, 8 aa, Artificial Sequence
  Synthetic construct
GFTFSSYS

SEQ ID NO: 12372 - protein, 8 aa, Artificial Sequence
  Synthetic construct
GYTLTELS

SEQ ID NO: 12373 - protein, 8 aa, Artificial Sequence
  Synthetic construct
GFTFSSYD

SEQ ID NO: 12374 - protein, 8 aa, Artificial Sequence
  Synthetic construct
GLTFSTYA

SEQ ID NO: 12375 - protein, 8 aa, Artificial Sequence
  Synthetic construct
GFIFSTYS

SEQ ID NO: 12376 - protein, 8 aa, Artificial Sequence
  Synthetic construct
GFTFNIYA

SEQ ID NO: 12377 - protein, 8 aa, Artificial Sequence
  Synthetic construct
GYTFSSYA

SEQ ID NO: 12378 - protein, 8 aa, Artificial Sequence
  Synthetic construct
GFTFEDFD

SEQ ID NO: 12379 - protein, 8 aa, Artificial Sequence
  Synthetic construct
GGSISSYY

SEQ ID NO: 12380 - protein, 8 aa, Artificial Sequence
  Synthetic construct
GFTFEDFD

SEQ ID NO: 12381 - protein, 10 aa, Artificial Sequence
  Synthetic construct
GFSLNTSGVG

SEQ ID NO: 12382 - protein, 8 aa, Artificial Sequence
  Synthetic construct
SGSISTYY

SEQ ID NO: 12383 - protein, 8 aa, Artificial Sequence
  Synthetic construct
GYTFTSYA

SEQ ID NO: 12384 - protein, 8 aa, Artificial Sequence
  Synthetic construct
GFTFSSYG

SEQ ID NO: 12385 - protein, 8 aa, Artificial Sequence
  Synthetic construct
GYTFTTYA

SEQ ID NO: 12386 - protein, 10 aa, Artificial Sequence
  Synthetic construct
GGSINSGDYY

SEQ ID NO: 12387 - protein, 8 aa, Artificial Sequence
  Synthetic construct
GFTFGDYA

SEQ ID NO: 12388 - protein, 8 aa, Artificial Sequence
  Synthetic construct
GFTFSMYD

SEQ ID NO: 12389 - protein, 8 aa, Artificial Sequence
  Synthetic construct
GYTFTSYA

SEQ ID NO: 12390 - protein, 8 aa, Artificial Sequence
  Synthetic construct
GYTFTSYA

SEQ ID NO: 12391 - protein, 8 aa, Artificial Sequence
  Synthetic construct
GFTFSSYS

SEQ ID NO: 12392 - protein, 8 aa, Artificial Sequence
  Synthetic construct
GLTFSAYA

SEQ ID NO: 12393 - protein, 8 aa, Artificial Sequence
  Synthetic construct
GFTFRSYW

SEQ ID NO: 12394 - protein, 8 aa, Artificial Sequence
  Synthetic construct
GFTFSSYG

SEQ ID NO: 12395 - protein, 10 aa, Artificial Sequence
  Synthetic construct
GGSVSSASYY

SEQ ID NO: 12396 - protein, 8 aa, Artificial Sequence
  Synthetic construct
GGSISSDY

SEQ ID NO: 12397 - protein, 8 aa, Artificial Sequence
  Synthetic construct
GYTFSNYP

SEQ ID NO: 12398 - protein, 8 aa, Artificial Sequence
  Synthetic construct
GYTFTIYA

SEQ ID NO: 12399 - protein, 8 aa, Artificial Sequence
  Synthetic construct
GFTFSSYG

SEQ ID NO: 12400 - protein, 8 aa, Artificial Sequence
  Synthetic construct
GFTFSNAW

SEQ ID NO: 12401 - protein, 10 aa, Artificial Sequence
  Synthetic construct
GFSLSTSGVA

SEQ ID NO: 12402 - protein, 8 aa, Artificial Sequence
  Synthetic construct
GFTFSSYA

SEQ ID NO: 12403 - protein, 10 aa, Artificial Sequence
  Synthetic construct
GGSISSGNYY

SEQ ID NO: 12404 - protein, 8 aa, Artificial Sequence
  Synthetic construct
GFTFSSYG

SEQ ID NO: 12405 - protein, 8 aa, Artificial Sequence
  Synthetic construct
GGSFSGYY

SEQ ID NO: 12406 - protein, 8 aa, Artificial Sequence
  Synthetic construct
GYTFTGYY

SEQ ID NO: 12407 - protein, 8 aa, Artificial Sequence
  Synthetic construct
GFRFSSYA

SEQ ID NO: 12408 - protein, 8 aa, Artificial Sequence
  Synthetic construct
GFTFNTYN

SEQ ID NO: 12409 - protein, 10 aa, Artificial Sequence
  Synthetic construct
DGSISSSTYY

SEQ ID NO: 12410 - protein, 8 aa, Artificial Sequence
  Synthetic construct
GFTFLSYA

SEQ ID NO: 12411 - protein, 8 aa, Artificial Sequence
  Synthetic construct
GYSFTNYW

SEQ ID NO: 12412 - protein, 8 aa, Artificial Sequence
  Synthetic construct
GGTFNNYA

SEQ ID NO: 12413 - protein, 8 aa, Artificial Sequence
  Synthetic construct
GYTFSNYV

SEQ ID NO: 12414 - protein, 8 aa, Artificial Sequence
  Synthetic construct
GFTFTSYA

SEQ ID NO: 12415 - protein, 8 aa, Artificial Sequence
  Synthetic construct
RFTFSNYA

SEQ ID NO: 12416 - protein, 8 aa, Artificial Sequence
  Synthetic construct
GYPFTSLY

SEQ ID NO: 12417 - protein, 8 aa, Artificial Sequence
  Synthetic construct
GFTFSSYA

SEQ ID NO: 12418 - protein, 8 aa, Artificial Sequence
  Synthetic construct
GYIFTTYG

SEQ ID NO: 12419 - protein, 8 aa, Artificial Sequence
  Synthetic construct
GYTFNSYA

SEQ ID NO: 12420 - protein, 8 aa, Artificial Sequence
  Synthetic construct
GFTFSSYG

SEQ ID NO: 12421 - protein, 10 aa, Artificial Sequence
  Synthetic construct
GDSISRTNYY

SEQ ID NO: 12422 - protein, 8 aa, Artificial Sequence
  Synthetic construct
GGSFGLYY

SEQ ID NO: 12423 - protein, 8 aa, Artificial Sequence
  Synthetic construct
GFTFSSYA

SEQ ID NO: 12424 - protein, 8 aa, Artificial Sequence
  Synthetic construct
GFTFSNYA

SEQ ID NO: 12425 - protein, 8 aa, Artificial Sequence
  Synthetic construct
GGSLTGYY

SEQ ID NO: 12426 - protein, 8 aa, Artificial Sequence
  Synthetic construct
INPSGGST

SEQ ID NO: 12427 - protein, 8 aa, Artificial Sequence
  Synthetic construct
IWFDGSNQ

SEQ ID NO: 12428 - protein, 8 aa, Artificial Sequence
  Synthetic construct
ISYDGTNK

SEQ ID NO: 12429 - protein, 7 aa, Artificial Sequence
  Synthetic construct
IYYSGIT

SEQ ID NO: 12430 - protein, 8 aa, Artificial Sequence
  Synthetic construct
IDPGDPYS

SEQ ID NO: 12431 - protein, 8 aa, Artificial Sequence
  Synthetic construct
MNPNSGHT

SEQ ID NO: 12432 - protein, 8 aa, Artificial Sequence
  Synthetic construct
INTNTGNP

SEQ ID NO: 12433 - protein, 8 aa, Artificial Sequence
  Synthetic construct
ISYDGSNE

SEQ ID NO: 12434 - protein, 8 aa, Artificial Sequence
  Synthetic construct
ISWNSGSI

SEQ ID NO: 12435 - protein, 7 aa, Artificial Sequence
  Synthetic construct
IFAGGST

SEQ ID NO: 12436 - protein, 7 aa, Artificial Sequence
  Synthetic construct
IFYSGST

SEQ ID NO: 12437 - protein, 8 aa, Artificial Sequence
  Synthetic construct
ISSSSTTV

SEQ ID NO: 12438 - protein, 8 aa, Artificial Sequence
  Synthetic construct
ISPYNGNT

SEQ ID NO: 12439 - protein, 8 aa, Artificial Sequence
  Synthetic construct
ISWDGDDT

SEQ ID NO: 12440 - protein, 8 aa, Artificial Sequence
  Synthetic construct
ISSSGSYM

SEQ ID NO: 12441 - protein, 7 aa, Artificial Sequence
  Synthetic construct
IYYSGST

SEQ ID NO: 12442 - protein, 7 aa, Artificial Sequence
  Synthetic construct
IYTSGST

SEQ ID NO: 12443 - protein, 8 aa, Artificial Sequence
  Synthetic construct
ISGYSGQT

SEQ ID NO: 12444 - protein, 8 aa, Artificial Sequence
  Synthetic construct
IKLDGSER

SEQ ID NO: 12445 - protein, 8 aa, Artificial Sequence
  Synthetic construct
ISYDGSNK

SEQ ID NO: 12446 - protein, 8 aa, Artificial Sequence
  Synthetic construct
ISAYNGNT

SEQ ID NO: 12447 - protein, 8 aa, Artificial Sequence
  Synthetic construct
ISYDGANK

SEQ ID NO: 12448 - protein, 8 aa, Artificial Sequence
  Synthetic construct
ISYDGYNK

SEQ ID NO: 12449 - protein, 8 aa, Artificial Sequence
  Synthetic construct
FDPEDGET

SEQ ID NO: 12450 - protein, 8 aa, Artificial Sequence
  Synthetic construct
ISAYNGST

SEQ ID NO: 12451 - protein, 8 aa, Artificial Sequence
  Synthetic construct
IWFDGSSK

SEQ ID NO: 12452 - protein, 8 aa, Artificial Sequence
  Synthetic construct
FDREDGER

SEQ ID NO: 12453 - protein, 10 aa, Artificial Sequence
  Synthetic construct
IKSKTDGGTT

SEQ ID NO: 12454 - protein, 7 aa, Artificial Sequence
  Synthetic construct
INHSGST

SEQ ID NO: 12455 - protein, 8 aa, Artificial Sequence
  Synthetic construct
IWSDGSNK

SEQ ID NO: 12456 - protein, 7 aa, Artificial Sequence
  Synthetic construct
INHSGST

SEQ ID NO: 12457 - protein, 8 aa, Artificial Sequence
  Synthetic construct
ISYDGSVQ

SEQ ID NO: 12458 - protein, 7 aa, Artificial Sequence
  Synthetic construct
VYISGST

SEQ ID NO: 12459 - protein, 7 aa, Artificial Sequence
  Synthetic construct
IYYSGST

SEQ ID NO: 12460 - protein, 8 aa, Artificial Sequence
  Synthetic construct
IIPFLGIA

SEQ ID NO: 12461 - protein, 8 aa, Artificial Sequence
  Synthetic construct
ISYDGSNK

SEQ ID NO: 12462 - protein, 7 aa, Artificial Sequence
  Synthetic construct
IYYSGST

SEQ ID NO: 12463 - protein, 7 aa, Artificial Sequence
  Synthetic construct
ISRNSDI

SEQ ID NO: 12464 - protein, 8 aa, Artificial Sequence
  Synthetic construct
ISSSSSSI

SEQ ID NO: 12465 - protein, 7 aa, Artificial Sequence
  Synthetic construct
IFYNGDT

SEQ ID NO: 12466 - protein, 8 aa, Artificial Sequence
  Synthetic construct
ISSSSSYI

SEQ ID NO: 12467 - protein, 8 aa, Artificial Sequence
  Synthetic construct
ISSNGGGT

SEQ ID NO: 12468 - protein, 8 aa, Artificial Sequence
  Synthetic construct
ISGSGGTS

SEQ ID NO: 12469 - protein, 8 aa, Artificial Sequence
  Synthetic construct
ISYDGSNK

SEQ ID NO: 12470 - protein, 7 aa, Artificial Sequence
  Synthetic construct
LYTDDRT

SEQ ID NO: 12471 - protein, 8 aa, Artificial Sequence
  Synthetic construct
IDTTGSTT

SEQ ID NO: 12472 - protein, 8 aa, Artificial Sequence
  Synthetic construct
IIPFLGVA

SEQ ID NO: 12473 - protein, 7 aa, Artificial Sequence
  Synthetic construct
INHGEST

SEQ ID NO: 12474 - protein, 8 aa, Artificial Sequence
  Synthetic construct
IIPILGIA

SEQ ID NO: 12475 - protein, 7 aa, Artificial Sequence
  Synthetic construct
IYHGGST

SEQ ID NO: 12476 - protein, 8 aa, Artificial Sequence
  Synthetic construct
FDPEDAET

SEQ ID NO: 12477 - protein, 7 aa, Artificial Sequence
  Synthetic construct
IYYSGSS

SEQ ID NO: 12478 - protein, 8 aa, Artificial Sequence
  Synthetic construct
ISFDGSNE

SEQ ID NO: 12479 - protein, 8 aa, Artificial Sequence
  Synthetic construct
INGGNGNT

SEQ ID NO: 12480 - protein, 8 aa, Artificial Sequence
  Synthetic construct
ISPYNDNT

SEQ ID NO: 12481 - protein, 7 aa, Artificial Sequence
  Synthetic construct
INHSGST

SEQ ID NO: 12482 - protein, 8 aa, Artificial Sequence
  Synthetic construct
MSGSGGNA

SEQ ID NO: 12483 - protein, 9 aa, Artificial Sequence
  Synthetic construct
TYYRSEWYN

SEQ ID NO: 12484 - protein, 8 aa, Artificial Sequence
  Synthetic construct
ISSVNGSI

SEQ ID NO: 12485 - protein, 7 aa, Artificial Sequence
  Synthetic construct
IGTAGDA

SEQ ID NO: 12486 - protein, 7 aa, Artificial Sequence
  Synthetic construct
IYYSGST

SEQ ID NO: 12487 - protein, 7 aa, Artificial Sequence
  Synthetic construct
INHRRTT

SEQ ID NO: 12488 - protein, 8 aa, Artificial Sequence
  Synthetic construct
ISSDGTYK

SEQ ID NO: 12489 - protein, 8 aa, Artificial Sequence
  Synthetic construct
INTNTGNP

SEQ ID NO: 12490 - protein, 7 aa, Artificial Sequence
  Synthetic construct
IYYSGST

SEQ ID NO: 12491 - protein, 8 aa, Artificial Sequence
  Synthetic construct
FDPEDGET

SEQ ID NO: 12492 - protein, 7 aa, Artificial Sequence
  Synthetic construct
VYTSGTT

SEQ ID NO: 12493 - protein, 8 aa, Artificial Sequence
  Synthetic construct
ITWNGGIL

SEQ ID NO: 12494 - protein, 7 aa, Artificial Sequence
  Synthetic construct
ISSGGDT

SEQ ID NO: 12495 - protein, 8 aa, Artificial Sequence
  Synthetic construct
IYPGDSDT

SEQ ID NO: 12496 - protein, 8 aa, Artificial Sequence
  Synthetic construct
ISYDGSVQ

SEQ ID NO: 12497 - protein, 8 aa, Artificial Sequence
  Synthetic construct
ISSSSGNI

SEQ ID NO: 12498 - protein, 8 aa, Artificial Sequence
  Synthetic construct
IDPGDPYS

SEQ ID NO: 12499 - protein, 8 aa, Artificial Sequence
  Synthetic construct
IWFDGSNK

SEQ ID NO: 12500 - protein, 8 aa, Artificial Sequence
  Synthetic construct
INGGSGHT

SEQ ID NO: 12501 - protein, 8 aa, Artificial Sequence
  Synthetic construct
IKQDGSEK

SEQ ID NO: 12502 - protein, 8 aa, Artificial Sequence
  Synthetic construct
ISGSGEST

SEQ ID NO: 12503 - protein, 8 aa, Artificial Sequence
  Synthetic construct
IWSDGDNK

SEQ ID NO: 12504 - protein, 8 aa, Artificial Sequence
  Synthetic construct
IIPIFGTA

SEQ ID NO: 12505 - protein, 8 aa, Artificial Sequence
  Synthetic construct
FDPEDGET

SEQ ID NO: 12506 - protein, 7 aa, Artificial Sequence
  Synthetic construct
IYYSGST

SEQ ID NO: 12507 - protein, 8 aa, Artificial Sequence
  Synthetic construct
IDPSDSYT

SEQ ID NO: 12508 - protein, 8 aa, Artificial Sequence
  Synthetic construct
ISNSGNII

SEQ ID NO: 12509 - protein, 8 aa, Artificial Sequence
  Synthetic construct
IIPIFGAT

SEQ ID NO: 12510 - protein, 8 aa, Artificial Sequence
  Synthetic construct
IYPGDSDT

SEQ ID NO: 12511 - protein, 8 aa, Artificial Sequence
  Synthetic construct
IWYDGSKK

SEQ ID NO: 12512 - protein, 8 aa, Artificial Sequence
  Synthetic construct
IIPIFGTA

SEQ ID NO: 12513 - protein, 8 aa, Artificial Sequence
  Synthetic construct
ISYDGGNV

SEQ ID NO: 12514 - protein, 8 aa, Artificial Sequence
  Synthetic construct
ISSSGNYT

SEQ ID NO: 12515 - protein, 8 aa, Artificial Sequence
  Synthetic construct
VSASGNIK

SEQ ID NO: 12516 - protein, 8 aa, Artificial Sequence
  Synthetic construct
IKEDGSEE

SEQ ID NO: 12517 - protein, 8 aa, Artificial Sequence
  Synthetic construct
ITTYTGYT

SEQ ID NO: 12518 - protein, 8 aa, Artificial Sequence
  Synthetic construct
ISSGSNFI

SEQ ID NO: 12519 - protein, 10 aa, Artificial Sequence
  Synthetic construct
IKNKNDGGTT

SEQ ID NO: 12520 - protein, 8 aa, Artificial Sequence
  Synthetic construct
MSGSGGSI

SEQ ID NO: 12521 - protein, 7 aa, Artificial Sequence
  Synthetic construct
IYWDDDE

SEQ ID NO: 12522 - protein, 8 aa, Artificial Sequence
  Synthetic construct
IKQDGSEK

SEQ ID NO: 12523 - protein, 8 aa, Artificial Sequence
  Synthetic construct
IDSSGGGT

SEQ ID NO: 12524 - protein, 7 aa, Artificial Sequence
  Synthetic construct
IYSGGST

SEQ ID NO: 12525 - protein, 8 aa, Artificial Sequence
  Synthetic construct
INTNTGNP

SEQ ID NO: 12526 - protein, 8 aa, Artificial Sequence
  Synthetic construct
ISYDGSNN

SEQ ID NO: 12527 - protein, 8 aa, Artificial Sequence
  Synthetic construct
IVGMFGTT

SEQ ID NO: 12528 - protein, 8 aa, Artificial Sequence
  Synthetic construct
ISGSGGST

SEQ ID NO: 12529 - protein, 8 aa, Artificial Sequence
  Synthetic construct
ISYDGSNK

SEQ ID NO: 12530 - protein, 8 aa, Artificial Sequence
  Synthetic construct
ISGSGAST

SEQ ID NO: 12531 - protein, 7 aa, Artificial Sequence
  Synthetic construct
AHYDGTT

SEQ ID NO: 12532 - protein, 8 aa, Artificial Sequence
  Synthetic construct
INPRDSDT

SEQ ID NO: 12533 - protein, 8 aa, Artificial Sequence
  Synthetic construct
ISYDGSNK

SEQ ID NO: 12534 - protein, 7 aa, Artificial Sequence
  Synthetic construct
INHSGST

SEQ ID NO: 12535 - protein, 7 aa, Artificial Sequence
  Synthetic construct
INHSGST

SEQ ID NO: 12536 - protein, 8 aa, Artificial Sequence
  Synthetic construct
ISSSDSII

SEQ ID NO: 12537 - protein, 7 aa, Artificial Sequence
  Synthetic construct
IGTSGDT

SEQ ID NO: 12538 - protein, 7 aa, Artificial Sequence
  Synthetic construct
IATTGDT

SEQ ID NO: 12539 - protein, 7 aa, Artificial Sequence
  Synthetic construct
IYTDGST

SEQ ID NO: 12540 - protein, 7 aa, Artificial Sequence
  Synthetic construct
IYYSGNT

SEQ ID NO: 12541 - protein, 8 aa, Artificial Sequence
  Synthetic construct
ITGSGALT

SEQ ID NO: 12542 - protein, 8 aa, Artificial Sequence
  Synthetic construct
ISAYNGST

SEQ ID NO: 12543 - protein, 8 aa, Artificial Sequence
  Synthetic construct
VDVSGGGT

SEQ ID NO: 12544 - protein, 8 aa, Artificial Sequence
  Synthetic construct
IYPGDSDT

SEQ ID NO: 12545 - protein, 7 aa, Artificial Sequence
  Synthetic construct
IYYSGST

SEQ ID NO: 12546 - protein, 8 aa, Artificial Sequence
  Synthetic construct
VSYDGSNK

SEQ ID NO: 12547 - protein, 7 aa, Artificial Sequence
  Synthetic construct
INHSGAT

SEQ ID NO: 12548 - protein, 7 aa, Artificial Sequence
  Synthetic construct
VYYDGTT

SEQ ID NO: 12549 - protein, 8 aa, Artificial Sequence
  Synthetic construct
LWRDGSKQ

SEQ ID NO: 12550 - protein, 7 aa, Artificial Sequence
  Synthetic construct
VYTSGST

SEQ ID NO: 12551 - protein, 8 aa, Artificial Sequence
  Synthetic construct
INTNTGNP

SEQ ID NO: 12552 - protein, 8 aa, Artificial Sequence
  Synthetic construct
IWYDGSNK

SEQ ID NO: 12553 - protein, 7 aa, Artificial Sequence
  Synthetic construct
IYYTGST

SEQ ID NO: 12554 - protein, 8 aa, Artificial Sequence
  Synthetic construct
ISGRGSPT

SEQ ID NO: 12555 - protein, 8 aa, Artificial Sequence
  Synthetic construct
VNPSGGST

SEQ ID NO: 12556 - protein, 7 aa, Artificial Sequence
  Synthetic construct
IHHSGST

SEQ ID NO: 12557 - protein, 8 aa, Artificial Sequence
  Synthetic construct
IYPDDSDT

SEQ ID NO: 12558 - protein, 7 aa, Artificial Sequence
  Synthetic construct
IYWDGDK

SEQ ID NO: 12559 - protein, 8 aa, Artificial Sequence
  Synthetic construct
ISGSGNTI

SEQ ID NO: 12560 - protein, 8 aa, Artificial Sequence
  Synthetic construct
INTNTGNP

SEQ ID NO: 12561 - protein, 7 aa, Artificial Sequence
  Synthetic construct
IYSGGST

SEQ ID NO: 12562 - protein, 7 aa, Artificial Sequence
  Synthetic construct
IYSGGST

SEQ ID NO: 12563 - protein, 7 aa, Artificial Sequence
  Synthetic construct
IYHSGST

SEQ ID NO: 12564 - protein, 8 aa, Artificial Sequence
  Synthetic construct
INTNTGNP

SEQ ID NO: 12565 - protein, 8 aa, Artificial Sequence
  Synthetic construct
ISYDGSNK

SEQ ID NO: 12566 - protein, 8 aa, Artificial Sequence
  Synthetic construct
FDPEDGET

SEQ ID NO: 12567 - protein, 8 aa, Artificial Sequence
  Synthetic construct
TSSSSSYK

SEQ ID NO: 12568 - protein, 8 aa, Artificial Sequence
  Synthetic construct
ISTSSSYI

SEQ ID NO: 12569 - protein, 8 aa, Artificial Sequence
  Synthetic construct
INTNTGNP

SEQ ID NO: 12570 - protein, 7 aa, Artificial Sequence
  Synthetic construct
INHSGST

SEQ ID NO: 12571 - protein, 8 aa, Artificial Sequence
  Synthetic construct
IVGMFGTT

SEQ ID NO: 12572 - protein, 7 aa, Artificial Sequence
  Synthetic construct
IYYSGST

SEQ ID NO: 12573 - protein, 8 aa, Artificial Sequence
  Synthetic construct
ISGSGGST

SEQ ID NO: 12574 - protein, 7 aa, Artificial Sequence
  Synthetic construct
IYYSGNT

SEQ ID NO: 12575 - protein, 8 aa, Artificial Sequence
  Synthetic construct
ISGSGTST

SEQ ID NO: 12576 - protein, 8 aa, Artificial Sequence
  Synthetic construct
ISSSSSSI

SEQ ID NO: 12577 - protein, 10 aa, Artificial Sequence
  Synthetic construct
IKSKIDGGTT

SEQ ID NO: 12578 - protein, 8 aa, Artificial Sequence
  Synthetic construct
ISGSGGST

SEQ ID NO: 12579 - protein, 7 aa, Artificial Sequence
  Synthetic construct
VFYNGDT

SEQ ID NO: 12580 - protein, 8 aa, Artificial Sequence
  Synthetic construct
ISYDGSNK

SEQ ID NO: 12581 - protein, 10 aa, Artificial Sequence
  Synthetic construct
TRNKANSYIT

SEQ ID NO: 12582 - protein, 8 aa, Artificial Sequence
  Synthetic construct
IYPGDSGT

SEQ ID NO: 12583 - protein, 8 aa, Artificial Sequence
  Synthetic construct
ISHDGTNK

SEQ ID NO: 12584 - protein, 7 aa, Artificial Sequence
  Synthetic construct
IYYSGST

SEQ ID NO: 12585 - protein, 8 aa, Artificial Sequence
  Synthetic construct
ISYDGSNK

SEQ ID NO: 12586 - protein, 7 aa, Artificial Sequence
  Synthetic construct
IYWDDDK

SEQ ID NO: 12587 - protein, 7 aa, Artificial Sequence
  Synthetic construct
VFHSGST

SEQ ID NO: 12588 - protein, 8 aa, Artificial Sequence
  Synthetic construct
ISGRAGST

SEQ ID NO: 12589 - protein, 8 aa, Artificial Sequence
  Synthetic construct
FDPANAET

SEQ ID NO: 12590 - protein, 8 aa, Artificial Sequence
  Synthetic construct
ISYDGSNK

SEQ ID NO: 12591 - protein, 8 aa, Artificial Sequence
  Synthetic construct
ISGGGGAT

SEQ ID NO: 12592 - protein, 8 aa, Artificial Sequence
  Synthetic construct
INPDDSDT

SEQ ID NO: 12593 - protein, 7 aa, Artificial Sequence
  Synthetic construct
IYSDGST

SEQ ID NO: 12594 - protein, 8 aa, Artificial Sequence
  Synthetic construct
IWFDGSNR

SEQ ID NO: 12595 - protein, 8 aa, Artificial Sequence
  Synthetic construct
IWFDGSQK

SEQ ID NO: 12596 - protein, 8 aa, Artificial Sequence
  Synthetic construct
ISGGGAST

SEQ ID NO: 12597 - protein, 8 aa, Artificial Sequence
  Synthetic construct
IIPMLGIA

SEQ ID NO: 12598 - protein, 7 aa, Artificial Sequence
  Synthetic construct
IYYSGRT

SEQ ID NO: 12599 - protein, 10 aa, Artificial Sequence
  Synthetic construct
IRSKTYGGTT

SEQ ID NO: 12600 - protein, 8 aa, Artificial Sequence
  Synthetic construct
IRSSSSYI

SEQ ID NO: 12601 - protein, 8 aa, Artificial Sequence
  Synthetic construct
INTNTGNP

SEQ ID NO: 12602 - protein, 8 aa, Artificial Sequence
  Synthetic construct
IWFDGSSK

SEQ ID NO: 12603 - protein, 8 aa, Artificial Sequence
  Synthetic construct
ISAYNGHT

SEQ ID NO: 12604 - protein, 7 aa, Artificial Sequence
  Synthetic construct
IHKNGGP

SEQ ID NO: 12605 - protein, 8 aa, Artificial Sequence
  Synthetic construct
IIPILGVA

SEQ ID NO: 12606 - protein, 8 aa, Artificial Sequence
  Synthetic construct
ISYDGSNK

SEQ ID NO: 12607 - protein, 8 aa, Artificial Sequence
  Synthetic construct
IYPGDSDT

SEQ ID NO: 12608 - protein, 8 aa, Artificial Sequence
  Synthetic construct
IYPGDSDT

SEQ ID NO: 12609 - protein, 7 aa, Artificial Sequence
  Synthetic construct
INHSGST

SEQ ID NO: 12610 - protein, 8 aa, Artificial Sequence
  Synthetic construct
ISSTSGSI

SEQ ID NO: 12611 - protein, 8 aa, Artificial Sequence
  Synthetic construct
ISNSGSDI

SEQ ID NO: 12612 - protein, 8 aa, Artificial Sequence
  Synthetic construct
IRGSDGSA

SEQ ID NO: 12613 - protein, 7 aa, Artificial Sequence
  Synthetic construct
LDYSGIT

SEQ ID NO: 12614 - protein, 8 aa, Artificial Sequence
  Synthetic construct
ITFSGTTK

SEQ ID NO: 12615 - protein, 7 aa, Artificial Sequence
  Synthetic construct
IYWDDDK

SEQ ID NO: 12616 - protein, 8 aa, Artificial Sequence
  Synthetic construct
IIPIFDTT

SEQ ID NO: 12617 - protein, 8 aa, Artificial Sequence
  Synthetic construct
IWYDGSNT

SEQ ID NO: 12618 - protein, 7 aa, Artificial Sequence
  Synthetic construct
IDWDDDK

SEQ ID NO: 12619 - protein, 8 aa, Artificial Sequence
  Synthetic construct
INQDGRDK

SEQ ID NO: 12620 - protein, 7 aa, Artificial Sequence
  Synthetic construct
IYYSGVT

SEQ ID NO: 12621 - protein, 8 aa, Artificial Sequence
  Synthetic construct
IWFDGTKK

SEQ ID NO: 12622 - protein, 8 aa, Artificial Sequence
  Synthetic construct
INPSGGST

SEQ ID NO: 12623 - protein, 7 aa, Artificial Sequence
  Synthetic construct
IYWDDDK

SEQ ID NO: 12624 - protein, 8 aa, Artificial Sequence
  Synthetic construct
ISFDGSNK

SEQ ID NO: 12625 - protein, 8 aa, Artificial Sequence
  Synthetic construct
ISSSSSYV

SEQ ID NO: 12626 - protein, 8 aa, Artificial Sequence
  Synthetic construct
IWHDGHNK

SEQ ID NO: 12627 - protein, 7 aa, Artificial Sequence
  Synthetic construct
IYYSGSS

SEQ ID NO: 12628 - protein, 10 aa, Artificial Sequence
  Synthetic construct
IKSKTDGGTT

SEQ ID NO: 12629 - protein, 7 aa, Artificial Sequence
  Synthetic construct
IFYTGII

SEQ ID NO: 12630 - protein, 8 aa, Artificial Sequence
  Synthetic construct
IITNTGNP

SEQ ID NO: 12631 - protein, 8 aa, Artificial Sequence
  Synthetic construct
ISSSSDTV

SEQ ID NO: 12632 - protein, 8 aa, Artificial Sequence
  Synthetic construct
ISYDGSSK

SEQ ID NO: 12633 - protein, 7 aa, Artificial Sequence
  Synthetic construct
VYTSGLT

SEQ ID NO: 12634 - protein, 8 aa, Artificial Sequence
  Synthetic construct
TIAIFGTA

SEQ ID NO: 12635 - protein, 8 aa, Artificial Sequence
  Synthetic construct
VSYDGDNT

SEQ ID NO: 12636 - protein, 7 aa, Artificial Sequence
  Synthetic construct
IYSGGST

SEQ ID NO: 12637 - protein, 8 aa, Artificial Sequence
  Synthetic construct
IKQDGSEK

SEQ ID NO: 12638 - protein, 7 aa, Artificial Sequence
  Synthetic construct
IYYSGST

SEQ ID NO: 12639 - protein, 8 aa, Artificial Sequence
  Synthetic construct
INTNTGDP

SEQ ID NO: 12640 - protein, 8 aa, Artificial Sequence
  Synthetic construct
IIPMLVLA

SEQ ID NO: 12641 - protein, 8 aa, Artificial Sequence
  Synthetic construct
ITWNGGIL

SEQ ID NO: 12642 - protein, 8 aa, Artificial Sequence
  Synthetic construct
IIPIFGTT

SEQ ID NO: 12643 - protein, 7 aa, Artificial Sequence
  Synthetic construct
IYTSGSI

SEQ ID NO: 12644 - protein, 8 aa, Artificial Sequence
  Synthetic construct
ISYDGSVQ

SEQ ID NO: 12645 - protein, 7 aa, Artificial Sequence
  Synthetic construct
IYISGST

SEQ ID NO: 12646 - protein, 7 aa, Artificial Sequence
  Synthetic construct
IYHSENT

SEQ ID NO: 12647 - protein, 10 aa, Artificial Sequence
  Synthetic construct
IKSRSDGGTA

SEQ ID NO: 12648 - protein, 7 aa, Artificial Sequence
  Synthetic construct
IYYSGST

SEQ ID NO: 12649 - protein, 8 aa, Artificial Sequence
  Synthetic construct
IYPGDSDI

SEQ ID NO: 12650 - protein, 8 aa, Artificial Sequence
  Synthetic construct
INPSGGST

SEQ ID NO: 12651 - protein, 8 aa, Artificial Sequence
  Synthetic construct
IWYDGSDK

SEQ ID NO: 12652 - protein, 7 aa, Artificial Sequence
  Synthetic construct
IYYSGIT

SEQ ID NO: 12653 - protein, 8 aa, Artificial Sequence
  Synthetic construct
LSTYNGST

SEQ ID NO: 12654 - protein, 8 aa, Artificial Sequence
  Synthetic construct
INTNTATP

SEQ ID NO: 12655 - protein, 7 aa, Artificial Sequence
  Synthetic construct
MSYSGST

SEQ ID NO: 12656 - protein, 7 aa, Artificial Sequence
  Synthetic construct
IYWDDDK

SEQ ID NO: 12657 - protein, 7 aa, Artificial Sequence
  Synthetic construct
IYYSGYT

SEQ ID NO: 12658 - protein, 8 aa, Artificial Sequence
  Synthetic construct
FSGSGGST

SEQ ID NO: 12659 - protein, 7 aa, Artificial Sequence
  Synthetic construct
IYHSGST

SEQ ID NO: 12660 - protein, 8 aa, Artificial Sequence
  Synthetic construct
IKEDGSEK

SEQ ID NO: 12661 - protein, 7 aa, Artificial Sequence
  Synthetic construct
IYSGGSA

SEQ ID NO: 12662 - protein, 8 aa, Artificial Sequence
  Synthetic construct
ISGYNGNT

SEQ ID NO: 12663 - protein, 8 aa, Artificial Sequence
  Synthetic construct
IWYDGSDK

SEQ ID NO: 12664 - protein, 7 aa, Artificial Sequence
  Synthetic construct
IGTAGDT

SEQ ID NO: 12665 - protein, 8 aa, Artificial Sequence
  Synthetic construct
IYPGDSET

SEQ ID NO: 12666 - protein, 8 aa, Artificial Sequence
  Synthetic construct
MSSSSRTI

SEQ ID NO: 12667 - protein, 8 aa, Artificial Sequence
  Synthetic construct
IIPILGIA

SEQ ID NO: 12668 - protein, 8 aa, Artificial Sequence
  Synthetic construct
IWYDGRNI

SEQ ID NO: 12669 - protein, 8 aa, Artificial Sequence
  Synthetic construct
IDVRGGGT

SEQ ID NO: 12670 - protein, 8 aa, Artificial Sequence
  Synthetic construct
FDPEDAET

SEQ ID NO: 12671 - protein, 8 aa, Artificial Sequence
  Synthetic construct
ISGYNGNT

SEQ ID NO: 12672 - protein, 8 aa, Artificial Sequence
  Synthetic construct
VHPGDSET

SEQ ID NO: 12673 - protein, 8 aa, Artificial Sequence
  Synthetic construct
ISYDGSNK

SEQ ID NO: 12674 - protein, 8 aa, Artificial Sequence
  Synthetic construct
ISYDGGYE

SEQ ID NO: 12675 - protein, 8 aa, Artificial Sequence
  Synthetic construct
IFPILGRA

SEQ ID NO: 12676 - protein, 8 aa, Artificial Sequence
  Synthetic construct
ISSSSNTK

SEQ ID NO: 12677 - protein, 8 aa, Artificial Sequence
  Synthetic construct
INTNTGNP

SEQ ID NO: 12678 - protein, 8 aa, Artificial Sequence
  Synthetic construct
ISSRSNTM

SEQ ID NO: 12679 - protein, 7 aa, Artificial Sequence
  Synthetic construct
IYYSGST

SEQ ID NO: 12680 - protein, 8 aa, Artificial Sequence
  Synthetic construct
IIPVFGAA

SEQ ID NO: 12681 - protein, 8 aa, Artificial Sequence
  Synthetic construct
ISYDGSVQ

SEQ ID NO: 12682 - protein, 8 aa, Artificial Sequence
  Synthetic construct
VSASGGNT

SEQ ID NO: 12683 - protein, 8 aa, Artificial Sequence
  Synthetic construct
ISYDGGDN

SEQ ID NO: 12684 - protein, 8 aa, Artificial Sequence
  Synthetic construct
ISYDGSNR

SEQ ID NO: 12685 - protein, 8 aa, Artificial Sequence
  Synthetic construct
IWYDGSNK

SEQ ID NO: 12686 - protein, 8 aa, Artificial Sequence
  Synthetic construct
ISAYNGNT

SEQ ID NO: 12687 - protein, 8 aa, Artificial Sequence
  Synthetic construct
ISPSGAST

SEQ ID NO: 12688 - protein, 8 aa, Artificial Sequence
  Synthetic construct
ISSSSSYI

SEQ ID NO: 12689 - protein, 8 aa, Artificial Sequence
  Synthetic construct
ISTNGAST

SEQ ID NO: 12690 - protein, 8 aa, Artificial Sequence
  Synthetic construct
IRGSGGST

SEQ ID NO: 12691 - protein, 8 aa, Artificial Sequence
  Synthetic construct
IWYDGRDK

SEQ ID NO: 12692 - protein, 10 aa, Artificial Sequence
  Synthetic construct
IKSKSDGGTT

SEQ ID NO: 12693 - protein, 8 aa, Artificial Sequence
  Synthetic construct
ISYDGSDK

SEQ ID NO: 12694 - protein, 8 aa, Artificial Sequence
  Synthetic construct
MSSSGRTI

SEQ ID NO: 12695 - protein, 7 aa, Artificial Sequence
  Synthetic construct
IYYSGST

SEQ ID NO: 12696 - protein, 8 aa, Artificial Sequence
  Synthetic construct
IIPIFDTA

SEQ ID NO: 12697 - protein, 8 aa, Artificial Sequence
  Synthetic construct
INTDTGNP

SEQ ID NO: 12698 - protein, 8 aa, Artificial Sequence
  Synthetic construct
INTNTGDP

SEQ ID NO: 12699 - protein, 7 aa, Artificial Sequence
  Synthetic construct
IYSSGST

SEQ ID NO: 12700 - protein, 8 aa, Artificial Sequence
  Synthetic construct
IIPILGVA

SEQ ID NO: 12701 - protein, 8 aa, Artificial Sequence
  Synthetic construct
ISGSGGGA

SEQ ID NO: 12702 - protein, 8 aa, Artificial Sequence
  Synthetic construct
INAGSGNT

SEQ ID NO: 12703 - protein, 7 aa, Artificial Sequence
  Synthetic construct
INYAGST

SEQ ID NO: 12704 - protein, 8 aa, Artificial Sequence
  Synthetic construct
INAGNGDT

SEQ ID NO: 12705 - protein, 7 aa, Artificial Sequence
  Synthetic construct
IIHGGTT

SEQ ID NO: 12706 - protein, 7 aa, Artificial Sequence
  Synthetic construct
VFYNGDT

SEQ ID NO: 12707 - protein, 7 aa, Artificial Sequence
  Synthetic construct
IYHGGNT

SEQ ID NO: 12708 - protein, 8 aa, Artificial Sequence
  Synthetic construct
IKQDGSEK

SEQ ID NO: 12709 - protein, 8 aa, Artificial Sequence
  Synthetic construct
LDGSGRST

SEQ ID NO: 12710 - protein, 7 aa, Artificial Sequence
  Synthetic construct
IYSGGST

SEQ ID NO: 12711 - protein, 8 aa, Artificial Sequence
  Synthetic construct
IYPGDSDT

SEQ ID NO: 12712 - protein, 10 aa, Artificial Sequence
  Synthetic construct
IKSKTDGGTT

SEQ ID NO: 12713 - protein, 7 aa, Artificial Sequence
  Synthetic construct
IYSGGST

SEQ ID NO: 12714 - protein, 8 aa, Artificial Sequence
  Synthetic construct
ISAYNGNT

SEQ ID NO: 12715 - protein, 7 aa, Artificial Sequence
  Synthetic construct
IYWDEDV

SEQ ID NO: 12716 - protein, 7 aa, Artificial Sequence
  Synthetic construct
IYYSGST

SEQ ID NO: 12717 - protein, 8 aa, Artificial Sequence
  Synthetic construct
ISYDGSVQ

SEQ ID NO: 12718 - protein, 10 aa, Artificial Sequence
  Synthetic construct
IRSKANSYAT

SEQ ID NO: 12719 - protein, 7 aa, Artificial Sequence
  Synthetic construct
IYSGGST

SEQ ID NO: 12720 - protein, 7 aa, Artificial Sequence
  Synthetic construct
IYHSGST

SEQ ID NO: 12721 - protein, 8 aa, Artificial Sequence
  Synthetic construct
INAGNGNT

SEQ ID NO: 12722 - protein, 8 aa, Artificial Sequence
  Synthetic construct
IIGMFGTT

SEQ ID NO: 12723 - protein, 7 aa, Artificial Sequence
  Synthetic construct
IYHSGST

SEQ ID NO: 12724 - protein, 8 aa, Artificial Sequence
  Synthetic construct
VIPMLGIA

SEQ ID NO: 12725 - protein, 8 aa, Artificial Sequence
  Synthetic construct
STWNSGTI

SEQ ID NO: 12726 - protein, 9 aa, Artificial Sequence
  Synthetic construct
TYYRSKWYY

SEQ ID NO: 12727 - protein, 8 aa, Artificial Sequence
  Synthetic construct
INSDGSRT

SEQ ID NO: 12728 - protein, 8 aa, Artificial Sequence
  Synthetic construct
ISSRGSSI

SEQ ID NO: 12729 - protein, 8 aa, Artificial Sequence
  Synthetic construct
LSGSGNSA

SEQ ID NO: 12730 - protein, 7 aa, Artificial Sequence
  Synthetic construct
IYHSGNT

SEQ ID NO: 12731 - protein, 7 aa, Artificial Sequence
  Synthetic construct
IYHSGST

SEQ ID NO: 12732 - protein, 8 aa, Artificial Sequence
  Synthetic construct
IKQDGSEK

SEQ ID NO: 12733 - protein, 8 aa, Artificial Sequence
  Synthetic construct
FDPEDGET

SEQ ID NO: 12734 - protein, 7 aa, Artificial Sequence
  Synthetic construct
ISRGWST

SEQ ID NO: 12735 - protein, 8 aa, Artificial Sequence
  Synthetic construct
INPSGDIT

SEQ ID NO: 12736 - protein, 7 aa, Artificial Sequence
  Synthetic construct
IYWDDDK

SEQ ID NO: 12737 - protein, 7 aa, Artificial Sequence
  Synthetic construct
INHDGTT

SEQ ID NO: 12738 - protein, 7 aa, Artificial Sequence
  Synthetic construct
LDYSGIT

SEQ ID NO: 12739 - protein, 8 aa, Artificial Sequence
  Synthetic construct
ISYDGSVQ

SEQ ID NO: 12740 - protein, 8 aa, Artificial Sequence
  Synthetic construct
ISGNGGGT

SEQ ID NO: 12741 - protein, 8 aa, Artificial Sequence
  Synthetic construct
IIPIFGTA

SEQ ID NO: 12742 - protein, 8 aa, Artificial Sequence
  Synthetic construct
IYPGDSDT

SEQ ID NO: 12743 - protein, 8 aa, Artificial Sequence
  Synthetic construct
IIPIFDTT

SEQ ID NO: 12744 - protein, 8 aa, Artificial Sequence
  Synthetic construct
ISYEGSVQ

SEQ ID NO: 12745 - protein, 8 aa, Artificial Sequence
  Synthetic construct
IATDTGKP

SEQ ID NO: 12746 - protein, 8 aa, Artificial Sequence
  Synthetic construct
IWYVGNNR

SEQ ID NO: 12747 - protein, 8 aa, Artificial Sequence
  Synthetic construct
INADNGHT

SEQ ID NO: 12748 - protein, 8 aa, Artificial Sequence
  Synthetic construct
ISYDGSNK

SEQ ID NO: 12749 - protein, 8 aa, Artificial Sequence
  Synthetic construct
IIPIFGTA

SEQ ID NO: 12750 - protein, 8 aa, Artificial Sequence
  Synthetic construct
IIPFLGIA

SEQ ID NO: 12751 - protein, 7 aa, Artificial Sequence
  Synthetic construct
IYWDDDK

SEQ ID NO: 12752 - protein, 8 aa, Artificial Sequence
  Synthetic construct
IWYDGSNK

SEQ ID NO: 12753 - protein, 7 aa, Artificial Sequence
  Synthetic construct
IYSDGPT

SEQ ID NO: 12754 - protein, 8 aa, Artificial Sequence
  Synthetic construct
ISVYNGKT

SEQ ID NO: 12755 - protein, 7 aa, Artificial Sequence
  Synthetic construct
IYYSGST

SEQ ID NO: 12756 - protein, 7 aa, Artificial Sequence
  Synthetic construct
IDGAGGT

SEQ ID NO: 12757 - protein, 8 aa, Artificial Sequence
  Synthetic construct
IIPIFGTP

SEQ ID NO: 12758 - protein, 8 aa, Artificial Sequence
  Synthetic construct
ISYDGSNK

SEQ ID NO: 12759 - protein, 8 aa, Artificial Sequence
  Synthetic construct
ISYDGSNK

SEQ ID NO: 12760 - protein, 7 aa, Artificial Sequence
  Synthetic construct
IYSGGST

SEQ ID NO: 12761 - protein, 8 aa, Artificial Sequence
  Synthetic construct
ISSSGNFI

SEQ ID NO: 12762 - protein, 8 aa, Artificial Sequence
  Synthetic construct
IIPIFGTA

SEQ ID NO: 12763 - protein, 8 aa, Artificial Sequence
  Synthetic construct
IHPEDSRT

SEQ ID NO: 12764 - protein, 7 aa, Artificial Sequence
  Synthetic construct
IYYSGST

SEQ ID NO: 12765 - protein, 8 aa, Artificial Sequence
  Synthetic construct
INAGNGNT

SEQ ID NO: 12766 - protein, 8 aa, Artificial Sequence
  Synthetic construct
FDPEDGET

SEQ ID NO: 12767 - protein, 7 aa, Artificial Sequence
  Synthetic construct
INHSGST

SEQ ID NO: 12768 - protein, 8 aa, Artificial Sequence
  Synthetic construct
ISYDGSVQ

SEQ ID NO: 12769 - protein, 8 aa, Artificial Sequence
  Synthetic construct
ISYDGSNK

SEQ ID NO: 12770 - protein, 8 aa, Artificial Sequence
  Synthetic construct
FDPEDGET

SEQ ID NO: 12771 - protein, 8 aa, Artificial Sequence
  Synthetic construct
ISGSGGTT

SEQ ID NO: 12772 - protein, 8 aa, Artificial Sequence
  Synthetic construct
FDPENGET

SEQ ID NO: 12773 - protein, 8 aa, Artificial Sequence
  Synthetic construct
IYPGDSDT

SEQ ID NO: 12774 - protein, 8 aa, Artificial Sequence
  Synthetic construct
IWYDGSNK

SEQ ID NO: 12775 - protein, 7 aa, Artificial Sequence
  Synthetic construct
IYWDDDK

SEQ ID NO: 12776 - protein, 8 aa, Artificial Sequence
  Synthetic construct
ISGSGGST

SEQ ID NO: 12777 - protein, 7 aa, Artificial Sequence
  Synthetic construct
IYSSGTT

SEQ ID NO: 12778 - protein, 7 aa, Artificial Sequence
  Synthetic construct
IFYNGST

SEQ ID NO: 12779 - protein, 8 aa, Artificial Sequence
  Synthetic construct
IWYDGSNE

SEQ ID NO: 12780 - protein, 8 aa, Artificial Sequence
  Synthetic construct
TVPIFGTA

SEQ ID NO: 12781 - protein, 8 aa, Artificial Sequence
  Synthetic construct
ISSSSSTI

SEQ ID NO: 12782 - protein, 8 aa, Artificial Sequence
  Synthetic construct
INTNNGNP

SEQ ID NO: 12783 - protein, 8 aa, Artificial Sequence
  Synthetic construct
ISSSSTTI

SEQ ID NO: 12784 - protein, 8 aa, Artificial Sequence
  Synthetic construct
IKEDGSEK

SEQ ID NO: 12785 - protein, 8 aa, Artificial Sequence
  Synthetic construct
INTDTGIP

SEQ ID NO: 12786 - protein, 8 aa, Artificial Sequence
  Synthetic construct
ISASGGNT

SEQ ID NO: 12787 - protein, 7 aa, Artificial Sequence
  Synthetic construct
IYYQVST

SEQ ID NO: 12788 - protein, 7 aa, Artificial Sequence
  Synthetic construct
MQYSGSP

SEQ ID NO: 12789 - protein, 8 aa, Artificial Sequence
  Synthetic construct
ISAYNGNT

SEQ ID NO: 12790 - protein, 8 aa, Artificial Sequence
  Synthetic construct
TSWNSGIV

SEQ ID NO: 12791 - protein, 8 aa, Artificial Sequence
  Synthetic construct
IKQDGSEK

SEQ ID NO: 12792 - protein, 8 aa, Artificial Sequence
  Synthetic construct
FDPEDGET

SEQ ID NO: 12793 - protein, 8 aa, Artificial Sequence
  Synthetic construct
ISAYNGST

SEQ ID NO: 12794 - protein, 8 aa, Artificial Sequence
  Synthetic construct
IYPGDSDT

SEQ ID NO: 12795 - protein, 8 aa, Artificial Sequence
  Synthetic construct
IIPIFGSA

SEQ ID NO: 12796 - protein, 8 aa, Artificial Sequence
  Synthetic construct
INPISGVT

SEQ ID NO: 12797 - protein, 7 aa, Artificial Sequence
  Synthetic construct
VYYSGST

SEQ ID NO: 12798 - protein, 8 aa, Artificial Sequence
  Synthetic construct
IWYVGDNK

SEQ ID NO: 12799 - protein, 8 aa, Artificial Sequence
  Synthetic construct
ISSSGNYI

SEQ ID NO: 12800 - protein, 8 aa, Artificial Sequence
  Synthetic construct
IRWDGGNT

SEQ ID NO: 12801 - protein, 8 aa, Artificial Sequence
  Synthetic construct
ISAYNGNT

SEQ ID NO: 12802 - protein, 8 aa, Artificial Sequence
  Synthetic construct
SSWNSGTI

SEQ ID NO: 12803 - protein, 7 aa, Artificial Sequence
  Synthetic construct
ISWTGRT

SEQ ID NO: 12804 - protein, 8 aa, Artificial Sequence
  Synthetic construct
ISGSGGST

SEQ ID NO: 12805 - protein, 8 aa, Artificial Sequence
  Synthetic construct
ISFDGNNK

SEQ ID NO: 12806 - protein, 8 aa, Artificial Sequence
  Synthetic construct
ISTYKGNT

SEQ ID NO: 12807 - protein, 8 aa, Artificial Sequence
  Synthetic construct
INQHGSES

SEQ ID NO: 12808 - protein, 7 aa, Artificial Sequence
  Synthetic construct
IYTSGST

SEQ ID NO: 12809 - protein, 8 aa, Artificial Sequence
  Synthetic construct
IWYDGSNK

SEQ ID NO: 12810 - protein, 8 aa, Artificial Sequence
  Synthetic construct
IIPLFGTA

SEQ ID NO: 12811 - protein, 8 aa, Artificial Sequence
  Synthetic construct
IWYDGSKK

SEQ ID NO: 12812 - protein, 10 aa, Artificial Sequence
  Synthetic construct
IRSKAYGGTT

SEQ ID NO: 12813 - protein, 8 aa, Artificial Sequence
  Synthetic construct
SSSDGTNK

SEQ ID NO: 12814 - protein, 8 aa, Artificial Sequence
  Synthetic construct
FDPEDAET

SEQ ID NO: 12815 - protein, 7 aa, Artificial Sequence
  Synthetic construct
IFYSGST

SEQ ID NO: 12816 - protein, 8 aa, Artificial Sequence
  Synthetic construct
ISAYNGNT

SEQ ID NO: 12817 - protein, 8 aa, Artificial Sequence
  Synthetic construct
IRASSGTT

SEQ ID NO: 12818 - protein, 8 aa, Artificial Sequence
  Synthetic construct
ISGSGDNT

SEQ ID NO: 12819 - protein, 8 aa, Artificial Sequence
  Synthetic construct
IDTNTGNP

SEQ ID NO: 12820 - protein, 7 aa, Artificial Sequence
  Synthetic construct
IYYSGST

SEQ ID NO: 12821 - protein, 8 aa, Artificial Sequence
  Synthetic construct
INTNTGNP

SEQ ID NO: 12822 - protein, 8 aa, Artificial Sequence
  Synthetic construct
INQDGSEK

SEQ ID NO: 12823 - protein, 8 aa, Artificial Sequence
  Synthetic construct
STWNSGTI

SEQ ID NO: 12824 - protein, 7 aa, Artificial Sequence
  Synthetic construct
IYSTGST

SEQ ID NO: 12825 - protein, 10 aa, Artificial Sequence
  Synthetic construct
IKSKTDGGTT

SEQ ID NO: 12826 - protein, 8 aa, Artificial Sequence
  Synthetic construct
ISGYNGNT

SEQ ID NO: 12827 - protein, 8 aa, Artificial Sequence
  Synthetic construct
ISFDGHNK

SEQ ID NO: 12828 - protein, 8 aa, Artificial Sequence
  Synthetic construct
IWYDGSNE

SEQ ID NO: 12829 - protein, 8 aa, Artificial Sequence
  Synthetic construct
INWNGIST

SEQ ID NO: 12830 - protein, 8 aa, Artificial Sequence
  Synthetic construct
ISYDGTNK

SEQ ID NO: 12831 - protein, 8 aa, Artificial Sequence
  Synthetic construct
ISSSSSYI

SEQ ID NO: 12832 - protein, 8 aa, Artificial Sequence
  Synthetic construct
STWNSGTI

SEQ ID NO: 12833 - protein, 7 aa, Artificial Sequence
  Synthetic construct
VNHSGST

SEQ ID NO: 12834 - protein, 7 aa, Artificial Sequence
  Synthetic construct
SGTGSDS

SEQ ID NO: 12835 - protein, 8 aa, Artificial Sequence
  Synthetic construct
VSGSSGFI

SEQ ID NO: 12836 - protein, 7 aa, Artificial Sequence
  Synthetic construct
IYHSGST

SEQ ID NO: 12837 - protein, 8 aa, Artificial Sequence
  Synthetic construct
ISAYDGHT

SEQ ID NO: 12838 - protein, 8 aa, Artificial Sequence
  Synthetic construct
IRSSSSTI

SEQ ID NO: 12839 - protein, 7 aa, Artificial Sequence
  Synthetic construct
IYSGGST

SEQ ID NO: 12840 - protein, 8 aa, Artificial Sequence
  Synthetic construct
ISGSGGST

SEQ ID NO: 12841 - protein, 8 aa, Artificial Sequence
  Synthetic construct
IRGSSGAI

SEQ ID NO: 12842 - protein, 8 aa, Artificial Sequence
  Synthetic construct
ISSDSSSK

SEQ ID NO: 12843 - protein, 8 aa, Artificial Sequence
  Synthetic construct
IIGMFGTT

SEQ ID NO: 12844 - protein, 8 aa, Artificial Sequence
  Synthetic construct
ISYDGSNK

SEQ ID NO: 12845 - protein, 8 aa, Artificial Sequence
  Synthetic construct
INPNSGVT

SEQ ID NO: 12846 - protein, 8 aa, Artificial Sequence
  Synthetic construct
ISYDGNNK

SEQ ID NO: 12847 - protein, 10 aa, Artificial Sequence
  Synthetic construct
IKSKSDGGTI

SEQ ID NO: 12848 - protein, 8 aa, Artificial Sequence
  Synthetic construct
ISYDGSNK

SEQ ID NO: 12849 - protein, 7 aa, Artificial Sequence
  Synthetic construct
IYYSGGT

SEQ ID NO: 12850 - protein, 8 aa, Artificial Sequence
  Synthetic construct
IIPIFGTA

SEQ ID NO: 12851 - protein, 7 aa, Artificial Sequence
  Synthetic construct
IYDSGST

SEQ ID NO: 12852 - protein, 7 aa, Artificial Sequence
  Synthetic construct
IYHSGNT

SEQ ID NO: 12853 - protein, 7 aa, Artificial Sequence
  Synthetic construct
INHSGST

SEQ ID NO: 12854 - protein, 8 aa, Artificial Sequence
  Synthetic construct
ITNSGDTI

SEQ ID NO: 12855 - protein, 8 aa, Artificial Sequence
  Synthetic construct
IYPDDSDT

SEQ ID NO: 12856 - protein, 7 aa, Artificial Sequence
  Synthetic construct
VYYSGST

SEQ ID NO: 12857 - protein, 10 aa, Artificial Sequence
  Synthetic construct
MKSKADGGTT

SEQ ID NO: 12858 - protein, 7 aa, Artificial Sequence
  Synthetic construct
LYYSGST

SEQ ID NO: 12859 - protein, 8 aa, Artificial Sequence
  Synthetic construct
IKQDGSEK

SEQ ID NO: 12860 - protein, 7 aa, Artificial Sequence
  Synthetic construct
IYSGGST

SEQ ID NO: 12861 - protein, 8 aa, Artificial Sequence
  Synthetic construct
IQPTSGVT

SEQ ID NO: 12862 - protein, 8 aa, Artificial Sequence
  Synthetic construct
IKEDGSDK

SEQ ID NO: 12863 - protein, 8 aa, Artificial Sequence
  Synthetic construct
ISYDGSVQ

SEQ ID NO: 12864 - protein, 8 aa, Artificial Sequence
  Synthetic construct
ISGYNGNT

SEQ ID NO: 12865 - protein, 7 aa, Artificial Sequence
  Synthetic construct
IQTSGSS

SEQ ID NO: 12866 - protein, 7 aa, Artificial Sequence
  Synthetic construct
IYTSGST

SEQ ID NO: 12867 - protein, 7 aa, Artificial Sequence
  Synthetic construct
IYSGGST

SEQ ID NO: 12868 - protein, 8 aa, Artificial Sequence
  Synthetic construct
ISAYNGNT

SEQ ID NO: 12869 - protein, 8 aa, Artificial Sequence
  Synthetic construct
IWHDGNNK

SEQ ID NO: 12870 - protein, 8 aa, Artificial Sequence
  Synthetic construct
IDPGDPYS

SEQ ID NO: 12871 - protein, 7 aa, Artificial Sequence
  Synthetic construct
LHHSGST

SEQ ID NO: 12872 - protein, 8 aa, Artificial Sequence
  Synthetic construct
ITPIFGAT

SEQ ID NO: 12873 - protein, 8 aa, Artificial Sequence
  Synthetic construct
ISFDGLNK

SEQ ID NO: 12874 - protein, 8 aa, Artificial Sequence
  Synthetic construct
INADNGHT

SEQ ID NO: 12875 - protein, 8 aa, Artificial Sequence
  Synthetic construct
ISSSSSTI

SEQ ID NO: 12876 - protein, 8 aa, Artificial Sequence
  Synthetic construct
ISYDGYNK

SEQ ID NO: 12877 - protein, 7 aa, Artificial Sequence
  Synthetic construct
IGTGGDT

SEQ ID NO: 12878 - protein, 8 aa, Artificial Sequence
  Synthetic construct
IDESGGFT

SEQ ID NO: 12879 - protein, 7 aa, Artificial Sequence
  Synthetic construct
IYTSGSI

SEQ ID NO: 12880 - protein, 7 aa, Artificial Sequence
  Synthetic construct
IHYTGST

SEQ ID NO: 12881 - protein, 8 aa, Artificial Sequence
  Synthetic construct
ISYDGSVQ

SEQ ID NO: 12882 - protein, 8 aa, Artificial Sequence
  Synthetic construct
IKQDGSEE

SEQ ID NO: 12883 - protein, 8 aa, Artificial Sequence
  Synthetic construct
ISSSSRTI

SEQ ID NO: 12884 - protein, 8 aa, Artificial Sequence
  Synthetic construct
IKRDGSEK

SEQ ID NO: 12885 - protein, 8 aa, Artificial Sequence
  Synthetic construct
ISAYNGNT

SEQ ID NO: 12886 - protein, 7 aa, Artificial Sequence
  Synthetic construct
IYYTGTT

SEQ ID NO: 12887 - protein, 8 aa, Artificial Sequence
  Synthetic construct
ISYDGSNK

SEQ ID NO: 12888 - protein, 8 aa, Artificial Sequence
  Synthetic construct
ISAYNGNT

SEQ ID NO: 12889 - protein, 8 aa, Artificial Sequence
  Synthetic construct
FDPEDGKT

SEQ ID NO: 12890 - protein, 7 aa, Artificial Sequence
  Synthetic construct
IFYSGST

SEQ ID NO: 12891 - protein, 7 aa, Artificial Sequence
  Synthetic construct
INHSGNT

SEQ ID NO: 12892 - protein, 8 aa, Artificial Sequence
  Synthetic construct
IIPIFGKG

SEQ ID NO: 12893 - protein, 7 aa, Artificial Sequence
  Synthetic construct
IYSGGST

SEQ ID NO: 12894 - protein, 8 aa, Artificial Sequence
  Synthetic construct
FDPEDAET

SEQ ID NO: 12895 - protein, 8 aa, Artificial Sequence
  Synthetic construct
VSFDGSNK

SEQ ID NO: 12896 - protein, 7 aa, Artificial Sequence
  Synthetic construct
IYWDGDK

SEQ ID NO: 12897 - protein, 7 aa, Artificial Sequence
  Synthetic construct
IYHSGST

SEQ ID NO: 12898 - protein, 7 aa, Artificial Sequence
  Synthetic construct
IYWDDDK

SEQ ID NO: 12899 - protein, 8 aa, Artificial Sequence
  Synthetic construct
ISGSGDRT

SEQ ID NO: 12900 - protein, 7 aa, Artificial Sequence
  Synthetic construct
IYYSGST

SEQ ID NO: 12901 - protein, 7 aa, Artificial Sequence
  Synthetic construct
IYHDGST

SEQ ID NO: 12902 - protein, 8 aa, Artificial Sequence
  Synthetic construct
ISGTGGAT

SEQ ID NO: 12903 - protein, 7 aa, Artificial Sequence
  Synthetic construct
IDWDDDK

SEQ ID NO: 12904 - protein, 8 aa, Artificial Sequence
  Synthetic construct
IIPIFGTT

SEQ ID NO: 12905 - protein, 8 aa, Artificial Sequence
  Synthetic construct
IKWDGSQI

SEQ ID NO: 12906 - protein, 7 aa, Artificial Sequence
  Synthetic construct
LNDSGRT

SEQ ID NO: 12907 - protein, 7 aa, Artificial Sequence
  Synthetic construct
MYYRGST

SEQ ID NO: 12908 - protein, 7 aa, Artificial Sequence
  Synthetic construct
IYSGGST

SEQ ID NO: 12909 - protein, 8 aa, Artificial Sequence
  Synthetic construct
INTDTGNP

SEQ ID NO: 12910 - protein, 7 aa, Artificial Sequence
  Synthetic construct
IYYSGST

SEQ ID NO: 12911 - protein, 8 aa, Artificial Sequence
  Synthetic construct
ISSSSSTI

SEQ ID NO: 12912 - protein, 7 aa, Artificial Sequence
  Synthetic construct
IYYTGST

SEQ ID NO: 12913 - protein, 8 aa, Artificial Sequence
  Synthetic construct
IEPDGSEK

SEQ ID NO: 12914 - protein, 7 aa, Artificial Sequence
  Synthetic construct
IYYSGST

SEQ ID NO: 12915 - protein, 7 aa, Artificial Sequence
  Synthetic construct
VNHSGST

SEQ ID NO: 12916 - protein, 7 aa, Artificial Sequence
  Synthetic construct
IYWDDDK

SEQ ID NO: 12917 - protein, 8 aa, Artificial Sequence
  Synthetic construct
ISGSGGST

SEQ ID NO: 12918 - protein, 8 aa, Artificial Sequence
  Synthetic construct
ISWNSGSI

SEQ ID NO: 12919 - protein, 8 aa, Artificial Sequence
  Synthetic construct
ISAYNGNT

SEQ ID NO: 12920 - protein, 8 aa, Artificial Sequence
  Synthetic construct
VYPGDSNT

SEQ ID NO: 12921 - protein, 7 aa, Artificial Sequence
  Synthetic construct
IYHGGST

SEQ ID NO: 12922 - protein, 8 aa, Artificial Sequence
  Synthetic construct
FDPEDGET

SEQ ID NO: 12923 - protein, 7 aa, Artificial Sequence
  Synthetic construct
IYPSGST

SEQ ID NO: 12924 - protein, 7 aa, Artificial Sequence
  Synthetic construct
IYHSGST

SEQ ID NO: 12925 - protein, 7 aa, Artificial Sequence
  Synthetic construct
IYYSGST

SEQ ID NO: 12926 - protein, 7 aa, Artificial Sequence
  Synthetic construct
MYTSGST

SEQ ID NO: 12927 - protein, 7 aa, Artificial Sequence
  Synthetic construct
IFYSGSA

SEQ ID NO: 12928 - protein, 7 aa, Artificial Sequence
  Synthetic construct
IYHSGDT

SEQ ID NO: 12929 - protein, 8 aa, Artificial Sequence
  Synthetic construct
ISSSGSTI

SEQ ID NO: 12930 - protein, 7 aa, Artificial Sequence
  Synthetic construct
IYSSGTT

SEQ ID NO: 12931 - protein, 8 aa, Artificial Sequence
  Synthetic construct
IIPLFGTA

SEQ ID NO: 12932 - protein, 8 aa, Artificial Sequence
  Synthetic construct
ISVGSTTI

SEQ ID NO: 12933 - protein, 8 aa, Artificial Sequence
  Synthetic construct
ISWNSGNK

SEQ ID NO: 12934 - protein, 8 aa, Artificial Sequence
  Synthetic construct
ISGSNGYI

SEQ ID NO: 12935 - protein, 8 aa, Artificial Sequence
  Synthetic construct
ISYDGDNK

SEQ ID NO: 12936 - protein, 7 aa, Artificial Sequence
  Synthetic construct
INHSGGT

SEQ ID NO: 12937 - protein, 8 aa, Artificial Sequence
  Synthetic construct
IIPFFGTA

SEQ ID NO: 12938 - protein, 8 aa, Artificial Sequence
  Synthetic construct
ISYDGSNK

SEQ ID NO: 12939 - protein, 7 aa, Artificial Sequence
  Synthetic construct
ISYSGNT

SEQ ID NO: 12940 - protein, 7 aa, Artificial Sequence
  Synthetic construct
VFTSGST

SEQ ID NO: 12941 - protein, 7 aa, Artificial Sequence
  Synthetic construct
IYYSGST

SEQ ID NO: 12942 - protein, 8 aa, Artificial Sequence
  Synthetic construct
IKQDGSEK

SEQ ID NO: 12943 - protein, 7 aa, Artificial Sequence
  Synthetic construct
ISHSGST

SEQ ID NO: 12944 - protein, 8 aa, Artificial Sequence
  Synthetic construct
ISGSGGST

SEQ ID NO: 12945 - protein, 8 aa, Artificial Sequence
  Synthetic construct
IYPGDSDT

SEQ ID NO: 12946 - protein, 8 aa, Artificial Sequence
  Synthetic construct
INAGNGNT

SEQ ID NO: 12947 - protein, 7 aa, Artificial Sequence
  Synthetic construct
IYYNGRT

SEQ ID NO: 12948 - protein, 8 aa, Artificial Sequence
  Synthetic construct
ISFHGRTK

SEQ ID NO: 12949 - protein, 7 aa, Artificial Sequence
  Synthetic construct
IDWDGDK

SEQ ID NO: 12950 - protein, 7 aa, Artificial Sequence
  Synthetic construct
TYGDNEL

SEQ ID NO: 12951 - protein, 8 aa, Artificial Sequence
  Synthetic construct
IWYDGSNK

SEQ ID NO: 12952 - protein, 8 aa, Artificial Sequence
  Synthetic construct
ISASGSAT

SEQ ID NO: 12953 - protein, 8 aa, Artificial Sequence
  Synthetic construct
ISAYNGNT

SEQ ID NO: 12954 - protein, 8 aa, Artificial Sequence
  Synthetic construct
ISYDGNNK

SEQ ID NO: 12955 - protein, 8 aa, Artificial Sequence
  Synthetic construct
INTYTGNP

SEQ ID NO: 12956 - protein, 8 aa, Artificial Sequence
  Synthetic construct
ISSSGSYI

SEQ ID NO: 12957 - protein, 8 aa, Artificial Sequence
  Synthetic construct
IIPVFGTV

SEQ ID NO: 12958 - protein, 8 aa, Artificial Sequence
  Synthetic construct
VSGTGATT

SEQ ID NO: 12959 - protein, 10 aa, Artificial Sequence
  Synthetic construct
IQRELDGGTT

SEQ ID NO: 12960 - protein, 7 aa, Artificial Sequence
  Synthetic construct
IYDSGST

SEQ ID NO: 12961 - protein, 7 aa, Artificial Sequence
  Synthetic construct
IYWDDDK

SEQ ID NO: 12962 - protein, 8 aa, Artificial Sequence
  Synthetic construct
ISSSSSYI

SEQ ID NO: 12963 - protein, 7 aa, Artificial Sequence
  Synthetic construct
ISYDGDI

SEQ ID NO: 12964 - protein, 8 aa, Artificial Sequence
  Synthetic construct
ISYDGSNK

SEQ ID NO: 12965 - protein, 8 aa, Artificial Sequence
  Synthetic construct
ISYDGSNK

SEQ ID NO: 12966 - protein, 10 aa, Artificial Sequence
  Synthetic construct
IKSQTAGGAR

SEQ ID NO: 12967 - protein, 8 aa, Artificial Sequence
  Synthetic construct
MTGSGTTT

SEQ ID NO: 12968 - protein, 8 aa, Artificial Sequence
  Synthetic construct
ISSNGVST

SEQ ID NO: 12969 - protein, 7 aa, Artificial Sequence
  Synthetic construct
IYSGGST

SEQ ID NO: 12970 - protein, 8 aa, Artificial Sequence
  Synthetic construct
ISSSSSTI

SEQ ID NO: 12971 - protein, 8 aa, Artificial Sequence
  Synthetic construct
IDPSDSYT

SEQ ID NO: 12972 - protein, 8 aa, Artificial Sequence
  Synthetic construct
ISGSGDRT

SEQ ID NO: 12973 - protein, 8 aa, Artificial Sequence
  Synthetic construct
IDPSDPYS

SEQ ID NO: 12974 - protein, 8 aa, Artificial Sequence
  Synthetic construct
IWPGGSEA

SEQ ID NO: 12975 - protein, 8 aa, Artificial Sequence
  Synthetic construct
INTNTGNP

SEQ ID NO: 12976 - protein, 7 aa, Artificial Sequence
  Synthetic construct
IYYSGSL

SEQ ID NO: 12977 - protein, 8 aa, Artificial Sequence
  Synthetic construct
IWFDGSNK

SEQ ID NO: 12978 - protein, 8 aa, Artificial Sequence
  Synthetic construct
INTNTESP

SEQ ID NO: 12979 - protein, 8 aa, Artificial Sequence
  Synthetic construct
ISGSDGRT

SEQ ID NO: 12980 - protein, 8 aa, Artificial Sequence
  Synthetic construct
INQDETEK

SEQ ID NO: 12981 - protein, 8 aa, Artificial Sequence
  Synthetic construct
INPSGGSA

SEQ ID NO: 12982 - protein, 7 aa, Artificial Sequence
  Synthetic construct
IFTSGST

SEQ ID NO: 12983 - protein, 10 aa, Artificial Sequence
  Synthetic construct
IKARSDGGTV

SEQ ID NO: 12984 - protein, 8 aa, Artificial Sequence
  Synthetic construct
ISAYNGNT

SEQ ID NO: 12985 - protein, 8 aa, Artificial Sequence
  Synthetic construct
IQPDGAAQ

SEQ ID NO: 12986 - protein, 8 aa, Artificial Sequence
  Synthetic construct
ISGSANYI

SEQ ID NO: 12987 - protein, 7 aa, Artificial Sequence
  Synthetic construct
IYHSENT

SEQ ID NO: 12988 - protein, 8 aa, Artificial Sequence
  Synthetic construct
ISSNGGGT

SEQ ID NO: 12989 - protein, 7 aa, Artificial Sequence
  Synthetic construct
INHSGST

SEQ ID NO: 12990 - protein, 7 aa, Artificial Sequence
  Synthetic construct
IYYSGST

SEQ ID NO: 12991 - protein, 7 aa, Artificial Sequence
  Synthetic construct
IYYIGSH

SEQ ID NO: 12992 - protein, 8 aa, Artificial Sequence
  Synthetic construct
ISYDGSNK

SEQ ID NO: 12993 - protein, 8 aa, Artificial Sequence
  Synthetic construct
ISGSGDST

SEQ ID NO: 12994 - protein, 8 aa, Artificial Sequence
  Synthetic construct
ISWYSGRI

SEQ ID NO: 12995 - protein, 7 aa, Artificial Sequence
  Synthetic construct
IYYIGST

SEQ ID NO: 12996 - protein, 8 aa, Artificial Sequence
  Synthetic construct
LSGSGNSA

SEQ ID NO: 12997 - protein, 7 aa, Artificial Sequence
  Synthetic construct
ITLGGGA

SEQ ID NO: 12998 - protein, 8 aa, Artificial Sequence
  Synthetic construct
IYPGDSDT

SEQ ID NO: 12999 - protein, 8 aa, Artificial Sequence
  Synthetic construct
ISSSRSYI

SEQ ID NO: 13000 - protein, 7 aa, Artificial Sequence
  Synthetic construct
INHSGGT

SEQ ID NO: 13001 - protein, 8 aa, Artificial Sequence
  Synthetic construct
ISAYNGDT

SEQ ID NO: 13002 - protein, 8 aa, Artificial Sequence
  Synthetic construct
ISYDGGDI

SEQ ID NO: 13003 - protein, 6 aa, Artificial Sequence
  Synthetic construct
VSSVST

SEQ ID NO: 13004 - protein, 8 aa, Artificial Sequence
  Synthetic construct
ISYDGSNK

SEQ ID NO: 13005 - protein, 8 aa, Artificial Sequence
  Synthetic construct
ISYDGSSN

SEQ ID NO: 13006 - protein, 7 aa, Artificial Sequence
  Synthetic construct
IYSTGST

SEQ ID NO: 13007 - protein, 8 aa, Artificial Sequence
  Synthetic construct
ISSSSSDK

SEQ ID NO: 13008 - protein, 8 aa, Artificial Sequence
  Synthetic construct
INPSAGST

SEQ ID NO: 13009 - protein, 8 aa, Artificial Sequence
  Synthetic construct
IRFDATEK

SEQ ID NO: 13010 - protein, 7 aa, Artificial Sequence
  Synthetic construct
IYYSGST

SEQ ID NO: 13011 - protein, 8 aa, Artificial Sequence
  Synthetic construct
ISSHGGST

SEQ ID NO: 13012 - protein, 8 aa, Artificial Sequence
  Synthetic construct
MNPNSGDT

SEQ ID NO: 13013 - protein, 7 aa, Artificial Sequence
  Synthetic construct
IYYSGST

SEQ ID NO: 13014 - protein, 7 aa, Artificial Sequence
  Synthetic construct
IYYSGAT

SEQ ID NO: 13015 - protein, 7 aa, Artificial Sequence
  Synthetic construct
IYYSGST

SEQ ID NO: 13016 - protein, 8 aa, Artificial Sequence
  Synthetic construct
IKQDGSDK

SEQ ID NO: 13017 - protein, 7 aa, Artificial Sequence
  Synthetic construct
IYTTGST

SEQ ID NO: 13018 - protein, 8 aa, Artificial Sequence
  Synthetic construct
ISNDGSIK

SEQ ID NO: 13019 - protein, 8 aa, Artificial Sequence
  Synthetic construct
ISNDGTDK

SEQ ID NO: 13020 - protein, 7 aa, Artificial Sequence
  Synthetic construct
IHHSGST

SEQ ID NO: 13021 - protein, 8 aa, Artificial Sequence
  Synthetic construct
INSNTGNP

SEQ ID NO: 13022 - protein, 8 aa, Artificial Sequence
  Synthetic construct
IKQDGSEK

SEQ ID NO: 13023 - protein, 8 aa, Artificial Sequence
  Synthetic construct
IWYDGSNE

SEQ ID NO: 13024 - protein, 8 aa, Artificial Sequence
  Synthetic construct
IVLGSGNT

SEQ ID NO: 13025 - protein, 7 aa, Artificial Sequence
  Synthetic construct
IYYSGST

SEQ ID NO: 13026 - protein, 8 aa, Artificial Sequence
  Synthetic construct
ISYDGSNT

SEQ ID NO: 13027 - protein, 7 aa, Artificial Sequence
  Synthetic construct
LYDSGRT

SEQ ID NO: 13028 - protein, 8 aa, Artificial Sequence
  Synthetic construct
TSYDGSDK

SEQ ID NO: 13029 - protein, 8 aa, Artificial Sequence
  Synthetic construct
ISGSRGWT

SEQ ID NO: 13030 - protein, 7 aa, Artificial Sequence
  Synthetic construct
IYYSGST

SEQ ID NO: 13031 - protein, 7 aa, Artificial Sequence
  Synthetic construct
IYSGGTT

SEQ ID NO: 13032 - protein, 8 aa, Artificial Sequence
  Synthetic construct
STWNSGTI

SEQ ID NO: 13033 - protein, 8 aa, Artificial Sequence
  Synthetic construct
IKGDEIET

SEQ ID NO: 13034 - protein, 8 aa, Artificial Sequence
  Synthetic construct
VIPMLGVA

SEQ ID NO: 13035 - protein, 7 aa, Artificial Sequence
  Synthetic construct
INHSGST

SEQ ID NO: 13036 - protein, 8 aa, Artificial Sequence
  Synthetic construct
ISGSGGST

SEQ ID NO: 13037 - protein, 10 aa, Artificial Sequence
  Synthetic construct
IEREGDGGTT

SEQ ID NO: 13038 - protein, 8 aa, Artificial Sequence
  Synthetic construct
ISYDGSNE

SEQ ID NO: 13039 - protein, 7 aa, Artificial Sequence
  Synthetic construct
IYFTGNT

SEQ ID NO: 13040 - protein, 8 aa, Artificial Sequence
  Synthetic construct
IISIFGIA

SEQ ID NO: 13041 - protein, 8 aa, Artificial Sequence
  Synthetic construct
IMPLFGTT

SEQ ID NO: 13042 - protein, 7 aa, Artificial Sequence
  Synthetic construct
IYTSGST

SEQ ID NO: 13043 - protein, 7 aa, Artificial Sequence
  Synthetic construct
VFHSGST

SEQ ID NO: 13044 - protein, 8 aa, Artificial Sequence
  Synthetic construct
VSYDGRNE

SEQ ID NO: 13045 - protein, 8 aa, Artificial Sequence
  Synthetic construct
ISYDGFDK

SEQ ID NO: 13046 - protein, 7 aa, Artificial Sequence
  Synthetic construct
IYYSGST

SEQ ID NO: 13047 - protein, 8 aa, Artificial Sequence
  Synthetic construct
FDPEDAET

SEQ ID NO: 13048 - protein, 8 aa, Artificial Sequence
  Synthetic construct
IGSSRSYT

SEQ ID NO: 13049 - protein, 7 aa, Artificial Sequence
  Synthetic construct
IYYTGTT

SEQ ID NO: 13050 - protein, 8 aa, Artificial Sequence
  Synthetic construct
IGGSGGKT

SEQ ID NO: 13051 - protein, 8 aa, Artificial Sequence
  Synthetic construct
IIPAFGTT

SEQ ID NO: 13052 - protein, 8 aa, Artificial Sequence
  Synthetic construct
INTNTGNP

SEQ ID NO: 13053 - protein, 8 aa, Artificial Sequence
  Synthetic construct
INTHTGNP

SEQ ID NO: 13054 - protein, 10 aa, Artificial Sequence
  Synthetic construct
IRSKAYGGTT

SEQ ID NO: 13055 - protein, 8 aa, Artificial Sequence
  Synthetic construct
ISYDGSIQ

SEQ ID NO: 13056 - protein, 8 aa, Artificial Sequence
  Synthetic construct
ITWNGGIL

SEQ ID NO: 13057 - protein, 8 aa, Artificial Sequence
  Synthetic construct
ISYDGSNK

SEQ ID NO: 13058 - protein, 8 aa, Artificial Sequence
  Synthetic construct
IGSTNGDT

SEQ ID NO: 13059 - protein, 8 aa, Artificial Sequence
  Synthetic construct
ISYDGINK

SEQ ID NO: 13060 - protein, 7 aa, Artificial Sequence
  Synthetic construct
IFYSGST

SEQ ID NO: 13061 - protein, 8 aa, Artificial Sequence
  Synthetic construct
VIPIIGMT

SEQ ID NO: 13062 - protein, 7 aa, Artificial Sequence
  Synthetic construct
IYAGGST

SEQ ID NO: 13063 - protein, 8 aa, Artificial Sequence
  Synthetic construct
ISAYNGNT

SEQ ID NO: 13064 - protein, 8 aa, Artificial Sequence
  Synthetic construct
ISSSSSYI

SEQ ID NO: 13065 - protein, 8 aa, Artificial Sequence
  Synthetic construct
MSYDGSVQ

SEQ ID NO: 13066 - protein, 8 aa, Artificial Sequence
  Synthetic construct
INSRGYTM

SEQ ID NO: 13067 - protein, 7 aa, Artificial Sequence
  Synthetic construct
IYTSGRT

SEQ ID NO: 13068 - protein, 7 aa, Artificial Sequence
  Synthetic construct
IYYTGII

SEQ ID NO: 13069 - protein, 8 aa, Artificial Sequence
  Synthetic construct
IDPSDPYS

SEQ ID NO: 13070 - protein, 8 aa, Artificial Sequence
  Synthetic construct
INPSGGST

SEQ ID NO: 13071 - protein, 7 aa, Artificial Sequence
  Synthetic construct
VSYSGST

SEQ ID NO: 13072 - protein, 8 aa, Artificial Sequence
  Synthetic construct
IIPIFGAT

SEQ ID NO: 13073 - protein, 7 aa, Artificial Sequence
  Synthetic construct
IYRSGGT

SEQ ID NO: 13074 - protein, 8 aa, Artificial Sequence
  Synthetic construct
ISGYNGKT

SEQ ID NO: 13075 - protein, 8 aa, Artificial Sequence
  Synthetic construct
INQDGSEK

SEQ ID NO: 13076 - protein, 8 aa, Artificial Sequence
  Synthetic construct
ISSSRSTI

SEQ ID NO: 13077 - protein, 7 aa, Artificial Sequence
  Synthetic construct
IYWDDDE

SEQ ID NO: 13078 - protein, 7 aa, Artificial Sequence
  Synthetic construct
IYSTGST

SEQ ID NO: 13079 - protein, 8 aa, Artificial Sequence
  Synthetic construct
ISGTGTST

SEQ ID NO: 13080 - protein, 7 aa, Artificial Sequence
  Synthetic construct
IYYSGST

SEQ ID NO: 13081 - protein, 7 aa, Artificial Sequence
  Synthetic construct
VHGSGIT

SEQ ID NO: 13082 - protein, 8 aa, Artificial Sequence
  Synthetic construct
ISYDGSVQ

SEQ ID NO: 13083 - protein, 8 aa, Artificial Sequence
  Synthetic construct
ISYDGSNK

SEQ ID NO: 13084 - protein, 8 aa, Artificial Sequence
  Synthetic construct
ISYDGSDK

SEQ ID NO: 13085 - protein, 8 aa, Artificial Sequence
  Synthetic construct
IGGSGDNT

SEQ ID NO: 13086 - protein, 7 aa, Artificial Sequence
  Synthetic construct
LDYSGIT

SEQ ID NO: 13087 - protein, 7 aa, Artificial Sequence
  Synthetic construct
IYTSGST

SEQ ID NO: 13088 - protein, 8 aa, Artificial Sequence
  Synthetic construct
INTKTGNP

SEQ ID NO: 13089 - protein, 7 aa, Artificial Sequence
  Synthetic construct
IYWDDDK

SEQ ID NO: 13090 - protein, 8 aa, Artificial Sequence
  Synthetic construct
ISHDGSNK

SEQ ID NO: 13091 - protein, 7 aa, Artificial Sequence
  Synthetic construct
IYYSGST

SEQ ID NO: 13092 - protein, 8 aa, Artificial Sequence
  Synthetic construct
IKHDGSEK

SEQ ID NO: 13093 - protein, 7 aa, Artificial Sequence
  Synthetic construct
IYSGGST

SEQ ID NO: 13094 - protein, 8 aa, Artificial Sequence
  Synthetic construct
ISSSSSTI

SEQ ID NO: 13095 - protein, 7 aa, Artificial Sequence
  Synthetic construct
THYDGST

SEQ ID NO: 13096 - protein, 8 aa, Artificial Sequence
  Synthetic construct
ISYDGSTK

SEQ ID NO: 13097 - protein, 8 aa, Artificial Sequence
  Synthetic construct
INTNTGDP

SEQ ID NO: 13098 - protein, 7 aa, Artificial Sequence
  Synthetic construct
IYPGGST

SEQ ID NO: 13099 - protein, 8 aa, Artificial Sequence
  Synthetic construct
ISYDGSNK

SEQ ID NO: 13100 - protein, 7 aa, Artificial Sequence
  Synthetic construct
VFWDGDK

SEQ ID NO: 13101 - protein, 8 aa, Artificial Sequence
  Synthetic construct
IVGMFGTT

SEQ ID NO: 13102 - protein, 7 aa, Artificial Sequence
  Synthetic construct
IHYSGSP

SEQ ID NO: 13103 - protein, 8 aa, Artificial Sequence
  Synthetic construct
ISYDGPNK

SEQ ID NO: 13104 - protein, 8 aa, Artificial Sequence
  Synthetic construct
ISHDARNK

SEQ ID NO: 13105 - protein, 8 aa, Artificial Sequence
  Synthetic construct
IKQDGSEK

SEQ ID NO: 13106 - protein, 7 aa, Artificial Sequence
  Synthetic construct
IYYSGST

SEQ ID NO: 13107 - protein, 8 aa, Artificial Sequence
  Synthetic construct
IWNDGRNK

SEQ ID NO: 13108 - protein, 8 aa, Artificial Sequence
  Synthetic construct
ISGSGGST

SEQ ID NO: 13109 - protein, 8 aa, Artificial Sequence
  Synthetic construct
ISGSGNST

SEQ ID NO: 13110 - protein, 8 aa, Artificial Sequence
  Synthetic construct
ISSSSSYI

SEQ ID NO: 13111 - protein, 8 aa, Artificial Sequence
  Synthetic construct
ISNSGSDT

SEQ ID NO: 13112 - protein, 8 aa, Artificial Sequence
  Synthetic construct
LSSNGNSA

SEQ ID NO: 13113 - protein, 7 aa, Artificial Sequence
  Synthetic construct
VNHSGST

SEQ ID NO: 13114 - protein, 8 aa, Artificial Sequence
  Synthetic construct
MSYDGTSK

SEQ ID NO: 13115 - protein, 7 aa, Artificial Sequence
  Synthetic construct
IGTSGDT

SEQ ID NO: 13116 - protein, 7 aa, Artificial Sequence
  Synthetic construct
IYYSGTT

SEQ ID NO: 13117 - protein, 8 aa, Artificial Sequence
  Synthetic construct
ISGSGGSR

SEQ ID NO: 13118 - protein, 8 aa, Artificial Sequence
  Synthetic construct
IYPGDSDT

SEQ ID NO: 13119 - protein, 8 aa, Artificial Sequence
  Synthetic construct
ISYDGSVQ

SEQ ID NO: 13120 - protein, 8 aa, Artificial Sequence
  Synthetic construct
INTNTGNP

SEQ ID NO: 13121 - protein, 8 aa, Artificial Sequence
  Synthetic construct
IIPIFGST

SEQ ID NO: 13122 - protein, 8 aa, Artificial Sequence
  Synthetic construct
VFPGDSDT

SEQ ID NO: 13123 - protein, 7 aa, Artificial Sequence
  Synthetic construct
IYHSGST

SEQ ID NO: 13124 - protein, 8 aa, Artificial Sequence
  Synthetic construct
IWSDGSNK

SEQ ID NO: 13125 - protein, 8 aa, Artificial Sequence
  Synthetic construct
INPDTGNP

SEQ ID NO: 13126 - protein, 7 aa, Artificial Sequence
  Synthetic construct
IYSGGST

SEQ ID NO: 13127 - protein, 8 aa, Artificial Sequence
  Synthetic construct
IWFDGSNK

SEQ ID NO: 13128 - protein, 7 aa, Artificial Sequence
  Synthetic construct
IYTDGSA

SEQ ID NO: 13129 - protein, 8 aa, Artificial Sequence
  Synthetic construct
ISSSSSFI

SEQ ID NO: 13130 - protein, 8 aa, Artificial Sequence
  Synthetic construct
ITWNGGIL

SEQ ID NO: 13131 - protein, 8 aa, Artificial Sequence
  Synthetic construct
IDPSDPYS

SEQ ID NO: 13132 - protein, 7 aa, Artificial Sequence
  Synthetic construct
IYYSGDT

SEQ ID NO: 13133 - protein, 8 aa, Artificial Sequence
  Synthetic construct
ISYDGSNK

SEQ ID NO: 13134 - protein, 8 aa, Artificial Sequence
  Synthetic construct
ISFDGSNK

SEQ ID NO: 13135 - protein, 8 aa, Artificial Sequence
  Synthetic construct
IVGMFGTT

SEQ ID NO: 13136 - protein, 8 aa, Artificial Sequence
  Synthetic construct
INVHGSEK

SEQ ID NO: 13137 - protein, 8 aa, Artificial Sequence
  Synthetic construct
ISFDGSNK

SEQ ID NO: 13138 - protein, 7 aa, Artificial Sequence
  Synthetic construct
IYYSGTT

SEQ ID NO: 13139 - protein, 7 aa, Artificial Sequence
  Synthetic construct
IYWDEDV

SEQ ID NO: 13140 - protein, 7 aa, Artificial Sequence
  Synthetic construct
INHSGST

SEQ ID NO: 13141 - protein, 8 aa, Artificial Sequence
  Synthetic construct
ISYDGSDK

SEQ ID NO: 13142 - protein, 8 aa, Artificial Sequence
  Synthetic construct
INPDTGNP

SEQ ID NO: 13143 - protein, 9 aa, Artificial Sequence
  Synthetic construct
TYYRSKWYN

SEQ ID NO: 13144 - protein, 8 aa, Artificial Sequence
  Synthetic construct
IIPIFGAA

SEQ ID NO: 13145 - protein, 8 aa, Artificial Sequence
  Synthetic construct
FDPEDGET

SEQ ID NO: 13146 - protein, 7 aa, Artificial Sequence
  Synthetic construct
IYSGGTT

SEQ ID NO: 13147 - protein, 8 aa, Artificial Sequence
  Synthetic construct
ISYDGSNK

SEQ ID NO: 13148 - protein, 8 aa, Artificial Sequence
  Synthetic construct
INAGNGNT

SEQ ID NO: 13149 - protein, 7 aa, Artificial Sequence
  Synthetic construct
IYHSGNT

SEQ ID NO: 13150 - protein, 8 aa, Artificial Sequence
  Synthetic construct
ISSNGGST

SEQ ID NO: 13151 - protein, 8 aa, Artificial Sequence
  Synthetic construct
IDVRGGGT

SEQ ID NO: 13152 - protein, 8 aa, Artificial Sequence
  Synthetic construct
ISPYNGNT

SEQ ID NO: 13153 - protein, 8 aa, Artificial Sequence
  Synthetic construct
ISYDGNNK

SEQ ID NO: 13154 - protein, 7 aa, Artificial Sequence
  Synthetic construct
LHSSGRT

SEQ ID NO: 13155 - protein, 8 aa, Artificial Sequence
  Synthetic construct
IQPSGGIT

SEQ ID NO: 13156 - protein, 8 aa, Artificial Sequence
  Synthetic construct
IIPIFGTP

SEQ ID NO: 13157 - protein, 8 aa, Artificial Sequence
  Synthetic construct
IWYDGRNK

SEQ ID NO: 13158 - protein, 8 aa, Artificial Sequence
  Synthetic construct
VSAYNGAT

SEQ ID NO: 13159 - protein, 8 aa, Artificial Sequence
  Synthetic construct
IDTNTGNP

SEQ ID NO: 13160 - protein, 7 aa, Artificial Sequence
  Synthetic construct
IYTSGST

SEQ ID NO: 13161 - protein, 8 aa, Artificial Sequence
  Synthetic construct
IDPSDSFT

SEQ ID NO: 13162 - protein, 8 aa, Artificial Sequence
  Synthetic construct
INSDGSST

SEQ ID NO: 13163 - protein, 7 aa, Artificial Sequence
  Synthetic construct
IYWDDDK

SEQ ID NO: 13164 - protein, 7 aa, Artificial Sequence
  Synthetic construct
ISRGGTT

SEQ ID NO: 13165 - protein, 8 aa, Artificial Sequence
  Synthetic construct
IYPADSNT

SEQ ID NO: 13166 - protein, 8 aa, Artificial Sequence
  Synthetic construct
ISYDGTIK

SEQ ID NO: 13167 - protein, 8 aa, Artificial Sequence
  Synthetic construct
ISAYNGNT

SEQ ID NO: 13168 - protein, 8 aa, Artificial Sequence
  Synthetic construct
ISYDGSNK

SEQ ID NO: 13169 - protein, 7 aa, Artificial Sequence
  Synthetic construct
IYHSGST

SEQ ID NO: 13170 - protein, 8 aa, Artificial Sequence
  Synthetic construct
IATYSASA

SEQ ID NO: 13171 - protein, 7 aa, Artificial Sequence
  Synthetic construct
IFYTGTT

SEQ ID NO: 13172 - protein, 8 aa, Artificial Sequence
  Synthetic construct
IDYGSNII

SEQ ID NO: 13173 - protein, 8 aa, Artificial Sequence
  Synthetic construct
IISIFGIA

SEQ ID NO: 13174 - protein, 8 aa, Artificial Sequence
  Synthetic construct
INTNTGDP

SEQ ID NO: 13175 - protein, 8 aa, Artificial Sequence
  Synthetic construct
INTNTGNP

SEQ ID NO: 13176 - protein, 8 aa, Artificial Sequence
  Synthetic construct
ISNSGSSI

SEQ ID NO: 13177 - protein, 8 aa, Artificial Sequence
  Synthetic construct
IIPIFGTA

SEQ ID NO: 13178 - protein, 10 aa, Artificial Sequence
  Synthetic construct
IRSKANSDAT

SEQ ID NO: 13179 - protein, 8 aa, Artificial Sequence
  Synthetic construct
ISSSSSTI

SEQ ID NO: 13180 - protein, 8 aa, Artificial Sequence
  Synthetic construct
INPSGGST

SEQ ID NO: 13181 - protein, 8 aa, Artificial Sequence
  Synthetic construct
IWFDGSNK

SEQ ID NO: 13182 - protein, 8 aa, Artificial Sequence
  Synthetic construct
IDAPGSST

SEQ ID NO: 13183 - protein, 7 aa, Artificial Sequence
  Synthetic construct
INHIGNT

SEQ ID NO: 13184 - protein, 7 aa, Artificial Sequence
  Synthetic construct
IYHSGNT

SEQ ID NO: 13185 - protein, 7 aa, Artificial Sequence
  Synthetic construct
LDYSGIT

SEQ ID NO: 13186 - protein, 7 aa, Artificial Sequence
  Synthetic construct
IFGGGST

SEQ ID NO: 13187 - protein, 8 aa, Artificial Sequence
  Synthetic construct
ISPSGAST

SEQ ID NO: 13188 - protein, 7 aa, Artificial Sequence
  Synthetic construct
GYSSGTT

SEQ ID NO: 13189 - protein, 8 aa, Artificial Sequence
  Synthetic construct
IIPTLDVP

SEQ ID NO: 13190 - protein, 8 aa, Artificial Sequence
  Synthetic construct
ISSDGSNK

SEQ ID NO: 13191 - protein, 7 aa, Artificial Sequence
  Synthetic construct
IYYSGST

SEQ ID NO: 13192 - protein, 8 aa, Artificial Sequence
  Synthetic construct
IWSDGSNK

SEQ ID NO: 13193 - protein, 8 aa, Artificial Sequence
  Synthetic construct
IIPMFGTT

SEQ ID NO: 13194 - protein, 7 aa, Artificial Sequence
  Synthetic construct
IYSSGST

SEQ ID NO: 13195 - protein, 8 aa, Artificial Sequence
  Synthetic construct
INTNTGNP

SEQ ID NO: 13196 - protein, 8 aa, Artificial Sequence
  Synthetic construct
IIPILGIP

SEQ ID NO: 13197 - protein, 8 aa, Artificial Sequence
  Synthetic construct
ISAYNGST

SEQ ID NO: 13198 - protein, 8 aa, Artificial Sequence
  Synthetic construct
ISDSSSYV

SEQ ID NO: 13199 - protein, 8 aa, Artificial Sequence
  Synthetic construct
VSGGNGDT

SEQ ID NO: 13200 - protein, 8 aa, Artificial Sequence
  Synthetic construct
ISSSNYYI

SEQ ID NO: 13201 - protein, 8 aa, Artificial Sequence
  Synthetic construct
FDPEDGER

SEQ ID NO: 13202 - protein, 7 aa, Artificial Sequence
  Synthetic construct
IGTAGDA

SEQ ID NO: 13203 - protein, 8 aa, Artificial Sequence
  Synthetic construct
ISYDGSNK

SEQ ID NO: 13204 - protein, 8 aa, Artificial Sequence
  Synthetic construct
IDYGSNII

SEQ ID NO: 13205 - protein, 8 aa, Artificial Sequence
  Synthetic construct
ISYDGTNK

SEQ ID NO: 13206 - protein, 8 aa, Artificial Sequence
  Synthetic construct
INAGNDNT

SEQ ID NO: 13207 - protein, 8 aa, Artificial Sequence
  Synthetic construct
STWNSGTI

SEQ ID NO: 13208 - protein, 7 aa, Artificial Sequence
  Synthetic construct
MYYSGSP

SEQ ID NO: 13209 - protein, 8 aa, Artificial Sequence
  Synthetic construct
STWNSGTI

SEQ ID NO: 13210 - protein, 7 aa, Artificial Sequence
  Synthetic construct
IYWDDDK

SEQ ID NO: 13211 - protein, 7 aa, Artificial Sequence
  Synthetic construct
INYAGST

SEQ ID NO: 13212 - protein, 8 aa, Artificial Sequence
  Synthetic construct
INTNTGNP

SEQ ID NO: 13213 - protein, 8 aa, Artificial Sequence
  Synthetic construct
IWYDGSNE

SEQ ID NO: 13214 - protein, 8 aa, Artificial Sequence
  Synthetic construct
INTNTGDP

SEQ ID NO: 13215 - protein, 7 aa, Artificial Sequence
  Synthetic construct
IYTSGST

SEQ ID NO: 13216 - protein, 10 aa, Artificial Sequence
  Synthetic construct
IRSKAYGGTT

SEQ ID NO: 13217 - protein, 8 aa, Artificial Sequence
  Synthetic construct
FSARTGGT

SEQ ID NO: 13218 - protein, 8 aa, Artificial Sequence
  Synthetic construct
INTNTGNP

SEQ ID NO: 13219 - protein, 8 aa, Artificial Sequence
  Synthetic construct
INTNTGNP

SEQ ID NO: 13220 - protein, 8 aa, Artificial Sequence
  Synthetic construct
ISSSNYYI

SEQ ID NO: 13221 - protein, 8 aa, Artificial Sequence
  Synthetic construct
ISSSGGST

SEQ ID NO: 13222 - protein, 8 aa, Artificial Sequence
  Synthetic construct
ISTDGIRT

SEQ ID NO: 13223 - protein, 8 aa, Artificial Sequence
  Synthetic construct
ISYDGSNK

SEQ ID NO: 13224 - protein, 7 aa, Artificial Sequence
  Synthetic construct
VYSSGTT

SEQ ID NO: 13225 - protein, 7 aa, Artificial Sequence
  Synthetic construct
IYYSGST

SEQ ID NO: 13226 - protein, 8 aa, Artificial Sequence
  Synthetic construct
ISAYNGNT

SEQ ID NO: 13227 - protein, 8 aa, Artificial Sequence
  Synthetic construct
INAGNGDT

SEQ ID NO: 13228 - protein, 8 aa, Artificial Sequence
  Synthetic construct
ISYDGSNK

SEQ ID NO: 13229 - protein, 10 aa, Artificial Sequence
  Synthetic construct
IKSKTDGGTT

SEQ ID NO: 13230 - protein, 7 aa, Artificial Sequence
  Synthetic construct
IYWDDDK

SEQ ID NO: 13231 - protein, 8 aa, Artificial Sequence
  Synthetic construct
ISTNGGGT

SEQ ID NO: 13232 - protein, 7 aa, Artificial Sequence
  Synthetic construct
LHSSGRT

SEQ ID NO: 13233 - protein, 8 aa, Artificial Sequence
  Synthetic construct
ISYDGSNK

SEQ ID NO: 13234 - protein, 7 aa, Artificial Sequence
  Synthetic construct
INHSGST

SEQ ID NO: 13235 - protein, 8 aa, Artificial Sequence
  Synthetic construct
INPNSGVT

SEQ ID NO: 13236 - protein, 8 aa, Artificial Sequence
  Synthetic construct
ISGRGDST

SEQ ID NO: 13237 - protein, 8 aa, Artificial Sequence
  Synthetic construct
ISSSSTTI

SEQ ID NO: 13238 - protein, 7 aa, Artificial Sequence
  Synthetic construct
IYYSGST

SEQ ID NO: 13239 - protein, 8 aa, Artificial Sequence
  Synthetic construct
ISGSGDIT

SEQ ID NO: 13240 - protein, 8 aa, Artificial Sequence
  Synthetic construct
IYPGDSDT

SEQ ID NO: 13241 - protein, 8 aa, Artificial Sequence
  Synthetic construct
IIPIFGTA

SEQ ID NO: 13242 - protein, 8 aa, Artificial Sequence
  Synthetic construct
ISPHNGNT

SEQ ID NO: 13243 - protein, 8 aa, Artificial Sequence
  Synthetic construct
ISISGGST

SEQ ID NO: 13244 - protein, 8 aa, Artificial Sequence
  Synthetic construct
VSYDGSNE

SEQ ID NO: 13245 - protein, 8 aa, Artificial Sequence
  Synthetic construct
INPSGSIT

SEQ ID NO: 13246 - protein, 8 aa, Artificial Sequence
  Synthetic construct
ISGSSDST

SEQ ID NO: 13247 - protein, 8 aa, Artificial Sequence
  Synthetic construct
INTNTGNP

SEQ ID NO: 13248 - protein, 8 aa, Artificial Sequence
  Synthetic construct
IDTNTGNP

SEQ ID NO: 13249 - protein, 8 aa, Artificial Sequence
  Synthetic construct
IWYDGSNK

SEQ ID NO: 13250 - protein, 7 aa, Artificial Sequence
  Synthetic construct
IFYAGST

SEQ ID NO: 13251 - protein, 7 aa, Artificial Sequence
  Synthetic construct
IFYNGDT

SEQ ID NO: 13252 - protein, 8 aa, Artificial Sequence
  Synthetic construct
ISYDGSNK

SEQ ID NO: 13253 - protein, 8 aa, Artificial Sequence
  Synthetic construct
ISFDGINK

SEQ ID NO: 13254 - protein, 7 aa, Artificial Sequence
  Synthetic construct
SNHSGGT

SEQ ID NO: 13255 - protein, 15 aa, Artificial Sequence
  Synthetic construct
ARELVRSEGTAGFDY

SEQ ID NO: 13256 - protein, 14 aa, Artificial Sequence
  Synthetic construct
AREGAVGATSGLDY

SEQ ID NO: 13257 - protein, 10 aa, Artificial Sequence
  Synthetic construct
ARGPGDNLDY

SEQ ID NO: 13258 - protein, 17 aa, Artificial Sequence
  Synthetic construct
ARRGRYCSSTSCLEIDY

SEQ ID NO: 13259 - protein, 12 aa, Artificial Sequence
  Synthetic construct
ARVNPVGGGPDY

SEQ ID NO: 13260 - protein, 13 aa, Artificial Sequence
  Synthetic construct
ARGWIGYQLICAY

SEQ ID NO: 13261 - protein, 23 aa, Artificial Sequence
  Synthetic construct
ARDHRDYYDSGTSYYIGENGLDP

SEQ ID NO: 13262 - protein, 21 aa, Artificial Sequence
  Synthetic construct
AKAHSSSWYNPLFHPSDAFDI

SEQ ID NO: 13263 - protein, 20 aa, Artificial Sequence
  Synthetic construct
AKEGAAAGQKTYYYYYYMDV

SEQ ID NO: 13264 - protein, 9 aa, Artificial Sequence
  Synthetic construct
ARVIQHLDS

SEQ ID NO: 13265 - protein, 13 aa, Artificial Sequence
  Synthetic construct
ARVAASVGYCFDY

SEQ ID NO: 13266 - protein, 20 aa, Artificial Sequence
  Synthetic construct
ARDALPYYDFWNGPQGAFDI

SEQ ID NO: 13267 - protein, 12 aa, Artificial Sequence
  Synthetic construct
ARDGEQRGWLDP

SEQ ID NO: 13268 - protein, 15 aa, Artificial Sequence
  Synthetic construct
VKDRNPYDILSGLDY

SEQ ID NO: 13269 - protein, 15 aa, Artificial Sequence
  Synthetic construct
ARDAISYGDYVSGDY

SEQ ID NO: 13270 - protein, 16 aa, Artificial Sequence
  Synthetic construct
ARDRRDSSSRYAGFDP

SEQ ID NO: 13271 - protein, 22 aa, Artificial Sequence
  Synthetic construct
ARAPGGGYCTNGVCYDAEYFQN

SEQ ID NO: 13272 - protein, 12 aa, Artificial Sequence
  Synthetic construct
ARGEAYDNYEDY

SEQ ID NO: 13273 - protein, 13 aa, Artificial Sequence
  Synthetic construct
ARVSFGEILPADY

SEQ ID NO: 13274 - protein, 16 aa, Artificial Sequence
  Synthetic construct
AKTSGSYGYYYSGMDV

SEQ ID NO: 13275 - protein, 15 aa, Artificial Sequence
  Synthetic construct
ARGLAVAGTGAAFDI

SEQ ID NO: 13276 - protein, 9 aa, Artificial Sequence
  Synthetic construct
ARDSGDFDY

SEQ ID NO: 13277 - protein, 18 aa, Artificial Sequence
  Synthetic construct
AKAPTDSSGWYTPGTFES

SEQ ID NO: 13278 - protein, 17 aa, Artificial Sequence
  Synthetic construct
ATGPPYYSESSGGWFDP

SEQ ID NO: 13279 - protein, 24 aa, Artificial Sequence
  Synthetic construct
ARDPASYYDLWSGYVDYYYYGMDV

SEQ ID NO: 13280 - protein, 11 aa, Artificial Sequence
  Synthetic construct
AREGLLQRIDY

SEQ ID NO: 13281 - protein, 17 aa, Artificial Sequence
  Synthetic construct
ATDIGSAHSGTSFYMDV

SEQ ID NO: 13282 - protein, 10 aa, Artificial Sequence
  Synthetic construct
THYSNYVFWY

SEQ ID NO: 13283 - protein, 17 aa, Artificial Sequence
  Synthetic construct
ARVRMQLPLYHYYGMDV

SEQ ID NO: 13284 - protein, 17 aa, Artificial Sequence
  Synthetic construct
AREHVTAVAGTTYTMDV

SEQ ID NO: 13285 - protein, 15 aa, Artificial Sequence
  Synthetic construct
ARDDGSGLHNYYMDV

SEQ ID NO: 13286 - protein, 9 aa, Artificial Sequence
  Synthetic construct
AKGATKIDF

SEQ ID NO: 13287 - protein, 19 aa, Artificial Sequence
  Synthetic construct
ARAELGLVPATIGSNAFDI

SEQ ID NO: 13288 - protein, 12 aa, Artificial Sequence
  Synthetic construct
ARDRLGNAPFDI

SEQ ID NO: 13289 - protein, 13 aa, Artificial Sequence
  Synthetic construct
ARDRGNNTYWFDP

SEQ ID NO: 13290 - protein, 16 aa, Artificial Sequence
  Synthetic construct
AKDRGSYSGKYFGLGK

SEQ ID NO: 13291 - protein, 15 aa, Artificial Sequence
  Synthetic construct
ARYVTGYSRDDAFDI

SEQ ID NO: 13292 - protein, 18 aa, Artificial Sequence
  Synthetic construct
ARGDLLLWFGELSPNFDY

SEQ ID NO: 13293 - protein, 20 aa, Artificial Sequence
  Synthetic construct
ARETIWERHFDWLLSPFFDY

SEQ ID NO: 13294 - protein, 20 aa, Artificial Sequence
  Synthetic construct
ARIWEGIEQLPGYYYFGMDV

SEQ ID NO: 13295 - protein, 18 aa, Artificial Sequence
  Synthetic construct
ATQPGAVTITYYYYGMDV

SEQ ID NO: 13296 - protein, 19 aa, Artificial Sequence
  Synthetic construct
ARDSVVVAAQNSVFYGMDV

SEQ ID NO: 13297 - protein, 13 aa, Artificial Sequence
  Synthetic construct
TKGPAFSESYSEV

SEQ ID NO: 13298 - protein, 14 aa, Artificial Sequence
  Synthetic construct
ARPRGHTYGTRFDY

SEQ ID NO: 13299 - protein, 8 aa, Artificial Sequence
  Synthetic construct
ASTYKGAY

SEQ ID NO: 13300 - protein, 18 aa, Artificial Sequence
  Synthetic construct
ARVGYRLLLGSYYYYLDV

SEQ ID NO: 13301 - protein, 13 aa, Artificial Sequence
  Synthetic construct
ARDRGNNTYWFDP

SEQ ID NO: 13302 - protein, 12 aa, Artificial Sequence
  Synthetic construct
ARAIWALWYFDL

SEQ ID NO: 13303 - protein, 18 aa, Artificial Sequence
  Synthetic construct
AREMGYSSSSSATYYFDY

SEQ ID NO: 13304 - protein, 14 aa, Artificial Sequence
  Synthetic construct
ARDLGLGVGCGMDV

SEQ ID NO: 13305 - protein, 14 aa, Artificial Sequence
  Synthetic construct
TTTSPLTTPAWFDP

SEQ ID NO: 13306 - protein, 18 aa, Artificial Sequence
  Synthetic construct
ATGRRRLLTGYLDIMNDY

SEQ ID NO: 13307 - protein, 18 aa, Artificial Sequence
  Synthetic construct
AKVAAWYGYESSGYYYDY

SEQ ID NO: 13308 - protein, 18 aa, Artificial Sequence
  Synthetic construct
ARDHEGSRPVYYYYAMDV

SEQ ID NO: 13309 - protein, 12 aa, Artificial Sequence
  Synthetic construct
AATYYYLGSLDI

SEQ ID NO: 13310 - protein, 15 aa, Artificial Sequence
  Synthetic construct
ARGQGSGWKAYAFDI

SEQ ID NO: 13311 - protein, 14 aa, Artificial Sequence
  Synthetic construct
ARGRIMGATFSFDP

SEQ ID NO: 13312 - protein, 18 aa, Artificial Sequence
  Synthetic construct
ARGRDSSGLDFYYSGLDV

SEQ ID NO: 13313 - protein, 22 aa, Artificial Sequence
  Synthetic construct
ARDSFRGVGVTAMDYYFYGMDV

SEQ ID NO: 13314 - protein, 18 aa, Artificial Sequence
  Synthetic construct
VRAEGVNLVRAVIGAFDI

SEQ ID NO: 13315 - protein, 14 aa, Artificial Sequence
  Synthetic construct
ARHRYNNGHYYMDV

SEQ ID NO: 13316 - protein, 18 aa, Artificial Sequence
  Synthetic construct
ARGRPNYGADLDLLAFDV

SEQ ID NO: 13317 - protein, 10 aa, Artificial Sequence
  Synthetic construct
AKDSSGIPDY

SEQ ID NO: 13318 - protein, 15 aa, Artificial Sequence
  Synthetic construct
ARDFEEMATIRPFDY

SEQ ID NO: 13319 - protein, 11 aa, Artificial Sequence
  Synthetic construct
AAGLGHWYFDL

SEQ ID NO: 13320 - protein, 16 aa, Artificial Sequence
  Synthetic construct
ATVPPLVSASYNWFDP

SEQ ID NO: 13321 - protein, 17 aa, Artificial Sequence
  Synthetic construct
ARVGSGTYYTDYYGMGV

SEQ ID NO: 13322 - protein, 13 aa, Artificial Sequence
  Synthetic construct
VKDSSRDYGGSDF

SEQ ID NO: 13323 - protein, 20 aa, Artificial Sequence
  Synthetic construct
AKDWGRSGTTWAYYYYGMDV

SEQ ID NO: 13324 - protein, 18 aa, Artificial Sequence
  Synthetic construct
ARLNSGYDFYSYYYYMDV

SEQ ID NO: 13325 - protein, 9 aa, Artificial Sequence
  Synthetic construct
AKGATKMDY

SEQ ID NO: 13326 - protein, 14 aa, Artificial Sequence
  Synthetic construct
ARAGAAAYYFFMDV

SEQ ID NO: 13327 - protein, 12 aa, Artificial Sequence
  Synthetic construct
ARVNLVGGGPDY

SEQ ID NO: 13328 - protein, 15 aa, Artificial Sequence
  Synthetic construct
ARESVADTLIGAFDI

SEQ ID NO: 13329 - protein, 20 aa, Artificial Sequence
  Synthetic construct
ARGNGAALAAVADGYNWFGP

SEQ ID NO: 13330 - protein, 23 aa, Artificial Sequence
  Synthetic construct
ARVQNGYFDWLFNAGYHYYYMDV

SEQ ID NO: 13331 - protein, 12 aa, Artificial Sequence
  Synthetic construct
VKDLGNFGSGSY

SEQ ID NO: 13332 - protein, 14 aa, Artificial Sequence
  Synthetic construct
ARRRRDGYNFYLDY

SEQ ID NO: 13333 - protein, 15 aa, Artificial Sequence
  Synthetic construct
ARWDHYDSSGHYFDY

SEQ ID NO: 13334 - protein, 21 aa, Artificial Sequence
  Synthetic construct
ATGFSIVPANVGYYYYYGMDV

SEQ ID NO: 13335 - protein, 6 aa, Artificial Sequence
  Synthetic construct
ARGFDP

SEQ ID NO: 13336 - protein, 19 aa, Artificial Sequence
  Synthetic construct
ARHLEGYCTSGSCLNWFDP

SEQ ID NO: 13337 - protein, 14 aa, Artificial Sequence
  Synthetic construct
VRGGSDYYLSAFDT

SEQ ID NO: 13338 - protein, 23 aa, Artificial Sequence
  Synthetic construct
ARDQYTMWVTGPPPPDFFYNMDV

SEQ ID NO: 13339 - protein, 15 aa, Artificial Sequence
  Synthetic construct
ARQGMATITGVGFDP

SEQ ID NO: 13340 - protein, 14 aa, Artificial Sequence
  Synthetic construct
AREGAVGSTTGLDY

SEQ ID NO: 13341 - protein, 15 aa, Artificial Sequence
  Synthetic construct
ARVGAYESSGYFQDS

SEQ ID NO: 13342 - protein, 20 aa, Artificial Sequence
  Synthetic construct
AKDHLQEWELLMNNYYGLDV

SEQ ID NO: 13343 - protein, 17 aa, Artificial Sequence
  Synthetic construct
VRDQYSSLYYYYYGMDV

SEQ ID NO: 13344 - protein, 18 aa, Artificial Sequence
  Synthetic construct
AKGKGTSQGEWLVNTFDP

SEQ ID NO: 13345 - protein, 17 aa, Artificial Sequence
  Synthetic construct
AREHGFRFYYYYYYMDV

SEQ ID NO: 13346 - protein, 15 aa, Artificial Sequence
  Synthetic construct
AREGSWRFGEYNIDY

SEQ ID NO: 13347 - protein, 17 aa, Artificial Sequence
  Synthetic construct
ARDPMVRGLFYFYYMDV

SEQ ID NO: 13348 - protein, 11 aa, Artificial Sequence
  Synthetic construct
ATVGMVWANDH

SEQ ID NO: 13349 - protein, 18 aa, Artificial Sequence
  Synthetic construct
AKDKTKNQLLYYYHAMDV

SEQ ID NO: 13350 - protein, 17 aa, Artificial Sequence
  Synthetic construct
AHSRDSVWTSRKLFFDS

SEQ ID NO: 13351 - protein, 15 aa, Artificial Sequence
  Synthetic construct
ARRRIVAADDNWFDP

SEQ ID NO: 13352 - protein, 15 aa, Artificial Sequence
  Synthetic construct
AKDIGSVWAADAFDI

SEQ ID NO: 13353 - protein, 15 aa, Artificial Sequence
  Synthetic construct
ASTSSSSSGGHAFYI

SEQ ID NO: 13354 - protein, 14 aa, Artificial Sequence
  Synthetic construct
ARVSDDFGIPAADY

SEQ ID NO: 13355 - protein, 13 aa, Artificial Sequence
  Synthetic construct
AKIVGALWGPVDY

SEQ ID NO: 13356 - protein, 13 aa, Artificial Sequence
  Synthetic construct
ARSGGYRLWFGEL

SEQ ID NO: 13357 - protein, 9 aa, Artificial Sequence
  Synthetic construct
AKGGDTFDP

SEQ ID NO: 13358 - protein, 10 aa, Artificial Sequence
  Synthetic construct
AREKTRASDS

SEQ ID NO: 13359 - protein, 15 aa, Artificial Sequence
  Synthetic construct
AKVDTAMVTFGYFDY

SEQ ID NO: 13360 - protein, 19 aa, Artificial Sequence
  Synthetic construct
ARHSSYYDSSGYVKTSPDY

SEQ ID NO: 13361 - protein, 11 aa, Artificial Sequence
  Synthetic construct
GGSYSGDYFDY

SEQ ID NO: 13362 - protein, 17 aa, Artificial Sequence
  Synthetic construct
ARGGYYDFLTGPGYFDY

SEQ ID NO: 13363 - protein, 15 aa, Artificial Sequence
  Synthetic construct
ARDDGSSLHNYYMDV

SEQ ID NO: 13364 - protein, 24 aa, Artificial Sequence
  Synthetic construct
ARGVRYFDWATVLGGKEPTYYMDV

SEQ ID NO: 13365 - protein, 13 aa, Artificial Sequence
  Synthetic construct
ARDESAVLGAFDI

SEQ ID NO: 13366 - protein, 22 aa, Artificial Sequence
  Synthetic construct
ARGEVDSSGWYRLGYYYYYMDV

SEQ ID NO: 13367 - protein, 14 aa, Artificial Sequence
  Synthetic construct
ARALRPFYYYYMDV

SEQ ID NO: 13368 - protein, 12 aa, Artificial Sequence
  Synthetic construct
ARADYNLRGYDS

SEQ ID NO: 13369 - protein, 15 aa, Artificial Sequence
  Synthetic construct
ARIPNGWIGEFLFDY

SEQ ID NO: 13370 - protein, 11 aa, Artificial Sequence
  Synthetic construct
AQDAYIAALYP

SEQ ID NO: 13371 - protein, 24 aa, Artificial Sequence
  Synthetic construct
ARDPASYYDLWSGYVDNYYYGLDV

SEQ ID NO: 13372 - protein, 17 aa, Artificial Sequence
  Synthetic construct
ARDPTRPSSGDPDGFDI

SEQ ID NO: 13373 - protein, 18 aa, Artificial Sequence
  Synthetic construct
ARTVDTVMVTDRAGAFDI

SEQ ID NO: 13374 - protein, 18 aa, Artificial Sequence
  Synthetic construct
ARLLGEWELLWQGGAPDY

SEQ ID NO: 13375 - protein, 21 aa, Artificial Sequence
  Synthetic construct
AKAHSSSWYSPLFHPTDAFDI

SEQ ID NO: 13376 - protein, 18 aa, Artificial Sequence
  Synthetic construct
ARGEYTSSFYGVHNWFDP

SEQ ID NO: 13377 - protein, 22 aa, Artificial Sequence
  Synthetic construct
AREDYHDASGYLGERYDYYIDV

SEQ ID NO: 13378 - protein, 22 aa, Artificial Sequence
  Synthetic construct
ARAKDFWNDAPYSLSRDNWFDV

SEQ ID NO: 13379 - protein, 18 aa, Artificial Sequence
  Synthetic construct
ARVFWEASWGSESYYFDY

SEQ ID NO: 13380 - protein, 22 aa, Artificial Sequence
  Synthetic construct
AREGRGGYSGYDDYYYYYYMDV

SEQ ID NO: 13381 - protein, 16 aa, Artificial Sequence
  Synthetic construct
AIDLGWSRNAEDAGGT

SEQ ID NO: 13382 - protein, 23 aa, Artificial Sequence
  Synthetic construct
ARHVEAYGGYDSKSFYGDYVPAD

SEQ ID NO: 13383 - protein, 19 aa, Artificial Sequence
  Synthetic construct
AKGALKLGDDFWSGYYFDY

SEQ ID NO: 13384 - protein, 12 aa, Artificial Sequence
  Synthetic construct
ARIGTLGGGMDV

SEQ ID NO: 13385 - protein, 14 aa, Artificial Sequence
  Synthetic construct
ARDLGLGVGCGMDV

SEQ ID NO: 13386 - protein, 11 aa, Artificial Sequence
  Synthetic construct
ARLQSGHPFDP

SEQ ID NO: 13387 - protein, 11 aa, Artificial Sequence
  Synthetic construct
AHHTVPTIYDY

SEQ ID NO: 13388 - protein, 13 aa, Artificial Sequence
  Synthetic construct
ARGGWFGEDAFDI

SEQ ID NO: 13389 - protein, 22 aa, Artificial Sequence
  Synthetic construct
ARDYSGYDTEGSGAYYYYYMDV

SEQ ID NO: 13390 - protein, 12 aa, Artificial Sequence
  Synthetic construct
ARAWALGYAFDI

SEQ ID NO: 13391 - protein, 13 aa, Artificial Sequence
  Synthetic construct
ARGGWPSGDVFDV

SEQ ID NO: 13392 - protein, 14 aa, Artificial Sequence
  Synthetic construct
ASGEWAVAATPRDY

SEQ ID NO: 13393 - protein, 18 aa, Artificial Sequence
  Synthetic construct
ARDRDTGMPDYSYYYMDV

SEQ ID NO: 13394 - protein, 12 aa, Artificial Sequence
  Synthetic construct
ARATRGYYYMDV

SEQ ID NO: 13395 - protein, 14 aa, Artificial Sequence
  Synthetic construct
ATASPVTKPAWLDP

SEQ ID NO: 13396 - protein, 18 aa, Artificial Sequence
  Synthetic construct
ARMAGDDNSGYYPYAFDI

SEQ ID NO: 13397 - protein, 16 aa, Artificial Sequence
  Synthetic construct
ARDPVRGFFYYYYMDV

SEQ ID NO: 13398 - protein, 13 aa, Artificial Sequence
  Synthetic construct
ARASYGSAWDLYY

SEQ ID NO: 13399 - protein, 18 aa, Artificial Sequence
  Synthetic construct
ARVDLSFTPYYYYYGMDV

SEQ ID NO: 13400 - protein, 13 aa, Artificial Sequence
  Synthetic construct
ARSGGYRLWFGEL

SEQ ID NO: 13401 - protein, 17 aa, Artificial Sequence
  Synthetic construct
ARFNRVFGSSSGLAFDI

SEQ ID NO: 13402 - protein, 16 aa, Artificial Sequence
  Synthetic construct
AKGGGVYGDYPEYFDY

SEQ ID NO: 13403 - protein, 15 aa, Artificial Sequence
  Synthetic construct
ARIPNGWIGEFLFDY

SEQ ID NO: 13404 - protein, 16 aa, Artificial Sequence
  Synthetic construct
AKSGWGYDFWSGYFDY

SEQ ID NO: 13405 - protein, 22 aa, Artificial Sequence
  Synthetic construct
ARDIADSKYSSGWYKYYYYMDV

SEQ ID NO: 13406 - protein, 11 aa, Artificial Sequence
  Synthetic construct
TTDSGNWNVPE

SEQ ID NO: 13407 - protein, 18 aa, Artificial Sequence
  Synthetic construct
AKGMGYCSGGSCLRAFDI

SEQ ID NO: 13408 - protein, 20 aa, Artificial Sequence
  Synthetic construct
ARSWEGIKQLPGYYYFGMDV

SEQ ID NO: 13409 - protein, 15 aa, Artificial Sequence
  Synthetic construct
AREGMVGEAGRSLDH

SEQ ID NO: 13410 - protein, 22 aa, Artificial Sequence
  Synthetic construct
ARVRGGEWVGDLGWYYYYGMDV

SEQ ID NO: 13411 - protein, 15 aa, Artificial Sequence
  Synthetic construct
ARPKRGSGSWFPFEY

SEQ ID NO: 13412 - protein, 15 aa, Artificial Sequence
  Synthetic construct
ARPLEDAYYFFYMDV

SEQ ID NO: 13413 - protein, 11 aa, Artificial Sequence
  Synthetic construct
ARHPRWWGFDP

SEQ ID NO: 13414 - protein, 24 aa, Artificial Sequence
  Synthetic construct
AKDSYYYDSSGYYYGVYYYYGMDV

SEQ ID NO: 13415 - protein, 16 aa, Artificial Sequence
  Synthetic construct
AHEYIAGVGSGGGFDS

SEQ ID NO: 13416 - protein, 17 aa, Artificial Sequence
  Synthetic construct
ARPTLYGSGSYESYFDS

SEQ ID NO: 13417 - protein, 13 aa, Artificial Sequence
  Synthetic construct
AKDQESSGGWYDY

SEQ ID NO: 13418 - protein, 12 aa, Artificial Sequence
  Synthetic construct
ATVTLMIQVFAD

SEQ ID NO: 13419 - protein, 13 aa, Artificial Sequence
  Synthetic construct
ARGKGGNYYYFDY

SEQ ID NO: 13420 - protein, 18 aa, Artificial Sequence
  Synthetic construct
AKEALAGQMYYYFYYMDV

SEQ ID NO: 13421 - protein, 25 aa, Artificial Sequence
  Synthetic construct
ARTSRTFRYFDWSPQRRLYSYGIDV

SEQ ID NO: 13422 - protein, 13 aa, Artificial Sequence
  Synthetic construct
GRVILWWGGAVDV

SEQ ID NO: 13423 - protein, 14 aa, Artificial Sequence
  Synthetic construct
AREGTVGDQTGLDV

SEQ ID NO: 13424 - protein, 14 aa, Artificial Sequence
  Synthetic construct
AREGIVGTTTGLDY

SEQ ID NO: 13425 - protein, 8 aa, Artificial Sequence
  Synthetic construct
AKGYSPDV

SEQ ID NO: 13426 - protein, 16 aa, Artificial Sequence
  Synthetic construct
ARDGSGDGYNSYWFDP

SEQ ID NO: 13427 - protein, 13 aa, Artificial Sequence
  Synthetic construct
ARVPGGRGWDFDY

SEQ ID NO: 13428 - protein, 15 aa, Artificial Sequence
  Synthetic construct
TRVDEYTTSSGWFDP

SEQ ID NO: 13429 - protein, 19 aa, Artificial Sequence
  Synthetic construct
ARSPLSYGDFFFYSYYMDV

SEQ ID NO: 13430 - protein, 14 aa, Artificial Sequence
  Synthetic construct
ARGASSWYVGAPDY

SEQ ID NO: 13431 - protein, 11 aa, Artificial Sequence
  Synthetic construct
AREGLLQRIDY

SEQ ID NO: 13432 - protein, 18 aa, Artificial Sequence
  Synthetic construct
ARDRVRGVAAYYYSGMDV

SEQ ID NO: 13433 - protein, 10 aa, Artificial Sequence
  Synthetic construct
AREVFGYFDY

SEQ ID NO: 13434 - protein, 15 aa, Artificial Sequence
  Synthetic construct
ARVYDSSGYDWYFDL

SEQ ID NO: 13435 - protein, 10 aa, Artificial Sequence
  Synthetic construct
ARDGGGWFDP

SEQ ID NO: 13436 - protein, 25 aa, Artificial Sequence
  Synthetic construct
ARTSRTLRYFDWSPQRRLYSYGMDV

SEQ ID NO: 13437 - protein, 18 aa, Artificial Sequence
  Synthetic construct
ARLSSGWSYSGYYYGLDV

SEQ ID NO: 13438 - protein, 11 aa, Artificial Sequence
  Synthetic construct
ARGRPQPGFDP

SEQ ID NO: 13439 - protein, 10 aa, Artificial Sequence
  Synthetic construct
ARDGGGGYRL

SEQ ID NO: 13440 - protein, 16 aa, Artificial Sequence
  Synthetic construct
ARDRGLMQLDENWFDP

SEQ ID NO: 13441 - protein, 21 aa, Artificial Sequence
  Synthetic construct
ARTPFLALGFGELLPHLNFDY

SEQ ID NO: 13442 - protein, 12 aa, Artificial Sequence
  Synthetic construct
ARRRGASSLRDF

SEQ ID NO: 13443 - protein, 13 aa, Artificial Sequence
  Synthetic construct
ARSYNSGSPSLDY

SEQ ID NO: 13444 - protein, 28 aa, Artificial Sequence
  Synthetic construct
AHAYDHLTGYYNVRADGAEDHYFWYLDV

SEQ ID NO: 13445 - protein, 15 aa, Artificial Sequence
  Synthetic construct
ARVDPYDSSGAFTDY

SEQ ID NO: 13446 - protein, 14 aa, Artificial Sequence
  Synthetic construct
AREGAVGATTGLDY

SEQ ID NO: 13447 - protein, 12 aa, Artificial Sequence
  Synthetic construct
ARMLFGSGWYDY

SEQ ID NO: 13448 - protein, 27 aa, Artificial Sequence
  Synthetic construct
ARNPSYAPRRPSDAYTVPWDFNYIMDV

SEQ ID NO: 13449 - protein, 14 aa, Artificial Sequence
  Synthetic construct
ARHQIRPPLPLFEF

SEQ ID NO: 13450 - protein, 15 aa, Artificial Sequence
  Synthetic construct
VRDFAWSSGSAEVGY

SEQ ID NO: 13451 - protein, 20 aa, Artificial Sequence
  Synthetic construct
AREEYSSSHPLGYYYYGMDV

SEQ ID NO: 13452 - protein, 16 aa, Artificial Sequence
  Synthetic construct
AHTGSVPVAMVGAFDI

SEQ ID NO: 13453 - protein, 18 aa, Artificial Sequence
  Synthetic construct
ARDWGLGQAPYFYFYMDV

SEQ ID NO: 13454 - protein, 22 aa, Artificial Sequence
  Synthetic construct
AREYLYHDFWSGYYTGTGGLDY

SEQ ID NO: 13455 - protein, 14 aa, Artificial Sequence
  Synthetic construct
AREGMVGATTGLDY

SEQ ID NO: 13456 - protein, 18 aa, Artificial Sequence
  Synthetic construct
ARDRIAPIDSYYHYYTDV

SEQ ID NO: 13457 - protein, 18 aa, Artificial Sequence
  Synthetic construct
TTDGAVFRFLEWLSDFDY

SEQ ID NO: 13458 - protein, 17 aa, Artificial Sequence
  Synthetic construct
ARVYSSGWRLYNTGFDV

SEQ ID NO: 13459 - protein, 12 aa, Artificial Sequence
  Synthetic construct
ATSPCISCPLDY

SEQ ID NO: 13460 - protein, 14 aa, Artificial Sequence
  Synthetic construct
ARSTTTNYYDSSGH

SEQ ID NO: 13461 - protein, 14 aa, Artificial Sequence
  Synthetic construct
ARVYGGSYRGYFDY

SEQ ID NO: 13462 - protein, 17 aa, Artificial Sequence
  Synthetic construct
ARVGSGTYYTDYYGMGV

SEQ ID NO: 13463 - protein, 14 aa, Artificial Sequence
  Synthetic construct
ARDLSVGATDGFDI

SEQ ID NO: 13464 - protein, 14 aa, Artificial Sequence
  Synthetic construct
ARARGGNYFDAFDI

SEQ ID NO: 13465 - protein, 9 aa, Artificial Sequence
  Synthetic construct
ARSNNWFDP

SEQ ID NO: 13466 - protein, 20 aa, Artificial Sequence
  Synthetic construct
ARHLPTCSGGPCYSFSWFDP

SEQ ID NO: 13467 - protein, 25 aa, Artificial Sequence
  Synthetic construct
ARLRGYIQWLLGYGPDNGGNYYFDL

SEQ ID NO: 13468 - protein, 16 aa, Artificial Sequence
  Synthetic construct
ARDSGHGSSWYRGFDY

SEQ ID NO: 13469 - protein, 21 aa, Artificial Sequence
  Synthetic construct
ARDGEGITIFGVENYYYGMDV

SEQ ID NO: 13470 - protein, 13 aa, Artificial Sequence
  Synthetic construct
AKDYSRDYGGCDF

SEQ ID NO: 13471 - protein, 20 aa, Artificial Sequence
  Synthetic construct
ARDRGYYGSGSEYYYYYMDV

SEQ ID NO: 13472 - protein, 18 aa, Artificial Sequence
  Synthetic construct
ARGTRHCGSTSCWPWFDP

SEQ ID NO: 13473 - protein, 9 aa, Artificial Sequence
  Synthetic construct
AKGATKVDY

SEQ ID NO: 13474 - protein, 16 aa, Artificial Sequence
  Synthetic construct
TKFSYYSATYYAWFDP

SEQ ID NO: 13475 - protein, 10 aa, Artificial Sequence
  Synthetic construct
ARTISGTIDY

SEQ ID NO: 13476 - protein, 11 aa, Artificial Sequence
  Synthetic construct
TTLGNHPPEFF

SEQ ID NO: 13477 - protein, 17 aa, Artificial Sequence
  Synthetic construct
ASFVRYCSSTSCYSFDY

SEQ ID NO: 13478 - protein, 23 aa, Artificial Sequence
  Synthetic construct
ARHGFDGYSDYEYWVSAGYGMDV

SEQ ID NO: 13479 - protein, 21 aa, Artificial Sequence
  Synthetic construct
ARGGTGTTFPTLYNYYYGMDV

SEQ ID NO: 13480 - protein, 12 aa, Artificial Sequence
  Synthetic construct
ARAEVVLGEFES

SEQ ID NO: 13481 - protein, 15 aa, Artificial Sequence
  Synthetic construct
ARLWDSYSYYSGMDV

SEQ ID NO: 13482 - protein, 24 aa, Artificial Sequence
  Synthetic construct
ARDPASYFDVWSGYVDYYYYGLDV

SEQ ID NO: 13483 - protein, 16 aa, Artificial Sequence
  Synthetic construct
ARDSGHGSNWYRGFDY

SEQ ID NO: 13484 - protein, 16 aa, Artificial Sequence
  Synthetic construct
SGYYYDSSGYNYGMDV

SEQ ID NO: 13485 - protein, 19 aa, Artificial Sequence
  Synthetic construct
SQASGYSGYFERAFSAFDV

SEQ ID NO: 13486 - protein, 15 aa, Artificial Sequence
  Synthetic construct
ARGESHYDFWSGWSY

SEQ ID NO: 13487 - protein, 12 aa, Artificial Sequence
  Synthetic construct
AKARWDGGGSDY

SEQ ID NO: 13488 - protein, 14 aa, Artificial Sequence
  Synthetic construct
ARDLGFGVGCGMDV

SEQ ID NO: 13489 - protein, 14 aa, Artificial Sequence
  Synthetic construct
ARDLRAVTGHYFDY

SEQ ID NO: 13490 - protein, 20 aa, Artificial Sequence
  Synthetic construct
ARDPQRMAAAGGYSYYGMDV

SEQ ID NO: 13491 - protein, 17 aa, Artificial Sequence
  Synthetic construct
ARDPLPSPFDPYNWFDP

SEQ ID NO: 13492 - protein, 20 aa, Artificial Sequence
  Synthetic construct
ARDHPDIAAAGIYYYFGMDV

SEQ ID NO: 13493 - protein, 15 aa, Artificial Sequence
  Synthetic construct
TRGGAAAGIYYYMDV

SEQ ID NO: 13494 - protein, 20 aa, Artificial Sequence
  Synthetic construct
ARHWAYSDILTGYSDYYMDV

SEQ ID NO: 13495 - protein, 13 aa, Artificial Sequence
  Synthetic construct
ASLYGIVGGSADY

SEQ ID NO: 13496 - protein, 18 aa, Artificial Sequence
  Synthetic construct
AREKGYSSLSSATYYFDS

SEQ ID NO: 13497 - protein, 17 aa, Artificial Sequence
  Synthetic construct
ARDRLGSSGYYGGVFDI

SEQ ID NO: 13498 - protein, 17 aa, Artificial Sequence
  Synthetic construct
ARDPTRPSNGDHDAFDV

SEQ ID NO: 13499 - protein, 21 aa, Artificial Sequence
  Synthetic construct
AAGFSIMPANVGYHYYYGLDV

SEQ ID NO: 13500 - protein, 17 aa, Artificial Sequence
  Synthetic construct
ARDPLPSPFDPYNWFDP

SEQ ID NO: 13501 - protein, 17 aa, Artificial Sequence
  Synthetic construct
ARVRYESRDYYGDGFDI

SEQ ID NO: 13502 - protein, 19 aa, Artificial Sequence
  Synthetic construct
ARVGHILRGVPNYYYYMDV

SEQ ID NO: 13503 - protein, 16 aa, Artificial Sequence
  Synthetic construct
ARDFFYGDYAYWYFDL

SEQ ID NO: 13504 - protein, 19 aa, Artificial Sequence
  Synthetic construct
ARGQWELKLAVPYYYYMDV

SEQ ID NO: 13505 - protein, 19 aa, Artificial Sequence
  Synthetic construct
ARDFGMFGELLSFYYGMDV

SEQ ID NO: 13506 - protein, 17 aa, Artificial Sequence
  Synthetic construct
ARLYYYDSSGYYPAFDI

SEQ ID NO: 13507 - protein, 21 aa, Artificial Sequence
  Synthetic construct
ARDGEVDSLMAPPGRTPPLDS

SEQ ID NO: 13508 - protein, 6 aa, Artificial Sequence
  Synthetic construct
ARGFDY

SEQ ID NO: 13509 - protein, 17 aa, Artificial Sequence
  Synthetic construct
ATGRDTSSWHAAYYFDY

SEQ ID NO: 13510 - protein, 9 aa, Artificial Sequence
  Synthetic construct
AKGATKMDY

SEQ ID NO: 13511 - protein, 9 aa, Artificial Sequence
  Synthetic construct
AKNGDYFDY

SEQ ID NO: 13512 - protein, 16 aa, Artificial Sequence
  Synthetic construct
ARDLSRWGWFGFQADY

SEQ ID NO: 13513 - protein, 13 aa, Artificial Sequence
  Synthetic construct
ASGSGNYLTWFDP

SEQ ID NO: 13514 - protein, 14 aa, Artificial Sequence
  Synthetic construct
ARDGQVGATTGADY

SEQ ID NO: 13515 - protein, 14 aa, Artificial Sequence
  Synthetic construct
ARDYKWNGHTCFDS

SEQ ID NO: 13516 - protein, 9 aa, Artificial Sequence
  Synthetic construct
ASGMSYMDV

SEQ ID NO: 13517 - protein, 20 aa, Artificial Sequence
  Synthetic construct
ARDLTILSAHWGGASRAFDI

SEQ ID NO: 13518 - protein, 9 aa, Artificial Sequence
  Synthetic construct
ARDYTATEH

SEQ ID NO: 13519 - protein, 19 aa, Artificial Sequence
  Synthetic construct
AKDPTEISFGALLTDLMDP

SEQ ID NO: 13520 - protein, 14 aa, Artificial Sequence
  Synthetic construct
AREGAVGATTGLDY

SEQ ID NO: 13521 - protein, 10 aa, Artificial Sequence
  Synthetic construct
TTDLLWPPCY

SEQ ID NO: 13522 - protein, 16 aa, Artificial Sequence
  Synthetic construct
ARDRFYGDYAYWFFDL

SEQ ID NO: 13523 - protein, 12 aa, Artificial Sequence
  Synthetic construct
ARALLTAPPLDY

SEQ ID NO: 13524 - protein, 21 aa, Artificial Sequence
  Synthetic construct
AREQIKVFGVVKTPTYYGMDV

SEQ ID NO: 13525 - protein, 19 aa, Artificial Sequence
  Synthetic construct
ARGGWFGESRMYYYHYMDV

SEQ ID NO: 13526 - protein, 19 aa, Artificial Sequence
  Synthetic construct
ARDFDSMIRGGYYYYYMDV

SEQ ID NO: 13527 - protein, 19 aa, Artificial Sequence
  Synthetic construct
ARDFDAMVRGGYYYYYMDV

SEQ ID NO: 13528 - protein, 6 aa, Artificial Sequence
  Synthetic construct
ARGFDY

SEQ ID NO: 13529 - protein, 14 aa, Artificial Sequence
  Synthetic construct
ARGVVAATPGYFDS

SEQ ID NO: 13530 - protein, 15 aa, Artificial Sequence
  Synthetic construct
AKEALNIVVVTAPRY

SEQ ID NO: 13531 - protein, 22 aa, Artificial Sequence
  Synthetic construct
ARVDYLPAALFGVSATGYYFDY

SEQ ID NO: 13532 - protein, 19 aa, Artificial Sequence
  Synthetic construct
ARGPLRYFEWKYYYNGMDV

SEQ ID NO: 13533 - protein, 19 aa, Artificial Sequence
  Synthetic construct
ARGGTWIQLTTYYYYAMDV

SEQ ID NO: 13534 - protein, 18 aa, Artificial Sequence
  Synthetic construct
ARGLYSSNWYGGGCWFDP

SEQ ID NO: 13535 - protein, 20 aa, Artificial Sequence
  Synthetic construct
ARSWEGIKQLPGYYYFGMDV

SEQ ID NO: 13536 - protein, 21 aa, Artificial Sequence
  Synthetic construct
ARSGGGDLTGDYRSHVYYMDV

SEQ ID NO: 13537 - protein, 12 aa, Artificial Sequence
  Synthetic construct
ARLSSSSWHWDY

SEQ ID NO: 13538 - protein, 17 aa, Artificial Sequence
  Synthetic construct
ARNSRYGGSGTADAFDI

SEQ ID NO: 13539 - protein, 13 aa, Artificial Sequence
  Synthetic construct
ARGGWPTGDTFDI

SEQ ID NO: 13540 - protein, 15 aa, Artificial Sequence
  Synthetic construct
ARQGMATITGVGFDP

SEQ ID NO: 13541 - protein, 23 aa, Artificial Sequence
  Synthetic construct
TTLGGGSGSYYLPHYYYYYYVDV

SEQ ID NO: 13542 - protein, 12 aa, Artificial Sequence
  Synthetic construct
ARFLEAAGGMDV

SEQ ID NO: 13543 - protein, 18 aa, Artificial Sequence
  Synthetic construct
ATTSGYYDYVWGTELLDY

SEQ ID NO: 13544 - protein, 14 aa, Artificial Sequence
  Synthetic construct
AHISGFEGTLHFDN

SEQ ID NO: 13545 - protein, 14 aa, Artificial Sequence
  Synthetic construct
AREWGVAENGYFDY

SEQ ID NO: 13546 - protein, 9 aa, Artificial Sequence
  Synthetic construct
VKGATKIDY

SEQ ID NO: 13547 - protein, 17 aa, Artificial Sequence
  Synthetic construct
TSTWQWLRGYYYYGMDV

SEQ ID NO: 13548 - protein, 15 aa, Artificial Sequence
  Synthetic construct
ARVFTDSFGWYQFDY

SEQ ID NO: 13549 - protein, 12 aa, Artificial Sequence
  Synthetic construct
ASTYGSGNWFDP

SEQ ID NO: 13550 - protein, 19 aa, Artificial Sequence
  Synthetic construct
ARGGTWIQLTTYYYYAMDV

SEQ ID NO: 13551 - protein, 13 aa, Artificial Sequence
  Synthetic construct
ARGQFYHFSYMDL

SEQ ID NO: 13552 - protein, 14 aa, Artificial Sequence
  Synthetic construct
ARGWGSGSYTLYDY

SEQ ID NO: 13553 - protein, 14 aa, Artificial Sequence
  Synthetic construct
ARGVVAATPGYFDP

SEQ ID NO: 13554 - protein, 22 aa, Artificial Sequence
  Synthetic construct
AKDIGRYDHYYIFGRVGGAFDI

SEQ ID NO: 13555 - protein, 15 aa, Artificial Sequence
  Synthetic construct
ARGGLWFGVDYYFDY

SEQ ID NO: 13556 - protein, 13 aa, Artificial Sequence
  Synthetic construct
ARDGIQATSYLDY

SEQ ID NO: 13557 - protein, 17 aa, Artificial Sequence
  Synthetic construct
ARADREEVWLRYWYFDL

SEQ ID NO: 13558 - protein, 15 aa, Artificial Sequence
  Synthetic construct
AKPVSSSWYEGAFHS

SEQ ID NO: 13559 - protein, 13 aa, Artificial Sequence
  Synthetic construct
FSRSSGYHNWFDP

SEQ ID NO: 13560 - protein, 12 aa, Artificial Sequence
  Synthetic construct
ARRDPILNWFDP

SEQ ID NO: 13561 - protein, 12 aa, Artificial Sequence
  Synthetic construct
ARMGGDPYYMDV

SEQ ID NO: 13562 - protein, 21 aa, Artificial Sequence
  Synthetic construct
ATGFSIVPANVGYYYYYGMDV

SEQ ID NO: 13563 - protein, 10 aa, Artificial Sequence
  Synthetic construct
ARVRPLDFDY

SEQ ID NO: 13564 - protein, 13 aa, Artificial Sequence
  Synthetic construct
ASGYYGSGSSVAL

SEQ ID NO: 13565 - protein, 18 aa, Artificial Sequence
  Synthetic construct
AHSRYDMLTGYDRAPFDY

SEQ ID NO: 13566 - protein, 13 aa, Artificial Sequence
  Synthetic construct
ATSPWGGYGEVDY

SEQ ID NO: 13567 - protein, 12 aa, Artificial Sequence
  Synthetic construct
ARRRGASSLRDF

SEQ ID NO: 13568 - protein, 9 aa, Artificial Sequence
  Synthetic construct
AKGATKMDY

SEQ ID NO: 13569 - protein, 15 aa, Artificial Sequence
  Synthetic construct
AKEALNIVVVTAPRY

SEQ ID NO: 13570 - protein, 20 aa, Artificial Sequence
  Synthetic construct
AREAPWHDYYSSGSLNWFDP

SEQ ID NO: 13571 - protein, 14 aa, Artificial Sequence
  Synthetic construct
ATTITLDGTSGFDI

SEQ ID NO: 13572 - protein, 15 aa, Artificial Sequence
  Synthetic construct
ARVSGYDSSGHWGDY

SEQ ID NO: 13573 - protein, 9 aa, Artificial Sequence
  Synthetic construct
AKGATKVDY

SEQ ID NO: 13574 - protein, 12 aa, Artificial Sequence
  Synthetic construct
ATGVGNYYYMDV

SEQ ID NO: 13575 - protein, 17 aa, Artificial Sequence
  Synthetic construct
ARDLPSDNWNDVGAFDI

SEQ ID NO: 13576 - protein, 17 aa, Artificial Sequence
  Synthetic construct
ARGPIVLMVYPRYYFDY

SEQ ID NO: 13577 - protein, 14 aa, Artificial Sequence
  Synthetic construct
SRDSSGGYWGSFDY

SEQ ID NO: 13578 - protein, 17 aa, Artificial Sequence
  Synthetic construct
AGSGSYYHHYYYYYMDV

SEQ ID NO: 13579 - protein, 17 aa, Artificial Sequence
  Synthetic construct
AREKGYSSSSSATYFDL

SEQ ID NO: 13580 - protein, 17 aa, Artificial Sequence
  Synthetic construct
AHFTYSHSGIYSRTFDY

SEQ ID NO: 13581 - protein, 23 aa, Artificial Sequence
  Synthetic construct
AMGGYCSGGSCRGGEYYYYGMDV

SEQ ID NO: 13582 - protein, 15 aa, Artificial Sequence
  Synthetic construct
ARDRRIVGYYFGMDV

SEQ ID NO: 13583 - protein, 11 aa, Artificial Sequence
  Synthetic construct
ARAIDFGWFDP

SEQ ID NO: 13584 - protein, 17 aa, Artificial Sequence
  Synthetic construct
ARFNKVFGSSSGLAFDI

SEQ ID NO: 13585 - protein, 16 aa, Artificial Sequence
  Synthetic construct
ARRKGGLGSYSDAFDL

SEQ ID NO: 13586 - protein, 18 aa, Artificial Sequence
  Synthetic construct
ARVRESYSSGLYYYYMDV

SEQ ID NO: 13587 - protein, 15 aa, Artificial Sequence
  Synthetic construct
AREGMVGAAGRSLDF

SEQ ID NO: 13588 - protein, 14 aa, Artificial Sequence
  Synthetic construct
ARAGGGSYRSSFDY

SEQ ID NO: 13589 - protein, 21 aa, Artificial Sequence
  Synthetic construct
ARDRETSNPWGFYYYYYGMDV

SEQ ID NO: 13590 - protein, 20 aa, Artificial Sequence
  Synthetic construct
ARETIWERYFDWLLSPFFDY

SEQ ID NO: 13591 - protein, 24 aa, Artificial Sequence
  Synthetic construct
ASWTPIHRKTTVVEDSYYYYYMDV

SEQ ID NO: 13592 - protein, 12 aa, Artificial Sequence
  Synthetic construct
TASGYSRDWYYY

SEQ ID NO: 13593 - protein, 21 aa, Artificial Sequence
  Synthetic construct
ARRSALDMATIMSFGLDYFDY

SEQ ID NO: 13594 - protein, 21 aa, Artificial Sequence
  Synthetic construct
ARVDFLPAALFGVAAGYHFDS

SEQ ID NO: 13595 - protein, 17 aa, Artificial Sequence
  Synthetic construct
ATGSPLLWFGDGYWFDP

SEQ ID NO: 13596 - protein, 16 aa, Artificial Sequence
  Synthetic construct
ARGWGRAAAGKYYMDV

SEQ ID NO: 13597 - protein, 9 aa, Artificial Sequence
  Synthetic construct
AKGATKVDN

SEQ ID NO: 13598 - protein, 13 aa, Artificial Sequence
  Synthetic construct
ARDRESVAGPLDY

SEQ ID NO: 13599 - protein, 15 aa, Artificial Sequence
  Synthetic construct
GTTSPHPGWGGWFDP

SEQ ID NO: 13600 - protein, 15 aa, Artificial Sequence
  Synthetic construct
AKPRGIHYPYYALDV

SEQ ID NO: 13601 - protein, 14 aa, Artificial Sequence
  Synthetic construct
AISPAIVRQNWFDP

SEQ ID NO: 13602 - protein, 14 aa, Artificial Sequence
  Synthetic construct
ARQGPSWSHDAFDI

SEQ ID NO: 13603 - protein, 18 aa, Artificial Sequence
  Synthetic construct
ARDEVTIFGVVYSFAMDV

SEQ ID NO: 13604 - protein, 11 aa, Artificial Sequence
  Synthetic construct
ARLTTETIFDS

SEQ ID NO: 13605 - protein, 21 aa, Artificial Sequence
  Synthetic construct
ARDAFYYGSGSHFYYYYYMDV

SEQ ID NO: 13606 - protein, 13 aa, Artificial Sequence
  Synthetic construct
AREVGSGWFYLDT

SEQ ID NO: 13607 - protein, 15 aa, Artificial Sequence
  Synthetic construct
AGDYGDSYYYYGLDV

SEQ ID NO: 13608 - protein, 16 aa, Artificial Sequence
  Synthetic construct
ARWGAGSGWDEGEFDY

SEQ ID NO: 13609 - protein, 21 aa, Artificial Sequence
  Synthetic construct
ASLGGDYYDSGSFYNSSGFDP

SEQ ID NO: 13610 - protein, 15 aa, Artificial Sequence
  Synthetic construct
ARALSYNGIYPNGDY

SEQ ID NO: 13611 - protein, 19 aa, Artificial Sequence
  Synthetic construct
ARDFMVRGVLDYYYYYMDV

SEQ ID NO: 13612 - protein, 15 aa, Artificial Sequence
  Synthetic construct
ARALSYNGIYPNGDC

SEQ ID NO: 13613 - protein, 20 aa, Artificial Sequence
  Synthetic construct
ARGGLYYYDSSAYYISAFDI

SEQ ID NO: 13614 - protein, 18 aa, Artificial Sequence
  Synthetic construct
ARLSYRVSGEDYHYYMDV

SEQ ID NO: 13615 - protein, 13 aa, Artificial Sequence
  Synthetic construct
ALSTSSAVEGGNY

SEQ ID NO: 13616 - protein, 15 aa, Artificial Sequence
  Synthetic construct
ARDNNSTWRRGWFDP

SEQ ID NO: 13617 - protein, 15 aa, Artificial Sequence
  Synthetic construct
GRLVLRGGWNDAFDL

SEQ ID NO: 13618 - protein, 20 aa, Artificial Sequence
  Synthetic construct
ARDYLGYCTSTSCYGGVAAY

SEQ ID NO: 13619 - protein, 21 aa, Artificial Sequence
  Synthetic construct
AKLSGYSVFDFSGTDFRDFDY

SEQ ID NO: 13620 - protein, 23 aa, Artificial Sequence
  Synthetic construct
ARVQNGYFDWLLNAGYYYYYMDV

SEQ ID NO: 13621 - protein, 18 aa, Artificial Sequence
  Synthetic construct
ATDRSSGYPHYHYYGMDV

SEQ ID NO: 13622 - protein, 24 aa, Artificial Sequence
  Synthetic construct
ARDPASYYDLWSGYVDYYYYGMDV

SEQ ID NO: 13623 - protein, 13 aa, Artificial Sequence
  Synthetic construct
ARLDTTIPYYFDY

SEQ ID NO: 13624 - protein, 21 aa, Artificial Sequence
  Synthetic construct
ARDRGASSGWLGGYYYYYMDV

SEQ ID NO: 13625 - protein, 16 aa, Artificial Sequence
  Synthetic construct
ARDLLGHSSGWYAWGY

SEQ ID NO: 13626 - protein, 14 aa, Artificial Sequence
  Synthetic construct
ARGTENRGYYYMDV

SEQ ID NO: 13627 - protein, 17 aa, Artificial Sequence
  Synthetic construct
ARDLPSDNWNDVGAFDI

SEQ ID NO: 13628 - protein, 19 aa, Artificial Sequence
  Synthetic construct
ASAEEDFAVAEKYFYGMDV

SEQ ID NO: 13629 - protein, 17 aa, Artificial Sequence
  Synthetic construct
AKDRSFYGSGKLHAFDI

SEQ ID NO: 13630 - protein, 23 aa, Artificial Sequence
  Synthetic construct
ARDLGGRFSSTYYYDGSAYDWDY

SEQ ID NO: 13631 - protein, 15 aa, Artificial Sequence
  Synthetic construct
AKDLRSDGDYWAFDI

SEQ ID NO: 13632 - protein, 13 aa, Artificial Sequence
  Synthetic construct
ARLPDIDGWPFDY

SEQ ID NO: 13633 - protein, 9 aa, Artificial Sequence
  Synthetic construct
AHFYTAPGW

SEQ ID NO: 13634 - protein, 14 aa, Artificial Sequence
  Synthetic construct
AKGRGGNYFDAFDM

SEQ ID NO: 13635 - protein, 20 aa, Artificial Sequence
  Synthetic construct
ARITIVRGADDYYYRYGMDV

SEQ ID NO: 13636 - protein, 10 aa, Artificial Sequence
  Synthetic construct
AGRWYSTMDV

SEQ ID NO: 13637 - protein, 15 aa, Artificial Sequence
  Synthetic construct
ARTGDFWSGLVYFQH

SEQ ID NO: 13638 - protein, 14 aa, Artificial Sequence
  Synthetic construct
AREGVVGATTGLDY

SEQ ID NO: 13639 - protein, 13 aa, Artificial Sequence
  Synthetic construct
ARIAAAGLSYLDY

SEQ ID NO: 13640 - protein, 14 aa, Artificial Sequence
  Synthetic construct
AREGQISGTTGLDY

SEQ ID NO: 13641 - protein, 17 aa, Artificial Sequence
  Synthetic construct
SRVIAGAAPGTVNWFDP

SEQ ID NO: 13642 - protein, 14 aa, Artificial Sequence
  Synthetic construct
AKDLYGGNSGAIDV

SEQ ID NO: 13643 - protein, 19 aa, Artificial Sequence
  Synthetic construct
ATAFALRYGEPGYYYGMDV

SEQ ID NO: 13644 - protein, 28 aa, Artificial Sequence
  Synthetic construct
VRVPGSEDLLTGYLGRRSDPRGKAWFDP

SEQ ID NO: 13645 - protein, 18 aa, Artificial Sequence
  Synthetic construct
ARDPRIVGASIYYYYMDV

SEQ ID NO: 13646 - protein, 22 aa, Artificial Sequence
  Synthetic construct
ARDIADSKYSSGWYHYYYYMDV

SEQ ID NO: 13647 - protein, 14 aa, Artificial Sequence
  Synthetic construct
AEGSTIVLMVYATR

SEQ ID NO: 13648 - protein, 18 aa, Artificial Sequence
  Synthetic construct
ARDGEPAYPSFYYYYMDV

SEQ ID NO: 13649 - protein, 16 aa, Artificial Sequence
  Synthetic construct
ARRVPLWFGEFYAFDI

SEQ ID NO: 13650 - protein, 18 aa, Artificial Sequence
  Synthetic construct
ARDSAGDHPYYNYYYMDV

SEQ ID NO: 13651 - protein, 18 aa, Artificial Sequence
  Synthetic construct
ARVSRYCNGGNCADAFDI

SEQ ID NO: 13652 - protein, 22 aa, Artificial Sequence
  Synthetic construct
AKDIGRFDQSDTLGRVGGAFDI

SEQ ID NO: 13653 - protein, 25 aa, Artificial Sequence
  Synthetic construct
ARGAGEQRLVGGLFGVSHFYYYMDV

SEQ ID NO: 13654 - protein, 18 aa, Artificial Sequence
  Synthetic construct
TTERLYDYIWGSYRIFDY

SEQ ID NO: 13655 - protein, 20 aa, Artificial Sequence
  Synthetic construct
ARDYDPSLHYESGGSDTLDI

SEQ ID NO: 13656 - protein, 11 aa, Artificial Sequence
  Synthetic construct
AKIVGALGGDF

SEQ ID NO: 13657 - protein, 16 aa, Artificial Sequence
  Synthetic construct
ARWGAGSGWDEGEFDY

SEQ ID NO: 13658 - protein, 23 aa, Artificial Sequence
  Synthetic construct
AREGPTYFIDGGSYWGGPHYMDV

SEQ ID NO: 13659 - protein, 17 aa, Artificial Sequence
  Synthetic construct
AREKQWLAPPYYYYMNV

SEQ ID NO: 13660 - protein, 15 aa, Artificial Sequence
  Synthetic construct
ARNPSSWYGTSTLDY

SEQ ID NO: 13661 - protein, 22 aa, Artificial Sequence
  Synthetic construct
AKDIGRFDYYKILGRGGGAFDI

SEQ ID NO: 13662 - protein, 14 aa, Artificial Sequence
  Synthetic construct
ARGDGGYDLYYFDF

SEQ ID NO: 13663 - protein, 17 aa, Artificial Sequence
  Synthetic construct
ARGYDISTGSSTGAFDI

SEQ ID NO: 13664 - protein, 16 aa, Artificial Sequence
  Synthetic construct
ARDRGAGDLIFGVFDS

SEQ ID NO: 13665 - protein, 18 aa, Artificial Sequence
  Synthetic construct
ARWGRDQWEPALTNAFDI

SEQ ID NO: 13666 - protein, 14 aa, Artificial Sequence
  Synthetic construct
ATSSGRYYNGHDSN

SEQ ID NO: 13667 - protein, 22 aa, Artificial Sequence
  Synthetic construct
ARDIADSKYRSGWYHYYYYMDV

SEQ ID NO: 13668 - protein, 11 aa, Artificial Sequence
  Synthetic construct
ARDLQEHGLDV

SEQ ID NO: 13669 - protein, 21 aa, Artificial Sequence
  Synthetic construct
AKGGDYYGSGSYYNGYYYMDV

SEQ ID NO: 13670 - protein, 22 aa, Artificial Sequence
  Synthetic construct
ARDIADSKYSSGWYNYYYYMDV

SEQ ID NO: 13671 - protein, 10 aa, Artificial Sequence
  Synthetic construct
AKDSSGIPDY

SEQ ID NO: 13672 - protein, 13 aa, Artificial Sequence
  Synthetic construct
ARGTYYYYSYLDV

SEQ ID NO: 13673 - protein, 14 aa, Artificial Sequence
  Synthetic construct
ARARGGSYYYGLDV

SEQ ID NO: 13674 - protein, 19 aa, Artificial Sequence
  Synthetic construct
AREMGIGGGDLYYHYGMDV

SEQ ID NO: 13675 - protein, 14 aa, Artificial Sequence
  Synthetic construct
ARSLGGNYFDAFNI

SEQ ID NO: 13676 - protein, 19 aa, Artificial Sequence
  Synthetic construct
STVDYYYDSSAYVNDAFDI

SEQ ID NO: 13677 - protein, 13 aa, Artificial Sequence
  Synthetic construct
ARSRGGGYGPPDY

SEQ ID NO: 13678 - protein, 21 aa, Artificial Sequence
  Synthetic construct
ARLTARVAMIVVIRGSYYFDY

SEQ ID NO: 13679 - protein, 21 aa, Artificial Sequence
  Synthetic construct
ASLGGDYYGSGSYYNSSVFDP

SEQ ID NO: 13680 - protein, 11 aa, Artificial Sequence
  Synthetic construct
ARGQYSTGYDS

SEQ ID NO: 13681 - protein, 13 aa, Artificial Sequence
  Synthetic construct
LSRSSGYHNWFDP

SEQ ID NO: 13682 - protein, 24 aa, Artificial Sequence
  Synthetic construct
ARIRLFSINPGPLQTFYYYYGMDV

SEQ ID NO: 13683 - protein, 16 aa, Artificial Sequence
  Synthetic construct
ARDRGLTQLDENWFDP

SEQ ID NO: 13684 - protein, 20 aa, Artificial Sequence
  Synthetic construct
ARPGGSGSSFTYYYYYYMDV

SEQ ID NO: 13685 - protein, 11 aa, Artificial Sequence
  Synthetic construct
ANKRISGDFNY

SEQ ID NO: 13686 - protein, 10 aa, Artificial Sequence
  Synthetic construct
ITDPGEYRPY

SEQ ID NO: 13687 - protein, 13 aa, Artificial Sequence
  Synthetic construct
ARMRGWRGRAFDI

SEQ ID NO: 13688 - protein, 11 aa, Artificial Sequence
  Synthetic construct
ARGGLWGTFDY

SEQ ID NO: 13689 - protein, 11 aa, Artificial Sequence
  Synthetic construct
ARHLDYYGTDV

SEQ ID NO: 13690 - protein, 17 aa, Artificial Sequence
  Synthetic construct
ARDPLRPSAGDDDGFDV

SEQ ID NO: 13691 - protein, 23 aa, Artificial Sequence
  Synthetic construct
ARVRGVGDFWSGYFFVSSTYFDS

SEQ ID NO: 13692 - protein, 9 aa, Artificial Sequence
  Synthetic construct
AKGATKVDY

SEQ ID NO: 13693 - protein, 15 aa, Artificial Sequence
  Synthetic construct
TRDSSGYYYYYHMDV

SEQ ID NO: 13694 - protein, 17 aa, Artificial Sequence
  Synthetic construct
AREANYDFWRAYYVIDY

SEQ ID NO: 13695 - protein, 22 aa, Artificial Sequence
  Synthetic construct
ARAPGGGYCTNGVCYDAEYFQN

SEQ ID NO: 13696 - protein, 12 aa, Artificial Sequence
  Synthetic construct
ARDFIGIPGVDH

SEQ ID NO: 13697 - protein, 25 aa, Artificial Sequence
  Synthetic construct
ARDGGLVEVIPAAMFGVKYYYYMDV

SEQ ID NO: 13698 - protein, 14 aa, Artificial Sequence
  Synthetic construct
AREGIVGATTGLDY

SEQ ID NO: 13699 - protein, 12 aa, Artificial Sequence
  Synthetic construct
ARVNPVGGGPDF

SEQ ID NO: 13700 - protein, 18 aa, Artificial Sequence
  Synthetic construct
ARVAVGYAPWYYYYGMDV

SEQ ID NO: 13701 - protein, 13 aa, Artificial Sequence
  Synthetic construct
ARQTTLFIGEFDP

SEQ ID NO: 13702 - protein, 13 aa, Artificial Sequence
  Synthetic construct
ARGGGNYFGGFDY

SEQ ID NO: 13703 - protein, 17 aa, Artificial Sequence
  Synthetic construct
ARGPIVLMVYPRYYFDY

SEQ ID NO: 13704 - protein, 13 aa, Artificial Sequence
  Synthetic construct
ARDDVVAALKFDF

SEQ ID NO: 13705 - protein, 12 aa, Artificial Sequence
  Synthetic construct
ARGGGGYKYFDY

SEQ ID NO: 13706 - protein, 23 aa, Artificial Sequence
  Synthetic construct
ARVLSSSQLGSEGRYYYYYYMDV

SEQ ID NO: 13707 - protein, 15 aa, Artificial Sequence
  Synthetic construct
AKGAGSVSYKFFFDN

SEQ ID NO: 13708 - protein, 18 aa, Artificial Sequence
  Synthetic construct
ARGTRHCGSTSCWPWFDP

SEQ ID NO: 13709 - protein, 21 aa, Artificial Sequence
  Synthetic construct
ARFPPDTSGSFPHASNYYMDV

SEQ ID NO: 13710 - protein, 9 aa, Artificial Sequence
  Synthetic construct
AKGATKVDY

SEQ ID NO: 13711 - protein, 10 aa, Artificial Sequence
  Synthetic construct
ARGWNYHFDS

SEQ ID NO: 13712 - protein, 13 aa, Artificial Sequence
  Synthetic construct
ARDDVVGAFKFDY

SEQ ID NO: 13713 - protein, 12 aa, Artificial Sequence
  Synthetic construct
ASEFLWFAEVDY

SEQ ID NO: 13714 - protein, 12 aa, Artificial Sequence
  Synthetic construct
ARAEAYSNYEDY

SEQ ID NO: 13715 - protein, 19 aa, Artificial Sequence
  Synthetic construct
AKTYSDGSGTYRGHGWFDP

SEQ ID NO: 13716 - protein, 14 aa, Artificial Sequence
  Synthetic construct
ARGYGGNYRAYFDY

SEQ ID NO: 13717 - protein, 12 aa, Artificial Sequence
  Synthetic construct
ARAEAYSNYEDY

SEQ ID NO: 13718 - protein, 17 aa, Artificial Sequence
  Synthetic construct
ATGDPYYHAPGRDAFDI

SEQ ID NO: 13719 - protein, 16 aa, Artificial Sequence
  Synthetic construct
ARRHRPFTLLRGAIDY

SEQ ID NO: 13720 - protein, 15 aa, Artificial Sequence
  Synthetic construct
ARDDGSGLHNYYMDV

SEQ ID NO: 13721 - protein, 15 aa, Artificial Sequence
  Synthetic construct
ARYFAYEGSGYSWDS

SEQ ID NO: 13722 - protein, 23 aa, Artificial Sequence
  Synthetic construct
ARGSVHCSSTSCYERSGYWYFDL

SEQ ID NO: 13723 - protein, 12 aa, Artificial Sequence
  Synthetic construct
ATVPLMIQVFAD

SEQ ID NO: 13724 - protein, 21 aa, Artificial Sequence
  Synthetic construct
AKDMPKGARSGWYYYYYGMDV

SEQ ID NO: 13725 - protein, 16 aa, Artificial Sequence
  Synthetic construct
VHTGAVPPAMVGAFDI

SEQ ID NO: 13726 - protein, 16 aa, Artificial Sequence
  Synthetic construct
ARFSRTYYDKSYAFDI

SEQ ID NO: 13727 - protein, 11 aa, Artificial Sequence
  Synthetic construct
ARLTTVTIFDS

SEQ ID NO: 13728 - protein, 12 aa, Artificial Sequence
  Synthetic construct
ACGYSGYDYEAP

SEQ ID NO: 13729 - protein, 25 aa, Artificial Sequence
  Synthetic construct
ARQVRVFGYDFWSGSQPYYYNAMDV

SEQ ID NO: 13730 - protein, 12 aa, Artificial Sequence
  Synthetic construct
VRVGGATRAFDI

SEQ ID NO: 13731 - protein, 14 aa, Artificial Sequence
  Synthetic construct
AVPPQALVTADVDY

SEQ ID NO: 13732 - protein, 17 aa, Artificial Sequence
  Synthetic construct
ARIKYDILAGYYIGFDY

SEQ ID NO: 13733 - protein, 21 aa, Artificial Sequence
  Synthetic construct
ATINRPRENLAYFDSTDYSAY

SEQ ID NO: 13734 - protein, 10 aa, Artificial Sequence
  Synthetic construct
ARDNVRLAYL

SEQ ID NO: 13735 - protein, 20 aa, Artificial Sequence
  Synthetic construct
ARVSRRSGLDFSTFRGAFDI

SEQ ID NO: 13736 - protein, 13 aa, Artificial Sequence
  Synthetic construct
ARRVPGDYYCLDV

SEQ ID NO: 13737 - protein, 13 aa, Artificial Sequence
  Synthetic construct
ARMDYYHSWYFDL

SEQ ID NO: 13738 - protein, 19 aa, Artificial Sequence
  Synthetic construct
ARDFDSMVRGGYYYYYMDV

SEQ ID NO: 13739 - protein, 14 aa, Artificial Sequence
  Synthetic construct
AREVPWFGENGIDY

SEQ ID NO: 13740 - protein, 21 aa, Artificial Sequence
  Synthetic construct
ARDIADSKYSSGWYYYYYMDV

SEQ ID NO: 13741 - protein, 11 aa, Artificial Sequence
  Synthetic construct
ARARGLYHFDC

SEQ ID NO: 13742 - protein, 16 aa, Artificial Sequence
  Synthetic construct
ARDWGILTGYLGLMDY

SEQ ID NO: 13743 - protein, 17 aa, Artificial Sequence
  Synthetic construct
ATEVVGELRLAYNGMDV

SEQ ID NO: 13744 - protein, 15 aa, Artificial Sequence
  Synthetic construct
ARDDGSSLHNYYMDV

SEQ ID NO: 13745 - protein, 17 aa, Artificial Sequence
  Synthetic construct
AHSRHDYVWGSYRSFDY

SEQ ID NO: 13746 - protein, 12 aa, Artificial Sequence
  Synthetic construct
AKGFDAFWSGPT

SEQ ID NO: 13747 - protein, 16 aa, Artificial Sequence
  Synthetic construct
ARVFRSSVMVRGPTDY

SEQ ID NO: 13748 - protein, 20 aa, Artificial Sequence
  Synthetic construct
ARELKIVATTGHYYYYYMDV

SEQ ID NO: 13749 - protein, 11 aa, Artificial Sequence
  Synthetic construct
AGGGSSTSIDY

SEQ ID NO: 13750 - protein, 12 aa, Artificial Sequence
  Synthetic construct
ARYTSSGREFDP

SEQ ID NO: 13751 - protein, 14 aa, Artificial Sequence
  Synthetic construct
AAEHSDLWVRAFEI

SEQ ID NO: 13752 - protein, 13 aa, Artificial Sequence
  Synthetic construct
ARTYYYDTDAFDI

SEQ ID NO: 13753 - protein, 13 aa, Artificial Sequence
  Synthetic construct
ARAWGAGIPSFDY

SEQ ID NO: 13754 - protein, 20 aa, Artificial Sequence
  Synthetic construct
ARHPRGYYDSSGYYSHAFDY

SEQ ID NO: 13755 - protein, 19 aa, Artificial Sequence
  Synthetic construct
ARGGAVAEGDYYYYYGMDV

SEQ ID NO: 13756 - protein, 15 aa, Artificial Sequence
  Synthetic construct
ARVWDILTYTDAFDI

SEQ ID NO: 13757 - protein, 18 aa, Artificial Sequence
  Synthetic construct
AREPFLEHGFQSYSWFDP

SEQ ID NO: 13758 - protein, 12 aa, Artificial Sequence
  Synthetic construct
TRHEWLGGTWVY

SEQ ID NO: 13759 - protein, 20 aa, Artificial Sequence
  Synthetic construct
ARADTYYDLLTGHLGALFDY

SEQ ID NO: 13760 - protein, 13 aa, Artificial Sequence
  Synthetic construct
ARIAAAGLSYLDY

SEQ ID NO: 13761 - protein, 15 aa, Artificial Sequence
  Synthetic construct
ATGPPRGSGSYGPDY

SEQ ID NO: 13762 - protein, 20 aa, Artificial Sequence
  Synthetic construct
AKAGEWGYDILTGHGPPFDF

SEQ ID NO: 13763 - protein, 22 aa, Artificial Sequence
  Synthetic construct
ARDSFRGVGVTAMDYYYYGMDV

SEQ ID NO: 13764 - protein, 16 aa, Artificial Sequence
  Synthetic construct
ARGPEGGGSYYVPLGH

SEQ ID NO: 13765 - protein, 9 aa, Artificial Sequence
  Synthetic construct
AHNKGRFDP

SEQ ID NO: 13766 - protein, 21 aa, Artificial Sequence
  Synthetic construct
ARDPGYCSGGSCNNSYYYMDV

SEQ ID NO: 13767 - protein, 25 aa, Artificial Sequence
  Synthetic construct
ARGRFRPDFDWLRSALYDQSLDFDI

SEQ ID NO: 13768 - protein, 12 aa, Artificial Sequence
  Synthetic construct
ARGRGLGWWFDP

SEQ ID NO: 13769 - protein, 21 aa, Artificial Sequence
  Synthetic construct
ARMQGYCSGGSCYSGYYGMDV

SEQ ID NO: 13770 - protein, 13 aa, Artificial Sequence
  Synthetic construct
ARMRGWRGRAFDI

SEQ ID NO: 13771 - protein, 23 aa, Artificial Sequence
  Synthetic construct
ARVENGNFDWLFNAGYYYYYMDV

SEQ ID NO: 13772 - protein, 18 aa, Artificial Sequence
  Synthetic construct
ARLVVGYAPWYYYHGMDV

SEQ ID NO: 13773 - protein, 19 aa, Artificial Sequence
  Synthetic construct
AKDFGLLWFGKLFSGVFDI

SEQ ID NO: 13774 - protein, 21 aa, Artificial Sequence
  Synthetic construct
ARRPSSYYYGSGSYVSDAFDI

SEQ ID NO: 13775 - protein, 18 aa, Artificial Sequence
  Synthetic construct
ATVFYYGSDNLYNGAFDY

SEQ ID NO: 13776 - protein, 12 aa, Artificial Sequence
  Synthetic construct
ARRGIMIRWFDP

SEQ ID NO: 13777 - protein, 17 aa, Artificial Sequence
  Synthetic construct
ARGRHLRNNYHRVHMDV

SEQ ID NO: 13778 - protein, 13 aa, Artificial Sequence
  Synthetic construct
ARTREYTNYYMDV

SEQ ID NO: 13779 - protein, 13 aa, Artificial Sequence
  Synthetic construct
AHTNGAGRNYMDV

SEQ ID NO: 13780 - protein, 14 aa, Artificial Sequence
  Synthetic construct
ARGQGATLRYGMDV

SEQ ID NO: 13781 - protein, 13 aa, Artificial Sequence
  Synthetic construct
AIASGRTYYGMNV

SEQ ID NO: 13782 - protein, 19 aa, Artificial Sequence
  Synthetic construct
ARGTSLVWFGELYIPNLDY

SEQ ID NO: 13783 - protein, 14 aa, Artificial Sequence
  Synthetic construct
AKSYRGGYYDPLDI

SEQ ID NO: 13784 - protein, 15 aa, Artificial Sequence
  Synthetic construct
ARDFEEMASIRPFDY

SEQ ID NO: 13785 - protein, 19 aa, Artificial Sequence
  Synthetic construct
ASAEEDFGVIENYFYGMDV

SEQ ID NO: 13786 - protein, 11 aa, Artificial Sequence
  Synthetic construct
APSGTHHPVGG

SEQ ID NO: 13787 - protein, 12 aa, Artificial Sequence
  Synthetic construct
AKVSGIGSALDY

SEQ ID NO: 13788 - protein, 11 aa, Artificial Sequence
  Synthetic construct
ASQGGAGEAHH

SEQ ID NO: 13789 - protein, 20 aa, Artificial Sequence
  Synthetic construct
ARLNIAEAGLGNYFYYGFDV

SEQ ID NO: 13790 - protein, 16 aa, Artificial Sequence
  Synthetic construct
AHTGSVPPGMVGAFDI

SEQ ID NO: 13791 - protein, 22 aa, Artificial Sequence
  Synthetic construct
ARVSEWIYSGYDWGYYYYYMDV

SEQ ID NO: 13792 - protein, 21 aa, Artificial Sequence
  Synthetic construct
ARGAHLRGTITFGGVFSIFDS

SEQ ID NO: 13793 - protein, 14 aa, Artificial Sequence
  Synthetic construct
ARTYSGSYYGPFDF

SEQ ID NO: 13794 - protein, 14 aa, Artificial Sequence
  Synthetic construct
ARGFGGSYRGYFDY

SEQ ID NO: 13795 - protein, 5 aa, Artificial Sequence
  Synthetic construct
TTWWF

SEQ ID NO: 13796 - protein, 14 aa, Artificial Sequence
  Synthetic construct
AKESVTTSGGWLDP

SEQ ID NO: 13797 - protein, 12 aa, Artificial Sequence
  Synthetic construct
VKGSSSWFSFDY

SEQ ID NO: 13798 - protein, 11 aa, Artificial Sequence
  Synthetic construct
ARDLWDYGMDV

SEQ ID NO: 13799 - protein, 15 aa, Artificial Sequence
  Synthetic construct
ARALSYNGIYPNGDY

SEQ ID NO: 13800 - protein, 24 aa, Artificial Sequence
  Synthetic construct
ARQWQPGAWVIPYYSDSILNWFDP

SEQ ID NO: 13801 - protein, 12 aa, Artificial Sequence
  Synthetic construct
ACGYSGYDYEAP

SEQ ID NO: 13802 - protein, 9 aa, Artificial Sequence
  Synthetic construct
ARVGGGPEY

SEQ ID NO: 13803 - protein, 13 aa, Artificial Sequence
  Synthetic construct
ARHAKEAARHPDY

SEQ ID NO: 13804 - protein, 19 aa, Artificial Sequence
  Synthetic construct
ARDGQQSFGNIYYYYYMDV

SEQ ID NO: 13805 - protein, 6 aa, Artificial Sequence
  Synthetic construct
VRGFDY

SEQ ID NO: 13806 - protein, 14 aa, Artificial Sequence
  Synthetic construct
ARDGAVGSTTGLDY

SEQ ID NO: 13807 - protein, 12 aa, Artificial Sequence
  Synthetic construct
VRDYGHPYFIDV

SEQ ID NO: 13808 - protein, 14 aa, Artificial Sequence
  Synthetic construct
AKDVVFWSAYYYDY

SEQ ID NO: 13809 - protein, 15 aa, Artificial Sequence
  Synthetic construct
VRDPNTYSWTEYFQD

SEQ ID NO: 13810 - protein, 14 aa, Artificial Sequence
  Synthetic construct
ARDGGGYGDYGCDH

SEQ ID NO: 13811 - protein, 23 aa, Artificial Sequence
  Synthetic construct
ARAEYSRIAAAFGAVAGTDSFDI

SEQ ID NO: 13812 - protein, 11 aa, Artificial Sequence
  Synthetic construct
TTLGNHPPEFF

SEQ ID NO: 13813 - protein, 20 aa, Artificial Sequence
  Synthetic construct
ARDRYSSGWYRDSNNYWFDP

SEQ ID NO: 13814 - protein, 13 aa, Artificial Sequence
  Synthetic construct
ARYPSPNPYYFDY

SEQ ID NO: 13815 - protein, 15 aa, Artificial Sequence
  Synthetic construct
ARDADTTLVTGVMDV

SEQ ID NO: 13816 - protein, 10 aa, Artificial Sequence
  Synthetic construct
ARTISGTIDY

SEQ ID NO: 13817 - protein, 19 aa, Artificial Sequence
  Synthetic construct
ARDSVVVGAQNSVFYGMDV

SEQ ID NO: 13818 - protein, 20 aa, Artificial Sequence
  Synthetic construct
ARGGIFVVVPPAHKNWYFDL

SEQ ID NO: 13819 - protein, 13 aa, Artificial Sequence
  Synthetic construct
ARRPLTDYYYMDV

SEQ ID NO: 13820 - protein, 19 aa, Artificial Sequence
  Synthetic construct
ARDGRYYDNSGYSIHASDI

SEQ ID NO: 13821 - protein, 15 aa, Artificial Sequence
  Synthetic construct
ARGHGSGSYYGAFAY

SEQ ID NO: 13822 - protein, 14 aa, Artificial Sequence
  Synthetic construct
AKSATIVLMVSAIY

SEQ ID NO: 13823 - protein, 14 aa, Artificial Sequence
  Synthetic construct
AKGDTSSWLGAMDV

SEQ ID NO: 13824 - protein, 17 aa, Artificial Sequence
  Synthetic construct
ARFGYNSVETFIDAFDI

SEQ ID NO: 13825 - protein, 15 aa, Artificial Sequence
  Synthetic construct
AKPVSSSWYEGAFHS

SEQ ID NO: 13826 - protein, 14 aa, Artificial Sequence
  Synthetic construct
ARYSPGGYGDYEGD

SEQ ID NO: 13827 - protein, 18 aa, Artificial Sequence
  Synthetic construct
ARHGGTGNRKYYYFYMDV

SEQ ID NO: 13828 - protein, 21 aa, Artificial Sequence
  Synthetic construct
ARGYYYGSGSYYNPDPNWFDP

SEQ ID NO: 13829 - protein, 14 aa, Artificial Sequence
  Synthetic construct
ARGHGVYHYYGMDV

SEQ ID NO: 13830 - protein, 15 aa, Artificial Sequence
  Synthetic construct
ARDSDYGDYANWFDP

SEQ ID NO: 13831 - protein, 11 aa, Artificial Sequence
  Synthetic construct
AKDLSTGVIDY

SEQ ID NO: 13832 - protein, 19 aa, Artificial Sequence
  Synthetic construct
ARGQLVVDGDYYYFYGMDV

SEQ ID NO: 13833 - protein, 16 aa, Artificial Sequence
  Synthetic construct
AKGGMYASTWYGVFDY

SEQ ID NO: 13834 - protein, 15 aa, Artificial Sequence
  Synthetic construct
ARDGDYGSGVWALDP

SEQ ID NO: 13835 - protein, 25 aa, Artificial Sequence
  Synthetic construct
ARGAGEQRLVGGLFGVSHFYYYMDV

SEQ ID NO: 13836 - protein, 19 aa, Artificial Sequence
  Synthetic construct
ASAEEDFAVVEKYYYGMDV

SEQ ID NO: 13837 - protein, 15 aa, Artificial Sequence
  Synthetic construct
ARGLFIPAAMGWFDP

SEQ ID NO: 13838 - protein, 14 aa, Artificial Sequence
  Synthetic construct
ARSNRRWVYQGVDV

SEQ ID NO: 13839 - protein, 12 aa, Artificial Sequence
  Synthetic construct
ARLNNNNWAFDY

SEQ ID NO: 13840 - protein, 16 aa, Artificial Sequence
  Synthetic construct
VKIGTGGYGSRNYFDF

SEQ ID NO: 13841 - protein, 16 aa, Artificial Sequence
  Synthetic construct
ARGFGQQWLVPMKIDY

SEQ ID NO: 13842 - protein, 15 aa, Artificial Sequence
  Synthetic construct
ARQLKWFGELHRFDP

SEQ ID NO: 13843 - protein, 18 aa, Artificial Sequence
  Synthetic construct
ARLTYYFDTSGHLYYFDY

SEQ ID NO: 13844 - protein, 19 aa, Artificial Sequence
  Synthetic construct
ARRGNCSGASCYLDWHFDL

SEQ ID NO: 13845 - protein, 23 aa, Artificial Sequence
  Synthetic construct
ARVRGVGDFWSGYFFVSSTYFDS

SEQ ID NO: 13846 - protein, 12 aa, Artificial Sequence
  Synthetic construct
ATEGQWLYYFEY

SEQ ID NO: 13847 - protein, 16 aa, Artificial Sequence
  Synthetic construct
ARDGAGGYSLYDWFDP

SEQ ID NO: 13848 - protein, 20 aa, Artificial Sequence
  Synthetic construct
AKADGGYYDSSAFYSTAIDY

SEQ ID NO: 13849 - protein, 16 aa, Artificial Sequence
  Synthetic construct
ARDGYDTGGYYVCVDY

SEQ ID NO: 13850 - protein, 18 aa, Artificial Sequence
  Synthetic construct
ARLNWVVNGDNYYYYMDV

SEQ ID NO: 13851 - protein, 19 aa, Artificial Sequence
  Synthetic construct
ATGPLRYFDWLFGPYYMDV

SEQ ID NO: 13852 - protein, 16 aa, Artificial Sequence
  Synthetic construct
ARWGAGSGWDEGEFDY

SEQ ID NO: 13853 - protein, 17 aa, Artificial Sequence
  Synthetic construct
GGGGHGLGDNYYYGTDV

SEQ ID NO: 13854 - protein, 6 aa, Artificial Sequence
  Synthetic construct
ARGFDY

SEQ ID NO: 13855 - protein, 14 aa, Artificial Sequence
  Synthetic construct
ARPGSGSYYSYFDY

SEQ ID NO: 13856 - protein, 13 aa, Artificial Sequence
  Synthetic construct
SRMRGWRGRAFDI

SEQ ID NO: 13857 - protein, 18 aa, Artificial Sequence
  Synthetic construct
ARDNYSSGWYYYFFYMDV

SEQ ID NO: 13858 - protein, 6 aa, Artificial Sequence
  Synthetic construct
AKNWDY

SEQ ID NO: 13859 - protein, 18 aa, Artificial Sequence
  Synthetic construct
ARRRTMIVVVPKGDWFDP

SEQ ID NO: 13860 - protein, 13 aa, Artificial Sequence
  Synthetic construct
ASLLEWSHYGMDV

SEQ ID NO: 13861 - protein, 22 aa, Artificial Sequence
  Synthetic construct
AKDIGRYDHYDTFGRVGGAFDI

SEQ ID NO: 13862 - protein, 20 aa, Artificial Sequence
  Synthetic construct
ARVNNYPDSSGHHSGEHFDH

SEQ ID NO: 13863 - protein, 18 aa, Artificial Sequence
  Synthetic construct
ARERGYSSSSSATYYFDY

SEQ ID NO: 13864 - protein, 15 aa, Artificial Sequence
  Synthetic construct
ARDDGSGVHNYYMDV

SEQ ID NO: 13865 - protein, 17 aa, Artificial Sequence
  Synthetic construct
AKSVLEWLLGYYYGMDV

SEQ ID NO: 13866 - protein, 11 aa, Artificial Sequence
  Synthetic construct
ASQGGAGEAHH

SEQ ID NO: 13867 - protein, 12 aa, Artificial Sequence
  Synthetic construct
IGSGAGWGSFDY

SEQ ID NO: 13868 - protein, 24 aa, Artificial Sequence
  Synthetic construct
ARAPRTSMLRGIIITALEPLRFDY

SEQ ID NO: 13869 - protein, 17 aa, Artificial Sequence
  Synthetic construct
ARTLTTYYYESNTYLDV

SEQ ID NO: 13870 - protein, 20 aa, Artificial Sequence
  Synthetic construct
ARWAPTMAAAGDSYYYYMDV

SEQ ID NO: 13871 - protein, 19 aa, Artificial Sequence
  Synthetic construct
ARAELVLVPAAIGSNAFDI

SEQ ID NO: 13872 - protein, 19 aa, Artificial Sequence
  Synthetic construct
ARPVQIVLLPGAASSWFDP

SEQ ID NO: 13873 - protein, 15 aa, Artificial Sequence
  Synthetic construct
VRDPYIVPTALPLDY

SEQ ID NO: 13874 - protein, 9 aa, Artificial Sequence
  Synthetic construct
ARDEEGPDY

SEQ ID NO: 13875 - protein, 14 aa, Artificial Sequence
  Synthetic construct
ARRGYSFGYIGFDI

SEQ ID NO: 13876 - protein, 21 aa, Artificial Sequence
  Synthetic construct
ATASATPDYYDSSSFYYQLDY

SEQ ID NO: 13877 - protein, 21 aa, Artificial Sequence
  Synthetic construct
ARGYYYGSGSYYNPDPNWFDP

SEQ ID NO: 13878 - protein, 19 aa, Artificial Sequence
  Synthetic construct
AKTYSDGSGTYRGHGWFDP

SEQ ID NO: 13879 - protein, 14 aa, Artificial Sequence
  Synthetic construct
AKLSPTTAEDYFDY

SEQ ID NO: 13880 - protein, 15 aa, Artificial Sequence
  Synthetic construct
AGHSPYDSSGYYKVD

SEQ ID NO: 13881 - protein, 18 aa, Artificial Sequence
  Synthetic construct
ARDRHTAMPDYSYYYMDV

SEQ ID NO: 13882 - protein, 18 aa, Artificial Sequence
  Synthetic construct
VRDPRGEMSLRSDDAFDI

SEQ ID NO: 13883 - protein, 17 aa, Artificial Sequence
  Synthetic construct
TRDRLIWEGDYHYYMDV

SEQ ID NO: 13884 - protein, 9 aa, Artificial Sequence
  Synthetic construct
AKGATKMDY

SEQ ID NO: 13885 - protein, 13 aa, Artificial Sequence
  Synthetic construct
AKDSSRDYGGSDF

SEQ ID NO: 13886 - protein, 13 aa, Artificial Sequence
  Synthetic construct
ATGGGSYYNLFDI

SEQ ID NO: 13887 - protein, 11 aa, Artificial Sequence
  Synthetic construct
AKSPGSWAHDY

SEQ ID NO: 13888 - protein, 14 aa, Artificial Sequence
  Synthetic construct
ARAYGGSYWGAFDI

SEQ ID NO: 13889 - protein, 16 aa, Artificial Sequence
  Synthetic construct
ARVVPMIRGVVRWFDP

SEQ ID NO: 13890 - protein, 12 aa, Artificial Sequence
  Synthetic construct
AGRSSDDPGEDV

SEQ ID NO: 13891 - protein, 11 aa, Artificial Sequence
  Synthetic construct
ARDWGEFYFDY

SEQ ID NO: 13892 - protein, 24 aa, Artificial Sequence
  Synthetic construct
ARDPVSYYDFWSGHVDYYRYGMDV

SEQ ID NO: 13893 - protein, 18 aa, Artificial Sequence
  Synthetic construct
ARDPISGWYRPGVYYMDV

SEQ ID NO: 13894 - protein, 9 aa, Artificial Sequence
  Synthetic construct
AKGATKVDY

SEQ ID NO: 13895 - protein, 12 aa, Artificial Sequence
  Synthetic construct
ARDQNNWNWIDT

SEQ ID NO: 13896 - protein, 14 aa, Artificial Sequence
  Synthetic construct
AFTQRGYYYYGMDV

SEQ ID NO: 13897 - protein, 17 aa, Artificial Sequence
  Synthetic construct
ARVYSSGWRLYDNGIDV

SEQ ID NO: 13898 - protein, 9 aa, Artificial Sequence
  Synthetic construct
ARVGGGPEY

SEQ ID NO: 13899 - protein, 26 aa, Artificial Sequence
  Synthetic construct
ARSPYYDFWSGYYFGAGQYYYYGMDV

SEQ ID NO: 13900 - protein, 20 aa, Artificial Sequence
  Synthetic construct
ARHGKMVRGPIYRKPHWLDP

SEQ ID NO: 13901 - protein, 16 aa, Artificial Sequence
  Synthetic construct
ARVGSYDDSSGEYSDN

SEQ ID NO: 13902 - protein, 15 aa, Artificial Sequence
  Synthetic construct
ARAMDTYNYDSTFDY

SEQ ID NO: 13903 - protein, 14 aa, Artificial Sequence
  Synthetic construct
ARGYLQVWSTKFDS

SEQ ID NO: 13904 - protein, 19 aa, Artificial Sequence
  Synthetic construct
ARDAGYNYGWGSYRHGFDV

SEQ ID NO: 13905 - protein, 17 aa, Artificial Sequence
  Synthetic construct
ARERVMVTTQYYYYMDV

SEQ ID NO: 13906 - protein, 16 aa, Artificial Sequence
  Synthetic construct
ARKQYTSSWYGNWFDP

SEQ ID NO: 13907 - protein, 25 aa, Artificial Sequence
  Synthetic construct
ARGAGEQRLVGGLFGVSHFYYYMDV

SEQ ID NO: 13908 - protein, 15 aa, Artificial Sequence
  Synthetic construct
AKEALNIVVVTAPRY

SEQ ID NO: 13909 - protein, 14 aa, Artificial Sequence
  Synthetic construct
ARRGYDSGGYALGY

SEQ ID NO: 13910 - protein, 14 aa, Artificial Sequence
  Synthetic construct
ARDFEAGFSGWFDY

SEQ ID NO: 13911 - protein, 9 aa, Artificial Sequence
  Synthetic construct
AKGATKMDY

SEQ ID NO: 13912 - protein, 14 aa, Artificial Sequence
  Synthetic construct
ASTSSGSYYGPFDY

SEQ ID NO: 13913 - protein, 14 aa, Artificial Sequence
  Synthetic construct
AKGGSYAYYYYMDV

SEQ ID NO: 13914 - protein, 10 aa, Artificial Sequence
  Synthetic construct
AKLSSSWESS

SEQ ID NO: 13915 - protein, 12 aa, Artificial Sequence
  Synthetic construct
ARRRGASSLRDF

SEQ ID NO: 13916 - protein, 15 aa, Artificial Sequence
  Synthetic construct
ARTGDFWSGLVYFQH

SEQ ID NO: 13917 - protein, 9 aa, Artificial Sequence
  Synthetic construct
ARDSVYFDY

SEQ ID NO: 13918 - protein, 10 aa, Artificial Sequence
  Synthetic construct
AHETAMAANY

SEQ ID NO: 13919 - protein, 16 aa, Artificial Sequence
  Synthetic construct
ARDQVLWFGDLSPLGV

SEQ ID NO: 13920 - protein, 6 aa, Artificial Sequence
  Synthetic construct
ARGFDY

SEQ ID NO: 13921 - protein, 17 aa, Artificial Sequence
  Synthetic construct
ARSPYGLKFYFYYGMDV

SEQ ID NO: 13922 - protein, 12 aa, Artificial Sequence
  Synthetic construct
ATTTTAAAPFDF

SEQ ID NO: 13923 - protein, 18 aa, Artificial Sequence
  Synthetic construct
ARDPTGDYGLLLYNWFDP

SEQ ID NO: 13924 - protein, 11 aa, Artificial Sequence
  Synthetic construct
ARHGHGYGFDY

SEQ ID NO: 13925 - protein, 14 aa, Artificial Sequence
  Synthetic construct
ARDGGNSESWEIDY

SEQ ID NO: 13926 - protein, 24 aa, Artificial Sequence
  Synthetic construct
ARLSYFDSGDYTPGVGEYYYYMDV

SEQ ID NO: 13927 - protein, 9 aa, Artificial Sequence
  Synthetic construct
ARVETIDSY

SEQ ID NO: 13928 - protein, 14 aa, Artificial Sequence
  Synthetic construct
ARPYSGSYLFYFDY

SEQ ID NO: 13929 - protein, 12 aa, Artificial Sequence
  Synthetic construct
ARLLIEHDAFDV

SEQ ID NO: 13930 - protein, 13 aa, Artificial Sequence
  Synthetic construct
ARSGGYRLWFGEL

SEQ ID NO: 13931 - protein, 15 aa, Artificial Sequence
  Synthetic construct
GRLVVRGGWNDAFDL

SEQ ID NO: 13932 - protein, 17 aa, Artificial Sequence
  Synthetic construct
AKGRWYSSSWPTAHFDY

SEQ ID NO: 13933 - protein, 10 aa, Artificial Sequence
  Synthetic construct
AKGAMGGLDV

SEQ ID NO: 13934 - protein, 12 aa, Artificial Sequence
  Synthetic construct
ASLSSSSWYWDY

SEQ ID NO: 13935 - protein, 16 aa, Artificial Sequence
  Synthetic construct
ATYYYDTSGYNYGFEY

SEQ ID NO: 13936 - protein, 15 aa, Artificial Sequence
  Synthetic construct
ARGPPLMIGYDYLDY

SEQ ID NO: 13937 - protein, 16 aa, Artificial Sequence
  Synthetic construct
AKDHSGVAGSADAFDI

SEQ ID NO: 13938 - protein, 14 aa, Artificial Sequence
  Synthetic construct
ATERGIAAAGIFDY

SEQ ID NO: 13939 - protein, 17 aa, Artificial Sequence
  Synthetic construct
ARPNGALEWLYYYGMDV

SEQ ID NO: 13940 - protein, 16 aa, Artificial Sequence
  Synthetic construct
ARDRGLTQLDENWFDP

SEQ ID NO: 13941 - protein, 15 aa, Artificial Sequence
  Synthetic construct
VKDHSTVTTGEYFDY

SEQ ID NO: 13942 - protein, 13 aa, Artificial Sequence
  Synthetic construct
ARGGGYSYGALDF

SEQ ID NO: 13943 - protein, 22 aa, Artificial Sequence
  Synthetic construct
AKDGPTVRRELLGYYYYYYLDV

SEQ ID NO: 13944 - protein, 21 aa, Artificial Sequence
  Synthetic construct
VRGDDYYDRSGYGIDYYYMDV

SEQ ID NO: 13945 - protein, 15 aa, Artificial Sequence
  Synthetic construct
ARLWDTNDYYSGMDV

SEQ ID NO: 13946 - protein, 10 aa, Artificial Sequence
  Synthetic construct
AKDLGGYFDS

SEQ ID NO: 13947 - protein, 11 aa, Artificial Sequence
  Synthetic construct
ARRETTMGMDV

SEQ ID NO: 13948 - protein, 9 aa, Artificial Sequence
  Synthetic construct
AKGATKVDY

SEQ ID NO: 13949 - protein, 11 aa, Artificial Sequence
  Synthetic construct
AREEGRGRGPV

SEQ ID NO: 13950 - protein, 15 aa, Artificial Sequence
  Synthetic construct
ARSEGFESSGHYWDY

SEQ ID NO: 13951 - protein, 15 aa, Artificial Sequence
  Synthetic construct
ARDRGEPGLGDWFDP

SEQ ID NO: 13952 - protein, 16 aa, Artificial Sequence
  Synthetic construct
ARGPGQWLMGGYFFDS

SEQ ID NO: 13953 - protein, 17 aa, Artificial Sequence
  Synthetic construct
AREHVTAVAGTTYTMDV

SEQ ID NO: 13954 - protein, 14 aa, Artificial Sequence
  Synthetic construct
ARGSSGFEGDAFDI

SEQ ID NO: 13955 - protein, 20 aa, Artificial Sequence
  Synthetic construct
ARNFCGADCFNHVGEIDFQF

SEQ ID NO: 13956 - protein, 13 aa, Artificial Sequence
  Synthetic construct
AREGVVGATGIDY

SEQ ID NO: 13957 - protein, 13 aa, Artificial Sequence
  Synthetic construct
ARVTLWFGGAVDV

SEQ ID NO: 13958 - protein, 15 aa, Artificial Sequence
  Synthetic construct
ARDSASGWYVDAFDI

SEQ ID NO: 13959 - protein, 13 aa, Artificial Sequence
  Synthetic construct
AKDSSRDYGGSDF

SEQ ID NO: 13960 - protein, 9 aa, Artificial Sequence
  Synthetic construct
ARVGGGPEY

SEQ ID NO: 13961 - protein, 20 aa, Artificial Sequence
  Synthetic construct
ARHGVVRYFDWVSGRSPFDI

SEQ ID NO: 13962 - protein, 11 aa, Artificial Sequence
  Synthetic construct
ARSANYYYMDV

SEQ ID NO: 13963 - protein, 15 aa, Artificial Sequence
  Synthetic construct
VKGRVMATKKDYFDY

SEQ ID NO: 13964 - protein, 13 aa, Artificial Sequence
  Synthetic construct
ARSGGYRLWFGEL

SEQ ID NO: 13965 - protein, 9 aa, Artificial Sequence
  Synthetic construct
ARGHYGMDV

SEQ ID NO: 13966 - protein, 18 aa, Artificial Sequence
  Synthetic construct
ARDWGLGQAPYFYFYMDV

SEQ ID NO: 13967 - protein, 14 aa, Artificial Sequence
  Synthetic construct
ARPPGQLLFDAFGI

SEQ ID NO: 13968 - protein, 14 aa, Artificial Sequence
  Synthetic construct
AHISGFEGTLHFDN

SEQ ID NO: 13969 - protein, 13 aa, Artificial Sequence
  Synthetic construct
ARGGGSSGYYFDY

SEQ ID NO: 13970 - protein, 12 aa, Artificial Sequence
  Synthetic construct
ARSQIAFYYFDY

SEQ ID NO: 13971 - protein, 14 aa, Artificial Sequence
  Synthetic construct
ARGSSGVEGDAFDI

SEQ ID NO: 13972 - protein, 18 aa, Artificial Sequence
  Synthetic construct
ARGRDSSGLDLYYYGMDV

SEQ ID NO: 13973 - protein, 11 aa, Artificial Sequence
  Synthetic construct
ARETVVEATDY

SEQ ID NO: 13974 - protein, 15 aa, Artificial Sequence
  Synthetic construct
ATTSVHPGWGGWFDP

SEQ ID NO: 13975 - protein, 13 aa, Artificial Sequence
  Synthetic construct
ASLLEWSYYGMDV

SEQ ID NO: 13976 - protein, 16 aa, Artificial Sequence
  Synthetic construct
AKDQEIVVVAATWFDP

SEQ ID NO: 13977 - protein, 23 aa, Artificial Sequence
  Synthetic construct
ARNSCGDDCYSVLGAGGGDTLDI

SEQ ID NO: 13978 - protein, 10 aa, Artificial Sequence
  Synthetic construct
ARTISGTIDY

SEQ ID NO: 13979 - protein, 12 aa, Artificial Sequence
  Synthetic construct
VRGSSSWFSFDY

SEQ ID NO: 13980 - protein, 17 aa, Artificial Sequence
  Synthetic construct
ARDPTRPSNGDHDAFDV

SEQ ID NO: 13981 - protein, 15 aa, Artificial Sequence
  Synthetic construct
ARQNLIAVAGTPWIN

SEQ ID NO: 13982 - protein, 14 aa, Artificial Sequence
  Synthetic construct
AKSSGGSYLDAFDI

SEQ ID NO: 13983 - protein, 18 aa, Artificial Sequence
  Synthetic construct
ARLFRRTMWNRGNSWFDF

SEQ ID NO: 13984 - protein, 17 aa, Artificial Sequence
  Synthetic construct
ARDPSRPSAGDDDGFDV

SEQ ID NO: 13985 - protein, 18 aa, Artificial Sequence
  Synthetic construct
ASLMETGSPQEDYYNMDV

SEQ ID NO: 13986 - protein, 14 aa, Artificial Sequence
  Synthetic construct
AREGAVGVTTGLDY

SEQ ID NO: 13987 - protein, 12 aa, Artificial Sequence
  Synthetic construct
ARTDAYTNYADY

SEQ ID NO: 13988 - protein, 18 aa, Artificial Sequence
  Synthetic construct
ARDFSLHQSYLYYYYMDV

SEQ ID NO: 13989 - protein, 18 aa, Artificial Sequence
  Synthetic construct
AREALHYDFWIGLGWFDP

SEQ ID NO: 13990 - protein, 11 aa, Artificial Sequence
  Synthetic construct
ARQQRPWSIDY

SEQ ID NO: 13991 - protein, 12 aa, Artificial Sequence
  Synthetic construct
ARVAWGSWGMDV

SEQ ID NO: 13992 - protein, 15 aa, Artificial Sequence
  Synthetic construct
AHRTPSGWYGDWFDP

SEQ ID NO: 13993 - protein, 10 aa, Artificial Sequence
  Synthetic construct
ARVRPLDFDY

SEQ ID NO: 13994 - protein, 16 aa, Artificial Sequence
  Synthetic construct
ARSYCFNGVCDQHFQN

SEQ ID NO: 13995 - protein, 14 aa, Artificial Sequence
  Synthetic construct
ARAGGGSYYGPFDY

SEQ ID NO: 13996 - protein, 15 aa, Artificial Sequence
  Synthetic construct
ARDSDYGDYANWFDP

SEQ ID NO: 13997 - protein, 13 aa, Artificial Sequence
  Synthetic construct
ARGGGSYYWYFDL

SEQ ID NO: 13998 - protein, 22 aa, Artificial Sequence
  Synthetic construct
ARAIPPSGSYFYLYYYYYYMDV

SEQ ID NO: 13999 - protein, 17 aa, Artificial Sequence
  Synthetic construct
ARRQSSSWPKINNWFDP

SEQ ID NO: 14000 - protein, 16 aa, Artificial Sequence
  Synthetic construct
ARHDRHSDGYYHTLDY

SEQ ID NO: 14001 - protein, 17 aa, Artificial Sequence
  Synthetic construct
VGENDYSWGNYRDLMEV

SEQ ID NO: 14002 - protein, 17 aa, Artificial Sequence
  Synthetic construct
ARTLTTYYYESNTYLEV

SEQ ID NO: 14003 - protein, 18 aa, Artificial Sequence
  Synthetic construct
ARDFRGSESYYYYYYMDV

SEQ ID NO: 14004 - protein, 10 aa, Artificial Sequence
  Synthetic construct
AREDTFYFDF

SEQ ID NO: 14005 - protein, 13 aa, Artificial Sequence
  Synthetic construct
ARDLRVRGVPFDY

SEQ ID NO: 14006 - protein, 12 aa, Artificial Sequence
  Synthetic construct
ARPAAAGTSFDY

SEQ ID NO: 14007 - protein, 21 aa, Artificial Sequence
  Synthetic construct
TSLLSYSSSWSGVWDYFGLDV

SEQ ID NO: 14008 - protein, 13 aa, Artificial Sequence
  Synthetic construct
ARDDVMGAFKFDY

SEQ ID NO: 14009 - protein, 22 aa, Artificial Sequence
  Synthetic construct
ARARGYAGGGFYSDPLNYGLDV

SEQ ID NO: 14010 - protein, 14 aa, Artificial Sequence
  Synthetic construct
AREGAVGGTTGCDY

SEQ ID NO: 14011 - protein, 18 aa, Artificial Sequence
  Synthetic construct
ARVGYRLLLGSYYYYLDV

SEQ ID NO: 14012 - protein, 15 aa, Artificial Sequence
  Synthetic construct
ARDDGSSLHNYYMDV

SEQ ID NO: 14013 - protein, 13 aa, Artificial Sequence
  Synthetic construct
AAGWSYSNWYFDY

SEQ ID NO: 14014 - protein, 12 aa, Artificial Sequence
  Synthetic construct
ARRRGASSLRDF

SEQ ID NO: 14015 - protein, 13 aa, Artificial Sequence
  Synthetic construct
ARGMGTSGSALDY

SEQ ID NO: 14016 - protein, 9 aa, Artificial Sequence
  Synthetic construct
ASGMSYMDV

SEQ ID NO: 14017 - protein, 11 aa, Artificial Sequence
  Synthetic construct
ARAINPYGMDV

SEQ ID NO: 14018 - protein, 14 aa, Artificial Sequence
  Synthetic construct
VRDLEIFGVASPPP

SEQ ID NO: 14019 - protein, 21 aa, Artificial Sequence
  Synthetic construct
AKDGGWAGRYQLLFGPNYFDY

SEQ ID NO: 14020 - protein, 6 aa, Artificial Sequence
  Synthetic construct
ARGFDL

SEQ ID NO: 14021 - protein, 17 aa, Artificial Sequence
  Synthetic construct
AREHVTAVAGTTYTMDV

SEQ ID NO: 14022 - protein, 21 aa, Artificial Sequence
  Synthetic construct
ARDQGYCSGGSCHSYYHYMDV

SEQ ID NO: 14023 - protein, 6 aa, Artificial Sequence
  Synthetic construct
ARDFSL

SEQ ID NO: 14024 - protein, 18 aa, Artificial Sequence
  Synthetic construct
ARDFSLHQYYYYYYYMDV

SEQ ID NO: 14025 - protein, 18 aa, Artificial Sequence
  Synthetic construct
AREKGYSSLSSATFYFDY

SEQ ID NO: 14026 - protein, 24 aa, Artificial Sequence
  Synthetic construct
ARDPASYYDFWSGYVDYYYYGMDV

SEQ ID NO: 14027 - protein, 11 aa, Artificial Sequence
  Synthetic construct
ARWGWNDAFDI

SEQ ID NO: 14028 - protein, 12 aa, Artificial Sequence
  Synthetic construct
ARDWGKSAYFDY

SEQ ID NO: 14029 - protein, 26 aa, Artificial Sequence
  Synthetic construct
ARDEGPLGSCSGDSCNSGFHYYGLDV

SEQ ID NO: 14030 - protein, 17 aa, Artificial Sequence
  Synthetic construct
VTGARGGLWFGEILPHY

SEQ ID NO: 14031 - protein, 19 aa, Artificial Sequence
  Synthetic construct
ARGSMVRGVSLYYFYYMDV

SEQ ID NO: 14032 - protein, 14 aa, Artificial Sequence
  Synthetic construct
AKSSGGNYLDAFDI

SEQ ID NO: 14033 - protein, 17 aa, Artificial Sequence
  Synthetic construct
VGENDYSWGNYRDLMEV

SEQ ID NO: 14034 - protein, 14 aa, Artificial Sequence
  Synthetic construct
AKCASGSYKSWFDP

SEQ ID NO: 14035 - protein, 17 aa, Artificial Sequence
  Synthetic construct
ARGFWSSYSQDYSGMDV

SEQ ID NO: 14036 - protein, 22 aa, Artificial Sequence
  Synthetic construct
AKDIGRYDHFGTFGRVGGAFDI

SEQ ID NO: 14037 - protein, 6 aa, Artificial Sequence
  Synthetic construct
ARGFDY

SEQ ID NO: 14038 - protein, 22 aa, Artificial Sequence
  Synthetic construct
AKDIGRYDHYDTFDRVGGAFDI

SEQ ID NO: 14039 - protein, 14 aa, Artificial Sequence
  Synthetic construct
AHRSPRWFGESLDY

SEQ ID NO: 14040 - protein, 19 aa, Artificial Sequence
  Synthetic construct
ARGPLRYFEWKYYYIGLDV

SEQ ID NO: 14041 - protein, 18 aa, Artificial Sequence
  Synthetic construct
ARDFSGTYYNNYYYYMDV

SEQ ID NO: 14042 - protein, 22 aa, Artificial Sequence
  Synthetic construct
ARSGGWGSSVSFPYYHYYGLDV

SEQ ID NO: 14043 - protein, 19 aa, Artificial Sequence
  Synthetic construct
ARDFDTMLPGGYYYYYMDV

SEQ ID NO: 14044 - protein, 12 aa, Artificial Sequence
  Synthetic construct
AREGSWKYVLDY

SEQ ID NO: 14045 - protein, 17 aa, Artificial Sequence
  Synthetic construct
TRDRLIWEGDYHYYMDV

SEQ ID NO: 14046 - protein, 12 aa, Artificial Sequence
  Synthetic construct
AREGYNYWYFDL

SEQ ID NO: 14047 - protein, 18 aa, Artificial Sequence
  Synthetic construct
ARDRDTGMPDYYYYYMDV

SEQ ID NO: 14048 - protein, 19 aa, Artificial Sequence
  Synthetic construct
ARDFDKIAAAEYYYFYMDV

SEQ ID NO: 14049 - protein, 26 aa, Artificial Sequence
  Synthetic construct
ARDEGPLGSCSGDSCNSGFHYYGLDV

SEQ ID NO: 14050 - protein, 15 aa, Artificial Sequence
  Synthetic construct
ARETSGSYTLDAFDI

SEQ ID NO: 14051 - protein, 12 aa, Artificial Sequence
  Synthetic construct
VTWSIVGATNGY

SEQ ID NO: 14052 - protein, 13 aa, Artificial Sequence
  Synthetic construct
AKDSIAVAGPFDY

SEQ ID NO: 14053 - protein, 11 aa, Artificial Sequence
  Synthetic construct
ARAINPYGMDV

SEQ ID NO: 14054 - protein, 17 aa, Artificial Sequence
  Synthetic construct
ARGQVGYSYGYDNWFDP

SEQ ID NO: 14055 - protein, 24 aa, Artificial Sequence
  Synthetic construct
ARDPASYYDFWSGYVDYYYYGMDV

SEQ ID NO: 14056 - protein, 19 aa, Artificial Sequence
  Synthetic construct
ARGGTLMQLTTYYYYAMDV

SEQ ID NO: 14057 - protein, 16 aa, Artificial Sequence
  Synthetic construct
AKDLEFPYSSSWPPTH

SEQ ID NO: 14058 - protein, 23 aa, Artificial Sequence
  Synthetic construct
GTLGGGSASYYLSYYYYYYYMDV

SEQ ID NO: 14059 - protein, 12 aa, Artificial Sequence
  Synthetic construct
AHRRTLYDAFDI

SEQ ID NO: 14060 - protein, 15 aa, Artificial Sequence
  Synthetic construct
ARETGGSYTLEPFDI

SEQ ID NO: 14061 - protein, 12 aa, Artificial Sequence
  Synthetic construct
ARAGFGEPAFNY

SEQ ID NO: 14062 - protein, 15 aa, Artificial Sequence
  Synthetic construct
AREGMVGEAGRSLDY

SEQ ID NO: 14063 - protein, 15 aa, Artificial Sequence
  Synthetic construct
ARWDTVVVPVASFDP

SEQ ID NO: 14064 - protein, 20 aa, Artificial Sequence
  Synthetic construct
AREQYYYGSGSYYSPGGLDV

SEQ ID NO: 14065 - protein, 12 aa, Artificial Sequence
  Synthetic construct
ARDLFDDEGFDY

SEQ ID NO: 14066 - protein, 13 aa, Artificial Sequence
  Synthetic construct
ARDDVVRAFKFDF

SEQ ID NO: 14067 - protein, 12 aa, Artificial Sequence
  Synthetic construct
ARRGWGELHWAY

SEQ ID NO: 14068 - protein, 15 aa, Artificial Sequence
  Synthetic construct
AKEALNIVVVTAPRY

SEQ ID NO: 14069 - protein, 15 aa, Artificial Sequence
  Synthetic construct
ARQAMATITGVGFDP

SEQ ID NO: 14070 - protein, 21 aa, Artificial Sequence
  Synthetic construct
ARTGYSSSWNLGDYYYYYMDV

SEQ ID NO: 14071 - protein, 24 aa, Artificial Sequence
  Synthetic construct
ARDPASYYDFWSGYVDYYQYGMDV

SEQ ID NO: 14072 - protein, 16 aa, Artificial Sequence
  Synthetic construct
AKDFSSGIVGASSFDC

SEQ ID NO: 14073 - protein, 10 aa, Artificial Sequence
  Synthetic construct
ARERMRTADY

SEQ ID NO: 14074 - protein, 9 aa, Artificial Sequence
  Synthetic construct
ARQGGAFDI

SEQ ID NO: 14075 - protein, 12 aa, Artificial Sequence
  Synthetic construct
AKDRDNWGFVDY

SEQ ID NO: 14076 - protein, 23 aa, Artificial Sequence
  Synthetic construct
ARDHRDYYDSGTSYYIGENGLDP

SEQ ID NO: 14077 - protein, 18 aa, Artificial Sequence
  Synthetic construct
AREGGFTGKLGPGDWFDP

SEQ ID NO: 14078 - protein, 14 aa, Artificial Sequence
  Synthetic construct
ARGQGATLRYGMDV

SEQ ID NO: 14079 - protein, 20 aa, Artificial Sequence
  Synthetic construct
ARGVRYFDWLLSRELYYFDY

SEQ ID NO: 14080 - protein, 20 aa, Artificial Sequence
  Synthetic construct
ARSWEGIKQLPGYYYFGMDV

SEQ ID NO: 14081 - protein, 14 aa, Artificial Sequence
  Synthetic construct
SRDSSGGYWGSFDY

SEQ ID NO: 14082 - protein, 12 aa, Artificial Sequence
  Synthetic construct
ARGGGGYKYFDY

SEQ ID NO: 14083 - protein, 17 aa, Artificial Sequence
  Synthetic construct
ARKPLLYSSVNPGAFDI

SEQ ID NO: 14084 - protein, 6 aa, Artificial Sequence
  Synthetic construct
QSVSSY

SEQ ID NO: 14085 - protein, 6 aa, Artificial Sequence
  Synthetic construct
ALPKKY

SEQ ID NO: 14086 - protein, 6 aa, Artificial Sequence
  Synthetic construct
NLGDKY

SEQ ID NO: 14087 - protein, 9 aa, Artificial Sequence
  Synthetic construct
SSDVGSYNY

SEQ ID NO: 14088 - protein, 11 aa, Artificial Sequence
  Synthetic construct
QSLLYSNGYTY

SEQ ID NO: 14089 - protein, 6 aa, Artificial Sequence
  Synthetic construct
QSVSSY

SEQ ID NO: 14090 - protein, 6 aa, Artificial Sequence
  Synthetic construct
ALPRKY

SEQ ID NO: 14091 - protein, 9 aa, Artificial Sequence
  Synthetic construct
SSNIGAGYD

SEQ ID NO: 14092 - protein, 6 aa, Artificial Sequence
  Synthetic construct
QSVSSN

SEQ ID NO: 14093 - protein, 6 aa, Artificial Sequence
  Synthetic construct
QSVSSN

SEQ ID NO: 14094 - protein, 6 aa, Artificial Sequence
  Synthetic construct
NLGDKY

SEQ ID NO: 14095 - protein, 12 aa, Artificial Sequence
  Synthetic construct
QSVLYSSNNKNY

SEQ ID NO: 14096 - protein, 9 aa, Artificial Sequence
  Synthetic construct
SSDIGSYNL

SEQ ID NO: 14097 - protein, 6 aa, Artificial Sequence
  Synthetic construct
QSISGW

SEQ ID NO: 14098 - protein, 6 aa, Artificial Sequence
  Synthetic construct
QSVSSN

SEQ ID NO: 14099 - protein, 12 aa, Artificial Sequence
  Synthetic construct
QSVLYSSNNKNY

SEQ ID NO: 14100 - protein, 7 aa, Artificial Sequence
  Synthetic construct
QSVSSDS

SEQ ID NO: 14101 - protein, 7 aa, Artificial Sequence
  Synthetic construct
QSISSSH

SEQ ID NO: 14102 - protein, 6 aa, Artificial Sequence
  Synthetic construct
KLGDKY

SEQ ID NO: 14103 - protein, 6 aa, Artificial Sequence
  Synthetic construct
QDISNY

SEQ ID NO: 14104 - protein, 8 aa, Artificial Sequence
  Synthetic construct
SSNIGSNT

SEQ ID NO: 14105 - protein, 6 aa, Artificial Sequence
  Synthetic construct
QSFSSY

SEQ ID NO: 14106 - protein, 6 aa, Artificial Sequence
  Synthetic construct
QSISSY

SEQ ID NO: 14107 - protein, 9 aa, Artificial Sequence
  Synthetic construct
SSDVGGYNY

SEQ ID NO: 14108 - protein, 7 aa, Artificial Sequence
  Synthetic construct
QSVSSSY

SEQ ID NO: 14109 - protein, 7 aa, Artificial Sequence
  Synthetic construct
SGYSNYK

SEQ ID NO: 14110 - protein, 6 aa, Artificial Sequence
  Synthetic construct
QSVSSY

SEQ ID NO: 14111 - protein, 9 aa, Artificial Sequence
  Synthetic construct
SSDVGGYNY

SEQ ID NO: 14112 - protein, 6 aa, Artificial Sequence
  Synthetic construct
QSVNSN

SEQ ID NO: 14113 - protein, 9 aa, Artificial Sequence
  Synthetic construct
SSDVGGYDF

SEQ ID NO: 14114 - protein, 8 aa, Artificial Sequence
  Synthetic construct
SSNIGNNY

SEQ ID NO: 14115 - protein, 9 aa, Artificial Sequence
  Synthetic construct
SSDVGSYDH

SEQ ID NO: 14116 - protein, 12 aa, Artificial Sequence
  Synthetic construct
QSVLYSSNNKNY

SEQ ID NO: 14117 - protein, 12 aa, Artificial Sequence
  Synthetic construct
QSVLYSSNNKNY

SEQ ID NO: 14118 - protein, 9 aa, Artificial Sequence
  Synthetic construct
NSNIGAGYD

SEQ ID NO: 14119 - protein, 12 aa, Artificial Sequence
  Synthetic construct
QSVLYSSNNKNY

SEQ ID NO: 14120 - protein, 6 aa, Artificial Sequence
  Synthetic construct
QGIRDD

SEQ ID NO: 14121 - protein, 6 aa, Artificial Sequence
  Synthetic construct
QSVSSY

SEQ ID NO: 14122 - protein, 9 aa, Artificial Sequence
  Synthetic construct
SSDVGGYNY

SEQ ID NO: 14123 - protein, 6 aa, Artificial Sequence
  Synthetic construct
QSVSTY

SEQ ID NO: 14124 - protein, 6 aa, Artificial Sequence
  Synthetic construct
KLGDKY

SEQ ID NO: 14125 - protein, 6 aa, Artificial Sequence
  Synthetic construct
ALPKKY

SEQ ID NO: 14126 - protein, 12 aa, Artificial Sequence
  Synthetic construct
QSVLYRYGKKNY

SEQ ID NO: 14127 - protein, 6 aa, Artificial Sequence
  Synthetic construct
QDISNF

SEQ ID NO: 14128 - protein, 9 aa, Artificial Sequence
  Synthetic construct
TGAVTSGHY

SEQ ID NO: 14129 - protein, 6 aa, Artificial Sequence
  Synthetic construct
QDISSY

SEQ ID NO: 14130 - protein, 9 aa, Artificial Sequence
  Synthetic construct
GSNIGAGYD

SEQ ID NO: 14131 - protein, 7 aa, Artificial Sequence
  Synthetic construct
QSVSSSY

SEQ ID NO: 14132 - protein, 9 aa, Artificial Sequence
  Synthetic construct
SSNIGAGYD

SEQ ID NO: 14133 - protein, 9 aa, Artificial Sequence
  Synthetic construct
SSDVGGYNY

SEQ ID NO: 14134 - protein, 8 aa, Artificial Sequence
  Synthetic construct
SSNIANNY

SEQ ID NO: 14135 - protein, 6 aa, Artificial Sequence
  Synthetic construct
QDISHY

SEQ ID NO: 14136 - protein, 6 aa, Artificial Sequence
  Synthetic construct
QDISNY

SEQ ID NO: 14137 - protein, 6 aa, Artificial Sequence
  Synthetic construct
KLGAKY

SEQ ID NO: 14138 - protein, 6 aa, Artificial Sequence
  Synthetic construct
ALPKQY

SEQ ID NO: 14139 - protein, 6 aa, Artificial Sequence
  Synthetic construct
QSINSY

SEQ ID NO: 14140 - protein, 8 aa, Artificial Sequence
  Synthetic construct
SSNIGDNY

SEQ ID NO: 14141 - protein, 8 aa, Artificial Sequence
  Synthetic construct
SSNIGSNY

SEQ ID NO: 14142 - protein, 11 aa, Artificial Sequence
  Synthetic construct
QSLLHSNGYNY

SEQ ID NO: 14143 - protein, 11 aa, Artificial Sequence
  Synthetic construct
QSLVYSDGNTY

SEQ ID NO: 14144 - protein, 6 aa, Artificial Sequence
  Synthetic construct
ALPKKY

SEQ ID NO: 14145 - protein, 9 aa, Artificial Sequence
  Synthetic construct
TNDIGNFNL

SEQ ID NO: 14146 - protein, 6 aa, Artificial Sequence
  Synthetic construct
KLGDNN

SEQ ID NO: 14147 - protein, 8 aa, Artificial Sequence
  Synthetic construct
SSNIGSNY

SEQ ID NO: 14148 - protein, 6 aa, Artificial Sequence
  Synthetic construct
KLGDKY

SEQ ID NO: 14149 - protein, 8 aa, Artificial Sequence
  Synthetic construct
SSNIGSNI

SEQ ID NO: 14150 - protein, 6 aa, Artificial Sequence
  Synthetic construct
QNINIY

SEQ ID NO: 14151 - protein, 6 aa, Artificial Sequence
  Synthetic construct
NIGSKS

SEQ ID NO: 14152 - protein, 7 aa, Artificial Sequence
  Synthetic construct
QSVNNNH

SEQ ID NO: 14153 - protein, 7 aa, Artificial Sequence
  Synthetic construct
QSVSSSQ

SEQ ID NO: 14154 - protein, 9 aa, Artificial Sequence
  Synthetic construct
NSDVGSYDH

SEQ ID NO: 14155 - protein, 8 aa, Artificial Sequence
  Synthetic construct
DSNIGNNY

SEQ ID NO: 14156 - protein, 11 aa, Artificial Sequence
  Synthetic construct
QSLLYSNGYTY

SEQ ID NO: 14157 - protein, 6 aa, Artificial Sequence
  Synthetic construct
ALPKKY

SEQ ID NO: 14158 - protein, 12 aa, Artificial Sequence
  Synthetic construct
QTVLYRSNNQNY

SEQ ID NO: 14159 - protein, 6 aa, Artificial Sequence
  Synthetic construct
QSISSY

SEQ ID NO: 14160 - protein, 6 aa, Artificial Sequence
  Synthetic construct
KLGDKY

SEQ ID NO: 14161 - protein, 9 aa, Artificial Sequence
  Synthetic construct
SSDIGAGYD

SEQ ID NO: 14162 - protein, 6 aa, Artificial Sequence
  Synthetic construct
QSVSSF

SEQ ID NO: 14163 - protein, 11 aa, Artificial Sequence
  Synthetic construct
QSLVHSDGNTY

SEQ ID NO: 14164 - protein, 7 aa, Artificial Sequence
  Synthetic construct
QSVSSSY

SEQ ID NO: 14165 - protein, 9 aa, Artificial Sequence
  Synthetic construct
SSNIGADYD

SEQ ID NO: 14166 - protein, 12 aa, Artificial Sequence
  Synthetic construct
QSVLYSSNNKNY

SEQ ID NO: 14167 - protein, 9 aa, Artificial Sequence
  Synthetic construct
SSDIGSHNL

SEQ ID NO: 14168 - protein, 11 aa, Artificial Sequence
  Synthetic construct
QSLLHSNGHNY

SEQ ID NO: 14169 - protein, 6 aa, Artificial Sequence
  Synthetic construct
ALPKKY

SEQ ID NO: 14170 - protein, 6 aa, Artificial Sequence
  Synthetic construct
QSVSSF

SEQ ID NO: 14171 - protein, 9 aa, Artificial Sequence
  Synthetic construct
TGAVTNNYY

SEQ ID NO: 14172 - protein, 7 aa, Artificial Sequence
  Synthetic construct
QSVISNY

SEQ ID NO: 14173 - protein, 6 aa, Artificial Sequence
  Synthetic construct
QSINNN

SEQ ID NO: 14174 - protein, 8 aa, Artificial Sequence
  Synthetic construct
SSNIGNNY

SEQ ID NO: 14175 - protein, 8 aa, Artificial Sequence
  Synthetic construct
NSNIGSNT

SEQ ID NO: 14176 - protein, 6 aa, Artificial Sequence
  Synthetic construct
KLGDKY

SEQ ID NO: 14177 - protein, 7 aa, Artificial Sequence
  Synthetic construct
QSVGGNF

SEQ ID NO: 14178 - protein, 6 aa, Artificial Sequence
  Synthetic construct
QDISNY

SEQ ID NO: 14179 - protein, 6 aa, Artificial Sequence
  Synthetic construct
QSLTDC

SEQ ID NO: 14180 - protein, 6 aa, Artificial Sequence
  Synthetic construct
AFPKQY

SEQ ID NO: 14181 - protein, 6 aa, Artificial Sequence
  Synthetic construct
QSISSY

SEQ ID NO: 14182 - protein, 6 aa, Artificial Sequence
  Synthetic construct
QDISNY

SEQ ID NO: 14183 - protein, 8 aa, Artificial Sequence
  Synthetic construct
SSNIGSNY

SEQ ID NO: 14184 - protein, 6 aa, Artificial Sequence
  Synthetic construct
ESISSW

SEQ ID NO: 14185 - protein, 7 aa, Artificial Sequence
  Synthetic construct
QSVNNNY

SEQ ID NO: 14186 - protein, 6 aa, Artificial Sequence
  Synthetic construct
ALAKQY

SEQ ID NO: 14187 - protein, 6 aa, Artificial Sequence
  Synthetic construct
QSISSY

SEQ ID NO: 14188 - protein, 6 aa, Artificial Sequence
  Synthetic construct
NIGSKN

SEQ ID NO: 14189 - protein, 6 aa, Artificial Sequence
  Synthetic construct
ALPQKY

SEQ ID NO: 14190 - protein, 6 aa, Artificial Sequence
  Synthetic construct
QSISSW

SEQ ID NO: 14191 - protein, 9 aa, Artificial Sequence
  Synthetic construct
SSDVGGYNS

SEQ ID NO: 14192 - protein, 8 aa, Artificial Sequence
  Synthetic construct
SSNIGNNY

SEQ ID NO: 14193 - protein, 12 aa, Artificial Sequence
  Synthetic construct
QSVLYSSNNKNY

SEQ ID NO: 14194 - protein, 6 aa, Artificial Sequence
  Synthetic construct
NIGSKS

SEQ ID NO: 14195 - protein, 6 aa, Artificial Sequence
  Synthetic construct
QTISSY

SEQ ID NO: 14196 - protein, 9 aa, Artificial Sequence
  Synthetic construct
SSDVGGYNY

SEQ ID NO: 14197 - protein, 11 aa, Artificial Sequence
  Synthetic construct
QSLLHSDGKNY

SEQ ID NO: 14198 - protein, 7 aa, Artificial Sequence
  Synthetic construct
QSVSSNY

SEQ ID NO: 14199 - protein, 6 aa, Artificial Sequence
  Synthetic construct
ETIGNY

SEQ ID NO: 14200 - protein, 7 aa, Artificial Sequence
  Synthetic construct
QSVSSSY

SEQ ID NO: 14201 - protein, 6 aa, Artificial Sequence
  Synthetic construct
QSVSDY

SEQ ID NO: 14202 - protein, 6 aa, Artificial Sequence
  Synthetic construct
NIGTKT

SEQ ID NO: 14203 - protein, 6 aa, Artificial Sequence
  Synthetic construct
SLRSYY

SEQ ID NO: 14204 - protein, 9 aa, Artificial Sequence
  Synthetic construct
SSNIGAGYD

SEQ ID NO: 14205 - protein, 9 aa, Artificial Sequence
  Synthetic construct
SSDVGGYNY

SEQ ID NO: 14206 - protein, 6 aa, Artificial Sequence
  Synthetic construct
TLSTKY

SEQ ID NO: 14207 - protein, 9 aa, Artificial Sequence
  Synthetic construct
SSNIGANFD

SEQ ID NO: 14208 - protein, 6 aa, Artificial Sequence
  Synthetic construct
QGISSW

SEQ ID NO: 14209 - protein, 6 aa, Artificial Sequence
  Synthetic construct
ALPKQY

SEQ ID NO: 14210 - protein, 6 aa, Artificial Sequence
  Synthetic construct
ALPKKF

SEQ ID NO: 14211 - protein, 8 aa, Artificial Sequence
  Synthetic construct
SSNIGSNH

SEQ ID NO: 14212 - protein, 6 aa, Artificial Sequence
  Synthetic construct
QSVNSN

SEQ ID NO: 14213 - protein, 6 aa, Artificial Sequence
  Synthetic construct
QSISTY

SEQ ID NO: 14214 - protein, 9 aa, Artificial Sequence
  Synthetic construct
SSDVGAYNY

SEQ ID NO: 14215 - protein, 9 aa, Artificial Sequence
  Synthetic construct
SSDVGDYDF

SEQ ID NO: 14216 - protein, 9 aa, Artificial Sequence
  Synthetic construct
SGDVGDYNY

SEQ ID NO: 14217 - protein, 7 aa, Artificial Sequence
  Synthetic construct
SGHSRHP

SEQ ID NO: 14218 - protein, 11 aa, Artificial Sequence
  Synthetic construct
QSLLHSDGKTY

SEQ ID NO: 14219 - protein, 9 aa, Artificial Sequence
  Synthetic construct
SSDVGGYDY

SEQ ID NO: 14220 - protein, 6 aa, Artificial Sequence
  Synthetic construct
QGISSY

SEQ ID NO: 14221 - protein, 12 aa, Artificial Sequence
  Synthetic construct
QSLLDSDDGNTY

SEQ ID NO: 14222 - protein, 11 aa, Artificial Sequence
  Synthetic construct
QSLLHSDGKTY

SEQ ID NO: 14223 - protein, 6 aa, Artificial Sequence
  Synthetic construct
QGISSW

SEQ ID NO: 14224 - protein, 8 aa, Artificial Sequence
  Synthetic construct
SSNIGNNY

SEQ ID NO: 14225 - protein, 8 aa, Artificial Sequence
  Synthetic construct
SSNIGSNY

SEQ ID NO: 14226 - protein, 9 aa, Artificial Sequence
  Synthetic construct
SSNIGAGYD

SEQ ID NO: 14227 - protein, 9 aa, Artificial Sequence
  Synthetic construct
SSDVGSFNL

SEQ ID NO: 14228 - protein, 6 aa, Artificial Sequence
  Synthetic construct
QGISSW

SEQ ID NO: 14229 - protein, 7 aa, Artificial Sequence
  Synthetic construct
QSVNNNY

SEQ ID NO: 14230 - protein, 9 aa, Artificial Sequence
  Synthetic construct
SSDVGGYNY

SEQ ID NO: 14231 - protein, 6 aa, Artificial Sequence
  Synthetic construct
QGISSY

SEQ ID NO: 14232 - protein, 7 aa, Artificial Sequence
  Synthetic construct
QSVSSNY

SEQ ID NO: 14233 - protein, 6 aa, Artificial Sequence
  Synthetic construct
QDISNY

SEQ ID NO: 14234 - protein, 6 aa, Artificial Sequence
  Synthetic construct
QSVNSY

SEQ ID NO: 14235 - protein, 8 aa, Artificial Sequence
  Synthetic construct
SGIIASNY

SEQ ID NO: 14236 - protein, 6 aa, Artificial Sequence
  Synthetic construct
QSISSW

SEQ ID NO: 14237 - protein, 6 aa, Artificial Sequence
  Synthetic construct
QSVSTY

SEQ ID NO: 14238 - protein, 6 aa, Artificial Sequence
  Synthetic construct
ALPKKY

SEQ ID NO: 14239 - protein, 11 aa, Artificial Sequence
  Synthetic construct
QSLLHSNGHNF

SEQ ID NO: 14240 - protein, 12 aa, Artificial Sequence
  Synthetic construct
HSVFYSSNHKNY

SEQ ID NO: 14241 - protein, 7 aa, Artificial Sequence
  Synthetic construct
QSVSGPY

SEQ ID NO: 14242 - protein, 11 aa, Artificial Sequence
  Synthetic construct
QSLVYSDGNTY

SEQ ID NO: 14243 - protein, 6 aa, Artificial Sequence
  Synthetic construct
KLGDKY

SEQ ID NO: 14244 - protein, 7 aa, Artificial Sequence
  Synthetic construct
SGHSNYA

SEQ ID NO: 14245 - protein, 6 aa, Artificial Sequence
  Synthetic construct
QSVSNY

SEQ ID NO: 14246 - protein, 8 aa, Artificial Sequence
  Synthetic construct
SSNIGKNS

SEQ ID NO: 14247 - protein, 6 aa, Artificial Sequence
  Synthetic construct
QSVRSN

SEQ ID NO: 14248 - protein, 6 aa, Artificial Sequence
  Synthetic construct
QTISSW

SEQ ID NO: 14249 - protein, 7 aa, Artificial Sequence
  Synthetic construct
QSVSSSY

SEQ ID NO: 14250 - protein, 9 aa, Artificial Sequence
  Synthetic construct
TGGVTSGHY

SEQ ID NO: 14251 - protein, 7 aa, Artificial Sequence
  Synthetic construct
ESVSSTY

SEQ ID NO: 14252 - protein, 6 aa, Artificial Sequence
  Synthetic construct
ALPKKY

SEQ ID NO: 14253 - protein, 6 aa, Artificial Sequence
  Synthetic construct
ALPKKY

SEQ ID NO: 14254 - protein, 6 aa, Artificial Sequence
  Synthetic construct
QSVSSN

SEQ ID NO: 14255 - protein, 9 aa, Artificial Sequence
  Synthetic construct
NSNIGAGYD

SEQ ID NO: 14256 - protein, 9 aa, Artificial Sequence
  Synthetic construct
SSDIGRYNY

SEQ ID NO: 14257 - protein, 11 aa, Artificial Sequence
  Synthetic construct
QSLLHSTGYNY

SEQ ID NO: 14258 - protein, 7 aa, Artificial Sequence
  Synthetic construct
QSVSSSY

SEQ ID NO: 14259 - protein, 7 aa, Artificial Sequence
  Synthetic construct
QSVSSSY

SEQ ID NO: 14260 - protein, 7 aa, Artificial Sequence
  Synthetic construct
SGYSNYK

SEQ ID NO: 14261 - protein, 9 aa, Artificial Sequence
  Synthetic construct
SSNIGAGYD

SEQ ID NO: 14262 - protein, 6 aa, Artificial Sequence
  Synthetic construct
QSVSTN

SEQ ID NO: 14263 - protein, 9 aa, Artificial Sequence
  Synthetic construct
SSNIEAGYD

SEQ ID NO: 14264 - protein, 6 aa, Artificial Sequence
  Synthetic construct
KLGDKY

SEQ ID NO: 14265 - protein, 9 aa, Artificial Sequence
  Synthetic construct
TGAVTSGHY

SEQ ID NO: 14266 - protein, 6 aa, Artificial Sequence
  Synthetic construct
SLRGYY

SEQ ID NO: 14267 - protein, 6 aa, Artificial Sequence
  Synthetic construct
NIGSKS

SEQ ID NO: 14268 - protein, 6 aa, Artificial Sequence
  Synthetic construct
ALPKQY

SEQ ID NO: 14269 - protein, 6 aa, Artificial Sequence
  Synthetic construct
QGISIW

SEQ ID NO: 14270 - protein, 9 aa, Artificial Sequence
  Synthetic construct
SSDVGSYNL

SEQ ID NO: 14271 - protein, 9 aa, Artificial Sequence
  Synthetic construct
STDIGIYSY

SEQ ID NO: 14272 - protein, 9 aa, Artificial Sequence
  Synthetic construct
SSDVGAYKY

SEQ ID NO: 14273 - protein, 6 aa, Artificial Sequence
  Synthetic construct
QTINNW

SEQ ID NO: 14274 - protein, 6 aa, Artificial Sequence
  Synthetic construct
QSVSNY

SEQ ID NO: 14275 - protein, 6 aa, Artificial Sequence
  Synthetic construct
ALPKKY

SEQ ID NO: 14276 - protein, 9 aa, Artificial Sequence
  Synthetic construct
SGSVSISHY

SEQ ID NO: 14277 - protein, 6 aa, Artificial Sequence
  Synthetic construct
QGIGSW

SEQ ID NO: 14278 - protein, 7 aa, Artificial Sequence
  Synthetic construct
SGYINYK

SEQ ID NO: 14279 - protein, 6 aa, Artificial Sequence
  Synthetic construct
ALPKKY

SEQ ID NO: 14280 - protein, 6 aa, Artificial Sequence
  Synthetic construct
QSISSY

SEQ ID NO: 14281 - protein, 6 aa, Artificial Sequence
  Synthetic construct
ALPKQY

SEQ ID NO: 14282 - protein, 8 aa, Artificial Sequence
  Synthetic construct
SSNIGNNY

SEQ ID NO: 14283 - protein, 9 aa, Artificial Sequence
  Synthetic construct
SSNIGAGYD

SEQ ID NO: 14284 - protein, 6 aa, Artificial Sequence
  Synthetic construct
ALPKKY

SEQ ID NO: 14285 - protein, 11 aa, Artificial Sequence
  Synthetic construct
QSLLHSNGYNY

SEQ ID NO: 14286 - protein, 8 aa, Artificial Sequence
  Synthetic construct
SSNIGNNG

SEQ ID NO: 14287 - protein, 7 aa, Artificial Sequence
  Synthetic construct
QPVGDTF

SEQ ID NO: 14288 - protein, 7 aa, Artificial Sequence
  Synthetic construct
QSVSSSY

SEQ ID NO: 14289 - protein, 6 aa, Artificial Sequence
  Synthetic construct
QSISSW

SEQ ID NO: 14290 - protein, 12 aa, Artificial Sequence
  Synthetic construct
QSVLYSSNSKNY

SEQ ID NO: 14291 - protein, 6 aa, Artificial Sequence
  Synthetic construct
QNINVY

SEQ ID NO: 14292 - protein, 11 aa, Artificial Sequence
  Synthetic construct
QSLVYSDGNTY

SEQ ID NO: 14293 - protein, 6 aa, Artificial Sequence
  Synthetic construct
QSVHSN

SEQ ID NO: 14294 - protein, 6 aa, Artificial Sequence
  Synthetic construct
QSVSSN

SEQ ID NO: 14295 - protein, 6 aa, Artificial Sequence
  Synthetic construct
KLGEKY

SEQ ID NO: 14296 - protein, 12 aa, Artificial Sequence
  Synthetic construct
QSVLNSSNNKNY

SEQ ID NO: 14297 - protein, 8 aa, Artificial Sequence
  Synthetic construct
GGSIASNY

SEQ ID NO: 14298 - protein, 8 aa, Artificial Sequence
  Synthetic construct
SSNIGSKT

SEQ ID NO: 14299 - protein, 6 aa, Artificial Sequence
  Synthetic construct
NIGSQS

SEQ ID NO: 14300 - protein, 6 aa, Artificial Sequence
  Synthetic construct
QSVSSY

SEQ ID NO: 14301 - protein, 6 aa, Artificial Sequence
  Synthetic construct
QSISNY

SEQ ID NO: 14302 - protein, 9 aa, Artificial Sequence
  Synthetic construct
SSDVGSYDH

SEQ ID NO: 14303 - protein, 9 aa, Artificial Sequence
  Synthetic construct
SSNIGAGYD

SEQ ID NO: 14304 - protein, 9 aa, Artificial Sequence
  Synthetic construct
SSDVGSYNL

SEQ ID NO: 14305 - protein, 12 aa, Artificial Sequence
  Synthetic construct
QSILYNSDNKNY

SEQ ID NO: 14306 - protein, 9 aa, Artificial Sequence
  Synthetic construct
SSDVGGYNY

SEQ ID NO: 14307 - protein, 11 aa, Artificial Sequence
  Synthetic construct
QSLLHSNGYNY

SEQ ID NO: 14308 - protein, 6 aa, Artificial Sequence
  Synthetic construct
QGISSY

SEQ ID NO: 14309 - protein, 6 aa, Artificial Sequence
  Synthetic construct
QSISSW

SEQ ID NO: 14310 - protein, 6 aa, Artificial Sequence
  Synthetic construct
QGISNF

SEQ ID NO: 14311 - protein, 7 aa, Artificial Sequence
  Synthetic construct
QSISGSY

SEQ ID NO: 14312 - protein, 8 aa, Artificial Sequence
  Synthetic construct
SGSIASNY

SEQ ID NO: 14313 - protein, 6 aa, Artificial Sequence
  Synthetic construct
QGISSY

SEQ ID NO: 14314 - protein, 9 aa, Artificial Sequence
  Synthetic construct
SSDIGGYNY

SEQ ID NO: 14315 - protein, 9 aa, Artificial Sequence
  Synthetic construct
SSDVGAYNY

SEQ ID NO: 14316 - protein, 6 aa, Artificial Sequence
  Synthetic construct
QGISSY

SEQ ID NO: 14317 - protein, 9 aa, Artificial Sequence
  Synthetic construct
SSDVGGYNY

SEQ ID NO: 14318 - protein, 6 aa, Artificial Sequence
  Synthetic construct
QSVNTY

SEQ ID NO: 14319 - protein, 6 aa, Artificial Sequence
  Synthetic construct
QSVNNN

SEQ ID NO: 14320 - protein, 6 aa, Artificial Sequence
  Synthetic construct
QSVSRD

SEQ ID NO: 14321 - protein, 6 aa, Artificial Sequence
  Synthetic construct
ALPKQY

SEQ ID NO: 14322 - protein, 6 aa, Artificial Sequence
  Synthetic construct
QTISSY

SEQ ID NO: 14323 - protein, 8 aa, Artificial Sequence
  Synthetic construct
SSNIGSNY

SEQ ID NO: 14324 - protein, 6 aa, Artificial Sequence
  Synthetic construct
NIGSYS

SEQ ID NO: 14325 - protein, 9 aa, Artificial Sequence
  Synthetic construct
NSNIGAGYD

SEQ ID NO: 14326 - protein, 6 aa, Artificial Sequence
  Synthetic construct
QDISNY

SEQ ID NO: 14327 - protein, 6 aa, Artificial Sequence
  Synthetic construct
QSVSTY

SEQ ID NO: 14328 - protein, 11 aa, Artificial Sequence
  Synthetic construct
QSLAHSDGNTY

SEQ ID NO: 14329 - protein, 6 aa, Artificial Sequence
  Synthetic construct
QSVSRD

SEQ ID NO: 14330 - protein, 9 aa, Artificial Sequence
  Synthetic construct
SSDIGSYNY

SEQ ID NO: 14331 - protein, 11 aa, Artificial Sequence
  Synthetic construct
QSLLHSNGYNY

SEQ ID NO: 14332 - protein, 6 aa, Artificial Sequence
  Synthetic construct
QGISNY

SEQ ID NO: 14333 - protein, 7 aa, Artificial Sequence
  Synthetic construct
QTVSSSY

SEQ ID NO: 14334 - protein, 6 aa, Artificial Sequence
  Synthetic construct
QSISSY

SEQ ID NO: 14335 - protein, 9 aa, Artificial Sequence
  Synthetic construct
SGSVSTTYY

SEQ ID NO: 14336 - protein, 6 aa, Artificial Sequence
  Synthetic construct
NIGRKS

SEQ ID NO: 14337 - protein, 7 aa, Artificial Sequence
  Synthetic construct
QSVGSSY

SEQ ID NO: 14338 - protein, 6 aa, Artificial Sequence
  Synthetic construct
QSVSSN

SEQ ID NO: 14339 - protein, 9 aa, Artificial Sequence
  Synthetic construct
NSDIGSYDH

SEQ ID NO: 14340 - protein, 6 aa, Artificial Sequence
  Synthetic construct
ALPNRY

SEQ ID NO: 14341 - protein, 9 aa, Artificial Sequence
  Synthetic construct
SSDVGGYNY

SEQ ID NO: 14342 - protein, 6 aa, Artificial Sequence
  Synthetic construct
QSVSSK

SEQ ID NO: 14343 - protein, 6 aa, Artificial Sequence
  Synthetic construct
ALPTKY

SEQ ID NO: 14344 - protein, 6 aa, Artificial Sequence
  Synthetic construct
QSVSSY

SEQ ID NO: 14345 - protein, 9 aa, Artificial Sequence
  Synthetic construct
SSDIGAYNY

SEQ ID NO: 14346 - protein, 6 aa, Artificial Sequence
  Synthetic construct
QSVSSN

SEQ ID NO: 14347 - protein, 6 aa, Artificial Sequence
  Synthetic construct
QSVSSN

SEQ ID NO: 14348 - protein, 6 aa, Artificial Sequence
  Synthetic construct
QGISNY

SEQ ID NO: 14349 - protein, 6 aa, Artificial Sequence
  Synthetic construct
ALPKKY

SEQ ID NO: 14350 - protein, 6 aa, Artificial Sequence
  Synthetic construct
SLRSYY

SEQ ID NO: 14351 - protein, 6 aa, Artificial Sequence
  Synthetic construct
QGISNY

SEQ ID NO: 14352 - protein, 9 aa, Artificial Sequence
  Synthetic construct
SSDVGSYNL

SEQ ID NO: 14353 - protein, 6 aa, Artificial Sequence
  Synthetic construct
QSVSSN

SEQ ID NO: 14354 - protein, 11 aa, Artificial Sequence
  Synthetic construct
QSLVHSAGNTF

SEQ ID NO: 14355 - protein, 11 aa, Artificial Sequence
  Synthetic construct
QSLLHSDGKTY

SEQ ID NO: 14356 - protein, 11 aa, Artificial Sequence
  Synthetic construct
QSLLHGDGKTY

SEQ ID NO: 14357 - protein, 7 aa, Artificial Sequence
  Synthetic construct
QSVSSLY

SEQ ID NO: 14358 - protein, 6 aa, Artificial Sequence
  Synthetic construct
QSVSSN

SEQ ID NO: 14359 - protein, 9 aa, Artificial Sequence
  Synthetic construct
SSDVGGYNY

SEQ ID NO: 14360 - protein, 7 aa, Artificial Sequence
  Synthetic construct
QSVSSSY

SEQ ID NO: 14361 - protein, 7 aa, Artificial Sequence
  Synthetic construct
QSVSNNY

SEQ ID NO: 14362 - protein, 11 aa, Artificial Sequence
  Synthetic construct
QSLLHSNGYNY

SEQ ID NO: 14363 - protein, 9 aa, Artificial Sequence
  Synthetic construct
SSDVGNYNL

SEQ ID NO: 14364 - protein, 6 aa, Artificial Sequence
  Synthetic construct
QSVSTY

SEQ ID NO: 14365 - protein, 12 aa, Artificial Sequence
  Synthetic construct
QTVLYSSNNLNY

SEQ ID NO: 14366 - protein, 6 aa, Artificial Sequence
  Synthetic construct
KLGDKY

SEQ ID NO: 14367 - protein, 6 aa, Artificial Sequence
  Synthetic construct
QSVTNY

SEQ ID NO: 14368 - protein, 6 aa, Artificial Sequence
  Synthetic construct
QGISTY

SEQ ID NO: 14369 - protein, 11 aa, Artificial Sequence
  Synthetic construct
QSLLHSNGYKY

SEQ ID NO: 14370 - protein, 6 aa, Artificial Sequence
  Synthetic construct
QSVTSS

SEQ ID NO: 14371 - protein, 7 aa, Artificial Sequence
  Synthetic construct
QGVSSSY

SEQ ID NO: 14372 - protein, 6 aa, Artificial Sequence
  Synthetic construct
QSISNY

SEQ ID NO: 14373 - protein, 6 aa, Artificial Sequence
  Synthetic construct
KLGNKY

SEQ ID NO: 14374 - protein, 12 aa, Artificial Sequence
  Synthetic construct
QSVLYSSNNKNY

SEQ ID NO: 14375 - protein, 9 aa, Artificial Sequence
  Synthetic construct
SSDVGSYDH

SEQ ID NO: 14376 - protein, 6 aa, Artificial Sequence
  Synthetic construct
QDISNS

SEQ ID NO: 14377 - protein, 6 aa, Artificial Sequence
  Synthetic construct
QSVSRN

SEQ ID NO: 14378 - protein, 9 aa, Artificial Sequence
  Synthetic construct
SSNIGAGYD

SEQ ID NO: 14379 - protein, 11 aa, Artificial Sequence
  Synthetic construct
QSLLHSNGYNY

SEQ ID NO: 14380 - protein, 6 aa, Artificial Sequence
  Synthetic construct
QGISNS

SEQ ID NO: 14381 - protein, 9 aa, Artificial Sequence
  Synthetic construct
SSDVGSYNL

SEQ ID NO: 14382 - protein, 6 aa, Artificial Sequence
  Synthetic construct
QSVSSN

SEQ ID NO: 14383 - protein, 6 aa, Artificial Sequence
  Synthetic construct
KDISIH

SEQ ID NO: 14384 - protein, 12 aa, Artificial Sequence
  Synthetic construct
QSILDSSNNKNY

SEQ ID NO: 14385 - protein, 6 aa, Artificial Sequence
  Synthetic construct
KLGDKY

SEQ ID NO: 14386 - protein, 9 aa, Artificial Sequence
  Synthetic construct
SGDVGSYNL

SEQ ID NO: 14387 - protein, 6 aa, Artificial Sequence
  Synthetic construct
QSISNW

SEQ ID NO: 14388 - protein, 9 aa, Artificial Sequence
  Synthetic construct
SSDVGSYNL

SEQ ID NO: 14389 - protein, 9 aa, Artificial Sequence
  Synthetic construct
SGDVGSYNL

SEQ ID NO: 14390 - protein, 6 aa, Artificial Sequence
  Synthetic construct
KLGDKY

SEQ ID NO: 14391 - protein, 11 aa, Artificial Sequence
  Synthetic construct
QSLVHSDGNTY

SEQ ID NO: 14392 - protein, 8 aa, Artificial Sequence
  Synthetic construct
SSNIGDNY

SEQ ID NO: 14393 - protein, 6 aa, Artificial Sequence
  Synthetic construct
QDISKY

SEQ ID NO: 14394 - protein, 8 aa, Artificial Sequence
  Synthetic construct
SSNIENNA

SEQ ID NO: 14395 - protein, 11 aa, Artificial Sequence
  Synthetic construct
QSLLNSNGNNN

SEQ ID NO: 14396 - protein, 9 aa, Artificial Sequence
  Synthetic construct
STDIGIYSY

SEQ ID NO: 14397 - protein, 9 aa, Artificial Sequence
  Synthetic construct
NSDIGSYDH

SEQ ID NO: 14398 - protein, 9 aa, Artificial Sequence
  Synthetic construct
SSDVGGYNY

SEQ ID NO: 14399 - protein, 6 aa, Artificial Sequence
  Synthetic construct
QSVTNF

SEQ ID NO: 14400 - protein, 6 aa, Artificial Sequence
  Synthetic construct
SLRRYY

SEQ ID NO: 14401 - protein, 6 aa, Artificial Sequence
  Synthetic construct
QTVSSF

SEQ ID NO: 14402 - protein, 9 aa, Artificial Sequence
  Synthetic construct
SSDVGSYDH

SEQ ID NO: 14403 - protein, 12 aa, Artificial Sequence
  Synthetic construct
QSLFYNSNNKNY

SEQ ID NO: 14404 - protein, 6 aa, Artificial Sequence
  Synthetic construct
ALPKKY

SEQ ID NO: 14405 - protein, 9 aa, Artificial Sequence
  Synthetic construct
SSNIGADYD

SEQ ID NO: 14406 - protein, 6 aa, Artificial Sequence
  Synthetic construct
SIGSKN

SEQ ID NO: 14407 - protein, 7 aa, Artificial Sequence
  Synthetic construct
QSVSSSY

SEQ ID NO: 14408 - protein, 9 aa, Artificial Sequence
  Synthetic construct
SSNIGARYD

SEQ ID NO: 14409 - protein, 8 aa, Artificial Sequence
  Synthetic construct
TSNIGNNY

SEQ ID NO: 14410 - protein, 11 aa, Artificial Sequence
  Synthetic construct
QSLLHSNGYNY

SEQ ID NO: 14411 - protein, 9 aa, Artificial Sequence
  Synthetic construct
SSDVGSYNL

SEQ ID NO: 14412 - protein, 12 aa, Artificial Sequence
  Synthetic construct
QSVLYTSNNKNF

SEQ ID NO: 14413 - protein, 9 aa, Artificial Sequence
  Synthetic construct
SSDVGGYNY

SEQ ID NO: 14414 - protein, 9 aa, Artificial Sequence
  Synthetic construct
SSSIGAGYD

SEQ ID NO: 14415 - protein, 9 aa, Artificial Sequence
  Synthetic construct
SSNIGAGYD

SEQ ID NO: 14416 - protein, 6 aa, Artificial Sequence
  Synthetic construct
ALPKKY

SEQ ID NO: 14417 - protein, 6 aa, Artificial Sequence
  Synthetic construct
QSISSW

SEQ ID NO: 14418 - protein, 9 aa, Artificial Sequence
  Synthetic construct
SSNIGAGYD

SEQ ID NO: 14419 - protein, 9 aa, Artificial Sequence
  Synthetic construct
SSDVGGYNY

SEQ ID NO: 14420 - protein, 6 aa, Artificial Sequence
  Synthetic construct
QSVSSY

SEQ ID NO: 14421 - protein, 6 aa, Artificial Sequence
  Synthetic construct
QSVNSD

SEQ ID NO: 14422 - protein, 9 aa, Artificial Sequence
  Synthetic construct
STDFGNFNY

SEQ ID NO: 14423 - protein, 7 aa, Artificial Sequence
  Synthetic construct
QSVSSSY

SEQ ID NO: 14424 - protein, 8 aa, Artificial Sequence
  Synthetic construct
SSNIGSNT

SEQ ID NO: 14425 - protein, 9 aa, Artificial Sequence
  Synthetic construct
SSDVGGYNY

SEQ ID NO: 14426 - protein, 9 aa, Artificial Sequence
  Synthetic construct
SSDIGTYDH

SEQ ID NO: 14427 - protein, 6 aa, Artificial Sequence
  Synthetic construct
KLGNRY

SEQ ID NO: 14428 - protein, 6 aa, Artificial Sequence
  Synthetic construct
QSVSSN

SEQ ID NO: 14429 - protein, 9 aa, Artificial Sequence
  Synthetic construct
TSDVGVYDY

SEQ ID NO: 14430 - protein, 6 aa, Artificial Sequence
  Synthetic construct
KLGSKS

SEQ ID NO: 14431 - protein, 6 aa, Artificial Sequence
  Synthetic construct
QGISSY

SEQ ID NO: 14432 - protein, 6 aa, Artificial Sequence
  Synthetic construct
QSLSSN

SEQ ID NO: 14433 - protein, 9 aa, Artificial Sequence
  Synthetic construct
SSDVGAFNY

SEQ ID NO: 14434 - protein, 7 aa, Artificial Sequence
  Synthetic construct
QSVSSSY

SEQ ID NO: 14435 - protein, 9 aa, Artificial Sequence
  Synthetic construct
SSNIGANYD

SEQ ID NO: 14436 - protein, 7 aa, Artificial Sequence
  Synthetic construct
QSVYSSY

SEQ ID NO: 14437 - protein, 6 aa, Artificial Sequence
  Synthetic construct
QGISRN

SEQ ID NO: 14438 - protein, 6 aa, Artificial Sequence
  Synthetic construct
QSISSF

SEQ ID NO: 14439 - protein, 8 aa, Artificial Sequence
  Synthetic construct
SSNIGRNT

SEQ ID NO: 14440 - protein, 11 aa, Artificial Sequence
  Synthetic construct
ESLLGSDGKTY

SEQ ID NO: 14441 - protein, 8 aa, Artificial Sequence
  Synthetic construct
SSNVGSNT

SEQ ID NO: 14442 - protein, 6 aa, Artificial Sequence
  Synthetic construct
ALPKKY

SEQ ID NO: 14443 - protein, 6 aa, Artificial Sequence
  Synthetic construct
QSISSY

SEQ ID NO: 14444 - protein, 9 aa, Artificial Sequence
  Synthetic construct
TGAVTSGHF

SEQ ID NO: 14445 - protein, 6 aa, Artificial Sequence
  Synthetic construct
QSVSSN

SEQ ID NO: 14446 - protein, 6 aa, Artificial Sequence
  Synthetic construct
HSVSSS

SEQ ID NO: 14447 - protein, 7 aa, Artificial Sequence
  Synthetic construct
QSVSSSY

SEQ ID NO: 14448 - protein, 8 aa, Artificial Sequence
  Synthetic construct
SSNIGDNY

SEQ ID NO: 14449 - protein, 6 aa, Artificial Sequence
  Synthetic construct
QSISSY

SEQ ID NO: 14450 - protein, 8 aa, Artificial Sequence
  Synthetic construct
SSNIGTNY

SEQ ID NO: 14451 - protein, 7 aa, Artificial Sequence
  Synthetic construct
QSVSSSY

SEQ ID NO: 14452 - protein, 6 aa, Artificial Sequence
  Synthetic construct
NIGSTS

SEQ ID NO: 14453 - protein, 12 aa, Artificial Sequence
  Synthetic construct
QSVLYNSNNKNY

SEQ ID NO: 14454 - protein, 9 aa, Artificial Sequence
  Synthetic construct
SSDVGGYNY

SEQ ID NO: 14455 - protein, 9 aa, Artificial Sequence
  Synthetic construct
SSDVGGYNY

SEQ ID NO: 14456 - protein, 6 aa, Artificial Sequence
  Synthetic construct
ALPKKY

SEQ ID NO: 14457 - protein, 6 aa, Artificial Sequence
  Synthetic construct
KLGNKY

SEQ ID NO: 14458 - protein, 6 aa, Artificial Sequence
  Synthetic construct
NIGSES

SEQ ID NO: 14459 - protein, 6 aa, Artificial Sequence
  Synthetic construct
VLAKKF

SEQ ID NO: 14460 - protein, 6 aa, Artificial Sequence
  Synthetic construct
NIGSKS

SEQ ID NO: 14461 - protein, 6 aa, Artificial Sequence
  Synthetic construct
QTISRS

SEQ ID NO: 14462 - protein, 6 aa, Artificial Sequence
  Synthetic construct
KLGDKY

SEQ ID NO: 14463 - protein, 6 aa, Artificial Sequence
  Synthetic construct
QSISSW

SEQ ID NO: 14464 - protein, 6 aa, Artificial Sequence
  Synthetic construct
ALPKQY

SEQ ID NO: 14465 - protein, 7 aa, Artificial Sequence
  Synthetic construct
QSISSKS

SEQ ID NO: 14466 - protein, 12 aa, Artificial Sequence
  Synthetic construct
QSVLYSSNNKNY

SEQ ID NO: 14467 - protein, 6 aa, Artificial Sequence
  Synthetic construct
ALPKKY

SEQ ID NO: 14468 - protein, 6 aa, Artificial Sequence
  Synthetic construct
QSMSSW

SEQ ID NO: 14469 - protein, 6 aa, Artificial Sequence
  Synthetic construct
ALPKKY

SEQ ID NO: 14470 - protein, 6 aa, Artificial Sequence
  Synthetic construct
QSVSSN

SEQ ID NO: 14471 - protein, 6 aa, Artificial Sequence
  Synthetic construct
ALPKKF

SEQ ID NO: 14472 - protein, 11 aa, Artificial Sequence
  Synthetic construct
QSLVHTDGNTY

SEQ ID NO: 14473 - protein, 6 aa, Artificial Sequence
  Synthetic construct
ESISNY

SEQ ID NO: 14474 - protein, 8 aa, Artificial Sequence
  Synthetic construct
SSNIGNTY

SEQ ID NO: 14475 - protein, 6 aa, Artificial Sequence
  Synthetic construct
QSVSSY

SEQ ID NO: 14476 - protein, 9 aa, Artificial Sequence
  Synthetic construct
SSDVGDYNY

SEQ ID NO: 14477 - protein, 11 aa, Artificial Sequence
  Synthetic construct
QSLLHSDGKTY

SEQ ID NO: 14478 - protein, 6 aa, Artificial Sequence
  Synthetic construct
QSISSY

SEQ ID NO: 14479 - protein, 11 aa, Artificial Sequence
  Synthetic construct
ESLLHSDGKTY

SEQ ID NO: 14480 - protein, 6 aa, Artificial Sequence
  Synthetic construct
QSITRF

SEQ ID NO: 14481 - protein, 6 aa, Artificial Sequence
  Synthetic construct
QDITIY

SEQ ID NO: 14482 - protein, 6 aa, Artificial Sequence
  Synthetic construct
QTISSW

SEQ ID NO: 14483 - protein, 6 aa, Artificial Sequence
  Synthetic construct
QGISNY

SEQ ID NO: 14484 - protein, 6 aa, Artificial Sequence
  Synthetic construct
QSISSW

SEQ ID NO: 14485 - protein, 6 aa, Artificial Sequence
  Synthetic construct
QDIRND

SEQ ID NO: 14486 - protein, 6 aa, Artificial Sequence
  Synthetic construct
QGISSN

SEQ ID NO: 14487 - protein, 7 aa, Artificial Sequence
  Synthetic construct
HRVSSSF

SEQ ID NO: 14488 - protein, 6 aa, Artificial Sequence
  Synthetic construct
QSVSTS

SEQ ID NO: 14489 - protein, 8 aa, Artificial Sequence
  Synthetic construct
SSNIGGNT

SEQ ID NO: 14490 - protein, 6 aa, Artificial Sequence
  Synthetic construct
QDINIF

SEQ ID NO: 14491 - protein, 6 aa, Artificial Sequence
  Synthetic construct
KLGDKY

SEQ ID NO: 14492 - protein, 6 aa, Artificial Sequence
  Synthetic construct
QVISNN

SEQ ID NO: 14493 - protein, 8 aa, Artificial Sequence
  Synthetic construct
SSNIGNNF

SEQ ID NO: 14494 - protein, 6 aa, Artificial Sequence
  Synthetic construct
QDISNY

SEQ ID NO: 14495 - protein, 6 aa, Artificial Sequence
  Synthetic construct
QSISSN

SEQ ID NO: 14496 - protein, 6 aa, Artificial Sequence
  Synthetic construct
QTVSSY

SEQ ID NO: 14497 - protein, 6 aa, Artificial Sequence
  Synthetic construct
QGISSW

SEQ ID NO: 14498 - protein, 9 aa, Artificial Sequence
  Synthetic construct
SSSIGAGYD

SEQ ID NO: 14499 - protein, 6 aa, Artificial Sequence
  Synthetic construct
QSVSSY

SEQ ID NO: 14500 - protein, 6 aa, Artificial Sequence
  Synthetic construct
KLGDKN

SEQ ID NO: 14501 - protein, 6 aa, Artificial Sequence
  Synthetic construct
QDIRNS

SEQ ID NO: 14502 - protein, 6 aa, Artificial Sequence
  Synthetic construct
QSISSY

SEQ ID NO: 14503 - protein, 9 aa, Artificial Sequence
  Synthetic construct
SSDVGGYNY

SEQ ID NO: 14504 - protein, 6 aa, Artificial Sequence
  Synthetic construct
QSISSW

SEQ ID NO: 14505 - protein, 6 aa, Artificial Sequence
  Synthetic construct
ALPKKY

SEQ ID NO: 14506 - protein, 6 aa, Artificial Sequence
  Synthetic construct
QSISDW

SEQ ID NO: 14507 - protein, 6 aa, Artificial Sequence
  Synthetic construct
QGISSW

SEQ ID NO: 14508 - protein, 6 aa, Artificial Sequence
  Synthetic construct
QSVSSF

SEQ ID NO: 14509 - protein, 6 aa, Artificial Sequence
  Synthetic construct
QGINNW

SEQ ID NO: 14510 - protein, 9 aa, Artificial Sequence
  Synthetic construct
SSDVGSYNL

SEQ ID NO: 14511 - protein, 6 aa, Artificial Sequence
  Synthetic construct
QSVSSN

SEQ ID NO: 14512 - protein, 6 aa, Artificial Sequence
  Synthetic construct
QGISSW

SEQ ID NO: 14513 - protein, 9 aa, Artificial Sequence
  Synthetic construct
RSDIGGYNY

SEQ ID NO: 14514 - protein, 6 aa, Artificial Sequence
  Synthetic construct
QDISNH

SEQ ID NO: 14515 - protein, 12 aa, Artificial Sequence
  Synthetic construct
QSVLYSSKNKNY

SEQ ID NO: 14516 - protein, 9 aa, Artificial Sequence
  Synthetic construct
GSDVGGYNY

SEQ ID NO: 14517 - protein, 7 aa, Artificial Sequence
  Synthetic construct
QSVSSGY

SEQ ID NO: 14518 - protein, 6 aa, Artificial Sequence
  Synthetic construct
QGISSY

SEQ ID NO: 14519 - protein, 6 aa, Artificial Sequence
  Synthetic construct
QSARIS

SEQ ID NO: 14520 - protein, 9 aa, Artificial Sequence
  Synthetic construct
GSNIGVGYD

SEQ ID NO: 14521 - protein, 9 aa, Artificial Sequence
  Synthetic construct
SSDVGSYDH

SEQ ID NO: 14522 - protein, 8 aa, Artificial Sequence
  Synthetic construct
SSDIGNNY

SEQ ID NO: 14523 - protein, 12 aa, Artificial Sequence
  Synthetic construct
QSIFYSSNKKSY

SEQ ID NO: 14524 - protein, 7 aa, Artificial Sequence
  Synthetic construct
QSVSSDS

SEQ ID NO: 14525 - protein, 6 aa, Artificial Sequence
  Synthetic construct
QDINKY

SEQ ID NO: 14526 - protein, 12 aa, Artificial Sequence
  Synthetic construct
QSVLHSSNNKNS

SEQ ID NO: 14527 - protein, 6 aa, Artificial Sequence
  Synthetic construct
ALPKKY

SEQ ID NO: 14528 - protein, 11 aa, Artificial Sequence
  Synthetic construct
QSLLYSNGYTY

SEQ ID NO: 14529 - protein, 6 aa, Artificial Sequence
  Synthetic construct
QDISSW

SEQ ID NO: 14530 - protein, 9 aa, Artificial Sequence
  Synthetic construct
TSNIGASYD

SEQ ID NO: 14531 - protein, 11 aa, Artificial Sequence
  Synthetic construct
QSLVYSDGNTY

SEQ ID NO: 14532 - protein, 9 aa, Artificial Sequence
  Synthetic construct
SSNIGADYD

SEQ ID NO: 14533 - protein, 6 aa, Artificial Sequence
  Synthetic construct
QGIRND

SEQ ID NO: 14534 - protein, 7 aa, Artificial Sequence
  Synthetic construct
QSVSSSS

SEQ ID NO: 14535 - protein, 6 aa, Artificial Sequence
  Synthetic construct
QSISSY

SEQ ID NO: 14536 - protein, 6 aa, Artificial Sequence
  Synthetic construct
QSVSSN

SEQ ID NO: 14537 - protein, 6 aa, Artificial Sequence
  Synthetic construct
QSISSY

SEQ ID NO: 14538 - protein, 9 aa, Artificial Sequence
  Synthetic construct
SSDLGGFNY

SEQ ID NO: 14539 - protein, 9 aa, Artificial Sequence
  Synthetic construct
SSDVGSYDH

SEQ ID NO: 14540 - protein, 9 aa, Artificial Sequence
  Synthetic construct
SGSVSTSHY

SEQ ID NO: 14541 - protein, 6 aa, Artificial Sequence
  Synthetic construct
QGIRND

SEQ ID NO: 14542 - protein, 7 aa, Artificial Sequence
  Synthetic construct
HSVSSSS

SEQ ID NO: 14543 - protein, 6 aa, Artificial Sequence
  Synthetic construct
QGISNS

SEQ ID NO: 14544 - protein, 6 aa, Artificial Sequence
  Synthetic construct
QSVSSY

SEQ ID NO: 14545 - protein, 12 aa, Artificial Sequence
  Synthetic construct
QSVLYSSNNKNY

SEQ ID NO: 14546 - protein, 6 aa, Artificial Sequence
  Synthetic construct
QGISNS

SEQ ID NO: 14547 - protein, 6 aa, Artificial Sequence
  Synthetic construct
QSISNY

SEQ ID NO: 14548 - protein, 9 aa, Artificial Sequence
  Synthetic construct
SSDVGSYNL

SEQ ID NO: 14549 - protein, 8 aa, Artificial Sequence
  Synthetic construct
SSNIENNY

SEQ ID NO: 14550 - protein, 6 aa, Artificial Sequence
  Synthetic construct
QSVSTF

SEQ ID NO: 14551 - protein, 6 aa, Artificial Sequence
  Synthetic construct
QSISSW

SEQ ID NO: 14552 - protein, 6 aa, Artificial Sequence
  Synthetic construct
QIVSSN

SEQ ID NO: 14553 - protein, 11 aa, Artificial Sequence
  Synthetic construct
QSLVHSDGNTY

SEQ ID NO: 14554 - protein, 6 aa, Artificial Sequence
  Synthetic construct
ALPNQY

SEQ ID NO: 14555 - protein, 9 aa, Artificial Sequence
  Synthetic construct
SSDVGSYNL

SEQ ID NO: 14556 - protein, 9 aa, Artificial Sequence
  Synthetic construct
SRDVGAFNY

SEQ ID NO: 14557 - protein, 6 aa, Artificial Sequence
  Synthetic construct
QSVSSS

SEQ ID NO: 14558 - protein, 8 aa, Artificial Sequence
  Synthetic construct
SSNIGSNT

SEQ ID NO: 14559 - protein, 9 aa, Artificial Sequence
  Synthetic construct
AGAVTIANI

SEQ ID NO: 14560 - protein, 6 aa, Artificial Sequence
  Synthetic construct
ALPQKY

SEQ ID NO: 14561 - protein, 8 aa, Artificial Sequence
  Synthetic construct
SSNIGSNY

SEQ ID NO: 14562 - protein, 6 aa, Artificial Sequence
  Synthetic construct
QGISNY

SEQ ID NO: 14563 - protein, 9 aa, Artificial Sequence
  Synthetic construct
SSDIGNYNQ

SEQ ID NO: 14564 - protein, 6 aa, Artificial Sequence
  Synthetic construct
SGIGKY

SEQ ID NO: 14565 - protein, 6 aa, Artificial Sequence
  Synthetic construct
QSISDY

SEQ ID NO: 14566 - protein, 6 aa, Artificial Sequence
  Synthetic construct
SLRSYY

SEQ ID NO: 14567 - protein, 11 aa, Artificial Sequence
  Synthetic construct
QSLLHGDGKTY

SEQ ID NO: 14568 - protein, 6 aa, Artificial Sequence
  Synthetic construct
QSISSY

SEQ ID NO: 14569 - protein, 6 aa, Artificial Sequence
  Synthetic construct
QSVSSY

SEQ ID NO: 14570 - protein, 9 aa, Artificial Sequence
  Synthetic construct
SSNIGAGFD

SEQ ID NO: 14571 - protein, 12 aa, Artificial Sequence
  Synthetic construct
QSVLYSSINKNF

SEQ ID NO: 14572 - protein, 9 aa, Artificial Sequence
  Synthetic construct
SSDVGGYNY

SEQ ID NO: 14573 - protein, 8 aa, Artificial Sequence
  Synthetic construct
SSNIGNNF

SEQ ID NO: 14574 - protein, 6 aa, Artificial Sequence
  Synthetic construct
RSISTY

SEQ ID NO: 14575 - protein, 6 aa, Artificial Sequence
  Synthetic construct
QSISSW

SEQ ID NO: 14576 - protein, 7 aa, Artificial Sequence
  Synthetic construct
QSVSSTY

SEQ ID NO: 14577 - protein, 7 aa, Artificial Sequence
  Synthetic construct
QSVTSSY

SEQ ID NO: 14578 - protein, 6 aa, Artificial Sequence
  Synthetic construct
KLGDKY

SEQ ID NO: 14579 - protein, 6 aa, Artificial Sequence
  Synthetic construct
QSIANY

SEQ ID NO: 14580 - protein, 6 aa, Artificial Sequence
  Synthetic construct
QSVSSS

SEQ ID NO: 14581 - protein, 6 aa, Artificial Sequence
  Synthetic construct
HDISNY

SEQ ID NO: 14582 - protein, 9 aa, Artificial Sequence
  Synthetic construct
SGDVGSYNL

SEQ ID NO: 14583 - protein, 9 aa, Artificial Sequence
  Synthetic construct
SSDVGSYNL

SEQ ID NO: 14584 - protein, 6 aa, Artificial Sequence
  Synthetic construct
ALPKQY

SEQ ID NO: 14585 - protein, 6 aa, Artificial Sequence
  Synthetic construct
QGIRTD

SEQ ID NO: 14586 - protein, 6 aa, Artificial Sequence
  Synthetic construct
QGITSF

SEQ ID NO: 14587 - protein, 6 aa, Artificial Sequence
  Synthetic construct
QDINNY

SEQ ID NO: 14588 - protein, 7 aa, Artificial Sequence
  Synthetic construct
QTVSNDY

SEQ ID NO: 14589 - protein, 6 aa, Artificial Sequence
  Synthetic construct
QSMSSW

SEQ ID NO: 14590 - protein, 9 aa, Artificial Sequence
  Synthetic construct
SGINVGTYR

SEQ ID NO: 14591 - protein, 7 aa, Artificial Sequence
  Synthetic construct
QSVSSTY

SEQ ID NO: 14592 - protein, 11 aa, Artificial Sequence
  Synthetic construct
QSLLHSNGYNY

SEQ ID NO: 14593 - protein, 12 aa, Artificial Sequence
  Synthetic construct
QSVLYSSNNKNY

SEQ ID NO: 14594 - protein, 9 aa, Artificial Sequence
  Synthetic construct
SSDVGNYNL

SEQ ID NO: 14595 - protein, 6 aa, Artificial Sequence
  Synthetic construct
QSVSSY

SEQ ID NO: 14596 - protein, 11 aa, Artificial Sequence
  Synthetic construct
QSLVYSDGNTY

SEQ ID NO: 14597 - protein, 9 aa, Artificial Sequence
  Synthetic construct
STDVGGSNY

SEQ ID NO: 14598 - protein, 6 aa, Artificial Sequence
  Synthetic construct
QSISSY

SEQ ID NO: 14599 - protein, 9 aa, Artificial Sequence
  Synthetic construct
SSDVGTYNY

SEQ ID NO: 14600 - protein, 6 aa, Artificial Sequence
  Synthetic construct
QSISSY

SEQ ID NO: 14601 - protein, 6 aa, Artificial Sequence
  Synthetic construct
QGISSW

SEQ ID NO: 14602 - protein, 9 aa, Artificial Sequence
  Synthetic construct
SSDVGDYNY

SEQ ID NO: 14603 - protein, 6 aa, Artificial Sequence
  Synthetic construct
QSISSW

SEQ ID NO: 14604 - protein, 11 aa, Artificial Sequence
  Synthetic construct
QSLLHSNGYNY

SEQ ID NO: 14605 - protein, 6 aa, Artificial Sequence
  Synthetic construct
NVGSDG

SEQ ID NO: 14606 - protein, 6 aa, Artificial Sequence
  Synthetic construct
QDIGDY

SEQ ID NO: 14607 - protein, 9 aa, Artificial Sequence
  Synthetic construct
SSDVGSYNR

SEQ ID NO: 14608 - protein, 6 aa, Artificial Sequence
  Synthetic construct
QSVDNN

SEQ ID NO: 14609 - protein, 6 aa, Artificial Sequence
  Synthetic construct
QSVSSY

SEQ ID NO: 14610 - protein, 9 aa, Artificial Sequence
  Synthetic construct
TGAVTSGHY

SEQ ID NO: 14611 - protein, 8 aa, Artificial Sequence
  Synthetic construct
RSNIGNNY

SEQ ID NO: 14612 - protein, 6 aa, Artificial Sequence
  Synthetic construct
QGISSY

SEQ ID NO: 14613 - protein, 8 aa, Artificial Sequence
  Synthetic construct
SSNIGSNY

SEQ ID NO: 14614 - protein, 6 aa, Artificial Sequence
  Synthetic construct
KLGDKY

SEQ ID NO: 14615 - protein, 6 aa, Artificial Sequence
  Synthetic construct
QSVSSN

SEQ ID NO: 14616 - protein, 6 aa, Artificial Sequence
  Synthetic construct
KLGDKY

SEQ ID NO: 14617 - protein, 9 aa, Artificial Sequence
  Synthetic construct
SSDVGGNDY

SEQ ID NO: 14618 - protein, 8 aa, Artificial Sequence
  Synthetic construct
SSNIGSNY

SEQ ID NO: 14619 - protein, 6 aa, Artificial Sequence
  Synthetic construct
ALPNQY

SEQ ID NO: 14620 - protein, 6 aa, Artificial Sequence
  Synthetic construct
QSISSY

SEQ ID NO: 14621 - protein, 6 aa, Artificial Sequence
  Synthetic construct
QGISDY

SEQ ID NO: 14622 - protein, 6 aa, Artificial Sequence
  Synthetic construct
QSIGTK

SEQ ID NO: 14623 - protein, 12 aa, Artificial Sequence
  Synthetic construct
QSVLYSSNNKNY

SEQ ID NO: 14624 - protein, 6 aa, Artificial Sequence
  Synthetic construct
SLTKYY

SEQ ID NO: 14625 - protein, 12 aa, Artificial Sequence
  Synthetic construct
QDILYSANNKNY

SEQ ID NO: 14626 - protein, 11 aa, Artificial Sequence
  Synthetic construct
QSLVYSDGNTY

SEQ ID NO: 14627 - protein, 6 aa, Artificial Sequence
  Synthetic construct
QGISSY

SEQ ID NO: 14628 - protein, 8 aa, Artificial Sequence
  Synthetic construct
SSNVGSNT

SEQ ID NO: 14629 - protein, 7 aa, Artificial Sequence
  Synthetic construct
QSVSSSY

SEQ ID NO: 14630 - protein, 6 aa, Artificial Sequence
  Synthetic construct
QSVSSS

SEQ ID NO: 14631 - protein, 11 aa, Artificial Sequence
  Synthetic construct
QSLLFGNGYTY

SEQ ID NO: 14632 - protein, 8 aa, Artificial Sequence
  Synthetic construct
YSNIGGNS

SEQ ID NO: 14633 - protein, 11 aa, Artificial Sequence
  Synthetic construct
QSLLHSDGKTY

SEQ ID NO: 14634 - protein, 7 aa, Artificial Sequence
  Synthetic construct
QSLSSSD

SEQ ID NO: 14635 - protein, 6 aa, Artificial Sequence
  Synthetic construct
ALPKKY

SEQ ID NO: 14636 - protein, 8 aa, Artificial Sequence
  Synthetic construct
TSNIGSHT

SEQ ID NO: 14637 - protein, 6 aa, Artificial Sequence
  Synthetic construct
QDISNY

SEQ ID NO: 14638 - protein, 6 aa, Artificial Sequence
  Synthetic construct
QSVTNW

SEQ ID NO: 14639 - protein, 6 aa, Artificial Sequence
  Synthetic construct
QSVSTY

SEQ ID NO: 14640 - protein, 9 aa, Artificial Sequence
  Synthetic construct
SSNIGAGYD

SEQ ID NO: 14641 - protein, 12 aa, Artificial Sequence
  Synthetic construct
QRVLYSSDNKNY

SEQ ID NO: 14642 - protein, 9 aa, Artificial Sequence
  Synthetic construct
SSDVGGYNY

SEQ ID NO: 14643 - protein, 9 aa, Artificial Sequence
  Synthetic construct
SRDVGNYKL

SEQ ID NO: 14644 - protein, 6 aa, Artificial Sequence
  Synthetic construct
QSVSTF

SEQ ID NO: 14645 - protein, 9 aa, Artificial Sequence
  Synthetic construct
SSDVGSYNL

SEQ ID NO: 14646 - protein, 6 aa, Artificial Sequence
  Synthetic construct
ALPKKY

SEQ ID NO: 14647 - protein, 9 aa, Artificial Sequence
  Synthetic construct
SSDVGDYNY

SEQ ID NO: 14648 - protein, 6 aa, Artificial Sequence
  Synthetic construct
QSISSY

SEQ ID NO: 14649 - protein, 11 aa, Artificial Sequence
  Synthetic construct
HSLLHSNGYNY

SEQ ID NO: 14650 - protein, 7 aa, Artificial Sequence
  Synthetic construct
ESLSSRY

SEQ ID NO: 14651 - protein, 9 aa, Artificial Sequence
  Synthetic construct
SSDVGGYNY

SEQ ID NO: 14652 - protein, 6 aa, Artificial Sequence
  Synthetic construct
QSIGSS

SEQ ID NO: 14653 - protein, 6 aa, Artificial Sequence
  Synthetic construct
QGIRND

SEQ ID NO: 14654 - protein, 6 aa, Artificial Sequence
  Synthetic construct
QSISNW

SEQ ID NO: 14655 - protein, 8 aa, Artificial Sequence
  Synthetic construct
SSNIGRNY

SEQ ID NO: 14656 - protein, 9 aa, Artificial Sequence
  Synthetic construct
SSDIGDYNY

SEQ ID NO: 14657 - protein, 9 aa, Artificial Sequence
  Synthetic construct
SSNIGAGYD

SEQ ID NO: 14658 - protein, 9 aa, Artificial Sequence
  Synthetic construct
SSDVGGYNY

SEQ ID NO: 14659 - protein, 6 aa, Artificial Sequence
  Synthetic construct
QSVSSY

SEQ ID NO: 14660 - protein, 6 aa, Artificial Sequence
  Synthetic construct
QGISSW

SEQ ID NO: 14661 - protein, 6 aa, Artificial Sequence
  Synthetic construct
ALPKQY

SEQ ID NO: 14662 - protein, 6 aa, Artificial Sequence
  Synthetic construct
QDISYY

SEQ ID NO: 14663 - protein, 6 aa, Artificial Sequence
  Synthetic construct
QSVSSS

SEQ ID NO: 14664 - protein, 6 aa, Artificial Sequence
  Synthetic construct
QSISSW

SEQ ID NO: 14665 - protein, 6 aa, Artificial Sequence
  Synthetic construct
KLGDKY

SEQ ID NO: 14666 - protein, 6 aa, Artificial Sequence
  Synthetic construct
QSISSY

SEQ ID NO: 14667 - protein, 11 aa, Artificial Sequence
  Synthetic construct
QSLLHSNGYNY

SEQ ID NO: 14668 - protein, 6 aa, Artificial Sequence
  Synthetic construct
ALPKQY

SEQ ID NO: 14669 - protein, 6 aa, Artificial Sequence
  Synthetic construct
QSVSSD

SEQ ID NO: 14670 - protein, 11 aa, Artificial Sequence
  Synthetic construct
QSLLHSNGFNY

SEQ ID NO: 14671 - protein, 8 aa, Artificial Sequence
  Synthetic construct
SSNIGNNY

SEQ ID NO: 14672 - protein, 6 aa, Artificial Sequence
  Synthetic construct
ALPKQY

SEQ ID NO: 14673 - protein, 6 aa, Artificial Sequence
  Synthetic construct
ALPNQY

SEQ ID NO: 14674 - protein, 9 aa, Artificial Sequence
  Synthetic construct
SSNIGAGYD

SEQ ID NO: 14675 - protein, 6 aa, Artificial Sequence
  Synthetic construct
KLGDKY

SEQ ID NO: 14676 - protein, 6 aa, Artificial Sequence
  Synthetic construct
QSISSY

SEQ ID NO: 14677 - protein, 6 aa, Artificial Sequence
  Synthetic construct
ALPKKY

SEQ ID NO: 14678 - protein, 9 aa, Artificial Sequence
  Synthetic construct
SGSVSTNYY

SEQ ID NO: 14679 - protein, 6 aa, Artificial Sequence
  Synthetic construct
QSISNY

SEQ ID NO: 14680 - protein, 6 aa, Artificial Sequence
  Synthetic construct
QSISSY

SEQ ID NO: 14681 - protein, 6 aa, Artificial Sequence
  Synthetic construct
QGISRN

SEQ ID NO: 14682 - protein, 6 aa, Artificial Sequence
  Synthetic construct
QSLSSW

SEQ ID NO: 14683 - protein, 7 aa, Artificial Sequence
  Synthetic construct
QTVSSSY

SEQ ID NO: 14684 - protein, 12 aa, Artificial Sequence
  Synthetic construct
QSVLYSSNNKNY

SEQ ID NO: 14685 - protein, 9 aa, Artificial Sequence
  Synthetic construct
SSDVGYYNY

SEQ ID NO: 14686 - protein, 9 aa, Artificial Sequence
  Synthetic construct
SSDVGGYDY

SEQ ID NO: 14687 - protein, 8 aa, Artificial Sequence
  Synthetic construct
RSNIGSQI

SEQ ID NO: 14688 - protein, 9 aa, Artificial Sequence
  Synthetic construct
SSNIGAGYD

SEQ ID NO: 14689 - protein, 8 aa, Artificial Sequence
  Synthetic construct
SSNIGSKP

SEQ ID NO: 14690 - protein, 6 aa, Artificial Sequence
  Synthetic construct
QDISIY

SEQ ID NO: 14691 - protein, 6 aa, Artificial Sequence
  Synthetic construct
QSIRTY

SEQ ID NO: 14692 - protein, 9 aa, Artificial Sequence
  Synthetic construct
SSNIGAGYD

SEQ ID NO: 14693 - protein, 8 aa, Artificial Sequence
  Synthetic construct
SSNIGNNY

SEQ ID NO: 14694 - protein, 6 aa, Artificial Sequence
  Synthetic construct
QSVSSY

SEQ ID NO: 14695 - protein, 3 aa, Artificial Sequence
  Synthetic construct
  MISC_FEATURE (1)..(3): X can be any amino acid
XXX

SEQ ID NO: 14696 - protein, 7 aa, Artificial Sequence
  Synthetic construct
QSVSSSY

SEQ ID NO: 14697 - protein, 6 aa, Artificial Sequence
  Synthetic construct
QDINNY

SEQ ID NO: 14698 - protein, 7 aa, Artificial Sequence
  Synthetic construct
QSVSSSY

SEQ ID NO: 14699 - protein, 6 aa, Artificial Sequence
  Synthetic construct
QSVGSY

SEQ ID NO: 14700 - protein, 12 aa, Artificial Sequence
  Synthetic construct
QSVLYSSNNKNY

SEQ ID NO: 14701 - protein, 9 aa, Artificial Sequence
  Synthetic construct
SSNIGAGYD

SEQ ID NO: 14702 - protein, 6 aa, Artificial Sequence
  Synthetic construct
QSVRRN

SEQ ID NO: 14703 - protein, 9 aa, Artificial Sequence
  Synthetic construct
SGDVGGYNY

SEQ ID NO: 14704 - protein, 6 aa, Artificial Sequence
  Synthetic construct
QSISSN

SEQ ID NO: 14705 - protein, 6 aa, Artificial Sequence
  Synthetic construct
QSVSSN

SEQ ID NO: 14706 - protein, 9 aa, Artificial Sequence
  Synthetic construct
SSNIGAGYD

SEQ ID NO: 14707 - protein, 6 aa, Artificial Sequence
  Synthetic construct
QSVSSY

SEQ ID NO: 14708 - protein, 6 aa, Artificial Sequence
  Synthetic construct
NIGSKS

SEQ ID NO: 14709 - protein, 6 aa, Artificial Sequence
  Synthetic construct
QSVSSF

SEQ ID NO: 14710 - protein, 11 aa, Artificial Sequence
  Synthetic construct
QSLLHSDGKTY

SEQ ID NO: 14711 - protein, 6 aa, Artificial Sequence
  Synthetic construct
ALPKYY

SEQ ID NO: 14712 - protein, 6 aa, Artificial Sequence
  Synthetic construct
QSIATY

SEQ ID NO: 14713 - protein, 9 aa, Artificial Sequence
  Synthetic construct
NSDVGSYDH

SEQ ID NO: 14714 - protein, 6 aa, Artificial Sequence
  Synthetic construct
NIGSKS

SEQ ID NO: 14715 - protein, 6 aa, Artificial Sequence
  Synthetic construct
QSIGSR

SEQ ID NO: 14716 - protein, 9 aa, Artificial Sequence
  Synthetic construct
SSDIGTYNY

SEQ ID NO: 14717 - protein, 7 aa, Artificial Sequence
  Synthetic construct
QSVSSSY

SEQ ID NO: 14718 - protein, 8 aa, Artificial Sequence
  Synthetic construct
SSNIGNSF

SEQ ID NO: 14719 - protein, 7 aa, Artificial Sequence
  Synthetic construct
QSVTSTY

SEQ ID NO: 14720 - protein, 6 aa, Artificial Sequence
  Synthetic construct
QTINNY

SEQ ID NO: 14721 - protein, 7 aa, Artificial Sequence
  Synthetic construct
QSVSSSY

SEQ ID NO: 14722 - protein, 6 aa, Artificial Sequence
  Synthetic construct
QSISSY

SEQ ID NO: 14723 - protein, 9 aa, Artificial Sequence
  Synthetic construct
SSDVGSYDH

SEQ ID NO: 14724 - protein, 9 aa, Artificial Sequence
  Synthetic construct
SSDVGGYKY

SEQ ID NO: 14725 - protein, 9 aa, Artificial Sequence
  Synthetic construct
SSDVGGYNY

SEQ ID NO: 14726 - protein, 7 aa, Artificial Sequence
  Synthetic construct
QPVSNNY

SEQ ID NO: 14727 - protein, 11 aa, Artificial Sequence
  Synthetic construct
QSLLFGNGYTY

SEQ ID NO: 14728 - protein, 6 aa, Artificial Sequence
  Synthetic construct
QNISNW

SEQ ID NO: 14729 - protein, 9 aa, Artificial Sequence
  Synthetic construct
SSDVGGYNY

SEQ ID NO: 14730 - protein, 6 aa, Artificial Sequence
  Synthetic construct
QSVSNF

SEQ ID NO: 14731 - protein, 6 aa, Artificial Sequence
  Synthetic construct
QGIRND

SEQ ID NO: 14732 - protein, 9 aa, Artificial Sequence
  Synthetic construct
SSDIGSYNL

SEQ ID NO: 14733 - protein, 9 aa, Artificial Sequence
  Synthetic construct
SSDIGGYNY

SEQ ID NO: 14734 - protein, 7 aa, Artificial Sequence
  Synthetic construct
QSVSSSY

SEQ ID NO: 14735 - protein, 8 aa, Artificial Sequence
  Synthetic construct
SSNIGHNG

SEQ ID NO: 14736 - protein, 6 aa, Artificial Sequence
  Synthetic construct
QSISSW

SEQ ID NO: 14737 - protein, 9 aa, Artificial Sequence
  Synthetic construct
SSDVGGFNY

SEQ ID NO: 14738 - protein, 6 aa, Artificial Sequence
  Synthetic construct
SLRKYY

SEQ ID NO: 14739 - protein, 6 aa, Artificial Sequence
  Synthetic construct
QDITTW

SEQ ID NO: 14740 - protein, 9 aa, Artificial Sequence
  Synthetic construct
ISDIGSYDH

SEQ ID NO: 14741 - protein, 12 aa, Artificial Sequence
  Synthetic construct
QSVLYSSNNKNY

SEQ ID NO: 14742 - protein, 6 aa, Artificial Sequence
  Synthetic construct
QGISNY

SEQ ID NO: 14743 - protein, 6 aa, Artificial Sequence
  Synthetic construct
VLAKKY

SEQ ID NO: 14744 - protein, 9 aa, Artificial Sequence
  Synthetic construct
STDIGIYSY

SEQ ID NO: 14745 - protein, 12 aa, Artificial Sequence
  Synthetic construct
QSVLYSSNNKNY

SEQ ID NO: 14746 - protein, 6 aa, Artificial Sequence
  Synthetic construct
QSVSNN

SEQ ID NO: 14747 - protein, 12 aa, Artificial Sequence
  Synthetic construct
QSVLYSSNNKNY

SEQ ID NO: 14748 - protein, 6 aa, Artificial Sequence
  Synthetic construct
QSISRW

SEQ ID NO: 14749 - protein, 7 aa, Artificial Sequence
  Synthetic construct
QSVGSIY

SEQ ID NO: 14750 - protein, 6 aa, Artificial Sequence
  Synthetic construct
QSISSY

SEQ ID NO: 14751 - protein, 6 aa, Artificial Sequence
  Synthetic construct
QSISMW

SEQ ID NO: 14752 - protein, 6 aa, Artificial Sequence
  Synthetic construct
QGISSY

SEQ ID NO: 14753 - protein, 9 aa, Artificial Sequence
  Synthetic construct
SASVSSSHT

SEQ ID NO: 14754 - protein, 6 aa, Artificial Sequence
  Synthetic construct
QSISSN

SEQ ID NO: 14755 - protein, 6 aa, Artificial Sequence
  Synthetic construct
QSISSY

SEQ ID NO: 14756 - protein, 6 aa, Artificial Sequence
  Synthetic construct
NFGSKS

SEQ ID NO: 14757 - protein, 12 aa, Artificial Sequence
  Synthetic construct
QSVLNSSNNKNY

SEQ ID NO: 14758 - protein, 11 aa, Artificial Sequence
  Synthetic construct
QSLLHSNGNHY

SEQ ID NO: 14759 - protein, 7 aa, Artificial Sequence
  Synthetic construct
QSVSNNY

SEQ ID NO: 14760 - protein, 6 aa, Artificial Sequence
  Synthetic construct
QSVSSN

SEQ ID NO: 14761 - protein, 6 aa, Artificial Sequence
  Synthetic construct
QDINNH

SEQ ID NO: 14762 - protein, 6 aa, Artificial Sequence
  Synthetic construct
QDITRW

SEQ ID NO: 14763 - protein, 6 aa, Artificial Sequence
  Synthetic construct
KLGDKY

SEQ ID NO: 14764 - protein, 6 aa, Artificial Sequence
  Synthetic construct
QGFSSW

SEQ ID NO: 14765 - protein, 6 aa, Artificial Sequence
  Synthetic construct
QGIRND

SEQ ID NO: 14766 - protein, 6 aa, Artificial Sequence
  Synthetic construct
QSISSY

SEQ ID NO: 14767 - protein, 6 aa, Artificial Sequence
  Synthetic construct
QDISNY

SEQ ID NO: 14768 - protein, 7 aa, Artificial Sequence
  Synthetic construct
QSVSSSY

SEQ ID NO: 14769 - protein, 6 aa, Artificial Sequence
  Synthetic construct
QGISRW

SEQ ID NO: 14770 - protein, 6 aa, Artificial Sequence
  Synthetic construct
NIGSKS

SEQ ID NO: 14771 - protein, 8 aa, Artificial Sequence
  Synthetic construct
SSNIGTNY

SEQ ID NO: 14772 - protein, 6 aa, Artificial Sequence
  Synthetic construct
QSVGTY

SEQ ID NO: 14773 - protein, 6 aa, Artificial Sequence
  Synthetic construct
QSISRY

SEQ ID NO: 14774 - protein, 6 aa, Artificial Sequence
  Synthetic construct
QAISNY

SEQ ID NO: 14775 - protein, 6 aa, Artificial Sequence
  Synthetic construct
KLGDKY

SEQ ID NO: 14776 - protein, 6 aa, Artificial Sequence
  Synthetic construct
QSVRKF

SEQ ID NO: 14777 - protein, 9 aa, Artificial Sequence
  Synthetic construct
SSDVGSYDH

SEQ ID NO: 14778 - protein, 6 aa, Artificial Sequence
  Synthetic construct
ALSNQY

SEQ ID NO: 14779 - protein, 6 aa, Artificial Sequence
  Synthetic construct
QSVSNF

SEQ ID NO: 14780 - protein, 7 aa, Artificial Sequence
  Synthetic construct
ESVTSRS

SEQ ID NO: 14781 - protein, 6 aa, Artificial Sequence
  Synthetic construct
QSIKNY

SEQ ID NO: 14782 - protein, 9 aa, Artificial Sequence
  Synthetic construct
SSDVGGYDF

SEQ ID NO: 14783 - protein, 6 aa, Artificial Sequence
  Synthetic construct
ALPKRY

SEQ ID NO: 14784 - protein, 12 aa, Artificial Sequence
  Synthetic construct
QSILYRSNNRNY

SEQ ID NO: 14785 - protein, 6 aa, Artificial Sequence
  Synthetic construct
ALPKKY

SEQ ID NO: 14786 - protein, 7 aa, Artificial Sequence
  Synthetic construct
QSVSSSY

SEQ ID NO: 14787 - protein, 9 aa, Artificial Sequence
  Synthetic construct
SSDIGSYNL

SEQ ID NO: 14788 - protein, 6 aa, Artificial Sequence
  Synthetic construct
NIGSKS

SEQ ID NO: 14789 - protein, 11 aa, Artificial Sequence
  Synthetic construct
QSLLFGNGYTY

SEQ ID NO: 14790 - protein, 7 aa, Artificial Sequence
  Synthetic construct
QSVSSSY

SEQ ID NO: 14791 - protein, 6 aa, Artificial Sequence
  Synthetic construct
QGISSY

SEQ ID NO: 14792 - protein, 8 aa, Artificial Sequence
  Synthetic construct
SSNIGNNH

SEQ ID NO: 14793 - protein, 7 aa, Artificial Sequence
  Synthetic construct
QSVSNNY

SEQ ID NO: 14794 - protein, 12 aa, Artificial Sequence
  Synthetic construct
RSVLNSSDNKNY

SEQ ID NO: 14795 - protein, 8 aa, Artificial Sequence
  Synthetic construct
SSNIGNNY

SEQ ID NO: 14796 - protein, 9 aa, Artificial Sequence
  Synthetic construct
SSDVGGYDY

SEQ ID NO: 14797 - protein, 6 aa, Artificial Sequence
  Synthetic construct
KLGNKY

SEQ ID NO: 14798 - protein, 6 aa, Artificial Sequence
  Synthetic construct
QSVSSS

SEQ ID NO: 14799 - protein, 6 aa, Artificial Sequence
  Synthetic construct
QSISSW

SEQ ID NO: 14800 - protein, 6 aa, Artificial Sequence
  Synthetic construct
ALPKRY

SEQ ID NO: 14801 - protein, 8 aa, Artificial Sequence
  Synthetic construct
SSNIGINY

SEQ ID NO: 14802 - protein, 6 aa, Artificial Sequence
  Synthetic construct
QSVSSF

SEQ ID NO: 14803 - protein, 6 aa, Artificial Sequence
  Synthetic construct
QSVSSN

SEQ ID NO: 14804 - protein, 8 aa, Artificial Sequence
  Synthetic construct
SSNIGSNP

SEQ ID NO: 14805 - protein, 6 aa, Artificial Sequence
  Synthetic construct
QSVSSN

SEQ ID NO: 14806 - protein, 6 aa, Artificial Sequence
  Synthetic construct
KLGDKY

SEQ ID NO: 14807 - protein, 9 aa, Artificial Sequence
  Synthetic construct
SSDVGSYNL

SEQ ID NO: 14808 - protein, 11 aa, Artificial Sequence
  Synthetic construct
QSLVYSDGNTY

SEQ ID NO: 14809 - protein, 6 aa, Artificial Sequence
  Synthetic construct
QSVSTY

SEQ ID NO: 14810 - protein, 12 aa, Artificial Sequence
  Synthetic construct
QSVLYSSNNKNY

SEQ ID NO: 14811 - protein, 12 aa, Artificial Sequence
  Synthetic construct
QSVLYSSNNKNY

SEQ ID NO: 14812 - protein, 9 aa, Artificial Sequence
  Synthetic construct
SSNIGADYD

SEQ ID NO: 14813 - protein, 6 aa, Artificial Sequence
  Synthetic construct
QSVRIS

SEQ ID NO: 14814 - protein, 6 aa, Artificial Sequence
  Synthetic construct
QSVNIY

SEQ ID NO: 14815 - protein, 6 aa, Artificial Sequence
  Synthetic construct
ALAKKY

SEQ ID NO: 14816 - protein, 6 aa, Artificial Sequence
  Synthetic construct
QSVSSN

SEQ ID NO: 14817 - protein, 11 aa, Artificial Sequence
  Synthetic construct
QSLLHSDGKTY

SEQ ID NO: 14818 - protein, 7 aa, Artificial Sequence
  Synthetic construct
QSIRTYY

SEQ ID NO: 14819 - protein, 8 aa, Artificial Sequence
  Synthetic construct
SGSIASNY

SEQ ID NO: 14820 - protein, 6 aa, Artificial Sequence
  Synthetic construct
QGISSW

SEQ ID NO: 14821 - protein, 8 aa, Artificial Sequence
  Synthetic construct
SSNIESNF

SEQ ID NO: 14822 - protein, 8 aa, Artificial Sequence
  Synthetic construct
SSNIENNY

SEQ ID NO: 14823 - protein, 6 aa, Artificial Sequence
  Synthetic construct
QSVSSN

SEQ ID NO: 14824 - protein, 9 aa, Artificial Sequence
  Synthetic construct
SSDVGGYNY

SEQ ID NO: 14825 - protein, 6 aa, Artificial Sequence
  Synthetic construct
QSVSSY

SEQ ID NO: 14826 - protein, 12 aa, Artificial Sequence
  Synthetic construct
QSVLYSSNNKNY

SEQ ID NO: 14827 - protein, 9 aa, Artificial Sequence
  Synthetic construct
SSNIGAGYD

SEQ ID NO: 14828 - protein, 8 aa, Artificial Sequence
  Synthetic construct
SSNVGGHA

SEQ ID NO: 14829 - protein, 9 aa, Artificial Sequence
  Synthetic construct
SSDVGSYNL

SEQ ID NO: 14830 - protein, 11 aa, Artificial Sequence
  Synthetic construct
QSLVFRDGNTY

SEQ ID NO: 14831 - protein, 7 aa, Artificial Sequence
  Synthetic construct
QSVSSSY

SEQ ID NO: 14832 - protein, 11 aa, Artificial Sequence
  Synthetic construct
ESLLHSDGKTY

SEQ ID NO: 14833 - protein, 7 aa, Artificial Sequence
  Synthetic construct
QSVGSRF

SEQ ID NO: 14834 - protein, 6 aa, Artificial Sequence
  Synthetic construct
QSVSSN

SEQ ID NO: 14835 - protein, 7 aa, Artificial Sequence
  Synthetic construct
PSVSSNY

SEQ ID NO: 14836 - protein, 8 aa, Artificial Sequence
  Synthetic construct
SSNIGSNT

SEQ ID NO: 14837 - protein, 6 aa, Artificial Sequence
  Synthetic construct
QGIRND

SEQ ID NO: 14838 - protein, 6 aa, Artificial Sequence
  Synthetic construct
NLRSKD

SEQ ID NO: 14839 - protein, 6 aa, Artificial Sequence
  Synthetic construct
ALPTKY

SEQ ID NO: 14840 - protein, 6 aa, Artificial Sequence
  Synthetic construct
QDISSY

SEQ ID NO: 14841 - protein, 8 aa, Artificial Sequence
  Synthetic construct
NSNIGNNY

SEQ ID NO: 14842 - protein, 9 aa, Artificial Sequence
  Synthetic construct
SSDVGSYNL

SEQ ID NO: 14843 - protein, 9 aa, Artificial Sequence
  Synthetic construct
STDIGIYSY

SEQ ID NO: 14844 - protein, 6 aa, Artificial Sequence
  Synthetic construct
QSISNW

SEQ ID NO: 14845 - protein, 9 aa, Artificial Sequence
  Synthetic construct
SSDIGAYNY

SEQ ID NO: 14846 - protein, 9 aa, Artificial Sequence
  Synthetic construct
SGINVGTYR

SEQ ID NO: 14847 - protein, 6 aa, Artificial Sequence
  Synthetic construct
QDIRNN

SEQ ID NO: 14848 - protein, 9 aa, Artificial Sequence
  Synthetic construct
SSDVGGYNS

SEQ ID NO: 14849 - protein, 7 aa, Artificial Sequence
  Synthetic construct
QSVSSSY

SEQ ID NO: 14850 - protein, 9 aa, Artificial Sequence
  Synthetic construct
SSDVGGYDF

SEQ ID NO: 14851 - protein, 6 aa, Artificial Sequence
  Synthetic construct
QSVSSF

SEQ ID NO: 14852 - protein, 7 aa, Artificial Sequence
  Synthetic construct
QSVSSIY

SEQ ID NO: 14853 - protein, 11 aa, Artificial Sequence
  Synthetic construct
QSLLHSDGKTY

SEQ ID NO: 14854 - protein, 9 aa, Artificial Sequence
  Synthetic construct
NSNIGAGYD

SEQ ID NO: 14855 - protein, 7 aa, Artificial Sequence
  Synthetic construct
QSVSSSY

SEQ ID NO: 14856 - protein, 7 aa, Artificial Sequence
  Synthetic construct
QSVSSSY

SEQ ID NO: 14857 - protein, 9 aa, Artificial Sequence
  Synthetic construct
SSNLGAGYA

SEQ ID NO: 14858 - protein, 6 aa, Artificial Sequence
  Synthetic construct
QSISRY

SEQ ID NO: 14859 - protein, 7 aa, Artificial Sequence
  Synthetic construct
QSVSSSF

SEQ ID NO: 14860 - protein, 6 aa, Artificial Sequence
  Synthetic construct
QSISSY

SEQ ID NO: 14861 - protein, 12 aa, Artificial Sequence
  Synthetic construct
QTVLYRSNNKNY

SEQ ID NO: 14862 - protein, 11 aa, Artificial Sequence
  Synthetic construct
QSLVFRDGNTY

SEQ ID NO: 14863 - protein, 8 aa, Artificial Sequence
  Synthetic construct
SSNIGSNY

SEQ ID NO: 14864 - protein, 9 aa, Artificial Sequence
  Synthetic construct
TSNIGAGYD

SEQ ID NO: 14865 - protein, 6 aa, Artificial Sequence
  Synthetic construct
QDINIY

SEQ ID NO: 14866 - protein, 7 aa, Artificial Sequence
  Synthetic construct
QSVGSLY

SEQ ID NO: 14867 - protein, 6 aa, Artificial Sequence
  Synthetic construct
QDINFS

SEQ ID NO: 14868 - protein, 8 aa, Artificial Sequence
  Synthetic construct
NFNIGKNF

SEQ ID NO: 14869 - protein, 7 aa, Artificial Sequence
  Synthetic construct
QSVSNNY

SEQ ID NO: 14870 - protein, 11 aa, Artificial Sequence
  Synthetic construct
QSLLHSDGKTY

SEQ ID NO: 14871 - protein, 11 aa, Artificial Sequence
  Synthetic construct
QSLLHSNGYNY

SEQ ID NO: 14872 - protein, 11 aa, Artificial Sequence
  Synthetic construct
QSLLHGDGKTY

SEQ ID NO: 14873 - protein, 6 aa, Artificial Sequence
  Synthetic construct
KLGDKY

SEQ ID NO: 14874 - protein, 6 aa, Artificial Sequence
  Synthetic construct
QSISSY

SEQ ID NO: 14875 - protein, 6 aa, Artificial Sequence
  Synthetic construct
QSVSSY

SEQ ID NO: 14876 - protein, 11 aa, Artificial Sequence
  Synthetic construct
QSLLHSDGKTY

SEQ ID NO: 14877 - protein, 11 aa, Artificial Sequence
  Synthetic construct
QSLLHSDGKTY

SEQ ID NO: 14878 - protein, 6 aa, Artificial Sequence
  Synthetic construct
QSISRY

SEQ ID NO: 14879 - protein, 6 aa, Artificial Sequence
  Synthetic construct
SIGSKS

SEQ ID NO: 14880 - protein, 6 aa, Artificial Sequence
  Synthetic construct
QDISNY

SEQ ID NO: 14881 - protein, 6 aa, Artificial Sequence
  Synthetic construct
KLGDKY

SEQ ID NO: 14882 - protein, 9 aa, Artificial Sequence
  Synthetic construct
SGINVGTYR

SEQ ID NO: 14883 - protein, 8 aa, Artificial Sequence
  Synthetic construct
SSNIGSNT

SEQ ID NO: 14884 - protein, 7 aa, Artificial Sequence
  Synthetic construct
QSVSSNY

SEQ ID NO: 14885 - protein, 11 aa, Artificial Sequence
  Synthetic construct
QSLLHNNGYNY

SEQ ID NO: 14886 - protein, 6 aa, Artificial Sequence
  Synthetic construct
ALPKKY

SEQ ID NO: 14887 - protein, 6 aa, Artificial Sequence
  Synthetic construct
QSVSSN

SEQ ID NO: 14888 - protein, 6 aa, Artificial Sequence
  Synthetic construct
DLGDKY

SEQ ID NO: 14889 - protein, 6 aa, Artificial Sequence
  Synthetic construct
SIGSKS

SEQ ID NO: 14890 - protein, 9 aa, Artificial Sequence
  Synthetic construct
SADVGSYDL

SEQ ID NO: 14891 - protein, 6 aa, Artificial Sequence
  Synthetic construct
ALPKKY

SEQ ID NO: 14892 - protein, 6 aa, Artificial Sequence
  Synthetic construct
QGIRND

SEQ ID NO: 14893 - protein, 9 aa, Artificial Sequence
  Synthetic construct
SSDVGGYNY

SEQ ID NO: 14894 - protein, 9 aa, Artificial Sequence
  Synthetic construct
SGINVGTYR

SEQ ID NO: 14895 - protein, 6 aa, Artificial Sequence
  Synthetic construct
QGIRND

SEQ ID NO: 14896 - protein, 9 aa, Artificial Sequence
  Synthetic construct
SSDVGGYKH

SEQ ID NO: 14897 - protein, 9 aa, Artificial Sequence
  Synthetic construct
SSDVGGYNY

SEQ ID NO: 14898 - protein, 11 aa, Artificial Sequence
  Synthetic construct
QSLLHNNGHNY

SEQ ID NO: 14899 - protein, 6 aa, Artificial Sequence
  Synthetic construct
QSVSSY

SEQ ID NO: 14900 - protein, 7 aa, Artificial Sequence
  Synthetic construct
QSVSSSY

SEQ ID NO: 14901 - protein, 6 aa, Artificial Sequence
  Synthetic construct
QDISNY

SEQ ID NO: 14902 - protein, 6 aa, Artificial Sequence
  Synthetic construct
QNIASY

SEQ ID NO: 14903 - protein, 7 aa, Artificial Sequence
  Synthetic construct
QSVSSNY

SEQ ID NO: 14904 - protein, 6 aa, Artificial Sequence
  Synthetic construct
QSISSW

SEQ ID NO: 14905 - protein, 6 aa, Artificial Sequence
  Synthetic construct
ALPRKY

SEQ ID NO: 14906 - protein, 6 aa, Artificial Sequence
  Synthetic construct
NIGSKS

SEQ ID NO: 14907 - protein, 6 aa, Artificial Sequence
  Synthetic construct
QSVSSY

SEQ ID NO: 14908 - protein, 9 aa, Artificial Sequence
  Synthetic construct
NSDVGGYNS

SEQ ID NO: 14909 - protein, 6 aa, Artificial Sequence
  Synthetic construct
QSVSTY

SEQ ID NO: 14910 - protein, 6 aa, Artificial Sequence
  Synthetic construct
SIGSKN

SEQ ID NO: 14911 - protein, 7 aa, Artificial Sequence
  Synthetic construct
QSVSSSS

SEQ ID NO: 14912 - protein, 7 aa, Artificial Sequence
  Synthetic construct
QSVTGSY

SEQ ID NO: 14913 - protein, 3 aa, Artificial Sequence
  Synthetic construct
DAS

SEQ ID NO: 14914 - protein, 3 aa, Artificial Sequence
  Synthetic construct
EDT

SEQ ID NO: 14915 - protein, 3 aa, Artificial Sequence
  Synthetic construct
QDT

SEQ ID NO: 14916 - protein, 3 aa, Artificial Sequence
  Synthetic construct
EVS

SEQ ID NO: 14917 - protein, 3 aa, Artificial Sequence
  Synthetic construct
LGS

SEQ ID NO: 14918 - protein, 3 aa, Artificial Sequence
  Synthetic construct
DAS

SEQ ID NO: 14919 - protein, 3 aa, Artificial Sequence
  Synthetic construct
EDT

SEQ ID NO: 14920 - protein, 3 aa, Artificial Sequence
  Synthetic construct
GKS

SEQ ID NO: 14921 - protein, 3 aa, Artificial Sequence
  Synthetic construct
GAS

SEQ ID NO: 14922 - protein, 3 aa, Artificial Sequence
  Synthetic construct
GAS

SEQ ID NO: 14923 - protein, 3 aa, Artificial Sequence
  Synthetic construct
QDN

SEQ ID NO: 14924 - protein, 3 aa, Artificial Sequence
  Synthetic construct
WAS

SEQ ID NO: 14925 - protein, 3 aa, Artificial Sequence
  Synthetic construct
VGS

SEQ ID NO: 14926 - protein, 3 aa, Artificial Sequence
  Synthetic construct
KAS

SEQ ID NO: 14927 - protein, 3 aa, Artificial Sequence
  Synthetic construct
GAS

SEQ ID NO: 14928 - protein, 3 aa, Artificial Sequence
  Synthetic construct
WAS

SEQ ID NO: 14929 - protein, 3 aa, Artificial Sequence
  Synthetic construct
GAS

SEQ ID NO: 14930 - protein, 3 aa, Artificial Sequence
  Synthetic construct
GTS

SEQ ID NO: 14931 - protein, 3 aa, Artificial Sequence
  Synthetic construct
QDS

SEQ ID NO: 14932 - protein, 3 aa, Artificial Sequence
  Synthetic construct
DAS

SEQ ID NO: 14933 - protein, 3 aa, Artificial Sequence
  Synthetic construct
STN

SEQ ID NO: 14934 - protein, 3 aa, Artificial Sequence
  Synthetic construct
DAS

SEQ ID NO: 14935 - protein, 3 aa, Artificial Sequence
  Synthetic construct
AAS

SEQ ID NO: 14936 - protein, 3 aa, Artificial Sequence
  Synthetic construct
DVS

SEQ ID NO: 14937 - protein, 3 aa, Artificial Sequence
  Synthetic construct
GAS

SEQ ID NO: 14938 - protein, 8 aa, Artificial Sequence
  Synthetic construct
VGTSGIVG

SEQ ID NO: 14939 - protein, 3 aa, Artificial Sequence
  Synthetic construct
DAS

SEQ ID NO: 14940 - protein, 3 aa, Artificial Sequence
  Synthetic construct
DVS

SEQ ID NO: 14941 - protein, 3 aa, Artificial Sequence
  Synthetic construct
DAS

SEQ ID NO: 14942 - protein, 3 aa, Artificial Sequence
  Synthetic construct
DVS

SEQ ID NO: 14943 - protein, 3 aa, Artificial Sequence
  Synthetic construct
ENN

SEQ ID NO: 14944 - protein, 3 aa, Artificial Sequence
  Synthetic construct
DVN

SEQ ID NO: 14945 - protein, 3 aa, Artificial Sequence
  Synthetic construct
WAS

SEQ ID NO: 14946 - protein, 3 aa, Artificial Sequence
  Synthetic construct
WAS

SEQ ID NO: 14947 - protein, 3 aa, Artificial Sequence
  Synthetic construct
DNT

SEQ ID NO: 14948 - protein, 3 aa, Artificial Sequence
  Synthetic construct
WAS

SEQ ID NO: 14949 - protein, 3 aa, Artificial Sequence
  Synthetic construct
AAS

SEQ ID NO: 14950 - protein, 3 aa, Artificial Sequence
  Synthetic construct
DTS

SEQ ID NO: 14951 - protein, 3 aa, Artificial Sequence
  Synthetic construct
EVS

SEQ ID NO: 14952 - protein, 3 aa, Artificial Sequence
  Synthetic construct
GAS

SEQ ID NO: 14953 - protein, 3 aa, Artificial Sequence
  Synthetic construct
QDS

SEQ ID NO: 14954 - protein, 3 aa, Artificial Sequence
  Synthetic construct
EDN

SEQ ID NO: 14955 - protein, 3 aa, Artificial Sequence
  Synthetic construct
WAS

SEQ ID NO: 14956 - protein, 3 aa, Artificial Sequence
  Synthetic construct
DAS

SEQ ID NO: 14957 - protein, 3 aa, Artificial Sequence
  Synthetic construct
DTS

SEQ ID NO: 14958 - protein, 3 aa, Artificial Sequence
  Synthetic construct
AAS

SEQ ID NO: 14959 - protein, 3 aa, Artificial Sequence
  Synthetic construct
GYT

SEQ ID NO: 14960 - protein, 3 aa, Artificial Sequence
  Synthetic construct
GAS

SEQ ID NO: 14961 - protein, 3 aa, Artificial Sequence
  Synthetic construct
ASS

SEQ ID NO: 14962 - protein, 3 aa, Artificial Sequence
  Synthetic construct
DVN

SEQ ID NO: 14963 - protein, 3 aa, Artificial Sequence
  Synthetic construct
DNN

SEQ ID NO: 14964 - protein, 3 aa, Artificial Sequence
  Synthetic construct
DAS

SEQ ID NO: 14965 - protein, 3 aa, Artificial Sequence
  Synthetic construct
DAS

SEQ ID NO: 14966 - protein, 3 aa, Artificial Sequence
  Synthetic construct
QDN

SEQ ID NO: 14967 - protein, 3 aa, Artificial Sequence
  Synthetic construct
KDS

SEQ ID NO: 14968 - protein, 3 aa, Artificial Sequence
  Synthetic construct
AAS

SEQ ID NO: 14969 - protein, 3 aa, Artificial Sequence
  Synthetic construct
END

SEQ ID NO: 14970 - protein, 3 aa, Artificial Sequence
  Synthetic construct
RNN

SEQ ID NO: 14971 - protein, 3 aa, Artificial Sequence
  Synthetic construct
LGS

SEQ ID NO: 14972 - protein, 3 aa, Artificial Sequence
  Synthetic construct
KVS

SEQ ID NO: 14973 - protein, 3 aa, Artificial Sequence
  Synthetic construct
EDN

SEQ ID NO: 14974 - protein, 3 aa, Artificial Sequence
  Synthetic construct
EVN

SEQ ID NO: 14975 - protein, 3 aa, Artificial Sequence
  Synthetic construct
QDN

SEQ ID NO: 14976 - protein, 3 aa, Artificial Sequence
  Synthetic construct
RNK

SEQ ID NO: 14977 - protein, 3 aa, Artificial Sequence
  Synthetic construct
QDT

SEQ ID NO: 14978 - protein, 3 aa, Artificial Sequence
  Synthetic construct
SNN

SEQ ID NO: 14979 - protein, 3 aa, Artificial Sequence
  Synthetic construct
GAS

SEQ ID NO: 14980 - protein, 3 aa, Artificial Sequence
  Synthetic construct
YDS

SEQ ID NO: 14981 - protein, 3 aa, Artificial Sequence
  Synthetic construct
GTS

SEQ ID NO: 14982 - protein, 3 aa, Artificial Sequence
  Synthetic construct
GAS

SEQ ID NO: 14983 - protein, 3 aa, Artificial Sequence
  Synthetic construct
DVT

SEQ ID NO: 14984 - protein, 3 aa, Artificial Sequence
  Synthetic construct
ENS

SEQ ID NO: 14985 - protein, 3 aa, Artificial Sequence
  Synthetic construct
LGS

SEQ ID NO: 14986 - protein, 3 aa, Artificial Sequence
  Synthetic construct
EDS

SEQ ID NO: 14987 - protein, 3 aa, Artificial Sequence
  Synthetic construct
WAS

SEQ ID NO: 14988 - protein, 3 aa, Artificial Sequence
  Synthetic construct
AAS

SEQ ID NO: 14989 - protein, 3 aa, Artificial Sequence
  Synthetic construct
QDT

SEQ ID NO: 14990 - protein, 3 aa, Artificial Sequence
  Synthetic construct
ANI

SEQ ID NO: 14991 - protein, 3 aa, Artificial Sequence
  Synthetic construct
DAS

SEQ ID NO: 14992 - protein, 3 aa, Artificial Sequence
  Synthetic construct
KIS

SEQ ID NO: 14993 - protein, 3 aa, Artificial Sequence
  Synthetic construct
GAS

SEQ ID NO: 14994 - protein, 3 aa, Artificial Sequence
  Synthetic construct
GNS

SEQ ID NO: 14995 - protein, 3 aa, Artificial Sequence
  Synthetic construct
WAS

SEQ ID NO: 14996 - protein, 3 aa, Artificial Sequence
  Synthetic construct
EDI

SEQ ID NO: 14997 - protein, 3 aa, Artificial Sequence
  Synthetic construct
LAS

SEQ ID NO: 14998 - protein, 3 aa, Artificial Sequence
  Synthetic construct
EDS

SEQ ID NO: 14999 - protein, 3 aa, Artificial Sequence
  Synthetic construct
DAS

SEQ ID NO: 15000 - protein, 3 aa, Artificial Sequence
  Synthetic construct
STS

SEQ ID NO: 15001 - protein, 3 aa, Artificial Sequence
  Synthetic construct
GAS

SEQ ID NO: 15002 - protein, 3 aa, Artificial Sequence
  Synthetic construct
STS

SEQ ID NO: 15003 - protein, 3 aa, Artificial Sequence
  Synthetic construct
EDK

SEQ ID NO: 15004 - protein, 3 aa, Artificial Sequence
  Synthetic construct
INN

SEQ ID NO: 15005 - protein, 3 aa, Artificial Sequence
  Synthetic construct
QDN

SEQ ID NO: 15006 - protein, 3 aa, Artificial Sequence
  Synthetic construct
RAS

SEQ ID NO: 15007 - protein, 3 aa, Artificial Sequence
  Synthetic construct
DAS

SEQ ID NO: 15008 - protein, 3 aa, Artificial Sequence
  Synthetic construct
KAS

SEQ ID NO: 15009 - protein, 3 aa, Artificial Sequence
  Synthetic construct
KDS

SEQ ID NO: 15010 - protein, 3 aa, Artificial Sequence
  Synthetic construct
AAS

SEQ ID NO: 15011 - protein, 3 aa, Artificial Sequence
  Synthetic construct
DAS

SEQ ID NO: 15012 - protein, 3 aa, Artificial Sequence
  Synthetic construct
WNN

SEQ ID NO: 15013 - protein, 3 aa, Artificial Sequence
  Synthetic construct
RAS

SEQ ID NO: 15014 - protein, 3 aa, Artificial Sequence
  Synthetic construct
GTF

SEQ ID NO: 15015 - protein, 3 aa, Artificial Sequence
  Synthetic construct
KDS

SEQ ID NO: 15016 - protein, 3 aa, Artificial Sequence
  Synthetic construct
AAS

SEQ ID NO: 15017 - protein, 3 aa, Artificial Sequence
  Synthetic construct
YDR

SEQ ID NO: 15018 - protein, 3 aa, Artificial Sequence
  Synthetic construct
EDT

SEQ ID NO: 15019 - protein, 3 aa, Artificial Sequence
  Synthetic construct
QAS

SEQ ID NO: 15020 - protein, 3 aa, Artificial Sequence
  Synthetic construct
DVS

SEQ ID NO: 15021 - protein, 3 aa, Artificial Sequence
  Synthetic construct
ENN

SEQ ID NO: 15022 - protein, 3 aa, Artificial Sequence
  Synthetic construct
WAS

SEQ ID NO: 15023 - protein, 3 aa, Artificial Sequence
  Synthetic construct
YDS

SEQ ID NO: 15024 - protein, 3 aa, Artificial Sequence
  Synthetic construct
GAS

SEQ ID NO: 15025 - protein, 3 aa, Artificial Sequence
  Synthetic construct
DVS

SEQ ID NO: 15026 - protein, 3 aa, Artificial Sequence
  Synthetic construct
FGS

SEQ ID NO: 15027 - protein, 3 aa, Artificial Sequence
  Synthetic construct
GAS

SEQ ID NO: 15028 - protein, 3 aa, Artificial Sequence
  Synthetic construct
GVS

SEQ ID NO: 15029 - protein, 3 aa, Artificial Sequence
  Synthetic construct
GAS

SEQ ID NO: 15030 - protein, 3 aa, Artificial Sequence
  Synthetic construct
DAS

SEQ ID NO: 15031 - protein, 3 aa, Artificial Sequence
  Synthetic construct
YDS

SEQ ID NO: 15032 - protein, 3 aa, Artificial Sequence
  Synthetic construct
GKN

SEQ ID NO: 15033 - protein, 3 aa, Artificial Sequence
  Synthetic construct
GNS

SEQ ID NO: 15034 - protein, 3 aa, Artificial Sequence
  Synthetic construct
DVS

SEQ ID NO: 15035 - protein, 3 aa, Artificial Sequence
  Synthetic construct
EDN

SEQ ID NO: 15036 - protein, 3 aa, Artificial Sequence
  Synthetic construct
RNT

SEQ ID NO: 15037 - protein, 3 aa, Artificial Sequence
  Synthetic construct
AAS

SEQ ID NO: 15038 - protein, 3 aa, Artificial Sequence
  Synthetic construct
KDS

SEQ ID NO: 15039 - protein, 3 aa, Artificial Sequence
  Synthetic construct
EDN

SEQ ID NO: 15040 - protein, 3 aa, Artificial Sequence
  Synthetic construct
RNN

SEQ ID NO: 15041 - protein, 3 aa, Artificial Sequence
  Synthetic construct
GAS

SEQ ID NO: 15042 - protein, 3 aa, Artificial Sequence
  Synthetic construct
DAS

SEQ ID NO: 15043 - protein, 3 aa, Artificial Sequence
  Synthetic construct
DVN

SEQ ID NO: 15044 - protein, 3 aa, Artificial Sequence
  Synthetic construct
DVN

SEQ ID NO: 15045 - protein, 3 aa, Artificial Sequence
  Synthetic construct
EVN

SEQ ID NO: 15046 - protein, 7 aa, Artificial Sequence
  Synthetic construct
LNSDGSH

SEQ ID NO: 15047 - protein, 3 aa, Artificial Sequence
  Synthetic construct
EAY

SEQ ID NO: 15048 - protein, 3 aa, Artificial Sequence
  Synthetic construct
DVT

SEQ ID NO: 15049 - protein, 3 aa, Artificial Sequence
  Synthetic construct
AAS

SEQ ID NO: 15050 - protein, 3 aa, Artificial Sequence
  Synthetic construct
MLS

SEQ ID NO: 15051 - protein, 3 aa, Artificial Sequence
  Synthetic construct
EVS

SEQ ID NO: 15052 - protein, 3 aa, Artificial Sequence
  Synthetic construct
AAS

SEQ ID NO: 15053 - protein, 3 aa, Artificial Sequence
  Synthetic construct
DNN

SEQ ID NO: 15054 - protein, 3 aa, Artificial Sequence
  Synthetic construct
RNN

SEQ ID NO: 15055 - protein, 3 aa, Artificial Sequence
  Synthetic construct
GNN

SEQ ID NO: 15056 - protein, 3 aa, Artificial Sequence
  Synthetic construct
EGS

SEQ ID NO: 15057 - protein, 3 aa, Artificial Sequence
  Synthetic construct
AAS

SEQ ID NO: 15058 - protein, 3 aa, Artificial Sequence
  Synthetic construct
GTF

SEQ ID NO: 15059 - protein, 3 aa, Artificial Sequence
  Synthetic construct
EVT

SEQ ID NO: 15060 - protein, 3 aa, Artificial Sequence
  Synthetic construct
AAS

SEQ ID NO: 15061 - protein, 3 aa, Artificial Sequence
  Synthetic construct
GAS

SEQ ID NO: 15062 - protein, 3 aa, Artificial Sequence
  Synthetic construct
DAS

SEQ ID NO: 15063 - protein, 3 aa, Artificial Sequence
  Synthetic construct
DAS

SEQ ID NO: 15064 - protein, 3 aa, Artificial Sequence
  Synthetic construct
EDY

SEQ ID NO: 15065 - protein, 3 aa, Artificial Sequence
  Synthetic construct
KAS

SEQ ID NO: 15066 - protein, 3 aa, Artificial Sequence
  Synthetic construct
GAS

SEQ ID NO: 15067 - protein, 3 aa, Artificial Sequence
  Synthetic construct
EDS

SEQ ID NO: 15068 - protein, 3 aa, Artificial Sequence
  Synthetic construct
LGS

SEQ ID NO: 15069 - protein, 3 aa, Artificial Sequence
  Synthetic construct
WAS

SEQ ID NO: 15070 - protein, 3 aa, Artificial Sequence
  Synthetic construct
GAS

SEQ ID NO: 15071 - protein, 3 aa, Artificial Sequence
  Synthetic construct
KVS

SEQ ID NO: 15072 - protein, 3 aa, Artificial Sequence
  Synthetic construct
QDS

SEQ ID NO: 15073 - protein, 7 aa, Artificial Sequence
  Synthetic construct
LNSGGGH

SEQ ID NO: 15074 - protein, 3 aa, Artificial Sequence
  Synthetic construct
DAS

SEQ ID NO: 15075 - protein, 3 aa, Artificial Sequence
  Synthetic construct
RSN

SEQ ID NO: 15076 - protein, 3 aa, Artificial Sequence
  Synthetic construct
GAS

SEQ ID NO: 15077 - protein, 3 aa, Artificial Sequence
  Synthetic construct
KAS

SEQ ID NO: 15078 - protein, 3 aa, Artificial Sequence
  Synthetic construct
DAS

SEQ ID NO: 15079 - protein, 3 aa, Artificial Sequence
  Synthetic construct
DTN

SEQ ID NO: 15080 - protein, 3 aa, Artificial Sequence
  Synthetic construct
AAS

SEQ ID NO: 15081 - protein, 3 aa, Artificial Sequence
  Synthetic construct
EDN

SEQ ID NO: 15082 - protein, 3 aa, Artificial Sequence
  Synthetic construct
EDS

SEQ ID NO: 15083 - protein, 3 aa, Artificial Sequence
  Synthetic construct
GAS

SEQ ID NO: 15084 - protein, 3 aa, Artificial Sequence
  Synthetic construct
GNS

SEQ ID NO: 15085 - protein, 3 aa, Artificial Sequence
  Synthetic construct
DVS

SEQ ID NO: 15086 - protein, 3 aa, Artificial Sequence
  Synthetic construct
LGS

SEQ ID NO: 15087 - protein, 3 aa, Artificial Sequence
  Synthetic construct
GGS

SEQ ID NO: 15088 - protein, 3 aa, Artificial Sequence
  Synthetic construct
AAS

SEQ ID NO: 15089 - protein, 8 aa, Artificial Sequence
  Synthetic construct
VGTSGIVG

SEQ ID NO: 15090 - protein, 3 aa, Artificial Sequence
  Synthetic construct
GNT

SEQ ID NO: 15091 - protein, 3 aa, Artificial Sequence
  Synthetic construct
GAS

SEQ ID NO: 15092 - protein, 3 aa, Artificial Sequence
  Synthetic construct
GNT

SEQ ID NO: 15093 - protein, 3 aa, Artificial Sequence
  Synthetic construct
QDT

SEQ ID NO: 15094 - protein, 3 aa, Artificial Sequence
  Synthetic construct
DTS

SEQ ID NO: 15095 - protein, 3 aa, Artificial Sequence
  Synthetic construct
GIN

SEQ ID NO: 15096 - protein, 3 aa, Artificial Sequence
  Synthetic construct
YDT

SEQ ID NO: 15097 - protein, 3 aa, Artificial Sequence
  Synthetic construct
KDS

SEQ ID NO: 15098 - protein, 3 aa, Artificial Sequence
  Synthetic construct
AAS

SEQ ID NO: 15099 - protein, 3 aa, Artificial Sequence
  Synthetic construct
EGS

SEQ ID NO: 15100 - protein, 3 aa, Artificial Sequence
  Synthetic construct
DVS

SEQ ID NO: 15101 - protein, 3 aa, Artificial Sequence
  Synthetic construct
DVS

SEQ ID NO: 15102 - protein, 3 aa, Artificial Sequence
  Synthetic construct
KAS

SEQ ID NO: 15103 - protein, 3 aa, Artificial Sequence
  Synthetic construct
DAS

SEQ ID NO: 15104 - protein, 3 aa, Artificial Sequence
  Synthetic construct
EDS

SEQ ID NO: 15105 - protein, 3 aa, Artificial Sequence
  Synthetic construct
STN

SEQ ID NO: 15106 - protein, 3 aa, Artificial Sequence
  Synthetic construct
GAS

SEQ ID NO: 15107 - protein, 8 aa, Artificial Sequence
  Synthetic construct
VGTGGIVG

SEQ ID NO: 15108 - protein, 3 aa, Artificial Sequence
  Synthetic construct
EDS

SEQ ID NO: 15109 - protein, 3 aa, Artificial Sequence
  Synthetic construct
AAS

SEQ ID NO: 15110 - protein, 3 aa, Artificial Sequence
  Synthetic construct
KDS

SEQ ID NO: 15111 - protein, 3 aa, Artificial Sequence
  Synthetic construct
ENN

SEQ ID NO: 15112 - protein, 3 aa, Artificial Sequence
  Synthetic construct
NNI

SEQ ID NO: 15113 - protein, 3 aa, Artificial Sequence
  Synthetic construct
EDS

SEQ ID NO: 15114 - protein, 3 aa, Artificial Sequence
  Synthetic construct
LGS

SEQ ID NO: 15115 - protein, 3 aa, Artificial Sequence
  Synthetic construct
YDD

SEQ ID NO: 15116 - protein, 3 aa, Artificial Sequence
  Synthetic construct
GAS

SEQ ID NO: 15117 - protein, 3 aa, Artificial Sequence
  Synthetic construct
DAS

SEQ ID NO: 15118 - protein, 3 aa, Artificial Sequence
  Synthetic construct
KAS

SEQ ID NO: 15119 - protein, 3 aa, Artificial Sequence
  Synthetic construct
WAS

SEQ ID NO: 15120 - protein, 3 aa, Artificial Sequence
  Synthetic construct
AAS

SEQ ID NO: 15121 - protein, 3 aa, Artificial Sequence
  Synthetic construct
KVS

SEQ ID NO: 15122 - protein, 3 aa, Artificial Sequence
  Synthetic construct
GAS

SEQ ID NO: 15123 - protein, 3 aa, Artificial Sequence
  Synthetic construct
GAS

SEQ ID NO: 15124 - protein, 3 aa, Artificial Sequence
  Synthetic construct
EDN

SEQ ID NO: 15125 - protein, 3 aa, Artificial Sequence
  Synthetic construct
WAS

SEQ ID NO: 15126 - protein, 3 aa, Artificial Sequence
  Synthetic construct
EDN

SEQ ID NO: 15127 - protein, 3 aa, Artificial Sequence
  Synthetic construct
GNN

SEQ ID NO: 15128 - protein, 3 aa, Artificial Sequence
  Synthetic construct
YDS

SEQ ID NO: 15129 - protein, 3 aa, Artificial Sequence
  Synthetic construct
DAS

SEQ ID NO: 15130 - protein, 3 aa, Artificial Sequence
  Synthetic construct
AAS

SEQ ID NO: 15131 - protein, 3 aa, Artificial Sequence
  Synthetic construct
DVN

SEQ ID NO: 15132 - protein, 3 aa, Artificial Sequence
  Synthetic construct
ADS

SEQ ID NO: 15133 - protein, 3 aa, Artificial Sequence
  Synthetic construct
EAN

SEQ ID NO: 15134 - protein, 3 aa, Artificial Sequence
  Synthetic construct
WAS

SEQ ID NO: 15135 - protein, 3 aa, Artificial Sequence
  Synthetic construct
EVS

SEQ ID NO: 15136 - protein, 3 aa, Artificial Sequence
  Synthetic construct
LGS

SEQ ID NO: 15137 - protein, 3 aa, Artificial Sequence
  Synthetic construct
AAS

SEQ ID NO: 15138 - protein, 3 aa, Artificial Sequence
  Synthetic construct
KAS

SEQ ID NO: 15139 - protein, 3 aa, Artificial Sequence
  Synthetic construct
AAS

SEQ ID NO: 15140 - protein, 3 aa, Artificial Sequence
  Synthetic construct
GAS

SEQ ID NO: 15141 - protein, 3 aa, Artificial Sequence
  Synthetic construct
EDT

SEQ ID NO: 15142 - protein, 3 aa, Artificial Sequence
  Synthetic construct
AAS

SEQ ID NO: 15143 - protein, 3 aa, Artificial Sequence
  Synthetic construct
DVR

SEQ ID NO: 15144 - protein, 3 aa, Artificial Sequence
  Synthetic construct
DVS

SEQ ID NO: 15145 - protein, 3 aa, Artificial Sequence
  Synthetic construct
AAS

SEQ ID NO: 15146 - protein, 3 aa, Artificial Sequence
  Synthetic construct
DVS

SEQ ID NO: 15147 - protein, 3 aa, Artificial Sequence
  Synthetic construct
DAF

SEQ ID NO: 15148 - protein, 3 aa, Artificial Sequence
  Synthetic construct
GAS

SEQ ID NO: 15149 - protein, 3 aa, Artificial Sequence
  Synthetic construct
GAS

SEQ ID NO: 15150 - protein, 3 aa, Artificial Sequence
  Synthetic construct
KDS

SEQ ID NO: 15151 - protein, 3 aa, Artificial Sequence
  Synthetic construct
AAS

SEQ ID NO: 15152 - protein, 3 aa, Artificial Sequence
  Synthetic construct
RNN

SEQ ID NO: 15153 - protein, 3 aa, Artificial Sequence
  Synthetic construct
YDS

SEQ ID NO: 15154 - protein, 3 aa, Artificial Sequence
  Synthetic construct
VNS

SEQ ID NO: 15155 - protein, 3 aa, Artificial Sequence
  Synthetic construct
DAS

SEQ ID NO: 15156 - protein, 3 aa, Artificial Sequence
  Synthetic construct
DAS

SEQ ID NO: 15157 - protein, 3 aa, Artificial Sequence
  Synthetic construct
KIS

SEQ ID NO: 15158 - protein, 3 aa, Artificial Sequence
  Synthetic construct
GAS

SEQ ID NO: 15159 - protein, 3 aa, Artificial Sequence
  Synthetic construct
EVS

SEQ ID NO: 15160 - protein, 3 aa, Artificial Sequence
  Synthetic construct
LGS

SEQ ID NO: 15161 - protein, 3 aa, Artificial Sequence
  Synthetic construct
AAS

SEQ ID NO: 15162 - protein, 3 aa, Artificial Sequence
  Synthetic construct
DAS

SEQ ID NO: 15163 - protein, 3 aa, Artificial Sequence
  Synthetic construct
AAS

SEQ ID NO: 15164 - protein, 3 aa, Artificial Sequence
  Synthetic construct
STN

SEQ ID NO: 15165 - protein, 3 aa, Artificial Sequence
  Synthetic construct
YNS

SEQ ID NO: 15166 - protein, 3 aa, Artificial Sequence
  Synthetic construct
AAS

SEQ ID NO: 15167 - protein, 3 aa, Artificial Sequence
  Synthetic construct
GAS

SEQ ID NO: 15168 - protein, 3 aa, Artificial Sequence
  Synthetic construct
DVT

SEQ ID NO: 15169 - protein, 3 aa, Artificial Sequence
  Synthetic construct
KDT

SEQ ID NO: 15170 - protein, 3 aa, Artificial Sequence
  Synthetic construct
EVT

SEQ ID NO: 15171 - protein, 3 aa, Artificial Sequence
  Synthetic construct
GAS

SEQ ID NO: 15172 - protein, 3 aa, Artificial Sequence
  Synthetic construct
EDN

SEQ ID NO: 15173 - protein, 3 aa, Artificial Sequence
  Synthetic construct
DAS

SEQ ID NO: 15174 - protein, 3 aa, Artificial Sequence
  Synthetic construct
DVS

SEQ ID NO: 15175 - protein, 3 aa, Artificial Sequence
  Synthetic construct
GAS

SEQ ID NO: 15176 - protein, 3 aa, Artificial Sequence
  Synthetic construct
GAS

SEQ ID NO: 15177 - protein, 3 aa, Artificial Sequence
  Synthetic construct
AAS

SEQ ID NO: 15178 - protein, 3 aa, Artificial Sequence
  Synthetic construct
EDN

SEQ ID NO: 15179 - protein, 3 aa, Artificial Sequence
  Synthetic construct
GKN

SEQ ID NO: 15180 - protein, 3 aa, Artificial Sequence
  Synthetic construct
AAS

SEQ ID NO: 15181 - protein, 3 aa, Artificial Sequence
  Synthetic construct
EGS

SEQ ID NO: 15182 - protein, 3 aa, Artificial Sequence
  Synthetic construct
GAS

SEQ ID NO: 15183 - protein, 3 aa, Artificial Sequence
  Synthetic construct
KIS

SEQ ID NO: 15184 - protein, 3 aa, Artificial Sequence
  Synthetic construct
EVS

SEQ ID NO: 15185 - protein, 3 aa, Artificial Sequence
  Synthetic construct
EVS

SEQ ID NO: 15186 - protein, 3 aa, Artificial Sequence
  Synthetic construct
GAS

SEQ ID NO: 15187 - protein, 3 aa, Artificial Sequence
  Synthetic construct
GAS

SEQ ID NO: 15188 - protein, 3 aa, Artificial Sequence
  Synthetic construct
DVS

SEQ ID NO: 15189 - protein, 3 aa, Artificial Sequence
  Synthetic construct
GAS

SEQ ID NO: 15190 - protein, 3 aa, Artificial Sequence
  Synthetic construct
GAS

SEQ ID NO: 15191 - protein, 3 aa, Artificial Sequence
  Synthetic construct
LGS

SEQ ID NO: 15192 - protein, 3 aa, Artificial Sequence
  Synthetic construct
EGS

SEQ ID NO: 15193 - protein, 3 aa, Artificial Sequence
  Synthetic construct
GAS

SEQ ID NO: 15194 - protein, 3 aa, Artificial Sequence
  Synthetic construct
WAS

SEQ ID NO: 15195 - protein, 3 aa, Artificial Sequence
  Synthetic construct
EDS

SEQ ID NO: 15196 - protein, 3 aa, Artificial Sequence
  Synthetic construct
DAS

SEQ ID NO: 15197 - protein, 3 aa, Artificial Sequence
  Synthetic construct
AAS

SEQ ID NO: 15198 - protein, 3 aa, Artificial Sequence
  Synthetic construct
LGS

SEQ ID NO: 15199 - protein, 3 aa, Artificial Sequence
  Synthetic construct
GAS

SEQ ID NO: 15200 - protein, 3 aa, Artificial Sequence
  Synthetic construct
GAS

SEQ ID NO: 15201 - protein, 3 aa, Artificial Sequence
  Synthetic construct
AAS

SEQ ID NO: 15202 - protein, 3 aa, Artificial Sequence
  Synthetic construct
EDR

SEQ ID NO: 15203 - protein, 3 aa, Artificial Sequence
  Synthetic construct
WAS

SEQ ID NO: 15204 - protein, 3 aa, Artificial Sequence
  Synthetic construct
DVN

SEQ ID NO: 15205 - protein, 3 aa, Artificial Sequence
  Synthetic construct
DAS

SEQ ID NO: 15206 - protein, 3 aa, Artificial Sequence
  Synthetic construct
GAS

SEQ ID NO: 15207 - protein, 3 aa, Artificial Sequence
  Synthetic construct
GNS

SEQ ID NO: 15208 - protein, 3 aa, Artificial Sequence
  Synthetic construct
LGS

SEQ ID NO: 15209 - protein, 3 aa, Artificial Sequence
  Synthetic construct
DAS

SEQ ID NO: 15210 - protein, 3 aa, Artificial Sequence
  Synthetic construct
EGS

SEQ ID NO: 15211 - protein, 3 aa, Artificial Sequence
  Synthetic construct
GAS

SEQ ID NO: 15212 - protein, 3 aa, Artificial Sequence
  Synthetic construct
DAS

SEQ ID NO: 15213 - protein, 3 aa, Artificial Sequence
  Synthetic construct
WAS

SEQ ID NO: 15214 - protein, 3 aa, Artificial Sequence
  Synthetic construct
QDS

SEQ ID NO: 15215 - protein, 3 aa, Artificial Sequence
  Synthetic construct
EGD

SEQ ID NO: 15216 - protein, 3 aa, Artificial Sequence
  Synthetic construct
EAS

SEQ ID NO: 15217 - protein, 3 aa, Artificial Sequence
  Synthetic construct
EAS

SEQ ID NO: 15218 - protein, 3 aa, Artificial Sequence
  Synthetic construct
GVS

SEQ ID NO: 15219 - protein, 3 aa, Artificial Sequence
  Synthetic construct
QDN

SEQ ID NO: 15220 - protein, 3 aa, Artificial Sequence
  Synthetic construct
KIS

SEQ ID NO: 15221 - protein, 3 aa, Artificial Sequence
  Synthetic construct
ENN

SEQ ID NO: 15222 - protein, 3 aa, Artificial Sequence
  Synthetic construct
DAS

SEQ ID NO: 15223 - protein, 3 aa, Artificial Sequence
  Synthetic construct
HDD

SEQ ID NO: 15224 - protein, 3 aa, Artificial Sequence
  Synthetic construct
LGS

SEQ ID NO: 15225 - protein, 3 aa, Artificial Sequence
  Synthetic construct
DVS

SEQ ID NO: 15226 - protein, 3 aa, Artificial Sequence
  Synthetic construct
DVT

SEQ ID NO: 15227 - protein, 3 aa, Artificial Sequence
  Synthetic construct
DVS

SEQ ID NO: 15228 - protein, 3 aa, Artificial Sequence
  Synthetic construct
DAS

SEQ ID NO: 15229 - protein, 3 aa, Artificial Sequence
  Synthetic construct
DKN

SEQ ID NO: 15230 - protein, 3 aa, Artificial Sequence
  Synthetic construct
DAS

SEQ ID NO: 15231 - protein, 3 aa, Artificial Sequence
  Synthetic construct
DVN

SEQ ID NO: 15232 - protein, 3 aa, Artificial Sequence
  Synthetic construct
WAS

SEQ ID NO: 15233 - protein, 3 aa, Artificial Sequence
  Synthetic construct
EDS

SEQ ID NO: 15234 - protein, 3 aa, Artificial Sequence
  Synthetic construct
GNS

SEQ ID NO: 15235 - protein, 3 aa, Artificial Sequence
  Synthetic construct
RDS

SEQ ID NO: 15236 - protein, 3 aa, Artificial Sequence
  Synthetic construct
GAS

SEQ ID NO: 15237 - protein, 3 aa, Artificial Sequence
  Synthetic construct
ANN

SEQ ID NO: 15238 - protein, 3 aa, Artificial Sequence
  Synthetic construct
ENN

SEQ ID NO: 15239 - protein, 3 aa, Artificial Sequence
  Synthetic construct
LGS

SEQ ID NO: 15240 - protein, 3 aa, Artificial Sequence
  Synthetic construct
EGS

SEQ ID NO: 15241 - protein, 3 aa, Artificial Sequence
  Synthetic construct
WAS

SEQ ID NO: 15242 - protein, 3 aa, Artificial Sequence
  Synthetic construct
EVT

SEQ ID NO: 15243 - protein, 3 aa, Artificial Sequence
  Synthetic construct
TNN

SEQ ID NO: 15244 - protein, 3 aa, Artificial Sequence
  Synthetic construct
VNT

SEQ ID NO: 15245 - protein, 3 aa, Artificial Sequence
  Synthetic construct
EDS

SEQ ID NO: 15246 - protein, 3 aa, Artificial Sequence
  Synthetic construct
KAS

SEQ ID NO: 15247 - protein, 3 aa, Artificial Sequence
  Synthetic construct
GNS

SEQ ID NO: 15248 - protein, 3 aa, Artificial Sequence
  Synthetic construct
EVT

SEQ ID NO: 15249 - protein, 3 aa, Artificial Sequence
  Synthetic construct
DAS

SEQ ID NO: 15250 - protein, 3 aa, Artificial Sequence
  Synthetic construct
DVS

SEQ ID NO: 15251 - protein, 3 aa, Artificial Sequence
  Synthetic construct
DVS

SEQ ID NO: 15252 - protein, 3 aa, Artificial Sequence
  Synthetic construct
GAS

SEQ ID NO: 15253 - protein, 3 aa, Artificial Sequence
  Synthetic construct
SNN

SEQ ID NO: 15254 - protein, 3 aa, Artificial Sequence
  Synthetic construct
DVS

SEQ ID NO: 15255 - protein, 3 aa, Artificial Sequence
  Synthetic construct
DVK

SEQ ID NO: 15256 - protein, 3 aa, Artificial Sequence
  Synthetic construct
QDT

SEQ ID NO: 15257 - protein, 3 aa, Artificial Sequence
  Synthetic construct
GAS

SEQ ID NO: 15258 - protein, 3 aa, Artificial Sequence
  Synthetic construct
DVS

SEQ ID NO: 15259 - protein, 3 aa, Artificial Sequence
  Synthetic construct
QAT

SEQ ID NO: 15260 - protein, 3 aa, Artificial Sequence
  Synthetic construct
AAS

SEQ ID NO: 15261 - protein, 3 aa, Artificial Sequence
  Synthetic construct
GAS

SEQ ID NO: 15262 - protein, 3 aa, Artificial Sequence
  Synthetic construct
DVT

SEQ ID NO: 15263 - protein, 3 aa, Artificial Sequence
  Synthetic construct
DAS

SEQ ID NO: 15264 - protein, 3 aa, Artificial Sequence
  Synthetic construct
AKT

SEQ ID NO: 15265 - protein, 3 aa, Artificial Sequence
  Synthetic construct
AAS

SEQ ID NO: 15266 - protein, 3 aa, Artificial Sequence
  Synthetic construct
ASS

SEQ ID NO: 15267 - protein, 3 aa, Artificial Sequence
  Synthetic construct
DAS

SEQ ID NO: 15268 - protein, 3 aa, Artificial Sequence
  Synthetic construct
SNN

SEQ ID NO: 15269 - protein, 3 aa, Artificial Sequence
  Synthetic construct
EVF

SEQ ID NO: 15270 - protein, 3 aa, Artificial Sequence
  Synthetic construct
SNN

SEQ ID NO: 15271 - protein, 3 aa, Artificial Sequence
  Synthetic construct
EDT

SEQ ID NO: 15272 - protein, 3 aa, Artificial Sequence
  Synthetic construct
AAS

SEQ ID NO: 15273 - protein, 3 aa, Artificial Sequence
  Synthetic construct
DTS

SEQ ID NO: 15274 - protein, 3 aa, Artificial Sequence
  Synthetic construct
GAS

SEQ ID NO: 15275 - protein, 3 aa, Artificial Sequence
  Synthetic construct
GAS

SEQ ID NO: 15276 - protein, 3 aa, Artificial Sequence
  Synthetic construct
GAS

SEQ ID NO: 15277 - protein, 3 aa, Artificial Sequence
  Synthetic construct
DNN

SEQ ID NO: 15278 - protein, 3 aa, Artificial Sequence
  Synthetic construct
AAS

SEQ ID NO: 15279 - protein, 3 aa, Artificial Sequence
  Synthetic construct
RNN

SEQ ID NO: 15280 - protein, 3 aa, Artificial Sequence
  Synthetic construct
GAS

SEQ ID NO: 15281 - protein, 3 aa, Artificial Sequence
  Synthetic construct
YDG

SEQ ID NO: 15282 - protein, 3 aa, Artificial Sequence
  Synthetic construct
WAS

SEQ ID NO: 15283 - protein, 3 aa, Artificial Sequence
  Synthetic construct
DVS

SEQ ID NO: 15284 - protein, 3 aa, Artificial Sequence
  Synthetic construct
DVS

SEQ ID NO: 15285 - protein, 3 aa, Artificial Sequence
  Synthetic construct
EDS

SEQ ID NO: 15286 - protein, 3 aa, Artificial Sequence
  Synthetic construct
QDD

SEQ ID NO: 15287 - protein, 3 aa, Artificial Sequence
  Synthetic construct
FDT

SEQ ID NO: 15288 - protein, 3 aa, Artificial Sequence
  Synthetic construct
KDN

SEQ ID NO: 15289 - protein, 3 aa, Artificial Sequence
  Synthetic construct
NDS

SEQ ID NO: 15290 - protein, 3 aa, Artificial Sequence
  Synthetic construct
TVS

SEQ ID NO: 15291 - protein, 3 aa, Artificial Sequence
  Synthetic construct
QDN

SEQ ID NO: 15292 - protein, 3 aa, Artificial Sequence
  Synthetic construct
KAS

SEQ ID NO: 15293 - protein, 3 aa, Artificial Sequence
  Synthetic construct
KDS

SEQ ID NO: 15294 - protein, 3 aa, Artificial Sequence
  Synthetic construct
DAS

SEQ ID NO: 15295 - protein, 3 aa, Artificial Sequence
  Synthetic construct
WAS

SEQ ID NO: 15296 - protein, 3 aa, Artificial Sequence
  Synthetic construct
EDS

SEQ ID NO: 15297 - protein, 3 aa, Artificial Sequence
  Synthetic construct
KAS

SEQ ID NO: 15298 - protein, 3 aa, Artificial Sequence
  Synthetic construct
EDN

SEQ ID NO: 15299 - protein, 3 aa, Artificial Sequence
  Synthetic construct
GGS

SEQ ID NO: 15300 - protein, 3 aa, Artificial Sequence
  Synthetic construct
EDS

SEQ ID NO: 15301 - protein, 3 aa, Artificial Sequence
  Synthetic construct
KIS

SEQ ID NO: 15302 - protein, 3 aa, Artificial Sequence
  Synthetic construct
TAS

SEQ ID NO: 15303 - protein, 3 aa, Artificial Sequence
  Synthetic construct
ENN

SEQ ID NO: 15304 - protein, 3 aa, Artificial Sequence
  Synthetic construct
DAS

SEQ ID NO: 15305 - protein, 3 aa, Artificial Sequence
  Synthetic construct
DVS

SEQ ID NO: 15306 - protein, 3 aa, Artificial Sequence
  Synthetic construct
EIS

SEQ ID NO: 15307 - protein, 3 aa, Artificial Sequence
  Synthetic construct
AAS

SEQ ID NO: 15308 - protein, 3 aa, Artificial Sequence
  Synthetic construct
ELS

SEQ ID NO: 15309 - protein, 3 aa, Artificial Sequence
  Synthetic construct
GAT

SEQ ID NO: 15310 - protein, 3 aa, Artificial Sequence
  Synthetic construct
DAS

SEQ ID NO: 15311 - protein, 3 aa, Artificial Sequence
  Synthetic construct
KAS

SEQ ID NO: 15312 - protein, 3 aa, Artificial Sequence
  Synthetic construct
AAS

SEQ ID NO: 15313 - protein, 3 aa, Artificial Sequence
  Synthetic construct
KAS

SEQ ID NO: 15314 - protein, 3 aa, Artificial Sequence
  Synthetic construct
AAS

SEQ ID NO: 15315 - protein, 3 aa, Artificial Sequence
  Synthetic construct
AAS

SEQ ID NO: 15316 - protein, 3 aa, Artificial Sequence
  Synthetic construct
DGS

SEQ ID NO: 15317 - protein, 3 aa, Artificial Sequence
  Synthetic construct
DAS

SEQ ID NO: 15318 - protein, 3 aa, Artificial Sequence
  Synthetic construct
INN

SEQ ID NO: 15319 - protein, 3 aa, Artificial Sequence
  Synthetic construct
DAS

SEQ ID NO: 15320 - protein, 3 aa, Artificial Sequence
  Synthetic construct
RSS

SEQ ID NO: 15321 - protein, 3 aa, Artificial Sequence
  Synthetic construct
GAS

SEQ ID NO: 15322 - protein, 3 aa, Artificial Sequence
  Synthetic construct
DND

SEQ ID NO: 15323 - protein, 3 aa, Artificial Sequence
  Synthetic construct
DAS

SEQ ID NO: 15324 - protein, 3 aa, Artificial Sequence
  Synthetic construct
GAS

SEQ ID NO: 15325 - protein, 3 aa, Artificial Sequence
  Synthetic construct
DAS

SEQ ID NO: 15326 - protein, 3 aa, Artificial Sequence
  Synthetic construct
AAS

SEQ ID NO: 15327 - protein, 3 aa, Artificial Sequence
  Synthetic construct
GNS

SEQ ID NO: 15328 - protein, 3 aa, Artificial Sequence
  Synthetic construct
DAS

SEQ ID NO: 15329 - protein, 3 aa, Artificial Sequence
  Synthetic construct
QDH

SEQ ID NO: 15330 - protein, 3 aa, Artificial Sequence
  Synthetic construct
AAS

SEQ ID NO: 15331 - protein, 3 aa, Artificial Sequence
  Synthetic construct
SAS

SEQ ID NO: 15332 - protein, 3 aa, Artificial Sequence
  Synthetic construct
DVN

SEQ ID NO: 15333 - protein, 3 aa, Artificial Sequence
  Synthetic construct
KAS

SEQ ID NO: 15334 - protein, 3 aa, Artificial Sequence
  Synthetic construct
EDS

SEQ ID NO: 15335 - protein, 3 aa, Artificial Sequence
  Synthetic construct
KAS

SEQ ID NO: 15336 - protein, 3 aa, Artificial Sequence
  Synthetic construct
AAS

SEQ ID NO: 15337 - protein, 3 aa, Artificial Sequence
  Synthetic construct
DAS

SEQ ID NO: 15338 - protein, 3 aa, Artificial Sequence
  Synthetic construct
AAS

SEQ ID NO: 15339 - protein, 3 aa, Artificial Sequence
  Synthetic construct
EAS

SEQ ID NO: 15340 - protein, 3 aa, Artificial Sequence
  Synthetic construct
GAS

SEQ ID NO: 15341 - protein, 3 aa, Artificial Sequence
  Synthetic construct
DAS

SEQ ID NO: 15342 - protein, 3 aa, Artificial Sequence
  Synthetic construct
DVT

SEQ ID NO: 15343 - protein, 3 aa, Artificial Sequence
  Synthetic construct
DAS

SEQ ID NO: 15344 - protein, 3 aa, Artificial Sequence
  Synthetic construct
WAS

SEQ ID NO: 15345 - protein, 3 aa, Artificial Sequence
  Synthetic construct
DVS

SEQ ID NO: 15346 - protein, 3 aa, Artificial Sequence
  Synthetic construct
GAS

SEQ ID NO: 15347 - protein, 3 aa, Artificial Sequence
  Synthetic construct
AAS

SEQ ID NO: 15348 - protein, 3 aa, Artificial Sequence
  Synthetic construct
DTS

SEQ ID NO: 15349 - protein, 3 aa, Artificial Sequence
  Synthetic construct
GNT

SEQ ID NO: 15350 - protein, 3 aa, Artificial Sequence
  Synthetic construct
DVN

SEQ ID NO: 15351 - protein, 3 aa, Artificial Sequence
  Synthetic construct
DNN

SEQ ID NO: 15352 - protein, 3 aa, Artificial Sequence
  Synthetic construct
WAS

SEQ ID NO: 15353 - protein, 3 aa, Artificial Sequence
  Synthetic construct
GAS

SEQ ID NO: 15354 - protein, 3 aa, Artificial Sequence
  Synthetic construct
DAS

SEQ ID NO: 15355 - protein, 3 aa, Artificial Sequence
  Synthetic construct
WAS

SEQ ID NO: 15356 - protein, 3 aa, Artificial Sequence
  Synthetic construct
EDS

SEQ ID NO: 15357 - protein, 3 aa, Artificial Sequence
  Synthetic construct
LGS

SEQ ID NO: 15358 - protein, 3 aa, Artificial Sequence
  Synthetic construct
AAS

SEQ ID NO: 15359 - protein, 3 aa, Artificial Sequence
  Synthetic construct
GNS

SEQ ID NO: 15360 - protein, 3 aa, Artificial Sequence
  Synthetic construct
KVS

SEQ ID NO: 15361 - protein, 3 aa, Artificial Sequence
  Synthetic construct
GNS

SEQ ID NO: 15362 - protein, 3 aa, Artificial Sequence
  Synthetic construct
AAS

SEQ ID NO: 15363 - protein, 3 aa, Artificial Sequence
  Synthetic construct
GAS

SEQ ID NO: 15364 - protein, 3 aa, Artificial Sequence
  Synthetic construct
AAS

SEQ ID NO: 15365 - protein, 3 aa, Artificial Sequence
  Synthetic construct
GAS

SEQ ID NO: 15366 - protein, 3 aa, Artificial Sequence
  Synthetic construct
AAS

SEQ ID NO: 15367 - protein, 3 aa, Artificial Sequence
  Synthetic construct
DVS

SEQ ID NO: 15368 - protein, 3 aa, Artificial Sequence
  Synthetic construct
DVN

SEQ ID NO: 15369 - protein, 3 aa, Artificial Sequence
  Synthetic construct
STN

SEQ ID NO: 15370 - protein, 3 aa, Artificial Sequence
  Synthetic construct
AAS

SEQ ID NO: 15371 - protein, 3 aa, Artificial Sequence
  Synthetic construct
GAS

SEQ ID NO: 15372 - protein, 3 aa, Artificial Sequence
  Synthetic construct
GAS

SEQ ID NO: 15373 - protein, 3 aa, Artificial Sequence
  Synthetic construct
DAT

SEQ ID NO: 15374 - protein, 3 aa, Artificial Sequence
  Synthetic construct
WAS

SEQ ID NO: 15375 - protein, 3 aa, Artificial Sequence
  Synthetic construct
GAS

SEQ ID NO: 15376 - protein, 3 aa, Artificial Sequence
  Synthetic construct
AAS

SEQ ID NO: 15377 - protein, 3 aa, Artificial Sequence
  Synthetic construct
EGS

SEQ ID NO: 15378 - protein, 3 aa, Artificial Sequence
  Synthetic construct
DNN

SEQ ID NO: 15379 - protein, 3 aa, Artificial Sequence
  Synthetic construct
DAS

SEQ ID NO: 15380 - protein, 3 aa, Artificial Sequence
  Synthetic construct
KAS

SEQ ID NO: 15381 - protein, 3 aa, Artificial Sequence
  Synthetic construct
GAS

SEQ ID NO: 15382 - protein, 3 aa, Artificial Sequence
  Synthetic construct
KIS

SEQ ID NO: 15383 - protein, 3 aa, Artificial Sequence
  Synthetic construct
KDS

SEQ ID NO: 15384 - protein, 3 aa, Artificial Sequence
  Synthetic construct
EGS

SEQ ID NO: 15385 - protein, 3 aa, Artificial Sequence
  Synthetic construct
DVS

SEQ ID NO: 15386 - protein, 3 aa, Artificial Sequence
  Synthetic construct
GAS

SEQ ID NO: 15387 - protein, 3 aa, Artificial Sequence
  Synthetic construct
SDN

SEQ ID NO: 15388 - protein, 3 aa, Artificial Sequence
  Synthetic construct
ATS

SEQ ID NO: 15389 - protein, 3 aa, Artificial Sequence
  Synthetic construct
EDS

SEQ ID NO: 15390 - protein, 3 aa, Artificial Sequence
  Synthetic construct
RNN

SEQ ID NO: 15391 - protein, 3 aa, Artificial Sequence
  Synthetic construct
AAS

SEQ ID NO: 15392 - protein, 3 aa, Artificial Sequence
  Synthetic construct
DVN

SEQ ID NO: 15393 - protein, 3 aa, Artificial Sequence
  Synthetic construct
DAS

SEQ ID NO: 15394 - protein, 3 aa, Artificial Sequence
  Synthetic construct
AAS

SEQ ID NO: 15395 - protein, 3 aa, Artificial Sequence
  Synthetic construct
GKN

SEQ ID NO: 15396 - protein, 3 aa, Artificial Sequence
  Synthetic construct
EVS

SEQ ID NO: 15397 - protein, 3 aa, Artificial Sequence
  Synthetic construct
AAS

SEQ ID NO: 15398 - protein, 3 aa, Artificial Sequence
  Synthetic construct
DAS

SEQ ID NO: 15399 - protein, 3 aa, Artificial Sequence
  Synthetic construct
GNI

SEQ ID NO: 15400 - protein, 3 aa, Artificial Sequence
  Synthetic construct
WAS

SEQ ID NO: 15401 - protein, 3 aa, Artificial Sequence
  Synthetic construct
DVS

SEQ ID NO: 15402 - protein, 3 aa, Artificial Sequence
  Synthetic construct
DNN

SEQ ID NO: 15403 - protein, 3 aa, Artificial Sequence
  Synthetic construct
ATS

SEQ ID NO: 15404 - protein, 3 aa, Artificial Sequence
  Synthetic construct
KAS

SEQ ID NO: 15405 - protein, 3 aa, Artificial Sequence
  Synthetic construct
GAS

SEQ ID NO: 15406 - protein, 3 aa, Artificial Sequence
  Synthetic construct
GAS

SEQ ID NO: 15407 - protein, 3 aa, Artificial Sequence
  Synthetic construct
QDS

SEQ ID NO: 15408 - protein, 3 aa, Artificial Sequence
  Synthetic construct
TAS

SEQ ID NO: 15409 - protein, 3 aa, Artificial Sequence
  Synthetic construct
DAS

SEQ ID NO: 15410 - protein, 3 aa, Artificial Sequence
  Synthetic construct
DAS

SEQ ID NO: 15411 - protein, 3 aa, Artificial Sequence
  Synthetic construct
EGS

SEQ ID NO: 15412 - protein, 3 aa, Artificial Sequence
  Synthetic construct
EVR

SEQ ID NO: 15413 - protein, 3 aa, Artificial Sequence
  Synthetic construct
KDS

SEQ ID NO: 15414 - protein, 3 aa, Artificial Sequence
  Synthetic construct
AAS

SEQ ID NO: 15415 - protein, 3 aa, Artificial Sequence
  Synthetic construct
AAS

SEQ ID NO: 15416 - protein, 3 aa, Artificial Sequence
  Synthetic construct
DAS

SEQ ID NO: 15417 - protein, 3 aa, Artificial Sequence
  Synthetic construct
DAS

SEQ ID NO: 15418 - protein, 3 aa, Artificial Sequence
  Synthetic construct
KAS

SEQ ID NO: 15419 - protein, 7 aa, Artificial Sequence
  Synthetic construct
YMSDSDQ

SEQ ID NO: 15420 - protein, 3 aa, Artificial Sequence
  Synthetic construct
GAS

SEQ ID NO: 15421 - protein, 3 aa, Artificial Sequence
  Synthetic construct
LGS

SEQ ID NO: 15422 - protein, 3 aa, Artificial Sequence
  Synthetic construct
WAS

SEQ ID NO: 15423 - protein, 3 aa, Artificial Sequence
  Synthetic construct
EGT

SEQ ID NO: 15424 - protein, 3 aa, Artificial Sequence
  Synthetic construct
DAS

SEQ ID NO: 15425 - protein, 3 aa, Artificial Sequence
  Synthetic construct
KVS

SEQ ID NO: 15426 - protein, 3 aa, Artificial Sequence
  Synthetic construct
DVT

SEQ ID NO: 15427 - protein, 3 aa, Artificial Sequence
  Synthetic construct
AAS

SEQ ID NO: 15428 - protein, 3 aa, Artificial Sequence
  Synthetic construct
DVS

SEQ ID NO: 15429 - protein, 3 aa, Artificial Sequence
  Synthetic construct
AAS

SEQ ID NO: 15430 - protein, 3 aa, Artificial Sequence
  Synthetic construct
SAS

SEQ ID NO: 15431 - protein, 3 aa, Artificial Sequence
  Synthetic construct
DVS

SEQ ID NO: 15432 - protein, 3 aa, Artificial Sequence
  Synthetic construct
KAS

SEQ ID NO: 15433 - protein, 3 aa, Artificial Sequence
  Synthetic construct
LGS

SEQ ID NO: 15434 - protein, 3 aa, Artificial Sequence
  Synthetic construct
YNS

SEQ ID NO: 15435 - protein, 3 aa, Artificial Sequence
  Synthetic construct
DAS

SEQ ID NO: 15436 - protein, 3 aa, Artificial Sequence
  Synthetic construct
EVI

SEQ ID NO: 15437 - protein, 3 aa, Artificial Sequence
  Synthetic construct
WAS

SEQ ID NO: 15438 - protein, 3 aa, Artificial Sequence
  Synthetic construct
GAS

SEQ ID NO: 15439 - protein, 3 aa, Artificial Sequence
  Synthetic construct
DTI

SEQ ID NO: 15440 - protein, 3 aa, Artificial Sequence
  Synthetic construct
ENN

SEQ ID NO: 15441 - protein, 3 aa, Artificial Sequence
  Synthetic construct
AAS

SEQ ID NO: 15442 - protein, 3 aa, Artificial Sequence
  Synthetic construct
RNN

SEQ ID NO: 15443 - protein, 3 aa, Artificial Sequence
  Synthetic construct
QDN

SEQ ID NO: 15444 - protein, 3 aa, Artificial Sequence
  Synthetic construct
GAS

SEQ ID NO: 15445 - protein, 3 aa, Artificial Sequence
  Synthetic construct
QDT

SEQ ID NO: 15446 - protein, 3 aa, Artificial Sequence
  Synthetic construct
LLY

SEQ ID NO: 15447 - protein, 3 aa, Artificial Sequence
  Synthetic construct
RND

SEQ ID NO: 15448 - protein, 3 aa, Artificial Sequence
  Synthetic construct
KDS

SEQ ID NO: 15449 - protein, 3 aa, Artificial Sequence
  Synthetic construct
AAS

SEQ ID NO: 15450 - protein, 3 aa, Artificial Sequence
  Synthetic construct
AAS

SEQ ID NO: 15451 - protein, 3 aa, Artificial Sequence
  Synthetic construct
YAS

SEQ ID NO: 15452 - protein, 3 aa, Artificial Sequence
  Synthetic construct
WAS

SEQ ID NO: 15453 - protein, 3 aa, Artificial Sequence
  Synthetic construct
DNN

SEQ ID NO: 15454 - protein, 3 aa, Artificial Sequence
  Synthetic construct
WAS

SEQ ID NO: 15455 - protein, 3 aa, Artificial Sequence
  Synthetic construct
KVS

SEQ ID NO: 15456 - protein, 3 aa, Artificial Sequence
  Synthetic construct
AAS

SEQ ID NO: 15457 - protein, 3 aa, Artificial Sequence
  Synthetic construct
SNN

SEQ ID NO: 15458 - protein, 3 aa, Artificial Sequence
  Synthetic construct
GAS

SEQ ID NO: 15459 - protein, 3 aa, Artificial Sequence
  Synthetic construct
GAS

SEQ ID NO: 15460 - protein, 3 aa, Artificial Sequence
  Synthetic construct
LGS

SEQ ID NO: 15461 - protein, 3 aa, Artificial Sequence
  Synthetic construct
FDD

SEQ ID NO: 15462 - protein, 3 aa, Artificial Sequence
  Synthetic construct
DLS

SEQ ID NO: 15463 - protein, 3 aa, Artificial Sequence
  Synthetic construct
GAS

SEQ ID NO: 15464 - protein, 3 aa, Artificial Sequence
  Synthetic construct
EDS

SEQ ID NO: 15465 - protein, 3 aa, Artificial Sequence
  Synthetic construct
SGE

SEQ ID NO: 15466 - protein, 3 aa, Artificial Sequence
  Synthetic construct
DAS

SEQ ID NO: 15467 - protein, 3 aa, Artificial Sequence
  Synthetic construct
TAS

SEQ ID NO: 15468 - protein, 3 aa, Artificial Sequence
  Synthetic construct
GAS

SEQ ID NO: 15469 - protein, 3 aa, Artificial Sequence
  Synthetic construct
GST

SEQ ID NO: 15470 - protein, 3 aa, Artificial Sequence
  Synthetic construct
WAS

SEQ ID NO: 15471 - protein, 3 aa, Artificial Sequence
  Synthetic construct
DVS

SEQ ID NO: 15472 - protein, 3 aa, Artificial Sequence
  Synthetic construct
DDT

SEQ ID NO: 15473 - protein, 3 aa, Artificial Sequence
  Synthetic construct
DAS

SEQ ID NO: 15474 - protein, 3 aa, Artificial Sequence
  Synthetic construct
EAN

SEQ ID NO: 15475 - protein, 3 aa, Artificial Sequence
  Synthetic construct
EDS

SEQ ID NO: 15476 - protein, 3 aa, Artificial Sequence
  Synthetic construct
DVS

SEQ ID NO: 15477 - protein, 3 aa, Artificial Sequence
  Synthetic construct
AAS

SEQ ID NO: 15478 - protein, 3 aa, Artificial Sequence
  Synthetic construct
LGS

SEQ ID NO: 15479 - protein, 3 aa, Artificial Sequence
  Synthetic construct
GAS

SEQ ID NO: 15480 - protein, 3 aa, Artificial Sequence
  Synthetic construct
DVS

SEQ ID NO: 15481 - protein, 3 aa, Artificial Sequence
  Synthetic construct
YAS

SEQ ID NO: 15482 - protein, 3 aa, Artificial Sequence
  Synthetic construct
AVS

SEQ ID NO: 15483 - protein, 3 aa, Artificial Sequence
  Synthetic construct
EAS

SEQ ID NO: 15484 - protein, 3 aa, Artificial Sequence
  Synthetic construct
RNN

SEQ ID NO: 15485 - protein, 3 aa, Artificial Sequence
  Synthetic construct
EVS

SEQ ID NO: 15486 - protein, 3 aa, Artificial Sequence
  Synthetic construct
VNS

SEQ ID NO: 15487 - protein, 3 aa, Artificial Sequence
  Synthetic construct
DVS

SEQ ID NO: 15488 - protein, 3 aa, Artificial Sequence
  Synthetic construct
DAS

SEQ ID NO: 15489 - protein, 3 aa, Artificial Sequence
  Synthetic construct
AAS

SEQ ID NO: 15490 - protein, 3 aa, Artificial Sequence
  Synthetic construct
KDS

SEQ ID NO: 15491 - protein, 3 aa, Artificial Sequence
  Synthetic construct
DAS

SEQ ID NO: 15492 - protein, 3 aa, Artificial Sequence
  Synthetic construct
GAS

SEQ ID NO: 15493 - protein, 3 aa, Artificial Sequence
  Synthetic construct
KAS

SEQ ID NO: 15494 - protein, 3 aa, Artificial Sequence
  Synthetic construct
QDS

SEQ ID NO: 15495 - protein, 3 aa, Artificial Sequence
  Synthetic construct
AAS

SEQ ID NO: 15496 - protein, 3 aa, Artificial Sequence
  Synthetic construct
LGS

SEQ ID NO: 15497 - protein, 3 aa, Artificial Sequence
  Synthetic construct
KDS

SEQ ID NO: 15498 - protein, 3 aa, Artificial Sequence
  Synthetic construct
GTS

SEQ ID NO: 15499 - protein, 3 aa, Artificial Sequence
  Synthetic construct
LGS

SEQ ID NO: 15500 - protein, 3 aa, Artificial Sequence
  Synthetic construct
EDN

SEQ ID NO: 15501 - protein, 3 aa, Artificial Sequence
  Synthetic construct
KDS

SEQ ID NO: 15502 - protein, 3 aa, Artificial Sequence
  Synthetic construct
KDS

SEQ ID NO: 15503 - protein, 3 aa, Artificial Sequence
  Synthetic construct
GNS

SEQ ID NO: 15504 - protein, 3 aa, Artificial Sequence
  Synthetic construct
QDT

SEQ ID NO: 15505 - protein, 3 aa, Artificial Sequence
  Synthetic construct
AAS

SEQ ID NO: 15506 - protein, 3 aa, Artificial Sequence
  Synthetic construct
EDS

SEQ ID NO: 15507 - protein, 3 aa, Artificial Sequence
  Synthetic construct
STN

SEQ ID NO: 15508 - protein, 3 aa, Artificial Sequence
  Synthetic construct
AAS

SEQ ID NO: 15509 - protein, 3 aa, Artificial Sequence
  Synthetic construct
AAS

SEQ ID NO: 15510 - protein, 3 aa, Artificial Sequence
  Synthetic construct
AAS

SEQ ID NO: 15511 - protein, 3 aa, Artificial Sequence
  Synthetic construct
KAS

SEQ ID NO: 15512 - protein, 3 aa, Artificial Sequence
  Synthetic construct
ATS

SEQ ID NO: 15513 - protein, 3 aa, Artificial Sequence
  Synthetic construct
WAS

SEQ ID NO: 15514 - protein, 3 aa, Artificial Sequence
  Synthetic construct
DVT

SEQ ID NO: 15515 - protein, 3 aa, Artificial Sequence
  Synthetic construct
DVS

SEQ ID NO: 15516 - protein, 3 aa, Artificial Sequence
  Synthetic construct
NNN

SEQ ID NO: 15517 - protein, 3 aa, Artificial Sequence
  Synthetic construct
ANS

SEQ ID NO: 15518 - protein, 3 aa, Artificial Sequence
  Synthetic construct
TDN

SEQ ID NO: 15519 - protein, 3 aa, Artificial Sequence
  Synthetic construct
DAS

SEQ ID NO: 15520 - protein, 3 aa, Artificial Sequence
  Synthetic construct
ATS

SEQ ID NO: 15521 - protein, 3 aa, Artificial Sequence
  Synthetic construct
RSS

SEQ ID NO: 15522 - protein, 3 aa, Artificial Sequence
  Synthetic construct
ENN

SEQ ID NO: 15523 - protein, 3 aa, Artificial Sequence
  Synthetic construct
DAS

SEQ ID NO: 15524 - protein, 1 aa, Artificial Sequence
  Synthetic construct
S

SEQ ID NO: 15525 - protein, 3 aa, Artificial Sequence
  Synthetic construct
GAS

SEQ ID NO: 15526 - protein, 3 aa, Artificial Sequence
  Synthetic construct
DAS

SEQ ID NO: 15527 - protein, 3 aa, Artificial Sequence
  Synthetic construct
GAS

SEQ ID NO: 15528 - protein, 3 aa, Artificial Sequence
  Synthetic construct
DAS

SEQ ID NO: 15529 - protein, 3 aa, Artificial Sequence
  Synthetic construct
WAS

SEQ ID NO: 15530 - protein, 3 aa, Artificial Sequence
  Synthetic construct
GNN

SEQ ID NO: 15531 - protein, 3 aa, Artificial Sequence
  Synthetic construct
GAS

SEQ ID NO: 15532 - protein, 3 aa, Artificial Sequence
  Synthetic construct
DVS

SEQ ID NO: 15533 - protein, 3 aa, Artificial Sequence
  Synthetic construct
GAS

SEQ ID NO: 15534 - protein, 3 aa, Artificial Sequence
  Synthetic construct
GAS

SEQ ID NO: 15535 - protein, 3 aa, Artificial Sequence
  Synthetic construct
VNS

SEQ ID NO: 15536 - protein, 3 aa, Artificial Sequence
  Synthetic construct
DAT

SEQ ID NO: 15537 - protein, 3 aa, Artificial Sequence
  Synthetic construct
YDS

SEQ ID NO: 15538 - protein, 3 aa, Artificial Sequence
  Synthetic construct
DAS

SEQ ID NO: 15539 - protein, 3 aa, Artificial Sequence
  Synthetic construct
EVS

SEQ ID NO: 15540 - protein, 3 aa, Artificial Sequence
  Synthetic construct
KDS

SEQ ID NO: 15541 - protein, 3 aa, Artificial Sequence
  Synthetic construct
DAS

SEQ ID NO: 15542 - protein, 3 aa, Artificial Sequence
  Synthetic construct
DVT

SEQ ID NO: 15543 - protein, 3 aa, Artificial Sequence
  Synthetic construct
YDS

SEQ ID NO: 15544 - protein, 3 aa, Artificial Sequence
  Synthetic construct
YAS

SEQ ID NO: 15545 - protein, 3 aa, Artificial Sequence
  Synthetic construct
DVT

SEQ ID NO: 15546 - protein, 3 aa, Artificial Sequence
  Synthetic construct
GAS

SEQ ID NO: 15547 - protein, 3 aa, Artificial Sequence
  Synthetic construct
DNN

SEQ ID NO: 15548 - protein, 3 aa, Artificial Sequence
  Synthetic construct
GAS

SEQ ID NO: 15549 - protein, 3 aa, Artificial Sequence
  Synthetic construct
TAS

SEQ ID NO: 15550 - protein, 3 aa, Artificial Sequence
  Synthetic construct
GAS

SEQ ID NO: 15551 - protein, 3 aa, Artificial Sequence
  Synthetic construct
AAS

SEQ ID NO: 15552 - protein, 3 aa, Artificial Sequence
  Synthetic construct
DVN

SEQ ID NO: 15553 - protein, 3 aa, Artificial Sequence
  Synthetic construct
EVS

SEQ ID NO: 15554 - protein, 3 aa, Artificial Sequence
  Synthetic construct
DVS

SEQ ID NO: 15555 - protein, 3 aa, Artificial Sequence
  Synthetic construct
GVS

SEQ ID NO: 15556 - protein, 3 aa, Artificial Sequence
  Synthetic construct
LGS

SEQ ID NO: 15557 - protein, 3 aa, Artificial Sequence
  Synthetic construct
KAS

SEQ ID NO: 15558 - protein, 3 aa, Artificial Sequence
  Synthetic construct
EVT

SEQ ID NO: 15559 - protein, 3 aa, Artificial Sequence
  Synthetic construct
DAS

SEQ ID NO: 15560 - protein, 3 aa, Artificial Sequence
  Synthetic construct
AAS

SEQ ID NO: 15561 - protein, 3 aa, Artificial Sequence
  Synthetic construct
EGS

SEQ ID NO: 15562 - protein, 3 aa, Artificial Sequence
  Synthetic construct
DVI

SEQ ID NO: 15563 - protein, 3 aa, Artificial Sequence
  Synthetic construct
GAS

SEQ ID NO: 15564 - protein, 3 aa, Artificial Sequence
  Synthetic construct
NDD

SEQ ID NO: 15565 - protein, 3 aa, Artificial Sequence
  Synthetic construct
KAS

SEQ ID NO: 15566 - protein, 3 aa, Artificial Sequence
  Synthetic construct
DVS

SEQ ID NO: 15567 - protein, 3 aa, Artificial Sequence
  Synthetic construct
GEN

SEQ ID NO: 15568 - protein, 3 aa, Artificial Sequence
  Synthetic construct
AAS

SEQ ID NO: 15569 - protein, 3 aa, Artificial Sequence
  Synthetic construct
DVS

SEQ ID NO: 15570 - protein, 3 aa, Artificial Sequence
  Synthetic construct
WAS

SEQ ID NO: 15571 - protein, 3 aa, Artificial Sequence
  Synthetic construct
DAS

SEQ ID NO: 15572 - protein, 3 aa, Artificial Sequence
  Synthetic construct
KDD

SEQ ID NO: 15573 - protein, 3 aa, Artificial Sequence
  Synthetic construct
DVS

SEQ ID NO: 15574 - protein, 3 aa, Artificial Sequence
  Synthetic construct
WAS

SEQ ID NO: 15575 - protein, 3 aa, Artificial Sequence
  Synthetic construct
SAF

SEQ ID NO: 15576 - protein, 3 aa, Artificial Sequence
  Synthetic construct
WAS

SEQ ID NO: 15577 - protein, 3 aa, Artificial Sequence
  Synthetic construct
KAS

SEQ ID NO: 15578 - protein, 3 aa, Artificial Sequence
  Synthetic construct
GAS

SEQ ID NO: 15579 - protein, 3 aa, Artificial Sequence
  Synthetic construct
AAS

SEQ ID NO: 15580 - protein, 3 aa, Artificial Sequence
  Synthetic construct
KAS

SEQ ID NO: 15581 - protein, 3 aa, Artificial Sequence
  Synthetic construct
AAS

SEQ ID NO: 15582 - protein, 3 aa, Artificial Sequence
  Synthetic construct
RTD

SEQ ID NO: 15583 - protein, 3 aa, Artificial Sequence
  Synthetic construct
GAS

SEQ ID NO: 15584 - protein, 3 aa, Artificial Sequence
  Synthetic construct
AAS

SEQ ID NO: 15585 - protein, 3 aa, Artificial Sequence
  Synthetic construct
YDS

SEQ ID NO: 15586 - protein, 3 aa, Artificial Sequence
  Synthetic construct
WAS

SEQ ID NO: 15587 - protein, 3 aa, Artificial Sequence
  Synthetic construct
LGS

SEQ ID NO: 15588 - protein, 3 aa, Artificial Sequence
  Synthetic construct
GAS

SEQ ID NO: 15589 - protein, 3 aa, Artificial Sequence
  Synthetic construct
GAS

SEQ ID NO: 15590 - protein, 3 aa, Artificial Sequence
  Synthetic construct
DAS

SEQ ID NO: 15591 - protein, 3 aa, Artificial Sequence
  Synthetic construct
GAS

SEQ ID NO: 15592 - protein, 3 aa, Artificial Sequence
  Synthetic construct
EDN

SEQ ID NO: 15593 - protein, 3 aa, Artificial Sequence
  Synthetic construct
AAS

SEQ ID NO: 15594 - protein, 3 aa, Artificial Sequence
  Synthetic construct
AAS

SEQ ID NO: 15595 - protein, 3 aa, Artificial Sequence
  Synthetic construct
AAS

SEQ ID NO: 15596 - protein, 3 aa, Artificial Sequence
  Synthetic construct
DAS

SEQ ID NO: 15597 - protein, 3 aa, Artificial Sequence
  Synthetic construct
GAS

SEQ ID NO: 15598 - protein, 3 aa, Artificial Sequence
  Synthetic construct
DAS

SEQ ID NO: 15599 - protein, 3 aa, Artificial Sequence
  Synthetic construct
YDS

SEQ ID NO: 15600 - protein, 3 aa, Artificial Sequence
  Synthetic construct
RNN

SEQ ID NO: 15601 - protein, 3 aa, Artificial Sequence
  Synthetic construct
DAS

SEQ ID NO: 15602 - protein, 3 aa, Artificial Sequence
  Synthetic construct
GGS

SEQ ID NO: 15603 - protein, 3 aa, Artificial Sequence
  Synthetic construct
AAS

SEQ ID NO: 15604 - protein, 3 aa, Artificial Sequence
  Synthetic construct
QDN

SEQ ID NO: 15605 - protein, 3 aa, Artificial Sequence
  Synthetic construct
DAS

SEQ ID NO: 15606 - protein, 3 aa, Artificial Sequence
  Synthetic construct
DVN

SEQ ID NO: 15607 - protein, 3 aa, Artificial Sequence
  Synthetic construct
QDA

SEQ ID NO: 15608 - protein, 3 aa, Artificial Sequence
  Synthetic construct
DAS

SEQ ID NO: 15609 - protein, 3 aa, Artificial Sequence
  Synthetic construct
GTF

SEQ ID NO: 15610 - protein, 3 aa, Artificial Sequence
  Synthetic construct
AAS

SEQ ID NO: 15611 - protein, 3 aa, Artificial Sequence
  Synthetic construct
DVS

SEQ ID NO: 15612 - protein, 3 aa, Artificial Sequence
  Synthetic construct
KDS

SEQ ID NO: 15613 - protein, 3 aa, Artificial Sequence
  Synthetic construct
WAS

SEQ ID NO: 15614 - protein, 3 aa, Artificial Sequence
  Synthetic construct
EDS

SEQ ID NO: 15615 - protein, 3 aa, Artificial Sequence
  Synthetic construct
AAS

SEQ ID NO: 15616 - protein, 3 aa, Artificial Sequence
  Synthetic construct
EGS

SEQ ID NO: 15617 - protein, 3 aa, Artificial Sequence
  Synthetic construct
YDG

SEQ ID NO: 15618 - protein, 3 aa, Artificial Sequence
  Synthetic construct
LGS

SEQ ID NO: 15619 - protein, 3 aa, Artificial Sequence
  Synthetic construct
GAS

SEQ ID NO: 15620 - protein, 3 aa, Artificial Sequence
  Synthetic construct
AAS

SEQ ID NO: 15621 - protein, 3 aa, Artificial Sequence
  Synthetic construct
DNN

SEQ ID NO: 15622 - protein, 3 aa, Artificial Sequence
  Synthetic construct
GTF

SEQ ID NO: 15623 - protein, 3 aa, Artificial Sequence
  Synthetic construct
WAS

SEQ ID NO: 15624 - protein, 3 aa, Artificial Sequence
  Synthetic construct
ENN

SEQ ID NO: 15625 - protein, 3 aa, Artificial Sequence
  Synthetic construct
DVT

SEQ ID NO: 15626 - protein, 3 aa, Artificial Sequence
  Synthetic construct
EDR

SEQ ID NO: 15627 - protein, 3 aa, Artificial Sequence
  Synthetic construct
DAS

SEQ ID NO: 15628 - protein, 3 aa, Artificial Sequence
  Synthetic construct
KAS

SEQ ID NO: 15629 - protein, 3 aa, Artificial Sequence
  Synthetic construct
KDT

SEQ ID NO: 15630 - protein, 3 aa, Artificial Sequence
  Synthetic construct
RNS

SEQ ID NO: 15631 - protein, 3 aa, Artificial Sequence
  Synthetic construct
DAS

SEQ ID NO: 15632 - protein, 3 aa, Artificial Sequence
  Synthetic construct
GAS

SEQ ID NO: 15633 - protein, 3 aa, Artificial Sequence
  Synthetic construct
GNN

SEQ ID NO: 15634 - protein, 3 aa, Artificial Sequence
  Synthetic construct
GAS

SEQ ID NO: 15635 - protein, 3 aa, Artificial Sequence
  Synthetic construct
EDD

SEQ ID NO: 15636 - protein, 3 aa, Artificial Sequence
  Synthetic construct
EGN

SEQ ID NO: 15637 - protein, 3 aa, Artificial Sequence
  Synthetic construct
KVS

SEQ ID NO: 15638 - protein, 3 aa, Artificial Sequence
  Synthetic construct
DAS

SEQ ID NO: 15639 - protein, 3 aa, Artificial Sequence
  Synthetic construct
WAS

SEQ ID NO: 15640 - protein, 3 aa, Artificial Sequence
  Synthetic construct
WAS

SEQ ID NO: 15641 - protein, 3 aa, Artificial Sequence
  Synthetic construct
NNN

SEQ ID NO: 15642 - protein, 3 aa, Artificial Sequence
  Synthetic construct
DAS

SEQ ID NO: 15643 - protein, 3 aa, Artificial Sequence
  Synthetic construct
DAS

SEQ ID NO: 15644 - protein, 3 aa, Artificial Sequence
  Synthetic construct
EDS

SEQ ID NO: 15645 - protein, 3 aa, Artificial Sequence
  Synthetic construct
GAS

SEQ ID NO: 15646 - protein, 3 aa, Artificial Sequence
  Synthetic construct
ELS

SEQ ID NO: 15647 - protein, 3 aa, Artificial Sequence
  Synthetic construct
GAS

SEQ ID NO: 15648 - protein, 3 aa, Artificial Sequence
  Synthetic construct
EDN

SEQ ID NO: 15649 - protein, 3 aa, Artificial Sequence
  Synthetic construct
AAS

SEQ ID NO: 15650 - protein, 3 aa, Artificial Sequence
  Synthetic construct
SND

SEQ ID NO: 15651 - protein, 3 aa, Artificial Sequence
  Synthetic construct
ENN

SEQ ID NO: 15652 - protein, 3 aa, Artificial Sequence
  Synthetic construct
SAS

SEQ ID NO: 15653 - protein, 3 aa, Artificial Sequence
  Synthetic construct
GVS

SEQ ID NO: 15654 - protein, 3 aa, Artificial Sequence
  Synthetic construct
DAS

SEQ ID NO: 15655 - protein, 3 aa, Artificial Sequence
  Synthetic construct
WAS

SEQ ID NO: 15656 - protein, 3 aa, Artificial Sequence
  Synthetic construct
GNS

SEQ ID NO: 15657 - protein, 3 aa, Artificial Sequence
  Synthetic construct
TDN

SEQ ID NO: 15658 - protein, 3 aa, Artificial Sequence
  Synthetic construct
EDT

SEQ ID NO: 15659 - protein, 3 aa, Artificial Sequence
  Synthetic construct
KVS

SEQ ID NO: 15660 - protein, 3 aa, Artificial Sequence
  Synthetic construct
GAS

SEQ ID NO: 15661 - protein, 3 aa, Artificial Sequence
  Synthetic construct
EVS

SEQ ID NO: 15662 - protein, 3 aa, Artificial Sequence
  Synthetic construct
GAS

SEQ ID NO: 15663 - protein, 3 aa, Artificial Sequence
  Synthetic construct
GAS

SEQ ID NO: 15664 - protein, 3 aa, Artificial Sequence
  Synthetic construct
GAA

SEQ ID NO: 15665 - protein, 3 aa, Artificial Sequence
  Synthetic construct
DNN

SEQ ID NO: 15666 - protein, 3 aa, Artificial Sequence
  Synthetic construct
AAF

SEQ ID NO: 15667 - protein, 3 aa, Artificial Sequence
  Synthetic construct
YDS

SEQ ID NO: 15668 - protein, 3 aa, Artificial Sequence
  Synthetic construct
EDN

SEQ ID NO: 15669 - protein, 3 aa, Artificial Sequence
  Synthetic construct
AAS

SEQ ID NO: 15670 - protein, 3 aa, Artificial Sequence
  Synthetic construct
DNN

SEQ ID NO: 15671 - protein, 3 aa, Artificial Sequence
  Synthetic construct
EGS

SEQ ID NO: 15672 - protein, 3 aa, Artificial Sequence
  Synthetic construct
DVS

SEQ ID NO: 15673 - protein, 3 aa, Artificial Sequence
  Synthetic construct
KAS

SEQ ID NO: 15674 - protein, 3 aa, Artificial Sequence
  Synthetic construct
DVS

SEQ ID NO: 15675 - protein, 7 aa, Artificial Sequence
  Synthetic construct
YKSDSDK

SEQ ID NO: 15676 - protein, 3 aa, Artificial Sequence
  Synthetic construct
AAS

SEQ ID NO: 15677 - protein, 3 aa, Artificial Sequence
  Synthetic construct
DVS

SEQ ID NO: 15678 - protein, 3 aa, Artificial Sequence
  Synthetic construct
ATS

SEQ ID NO: 15679 - protein, 3 aa, Artificial Sequence
  Synthetic construct
DVS

SEQ ID NO: 15680 - protein, 3 aa, Artificial Sequence
  Synthetic construct
DAS

SEQ ID NO: 15681 - protein, 3 aa, Artificial Sequence
  Synthetic construct
AAS

SEQ ID NO: 15682 - protein, 3 aa, Artificial Sequence
  Synthetic construct
EVS

SEQ ID NO: 15683 - protein, 3 aa, Artificial Sequence
  Synthetic construct
ANI

SEQ ID NO: 15684 - protein, 3 aa, Artificial Sequence
  Synthetic construct
SAS

SEQ ID NO: 15685 - protein, 3 aa, Artificial Sequence
  Synthetic construct
GAS

SEQ ID NO: 15686 - protein, 3 aa, Artificial Sequence
  Synthetic construct
GDN

SEQ ID NO: 15687 - protein, 3 aa, Artificial Sequence
  Synthetic construct
AAS

SEQ ID NO: 15688 - protein, 3 aa, Artificial Sequence
  Synthetic construct
GTS

SEQ ID NO: 15689 - protein, 3 aa, Artificial Sequence
  Synthetic construct
AAS

SEQ ID NO: 15690 - protein, 3 aa, Artificial Sequence
  Synthetic construct
WAS

SEQ ID NO: 15691 - protein, 3 aa, Artificial Sequence
  Synthetic construct
KVS

SEQ ID NO: 15692 - protein, 3 aa, Artificial Sequence
  Synthetic construct
KNN

SEQ ID NO: 15693 - protein, 3 aa, Artificial Sequence
  Synthetic construct
GFT

SEQ ID NO: 15694 - protein, 3 aa, Artificial Sequence
  Synthetic construct
DAS

SEQ ID NO: 15695 - protein, 3 aa, Artificial Sequence
  Synthetic construct
GAS

SEQ ID NO: 15696 - protein, 3 aa, Artificial Sequence
  Synthetic construct
DAS

SEQ ID NO: 15697 - protein, 3 aa, Artificial Sequence
  Synthetic construct
DND

SEQ ID NO: 15698 - protein, 3 aa, Artificial Sequence
  Synthetic construct
GAS

SEQ ID NO: 15699 - protein, 3 aa, Artificial Sequence
  Synthetic construct
EVF

SEQ ID NO: 15700 - protein, 3 aa, Artificial Sequence
  Synthetic construct
LGS

SEQ ID NO: 15701 - protein, 3 aa, Artificial Sequence
  Synthetic construct
EVF

SEQ ID NO: 15702 - protein, 3 aa, Artificial Sequence
  Synthetic construct
QDN

SEQ ID NO: 15703 - protein, 3 aa, Artificial Sequence
  Synthetic construct
DAS

SEQ ID NO: 15704 - protein, 3 aa, Artificial Sequence
  Synthetic construct
DAS

SEQ ID NO: 15705 - protein, 3 aa, Artificial Sequence
  Synthetic construct
EVS

SEQ ID NO: 15706 - protein, 3 aa, Artificial Sequence
  Synthetic construct
ELS

SEQ ID NO: 15707 - protein, 3 aa, Artificial Sequence
  Synthetic construct
AAS

SEQ ID NO: 15708 - protein, 3 aa, Artificial Sequence
  Synthetic construct
YDS

SEQ ID NO: 15709 - protein, 3 aa, Artificial Sequence
  Synthetic construct
DAS

SEQ ID NO: 15710 - protein, 3 aa, Artificial Sequence
  Synthetic construct
QDS

SEQ ID NO: 15711 - protein, 7 aa, Artificial Sequence
  Synthetic construct
YKSDSDK

SEQ ID NO: 15712 - protein, 3 aa, Artificial Sequence
  Synthetic construct
SSN

SEQ ID NO: 15713 - protein, 3 aa, Artificial Sequence
  Synthetic construct
GAS

SEQ ID NO: 15714 - protein, 3 aa, Artificial Sequence
  Synthetic construct
LGS

SEQ ID NO: 15715 - protein, 3 aa, Artificial Sequence
  Synthetic construct
EDS

SEQ ID NO: 15716 - protein, 3 aa, Artificial Sequence
  Synthetic construct
GAS

SEQ ID NO: 15717 - protein, 3 aa, Artificial Sequence
  Synthetic construct
QDT

SEQ ID NO: 15718 - protein, 3 aa, Artificial Sequence
  Synthetic construct
YDS

SEQ ID NO: 15719 - protein, 3 aa, Artificial Sequence
  Synthetic construct
EDT

SEQ ID NO: 15720 - protein, 3 aa, Artificial Sequence
  Synthetic construct
EDN

SEQ ID NO: 15721 - protein, 3 aa, Artificial Sequence
  Synthetic construct
ATS

SEQ ID NO: 15722 - protein, 3 aa, Artificial Sequence
  Synthetic construct
DVS

SEQ ID NO: 15723 - protein, 7 aa, Artificial Sequence
  Synthetic construct
YRSDSDK

SEQ ID NO: 15724 - protein, 3 aa, Artificial Sequence
  Synthetic construct
AAS

SEQ ID NO: 15725 - protein, 3 aa, Artificial Sequence
  Synthetic construct
EVS

SEQ ID NO: 15726 - protein, 3 aa, Artificial Sequence
  Synthetic construct
DVS

SEQ ID NO: 15727 - protein, 3 aa, Artificial Sequence
  Synthetic construct
LGS

SEQ ID NO: 15728 - protein, 3 aa, Artificial Sequence
  Synthetic construct
DAS

SEQ ID NO: 15729 - protein, 3 aa, Artificial Sequence
  Synthetic construct
GAS

SEQ ID NO: 15730 - protein, 3 aa, Artificial Sequence
  Synthetic construct
DAS

SEQ ID NO: 15731 - protein, 3 aa, Artificial Sequence
  Synthetic construct
AAS

SEQ ID NO: 15732 - protein, 3 aa, Artificial Sequence
  Synthetic construct
GAS

SEQ ID NO: 15733 - protein, 3 aa, Artificial Sequence
  Synthetic construct
KAS

SEQ ID NO: 15734 - protein, 3 aa, Artificial Sequence
  Synthetic construct
EDT

SEQ ID NO: 15735 - protein, 3 aa, Artificial Sequence
  Synthetic construct
YDS

SEQ ID NO: 15736 - protein, 3 aa, Artificial Sequence
  Synthetic construct
GAS

SEQ ID NO: 15737 - protein, 3 aa, Artificial Sequence
  Synthetic construct
EVS

SEQ ID NO: 15738 - protein, 3 aa, Artificial Sequence
  Synthetic construct
GAS

SEQ ID NO: 15739 - protein, 3 aa, Artificial Sequence
  Synthetic construct
RDS

SEQ ID NO: 15740 - protein, 3 aa, Artificial Sequence
  Synthetic construct
GAS

SEQ ID NO: 15741 - protein, 3 aa, Artificial Sequence
  Synthetic construct
GAS

SEQ ID NO: 15742 - protein, 9 aa, Artificial Sequence
  Synthetic construct
QQGSNWPLT

SEQ ID NO: 15743 - protein, 10 aa, Artificial Sequence
  Synthetic construct
YSRDSSGNPL

SEQ ID NO: 15744 - protein, 9 aa, Artificial Sequence
  Synthetic construct
QAWDSRTVV

SEQ ID NO: 15745 - protein, 10 aa, Artificial Sequence
  Synthetic construct
SSYAGSNQVI

SEQ ID NO: 15746 - protein, 9 aa, Artificial Sequence
  Synthetic construct
MQALQTPWT

SEQ ID NO: 15747 - protein, 9 aa, Artificial Sequence
  Synthetic construct
QQRSDWPLT

SEQ ID NO: 15748 - protein, 11 aa, Artificial Sequence
  Synthetic construct
YSTDSSDNHRV

SEQ ID NO: 15749 - protein, 12 aa, Artificial Sequence
  Synthetic construct
QSYDSSLSGPYV

SEQ ID NO: 15750 - protein, 8 aa, Artificial Sequence
  Synthetic construct
QQYNNWWT

SEQ ID NO: 15751 - protein, 10 aa, Artificial Sequence
  Synthetic construct
QHYDNWPPIT

SEQ ID NO: 15752 - protein, 8 aa, Artificial Sequence
  Synthetic construct
QAWDGTVV

SEQ ID NO: 15753 - protein, 8 aa, Artificial Sequence
  Synthetic construct
QQYYITWT

SEQ ID NO: 15754 - protein, 10 aa, Artificial Sequence
  Synthetic construct
CSYAGSSTWV

SEQ ID NO: 15755 - protein, 9 aa, Artificial Sequence
  Synthetic construct
HQYHTYSCT

SEQ ID NO: 15756 - protein, 10 aa, Artificial Sequence
  Synthetic construct
QQYNNWPPRT

SEQ ID NO: 15757 - protein, 9 aa, Artificial Sequence
  Synthetic construct
QQYYSTPFT

SEQ ID NO: 15758 - protein, 9 aa, Artificial Sequence
  Synthetic construct
QQYGSSPRT

SEQ ID NO: 15759 - protein, 9 aa, Artificial Sequence
  Synthetic construct
QQFGSSPWT

SEQ ID NO: 15760 - protein, 9 aa, Artificial Sequence
  Synthetic construct
QAWDSSAAV

SEQ ID NO: 15761 - protein, 9 aa, Artificial Sequence
  Synthetic construct
QQYDNSLFT

SEQ ID NO: 15762 - protein, 11 aa, Artificial Sequence
  Synthetic construct
AAWDDSLNGAV

SEQ ID NO: 15763 - protein, 9 aa, Artificial Sequence
  Synthetic construct
QQRTNWVFT

SEQ ID NO: 15764 - protein, 9 aa, Artificial Sequence
  Synthetic construct
QHSYSTPWT

SEQ ID NO: 15765 - protein, 10 aa, Artificial Sequence
  Synthetic construct
SSYTSSSTYV

SEQ ID NO: 15766 - protein, 9 aa, Artificial Sequence
  Synthetic construct
HHYGSSRLT

SEQ ID NO: 15767 - protein, 13 aa, Artificial Sequence
  Synthetic construct
GADHDSGSNFVRV

SEQ ID NO: 15768 - protein, 8 aa, Artificial Sequence
  Synthetic construct
QQRANWLT

SEQ ID NO: 15769 - protein, 11 aa, Artificial Sequence
  Synthetic construct
CSYAGSYTWGV

SEQ ID NO: 15770 - protein, 9 aa, Artificial Sequence
  Synthetic construct
QQYNNWPYT

SEQ ID NO: 15771 - protein, 11 aa, Artificial Sequence
  Synthetic construct
SSYTSSSTLDV

SEQ ID NO: 15772 - protein, 11 aa, Artificial Sequence
  Synthetic construct
GTWDSSLSTVV

SEQ ID NO: 15773 - protein, 10 aa, Artificial Sequence
  Synthetic construct
LSYTSRGTRV

SEQ ID NO: 15774 - protein, 9 aa, Artificial Sequence
  Synthetic construct
QQYYTTPLA

SEQ ID NO: 15775 - protein, 9 aa, Artificial Sequence
  Synthetic construct
QQYYSAPRT

SEQ ID NO: 15776 - protein, 11 aa, Artificial Sequence
  Synthetic construct
QSYDSSLSGSV

SEQ ID NO: 15777 - protein, 9 aa, Artificial Sequence
  Synthetic construct
QQYYTTPYT

SEQ ID NO: 15778 - protein, 9 aa, Artificial Sequence
  Synthetic construct
LQYNSYPFT

SEQ ID NO: 15779 - protein, 9 aa, Artificial Sequence
  Synthetic construct
QQRSNWPPG

SEQ ID NO: 15780 - protein, 12 aa, Artificial Sequence
  Synthetic construct
SSYAGSNNFYVL

SEQ ID NO: 15781 - protein, 8 aa, Artificial Sequence
  Synthetic construct
QQRGGWYT

SEQ ID NO: 15782 - protein, 9 aa, Artificial Sequence
  Synthetic construct
QAWDSSTVV

SEQ ID NO: 15783 - protein, 10 aa, Artificial Sequence
  Synthetic construct
YSTDSSGNPF

SEQ ID NO: 15784 - protein, 9 aa, Artificial Sequence
  Synthetic construct
QQYYTTPFT

SEQ ID NO: 15785 - protein, 9 aa, Artificial Sequence
  Synthetic construct
QHYDSLRYT

SEQ ID NO: 15786 - protein, 10 aa, Artificial Sequence
  Synthetic construct
LLSYSATYWV

SEQ ID NO: 15787 - protein, 10 aa, Artificial Sequence
  Synthetic construct
QQLNSFFRVT

SEQ ID NO: 15788 - protein, 11 aa, Artificial Sequence
  Synthetic construct
QSYDSSLSDSV

SEQ ID NO: 15789 - protein, 9 aa, Artificial Sequence
  Synthetic construct
QQYGSSPLT

SEQ ID NO: 15790 - protein, 11 aa, Artificial Sequence
  Synthetic construct
QSYDSSLSALV

SEQ ID NO: 15791 - protein, 10 aa, Artificial Sequence
  Synthetic construct
SSYTNSSTVL

SEQ ID NO: 15792 - protein, 11 aa, Artificial Sequence
  Synthetic construct
GTWDSSLRAGV

SEQ ID NO: 15793 - protein, 9 aa, Artificial Sequence
  Synthetic construct
QQYENLPIT

SEQ ID NO: 15794 - protein, 11 aa, Artificial Sequence
  Synthetic construct
QQYDTLLRIFT

SEQ ID NO: 15795 - protein, 8 aa, Artificial Sequence
  Synthetic construct
QAWDSSAV

SEQ ID NO: 15796 - protein, 12 aa, Artificial Sequence
  Synthetic construct
QSSDNSGTYNYV

SEQ ID NO: 15797 - protein, 8 aa, Artificial Sequence
  Synthetic construct
QQTHSTFT

SEQ ID NO: 15798 - protein, 11 aa, Artificial Sequence
  Synthetic construct
GTWDSSLSAGV

SEQ ID NO: 15799 - protein, 11 aa, Artificial Sequence
  Synthetic construct
AAWDDSLSGEV

SEQ ID NO: 15800 - protein, 8 aa, Artificial Sequence
  Synthetic construct
MQGLQTRT

SEQ ID NO: 15801 - protein, 8 aa, Artificial Sequence
  Synthetic construct
MQGTHWPT

SEQ ID NO: 15802 - protein, 11 aa, Artificial Sequence
  Synthetic construct
YSTDSSANEGV

SEQ ID NO: 15803 - protein, 8 aa, Artificial Sequence
  Synthetic construct
CSYAGDVL

SEQ ID NO: 15804 - protein, 9 aa, Artificial Sequence
  Synthetic construct
QAWDTSTWV

SEQ ID NO: 15805 - protein, 11 aa, Artificial Sequence
  Synthetic construct
AAWDDSLSGYV

SEQ ID NO: 15806 - protein, 9 aa, Artificial Sequence
  Synthetic construct
QAWASSTAV

SEQ ID NO: 15807 - protein, 11 aa, Artificial Sequence
  Synthetic construct
AAWDDSLSGYV

SEQ ID NO: 15808 - protein, 8 aa, Artificial Sequence
  Synthetic construct
QQGYSTPT

SEQ ID NO: 15809 - protein, 11 aa, Artificial Sequence
  Synthetic construct
QVWDGSGDYCV

SEQ ID NO: 15810 - protein, 9 aa, Artificial Sequence
  Synthetic construct
QQYGTSPGT

SEQ ID NO: 15811 - protein, 9 aa, Artificial Sequence
  Synthetic construct
QQYGSSQGT

SEQ ID NO: 15812 - protein, 10 aa, Artificial Sequence
  Synthetic construct
SSYTSSGTRV

SEQ ID NO: 15813 - protein, 11 aa, Artificial Sequence
  Synthetic construct
GTWDSSLNTGV

SEQ ID NO: 15814 - protein, 9 aa, Artificial Sequence
  Synthetic construct
MQALQIPWT

SEQ ID NO: 15815 - protein, 13 aa, Artificial Sequence
  Synthetic construct
CSTDSSSNHPNWV

SEQ ID NO: 15816 - protein, 9 aa, Artificial Sequence
  Synthetic construct
QQYLTSPIT

SEQ ID NO: 15817 - protein, 9 aa, Artificial Sequence
  Synthetic construct
QKSYSSPQT

SEQ ID NO: 15818 - protein, 9 aa, Artificial Sequence
  Synthetic construct
QTWDSTTVV

SEQ ID NO: 15819 - protein, 11 aa, Artificial Sequence
  Synthetic construct
QSYDSSLSCEV

SEQ ID NO: 15820 - protein, 11 aa, Artificial Sequence
  Synthetic construct
HHRSNWPPRIT

SEQ ID NO: 15821 - protein, 9 aa, Artificial Sequence
  Synthetic construct
MQATQFPWT

SEQ ID NO: 15822 - protein, 10 aa, Artificial Sequence
  Synthetic construct
QQYGSSLLWT

SEQ ID NO: 15823 - protein, 12 aa, Artificial Sequence
  Synthetic construct
QSYDSSLSGGGV

SEQ ID NO: 15824 - protein, 9 aa, Artificial Sequence
  Synthetic construct
QQYYSTPLT

SEQ ID NO: 15825 - protein, 10 aa, Artificial Sequence
  Synthetic construct
CSYAGGRNLV

SEQ ID NO: 15826 - protein, 9 aa, Artificial Sequence
  Synthetic construct
MQALQTPYT

SEQ ID NO: 15827 - protein, 10 aa, Artificial Sequence
  Synthetic construct
SSRDSSGNPL

SEQ ID NO: 15828 - protein, 11 aa, Artificial Sequence
  Synthetic construct
QQRSNWPPALT

SEQ ID NO: 15829 - protein, 9 aa, Artificial Sequence
  Synthetic construct
LLYYGGSYV

SEQ ID NO: 15830 - protein, 9 aa, Artificial Sequence
  Synthetic construct
QQYGSPPYT

SEQ ID NO: 15831 - protein, 9 aa, Artificial Sequence
  Synthetic construct
QQSYSVPLT

SEQ ID NO: 15832 - protein, 11 aa, Artificial Sequence
  Synthetic construct
GTWDSSLSARV

SEQ ID NO: 15833 - protein, 11 aa, Artificial Sequence
  Synthetic construct
AAWDDGLSGSV

SEQ ID NO: 15834 - protein, 11 aa, Artificial Sequence
  Synthetic construct
QAWGSSTAHYV

SEQ ID NO: 15835 - protein, 8 aa, Artificial Sequence
  Synthetic construct
QQYSSLYS

SEQ ID NO: 15836 - protein, 9 aa, Artificial Sequence
  Synthetic construct
QQYDSLPLT

SEQ ID NO: 15837 - protein, 10 aa, Artificial Sequence
  Synthetic construct
QQYCIFSQWA

SEQ ID NO: 15838 - protein, 9 aa, Artificial Sequence
  Synthetic construct
QSADSSGTV

SEQ ID NO: 15839 - protein, 10 aa, Artificial Sequence
  Synthetic construct
QQSYSTPPLT

SEQ ID NO: 15840 - protein, 8 aa, Artificial Sequence
  Synthetic construct
QQYDNLIT

SEQ ID NO: 15841 - protein, 11 aa, Artificial Sequence
  Synthetic construct
ATWDDSLSGVV

SEQ ID NO: 15842 - protein, 9 aa, Artificial Sequence
  Synthetic construct
QQYNLYSGT

SEQ ID NO: 15843 - protein, 9 aa, Artificial Sequence
  Synthetic construct
QQYGGSPAT

SEQ ID NO: 15844 - protein, 8 aa, Artificial Sequence
  Synthetic construct
QSADSSVV

SEQ ID NO: 15845 - protein, 9 aa, Artificial Sequence
  Synthetic construct
QQGYSPIWT

SEQ ID NO: 15846 - protein, 11 aa, Artificial Sequence
  Synthetic construct
QVWDSSSDHWV

SEQ ID NO: 15847 - protein, 12 aa, Artificial Sequence
  Synthetic construct
YSTDNGVNHEAV

SEQ ID NO: 15848 - protein, 9 aa, Artificial Sequence
  Synthetic construct
QHYNAYSWT

SEQ ID NO: 15849 - protein, 11 aa, Artificial Sequence
  Synthetic construct
SSYTTSITPYV

SEQ ID NO: 15850 - protein, 11 aa, Artificial Sequence
  Synthetic construct
GTWDSSLSAVV

SEQ ID NO: 15851 - protein, 9 aa, Artificial Sequence
  Synthetic construct
QQYYSTPQT

SEQ ID NO: 15852 - protein, 8 aa, Artificial Sequence
  Synthetic construct
QVWDTSVV

SEQ ID NO: 15853 - protein, 10 aa, Artificial Sequence
  Synthetic construct
QQSYSTPPWT

SEQ ID NO: 15854 - protein, 10 aa, Artificial Sequence
  Synthetic construct
CSYAGSFTFV

SEQ ID NO: 15855 - protein, 9 aa, Artificial Sequence
  Synthetic construct
MQALRTPLT

SEQ ID NO: 15856 - protein, 9 aa, Artificial Sequence
  Synthetic construct
QQYGSSVLT

SEQ ID NO: 15857 - protein, 10 aa, Artificial Sequence
  Synthetic construct
QQSYTTPRKT

SEQ ID NO: 15858 - protein, 9 aa, Artificial Sequence
  Synthetic construct
HQYGSSRLT

SEQ ID NO: 15859 - protein, 11 aa, Artificial Sequence
  Synthetic construct
QQRSIRPPTWT

SEQ ID NO: 15860 - protein, 11 aa, Artificial Sequence
  Synthetic construct
QVWDSSSDHGV

SEQ ID NO: 15861 - protein, 11 aa, Artificial Sequence
  Synthetic construct
NSRDSSGDHLV

SEQ ID NO: 15862 - protein, 12 aa, Artificial Sequence
  Synthetic construct
QSYDTSLSGPYV

SEQ ID NO: 15863 - protein, 12 aa, Artificial Sequence
  Synthetic construct
CSYAGSFTPLFV

SEQ ID NO: 15864 - protein, 11 aa, Artificial Sequence
  Synthetic construct
YSTDKSDDHRV

SEQ ID NO: 15865 - protein, 11 aa, Artificial Sequence
  Synthetic construct
QSYDRSLDAYV

SEQ ID NO: 15866 - protein, 9 aa, Artificial Sequence
  Synthetic construct
QQANSFPLT

SEQ ID NO: 15867 - protein, 11 aa, Artificial Sequence
  Synthetic construct
QSADSSGTYLV

SEQ ID NO: 15868 - protein, 11 aa, Artificial Sequence
  Synthetic construct
SSTDNTANHWV

SEQ ID NO: 15869 - protein, 11 aa, Artificial Sequence
  Synthetic construct
AAWDDSLSAWV

SEQ ID NO: 15870 - protein, 10 aa, Artificial Sequence
  Synthetic construct
QQYNDWPPKT

SEQ ID NO: 15871 - protein, 8 aa, Artificial Sequence
  Synthetic construct
HQSYSTPT

SEQ ID NO: 15872 - protein, 10 aa, Artificial Sequence
  Synthetic construct
SSFTNISTVV

SEQ ID NO: 15873 - protein, 11 aa, Artificial Sequence
  Synthetic construct
SSSTSTSTLYV

SEQ ID NO: 15874 - protein, 10 aa, Artificial Sequence
  Synthetic construct
SSYAGSNPLI

SEQ ID NO: 15875 - protein, 9 aa, Artificial Sequence
  Synthetic construct
QTWGTGIQV

SEQ ID NO: 15876 - protein, 8 aa, Artificial Sequence
  Synthetic construct
MQSMQLLF

SEQ ID NO: 15877 - protein, 10 aa, Artificial Sequence
  Synthetic construct
CSYAGSYTPV

SEQ ID NO: 15878 - protein, 10 aa, Artificial Sequence
  Synthetic construct
QQLDSYPEIT

SEQ ID NO: 15879 - protein, 9 aa, Artificial Sequence
  Synthetic construct
MQRIEFPLT

SEQ ID NO: 15880 - protein, 9 aa, Artificial Sequence
  Synthetic construct
MQSIQLPLT

SEQ ID NO: 15881 - protein, 8 aa, Artificial Sequence
  Synthetic construct
QQANSPWT

SEQ ID NO: 15882 - protein, 11 aa, Artificial Sequence
  Synthetic construct
GTWDSSLSAGV

SEQ ID NO: 15883 - protein, 11 aa, Artificial Sequence
  Synthetic construct
AAWDDRLSGYV

SEQ ID NO: 15884 - protein, 12 aa, Artificial Sequence
  Synthetic construct
QSYDSSLSGSWV

SEQ ID NO: 15885 - protein, 8 aa, Artificial Sequence
  Synthetic construct
CSYAGGVV

SEQ ID NO: 15886 - protein, 9 aa, Artificial Sequence
  Synthetic construct
QQANSFPFT

SEQ ID NO: 15887 - protein, 9 aa, Artificial Sequence
  Synthetic construct
QQYGGSPAT

SEQ ID NO: 15888 - protein, 10 aa, Artificial Sequence
  Synthetic construct
FSYAGSNGVL

SEQ ID NO: 15889 - protein, 9 aa, Artificial Sequence
  Synthetic construct
QQLHSYPFT

SEQ ID NO: 15890 - protein, 9 aa, Artificial Sequence
  Synthetic construct
QQYGSSVLT

SEQ ID NO: 15891 - protein, 10 aa, Artificial Sequence
  Synthetic construct
QQYDNLPPYS

SEQ ID NO: 15892 - protein, 10 aa, Artificial Sequence
  Synthetic construct
QQRSNWPPFT

SEQ ID NO: 15893 - protein, 10 aa, Artificial Sequence
  Synthetic construct
QSYDSSNRWV

SEQ ID NO: 15894 - protein, 9 aa, Artificial Sequence
  Synthetic construct
QQYNSYPFT

SEQ ID NO: 15895 - protein, 8 aa, Artificial Sequence
  Synthetic construct
QQRGSWYT

SEQ ID NO: 15896 - protein, 11 aa, Artificial Sequence
  Synthetic construct
HSTDGSGNLWV

SEQ ID NO: 15897 - protein, 9 aa, Artificial Sequence
  Synthetic construct
MQALQTPRT

SEQ ID NO: 15898 - protein, 10 aa, Artificial Sequence
  Synthetic construct
QQYYSTPLFT

SEQ ID NO: 15899 - protein, 9 aa, Artificial Sequence
  Synthetic construct
QQYGRSRWT

SEQ ID NO: 15900 - protein, 9 aa, Artificial Sequence
  Synthetic construct
MQGTHWPPT

SEQ ID NO: 15901 - protein, 10 aa, Artificial Sequence
  Synthetic construct
QAWDSSTLYV

SEQ ID NO: 15902 - protein, 9 aa, Artificial Sequence
  Synthetic construct
QTWGTGIRV

SEQ ID NO: 15903 - protein, 11 aa, Artificial Sequence
  Synthetic construct
QQRSKWPPVLT

SEQ ID NO: 15904 - protein, 11 aa, Artificial Sequence
  Synthetic construct
AAWDDSLNGPV

SEQ ID NO: 15905 - protein, 10 aa, Artificial Sequence
  Synthetic construct
QQYNDWPFWT

SEQ ID NO: 15906 - protein, 9 aa, Artificial Sequence
  Synthetic construct
QQYNDYPWT

SEQ ID NO: 15907 - protein, 9 aa, Artificial Sequence
  Synthetic construct
QQYGTSSFT

SEQ ID NO: 15908 - protein, 9 aa, Artificial Sequence
  Synthetic construct
LLSYSGAAV

SEQ ID NO: 15909 - protein, 9 aa, Artificial Sequence
  Synthetic construct
QLYGSSQLT

SEQ ID NO: 15910 - protein, 11 aa, Artificial Sequence
  Synthetic construct
YSTGTSGYHWV

SEQ ID NO: 15911 - protein, 12 aa, Artificial Sequence
  Synthetic construct
YSTDNSGDHRGV

SEQ ID NO: 15912 - protein, 10 aa, Artificial Sequence
  Synthetic construct
QQYNNWPPYT

SEQ ID NO: 15913 - protein, 11 aa, Artificial Sequence
  Synthetic construct
QSYDSSLIGSV

SEQ ID NO: 15914 - protein, 10 aa, Artificial Sequence
  Synthetic construct
TSYTSSSTVV

SEQ ID NO: 15915 - protein, 9 aa, Artificial Sequence
  Synthetic construct
MQALQTPLT

SEQ ID NO: 15916 - protein, 9 aa, Artificial Sequence
  Synthetic construct
QQYGSSLLT

SEQ ID NO: 15917 - protein, 9 aa, Artificial Sequence
  Synthetic construct
QQYGRSPLT

SEQ ID NO: 15918 - protein, 13 aa, Artificial Sequence
  Synthetic construct
GADHDSGSNFVRV

SEQ ID NO: 15919 - protein, 12 aa, Artificial Sequence
  Synthetic construct
QSYDTNLSGSRV

SEQ ID NO: 15920 - protein, 8 aa, Artificial Sequence
  Synthetic construct
QQYEYWYT

SEQ ID NO: 15921 - protein, 11 aa, Artificial Sequence
  Synthetic construct
QSYDSSLSGYV

SEQ ID NO: 15922 - protein, 9 aa, Artificial Sequence
  Synthetic construct
QAWDSSTVV

SEQ ID NO: 15923 - protein, 9 aa, Artificial Sequence
  Synthetic construct
LLSYSGAAV

SEQ ID NO: 15924 - protein, 11 aa, Artificial Sequence
  Synthetic construct
LSRDRSGNHYV

SEQ ID NO: 15925 - protein, 11 aa, Artificial Sequence
  Synthetic construct
QVWDSSSDHVV

SEQ ID NO: 15926 - protein, 12 aa, Artificial Sequence
  Synthetic construct
QSADSGTTPHVV

SEQ ID NO: 15927 - protein, 9 aa, Artificial Sequence
  Synthetic construct
QQASSFPPT

SEQ ID NO: 15928 - protein, 10 aa, Artificial Sequence
  Synthetic construct
CSYAGPTTWV

SEQ ID NO: 15929 - protein, 10 aa, Artificial Sequence
  Synthetic construct
NSYTITGTWV

SEQ ID NO: 15930 - protein, 10 aa, Artificial Sequence
  Synthetic construct
SSYTSTRTLV

SEQ ID NO: 15931 - protein, 8 aa, Artificial Sequence
  Synthetic construct
QQYHSYST

SEQ ID NO: 15932 - protein, 11 aa, Artificial Sequence
  Synthetic construct
QQRSNWPPVYT

SEQ ID NO: 15933 - protein, 10 aa, Artificial Sequence
  Synthetic construct
YSRDSSGNPL

SEQ ID NO: 15934 - protein, 10 aa, Artificial Sequence
  Synthetic construct
VLYMGSGISV

SEQ ID NO: 15935 - protein, 9 aa, Artificial Sequence
  Synthetic construct
QQATSFPLT

SEQ ID NO: 15936 - protein, 13 aa, Artificial Sequence
  Synthetic construct
GADHGSGSNFFVV

SEQ ID NO: 15937 - protein, 11 aa, Artificial Sequence
  Synthetic construct
YSTDTSGNNWV

SEQ ID NO: 15938 - protein, 9 aa, Artificial Sequence
  Synthetic construct
QQSYSTPYT

SEQ ID NO: 15939 - protein, 11 aa, Artificial Sequence
  Synthetic construct
QSADSSGTYWV

SEQ ID NO: 15940 - protein, 11 aa, Artificial Sequence
  Synthetic construct
GTWDSSLSAYV

SEQ ID NO: 15941 - protein, 10 aa, Artificial Sequence
  Synthetic construct
QSYDNSLKVV

SEQ ID NO: 15942 - protein, 12 aa, Artificial Sequence
  Synthetic construct
YSTDSSDNNRRV

SEQ ID NO: 15943 - protein, 9 aa, Artificial Sequence
  Synthetic construct
RQVLQTPWT

SEQ ID NO: 15944 - protein, 11 aa, Artificial Sequence
  Synthetic construct
AAWDDSLNAVV

SEQ ID NO: 15945 - protein, 9 aa, Artificial Sequence
  Synthetic construct
QQHSSSVWT

SEQ ID NO: 15946 - protein, 9 aa, Artificial Sequence
  Synthetic construct
HQYGSSSFT

SEQ ID NO: 15947 - protein, 8 aa, Artificial Sequence
  Synthetic construct
QQYNSLWT

SEQ ID NO: 15948 - protein, 9 aa, Artificial Sequence
  Synthetic construct
QQYYSTPPT

SEQ ID NO: 15949 - protein, 8 aa, Artificial Sequence
  Synthetic construct
QQGYSTPT

SEQ ID NO: 15950 - protein, 10 aa, Artificial Sequence
  Synthetic construct
MQGTHWPRYT

SEQ ID NO: 15951 - protein, 10 aa, Artificial Sequence
  Synthetic construct
QQYKDWPPNT

SEQ ID NO: 15952 - protein, 10 aa, Artificial Sequence
  Synthetic construct
QQYTNWPPYT

SEQ ID NO: 15953 - protein, 9 aa, Artificial Sequence
  Synthetic construct
QAWDSSTAV

SEQ ID NO: 15954 - protein, 9 aa, Artificial Sequence
  Synthetic construct
QQYYSSPPT

SEQ ID NO: 15955 - protein, 9 aa, Artificial Sequence
  Synthetic construct
QSYDWTDVV

SEQ ID NO: 15956 - protein, 11 aa, Artificial Sequence
  Synthetic construct
AAWDDSLNGVV

SEQ ID NO: 15957 - protein, 11 aa, Artificial Sequence
  Synthetic construct
QVWDSTSDNIV

SEQ ID NO: 15958 - protein, 11 aa, Artificial Sequence
  Synthetic construct
QQRSNWPPRYT

SEQ ID NO: 15959 - protein, 9 aa, Artificial Sequence
  Synthetic construct
QQSYGAPWT

SEQ ID NO: 15960 - protein, 10 aa, Artificial Sequence
  Synthetic construct
FSYTTRGTRV

SEQ ID NO: 15961 - protein, 11 aa, Artificial Sequence
  Synthetic construct
QSYDSSLSVWV

SEQ ID NO: 15962 - protein, 10 aa, Artificial Sequence
  Synthetic construct
CSYAGSSTWV

SEQ ID NO: 15963 - protein, 9 aa, Artificial Sequence
  Synthetic construct
QQYYSAPYT

SEQ ID NO: 15964 - protein, 9 aa, Artificial Sequence
  Synthetic construct
SSYVGSNNL

SEQ ID NO: 15965 - protein, 9 aa, Artificial Sequence
  Synthetic construct
MQPLQTPRT

SEQ ID NO: 15966 - protein, 9 aa, Artificial Sequence
  Synthetic construct
QQLNSYPYT

SEQ ID NO: 15967 - protein, 9 aa, Artificial Sequence
  Synthetic construct
QQYHSYPRT

SEQ ID NO: 15968 - protein, 9 aa, Artificial Sequence
  Synthetic construct
QQYNSYPIT

SEQ ID NO: 15969 - protein, 9 aa, Artificial Sequence
  Synthetic construct
QQYGSSRLT

SEQ ID NO: 15970 - protein, 9 aa, Artificial Sequence
  Synthetic construct
QSYDWTNVV

SEQ ID NO: 15971 - protein, 9 aa, Artificial Sequence
  Synthetic construct
QQLNSYPIT

SEQ ID NO: 15972 - protein, 11 aa, Artificial Sequence
  Synthetic construct
SSYISSSTYVV

SEQ ID NO: 15973 - protein, 10 aa, Artificial Sequence
  Synthetic construct
SSYTSDNTLV

SEQ ID NO: 15974 - protein, 9 aa, Artificial Sequence
  Synthetic construct
QQLNSYPIT

SEQ ID NO: 15975 - protein, 10 aa, Artificial Sequence
  Synthetic construct
SSYTSSSTVV

SEQ ID NO: 15976 - protein, 9 aa, Artificial Sequence
  Synthetic construct
QHRRSWPLT

SEQ ID NO: 15977 - protein, 10 aa, Artificial Sequence
  Synthetic construct
QQYSIWPPYT

SEQ ID NO: 15978 - protein, 10 aa, Artificial Sequence
  Synthetic construct
QQYNNWPPLT

SEQ ID NO: 15979 - protein, 9 aa, Artificial Sequence
  Synthetic construct
QSADSSYVV

SEQ ID NO: 15980 - protein, 10 aa, Artificial Sequence
  Synthetic construct
QQSYSSPPWT

SEQ ID NO: 15981 - protein, 10 aa, Artificial Sequence
  Synthetic construct
ATWDDSLSGV

SEQ ID NO: 15982 - protein, 11 aa, Artificial Sequence
  Synthetic construct
QVWDSSSDHYV

SEQ ID NO: 15983 - protein, 11 aa, Artificial Sequence
  Synthetic construct
QSYDSSLSALV

SEQ ID NO: 15984 - protein, 8 aa, Artificial Sequence
  Synthetic construct
QQYDNLPT

SEQ ID NO: 15985 - protein, 11 aa, Artificial Sequence
  Synthetic construct
QQRSTRPPTWT

SEQ ID NO: 15986 - protein, 9 aa, Artificial Sequence
  Synthetic construct
MQATQFPWT

SEQ ID NO: 15987 - protein, 10 aa, Artificial Sequence
  Synthetic construct
QQYNNWPPLT

SEQ ID NO: 15988 - protein, 10 aa, Artificial Sequence
  Synthetic construct
GSYSRVSTHV

SEQ ID NO: 15989 - protein, 9 aa, Artificial Sequence
  Synthetic construct
MQALQTPLT

SEQ ID NO: 15990 - protein, 9 aa, Artificial Sequence
  Synthetic construct
QKYNIVPPT

SEQ ID NO: 15991 - protein, 9 aa, Artificial Sequence
  Synthetic construct
QQYGSAPRT

SEQ ID NO: 15992 - protein, 9 aa, Artificial Sequence
  Synthetic construct
QQSYNTPPG

SEQ ID NO: 15993 - protein, 10 aa, Artificial Sequence
  Synthetic construct
VLFMGSGIWV

SEQ ID NO: 15994 - protein, 11 aa, Artificial Sequence
  Synthetic construct
QVWDSFSDQAV

SEQ ID NO: 15995 - protein, 9 aa, Artificial Sequence
  Synthetic construct
QQYGSSPWT

SEQ ID NO: 15996 - protein, 10 aa, Artificial Sequence
  Synthetic construct
QQYNNWPLIT

SEQ ID NO: 15997 - protein, 10 aa, Artificial Sequence
  Synthetic construct
SSYTSSGTRV

SEQ ID NO: 15998 - protein, 9 aa, Artificial Sequence
  Synthetic construct
QSADSSGVV

SEQ ID NO: 15999 - protein, 11 aa, Artificial Sequence
  Synthetic construct
SSYAGTYNFVV

SEQ ID NO: 16000 - protein, 9 aa, Artificial Sequence
  Synthetic construct
QQYSNWPLT

SEQ ID NO: 16001 - protein, 11 aa, Artificial Sequence
  Synthetic construct
YSTDNSGNGRV

SEQ ID NO: 16002 - protein, 9 aa, Artificial Sequence
  Synthetic construct
QQRNNWPLT

SEQ ID NO: 16003 - protein, 9 aa, Artificial Sequence
  Synthetic construct
CSYAGSYVV

SEQ ID NO: 16004 - protein, 9 aa, Artificial Sequence
  Synthetic construct
QQYNNWPLT

SEQ ID NO: 16005 - protein, 10 aa, Artificial Sequence
  Synthetic construct
QHYNNWPPYT

SEQ ID NO: 16006 - protein, 9 aa, Artificial Sequence
  Synthetic construct
QQYNSYPRT

SEQ ID NO: 16007 - protein, 10 aa, Artificial Sequence
  Synthetic construct
YSTDSSGNPL

SEQ ID NO: 16008 - protein, 12 aa, Artificial Sequence
  Synthetic construct
NSRDSSGNHYVV

SEQ ID NO: 16009 - protein, 9 aa, Artificial Sequence
  Synthetic construct
QKYNSAPPT

SEQ ID NO: 16010 - protein, 10 aa, Artificial Sequence
  Synthetic construct
CSYAGFSTWV

SEQ ID NO: 16011 - protein, 10 aa, Artificial Sequence [sequence omitted]

SEQ ID NO: 16012 - protein, 9 aa, Artificial Sequence
  Synthetic construct
MQATQFPHT

SEQ ID NO: 16013 - protein, 9 aa, Artificial Sequence
  Synthetic construct
MQSIQLPYT

SEQ ID NO: 16014 - protein, 9 aa, Artificial Sequence
  Synthetic construct
MQSIQLPYT

SEQ ID NO: 16015 - protein, 9 aa, Artificial Sequence
  Synthetic construct
QQYGSSPWT

SEQ ID NO: 16016 - protein, 8 aa, Artificial Sequence
  Synthetic construct
QQYNNWLT

SEQ ID NO: 16017 - protein, 10 aa, Artificial Sequence
  Synthetic construct
SSYTSSSTLV

SEQ ID NO: 16018 - protein, 10 aa, Artificial Sequence
  Synthetic construct
QQYGGSTGYT

SEQ ID NO: 16019 - protein, 10 aa, Artificial Sequence
  Synthetic construct
HQYGYSLPNT

SEQ ID NO: 16020 - protein, 9 aa, Artificial Sequence
  Synthetic construct
MQALQTPIT

SEQ ID NO: 16021 - protein, 9 aa, Artificial Sequence
  Synthetic construct
CSYAGSSPV

SEQ ID NO: 16022 - protein, 8 aa, Artificial Sequence
  Synthetic construct
QQRGSWYT

SEQ ID NO: 16023 - protein, 8 aa, Artificial Sequence
  Synthetic construct
QQYYTTVT

SEQ ID NO: 16024 - protein, 9 aa, Artificial Sequence
  Synthetic construct
QAWGSSTAV

SEQ ID NO: 16025 - protein, 9 aa, Artificial Sequence
  Synthetic construct
QQRSNWPPT

SEQ ID NO: 16026 - protein, 10 aa, Artificial Sequence
  Synthetic construct
QQLNSYPEIT

SEQ ID NO: 16027 - protein, 9 aa, Artificial Sequence
  Synthetic construct
MQALQTPYT

SEQ ID NO: 16028 - protein, 9 aa, Artificial Sequence
  Synthetic construct
QQYNDWPGT

SEQ ID NO: 16029 - protein, 9 aa, Artificial Sequence
  Synthetic construct
QQYGSSPGT

SEQ ID NO: 16030 - protein, 9 aa, Artificial Sequence
  Synthetic construct
QQSYSTPLT

SEQ ID NO: 16031 - protein, 10 aa, Artificial Sequence
  Synthetic construct
QAWDTSTFYV

SEQ ID NO: 16032 - protein, 9 aa, Artificial Sequence
  Synthetic construct
QQYYSAPRT

SEQ ID NO: 16033 - protein, 10 aa, Artificial Sequence
  Synthetic construct
FSYTSGGTRV

SEQ ID NO: 16034 - protein, 9 aa, Artificial Sequence
  Synthetic construct
QHYDNLPPT

SEQ ID NO: 16035 - protein, 9 aa, Artificial Sequence
  Synthetic construct
QHYHNWPSM

SEQ ID NO: 16036 - protein, 11 aa, Artificial Sequence
  Synthetic construct
QSYDSSLSGVL

SEQ ID NO: 16037 - protein, 9 aa, Artificial Sequence
  Synthetic construct
MQALQTPIT

SEQ ID NO: 16038 - protein, 9 aa, Artificial Sequence
  Synthetic construct
QKYNSAPLT

SEQ ID NO: 16039 - protein, 10 aa, Artificial Sequence
  Synthetic construct
CSYAGSRTWV

SEQ ID NO: 16040 - protein, 8 aa, Artificial Sequence
  Synthetic construct
QQYDNWLT

SEQ ID NO: 16041 - protein, 8 aa, Artificial Sequence
  Synthetic construct
QHYDDLPR

SEQ ID NO: 16042 - protein, 9 aa, Artificial Sequence
  Synthetic construct
QQYYSTPYT

SEQ ID NO: 16043 - protein, 9 aa, Artificial Sequence
  Synthetic construct
QAWDSSTAV

SEQ ID NO: 16044 - protein, 12 aa, Artificial Sequence
  Synthetic construct
CSYARRSSPYVV

SEQ ID NO: 16045 - protein, 9 aa, Artificial Sequence
  Synthetic construct
QQYNSYPLS

SEQ ID NO: 16046 - protein, 10 aa, Artificial Sequence
  Synthetic construct
CSYAGSSTWV

SEQ ID NO: 16047 - protein, 10 aa, Artificial Sequence
  Synthetic construct
CSYAGSSTWV

SEQ ID NO: 16048 - protein, 9 aa, Artificial Sequence
  Synthetic construct
QAWDSSTVV

SEQ ID NO: 16049 - protein, 9 aa, Artificial Sequence
  Synthetic construct
MQATQFPWT

SEQ ID NO: 16050 - protein, 11 aa, Artificial Sequence
  Synthetic construct
GTWDSSLSAWV

SEQ ID NO: 16051 - protein, 9 aa, Artificial Sequence
  Synthetic construct
QQYDNLPLT

SEQ ID NO: 16052 - protein, 11 aa, Artificial Sequence
  Synthetic construct
AAWDDSLNGPV

SEQ ID NO: 16053 - protein, 9 aa, Artificial Sequence
  Synthetic construct
MHAVHAPYT

SEQ ID NO: 16054 - protein, 10 aa, Artificial Sequence
  Synthetic construct
NSYTITGTWV

SEQ ID NO: 16055 - protein, 10 aa, Artificial Sequence
  Synthetic construct
SSYTSSATRV

SEQ ID NO: 16056 - protein, 10 aa, Artificial Sequence
  Synthetic construct
SSYTSSSTLV

SEQ ID NO: 16057 - protein, 11 aa, Artificial Sequence
  Synthetic construct
QHRSNWPPVLT

SEQ ID NO: 16058 - protein, 11 aa, Artificial Sequence
  Synthetic construct
NSRDSSGNHFV

SEQ ID NO: 16059 - protein, 11 aa, Artificial Sequence
  Synthetic construct
QQRSNWPPIFT

SEQ ID NO: 16060 - protein, 10 aa, Artificial Sequence
  Synthetic construct
FSYTSRGTRV

SEQ ID NO: 16061 - protein, 8 aa, Artificial Sequence
  Synthetic construct
QQYYDSPH

SEQ ID NO: 16062 - protein, 10 aa, Artificial Sequence
  Synthetic construct
YSTDSSGKGV

SEQ ID NO: 16063 - protein, 11 aa, Artificial Sequence
  Synthetic construct
QSYDSSLSGAV

SEQ ID NO: 16064 - protein, 8 aa, Artificial Sequence
  Synthetic construct
QVWDSGVL

SEQ ID NO: 16065 - protein, 10 aa, Artificial Sequence
  Synthetic construct
QQYGSSPPIT

SEQ ID NO: 16066 - protein, 11 aa, Artificial Sequence
  Synthetic construct
QSYDSSLTALV

SEQ ID NO: 16067 - protein, 12 aa, Artificial Sequence
  Synthetic construct
GSWDTSLSSGQA

SEQ ID NO: 16068 - protein, 10 aa, Artificial Sequence
  Synthetic construct
MQALQTPRYT

SEQ ID NO: 16069 - protein, 8 aa, Artificial Sequence
  Synthetic construct
CSYTETWV

SEQ ID NO: 16070 - protein, 9 aa, Artificial Sequence
  Synthetic construct
QQYYSTPET

SEQ ID NO: 16071 - protein, 10 aa, Artificial Sequence
  Synthetic construct
FSYAGSDGVL

SEQ ID NO: 16072 - protein, 11 aa, Artificial Sequence
  Synthetic construct
QSWDNSLSGSV

SEQ ID NO: 16073 - protein, 12 aa, Artificial Sequence
  Synthetic construct
QSYDNSLSGPVV

SEQ ID NO: 16074 - protein, 11 aa, Artificial Sequence
  Synthetic construct
YSTDSSGNLWV

SEQ ID NO: 16075 - protein, 8 aa, Artificial Sequence
  Synthetic construct
QQYNSYWT

SEQ ID NO: 16076 - protein, 11 aa, Artificial Sequence
  Synthetic construct
QSYDSSLSGVV

SEQ ID NO: 16077 - protein, 12 aa, Artificial Sequence
  Synthetic construct
SSYAGSNNFYVV

SEQ ID NO: 16078 - protein, 11 aa, Artificial Sequence
  Synthetic construct
QQRSNWPPRIT

SEQ ID NO: 16079 - protein, 9 aa, Artificial Sequence
  Synthetic construct
QHRVSWPWA

SEQ ID NO: 16080 - protein, 10 aa, Artificial Sequence
  Synthetic construct
SSYTSISTVV

SEQ ID NO: 16081 - protein, 10 aa, Artificial Sequence
  Synthetic construct
QQYGSSTGYT

SEQ ID NO: 16082 - protein, 12 aa, Artificial Sequence
  Synthetic construct
AAWDDSLNGNWV

SEQ ID NO: 16083 - protein, 9 aa, Artificial Sequence
  Synthetic construct
CSYAGSYTV

SEQ ID NO: 16084 - protein, 10 aa, Artificial Sequence
  Synthetic construct
FSYRGRGTRV

SEQ ID NO: 16085 - protein, 9 aa, Artificial Sequence
  Synthetic construct
QAWDSSTVV

SEQ ID NO: 16086 - protein, 9 aa, Artificial Sequence
  Synthetic construct
QQYNNWPYT

SEQ ID NO: 16087 - protein, 10 aa, Artificial Sequence
  Synthetic construct
SSYTSSSTVV

SEQ ID NO: 16088 - protein, 9 aa, Artificial Sequence
  Synthetic construct
QAWDSSTYV

SEQ ID NO: 16089 - protein, 9 aa, Artificial Sequence
  Synthetic construct
QQLKSYPRT

SEQ ID NO: 16090 - protein, 9 aa, Artificial Sequence
  Synthetic construct
QQYNNWPRT

SEQ ID NO: 16091 - protein, 9 aa, Artificial Sequence
  Synthetic construct
SSYTSNSVV

SEQ ID NO: 16092 - protein, 8 aa, Artificial Sequence
  Synthetic construct
QQYGSSPT

SEQ ID NO: 16093 - protein, 11 aa, Artificial Sequence
  Synthetic construct
QSYDNSLGGKV

SEQ ID NO: 16094 - protein, 8 aa, Artificial Sequence
  Synthetic construct
HQYGGSRT

SEQ ID NO: 16095 - protein, 9 aa, Artificial Sequence
  Synthetic construct
QQLSSYPVT

SEQ ID NO: 16096 - protein, 10 aa, Artificial Sequence
  Synthetic construct
QQRSNWPPFT

SEQ ID NO: 16097 - protein, 11 aa, Artificial Sequence
  Synthetic construct
AAWDDSLNGWV

SEQ ID NO: 16098 - protein, 9 aa, Artificial Sequence
  Synthetic construct
MQSIQLPYT

SEQ ID NO: 16099 - protein, 11 aa, Artificial Sequence
  Synthetic construct
AAWDDSLNGWV

SEQ ID NO: 16100 - protein, 11 aa, Artificial Sequence
  Synthetic construct
YSADSSANQGV

SEQ ID NO: 16101 - protein, 9 aa, Artificial Sequence
  Synthetic construct
QQSYSTPPT

SEQ ID NO: 16102 - protein, 9 aa, Artificial Sequence
  Synthetic construct
LLSYSGAGV

SEQ ID NO: 16103 - protein, 9 aa, Artificial Sequence
  Synthetic construct
QQYNNWPRT

SEQ ID NO: 16104 - protein, 8 aa, Artificial Sequence
  Synthetic construct
QQYNYWPT

SEQ ID NO: 16105 - protein, 9 aa, Artificial Sequence
  Synthetic construct
QQYGTSPLT

SEQ ID NO: 16106 - protein, 11 aa, Artificial Sequence
  Synthetic construct
GTWDSSLSAGV

SEQ ID NO: 16107 - protein, 9 aa, Artificial Sequence
  Synthetic construct
QQSYSTPQT

SEQ ID NO: 16108 - protein, 12 aa, Artificial Sequence
  Synthetic construct
AAWDDSLSGFWV

SEQ ID NO: 16109 - protein, 9 aa, Artificial Sequence
  Synthetic construct
HQYGSSRLT

SEQ ID NO: 16110 - protein, 11 aa, Artificial Sequence
  Synthetic construct
QVWESNTDHLI

SEQ ID NO: 16111 - protein, 9 aa, Artificial Sequence
  Synthetic construct
QQYYSAPFT

SEQ ID NO: 16112 - protein, 10 aa, Artificial Sequence
  Synthetic construct
CSYAGTYTWV

SEQ ID NO: 16113 - protein, 10 aa, Artificial Sequence
  Synthetic construct
ASYTSSNPVI

SEQ ID NO: 16114 - protein, 10 aa, Artificial Sequence
  Synthetic construct
YSTDSSGKGV

SEQ ID NO: 16115 - protein, 8 aa, Artificial Sequence
  Synthetic construct
QAWDNSVV

SEQ ID NO: 16116 - protein, 11 aa, Artificial Sequence
  Synthetic construct
QVWDSSSDFWV

SEQ ID NO: 16117 - protein, 9 aa, Artificial Sequence
  Synthetic construct
YSAADNNQV

SEQ ID NO: 16118 - protein, 11 aa, Artificial Sequence
  Synthetic construct
QVWDSSSDHQV

SEQ ID NO: 16119 - protein, 9 aa, Artificial Sequence
  Synthetic construct
QQSHGFPYT

SEQ ID NO: 16120 - protein, 9 aa, Artificial Sequence
  Synthetic construct
QAWDSSTVV

SEQ ID NO: 16121 - protein, 7 aa, Artificial Sequence
  Synthetic construct
QQYNTWT

SEQ ID NO: 16122 - protein, 11 aa, Artificial Sequence
  Synthetic construct
QSADSSGTYGV

SEQ ID NO: 16123 - protein, 10 aa, Artificial Sequence
  Synthetic construct
QQYGGTPPWA

SEQ ID NO: 16124 - protein, 9 aa, Artificial Sequence
  Synthetic construct
QQYYSSPRT

SEQ ID NO: 16125 - protein, 11 aa, Artificial Sequence
  Synthetic construct
YSRDSSANHWV

SEQ ID NO: 16126 - protein, 9 aa, Artificial Sequence
  Synthetic construct
QQYNSYPYT

SEQ ID NO: 16127 - protein, 12 aa, Artificial Sequence
  Synthetic construct
YSTDSSDNHRRV

SEQ ID NO: 16128 - protein, 8 aa, Artificial Sequence
  Synthetic construct
QQYNNWWT

SEQ ID NO: 16129 - protein, 10 aa, Artificial Sequence
  Synthetic construct
YSPDSSGNPP

SEQ ID NO: 16130 - protein, 9 aa, Artificial Sequence
  Synthetic construct
MQASQFPYT

SEQ ID NO: 16131 - protein, 9 aa, Artificial Sequence
  Synthetic construct
QQGYGSPLT

SEQ ID NO: 16132 - protein, 10 aa, Artificial Sequence
  Synthetic construct
GTWDSSLSGV

SEQ ID NO: 16133 - protein, 10 aa, Artificial Sequence
  Synthetic construct
QQRSNWPPFT

SEQ ID NO: 16134 - protein, 10 aa, Artificial Sequence
  Synthetic construct
SSYSSSSTLV

SEQ ID NO: 16135 - protein, 8 aa, Artificial Sequence
  Synthetic construct
MQSIQLIT

SEQ ID NO: 16136 - protein, 8 aa, Artificial Sequence
  Synthetic construct
QQSYSTLA

SEQ ID NO: 16137 - protein, 9 aa, Artificial Sequence
  Synthetic construct
LQTIQLPYT

SEQ ID NO: 16138 - protein, 9 aa, Artificial Sequence
  Synthetic construct
QQSHSTPRT

SEQ ID NO: 16139 - protein, 8 aa, Artificial Sequence
  Synthetic construct
QHYDDLPR

SEQ ID NO: 16140 - protein, 9 aa, Artificial Sequence
  Synthetic construct
QQYNSYPWT

SEQ ID NO: 16141 - protein, 10 aa, Artificial Sequence
  Synthetic construct
QKYNSDPPLT

SEQ ID NO: 16142 - protein, 9 aa, Artificial Sequence
  Synthetic construct
QQYNSYPYT

SEQ ID NO: 16143 - protein, 9 aa, Artificial Sequence
  Synthetic construct
LQDNNFPLT

SEQ ID NO: 16144 - protein, 9 aa, Artificial Sequence
  Synthetic construct
QQLSSYPVT

SEQ ID NO: 16145 - protein, 9 aa, Artificial Sequence
  Synthetic construct
QQYGSSSIT

SEQ ID NO: 16146 - protein, 9 aa, Artificial Sequence
  Synthetic construct
QQRTNWPIT

SEQ ID NO: 16147 - protein, 11 aa, Artificial Sequence
  Synthetic construct
AAWDDSLNGPV

SEQ ID NO: 16148 - protein, 8 aa, Artificial Sequence
  Synthetic construct
QHYDNLPR

SEQ ID NO: 16149 - protein, 9 aa, Artificial Sequence
  Synthetic construct
QAWDSNTVV

SEQ ID NO: 16150 - protein, 11 aa, Artificial Sequence
  Synthetic construct
QKYHTAPPGGT

SEQ ID NO: 16151 - protein, 11 aa, Artificial Sequence
  Synthetic construct
GTWDSSLSPGI

SEQ ID NO: 16152 - protein, 9 aa, Artificial Sequence
  Synthetic construct
QQYDNLPYT

SEQ ID NO: 16153 - protein, 9 aa, Artificial Sequence
  Synthetic construct
QQYDNWPKT

SEQ ID NO: 16154 - protein, 10 aa, Artificial Sequence
  Synthetic construct
QQRSDWPPFT

SEQ ID NO: 16155 - protein, 8 aa, Artificial Sequence
  Synthetic construct
QQANSFPL

SEQ ID NO: 16156 - protein, 9 aa, Artificial Sequence
  Synthetic construct
QSYDSSLQV

SEQ ID NO: 16157 - protein, 10 aa, Artificial Sequence
  Synthetic construct
QQRSNWPPFT

SEQ ID NO: 16158 - protein, 9 aa, Artificial Sequence
  Synthetic construct
QAWDSSTWV

SEQ ID NO: 16159 - protein, 9 aa, Artificial Sequence
  Synthetic construct
QKYNSAPLT

SEQ ID NO: 16160 - protein, 10 aa, Artificial Sequence
  Synthetic construct
QQSYSTPRLT

SEQ ID NO: 16161 - protein, 10 aa, Artificial Sequence
  Synthetic construct
CSYAGSFKGI

SEQ ID NO: 16162 - protein, 7 aa, Artificial Sequence
  Synthetic construct
QQYYTWT

SEQ ID NO: 16163 - protein, 11 aa, Artificial Sequence
  Synthetic construct
YSTDSSGNHRV

SEQ ID NO: 16164 - protein, 8 aa, Artificial Sequence
  Synthetic construct
QQYNSYWT

SEQ ID NO: 16165 - protein, 9 aa, Artificial Sequence
  Synthetic construct
QQANTFPLT

SEQ ID NO: 16166 - protein, 10 aa, Artificial Sequence
  Synthetic construct
QQRSNWPPFT

SEQ ID NO: 16167 - protein, 9 aa, Artificial Sequence
  Synthetic construct
QQYNYYPHT

SEQ ID NO: 16168 - protein, 10 aa, Artificial Sequence
  Synthetic construct
SSYAGSSTWV

SEQ ID NO: 16169 - protein, 11 aa, Artificial Sequence
  Synthetic construct
QQYNNWPPLFT

SEQ ID NO: 16170 - protein, 9 aa, Artificial Sequence
  Synthetic construct
QQAHTFPPT

SEQ ID NO: 16171 - protein, 10 aa, Artificial Sequence
  Synthetic construct
SSYTNTITWV

SEQ ID NO: 16172 - protein, 10 aa, Artificial Sequence
  Synthetic construct
QQYDSLPPVT

SEQ ID NO: 16173 - protein, 10 aa, Artificial Sequence
  Synthetic construct
QQYYRSPPWT

SEQ ID NO: 16174 - protein, 10 aa, Artificial Sequence
  Synthetic construct
SSYTSSFTYV

SEQ ID NO: 16175 - protein, 9 aa, Artificial Sequence
  Synthetic construct
QQYGYSLYT

SEQ ID NO: 16176 - protein, 10 aa, Artificial Sequence
  Synthetic construct
QQLNSYPPFT

SEQ ID NO: 16177 - protein, 11 aa, Artificial Sequence
  Synthetic construct
QQRSTAPPTWT

SEQ ID NO: 16178 - protein, 11 aa, Artificial Sequence
  Synthetic construct
QSYDSSLSGNV

SEQ ID NO: 16179 - protein, 10 aa, Artificial Sequence
  Synthetic construct
LSYTSRGTRV

SEQ ID NO: 16180 - protein, 11 aa, Artificial Sequence
  Synthetic construct
GTWDSSLSVVV

SEQ ID NO: 16181 - protein, 9 aa, Artificial Sequence
  Synthetic construct
QQYYTLPIT

SEQ ID NO: 16182 - protein, 9 aa, Artificial Sequence
  Synthetic construct
QQYGSSPRT

SEQ ID NO: 16183 - protein, 9 aa, Artificial Sequence
  Synthetic construct
LQYDNLPRT

SEQ ID NO: 16184 - protein, 9 aa, Artificial Sequence
  Synthetic construct
QQYYSTPLT

SEQ ID NO: 16185 - protein, 12 aa, Artificial Sequence
  Synthetic construct
YSTDNSGNHRGV

SEQ ID NO: 16186 - protein, 9 aa, Artificial Sequence
  Synthetic construct
MQALQTPWT

SEQ ID NO: 16187 - protein, 9 aa, Artificial Sequence
  Synthetic construct
QQANSFPWT

SEQ ID NO: 16188 - protein, 11 aa, Artificial Sequence
  Synthetic construct
QSYDSSLNDYV

SEQ ID NO: 16189 - protein, 9 aa, Artificial Sequence
  Synthetic construct
MQGTHWPPA

SEQ ID NO: 16190 - protein, 11 aa, Artificial Sequence
  Synthetic construct
QSYDSSLSGAV

SEQ ID NO: 16191 - protein, 10 aa, Artificial Sequence
  Synthetic construct
LQYNYYPLVT

SEQ ID NO: 16192 - protein, 10 aa, Artificial Sequence
  Synthetic construct
QQYGTSPGYT

SEQ ID NO: 16193 - protein, 10 aa, Artificial Sequence
  Synthetic construct
QQSYTAPGYT

SEQ ID NO: 16194 - protein, 9 aa, Artificial Sequence
  Synthetic construct
QQYNNWPLT

SEQ ID NO: 16195 - protein, 9 aa, Artificial Sequence
  Synthetic construct
QQSYGTPWT

SEQ ID NO: 16196 - protein, 10 aa, Artificial Sequence
  Synthetic construct
SSFTSGSTYV

SEQ ID NO: 16197 - protein, 10 aa, Artificial Sequence
  Synthetic construct
FSYTSRGTRV

SEQ ID NO: 16198 - protein, 12 aa, Artificial Sequence
  Synthetic construct
VLFMGRGGDIVV

SEQ ID NO: 16199 - protein, 10 aa, Artificial Sequence
  Synthetic construct
LQYNSYPLVT

SEQ ID NO: 16200 - protein, 11 aa, Artificial Sequence
  Synthetic construct
QHYGSSPPLYT

SEQ ID NO: 16201 - protein, 9 aa, Artificial Sequence
  Synthetic construct
QKYNSAPFT

SEQ ID NO: 16202 - protein, 10 aa, Artificial Sequence
  Synthetic construct
QQRSNWRRLT

SEQ ID NO: 16203 - protein, 9 aa, Artificial Sequence
  Synthetic construct
QQYYSSPPT

SEQ ID NO: 16204 - protein, 9 aa, Artificial Sequence
  Synthetic construct
QKYNSAPFT

SEQ ID NO: 16205 - protein, 9 aa, Artificial Sequence
  Synthetic construct
QQNYNAPWT

SEQ ID NO: 16206 - protein, 9 aa, Artificial Sequence
  Synthetic construct
SSYAGSSLV

SEQ ID NO: 16207 - protein, 11 aa, Artificial Sequence
  Synthetic construct
GTWDSSLSAVV

SEQ ID NO: 16208 - protein, 11 aa, Artificial Sequence
  Synthetic construct
QHRSNWPPALT

SEQ ID NO: 16209 - protein, 9 aa, Artificial Sequence
  Synthetic construct
QQYNSYSRT

SEQ ID NO: 16210 - protein, 10 aa, Artificial Sequence
  Synthetic construct
QQYYNWPFWT

SEQ ID NO: 16211 - protein, 9 aa, Artificial Sequence
  Synthetic construct
MQATQFPLT

SEQ ID NO: 16212 - protein, 11 aa, Artificial Sequence
  Synthetic construct
QSVDSSGSNWV

SEQ ID NO: 16213 - protein, 8 aa, Artificial Sequence
  Synthetic construct
CSYAGTVL

SEQ ID NO: 16214 - protein, 9 aa, Artificial Sequence
  Synthetic construct
SSYTTSSVV

SEQ ID NO: 16215 - protein, 9 aa, Artificial Sequence
  Synthetic construct
QKYDDWPPT

SEQ ID NO: 16216 - protein, 12 aa, Artificial Sequence
  Synthetic construct
AAWDDSLNGCYV

SEQ ID NO: 16217 - protein, 9 aa, Artificial Sequence
  Synthetic construct
LLYYGGAWV

SEQ ID NO: 16218 - protein, 11 aa, Artificial Sequence
  Synthetic construct
YSTDSSGKGYV

SEQ ID NO: 16219 - protein, 11 aa, Artificial Sequence
  Synthetic construct
ATWDDSLSGWV

SEQ ID NO: 16220 - protein, 9 aa, Artificial Sequence
  Synthetic construct
QQYKSYPIT

SEQ ID NO: 16221 - protein, 10 aa, Artificial Sequence
  Synthetic construct
SSYTSSSTWV

SEQ ID NO: 16222 - protein, 9 aa, Artificial Sequence
  Synthetic construct
QRYSSAPRT

SEQ ID NO: 16223 - protein, 10 aa, Artificial Sequence
  Synthetic construct
QQSYSTRALT

SEQ ID NO: 16224 - protein, 11 aa, Artificial Sequence
  Synthetic construct
NSRDSSDIPWV

SEQ ID NO: 16225 - protein, 5 aa, Artificial Sequence
  Synthetic construct
MHPYT

SEQ ID NO: 16226 - protein, 9 aa, Artificial Sequence
  Synthetic construct
QQSYSTPHS

SEQ ID NO: 16227 - protein, 10 aa, Artificial Sequence
  Synthetic construct
QQRSNWPPFT

SEQ ID NO: 16228 - protein, 12 aa, Artificial Sequence
  Synthetic construct
QSYDNSLSVPYV

SEQ ID NO: 16229 - protein, 9 aa, Artificial Sequence
  Synthetic construct
QQYYSTPRT

SEQ ID NO: 16230 - protein, 10 aa, Artificial Sequence
  Synthetic construct
SSYTSISTVI

SEQ ID NO: 16231 - protein, 11 aa, Artificial Sequence
  Synthetic construct
GTWDSSLSAVV

SEQ ID NO: 16232 - protein, 8 aa, Artificial Sequence
  Synthetic construct
QQSYSTYT

SEQ ID NO: 16233 - protein, 9 aa, Artificial Sequence
  Synthetic construct
QQYNSYPYT

SEQ ID NO: 16234 - protein, 9 aa, Artificial Sequence
  Synthetic construct
QQYGSSPLT

SEQ ID NO: 16235 - protein, 10 aa, Artificial Sequence
  Synthetic construct
QRYGGSPRFT

SEQ ID NO: 16236 - protein, 8 aa, Artificial Sequence
  Synthetic construct
QAWDSSVV

SEQ ID NO: 16237 - protein, 9 aa, Artificial Sequence
  Synthetic construct
QQSYSTPYT

SEQ ID NO: 16238 - protein, 6 aa, Artificial Sequence
  Synthetic construct
QQRSNS

SEQ ID NO: 16239 - protein, 9 aa, Artificial Sequence
  Synthetic construct
QQYDNLPFT

SEQ ID NO: 16240 - protein, 10 aa, Artificial Sequence
  Synthetic construct
CSYAGSSTWV

SEQ ID NO: 16241 - protein, 10 aa, Artificial Sequence
  Synthetic construct
FSYAGSSPWL

SEQ ID NO: 16242 - protein, 11 aa, Artificial Sequence
  Synthetic construct
QSADSSATYVV

SEQ ID NO: 16243 - protein, 9 aa, Artificial Sequence
  Synthetic construct
LQHNSYPPT

SEQ ID NO: 16244 - protein, 10 aa, Artificial Sequence
  Synthetic construct
QQLNSYPALT

SEQ ID NO: 16245 - protein, 9 aa, Artificial Sequence
  Synthetic construct
QQYDNLPWT

SEQ ID NO: 16246 - protein, 9 aa, Artificial Sequence
  Synthetic construct
QQYSDSPLT

SEQ ID NO: 16247 - protein, 9 aa, Artificial Sequence
  Synthetic construct
QQYNSYPYT

SEQ ID NO: 16248 - protein, 9 aa, Artificial Sequence
  Synthetic construct
MIWHSSAWV

SEQ ID NO: 16249 - protein, 10 aa, Artificial Sequence
  Synthetic construct
QQYGSSPVYS

SEQ ID NO: 16250 - protein, 8 aa, Artificial Sequence
  Synthetic construct
MQALQTRT

SEQ ID NO: 16251 - protein, 9 aa, Artificial Sequence
  Synthetic construct
QQYYSIPHT

SEQ ID NO: 16252 - protein, 10 aa, Artificial Sequence
  Synthetic construct
CSYAYSSTFV

SEQ ID NO: 16253 - protein, 11 aa, Artificial Sequence
  Synthetic construct
QQRRNWPPRYT

SEQ ID NO: 16254 - protein, 10 aa, Artificial Sequence
  Synthetic construct
MQGTHWPPWT

SEQ ID NO: 16255 - protein, 10 aa, Artificial Sequence
  Synthetic construct
SSFISDNTLV

SEQ ID NO: 16256 - protein, 9 aa, Artificial Sequence
  Synthetic construct
QQSFNTPWT

SEQ ID NO: 16257 - protein, 10 aa, Artificial Sequence
  Synthetic construct
SSYTSSNTYV

SEQ ID NO: 16258 - protein, 9 aa, Artificial Sequence
  Synthetic construct
QQSYSTPQT

SEQ ID NO: 16259 - protein, 9 aa, Artificial Sequence
  Synthetic construct
QQANSFPWT

SEQ ID NO: 16260 - protein, 11 aa, Artificial Sequence
  Synthetic construct
ISYTSSSTQVV

SEQ ID NO: 16261 - protein, 9 aa, Artificial Sequence
  Synthetic construct
QQYNSYPWT

SEQ ID NO: 16262 - protein, 9 aa, Artificial Sequence
  Synthetic construct
MQALQTPPA

SEQ ID NO: 16263 - protein, 11 aa, Artificial Sequence
  Synthetic construct
QVWDRSNDQGV

SEQ ID NO: 16264 - protein, 10 aa, Artificial Sequence
  Synthetic construct
QHYDYPIVFT

SEQ ID NO: 16265 - protein, 10 aa, Artificial Sequence
  Synthetic construct
SSYTSSSTYV

SEQ ID NO: 16266 - protein, 9 aa, Artificial Sequence
  Synthetic construct
QQYDAFPLT

SEQ ID NO: 16267 - protein, 8 aa, Artificial Sequence
  Synthetic construct
QQYNNWWT

SEQ ID NO: 16268 - protein, 10 aa, Artificial Sequence
  Synthetic construct
LLSYSDTRRL

SEQ ID NO: 16269 - protein, 12 aa, Artificial Sequence
  Synthetic construct
GTWDSSLSPYWV

SEQ ID NO: 16270 - protein, 10 aa, Artificial Sequence
  Synthetic construct
QQLNSYPMYT

SEQ ID NO: 16271 - protein, 11 aa, Artificial Sequence
  Synthetic construct
AAWDDSLSGYV

SEQ ID NO: 16272 - protein, 8 aa, Artificial Sequence
  Synthetic construct
QAWDSSVV

SEQ ID NO: 16273 - protein, 9 aa, Artificial Sequence
  Synthetic construct
QQHNKWPLT

SEQ ID NO: 16274 - protein, 9 aa, Artificial Sequence
  Synthetic construct
QAWDSSTVV

SEQ ID NO: 16275 - protein, 8 aa, Artificial Sequence
  Synthetic construct
FSYVGAYL

SEQ ID NO: 16276 - protein, 11 aa, Artificial Sequence
  Synthetic construct
ATWDDSLSGWV

SEQ ID NO: 16277 - protein, 11 aa, Artificial Sequence
  Synthetic construct
QSTDSSGPYWV

SEQ ID NO: 16278 - protein, 10 aa, Artificial Sequence
  Synthetic construct
QQSYSTPPYT

SEQ ID NO: 16279 - protein, 9 aa, Artificial Sequence
  Synthetic construct
QKYNSAPLT

SEQ ID NO: 16280 - protein, 9 aa, Artificial Sequence
  Synthetic construct
HQSSSLPLT

SEQ ID NO: 16281 - protein, 9 aa, Artificial Sequence
  Synthetic construct
QQYYSTPPT

SEQ ID NO: 16282 - protein, 11 aa, Artificial Sequence
  Synthetic construct
QSRSASGSHLV

SEQ ID NO: 16283 - protein, 9 aa, Artificial Sequence
  Synthetic construct
HQYYSIPYT

SEQ ID NO: 16284 - protein, 9 aa, Artificial Sequence
  Synthetic construct
MQGTHWPPA

SEQ ID NO: 16285 - protein, 10 aa, Artificial Sequence
  Synthetic construct
QQLNSYPPAT

SEQ ID NO: 16286 - protein, 11 aa, Artificial Sequence
  Synthetic construct
AAWDDSLNGWV

SEQ ID NO: 16287 - protein, 8 aa, Artificial Sequence
  Synthetic construct
QQYGSSPT

SEQ ID NO: 16288 - protein, 9 aa, Artificial Sequence
  Synthetic construct
QKYDDWPPT

SEQ ID NO: 16289 - protein, 9 aa, Artificial Sequence
  Synthetic construct
MQALQTPWT

SEQ ID NO: 16290 - protein, 11 aa, Artificial Sequence
  Synthetic construct
ASYDDNLKGWV

SEQ ID NO: 16291 - protein, 9 aa, Artificial Sequence
  Synthetic construct
MQSIQPPFT

SEQ ID NO: 16292 - protein, 9 aa, Artificial Sequence
  Synthetic construct
QQYGSSPWT

SEQ ID NO: 16293 - protein, 10 aa, Artificial Sequence
  Synthetic construct
YSRDSSANPL

SEQ ID NO: 16294 - protein, 11 aa, Artificial Sequence
  Synthetic construct
LVWDGSLSGWV

SEQ ID NO: 16295 - protein, 9 aa, Artificial Sequence
  Synthetic construct
QQYDNVPYT

SEQ ID NO: 16296 - protein, 9 aa, Artificial Sequence
  Synthetic construct
QQYSTYSKT

SEQ ID NO: 16297 - protein, 9 aa, Artificial Sequence
  Synthetic construct
QQNYHTPRT

SEQ ID NO: 16298 - protein, 11 aa, Artificial Sequence
  Synthetic construct
QSYDSSLSGSV

SEQ ID NO: 16299 - protein, 9 aa, Artificial Sequence
  Synthetic construct
QQYYSAPYT

SEQ ID NO: 16300 - protein, 10 aa, Artificial Sequence
  Synthetic construct
SSYTSSSTWV

SEQ ID NO: 16301 - protein, 10 aa, Artificial Sequence
  Synthetic construct
CSFAGSGTWV

SEQ ID NO: 16302 - protein, 9 aa, Artificial Sequence
  Synthetic construct
QQRSIWPPL

SEQ ID NO: 16303 - protein, 10 aa, Artificial Sequence
  Synthetic construct
CSYAGSSTWV

SEQ ID NO: 16304 - protein, 10 aa, Artificial Sequence
  Synthetic construct
YSTDSSGNPF

SEQ ID NO: 16305 - protein, 9 aa, Artificial Sequence
  Synthetic construct
SSYRSTTRV

SEQ ID NO: 16306 - protein, 9 aa, Artificial Sequence
  Synthetic construct
QQSYSTLLT

SEQ ID NO: 16307 - protein, 9 aa, Artificial Sequence
  Synthetic construct
MQALQTPLT

SEQ ID NO: 16308 - protein, 7 aa, Artificial Sequence
  Synthetic construct
QQYGSFT

SEQ ID NO: 16309 - protein, 10 aa, Artificial Sequence
  Synthetic construct
SSYTSTSTLV

SEQ ID NO: 16310 - protein, 8 aa, Artificial Sequence
  Synthetic construct
HQSSSLPS

SEQ ID NO: 16311 - protein, 9 aa, Artificial Sequence
  Synthetic construct
LQYHTYPLT

SEQ ID NO: 16312 - protein, 9 aa, Artificial Sequence
  Synthetic construct
QQYNSYPLS

SEQ ID NO: 16313 - protein, 11 aa, Artificial Sequence
  Synthetic construct
AAWDDSLSGRV

SEQ ID NO: 16314 - protein, 10 aa, Artificial Sequence
  Synthetic construct
SSYAGSNIMV

SEQ ID NO: 16315 - protein, 11 aa, Artificial Sequence
  Synthetic construct
QSYDSSLSGYV

SEQ ID NO: 16316 - protein, 9 aa, Artificial Sequence
  Synthetic construct
LSYAGSNTL

SEQ ID NO: 16317 - protein, 9 aa, Artificial Sequence
  Synthetic construct
QQRSNWLWT

SEQ ID NO: 16318 - protein, 9 aa, Artificial Sequence
  Synthetic construct
QQANSFPLT

SEQ ID NO: 16319 - protein, 11 aa, Artificial Sequence
  Synthetic construct
QSADSSGTYLV

SEQ ID NO: 16320 - protein, 9 aa, Artificial Sequence
  Synthetic construct
QHYDNLPPT

SEQ ID NO: 16321 - protein, 10 aa, Artificial Sequence
  Synthetic construct
QQYNNWPPLT

SEQ ID NO: 16322 - protein, 9 aa, Artificial Sequence
  Synthetic construct
QQYNSYPWT

SEQ ID NO: 16323 - protein, 8 aa, Artificial Sequence
  Synthetic construct
QAWDSSVV

SEQ ID NO: 16324 - protein, 5 aa, Artificial Sequence
  Synthetic construct
QQSYS

SEQ ID NO: 16325 - protein, 9 aa, Artificial Sequence
  Synthetic construct
MQPLQTPWT

SEQ ID NO: 16326 - protein, 12 aa, Artificial Sequence
  Synthetic construct
QSADSSGTYPVV

SEQ ID NO: 16327 - protein, 9 aa, Artificial Sequence
  Synthetic construct
QQYDNWPQT

SEQ ID NO: 16328 - protein, 9 aa, Artificial Sequence
  Synthetic construct
MQALQTPWT

SEQ ID NO: 16329 - protein, 11 aa, Artificial Sequence
  Synthetic construct
GTRDSSLSIYV

SEQ ID NO: 16330 - protein, 11 aa, Artificial Sequence
  Synthetic construct
QSADTSGSFVL

SEQ ID NO: 16331 - protein, 10 aa, Artificial Sequence
  Synthetic construct
QSADSSGTYV

SEQ ID NO: 16332 - protein, 11 aa, Artificial Sequence
  Synthetic construct
QSYDSSLSGNV

SEQ ID NO: 16333 - protein, 9 aa, Artificial Sequence
  Synthetic construct
QAWDSSTVV

SEQ ID NO: 16334 - protein, 10 aa, Artificial Sequence
  Synthetic construct
QQSYSTSMYT

SEQ ID NO: 16335 - protein, 11 aa, Artificial Sequence
  Synthetic construct
YSTDSSANSGV

SEQ ID NO: 16336 - protein, 10 aa, Artificial Sequence
  Synthetic construct
VLYMGSGSFV

SEQ ID NO: 16337 - protein, 9 aa, Artificial Sequence
  Synthetic construct
QQSYSTPHT

SEQ ID NO: 16338 - protein, 9 aa, Artificial Sequence
  Synthetic construct
QQSYSTLWT

SEQ ID NO: 16339 - protein, 9 aa, Artificial Sequence
  Synthetic construct
QQLSSYPVT

SEQ ID NO: 16340 - protein, 9 aa, Artificial Sequence
  Synthetic construct
QQYNSYPWT

SEQ ID NO: 16341 - protein, 9 aa, Artificial Sequence
  Synthetic construct
QQYGSSPWT

SEQ ID NO: 16342 - protein, 10 aa, Artificial Sequence
  Synthetic construct
QQYYIPPPGT

SEQ ID NO: 16343 - protein, 10 aa, Artificial Sequence
  Synthetic construct
NSYTTSSTYV

SEQ ID NO: 16344 - protein, 10 aa, Artificial Sequence
  Synthetic construct
SSYAGSNNLV

SEQ ID NO: 16345 - protein, 11 aa, Artificial Sequence
  Synthetic construct
EAWDDSLPGNV

SEQ ID NO: 16346 - protein, 11 aa, Artificial Sequence
  Synthetic construct
QSYDSSLSGSV

SEQ ID NO: 16347 - protein, 11 aa, Artificial Sequence
  Synthetic construct
AAWDDSLNGWV

SEQ ID NO: 16348 - protein, 8 aa, Artificial Sequence
  Synthetic construct
QHYDNLPR

SEQ ID NO: 16349 - protein, 9 aa, Artificial Sequence
  Synthetic construct
QQSYDVPRT

SEQ ID NO: 16350 - protein, 11 aa, Artificial Sequence
  Synthetic construct
QSYDSGLSDLV

SEQ ID NO: 16351 - protein, 11 aa, Artificial Sequence
  Synthetic construct
GTWDSSLSAVV

SEQ ID NO: 16352 - protein, 6 aa, Artificial Sequence
  Synthetic construct
QQRSSV

SEQ ID NO: 16353 - protein, 9 aa, Artificial Sequence
  Synthetic construct
QQRKYWPWT

SEQ ID NO: 16354 - protein, 8 aa, Artificial Sequence
  Synthetic construct
QQYGSSIT

SEQ ID NO: 16355 - protein, 9 aa, Artificial Sequence
  Synthetic construct
QQFHSLPLT

SEQ ID NO: 16356 - protein, 9 aa, Artificial Sequence
  Synthetic construct
QQYGSSPQT

SEQ ID NO: 16357 - protein, 11 aa, Artificial Sequence
  Synthetic construct
HQRSNWPPRIT

SEQ ID NO: 16358 - protein, 9 aa, Artificial Sequence
  Synthetic construct
QQYYITPLA

SEQ ID NO: 16359 - protein, 11 aa, Artificial Sequence
  Synthetic construct
QSYDSSLSGSV

SEQ ID NO: 16360 - protein, 10 aa, Artificial Sequence
  Synthetic construct
QQYDDWPLIT

SEQ ID NO: 16361 - protein, 10 aa, Artificial Sequence
  Synthetic construct
SSYTSSSTYV

SEQ ID NO: 16362 - protein, 11 aa, Artificial Sequence
  Synthetic construct
QQYSNWPPALT

SEQ ID NO: 16363 - protein, 9 aa, Artificial Sequence
  Synthetic construct
LQYNNWPRT

SEQ ID NO: 16364 - protein, 11 aa, Artificial Sequence
  Synthetic construct
QSYDSSLSGYV

SEQ ID NO: 16365 - protein, 10 aa, Artificial Sequence
  Synthetic construct
QQRSNWRRLT

SEQ ID NO: 16366 - protein, 8 aa, Artificial Sequence
  Synthetic construct
QVWDSGWV

SEQ ID NO: 16367 - protein, 11 aa, Artificial Sequence
  Synthetic construct
QQRSHWPPVIT

SEQ ID NO: 16368 - protein, 9 aa, Artificial Sequence
  Synthetic construct
MQSIQLPLT

SEQ ID NO: 16369 - protein, 10 aa, Artificial Sequence
  Synthetic construct
QSADSSGSWV

SEQ ID NO: 16370 - protein, 9 aa, Artificial Sequence
  Synthetic construct
QQSYSTPWT

SEQ ID NO: 16371 - protein, 10 aa, Artificial Sequence
  Synthetic construct
SSYTSSSTRV

SEQ ID NO: 16372 - protein, 11 aa, Artificial Sequence
  Synthetic construct
QVWDNISDDFV

SEQ ID NO: 16373 - protein, 9 aa, Artificial Sequence
  Synthetic construct
HQSTSLPLT

SEQ ID NO: 16374 - protein, 10 aa, Artificial Sequence
  Synthetic construct
TSYTTRRTLV

SEQ ID NO: 16375 - protein, 8 aa, Artificial Sequence
  Synthetic construct
QQYGSSFT

SEQ ID NO: 16376 - protein, 11 aa, Artificial Sequence
  Synthetic construct
ATWDSSLSAVV

SEQ ID NO: 16377 - protein, 9 aa, Artificial Sequence
  Synthetic construct
QQYGTFLWT

SEQ ID NO: 16378 - protein, 9 aa, Artificial Sequence
  Synthetic construct
QQYYSSPRT

SEQ ID NO: 16379 - protein, 9 aa, Artificial Sequence
  Synthetic construct
QQYGSSRLS

SEQ ID NO: 16380 - protein, 9 aa, Artificial Sequence
  Synthetic construct
QQSYSTPLT

SEQ ID NO: 16381 - protein, 10 aa, Artificial Sequence
  Synthetic construct
LSYTSRGSRV

SEQ ID NO: 16382 - protein, 11 aa, Artificial Sequence
  Synthetic construct
SSYAGSNRPYV

SEQ ID NO: 16383 - protein, 11 aa, Artificial Sequence
  Synthetic construct
GSFTSTTTSYV

SEQ ID NO: 16384 - protein, 9 aa, Artificial Sequence
  Synthetic construct
QQYSSSVWT

SEQ ID NO: 16385 - protein, 9 aa, Artificial Sequence
  Synthetic construct
MQALQTPWT

SEQ ID NO: 16386 - protein, 9 aa, Artificial Sequence
  Synthetic construct
QQYNTYPLT

SEQ ID NO: 16387 - protein, 11 aa, Artificial Sequence
  Synthetic construct
SSYAGSNDFYV

SEQ ID NO: 16388 - protein, 11 aa, Artificial Sequence
  Synthetic construct
QQRRNWPPRIT

SEQ ID NO: 16389 - protein, 9 aa, Artificial Sequence
  Synthetic construct
LQHNSYPLT

SEQ ID NO: 16390 - protein, 10 aa, Artificial Sequence
  Synthetic construct
CSYAGSSTSV

SEQ ID NO: 16391 - protein, 10 aa, Artificial Sequence
  Synthetic construct
SSYTSSTALI

SEQ ID NO: 16392 - protein, 10 aa, Artificial Sequence
  Synthetic construct
QQYGYSPPYT

SEQ ID NO: 16393 - protein, 11 aa, Artificial Sequence
  Synthetic construct
AAWDDSLNGPV

SEQ ID NO: 16394 - protein, 9 aa, Artificial Sequence
  Synthetic construct
QQYNSYPWT

SEQ ID NO: 16395 - protein, 10 aa, Artificial Sequence
  Synthetic construct
SSYTSSSTLV

SEQ ID NO: 16396 - protein, 11 aa, Artificial Sequence
  Synthetic construct
NSRDSSGNHLV

SEQ ID NO: 16397 - protein, 11 aa, Artificial Sequence
  Synthetic construct
QQANSFPRMYT

SEQ ID NO: 16398 - protein, 10 aa, Artificial Sequence
  Synthetic construct
SSYTNSGTRL

SEQ ID NO: 16399 - protein, 9 aa, Artificial Sequence
  Synthetic construct
QQYYSTMYT

SEQ ID NO: 16400 - protein, 9 aa, Artificial Sequence
  Synthetic construct
QQYDNLPLT

SEQ ID NO: 16401 - protein, 9 aa, Artificial Sequence
  Synthetic construct
YSAADNAWV

SEQ ID NO: 16402 - protein, 10 aa, Artificial Sequence
  Synthetic construct
NSYTITGTWV

SEQ ID NO: 16403 - protein, 9 aa, Artificial Sequence
  Synthetic construct
QQYYSSPRT

SEQ ID NO: 16404 - protein, 8 aa, Artificial Sequence
  Synthetic construct
QQYHNWYT

SEQ ID NO: 16405 - protein, 9 aa, Artificial Sequence
  Synthetic construct
QQYYSTPYT

SEQ ID NO: 16406 - protein, 9 aa, Artificial Sequence
  Synthetic construct
QQYNSYSRT

SEQ ID NO: 16407 - protein, 9 aa, Artificial Sequence
  Synthetic construct
QQYGSSPWT

SEQ ID NO: 16408 - protein, 9 aa, Artificial Sequence
  Synthetic construct
QQSHSTPWT

SEQ ID NO: 16409 - protein, 8 aa, Artificial Sequence
  Synthetic construct
QQYNSYWT

SEQ ID NO: 16410 - protein, 9 aa, Artificial Sequence
  Synthetic construct
QQLNSYPRT

SEQ ID NO: 16411 - protein, 10 aa, Artificial Sequence
  Synthetic construct
VLFMGSGIWV

SEQ ID NO: 16412 - protein, 10 aa, Artificial Sequence
  Synthetic construct
QQYNNWPPLT

SEQ ID NO: 16413 - protein, 9 aa, Artificial Sequence
  Synthetic construct
QQSYGTPPT

SEQ ID NO: 16414 - protein, 11 aa, Artificial Sequence
  Synthetic construct
QVWDSSSDHYV

SEQ ID NO: 16415 - protein, 8 aa, Artificial Sequence
  Synthetic construct
QQYNSSLT

SEQ ID NO: 16416 - protein, 9 aa, Artificial Sequence
  Synthetic construct
MQALHFPYT

SEQ ID NO: 16417 - protein, 9 aa, Artificial Sequence
  Synthetic construct
QQYGSSPAT

SEQ ID NO: 16418 - protein, 8 aa, Artificial Sequence
  Synthetic construct
QQYNYWPT

SEQ ID NO: 16419 - protein, 9 aa, Artificial Sequence
  Synthetic construct
QRNDNVPFT

SEQ ID NO: 16420 - protein, 9 aa, Artificial Sequence
  Synthetic construct
QQSKNFPLS

SEQ ID NO: 16421 - protein, 9 aa, Artificial Sequence
  Synthetic construct
QAWDSSTAV

SEQ ID NO: 16422 - protein, 9 aa, Artificial Sequence
  Synthetic construct
QQANSFPLT

SEQ ID NO: 16423 - protein, 9 aa, Artificial Sequence
  Synthetic construct
LQHNSYPYT

SEQ ID NO: 16424 - protein, 9 aa, Artificial Sequence
  Synthetic construct
QQSYSTPRT

SEQ ID NO: 16425 - protein, 9 aa, Artificial Sequence
  Synthetic construct
QQYDNLPIT

SEQ ID NO: 16426 - protein, 9 aa, Artificial Sequence
  Synthetic construct
QQYGSSPKT

SEQ ID NO: 16427 - protein, 9 aa, Artificial Sequence
  Synthetic construct
QQAHSFPPT

SEQ ID NO: 16428 - protein, 11 aa, Artificial Sequence
  Synthetic construct
QVWDSSSVYVV

SEQ ID NO: 16429 - protein, 12 aa, Artificial Sequence
  Synthetic construct
AAWDDSFSAHVV

SEQ ID NO: 16430 - protein, 10 aa, Artificial Sequence
  Synthetic construct
QQRSSWPPGA

SEQ ID NO: 16431 - protein, 10 aa, Artificial Sequence
  Synthetic construct
QQSYSMPPWT

SEQ ID NO: 16432 - protein, 9 aa, Artificial Sequence
  Synthetic construct
QQYNSYPIT

SEQ ID NO: 16433 - protein, 10 aa, Artificial Sequence
  Synthetic construct
QAWDRSANYV

SEQ ID NO: 16434 - protein, 10 aa, Artificial Sequence
  Synthetic construct
QQRSIWPSIT

SEQ ID NO: 16435 - protein, 10 aa, Artificial Sequence
  Synthetic construct
LSYTSRGTRV

SEQ ID NO: 16436 - protein, 11 aa, Artificial Sequence
  Synthetic construct
QSADNSGSLWV

SEQ ID NO: 16437 - protein, 11 aa, Artificial Sequence
  Synthetic construct
QQRSNWPPKLT

SEQ ID NO: 16438 - protein, 10 aa, Artificial Sequence
  Synthetic construct
QQYGSSPMFT

SEQ ID NO: 16439 - protein, 9 aa, Artificial Sequence
  Synthetic construct
QQSYSTPRT

SEQ ID NO: 16440 - protein, 11 aa, Artificial Sequence
  Synthetic construct
SSYTSSSTLDV

SEQ ID NO: 16441 - protein, 10 aa, Artificial Sequence
  Synthetic construct
QSADGSGTWV

SEQ ID NO: 16442 - protein, 9 aa, Artificial Sequence
  Synthetic construct
LHYYTIPYT

SEQ ID NO: 16443 - protein, 9 aa, Artificial Sequence
  Synthetic construct
YSTDSSGKR

SEQ ID NO: 16444 - protein, 9 aa, Artificial Sequence
  Synthetic construct
QLYGYSQLT

SEQ ID NO: 16445 - protein, 11 aa, Artificial Sequence
  Synthetic construct
CSYAGSRTFYV

SEQ ID NO: 16446 - protein, 11 aa, Artificial Sequence
  Synthetic construct
QVWHSSSDNFV

SEQ ID NO: 16447 - protein, 9 aa, Artificial Sequence
  Synthetic construct
MQALQTPWT

SEQ ID NO: 16448 - protein, 9 aa, Artificial Sequence
  Synthetic construct
QQYGSSPET

SEQ ID NO: 16449 - protein, 5 aa, Artificial Sequence
  Synthetic construct
QHLGA

SEQ ID NO: 16450 - protein, 11 aa, Artificial Sequence
  Synthetic construct
ATWDSSLSGVV

SEQ ID NO: 16451 - protein, 9 aa, Artificial Sequence
  Synthetic construct
QQYGGSPAT

SEQ ID NO: 16452 - protein, 9 aa, Artificial Sequence
  Synthetic construct
QQYYATPRT

SEQ ID NO: 16453 - protein, 11 aa, Artificial Sequence
  Synthetic construct
GTWDSSLSAYV

SEQ ID NO: 16454 - protein, 10 aa, Artificial Sequence
  Synthetic construct
SSYTSSYTLV

SEQ ID NO: 16455 - protein, 10 aa, Artificial Sequence
  Synthetic construct
QAWDTSTFYV

SEQ ID NO: 16456 - protein, 10 aa, Artificial Sequence
  Synthetic construct
QQRSNWPPGT

SEQ ID NO: 16457 - protein, 9 aa, Artificial Sequence
  Synthetic construct
QQYNSYSFT

SEQ ID NO: 16458 - protein, 10 aa, Artificial Sequence
  Synthetic construct
QSADGSGTWV

SEQ ID NO: 16459 - protein, 11 aa, Artificial Sequence
  Synthetic construct
AAWDDSLSGEV

SEQ ID NO: 16460 - protein, 11 aa, Artificial Sequence
  Synthetic construct
QQRSSWPPRGT

SEQ ID NO: 16461 - protein, 9 aa, Artificial Sequence
  Synthetic construct
QQYNNWPYT

SEQ ID NO: 16462 - protein, 11 aa, Artificial Sequence
  Synthetic construct
AAWDASLKGWV

SEQ ID NO: 16463 - protein, 10 aa, Artificial Sequence
  Synthetic construct
QQYHNWPPYT

SEQ ID NO: 16464 - protein, 9 aa, Artificial Sequence
  Synthetic construct
QAWDTSTAV

SEQ ID NO: 16465 - protein, 10 aa, Artificial Sequence
  Synthetic construct
CSYAGSSTWV

SEQ ID NO: 16466 - protein, 9 aa, Artificial Sequence
  Synthetic construct
MQGAHWPPA

SEQ ID NO: 16467 - protein, 11 aa, Artificial Sequence
  Synthetic construct
QQRSTRPPTWT

SEQ ID NO: 16468 - protein, 9 aa, Artificial Sequence
  Synthetic construct
QQYYNTPRT

SEQ ID NO: 16469 - protein, 9 aa, Artificial Sequence
  Synthetic construct
QQYYSTPYT

SEQ ID NO: 16470 - protein, 11 aa, Artificial Sequence
  Synthetic construct
QSYDNSLSGYV

SEQ ID NO: 16471 - protein, 11 aa, Artificial Sequence
  Synthetic construct
QQRSNGPPTWT

SEQ ID NO: 16472 - protein, 10 aa, Artificial Sequence
  Synthetic construct
QQRSNWPPYT

SEQ ID NO: 16473 - protein, 10 aa, Artificial Sequence
  Synthetic construct
YSTDSSAYPL

SEQ ID NO: 16474 - protein, 9 aa, Artificial Sequence
  Synthetic construct
HQYNDWPFT

SEQ ID NO: 16475 - protein, 9 aa, Artificial Sequence
  Synthetic construct
MQTIQLPYT

SEQ ID NO: 16476 - protein, 9 aa, Artificial Sequence
  Synthetic construct
QQYGSSPHT

SEQ ID NO: 16477 - protein, 9 aa, Artificial Sequence
  Synthetic construct
QSYESTNWV

SEQ ID NO: 16478 - protein, 9 aa, Artificial Sequence
  Synthetic construct
QQANSFPWT

SEQ ID NO: 16479 - protein, 11 aa, Artificial Sequence
  Synthetic construct
ATWDDRLDGPV

SEQ ID NO: 16480 - protein, 11 aa, Artificial Sequence
  Synthetic construct
GTWDSSLSAWV

SEQ ID NO: 16481 - protein, 9 aa, Artificial Sequence
  Synthetic construct
QQYNNWPLT

SEQ ID NO: 16482 - protein, 11 aa, Artificial Sequence
  Synthetic construct
SSYTSSSTLVV

SEQ ID NO: 16483 - protein, 9 aa, Artificial Sequence
  Synthetic construct
QQRSNWLWT

SEQ ID NO: 16484 - protein, 9 aa, Artificial Sequence
  Synthetic construct
QQYYSTPYT

SEQ ID NO: 16485 - protein, 11 aa, Artificial Sequence
  Synthetic construct
QSYDSSLSGSV

SEQ ID NO: 16486 - protein, 11 aa, Artificial Sequence
  Synthetic construct
AAWDDNLNGVI

SEQ ID NO: 16487 - protein, 8 aa, Artificial Sequence
  Synthetic construct
CSYAGLWV

SEQ ID NO: 16488 - protein, 9 aa, Artificial Sequence
  Synthetic construct
MQGTHWPIT

SEQ ID NO: 16489 - protein, 9 aa, Artificial Sequence
  Synthetic construct
QQYGSSPQT

SEQ ID NO: 16490 - protein, 9 aa, Artificial Sequence
  Synthetic construct
MQSLQYPLT

SEQ ID NO: 16491 - protein, 8 aa, Artificial Sequence
  Synthetic construct
QQYGTSPS

SEQ ID NO: 16492 - protein, 10 aa, Artificial Sequence
  Synthetic construct
QQYNNWPPLT

SEQ ID NO: 16493 - protein, 9 aa, Artificial Sequence
  Synthetic construct
QQDYNLPYT

SEQ ID NO: 16494 - protein, 10 aa, Artificial Sequence
  Synthetic construct
AAWDDSLNAL

SEQ ID NO: 16495 - protein, 10 aa, Artificial Sequence
  Synthetic construct
LQHNNYPLVT

SEQ ID NO: 16496 - protein, 11 aa, Artificial Sequence
  Synthetic construct
QVWHANSDHVV

SEQ ID NO: 16497 - protein, 11 aa, Artificial Sequence
  Synthetic construct
YSTDTSGNHRV

SEQ ID NO: 16498 - protein, 10 aa, Artificial Sequence
  Synthetic construct
QQVNSFFRVT

SEQ ID NO: 16499 - protein, 11 aa, Artificial Sequence
  Synthetic construct
GTWDSSLSAVV

SEQ ID NO: 16500 - protein, 10 aa, Artificial Sequence
  Synthetic construct
CSYAGSSTWV

SEQ ID NO: 16501 - protein, 10 aa, Artificial Sequence
  Synthetic construct
NSYTITGTWV

SEQ ID NO: 16502 - protein, 9 aa, Artificial Sequence
  Synthetic construct
QQYNSYSYT

SEQ ID NO: 16503 - protein, 9 aa, Artificial Sequence
  Synthetic construct
CSYAGSYVV

SEQ ID NO: 16504 - protein, 9 aa, Artificial Sequence
  Synthetic construct
MIWHTSAWV

SEQ ID NO: 16505 - protein, 9 aa, Artificial Sequence
  Synthetic construct
QQYNDYPVT

SEQ ID NO: 16506 - protein, 11 aa, Artificial Sequence
  Synthetic construct
SSYTTSTTPYV

SEQ ID NO: 16507 - protein, 9 aa, Artificial Sequence
  Synthetic construct
QQYGSSPWT

SEQ ID NO: 16508 - protein, 11 aa, Artificial Sequence
  Synthetic construct
SSYTSSSTLDV

SEQ ID NO: 16509 - protein, 11 aa, Artificial Sequence
  Synthetic construct
QQRSNWPPMYT

SEQ ID NO: 16510 - protein, 9 aa, Artificial Sequence
  Synthetic construct
QQYGSSPWT

SEQ ID NO: 16511 - protein, 9 aa, Artificial Sequence
  Synthetic construct
MQSIQLPYT

SEQ ID NO: 16512 - protein, 11 aa, Artificial Sequence
  Synthetic construct
QSYDSSLSALV

SEQ ID NO: 16513 - protein, 9 aa, Artificial Sequence
  Synthetic construct
QQYGNSRLT

SEQ ID NO: 16514 - protein, 8 aa, Artificial Sequence
  Synthetic construct
QQYGSPWT

SEQ ID NO: 16515 - protein, 11 aa, Artificial Sequence
  Synthetic construct
QSYDSRLSAYV

SEQ ID NO: 16516 - protein, 9 aa, Artificial Sequence
  Synthetic construct
QQSYSTPPT

SEQ ID NO: 16517 - protein, 9 aa, Artificial Sequence
  Synthetic construct
HHYGSSRIA

SEQ ID NO: 16518 - protein, 10 aa, Artificial Sequence
  Synthetic construct
QQTYTMPTWT

SEQ ID NO: 16519 - protein, 9 aa, Artificial Sequence
  Synthetic construct
QQYYTTPYT

SEQ ID NO: 16520 - protein, 9 aa, Artificial Sequence
  Synthetic construct
MQGTHWPIT

SEQ ID NO: 16521 - protein, 11 aa, Artificial Sequence
  Synthetic construct
ATWDDSLSGPV

SEQ ID NO: 16522 - protein, 11 aa, Artificial Sequence
  Synthetic construct
QSYDSSLSSVV

SEQ ID NO: 16523 - protein, 8 aa, Artificial Sequence
  Synthetic construct
QHYDNLPR

SEQ ID NO: 16524 - protein, 9 aa, Artificial Sequence
  Synthetic construct
LQYGSPTWT

SEQ ID NO: 16525 - protein, 8 aa, Artificial Sequence
  Synthetic construct
QHYHNVPR

SEQ ID NO: 16526 - protein, 11 aa, Artificial Sequence
  Synthetic construct
GTWDGSLSAGV

SEQ ID NO: 16527 - protein, 10 aa, Artificial Sequence
  Synthetic construct
HQYGYSLPNT

SEQ ID NO: 16528 - protein, 9 aa, Artificial Sequence
  Synthetic construct
MQSIQFPYT

SEQ ID NO: 16529 - protein, 9 aa, Artificial Sequence
  Synthetic construct
MQALQTPLT

SEQ ID NO: 16530 - protein, 9 aa, Artificial Sequence
  Synthetic construct
MQSIQVPYT

SEQ ID NO: 16531 - protein, 9 aa, Artificial Sequence
  Synthetic construct
QAWDSSNVV

SEQ ID NO: 16532 - protein, 9 aa, Artificial Sequence
  Synthetic construct
QQTYNIPWT

SEQ ID NO: 16533 - protein, 9 aa, Artificial Sequence
  Synthetic construct
QHRANWPLT

SEQ ID NO: 16534 - protein, 9 aa, Artificial Sequence
  Synthetic construct
MQSIKLPLT

SEQ ID NO: 16535 - protein, 9 aa, Artificial Sequence
  Synthetic construct
MQSIQLPLT

SEQ ID NO: 16536 - protein, 9 aa, Artificial Sequence
  Synthetic construct
QQSYSTPPT

SEQ ID NO: 16537 - protein, 8 aa, Artificial Sequence
  Synthetic construct
QVWDTSSE

SEQ ID NO: 16538 - protein, 9 aa, Artificial Sequence
  Synthetic construct
QQYDNLPLT

SEQ ID NO: 16539 - protein, 9 aa, Artificial Sequence
  Synthetic construct
QAWDSSTVV

SEQ ID NO: 16540 - protein, 9 aa, Artificial Sequence
  Synthetic construct
MIWHTSAWV

SEQ ID NO: 16541 - protein, 11 aa, Artificial Sequence
  Synthetic construct
ATWDDSLNGPV

SEQ ID NO: 16542 - protein, 9 aa, Artificial Sequence
  Synthetic construct
QQYVNSRLT

SEQ ID NO: 16543 - protein, 9 aa, Artificial Sequence
  Synthetic construct
MQALQTPIT

SEQ ID NO: 16544 - protein, 11 aa, Artificial Sequence
  Synthetic construct
YSRDSSGNHYV

SEQ ID NO: 16545 - protein, 9 aa, Artificial Sequence
  Synthetic construct
QQYNNWPGT

SEQ ID NO: 16546 - protein, 10 aa, Artificial Sequence
  Synthetic construct
QAWDSSTAYV

SEQ ID NO: 16547 - protein, 8 aa, Artificial Sequence
  Synthetic construct
QVWDTSSE

SEQ ID NO: 16548 - protein, 11 aa, Artificial Sequence
  Synthetic construct
CSYAGTNTPYV

SEQ ID NO: 16549 - protein, 11 aa, Artificial Sequence
  Synthetic construct
HSTDSSGNVWL

SEQ ID NO: 16550 - protein, 9 aa, Artificial Sequence
  Synthetic construct
LQHNYYPYT

SEQ ID NO: 16551 - protein, 10 aa, Artificial Sequence
  Synthetic construct
TSYTSSSTLV

SEQ ID NO: 16552 - protein, 9 aa, Artificial Sequence
  Synthetic construct
MIRHSSAYV

SEQ ID NO: 16553 - protein, 10 aa, Artificial Sequence
  Synthetic construct
LQYNSYPLVT

SEQ ID NO: 16554 - protein, 10 aa, Artificial Sequence
  Synthetic construct
SSYAGSNNFV

SEQ ID NO: 16555 - protein, 10 aa, Artificial Sequence
  Synthetic construct
SSYTSNSTLV

SEQ ID NO: 16556 - protein, 9 aa, Artificial Sequence
  Synthetic construct
MQALQTPYT

SEQ ID NO: 16557 - protein, 8 aa, Artificial Sequence
  Synthetic construct
QHRSNWPL

SEQ ID NO: 16558 - protein, 9 aa, Artificial Sequence
  Synthetic construct
QQSGNSRLT

SEQ ID NO: 16559 - protein, 9 aa, Artificial Sequence
  Synthetic construct
QQYANLPIT

SEQ ID NO: 16560 - protein, 9 aa, Artificial Sequence
  Synthetic construct
QQTYSPLWT

SEQ ID NO: 16561 - protein, 9 aa, Artificial Sequence
  Synthetic construct
QQYGGSPVT

SEQ ID NO: 16562 - protein, 9 aa, Artificial Sequence
  Synthetic construct
QQYNSYSYT

SEQ ID NO: 16563 - protein, 11 aa, Artificial Sequence
  Synthetic construct
YSTDSSDNHRV

SEQ ID NO: 16564 - protein, 13 aa, Artificial Sequence
  Synthetic construct
QVWDGTSDHPAYV

SEQ ID NO: 16565 - protein, 8 aa, Artificial Sequence
  Synthetic construct
QQYNNWWT

SEQ ID NO: 16566 - protein, 11 aa, Artificial Sequence
  Synthetic construct
SSYAGYSNYVI

SEQ ID NO: 16567 - protein, 8 aa, Artificial Sequence
  Synthetic construct
QQRGSWYT

SEQ ID NO: 16568 - protein, 8 aa, Artificial Sequence
  Synthetic construct
QVWDSGVL

SEQ ID NO: 16569 - protein, 10 aa, Artificial Sequence
  Synthetic construct
QQYGASPGYT

SEQ ID NO: 16570 - protein, 9 aa, Artificial Sequence
  Synthetic construct
QQYGSSPRT

SEQ ID NO: 16571 - DNA, 16 bp, Artificial Sequence
  Synthetic construct
aaacggggtaattgga

SEQ ID NO: 16572 - DNA, 16 bp, Artificial Sequence
  Synthetic construct
aaacggggtaattgga

SEQ ID NO: 16573 - DNA, 16 bp, Artificial Sequence
  Synthetic construct
aaacggggtcaacatc

SEQ ID NO: 16574 - DNA, 16 bp, Artificial Sequence
  Synthetic construct
aaacggggtcaacatc

SEQ ID NO: 16575 - DNA, 16 bp, Artificial Sequence
  Synthetic construct
aaagatgcagtatctg

SEQ ID NO: 16576 - DNA, 16 bp, Artificial Sequence
  Synthetic construct
aaagatgcagtatctg

SEQ ID NO: 16577 - DNA, 16 bp, Artificial Sequence
  Synthetic construct
aaagcaaagaagggta

SEQ ID NO: 16578 - DNA, 16 bp, Artificial Sequence
  Synthetic construct
aaagcaaagaagggta

SEQ ID NO: 16579 - DNA, 16 bp, Artificial Sequence
  Synthetic construct
aaagcaaaggagtacc

SEQ ID NO: 16580 - DNA, 16 bp, Artificial Sequence
  Synthetic construct
aaagcaaaggagtacc

SEQ ID NO: 16581 - DNA, 16 bp, Artificial Sequence
  Synthetic construct
aaagcaagtgcctggt

SEQ ID NO: 16582 - DNA, 16 bp, Artificial Sequence
  Synthetic construct
aaagcaagtgcctggt

SEQ ID NO: 16583 - DNA, 16 bp, Artificial Sequence
  Synthetic construct
aaagtagagtacgtaa

SEQ ID NO: 16584 - DNA, 16 bp, Artificial Sequence
  Synthetic construct
aaagtagagtacgtaa

SEQ ID NO: 16585 - DNA, 16 bp, Artificial Sequence
  Synthetic construct
aaagtagcagcttaac

SEQ ID NO: 16586 - DNA, 16 bp, Artificial Sequence
  Synthetic construct
aaagtagcagcttaac

SEQ ID NO: 16587 - DNA, 16 bp, Artificial Sequence
  Synthetic construct
aaagtaggtctaaaga

SEQ ID NO: 16588 - DNA, 16 bp, Artificial Sequence
  Synthetic construct
aaagtaggtctaaaga

SEQ ID NO: 16589 - DNA, 16 bp, Artificial Sequence
  Synthetic construct
aaagtaggtgagtgac

SEQ ID NO: 16590 - DNA, 16 bp, Artificial Sequence
  Synthetic construct
aaagtaggtgagtgac

SEQ ID NO: 16591 - DNA, 16 bp, Artificial Sequence
  Synthetic construct
aaatgccagacttgaa

SEQ ID NO: 16592 - DNA, 16 bp, Artificial Sequence
  Synthetic construct
aaatgccagacttgaa

SEQ ID NO: 16593 - DNA, 16 bp, Artificial Sequence
  Synthetic construct
aaatgccgtaaagtca

SEQ ID NO: 16594 - DNA, 16 bp, Artificial Sequence
  Synthetic construct
aaatgccgtaaagtca

SEQ ID NO: 16595 - DNA, 16 bp, Artificial Sequence
  Synthetic construct
aaatgccgtgataagt

SEQ ID NO: 16596 - DNA, 16 bp, Artificial Sequence
  Synthetic construct
aaatgccgtgataagt

SEQ ID NO: 16597 - DNA, 16 bp, Artificial Sequence
  Synthetic construct
aacacgtaggctatct

SEQ ID NO: 16598 - DNA, 16 bp, Artificial Sequence
  Synthetic construct
aacacgtaggctatct

SEQ ID NO: 16599 - DNA, 16 bp, Artificial Sequence
  Synthetic construct
aacacgtcaccgttgg

SEQ ID NO: 16600 - DNA, 16 bp, Artificial Sequence
  Synthetic construct
aacacgtcaccgttgg

SEQ ID NO: 16601 - DNA, 16 bp, Artificial Sequence
  Synthetic construct
aacacgtgtatagtag

SEQ ID NO: 16602 - DNA, 16 bp, Artificial Sequence
  Synthetic construct
aacacgtgtatagtag

SEQ ID NO: 16603 - DNA, 16 bp, Artificial Sequence
  Synthetic construct
aacacgtgtgaccaag

SEQ ID NO: 16604 - DNA, 16 bp, Artificial Sequence
  Synthetic construct
aacacgtgtgaccaag

SEQ ID NO: 16605 - DNA, 16 bp, Artificial Sequence
  Synthetic construct
aacacgttctttaggg

SEQ ID NO: 16606 - DNA, 16 bp, Artificial Sequence
  Synthetic construct
aacacgttctttaggg

SEQ ID NO: 16607 - DNA, 16 bp, Artificial Sequence
  Synthetic construct
aaccatgcagcgtaag

SEQ ID NO: 16608 - DNA, 16 bp, Artificial Sequence
  Synthetic construct
aaccatgcagcgtaag

SEQ ID NO: 16609 - DNA, 16 bp, Artificial Sequence
  Synthetic construct
aacgttgcaacgcacc

SEQ ID NO: 16610 - DNA, 16 bp, Artificial Sequence
  Synthetic construct
aacgttgcaacgcacc

SEQ ID NO: 16611 - DNA, 16 bp, Artificial Sequence
  Synthetic construct
aactcagcaatggagc

SEQ ID NO: 16612 - DNA, 16 bp, Artificial Sequence
  Synthetic construct
aactcagcaatggagc

SEQ ID NO: 16613 - DNA, 16 bp, Artificial Sequence
  Synthetic construct
aactcagcacatgtgt

SEQ ID NO: 16614 - DNA, 16 bp, Artificial Sequence
  Synthetic construct
aactcagcacatgtgt

SEQ ID NO: 16615 - DNA, 16 bp, Artificial Sequence
  Synthetic construct
aactcaggtcgcttct

SEQ ID NO: 16616 - DNA, 16 bp, Artificial Sequence
  Synthetic construct
aactcaggtcgcttct

SEQ ID NO: 16617 - DNA, 16 bp, Artificial Sequence
  Synthetic construct
aactcaggtgtgaaat

SEQ ID NO: 16618 - DNA, 16 bp, Artificial Sequence
  Synthetic construct
aactcaggtgtgaaat

SEQ ID NO: 16619 - DNA, 16 bp, Artificial Sequence
  Synthetic construct
aactccccaaagaatc

SEQ ID NO: 16620 - DNA, 16 bp, Artificial Sequence
  Synthetic construct
aactccccaaagaatc

SEQ ID NO: 16621 - DNA, 16 bp, Artificial Sequence
  Synthetic construct
aactcccgtggacgat

SEQ ID NO: 16622 - DNA, 16 bp, Artificial Sequence
  Synthetic construct
aactcccgtggacgat

SEQ ID NO: 16623 - DNA, 16 bp, Artificial Sequence
  Synthetic construct
aactccctcgtagatc

SEQ ID NO: 16624 - DNA, 16 bp, Artificial Sequence
  Synthetic construct
aactccctcgtagatc

SEQ ID NO: 16625 - DNA, 16 bp, Artificial Sequence
  Synthetic construct
aactcttcaaacgcga

SEQ ID NO: 16626 - DNA, 16 bp, Artificial Sequence
  Synthetic construct
aactcttcaaacgcga

SEQ ID NO: 16627 - DNA, 16 bp, Artificial Sequence
  Synthetic construct
aactctttctgtacga

SEQ ID NO: 16628 - DNA, 16 bp, Artificial Sequence
  Synthetic construct
aactctttctgtacga

SEQ ID NO: 16629 - DNA, 16 bp, Artificial Sequence
  Synthetic construct
aactggtagttgagat

SEQ ID NO: 16630 - DNA, 16 bp, Artificial Sequence
  Synthetic construct
aactggtagttgagat

SEQ ID NO: 16631 - DNA, 16 bp, Artificial Sequence
  Synthetic construct
aactggttcaacgcta

SEQ ID NO: 16632 - DNA, 16 bp, Artificial Sequence
  Synthetic construct
aactggttcaacgcta

SEQ ID NO: 16633 - DNA, 16 bp, Artificial Sequence
  Synthetic construct
aactttctcccgactt

SEQ ID NO: 16634 - DNA, 16 bp, Artificial Sequence
  Synthetic construct
aactttctcccgactt

SEQ ID NO: 16635 - DNA, 16 bp, Artificial Sequence
  Synthetic construct
aagacctcacctatcc

SEQ ID NO: 16636 - DNA, 16 bp, Artificial Sequence
  Synthetic construct
aagacctcacctatcc

SEQ ID NO: 16637 - DNA, 16 bp, Artificial Sequence
  Synthetic construct
aagacctgtacaccgc

SEQ ID NO: 16638 - DNA, 16 bp, Artificial Sequence
  Synthetic construct
aagacctgtacaccgc

SEQ ID NO: 16639 - DNA, 16 bp, Artificial Sequence
  Synthetic construct
aagacctgttcgttga

SEQ ID NO: 16640 - DNA, 16 bp, Artificial Sequence
  Synthetic construct
aagacctgttcgttga

SEQ ID NO: 16641 - DNA, 16 bp, Artificial Sequence
  Synthetic construct
aagccgccatcggaag

SEQ ID NO: 16642 - DNA, 16 bp, Artificial Sequence
  Synthetic construct
aagccgccatcggaag

SEQ ID NO: 16643 - DNA, 16 bp, Artificial Sequence
  Synthetic construct
aagccgctcaaacaag

SEQ ID NO: 16644 - DNA, 16 bp, Artificial Sequence
  Synthetic construct
aagccgctcaaacaag

SEQ ID NO: 16645 - DNA, 16 bp, Artificial Sequence
  Synthetic construct
aaggcagcatcacaac

SEQ ID NO: 16646 - DNA, 16 bp, Artificial Sequence
  Synthetic construct
aaggcagcatcacaac

SEQ ID NO: 16647 - DNA, 16 bp, Artificial Sequence
  Synthetic construct
aaggcagcatgggaca

SEQ ID NO: 16648 - DNA, 16 bp, Artificial Sequence
  Synthetic construct
aaggcagcatgggaca

SEQ ID NO: 16649 - DNA, 16 bp, Artificial Sequence
  Synthetic construct
aaggcaggtagcgatg

SEQ ID NO: 16650 - DNA, 16 bp, Artificial Sequence
  Synthetic construct
aaggcaggtagcgatg

SEQ ID NO: 16651 - DNA, 16 bp, Artificial Sequence
  Synthetic construct
aaggcagtcatcgatg

SEQ ID NO: 16652 - DNA, 16 bp, Artificial Sequence
  Synthetic construct
aaggcagtcatcgatg

SEQ ID NO: 16653 - DNA, 16 bp, Artificial Sequence
  Synthetic construct
aaggcagtcttgggta

SEQ ID NO: 16654 - DNA, 16 bp, Artificial Sequence
  Synthetic construct
aaggcagtcttgggta

SEQ ID NO: 16655 - DNA, 16 bp, Artificial Sequence
  Synthetic construct
aaggttcagtgtactc

SEQ ID NO: 16656 - DNA, 16 bp, Artificial Sequence
  Synthetic construct
aaggttcagtgtactc

SEQ ID NO: 16657 - DNA, 16 bp, Artificial Sequence
  Synthetic construct
aaggttccatccaaca

SEQ ID NO: 16658 - DNA, 16 bp, Artificial Sequence
  Synthetic construct
aaggttccatccaaca

SEQ ID NO: 16659 - DNA, 16 bp, Artificial Sequence
  Synthetic construct
aaggttcgttaagaac

SEQ ID NO: 16660 - DNA, 16 bp, Artificial Sequence
  Synthetic construct
aaggttcgttaagaac

SEQ ID NO: 16661 - DNA, 16 bp, Artificial Sequence
  Synthetic construct
aagtctgcaactggcc

SEQ ID NO: 16662 - DNA, 16 bp, Artificial Sequence
  Synthetic construct
aagtctgcaactggcc

SEQ ID NO: 16663 - DNA, 16 bp, Artificial Sequence
  Synthetic construct
aagtctgtcaataagg

SEQ ID NO: 16664 - DNA, 16 bp, Artificial Sequence
  Synthetic construct
aagtctgtcaataagg

SEQ ID NO: 16665 - DNA, 16 bp, Artificial Sequence
  Synthetic construct
aatccagagcatcatc

SEQ ID NO: 16666 - DNA, 16 bp, Artificial Sequence
  Synthetic construct
aatccagagcatcatc

SEQ ID NO: 16667 - DNA, 16 bp, Artificial Sequence
  Synthetic construct
aatccagcatggtcat

SEQ ID NO: 16668 - DNA, 16 bp, Artificial Sequence
  Synthetic construct
aatccagcatggtcat

SEQ ID NO: 16669 - DNA, 16 bp, Artificial Sequence
  Synthetic construct
aatccagtcgagagca

SEQ ID NO: 16670 - DNA, 16 bp, Artificial Sequence
  Synthetic construct
aatccagtcgagagca

SEQ ID NO: 16671 - DNA, 16 bp, Artificial Sequence
  Synthetic construct
acaccaacatcacgat

SEQ ID NO: 16672 - DNA, 16 bp, Artificial Sequence
  Synthetic construct
acaccaacatcacgat

SEQ ID NO: 16673 - DNA, 16 bp, Artificial Sequence
  Synthetic construct
acaccctcacttcgaa

SEQ ID NO: 16674 - DNA, 16 bp, Artificial Sequence
  Synthetic construct
acaccctcacttcgaa

SEQ ID NO: 16675 - DNA, 16 bp, Artificial Sequence
  Synthetic construct
acactgacagtccttc

SEQ ID NO: 16676 - DNA, 16 bp, Artificial Sequence
  Synthetic construct
acactgacagtccttc

SEQ ID NO: 16677 - DNA, 16 bp, Artificial Sequence
  Synthetic construct
acactgatctgacctc

SEQ ID NO: 16678 - DNA, 16 bp, Artificial Sequence
  Synthetic construct
acactgatctgacctc

SEQ ID NO: 16679 - DNA, 16 bp, Artificial Sequence
  Synthetic construct
acactgatctttaggg

SEQ ID NO: 16680 - DNA, 16 bp, Artificial Sequence
  Synthetic construct
acactgatctttaggg

SEQ ID NO: 16681 - DNA, 16 bp, Artificial Sequence
  Synthetic construct
acagccgagatgttag

SEQ ID NO: 16682 - DNA, 16 bp, Artificial Sequence
  Synthetic construct
acagccgagatgttag

SEQ ID NO: 16683 - DNA, 16 bp, Artificial Sequence
  Synthetic construct
acagccgagctcaact

SEQ ID NO: 16684 - DNA, 16 bp, Artificial Sequence
  Synthetic construct
acagccgagctcaact

SEQ ID NO: 16685 - DNA, 16 bp, Artificial Sequence
  Synthetic construct
acagccgcacgaaacg

SEQ ID NO: 16686 - DNA, 16 bp, Artificial Sequence
  Synthetic construct
acagccgcacgaaacg

SEQ ID NO: 16687 - DNA, 16 bp, Artificial Sequence
  Synthetic construct
acagccgcatctcgct

SEQ ID NO: 16688 - DNA, 16 bp, Artificial Sequence
  Synthetic construct
acagccgcatctcgct

SEQ ID NO: 16689 - DNA, 16 bp, Artificial Sequence
  Synthetic construct
acatacgagcatggca

SEQ ID NO: 16690 - DNA, 16 bp, Artificial Sequence
  Synthetic construct
acatacgagcatggca

SEQ ID NO: 16691 - DNA, 16 bp, Artificial Sequence
  Synthetic construct
acatacgagttcgcat

SEQ ID NO: 16692 - DNA, 16 bp, Artificial Sequence
  Synthetic construct
acatacgagttcgcat

SEQ ID NO: 16693 - DNA, 16 bp, Artificial Sequence
  Synthetic construct
acatacgtcacttact

SEQ ID NO: 16694 - DNA, 16 bp, Artificial Sequence
  Synthetic construct
acatacgtcacttact

SEQ ID NO: 16695 - DNA, 16 bp, Artificial Sequence
  Synthetic construct
acatacgtctcgcatc

SEQ ID NO: 16696 - DNA, 16 bp, Artificial Sequence
  Synthetic construct
acatacgtctcgcatc

SEQ ID NO: 16697 - DNA, 16 bp, Artificial Sequence
  Synthetic construct
acatggttcctatgtt

SEQ ID NO: 16698 - DNA, 16 bp, Artificial Sequence
  Synthetic construct
acatggttcctatgtt

SEQ ID NO: 16699 - DNA, 16 bp, Artificial Sequence
  Synthetic construct
acatggttctagcaca

SEQ ID NO: 16700 - DNA, 16 bp, Artificial Sequence
  Synthetic construct
acatggttctagcaca

SEQ ID NO: 16701 - DNA, 16 bp, Artificial Sequence
  Synthetic construct
acatggttctgtctcg

SEQ ID NO: 16702 - DNA, 16 bp, Artificial Sequence
  Synthetic construct
acatggttctgtctcg

SEQ ID NO: 16703 - DNA, 16 bp, Artificial Sequence
  Synthetic construct
acccactaggcgacat

SEQ ID NO: 16704 - DNA, 16 bp, Artificial Sequence
  Synthetic construct
acccactaggcgacat

SEQ ID NO: 16705 - DNA, 16 bp, Artificial Sequence
  Synthetic construct
acccactgtagcgtag

SEQ ID NO: 16706 - DNA, 16 bp, Artificial Sequence
  Synthetic construct
acccactgtagcgtag

SEQ ID NO: 16707 - DNA, 16 bp, Artificial Sequence
  Synthetic construct
acccactgttctcatt

SEQ ID NO: 16708 - DNA, 16 bp, Artificial Sequence
  Synthetic construct
acccactgttctcatt

SEQ ID NO: 16709 - DNA, 16 bp, Artificial Sequence
  Synthetic construct
accgtaagtaccgtat

SEQ ID NO: 16710 - DNA, 16 bp, Artificial Sequence
  Synthetic construct
accgtaagtaccgtat

SEQ ID NO: 16711 - DNA, 16 bp, Artificial Sequence
  Synthetic construct
acctttagtagagctg

SEQ ID NO: 16712 - DNA, 16 bp, Artificial Sequence
  Synthetic construct
acctttagtagagctg

SEQ ID NO: 16713 - DNA, 16 bp, Artificial Sequence
  Synthetic construct
acctttatctaacttc

SEQ ID NO: 16714 - DNA, 16 bp, Artificial Sequence
  Synthetic construct
acctttatctaacttc

SEQ ID NO: 16715 - DNA, 16 bp, Artificial Sequence
  Synthetic construct
acgagcccagcgtcca

SEQ ID NO: 16716 - DNA, 16 bp, Artificial Sequence
  Synthetic construct
acgagcccagcgtcca

SEQ ID NO: 16717 - DNA, 16 bp, Artificial Sequence
  Synthetic construct
acgagccgtggtccgt

SEQ ID NO: 16718 - DNA, 16 bp, Artificial Sequence
  Synthetic construct
acgagccgtggtccgt

SEQ ID NO: 16719 - DNA, 16 bp, Artificial Sequence
  Synthetic construct
acgagcctcttaccgc

SEQ ID NO: 16720 - DNA, 16 bp, Artificial Sequence
  Synthetic construct
acgagcctcttaccgc

SEQ ID NO: 16721 - DNA, 16 bp, Artificial Sequence
  Synthetic construct
acgaggaagtctcaac

SEQ ID NO: 16722 - DNA, 16 bp, Artificial Sequence
  Synthetic construct
acgaggaagtctcaac

SEQ ID NO: 16723 - DNA, 16 bp, Artificial Sequence
  Synthetic construct
acgaggagtacagtgg

SEQ ID NO: 16724 - DNA, 16 bp, Artificial Sequence
  Synthetic construct
acgaggagtacagtgg

SEQ ID NO: 16725 - DNA, 16 bp, Artificial Sequence
  Synthetic construct
acgaggatcaacacac

SEQ ID NO: 16726 - DNA, 16 bp, Artificial Sequence
  Synthetic construct
acgaggatcaacacac

SEQ ID NO: 16727 - DNA, 16 bp, Artificial Sequence
  Synthetic construct
acgataccaccacgtg

SEQ ID NO: 16728 - DNA, 16 bp, Artificial Sequence
  Synthetic construct
acgataccaccacgtg

SEQ ID NO: 16729 - DNA, 16 bp, Artificial Sequence
  Synthetic construct
acgatacgttacgtca

SEQ ID NO: 16730 - DNA, 16 bp, Artificial Sequence
  Synthetic construct
acgatacgttacgtca

SEQ ID NO: 16731 - DNA, 16 bp, Artificial Sequence
  Synthetic construct
acgcagccaatagcgg

SEQ ID NO: 16732 - DNA, 16 bp, Artificial Sequence
  Synthetic construct
acgcagccaatagcgg

SEQ ID NO: 16733 - DNA, 16 bp, Artificial Sequence
  Synthetic construct
acgcagccatgacgga

SEQ ID NO: 16734 - DNA, 16 bp, Artificial Sequence
  Synthetic construct
acgcagccatgacgga

SEQ ID NO: 16735 - DNA, 16 bp, Artificial Sequence
  Synthetic construct
acgccagcaagcgctc

SEQ ID NO: 16736 - DNA, 16 bp, Artificial Sequence
  Synthetic construct
acgccagcaagcgctc

SEQ ID NO: 16737 - DNA, 16 bp, Artificial Sequence
  Synthetic construct
acgccagtcatgcaac

SEQ ID NO: 16738 - DNA, 16 bp, Artificial Sequence
  Synthetic construct
acgccagtcatgcaac

SEQ ID NO: 16739 - DNA, 16 bp, Artificial Sequence
  Synthetic construct
acgccagtcgtaccgg

SEQ ID NO: 16740 - DNA, 16 bp, Artificial Sequence
  Synthetic construct
acgccagtcgtaccgg

SEQ ID NO: 16741 - DNA, 16 bp, Artificial Sequence
  Synthetic construct
acgccgagtcgaaagc

SEQ ID NO: 16742 - DNA, 16 bp, Artificial Sequence
  Synthetic construct
acgccgagtcgaaagc

SEQ ID NO: 16743 - DNA, 16 bp, Artificial Sequence
  Synthetic construct
acggagaagcatcatc

SEQ ID NO: 16744 - DNA, 16 bp, Artificial Sequence
  Synthetic construct
acggagaagcatcatc

SEQ ID NO: 16745 - DNA, 16 bp, Artificial Sequence
  Synthetic construct
acgggtcagtattgga

SEQ ID NO: 16746 - DNA, 16 bp, Artificial Sequence
  Synthetic construct
acgggtcagtattgga

SEQ ID NO: 16747 - DNA, 16 bp, Artificial Sequence
  Synthetic construct
acgggtccaaggtttc

SEQ ID NO: 16748 - DNA, 16 bp, Artificial Sequence
  Synthetic construct
acgggtccaaggtttc

SEQ ID NO: 16749 - DNA, 16 bp, Artificial Sequence
  Synthetic construct
acgggtcgttccacaa

SEQ ID NO: 16750 - DNA, 16 bp, Artificial Sequence
  Synthetic construct
acgggtcgttccacaa

SEQ ID NO: 16751 - DNA, 16 bp, Artificial Sequence
  Synthetic construct
acgggtctcgaccagc

SEQ ID NO: 16752 - DNA, 16 bp, Artificial Sequence
  Synthetic construct
acgggtctcgaccagc

SEQ ID NO: 16753 - DNA, 16 bp, Artificial Sequence
  Synthetic construct
acgtcaaagatgcgac

SEQ ID NO: 16754 - DNA, 16 bp, Artificial Sequence
  Synthetic construct
acgtcaaagatgcgac

SEQ ID NO: 16755 - DNA, 16 bp, Artificial Sequence
  Synthetic construct
acgtcaacatcacaac

SEQ ID NO: 16756 - DNA, 16 bp, Artificial Sequence
  Synthetic construct
acgtcaacatcacaac

SEQ ID NO: 16757 - DNA, 16 bp, Artificial Sequence
  Synthetic construct
actgaacgtctaaaga

SEQ ID NO: 16758 - DNA, 16 bp, Artificial Sequence
  Synthetic construct
actgaacgtctaaaga

SEQ ID NO: 16759 - DNA, 16 bp, Artificial Sequence
  Synthetic construct
actgagtagggagtaa

SEQ ID NO: 16760 - DNA, 16 bp, Artificial Sequence
  Synthetic construct
actgagtagggagtaa

SEQ ID NO: 16761 - DNA, 16 bp, Artificial Sequence
  Synthetic construct
actgagtgtagcgtag

SEQ ID NO: 16762 - DNA, 16 bp, Artificial Sequence
  Synthetic construct
actgagtgtagcgtag

SEQ ID NO: 16763 - DNA, 16 bp, Artificial Sequence
  Synthetic construct
actgatgcacgcgaaa

SEQ ID NO: 16764 - DNA, 16 bp, Artificial Sequence
  Synthetic construct
actgatgcacgcgaaa

SEQ ID NO: 16765 - DNA, 16 bp, Artificial Sequence
  Synthetic construct
actgatgcatcatccc

SEQ ID NO: 16766 - DNA, 16 bp, Artificial Sequence
  Synthetic construct
actgatgcatcatccc

SEQ ID NO: 16767 - DNA, 16 bp, Artificial Sequence
  Synthetic construct
actgatgtcggtctaa

SEQ ID NO: 16768 - DNA, 16 bp, Artificial Sequence
  Synthetic construct
actgatgtcggtctaa

SEQ ID NO: 16769 - DNA, 16 bp, Artificial Sequence
  Synthetic construct
actgctcagggttccc

SEQ ID NO: 16770 - DNA, 16 bp, Artificial Sequence
  Synthetic construct
actgctcagggttccc

SEQ ID NO: 16771 - DNA, 16 bp, Artificial Sequence
  Synthetic construct
actgctcgtccaacta

SEQ ID NO: 16772 - DNA, 16 bp, Artificial Sequence
  Synthetic construct
actgctcgtccaacta

SEQ ID NO: 16773 - DNA, 16 bp, Artificial Sequence
  Synthetic construct
actgctcgtcgcatat

SEQ ID NO: 16774 - DNA, 16 bp, Artificial Sequence
  Synthetic construct
actgctcgtcgcatat

SEQ ID NO: 16775 - DNA, 16 bp, Artificial Sequence
  Synthetic construct
actgtccgttcctcca

SEQ ID NO: 16776 - DNA, 16 bp, Artificial Sequence
  Synthetic construct
actgtccgttcctcca

SEQ ID NO: 16777 - DNA, 16 bp, Artificial Sequence
  Synthetic construct
actgtcctcattgccc

SEQ ID NO: 16778 - DNA, 16 bp, Artificial Sequence
  Synthetic construct
actgtcctcattgccc

SEQ ID NO: 16779 - DNA, 16 bp, Artificial Sequence
  Synthetic construct
acttactgtttagctg

SEQ ID NO: 16780 - DNA, 16 bp, Artificial Sequence
  Synthetic construct
acttactgtttagctg

SEQ ID NO: 16781 - DNA, 16 bp, Artificial Sequence
  Synthetic construct
acttgttcagctattg

SEQ ID NO: 16782 - DNA, 16 bp, Artificial Sequence
  Synthetic construct
acttgttcagctattg

SEQ ID NO: 16783 - DNA, 16 bp, Artificial Sequence
  Synthetic construct
acttgtttcctgtaga

SEQ ID NO: 16784 - DNA, 16 bp, Artificial Sequence
  Synthetic construct
acttgtttcctgtaga

SEQ ID NO: 16785 - DNA, 16 bp, Artificial Sequence
  Synthetic construct
acttgtttcgcaggct

SEQ ID NO: 16786 - DNA, 16 bp, Artificial Sequence
  Synthetic construct
acttgtttcgcaggct

SEQ ID NO: 16787 - DNA, 16 bp, Artificial Sequence
  Synthetic construct
actttcaagctgcgaa

SEQ ID NO: 16788 - DNA, 16 bp, Artificial Sequence
  Synthetic construct
actttcaagctgcgaa

SEQ ID NO: 16789 - DNA, 16 bp, Artificial Sequence
  Synthetic construct
actttcacaatggacg

SEQ ID NO: 16790 - DNA, 16 bp, Artificial Sequence
  Synthetic construct
actttcacaatggacg

SEQ ID NO: 16791 - DNA, 16 bp, Artificial Sequence
  Synthetic construct
actttcacataaaggt

SEQ ID NO: 16792 - DNA, 16 bp, Artificial Sequence
  Synthetic construct
actttcacataaaggt

SEQ ID NO: 16793 - DNA, 16 bp, Artificial Sequence
  Synthetic construct
agaatagcataaaggt

SEQ ID NO: 16794 - DNA, 16 bp, Artificial Sequence
  Synthetic construct
agaatagcataaaggt

SEQ ID NO: 16795 - DNA, 16 bp, Artificial Sequence
  Synthetic construct
agaataggttcacggc

SEQ ID NO: 16796 - DNA, 16 bp, Artificial Sequence
  Synthetic construct
agaataggttcacggc

SEQ ID NO: 16797 - DNA, 16 bp, Artificial Sequence
  Synthetic construct
agaatagtccgtaggc

SEQ ID NO: 16798 - DNA, 16 bp, Artificial Sequence
  Synthetic construct
agaatagtccgtaggc

SEQ ID NO: 16799 - DNA, 16 bp, Artificial Sequence
  Synthetic construct
agacgttagcgtaata

SEQ ID NO: 16800 - DNA, 16 bp, Artificial Sequence
  Synthetic construct
agacgttagcgtaata

SEQ ID NO: 16801 - DNA, 16 bp, Artificial Sequence
  Synthetic construct
agacgttgtaacgcga

SEQ ID NO: 16802 - DNA, 16 bp, Artificial Sequence
  Synthetic construct
agacgttgtaacgcga

SEQ ID NO: 16803 - DNA, 16 bp, Artificial Sequence
  Synthetic construct
agacgttgtcatcggc

SEQ ID NO: 16804 - DNA, 16 bp, Artificial Sequence
  Synthetic construct
agacgttgtcatcggc

SEQ ID NO: 16805 - DNA, 16 bp, Artificial Sequence
  Synthetic construct
agacgtttcgcttgtc

SEQ ID NO: 16806 - DNA, 16 bp, Artificial Sequence
  Synthetic construct
agacgtttcgcttgtc

SEQ ID NO: 16807 - DNA, 16 bp, Artificial Sequence
  Synthetic construct
agagcgaagacactaa

SEQ ID NO: 16808 - DNA, 16 bp, Artificial Sequence
  Synthetic construct
agagcgaagacactaa

SEQ ID NO: 16809 - DNA, 16 bp, Artificial Sequence
  Synthetic construct
agagcgaaggacagct

SEQ ID NO: 16810 - DNA, 16 bp, Artificial Sequence
  Synthetic construct
agagcgaaggacagct

SEQ ID NO: 16811 - DNA, 16 bp, Artificial Sequence
  Synthetic construct
agagcgaagtgttaga

SEQ ID NO: 16812 - DNA, 16 bp, Artificial Sequence
  Synthetic construct
agagcgaagtgttaga

SEQ ID NO: 16813 - DNA, 16 bp, Artificial Sequence
  Synthetic construct
agagcgacaagcccac

SEQ ID NO: 16814 - DNA, 16 bp, Artificial Sequence
  Synthetic construct
agagcgacaagcccac

SEQ ID NO: 16815 - DNA, 16 bp, Artificial Sequence
  Synthetic construct
agagcgatcttgaggt

SEQ ID NO: 16816 - DNA, 16 bp, Artificial Sequence
  Synthetic construct
agagcgatcttgaggt

SEQ ID NO: 16817 - DNA, 16 bp, Artificial Sequence
  Synthetic construct
agagcttaggcacatg

SEQ ID NO: 16818 - DNA, 16 bp, Artificial Sequence
  Synthetic construct
agagcttaggcacatg

SEQ ID NO: 16819 - DNA, 16 bp, Artificial Sequence
  Synthetic construct
agagcttgttgcgtta

SEQ ID NO: 16820 - DNA, 16 bp, Artificial Sequence
  Synthetic construct
agagcttgttgcgtta

SEQ ID NO: 16821 - DNA, 16 bp, Artificial Sequence
  Synthetic construct
agagtggagagtgaga

SEQ ID NO: 16822 - DNA, 16 bp, Artificial Sequence
  Synthetic construct
agagtggagagtgaga

SEQ ID NO: 16823 - DNA, 16 bp, Artificial Sequence
  Synthetic construct
agagtggcacacatgt

SEQ ID NO: 16824 - DNA, 16 bp, Artificial Sequence
  Synthetic construct
agagtggcacacatgt

SEQ ID NO: 16825 - DNA, 16 bp, Artificial Sequence
  Synthetic construct
agatctgagtacttgc

SEQ ID NO: 16826 - DNA, 16 bp, Artificial Sequence
  Synthetic construct
agatctgagtacttgc

SEQ ID NO: 16827 - DNA, 16 bp, Artificial Sequence
  Synthetic construct
agcatacagtaagtac

SEQ ID NO: 16828 - DNA, 16 bp, Artificial Sequence
  Synthetic construct
agcatacagtaagtac

SEQ ID NO: 16829 - DNA, 16 bp, Artificial Sequence
  Synthetic construct
agcataccaattgctg

SEQ ID NO: 16830 - DNA, 16 bp, Artificial Sequence
  Synthetic construct
agcataccaattgctg

SEQ ID NO: 16831 - DNA, 16 bp, Artificial Sequence
  Synthetic construct
agcctaaaggatggaa

SEQ ID NO: 16832 - DNA, 16 bp, Artificial Sequence
  Synthetic construct
agcctaaaggatggaa

SEQ ID NO: 16833 - DNA, 16 bp, Artificial Sequence
  Synthetic construct
agcctaagtccagtgc

SEQ ID NO: 16834 - DNA, 16 bp, Artificial Sequence
  Synthetic construct
agcctaagtccagtgc

SEQ ID NO: 16835 - DNA, 16 bp, Artificial Sequence
  Synthetic construct
agcctaagtccgaaga

SEQ ID NO: 16836 - DNA, 16 bp, Artificial Sequence
  Synthetic construct
agcctaagtccgaaga

SEQ ID NO: 16837 - DNA, 16 bp, Artificial Sequence
  Synthetic construct
agcggtcagactagat

SEQ ID NO: 16838 - DNA, 16 bp, Artificial Sequence
  Synthetic construct
agcggtcagactagat

SEQ ID NO: 16839 - DNA, 16 bp, Artificial Sequence
  Synthetic construct
agcgtatgtgtcgctg

SEQ ID NO: 16840 - DNA, 16 bp, Artificial Sequence
  Synthetic construct
agcgtatgtgtcgctg

SEQ ID NO: 16841 - DNA, 16 bp, Artificial Sequence
  Synthetic construct
agctccttcagcgatt

SEQ ID NO: 16842 - DNA, 16 bp, Artificial Sequence
  Synthetic construct
agctccttcagcgatt

SEQ ID NO: 16843 - DNA, 16 bp, Artificial Sequence
  Synthetic construct
agctccttcgcctgtt

SEQ ID NO: 16844 - DNA, 16 bp, Artificial Sequence
  Synthetic construct
agctccttcgcctgtt

SEQ ID NO: 16845 - DNA, 16 bp, Artificial Sequence
  Synthetic construct
agcttgaagatatggt

SEQ ID NO: 16846 - DNA, 16 bp, Artificial Sequence
  Synthetic construct
agcttgaagatatggt

SEQ ID NO: 16847 - DNA, 16 bp, Artificial Sequence
  Synthetic construct
agcttgaagctaactc

SEQ ID NO: 16848 - DNA, 16 bp, Artificial Sequence
  Synthetic construct
agcttgaagctaactc

SEQ ID NO: 16849 - DNA, 16 bp, Artificial Sequence
  Synthetic construct
agcttgagtatcgcat

SEQ ID NO: 16850 - DNA, 16 bp, Artificial Sequence
  Synthetic construct
agcttgagtatcgcat

SEQ ID NO: 16851 - DNA, 16 bp, Artificial Sequence
  Synthetic construct
agcttgatcggcggtt

SEQ ID NO: 16852 - DNA, 16 bp, Artificial Sequence
  Synthetic construct
agcttgatcggcggtt

SEQ ID NO: 16853 - DNA, 16 bp, Artificial Sequence
  Synthetic construct
aggccacagcgtctat

SEQ ID NO: 16854 - DNA, 16 bp, Artificial Sequence
  Synthetic construct
aggccacagcgtctat

SEQ ID NO: 16855 - DNA, 16 bp, Artificial Sequence
  Synthetic construct
aggccaccagagtgtg

SEQ ID NO: 16856 - DNA, 16 bp, Artificial Sequence
  Synthetic construct
aggccaccagagtgtg

SEQ ID NO: 16857 - DNA, 16 bp, Artificial Sequence
  Synthetic construct
aggccaccagggagag

SEQ ID NO: 16858 - DNA, 16 bp, Artificial Sequence
  Synthetic construct
aggccaccagggagag

SEQ ID NO: 16859 - DNA, 16 bp, Artificial Sequence
  Synthetic construct
aggccgtagaatgttg

SEQ ID NO: 16860 - DNA, 16 bp, Artificial Sequence
  Synthetic construct
aggccgtagaatgttg

SEQ ID NO: 16861 - DNA, 16 bp, Artificial Sequence
  Synthetic construct
aggccgtcattgagct

SEQ ID NO: 16862 - DNA, 16 bp, Artificial Sequence
  Synthetic construct
aggccgtcattgagct

SEQ ID NO: 16863 - DNA, 16 bp, Artificial Sequence
  Synthetic construct
agggagtgtagctaaa

SEQ ID NO: 16864 - DNA, 16 bp, Artificial Sequence
  Synthetic construct
agggagtgtagctaaa

SEQ ID NO: 16865 - DNA, 16 bp, Artificial Sequence
  Synthetic construct
agggagtgttccggca

SEQ ID NO: 16866 - DNA, 16 bp, Artificial Sequence
  Synthetic construct
agggagtgttccggca

SEQ ID NO: 16867 - DNA, 16 bp, Artificial Sequence
  Synthetic construct
agggagttcgccgtga

SEQ ID NO: 16868 - DNA, 16 bp, Artificial Sequence
  Synthetic construct
agggagttcgccgtga

SEQ ID NO: 16869 - DNA, 16 bp, Artificial Sequence
  Synthetic construct
agggatgaggctaggt

SEQ ID NO: 16870 - DNA, 16 bp, Artificial Sequence
  Synthetic construct
agggatgaggctaggt

SEQ ID NO: 16871 - DNA, 16 bp, Artificial Sequence
  Synthetic construct
agggtgaagtctcaac

SEQ ID NO: 16872 - DNA, 16 bp, Artificial Sequence
  Synthetic construct
agggtgaagtctcaac

SEQ ID NO: 16873 - DNA, 16 bp, Artificial Sequence
  Synthetic construct
agggtgacacggacaa

SEQ ID NO: 16874 - DNA, 16 bp, Artificial Sequence
  Synthetic construct
agggtgacacggacaa

SEQ ID NO: 16875 - DNA, 16 bp, Artificial Sequence
  Synthetic construct
agggtgagttacgact

SEQ ID NO: 16876 - DNA, 16 bp, Artificial Sequence
  Synthetic construct
agggtgagttacgact

SEQ ID NO: 16877 - DNA, 16 bp, Artificial Sequence
  Synthetic construct
aggtcataggagcgtt

SEQ ID NO: 16878 - DNA, 16 bp, Artificial Sequence
  Synthetic construct
aggtcataggagcgtt

SEQ ID NO: 16879 - DNA, 16 bp, Artificial Sequence
  Synthetic construct
aggtcatagttatcgc

SEQ ID NO: 16880 - DNA, 16 bp, Artificial Sequence
  Synthetic construct
aggtcatagttatcgc

SEQ ID NO: 16881 - DNA, 16 bp, Artificial Sequence
  Synthetic construct
agtctttagatgcgac

SEQ ID NO: 16882 - DNA, 16 bp, Artificial Sequence
  Synthetic construct
agtctttagatgcgac

SEQ ID NO: 16883 - DNA, 16 bp, Artificial Sequence
  Synthetic construct
agtcttttcaataccg

SEQ ID NO: 16884 - DNA, 16 bp, Artificial Sequence
  Synthetic construct
agtcttttcaataccg

SEQ ID NO: 16885 - DNA, 16 bp, Artificial Sequence
  Synthetic construct
agtgaggagacccacc

SEQ ID NO: 16886 - DNA, 16 bp, Artificial Sequence
  Synthetic construct
agtgaggagacccacc

SEQ ID NO: 16887 - DNA, 16 bp, Artificial Sequence
  Synthetic construct
agtgagggtcatccct

SEQ ID NO: 16888 - DNA, 16 bp, Artificial Sequence
  Synthetic construct
agtgagggtcatccct

SEQ ID NO: 16889 - DNA, 16 bp, Artificial Sequence
  Synthetic construct
agtgggacacttaacg

SEQ ID NO: 16890 - DNA, 16 bp, Artificial Sequence
  Synthetic construct
agtgggacacttaacg

SEQ ID NO: 16891 - DNA, 16 bp, Artificial Sequence
  Synthetic construct
agtgtcagtttgacac

SEQ ID NO: 16892 - DNA, 16 bp, Artificial Sequence
  Synthetic construct
agtgtcagtttgacac

SEQ ID NO: 16893 - DNA, 16 bp, Artificial Sequence
  Synthetic construct
agtgtcatcaataccg

SEQ ID NO: 16894 - DNA, 16 bp, Artificial Sequence
  Synthetic construct
agtgtcatcaataccg

SEQ ID NO: 16895 - DNA, 16 bp, Artificial Sequence
  Synthetic construct
agttggttcatgcatg

SEQ ID NO: 16896 - DNA, 16 bp, Artificial Sequence
  Synthetic construct
agttggttcatgcatg

SEQ ID NO: 16897 - DNA, 16 bp, Artificial Sequence
  Synthetic construct
agttggttccttggtc

SEQ ID NO: 16898 - DNA, 16 bp, Artificial Sequence
  Synthetic construct
agttggttccttggtc

SEQ ID NO: 16899 - DNA, 16 bp, Artificial Sequence
  Synthetic construct
ataacgccaagcgatg

SEQ ID NO: 16900 - DNA, 16 bp, Artificial Sequence
  Synthetic construct
ataacgccaagcgatg

SEQ ID NO: 16901 - DNA, 16 bp, Artificial Sequence
  Synthetic construct
ataacgccattacctt

SEQ ID NO: 16902 - DNA, 16 bp, Artificial Sequence
  Synthetic construct
ataacgccattacctt

SEQ ID NO: 16903 - DNA, 16 bp, Artificial Sequence
  Synthetic construct
ataacgcgtatcagtc

SEQ ID NO: 16904 - DNA, 16 bp, Artificial Sequence
  Synthetic construct
ataacgcgtatcagtc

SEQ ID NO: 16905 - DNA, 16 bp, Artificial Sequence
  Synthetic construct
atagaccgtaagagga

SEQ ID NO: 16906 - DNA, 16 bp, Artificial Sequence
  Synthetic construct
atagaccgtaagagga

SEQ ID NO: 16907 - DNA, 16 bp, Artificial Sequence
  Synthetic construct
atagacctcctttaca

SEQ ID NO: 16908 - DNA, 16 bp, Artificial Sequence
  Synthetic construct
atagacctcctttaca

SEQ ID NO: 16909 - DNA, 16 bp, Artificial Sequence
  Synthetic construct
atagacctctgtctcg

SEQ ID NO: 16910 - DNA, 16 bp, Artificial Sequence
  Synthetic construct
atagacctctgtctcg

SEQ ID NO: 16911 - DNA, 16 bp, Artificial Sequence
  Synthetic construct
atcacgagtcgagttt

SEQ ID NO: 16912 - DNA, 16 bp, Artificial Sequence
  Synthetic construct
atcacgagtcgagttt

SEQ ID NO: 16913 - DNA, 16 bp, Artificial Sequence
  Synthetic construct
atcatctgttgtcttt

SEQ ID NO: 16914 - DNA, 16 bp, Artificial Sequence
  Synthetic construct
atcatctgttgtcttt

SEQ ID NO: 16915 - DNA, 16 bp, Artificial Sequence
  Synthetic construct
atcatctgtttgtgtg

SEQ ID NO: 16916 - DNA, 16 bp, Artificial Sequence
  Synthetic construct
atcatctgtttgtgtg

SEQ ID NO: 16917 - DNA, 16 bp, Artificial Sequence
  Synthetic construct
atcatcttctgtgcaa

SEQ ID NO: 16918 - DNA, 16 bp, Artificial Sequence
  Synthetic construct
atcatcttctgtgcaa

SEQ ID NO: 16919 - DNA, 16 bp, Artificial Sequence
  Synthetic construct
atcatggagctgtcta

SEQ ID NO: 16920 - DNA, 16 bp, Artificial Sequence
  Synthetic construct
atcatggagctgtcta

SEQ ID NO: 16921 - DNA, 16 bp, Artificial Sequence
  Synthetic construct
atcatggcatactctt

SEQ ID NO: 16922 - DNA, 16 bp, Artificial Sequence
  Synthetic construct
atcatggcatactctt

SEQ ID NO: 16923 - DNA, 16 bp, Artificial Sequence
  Synthetic construct
atcatgggtcagaata

SEQ ID NO: 16924 - DNA, 16 bp, Artificial Sequence
  Synthetic construct
atcatgggtcagaata

SEQ ID NO: 16925 - DNA, 16 bp, Artificial Sequence
  Synthetic construct
atccgaacagtagagc

SEQ ID NO: 16926 - DNA, 16 bp, Artificial Sequence
  Synthetic construct
atccgaacagtagagc

SEQ ID NO: 16927 - DNA, 16 bp, Artificial Sequence
  Synthetic construct
atccgaagttcgggct

SEQ ID NO: 16928 - DNA, 16 bp, Artificial Sequence
  Synthetic construct
atccgaagttcgggct

SEQ ID NO: 16929 - DNA, 16 bp, Artificial Sequence
  Synthetic construct
atcgagtcacatttct

SEQ ID NO: 16930 - DNA, 16 bp, Artificial Sequence
  Synthetic construct
atcgagtcacatttct

SEQ ID NO: 16931 - DNA, 16 bp, Artificial Sequence
  Synthetic construct
atctactcattcttac

SEQ ID NO: 16932 - DNA, 16 bp, Artificial Sequence
  Synthetic construct
atctactcattcttac

SEQ ID NO: 16933 - DNA, 16 bp, Artificial Sequence
  Synthetic construct
atctactgtcgaatct

SEQ ID NO: 16934 - DNA, 16 bp, Artificial Sequence
  Synthetic construct
atctactgtcgaatct

SEQ ID NO: 16935 - DNA, 16 bp, Artificial Sequence
  Synthetic construct
atgaggggtgaaatca

SEQ ID NO: 16936 - DNA, 16 bp, Artificial Sequence
  Synthetic construct
atgaggggtgaaatca

SEQ ID NO: 16937 - DNA, 16 bp, Artificial Sequence
  Synthetic construct
atgcgatagctaccta

SEQ ID NO: 16938 - DNA, 16 bp, Artificial Sequence
  Synthetic construct
atgcgatagctaccta

SEQ ID NO: 16939 - DNA, 16 bp, Artificial Sequence
  Synthetic construct
atgggagcaatcacac

SEQ ID NO: 16940 - DNA, 16 bp, Artificial Sequence
  Synthetic construct
atgggagcaatcacac

SEQ ID NO: 16941 - DNA, 16 bp, Artificial Sequence
  Synthetic construct
atgtgtgcaaacccat

SEQ ID NO: 16942 - DNA, 16 bp, Artificial Sequence
  Synthetic construct
atgtgtgcaaacccat

SEQ ID NO: 16943 - DNA, 16 bp, Artificial Sequence
  Synthetic construct
attactcagtctcaac

SEQ ID NO: 16944 - DNA, 16 bp, Artificial Sequence
  Synthetic construct
attactcagtctcaac

SEQ ID NO: 16945 - DNA, 16 bp, Artificial Sequence
  Synthetic construct
attactcgtaaatgac

SEQ ID NO: 16946 - DNA, 16 bp, Artificial Sequence
  Synthetic construct
attactcgtaaatgac

SEQ ID NO: 16947 - DNA, 16 bp, Artificial Sequence
  Synthetic construct
attactcgtagcaaat

SEQ ID NO: 16948 - DNA, 16 bp, Artificial Sequence
  Synthetic construct
attactcgtagcaaat

SEQ ID NO: 16949 - DNA, 16 bp, Artificial Sequence
  Synthetic construct
attactcgtagctgcc

SEQ ID NO: 16950 - DNA, 16 bp, Artificial Sequence
  Synthetic construct
attactcgtagctgcc

SEQ ID NO: 16951 - DNA, 16 bp, Artificial Sequence
  Synthetic construct
attactcgtgatgccc

SEQ ID NO: 16952 - DNA, 16 bp, Artificial Sequence
  Synthetic construct
attactcgtgatgccc

SEQ ID NO: 16953 - DNA, 16 bp, Artificial Sequence
  Synthetic construct
attctacagactagat

SEQ ID NO: 16954 - DNA, 16 bp, Artificial Sequence
  Synthetic construct
attctacagactagat

SEQ ID NO: 16955 - DNA, 16 bp, Artificial Sequence
  Synthetic construct
attctacgtcgccatg

SEQ ID NO: 16956 - DNA, 16 bp, Artificial Sequence
  Synthetic construct
attctacgtcgccatg

SEQ ID NO: 16957 - DNA, 16 bp, Artificial Sequence
  Synthetic construct
attctactcacatagc

SEQ ID NO: 16958 - DNA, 16 bp, Artificial Sequence
  Synthetic construct
attctactcacatagc

SEQ ID NO: 16959 - DNA, 16 bp, Artificial Sequence
  Synthetic construct
attggaccatcaccct

SEQ ID NO: 16960 - DNA, 16 bp, Artificial Sequence
  Synthetic construct
attggaccatcaccct

SEQ ID NO: 16961 - DNA, 16 bp, Artificial Sequence
  Synthetic construct
attggtgcaaatacag

SEQ ID NO: 16962 - DNA, 16 bp, Artificial Sequence
  Synthetic construct
attggtgcaaatacag

SEQ ID NO: 16963 - DNA, 16 bp, Artificial Sequence
  Synthetic construct
attggtggtcgagttt

SEQ ID NO: 16964 - DNA, 16 bp, Artificial Sequence
  Synthetic construct
attggtggtcgagttt

SEQ ID NO: 16965 - DNA, 16 bp, Artificial Sequence
  Synthetic construct
attggtggttacgact

SEQ ID NO: 16966 - DNA, 16 bp, Artificial Sequence
  Synthetic construct
attggtggttacgact

SEQ ID NO: 16967 - DNA, 16 bp, Artificial Sequence
  Synthetic construct
attggtgtcttgcaag

SEQ ID NO: 16968 - DNA, 16 bp, Artificial Sequence
  Synthetic construct
attggtgtcttgcaag

SEQ ID NO: 16969 - DNA, 16 bp, Artificial Sequence
  Synthetic construct
atttctgcagcctata

SEQ ID NO: 16970 - DNA, 16 bp, Artificial Sequence
  Synthetic construct
atttctgcagcctata

SEQ ID NO: 16971 - DNA, 16 bp, Artificial Sequence
  Synthetic construct
atttctggtactctcc

SEQ ID NO: 16972 - DNA, 16 bp, Artificial Sequence
  Synthetic construct
atttctggtactctcc

SEQ ID NO: 16973 - DNA, 16 bp, Artificial Sequence
  Synthetic construct
atttctggttgtggag

SEQ ID NO: 16974 - DNA, 16 bp, Artificial Sequence
  Synthetic construct
atttctggttgtggag

SEQ ID NO: 16975 - DNA, 16 bp, Artificial Sequence
  Synthetic construct
caaccaaaggcccgtt

SEQ ID NO: 16976 - DNA, 16 bp, Artificial Sequence
  Synthetic construct
caaccaaaggcccgtt

SEQ ID NO: 16977 - DNA, 16 bp, Artificial Sequence
  Synthetic construct
caaccaacaccctatc

SEQ ID NO: 16978 - DNA, 16 bp, Artificial Sequence
  Synthetic construct
caaccaacaccctatc

SEQ ID NO: 16979 - DNA, 16 bp, Artificial Sequence
  Synthetic construct
caaccaatctaacggt

SEQ ID NO: 16980 - DNA, 16 bp, Artificial Sequence
  Synthetic construct
caaccaatctaacggt

SEQ ID NO: 16981 - DNA, 16 bp, Artificial Sequence
  Synthetic construct
caacctcaggaattac

SEQ ID NO: 16982 - DNA, 16 bp, Artificial Sequence
  Synthetic construct
caacctcaggaattac

SEQ ID NO: 16983 - DNA, 16 bp, Artificial Sequence
  Synthetic construct
caacctctcacagtac

SEQ ID NO: 16984 - DNA, 16 bp, Artificial Sequence
  Synthetic construct
caacctctcacagtac

SEQ ID NO: 16985 - DNA, 16 bp, Artificial Sequence
  Synthetic construct
caactagaggcatggt

SEQ ID NO: 16986 - DNA, 16 bp, Artificial Sequence
  Synthetic construct
caactagaggcatggt

SEQ ID NO: 16987 - DNA, 16 bp, Artificial Sequence
  Synthetic construct
caagaaaaggttccta

SEQ ID NO: 16988 - DNA, 16 bp, Artificial Sequence
  Synthetic construct
caagaaaaggttccta

SEQ ID NO: 16989 - DNA, 16 bp, Artificial Sequence
  Synthetic construct
caagaaacaagctgtt

SEQ ID NO: 16990 - DNA, 16 bp, Artificial Sequence
  Synthetic construct
caagaaacaagctgtt

SEQ ID NO: 16991 - DNA, 16 bp, Artificial Sequence
  Synthetic construct
caagaaatcacgaagg

SEQ ID NO: 16992 - DNA, 16 bp, Artificial Sequence
  Synthetic construct
caagaaatcacgaagg

SEQ ID NO: 16993 - DNA, 16 bp, Artificial Sequence
  Synthetic construct
caagaaatcctcaacc

SEQ ID NO: 16994 - DNA, 16 bp, Artificial Sequence
  Synthetic construct
caagaaatcctcaacc

SEQ ID NO: 16995 - DNA, 16 bp, Artificial Sequence
  Synthetic construct
caagatcagctaccta

SEQ ID NO: 16996 - DNA, 16 bp, Artificial Sequence
  Synthetic construct
caagatcagctaccta

SEQ ID NO: 16997 - DNA, 16 bp, Artificial Sequence
  Synthetic construct
caagatcgtctcgttc

SEQ ID NO: 16998 - DNA, 16 bp, Artificial Sequence
  Synthetic construct
caagatcgtctcgttc

SEQ ID NO: 16999 - DNA, 16 bp, Artificial Sequence
  Synthetic construct
caagatctcctcatta

SEQ ID NO: 17000 - DNA, 16 bp, Artificial Sequence
  Synthetic construct
caagatctcctcatta

SEQ ID NO: 17001 - DNA, 16 bp, Artificial Sequence
  Synthetic construct
caagatctctctgtcg

SEQ ID NO: 17002 - DNA, 16 bp, Artificial Sequence
  Synthetic construct
caagatctctctgtcg

SEQ ID NO: 17003 - DNA, 16 bp, Artificial Sequence
  Synthetic construct
caagatctcttaccgc

SEQ ID NO: 17004 - DNA, 16 bp, Artificial Sequence
  Synthetic construct
caagatctcttaccgc

SEQ ID NO: 17005 - DNA, 16 bp, Artificial Sequence
  Synthetic construct
caaggccaggtgcaac

SEQ ID NO: 17006 - DNA, 16 bp, Artificial Sequence
  Synthetic construct
caaggccaggtgcaac

SEQ ID NO: 17007 - DNA, 16 bp, Artificial Sequence
  Synthetic construct
caaggcctctccctga

SEQ ID NO: 17008 - DNA, 16 bp, Artificial Sequence
  Synthetic construct
caaggcctctccctga

SEQ ID NO: 17009 - DNA, 16 bp, Artificial Sequence
  Synthetic construct
caagttgagcgatccc

SEQ ID NO: 17010 - DNA, 16 bp, Artificial Sequence
  Synthetic construct
caagttgagcgatccc

SEQ ID NO: 17011 - DNA, 16 bp, Artificial Sequence
  Synthetic construct
caagttgtcccggatg

SEQ ID NO: 17012 - DNA, 16 bp, Artificial Sequence
  Synthetic construct
caagttgtcccggatg

SEQ ID NO: 17013 - DNA, 16 bp, Artificial Sequence
  Synthetic construct
caagttgtcgtccgtt

SEQ ID NO: 17014 - DNA, 16 bp, Artificial Sequence
  Synthetic construct
caagttgtcgtccgtt

SEQ ID NO: 17015 - DNA, 16 bp, Artificial Sequence
  Synthetic construct
cacaaacgtcgcatcg

SEQ ID NO: 17016 - DNA, 16 bp, Artificial Sequence
  Synthetic construct
cacaaacgtcgcatcg

SEQ ID NO: 17017 - DNA, 16 bp, Artificial Sequence
  Synthetic construct
cacacaaagagacgaa

SEQ ID NO: 17018 - DNA, 16 bp, Artificial Sequence
  Synthetic construct
cacacaaagagacgaa

SEQ ID NO: 17019 - DNA, 16 bp, Artificial Sequence
  Synthetic construct
cacacaaagagtaccg

SEQ ID NO: 17020 - DNA, 16 bp, Artificial Sequence
  Synthetic construct
cacacaaagagtaccg

SEQ ID NO: 17021 - DNA, 16 bp, Artificial Sequence
  Synthetic construct
cacacaaagggcttga

SEQ ID NO: 17022 - DNA, 16 bp, Artificial Sequence
  Synthetic construct
cacacaaagggcttga

SEQ ID NO: 17023 - DNA, 16 bp, Artificial Sequence
  Synthetic construct
cacacaacaaactgct

SEQ ID NO: 17024 - DNA, 16 bp, Artificial Sequence
  Synthetic construct
cacacaacaaactgct

SEQ ID NO: 17025 - DNA, 16 bp, Artificial Sequence
  Synthetic construct
cacacaacaatgtaag

SEQ ID NO: 17026 - DNA, 16 bp, Artificial Sequence
  Synthetic construct
cacacaacaatgtaag

SEQ ID NO: 17027 - DNA, 16 bp, Artificial Sequence
  Synthetic construct
cacactcgtatgaatg

SEQ ID NO: 17028 - DNA, 16 bp, Artificial Sequence
  Synthetic construct
cacactcgtatgaatg

SEQ ID NO: 17029 - DNA, 16 bp, Artificial Sequence
  Synthetic construct
cacaggcagctagtct

SEQ ID NO: 17030 - DNA, 16 bp, Artificial Sequence
  Synthetic construct
cacaggcagctagtct

SEQ ID NO: 17031 - DNA, 16 bp, Artificial Sequence
  Synthetic construct
cacaggcagctttggt

SEQ ID NO: 17032 - DNA, 16 bp, Artificial Sequence
  Synthetic construct
cacaggcagctttggt

SEQ ID NO: 17033 - DNA, 16 bp, Artificial Sequence
  Synthetic construct
cacaggccagacaagc

SEQ ID NO: 17034 - DNA, 16 bp, Artificial Sequence
  Synthetic construct
cacaggccagacaagc

SEQ ID NO: 17035 - DNA, 16 bp, Artificial Sequence
  Synthetic construct
cacaggctcctttaca

SEQ ID NO: 17036 - DNA, 16 bp, Artificial Sequence
  Synthetic construct
cacaggctcctttaca

SEQ ID NO: 17037 - DNA, 16 bp, Artificial Sequence
  Synthetic construct
cacagtagtttagctg

SEQ ID NO: 17038 - DNA, 16 bp, Artificial Sequence
  Synthetic construct
cacagtagtttagctg

SEQ ID NO: 17039 - DNA, 16 bp, Artificial Sequence
  Synthetic construct
cacagtatcagctggc

SEQ ID NO: 17040 - DNA, 16 bp, Artificial Sequence
  Synthetic construct
cacagtatcagctggc

SEQ ID NO: 17041 - DNA, 16 bp, Artificial Sequence
  Synthetic construct
cacatagagatgtgta

SEQ ID NO: 17042 - DNA, 16 bp, Artificial Sequence
  Synthetic construct
cacatagagatgtgta

SEQ ID NO: 17043 - DNA, 16 bp, Artificial Sequence
  Synthetic construct
cacatagagccagttt

SEQ ID NO: 17044 - DNA, 16 bp, Artificial Sequence
  Synthetic construct
cacatagagccagttt

SEQ ID NO: 17045 - DNA, 16 bp, Artificial Sequence
  Synthetic construct
cacatagagcgatgac

SEQ ID NO: 17046 - DNA, 16 bp, Artificial Sequence
  Synthetic construct
cacatagagcgatgac

SEQ ID NO: 17047 - DNA, 16 bp, Artificial Sequence
  Synthetic construct
cacatagaggagcgtt

SEQ ID NO: 17048 - DNA, 16 bp, Artificial Sequence
  Synthetic construct
cacatagaggagcgtt

SEQ ID NO: 17049 - DNA, 16 bp, Artificial Sequence
  Synthetic construct
cacataggttactgac

SEQ ID NO: 17050 - DNA, 16 bp, Artificial Sequence
  Synthetic construct
cacataggttactgac

SEQ ID NO: 17051 - DNA, 16 bp, Artificial Sequence
  Synthetic construct
cacatagtcatcgctc

SEQ ID NO: 17052 - DNA, 16 bp, Artificial Sequence
  Synthetic construct
cacatagtcatcgctc

SEQ ID NO: 17053 - DNA, 16 bp, Artificial Sequence
  Synthetic construct
cacatagtcctattca

SEQ ID NO: 17054 - DNA, 16 bp, Artificial Sequence
  Synthetic construct
cacatagtcctattca

SEQ ID NO: 17055 - DNA, 16 bp, Artificial Sequence
  Synthetic construct
cacatagtctccctga

SEQ ID NO: 17056 - DNA, 16 bp, Artificial Sequence
  Synthetic construct
cacatagtctccctga

SEQ ID NO: 17057 - DNA, 16 bp, Artificial Sequence
  Synthetic construct
caccactcaccaccag

SEQ ID NO: 17058 - DNA, 16 bp, Artificial Sequence
  Synthetic construct
caccactcaccaccag

SEQ ID NO: 17059 - DNA, 16 bp, Artificial Sequence
  Synthetic construct
caccactcatcccact

SEQ ID NO: 17060 - DNA, 16 bp, Artificial Sequence
  Synthetic construct
caccactcatcccact

SEQ ID NO: 17061 - DNA, 16 bp, Artificial Sequence
  Synthetic construct
caccactcatcgattg

SEQ ID NO: 17062 - DNA, 16 bp, Artificial Sequence
  Synthetic construct
caccactcatcgattg

SEQ ID NO: 17063 - DNA, 16 bp, Artificial Sequence
  Synthetic construct
caccacttctgattct

SEQ ID NO: 17064 - DNA, 16 bp, Artificial Sequence
  Synthetic construct
caccacttctgattct

SEQ ID NO: 17065 - DNA, 16 bp, Artificial Sequence
  Synthetic construct
caccaggagaactcgg

SEQ ID NO: 17066 - DNA, 16 bp, Artificial Sequence
  Synthetic construct
caccaggagaactcgg

SEQ ID NO: 17067 - DNA, 16 bp, Artificial Sequence
  Synthetic construct
caccaggagctaccgc

SEQ ID NO: 17068 - DNA, 16 bp, Artificial Sequence
  Synthetic construct
caccaggagctaccgc

SEQ ID NO: 17069 - DNA, 16 bp, Artificial Sequence
  Synthetic construct
caccttgagctgataa

SEQ ID NO: 17070 - DNA, 16 bp, Artificial Sequence
  Synthetic construct
caccttgagctgataa

SEQ ID NO: 17071 - DNA, 16 bp, Artificial Sequence
  Synthetic construct
caccttgcaggtcgtc

SEQ ID NO: 17072 - DNA, 16 bp, Artificial Sequence
  Synthetic construct
caccttgcaggtcgtc

SEQ ID NO: 17073 - DNA, 16 bp, Artificial Sequence
  Synthetic construct
caccttgcatcgacgc

SEQ ID NO: 17074 - DNA, 16 bp, Artificial Sequence
  Synthetic construct
caccttgcatcgacgc

SEQ ID NO: 17075 - DNA, 16 bp, Artificial Sequence
  Synthetic construct
cactccacagtcgatt

SEQ ID NO: 17076 - DNA, 16 bp, Artificial Sequence
  Synthetic construct
cactccacagtcgatt

SEQ ID NO: 17077 - DNA, 16 bp, Artificial Sequence
  Synthetic construct
cactccagtgttcttt

SEQ ID NO: 17078 - DNA, 16 bp, Artificial Sequence
  Synthetic construct
cactccagtgttcttt

SEQ ID NO: 17079 - DNA, 16 bp, Artificial Sequence
  Synthetic construct
cactccatcgcgatcg

SEQ ID NO: 17080 - DNA, 16 bp, Artificial Sequence
  Synthetic construct
cactccatcgcgatcg

SEQ ID NO: 17081 - DNA, 16 bp, Artificial Sequence
  Synthetic construct
cactccatctacttac

SEQ ID NO: 17082 - DNA, 16 bp, Artificial Sequence
  Synthetic construct
cactccatctacttac

SEQ ID NO: 17083 - DNA, 16 bp, Artificial Sequence
  Synthetic construct
cagaatccagggcata

SEQ ID NO: 17084 - DNA, 16 bp, Artificial Sequence
  Synthetic construct
cagaatccagggcata

SEQ ID NO: 17085 - DNA, 16 bp, Artificial Sequence
  Synthetic construct
cagaatccaggtcgtc

SEQ ID NO: 17086 - DNA, 16 bp, Artificial Sequence
  Synthetic construct
cagaatccaggtcgtc

SEQ ID NO: 17087 - DNA, 16 bp, Artificial Sequence
  Synthetic construct
cagagagcatcacgta

SEQ ID NO: 17088 - DNA, 16 bp, Artificial Sequence
  Synthetic construct
cagagagcatcacgta

SEQ ID NO: 17089 - DNA, 16 bp, Artificial Sequence
  Synthetic construct
cagagaggttggaggt

SEQ ID NO: 17090 - DNA, 16 bp, Artificial Sequence
  Synthetic construct
cagagaggttggaggt

SEQ ID NO: 17091 - DNA, 16 bp, Artificial Sequence
  Synthetic construct
cagagagtcaaaccgt

SEQ ID NO: 17092 - DNA, 16 bp, Artificial Sequence
  Synthetic construct
cagagagtcaaaccgt

SEQ ID NO: 17093 - DNA, 16 bp, Artificial Sequence
  Synthetic construct
cagagagtccgcggta

SEQ ID NO: 17094 - DNA, 16 bp, Artificial Sequence
  Synthetic construct
cagagagtccgcggta

SEQ ID NO: 17095 - DNA, 16 bp, Artificial Sequence
  Synthetic construct
cagatcaagagtcggt

SEQ ID NO: 17096 - DNA, 16 bp, Artificial Sequence
  Synthetic construct
cagatcaagagtcggt

SEQ ID NO: 17097 - DNA, 16 bp, Artificial Sequence
  Synthetic construct
cagatcaagctaccta

SEQ ID NO: 17098 - DNA, 16 bp, Artificial Sequence
  Synthetic construct
cagatcaagctaccta

SEQ ID NO: 17099 - DNA, 16 bp, Artificial Sequence
  Synthetic construct
cagatcacagttccct

SEQ ID NO: 17100 - DNA, 16 bp, Artificial Sequence
  Synthetic construct
cagatcacagttccct

SEQ ID NO: 17101 - DNA, 16 bp, Artificial Sequence
  Synthetic construct
cagatcagttccggca

SEQ ID NO: 17102 - DNA, 16 bp, Artificial Sequence
  Synthetic construct
cagatcagttccggca

SEQ ID NO: 17103 - DNA, 16 bp, Artificial Sequence
  Synthetic construct
cagcagcagagtaatc

SEQ ID NO: 17104 - DNA, 16 bp, Artificial Sequence
  Synthetic construct
cagcagcagagtaatc

SEQ ID NO: 17105 - DNA, 16 bp, Artificial Sequence
  Synthetic construct
cagcagcaggatgtat

SEQ ID NO: 17106 - DNA, 16 bp, Artificial Sequence
  Synthetic construct
cagcagcaggatgtat

SEQ ID NO: 17107 - DNA, 16 bp, Artificial Sequence
  Synthetic construct
cagcagccaccaaccg

SEQ ID NO: 17108 - DNA, 16 bp, Artificial Sequence
  Synthetic construct
cagcagccaccaaccg

SEQ ID NO: 17109 - DNA, 16 bp, Artificial Sequence
  Synthetic construct
cagcagccacttaacg

SEQ ID NO: 17110 - DNA, 16 bp, Artificial Sequence
  Synthetic construct
cagcagccacttaacg

SEQ ID NO: 17111 - DNA, 16 bp, Artificial Sequence
  Synthetic construct
cagccgagtattctct

SEQ ID NO: 17112 - DNA, 16 bp, Artificial Sequence
  Synthetic construct
cagccgagtattctct

SEQ ID NO: 17113 - DNA, 16 bp, Artificial Sequence
  Synthetic construct
cagcgacgttgaggtg

SEQ ID NO: 17114 - DNA, 16 bp, Artificial Sequence
  Synthetic construct
cagcgacgttgaggtg

SEQ ID NO: 17115 - DNA, 16 bp, Artificial Sequence
  Synthetic construct
cagcgactcttgggta

SEQ ID NO: 17116 - DNA, 16 bp, Artificial Sequence
  Synthetic construct
cagcgactcttgggta

SEQ ID NO: 17117 - DNA, 16 bp, Artificial Sequence
  Synthetic construct
cagctaacacgctttc

SEQ ID NO: 17118 - DNA, 16 bp, Artificial Sequence
  Synthetic construct
cagctaacacgctttc

SEQ ID NO: 17119 - DNA, 16 bp, Artificial Sequence
  Synthetic construct
cagctaacagttaacc

SEQ ID NO: 17120 - DNA, 16 bp, Artificial Sequence
  Synthetic construct
cagctaacagttaacc

SEQ ID NO: 17121 - DNA, 16 bp, Artificial Sequence
  Synthetic construct
cagctaagttcagtac

SEQ ID NO: 17122 - DNA, 16 bp, Artificial Sequence
  Synthetic construct
cagctaagttcagtac

SEQ ID NO: 17123 - DNA, 16 bp, Artificial Sequence
  Synthetic construct
cagctggagaaaccta

SEQ ID NO: 17124 - DNA, 16 bp, Artificial Sequence
  Synthetic construct
cagctggagaaaccta

SEQ ID NO: 17125 - DNA, 16 bp, Artificial Sequence
  Synthetic construct
caggtgcgttctggta

SEQ ID NO: 17126 - DNA, 16 bp, Artificial Sequence
  Synthetic construct
caggtgcgttctggta

SEQ ID NO: 17127 - DNA, 16 bp, Artificial Sequence
  Synthetic construct
cagtaacagccggtaa

SEQ ID NO: 17128 - DNA, 16 bp, Artificial Sequence
  Synthetic construct
cagtaacagccggtaa

SEQ ID NO: 17129 - DNA, 16 bp, Artificial Sequence
  Synthetic construct
cagtaactcctcctag

SEQ ID NO: 17130 - DNA, 16 bp, Artificial Sequence
  Synthetic construct
cagtaactcctcctag

SEQ ID NO: 17131 - DNA, 16 bp, Artificial Sequence
  Synthetic construct
cagtccttcgtccgtt

SEQ ID NO: 17132 - DNA, 16 bp, Artificial Sequence
  Synthetic construct
cagtccttcgtccgtt

SEQ ID NO: 17133 - DNA, 16 bp, Artificial Sequence
  Synthetic construct
catatggagaactcgg

SEQ ID NO: 17134 - DNA, 16 bp, Artificial Sequence
  Synthetic construct
catatggagaactcgg

SEQ ID NO: 17135 - DNA, 16 bp, Artificial Sequence
  Synthetic construct
catatggcaataagca

SEQ ID NO: 17136 - DNA, 16 bp, Artificial Sequence
  Synthetic construct
catatggcaataagca

SEQ ID NO: 17137 - DNA, 16 bp, Artificial Sequence
  Synthetic construct
catatgggtcatgccg

SEQ ID NO: 17138 - DNA, 16 bp, Artificial Sequence
  Synthetic construct
catatgggtcatgccg

SEQ ID NO: 17139 - DNA, 16 bp, Artificial Sequence
  Synthetic construct
catattctcacagtac

SEQ ID NO: 17140 - DNA, 16 bp, Artificial Sequence
  Synthetic construct
catattctcacagtac

SEQ ID NO: 17141 - DNA, 16 bp, Artificial Sequence
  Synthetic construct
catcaagagggaacgg

SEQ ID NO: 17142 - DNA, 16 bp, Artificial Sequence
  Synthetic construct
catcaagagggaacgg

SEQ ID NO: 17143 - DNA, 16 bp, Artificial Sequence
  Synthetic construct
catccaccacttggat

SEQ ID NO: 17144 - DNA, 16 bp, Artificial Sequence
  Synthetic construct
catccaccacttggat

SEQ ID NO: 17145 - DNA, 16 bp, Artificial Sequence
  Synthetic construct
catcgaaagtcgtttg

SEQ ID NO: 17146 - DNA, 16 bp, Artificial Sequence
  Synthetic construct
catcgaaagtcgtttg

SEQ ID NO: 17147 - DNA, 16 bp, Artificial Sequence
  Synthetic construct
catcgggcaggcagta

SEQ ID NO: 17148 - DNA, 16 bp, Artificial Sequence
  Synthetic construct
catcgggcaggcagta

SEQ ID NO: 17149 - DNA, 16 bp, Artificial Sequence
  Synthetic construct
catcgggcagggttag

SEQ ID NO: 17150 - DNA, 16 bp, Artificial Sequence
  Synthetic construct
catcgggcagggttag

SEQ ID NO: 17151 - DNA, 16 bp, Artificial Sequence
  Synthetic construct
catgacagttagggtg

SEQ ID NO: 17152 - DNA, 16 bp, Artificial Sequence
  Synthetic construct
catgacagttagggtg

SEQ ID NO: 17153 - DNA, 16 bp, Artificial Sequence
  Synthetic construct
catgacatctcattca

SEQ ID NO: 17154 - DNA, 16 bp, Artificial Sequence
  Synthetic construct
catgacatctcattca

SEQ ID NO: 17155 - DNA, 16 bp, Artificial Sequence
  Synthetic construct
catgcctcatgttgac

SEQ ID NO: 17156 - DNA, 16 bp, Artificial Sequence
  Synthetic construct
catgcctcatgttgac

SEQ ID NO: 17157 - DNA, 16 bp, Artificial Sequence
  Synthetic construct
catgcctgtacgaccc

SEQ ID NO: 17158 - DNA, 16 bp, Artificial Sequence
  Synthetic construct
catgcctgtacgaccc

SEQ ID NO: 17159 - DNA, 16 bp, Artificial Sequence
  Synthetic construct
catgcctgtctgattg

SEQ ID NO: 17160 - DNA, 16 bp, Artificial Sequence
  Synthetic construct
catgcctgtctgattg

SEQ ID NO: 17161 - DNA, 16 bp, Artificial Sequence
  Synthetic construct
catgccttcacaggcc

SEQ ID NO: 17162 - DNA, 16 bp, Artificial Sequence
  Synthetic construct
catgccttcacaggcc

SEQ ID NO: 17163 - DNA, 16 bp, Artificial Sequence
  Synthetic construct
cattatccaggattgg

SEQ ID NO: 17164 - DNA, 16 bp, Artificial Sequence
  Synthetic construct
cattatccaggattgg

SEQ ID NO: 17165 - DNA, 16 bp, Artificial Sequence
  Synthetic construct
cattatctcccacttg

SEQ ID NO: 17166 - DNA, 16 bp, Artificial Sequence
  Synthetic construct
cattatctcccacttg

SEQ ID NO: 17167 - DNA, 16 bp, Artificial Sequence
  Synthetic construct
cattcgctctaacttc

SEQ ID NO: 17168 - DNA, 16 bp, Artificial Sequence
  Synthetic construct
cattcgctctaacttc

SEQ ID NO: 17169 - DNA, 16 bp, Artificial Sequence
  Synthetic construct
ccaatcccaaggtgtg

SEQ ID NO: 17170 - DNA, 16 bp, Artificial Sequence
  Synthetic construct
ccaatcccaaggtgtg

SEQ ID NO: 17171 - DNA, 16 bp, Artificial Sequence
  Synthetic construct
ccaatcccacaacgcc

SEQ ID NO: 17172 - DNA, 16 bp, Artificial Sequence
  Synthetic construct
ccaatcccacaacgcc

SEQ ID NO: 17173 - DNA, 16 bp, Artificial Sequence
  Synthetic construct
ccaatcccacatcttt

SEQ ID NO: 17174 - DNA, 16 bp, Artificial Sequence
  Synthetic construct
ccaatcccacatcttt

SEQ ID NO: 17175 - DNA, 16 bp, Artificial Sequence
  Synthetic construct
ccaatcccagacaggt

SEQ ID NO: 17176 - DNA, 16 bp, Artificial Sequence
  Synthetic construct
ccaatcccagacaggt

SEQ ID NO: 17177 - DNA, 16 bp, Artificial Sequence
  Synthetic construct
ccacctacaataacga

SEQ ID NO: 17178 - DNA, 16 bp, Artificial Sequence
  Synthetic construct
ccacctacaataacga

SEQ ID NO: 17179 - DNA, 16 bp, Artificial Sequence
  Synthetic construct
ccacctacacatccgg

SEQ ID NO: 17180 - DNA, 16 bp, Artificial Sequence
  Synthetic construct
ccacctacacatccgg

SEQ ID NO: 17181 - DNA, 16 bp, Artificial Sequence
  Synthetic construct
ccacctatctgtttgt

SEQ ID NO: 17182 - DNA, 16 bp, Artificial Sequence
  Synthetic construct
ccacctatctgtttgt

SEQ ID NO: 17183 - DNA, 16 bp, Artificial Sequence
  Synthetic construct
ccacggaagacgcttt

SEQ ID NO: 17184 - DNA, 16 bp, Artificial Sequence
  Synthetic construct
ccacggaagacgcttt

SEQ ID NO: 17185 - DNA, 16 bp, Artificial Sequence
  Synthetic construct
ccacggaagtgaacgc

SEQ ID NO: 17186 - DNA, 16 bp, Artificial Sequence
  Synthetic construct
ccacggaagtgaacgc

SEQ ID NO: 17187 - DNA, 16 bp, Artificial Sequence
  Synthetic construct
ccactacaggaactgc

SEQ ID NO: 17188 - DNA, 16 bp, Artificial Sequence
  Synthetic construct
ccactacaggaactgc

SEQ ID NO: 17189 - DNA, 16 bp, Artificial Sequence
  Synthetic construct
ccactacagtgacata

SEQ ID NO: 17190 - DNA, 16 bp, Artificial Sequence
  Synthetic construct
ccactacagtgacata

SEQ ID NO: 17191 - DNA, 16 bp, Artificial Sequence
  Synthetic construct
ccactactcaacacca

SEQ ID NO: 17192 - DNA, 16 bp, Artificial Sequence
  Synthetic construct
ccactactcaacacca

SEQ ID NO: 17193 - DNA, 16 bp, Artificial Sequence
  Synthetic construct
ccagcgaaggtgatta

SEQ ID NO: 17194 - DNA, 16 bp, Artificial Sequence
  Synthetic construct
ccagcgaaggtgatta

SEQ ID NO: 17195 - DNA, 16 bp, Artificial Sequence
  Synthetic construct
ccatgtcgtctcttta

SEQ ID NO: 17196 - DNA, 16 bp, Artificial Sequence
  Synthetic construct
ccatgtcgtctcttta

SEQ ID NO: 17197 - DNA, 16 bp, Artificial Sequence
  Synthetic construct
cccaatcgtcaatacc

SEQ ID NO: 17198 - DNA, 16 bp, Artificial Sequence
  Synthetic construct
cccaatcgtcaatacc

SEQ ID NO: 17199 - DNA, 16 bp, Artificial Sequence
  Synthetic construct
cccagttgttagggtg

SEQ ID NO: 17200 - DNA, 16 bp, Artificial Sequence
  Synthetic construct
cccagttgttagggtg

SEQ ID NO: 17201 - DNA, 16 bp, Artificial Sequence
  Synthetic construct
cccagtttctcttatg

SEQ ID NO: 17202 - DNA, 16 bp, Artificial Sequence
  Synthetic construct
cccagtttctcttatg

SEQ ID NO: 17203 - DNA, 16 bp, Artificial Sequence
  Synthetic construct
cccatacagcctcgtg

SEQ ID NO: 17204 - DNA, 16 bp, Artificial Sequence
  Synthetic construct
cccatacagcctcgtg

SEQ ID NO: 17205 - DNA, 16 bp, Artificial Sequence
  Synthetic construct
cccatacgttaaagac

SEQ ID NO: 17206 - DNA, 16 bp, Artificial Sequence
  Synthetic construct
cccatacgttaaagac

SEQ ID NO: 17207 - DNA, 16 bp, Artificial Sequence
  Synthetic construct
ccgggataggctagac

SEQ ID NO: 17208 - DNA, 16 bp, Artificial Sequence
  Synthetic construct
ccgggataggctagac

SEQ ID NO: 17209 - DNA, 16 bp, Artificial Sequence
  Synthetic construct
ccgggatagtcgtttg

SEQ ID NO: 17210 - DNA, 16 bp, Artificial Sequence
  Synthetic construct
ccgggatagtcgtttg

SEQ ID NO: 17211 - DNA, 16 bp, Artificial Sequence
  Synthetic construct
ccgggatcaagccgct

SEQ ID NO: 17212 - DNA, 16 bp, Artificial Sequence
  Synthetic construct
ccgggatcaagccgct

SEQ ID NO: 17213 - DNA, 16 bp, Artificial Sequence
  Synthetic construct
ccgggatcatcgggtc

SEQ ID NO: 17214 - DNA, 16 bp, Artificial Sequence
  Synthetic construct
ccgggatcatcgggtc

SEQ ID NO: 17215 - DNA, 16 bp, Artificial Sequence
  Synthetic construct
ccgtacttcacgatgt

SEQ ID NO: 17216 - DNA, 16 bp, Artificial Sequence
  Synthetic construct
ccgtacttcacgatgt

SEQ ID NO: 17217 - DNA, 16 bp, Artificial Sequence
  Synthetic construct
ccgttcagtgtatggg

SEQ ID NO: 17218 - DNA, 16 bp, Artificial Sequence
  Synthetic construct
ccgttcagtgtatggg

SEQ ID NO: 17219 - DNA, 16 bp, Artificial Sequence
  Synthetic construct
ccgttcatcacggtta

SEQ ID NO: 17220 - DNA, 16 bp, Artificial Sequence
  Synthetic construct
ccgttcatcacggtta

SEQ ID NO: 17221 - DNA, 16 bp, Artificial Sequence
  Synthetic construct
ccgttcatccaaagtc

SEQ ID NO: 17222 - DNA, 16 bp, Artificial Sequence
  Synthetic construct
ccgttcatccaaagtc

SEQ ID NO: 17223 - DNA, 16 bp, Artificial Sequence
  Synthetic construct
cctacaccatcccatc

SEQ ID NO: 17224 - DNA, 16 bp, Artificial Sequence
  Synthetic construct
cctacaccatcccatc

SEQ ID NO: 17225 - DNA, 16 bp, Artificial Sequence
  Synthetic construct
cctacacgtcaggaca

SEQ ID NO: 17226 - DNA, 16 bp, Artificial Sequence
  Synthetic construct
cctacacgtcaggaca

SEQ ID NO: 17227 - DNA, 16 bp, Artificial Sequence
  Synthetic construct
cctagctcatagaaac

SEQ ID NO: 17228 - DNA, 16 bp, Artificial Sequence
  Synthetic construct
cctagctcatagaaac

SEQ ID NO: 17229 - DNA, 16 bp, Artificial Sequence
  Synthetic construct
cctagctgtcttctcg

SEQ ID NO: 17230 - DNA, 16 bp, Artificial Sequence
  Synthetic construct
cctagctgtcttctcg

SEQ ID NO: 17231 - DNA, 16 bp, Artificial Sequence
  Synthetic construct
cctattaaggagttta

SEQ ID NO: 17232 - DNA, 16 bp, Artificial Sequence
  Synthetic construct
cctattaaggagttta

SEQ ID NO: 17233 - DNA, 16 bp, Artificial Sequence
  Synthetic construct
cctattagtaatcgtc

SEQ ID NO: 17234 - DNA, 16 bp, Artificial Sequence
  Synthetic construct
cctattagtaatcgtc

SEQ ID NO: 17235 - DNA, 16 bp, Artificial Sequence
  Synthetic construct
cctattagtgtgcgtc

SEQ ID NO: 17236 - DNA, 16 bp, Artificial Sequence
  Synthetic construct
cctattagtgtgcgtc

SEQ ID NO: 17237 - DNA, 16 bp, Artificial Sequence
  Synthetic construct
cctattatcagtgcat

SEQ ID NO: 17238 - DNA, 16 bp, Artificial Sequence
  Synthetic construct
cctattatcagtgcat

SEQ ID NO: 17239 - DNA, 16 bp, Artificial Sequence
  Synthetic construct
cctcagtagtcaaggc

SEQ ID NO: 17240 - DNA, 16 bp, Artificial Sequence
  Synthetic construct
cctcagtagtcaaggc

SEQ ID NO: 17241 - DNA, 16 bp, Artificial Sequence
  Synthetic construct
cctcagttcttgtatc

SEQ ID NO: 17242 - DNA, 16 bp, Artificial Sequence
  Synthetic construct
cctcagttcttgtatc

SEQ ID NO: 17243 - DNA, 16 bp, Artificial Sequence
  Synthetic construct
ccttacgagcgacgta

SEQ ID NO: 17244 - DNA, 16 bp, Artificial Sequence
  Synthetic construct
ccttacgagcgacgta

SEQ ID NO: 17245 - DNA, 16 bp, Artificial Sequence
  Synthetic construct
ccttacgaggaatcgc

SEQ ID NO: 17246 - DNA, 16 bp, Artificial Sequence
  Synthetic construct
ccttacgaggaatcgc

SEQ ID NO: 17247 - DNA, 16 bp, Artificial Sequence
  Synthetic construct
ccttacgcagtacact

SEQ ID NO: 17248 - DNA, 16 bp, Artificial Sequence
  Synthetic construct
ccttacgcagtacact

SEQ ID NO: 17249 - DNA, 16 bp, Artificial Sequence
  Synthetic construct
ccttacgtcctcgcat

SEQ ID NO: 17250 - DNA, 16 bp, Artificial Sequence
  Synthetic construct
ccttacgtcctcgcat

SEQ ID NO: 17251 - DNA, 16 bp, Artificial Sequence
  Synthetic construct
ccttcccgttggaccc

SEQ ID NO: 17252 - DNA, 16 bp, Artificial Sequence
  Synthetic construct
ccttcccgttggaccc

SEQ ID NO: 17253 - DNA, 16 bp, Artificial Sequence
  Synthetic construct
ccttcgacattaggct

SEQ ID NO: 17254 - DNA, 16 bp, Artificial Sequence
  Synthetic construct
ccttcgacattaggct

SEQ ID NO: 17255 - DNA, 16 bp, Artificial Sequence
  Synthetic construct
ccttcgagttacgcgc

SEQ ID NO: 17256 - DNA, 16 bp, Artificial Sequence
  Synthetic construct
ccttcgagttacgcgc

SEQ ID NO: 17257 - DNA, 16 bp, Artificial Sequence
  Synthetic construct
cctttctcatgcctaa

SEQ ID NO: 17258 - DNA, 16 bp, Artificial Sequence
  Synthetic construct
cctttctcatgcctaa

SEQ ID NO: 17259 - DNA, 16 bp, Artificial Sequence
  Synthetic construct
cgaacattctagcaca

SEQ ID NO: 17260 - DNA, 16 bp, Artificial Sequence
  Synthetic construct
cgaacattctagcaca

SEQ ID NO: 17261 - DNA, 16 bp, Artificial Sequence
  Synthetic construct
cgaccttcaagccgtc

SEQ ID NO: 17262 - DNA, 16 bp, Artificial Sequence
  Synthetic construct
cgaccttcaagccgtc

SEQ ID NO: 17263 - DNA, 16 bp, Artificial Sequence
  Synthetic construct
cgacttccaatgttgc

SEQ ID NO: 17264 - DNA, 16 bp, Artificial Sequence
  Synthetic construct
cgacttccaatgttgc

SEQ ID NO: 17265 - DNA, 16 bp, Artificial Sequence
  Synthetic construct
cgacttccaggctgaa

SEQ ID NO: 17266 - DNA, 16 bp, Artificial Sequence
  Synthetic construct
cgacttccaggctgaa

SEQ ID NO: 17267 - DNA, 16 bp, Artificial Sequence
  Synthetic construct
cgacttccatgtctcc

SEQ ID NO: 17268 - DNA, 16 bp, Artificial Sequence
  Synthetic construct
cgacttccatgtctcc

SEQ ID NO: 17269 - DNA, 16 bp, Artificial Sequence
  Synthetic construct
cgacttcgtcttcaag

SEQ ID NO: 17270 - DNA, 16 bp, Artificial Sequence
  Synthetic construct
cgacttcgtcttcaag

SEQ ID NO: 17271 - DNA, 16 bp, Artificial Sequence
  Synthetic construct
cgacttctcgcatggc

SEQ ID NO: 17272 - DNA, 16 bp, Artificial Sequence
  Synthetic construct
cgacttctcgcatggc

SEQ ID NO: 17273 - DNA, 16 bp, Artificial Sequence
  Synthetic construct
cgagaagaggctctta

SEQ ID NO: 17274 - DNA, 16 bp, Artificial Sequence
  Synthetic construct
cgagaagaggctctta

SEQ ID NO: 17275 - DNA, 16 bp, Artificial Sequence
  Synthetic construct
cgagaagaggttccta

SEQ ID NO: 17276 - DNA, 16 bp, Artificial Sequence
  Synthetic construct
cgagaagaggttccta

SEQ ID NO: 17277 - DNA, 16 bp, Artificial Sequence
  Synthetic construct
cgagaaggtattcgtg

SEQ ID NO: 17278 - DNA, 16 bp, Artificial Sequence
  Synthetic construct
cgagaaggtattcgtg

SEQ ID NO: 17279 - DNA, 16 bp, Artificial Sequence
  Synthetic construct
cgagcaccactatctt

SEQ ID NO: 17280 - DNA, 16 bp, Artificial Sequence
  Synthetic construct
cgagcaccactatctt

SEQ ID NO: 17281 - DNA, 16 bp, Artificial Sequence
  Synthetic construct
cgagcacgttgtacac

SEQ ID NO: 17282 - DNA, 16 bp, Artificial Sequence
  Synthetic construct
cgagcacgttgtacac

SEQ ID NO: 17283 - DNA, 16 bp, Artificial Sequence
  Synthetic construct
cgagccaagacacgac

SEQ ID NO: 17284 - DNA, 16 bp, Artificial Sequence
  Synthetic construct
cgagccaagacacgac

SEQ ID NO: 17285 - DNA, 16 bp, Artificial Sequence
  Synthetic construct
cgagccagtaaacaca

SEQ ID NO: 17286 - DNA, 16 bp, Artificial Sequence
  Synthetic construct
cgagccagtaaacaca

SEQ ID NO: 17287 - DNA, 16 bp, Artificial Sequence
  Synthetic construct
cgagccagtacatgtc

SEQ ID NO: 17288 - DNA, 16 bp, Artificial Sequence
  Synthetic construct
cgagccagtacatgtc

SEQ ID NO: 17289 - DNA, 16 bp, Artificial Sequence
  Synthetic construct
cgagccatctccaggg

SEQ ID NO: 17290 - DNA, 16 bp, Artificial Sequence
  Synthetic construct
cgagccatctccaggg

SEQ ID NO: 17291 - DNA, 16 bp, Artificial Sequence
  Synthetic construct
cgatcggagcgtgtcc

SEQ ID NO: 17292 - DNA, 16 bp, Artificial Sequence
  Synthetic construct
cgatcggagcgtgtcc

SEQ ID NO: 17293 - DNA, 16 bp, Artificial Sequence
  Synthetic construct
cgatcgggtctagtca

SEQ ID NO: 17294 - DNA, 16 bp, Artificial Sequence
  Synthetic construct
cgatcgggtctagtca

SEQ ID NO: 17295 - DNA, 16 bp, Artificial Sequence
  Synthetic construct
cgatggcagtcgataa

SEQ ID NO: 17296 - DNA, 16 bp, Artificial Sequence
  Synthetic construct
cgatggcagtcgataa

SEQ ID NO: 17297 - DNA, 16 bp, Artificial Sequence
  Synthetic construct
cgatggctccctcagt

SEQ ID NO: 17298 - DNA, 16 bp, Artificial Sequence
  Synthetic construct
cgatggctccctcagt

SEQ ID NO: 17299 - DNA, 16 bp, Artificial Sequence
  Synthetic construct
cgatggctcgcttgtc

SEQ ID NO: 17300 - DNA, 16 bp, Artificial Sequence
  Synthetic construct
cgatggctcgcttgtc

SEQ ID NO: 17301 - DNA, 16 bp, Artificial Sequence
  Synthetic construct
cgatgtacagcatgag

SEQ ID NO: 17302 - DNA, 16 bp, Artificial Sequence
  Synthetic construct
cgatgtacagcatgag

SEQ ID NO: 17303 - DNA, 16 bp, Artificial Sequence
  Synthetic construct
cgatgtagtcatatgc

SEQ ID NO: 17304 - DNA, 16 bp, Artificial Sequence
  Synthetic construct
cgatgtagtcatatgc

SEQ ID NO: 17305 - DNA, 16 bp, Artificial Sequence
  Synthetic construct
cgatgtagtgtatggg

SEQ ID NO: 17306 - DNA, 16 bp, Artificial Sequence
  Synthetic construct
cgatgtagtgtatggg

SEQ ID NO: 17307 - DNA, 16 bp, Artificial Sequence
  Synthetic construct
cgatgtagttcgaatc

SEQ ID NO: 17308 - DNA, 16 bp, Artificial Sequence
  Synthetic construct
cgatgtagttcgaatc

SEQ ID NO: 17309 - DNA, 16 bp, Artificial Sequence
  Synthetic construct
cgattgacaaggtgtg

SEQ ID NO: 17310 - DNA, 16 bp, Artificial Sequence
  Synthetic construct
cgattgacaaggtgtg

SEQ ID NO: 17311 - DNA, 16 bp, Artificial Sequence
  Synthetic construct
cgattgacacaggttt

SEQ ID NO: 17312 - DNA, 16 bp, Artificial Sequence
  Synthetic construct
cgattgacacaggttt

SEQ ID NO: 17313 - DNA, 16 bp, Artificial Sequence
  Synthetic construct
cgattgagtaaagtca

SEQ ID NO: 17314 - DNA, 16 bp, Artificial Sequence
  Synthetic construct
cgattgagtaaagtca

SEQ ID NO: 17315 - DNA, 16 bp, Artificial Sequence
  Synthetic construct
cgattgagtttaggaa

SEQ ID NO: 17316 - DNA, 16 bp, Artificial Sequence
  Synthetic construct
cgattgagtttaggaa

SEQ ID NO: 17317 - DNA, 16 bp, Artificial Sequence
  Synthetic construct
cgattgatcgcatggc

SEQ ID NO: 17318 - DNA, 16 bp, Artificial Sequence
  Synthetic construct
cgattgatcgcatggc

SEQ ID NO: 17319 - DNA, 16 bp, Artificial Sequence
  Synthetic construct
cgccaaggttgtacac

SEQ ID NO: 17320 - DNA, 16 bp, Artificial Sequence
  Synthetic construct
cgccaaggttgtacac

SEQ ID NO: 17321 - DNA, 16 bp, Artificial Sequence
  Synthetic construct
cgcggtacaacttgac

SEQ ID NO: 17322 - DNA, 16 bp, Artificial Sequence
  Synthetic construct
cgcggtacaacttgac

SEQ ID NO: 17323 - DNA, 16 bp, Artificial Sequence
  Synthetic construct
cgcgtttagctgccca

SEQ ID NO: 17324 - DNA, 16 bp, Artificial Sequence
  Synthetic construct
cgcgtttagctgccca

SEQ ID NO: 17325 - DNA, 16 bp, Artificial Sequence
  Synthetic construct
cgcgtttcagcctgtg

SEQ ID NO: 17326 - DNA, 16 bp, Artificial Sequence
  Synthetic construct
cgcgtttcagcctgtg

SEQ ID NO: 17327 - DNA, 16 bp, Artificial Sequence
  Synthetic construct
cgcgttttcataaccg

SEQ ID NO: 17328 - DNA, 16 bp, Artificial Sequence
  Synthetic construct
cgcgttttcataaccg

SEQ ID NO: 17329 - DNA, 16 bp, Artificial Sequence
  Synthetic construct
cgctatcagttccaca

SEQ ID NO: 17330 - DNA, 16 bp, Artificial Sequence
  Synthetic construct
cgctatcagttccaca

SEQ ID NO: 17331 - DNA, 16 bp, Artificial Sequence
  Synthetic construct
cgctatcgtccatcct

SEQ ID NO: 17332 - DNA, 16 bp, Artificial Sequence
  Synthetic construct
cgctatcgtccatcct

SEQ ID NO: 17333 - DNA, 16 bp, Artificial Sequence
  Synthetic construct
cgctggacacgcgaaa

SEQ ID NO: 17334 - DNA, 16 bp, Artificial Sequence
  Synthetic construct
cgctggacacgcgaaa

SEQ ID NO: 17335 - DNA, 16 bp, Artificial Sequence
  Synthetic construct
cgctggacactctgtc

SEQ ID NO: 17336 - DNA, 16 bp, Artificial Sequence
  Synthetic construct
cgctggacactctgtc

SEQ ID NO: 17337 - DNA, 16 bp, Artificial Sequence
  Synthetic construct
cgctggacagtcacta

SEQ ID NO: 17338 - DNA, 16 bp, Artificial Sequence
  Synthetic construct
cgctggacagtcacta

SEQ ID NO: 17339 - DNA, 16 bp, Artificial Sequence
  Synthetic construct
cgctggacagtcagcc

SEQ ID NO: 17340 - DNA, 16 bp, Artificial Sequence
  Synthetic construct
cgctggacagtcagcc

SEQ ID NO: 17341 - DNA, 16 bp, Artificial Sequence
  Synthetic construct
cgctggagtgtgaccc

SEQ ID NO: 17342 - DNA, 16 bp, Artificial Sequence
  Synthetic construct
cgctggagtgtgaccc

SEQ ID NO: 17343 - DNA, 16 bp, Artificial Sequence
  Synthetic construct
cgctggagttacgcgc

SEQ ID NO: 17344 - DNA, 16 bp, Artificial Sequence
  Synthetic construct
cgctggagttacgcgc

SEQ ID NO: 17345 - DNA, 16 bp, Artificial Sequence
  Synthetic construct
cgctggatcgctgata

SEQ ID NO: 17346 - DNA, 16 bp, Artificial Sequence
  Synthetic construct
cgctggatcgctgata

SEQ ID NO: 17347 - DNA, 16 bp, Artificial Sequence
  Synthetic construct
cgcttcatcggaggta

SEQ ID NO: 17348 - DNA, 16 bp, Artificial Sequence
  Synthetic construct
cgcttcatcggaggta

SEQ ID NO: 17349 - DNA, 16 bp, Artificial Sequence
  Synthetic construct
cgcttcatctcctata

SEQ ID NO: 17350 - DNA, 16 bp, Artificial Sequence
  Synthetic construct
cgcttcatctcctata

SEQ ID NO: 17351 - DNA, 16 bp, Artificial Sequence
  Synthetic construct
cggacacagcggcttc

SEQ ID NO: 17352 - DNA, 16 bp, Artificial Sequence
  Synthetic construct
cggacacagcggcttc

SEQ ID NO: 17353 - DNA, 16 bp, Artificial Sequence
  Synthetic construct
cggacacgtccaagtt

SEQ ID NO: 17354 - DNA, 16 bp, Artificial Sequence
  Synthetic construct
cggacacgtccaagtt

SEQ ID NO: 17355 - DNA, 16 bp, Artificial Sequence
  Synthetic construct
cggacactcacttcat

SEQ ID NO: 17356 - DNA, 16 bp, Artificial Sequence
  Synthetic construct
cggacactcacttcat

SEQ ID NO: 17357 - DNA, 16 bp, Artificial Sequence
  Synthetic construct
cggacactccgcataa

SEQ ID NO: 17358 - DNA, 16 bp, Artificial Sequence
  Synthetic construct
cggacactccgcataa

SEQ ID NO: 17359 - DNA, 16 bp, Artificial Sequence
  Synthetic construct
cggacgtgtgatgtgg

SEQ ID NO: 17360 - DNA, 16 bp, Artificial Sequence
  Synthetic construct
cggacgtgtgatgtgg

SEQ ID NO: 17361 - DNA, 16 bp, Artificial Sequence
  Synthetic construct
cggactgagtggcaca

SEQ ID NO: 17362 - DNA, 16 bp, Artificial Sequence
  Synthetic construct
cggactgagtggcaca

SEQ ID NO: 17363 - DNA, 16 bp, Artificial Sequence
  Synthetic construct
cggactggtagggact

SEQ ID NO: 17364 - DNA, 16 bp, Artificial Sequence
  Synthetic construct
cggactggtagggact

SEQ ID NO: 17365 - DNA, 16 bp, Artificial Sequence
  Synthetic construct
cggactgtcatctgcc

SEQ ID NO: 17366 - DNA, 16 bp, Artificial Sequence
  Synthetic construct
cggactgtcatctgcc

SEQ ID NO: 17367 - DNA, 16 bp, Artificial Sequence
  Synthetic construct
cggagctagcctatgt

SEQ ID NO: 17368 - DNA, 16 bp, Artificial Sequence
  Synthetic construct
cggagctagcctatgt

SEQ ID NO: 17369 - DNA, 16 bp, Artificial Sequence
  Synthetic construct
cggagctgttatcacg

SEQ ID NO: 17370 - DNA, 16 bp, Artificial Sequence
  Synthetic construct
cggagctgttatcacg

SEQ ID NO: 17371 - DNA, 16 bp, Artificial Sequence
  Synthetic construct
cggagtcagcgtaata

SEQ ID NO: 17372 - DNA, 16 bp, Artificial Sequence
  Synthetic construct
cggagtcagcgtaata

SEQ ID NO: 17373 - DNA, 16 bp, Artificial Sequence
  Synthetic construct
cggagtccagtagagc

SEQ ID NO: 17374 - DNA, 16 bp, Artificial Sequence
  Synthetic construct
cggagtccagtagagc

SEQ ID NO: 17375 - DNA, 16 bp, Artificial Sequence
  Synthetic construct
cggagtccatttgccc

SEQ ID NO: 17376 - DNA, 16 bp, Artificial Sequence
  Synthetic construct
cggagtccatttgccc

SEQ ID NO: 17377 - DNA, 16 bp, Artificial Sequence
  Synthetic construct
cggctagagtgaattg

SEQ ID NO: 17378 - DNA, 16 bp, Artificial Sequence
  Synthetic construct
cggctagagtgaattg

SEQ ID NO: 17379 - DNA, 16 bp, Artificial Sequence
  Synthetic construct
cggctaggttctgttt

SEQ ID NO: 17380 - DNA, 16 bp, Artificial Sequence
  Synthetic construct
cggctaggttctgttt

SEQ ID NO: 17381 - DNA, 16 bp, Artificial Sequence
  Synthetic construct
cggctagtcatatcgg

SEQ ID NO: 17382 - DNA, 16 bp, Artificial Sequence
  Synthetic construct
cggctagtcatatcgg

SEQ ID NO: 17383 - DNA, 16 bp, Artificial Sequence
  Synthetic construct
cggttaaagtcatcca

SEQ ID NO: 17384 - DNA, 16 bp, Artificial Sequence
  Synthetic construct
cggttaaagtcatcca

SEQ ID NO: 17385 - DNA, 16 bp, Artificial Sequence
  Synthetic construct
cggttaagtgtgtgcc

SEQ ID NO: 17386 - DNA, 16 bp, Artificial Sequence
  Synthetic construct
cggttaagtgtgtgcc

SEQ ID NO: 17387 - DNA, 16 bp, Artificial Sequence
  Synthetic construct
cgtagcgcaagcgctc

SEQ ID NO: 17388 - DNA, 16 bp, Artificial Sequence
  Synthetic construct
cgtagcgcaagcgctc

SEQ ID NO: 17389 - DNA, 16 bp, Artificial Sequence
  Synthetic construct
cgtagcgcatccaaca

SEQ ID NO: 17390 - DNA, 16 bp, Artificial Sequence
  Synthetic construct
cgtagcgcatccaaca

SEQ ID NO: 17391 - DNA, 16 bp, Artificial Sequence
  Synthetic construct
cgtagcgtcaacacac

SEQ ID NO: 17392 - DNA, 16 bp, Artificial Sequence
  Synthetic construct
cgtagcgtcaacacac

SEQ ID NO: 17393 - DNA, 16 bp, Artificial Sequence
  Synthetic construct
cgtaggcagttagcgg

SEQ ID NO: 17394 - DNA, 16 bp, Artificial Sequence
  Synthetic construct
cgtaggcagttagcgg

SEQ ID NO: 17395 - DNA, 16 bp, Artificial Sequence
  Synthetic construct
cgtaggcgtgtcaatc

SEQ ID NO: 17396 - DNA, 16 bp, Artificial Sequence
  Synthetic construct
cgtaggcgtgtcaatc

SEQ ID NO: 17397 - DNA, 16 bp, Artificial Sequence
  Synthetic construct
cgtcactcacatgact

SEQ ID NO: 17398 - DNA, 16 bp, Artificial Sequence
  Synthetic construct
cgtcactcacatgact

SEQ ID NO: 17399 - DNA, 16 bp, Artificial Sequence
  Synthetic construct
cgtcacttcatgctcc

SEQ ID NO: 17400 - DNA, 16 bp, Artificial Sequence
  Synthetic construct
cgtcacttcatgctcc

SEQ ID NO: 17401 - DNA, 16 bp, Artificial Sequence
  Synthetic construct
cgtcaggagtacgttc

SEQ ID NO: 17402 - DNA, 16 bp, Artificial Sequence
  Synthetic construct
cgtcaggagtacgttc

SEQ ID NO: 17403 - DNA, 16 bp, Artificial Sequence
  Synthetic construct
cgtcaggcaggaacgt

SEQ ID NO: 17404 - DNA, 16 bp, Artificial Sequence
  Synthetic construct
cgtcaggcaggaacgt

SEQ ID NO: 17405 - DNA, 16 bp, Artificial Sequence
  Synthetic construct
cgtcaggtcgatccct

SEQ ID NO: 17406 - DNA, 16 bp, Artificial Sequence
  Synthetic construct
cgtcaggtcgatccct

SEQ ID NO: 17407 - DNA, 16 bp, Artificial Sequence
  Synthetic construct
cgtccattccgcgttt

SEQ ID NO: 17408 - DNA, 16 bp, Artificial Sequence
  Synthetic construct
cgtccattccgcgttt

SEQ ID NO: 17409 - DNA, 16 bp, Artificial Sequence
  Synthetic construct
cgtgagcagacgcaac

SEQ ID NO: 17410 - DNA, 16 bp, Artificial Sequence
  Synthetic construct
cgtgagcagacgcaac

SEQ ID NO: 17411 - DNA, 16 bp, Artificial Sequence
  Synthetic construct
cgtgagcgtgagggtt

SEQ ID NO: 17412 - DNA, 16 bp, Artificial Sequence
  Synthetic construct
cgtgagcgtgagggtt

SEQ ID NO: 17413 - DNA, 16 bp, Artificial Sequence
  Synthetic construct
cgtgtctagccgccta

SEQ ID NO: 17414 - DNA, 16 bp, Artificial Sequence
  Synthetic construct
cgtgtctagccgccta

SEQ ID NO: 17415 - DNA, 16 bp, Artificial Sequence
  Synthetic construct
cgtgtctcaagcctat

SEQ ID NO: 17416 - DNA, 16 bp, Artificial Sequence
  Synthetic construct
cgtgtctcaagcctat

SEQ ID NO: 17417 - DNA, 16 bp, Artificial Sequence
  Synthetic construct
cgttagagtaagcacg

SEQ ID NO: 17418 - DNA, 16 bp, Artificial Sequence
  Synthetic construct
cgttagagtaagcacg

SEQ ID NO: 17419 - DNA, 16 bp, Artificial Sequence
  Synthetic construct
cgttagagtgtgacga

SEQ ID NO: 17420 - DNA, 16 bp, Artificial Sequence
  Synthetic construct
cgttagagtgtgacga

SEQ ID NO: 17421 - DNA, 16 bp, Artificial Sequence
  Synthetic construct
cgttctggttctcatt

SEQ ID NO: 17422 - DNA, 16 bp, Artificial Sequence
  Synthetic construct
cgttctggttctcatt

SEQ ID NO: 17423 - DNA, 16 bp, Artificial Sequence
  Synthetic construct
cgttggggttagaaca

SEQ ID NO: 17424 - DNA, 16 bp, Artificial Sequence
  Synthetic construct
cgttggggttagaaca

SEQ ID NO: 17425 - DNA, 16 bp, Artificial Sequence
  Synthetic construct
cgttgggtcaggttca

SEQ ID NO: 17426 - DNA, 16 bp, Artificial Sequence
  Synthetic construct
cgttgggtcaggttca

SEQ ID NO: 17427 - DNA, 16 bp, Artificial Sequence
  Synthetic construct
ctaacttaggagttgc

SEQ ID NO: 17428 - DNA, 16 bp, Artificial Sequence
  Synthetic construct
ctaacttaggagttgc

SEQ ID NO: 17429 - DNA, 16 bp, Artificial Sequence
  Synthetic construct
ctaactttcgcgccaa

SEQ ID NO: 17430 - DNA, 16 bp, Artificial Sequence
  Synthetic construct
ctaactttcgcgccaa

SEQ ID NO: 17431 - DNA, 16 bp, Artificial Sequence
  Synthetic construct
ctaagacagaagattc

SEQ ID NO: 17432 - DNA, 16 bp, Artificial Sequence
  Synthetic construct
ctaagacagaagattc

SEQ ID NO: 17433 - DNA, 16 bp, Artificial Sequence
  Synthetic construct
ctaagacagtgcaagc

SEQ ID NO: 17434 - DNA, 16 bp, Artificial Sequence
  Synthetic construct
ctaagacagtgcaagc

SEQ ID NO: 17435 - DNA, 16 bp, Artificial Sequence
  Synthetic construct
ctaagacgtaaagtca

SEQ ID NO: 17436 - DNA, 16 bp, Artificial Sequence
  Synthetic construct
ctaagacgtaaagtca

SEQ ID NO: 17437 - DNA, 16 bp, Artificial Sequence
  Synthetic construct
ctaagacgtgcagtag

SEQ ID NO: 17438 - DNA, 16 bp, Artificial Sequence
  Synthetic construct
ctaagacgtgcagtag

SEQ ID NO: 17439 - DNA, 16 bp, Artificial Sequence
  Synthetic construct
ctaagacgttatccga

SEQ ID NO: 17440 - DNA, 16 bp, Artificial Sequence
  Synthetic construct
ctaagacgttatccga

SEQ ID NO: 17441 - DNA, 16 bp, Artificial Sequence
  Synthetic construct
ctacacctcgcctgag

SEQ ID NO: 17442 - DNA, 16 bp, Artificial Sequence
  Synthetic construct
ctacacctcgcctgag

SEQ ID NO: 17443 - DNA, 16 bp, Artificial Sequence
  Synthetic construct
ctacattagtacgata

SEQ ID NO: 17444 - DNA, 16 bp, Artificial Sequence
  Synthetic construct
ctacattagtacgata

SEQ ID NO: 17445 - DNA, 16 bp, Artificial Sequence
  Synthetic construct
ctacattcaccttgtc

SEQ ID NO: 17446 - DNA, 16 bp, Artificial Sequence
  Synthetic construct
ctacattcaccttgtc

SEQ ID NO: 17447 - DNA, 16 bp, Artificial Sequence
  Synthetic construct
ctacccaagttagcgg

SEQ ID NO: 17448 - DNA, 16 bp, Artificial Sequence
  Synthetic construct
ctacccaagttagcgg

SEQ ID NO: 17449 - DNA, 16 bp, Artificial Sequence
  Synthetic construct
ctacccatccacgacg

SEQ ID NO: 17450 - DNA, 16 bp, Artificial Sequence
  Synthetic construct
ctacccatccacgacg

SEQ ID NO: 17451 - DNA, 16 bp, Artificial Sequence
  Synthetic construct
ctacgtccactagtac

SEQ ID NO: 17452 - DNA, 16 bp, Artificial Sequence
  Synthetic construct
ctacgtccactagtac

SEQ ID NO: 17453 - DNA, 16 bp, Artificial Sequence
  Synthetic construct
ctagagtagacccacc

SEQ ID NO: 17454 - DNA, 16 bp, Artificial Sequence
  Synthetic construct
ctagagtagacccacc

SEQ ID NO: 17455 - DNA, 16 bp, Artificial Sequence
  Synthetic construct
ctagagtcatgcatgt

SEQ ID NO: 17456 - DNA, 16 bp, Artificial Sequence
  Synthetic construct
ctagagtcatgcatgt

SEQ ID NO: 17457 - DNA, 16 bp, Artificial Sequence
  Synthetic construct
ctagagtgtactctcc

SEQ ID NO: 17458 - DNA, 16 bp, Artificial Sequence
  Synthetic construct
ctagagtgtactctcc

SEQ ID NO: 17459 - DNA, 16 bp, Artificial Sequence
  Synthetic construct
ctagagtgttatgtgc

SEQ ID NO: 17460 - DNA, 16 bp, Artificial Sequence
  Synthetic construct
ctagagtgttatgtgc

SEQ ID NO: 17461 - DNA, 16 bp, Artificial Sequence
  Synthetic construct
ctagcctagaaagtgg

SEQ ID NO: 17462 - DNA, 16 bp, Artificial Sequence
  Synthetic construct
ctagcctagaaagtgg

SEQ ID NO: 17463 - DNA, 16 bp, Artificial Sequence
  Synthetic construct
ctagcctagccacgct

SEQ ID NO: 17464 - DNA, 16 bp, Artificial Sequence
  Synthetic construct
ctagcctagccacgct

SEQ ID NO: 17465 - DNA, 16 bp, Artificial Sequence
  Synthetic construct
ctagcctgttgcgcac

SEQ ID NO: 17466 - DNA, 16 bp, Artificial Sequence
  Synthetic construct
ctagcctgttgcgcac

SEQ ID NO: 17467 - DNA, 16 bp, Artificial Sequence
  Synthetic construct
ctcacactcacgaagg

SEQ ID NO: 17468 - DNA, 16 bp, Artificial Sequence
  Synthetic construct
ctcacactcacgaagg

SEQ ID NO: 17469 - DNA, 16 bp, Artificial Sequence
  Synthetic construct
ctcagaatcgaacgga

SEQ ID NO: 17470 - DNA, 16 bp, Artificial Sequence
  Synthetic construct
ctcagaatcgaacgga

SEQ ID NO: 17471 - DNA, 16 bp, Artificial Sequence
  Synthetic construct
ctcattaaggatcgca

SEQ ID NO: 17472 - DNA, 16 bp, Artificial Sequence
  Synthetic construct
ctcattaaggatcgca

SEQ ID NO: 17473 - DNA, 16 bp, Artificial Sequence
  Synthetic construct
ctcattacacggttta

SEQ ID NO: 17474 - DNA, 16 bp, Artificial Sequence
  Synthetic construct
ctcattacacggttta

SEQ ID NO: 17475 - DNA, 16 bp, Artificial Sequence
  Synthetic construct
ctcgaaatctttagtc

SEQ ID NO: 17476 - DNA, 16 bp, Artificial Sequence
  Synthetic construct
ctcgaaatctttagtc

SEQ ID NO: 17477 - DNA, 16 bp, Artificial Sequence
  Synthetic construct
ctcgaggagttaacga

SEQ ID NO: 17478 - DNA, 16 bp, Artificial Sequence
  Synthetic construct
ctcgaggagttaacga

SEQ ID NO: 17479 - DNA, 16 bp, Artificial Sequence
  Synthetic construct
ctcgaggtcccttgca

SEQ ID NO: 17480 - DNA, 16 bp, Artificial Sequence
  Synthetic construct
ctcgaggtcccttgca

SEQ ID NO: 17481 - DNA, 16 bp, Artificial Sequence
  Synthetic construct
ctcggaggtatgaatg

SEQ ID NO: 17482 - DNA, 16 bp, Artificial Sequence
  Synthetic construct
ctcggaggtatgaatg

SEQ ID NO: 17483 - DNA, 16 bp, Artificial Sequence
  Synthetic construct
ctcgggacacgtgaga

SEQ ID NO: 17484 - DNA, 16 bp, Artificial Sequence
  Synthetic construct
ctcgggacacgtgaga

SEQ ID NO: 17485 - DNA, 16 bp, Artificial Sequence
  Synthetic construct
ctcgtacagacgcttt

SEQ ID NO: 17486 - DNA, 16 bp, Artificial Sequence
  Synthetic construct
ctcgtacagacgcttt

SEQ ID NO: 17487 - DNA, 16 bp, Artificial Sequence
  Synthetic construct
ctcgtacaggcccttg

SEQ ID NO: 17488 - DNA, 16 bp, Artificial Sequence
  Synthetic construct
ctcgtacaggcccttg

SEQ ID NO: 17489 - DNA, 16 bp, Artificial Sequence
  Synthetic construct
ctcgtacgtaagggaa

SEQ ID NO: 17490 - DNA, 16 bp, Artificial Sequence
  Synthetic construct
ctcgtacgtaagggaa

SEQ ID NO: 17491 - DNA, 16 bp, Artificial Sequence
  Synthetic construct
ctcgtcaagaatgttg

SEQ ID NO: 17492 - DNA, 16 bp, Artificial Sequence
  Synthetic construct
ctcgtcaagaatgttg

SEQ ID NO: 17493 - DNA, 16 bp, Artificial Sequence
  Synthetic construct
ctcgtcaagggtcgat

SEQ ID NO: 17494 - DNA, 16 bp, Artificial Sequence
  Synthetic construct
ctcgtcaagggtcgat

SEQ ID NO: 17495 - DNA, 16 bp, Artificial Sequence
  Synthetic construct
ctctaattcccttgtg

SEQ ID NO: 17496 - DNA, 16 bp, Artificial Sequence
  Synthetic construct
ctctaattcccttgtg

SEQ ID NO: 17497 - DNA, 16 bp, Artificial Sequence
  Synthetic construct
ctctacgagccactat

SEQ ID NO: 17498 - DNA, 16 bp, Artificial Sequence
  Synthetic construct
ctctacgagccactat

SEQ ID NO: 17499 - DNA, 16 bp, Artificial Sequence
  Synthetic construct
ctctacgcactcaggc

SEQ ID NO: 17500 - DNA, 16 bp, Artificial Sequence
  Synthetic construct
ctctacgcactcaggc

SEQ ID NO: 17501 - DNA, 16 bp, Artificial Sequence
  Synthetic construct
ctctggtcaagggtca

SEQ ID NO: 17502 - DNA, 16 bp, Artificial Sequence
  Synthetic construct
ctctggtcaagggtca

SEQ ID NO: 17503 - DNA, 16 bp, Artificial Sequence
  Synthetic construct
ctctggttcatttggg

SEQ ID NO: 17504 - DNA, 16 bp, Artificial Sequence
  Synthetic construct
ctctggttcatttggg

SEQ ID NO: 17505 - DNA, 16 bp, Artificial Sequence
  Synthetic construct
ctgaaacgtcgcggtt

SEQ ID NO: 17506 - DNA, 16 bp, Artificial Sequence
  Synthetic construct
ctgaaacgtcgcggtt

SEQ ID NO: 17507 - DNA, 16 bp, Artificial Sequence
  Synthetic construct
ctgaagttcagttgac

SEQ ID NO: 17508 - DNA, 16 bp, Artificial Sequence
  Synthetic construct
ctgaagttcagttgac

SEQ ID NO: 17509 - DNA, 16 bp, Artificial Sequence
  Synthetic construct
ctgaagttccaaagtc

SEQ ID NO: 17510 - DNA, 16 bp, Artificial Sequence
  Synthetic construct
ctgaagttccaaagtc

SEQ ID NO: 17511 - DNA, 16 bp, Artificial Sequence
  Synthetic construct
ctgatagagaaggaca

SEQ ID NO: 17512 - DNA, 16 bp, Artificial Sequence
  Synthetic construct
ctgatagagaaggaca

SEQ ID NO: 17513 - DNA, 16 bp, Artificial Sequence
  Synthetic construct
ctgatagagtgggatc

SEQ ID NO: 17514 - DNA, 16 bp, Artificial Sequence
  Synthetic construct
ctgatagagtgggatc

SEQ ID NO: 17515 - DNA, 16 bp, Artificial Sequence
  Synthetic construct
ctgatccgttccaaca

SEQ ID NO: 17516 - DNA, 16 bp, Artificial Sequence
  Synthetic construct
ctgatccgttccaaca

SEQ ID NO: 17517 - DNA, 16 bp, Artificial Sequence
  Synthetic construct
ctgatcctcaaaccac

SEQ ID NO: 17518 - DNA, 16 bp, Artificial Sequence
  Synthetic construct
ctgatcctcaaaccac

SEQ ID NO: 17519 - DNA, 16 bp, Artificial Sequence
  Synthetic construct
ctgatcctcataaccg

SEQ ID NO: 17520 - DNA, 16 bp, Artificial Sequence
  Synthetic construct
ctgatcctcataaccg

SEQ ID NO: 17521 - DNA, 16 bp, Artificial Sequence
  Synthetic construct
ctgatcctctactatc

SEQ ID NO: 17522 - DNA, 16 bp, Artificial Sequence
  Synthetic construct
ctgatcctctactatc

SEQ ID NO: 17523 - DNA, 16 bp, Artificial Sequence
  Synthetic construct
ctgcctacaatctgca

SEQ ID NO: 17524 - DNA, 16 bp, Artificial Sequence
  Synthetic construct
ctgcctacaatctgca

SEQ ID NO: 17525 - DNA, 16 bp, Artificial Sequence
  Synthetic construct
ctgcctacaccctatc

SEQ ID NO: 17526 - DNA, 16 bp, Artificial Sequence
  Synthetic construct
ctgcctacaccctatc

SEQ ID NO: 17527 - DNA, 16 bp, Artificial Sequence
  Synthetic construct
ctgcctagtaagggaa

SEQ ID NO: 17528 - DNA, 16 bp, Artificial Sequence
  Synthetic construct
ctgcctagtaagggaa

SEQ ID NO: 17529 - DNA, 16 bp, Artificial Sequence
  Synthetic construct
ctgcggaagaggttat

SEQ ID NO: 17530 - DNA, 16 bp, Artificial Sequence
  Synthetic construct
ctgcggaagaggttat

SEQ ID NO: 17531 - DNA, 16 bp, Artificial Sequence
  Synthetic construct
ctgcggacaatagagt

SEQ ID NO: 17532 - DNA, 16 bp, Artificial Sequence
  Synthetic construct
ctgcggacaatagagt

SEQ ID NO: 17533 - DNA, 16 bp, Artificial Sequence
  Synthetic construct
ctgctgtgtcttgtcc

SEQ ID NO: 17534 - DNA, 16 bp, Artificial Sequence
  Synthetic construct
ctgctgtgtcttgtcc

SEQ ID NO: 17535 - DNA, 16 bp, Artificial Sequence
  Synthetic construct
ctggtctcagtgggat

SEQ ID NO: 17536 - DNA, 16 bp, Artificial Sequence
  Synthetic construct
ctggtctcagtgggat

SEQ ID NO: 17537 - DNA, 16 bp, Artificial Sequence
  Synthetic construct
ctggtctgtcccttgt

SEQ ID NO: 17538 - DNA, 16 bp, Artificial Sequence
  Synthetic construct
ctggtctgtcccttgt

SEQ ID NO: 17539 - DNA, 16 bp, Artificial Sequence
  Synthetic construct
ctggtctgttcggcac

SEQ ID NO: 17540 - DNA, 16 bp, Artificial Sequence
  Synthetic construct
ctggtctgttcggcac

SEQ ID NO: 17541 - DNA, 16 bp, Artificial Sequence
  Synthetic construct
ctggtcttcatcggat

SEQ ID NO: 17542 - DNA, 16 bp, Artificial Sequence
  Synthetic construct
ctggtcttcatcggat

SEQ ID NO: 17543 - DNA, 16 bp, Artificial Sequence
  Synthetic construct
ctgtgctagttgagat

SEQ ID NO: 17544 - DNA, 16 bp, Artificial Sequence
  Synthetic construct
ctgtgctagttgagat

SEQ ID NO: 17545 - DNA, 16 bp, Artificial Sequence
  Synthetic construct
ctgtttacagggattg

SEQ ID NO: 17546 - DNA, 16 bp, Artificial Sequence
  Synthetic construct
ctgtttacagggattg

SEQ ID NO: 17547 - DNA, 16 bp, Artificial Sequence
  Synthetic construct
ctgtttacatggaata

SEQ ID NO: 17548 - DNA, 16 bp, Artificial Sequence
  Synthetic construct
ctgtttacatggaata

SEQ ID NO: 17549 - DNA, 16 bp, Artificial Sequence
  Synthetic construct
ctgtttagtgcgatag

SEQ ID NO: 17550 - DNA, 16 bp, Artificial Sequence
  Synthetic construct
ctgtttagtgcgatag

SEQ ID NO: 17551 - DNA, 16 bp, Artificial Sequence
  Synthetic construct
cttaactgtactctcc

SEQ ID NO: 17552 - DNA, 16 bp, Artificial Sequence
  Synthetic construct
cttaactgtactctcc

SEQ ID NO: 17553 - DNA, 16 bp, Artificial Sequence
  Synthetic construct
cttaacttcatctgcc

SEQ ID NO: 17554 - DNA, 16 bp, Artificial Sequence
  Synthetic construct
cttaacttcatctgcc

SEQ ID NO: 17555 - DNA, 16 bp, Artificial Sequence
  Synthetic construct
cttaacttccactcca

SEQ ID NO: 17556 - DNA, 16 bp, Artificial Sequence
  Synthetic construct
cttaacttccactcca

SEQ ID NO: 17557 - DNA, 16 bp, Artificial Sequence
  Synthetic construct
cttaacttccgttgtc

SEQ ID NO: 17558 - DNA, 16 bp, Artificial Sequence
  Synthetic construct
cttaacttccgttgtc

SEQ ID NO: 17559 - DNA, 16 bp, Artificial Sequence
  Synthetic construct
cttaccggtaacgcga

SEQ ID NO: 17560 - DNA, 16 bp, Artificial Sequence
  Synthetic construct
cttaccggtaacgcga

SEQ ID NO: 17561 - DNA, 16 bp, Artificial Sequence
  Synthetic construct
cttctctaggatgcgt

SEQ ID NO: 17562 - DNA, 16 bp, Artificial Sequence
  Synthetic construct
cttctctaggatgcgt

SEQ ID NO: 17563 - DNA, 16 bp, Artificial Sequence
  Synthetic construct
cttctcttctgctgct

SEQ ID NO: 17564 - DNA, 16 bp, Artificial Sequence
  Synthetic construct
cttctcttctgctgct

SEQ ID NO: 17565 - DNA, 16 bp, Artificial Sequence
  Synthetic construct
cttggctcattgtgca

SEQ ID NO: 17566 - DNA, 16 bp, Artificial Sequence
  Synthetic construct
cttggctcattgtgca

SEQ ID NO: 17567 - DNA, 16 bp, Artificial Sequence
  Synthetic construct
ctttgcgagacgcaac

SEQ ID NO: 17568 - DNA, 16 bp, Artificial Sequence
  Synthetic construct
ctttgcgagacgcaac

SEQ ID NO: 17569 - DNA, 16 bp, Artificial Sequence
  Synthetic construct
ctttgcgagtacgata

SEQ ID NO: 17570 - DNA, 16 bp, Artificial Sequence
  Synthetic construct
ctttgcgagtacgata

SEQ ID NO: 17571 - DNA, 16 bp, Artificial Sequence
  Synthetic construct
ctttgcgcaaattgcc

SEQ ID NO: 17572 - DNA, 16 bp, Artificial Sequence
  Synthetic construct
ctttgcgcaaattgcc

SEQ ID NO: 17573 - DNA, 16 bp, Artificial Sequence
  Synthetic construct
gaaactcagaattccc

SEQ ID NO: 17574 - DNA, 16 bp, Artificial Sequence
  Synthetic construct
gaaactcagaattccc

SEQ ID NO: 17575 - DNA, 16 bp, Artificial Sequence
  Synthetic construct
gaaactccatctccca

SEQ ID NO: 17576 - DNA, 16 bp, Artificial Sequence
  Synthetic construct
gaaactccatctccca

SEQ ID NO: 17577 - DNA, 16 bp, Artificial Sequence
  Synthetic construct
gaaactcgtcatatcg

SEQ ID NO: 17578 - DNA, 16 bp, Artificial Sequence
  Synthetic construct
gaaactcgtcatatcg

SEQ ID NO: 17579 - DNA, 16 bp, Artificial Sequence
  Synthetic construct
gaaactcgtttgtgtg

SEQ ID NO: 17580 - DNA, 16 bp, Artificial Sequence
  Synthetic construct
gaaactcgtttgtgtg

SEQ ID NO: 17581 - DNA, 16 bp, Artificial Sequence
  Synthetic construct
gaaactctcaacacca

SEQ ID NO: 17582 - DNA, 16 bp, Artificial Sequence
  Synthetic construct
gaaactctcaacacca

SEQ ID NO: 17583 - DNA, 16 bp, Artificial Sequence
  Synthetic construct
gaacatcagagtgacc

SEQ ID NO: 17584 - DNA, 16 bp, Artificial Sequence
  Synthetic construct
gaacatcagagtgacc

SEQ ID NO: 17585 - DNA, 16 bp, Artificial Sequence
  Synthetic construct
gaacatccatactctt

SEQ ID NO: 17586 - DNA, 16 bp, Artificial Sequence
  Synthetic construct
gaacatccatactctt

SEQ ID NO: 17587 - DNA, 16 bp, Artificial Sequence
  Synthetic construct
gaacatcgtaaatgtg

SEQ ID NO: 17588 - DNA, 16 bp, Artificial Sequence
  Synthetic construct
gaacatcgtaaatgtg

SEQ ID NO: 17589 - DNA, 16 bp, Artificial Sequence
  Synthetic construct
gaacctacaagtagta

SEQ ID NO: 17590 - DNA, 16 bp, Artificial Sequence
  Synthetic construct
gaacctacaagtagta

SEQ ID NO: 17591 - DNA, 16 bp, Artificial Sequence
  Synthetic construct
gaacctacacaagccc

SEQ ID NO: 17592 - DNA, 16 bp, Artificial Sequence
  Synthetic construct
gaacctacacaagccc

SEQ ID NO: 17593 - DNA, 16 bp, Artificial Sequence
  Synthetic construct
gaacggatcggaggta

SEQ ID NO: 17594 - DNA, 16 bp, Artificial Sequence
  Synthetic construct
gaacggatcggaggta

SEQ ID NO: 17595 - DNA, 16 bp, Artificial Sequence
  Synthetic construct
gaagcagagaaaccgc

SEQ ID NO: 17596 - DNA, 16 bp, Artificial Sequence
  Synthetic construct
gaagcagagaaaccgc

SEQ ID NO: 17597 - DNA, 16 bp, Artificial Sequence
  Synthetic construct
gaagcagcaactggcc

SEQ ID NO: 17598 - DNA, 16 bp, Artificial Sequence
  Synthetic construct
gaagcagcaactggcc

SEQ ID NO: 17599 - DNA, 16 bp, Artificial Sequence
  Synthetic construct
gaagcagtctgcgtaa

SEQ ID NO: 17600 - DNA, 16 bp, Artificial Sequence
  Synthetic construct
gaagcagtctgcgtaa

SEQ ID NO: 17601 - DNA, 16 bp, Artificial Sequence
  Synthetic construct
gaataagagatcccgc

SEQ ID NO: 17602 - DNA, 16 bp, Artificial Sequence
  Synthetic construct
gaataagagatcccgc

SEQ ID NO: 17603 - DNA, 16 bp, Artificial Sequence
  Synthetic construct
gacacgcagtcgtttg

SEQ ID NO: 17604 - DNA, 16 bp, Artificial Sequence
  Synthetic construct
gacacgcagtcgtttg

SEQ ID NO: 17605 - DNA, 16 bp, Artificial Sequence
  Synthetic construct
gacagagagcggcttc

SEQ ID NO: 17606 - DNA, 16 bp, Artificial Sequence
  Synthetic construct
gacagagagcggcttc

SEQ ID NO: 17607 - DNA, 16 bp, Artificial Sequence
  Synthetic construct
gacagaggttagatga

SEQ ID NO: 17608 - DNA, 16 bp, Artificial Sequence
  Synthetic construct
gacagaggttagatga

SEQ ID NO: 17609 - DNA, 16 bp, Artificial Sequence
  Synthetic construct
gaccaatcacaacgcc

SEQ ID NO: 17610 - DNA, 16 bp, Artificial Sequence
  Synthetic construct
gaccaatcacaacgcc

SEQ ID NO: 17611 - DNA, 16 bp, Artificial Sequence
  Synthetic construct
gaccaatgttaagggc

SEQ ID NO: 17612 - DNA, 16 bp, Artificial Sequence
  Synthetic construct
gaccaatgttaagggc

SEQ ID NO: 17613 - DNA, 16 bp, Artificial Sequence
  Synthetic construct
gacctgggtttgttgg

SEQ ID NO: 17614 - DNA, 16 bp, Artificial Sequence
  Synthetic construct
gacctgggtttgttgg

SEQ ID NO: 17615 - DNA, 16 bp, Artificial Sequence
  Synthetic construct
gacgcgtgtgtcgctg

SEQ ID NO: 17616 - DNA, 16 bp, Artificial Sequence
  Synthetic construct
gacgcgtgtgtcgctg

SEQ ID NO: 17617 - DNA, 16 bp, Artificial Sequence
  Synthetic construct
gacgcgttctctaagg

SEQ ID NO: 17618 - DNA, 16 bp, Artificial Sequence
  Synthetic construct
gacgcgttctctaagg

SEQ ID NO: 17619 - DNA, 16 bp, Artificial Sequence
  Synthetic construct
gacggcttctccaacc

SEQ ID NO: 17620 - DNA, 16 bp, Artificial Sequence
  Synthetic construct
gacggcttctccaacc

SEQ ID NO: 17621 - DNA, 16 bp, Artificial Sequence
  Synthetic construct
gacgtgccaaggctcc

SEQ ID NO: 17622 - DNA, 16 bp, Artificial Sequence
  Synthetic construct
gacgtgccaaggctcc

SEQ ID NO: 17623 - DNA, 16 bp, Artificial Sequence
  Synthetic construct
gacgttacaccgttgg

SEQ ID NO: 17624 - DNA, 16 bp, Artificial Sequence
  Synthetic construct
gacgttacaccgttgg

SEQ ID NO: 17625 - DNA, 16 bp, Artificial Sequence
  Synthetic construct
gacgttatcaacgaaa

SEQ ID NO: 17626 - DNA, 16 bp, Artificial Sequence
  Synthetic construct
gacgttatcaacgaaa

SEQ ID NO: 17627 - DNA, 16 bp, Artificial Sequence
  Synthetic construct
gactaactcaataagg

SEQ ID NO: 17628 - DNA, 16 bp, Artificial Sequence
  Synthetic construct
gactaactcaataagg

SEQ ID NO: 17629 - DNA, 16 bp, Artificial Sequence
  Synthetic construct
gactacagtggtgtag

SEQ ID NO: 17630 - DNA, 16 bp, Artificial Sequence
  Synthetic construct
gactacagtggtgtag

SEQ ID NO: 17631 - DNA, 16 bp, Artificial Sequence
  Synthetic construct
gactgcgagttatcgc

SEQ ID NO: 17632 - DNA, 16 bp, Artificial Sequence
  Synthetic construct
gactgcgagttatcgc

SEQ ID NO: 17633 - DNA, 16 bp, Artificial Sequence
  Synthetic construct
gactgcgtcagcgacc

SEQ ID NO: 17634 - DNA, 16 bp, Artificial Sequence
  Synthetic construct
gactgcgtcagcgacc

SEQ ID NO: 17635 - DNA, 16 bp, Artificial Sequence
  Synthetic construct
gagcagatcccttgca

SEQ ID NO: 17636 - DNA, 16 bp, Artificial Sequence
  Synthetic construct
gagcagatcccttgca

SEQ ID NO: 17637 - DNA, 16 bp, Artificial Sequence
  Synthetic construct
gagcagatcctttctc

SEQ ID NO: 17638 - DNA, 16 bp, Artificial Sequence
  Synthetic construct
gagcagatcctttctc

SEQ ID NO: 17639 - DNA, 16 bp, Artificial Sequence
  Synthetic construct
gatcagtcatgcgcac

SEQ ID NO: 17640 - DNA, 16 bp, Artificial Sequence
  Synthetic construct
gatcagtcatgcgcac

SEQ ID NO: 17641 - DNA, 16 bp, Artificial Sequence
  Synthetic construct
gatcagttccagatca

SEQ ID NO: 17642 - DNA, 16 bp, Artificial Sequence
  Synthetic construct
gatcagttccagatca

SEQ ID NO: 17643 - DNA, 16 bp, Artificial Sequence
  Synthetic construct
gatcgcgagatgagag

SEQ ID NO: 17644 - DNA, 16 bp, Artificial Sequence
  Synthetic construct
gatcgcgagatgagag

SEQ ID NO: 17645 - DNA, 16 bp, Artificial Sequence
  Synthetic construct
gatcgtacatccgcga

SEQ ID NO: 17646 - DNA, 16 bp, Artificial Sequence
  Synthetic construct
gatcgtacatccgcga

SEQ ID NO: 17647 - DNA, 16 bp, Artificial Sequence
  Synthetic construct
gatcgtatcgaacgga

SEQ ID NO: 17648 - DNA, 16 bp, Artificial Sequence
  Synthetic construct
gatcgtatcgaacgga

SEQ ID NO: 17649 - DNA, 16 bp, Artificial Sequence
  Synthetic construct
gatctagcagatgggt

SEQ ID NO: 17650 - DNA, 16 bp, Artificial Sequence
  Synthetic construct
gatctagcagatgggt

SEQ ID NO: 17651 - DNA, 16 bp, Artificial Sequence
  Synthetic construct
gatctagtcgagccca

SEQ ID NO: 17652 - DNA, 16 bp, Artificial Sequence
  Synthetic construct
gatctagtcgagccca

SEQ ID NO: 17653 - DNA, 16 bp, Artificial Sequence
  Synthetic construct
gatgaaaagcccgaaa

SEQ ID NO: 17654 - DNA, 16 bp, Artificial Sequence
  Synthetic construct
gatgaaaagcccgaaa

SEQ ID NO: 17655 - DNA, 16 bp, Artificial Sequence
  Synthetic construct
gatgaaagtcacttcc

SEQ ID NO: 17656 - DNA, 16 bp, Artificial Sequence
  Synthetic construct
gatgaaagtcacttcc

SEQ ID NO: 17657 - DNA, 16 bp, Artificial Sequence
  Synthetic construct
gatgaaagtggctcca

SEQ ID NO: 17658 - DNA, 16 bp, Artificial Sequence
  Synthetic construct
gatgaaagtggctcca

SEQ ID NO: 17659 - DNA, 16 bp, Artificial Sequence
  Synthetic construct
gatgaaatcgtatcag

SEQ ID NO: 17660 - DNA, 16 bp, Artificial Sequence
  Synthetic construct
gatgaaatcgtatcag

SEQ ID NO: 17661 - DNA, 16 bp, Artificial Sequence
  Synthetic construct
gatgaggcatagactc

SEQ ID NO: 17662 - DNA, 16 bp, Artificial Sequence
  Synthetic construct
gatgaggcatagactc

SEQ ID NO: 17663 - DNA, 16 bp, Artificial Sequence
  Synthetic construct
gatgctatcaacgaaa

SEQ ID NO: 17664 - DNA, 16 bp, Artificial Sequence
  Synthetic construct
gatgctatcaacgaaa

SEQ ID NO: 17665 - DNA, 16 bp, Artificial Sequence
  Synthetic construct
gcaaacttctgtacga

SEQ ID NO: 17666 - DNA, 16 bp, Artificial Sequence
  Synthetic construct
gcaaacttctgtacga

SEQ ID NO: 17667 - DNA, 16 bp, Artificial Sequence
  Synthetic construct
gcaatcacaaggactg

SEQ ID NO: 17668 - DNA, 16 bp, Artificial Sequence
  Synthetic construct
gcaatcacaaggactg

SEQ ID NO: 17669 - DNA, 16 bp, Artificial Sequence
  Synthetic construct
gcaatcagtgccttgg

SEQ ID NO: 17670 - DNA, 16 bp, Artificial Sequence
  Synthetic construct
gcaatcagtgccttgg

SEQ ID NO: 17671 - DNA, 16 bp, Artificial Sequence
  Synthetic construct
gcaatcatcgtaccgg

SEQ ID NO: 17672 - DNA, 16 bp, Artificial Sequence
  Synthetic construct
gcaatcatcgtaccgg

SEQ ID NO: 17673 - DNA, 16 bp, Artificial Sequence
  Synthetic construct
gcacatagtcagctat

SEQ ID NO: 17674 - DNA, 16 bp, Artificial Sequence
  Synthetic construct
gcacatagtcagctat

SEQ ID NO: 17675 - DNA, 16 bp, Artificial Sequence
  Synthetic construct
gcacatagtttgacac

SEQ ID NO: 17676 - DNA, 16 bp, Artificial Sequence
  Synthetic construct
gcacatagtttgacac

SEQ ID NO: 17677 - DNA, 16 bp, Artificial Sequence
  Synthetic construct
gcactctcatagtaag

SEQ ID NO: 17678 - DNA, 16 bp, Artificial Sequence
  Synthetic construct
gcactctcatagtaag

SEQ ID NO: 17679 - DNA, 16 bp, Artificial Sequence
  Synthetic construct
gcactctgtattcgtg

SEQ ID NO: 17680 - DNA, 16 bp, Artificial Sequence
  Synthetic construct
gcactctgtattcgtg

SEQ ID NO: 17681 - DNA, 16 bp, Artificial Sequence
  Synthetic construct
gcactctgttaagtag

SEQ ID NO: 17682 - DNA, 16 bp, Artificial Sequence
  Synthetic construct
gcactctgttaagtag

SEQ ID NO: 17683 - DNA, 16 bp, Artificial Sequence
  Synthetic construct
gcactctgttacgtca

SEQ ID NO: 17684 - DNA, 16 bp, Artificial Sequence
  Synthetic construct
gcactctgttacgtca

SEQ ID NO: 17685 - DNA, 16 bp, Artificial Sequence
  Synthetic construct
gcagccaagcaatctc

SEQ ID NO: 17686 - DNA, 16 bp, Artificial Sequence
  Synthetic construct
gcagccaagcaatctc

SEQ ID NO: 17687 - DNA, 16 bp, Artificial Sequence
  Synthetic construct
gcagccatccaaactg

SEQ ID NO: 17688 - DNA, 16 bp, Artificial Sequence
  Synthetic construct
gcagccatccaaactg

SEQ ID NO: 17689 - DNA, 16 bp, Artificial Sequence
  Synthetic construct
gcatacaagtgcgatg

SEQ ID NO: 17690 - DNA, 16 bp, Artificial Sequence
  Synthetic construct
gcatacaagtgcgatg

SEQ ID NO: 17691 - DNA, 16 bp, Artificial Sequence
  Synthetic construct
gcatacacaactgcgc

SEQ ID NO: 17692 - DNA, 16 bp, Artificial Sequence
  Synthetic construct
gcatacacaactgcgc

SEQ ID NO: 17693 - DNA, 16 bp, Artificial Sequence
  Synthetic construct
gcatacatcgtctgaa

SEQ ID NO: 17694 - DNA, 16 bp, Artificial Sequence
  Synthetic construct
gcatacatcgtctgaa

SEQ ID NO: 17695 - DNA, 16 bp, Artificial Sequence
  Synthetic construct
gcatgcgagaatgtgt

SEQ ID NO: 17696 - DNA, 16 bp, Artificial Sequence
  Synthetic construct
gcatgcgagaatgtgt

SEQ ID NO: 17697 - DNA, 16 bp, Artificial Sequence
  Synthetic construct
gcatgcgcacataacc

SEQ ID NO: 17698 - DNA, 16 bp, Artificial Sequence
  Synthetic construct
gcatgcgcacataacc

SEQ ID NO: 17699 - DNA, 16 bp, Artificial Sequence
  Synthetic construct
gcatgcgcacgaaagc

SEQ ID NO: 17700 - DNA, 16 bp, Artificial Sequence
  Synthetic construct
gcatgcgcacgaaagc

SEQ ID NO: 17701 - DNA, 16 bp, Artificial Sequence
  Synthetic construct
gcatgcgcacggtgtc

SEQ ID NO: 17702 - DNA, 16 bp, Artificial Sequence
  Synthetic construct
gcatgcgcacggtgtc

SEQ ID NO: 17703 - DNA, 16 bp, Artificial Sequence
  Synthetic construct
gcatgcgcatttgctt

SEQ ID NO: 17704 - DNA, 16 bp, Artificial Sequence
  Synthetic construct
gcatgcgcatttgctt

SEQ ID NO: 17705 - DNA, 16 bp, Artificial Sequence
  Synthetic construct
gcatgcggtttaggaa

SEQ ID NO: 17706 - DNA, 16 bp, Artificial Sequence
  Synthetic construct
gcatgcggtttaggaa

SEQ ID NO: 17707 - DNA, 16 bp, Artificial Sequence
  Synthetic construct
gcatgtacaatgtaag

SEQ ID NO: 17708 - DNA, 16 bp, Artificial Sequence
  Synthetic construct
gcatgtacaatgtaag

SEQ ID NO: 17709 - DNA, 16 bp, Artificial Sequence
  Synthetic construct
gccaaatcactctgtc

SEQ ID NO: 17710 - DNA, 16 bp, Artificial Sequence
  Synthetic construct
gccaaatcactctgtc

SEQ ID NO: 17711 - DNA, 16 bp, Artificial Sequence
  Synthetic construct
gccaaatgtctaacgt

SEQ ID NO: 17712 - DNA, 16 bp, Artificial Sequence
  Synthetic construct
gccaaatgtctaacgt

SEQ ID NO: 17713 - DNA, 16 bp, Artificial Sequence
  Synthetic construct
gccaaatgtgaaatca

SEQ ID NO: 17714 - DNA, 16 bp, Artificial Sequence
  Synthetic construct
gccaaatgtgaaatca

SEQ ID NO: 17715 - DNA, 16 bp, Artificial Sequence
  Synthetic construct
gcctctatcataaagg

SEQ ID NO: 17716 - DNA, 16 bp, Artificial Sequence
  Synthetic construct
gcctctatcataaagg

SEQ ID NO: 17717 - DNA, 16 bp, Artificial Sequence
  Synthetic construct
gcgaccacaagttctg

SEQ ID NO: 17718 - DNA, 16 bp, Artificial Sequence
  Synthetic construct
gcgaccacaagttctg

SEQ ID NO: 17719 - DNA, 16 bp, Artificial Sequence
  Synthetic construct
gcgaccatcggtgtta

SEQ ID NO: 17720 - DNA, 16 bp, Artificial Sequence
  Synthetic construct
gcgaccatcggtgtta

SEQ ID NO: 17721 - DNA, 16 bp, Artificial Sequence
  Synthetic construct
gcgagaagtgacaaat

SEQ ID NO: 17722 - DNA, 16 bp, Artificial Sequence
  Synthetic construct
gcgagaagtgacaaat

SEQ ID NO: 17723 - DNA, 16 bp, Artificial Sequence
  Synthetic construct
gcgcaaccaaagcggt

SEQ ID NO: 17724 - DNA, 16 bp, Artificial Sequence
  Synthetic construct
gcgcaaccaaagcggt

SEQ ID NO: 17725 - DNA, 16 bp, Artificial Sequence
  Synthetic construct
gcgcaaccatgatcca

SEQ ID NO: 17726 - DNA, 16 bp, Artificial Sequence
  Synthetic construct
gcgcaaccatgatcca

SEQ ID NO: 17727 - DNA, 16 bp, Artificial Sequence
  Synthetic construct
gcgcaacgtatgaatg

SEQ ID NO: 17728 - DNA, 16 bp, Artificial Sequence
  Synthetic construct
gcgcaacgtatgaatg

SEQ ID NO: 17729 - DNA, 16 bp, Artificial Sequence
  Synthetic construct
gcgcaactccttaatc

SEQ ID NO: 17730 - DNA, 16 bp, Artificial Sequence
  Synthetic construct
gcgcaactccttaatc

SEQ ID NO: 17731 - DNA, 16 bp, Artificial Sequence
  Synthetic construct
gcgcagtagaaacgag

SEQ ID NO: 17732 - DNA, 16 bp, Artificial Sequence
  Synthetic construct
gcgcagtagaaacgag

SEQ ID NO: 17733 - DNA, 16 bp, Artificial Sequence
  Synthetic construct
gcgcagtagtcatgct

SEQ ID NO: 17734 - DNA, 16 bp, Artificial Sequence
  Synthetic construct
gcgcagtagtcatgct

SEQ ID NO: 17735 - DNA, 16 bp, Artificial Sequence
  Synthetic construct
gcgcagtcaatagcaa

SEQ ID NO: 17736 - DNA, 16 bp, Artificial Sequence
  Synthetic construct
gcgcagtcaatagcaa

SEQ ID NO: 17737 - DNA, 16 bp, Artificial Sequence
  Synthetic construct
gcgcagttcagttcga

SEQ ID NO: 17738 - DNA, 16 bp, Artificial Sequence
  Synthetic construct
gcgcagttcagttcga

SEQ ID NO: 17739 - DNA, 16 bp, Artificial Sequence
  Synthetic construct
gcgcagttccaaccaa

SEQ ID NO: 17740 - DNA, 16 bp, Artificial Sequence
  Synthetic construct
gcgcagttccaaccaa

SEQ ID NO: 17741 - DNA, 16 bp, Artificial Sequence
  Synthetic construct
gcgcgatagacagacc

SEQ ID NO: 17742 - DNA, 16 bp, Artificial Sequence
  Synthetic construct
gcgcgatagacagacc

SEQ ID NO: 17743 - DNA, 16 bp, Artificial Sequence
  Synthetic construct
gcgggtttcgaactgt

SEQ ID NO: 17744 - DNA, 16 bp, Artificial Sequence
  Synthetic construct
gcgggtttcgaactgt

SEQ ID NO: 17745 - DNA, 16 bp, Artificial Sequence
  Synthetic construct
gctctgtagcgtttac

SEQ ID NO: 17746 - DNA, 16 bp, Artificial Sequence
  Synthetic construct
gctctgtagcgtttac

SEQ ID NO: 17747 - DNA, 16 bp, Artificial Sequence
  Synthetic construct
gctgcagagtctcaac

SEQ ID NO: 17748 - DNA, 16 bp, Artificial Sequence
  Synthetic construct
gctgcagagtctcaac

SEQ ID NO: 17749 - DNA, 16 bp, Artificial Sequence
  Synthetic construct
gctgcagcaaagtgcg

SEQ ID NO: 17750 - DNA, 16 bp, Artificial Sequence
  Synthetic construct
gctgcagcaaagtgcg

SEQ ID NO: 17751 - DNA, 16 bp, Artificial Sequence
  Synthetic construct
gctgcagtcaacggcc

SEQ ID NO: 17752 - DNA, 16 bp, Artificial Sequence
  Synthetic construct
gctgcagtcaacggcc

SEQ ID NO: 17753 - DNA, 16 bp, Artificial Sequence
  Synthetic construct
gctgcagtcttgtcat

SEQ ID NO: 17754 - DNA, 16 bp, Artificial Sequence
  Synthetic construct
gctgcagtcttgtcat

SEQ ID NO: 17755 - DNA, 16 bp, Artificial Sequence
  Synthetic construct
gctgcgaagacttgaa

SEQ ID NO: 17756 - DNA, 16 bp, Artificial Sequence
  Synthetic construct
gctgcgaagacttgaa

SEQ ID NO: 17757 - DNA, 16 bp, Artificial Sequence
  Synthetic construct
gctgcgagttccacaa

SEQ ID NO: 17758 - DNA, 16 bp, Artificial Sequence
  Synthetic construct
gctgcgagttccacaa

SEQ ID NO: 17759 - DNA, 16 bp, Artificial Sequence
  Synthetic construct
gctgcttgtagcgcaa

SEQ ID NO: 17760 - DNA, 16 bp, Artificial Sequence
  Synthetic construct
gctgcttgtagcgcaa

SEQ ID NO: 17761 - DNA, 16 bp, Artificial Sequence
  Synthetic construct
gctgggtagtccggtc

SEQ ID NO: 17762 - DNA, 16 bp, Artificial Sequence
  Synthetic construct
gctgggtagtccggtc

SEQ ID NO: 17763 - DNA, 16 bp, Artificial Sequence
  Synthetic construct
gctgggtagtgaagag

SEQ ID NO: 17764 - DNA, 16 bp, Artificial Sequence
  Synthetic construct
gctgggtagtgaagag

SEQ ID NO: 17765 - DNA, 16 bp, Artificial Sequence
  Synthetic construct
gctgggttctctaagg

SEQ ID NO: 17766 - DNA, 16 bp, Artificial Sequence
  Synthetic construct
gctgggttctctaagg

SEQ ID NO: 17767 - DNA, 16 bp, Artificial Sequence
  Synthetic construct
gcttccaagaggttgc

SEQ ID NO: 17768 - DNA, 16 bp, Artificial Sequence
  Synthetic construct
gcttccaagaggttgc

SEQ ID NO: 17769 - DNA, 16 bp, Artificial Sequence
  Synthetic construct
gcttgaaagagcaatt

SEQ ID NO: 17770 - DNA, 16 bp, Artificial Sequence
  Synthetic construct
gcttgaaagagcaatt

SEQ ID NO: 17771 - DNA, 16 bp, Artificial Sequence
  Synthetic construct
gcttgaaaggagttta

SEQ ID NO: 17772 - DNA, 16 bp, Artificial Sequence
  Synthetic construct
gcttgaaaggagttta

SEQ ID NO: 17773 - DNA, 16 bp, Artificial Sequence
  Synthetic construct
ggaataaagtgtacct

SEQ ID NO: 17774 - DNA, 16 bp, Artificial Sequence
  Synthetic construct
ggaataaagtgtacct

SEQ ID NO: 17775 - DNA, 16 bp, Artificial Sequence
  Synthetic construct
ggaataacagacgcct

SEQ ID NO: 17776 - DNA, 16 bp, Artificial Sequence
  Synthetic construct
ggaataacagacgcct

SEQ ID NO: 17777 - DNA, 16 bp, Artificial Sequence
  Synthetic construct
ggacatttcagagctt

SEQ ID NO: 17778 - DNA, 16 bp, Artificial Sequence
  Synthetic construct
ggacatttcagagctt

SEQ ID NO: 17779 - DNA, 16 bp, Artificial Sequence
  Synthetic construct
ggacgtcaggcccgtt

SEQ ID NO: 17780 - DNA, 16 bp, Artificial Sequence
  Synthetic construct
ggacgtcaggcccgtt

SEQ ID NO: 17781 - DNA, 16 bp, Artificial Sequence
  Synthetic construct
ggacgtcgttgcgcac

SEQ ID NO: 17782 - DNA, 16 bp, Artificial Sequence
  Synthetic construct
ggacgtcgttgcgcac

SEQ ID NO: 17783 - DNA, 16 bp, Artificial Sequence
  Synthetic construct
ggagcaagtaagtgta

SEQ ID NO: 17784 - DNA, 16 bp, Artificial Sequence
  Synthetic construct
ggagcaagtaagtgta

SEQ ID NO: 17785 - DNA, 16 bp, Artificial Sequence
  Synthetic construct
ggatgttcagagccaa

SEQ ID NO: 17786 - DNA, 16 bp, Artificial Sequence
  Synthetic construct
ggatgttcagagccaa

SEQ ID NO: 17787 - DNA, 16 bp, Artificial Sequence
  Synthetic construct
ggatgttcatcccact

SEQ ID NO: 17788 - DNA, 16 bp, Artificial Sequence
  Synthetic construct
ggatgttcatcccact

SEQ ID NO: 17789 - DNA, 16 bp, Artificial Sequence
  Synthetic construct
ggatgttgtagagtgc

SEQ ID NO: 17790 - DNA, 16 bp, Artificial Sequence
  Synthetic construct
ggatgttgtagagtgc

SEQ ID NO: 17791 - DNA, 16 bp, Artificial Sequence
  Synthetic construct
ggatgttgtcacaagg

SEQ ID NO: 17792 - DNA, 16 bp, Artificial Sequence
  Synthetic construct
ggatgttgtcacaagg

SEQ ID NO: 17793 - DNA, 16 bp, Artificial Sequence
  Synthetic construct
ggatgttgtccgagtc

SEQ ID NO: 17794 - DNA, 16 bp, Artificial Sequence
  Synthetic construct
ggatgttgtccgagtc

SEQ ID NO: 17795 - DNA, 16 bp, Artificial Sequence
  Synthetic construct
ggattacagctttggt

SEQ ID NO: 17796 - DNA, 16 bp, Artificial Sequence
  Synthetic construct
ggattacagctttggt

SEQ ID NO: 17797 - DNA, 16 bp, Artificial Sequence
  Synthetic construct
ggcaattagccactat

SEQ ID NO: 17798 - DNA, 16 bp, Artificial Sequence
  Synthetic construct
ggcaattagccactat

SEQ ID NO: 17799 - DNA, 16 bp, Artificial Sequence
  Synthetic construct
ggcaattaggactggt

SEQ ID NO: 17800 - DNA, 16 bp, Artificial Sequence
  Synthetic construct
ggcaattaggactggt

SEQ ID NO: 17801 - DNA, 16 bp, Artificial Sequence
  Synthetic construct
ggcaattcagggtaca

SEQ ID NO: 17802 - DNA, 16 bp, Artificial Sequence
  Synthetic construct
ggcaattcagggtaca

SEQ ID NO: 17803 - DNA, 16 bp, Artificial Sequence
  Synthetic construct
ggccgatagaactgta

SEQ ID NO: 17804 - DNA, 16 bp, Artificial Sequence
  Synthetic construct
ggccgatagaactgta

SEQ ID NO: 17805 - DNA, 16 bp, Artificial Sequence
  Synthetic construct
ggccgattcaccacct

SEQ ID NO: 17806 - DNA, 16 bp, Artificial Sequence
  Synthetic construct
ggccgattcaccacct

SEQ ID NO: 17807 - DNA, 16 bp, Artificial Sequence
  Synthetic construct
ggcgactagccagtag

SEQ ID NO: 17808 - DNA, 16 bp, Artificial Sequence
  Synthetic construct
ggcgactagccagtag

SEQ ID NO: 17809 - DNA, 16 bp, Artificial Sequence
  Synthetic construct
ggcgactagctagtgg

SEQ ID NO: 17810 - DNA, 16 bp, Artificial Sequence
  Synthetic construct
ggcgactagctagtgg

SEQ ID NO: 17811 - DNA, 16 bp, Artificial Sequence
  Synthetic construct
ggcgactgtgcggtaa

SEQ ID NO: 17812 - DNA, 16 bp, Artificial Sequence
  Synthetic construct
ggcgactgtgcggtaa

SEQ ID NO: 17813 - DNA, 16 bp, Artificial Sequence
  Synthetic construct
ggcgacttcagcgacc

SEQ ID NO: 17814 - DNA, 16 bp, Artificial Sequence
  Synthetic construct
ggcgacttcagcgacc

SEQ ID NO: 17815 - DNA, 16 bp, Artificial Sequence
  Synthetic construct
ggcgacttcggctacg

SEQ ID NO: 17816 - DNA, 16 bp, Artificial Sequence
  Synthetic construct
ggcgacttcggctacg

SEQ ID NO: 17817 - DNA, 16 bp, Artificial Sequence
  Synthetic construct
ggctcgaagagtaatc

SEQ ID NO: 17818 - DNA, 16 bp, Artificial Sequence
  Synthetic construct
ggctcgaagagtaatc

SEQ ID NO: 17819 - DNA, 16 bp, Artificial Sequence
  Synthetic construct
ggctcgatcagcatgt

SEQ ID NO: 17820 - DNA, 16 bp, Artificial Sequence
  Synthetic construct
ggctcgatcagcatgt

SEQ ID NO: 17821 - DNA, 16 bp, Artificial Sequence
  Synthetic construct
ggctggtcatggatgg

SEQ ID NO: 17822 - DNA, 16 bp, Artificial Sequence
  Synthetic construct
ggctggtcatggatgg

SEQ ID NO: 17823 - DNA, 16 bp, Artificial Sequence
  Synthetic construct
gggaatgcattgggcc

SEQ ID NO: 17824 - DNA, 16 bp, Artificial Sequence
  Synthetic construct
gggaatgcattgggcc

SEQ ID NO: 17825 - DNA, 16 bp, Artificial Sequence
  Synthetic construct
gggacctagaaagtgg

SEQ ID NO: 17826 - DNA, 16 bp, Artificial Sequence
  Synthetic construct
gggacctagaaagtgg

SEQ ID NO: 17827 - DNA, 16 bp, Artificial Sequence
  Synthetic construct
gggacctagatgccag

SEQ ID NO: 17828 - DNA, 16 bp, Artificial Sequence
  Synthetic construct
gggacctagatgccag

SEQ ID NO: 17829 - DNA, 16 bp, Artificial Sequence
  Synthetic construct
gggacctcacacgctg

SEQ ID NO: 17830 - DNA, 16 bp, Artificial Sequence
  Synthetic construct
gggacctcacacgctg

SEQ ID NO: 17831 - DNA, 16 bp, Artificial Sequence
  Synthetic construct
gggacctgtaaacctc

SEQ ID NO: 17832 - DNA, 16 bp, Artificial Sequence
  Synthetic construct
gggacctgtaaacctc

SEQ ID NO: 17833 - DNA, 16 bp, Artificial Sequence
  Synthetic construct
gggacctgtaaatgac

SEQ ID NO: 17834 - DNA, 16 bp, Artificial Sequence
  Synthetic construct
gggacctgtaaatgac

SEQ ID NO: 17835 - DNA, 16 bp, Artificial Sequence
  Synthetic construct
gggaccttcagctggc

SEQ ID NO: 17836 - DNA, 16 bp, Artificial Sequence
  Synthetic construct
gggaccttcagctggc

SEQ ID NO: 17837 - DNA, 16 bp, Artificial Sequence
  Synthetic construct
gggagatagaaaccgc

SEQ ID NO: 17838 - DNA, 16 bp, Artificial Sequence
  Synthetic construct
gggagatagaaaccgc

SEQ ID NO: 17839 - DNA, 16 bp, Artificial Sequence
  Synthetic construct
gggagatagtgtgaat

SEQ ID NO: 17840 - DNA, 16 bp, Artificial Sequence
  Synthetic construct
gggagatagtgtgaat

SEQ ID NO: 17841 - DNA, 16 bp, Artificial Sequence
  Synthetic construct
gggagatagtttgcgt

SEQ ID NO: 17842 - DNA, 16 bp, Artificial Sequence
  Synthetic construct
gggagatagtttgcgt

SEQ ID NO: 17843 - DNA, 16 bp, Artificial Sequence
  Synthetic construct
gggagatcaacaacct

SEQ ID NO: 17844 - DNA, 16 bp, Artificial Sequence
  Synthetic construct
gggagatcaacaacct

SEQ ID NO: 17845 - DNA, 16 bp, Artificial Sequence
  Synthetic construct
gggagatgtacatgtc

SEQ ID NO: 17846 - DNA, 16 bp, Artificial Sequence
  Synthetic construct
gggagatgtacatgtc

SEQ ID NO: 17847 - DNA, 16 bp, Artificial Sequence
  Synthetic construct
gggagatgtctctctg

SEQ ID NO: 17848 - DNA, 16 bp, Artificial Sequence
  Synthetic construct
gggagatgtctctctg

SEQ ID NO: 17849 - DNA, 16 bp, Artificial Sequence
  Synthetic construct
gggagatgttattctc

SEQ ID NO: 17850 - DNA, 16 bp, Artificial Sequence
  Synthetic construct
gggagatgttattctc

SEQ ID NO: 17851 - DNA, 16 bp, Artificial Sequence
  Synthetic construct
gggatgaagccacgct

SEQ ID NO: 17852 - DNA, 16 bp, Artificial Sequence
  Synthetic construct
gggatgaagccacgct

SEQ ID NO: 17853 - DNA, 16 bp, Artificial Sequence
  Synthetic construct
gggatgaaggacatta

SEQ ID NO: 17854 - DNA, 16 bp, Artificial Sequence
  Synthetic construct
gggatgaaggacatta

SEQ ID NO: 17855 - DNA, 16 bp, Artificial Sequence
  Synthetic construct
gggatgacacacgctg

SEQ ID NO: 17856 - DNA, 16 bp, Artificial Sequence
  Synthetic construct
gggatgacacacgctg

SEQ ID NO: 17857 - DNA, 16 bp, Artificial Sequence
  Synthetic construct
gggatgagttaccagt

SEQ ID NO: 17858 - DNA, 16 bp, Artificial Sequence
  Synthetic construct
gggatgagttaccagt

SEQ ID NO: 17859 - DNA, 16 bp, Artificial Sequence
  Synthetic construct
gggatgagttctgaac

SEQ ID NO: 17860 - DNA, 16 bp, Artificial Sequence
  Synthetic construct
gggatgagttctgaac

SEQ ID NO: 17861 - DNA, 16 bp, Artificial Sequence
  Synthetic construct
gggatgatctacctgc

SEQ ID NO: 17862 - DNA, 16 bp, Artificial Sequence
  Synthetic construct
gggatgatctacctgc

SEQ ID NO: 17863 - DNA, 16 bp, Artificial Sequence
  Synthetic construct
gggcactcatgggaac

SEQ ID NO: 17864 - DNA, 16 bp, Artificial Sequence
  Synthetic construct
gggcactcatgggaac

SEQ ID NO: 17865 - DNA, 16 bp, Artificial Sequence
  Synthetic construct
gggcatccagggtaca

SEQ ID NO: 17866 - DNA, 16 bp, Artificial Sequence
  Synthetic construct
gggcatccagggtaca

SEQ ID NO: 17867 - DNA, 16 bp, Artificial Sequence
  Synthetic construct
gggcatcgttcacggc

SEQ ID NO: 17868 - DNA, 16 bp, Artificial Sequence
  Synthetic construct
gggcatcgttcacggc

SEQ ID NO: 17869 - DNA, 16 bp, Artificial Sequence
  Synthetic construct
gggtctgagactttcg

SEQ ID NO: 17870 - DNA, 16 bp, Artificial Sequence
  Synthetic construct
gggtctgagactttcg

SEQ ID NO: 17871 - DNA, 16 bp, Artificial Sequence
  Synthetic construct
gggtctgagaggttgc

SEQ ID NO: 17872 - DNA, 16 bp, Artificial Sequence
  Synthetic construct
gggtctgagaggttgc

SEQ ID NO: 17873 - DNA, 16 bp, Artificial Sequence
  Synthetic construct
gggtctgagggtcgat

SEQ ID NO: 17874 - DNA, 16 bp, Artificial Sequence
  Synthetic construct
gggtctgagggtcgat

SEQ ID NO: 17875 - DNA, 16 bp, Artificial Sequence
  Synthetic construct
gggttgccatctcgct

SEQ ID NO: 17876 - DNA, 16 bp, Artificial Sequence
  Synthetic construct
gggttgccatctcgct

SEQ ID NO: 17877 - DNA, 16 bp, Artificial Sequence
  Synthetic construct
gggttgctccactggg

SEQ ID NO: 17878 - DNA, 16 bp, Artificial Sequence
  Synthetic construct
gggttgctccactggg

SEQ ID NO: 17879 - DNA, 16 bp, Artificial Sequence
  Synthetic construct
ggtattgagcccaacc

SEQ ID NO: 17880 - DNA, 16 bp, Artificial Sequence
  Synthetic construct
ggtattgagcccaacc

SEQ ID NO: 17881 - DNA, 16 bp, Artificial Sequence
  Synthetic construct
ggtattgtcttaccgc

SEQ ID NO: 17882 - DNA, 16 bp, Artificial Sequence
  Synthetic construct
ggtattgtcttaccgc

SEQ ID NO: 17883 - DNA, 16 bp, Artificial Sequence
  Synthetic construct
ggtgaagagggtgttg

SEQ ID NO: 17884 - DNA, 16 bp, Artificial Sequence
  Synthetic construct
ggtgaagagggtgttg

SEQ ID NO: 17885 - DNA, 16 bp, Artificial Sequence
  Synthetic construct
ggtgaagcactgttag

SEQ ID NO: 17886 - DNA, 16 bp, Artificial Sequence
  Synthetic construct
ggtgaagcactgttag

SEQ ID NO: 17887 - DNA, 16 bp, Artificial Sequence
  Synthetic construct
ggtgaagcagtttacg

SEQ ID NO: 17888 - DNA, 16 bp, Artificial Sequence
  Synthetic construct
ggtgaagcagtttacg

SEQ ID NO: 17889 - DNA, 16 bp, Artificial Sequence
  Synthetic construct
ggtgaagcatggaata

SEQ ID NO: 17890 - DNA, 16 bp, Artificial Sequence
  Synthetic construct
ggtgaagcatggaata

SEQ ID NO: 17891 - DNA, 16 bp, Artificial Sequence
  Synthetic construct
ggtgaagtcgttacag

SEQ ID NO: 17892 - DNA, 16 bp, Artificial Sequence
  Synthetic construct
ggtgaagtcgttacag

SEQ ID NO: 17893 - DNA, 16 bp, Artificial Sequence
  Synthetic construct
ggtgttacacggccat

SEQ ID NO: 17894 - DNA, 16 bp, Artificial Sequence
  Synthetic construct
ggtgttacacggccat

SEQ ID NO: 17895 - DNA, 16 bp, Artificial Sequence
  Synthetic construct
ggtgttatcctttctc

SEQ ID NO: 17896 - DNA, 16 bp, Artificial Sequence
  Synthetic construct
ggtgttatcctttctc

SEQ ID NO: 17897 - DNA, 16 bp, Artificial Sequence
  Synthetic construct
gtaacgtagaatctcc

SEQ ID NO: 17898 - DNA, 16 bp, Artificial Sequence
  Synthetic construct
gtaacgtagaatctcc

SEQ ID NO: 17899 - DNA, 16 bp, Artificial Sequence
  Synthetic construct
gtaacgtgttcagact

SEQ ID NO: 17900 - DNA, 16 bp, Artificial Sequence
  Synthetic construct
gtaacgtgttcagact

SEQ ID NO: 17901 - DNA, 16 bp, Artificial Sequence
  Synthetic construct
gtaactgtcggtgtcg

SEQ ID NO: 17902 - DNA, 16 bp, Artificial Sequence
  Synthetic construct
gtaactgtcggtgtcg

SEQ ID NO: 17903 - DNA, 16 bp, Artificial Sequence
  Synthetic construct
gtactccaggctagca

SEQ ID NO: 17904 - DNA, 16 bp, Artificial Sequence
  Synthetic construct
gtactccaggctagca

SEQ ID NO: 17905 - DNA, 16 bp, Artificial Sequence
  Synthetic construct
gtactccgtgctagcc

SEQ ID NO: 17906 - DNA, 16 bp, Artificial Sequence
  Synthetic construct
gtactccgtgctagcc

SEQ ID NO: 17907 - DNA, 16 bp, Artificial Sequence
  Synthetic construct
gtactttagagcctag

SEQ ID NO: 17908 - DNA, 16 bp, Artificial Sequence
  Synthetic construct
gtactttagagcctag

SEQ ID NO: 17909 - DNA, 16 bp, Artificial Sequence
  Synthetic construct
gtactttgtctcccta

SEQ ID NO: 17910 - DNA, 16 bp, Artificial Sequence
  Synthetic construct
gtactttgtctcccta

SEQ ID NO: 17911 - DNA, 16 bp, Artificial Sequence
  Synthetic construct
gtaggcctcaccatag

SEQ ID NO: 17912 - DNA, 16 bp, Artificial Sequence
  Synthetic construct
gtaggcctcaccatag

SEQ ID NO: 17913 - DNA, 16 bp, Artificial Sequence
  Synthetic construct
gtaggcctcttgcatt

SEQ ID NO: 17914 - DNA, 16 bp, Artificial Sequence
  Synthetic construct
gtaggcctcttgcatt

SEQ ID NO: 17915 - DNA, 16 bp, Artificial Sequence
  Synthetic construct
gtagtcaagttgtaga

SEQ ID NO: 17916 - DNA, 16 bp, Artificial Sequence
  Synthetic construct
gtagtcaagttgtaga

SEQ ID NO: 17917 - DNA, 16 bp, Artificial Sequence
  Synthetic construct
gtagtcacatggaata

SEQ ID NO: 17918 - DNA, 16 bp, Artificial Sequence
  Synthetic construct
gtagtcacatggaata

SEQ ID NO: 17919 - DNA, 16 bp, Artificial Sequence
  Synthetic construct
gtagtcagtgcacgaa

SEQ ID NO: 17920 - DNA, 16 bp, Artificial Sequence
  Synthetic construct
gtagtcagtgcacgaa

SEQ ID NO: 17921 - DNA, 16 bp, Artificial Sequence
  Synthetic construct
gtatcttgttgcctct

SEQ ID NO: 17922 - DNA, 16 bp, Artificial Sequence
  Synthetic construct
gtatcttgttgcctct

SEQ ID NO: 17923 - DNA, 16 bp, Artificial Sequence
  Synthetic construct
gtattctaggtgttaa

SEQ ID NO: 17924 - DNA, 16 bp, Artificial Sequence
  Synthetic construct
gtattctaggtgttaa

SEQ ID NO: 17925 - DNA, 16 bp, Artificial Sequence
  Synthetic construct
gtattctagtcctcct

SEQ ID NO: 17926 - DNA, 16 bp, Artificial Sequence
  Synthetic construct
gtattctagtcctcct

SEQ ID NO: 17927 - DNA, 16 bp, Artificial Sequence
  Synthetic construct
gtattcttcagttgac

SEQ ID NO: 17928 - DNA, 16 bp, Artificial Sequence
  Synthetic construct
gtattcttcagttgac

SEQ ID NO: 17929 - DNA, 16 bp, Artificial Sequence
  Synthetic construct
gtcaagtagcaaatca

SEQ ID NO: 17930 - DNA, 16 bp, Artificial Sequence
  Synthetic construct
gtcaagtagcaaatca

SEQ ID NO: 17931 - DNA, 16 bp, Artificial Sequence
  Synthetic construct
gtcacaacatgaagta

SEQ ID NO: 17932 - DNA, 16 bp, Artificial Sequence
  Synthetic construct
gtcacaacatgaagta

SEQ ID NO: 17933 - DNA, 16 bp, Artificial Sequence
  Synthetic construct
gtcacgggttgtggag

SEQ ID NO: 17934 - DNA, 16 bp, Artificial Sequence
  Synthetic construct
gtcacgggttgtggag

SEQ ID NO: 17935 - DNA, 16 bp, Artificial Sequence
  Synthetic construct
gtcatttagccgccta

SEQ ID NO: 17936 - DNA, 16 bp, Artificial Sequence
  Synthetic construct
gtcatttagccgccta

SEQ ID NO: 17937 - DNA, 16 bp, Artificial Sequence
  Synthetic construct
gtcatttgtgtcctct

SEQ ID NO: 17938 - DNA, 16 bp, Artificial Sequence
  Synthetic construct
gtcatttgtgtcctct

SEQ ID NO: 17939 - DNA, 16 bp, Artificial Sequence
  Synthetic construct
gtcctcacacctcgtt

SEQ ID NO: 17940 - DNA, 16 bp, Artificial Sequence
  Synthetic construct
gtcctcacacctcgtt

SEQ ID NO: 17941 - DNA, 16 bp, Artificial Sequence
  Synthetic construct
gtcctcagtcctagcg

SEQ ID NO: 17942 - DNA, 16 bp, Artificial Sequence
  Synthetic construct
gtcctcagtcctagcg

SEQ ID NO: 17943 - DNA, 16 bp, Artificial Sequence
  Synthetic construct
gtcctcagtgttcgat

SEQ ID NO: 17944 - DNA, 16 bp, Artificial Sequence
  Synthetic construct
gtcctcagtgttcgat

SEQ ID NO: 17945 - DNA, 16 bp, Artificial Sequence
  Synthetic construct
gtcctcatccctaacc

SEQ ID NO: 17946 - DNA, 16 bp, Artificial Sequence
  Synthetic construct
gtcctcatccctaacc

SEQ ID NO: 17947 - DNA, 16 bp, Artificial Sequence
  Synthetic construct
gtcgggtcaaccgcca

SEQ ID NO: 17948 - DNA, 16 bp, Artificial Sequence
  Synthetic construct
gtcgggtcaaccgcca

SEQ ID NO: 17949 - DNA, 16 bp, Artificial Sequence
  Synthetic construct
gtcgggtcagctcgca

SEQ ID NO: 17950 - DNA, 16 bp, Artificial Sequence
  Synthetic construct
gtcgggtcagctcgca

SEQ ID NO: 17951 - DNA, 16 bp, Artificial Sequence
  Synthetic construct
gtctcgtcaacttgac

SEQ ID NO: 17952 - DNA, 16 bp, Artificial Sequence
  Synthetic construct
gtctcgtcaacttgac

SEQ ID NO: 17953 - DNA, 16 bp, Artificial Sequence
  Synthetic construct
gtcttcgagtacacct

SEQ ID NO: 17954 - DNA, 16 bp, Artificial Sequence
  Synthetic construct
gtcttcgagtacacct

SEQ ID NO: 17955 - DNA, 16 bp, Artificial Sequence
  Synthetic construct
gtgaaggagcacgcct

SEQ ID NO: 17956 - DNA, 16 bp, Artificial Sequence
  Synthetic construct
gtgaaggagcacgcct

SEQ ID NO: 17957 - DNA, 16 bp, Artificial Sequence
  Synthetic construct
gtgaaggagcctcgtg

SEQ ID NO: 17958 - DNA, 16 bp, Artificial Sequence
  Synthetic construct
gtgaaggagcctcgtg

SEQ ID NO: 17959 - DNA, 16 bp, Artificial Sequence
  Synthetic construct
gtgaagggtcctccat

SEQ ID NO: 17960 - DNA, 16 bp, Artificial Sequence
  Synthetic construct
gtgaagggtcctccat

SEQ ID NO: 17961 - DNA, 16 bp, Artificial Sequence
  Synthetic construct
gtgaagggttgggaca

SEQ ID NO: 17962 - DNA, 16 bp, Artificial Sequence
  Synthetic construct
gtgaagggttgggaca

SEQ ID NO: 17963 - DNA, 16 bp, Artificial Sequence
  Synthetic construct
gtgcagcagtcgtttg

SEQ ID NO: 17964 - DNA, 16 bp, Artificial Sequence
  Synthetic construct
gtgcagcagtcgtttg

SEQ ID NO: 17965 - DNA, 16 bp, Artificial Sequence
  Synthetic construct
gtgcagccaagacacg

SEQ ID NO: 17966 - DNA, 16 bp, Artificial Sequence
  Synthetic construct
gtgcagccaagacacg

SEQ ID NO: 17967 - DNA, 16 bp, Artificial Sequence
  Synthetic construct
gtgcagctcagtttgg

SEQ ID NO: 17968 - DNA, 16 bp, Artificial Sequence
  Synthetic construct
gtgcagctcagtttgg

SEQ ID NO: 17969 - DNA, 16 bp, Artificial Sequence
  Synthetic construct
gtgcataagagacgaa

SEQ ID NO: 17970 - DNA, 16 bp, Artificial Sequence
  Synthetic construct
gtgcataagagacgaa

SEQ ID NO: 17971 - DNA, 16 bp, Artificial Sequence
  Synthetic construct
gtgcggtgtttgggcc

SEQ ID NO: 17972 - DNA, 16 bp, Artificial Sequence
  Synthetic construct
gtgcggtgtttgggcc

SEQ ID NO: 17973 - DNA, 16 bp, Artificial Sequence
  Synthetic construct
gtgcggttcacatagc

SEQ ID NO: 17974 - DNA, 16 bp, Artificial Sequence
  Synthetic construct
gtgcggttcacatagc

SEQ ID NO: 17975 - DNA, 16 bp, Artificial Sequence
  Synthetic construct
gtgcttcgtatggttc

SEQ ID NO: 17976 - DNA, 16 bp, Artificial Sequence
  Synthetic construct
gtgcttcgtatggttc

SEQ ID NO: 17977 - DNA, 16 bp, Artificial Sequence
  Synthetic construct
gtgggtcagagcccaa

SEQ ID NO: 17978 - DNA, 16 bp, Artificial Sequence
  Synthetic construct
gtgggtcagagcccaa

SEQ ID NO: 17979 - DNA, 16 bp, Artificial Sequence
  Synthetic construct
gtgggtccacagccca

SEQ ID NO: 17980 - DNA, 16 bp, Artificial Sequence
  Synthetic construct
gtgggtccacagccca

SEQ ID NO: 17981 - DNA, 16 bp, Artificial Sequence
  Synthetic construct
gtgggtccacgaagca

SEQ ID NO: 17982 - DNA, 16 bp, Artificial Sequence
  Synthetic construct
gtgggtccacgaagca

SEQ ID NO: 17983 - DNA, 16 bp, Artificial Sequence
  Synthetic construct
gtgggtctctcgatga

SEQ ID NO: 17984 - DNA, 16 bp, Artificial Sequence
  Synthetic construct
gtgggtctctcgatga

SEQ ID NO: 17985 - DNA, 16 bp, Artificial Sequence
  Synthetic construct
gtgtgcggtcttgtcc

SEQ ID NO: 17986 - DNA, 16 bp, Artificial Sequence
  Synthetic construct
gtgtgcggtcttgtcc

SEQ ID NO: 17987 - DNA, 16 bp, Artificial Sequence
  Synthetic construct
gtgttagagtatcgaa

SEQ ID NO: 17988 - DNA, 16 bp, Artificial Sequence
  Synthetic construct
gtgttagagtatcgaa

SEQ ID NO: 17989 - DNA, 16 bp, Artificial Sequence
  Synthetic construct
gtgttagtcgttgcct

SEQ ID NO: 17990 - DNA, 16 bp, Artificial Sequence
  Synthetic construct
gtgttagtcgttgcct

SEQ ID NO: 17991 - DNA, 16 bp, Artificial Sequence
  Synthetic construct
gttaagcgtaccgctg

SEQ ID NO: 17992 - DNA, 16 bp, Artificial Sequence
  Synthetic construct
gttaagcgtaccgctg

SEQ ID NO: 17993 - DNA, 16 bp, Artificial Sequence
  Synthetic construct
gttaagctccgcatct

SEQ ID NO: 17994 - DNA, 16 bp, Artificial Sequence
  Synthetic construct
gttaagctccgcatct

SEQ ID NO: 17995 - DNA, 16 bp, Artificial Sequence
  Synthetic construct
gttacagcaatctgca

SEQ ID NO: 17996 - DNA, 16 bp, Artificial Sequence
  Synthetic construct
gttacagcaatctgca

SEQ ID NO: 17997 - DNA, 16 bp, Artificial Sequence
  Synthetic construct
gttacagcatggtcta

SEQ ID NO: 17998 - DNA, 16 bp, Artificial Sequence
  Synthetic construct
gttacagcatggtcta

SEQ ID NO: 17999 - DNA, 16 bp, Artificial Sequence
  Synthetic construct
gttacaggtggaaaga

SEQ ID NO: 18000 - DNA, 16 bp, Artificial Sequence
  Synthetic construct
gttacaggtggaaaga

SEQ ID NO: 18001 - DNA, 16 bp, Artificial Sequence
  Synthetic construct
gttcattagatgcgac

SEQ ID NO: 18002 - DNA, 16 bp, Artificial Sequence
  Synthetic construct
gttcattagatgcgac

SEQ ID NO: 18003 - DNA, 16 bp, Artificial Sequence
  Synthetic construct
gttctcgcaatggacg

SEQ ID NO: 18004 - DNA, 16 bp, Artificial Sequence
  Synthetic construct
gttctcgcaatggacg

SEQ ID NO: 18005 - DNA, 16 bp, Artificial Sequence
  Synthetic construct
gttctcgcaccttgtc

SEQ ID NO: 18006 - DNA, 16 bp, Artificial Sequence
  Synthetic construct
gttctcgcaccttgtc

SEQ ID NO: 18007 - DNA, 16 bp, Artificial Sequence
  Synthetic construct
gttctcgcatgttccc

SEQ ID NO: 18008 - DNA, 16 bp, Artificial Sequence
  Synthetic construct
gttctcgcatgttccc

SEQ ID NO: 18009 - DNA, 16 bp, Artificial Sequence
  Synthetic construct
gttctcggtctgattg

SEQ ID NO: 18010 - DNA, 16 bp, Artificial Sequence
  Synthetic construct
gttctcggtctgattg

SEQ ID NO: 18011 - DNA, 16 bp, Artificial Sequence
  Synthetic construct
gtttctacacctggtg

SEQ ID NO: 18012 - DNA, 16 bp, Artificial Sequence
  Synthetic construct
gtttctacacctggtg

SEQ ID NO: 18013 - DNA, 16 bp, Artificial Sequence
  Synthetic construct
gtttctacaggtcgtc

SEQ ID NO: 18014 - DNA, 16 bp, Artificial Sequence
  Synthetic construct
gtttctacaggtcgtc

SEQ ID NO: 18015 - DNA, 16 bp, Artificial Sequence
  Synthetic construct
gtttctacagtcagcc

SEQ ID NO: 18016 - DNA, 16 bp, Artificial Sequence
  Synthetic construct
gtttctacagtcagcc

SEQ ID NO: 18017 - DNA, 16 bp, Artificial Sequence
  Synthetic construct
gtttctatcagcgatt

SEQ ID NO: 18018 - DNA, 16 bp, Artificial Sequence
  Synthetic construct
gtttctatcagcgatt

SEQ ID NO: 18019 - DNA, 16 bp, Artificial Sequence
  Synthetic construct
gtttctatcgtacggc

SEQ ID NO: 18020 - DNA, 16 bp, Artificial Sequence
  Synthetic construct
gtttctatcgtacggc

SEQ ID NO: 18021 - DNA, 16 bp, Artificial Sequence
  Synthetic construct
taaaccggtgcttctc

SEQ ID NO: 18022 - DNA, 16 bp, Artificial Sequence
  Synthetic construct
taaaccggtgcttctc

SEQ ID NO: 18023 - DNA, 16 bp, Artificial Sequence
  Synthetic construct
taagagagtagaggaa

SEQ ID NO: 18024 - DNA, 16 bp, Artificial Sequence
  Synthetic construct
taagagagtagaggaa

SEQ ID NO: 18025 - DNA, 16 bp, Artificial Sequence
  Synthetic construct
taagcgtgttagatga

SEQ ID NO: 18026 - DNA, 16 bp, Artificial Sequence
  Synthetic construct
taagcgtgttagatga

SEQ ID NO: 18027 - DNA, 16 bp, Artificial Sequence
  Synthetic construct
taagcgtgttatcacg

SEQ ID NO: 18028 - DNA, 16 bp, Artificial Sequence
  Synthetic construct
taagcgtgttatcacg

SEQ ID NO: 18029 - DNA, 16 bp, Artificial Sequence
  Synthetic construct
taagtgccaaaggtgc

SEQ ID NO: 18030 - DNA, 16 bp, Artificial Sequence
  Synthetic construct
taagtgccaaaggtgc

SEQ ID NO: 18031 - DNA, 16 bp, Artificial Sequence
  Synthetic construct
taagtgcgtacttctt

SEQ ID NO: 18032 - DNA, 16 bp, Artificial Sequence
  Synthetic construct
taagtgcgtacttctt

SEQ ID NO: 18033 - DNA, 16 bp, Artificial Sequence
  Synthetic construct
taagtgctcacaatgc

SEQ ID NO: 18034 - DNA, 16 bp, Artificial Sequence
  Synthetic construct
taagtgctcacaatgc

SEQ ID NO: 18035 - DNA, 16 bp, Artificial Sequence
  Synthetic construct
tacacgatcctatgtt

SEQ ID NO: 18036 - DNA, 16 bp, Artificial Sequence
  Synthetic construct
tacacgatcctatgtt

SEQ ID NO: 18037 - DNA, 16 bp, Artificial Sequence
  Synthetic construct
tacctatgtcaactgt

SEQ ID NO: 18038 - DNA, 16 bp, Artificial Sequence
  Synthetic construct
tacctatgtcaactgt

SEQ ID NO: 18039 - DNA, 16 bp, Artificial Sequence
  Synthetic construct
tacctattcggtgtcg

SEQ ID NO: 18040 - DNA, 16 bp, Artificial Sequence
  Synthetic construct
tacctattcggtgtcg

SEQ ID NO: 18041 - DNA, 16 bp, Artificial Sequence
  Synthetic construct
taccttagtgttggga

SEQ ID NO: 18042 - DNA, 16 bp, Artificial Sequence
  Synthetic construct
taccttagtgttggga

SEQ ID NO: 18043 - DNA, 16 bp, Artificial Sequence
  Synthetic construct
taccttatccgctgtt

SEQ ID NO: 18044 - DNA, 16 bp, Artificial Sequence
  Synthetic construct
taccttatccgctgtt

SEQ ID NO: 18045 - DNA, 16 bp, Artificial Sequence
  Synthetic construct
tacggatagatgagag

SEQ ID NO: 18046 - DNA, 16 bp, Artificial Sequence
  Synthetic construct
tacggatagatgagag

SEQ ID NO: 18047 - DNA, 16 bp, Artificial Sequence
  Synthetic construct
tacggatcattagcca

SEQ ID NO: 18048 - DNA, 16 bp, Artificial Sequence
  Synthetic construct
tacggatcattagcca

SEQ ID NO: 18049 - DNA, 16 bp, Artificial Sequence
  Synthetic construct
tacgggctcgccagca

SEQ ID NO: 18050 - DNA, 16 bp, Artificial Sequence
  Synthetic construct
tacgggctcgccagca

SEQ ID NO: 18051 - DNA, 16 bp, Artificial Sequence
  Synthetic construct
tacggtaagccatcgc

SEQ ID NO: 18052 - DNA, 16 bp, Artificial Sequence
  Synthetic construct
tacggtaagccatcgc

SEQ ID NO: 18053 - DNA, 16 bp, Artificial Sequence
  Synthetic construct
tacggtacaagcctat

SEQ ID NO: 18054 - DNA, 16 bp, Artificial Sequence
  Synthetic construct
tacggtacaagcctat

SEQ ID NO: 18055 - DNA, 16 bp, Artificial Sequence
  Synthetic construct
tacggtacagacactt

SEQ ID NO: 18056 - DNA, 16 bp, Artificial Sequence
  Synthetic construct
tacggtacagacactt

SEQ ID NO: 18057 - DNA, 16 bp, Artificial Sequence
  Synthetic construct
tacggtagtaggagtc

SEQ ID NO: 18058 - DNA, 16 bp, Artificial Sequence
  Synthetic construct
tacggtagtaggagtc

SEQ ID NO: 18059 - DNA, 16 bp, Artificial Sequence
  Synthetic construct
tactcatagtatctcg

SEQ ID NO: 18060 - DNA, 16 bp, Artificial Sequence
  Synthetic construct
tactcatagtatctcg

SEQ ID NO: 18061 - DNA, 16 bp, Artificial Sequence
  Synthetic construct
tactcatcaagcgatg

SEQ ID NO: 18062 - DNA, 16 bp, Artificial Sequence
  Synthetic construct
tactcatcaagcgatg

SEQ ID NO: 18063 - DNA, 16 bp, Artificial Sequence
  Synthetic construct
tactcatcatttcagg

SEQ ID NO: 18064 - DNA, 16 bp, Artificial Sequence
  Synthetic construct
tactcatcatttcagg

SEQ ID NO: 18065 - DNA, 16 bp, Artificial Sequence
  Synthetic construct
tactcattcttatctg

SEQ ID NO: 18066 - DNA, 16 bp, Artificial Sequence
  Synthetic construct
tactcattcttatctg

SEQ ID NO: 18067 - DNA, 16 bp, Artificial Sequence
  Synthetic construct
tactcgcagaacaact

SEQ ID NO: 18068 - DNA, 16 bp, Artificial Sequence
  Synthetic construct
tactcgcagaacaact

SEQ ID NO: 18069 - DNA, 16 bp, Artificial Sequence
  Synthetic construct
tactcgccacttctgc

SEQ ID NO: 18070 - DNA, 16 bp, Artificial Sequence
  Synthetic construct
tactcgccacttctgc

SEQ ID NO: 18071 - DNA, 16 bp, Artificial Sequence
  Synthetic construct
tactcgcgtactcaac

SEQ ID NO: 18072 - DNA, 16 bp, Artificial Sequence
  Synthetic construct
tactcgcgtactcaac

SEQ ID NO: 18073 - DNA, 16 bp, Artificial Sequence
  Synthetic construct
tacttactctgtcaag

SEQ ID NO: 18074 - DNA, 16 bp, Artificial Sequence
  Synthetic construct
tacttactctgtcaag

SEQ ID NO: 18075 - DNA, 16 bp, Artificial Sequence
  Synthetic construct
tacttgtaggtgacca

SEQ ID NO: 18076 - DNA, 16 bp, Artificial Sequence
  Synthetic construct
tacttgtaggtgacca

SEQ ID NO: 18077 - DNA, 16 bp, Artificial Sequence
  Synthetic construct
tacttgtcagctgtta

SEQ ID NO: 18078 - DNA, 16 bp, Artificial Sequence
  Synthetic construct
tacttgtcagctgtta

SEQ ID NO: 18079 - DNA, 16 bp, Artificial Sequence
  Synthetic construct
tacttgtgtcgctttc

SEQ ID NO: 18080 - DNA, 16 bp, Artificial Sequence
  Synthetic construct
tacttgtgtcgctttc

SEQ ID NO: 18081 - DNA, 16 bp, Artificial Sequence
  Synthetic construct
tacttgttctgccagg

SEQ ID NO: 18082 - DNA, 16 bp, Artificial Sequence
  Synthetic construct
tacttgttctgccagg

SEQ ID NO: 18083 - DNA, 16 bp, Artificial Sequence
  Synthetic construct
tagaccaagaaggaca

SEQ ID NO: 18084 - DNA, 16 bp, Artificial Sequence
  Synthetic construct
tagaccaagaaggaca

SEQ ID NO: 18085 - DNA, 16 bp, Artificial Sequence
  Synthetic construct
tagaccatcatgtggt

SEQ ID NO: 18086 - DNA, 16 bp, Artificial Sequence
  Synthetic construct
tagaccatcatgtggt

SEQ ID NO: 18087 - DNA, 16 bp, Artificial Sequence
  Synthetic construct
tagaccatcgccagca

SEQ ID NO: 18088 - DNA, 16 bp, Artificial Sequence
  Synthetic construct
tagaccatcgccagca

SEQ ID NO: 18089 - DNA, 16 bp, Artificial Sequence
  Synthetic construct
tagagctagtgggatc

SEQ ID NO: 18090 - DNA, 16 bp, Artificial Sequence
  Synthetic construct
tagagctagtgggatc

SEQ ID NO: 18091 - DNA, 16 bp, Artificial Sequence
  Synthetic construct
tagagctcaccttgtc

SEQ ID NO: 18092 - DNA, 16 bp, Artificial Sequence
  Synthetic construct
tagagctcaccttgtc

SEQ ID NO: 18093 - DNA, 16 bp, Artificial Sequence
  Synthetic construct
tagccggcagatgagc

SEQ ID NO: 18094 - DNA, 16 bp, Artificial Sequence
  Synthetic construct
tagccggcagatgagc

SEQ ID NO: 18095 - DNA, 16 bp, Artificial Sequence
  Synthetic construct
tagccggcagccacca

SEQ ID NO: 18096 - DNA, 16 bp, Artificial Sequence
  Synthetic construct
tagccggcagccacca

SEQ ID NO: 18097 - DNA, 16 bp, Artificial Sequence
  Synthetic construct
tagccggcataggata

SEQ ID NO: 18098 - DNA, 16 bp, Artificial Sequence
  Synthetic construct
tagccggcataggata

SEQ ID NO: 18099 - DNA, 16 bp, Artificial Sequence
  Synthetic construct
tagccggtccattcta

SEQ ID NO: 18100 - DNA, 16 bp, Artificial Sequence
  Synthetic construct
tagccggtccattcta

SEQ ID NO: 18101 - DNA, 16 bp, Artificial Sequence
  Synthetic construct
taggcatgttacagaa

SEQ ID NO: 18102 - DNA, 16 bp, Artificial Sequence
  Synthetic construct
taggcatgttacagaa

SEQ ID NO: 18103 - DNA, 16 bp, Artificial Sequence
  Synthetic construct
taggcatgttgattgc

SEQ ID NO: 18104 - DNA, 16 bp, Artificial Sequence
  Synthetic construct
taggcatgttgattgc

SEQ ID NO: 18105 - DNA, 16 bp, Artificial Sequence
  Synthetic construct
taggcattctatcccg

SEQ ID NO: 18106 - DNA, 16 bp, Artificial Sequence
  Synthetic construct
taggcattctatcccg

SEQ ID NO: 18107 - DNA, 16 bp, Artificial Sequence
  Synthetic construct
tagtggtcattgcggc

SEQ ID NO: 18108 - DNA, 16 bp, Artificial Sequence
  Synthetic construct
tagtggtcattgcggc

SEQ ID NO: 18109 - DNA, 16 bp, Artificial Sequence
  Synthetic construct
tagtggtgtaagtagt

SEQ ID NO: 18110 - DNA, 16 bp, Artificial Sequence
  Synthetic construct
tagtggtgtaagtagt

SEQ ID NO: 18111 - DNA, 16 bp, Artificial Sequence
  Synthetic construct
tagttggaggcgtaca

SEQ ID NO: 18112 - DNA, 16 bp, Artificial Sequence
  Synthetic construct
tagttggaggcgtaca

SEQ ID NO: 18113 - DNA, 16 bp, Artificial Sequence
  Synthetic construct
tagttggagtccatac

SEQ ID NO: 18114 - DNA, 16 bp, Artificial Sequence
  Synthetic construct
tagttggagtccatac

SEQ ID NO: 18115 - DNA, 16 bp, Artificial Sequence
  Synthetic construct
tatcagggtctcacct

SEQ ID NO: 18116 - DNA, 16 bp, Artificial Sequence
  Synthetic construct
tatcagggtctcacct

SEQ ID NO: 18117 - DNA, 16 bp, Artificial Sequence
  Synthetic construct
tatctcaaggttacct

SEQ ID NO: 18118 - DNA, 16 bp, Artificial Sequence
  Synthetic construct
tatctcaaggttacct

SEQ ID NO: 18119 - DNA, 16 bp, Artificial Sequence
  Synthetic construct
tatctcaagtcttgca

SEQ ID NO: 18120 - DNA, 16 bp, Artificial Sequence
  Synthetic construct
tatctcaagtcttgca

SEQ ID NO: 18121 - DNA, 16 bp, Artificial Sequence
  Synthetic construct
tatctcacagctgcac

SEQ ID NO: 18122 - DNA, 16 bp, Artificial Sequence
  Synthetic construct
tatctcacagctgcac

SEQ ID NO: 18123 - DNA, 16 bp, Artificial Sequence
  Synthetic construct
tatctcagtctctcgt

SEQ ID NO: 18124 - DNA, 16 bp, Artificial Sequence
  Synthetic construct
tatctcagtctctcgt

SEQ ID NO: 18125 - DNA, 16 bp, Artificial Sequence
  Synthetic construct
tatgcccagcggcttc

SEQ ID NO: 18126 - DNA, 16 bp, Artificial Sequence
  Synthetic construct
tatgcccagcggcttc

SEQ ID NO: 18127 - DNA, 16 bp, Artificial Sequence
  Synthetic construct
tattaccagtgtccat

SEQ ID NO: 18128 - DNA, 16 bp, Artificial Sequence
  Synthetic construct
tattaccagtgtccat

SEQ ID NO: 18129 - DNA, 16 bp, Artificial Sequence
  Synthetic construct
tattaccagtgtcccg

SEQ ID NO: 18130 - DNA, 16 bp, Artificial Sequence
  Synthetic construct
tattaccagtgtcccg

SEQ ID NO: 18131 - DNA, 16 bp, Artificial Sequence
  Synthetic construct
tattacccacggtgtc

SEQ ID NO: 18132 - DNA, 16 bp, Artificial Sequence
  Synthetic construct
tattacccacggtgtc

SEQ ID NO: 18133 - DNA, 16 bp, Artificial Sequence
  Synthetic construct
tattaccgtacaagta

SEQ ID NO: 18134 - DNA, 16 bp, Artificial Sequence
  Synthetic construct
tattaccgtacaagta

SEQ ID NO: 18135 - DNA, 16 bp, Artificial Sequence
  Synthetic construct
tcaacgaagatgccag

SEQ ID NO: 18136 - DNA, 16 bp, Artificial Sequence
  Synthetic construct
tcaacgaagatgccag

SEQ ID NO: 18137 - DNA, 16 bp, Artificial Sequence
  Synthetic construct
tcaacgagtaccgtta

SEQ ID NO: 18138 - DNA, 16 bp, Artificial Sequence
  Synthetic construct
tcaacgagtaccgtta

SEQ ID NO: 18139 - DNA, 16 bp, Artificial Sequence
  Synthetic construct
tcaacgagtagcgtag

SEQ ID NO: 18140 - DNA, 16 bp, Artificial Sequence
  Synthetic construct
tcaacgagtagcgtag

SEQ ID NO: 18141 - DNA, 16 bp, Artificial Sequence
  Synthetic construct
tcaacgagtgcagtag

SEQ ID NO: 18142 - DNA, 16 bp, Artificial Sequence
  Synthetic construct
tcaacgagtgcagtag

SEQ ID NO: 18143 - DNA, 16 bp, Artificial Sequence
  Synthetic construct
tcaatctagcttatcg

SEQ ID NO: 18144 - DNA, 16 bp, Artificial Sequence
  Synthetic construct
tcaatctagcttatcg

SEQ ID NO: 18145 - DNA, 16 bp, Artificial Sequence
  Synthetic construct
tcacaaggtttgggcc

SEQ ID NO: 18146 - DNA, 16 bp, Artificial Sequence
  Synthetic construct
tcacaaggtttgggcc

SEQ ID NO: 18147 - DNA, 16 bp, Artificial Sequence
  Synthetic construct
tcacgaacatccgtgg

SEQ ID NO: 18148 - DNA, 16 bp, Artificial Sequence
  Synthetic construct
tcacgaacatccgtgg

SEQ ID NO: 18149 - DNA, 16 bp, Artificial Sequence
  Synthetic construct
tcacgaagtcacctaa

SEQ ID NO: 18150 - DNA, 16 bp, Artificial Sequence
  Synthetic construct
tcacgaagtcacctaa

SEQ ID NO: 18151 - DNA, 16 bp, Artificial Sequence
  Synthetic construct
tcacgaagtccgaatt

SEQ ID NO: 18152 - DNA, 16 bp, Artificial Sequence
  Synthetic construct
tcacgaagtccgaatt

SEQ ID NO: 18153 - DNA, 16 bp, Artificial Sequence
  Synthetic construct
tcacgaagtgaccaag

SEQ ID NO: 18154 - DNA, 16 bp, Artificial Sequence
  Synthetic construct
tcacgaagtgaccaag

SEQ ID NO: 18155 - DNA, 16 bp, Artificial Sequence
  Synthetic construct
tcacgaagttaagaac

SEQ ID NO: 18156 - DNA, 16 bp, Artificial Sequence
  Synthetic construct
tcacgaagttaagaac

SEQ ID NO: 18157 - DNA, 16 bp, Artificial Sequence
  Synthetic construct
tcacgaatcagaggtg

SEQ ID NO: 18158 - DNA, 16 bp, Artificial Sequence
  Synthetic construct
tcacgaatcagaggtg

SEQ ID NO: 18159 - DNA, 16 bp, Artificial Sequence
  Synthetic construct
tcacgaatccacgcag

SEQ ID NO: 18160 - DNA, 16 bp, Artificial Sequence
  Synthetic construct
tcacgaatccacgcag

SEQ ID NO: 18161 - DNA, 16 bp, Artificial Sequence
  Synthetic construct
tcagatgcacaccgac

SEQ ID NO: 18162 - DNA, 16 bp, Artificial Sequence
  Synthetic construct
tcagatgcacaccgac

SEQ ID NO: 18163 - DNA, 16 bp, Artificial Sequence
  Synthetic construct
tcagatgcagacaagc

SEQ ID NO: 18164 - DNA, 16 bp, Artificial Sequence
  Synthetic construct
tcagatgcagacaagc

SEQ ID NO: 18165 - DNA, 16 bp, Artificial Sequence
  Synthetic construct
tcagcaagtaatcgtc

SEQ ID NO: 18166 - DNA, 16 bp, Artificial Sequence
  Synthetic construct
tcagcaagtaatcgtc

SEQ ID NO: 18167 - DNA, 16 bp, Artificial Sequence
  Synthetic construct
tcagctcagatgcctt

SEQ ID NO: 18168 - DNA, 16 bp, Artificial Sequence
  Synthetic construct
tcagctcagatgcctt

SEQ ID NO: 18169 - DNA, 16 bp, Artificial Sequence
  Synthetic construct
tcagctccacgactcg

SEQ ID NO: 18170 - DNA, 16 bp, Artificial Sequence
  Synthetic construct
tcagctccacgactcg

SEQ ID NO: 18171 - DNA, 16 bp, Artificial Sequence
  Synthetic construct
tcagctctctcgagta

SEQ ID NO: 18172 - DNA, 16 bp, Artificial Sequence
  Synthetic construct
tcagctctctcgagta

SEQ ID NO: 18173 - DNA, 16 bp, Artificial Sequence
  Synthetic construct
tcaggatagatgcgac

SEQ ID NO: 18174 - DNA, 16 bp, Artificial Sequence
  Synthetic construct
tcaggatagatgcgac

SEQ ID NO: 18175 - DNA, 16 bp, Artificial Sequence
  Synthetic construct
tcaggatagcccgaaa

SEQ ID NO: 18176 - DNA, 16 bp, Artificial Sequence
  Synthetic construct
tcaggatagcccgaaa

SEQ ID NO: 18177 - DNA, 16 bp, Artificial Sequence
  Synthetic construct
tcaggatgtgatgccc

SEQ ID NO: 18178 - DNA, 16 bp, Artificial Sequence
  Synthetic construct
tcaggatgtgatgccc

SEQ ID NO: 18179 - DNA, 16 bp, Artificial Sequence
  Synthetic construct
tcaggattctgctgct

SEQ ID NO: 18180 - DNA, 16 bp, Artificial Sequence
  Synthetic construct
tcaggattctgctgct

SEQ ID NO: 18181 - DNA, 16 bp, Artificial Sequence
  Synthetic construct
tcaggtaagaaggttt

SEQ ID NO: 18182 - DNA, 16 bp, Artificial Sequence
  Synthetic construct
tcaggtaagaaggttt

SEQ ID NO: 18183 - DNA, 16 bp, Artificial Sequence
  Synthetic construct
tcaggtaagtacgcga

SEQ ID NO: 18184 - DNA, 16 bp, Artificial Sequence
  Synthetic construct
tcaggtaagtacgcga

SEQ ID NO: 18185 - DNA, 16 bp, Artificial Sequence
  Synthetic construct
tcaggtacatatacgc

SEQ ID NO: 18186 - DNA, 16 bp, Artificial Sequence
  Synthetic construct
tcaggtacatatacgc

SEQ ID NO: 18187 - DNA, 16 bp, Artificial Sequence
  Synthetic construct
tcattacagcttatcg

SEQ ID NO: 18188 - DNA, 16 bp, Artificial Sequence
  Synthetic construct
tcattacagcttatcg

SEQ ID NO: 18189 - DNA, 16 bp, Artificial Sequence
  Synthetic construct
tcattacagttccaca

SEQ ID NO: 18190 - DNA, 16 bp, Artificial Sequence
  Synthetic construct
tcattacagttccaca

SEQ ID NO: 18191 - DNA, 16 bp, Artificial Sequence
  Synthetic construct
tcattaccagtatgct

SEQ ID NO: 18192 - DNA, 16 bp, Artificial Sequence
  Synthetic construct
tcattaccagtatgct

SEQ ID NO: 18193 - DNA, 16 bp, Artificial Sequence
  Synthetic construct
tcattaccagtcttcc

SEQ ID NO: 18194 - DNA, 16 bp, Artificial Sequence
  Synthetic construct
tcattaccagtcttcc

SEQ ID NO: 18195 - DNA, 16 bp, Artificial Sequence
  Synthetic construct
tcattaccataccatg

SEQ ID NO: 18196 - DNA, 16 bp, Artificial Sequence
  Synthetic construct
tcattaccataccatg

SEQ ID NO: 18197 - DNA, 16 bp, Artificial Sequence
  Synthetic construct
tcattacgtttaggaa

SEQ ID NO: 18198 - DNA, 16 bp, Artificial Sequence
  Synthetic construct
tcattacgtttaggaa

SEQ ID NO: 18199 - DNA, 16 bp, Artificial Sequence
  Synthetic construct
tcatttgagcacaggt

SEQ ID NO: 18200 - DNA, 16 bp, Artificial Sequence
  Synthetic construct
tcatttgagcacaggt

SEQ ID NO: 18201 - DNA, 16 bp, Artificial Sequence
  Synthetic construct
tcatttgagtgtctca

SEQ ID NO: 18202 - DNA, 16 bp, Artificial Sequence
  Synthetic construct
tcatttgagtgtctca

SEQ ID NO: 18203 - DNA, 16 bp, Artificial Sequence
  Synthetic construct
tcatttggtctcacct

SEQ ID NO: 18204 - DNA, 16 bp, Artificial Sequence
  Synthetic construct
tcatttggtctcacct

SEQ ID NO: 18205 - DNA, 16 bp, Artificial Sequence
  Synthetic construct
tcatttgtcgacagcc

SEQ ID NO: 18206 - DNA, 16 bp, Artificial Sequence
  Synthetic construct
tcatttgtcgacagcc

SEQ ID NO: 18207 - DNA, 16 bp, Artificial Sequence
  Synthetic construct
tccacacgtcagctat

SEQ ID NO: 18208 - DNA, 16 bp, Artificial Sequence
  Synthetic construct
tccacacgtcagctat

SEQ ID NO: 18209 - DNA, 16 bp, Artificial Sequence
  Synthetic construct
tcccgattcctgccat

SEQ ID NO: 18210 - DNA, 16 bp, Artificial Sequence
  Synthetic construct
tcccgattcctgccat

SEQ ID NO: 18211 - DNA, 16 bp, Artificial Sequence
  Synthetic construct
tcccgattctttacac

SEQ ID NO: 18212 - DNA, 16 bp, Artificial Sequence
  Synthetic construct
tcccgattctttacac

SEQ ID NO: 18213 - DNA, 16 bp, Artificial Sequence
  Synthetic construct
tcgcgtttcgtaggtt

SEQ ID NO: 18214 - DNA, 16 bp, Artificial Sequence
  Synthetic construct
tcgcgtttcgtaggtt

SEQ ID NO: 18215 - DNA, 16 bp, Artificial Sequence
  Synthetic construct
tcgggaccatcatccc

SEQ ID NO: 18216 - DNA, 16 bp, Artificial Sequence
  Synthetic construct
tcgggaccatcatccc

SEQ ID NO: 18217 - DNA, 16 bp, Artificial Sequence
  Synthetic construct
tcgggactctcacatt

SEQ ID NO: 18218 - DNA, 16 bp, Artificial Sequence
  Synthetic construct
tcgggactctcacatt

SEQ ID NO: 18219 - DNA, 16 bp, Artificial Sequence
  Synthetic construct
tcgtacccaagttaag

SEQ ID NO: 18220 - DNA, 16 bp, Artificial Sequence
  Synthetic construct
tcgtacccaagttaag

SEQ ID NO: 18221 - DNA, 16 bp, Artificial Sequence
  Synthetic construct
tctattgagaaggaca

SEQ ID NO: 18222 - DNA, 16 bp, Artificial Sequence
  Synthetic construct
tctattgagaaggaca

SEQ ID NO: 18223 - DNA, 16 bp, Artificial Sequence
  Synthetic construct
tctattgaggctaggt

SEQ ID NO: 18224 - DNA, 16 bp, Artificial Sequence
  Synthetic construct
tctattgaggctaggt

SEQ ID NO: 18225 - DNA, 16 bp, Artificial Sequence
  Synthetic construct
tctattgcatagactc

SEQ ID NO: 18226 - DNA, 16 bp, Artificial Sequence
  Synthetic construct
tctattgcatagactc

SEQ ID NO: 18227 - DNA, 16 bp, Artificial Sequence
  Synthetic construct
tctattgtcttccttc

SEQ ID NO: 18228 - DNA, 16 bp, Artificial Sequence
  Synthetic construct
tctattgtcttccttc

SEQ ID NO: 18229 - DNA, 16 bp, Artificial Sequence
  Synthetic construct
tctcatagtcgaacag

SEQ ID NO: 18230 - DNA, 16 bp, Artificial Sequence
  Synthetic construct
tctcatagtcgaacag

SEQ ID NO: 18231 - DNA, 16 bp, Artificial Sequence
  Synthetic construct
tctcatatctcgcatc

SEQ ID NO: 18232 - DNA, 16 bp, Artificial Sequence
  Synthetic construct
tctcatatctcgcatc

SEQ ID NO: 18233 - DNA, 16 bp, Artificial Sequence
  Synthetic construct
tctgagaagataggag

SEQ ID NO: 18234 - DNA, 16 bp, Artificial Sequence
  Synthetic construct
tctgagaagataggag

SEQ ID NO: 18235 - DNA, 16 bp, Artificial Sequence
  Synthetic construct
tctgagaaggtactct

SEQ ID NO: 18236 - DNA, 16 bp, Artificial Sequence
  Synthetic construct
tctgagaaggtactct

SEQ ID NO: 18237 - DNA, 16 bp, Artificial Sequence
  Synthetic construct
tctgagacagctgctg

SEQ ID NO: 18238 - DNA, 16 bp, Artificial Sequence
  Synthetic construct
tctgagacagctgctg

SEQ ID NO: 18239 - DNA, 16 bp, Artificial Sequence
  Synthetic construct
tctgagacatcggacc

SEQ ID NO: 18240 - DNA, 16 bp, Artificial Sequence
  Synthetic construct
tctgagacatcggacc

SEQ ID NO: 18241 - DNA, 16 bp, Artificial Sequence
  Synthetic construct
tctggaaaggagcgtt

SEQ ID NO: 18242 - DNA, 16 bp, Artificial Sequence
  Synthetic construct
tctggaaaggagcgtt

SEQ ID NO: 18243 - DNA, 16 bp, Artificial Sequence
  Synthetic construct
tctggaacaagccgtc

SEQ ID NO: 18244 - DNA, 16 bp, Artificial Sequence
  Synthetic construct
tctggaacaagccgtc

SEQ ID NO: 18245 - DNA, 16 bp, Artificial Sequence
  Synthetic construct
tctggaagttagaaca

SEQ ID NO: 18246 - DNA, 16 bp, Artificial Sequence
  Synthetic construct
tctggaagttagaaca

SEQ ID NO: 18247 - DNA, 16 bp, Artificial Sequence
  Synthetic construct
tcttcggcaaagcggt

SEQ ID NO: 18248 - DNA, 16 bp, Artificial Sequence
  Synthetic construct
tcttcggcaaagcggt

SEQ ID NO: 18249 - DNA, 16 bp, Artificial Sequence
  Synthetic construct
tctttccaggacgaaa

SEQ ID NO: 18250 - DNA, 16 bp, Artificial Sequence
  Synthetic construct
tctttccaggacgaaa

SEQ ID NO: 18251 - DNA, 16 bp, Artificial Sequence
  Synthetic construct
tctttcccatgggaac

SEQ ID NO: 18252 - DNA, 16 bp, Artificial Sequence
  Synthetic construct
tctttcccatgggaac

SEQ ID NO: 18253 - DNA, 16 bp, Artificial Sequence
  Synthetic construct
tctttcccattaggct

SEQ ID NO: 18254 - DNA, 16 bp, Artificial Sequence
  Synthetic construct
tctttcccattaggct

SEQ ID NO: 18255 - DNA, 16 bp, Artificial Sequence
  Synthetic construct
tctttcctcatgtagc

SEQ ID NO: 18256 - DNA, 16 bp, Artificial Sequence
  Synthetic construct
tctttcctcatgtagc

SEQ ID NO: 18257 - DNA, 16 bp, Artificial Sequence
  Synthetic construct
tctttcctcttgtttg

SEQ ID NO: 18258 - DNA, 16 bp, Artificial Sequence
  Synthetic construct
tctttcctcttgtttg

SEQ ID NO: 18259 - DNA, 16 bp, Artificial Sequence
  Synthetic construct
tctttcctctttaggg

SEQ ID NO: 18260 - DNA, 16 bp, Artificial Sequence
  Synthetic construct
tctttcctctttaggg

SEQ ID NO: 18261 - DNA, 16 bp, Artificial Sequence
  Synthetic construct
tgaaagacagagccaa

SEQ ID NO: 18262 - DNA, 16 bp, Artificial Sequence
  Synthetic construct
tgaaagacagagccaa

SEQ ID NO: 18263 - DNA, 16 bp, Artificial Sequence
  Synthetic construct
tgacaacgtgcagtag

SEQ ID NO: 18264 - DNA, 16 bp, Artificial Sequence
  Synthetic construct
tgacaacgtgcagtag

SEQ ID NO: 18265 - DNA, 16 bp, Artificial Sequence
  Synthetic construct
tgacaactcgtaggag

SEQ ID NO: 18266 - DNA, 16 bp, Artificial Sequence
  Synthetic construct
tgacaactcgtaggag

SEQ ID NO: 18267 - DNA, 16 bp, Artificial Sequence
  Synthetic construct
tgacggccaactgcgc

SEQ ID NO: 18268 - DNA, 16 bp, Artificial Sequence
  Synthetic construct
tgacggccaactgcgc

SEQ ID NO: 18269 - DNA, 16 bp, Artificial Sequence
  Synthetic construct
tgactagagaaggcct

SEQ ID NO: 18270 - DNA, 16 bp, Artificial Sequence
  Synthetic construct
tgactagagaaggcct

SEQ ID NO: 18271 - DNA, 16 bp, Artificial Sequence
  Synthetic construct
tgactttcactgtgta

SEQ ID NO: 18272 - DNA, 16 bp, Artificial Sequence
  Synthetic construct
tgactttcactgtgta

SEQ ID NO: 18273 - DNA, 16 bp, Artificial Sequence
  Synthetic construct
tgactttgtgtttggt

SEQ ID NO: 18274 - DNA, 16 bp, Artificial Sequence
  Synthetic construct
tgactttgtgtttggt

SEQ ID NO: 18275 - DNA, 16 bp, Artificial Sequence
  Synthetic construct
tgactttgttctcatt

SEQ ID NO: 18276 - DNA, 16 bp, Artificial Sequence
  Synthetic construct
tgactttgttctcatt

SEQ ID NO: 18277 - DNA, 16 bp, Artificial Sequence
  Synthetic construct
tgacttttctcaagtg

SEQ ID NO: 18278 - DNA, 16 bp, Artificial Sequence
  Synthetic construct
tgacttttctcaagtg

SEQ ID NO: 18279 - DNA, 16 bp, Artificial Sequence
  Synthetic construct
tgagagggtgcagtag

SEQ ID NO: 18280 - DNA, 16 bp, Artificial Sequence
  Synthetic construct
tgagagggtgcagtag

SEQ ID NO: 18281 - DNA, 16 bp, Artificial Sequence
  Synthetic construct
tgagaggtccaaagtc

SEQ ID NO: 18282 - DNA, 16 bp, Artificial Sequence
  Synthetic construct
tgagaggtccaaagtc

SEQ ID NO: 18283 - DNA, 16 bp, Artificial Sequence
  Synthetic construct
tgagcatcaaagcaat

SEQ ID NO: 18284 - DNA, 16 bp, Artificial Sequence
  Synthetic construct
tgagcatcaaagcaat

SEQ ID NO: 18285 - DNA, 16 bp, Artificial Sequence
  Synthetic construct
tgagcatcaggaacgt

SEQ ID NO: 18286 - DNA, 16 bp, Artificial Sequence
  Synthetic construct
tgagcatcaggaacgt

SEQ ID NO: 18287 - DNA, 16 bp, Artificial Sequence
  Synthetic construct
tgagggacaaacctac

SEQ ID NO: 18288 - DNA, 16 bp, Artificial Sequence
  Synthetic construct
tgagggacaaacctac

SEQ ID NO: 18289 - DNA, 16 bp, Artificial Sequence
  Synthetic construct
tgagggagttcggcac

SEQ ID NO: 18290 - DNA, 16 bp, Artificial Sequence
  Synthetic construct
tgagggagttcggcac

SEQ ID NO: 18291 - DNA, 16 bp, Artificial Sequence
  Synthetic construct
tgagggagttggaccc

SEQ ID NO: 18292 - DNA, 16 bp, Artificial Sequence
  Synthetic construct
tgagggagttggaccc

SEQ ID NO: 18293 - DNA, 16 bp, Artificial Sequence
  Synthetic construct
tgagggatcgtccagg

SEQ ID NO: 18294 - DNA, 16 bp, Artificial Sequence
  Synthetic construct
tgagggatcgtccagg

SEQ ID NO: 18295 - DNA, 16 bp, Artificial Sequence
  Synthetic construct
tgatttcaggtgatta

SEQ ID NO: 18296 - DNA, 16 bp, Artificial Sequence
  Synthetic construct
tgatttcaggtgatta

SEQ ID NO: 18297 - DNA, 16 bp, Artificial Sequence
  Synthetic construct
tgatttcgtatatgag

SEQ ID NO: 18298 - DNA, 16 bp, Artificial Sequence
  Synthetic construct
tgatttcgtatatgag

SEQ ID NO: 18299 - DNA, 16 bp, Artificial Sequence
  Synthetic construct
tgcacctcaccgaaag

SEQ ID NO: 18300 - DNA, 16 bp, Artificial Sequence
  Synthetic construct
tgcacctcaccgaaag

SEQ ID NO: 18301 - DNA, 16 bp, Artificial Sequence
  Synthetic construct
tgcacctgttatgtgc

SEQ ID NO: 18302 - DNA, 16 bp, Artificial Sequence
  Synthetic construct
tgcacctgttatgtgc

SEQ ID NO: 18303 - DNA, 16 bp, Artificial Sequence
  Synthetic construct
tgcacctgttcagtac

SEQ ID NO: 18304 - DNA, 16 bp, Artificial Sequence
  Synthetic construct
tgcacctgttcagtac

SEQ ID NO: 18305 - DNA, 16 bp, Artificial Sequence
  Synthetic construct
tgccaaaaggattcgg

SEQ ID NO: 18306 - DNA, 16 bp, Artificial Sequence
  Synthetic construct
tgccaaaaggattcgg

SEQ ID NO: 18307 - DNA, 16 bp, Artificial Sequence
  Synthetic construct
tgccaaatcgccagca

SEQ ID NO: 18308 - DNA, 16 bp, Artificial Sequence
  Synthetic construct
tgccaaatcgccagca

SEQ ID NO: 18309 - DNA, 16 bp, Artificial Sequence
  Synthetic construct
tgcccatcagcatact

SEQ ID NO: 18310 - DNA, 16 bp, Artificial Sequence
  Synthetic construct
tgcccatcagcatact

SEQ ID NO: 18311 - DNA, 16 bp, Artificial Sequence
  Synthetic construct
tgcccattctgtctat

SEQ ID NO: 18312 - DNA, 16 bp, Artificial Sequence
  Synthetic construct
tgcccattctgtctat

SEQ ID NO: 18313 - DNA, 16 bp, Artificial Sequence
  Synthetic construct
tgccctatcggcttgg

SEQ ID NO: 18314 - DNA, 16 bp, Artificial Sequence
  Synthetic construct
tgccctatcggcttgg

SEQ ID NO: 18315 - DNA, 16 bp, Artificial Sequence
  Synthetic construct
tgcgcaggtcgttgta

SEQ ID NO: 18316 - DNA, 16 bp, Artificial Sequence
  Synthetic construct
tgcgcaggtcgttgta

SEQ ID NO: 18317 - DNA, 16 bp, Artificial Sequence
  Synthetic construct
tgcgggttcctgtaga

SEQ ID NO: 18318 - DNA, 16 bp, Artificial Sequence
  Synthetic construct
tgcgggttcctgtaga

SEQ ID NO: 18319 - DNA, 16 bp, Artificial Sequence
  Synthetic construct
tgctaccagagcaatt

SEQ ID NO: 18320 - DNA, 16 bp, Artificial Sequence
  Synthetic construct
tgctaccagagcaatt

SEQ ID NO: 18321 - DNA, 16 bp, Artificial Sequence
  Synthetic construct
tgctaccagctaaaca

SEQ ID NO: 18322 - DNA, 16 bp, Artificial Sequence
  Synthetic construct
tgctaccagctaaaca

SEQ ID NO: 18323 - DNA, 16 bp, Artificial Sequence
  Synthetic construct
tgctacccagcgtaag

SEQ ID NO: 18324 - DNA, 16 bp, Artificial Sequence
  Synthetic construct
tgctacccagcgtaag

SEQ ID NO: 18325 - DNA, 16 bp, Artificial Sequence
  Synthetic construct
tgctacctcagcgatt

SEQ ID NO: 18326 - DNA, 16 bp, Artificial Sequence
  Synthetic construct
tgctacctcagcgatt

SEQ ID NO: 18327 - DNA, 16 bp, Artificial Sequence
  Synthetic construct
tgctgctagaattccc

SEQ ID NO: 18328 - DNA, 16 bp, Artificial Sequence
  Synthetic construct
tgctgctagaattccc

SEQ ID NO: 18329 - DNA, 16 bp, Artificial Sequence
  Synthetic construct
tgctgctagtccggtc

SEQ ID NO: 18330 - DNA, 16 bp, Artificial Sequence
  Synthetic construct
tgctgctagtccggtc

SEQ ID NO: 18331 - DNA, 16 bp, Artificial Sequence
  Synthetic construct
tgctgctcattgggcc

SEQ ID NO: 18332 - DNA, 16 bp, Artificial Sequence
  Synthetic construct
tgctgctcattgggcc

SEQ ID NO: 18333 - DNA, 16 bp, Artificial Sequence
  Synthetic construct
tgctgcttctttacac

SEQ ID NO: 18334 - DNA, 16 bp, Artificial Sequence
  Synthetic construct
tgctgcttctttacac

SEQ ID NO: 18335 - DNA, 16 bp, Artificial Sequence
  Synthetic construct
tggacgcgtacagacg

SEQ ID NO: 18336 - DNA, 16 bp, Artificial Sequence
  Synthetic construct
tggacgcgtacagacg

SEQ ID NO: 18337 - DNA, 16 bp, Artificial Sequence
  Synthetic construct
tggacgcgtggcccta

SEQ ID NO: 18338 - DNA, 16 bp, Artificial Sequence
  Synthetic construct
tggacgcgtggcccta

SEQ ID NO: 18339 - DNA, 16 bp, Artificial Sequence
  Synthetic construct
tggccagagactgtaa

SEQ ID NO: 18340 - DNA, 16 bp, Artificial Sequence
  Synthetic construct
tggccagagactgtaa

SEQ ID NO: 18341 - DNA, 16 bp, Artificial Sequence
  Synthetic construct
tggccaggtgaggcta

SEQ ID NO: 18342 - DNA, 16 bp, Artificial Sequence
  Synthetic construct
tggccaggtgaggcta

SEQ ID NO: 18343 - DNA, 16 bp, Artificial Sequence
  Synthetic construct
tggcgcaagtgaacat

SEQ ID NO: 18344 - DNA, 16 bp, Artificial Sequence
  Synthetic construct
tggcgcaagtgaacat

SEQ ID NO: 18345 - DNA, 16 bp, Artificial Sequence
  Synthetic construct
tggcgcacaaaggcgt

SEQ ID NO: 18346 - DNA, 16 bp, Artificial Sequence
  Synthetic construct
tggcgcacaaaggcgt

SEQ ID NO: 18347 - DNA, 16 bp, Artificial Sequence
  Synthetic construct
tggcgcatcaccctca

SEQ ID NO: 18348 - DNA, 16 bp, Artificial Sequence
  Synthetic construct
tggcgcatcaccctca

SEQ ID NO: 18349 - DNA, 16 bp, Artificial Sequence
  Synthetic construct
tggctggcagtggagt

SEQ ID NO: 18350 - DNA, 16 bp, Artificial Sequence
  Synthetic construct
tggctggcagtggagt

SEQ ID NO: 18351 - DNA, 16 bp, Artificial Sequence
  Synthetic construct
tggctgggtagcctcg

SEQ ID NO: 18352 - DNA, 16 bp, Artificial Sequence
  Synthetic construct
tggctgggtagcctcg

SEQ ID NO: 18353 - DNA, 16 bp, Artificial Sequence
  Synthetic construct
tggctgggtatctgca

SEQ ID NO: 18354 - DNA, 16 bp, Artificial Sequence
  Synthetic construct
tggctgggtatctgca

SEQ ID NO: 18355 - DNA, 16 bp, Artificial Sequence
  Synthetic construct
tgggaagaggctctta

SEQ ID NO: 18356 - DNA, 16 bp, Artificial Sequence
  Synthetic construct
tgggaagaggctctta

SEQ ID NO: 18357 - DNA, 16 bp, Artificial Sequence
  Synthetic construct
tggttagagccacgct

SEQ ID NO: 18358 - DNA, 16 bp, Artificial Sequence
  Synthetic construct
tggttagagccacgct

SEQ ID NO: 18359 - DNA, 16 bp, Artificial Sequence
  Synthetic construct
tggttccagttagcgg

SEQ ID NO: 18360 - DNA, 16 bp, Artificial Sequence
  Synthetic construct
tggttccagttagcgg

SEQ ID NO: 18361 - DNA, 16 bp, Artificial Sequence
  Synthetic construct
tggttcctccatgctc

SEQ ID NO: 18362 - DNA, 16 bp, Artificial Sequence
  Synthetic construct
tggttcctccatgctc

SEQ ID NO: 18363 - DNA, 16 bp, Artificial Sequence
  Synthetic construct
tgtattcagtacgccc

SEQ ID NO: 18364 - DNA, 16 bp, Artificial Sequence
  Synthetic construct
tgtattcagtacgccc

SEQ ID NO: 18365 - DNA, 16 bp, Artificial Sequence
  Synthetic construct
tgtcccagtgaaagag

SEQ ID NO: 18366 - DNA, 16 bp, Artificial Sequence
  Synthetic construct
tgtcccagtgaaagag

SEQ ID NO: 18367 - DNA, 16 bp, Artificial Sequence
  Synthetic construct
tgtcccatctcaactt

SEQ ID NO: 18368 - DNA, 16 bp, Artificial Sequence
  Synthetic construct
tgtcccatctcaactt

SEQ ID NO: 18369 - DNA, 16 bp, Artificial Sequence
  Synthetic construct
tgtggtaagacactaa

SEQ ID NO: 18370 - DNA, 16 bp, Artificial Sequence
  Synthetic construct
tgtggtaagacactaa

SEQ ID NO: 18371 - DNA, 16 bp, Artificial Sequence
  Synthetic construct
tgtggtaagatcccgc

SEQ ID NO: 18372 - DNA, 16 bp, Artificial Sequence
  Synthetic construct
tgtggtaagatcccgc

SEQ ID NO: 18373 - DNA, 16 bp, Artificial Sequence
  Synthetic construct
tgtggtacattacctt

SEQ ID NO: 18374 - DNA, 16 bp, Artificial Sequence
  Synthetic construct
tgtggtacattacctt

SEQ ID NO: 18375 - DNA, 16 bp, Artificial Sequence
  Synthetic construct
tgtgtttagccgccta

SEQ ID NO: 18376 - DNA, 16 bp, Artificial Sequence
  Synthetic construct
tgtgtttagccgccta

SEQ ID NO: 18377 - DNA, 16 bp, Artificial Sequence
  Synthetic construct
tgtgtttagtgtacct

SEQ ID NO: 18378 - DNA, 16 bp, Artificial Sequence
  Synthetic construct
tgtgtttagtgtacct

SEQ ID NO: 18379 - DNA, 16 bp, Artificial Sequence
  Synthetic construct
tgttccgagttcgcat

SEQ ID NO: 18380 - DNA, 16 bp, Artificial Sequence
  Synthetic construct
tgttccgagttcgcat

SEQ ID NO: 18381 - DNA, 16 bp, Artificial Sequence
  Synthetic construct
tgttccgcaccggaaa

SEQ ID NO: 18382 - DNA, 16 bp, Artificial Sequence
  Synthetic construct
tgttccgcaccggaaa

SEQ ID NO: 18383 - DNA, 16 bp, Artificial Sequence
  Synthetic construct
tgttccggtgcaactt

SEQ ID NO: 18384 - DNA, 16 bp, Artificial Sequence
  Synthetic construct
tgttccggtgcaactt

SEQ ID NO: 18385 - DNA, 16 bp, Artificial Sequence
  Synthetic construct
tgttccgtcatggtca

SEQ ID NO: 18386 - DNA, 16 bp, Artificial Sequence
  Synthetic construct
tgttccgtcatggtca

SEQ ID NO: 18387 - DNA, 16 bp, Artificial Sequence
  Synthetic construct
ttaggacgtgtctgat

SEQ ID NO: 18388 - DNA, 16 bp, Artificial Sequence
  Synthetic construct
ttaggacgtgtctgat

SEQ ID NO: 18389 - DNA, 16 bp, Artificial Sequence
  Synthetic construct
ttaggcaagcaggcta

SEQ ID NO: 18390 - DNA, 16 bp, Artificial Sequence
  Synthetic construct
ttaggcaagcaggcta

SEQ ID NO: 18391 - DNA, 16 bp, Artificial Sequence
  Synthetic construct
ttaggcacagtggagt

SEQ ID NO: 18392 - DNA, 16 bp, Artificial Sequence
  Synthetic construct
ttaggcacagtggagt

SEQ ID NO: 18393 - DNA, 16 bp, Artificial Sequence
  Synthetic construct
ttaggcagttacgtca

SEQ ID NO: 18394 - DNA, 16 bp, Artificial Sequence
  Synthetic construct
ttaggcagttacgtca

SEQ ID NO: 18395 - DNA, 16 bp, Artificial Sequence
  Synthetic construct
ttagttcagtggagaa

SEQ ID NO: 18396 - DNA, 16 bp, Artificial Sequence
  Synthetic construct
ttagttcagtggagaa

SEQ ID NO: 18397 - DNA, 16 bp, Artificial Sequence
  Synthetic construct
ttagttcgtctaaacc

SEQ ID NO: 18398 - DNA, 16 bp, Artificial Sequence
  Synthetic construct
ttagttcgtctaaacc

SEQ ID NO: 18399 - DNA, 16 bp, Artificial Sequence
  Synthetic construct
ttagttctcgtccgtt

SEQ ID NO: 18400 - DNA, 16 bp, Artificial Sequence
  Synthetic construct
ttagttctcgtccgtt

SEQ ID NO: 18401 - DNA, 16 bp, Artificial Sequence
  Synthetic construct
ttatgctaggtgtggt

SEQ ID NO: 18402 - DNA, 16 bp, Artificial Sequence
  Synthetic construct
ttatgctaggtgtggt

SEQ ID NO: 18403 - DNA, 16 bp, Artificial Sequence
  Synthetic construct
ttatgcttctccggtt

SEQ ID NO: 18404 - DNA, 16 bp, Artificial Sequence
  Synthetic construct
ttatgcttctccggtt

SEQ ID NO: 18405 - DNA, 16 bp, Artificial Sequence
  Synthetic construct
ttcccagagcatcatc

SEQ ID NO: 18406 - DNA, 16 bp, Artificial Sequence
  Synthetic construct
ttcccagagcatcatc

SEQ ID NO: 18407 - DNA, 16 bp, Artificial Sequence
  Synthetic construct
ttcgaagagctaactc

SEQ ID NO: 18408 - DNA, 16 bp, Artificial Sequence
  Synthetic construct
ttcgaagagctaactc

SEQ ID NO: 18409 - DNA, 16 bp, Artificial Sequence
  Synthetic construct
ttcgaagagtggtccc

SEQ ID NO: 18410 - DNA, 16 bp, Artificial Sequence
  Synthetic construct
ttcgaagagtggtccc

SEQ ID NO: 18411 - DNA, 16 bp, Artificial Sequence
  Synthetic construct
ttcggtccacgaaata

SEQ ID NO: 18412 - DNA, 16 bp, Artificial Sequence
  Synthetic construct
ttcggtccacgaaata

SEQ ID NO: 18413 - DNA, 16 bp, Artificial Sequence
  Synthetic construct
ttcggtccatcgatgt

SEQ ID NO: 18414 - DNA, 16 bp, Artificial Sequence
  Synthetic construct
ttcggtccatcgatgt

SEQ ID NO: 18415 - DNA, 16 bp, Artificial Sequence
  Synthetic construct
ttctacaagatatgca

SEQ ID NO: 18416 - DNA, 16 bp, Artificial Sequence
  Synthetic construct
ttctacaagatatgca

SEQ ID NO: 18417 - DNA, 16 bp, Artificial Sequence
  Synthetic construct
ttctcaaagcgtgagt

SEQ ID NO: 18418 - DNA, 16 bp, Artificial Sequence
  Synthetic construct
ttctcaaagcgtgagt

SEQ ID NO: 18419 - DNA, 16 bp, Artificial Sequence
  Synthetic construct
ttctcaaagcttatcg

SEQ ID NO: 18420 - DNA, 16 bp, Artificial Sequence
  Synthetic construct
ttctcaaagcttatcg

SEQ ID NO: 18421 - DNA, 16 bp, Artificial Sequence
  Synthetic construct
ttctcaaagtgactct

SEQ ID NO: 18422 - DNA, 16 bp, Artificial Sequence
  Synthetic construct
ttctcaaagtgactct

SEQ ID NO: 18423 - DNA, 16 bp, Artificial Sequence
  Synthetic construct
ttctcaatcagctggc

SEQ ID NO: 18424 - DNA, 16 bp, Artificial Sequence
  Synthetic construct
ttctcaatcagctggc

SEQ ID NO: 18425 - DNA, 16 bp, Artificial Sequence
  Synthetic construct
ttctcctcagccagaa

SEQ ID NO: 18426 - DNA, 16 bp, Artificial Sequence
  Synthetic construct
ttctcctcagccagaa

SEQ ID NO: 18427 - DNA, 16 bp, Artificial Sequence
  Synthetic construct
ttctcctgttgtcgcg

SEQ ID NO: 18428 - DNA, 16 bp, Artificial Sequence
  Synthetic construct
ttctcctgttgtcgcg

SEQ ID NO: 18429 - DNA, 16 bp, Artificial Sequence
  Synthetic construct
ttcttagagctaggca

SEQ ID NO: 18430 - DNA, 16 bp, Artificial Sequence
  Synthetic construct
ttcttagagctaggca

SEQ ID NO: 18431 - DNA, 16 bp, Artificial Sequence
  Synthetic construct
ttcttagagctccttc

SEQ ID NO: 18432 - DNA, 16 bp, Artificial Sequence
  Synthetic construct
ttcttagagctccttc

SEQ ID NO: 18433 - DNA, 16 bp, Artificial Sequence
  Synthetic construct
ttcttagcaggaccct

SEQ ID NO: 18434 - DNA, 16 bp, Artificial Sequence
  Synthetic construct
ttcttagcaggaccct

SEQ ID NO: 18435 - DNA, 16 bp, Artificial Sequence
  Synthetic construct
ttcttagtcgtaggtt

SEQ ID NO: 18436 - DNA, 16 bp, Artificial Sequence
  Synthetic construct
ttcttagtcgtaggtt

SEQ ID NO: 18437 - DNA, 16 bp, Artificial Sequence
  Synthetic construct
ttgaacgagagcctag

SEQ ID NO: 18438 - DNA, 16 bp, Artificial Sequence
  Synthetic construct
ttgaacgagagcctag

SEQ ID NO: 18439 - DNA, 16 bp, Artificial Sequence
  Synthetic construct
ttgaacggtgagtata

SEQ ID NO: 18440 - DNA, 16 bp, Artificial Sequence
  Synthetic construct
ttgaacggtgagtata

SEQ ID NO: 18441 - DNA, 16 bp, Artificial Sequence
  Synthetic construct
ttgacttagcccgaaa

SEQ ID NO: 18442 - DNA, 16 bp, Artificial Sequence
  Synthetic construct
ttgacttagcccgaaa

SEQ ID NO: 18443 - DNA, 16 bp, Artificial Sequence
  Synthetic construct
ttgacttcaatcgaaa

SEQ ID NO: 18444 - DNA, 16 bp, Artificial Sequence
  Synthetic construct
ttgacttcaatcgaaa

SEQ ID NO: 18445 - DNA, 16 bp, Artificial Sequence
  Synthetic construct
ttgactttcaaccatg

SEQ ID NO: 18446 - DNA, 16 bp, Artificial Sequence
  Synthetic construct
ttgactttcaaccatg

SEQ ID NO: 18447 - DNA, 16 bp, Artificial Sequence
  Synthetic construct
ttgactttcttgtatc

SEQ ID NO: 18448 - DNA, 16 bp, Artificial Sequence
  Synthetic construct
ttgactttcttgtatc

SEQ ID NO: 18449 - DNA, 16 bp, Artificial Sequence
  Synthetic construct
ttgccgtagtttcctt

SEQ ID NO: 18450 - DNA, 16 bp, Artificial Sequence
  Synthetic construct
ttgccgtagtttcctt

SEQ ID NO: 18451 - DNA, 16 bp, Artificial Sequence
  Synthetic construct
ttgcgtcgttctggta

SEQ ID NO: 18452 - DNA, 16 bp, Artificial Sequence
  Synthetic construct
ttgcgtcgttctggta

SEQ ID NO: 18453 - DNA, 16 bp, Artificial Sequence
  Synthetic construct
ttgcgtctcgtgacat

SEQ ID NO: 18454 - DNA, 16 bp, Artificial Sequence
  Synthetic construct
ttgcgtctcgtgacat

SEQ ID NO: 18455 - DNA, 16 bp, Artificial Sequence
  Synthetic construct
ttgcgtctctggcgac

SEQ ID NO: 18456 - DNA, 16 bp, Artificial Sequence
  Synthetic construct
ttgcgtctctggcgac

SEQ ID NO: 18457 - DNA, 16 bp, Artificial Sequence
  Synthetic construct
ttggaacagaaggtga

SEQ ID NO: 18458 - DNA, 16 bp, Artificial Sequence
  Synthetic construct
ttggaacagaaggtga

SEQ ID NO: 18459 - DNA, 16 bp, Artificial Sequence
  Synthetic construct
ttggaaccacgaggta

SEQ ID NO: 18460 - DNA, 16 bp, Artificial Sequence
  Synthetic construct
ttggaaccacgaggta

SEQ ID NO: 18461 - DNA, 16 bp, Artificial Sequence
  Synthetic construct
ttggcaatcagagacg

SEQ ID NO: 18462 - DNA, 16 bp, Artificial Sequence
  Synthetic construct
ttggcaatcagagacg

SEQ ID NO: 18463 - DNA, 16 bp, Artificial Sequence
  Synthetic construct
tttactgcacggtgtc

SEQ ID NO: 18464 - DNA, 16 bp, Artificial Sequence
  Synthetic construct
tttactgcacggtgtc

SEQ ID NO: 18465 - DNA, 16 bp, Artificial Sequence
  Synthetic construct
tttactggtccgaacc

SEQ ID NO: 18466 - DNA, 16 bp, Artificial Sequence
  Synthetic construct
tttactggtccgaacc

SEQ ID NO: 18467 - DNA, 16 bp, Artificial Sequence
  Synthetic construct
tttatgccaacacccg

SEQ ID NO: 18468 - DNA, 16 bp, Artificial Sequence
  Synthetic construct
tttatgccaacacccg

SEQ ID NO: 18469 - DNA, 16 bp, Artificial Sequence
  Synthetic construct
tttatgctcaacgcta

SEQ ID NO: 18470 - DNA, 16 bp, Artificial Sequence
  Synthetic construct
tttatgctcaacgcta

SEQ ID NO: 18471 - DNA, 16 bp, Artificial Sequence
  Synthetic construct
tttcctctcagagctt

SEQ ID NO: 18472 - DNA, 16 bp, Artificial Sequence
  Synthetic construct
tttcctctcagagctt

SEQ ID NO: 18473 - DNA, 16 bp, Artificial Sequence
  Synthetic construct
tttgcgcgttccacaa

SEQ ID NO: 18474 - DNA, 16 bp, Artificial Sequence
  Synthetic construct
tttgcgcgttccacaa

SEQ ID NO: 18475 - DNA, 16 bp, Artificial Sequence
  Synthetic construct
tttgcgctccacgaat

SEQ ID NO: 18476 - DNA, 16 bp, Artificial Sequence
  Synthetic construct
tttgcgctccacgaat

SEQ ID NO: 18477 - DNA, 16 bp, Artificial Sequence
  Synthetic construct
tttgcgctccagggct

SEQ ID NO: 18478 - DNA, 16 bp, Artificial Sequence
  Synthetic construct
tttgcgctccagggct

SEQ ID NO: 18479 - DNA, 16 bp, Artificial Sequence
  Synthetic construct
tttgcgctctgtgcaa

SEQ ID NO: 18480 - DNA, 16 bp, Artificial Sequence
  Synthetic construct
tttgcgctctgtgcaa

SEQ ID NO: 18481 - DNA, 16 bp, Artificial Sequence
  Synthetic construct
tttggttgttcgaatc

SEQ ID NO: 18482 - DNA, 16 bp, Artificial Sequence
  Synthetic construct
tttggttgttcgaatc

SEQ ID NO: 18483 - DNA, 16 bp, Artificial Sequence
  Synthetic construct
tttgtcatcttccttc

SEQ ID NO: 18484 - DNA, 16 bp, Artificial Sequence
  Synthetic construct
tttgtcatcttccttc

SEQ ID NO: 18485 - protein, 120 aa, Artificial Sequence
  Synthetic construct
QVQLQESGPGLVKPSETLSLTCTVSGYSISSPYYWGWIRQPPGKGLEWIGNIYHSGSTYYNPSLKSRVTISIDASKNQFSLKLSSVTAADTAVYYCARVSYDRGWGFDYWGRGTLITVSS

SEQ ID NO: 18486 - protein, 127 aa, Artificial Sequence
  Synthetic construct
QVTLRESGPALVKPTQTLTLTCTFSGFSLSTSGMSVSWIRQPPGKALEWLALIDWGDDKYYSTSLKTRLTISKDTSKNQVVLTMTNMDPVDTATYYCARTANDWLSGDYDYYYMDVWGKGTTVTVSS

SEQ ID NO: 18487 - protein, 120 aa, Artificial Sequence
  Synthetic construct
QVQLVESGGGVVQPGRSLRLSCAASGFTFSLYPIHWVRQAPGEGLEWVALISFDGSNKYYADSVKGRFAISRDNSKNTLYLQMNSLRAEDTAVYYCARGGGGNYRYFDYWGQGTLVTVSS

SEQ ID NO: 18488 - protein, 129 aa, Artificial Sequence
  Synthetic construct
EVQLVQSGAEVKKPGDSLKISCKGSGYSFTSHWIGWVRQMPGKGLEWMGIIYPDDSHTRYRPSFQGQVTISVDKSISTAYLQWSSLKASDTAMYYCARPRFGGSGNYYNVPGAGAFDMWGQGTLVTVSS

SEQ ID NO: 18489 - protein, 118 aa, Artificial Sequence
  Synthetic construct
EVQLLESGGGLVQPGGSLRLSCAASGFTFSSYAMSWVRQAPGKGLEWVSAISGSGGRTYYTDSVKGRFTISRDSSKNTLYLQMNSLRAEDTAVYYCAAITGTGSFDYWGQGTLVTVSS

SEQ ID NO: 18490 - protein, 125 aa, Artificial Sequence
  Synthetic construct
QVQLVQSGAEVKKPGSSMKVSCKASGGSFSSYAINWVRQAPGQGLEWMGGIIPIFGTPNYAQKFQGRVTITADESTSTAYLELSSLRSEDTAVYYCASLMETGSIQDDYYNMDVWGKGVTVSVSS

SEQ ID NO: 18491 - protein, 118 aa, Artificial Sequence
  Synthetic construct
QVQLQQWGAGLLKPSETLSLTCAVYGGSFSDYYWNWIRQPPGKGLEWIGEINHSGTTNYSPSLKSRVTMSVDTSKNQFSLKLSSVTAADTAVYFCASGVFQPGYPTNWGQGTLVTVSS

SEQ ID NO: 18492 - protein, 121 aa, Artificial Sequence
  Synthetic construct
QVTLRESGPALVKPTQTLTLTCTFSGFSLSTTGMCVSWIRQPPGKALEWLALMDWDDDKYYSTSLKTRLTISKDTSKNQLVLTMTNMDPVDTGTYYCARTREYSKYYMDVWGKGTTVTVSS

SEQ ID NO: 18493 - protein, 118 aa, Artificial Sequence
  Synthetic construct
EVQVVESGGGLVKPGGSLRLSCAASGFTFSSYSMNWVRQAPGKGLEWVSSIGSSSSHIYYADSVKGRFSISRDNAKNSLYLQMNRLRAEDTAVYYCVSTPYYYGMDVWGQGTTVTVSS

SEQ ID NO: 18494 - protein, 118 aa, Artificial Sequence
  Synthetic construct
EVQLVQSGAEVKKPGASVKVSCKASGYTFTSFYMHWFRQAPGQGLEWVGEFNPSGDSTNYAQKFQGRVSMTRDTSTSTVYMQLSSLISEDTAVYYCARGVQPHFFDYWGQGTLVTVSS

SEQ ID NO: 18495 - protein, 126 aa, Artificial Sequence
  Synthetic construct
QVQLVQSGSELKNPGASVKVSCKASGYTFTTYAMNWVRQAPGQGLEWMGWINTNTGNPTYAQAFTGRFVFSLDTSVSTAYLQISSLKAEDTAVYYCARDFDNMVRGGYYYYYMDVWGKGTTVTVSS

SEQ ID NO: 18496 - protein, 127 aa, Artificial Sequence
  Synthetic construct
QVQLVQSGAEVKKPGSSVKVSCKASGGTFSNYTITWVRQAPGQGLEWMGGIIPIFGTTNYAQKFQGRVTLTADESTTTAYMELYSLRSEDTAVYYCARDRGYFFSGTEYYYSYMDVWGKGTTVTVSS

SEQ ID NO: 18497 - protein, 121 aa, Artificial Sequence
  Synthetic construct
QVQLVESGGGVVQPGRSLRLSCAASGFTFSGNAMHWVRQAPGKGLEWVAVISYDGSNQYYADSVKGRFTVSRDNSKNTLYLQMSSLRAEDTAVYYCAKGRGGNYLVAFDIWGQGAMVTVSS

SEQ ID NO: 18498 - protein, 123 aa, Artificial Sequence
  Synthetic construct
QVQLVQSGAEVKKPGSSVKVSCKASGGTFSNYTISWVRQAPGQGLEWMGRIIPILLIVHYAQKFQGRVTITADTSTSTAYMELSSLKSEDSALYYCATGLWFGDSETNWFDPWGQGTLVTVSS

SEQ ID NO: 18499 - protein, 122 aa, Artificial Sequence
  Synthetic construct
QVQLVQSGAEVKKPGSSVKVSCKASGGTFSSYGISWVRQAPGQGLEWMGGIIPIFGTTNYAQKFQGRVTITADEFTSTAYLELSSLRSEDTAVYYCARVSAYDSSGSWGDYWGQGTLVTVSS

SEQ ID NO: 18500 - protein, 122 aa, Artificial Sequence
  Synthetic construct
QLQLQESGPGLVKPSETLSLTCTVSGGSISSSSYYWGWIRQPPGKGLEWIGSIYYSGSTYYNPSLKSRVTISVDTSKNQFSLKLSSVTAADTAVYYCARVSYGSGYNWFDPWGQGTLVTVSS

SEQ ID NO: 18501 - protein, 121 aa, Artificial Sequence
  Synthetic construct
EVQLVESGGGLVQPGGSLRLSCAASGFTVSDNYMSWVRQAPGKGLQWVSVIYSGGNTYYADFVKGRFNITRDDSKNMLYLQMNSLRREDTAVYYCVRDRRIVGYYFGLDVWGQGTTVTVFS

SEQ ID NO: 18502 - protein, 117 aa, Artificial Sequence
  Synthetic construct
EVQLVESGGGLIQPGGSLRLSCAASGIIVSRNYMSWVRQAPEKGLEWVSIIYSGGSTYYADSVKGRFTISRDNSKNTLYLQMNSLRAEDTAVYYCARDLQESGMDVWGQGTTVTVSS

SEQ ID NO: 18503 - protein, 119 aa, Artificial Sequence
  Synthetic construct
QLQLQESGPGLVKPSQTLSLTGTVSGGSISSGGYYWSWIRQHPGKGLEWIGYIYYSGSTHYNPSLKSRLTISVDTSKNQFSLTLSSVTAADTAVYYCARWAVAGFFDYWGQGTLVTVSS

SEQ ID NO: 18504 - protein, 117 aa, Artificial Sequence
  Synthetic construct
QVQLQESGPGLAKPSGTLSLTCAVSGGSISSNNWWSWVRQPPGKGLEWIGEIYQSGSANYNPSLKSRVTISVDKSKNQFSLRLSSVTAADTAVYYCATTRAGTIDYWGQGTLVTVSS

SEQ ID NO: 18505 - protein, 121 aa, Artificial Sequence; identical to SEQ ID NO: 2116
  Synthetic construct

SEQ ID NO: 18506 - protein, 124 aa, Artificial Sequence
  Synthetic construct
EVQLVQSGAEVKKPAESLKISCKGSGYSFTSYWIGWVRQMPGKGLEWMGIIYPGDSETRYSPSFQGQVTISVDKSISTAFLQWSSLKASDTAMYYCARPGWELPGLSVGAFDIWGQGTMVTVSS

SEQ ID NO: 18507 - protein, 121 aa, Artificial Sequence
  Synthetic construct
EVQLVQSGAEVKKPGESLKISCKGSGYSFTNYWIAWVRQMPGKGLEWMGIIYPGDSDTRYSPSFQGQVTISADKSINTAYLQWGSLKASDTAMFYCARQGPSWSHDAFDIWGQGTMVTVSS

SEQ ID NO: 18508 - protein, 122 aa, Artificial Sequence
  Synthetic construct
QVQLQESGPGLVRPSGTLSLTCAVSGDSISSSNWWTWVRQPPGKGLEWIGEISHSGNTNYNPSLKTRVTMSLDTSKNQFSLKLSSVTAADTAVYYCARGGPPNYYYYGMDVWGQGTTVTVSS

SEQ ID NO: 18509 - protein, 128 aa, Artificial Sequence
  Synthetic construct
QVQLQQSGPGLVKPSQTLSLTCAISGDSVSSNSAAWNWIRQSPSRGLEWLGRTYYRSKWYNDYAVSVKSRLRINPDTSENQFSLHLNSVTPEDTAVYYCARGRDSSGLDLYYYGIDVWGQGTTVTVSS

SEQ ID NO: 18510 - protein, 121 aa, Artificial Sequence
  Synthetic construct
QITLKESGPALVKPTQTLTLTCTFSGFSLSTSGVGVGWIRQPPGKALEWLALIYWDDDKRYSPSLKSRLTITKDTSKNQVVLTMTNMDPVDTATYFCTHGNDYGDSHVTHWGPGTLVTVSS

SEQ ID NO: 18511 - protein, 118 aa, Artificial Sequence
  Synthetic construct
QVQLQESGPGLVKPSGTLSLTCAVSDGSIRSSNWWSWVRQPPEKGLEWIGEIFHSGGTNYNPSLKSRVTISLDTSKSQFSLKLTSVTAADTAIYYCARETAMVGIDYWGQGTLVTVSS

SEQ ID NO: 18512 - protein, 126 aa, Artificial Sequence
  Synthetic construct
QVQLQESGPGLVKPSETLSLSCTVAGGSISSTTSYWVWIRQAPGRGLEWLGSVYYSGNTYYSPPLKSRLTISADTSKNQFSLNLRSVTAADTAVYYCAGNSAYFDWTSPHYYMDVWATGTKVTVSS

SEQ ID NO: 18513 - protein, 133 aa, Artificial Sequence
  Synthetic construct
EVQLVESGGGLVQPGGSLRLSCAASGFTFSPYSMNWVRQAPGKGLEWVSYISSSSSTIYYADSVKGRFTISRDNAKNSLYLLMNSLRAEDTAVYYCARLGRPTAIVVAGIPSPPVYFYYMDVWGKGTTVTVSS

SEQ ID NO: 18514 - protein, 125 aa, Artificial Sequence
  Synthetic construct
QVQLVQSGAEVKKPGASLKVSCKVSGYTLSELSIHWVRQAPGKGLEWMGGFDPEDGETIYAQMFQGRVTMTEDTSTDTAYMELSSLRREDTAVYYCATDSQLERRFWSSYSMDVWGQGTTVTVSS

SEQ ID NO: 18515 - protein, 119 aa, Artificial Sequence
  Synthetic construct
QVQLQESGPGLVKPSETLSLTCTVSGGSISSYYWSWIRQPPGKGLEWIGYLYYSGNTNYNPSLKSRVTILVDTSKNQFSLKLSSVTAADTAVYYCARMRGWRGRAFDIWGQGTMVTVSS

SEQ ID NO: 18516 - protein, 123 aa, Artificial Sequence
  Synthetic construct
QLQLQESGPGLVKPSETLSLTCTVSGGSISSSSYYWGWIRQPPGKGLEWIGNIYYTGRTYLNSSLKSRVTMSVDTSKNQFSLRLTSVTAADTALYYCARYSYGYLGDDAYDIWGQGTMVTVSS

SEQ ID NO: 18517 - protein, 124 aa, Artificial Sequence
  Synthetic construct
EVQVLESGGGLVQPGGSLRLSCAASGFTFSSYAMSWVRQAPGKGLEWVSGMSGSGGSTYYADSVKGRFTISRDNSKNTLYLQMNSLRAEDTAIYYCAKGRHLLYLGDFFPFDYWGQGTLVTVSS

SEQ ID NO: 18518 - protein, 123 aa, Artificial Sequence
  Synthetic construct
QLQLQESGPGLVKPSETLSLTCTVSGGSISSSSYYWGWIRQPPGKGLEWIGSIYYSGSTYHNPSLKSRVTISVDTSKNQFSLELSSVTAADTAVYYCARDGSSGYYDEPFDYWGQGTLVTVSS

SEQ ID NO: 18519 - protein, 121 aa, Artificial Sequence
  Synthetic construct
EVQLVQSGAEVKKPGESLKISCKGSGYSFISNWIGWVRQMPGRGLEWMGIIYPGDSDTRYSPSFQGQVTMSADKSISTAYLQWSSLKASDTAMYYCGRVGGSGYDVEFDYWGQGTLVAVSS

SEQ ID NO: 18520 - protein, 125 aa, Artificial Sequence
  Synthetic construct
QVQLQESGPGLVMPSETLSLTCDVSGGSVTRFSWSWVRLSPERGLEWIGYISSTGGPNYNPSLNSRVTISLDMSKNQFSLRLNSVTAADTAVYYCARSPRYCLGGSCYPLHFDSWGQGTLVTVSS

SEQ ID NO: 18521 - protein, 122 aa, Artificial Sequence; identical to SEQ ID NO: 2271
  Synthetic construct

SEQ ID NO: 18522 - protein, 121 aa, Artificial Sequence
  Synthetic construct
QVQLVESGGGVVQPGRSLRLSCAASGFTFSSYGMHWVRQAPGKGLEWVAVIWFDGSNKYYADSVKGRFTISRDNSKNTLLLQMNSLRAEDTAVYYCAREGLVGATTGLDYWGQGTLVTVSS

SEQ ID NO: 18523 - protein, 123 aa, Artificial Sequence
  Synthetic construct
QITLKESGPTLVKPTQTLTLTCTFSNFSLSTSGVGVGWIRQPPGKALEWLALIYWDDDKRYSPSLKNRLTITRDTSKNHVVLTMTNMDPEDTGTYYCAHRTPSGWFGDWFDPWGQGTLVTVSS

SEQ ID NO: 18524 - protein, 124 aa, Artificial Sequence
  Synthetic construct
QVHLVESGGGVVQPGRSLRLSCAASGFTFSNYGMHWVRQAPGKGLEWVAVMWYVGNNKFYADSVKGRFTISRDNSNNTLYLQMNSLRAEDTAVYYCARDLPSDNWSDVGAFDIWGQGTMVAVSS

SEQ ID NO: 18525 - protein, 130 aa, Artificial Sequence
  Synthetic construct
QVQLVQSGAEMKKPGASVKVSCKASGYTFTSYGISWVRQAPGQGLEWMGWISAYNANTNYAQKLQGRVTMTTDTSTSTAYMELRSLRSDDTAVYYCARVVLRYFDWLLQAGGDYYFMDVWGKGTTVTVSS

SEQ ID NO: 18526 - protein, 116 aa, Artificial Sequence
  Synthetic construct
EVQLVDSGGGLVQPGGSLRVSCAASGFTVSSNFMSWVRQAPGKGLEWVSGFYGGGSTYYADSVKGRFTISRDNSKNTLYLQMNSLRLEDTAIYYCARDVTHAFDLWGQGTVVTVSS

SEQ ID NO: 18527 - protein, 119 aa, Artificial Sequence
  Synthetic construct
EVQLVESGGGLIQPGGSLRLSCAASGVIVSSNYMNWVRQAPGEGLEWVSVIYSGGSTFYADSVKGRFTISRDNSKNTLYLQMNRLRAEDTAVYYCTRGGWPSGDAFDIWGQGTMVTVSS

SEQ ID NO: 18528 - protein, 119 aa, Artificial Sequence
  Synthetic construct
QVQLVQSGAEVRKPGASVRVSCKASGYTFSNYDIVWVRQPTGQGLEWMGWVNPISANTNYAQKFRGRVTMTGDTSMSTAHMDLTNLRSEDTAVYYCARAIRNQLLPDYWGQGTLVTVSS

SEQ ID NO: 18529 - protein, 116 aa, Artificial Sequence
  Synthetic construct
QVQLVESGGGVVQPGRSLRVSCAASGITVKDYGMHWVRQAPGRGLEWVAFISYDGSVQHYGDSVKGRFTISRDDLKNTLFLQMNSLRADDTAVYYCAKGATKVDYWGQGTLVTVSS

SEQ ID NO: 18530 - protein, 121 aa, Artificial Sequence
  Synthetic construct
EVQLVQSGGGLVQPGGSLRLSCAASGFNVSSNYMSWVRQAPGKGLEWVSVIYSGGNTFYADSVKGRFTISRGDSKNTLYLQMNSLRPEDTAVYYCARDRRIVGYYFALDVWGQGTTVTVSS

SEQ ID NO: 18531 - protein, 129 aa, Artificial Sequence
  Synthetic construct
QVQVVQSGAEVRKPGASVKVSCKVSGYTLPELSIHWVRQAPGKGLEWMGGFDPEEGETIYAQKFQGRVTMTEDTSTDTAYMELSSLRSEDTAVYYCATGVVVTGTGPNDYYYYYGLDFWGQGTTVTVSS

SEQ ID NO: 18532 - protein, 126 aa, Artificial Sequence
  Synthetic construct
QVQLQESGPGLVKPSQTLSLTCTVSGGSISSGGYYWSWIRQHPGKGLEWIAYIYYSGNTYYNPSLRSRLTISLDTSKNQFSLKLSSVTAADTAVYYCASGHYCSGGNCYSGWFDPWGQGTLVTVSS

SEQ ID NO: 18533 - protein, 121 aa, Artificial Sequence
  Synthetic construct
QVHLQQWGAGLLKPSETLSLTCTVYGGSFSGFQWSWIRQPPGKGLEWIGEINHSGNTNYNPSLRSRVTISLDTSKNQFSLKLSSVTAADTAVYYCARDDGSSVYNYYMDVWGKGATVTVSS

SEQ ID NO: 18534 - protein, 130 aa, Artificial Sequence
  Synthetic construct
EVLLVQSGAEVKKPGESLKISCKGSGYSFTSYWIGWVRQMPGKGLEWMGIIYPGDSNTTYSPSFQGQVTISADKSISTAYLQWSSLKASDTAMYYCARHGFGGYSGYYYWVSAGNGMDVWGQGTTVTVSS

SEQ ID NO: 18535 - protein, 131 aa, Artificial Sequence
  Synthetic construct
QVQLVQSGAEVKKPGASVKVSCKASGYTFTNYAISWVRQAPGQGLEWMGWINPYNGSTNYGQKLQGRVTMTTDTSTSTAYMELRSLRSDDTAVYYCAKDPASYHDIWSGYVAYYYYGIDVWGQGTTVTVSS

SEQ ID NO: 18536 - protein, 125 aa, Artificial Sequence
  Synthetic construct
QVQLVQSGSELKKPGASVKVSCKASGYTFTTYAMNWVRQAPGQGLEWMGWINTNTGNPTYAQGFTGRFVFSLDTSVSTAYLQISSLKAEDTAVYYCARDRETGMPYYDYYYLDVWGKGTTVTVSS

SEQ ID NO: 18537 - protein, 118 aa, Artificial Sequence
  Synthetic construct
EVQLVESGGGLIQPGGSLRLSCAASGFIVGNNYMSWVRQAPGKGLEWVSVIYRGGNTYYADSVKGRFTISRDISKNTLYLQMNSLRAEDTAVYYCASRYIGSWGHDYWGQGTLVTVSS

SEQ ID NO: 18538 - protein, 124 aa, Artificial Sequence
  Synthetic construct
QITLKESGPTLVKPTQTLTLTCTFSGFSLTTSGVGVGWIRQPPGKALEWLALIYWDDDKRYSPSLKNRLTITKDTSKNQVVLTMTNMDPVDTATYYCAHTGSVPPAMVGAFDIWGHGTMVTVSS

SEQ ID NO: 18539 - protein, 123 aa, Artificial Sequence
  Synthetic construct
QLQLQESGPGLVKPSETLSLTCSVSGGSISRSTYYWGWIRQPPGKGLEWIGSIYYSGSTHYNPSLKSRVTLSVDTSKNQFSLKLSSVTAADMAMYYCARIPYRNSWYEGFDSWGQGTLVTVSS

SEQ ID NO: 18540 - protein, 121 aa, Artificial Sequence
  Synthetic construct
QVQLQESGPGLVKPSGTLSLTCDVSGGSISSNNWWNWVRQPPGKGLEWIGEIHQSGGTNYKSSLKSRVTISIDKSKNQFSLKLSSVTAADTGVYYCARDLGLGVGCGMDVWGQGTTVTVTS

SEQ ID NO: 18541 - protein, 125 aa, Artificial Sequence
  Synthetic construct
QVQLQQWGAGLLRPSETLSLTCAVLGGSFTGYYWNWIRQSPGKGLEWIGEIDQRGNTNYNPSLKSRVTISGDTSKKQFSLNLTSVTAADTAVYYCARVMAAAKHRVFYYYYMDVWGKGTTVTVPS

SEQ ID NO: 18542 - protein, 123 aa, Artificial Sequence
  Synthetic construct
QVQLVESGGGVVQPGKSLRLSCVASGFTFKNFAMHWVRQTPGKGLEWLAVISFDGNIKYYADSVEGRFTVSRDNFRNILSLQMNRLGAEDTAVYFCARDGGCRKYFDCPGEDWGQGTRVIVSS

SEQ ID NO: 18543 - protein, 126 aa, Artificial Sequence
  Synthetic construct
QVQLVQSGSELKKPGASVKLSCKASGYTFTTYAMNWVRQAPGQGLEWMGWINTNTGNPTYAQGFTGRFVFSLDTSVSTAYLQISSLKAEDTAVYYCARDFDGMVRGGYYYYYMDVWGKGTTVTVSS

SEQ ID NO: 18544 - protein, 124 aa, Artificial Sequence
  Synthetic construct
EVQLVESGGGLVKPGGSLRLSCAASGFTFSDYSINWVRQAPGKGLEWVSSISGSSSHMYYADSLKGRFTISRDNAKNSLYLQMNSLRAEDTAVYYCARVGRRYSSGYDNGIDYWGQGTLVTVSS

SEQ ID NO: 18545 - protein, 121 aa, Artificial Sequence; identical to SEQ ID NO: 18530
  Synthetic construct

SEQ ID NO: 18546 - protein, 119 aa, Artificial Sequence
  Synthetic construct
QVQLQESGPGLVKPSQTLSLTCTVSGGSISSGGYYWSWIRQHPGKGLEWIGYIYYTGSTDYNPSLKSRVTISIDTSKTQFSLKLSSVTAADTAMYYCARARGLYHFDYWGQGTLVTVSS

SEQ ID NO: 18547 - protein, 120 aa, Artificial Sequence
  Synthetic construct
EVQLVQSGAEVKKPGEALKISCKGSGYSFTSYWIGWVRQMPGKGLEWMGIIFPGDSDTRYSPSFQGQVTISADKSISTAYLQWSSLKASDTAIYYCARPPYGDPWNFDYWGQGTLVTVSS

SEQ ID NO: 18548 - protein, 117 aa, Artificial Sequence; identical to SEQ ID NO: 2256
  Synthetic construct

SEQ ID NO: 18549 - protein, 124 aa, Artificial Sequence
  Synthetic construct
QVQLVQSGAEVKKPGASVKVSCKAFGYTFNNYYIHWVRQAPGQGLEWMGILDVSGGGTSYAQKLQGRVTMTRDTSTSSVFMELNSLTSDDTAVYYCARDPTRPSNGDPDGFDIWGQGTLLTVSA

SEQ ID NO: 18550 - protein, 122 aa, Artificial Sequence
  Synthetic construct
QVQLVESGGGVVQPGRSLRLSCAASGFTFNNFGMHWVRQAPGKGLEWVAVISYDGSNKYYADSVKGRFTISRDNSKNTLFLQMNSLRAEDTAVYYCAREGMVGEAGRSLDYWGQGTLVTVSS

SEQ ID NO: 18551 - protein, 128 aa, Artificial Sequence
  Synthetic construct
QVQLVQSGAEVKKPGASVKVSCKASGYTFTNYGISWVRQAPGQGLEWMGWISTYNDNTNYAQELQGRVTMTTDTSTSTAYMELRSLRSDDTAVYYCARGVTGTTFLVPYYYYYGLDVWGQGTTVTVSS

SEQ ID NO: 18552 - protein, 129 aa, Artificial Sequence
  Synthetic construct
EVQLVESGGGLVQPGGSLRLSCAASGFTFSSYSMNWVRQAPGKGLEWVSHIRSSSSTIYYADSVKGRFTISRDNAKNSLYLQMNSLRAEDTAVYYCARDIADSKYSSGWYHYYYYMDVWGKGTTVTVSS

SEQ ID NO: 18553 - protein, 124 aa, Artificial Sequence
  Synthetic construct
QVTLRESGPALVKPTQTLTLTCTFSGFSLGTSGMCVSWIRQPPGKALEWLALIDWDDDKYYNTSLRARLTISKDTSKNQVVLTMTNMDPVDTATYYCARMPSGYYDSSEAFDIWGQGTMVTVSS

SEQ ID NO: 18554 - protein, 122 aa, Artificial Sequence
  Synthetic construct
QVQLQESGPGLVKPSGTLSLTCAVSGDSISSSNWWTWVRQPPGKGLEWIGEISHSGSTNYNPSLKSRVTTSVDKSKNQFSLKLSSVTAADTAVYYCARGGPPGYYYYGMDVWGQGTTVTVSS

SEQ ID NO: 18555 - protein, 128 aa, Artificial Sequence
  Synthetic construct
QLQLQESGPGLVKPSETLSLTCTVSGGSISSSGYYWGWLRQPPGKGLECIGSIYYSGSTYYNPSLKGRVTISLDTSKNQFSLKLSSVTAADTAVYYCARLKESTIFGVVITPSWFDPWGQGTLVTVSS

SEQ ID NO: 18556 - protein, 120 aa, Artificial Sequence
  Synthetic construct
QMHLVQSGPEVKKPGTSVKVSCKASGFTFTNTVVHWVRQARGQRLEWIGWIVVASTYTNYAQEFQERVTITRDVPTSTAYLEVSSLKSDDTAVYYCAVERRNSEEVFEMWGQGTLVSVSS

SEQ ID NO: 18557 - protein, 118 aa, Artificial Sequence; identical to SEQ ID NO: 2139
  Synthetic construct

SEQ ID NO: 18558 - protein, 121 aa, Artificial Sequence
  Synthetic construct
QVQLVESGGGVVQPGRSLRLSCAASGFTFSTYAIHWVRQAPGKGLEWVAVISYDGSNKYYADSVKGRFTLSRDNSKNTLYLQMNSLRAEDTAVYYCARDYSGTYWGFFDYWGQGTLVTVSS

SEQ ID NO: 18559 - protein, 118 aa, Artificial Sequence
  Synthetic construct
EVQLVESGGGLIQPGGSLRLSCAASGFTVGNNYMSWVRQAPGKGLEWVSVIYRGGNTYYADSVKGRFTISRDISRNTLYLQMNSLRAEDTAVYYCASRYIGSWGHDYWGQGTLVTVSS

SEQ ID NO: 18560 - protein, 131 aa, Artificial Sequence
  Synthetic construct
QLQLLESGPGLVKPSETLSLTCTVSGGSISSSGYYWGWIRQPPGKGLEWIGIIYYTGSTYYKPSLKSRVTISVDTSKNQFSLKLSSVTATDTAVYYCARHVEAYSGYDSKSFYGDYVPADWGQGTLVTVSS

SEQ ID NO: 18561 - protein, 127 aa, Artificial Sequence
  Synthetic construct
QVQLVESGGGVVQPGRSLRLSCAASGFTFSSYAMHWVRQAPGKGLEWVALISYDGSNEYYANSVKGRFTISRDNSKNTLYLQMNSLRPEDTAMYYCARDRSLGLWFGEPTPAYFDLWGRGTLVTVSS

SEQ ID NO: 18562 - protein, 128 aa, Artificial Sequence
  Synthetic construct
QVHLVQSGAEVKKPGSSVKVSCKASGGTLINYGISWVRQAPGQGLEWMGGTIPIFGTANYAQKFQGRVTITADESTSTAYLELSSLRSEDTAVYYCASLGGDYYGSGSYHNTSEFDPWGQGTLVTVSS

SEQ ID NO: 18563 - protein, 119 aa, Artificial Sequence
  Synthetic construct
QVQLQESGPGLVKPSETLSLTCNVSGGSISSYYWSWIRQPPGKGLEWIGYLYYSGSTNYSPSLKSRVTISEDTSKNQFSLKLSSVTAADTAVYYCARMRGWRGRSFDIWGQGTMVTVSS

SEQ ID NO: 18564 - protein, 120 aa, Artificial Sequence
  Synthetic construct
QVHLQESGPGLVKPSETLSLTCSVSGVSISDYYWTWIRQPPGKVLEWIGYIYYTGSTNYNPSLKSRITVSVDTSKNQFSLKLSSVTAADTAVYYCARGDCNGGTCYSDYWGQGTLVTVSS

SEQ ID NO: 18565 - protein, 119 aa, Artificial Sequence
  Synthetic construct
QVQLQQWGAGLLKPSETLSLTCAVYGGSFSGYYWSWIRQPPGKGLEWIGEINHSGSTNYNPSLKSRVTISVDTSKNQFSLKLSSVTAADTAVYYCATTWLLEEGWFDPWGQGTLVTVSS

SEQ ID NO: 18566 - protein, 124 aa, Artificial Sequence
  Synthetic construct
QVQLVQSGAEVKKPGSSVKVSCKASGGSFSTYAISWVRQAPGQGLEWMGGVTPIFGTANYAQKFQGRVTITADESTNIAYMELSSLTSEDTAVYYCASLGGDYYVSGSSEFDPWGQGTLVTVSS

SEQ ID NO: 18567 - protein, 120 aa, Artificial Sequence
  Synthetic construct
QVQLVESGGGVVQPGRSLRLSCAASGFTFSSYGMHWVRQAPGKGLEWVAVIWYDGSNKYYADSVKGRFTISRDNSKNTLYLQMNSLRAEDTAVYYCAREGVVGATGLDYWGQGTLVTVSS

SEQ ID NO: 18568 - protein, 91 aa, Artificial Sequence
  Synthetic construct
WDVWTWIRQPAGKGLEWIGRVYTSGSTDYNASLKSRVIISIDTPRNQFSLSLNSLTAADTAVYYCARGGESSGYPSAFDLWGPGTMVIVSS

SEQ ID NO: 18569 - protein, 116 aa, Artificial Sequence
  Synthetic construct
QVQLVESGGGVVQPGGSLRLSCAASGFTLNEYGMHWVRQAPGRGLEWVAFISYDGSIQKYVDSVKGRFTISRDDFKNTLFLQMTSLRVDDTAVYYCSKGATKMDYWGQGTLVTVSS

SEQ ID NO: 18570 - protein, 118 aa, Artificial Sequence
  Synthetic construct
QVQLVESGGGVVQPGRSLRLSCAASGFIFNTYAMHWVRQAPGKGLEWVAVISYDGNNKYYADSVKGRFTISRDNSKNTLYMQMNSLRAEDTAVYYCARGENYWYSDLWGRGTLVTVSS

SEQ ID NO: 18571 - protein, 119 aa, Artificial Sequence
  Synthetic construct
QVQLVESGGGVVQPGRSLRLSCAASGFTFSNYAMHWVRQAPGKGLEWVAVISYDGSNKYYADSVKGRFTISRDNSKNTLFLQMNSLRAEDTAVYYCARGGGGYKYFDYWGQGTLVTVSS

SEQ ID NO: 18572 - protein, 130 aa, Artificial Sequence
  Synthetic construct
EVQLVESGGGLVKPGGSLRLSCAASGFTFRNAWMSWVRRAPGKGLEWVGRIKSKTDGGTTDYAAPVKGRFTISRDDSKNTLYLQMNSLKTEDTAVYYCTTDGYYYDSSGYPSFRVWFDPWGQGTLVTVSS

SEQ ID NO: 18573 - protein, 119 aa, Artificial Sequence
  Synthetic construct
EVQLVESGGGLVQPGGSLRLSCAASGFTFSRYAMSWVRQAPGKGLEWVSGISGSGDSTYYADSVKGRFTISRDNSKNTLYLQMNSLRAEDTAVYYCPKDLSAARGFDYWGQGTLVTVSS

SEQ ID NO: 18574 - protein, 121 aa, Artificial Sequence
  Synthetic construct
QVQLVESGGGVVQPGRSLRLSCVASAFTFSSYGMHWVRQAPGKGLEWVAVIWYDGSKKYYADSVKGRFTISRDISKNTLFLQMNSLRAEDTAVYYCAREGAVGATTGLDSWGQGTLVTVSS

SEQ ID NO: 18575 - protein, 131 aa, Artificial Sequence
  Synthetic construct
EEQLLESGGGLVQPGGSLRLSCAASGFTFSSYAMSWVRQAPGKGLEWVSAISGSGGSTYYADSVKGRFTISRDNSKNTLYLQMSSLRAEDTAVYYCAKGLYYGSGSYYIQPFYYYYAMDVWGQGTTVTVSS

SEQ ID NO: 18576 - protein, 121 aa, Artificial Sequence
  Synthetic construct
QVQLQQWGAGLLKSSETLSLTCAVYGGSFSGYQWSWIRQPPGKGLEWIGEVNHSGSTNYNPSLKSRVSILIDTSKNQFSLRLSSVTAADTAVYYCARDDGSSVHNYYMDVWGKGTTVAVSS

SEQ ID NO: 18577 - protein, 122 aa, Artificial Sequence
  Synthetic construct
QVQLVESGGGVVQPGGSLRLSCAASGFTFSDYAMRWVRQGPGKGLEWVAIISYDGRNEHFAGSVRGRFSISRDNSKNIVFLQMNSLRPEDTALYFCARDPYIVPTALPLDYWGQGTLVTVSS

SEQ ID NO: 18578 - protein, 120 aa, Artificial Sequence
  Synthetic construct
QVQLVQSGAEVKKPGSSVKVSCKASGGPFSSYAITWVRQAPGQGLEWMGGIIPIFNTANYAQKFQGRVTITADESTSTAYMELSSLRSEDTAVYYCARVNGYDSDGGDYWGQGTLVTVSS

SEQ ID NO: 18579 - protein, 121 aa, Artificial Sequence
  Synthetic construct
QVQLQESGPGLVKPSQTLSLTCTVSGGSINSASYFWSWVRQPAGKGLEWIGHIYASGGTKYNPSLMSRVTMSVDTSKNQFSLKLNSVNAEDTAVYYCAREEGSGWWKHDYWGQGTLVTVSS

SEQ ID NO: 18580 - protein, 101 aa, Artificial Sequence
  Synthetic construct
DGVITWVRQAPGQGLEWMGWINAHDGNTNYAQKLQGRVTMTTDTSTSTAYMELRSLRSDDTAVYYCARDPASYYDFWSGYVDYYYYGLDVWGQGTTVTVSS

SEQ ID NO: 18581 - protein, 121 aa, Artificial Sequence
  Synthetic construct
QVQLVESGGGVVQPGRSLRLSCAASGFTFSSYGMHWVRQAPGKGLEWVSVIWYDGSNKYYADSVKGRFTISRDNSRNTLYLQMNSLRADDTAIYYCARDGRVGETSGIDYWGQGILVTVSS

SEQ ID NO: 18582 - protein, 118 aa, Artificial Sequence
  Synthetic construct
QVQLVQSGAEVKKPGSSVKVSCKASGDTFSSYAISWVRQAPGQGLEWMGGIIPIFGTANYAQKFQGRLTLTADESTSTAYMELSSLRSEDTAIYYCARETVVRATDSWGQGTLVTVSS

SEQ ID NO: 18583 - protein, 117 aa, Artificial Sequence
  Synthetic construct
QVQLQESGPGLVKPSETLSLTCIVSGYSISSGYYWGWIRQPPGKGLQWIGNISRGWSTYYNPSLKSRVTISVDTSKNQFSLKLNSVTAADTAVYYCARVRPLDFDYWGQGTLVIASS

SEQ ID NO: 18584 - protein, 129 aa, Artificial Sequence
  Synthetic construct
QVQLVQSGSELKKPGASVKVSCKASGYTFTSYGMSWVRQAPGQGLEWMGSINTNTGNPTYAQGVTGRFVLSLDTSVSTAYLQISSLQAEDTAVYYCARLERDIVVVVGAIDYFYYMDVWGKGTTVTVSS

SEQ ID NO: 18585 - protein, 130 aa, Artificial Sequence
  Synthetic construct
QVQLVESGGGVVQPGRSLRLSCAASGFTFSIYPMHWVRQAPGKGLEWVTFMSYDGSNKHYADSVKGRFTISRDNSKNMLYLQMNSLRAEDTAVYYCARQNYHDSSGYSPDAYSPDAFDIWGQGTMVTVSS

SEQ ID NO: 18586 - protein, 125 aa, Artificial Sequence
  Synthetic construct
QVQLVQSGSELKKPGASVKVSCKASGYNFTRYAMNWVRQAPGQGLEWMGWINTNTGDPTYAQAFTGRFVFSLDTSVSTAYLQISSLKAEDTAVYYCARDFSTAAYYYYYYYMDVWGKGTTVTVSS

SEQ ID NO: 18587 - protein, 121 aa, Artificial Sequence
  Synthetic construct
QVQLVESGGGVVQPGRSLRLSCAASGFTFSTYAIHWVRQAPGKGLEWVALISYDGSNKYYADSVKGRFAISRDNPKNTLYLQLNSLRAEDTAIYYCARGYGGNYRTYFDYWGQGTLVTVSS

SEQ ID NO: 18588 - protein, 131 aa, Artificial Sequence; identical to SEQ ID NO: 10066
  Synthetic construct

SEQ ID NO: 18589 - protein, 124 aa, Artificial Sequence
  Synthetic construct
QVQLQESGPGLVKPSETLSLTCTVSGYSISSGYSWGWIRQPPGKGLEWIGSMYHNGSTYHNPSLKSRVTIPVDTSKNQFSLKLRSVTAADTAVYYCARELRIRYYDWIYWFDPWGQGTLVTVSS

SEQ ID NO: 18590 - protein, 128 aa, Artificial Sequence
  Synthetic construct
EVQLVQSGAEVKKPGESLKISCKSSGYNFTNYWIAWVRQMPGKGLEWMGMIYPGDSDTRYSPSCQGHVTMSADKSISTAYLQWSSLKASDTAMYYCARHPPFWGGPTAMMGWGEFDYWGQGSQVTVSS

SEQ ID NO: 18591 - protein, 125 aa, Artificial Sequence
  Synthetic construct
QVQLQESGPGLVKPSGTLSLTCAVSGDSISSNNWWSWVRQPPGKGLEWIGEIYHSGSTNYNPSLKSRVTISVDKSKNQFSLRLRSVTAADTAVYYCARGYMVGVGVGPRHWFDPWGQGSLVTVSS

SEQ ID NO: 18592 - protein, 125 aa, Artificial Sequence
  Synthetic construct
QVQMQESGPGLVKPSETLSLTCTVSGGSISTYYWSWIRQSPGKGLEWIGYINYAGSTTYNPSLESRLTISVDTSKNQFSLRLSSVAAADTAVYFCARGPLRYFEWKYYYIGMDVWGRGTTVTVSS

SEQ ID NO: 18593 - protein, 125 aa, Artificial Sequence
  Synthetic construct
QVQLQESGPGLVKPSETLSLTCTVSGASINTYYWSWIRQPPGKGLEWIGYAFHNGITNYNPSLESRVTISVDTSKSQISLKLISVTAADTAVYYCARDGAYDSRNYYNYHGMDVWGQGTTVTVSS

SEQ ID NO: 18594 - protein, 119 aa, Artificial Sequence
  Synthetic construct
QVQLVESGGGVVHPGRSLRLSCAASGFTFNSYTTHWVRQSPGKGLEWLAVIWYDGSKKYYADSVKGRFTISRDNSKNTVYLQMNSLRAEDTAVYYCASQRLYYYGMDVWGQGTTVTVSS

SEQ ID NO: 18595 - protein, 129 aa, Artificial Sequence; identical to SEQ ID NO: 10545
  Synthetic construct

SEQ ID NO: 18596 - protein, 120 aa, Artificial Sequence
  Synthetic construct
QVQLQESGPGLVKPSGTLSLTCAVSGGSISSINWWSWVRQPPGKGLEWIGEIYHSGSTNYNPSLKSRVTISVDRSKNQFSLNLTSVTAADTAVYYCARSAASGPQRGDYWGQGTLVTVSS

SEQ ID NO: 18597 - protein, 121 aa, Artificial Sequence
  Synthetic construct
QVQLQQWGAGLLKPSETLSLTCAVYGGSFSGYYWSWIRQPPGKGLEWIGEVVHSGSTSYNPSLKSRVTIFLDTSNNHFSLKLSSVTAADTAVYYCARDNGSGTQNYHMDVWGKGTTVTVSS

SEQ ID NO: 18598 - protein, 126 aa, Artificial Sequence
  Synthetic construct
QVQLQESGPGLVKPSQTLSLTCTVSGGSITSGSSYWSWIRQPAGKGLEWIGRIYRSGSTNYNPSLKSRVTISIDTSKNQFSLKLSSVTAADTALYYCARDGSFLDFWSGLAWFDPWGQGTLVTVSS

SEQ ID NO: 18599 - protein, 121 aa, Artificial Sequence; identical to SEQ ID NO: 2116
  Synthetic construct

SEQ ID NO: 18600 - protein, 123 aa, Artificial Sequence
  Synthetic construct
EVQLVESGGGLVQVGGSLRLSCSASGFTFSSYAIHWVRQAPGKGLEYVSAISSHGDSTYYADSVKGRFTISRDNSKNTLFLQMSSLRAEDTALYYCVKIGTGAYGSRNYFDCWGQGTLVTVSS

SEQ ID NO: 18601 - protein, 119 aa, Artificial Sequence
  Synthetic construct
QVQLVQSGSELKKSGASVRVSCKASGYTFSTYAMNWVRQAPGQGLEWMGWINTYTGNPMYAQGFTGRFVFSLDTSVSTAYLQISSLKAEDTAVYYCARLNTIPENIDFWGQGTLVTVSS

SEQ ID NO: 18602 - protein, 128 aa, Artificial Sequence
  Synthetic construct
QLQLQESGPGLVKPSETLSLTCTVSGGSISSTNYYWAWIRQPPGKGLEWIGSIFYSGNTYYNPSLKSRVIISVDTSKNQFSLKLNSVTAADTAVYYCARYTSYYDRSGFRRVEYFQHWGQGTLVTVSS

SEQ ID NO: 18603 - protein, 116 aa, Artificial Sequence
  Synthetic construct
EVQLVDSGGGLVQPGGSLRLSCAVSGFTFNTYWMSWIRQVPGKGPEWVANINQDGTEKHYVDSVKGRFTISRDDANNSFYLQMDSLRVEDTAVYYCARGGSEVDHWGRGTLVTVSS

SEQ ID NO: 18604 - protein, 121 aa, Artificial Sequence; identical to SEQ ID NO: 2116
  Synthetic construct

SEQ ID NO: 18605 - protein, 120 aa, Artificial Sequence
  Synthetic construct
EVQLVESGGALVKPGGSLTLSCAVSGFTFADAWMIWVRQAPGKGLEWVGRIQREVDGGTTYYTAPVKGRFTITRDDSKNTLYVQMNSLKIEDTAVYYCASQGGAGEAHHWGQGTLVIVSS

SEQ ID NO: 18606 - protein, 121 aa, Artificial Sequence
  Synthetic construct
QVQLVESGGGVVQPGGSLRLSCAASGFTFSTYAIHWVRQAPGKGLEWVAVISYDGSNKYYADSVKGRFTISRDNSKNTLYLQMNSLRAEDTAVFYCARDYSATYWGYFDCWGQGTLVTVSS

SEQ ID NO: 18607 - protein, 121 aa, Artificial Sequence
  Synthetic construct
QVQLVESGGGVVQPGRSLRLSCAASGFTFSTYAMHWVRQAPGKGLEWVAIISYDGINRYYVDSVKGRFTISRDNSKNTLYLQMSSLRAEDTAVFYCARAKGGSYHGAFDFWGQGTMVTVSS

SEQ ID NO: 18608 - protein, 127 aa, Artificial Sequence
  Synthetic construct
QITLKESGPTLVKPTQTLTLTCTFSGFSLSTGGVGVAWIRQPPGQALEWLALIYWDDDKRYSPSLKSRLTITKDTSKNQVVLTMTNMDPVDTATYYCSQASGYSAYFERAFSAFDIWGQGTMVTVSS

SEQ ID NO: 18609 - protein, 122 aa, Artificial Sequence
  Synthetic construct
EVQLVESGGGLVQPGGSLRLSCAASGFSFSSYWMSWVRQAPGKGLEWVANIKRDGIEKDYVDSVKGRFTISRDNAKNSLYLQMNSLRVEDTAVYYCARGDTSGWLPHILDIWGQGTMVSVSL

SEQ ID NO: 18610 - protein, 122 aa, Artificial Sequence
  Synthetic construct
QVQLQESGPGLVKPSETLSLTCTVSGGSISSYYWSWIRQPPGKGLEWIGYIYYSGSTNYNPSLKSRVTISVDTSKNQFSLKLTSVTAADTAVYYCATYYYDSSGYYYGFEYWGQGTLVTVSS

SEQ ID NO: 18611 - protein, 118 aa, Artificial Sequence
  Synthetic construct
QVQLVQSGAEVKKPGSSVKVSCKASGGTFSSYAISWVRQAPGQGLEWMGGNIPIFGTANYAQKFQGRVTITADESTSTAYMELSSLRSEDTAVYYCATYYGDQDFDYWGQGTLVTVSS

SEQ ID NO: 18612 - protein, 119 aa, Artificial Sequence
  Synthetic construct
QVQLQESGPGLVKPSETLSLTCTVSGGSISSYYWSWIRQPPGKGLEWIGYIYYSGSTNYNPSLKSRVTISVDTSKNQFSLKLSSVTAADTAVYYCARDHAWGGYWFDPWGQGTLVTVSS

SEQ ID NO: 18613 - protein, 128 aa, Artificial Sequence
  Synthetic construct
QVQLVQSGSELKKPGASVKVSCKASGYTFTSYAMNWVRQAPGQGLEWMGWINTNTGNPTYAQGFTGRFVFSLDTSVSTAYLQISSLKAEDTAVYYCARDSSGFYYGGPFYYYYYMDVWGKGTTVTVSS

SEQ ID NO: 18614 - protein, 127 aa, Artificial Sequence
  Synthetic construct
QVQLVESGGGVGQPGRSLRLSCAASGFSFSSYGMNWVRQAPGKGLEWVAVIWNDGNNKYYADSVKGRFTISRDNSKNTLFLQMNSLRAEDTAVYYCARDLGQLAGGYYYYYYGMDVWGQGTTVTVSS

SEQ ID NO: 18615 - protein, 123 aa, Artificial Sequence
  Synthetic construct
HVQLQQWGAGLLKPSETLSLNCAVYGGSLSIYYWTWIRQPPGKGLEWIGEINYSGSTDYNPSLRSRVSISIDTSKNQFSLKLSSVTAADTAVYYCARKPLLHSTVNPGAFDIWGQGTMVTVSS

SEQ ID NO: 18616 - protein, 123 aa, Artificial Sequence
  Synthetic construct
QVQLVQSGAEVKKPGSSVKVSCKASGGTFSTYAISWVRQAPGQGLEWMGGTIPIFGTANYAQKFQGRVTITADESTSTAYMELSSLRSEDTAVYYCASFSEDTPMDDYYFDYWGQGTLVTVSS

SEQ ID NO: 18617 - protein, 126 aa, Artificial Sequence
  Synthetic construct
QITLKESGPTLVKPTQTLTLTCTFSGFSLSTSGLGVGWIRQPPGKALEWLALIYWDDDKRYSPSLRSRLTITKDTSKNQVVLTMTNMGPVDTATYYCAHRLHPYTRSSWDGWFDPWGQGTLVTVSS

SEQ ID NO: 18618 - protein, 130 aa, Artificial Sequence
  Synthetic construct
QVQLVQSGAEVKKPGSSVKVSCRASGGTFSNYAISWVRQAPGQGLEWMGGIIPIFGTAIYAQKFQGRVTITADESTSTAYVELSSLRSEDTAVYYCARDPGYYGSGSVADPQYYYYMDVWGKGTTVTVSS

SEQ ID NO: 18619 - protein, 125 aa, Artificial Sequence
  Synthetic construct
EVQLVESGGGLVKPGGSLRLSCAASGFSFSSYNMNWVRQAPGKGLEWVSSISSSSSHIYYADSVKGRFIISRDNAKNSLYLQMNSLRAEDTAVYYCARVDYYASGNYGLGPSDFWGQGTLVTVSS

SEQ ID NO: 18620 - protein, 125 aa, Artificial Sequence
  Synthetic construct
EVQLVQSGAEVKKPGESLKISCKGSGYNFTTYWIVWVRQMPGKGLEWMGIIYPGDSDTTYSPSFQGQVTISVDKSIGTAYLQWSSLKASDTAMYYCARRQKILYHYGSSSPPDFWGQGTLVTVSS

SEQ ID NO: 18621 - protein, 121 aa, Artificial Sequence
  Synthetic construct
QLQLVESGGGVVQPGRSLRLSCAASGFAFNNYGIHWVRQAPGKGLEWVAVIWHDGNKNYYADSVKGRFTVSRDNSKNTLYLQMNSLRAEDTAMYYCAREGIVGTTTGLDYWGQGTLVTVSS

SEQ ID NO: 18622 - protein, 123 aa, Artificial Sequence
  Synthetic construct
QITLKESGPTLVKPTQTLTLTCTCSNFSLTTSGVGVGWIRQPPGKALEWLALIYWDDDERYSPSLKNRLTITKDTSKNHVVLTMTNMDPVDTATYYCAHRTPSGWYGDWFDPWGQGTLVTVSS

SEQ ID NO: 18623 - protein, 129 aa, Artificial Sequence
  Synthetic construct
QVQLVQSGAEVKKPGASVKVSCKASGYTFSSYGISWVRQAPGQGLEWMGWISAYNGNTNYAQKLQGRVTMTTDTSTSTAYMELRSLKSDDTAIYYCARVIVSSWYRGGNYYYYYYMDVWGKGTTVTVSS

SEQ ID NO: 18624 - protein, 128 aa, Artificial Sequence
  Synthetic construct
QVQLVQSGSELKKPGASVKISCKASGYTFTNYAMNWVRQAPGQGLEWMGWINTNTGNPTYAQGFTGRFVFSLDTSVSTAYLQISSLKAEDTAVYFCARDWDYYGSGGYYYYYYYMDVWGKGTTVTVSS

SEQ ID NO: 18625 - protein, 129 aa, Artificial Sequence
  Synthetic construct
QVQLQESGPGLVKPSENLSLTCTVSGYSISSGYYWGWIRQPPGKGLEWIGSVYHSGSTYYNPSLKSRVTVSVDTSKNQVSLKLSSVTAADTAVYYCARAIPPSGSYFYLYYYYYYMDVWGKGTTVSASS

SEQ ID NO: 18626 - protein, 119 aa, Artificial Sequence
  Synthetic construct
EVQLVESGGGLVQPGGSLRLPCAASGFTFSSFWMSWVRQAPGKGLEWVASIKQDGSEKYYVDSVKGRFTISRDNAKNSLYLQMHSLRAEDTAVYYCARLSTSSWHWAYWGQGTLVTVSS

SEQ ID NO: 18627 - protein, 127 aa, Artificial Sequence
  Synthetic construct
QVQLQESGPGLVKPSETLSLTCTVSGGSINNYYWSWIRQPPGKRLEWIGSIFYSGSTNYTPSLKSRVTISLDASKNQFSLRLSSVTAADTALYYCVRDSRPTHDFSTSHYNYALDVWGQGTTVVVSS

SEQ ID NO: 18628 - protein, 127 aa, Artificial Sequence
  Synthetic construct
QVQLEESGGGVVQPGRSLRLSCAASEFTFSNYCMHWVRQAPGKGLEWVAFISEDGSKKYYADSVKGRFTISRDNSKNTLYLQMNTLRAEDTAVYYCAKADGGYYDSSAYYSTAIDYWGQGTLVTVSS

SEQ ID NO: 18629 - protein, 126 aa, Artificial Sequence
  Synthetic construct
QLQLQESGPGLVKPSETLSLTCTVSGGSISTSNYYWAWIRQPPGKGLEWIGNIYYSGITYYNPSLKSRVTMSVDTSKNQFSLKLSSVTAADTAVYYCARIGRYFGSGTYFGGMDVWGKGTTVSVSS

SEQ ID NO: 18630 - protein, 122 aa, Artificial Sequence
  Synthetic construct
QVQLVESGGGVVQPGRSLRLSCAASGFTFSSYGMHWVRQAPGKGLEWVAVISYDGNNKYYADSVKGRFTISRDNSKNTLYLQMNSLRAEDTAVYYCAKDLGFGYDGGDSQHWGQGTLVTVSS

SEQ ID NO: 18631 - protein, 121 aa, Artificial Sequence
  Synthetic construct
QVQLVESGGGVVQPGRSLRLSCAASGFTFSSYAMHWVRQAPGKGLEWAAVISYDGNNKYYADSVKGRFTISRDNSKNTLYLRMNSLRAEDTAVYYCARSGSGSYYGAFDIWGQGTMVTVSS

SEQ ID NO: 18632 - protein, 123 aa, Artificial Sequence
  Synthetic construct
QLQLQESGPGLVKPSETLSLTCTVSGGSITRNNYYWGWIRQPPGKGLEWIGNIYYSGITYYNPSLKSRVTISVDTSKNQFSLKLSSVTAADTSVYYCAQYYSGWDRDDAFDIWGQGTMVTVSS

SEQ ID NO: 18633 - protein, 115 aa, Artificial Sequence; identical to SEQ ID NO: 10149
  Synthetic construct

SEQ ID NO: 18634 - protein, 128 aa, Artificial Sequence
  Synthetic construct
QVQLQESGPGLVKPSETLSLTCTVSGGSINSYYWTWIRQPPGKGLEWIGYIYYSGSTNYNPSLKSRVTISVDTSKNQFSLKLSSVTAADTAVYYCAREGSGYDSWSVLSPLNWYFDLWGRGTPVTVSS

SEQ ID NO: 18635 - protein, 122 aa, Artificial Sequence
  Synthetic construct
QVQLVESGGGAVQPGRSLRLSCAASGFTFSSHGIHWVRQAPGKGLEWVAVISYDGSDDYYADSVKGRFTISRDNSKNTLYLQMNSLRPEDTAVYYCAREGMVGAAGRSLDYWGQGTLVTVSS

SEQ ID NO: 18636 - protein, 118 aa, Artificial Sequence
  Synthetic construct
QVQLVESGGGVVQPGRSLRLSCAASGFTFSTFAMHWVRQAPGKGLEWVAVISFDGSNKYYGDSVKGRFAISRDTSKNTLYLQMNSLTVEDTAVYYCARSENYYYMDVWGKGTTVTVSS

SEQ ID NO: 18637 - protein, 120 aa, Artificial Sequence; identical to SEQ ID NO: 1717
  Synthetic construct

SEQ ID NO: 18638 - protein, 122 aa, Artificial Sequence
  Synthetic construct
QVQLQESGPGLVKPSETLSLTCSVSGGSISSYYWSWIRQPPGKGLEWIGYISYTGSTNYNPSLKSRVTISVDTSKNQFSLKLSSVTAADTAVYYCASYYYDSSGYPYGMDVWGQGTTVTVSS

SEQ ID NO: 18639 - protein, 120 aa, Artificial Sequence
  Synthetic construct
QVQLVQSGAEVKKPGASVKVSCKVSGYTLTELSMHWVRQAPGKGLEWMGGFDPEDGETIYAQKFQGRVTMTEDTSTDTAYMELSSLRSEDTAVYYCATTYALLARPFDYWGQGTLVTVSS

SEQ ID NO: 18640 - protein, 125 aa, Artificial Sequence
  Synthetic construct
QLQLQESGPGLVKPSATLSLTCSVSGGSISSSSYYWGWIRQPPGKGLEWIGHIFYSGITYNNPSLRSRVTISIDTSKNQFSLKLNSVTAADTAVYYCARFAYNSVETFIGGFDIWGQGTMVTVSS

SEQ ID NO: 18641 - protein, 126 aa, Artificial Sequence
  Synthetic construct
EVQLVQSGAEVKKPGESLKISCKGSGYSFTNYWIGWVRQLPGKGLEWMGTIYPRDSHTTYSPSFQGQVTISADKSISTAYLQWSSLKASDTAMYYCARRAAAGKVGMYYYYGMDVWGQGTTVTVSS

SEQ ID NO: 18642 - protein, 123 aa, Artificial Sequence
  Synthetic construct
QVQLVESGGGVVQPGRSLRLSCAASGFIFSSYGMHWVRQAPGKGLEWVAVVWFDGTNKYYADSVKGRFTISRDNSKNTLNLQMNSLRGEDTAVYYCAREGVAVAGTGNALDYWGQGTLVTVSS

SEQ ID NO: 18643 - protein, 120 aa, Artificial Sequence
  Synthetic construct
EVQMLESGGGLVQPGGSLRLSCAASGFTFRNYAMSWVRQAPGKGLEWVSVISGSGGRAYYADSAKGRFTISRDNSKNTLYLQMNSLRADDTAMYYCAADFWSGRFGMDVWGQGTTVSVSS

SEQ ID NO: 18644 - protein, 121 aa, Artificial Sequence
  Synthetic construct
QVQLVQSGAEVKKPGASVKVSCKASGYILTNYFIHWVRQAPGQGLEWMGIFNPSDHTTTYEQRLQGRLTMTGDTSTSTVYMELSSLRSDDTAVYYCAREGSGTYYSVLDSWGQGTLVTVSS

SEQ ID NO: 18645 - protein, 134 aa, Artificial Sequence
  Synthetic construct
EVQLVESGGGLVKPGGSLRLSCAASGFSFSNYNMNWVRQAPGKGLEWVSSISSSSVYIHYADSVKGRFTISRDDAKNSVFLQINRLRAEDTAMYYCARGGRRLAIAWWRKQEFESSGYHYFDQWGQGTLVTVSS

SEQ ID NO: 18646 - protein, 122 aa, Artificial Sequence
  Synthetic construct
QVQLVQSGTEVKKPGSSVKVSCKASGGTFSSYTVSWVRQAPGQGLEWMARIFPILGVADYAQRFQGRVTVTADKSTSTAYMELSSLRSEDTAVYYCAREGTAASNSHWFAPWGQGTLVTVSS

SEQ ID NO: 18647 - protein, 135 aa, Artificial Sequence
  Synthetic construct
QVQLVQSGAEVKKPGASVKVSCKASGYTFTSYYMHWVRQAPGQGLEWMGIINPSGGSTSYAQKFQGRVTMTRDTSTSTVYMELSSLRSEDTAVYYCARDGTYYDFWSGYYWGQERGYYYYGMDVWGQGTTVTVSS

SEQ ID NO: 18648 - protein, 121 aa, Artificial Sequence
  Synthetic construct
QVQLVQSGAEVKKPGASVKVSCKVSGYTLPELSIHWVRQAPGKGLEWMGGFDPEDAKTIYAQKFQGRITMTEDTSTDTAYMELSNLRSEDTAFYYCATSPAIVRQIWFDPWGQGTLVTVSS

SEQ ID NO: 18649 - protein, 123 aa, Artificial Sequence
  Synthetic construct
EVQLVESGGGLVQPGGSLRLSCAASGFTFSNYNMNWVRQAPGKGLEWISYISRSSSTIYYADSVKGRFTISRDNAKNSLSLQMNSLRDEDTAVYYCARPQGPSSYYYYGLDVWGQGTTVSVSS

SEQ ID NO: 18650 - protein, 121 aa, Artificial Sequence
  Synthetic construct
QVQLVESGGGVVQPGRSLRLSCAASGFTFSIYAIHWVRQAPGKGLEWVAVISYDGINKYYADSVKGRLTISRDNSKNTLYLQMNSLRAEDTAVYYCAKSSGGNYLDAFDIWGQGTMVTVSS

SEQ ID NO: 18651 - protein, 116 aa, Artificial Sequence
  Synthetic construct
QVQLVESGGGVVQPGRSLRLSCAASGITFKDYGMHWVRQAPGRGLEWVAFISYDGSVQHYGDSVKGRFTISRDDLKNTLFLQMNSLRADDTAVYYCAKGATKVDYWGQGTLVTVSS

SEQ ID NO: 18652 - protein, 116 aa, Artificial Sequence
  Synthetic construct
EVQLVESGGGLVQPGGSLRLSCAASGFTVSTNYMSWVRQAPGKGLEWVSAIYGGGNTYYADSVKGRFTISRDSSRYTLYLQMNTLRPEDTAVYYCAREVTAAFDIWGQGTMVTVSS

SEQ ID NO: 18653 - protein, 127 aa, Artificial Sequence
  Synthetic construct
EVQLVESGGGLVQPGGSLRLSCAASGFTFSSYWMSWVRQAAGKGLEWVASIKQDGSEKYYVDSVKGRFTISRDNSKNSLYLQMNSLRAEDTAVFYCARHLPTCSGGPCYSFSWFDPWGQGTLVTVSS

SEQ ID NO: 18654 - protein, 119 aa, Artificial Sequence
  Synthetic construct
QVHLQQWGAGLLKPSETLSLTCAVYGRSLSDDYWSWIRQAPGKGLEWIGETSPSGTTKYSPSLRGRGTISLDKSKNQFFLRLASVTAADTAVYFCARVRKRFVETFDIWGQGTLVTVSS

SEQ ID NO: 18655 - protein, 120 aa, Artificial Sequence
  Synthetic construct
QVQLQESGPGLVKPSQTLSLTCIVSGGSISSGSYYWSWIRQPAGKGLEWIGRIYTSGSTNYNPSLKSRVTISVDTSKNQFSLKLSSVTAADTAVYFCAREGSWKYVFDYWGQGTLVNVSS

SEQ ID NO: 18656 - protein, 112 aa, Artificial Sequence
  Synthetic construct
QVQLQESGPGLVKPSETLSLTCIVSGGSISSHYWSWIRQPPGKGLEWIGYIYYSGSTNYNPSLKSRVTISVDTSKNQFSLNLTSVTAADTAVYYCARGFDYWGQGTLVTVSS

SEQ ID NO: 18657 - protein, 129 aa, Artificial Sequence
  Synthetic construct
EVQLVEFGGGLVQPGRSLRLSCATSGFTFEDFDMHWVRQAPGKGLEWVSGSTWNSGIIGYADSVKGRFTTSRDNAKNSLYMQMNNLREEDTALYYCAKDIGRYDHYNIFGRVGGAFDIWGQGTMVTVSS

SEQ ID NO: 18658 - protein, 127 aa, Artificial Sequence
  Synthetic construct
EGQLVESGGGLVKPGGSLRLSCAASGFTFRNAWMSWVRQGPGKGLEWVGRIKSKTNGGTTDYAAPVKGRFTISRDDSKNTLYLQMNSLKTEDTAVYYCTTAPIAATGAVSFDYMDVWGKGTAVSVST

SEQ ID NO: 18659 - protein, 125 aa, Artificial Sequence
  Synthetic construct
QVQLVQSGSEVKKPGSSVKVSCKASGGTFSSYTISWVRQAPGQGLEWMGRIIPILGITNYAQKFQGRVTITADESTTTAYMELSSLRSEDTAVYYCARSLFDTLTGYEVHYFDYWGQGTLVTVSS

SEQ ID NO: 18660 - protein, 130 aa, Artificial Sequence
  Synthetic construct
QVQLVQSGAEVKKPGASVKVSCKASGYTFTSYYMHWVRQAPGQGLEWMGIINPSGGSTSYAQKFQGRVTMTRDTSTSTVYMELSSLRSEDTAVYYCARGESMETWIQLWETYYYYGMDVWGQGTTVTVSS

SEQ ID NO: 18661 - protein, 117 aa, Artificial Sequence
  Synthetic construct
QVQLQESGPGLVKPSETLSLTCIVSGYSISSGYYWGWIRQPPGKGLEWIGNISRGGSTYYNPSLKSRVTISVDTSKNQFSLKLSSVTAADTAVYYCARVRPLDFDYWGQGTLVTASS

SEQ ID NO: 18662 - protein, 117 aa, Artificial Sequence
  Synthetic construct
QVQLAQSGAEVKKPGASVKVSCKASGYTFTSYGISWVRQAPGQGLEWMGWISAYNGNTKNAQKLQGRVTMTTDTSTTTAYMELRSLRSDDTAVYYCARETNWGSDYWGQGTLVTVSS

SEQ ID NO: 18663 - protein, 119 aa, Artificial Sequence
  Synthetic construct
EVQLVQSGAEVKKPGESLKISCKGSGYSFISHWIGWVRQMPGKGLEWMGIIYPGDSDTRYSPSFQGQVTISVDKSISTAYLQWSSLKTSDTAMYYCARHMGGDYAAEYWGQGTLVTVSS

SEQ ID NO: 18664 - protein, 126 aa, Artificial Sequence
  Synthetic construct
EVQLVESGGGLVQPGRSLRLSCTASGFTLGDYAMSWFRQAPGKGLEWVGFIRSKAYGGTTQYAASVKGRFTISRDDSKSIAYLQMNSLNTEDTAVYYCTRVIAGAAPGTVNWFDPWGQGTLVTVSS

SEQ ID NO: 18665 - protein, 120 aa, Artificial Sequence
  Synthetic construct
QVQLVQSGAEVKKPGASVRVSCKVFGYTLTEVAIHWVRQAPAKGLEWMGGFDPDQTETIYAQNFQDRVTMTEDTSTDTAYMELSGLRSEDTAVYYCATGPTLRGNWFDPWGQGTLVTVSS

SEQ ID NO: 18666 - protein, 70 aa, Artificial Sequence
  Synthetic construct
WDDGSNKYYADSVKGRFTISRDNSKNTLYLQMNSLRAEDAAVFYCARARGGSYSAPFDYWGQGTLVTVSS

SEQ ID NO: 18667 - protein, 125 aa, Artificial Sequence
  Synthetic construct
QLQLQESGPGLVKPSETLSLTCTVSGGSISSSSYYWGWIRQPPGKGLEWIGNIYYSGSTYYNPSLESRVTLSVDTSKNQFSLKLSSVTAADTAVYYCASFVRYCSSTSCYNFDHWGQGTLVTVSS

SEQ ID NO: 18668 - protein, 123 aa, Artificial Sequence
  Synthetic construct
QVQLVESGGGLVKPGGSLRLSCAASGFIFSDYYMTWIRQAPGKGLEWVSYISNSGDSKYYADSVKGRFTISRDNAKTSLYLQMSSLRVEDTAVYYCARDRGLTQLDENWFDPWGQGTLVTVSS

SEQ ID NO: 18669 - protein, 125 aa, Artificial Sequence
  Synthetic construct
EVQLVESGGGLVKPGGSLRLSCAASGFTFSSYSMNWVRQAPGQGLEWVSSISITSTYISYADSLKGRFTISRDNAKSSLYLQMNSLRAEDTAVYYCARDLDWYDSSGSWPPLDYWGPGTLVTVSS

SEQ ID NO: 18670 - protein, 117 aa, Artificial Sequence
  Synthetic construct
QVQLQQWGAGLLKPSETLSLTCAVYGGSFSGYYWTWIRQPPGKGLEWIGEINQSENTNYNPSLKSRVTISVDTSKNQFSLKVTSMTAADTAVYFCARGVWSGEVDVWGQGTTVTVSS

SEQ ID NO: 18671 - protein, 123 aa, Artificial Sequence
  Synthetic construct
EVQLLESGGGLVQPGGSLRLSCAASGLIFSSYAMSWVRQAPGKGLEWVSVISGSGGSTNYADSVKGRFTISRDNSKNTLYLQMNSLRAEDTAVYYCAKPVAARGMGKDWFDPWGQGTLVTVSS

SEQ ID NO: 18672 - protein, 122 aa, Artificial Sequence
  Synthetic construct
EVHLVESGGGFAQPGGSLRLSCAASGITFSVHYMNWVRQAPGKGLEWVGRTKNKANNYTTEYAASVKGRFTISRDASKNSLYLQMNGLKTEDTAVYYCIKEGASGGPDFEYWGQGTLVTVAS

SEQ ID NO: 18673 - protein, 122 aa, Artificial Sequence
  Synthetic construct
EVQLLESGGGLVQPGGSLRLSCTASGFSFIDYATSWVRQAPGKGLEWVSGISGSSDSTYYADSVKGRFTISRGNSKNTLYLEMNSLRAEDTAVYYCAKEALNIVVVTAPRYWGQGSLVTVSS

SEQ ID NO: 18674 - protein, 123 aa, Artificial Sequence
  Synthetic construct
QMQLVQSGPEVKKPGTSVKVSCKASGFTFTTSAVQWVRQARGQRLEWIGWIVVGSGNTNYAQKFQERVTITRDMSTTTAYMELSSLRSEDTAVYYCAAPYCSSTSCYDGFDIWGRGTMVTVSS

SEQ ID NO: 18675 - protein, 119 aa, Artificial Sequence
  Synthetic construct
EVQLVESGGTLVQPGGSLRLSCAASGFTFSDYSMNWVRQAPGKGLEWISYISTHSRTIYYADSVKGRFTISRDNAKNSLFLQMHSLRDEDTALYYCAASEGPFGWFDPWGQGTLVTVSS

SEQ ID NO: 18676 - protein, 121 aa, Artificial Sequence
  Synthetic construct
QVHLQESGPGMVKPSETLSLTCTVSDGSIASYFWSWIRQPPGKRLEWIGYVSNGGATKYNPSLKSRGNISIKPSHNQFFLQLTSLSIADTAFYFCARGRGGSPTEHWFDPWGQGILVIVSS

SEQ ID NO: 18677 - protein, 112 aa, Artificial Sequence
  Synthetic construct
QVQLLESGPGLVKPSETLSLMCTVSGASISSYYWSWFRQPPGKGLEWIGYIYSSGSTNYNPSLNSRVTMSVDTSKNQFSLKLSSVTAADTAVYYCARDFSTWGQGTLVTVSS

SEQ ID NO: 18678 - protein, 125 aa, Artificial Sequence
  Synthetic construct
QVQLQESGPGLVRPSQTLSLTCIVSGGSITSGLYYWSWIRQPAGKGLEWIGRIYTSGRTNYNPSLESRVTISVDTSKNQFSLKLRSVTAADTAVYFCARVGSGTYYSDYYGMGVWGQGTTVTVSS

SEQ ID NO: 18679 - protein, 123 aa, Artificial Sequence
  Synthetic construct
QITLKESGPTQVKPTQTLTLTCTFSGFSFNTSRVGVGWIRQPPGKALEWLALIYWDGDKRYSPSLKSRLTISKDTSKNQVVLTMTKMDPVDTATYYCAHRTPSNWFGDWFDPWGQGTLVTVSS

SEQ ID NO: 18680 - protein, 126 aa, Artificial Sequence
  Synthetic construct
QVQLVQSGSELKKPGASVKVSCTASGYSFTTYAMNWVRQAPGQGLEWMGWINTNTGNPTYAQGFTGRFVFSLDTSVSTAYLQISSLKAEDTAVYYCARDFDAMVRGGYYYYYMDVWGKGTTVTVSS

SEQ ID NO: 18681 - protein, 126 aa, Artificial Sequence
  Synthetic construct
EVQLVESGGDLVQPGGSLRLSCAASGFTFSGYSMNWVRQAPGKGLEWVSYISSSSSTIYYADSVKGRFTISRDNAKNSLYLQMNSLRAEDTAVYHCARRSAPDSSSWYREKFFDLWGQGTLVTVSS

SEQ ID NO: 18682 - protein, 127 aa, Artificial Sequence
  Synthetic construct
QLQLQESGPGLVKPSETLSLTCTVSGVSINSTVSYWGWVRQPPGKGLEWIGSMYYGGSTNYNPSLKSRLTISVDTSKNQLSLKLTSVTAADTAVYYCARHSNYYDSSAYVNTSPDYWGQGTLVTVSS

SEQ ID NO: 18683 - protein, 123 aa, Artificial Sequence
  Synthetic construct
EVQLVESGGGLVEPGGSLRLSCTASGFTFSHFTMNWVRQAPGKGLEWVSSITSSSRYIEDADSVKGRFTISRDDAKNSLYLQMNSLRAEDTAVYYCARGRDFGSGPQRSFDSWGQGTLVTVSS

SEQ ID NO: 18684 - protein, 124 aa, Artificial Sequence
  Synthetic construct
QVQLVQSGSELKKPGASVKVSCKASGYTFTKYAMNWVRQAPGQGLEWMGWINTNTGNPTYAQGFRGRFVFSLDTSVSTAYLQISSLKAEDTAVYFCARDYVSDIPRNYYYMDVWGKGTTVTVSS

SEQ ID NO: 18685 - protein, 119 aa, Artificial Sequence
  Synthetic construct
EVQLVESGGGLVQPGRSLRLSCAASGFNFDKYAMHWVRQAPGKGLEWVSGISWNSGSIGYADSVKGRFTISRDNAKNSLYLQMNSLRPEDTALYYCAKSVLVPDPLDVWGKGTTVTVSS

SEQ ID NO: 18686 - protein, 116 aa, Artificial Sequence
  Synthetic construct
EVQLVESGGALVQPGGSLRLSCAASGFTFSGYWMHWVRQAPGKGPVWVSHINNDGSRTTYADSVKGRFTISRDNAKNTLYLQMNSLRAEDTAVYHCVRDSWGIHDWGQGTLVTVSS

SEQ ID NO: 18687 - protein, 123 aa, Artificial Sequence
  Synthetic construct
QVQLQESGPGLVKPSGTLSLTCAVSGGSISNNNWWSWVRQPPGKGLEWIGEIYHSGSTNYSPSLRSRVTISVDKSKNQFSLKLNSVTAADTAVYYCARDLYTNGWSRGDFDLWGRGTLVTVSS

SEQ ID NO: 18688 - protein, 121 aa, Artificial Sequence
  Synthetic construct
QVQLVESGGGVVQPGRSLRLSCAASGFTFSGYAMHWVRQAPGKGLEWVALISYDGINKYYADSLKGRFTISRDNSKNTLYLQMNSLRADDTALYYCARAGGGSYFGHFDYWGQGTLVTVSS

SEQ ID NO: 18689 - protein, 127 aa, Artificial Sequence
  Synthetic construct
QVQLQESGPGLMKPSETLSLTCTVSGDSISSGTYFWGWIRQPPGKGPEWIGSMNYSGSTYYNPSLKSRLTISVDTSKNQFSLKLTSVTAADTAVYYCARHSSYYDSSGYVNTSPDYWGQGTLVTVYS

SEQ ID NO: 18690 - protein, 121 aa, Artificial Sequence
  Synthetic construct
EVQLVESGGGLVQPGGSLRLSCAASGFTLSSYWMSWVRQTPGKGLEWVANINQDGSEKYYVDSVTGRLTISRDNAKNSLYLQMNSLRAEDTAVYYCARGARDYGGNPIDYWGQGTLVTVSS

SEQ ID NO: 18691 - protein, 123 aa, Artificial Sequence
  Synthetic construct
QVQLQESGPGLVKPSQTLSLTCSVSGGSIYSGGYYWSWIRQHPGKGLEWIGYIYYSGDTYYNPSLKSRVTISVDTSKNQFSLKLRSVTAADTAVYYCARGVMGATTEAHFDYWGQGTLVTVSS

SEQ ID NO: 18692 - protein, 122 aa, Artificial Sequence
  Synthetic construct
QVQLVESGGGVVQPGRSLRLSCAASGFTFSSHGMHWLRQAPGKGLELVAVIWYDGSNKFYGDSVKGRFTISRDNSKDTLFLQMNSLRPEDTAVYYCARDPSPALSLYYFDYWGQGTLVTVSS

SEQ ID NO: 18693 - protein, 120 aa, Artificial Sequence; identical to SEQ ID NO: 10465
  Synthetic construct

SEQ ID NO: 18694 - protein, 131 aa, Artificial Sequence
  Synthetic construct
EVQLVESGGGLVKPGGSLRLSCAASGFSFSSHSMNWVRQAPGKGLEWVSSISSSTSFRYYADSVKGRFTISRDNAKNSLYLQMNSLRAEDTAVYYCARVSQTGVRYFDWSLATGHYYMDVWGKGTTVTVSS

SEQ ID NO: 18695 - protein, 121 aa, Artificial Sequence
  Synthetic construct
QVQLVESGGGVVQPGRSLRLSCAASGFTFSSYAMHWVRQAPGKGLEWVAVISYDGDNKYYPDSVKGRFTISRDNSKNTLYLQMNSLRTEDTAVYFCARSSGGGYFSYMDVWGKGTTVTVSS

SEQ ID NO: 18696 - protein, 125 aa, Artificial Sequence
  Synthetic construct
QVQLVQSGAEVKKPGASVKVSCKASGYTFTSFAISWVRQAPGQGLEWMGWVSAYDGNTNYTQKLQGRVTMTTDTSTSTAYMELRSLRSDDTAVYYCARDQLWLLGVYYYYGMDVWGQGTTVTVSS

SEQ ID NO: 18697 - protein, 119 aa, Artificial Sequence
  Synthetic construct
EVQLVQSGAEVKKPGESLRISCKGSGYTFASNWITWVRQMPGKGLEWMGRIDPGDPYSNSSPSFQGHATLSLDKAINTAYLHWSSLKASDTAMYYCARVNLVGGGPDYWGQGTLVTVSS

SEQ ID NO: 18698 - protein, 119 aa, Artificial Sequence
  Synthetic construct
QVQLVESGGGVVQPGRSLRLSCAASGFTFNIYAIHWVRQAPGKGLEWVALISYDGSNKYYADSVKGRFTISRDNSKNTLYLQMKSLRAEDTAVYYCARTNGYKNRFDYWGQGTLVTVSS

SEQ ID NO: 18699 - protein, 126 aa, Artificial Sequence
  Synthetic construct
QLQLQESGPGLVKPSETLSLTCTVSGGSISSSSFFWGWIRQPPVKGLEWIGSIYYSGSTYYNPSLKSRVTMSVDTSKNQFSLKLSSVTAADTAVYYCARERFLENGYESYNWFDPWGQGTLVTVSS

SEQ ID NO: 18700 - protein, 116 aa, Artificial Sequence
  Synthetic construct
EVQLVESGGGLVQPGGSLKLSCAGSGFIFSGSAMHWVRQASGKGLEWVGRIRSKANNYATAYAASVRGRFTISRDDSINTAYLQMNSLKIEDTAVYYCTPGSGSPRFQGTLVTVSP

SEQ ID NO: 18701 - protein, 137 aa, Artificial Sequence
  Synthetic construct
QVQVVQSGAEVKKPGASVKVSCKVSGYTLTELSMHWVRQAPGKGLEWMGGFDPEDAETIYAQRFQGRVTMTEDTSTDTAYMELSSLRSEDTAVYYCATAPAIAATGTAPAITAAGTIYYYYYGMDVWGQGTTVTVSS

SEQ ID NO: 18702 - protein, 125 aa, Artificial Sequence
  Synthetic construct
EVLLEQSGAEVKKPGESLKISCKTSGYSFTSHWIGWVRQMPGKGLEWMGIIYPADSDTRYSPSFKGQVTISADKSITTAYLQWNSLRASDTAMYYCARHGETGNRKYQYFYMDVWGKGTTVTVSS

SEQ ID NO: 18703 - protein, 122 aa, Artificial Sequence
  Synthetic construct
QVQLVQSGAEVKKPGASVKISCKASGYTFTSYYMHWVRQAPGQGLEWMGMINPDAGSTGYTQKFQGRVTMTMDTSTTTVYMELSSLRSEDTAVYYCARDIVLVPAANALDIWGQGTMVTVSS

SEQ ID NO: 18704 - protein, 120 aa, Artificial Sequence
  Synthetic construct
QVQLVESGGGVVQPGRSLRLSCAASGFTFSSYAMHWVRQAPGKGLEWVAVISYDGSNQYYADSVKGRFTISRDNSKNTLYLQMNSLRPEDTAVYYCARNYYDSSDAFDIWGQGTMVTVSS

SEQ ID NO: 18705 - protein, 128 aa, Artificial Sequence
  Synthetic construct
QVQLVESGGGVVQPGRSLRLSCAASGFTFRSYGMHWVRQAPGKGLEWVAVISFDGSNKYFGDSVKGRFTISRDNSKNTLYLQMHSLRAEDTAVYYCARAHSSSWYNPLFHPSDAFDVWGQGTMVTVSS

SEQ ID NO: 18706 - protein, 121 aa, Artificial Sequence
  Synthetic construct
EVQLLESGGGLVQPGGSLRLSCAASGFTFISYAMSWVRQAPGKGLEWVSAISGSGGSTYYADSVKGRFTISRDNSKNTLYLQMNSLRAEDTAVYHCAKGSTIVLMVFATRWGQGTLVTVSS

SEQ ID NO: 18707 - protein, 122 aa, Artificial Sequence
  Synthetic construct
QVQLVQSGAEVKKPGSSVKVSCKASGDTFSSYAITWVRQAPGQGLEWMGGIIPIFGTTNYAQKFQGRVTITADESTSTAYMELSSLRSEDTAVYYCVRVYQYEGTGSYGDYWGQGTLVTVSS

SEQ ID NO: 18708 - protein, 123 aa, Artificial Sequence
  Synthetic construct
QVQLVQSGAEVKKPGASVKVSCKASGYTFASYYIHWVRQAPGQGLEWMGIINPSGTSTSYAQTFQGRVAMTGDTSTSTVYMELSSLRSEDTAVYYCARGSGPIPSKWYFFDYWGQGTLVTVSS

SEQ ID NO: 18709 - protein, 126 aa, Artificial Sequence
  Synthetic construct
EVQLVESGGRLVKPGGSLRLSCAASGFTFSSYNMNWVRQAPGKGLEWVSSISSSSTYILYADSVKGRFTISRDNAKNSLYLQMNRLRGDDTAVYYCASAEEDFAVVENYFYGMDVWGRGTTVTVSS

SEQ ID NO: 18710 - protein, 129 aa, Artificial Sequence
  Synthetic construct
EVQLVEFGGGLVQPGRSLRLSCATSGFTFEDFAMHWVRQAPGKGLEWVSGSTWNSGTIGYADSVKGRFITIRDNARNSLYLQMNNLRDEDTALYYCAKDIGRFDHYDAFDRVGGAFDIWGQGTMVTVSS

SEQ ID NO: 18711 - protein, 123 aa, Artificial Sequence
  Synthetic construct
QLQLQESGPGLVKPSETLSLTCTVSGGSISSTNYYWGWIRQPPGKGLEWIGSIYYSGLTYYSPSLKSRVTISVDPSKNQFSLKLTSVTAADTAVYYCARYSSGWRWDEGFDIWGQGTLVTVSS

SEQ ID NO: 18712 - protein, 124 aa, Artificial Sequence
  Synthetic construct
QVQLQQSGPGLLKPSQTLSLTCVISGDDVSRNSAAWNWVRQSPSRGLEWLGRTYHRFKWYHDYAPSVKGRVTFNADTSKNQLSLQLNSVTPEDTGVYYCARDGRGYDYYGMDVWGPGTTVTVSS

SEQ ID NO: 18713 - protein, 121 aa, Artificial Sequence
  Synthetic construct
EAQLVESGGGLVQPGGSLRLSCAASEFIVSRNYMSWVRQAPGKGLEWVSLIYSGGSTYYADSVKGRFTISRDNSKNTLYLQMNSLRAEDTAVYYCARALSVGATWDYFDYWGQGTLVTVSS

SEQ ID NO: 18714 - protein, 124 aa, Artificial Sequence
  Synthetic construct
QITLKESGPTLVKPTQTLTLTCTFSGFSLSTSGVGVGWIRQPPGKALEWLALIYWDDDKRFSPSLKSRLAITKDTSKNQVVLTMTNMDPVDTATYYCAHTGSVPPAMVGAFDMWGQGTMVTVSS

SEQ ID NO: 18715 - protein, 121 aa, Artificial Sequence
  Synthetic construct
QVQLVQSGAEVRKPGASVKVSCKVSGYTLIELSMHWVRQAPGKGLEWMGGFDSEDAETIYAQKFQGRVTMTEDTSTDIAYMELSSLRSEDTAVYYCATVFAVFRTDYFAYWGQGTLVTVSS

SEQ ID NO: 18716 - protein, 128 aa, Artificial Sequence
  Synthetic construct
QVQLVESGGGVVQPGRSLRLSCAASGFTFTGYGMHWVRQAPGKGLEWVAVISYDGSNEYYADSVKGRFTISRDNSKNTLYLQMNSLRAEDTAVYYCAKAHSSSWYSPLFHPTDAFDIWGQGTMVTVSS

SEQ ID NO: 18717 - protein, 119 aa, Artificial Sequence; identical to SEQ ID NO: 2467
  Synthetic construct

SEQ ID NO: 18718 - protein, 127 aa, Artificial Sequence
  Synthetic construct
QVQLVESGGGVVQPGRSLRVSCAASGFTFGSYGMHWVRQAPGKGLEWVAVISDDGSNKHYADSVKGRFTISRDNAKNTLYLQMNTLRPEDTAVYYCAKADGGYYDSSAYYSTAIDYWGQGTPVTVSS

SEQ ID NO: 18719 - protein, 120 aa, Artificial Sequence
  Synthetic construct
EVQLVESGGGLVKPGGSLRLSCAASGFTFSNAWMSWVRQAPGKGLEWVGRINSKTDGGTTDYAAPVKGRFTISRDDSKNTLYLQMNSLKTEDTAVYYCTTDSGNWNVPDWGQGTLVTVSS

SEQ ID NO: 18720 - protein, 121 aa, Artificial Sequence
  Synthetic construct
QVQLQESGPGLVKPSETLSLTCTVSGDSMSNYFWTWIRQPPGKGLEWIGYIYYSGTTNYNPSLKSRVTMSVDTSKNHFSLKLTSVTAADTAIYYCAREAARPRIGGGMDVWGQGTTVTVSS

SEQ ID NO: 18721 - protein, 130 aa, Artificial Sequence
  Synthetic construct
EVQLVQSGAEVKKPGESLKISCKGSGYSFTKYWIAWVRQMPGKGLEWMGFIYPGDSDTRYSPSFQGQVTISADKSISTAYLQWGSLKASDTAMYYCAICGITIFGVVPEPHFYYYGMDVWGQGTTVTVSS

SEQ ID NO: 18722 - protein, 120 aa, Artificial Sequence
  Synthetic construct
QLQLQESGPGLVKPSETLSLTCTVSGGSISSSYYYWGCIRQPPGKGLEWIGSIYSSGSTYYNPSLKSRVTISVDTSKNQFSLKLSSVTAADTAMYYCARHTFDWGGFDYWGQGSLVTVSS

SEQ ID NO: 18723 - protein, 124 aa, Artificial Sequence
  Synthetic construct
EVQLVESGGGLVKPGGSLRLSCAASEFTFSDYSINWVRQAPGKGLEWVSSISNSGSYIYFADSVKGRFTISRDNAKNSLYLQMNSLRAEDTAVYYCARARNFWSGYYPDAFDIWGQGTMVTVSS

SEQ ID NO: 18724 - protein, 128 aa, Artificial Sequence
  Synthetic construct
QVQLQESGPRLVKPSETLSLTCTVSDGSINNYYWSWIRQPPGKGLEWIGYIYHSGTTNYNPSLKSRVTISIDTSKTQFSLKLSSVTAADTAVYYCAREGSGSDFWSAYSPLNWYFDLWGRGTLVTVSS

SEQ ID NO: 18725 - protein, 127 aa, Artificial Sequence
  Synthetic construct
QVQLVQSGAEVKKPGSSVKVSCKASGGTFSSYAISWVRQAPGQGLEWMGGIIPIFGTANYAQKFQGRVTITADESTSTAYMELSSLRSEDTAVYYCARCIGEPGIFNYYYYYYMDVWGKGTTVTVSS

SEQ ID NO: 18726 - protein, 121 aa, Artificial Sequence
  Synthetic construct
QVTLRESGPALVKPTQTLTLTCTLSGFSLPTTGVCVSWIRQPPGKALEWLALIDWADDKYYSTSLKTRLTIFKDTSKNQVVLTMTNMDPVDTATYYCARTREYTNYYMDVWGKGTTVTVSS

SEQ ID NO: 18727 - protein, 121 aa, Artificial Sequence
  Synthetic construct
QVQLVESGGGVVQPGRSLRLSCAASGFTFSSYGIHWVRQAPGKGLEWVAVIWYDGSNKYYADSVKGRFTISRDNSKNTLYLQMNSLRAEDTALYYCARDGAVGDTTGLDYWGQGTLVTVSS

SEQ ID NO: 18728 - protein, 121 aa, Artificial Sequence; identical to SEQ ID NO: 10464
  Synthetic construct

SEQ ID NO: 18729 - protein, 122 aa, Artificial Sequence
  Synthetic construct
EVQLLESGGGLVQPGGSLRLSCAASGFTFINYAMSWVRQAPGKGLEWVSAISGSGESTYYADSVKGRFTISTDNSKNTLYLQMNSLRAEDTAVYYCAKEALNIVVVTAPRYWGQGTLVTVSS

SEQ ID NO: 18730 - protein, 119 aa, Artificial Sequence
  Synthetic construct
QVQLVESGGGLVKPGGSLRLSCAASGFTFSDYYMNWIRQTPGKGLEWVSYISSSGDTIYYADSVKGRFTISRDDAKNSLYLQMNSLRAEDTAVYYCASQQWLRGAFDMWGQGTMVTVSS

SEQ ID NO: 18731 - protein, 120 aa, Artificial Sequence
  Synthetic construct
EVQLLESGGGLVQPGGSLRISCAASGFTFSSSVMSWVRQAPGKGLEWVSVISASGGNKYYADAVKGRFTISRDASKNTLYLQMSSLRVEDTAVYYCAKGDYDFWSGYGHWGQGTLVIVSS

SEQ ID NO: 18732 - protein, 118 aa, Artificial Sequence
  Synthetic construct
EVQLVESGGGLVQPGGSLRLSCAASRFAFSSYDMHWVRQATGKGLEWVSTIDSAGDTYYPGSVKGRFTISRENTKNSLYLQMNSLRVGDTAVYYCARSPGATPYMDVWGEGTTVTVSS

SEQ ID NO: 18733 - protein, 117 aa, Artificial Sequence
  Synthetic construct
QVQLVESGGGVVQPGRSLRLSCAAPGFTFSDYALHWVRQAPGKGLEWVAVISYDGSNKFYADSVKGRFTISRDNSKNTLYLQMNSLRGEDTAVYYCAREKTRASDYWGQGTLVTVSS

SEQ ID NO: 18734 - protein, 126 aa, Artificial Sequence
  Synthetic construct
QVQLVQSGSELKKPGASVEVSCKASGYNFTTYAMNWVRQAPGQGLEWMGWINTNTGNPTYAQGFTGRYVFFLDTSVSTAYLQISSLKAEDTAVYYCARDFDIMLRGGYYYYYMDVWGKGTTVTVSS

SEQ ID NO: 18735 - protein, 122 aa, Artificial Sequence
  Synthetic construct
QVQLVESGGGVVQPGRSLRLSCAASGFTFNNYGMHWVRQTPGKGLEWVALIWQDGSNKYYADSVKGRFTISRDNSKNTLFLQMNSLRAEDTAVYYCARGNTWDYDYNGMDVWGQGTTVTVSS

SEQ ID NO: 18736 - protein, 122 aa, Artificial Sequence
  Synthetic construct
QVQLVQSGAEVKKPGSSVKVSCKASGGTFSSYAISWVRQAPGQGLEWMGGIIPIFGTANYAQKFQGRVTITADESTSTAYMELSSLRSEDTAVYYCARDTAYDSSGYYNSYWGQGTLVTVSS

SEQ ID NO: 18737 - protein, 125 aa, Artificial Sequence
  Synthetic construct
EVQLVQSGAEVKEPGESLRISCKGSGYSFTSWWISWVRQMPGKGLEWMGRIDPSDSYTNYSPSFQGHVTISADKSINTAYLQWSSLKASDTAMYYCARHLGSRGDYGVVNWFDPWGQGTLVTVSS

SEQ ID NO: 18738 - protein, 129 aa, Artificial Sequence
  Synthetic construct
QVQLQESGPGLVRPSQTLSLTCAVSGASISSGSYYWSWIRQPAGKGLEWIGRIFTSGSTNYNPSLKSRVTVSLDTSKNQFSLKLTSVTAADTAVYYCARMQGYCSGGGCYSGYYGMDVWGQGTTVTVSS

SEQ ID NO: 18739 - protein, 128 aa, Artificial Sequence
  Synthetic construct
QLQLQESGPGLVKPSETLSLTCTVSGGSISSSSYYWGWIRQPPGKGLEWIGLIYYSGSTYYKPSFKSRVTISVDTSKNQFSLKLSSVTAADTAVYYCARGGVVVVAAMRMHLNWFDPWGQGTLVTVSS

SEQ ID NO: 18740 - protein, 123 aa, Artificial Sequence
  Synthetic construct
QVQLQESGPGLVNPSETLSLTCSVSGYSISSGYYWGWIRQPPGKGLEWIGSVYHSGSTYYNPSLKSRVTISVDTSENQFSLKLTSVTAADTAVYYCARVLDYYGSGSFGFDFWGQGTMVTISS

SEQ ID NO: 18741 - protein, 134 aa, Artificial Sequence
  Synthetic construct
QVQLVESGGGVVQPGRSLRLSCAASGFTFSSYGMHWVRQAPGKGLEWVAVISYDGSNKYYADSVKGRFTISRDNSKNTLYLQMNSLRAEDTAVYYCAKDAYLYDFWSGYLPRNGGYYYYGMDVWGQGTTVTVSS

SEQ ID NO: 18742 - protein, 118 aa, Artificial Sequence
  Synthetic construct
EVQLVESGGGLVQPGGSLRLSCAASGFTVSSNYMTWVRQAPGKGLEWVSLIYSGGSTFYADSVKGRFTISRDNSKNTLYLQMNSLRAEDTAVYYCARDFIGVPGVDHWGQGTLVTVSS

SEQ ID NO: 18743 - protein, 126 aa, Artificial Sequence
  Synthetic construct
EVQLVESGGGLVQPGRSLRLSCTASGFTFGDYAMSWFRQAPGKGLEWVGFIRSKAYGGTTQDAASVKGRFIISRDDSKSIAYLQMNSLKTEDTAVYYCTRVIAGAAPGTINWFDPWGQGTLVTVSS

SEQ ID NO: 18744 - protein, 120 aa, Artificial Sequence
  Synthetic construct
QVHLVQSGADVMKPGASVKVSCEASGYNFIGFYIHWVRQAPGQGLEWMGWINPNGGGTHYAQKFQGRVSITRDTSTSTVYMELTRLRSDDTAVYYCARCNWNGYSGMDVWGQGTTVTVSS

SEQ ID NO: 18745 - protein, 121 aa, Artificial Sequence
  Synthetic construct
QITLKESGPTLVKPTQTLTLTCTFSGFSLSTSGVGVGWIRQPPGKALEWLALIYWDDDKRYCPSLKSRLTITKDTSKNQVVLTMTNMDPVDTATYYCAHRLVAVAGPFDYWGQGTLVTVSS

SEQ ID NO: 18746 - protein, 130 aa, Artificial Sequence
  Synthetic construct
QVQLVESGGGVVQPGRSLRLSCAASGFTFSSYPMHWVRQAPGKGLEWVALISHDGSNKYYADSVKGRFTISRDNSRNTLYLQVNSLRAEDTAVYYCARDLTGDYDYVWGSYRYNTAFDYWGQGTLVTVSS

SEQ ID NO: 18747 - protein, 123 aa, Artificial Sequence
  Synthetic construct
QLQLQESGPGLVKPSETLSLTCTVSGGSIGSSNYYWGWIRQPPGKGLEWIGTIYYTGTTYYNPSLKSRVTISVDTSKNQFSLRLNSVTAADTAVYYCARLWDSYYHSYGMDLWGQGTTVTVSS

SEQ ID NO: 18748 - protein, 123 aa, Artificial Sequence
  Synthetic construct
QLQLQESGPGLVKPSETLSLTCTISAGSISSSSSYWGWIRQPPGKGLEWIGSIYYSGSTYYNPSLKSRVTISVDTSKNQFSLKLSSVTAADTSVYYCARFASGFSFDDGFDIWGQGTMVTVSS

SEQ ID NO: 18749 - protein, 119 aa, Artificial Sequence
  Synthetic construct
QVQLQESGPGLVKPSETLSLTCTVSDDSMSSYYWSWIRQPPGKGLEWIGYFYYSGNTNYNPSLKRRVTISVDTSKSQFSLKVNSVTAADTAVYYCARSGSYGDRTFDSWGQGTLVTVSS

SEQ ID NO: 18750 - protein, 121 aa, Artificial Sequence
  Synthetic construct
QVQLQQWGAGLLKPSETLSLTCAVFGGSLSGYQWSWIRQSPGKGLEWIGEVNHSGSTSYNPSLKSRVTISVDTSKNQFSLKLRSVTAADTAVYYCARDDGSSVHNYYMDVWGKGTTVTVSS

SEQ ID NO: 18751 - protein, 132 aa, Artificial Sequence
  Synthetic construct
EVQLVQSGAEVKKPGESLKISCKGSGYSFTTDWIGWVRQMPGKGLEWMGIIYPGDSDTRYSPSFQGQVTISADKSISTAYLQWSSLKASDTAIYYCARMSRTLRYFDWSPQRRLYSYGMDVWGQGTTVTVSS

SEQ ID NO: 18752 - protein, 128 aa, Artificial Sequence
  Synthetic construct
EVQLVESGGGLVKPGRSLRVSCAASGFTFSNAWMNWVRQAPGKGLEWVGRIKSNTDGGTTDYAAPVKGRFTISREDSKNTLYLQMNSLKTEDTAVYYCSTGLFYYGSSAYSNDAFDIWGQGAMVTVSS

SEQ ID NO: 18753 - protein, 121 aa, Artificial Sequence
  Synthetic construct
QVTLKESGPVLVKPTETLTLTCTVSGFSLINAKMGVSWIRQPPGKALEWLAHIFSNGEKSYRTSLKSRLSISKDTSKSQVVLTMTNMDPVDTATYFCARILWFGGNYFDYWGQGTLVTVSS

SEQ ID NO: 18754 - protein, 126 aa, Artificial Sequence
  Synthetic construct
QVQLVQSGAEVKKPGASVKVSCKASGFSFTDYYMHWVRQAPGQGLEWMGWINPRSGVTNYAQNFEGWVTMTRDTSISTAYMEVSRLRSDDTAVYYCAREMHIGGGDLYYNYGMDVWGQGTTVTVSS

SEQ ID NO: 18755 - protein, 121 aa, Artificial Sequence
  Synthetic construct
QVQLQQWGAGLLKPSETLSLTCAVYGGSFSGYQWSWIRQPPGKGLEWIGEINHSGNTNYNPSFKSRVTISLETSKTQFSLKLSSVTATDTAVYYCARDNGSGTQNYHMDVWGKGTTVTVSS

SEQ ID NO: 18756 - protein, 122 aa, Artificial Sequence
  Synthetic construct
QVQLQESGPGLVKPSETLSLTCTVSGGSISSYYWTWIRQPPGKGLEWIGYIFYSGSTKYNPSLKSRVTISVDTSKNQFSLKLSSVTAADTAVYYCTGYYQDSSGYDYGMDVWGQGTTVTVSS

SEQ ID NO: 18757 - protein, 127 aa, Artificial Sequence
  Synthetic construct
QVQLVQSGAEVEKPGSSVKVSCKASGGTFSSNAISWVRQAPGQGLEWMGGIIPLFGTTTYAQKFQGRVTITADESTSTVYMELSSLRSEDTAVYYCARDRGYYGSGSENNYYYMDVWGKGTTVTVSS

SEQ ID NO: 18758 - protein, 117 aa, Artificial Sequence
  Synthetic construct
EVQLEESGGGLVQPGGSLRISCVASGFIVGSNYMSWVRQAPGKGLEWVAVLYSGGSTFYADSVKGRFTISRDNSKNTLYLQMNSLRAEDTAFYYCARDLSYLGMDVWGQGTTVTVSS

SEQ ID NO: 18759 - protein, 125 aa, Artificial Sequence
  Synthetic construct
QVQLVQSGAEVKKPGSSVKVSCKASGGTFSSYAISWVRQAPGQGLEWMGGIIPIFGTANYAQKFQGRVTITADESTSTAYMELSSLRSEDTAVYYCASLMETGSTQEDYYYMDVWGKGTTVTVSS

SEQ ID NO: 18760 - protein, 115 aa, Artificial Sequence
  Synthetic construct
EVQLLESGGGLVQPGGSLRLSCVASGFTFTNYAMSWVRQTPGKGLEWVSAISGSGGTTYYADSVKGRFSISRDNSKNTLYLQMNSLRADDTAVYYCAKDECSGYWGQGTLVIVSS

SEQ ID NO: 18761 - protein, 129 aa, Artificial Sequence
  Synthetic construct
QVQLVESGGGVVQPGRSLRLSCAASGFTFSSYAMHWVRQAPGKGLEWVAVISYDGSNKYYADSVKGRFTISRDNSKNTLYLQMNSLRAEDTAVYYCARAPPEEGWLLFMSGYYYYMDVWGKGTTVTVSS

SEQ ID NO: 18762 - protein, 116 aa, Artificial Sequence
  Synthetic construct
QVQLVESGGGVVQPGTSLRLSCAASGITFNDYGMHWVRQAPGRGLEWVAFISYEGSVQHYGDSVKGRFTISRDDLKSTLFLQMNSLRPDDTAVYYCAKGATKLDYWGQGTLVTVSS

SEQ ID NO: 18763 - protein, 116 aa, Artificial Sequence
  Synthetic construct
EVQLVESGGDLVQPGGSLRLSCSASGFTFSNYAMHWVRQAAGKRLEYVSAISTEGGSTYYGDSVKGRFTISRDNSKNTLYLQMSSLRAEDTAVYYCVQGWAGTTYWGQGTLVTVSS

SEQ ID NO: 18764 - protein, 121 aa, Artificial Sequence
  Synthetic construct
QVQLVESGGGVVQPGRSLRLSCAASGFAFNNYGTHWVRQAPGKGLEWVAVIWHDGSKRYYADSVRGRFTISRDNSKNTLFLQMNSLRAEDTAMYYCAREGIVGTTTGLDYWGQGTLVTVSS

SEQ ID NO: 18765 - protein, 121 aa, Artificial Sequence
  Synthetic construct
QVQLVESGGGVVQPGRSLRLSCAASGFIFSTYAFHWVRQAPGKGLEWVAVISYDGINKYYADSVKGRFTISRDNSQNTLYLQMNSLSVEDTAVYYCARDPDSTFGGDFDYWGQGTLVTVSP

SEQ ID NO: 18766 - protein, 123 aa, Artificial Sequence
  Synthetic construct
QVQLVESGGGLVKPGGSLRLSCAASGFIFSDHYMTWIRQAPGKGLEWVSYISNSGSDIYYAASVKGRFTISRDNAKNSLYLQMNSLRAEDTAVYYCARDRGLTQLDENWFDPWGQGTLVTVSS

SEQ ID NO: 18767 - protein, 122 aa, Artificial Sequence
  Synthetic construct
QVQLMESGGGVVQPGRSLRLSCAASGFTFSSYTMHWVRQAPGKGLEWVALISYDGSNEYYADSVKGRFTISRDNSKNTLYLQMDSLRTEDTAVYYCAKERNLIWLLGSQDYCGQGTLVTVSS

SEQ ID NO: 18768 - protein, 131 aa, Artificial Sequence
  Synthetic construct
SQVLVQSGVELKKPGASVKVSCKASGYTFTSYGISWVRQAPGLGLEWMGWISAYNGNTNYAQKLQGRVTMTTDTSTSTAYMELRSLRSDDTAVYYCARDAGFSSSWYQIRSGYNYYYMDVWGKGTTVTVSS

SEQ ID NO: 18769 - protein, 125 aa, Artificial Sequence
  Synthetic construct
QVQLVQSGAEVKKPGASVKVSCKASGYTFTSYAMHWVRQAPGQRLEWMGWINAGNGNTKYSQKFQGRVTITRDTSASTAYMELSSLRSEDTAVYYCARVYYYGSGSYYSGAFDIWGQGTMVTVSS

SEQ ID NO: 18770 - protein, 126 aa, Artificial Sequence; identical to SEQ ID NO: 2282
  Synthetic construct

SEQ ID NO: 18771 - protein, 122 aa, Artificial Sequence
  Synthetic construct
QVQLQESGPGLVKPSETLSLTCTVSGASISSYYWSWIRQPPGKGLEWIGYIYYSGSTNYNPSLKSRVTISVDTSKTQFSLKLNSVTAADTAVYYCATYYYDSSGYNYGFDYWGQGTLVAVSS

SEQ ID NO: 18772 - protein, 123 aa, Artificial Sequence
  Synthetic construct
EVQLLESGGGLVQPGGSLRLSCAASGFSFSNYAMNWVRQAPGKGLEWVSTLSGGGGSTYYADSVKGRFTISRDNSKNTLYLQMNSLRAEDTAVYYCATFGGDDSRLSNWFDPWGQGTLVTVSS

SEQ ID NO: 18773 - protein, 120 aa, Artificial Sequence
  Synthetic construct
QVQLQESGPGLVKPSQTLSLTCTVSGDSISSGSYYWSWIRQPAGKGLEWIGRIYTSGSTNYNPSLRSRVTISVDTSKNQFSLRLSSVTAADTAVYYCAREGSWKYVFDFWGQGTLVNVSS

SEQ ID NO: 18774 - protein, 118 aa, Artificial Sequence
  Synthetic construct
EVQMVESGGGLVQPGGSLRLSCAVSGFSLRGPWMSWVRQAPGKGLEWVATIVGDVSEKKYVDSVKGRFVISKDYAKNSVSLQMDSLTAEDTAMYFCAKVSTKSSFDYWGQGILVTVSS

SEQ ID NO: 18775 - protein, 132 aa, Artificial Sequence
  Synthetic construct
QVQLVQSGAEVRKPGASVKVSCKASGYTFTNYGVSWVRQAPGQGLEWMGWISAYNGYTNYAQKFQGRATMTTDTSTSTAHMELRSLRSDDTAVYYCARDRGDGDYYTMPNAGGGYLGAFDIWGQGTMVTVSS

SEQ ID NO: 18776 - protein, 125 aa, Artificial Sequence
  Synthetic construct
QVQLVQSGAEVKKPGSSVKVSCKASGGTFSSYPISWVRQAPGQGLEWMGRIIPILRIANYAQKFQGRVTITADKSTSTAYMELSSLRSEDTAVFYCAREKGYSSSSSASYYFDYWGQGTLVTVSS

SEQ ID NO: 18777 - protein, 121 aa, Artificial Sequence
  Synthetic construct
QVKVVESGGGLVKPGGSLRLSCAASGFIFSDYYMSWIRQAPGKGLEWVSYISTSGSAIDYADSVKGRFTISRDNAKNSLNLQMNSLRAEDTAVYYCAVTFYYDNIGYFSLWGQGTLVTVSS

SEQ ID NO: 18778 - protein, 119 aa, Artificial Sequence
  Synthetic construct
EVQLVESGGGLILPGGSLRLSCAASGVTVSSNYMNWVRQAPGKGLEWVSVIYSGGSTFYADSVKGRFTISRDNSKNTLYLQMNSLRAEDTAVYYCARGGWPSGDTFDIWGQGTMVTVSS

SEQ ID NO: 18779 - protein, 123 aa, Artificial Sequence
  Synthetic construct
QVQLVESGGGLVQPGRSLRLSCAASGFTFSSYAFHWVRQAPGQGLEWVAVISYDGINKYYADSVKGRFTISRDNSKNTLYLQMNSLRPEDTAVYYCARGEDLSSWEPDYFDYWGQGTLVTVSS

SEQ ID NO: 18780 - protein, 131 aa, Artificial Sequence
  Synthetic construct
QVQLVESGGGLVKPGGSLRLSCAASGFTFSDYYMSWIRQAPGKGLEWVSYISSSSSYTNYADSVKGRFTISRDNAKNSLYLQMNSLRAEDTAVYYCARALGIAAAGTRAGRWRGPGYFQHWGQGTLVTVSS

SEQ ID NO: 18781 - protein, 121 aa, Artificial Sequence; identical to SEQ ID NO: 2116
  Synthetic construct

SEQ ID NO: 18782 - protein, 120 aa, Artificial Sequence
  Synthetic construct
EVQLVQSGAEVKKPGESLRISCKGSGYSFTTYWITWVRQMPGKGLEWMGMIDPSDSYTNYSPSFQGHVTISADKSTSTAYLQWSSLKASDTAIYYCARYSVYYYYGMDVWGQGTTVTVSS

SEQ ID NO: 18783 - protein, 120 aa, Artificial Sequence; identical to SEQ ID NO: 1717
  Synthetic construct

SEQ ID NO: 18784 - protein, 128 aa, Artificial Sequence
  Synthetic construct
QVQLVQSGAEVKKPGSSVKVSCKASGGTFSNYAISWVRQAPGQGLEWMGGLTPIFATANYAQKFQGRVTITADESTSTAYMELSSLRSEDTAVYYCASLGGDYYVSETSYNNSGFDPWGQGTLVTVSS

SEQ ID NO: 18785 - protein, 121 aa, Artificial Sequence
  Synthetic construct
QVQLVQSGAEVKKPESSVKVSCKVSGGTFSSYTFNWVRQAPGQGLEWMGRIIPVLGAATSAQKFQGRVTITADNSTSTTYMELSSLRSEDTAVYYCARGVVAATPGYFDYWGQGTLVTVSS

SEQ ID NO: 18786 - protein, 124 aa, Artificial Sequence
  Synthetic construct
EVQLVESGGGLVQPGESLRLSCAASGFTFSTYAMSWVRQASGKGLEWVSAISGSGGSTYYADSVKGRFTISRDNSKDTLYLQMNSLRAEDTAVYYCANGGYCTGGSCYRWFDPWGQGTLVTVSS

SEQ ID NO: 18787 - protein, 122 aa, Artificial Sequence
  Synthetic construct
QITLKESGPTQVKPAQTLTLTCTVSGFSLTSNGGAVGWIRQPPGKALEWLALIYWDDDTRYSPSLKNRLTITQDTSKNQVVLTMTNMAPVDTATYYCAHVFDVVTGYEFDPWGQGTLVTVTS

SEQ ID NO: 18788 - protein, 125 aa, Artificial Sequence
  Synthetic construct
EVQLVQSGPEVKKYGESLRISCQIYGYDFTNYWISWVRQMPGKGLEWMGRIDPSDSHTNYSPSFQGHVTISVDESINTAFLQWNTLKASDTAIYYCARHRAGWGGYASSSTFDYWGQGTLVTVSS

SEQ ID NO: 18789 - protein, 117 aa, Artificial Sequence
  Synthetic construct
EVQLVESGGGLVQPGGSLRLSCAASGIIVSSNYMTWVRQAPGKGLEWVSLIYSGGSTFYADSVKGRFTISRDNSKNTLYLQMSSLRGDDTAVYYCARDLYYYGMDVWGQGTTVTVSS

SEQ ID NO: 18790 - protein, 115 aa, Artificial Sequence
  Synthetic construct
EVQLVESGGGLVKPGGSLRLSCAASGFTFSSYSMYWVRQAPGKGLEWVSCITSGSSYIYYADSVKGRFTISRDNAKNSLYLQMNSLGAEDTAVYYCAGGYNYNYWGQGTLVTVSS

SEQ ID NO: 18791 - protein, 126 aa, Artificial Sequence
  Synthetic construct
QVQLVESGGAVVQPGRSLRLSCAASGFTFSNYALHWVRQAPGKGLEWVALISYAGSNEYYADSVKGRFTISRDNSKNTLYLQMNSLRIEDTAVYFCARDALDSYASESAENYFDFWGQGTLVTVSA

SEQ ID NO: 18792 - protein, 119 aa, Artificial Sequence
  Synthetic construct
QVQLQESGPGLVKPSETLSLTCTVSGASINTYYWSWIRQPPGKGLEWIDYFYYSGTTSYNPPLKSRVTISVDTSKNQCSLKLSSVTAADTAVYYCARMRGWRGRAFDIWGLGTMVTVSS

SEQ ID NO: 18793 - protein, 123 aa, Artificial Sequence
  Synthetic construct
QLQLQESGPGLVKPSETLSLTCTVSGGSISSSSYYWGWIRQPPGKGLEWIGSIYYSGSTYYSPSLKSRVTISVDTSKNQFSLRLSSVTAADTAVYNCARFHWEYSSGWYVDYWGQGTLVTVSS

SEQ ID NO: 18794 - protein, 122 aa, Artificial Sequence
  Synthetic construct
QVQLVQSGAEVKKPGASVKVSCKVSGYTLPELSMHWVRQAPGKGLEWMGGFDPEDGETIYTQKFQGRVTMTEDTSTDTAYMELSSLRSEDTAVYYCATEWAVVGPAEYFHHWGQGTLVTVSS

SEQ ID NO: 18795 - protein, 121 aa, Artificial Sequence
  Synthetic construct
EVKLVESGGGLVQPGGSLRLSCEASGFTFSNYWMHWVRQAPGKGLVWVSCINSDGSTTSYADSVKGRFTISRDNAKNTLYLQMNTLRAEDTAVYYCARQNRLQGIAVLGYWGQGTLVTVSS

SEQ ID NO: 18796 - protein, 119 aa, Artificial Sequence
  Synthetic construct
QVQLVQSGAEVKKPGASVNVSCKASGYTFTNFYLHWVRQAPGRGLEWVGMINPSGGSPSYGQKSQDRITLIRDTSTSTVYLELSSLKSEDAAVYYCARDYQWGTGMDVWGQGTTVTVSS

SEQ ID NO: 18797 - protein, 123 aa, Artificial Sequence
  Synthetic construct
EVQLVQSGAEVKKPGESLRISCKGSGYSFTSYWISWVRQMPGKGLEWMGTIDPSDSYTNYSPSFQGHVTISADKSISTAYLQWSSLKASDTAMYYCARHFSGNMVFWWWFDPWGQGTLVTVSS

SEQ ID NO: 18798 - protein, 125 aa, Artificial Sequence
  Synthetic construct
QVQLVESGGAVVQPGGSLRLSCVASGFTFRLYDMHWVRQAPGKGLEWLTLISNSGSVEFYAASVKGRFTVSRDNSKNTVFLQMNGLRLEDTAVYFCAKWVAPGYYNGAGPQLDHWGPGTLVTVAS

SEQ ID NO: 18799 - protein, 124 aa, Artificial Sequence
  Synthetic construct
QVQLVQSGAEVKKPGASVKVSCKASGYTFTDYYIHWVRQAQGQGLEWMGIISPSNGGTSYAQKWQGRVSMTRDTSTSTVYMELSSLISDDAAVYYCARDPARPSYGDHDAFDIWGHGTMLTVSS

SEQ ID NO: 18800 - protein, 117 aa, Artificial Sequence
  Synthetic construct
QVQLVQSGSELKKPGASVKVSCKASGYTFTKYAINWVRQAPGQGPEWMGWINTNTGNPTYAQGFTGRFVFSLDTSVNTAYLQISSLKAEDTAVYFCARDITPFPDVWGKGTTVTVSS

SEQ ID NO: 18801 - protein, 125 aa, Artificial Sequence
  Synthetic construct
QVQLVQSGAEVKKPGSSVKVSCKASGGTFSNYTISWVRQAPGQGLEWMGRIIPILGITHYAQRFQGRVTITADKSTTTAYMELRSLRSEDTAVYYCARSIYDTLTGYEVHYFDYWGQGTLVTVSS

SEQ ID NO: 18802 - protein, 121 aa, Artificial Sequence
  Synthetic construct
QVQLVQSGAEVKKPGASVKVSCKVSGYTLIELSVHWVRQAPGKGLEWMGGFDPEDGEIIYAQKFQGRVTMTEDTSTDTAYMEMSSLRSEDTAVYYCATSPAVVRQNWFEFRGQGTLVTVSS

SEQ ID NO: 18803 - protein, 121 aa, Artificial Sequence
  Synthetic construct
QVQLVESGGGVVQPGRSLRLSCAASGFTFTTYGMHWVRQAPGKGLEWVAVIWFDGSNKYYADSVKGRFTISRENSKNTLYLQMNSLRAEDTAIYYCLREGQVGTTTGADYWGQGTLVTVSA

SEQ ID NO: 18804 - protein, 123 aa, Artificial Sequence
  Synthetic construct
QVQLQQWGAGLLKTSETLSLTCAVYGGSFSDYYWSWIRQTPGKGLEWIGEINHSGITNYNPSLKSRVTISVDTSKHQFSLKLSSVTAADTAVYYCARLWGVTSGYGDYGLDVWGQGTTVTVSS

SEQ ID NO: 18805 - protein, 119 aa, Artificial Sequence
  Synthetic construct
QVHLVEYGGGVVQPGRSLRLSCAASGFTFSNYAMHWVRQAPGKGLEWVAVISYDGTNKYYADSVRGRFTISRDDSQNTVYLQMNSLRTEDTTLYYCARGGGGYKYFDYWGQGTLVAVSA

SEQ ID NO: 18806 - protein, 124 aa, Artificial Sequence
  Synthetic construct
QVQLVESGGGVVQPGRSLRLSCAASGFSFSRHGMHWVRQAPGKGLEWVAVIWYDGSNKYHADSVKGRFTISRDNSKNTLYLQMNSLRADDTAVYYCARDHGITVAGTIYVMDVWGQGTTVTVSS

SEQ ID NO: 18807 - protein, 129 aa, Artificial Sequence
  Synthetic construct
QVQLVQSGSELKKPGASVKVSCKASGYTFSSYGMNWVRQAPGQGLEWMGWINTNTGNPTYAQGFTGRFVFSLDTSVSTAYLQISSLKAEDTAVYYCARAERDIVVVLGGIDYFYYMDVWGKGTTVTVSS

SEQ ID NO: 18808 - protein, 122 aa, Artificial Sequence
  Synthetic construct
QVQLVQSGAEVKKPGSSVKVSCKASGGTFTNSAISWVRQAPGQGLEWMGGIIPIFGTTNYAQKFQGRLTITADESTSTAYMELSSLRSEDTAVFYCARTGFFYASGSYSDLWGQGTLVTVSS

SEQ ID NO: 18809 - protein, 131 aa, Artificial Sequence
  Synthetic construct
QVQLVQSGAEVKKPGASVKVSCKASGYTFSNYVISWVRQAPGQGLEWMGWISAYNGSTNYAQNLQGRVTMTTDTSTSTAYMELRSLRSDDTAVYFCARDPASYYDFWSGYVDLYYYGLDVWGQGTTVTVSS

SEQ ID NO: 18810 - protein, 121 aa, Artificial Sequence
  Synthetic construct
QVQLVEFGGGVVQPGRSLRLSCAASGFTFSTYAMHWVRQAPGKGLEWVAVVSYDGYDKYYADSVKGRFTLSRDNSKNTLSLQMNSLRLEDTAVYFCARSLGGNYFDAFGIWGQGTMVTVSS

SEQ ID NO: 18811 - protein, 128 aa, Artificial Sequence
  Synthetic construct
EVRLVQSGAEVKKPGESLKVSCQASGYNFTNYWIGWVRQTSGKGLEWMGIIHPADSNTKYSPSFQGQVTISADKSTSTTYLQWGSLKTADIAVYYCARVSSPSWYRRNYRYYFYMDVWGDGTALTVSS

SEQ ID NO: 18812 - protein, 131 aa, Artificial Sequence
  Synthetic construct
QVQLQESGPGLVKPSGTLSLTCAVSGGSISSNYWWSWVRQAPGKGLEWIGEIYQSGSTNYNPSLKSRVTISVDKSKNQFLLKLTSVAAADTAVYYCARYVPVNRADYGDYGLSYPSTFDSWGQGTLVTVSS

SEQ ID NO: 18813 - protein, 129 aa, Artificial Sequence
  Synthetic construct
EVQVVEFGGGLVKPGRSLRLSCATSGFTFEDFAMHWVRQVPGKGLEWVSGSTWNSATIGYADSVKGRFTTSRDNAKNSLYLQMNNLRIEDTALYYCVKDIGRYDHHDTFGRVGGAFDIWGQGTMVTVSS

SEQ ID NO: 18814 - protein, 121 aa, Artificial Sequence
  Synthetic construct
QITLKESGPTLVKPTQTLTLTCTFSGFSLSTSGVGVGWIRQPPGKALEWLALIYWDDDKRYSPFLKSRLTITKDTSKDQVVLTMTNMDPVDTATYFCAHRLVAVAGPFDFWGQGTLVTVSS

SEQ ID NO: 18815 - protein, 120 aa, Artificial Sequence
  Synthetic construct
QVQLVESGGGVVQPGRSLRLSCAASGFTFSNYAMHWVRQAPGKGLEWVAVISFDGYNKYYAVSVKGRFTISRDNSKNTLYLHLNSLRAEDTAVYYCARGSGSYNVYFQHWGQGTLVTVSS

SEQ ID NO: 18816 - protein, 126 aa, Artificial Sequence
  Synthetic construct
QVQLVQSGAEVKKPGASVKVSCKASGYTFTSYGINWVRQAPGQGLEWMGWINTYNGNTNFAQKLQGRVTMTTDTSTSTAYMELRSLRSDDTAVYYCARALSLVRGVIFSYYYLDVWGRGTTVTVSS

SEQ ID NO: 18817 - protein, 128 aa, Artificial Sequence
  Synthetic construct
LVQLVQSGAEVRKPGSSVKVSCKASGGTFSSYAISWVRQAPGQGLEWMGGMTPIFGTANYAQKFQGRVTITADESTSTAYMELSGLRSEDTAVYYCASLGGDYYGSGSYHDDSEFDPWGQGTLVTVSS

SEQ ID NO: 18818 - protein, 120 aa, Artificial Sequence
  Synthetic construct
QVQLVESGGGVVQPGRSLRLSCAASGFTFSIYAMHWVRQAPGRGLEWVAVISYDGTNKYYADSVRGRFTISRDNSKNTLFLQMNSLRAEDTAVYYCARDGSGSYSYFDYWGQGTLVTVSS

SEQ ID NO: 18819 - protein, 125 aa, Artificial Sequence
  Synthetic construct
EVQLVQSGAEVKKPGESLNISCKGSGYIFSNNWVGWVRQMPGKGLEWMGIIYPGDSDTRYSPSFQGQVTISADKSISTAYLQWSSLKASDTAMYYCARLNSAYDFYYYSYYLDVWGKGTAVTVSS

SEQ ID NO: 18820 - protein, 121 aa, Artificial Sequence
  Synthetic construct
QVQLVQSGSELKKPGASVKVSCQASGNSFTTHAINWVRQAPGQGLDWMGWINTHTGKPTYAQDFRGRFVFSLDTSVGTAFLQISSLKVEDTAVYYCARESGGQDAIWFDPWGQGTLVTVSS

SEQ ID NO: 18821 - protein, 120 aa, Artificial Sequence
  Synthetic construct
QVQLQQWGAGLLKPSETLSLTCAVYGGSFSGYSWSWIRQPPGKALEWIGEINHSGSTNYNPSLKSRITISADTSKKQFSLKLNSVTAADTAVYYCARWELMVPEDAFDIWGQGTMVTVSS

SEQ ID NO: 18822 - protein, 126 aa, Artificial Sequence
  Synthetic construct
QVQLVQSGAEVKKPGASVKVSCKASGYTFTGYYMHWVRQAPGQGLEWMGWINPNSGVTNYAQKFQGWVTMTRDTSITTAYMELSRLRSDDTAVYYCAREGYYDSSGYAGNYGMDVWGQGTTVTVSS

SEQ ID NO: 18823 - protein, 129 aa, Artificial Sequence
  Synthetic construct
EVQLVESGGGLAQPGRSLRLSCRGSGFKFGDYVLSWFRQAPGKGLEWVGFIRGKAYDGTAEYAASVRARFTLSRDDSKRIAYLQMNSLKTEDTAVYYCSREGEGYCSGDNCYSNAFEFWGQGTTVTVSS

SEQ ID NO: 18824 - protein, 119 aa, Artificial Sequence
  Synthetic construct
QVQLVESGGGVVQPGRSLRLSCAASGFIFNIYAMHWVRQAPGQGLEWVAVISYDGDNKYYADSVNGRFTISRDNSKNTLFMQMNSLRAEDTAVYYCARGGGGYKYFDFWGQGILVTVSS

SEQ ID NO: 18825 - protein, 119 aa, Artificial Sequence
  Synthetic construct
QVQLQESGPGLVKPSETLSLTCTVSGGSISSYYWSWIRQPPGKGLEWIGYIYYSGSTNYNPSLKSRVTISVDTSKNQFSLKLSSVTAADTAVYYCASHYSSSWYLFDYWGQGTLVTVSS

SEQ ID NO: 18826 - protein, 119 aa, Artificial Sequence
  Synthetic construct
EVQLVESGGGLVQPGGSLRLSCSASGFTFSTYAMHWVRQAPGKGLEYVSTISTDGGSTYYADSVKARFTISRDNSNNTLYLQMSSLRAEDTALYYCVKDADYYYGMDVWGQGTTVTVSS

SEQ ID NO: 18827 - protein, 130 aa, Artificial Sequence
  Synthetic construct
EVQLVESGGGLVQPGGSLRLSCAASGFTFSNYWMSWVRQAPGKGLEWVANIKPDGSENHYVDSVKGRFTISRDNAKNSLYVQMNSLRAEDTAVYYCARVQNGNFDWLLNAGYSHYYMDVWGKGTTVTVSS

SEQ ID NO: 18828 - protein, 129 aa, Artificial Sequence
  Synthetic construct
EVQVVESGGGLVQPGRSLRLSCATSGFTFEDFAMHWVRQAPGKGLEWVSGSTWNSGTIGYADSVKGRFTTSRDNAKNSLYLQMRNLRDEDTALYYCTKDIGRYDHYEGFGRVGGAFHIWGQGTVVTVSS

SEQ ID NO: 18829 - protein, 61 aa, Artificial Sequence
  Synthetic construct
WGESVKGRFTISRDNSKNTLFLQMESLRAEDTAVYYCARGGGSYYNALEIWGQGTMVTVSS

SEQ ID NO: 18830 - protein, 130 aa, Artificial Sequence
  Synthetic construct
EVQLVESGGGLVKPGGSLRLSCGASGFTFSNAWMSWVRQAPGKGLEWVGRIKTKTDGGTTDYAAPVKGRFSISRDDSRNTLYLQMNSLKTEDTAVYYCSTDGYYYDSSGYPSFRVWFDPWGQGTLVTVSS

SEQ ID NO: 18831 - protein, 124 aa, Artificial Sequence
  Synthetic construct
QVQLVESGGGVVQPGRSLRLSCAASGFTFSSHGMHWVRQAPGKGLEWVAVILYDGSNKYYADSVKGRFTISRDNSRNTLYLQMNSLRAEDTAVFYCAKSRGRGTQLWGLYLDFWGQGTLVTVSS

SEQ ID NO: 18832 - protein, 121 aa, Artificial Sequence
  Synthetic construct
QVHLVQSGAEVKKPGASVKVSCKVSGYTLTELSIHWVRQAPGKGLEWMGGFDPDDGESIYAQRFQGRVTMTEDTSTDTAYMELSSLRSEDTAVYYCATSPAVVRQNWFEFRGQGTLVTVSS

SEQ ID NO: 18833 - protein, 127 aa, Artificial Sequence
  Synthetic construct
QVQLVESGGGVVQPGRSLRLSCAASGFTFRSHGMHWVRQAPGKGLEWVAVIWYDGSEKFYADSAKGRFTISRDNSKNTLYLQMNSLRVEDTAVYYCARDLIRAVAGPVYFYHGMDVWGQGTTVTVSS

SEQ ID NO: 18834 - protein, 119 aa, Artificial Sequence; identical to SEQ ID NO: 10011
  Synthetic construct

SEQ ID NO: 18835 - protein, 120 aa, Artificial Sequence
  Synthetic construct
QLQLQASGPGLVKSSETLSLTCSVSGGSITTSSFFWGWIRQPPGKGLEWIGNSHYSGTTNYNPSLKTRLTIFVDSSKSQFSLNLSSVTAADTAVYYCARLRYGSGIFDSWGQGTLVTVSS

SEQ ID NO: 18836 - protein, 121 aa, Artificial Sequence; identical to SEQ ID NO: 18810
  Synthetic construct

SEQ ID NO: 18837 - protein, 120 aa, Artificial Sequence
  Synthetic construct
QVQLQESGPGLVKPSETLSLTCTVSGSSISSGYFWGWIRQPPGQGLEWIGSIYHSGSTHYNPSLKSRVTISVDTSKNQFSLKLSSVTAADTAVYYCARERGGLLWFGESTPKGTTVTVSS

SEQ ID NO: 18838 - protein, 118 aa, Artificial Sequence
  Synthetic construct
EVQLVQSGAEVKKPGESLNISCKGSGYSFTIYWIAWVRQMPGKGLEWMGIIYPGDSDTRYSPSFQGQVTISADHSISTAYLQWSSLKASDTAMYYCARTVMNDAFEIWGQGTMVTVSS

SEQ ID NO: 18839 - protein, 119 aa, Artificial Sequence
  Synthetic construct
EVQLVESGGGLVQPGGSLRLSCAASGFFFRTYAMNWVRQAPGKGLECVSAITGSGDRTYYADSVKGRFTMSRDNSKNTVYLQMNSLRADDTAVYFCACGYSGYEYEAPWGQGTQVTVSS

SEQ ID NO: 18840 - protein, 124 aa, Artificial Sequence
  Synthetic construct
EVQLVESGGGLVQPGGSLRLSCAVSGFTFTNYAMSWVRRAPGKGLQWVSSIGATDGRTFYATSVKGRFTISRDNSKNTLYLQMNSLRVDDTALYYCAKAGPEIFPLVITPLDSWGQGALVAVSS

SEQ ID NO: 18841 - protein, 127 aa, Artificial Sequence
  Synthetic construct
QVQLVESGGGVVQPGRSLRLSCAASGFTFSSYGMHWVRQAPGKGLEWVAVISNDGSNKYYADSVKGRFTISRDNSKNTLYLQMNSLRREDTAVYYCAKQVDPLRSLEWLLDYYFDYWGQGTLVTVSS

SEQ ID NO: 18842 - protein, 123 aa, Artificial Sequence
  Synthetic construct
QLQLQESGPGLVKPSETLSLTCTVSGASISSSSYYWSWIRQPPGKGLEWIGNVFYSGTTYYNPSLKSRITISVDTSQNHFSLKLSSVTAADTAVYYCARYSSGYSRDDAFDIWGQGTMVTVSS

SEQ ID NO: 18843 - protein, 119 aa, Artificial Sequence
  Synthetic construct
EVQLLESGGGLVQPGGSLRLSCAASGFNFSIYTMSWVRQAPGKGLEWVSGFSGSGVSTYYADSVKGRFTVSRDNSKNTLFLQMNSLRVEDTAVYYCAKARWHGGGSDYWGQGTLVTVSS

SEQ ID NO: 18844 - protein, 121 aa, Artificial Sequence
  Synthetic construct
EVQLVESGGGLVQPGGSLRLSCAASGFTVSSNYMSWVRQAPGKGLEWVSVIYSGGPTYYADSVKGRFTISRDNSKNTLYLQMNSLRAEDTAVYYCARDRRIVGYYYAMDVWGQGTTVTVSS

SEQ ID NO: 18845 - protein, 49 aa, Artificial Sequence
  Synthetic construct
GKNSLYLQMNSLRVEDSALYFCTKDARPAGRYYYYMDVWGKGTTVTVSS

SEQ ID NO: 18846 - protein, 124 aa, Artificial Sequence
  Synthetic construct
EVQLVESGGGLGKPGGSLRLSCAASGFSFSTYSMNWVRQAPGKGLEWVSSISSSGRSTFYADSLRGRFTISRDNAQNSLFLQMSSLRVEDTAVYYCVRSAIRVSVGFDNCFDPWGQGTLVTVSS

SEQ ID NO: 18847 - protein, 121 aa, Artificial Sequence
  Synthetic construct
QVQLVQSGAEVKKPGSSVKVFCKASGGTFGSFAVSWVRQAPGRGLEWMGGIIPVFGTTNYAQKFQGRVTITADESTSTAYMEMSSLRSEDTAVYFCARVPSGWYVGYFDYWGQGTLVTVSS

SEQ ID NO: 18848 - protein, 123 aa, Artificial Sequence
  Synthetic construct
EMQLVESGGGLVQPGGSLRLSCSASGFTFSTYAMHWVRQAPGKGLEYVSAISTNGGITYYADSVKGRFTISRDDSKNTLYLQMSSLRAEDTAVYYCVKDKDSQQLFVDVFDIWGQGTMVTVSS

SEQ ID NO: 18849 - protein, 122 aa, Artificial Sequence
  Synthetic construct
QVQLVQSGAEVKKPGSSMKVSCKASGGTFNSYAISWVRQAPGQGLEWMGGIIPVFETTNYAQKFQGRVTITADESTSTAYMELSSLRSEDTAVYYCVRSEGFDSSGHFWDYWGQGTLVTVSS

SEQ ID NO: 18850 - protein, 117 aa, Artificial Sequence
  Synthetic construct
EVQLVESGGGLIQPGGSLRLSCAASGFIVSSNYMSWVRQAPGKGLEWVSVIYSGGSTFYADSVKGRFTISRDNSKNTLYLQMNSLGAEDTAVYYCARDWGEFYFDYWGQGTLVTVSS

SEQ ID NO: 18851 - protein, 124 aa, Artificial Sequence
  Synthetic construct
QLQMQESGPGLVKPSETLSLTCTVSGGSISSSSYYWGWIRQPPGKGLEWIGSIYYSGSTYYTPSLKSRVTISVDTSKNQFSLKLSSVTAADTAVYYCARHDRHSGGYYHALGYWGQGTLVTVSS

SEQ ID NO: 18852 - protein, 129 aa, Artificial Sequence
  Synthetic construct
EVQVVEFGGGLVQPGRSLRLSCATSGFTFEDFAMHWVRQAPGKGLEWVSGSTWNSATIGYAESVKGRFTTSRDNAKNSLFLQMNNLRDEDTALYYCAKDSGRYDHYEGFSRVGGAFDVWGQGTLVTVSS

SEQ ID NO: 18853 - protein, 121 aa, Artificial Sequence
  Synthetic construct
QVQLVESGGGVVQPGRSLRLSCAASGFTFSTYAMHWVRQAPGKGLEWVAVVSYDGSNKYFADSVKGRCTISRDNSKNKVYVEMNSLRGEDTAVYYCARARGGNYFDAFDIWGQGTLVTVSS

SEQ ID NO: 18854 - protein, 120 aa, Artificial Sequence
  Synthetic construct
GVQLVESGGGLVQPGGSLRLSCAASGFTFSGYWMNWVRQAPGKGLEWVANIKQDASEKYYVDSVKGRFSISRDNAKNSLYLQMNSLRAEDTAVYFCARSYYGYILPFDLWGQGTLVIVSS

SEQ ID NO: 18855 - protein, 122 aa, Artificial Sequence
  Synthetic construct
QVQLVQSGAEVKKPGSSVKVSCKASGGTFSSYAISWVRQAPGQGLQWMGGIIPIFGTANYAQSFQGRVTITADESTTTAYMELSSLRSEDTAVYYCAKILAYDSSGYSWDYWGQGTLVTVSS

SEQ ID NO: 18856 - protein, 121 aa, Artificial Sequence
  Synthetic construct
QVQLVESGGGVVQPGRSLRLSCAASGFAFSNYGIHWVRQAPGKGLEWVAVIWHDGINKYYADTVKGRFTISRDNSKNTLYLQMNSLRAEDTAMYYCAREGIVGTTTGLDYWGQGALVTVSS

SEQ ID NO: 18857 - protein, 125 aa, Artificial Sequence
  Synthetic construct
QVQMQESGPGLVKPSETLSLTCTVSGGSISTYYWSWIRQSPGKGLEWIGYINYGGSTTYNPSLESRLTISVDTSKNQFSLRLSSVTAADTAVYFCARGPLRYFEWKYYYNGMDVWGRGTTVTVSS

SEQ ID NO: 18858 - protein, 129 aa, Artificial Sequence
  Synthetic construct
QVQLQESGPGLVKPSETLSLTCTVSGGSISSGGYYWSWIRQHPGKGLEWIGYIYYSGSTYYNPSLKSRVTISVDTSKNQFSLRLSSVTAADTAVYYCVREQITIFGVLNTPTYHGMDVWGQGTTVTVSS

SEQ ID NO: 18859 - protein, 115 aa, Artificial Sequence; identical to SEQ ID NO: 10149
  Synthetic construct

SEQ ID NO: 18860 - protein, 120 aa, Artificial Sequence
  Synthetic construct
QVQLQESGPGLVKPSETLSLTCSVSGFSISSGYYWGWIRQPPGKGLEWIGSIYHGGYTYYNPSLKSRVTMSVDTSKNQFSLNLRSVTAADTAVHYCARGSSGWPDAFDIWGQGTLVTVSS

SEQ ID NO: 18861 - protein, 121 aa, Artificial Sequence; identical to SEQ ID NO: 2164
  Synthetic construct

SEQ ID NO: 18862 - protein, 116 aa, Artificial Sequence
  Synthetic construct
QVQLVESGGGVVQPGRSLRLSCAASGITFKDYGMHWVRQAPGRGLEWVAFISYDGSVQHYGDSVKGRFTISRDDLKSTLFLQMNSLRADDTAVYYCAKGATKVDYWGQGTLVTVSS

SEQ ID NO: 18863 - protein, 126 aa, Artificial Sequence
  Synthetic construct
QVQLVQSGAEVKKPGASVKVSCKASGYTFTNYAMHWLRQAPGQGLEWMGWINADSGKTKYSQKFQGRVTITRDTSASTAYMELSSLRSEDTAVYYCARGGEAARLIHFLTYGMDVWGQGTTVTVSS

SEQ ID NO: 18864 - protein, 124 aa, Artificial Sequence
  Synthetic construct
QVQLQESGPGLVKPSGTLSLTCAVSGGSISSSYWWSWVRQPPGKGLEWIGEIYHSGRTNYNPSLQSRVTISVDKSKNEFSLKVSSVTAADTAVYYCARRVTVAGTIGFDAFDIWGQGTVVTVSS

SEQ ID NO: 18865 - protein, 128 aa, Artificial Sequence
  Synthetic construct
QVQLQQSSTGLVKPSQTLSLTCVISGDSVSSDSAAWNWVRQSPSRGLEWLGRTYYRSTWYNDYAVSVKSRLTINPDTSKNQFSLQLNSVTPEDTAVYYCARGRDSSGLDFYFYGFDVWGQGTTVTVSS

SEQ ID NO: 18866 - protein, 122 aa, Artificial Sequence
  Synthetic construct
QVQVVQSGAEVKKPGSSVKVSCKASGGTFSSYAITWVRQAPGQGLEWMGGIIPIFGPANYAQKFQGRVTITADESTSTAYMELSSLRSEDTAVYYCARVSGYYDSGAYSDYWGQGTLVTVSS

SEQ ID NO: 18867 - protein, 132 aa, Artificial Sequence
  Synthetic construct
QVQLQQWGAGLLKPSETLSLTCGVYGGSFTGYYWSWIRQPPGKGLEWIGEITHTGSTNYNPSLKSRVTISLDTSKNQFSLKVSAVTAADTAVYYCARGMGGAARILSGGTGWPYYFYYMDVWGKGTTVTVSS

SEQ ID NO: 18868 - protein, 126 aa, Artificial Sequence
  Synthetic construct
QVQLVESGGGVVQPGKSLRLSCAPSGFTFSNYGMHWVRQAPGKGLEWVAVISNDGRNKNYADSVKGRFTISRDNSQNTLYLQMNSLRAEDTAVYYCARDSLEWFFLHHYYYGMDVWGQGTTVTVSS

SEQ ID NO: 18869 - protein, 130 aa, Artificial Sequence
  Synthetic construct
DVQLVESGGGLVQPGGSLRLSCAGSGFTFSNSWMGWVRQAPGKGLEWVANMKHDGSDKSYLDSVKGRFNISRDNAKKSLYLQMNSLRAEDTAVYYCARVGGVGDFWSGYFFVSSTYFDSWGQGTLVTVSS

SEQ ID NO: 18870 - protein, 124 aa, Artificial Sequence
  Synthetic construct
QVHLVQSGAEVKKPGSSVKVSCKASGGTFSSYTINWVRQAPGHGLEWMGRIIPILGIANYAQKFQGRVTISADKSTSTAYMELSSLTSEDTAVYYCASGGTGTWGDYYYGMDVWGQGTTVTVSS

SEQ ID NO: 18871 - protein, 119 aa, Artificial Sequence
  Synthetic construct
QVHLVQSGAEVKKPGASVKISCKASGYSFTNFAIYWVRQAPGQRPEWMGWMYAGNGDTQYSHKFQGRFTMTRDTSATTAYMELSSLTSEDTAVYYCARNPPRTQTLDSWGLGTLVTVSS

SEQ ID NO: 18872 - protein, 128 aa, Artificial Sequence
  Synthetic construct
QVQLQESGPGLVKPSGTLSLTCAVSGGSISSSNWWSWVRQPPGKGLEWIGEIYHSGNANYNPSLNSRVTISVDKSNNQFSLKLTSVTAADTAVYYCARGYMLTTVAVGVGPRYWFDPWGQGSLVTVSS

SEQ ID NO: 18873 - protein, 128 aa, Artificial Sequence
  Synthetic construct
EVQLVQSGAEVKKPGESLKISCKGSGYSFSSYWIGWVRQMPGKGLEWMGMVYPGDSDTKFSPSFQGQVTISADNSISTAYLQWSSLKASDTAMYFCARHPPFWGGPTVMVGWGEFDFWGQGTLVTVSS

SEQ ID NO: 18874 - protein, 119 aa, Artificial Sequence
  Synthetic construct
QVQLVQSGSELKKPGASVKVSCKASGYTFTSYAMSWVRQAPGQGLEWMGWIDTNTGNPTYAQGFTGRFVFSLDTSVSTTYLQISSLKAEDTAVFYCATSPCSSCPLDYWGQGTLVSVSS

SEQ ID NO: 18875 - protein, 120 aa, Artificial Sequence
  Synthetic construct
QVQLVESGGSVVQPGKSLRLSCAASRFTFSSFAMHWVRQAPGKGLEWLAVVSYDGSNKYYADSVKGRFTISRDNSKNTLYLQMNSLRAEDTAVYYCAADSSGYYGVLGNWGQGTLVTVSS

SEQ ID NO: 18876 - protein, 126 aa, Artificial Sequence
  Synthetic construct
QVQLVQSGSELKNPGASVKVSCKASGYTFTTYAMNWVRQAPGQGLEWMGWINTNTGDPTYAQGFTGRFVFSLDTSVNTAYLQISSLKAEDTAVYYCARDFDSMIRGGYYYYYMDVWGKGTTVTVSS

SEQ ID NO: 18877 - protein, 112 aa, Artificial Sequence
  Synthetic construct
QVQLQESGPGLVKPSETLSLTCTVSGDSISGYYWTWIRQPPGKGLEWIGYMYYGGNTNYNPSLKSRVTISVDTSKNQFSLKLSSVTAADTAVYYCARGFDPWGQGTLVTVSS

SEQ ID NO: 18878 - protein, 117 aa, Artificial Sequence
  Synthetic construct
QVQLVQSGSELKKPGASVKVSCKASGYTFTKYAMNWVRQAPGQGLEWMGWINTNTGNPTYAQGFTGRFVFSLDTSVSTAYLQISSLKAEDTAVYYCARDITPSPDVWGKGTTVIVSS

SEQ ID NO: 18879 - protein, 122 aa, Artificial Sequence
  Synthetic construct
EVQLVESGGGLVKPGGSLRLSCAASGFTFTAYNMNWVRQAPGKGLEWVSSMSGRNNYIHYADSVKGRFTISRDNAKNSLYLQMNSLGAEDTAVYFCTRDLIAAYSYYGMDVWGRGTTVTVSS

SEQ ID NO: 18880 - protein, 123 aa, Artificial Sequence; identical to SEQ ID NO: 2353
  Synthetic construct

SEQ ID NO: 18881 - protein, 127 aa, Artificial Sequence
  Synthetic construct
EVQLVQSGVEVKKPGESLKISCKGSGYNFTSYWIGWVRQMPGKGLEWMGIIYPDDSNTRYSPSFQGQVTISADKSINTAYLQWSSLKASDTAMYYCARGRISYVLRFLEWLPDFDYWGQGTLVTVSS

SEQ ID NO: 18882 - protein, 127 aa, Artificial Sequence
  Synthetic construct
QLQLQESGPGLVKPSETLSLTCTVSGGSISSSNYYWGWIRQPPGKGLEWIGSIYYSGNNYYNPSLKSRVTISVDTSKNQFSLRLSSVTAADTAVYYCARHSYYHDIAAYVNTSPDYWGRGTLVTVSS

SEQ ID NO: 18883 - protein, 120 aa, Artificial Sequence; identical to SEQ ID NO: 10444
  Synthetic construct

SEQ ID NO: 18884 - protein, 125 aa, Artificial Sequence
  Synthetic construct
EVQLVESGGGLVQPGRSLRLSCAASGFTFDDYAMHWVRQAPGKGLEWVSGISWNSGFIGYADSVKGRFTISRDDARNSLYLQMNSLRAEDTAFYYCAKQPFGSRNYYNVGSIDYWGQGTLVTVSS

SEQ ID NO: 18885 - protein, 117 aa, Artificial Sequence
  Synthetic construct
QVQLQQWGAGLLKPSETLSLTCAVYGGSFSGYYWSWIRQPPGKGLEWIGEIDHSGSTNYNPSLKTRVTISVDTSKNQFSLKLSSVTAADTAIYYCARGPWVEYFQHWGQGTLVTVSS

SEQ ID NO: 18886 - protein, 120 aa, Artificial Sequence
  Synthetic construct
QVQLVESGGGVVQPERSLRLSCAASGFTFSSYGIHWVRQAPGKGLEWVAVIWYDGTKKYYADSVKGRFTISRDTPKNMVYLQMNSLRAEDTAMYYCARDGVVGATGIDHWGQGTLVTVSS

SEQ ID NO: 18887 - protein, 122 aa, Artificial Sequence
  Synthetic construct
QVQLVQSGAEVKKPGASVKVSCKASGYSFTAYAIHWVRQAPGQRLECVGWINGANGNTKYSQKFQGRVTITRDTSANTAYMELSSLRSEDTAVYYCARDPLHYYDKSGYDYWGQGTLVTVSS

SEQ ID NO: 18888 - protein, 126 aa, Artificial Sequence; identical to SEQ ID NO: 10092
  Synthetic construct

SEQ ID NO: 18889 - protein, 131 aa, Artificial Sequence; identical to SEQ ID NO: 18535
  Synthetic construct

SEQ ID NO: 18890 - protein, 120 aa, Artificial Sequence
  Synthetic construct
QVHLQEWGPGLVKPSETLSLTCSVSGGSMSNYYWSWIRQPPGKGLEWIGYIYDSGSTNYNPSLKSRVTISVDTSKNQFSLKLTSVTAADTAVYYCAGGPAATYYYYMDVWGKGTTVTVSS

SEQ ID NO: 18891 - protein, 119 aa, Artificial Sequence; identical to SEQ ID NO: 2467
  Synthetic construct

SEQ ID NO: 18892 - protein, 120 aa, Artificial Sequence
  Synthetic construct
EVQLVESGGGLAQPGGSLRVSCAASGFTFSSYWMHWVRQAPGEGLVWVSYLNFDGGTTTYADSVKGRFTISRDNAKNMLYLQMNDLRAEDTAVYYCARANQRFGGAYDIWGQGTMVSVSA

SEQ ID NO: 18893 - protein, 121 aa, Artificial Sequence; identical to SEQ ID NO: 1760
  Synthetic construct

SEQ ID NO: 18894 - protein, 122 aa, Artificial Sequence
  Synthetic construct
QVQLVQSGAEAKKPGASVKVSCKVSGYTLPELSLHWVRQAPGKGLEWMGGFDPEDGETIYAQKFQGRVTMTEDTSTDTAYMELSSLRSEDTAVYYCLIGSPVAASAGWFDPWGQGTLVTVSS

SEQ ID NO: 18895 - protein, 123 aa, Artificial Sequence
  Synthetic construct
EVQLVESGGGLVQPGGSLRLSCAASGFTFNNYWMNWVRQAPGKGLEWVANIKQDGSEKYYVDSMRGRFTISRDNSKNSLYLQMNSLRAEDTAVYYCARARRLWFGDHDAFDLWGQGTMVTVSS

SEQ ID NO: 18896 - protein, 121 aa, Artificial Sequence
  Synthetic construct
EVQLLESGGGLVQPGGSLRLSCAASGFTFSSYAMSWVRQAPGKGLEWVSDISGSGLSTYYADSVKGRFTISRDNSKNTLYLQMNSLRAEDTALYYCARDSSSWYWWFFDLWGRGTLVTVSS

SEQ ID NO: 18897 - protein, 84 aa, Artificial Sequence
  Synthetic construct
EVQLVQSGGGLVQPGGSLRLSCAASGFNTPRADSPSPEAIPRTRSIFKTADLRTRLCITVREIGASATTSLWTSGAKGPRSPSP

SEQ ID NO: 18898 - protein, 117 aa, Artificial Sequence
  Synthetic construct
QVQLVESGGGVVQPGRSLRLSCAASGFTFSTYAIHWVRQAPGKGLEWVALISYDGRNKYYADSVKGRFTISRDNSKNTLYLQMNSLRPDDTAVYYCARDGGGWIDPWGQGTLVTVSS

SEQ ID NO: 18899 - protein, 120 aa, Artificial Sequence
  Synthetic construct
EVQLLESGGGLVQPGGSLRLSCAASGFTFSSYAMNWVRQAPGKGLEWVSAISGSGGSTYYAESVKGRFTISRDNSKNTLFLQMNSLRAEDTAVYYCAKAWLLHWSPFHYWGQGTLVTVSS

SEQ ID NO: 18900 - protein, 119 aa, Artificial Sequence
  Synthetic construct
QVQLVQSGSELRKPGASVKVSCKASGYTLRNFALHWVRQAPGQGLEWMGWINTYSRDPTYAQDFKRRFVFSVDTSVNTAYLQITSLKPEDTAVYYCARPPTLGDHFDYWGQGTLVTVSS

SEQ ID NO: 18901 - protein, 123 aa, Artificial Sequence
  Synthetic construct
QLQLQESGPGLVKPSETLSLTCTVSGGSISSSSYYWGWIRQPPGKGLEWIGTIYYSGSTYYNPSLKSRVTISVDTSKTQFSLKLSSVTAADTAVYYCARDRRGGGWTASFDFWGQGTLVTVSS

SEQ ID NO: 18902 - protein, 124 aa, Artificial Sequence
  Synthetic construct
QVQLQQWGAGLLKPSETLSLTCAVYGGSFSGYYWSWIRQPPGKGLEWIGEINHSGSTNYNPSLKSRVTISVDTSKNQFSLKLSSVTAADTAVYYCARWVWRPEFLYSGSYYDYWGQGTLVTVSS

SEQ ID NO: 18903 - protein, 121 aa, Artificial Sequence
  Synthetic construct
QVQLVESGGGVVQPGKSLRLSCVVSGFTFSTYAMHWVRQTPGKGLEWVAVISYDGSNKYYADSVKGRFPISRDNSKNTLYLQMNTLRAEDTAVYYCARGYGGNYRAYFDYWGQGTLVTVSS

SEQ ID NO: 18904 - protein, 120 aa, Artificial Sequence
  Synthetic construct
QVQLQESGPGLVKPSGTLSLTCAVSGGSISSSIWWSWVRQPPGKGLEWIGEIYHSGSTNYNPSLESRVTMSVDKSKNQFSLNLSSVTAADTAVYYCVSRNSGYHNWFDPWGQGTLVTVSS

SEQ ID NO: 18905 - protein, 118 aa, Artificial Sequence
  Synthetic construct
EVQLVESGGGLVQPGGSLRLSCAASGFTVSSSYMSWVRQAPGKGLEWVSVIYRGGNTYYADSVKGRFAISRDNSNNTLYLEMNSLRAEDTALYYCARRSAGSWSHDYWGQGTLVTVSS

SEQ ID NO: 18906 - protein, 126 aa, Artificial Sequence
  Synthetic construct
EVQLVESGGGLVKPGGSLRLSCAASGITFSSYNMNWVRQAPGKGLEWVSSISSSSSHTSYADSVRGRFTISRDNAKNSLYLQMSSLRAEDTAMYYCASAEEDFAVAENYFYGMDVWGQGTTVTVSS

SEQ ID NO: 18907 - protein, 117 aa, Artificial Sequence
  Synthetic construct
EVQLVQSGAEVKKPGESLRISCKASGYTFTSNWITWVRQMPGKGLEWMGRIDPSDPYSNSSPSFQGHATISVDKSISTAYLQWSSLKASDTAIYYCARVMGGGPELWGQGTLVTVSS

SEQ ID NO: 18908 - protein, 124 aa, Artificial Sequence; identical to SEQ ID NO: 10083
  Synthetic construct

SEQ ID NO: 18909 - protein, 126 aa, Artificial Sequence
  Synthetic construct
EVQLVESGGGLVKPGGSLRLSCAASGFTFSSYSMNWVRQAPGKGLEWVSSISSSSSYIYYADSVKGRFTISRDNAKNSLYLQMNSLRAEDTAVYYCASAEEDFGVVENYYYGMDVWGQGTTVTVSS

SEQ ID NO: 18910 - protein, 121 aa, Artificial Sequence
  Synthetic construct
QVQLVESGGGVVQPGRSLRLSCAASGFTFRSYGIHWVRQAPGKGLEWVAVIYHDGSNKYYADSVKGRFTISRDNSKNTLYLQMNSLRAEDTAVYYCAREGQVGATTGADYWGQGTLVTVSS

SEQ ID NO: 18911 - protein, 119 aa, Artificial Sequence
  Synthetic construct
QITLKESGPTLVKPTQTLTLTCTFSGFSLSTGGVGVGWIRQPPGKALEWLALIYWDDDKRYSPSLKSRLAITKDTSKNQVVLTMTNMDPVDTATYYCAHHTIPTIYNYWGQGTLVAVSS

SEQ ID NO: 18912 - protein, 117 aa, Artificial Sequence; identical to SEQ ID NO: 18878
  Synthetic construct

SEQ ID NO: 18913 - protein, 123 aa, Artificial Sequence
  Synthetic construct
AEQLVESGGGLVQPGGSLRLSCAASGFTFSNYAMSWVRQAAGEGLEWVSGISGSGVNTNYADSVKGRFTISRDSSRNTLFLQMTGLRADDTAVYYCAKEGLQYSTFYYYMDVWGKGTTVTVSS

SEQ ID NO: 18914 - protein, 125 aa, Artificial Sequence
  Synthetic construct
QVQLVQSGAEVKKPGASVKVSCKVSGYTLIELSMHWVRQAPGKGLEWMGGFDPEDGETIYAQKFQGRVTMTEDTSTDTAYMELSSLRSEDTAVYYCAAGPPYCSTSRCPNWFDPWGQGTLVTVSS

SEQ ID NO: 18915 - protein, 125 aa, Artificial Sequence
  Synthetic construct
QVQLVQSGSELKKPGASVNVSCKASGYTFTSYAMNWVRQAPGQGLEWMGWINTNTGNPTYALGFTGRFVFSLDTSVSTAYLQISSLKAEDTAVYYCARDRDTGMPSYSYYYMDVWGKGTTVTVSS

SEQ ID NO: 18916 - protein, 120 aa, Artificial Sequence
  Synthetic construct
QITLEESGPTLVTPTQTLTLTCSFSGFSLDTIGVAVAWIRQPPGKALEWLGTVFWDYDKRYSPPLSSRLTVIKDTSQQYVVLRLTDVGPGDTATYYCARLLIEHDAFDIWGQGAVVIVSS

SEQ ID NO: 18917 - protein, 119 aa, Artificial Sequence; identical to SEQ ID NO: 2467
  Synthetic construct

SEQ ID NO: 18918 - protein, 124 aa, Artificial Sequence
  Synthetic construct
QVQLVQSGAEVKKPGSSVKVSCKASGGTFSSYPISWVRQAPGQGLEWMGRIIPILGIANYAQNFQGRVTITADKSTGTAYMDLSSLRSDDTAVYYCAREKGYSSSSATYYFDYWGLGTPVTVSS

SEQ ID NO: 18919 - protein, 121 aa, Artificial Sequence
  Synthetic construct
QVQLVESGGGVVQPGRSLRLSCAASGFTFSIYAMHWVRQAPGKGLEWVALISYDGINKYFADSVRGRFTISRDNSKNTLYLQISSLRAEDTAVYYCAKSRGGNYLDAFDIWGQGTMVTVSS

SEQ ID NO: 18920 - protein, 126 aa, Artificial Sequence
  Synthetic construct
QVQLVESGGGVVQPGRSLRLSCAASGFTFRTYGMHWVRQAPGKGLEWVAVISYDGDNEYYADSVKGRFTISRDNSKNSLYLQMNSLRAEDTAVYYCAKREGVYCAGDCSTGPFDFWGQGTLVTVSS

SEQ ID NO: 18921 - protein, 126 aa, Artificial Sequence
  Synthetic construct
QITLKESGPTLVKPTQTLTLTCTFSGFSLSTSGLGVGWIRQPPGKALEWLALIYWDDDKRYSPSLRSRLTITKDTSKNQVVLTITNMDPVDTATYFCAHRLHPYTSSSWDGWFDPWGQGTLVTVSS

SEQ ID NO: 18922 - protein, 126 aa, Artificial Sequence
  Synthetic construct
QVQLVQSGAEVKKPGASVKVSCKASGYTFSAYAIHWVRQAPGQRLEWMGWINAGNGDTKYSQNFQGRVTITRDTSANTAYLDLSSLRSEDTAVYYCARGGTWMHLTTYYLYAVDVWGRGTTVSVSS

SEQ ID NO: 18923 - protein, 122 aa, Artificial Sequence
  Synthetic construct
QVQLVQSGAEVKKPGSSVKVSCKASGGTFNSYAITWVRQAPGQGLEWMGGIIPIFGTTNYAQKFQGRVTISADESTSTAYMELSSLRSEDTAVYYCTRVYQYEASGSYGDYWGQGTQVTVSS

SEQ ID NO: 18924 - protein, 123 aa, Artificial Sequence
  Synthetic construct
QVQLVQSGAEVKKPGASVKVSCKASGYTFASYYVHWVRQAPGQGLEWMGIINPGGASTSYAQKLQGRVAMTGDTTTSTVYMELSRLRSEDTAVYFCARGSGPIPSKWYFFDNWGQGTLVTVSS

SEQ ID NO: 18925 - protein, 120 aa, Artificial Sequence
  Synthetic construct
QVQLQQSGPGLVKPSQTLSLTCAISGDSVSSNSVTWNWIRQSPSGGLEWLGRTYYRSKWYNEYALSVKSRITINPDTSKNQFSLQLNSVTPGDTAVYYCARNNNWSFDSWGQGILVTVSS

SEQ ID NO: 18926 - protein, 123 aa, Artificial Sequence; identical to SEQ ID NO: 18913
  Synthetic construct

SEQ ID NO: 18927 - protein, 127 aa, Artificial Sequence
  Synthetic construct
QVQLVQSGSELKKPGASVKVSCKASGYTFTSYAMNWVRQAPGQGLEWMGWINTNTGSPTYAQGFTGRFVFSLDTSVSTAYLQISSLKAEDTAVYYCARDFDGLVRGSFRQYYYMDVWGKGTTVTVSS

SEQ ID NO: 18928 - protein, 124 aa, Artificial Sequence
  Synthetic construct
QVQLIQSGAEVKKPGASVMVSCKVSGYTLIELSMHWVRQAPGKGLEWMGGFDPEDVETIYAQKFQGRVTMTEDTSIDTAYMELSSLRSEDTAVYYCTTAFAYCGGDCYGRFDYWGQGTLVTVSS

SEQ ID NO: 18929 - protein, 124 aa, Artificial Sequence
  Synthetic construct
QVQLVQSGAEVRNPGASVKVSCKTSGYTFNSYYIHWVRQAPGQGLEWMGIIQPSGGMTSYAQKLQGRVTMTRDTSTSTVYMELSSLRSEDTAIYYCARDPTRPSAGDDDGFDVWGRGTMVTVSS

SEQ ID NO: 18930 - protein, 119 aa, Artificial Sequence
  Synthetic construct
QITLKESGPTLVKPTQTLTLTCTFSGFSLSTSGVGVGWIRQPPGKALEWLALIYWDGDKRYSPSLKNRLTITEDTSKNQVVLTMTNMDPVDTATYYCAHHTVPTIYDYWGQGTLVTVSS

SEQ ID NO: 18931 - protein, 122 aa, Artificial Sequence
  Synthetic construct
QVQLVQSGAEVKKPGSSVKVSCKASGGTFSSYAITWVRQAPGQGLEWMGGIIPIFGTANYAQKFQARVTITSDESTSTAYMELSSLRSEDSAVYYCARVSGYDSSGYWADYWGQGTLVTVSS

SEQ ID NO: 18932 - protein, 121 aa, Artificial Sequence
  Synthetic construct
QVQLVESGGGVVQPGRSLRLSCAASGFTFSIYAMYWVRQTPGKGLEWVAVISYDGTNKYYADSVKGRIIISRDNSKNTLYLQMNSLRPDDTAVYYCARVYSGSYKSYFDYWGQGTLVTVSS

SEQ ID NO: 18933 - protein, 128 aa, Artificial Sequence
  Synthetic construct
QVQLVQSGAEVKKPGSSVKVSCKASGGTFSRYAVSWVRQVPGQGLEWMGGIIPIFGTANYTQKFQGRVTITADKSTRAVYMEVSSLRSEDTAVYYCARALWHYDRSGYYQAAEYFQYWGQGTLVTVSS

SEQ ID NO: 18934 - protein, 125 aa, Artificial Sequence
  Synthetic construct
EVQLVQSGTEVNKPGESLRISCKVSGYRFTAYWISWVRQMPGKGLEWVGTIDPSDSYTNYSPSFQGHVTISGDKSVSTAYLQWSSLKASDTAIYYCARHNLKAVAGIPYWYFDLWGRGTLVIVSS

SEQ ID NO: 18935 - protein, 125 aa, Artificial Sequence
  Synthetic construct
EVQLVQSGAEVKKPGESLKISCKGSGYSFTSNWIVWVRQMPGKGLEWMGIIYPDDSDTRYSPSFQGQVTISADKSISTAYLQWRSLKASDTAIYYCARLNSGYEFYYYFYYMDVWGTGTTVTVSS

SEQ ID NO: 18936 - protein, 129 aa, Artificial Sequence
  Synthetic construct
EVQLVESGGGLVQPGGSLRLSCAASGFTFSHYSMDWVRQAPGKGLEWVSYISSSSSTIYYADSVKGRFTISRDNAKNSVYLQMNSLGAEDTAVYYCARDFADSKYSGGWYKYYYYMDVWGKGTTVSVSS

SEQ ID NO: 18937 - protein, 123 aa, Artificial Sequence
  Synthetic construct
EVHLVESGGGLVQPGGSLRLSCEASGFTFSNYAMSWVRQAPGKGLEWVSGISGIGVSTYLADSLKGRFIMSRDNSKNTVYLQMNSLRGEDTAVYYCAKEGLQYSRFHYYMDVWGKGTTVTVSS

SEQ ID NO: 18938 - protein, 127 aa, Artificial Sequence
  Synthetic construct
EVQLVESGGGLVKPGGSLRLSCAASGFNFSTYTMNWVRQAPGKGLEWVSSISSRSSYIYYADSMKGRFTISRDNAKNSLYLEMHSLRAEDTAVYYCARWAPYDYDSSGYYPHAFDVWGQGTMVTVSS

SEQ ID NO: 18939 - protein, 122 aa, Artificial Sequence
  Synthetic construct
QVQLQESGPGLVKPSETLSLTCTVSGYSISSDYYWGWIRQPPGKGLEWIGNIFHSGSTYYNPSLKSRVTISVDTSKNQFSLRLSSVTAADTAVYYCARAMDTYYYHGTFDYWGQGILVTVSS

SEQ ID NO: 18940 - protein, 121 aa, Artificial Sequence
  Synthetic construct
QVQLVQSGAEVKKPGASVKVSCKVSGYTLSEISMHWVRQAPGKGLEWMGGFDPEDAETIYAQKFQDRVSMTEDTSTDTAYMELRSLRSEDTAVYYCAISPAIVRQNWFDPWGQGTLVTVSS

SEQ ID NO: 18941 - protein, 128 aa, Artificial Sequence; identical to SEQ ID NO: 10059
  Synthetic construct

SEQ ID NO: 18942 - protein, 121 aa, Artificial Sequence
  Synthetic construct
EIQLVESGGVVVQPGGSLRLSCAASGFTFDDYTMHWVRQAPGKGLEWVSLISWDGGSTYYADSVKGRFTISRDNSKNSLSLQMNSLRTEDTALYYCAKDFNRFGEFPLDYWGQGTLVTVSS

SEQ ID NO: 18943 - protein, 118 aa, Artificial Sequence
  Synthetic construct
EVQLVESGGGLVQPGGSLRLSCAASGFTFSSFAMSWVRQAPGKGLEWVSAISGSGGATNYADSVKGRFTISRDNSKNTLYLQMNSLRAEDTAVYYCAKMAATMGRDYWGQGTLVTVSS

SEQ ID NO: 18944 - protein, 126 aa, Artificial Sequence
  Synthetic construct
EVQLVESGGGLVKPGGSLRLSCAASGLTFSSYNMNWVRQAPGKGLEWVSSISSSSSYIYYADSVKGRFTISRDNAKNSLYLQMNSLRAEDTAVYYCASAEEDFAVVENYFYGMDVWGQGTTVTVSS

SEQ ID NO: 18945 - protein, 124 aa, Artificial Sequence
  Synthetic construct
QVQLVESGGGVVQPGRSLRLSCAASGFTFSNYGMHWVRQAPGKGLEWVAVMWSIGNNKYYADSVKGRFTISRDNSKNTLYLQMNSLRVEDTAVYYCAREVPSDNWSDVGAFDVWGQGTMVTVSS

SEQ ID NO: 18946 - protein, 126 aa, Artificial Sequence
  Synthetic construct
QVQLQESGPGLVKPSGTLSLTCAVSGGSISSSNWWTWVRQPPGKGLEWIGEIYHSGSTNYNPSLKSRVTISVDKSKNQFSLRLTSVTAADTAVYYCARSQGIVVVPDGIGRMFDPWGQGTLVTVSS

SEQ ID NO: 18947 - protein, 121 aa, Artificial Sequence
  Synthetic construct
QVQLQESGRGLVKPSETLSLTCTVSGGSVSSGNYYWSWIRQPPGKGLEWIGYIYYSGSTHYNPSLKSRVTMSVDTSKNQFSLKLSSVTAADTAFYYCARAKDILTGYVDYWGQGTLVTVSS

SEQ ID NO: 18948 - protein, 122 aa, Artificial Sequence
  Synthetic construct
QVQLVQSGAEVKKPGSSVKVSCKASGGTFSSYAISWVRQAPGQGLEWMGGIIPIFGTANYAQKFQGRVTITADESTSTAYMELSSLRSEDTAVYYCARWDSYDSSGYYFDYWGQGTLVTVSS

SEQ ID NO: 18949 - protein, 115 aa, Artificial Sequence
  Synthetic construct
EVQLLESGGGLVQPGGSLRLSCAASGFTFNSDAMSWVRQAPGKGLEWVSAISGGGASTYYADSVKGRFTISRDNSKNTLYLQMYSLRADDTAVYYCAKGYSPDVWGQGTTVTVSS

SEQ ID NO: 18950 - protein, 119 aa, Artificial Sequence
  Synthetic construct
QITLKESGPTLVKPTQTLTLTCTFSGFSLNTSGVAVGWIRQPPGKALEWLALIYWDDDKRYSPSLKSRLTITKDTSKNQLVLTMTNMDPVDTATFYCARLTTVTIFDYWGQGILVTVSS

SEQ ID NO: 18951 - protein, 121 aa, Artificial Sequence
  Synthetic construct
QVQLVESGGGVVQPGRSLRLSCAASGFTFSSYAMHWVRQAPGKGLEWVALISYDGDNKYYADSVKGRFTISRDNSKNTLYLQMSSLRAEDTAVYYCARDAGSGWYSLGRYWGQGTLVTVSS

SEQ ID NO: 18952 - protein, 123 aa, Artificial Sequence
  Synthetic construct
QLQLQESGPGLVKPSETLSLTCTVSGGSISSSSHYWGWIRQPPGKGLEWIGNIFYSGATYYNPSLKSRITISVDTSRNQFSLKLSSVTAADTAVYFCAEYSSGWSRDDAFDIWGQGTMVTVSS

SEQ ID NO: 18953 - protein, 121 aa, Artificial Sequence
  Synthetic construct
QVQLVESGGGGVQPGRSRRLSCAASGFIFSSYAMHWVRQAPGKGLEWVAVISYDGSNEYYPDSVKGRFTISRDNSKNTLYLQMNSLRAEDTAVYYCARDSSGGYWGYFDYWGQGTLVTVSS

SEQ ID NO: 18954 - protein, 121 aa, Artificial Sequence
  Synthetic construct
QVQLVESGGGVVQPGGSLRLSCEASGFTFSSYGMHWVRQAPGKGLEWVAVIYYDGRNEYYADSVKGRFTISRDNSKNTLYLQLNSLRAEDTAVYYCAREGQVGTTTGADYWGQGTLVTVSS

SEQ ID NO: 18955 - protein, 123 aa, Artificial Sequence
  Synthetic construct
QLQLQESGPGLVKPSETLSLTCTVSGGSISSSSSYWGWIRQPPGKGLEWIGSIYYSGSTYYNPSLKSRVTISVDTSKNQFSLKLSSVTAADTAVYYCARFVSGYSFDDGFDIWGQGTMVTVSS

SEQ ID NO: 18956 - protein, 112 aa, Artificial Sequence
  Synthetic construct
QVQLQESGPGLVKPSETVSLTCTVSGGSISDYYWSWIRQPPGKGLEWIGYISYSGSTKYNPSLKSRVTISGDTSKNQLSLRLSSVSAADTAVYYCARGYTDWGQGTLVTVSS

SEQ ID NO: 18957 - protein, 129 aa, Artificial Sequence
  Synthetic construct
EVQLVESGGGLVKPGGSLRLSCAASGFTFNYAWMSWVRQAPGKGLEWVGRIKSKTDGGTTDYAAPVKGRFTISRDDSKNTLYLQMSSLKTEDTAVYYCTTDKGPPFTWTVVDHDAFDIWGQGTMVTVSS

SEQ ID NO: 18958 - protein, 127 aa, Artificial Sequence
  Synthetic construct
QVQLQESGPGLVKPSDTLSLTCTVSGGSISSYYWSWIRQPPGKGLEWIGYTYYIGSTNYNPSLKSRVTISIDTSKNQLSLQLGSVTAPDTAVYYCARFPPDSSGFFPHAFHYYMDVWGIGTTVTVSS

SEQ ID NO: 18959 - protein, 120 aa, Artificial Sequence
  Synthetic construct
QLQLQESGPGLVKPSETLSLTCNVSGGSISINNYYWGWIRQPPGKGLEWIGSIYYSGNTYYNPSLKSRVTISVDTSKNQFSLRLSSVTAADTAVFYCARLYPVPGAFDYWGQGTLVTVSS

SEQ ID NO: 18960 - protein, 133 aa, Artificial Sequence
  Synthetic construct
QLQLQESGPGLVKPSETLSLTCTVSGGSFSSSSYYWGWIRQPPGKGLEWIGTIYYSGSTYYSPSLKSRVTISVDTSKNQFSLKLSSVTAADTAVYYCARLRGYIQWLLGYGADNGGNWYFDLWGRGTLVTVSS

SEQ ID NO: 18961 - protein, 129 aa, Artificial Sequence
  Synthetic construct
QVQLQESGPGLVKPSQTLSLTCTVSGGSISSGTYYWSWIRQSAGKGLEWIGRIYSSGSTNYNPSLKSRVTISVDTSKNQFSLKLSSVTAADTAVYFCARYYDSSGYYPRDYYYSGLDVWGQGTTVTVSS

SEQ ID NO: 18962 - protein, 123 aa, Artificial Sequence
  Synthetic construct
AVQLVESGGGLVQPGGSLRLSCAASGFTFSNYAMSWVRQAAGKGLEWVSGISASGVNTYYADSVKGRFTISRDSSRNTLFLQMDGLRAEDTAVYYCAKEGLEYSTFYYYMDVWGKGTTVTVSS

SEQ ID NO: 18963 - protein, 131 aa, Artificial Sequence
  Synthetic construct
QLQLLESGPGLVKPSETLSLTCTVSGGSISSSGYYWGWIRQPPGKGLEWIGIIYYTGSTYYKPSLKSRVTISVDTSKNQFSLKLSSVTATDTAVYYCARHVEAYSGYDSKSFYGDYVPADWGQGTLVIVSS

SEQ ID NO: 18964 - protein, 123 aa, Artificial Sequence
  Synthetic construct
QLQLQESGPGLVKPSETLSLTCTVSGGSISSNTYYWGWIRQPPGKGLEWIGSIYYSGNSYYNPSLKSRVTISIDTSKNQFSLMLRSVIAADTAVFYCARYHSGYSYDEGFDIWGQGTMVTVSS

SEQ ID NO: 18965 - protein, 128 aa, Artificial Sequence
  Synthetic construct
QVQLVQSGNEVKKPGASVRVSCKASGYSFTRYGIGWVRQAPGEGLQWMGWISGYNGNTYYEQRFQGRVFMTTDRSTTTAYLELRSLRSDDTAVYFCARLGFGELLVLPQVVQEPFDLWGQGTQVIVSS

SEQ ID NO: 18966 - protein, 120 aa, Artificial Sequence
  Synthetic construct
QVQLVQSGAELKKPGSSVRVSCTASGGDFTYYPLSWMRQAPGRGLEWLGGIIPGYGGAHVARRFQDRVTITADESTTTVNMELRSLRSDDSAVYYCAREEGSGWWKHDYWGQGTLVTVSS

SEQ ID NO: 18967 - protein, 117 aa, Artificial Sequence
  Synthetic construct
QVQLVESGGGVVQPGRSLRLSCTASGFTFSNYAIHWVRQAPGKGLEWAAVISSDGTIQYYADSVRGRFSISRDNSKNTLYLQMNNLRAEDTAVYYCAKDSSGIPDYWGQGTLVTVSS

SEQ ID NO: 18968 - protein, 124 aa, Artificial Sequence
  Synthetic construct
EVQLLESGGGLGQPGGSLRLSCAASGFTFSSHAMSWVRQAPGKGLEWVSAISGSGDSTYYADSVKGRFTISRDNSRNTLYLQMNSLRAEDTAVYYCAKGRHLLSLGDCFPFDYWGQGTLVTVSS

SEQ ID NO: 18969 - protein, 122 aa, Artificial Sequence
  Synthetic construct
QVQLVESGGGGVQPGRSLRLSCAASGVTFSSYAMHWVRQAPGKGLEWVAVISYDGNNKYYADSVKGRFTVSRDNSKNTLYLQMNSLRAEDTALYYCARGYDILTGYLYFDYWGQGTLVTVSS

SEQ ID NO: 18970 - protein, 120 aa, Artificial Sequence
  Synthetic construct
QVQLVESGGGVVQPGRSLRFSCTASGFTFNTYAMHWVRQAPGKGLEWVAVISYDGSQKYYADSVKGRLTISRDNAKNTLYLQMNSLRAEDTAVYYCARGMSMIRGVPDYWGQGTLVTVSS

SEQ ID NO: 18971 - protein, 120 aa, Artificial Sequence
  Synthetic construct
QVQLVESGGGVVQPGTSLRLSCVASGFTFSTYGMHWVRQAPGKGLEWVAVIWYDGSNKYYADSVKGRFTISRDKSKNTLFLQMNSLRVEDTAVYYCARDGVVGATGIDYWGQGTQVTVSS

SEQ ID NO: 18972 - protein, 121 aa, Artificial Sequence
  Synthetic construct
QVQLVESGGGVVQPGRSLRLSCVASGFTFSTFAIHWVRQAPGKGLEWVAVISYDGSNKYYADSVKGRFTISRDNSKNTLWLLMHSLIFEDTGVYYCARSKSGSYLSWFDPWGQGTLVTVSS

SEQ ID NO: 18973 - protein, 127 aa, Artificial Sequence
  Synthetic construct
EVQLVESGGGLVQPGGSLRLSCAASGFTSSSYWMSWVRQAPGKGLEWVANINQDGSEKYYVDSVKGRFTISRDNAKNSLYLQMNSLRAEDTAVYYCARGGLYYYDSSAYYISAFDIWGQGTMVTVSS

SEQ ID NO: 18974 - protein, 120 aa, Artificial Sequence
  Synthetic construct
EIQLVQSGAEVKKPGESLRISCKGSGYDFPIYWIGWVRQMPGKGLEWMGIIYVGDSDIRYSPSFQGQVTISVDKSISTAYLQWSSLKASDTATYYCARTLGRGHWYFDLWGRGTLITVSS

SEQ ID NO: 18975 - protein, 118 aa, Artificial Sequence
  Synthetic construct
QITLEESGPTLVKPTQTLTLTCTVSGLSLSSTGVGVGWIRQSPGKALEWLALVWWDGDDRYSASLKNRLSISKAASSDQVVLTMTNVGPADTATYYCAHASTAGFTHWGQGTLVTVSS

SEQ ID NO: 18976 - protein, 120 aa, Artificial Sequence
  Synthetic construct
QVQLVESGGGVVQPGRSLRLSCAASGFTFSDYAMHCVRQAPGKGLEWVAAISFDGTNTYYADSVKGRFTISRDNSKNTLYVQVNSLLTEDTAVYYCVRSRGGRTDAFDIWGQGTMVTVSS

SEQ ID NO: 18977 - protein, 129 aa, Artificial Sequence
  Synthetic construct
QVQLVESGGGVVQPGRSLRLSCAASGFTFSTYAMHWVRQAPGEGLEWVAVISYDGSDKYYADSVKGRFTISRDTSKNTLSLQMNSLRAEDTAVYYCARDGAYCSGGICYPDIVFTMDVWGTGTTVTVSS

SEQ ID NO: 18978 - protein, 120 aa, Artificial Sequence
  Synthetic construct
QITLKESGPTLVKPTQTLTLTCTFSGFSLSTSGVAVGWIRQPPGKALEWLALIYWDDDKRYSPSLKNRLTITTDTSRHLVVLTLTNMDPVDTATYYCAHIVSGYYYVDYWGQGTLVTVSS

SEQ ID NO: 18979 - protein, 128 aa, Artificial Sequence
  Synthetic construct
QVQLVESGGGLVRPGGSLRLSCAASGFTFSDYYMSWIRQAPGKGLEWVSYIDSSGSTIYYTDSVKGRFTMSRDNAKNSLYLQMTSLRAEDTAVYYCARDALNFDWLWRTAPDLAFDYWGQGTLVTVSS

SEQ ID NO: 18980 - protein, 125 aa, Artificial Sequence
  Synthetic construct
EVQLVESGGGLVKPGGSLRLSCAASGFTFSSYSMNWVRQAPGKGLEWVSSISRSSSYISYADSVKGRFTISRDNAKNSLYLQMSSLRVEDTAVYYCARDLDYYDSSGSWPPLDCWGQGTLVTVSS

SEQ ID NO: 18981 - protein, 118 aa, Artificial Sequence
  Synthetic construct
EVQLLETGGGLVQPGGSLRLSCAASGFTFSSYAMSWVRQAPGKGLEWVSAISGSGGRTYYADSVKGRFTISRDNSKNTLYLQMNSLRAEDTAEYYCAAITGTGSFDYWGQGTLVTVSS

SEQ ID NO: 18982 - protein, 126 aa, Artificial Sequence
  Synthetic construct
QVQLVQSGAEVKKPGASVKVSCKASGYTFTSYAMHWVRQAPGQRLEWMGWINAGNGNTKYSQKFQGRVTITRDTSASTAYMELSSLRSEDTAVYYCARGNKYCSGGSCYSLGFDYWGQGTLVTVSS

SEQ ID NO: 18983 - protein, 125 aa, Artificial Sequence
  Synthetic construct
QVQLVQSGAEVKKPGSSVKVSCKASGGTLSSCAISWVRQAPGQGLEWMGGIIPIFGTTSYAQKFQGRVTITADESTSTAYMELNSLRSEDTAVYYCVRANTYYDILTGHSPFDSWGQGTLVTVSP

SEQ ID NO: 18984 - protein, 119 aa, Artificial Sequence
  Synthetic construct
QVQLQQWGAGLLKPSETLSLTCAVYGGSFSGYYWSWIRQPPGKGLEWIGEIDHSGSTNYNPSLKSRVTISEDTSKNQFSLQLNSVTAADTAVYYCARGVTQDSSGPDYWGQGTLVTVSS

SEQ ID NO: 18985 - protein, 130 aa, Artificial Sequence; identical to SEQ ID NO: 10529
  Synthetic construct

SEQ ID NO: 18986 - protein, 126 aa, Artificial Sequence
  Synthetic construct
QVQLVQSGSELKKPGASVKVSCKASGYTFTSYAMNWVRQAPGQGLEWMGWINTNTGNPTYAQGFTGRFVFSLDTSVSTAYLQISSLKAEDTAVYYCARDFEPTYPDHYYYYYMDVWGKGTTVTVSS

SEQ ID NO: 18987 - protein, 122 aa, Artificial Sequence
  Synthetic construct
QVQLQESGPGLVKPSETLSLICTVSGSVSSGNYYWSWIRQPPGKGLEWIGYIYYTGSTKYNPSLKSRVTISADTSKNQFSLKLSSVTAADTAVYYCARGYFDWLQRNYFDYWGQGTLVTVSS

SEQ ID NO: 18988 - protein, 123 aa, Artificial Sequence
  Synthetic construct
QVQVVQSGAEVKKPGASVRISCKASGYTFTSHWMHWVRQAPGQGLEWMGIINPTGSSTSYAQKFQGRVTLTRDTSTNTDYMELRSLRSDDTAFYYCARDNSIAAIGTWWFDPWGQGTLVTVSS

SEQ ID NO: 18989 - protein, 130 aa, Artificial Sequence
  Synthetic construct
QVQLVESGGGLVKPGGSLRLSCAASGFNFSDYYMSWVRQAPGKGLEWVSYISSSGSTVYYADSVKGRFTISRDNAKKSVYLQMNSLRAEDTAVYYCVRVEKVPAAMRRAYYYYYFYMDVWGKGTAVTVSS

SEQ ID NO: 18990 - protein, 124 aa, Artificial Sequence
  Synthetic construct
QVKLVESGGGVVQPGTSLRLSCAASGFSFSNYGMHWVRQAPGKGLEWVAVLWYVGNNEYYADSVRGRFTISRDNSKNTLYLQMNTLRAEDTAVYYCARDLPSDNWNDVGAFDIWGQGTMVTVSS

SEQ ID NO: 18991 - protein, 124 aa, Artificial Sequence
  Synthetic construct
QVQLVQSGAEVKKPGASVKLSCKTSGYTFTDYAMHWVRQAPGQRLEWMGWINAGNGHTEYSQKFQGRVTFTRDTSASTAYMYLSSLRSEDTAVYYCARGPIVLMVYPRYYFDFWGQGTLVTVSS

SEQ ID NO: 18992 - protein, 127 aa, Artificial Sequence
  Synthetic construct
QLQLQESGPRLLKPSETLSLTCTVSRGSVTSSNYYWGWIRQPPGKGLEWIGSLYYNGSTNYNPSLKSRLTMSVDTSRNQFSLKLTSVTAADTAVYYCARHSNYYDSAGFVNTSPDFWGQGTLVTVSS

SEQ ID NO: 18993 - protein, 129 aa, Artificial Sequence
  Synthetic construct
EVQLVESGGGLVQPGGSLRLSCSASGFTFSVYAMHWVRQAPGKGLEYVSAISSNGGSTSYADSLKGRFTISRDNSKNTLYLQMSSLRPEDTAVYYCVKDGASHYDFWGGFMVDDAFDIWGQGTMVTVSS

SEQ ID NO: 18994 - protein, 129 aa, Artificial Sequence; identical to SEQ ID NO: 10073
  Synthetic construct

SEQ ID NO: 18995 - protein, 122 aa, Artificial Sequence
  Synthetic construct
QVQLVQSGAEVKRPGSSVKVSCKASGGTFSNYAIIWVRQAPGQGLEWMAGIIPIFGAPNYAQKFQGRLTITADESTSTAYMDLSSLRSEDTAVYYCARVYYDNSGRLPFDYWGQGTLVTVSS

SEQ ID NO: 18996 - protein, 117 aa, Artificial Sequence
  Synthetic construct
EVQLVESGGGLVQPGGSLRLSCAASGIIVSSNYMSWVRQAPGKGLEWVSVIYSGGSTFYADSVKGRFTISRDNSKNTLYLQMNSLRAEDTAVYYCARDWGEYYFDYWGQGTLVTVSS

SEQ ID NO: 18997 - protein, 127 aa, Artificial Sequence
  Synthetic construct
EVQLVESGGGLVQPGRSLRLSCAASGFTFDDCAMHWVRQAPGKGLEWVSGISWNSGNIVYADSVKGRFTISRDNAKNSLYLQMNSLRAEDTAFYYCAKAGEWGYDILTGHGPPFDFWGQGTLVTVSS

SEQ ID NO: 18998 - protein, 125 aa, Artificial Sequence
  Synthetic construct
QVQLVQSGSELKKPGASVKLSCKASGYTFTSYAMNWVRQAPGQGLEWMGWINTNTGNPTYAQGFTGRFVFSLDTSVSTAYLQISSLKAEDTAVYFCARDYDSGSPQYSYYYMDVWGKGTTVTVSS

SEQ ID NO: 18999 - protein, 129 aa, Artificial Sequence
  Synthetic construct
EVQVVEFGGDLVQPGRSLRLSCATSGFTFEDFAMHWVRQVPGKGLEWVSGSTWNSGTIGYVDSVKGRFTTSRDNAENSLYLQMNNLRDEDTALYYCAKDIGRYDHYEGFGRVGGAFDIWGHGTMVTVSS

SEQ ID NO: 19000 - protein, 118 aa, Artificial Sequence
  Synthetic construct
QVQLPQWGAGLLKPSETLSLTCGVYGGTLSKYFWSWIRQAPGKELEWIAGINHRGESKYKSSLKSRLIISLDRSKNQLSLKLISVTAADTALYFCVLASGSQNAFDIWGQGTMVTVSS

SEQ ID NO: 19001 - protein, 123 aa, Artificial Sequence
  Synthetic construct
QVQLVQSGAEVKKPGSSVKVSCKASGGTFSNYTFSWVRQAPGQGLEWMGRIIPMFDIINYAQKFQGRVTITADKSTSTAYMALSSLRSEDTALYYCATGLWFGDSETTWFDPWGQGTLVTVSS

SEQ ID NO: 19002 - protein, 127 aa, Artificial Sequence
  Synthetic construct
QVQLVQSGADVKKPGASVKVSCKASGYTFSSYGISWVRQAPGQGLEWMGWISAYTGNTYYTQKLQGRVTMTTDTSANTAYMELRSLRSDDTAIYFCARDPDPDIVVVEGADASLDYWGQGTLVTVSS

SEQ ID NO: 19003 - protein, 126 aa, Artificial Sequence
  Synthetic construct
QVQLQQWGAGLLKPSETLSLTCGVYGGSFNGYYWSWIRQPPGKGLEWIGEINHSGGTNYSPSLKSRLTISVDTSKNDFSLKLSSVTAADTAVYYCARVPNVNIRGAIRLYYYMDVWGKGTTVTVSS

SEQ ID NO: 19004 - protein, 128 aa, Artificial Sequence
  Synthetic construct
QVQLVESGGGVVQPGRSLRLSCAASGFTFNNYAMHWVRQAPGKGLEWVTVMSYDGPGQYYADSVRGRFTISRDNSKNTLYLQMSSLRAEDTALYYCARDRRAVVPKRAYSYGYAFDIWGQGTMVTVSS

SEQ ID NO: 19005 - protein, 124 aa, Artificial Sequence
  Synthetic construct
EVQLLESGGGLVQPGGSLRLSCAASGFTFSSYAMSWVRQAPGKGLEWVSAISGSGDSTYYADSVKGRFTISRDNSKNTLYLQMNSLRAEETAVYYCAKGRHLLSLGDCFPFDYWGQGTLVTVSS

SEQ ID NO: 19006 - protein, 129 aa, Artificial Sequence; identical to SEQ ID NO: 10138
  Synthetic construct

SEQ ID NO: 19007 - protein, 121 aa, Artificial Sequence
  Synthetic construct
QVQLVQSGAEVKKPGSSVKVSCKASGGTFSSYAIGWVRQAPGQGLEWMGEIIPMFGTENYAQKFQGRVTITADESTSTAYMELSSLRSDDTAVFYCARDRGGFEPSYFDFWGQGTLVIVSS

SEQ ID NO: 19008 - protein, 120 aa, Artificial Sequence
  Synthetic construct
GVESGGGVVQPGRSLRLSCAASGFTFSSFGMHWVRQAPGKGLEWVAVIWYDGSNENYADSVKGRFTISRDNSKNNLYLQMNSLRAEDTAVYYCARWGAGSGWDEGEFDYWGQGTLVTVSS

SEQ ID NO: 19009 - protein, 120 aa, Artificial Sequence; identical to SEQ ID NO: 1687
  Synthetic construct

SEQ ID NO: 19010 - protein, 118 aa, Artificial Sequence
  Synthetic construct
GVQLVESGGGLIQPGGSLRLSCAVSGFTVRSNYMTWVRQAPGKGLEWVSVIYPGGTRYYADSVKGRFTISRDDSKNILYLQMNSLTAEDTAVYYCARGSRGDNWFDPWGQGALVTVSS

SEQ ID NO: 19011 - protein, 121 aa, Artificial Sequence; identical to SEQ ID NO: 10053
  Synthetic construct

SEQ ID NO: 19012 - protein, 124 aa, Artificial Sequence
  Synthetic construct
QVQLQESGPGLVKPSQTLSLTCTVSGGSITSGAYYWSWIRQHPGKGLEWIGYIFYSGSTYYNPSLKSRVIMSADTSKNQFSLKLSSVTAADTAVYYCAREHYDLLTAHYYFDFWGQGTLVTVSS

SEQ ID NO: 19013 - protein, 119 aa, Artificial Sequence
  Synthetic construct
EVQLVESGGGMVQPGGSLRLSCAASGFTFSSYWMSWVRQAPGKGLEWVANIKEDGSEKYYVDSMKGRFTISRDNAKNSLYLQMNSLRAEDTAVYYCARLQWLRGRFDYWGQGTLVTVSS

SEQ ID NO: 19014 - protein, 124 aa, Artificial Sequence
  Synthetic construct
QVQLVESGGGVVQPGRSLRLSCEASGFTFSNFGMHWVRQAPGKGLEWVAVLWYVGNNKFYADSVKDRFTISRDNSKNTLYLQMNGLKADDTAVYYCARDLPSDNWNDVGAFDLWGQGTMVTVSS

SEQ ID NO: 19015 - protein, 121 aa, Artificial Sequence
  Synthetic construct
QVQLVESGGGVVQPGRSLRLSCAASGFTFSSYGMHWVRQARGKGLEWVAVIWYDGTSKYYADSVKGRFTISRDNSKNTLYLQMDSLRAEDTAVYYCAREGSLGATPGLDYWGQGVLVTVSS

SEQ ID NO: 19016 - protein, 119 aa, Artificial Sequence; identical to SEQ ID NO: 18824
  Synthetic construct

SEQ ID NO: 19017 - protein, 122 aa, Artificial Sequence
  Synthetic construct
QVQLVQSGAEVKTPGASVKVSCKVSGFSVIELSLHWVRQAPGKGLEWMGGFDPEDGQTIYAQKFQGRVTMTEDTSTDTAYMELSSLRSEDTAVYYCATTSARPGWGGWFDPWGQGTLVSVSS

SEQ ID NO: 19018 - protein, 119 aa, Artificial Sequence
  Synthetic construct
EVQLVESGGGLVQPGGSLRLSCAASGFTFSAYDMYWVRQAPGKGLEWVASISISGTYIFYADSVKGRFTISRDNGKNSLYLQMNSLRAEDTAVYYCARRHLMAWTFDFWGQGTLVTVSS

SEQ ID NO: 19019 - protein, 116 aa, Artificial Sequence
  Synthetic construct
EVQLLASGGGLVQPGGSLRLSCAASGFSISTYDMHWVRQAPGKGLEWISSLAKSGIGMYYSDSVKGRLTISRDTAKNTLSLQMTSLRVEDTALYSCLSTGGDYDHWGQGTLVTVSS

SEQ ID NO: 19020 - protein, 122 aa, Artificial Sequence
  Synthetic construct
EVQLVESGGGLVQPGRSLRLSCAASGFTFDDYAIHWVRQAPGKGLEWVSGVSWNSGIIGYVDSVKGRFTISRDNANNSLYLQMIRLRAEDTALYYCVKDRGYGDHEDAFDIWGQGTMVTVSS

SEQ ID NO: 19021 - protein, 128 aa, Artificial Sequence
  Synthetic construct
EGHLVESGGGLIQPGGSLRLSCAASGFSVSSNYMSWVRQAPGKGLEWVSVIYSGGNTYYADSVKGRFTISRDNSKNTLFLQMNSLRAEDTAVYYCARDVWKYLLLKGGGNNYYGMDVWGQGTTVTVSS

SEQ ID NO: 19022 - protein, 119 aa, Artificial Sequence
  Synthetic construct
QITLKESGPTLVKPTQTLTLTCTFSGFSLSTSGVGVGWIRQPPGKALEWLALIYWDDDKRYSPSLKSRLAITRDTSKNQVVLTMTYLDPVDTATYYCARLTTETVFDYWGQGTLVTVSS

SEQ ID NO: 19023 - protein, 124 aa, Artificial Sequence
  Synthetic construct
EVQLVESGGGLVQPGGSLRLSCAASGFTFSSDDMHWVRQATGKGLEWVSAIGTAGDTYYLDSVKGRFTISRENAKNSLYLQMNSLRAGDTAVYYCARGVVTARGSYYYYYMDVWGKGTTVTVSL

SEQ ID NO: 19024 - protein, 125 aa, Artificial Sequence
  Synthetic construct
QVQLVQSGSELKKPGASVKVSCKASEYTFTHYAMNWVRQAPGQGLEWMGWIHTSTGNPTYAQGFTGRFVFSLDTSVSTAYLQISSLKTEDTAVYYCARAPPLSDISDYYVSPYYWGQGTLVTVSS

SEQ ID NO: 19025 - protein, 125 aa, Artificial Sequence
  Synthetic construct
QVQLVQSGAEVKKPGASVKVSCKASGYTFTSHGISWVRQAPGQGLEWMGWISAYNGNINYAQKLQGRVTMTTDTSTSTVYMELRSLRSDDTGVYYCARMVLSSSGWYFYYGMDVWGQGTTVTVSS

SEQ ID NO: 19026 - protein, 131 aa, Artificial Sequence
  Synthetic construct
EVQLVESGGGLVQPGGSLRLSCAASGFTFSTYDMHWVRQATGKGLEWVSTIGTAGDTYYPGSVKGRFTISRENAKNSLYLQMNSLRAGDTAVYYCARADMTTVTTNGPSGRYYSYYYMDVWGKGTTVTVSS

SEQ ID NO: 19027 - protein, 128 aa, Artificial Sequence
  Synthetic construct
QVQLVESGGGVVQPGRSLRLSCAASGFTFSGYGMHWVRQAPGKGLEWVAGISYDGNNKYYADSVKGRFTISRDNSKNTLYVQLNSLRPEDTAVYYCAKAHSSSWYNPLFHPTDAFDIWGQGTMVTVSS

SEQ ID NO: 19028 - protein, 121 aa, Artificial Sequence; identical to SEQ ID NO: 18814
  Synthetic construct

SEQ ID NO: 19029 - protein, 129 aa, Artificial Sequence
  Synthetic construct
QVQLVQSGSELKKPGASVQVSCKASGYTFTSYGINWVRQAPGQGLEWMGWINTNTGNPMYAQGFTGRFVFSLDTSVSTAYLQISSLKAEDTAVYYCARGERDTVVVLGGIDYFYYMDVWGKGTTVTVSS

SEQ ID NO: 19030 - protein, 129 aa, Artificial Sequence
  Synthetic construct
QVQLVQSGSELKKPGASVKVSCKASGYTFTSYGMNWVRQAPGQGLEWMGWINTNTGNPTYAQGFTGRFVFSLDTSVSTAYLQISSLKAEDTAIYYCARVERDIVVVVTAIDYYYYMDVWGKGTTVTVSS

SEQ ID NO: 19031 - protein, 112 aa, Artificial Sequence
  Synthetic construct
QVQLQESGPGLVKPSETLSLTCSVSGDSISGYYWSWIRQPPGKGLEWIGYMYSTGRAEYNPSLQSRVTISVDTSKNQFSLNLTSVTAADTAVYYCARGFDPWGQGTLVTVSS

SEQ ID NO: 19032 - protein, 127 aa, Artificial Sequence
  Synthetic construct
EVQLVESGGGLVKPGGSLRLSCAASRFNFSSYTMNWVRQAPGKGLEWVSSISGSSSFIYYADSLKGRFTISRDNAKNSLYLQMNSLRAEDTAVYYCARDRKVLRYFDWLLSGAFDIWGQGTMVTVSS

SEQ ID NO: 19033 - protein, 126 aa, Artificial Sequence
  Synthetic construct
QVQLVQSGAEVKDPGASVKVSCKASGYIFTDHYMHWVRQAPGQGLEWMGWINPYSGVTNYAQKFQGWVTMIRDTSIRTVYMQLSRLRSDDTAVYYCAREGYYDSSGFPGNYGMDVWGQGTTITVSS

SEQ ID NO: 19034 - protein, 118 aa, Artificial Sequence
  Synthetic construct
EVQLVESGGGLVQPGGSLRLSCAASGFTFRSYWMSWVRQAPGKGLEWVTNIKQDGSDKNYVDSVKGRFTISRDNAKNSLYLQMNSLRAEDTAVYYCAREGWAEPFDYWGQGTLVTVSS

SEQ ID NO: 19035 - protein, 117 aa, Artificial Sequence
  Synthetic construct
QVQLVQSGSELKKPGASVKVSCKASRYTFTTYAIHWVRQAPGQGLEWMGWINTNTGNPMYAQGFTGRFVFSLATSVSTAYLQISSLKAEDTAVYYCAREDTFYFDFWGQGTLVTVSS

SEQ ID NO: 19036 - protein, 118 aa, Artificial Sequence
  Synthetic construct
QVQLVESGGGLVKPGESLRLSCIGSGFTFSDHYMYWIRQAPGKGLEWVSYMSGETGHINYADSVKGRFTISRDNAKNSLYLQMNSLRAEDTAFYYCARDAHVWNLDYWGQGTLVTVSS

SEQ ID NO: 19037 - protein, 121 aa, Artificial Sequence
  Synthetic construct
QVQLVESGGGVVQPGRSLRLSCAASGFTFSTYGMHWVRQAPGKGLEWVAVIWYDGSNKYYADSVKGRFTISRENSKNTLYLQMNSLRAEDTAVYYCVREGQVGTTTGADYWGQGTLVTVSS

SEQ ID NO: 19038 - protein, 124 aa, Artificial Sequence
  Synthetic construct
QVQLIQSGAEVKKPGASVKVSCKVSGYTLTELSMHWVRQAPGKGLEWMGGFDPEDGETIYAQKFQGRVTMTEDTSTDTAYMELSSLRSEDTAVYYCATAFAYCGGDCYGRFDYWGQGTLVTVSS

SEQ ID NO: 19039 - protein, 99 aa, Artificial Sequence
  Synthetic construct
VSGYSLAEVSMHWVRQAPGKGLEWMGGFDPEDVEIIYAQKFQGRVTMTEDTSTDTAYMELSSLRSEDTAVYYCATEWAVAGTFGEHHYWGQGTLVTVSS

SEQ ID NO: 19040 - protein, 122 aa, Artificial Sequence
  Synthetic construct
QVELVESGGGVVQPGRSLRLSCAASGFSFSTYGMHWVRQAPGKGLEWVAVIWYDGSKKYYADSVKGRFTISRDNSKNTLYLQMNSLRAEDTAVYYCARDGDFSRSEPPFDSWGQGTLVTVSS

SEQ ID NO: 19041 - protein, 126 aa, Artificial Sequence
  Synthetic construct
EMQLVESGGGLVQPGGSLRLSCAASGFTLSSYWMSWVRQAPGKGLEWVANIKQDGSEKDYVDSVKGRFTISRDNAKNSLYLQMNSLRAEDTAVYYCARVNKFQMRYPPHYYYMDVWGKGTTVTVSS

SEQ ID NO: 19042 - protein, 126 aa, Artificial Sequence
  Synthetic construct
QVQLVQSGSELKKPGASVKVSCKASGYTFTTYAMNWVRQAPGQGLEWMGWINTNTGDPTYAQGFTGRFVFSLDTSVSTAYLQISSLKAEDTAVYYCARDFDSMVRGGYYYYYMDVWGKGTTVTVSS

SEQ ID NO: 19043 - protein, 125 aa, Artificial Sequence
  Synthetic construct
QVQLVQSGSELKKPGASVKVSCKASGYTFTKYAMNWVRQAPGQGLEWMGWINTNTGNPTYAQGFTGRFVFSLDTSVSTAYLQISSLKAEDTAVYFCARDSAADHPYYYYYYMDVWGKGTTVTVSS

SEQ ID NO: 19044 - protein, 128 aa, Artificial Sequence
  Synthetic construct
QVQLVQSGSELKKPGASVKVSCKASGYTFTSYAMNWVRQAPGQGLEWMGWINTNTGNPTYAQGFTGRFVFSLDTSVSTAYLQISSLKAEDTAVYYCARGQFSDWLLYLRGSSEYFQHWGQGTLVTVSS

SEQ ID NO: 19045 - protein, 124 aa, Artificial Sequence
  Synthetic construct
QVQLVQPGAEVGKPGASVKLSCKASGYTFTNYYIHWVRQAPGQGLEWMGIIDVSGGGTSYARKLQGRVAMTRDASTTTVFMELSSLTSEDTAVYYCARDPSRPSTTDPDAFDIWGQGTLLIVSS

SEQ ID NO: 19046 - protein, 120 aa, Artificial Sequence
  Synthetic construct
QVQLVESGGGVVQPGRSLRLSCAASGFIFSSYAMHWVRQAPGKGLEWVTVISYDGSNKYYADSVRGRFTISRDNSKNTLYLQMNSLRAEDTAVYYCTSGSGNYLTWFDPWGQGTLVTVSS

SEQ ID NO: 19047 - protein, 129 aa, Artificial Sequence
  Synthetic construct
QVQLVQSGAEVKKPGASVKVSCKASGYIFTSYDMHWVRQAPGQRLEWMGWINVGNGNTKYSQKFLGRVTFTRDTSASTVYMELSSLRSEDTAMYYCARPPRGYYDRTGYYNVVHYFQHWGQGTLVTVSS

SEQ ID NO: 19048 - protein, 124 aa, Artificial Sequence
  Synthetic construct
EVQLVESGGGLVKPGGSLRLSCAASGFTFSSYSMNWVRQAPGKGLEWVSSISSSGRYIHLADSLKGRFTISRDNAKNSLYLQMNSLRAEDTAVYYCAKSNGGWYTPPPSGMDVWGQGTTVTVSS

SEQ ID NO: 19049 - protein, 131 aa, Artificial Sequence; identical to SEQ ID NO: 10337
  Synthetic construct

SEQ ID NO: 19050 - protein, 120 aa, Artificial Sequence
  Synthetic construct
QVQLVESGGGVLQPGRSLRVSCAASGFTFSNYAIHWVRQAPGKGLEWVAVISYDGSNKLYAESVKGRFTISRDNSKNTLYLQMNSLRAEDTAVYYCARGTGRITGSLDYWGQGTLVTVSS

SEQ ID NO: 19051 - protein, 121 aa, Artificial Sequence
  Synthetic construct
QVQLVESGGGVVQPGKSLRLSCAASGFTFTTYAIYWVRQAPGKGPEWVAVISYDGSNKYYADSLKGRFTISRDNSKNTVFLQMNRLRGEDTAVYYCARTYSGSYYGPFDYWGQGTLVTVSS

SEQ ID NO: 19052 - protein, 117 aa, Artificial Sequence
  Synthetic construct
QVQLVESGGGVVQPGRSLRLSCTASGFTFSGYGMHWVRQAPGKGLEWAAVISSDGSYKFYADSVKGRFSISRDNSENTLYLQMNSLSAEDTAVYYCAKDSSGIPEYWGQGTLVTVSS

SEQ ID NO: 19053 - protein, 119 aa, Artificial Sequence
  Synthetic construct
QVTLKESGPVLVKPTETLTLTCTVSRFSLSNARMGVSWIRQPPGKALEWLAHIFSNDEKSYSTSLKSRLNISRDTSKSQVVLTMTNMDPVDTATYFCAGSYSNSWVDYWGQGTLVTVSS

SEQ ID NO: 19054 - protein, 129 aa, Artificial Sequence
  Synthetic construct
QVQLMESGGGVVQPGRSQRLSCAASGFSFSTYAMHWVRQAPGKGLEWVAVISYDGSIKYYADSVKGRFTISRDNTKNTLYLQMNSLRPEDTAVYYCARDGAYCSGGWCYPDIVFTMDVWGKGTTVTVSS

SEQ ID NO: 19055 - protein, 122 aa, Artificial Sequence
  Synthetic construct
QLQLQESGPGLVKPSETLSLTCTVSNDSITRSTYYWGWVRQPPGKGLEWIGSVYYSGSTYYNPSLKSRVTISVDTSRNQFSLTLTSVTAADTALYYCATSRITIIVSFVDQWGQGTLVTVSS

SEQ ID NO: 19056 - protein, 122 aa, Artificial Sequence
  Synthetic construct
EVQLVESGGGLVKPGGSLRLSCAASGFTFSNAWMTWVRQAPGKGLEWVGRIKSKTDGGTTDYAAPVKGRFTISRDDSKNTLYLQMNSLKTEDTAVYYCTTNILTGTDAFDIWGQGTLVTVSS

SEQ ID NO: 19057 - protein, 126 aa, Artificial Sequence
  Synthetic construct
QVQLVQSGAEVKKPGASVKVSCKASGYTISSYVMHWVRQAPGQRLEWMGWINAANGDTKYSQNFQGRVSITRDTSATTVYMDLSSLRSEDTAVYYCARGGTWMQLTTYYYYAMDVWGQGTTVTVSS

SEQ ID NO: 19058 - protein, 123 aa, Artificial Sequence
  Synthetic construct
QVQLVQSGAEVKKPGASVTVSCKASGYTFIGYYIHWVRQAPGQGLEWMGWINPNSGVTKYAQKFQGWVTMTRDTSISTAYMEMSRMKADDTAVYYCARALYDSSGYGDWFDPWGQGTLVTVSS

SEQ ID NO: 19059 - protein, 118 aa, Artificial Sequence; identical to SEQ ID NO: 19034
  Synthetic construct

SEQ ID NO: 19060 - protein, 130 aa, Artificial Sequence
  Synthetic construct
QVQLVQSGAEVKKPGASVKVSCKVSGYMLTELFMHWVRQAPGKGLEWMGYFEPEDGETIYAQKFQGRVTMTEDTFTDTAYMELSSLRSEDTAVYYCATEFFFESGYGDYVSGSHYPFHHWGQGTLVTVSS

SEQ ID NO: 19061 - protein, 123 aa, Artificial Sequence
  Synthetic construct
EVQLVESGGGLVQPGGSLRLSCAASGFTFSSYDMYWVRQVTGKGLEWVSTIGTAGDTYYPDSVKGRFTISRENAKNSLYLQMNTLTAGDTAVYYCARVDYHYGDKLYWYFDLWGRGTLVTVSS

SEQ ID NO: 19062 - protein, 125 aa, Artificial Sequence
  Synthetic construct
EVQLVESGGGLVQPGGSLRLSCAASGFTFSSYAMNWVRQAPGKGLEWVSAISASGGSTYYADSVKGRFTISRDNSKNTLYLQVNSLRAEDTAVYYCAKSLDYFSGNYYRNYMDVWGKGTTVTVSS

SEQ ID NO: 19063 - protein, 124 aa, Artificial Sequence
  Synthetic construct
QVQLVQSGAEVKKPGSSVKVSCKASGGTFSSHAISWVRQAPGQGLEWMGGIIPIFDTENYAQKFQGRVSIAADESTSTAYMELSSLRSEDTAVYYCARADYGDNEGEGYYFDSWGQGTLVTVSS

SEQ ID NO: 19064 - protein, 128 aa, Artificial Sequence
  Synthetic construct
QVQLVQSGAEVKKPGSSVKVSCKASGGTFSSYAISWVRQAPGQGLEWMGGIIPIFGTANYAQKFQGRVTITADESTSTAYMELSSLRSEDTAVYYCASLGGDYYGSGSYYNSSGFDPWGQGTLVTVSS

SEQ ID NO: 19065 - protein, 48 aa, Artificial Sequence
  Synthetic construct
GKNSLFLHMNSLRAEDTAVYYCARGDTSGWLPHAFHIWGQGTMVAVSS

SEQ ID NO: 19066 - protein, 116 aa, Artificial Sequence
  Synthetic construct
EVQLVESGGHLVQPGGSLRLSCAASGFTFGSFWMSWVRQAPGKGLEWVANIKQDGSEKYYVDSVKGRFTISRDNAKNSLYLEMNSLRAEDTAMYYCVRGGRAFDCGGQGTLVTVSS

SEQ ID NO: 19067 - protein, 124 aa, Artificial Sequence
  Synthetic construct
QVQLVQSGSELKKPGASVKVSCKASGYTFTSYPMNWVRQAPGQGLEWMGWINTNTGNPTYAQGFTGRFVFSLDTSVSTAYLQISSLKAEDTAVYYCARVLAWGMVRGLSSFDYWGQGTLVTVSS

SEQ ID NO: 19068 - protein, 119 aa, Artificial Sequence
  Synthetic construct
QMQLQQWGAGLLRPSETLSLTCAVYGGSFSDHYWNWIRQPPGKGLEWIGEIHHSGTTNYNPSLKSRVTISVDTSKNQLSLKLTSVTAADTAVYYCARGWSGRFYGMDVWGQGTTVTVSS

SEQ ID NO: 19069 - protein, 125 aa, Artificial Sequence
  Synthetic construct
QVQLVESGGAVVQPGGSLRLSCVASGFNFRLYDMHWVRQGPGKGLEWLTLISNSGSVEFYAASVKGRFTVSRDNSKNTVFLQMNNLRLEDTAVYFCAKWVAPGYYNGAGPQLDHWGPGTLVTVSS

SEQ ID NO: 19070 - protein, 125 aa, Artificial Sequence
  Synthetic construct
QVQLVQSGSELKKPGASVKVSCKASGYTFTSYAVNWVRQAPGQGLEWMGWIHTYTGNPTYAQGFTGRFVFSLDTSVSTAYLQISSLKAEDTAVYYCARAPPLYDISTYYVSPYYWGQGTLVTVSS

SEQ ID NO: 19071 - protein, 123 aa, Artificial Sequence; identical to SEQ ID NO: 10292
  Synthetic construct

SEQ ID NO: 19072 - protein, 125 aa, Artificial Sequence
  Synthetic construct
EVQLVESGGSLIQPGGSLRLSCAASGFTVSSNYMSWVRQAPGKGLEWVSVIYSGGSTYYADSVKGRFTISRDNSKNTLYLQMNSLRAEDTAVYYCASSYGVEWFLDGDENAFDIWGQGTMVTVSS

SEQ ID NO: 19073 - protein, 125 aa, Artificial Sequence
  Synthetic construct
QVQLVQSGAEVKTPGSSVKVSCKASGGSLSTKGISWVRQAPGQGLEWMGGINPVFGSPNYAQKFQGRVTITADESTHTVDMELSSLRSDDTAVYFCARPSQDLGIINYHYYMDVWGKGTTVTVSS

SEQ ID NO: 19074 - protein, 123 aa, Artificial Sequence
  Synthetic construct
QLQLQESGPGLVKPSETLSLTCTVSNGSISSSSYYWGWIRQPPGKGLEWIGNIYYGGSTYYNVSLKSRVTMFVDTSKNQLSLKVSSVTAADTAVYYCATGQVGYSYDTPFDYWGQGILVSVSS

SEQ ID NO: 19075 - protein, 120 aa, Artificial Sequence; identical to SEQ ID NO: 18976
  Synthetic construct

SEQ ID NO: 19076 - protein, 122 aa, Artificial Sequence
  Synthetic construct
QVTLRESGPALVKPTQTLTLTCTFSGFSLSTSGLCVSWIRQPPGKALEWLALIDWDDDKYYSTSLKPRLTISKDTSKNQVVLTMTNMDPVDTATYYCARLMVAVAGSPFDSWGQGTLVTVSS

SEQ ID NO: 19077 - protein, 122 aa, Artificial Sequence
  Synthetic construct
QVQLQESGPGLVKPSQTLSLTCTVSGGSISSGSYYWSWIRQPAGKGLEWIGRMYTSGGTNYNPSLKSRVTISVDTSKNQFYLKLSSVTAADTAVYYCARDLGDYGVDWFDPWGQGTLVIVSS

SEQ ID NO: 19078 - protein, 128 aa, Artificial Sequence
  Synthetic construct
EVQLVQSGAEVKKPGESLKISCKGSGYSFTSNWIAWVRQMPGKGLEWMGNIYPGDSDTRYSPSFQGQVTISADKSISTAYLQWSSLKASDTAMYYCARLAYDSSGYYYSRSVYYFDYWGQGTLVTVSS

SEQ ID NO: 19079 - protein, 120 aa, Artificial Sequence
  Synthetic construct
QVQLVESGGGVVQPGRSLRVSCAASGFTFSSHGMHWVRQAPGKGLEWVAVIWYDGSNKYYADSVKGRFTISRDNSKNTVYLQMNSLRVEDTAVYYCARDGVVGATGLDYWGQGILVTVSS

SEQ ID NO: 19080 - protein, 126 aa, Artificial Sequence
  Synthetic construct
EVQLVESGGGLVKRGGSHRLSCAASGFTFSNAWMSWVRQAPGKGLEWVGRIKSKTDGGTTDYAAPVKGRFTISRDDSKNTLYLQMNSLKTEDTAVYYCTTTYYYDSRYYYYGMDVWGQGTTVTVSS

SEQ ID NO: 19081 - protein, 125 aa, Artificial Sequence; identical to SEQ ID NO: 18788
  Synthetic construct

SEQ ID NO: 19082 - protein, 123 aa, Artificial Sequence
  Synthetic construct
QVQLVESGGGVVQPGRSLRVSCATSGFTFSSYGMHWVRQAPGKGLEWVAVIWFDGSKKYYVNSVKGRFTISRDNSKNTLYLQMNSLRPEDTGVYYCAREGIVVDGTGNALDCWGQGTLVTVSS

SEQ ID NO: 19083 - protein, 129 aa, Artificial Sequence
  Synthetic construct
QVQLQESGPGLVRPSQTLSLTCTVSGGSISSGSYYWSWIRQPAGKGLEWIGRIFTSGSTNYNPSLKSRLTISVDTSKNQLSLKLNSVTAADTAVYYCARMQGYCSGGGCYSGYYGMDVWGQGTTVTVSS

SEQ ID NO: 19084 - protein, 126 aa, Artificial Sequence
  Synthetic construct
QVQLQESGPGLVKPSETLSLTCTVSGGSVKGDSYCWTWIRQPPGKGLEWIGYMYSSGSFIFNPSLESRVTMSVDTSKNQFSLNLNSVTTADTAVYYCAREVSRRLDEYYYYYLDVWGKGTTVIVSS

SEQ ID NO: 19085 - protein, 129 aa, Artificial Sequence
  Synthetic construct
EVQLVESGGGLVQPGGSLRLSCAASGFTFSHYSMNWVRQAPGKGLEWVSYISSSSSTIYYADSVKGRFTISRDNAKNSLYLQMNSLRAEDTAVYYCARDIADSKYSGGWYYYYYYMDVWGKGTTVTVSS

SEQ ID NO: 19086 - protein, 127 aa, Artificial Sequence
  Synthetic construct
EVQLVESGGGLGQPGGSLRLSCAASGFTFSKYNMNWVRQAPGKGLEWVSYISTNSLTIYYADSVRGRFTISRENAKNSLYLQMNSLRAEDTAVYYCAREIIWERNFDWLLSPFFDYWGQGTLVTVAS

SEQ ID NO: 19087 - protein, 125 aa, Artificial Sequence
  Synthetic construct
QLQLQESGPGLVKPSETLSLTCIVSGGSITRNSFFWGWIRQPPGKGLEWIGNIYYSGSTYYNPSLKSRVTVSVDTSKNQFSLKLSSVTVADTAVYYCARASTGYSSGWYNWFDPWGQGKLVIVSS

SEQ ID NO: 19088 - protein, 122 aa, Artificial Sequence
  Synthetic construct
QVHLVESGGGVVQPGRSLRLSCAASGFTFSNYGMHWVRQAPGKGLEWVAVIYYDGSNKYYADSVKGRFTISRDNSKNTLYLQMSNLRAEDTAVYYCARDFGVAAAASSTGYWGQGTPVTVSS

SEQ ID NO: 19089 - protein, 115 aa, Artificial Sequence; identical to SEQ ID NO: 9948
  Synthetic construct

SEQ ID NO: 19090 - protein, 127 aa, Artificial Sequence
  Synthetic construct
QLQLRESGPGLVKPSETLSLTCTVSDGSINSSSHYWGWIRQPPGKGLEWIGTIYHSGNTYYDPSLKSRVTISVDTSKNQFSLKLSSVTAADTAVYYCARHSHYYDVTAYVNTSPDYWGQGTLVTVSS

SEQ ID NO: 19091 - protein, 121 aa, Artificial Sequence
  Synthetic construct
EVQLLESGGGLVQPGGSLRLSCVASGFTFSSSAMSWVRQAPGKGLEWVSSISGSGGGTYYADSVRGRFTISRDNSKDTLYLQMNSLRADDTAVYYCTKHTITVTGGAMDVWGQGTTVTVSS

SEQ ID NO: 19092 - protein, 118 aa, Artificial Sequence
  Synthetic construct
EVQLVESGGGLVQPGGSLRLSCAASGFTVSRNYMSWVRQAPGKGLEWVSTIYSGGSTFYADSVKGRFTISRDNSKNTLYLQMNSLRAEDTAVYYCARDFVGVPGVDFWGQGTLVTVSS

SEQ ID NO: 19093 - protein, 125 aa, Artificial Sequence; identical to SEQ ID NO: 18640
  Synthetic construct

SEQ ID NO: 19094 - protein, 121 aa, Artificial Sequence
  Synthetic construct
QVQLVESGGGVVQPGRSLRLSCAASEFTFSSYGMHWVRQAPGKGLQWVAVIWFDGSNTYYADSVKGRFTISRDNSKNTLYLQMSSLRAEDTAVYYCAREGQVGETSGFDIWGQGTLVTVSS

SEQ ID NO: 19095 - protein, 128 aa, Artificial Sequence
  Synthetic construct
QGQLVQSGAEVKKPGSSVKVSCKASGGTFSRYAFSWVRQAPGQGLEWMGGIIPIHGTASYAQKFQDRVTITADESTSTVYMELSSLRSEDTAVYYCARVPWYYDRSGHYQADEYFQHWGQGTLVTVSS

SEQ ID NO: 19096 - protein, 123 aa, Artificial Sequence
  Synthetic construct
QVQLQQWGAGLLKPSETLSLNCAVYGGSLSNYYWAWIRQPPGKGLEWIGEINHSGGTGYNPSLRSRVSISIDTSKNHFSLKLSSVTAADTAVYYCARKPLLHSPVNPGAFDIWGQGTMVTVSS

SEQ ID NO: 19097 - protein, 119 aa, Artificial Sequence
  Synthetic construct
QVQLVESGGGVGQPGRSLRLSCAASGFTFNIYPIHWVRQAPGKGLEWVALISYDGINKYYADSVKGRFTISRDNSKNTLYLQMNSLRAEDTAVYYCARTNGYKNRFDFWGQGTLVTVSS

SEQ ID NO: 19098 - protein, 128 aa, Artificial Sequence
  Synthetic construct
QVQLVQSGAEVKKPGASVKVSCKVSGYTLTELSMHWVRQAPVKGLEWMGGFDPDDGETIYAQKFQGRVIMTEDTSTDTAYMELSSLRSEDTAVYFCATGFSIVPANVGYSLYYGMDVWGQGTTVTVSS

SEQ ID NO: 19099 - protein, 123 aa, Artificial Sequence
  Synthetic construct
QVQLVQSGAEVKKPGSSVKVSCKASGGTFGSYAISWVRQAPGQGLEWMGVIIPIFDTTNYAQRFQGRVTITADESTSTAYMELNSLRSEDTAVYFCAREVTMIAEGIYYFDSWGQGTLVTVSS

SEQ ID NO: 19100 - protein, 119 aa, Artificial Sequence
  Synthetic construct
QAQLVESGGGLVKPGGSLRLSCAASEFTFSDYYMSWIRQAPGKGLEWISYISSSGTTIYNADSVKGRFTISRDNAKNSLYLQMNSLRAEDTAVYYCVRHEWLGGTWVYWGQGILVTVSS

SEQ ID NO: 19101 - protein, 122 aa, Artificial Sequence
  Synthetic construct
QVQLVESGGGVVQPGRSLRLSCAASGFTFSIFAMHWVRQAPGKGLEWVAVISYDGSNKYYADSVKGRFTISRDNSKNTLHLQMNSLRPEDTAVYYCATKRSGGNYWGYFDYWGQGTLVTVSS

SEQ ID NO: 19102 - protein, 112 aa, Artificial Sequence
  Synthetic construct
QVQLQESGPGLVKPSETLSLTCTVSGGSISSYYWSWLRQPPEKGLEWIGYIYYSGSTNYNPSLKSRVTISVDTSKNQFSLKLTSVTAADTAVYYCARGFDLWGRGTLVTVSS

SEQ ID NO: 19103 - protein, 120 aa, Artificial Sequence
  Synthetic construct
EVKLMESGGGLVLPGESLRLSCVGSGFTFRSHWMTWVRQAPGKGLEWVATIKEDGSEQNYVDSVKGRFTISRDNNKNLVNLHMKSLTAEDTAIYYCARSSWFWGYYFDYCGQGILVTVSS

SEQ ID NO: 19104 - protein, 128 aa, Artificial Sequence
  Synthetic construct
QVQLQQSGPGLVKPSQTLSLTCAISGDTVSSDTASWNWIRQSPSRGLEWLGRTYYRSEWYHDYARSVKSRITINPDTSKNRISLQLNSVTPEDTAVYYCARGRDSSGLDFYYYGLDVWGQGTTVTVSS

SEQ ID NO: 19105 - protein, 119 aa, Artificial Sequence
  Synthetic construct
QVQLVQSGAEVKKPGASVKVSCKASGYTLTSYYLHWVRQAPGQGLEWMGIVNPSGDSTSYAQKFQGRVTMTRDTSTSTVYMELSSLRFEDTAVYYCARIGTLGGGMDVWGQGTTVTVSS

SEQ ID NO: 19106 - protein, 122 aa, Artificial Sequence
  Synthetic construct
QVQLVESGGGVVQPGRSLRLSCAASGFTFGSFGMHWVRQAPGKGLEWVAVIYFDGSHEYYADSVRGRFTISRDNSKNTLYLQMNSLRAEDTAMYYCAREGVVVVVGSALDYWGQGTLVTVSS

SEQ ID NO: 19107 - protein, 121 aa, Artificial Sequence
  Synthetic construct
QVNLVQSGAEVKKPGASLKVSCKASGYTFTSYYIHWMRQAPGQGLEWMGIINPSGGDTSCAQKFQGRVTMTRDTSTSTVYMELSSLRSEDTAVYYCARDRSVSRTVWFDPWGQGTLVTVSS

SEQ ID NO: 19108 - protein, 121 aa, Artificial Sequence
  Synthetic construct
EVQLVESGGGLVQPGGSLRLSCAASGFTFNSYSMNWVRQAPGKGLEWVSYISTSSSTMYYADSVKGRFTISRDNAKNSLYLQMNSLRAEDTAVYYCAREGGWYSVGWVDPWGQGTLVTVSS

SEQ ID NO: 19109 - protein, 120 aa, Artificial Sequence
  Synthetic construct
QVQLQESGPGLVKPSQTLSLTCTASGGSISSGSYYWSWIRQPAGKGLEWIGRIYTGGSTNYNPSFKSRVTILGDTSKNQFSLRLSSVTAADTAVYYCASTRRGVYGMDVWGQGTTVTVSS

SEQ ID NO: 19110 - protein, 118 aa, Artificial Sequence
  Synthetic construct
EVQLVASGGGLVQPGGSLRLSCAASGFTVSVNYMSWVRQAPGKGLEWVSMIYSGGTTYYADSVKGRFTISRDSSKNTLSLQMNSLRAGDTAVYYCAREARVSTEFDPWGQGTLVTVSS

SEQ ID NO: 19111 - protein, 128 aa, Artificial Sequence
  Synthetic construct
QVQLVQSGTEVKKPGSSVKVSCKASGGTFSSYAINWVRQAPGQGLEWMGGIIPIFGTANYAQKFQGKVTITADESTSTAYMELSSLRSEDTAVYYCASLGGDYYGSGSYYNSSGFDPWGQGTLVTVSS

SEQ ID NO: 19112 - protein, 117 aa, Artificial Sequence
  Synthetic construct
QVQLVQSGTEVEKPGASVKVSCQASEYTFTNFEINWVRQASGQGLEWMGWMNPKSGNTGYAPKFQGRVNMTRDTSTTTAYMELSNLRSDDTAVYYCATEKRSRMEFWGEGTTLVVSS

SEQ ID NO: 19113 - protein, 120 aa, Artificial Sequence
  Synthetic construct
QEQLVESGGGVVQPGRSLRLSCVASGFTFSSSGMHWVRQAPGKGLEWVAVIWYDGRNKYYADSVKGRFTISRDNAKNTLYLQMNSLRAEDTAVFYCARGVSNSWYYFDSWGQGTLVTVSS

SEQ ID NO: 19114 - protein, 119 aa, Artificial Sequence
  Synthetic construct
QVQLQQWGAGLLKPSETLSLTCGVYGGSFSGHYWSWIRQPPGKGLEWIGEIDHSGRTNYNPSLKSRVTISVDTSKNQFSLKLNYVTAADTAVYYCARGTWIQGLRIDYWGQGTLVTVSS

SEQ ID NO: 19115 - protein, 120 aa, Artificial Sequence
  Synthetic construct
EAQLVESGGALVKPGGSLTLSCAVSGFTFADAWMIWVRQAPGKGLEWVGRIERGVDGGTTSYTAPVKGRFTITRDDSKDTLYVQMNSLKIEDTAVYYCASQGGAGEAFHWGQGTLVIVSS

SEQ ID NO: 19116 - protein, 127 aa, Artificial Sequence
  Synthetic construct
QLQLQESGPGLAKPSETLSLTCTVSGGSISSSSYYWGWIRQPPGKGLEWIGSIYYSGSTYYSPSLKSRVTISVDTSKNQFSLNLSSVTAADTAVYYCARHLAINLLLPGARGYFDNWGQGTLVTVSS

SEQ ID NO: 19117 - protein, 119 aa, Artificial Sequence
  Synthetic construct
QVQLQESGPGLVKPSQTLSLTCTVSGGSITSGGYYWSWIRQHPGKGLEWIGYVYYSGSTYYNPSLKSRIIISVDTSKKQFSLNLSSVTAADTAVYYCATGFTPYYFDYWGQGTLVTVSS

SEQ ID NO: 19118 - protein, 124 aa, Artificial Sequence
  Synthetic construct
QVQLVESGGGVVQPGRSLRLSCAASGFTFSSYGMHWVRQAPGKGLEWVAVISYDGTKKYDADSVKGRFAISRDNSKNTLYLQMNSLRVEDTAVYYCAKDRGFGVVVGATLFDDWGQGTLVTVSS

SEQ ID NO: 19119 - protein, 126 aa, Artificial Sequence
  Synthetic construct
EVHLVESGGGLVKPGGSLRLSCAASGLTFRSYDMNWVRQAPGKGLEWVSSISRSSTYIYYADSVKGRFTISRDNTQNSLYLQMNSLRAEDTAVYYCARGRELLSAYYHYYYFMDVWGKGTTVTVSS

SEQ ID NO: 19120 - protein, 124 aa, Artificial Sequence
  Synthetic construct
QVQLIQSGAEVKKPGASVKVSCEVSGYTLPELSIHWVRQPPGKGLEWMGGFDPENVETIYAQKFQGRVTMTEDTSTDTAYMELSSLRSEDAAVYYCATAFAYCGGDCFGRFDYWGQGTLVTVSS

SEQ ID NO: 19121 - protein, 123 aa, Artificial Sequence
  Synthetic construct
EVQLVESGGGLVKPGGSLKLSCAASGFTFSSYTMNWVRQAPGKGLEWVSCISSSRTNTYYTDSVKGRFTISRDNAKNSLYLQMNSLRAEDTAVYYCAREYESFGDYVYYMDVWGKGTTVIVSS

SEQ ID NO: 19122 - protein, 119 aa, Artificial Sequence
  Synthetic construct
EVQLVESGGGLVQPGGSLRLSCAASGFIFNSYWMSWVRQAPGKGLEWVANIKQDGGEKYYVDSVKGRFTISRDNAKNSLYLQMNSLRAEDTAVYYCARLALSSWYFGYWGQGTLVTVSS

SEQ ID NO: 19123 - protein, 122 aa, Artificial Sequence
  Synthetic construct
QLQLQESGPGLVKPSETLSLTCTVSGGSITSSSYYWGWIRQPPGKGLEWIGSIYYSGNTHYNPSLKSRVTISVDTSKNQFSLKLNSVTAADTAVYYCARRGYDSGGYALGYWGQGTLVTVSS

SEQ ID NO: 19124 - protein, 123 aa, Artificial Sequence
  Synthetic construct
QVQLVESGGGVVQPGRSLRLSCAASGFTFSTYGMHWVRQAPGKGLEWVAVIYYDGSNKYYADSVKGRFAISRDNSKNTLYLQVNSLRADDTAVYYCAREGVALAGSGNALDYWGQGTVVTVSS

SEQ ID NO: 19125 - protein, 121 aa, Artificial Sequence
  Synthetic construct
QVQLQESGPGLVKPSQTLSLTCSVSGGFISSDGYYWSWIRQNPGKGLEWIGYIFHRGSTYYNPSLKSRVTISLDTSKNQFSLKLSSMTAADTAVYYCAREIFGVENWLDSWGQGTLVTVSS

SEQ ID NO: 19126 - protein, 119 aa, Artificial Sequence
  Synthetic construct
QVQLVESGGGLVQPGGSLRLSCAASAFTFSDYYMSWVRQAPGKGLEWVSYISSIGSTIYYADSVKGRFTISRDNARNSLYLQMNSLRAEDTAVYYCVRHEWLGGTWVYWGQGTLVTVSS

SEQ ID NO: 19127 - protein, 122 aa, Artificial Sequence
  Synthetic construct
QVQLVQSGAEVKKPGSSVKVSCKASGGTFSSYAISWVRQAPGQGLEWMGGIIPFFGTTKYAQKFQGRVTITADESTSTAYMELSSLTSEDTAVYYCARIGAYDSGGYSDDYWGQGTLVTVSS

SEQ ID NO: 19128 - protein, 120 aa, Artificial Sequence
  Synthetic construct
QVQLQQWGAGLLKPSETLSLTCAVYGGSFSGYSWSWIRQAPGKGLEWIGDINQSGSTNYNPSLKSRVTISVDTSKTQFSLKLRSVTAADTAVYYCARWERLVPEDAFDIWGQGTMVTVSS

SEQ ID NO: 19129 - protein, 120 aa, Artificial Sequence
  Synthetic construct
QITLTESGPTLVTPTQTLTLTCSFSGFSLDTIGVAVGWIRQPPGKALEWLGILFWDGDKRYSPPLSSRVTVTKDTSKNHVVLRLPNMDSADTATYYCARLLMEHDAFDVWGQGAMVSVSS

SEQ ID NO: 19130 - protein, 121 aa, Artificial Sequence; identical to SEQ ID NO: 18972
  Synthetic construct

SEQ ID NO: 19131 - protein, 119 aa, Artificial Sequence
  Synthetic construct
EVQLVESGGGLVQPGGSLRLSCAASGFIFRTYAMSWVRQAPGKGLESVSAISGSGDRTYYADSVKGRFTMSRDNSKNTVYLQMNSLRAEDTAVYFCACGYSGYDYDAPWGQGTLVTVSS

SEQ ID NO: 19132 - protein, 131 aa, Artificial Sequence
  Synthetic construct
EVQLVESGGGLVKPGGSLRLSCAASGFTFSSYIMNWVRQAPGKGLEWVSSISSRSSYIFYADSVKGRFTISRDNAKNSLYLQMNSLRAEDTAVYYCARALHTGDTSGWFDPPPYFYGLDVWGQGTTVTVSS

SEQ ID NO: 19133 - protein, 128 aa, Artificial Sequence
  Synthetic construct
QVQLVQSGAEVKKPGSSVKVSCKASGGTFSNYAVSWVRQAPGQGLEWMGGIIPIFGIAIYAQKFQGRVTITADESTSTAYMELSSLRSEDTAVYYCARDPGYCSGGSCSNYYYYMDVWGKGTTVTVSS

SEQ ID NO: 19134 - protein, 122 aa, Artificial Sequence
  Synthetic construct
QDQLVQSGAEVKKPGASVKVSCKASGYTFTSFDISWVRQAPGQGLEWMGWISTYNGNTDYAQNLQGRVTMTTDTSTSTAYMELRSLRSGDTAVYYCSRWPRFRTQPRQFDPWGQGTLVTVSS

SEQ ID NO: 19135 - protein, 121 aa, Artificial Sequence; identical to SEQ ID NO: 2078
  Synthetic construct

SEQ ID NO: 19136 - protein, 121 aa, Artificial Sequence
  Synthetic construct
QVQLVESGGGVVQPGRSLRLSCAASGFTFSSYAMHWVRQAPGKGLEWVAVISYDGSNKYYADSVKGRFTISRDNSKKTLYLQMNSLRSEDTAVFYCARAWGGGYRGPVDYWGQGTLVTVSS

SEQ ID NO: 19137 - protein, 121 aa, Artificial Sequence
  Synthetic construct
QLQLQESGPGLVKPSETLSLTCTVSGDSISGSAYFWGWIRQPPGKGLEWLGHIFYSGTTYYDPSLKSRVTISVDTSKNQFSLKLTSVTAADTAVYYCARVPGGRGWDFDYWGHGTLVTVSS

SEQ ID NO: 19138 - protein, 127 aa, Artificial Sequence
  Synthetic construct
QVQLVQSGAEVKKPGASVKVSCKASGYTFTGYYMHWVRQAPGQGLEWMGWINPNSGVTNYAQKFQGCVTMARDTSISTVYMEMSRLRSDDTAVYYCAREQYYYGSGSYHSPGGMDVWGQGTTVIVSS

SEQ ID NO: 19139 - protein, 119 aa, Artificial Sequence
  Synthetic construct
QITLKESGPTLVKPTQTLTLTCTFSGFSLTTSGVGVGWIRQPPGKALEWLALIYWDYDKRYSPSLKSRLTITKDTSKNEMVLTMTNMDPVDTATYYCARLTTVTIFDSWGQGTLVTVSS

SEQ ID NO: 19140 - protein, 116 aa, Artificial Sequence; identical to SEQ ID NO: 18651
  Synthetic construct

SEQ ID NO: 19141 - protein, 124 aa, Artificial Sequence
  Synthetic construct
QVQLVQSGAEVKKPGSSVKVSCKASGGTFSSYTISWVRQAPGQGLEWMGKIIPILGITDYALKFQGRVTITADKSTGTAYMDLSSLRSEDTAVYYCAREKGYSSSSSSTYFNHWGQGTLVTVSS

SEQ ID NO: 19142 - protein, 119 aa, Artificial Sequence
  Synthetic construct
QVQLVQSGAEVKKPGASVKVSCKVSGYTLIELPMHWVRQAPGKGLEWMGGFDPEDGETIYAQKFQGRVTMTEDTSTDTAYMELSSLRSEDSAVYYCATVTFLIHVFADWGQGTLVTVSS

SEQ ID NO: 19143 - protein, 121 aa, Artificial Sequence
  Synthetic construct
RVQLVQSGAEVKMPGASVKVSCKVSGYTLPELSMHWVRQAPGKGLEWMGGFDPEDGETIYAQNFQGRVTMTEDTSTDTAYMELSSLRSEDTAVYFCATSPAIVRQNWFDPWGQGTLVTVSS

SEQ ID NO: 19144 - protein, 135 aa, Artificial Sequence
  Synthetic construct
QVQLVQSGAEVKKPGASVKVSCKASGYTFTSYAISWVRQAPGQGLEWMGWISAYNGNTNYAQKLQGRVTMTTDTSTSTAYMELGSLRSDDTAVYYCARDGSVLPDYDFWSGYSSRGDYHYGMDVWGQGTTVTVSS

SEQ ID NO: 19145 - protein, 125 aa, Artificial Sequence
  Synthetic construct
QVQLVQSGSELKKPGASVKVSCKASGYTFTSFALNWVRQAPGQGLEWMGWINTNTGIPTYAQGFTGRFVFSLDTSVSTAYLQVSSLKAEDTAMYYCARLNWVVNGDNYYYYMDVWGKGTTVTVSS

SEQ ID NO: 19146 - protein, 125 aa, Artificial Sequence
  Synthetic construct
QVQLVQSGAEVKKPGASVKVSCKASGYTFISHYIHWVRQAPGQGLEWMGVINPTGGSTRYSQKLQGRVTMTRDTSTSTIYMQLSSLRSEDTALYYCARGEKAHVTVAAYRLLIPWGQGTLVTVSS

SEQ ID NO: 19147 - protein, 119 aa, Artificial Sequence
  Synthetic construct
QVQLVESGGGVVQPGRSLRLSCAASGFIFSTYGMHWVRQAPGKGLEWVAFISYDGSNKYYADSVKGRFTISRDNSKNTLYLQMNSLRVEDTALYYCAKEGLGSPPPESWGQGTLVTVSS

SEQ ID NO: 19148 - protein, 119 aa, Artificial Sequence
  Synthetic construct
EAQLVESGGGLVKPRGFLRLSCAASGFNFANAWMHWVRQAPGKGLEWVGRIRSKPDGETTDYATPVKGRFIISRDDSKKTLYLQMSSLKAEDTAVYFCVKEGFSPFDYWGQGTLVTVSS

SEQ ID NO: 19149 - protein, 120 aa, Artificial Sequence
  Synthetic construct
QVQLVESGGGVVQPGRSLRLSCAASGFTFSDYSVHCVRQAPGKGLEWVAAISFDGSITFYADSVRGRFTISRDNSKNTLYVQMNSLLTEDTAIYYCVRSRGGRTDALDIWGQGTMVTVSS

SEQ ID NO: 19150 - protein, 123 aa, Artificial Sequence
  Synthetic construct
QVQLVQSGAEVKKPGSSVKVSCKASGGTFNTYAITWVRQAPGQGLEWMGGIIPIFGTAKYAQKFQGRVTLTADESTGTAYMDLRSLRSEDTAVYYCARLDYQLQPHYHYMDVWGRGTTVTVSS

SEQ ID NO: 19151 - protein, 127 aa, Artificial Sequence; identical to SEQ ID NO: 10273
  Synthetic construct

SEQ ID NO: 19152 - protein, 122 aa, Artificial Sequence
  Synthetic construct
QLQLQESGPGLVKPSETLSLTCTVSGGSISSSDYYWGWIRQPPRKGLEWIGSIYYSGSTYYNPSLKSRVTISVDTSKNQFSLKLNSVTAADTGIYYCARPESSGTAAAFDPWGQGTLVTVSS

SEQ ID NO: 19153 - protein, 125 aa, Artificial Sequence
  Synthetic construct
QVQLVQSGSELKKPGASVKVSCKASGYTFTNYAINWVRQAPGQGLEWMGWINTNTGDPTYAQGFTGRFVFSLDTSVSTAYLQISSLKAEDTAVYYCARDSAADHPYYYYYYMDVWGKGTTVTVSS

SEQ ID NO: 19154 - protein, 124 aa, Artificial Sequence
  Synthetic construct
QLQLQESGPGLVKPSETLSLTCTVSGGSISSSSYYWDWIRQPPGNGLEWMGSIFYSGITYYNPSLKSRVTISVDTSKNQFSLKLTSVTAADTAVYYCARRHRPFTLLRGAFDSWGQGTLVTVSS

SEQ ID NO: 19155 - protein, 125 aa, Artificial Sequence
  Synthetic construct
QVQLVQSGSELKKPGASVKVSCKASGYTFTDYAMNWVRQAPGQGLQWMGWINTNTGDPSYAQGFTGRFVFSLDTSVSTAYLQISSLKADDTAVYYCARDRRTAMPDYSYFYMDVWGRGTTVTVSS

SEQ ID NO: 19156 - protein, 125 aa, Artificial Sequence
  Synthetic construct
QVQLQQWGAGLLKPSETLSLTCAVSGGSFSAYYWTWIRQPPGKGLEWIGEINHNGRTNYNPSLKSRVTISIDTSKNQFSLKLSSVTAADTAVYYCARGLAGFYYGSTILAYFDYWGQGTLVTVSS

SEQ ID NO: 19157 - protein, 121 aa, Artificial Sequence
  Synthetic construct
QVQLVESGGGVVQPGRSLRLSCAASGFTFSSYGMHWVRQAPGKGLEWVAVIWFDGSNKYCADSVKGRFTISRDNSKNTLYLQMDSLRAEDTAMYYCAREGMVGATTGIDYWGQGTLVTVSS

SEQ ID NO: 19158 - protein, 121 aa, Artificial Sequence
  Synthetic construct
EVHLVESGGGLVQPGGSLRLSCAASGFTVSSNYMSWVRQAPGKGLEWVSVIYSGGNTYYADSVKGRFTISRDNSKNTLYLQMNSLRAEDTAVYYCARDRRIIGYYFGMDVWGRGTTVTVSS

SEQ ID NO: 19159 - protein, 119 aa, Artificial Sequence
  Synthetic construct
QVQLVQSGSELKKPGASVKVSCKASGYTFTTYPLNWLRQAPGQGLEWMGWINTNTGYPTYAQGFTGRFVFSLDTSVSTAYLQISSLKAEDTAVYYCARGHVFIYYFDYWGQGTPVTVSS

SEQ ID NO: 19160 - protein, 119 aa, Artificial Sequence; identical to SEQ ID NO: 2239
  Synthetic construct

SEQ ID NO: 19161 - protein, 124 aa, Artificial Sequence
  Synthetic construct
QVQLVQSGAEVKKPGASVKISCKASGYTFTNYYMHWLRQAPGQGLEWMGIINPSSGSTSYVQKFQGRVSMTRDTSTSTVYMELSGLRSDDTALYYCARDYILTTVAGGRGFDPWGQGTLVTVSS

SEQ ID NO: 19162 - protein, 120 aa, Artificial Sequence
  Synthetic construct
QVQLVESGGGVVQPGRSLRLSCAASGFTFSSSALHWVRQAPGKGLEWVAVISYDGFNKYYADSVRGRFTLSRDNSKNALYLQMNSLRTEDTAVYYCATGGGNYYNAFHIWGQGTMVTVSS

SEQ ID NO: 19163 - protein, 123 aa, Artificial Sequence
  Synthetic construct
QLQLQESGPGLVKPSETLSLTCTVSGGSISSSSYYWGWIRQPPGKGLEWIGSIYYSGSAYYSPSLKSRVTISVDTSKNQISLRLRSVTAADTAVYYCARLWDTYNYYSGMDVWGQGTTVTVSS

SEQ ID NO: 19164 - protein, 123 aa, Artificial Sequence
  Synthetic construct
QVQLVQSGAEVKKPGASVRVSCKVSEYTLTEFSVHWVRQAPGKGLEWMGGFDPENGETIYAQRFQGRVTMTEDTSTDTAYMELSSLRSEDTAVYYCATVPPLVTAGHNWFDPWGQGTLVTVSS

SEQ ID NO: 19165 - protein, 123 aa, Artificial Sequence
  Synthetic construct
QVQLVQSGTEVRKPGASVKVSCKASGYTFTDYYMHWVRQAPGQGLEWLGWINPDTGGTNYAQTFQGWVTMTRDTSITTVYVELNRLRFEDTAVYYCARENPGVYDSGGYFDYWGQGTLLTVSS

SEQ ID NO: 19166 - protein, 52 aa, Artificial Sequence
  Synthetic construct
GADESTSTAYLALSSLRSDDTAVYFCTRVSGYDSRGHWVDYWGQGTRVTVFP

SEQ ID NO: 19167 - protein, 126 aa, Artificial Sequence
  Synthetic construct
QVQLVESGGGLVKPGGSLRLSCAASGFTFSDYYMTWIRQAPGKGLEWVSYISTSGTITSYADSVKGRFTVSRDNAQNSLFLQMNSLRAEDTAIYFCARDSGYSGSGTYYIQAFDVWGQGAVVSVSS

SEQ ID NO: 19168 - protein, 128 aa, Artificial Sequence
  Synthetic construct
EVQLVESGGGSVQPGGSLRLSCAASGFAFRSYWMHWVRQAPGKGLVWVSRINRDGRSTTYADSVKGRFTISRDNAKNTLYLQMNSLRAEDTAVYYCARDSTPREYYYDRSGDEAFDIWGQGTKVTVSS

SEQ ID NO: 19169 - protein, 118 aa, Artificial Sequence
  Synthetic construct
EVQLVESGGGLIQPGGSLRLSCAASGVTVSRNYMSWVRQAPGKGLEWVSLIYSGGSTFYADSVKGRFTISRDNSKNTLYVQMNNVRAEDTAVYYCARFLEAAGGMDVWGQGTTVTVSS

SEQ ID NO: 19170 - protein, 121 aa, Artificial Sequence
  Synthetic construct
QITLKESGPTVVKPTQTLTLTCTFSGFSFNTSGVGVGWIRQPPGKALEWLALIYWDDDKRFSPSLKSRLTITKVTSKNQVVLTMTNMDPVDTATYYCAHQNFYYYYYIDVWGKGTTVTVSS

SEQ ID NO: 19171 - protein, 102 aa, Artificial Sequence
  Synthetic construct
PVQLVQSGAEVKKPGASVKVSCKASGYTFSNYVITWVRQSHHDHRHIHEHSLHGAEEPEIRHGRVLLCERSRLVLRFLEWLCRLLPVRYGRLGPRDHGHRLL

SEQ ID NO: 19172 - protein, 125 aa, Artificial Sequence
  Synthetic construct
QLQLQESGPGLVKPSETLSLTCSVSGGSISSSSYYWGWIRQPPGKGLEWIGHIFYTGSTYNNPSLESRVAISIDTSKNQFSLRLSSVTAADTAVYYCARFAYNSVETFIGGFDIWGQGTMVTVSS

SEQ ID NO: 19173 - protein, 120 aa, Artificial Sequence
  Synthetic construct
QVQLVQSGAEVKKPGSSVKVSCKASGGTFSSHSINWVRQAPGQGLEWMGRIIPVLGIANYAQKFQGRVTFTADKSTSTAYMELSSLRSEDTAVYYCARGVGDSRQFREHWGQGTLVTVSS

SEQ ID NO: 19174 - protein, 124 aa, Artificial Sequence
  Synthetic construct
EVQLLESGGGLVQPGGSLRLSCAASGFTFSSYAMSWVRQGPGKGLEWVSAISGSGGSTYYADSVKGRFTISRDNSKNTLYLQMNSLRADETAVYYCAKGLVEVAATLYYGMDVWGHGTTVTVSS

SEQ ID NO: 19175 - protein, 127 aa, Artificial Sequence
  Synthetic construct
QLQLQESGPGLVKPSETLSLTCTVSGGSMNSTSFYWGWIRQSPGKGLEWIGTIYYSGSTYFNPSLRSRVTISVDSSKNQFSLKLSSVTAADTAVYYCARHSFYYDVAAYVNTSPDYWGQGTLVTVSS

SEQ ID NO: 19176 - protein, 125 aa, Artificial Sequence
  Synthetic construct
QVQLVESGGGLVKPGGSLRLSCAASGFTFSDYYMSWIRQAPGKALEWISYIDATGSSTYNADSVKGRFTVSRDNAQNSLYLQLDGLRVADTAIFYCARVGYRLLLGSYHYYLDVWGKGTTVTVSS

SEQ ID NO: 19177 - protein, 128 aa, Artificial Sequence
  Synthetic construct
QVQLVQSGSELKKPGASVKVSCKASGYTFTNYAMNWVRQAPGLGLEWMGWINTNTGNPTYAQGFTGRFVFSLDTSVSTAYLQISSLKAEDTAVYYCARGGGPSSWSLDYYFYYYMDVWGRGTTVTVSS

SEQ ID NO: 19178 - protein, 123 aa, Artificial Sequence
  Synthetic construct
QVQLQQWGAGLLKPSETLSLNCTVYGGSLSGYFWTWIRQSPGKGLEWIGEISHSGNTGYNPSLRSRVSISVDTSKNQVSLKLNSVTAADTAVYYCARKPLLHSAVNPGAFDIWGQGTLVTVSS

SEQ ID NO: 19179 - protein, 122 aa, Artificial Sequence
  Synthetic construct
QVQLVQSGAEVKKPGSSVKVSCKASGGTFSSYAISWVRQAPGQGLEWMGGIIPIFGTANYAQKFQGRVTITADESTSTASMELSSLRSEDTAVYYCARDTAYDSSGYYYSYWGQGTLVTVSS

SEQ ID NO: 19180 - protein, 122 aa, Artificial Sequence
  Synthetic construct
EVQLVQSGAEVKKPGESLKISCKGSGYSFSSYWIGWVRQMPGKGLQWMGIIYPGDSDTRYSPSFQGQVTISADKSISTAYLQWSSLKASDTAIYYCARQGMATITGVGFDPWGQGTLVTVSS

SEQ ID NO: 19181 - protein, 127 aa, Artificial Sequence
  Synthetic construct
QVQLQESGPGLVKPSETLSLTCTVSGGSISSYYWNWIRQPPGKGLEWIGNIYYSGSTNHNPSLRSRVTILIDTSRNQFSLKLSSVTAADTAVYYCARLYCSGGSCFSWDYYYGMDVWGQGTTVTVSS

SEQ ID NO: 19182 - protein, 119 aa, Artificial Sequence
  Synthetic construct
QVLLVESGGGVVQPGRALRLSCAASGFTFSSYAVHWVRQAPGKGLEWVAVISYDGINKYYADSVKGRFTISRDNSKNTLYLQMNSLRAEDTAVYYCARSDGYKSFFDYWGQGTLVTVSS

SEQ ID NO: 19183 - protein, 121 aa, Artificial Sequence
  Synthetic construct
QVHLVESGGGVVQPGRSLRLSCAASGFTFSSYAMHWVRQAPGKGLEWVTVISYDGNNKYYADSVRGRFTISRDNSKNTLFLQMNSLRPDDTAIYYCARPPSGNYFGWFDPWGQGTLVTVSS

SEQ ID NO: 19184 - protein, 121 aa, Artificial Sequence; identical to SEQ ID NO: 2469
  Synthetic construct

SEQ ID NO: 19185 - protein, 129 aa, Artificial Sequence
  Synthetic construct
EVQVVEFGGGLVQPGRSLRLSCATSGFTFEDFDMHWVRQVPGKGLEWVSGSTWNSGTIDYADSVKGRFTISRDNAKNSLYLQMNNLRDEDTALYYCAKDIGRYDHYYTFGRVGGAFDIWGQGTMVTVSS

SEQ ID NO: 19186 - protein, 128 aa, Artificial Sequence
  Synthetic construct
QVQLVQSGAEVKKPGSSVKVSCTASGGTFSDYPISWVRQAPGQGLEWMGGLIPMFGTPNYAQKFQGRVTITADESTSTAYMELSSLRYEDTAVYYCASLGGDYYDSGTYYNSSEFDPWGQGTLVTVSS

SEQ ID NO: 19187 - protein, 122 aa, Artificial Sequence
  Synthetic construct
QVQLVQSGAEVKKPGSSVKVSCKASGGTFSSHAISWVRQAPGQGLEWMGGIIPIFGTANYAQKFQGRVTFTADESTSTTYMQLSSLTPEDTAVYYCARIEGFDRSGHYWDFWGQGTLVTVSS

SEQ ID NO: 19188 - protein, 125 aa, Artificial Sequence
  Synthetic construct
EVQLVQSGAEAKKPGESLKISCKGFGYTFTSNWIGWVRQMPGKGLEWMGIIYPGDSDTRYSPSFQGQVTISADKSISTAYLQWSSLKASDTARYYCARLNSGYDFYSYYYYMDVWGKGTTVTVSS

SEQ ID NO: 19189 - protein, 124 aa, Artificial Sequence
  Synthetic construct
QVQLVQSGAEVKKPGASVKVSCKASGYTFTNYYIHWVRQAPGQGLEWMGILDVSGGGTSNAQKLQGRLTMTRDTSTSTVFMELSSLTSEDTAVYYCARDPTRPSNGDPDGFDMWGQGTLLTVSV

SEQ ID NO: 19190 - protein, 121 aa, Artificial Sequence
  Synthetic construct
QVQLQQWGAGLLKPSETLSLTCAVYGGSFSGYYWSWIRQPPGKGLEWIGEVVHSGSTSYNPSLKSRVTILLDTSNNQFSLKLSSVTAADTAVYYCARDNGSGTQNYHMDVWGKGTTVTVSS

SEQ ID NO: 19191 - protein, 122 aa, Artificial Sequence
  Synthetic construct
EVQLLESGGGLVQPGGSLRLSCAASGITFINYAMSWVRQAPGKGLEWVSGISGSGGGTYYADSVKGRFTISRDNSKNTLYLQMNSLRVEDTAVYYCAQEALNVVVVTAPRYWGQGSLVTVSS

SEQ ID NO: 19192 - protein, 121 aa, Artificial Sequence
  Synthetic construct
QVQLVESGGGVVQPGRSLRLSCAASGFTFTNYGMHWVRQAPGKGLEWVAVIWYDGSNKYYAESVKGRFTISRDNSKNTLYLEMNSLRAEDTAVYYCAREGQVGETGGFDIWGQGTMVTVSS

SEQ ID NO: 19193 - protein, 125 aa, Artificial Sequence
  Synthetic construct
QVQLVQSGSELKKPGASVKVSCQASGYTFTSYAVTWVRQAPGQGLEWMGWINTNTGDPTYAQGFTGRLVFSLDTSVSTAYLQISSLKVEDTAVYYCARLNWVVNGDFYYYYMDVWGKGTTVTVSA

SEQ ID NO: 19194 - protein, 119 aa, Artificial Sequence
  Synthetic construct
EVQLVESGGGLVQPGGSLRLSCAASEFTVSTNYMSWVRQAPGKGLEWVSVIYTGGSTSYADSVKGRFTISRDNSKNTLYLQMNSLRAEDTALYYCARGDGSYYSSFDYWGQGTLVTVSS

SEQ ID NO: 19195 - protein, 125 aa, Artificial Sequence
  Synthetic construct
QVQLVQSGAEVKKPGSSVKVSCKASGGTFSSYSITWVRHAPGQGLEWMGRIIPILSISEYAQKVQGRVTITADKSTSTAYMELSSLTSEDTAVYYCAREKGYSSLSSATYYFEYWGQGTLVTVSS

SEQ ID NO: 19196 - protein, 119 aa, Artificial Sequence; identical to SEQ ID NO: 2467
  Synthetic construct

SEQ ID NO: 19197 - protein, 127 aa, Artificial Sequence
  Synthetic construct
EVQLVESGGGLVKPGGSLRLSCAASGFTFNRSSMNWVRQAPGKGLEWVSSISSSSSYIYYGDSVKGRFTISRDNAKNSLYLQMNSLRAEDTAVYYCASMRTNYDIFTGYYPDAFDIWGQGTMVTVSS

SEQ ID NO: 19198 - protein, 121 aa, Artificial Sequence
  Synthetic construct
EVQLVQSGAEVTKPGESLKISCEGSGYTFTTYWIGWVRQMPGKGLEWMGIIYPGDSDTRYSPSFQGQVTISADNSIRTAYLQWSSLKASDTAMYYCARQGPPWSHDAFDIWGQGTMVTVSS

SEQ ID NO: 19199 - protein, 121 aa, Artificial Sequence
  Synthetic construct
QVQLQQWGAGLLKPSETLSLTCAVYGGSFSDYYWSWIRQPPGKGLEWIGESNHGGSTNYNPSLKSRVTISVDTSKKQFSLKLSSVTAADTAMYYCARVSRGYTYGAPSDYWGQGTLVTVSS

SEQ ID NO: 19200 - protein, 123 aa, Artificial Sequence
  Synthetic construct
EVQLVESGGGLVQPGRSLRISCTASGFTFNDYAMHWVRQAPGKGLEWVSGISWNSAGIGYADSVKGRFTISRDNAKNSLYLQMNSLRAEDTALYYCAKGDGSGTYYYYYMDVWGKGATVTVSS

SEQ ID NO: 19201 - protein, 126 aa, Artificial Sequence
  Synthetic construct
QVHLVQSGAEVKKPGASVKVSCKASGYSFTRYGITWVRQAPGQGLQWMGWISADNGNTNYAQKLQGRVTMTTDTSTSTAYLELRSLRSDDTAVYYCARDSGYCSSSSCRFDWFDPWGQGTLVTVSS

SEQ ID NO: 19202 - protein, 123 aa, Artificial Sequence
  Synthetic construct
QLQLQESGPGLVKPSETLSLTCTVSGGSISSSTYFWGWIRQPPEKGLEWIGTIYYSGSTYYNPSLKSRVTISVDTSKNQFSLRLSSVTAADTSMYYCARYTRDWSRDDAFDIWGQGTMVTVSS

SEQ ID NO: 19203 - protein, 122 aa, Artificial Sequence
  Synthetic construct
QVQLVQSGAEVKKPGASVKVSCKVSGYTLIELSIHWVRQAPGKGLEWMAGFDPEDGETIYAQKFQGRVTVTEDTSTDTAYMELSSLRFEDTAIYYCATGPPIITVGHWFDPWGQGTLVTVSS

SEQ ID NO: 19204 - protein, 119 aa, Artificial Sequence
  Synthetic construct
QVHLVESGGGVVQPGRSLRLSCAASGFTFTNYAMHWVRQAPGKGLEWVAVISYDGYNRYYADSVKGRFTISRDDSQNTLYVQMNSLRAEDTALYYCARGGGGYKFFDYWGRGTLVTVSS

SEQ ID NO: 19205 - protein, 123 aa, Artificial Sequence
  Synthetic construct
EVQLVQSGAEVKKPGESLRISCKASGYSFADYWIAWVRQMPGKGLEWMGRIDASDSYTDYSPSFQGLVTMSADRSTSTAYLQWSSLKASDTAIYYCARLPAFQVRGKYGMDVWGQGTTVTVSS

SEQ ID NO: 19206 - protein, 121 aa, Artificial Sequence
  Synthetic construct
QVQLQESGPGLVKPSETLSLTCTVSGGSISSYYWSWIRQPPGKGLEWIGSVYDTGNTNYNPSLKSRVTISVDTSKHQFSLNLSSVTAADTAVYYCARVTLSYFGYYYMDVWGKGTTVTVSS

SEQ ID NO: 19207 - protein, 123 aa, Artificial Sequence
  Synthetic construct
QVQLVQSGPEVKKPGSSVKVSCTASGVSLTRNTFDWVRQAPGQGLEWVGRIIPVVGLTNYPQKFQGRVTVTADISTSTAYMELTGLRSEDTAVYYCIHVGSVTFYQYNGVDLWGQGTPVTVSS

SEQ ID NO: 19208 - protein, 125 aa, Artificial Sequence
  Synthetic construct
QVQLVQSGSELKKPGASVKVSCKASGYTFTHYALNWVRQAPGQGLEWMGWIHTNTGYPMYAQGFTGRFLFSLDTSVTTAFLQISSLRAEDTAVYYCARAPPLYETRDYYVSPFYWGQGTLVTVSS

SEQ ID NO: 19209 - protein, 129 aa, Artificial Sequence
  Synthetic construct
EVQLVESGGGLVKPGGSLRLSCAASGFTFSNYYMNWVRQAPGKGLEWVSSISGSSSYIYYADSVKGRFTISRDNAKNSLYLQMNSLRAEDTAVYYCARDSFRGVGVTAMDYYYYGMDVWGQGTTVTVSS

SEQ ID NO: 19210 - protein, 121 aa, Artificial Sequence
  Synthetic construct
QVQLVQSGAEVKKPGSSVKVSCKASGGTFSSYPISWVRQAPGQGLEWMGGVIPIFGTANYAQKFQGRVTITADESTGTAYMEMSSLRSEDTAFYYCARDRGSGWTDAFDIWGQGTMVTVSS

SEQ ID NO: 19211 - protein, 123 aa, Artificial Sequence; identical to SEQ ID NO: 2242
  Synthetic construct

SEQ ID NO: 19212 - protein, 121 aa, Artificial Sequence
  Synthetic construct
QVQLVESGGGVVQPGRSLRLSCAASGFTFSNYGMHWVRQAPGKGLEWVALISFDGSNKYYADSVKGRFTISRDNSKNTLYLQMNSLRAEDTAVFYCAKDFAWGGEPELLLWGQGTLVTVSS

SEQ ID NO: 19213 - protein, 121 aa, Artificial Sequence
  Synthetic construct
QVQLVQSGAEVKKPGASVKVSCKVSGYTLTELSIHWVRQAPGKGLEWMGGFNPEHDETIYAQNFQGRVTMTEDTSTDTAYMELSSLRSEDTAVYYCATSPAVVRQNWFDPWGQGTLVTVSS

SEQ ID NO: 19214 - protein, 125 aa, Artificial Sequence
  Synthetic construct
QVQLVQSGSELKKPGASVKVSCKASGYTLTNYAMNWVRQAPGQGLEWMGWIDTSTGHPTYAQGFTGRFVFSLDTSVSTAYLQISSLKAEDTAVYYCARDFQGPENYYYYFYMDVWGKGTAVTVSS

SEQ ID NO: 19215 - protein, 118 aa, Artificial Sequence
  Synthetic construct
EVQLVESGGGLVQPGGSLRLSCAASGFIVSSNYMSWVRQAPGKGLEWVSVIYSGGSTYYVDSVKGRFTISRDNSMNTLYLQMNSLRAEDTAVYYCAREARVSTEFDPWGQGTLVTVSS

SEQ ID NO: 19216 - protein, 119 aa, Artificial Sequence
  Synthetic construct
EVQLVESGGGLIQPGGSLRLSCTASGITVSTNYMTWVRQAPGKGLEWVSIIYSGGSTYYADSVKGRFTISRDNSKNTLYLQMNSLRADDTAVYYCTRGGWPSGDTFDIWGLGTMVTVSS

SEQ ID NO: 19217 - protein, 123 aa, Artificial Sequence
  Synthetic construct
EVQLVQSGGGLVQPGGSLRLSCAASGFTYSTYWMSWVRQAPGKGLEWVANIKEDGSEKYYVDSVRGRFTISRDNARNSLNLQMNSLRVEDTAVYYCAREGYYYDTTHSPPHFWGQGTLVTVSS

SEQ ID NO: 19218 - protein, 120 aa, Artificial Sequence
  Synthetic construct
EVQLVESGGGLVQPGRSLRLSCAASGFTFDDYAMHWVRQAPGKGLEWVSGITWNSGTLGYADSVKGRFIISRDNAKNSLYLQMNSLRTEDTALYYCVKDSSRDYGGCDHWGQGTLVTVSS

SEQ ID NO: 19219 - protein, 128 aa, Artificial Sequence
  Synthetic construct
QVQLVQSGAEVKKPGSSVKVSCKPSGGTFSSYAISWVRQAPGQGLEWMGGIIPIFGTADYAQKFQGRVTITADESTSTAYMELSSLRSEDTAVYYCAGALGRDWLLHSDYYYYYMDVWGKGTTVTVSS

SEQ ID NO: 19220 - protein, 129 aa, Artificial Sequence
  Synthetic construct
QVQLVQSGAEVKKPGSSVKVSCKASGGSFSSTTISWVRQAPGQGLKWMGRITPILGITNYAQKFQARVTITADKSTSTVYMELSSLRSEDTAVYFCAREPRSPLDTALVLGLHNWFDPWGQGTLVTVSS

SEQ ID NO: 19221 - protein, 123 aa, Artificial Sequence
  Synthetic construct
EVQLVESGGGLVQPGRSLRLSCAASGFTFDDYAMHWVRQAPGKGLEWVSGISWNSVTIGYADSVTGRFTISRDNAKNSLYLQMNSLRAEDTALYYCAKCSSGTHYFFDAFDIWGQGTMVTVSS

SEQ ID NO: 19222 - protein, 112 aa, Artificial Sequence
  Synthetic construct
QVQLQESGPGLVKPSETLSLTCTVSGASISSHYWSWIRQPPGKGLEWIGYIYYSGSTNYNPSVKSRVTISVDTSKSQFSLKLSSVTAADTAVYYCARGFDYWGQGTLVTVSS

SEQ ID NO: 19223 - protein, 120 aa, Artificial Sequence
  Synthetic construct
QMQLVESGGGVVQPGRSLRLSCVASGFTFNTYAMHWVRQSPGKGLEWVALISYDGSNKYYADSVKGRFTISRDNSKNTVYLQMNSLRTEDTAVYYCARVMGGYSTAFDYWGQGTLVTVSS

SEQ ID NO: 19224 - protein, 115 aa, Artificial Sequence
  Synthetic construct
EVQLVESGGGLIQPGGSLRLSCAASGFTVSLNYMSWVRQAPGKGLEWVSVIYAGGTTYYADSVKGRFTISRDNSKNTLYLQMNSLRAEDTAVYFCARVETIDSYWGQGTLVTVSS

SEQ ID NO: 19225 - protein, 127 aa, Artificial Sequence
  Synthetic construct
QVQLVQSGAELKKPGASVKVSCKASGYTFTSYGISWVRQAPGQGLEWMGWISAFTGNTHYAQKLQGRVTLTTDTSTSTAYMELRSLRSDDTALYYCARDPDPDIAVMETADASLDYWGQGTLVTVSS

SEQ ID NO: 19226 - protein, 125 aa, Artificial Sequence
  Synthetic construct
EVQLVQSGAEVKKPGESLKISCKGSGYRFTSYWIGWVRQMPGKGLEWMGIIYPGDSDTRYSPSFQGQVTISADKSISTAYLQWSSLKASDTAMYYCASQQQQLVSYYYYYYMDVWGRGTTVTVSS

SEQ ID NO: 19227 - protein, 121 aa, Artificial Sequence
  Synthetic construct
QVLLQESGPRLVKPSQTLSLTCTVSGGSIGSGRYYWTWIRQPTGKGLEWIGRIISSGDTYYNPSLASRVTISGDTSKNQFSLRLTSVTAADTAVYYCARGWDLGDNRFDPWGQGTQVTVSS

SEQ ID NO: 19228 - protein, 121 aa, Artificial Sequence; identical to SEQ ID NO: 18690
  Synthetic construct

SEQ ID NO: 19229 - protein, 125 aa, Artificial Sequence
  Synthetic construct
QLQLQESGPGLVKSSETLSLTCTVSGGSISSRSYYWGWIRQPPGKGLEWIGTVYYSGSTYYNPSLKSRVTISVDTSKNQFSLKLSSVTAADTAVYYCARLRDYHGSGREGWFDPWGQGTLVTVSS

SEQ ID NO: 19230 - protein, 122 aa, Artificial Sequence
  Synthetic construct
QVQLVQSGAEVKKPGASVKVSCKVSGYTLTELSMHWVRQAPGKGLEWMGGFDPEDGETIYAQKFQGRVTMTEDTSTDTAYMELSSLRSEDTAVYYCATEWAVAGTFGEHHYWGQGTLVTVSS

SEQ ID NO: 19231 - protein, 121 aa, Artificial Sequence
  Synthetic construct
QVQLVESGGGVVQPGRSLRLSCAASGFTFSTYAIHWVRQAPGKGLEWVALISYDGSNKYYADSVKGRFTISRDNSKNTLYLQMNSLRGEDTAVYYCARSLGGSYYHGFDYWGQGTLVTVSS

SEQ ID NO: 19232 - protein, 124 aa, Artificial Sequence
  Synthetic construct
QVQLVQSGAEVKKPGASVKVSCKSSGYPFTMYAMHWVRQAPGQRLEWMGWINTGNGYTEYSQQFQGRVTITRDTSASTAYMELSSLRSEDTAVYSCARGSGAPNNYLFYYMDVWGKGATVTVSS

SEQ ID NO: 19233 - protein, 130 aa, Artificial Sequence
  Synthetic construct
QVQLVQSGAEVKKPGASVKVSCKASGYTFTSNYVHWVRQAPGQGLEWMGIINPSGGSTSYAQKFQGRVTMTRDTSTSTVYMELSSLRYEDTAVYYCARAQVKNYDFWSGYSGYYYGMDVWGQGTTVTVSS

SEQ ID NO: 19234 - protein, 120 aa, Artificial Sequence
  Synthetic construct
EVQLVQSGAEVKKPGESLKISCKGSGYNFTSYWIAWVRQMPGKGLEWMGIIYPGDSDTRYSPSFQGQITISADQSISTAYLLWSSLKASDTAMYYCARLLNLAGAFNDYWGQGTLVTVSS

SEQ ID NO: 19235 - protein, 116 aa, Artificial Sequence
  Synthetic construct
QVQLVQSGGGVVQPGRSLRLSCAASGFTLNQYGMHWVRQAPGRGLEWVAFISYDGSIQHYVDSVKGRFTISRDDFKNTLFLHMTSLRVDDTAAYYCAKGATKMDYWGQGTLVTVSS

SEQ ID NO: 19236 - protein, 123 aa, Artificial Sequence; identical to SEQ ID NO: 18955
  Synthetic construct

SEQ ID NO: 19237 - protein, 121 aa, Artificial Sequence; identical to SEQ ID NO: 2116
  Synthetic construct

SEQ ID NO: 19238 - protein, 124 aa, Artificial Sequence
  Synthetic construct
QVQLQESGPGLVKPSGTLSLTCAVSGGSISSTNWWSWVRQPPGKGLEWIGEIYHSGRANYNPSLMGRVTISIDKSKNEFSLNLNSVTAADTAVYFCARRIAVAGTIGFDAFDIWGQGTTVTVSS

SEQ ID NO: 19239 - protein, 118 aa, Artificial Sequence
  Synthetic construct
QVQLLESGPGLVRPSETLSLTCSVSGGSIASYYWTWLRQAPGKGLEWVGFVHNSGDTESNPSLRGRVTMSLDTSNKLSLKVTSVTAADTAVYYCVRGRGMATIPFEHWGQGRLVIVSS

SEQ ID NO: 19240 - protein, 129 aa, Artificial Sequence; identical to SEQ ID NO: 18657
  Synthetic construct

SEQ ID NO: 19241 - protein, 119 aa, Artificial Sequence; identical to SEQ ID NO: 18571
  Synthetic construct

SEQ ID NO: 19242 - protein, 129 aa, Artificial Sequence
  Synthetic construct
QVQLVDSGGGVVQPGRSLRLSCAGSGFTFSNYAMHWVRQAPGKGLEWVAVISYDGSNKYYADSVKGRFTISRDNSKNTLYLQMNSLRAEDTAVYYCARETSDRQWLGTTYHYYYYMDVWGKGTTVTVSS

SEQ ID NO: 19243 - protein, 130 aa, Artificial Sequence
  Synthetic construct
QVQLVESGGGVVQPGRSLRLSCAASGFTFSNYAMHWVRQAPGKGLEWVTFMSYDGSNKHYADSVKGRFTISRDNSKNMFYLQMNSLRAEDTAVYYCARQNYYDSSGYSPDAYSPDAFDIWGQGTMVTVSS

SEQ ID NO: 19244 - protein, 120 aa, Artificial Sequence
  Synthetic construct
QVQLVESGGGVVQPGRSLRLSCAASGFTFSTYAMHWVRQAPGKGLEWVAVISYDGMNKYYADSVKGRFTISRDNSRNTLYMQMNSLRAEDTAVYYCATGGGNYYNAFDIWGQGTRVTVSS

SEQ ID NO: 19245 - protein, 122 aa, Artificial Sequence
  Synthetic construct
QVQLVESGGGGVQPGRSLRLSCAASGVTFSSYAMHWVRQAPGKGLEWVAVISYDGTNKYYADSVKGRFTISRDNSKNTLYLQMNSLRVEDTAVYYCARGYDILTGYLYFDYWGQGTLVTVSS

SEQ ID NO: 19246 - protein, 126 aa, Artificial Sequence
  Synthetic construct
EVQLVQSGAEVKKPGESLKISCKGSGYSFTNYWIGWVRQMPGKGLECMGIIYPGDSDTRYSPSFQGQVTISADKSTSTAYLQWSSLKASDTAMYYCARPTFGYYGSHYNYYGMDVWGQGTTVTVSS

SEQ ID NO: 19247 - protein, 128 aa, Artificial Sequence
  Synthetic construct
EVQLMESGGGLVQPGGSLRLSCAASGFTVSGTSMTWVRQAPGKGLECISLIYTDTKTNYADSVQGRFTISRDTSTNILYLQMNSLTAEDTAVYYCARNSYYAVWRGSYGFAFHGMDVWGQGTTVIVSS

SEQ ID NO: 19248 - protein, 124 aa, Artificial Sequence
  Synthetic construct
QITLKESGPTLVKPTQTLTLTCTFSGFSLSTSGVGVGWIRQPPGKALEWLALIYWDDDKRYSPSLKTRLTITKDTSKNQVVLTMTNMDPVDTATFYCAHTGSVPLAMVGAFDIWGQGTMVTVSS

SEQ ID NO: 19249 - protein, 121 aa, Artificial Sequence
  Synthetic construct
QVQLVESGGGVVQPGRSLRLSCAASGFTFTTYGMHWVRQAPGKGLEWVAVIWYDGGNKYYADSVKGRFTISRDNSKNTLYLQMSSLRAEDTAVYYCARGQGATLRYGMDVWGQGTTVTVSS

SEQ ID NO: 19250 - protein, 132 aa, Artificial Sequence; identical to SEQ ID NO: 10120
  Synthetic construct

SEQ ID NO: 19251 - protein, 121 aa, Artificial Sequence
  Synthetic construct
QVQLVESGGGVVQPGRSLRLSCAASGFTFSSYGMHWVRQAPGKGLEWVAVIWYDGTNNNYADSVKGRFTISRDNSRNTLYLQMNSLRAEDTAVYYCARDRGSGWYGYFDNWGQGTLVTVSS

SEQ ID NO: 19252 - protein, 119 aa, Artificial Sequence
  Synthetic construct
EVQLVESGGGLIQPGGSLRLSCAASGFTVSNNYMSWVRQAPGKGLEWVSVIYIGGSTDYADSVKGRFTISRDKSKNTLYLQMNSLRAEDTAVYYCARDPGGAGAWFDPWGQGTLVTVSS

SEQ ID NO: 19253 - protein, 124 aa, Artificial Sequence
  Synthetic construct
QLQLQESGPGLVKPSETLSLTCTVSGGSISSSNYYWDWVRQPPGKGLEWIGSIYYSGVTYYSPSRKSRVTISVDTSKNQFSLKLSSLTAADTAVYICARRTRIYGDYAGAYDFWGQGTLVTVSS

SEQ ID NO: 19254 - protein, 126 aa, Artificial Sequence
  Synthetic construct
EVQLVESGGGLVKPGGSLRLSCAASGLTFSSYSMNWVRRAPGKGLEWVSSISSSSSEIHYADSVKGRFTISRDNAKNSLYLQMNSLRAEDTAVYYCASAEEDFGVVEKYFYGMDVWGQGTTVTVSS

SEQ ID NO: 19255 - protein, 117 aa, Artificial Sequence
  Synthetic construct
EVQLVESGGGLVQPGGSLRLSCAASGFTVSSNYMTWVRQAPGKGLEWVSIIYSGGSTFYADSVKGRFTISRDNSKNTLYLQMNSLRAEDTAVYYCVRDVTLRGVINWGLGTLVTVSS

SEQ ID NO: 19256 - protein, 127 aa, Artificial Sequence
  Synthetic construct
EVQLVESGGALVQPGGSLRLSCAASGFTFSDYSMNWVRQAPGKGLEWVSYIKSNSLMIYYADSVKGRFTISRDNAKNSLYLQMNSLRAEDTAVYYCARETIWERYFDWLLSPFFDYWGQGTLVTVSS

SEQ ID NO: 19257 - protein, 123 aa, Artificial Sequence
  Synthetic construct
EVQLVESGGGLVQSGGSLRLSCAASGFTFSRYTMNWVRQAPGKGLEWVSGISDSGRRTYYADSVKGRFTISRDNSKNTLYLQLNSLRAEDTAVYYCAKDYYDSGSYLNAFDIWGQGTMVTVSS

SEQ ID NO: 19258 - protein, 118 aa, Artificial Sequence
  Synthetic construct
EVRLVESGGGLVKPGGSLRLSCAASGFTFSSYTMNWVRQAPGKGLEWVSSITSSSRYIHYTDSVKGRFTVSRDNAKTSLSLQMNSLRAEDTAVYYCAREGVNGSQDYWGQGTLVTVSS

SEQ ID NO: 19259 - protein, 121 aa, Artificial Sequence
  Synthetic construct
QVQLQESGPGLVKPSGTLSLTCAVSGDSISSNIWWSWVRQPPGKGLEWIGEIYHSGSTNYNPSLKSRLTISIDKSKNQFSLKLSSVTAADTAVYYCARSWGMDMAGNFDSWGQGTLVTVSS

SEQ ID NO: 19260 - protein, 130 aa, Artificial Sequence
  Synthetic construct
DVQLVESGGGLVQPGGSLRLSCAGSGFTFSSSWMGWVRQAPGKGLEWVANIKQDGSDKSYVDSVEGRFTISRDNAKNSLYMQMNSLRAEDTAVYYCARVRGVGDFWSGYFFVSSTYFDSWGQGTLVTVSS

SEQ ID NO: 19261 - protein, 120 aa, Artificial Sequence
  Synthetic construct
QVQLVESGGGVVQPGRSLRLSCAASGFTFNSYAMHWVRQAPGKGLEWVAVISYDGDNKYYADSLKGRFTVSRDNSKNTLYLQMDSLRLEDTAVYYCARDRSGGYSYFDFWGQGTLVTVSS

SEQ ID NO: 19262 - protein, 132 aa, Artificial Sequence
  Synthetic construct
QVQLVESGGGVVQPGMSLRLSCAASGFTFSYYGMHWVRQAPGKGLEWVAVIWYDGNNKYYADSVKGRFTISRDNSKNMVYLQMNSLRAEDTAVYYCARDFGFTSSSWPGGENRYYYYGLDVWGQGTTVTVSS

SEQ ID NO: 19263 - protein, 128 aa, Artificial Sequence
  Synthetic construct
QVHLEESGGGVVQPGTSLRLSCVASGFTFSDYAMHWVRQAPGGGLEWIATTSYSGGDQYYADSVRGRFRISRDNSRNTLFLEMTSLRPGDTATYYCSKDSGYYGLGSYFARNNYFDPWGQGTLVIVSS

SEQ ID NO: 19264 - protein, 121 aa, Artificial Sequence
  Synthetic construct
QITLKESGPTLVKPTQTLTLTCTFSGFSLSNSGVAVGWIRQPPGKALEWLALIYWDDDKRYSPFLKSRLTITKDTSKNQVVLTMTNMDPVDTATYFCAHRLVAVAGPFDFWGQGTLVTVSS

SEQ ID NO: 19265 - protein, 131 aa, Artificial Sequence
  Synthetic construct
QVQLVQSGPEVKKPGASVKVSCKASGYTFPNYCITWVRQAPGQGLEWMGWISAYNGNTNYAQEFQGRVTMTTDTSTSTAYMELRSLRSDDTAVYYCARDPASHYDFWSGYVDFYQYGLDVWGQGTTVTVSS

SEQ ID NO: 19266 - protein, 119 aa, Artificial Sequence; identical to SEQ ID NO: 2467
  Synthetic construct

SEQ ID NO: 19267 - protein, 112 aa, Artificial Sequence
  Synthetic construct
QVQLQESGPGLVKPSETLSLTCTVSDGSISSYYWSWIRQPPGKGLEWIGYIYSSGSTNYNPSLKSRVTISVDTSKNQFSLKLISVTTADTAVYYCARGFEYWGQGTLVTVSS

SEQ ID NO: 19268 - protein, 122 aa, Artificial Sequence
  Synthetic construct
EVQLVESGGGLVQPGGSLRLSCSASGFTFSTYAMHWVRQAPGKGLEYVSAISSEGGSIYYADSVKGRFTISRDNSKNTLYLQMSSLRAEDTAVYYCVKDPSTVTSGEYFDYWGQGTLVTVSS

SEQ ID NO: 19269 - protein, 123 aa, Artificial Sequence; identical to SEQ ID NO: 19099
  Synthetic construct

SEQ ID NO: 19270 - protein, 121 aa, Artificial Sequence
  Synthetic construct
QVQLVESGGGVVQPGRSLRLSCAASGFTFSTYAMHWVRQAPGKGLEWVALISYDGSNKYYADSVKGRFTISRDNSKNTLYLQMNSLRAEDTAVYYCARGLGGSYYHGFDFWGQGTLVTVSS

SEQ ID NO: 19271 - protein, 118 aa, Artificial Sequence
  Synthetic construct
EVQLEESGGGLVQPGGSLRLSCGASGFTVSSNYMSWVRQAPGRGLEWVSFIYSGGDTYYADSVKGRFTVSRDNSKNTVYLQMNTLRAEDTAVYYCARDLVGWGWFDAWGQGTLVTVSS

SEQ ID NO: 19272 - protein, 131 aa, Artificial Sequence
  Synthetic construct
QVQLQQWGAGLLRPSETLSLTCAVYGGSFRAYYWTWVRQPPGRGLEWVGEIDHRGSTSYNPSLKSRVSMSSDTSQSQLSLKLTSVTAADTAVYYCAISPYDSSGYYVDDYSFPPYWDIDYWGQGTLVTVSA

SEQ ID NO: 19273 - protein, 124 aa, Artificial Sequence
  Synthetic construct
QVQLVQSGAEVKKPGASVKVSCKASGYMFTNYYIHWVRQAPGQGLEWMGILNVSGGGTIYAQKLQGRVTMTRDTTTSTVFMELSSLTSEDTAVYYCARDPTRPSNGDPDGFDIWGQGTLLTVSA

SEQ ID NO: 19274 - protein, 118 aa, Artificial Sequence
  Synthetic construct
QVQLVESGGGVVQPGRSLRLSCAASGFSFSNYGMHWVRLAPGKGLEWLAVISYDVNDKYYADSVRGRFTISRDNSKNTLHLQMSSLRGDDTAVYYCAKDGGTATFDSWGQGTLVTVSS

SEQ ID NO: 19275 - protein, 128 aa, Artificial Sequence
  Synthetic construct
QLQLQESGPGLVKPSETLSLTCTVSGGSISSSSYYWGWIRQPPGKGLEWIGSIYDSGSTYYNPSLKSRVTISEDTSKNQFSLNLSSVTAADTAVYYCATSSHDQWELHRGTTWYFDLWGRGTLVTVSS

SEQ ID NO: 19276 - protein, 122 aa, Artificial Sequence
  Synthetic construct
QVQLVESGGGVVQPGMSLRLSCAASGFMFKNFGMHWVRQAPGKGLEWVAVISYGGTMKYYADSVKGRFTISRDNSKNTLYLQMNSLRAEDTAVYYCAKEGMVGEAGRSLDYWGQGSLVTVSS

SEQ ID NO: 19277 - protein, 130 aa, Artificial Sequence
  Synthetic construct
DVQLVESGGGLVQPGGSLRLSCVGSGFTFSSSWMAWVRQAPGKGLEWVANIKQDGSDKSYLDSVKGRFTISRDNAKNSLYLQMNSLRAEDTAVYYCARVRGVGDFWSGYFFVSSTYFDSWAQGTLVTVSS

SEQ ID NO: 19278 - protein, 128 aa, Artificial Sequence
  Synthetic construct
EVQLVESGGGLVQPGGSLRLSCAASGFTLSSYAMNWVRQAPGKGLEWVSAISGSGGSTYYADSVKGRVTISRDNSKNTLYLQMNSLRVEDTAVYYCAKDAFYYGSGSHFYYYYYMDVWGKGTTVTVSS

SEQ ID NO: 19279 - protein, 127 aa, Artificial Sequence; identical to SEQ ID NO: 2134
  Synthetic construct

SEQ ID NO: 19280 - protein, 122 aa, Artificial Sequence
  Synthetic construct
EVQLVESGGGLVQPGGSLRLSCAASGFTVSANYMSWIRQAPGRGLEWVSVIYSGGSTFYADSVKGRFTISRDNSKNTLYLQMNSLRAEDTAVYYCARSYDILTGYSDAFDIWGQGTMVTVSS

SEQ ID NO: 19281 - protein, 124 aa, Artificial Sequence
  Synthetic construct
QLQLQESGPGLVKPSETLSLTCTVSGDSIISNTYYWGWIRQPPGKGLEWIGSIYYSGSTYYNPSLKSRVTISVDTSKNQFSLKLSSVTAADTAVYHCARHFAFFGYVGSWFDPWGPGTLVTVFS

SEQ ID NO: 19282 - protein, 125 aa, Artificial Sequence
  Synthetic construct
EVQLVQSGAEVKKPGESLKISCKGSGYTFTTYWIGWVRQMPGKGLEWMGIIYPGDSDTRYSPSFQGQVTISADKSISTAYLQWSSLKASDTAMYYCARLNSGYDFYSYYYYMDVWGKGTTVTVSS

SEQ ID NO: 19283 - protein, 121 aa, Artificial Sequence
  Synthetic construct
QVQLVESGGGVVQPGRSLRLSCAASGFTFTTYAMYWVRQAPGKGLEWVAVISYDGINKYYADSVKGRFAISRDNSKNTLYLQMNSLRAEDTAIYHCARSSSGSYYGAFDIWGQGTMVTVSS

SEQ ID NO: 19284 - protein, 121 aa, Artificial Sequence
  Synthetic construct
QVQLVESGGGVVQPGRSLRLSCAASGFTFSSYSMHWVRQAPGKGLEWVAVISYDGDNKYYADSVKGRFAISRDTSKSTLYLQMSSLRADDTAVYYCARPRGGSYFDAFDIWGQGTMVTVSS

SEQ ID NO: 19285 - protein, 119 aa, Artificial Sequence; identical to SEQ ID NO: 10701
  Synthetic construct

SEQ ID NO: 19286 - protein, 124 aa, Artificial Sequence; identical to SEQ ID NO: 18723
  Synthetic construct

SEQ ID NO: 19287 - protein, 122 aa, Artificial Sequence
  Synthetic construct
QVQLVQSGAEVKKPGASVKVSCKVSGYTLTEFSMHWVRQAPGKGLELMGGFDPEDGGTFFAQKFQGRVTMTEDTSTDTAYMELNSLRSEDTAVYYCATAGDRVATLYYFDYWGQGTLVTVSS

SEQ ID NO: 19288 - protein, 124 aa, Artificial Sequence
  Synthetic construct
EVQLVESGGGLVKPGGSLRLSCAASGFTFSDYSMNWVRQAPGKGLEWVSSISSSSSHIYYADSVKGRFTISRDNAKNSLYLQMNSLRAEDTAVYYCARVGRRYSSGYDNGIDYWGQGTLVSVSS

SEQ ID NO: 19289 - protein, 127 aa, Artificial Sequence
  Synthetic construct
EVQLVESGGGLVKPGGSLRLSCAASGFSFSDAWMSWVRQAPGKGLEWVGRIKSKTDGGTTDYAAPVQGRFTISRDESNSTLYLQMNSLKTEDTAVYYCTTATDIVLAVSADDAFDLWGQGTMVTVSS

SEQ ID NO: 19290 - protein, 125 aa, Artificial Sequence
  Synthetic construct
EVQLVQSGAEVKKPGESLKIPCKGSGYNFTDYWIVWVRQMPGKGLEWMGIIYPGDSDTRYSPSFQGQVTISADKSISTAYLQWSSLKASDTAIYYCARLNSGYDFYYYYYYMDVWGKGTTVTVSS

SEQ ID NO: 19291 - protein, 44 aa, Artificial Sequence
  Synthetic construct
GELSGLTSEDTAVYYCARDPTRPSNGDPDGFDIWGQGTLLTVSA

SEQ ID NO: 19292 - protein, 124 aa, Artificial Sequence
  Synthetic construct
QVHLVQSGTEVKKPGSSVKVSCKASGGTFSTYGISWVRQAPGQGLEWMGGIIPVFGTANYAQKFQGRVTITADESTSTAYLDLSSLRSEDTAAYYCATGRDTSSWHAAYYFDYWGQGTLVTVSS

SEQ ID NO: 19293 - protein, 123 aa, Artificial Sequence
  Synthetic construct
QVQLQQWGAGLLRPSETLSLTCAVYGESFSAYYWSWIRQPPGKGLEWIGEINHSGRTNYNPSLKSRVAMSVDTSKNQFSLMLSSVTAADTAVYYCARGWRYYDSGSYSYFDYWGQGSLVTVSS

SEQ ID NO: 19294 - protein, 120 aa, Artificial Sequence
  Synthetic construct
QVQLVESGGGVVHPGRSLRLSCAASGFTFSDYAMHCVRQAPGKGLEWVAAISFDGSNTYYADSVKGRFTISRDNSKNTLYVQMNSLLNEDTALYYCVRSRGGRTDAFDIWGPGTMVTVSS

SEQ ID NO: 19295 - protein, 129 aa, Artificial Sequence; identical to SEQ ID NO: 2281
  Synthetic construct

SEQ ID NO: 19296 - protein, 119 aa, Artificial Sequence; identical to SEQ ID NO: 10701
  Synthetic construct

SEQ ID NO: 19297 - protein, 121 aa, Artificial Sequence
  Synthetic construct
QVQLEESGGGVVQPGRSLRLSCAASGFTFSIYAMHWVRQAPGKGLEWVAVISYDGSNKYYADSVKGRFTLSRDNSKNSLYLEMNSLRAEDTAVYYCARSLGGNYFDAFDIWGQGTMVTVSS

SEQ ID NO: 19298 - protein, 121 aa, Artificial Sequence
  Synthetic construct
QVQLQQWGARLLKSSETLSLTCAVYGGSFSGYQWSWIRQPPGKGLEWIGEINHSGSTSYNPSLKSRVTISVDTSKNQFSLKLSSVTAADTAVYYCARDDGSSIHNYYMDVWGKGTTVTVSS

SEQ ID NO: 19299 - protein, 123 aa, Artificial Sequence
  Synthetic construct
EVQLVQSGAEVKKPGESLRISCKGSGYSFTSYWISWVRQMAGKGLEWMGRIDPSDSDTNYSPSFQGHVTISADKSIITAYLQWSSLKASDTAIYYCAGRFRGDYGDYLGFDIWGQGTMVTVSS

SEQ ID NO: 19300 - protein, 119 aa, Artificial Sequence
  Synthetic construct
QVQLVQSGAEVKKPGASVKVSCKASGYSFANYGLSWVRQAPGQGLEWMGWISPYNGNTNYAQKVQGRVTVTADTSTSTAYMELRSLRYDDTAVYYCAATYYYLGSLDVWGKGTTVTVSS

SEQ ID NO: 19301 - protein, 127 aa, Artificial Sequence
  Synthetic construct
QLQLQESGPGLVKPSETLSLTCSVSGGSISSNSYYWGWIRQPPGKGLEWIGSIFYSGSTFYNSSLKRRVTISLDTSENQFSLKLTSATAADTAVYYCAGQGRFFDSPYYYYYYMDVWGKGTTVTVSS

SEQ ID NO: 19302 - protein, 121 aa, Artificial Sequence
  Synthetic construct
QVQLVESGGGVVQPGRSLRLSCAASGFTFSSFAMHWVRQAPGKGLEWVAVISYDGINTYYADSVRGRFTISRDNSKNTLYVQMNRLRTEDTAVYYCARPYSGSYYSWFDPWGQGTLVTVSS

SEQ ID NO: 19303 - protein, 126 aa, Artificial Sequence
  Synthetic construct
QVQLVQSGAAVKRPGASVKVSCKASGYTFSSYGLSWVRQAPGQGLEWMGWINPYNGNTNYAQKFQGRVTMTTDTSTTTASMELRSLRSDDTAVYYCARALSLARGIIFTHYYMDVWGGGTTVTVSS

SEQ ID NO: 19304 - protein, 112 aa, Artificial Sequence
  Synthetic construct
QVQLQESGPGLVKPSETLSLSCSVSGGSISSYYWTWFRQPPGKGLEWIGYIYSSGSTNYNPSLKSRVTISVDTSKNQFSLKLNSVTAADTAVYYCARGFDYWGQGTLVTVSS

SEQ ID NO: 19305 - protein, 118 aa, Artificial Sequence
  Synthetic construct
QVQLQESGPGLVKPSGTLSLTCAVSGDSISSSNWWSWVRQPPGKGLEWIGEVYHSGNTNYNPSLNSRVTMSVDKSKNHFSLKLTSVTAADTAVYYCSRHILPPRFDPWGQGTLVTVSS

SEQ ID NO: 19306 - protein, 112 aa, Artificial Sequence
  Synthetic construct
QVQLQESGPGLVKPSETLSLTCTVSGGSINNYYWSWIRQPPGKGLEWIGYIHYSGSTNYNPSLESRVTISVDTSKNQLSLKLSSVTAADTAMYYCARGFDYWGQGTLVTVSS

SEQ ID NO: 19307 - protein, 124 aa, Artificial Sequence
  Synthetic construct
QVQLQQWGAGLLKPSETLSLTCAFYGGSFSGHYWNWIRQPPGKGLEWIGEINHSGSTNYNPSLKSRVTISVDTSKNQFSLRLSSVTAADTAVYYCARGRTVSTFFLHSYDMDVWGPGTTVTVSS

SEQ ID NO: 19308 - protein, 123 aa, Artificial Sequence
  Synthetic construct
QVQLVESGGGLVKPGGSLRLSCAASGLTFGDYYMSWIRQAPGKGLEWVSYISNSGNDVYYADSVKGRFTISRDNAKNSLYLQMNSLRVEDTAVYYCARDRGLTQLDENWFDPWGQGTLVTVSS

SEQ ID NO: 19309 - protein, 120 aa, Artificial Sequence
  Synthetic construct
QVQLVESGGGVVQPGRSLRLSCAASRFTFSSYAMHWVRQAPGKGLEWVAVISYDGYNKYYADSVKGRFTISRDNSKNTLYLQMNSLRTDDTAVFYCARARSGGYDAFDIWGQGTMVTVSS

SEQ ID NO: 19310 - protein, 121 aa, Artificial Sequence
  Synthetic construct
EVQLLESGGGLVQPGGSLRLSCAASGFTFSSSAMSWVRQAPGRGLEWVSSISGSGGGTYYADSVRGRFSISRDNSKDTLYLQMNSLRAEDTALYYCSRHTITVTGGALDVWGLGTTVTVSS

SEQ ID NO: 19311 - protein, 121 aa, Artificial Sequence
  Synthetic construct
QVQLVESGGGVVQPGRSLRLSCAASGFTFRSYAMHWVRQAPGQGLEWVAVISYDGIKKYYSESVKGRFTLSRDNSKNTLYLQMNSLRAEDTAVYYCARDYSGSYWGHFDYWGQGTLVTVSS

SEQ ID NO: 19312 - protein, 126 aa, Artificial Sequence
  Synthetic construct
EVQLVESGGGLVQPGGSLRLSCAASGFTFSSYWMHWVRQAPGKGLVWVSRINSDGSSTSYADSVKGRFTISRDNAKNTLYLQMNSLRAEDTAVYYCARDPRYYYDSSGVSPFFDLWGRGTLVTVSS

SEQ ID NO: 19313 - protein, 117 aa, Artificial Sequence
  Synthetic construct
EVHLVESGGGLIQPGGSLRLSCAASGITVSSNYMTWVRQAPGKGLDWVSVIYSGGSTFYADSVKGRFTISRDNSKNTLYLQMNSLRVEDTAVYYCARDLSYLGMDVWGQGTTVTVSS

SEQ ID NO: 19314 - protein, 121 aa, Artificial Sequence; identical to SEQ ID NO: 2116
  Synthetic construct

SEQ ID NO: 19315 - protein, 126 aa, Artificial Sequence
  Synthetic construct
QVQLQESGPGLVKPSQTLSLTCTVSGGSISSGAYYWSWIRQHPGKGLEWIGHIYYSGSTYFNPSLKSRVTISVDTSKNQFSLNLSSVTAADTAVYFCARLKYYYDSSGFYLYFDYWGQGTLVTVSS

SEQ ID NO: 19316 - protein, 124 aa, Artificial Sequence
  Synthetic construct
QITLKESGPALVKPTQTLTLTCTFSGFSVSSSGVGVGWIRQPPGKALEWLALIYWDDDKRYSPSLKSRLTITKDTSKNQVVLTMTNMDPVDTATYFCAHTGSVPVAMVGAFDIWGQGTMVTVSS

SEQ ID NO: 19317 - protein, 116 aa, Artificial Sequence
  Synthetic construct
QVQLVESGGGVVQPGRSLRLSCVASGITLKDYGMHWVRQAPGRGLEWVAFISYEGSVQHYGDSVKGRFTISRDDLKNTIFLEMNSLRADDTAVYYCAKGATKVDYWGQGTLVSVSS

SEQ ID NO: 19318 - protein, 121 aa, Artificial Sequence; identical to SEQ ID NO: 10464
  Synthetic construct

SEQ ID NO: 19319 - protein, 121 aa, Artificial Sequence
  Synthetic construct
EVQLVESGGGLVQPGKSLRLSCTASGFTFDDYAMHWVRQAPGKGLEWVSGIDWNSGVIDYADSVKGRFFISRDNAKNSLYLQMIRLKVEDTALYYCAKDIAATGPWYFDLWGRGTLVTVSS

SEQ ID NO: 19320 - protein, 120 aa, Artificial Sequence
  Synthetic construct
QVRLQESGPGLVKPSGTLSLTCAVSGDSINNDNWWSWVRQPPGKGLEWIGEIFHSRTTNYNPSLQSRVTISLDKSMNHFSLNLYSLTAADTAVYYCARGRGFGKYVMDVWGQGITVSVSS

SEQ ID NO: 19321 - protein, 129 aa, Artificial Sequence
  Synthetic construct
QVQLVESGGGVVQPGRSLRLSCAASGFTFSSYGMHWVRQAPGKGLEWVAVIWYDGSNQYYADSVKGRFTISRDNSKNTLFLQMSSLRAEDTAVYSCARTGGWGSSLSFPYYHYYGMDVWGQGTTVTVSS

SEQ ID NO: 19322 - protein, 124 aa, Artificial Sequence
  Synthetic construct
QISLKESGPTLVKPKQTLTLTCTFSGFPLSSSGVGVGWIRQPPGEALEWLALIYWDDDKRYSPSLKSRLTITKDTSKNQVVLTMTNMDPVDTATYYCAHTGSVPIGMVGAFDIWGPGTMVTVSS

SEQ ID NO: 19323 - protein, 124 aa, Artificial Sequence
  Synthetic construct
EVQLVESGGGLVQPGGSLRLSCAASGFTFSNYSMNWVREAPGKGLEWVSFIGSTGGTIYYADSVKGRFTISRDNAKNSLYLQMNSLRAEDTAVYYCARLRSAAMAWYYYHMDVWGKGTTVTVSS

SEQ ID NO: 19324 - protein, 124 aa, Artificial Sequence
  Synthetic construct
QVQLVESGGGVVQPGRSLRLSCAASGFTFSRYVMHWVRQAPGKGLEWMALTSYDGGNKYYADSVKGRFTISRDNSNNTLYLQMNSLRAEDTAVYYCARVSSAPLDTSLGWFDPWGQGTLVTVSS

SEQ ID NO: 19325 - protein, 119 aa, Artificial Sequence
  Synthetic construct
EVQLVQSGAEVKKPGESLTISCKGSGYTFTSNWITWVRQMPGKGLEWMGRIDPGDPYSNSSPSFQGHATLSLDKAINTAYLHWSSLKASDTAMYYCATVDLVRGGPDYWGQGTLVTVSS

SEQ ID NO: 19326 - protein, 124 aa, Artificial Sequence
  Synthetic construct
QVQLVESGGGVVQPGRSLRLSCAASGFTLIPYGMHWVRQAPGKGLEWVAVTSYDGSKKYYADSVKGRFTISRDNSKNTLFLQMNSLRADDTAVYYCAKDQGWSQDSGLDGLDVWGQGTTVTVSS

SEQ ID NO: 19327 - protein, 129 aa, Artificial Sequence
  Synthetic construct
EVQLVEFGGGLVQPGRSLRLSCVTSGFTFEDFDMHWVRQAPGKGLEWVSGSTWNSGTIGYADSVKGRFTTSRDNAKNSLYLQMINLRDEDTALYYCAKDIGRYDHLGTFGRVGGAFDIWGQGTVVTVSS

SEQ ID NO: 19328 - protein, 129 aa, Artificial Sequence
  Synthetic construct
QITLKESGPTLVKPTQTLTLTCTFSGFSLSTSGVGVGWIRQPPGKALEWLAVIYWDDDKRYSPSLKSRLTITKDTSKNQVVLTMTDMDPVDTATYYCAHRPRVVLWFGESYGPNWFDPWGQGTLVTVSS

SEQ ID NO: 19329 - protein, 120 aa, Artificial Sequence
  Synthetic construct
QVQLVESGGGVVQPGRSLRLSCAASGLTFRNYGMHWVRQAAGKGLEWVAVISYDGSHKYYADSVKGRFTISKDNSKNTLYLQMNSLRAEDTAVYYCAKDYYYNSSGVDVWGQGTTVIVSS

SEQ ID NO: 19330 - protein, 119 aa, Artificial Sequence
  Synthetic construct
EVQLVESGGGLVQPGGSLRLSCAASGFTFNIYWMTWVRQAPGKGLEWVANIKQDGSEKFYVDSVRGRFTISRDNTKNSLYLQMNSLRAEDTAMYYCARLHGNSWAMDVWGKGTTVTVSS

SEQ ID NO: 19331 - protein, 119 aa, Artificial Sequence
  Synthetic construct
EVQLVESGGGLVQPGGSLRLSCAASGFTFSGSVVHWVRQASGKGLEWVGRIRRKTDNYATLYAASVKGRFTISRDDSKNTVYLQMNSLKIEDTAVYYCTRLYYYTVGTWGQGTLVTVSS

SEQ ID NO: 19332 - protein, 123 aa, Artificial Sequence
  Synthetic construct
QVQLVQSGDEVKKPGASVKVSCKASGYTFNDHGISWVRQAPGQGFEWMGWISAYNGNTNYAQKFQGRVTITTDISTNTAYMELRSLRSDDTAIYYCGRLRGKLLLFYYYMDVWGKGTTVTVSS

SEQ ID NO: 19333 - protein, 122 aa, Artificial Sequence
  Synthetic construct
QVQLQESGPGLVKPSETLSLTCTVSGGSVSSDNYYWSWIRQPPGKGLEWIGYIYYSGNTNYNPSLKSRVTLSIDTSKNQFSLKLTSLTAADTAVFYCARGPLGTYYHYMDVWGKGTTVTVSS

SEQ ID NO: 19334 - protein, 126 aa, Artificial Sequence
  Synthetic construct
EVQLVQSGAEVKKPGESLKISCKGSGYAFTNYWIGWVRQMPGKGLEWMGIIYPDDSHTRYSPSFQGQVTMSADKSISTAYLQWSSLKASDTAMYYCARLQWRYCGSTSCPCGMDLWGQGTTVTVSS

SEQ ID NO: 19335 - protein, 120 aa, Artificial Sequence
  Synthetic construct
EVQLVESGGTLVQPGGSLRLSCAASGFTFSNYNMNWVRQAPGKGLEWVSYISSSSSTIFYADSVMGRFTISRDNAKNSLYLQLNSLRDEDTAVYYCARDDVVAALKFDFWGQGTLVTVSP

SEQ ID NO: 19336 - protein, 116 aa, Artificial Sequence
  Synthetic construct
EVQLVETGGGLIQPGGSLRLSCAASGIIVSRNYMSWVRQAPGKGLEWVSVIYSGGSRFYADSVKGRFTISRDNSQNTLYLQMNSLRAEDTAVYYCARDRGGPHDSWGQGTLVTVSS

SEQ ID NO: 19337 - protein, 119 aa, Artificial Sequence
  Synthetic construct
QITLKESGPTLVKPTQTLTLTCNFFGFSLSTSGVGVGWIRQPPGKALEWLALIYWDDDKRYSPSLKSRLIISKDTSKNQVVLTMTNMDPVDTAIYYCARLTTVTICDYWGQGTLVTVSS

SEQ ID NO: 19338 - protein, 115 aa, Artificial Sequence; identical to SEQ ID NO: 19224
  Synthetic construct

SEQ ID NO: 19339 - protein, 121 aa, Artificial Sequence
  Synthetic construct
QLQVQESGPGLAKPSETLSLTCTVSGGSISSSSYYWGWIRQPPGKGLEWIGSLYYTESPYYNPSLKSRVTISVDTSKNRLSLKLRSVTAADTALYYCAGYTTSSEGWFDPWGQGTLVTVSS

SEQ ID NO: 19340 - protein, 117 aa, Artificial Sequence
  Synthetic construct
EVQLVQSGAEVKKPGESLRISCKASGYTFTSNWITWVRQMPGKGLEWMGRIDPSDPYSNSSPSFQGHATISVDKSISTAYLQWSSLKASDTAMYYCARVMGGGPEFWGQGTLVTVSS

SEQ ID NO: 19341 - protein, 129 aa, Artificial Sequence; identical to SEQ ID NO: 10545
  Synthetic construct

SEQ ID NO: 19342 - protein, 122 aa, Artificial Sequence
  Synthetic construct
EVQLLESGGGLVQPGGSLRLSCSASGLTFITYAMSWVRQAPGKGLEWVAAISGSGGDAYYADSVKGRFTISRNNSKNTLYLQMNSLRAEDTAVYYCAKEALNIVVVTAPRFWGQGTLVAVSS

SEQ ID NO: 19343 - protein, 123 aa, Artificial Sequence
  Synthetic construct
QVQLVQSGAEVKKPGSTVKVSCKASGGTFKTYAISWVRQAPGQGLEWMGGIIPIFGTTNYAQKFQGRVTITADDSTSTAYMELNSLRSEDTAVYYCARHYYGSGSNYAFFDYWGQGSLLTVSS

SEQ ID NO: 19344 - protein, 129 aa, Artificial Sequence
  Synthetic construct
EVQLVEFGGGLVQPGRSLRLSCATSGFSFEDFAMHWVRQAPGKGLEWVSGSTWNSGTIGYADSVKGRFITIRDNAKNSLYLQMNNLRDEDTALYYCAKDIGRYDHYHTFGRVGGAFDIWGQGTMVTVSS

SEQ ID NO: 19345 - protein, 122 aa, Artificial Sequence
  Synthetic construct
QVQLVQSGAEVKKPGASVKISCKASGYTFSNYYIHWVRQAPGQGLEWMGIINPPVGSTSYAQKLQGRVTMSSDMSTSTVYMDLSSLRSEDTAVYYCARGCHDSSAYYCSDYWGQGTLVAVSS

SEQ ID NO: 19346 - protein, 125 aa, Artificial Sequence
  Synthetic construct
QVHLVQSGAEVKKPGASVRVSCKAFGYTFTDFFIHWVRQAPGQGLEWMGWINPKPGGTNYAQKFQGRVTMTRDTSFTTAYLELRTLTSDDTAMYFCARVRVSPYYDHSLYGMDVWGQGTTVTVSS

SEQ ID NO: 19347 - protein, 112 aa, Artificial Sequence
  Synthetic construct
QVQLLESGPGLVQPSETLSLTCAVSGGSISSYYWSWIRQPPGKGLEWIGYIYYSGSTNYNPSLKSRVTISVDTSKNLLSLKLRSVTAADTAVYYCARGFDYWGQGTLVTVSS

SEQ ID NO: 19348 - protein, 121 aa, Artificial Sequence
  Synthetic construct
QGQLVQSGSELKEPGASVKVSCKASGYILTSHGLNWVRQARGQGLEWLGWINTYSGNPTYAQGFTGRFVFSLDTSVSTAYLQISSLKAEDTAVYYCARDLRSRGSYYMDVWGNGTTVTVSS

SEQ ID NO: 19349 - protein, 117 aa, Artificial Sequence
  Synthetic construct
QVQLVESGGGVVQPGRSLRLSCAASGFTFSSYAMHWVRQAPGKGLEWAALISYDGSKKYYADSVKGRFTISRDNSKNTLYLQMNSLRAEDTALYYCARDQGGYMGVWGKGTSVTVSS

SEQ ID NO: 19350 - protein, 130 aa, Artificial Sequence
  Synthetic construct
QVQLQESGPGLVKPSGTLSLTCTVSGGSISNYFWSWVRQSPGKGLEWIGYIYFTGNTNYNPSLKGRVTISLDTSKNQFSLELNSVTAADTAVYYCARAPRTSMLRGIIVTALEPLRFDYWGQGTLVTVSS

SEQ ID NO: 19351 - protein, 122 aa, Artificial Sequence
  Synthetic construct
QITLKESGPTLVKPTQTLTVTCTFSGFSLSTRGVGVGWIRQPPGKALEWLALIYWDDEKRYSPSLKSRLTVTRDTSKNQVVLTMTNTDPVDTATYYCSHMNMVRGVMYFDYWGQGILVTVSS

SEQ ID NO: 19352 - protein, 124 aa, Artificial Sequence
  Synthetic construct
QVHLVQSGSELKKPGASVKVFCKASGYTFTNYAMNWVRQAPGQGLEWMGWINTYTGNPTYAQDFTGRFVFSLDTSVRTAYLQISSLKAEDTAVYYCARGGTNAYSSSWYYIEVWGQGTLVTVSS

SEQ ID NO: 19353 - protein, 127 aa, Artificial Sequence
  Synthetic construct
QVQLVQSGAEVKKPGSSVRVSCKASGGTFSNYTITWVRQAPGQGLEWMGGIIPIFGTTNFAQKFQGRVTFTADEYTSTAYMELSSLRSEDTAVYYCARDRGYFASGSEYYYSYMDVWGKGTTVTVSS

SEQ ID NO: 19354 - protein, 124 aa, Artificial Sequence
  Synthetic construct
EVQLVESGGGLVQPGGSLRLSCAASGFTFSKYDMHWVRQVAGKGLEWVSAVGTTGDTYNSGSVKGRFTISRENAKNSLYLQMNSLRAGDTAVYYCVRGTQDQLDNYFYYYMDVWGKGTTVTVSS

SEQ ID NO: 19355 - protein, 120 aa, Artificial Sequence
  Synthetic construct
QVQLVESGGGVVQPGRSLRLSCAASGFIFSDYAMHCVRQAPGKGLEWVAALSFDGSNTFYANSVKGRFTISRDNSKNTLFMQMNSLLTEDTAVYYCVRSRGGRTDTFDIWGQGTMVTVSS

SEQ ID NO: 19356 - protein, 120 aa, Artificial Sequence
  Synthetic construct
EVQLVESGGGLVQPGGSLRLSCAASGFTFNTYNMNWVRQAPGKGLEWISYISGSSRTIHYADSVKGRFTISRDNAKNSLYLQMNSLRDEDTAVYYCVRDDVVGAFKFDYWGQGTLVTVSS

SEQ ID NO: 19357 - protein, 132 aa, Artificial Sequence
  Synthetic construct
QVQLQESGPGLVKPSETLSLTCTVSGGSISSSSYYWGWIRQPPGKGLEWIGSIYYSGNTFYNPSLKSRVIISVDTSRNQFSLKLSSVTATDTAVYYCARDPPALCSSPTCYMYYHNYGMDVWGQGTTVTVSS

SEQ ID NO: 19358 - protein, 127 aa, Artificial Sequence
  Synthetic construct
QVQLVESGGGVVQPGRSLRLSCAASGFTFSSYGMHWVRQAPGKGLEWVAVIWDDGNNKYYADSVKGRFTISRDNSKNTLYLQMNSLRAEDTAVYYCARDLGQLAGGYYYYYYGMDVWGQGTTVTVSS

SEQ ID NO: 19359 - protein, 122 aa, Artificial Sequence
  Synthetic construct
QVQLVESGGGVVQPGRSLRLSCAASGFTFSTYGMHWVRQAPGKGLEWVALISYDGSNKYYADSVKGRFTISRDNSKNTVFLQMNSLRTEDTAMYYCAKDLGFGYDGGDFQHWGQGTLVTVSS

SEQ ID NO: 19360 - protein, 126 aa, Artificial Sequence
  Synthetic construct
QVQLVQSGSELKKPGASVKLSCKASGYTFSSYAMNWVRQAPGQGLEWMGWINTNTGNSTYAQGFTGRFVFSLDTSVSTAYLQISSLKAEDTAVYFCARDFDEIAAAEYYYYYMDVWGKGTTVTVSS

SEQ ID NO: 19361 - protein, 129 aa, Artificial Sequence
  Synthetic construct
QVQLVQSGSELKKPGASVKVACKASGYTFTSYGMNWVRQAPGQGLEWMGRINTNTGNPAYAQGFTGRFVFSLDTSVSTAYLQISSLKAEDTAVYYCARAERDIVVVAGAIDYFYYMDVWGRGTTVTVSS

SEQ ID NO: 19362 - protein, 116 aa, Artificial Sequence
  Synthetic construct
DVQLVESGGGLVQPGGSLRLSCAASGLIFRNYAMSWVRQAPGKGLEWVSGISGVGQTTYYADYVKGRFAISRDNSKSTLYLHMNSLKGEDTAVYYCVKGVTPLRDWGQGTLVTVSS

SEQ ID NO: 19363 - protein, 122 aa, Artificial Sequence
  Synthetic construct
QVQLVESGGGVVQPGRSLRLSCAASGFTFSSYGMHWVRQAPGKGLEWVAVIWYDGSDKYYADSVKGRFTISRDNSKNTLFLQMNSLRAEDTAVYYCARDGDFSSSEPPFDYWGQGALVTVSS

SEQ ID NO: 19364 - protein, 128 aa, Artificial Sequence
  Synthetic construct
QVQLVQSGAEVKKPGSSVKVSCKASGGTFSSYGISWVRQAPGQGLEWMGGLIPIFGTANYAQKFQGRVTITADESTSTAYMELNSLRSDHTAVYYCASLGGDYYTSGTYSNSSGFDPWGQGTLVTVSS

SEQ ID NO: 19365 - protein, 131 aa, Artificial Sequence
  Synthetic construct
QVQLVQSGAEVKKPGASVKVSCKASGYTFTSYYMHWVRQAPGQGLEWMGIINPSGGSTSYAQKFQGRVTMTRDTSTSTVYMELSSLRSEDTAVYYCARDPPSYYDILTGYPLTPTYYFDYWGQGTLVTVSS

SEQ ID NO: 19366 - protein, 131 aa, Artificial Sequence
  Synthetic construct
EVQLVESGGGLVQPGRSLRLSCAASGFTFDDYGMHWVRQAPGKGLEWVSGISWNSASMGYGDSVKGRFTISRDNAKNSLYLQMNSLRAEDTALYYCAKVVGGYCSGGRCYGGQWDDAFDMWGQGTMVTVSS

SEQ ID NO: 19367 - protein, 123 aa, Artificial Sequence
  Synthetic construct
QVQLVESGGGVVQPGRSLRLSCAASGFTFSSYGMHWVRQAPGKGLEWVAVIWYDGSNKYYADSVKGRCTISRDNSKNTLYLQMNSLRAEDTAVYYCARDGDALVVVAARLDYWGQGTLVTVSS

SEQ ID NO: 19368 - protein, 122 aa, Artificial Sequence
  Synthetic construct
QLQLQESGPGLVKPSETLSLTCTVSGGSISVSIYYWGWIRQPPGKGLEWIGSIYYSGSTHYNPSLKSRVTISVDTSKNQFSLKLSSVTAADTAVYYCARRGYDSGGYALGYWGQGTLVTVSS

SEQ ID NO: 19369 - protein, 121 aa, Artificial Sequence
  Synthetic construct
QVQLVQSGAEVKKPGSSVKVSCKASGGTFSSYTINWVRQAPGQGFEWMGRIIPFLDTATYAQNFQGRVTFTADKSTSTVYMELSSLRSEDTAVYYCARAIVGPTPNWFDPWGQGTLVTVSS

SEQ ID NO: 19370 - protein, 122 aa, Artificial Sequence
  Synthetic construct
QVQLVQSGAEVKKPGASVKVSCKASGDTFTTYYLHWVRQAPGQGLEWMGIINPSGGSTSYAQKFQGRVTMTRDTSTSTVYMELSSLRSEDTAVYYCARGGIVPAAMDAFDIWGQGTMVTVSS

SEQ ID NO: 19371 - protein, 123 aa, Artificial Sequence
  Synthetic construct
QVQLVESGGGAVQPGRSLRLSCAASGFTFSTYGMHWVRQAPGKGLEWAAVIWHDESNKHYADSVKGRFTISRDNSKNTLYLQMNSLRADDTAVYYCAREGIAVSGTGTALDYWGQGTLVTVSS

SEQ ID NO: 19372 - protein, 123 aa, Artificial Sequence
  Synthetic construct
QVQLVQSGAEVKKPGASVKVSCKASGYTFTSYGINWVRQAPGQGLEWMGWISAYNGNTKFGQNLQGRFTMTTDTSTSTGYMELRSLRFDDTAVYFCARGSRIAAAGYNWFDPWGQGTLVTVSS

SEQ ID NO: 19373 - protein, 122 aa, Artificial Sequence
  Synthetic construct
QVQLVQSGAEVKKPGSSVKVSCKASGGTFSSYAISWVRQAPGQGLEWMGGIIPIFDTANYAQKFQGRVTITADESTSTAYMELSSLRSEDTAVYYCERLDSYDSSGYYFDYWGQGTLITVSS

SEQ ID NO: 19374 - protein, 122 aa, Artificial Sequence
  Synthetic construct
QVQLVQSGAEVKKPGASVKVSCRASGDTFISHYMHWVRQAPGQGLEWMGIINPEAGSTTYTQKLQGRVTMTRDTSTRTVYMELSSLRSEDTAVYFCARDLYYVPHRGAFDIWGQGTMVTVSS

SEQ ID NO: 19375 - protein, 121 aa, Artificial Sequence
  Synthetic construct
QVELVESGGGVVQPGRSLRLSCAASGFTFNSYAIYWVRQAPGKGLEWVAIISYDGSNKYYADSVRGRFTISRDNSKNTLYLQMNSLRVEDTAVYSCARTDSGSYYGAFDIWGQGTMVTVSS

SEQ ID NO: 19376 - protein, 121 aa, Artificial Sequence
  Synthetic construct
QVQLVESGGGVVQPGRSLRLSCAASGFTFSNYGIHWVRQAPGKGLEWVAVIWFDGTKKYYADSVKGRFSISRDNSKNTLYLQMNSLRAEDTAVYYCARDGAVGDNTGLDCWGQGTLVTVSS

SEQ ID NO: 19377 - protein, 125 aa, Artificial Sequence
  Synthetic construct
QVQLVQSGSELKKPGASVKVSCKASGYTFTSNAMNWVRQAPGQGLEWMGWINTNTGNPTYAQGFTGRFVFSLDTSVSTAYLQISSLKAEDTAVYFCARDGAPAYPSFTYYYMDVWGKGTTVTVSS

SEQ ID NO: 19378 - protein, 121 aa, Artificial Sequence
  Synthetic construct
QVQLVESGGGVVQPGRSLRLSCAASGFTFSSFGMHWVRQAPGKGLEWVAVIWYDGSNKYYADSVKGRFTISRDNSKNTVHLQMSSLRAEDTAVYYCARDGRVGEISGIDFWGQGTLVTVSS

SEQ ID NO: 19379 - protein, 123 aa, Artificial Sequence
  Synthetic construct
QVQLVQSGAEVKKPGASVRVSCKFSGYTLTELSIHWVRQAPGKGLEWMGGFDPEDGETIYAQKFQGRVTMTEDTSTDTAYMELSSLTSEDTAVYYCATEPIPLSNTEPYFDHWGQGTLVIVSS

SEQ ID NO: 19380 - protein, 120 aa, Artificial Sequence
  Synthetic construct
QITLKESGPTLVTPTQTLTLTCSFSGFSLDTIGVAVAWIRQPPGKALEWLGIVFWDFDKRYSPPLSSRLTVTKDTSKNHVVLRLTNMDPADTATYYCARLLIEHDAFDIWGQGATVSVSS

SEQ ID NO: 19381 - protein, 120 aa, Artificial Sequence
  Synthetic construct
QVQLVQSGPEVKKPGSSVKVSCKASGGTFSSYAISWVRQAPGQGLQWMGGIIPIFGTANYAQKFQGRVTITADESTSTAYMDMSSLRSEDTAFYYCARVLGWDGVPGEDWGQGSLVTVSS

SEQ ID NO: 19382 - protein, 125 aa, Artificial Sequence
  Synthetic construct
QLQLQESGPGLVKPSETLSLTCTVSGGSISSSSYYWGWIRQPPGKGLEWIGNIYYSGRTYFNPSLRSRVTISVDTSTNQFSLKLSSVTAADTAVYYCARHPLAAYYYGSGSLDYWGQGTLVTVSS

SEQ ID NO: 19383 - protein, 115 aa, Artificial Sequence
  Synthetic construct
QVQLVQSGAEVKKPGASVKVSCKASGYTFTSYGISWVRQAPGQGLEWMGWISAYNGNTNYAQKLQGRVTMTTDTSTSTAYMELRSLRSDDTAVYYCATANWGDYWGQGTLVTVSS

SEQ ID NO: 19384 - protein, 127 aa, Artificial Sequence
  Synthetic construct
QVQLQESGPGLVKPSETLSLTCTVSGGSISSYYWSWIRQPPGKGLEWIGYIYYSGSTNYNPSLKSRVTISVDTSKNQLSLKLSSVTAADTAVFYCARFPPDTSGNFPHAFYYYMDVWGKGTTVTVSS

SEQ ID NO: 19385 - protein, 118 aa, Artificial Sequence
  Synthetic construct
EVQLVESGGGLVQPGGSLRLSCAASGFPFNSYDMHWVRQTTGKGLEWVSTIDTAGDTYYPGSVKGRFTISRENAKNSLYLQMDSLRAGDTAVYSCARSPGATPYMDVWGKGTTVTVSS

SEQ ID NO: 19386 - protein, 121 aa, Artificial Sequence
  Synthetic construct
QVQLQESGPGLVKPSQTLSLTCTVSGDSISSGGHYWTWIRQHPGKGLEWIGYIYYSGSTYYKPSLKSRVSISVDTSRNQFSLKLSSVTAADTGIYYCARVADVINWHFDLWGRGILVTVSS

SEQ ID NO: 19387 - protein, 129 aa, Artificial Sequence; identical to SEQ ID NO: 10545
  Synthetic construct

SEQ ID NO: 19388 - protein, 121 aa, Artificial Sequence
  Synthetic construct
QVQLVESGGGVVQPGRSLRLSCAASGFTFSTYAMHWVRQAPGKGLEWVAVISYDGSNKYLADSVKGRFTVSRDNSKNTLYLQLNSLRADDTAVFYCARDYSGTYWGYFDYWGQGTLVTVSS

SEQ ID NO: 19389 - protein, 115 aa, Artificial Sequence
  Synthetic construct
EVQLVESGGGLVQPGGSLRLSCAASGFTFISNDMSWVRQAPGKGLEWVSTISISAKSTYYAGSVKGRFTISRDDSKNTLYLQMNRLRADDTAVYYCAKGGWLEYWGQGTLVTVSS

SEQ ID NO: 19390 - protein, 121 aa, Artificial Sequence
  Synthetic construct
EVQLLESGGGLVQPGGSLRLSCAASGFTFSNYAMSWVRQAPGKGLECVSVIGGSGGNTYYADSVKGRFTISRDSSKNTLYLQMNSLRAEDTAVYYCAKLSPTTAEDYFDYWGQGTLVTVSS

SEQ ID NO: 19391 - protein, 121 aa, Artificial Sequence
  Synthetic construct
QVQLVESGGGVVQPGRSLRLSCAASGFTFSSYAMHWVRQAPGKGLEWVAVISYDGSNKYYADSVKGRFTISRDNSKNTLYLQMNSLRAEDTAVYYCARGLYGDYRTVFDYWGQGTLVTVSS

SEQ ID NO: 19392 - protein, 123 aa, Artificial Sequence
  Synthetic construct
EVQLVQSGAEVKNPGESLKISCRASGYSFTNYWIAWVRQIPGKGLEWMGIFYPGDSDTRYNPSFQGQVTLSADTSINTAYLQWSSLKASDSAIYYCARIDGTVVGKGDAFDMWGQGTLVTVSS

SEQ ID NO: 19393 - protein, 122 aa, Artificial Sequence
  Synthetic construct
EVQLVESGGALVQPGGSLRLSCAASGFSFSSYWMSWVRQAPGKGLEWVANIKRDGIEKDYVDSVKGRFTISRDNAKNSLYLQMNSLRVEDTAVYYCARGDTSGWLPHILDIWGQGTMVSVSL

SEQ ID NO: 19394 - protein, 129 aa, Artificial Sequence
  Synthetic construct
EVQLLESGGGLVQPGGSLRLSCAASGFTFSSYAMSWVRQAPGKGLEWVSAISGGGGGTYYADSVKGRLTISRDNSKNTLYLQMNSLRVEDTAVYYCATPRATYYYASGSYYYGGPFDYWGQGTLVTVSS

SEQ ID NO: 19395 - protein, 123 aa, Artificial Sequence
  Synthetic construct
QVQLVQSGAEVKKPGSSVKVSCKASGGTFSSYAITWVRQAPGQGLEWMGGIIPIFGTANYAQKFQGRLTITADESTSTDYMELSSLRSEDTAVYYCARLEYQLLPDYSYMDVWGKGTAVTVSS

SEQ ID NO: 19396 - protein, 121 aa, Artificial Sequence
  Synthetic construct
QVQLVESGGGVVQPGRSLRLSCAASGFSFGSYGMHWVRQAPGKGLEWVALIWFDGNNEYYADSVKGRFTISRDNSKNMMYLQMHSLRADDTAVYYCAREGRFGELSSLDYWGQGTLVTVSS

SEQ ID NO: 19397 - protein, 125 aa, Artificial Sequence
  Synthetic construct
QVQLVQSGAELKKPGASVRVSCESSGYTFTSYPINWVRQAPGQGLEWMGWINTNTGNPTYARGFTGRFVFSLDTSVSTAYLQISSLKAEDTAVYYCARETLIVSTTGHYQNMDVWGKGTTVTVSS

SEQ ID NO: 19398 - protein, 125 aa, Artificial Sequence
  Synthetic construct
QITLKESGPTLVKPTQTLTLTCTFSGFSLSTSGVGVGWIRQPPGKALEWLALIYWDDDKLYSPSLKSRLTITKDTSKNQVVLTMTNMDPVDTATFYCAHTYYDILSAYNYAFDYWGQGTLVTVSS

SEQ ID NO: 19399 - protein, 129 aa, Artificial Sequence
  Synthetic construct
EVQLVESGGGLVQPGGSLRLSCAASGFSISTYSMNWVRQAPGKGLEWVSHIRGSSGNLYYVDSVKGRFTISRDNAKNSLYLQMNSLRAEDTAVYYCARDIADSKYSSGWYHYYYYMDVWGKGTTVTVSS

SEQ ID NO: 19400 - protein, 123 aa, Artificial Sequence
  Synthetic construct
QVQLQESGPRLVKPSGTLSLNCAVSGGSVNTDHWWSWVRQSPEKGLEFIGEIYRSGSTNYSPSLKSRVAMSLDKSRNQFSLRLTSVTAADTAVYYCAKIDLYTTSGHNYFDTWGPGIQVTVSS

SEQ ID NO: 19401 - protein, 123 aa, Artificial Sequence
  Synthetic construct
QVQLVESGGGVVQSGRSLRLSCAASGFTFSSHGMHWVRQAPGKGLEWVAVIWYDGTKKYYTDSVKGRFTISRDNSKNTLYLQMNSLRAEDTAVYYCATEPLTGWNDGYGMDVWGQGTTVTVSS

SEQ ID NO: 19402 - protein, 129 aa, Artificial Sequence
  Synthetic construct
QVQLQESGPGLVRPSQTLSLTCTVSGDSISSGSYYWSWIRQPAGGGLEWIGRIFTSGGSNYSPSLKSRVTISVDTSKNQFSLKLTSVTAADTAVYYCARMQGYCSGGGCYSGYYGMDVWGQGTTVTVSS

SEQ ID NO: 19403 - protein, 121 aa, Artificial Sequence
  Synthetic construct
QITLKESGPTLVKPTQTLTLTCSFSGFSLSTNGVGVGWFRQPPGKALEWLALIYWDDDKRYSPSLKSRLSLTKDTSKNQVVLTMTSMDPVDTATYYCAHGITGTTIYFHNWGQGTLVTVSS

SEQ ID NO: 19404 - protein, 126 aa, Artificial Sequence
  Synthetic construct
QVQLVQSGSELQKPGASVKVSCKASGYTFTTYAINWVRQAPGQGLEWMGWINTNTGNPTYAQGFTGRFVFSLDTSVNTAYLQISSLKAEDTAVYYCARDFDTMFRGGYYYYYMDVWGKGTTVTVSS

SEQ ID NO: 19405 - protein, 118 aa, Artificial Sequence
  Synthetic construct
EVQLVESGGGLIQPGGSLRLSCAASGFIVSRNYMNWVRQAPGKGLEWVSIIYSGGSTYYADSVKGRFTISRDDSKNTLYLQMNSLRAEDSAVYSCARDRSSTGVFDIWGQGTMVTVSS

SEQ ID NO: 19406 - protein, 132 aa, Artificial Sequence
  Synthetic construct
QGQLVQSGAEVKKPGAAVKVSCKASGYSFTSYGISWVRQAPGQGLEWMGWISAYNGNTNYAQKLQGRVTMTADTSTSTAYMELRSLRSDDTAVYYCARDGGLTEVVPAAMFGVNYYYYMDVWGKGTTVTVSS

SEQ ID NO: 19407 - protein, 127 aa, Artificial Sequence
  Synthetic construct
QIQLQQSGPGLVKASQTLSVTCAISGDSVSSSSAAWNWIRQSPSGGLEWLGRAFYRSRWYNEYAVSVKSRVNIKPDTSKNQVSLQLNSVTAEDTAVYYCARGYDDSRDSLYHGMDVWGQGTTVIVSS

SEQ ID NO: 19408 - protein, 121 aa, Artificial Sequence
  Synthetic construct
QITLKESGPTVVKPTQTLTLTCTFSGFSLSTSGVGVGWIRQPPGKALEWLALIYWDDDKRYSPSLKSRLTISKVTSKNQVVLTMTNMDPVDTATYYCAHQNFYYYYYMDVWGKGTTVTVSS

SEQ ID NO: 19409 - protein, 122 aa, Artificial Sequence
  Synthetic construct
QVQLQESGPGLVKPSETLSLTCTVSGYSISSGYYWGWIRQPPGKGLEWIGSIYHSGSTYYNPSLKSRVTISVDTSKNQFSLKLSSVTAADTAVYYCARDFVLLWFEGSHDYWGQGTLVTVSS

SEQ ID NO: 19410 - protein, 127 aa, Artificial Sequence; identical to SEQ ID NO: 10273
  Synthetic construct

SEQ ID NO: 19411 - protein, 125 aa, Artificial Sequence
  Synthetic construct
EVQLVESGGALVQPGESLRLSCSASGFTFSTYSYHWVRQAPGKGLEFVSAINDNGGSTLYADSVKGRFTISRDNSKNTLYLQMRSLRAEDTAVYYCVKDGCSTSSCYSPGNFHHWGRGTLVTVSS

SEQ ID NO: 19412 - protein, 122 aa, Artificial Sequence
  Synthetic construct
EMQLVESGGVVVQPGGSLRLSCAASGFTFDDYAMHWVRQTPGKGLEWVSLISWDGDDTYYADSVRGRFTTSRDNSKNSLYLQMNSLRAEDTAWYYCVKDRNPYDILSGLDYWGQGTLVTVSS

SEQ ID NO: 19413 - protein, 131 aa, Artificial Sequence; identical to SEQ ID NO: 10066
  Synthetic construct

SEQ ID NO: 19414 - protein, 116 aa, Artificial Sequence
  Synthetic construct
QVQLVESGGGVVQPGRSLRLSCAASGLTLNDYGMHWVRQAPGRGLEWVAFISYDGSVQHYVDSVKGRFTVSRDDFKNTLFLQMTSLRVDDTAVYYCAKGATKMDYWGQGTLVTVSS

SEQ ID NO: 19415 - protein, 127 aa, Artificial Sequence
  Synthetic construct
QVQLVQSGAEVKKPGASVKVSCKASGYSFISYYMNWVRQAPGQGLEWMGIINPSGGSTNYAQKLQGRVTMTRDTSTSTFYMDLSSLRSEDTAVYYCARMGGEHYDNSGYPADAFDIWGQGTMVTVSS

SEQ ID NO: 19416 - protein, 127 aa, Artificial Sequence
  Synthetic construct
EVQLVESGGGLVQPGGSLRLSCAASGFTFSSYWMTWVRQAPGKGLEWVASIKQDGSETYYVDSVKGRFTISRDNAKNSLYLQMNSLRAEDTAVYFCARERLGPYQGNYYYYYFMDVWGKGTTVTVSS

SEQ ID NO: 19417 - protein, 124 aa, Artificial Sequence
  Synthetic construct
QITLKESGPTLVKPTQTLTLTCTFSGFSLSTGGVSVAWIRQPPGKALEWLALIYWDDDKRYSPSLKSRLTITKDTSKNQVVLTMTNMDPMDTATYFCAHSDYDIQNLPVFFDCWGQGTLVTVSS

SEQ ID NO: 19418 - protein, 121 aa, Artificial Sequence
  Synthetic construct
QVQLVESGGGVVQPGRSLRLSCAASGFTFSTYAMHWVRQAPGKGLEWVAVISYDGTNKYYGYSVKGRFTISRDNSKNTLYLQMNSLRADDTAVYYCARAYGGGYWGAFDVWGQGTIVTVSS

SEQ ID NO: 19419 - protein, 121 aa, Artificial Sequence
  Synthetic construct
QVQLVESGGGVVQPGRSLRLSCAASGFTFSSYGMHWVRQAPGKGLEWVAVIWYDGGNKYYADSVKGRFTISRDNSKNTLYLQMSSLRAEDTAVYYCARGQGATLRYGMDVWGQGTTVTVSS

SEQ ID NO: 19420 - protein, 127 aa, Artificial Sequence
  Synthetic construct
EVQLVESGGGLVQPGGSLRLSCAASGFTSSSYWMSWVRQAPGKGLEWVANIKQDGSEKYYVDSVKGRFTISRDNAKNSLYLQMNSLRAEDTAVYYCARGGLSYYDSSGYYISAFDIWGQGTMVTVSS

SEQ ID NO: 19421 - protein, 125 aa, Artificial Sequence; identical to SEQ ID NO: 18788
  Synthetic construct

SEQ ID NO: 19422 - protein, 119 aa, Artificial Sequence
  Synthetic construct
QITLKESGPTLVTPTQTLTLTCSFSGFSLSTSGVGVGWIRQPPGKALEWLALIYWDDTKRYSPSLKSRLTITKDTSKNQVVLTMTNMDPVDTATYYCAHVGVATTFAFWGQGTLVTVSS

SEQ ID NO: 19423 - protein, 126 aa, Artificial Sequence
  Synthetic construct
EVQLVESGGGLVKPGGSLRLSCAASGFTFTNAWMIWVRQAPGKGLEWIGRIKSRKDGGTADYSTPLRGRFTILRDDLKDTLYLLMNSLKTEDTAVYYCATDTGPLQDQYYYYMDVWGKGTTVTVSS

SEQ ID NO: 19424 - protein, 120 aa, Artificial Sequence
  Synthetic construct
EVQLVESGGALVKPGGSLTLSCAVSGFTFADAWMIWVRQAPGKGLEWVGRIQREVDAGTTDYTAPVKGRFTITRDDSKNTLYVQMNSLKIEDTAVYYCASQGGAGEAHHWGQGTLVIVSS

SEQ ID NO: 19425 - protein, 119 aa, Artificial Sequence
  Synthetic construct
QVQLVQSGAEVKEPGASVKVSCKVSGYTLIELPMHWVRQAPGKGLEWMGGFDPEAAETIYAQKFQGRITMTEDTSTDTAYMELNSLRSEDTAVYYCATVTVMIQVFADWGQGTLVTVSS

SEQ ID NO: 19426 - protein, 119 aa, Artificial Sequence
  Synthetic construct
QLHLQESGPGLVKPSETLSLTCTVSGGSVSTSGHFWAWIRQPPGKGLEWIGSVDYSGRTYHNPSLKSRVTISVDTSKNQFSLKLSSVTAADTAVYYCAKDIGDYQTDSWGQGTLVTVSS

SEQ ID NO: 19427 - protein, 130 aa, Artificial Sequence
  Synthetic construct
EVQLVQSGAEVKKPGESLKISCKGSGYSFTSYWIGWVRQMPGKGLEWMGIIYPGDSNTTYSPSFQGQVTISADKSISTAYLQWSSLKASETAIYYCARHGFGGYSDYDYWVSAGNGMDVWGQGTTVTVSS

SEQ ID NO: 19428 - protein, 122 aa, Artificial Sequence
  Synthetic construct
EAQLVESGGGLVQPGGSLRLSCVASGISLDDYGMHWVRQAPGKGLEWVSGINWNSRSTVYADSVKGRFTISRDNAKKSLFLQMTSLRAEDTALYYCAKDLRGYYESCAADIWGQGAMVIVSS

SEQ ID NO: 19429 - protein, 125 aa, Artificial Sequence
  Synthetic construct
QVQLVQSGAEVKKPGASVKVSCKASGYTFTNYAMHWVRQAPGQRLEWMGWINAGNGHTKYSQKFQDRVTITRDTTASTAYMELSGLRSEDTAVYYCARDQQQLVWLGEGNWFDPWGQGTLVTVSS

SEQ ID NO: 19430 - protein, 93 aa, Artificial Sequence
  Synthetic construct
GDDYGMSWVRQAPGKGLEWVSGINFNSGSTTYADSVKGRFTISRDNAKNSLYLQMHSLRAEDTALYYCARALRGYFYYGMDVWGQGTTVTVSS

SEQ ID NO: 19431 - protein, 131 aa, Artificial Sequence; identical to SEQ ID NO: 10066
  Synthetic construct

SEQ ID NO: 19432 - protein, 126 aa, Artificial Sequence
  Synthetic construct
QVQLVESGGGVVQPGKSLRLSCAPSGFTFSNYGMHWVRQAPGKGLEWVAVISNDGKNKNYADSVKGRFTISRDSSQNTLYLQMNSLRAEDTAVYYCARDSLEWFFVHHYYYGMDVWGQGTTVTVSP

SEQ ID NO: 19433 - protein, 129 aa, Artificial Sequence
  Synthetic construct
EVQLVEFGGGLVQPGRSLRLSCATSGFTFEDFDMHWVRQAPGKGLEWVSGSTWNSGTIGYVDSVKGRFTTSRDNAKNSLFLQMNNLRDEDTALYYCAKDIGRYDHYYIFGRVGGAFDIWGQGTMVTVSS

SEQ ID NO: 19434 - protein, 123 aa, Artificial Sequence
  Synthetic construct
QVQLVQSGAEVKKPGSSVKVSCKASGGTFSSYTISWVRQAPGQGLEWMGRIIPILGIANYAQKLQGRLTITADKTTSTAYMELNSLRSEDTAVYYCATGLWFGDSETHWFDPWGQGTPVTVSS

SEQ ID NO: 19435 - protein, 124 aa, Artificial Sequence
  Synthetic construct
QITLKESGPTLVKPTQTLTLTCTFSGFSLSTSGVGVGWIRQPPGKALEWLTLIYWDDDKRYSPSLKSRLTITKDTSKNQVVLTMTNMDPVDTATYYCAHRLRATSSGYGWFDPWGQGTLVTVSS

SEQ ID NO: 19436 - protein, 121 aa, Artificial Sequence
  Synthetic construct
QITLKESGPTLVKPTQTLTLTCTFSGFSLSTSGVGVGWIRQPPGKALEWLALIYWDDDKRYSPSLKSRLTITKDTSKNQVVLTMTNMDPVDTATYYCSSQRLYYYYGMDVWGQGTTVTVSS

SEQ ID NO: 19437 - protein, 125 aa, Artificial Sequence
  Synthetic construct
QLQLQESGPGLVKPSETLSLTCTVSGASISSSNPYWGWIRQPPGKGLEWIGSIYYSGNTFYNPSLKSRVTISVDTSKNQFSLKLNSVTAADTAVYFCASPSYCSGGRCYRQFDYWGQGTLVTVSS

SEQ ID NO: 19438 - protein, 119 aa, Artificial Sequence
  Synthetic construct
QVHLVESGGGLVKPGGSLRLSCVASGFSFSDYYMNWIRQSPGKGLEWLSYLSGHSSYASHADSVKGRFAVSRDNAKNSLYLQMNSLTVDDTAIYYCARQLEVAGTIDLWGQGTLVTVSS

SEQ ID NO: 19439 - protein, 130 aa, Artificial Sequence
  Synthetic construct
EVQLVESGGGLVQPGGSLRLSCAASGFIFSDHYMGWVRQAPGKGLEWVGRVGNKANTYTTEYAASVKGRFTISRDDSKNLLHLQMDSLKSEDTAVYYCARLLGSSSGGYWASYYYYMDVWGKGTTVIVSS

SEQ ID NO: 19440 - protein, 120 aa, Artificial Sequence; identical to SEQ ID NO: 19162
  Synthetic construct

SEQ ID NO: 19441 - protein, 125 aa, Artificial Sequence
  Synthetic construct
EVQLVQSGAEVKKPGESLRISCKSSGYSFTSYWISWVRQMPGKGLEWMGRIDPSDSYTNYSPSFEGHVTISADKSISTAYLQWSSLKASDTAMYYCARLLLSSGWNSRGNWFDPWGQGTLVTVSS

SEQ ID NO: 19442 - protein, 9 aa, Artificial Sequence
  Synthetic construct
GYSISSPYY

SEQ ID NO: 19443 - protein, 10 aa, Artificial Sequence
  Synthetic construct
GFSLSTSGMS

SEQ ID NO: 19444 - protein, 8 aa, Artificial Sequence
  Synthetic construct
GFTFSLYP

SEQ ID NO: 19445 - protein, 8 aa, Artificial Sequence
  Synthetic construct
GYSFTSHW

SEQ ID NO: 19446 - protein, 8 aa, Artificial Sequence
  Synthetic construct
GFTFSSYA

SEQ ID NO: 19447 - protein, 8 aa, Artificial Sequence
  Synthetic construct
GGSFSSYA

SEQ ID NO: 19448 - protein, 8 aa, Artificial Sequence
  Synthetic construct
GGSFSDYY

SEQ ID NO: 19449 - protein, 10 aa, Artificial Sequence
  Synthetic construct
GFSLSTTGMC

SEQ ID NO: 19450 - protein, 8 aa, Artificial Sequence
  Synthetic construct
GFTFSSYS

SEQ ID NO: 19451 - protein, 8 aa, Artificial Sequence
  Synthetic construct
GYTFTSFY

SEQ ID NO: 19452 - protein, 8 aa, Artificial Sequence
  Synthetic construct
GYTFTTYA

SEQ ID NO: 19453 - protein, 8 aa, Artificial Sequence
  Synthetic construct
GGTFSNYT

SEQ ID NO: 19454 - protein, 8 aa, Artificial Sequence
  Synthetic construct
GFTFSGNA

SEQ ID NO: 19455 - protein, 8 aa, Artificial Sequence
  Synthetic construct
GGTFSNYT

SEQ ID NO: 19456 - protein, 8 aa, Artificial Sequence
  Synthetic construct
GGTFSSYG

SEQ ID NO: 19457 - protein, 10 aa, Artificial Sequence
  Synthetic construct
GGSISSSSYY

SEQ ID NO: 19458 - protein, 8 aa, Artificial Sequence
  Synthetic construct
GFTVSDNY

SEQ ID NO: 19459 - protein, 8 aa, Artificial Sequence
  Synthetic construct
GIIVSRNY

SEQ ID NO: 19460 - protein, 10 aa, Artificial Sequence
  Synthetic construct
GGSISSGGYY

SEQ ID NO: 19461 - protein, 9 aa, Artificial Sequence
  Synthetic construct
GGSISSNNW

SEQ ID NO: 19462 - protein, 10 aa, Artificial Sequence
  Synthetic construct
GGSISSGSYY

SEQ ID NO: 19463 - protein, 8 aa, Artificial Sequence
  Synthetic construct
GYSFTSYW

SEQ ID NO: 19464 - protein, 8 aa, Artificial Sequence
  Synthetic construct
GYSFTNYW

SEQ ID NO: 19465 - protein, 9 aa, Artificial Sequence
  Synthetic construct
GDSISSSNW

SEQ ID NO: 19466 - protein, 10 aa, Artificial Sequence
  Synthetic construct
GDSVSSNSAA

SEQ ID NO: 19467 - protein, 10 aa, Artificial Sequence
  Synthetic construct
GFSLSTSGVG

SEQ ID NO: 19468 - protein, 9 aa, Artificial Sequence
  Synthetic construct
DGSIRSSNW

SEQ ID NO: 19469 - protein, 10 aa, Artificial Sequence
  Synthetic construct
GGSISSTTSY

SEQ ID NO: 19470 - protein, 8 aa, Artificial Sequence
  Synthetic construct
GFTFSPYS

SEQ ID NO: 19471 - protein, 8 aa, Artificial Sequence
  Synthetic construct
GYTLSELS

SEQ ID NO: 19472 - protein, 8 aa, Artificial Sequence
  Synthetic construct
GGSISSYY

SEQ ID NO: 19473 - protein, 10 aa, Artificial Sequence
  Synthetic construct
GGSISSSSYY

SEQ ID NO: 19474 - protein, 8 aa, Artificial Sequence
  Synthetic construct
GFTFSSYA

SEQ ID NO: 19475 - protein, 10 aa, Artificial Sequence
  Synthetic construct
GGSISSSSYY

SEQ ID NO: 19476 - protein, 8 aa, Artificial Sequence
  Synthetic construct
GYSFISNW

SEQ ID NO: 19477 - protein, 8 aa, Artificial Sequence
  Synthetic construct
GGSVTRFS

SEQ ID NO: 19478 - protein, 8 aa, Artificial Sequence
  Synthetic construct
GYTFARYG

SEQ ID NO: 19479 - protein, 8 aa, Artificial Sequence
  Synthetic construct
GFTFSSYG

SEQ ID NO: 19480 - protein, 10 aa, Artificial Sequence
  Synthetic construct
NFSLSTSGVG

SEQ ID NO: 19481 - protein, 8 aa, Artificial Sequence
  Synthetic construct
GFTFSNYG

SEQ ID NO: 19482 - protein, 8 aa, Artificial Sequence
  Synthetic construct
GYTFTSYG

SEQ ID NO: 19483 - protein, 8 aa, Artificial Sequence
  Synthetic construct
GFTVSSNF

SEQ ID NO: 19484 - protein, 8 aa, Artificial Sequence
  Synthetic construct
GVIVSSNY

SEQ ID NO: 19485 - protein, 8 aa, Artificial Sequence
  Synthetic construct
GYTFSNYD

SEQ ID NO: 19486 - protein, 8 aa, Artificial Sequence
  Synthetic construct
GITVKDYG

SEQ ID NO: 19487 - protein, 8 aa, Artificial Sequence
  Synthetic construct
GFNVSSNY

SEQ ID NO: 19488 - protein, 8 aa, Artificial Sequence
  Synthetic construct
GYTLPELS

SEQ ID NO: 19489 - protein, 10 aa, Artificial Sequence
  Synthetic construct
GGSISSGGYY

SEQ ID NO: 19490 - protein, 8 aa, Artificial Sequence
  Synthetic construct
GGSFSGFQ

SEQ ID NO: 19491 - protein, 8 aa, Artificial Sequence
  Synthetic construct
GYSFTSYW

SEQ ID NO: 19492 - protein, 8 aa, Artificial Sequence
  Synthetic construct
GYTFTNYA

SEQ ID NO: 19493 - protein, 8 aa, Artificial Sequence
  Synthetic construct
GYTFTTYA

SEQ ID NO: 19494 - protein, 8 aa, Artificial Sequence
  Synthetic construct
GFIVGNNY

SEQ ID NO: 19495 - protein, 10 aa, Artificial Sequence
  Synthetic construct
GFSLTTSGVG

SEQ ID NO: 19496 - protein, 10 aa, Artificial Sequence
  Synthetic construct
GGSISRSTYY

SEQ ID NO: 19497 - protein, 9 aa, Artificial Sequence
  Synthetic construct
GGSISSNNW

SEQ ID NO: 19498 - protein, 8 aa, Artificial Sequence
  Synthetic construct
GGSFTGYY

SEQ ID NO: 19499 - protein, 8 aa, Artificial Sequence
  Synthetic construct
GFTFKNFA

SEQ ID NO: 19500 - protein, 8 aa, Artificial Sequence
  Synthetic construct
GYTFTTYA

SEQ ID NO: 19501 - protein, 8 aa, Artificial Sequence
  Synthetic construct
GFTFSDYS

SEQ ID NO: 19502 - protein, 8 aa, Artificial Sequence
  Synthetic construct
GFNVSSNY

SEQ ID NO: 19503 - protein, 10 aa, Artificial Sequence
  Synthetic construct
GGSISSGGYY

SEQ ID NO: 19504 - protein, 8 aa, Artificial Sequence
  Synthetic construct
GYSFTSYW

SEQ ID NO: 19505 - protein, 8 aa, Artificial Sequence
  Synthetic construct
GYTFTSNW

SEQ ID NO: 19506 - protein, 8 aa, Artificial Sequence
  Synthetic construct
GYTFNNYY

SEQ ID NO: 19507 - protein, 8 aa, Artificial Sequence
  Synthetic construct
GFTFNNFG

SEQ ID NO: 19508 - protein, 8 aa, Artificial Sequence
  Synthetic construct
GYTFTNYG

SEQ ID NO: 19509 - protein, 8 aa, Artificial Sequence
  Synthetic construct
GFTFSSYS

SEQ ID NO: 19510 - protein, 10 aa, Artificial Sequence
  Synthetic construct
GFSLGTSGMC

SEQ ID NO: 19511 - protein, 9 aa, Artificial Sequence
  Synthetic construct
GDSISSSNW

SEQ ID NO: 19512 - protein, 10 aa, Artificial Sequence
  Synthetic construct
GGSISSSGYY

SEQ ID NO: 19513 - protein, 8 aa, Artificial Sequence
  Synthetic construct
GFTFTNTV

SEQ ID NO: 19514 - protein, 8 aa, Artificial Sequence
  Synthetic construct
AFTFNNYA

SEQ ID NO: 19515 - protein, 8 aa, Artificial Sequence
  Synthetic construct
GFTFSTYA

SEQ ID NO: 19516 - protein, 8 aa, Artificial Sequence
  Synthetic construct
GFTVGNNY

SEQ ID NO: 19517 - protein, 10 aa, Artificial Sequence
  Synthetic construct
GGSISSSGYY

SEQ ID NO: 19518 - protein, 8 aa, Artificial Sequence
  Synthetic construct
GFTFSSYA

SEQ ID NO: 19519 - protein, 8 aa, Artificial Sequence
  Synthetic construct
GGTLINYG

SEQ ID NO: 19520 - protein, 8 aa, Artificial Sequence
  Synthetic construct
GGSISSYY

SEQ ID NO: 19521 - protein, 8 aa, Artificial Sequence
  Synthetic construct
GVSISDYY

SEQ ID NO: 19522 - protein, 8 aa, Artificial Sequence
  Synthetic construct
GGSFSGYY

SEQ ID NO: 19523 - protein, 8 aa, Artificial Sequence
  Synthetic construct
GGSFSTYA

SEQ ID NO: 19524 - protein, 8 aa, Artificial Sequence
  Synthetic construct
GFTFSSYG

SEQ ID NO: 19525 - protein, 3 aa, Artificial Sequence
  Synthetic construct
WDV

SEQ ID NO: 19526 - protein, 8 aa, Artificial Sequence
  Synthetic construct
GFTLNEYG

SEQ ID NO: 19527 - protein, 8 aa, Artificial Sequence
  Synthetic construct
GFIFNTYA

SEQ ID NO: 19528 - protein, 8 aa, Artificial Sequence
  Synthetic construct
GFTFSNYA

SEQ ID NO: 19529 - protein, 8 aa, Artificial Sequence
  Synthetic construct
GFTFRNAW

SEQ ID NO: 19530 - protein, 8 aa, Artificial Sequence
  Synthetic construct
GFTFSRYA

SEQ ID NO: 19531 - protein, 8 aa, Artificial Sequence
  Synthetic construct
AFTFSSYG

SEQ ID NO: 19532 - protein, 8 aa, Artificial Sequence
  Synthetic construct
GFTFSSYA

SEQ ID NO: 19533 - protein, 8 aa, Artificial Sequence
  Synthetic construct
GGSFSGYQ

SEQ ID NO: 19534 - protein, 8 aa, Artificial Sequence
  Synthetic construct
GFTFSDYA

SEQ ID NO: 19535 - protein, 8 aa, Artificial Sequence
  Synthetic construct
GGPFSSYA

SEQ ID NO: 19536 - protein, 10 aa, Artificial Sequence
  Synthetic construct
GGSINSASYF

SEQ ID NO: 19537 - protein, 3 aa, Artificial Sequence
  Synthetic construct
DGV

SEQ ID NO: 19538 - protein, 8 aa, Artificial Sequence
  Synthetic construct
GFTFSSYG

SEQ ID NO: 19539 - protein, 8 aa, Artificial Sequence
  Synthetic construct
GDTFSSYA

SEQ ID NO: 19540 - protein, 9 aa, Artificial Sequence
  Synthetic construct
GYSISSGYY

SEQ ID NO: 19541 - protein, 8 aa, Artificial Sequence
  Synthetic construct
GYTFTSYG

SEQ ID NO: 19542 - protein, 8 aa, Artificial Sequence
  Synthetic construct
GFTFSIYP

SEQ ID NO: 19543 - protein, 8 aa, Artificial Sequence
  Synthetic construct
GYNFTRYA

SEQ ID NO: 19544 - protein, 8 aa, Artificial Sequence
  Synthetic construct
GFTFSTYA

SEQ ID NO: 19545 - protein, 10 aa, Artificial Sequence
  Synthetic construct
GDSISSSGYY

SEQ ID NO: 19546 - protein, 9 aa, Artificial Sequence
  Synthetic construct
GYSISSGYS

SEQ ID NO: 19547 - protein, 8 aa, Artificial Sequence
  Synthetic construct
GYNFTNYW

SEQ ID NO: 19548 - protein, 9 aa, Artificial Sequence
  Synthetic construct
GDSISSNNW

SEQ ID NO: 19549 - protein, 8 aa, Artificial Sequence
  Synthetic construct
GGSISTYY

SEQ ID NO: 19550 - protein, 8 aa, Artificial Sequence
  Synthetic construct
GASINTYY

SEQ ID NO: 19551 - protein, 8 aa, Artificial Sequence
  Synthetic construct
GFTFNSYT

SEQ ID NO: 19552 - protein, 8 aa, Artificial Sequence
  Synthetic construct
GFTFEDFA

SEQ ID NO: 19553 - protein, 9 aa, Artificial Sequence
  Synthetic construct
GGSISSINW

SEQ ID NO: 19554 - protein, 8 aa, Artificial Sequence
  Synthetic construct
GGSFSGYY

SEQ ID NO: 19555 - protein, 10 aa, Artificial Sequence
  Synthetic construct
GGSITSGSSY

SEQ ID NO: 19556 - protein, 10 aa, Artificial Sequence
  Synthetic construct
GGSISSGSYY

SEQ ID NO: 19557 - protein, 8 aa, Artificial Sequence
  Synthetic construct
GFTFSSYA

SEQ ID NO: 19558 - protein, 8 aa, Artificial Sequence
  Synthetic construct
GYTFSTYA

SEQ ID NO: 19559 - protein, 10 aa, Artificial Sequence
  Synthetic construct
GGSISSTNYY

SEQ ID NO: 19560 - protein, 8 aa, Artificial Sequence
  Synthetic construct
GFTFNTYW

SEQ ID NO: 19561 - protein, 10 aa, Artificial Sequence
  Synthetic construct
GGSISSGSYY

SEQ ID NO: 19562 - protein, 8 aa, Artificial Sequence
  Synthetic construct
GFTFADAW

SEQ ID NO: 19563 - protein, 8 aa, Artificial Sequence
  Synthetic construct
GFTFSTYA

SEQ ID NO: 19564 - protein, 8 aa, Artificial Sequence
  Synthetic construct
GFTFSTYA

SEQ ID NO: 19565 - protein, 10 aa, Artificial Sequence
  Synthetic construct
GFSLSTGGVG

SEQ ID NO: 19566 - protein, 8 aa, Artificial Sequence
  Synthetic construct
GFSFSSYW

SEQ ID NO: 19567 - protein, 8 aa, Artificial Sequence
  Synthetic construct
GGSISSYY

SEQ ID NO: 19568 - protein, 8 aa, Artificial Sequence
  Synthetic construct
GGTFSSYA

SEQ ID NO: 19569 - protein, 8 aa, Artificial Sequence
  Synthetic construct
GGSISSYY

SEQ ID NO: 19570 - protein, 8 aa, Artificial Sequence
  Synthetic construct
GYTFTSYA

SEQ ID NO: 19571 - protein, 8 aa, Artificial Sequence
  Synthetic construct
GFSFSSYG

SEQ ID NO: 19572 - protein, 8 aa, Artificial Sequence
  Synthetic construct
GGSLSIYY

SEQ ID NO: 19573 - protein, 8 aa, Artificial Sequence
  Synthetic construct
GGTFSTYA

SEQ ID NO: 19574 - protein, 10 aa, Artificial Sequence
  Synthetic construct
GFSLSTSGLG

SEQ ID NO: 19575 - protein, 8 aa, Artificial Sequence
  Synthetic construct
GGTFSNYA

SEQ ID NO: 19576 - protein, 8 aa, Artificial Sequence
  Synthetic construct
GFSFSSYN

SEQ ID NO: 19577 - protein, 8 aa, Artificial Sequence
  Synthetic construct
GYNFTTYW

SEQ ID NO: 19578 - protein, 8 aa, Artificial Sequence
  Synthetic construct
GFAFNNYG

SEQ ID NO: 19579 - protein, 10 aa, Artificial Sequence
  Synthetic construct
NFSLTTSGVG

SEQ ID NO: 19580 - protein, 8 aa, Artificial Sequence
  Synthetic construct
GYTFSSYG

SEQ ID NO: 19581 - protein, 8 aa, Artificial Sequence
  Synthetic construct
GYTFTNYA

SEQ ID NO: 19582 - protein, 9 aa, Artificial Sequence
  Synthetic construct
GYSISSGYY

SEQ ID NO: 19583 - protein, 8 aa, Artificial Sequence
  Synthetic construct
GFTFSSFW

SEQ ID NO: 19584 - protein, 8 aa, Artificial Sequence
  Synthetic construct
GGSINNYY

SEQ ID NO: 19585 - protein, 8 aa, Artificial Sequence
  Synthetic construct
EFTFSNYC

SEQ ID NO: 19586 - protein, 10 aa, Artificial Sequence
  Synthetic construct
GGSISTSNYY

SEQ ID NO: 19587 - protein, 8 aa, Artificial Sequence
  Synthetic construct
GFTFSSYG

SEQ ID NO: 19588 - protein, 8 aa, Artificial Sequence
  Synthetic construct
GFTFSSYA

SEQ ID NO: 19589 - protein, 10 aa, Artificial Sequence
  Synthetic construct
GGSITRNNYY

SEQ ID NO: 19590 - protein, 8 aa, Artificial Sequence
  Synthetic construct
GFTVSSNY

SEQ ID NO: 19591 - protein, 8 aa, Artificial Sequence
  Synthetic construct
GGSINSYY

SEQ ID NO: 19592 - protein, 8 aa, Artificial Sequence
  Synthetic construct
GFTFSSHG

SEQ ID NO: 19593 - protein, 8 aa, Artificial Sequence
  Synthetic construct
GFTFSTFA

SEQ ID NO: 19594 - protein, 8 aa, Artificial Sequence
  Synthetic construct
GYSFATNW

SEQ ID NO: 19595 - protein, 8 aa, Artificial Sequence
  Synthetic construct
GGSISSYY

SEQ ID NO: 19596 - protein, 8 aa, Artificial Sequence
  Synthetic construct
GYTLTELS

SEQ ID NO: 19597 - protein, 10 aa, Artificial Sequence
  Synthetic construct
GGSISSSSYY

SEQ ID NO: 19598 - protein, 8 aa, Artificial Sequence
  Synthetic construct
GYSFTNYW

SEQ ID NO: 19599 - protein, 8 aa, Artificial Sequence
  Synthetic construct
GFIFSSYG

SEQ ID NO: 19600 - protein, 8 aa, Artificial Sequence
  Synthetic construct
GFTFRNYA

SEQ ID NO: 19601 - protein, 8 aa, Artificial Sequence
  Synthetic construct
GYILTNYF

SEQ ID NO: 19602 - protein, 8 aa, Artificial Sequence
  Synthetic construct
GFSFSNYN

SEQ ID NO: 19603 - protein, 8 aa, Artificial Sequence
  Synthetic construct
GGTFSSYT

SEQ ID NO: 19604 - protein, 8 aa, Artificial Sequence
  Synthetic construct
GYTFTSYY

SEQ ID NO: 19605 - protein, 8 aa, Artificial Sequence
  Synthetic construct
GYTLPELS

SEQ ID NO: 19606 - protein, 8 aa, Artificial Sequence
  Synthetic construct
GFTFSNYN

SEQ ID NO: 19607 - protein, 8 aa, Artificial Sequence
  Synthetic construct
GFTFSIYA

SEQ ID NO: 19608 - protein, 8 aa, Artificial Sequence
  Synthetic construct
GITFKDYG

SEQ ID NO: 19609 - protein, 8 aa, Artificial Sequence
  Synthetic construct
GFTVSTNY

SEQ ID NO: 19610 - protein, 8 aa, Artificial Sequence
  Synthetic construct
GFTFSSYW

SEQ ID NO: 19611 - protein, 8 aa, Artificial Sequence
  Synthetic construct
GRSLSDDY

SEQ ID NO: 19612 - protein, 10 aa, Artificial Sequence
  Synthetic construct
GGSISSGSYY

SEQ ID NO: 19613 - protein, 8 aa, Artificial Sequence
  Synthetic construct
GGSISSHY

SEQ ID NO: 19614 - protein, 8 aa, Artificial Sequence
  Synthetic construct
GFTFEDFD

SEQ ID NO: 19615 - protein, 8 aa, Artificial Sequence
  Synthetic construct
GFTFRNAW

SEQ ID NO: 19616 - protein, 8 aa, Artificial Sequence
  Synthetic construct
GGTFSSYT

SEQ ID NO: 19617 - protein, 8 aa, Artificial Sequence
  Synthetic construct
GYTFTSYY

SEQ ID NO: 19618 - protein, 9 aa, Artificial Sequence
  Synthetic construct
GYSISSGYY

SEQ ID NO: 19619 - protein, 8 aa, Artificial Sequence
  Synthetic construct
GYTFTSYG

SEQ ID NO: 19620 - protein, 8 aa, Artificial Sequence
  Synthetic construct
GYSFISHW

SEQ ID NO: 19621 - protein, 8 aa, Artificial Sequence
  Synthetic construct
GFTLGDYA

SEQ ID NO: 19622 - protein, 8 aa, Artificial Sequence
  Synthetic construct
GYTLTEVA

SEQ ID NO: 19623 - protein, 3 aa, Artificial Sequence
  Synthetic construct
  MISC_FEATURE (1)..(3): X can be any amino acid
XXX

SEQ ID NO: 19624 - protein, 10 aa, Artificial Sequence
  Synthetic construct
GGSISSSSYY

SEQ ID NO: 19625 - protein, 8 aa, Artificial Sequence
  Synthetic construct
GFIFSDYY

SEQ ID NO: 19626 - protein, 8 aa, Artificial Sequence
  Synthetic construct
GFTFSSYS

SEQ ID NO: 19627 - protein, 8 aa, Artificial Sequence
  Synthetic construct
GGSFSGYY

SEQ ID NO: 19628 - protein, 8 aa, Artificial Sequence
  Synthetic construct
GLIFSSYA

SEQ ID NO: 19629 - protein, 8 aa, Artificial Sequence
  Synthetic construct
GITFSVHY

SEQ ID NO: 19630 - protein, 8 aa, Artificial Sequence
  Synthetic construct
GFSFIDYA

SEQ ID NO: 19631 - protein, 8 aa, Artificial Sequence
  Synthetic construct
GFTFTTSA

SEQ ID NO: 19632 - protein, 8 aa, Artificial Sequence
  Synthetic construct
GFTFSDYS

SEQ ID NO: 19633 - protein, 8 aa, Artificial Sequence
  Synthetic construct
DGSIASYF

SEQ ID NO: 19634 - protein, 8 aa, Artificial Sequence
  Synthetic construct
GASISSYY

SEQ ID NO: 19635 - protein, 10 aa, Artificial Sequence
  Synthetic construct
GGSITSGLYY

SEQ ID NO: 19636 - protein, 10 aa, Artificial Sequence
  Synthetic construct
GFSFNTSRVG

SEQ ID NO: 19637 - protein, 8 aa, Artificial Sequence
  Synthetic construct
GYSFTTYA

SEQ ID NO: 19638 - protein, 8 aa, Artificial Sequence
  Synthetic construct
GFTFSGYS

SEQ ID NO: 19639 - protein, 10 aa, Artificial Sequence
  Synthetic construct
GVSINSTVSY

SEQ ID NO: 19640 - protein, 8 aa, Artificial Sequence
  Synthetic construct
GFTFSHFT

SEQ ID NO: 19641 - protein, 8 aa, Artificial Sequence
  Synthetic construct
GYTFTKYA

SEQ ID NO: 19642 - protein, 8 aa, Artificial Sequence
  Synthetic construct
GFNFDKYA

SEQ ID NO: 19643 - protein, 8 aa, Artificial Sequence
  Synthetic construct
GFTFSGYW

SEQ ID NO: 19644 - protein, 9 aa, Artificial Sequence
  Synthetic construct
GGSISNNNW

SEQ ID NO: 19645 - protein, 8 aa, Artificial Sequence
  Synthetic construct
GFTFSGYA

SEQ ID NO: 19646 - protein, 10 aa, Artificial Sequence
  Synthetic construct
GDSISSGTYF

SEQ ID NO: 19647 - protein, 8 aa, Artificial Sequence
  Synthetic construct
GFTLSSYW

SEQ ID NO: 19648 - protein, 10 aa, Artificial Sequence
  Synthetic construct
GGSIYSGGYY

SEQ ID NO: 19649 - protein, 8 aa, Artificial Sequence
  Synthetic construct
GFTFSSHG

SEQ ID NO: 19650 - protein, 8 aa, Artificial Sequence
  Synthetic construct
GFTFSSYA

SEQ ID NO: 19651 - protein, 8 aa, Artificial Sequence
  Synthetic construct
GFSFSSHS

SEQ ID NO: 19652 - protein, 8 aa, Artificial Sequence
  Synthetic construct
GFTFSSYA

SEQ ID NO: 19653 - protein, 8 aa, Artificial Sequence
  Synthetic construct
GYTFTSFA

SEQ ID NO: 19654 - protein, 8 aa, Artificial Sequence
  Synthetic construct
GYTFASNW

SEQ ID NO: 19655 - protein, 8 aa, Artificial Sequence
  Synthetic construct
GFTFNIYA

SEQ ID NO: 19656 - protein, 10 aa, Artificial Sequence
  Synthetic construct
GGSISSSSFF

SEQ ID NO: 19657 - protein, 8 aa, Artificial Sequence
  Synthetic construct
GFIFSGSA

SEQ ID NO: 19658 - protein, 8 aa, Artificial Sequence
  Synthetic construct
GYTLTELS

SEQ ID NO: 19659 - protein, 8 aa, Artificial Sequence
  Synthetic construct
GYSFTSHW

SEQ ID NO: 19660 - protein, 8 aa, Artificial Sequence
  Synthetic construct
GYTFTSYY

SEQ ID NO: 19661 - protein, 8 aa, Artificial Sequence
  Synthetic construct
GFTFSSYA

SEQ ID NO: 19662 - protein, 8 aa, Artificial Sequence
  Synthetic construct
GFTFRSYG

SEQ ID NO: 19663 - protein, 8 aa, Artificial Sequence
  Synthetic construct
GFTFISYA

SEQ ID NO: 19664 - protein, 8 aa, Artificial Sequence
  Synthetic construct
GDTFSSYA

SEQ ID NO: 19665 - protein, 8 aa, Artificial Sequence
  Synthetic construct
GYTFASYY

SEQ ID NO: 19666 - protein, 8 aa, Artificial Sequence
  Synthetic construct
GFTFSSYN

SEQ ID NO: 19667 - protein, 8 aa, Artificial Sequence
  Synthetic construct
GFTFEDFA

SEQ ID NO: 19668 - protein, 10 aa, Artificial Sequence
  Synthetic construct
GGSISSTNYY

SEQ ID NO: 19669 - protein, 10 aa, Artificial Sequence
  Synthetic construct
GDDVSRNSAA

SEQ ID NO: 19670 - protein, 8 aa, Artificial Sequence
  Synthetic construct
EFIVSRNY

SEQ ID NO: 19671 - protein, 10 aa, Artificial Sequence
  Synthetic construct
GFSLSTSGVG

SEQ ID NO: 19672 - protein, 8 aa, Artificial Sequence
  Synthetic construct
GYTLIELS

SEQ ID NO: 19673 - protein, 8 aa, Artificial Sequence
  Synthetic construct
GFTFTGYG

SEQ ID NO: 19674 - protein, 8 aa, Artificial Sequence
  Synthetic construct
GFIFRTYA

SEQ ID NO: 19675 - protein, 8 aa, Artificial Sequence
  Synthetic construct
GFTFGSYG

SEQ ID NO: 19676 - protein, 8 aa, Artificial Sequence
  Synthetic construct
GFTFSNAW

SEQ ID NO: 19677 - protein, 8 aa, Artificial Sequence
  Synthetic construct
GDSMSNYF

SEQ ID NO: 19678 - protein, 8 aa, Artificial Sequence
  Synthetic construct
GYSFTKYW

SEQ ID NO: 19679 - protein, 10 aa, Artificial Sequence
  Synthetic construct
GGSISSSYYY

SEQ ID NO: 19680 - protein, 8 aa, Artificial Sequence
  Synthetic construct
EFTFSDYS

SEQ ID NO: 19681 - protein, 8 aa, Artificial Sequence
  Synthetic construct
DGSINNYY

SEQ ID NO: 19682 - protein, 8 aa, Artificial Sequence
  Synthetic construct
GGTFSSYA

SEQ ID NO: 19683 - protein, 10 aa, Artificial Sequence
  Synthetic construct
GFSLPTTGVC

SEQ ID NO: 19684 - protein, 8 aa, Artificial Sequence
  Synthetic construct
GFTFSSYG

SEQ ID NO: 19685 - protein, 8 aa, Artificial Sequence
  Synthetic construct
GFTFSSYG

SEQ ID NO: 19686 - protein, 8 aa, Artificial Sequence
  Synthetic construct
GFTFINYA

SEQ ID NO: 19687 - protein, 8 aa, Artificial Sequence
  Synthetic construct
GFTFSDYY

SEQ ID NO: 19688 - protein, 8 aa, Artificial Sequence
  Synthetic construct
GFTFSSSV

SEQ ID NO: 19689 - protein, 8 aa, Artificial Sequence
  Synthetic construct
RFAFSSYD

SEQ ID NO: 19690 - protein, 8 aa, Artificial Sequence
  Synthetic construct
GFTFSDYA

SEQ ID NO: 19691 - protein, 8 aa, Artificial Sequence
  Synthetic construct
GYNFTTYA

SEQ ID NO: 19692 - protein, 8 aa, Artificial Sequence
  Synthetic construct
GFTFNNYG

SEQ ID NO: 19693 - protein, 8 aa, Artificial Sequence
  Synthetic construct
GGTFSSYA

SEQ ID NO: 19694 - protein, 8 aa, Artificial Sequence
  Synthetic construct
GYSFTSWW

SEQ ID NO: 19695 - protein, 10 aa, Artificial Sequence
  Synthetic construct
GASISSGSYY

SEQ ID NO: 19696 - protein, 10 aa, Artificial Sequence
  Synthetic construct
GGSISSSSYY

SEQ ID NO: 19697 - protein, 9 aa, Artificial Sequence
  Synthetic construct
GYSISSGYY

SEQ ID NO: 19698 - protein, 8 aa, Artificial Sequence
  Synthetic construct
GFTFSSYG

SEQ ID NO: 19699 - protein, 8 aa, Artificial Sequence
  Synthetic construct
GFTVSSNY

SEQ ID NO: 19700 - protein, 8 aa, Artificial Sequence
  Synthetic construct
GFTFGDYA

SEQ ID NO: 19701 - protein, 8 aa, Artificial Sequence
  Synthetic construct
GYNFIGFY

SEQ ID NO: 19702 - protein, 10 aa, Artificial Sequence
  Synthetic construct
GFSLSTSGVG

SEQ ID NO: 19703 - protein, 8 aa, Artificial Sequence
  Synthetic construct
GFTFSSYP

SEQ ID NO: 19704 - protein, 10 aa, Artificial Sequence
  Synthetic construct
GGSIGSSNYY

SEQ ID NO: 19705 - protein, 10 aa, Artificial Sequence
  Synthetic construct
AGSISSSSSY

SEQ ID NO: 19706 - protein, 8 aa, Artificial Sequence
  Synthetic construct
DDSMSSYY

SEQ ID NO: 19707 - protein, 8 aa, Artificial Sequence
  Synthetic construct
GGSLSGYQ

SEQ ID NO: 19708 - protein, 8 aa, Artificial Sequence
  Synthetic construct
GYSFTTDW

SEQ ID NO: 19709 - protein, 8 aa, Artificial Sequence
  Synthetic construct
GFTFSNAW

SEQ ID NO: 19710 - protein, 10 aa, Artificial Sequence
  Synthetic construct
GFSLINAKMG

SEQ ID NO: 19711 - protein, 8 aa, Artificial Sequence
  Synthetic construct
GFSFTDYY

SEQ ID NO: 19712 - protein, 8 aa, Artificial Sequence
  Synthetic construct
GGSFSGYQ

SEQ ID NO: 19713 - protein, 8 aa, Artificial Sequence
  Synthetic construct
GGSISSYY

SEQ ID NO: 19714 - protein, 8 aa, Artificial Sequence
  Synthetic construct
GGTFSSNA

SEQ ID NO: 19715 - protein, 8 aa, Artificial Sequence
  Synthetic construct
GFIVGSNY

SEQ ID NO: 19716 - protein, 8 aa, Artificial Sequence
  Synthetic construct
GGTFSSYA

SEQ ID NO: 19717 - protein, 8 aa, Artificial Sequence
  Synthetic construct
GFTFTNYA

SEQ ID NO: 19718 - protein, 8 aa, Artificial Sequence
  Synthetic construct
GFTFSSYA

SEQ ID NO: 19719 - protein, 8 aa, Artificial Sequence
  Synthetic construct
GITFNDYG

SEQ ID NO: 19720 - protein, 8 aa, Artificial Sequence
  Synthetic construct
GFTFSNYA

SEQ ID NO: 19721 - protein, 8 aa, Artificial Sequence
  Synthetic construct
GFAFNNYG

SEQ ID NO: 19722 - protein, 8 aa, Artificial Sequence
  Synthetic construct
GFIFSTYA

SEQ ID NO: 19723 - protein, 8 aa, Artificial Sequence
  Synthetic construct
GFIFSDHY

SEQ ID NO: 19724 - protein, 8 aa, Artificial Sequence
  Synthetic construct
GFTFSSYT

SEQ ID NO: 19725 - protein, 8 aa, Artificial Sequence
  Synthetic construct
GYTFTSYG

SEQ ID NO: 19726 - protein, 8 aa, Artificial Sequence
  Synthetic construct
GYTFTSYA

SEQ ID NO: 19727 - protein, 8 aa, Artificial Sequence
  Synthetic construct
GYTFIGYY

SEQ ID NO: 19728 - protein, 8 aa, Artificial Sequence
  Synthetic construct
GASISSYY

SEQ ID NO: 19729 - protein, 8 aa, Artificial Sequence
  Synthetic construct
GFSFSNYA

SEQ ID NO: 19730 - protein, 10 aa, Artificial Sequence
  Synthetic construct
GDSISSGSYY

SEQ ID NO: 19731 - protein, 8 aa, Artificial Sequence
  Synthetic construct
GFSLRGPW

SEQ ID NO: 19732 - protein, 8 aa, Artificial Sequence
  Synthetic construct
GYTFTNYG

SEQ ID NO: 19733 - protein, 8 aa, Artificial Sequence
  Synthetic construct
GGTFSSYP

SEQ ID NO: 19734 - protein, 8 aa, Artificial Sequence
  Synthetic construct
GFIFSDYY

SEQ ID NO: 19735 - protein, 8 aa, Artificial Sequence
  Synthetic construct
GVTVSSNY

SEQ ID NO: 19736 - protein, 8 aa, Artificial Sequence
  Synthetic construct
GFTFSSYA

SEQ ID NO: 19737 - protein, 8 aa, Artificial Sequence
  Synthetic construct
GFTFSDYY

SEQ ID NO: 19738 - protein, 10 aa, Artificial Sequence
  Synthetic construct
GGSISSGSYY

SEQ ID NO: 19739 - protein, 8 aa, Artificial Sequence
  Synthetic construct
GYSFTTYW

SEQ ID NO: 19740 - protein, 8 aa, Artificial Sequence
  Synthetic construct
GYSFATNW

SEQ ID NO: 19741 - protein, 8 aa, Artificial Sequence
  Synthetic construct
GGTFSNYA

SEQ ID NO: 19742 - protein, 8 aa, Artificial Sequence
  Synthetic construct
GGTFSSYT

SEQ ID NO: 19743 - protein, 8 aa, Artificial Sequence
  Synthetic construct
GFTFSTYA

SEQ ID NO: 19744 - protein, 10 aa, Artificial Sequence
  Synthetic construct
GFSLTSNGGA

SEQ ID NO: 19745 - protein, 8 aa, Artificial Sequence
  Synthetic construct
GYDFTNYW

SEQ ID NO: 19746 - protein, 8 aa, Artificial Sequence
  Synthetic construct
GIIVSSNY

SEQ ID NO: 19747 - protein, 8 aa, Artificial Sequence
  Synthetic construct
GFTFSSYS

SEQ ID NO: 19748 - protein, 8 aa, Artificial Sequence
  Synthetic construct
GFTFSNYA

SEQ ID NO: 19749 - protein, 8 aa, Artificial Sequence
  Synthetic construct
GASINTYY

SEQ ID NO: 19750 - protein, 10 aa, Artificial Sequence
  Synthetic construct
GGSISSSSYY

SEQ ID NO: 19751 - protein, 8 aa, Artificial Sequence
  Synthetic construct
GYTLPELS

SEQ ID NO: 19752 - protein, 8 aa, Artificial Sequence
  Synthetic construct
GFTFSNYW

SEQ ID NO: 19753 - protein, 8 aa, Artificial Sequence
  Synthetic construct
GYTFTNFY

SEQ ID NO: 19754 - protein, 8 aa, Artificial Sequence
  Synthetic construct
GYSFTSYW

SEQ ID NO: 19755 - protein, 8 aa, Artificial Sequence
  Synthetic construct
GFTFRLYD

SEQ ID NO: 19756 - protein, 8 aa, Artificial Sequence
  Synthetic construct
GYTFTDYY

SEQ ID NO: 19757 - protein, 8 aa, Artificial Sequence
  Synthetic construct
GYTFTKYA

SEQ ID NO: 19758 - protein, 8 aa, Artificial Sequence
  Synthetic construct
GGTFSNYT

SEQ ID NO: 19759 - protein, 8 aa, Artificial Sequence
  Synthetic construct
GYTLIELS

SEQ ID NO: 19760 - protein, 8 aa, Artificial Sequence
  Synthetic construct
GFTFTTYG

SEQ ID NO: 19761 - protein, 8 aa, Artificial Sequence
  Synthetic construct
GGSFSDYY

SEQ ID NO: 19762 - protein, 8 aa, Artificial Sequence
  Synthetic construct
GFTFSNYA

SEQ ID NO: 19763 - protein, 8 aa, Artificial Sequence
  Synthetic construct
GFSFSRHG

SEQ ID NO: 19764 - protein, 8 aa, Artificial Sequence
  Synthetic construct
GYTFSSYG

SEQ ID NO: 19765 - protein, 8 aa, Artificial Sequence
  Synthetic construct
GGTFTNSA

SEQ ID NO: 19766 - protein, 8 aa, Artificial Sequence
  Synthetic construct
GYTFSNYV

SEQ ID NO: 19767 - protein, 8 aa, Artificial Sequence
  Synthetic construct
GFTFSTYA

SEQ ID NO: 19768 - protein, 8 aa, Artificial Sequence
  Synthetic construct
GYNFTNYW

SEQ ID NO: 19769 - protein, 9 aa, Artificial Sequence
  Synthetic construct
GGSISSNYW

SEQ ID NO: 19770 - protein, 8 aa, Artificial Sequence
  Synthetic construct
GFTFEDFA

SEQ ID NO: 19771 - protein, 10 aa, Artificial Sequence
  Synthetic construct
GFSLSTSGVG

SEQ ID NO: 19772 - protein, 8 aa, Artificial Sequence
  Synthetic construct
GFTFSNYA

SEQ ID NO: 19773 - protein, 8 aa, Artificial Sequence
  Synthetic construct
GYTFTSYG

SEQ ID NO: 19774 - protein, 8 aa, Artificial Sequence
  Synthetic construct
GGTFSSYA

SEQ ID NO: 19775 - protein, 8 aa, Artificial Sequence
  Synthetic construct
GFTFSIYA

SEQ ID NO: 19776 - protein, 8 aa, Artificial Sequence
  Synthetic construct
GYIFSNNW

SEQ ID NO: 19777 - protein, 8 aa, Artificial Sequence
  Synthetic construct
GNSFTTHA

SEQ ID NO: 19778 - protein, 8 aa, Artificial Sequence
  Synthetic construct
GGSFSGYS

SEQ ID NO: 19779 - protein, 8 aa, Artificial Sequence
  Synthetic construct
GYTFTGYY

SEQ ID NO: 19780 - protein, 8 aa, Artificial Sequence
  Synthetic construct
GFKFGDYV

SEQ ID NO: 19781 - protein, 8 aa, Artificial Sequence
  Synthetic construct
GFIFNIYA

SEQ ID NO: 19782 - protein, 8 aa, Artificial Sequence
  Synthetic construct
GGSISSYY

SEQ ID NO: 19783 - protein, 8 aa, Artificial Sequence
  Synthetic construct
GFTFSTYA

SEQ ID NO: 19784 - protein, 8 aa, Artificial Sequence
  Synthetic construct
GFTFSNYW

SEQ ID NO: 19785 - protein, 8 aa, Artificial Sequence
  Synthetic construct
GFTFEDFA

SEQ ID NO: 19786 - protein, 3 aa, Artificial Sequence
  Synthetic construct
  MISC_FEATURE (1)..(3): X can be any amino acid
XXX

SEQ ID NO: 19787 - protein, 8 aa, Artificial Sequence
  Synthetic construct
GFTFSNAW

SEQ ID NO: 19788 - protein, 8 aa, Artificial Sequence
  Synthetic construct
GFTFSSHG

SEQ ID NO: 19789 - protein, 8 aa, Artificial Sequence
  Synthetic construct
GYTLTELS

SEQ ID NO: 19790 - protein, 8 aa, Artificial Sequence
  Synthetic construct
GFTFRSHG

SEQ ID NO: 19791 - protein, 8 aa, Artificial Sequence
  Synthetic construct
GYTFTNNW

SEQ ID NO: 19792 - protein, 10 aa, Artificial Sequence
  Synthetic construct
GGSITTSSFF

SEQ ID NO: 19793 - protein, 8 aa, Artificial Sequence
  Synthetic construct
GFTFSTYA

SEQ ID NO: 19794 - protein, 9 aa, Artificial Sequence
  Synthetic construct
GSSISSGYF

SEQ ID NO: 19795 - protein, 8 aa, Artificial Sequence
  Synthetic construct
GYSFTIYW

SEQ ID NO: 19796 - protein, 8 aa, Artificial Sequence
  Synthetic construct
GFFFRTYA

SEQ ID NO: 19797 - protein, 8 aa, Artificial Sequence
  Synthetic construct
GFTFTNYA

SEQ ID NO: 19798 - protein, 8 aa, Artificial Sequence
  Synthetic construct
GFTFSSYG

SEQ ID NO: 19799 - protein, 10 aa, Artificial Sequence
  Synthetic construct
GASISSSSYY

SEQ ID NO: 19800 - protein, 8 aa, Artificial Sequence
  Synthetic construct
GFNFSIYT

SEQ ID NO: 19801 - protein, 8 aa, Artificial Sequence
  Synthetic construct
GFTVSSNY

SEQ ID NO: 19802 - protein, 3 aa, Artificial Sequence
  Synthetic construct
  MISC_FEATURE (1)..(3): X can be any amino acid
XXX

SEQ ID NO: 19803 - protein, 8 aa, Artificial Sequence
  Synthetic construct
GFSFSTYS

SEQ ID NO: 19804 - protein, 8 aa, Artificial Sequence
  Synthetic construct
GGTFGSFA

SEQ ID NO: 19805 - protein, 8 aa, Artificial Sequence
  Synthetic construct
GFTFSTYA

SEQ ID NO: 19806 - protein, 8 aa, Artificial Sequence
  Synthetic construct
GGTFNSYA

SEQ ID NO: 19807 - protein, 8 aa, Artificial Sequence
  Synthetic construct
GFIVSSNY

SEQ ID NO: 19808 - protein, 10 aa, Artificial Sequence
  Synthetic construct
GGSISSSSYY

SEQ ID NO: 19809 - protein, 8 aa, Artificial Sequence
  Synthetic construct
GFTFEDFA

SEQ ID NO: 19810 - protein, 8 aa, Artificial Sequence
  Synthetic construct
GFTFSTYA

SEQ ID NO: 19811 - protein, 8 aa, Artificial Sequence
  Synthetic construct
GFTFSGYW

SEQ ID NO: 19812 - protein, 8 aa, Artificial Sequence
  Synthetic construct
GGTFSSYA

SEQ ID NO: 19813 - protein, 8 aa, Artificial Sequence
  Synthetic construct
GFAFSNYG

SEQ ID NO: 19814 - protein, 8 aa, Artificial Sequence
  Synthetic construct
GGSISTYY

SEQ ID NO: 19815 - protein, 10 aa, Artificial Sequence
  Synthetic construct
GGSISSGGYY

SEQ ID NO: 19816 - protein, 8 aa, Artificial Sequence
  Synthetic construct
GFTVSSNY

SEQ ID NO: 19817 - protein, 9 aa, Artificial Sequence
  Synthetic construct
GFSISSGYY

SEQ ID NO: 19818 - protein, 8 aa, Artificial Sequence
  Synthetic construct
AFTFSTYA

SEQ ID NO: 19819 - protein, 8 aa, Artificial Sequence
  Synthetic construct
GITFKDYG

SEQ ID NO: 19820 - protein, 8 aa, Artificial Sequence
  Synthetic construct
GYTFTNYA

SEQ ID NO: 19821 - protein, 9 aa, Artificial Sequence
  Synthetic construct
GGSISSSYW

SEQ ID NO: 19822 - protein, 10 aa, Artificial Sequence
  Synthetic construct
GDSVSSDSAA

SEQ ID NO: 19823 - protein, 8 aa, Artificial Sequence
  Synthetic construct
GGTFSSYA

SEQ ID NO: 19824 - protein, 8 aa, Artificial Sequence
  Synthetic construct
GGSFTGYY

SEQ ID NO: 19825 - protein, 8 aa, Artificial Sequence
  Synthetic construct
GFTFSNYG

SEQ ID NO: 19826 - protein, 8 aa, Artificial Sequence
  Synthetic construct
GFTFSNSW

SEQ ID NO: 19827 - protein, 8 aa, Artificial Sequence
  Synthetic construct
GGTFSSYT

SEQ ID NO: 19828 - protein, 8 aa, Artificial Sequence
  Synthetic construct
GYSFTNFA

SEQ ID NO: 19829 - protein, 9 aa, Artificial Sequence
  Synthetic construct
GGSISSSNW

SEQ ID NO: 19830 - protein, 8 aa, Artificial Sequence
  Synthetic construct
GYSFSSYW

SEQ ID NO: 19831 - protein, 8 aa, Artificial Sequence
  Synthetic construct
GYTFTSYA

SEQ ID NO: 19832 - protein, 8 aa, Artificial Sequence
  Synthetic construct
RFTFSSFA

SEQ ID NO: 19833 - protein, 8 aa, Artificial Sequence
  Synthetic construct
GYTFTTYA

SEQ ID NO: 19834 - protein, 8 aa, Artificial Sequence
  Synthetic construct
GDSISGYY

SEQ ID NO: 19835 - protein, 8 aa, Artificial Sequence
  Synthetic construct
GYTFTKYA

SEQ ID NO: 19836 - protein, 8 aa, Artificial Sequence
  Synthetic construct
GFTFTAYN

SEQ ID NO: 19837 - protein, 8 aa, Artificial Sequence
  Synthetic construct
GGSFSGYF

SEQ ID NO: 19838 - protein, 8 aa, Artificial Sequence
  Synthetic construct
GYNFTSYW

SEQ ID NO: 19839 - protein, 10 aa, Artificial Sequence
  Synthetic construct
GGSISSSNYY

SEQ ID NO: 19840 - protein, 8 aa, Artificial Sequence
  Synthetic construct
GGTFSSYT

SEQ ID NO: 19841 - protein, 8 aa, Artificial Sequence
  Synthetic construct
GFTFDDYA

SEQ ID NO: 19842 - protein, 8 aa, Artificial Sequence
  Synthetic construct
GGSFSGYY

SEQ ID NO: 19843 - protein, 8 aa, Artificial Sequence
  Synthetic construct
GFTFSSYG

SEQ ID NO: 19844 - protein, 8 aa, Artificial Sequence
  Synthetic construct
GYSFTAYA

SEQ ID NO: 19845 - protein, 8 aa, Artificial Sequence
  Synthetic construct
GGSFGLYY

SEQ ID NO: 19846 - protein, 8 aa, Artificial Sequence
  Synthetic construct
GYTFTNYA

SEQ ID NO: 19847 - protein, 8 aa, Artificial Sequence
  Synthetic construct
GGSMSNYY

SEQ ID NO: 19848 - protein, 8 aa, Artificial Sequence
  Synthetic construct
GFIFRTYA

SEQ ID NO: 19849 - protein, 8 aa, Artificial Sequence
  Synthetic construct
GFTFSSYW

SEQ ID NO: 19850 - protein, 10 aa, Artificial Sequence
  Synthetic construct
GGSINSASYY

SEQ ID NO: 19851 - protein, 8 aa, Artificial Sequence
  Synthetic construct
GYTLPELS

SEQ ID NO: 19852 - protein, 8 aa, Artificial Sequence
  Synthetic construct
GFTFNNYW

SEQ ID NO: 19853 - protein, 8 aa, Artificial Sequence
  Synthetic construct
GFTFSSYA

SEQ ID NO: 19854 - protein, 2 aa, Artificial Sequence
  Synthetic construct
GF

SEQ ID NO: 19855 - protein, 8 aa, Artificial Sequence
  Synthetic construct
GFTFSTYA

SEQ ID NO: 19856 - protein, 8 aa, Artificial Sequence
  Synthetic construct
GFTFSSYA

SEQ ID NO: 19857 - protein, 8 aa, Artificial Sequence
  Synthetic construct
GYTLRNFA

SEQ ID NO: 19858 - protein, 10 aa, Artificial Sequence
  Synthetic construct
GGSISSSSYY

SEQ ID NO: 19859 - protein, 8 aa, Artificial Sequence
  Synthetic construct
GGSFSGYY

SEQ ID NO: 19860 - protein, 8 aa, Artificial Sequence
  Synthetic construct
GFTFSTYA

SEQ ID NO: 19861 - protein, 9 aa, Artificial Sequence
  Synthetic construct
GGSISSSIW

SEQ ID NO: 19862 - protein, 8 aa, Artificial Sequence
  Synthetic construct
GFTVSSSY

SEQ ID NO: 19863 - protein, 8 aa, Artificial Sequence
  Synthetic construct
GITFSSYN

SEQ ID NO: 19864 - protein, 8 aa, Artificial Sequence
  Synthetic construct
GYTFTSNW

SEQ ID NO: 19865 - protein, 8 aa, Artificial Sequence
  Synthetic construct
GGSFSGYY

SEQ ID NO: 19866 - protein, 8 aa, Artificial Sequence
  Synthetic construct
GFTFSSYS

SEQ ID NO: 19867 - protein, 8 aa, Artificial Sequence
  Synthetic construct
GFTFRSYG

SEQ ID NO: 19868 - protein, 10 aa, Artificial Sequence
  Synthetic construct
GFSLSTGGVG

SEQ ID NO: 19869 - protein, 8 aa, Artificial Sequence
  Synthetic construct
GYTFTKYA

SEQ ID NO: 19870 - protein, 8 aa, Artificial Sequence
  Synthetic construct
GFTFSNYA

SEQ ID NO: 19871 - protein, 8 aa, Artificial Sequence
  Synthetic construct
GYTLIELS

SEQ ID NO: 19872 - protein, 8 aa, Artificial Sequence
  Synthetic construct
GYTFTSYA

SEQ ID NO: 19873 - protein, 10 aa, Artificial Sequence
  Synthetic construct
GFSLDTIGVA

SEQ ID NO: 19874 - protein, 8 aa, Artificial Sequence
  Synthetic construct
GFIFRTYA

SEQ ID NO: 19875 - protein, 8 aa, Artificial Sequence
  Synthetic construct
GGTFSSYP

SEQ ID NO: 19876 - protein, 8 aa, Artificial Sequence
  Synthetic construct
GFTFSIYA

SEQ ID NO: 19877 - protein, 8 aa, Artificial Sequence
  Synthetic construct
GFTFRTYG

SEQ ID NO: 19878 - protein, 10 aa, Artificial Sequence
  Synthetic construct
GFSLSTSGLG

SEQ ID NO: 19879 - protein, 8 aa, Artificial Sequence
  Synthetic construct
GYTFSAYA

SEQ ID NO: 19880 - protein, 8 aa, Artificial Sequence
  Synthetic construct
GGTFNSYA

SEQ ID NO: 19881 - protein, 8 aa, Artificial Sequence
  Synthetic construct
GYTFASYY

SEQ ID NO: 19882 - protein, 10 aa, Artificial Sequence
  Synthetic construct
GDSVSSNSVT

SEQ ID NO: 19883 - protein, 8 aa, Artificial Sequence
  Synthetic construct
GFTFSNYA

SEQ ID NO: 19884 - protein, 8 aa, Artificial Sequence
  Synthetic construct
GYTFTSYA

SEQ ID NO: 19885 - protein, 8 aa, Artificial Sequence
  Synthetic construct
GYTLIELS

SEQ ID NO: 19886 - protein, 8 aa, Artificial Sequence
  Synthetic construct
GYTFNSYY

SEQ ID NO: 19887 - protein, 10 aa, Artificial Sequence
  Synthetic construct
GFSLSTSGVG

SEQ ID NO: 19888 - protein, 8 aa, Artificial Sequence
  Synthetic construct
GGTFSSYA

SEQ ID NO: 19889 - protein, 8 aa, Artificial Sequence
  Synthetic construct
GFTFSIYA

SEQ ID NO: 19890 - protein, 8 aa, Artificial Sequence
  Synthetic construct
GGTFSRYA

SEQ ID NO: 19891 - protein, 8 aa, Artificial Sequence
  Synthetic construct
GYRFTAYW

SEQ ID NO: 19892 - protein, 8 aa, Artificial Sequence
  Synthetic construct
GYSFTSNW

SEQ ID NO: 19893 - protein, 8 aa, Artificial Sequence
  Synthetic construct
GFTFSHYS

SEQ ID NO: 19894 - protein, 8 aa, Artificial Sequence
  Synthetic construct
GFTFSNYA

SEQ ID NO: 19895 - protein, 8 aa, Artificial Sequence
  Synthetic construct
GFNFSTYT

SEQ ID NO: 19896 - protein, 9 aa, Artificial Sequence
  Synthetic construct
GYSISSDYY

SEQ ID NO: 19897 - protein, 8 aa, Artificial Sequence
  Synthetic construct
GYTLSEIS

SEQ ID NO: 19898 - protein, 8 aa, Artificial Sequence
  Synthetic construct
RFTFSGFG

SEQ ID NO: 19899 - protein, 8 aa, Artificial Sequence
  Synthetic construct
GFTFDDYT

SEQ ID NO: 19900 - protein, 8 aa, Artificial Sequence
  Synthetic construct
GFTFSSFA

SEQ ID NO: 19901 - protein, 8 aa, Artificial Sequence
  Synthetic construct
GLTFSSYN

SEQ ID NO: 19902 - protein, 8 aa, Artificial Sequence
  Synthetic construct
GFTFSNYG

SEQ ID NO: 19903 - protein, 9 aa, Artificial Sequence
  Synthetic construct
GGSISSSNW

SEQ ID NO: 19904 - protein, 10 aa, Artificial Sequence
  Synthetic construct
GGSVSSGNYY

SEQ ID NO: 19905 - protein, 8 aa, Artificial Sequence
  Synthetic construct
GGTFSSYA

SEQ ID NO: 19906 - protein, 8 aa, Artificial Sequence
  Synthetic construct
GFTFNSDA

SEQ ID NO: 19907 - protein, 10 aa, Artificial Sequence
  Synthetic construct
GFSLNTSGVA

SEQ ID NO: 19908 - protein, 8 aa, Artificial Sequence
  Synthetic construct
GFTFSSYA

SEQ ID NO: 19909 - protein, 10 aa, Artificial Sequence
  Synthetic construct
GGSISSSSHY

SEQ ID NO: 19910 - protein, 8 aa, Artificial Sequence
  Synthetic construct
GFIFSSYA

SEQ ID NO: 19911 - protein, 8 aa, Artificial Sequence
  Synthetic construct
GFTFSSYG

SEQ ID NO: 19912 - protein, 10 aa, Artificial Sequence
  Synthetic construct
GGSISSSSSY

SEQ ID NO: 19913 - protein, 8 aa, Artificial Sequence
  Synthetic construct
GGSISDYY

SEQ ID NO: 19914 - protein, 8 aa, Artificial Sequence
  Synthetic construct
GFTFNYAW

SEQ ID NO: 19915 - protein, 8 aa, Artificial Sequence
  Synthetic construct
GGSISSYY

SEQ ID NO: 19916 - protein, 10 aa, Artificial Sequence
  Synthetic construct
GGSISINNYY

SEQ ID NO: 19917 - protein, 10 aa, Artificial Sequence
  Synthetic construct
GGSFSSSSYY

SEQ ID NO: 19918 - protein, 10 aa, Artificial Sequence
  Synthetic construct
GGSISSGTYY

SEQ ID NO: 19919 - protein, 8 aa, Artificial Sequence
  Synthetic construct
GFTFSNYA

SEQ ID NO: 19920 - protein, 10 aa, Artificial Sequence
  Synthetic construct
GGSISSSGYY

SEQ ID NO: 19921 - protein, 10 aa, Artificial Sequence
  Synthetic construct
GGSISSNTYY

SEQ ID NO: 19922 - protein, 8 aa, Artificial Sequence
  Synthetic construct
GYSFTRYG

SEQ ID NO: 19923 - protein, 8 aa, Artificial Sequence
  Synthetic construct
GGDFTYYP

SEQ ID NO: 19924 - protein, 8 aa, Artificial Sequence
  Synthetic construct
GFTFSNYA

SEQ ID NO: 19925 - protein, 8 aa, Artificial Sequence
  Synthetic construct
GFTFSSHA

SEQ ID NO: 19926 - protein, 8 aa, Artificial Sequence
  Synthetic construct
GVTFSSYA

SEQ ID NO: 19927 - protein, 8 aa, Artificial Sequence
  Synthetic construct
GFTFNTYA

SEQ ID NO: 19928 - protein, 8 aa, Artificial Sequence
  Synthetic construct
GFTFSTYG

SEQ ID NO: 19929 - protein, 8 aa, Artificial Sequence
  Synthetic construct
GFTFSTFA

SEQ ID NO: 19930 - protein, 8 aa, Artificial Sequence
  Synthetic construct
GFTSSSYW

SEQ ID NO: 19931 - protein, 8 aa, Artificial Sequence
  Synthetic construct
GYDFPIYW

SEQ ID NO: 19932 - protein, 10 aa, Artificial Sequence
  Synthetic construct
GLSLSSTGVG

SEQ ID NO: 19933 - protein, 8 aa, Artificial Sequence
  Synthetic construct
GFTFSDYA

SEQ ID NO: 19934 - protein, 8 aa, Artificial Sequence
  Synthetic construct
GFTFSTYA

SEQ ID NO: 19935 - protein, 10 aa, Artificial Sequence
  Synthetic construct
GFSLSTSGVA

SEQ ID NO: 19936 - protein, 8 aa, Artificial Sequence
  Synthetic construct
GFTFSDYY

SEQ ID NO: 19937 - protein, 8 aa, Artificial Sequence
  Synthetic construct
GFTFSSYS

SEQ ID NO: 19938 - protein, 8 aa, Artificial Sequence
  Synthetic construct
GFTFSSYA

SEQ ID NO: 19939 - protein, 8 aa, Artificial Sequence
  Synthetic construct
GYTFTSYA

SEQ ID NO: 19940 - protein, 8 aa, Artificial Sequence
  Synthetic construct
GGTLSSCA

SEQ ID NO: 19941 - protein, 8 aa, Artificial Sequence
  Synthetic construct
GGSFSGYY

SEQ ID NO: 19942 - protein, 8 aa, Artificial Sequence
  Synthetic construct
GFTFSSSW

SEQ ID NO: 19943 - protein, 8 aa, Artificial Sequence
  Synthetic construct
GYTFTSYA

SEQ ID NO: 19944 - protein, 9 aa, Artificial Sequence
  Synthetic construct
GSVSSGNYY

SEQ ID NO: 19945 - protein, 8 aa, Artificial Sequence
  Synthetic construct
GYTFTSHW

SEQ ID NO: 19946 - protein, 8 aa, Artificial Sequence
  Synthetic construct
GFNFSDYY

SEQ ID NO: 19947 - protein, 8 aa, Artificial Sequence
  Synthetic construct
GFSFSNYG

SEQ ID NO: 19948 - protein, 8 aa, Artificial Sequence
  Synthetic construct
GYTFTDYA

SEQ ID NO: 19949 - protein, 10 aa, Artificial Sequence
  Synthetic construct
RGSVTSSNYY

SEQ ID NO: 19950 - protein, 8 aa, Artificial Sequence
  Synthetic construct
GFTFSVYA

SEQ ID NO: 19951 - protein, 8 aa, Artificial Sequence
  Synthetic construct
GYTFTSFA

SEQ ID NO: 19952 - protein, 8 aa, Artificial Sequence
  Synthetic construct
GGTFSNYA

SEQ ID NO: 19953 - protein, 8 aa, Artificial Sequence
  Synthetic construct
GIIVSSNY

SEQ ID NO: 19954 - protein, 8 aa, Artificial Sequence
  Synthetic construct
GFTFDDCA

SEQ ID NO: 19955 - protein, 8 aa, Artificial Sequence
  Synthetic construct
GYTFTSYA

SEQ ID NO: 19956 - protein, 8 aa, Artificial Sequence
  Synthetic construct
GFTFEDFA

SEQ ID NO: 19957 - protein, 8 aa, Artificial Sequence
  Synthetic construct
GGTLSKYF

SEQ ID NO: 19958 - protein, 8 aa, Artificial Sequence
  Synthetic construct
GGTFSNYT

SEQ ID NO: 19959 - protein, 8 aa, Artificial Sequence
  Synthetic construct
GYTFSSYG

SEQ ID NO: 19960 - protein, 8 aa, Artificial Sequence
  Synthetic construct
GGSFNGYY

SEQ ID NO: 19961 - protein, 8 aa, Artificial Sequence
  Synthetic construct
GFTFNNYA

SEQ ID NO: 19962 - protein, 8 aa, Artificial Sequence
  Synthetic construct
GFTFSSYA

SEQ ID NO: 19963 - protein, 8 aa, Artificial Sequence
  Synthetic construct
GFTFSNSS

SEQ ID NO: 19964 - protein, 8 aa, Artificial Sequence
  Synthetic construct
GGTFSSYA

SEQ ID NO: 19965 - protein, 8 aa, Artificial Sequence
  Synthetic construct
GFTFSSFG

SEQ ID NO: 19966 - protein, 8 aa, Artificial Sequence
  Synthetic construct
GGTFSSYA

SEQ ID NO: 19967 - protein, 8 aa, Artificial Sequence
  Synthetic construct
GFTVRSNY

SEQ ID NO: 19968 - protein, 8 aa, Artificial Sequence
  Synthetic construct
GDSISNFY

SEQ ID NO: 19969 - protein, 10 aa, Artificial Sequence
  Synthetic construct
GGSITSGAYY

SEQ ID NO: 19970 - protein, 8 aa, Artificial Sequence
  Synthetic construct
GFTFSSYW

SEQ ID NO: 19971 - protein, 8 aa, Artificial Sequence
  Synthetic construct
GFTFSNFG

SEQ ID NO: 19972 - protein, 8 aa, Artificial Sequence
  Synthetic construct
GFTFSSYG

SEQ ID NO: 19973 - protein, 8 aa, Artificial Sequence
  Synthetic construct
GFIFNIYA

SEQ ID NO: 19974 - protein, 8 aa, Artificial Sequence
  Synthetic construct
GFSVIELS

SEQ ID NO: 19975 - protein, 8 aa, Artificial Sequence
  Synthetic construct
GFTFSAYD

SEQ ID NO: 19976 - protein, 8 aa, Artificial Sequence
  Synthetic construct
GFSISTYD

SEQ ID NO: 19977 - protein, 8 aa, Artificial Sequence
  Synthetic construct
GFTFDDYA

SEQ ID NO: 19978 - protein, 8 aa, Artificial Sequence
  Synthetic construct
GFSVSSNY

SEQ ID NO: 19979 - protein, 10 aa, Artificial Sequence
  Synthetic construct
GFSLSTSGVG

SEQ ID NO: 19980 - protein, 8 aa, Artificial Sequence
  Synthetic construct
GFTFSSDD

SEQ ID NO: 19981 - protein, 8 aa, Artificial Sequence
  Synthetic construct
EYTFTHYA

SEQ ID NO: 19982 - protein, 8 aa, Artificial Sequence
  Synthetic construct
GYTFTSHG

SEQ ID NO: 19983 - protein, 8 aa, Artificial Sequence
  Synthetic construct
GFTFSTYD

SEQ ID NO: 19984 - protein, 8 aa, Artificial Sequence
  Synthetic construct
GFTFSGYG

SEQ ID NO: 19985 - protein, 10 aa, Artificial Sequence
  Synthetic construct
GFSLSTSGVG

SEQ ID NO: 19986 - protein, 8 aa, Artificial Sequence
  Synthetic construct
GYTFTSYG

SEQ ID NO: 19987 - protein, 8 aa, Artificial Sequence
  Synthetic construct
GYTFTSYG

SEQ ID NO: 19988 - protein, 8 aa, Artificial Sequence
  Synthetic construct
GDSISGYY

SEQ ID NO: 19989 - protein, 8 aa, Artificial Sequence
  Synthetic construct
RFNFSSYT

SEQ ID NO: 19990 - protein, 8 aa, Artificial Sequence
  Synthetic construct
GYIFTDHY

SEQ ID NO: 19991 - protein, 8 aa, Artificial Sequence
  Synthetic construct
GFTFRSYW

SEQ ID NO: 19992 - protein, 8 aa, Artificial Sequence
  Synthetic construct
RYTFTTYA

SEQ ID NO: 19993 - protein, 8 aa, Artificial Sequence
  Synthetic construct
GFTFSDHY

SEQ ID NO: 19994 - protein, 8 aa, Artificial Sequence
  Synthetic construct
GFTFSTYG

SEQ ID NO: 19995 - protein, 8 aa, Artificial Sequence
  Synthetic construct
GYTLTELS

SEQ ID NO: 19996 - protein, 8 aa, Artificial Sequence
  Synthetic construct
GYSLAEVS

SEQ ID NO: 19997 - protein, 8 aa, Artificial Sequence
  Synthetic construct
GFSFSTYG

SEQ ID NO: 19998 - protein, 8 aa, Artificial Sequence
  Synthetic construct
GFTLSSYW

SEQ ID NO: 19999 - protein, 8 aa, Artificial Sequence
  Synthetic construct
GYTFTTYA

SEQ ID NO: 20000 - protein, 8 aa, Artificial Sequence
  Synthetic construct
GYTFTKYA

SEQ ID NO: 20001 - protein, 8 aa, Artificial Sequence
  Synthetic construct
GYTFTSYA

SEQ ID NO: 20002 - protein, 8 aa, Artificial Sequence
  Synthetic construct
GYTFTNYY

SEQ ID NO: 20003 - protein, 8 aa, Artificial Sequence
  Synthetic construct
GFIFSSYA

SEQ ID NO: 20004 - protein, 8 aa, Artificial Sequence
  Synthetic construct
GYIFTSYD

SEQ ID NO: 20005 - protein, 8 aa, Artificial Sequence
  Synthetic construct
GFTFSSYS

SEQ ID NO: 20006 - protein, 8 aa, Artificial Sequence
  Synthetic construct
GGSISSYS

SEQ ID NO: 20007 - protein, 8 aa, Artificial Sequence
  Synthetic construct
GFTFSNYA

SEQ ID NO: 20008 - protein, 8 aa, Artificial Sequence
  Synthetic construct
GFTFTTYA

SEQ ID NO: 20009 - protein, 8 aa, Artificial Sequence
  Synthetic construct
GFTFSGYG

SEQ ID NO: 20010 - protein, 10 aa, Artificial Sequence
  Synthetic construct
RFSLSNARMG

SEQ ID NO: 20011 - protein, 8 aa, Artificial Sequence
  Synthetic construct
GFSFSTYA

SEQ ID NO: 20012 - protein, 10 aa, Artificial Sequence
  Synthetic construct
NDSITRSTYY

SEQ ID NO: 20013 - protein, 8 aa, Artificial Sequence
  Synthetic construct
GFTFSNAW

SEQ ID NO: 20014 - protein, 8 aa, Artificial Sequence
  Synthetic construct
GYTISSYV

SEQ ID NO: 20015 - protein, 8 aa, Artificial Sequence
  Synthetic construct
GYTFIGYY

SEQ ID NO: 20016 - protein, 8 aa, Artificial Sequence
  Synthetic construct
GFTFRSYW

SEQ ID NO: 20017 - protein, 8 aa, Artificial Sequence
  Synthetic construct
GYMLTELF

SEQ ID NO: 20018 - protein, 8 aa, Artificial Sequence
  Synthetic construct
GFTFSSYD

SEQ ID NO: 20019 - protein, 8 aa, Artificial Sequence
  Synthetic construct
GFTFSSYA

SEQ ID NO: 20020 - protein, 8 aa, Artificial Sequence
  Synthetic construct
GGTFSSHA

SEQ ID NO: 20021 - protein, 8 aa, Artificial Sequence
  Synthetic construct
GGTFSSYA

SEQ ID NO: 20022 - protein, 3 aa, Artificial Sequence
  Synthetic construct
  MISC_FEATURE (1)..(3): X can be any amino acid
XXX

SEQ ID NO: 20023 - protein, 8 aa, Artificial Sequence
  Synthetic construct
GFTFGSFW

SEQ ID NO: 20024 - protein, 8 aa, Artificial Sequence
  Synthetic construct
GYTFTSYP

SEQ ID NO: 20025 - protein, 8 aa, Artificial Sequence
  Synthetic construct
GGSFSDHY

SEQ ID NO: 20026 - protein, 8 aa, Artificial Sequence
  Synthetic construct
GFNFRLYD

SEQ ID NO: 20027 - protein, 8 aa, Artificial Sequence
  Synthetic construct
GYTFTSYA

SEQ ID NO: 20028 - protein, 8 aa, Artificial Sequence
  Synthetic construct
GFTFSSFG

SEQ ID NO: 20029 - protein, 8 aa, Artificial Sequence
  Synthetic construct
GFTVSSNY

SEQ ID NO: 20030 - protein, 8 aa, Artificial Sequence
  Synthetic construct
GGSLSTKG

SEQ ID NO: 20031 - protein, 10 aa, Artificial Sequence
  Synthetic construct
NGSISSSSYY

SEQ ID NO: 20032 - protein, 8 aa, Artificial Sequence
  Synthetic construct
GFTFSDYA

SEQ ID NO: 20033 - protein, 10 aa, Artificial Sequence
  Synthetic construct
GFSLSTSGLC

SEQ ID NO: 20034 - protein, 10 aa, Artificial Sequence
  Synthetic construct
GGSISSGSYY

SEQ ID NO: 20035 - protein, 8 aa, Artificial Sequence
  Synthetic construct
GYSFTSNW

SEQ ID NO: 20036 - protein, 8 aa, Artificial Sequence
  Synthetic construct
GFTFSSHG

SEQ ID NO: 20037 - protein, 8 aa, Artificial Sequence
  Synthetic construct
GFTFSNAW

SEQ ID NO: 20038 - protein, 8 aa, Artificial Sequence
  Synthetic construct
GYDFTNYW

SEQ ID NO: 20039 - protein, 8 aa, Artificial Sequence
  Synthetic construct
GFTFSSYG

SEQ ID NO: 20040 - protein, 10 aa, Artificial Sequence
  Synthetic construct
GGSISSGSYY

SEQ ID NO: 20041 - protein, 10 aa, Artificial Sequence
  Synthetic construct
GGSVKGDSYC

SEQ ID NO: 20042 - protein, 8 aa, Artificial Sequence
  Synthetic construct
GFTFSHYS

SEQ ID NO: 20043 - protein, 8 aa, Artificial Sequence
  Synthetic construct
GFTFSKYN

SEQ ID NO: 20044 - protein, 10 aa, Artificial Sequence
  Synthetic construct
GGSITRNSFF

SEQ ID NO: 20045 - protein, 8 aa, Artificial Sequence
  Synthetic construct
GFTFSNYG

SEQ ID NO: 20046 - protein, 8 aa, Artificial Sequence
  Synthetic construct
GLTVSSNY

SEQ ID NO: 20047 - protein, 10 aa, Artificial Sequence
  Synthetic construct
DGSINSSSHY

SEQ ID NO: 20048 - protein, 8 aa, Artificial Sequence
  Synthetic construct
GFTFSSSA

SEQ ID NO: 20049 - protein, 8 aa, Artificial Sequence
  Synthetic construct
GFTVSRNY

SEQ ID NO: 20050 - protein, 10 aa, Artificial Sequence
  Synthetic construct
GGSISSSSYY

SEQ ID NO: 20051 - protein, 8 aa, Artificial Sequence
  Synthetic construct
EFTFSSYG

SEQ ID NO: 20052 - protein, 8 aa, Artificial Sequence
  Synthetic construct
GGTFSRYA

SEQ ID NO: 20053 - protein, 8 aa, Artificial Sequence
  Synthetic construct
GGSLSNYY

SEQ ID NO: 20054 - protein, 8 aa, Artificial Sequence
  Synthetic construct
GFTFNIYP

SEQ ID NO: 20055 - protein, 8 aa, Artificial Sequence
  Synthetic construct
GYTLTELS

SEQ ID NO: 20056 - protein, 8 aa, Artificial Sequence
  Synthetic construct
GGTFGSYA

SEQ ID NO: 20057 - protein, 8 aa, Artificial Sequence
  Synthetic construct
EFTFSDYY

SEQ ID NO: 20058 - protein, 8 aa, Artificial Sequence
  Synthetic construct
GFTFSIFA

SEQ ID NO: 20059 - protein, 8 aa, Artificial Sequence
  Synthetic construct
GGSISSYY

SEQ ID NO: 20060 - protein, 8 aa, Artificial Sequence
  Synthetic construct
GFTFRSHW

SEQ ID NO: 20061 - protein, 10 aa, Artificial Sequence
  Synthetic construct
GDTVSSDTAS

SEQ ID NO: 20062 - protein, 8 aa, Artificial Sequence
  Synthetic construct
GYTLTSYY

SEQ ID NO: 20063 - protein, 8 aa, Artificial Sequence
  Synthetic construct
GFTFGSFG

SEQ ID NO: 20064 - protein, 8 aa, Artificial Sequence
  Synthetic construct
GYTFTSYY

SEQ ID NO: 20065 - protein, 8 aa, Artificial Sequence
  Synthetic construct
GFTFNSYS

SEQ ID NO: 20066 - protein, 10 aa, Artificial Sequence
  Synthetic construct
GGSISSGSYY

SEQ ID NO: 20067 - protein, 8 aa, Artificial Sequence
  Synthetic construct
GFTVSVNY

SEQ ID NO: 20068 - protein, 8 aa, Artificial Sequence
  Synthetic construct
GGTFSSYA

SEQ ID NO: 20069 - protein, 8 aa, Artificial Sequence
  Synthetic construct
EYTFTNFE

SEQ ID NO: 20070 - protein, 8 aa, Artificial Sequence
  Synthetic construct
GFTFSSSG

SEQ ID NO: 20071 - protein, 8 aa, Artificial Sequence
  Synthetic construct
GGSFSGHY

SEQ ID NO: 20072 - protein, 8 aa, Artificial Sequence
  Synthetic construct
GFTFADAW

SEQ ID NO: 20073 - protein, 10 aa, Artificial Sequence
  Synthetic construct
GGSISSSSYY

SEQ ID NO: 20074 - protein, 10 aa, Artificial Sequence
  Synthetic construct
GGSITSGGYY

SEQ ID NO: 20075 - protein, 8 aa, Artificial Sequence
  Synthetic construct
GFTFSSYG

SEQ ID NO: 20076 - protein, 8 aa, Artificial Sequence
  Synthetic construct
GLTFRSYD

SEQ ID NO: 20077 - protein, 8 aa, Artificial Sequence
  Synthetic construct
GYTLPELS

SEQ ID NO: 20078 - protein, 8 aa, Artificial Sequence
  Synthetic construct
GFTFSSYT

SEQ ID NO: 20079 - protein, 8 aa, Artificial Sequence
  Synthetic construct
GFIFNSYW

SEQ ID NO: 20080 - protein, 10 aa, Artificial Sequence
  Synthetic construct
GGSITSSSYY

SEQ ID NO: 20081 - protein, 8 aa, Artificial Sequence
  Synthetic construct
GFTFSTYG

SEQ ID NO: 20082 - protein, 10 aa, Artificial Sequence
  Synthetic construct
GGFISSDGYY

SEQ ID NO: 20083 - protein, 8 aa, Artificial Sequence
  Synthetic construct
AFTFSDYY

SEQ ID NO: 20084 - protein, 8 aa, Artificial Sequence
  Synthetic construct
GGTFSSYA

SEQ ID NO: 20085 - protein, 8 aa, Artificial Sequence
  Synthetic construct
GGSFSGYS

SEQ ID NO: 20086 - protein, 10 aa, Artificial Sequence
  Synthetic construct
GFSLDTIGVA

SEQ ID NO: 20087 - protein, 8 aa, Artificial Sequence
  Synthetic construct
GFTFSTFA

SEQ ID NO: 20088 - protein, 8 aa, Artificial Sequence
  Synthetic construct
GFIFRTYA

SEQ ID NO: 20089 - protein, 8 aa, Artificial Sequence
  Synthetic construct
GFTFSSYI

SEQ ID NO: 20090 - protein, 8 aa, Artificial Sequence
  Synthetic construct
GGTFSNYA

SEQ ID NO: 20091 - protein, 8 aa, Artificial Sequence
  Synthetic construct
GYTFTSFD

SEQ ID NO: 20092 - protein, 8 aa, Artificial Sequence
  Synthetic construct
GFTFSSYA

SEQ ID NO: 20093 - protein, 8 aa, Artificial Sequence
  Synthetic construct
GFTFSSYA

SEQ ID NO: 20094 - protein, 10 aa, Artificial Sequence
  Synthetic construct
GDSISGSAYF

SEQ ID NO: 20095 - protein, 8 aa, Artificial Sequence
  Synthetic construct
GYTFTGYY

SEQ ID NO: 20096 - protein, 10 aa, Artificial Sequence
  Synthetic construct
GFSLTTSGVG

SEQ ID NO: 20097 - protein, 8 aa, Artificial Sequence
  Synthetic construct
GITFKDYG

SEQ ID NO: 20098 - protein, 8 aa, Artificial Sequence
  Synthetic construct
GGTFSSYT

SEQ ID NO: 20099 - protein, 8 aa, Artificial Sequence
  Synthetic construct
GYTLIELP

SEQ ID NO: 20100 - protein, 8 aa, Artificial Sequence
  Synthetic construct
GYTLPELS

SEQ ID NO: 20101 - protein, 8 aa, Artificial Sequence
  Synthetic construct
GYTFTSYA

SEQ ID NO: 20102 - protein, 8 aa, Artificial Sequence
  Synthetic construct
GYTFTSFA

SEQ ID NO: 20103 - protein, 8 aa, Artificial Sequence
  Synthetic construct
GYTFISHY

SEQ ID NO: 20104 - protein, 8 aa, Artificial Sequence
  Synthetic construct
GFIFSTYG

SEQ ID NO: 20105 - protein, 8 aa, Artificial Sequence
  Synthetic construct
GFNFANAW

SEQ ID NO: 20106 - protein, 8 aa, Artificial Sequence
  Synthetic construct
GFTFSDYS

SEQ ID NO: 20107 - protein, 8 aa, Artificial Sequence
  Synthetic construct
GGTFNTYA

SEQ ID NO: 20108 - protein, 8 aa, Artificial Sequence
  Synthetic construct
GFTVSSNY

SEQ ID NO: 20109 - protein, 10 aa, Artificial Sequence
  Synthetic construct
GGSISSSDYY

SEQ ID NO: 20110 - protein, 8 aa, Artificial Sequence
  Synthetic construct
GYTFTNYA

SEQ ID NO: 20111 - protein, 10 aa, Artificial Sequence
  Synthetic construct
GGSISSSSYY

SEQ ID NO: 20112 - protein, 8 aa, Artificial Sequence
  Synthetic construct
GYTFTDYA

SEQ ID NO: 20113 - protein, 8 aa, Artificial Sequence
  Synthetic construct
GGSFSAYY

SEQ ID NO: 20114 - protein, 8 aa, Artificial Sequence
  Synthetic construct
GFTFSSYG

SEQ ID NO: 20115 - protein, 8 aa, Artificial Sequence
  Synthetic construct
GFTVSSNY

SEQ ID NO: 20116 - protein, 8 aa, Artificial Sequence
  Synthetic construct
GYTFTTYP

SEQ ID NO: 20117 - protein, 8 aa, Artificial Sequence
  Synthetic construct
GFTFSDYD

SEQ ID NO: 20118 - protein, 8 aa, Artificial Sequence
  Synthetic construct
GYTFTNYY

SEQ ID NO: 20119 - protein, 8 aa, Artificial Sequence
  Synthetic construct
GFTFSSSA

SEQ ID NO: 20120 - protein, 10 aa, Artificial Sequence
  Synthetic construct
GGSISSSSYY

SEQ ID NO: 20121 - protein, 8 aa, Artificial Sequence
  Synthetic construct
EYTLTEFS

SEQ ID NO: 20122 - protein, 8 aa, Artificial Sequence
  Synthetic construct
GYTFTDYY

SEQ ID NO: 20123 - protein, 3 aa, Artificial Sequence
  Synthetic construct
  MISC_FEATURE (1)..(3): X can be any amino acid
XXX

SEQ ID NO: 20124 - protein, 8 aa, Artificial Sequence
  Synthetic construct
GFTFSDYY

SEQ ID NO: 20125 - protein, 8 aa, Artificial Sequence
  Synthetic construct
GFAFRSYW

SEQ ID NO: 20126 - protein, 8 aa, Artificial Sequence
  Synthetic construct
GVTVSRNY

SEQ ID NO: 20127 - protein, 10 aa, Artificial Sequence
  Synthetic construct
GFSFNTSGVG

SEQ ID NO: 20128 - protein, 8 aa, Artificial Sequence
  Synthetic construct
GYTFSNYV

SEQ ID NO: 20129 - protein, 10 aa, Artificial Sequence
  Synthetic construct
GGSISSSSYY

SEQ ID NO: 20130 - protein, 8 aa, Artificial Sequence
  Synthetic construct
GGTFSSHS

SEQ ID NO: 20131 - protein, 8 aa, Artificial Sequence
  Synthetic construct
GFTFSSYA

SEQ ID NO: 20132 - protein, 10 aa, Artificial Sequence
  Synthetic construct
GGSMNSTSFY

SEQ ID NO: 20133 - protein, 8 aa, Artificial Sequence
  Synthetic construct
GFTFSDYY

SEQ ID NO: 20134 - protein, 8 aa, Artificial Sequence
  Synthetic construct
GYTFTNYA

SEQ ID NO: 20135 - protein, 8 aa, Artificial Sequence
  Synthetic construct
GGSLSGYF

SEQ ID NO: 20136 - protein, 8 aa, Artificial Sequence
  Synthetic construct
GGTFSSYA

SEQ ID NO: 20137 - protein, 8 aa, Artificial Sequence
  Synthetic construct
GYSFSSYW

SEQ ID NO: 20138 - protein, 8 aa, Artificial Sequence
  Synthetic construct
GGSISSYY

SEQ ID NO: 20139 - protein, 8 aa, Artificial Sequence
  Synthetic construct
GFTFSSYA

SEQ ID NO: 20140 - protein, 8 aa, Artificial Sequence
  Synthetic construct
GFTFSSYA

SEQ ID NO: 20141 - protein, 8 aa, Artificial Sequence
  Synthetic construct
GFIFSTFA

SEQ ID NO: 20142 - protein, 8 aa, Artificial Sequence
  Synthetic construct
GFTFEDFD

SEQ ID NO: 20143 - protein, 8 aa, Artificial Sequence
  Synthetic construct
GGTFSDYP

SEQ ID NO: 20144 - protein, 8 aa, Artificial Sequence
  Synthetic construct
GGTFSSHA

SEQ ID NO: 20145 - protein, 8 aa, Artificial Sequence
  Synthetic construct
GYTFTSNW

SEQ ID NO: 20146 - protein, 8 aa, Artificial Sequence
  Synthetic construct
GYTFTNYY

SEQ ID NO: 20147 - protein, 8 aa, Artificial Sequence
  Synthetic construct
GGSFSGYY

SEQ ID NO: 20148 - protein, 8 aa, Artificial Sequence
  Synthetic construct
GITFINYA

SEQ ID NO: 20149 - protein, 8 aa, Artificial Sequence
  Synthetic construct
GFTFTNYG

SEQ ID NO: 20150 - protein, 8 aa, Artificial Sequence
  Synthetic construct
GYTFTSYA

SEQ ID NO: 20151 - protein, 8 aa, Artificial Sequence
  Synthetic construct
EFTVSTNY

SEQ ID NO: 20152 - protein, 8 aa, Artificial Sequence
  Synthetic construct
GGTFSSYS

SEQ ID NO: 20153 - protein, 8 aa, Artificial Sequence
  Synthetic construct
GFIFRTYA

SEQ ID NO: 20154 - protein, 8 aa, Artificial Sequence
  Synthetic construct
GFTFNRSS

SEQ ID NO: 20155 - protein, 8 aa, Artificial Sequence
  Synthetic construct
GYTFTTYW

SEQ ID NO: 20156 - protein, 8 aa, Artificial Sequence
  Synthetic construct
GGSFSDYY

SEQ ID NO: 20157 - protein, 8 aa, Artificial Sequence
  Synthetic construct
GFTFNDYA

SEQ ID NO: 20158 - protein, 8 aa, Artificial Sequence
  Synthetic construct
GYSFTRYG

SEQ ID NO: 20159 - protein, 10 aa, Artificial Sequence
  Synthetic construct
GGSISSSTYF

SEQ ID NO: 20160 - protein, 8 aa, Artificial Sequence
  Synthetic construct
GYTLIELS

SEQ ID NO: 20161 - protein, 8 aa, Artificial Sequence
  Synthetic construct
GFTFTNYA

SEQ ID NO: 20162 - protein, 8 aa, Artificial Sequence
  Synthetic construct
GYSFADYW

SEQ ID NO: 20163 - protein, 8 aa, Artificial Sequence
  Synthetic construct
GGSISSYY

SEQ ID NO: 20164 - protein, 8 aa, Artificial Sequence
  Synthetic construct
GVSLTRNT

SEQ ID NO: 20165 - protein, 8 aa, Artificial Sequence
  Synthetic construct
GYTFTHYA

SEQ ID NO: 20166 - protein, 8 aa, Artificial Sequence
  Synthetic construct
GFTFSNYY

SEQ ID NO: 20167 - protein, 8 aa, Artificial Sequence
  Synthetic construct
GGTFSSYP

SEQ ID NO: 20168 - protein, 10 aa, Artificial Sequence
  Synthetic construct
GFSLSTSGMC

SEQ ID NO: 20169 - protein, 8 aa, Artificial Sequence
  Synthetic construct
GFTFSNYG

SEQ ID NO: 20170 - protein, 8 aa, Artificial Sequence
  Synthetic construct
GYTLTELS

SEQ ID NO: 20171 - protein, 8 aa, Artificial Sequence
  Synthetic construct
GYTLTNYA

SEQ ID NO: 20172 - protein, 8 aa, Artificial Sequence
  Synthetic construct
GFIVSSNY

SEQ ID NO: 20173 - protein, 8 aa, Artificial Sequence
  Synthetic construct
GITVSTNY

SEQ ID NO: 20174 - protein, 8 aa, Artificial Sequence
  Synthetic construct
GFTYSTYW

SEQ ID NO: 20175 - protein, 8 aa, Artificial Sequence
  Synthetic construct
GFTFDDYA

SEQ ID NO: 20176 - protein, 8 aa, Artificial Sequence
  Synthetic construct
GGTFSSYA

SEQ ID NO: 20177 - protein, 8 aa, Artificial Sequence
  Synthetic construct
GGSFSSTT

SEQ ID NO: 20178 - protein, 8 aa, Artificial Sequence
  Synthetic construct
GFTFDDYA

SEQ ID NO: 20179 - protein, 8 aa, Artificial Sequence
  Synthetic construct
GASISSHY

SEQ ID NO: 20180 - protein, 8 aa, Artificial Sequence
  Synthetic construct
GFTFNTYA

SEQ ID NO: 20181 - protein, 8 aa, Artificial Sequence
  Synthetic construct
GFTVSLNY

SEQ ID NO: 20182 - protein, 8 aa, Artificial Sequence
  Synthetic construct
GYTFTSYG

SEQ ID NO: 20183 - protein, 8 aa, Artificial Sequence
  Synthetic construct
GYRFTSYW

SEQ ID NO: 20184 - protein, 10 aa, Artificial Sequence
  Synthetic construct
GGSIGSGRYY

SEQ ID NO: 20185 - protein, 8 aa, Artificial Sequence
  Synthetic construct
GFTLSSYW

SEQ ID NO: 20186 - protein, 10 aa, Artificial Sequence
  Synthetic construct
GGSISSRSYY

SEQ ID NO: 20187 - protein, 8 aa, Artificial Sequence
  Synthetic construct
GYTLTELS

SEQ ID NO: 20188 - protein, 8 aa, Artificial Sequence
  Synthetic construct
GFTFSTYA

SEQ ID NO: 20189 - protein, 8 aa, Artificial Sequence
  Synthetic construct
GYPFTMYA

SEQ ID NO: 20190 - protein, 8 aa, Artificial Sequence
  Synthetic construct
GYTFTSNY

SEQ ID NO: 20191 - protein, 8 aa, Artificial Sequence
  Synthetic construct
GYNFTSYW

SEQ ID NO: 20192 - protein, 8 aa, Artificial Sequence
  Synthetic construct
GFTLNQYG

SEQ ID NO: 20193 - protein, 10 aa, Artificial Sequence
  Synthetic construct
GGSISSSSSY

SEQ ID NO: 20194 - protein, 10 aa, Artificial Sequence
  Synthetic construct
GGSISSGSYY

SEQ ID NO: 20195 - protein, 9 aa, Artificial Sequence
  Synthetic construct
GGSISSTNW

SEQ ID NO: 20196 - protein, 8 aa, Artificial Sequence
  Synthetic construct
GGSIASYY

SEQ ID NO: 20197 - protein, 8 aa, Artificial Sequence
  Synthetic construct
GFTFEDFD

SEQ ID NO: 20198 - protein, 8 aa, Artificial Sequence
  Synthetic construct
GFTFSNYA

SEQ ID NO: 20199 - protein, 8 aa, Artificial Sequence
  Synthetic construct
GFTFSNYA

SEQ ID NO: 20200 - protein, 8 aa, Artificial Sequence
  Synthetic construct
GFTFSNYA

SEQ ID NO: 20201 - protein, 8 aa, Artificial Sequence
  Synthetic construct
GFTFSTYA

SEQ ID NO: 20202 - protein, 8 aa, Artificial Sequence
  Synthetic construct
GVTFSSYA

SEQ ID NO: 20203 - protein, 8 aa, Artificial Sequence
  Synthetic construct
GYSFTNYW

SEQ ID NO: 20204 - protein, 8 aa, Artificial Sequence
  Synthetic construct
GFTVSGTS

SEQ ID NO: 20205 - protein, 10 aa, Artificial Sequence
  Synthetic construct
GFSLSTSGVG

SEQ ID NO: 20206 - protein, 8 aa, Artificial Sequence
  Synthetic construct
GFTFTTYG

SEQ ID NO: 20207 - protein, 8 aa, Artificial Sequence
  Synthetic construct
GYNFTTDW

SEQ ID NO: 20208 - protein, 8 aa, Artificial Sequence
  Synthetic construct
GFTFSSYG

SEQ ID NO: 20209 - protein, 8 aa, Artificial Sequence
  Synthetic construct
GFTVSNNY

SEQ ID NO: 20210 - protein, 10 aa, Artificial Sequence
  Synthetic construct
GGSISSSNYY

SEQ ID NO: 20211 - protein, 8 aa, Artificial Sequence
  Synthetic construct
GLTFSSYS

SEQ ID NO: 20212 - protein, 8 aa, Artificial Sequence
  Synthetic construct
GFTVSSNY

SEQ ID NO: 20213 - protein, 8 aa, Artificial Sequence
  Synthetic construct
GFTFSDYS

SEQ ID NO: 20214 - protein, 8 aa, Artificial Sequence
  Synthetic construct
GFTFSRYT

SEQ ID NO: 20215 - protein, 8 aa, Artificial Sequence
  Synthetic construct
GFTFSSYT

SEQ ID NO: 20216 - protein, 9 aa, Artificial Sequence
  Synthetic construct
GDSISSNIW

SEQ ID NO: 20217 - protein, 8 aa, Artificial Sequence
  Synthetic construct
GFTFSSSW

SEQ ID NO: 20218 - protein, 8 aa, Artificial Sequence
  Synthetic construct
GFTFNSYA

SEQ ID NO: 20219 - protein, 8 aa, Artificial Sequence
  Synthetic construct
GFTFSYYG

SEQ ID NO: 20220 - protein, 8 aa, Artificial Sequence
  Synthetic construct
GFTFSDYA

SEQ ID NO: 20221 - protein, 10 aa, Artificial Sequence
  Synthetic construct
GFSLSNSGVA

SEQ ID NO: 20222 - protein, 8 aa, Artificial Sequence
  Synthetic construct
GYTFPNYC

SEQ ID NO: 20223 - protein, 8 aa, Artificial Sequence
  Synthetic construct
GFIFRTYA

SEQ ID NO: 20224 - protein, 8 aa, Artificial Sequence
  Synthetic construct
DGSISSYY

SEQ ID NO: 20225 - protein, 8 aa, Artificial Sequence
  Synthetic construct
GFTFSTYA

SEQ ID NO: 20226 - protein, 8 aa, Artificial Sequence
  Synthetic construct
GGTFGSYA

SEQ ID NO: 20227 - protein, 8 aa, Artificial Sequence
  Synthetic construct
GFTFSTYA

SEQ ID NO: 20228 - protein, 8 aa, Artificial Sequence
  Synthetic construct
GFTVSSNY

SEQ ID NO: 20229 - protein, 8 aa, Artificial Sequence
  Synthetic construct
GGSFRAYY

SEQ ID NO: 20230 - protein, 8 aa, Artificial Sequence
  Synthetic construct
GYMFTNYY

SEQ ID NO: 20231 - protein, 8 aa, Artificial Sequence
  Synthetic construct
GFSFSNYG

SEQ ID NO: 20232 - protein, 10 aa, Artificial Sequence
  Synthetic construct
GGSISSSSYY

SEQ ID NO: 20233 - protein, 8 aa, Artificial Sequence
  Synthetic construct
GFMFKNFG

SEQ ID NO: 20234 - protein, 8 aa, Artificial Sequence
  Synthetic construct
GFTFSSSW

SEQ ID NO: 20235 - protein, 8 aa, Artificial Sequence
  Synthetic construct
GFTLSSYA

SEQ ID NO: 20236 - protein, 10 aa, Artificial Sequence
  Synthetic construct
GGSVSSGSHY

SEQ ID NO: 20237 - protein, 8 aa, Artificial Sequence
  Synthetic construct
GFTVSANY

SEQ ID NO: 20238 - protein, 10 aa, Artificial Sequence
  Synthetic construct
GDSIISNTYY

SEQ ID NO: 20239 - protein, 8 aa, Artificial Sequence
  Synthetic construct
GYTFTTYW

SEQ ID NO: 20240 - protein, 8 aa, Artificial Sequence
  Synthetic construct
GFTFTTYA

SEQ ID NO: 20241 - protein, 8 aa, Artificial Sequence
  Synthetic construct
GFTFSSYS

SEQ ID NO: 20242 - protein, 10 aa, Artificial Sequence
  Synthetic construct
GGSVSSASYY

SEQ ID NO: 20243 - protein, 8 aa, Artificial Sequence
  Synthetic construct
EFTFSDYS

SEQ ID NO: 20244 - protein, 8 aa, Artificial Sequence
  Synthetic construct
GYTLTEFS

SEQ ID NO: 20245 - protein, 8 aa, Artificial Sequence
  Synthetic construct
GFTFSDYS

SEQ ID NO: 20246 - protein, 8 aa, Artificial Sequence
  Synthetic construct
GFSFSDAW

SEQ ID NO: 20247 - protein, 8 aa, Artificial Sequence
  Synthetic construct
GYNFTDYW

SEQ ID NO: 20248 - protein, 3 aa, Artificial Sequence
  Synthetic construct
  MISC_FEATURE (1)..(3): X can be any amino acid
XXX

SEQ ID NO: 20249 - protein, 8 aa, Artificial Sequence
  Synthetic construct
GGTFSTYG

SEQ ID NO: 20250 - protein, 8 aa, Artificial Sequence
  Synthetic construct
GESFSAYY

SEQ ID NO: 20251 - protein, 8 aa, Artificial Sequence
  Synthetic construct
GFTFSDYA

SEQ ID NO: 20252 - protein, 8 aa, Artificial Sequence
  Synthetic construct
GFFFNSYI

SEQ ID NO: 20253 - protein, 10 aa, Artificial Sequence
  Synthetic construct
GGSVSSASYY

SEQ ID NO: 20254 - protein, 8 aa, Artificial Sequence
  Synthetic construct
GFTFSIYA

SEQ ID NO: 20255 - protein, 8 aa, Artificial Sequence
  Synthetic construct
GGSFSGYQ

SEQ ID NO: 20256 - protein, 8 aa, Artificial Sequence
  Synthetic construct
GYSFTSYW

SEQ ID NO: 20257 - protein, 8 aa, Artificial Sequence
  Synthetic construct
GYSFANYG

SEQ ID NO: 20258 - protein, 10 aa, Artificial Sequence
  Synthetic construct
GGSISSNSYY

SEQ ID NO: 20259 - protein, 8 aa, Artificial Sequence
  Synthetic construct
GFTFSSFA

SEQ ID NO: 20260 - protein, 8 aa, Artificial Sequence
  Synthetic construct
GYTFSSYG

SEQ ID NO: 20261 - protein, 8 aa, Artificial Sequence
  Synthetic construct
GGSISSYY

SEQ ID NO: 20262 - protein, 9 aa, Artificial Sequence
  Synthetic construct
GDSISSSNW

SEQ ID NO: 20263 - protein, 8 aa, Artificial Sequence
  Synthetic construct
GGSINNYY

SEQ ID NO: 20264 - protein, 8 aa, Artificial Sequence
  Synthetic construct
GGSFSGHY

SEQ ID NO: 20265 - protein, 8 aa, Artificial Sequence
  Synthetic construct
GLTFGDYY

SEQ ID NO: 20266 - protein, 8 aa, Artificial Sequence
  Synthetic construct
RFTFSSYA

SEQ ID NO: 20267 - protein, 8 aa, Artificial Sequence
  Synthetic construct
GFTFSSSA

SEQ ID NO: 20268 - protein, 8 aa, Artificial Sequence
  Synthetic construct
GFTFRSYA

SEQ ID NO: 20269 - protein, 8 aa, Artificial Sequence
  Synthetic construct
GFTFSSYW

SEQ ID NO: 20270 - protein, 8 aa, Artificial Sequence
  Synthetic construct
GITVSSNY

SEQ ID NO: 20271 - protein, 10 aa, Artificial Sequence
  Synthetic construct
GGSISSGSYY

SEQ ID NO: 20272 - protein, 10 aa, Artificial Sequence
  Synthetic construct
GGSISSGAYY

SEQ ID NO: 20273 - protein, 10 aa, Artificial Sequence
  Synthetic construct
GFSVSSSGVG

SEQ ID NO: 20274 - protein, 8 aa, Artificial Sequence
  Synthetic construct
GITLKDYG

SEQ ID NO: 20275 - protein, 8 aa, Artificial Sequence
  Synthetic construct
GFTFSSYG

SEQ ID NO: 20276 - protein, 8 aa, Artificial Sequence
  Synthetic construct
GFTFDDYA

SEQ ID NO: 20277 - protein, 9 aa, Artificial Sequence
  Synthetic construct
GDSINNDNW

SEQ ID NO: 20278 - protein, 8 aa, Artificial Sequence
  Synthetic construct
GFTFSSYG

SEQ ID NO: 20279 - protein, 10 aa, Artificial Sequence
  Synthetic construct
GFPLSSSGVG

SEQ ID NO: 20280 - protein, 8 aa, Artificial Sequence
  Synthetic construct
GFTFSNYS

SEQ ID NO: 20281 - protein, 8 aa, Artificial Sequence
  Synthetic construct
GFTFSRYV

SEQ ID NO: 20282 - protein, 8 aa, Artificial Sequence
  Synthetic construct
GYTFTSNW

SEQ ID NO: 20283 - protein, 8 aa, Artificial Sequence
  Synthetic construct
GFTLIPYG

SEQ ID NO: 20284 - protein, 8 aa, Artificial Sequence
  Synthetic construct
GFTFEDFD

SEQ ID NO: 20285 - protein, 10 aa, Artificial Sequence
  Synthetic construct
GFSLSTSGVG

SEQ ID NO: 20286 - protein, 8 aa, Artificial Sequence
  Synthetic construct
GLTFRNYG

SEQ ID NO: 20287 - protein, 8 aa, Artificial Sequence
  Synthetic construct
GFTFNIYW

SEQ ID NO: 20288 - protein, 8 aa, Artificial Sequence
  Synthetic construct
GFTFSGSV

SEQ ID NO: 20289 - protein, 8 aa, Artificial Sequence
  Synthetic construct
GYTFNDHG

SEQ ID NO: 20290 - protein, 10 aa, Artificial Sequence
  Synthetic construct
GGSVSSDNYY

SEQ ID NO: 20291 - protein, 8 aa, Artificial Sequence
  Synthetic construct
GYAFTNYW

SEQ ID NO: 20292 - protein, 8 aa, Artificial Sequence
  Synthetic construct
GFTFSNYN

SEQ ID NO: 20293 - protein, 8 aa, Artificial Sequence
  Synthetic construct
GIIVSRNY

SEQ ID NO: 20294 - protein, 10 aa, Artificial Sequence
  Synthetic construct
GFSLSTSGVG

SEQ ID NO: 20295 - protein, 8 aa, Artificial Sequence
  Synthetic construct
GFTVSLNY

SEQ ID NO: 20296 - protein, 10 aa, Artificial Sequence
  Synthetic construct
GGSISSSSYY

SEQ ID NO: 20297 - protein, 8 aa, Artificial Sequence
  Synthetic construct
GYTFTSNW

SEQ ID NO: 20298 - protein, 8 aa, Artificial Sequence
  Synthetic construct
GFTFEDFA

SEQ ID NO: 20299 - protein, 8 aa, Artificial Sequence
  Synthetic construct
GLTFITYA

SEQ ID NO: 20300 - protein, 8 aa, Artificial Sequence
  Synthetic construct
GGTFKTYA

SEQ ID NO: 20301 - protein, 8 aa, Artificial Sequence
  Synthetic construct
GFSFEDFA

SEQ ID NO: 20302 - protein, 8 aa, Artificial Sequence
  Synthetic construct
GYTFSNYY

SEQ ID NO: 20303 - protein, 8 aa, Artificial Sequence
  Synthetic construct
GYTFTDFF

SEQ ID NO: 20304 - protein, 8 aa, Artificial Sequence
  Synthetic construct
GGSISSYY

SEQ ID NO: 20305 - protein, 8 aa, Artificial Sequence
  Synthetic construct
GYILTSHG

SEQ ID NO: 20306 - protein, 8 aa, Artificial Sequence
  Synthetic construct
GFTFSSYA

SEQ ID NO: 20307 - protein, 8 aa, Artificial Sequence
  Synthetic construct
GGSISNYF

SEQ ID NO: 20308 - protein, 10 aa, Artificial Sequence
  Synthetic construct
GFSLSTRGVG

SEQ ID NO: 20309 - protein, 8 aa, Artificial Sequence
  Synthetic construct
GYTFTNYA

SEQ ID NO: 20310 - protein, 8 aa, Artificial Sequence
  Synthetic construct
GGTFSNYT

SEQ ID NO: 20311 - protein, 8 aa, Artificial Sequence
  Synthetic construct
GFTFSKYD

SEQ ID NO: 20312 - protein, 8 aa, Artificial Sequence
  Synthetic construct
GFIFSDYA

SEQ ID NO: 20313 - protein, 8 aa, Artificial Sequence
  Synthetic construct
GFTFNTYN

SEQ ID NO: 20314 - protein, 10 aa, Artificial Sequence
  Synthetic construct
GGSISSSSYY

SEQ ID NO: 20315 - protein, 8 aa, Artificial Sequence
  Synthetic construct
GFTFSSYG

SEQ ID NO: 20316 - protein, 8 aa, Artificial Sequence
  Synthetic construct
GFTFSTYG

SEQ ID NO: 20317 - protein, 8 aa, Artificial Sequence
  Synthetic construct
GYTFSSYA

SEQ ID NO: 20318 - protein, 8 aa, Artificial Sequence
  Synthetic construct
GYTFTSYG

SEQ ID NO: 20319 - protein, 8 aa, Artificial Sequence
  Synthetic construct
GLIFRNYA

SEQ ID NO: 20320 - protein, 8 aa, Artificial Sequence
  Synthetic construct
GFTFSSYG

SEQ ID NO: 20321 - protein, 8 aa, Artificial Sequence
  Synthetic construct
GGTFSSYG

SEQ ID NO: 20322 - protein, 8 aa, Artificial Sequence
  Synthetic construct
GYTFTSYY

SEQ ID NO: 20323 - protein, 8 aa, Artificial Sequence
  Synthetic construct
GFTFDDYG

SEQ ID NO: 20324 - protein, 8 aa, Artificial Sequence
  Synthetic construct
GFTFSSYG

SEQ ID NO: 20325 - protein, 10 aa, Artificial Sequence
  Synthetic construct
GGSISVSIYY

SEQ ID NO: 20326 - protein, 8 aa, Artificial Sequence
  Synthetic construct
GGTFSSYT

SEQ ID NO: 20327 - protein, 8 aa, Artificial Sequence
  Synthetic construct
GDTFTTYY

SEQ ID NO: 20328 - protein, 8 aa, Artificial Sequence
  Synthetic construct
GFTFSTYG

SEQ ID NO: 20329 - protein, 8 aa, Artificial Sequence
  Synthetic construct
GYTFTSYG

SEQ ID NO: 20330 - protein, 8 aa, Artificial Sequence
  Synthetic construct
GGTFSSYA

SEQ ID NO: 20331 - protein, 8 aa, Artificial Sequence
  Synthetic construct
GDTFISHY

SEQ ID NO: 20332 - protein, 8 aa, Artificial Sequence
  Synthetic construct
GFTFNSYA

SEQ ID NO: 20333 - protein, 8 aa, Artificial Sequence
  Synthetic construct
GFTFSNYG

SEQ ID NO: 20334 - protein, 8 aa, Artificial Sequence
  Synthetic construct
GYTFTSNA

SEQ ID NO: 20335 - protein, 8 aa, Artificial Sequence
  Synthetic construct
GFTFSSFG

SEQ ID NO: 20336 - protein, 8 aa, Artificial Sequence
  Synthetic construct
GYTLTELS

SEQ ID NO: 20337 - protein, 10 aa, Artificial Sequence
  Synthetic construct
GFSLDTIGVA

SEQ ID NO: 20338 - protein, 8 aa, Artificial Sequence
  Synthetic construct
GGTFSSYA

SEQ ID NO: 20339 - protein, 10 aa, Artificial Sequence
  Synthetic construct
GGSISSSSYY

SEQ ID NO: 20340 - protein, 8 aa, Artificial Sequence
  Synthetic construct
GYTFTSYG

SEQ ID NO: 20341 - protein, 8 aa, Artificial Sequence
  Synthetic construct
GGSISSYY

SEQ ID NO: 20342 - protein, 8 aa, Artificial Sequence
  Synthetic construct
GFPFNSYD

SEQ ID NO: 20343 - protein, 10 aa, Artificial Sequence
  Synthetic construct
GDSISSGGHY

SEQ ID NO: 20344 - protein, 8 aa, Artificial Sequence
  Synthetic construct
GFTFEDFA

SEQ ID NO: 20345 - protein, 8 aa, Artificial Sequence
  Synthetic construct
GFTFSTYA

SEQ ID NO: 20346 - protein, 8 aa, Artificial Sequence
  Synthetic construct
GFTFISND

SEQ ID NO: 20347 - protein, 8 aa, Artificial Sequence
  Synthetic construct
GFTFSNYA

SEQ ID NO: 20348 - protein, 8 aa, Artificial Sequence
  Synthetic construct
GFTFSSYA

SEQ ID NO: 20349 - protein, 8 aa, Artificial Sequence
  Synthetic construct
GYSFTNYW

SEQ ID NO: 20350 - protein, 8 aa, Artificial Sequence
  Synthetic construct
GFSFSSYW

SEQ ID NO: 20351 - protein, 8 aa, Artificial Sequence
  Synthetic construct
GFTFSSYA

SEQ ID NO: 20352 - protein, 8 aa, Artificial Sequence
  Synthetic construct
GGTFSSYA

SEQ ID NO: 20353 - protein, 8 aa, Artificial Sequence
  Synthetic construct
GFSFGSYG

SEQ ID NO: 20354 - protein, 8 aa, Artificial Sequence
  Synthetic construct
GYTFTSYP

SEQ ID NO: 20355 - protein, 10 aa, Artificial Sequence
  Synthetic construct
GFSLSTSGVG

SEQ ID NO: 20356 - protein, 8 aa, Artificial Sequence
  Synthetic construct
GFSISTYS

SEQ ID NO: 20357 - protein, 9 aa, Artificial Sequence
  Synthetic construct
GGSVNTDHW

SEQ ID NO: 20358 - protein, 8 aa, Artificial Sequence
  Synthetic construct
GFTFSSHG

SEQ ID NO: 20359 - protein, 10 aa, Artificial Sequence
  Synthetic construct
GDSISSGSYY

SEQ ID NO: 20360 - protein, 10 aa, Artificial Sequence
  Synthetic construct
GFSLSTNGVG

SEQ ID NO: 20361 - protein, 8 aa, Artificial Sequence
  Synthetic construct
GYTFTTYA

SEQ ID NO: 20362 - protein, 8 aa, Artificial Sequence
  Synthetic construct
GFIVSRNY

SEQ ID NO: 20363 - protein, 8 aa, Artificial Sequence
  Synthetic construct
GYSFTSYG

SEQ ID NO: 20364 - protein, 10 aa, Artificial Sequence
  Synthetic construct
GDSVSSSSAA

SEQ ID NO: 20365 - protein, 10 aa, Artificial Sequence
  Synthetic construct
GFSLSTSGVG

SEQ ID NO: 20366 - protein, 9 aa, Artificial Sequence
  Synthetic construct
GYSISSGYY

SEQ ID NO: 20367 - protein, 8 aa, Artificial Sequence
  Synthetic construct
GFTVSSNY

SEQ ID NO: 20368 - protein, 8 aa, Artificial Sequence
  Synthetic construct
GFTFSTYS

SEQ ID NO: 20369 - protein, 8 aa, Artificial Sequence
  Synthetic construct
GFTFDDYA

SEQ ID NO: 20370 - protein, 10 aa, Artificial Sequence
  Synthetic construct
GDSISSSGYY

SEQ ID NO: 20371 - protein, 8 aa, Artificial Sequence
  Synthetic construct
GLTLNDYG

SEQ ID NO: 20372 - protein, 8 aa, Artificial Sequence
  Synthetic construct
GYSFISYY

SEQ ID NO: 20373 - protein, 8 aa, Artificial Sequence
  Synthetic construct
GFTFSSYW

SEQ ID NO: 20374 - protein, 10 aa, Artificial Sequence
  Synthetic construct
GFSLSTGGVS

SEQ ID NO: 20375 - protein, 8 aa, Artificial Sequence
  Synthetic construct
GFTFSTYA

SEQ ID NO: 20376 - protein, 8 aa, Artificial Sequence
  Synthetic construct
GFTFSSYG

SEQ ID NO: 20377 - protein, 8 aa, Artificial Sequence
  Synthetic construct
GFTSSSYW

SEQ ID NO: 20378 - protein, 8 aa, Artificial Sequence
  Synthetic construct
GYDFTNYW

SEQ ID NO: 20379 - protein, 10 aa, Artificial Sequence
  Synthetic construct
GFSLSTSGVG

SEQ ID NO: 20380 - protein, 8 aa, Artificial Sequence
  Synthetic construct
GFTFTNAW

SEQ ID NO: 20381 - protein, 8 aa, Artificial Sequence
  Synthetic construct
GFTFADAW

SEQ ID NO: 20382 - protein, 8 aa, Artificial Sequence
  Synthetic construct
GYTLIELP

SEQ ID NO: 20383 - protein, 10 aa, Artificial Sequence
  Synthetic construct
GGSVSTSGHF

SEQ ID NO: 20384 - protein, 8 aa, Artificial Sequence
  Synthetic construct
GYSFTSYW

SEQ ID NO: 20385 - protein, 8 aa, Artificial Sequence
  Synthetic construct
GISLDDYG

SEQ ID NO: 20386 - protein, 8 aa, Artificial Sequence
  Synthetic construct
GYTFTNYA

SEQ ID NO: 20387 - protein, 5 aa, Artificial Sequence
  Synthetic construct
GDDYG

SEQ ID NO: 20388 - protein, 10 aa, Artificial Sequence
  Synthetic construct
GDSISSSGYY

SEQ ID NO: 20389 - protein, 8 aa, Artificial Sequence
  Synthetic construct
GFTFSNYG

SEQ ID NO: 20390 - protein, 8 aa, Artificial Sequence
  Synthetic construct
GFTFEDFD

SEQ ID NO: 20391 - protein, 8 aa, Artificial Sequence
  Synthetic construct
GGTFSSYT

SEQ ID NO: 20392 - protein, 10 aa, Artificial Sequence
  Synthetic construct
GFSLSTSGVG

SEQ ID NO: 20393 - protein, 10 aa, Artificial Sequence
  Synthetic construct
GFSLSTSGVG

SEQ ID NO: 20394 - protein, 10 aa, Artificial Sequence
  Synthetic construct
GASISSSNPY

SEQ ID NO: 20395 - protein, 8 aa, Artificial Sequence
  Synthetic construct
GFSFSDYY

SEQ ID NO: 20396 - protein, 8 aa, Artificial Sequence
  Synthetic construct
GFIFSDHY

SEQ ID NO: 20397 - protein, 8 aa, Artificial Sequence
  Synthetic construct
GFTFSSSA

SEQ ID NO: 20398 - protein, 8 aa, Artificial Sequence
  Synthetic construct
GYSFTSYW

SEQ ID NO: 20399 - protein, 7 aa, Artificial Sequence
  Synthetic construct
IYHSGST

SEQ ID NO: 20400 - protein, 7 aa, Artificial Sequence
  Synthetic construct
IDWGDDK

SEQ ID NO: 20401 - protein, 8 aa, Artificial Sequence
  Synthetic construct
ISFDGSNK

SEQ ID NO: 20402 - protein, 8 aa, Artificial Sequence
  Synthetic construct
IYPDDSHT

SEQ ID NO: 20403 - protein, 8 aa, Artificial Sequence
  Synthetic construct
ISGSGGRT

SEQ ID NO: 20404 - protein, 8 aa, Artificial Sequence
  Synthetic construct
IIPIFGTP

SEQ ID NO: 20405 - protein, 7 aa, Artificial Sequence
  Synthetic construct
INHSGTT

SEQ ID NO: 20406 - protein, 7 aa, Artificial Sequence
  Synthetic construct
MDWDDDK

SEQ ID NO: 20407 - protein, 8 aa, Artificial Sequence
  Synthetic construct
IGSSSSHI

SEQ ID NO: 20408 - protein, 8 aa, Artificial Sequence
  Synthetic construct
FNPSGDST

SEQ ID NO: 20409 - protein, 8 aa, Artificial Sequence
  Synthetic construct
INTNTGNP

SEQ ID NO: 20410 - protein, 8 aa, Artificial Sequence
  Synthetic construct
IIPIFGTT

SEQ ID NO: 20411 - protein, 8 aa, Artificial Sequence
  Synthetic construct
ISYDGSNQ

SEQ ID NO: 20412 - protein, 8 aa, Artificial Sequence
  Synthetic construct
IIPILLIV

SEQ ID NO: 20413 - protein, 8 aa, Artificial Sequence
  Synthetic construct
IIPIFGTT

SEQ ID NO: 20414 - protein, 7 aa, Artificial Sequence
  Synthetic construct
IYYSGST

SEQ ID NO: 20415 - protein, 7 aa, Artificial Sequence
  Synthetic construct
IYSGGNT

SEQ ID NO: 20416 - protein, 7 aa, Artificial Sequence
  Synthetic construct
IYSGGST

SEQ ID NO: 20417 - protein, 7 aa, Artificial Sequence
  Synthetic construct
IYYSGST

SEQ ID NO: 20418 - protein, 7 aa, Artificial Sequence
  Synthetic construct
IYQSGSA

SEQ ID NO: 20419 - protein, 7 aa, Artificial Sequence
  Synthetic construct
IYTSGST

SEQ ID NO: 20420 - protein, 8 aa, Artificial Sequence
  Synthetic construct
IYPGDSET

SEQ ID NO: 20421 - protein, 8 aa, Artificial Sequence
  Synthetic construct
IYPGDSDT

SEQ ID NO: 20422 - protein, 7 aa, Artificial Sequence
  Synthetic construct
ISHSGNT

SEQ ID NO: 20423 - protein, 9 aa, Artificial Sequence
  Synthetic construct
TYYRSKWYN

SEQ ID NO: 20424 - protein, 7 aa, Artificial Sequence
  Synthetic construct
IYWDDDK

SEQ ID NO: 20425 - protein, 7 aa, Artificial Sequence
  Synthetic construct
IFHSGGT

SEQ ID NO: 20426 - protein, 7 aa, Artificial Sequence
  Synthetic construct
VYYSGNT

SEQ ID NO: 20427 - protein, 8 aa, Artificial Sequence
  Synthetic construct
ISSSSSTI

SEQ ID NO: 20428 - protein, 8 aa, Artificial Sequence
  Synthetic construct
FDPEDGET

SEQ ID NO: 20429 - protein, 7 aa, Artificial Sequence
  Synthetic construct
LYYSGNT

SEQ ID NO: 20430 - protein, 7 aa, Artificial Sequence
  Synthetic construct
IYYTGRT

SEQ ID NO: 20431 - protein, 8 aa, Artificial Sequence
  Synthetic construct
MSGSGGST

SEQ ID NO: 20432 - protein, 7 aa, Artificial Sequence
  Synthetic construct
IYYSGST

SEQ ID NO: 20433 - protein, 8 aa, Artificial Sequence
  Synthetic construct
IYPGDSDT

SEQ ID NO: 20434 - protein, 7 aa, Artificial Sequence
  Synthetic construct
ISSTGGP

SEQ ID NO: 20435 - protein, 8 aa, Artificial Sequence
  Synthetic construct
ISAFNGNT

SEQ ID NO: 20436 - protein, 8 aa, Artificial Sequence
  Synthetic construct
IWFDGSNK

SEQ ID NO: 20437 - protein, 7 aa, Artificial Sequence
  Synthetic construct
IYWDDDK

SEQ ID NO: 20438 - protein, 8 aa, Artificial Sequence
  Synthetic construct
MWYVGNNK

SEQ ID NO: 20439 - protein, 8 aa, Artificial Sequence
  Synthetic construct
ISAYNANT

SEQ ID NO: 20440 - protein, 7 aa, Artificial Sequence
  Synthetic construct
FYGGGST

SEQ ID NO: 20441 - protein, 7 aa, Artificial Sequence
  Synthetic construct
IYSGGST

SEQ ID NO: 20442 - protein, 8 aa, Artificial Sequence
  Synthetic construct
VNPISANT

SEQ ID NO: 20443 - protein, 8 aa, Artificial Sequence
  Synthetic construct
ISYDGSVQ

SEQ ID NO: 20444 - protein, 7 aa, Artificial Sequence
  Synthetic construct
IYSGGNT

SEQ ID NO: 20445 - protein, 8 aa, Artificial Sequence
  Synthetic construct
FDPEEGET

SEQ ID NO: 20446 - protein, 7 aa, Artificial Sequence
  Synthetic construct
IYYSGNT

SEQ ID NO: 20447 - protein, 7 aa, Artificial Sequence
  Synthetic construct
INHSGNT

SEQ ID NO: 20448 - protein, 8 aa, Artificial Sequence
  Synthetic construct
IYPGDSNT

SEQ ID NO: 20449 - protein, 8 aa, Artificial Sequence
  Synthetic construct
INPYNGST

SEQ ID NO: 20450 - protein, 8 aa, Artificial Sequence
  Synthetic construct
INTNTGNP

SEQ ID NO: 20451 - protein, 7 aa, Artificial Sequence
  Synthetic construct
IYRGGNT

SEQ ID NO: 20452 - protein, 7 aa, Artificial Sequence
  Synthetic construct
IYWDDDK

SEQ ID NO: 20453 - protein, 7 aa, Artificial Sequence
  Synthetic construct
IYYSGST

SEQ ID NO: 20454 - protein, 7 aa, Artificial Sequence
  Synthetic construct
IHQSGGT

SEQ ID NO: 20455 - protein, 7 aa, Artificial Sequence
  Synthetic construct
IDQRGNT

SEQ ID NO: 20456 - protein, 8 aa, Artificial Sequence
  Synthetic construct
ISFDGNIK

SEQ ID NO: 20457 - protein, 8 aa, Artificial Sequence
  Synthetic construct
INTNTGNP

SEQ ID NO: 20458 - protein, 8 aa, Artificial Sequence
  Synthetic construct
ISGSSSHM

SEQ ID NO: 20459 - protein, 7 aa, Artificial Sequence
  Synthetic construct
IYSGGNT

SEQ ID NO: 20460 - protein, 7 aa, Artificial Sequence
  Synthetic construct
IYYTGST

SEQ ID NO: 20461 - protein, 8 aa, Artificial Sequence
  Synthetic construct
IFPGDSDT

SEQ ID NO: 20462 - protein, 8 aa, Artificial Sequence
  Synthetic construct
IDPGDPYS

SEQ ID NO: 20463 - protein, 8 aa, Artificial Sequence
  Synthetic construct
LDVSGGGT

SEQ ID NO: 20464 - protein, 8 aa, Artificial Sequence
  Synthetic construct
ISYDGSNK

SEQ ID NO: 20465 - protein, 8 aa, Artificial Sequence
  Synthetic construct
ISTYNDNT

SEQ ID NO: 20466 - protein, 8 aa, Artificial Sequence
  Synthetic construct
IRSSSSTI

SEQ ID NO: 20467 - protein, 7 aa, Artificial Sequence
  Synthetic construct
IDWDDDK

SEQ ID NO: 20468 - protein, 7 aa, Artificial Sequence
  Synthetic construct
ISHSGST

SEQ ID NO: 20469 - protein, 7 aa, Artificial Sequence
  Synthetic construct
IYYSGST

SEQ ID NO: 20470 - protein, 8 aa, Artificial Sequence
  Synthetic construct
IVVASTYT

SEQ ID NO: 20471 - protein, 8 aa, Artificial Sequence
  Synthetic construct
ISYDGSNK

SEQ ID NO: 20472 - protein, 8 aa, Artificial Sequence
  Synthetic construct
ISYDGSNK

SEQ ID NO: 20473 - protein, 7 aa, Artificial Sequence
  Synthetic construct
IYRGGNT

SEQ ID NO: 20474 - protein, 7 aa, Artificial Sequence
  Synthetic construct
IYYTGST

SEQ ID NO: 20475 - protein, 8 aa, Artificial Sequence
  Synthetic construct
ISYDGSNE

SEQ ID NO: 20476 - protein, 8 aa, Artificial Sequence
  Synthetic construct
TIPIFGTA

SEQ ID NO: 20477 - protein, 7 aa, Artificial Sequence
  Synthetic construct
LYYSGST

SEQ ID NO: 20478 - protein, 7 aa, Artificial Sequence
  Synthetic construct
IYYTGST

SEQ ID NO: 20479 - protein, 7 aa, Artificial Sequence
  Synthetic construct
INHSGST

SEQ ID NO: 20480 - protein, 8 aa, Artificial Sequence
  Synthetic construct
VTPIFGTA

SEQ ID NO: 20481 - protein, 8 aa, Artificial Sequence
  Synthetic construct
IWYDGSNK

SEQ ID NO: 20482 - protein, 7 aa, Artificial Sequence
  Synthetic construct
VYTSGST

SEQ ID NO: 20483 - protein, 8 aa, Artificial Sequence
  Synthetic construct
ISYDGSIQ

SEQ ID NO: 20484 - protein, 8 aa, Artificial Sequence
  Synthetic construct
ISYDGNNK

SEQ ID NO: 20485 - protein, 8 aa, Artificial Sequence
  Synthetic construct
ISYDGSNK

SEQ ID NO: 20486 - protein, 10 aa, Artificial Sequence
  Synthetic construct
IKSKTDGGTT

SEQ ID NO: 20487 - protein, 8 aa, Artificial Sequence
  Synthetic construct
ISGSGDST

SEQ ID NO: 20488 - protein, 8 aa, Artificial Sequence
  Synthetic construct
IWYDGSKK

SEQ ID NO: 20489 - protein, 8 aa, Artificial Sequence
  Synthetic construct
ISGSGGST

SEQ ID NO: 20490 - protein, 7 aa, Artificial Sequence
  Synthetic construct
VNHSGST

SEQ ID NO: 20491 - protein, 8 aa, Artificial Sequence
  Synthetic construct
ISYDGRNE

SEQ ID NO: 20492 - protein, 8 aa, Artificial Sequence
  Synthetic construct
IIPIFNTA

SEQ ID NO: 20493 - protein, 7 aa, Artificial Sequence
  Synthetic construct
IYASGGT

SEQ ID NO: 20494 - protein, 8 aa, Artificial Sequence
  Synthetic construct
INAHDGNT

SEQ ID NO: 20495 - protein, 8 aa, Artificial Sequence
  Synthetic construct
IWYDGSNK

SEQ ID NO: 20496 - protein, 8 aa, Artificial Sequence
  Synthetic construct
IIPIFGTA

SEQ ID NO: 20497 - protein, 7 aa, Artificial Sequence
  Synthetic construct
ISRGWST

SEQ ID NO: 20498 - protein, 8 aa, Artificial Sequence
  Synthetic construct
INTNTGNP

SEQ ID NO: 20499 - protein, 8 aa, Artificial Sequence
  Synthetic construct
MSYDGSNK

SEQ ID NO: 20500 - protein, 8 aa, Artificial Sequence
  Synthetic construct
INTNTGDP

SEQ ID NO: 20501 - protein, 8 aa, Artificial Sequence
  Synthetic construct
ISYDGSNK

SEQ ID NO: 20502 - protein, 7 aa, Artificial Sequence
  Synthetic construct
IYYTGST

SEQ ID NO: 20503 - protein, 7 aa, Artificial Sequence
  Synthetic construct
MYHNGST

SEQ ID NO: 20504 - protein, 8 aa, Artificial Sequence
  Synthetic construct
IYPGDSDT

SEQ ID NO: 20505 - protein, 7 aa, Artificial Sequence
  Synthetic construct
IYHSGST

SEQ ID NO: 20506 - protein, 7 aa, Artificial Sequence
  Synthetic construct
INYAGST

SEQ ID NO: 20507 - protein, 7 aa, Artificial Sequence
  Synthetic construct
AFHNGIT

SEQ ID NO: 20508 - protein, 8 aa, Artificial Sequence
  Synthetic construct
IWYDGSKK

SEQ ID NO: 20509 - protein, 8 aa, Artificial Sequence
  Synthetic construct
STWNSGTI

SEQ ID NO: 20510 - protein, 7 aa, Artificial Sequence
  Synthetic construct
IYHSGST

SEQ ID NO: 20511 - protein, 7 aa, Artificial Sequence
  Synthetic construct
VVHSGST

SEQ ID NO: 20512 - protein, 7 aa, Artificial Sequence
  Synthetic construct
IYRSGST

SEQ ID NO: 20513 - protein, 7 aa, Artificial Sequence
  Synthetic construct
IYTSGST

SEQ ID NO: 20514 - protein, 8 aa, Artificial Sequence
  Synthetic construct
ISSHGDST

SEQ ID NO: 20515 - protein, 8 aa, Artificial Sequence
  Synthetic construct
INTYTGNP

SEQ ID NO: 20516 - protein, 7 aa, Artificial Sequence
  Synthetic construct
IFYSGNT

SEQ ID NO: 20517 - protein, 8 aa, Artificial Sequence
  Synthetic construct
INQDGTEK

SEQ ID NO: 20518 - protein, 7 aa, Artificial Sequence
  Synthetic construct
IYTSGST

SEQ ID NO: 20519 - protein, 10 aa, Artificial Sequence
  Synthetic construct
IQREVDGGTT

SEQ ID NO: 20520 - protein, 8 aa, Artificial Sequence
  Synthetic construct
ISYDGSNK

SEQ ID NO: 20521 - protein, 8 aa, Artificial Sequence
  Synthetic construct
ISYDGINR

SEQ ID NO: 20522 - protein, 7 aa, Artificial Sequence
  Synthetic construct
IYWDDDK

SEQ ID NO: 20523 - protein, 8 aa, Artificial Sequence
  Synthetic construct
IKRDGIEK

SEQ ID NO: 20524 - protein, 7 aa, Artificial Sequence
  Synthetic construct
IYYSGST

SEQ ID NO: 20525 - protein, 8 aa, Artificial Sequence
  Synthetic construct
NIPIFGTA

SEQ ID NO: 20526 - protein, 7 aa, Artificial Sequence
  Synthetic construct
IYYSGST

SEQ ID NO: 20527 - protein, 8 aa, Artificial Sequence
  Synthetic construct
INTNTGNP

SEQ ID NO: 20528 - protein, 8 aa, Artificial Sequence
  Synthetic construct
IWNDGNNK

SEQ ID NO: 20529 - protein, 7 aa, Artificial Sequence
  Synthetic construct
INYSGST

SEQ ID NO: 20530 - protein, 8 aa, Artificial Sequence
  Synthetic construct
TIPIFGTA

SEQ ID NO: 20531 - protein, 7 aa, Artificial Sequence
  Synthetic construct
IYWDDDK

SEQ ID NO: 20532 - protein, 8 aa, Artificial Sequence
  Synthetic construct
IIPIFGTA

SEQ ID NO: 20533 - protein, 8 aa, Artificial Sequence
  Synthetic construct
ISSSSSHI

SEQ ID NO: 20534 - protein, 8 aa, Artificial Sequence
  Synthetic construct
IYPGDSDT

SEQ ID NO: 20535 - protein, 8 aa, Artificial Sequence
  Synthetic construct
IWHDGNKN

SEQ ID NO: 20536 - protein, 7 aa, Artificial Sequence
  Synthetic construct
IYWDDDE

SEQ ID NO: 20537 - protein, 8 aa, Artificial Sequence
  Synthetic construct
ISAYNGNT

SEQ ID NO: 20538 - protein, 8 aa, Artificial Sequence
  Synthetic construct
INTNTGNP

SEQ ID NO: 20539 - protein, 7 aa, Artificial Sequence
  Synthetic construct
VYHSGST

SEQ ID NO: 20540 - protein, 8 aa, Artificial Sequence
  Synthetic construct
IKQDGSEK

SEQ ID NO: 20541 - protein, 7 aa, Artificial Sequence
  Synthetic construct
IFYSGST

SEQ ID NO: 20542 - protein, 8 aa, Artificial Sequence
  Synthetic construct
ISEDGSKK

SEQ ID NO: 20543 - protein, 7 aa, Artificial Sequence
  Synthetic construct
IYYSGIT

SEQ ID NO: 20544 - protein, 8 aa, Artificial Sequence
  Synthetic construct
ISYDGNNK

SEQ ID NO: 20545 - protein, 8 aa, Artificial Sequence
  Synthetic construct
ISYDGNNK

SEQ ID NO: 20546 - protein, 7 aa, Artificial Sequence
  Synthetic construct
IYYSGIT

SEQ ID NO: 20547 - protein, 7 aa, Artificial Sequence
  Synthetic construct
IYSGGST

SEQ ID NO: 20548 - protein, 7 aa, Artificial Sequence
  Synthetic construct
IYYSGST

SEQ ID NO: 20549 - protein, 8 aa, Artificial Sequence
  Synthetic construct
ISYDGSDD

SEQ ID NO: 20550 - protein, 8 aa, Artificial Sequence
  Synthetic construct
ISFDGSNK

SEQ ID NO: 20551 - protein, 8 aa, Artificial Sequence
  Synthetic construct
IYPIDSDT

SEQ ID NO: 20552 - protein, 7 aa, Artificial Sequence
  Synthetic construct
ISYTGST

SEQ ID NO: 20553 - protein, 8 aa, Artificial Sequence
  Synthetic construct
FDPEDGET

SEQ ID NO: 20554 - protein, 7 aa, Artificial Sequence
  Synthetic construct
IFYSGIT

SEQ ID NO: 20555 - protein, 8 aa, Artificial Sequence
  Synthetic construct
IYPRDSHT

SEQ ID NO: 20556 - protein, 8 aa, Artificial Sequence
  Synthetic construct
VWFDGTNK

SEQ ID NO: 20557 - protein, 8 aa, Artificial Sequence
  Synthetic construct
ISGSGGRA

SEQ ID NO: 20558 - protein, 8 aa, Artificial Sequence
  Synthetic construct
FNPSDHTT

SEQ ID NO: 20559 - protein, 8 aa, Artificial Sequence
  Synthetic construct
ISSSSVYI

SEQ ID NO: 20560 - protein, 8 aa, Artificial Sequence
  Synthetic construct
IFPILGVA

SEQ ID NO: 20561 - protein, 8 aa, Artificial Sequence
  Synthetic construct
INPSGGST

SEQ ID NO: 20562 - protein, 8 aa, Artificial Sequence
  Synthetic construct
FDPEDAKT

SEQ ID NO: 20563 - protein, 8 aa, Artificial Sequence
  Synthetic construct
ISRSSSTI

SEQ ID NO: 20564 - protein, 8 aa, Artificial Sequence
  Synthetic construct
ISYDGINK

SEQ ID NO: 20565 - protein, 8 aa, Artificial Sequence
  Synthetic construct
ISYDGSVQ

SEQ ID NO: 20566 - protein, 7 aa, Artificial Sequence
  Synthetic construct
IYGGGNT

SEQ ID NO: 20567 - protein, 8 aa, Artificial Sequence
  Synthetic construct
IKQDGSEK

SEQ ID NO: 20568 - protein, 7 aa, Artificial Sequence
  Synthetic construct
TSPSGTT

SEQ ID NO: 20569 - protein, 7 aa, Artificial Sequence
  Synthetic construct
IYTSGST

SEQ ID NO: 20570 - protein, 7 aa, Artificial Sequence
  Synthetic construct
IYYSGST

SEQ ID NO: 20571 - protein, 8 aa, Artificial Sequence
  Synthetic construct
STWNSGII

SEQ ID NO: 20572 - protein, 10 aa, Artificial Sequence
  Synthetic construct
IKSKTNGGTT

SEQ ID NO: 20573 - protein, 8 aa, Artificial Sequence
  Synthetic construct
IIPILGIT

SEQ ID NO: 20574 - protein, 8 aa, Artificial Sequence
  Synthetic construct
INPSGGST

SEQ ID NO: 20575 - protein, 7 aa, Artificial Sequence
  Synthetic construct
ISRGGST

SEQ ID NO: 20576 - protein, 8 aa, Artificial Sequence
  Synthetic construct
ISAYNGNT

SEQ ID NO: 20577 - protein, 8 aa, Artificial Sequence
  Synthetic construct
IYPGDSDT

SEQ ID NO: 20578 - protein, 10 aa, Artificial Sequence
  Synthetic construct
IRSKAYGGTT

SEQ ID NO: 20579 - protein, 8 aa, Artificial Sequence
  Synthetic construct
FDPDQTET

SEQ ID NO: 20580 - protein, 7 aa, Artificial Sequence
  Synthetic construct
WDDGSNK

SEQ ID NO: 20581 - protein, 7 aa, Artificial Sequence
  Synthetic construct
IYYSGST

SEQ ID NO: 20582 - protein, 8 aa, Artificial Sequence
  Synthetic construct
ISNSGDSK

SEQ ID NO: 20583 - protein, 8 aa, Artificial Sequence
  Synthetic construct
ISITSTYI

SEQ ID NO: 20584 - protein, 7 aa, Artificial Sequence
  Synthetic construct
INQSENT

SEQ ID NO: 20585 - protein, 8 aa, Artificial Sequence
  Synthetic construct
ISGSGGST

SEQ ID NO: 20586 - protein, 10 aa, Artificial Sequence
  Synthetic construct
TKNKANNYTT

SEQ ID NO: 20587 - protein, 8 aa, Artificial Sequence
  Synthetic construct
ISGSSDST

SEQ ID NO: 20588 - protein, 8 aa, Artificial Sequence
  Synthetic construct
IVVGSGNT

SEQ ID NO: 20589 - protein, 8 aa, Artificial Sequence
  Synthetic construct
ISTHSRTI

SEQ ID NO: 20590 - protein, 7 aa, Artificial Sequence
  Synthetic construct
VSNGGAT

SEQ ID NO: 20591 - protein, 7 aa, Artificial Sequence
  Synthetic construct
IYSSGST

SEQ ID NO: 20592 - protein, 7 aa, Artificial Sequence
  Synthetic construct
IYTSGRT

SEQ ID NO: 20593 - protein, 7 aa, Artificial Sequence
  Synthetic construct
IYWDGDK

SEQ ID NO: 20594 - protein, 8 aa, Artificial Sequence
  Synthetic construct
INTNTGNP

SEQ ID NO: 20595 - protein, 8 aa, Artificial Sequence
  Synthetic construct
ISSSSSTI

SEQ ID NO: 20596 - protein, 7 aa, Artificial Sequence
  Synthetic construct
MYYGGST

SEQ ID NO: 20597 - protein, 8 aa, Artificial Sequence
  Synthetic construct
ITSSSRYI

SEQ ID NO: 20598 - protein, 8 aa, Artificial Sequence
  Synthetic construct
INTNTGNP

SEQ ID NO: 20599 - protein, 8 aa, Artificial Sequence
  Synthetic construct
ISWNSGSI

SEQ ID NO: 20600 - protein, 8 aa, Artificial Sequence
  Synthetic construct
INNDGSRT

SEQ ID NO: 20601 - protein, 7 aa, Artificial Sequence
  Synthetic construct
IYHSGST

SEQ ID NO: 20602 - protein, 8 aa, Artificial Sequence
  Synthetic construct
ISYDGINK

SEQ ID NO: 20603 - protein, 7 aa, Artificial Sequence
  Synthetic construct
MNYSGST

SEQ ID NO: 20604 - protein, 8 aa, Artificial Sequence
  Synthetic construct
INQDGSEK

SEQ ID NO: 20605 - protein, 7 aa, Artificial Sequence
  Synthetic construct
IYYSGDT

SEQ ID NO: 20606 - protein, 8 aa, Artificial Sequence
  Synthetic construct
IWYDGSNK

SEQ ID NO: 20607 - protein, 8 aa, Artificial Sequence
  Synthetic construct
ISASGSAT

SEQ ID NO: 20608 - protein, 8 aa, Artificial Sequence
  Synthetic construct
ISSSTSFR

SEQ ID NO: 20609 - protein, 8 aa, Artificial Sequence
  Synthetic construct
ISYDGDNK

SEQ ID NO: 20610 - protein, 8 aa, Artificial Sequence
  Synthetic construct
VSAYDGNT

SEQ ID NO: 20611 - protein, 8 aa, Artificial Sequence
  Synthetic construct
IDPGDPYS

SEQ ID NO: 20612 - protein, 8 aa, Artificial Sequence
  Synthetic construct
ISYDGSNK

SEQ ID NO: 20613 - protein, 7 aa, Artificial Sequence
  Synthetic construct
IYYSGST

SEQ ID NO: 20614 - protein, 10 aa, Artificial Sequence
  Synthetic construct
IRSKANNYAT

SEQ ID NO: 20615 - protein, 8 aa, Artificial Sequence
  Synthetic construct
FDPEDAET

SEQ ID NO: 20616 - protein, 8 aa, Artificial Sequence
  Synthetic construct
IYPADSDT

SEQ ID NO: 20617 - protein, 8 aa, Artificial Sequence
  Synthetic construct
INPDAGST

SEQ ID NO: 20618 - protein, 8 aa, Artificial Sequence
  Synthetic construct
ISYDGSNQ

SEQ ID NO: 20619 - protein, 8 aa, Artificial Sequence
  Synthetic construct
ISFDGSNK

SEQ ID NO: 20620 - protein, 8 aa, Artificial Sequence
  Synthetic construct
ISGSGGST

SEQ ID NO: 20621 - protein, 8 aa, Artificial Sequence
  Synthetic construct
IIPIFGTT

SEQ ID NO: 20622 - protein, 8 aa, Artificial Sequence
  Synthetic construct
INPSGTST

SEQ ID NO: 20623 - protein, 8 aa, Artificial Sequence
  Synthetic construct
ISSSSTYI

SEQ ID NO: 20624 - protein, 8 aa, Artificial Sequence
  Synthetic construct
STWNSGTI

SEQ ID NO: 20625 - protein, 7 aa, Artificial Sequence
  Synthetic construct
IYYSGLT

SEQ ID NO: 20626 - protein, 9 aa, Artificial Sequence
  Synthetic construct
TYHRFKWYH

SEQ ID NO: 20627 - protein, 7 aa, Artificial Sequence
  Synthetic construct
IYSGGST

SEQ ID NO: 20628 - protein, 7 aa, Artificial Sequence
  Synthetic construct
IYWDDDK

SEQ ID NO: 20629 - protein, 8 aa, Artificial Sequence
  Synthetic construct
FDSEDAET

SEQ ID NO: 20630 - protein, 8 aa, Artificial Sequence
  Synthetic construct
ISYDGSNE

SEQ ID NO: 20631 - protein, 8 aa, Artificial Sequence
  Synthetic construct
ISGSGDRT

SEQ ID NO: 20632 - protein, 8 aa, Artificial Sequence
  Synthetic construct
ISDDGSNK

SEQ ID NO: 20633 - protein, 10 aa, Artificial Sequence
  Synthetic construct
INSKTDGGTT

SEQ ID NO: 20634 - protein, 7 aa, Artificial Sequence
  Synthetic construct
IYYSGTT

SEQ ID NO: 20635 - protein, 8 aa, Artificial Sequence
  Synthetic construct
IYPGDSDT

SEQ ID NO: 20636 - protein, 7 aa, Artificial Sequence
  Synthetic construct
IYSSGST

SEQ ID NO: 20637 - protein, 8 aa, Artificial Sequence
  Synthetic construct
ISNSGSYI

SEQ ID NO: 20638 - protein, 7 aa, Artificial Sequence
  Synthetic construct
IYHSGTT

SEQ ID NO: 20639 - protein, 8 aa, Artificial Sequence
  Synthetic construct
IIPIFGTA

SEQ ID NO: 20640 - protein, 7 aa, Artificial Sequence
  Synthetic construct
IDWADDK

SEQ ID NO: 20641 - protein, 8 aa, Artificial Sequence
  Synthetic construct
IWYDGSNK

SEQ ID NO: 20642 - protein, 8 aa, Artificial Sequence
  Synthetic construct
IWYDGSNK

SEQ ID NO: 20643 - protein, 8 aa, Artificial Sequence
  Synthetic construct
ISGSGEST

SEQ ID NO: 20644 - protein, 8 aa, Artificial Sequence
  Synthetic construct
ISSSGDTI

SEQ ID NO: 20645 - protein, 8 aa, Artificial Sequence
  Synthetic construct
ISASGGNK

SEQ ID NO: 20646 - protein, 7 aa, Artificial Sequence
  Synthetic construct
IDSAGDT

SEQ ID NO: 20647 - protein, 8 aa, Artificial Sequence
  Synthetic construct
ISYDGSNK

SEQ ID NO: 20648 - protein, 8 aa, Artificial Sequence
  Synthetic construct
INTNTGNP

SEQ ID NO: 20649 - protein, 8 aa, Artificial Sequence
  Synthetic construct
IWQDGSNK

SEQ ID NO: 20650 - protein, 8 aa, Artificial Sequence
  Synthetic construct
IIPIFGTA

SEQ ID NO: 20651 - protein, 8 aa, Artificial Sequence
  Synthetic construct
IDPSDSYT

SEQ ID NO: 20652 - protein, 7 aa, Artificial Sequence
  Synthetic construct
IFTSGST

SEQ ID NO: 20653 - protein, 7 aa, Artificial Sequence
  Synthetic construct
IYYSGST

SEQ ID NO: 20654 - protein, 7 aa, Artificial Sequence
  Synthetic construct
VYHSGST

SEQ ID NO: 20655 - protein, 8 aa, Artificial Sequence
  Synthetic construct
ISYDGSNK

SEQ ID NO: 20656 - protein, 7 aa, Artificial Sequence
  Synthetic construct
IYSGGST

SEQ ID NO: 20657 - protein, 10 aa, Artificial Sequence
  Synthetic construct
IRSKAYGGTT

SEQ ID NO: 20658 - protein, 8 aa, Artificial Sequence
  Synthetic construct
INPNGGGT

SEQ ID NO: 20659 - protein, 7 aa, Artificial Sequence
  Synthetic construct
IYWDDDK

SEQ ID NO: 20660 - protein, 8 aa, Artificial Sequence
  Synthetic construct
ISHDGSNK

SEQ ID NO: 20661 - protein, 7 aa, Artificial Sequence
  Synthetic construct
IYYTGTT

SEQ ID NO: 20662 - protein, 7 aa, Artificial Sequence
  Synthetic construct
IYYSGST

SEQ ID NO: 20663 - protein, 7 aa, Artificial Sequence
  Synthetic construct
FYYSGNT

SEQ ID NO: 20664 - protein, 7 aa, Artificial Sequence
  Synthetic construct
VNHSGST

SEQ ID NO: 20665 - protein, 8 aa, Artificial Sequence
  Synthetic construct
IYPGDSDT

SEQ ID NO: 20666 - protein, 10 aa, Artificial Sequence
  Synthetic construct
IKSNTDGGTT

SEQ ID NO: 20667 - protein, 7 aa, Artificial Sequence
  Synthetic construct
IFSNGEK

SEQ ID NO: 20668 - protein, 8 aa, Artificial Sequence
  Synthetic construct
INPRSGVT

SEQ ID NO: 20669 - protein, 7 aa, Artificial Sequence
  Synthetic construct
INHSGNT

SEQ ID NO: 20670 - protein, 7 aa, Artificial Sequence
  Synthetic construct
IFYSGST

SEQ ID NO: 20671 - protein, 8 aa, Artificial Sequence
  Synthetic construct
IIPLFGTT

SEQ ID NO: 20672 - protein, 7 aa, Artificial Sequence
  Synthetic construct
LYSGGST

SEQ ID NO: 20673 - protein, 8 aa, Artificial Sequence
  Synthetic construct
IIPIFGTA

SEQ ID NO: 20674 - protein, 8 aa, Artificial Sequence
  Synthetic construct
ISGSGGTT

SEQ ID NO: 20675 - protein, 8 aa, Artificial Sequence
  Synthetic construct
ISYDGSNK

SEQ ID NO: 20676 - protein, 8 aa, Artificial Sequence
  Synthetic construct
ISYEGSVQ

SEQ ID NO: 20677 - protein, 8 aa, Artificial Sequence
  Synthetic construct
ISTEGGST

SEQ ID NO: 20678 - protein, 8 aa, Artificial Sequence
  Synthetic construct
IWHDGSKR

SEQ ID NO: 20679 - protein, 8 aa, Artificial Sequence
  Synthetic construct
ISYDGINK

SEQ ID NO: 20680 - protein, 8 aa, Artificial Sequence
  Synthetic construct
ISNSGSDI

SEQ ID NO: 20681 - protein, 8 aa, Artificial Sequence
  Synthetic construct
ISYDGSNE

SEQ ID NO: 20682 - protein, 8 aa, Artificial Sequence
  Synthetic construct
ISAYNGNT

SEQ ID NO: 20683 - protein, 8 aa, Artificial Sequence
  Synthetic construct
INAGNGNT

SEQ ID NO: 20684 - protein, 8 aa, Artificial Sequence
  Synthetic construct
INPNSGRT

SEQ ID NO: 20685 - protein, 7 aa, Artificial Sequence
  Synthetic construct
IYYSGST

SEQ ID NO: 20686 - protein, 8 aa, Artificial Sequence
  Synthetic construct
LSGGGGST

SEQ ID NO: 20687 - protein, 7 aa, Artificial Sequence
  Synthetic construct
IYTSGST

SEQ ID NO: 20688 - protein, 8 aa, Artificial Sequence
  Synthetic construct
IVGDVSEK

SEQ ID NO: 20689 - protein, 8 aa, Artificial Sequence
  Synthetic construct
ISAYNGYT

SEQ ID NO: 20690 - protein, 8 aa, Artificial Sequence
  Synthetic construct
IIPILRIA

SEQ ID NO: 20691 - protein, 8 aa, Artificial Sequence
  Synthetic construct
ISTSGSAI

SEQ ID NO: 20692 - protein, 7 aa, Artificial Sequence
  Synthetic construct
IYSGGST

SEQ ID NO: 20693 - protein, 8 aa, Artificial Sequence
  Synthetic construct
ISYDGINK

SEQ ID NO: 20694 - protein, 8 aa, Artificial Sequence
  Synthetic construct
ISSSSSYT

SEQ ID NO: 20695 - protein, 7 aa, Artificial Sequence
  Synthetic construct
IYTSGST

SEQ ID NO: 20696 - protein, 8 aa, Artificial Sequence
  Synthetic construct
IDPSDSYT

SEQ ID NO: 20697 - protein, 8 aa, Artificial Sequence
  Synthetic construct
IYPIDSDT

SEQ ID NO: 20698 - protein, 8 aa, Artificial Sequence
  Synthetic construct
LTPIFATA

SEQ ID NO: 20699 - protein, 8 aa, Artificial Sequence
  Synthetic construct
IIPVLGAA

SEQ ID NO: 20700 - protein, 8 aa, Artificial Sequence
  Synthetic construct
ISGSGGST

SEQ ID NO: 20701 - protein, 7 aa, Artificial Sequence
  Synthetic construct
IYWDDDT

SEQ ID NO: 20702 - protein, 8 aa, Artificial Sequence
  Synthetic construct
IDPSDSHT

SEQ ID NO: 20703 - protein, 7 aa, Artificial Sequence
  Synthetic construct
IYSGGST

SEQ ID NO: 20704 - protein, 8 aa, Artificial Sequence
  Synthetic construct
ITSGSSYI

SEQ ID NO: 20705 - protein, 8 aa, Artificial Sequence
  Synthetic construct
ISYAGSNE

SEQ ID NO: 20706 - protein, 7 aa, Artificial Sequence
  Synthetic construct
FYYSGTT

SEQ ID NO: 20707 - protein, 7 aa, Artificial Sequence
  Synthetic construct
IYYSGST

SEQ ID NO: 20708 - protein, 8 aa, Artificial Sequence
  Synthetic construct
FDPEDGET

SEQ ID NO: 20709 - protein, 8 aa, Artificial Sequence
  Synthetic construct
INSDGSTT

SEQ ID NO: 20710 - protein, 8 aa, Artificial Sequence
  Synthetic construct
INPSGGSP

SEQ ID NO: 20711 - protein, 8 aa, Artificial Sequence
  Synthetic construct
IDPSDSYT

SEQ ID NO: 20712 - protein, 8 aa, Artificial Sequence
  Synthetic construct
ISNSGSVE

SEQ ID NO: 20713 - protein, 8 aa, Artificial Sequence
  Synthetic construct
ISPSNGGT

SEQ ID NO: 20714 - protein, 8 aa, Artificial Sequence
  Synthetic construct
INTNTGNP

SEQ ID NO: 20715 - protein, 8 aa, Artificial Sequence
  Synthetic construct
IIPILGIT

SEQ ID NO: 20716 - protein, 8 aa, Artificial Sequence
  Synthetic construct
FDPEDGEI

SEQ ID NO: 20717 - protein, 8 aa, Artificial Sequence
  Synthetic construct
IWFDGSNK

SEQ ID NO: 20718 - protein, 7 aa, Artificial Sequence
  Synthetic construct
INHSGIT

SEQ ID NO: 20719 - protein, 8 aa, Artificial Sequence
  Synthetic construct
ISYDGTNK

SEQ ID NO: 20720 - protein, 8 aa, Artificial Sequence
  Synthetic construct
IWYDGSNK

SEQ ID NO: 20721 - protein, 8 aa, Artificial Sequence
  Synthetic construct
INTNTGNP

SEQ ID NO: 20722 - protein, 8 aa, Artificial Sequence
  Synthetic construct
IIPIFGTT

SEQ ID NO: 20723 - protein, 8 aa, Artificial Sequence
  Synthetic construct
ISAYNGST

SEQ ID NO: 20724 - protein, 8 aa, Artificial Sequence
  Synthetic construct
VSYDGYDK

SEQ ID NO: 20725 - protein, 8 aa, Artificial Sequence
  Synthetic construct
IHPADSNT

SEQ ID NO: 20726 - protein, 7 aa, Artificial Sequence
  Synthetic construct
IYQSGST

SEQ ID NO: 20727 - protein, 8 aa, Artificial Sequence
  Synthetic construct
STWNSATI

SEQ ID NO: 20728 - protein, 7 aa, Artificial Sequence
  Synthetic construct
IYWDDDK

SEQ ID NO: 20729 - protein, 8 aa, Artificial Sequence
  Synthetic construct
ISFDGYNK

SEQ ID NO: 20730 - protein, 8 aa, Artificial Sequence
  Synthetic construct
INTYNGNT

SEQ ID NO: 20731 - protein, 8 aa, Artificial Sequence
  Synthetic construct
MTPIFGTA

SEQ ID NO: 20732 - protein, 8 aa, Artificial Sequence
  Synthetic construct
ISYDGTNK

SEQ ID NO: 20733 - protein, 8 aa, Artificial Sequence
  Synthetic construct
IYPGDSDT

SEQ ID NO: 20734 - protein, 8 aa, Artificial Sequence
  Synthetic construct
INTHTGKP

SEQ ID NO: 20735 - protein, 7 aa, Artificial Sequence
  Synthetic construct
INHSGST

SEQ ID NO: 20736 - protein, 8 aa, Artificial Sequence
  Synthetic construct
INPNSGVT

SEQ ID NO: 20737 - protein, 10 aa, Artificial Sequence
  Synthetic construct
IRGKAYDGTA

SEQ ID NO: 20738 - protein, 8 aa, Artificial Sequence
  Synthetic construct
ISYDGDNK

SEQ ID NO: 20739 - protein, 7 aa, Artificial Sequence
  Synthetic construct
IYYSGST

SEQ ID NO: 20740 - protein, 8 aa, Artificial Sequence
  Synthetic construct
ISTDGGST

SEQ ID NO: 20741 - protein, 8 aa, Artificial Sequence
  Synthetic construct
IKPDGSEN

SEQ ID NO: 20742 - protein, 8 aa, Artificial Sequence
  Synthetic construct
STWNSGTI

SEQ ID NO: 20743 - protein, 3 aa, Artificial Sequence
  Synthetic construct
  MISC_FEATURE (1)..(3): X can be any amino acid
XXX

SEQ ID NO: 20744 - protein, 10 aa, Artificial Sequence
  Synthetic construct
IKTKTDGGTT

SEQ ID NO: 20745 - protein, 8 aa, Artificial Sequence
  Synthetic construct
ILYDGSNK

SEQ ID NO: 20746 - protein, 8 aa, Artificial Sequence
  Synthetic construct
FDPDDGES

SEQ ID NO: 20747 - protein, 8 aa, Artificial Sequence
  Synthetic construct
IWYDGSEK

SEQ ID NO: 20748 - protein, 8 aa, Artificial Sequence
  Synthetic construct
IDPGDPYS

SEQ ID NO: 20749 - protein, 7 aa, Artificial Sequence
  Synthetic construct
SHYSGTT

SEQ ID NO: 20750 - protein, 8 aa, Artificial Sequence
  Synthetic construct
VSYDGYDK

SEQ ID NO: 20751 - protein, 7 aa, Artificial Sequence
  Synthetic construct
IYHSGST

SEQ ID NO: 20752 - protein, 8 aa, Artificial Sequence
  Synthetic construct
IYPGDSDT

SEQ ID NO: 20753 - protein, 8 aa, Artificial Sequence
  Synthetic construct
ITGSGDRT

SEQ ID NO: 20754 - protein, 8 aa, Artificial Sequence
  Synthetic construct
IGATDGRT

SEQ ID NO: 20755 - protein, 8 aa, Artificial Sequence
  Synthetic construct
ISNDGSNK

SEQ ID NO: 20756 - protein, 7 aa, Artificial Sequence
  Synthetic construct
VFYSGTT

SEQ ID NO: 20757 - protein, 8 aa, Artificial Sequence
  Synthetic construct
FSGSGVST

SEQ ID NO: 20758 - protein, 7 aa, Artificial Sequence
  Synthetic construct
IYSGGPT

SEQ ID NO: 20759 - protein, 3 aa, Artificial Sequence
  Synthetic construct
  MISC_FEATURE (1)..(3): X can be any amino acid
XXX

SEQ ID NO: 20760 - protein, 8 aa, Artificial Sequence
  Synthetic construct
ISSSGRST

SEQ ID NO: 20761 - protein, 8 aa, Artificial Sequence
  Synthetic construct
IIPVFGTT

SEQ ID NO: 20762 - protein, 8 aa, Artificial Sequence
  Synthetic construct
ISTNGGIT

SEQ ID NO: 20763 - protein, 8 aa, Artificial Sequence
  Synthetic construct
IIPVFETT

SEQ ID NO: 20764 - protein, 7 aa, Artificial Sequence
  Synthetic construct
IYSGGST

SEQ ID NO: 20765 - protein, 7 aa, Artificial Sequence
  Synthetic construct
IYYSGST

SEQ ID NO: 20766 - protein, 8 aa, Artificial Sequence
  Synthetic construct
STWNSATI

SEQ ID NO: 20767 - protein, 8 aa, Artificial Sequence
  Synthetic construct
VSYDGSNK

SEQ ID NO: 20768 - protein, 8 aa, Artificial Sequence
  Synthetic construct
IKQDASEK

SEQ ID NO: 20769 - protein, 8 aa, Artificial Sequence
  Synthetic construct
IIPIFGTA

SEQ ID NO: 20770 - protein, 8 aa, Artificial Sequence
  Synthetic construct
IWHDGINK

SEQ ID NO: 20771 - protein, 7 aa, Artificial Sequence
  Synthetic construct
INYGGST

SEQ ID NO: 20772 - protein, 7 aa, Artificial Sequence
  Synthetic construct
IYYSGST

SEQ ID NO: 20773 - protein, 7 aa, Artificial Sequence
  Synthetic construct
IYSGGST

SEQ ID NO: 20774 - protein, 7 aa, Artificial Sequence
  Synthetic construct
IYHGGYT

SEQ ID NO: 20775 - protein, 8 aa, Artificial Sequence
  Synthetic construct
ISYDGDNK

SEQ ID NO: 20776 - protein, 8 aa, Artificial Sequence
  Synthetic construct
ISYDGSVQ

SEQ ID NO: 20777 - protein, 8 aa, Artificial Sequence
  Synthetic construct
INADSGKT

SEQ ID NO: 20778 - protein, 7 aa, Artificial Sequence
  Synthetic construct
IYHSGRT

SEQ ID NO: 20779 - protein, 9 aa, Artificial Sequence
  Synthetic construct
TYYRSTWYN

SEQ ID NO: 20780 - protein, 8 aa, Artificial Sequence
  Synthetic construct
IIPIFGPA

SEQ ID NO: 20781 - protein, 7 aa, Artificial Sequence
  Synthetic construct
ITHTGST

SEQ ID NO: 20782 - protein, 8 aa, Artificial Sequence
  Synthetic construct
ISNDGRNK

SEQ ID NO: 20783 - protein, 8 aa, Artificial Sequence
  Synthetic construct
MKHDGSDK

SEQ ID NO: 20784 - protein, 8 aa, Artificial Sequence
  Synthetic construct
IIPILGIA

SEQ ID NO: 20785 - protein, 8 aa, Artificial Sequence
  Synthetic construct
MYAGNGDT

SEQ ID NO: 20786 - protein, 7 aa, Artificial Sequence
  Synthetic construct
IYHSGNA

SEQ ID NO: 20787 - protein, 8 aa, Artificial Sequence
  Synthetic construct
VYPGDSDT

SEQ ID NO: 20788 - protein, 8 aa, Artificial Sequence
  Synthetic construct
IDTNTGNP

SEQ ID NO: 20789 - protein, 8 aa, Artificial Sequence
  Synthetic construct
VSYDGSNK

SEQ ID NO: 20790 - protein, 8 aa, Artificial Sequence
  Synthetic construct
INTNTGDP

SEQ ID NO: 20791 - protein, 7 aa, Artificial Sequence
  Synthetic construct
MYYGGNT

SEQ ID NO: 20792 - protein, 8 aa, Artificial Sequence
  Synthetic construct
INTNTGNP

SEQ ID NO: 20793 - protein, 8 aa, Artificial Sequence
  Synthetic construct
MSGRNNYI

SEQ ID NO: 20794 - protein, 7 aa, Artificial Sequence
  Synthetic construct
INHSGSA

SEQ ID NO: 20795 - protein, 8 aa, Artificial Sequence
  Synthetic construct
IYPDDSNT

SEQ ID NO: 20796 - protein, 7 aa, Artificial Sequence
  Synthetic construct
IYYSGNN

SEQ ID NO: 20797 - protein, 8 aa, Artificial Sequence
  Synthetic construct
IIPLFGTA

SEQ ID NO: 20798 - protein, 8 aa, Artificial Sequence
  Synthetic construct
ISWNSGFI

SEQ ID NO: 20799 - protein, 7 aa, Artificial Sequence
  Synthetic construct
IDHSGST

SEQ ID NO: 20800 - protein, 8 aa, Artificial Sequence
  Synthetic construct
IWYDGTKK

SEQ ID NO: 20801 - protein, 8 aa, Artificial Sequence
  Synthetic construct
INGANGNT

SEQ ID NO: 20802 - protein, 7 aa, Artificial Sequence
  Synthetic construct
VFYNGDT

SEQ ID NO: 20803 - protein, 8 aa, Artificial Sequence
  Synthetic construct
INPYNGST

SEQ ID NO: 20804 - protein, 7 aa, Artificial Sequence
  Synthetic construct
IYDSGST

SEQ ID NO: 20805 - protein, 8 aa, Artificial Sequence
  Synthetic construct
ISGSGDRT

SEQ ID NO: 20806 - protein, 8 aa, Artificial Sequence
  Synthetic construct
LNFDGGTT

SEQ ID NO: 20807 - protein, 7 aa, Artificial Sequence
  Synthetic construct
IYASGGT

SEQ ID NO: 20808 - protein, 8 aa, Artificial Sequence
  Synthetic construct
FDPEDGET

SEQ ID NO: 20809 - protein, 8 aa, Artificial Sequence
  Synthetic construct
IKQDGSEK

SEQ ID NO: 20810 - protein, 8 aa, Artificial Sequence
  Synthetic construct
ISGSGLST

SEQ ID NO: 20811 - protein, 3 aa, Artificial Sequence
  Synthetic construct
  MISC_FEATURE (1)..(3): X can be any amino acid
XXX

SEQ ID NO: 20812 - protein, 8 aa, Artificial Sequence
  Synthetic construct
ISYDGRNK

SEQ ID NO: 20813 - protein, 8 aa, Artificial Sequence
  Synthetic construct
ISGSGGST

SEQ ID NO: 20814 - protein, 8 aa, Artificial Sequence
  Synthetic construct
INTYSRDP

SEQ ID NO: 20815 - protein, 7 aa, Artificial Sequence
  Synthetic construct
IYYSGST

SEQ ID NO: 20816 - protein, 7 aa, Artificial Sequence
  Synthetic construct
INHSGST

SEQ ID NO: 20817 - protein, 8 aa, Artificial Sequence
  Synthetic construct
ISYDGSNK

SEQ ID NO: 20818 - protein, 7 aa, Artificial Sequence
  Synthetic construct
IYHSGST

SEQ ID NO: 20819 - protein, 7 aa, Artificial Sequence
  Synthetic construct
IYRGGNT

SEQ ID NO: 20820 - protein, 8 aa, Artificial Sequence
  Synthetic construct
ISSSSSHT

SEQ ID NO: 20821 - protein, 8 aa, Artificial Sequence
  Synthetic construct
IDPSDPYS

SEQ ID NO: 20822 - protein, 7 aa, Artificial Sequence
  Synthetic construct
INHSGST

SEQ ID NO: 20823 - protein, 8 aa, Artificial Sequence
  Synthetic construct
ISSSSSYI

SEQ ID NO: 20824 - protein, 8 aa, Artificial Sequence
  Synthetic construct
IYHDGSNK

SEQ ID NO: 20825 - protein, 7 aa, Artificial Sequence
  Synthetic construct
IYWDDDK

SEQ ID NO: 20826 - protein, 8 aa, Artificial Sequence
  Synthetic construct
INTNTGNP

SEQ ID NO: 20827 - protein, 8 aa, Artificial Sequence
  Synthetic construct
ISGSGVNT

SEQ ID NO: 20828 - protein, 8 aa, Artificial Sequence
  Synthetic construct
FDPEDGET

SEQ ID NO: 20829 - protein, 8 aa, Artificial Sequence
  Synthetic construct
INTNTGNP

SEQ ID NO: 20830 - protein, 7 aa, Artificial Sequence
  Synthetic construct
VFWDYDK

SEQ ID NO: 20831 - protein, 8 aa, Artificial Sequence
  Synthetic construct
ISGSGDRT

SEQ ID NO: 20832 - protein, 8 aa, Artificial Sequence
  Synthetic construct
IIPILGIA

SEQ ID NO: 20833 - protein, 8 aa, Artificial Sequence
  Synthetic construct
ISYDGINK

SEQ ID NO: 20834 - protein, 8 aa, Artificial Sequence
  Synthetic construct
ISYDGDNE

SEQ ID NO: 20835 - protein, 7 aa, Artificial Sequence
  Synthetic construct
IYWDDDK

SEQ ID NO: 20836 - protein, 8 aa, Artificial Sequence
  Synthetic construct
INAGNGDT

SEQ ID NO: 20837 - protein, 8 aa, Artificial Sequence
  Synthetic construct
IIPIFGTT

SEQ ID NO: 20838 - protein, 8 aa, Artificial Sequence
  Synthetic construct
INPGGAST

SEQ ID NO: 20839 - protein, 9 aa, Artificial Sequence
  Synthetic construct
TYYRSKWYN

SEQ ID NO: 20840 - protein, 8 aa, Artificial Sequence
  Synthetic construct
ISGSGVNT

SEQ ID NO: 20841 - protein, 8 aa, Artificial Sequence
  Synthetic construct
INTNTGSP

SEQ ID NO: 20842 - protein, 8 aa, Artificial Sequence
  Synthetic construct
FDPEDVET

SEQ ID NO: 20843 - protein, 8 aa, Artificial Sequence
  Synthetic construct
IQPSGGMT

SEQ ID NO: 20844 - protein, 7 aa, Artificial Sequence
  Synthetic construct
IYWDGDK

SEQ ID NO: 20845 - protein, 8 aa, Artificial Sequence
  Synthetic construct
IIPIFGTA

SEQ ID NO: 20846 - protein, 8 aa, Artificial Sequence
  Synthetic construct
ISYDGTNK

SEQ ID NO: 20847 - protein, 8 aa, Artificial Sequence
  Synthetic construct
IIPIFGTA

SEQ ID NO: 20848 - protein, 8 aa, Artificial Sequence
  Synthetic construct
IDPSDSYT

SEQ ID NO: 20849 - protein, 8 aa, Artificial Sequence
  Synthetic construct
IYPDDSDT

SEQ ID NO: 20850 - protein, 8 aa, Artificial Sequence
  Synthetic construct
ISSSSSTI

SEQ ID NO: 20851 - protein, 8 aa, Artificial Sequence
  Synthetic construct
ISGIGVST

SEQ ID NO: 20852 - protein, 8 aa, Artificial Sequence
  Synthetic construct
ISSRSSYI

SEQ ID NO: 20853 - protein, 7 aa, Artificial Sequence
  Synthetic construct
IFHSGST

SEQ ID NO: 20854 - protein, 8 aa, Artificial Sequence
  Synthetic construct
FDPEDAET

SEQ ID NO: 20855 - protein, 8 aa, Artificial Sequence
  Synthetic construct
VSYDGSNK

SEQ ID NO: 20856 - protein, 8 aa, Artificial Sequence
  Synthetic construct
ISWDGGST

SEQ ID NO: 20857 - protein, 8 aa, Artificial Sequence
  Synthetic construct
ISGSGGAT

SEQ ID NO: 20858 - protein, 8 aa, Artificial Sequence
  Synthetic construct
ISSSSSYI

SEQ ID NO: 20859 - protein, 8 aa, Artificial Sequence
  Synthetic construct
MWSIGNNK

SEQ ID NO: 20860 - protein, 7 aa, Artificial Sequence
  Synthetic construct
IYHSGST

SEQ ID NO: 20861 - protein, 7 aa, Artificial Sequence
  Synthetic construct
IYYSGST

SEQ ID NO: 20862 - protein, 8 aa, Artificial Sequence
  Synthetic construct
IIPIFGTA

SEQ ID NO: 20863 - protein, 8 aa, Artificial Sequence
  Synthetic construct
ISGGGAST

SEQ ID NO: 20864 - protein, 7 aa, Artificial Sequence
  Synthetic construct
IYWDDDK

SEQ ID NO: 20865 - protein, 8 aa, Artificial Sequence
  Synthetic construct
ISYDGDNK

SEQ ID NO: 20866 - protein, 7 aa, Artificial Sequence
  Synthetic construct
IFYSGAT

SEQ ID NO: 20867 - protein, 8 aa, Artificial Sequence
  Synthetic construct
ISYDGSNE

SEQ ID NO: 20868 - protein, 8 aa, Artificial Sequence
  Synthetic construct
IYYDGRNE

SEQ ID NO: 20869 - protein, 7 aa, Artificial Sequence
  Synthetic construct
IYYSGST

SEQ ID NO: 20870 - protein, 7 aa, Artificial Sequence
  Synthetic construct
ISYSGST

SEQ ID NO: 20871 - protein, 10 aa, Artificial Sequence
  Synthetic construct
IKSKTDGGTT

SEQ ID NO: 20872 - protein, 7 aa, Artificial Sequence
  Synthetic construct
TYYIGST

SEQ ID NO: 20873 - protein, 7 aa, Artificial Sequence
  Synthetic construct
IYYSGNT

SEQ ID NO: 20874 - protein, 7 aa, Artificial Sequence
  Synthetic construct
IYYSGST

SEQ ID NO: 20875 - protein, 7 aa, Artificial Sequence
  Synthetic construct
IYSSGST

SEQ ID NO: 20876 - protein, 8 aa, Artificial Sequence
  Synthetic construct
ISASGVNT

SEQ ID NO: 20877 - protein, 7 aa, Artificial Sequence
  Synthetic construct
IYYTGST

SEQ ID NO: 20878 - protein, 7 aa, Artificial Sequence
  Synthetic construct
IYYSGNS

SEQ ID NO: 20879 - protein, 8 aa, Artificial Sequence
  Synthetic construct
ISGYNGNT

SEQ ID NO: 20880 - protein, 8 aa, Artificial Sequence
  Synthetic construct
IIPGYGGA

SEQ ID NO: 20881 - protein, 8 aa, Artificial Sequence
  Synthetic construct
ISSDGTIQ

SEQ ID NO: 20882 - protein, 8 aa, Artificial Sequence
  Synthetic construct
ISGSGDST

SEQ ID NO: 20883 - protein, 8 aa, Artificial Sequence
  Synthetic construct
ISYDGNNK

SEQ ID NO: 20884 - protein, 8 aa, Artificial Sequence
  Synthetic construct
ISYDGSQK

SEQ ID NO: 20885 - protein, 8 aa, Artificial Sequence
  Synthetic construct
IWYDGSNK

SEQ ID NO: 20886 - protein, 8 aa, Artificial Sequence
  Synthetic construct
ISYDGSNK

SEQ ID NO: 20887 - protein, 8 aa, Artificial Sequence
  Synthetic construct
INQDGSEK

SEQ ID NO: 20888 - protein, 8 aa, Artificial Sequence
  Synthetic construct
IYVGDSDI

SEQ ID NO: 20889 - protein, 7 aa, Artificial Sequence
  Synthetic construct
VWWDGDD

SEQ ID NO: 20890 - protein, 8 aa, Artificial Sequence
  Synthetic construct
ISFDGTNT

SEQ ID NO: 20891 - protein, 8 aa, Artificial Sequence
  Synthetic construct
ISYDGSDK

SEQ ID NO: 20892 - protein, 7 aa, Artificial Sequence
  Synthetic construct
IYWDDDK

SEQ ID NO: 20893 - protein, 8 aa, Artificial Sequence
  Synthetic construct
IDSSGSTI

SEQ ID NO: 20894 - protein, 8 aa, Artificial Sequence
  Synthetic construct
ISRSSSYI

SEQ ID NO: 20895 - protein, 8 aa, Artificial Sequence
  Synthetic construct
ISGSGGRT

SEQ ID NO: 20896 - protein, 8 aa, Artificial Sequence
  Synthetic construct
INAGNGNT

SEQ ID NO: 20897 - protein, 8 aa, Artificial Sequence
  Synthetic construct
IIPIFGTT

SEQ ID NO: 20898 - protein, 7 aa, Artificial Sequence
  Synthetic construct
IDHSGST

SEQ ID NO: 20899 - protein, 8 aa, Artificial Sequence
  Synthetic construct
IKQDGSDK

SEQ ID NO: 20900 - protein, 8 aa, Artificial Sequence
  Synthetic construct
INTNTGNP

SEQ ID NO: 20901 - protein, 7 aa, Artificial Sequence
  Synthetic construct
IYYTGST

SEQ ID NO: 20902 - protein, 8 aa, Artificial Sequence
  Synthetic construct
INPTGSST

SEQ ID NO: 20903 - protein, 8 aa, Artificial Sequence
  Synthetic construct
ISSSGSTV

SEQ ID NO: 20904 - protein, 8 aa, Artificial Sequence
  Synthetic construct
LWYVGNNE

SEQ ID NO: 20905 - protein, 8 aa, Artificial Sequence
  Synthetic construct
INAGNGHT

SEQ ID NO: 20906 - protein, 7 aa, Artificial Sequence
  Synthetic construct
LYYNGST

SEQ ID NO: 20907 - protein, 8 aa, Artificial Sequence
  Synthetic construct
ISSNGGST

SEQ ID NO: 20908 - protein, 8 aa, Artificial Sequence
  Synthetic construct
INTNTGNP

SEQ ID NO: 20909 - protein, 8 aa, Artificial Sequence
  Synthetic construct
IIPIFGAP

SEQ ID NO: 20910 - protein, 7 aa, Artificial Sequence
  Synthetic construct
IYSGGST

SEQ ID NO: 20911 - protein, 8 aa, Artificial Sequence
  Synthetic construct
ISWNSGNI

SEQ ID NO: 20912 - protein, 8 aa, Artificial Sequence
  Synthetic construct
INTNTGNP

SEQ ID NO: 20913 - protein, 8 aa, Artificial Sequence
  Synthetic construct
STWNSGTI

SEQ ID NO: 20914 - protein, 7 aa, Artificial Sequence
  Synthetic construct
INHRGES

SEQ ID NO: 20915 - protein, 8 aa, Artificial Sequence
  Synthetic construct
IIPMFDII

SEQ ID NO: 20916 - protein, 8 aa, Artificial Sequence
  Synthetic construct
ISAYTGNT

SEQ ID NO: 20917 - protein, 7 aa, Artificial Sequence
  Synthetic construct
INHSGGT

SEQ ID NO: 20918 - protein, 8 aa, Artificial Sequence
  Synthetic construct
MSYDGPGQ

SEQ ID NO: 20919 - protein, 8 aa, Artificial Sequence
  Synthetic construct
ISGSGDST

SEQ ID NO: 20920 - protein, 8 aa, Artificial Sequence
  Synthetic construct
ISSSSSYV

SEQ ID NO: 20921 - protein, 8 aa, Artificial Sequence
  Synthetic construct
IIPMFGTE

SEQ ID NO: 20922 - protein, 8 aa, Artificial Sequence
  Synthetic construct
IWYDGSNE

SEQ ID NO: 20923 - protein, 8 aa, Artificial Sequence
  Synthetic construct
IVGMFGTT

SEQ ID NO: 20924 - protein, 7 aa, Artificial Sequence
  Synthetic construct
IYPGGTR

SEQ ID NO: 20925 - protein, 7 aa, Artificial Sequence
  Synthetic construct
IYYSGNT

SEQ ID NO: 20926 - protein, 7 aa, Artificial Sequence
  Synthetic construct
IFYSGST

SEQ ID NO: 20927 - protein, 8 aa, Artificial Sequence
  Synthetic construct
IKEDGSEK

SEQ ID NO: 20928 - protein, 8 aa, Artificial Sequence
  Synthetic construct
LWYVGNNK

SEQ ID NO: 20929 - protein, 8 aa, Artificial Sequence
  Synthetic construct
IWYDGTSK

SEQ ID NO: 20930 - protein, 8 aa, Artificial Sequence
  Synthetic construct
ISYDGDNK

SEQ ID NO: 20931 - protein, 8 aa, Artificial Sequence
  Synthetic construct
FDPEDGQT

SEQ ID NO: 20932 - protein, 8 aa, Artificial Sequence
  Synthetic construct
ISISGTYI

SEQ ID NO: 20933 - protein, 8 aa, Artificial Sequence
  Synthetic construct
LAKSGIGM

SEQ ID NO: 20934 - protein, 8 aa, Artificial Sequence
  Synthetic construct
VSWNSGII

SEQ ID NO: 20935 - protein, 7 aa, Artificial Sequence
  Synthetic construct
IYSGGNT

SEQ ID NO: 20936 - protein, 7 aa, Artificial Sequence
  Synthetic construct
IYWDDDK

SEQ ID NO: 20937 - protein, 7 aa, Artificial Sequence
  Synthetic construct
IGTAGDT

SEQ ID NO: 20938 - protein, 8 aa, Artificial Sequence
  Synthetic construct
IHTSTGNP

SEQ ID NO: 20939 - protein, 8 aa, Artificial Sequence
  Synthetic construct
ISAYNGNI

SEQ ID NO: 20940 - protein, 7 aa, Artificial Sequence
  Synthetic construct
IGTAGDT

SEQ ID NO: 20941 - protein, 8 aa, Artificial Sequence
  Synthetic construct
ISYDGNNK

SEQ ID NO: 20942 - protein, 7 aa, Artificial Sequence
  Synthetic construct
IYWDDDK

SEQ ID NO: 20943 - protein, 8 aa, Artificial Sequence
  Synthetic construct
INTNTGNP

SEQ ID NO: 20944 - protein, 8 aa, Artificial Sequence
  Synthetic construct
INTNTGNP

SEQ ID NO: 20945 - protein, 7 aa, Artificial Sequence
  Synthetic construct
MYSTGRA

SEQ ID NO: 20946 - protein, 8 aa, Artificial Sequence
  Synthetic construct
ISGSSSFI

SEQ ID NO: 20947 - protein, 8 aa, Artificial Sequence
  Synthetic construct
INPYSGVT

SEQ ID NO: 20948 - protein, 8 aa, Artificial Sequence
  Synthetic construct
IKQDGSDK

SEQ ID NO: 20949 - protein, 8 aa, Artificial Sequence
  Synthetic construct
INTNTGNP

SEQ ID NO: 20950 - protein, 8 aa, Artificial Sequence
  Synthetic construct
MSGETGHI

SEQ ID NO: 20951 - protein, 8 aa, Artificial Sequence
  Synthetic construct
IWYDGSNK

SEQ ID NO: 20952 - protein, 8 aa, Artificial Sequence
  Synthetic construct
FDPEDGET

SEQ ID NO: 20953 - protein, 8 aa, Artificial Sequence
  Synthetic construct
FDPEDVEI

SEQ ID NO: 20954 - protein, 8 aa, Artificial Sequence
  Synthetic construct
IWYDGSKK

SEQ ID NO: 20955 - protein, 8 aa, Artificial Sequence
  Synthetic construct
IKQDGSEK

SEQ ID NO: 20956 - protein, 8 aa, Artificial Sequence
  Synthetic construct
INTNTGDP

SEQ ID NO: 20957 - protein, 8 aa, Artificial Sequence
  Synthetic construct
INTNTGNP

SEQ ID NO: 20958 - protein, 8 aa, Artificial Sequence
  Synthetic construct
INTNTGNP

SEQ ID NO: 20959 - protein, 8 aa, Artificial Sequence
  Synthetic construct
IDVSGGGT

SEQ ID NO: 20960 - protein, 8 aa, Artificial Sequence
  Synthetic construct
ISYDGSNK

SEQ ID NO: 20961 - protein, 8 aa, Artificial Sequence
  Synthetic construct
INVGNGNT

SEQ ID NO: 20962 - protein, 8 aa, Artificial Sequence
  Synthetic construct
ISSSGRYI

SEQ ID NO: 20963 - protein, 7 aa, Artificial Sequence
  Synthetic construct
IYSTGST

SEQ ID NO: 20964 - protein, 8 aa, Artificial Sequence
  Synthetic construct
ISYDGSNK

SEQ ID NO: 20965 - protein, 8 aa, Artificial Sequence
  Synthetic construct
ISYDGSNK

SEQ ID NO: 20966 - protein, 8 aa, Artificial Sequence
  Synthetic construct
ISSDGSYK

SEQ ID NO: 20967 - protein, 7 aa, Artificial Sequence
  Synthetic construct
IFSNDEK

SEQ ID NO: 20968 - protein, 8 aa, Artificial Sequence
  Synthetic construct
ISYDGSIK

SEQ ID NO: 20969 - protein, 7 aa, Artificial Sequence
  Synthetic construct
VYYSGST

SEQ ID NO: 20970 - protein, 10 aa, Artificial Sequence
  Synthetic construct
IKSKTDGGTT

SEQ ID NO: 20971 - protein, 8 aa, Artificial Sequence
  Synthetic construct
INAANGDT

SEQ ID NO: 20972 - protein, 8 aa, Artificial Sequence
  Synthetic construct
INPNSGVT

SEQ ID NO: 20973 - protein, 8 aa, Artificial Sequence
  Synthetic construct
IKQDGSDK

SEQ ID NO: 20974 - protein, 8 aa, Artificial Sequence
  Synthetic construct
FEPEDGET

SEQ ID NO: 20975 - protein, 7 aa, Artificial Sequence
  Synthetic construct
IGTAGDT

SEQ ID NO: 20976 - protein, 8 aa, Artificial Sequence
  Synthetic construct
ISASGGST

SEQ ID NO: 20977 - protein, 8 aa, Artificial Sequence
  Synthetic construct
IIPIFDTE

SEQ ID NO: 20978 - protein, 8 aa, Artificial Sequence
  Synthetic construct
IIPIFGTA

SEQ ID NO: 20979 - protein, 3 aa, Artificial Sequence
  Synthetic construct
  MISC_FEATURE (1)..(3): X can be any amino acid
XXX

SEQ ID NO: 20980 - protein, 8 aa, Artificial Sequence
  Synthetic construct
IKQDGSEK

SEQ ID NO: 20981 - protein, 8 aa, Artificial Sequence
  Synthetic construct
INTNTGNP

SEQ ID NO: 20982 - protein, 7 aa, Artificial Sequence
  Synthetic construct
IHHSGTT

SEQ ID NO: 20983 - protein, 8 aa, Artificial Sequence
  Synthetic construct
ISNSGSVE

SEQ ID NO: 20984 - protein, 8 aa, Artificial Sequence
  Synthetic construct
IHTYTGNP

SEQ ID NO: 20985 - protein, 8 aa, Artificial Sequence
  Synthetic construct
IWYDGSNE

SEQ ID NO: 20986 - protein, 7 aa, Artificial Sequence
  Synthetic construct
IYSGGST

SEQ ID NO: 20987 - protein, 8 aa, Artificial Sequence
  Synthetic construct
INPVFGSP

SEQ ID NO: 20988 - protein, 7 aa, Artificial Sequence
  Synthetic construct
IYYGGST

SEQ ID NO: 20989 - protein, 8 aa, Artificial Sequence
  Synthetic construct
ISFDGTNT

SEQ ID NO: 20990 - protein, 7 aa, Artificial Sequence
  Synthetic construct
IDWDDDK

SEQ ID NO: 20991 - protein, 7 aa, Artificial Sequence
  Synthetic construct
MYTSGGT

SEQ ID NO: 20992 - protein, 8 aa, Artificial Sequence
  Synthetic construct
IYPGDSDT

SEQ ID NO: 20993 - protein, 8 aa, Artificial Sequence
  Synthetic construct
IWYDGSNK

SEQ ID NO: 20994 - protein, 10 aa, Artificial Sequence
  Synthetic construct
IKSKTDGGTT

SEQ ID NO: 20995 - protein, 8 aa, Artificial Sequence
  Synthetic construct
IDPSDSHT

SEQ ID NO: 20996 - protein, 8 aa, Artificial Sequence
  Synthetic construct
IWFDGSKK

SEQ ID NO: 20997 - protein, 7 aa, Artificial Sequence
  Synthetic construct
IFTSGST

SEQ ID NO: 20998 - protein, 7 aa, Artificial Sequence
  Synthetic construct
MYSSGSF

SEQ ID NO: 20999 - protein, 8 aa, Artificial Sequence
  Synthetic construct
ISSSSSTI

SEQ ID NO: 21000 - protein, 8 aa, Artificial Sequence
  Synthetic construct
ISTNSLTI

SEQ ID NO: 21001 - protein, 7 aa, Artificial Sequence
  Synthetic construct
IYYSGST

SEQ ID NO: 21002 - protein, 8 aa, Artificial Sequence
  Synthetic construct
IYYDGSNK

SEQ ID NO: 21003 - protein, 7 aa, Artificial Sequence
  Synthetic construct
IFAGGST

SEQ ID NO: 21004 - protein, 7 aa, Artificial Sequence
  Synthetic construct
IYHSGNT

SEQ ID NO: 21005 - protein, 8 aa, Artificial Sequence
  Synthetic construct
ISGSGGGT

SEQ ID NO: 21006 - protein, 7 aa, Artificial Sequence
  Synthetic construct
IYSGGST

SEQ ID NO: 21007 - protein, 7 aa, Artificial Sequence
  Synthetic construct
IFYSGIT

SEQ ID NO: 21008 - protein, 8 aa, Artificial Sequence
  Synthetic construct
IWFDGSNT

SEQ ID NO: 21009 - protein, 8 aa, Artificial Sequence
  Synthetic construct
IIPIHGTA

SEQ ID NO: 21010 - protein, 7 aa, Artificial Sequence
  Synthetic construct
INHSGGT

SEQ ID NO: 21011 - protein, 8 aa, Artificial Sequence
  Synthetic construct
ISYDGINK

SEQ ID NO: 21012 - protein, 8 aa, Artificial Sequence
  Synthetic construct
FDPDDGET

SEQ ID NO: 21013 - protein, 8 aa, Artificial Sequence
  Synthetic construct
IIPIFDTT

SEQ ID NO: 21014 - protein, 8 aa, Artificial Sequence
  Synthetic construct
ISSSGTTI

SEQ ID NO: 21015 - protein, 8 aa, Artificial Sequence
  Synthetic construct
ISYDGSNK

SEQ ID NO: 21016 - protein, 7 aa, Artificial Sequence
  Synthetic construct
IYYSGST

SEQ ID NO: 21017 - protein, 8 aa, Artificial Sequence
  Synthetic construct
IKEDGSEQ

SEQ ID NO: 21018 - protein, 9 aa, Artificial Sequence
  Synthetic construct
TYYRSEWYH

SEQ ID NO: 21019 - protein, 8 aa, Artificial Sequence
  Synthetic construct
VNPSGDST

SEQ ID NO: 21020 - protein, 8 aa, Artificial Sequence
  Synthetic construct
IYFDGSHE

SEQ ID NO: 21021 - protein, 8 aa, Artificial Sequence
  Synthetic construct
INPSGGDT

SEQ ID NO: 21022 - protein, 8 aa, Artificial Sequence
  Synthetic construct
ISTSSSTM

SEQ ID NO: 21023 - protein, 7 aa, Artificial Sequence
  Synthetic construct
IYTGGST

SEQ ID NO: 21024 - protein, 7 aa, Artificial Sequence
  Synthetic construct
IYSGGTT

SEQ ID NO: 21025 - protein, 8 aa, Artificial Sequence
  Synthetic construct
IIPIFGTA

SEQ ID NO: 21026 - protein, 8 aa, Artificial Sequence
  Synthetic construct
MNPKSGNT

SEQ ID NO: 21027 - protein, 8 aa, Artificial Sequence
  Synthetic construct
IWYDGRNK

SEQ ID NO: 21028 - protein, 7 aa, Artificial Sequence
  Synthetic construct
IDHSGRT

SEQ ID NO: 21029 - protein, 10 aa, Artificial Sequence
  Synthetic construct
IERGVDGGTT

SEQ ID NO: 21030 - protein, 7 aa, Artificial Sequence
  Synthetic construct
IYYSGST

SEQ ID NO: 21031 - protein, 7 aa, Artificial Sequence
  Synthetic construct
VYYSGST

SEQ ID NO: 21032 - protein, 8 aa, Artificial Sequence
  Synthetic construct
ISYDGTKK

SEQ ID NO: 21033 - protein, 8 aa, Artificial Sequence
  Synthetic construct
ISRSSTYI

SEQ ID NO: 21034 - protein, 8 aa, Artificial Sequence
  Synthetic construct
FDPENVET

SEQ ID NO: 21035 - protein, 8 aa, Artificial Sequence
  Synthetic construct
ISSSRTNT

SEQ ID NO: 21036 - protein, 8 aa, Artificial Sequence
  Synthetic construct
IKQDGGEK

SEQ ID NO: 21037 - protein, 7 aa, Artificial Sequence
  Synthetic construct
IYYSGNT

SEQ ID NO: 21038 - protein, 8 aa, Artificial Sequence
  Synthetic construct
IYYDGSNK

SEQ ID NO: 21039 - protein, 7 aa, Artificial Sequence
  Synthetic construct
IFHRGST

SEQ ID NO: 21040 - protein, 8 aa, Artificial Sequence
  Synthetic construct
ISSIGSTI

SEQ ID NO: 21041 - protein, 8 aa, Artificial Sequence
  Synthetic construct
IIPFFGTT

SEQ ID NO: 21042 - protein, 7 aa, Artificial Sequence
  Synthetic construct
INQSGST

SEQ ID NO: 21043 - protein, 7 aa, Artificial Sequence
  Synthetic construct
LFWDGDK

SEQ ID NO: 21044 - protein, 8 aa, Artificial Sequence
  Synthetic construct
ISYDGSNK

SEQ ID NO: 21045 - protein, 8 aa, Artificial Sequence
  Synthetic construct
ISGSGDRT

SEQ ID NO: 21046 - protein, 8 aa, Artificial Sequence
  Synthetic construct
ISSRSSYI

SEQ ID NO: 21047 - protein, 8 aa, Artificial Sequence
  Synthetic construct
IIPIFGIA

SEQ ID NO: 21048 - protein, 8 aa, Artificial Sequence
  Synthetic construct
ISTYNGNT

SEQ ID NO: 21049 - protein, 8 aa, Artificial Sequence
  Synthetic construct
ISGSGGST

SEQ ID NO: 21050 - protein, 8 aa, Artificial Sequence
  Synthetic construct
ISYDGSNK

SEQ ID NO: 21051 - protein, 7 aa, Artificial Sequence
  Synthetic construct
IFYSGTT

SEQ ID NO: 21052 - protein, 8 aa, Artificial Sequence
  Synthetic construct
INPNSGVT

SEQ ID NO: 21053 - protein, 7 aa, Artificial Sequence
  Synthetic construct
IYWDYDK

SEQ ID NO: 21054 - protein, 8 aa, Artificial Sequence
  Synthetic construct
ISYDGSVQ

SEQ ID NO: 21055 - protein, 8 aa, Artificial Sequence
  Synthetic construct
IIPILGIT

SEQ ID NO: 21056 - protein, 8 aa, Artificial Sequence
  Synthetic construct
FDPEDGET

SEQ ID NO: 21057 - protein, 8 aa, Artificial Sequence
  Synthetic construct
FDPEDGET

SEQ ID NO: 21058 - protein, 8 aa, Artificial Sequence
  Synthetic construct
ISAYNGNT

SEQ ID NO: 21059 - protein, 8 aa, Artificial Sequence
  Synthetic construct
INTNTGIP

SEQ ID NO: 21060 - protein, 8 aa, Artificial Sequence
  Synthetic construct
INPTGGST

SEQ ID NO: 21061 - protein, 8 aa, Artificial Sequence
  Synthetic construct
ISYDGSNK

SEQ ID NO: 21062 - protein, 10 aa, Artificial Sequence
  Synthetic construct
IRSKPDGETT

SEQ ID NO: 21063 - protein, 8 aa, Artificial Sequence
  Synthetic construct
ISFDGSIT

SEQ ID NO: 21064 - protein, 8 aa, Artificial Sequence
  Synthetic construct
IIPIFGTA

SEQ ID NO: 21065 - protein, 7 aa, Artificial Sequence
  Synthetic construct
IYSGGST

SEQ ID NO: 21066 - protein, 7 aa, Artificial Sequence
  Synthetic construct
IYYSGST

SEQ ID NO: 21067 - protein, 8 aa, Artificial Sequence
  Synthetic construct
INTNTGDP

SEQ ID NO: 21068 - protein, 7 aa, Artificial Sequence
  Synthetic construct
IFYSGIT

SEQ ID NO: 21069 - protein, 8 aa, Artificial Sequence
  Synthetic construct
INTNTGDP

SEQ ID NO: 21070 - protein, 7 aa, Artificial Sequence
  Synthetic construct
INHNGRT

SEQ ID NO: 21071 - protein, 8 aa, Artificial Sequence
  Synthetic construct
IWFDGSNK

SEQ ID NO: 21072 - protein, 7 aa, Artificial Sequence
  Synthetic construct
IYSGGNT

SEQ ID NO: 21073 - protein, 8 aa, Artificial Sequence
  Synthetic construct
INTNTGYP

SEQ ID NO: 21074 - protein, 7 aa, Artificial Sequence
  Synthetic construct
IGIADDT

SEQ ID NO: 21075 - protein, 8 aa, Artificial Sequence
  Synthetic construct
INPSSGST

SEQ ID NO: 21076 - protein, 8 aa, Artificial Sequence
  Synthetic construct
ISYDGFNK

SEQ ID NO: 21077 - protein, 7 aa, Artificial Sequence
  Synthetic construct
IYYSGSA

SEQ ID NO: 21078 - protein, 8 aa, Artificial Sequence
  Synthetic construct
FDPENGET

SEQ ID NO: 21079 - protein, 8 aa, Artificial Sequence
  Synthetic construct
INPDTGGT

SEQ ID NO: 21080 - protein, 3 aa, Artificial Sequence
  Synthetic construct
  MISC_FEATURE (1)..(3): X can be any amino acid
XXX

SEQ ID NO: 21081 - protein, 8 aa, Artificial Sequence
  Synthetic construct
ISTSGTIT

SEQ ID NO: 21082 - protein, 8 aa, Artificial Sequence
  Synthetic construct
INRDGRST

SEQ ID NO: 21083 - protein, 7 aa, Artificial Sequence
  Synthetic construct
IYSGGST

SEQ ID NO: 21084 - protein, 7 aa, Artificial Sequence
  Synthetic construct
IYWDDDK

SEQ ID NO: 21085 - protein, 3 aa, Artificial Sequence
  Synthetic construct
  MISC_FEATURE (1)..(3): X can be any amino acid
XXX

SEQ ID NO: 21086 - protein, 7 aa, Artificial Sequence
  Synthetic construct
IFYTGST

SEQ ID NO: 21087 - protein, 8 aa, Artificial Sequence
  Synthetic construct
IIPVLGIA

SEQ ID NO: 21088 - protein, 8 aa, Artificial Sequence
  Synthetic construct
ISGSGGST

SEQ ID NO: 21089 - protein, 7 aa, Artificial Sequence
  Synthetic construct
IYYSGST

SEQ ID NO: 21090 - protein, 8 aa, Artificial Sequence
  Synthetic construct
IDATGSST

SEQ ID NO: 21091 - protein, 8 aa, Artificial Sequence
  Synthetic construct
INTNTGNP

SEQ ID NO: 21092 - protein, 7 aa, Artificial Sequence
  Synthetic construct
ISHSGNT

SEQ ID NO: 21093 - protein, 8 aa, Artificial Sequence
  Synthetic construct
IIPIFGTA

SEQ ID NO: 21094 - protein, 8 aa, Artificial Sequence
  Synthetic construct
IYPGDSDT

SEQ ID NO: 21095 - protein, 7 aa, Artificial Sequence
  Synthetic construct
IYYSGST

SEQ ID NO: 21096 - protein, 8 aa, Artificial Sequence
  Synthetic construct
ISYDGINK

SEQ ID NO: 21097 - protein, 8 aa, Artificial Sequence
  Synthetic construct
ISYDGNNK

SEQ ID NO: 21098 - protein, 8 aa, Artificial Sequence
  Synthetic construct
ISYDGNNK

SEQ ID NO: 21099 - protein, 8 aa, Artificial Sequence
  Synthetic construct
STWNSGTI

SEQ ID NO: 21100 - protein, 8 aa, Artificial Sequence
  Synthetic construct
LIPMFGTP

SEQ ID NO: 21101 - protein, 8 aa, Artificial Sequence
  Synthetic construct
IIPIFGTA

SEQ ID NO: 21102 - protein, 8 aa, Artificial Sequence
  Synthetic construct
IYPGDSDT

SEQ ID NO: 21103 - protein, 8 aa, Artificial Sequence
  Synthetic construct
LDVSGGGT

SEQ ID NO: 21104 - protein, 7 aa, Artificial Sequence
  Synthetic construct
VVHSGST

SEQ ID NO: 21105 - protein, 8 aa, Artificial Sequence
  Synthetic construct
ISGSGGGT

SEQ ID NO: 21106 - protein, 8 aa, Artificial Sequence
  Synthetic construct
IWYDGSNK

SEQ ID NO: 21107 - protein, 8 aa, Artificial Sequence
  Synthetic construct
INTNTGDP

SEQ ID NO: 21108 - protein, 7 aa, Artificial Sequence
  Synthetic construct
IYTGGST

SEQ ID NO: 21109 - protein, 8 aa, Artificial Sequence
  Synthetic construct
IIPILSIS

SEQ ID NO: 21110 - protein, 8 aa, Artificial Sequence
  Synthetic construct
ISGSGDRT

SEQ ID NO: 21111 - protein, 8 aa, Artificial Sequence
  Synthetic construct
ISSSSSYI

SEQ ID NO: 21112 - protein, 8 aa, Artificial Sequence
  Synthetic construct
IYPGDSDT

SEQ ID NO: 21113 - protein, 7 aa, Artificial Sequence
  Synthetic construct
SNHGGST

SEQ ID NO: 21114 - protein, 8 aa, Artificial Sequence
  Synthetic construct
ISWNSAGI

SEQ ID NO: 21115 - protein, 8 aa, Artificial Sequence
  Synthetic construct
ISADNGNT

SEQ ID NO: 21116 - protein, 7 aa, Artificial Sequence
  Synthetic construct
IYYSGST

SEQ ID NO: 21117 - protein, 8 aa, Artificial Sequence
  Synthetic construct
FDPEDGET

SEQ ID NO: 21118 - protein, 8 aa, Artificial Sequence
  Synthetic construct
ISYDGYNR

SEQ ID NO: 21119 - protein, 8 aa, Artificial Sequence
  Synthetic construct
IDASDSYT

SEQ ID NO: 21120 - protein, 7 aa, Artificial Sequence
  Synthetic construct
VYDTGNT

SEQ ID NO: 21121 - protein, 8 aa, Artificial Sequence
  Synthetic construct
IIPVVGLT

SEQ ID NO: 21122 - protein, 8 aa, Artificial Sequence
  Synthetic construct
IHTNTGYP

SEQ ID NO: 21123 - protein, 8 aa, Artificial Sequence
  Synthetic construct
ISGSSSYI

SEQ ID NO: 21124 - protein, 8 aa, Artificial Sequence
  Synthetic construct
VIPIFGTA

SEQ ID NO: 21125 - protein, 7 aa, Artificial Sequence
  Synthetic construct
IDWDDDK

SEQ ID NO: 21126 - protein, 8 aa, Artificial Sequence
  Synthetic construct
ISFDGSNK

SEQ ID NO: 21127 - protein, 8 aa, Artificial Sequence
  Synthetic construct
FNPEHDET

SEQ ID NO: 21128 - protein, 8 aa, Artificial Sequence
  Synthetic construct
IDTSTGHP

SEQ ID NO: 21129 - protein, 7 aa, Artificial Sequence
  Synthetic construct
IYSGGST

SEQ ID NO: 21130 - protein, 7 aa, Artificial Sequence
  Synthetic construct
IYSGGST

SEQ ID NO: 21131 - protein, 8 aa, Artificial Sequence
  Synthetic construct
IKEDGSEK

SEQ ID NO: 21132 - protein, 8 aa, Artificial Sequence
  Synthetic construct
ITWNSGTL

SEQ ID NO: 21133 - protein, 8 aa, Artificial Sequence
  Synthetic construct
IIPIFGTA

SEQ ID NO: 21134 - protein, 8 aa, Artificial Sequence
  Synthetic construct
ITPILGIT

SEQ ID NO: 21135 - protein, 8 aa, Artificial Sequence
  Synthetic construct
ISWNSVTI

SEQ ID NO: 21136 - protein, 7 aa, Artificial Sequence
  Synthetic construct
IYYSGST

SEQ ID NO: 21137 - protein, 8 aa, Artificial Sequence
  Synthetic construct
ISYDGSNK

SEQ ID NO: 21138 - protein, 7 aa, Artificial Sequence
  Synthetic construct
IYAGGTT

SEQ ID NO: 21139 - protein, 8 aa, Artificial Sequence
  Synthetic construct
ISAFTGNT

SEQ ID NO: 21140 - protein, 8 aa, Artificial Sequence
  Synthetic construct
IYPGDSDT

SEQ ID NO: 21141 - protein, 7 aa, Artificial Sequence
  Synthetic construct
IISSGDT

SEQ ID NO: 21142 - protein, 8 aa, Artificial Sequence
  Synthetic construct
INQDGSEK

SEQ ID NO: 21143 - protein, 7 aa, Artificial Sequence
  Synthetic construct
VYYSGST

SEQ ID NO: 21144 - protein, 8 aa, Artificial Sequence
  Synthetic construct
FDPEDGET

SEQ ID NO: 21145 - protein, 8 aa, Artificial Sequence
  Synthetic construct
ISYDGSNK

SEQ ID NO: 21146 - protein, 8 aa, Artificial Sequence
  Synthetic construct
INTGNGYT

SEQ ID NO: 21147 - protein, 8 aa, Artificial Sequence
  Synthetic construct
INPSGGST

SEQ ID NO: 21148 - protein, 8 aa, Artificial Sequence
  Synthetic construct
IYPGDSDT

SEQ ID NO: 21149 - protein, 8 aa, Artificial Sequence
  Synthetic construct
ISYDGSIQ

SEQ ID NO: 21150 - protein, 7 aa, Artificial Sequence
  Synthetic construct
IYYSGST

SEQ ID NO: 21151 - protein, 7 aa, Artificial Sequence
  Synthetic construct
IYTSGST

SEQ ID NO: 21152 - protein, 7 aa, Artificial Sequence
  Synthetic construct
IYHSGRA

SEQ ID NO: 21153 - protein, 7 aa, Artificial Sequence
  Synthetic construct
VHNSGDT

SEQ ID NO: 21154 - protein, 8 aa, Artificial Sequence
  Synthetic construct
STWNSGII

SEQ ID NO: 21155 - protein, 8 aa, Artificial Sequence
  Synthetic construct
ISYDGSNK

SEQ ID NO: 21156 - protein, 8 aa, Artificial Sequence
  Synthetic construct
ISYDGSNK

SEQ ID NO: 21157 - protein, 8 aa, Artificial Sequence
  Synthetic construct
MSYDGSNK

SEQ ID NO: 21158 - protein, 8 aa, Artificial Sequence
  Synthetic construct
ISYDGMNK

SEQ ID NO: 21159 - protein, 8 aa, Artificial Sequence
  Synthetic construct
ISYDGTNK

SEQ ID NO: 21160 - protein, 8 aa, Artificial Sequence
  Synthetic construct
IYPGDSDT

SEQ ID NO: 21161 - protein, 7 aa, Artificial Sequence
  Synthetic construct
IYTDTKT

SEQ ID NO: 21162 - protein, 7 aa, Artificial Sequence
  Synthetic construct
IYWDDDK

SEQ ID NO: 21163 - protein, 8 aa, Artificial Sequence
  Synthetic construct
IWYDGGNK

SEQ ID NO: 21164 - protein, 8 aa, Artificial Sequence
  Synthetic construct
IYPGDSDT

SEQ ID NO: 21165 - protein, 8 aa, Artificial Sequence
  Synthetic construct
IWYDGTNN

SEQ ID NO: 21166 - protein, 7 aa, Artificial Sequence
  Synthetic construct
IYIGGST

SEQ ID NO: 21167 - protein, 7 aa, Artificial Sequence
  Synthetic construct
IYYSGVT

SEQ ID NO: 21168 - protein, 8 aa, Artificial Sequence
  Synthetic construct
ISSSSSEI

SEQ ID NO: 21169 - protein, 7 aa, Artificial Sequence
  Synthetic construct
IYSGGST

SEQ ID NO: 21170 - protein, 8 aa, Artificial Sequence
  Synthetic construct
IKSNSLMI

SEQ ID NO: 21171 - protein, 8 aa, Artificial Sequence
  Synthetic construct
ISDSGRRT

SEQ ID NO: 21172 - protein, 8 aa, Artificial Sequence
  Synthetic construct
ITSSSRYI

SEQ ID NO: 21173 - protein, 7 aa, Artificial Sequence
  Synthetic construct
IYHSGST

SEQ ID NO: 21174 - protein, 8 aa, Artificial Sequence
  Synthetic construct
IKQDGSDK

SEQ ID NO: 21175 - protein, 8 aa, Artificial Sequence
  Synthetic construct
ISYDGDNK

SEQ ID NO: 21176 - protein, 8 aa, Artificial Sequence
  Synthetic construct
IWYDGNNK

SEQ ID NO: 21177 - protein, 8 aa, Artificial Sequence
  Synthetic construct
TSYSGGDQ

SEQ ID NO: 21178 - protein, 7 aa, Artificial Sequence
  Synthetic construct
IYWDDDK

SEQ ID NO: 21179 - protein, 8 aa, Artificial Sequence
  Synthetic construct
ISAYNGNT

SEQ ID NO: 21180 - protein, 8 aa, Artificial Sequence
  Synthetic construct
ISGSGDRT

SEQ ID NO: 21181 - protein, 7 aa, Artificial Sequence
  Synthetic construct
IYSSGST

SEQ ID NO: 21182 - protein, 8 aa, Artificial Sequence
  Synthetic construct
ISSEGGSI

SEQ ID NO: 21183 - protein, 8 aa, Artificial Sequence
  Synthetic construct
IIPIFDTT

SEQ ID NO: 21184 - protein, 8 aa, Artificial Sequence
  Synthetic construct
ISYDGSNK

SEQ ID NO: 21185 - protein, 7 aa, Artificial Sequence
  Synthetic construct
IYSGGDT

SEQ ID NO: 21186 - protein, 7 aa, Artificial Sequence
  Synthetic construct
IDHRGST

SEQ ID NO: 21187 - protein, 8 aa, Artificial Sequence
  Synthetic construct
LNVSGGGT

SEQ ID NO: 21188 - protein, 8 aa, Artificial Sequence
  Synthetic construct
ISYDVNDK

SEQ ID NO: 21189 - protein, 7 aa, Artificial Sequence
  Synthetic construct
IYDSGST

SEQ ID NO: 21190 - protein, 8 aa, Artificial Sequence
  Synthetic construct
ISYGGTMK

SEQ ID NO: 21191 - protein, 8 aa, Artificial Sequence
  Synthetic construct
IKQDGSDK

SEQ ID NO: 21192 - protein, 8 aa, Artificial Sequence
  Synthetic construct
ISGSGGST

SEQ ID NO: 21193 - protein, 7 aa, Artificial Sequence
  Synthetic construct
IYYSGST

SEQ ID NO: 21194 - protein, 7 aa, Artificial Sequence
  Synthetic construct
IYSGGST

SEQ ID NO: 21195 - protein, 7 aa, Artificial Sequence
  Synthetic construct
IYYSGST

SEQ ID NO: 21196 - protein, 8 aa, Artificial Sequence
  Synthetic construct
IYPGDSDT

SEQ ID NO: 21197 - protein, 8 aa, Artificial Sequence
  Synthetic construct
ISYDGINK

SEQ ID NO: 21198 - protein, 8 aa, Artificial Sequence
  Synthetic construct
ISYDGDNK

SEQ ID NO: 21199 - protein, 7 aa, Artificial Sequence
  Synthetic construct
GYSSGTT

SEQ ID NO: 21200 - protein, 8 aa, Artificial Sequence
  Synthetic construct
ISNSGSYI

SEQ ID NO: 21201 - protein, 8 aa, Artificial Sequence
  Synthetic construct
FDPEDGGT

SEQ ID NO: 21202 - protein, 8 aa, Artificial Sequence
  Synthetic construct
ISSSSSHI

SEQ ID NO: 21203 - protein, 10 aa, Artificial Sequence
  Synthetic construct
IKSKTDGGTT

SEQ ID NO: 21204 - protein, 8 aa, Artificial Sequence
  Synthetic construct
IYPGDSDT

SEQ ID NO: 21205 - protein, 3 aa, Artificial Sequence
  Synthetic construct
  MISC_FEATURE (1)..(3): X can be any amino acid
XXX

SEQ ID NO: 21206 - protein, 8 aa, Artificial Sequence
  Synthetic construct
IIPVFGTA

SEQ ID NO: 21207 - protein, 7 aa, Artificial Sequence
  Synthetic construct
INHSGRT

SEQ ID NO: 21208 - protein, 8 aa, Artificial Sequence
  Synthetic construct
ISFDGSNT

SEQ ID NO: 21209 - protein, 8 aa, Artificial Sequence
  Synthetic construct
ISSVNGSI

SEQ ID NO: 21210 - protein, 7 aa, Artificial Sequence
  Synthetic construct
GYSSGTT

SEQ ID NO: 21211 - protein, 8 aa, Artificial Sequence
  Synthetic construct
ISYDGSNK

SEQ ID NO: 21212 - protein, 7 aa, Artificial Sequence
  Synthetic construct
INHSGST

SEQ ID NO: 21213 - protein, 8 aa, Artificial Sequence
  Synthetic construct
IDPSDSDT

SEQ ID NO: 21214 - protein, 8 aa, Artificial Sequence
  Synthetic construct
ISPYNGNT

SEQ ID NO: 21215 - protein, 7 aa, Artificial Sequence
  Synthetic construct
IFYSGST

SEQ ID NO: 21216 - protein, 8 aa, Artificial Sequence
  Synthetic construct
ISYDGINT

SEQ ID NO: 21217 - protein, 8 aa, Artificial Sequence
  Synthetic construct
INPYNGNT

SEQ ID NO: 21218 - protein, 7 aa, Artificial Sequence
  Synthetic construct
IYSSGST

SEQ ID NO: 21219 - protein, 7 aa, Artificial Sequence
  Synthetic construct
VYHSGNT

SEQ ID NO: 21220 - protein, 7 aa, Artificial Sequence
  Synthetic construct
IHYSGST

SEQ ID NO: 21221 - protein, 7 aa, Artificial Sequence
  Synthetic construct
INHSGST

SEQ ID NO: 21222 - protein, 8 aa, Artificial Sequence
  Synthetic construct
ISNSGNDV

SEQ ID NO: 21223 - protein, 8 aa, Artificial Sequence
  Synthetic construct
ISYDGYNK

SEQ ID NO: 21224 - protein, 8 aa, Artificial Sequence
  Synthetic construct
ISGSGGGT

SEQ ID NO: 21225 - protein, 8 aa, Artificial Sequence
  Synthetic construct
ISYDGIKK

SEQ ID NO: 21226 - protein, 8 aa, Artificial Sequence
  Synthetic construct
INSDGSST

SEQ ID NO: 21227 - protein, 7 aa, Artificial Sequence
  Synthetic construct
IYSGGST

SEQ ID NO: 21228 - protein, 7 aa, Artificial Sequence
  Synthetic construct
IYTSGST

SEQ ID NO: 21229 - protein, 7 aa, Artificial Sequence
  Synthetic construct
IYYSGST

SEQ ID NO: 21230 - protein, 7 aa, Artificial Sequence
  Synthetic construct
IYWDDDK

SEQ ID NO: 21231 - protein, 8 aa, Artificial Sequence
  Synthetic construct
ISYEGSVQ

SEQ ID NO: 21232 - protein, 8 aa, Artificial Sequence
  Synthetic construct
IWYDGSNK

SEQ ID NO: 21233 - protein, 8 aa, Artificial Sequence
  Synthetic construct
IDWNSGVI

SEQ ID NO: 21234 - protein, 7 aa, Artificial Sequence
  Synthetic construct
IFHSRTT

SEQ ID NO: 21235 - protein, 8 aa, Artificial Sequence
  Synthetic construct
IWYDGSNQ

SEQ ID NO: 21236 - protein, 7 aa, Artificial Sequence
  Synthetic construct
IYWDDDK

SEQ ID NO: 21237 - protein, 8 aa, Artificial Sequence
  Synthetic construct
IGSTGGTI

SEQ ID NO: 21238 - protein, 8 aa, Artificial Sequence
  Synthetic construct
TSYDGGNK

SEQ ID NO: 21239 - protein, 8 aa, Artificial Sequence
  Synthetic construct
IDPGDPYS

SEQ ID NO: 21240 - protein, 8 aa, Artificial Sequence
  Synthetic construct
TSYDGSKK

SEQ ID NO: 21241 - protein, 8 aa, Artificial Sequence
  Synthetic construct
STWNSGTI

SEQ ID NO: 21242 - protein, 7 aa, Artificial Sequence
  Synthetic construct
IYWDDDK

SEQ ID NO: 21243 - protein, 8 aa, Artificial Sequence
  Synthetic construct
ISYDGSHK

SEQ ID NO: 21244 - protein, 8 aa, Artificial Sequence
  Synthetic construct
IKQDGSEK

SEQ ID NO: 21245 - protein, 10 aa, Artificial Sequence
  Synthetic construct
IRRKTDNYAT

SEQ ID NO: 21246 - protein, 8 aa, Artificial Sequence
  Synthetic construct
ISAYNGNT

SEQ ID NO: 21247 - protein, 7 aa, Artificial Sequence
  Synthetic construct
IYYSGNT

SEQ ID NO: 21248 - protein, 8 aa, Artificial Sequence
  Synthetic construct
IYPDDSHT

SEQ ID NO: 21249 - protein, 8 aa, Artificial Sequence
  Synthetic construct
ISSSSSTI

SEQ ID NO: 21250 - protein, 7 aa, Artificial Sequence
  Synthetic construct
IYSGGSR

SEQ ID NO: 21251 - protein, 7 aa, Artificial Sequence
  Synthetic construct
IYWDDDK

SEQ ID NO: 21252 - protein, 7 aa, Artificial Sequence
  Synthetic construct
IYAGGTT

SEQ ID NO: 21253 - protein, 7 aa, Artificial Sequence
  Synthetic construct
LYYTESP

SEQ ID NO: 21254 - protein, 8 aa, Artificial Sequence
  Synthetic construct
IDPSDPYS

SEQ ID NO: 21255 - protein, 8 aa, Artificial Sequence
  Synthetic construct
STWNSGTI

SEQ ID NO: 21256 - protein, 8 aa, Artificial Sequence
  Synthetic construct
ISGSGGDA

SEQ ID NO: 21257 - protein, 8 aa, Artificial Sequence
  Synthetic construct
IIPIFGTT

SEQ ID NO: 21258 - protein, 8 aa, Artificial Sequence
  Synthetic construct
STWNSGTI

SEQ ID NO: 21259 - protein, 8 aa, Artificial Sequence
  Synthetic construct
INPPVGST

SEQ ID NO: 21260 - protein, 8 aa, Artificial Sequence
  Synthetic construct
INPKPGGT

SEQ ID NO: 21261 - protein, 7 aa, Artificial Sequence
  Synthetic construct
IYYSGST

SEQ ID NO: 21262 - protein, 8 aa, Artificial Sequence
  Synthetic construct
INTYSGNP

SEQ ID NO: 21263 - protein, 8 aa, Artificial Sequence
  Synthetic construct
ISYDGSKK

SEQ ID NO: 21264 - protein, 7 aa, Artificial Sequence
  Synthetic construct
IYFTGNT

SEQ ID NO: 21265 - protein, 7 aa, Artificial Sequence
  Synthetic construct
IYWDDEK

SEQ ID NO: 21266 - protein, 8 aa, Artificial Sequence
  Synthetic construct
INTYTGNP

SEQ ID NO: 21267 - protein, 8 aa, Artificial Sequence
  Synthetic construct
IIPIFGTT

SEQ ID NO: 21268 - protein, 7 aa, Artificial Sequence
  Synthetic construct
VGTTGDT

SEQ ID NO: 21269 - protein, 8 aa, Artificial Sequence
  Synthetic construct
LSFDGSNT

SEQ ID NO: 21270 - protein, 8 aa, Artificial Sequence
  Synthetic construct
ISGSSRTI

SEQ ID NO: 21271 - protein, 7 aa, Artificial Sequence
  Synthetic construct
IYYSGNT

SEQ ID NO: 21272 - protein, 8 aa, Artificial Sequence
  Synthetic construct
IWDDGNNK

SEQ ID NO: 21273 - protein, 8 aa, Artificial Sequence
  Synthetic construct
ISYDGSNK

SEQ ID NO: 21274 - protein, 8 aa, Artificial Sequence
  Synthetic construct
INTNTGNS

SEQ ID NO: 21275 - protein, 8 aa, Artificial Sequence
  Synthetic construct
INTNTGNP

SEQ ID NO: 21276 - protein, 8 aa, Artificial Sequence
  Synthetic construct
ISGVGQTT

SEQ ID NO: 21277 - protein, 8 aa, Artificial Sequence
  Synthetic construct
IWYDGSDK

SEQ ID NO: 21278 - protein, 8 aa, Artificial Sequence
  Synthetic construct
LIPIFGTA

SEQ ID NO: 21279 - protein, 8 aa, Artificial Sequence
  Synthetic construct
INPSGGST

SEQ ID NO: 21280 - protein, 8 aa, Artificial Sequence
  Synthetic construct
ISWNSASM

SEQ ID NO: 21281 - protein, 8 aa, Artificial Sequence
  Synthetic construct
IWYDGSNK

SEQ ID NO: 21282 - protein, 7 aa, Artificial Sequence
  Synthetic construct
IYYSGST

SEQ ID NO: 21283 - protein, 8 aa, Artificial Sequence
  Synthetic construct
IIPFLDTA

SEQ ID NO: 21284 - protein, 8 aa, Artificial Sequence
  Synthetic construct
INPSGGST

SEQ ID NO: 21285 - protein, 8 aa, Artificial Sequence
  Synthetic construct
IWHDESNK

SEQ ID NO: 21286 - protein, 8 aa, Artificial Sequence
  Synthetic construct
ISAYNGNT

SEQ ID NO: 21287 - protein, 8 aa, Artificial Sequence
  Synthetic construct
IIPIFDTA

SEQ ID NO: 21288 - protein, 8 aa, Artificial Sequence
  Synthetic construct
INPEAGST

SEQ ID NO: 21289 - protein, 8 aa, Artificial Sequence
  Synthetic construct
ISYDGSNK

SEQ ID NO: 21290 - protein, 8 aa, Artificial Sequence
  Synthetic construct
IWFDGTKK

SEQ ID NO: 21291 - protein, 8 aa, Artificial Sequence
  Synthetic construct
INTNTGNP

SEQ ID NO: 21292 - protein, 8 aa, Artificial Sequence
  Synthetic construct
IWYDGSNK

SEQ ID NO: 21293 - protein, 8 aa, Artificial Sequence
  Synthetic construct
FDPEDGET

SEQ ID NO: 21294 - protein, 7 aa, Artificial Sequence
  Synthetic construct
VFWDFDK

SEQ ID NO: 21295 - protein, 8 aa, Artificial Sequence
  Synthetic construct
IIPIFGTA

SEQ ID NO: 21296 - protein, 7 aa, Artificial Sequence
  Synthetic construct
IYYSGRT

SEQ ID NO: 21297 - protein, 8 aa, Artificial Sequence
  Synthetic construct
ISAYNGNT

SEQ ID NO: 21298 - protein, 7 aa, Artificial Sequence
  Synthetic construct
IYYSGST

SEQ ID NO: 21299 - protein, 7 aa, Artificial Sequence
  Synthetic construct
IDTAGDT

SEQ ID NO: 21300 - protein, 7 aa, Artificial Sequence
  Synthetic construct
IYYSGST

SEQ ID NO: 21301 - protein, 8 aa, Artificial Sequence
  Synthetic construct
STWNSGTI

SEQ ID NO: 21302 - protein, 8 aa, Artificial Sequence
  Synthetic construct
ISYDGSNK

SEQ ID NO: 21303 - protein, 8 aa, Artificial Sequence
  Synthetic construct
ISISAKST

SEQ ID NO: 21304 - protein, 8 aa, Artificial Sequence
  Synthetic construct
IGGSGGNT

SEQ ID NO: 21305 - protein, 8 aa, Artificial Sequence
  Synthetic construct
ISYDGSNK

SEQ ID NO: 21306 - protein, 8 aa, Artificial Sequence
  Synthetic construct
FYPGDSDT

SEQ ID NO: 21307 - protein, 8 aa, Artificial Sequence
  Synthetic construct
IKRDGIEK

SEQ ID NO: 21308 - protein, 8 aa, Artificial Sequence
  Synthetic construct
ISGGGGGT

SEQ ID NO: 21309 - protein, 8 aa, Artificial Sequence
  Synthetic construct
IIPIFGTA

SEQ ID NO: 21310 - protein, 8 aa, Artificial Sequence
  Synthetic construct
IWFDGNNE

SEQ ID NO: 21311 - protein, 8 aa, Artificial Sequence
  Synthetic construct
INTNTGNP

SEQ ID NO: 21312 - protein, 7 aa, Artificial Sequence
  Synthetic construct
IYWDDDK

SEQ ID NO: 21313 - protein, 8 aa, Artificial Sequence
  Synthetic construct
IRGSSGNL

SEQ ID NO: 21314 - protein, 7 aa, Artificial Sequence
  Synthetic construct
IYRSGST

SEQ ID NO: 21315 - protein, 8 aa, Artificial Sequence
  Synthetic construct
IWYDGTKK

SEQ ID NO: 21316 - protein, 7 aa, Artificial Sequence
  Synthetic construct
IFTSGGS

SEQ ID NO: 21317 - protein, 7 aa, Artificial Sequence
  Synthetic construct
IYWDDDK

SEQ ID NO: 21318 - protein, 8 aa, Artificial Sequence
  Synthetic construct
INTNTGNP

SEQ ID NO: 21319 - protein, 7 aa, Artificial Sequence
  Synthetic construct
IYSGGST

SEQ ID NO: 21320 - protein, 8 aa, Artificial Sequence
  Synthetic construct
ISAYNGNT

SEQ ID NO: 21321 - protein, 9 aa, Artificial Sequence
  Synthetic construct
AFYRSRWYN

SEQ ID NO: 21322 - protein, 7 aa, Artificial Sequence
  Synthetic construct
IYWDDDK

SEQ ID NO: 21323 - protein, 7 aa, Artificial Sequence
  Synthetic construct
IYHSGST

SEQ ID NO: 21324 - protein, 7 aa, Artificial Sequence
  Synthetic construct
IYSGGST

SEQ ID NO: 21325 - protein, 8 aa, Artificial Sequence
  Synthetic construct
INDNGGST

SEQ ID NO: 21326 - protein, 8 aa, Artificial Sequence
  Synthetic construct
ISWDGDDT

SEQ ID NO: 21327 - protein, 7 aa, Artificial Sequence
  Synthetic construct
IYYTGST

SEQ ID NO: 21328 - protein, 8 aa, Artificial Sequence
  Synthetic construct
ISYDGSVQ

SEQ ID NO: 21329 - protein, 8 aa, Artificial Sequence
  Synthetic construct
INPSGGST

SEQ ID NO: 21330 - protein, 8 aa, Artificial Sequence
  Synthetic construct
IKQDGSET

SEQ ID NO: 21331 - protein, 7 aa, Artificial Sequence
  Synthetic construct
IYWDDDK

SEQ ID NO: 21332 - protein, 8 aa, Artificial Sequence
  Synthetic construct
ISYDGTNK

SEQ ID NO: 21333 - protein, 8 aa, Artificial Sequence
  Synthetic construct
IWYDGGNK

SEQ ID NO: 21334 - protein, 8 aa, Artificial Sequence
  Synthetic construct
IKQDGSEK

SEQ ID NO: 21335 - protein, 8 aa, Artificial Sequence
  Synthetic construct
IDPSDSHT

SEQ ID NO: 21336 - protein, 7 aa, Artificial Sequence
  Synthetic construct
IYWDDTK

SEQ ID NO: 21337 - protein, 10 aa, Artificial Sequence
  Synthetic construct
IKSRKDGGTA

SEQ ID NO: 21338 - protein, 10 aa, Artificial Sequence
  Synthetic construct
IQREVDAGTT

SEQ ID NO: 21339 - protein, 8 aa, Artificial Sequence
  Synthetic construct
FDPEAAET

SEQ ID NO: 21340 - protein, 7 aa, Artificial Sequence
  Synthetic construct
VDYSGRT

SEQ ID NO: 21341 - protein, 8 aa, Artificial Sequence
  Synthetic construct
IYPGDSNT

SEQ ID NO: 21342 - protein, 8 aa, Artificial Sequence
  Synthetic construct
INWNSRST

SEQ ID NO: 21343 - protein, 8 aa, Artificial Sequence
  Synthetic construct
INAGNGHT

SEQ ID NO: 21344 - protein, 8 aa, Artificial Sequence
  Synthetic construct
INFNSGST

SEQ ID NO: 21345 - protein, 7 aa, Artificial Sequence
  Synthetic construct
IYYTGST

SEQ ID NO: 21346 - protein, 8 aa, Artificial Sequence
  Synthetic construct
ISNDGKNK

SEQ ID NO: 21347 - protein, 8 aa, Artificial Sequence
  Synthetic construct
STWNSGTI

SEQ ID NO: 21348 - protein, 8 aa, Artificial Sequence
  Synthetic construct
IIPILGIA

SEQ ID NO: 21349 - protein, 7 aa, Artificial Sequence
  Synthetic construct
IYWDDDK

SEQ ID NO: 21350 - protein, 7 aa, Artificial Sequence
  Synthetic construct
IYWDDDK

SEQ ID NO: 21351 - protein, 7 aa, Artificial Sequence
  Synthetic construct
IYYSGNT

SEQ ID NO: 21352 - protein, 8 aa, Artificial Sequence
  Synthetic construct
LSGHSSYA

SEQ ID NO: 21353 - protein, 10 aa, Artificial Sequence
  Synthetic construct
VGNKANTYTT

SEQ ID NO: 21354 - protein, 8 aa, Artificial Sequence
  Synthetic construct
ISYDGFNK

SEQ ID NO: 21355 - protein, 8 aa, Artificial Sequence
  Synthetic construct
IDPSDSYT

SEQ ID NO: 21356 - protein, 13 aa, Artificial Sequence
  Synthetic construct
ARVSYDRGWGFDY

SEQ ID NO: 21357 - protein, 19 aa, Artificial Sequence
  Synthetic construct
ARTANDWLSGDYDYYYMDV

SEQ ID NO: 21358 - protein, 13 aa, Artificial Sequence
  Synthetic construct
ARGGGGNYRYFDY

SEQ ID NO: 21359 - protein, 22 aa, Artificial Sequence
  Synthetic construct
ARPRFGGSGNYYNVPGAGAFDM

SEQ ID NO: 21360 - protein, 11 aa, Artificial Sequence
  Synthetic construct
AAITGTGSFDY

SEQ ID NO: 21361 - protein, 18 aa, Artificial Sequence
  Synthetic construct
ASLMETGSIQDDYYNMDV

SEQ ID NO: 21362 - protein, 12 aa, Artificial Sequence
  Synthetic construct
ASGVFQPGYPTN

SEQ ID NO: 21363 - protein, 13 aa, Artificial Sequence
  Synthetic construct
ARTREYSKYYMDV

SEQ ID NO: 21364 - protein, 11 aa, Artificial Sequence
  Synthetic construct
VSTPYYYGMDV

SEQ ID NO: 21365 - protein, 11 aa, Artificial Sequence
  Synthetic construct
ARGVQPHFFDY

SEQ ID NO: 21366 - protein, 19 aa, Artificial Sequence
  Synthetic construct
ARDFDNMVRGGYYYYYMDV

SEQ ID NO: 21367 - protein, 20 aa, Artificial Sequence
  Synthetic construct
ARDRGYFFSGTEYYYSYMDV

SEQ ID NO: 21368 - protein, 14 aa, Artificial Sequence
  Synthetic construct
AKGRGGNYLVAFDI

SEQ ID NO: 21369 - protein, 16 aa, Artificial Sequence
  Synthetic construct
ATGLWFGDSETNWFDP

SEQ ID NO: 21370 - protein, 15 aa, Artificial Sequence
  Synthetic construct
ARVSAYDSSGSWGDY

SEQ ID NO: 21371 - protein, 14 aa, Artificial Sequence
  Synthetic construct
ARVSYGSGYNWFDP

SEQ ID NO: 21372 - protein, 15 aa, Artificial Sequence
  Synthetic construct
VRDRRIVGYYFGLDV

SEQ ID NO: 21373 - protein, 11 aa, Artificial Sequence
  Synthetic construct
ARDLQESGMDV

SEQ ID NO: 21374 - protein, 11 aa, Artificial Sequence
  Synthetic construct
ARWAVAGFFDY

SEQ ID NO: 21375 - protein, 10 aa, Artificial Sequence
  Synthetic construct
ATTRAGTIDY

SEQ ID NO: 21376 - protein, 13 aa, Artificial Sequence
  Synthetic construct
ARVFTTLDWYFDL

SEQ ID NO: 21377 - protein, 17 aa, Artificial Sequence
  Synthetic construct
ARPGWELPGLSVGAFDI

SEQ ID NO: 21378 - protein, 14 aa, Artificial Sequence
  Synthetic construct
ARQGPSWSHDAFDI

SEQ ID NO: 21379 - protein, 15 aa, Artificial Sequence
  Synthetic construct
ARGGPPNYYYYGMDV

SEQ ID NO: 21380 - protein, 18 aa, Artificial Sequence
  Synthetic construct
ARGRDSSGLDLYYYGIDV

SEQ ID NO: 21381 - protein, 13 aa, Artificial Sequence
  Synthetic construct
THGNDYGDSHVTH

SEQ ID NO: 21382 - protein, 11 aa, Artificial Sequence
  Synthetic construct
ARETAMVGIDY

SEQ ID NO: 21383 - protein, 18 aa, Artificial Sequence
  Synthetic construct
AGNSAYFDWTSPHYYMDV

SEQ ID NO: 21384 - protein, 26 aa, Artificial Sequence
  Synthetic construct
ARLGRPTAIVVAGIPSPPVYFYYMDV

SEQ ID NO: 21385 - protein, 18 aa, Artificial Sequence
  Synthetic construct
ATDSQLERRFWSSYSMDV

SEQ ID NO: 21386 - protein, 13 aa, Artificial Sequence
  Synthetic construct
ARMRGWRGRAFDI

SEQ ID NO: 21387 - protein, 15 aa, Artificial Sequence
  Synthetic construct
ARYSYGYLGDDAYDI

SEQ ID NO: 21388 - protein, 17 aa, Artificial Sequence
  Synthetic construct
AKGRHLLYLGDFFPFDY

SEQ ID NO: 21389 - protein, 15 aa, Artificial Sequence
  Synthetic construct
ARDGSSGYYDEPFDY

SEQ ID NO: 21390 - protein, 14 aa, Artificial Sequence
  Synthetic construct
GRVGGSGYDVEFDY

SEQ ID NO: 21391 - protein, 19 aa, Artificial Sequence
  Synthetic construct
ARSPRYCLGGSCYPLHFDS

SEQ ID NO: 21392 - protein, 15 aa, Artificial Sequence
  Synthetic construct
ARDPQVYSGHGSVDY

SEQ ID NO: 21393 - protein, 14 aa, Artificial Sequence
  Synthetic construct
AREGLVGATTGLDY

SEQ ID NO: 21394 - protein, 15 aa, Artificial Sequence
  Synthetic construct
AHRTPSGWFGDWFDP

SEQ ID NO: 21395 - protein, 17 aa, Artificial Sequence
  Synthetic construct
ARDLPSDNWSDVGAFDI

SEQ ID NO: 21396 - protein, 23 aa, Artificial Sequence
  Synthetic construct
ARVVLRYFDWLLQAGGDYYFMDV

SEQ ID NO: 21397 - protein, 10 aa, Artificial Sequence
  Synthetic construct
ARDVTHAFDL

SEQ ID NO: 21398 - protein, 13 aa, Artificial Sequence
  Synthetic construct
TRGGWPSGDAFDI

SEQ ID NO: 21399 - protein, 12 aa, Artificial Sequence
  Synthetic construct
ARAIRNQLLPDY

SEQ ID NO: 21400 - protein, 9 aa, Artificial Sequence
  Synthetic construct
AKGATKVDY

SEQ ID NO: 21401 - protein, 15 aa, Artificial Sequence
  Synthetic construct
ARDRRIVGYYFALDV

SEQ ID NO: 21402 - protein, 22 aa, Artificial Sequence
  Synthetic construct
ATGVVVTGTGPNDYYYYYGLDF

SEQ ID NO: 21403 - protein, 18 aa, Artificial Sequence
  Synthetic construct
ASGHYCSGGNCYSGWFDP

SEQ ID NO: 21404 - protein, 15 aa, Artificial Sequence
  Synthetic construct
ARDDGSSVYNYYMDV

SEQ ID NO: 21405 - protein, 23 aa, Artificial Sequence
  Synthetic construct
ARHGFGGYSGYYYWVSAGNGMDV

SEQ ID NO: 21406 - protein, 24 aa, Artificial Sequence
  Synthetic construct
AKDPASYHDIWSGYVAYYYYGIDV

SEQ ID NO: 21407 - protein, 18 aa, Artificial Sequence
  Synthetic construct
ARDRETGMPYYDYYYLDV

SEQ ID NO: 21408 - protein, 12 aa, Artificial Sequence
  Synthetic construct
ASRYIGSWGHDY

SEQ ID NO: 21409 - protein, 16 aa, Artificial Sequence
  Synthetic construct
AHTGSVPPAMVGAFDI

SEQ ID NO: 21410 - protein, 15 aa, Artificial Sequence
  Synthetic construct
ARIPYRNSWYEGFDS

SEQ ID NO: 21411 - protein, 14 aa, Artificial Sequence
  Synthetic construct
ARDLGLGVGCGMDV

SEQ ID NO: 21412 - protein, 19 aa, Artificial Sequence
  Synthetic construct
ARVMAAAKHRVFYYYYMDV

SEQ ID NO: 21413 - protein, 16 aa, Artificial Sequence
  Synthetic construct
ARDGGCRKYFDCPGED

SEQ ID NO: 21414 - protein, 19 aa, Artificial Sequence
  Synthetic construct
ARDFDGMVRGGYYYYYMDV

SEQ ID NO: 21415 - protein, 17 aa, Artificial Sequence
  Synthetic construct
ARVGRRYSSGYDNGIDY

SEQ ID NO: 21416 - protein, 15 aa, Artificial Sequence
  Synthetic construct
ARDRRIVGYYFALDV

SEQ ID NO: 21417 - protein, 11 aa, Artificial Sequence
  Synthetic construct
ARARGLYHFDY

SEQ ID NO: 21418 - protein, 13 aa, Artificial Sequence
  Synthetic construct
ARPPYGDPWNFDY

SEQ ID NO: 21419 - protein, 10 aa, Artificial Sequence
  Synthetic construct
ARVNNGGPDY

SEQ ID NO: 21420 - protein, 17 aa, Artificial Sequence
  Synthetic construct
ARDPTRPSNGDPDGFDI

SEQ ID NO: 21421 - protein, 15 aa, Artificial Sequence
  Synthetic construct
AREGMVGEAGRSLDY

SEQ ID NO: 21422 - protein, 21 aa, Artificial Sequence
  Synthetic construct
ARGVTGTTFLVPYYYYYGLDV

SEQ ID NO: 21423 - protein, 22 aa, Artificial Sequence
  Synthetic construct
ARDIADSKYSSGWYHYYYYMDV

SEQ ID NO: 21424 - protein, 16 aa, Artificial Sequence
  Synthetic construct
ARMPSGYYDSSEAFDI

SEQ ID NO: 21425 - protein, 15 aa, Artificial Sequence
  Synthetic construct
ARGGPPGYYYYGMDV

SEQ ID NO: 21426 - protein, 20 aa, Artificial Sequence
  Synthetic construct
ARLKESTIFGVVITPSWFDP

SEQ ID NO: 21427 - protein, 13 aa, Artificial Sequence
  Synthetic construct
AVERRNSEEVFEM

SEQ ID NO: 21428 - protein, 11 aa, Artificial Sequence
  Synthetic construct
ARGPNYYYMDV

SEQ ID NO: 21429 - protein, 14 aa, Artificial Sequence
  Synthetic construct
ARDYSGTYWGFFDY

SEQ ID NO: 21430 - protein, 12 aa, Artificial Sequence
  Synthetic construct
ASRYIGSWGHDY

SEQ ID NO: 21431 - protein, 23 aa, Artificial Sequence
  Synthetic construct
ARHVEAYSGYDSKSFYGDYVPAD

SEQ ID NO: 21432 - protein, 20 aa, Artificial Sequence
  Synthetic construct
ARDRSLGLWFGEPTPAYFDL

SEQ ID NO: 21433 - protein, 21 aa, Artificial Sequence
  Synthetic construct
ASLGGDYYGSGSYHNTSEFDP

SEQ ID NO: 21434 - protein, 13 aa, Artificial Sequence
  Synthetic construct
ARMRGWRGRSFDI

SEQ ID NO: 21435 - protein, 14 aa, Artificial Sequence
  Synthetic construct
ARGDCNGGTCYSDY

SEQ ID NO: 21436 - protein, 13 aa, Artificial Sequence
  Synthetic construct
ATTWLLEEGWFDP

SEQ ID NO: 21437 - protein, 17 aa, Artificial Sequence
  Synthetic construct
ASLGGDYYVSGSSEFDP

SEQ ID NO: 21438 - protein, 13 aa, Artificial Sequence
  Synthetic construct
AREGVVGATGLDY

SEQ ID NO: 21439 - protein, 15 aa, Artificial Sequence
  Synthetic construct
ARGGESSGYPSAFDL

SEQ ID NO: 21440 - protein, 9 aa, Artificial Sequence
  Synthetic construct
SKGATKMDY

SEQ ID NO: 21441 - protein, 11 aa, Artificial Sequence
  Synthetic construct
ARGENYWYSDL

SEQ ID NO: 21442 - protein, 12 aa, Artificial Sequence
  Synthetic construct
ARGGGGYKYFDY

SEQ ID NO: 21443 - protein, 21 aa, Artificial Sequence
  Synthetic construct
TTDGYYYDSSGYPSFRVWFDP

SEQ ID NO: 21444 - protein, 12 aa, Artificial Sequence
  Synthetic construct
PKDLSAARGFDY

SEQ ID NO: 21445 - protein, 14 aa, Artificial Sequence
  Synthetic construct
AREGAVGATTGLDS

SEQ ID NO: 21446 - protein, 24 aa, Artificial Sequence
  Synthetic construct
AKGLYYGSGSYYIQPFYYYYAMDV

SEQ ID NO: 21447 - protein, 15 aa, Artificial Sequence
  Synthetic construct
ARDDGSSVHNYYMDV

SEQ ID NO: 21448 - protein, 15 aa, Artificial Sequence
  Synthetic construct
ARDPYIVPTALPLDY

SEQ ID NO: 21449 - protein, 13 aa, Artificial Sequence
  Synthetic construct
ARVNGYDSDGGDY

SEQ ID NO: 21450 - protein, 13 aa, Artificial Sequence
  Synthetic construct
AREEGSGWWKHDY

SEQ ID NO: 21451 - protein, 24 aa, Artificial Sequence
  Synthetic construct
ARDPASYYDFWSGYVDYYYYGLDV

SEQ ID NO: 21452 - protein, 14 aa, Artificial Sequence
  Synthetic construct
ARDGRVGETSGIDY

SEQ ID NO: 21453 - protein, 11 aa, Artificial Sequence
  Synthetic construct
ARETVVRATDS

SEQ ID NO: 21454 - protein, 10 aa, Artificial Sequence
  Synthetic construct
ARVRPLDFDY

SEQ ID NO: 21455 - protein, 22 aa, Artificial Sequence
  Synthetic construct
ARLERDIVVVVGAIDYFYYMDV

SEQ ID NO: 21456 - protein, 23 aa, Artificial Sequence
  Synthetic construct
ARQNYHDSSGYSPDAYSPDAFDI

SEQ ID NO: 21457 - protein, 18 aa, Artificial Sequence
  Synthetic construct
ARDFSTAAYYYYYYYMDV

SEQ ID NO: 21458 - protein, 14 aa, Artificial Sequence
  Synthetic construct
ARGYGGNYRTYFDY

SEQ ID NO: 21459 - protein, 23 aa, Artificial Sequence
  Synthetic construct
ARHVEAYGGYDSKSFYGDYVPAD

SEQ ID NO: 21460 - protein, 17 aa, Artificial Sequence
  Synthetic construct
ARELRIRYYDWIYWFDP

SEQ ID NO: 21461 - protein, 21 aa, Artificial Sequence
  Synthetic construct
ARHPPFWGGPTAMMGWGEFDY

SEQ ID NO: 21462 - protein, 18 aa, Artificial Sequence
  Synthetic construct
ARGYMVGVGVGPRHWFDP

SEQ ID NO: 21463 - protein, 19 aa, Artificial Sequence
  Synthetic construct
ARGPLRYFEWKYYYIGMDV

SEQ ID NO: 21464 - protein, 19 aa, Artificial Sequence
  Synthetic construct
ARDGAYDSRNYYNYHGMDV

SEQ ID NO: 21465 - protein, 12 aa, Artificial Sequence
  Synthetic construct
ASQRLYYYGMDV

SEQ ID NO: 21466 - protein, 22 aa, Artificial Sequence
  Synthetic construct
AKDIGRYDHYDTFGRVGGAFDI

SEQ ID NO: 21467 - protein, 13 aa, Artificial Sequence
  Synthetic construct
ARSAASGPQRGDY

SEQ ID NO: 21468 - protein, 15 aa, Artificial Sequence
  Synthetic construct
ARDNGSGTQNYHMDV

SEQ ID NO: 21469 - protein, 18 aa, Artificial Sequence
  Synthetic construct
ARDGSFLDFWSGLAWFDP

SEQ ID NO: 21470 - protein, 13 aa, Artificial Sequence
  Synthetic construct
ARVFTTLDWYFDL

SEQ ID NO: 21471 - protein, 16 aa, Artificial Sequence
  Synthetic construct
VKIGTGAYGSRNYFDC

SEQ ID NO: 21472 - protein, 12 aa, Artificial Sequence
  Synthetic construct
ARLNTIPENIDF

SEQ ID NO: 21473 - protein, 20 aa, Artificial Sequence
  Synthetic construct
ARYTSYYDRSGFRRVEYFQH

SEQ ID NO: 21474 - protein, 9 aa, Artificial Sequence
  Synthetic construct
ARGGSEVDH

SEQ ID NO: 21475 - protein, 13 aa, Artificial Sequence
  Synthetic construct
ARVFTTLDWYFDL

SEQ ID NO: 21476 - protein, 11 aa, Artificial Sequence
  Synthetic construct
ASQGGAGEAHH

SEQ ID NO: 21477 - protein, 14 aa, Artificial Sequence
  Synthetic construct
ARDYSATYWGYFDC

SEQ ID NO: 21478 - protein, 14 aa, Artificial Sequence
  Synthetic construct
ARAKGGSYHGAFDF

SEQ ID NO: 21479 - protein, 19 aa, Artificial Sequence
  Synthetic construct
SQASGYSAYFERAFSAFDI

SEQ ID NO: 21480 - protein, 15 aa, Artificial Sequence
  Synthetic construct
ARGDTSGWLPHILDI

SEQ ID NO: 21481 - protein, 16 aa, Artificial Sequence
  Synthetic construct
ATYYYDSSGYYYGFEY

SEQ ID NO: 21482 - protein, 11 aa, Artificial Sequence
  Synthetic construct
ATYYGDQDFDY

SEQ ID NO: 21483 - protein, 13 aa, Artificial Sequence
  Synthetic construct
ARDHAWGGYWFDP

SEQ ID NO: 21484 - protein, 21 aa, Artificial Sequence
  Synthetic construct
ARDSSGFYYGGPFYYYYYMDV

SEQ ID NO: 21485 - protein, 20 aa, Artificial Sequence
  Synthetic construct
ARDLGQLAGGYYYYYYGMDV

SEQ ID NO: 21486 - protein, 17 aa, Artificial Sequence
  Synthetic construct
ARKPLLHSTVNPGAFDI

SEQ ID NO: 21487 - protein, 16 aa, Artificial Sequence
  Synthetic construct
ASFSEDTPMDDYYFDY

SEQ ID NO: 21488 - protein, 18 aa, Artificial Sequence
  Synthetic construct
AHRLHPYTRSSWDGWFDP

SEQ ID NO: 21489 - protein, 23 aa, Artificial Sequence
  Synthetic construct
ARDPGYYGSGSVADPQYYYYMDV

SEQ ID NO: 21490 - protein, 18 aa, Artificial Sequence
  Synthetic construct
ARVDYYASGNYGLGPSDF

SEQ ID NO: 21491 - protein, 18 aa, Artificial Sequence
  Synthetic construct
ARRQKILYHYGSSSPPDF

SEQ ID NO: 21492 - protein, 14 aa, Artificial Sequence
  Synthetic construct
AREGIVGTTTGLDY

SEQ ID NO: 21493 - protein, 15 aa, Artificial Sequence
  Synthetic construct
AHRTPSGWYGDWFDP

SEQ ID NO: 21494 - protein, 22 aa, Artificial Sequence
  Synthetic construct
ARVIVSSWYRGGNYYYYYYMDV

SEQ ID NO: 21495 - protein, 21 aa, Artificial Sequence
  Synthetic construct
ARDWDYYGSGGYYYYYYYMDV

SEQ ID NO: 21496 - protein, 22 aa, Artificial Sequence
  Synthetic construct
ARAIPPSGSYFYLYYYYYYMDV

SEQ ID NO: 21497 - protein, 12 aa, Artificial Sequence
  Synthetic construct
ARLSTSSWHWAY

SEQ ID NO: 21498 - protein, 21 aa, Artificial Sequence
  Synthetic construct
VRDSRPTHDFSTSHYNYALDV

SEQ ID NO: 21499 - protein, 20 aa, Artificial Sequence
  Synthetic construct
AKADGGYYDSSAYYSTAIDY

SEQ ID NO: 21500 - protein, 18 aa, Artificial Sequence
  Synthetic construct
ARIGRYFGSGTYFGGMDV

SEQ ID NO: 21501 - protein, 15 aa, Artificial Sequence
  Synthetic construct
AKDLGFGYDGGDSQH

SEQ ID NO: 21502 - protein, 14 aa, Artificial Sequence
  Synthetic construct
ARSGSGSYYGAFDI

SEQ ID NO: 21503 - protein, 15 aa, Artificial Sequence
  Synthetic construct
AQYYSGWDRDDAFDI

SEQ ID NO: 21504 - protein, 9 aa, Artificial Sequence
  Synthetic construct
ARSNNWFDP

SEQ ID NO: 21505 - protein, 22 aa, Artificial Sequence
  Synthetic construct
AREGSGYDSWSVLSPLNWYFDL

SEQ ID NO: 21506 - protein, 15 aa, Artificial Sequence
  Synthetic construct
AREGMVGAAGRSLDY

SEQ ID NO: 21507 - protein, 11 aa, Artificial Sequence
  Synthetic construct
ARSENYYYMDV

SEQ ID NO: 21508 - protein, 13 aa, Artificial Sequence
  Synthetic construct
AVFYGSGSYRFDP

SEQ ID NO: 21509 - protein, 16 aa, Artificial Sequence
  Synthetic construct
ASYYYDSSGYPYGMDV

SEQ ID NO: 21510 - protein, 13 aa, Artificial Sequence
  Synthetic construct
ATTYALLARPFDY

SEQ ID NO: 21511 - protein, 17 aa, Artificial Sequence
  Synthetic construct
ARFAYNSVETFIGGFDI

SEQ ID NO: 21512 - protein, 19 aa, Artificial Sequence
  Synthetic construct
ARRAAAGKVGMYYYYGMDV

SEQ ID NO: 21513 - protein, 16 aa, Artificial Sequence
  Synthetic construct
AREGVAVAGTGNALDY

SEQ ID NO: 21514 - protein, 13 aa, Artificial Sequence
  Synthetic construct
AADFWSGRFGMDV

SEQ ID NO: 21515 - protein, 14 aa, Artificial Sequence
  Synthetic construct
AREGSGTYYSVLDS

SEQ ID NO: 21516 - protein, 27 aa, Artificial Sequence
  Synthetic construct
ARGGRRLAIAWWRKQEFESSGYHYFDQ

SEQ ID NO: 21517 - protein, 15 aa, Artificial Sequence
  Synthetic construct
AREGTAASNSHWFAP

SEQ ID NO: 21518 - protein, 28 aa, Artificial Sequence
  Synthetic construct
ARDGTYYDFWSGYYWGQERGYYYYGMDV

SEQ ID NO: 21519 - protein, 14 aa, Artificial Sequence
  Synthetic construct
ATSPAIVRQIWFDP

SEQ ID NO: 21520 - protein, 16 aa, Artificial Sequence
  Synthetic construct
ARPQGPSSYYYYGLDV

SEQ ID NO: 21521 - protein, 14 aa, Artificial Sequence
  Synthetic construct
AKSSGGNYLDAFDI

SEQ ID NO: 21522 - protein, 9 aa, Artificial Sequence
  Synthetic construct
AKGATKVDY

SEQ ID NO: 21523 - protein, 10 aa, Artificial Sequence
  Synthetic construct
AREVTAAFDI

SEQ ID NO: 21524 - protein, 20 aa, Artificial Sequence
  Synthetic construct
ARHLPTCSGGPCYSFSWFDP

SEQ ID NO: 21525 - protein, 13 aa, Artificial Sequence
  Synthetic construct
ARVRKRFVETFDI

SEQ ID NO: 21526 - protein, 12 aa, Artificial Sequence
  Synthetic construct
AREGSWKYVFDY

SEQ ID NO: 21527 - protein, 6 aa, Artificial Sequence
  Synthetic construct
ARGFDY

SEQ ID NO: 21528 - protein, 22 aa, Artificial Sequence
  Synthetic construct
AKDIGRYDHYNIFGRVGGAFDI

SEQ ID NO: 21529 - protein, 18 aa, Artificial Sequence
  Synthetic construct
TTAPIAATGAVSFDYMDV

SEQ ID NO: 21530 - protein, 18 aa, Artificial Sequence
  Synthetic construct
ARSLFDTLTGYEVHYFDY

SEQ ID NO: 21531 - protein, 23 aa, Artificial Sequence
  Synthetic construct
ARGESMETWIQLWETYYYYGMDV

SEQ ID NO: 21532 - protein, 10 aa, Artificial Sequence
  Synthetic construct
ARVRPLDFDY

SEQ ID NO: 21533 - protein, 10 aa, Artificial Sequence
  Synthetic construct
ARETNWGSDY

SEQ ID NO: 21534 - protein, 12 aa, Artificial Sequence
  Synthetic construct
ARHMGGDYAAEY

SEQ ID NO: 21535 - protein, 17 aa, Artificial Sequence
  Synthetic construct
TRVIAGAAPGTVNWFDP

SEQ ID NO: 21536 - protein, 13 aa, Artificial Sequence
  Synthetic construct
ATGPTLRGNWFDP

SEQ ID NO: 21537 - protein, 14 aa, Artificial Sequence
  Synthetic construct
ARARGGSYSAPFDY

SEQ ID NO: 21538 - protein, 17 aa, Artificial Sequence
  Synthetic construct
ASFVRYCSSTSCYNFDH

SEQ ID NO: 21539 - protein, 16 aa, Artificial Sequence
  Synthetic construct
ARDRGLTQLDENWFDP

SEQ ID NO: 21540 - protein, 18 aa, Artificial Sequence
  Synthetic construct
ARDLDWYDSSGSWPPLDY

SEQ ID NO: 21541 - protein, 11 aa, Artificial Sequence
  Synthetic construct
ARGVWSGEVDV

SEQ ID NO: 21542 - protein, 16 aa, Artificial Sequence
  Synthetic construct
AKPVAARGMGKDWFDP

SEQ ID NO: 21543 - protein, 13 aa, Artificial Sequence
  Synthetic construct
IKEGASGGPDFEY

SEQ ID NO: 21544 - protein, 15 aa, Artificial Sequence
  Synthetic construct
AKEALNIVVVTAPRY

SEQ ID NO: 21545 - protein, 16 aa, Artificial Sequence
  Synthetic construct
AAPYCSSTSCYDGFDI

SEQ ID NO: 21546 - protein, 12 aa, Artificial Sequence
  Synthetic construct
AASEGPFGWFDP

SEQ ID NO: 21547 - protein, 15 aa, Artificial Sequence
  Synthetic construct
ARGRGGSPTEHWFDP

SEQ ID NO: 21548 - protein, 6 aa, Artificial Sequence
  Synthetic construct
ARDFST

SEQ ID NO: 21549 - protein, 17 aa, Artificial Sequence
  Synthetic construct
ARVGSGTYYSDYYGMGV

SEQ ID NO: 21550 - protein, 15 aa, Artificial Sequence
  Synthetic construct
AHRTPSNWFGDWFDP

SEQ ID NO: 21551 - protein, 19 aa, Artificial Sequence
  Synthetic construct
ARDFDAMVRGGYYYYYMDV

SEQ ID NO: 21552 - protein, 19 aa, Artificial Sequence
  Synthetic construct
ARRSAPDSSSWYREKFFDL

SEQ ID NO: 21553 - protein, 19 aa, Artificial Sequence
  Synthetic construct
ARHSNYYDSSAYVNTSPDY

SEQ ID NO: 21554 - protein, 16 aa, Artificial Sequence
  Synthetic construct
ARGRDFGSGPQRSFDS

SEQ ID NO: 21555 - protein, 17 aa, Artificial Sequence
  Synthetic construct
ARDYVSDIPRNYYYMDV

SEQ ID NO: 21556 - protein, 12 aa, Artificial Sequence
  Synthetic construct
AKSVLVPDPLDV

SEQ ID NO: 21557 - protein, 9 aa, Artificial Sequence
  Synthetic construct
VRDSWGIHD

SEQ ID NO: 21558 - protein, 16 aa, Artificial Sequence
  Synthetic construct
ARDLYTNGWSRGDFDL

SEQ ID NO: 21559 - protein, 14 aa, Artificial Sequence
  Synthetic construct
ARAGGGSYFGHFDY

SEQ ID NO: 21560 - protein, 19 aa, Artificial Sequence
  Synthetic construct
ARHSSYYDSSGYVNTSPDY

SEQ ID NO: 21561 - protein, 14 aa, Artificial Sequence
  Synthetic construct
ARGARDYGGNPIDY

SEQ ID NO: 21562 - protein, 15 aa, Artificial Sequence
  Synthetic construct
ARGVMGATTEAHFDY

SEQ ID NO: 21563 - protein, 15 aa, Artificial Sequence
  Synthetic construct
ARDPSPALSLYYFDY

SEQ ID NO: 21564 - protein, 13 aa, Artificial Sequence
  Synthetic construct
AIASGRTYYGMNV

SEQ ID NO: 21565 - protein, 24 aa, Artificial Sequence
  Synthetic construct
ARVSQTGVRYFDWSLATGHYYMDV

SEQ ID NO: 21566 - protein, 14 aa, Artificial Sequence
  Synthetic construct
ARSSGGGYFSYMDV

SEQ ID NO: 21567 - protein, 18 aa, Artificial Sequence
  Synthetic construct
ARDQLWLLGVYYYYGMDV

SEQ ID NO: 21568 - protein, 12 aa, Artificial Sequence
  Synthetic construct
ARVNLVGGGPDY

SEQ ID NO: 21569 - protein, 12 aa, Artificial Sequence
  Synthetic construct
ARTNGYKNRFDY

SEQ ID NO: 21570 - protein, 18 aa, Artificial Sequence
  Synthetic construct
ARERFLENGYESYNWFDP

SEQ ID NO: 21571 - protein, 7 aa, Artificial Sequence
  Synthetic construct
TPGSGSP

SEQ ID NO: 21572 - protein, 30 aa, Artificial Sequence
  Synthetic construct
ATAPAIAATGTAPAITAAGTIYYYYYGMDV

SEQ ID NO: 21573 - protein, 18 aa, Artificial Sequence
  Synthetic construct
ARHGETGNRKYQYFYMDV

SEQ ID NO: 21574 - protein, 15 aa, Artificial Sequence
  Synthetic construct
ARDIVLVPAANALDI

SEQ ID NO: 21575 - protein, 13 aa, Artificial Sequence
  Synthetic construct
ARNYYDSSDAFDI

SEQ ID NO: 21576 - protein, 21 aa, Artificial Sequence
  Synthetic construct
ARAHSSSWYNPLFHPSDAFDV

SEQ ID NO: 21577 - protein, 14 aa, Artificial Sequence
  Synthetic construct
AKGSTIVLMVFATR

SEQ ID NO: 21578 - protein, 15 aa, Artificial Sequence
  Synthetic construct
VRVYQYEGTGSYGDY

SEQ ID NO: 21579 - protein, 16 aa, Artificial Sequence
  Synthetic construct
ARGSGPIPSKWYFFDY

SEQ ID NO: 21580 - protein, 19 aa, Artificial Sequence
  Synthetic construct
ASAEEDFAVVENYFYGMDV

SEQ ID NO: 21581 - protein, 22 aa, Artificial Sequence
  Synthetic construct
AKDIGRFDHYDAFDRVGGAFDI

SEQ ID NO: 21582 - protein, 15 aa, Artificial Sequence
  Synthetic construct
ARYSSGWRWDEGFDI

SEQ ID NO: 21583 - protein, 14 aa, Artificial Sequence
  Synthetic construct
ARDGRGYDYYGMDV

SEQ ID NO: 21584 - protein, 15 aa, Artificial Sequence
  Synthetic construct
ARALSVGATWDYFDY

SEQ ID NO: 21585 - protein, 16 aa, Artificial Sequence
  Synthetic construct
AHTGSVPPAMVGAFDM

SEQ ID NO: 21586 - protein, 14 aa, Artificial Sequence
  Synthetic construct
ATVFAVFRTDYFAY

SEQ ID NO: 21587 - protein, 21 aa, Artificial Sequence
  Synthetic construct
AKAHSSSWYSPLFHPTDAFDI

SEQ ID NO: 21588 - protein, 12 aa, Artificial Sequence
  Synthetic construct
ACGYSGYDYEAP

SEQ ID NO: 21589 - protein, 20 aa, Artificial Sequence
  Synthetic construct
AKADGGYYDSSAYYSTAIDY

SEQ ID NO: 21590 - protein, 11 aa, Artificial Sequence
  Synthetic construct
TTDSGNWNVPD

SEQ ID NO: 21591 - protein, 15 aa, Artificial Sequence
  Synthetic construct
AREAARPRIGGGMDV

SEQ ID NO: 21592 - protein, 23 aa, Artificial Sequence
  Synthetic construct
AICGITIFGVVPEPHFYYYGMDV

SEQ ID NO: 21593 - protein, 12 aa, Artificial Sequence
  Synthetic construct
ARHTFDWGGFDY

SEQ ID NO: 21594 - protein, 17 aa, Artificial Sequence
  Synthetic construct
ARARNFWSGYYPDAFDI

SEQ ID NO: 21595 - protein, 22 aa, Artificial Sequence
  Synthetic construct
AREGSGSDFWSAYSPLNWYFDL

SEQ ID NO: 21596 - protein, 20 aa, Artificial Sequence
  Synthetic construct
ARCIGEPGIFNYYYYYYMDV

SEQ ID NO: 21597 - protein, 13 aa, Artificial Sequence
  Synthetic construct
ARTREYTNYYMDV

SEQ ID NO: 21598 - protein, 14 aa, Artificial Sequence
  Synthetic construct
ARDGAVGDTTGLDY

SEQ ID NO: 21599 - protein, 14 aa, Artificial Sequence
  Synthetic construct
ARGQGATLRYGMDV

SEQ ID NO: 21600 - protein, 15 aa, Artificial Sequence
  Synthetic construct
AKEALNIVVVTAPRY

SEQ ID NO: 21601 - protein, 12 aa, Artificial Sequence
  Synthetic construct
ASQQWLRGAFDM

SEQ ID NO: 21602 - protein, 13 aa, Artificial Sequence
  Synthetic construct
AKGDYDFWSGYGH

SEQ ID NO: 21603 - protein, 12 aa, Artificial Sequence
  Synthetic construct
ARSPGATPYMDV

SEQ ID NO: 21604 - protein, 10 aa, Artificial Sequence
  Synthetic construct
AREKTRASDY

SEQ ID NO: 21605 - protein, 19 aa, Artificial Sequence
  Synthetic construct
ARDFDIMLRGGYYYYYMDV

SEQ ID NO: 21606 - protein, 15 aa, Artificial Sequence
  Synthetic construct
ARGNTWDYDYNGMDV

SEQ ID NO: 21607 - protein, 15 aa, Artificial Sequence
  Synthetic construct
ARDTAYDSSGYYNSY

SEQ ID NO: 21608 - protein, 18 aa, Artificial Sequence
  Synthetic construct
ARHLGSRGDYGVVNWFDP

SEQ ID NO: 21609 - protein, 21 aa, Artificial Sequence
  Synthetic construct
ARMQGYCSGGGCYSGYYGMDV

SEQ ID NO: 21610 - protein, 20 aa, Artificial Sequence
  Synthetic construct
ARGGVVVVAAMRMHLNWFDP

SEQ ID NO: 21611 - protein, 16 aa, Artificial Sequence
  Synthetic construct
ARVLDYYGSGSFGFDF

SEQ ID NO: 21612 - protein, 27 aa, Artificial Sequence
  Synthetic construct
AKDAYLYDFWSGYLPRNGGYYYYGMDV

SEQ ID NO: 21613 - protein, 12 aa, Artificial Sequence
  Synthetic construct
ARDFIGVPGVDH

SEQ ID NO: 21614 - protein, 17 aa, Artificial Sequence
  Synthetic construct
TRVIAGAAPGTINWFDP

SEQ ID NO: 21615 - protein, 13 aa, Artificial Sequence
  Synthetic construct
ARCNWNGYSGMDV

SEQ ID NO: 21616 - protein, 13 aa, Artificial Sequence
  Synthetic construct
AHRLVAVAGPFDY

SEQ ID NO: 21617 - protein, 23 aa, Artificial Sequence
  Synthetic construct
ARDLTGDYDYVWGSYRYNTAFDY

SEQ ID NO: 21618 - protein, 15 aa, Artificial Sequence
  Synthetic construct
ARLWDSYYHSYGMDL

SEQ ID NO: 21619 - protein, 15 aa, Artificial Sequence
  Synthetic construct
ARFASGFSFDDGFDI

SEQ ID NO: 21620 - protein, 13 aa, Artificial Sequence
  Synthetic construct
ARSGSYGDRTFDS

SEQ ID NO: 21621 - protein, 15 aa, Artificial Sequence
  Synthetic construct
ARDDGSSVHNYYMDV

SEQ ID NO: 21622 - protein, 25 aa, Artificial Sequence
  Synthetic construct
ARMSRTLRYFDWSPQRRLYSYGMDV

SEQ ID NO: 21623 - protein, 19 aa, Artificial Sequence
  Synthetic construct
STGLFYYGSSAYSNDAFDI

SEQ ID NO: 21624 - protein, 13 aa, Artificial Sequence
  Synthetic construct
ARILWFGGNYFDY

SEQ ID NO: 21625 - protein, 19 aa, Artificial Sequence
  Synthetic construct
AREMHIGGGDLYYNYGMDV

SEQ ID NO: 21626 - protein, 15 aa, Artificial Sequence
  Synthetic construct
ARDNGSGTQNYHMDV

SEQ ID NO: 21627 - protein, 16 aa, Artificial Sequence
  Synthetic construct
TGYYQDSSGYDYGMDV

SEQ ID NO: 21628 - protein, 20 aa, Artificial Sequence
  Synthetic construct
ARDRGYYGSGSENNYYYMDV

SEQ ID NO: 21629 - protein, 11 aa, Artificial Sequence
  Synthetic construct
ARDLSYLGMDV

SEQ ID NO: 21630 - protein, 18 aa, Artificial Sequence
  Synthetic construct
ASLMETGSTQEDYYYMDV

SEQ ID NO: 21631 - protein, 8 aa, Artificial Sequence
  Synthetic construct
AKDECSGY

SEQ ID NO: 21632 - protein, 22 aa, Artificial Sequence
  Synthetic construct
ARAPPEEGWLLFMSGYYYYMDV

SEQ ID NO: 21633 - protein, 9 aa, Artificial Sequence
  Synthetic construct
AKGATKLDY

SEQ ID NO: 21634 - protein, 9 aa, Artificial Sequence
  Synthetic construct
VQGWAGTTY

SEQ ID NO: 21635 - protein, 14 aa, Artificial Sequence
  Synthetic construct
AREGIVGTTTGLDY

SEQ ID NO: 21636 - protein, 14 aa, Artificial Sequence
  Synthetic construct
ARDPDSTFGGDFDY

SEQ ID NO: 21637 - protein, 16 aa, Artificial Sequence
  Synthetic construct
ARDRGLTQLDENWFDP

SEQ ID NO: 21638 - protein, 15 aa, Artificial Sequence
  Synthetic construct
AKERNLIWLLGSQDY

SEQ ID NO: 21639 - protein, 24 aa, Artificial Sequence
  Synthetic construct
ARDAGFSSSWYQIRSGYNYYYMDV

SEQ ID NO: 21640 - protein, 18 aa, Artificial Sequence
  Synthetic construct
ARVYYYGSGSYYSGAFDI

SEQ ID NO: 21641 - protein, 19 aa, Artificial Sequence
  Synthetic construct
AREMGIGGGDLYYNYGMDV

SEQ ID NO: 21642 - protein, 16 aa, Artificial Sequence
  Synthetic construct
ATYYYDSSGYNYGFDY

SEQ ID NO: 21643 - protein, 16 aa, Artificial Sequence
  Synthetic construct
ATFGGDDSRLSNWFDP

SEQ ID NO: 21644 - protein, 12 aa, Artificial Sequence
  Synthetic construct
AREGSWKYVFDF

SEQ ID NO: 21645 - protein, 11 aa, Artificial Sequence
  Synthetic construct
AKVSTKSSFDY

SEQ ID NO: 21646 - protein, 25 aa, Artificial Sequence
  Synthetic construct
ARDRGDGDYYTMPNAGGGYLGAFDI

SEQ ID NO: 21647 - protein, 18 aa, Artificial Sequence
  Synthetic construct
AREKGYSSSSSASYYFDY

SEQ ID NO: 21648 - protein, 14 aa, Artificial Sequence
  Synthetic construct
AVTFYYDNIGYFSL

SEQ ID NO: 21649 - protein, 13 aa, Artificial Sequence
  Synthetic construct
ARGGWPSGDTFDI

SEQ ID NO: 21650 - protein, 16 aa, Artificial Sequence
  Synthetic construct
ARGEDLSSWEPDYFDY

SEQ ID NO: 21651 - protein, 24 aa, Artificial Sequence
  Synthetic construct
ARALGIAAAGTRAGRWRGPGYFQH

SEQ ID NO: 21652 - protein, 13 aa, Artificial Sequence
  Synthetic construct
ARVFTTLDWYFDL

SEQ ID NO: 21653 - protein, 13 aa, Artificial Sequence
  Synthetic construct
ARYSVYYYYGMDV

SEQ ID NO: 21654 - protein, 13 aa, Artificial Sequence
  Synthetic construct
AVFYGSGSYRFDP

SEQ ID NO: 21655 - protein, 21 aa, Artificial Sequence
  Synthetic construct
ASLGGDYYVSETSYNNSGFDP

SEQ ID NO: 21656 - protein, 14 aa, Artificial Sequence
  Synthetic construct
ARGVVAATPGYFDY

SEQ ID NO: 21657 - protein, 17 aa, Artificial Sequence
  Synthetic construct
ANGGYCTGGSCYRWFDP

SEQ ID NO: 21658 - protein, 14 aa, Artificial Sequence
  Synthetic construct
AHVFDVVTGYEFDP

SEQ ID NO: 21659 - protein, 18 aa, Artificial Sequence
  Synthetic construct
ARHRAGWGGYASSSTFDY

SEQ ID NO: 21660 - protein, 11 aa, Artificial Sequence
  Synthetic construct
ARDLYYYGMDV

SEQ ID NO: 21661 - protein, 8 aa, Artificial Sequence
  Synthetic construct
AGGYNYNY

SEQ ID NO: 21662 - protein, 19 aa, Artificial Sequence
  Synthetic construct
ARDALDSYASESAENYFDF

SEQ ID NO: 21663 - protein, 13 aa, Artificial Sequence
  Synthetic construct
ARMRGWRGRAFDI

SEQ ID NO: 21664 - protein, 15 aa, Artificial Sequence
  Synthetic construct
ARFHWEYSSGWYVDY

SEQ ID NO: 21665 - protein, 15 aa, Artificial Sequence
  Synthetic construct
ATEWAVVGPAEYFHH

SEQ ID NO: 21666 - protein, 14 aa, Artificial Sequence
  Synthetic construct
ARQNRLQGIAVLGY

SEQ ID NO: 21667 - protein, 12 aa, Artificial Sequence
  Synthetic construct
ARDYQWGTGMDV

SEQ ID NO: 21668 - protein, 16 aa, Artificial Sequence
  Synthetic construct
ARHFSGNMVFWWWFDP

SEQ ID NO: 21669 - protein, 18 aa, Artificial Sequence
  Synthetic construct
AKWVAPGYYNGAGPQLDH

SEQ ID NO: 21670 - protein, 17 aa, Artificial Sequence
  Synthetic construct
ARDPARPSYGDHDAFDI

SEQ ID NO: 21671 - protein, 10 aa, Artificial Sequence
  Synthetic construct
ARDITPFPDV

SEQ ID NO: 21672 - protein, 18 aa, Artificial Sequence
  Synthetic construct
ARSIYDTLTGYEVHYFDY

SEQ ID NO: 21673 - protein, 14 aa, Artificial Sequence
  Synthetic construct
ATSPAVVRQNWFEF

SEQ ID NO: 21674 - protein, 14 aa, Artificial Sequence
  Synthetic construct
LREGQVGTTTGADY

SEQ ID NO: 21675 - protein, 17 aa, Artificial Sequence
  Synthetic construct
ARLWGVTSGYGDYGLDV

SEQ ID NO: 21676 - protein, 12 aa, Artificial Sequence
  Synthetic construct
ARGGGGYKYFDY

SEQ ID NO: 21677 - protein, 17 aa, Artificial Sequence
  Synthetic construct
ARDHGITVAGTIYVMDV

SEQ ID NO: 21678 - protein, 22 aa, Artificial Sequence
  Synthetic construct
ARAERDIVVVLGGIDYFYYMDV

SEQ ID NO: 21679 - protein, 15 aa, Artificial Sequence
  Synthetic construct
ARTGFFYASGSYSDL

SEQ ID NO: 21680 - protein, 24 aa, Artificial Sequence
  Synthetic construct
ARDPASYYDFWSGYVDLYYYGLDV

SEQ ID NO: 21681 - protein, 14 aa, Artificial Sequence
  Synthetic construct
ARSLGGNYFDAFGI

SEQ ID NO: 21682 - protein, 21 aa, Artificial Sequence
  Synthetic construct
ARVSSPSWYRRNYRYYFYMDV

SEQ ID NO: 21683 - protein, 24 aa, Artificial Sequence
  Synthetic construct
ARYVPVNRADYGDYGLSYPSTFDS

SEQ ID NO: 21684 - protein, 22 aa, Artificial Sequence
  Synthetic construct
VKDIGRYDHHDTFGRVGGAFDI

SEQ ID NO: 21685 - protein, 13 aa, Artificial Sequence
  Synthetic construct
AHRLVAVAGPFDF

SEQ ID NO: 21686 - protein, 13 aa, Artificial Sequence
  Synthetic construct
ARGSGSYNVYFQH

SEQ ID NO: 21687 - protein, 19 aa, Artificial Sequence
  Synthetic construct
ARALSLVRGVIFSYYYLDV

SEQ ID NO: 21688 - protein, 21 aa, Artificial Sequence
  Synthetic construct
ASLGGDYYGSGSYHDDSEFDP

SEQ ID NO: 21689 - protein, 13 aa, Artificial Sequence
  Synthetic construct
ARDGSGSYSYFDY

SEQ ID NO: 21690 - protein, 18 aa, Artificial Sequence
  Synthetic construct
ARLNSAYDFYYYSYYLDV

SEQ ID NO: 21691 - protein, 14 aa, Artificial Sequence
  Synthetic construct
ARESGGQDAIWFDP

SEQ ID NO: 21692 - protein, 14 aa, Artificial Sequence
  Synthetic construct
ARWELMVPEDAFDI

SEQ ID NO: 21693 - protein, 19 aa, Artificial Sequence
  Synthetic construct
AREGYYDSSGYAGNYGMDV

SEQ ID NO: 21694 - protein, 20 aa, Artificial Sequence
  Synthetic construct
SREGEGYCSGDNCYSNAFEF

SEQ ID NO: 21695 - protein, 12 aa, Artificial Sequence
  Synthetic construct
ARGGGGYKYFDF

SEQ ID NO: 21696 - protein, 13 aa, Artificial Sequence
  Synthetic construct
ASHYSSSWYLFDY

SEQ ID NO: 21697 - protein, 12 aa, Artificial Sequence
  Synthetic construct
VKDADYYYGMDV

SEQ ID NO: 21698 - protein, 23 aa, Artificial Sequence
  Synthetic construct
ARVQNGNFDWLLNAGYSHYYMDV

SEQ ID NO: 21699 - protein, 22 aa, Artificial Sequence
  Synthetic construct
TKDIGRYDHYEGFGRVGGAFHI

SEQ ID NO: 21700 - protein, 13 aa, Artificial Sequence
  Synthetic construct
ARGGGSYYNALEI

SEQ ID NO: 21701 - protein, 21 aa, Artificial Sequence
  Synthetic construct
STDGYYYDSSGYPSFRVWFDP

SEQ ID NO: 21702 - protein, 17 aa, Artificial Sequence
  Synthetic construct
AKSRGRGTQLWGLYLDF

SEQ ID NO: 21703 - protein, 14 aa, Artificial Sequence
  Synthetic construct
ATSPAVVRQNWFEF

SEQ ID NO: 21704 - protein, 20 aa, Artificial Sequence
  Synthetic construct
ARDLIRAVAGPVYFYHGMDV

SEQ ID NO: 21705 - protein, 12 aa, Artificial Sequence
  Synthetic construct
ARVNLVGGGPDY

SEQ ID NO: 21706 - protein, 12 aa, Artificial Sequence
  Synthetic construct
ARLRYGSGIFDS

SEQ ID NO: 21707 - protein, 14 aa, Artificial Sequence
  Synthetic construct
ARSLGGNYFDAFGI

SEQ ID NO: 21708 - protein, 13 aa, Artificial Sequence
  Synthetic construct
ARERGGLLWFGES

SEQ ID NO: 21709 - protein, 11 aa, Artificial Sequence
  Synthetic construct
ARTVMNDAFEI

SEQ ID NO: 21710 - protein, 12 aa, Artificial Sequence
  Synthetic construct
ACGYSGYEYEAP

SEQ ID NO: 21711 - protein, 17 aa, Artificial Sequence
  Synthetic construct
AKAGPEIFPLVITPLDS

SEQ ID NO: 21712 - protein, 20 aa, Artificial Sequence
  Synthetic construct
AKQVDPLRSLEWLLDYYFDY

SEQ ID NO: 21713 - protein, 15 aa, Artificial Sequence
  Synthetic construct
ARYSSGYSRDDAFDI

SEQ ID NO: 21714 - protein, 12 aa, Artificial Sequence
  Synthetic construct
AKARWHGGGSDY

SEQ ID NO: 21715 - protein, 15 aa, Artificial Sequence
  Synthetic construct
ARDRRIVGYYYAMDV

SEQ ID NO: 21716 - protein, 16 aa, Artificial Sequence
  Synthetic construct
TKDARPAGRYYYYMDV

SEQ ID NO: 21717 - protein, 17 aa, Artificial Sequence
  Synthetic construct
VRSAIRVSVGFDNCFDP

SEQ ID NO: 21718 - protein, 14 aa, Artificial Sequence
  Synthetic construct
ARVPSGWYVGYFDY

SEQ ID NO: 21719 - protein, 16 aa, Artificial Sequence
  Synthetic construct
VKDKDSQQLFVDVFDI

SEQ ID NO: 21720 - protein, 15 aa, Artificial Sequence
  Synthetic construct
VRSEGFDSSGHFWDY

SEQ ID NO: 21721 - protein, 11 aa, Artificial Sequence
  Synthetic construct
ARDWGEFYFDY

SEQ ID NO: 21722 - protein, 16 aa, Artificial Sequence
  Synthetic construct
ARHDRHSGGYYHALGY

SEQ ID NO: 21723 - protein, 22 aa, Artificial Sequence
  Synthetic construct
AKDSGRYDHYEGFSRVGGAFDV

SEQ ID NO: 21724 - protein, 14 aa, Artificial Sequence
  Synthetic construct
ARARGGNYFDAFDI

SEQ ID NO: 21725 - protein, 13 aa, Artificial Sequence
  Synthetic construct
ARSYYGYILPFDL

SEQ ID NO: 21726 - protein, 15 aa, Artificial Sequence
  Synthetic construct
AKILAYDSSGYSWDY

SEQ ID NO: 21727 - protein, 14 aa, Artificial Sequence
  Synthetic construct
AREGIVGTTTGLDY

SEQ ID NO: 21728 - protein, 19 aa, Artificial Sequence
  Synthetic construct
ARGPLRYFEWKYYYNGMDV

SEQ ID NO: 21729 - protein, 21 aa, Artificial Sequence
  Synthetic construct
VREQITIFGVLNTPTYHGMDV

SEQ ID NO: 21730 - protein, 9 aa, Artificial Sequence
  Synthetic construct
ARSNNWFDP

SEQ ID NO: 21731 - protein, 13 aa, Artificial Sequence
  Synthetic construct
ARGSSGWPDAFDI

SEQ ID NO: 21732 - protein, 14 aa, Artificial Sequence
  Synthetic construct
ARAQSGSYYGGFDY

SEQ ID NO: 21733 - protein, 9 aa, Artificial Sequence
  Synthetic construct
AKGATKVDY

SEQ ID NO: 21734 - protein, 19 aa, Artificial Sequence
  Synthetic construct
ARGGEAARLIHFLTYGMDV

SEQ ID NO: 21735 - protein, 17 aa, Artificial Sequence
  Synthetic construct
ARRVTVAGTIGFDAFDI

SEQ ID NO: 21736 - protein, 18 aa, Artificial Sequence
  Synthetic construct
ARGRDSSGLDFYFYGFDV

SEQ ID NO: 21737 - protein, 15 aa, Artificial Sequence
  Synthetic construct
ARVSGYYDSGAYSDY

SEQ ID NO: 21738 - protein, 26 aa, Artificial Sequence
  Synthetic construct
ARGMGGAARILSGGTGWPYYFYYMDV

SEQ ID NO: 21739 - protein, 19 aa, Artificial Sequence
  Synthetic construct
ARDSLEWFFLHHYYYGMDV

SEQ ID NO: 21740 - protein, 23 aa, Artificial Sequence
  Synthetic construct
ARVGGVGDFWSGYFFVSSTYFDS

SEQ ID NO: 21741 - protein, 17 aa, Artificial Sequence
  Synthetic construct
ASGGTGTWGDYYYGMDV

SEQ ID NO: 21742 - protein, 12 aa, Artificial Sequence
  Synthetic construct
ARNPPRTQTLDS

SEQ ID NO: 21743 - protein, 21 aa, Artificial Sequence
  Synthetic construct
ARGYMLTTVAVGVGPRYWFDP

SEQ ID NO: 21744 - protein, 21 aa, Artificial Sequence
  Synthetic construct
ARHPPFWGGPTVMVGWGEFDF

SEQ ID NO: 21745 - protein, 12 aa, Artificial Sequence
  Synthetic construct
ATSPCSSCPLDY

SEQ ID NO: 21746 - protein, 13 aa, Artificial Sequence
  Synthetic construct
AADSSGYYGVLGN

SEQ ID NO: 21747 - protein, 19 aa, Artificial Sequence
  Synthetic construct
ARDFDSMIRGGYYYYYMDV

SEQ ID NO: 21748 - protein, 6 aa, Artificial Sequence
  Synthetic construct
ARGFDP

SEQ ID NO: 21749 - protein, 10 aa, Artificial Sequence
  Synthetic construct
ARDITPSPDV

SEQ ID NO: 21750 - protein, 15 aa, Artificial Sequence
  Synthetic construct
TRDLIAAYSYYGMDV

SEQ ID NO: 21751 - protein, 17 aa, Artificial Sequence
  Synthetic construct
ARGTGGSSWFANYYFDY

SEQ ID NO: 21752 - protein, 20 aa, Artificial Sequence
  Synthetic construct
ARGRISYVLRFLEWLPDFDY

SEQ ID NO: 21753 - protein, 19 aa, Artificial Sequence
  Synthetic construct
ARHSYYHDIAAYVNTSPDY

SEQ ID NO: 21754 - protein, 13 aa, Artificial Sequence
  Synthetic construct
ARIAAAGLSYLDY

SEQ ID NO: 21755 - protein, 18 aa, Artificial Sequence
  Synthetic construct
AKQPFGSRNYYNVGSIDY

SEQ ID NO: 21756 - protein, 11 aa, Artificial Sequence
  Synthetic construct
ARGPWVEYFQH

SEQ ID NO: 21757 - protein, 13 aa, Artificial Sequence
  Synthetic construct
ARDGVVGATGIDH

SEQ ID NO: 21758 - protein, 15 aa, Artificial Sequence
  Synthetic construct
ARDPLHYYDKSGYDY

SEQ ID NO: 21759 - protein, 20 aa, Artificial Sequence
  Synthetic construct
ARSWEGIKQLPGYYYFGMDV

SEQ ID NO: 21760 - protein, 24 aa, Artificial Sequence
  Synthetic construct
AKDPASYHDIWSGYVAYYYYGIDV

SEQ ID NO: 21761 - protein, 14 aa, Artificial Sequence
  Synthetic construct
AGGPAATYYYYMDV

SEQ ID NO: 21762 - protein, 12 aa, Artificial Sequence
  Synthetic construct
ACGYSGYDYEAP

SEQ ID NO: 21763 - protein, 13 aa, Artificial Sequence
  Synthetic construct
ARANQRFGGAYDI

SEQ ID NO: 21764 - protein, 13 aa, Artificial Sequence
  Synthetic construct
AREEGSGWWKHDY

SEQ ID NO: 21765 - protein, 15 aa, Artificial Sequence
  Synthetic construct
LIGSPVAASAGWFDP

SEQ ID NO: 21766 - protein, 16 aa, Artificial Sequence
  Synthetic construct
ARARRLWFGDHDAFDL

SEQ ID NO: 21767 - protein, 14 aa, Artificial Sequence
  Synthetic construct
ARDSSSWYWWFFDL

SEQ ID NO: 21768 - protein, 15 aa, Artificial Sequence
  Synthetic construct
ARDRRIVGYYFALDV

SEQ ID NO: 21769 - protein, 10 aa, Artificial Sequence
  Synthetic construct
ARDGGGWIDP

SEQ ID NO: 21770 - protein, 13 aa, Artificial Sequence
  Synthetic construct
AKAWLLHWSPFHY

SEQ ID NO: 21771 - protein, 12 aa, Artificial Sequence
  Synthetic construct
ARPPTLGDHFDY

SEQ ID NO: 21772 - protein, 15 aa, Artificial Sequence
  Synthetic construct
ARDRRGGGWTASFDF

SEQ ID NO: 21773 - protein, 18 aa, Artificial Sequence
  Synthetic construct
ARWVWRPEFLYSGSYYDY

SEQ ID NO: 21774 - protein, 14 aa, Artificial Sequence
  Synthetic construct
ARGYGGNYRAYFDY

SEQ ID NO: 21775 - protein, 13 aa, Artificial Sequence
  Synthetic construct
VSRNSGYHNWFDP

SEQ ID NO: 21776 - protein, 12 aa, Artificial Sequence
  Synthetic construct
ARRSAGSWSHDY

SEQ ID NO: 21777 - protein, 19 aa, Artificial Sequence
  Synthetic construct
ASAEEDFAVAENYFYGMDV

SEQ ID NO: 21778 - protein, 10 aa, Artificial Sequence
  Synthetic construct
ARVMGGGPEL

SEQ ID NO: 21779 - protein, 18 aa, Artificial Sequence
  Synthetic construct
ARVDLSFTPYYYYYGMDV

SEQ ID NO: 21780 - protein, 19 aa, Artificial Sequence
  Synthetic construct
ASAEEDFGVVENYYYGMDV

SEQ ID NO: 21781 - protein, 14 aa, Artificial Sequence
  Synthetic construct
AREGQVGATTGADY

SEQ ID NO: 21782 - protein, 11 aa, Artificial Sequence
  Synthetic construct
AHHTIPTIYNY

SEQ ID NO: 21783 - protein, 10 aa, Artificial Sequence
  Synthetic construct
ARDITPSPDV

SEQ ID NO: 21784 - protein, 16 aa, Artificial Sequence
  Synthetic construct
AKEGLQYSTFYYYMDV

SEQ ID NO: 21785 - protein, 18 aa, Artificial Sequence
  Synthetic construct
AAGPPYCSTSRCPNWFDP

SEQ ID NO: 21786 - protein, 18 aa, Artificial Sequence
  Synthetic construct
ARDRDTGMPSYSYYYMDV

SEQ ID NO: 21787 - protein, 12 aa, Artificial Sequence
  Synthetic construct
ARLLIEHDAFDI

SEQ ID NO: 21788 - protein, 12 aa, Artificial Sequence
  Synthetic construct
ACGYSGYDYEAP

SEQ ID NO: 21789 - protein, 17 aa, Artificial Sequence
  Synthetic construct
AREKGYSSSSATYYFDY

SEQ ID NO: 21790 - protein, 14 aa, Artificial Sequence
  Synthetic construct
AKSRGGNYLDAFDI

SEQ ID NO: 21791 - protein, 19 aa, Artificial Sequence
  Synthetic construct
AKREGVYCAGDCSTGPFDF

SEQ ID NO: 21792 - protein, 18 aa, Artificial Sequence
  Synthetic construct
AHRLHPYTSSSWDGWFDP

SEQ ID NO: 21793 - protein, 19 aa, Artificial Sequence
  Synthetic construct
ARGGTWMHLTTYYLYAVDV

SEQ ID NO: 21794 - protein, 15 aa, Artificial Sequence
  Synthetic construct
TRVYQYEASGSYGDY

SEQ ID NO: 21795 - protein, 16 aa, Artificial Sequence
  Synthetic construct
ARGSGPIPSKWYFFDN

SEQ ID NO: 21796 - protein, 10 aa, Artificial Sequence
  Synthetic construct
ARNNNWSFDS

SEQ ID NO: 21797 - protein, 16 aa, Artificial Sequence
  Synthetic construct
AKEGLQYSTFYYYMDV

SEQ ID NO: 21798 - protein, 20 aa, Artificial Sequence
  Synthetic construct
ARDFDGLVRGSFRQYYYMDV

SEQ ID NO: 21799 - protein, 17 aa, Artificial Sequence
  Synthetic construct
TTAFAYCGGDCYGRFDY

SEQ ID NO: 21800 - protein, 17 aa, Artificial Sequence
  Synthetic construct
ARDPTRPSAGDDDGFDV

SEQ ID NO: 21801 - protein, 11 aa, Artificial Sequence
  Synthetic construct
AHHTVPTIYDY

SEQ ID NO: 21802 - protein, 15 aa, Artificial Sequence
  Synthetic construct
ARVSGYDSSGYWADY

SEQ ID NO: 21803 - protein, 14 aa, Artificial Sequence
  Synthetic construct
ARVYSGSYKSYFDY

SEQ ID NO: 21804 - protein, 21 aa, Artificial Sequence
  Synthetic construct
ARALWHYDRSGYYQAAEYFQY

SEQ ID NO: 21805 - protein, 18 aa, Artificial Sequence
  Synthetic construct
ARHNLKAVAGIPYWYFDL

SEQ ID NO: 21806 - protein, 18 aa, Artificial Sequence
  Synthetic construct
ARLNSGYEFYYYFYYMDV

SEQ ID NO: 21807 - protein, 22 aa, Artificial Sequence
  Synthetic construct
ARDFADSKYSGGWYKYYYYMDV

SEQ ID NO: 21808 - protein, 16 aa, Artificial Sequence
  Synthetic construct
AKEGLQYSRFHYYMDV

SEQ ID NO: 21809 - protein, 20 aa, Artificial Sequence
  Synthetic construct
ARWAPYDYDSSGYYPHAFDV

SEQ ID NO: 21810 - protein, 15 aa, Artificial Sequence
  Synthetic construct
ARAMDTYYYHGTFDY

SEQ ID NO: 21811 - protein, 14 aa, Artificial Sequence
  Synthetic construct
AISPAIVRQNWFDP

SEQ ID NO: 21812 - protein, 21 aa, Artificial Sequence
  Synthetic construct
AKAHSSSWYSPLFHPTDAFDI

SEQ ID NO: 21813 - protein, 14 aa, Artificial Sequence
  Synthetic construct
AKDFNRFGEFPLDY

SEQ ID NO: 21814 - protein, 11 aa, Artificial Sequence
  Synthetic construct
AKMAATMGRDY

SEQ ID NO: 21815 - protein, 19 aa, Artificial Sequence
  Synthetic construct
ASAEEDFAVVENYFYGMDV

SEQ ID NO: 21816 - protein, 17 aa, Artificial Sequence
  Synthetic construct
AREVPSDNWSDVGAFDV

SEQ ID NO: 21817 - protein, 19 aa, Artificial Sequence
  Synthetic construct
ARSQGIVVVPDGIGRMFDP

SEQ ID NO: 21818 - protein, 13 aa, Artificial Sequence
  Synthetic construct
ARAKDILTGYVDY

SEQ ID NO: 21819 - protein, 15 aa, Artificial Sequence
  Synthetic construct
ARWDSYDSSGYYFDY

SEQ ID NO: 21820 - protein, 8 aa, Artificial Sequence
  Synthetic construct
AKGYSPDV

SEQ ID NO: 21821 - protein, 11 aa, Artificial Sequence
  Synthetic construct
ARLTTVTIFDY

SEQ ID NO: 21822 - protein, 14 aa, Artificial Sequence
  Synthetic construct
ARDAGSGWYSLGRY

SEQ ID NO: 21823 - protein, 15 aa, Artificial Sequence
  Synthetic construct
AEYSSGWSRDDAFDI

SEQ ID NO: 21824 - protein, 14 aa, Artificial Sequence
  Synthetic construct
ARDSSGGYWGYFDY

SEQ ID NO: 21825 - protein, 14 aa, Artificial Sequence
  Synthetic construct
AREGQVGTTTGADY

SEQ ID NO: 21826 - protein, 15 aa, Artificial Sequence
  Synthetic construct
ARFVSGYSFDDGFDI

SEQ ID NO: 21827 - protein, 6 aa, Artificial Sequence
  Synthetic construct
ARGYTD

SEQ ID NO: 21828 - protein, 20 aa, Artificial Sequence
  Synthetic construct
TTDKGPPFTWTVVDHDAFDI

SEQ ID NO: 21829 - protein, 21 aa, Artificial Sequence
  Synthetic construct
ARFPPDSSGFFPHAFHYYMDV

SEQ ID NO: 21830 - protein, 12 aa, Artificial Sequence
  Synthetic construct
ARLYPVPGAFDY

SEQ ID NO: 21831 - protein, 25 aa, Artificial Sequence
  Synthetic construct
ARLRGYIQWLLGYGADNGGNWYFDL

SEQ ID NO: 21832 - protein, 21 aa, Artificial Sequence
  Synthetic construct
ARYYDSSGYYPRDYYYSGLDV

SEQ ID NO: 21833 - protein, 16 aa, Artificial Sequence
  Synthetic construct
AKEGLEYSTFYYYMDV

SEQ ID NO: 21834 - protein, 23 aa, Artificial Sequence
  Synthetic construct
ARHVEAYSGYDSKSFYGDYVPAD

SEQ ID NO: 21835 - protein, 15 aa, Artificial Sequence
  Synthetic construct
ARYHSGYSYDEGFDI

SEQ ID NO: 21836 - protein, 21 aa, Artificial Sequence
  Synthetic construct
ARLGFGELLVLPQVVQEPFDL

SEQ ID NO: 21837 - protein, 13 aa, Artificial Sequence
  Synthetic construct
AREEGSGWWKHDY

SEQ ID NO: 21838 - protein, 10 aa, Artificial Sequence
  Synthetic construct
AKDSSGIPDY

SEQ ID NO: 21839 - protein, 17 aa, Artificial Sequence
  Synthetic construct
AKGRHLLSLGDCFPFDY

SEQ ID NO: 21840 - protein, 15 aa, Artificial Sequence
  Synthetic construct
ARGYDILTGYLYFDY

SEQ ID NO: 21841 - protein, 13 aa, Artificial Sequence
  Synthetic construct
ARGMSMIRGVPDY

SEQ ID NO: 21842 - protein, 13 aa, Artificial Sequence
  Synthetic construct
ARDGVVGATGIDY

SEQ ID NO: 21843 - protein, 14 aa, Artificial Sequence
  Synthetic construct
ARSKSGSYLSWFDP

SEQ ID NO: 21844 - protein, 20 aa, Artificial Sequence
  Synthetic construct
ARGGLYYYDSSAYYISAFDI

SEQ ID NO: 21845 - protein, 13 aa, Artificial Sequence
  Synthetic construct
ARTLGRGHWYFDL

SEQ ID NO: 21846 - protein, 10 aa, Artificial Sequence
  Synthetic construct
AHASTAGFTH

SEQ ID NO: 21847 - protein, 13 aa, Artificial Sequence
  Synthetic construct
VRSRGGRTDAFDI

SEQ ID NO: 21848 - protein, 22 aa, Artificial Sequence
  Synthetic construct
ARDGAYCSGGICYPDIVFTMDV

SEQ ID NO: 21849 - protein, 12 aa, Artificial Sequence
  Synthetic construct
AHIVSGYYYVDY

SEQ ID NO: 21850 - protein, 21 aa, Artificial Sequence
  Synthetic construct
ARDALNFDWLWRTAPDLAFDY

SEQ ID NO: 21851 - protein, 18 aa, Artificial Sequence
  Synthetic construct
ARDLDYYDSSGSWPPLDC

SEQ ID NO: 21852 - protein, 11 aa, Artificial Sequence
  Synthetic construct
AAITGTGSFDY

SEQ ID NO: 21853 - protein, 19 aa, Artificial Sequence
  Synthetic construct
ARGNKYCSGGSCYSLGFDY

SEQ ID NO: 21854 - protein, 18 aa, Artificial Sequence
  Synthetic construct
VRANTYYDILTGHSPFDS

SEQ ID NO: 21855 - protein, 13 aa, Artificial Sequence
  Synthetic construct
ARGVTQDSSGPDY

SEQ ID NO: 21856 - protein, 23 aa, Artificial Sequence
  Synthetic construct
ARVRGVGDFWSGYFFVSSTYFDS

SEQ ID NO: 21857 - protein, 19 aa, Artificial Sequence
  Synthetic construct
ARDFEPTYPDHYYYYYMDV

SEQ ID NO: 21858 - protein, 15 aa, Artificial Sequence
  Synthetic construct
ARGYFDWLQRNYFDY

SEQ ID NO: 21859 - protein, 16 aa, Artificial Sequence
  Synthetic construct
ARDNSIAAIGTWWFDP

SEQ ID NO: 21860 - protein, 23 aa, Artificial Sequence
  Synthetic construct
VRVEKVPAAMRRAYYYYYFYMDV

SEQ ID NO: 21861 - protein, 17 aa, Artificial Sequence
  Synthetic construct
ARDLPSDNWNDVGAFDI

SEQ ID NO: 21862 - protein, 17 aa, Artificial Sequence
  Synthetic construct
ARGPIVLMVYPRYYFDF

SEQ ID NO: 21863 - protein, 19 aa, Artificial Sequence
  Synthetic construct
ARHSNYYDSAGFVNTSPDF

SEQ ID NO: 21864 - protein, 22 aa, Artificial Sequence
  Synthetic construct
VKDGASHYDFWGGFMVDDAFDI

SEQ ID NO: 21865 - protein, 22 aa, Artificial Sequence
  Synthetic construct
ARDYSGYDTEGSGAYYYYYMDV

SEQ ID NO: 21866 - protein, 15 aa, Artificial Sequence
  Synthetic construct
ARVYYDNSGRLPFDY

SEQ ID NO: 21867 - protein, 11 aa, Artificial Sequence
  Synthetic construct
ARDWGEYYFDY

SEQ ID NO: 21868 - protein, 20 aa, Artificial Sequence
  Synthetic construct
AKAGEWGYDILTGHGPPFDF

SEQ ID NO: 21869 - protein, 18 aa, Artificial Sequence
  Synthetic construct
ARDYDSGSPQYSYYYMDV

SEQ ID NO: 21870 - protein, 22 aa, Artificial Sequence
  Synthetic construct
AKDIGRYDHYEGFGRVGGAFDI

SEQ ID NO: 21871 - protein, 12 aa, Artificial Sequence
  Synthetic construct
VLASGSQNAFDI

SEQ ID NO: 21872 - protein, 16 aa, Artificial Sequence
  Synthetic construct
ATGLWFGDSETTWFDP

SEQ ID NO: 21873 - protein, 20 aa, Artificial Sequence
  Synthetic construct
ARDPDPDIVVVEGADASLDY

SEQ ID NO: 21874 - protein, 20 aa, Artificial Sequence
  Synthetic construct
ARVPNVNIRGAIRLYYYMDV

SEQ ID NO: 21875 - protein, 21 aa, Artificial Sequence
  Synthetic construct
ARDRRAVVPKRAYSYGYAFDI

SEQ ID NO: 21876 - protein, 17 aa, Artificial Sequence
  Synthetic construct
AKGRHLLSLGDCFPFDY

SEQ ID NO: 21877 - protein, 22 aa, Artificial Sequence
  Synthetic construct
AREYLYHDFWSGYYTGTGGLDY

SEQ ID NO: 21878 - protein, 14 aa, Artificial Sequence
  Synthetic construct
ARDRGGFEPSYFDF

SEQ ID NO: 21879 - protein, 16 aa, Artificial Sequence
  Synthetic construct
ARWGAGSGWDEGEFDY

SEQ ID NO: 21880 - protein, 13 aa, Artificial Sequence
  Synthetic construct
ARSGGYRLWFGEL

SEQ ID NO: 21881 - protein, 12 aa, Artificial Sequence
  Synthetic construct
ARGSRGDNWFDP

SEQ ID NO: 21882 - protein, 15 aa, Artificial Sequence
  Synthetic construct
ARIPNGWIGEFLFDY

SEQ ID NO: 21883 - protein, 16 aa, Artificial Sequence
  Synthetic construct
AREHYDLLTAHYYFDF

SEQ ID NO: 21884 - protein, 12 aa, Artificial Sequence
  Synthetic construct
ARLQWLRGRFDY

SEQ ID NO: 21885 - protein, 17 aa, Artificial Sequence
  Synthetic construct
ARDLPSDNWNDVGAFDL

SEQ ID NO: 21886 - protein, 14 aa, Artificial Sequence
  Synthetic construct
AREGSLGATPGLDY

SEQ ID NO: 21887 - protein, 12 aa, Artificial Sequence
  Synthetic construct
ARGGGGYKYFDF

SEQ ID NO: 21888 - protein, 15 aa, Artificial Sequence
  Synthetic construct
ATTSARPGWGGWFDP

SEQ ID NO: 21889 - protein, 12 aa, Artificial Sequence
  Synthetic construct
ARRHLMAWTFDF

SEQ ID NO: 21890 - protein, 9 aa, Artificial Sequence
  Synthetic construct
LSTGGDYDH

SEQ ID NO: 21891 - protein, 15 aa, Artificial Sequence
  Synthetic construct
VKDRGYGDHEDAFDI

SEQ ID NO: 21892 - protein, 22 aa, Artificial Sequence
  Synthetic construct
ARDVWKYLLLKGGGNNYYGMDV

SEQ ID NO: 21893 - protein, 11 aa, Artificial Sequence
  Synthetic construct
ARLTTETVFDY

SEQ ID NO: 21894 - protein, 18 aa, Artificial Sequence
  Synthetic construct
ARGVVTARGSYYYYYMDV

SEQ ID NO: 21895 - protein, 18 aa, Artificial Sequence
  Synthetic construct
ARAPPLSDISDYYVSPYY

SEQ ID NO: 21896 - protein, 18 aa, Artificial Sequence
  Synthetic construct
ARMVLSSSGWYFYYGMDV

SEQ ID NO: 21897 - protein, 25 aa, Artificial Sequence
  Synthetic construct
ARADMTTVTTNGPSGRYYSYYYMDV

SEQ ID NO: 21898 - protein, 21 aa, Artificial Sequence
  Synthetic construct
AKAHSSSWYNPLFHPTDAFDI

SEQ ID NO: 21899 - protein, 13 aa, Artificial Sequence
  Synthetic construct
AHRLVAVAGPFDF

SEQ ID NO: 21900 - protein, 22 aa, Artificial Sequence
  Synthetic construct
ARGERDTVVVLGGIDYFYYMDV

SEQ ID NO: 21901 - protein, 22 aa, Artificial Sequence
  Synthetic construct
ARVERDIVVVVTAIDYYYYMDV

SEQ ID NO: 21902 - protein, 6 aa, Artificial Sequence
  Synthetic construct
ARGFDP

SEQ ID NO: 21903 - protein, 20 aa, Artificial Sequence
  Synthetic construct
ARDRKVLRYFDWLLSGAFDI

SEQ ID NO: 21904 - protein, 19 aa, Artificial Sequence
  Synthetic construct
AREGYYDSSGFPGNYGMDV

SEQ ID NO: 21905 - protein, 11 aa, Artificial Sequence
  Synthetic construct
AREGWAEPFDY

SEQ ID NO: 21906 - protein, 10 aa, Artificial Sequence
  Synthetic construct
AREDTFYFDF

SEQ ID NO: 21907 - protein, 11 aa, Artificial Sequence
  Synthetic construct
ARDAHVWNLDY

SEQ ID NO: 21908 - protein, 14 aa, Artificial Sequence
  Synthetic construct
VREGQVGTTTGADY

SEQ ID NO: 21909 - protein, 17 aa, Artificial Sequence
  Synthetic construct
ATAFAYCGGDCYGRFDY

SEQ ID NO: 21910 - protein, 15 aa, Artificial Sequence
  Synthetic construct
ATEWAVAGTFGEHHY

SEQ ID NO: 21911 - protein, 15 aa, Artificial Sequence
  Synthetic construct
ARDGDFSRSEPPFDS

SEQ ID NO: 21912 - protein, 19 aa, Artificial Sequence
  Synthetic construct
ARVNKFQMRYPPHYYYMDV

SEQ ID NO: 21913 - protein, 19 aa, Artificial Sequence
  Synthetic construct
ARDFDSMVRGGYYYYYMDV

SEQ ID NO: 21914 - protein, 18 aa, Artificial Sequence
  Synthetic construct
ARDSAADHPYYYYYYMDV

SEQ ID NO: 21915 - protein, 21 aa, Artificial Sequence
  Synthetic construct
ARGQFSDWLLYLRGSSEYFQH

SEQ ID NO: 21916 - protein, 17 aa, Artificial Sequence
  Synthetic construct
ARDPSRPSTTDPDAFDI

SEQ ID NO: 21917 - protein, 13 aa, Artificial Sequence
  Synthetic construct
TSGSGNYLTWFDP

SEQ ID NO: 21918 - protein, 22 aa, Artificial Sequence
  Synthetic construct
ARPPRGYYDRTGYYNVVHYFQH

SEQ ID NO: 21919 - protein, 17 aa, Artificial Sequence
  Synthetic construct
AKSNGGWYTPPPSGMDV

SEQ ID NO: 21920 - protein, 25 aa, Artificial Sequence
  Synthetic construct
ARGAGEQRLVGGLFGVSHFYYYMDV

SEQ ID NO: 21921 - protein, 13 aa, Artificial Sequence
  Synthetic construct
ARGTGRITGSLDY

SEQ ID NO: 21922 - protein, 14 aa, Artificial Sequence
  Synthetic construct
ARTYSGSYYGPFDY

SEQ ID NO: 21923 - protein, 10 aa, Artificial Sequence
  Synthetic construct
AKDSSGIPEY

SEQ ID NO: 21924 - protein, 11 aa, Artificial Sequence
  Synthetic construct
AGSYSNSWVDY

SEQ ID NO: 21925 - protein, 22 aa, Artificial Sequence
  Synthetic construct
ARDGAYCSGGWCYPDIVFTMDV

SEQ ID NO: 21926 - protein, 14 aa, Artificial Sequence
  Synthetic construct
ATSRITIIVSFVDQ

SEQ ID NO: 21927 - protein, 13 aa, Artificial Sequence
  Synthetic construct
TTNILTGTDAFDI

SEQ ID NO: 21928 - protein, 19 aa, Artificial Sequence
  Synthetic construct
ARGGTWMQLTTYYYYAMDV

SEQ ID NO: 21929 - protein, 16 aa, Artificial Sequence
  Synthetic construct
ARALYDSSGYGDWFDP

SEQ ID NO: 21930 - protein, 11 aa, Artificial Sequence
  Synthetic construct
AREGWAEPFDY

SEQ ID NO: 21931 - protein, 23 aa, Artificial Sequence
  Synthetic construct
ATEFFFESGYGDYVSGSHYPFHH

SEQ ID NO: 21932 - protein, 17 aa, Artificial Sequence
  Synthetic construct
ARVDYHYGDKLYWYFDL

SEQ ID NO: 21933 - protein, 18 aa, Artificial Sequence
  Synthetic construct
AKSLDYFSGNYYRNYMDV

SEQ ID NO: 21934 - protein, 17 aa, Artificial Sequence
  Synthetic construct
ARADYGDNEGEGYYFDS

SEQ ID NO: 21935 - protein, 21 aa, Artificial Sequence
  Synthetic construct
ASLGGDYYGSGSYYNSSGFDP

SEQ ID NO: 21936 - protein, 15 aa, Artificial Sequence
  Synthetic construct
ARGDTSGWLPHAFHI

SEQ ID NO: 21937 - protein, 9 aa, Artificial Sequence
  Synthetic construct
VRGGRAFDC

SEQ ID NO: 21938 - protein, 17 aa, Artificial Sequence
  Synthetic construct
ARVLAWGMVRGLSSFDY

SEQ ID NO: 21939 - protein, 13 aa, Artificial Sequence
  Synthetic construct
ARGWSGRFYGMDV

SEQ ID NO: 21940 - protein, 18 aa, Artificial Sequence
  Synthetic construct
AKWVAPGYYNGAGPQLDH

SEQ ID NO: 21941 - protein, 18 aa, Artificial Sequence
  Synthetic construct
ARAPPLYDISTYYVSPYY

SEQ ID NO: 21942 - protein, 16 aa, Artificial Sequence
  Synthetic construct
ARWGAGSGWDEGEFDY

SEQ ID NO: 21943 - protein, 19 aa, Artificial Sequence
  Synthetic construct
ASSYGVEWFLDGDENAFDI

SEQ ID NO: 21944 - protein, 18 aa, Artificial Sequence
  Synthetic construct
ARPSQDLGIINYHYYMDV

SEQ ID NO: 21945 - protein, 15 aa, Artificial Sequence
  Synthetic construct
ATGQVGYSYDTPFDY

SEQ ID NO: 21946 - protein, 13 aa, Artificial Sequence
  Synthetic construct
VRSRGGRTDAFDI

SEQ ID NO: 21947 - protein, 14 aa, Artificial Sequence
  Synthetic construct
ARLMVAVAGSPFDS

SEQ ID NO: 21948 - protein, 14 aa, Artificial Sequence
  Synthetic construct
ARDLGDYGVDWFDP

SEQ ID NO: 21949 - protein, 21 aa, Artificial Sequence
  Synthetic construct
ARLAYDSSGYYYSRSVYYFDY

SEQ ID NO: 21950 - protein, 13 aa, Artificial Sequence
  Synthetic construct
ARDGVVGATGLDY

SEQ ID NO: 21951 - protein, 17 aa, Artificial Sequence
  Synthetic construct
TTTYYYDSRYYYYGMDV

SEQ ID NO: 21952 - protein, 18 aa, Artificial Sequence
  Synthetic construct
ARHRAGWGGYASSSTFDY

SEQ ID NO: 21953 - protein, 16 aa, Artificial Sequence
  Synthetic construct
AREGIVVDGTGNALDC

SEQ ID NO: 21954 - protein, 21 aa, Artificial Sequence
  Synthetic construct
ARMQGYCSGGGCYSGYYGMDV

SEQ ID NO: 21955 - protein, 18 aa, Artificial Sequence
  Synthetic construct
AREVSRRLDEYYYYYLDV

SEQ ID NO: 21956 - protein, 22 aa, Artificial Sequence
  Synthetic construct
ARDIADSKYSGGWYYYYYYMDV

SEQ ID NO: 21957 - protein, 20 aa, Artificial Sequence
  Synthetic construct
AREIIWERNFDWLLSPFFDY

SEQ ID NO: 21958 - protein, 17 aa, Artificial Sequence
  Synthetic construct
ARASTGYSSGWYNWFDP

SEQ ID NO: 21959 - protein, 15 aa, Artificial Sequence
  Synthetic construct
ARDFGVAAAASSTGY

SEQ ID NO: 21960 - protein, 9 aa, Artificial Sequence
  Synthetic construct
ARVIQHLDS

SEQ ID NO: 21961 - protein, 19 aa, Artificial Sequence
  Synthetic construct
ARHSHYYDVTAYVNTSPDY

SEQ ID NO: 21962 - protein, 14 aa, Artificial Sequence
  Synthetic construct
TKHTITVTGGAMDV

SEQ ID NO: 21963 - protein, 12 aa, Artificial Sequence
  Synthetic construct
ARDFVGVPGVDF

SEQ ID NO: 21964 - protein, 17 aa, Artificial Sequence
  Synthetic construct
ARFAYNSVETFIGGFDI

SEQ ID NO: 21965 - protein, 14 aa, Artificial Sequence
  Synthetic construct
AREGQVGETSGFDI

SEQ ID NO: 21966 - protein, 21 aa, Artificial Sequence
  Synthetic construct
ARVPWYYDRSGHYQADEYFQH

SEQ ID NO: 21967 - protein, 17 aa, Artificial Sequence
  Synthetic construct
ARKPLLHSPVNPGAFDI

SEQ ID NO: 21968 - protein, 12 aa, Artificial Sequence
  Synthetic construct
ARTNGYKNRFDF

SEQ ID NO: 21969 - protein, 21 aa, Artificial Sequence
  Synthetic construct
ATGFSIVPANVGYSLYYGMDV

SEQ ID NO: 21970 - protein, 16 aa, Artificial Sequence
  Synthetic construct
AREVTMIAEGIYYFDS

SEQ ID NO: 21971 - protein, 12 aa, Artificial Sequence
  Synthetic construct
VRHEWLGGTWVY

SEQ ID NO: 21972 - protein, 15 aa, Artificial Sequence
  Synthetic construct
ATKRSGGNYWGYFDY

SEQ ID NO: 21973 - protein, 6 aa, Artificial Sequence
  Synthetic construct
ARGFDL

SEQ ID NO: 21974 - protein, 13 aa, Artificial Sequence
  Synthetic construct
ARSSWFWGYYFDY

SEQ ID NO: 21975 - protein, 18 aa, Artificial Sequence
  Synthetic construct
ARGRDSSGLDFYYYGLDV

SEQ ID NO: 21976 - protein, 12 aa, Artificial Sequence
  Synthetic construct
ARIGTLGGGMDV

SEQ ID NO: 21977 - protein, 15 aa, Artificial Sequence
  Synthetic construct
AREGVVVVVGSALDY

SEQ ID NO: 21978 - protein, 14 aa, Artificial Sequence
  Synthetic construct
ARDRSVSRTVWFDP

SEQ ID NO: 21979 - protein, 14 aa, Artificial Sequence
  Synthetic construct
AREGGWYSVGWVDP

SEQ ID NO: 21980 - protein, 12 aa, Artificial Sequence
  Synthetic construct
ASTRRGVYGMDV

SEQ ID NO: 21981 - protein, 12 aa, Artificial Sequence
  Synthetic construct
AREARVSTEFDP

SEQ ID NO: 21982 - protein, 21 aa, Artificial Sequence
  Synthetic construct
ASLGGDYYGSGSYYNSSGFDP

SEQ ID NO: 21983 - protein, 10 aa, Artificial Sequence
  Synthetic construct
ATEKRSRMEF

SEQ ID NO: 21984 - protein, 13 aa, Artificial Sequence
  Synthetic construct
ARGVSNSWYYFDS

SEQ ID NO: 21985 - protein, 13 aa, Artificial Sequence
  Synthetic construct
ARGTWIQGLRIDY

SEQ ID NO: 21986 - protein, 11 aa, Artificial Sequence
  Synthetic construct
ASQGGAGEAFH

SEQ ID NO: 21987 - protein, 19 aa, Artificial Sequence
  Synthetic construct
ARHLAINLLLPGARGYFDN

SEQ ID NO: 21988 - protein, 11 aa, Artificial Sequence
  Synthetic construct
ATGFTPYYFDY

SEQ ID NO: 21989 - protein, 17 aa, Artificial Sequence
  Synthetic construct
AKDRGFGVVVGATLFDD

SEQ ID NO: 21990 - protein, 19 aa, Artificial Sequence
  Synthetic construct
ARGRELLSAYYHYYYFMDV

SEQ ID NO: 21991 - protein, 17 aa, Artificial Sequence
  Synthetic construct
ATAFAYCGGDCFGRFDY

SEQ ID NO: 21992 - protein, 16 aa, Artificial Sequence
  Synthetic construct
AREYESFGDYVYYMDV

SEQ ID NO: 21993 - protein, 12 aa, Artificial Sequence
  Synthetic construct
ARLALSSWYFGY

SEQ ID NO: 21994 - protein, 14 aa, Artificial Sequence
  Synthetic construct
ARRGYDSGGYALGY

SEQ ID NO: 21995 - protein, 16 aa, Artificial Sequence
  Synthetic construct
AREGVALAGSGNALDY

SEQ ID NO: 21996 - protein, 13 aa, Artificial Sequence
  Synthetic construct
AREIFGVENWLDS

SEQ ID NO: 21997 - protein, 12 aa, Artificial Sequence
  Synthetic construct
VRHEWLGGTWVY

SEQ ID NO: 21998 - protein, 15 aa, Artificial Sequence
  Synthetic construct
ARIGAYDSGGYSDDY

SEQ ID NO: 21999 - protein, 14 aa, Artificial Sequence
  Synthetic construct
ARWERLVPEDAFDI

SEQ ID NO: 22000 - protein, 12 aa, Artificial Sequence
  Synthetic construct
ARLLMEHDAFDV

SEQ ID NO: 22001 - protein, 14 aa, Artificial Sequence
  Synthetic construct
ARSKSGSYLSWFDP

SEQ ID NO: 22002 - protein, 12 aa, Artificial Sequence
  Synthetic construct
ACGYSGYDYDAP

SEQ ID NO: 22003 - protein, 24 aa, Artificial Sequence
  Synthetic construct
ARALHTGDTSGWFDPPPYFYGLDV

SEQ ID NO: 22004 - protein, 21 aa, Artificial Sequence
  Synthetic construct
ARDPGYCSGGSCSNYYYYMDV

SEQ ID NO: 22005 - protein, 15 aa, Artificial Sequence
  Synthetic construct
SRWPRFRTQPRQFDP

SEQ ID NO: 22006 - protein, 14 aa, Artificial Sequence
  Synthetic construct
AEGSTIALMVYATR

SEQ ID NO: 22007 - protein, 14 aa, Artificial Sequence
  Synthetic construct
ARAWGGGYRGPVDY

SEQ ID NO: 22008 - protein, 13 aa, Artificial Sequence
  Synthetic construct
ARVPGGRGWDFDY

SEQ ID NO: 22009 - protein, 20 aa, Artificial Sequence
  Synthetic construct
AREQYYYGSGSYHSPGGMDV

SEQ ID NO: 22010 - protein, 11 aa, Artificial Sequence
  Synthetic construct
ARLTTVTIFDS

SEQ ID NO: 22011 - protein, 9 aa, Artificial Sequence
  Synthetic construct
AKGATKVDY

SEQ ID NO: 22012 - protein, 17 aa, Artificial Sequence
  Synthetic construct
AREKGYSSSSSSTYFNH

SEQ ID NO: 22013 - protein, 12 aa, Artificial Sequence
  Synthetic construct
ATVTFLIHVFAD

SEQ ID NO: 22014 - protein, 14 aa, Artificial Sequence
  Synthetic construct
ATSPAIVRQNWFDP

SEQ ID NO: 22015 - protein, 28 aa, Artificial Sequence
  Synthetic construct
ARDGSVLPDYDFWSGYSSRGDYHYGMDV

SEQ ID NO: 22016 - protein, 18 aa, Artificial Sequence
  Synthetic construct
ARLNWVVNGDNYYYYMDV

SEQ ID NO: 22017 - protein, 18 aa, Artificial Sequence
  Synthetic construct
ARGEKAHVTVAAYRLLIP

SEQ ID NO: 22018 - protein, 12 aa, Artificial Sequence
  Synthetic construct
AKEGLGSPPPES

SEQ ID NO: 22019 - protein, 10 aa, Artificial Sequence
  Synthetic construct
VKEGFSPFDY

SEQ ID NO: 22020 - protein, 13 aa, Artificial Sequence
  Synthetic construct
VRSRGGRTDALDI

SEQ ID NO: 22021 - protein, 16 aa, Artificial Sequence
  Synthetic construct
ARLDYQLQPHYHYMDV

SEQ ID NO: 22022 - protein, 21 aa, Artificial Sequence
  Synthetic construct
ARDRETSNPWGFYYYYYGMDV

SEQ ID NO: 22023 - protein, 14 aa, Artificial Sequence
  Synthetic construct
ARPESSGTAAAFDP

SEQ ID NO: 22024 - protein, 18 aa, Artificial Sequence
  Synthetic construct
ARDSAADHPYYYYYYMDV

SEQ ID NO: 22025 - protein, 16 aa, Artificial Sequence
  Synthetic construct
ARRHRPFTLLRGAFDS

SEQ ID NO: 22026 - protein, 18 aa, Artificial Sequence
  Synthetic construct
ARDRRTAMPDYSYFYMDV

SEQ ID NO: 22027 - protein, 19 aa, Artificial Sequence
  Synthetic construct
ARGLAGFYYGSTILAYFDY

SEQ ID NO: 22028 - protein, 14 aa, Artificial Sequence
  Synthetic construct
AREGMVGATTGIDY

SEQ ID NO: 22029 - protein, 15 aa, Artificial Sequence
  Synthetic construct
ARDRRIIGYYFGMDV

SEQ ID NO: 22030 - protein, 12 aa, Artificial Sequence
  Synthetic construct
ARGHVFIYYFDY

SEQ ID NO: 22031 - protein, 13 aa, Artificial Sequence
  Synthetic construct
ARGGFGSYFYFDC

SEQ ID NO: 22032 - protein, 17 aa, Artificial Sequence
  Synthetic construct
ARDYILTTVAGGRGFDP

SEQ ID NO: 22033 - protein, 13 aa, Artificial Sequence
  Synthetic construct
ATGGGNYYNAFHI

SEQ ID NO: 22034 - protein, 15 aa, Artificial Sequence
  Synthetic construct
ARLWDTYNYYSGMDV

SEQ ID NO: 22035 - protein, 16 aa, Artificial Sequence
  Synthetic construct
ATVPPLVTAGHNWFDP

SEQ ID NO: 22036 - protein, 16 aa, Artificial Sequence
  Synthetic construct
ARENPGVYDSGGYFDY

SEQ ID NO: 22037 - protein, 15 aa, Artificial Sequence
  Synthetic construct
TRVSGYDSRGHWVDY

SEQ ID NO: 22038 - protein, 19 aa, Artificial Sequence
  Synthetic construct
ARDSGYSGSGTYYIQAFDV

SEQ ID NO: 22039 - protein, 21 aa, Artificial Sequence
  Synthetic construct
ARDSTPREYYYDRSGDEAFDI

SEQ ID NO: 22040 - protein, 12 aa, Artificial Sequence
  Synthetic construct
ARFLEAAGGMDV

SEQ ID NO: 22041 - protein, 13 aa, Artificial Sequence
  Synthetic construct
AHQNFYYYYYIDV

SEQ ID NO: 22042 - protein, 24 aa, Artificial Sequence
  Synthetic construct
ARDPASYYDFWSGYVDYYQYGMDV

SEQ ID NO: 22043 - protein, 17 aa, Artificial Sequence
  Synthetic construct
ARFAYNSVETFIGGFDI

SEQ ID NO: 22044 - protein, 13 aa, Artificial Sequence
  Synthetic construct
ARGVGDSRQFREH

SEQ ID NO: 22045 - protein, 17 aa, Artificial Sequence
  Synthetic construct
AKGLVEVAATLYYGMDV

SEQ ID NO: 22046 - protein, 19 aa, Artificial Sequence
  Synthetic construct
ARHSFYYDVAAYVNTSPDY

SEQ ID NO: 22047 - protein, 18 aa, Artificial Sequence
  Synthetic construct
ARVGYRLLLGSYHYYLDV

SEQ ID NO: 22048 - protein, 21 aa, Artificial Sequence
  Synthetic construct
ARGGGPSSWSLDYYFYYYMDV

SEQ ID NO: 22049 - protein, 17 aa, Artificial Sequence
  Synthetic construct
ARKPLLHSAVNPGAFDI

SEQ ID NO: 22050 - protein, 15 aa, Artificial Sequence
  Synthetic construct
ARDTAYDSSGYYYSY

SEQ ID NO: 22051 - protein, 15 aa, Artificial Sequence
  Synthetic construct
ARQGMATITGVGFDP

SEQ ID NO: 22052 - protein, 21 aa, Artificial Sequence
  Synthetic construct
ARLYCSGGSCFSWDYYYGMDV

SEQ ID NO: 22053 - protein, 12 aa, Artificial Sequence
  Synthetic construct
ARSDGYKSFFDY

SEQ ID NO: 22054 - protein, 14 aa, Artificial Sequence
  Synthetic construct
ARPPSGNYFGWFDP

SEQ ID NO: 22055 - protein, 14 aa, Artificial Sequence
  Synthetic construct
ARSGSGSYYGDFGY

SEQ ID NO: 22056 - protein, 22 aa, Artificial Sequence
  Synthetic construct
AKDIGRYDHYYTFGRVGGAFDI

SEQ ID NO: 22057 - protein, 21 aa, Artificial Sequence
  Synthetic construct
ASLGGDYYDSGTYYNSSEFDP

SEQ ID NO: 22058 - protein, 15 aa, Artificial Sequence
  Synthetic construct
ARIEGFDRSGHYWDF

SEQ ID NO: 22059 - protein, 18 aa, Artificial Sequence
  Synthetic construct
ARLNSGYDFYSYYYYMDV

SEQ ID NO: 22060 - protein, 17 aa, Artificial Sequence
  Synthetic construct
ARDPTRPSNGDPDGFDM

SEQ ID NO: 22061 - protein, 15 aa, Artificial Sequence
  Synthetic construct
ARDNGSGTQNYHMDV

SEQ ID NO: 22062 - protein, 15 aa, Artificial Sequence
  Synthetic construct
AQEALNVVVVTAPRY

SEQ ID NO: 22063 - protein, 14 aa, Artificial Sequence
  Synthetic construct
AREGQVGETGGFDI

SEQ ID NO: 22064 - protein, 18 aa, Artificial Sequence
  Synthetic construct
ARLNWVVNGDFYYYYMDV

SEQ ID NO: 22065 - protein, 13 aa, Artificial Sequence
  Synthetic construct
ARGDGSYYSSFDY

SEQ ID NO: 22066 - protein, 18 aa, Artificial Sequence
  Synthetic construct
AREKGYSSLSSATYYFEY

SEQ ID NO: 22067 - protein, 12 aa, Artificial Sequence
  Synthetic construct
ACGYSGYDYEAP

SEQ ID NO: 22068 - protein, 20 aa, Artificial Sequence
  Synthetic construct
ASMRTNYDIFTGYYPDAFDI

SEQ ID NO: 22069 - protein, 14 aa, Artificial Sequence
  Synthetic construct
ARQGPPWSHDAFDI

SEQ ID NO: 22070 - protein, 15 aa, Artificial Sequence
  Synthetic construct
ARVSRGYTYGAPSDY

SEQ ID NO: 22071 - protein, 16 aa, Artificial Sequence
  Synthetic construct
AKGDGSGTYYYYYMDV

SEQ ID NO: 22072 - protein, 19 aa, Artificial Sequence
  Synthetic construct
ARDSGYCSSSSCRFDWFDP

SEQ ID NO: 22073 - protein, 15 aa, Artificial Sequence
  Synthetic construct
ARYTRDWSRDDAFDI

SEQ ID NO: 22074 - protein, 15 aa, Artificial Sequence
  Synthetic construct
ATGPPIITVGHWFDP

SEQ ID NO: 22075 - protein, 12 aa, Artificial Sequence
  Synthetic construct
ARGGGGYKFFDY

SEQ ID NO: 22076 - protein, 16 aa, Artificial Sequence
  Synthetic construct
ARLPAFQVRGKYGMDV

SEQ ID NO: 22077 - protein, 15 aa, Artificial Sequence
  Synthetic construct
ARVTLSYFGYYYMDV

SEQ ID NO: 22078 - protein, 16 aa, Artificial Sequence
  Synthetic construct
IHVGSVTFYQYNGVDL

SEQ ID NO: 22079 - protein, 18 aa, Artificial Sequence
  Synthetic construct
ARAPPLYETRDYYVSPFY

SEQ ID NO: 22080 - protein, 22 aa, Artificial Sequence
  Synthetic construct
ARDSFRGVGVTAMDYYYYGMDV

SEQ ID NO: 22081 - protein, 14 aa, Artificial Sequence
  Synthetic construct
ARDRGSGWTDAFDI

SEQ ID NO: 22082 - protein, 15 aa, Artificial Sequence
  Synthetic construct
ARMPGIITAGAAFDF

SEQ ID NO: 22083 - protein, 14 aa, Artificial Sequence
  Synthetic construct
AKDFAWGGEPELLL

SEQ ID NO: 22084 - protein, 14 aa, Artificial Sequence
  Synthetic construct
ATSPAVVRQNWFDP

SEQ ID NO: 22085 - protein, 18 aa, Artificial Sequence
  Synthetic construct
ARDFQGPENYYYYFYMDV

SEQ ID NO: 22086 - protein, 12 aa, Artificial Sequence
  Synthetic construct
AREARVSTEFDP

SEQ ID NO: 22087 - protein, 13 aa, Artificial Sequence
  Synthetic construct
TRGGWPSGDTFDI

SEQ ID NO: 22088 - protein, 16 aa, Artificial Sequence
  Synthetic construct
AREGYYYDTTHSPPHF

SEQ ID NO: 22089 - protein, 13 aa, Artificial Sequence
  Synthetic construct
VKDSSRDYGGCDH

SEQ ID NO: 22090 - protein, 21 aa, Artificial Sequence
  Synthetic construct
AGALGRDWLLHSDYYYYYMDV

SEQ ID NO: 22091 - protein, 22 aa, Artificial Sequence
  Synthetic construct
AREPRSPLDTALVLGLHNWFDP

SEQ ID NO: 22092 - protein, 16 aa, Artificial Sequence
  Synthetic construct
AKCSSGTHYFFDAFDI

SEQ ID NO: 22093 - protein, 6 aa, Artificial Sequence
  Synthetic construct
ARGFDY

SEQ ID NO: 22094 - protein, 13 aa, Artificial Sequence
  Synthetic construct
ARVMGGYSTAFDY

SEQ ID NO: 22095 - protein, 9 aa, Artificial Sequence
  Synthetic construct
ARVETIDSY

SEQ ID NO: 22096 - protein, 20 aa, Artificial Sequence
  Synthetic construct
ARDPDPDIAVMETADASLDY

SEQ ID NO: 22097 - protein, 18 aa, Artificial Sequence
  Synthetic construct
ASQQQQLVSYYYYYYMDV

SEQ ID NO: 22098 - protein, 13 aa, Artificial Sequence
  Synthetic construct
ARGWDLGDNRFDP

SEQ ID NO: 22099 - protein, 14 aa, Artificial Sequence
  Synthetic construct
ARGARDYGGNPIDY

SEQ ID NO: 22100 - protein, 17 aa, Artificial Sequence
  Synthetic construct
ARLRDYHGSGREGWFDP

SEQ ID NO: 22101 - protein, 15 aa, Artificial Sequence
  Synthetic construct
ATEWAVAGTFGEHHY

SEQ ID NO: 22102 - protein, 14 aa, Artificial Sequence
  Synthetic construct
ARSLGGSYYHGFDY

SEQ ID NO: 22103 - protein, 17 aa, Artificial Sequence
  Synthetic construct
ARGSGAPNNYLFYYMDV

SEQ ID NO: 22104 - protein, 23 aa, Artificial Sequence
  Synthetic construct
ARAQVKNYDFWSGYSGYYYGMDV

SEQ ID NO: 22105 - protein, 13 aa, Artificial Sequence
  Synthetic construct
ARLLNLAGAFNDY

SEQ ID NO: 22106 - protein, 9 aa, Artificial Sequence
  Synthetic construct
AKGATKMDY

SEQ ID NO: 22107 - protein, 15 aa, Artificial Sequence
  Synthetic construct
ARFVSGYSFDDGFDI

SEQ ID NO: 22108 - protein, 13 aa, Artificial Sequence
  Synthetic construct
ARVFTTLDWYFDL

SEQ ID NO: 22109 - protein, 17 aa, Artificial Sequence
  Synthetic construct
ARRIAVAGTIGFDAFDI

SEQ ID NO: 22110 - protein, 13 aa, Artificial Sequence
  Synthetic construct
VRGRGMATIPFEH

SEQ ID NO: 22111 - protein, 22 aa, Artificial Sequence
  Synthetic construct
AKDIGRYDHYNIFGRVGGAFDI

SEQ ID NO: 22112 - protein, 12 aa, Artificial Sequence
  Synthetic construct
ARGGGGYKYFDY

SEQ ID NO: 22113 - protein, 22 aa, Artificial Sequence
  Synthetic construct
ARETSDRQWLGTTYHYYYYMDV

SEQ ID NO: 22114 - protein, 23 aa, Artificial Sequence
  Synthetic construct
ARQNYYDSSGYSPDAYSPDAFDI

SEQ ID NO: 22115 - protein, 13 aa, Artificial Sequence
  Synthetic construct
ATGGGNYYNAFDI

SEQ ID NO: 22116 - protein, 15 aa, Artificial Sequence
  Synthetic construct
ARGYDILTGYLYFDY

SEQ ID NO: 22117 - protein, 19 aa, Artificial Sequence
  Synthetic construct
ARPTFGYYGSHYNYYGMDV

SEQ ID NO: 22118 - protein, 22 aa, Artificial Sequence
  Synthetic construct
ARNSYYAVWRGSYGFAFHGMDV

SEQ ID NO: 22119 - protein, 16 aa, Artificial Sequence
  Synthetic construct
AHTGSVPLAMVGAFDI

SEQ ID NO: 22120 - protein, 14 aa, Artificial Sequence
  Synthetic construct
ARGQGATLRYGMDV

SEQ ID NO: 22121 - protein, 25 aa, Artificial Sequence
  Synthetic construct
ARTSRTLRYFDWSPQRRLYSYGMDV

SEQ ID NO: 22122 - protein, 14 aa, Artificial Sequence
  Synthetic construct
ARDRGSGWYGYFDN

SEQ ID NO: 22123 - protein, 13 aa, Artificial Sequence
  Synthetic construct
ARDPGGAGAWFDP

SEQ ID NO: 22124 - protein, 16 aa, Artificial Sequence
  Synthetic construct
ARRTRIYGDYAGAYDF

SEQ ID NO: 22125 - protein, 19 aa, Artificial Sequence
  Synthetic construct
ASAEEDFGVVEKYFYGMDV

SEQ ID NO: 22126 - protein, 11 aa, Artificial Sequence
  Synthetic construct
VRDVTLRGVIN

SEQ ID NO: 22127 - protein, 20 aa, Artificial Sequence
  Synthetic construct
ARETIWERYFDWLLSPFFDY

SEQ ID NO: 22128 - protein, 16 aa, Artificial Sequence
  Synthetic construct
AKDYYDSGSYLNAFDI

SEQ ID NO: 22129 - protein, 11 aa, Artificial Sequence
  Synthetic construct
AREGVNGSQDY

SEQ ID NO: 22130 - protein, 14 aa, Artificial Sequence
  Synthetic construct
ARSWGMDMAGNFDS

SEQ ID NO: 22131 - protein, 23 aa, Artificial Sequence
  Synthetic construct
ARVRGVGDFWSGYFFVSSTYFDS

SEQ ID NO: 22132 - protein, 13 aa, Artificial Sequence
  Synthetic construct
ARDRSGGYSYFDF

SEQ ID NO: 22133 - protein, 25 aa, Artificial Sequence
  Synthetic construct
ARDFGFTSSSWPGGENRYYYYGLDV

SEQ ID NO: 22134 - protein, 21 aa, Artificial Sequence
  Synthetic construct
SKDSGYYGLGSYFARNNYFDP

SEQ ID NO: 22135 - protein, 13 aa, Artificial Sequence
  Synthetic construct
AHRLVAVAGPFDF

SEQ ID NO: 22136 - protein, 24 aa, Artificial Sequence
  Synthetic construct
ARDPASHYDFWSGYVDFYQYGLDV

SEQ ID NO: 22137 - protein, 12 aa, Artificial Sequence
  Synthetic construct
ACGYSGYDYEAP

SEQ ID NO: 22138 - protein, 6 aa, Artificial Sequence
  Synthetic construct
ARGFEY

SEQ ID NO: 22139 - protein, 15 aa, Artificial Sequence
  Synthetic construct
VKDPSTVTSGEYFDY

SEQ ID NO: 22140 - protein, 16 aa, Artificial Sequence
  Synthetic construct
AREVTMIAEGIYYFDS

SEQ ID NO: 22141 - protein, 14 aa, Artificial Sequence
  Synthetic construct
ARGLGGSYYHGFDF

SEQ ID NO: 22142 - protein, 12 aa, Artificial Sequence
  Synthetic construct
ARDLVGWGWFDA

SEQ ID NO: 22143 - protein, 25 aa, Artificial Sequence
  Synthetic construct
AISPYDSSGYYVDDYSFPPYWDIDY

SEQ ID NO: 22144 - protein, 17 aa, Artificial Sequence
  Synthetic construct
ARDPTRPSNGDPDGFDI

SEQ ID NO: 22145 - protein, 11 aa, Artificial Sequence
  Synthetic construct
AKDGGTATFDS

SEQ ID NO: 22146 - protein, 20 aa, Artificial Sequence
  Synthetic construct
ATSSHDQWELHRGTTWYFDL

SEQ ID NO: 22147 - protein, 15 aa, Artificial Sequence
  Synthetic construct
AKEGMVGEAGRSLDY

SEQ ID NO: 22148 - protein, 23 aa, Artificial Sequence
  Synthetic construct
ARVRGVGDFWSGYFFVSSTYFDS

SEQ ID NO: 22149 - protein, 21 aa, Artificial Sequence
  Synthetic construct
AKDAFYYGSGSHFYYYYYMDV

SEQ ID NO: 22150 - protein, 19 aa, Artificial Sequence
  Synthetic construct
ARIAWAAAAGSGYYYYMDV

SEQ ID NO: 22151 - protein, 16 aa, Artificial Sequence
  Synthetic construct
ARSYDILTGYSDAFDI

SEQ ID NO: 22152 - protein, 16 aa, Artificial Sequence
  Synthetic construct
ARHFAFFGYVGSWFDP

SEQ ID NO: 22153 - protein, 18 aa, Artificial Sequence
  Synthetic construct
ARLNSGYDFYSYYYYMDV

SEQ ID NO: 22154 - protein, 14 aa, Artificial Sequence
  Synthetic construct
ARSSSGSYYGAFDI

SEQ ID NO: 22155 - protein, 14 aa, Artificial Sequence
  Synthetic construct
ARPRGGSYFDAFDI

SEQ ID NO: 22156 - protein, 11 aa, Artificial Sequence
  Synthetic construct
ARAINPYGMDV

SEQ ID NO: 22157 - protein, 17 aa, Artificial Sequence
  Synthetic construct
ARARNFWSGYYPDAFDI

SEQ ID NO: 22158 - protein, 15 aa, Artificial Sequence
  Synthetic construct
ATAGDRVATLYYFDY

SEQ ID NO: 22159 - protein, 17 aa, Artificial Sequence
  Synthetic construct
ARVGRRYSSGYDNGIDY

SEQ ID NO: 22160 - protein, 18 aa, Artificial Sequence
  Synthetic construct
TTATDIVLAVSADDAFDL

SEQ ID NO: 22161 - protein, 18 aa, Artificial Sequence
  Synthetic construct
ARLNSGYDFYYYYYYMDV

SEQ ID NO: 22162 - protein, 17 aa, Artificial Sequence
  Synthetic construct
ARDPTRPSNGDPDGFDI

SEQ ID NO: 22163 - protein, 17 aa, Artificial Sequence
  Synthetic construct
ATGRDTSSWHAAYYFDY

SEQ ID NO: 22164 - protein, 17 aa, Artificial Sequence
  Synthetic construct
ARGWRYYDSGSYSYFDY

SEQ ID NO: 22165 - protein, 13 aa, Artificial Sequence
  Synthetic construct
VRSRGGRTDAFDI

SEQ ID NO: 22166 - protein, 22 aa, Artificial Sequence
  Synthetic construct
ARDSFRGVGVTAMDYYFYGMDV

SEQ ID NO: 22167 - protein, 11 aa, Artificial Sequence
  Synthetic construct
ARAINPYGMDV

SEQ ID NO: 22168 - protein, 14 aa, Artificial Sequence
  Synthetic construct
ARSLGGNYFDAFDI

SEQ ID NO: 22169 - protein, 15 aa, Artificial Sequence
  Synthetic construct
ARDDGSSIHNYYMDV

SEQ ID NO: 22170 - protein, 16 aa, Artificial Sequence
  Synthetic construct
AGRFRGDYGDYLGFDI

SEQ ID NO: 22171 - protein, 12 aa, Artificial Sequence
  Synthetic construct
AATYYYLGSLDV

SEQ ID NO: 22172 - protein, 19 aa, Artificial Sequence
  Synthetic construct
AGQGRFFDSPYYYYYYMDV

SEQ ID NO: 22173 - protein, 14 aa, Artificial Sequence
  Synthetic construct
ARPYSGSYYSWFDP

SEQ ID NO: 22174 - protein, 19 aa, Artificial Sequence
  Synthetic construct
ARALSLARGIIFTHYYMDV

SEQ ID NO: 22175 - protein, 6 aa, Artificial Sequence
  Synthetic construct
ARGFDY

SEQ ID NO: 22176 - protein, 11 aa, Artificial Sequence
  Synthetic construct
SRHILPPRFDP

SEQ ID NO: 22177 - protein, 6 aa, Artificial Sequence
  Synthetic construct
ARGFDY

SEQ ID NO: 22178 - protein, 18 aa, Artificial Sequence
  Synthetic construct
ARGRTVSTFFLHSYDMDV

SEQ ID NO: 22179 - protein, 16 aa, Artificial Sequence
  Synthetic construct
ARDRGLTQLDENWFDP

SEQ ID NO: 22180 - protein, 13 aa, Artificial Sequence
  Synthetic construct
ARARSGGYDAFDI

SEQ ID NO: 22181 - protein, 14 aa, Artificial Sequence
  Synthetic construct
SRHTITVTGGALDV

SEQ ID NO: 22182 - protein, 14 aa, Artificial Sequence
  Synthetic construct
ARDYSGSYWGHFDY

SEQ ID NO: 22183 - protein, 19 aa, Artificial Sequence
  Synthetic construct
ARDPRYYYDSSGVSPFFDL

SEQ ID NO: 22184 - protein, 11 aa, Artificial Sequence
  Synthetic construct
ARDLSYLGMDV

SEQ ID NO: 22185 - protein, 13 aa, Artificial Sequence
  Synthetic construct
ARVFTTLDWYFDL

SEQ ID NO: 22186 - protein, 18 aa, Artificial Sequence
  Synthetic construct
ARLKYYYDSSGFYLYFDY

SEQ ID NO: 22187 - protein, 16 aa, Artificial Sequence
  Synthetic construct
AHTGSVPVAMVGAFDI

SEQ ID NO: 22188 - protein, 9 aa, Artificial Sequence
  Synthetic construct
AKGATKVDY

SEQ ID NO: 22189 - protein, 14 aa, Artificial Sequence
  Synthetic construct
ARGQGATLRYGMDV

SEQ ID NO: 22190 - protein, 14 aa, Artificial Sequence
  Synthetic construct
AKDIAATGPWYFDL

SEQ ID NO: 22191 - protein, 13 aa, Artificial Sequence
  Synthetic construct
ARGRGFGKYVMDV

SEQ ID NO: 22192 - protein, 22 aa, Artificial Sequence
  Synthetic construct
ARTGGWGSSLSFPYYHYYGMDV

SEQ ID NO: 22193 - protein, 16 aa, Artificial Sequence
  Synthetic construct
AHTGSVPIGMVGAFDI

SEQ ID NO: 22194 - protein, 17 aa, Artificial Sequence
  Synthetic construct
ARLRSAAMAWYYYHMDV

SEQ ID NO: 22195 - protein, 17 aa, Artificial Sequence
  Synthetic construct
ARVSSAPLDTSLGWFDP

SEQ ID NO: 22196 - protein, 12 aa, Artificial Sequence
  Synthetic construct
ATVDLVRGGPDY

SEQ ID NO: 22197 - protein, 17 aa, Artificial Sequence
  Synthetic construct
AKDQGWSQDSGLDGLDV

SEQ ID NO: 22198 - protein, 22 aa, Artificial Sequence
  Synthetic construct
AKDIGRYDHLGTFGRVGGAFDI

SEQ ID NO: 22199 - protein, 21 aa, Artificial Sequence
  Synthetic construct
AHRPRVVLWFGESYGPNWFDP

SEQ ID NO: 22200 - protein, 13 aa, Artificial Sequence
  Synthetic construct
AKDYYYNSSGVDV

SEQ ID NO: 22201 - protein, 12 aa, Artificial Sequence
  Synthetic construct
ARLHGNSWAMDV

SEQ ID NO: 22202 - protein, 10 aa, Artificial Sequence
  Synthetic construct
TRLYYYTVGT

SEQ ID NO: 22203 - protein, 16 aa, Artificial Sequence
  Synthetic construct
GRLRGKLLLFYYYMDV

SEQ ID NO: 22204 - protein, 14 aa, Artificial Sequence
  Synthetic construct
ARGPLGTYYHYMDV

SEQ ID NO: 22205 - protein, 19 aa, Artificial Sequence
  Synthetic construct
ARLQWRYCGSTSCPCGMDL

SEQ ID NO: 22206 - protein, 13 aa, Artificial Sequence
  Synthetic construct
ARDDVVAALKFDF

SEQ ID NO: 22207 - protein, 10 aa, Artificial Sequence
  Synthetic construct
ARDRGGPHDS

SEQ ID NO: 22208 - protein, 11 aa, Artificial Sequence
  Synthetic construct
ARLTTVTICDY

SEQ ID NO: 22209 - protein, 9 aa, Artificial Sequence
  Synthetic construct
ARVETIDSY

SEQ ID NO: 22210 - protein, 13 aa, Artificial Sequence
  Synthetic construct
AGYTTSSEGWFDP

SEQ ID NO: 22211 - protein, 10 aa, Artificial Sequence
  Synthetic construct
ARVMGGGPEF

SEQ ID NO: 22212 - protein, 22 aa, Artificial Sequence
  Synthetic construct
AKDIGRYDHYDTFGRVGGAFDI

SEQ ID NO: 22213 - protein, 15 aa, Artificial Sequence
  Synthetic construct
AKEALNIVVVTAPRF

SEQ ID NO: 22214 - protein, 16 aa, Artificial Sequence
  Synthetic construct
ARHYYGSGSNYAFFDY

SEQ ID NO: 22215 - protein, 22 aa, Artificial Sequence
  Synthetic construct
AKDIGRYDHYHTFGRVGGAFDI

SEQ ID NO: 22216 - protein, 15 aa, Artificial Sequence
  Synthetic construct
ARGCHDSSAYYCSDY

SEQ ID NO: 22217 - protein, 18 aa, Artificial Sequence
  Synthetic construct
ARVRVSPYYDHSLYGMDV

SEQ ID NO: 22218 - protein, 6 aa, Artificial Sequence
  Synthetic construct
ARGFDY

SEQ ID NO: 22219 - protein, 14 aa, Artificial Sequence
  Synthetic construct
ARDLRSRGSYYMDV

SEQ ID NO: 22220 - protein, 10 aa, Artificial Sequence
  Synthetic construct
ARDQGGYMGV

SEQ ID NO: 22221 - protein, 24 aa, Artificial Sequence
  Synthetic construct
ARAPRTSMLRGIIVTALEPLRFDY

SEQ ID NO: 22222 - protein, 14 aa, Artificial Sequence
  Synthetic construct
SHMNMVRGVMYFDY

SEQ ID NO: 22223 - protein, 17 aa, Artificial Sequence
  Synthetic construct
ARGGTNAYSSSWYYIEV

SEQ ID NO: 22224 - protein, 20 aa, Artificial Sequence
  Synthetic construct
ARDRGYFASGSEYYYSYMDV

SEQ ID NO: 22225 - protein, 18 aa, Artificial Sequence
  Synthetic construct
VRGTQDQLDNYFYYYMDV

SEQ ID NO: 22226 - protein, 13 aa, Artificial Sequence
  Synthetic construct
VRSRGGRTDTFDI

SEQ ID NO: 22227 - protein, 13 aa, Artificial Sequence
  Synthetic construct
VRDDVVGAFKFDY

SEQ ID NO: 22228 - protein, 24 aa, Artificial Sequence
  Synthetic construct
ARDPPALCSSPTCYMYYHNYGMDV

SEQ ID NO: 22229 - protein, 20 aa, Artificial Sequence
  Synthetic construct
ARDLGQLAGGYYYYYYGMDV

SEQ ID NO: 22230 - protein, 15 aa, Artificial Sequence
  Synthetic construct
AKDLGFGYDGGDFQH

SEQ ID NO: 22231 - protein, 19 aa, Artificial Sequence
  Synthetic construct
ARDFDEIAAAEYYYYYMDV

SEQ ID NO: 22232 - protein, 22 aa, Artificial Sequence
  Synthetic construct
ARAERDIVVVAGAIDYFYYMDV

SEQ ID NO: 22233 - protein, 9 aa, Artificial Sequence
  Synthetic construct
VKGVTPLRD

SEQ ID NO: 22234 - protein, 15 aa, Artificial Sequence
  Synthetic construct
ARDGDFSSSEPPFDY

SEQ ID NO: 22235 - protein, 21 aa, Artificial Sequence
  Synthetic construct
ASLGGDYYTSGTYSNSSGFDP

SEQ ID NO: 22236 - protein, 24 aa, Artificial Sequence
  Synthetic construct
ARDPPSYYDILTGYPLTPTYYFDY

SEQ ID NO: 22237 - protein, 24 aa, Artificial Sequence
  Synthetic construct
AKVVGGYCSGGRCYGGQWDDAFDM

SEQ ID NO: 22238 - protein, 16 aa, Artificial Sequence
  Synthetic construct
ARDGDALVVVAARLDY

SEQ ID NO: 22239 - protein, 14 aa, Artificial Sequence
  Synthetic construct
ARRGYDSGGYALGY

SEQ ID NO: 22240 - protein, 14 aa, Artificial Sequence
  Synthetic construct
ARAIVGPTPNWFDP

SEQ ID NO: 22241 - protein, 15 aa, Artificial Sequence
  Synthetic construct
ARGGIVPAAMDAFDI

SEQ ID NO: 22242 - protein, 16 aa, Artificial Sequence
  Synthetic construct
AREGIAVSGTGTALDY

SEQ ID NO: 22243 - protein, 16 aa, Artificial Sequence
  Synthetic construct
ARGSRIAAAGYNWFDP

SEQ ID NO: 22244 - protein, 15 aa, Artificial Sequence
  Synthetic construct
ERLDSYDSSGYYFDY

SEQ ID NO: 22245 - protein, 15 aa, Artificial Sequence
  Synthetic construct
ARDLYYVPHRGAFDI

SEQ ID NO: 22246 - protein, 14 aa, Artificial Sequence
  Synthetic construct
ARTDSGSYYGAFDI

SEQ ID NO: 22247 - protein, 14 aa, Artificial Sequence
  Synthetic construct
ARDGAVGDNTGLDC

SEQ ID NO: 22248 - protein, 18 aa, Artificial Sequence
  Synthetic construct
ARDGAPAYPSFTYYYMDV

SEQ ID NO: 22249 - protein, 14 aa, Artificial Sequence
  Synthetic construct
ARDGRVGEISGIDF

SEQ ID NO: 22250 - protein, 16 aa, Artificial Sequence
  Synthetic construct
ATEPIPLSNTEPYFDH

SEQ ID NO: 22251 - protein, 12 aa, Artificial Sequence
  Synthetic construct
ARLLIEHDAFDI

SEQ ID NO: 22252 - protein, 13 aa, Artificial Sequence
  Synthetic construct
ARVLGWDGVPGED

SEQ ID NO: 22253 - protein, 17 aa, Artificial Sequence
  Synthetic construct
ARHPLAAYYYGSGSLDY

SEQ ID NO: 22254 - protein, 8 aa, Artificial Sequence
  Synthetic construct
ATANWGDY

SEQ ID NO: 22255 - protein, 21 aa, Artificial Sequence
  Synthetic construct
ARFPPDTSGNFPHAFYYYMDV

SEQ ID NO: 22256 - protein, 12 aa, Artificial Sequence
  Synthetic construct
ARSPGATPYMDV

SEQ ID NO: 22257 - protein, 13 aa, Artificial Sequence
  Synthetic construct
ARVADVINWHFDL

SEQ ID NO: 22258 - protein, 22 aa, Artificial Sequence
  Synthetic construct
AKDIGRYDHYDTFGRVGGAFDI

SEQ ID NO: 22259 - protein, 14 aa, Artificial Sequence
  Synthetic construct
ARDYSGTYWGYFDY

SEQ ID NO: 22260 - protein, 8 aa, Artificial Sequence
  Synthetic construct
AKGGWLEY

SEQ ID NO: 22261 - protein, 14 aa, Artificial Sequence
  Synthetic construct
AKLSPTTAEDYFDY

SEQ ID NO: 22262 - protein, 14 aa, Artificial Sequence
  Synthetic construct
ARGLYGDYRTVFDY

SEQ ID NO: 22263 - protein, 16 aa, Artificial Sequence
  Synthetic construct
ARIDGTVVGKGDAFDM

SEQ ID NO: 22264 - protein, 15 aa, Artificial Sequence
  Synthetic construct
ARGDTSGWLPHILDI

SEQ ID NO: 22265 - protein, 22 aa, Artificial Sequence
  Synthetic construct
ATPRATYYYASGSYYYGGPFDY

SEQ ID NO: 22266 - protein, 16 aa, Artificial Sequence
  Synthetic construct
ARLEYQLLPDYSYMDV

SEQ ID NO: 22267 - protein, 14 aa, Artificial Sequence
  Synthetic construct
AREGRFGELSSLDY

SEQ ID NO: 22268 - protein, 18 aa, Artificial Sequence
  Synthetic construct
ARETLIVSTTGHYQNMDV

SEQ ID NO: 22269 - protein, 17 aa, Artificial Sequence
  Synthetic construct
AHTYYDILSAYNYAFDY

SEQ ID NO: 22270 - protein, 22 aa, Artificial Sequence
  Synthetic construct
ARDIADSKYSSGWYHYYYYMDV

SEQ ID NO: 22271 - protein, 16 aa, Artificial Sequence
  Synthetic construct
AKIDLYTTSGHNYFDT

SEQ ID NO: 22272 - protein, 16 aa, Artificial Sequence
  Synthetic construct
ATEPLTGWNDGYGMDV

SEQ ID NO: 22273 - protein, 21 aa, Artificial Sequence
  Synthetic construct
ARMQGYCSGGGCYSGYYGMDV

SEQ ID NO: 22274 - protein, 13 aa, Artificial Sequence
  Synthetic construct
AHGITGTTIYFHN

SEQ ID NO: 22275 - protein, 19 aa, Artificial Sequence
  Synthetic construct
ARDFDTMFRGGYYYYYMDV

SEQ ID NO: 22276 - protein, 12 aa, Artificial Sequence
  Synthetic construct
ARDRSSTGVFDI

SEQ ID NO: 22277 - protein, 25 aa, Artificial Sequence
  Synthetic construct
ARDGGLTEVVPAAMFGVNYYYYMDV

SEQ ID NO: 22278 - protein, 17 aa, Artificial Sequence
  Synthetic construct
ARGYDDSRDSLYHGMDV

SEQ ID NO: 22279 - protein, 13 aa, Artificial Sequence
  Synthetic construct
AHQNFYYYYYMDV

SEQ ID NO: 22280 - protein, 15 aa, Artificial Sequence
  Synthetic construct
ARDFVLLWFEGSHDY

SEQ ID NO: 22281 - protein, 21 aa, Artificial Sequence
  Synthetic construct
ARDRETSNPWGFYYYYYGMDV

SEQ ID NO: 22282 - protein, 18 aa, Artificial Sequence
  Synthetic construct
VKDGCSTSSCYSPGNFHH

SEQ ID NO: 22283 - protein, 15 aa, Artificial Sequence
  Synthetic construct
VKDRNPYDILSGLDY

SEQ ID NO: 22284 - protein, 23 aa, Artificial Sequence
  Synthetic construct
ARHVEAYGGYDSKSFYGDYVPAD

SEQ ID NO: 22285 - protein, 9 aa, Artificial Sequence
  Synthetic construct
AKGATKMDY

SEQ ID NO: 22286 - protein, 20 aa, Artificial Sequence
  Synthetic construct
ARMGGEHYDNSGYPADAFDI

SEQ ID NO: 22287 - protein, 20 aa, Artificial Sequence
  Synthetic construct
ARERLGPYQGNYYYYYFMDV

SEQ ID NO: 22288 - protein, 16 aa, Artificial Sequence
  Synthetic construct
AHSDYDIQNLPVFFDC

SEQ ID NO: 22289 - protein, 14 aa, Artificial Sequence
  Synthetic construct
ARAYGGGYWGAFDV

SEQ ID NO: 22290 - protein, 14 aa, Artificial Sequence
  Synthetic construct
ARGQGATLRYGMDV

SEQ ID NO: 22291 - protein, 20 aa, Artificial Sequence
  Synthetic construct
ARGGLSYYDSSGYYISAFDI

SEQ ID NO: 22292 - protein, 18 aa, Artificial Sequence
  Synthetic construct
ARHRAGWGGYASSSTFDY

SEQ ID NO: 22293 - protein, 11 aa, Artificial Sequence
  Synthetic construct
AHVGVATTFAF

SEQ ID NO: 22294 - protein, 17 aa, Artificial Sequence
  Synthetic construct
ATDTGPLQDQYYYYMDV

SEQ ID NO: 22295 - protein, 11 aa, Artificial Sequence
  Synthetic construct
ASQGGAGEAHH

SEQ ID NO: 22296 - protein, 12 aa, Artificial Sequence
  Synthetic construct
ATVTVMIQVFAD

SEQ ID NO: 22297 - protein, 11 aa, Artificial Sequence
  Synthetic construct
AKDIGDYQTDS

SEQ ID NO: 22298 - protein, 23 aa, Artificial Sequence
  Synthetic construct
ARHGFGGYSDYDYWVSAGNGMDV

SEQ ID NO: 22299 - protein, 15 aa, Artificial Sequence
  Synthetic construct
AKDLRGYYESCAADI

SEQ ID NO: 22300 - protein, 18 aa, Artificial Sequence
  Synthetic construct
ARDQQQLVWLGEGNWFDP

SEQ ID NO: 22301 - protein, 14 aa, Artificial Sequence
  Synthetic construct
ARALRGYFYYGMDV

SEQ ID NO: 22302 - protein, 23 aa, Artificial Sequence
  Synthetic construct
ARHVEAYGGYDSKSFYGDYVPAD

SEQ ID NO: 22303 - protein, 19 aa, Artificial Sequence
  Synthetic construct
ARDSLEWFFVHHYYYGMDV

SEQ ID NO: 22304 - protein, 22 aa, Artificial Sequence
  Synthetic construct
AKDIGRYDHYYIFGRVGGAFDI

SEQ ID NO: 22305 - protein, 16 aa, Artificial Sequence
  Synthetic construct
ATGLWFGDSETHWFDP

SEQ ID NO: 22306 - protein, 16 aa, Artificial Sequence
  Synthetic construct
AHRLRATSSGYGWFDP

SEQ ID NO: 22307 - protein, 13 aa, Artificial Sequence
  Synthetic construct
SSQRLYYYYGMDV

SEQ ID NO: 22308 - protein, 17 aa, Artificial Sequence
  Synthetic construct
ASPSYCSGGRCYRQFDY

SEQ ID NO: 22309 - protein, 12 aa, Artificial Sequence
  Synthetic construct
ARQLEVAGTIDL

SEQ ID NO: 22310 - protein, 21 aa, Artificial Sequence
  Synthetic construct
ARLLGSSSGGYWASYYYYMDV

SEQ ID NO: 22311 - protein, 13 aa, Artificial Sequence
  Synthetic construct
ATGGGNYYNAFHI

SEQ ID NO: 22312 - protein, 18 aa, Artificial Sequence
  Synthetic construct
ARLLLSSGWNSRGNWFDP

SEQ ID NO: 22313 - protein, 108 aa, Artificial Sequence
  Synthetic construct
SYELTQPPSVSVSPGQTARITCSADALPKQYAYWYQQKPGQAPVLIIYKDTERPSGIPERFSGSTSGTTVTLTISGVQAEDEADYYCQSADSSGTYPGFGGGTKLTVL

SEQ ID NO: 22314 - protein, 107 aa, Artificial Sequence
  Synthetic construct
EIVMTQSPATLSVSPGERATLSCRASQSVSSNLAWYQQKPGQAPRLLIYGASTRATGIPARFGGSGSGTEFTLTISSLQSEDFAVYYCQQYNNWPLTFGGGTKVEIK

SEQ ID NO: 22315 - protein, 106 aa, Artificial Sequence
  Synthetic construct
SYELTQSPSVSVSPGQTASITCSGDKLGDKFVCWYQQKPGQSPVVVIYQDTKRPSGIPERFSGSNSGNTATLTISGTQAMDEADYYCQAWGSSTAVFGTGTKVTVL

SEQ ID NO: 22316 - protein, 111 aa, Artificial Sequence
  Synthetic construct
QSALTQPASVSGSPGQSITISCTGTSSDVGSYNLVSWYQQHPGKAPKLMIYEGSKRPSGVSNRFSGSKSGNTASLTISGLQAEDEADYYCCSYAGSSTYWVFGGGTKLTVL

SEQ ID NO: 22317 - protein, 107 aa, Artificial Sequence
  Synthetic construct
SYELTQPPSVSVSPGQTASITCSGDKLGDKYTCWYQQKPGQSPVLVIYEDSKRPSGIPERFSGSNSGNTATLTISGTQAMDEADYYCQAWDISTGGVFGTGTKVTVL

SEQ ID NO: 22318 - protein, 108 aa, Artificial Sequence
  Synthetic construct
EIVLTQSPATLSLSPGDRATLSCRASQSVSTYLAWYQQKPGQAPRLLIYDASNRATGIPARFSGSGSGTDFILTISSLEPEDFAIYYCQRRSNWPPYTFGQGTKLESK

SEQ ID NO: 22319 - protein, 110 aa, Artificial Sequence
  Synthetic construct
QSVLTQPPSVSAAPGQKVTISCSGSTSNIGYNYVSWYQQLPGTAPKVLIYDNDKRPSGIPDRFSGSKSGTSATLGITGLQTGDEADYYCGTWDSSLSAGVFGGGTKLTVL

SEQ ID NO: 22320 - protein, 110 aa, Artificial Sequence
  Synthetic construct
QSALTQPPSVSGSPGQSVTISCTGTSSDVGSYNRVSWYQQPPGTAPKLMIYEVSNRPSGVPDRFSGSKSGNTASLTISGLQAEDEADYYCSSYTGSSTYVFGTGTKVTVL

SEQ ID NO: 22321 - protein, 110 aa, Artificial Sequence
  Synthetic construct
QSALTQPPSVSGSPGQSVTISCTGTSSDVGGYNRVSWFQQPPGTAPKLMFYEVSNRPSGVPDRFSGSKSGNTAALTISGLQAEDEADYYCSSYTSSSTLVFGTGTKVTVL

SEQ ID NO: 22322 - protein, 109 aa, Artificial Sequence
  Synthetic construct
SYVLTQPPSVSVAPGKTARITCGGNNIGSKSVHWYQQRPGQAPVLVIYYDSDRPSGIPERFSGSNSGNTATLTISRVEAGDEADYYCQVWDGSNDPPYVFGTGTKVTVL

SEQ ID NO: 22323 - protein, 112 aa, Artificial Sequence
  Synthetic construct
DIVMTQTPLSLSVTPGQPASISCKSSESLLHGDGKTYLYWYLQKPGQPPHLLMYEVSNRFSGVPDRFSGSGSGTDFTLTFSRVEAEDVGIYYCMQSIQLPYTFGQGTKLEIK

SEQ ID NO: 22324 - protein, 109 aa, Artificial Sequence
  Synthetic construct
EIVLTQSPATLSLSPGERATLSCRASQSVSSYLAWYQQKPGQAPSLLIYDASNRATGIPARFSGSGSGTDFTLTISSLEPEDFAVYYCQQRSNWPPRYTFGQGTKLEIK

SEQ ID NO: 22325 - protein, 106 aa, Artificial Sequence
  Synthetic construct
DIQMTQSPSTLSASVGDRVTITCRASQSISSWLAWYQQKPGKAPKLMIYKASSLESGVPSRFSGSGSGTEFTLTISSLQPDDFATYYCQQYNSYSTFGQGTKLEIK

SEQ ID NO: 22326 - protein, 107 aa, Artificial Sequence
  Synthetic construct
DIQMTQSPSSLAATVGDRVTITCRASQSISTYLNWFHQKPGKAPKLLIYAASTLQSGVPSRFSGSGSGTDFTLTISSLQPEDFATYYCQQSYSTPPTFGQGTKVEII

SEQ ID NO: 22327 - protein, 109 aa, Artificial Sequence
  Synthetic construct
EIVLTQSPATLSLSPGERATLSCRASQSVSSFVAWYQHKPGQAPRLLIYDASNRATGIPARFSGSGSGTDFTLTISSLEPEDFAVYYCHQRSNWPPIFTFGPGTKVDIK

SEQ ID NO: 22328 - protein, 107 aa, Artificial Sequence
  Synthetic construct
EIVLTQSPATLSLSPGERATLSCRASQSVSSYLAWYQQKPGQAPRLLIYDASNRATGIPARFSGSGSGTDFTLTISSLEPEDFAVYYCQQRSNWPWTFGQGTKVEIK

SEQ ID NO: 22329 - protein, 108 aa, Artificial Sequence
  Synthetic construct
QSALTQPASVSGSPGQSITISCTGTSSDVRNYNLVSWYQQHPGKAPKLMIFEDSKRPSGVSNRFSGSKSGNTASLTIAGLQPEDEADYYCCSYATTWVFGGGTKVTVL

SEQ ID NO: 22330 - protein, 106 aa, Artificial Sequence
  Synthetic construct
DIQMTQSPSSVSASVGDRVTITCRASQGISSWLAWYQQKPGKAPKLLIYAASSLQSGVPSRFSGSGSGTDFTLTISSLQPEDFATYYCQQANGFPLFGPGTKVDIK

SEQ ID NO: 22331 - protein, 107 aa, Artificial Sequence
  Synthetic construct
DIQMTQSPSSLSASVGDRVTITCQASQDISNYLNWYQQKPGKAPKLLIYDVSNLETGVPSRFSGSGSGTDFSFTISSLQPEDIATYYCQQYDNVPFTFGPGTKVDIK

SEQ ID NO: 22332 - protein, 110 aa, Artificial Sequence
  Synthetic construct
QSALTQPASVSGSPGQSISISCTGTSSDVGSYNLVSWYQQHPGKAPKLMIYEGTKRPSGVSNRFSGSKSGNTASLTISGLQAEDEADYHCCSYAGFSTYVFGIGTKVTVL

SEQ ID NO: 22333 - protein, 113 aa, Artificial Sequence; identical to SEQ ID NO: 2944
  Synthetic construct

SEQ ID NO: 22334 - protein, 106 aa, Artificial Sequence
  Synthetic construct
SYELTQPPSVSVSPGQTARITCSGDALPKTYAYWYQQKSGQAPVLVIYEDSKRPSGIPERFSGSSSGTMATLTISGAQVEDEADYYCYSTDSSEGVFGGGTKLTVL

SEQ ID NO: 22335 - protein, 107 aa, Artificial Sequence
  Synthetic construct
DIQLTQSPSFLSASVGDRVTITCRASQGISSYLAWYQQHPGKAPKLLIYTASTFQSGVPSRFSGSGSGTEFTLTISSLQPEDFATYYCQQLKSYPRTFGQGTKVEIK

SEQ ID NO: 22336 - protein, 108 aa, Artificial Sequence
  Synthetic construct
EIVLTQSPGTLSLSPGERATLSCRASQSVSSSYLGWYQQKPGQAPRLLLYGASSRATGVPDRFSGSGSGTDFTLTISRLEPEDFAVYYCQQYGSSPRTFGQGTKVEIK

SEQ ID NO: 22337 - protein, 110 aa, Artificial Sequence
  Synthetic construct
QSVLTQPPSASGTPGQRVSISCSGSSSNIGLNYVYWYQQLPGTAPKLLIYRNNQRPSGVPDRFSGSKSGTSASLAISGLRSEDEADYYCAAWDDSLSGEVFGGGTKLTVL

SEQ ID NO: 22338 - protein, 109 aa, Artificial Sequence
  Synthetic construct
QTVVTQEPSLTVSPGGTVTLTCASSTGAVTSGYHPNWFQQKPGQAPRTLIYSTSNKHSWTPARFSGSLLGDKAALTLSGVQPEDEAEYYCLLFYGGAWVFGGGTKLTVL

SEQ ID NO: 22339 - protein, 111 aa, Artificial Sequence
  Synthetic construct
QSVLTQPPSVSGAPGQRVTISCTGSSSNIGAGYDVHWYQQLPGTAPKLLIYGNSNRPSGVPDRFSGSTSGTSASLAISGLQAADEADYYCQSFDTSLSVYVFGTGTKVTVL

SEQ ID NO: 22340 - protein, 107 aa, Artificial Sequence
  Synthetic construct
QSALTQPASVSGSPGQSITISCTGTSSGYVSWYQHHPGKAPTLILYHVSNRPFGVSDRFSGSKSGNTASLTISGLRAEDEADYYCNSHAGTNTPHVIFGGGTKLTVL

SEQ ID NO: 22341 - protein, 108 aa, Artificial Sequence
  Synthetic construct
EIVMTQSPATLSVSPGERATLSCRASQSVSNNLAWYQQKPGQAPRLLIYGASTRATGIPARFSGSGSGTEFTLTISSLQSEDFAVYYCQQYTYWPPLTFGGGTKVEIK

SEQ ID NO: 22342 - protein, 107 aa, Artificial Sequence
  Synthetic construct
DIQMTQSPSSLSASVGDRVTITCRASQSISGYLNWYQQKPGEAPKLLIYAAFSLQSGVPSRFSGSGSGTDFTLTISSLQPEDFATYYCQQSYSPPFTFGPGTKVDIT

SEQ ID NO: 22343 - protein, 110 aa, Artificial Sequence
  Synthetic construct
QSALTQPASVSGSPGQSITISCTGTSSDVGDYNYVSWYQQHPGKAPKLVIYDVSNRPSGVSNRFSGSKSGNTASLTISGLQAEDEADYYCSSYTSSSTYVFGTGTKVTVL

SEQ ID NO: 22344 - protein, 107 aa, Artificial Sequence
  Synthetic construct
DIQMTQSPSSLSASVGDRVTITCRASQGIRNDLGWYQQKPGKAPKRLIYAASSLQSGVPSRFSGSGSGTEFTLTIRSLQPEDFATYYCLQYNSYPITFGPGTKVDIK

SEQ ID NO: 22345 - protein, 111 aa, Artificial Sequence
  Synthetic construct
QSVLTQPPSVSAAPGQKVTISCSGSSSNIGNNYVSWYQQLPGTAPKLLIYDNNKRPSGIPDRFSGSKTGTSATLGITGLQTGDEADYYCGTWDSSLSVGGVFGGGTKLTVL

SEQ ID NO: 22346 - protein, 107 aa, Artificial Sequence
  Synthetic construct
DIQMTQSPSTLSASVGDRVTITCRASQSISSWLAWYQQKPGKAPKLLIYKASSLESGVPSRFSGSGSGTEFTLTISSLQPDDFATYYCQQYNSYPFTFGGGTKVEIK

SEQ ID NO: 22347 - protein, 109 aa, Artificial Sequence
  Synthetic construct
QSVLTQPPSASGTPGQRVTISCSGSSSNIGGNTVNWYQHLPGTAPKLLIYSNNQRPSGVPDRFSGSKSGTSASLAISGLQSEDEADYYCAAWDDSLNGVFGGGTKLTVL

SEQ ID NO: 22348 - protein, 107 aa, Artificial Sequence
  Synthetic construct
DIQMTQSPSSLSASVGDRVTITCRASQGIANYVAWYQHKPGKAPKLLIYSASTLQSGAPSRFSGSGSGTDFTLTISSLQPEDVATYYCQKYYRVPLTFGGGTKVEIK

SEQ ID NO: 22349 - protein, 109 aa, Artificial Sequence; identical to SEQ ID NO: 3099
  Synthetic construct

SEQ ID NO: 22350 - protein, 109 aa, Artificial Sequence
  Synthetic construct
SYELTQPPSVSVSPGQTARITCSGDALPKKYAYWYQQKSGQAPVMVIYEDSRRPSGIPERFSGSSSGTMATLTISGAQVEDEADYYCYSTDSSSNPNYVFGTGTKVTVL

SEQ ID NO: 22351 - protein, 110 aa, Artificial Sequence
  Synthetic construct
QSVLTQPPSASGTPGQRVTISCSGSSSNIETNFVNWYQQPPGTAPHLLIYSNDQRPSGVPGRFSGSKSGTSASLAISGLQSEDEADYYCATWDDSLDGPVFGTGTKVTVL

SEQ ID NO: 22352 - protein, 107 aa, Artificial Sequence
  Synthetic construct
SYELTQPPSVSVSPGQTARITCSGDALPKKYAYWYQQKSGQAPVLVIYEDNKRPSGIPERFSGSSSGTMATLTISGAQVEDEADYYCYSTDSSGKGVFGGGTMLTVL

SEQ ID NO: 22353 - protein, 107 aa, Artificial Sequence
  Synthetic construct
DIQMTQSPSSLSASVGDRVTITCRASQSISSYLNWYQQKPGKAPKLLIYPASSLQSGVPSRFSGSGSGTDFTLTISSLQPEDFATYYCQQSYSISWTFGQGTKVEIK

SEQ ID NO: 22354 - protein, 107 aa, Artificial Sequence
  Synthetic construct
DIQMTQSPSTLSASVGDRVTITCRASQSISTWLAWYQQKPGKAPKLLIYKASSLESGVPSRFSGSGSGTEFTLTISSLQPDDFATYYCQQYNNYLYTFGQGTKLEIK

SEQ ID NO: 22355 - protein, 108 aa, Artificial Sequence; identical to SEQ ID NO: 2585
  Synthetic construct

SEQ ID NO: 22356 - protein, 108 aa, Artificial Sequence
  Synthetic construct
EVVLTQSPGTVSLSPGERAALSCRASQSISSYYLAWYQQKPGQAPRLLIYEASNRATGIPERFSGSGSGTDFTLTISRLEAEDFAVYYCHLHGGLPRTFGQGTKVEIK

SEQ ID NO: 22357 - protein, 110 aa, Artificial Sequence; identical to SEQ ID NO: 2975
  Synthetic construct

SEQ ID NO: 22358 - protein, 108 aa, Artificial Sequence
  Synthetic construct
QSALTQPASVSGSPGQSITISCTGTSSDVGSYDLVSWYQQHPGKAPKLMIYEGTKRPSGVSSRFSGSKSGNTASLTISGLQAEDEADYYCCSYAHTWVFGGGSQLTVL

SEQ ID NO: 22359 - protein, 105 aa, Artificial Sequence
  Synthetic construct
EIVLTQSPGTLSLSPGERATLSCRASQSVNSSYLAWYQQRPGQAPRLLIYGASSRATGIPHRFSGSGSGTDFTLTISRLEPEDFAVYYCQQYGSIFGGGTKVEIK

SEQ ID NO: 22360 - protein, 107 aa, Artificial Sequence; identical to SEQ ID NO: 2952
  Synthetic construct

SEQ ID NO: 22361 - protein, 110 aa, Artificial Sequence
  Synthetic construct
QSVLTQPPSVSAAPGQKVTISCSGSSSNIGTNYVSWYQQLPGTAPKLLIYDNNKRPSGIPDRFSGSKSGTSATLGITGLQTGDEADYYCGTWDSSLSAVVFGGGTKLTVL

SEQ ID NO: 22362 - protein, 112 aa, Artificial Sequence
  Synthetic construct
DIVMTQSPLSLPVTPGEPASISCRSSQSLLHINGYNYLDWYLQKPGQSPQLLIYLGSNRASGVPDRFSGSGSGTDFTLKISRVEAEDVGVYYCMQALQTPRTFGQGTKVEIK

SEQ ID NO: 22363 - protein, 108 aa, Artificial Sequence
  Synthetic construct
EIVLTQSPGTLSLSPGERATLSCGASQSVSSSYLAWYQQKPGQAPRLLIYGASSRATGIPDRFSGSGSGTDFTLTISRLEPEDFAVYYCQQYGNSRLTFGPGTKVDIK

SEQ ID NO: 22364 - protein, 112 aa, Artificial Sequence
  Synthetic construct
EIVMTQTPLSVSVTPGQPASISCKSSQSLLHSDGKTYLYWYLQKSGQPPQLLIYEVSNRFSGVPDRFSGSGSGTDFTLKISRVEAEDVGVYYCMQSIQLPLTFGGGTKVEIK

SEQ ID NO: 22365 - protein, 110 aa, Artificial Sequence
  Synthetic construct
QSALTQPPSASGSPGQSVTISCTGTSSDVGGYNYVSWYKQHPGKAPKLMIHEVSKRPSGVPDRFSGSKSGNTASLTVSGLQAEDEADYYCSSYAGSNNLVFGGGTKLTVL

SEQ ID NO: 22366 - protein, 108 aa, Artificial Sequence
  Synthetic construct
SYVLTQPPSVSVSPGQTARITCSADALPKQYAYWYQQKPGQAPVLVIYKDTERPSGIPERFSGSSSGTTVTLTISGVQAEDEADYYCQSADSSGPYWVFGTGTKVTVL

SEQ ID NO: 22367 - protein, 108 aa, Artificial Sequence
  Synthetic construct
SYELTQPPSVSVSPGQTARITCSGDALPKQYAYWYQQKPGQAPVLVIYKDSHRPSGIPERFSGSSSGTKVTLTISGVQAEDEADYYCQSVDSSGTYWVFGGGTELTVL

SEQ ID NO: 22368 - protein, 110 aa, Artificial Sequence
  Synthetic construct
QSALTQPASVSGSPGQSIAISCTGTSSDVGAYNYVSWYQQHPGKAPKLMIYDVSDRPSGVSHRFSGSKSGNTASLTISGLQAEDEADYYCSSFTSSSTVVFGGGSKLTVV

SEQ ID NO: 22369 - protein, 108 aa, Artificial Sequence
  Synthetic construct
QSALTQPASVSGSPGQSITISCTGTSSDVGNYNLVSWYQQSPGKVPKLIIYEGNKRPSGVSNRFSGSKSGNTASLTISGLQAEDEADYYCCSYAGSVLFGGGTKLTVL

SEQ ID NO: 22370 - protein, 111 aa, Artificial Sequence
  Synthetic construct
QSVLAQPPSVSGAPGQSVTISCTGSSSNIGAGYDVHWYQHLPGTAPKLLIYGNSNRHSGVPDRFSGSKSGTSASLVITGLRADDEADYYCQSYDFSLRGWVFGGGTEVTVL

SEQ ID NO: 22371 - protein, 112 aa, Artificial Sequence
  Synthetic construct
DVVMTQTPLSLSVTPGQPASISCKSSQSLLHGDGKTYLYWYLQRPGQPPQLLIYELSDRFSGVPDRFSGSGSGTDFTLKISRVEAEDVGVYYCMQSIQLPYTFGQGTKLEIK

SEQ ID NO: 22372 - protein, 110 aa, Artificial Sequence
  Synthetic construct
QSVLTQPPSVSAAPGQKVTISCSGSSSNIGNHYVSWYQQLPGTAPKLLIYDTNKRPSGIPDRFSGSKSGTSATLGITGLQTGDEADYYCGTWDSSLSAGVFGGGTKLTVL

SEQ ID NO: 22373 - protein, 108 aa, Artificial Sequence; identical to SEQ ID NO: 22358
  Synthetic construct

SEQ ID NO: 22374 - protein, 112 aa, Artificial Sequence
  Synthetic construct
QSVLTQPPSVSGAPGQRVTISCTGSSSNIGAGFDVHWYQQLPGTGPKLLIYGNNIRPSGVPDRFSGSKSGTSASLAISGLQAEDEADYYCQSYDSNLSVPYVFGTGTTVTVL

SEQ ID NO: 22375 - protein, 108 aa, Artificial Sequence
  Synthetic construct
SYELTQPPSVSVSPGQTARITCSGDALPKQYAYWYQQRPGQAPVLVIYKDSERPSGIPERFSASSSGTTVTLTISGVQAEDEADYYCQSAASSGTWVVFGGGTKLTVL

SEQ ID NO: 22376 - protein, 112 aa, Artificial Sequence; identical to SEQ ID NO: 3084
  Synthetic construct

SEQ ID NO: 22377 - protein, 109 aa, Artificial Sequence
  Synthetic construct
EIVLTQSPGTLSLSPGERATLSCRASQSVSNYLAWYQQKPGQAPRLLIYDASKRAPGVPARFRGSGSGPDFTLTISSLEPEDFAVYYCQQRTSRPPTWTFGQGTKVEIK

SEQ ID NO: 22378 - protein, 108 aa, Artificial Sequence
  Synthetic construct
SYELTQPPSVSVSPGQTARITCSGDALPKKYVYWFQQRSGQAPVLVIYEDNKRPSGIPAKFSGSSSGTVATLTISGAQVEDEADYYCHSTDGSGNLWVFGGGTKLTVL

SEQ ID NO: 22379 - protein, 108 aa, Artificial Sequence
  Synthetic construct
EIVLTQSPGTLSLSPGERATLSCRASQSVSSSYFAWYQQKPGQAPRLLIYGASSRATGIPDRFSGSGSGTDFTLTISRLEPEDFAVYYCQQYGSSPYTFGQGTKLEIK

SEQ ID NO: 22380 - protein, 108 aa, Artificial Sequence
  Synthetic construct
EIVLTQSPATLSLSPGERATLSCRASQSVSSYLAWYQQKPGQAPRLLIYDASNRATGIPVRFSGSGSGTDFTLTISSLEPEDFAVYYCQQRSDWPPFTFGPGTKVDIK

SEQ ID NO: 22381 - protein, 107 aa, Artificial Sequence
  Synthetic construct
DIQMTQSPSSLSASVGDRVTITCRASQSINNYLNWYQQKPGKAPKLLIYTASNLQSGVPSRFSGSGSGTDFTLTISSLQPEDFATYYCQQSYITLRTFGQGTKVEIK

SEQ ID NO: 22382 - protein, 108 aa, Artificial Sequence [sequence omitted]

SEQ ID NO: 22383 - protein, 108 aa, Artificial Sequence
  Synthetic construct
EIVMTQSPATLSVSPGERATLSCRASQSVSSYLAWYQQKPGQAPRLLIYGASTRATGIPARFSGSGSGTEFTLTISSLQSEDFAVYYCQQYNNWPPWTFGQGTKVDIK

SEQ ID NO: 22384 - protein, 113 aa, Artificial Sequence
  Synthetic construct
DIVMTQSPDSLAVSLGERATINCKSSQSVLYSSNNKNYLVWYQQKPGQPPKLLIYWASTRESGVPERFSGSGSGTDFTLTISGLQAEDVAVYYCQQHYSLPRTFGQGTKVEIK

SEQ ID NO: 22385 - protein, 108 aa, Artificial Sequence; identical to SEQ ID NO: 2967
  Synthetic construct

SEQ ID NO: 22386 - protein, 105 aa, Artificial Sequence
  Synthetic construct
SYELTQPLSVSVALGQTARITCGGNNIGSKNVHWYQQKPGQAPVLVIYRDSNRPSGIPERFSGSNSGNTATLTISRAQAGDEADYYCQVWDSSVVFGGGTKLTVL

SEQ ID NO: 22387 - protein, 110 aa, Artificial Sequence
  Synthetic construct
QSALTQPPSASGSPGQSVTISCTGTSSDVGGYNYVSWYLQHPGKAPKLMIHEVSKRPSGVPDRFSGSKSGNTASLTVSGLQAEDEADYYCSSYAGSNNLVFGGGTKLTVL

SEQ ID NO: 22388 - protein, 110 aa, Artificial Sequence
  Synthetic construct
QSVLTQPPSASGTPGQRVTISCSGSSSNIGSNHVYWYQQLPGTAPKLLIYRNNERPSGVPDRFSGSKSGTSASLAISGLRSEDEADYYCAAWDDSLSAWVFGGGTKLTVL

SEQ ID NO: 22389 - protein, 114 aa, Artificial Sequence
  Synthetic construct
DIVMTQSPDSLAVSLGERATINCKSSQSVLYSSNHKNYVAWYQQKPGQPPKLLIYWASTRESGVPDRFSGSGSGTDFTLTISSLQAEDVAVYYCQQYYSTPPWTFGQGTKVEIK

SEQ ID NO: 22390 - protein, 108 aa, Artificial Sequence
  Synthetic construct
EIVLTQSPATLSLSPGERATLSCRASQSISSFLAWYQQKPGQAPRLLIYDASNRATGSPARFSGSGSGTDFTLTISSLEPEDIAIYYCQQRGNWPPFTFGGGTKVEIK

SEQ ID NO: 22391 - protein, 110 aa, Artificial Sequence
  Synthetic construct
QSALTQPASVSGSPGQSITISCTGTSSDVGYYNYVSWYQHHPGKAPKLMICDVSDRPSGVSNRFSGSKSGNTASLTISGLQAEDEADYYCNSYTSSSTYVFGTGTKVTVL

SEQ ID NO: 22392 - protein, 109 aa, Artificial Sequence
  Synthetic construct
DIVLTQSPGTLSLSPGERATLSCRASQSVKNTSLVWYQHKPGQAPRLLIYGASSRATGIPDRFSSSGSGTDFTLTISGLEPEDFAVYYCQQYGSSPLFTFGPGTKVDIK

SEQ ID NO: 22393 - protein, 107 aa, Artificial Sequence
  Synthetic construct
DIQMTQSPSSVSASVGDRVTITCRASQGISSWLAWYQQKPGKAPKLLIYAASSLQSGVPSRFSGSGSGTDFTLTISSLQPEDFATYYCQQANSFPYTFGQGTKLEIK

SEQ ID NO: 22394 - protein, 108 aa, Artificial Sequence
  Synthetic construct
EIVLTQSPATLSLSPGERATLSCRASQSISTFLAWYQQKPGQAPRLLIYDASNRATGIPARFSGSGSGTDFTLTISSLEPEDFAVYYCQQRSNWPPFTFGGGTKVEIK

SEQ ID NO: 22395 - protein, 107 aa, Artificial Sequence
  Synthetic construct
SYELTQPPSVSVSPGQTARITCSGDALPKKYAYWYQQKSGQAPVLVIYEDSKRPSGIPERFSGSSSGTMATLTISGAQVEDEADYYCYSTDSSGKGVFGTGTKVTVL

SEQ ID NO: 22396 - protein, 110 aa, Artificial Sequence
  Synthetic construct
QSALTQPPSASGSPGQSVSISCIGSSSDIGGYNYVSWYQQHPGKAPRLIVYEVTKRPSGVPDRFSGSKSGNTASLTVSGLQTEDEATYHCSSYAGSNPVIFGGGTKLTVL

SEQ ID NO: 22397 - protein, 110 aa, Artificial Sequence
  Synthetic construct
QSALTQPASVSGSPGQSITISCTGSNSDIGSYDHVSWFQQHAGGAPKLMIFDVTNRPSGVSNRFSGSKSGNTASLTISGLQAEDEADYYCSSYTSSATRVFGSGTAVTVL

SEQ ID NO: 22398 - protein, 102 aa, Artificial Sequence
  Synthetic construct
DIQLTQSPSFLSASVGDRVTITCRASQGISSFLAWYQQKPGKAPKLLIYAASTLQSGVPSRFSGSGSGTEFTLTISSLQPEDFATYYCQQGTFGQGTKVEIK

SEQ ID NO: 22399 - protein, 109 aa, Artificial Sequence
  Synthetic construct
EIVVTQSPGTLSLSPGERATLSCRASQSVSSSYLAWYQQKPGQAPRLLIYGASSRATGIPDRFSGSGSGTDFTLTISRLEPEDFAVYYCQQYATSPGYTFGQGTKLEIK

SEQ ID NO: 22400 - protein, 112 aa, Artificial Sequence
  Synthetic construct
QLVVTQSPSASASLGASVKLTCTLSSGHSSYAIAWHQQQPEKGPRYLMKVNSDGSHIKGDGIPDRFSGSSSGAERYLTISSLQSEDEADYYCQTWDTGVLRMFGGGTKLTVL

SEQ ID NO: 22401 - protein, 113 aa, Artificial Sequence
  Synthetic construct
QSALTQPASVSGSPGQSISISCTGTSSDVGGYNFVSWYQQHPGKAPKLMIFDVSNRPSGVSNRFSGSKSGNTASLTISGLQAEDEADYYCSSYTSSITLGPYVFGTGTKVTVL

SEQ ID NO: 22402 - protein, 107 aa, Artificial Sequence
  Synthetic construct
SYELTQPPSVSVSPGQTARITCSGDALPNKYAYWYQQKSGQAPVLVIYEDTKRPSGIPERFSGSSSGTMATLTISGAQVEDEADFYCHSTDNSGNPLFGGGTKLTVL

SEQ ID NO: 22403 - protein, 110 aa, Artificial Sequence
  Synthetic construct
QSALTQPASVSGSPGQSITISCTGTSSDIGGYNYVSWYQQPPGKAPKLMIYDVSDRPSGVSNRFSGSKSGNTASLTISGLQAEDEADYYCSSYTSSSTVVFGGGTKLTVL

SEQ ID NO: 22404 - protein, 110 aa, Artificial Sequence
  Synthetic construct
QSVLTQPPSVSAAPGQKVTISCSGSSSNIGNNYVSWYQQLPGTAPKLLTYENNKRPSGIPDRFSGSKSGTSATLGITGLQTGDEADYYCGAWDSSLSVVVFGGGTKLTVL

SEQ ID NO: 22405 - protein, 108 aa, Artificial Sequence
  Synthetic construct
EIVMTQSPVTLSVSPGERATLSCRASQNVRSNLAWYQQKPGQVPRLLIHGASTRATDIPARFSGSGSGTEFTLTISSLQSDDFAIYYCQQYDDWPLITFGPGTRLEIK

SEQ ID NO: 22406 - protein, 109 aa, Artificial Sequence
  Synthetic construct
EIVLTQSPATLSLSPGERATLSCRASQSVSSFLAWYQQKPGQAPRLLIYDASNRATGIPARFSGSGSGTDFTLTISSLEPEDFAVYYCQQRSNWPPRVTFGPGTKVDIK

SEQ ID NO: 22407 - protein, 107 aa, Artificial Sequence; identical to SEQ ID NO: 2588
  Synthetic construct

SEQ ID NO: 22408 - protein, 108 aa, Artificial Sequence
  Synthetic construct
DIVLTQSPGTLSLSPGERASLSCRASQSVSSSYLAWYQQKPGQAPRLLIFGASSRATGIPDRFSGSGSGTDFTLTISRLEPEDFAVYYCQQYGSSRLIFGPGTKVDFK

SEQ ID NO: 22409 - protein, 106 aa, Artificial Sequence
  Synthetic construct
SYELTQPPSVSVSPGQTARITCSGDALPKKYAYWYQQKSGQAPVLVIYEDNKRPSGIPERLSGSSSGTMATLTISGAQVEDEADYYCYSTDNNGRVFGGGTKLTVL

SEQ ID NO: 22410 - protein, 109 aa, Artificial Sequence
  Synthetic construct
EIVLTQSPATLSLSPGERATLSCRASQSVSNFLAWYQQKPGQAPRLLIYDASNRATGIPARFSGTGSGTDFTLTISSLEPEDFAVYYCQQRANWPPRGTFGGGTKVEIK

SEQ ID NO: 22411 - protein, 110 aa, Artificial Sequence
  Synthetic construct
QSVLTQPPSVSAAPGQKVTISCSGSSSNIGNNYVSWYQQLPGTAPKLLIYENTKGPSGIPDRFSGSQSGTSATLGITGLQTGDEADYYCGTWDDSLSAWVFGGGTKLTVL

SEQ ID NO: 22412 - protein, 107 aa, Artificial Sequence
  Synthetic construct
ERVMTQSPATLSVSPGERATLSCRASQSVSSNLAWYQQKPGQAPRLLIYATSTRATGIPARFSGSGSGTEFTLTISSLQSEDFAVYYCQQYNNWPYTFGQGTKLEIK

SEQ ID NO: 22413 - protein, 105 aa, Artificial Sequence
  Synthetic construct
SYVLTQPPSVSVAPGKTARISCGGNSIGSKSVHWYQQKPGQAPVVVIYYDSDRPSGIPERFSGSNSGNTATLTISRVEAGDEADYYCQVWDSSVVFGGGTKLTVL

SEQ ID NO: 22414 - protein, 112 aa, Artificial Sequence
  Synthetic construct
DIVMTQTPLSLSVTPGQPASISCRSSQSLLHSDGKTYLYWYLQKPGQPPQLLIYELSDRFSGVPDRFSGSGSGTDFTLKISRVEAEDVGVYYCMQSIQLPYTFGQGTKLEIK

SEQ ID NO: 22415 - protein, 113 aa, Artificial Sequence
  Synthetic construct
DIVMTQSPDSLAVSLGERATINCKSSQNVLYSSNNKNYLAWYQQKPGQPPKLLIYWASTRESGVPDRFSGSGSGTDFTLTISSLQAEDVAVYYCQQYYSTPPTFGQGTKVELK

SEQ ID NO: 22416 - protein, 110 aa, Artificial Sequence; identical to SEQ ID NO: 10895
  Synthetic construct

SEQ ID NO: 22417 - protein, 112 aa, Artificial Sequence
  Synthetic construct
QSVLTQPPSVSAAPGQKVTISCSGSSSNIGNNYVSWYQQLPGTAPKLLIYDNNQRPSGIPDRFSGSKSGTSATLGITGLQTGDEADYYCGTWDSSLSAGNVLFGGGTKLTVL

SEQ ID NO: 22418 - protein, 107 aa, Artificial Sequence
  Synthetic construct
DIQMTQSPSSLSASVGDRVTITCRPSQSISDYLNWYQQKLGKAPKLLIYAASSLHSGVPSRFSGSGSGTDFTLTINSLQPEDFATYYCQQSFSTPYTFGQGTQLEIK

SEQ ID NO: 22419 - protein, 110 aa, Artificial Sequence
  Synthetic construct
QSALTQPASVSGSPGQSITISCTGTSSDVGSYNLVSWYQQHPGRAPKLMIYEGSKRPSGVSNRFSGSKSGNTASLTISGLQAEDEADYYCCTYAGSSTYVFGTGTKVTVL

SEQ ID NO: 22420 - protein, 109 aa, Artificial Sequence; identical to SEQ ID NO: 11553
  Synthetic construct

SEQ ID NO: 22421 - protein, 107 aa, Artificial Sequence
  Synthetic construct
DIQMTQSPSTLSVSIGDRVTISCRASQSISNWLAWYQQKPGKAPKLLIYKASILESRVPSRFSGSGSGTEFTLTITSLQPDDFATYYCQQYSRYSYSFGQGTKLELK

SEQ ID NO: 22422 - protein, 109 aa, Artificial Sequence
  Synthetic construct
EIVSTQSPGTLSLSPGDRATLSCRASQSVRNNYLAWYQQKPGQAPRLLIYGASSRATGIPDRFSGSGSGTDFTLTISRLEPEDFAVYYCQQYGSSPPWTFGQGTKVEIK

SEQ ID NO: 22423 - protein, 106 aa, Artificial Sequence; identical to SEQ ID NO: 11374
  Synthetic construct

SEQ ID NO: 22424 - protein, 109 aa, Artificial Sequence
  Synthetic construct
EIVMTQSPATLSVSPGERATLSCRASQSISSNLAWYQQKPGQAPRLLIYSASTRATGIPARFSGSGSGTEFTLTISSLQSEDFAVYYCQQYNNWPPAKTFGQGTKVEIK

SEQ ID NO: 22425 - protein, 110 aa, Artificial Sequence
  Synthetic construct
QSVLTQPPSVSAASGQKVTISCSGRTSNIGNNYVSWYQQFPGTAPKLLIYENNKRSSGIPDRFSGSKSGTSATLGITGLQTGDEADYYCGTWDSSLSAVVFGGGTKLTVL

SEQ ID NO: 22426 - protein, 108 aa, Artificial Sequence
  Synthetic construct
EIVLTQSPGTLSLSPGERATLSCRASQSVSSNYLAWYQQKPGQAPRLLIYGASSRATGIPDRFSGSGSGTDFTLIISKPEPEDFAVYYCQQYGSSPYTFGQGTKLEIK

SEQ ID NO: 22427 - protein, 113 aa, Artificial Sequence; identical to SEQ ID NO: 2944
  Synthetic construct

SEQ ID NO: 22428 - protein, 107 aa, Artificial Sequence; identical to SEQ ID NO: 11353
  Synthetic construct

SEQ ID NO: 22429 - protein, 112 aa, Artificial Sequence
  Synthetic construct
QSVLTQPPSASGTPGQRVTISCSGSTFNIGSNYVYWYQQLPGTAPKLLISRDNQRPSGVPDRFSGSKSGTSASLAISGLRSEDEAHYYCATWDESLSVAYVVFGGGTKLTVL

SEQ ID NO: 22430 - protein, 108 aa, Artificial Sequence
  Synthetic construct
EIVLTQSPGTLSLSPGEGATLSCRASQSVSSSCLAWYQQKPGQAPSLLISDSSSRATGIPDRFSGSGSGTDFTLTISRLEPEDFAVYYCQQYGSSPYTFGQGTKLEIK

SEQ ID NO: 22431 - protein, 113 aa, Artificial Sequence
  Synthetic construct
DVVVTQSPDSLAVSLGERASMHCKSSQSVLYSSSNNNYLAWYQQKPGQPPRLLIYWAFIRESGVPDRFSGSGSGTDFTLTISSLQAEDVAVYYCQQYYSPPFTFGQGTKLEIK

SEQ ID NO: 22432 - protein, 113 aa, Artificial Sequence; identical to SEQ ID NO: 2944
  Synthetic construct

SEQ ID NO: 22433 - protein, 108 aa, Artificial Sequence
  Synthetic construct
QSALTQPRSVSGSPGQSVTISCTGTSSDVGGNDFVSWYQQHPGKAPKLLIYVVDRRPSGVPDRFSASKSGNTASLTISGLQAEDEADYYCCSYVDAYLFGGGTKLTVL

SEQ ID NO: 22434 - protein, 105 aa, Artificial Sequence
  Synthetic construct
SYELTQPLSVSVALGQTARIICLGNNLGSQSVHWYQQKPGQAPVLVIYRDYNRPSGIPERFSGSNSGNTATLTISRAQAGDEADYYCQVWDSGVVFGGGTKLTVL

SEQ ID NO: 22435 - protein, 107 aa, Artificial Sequence
  Synthetic construct
EIVLTQSPGTLSLSPGERATLSCRASQSVSSSYLAWYQQKPGQAPRLLISGASSRATGIPDRFSGSGSGTDFTLTISRLEPEDFVVYYCQQSGTSWTFGQGTKVEIK

SEQ ID NO: 22436 - protein, 111 aa, Artificial Sequence
  Synthetic construct
HSDLTQPASVSGSPGQSITISCTGASSDVGGYNYVSWYQQHPGKAPKLMIYDVSNRPSGVSNRFSGSKSGNTASLTISGLQAEDEADYYCSSYTSSSTYVVFGGGTKLTVL

SEQ ID NO: 22437 - protein, 114 aa, Artificial Sequence
  Synthetic construct
QSAVTQPASVSGSPGQSITISCTGTSSDIGRYNLVSWYQHHPGKAPKFLIYEGSKRPSGVSDRFSGSKSGDTASLTISGLQAEDEADYYCYSYAGAGSGGSSWVFGGGTKLTVL

SEQ ID NO: 22438 - protein, 107 aa, Artificial Sequence
  Synthetic construct
DIQMTQSPSSVSASVGDTVTISCRASQGFSSWLAWYQQRPGKAPRLLIYAASSLQSGVPSRFSGSGSGTDFTLTISSLQPEDFATYYCQQTNSFPLTFGQGTKVEVK

SEQ ID NO: 22439 - protein, 108 aa, Artificial Sequence
  Synthetic construct
EIVLTQSPATLSLSPGERATLSCRASQSVSSYLAWYQQKPGQAPRLLIYDASSRATGIPARFSGSGSGTDFTLTISSLEPEDFAVYYCQRRSNWPPFTFGPGTKVDIK

SEQ ID NO: 22440 - protein, 111 aa, Artificial Sequence
  Synthetic construct
KFMLTQPHSVSESPGKTVTISCTGSSGSIASNYVQWYQQRPGSAPTTVIYEDNQRPSGVPNRFSGSIDSSSNSASLTISGLKTEDEADYYCQSYDSSNRGVFGGGTKLTVL

SEQ ID NO: 22441 - protein, 112 aa, Artificial Sequence
  Synthetic construct
DIMMTQTPLSLSVTPGQPASISCKSSQSLLDSDGKTYLYWYLQKPGQPPQLLIYEVSDRFSGVPDRFSGSGSATDFTLKISRVEAEDVGVYYCMQSIQLPRTFGQGTKLEIK

SEQ ID NO: 22442 - protein, 107 aa, Artificial Sequence
  Synthetic construct
DIQLTQSPSFLSASVGDRVTITCRASQGISSYLAWYQQKPGKVPKLLIYAASTLQSGVPLRFSGSGSGTEFTLTISSLQPEDFATYYCQQLNSYPQTFGQGTKVEIK

SEQ ID NO: 22443 - protein, 108 aa, Artificial Sequence
  Synthetic construct
EIVLTQSPGTLSLSPGERATLSCRASQSVGGTYLAWYQHKPGQAPRLLMYGASSRATGIPDRFSGSGAGTDFTLTISRLEPEDFAVYYCQQYTAAPRTFGQGTRLDIK

SEQ ID NO: 22444 - protein, 108 aa, Artificial Sequence
  Synthetic construct
EIVLTQSPATLSLSPGERATLSCRASQSVSTYLAWLQHKPGQAPRLLIYDASNRATGIPARFSGSGSGTDFTLTISSLEPEDFAVYYCQQRSNWPPFTFGPGTKVDIK

SEQ ID NO: 22445 - protein, 110 aa, Artificial Sequence
  Synthetic construct
QSVLTQPPSASGTPGQRVSISCSGSNSNIGSNAVNWYQQLPGTAPKLLIYRNNQRPSGVPDRFSGSKSGTSASLAISGLQSEDEADYYCAAWDDSLNGPVFGGGTKLTVL

SEQ ID NO: 22446 - protein, 109 aa, Artificial Sequence
  Synthetic construct
EIVLTQSPATLSLSPGERATLSCRASQSVSSYLAWYQQKCGQAPRLLIYDASNRATGIPGRFSGSGSGTDFTLTISSLEPEDFAVYYCQHRRNWPPTYTFGQGTKLEIK

SEQ ID NO: 22447 - protein, 107 aa, Artificial Sequence
  Synthetic construct
DIQMTQSPSSLSASVGDRVTITCRASQGISRYLNWYQLKPGKAPKLLIYAASSLQSAVPSRFSGSGSGTDFTLTVSSLQPEDFATYYCQQTYSSPLTFGGGTKVQIK

SEQ ID NO: 22448 - protein, 111 aa, Artificial Sequence
  Synthetic construct
QSALTQPASVSGSPGQTITISCTGTRSDVGGYNYVSWYQQHPGKAPKVVIYDVTNRPSGVSNRFSGSKSGNTASLTISGLQAEDEADYYCSSYTSSSSPWVFGGGTKVTVL

SEQ ID NO: 22449 - protein, 109 aa, Artificial Sequence
  Synthetic construct
SYELTQPPSVSVSPGQTARITCSGDALPKKYVYWYQQKSGQAPVLVIYEDSKRPSGIPERFSGSSSGTMATLTISGAQVDDEADYYCYSTDNSDNHRRVFGTGTKVTVL

SEQ ID NO: 22450 - protein, 110 aa, Artificial Sequence
  Synthetic construct
QSVLTQPPSASGTPGQRVTISCSGSSSNIESNFVNWYQQLPGTAPHLLIYSNDQRPSGVPDRFSGSKSGTSASLAISGLQSEDEADYYCAAWDDSLDGPVFGTGTKVTVL

SEQ ID NO: 22451 - protein, 108 aa, Artificial Sequence
  Synthetic construct
EIVLTQSPGTLSLSPGERATLSCRASQIISSSYLAWYQQKPGQAPRLLIYGASSRATGIPDRFSGSGSGTDFTLTISRLEPEDFAVYYCQQYGSSLFTFGPGTKVDIK

SEQ ID NO: 22452 - protein, 111 aa, Artificial Sequence
  Synthetic construct
DVVMTQTPLSLSVTPGQPASISCKSSQSLLHSDGRTYMYWYLQKPGQPPQLLIYEVSNRFSGVPDRFSGSGSGTDFTLKISRVEAEDVGVYYCMQVIQPYTFGQGTKLEIK

SEQ ID NO: 22453 - protein, 111 aa, Artificial Sequence
  Synthetic construct
QSVLTQPPSVSGAPGQRVTISCTGSSSSIGAGYDVHWYQQLPGRAPKLLIHGNSNRPSGVPDRFSASRSGTSASLAITGLQTEDEADYYCQSYDSSLSGSVFGGGTKLTVL

SEQ ID NO: 22454 - protein, 106 aa, Artificial Sequence
  Synthetic construct
SYELTQPPSVSVSPGQTASITCSGDKLGDKFACWYQQKPGQSPVLVIYEDTKRPSGIPERFSGSNSGNTATLTISGTQAMDEADYYCQAWDSSTAVFGTGTKVTVL

SEQ ID NO: 22455 - protein, 107 aa, Artificial Sequence
  Synthetic construct
DIQMTQSPSSLSASIGDRVTITCRASQSIATYLNWYQRKPGKAPKLLIYTASSLQSGVPSRFSGSGSGTDFTLTISSLQPEDFATYYCQQSYSTPWTFGQGTKVEIK

SEQ ID NO: 22456 - protein, 108 aa, Artificial Sequence
  Synthetic construct
SYELTQPPSVSVSPGQTARITCSGDALPKKYAYWYQQKSGQAPVLLISEDTKRPSGIPERFSGSSSGTMATLTISGAQVEDEADYYCYSTDYTGNSGVFGGGTKLTVL

SEQ ID NO: 22457 - protein, 109 aa, Artificial Sequence; identical to SEQ ID NO: 10990
  Synthetic construct

SEQ ID NO: 22458 - protein, 109 aa, Artificial Sequence
  Synthetic construct
SYELTQPPSVSVSPGQTARITCSGDALPKTYAYWYQQKSGQAPVLVIYEDSKRPSGIPERFSGSSSGTMATLTISGAQVEDEADYYCYSTDSSDNHKGVFGGGTKLTVL

SEQ ID NO: 22459 - protein, 107 aa, Artificial Sequence
  Synthetic construct
EIVMTQSPATLSVSPGERATLSCRASQSVSSNLAWYQQKPGQAPRLLIYGASTRATGIPARFSGSGSGSEFTLTISSLQSEDFSVYYCQQYNNWPLTFGGGTKVEIK

SEQ ID NO: 22460 - protein, 107 aa, Artificial Sequence
  Synthetic construct
DIQMTQSPSSLSASVGDRVTITCRASQGIRNDLGWYQQKPGKAPKRLIYAASSLQSGVPSRFSGSGSGTESTLTISSLQPEDFATYYCLQYNSYPLTFGGGTKVEIK

SEQ ID NO: 22461 - protein, 108 aa, Artificial Sequence; identical to SEQ ID NO: 10978
  Synthetic construct

SEQ ID NO: 22462 - protein, 113 aa, Artificial Sequence
  Synthetic construct
DIVMTQSPDSLAVSLGERATINCKSSQSILYSPNNKSYLAWYQQKPGQPPNLLIYWASTRESGVPDRFNGSGSGTDFTLTISSLQAEDVAVYYCQQYYNSPRTFGQGTKLEIK

SEQ ID NO: 22463 - protein, 108 aa, Artificial Sequence
  Synthetic construct
SYELTQPPSVSVSPGQTARITCSGDALPKKYAYWYQQKSGQAPVLVIYEDTKRPSGIPATFSGSSSGTMATLTISGAQVEDEADYYCYSTDSSGNLCVFGGGTKLTVL

SEQ ID NO: 22464 - protein, 104 aa, Artificial Sequence
  Synthetic construct
EIVLTQSPGTLSLSPGERATLSCRASQSVSSSFLAWYQQKPGQAPRLLIYGASSRATGIPDRFSGSGSGTDFTLTISRLEPEDFAVYYCQQFLTFGGGTKVEIK

SEQ ID NO: 22465 - protein, 110 aa, Artificial Sequence; identical to SEQ ID NO: 2545
  Synthetic construct

SEQ ID NO: 22466 - protein, 106 aa, Artificial Sequence
  Synthetic construct
DIQMTQSPSSLSASVGDRLTITCRASQSISSYLHWYQQKPGKAPKLLIYAASNLQSGVPSRFSGSGSGTDFTLTISTLQPEDFATYYCQQTSSNITFGQGTRLEIK

SEQ ID NO: 22467 - protein, 107 aa, Artificial Sequence
  Synthetic construct
EIVLTQSPGTLSLSPGERATLSCRASQSVSSSYLAWYQQKPGQAPRLLIYGASSRATGIPDRFSGSGSGTDFTLTISRLEPEDFAVYYCQQYGSSPFFGGGTKVEIK

SEQ ID NO: 22468 - protein, 107 aa, Artificial Sequence
  Synthetic construct
DIQMTQSPSSLSASIGDRVTITCRASQGIRNDLGWYQQKPGKAPKRLIYAASSLQSGVPSRFSGSGSGTEFTLTISSLQPEDFATYYCLQHNSYPLTFGGGTKVEIK

SEQ ID NO: 22469 - protein, 106 aa, Artificial Sequence
  Synthetic construct
DIQMTQSPSSLSASVGDRVTITCRASQSIGNYLNWYQQKPGKAPKLIFAASSLQSGVPSRFSGGGSGTDFTLTISSLQPEDFATYYCQQSYSTPYTFGQGTKLEIK

SEQ ID NO: 22470 - protein, 108 aa, Artificial Sequence
  Synthetic construct
SHELTQPPSVSVSPGQTARITCSGDALPKKYAYWYQQKSGQAPVLVIYEDSKRPSGIPERFSGSSSGTMATLTISGAQVEDEADYYCYSTDSSGYHRVFGGGTTLAVL

SEQ ID NO: 22471 - protein, 112 aa, Artificial Sequence
  Synthetic construct
QSALTQPASVSGSPGQSITISCTGTSSDVGAYDYVSWYQQHPGKAPKLMIYDVNSRPSGVSHRFSGSKSGNTASLTISGLLPEDEADYYCSSYTSSSTLLYVFGTGTKVAVL

SEQ ID NO: 22472 - protein, 108 aa, Artificial Sequence
  Synthetic construct
EVVLTQSPATLSLSPGERATLSCRASQSVSSYLAWYQQKPGQAPRLLISYASNRATGIPARFSGSGSGTDFTLTISSLEPEDFAVYYCQERSSWPQITFGQGTRLEIK

SEQ ID NO: 22473 - protein, 107 aa, Artificial Sequence
  Synthetic construct
EIVLTQSPGTLSLSPGERATLSCRASQSVSSSYLAWYQQIPGQAPRLLIYGASSRATGIPDRFSGSGSGTDFTLTISRLEPEDFAVYYCQRYGGSPLFGGGTKVEIK

SEQ ID NO: 22474 - protein, 111 aa, Artificial Sequence
  Synthetic construct
QSVLTQPPSVSGAPGQRVTISCTGSNSNIGAGYDVHWYQQLPGTAPKLLIYGNTNRPSGVPDRFSGSRSDTSASLAITGLQAEDEADYYCQSYDSSLIEGVFGTGTKVTVL

SEQ ID NO: 22475 - protein, 112 aa, Artificial Sequence
  Synthetic construct
QSVLTQPPSVSGAPGQRVTISCTGSSSNIGAGYDVHWYQQLPGTAPKLLIYGNSNRPSGVPDRFSGSKSGTSASLAISGLQAEDEADYYCQSYDSSLSGSSVFGTGTKVTVL

SEQ ID NO: 22476 - protein, 106 aa, Artificial Sequence
  Synthetic construct
SYELTQPPSVSVSPGQTASITCSGDKLGDKSVSWYQQKPGQSPVLVIYQDTKRPSGIPERFSGSNSGNTATLTISGTQAMDEADYYCQAWDSNTYVFGTGTEVTVL

SEQ ID NO: 22477 - protein, 107 aa, Artificial Sequence
  Synthetic construct
DIQMTQSPSSLSASVGDRVTITCRASQSISSYLNWYQQKPGKAPKLLIYGTSSLQSGVPSRFSGSGSGTDFTLTISSLQPEDFATYYCQQSYSTPVTFGQGTKLEIK

SEQ ID NO: 22478 - protein, 113 aa, Artificial Sequence
  Synthetic construct
DIVMTQSPDSLAVSLGERATINCKSSQSVLYSSNNKNYLAWYQQKPGQPPRLLIYWASTRESWVPDRFSGSGSGTDFTLTISSLQAEDVAVYYCQQYYRTPYTFGQGTKLEIK

SEQ ID NO: 22479 - protein, 110 aa, Artificial Sequence; identical to SEQ ID NO: 2975
  Synthetic construct

SEQ ID NO: 22480 - protein, 107 aa, Artificial Sequence
  Synthetic construct
DIQMTQSPSTLSASVGDRVTITCRASQSISMWLAWYQQKPGKAPKLLIYKASNLESGVPSRFSGSGSGTEFTLTISSLQPDDFATYYCQQYNSYSYTFGQGTKLEIK

SEQ ID NO: 22481 - protein, 106 aa, Artificial Sequence
  Synthetic construct
SYELTQPPSVSVSPGQTVSITCSGDKLGEKYACWYQQKPGQSPVLVIYQDNKRPSGIPERFSGSNSGNTATLTISGTQAMDEADYYCQAWDSSTAVFGGGTKLTVL

SEQ ID NO: 22482 - protein, 109 aa, Artificial Sequence
  Synthetic construct
QTVVTQEPSLTVSPGGTVTLTCASTTGTVTSGHYTNWFQQRRGQAPRALIYGTNNRYSWTPARFSGSLLGGQATLTLSAVQPEDEADYYCLLYYGDAWVFGGGTKLTVL

SEQ ID NO: 22483 - protein, 106 aa, Artificial Sequence
  Synthetic construct
SYELTQPPSVSVSPGQTASITCSGDKLGDKYACWYQQKPGQSPVLVIYQDSKRPSRIPERFSGSNSGNTATLTISGTQAMDEADYYCQAWDSSNVVFGGGTKLTVL

SEQ ID NO: 22484 - protein, 108 aa, Artificial Sequence; identical to SEQ ID NO: 11433
  Synthetic construct

SEQ ID NO: 22485 - protein, 106 aa, Artificial Sequence
  Synthetic construct
DIQMTQSPSSLSASVGDRVTISCQTSQDISVSLNWYQQKPGKPPKVLIYDASNLEAGAPSRFSGSGSGTDFTFTISSLQPEDIATYYCQHYDNLPRFGPGTKVDIK

SEQ ID NO: 22486 - protein, 109 aa, Artificial Sequence
  Synthetic construct
QTVVTQEPSLTVSPGGTVTLTCASSTGAVTSGYYPNWFQQKPGQAPRALIYSTTNKHSWTPARFSGSLLGGKAALTLSGVQPEDEAEYYCLLYYGGPWVFGGGTKLTVL

SEQ ID NO: 22487 - protein, 107 aa, Artificial Sequence
  Synthetic construct
EIVLTQSPATLSLSPGERATLSCRASQSVSSYLAWYQQKPGQAPRLLIYDASNRATGIPARFSGGGSGTDFTLTISSLEPEDFAVYYCQQRSISALTFGGGTKVEIK

SEQ ID NO: 22488 - protein, 111 aa, Artificial Sequence
  Synthetic construct
DIVMTQSPLSLPVTPGEPASISCRSSQSLLHSNGYNYLDWYLQKPGQSPQLLIYLGSNRASGVPDRFSGSGSGTDFTLKISRVEAEDVGVYYCMQALQTSGFGQGTRLEIK

SEQ ID NO: 22489 - protein, 110 aa, Artificial Sequence
  Synthetic construct
QSVLTQPPSVSAAPGQKVTISCSGSSSNIGNNYVSWYQQLPGTAPKLLIYENNKGPSGIPDRFSGSKSGTSATLGITGLQTGDEADYYCGTWDSSLSAWVFGGGTKLTVL

SEQ ID NO: 22490 - protein, 107 aa, Artificial Sequence
  Synthetic construct
EIVMTQSPATLSVSPGERATLSCRASQSVSSNLAWYQQKPGQAPRLLIYGASTRATGFPARFSGSGSGTEFTLTISSLQSEDFAVYYCQQYNNWLRTFGQGTKVEIK

SEQ ID NO: 22491 - protein, 108 aa, Artificial Sequence
  Synthetic construct
SSELTQDPAVSVALGQTVRITCQGDSLRSFYASWYHQKPGQAPVLVIYGKNNRPSGIPDRFSGSSSGNTASLTITGAQAEDEADYYCNSRDSSGDHLVFGGGTKLTVL

SEQ ID NO: 22492 - protein, 106 aa, Artificial Sequence; identical to SEQ ID NO: 11154
  Synthetic construct

SEQ ID NO: 22493 - protein, 110 aa, Artificial Sequence
  Synthetic construct
QSALSQPASVSGSPGQSITISCTGTSSDVGGYNYVSWYQHHPGKAPKLIIYDVTYRPSGISDRFSGSKSGNTASLTISGLQAEDEADYYCSSYTSSSTQVFGTATRVTVL

SEQ ID NO: 22494 - protein, 109 aa, Artificial Sequence
  Synthetic construct
EIVLTQSPGTLSLPPGERATLSCRASQSVSSTYLAWYQQKPGQAPRLLIYGASSRASGVPDRFSGSGSGTDFTLSIGRLEPEDFAVYYCQQYGSSPPYTFGQGTKLEIK

SEQ ID NO: 22495 - protein, 109 aa, Artificial Sequence
  Synthetic construct
QSALTQPPSASGSPGQSVTISCTGTSSDVGGYNYVSWYQQHPGKAPKLMIYEVSKRPSGVPDRFSGSKSGNTASLTVSGLQAEDEAYYYCSSYVGSNNLFGGGTKLTVL

SEQ ID NO: 22496 - protein, 107 aa, Artificial Sequence
  Synthetic construct
DIQMTQSPSSVSASVGDRVTITCRASQGINRWLAWYQQKPEKAPKLLIYDASSLQSGVPSRFSGSGSGTDFTLTISSLQPEDFATYYCQQAHTFPPTFGGGTKVEIK

SEQ ID NO: 22497 - protein, 111 aa, Artificial Sequence
  Synthetic construct
QSVLTQPPSVSGAPGQRVTISCTGSSSNIGAGYHVHWYQQLPGTAPKLLIYGNNNRPSGVPDRFSGSKSGTSASLAIAGLQAEDEADYYCQSYDSSLSGYVFGTGTKVNVL

SEQ ID NO: 22498 - protein, 113 aa, Artificial Sequence
  Synthetic construct
DIVMTQSPDSLAVSLGERATINCKSSQSVLYSSKNRNYLAWYQQKPGQPPKMLIYWASTRESGVPDRFSGSGSGTDFTLTISSLQAEDVAVYYCQQYYSPPRTFGQGTKVEIK

SEQ ID NO: 22499 - protein, 107 aa, Artificial Sequence
  Synthetic construct
DIQMTQSPSTLSASVGDRVTITCRASQSISSWLAWYQQKAGKAPKLLIYQASSLESGVPSRFSGSGSGTEFTLTISSLQPDDFATYYCQQYNSYPITFGQGTRLEIK

SEQ ID NO: 22500 - protein, 110 aa, Artificial Sequence
  Synthetic construct
QSVLTQPPSASGTPGQRVTISCSGSSSNIGSNNVYWYQQLPGTAPKLLIYTNSQRPSGVPDRFSDSKSGTSASLAISGLRSEDEADYYCAVWDESLSGSVFGGGTKLTVL

SEQ ID NO: 22501 - protein, 110 aa, Artificial Sequence
  Synthetic construct
QSALTQPASVSGSPGQSITISCSGTSSDVGGYNYVSWYQQHPGKAPKLMIYDVNNRPSGISNRFSGSKSGNMASLTISGLQAEDEADYYCSSYTSTSTLVFGGGTKLTVL

SEQ ID NO: 22502 - protein, 108 aa, Artificial Sequence
  Synthetic construct
EIVLTQSPGTLSLSPGERATLSCRASQSVSSSYLAWYQQKPGQAPRLLIYGASNRATDIPDRFSGSGSGTDFTLTISRLEPEDFAVYYCQQYGSSPFTFGPGTKVDIT

SEQ ID NO: 22503 - protein, 112 aa, Artificial Sequence
  Synthetic construct
QSVLTQPPSVSGAPGQRVTISCTGSSSNIGAGYDVHWYQQLPGTAPKLLIYGNSNRPSGVPDRFSGSKSGTSASLAITGLQAEDEADYYCQSFDSSLDGPVLFGGGTKLTVL

SEQ ID NO: 22504 - protein, 110 aa, Artificial Sequence
  Synthetic construct
QSILTQSPSVSGTPGQGVTISCSGSRSDIGSHAVNWYQQVPGTAPKLVIYNTNQRPSGVPDRFSGSKSGASASLAITGLQSEDEADYYCTAWDDSVDGWVFGGGTKLTVL

SEQ ID NO: 22505 - protein, 108 aa, Artificial Sequence
  Synthetic construct
EIVLTQSPGTLSLSPGERATLSCRASQSLTSIYLGWYQQKPGQAPRLLIYATSSRATGIPDRFSGSGSGTDFTLTINRLEPEDFAVYYCQQYGNSPWTFGQGTKVEIK

SEQ ID NO: 22506 - protein, 106 aa, Artificial Sequence
  Synthetic construct
DIQMTQSPSSLSASVGDTVTITCRTSQNINIYLNWYQQKPGKAPKLLIYAASTLQDGVPSRFSGSGSGTDFTFTISSLQPEDFATFYCQQGYSTPTFGQGTKVESK

SEQ ID NO: 22507 - protein, 110 aa, Artificial Sequence
  Synthetic construct
QSMLTQPPSTSGTPGQRVTIFCSGSNSNIGSNTVDWYQLLPGTAPKLLIYSNYERPSGVPDRFSGSKSGTSASLAISGLQSEDEADYYCAAWDDSLNGPVFGTGTKVTVL

SEQ ID NO: 22508 - protein, 112 aa, Artificial Sequence
  Synthetic construct
DIVMTQTPLSLSVTPGQPASISCKSSQSLLHSDGKTYLFWYLQKPGQPPQLLIYEVFDRFSGVPDRFSGSGSGTDFTLQISRVEAEDVGVYYCMQSIELPYTFGRGTKLEIK

SEQ ID NO: 22509 - protein, 108 aa, Artificial Sequence
  Synthetic construct
EIVMTQSPATLSVSPGERATLSCRASQSVSSNLAWYQHKPGQAPRLLIHGASTRATGIPARFSGSGSGTEFTLTISSLQSEDFAVYYCQQYNNWPLWTFGQGTKVEIK

SEQ ID NO: 22510 - protein, 109 aa, Artificial Sequence
  Synthetic construct
SYELTQPPSVSVSPGQTARITCSGDALPKKYAYWYQQKSGQAPILIIYEDSRRPSGIPGRFSGSSSGTMATLTISGAQVEDEADYYCYSTDNTADPGGVFGGGTKLTVL

SEQ ID NO: 22511 - protein, 116 aa, Artificial Sequence
  Synthetic construct
QSALTQPASVSASPGQSITISCTGTSSDIGGYSYVSWYQHHPGKAPKLMIYDVNNRPSGVSSRFSGSKSGNTASLTISGLQAEDEADYYCSSYTTIITGVFGGGIVFGGGTKLTVL

SEQ ID NO: 22512 - protein, 111 aa, Artificial Sequence
  Synthetic construct
DIVMTQTPLSLSVTPGQPASISCKSSQSLLDSDGKTYLYWYLQKPGQPPQLLIYEVSDRFSGVPDRFSGSGSGTDFTLKISRVEAEDVGVYYCMQTIQPLTFGPGTKVDIK

SEQ ID NO: 22513 - protein, 107 aa, Artificial Sequence
  Synthetic construct
DIQMTQSPSSLSTSVGDRITITCRASQSIRTYLNWYQQKPGEAPRLLISSTSTLQSGLPSRFSGSGSDTEFTLTISSLQPEDFATYYCQQSYGTPLTFGGGTKVEIK

SEQ ID NO: 22514 - protein, 112 aa, Artificial Sequence
  Synthetic construct
DTVMTQTPLSSPVTLGQPASISCRASQSLLKSDGNTYLSWLQQRPGQPPRLLIYKISNRFSGVPDRFSGSGAGTDFTLKISRVEAEDVGVYYCMQATHFPLTFGGGTKVEIK

SEQ ID NO: 22515 - protein, 110 aa, Artificial Sequence
  Synthetic construct
QSALTQPASVSGSPGQSITISCTGTSSDVGSYNLVSWYQQHPGKAPKLMIYEASKRPSGVSTRFSGSKSGNTASLTISGLRAEDEADYHCCSYAGFSTWVFGGGTKLTVL

SEQ ID NO: 22516 - protein, 107 aa, Artificial Sequence
  Synthetic construct
DIQMTQSPSSLSASVGDRVTITCRASQGISNYLAWFQQKPGEAPKSLIYAASSLQSGVPLKFSGSGSGTDFTLTISSLQPEDFATYYCQQYNTYPPTFGGGTKVEIK

SEQ ID NO: 22517 - protein, 109 aa, Artificial Sequence
  Synthetic construct
SYELTQPPSVSVSPGQTARITCSGDALPKKYAYWYQQKSGQAPVLVIYEDTRRPSGIPERFSGSSSGTMATLTITGARVEDEADYYCYSTDNSAYHRAVFGGGTKLTVL

SEQ ID NO: 22518 - protein, 107 aa, Artificial Sequence
  Synthetic construct
AIQMTQSPSSLSASVGDRVTITCRASQDIRNDLGWYQQKPGKAPELLIYAASTLQSGVPSRFSGSGSGTDFTLTISSLQPEDFATYYCLQDYNYPLTFGGGTKVDIK

SEQ ID NO: 22519 - protein, 107 aa, Artificial Sequence
  Synthetic construct
DIQLTQSPSFLSASVGDRVTITCRASQGISTYLAWYQQKPGKAPKLLIYAASTLQSGVPSRFSGGVSGSEFTLTISSLQPEDFATYYCQQLNSYPITFGQGTRLEIK

SEQ ID NO: 22520 - protein, 111 aa, Artificial Sequence
  Synthetic construct
QSALTQPASVSGSPGQSITISCTGTSSDIGAYNYVSWYQQHPGKAPKLIIYDVTNRPSGVSNRFYGSKSDNTASLAISGLQADDEADYYCTSYTSSTPFYVFGTGTKVTVL

SEQ ID NO: 22521 - protein, 110 aa, Artificial Sequence; identical to SEQ ID NO: 11294
  Synthetic construct

SEQ ID NO: 22522 - protein, 110 aa, Artificial Sequence
  Synthetic construct
QSALTQPASVSGSPGQSITISCTGTSSDVGYYYSVSWYQHHPGKAPKLMIYDVSNRPSGVSNRFSGSKSGNTASLTISGLQAEDEADYYCSSYTSSSTLVFGGGTKLTVL

SEQ ID NO: 22523 - protein, 113 aa, Artificial Sequence
  Synthetic construct
DIVMTQSPDSLAVSLGERATINCKSSQSVLYSSNNKNYLAWYQQKPGQPPNLLIYWASTRESGVPDRFSGSGSGTDFTLTISSLQAEDVAVYYCQQYYSTSYTFGQGTKLEIK

SEQ ID NO: 22524 - protein, 108 aa, Artificial Sequence
  Synthetic construct
EIVMTQSPVTLSVSPGERATLSCRASQSVGSNLAWYQQKPGQAPRLLIYGASTRATGVPARFSGSGSGTEFTLTISSLQSEDFAVYYCQQYNNWPPWTFGQGTKVEIK

SEQ ID NO: 22525 - protein, 112 aa, Artificial Sequence
  Synthetic construct
DIAMTQSPLSLPVTPGEPASISCRSSQSLLYSNGYTYLNWYLQKPGQSPQLLIYLGSNRASGVPDRFSVSGSGTDFTLIISRVEAEDVGVYFCMQALQTPWTFGQGTRVEIK

SEQ ID NO: 22526 - protein, 106 aa, Artificial Sequence
  Synthetic construct
DIQMTQSPSTLSASVGDRVTITCRASQSISSWLAWYQQKPGKAPKLLIYKASSLESGVPSRFSGSGSGTEFTLTISSLQPDDFATYYCQQYNSFWTFGQGTKVEIK

SEQ ID NO: 22527 - protein, 108 aa, Artificial Sequence
  Synthetic construct
DIQLTQSPSFLSASVGDRVTITCRASQGIRSYLAWYQQKPGKAPKLLIYAASTLQSGVPSRFSGSGSGTEFTLTISSLQPEDFATYYCQQLNSYPALTFGGGTKVEIK

SEQ ID NO: 22528 - protein, 110 aa, Artificial Sequence
  Synthetic construct
QSALTQPASVSGSPGQSITISCTGTSSDVGGYNYVSWYQHHPGEAPKVIIYDVSKRPSGVSNRFSGSKSDNTASLTISGLQAEDEADYYCSSFTSTSTLVFGTGTKVTVL

SEQ ID NO: 22529 - protein, 110 aa, Artificial Sequence
  Synthetic construct
QSALTQPPSASGSPGQSVTFSCTGTSSDVGGYNYVSWYQQHPGKAPKLMIYEVSKRPSGVPDRFSGSKSGNTASLTVSGLQAEDEADYYCSSYAGTNGYVFGTGTKVTVL

SEQ ID NO: 22530 - protein, 110 aa, Artificial Sequence
  Synthetic construct
QSALTQPPSASGSPGQSVTISCTGSSSDIGDYNYVSWYRQHPGKVPELMIYEVSKRPSGVPDRFSGSKSGNTASLTVSGLQAEDEADYYCSSYAGSNIMVFGTGTKVTVL

SEQ ID NO: 22531 - protein, 108 aa, Artificial Sequence
  Synthetic construct
EIVLTQSPATLSLSPGERATLSCRASQSVSSYLAWYQQKPGQAPRLLIYDTSNRATGIPARFSGSGSGTDFTLTISSLEPEDFAVYYCQQRSNWPPFTFGPGTKVDIK

SEQ ID NO: 22532 - protein, 107 aa, Artificial Sequence
  Synthetic construct
SFKLTQPPSVSVSPGQTARITCSGDALPKQYAYWYQQKPGQAPVLVIYKDSERPSGIPERFSGSSSGTTVTLTISGVQAEDEADYYCQSADTIGTYVFGPGTKVTVL

SEQ ID NO: 22533 - protein, 112 aa, Artificial Sequence
  Synthetic construct
QSVLTQPPSVSGAPGQRVTISCTGSSSNIGAGYDVHWYQQLPEAAPRLLIYGNNNRPSGVPDRFSGSKSGTSASLAITGLQAEDEADYYCQSYDNSLSGPYVFGTGTRVTVL

SEQ ID NO: 22534 - protein, 110 aa, Artificial Sequence
  Synthetic construct
QSALTQPASVSGSPGQSITISCSGTSSDVGGYNYVSWYQQYPGKAPKLMIYDVSNRPSGVSNRFSGSKSGNTASLTISGLQAEDEADYHCSSYTSRSTLVFGSGTKVTVL

SEQ ID NO: 22535 - protein, 109 aa, Artificial Sequence
  Synthetic construct
EIVLTQSPATLSLSSGERATLSCRASQSVSNFLAWYQQKPGQAPRLLIYDASNRATGIPARFSGSGSGTDFTLTISSLEPEDFAVYYCQQRSNWPPRSTFGGGTKVEIK

SEQ ID NO: 22536 - protein, 112 aa, Artificial Sequence
  Synthetic construct
DIVMTQSPDSLAVSLGERATINCKSSQSVLYNSSNKNYLAWYQQKPGQPPKLLIYWSSTRESGVPDRFSGSGSGTDFTLTISSLQAEDVAIYFCQQYYSAPTFGQGTRLEIK

SEQ ID NO: 22537 - protein, 105 aa, Artificial Sequence
  Synthetic construct
SYELTQPPSVSVSPGQTASITCSGDKLGDKYACWYQQKPGQSPVLVIYQDSKRPSGIPERFSGSNSGNTATLTISGTQAMDEADYYCQAWDSSVVFGGGTKLTVL

SEQ ID NO: 22538 - protein, 106 aa, Artificial Sequence
  Synthetic construct
DIQMTQSPSSLSASVGDRVTISCQTSQDIRIYLNWYQHKPGKAPKLLIYDASNLEAGAPSRFSGSGSGTNFSFTISSLQPEDIATYYCQHYDNLPRFGPGTKVDIK

SEQ ID NO: 22539 - protein, 107 aa, Artificial Sequence
  Synthetic construct
DIQMTQSPSSLSASIGDRVTITCRASQGIRNDLGWYQQKPGKAPKRLIYAASSLQSGVPSRFSGSGSGTEFTLTISSLQPEDFATYCCLQYNSYPITFGGGTKVEIK

SEQ ID NO: 22540 - protein, 107 aa, Artificial Sequence
  Synthetic construct
EIVMTQSPATLSVSPGETATLSCRASQSVSSDLAWYQQKPGQAPRLLIYGAATRATGIPARFSGSGSGTEFTLTISSLQSEDFAVYYCQHYNNWHWTFGQGTKVEIK

SEQ ID NO: 22541 - protein, 111 aa, Artificial Sequence
  Synthetic construct
QSVLTQPPSVSGAPGQRVTISCTGSSSNIGAGYDVHWYQQLPGTAPKLLIYGNNNRPSGVPDRFSASKSGTSASLAISGLQAEDEADYYCQSYDSSLSVYVFGAGTKVTVL

SEQ ID NO: 22542 - protein, 108 aa, Artificial Sequence
  Synthetic construct
SYELTQPPSVSVSPGQTARITCSADALPKLYAYWYQQKPGQAPVLVIYKDSERPSGIPERFSGSSSGTTVTLTISGVQAEDEADYYCQSADSGGPYWVFGTGTKVTVL

SEQ ID NO: 22543 - protein, 108 aa, Artificial Sequence
  Synthetic construct
EIVLTQSPGTLSLSPGERATLSCRASQSVSSSYLAWYQQKPGQAPRLLIYGASSRATGIPDRFSGSGSGTDFTLTISRLEPEDCAVYYCQQYGSSPFTFGPGTKVDIK

SEQ ID NO: 22544 - protein, 112 aa, Artificial Sequence
  Synthetic construct
QSVLTQPPSVSGAPGQRVTISCTGSSSNIGADYDVHWYQQLPGTAPKLLIYGNNNRPSGVPDRFSGSKSGTSASLAITGLQAEDEADYYCQSYDSSLSGPYVFGTGTKVTVL

SEQ ID NO: 22545 - protein, 107 aa, Artificial Sequence; identical to SEQ ID NO: 3295
  Synthetic construct

SEQ ID NO: 22546 - protein, 108 aa, Artificial Sequence
  Synthetic construct
SYELTQPPSVSVSPGQTARITCSGDALPKKYAYWYQQKSGQAPVLLISEDSKRPSGIPERFSGSSSGTMATLTISGAQVEDEADYYCYSTDIIGNSGVFGGGTKLTVL

SEQ ID NO: 22547 - protein, 111 aa, Artificial Sequence
  Synthetic construct
NFMLTQPHSVSESPGKTVTISCTGSSGRIASNYVQWYQQRPGSAPTTIIYEDNQRPSGVPARFSGSIDSSSNSASLTISGLKTDDEADYYCQSYDSSNRWVFGGGTKLTVL

SEQ ID NO: 22548 - protein, 113 aa, Artificial Sequence
  Synthetic construct
DIVMTQSPDSLAVSLGERATINCKSSQSVLFTSNNKNYLAWYQQKPGQPPKLLIYWASTRESGVPDRFSGSGSGTDFTLTISSLQAADVAVYYCQQYYNSPRTFGQGTKLEIK

SEQ ID NO: 22549 - protein, 107 aa, Artificial Sequence
  Synthetic construct
DIQMTQSPSSLSASVGDRVTITCRASQSISSYLNWYQQKPGKAPKLLIYAASTLQSGVPSRFSGSESGTGFTLSISSLQPEDFATYYCQQSYSTPWTFGQGTKVEIK

SEQ ID NO: 22550 - protein, 108 aa, Artificial Sequence
  Synthetic construct
DIQMTQSPSSLSASVGDRVTITCQASQDISSYLNWYQQKPGKAPKLLIYDASNLETGVPSRFTGSGSGTDFTFTISNLQPEDIATYYCQQYDSFLSYTFGQGTRLEIK

SEQ ID NO: 22551 - protein, 108 aa, Artificial Sequence
  Synthetic construct
EIVMTQSPATLSVSPGERATLSCRASQSVSSNLAWYQQKPGQAPRLVIYGASTRATGIPARFSGSGSGTDFTLTISSLQSEDFAVYYCQHYYNWPPWTFGQGTKVEIK

SEQ ID NO: 22552 - protein, 113 aa, Artificial Sequence
  Synthetic construct
DIVMTQSPDSLAVSLGERATINCKSSQSVLYSSNSKNYLAWYQQKPGQPPKLLIYWASTRDSGVPDRFSGSGSGTDFTLTISSLQAEDVAVYYCQQYYNSPRTFGQGTKLEIK

SEQ ID NO: 22553 - protein, 108 aa, Artificial Sequence
  Synthetic construct
EIVLTQSPGTLSLSPGERATLSCRASQSVSSSYLAWYQQKPGQAPRLLIYGASSRATGIPDRFSGSGSGTDFTLTISRLEPEDFAVYYCQQYGSPALTFGGGTKVEIK

SEQ ID NO: 22554 - protein, 110 aa, Artificial Sequence
  Synthetic construct
QSALTQPPSVSGSPGQSVTISCTGTSSDVGSYNRVSWYQQPPGTAPKLMIYDVNNRPSGVPDRFSGSKSGNTASLTISGLQAEDEADYYCSSYTSSSTYVFGTGTKVTVL

SEQ ID NO: 22555 - protein, 107 aa, Artificial Sequence
  Synthetic construct
SYELTQPPSVSVSPGQTARITCSGDALSKKYAYWYQQKSGQAPVLVIYEDSKRPSGIPERFSGSSSGTMATLTVSGAQVEDEADYYCHSRDSSANPLFGAGTKLTVL

SEQ ID NO: 22556 - protein, 106 aa, Artificial Sequence; identical to SEQ ID NO: 11293
  Synthetic construct

SEQ ID NO: 22557 - protein, 110 aa, Artificial Sequence
  Synthetic construct
QSALTQPASVSGSPGQSITISCTGTSSDVGGYNYVSWYQQHPVKAPKLIIYDVSNRPSGVSNRFSGSKSGNTASLTISGLQAEDEADYYCSSYTSSSTLVFGGGTKLTVL

SEQ ID NO: 22558 - protein, 112 aa, Artificial Sequence
  Synthetic construct
NFMLTQPHSVSEFPGKTVTISCTGSSGSIASNYVQWYQQRPGSAPTTVIYEDNQRPSGVPDRFSGSIDSSSNSASLTISGLKTEDEADYYCQSYDNSSPFWVFGGGTKLTVL

SEQ ID NO: 22559 - protein, 111 aa, Artificial Sequence
  Synthetic construct
QSALTQPASVSGSPGQSITISCTGTSNDVGGYKYVSWYQQHPGKAPKLMIYDVNNRPSGVSSRFSGSKSGNTASLTISGLQAEDEADYFCSSYTSTTARVVFGGGTKLTVL

SEQ ID NO: 22560 - protein, 108 aa, Artificial Sequence
  Synthetic construct
SYVLTQPPSVSVAPGKTARITCGGNNIGSKSVHWYQQKPGQAPVLVIYYESDRPSGIPERFSGSNSGNTATLAISRVEAGDEADYYCQVWDGSSDHRVFGGGTKLTVL

SEQ ID NO: 22561 - protein, 107 aa, Artificial Sequence
  Synthetic construct
DIQMTQSPSSLSASVGDRVTITCRASQSISRYLNWYQQKPGKAPKLLIYAASSLQSGVPSRFSGSGSGTDFTLTISSLQPEDFATYYCQQSYSPIWTFGQGTKVEIK

SEQ ID NO: 22562 - protein, 108 aa, Artificial Sequence
  Synthetic construct
DIVMTQTPLSLSVIPGQPASISCKSSQSLLHSDGKTYLYWYLQKPGQPPQLLIYEVSNLFSGVPDRFGGSGSGTDFTLKISRVEAEDVGVYYCMHPYTFGQGTRLEIK

SEQ ID NO: 22563 - protein, 112 aa, Artificial Sequence
  Synthetic construct
EIVMTQSPLSLPVTPGEPASISCRSSQSLLHSNGHNYLEWYLQKPGQSPQVLIYLGSNRASGVPDRFSGSGSGTDFILKISRVEAEDVGVYYCMQSLQTPWTFGQGTKVEIK

SEQ ID NO: 22564 - protein, 109 aa, Artificial Sequence
  Synthetic construct
EIVLTQSPATLSLSPGERATLSCRASQSVSNFLAWYQQKPGQAPRLLIYDASNRATGIPARFSGSGSGTDFTLTISSLEPEDFAVYYCQQRSNWPPRFTFGPGTKVDIK

SEQ ID NO: 22565 - protein, 108 aa, Artificial Sequence
  Synthetic construct
EIVLTQSPGTLSLSPGERATLSCRASQSVSGSYFAWYQQRPGQAPRLLIYGASSRATGIPDRFSGSGSGTDFTLTISRLEPEDFAVYYCQQYGTSPYTFGQGTKLEIK

SEQ ID NO: 22566 - protein, 107 aa, Artificial Sequence
  Synthetic construct
DIQLSQSPSSLSASVGDRVTITCRASQSIISYLNWYQYKPGKAPKLLIYAASSLQSGVPSRFSGSGSGTDFTLTVSGLQVEDFATYYCQQSYSTPWTFGQGTKVEIK

SEQ ID NO: 22567 - protein, 108 aa, Artificial Sequence
  Synthetic construct
EIVLTQSPGTLSLSPGERATLSCRASQSVSSSYLAWYQQKPGQAPRLLIYEASSRATGIPDRVSGSGSGTDFTLTISRLEAEDFAVYYCQQYGSPPSTFGQGTRLEIK

SEQ ID NO: 22568 - protein, 108 aa, Artificial Sequence
  Synthetic construct
QSVLTQPPSVSAAPGQKVTISCSGSTSNIGKNYVSWYQQLPGTAPKLLIYENSRRPSGIPDRFSGSKSGTSATLGITGLQTGDEADYYCGTWDGSLSNFGGGTKLTVL

SEQ ID NO: 22569 - protein, 108 aa, Artificial Sequence; identical to SEQ ID NO: 2911
  Synthetic construct

SEQ ID NO: 22570 - protein, 107 aa, Artificial Sequence
  Synthetic construct
DIQMTQSPSSLSASVGDRVTITCQASQDINNYLNWYQQKPGKAPKLLIYDASNLETGVPSRFRGSGSGTDFTFTISSLQPEDVATYYCHQYDTLPRTFGQGTKLEIK

SEQ ID NO: 22571 - protein, 106 aa, Artificial Sequence
  Synthetic construct
EIVMTQSPATLSVSPGERATLSCRASQSVGSNLAWYQQKPGQAPRLLFYGASTRATGIPARFSGSGSGTEFTLTISSLQSEDFAVYYCQQYNNWWTFGQGTKVEIK

SEQ ID NO: 22572 - protein, 110 aa, Artificial Sequence
  Synthetic construct
QSALTQPASVSGSPGQSITISCTGTSSDILDYIFVSWYQQHPGKVPKLLIHNVSNRPSGISKRFSGSKSGNTASLTISGLQAEDEATYYCTSYTGSSTVVFGGGTTVTVL

SEQ ID NO: 22573 - protein, 108 aa, Artificial Sequence
  Synthetic construct
SYVLTQPPSVSVAPGKTARITCGGNNIGSKSVHWYQQKPGQAPVLVIYYDSGRPSGIPERFSGSNSGNTATLTISRVEAGDEADYYCQVWDGSSDHWVFGGGTKLTVL

SEQ ID NO: 22574 - protein, 111 aa, Artificial Sequence
  Synthetic construct
QLVLTQSPSASASLGASVKLTCTLSSGHSSYAIAWHQQQPEKGPRYLMKLNSDGSHNKGDGIPDRFSGSSSGAERYLTISSLQSEDEADYYCQTWGTGIQVFGGGTKLTVL

SEQ ID NO: 22575 - protein, 107 aa, Artificial Sequence
  Synthetic construct
DIQMTQSPSSLSASVGDRVTITCRASQGISNDLAWFQQKPGKAPKSLIYAASSLQSGVPSKFSGSGSGTDFTLTISSLQPEDSATYYCQQYNSYPITFGGGTKVEIK

SEQ ID NO: 22576 - protein, 107 aa, Artificial Sequence
  Synthetic construct
DIQMTQSPSSLSASVGDRVTITCRASQDIRNDLGWYQQKPGKAPKRLIYGASSLQSGVPSRFSGSGSGTEFTLTISSLQPEDFATFYCLQYNSYPLTFGGGTKVEIK

SEQ ID NO: 22577 - protein, 106 aa, Artificial Sequence
  Synthetic construct
SNELTQPPSVSVSPGQTASITCSGDKLGDKYASWFQQRPGQSPVLVIYQDTKRPSGIPERFSGSNSGNTATLTISGTQAMDEADYYCQAWDSSTGVFGTGTKVTVL

SEQ ID NO: 22578 - protein, 110 aa, Artificial Sequence
  Synthetic construct
QSVLTQPPSVSAAPGQKVTISCSGSNSNIGNNYVSWYQQLPGTAPKLLIYENNKRPSGIPDRFSGSKSGTSATLGITGLQTGDEADYYCGTWDSSLSAVVFGGGTKLTVL

SEQ ID NO: 22579 - protein, 109 aa, Artificial Sequence
  Synthetic construct
QAVVTQEPSLTVSPGGTVTLTCGSSTGAVTSGHYPYWFQQKPGQAPRTLIYDTSNKYSWTPARFSGSLLGGKAALTLSGAQAEDEAEYYCLVSYSGAAVFGGGTQLTVL

SEQ ID NO: 22580 - protein, 108 aa, Artificial Sequence
  Synthetic construct
SYELTQPPSVSVSPGQTARITCSGDALPKKYAYWYQQKSGQAPLLVISEDNKRPSGIPERFSGSSSGTMATLTISGAQVEDEADYYCYSTDSSSNHRVFGGGTKLTVL

SEQ ID NO: 22581 - protein, 109 aa, Artificial Sequence
  Synthetic construct
SYELTQPLSVSVALGQTARITCGGNNIGSKNVHWYQQKPGQAPVLVIYRNSNRPSGIPERFSGSNSGNTATLTISRAQAGDEAGYYCQLWDSSTAHDTEFGGGTKLTVL

SEQ ID NO: 22582 - protein, 110 aa, Artificial Sequence
  Synthetic construct
QSALTQPRSVSGSPGQSVTISCTGTSSDVGGYNYVSWYQQHLGKGPKLMIYDVNKRPSGVPDRFSGSKSGNTASLTISGLQAEDEADYYCCSYAGSYKGVFGGGTKLTVL

SEQ ID NO: 22583 - protein, 110 aa, Artificial Sequence
  Synthetic construct
QSVLTQPPSVSAAPGQKVTISCSGSSSNVGNSFVSWYQQLPGTAPKLLIYENNKRPSGIPDRFSGSKSGTSATLGITGLQTGDEADYYCGTWDSSLSTVVFGGGTKLTVL

SEQ ID NO: 22584 - protein, 107 aa, Artificial Sequence
  Synthetic construct
DIQLTQSPSFLSASVGDRVTITCRASQGISSYLAWYQQKPGKAPNLLIYAASTLQSGVPSRFSGSGSGTEFTLTISSLRPEDFATYYCQQLNSYPITFGQGTRLDIK

SEQ ID NO: 22585 - protein, 109 aa, Artificial Sequence
  Synthetic construct
EIVLTQSPATLSLSPGERATLSCRASQSVSSYLAWYQQKPGQAPRLLIYDASNRATGIPARFSGSGSGTDFTLTISSLEPADFVVYYCQHRRNWPPRYTFGQGTKLEIK

SEQ ID NO: 22586 - protein, 105 aa, Artificial Sequence
  Synthetic construct
DIQLTQSPSFLSASVGDRVTITCRASQGISSYLAWYQQKPGKAPKLLIYAASTLQSGVPSRFSGSGSGAEFTLTISSLQPEDFATYYCQEVNSYIFGGGTKVEIK

SEQ ID NO: 22587 - protein, 108 aa, Artificial Sequence
  Synthetic construct
EIVLTQSPATLSLSPGERATLSCRASQSVSSYLAWYQQKPGQAPRLLIYDASNRATGIPARFSGSGSGTDFTLTISSLEPEDFAVYYCQQRSNWPPYTFGQGTKLEIK

SEQ ID NO: 22588 - protein, 113 aa, Artificial Sequence
  Synthetic construct
DVVMTQSPLSLPVSLGQSASISCRSSQSLVYSDGNTYLNWFHQRPGQSPRRLIYKVSKRDSGVPDRFSGSGSGTDFTLKISRVEAEDVGVYYCMQGTHWPPCTFGQGTKLEIK

SEQ ID NO: 22589 - protein, 111 aa, Artificial Sequence
  Synthetic construct
QSVLTQPPSVSGAPGQRVTISCTGSSSNIGAGYDVHWYQQLPGTAPKLLIYGNSNRPSGVPDRFSGSKSGTSASLAITGLQAEDEADYYCQSYDSSLSGWVFGGGTKLTVL

SEQ ID NO: 22590 - protein, 110 aa, Artificial Sequence; identical to SEQ ID NO: 2975
  Synthetic construct

SEQ ID NO: 22591 - protein, 108 aa, Artificial Sequence
  Synthetic construct
EIVMTQSPATLSVSPGERATLSCRASQSVSSNLAWFQQKPGQAPRLLIYGASTRATGIPARFSGSGSGTEFTLTISSLQSEDFAVYYCHQYNNWPPYTFGQGTKLEIK

SEQ ID NO: 22592 - protein, 109 aa, Artificial Sequence
  Synthetic construct
SYELTQPPSVSVSPGQTARITCSGDALPKKYVYWYQQKSGQAPVLVIYEDNKRPSGIPERISGSSSGTVATLTISGAQVDDEADYYCYSTDNSGNHRGVFGTGTKVTVL

SEQ ID NO: 22593 - protein, 113 aa, Artificial Sequence
  Synthetic construct
DVVMTQSPLSLPVTLGQPASISCRSSQSLVYSDGNTYLSWFQQRPGQSPRRLIYKVSNRDSGVPDRFSGSGSGTDFTLKISRVEAEDVGFYYCMQGTHWPPWTFGHGTKVEIK

SEQ ID NO: 22594 - protein, 107 aa, Artificial Sequence
  Synthetic construct
DIQMTQSPSSVSASIGDRVTITCRASQGISSWLAWYQQKPGKAPKLLIYDASSLQSGVPSRFSGSGSGTDFTLTISSLQPEDFATYYCQQAHSFPPTFGGGTKVDIK

SEQ ID NO: 22595 - protein, 110 aa, Artificial Sequence
  Synthetic construct
QSALTQPPSASGSPGQSVTMSCTGTSSDVGGHNYVSWYQQHPGKAPKLMIYEVSKRPSGVPDRFSGSKSGNTASLTVSGLQAEDEADYYCSSYAGSNTYVFGTGTKVTVL

SEQ ID NO: 22596 - protein, 107 aa, Artificial Sequence
  Synthetic construct
DIQMTQSPSSLSASVGDRVTITCRASQSINSYLNWYQQKPGKAPVLLIYAASSLQSGVPSRFSGSASGTDFTLTISSLQPEDFATYYCQQSYNTPITFGQGTRLEIK

SEQ ID NO: 22597 - protein, 112 aa, Artificial Sequence
  Synthetic construct
DIVMTQSPLSLPVTPGEPASISCRSSQSLLHSNGYNYLDWYLQKPGQSPQLLIYLGSNRASGVPDRFSGSGSGTDFTLKISRVEAEDVGVYYCMQALQTPPTFGPGTKVDIK

SEQ ID NO: 22598 - protein, 110 aa, Artificial Sequence; identical to SEQ ID NO: 3110
  Synthetic construct

SEQ ID NO: 22599 - protein, 107 aa, Artificial Sequence
  Synthetic construct
NIQMTQSPSSVSASVGDRVTISCRASQVISNWLAWYQQKPGKAPKLLIYAASTLQSGVPSRFSGSGSGTDFTLTISSLQPEDFATYYCQQANSFPLTFGQGTKVEIK

SEQ ID NO: 22600 - protein, 106 aa, Artificial Sequence
  Synthetic construct
SYELTQPPSVSVSPGQTASITCSGDKLGDKYACWYQQKPGQSPVLVIYQDTKRPSGIPERFSGSSSGNTATLTISGTQAMDEADYYCQAWDSNTAIFGGGTKLTVL

SEQ ID NO: 22601 - protein, 106 aa, Artificial Sequence
  Synthetic construct
SSELTQPPSVSVSPGQTASITCSGDKLGDKYACWYQQKPGQSPVLVIYQDTKRPSGIPERFSGSNSGNTATLTISGTQAMDEADYYCQAWDSSNVVFGGGTKLTVL

SEQ ID NO: 22602 - protein, 110 aa, Artificial Sequence
  Synthetic construct
QTVVTQEPSLSVSPGGTVTLTCGLSSGSVSTGSGPSWYQQTPGQAPRTLIYLTNTRSSGVPDRFSGSILGNRAALTITGAQADDEADYHCGLYLATGIWVFGGGTRLTVL

SEQ ID NO: 22603 - protein, 106 aa, Artificial Sequence
  Synthetic construct
SYELTQPSSMSVSPGQTARITCSGDVLAKKYARWFQQKPGQAPVLVIYRDSERPSGIPDRFSGSSSGTTVTLTISGAQVEDEADYYCYSAADNNRVFGGGTKLTVL

SEQ ID NO: 22604 - protein, 111 aa, Artificial Sequence
  Synthetic construct
QSVLTQPPSVSGAPGQRVTISCTGSSSNIGAGYDVHWYQQLPGTAPKLLIYRNSNRPSGVPDRFSGSKSGTSASLAISGLQAEDEADYYCQSYDSSLSDLVFGGGTKLTVL

SEQ ID NO: 22605 - protein, 108 aa, Artificial Sequence
  Synthetic construct
SYVLTQPPSVSVAPGKTARIPCGGDNIGSKSVHWYQQKPGQAPVLVIYYVSDRPSGIPERFSGSNSGNTATLTISRVEAGDEADYYCQVCDSGADPWVFGGGTKLTVL

SEQ ID NO: 22606 - protein, 108 aa, Artificial Sequence; identical to SEQ ID NO: 2585
  Synthetic construct

SEQ ID NO: 22607 - protein, 113 aa, Artificial Sequence
  Synthetic construct
DVVMTQSPLSLPVTLGQPASISCRSSQSLVFSDGNTYLNWFQQRPGQSPRRLIYKVSNRDSGVPDRFSGSGSGTDFTLKISRVEAEDVGVYYCMQGTHWPPYTFGQGTKLEIK

SEQ ID NO: 22608 - protein, 111 aa, Artificial Sequence
  Synthetic construct
QSVLTQPPSVSAAPGQKVTISCSGSSSNIGNNYVSWYQQLPGTAPKLLIYENNKRPSGIPDRFSGSKSGTSATLGITGLQTGDEADYYCGTWDSSLSAPWVFGGGTKLTVL

SEQ ID NO: 22609 - protein, 113 aa, Artificial Sequence; identical to SEQ ID NO: 2944
  Synthetic construct

SEQ ID NO: 22610 - protein, 109 aa, Artificial Sequence
  Synthetic construct
QSALTQPRSVSGSPGQSVTISCTGTRSDVGRFNYVSWYQQHPGKAPKLMIFDVTKRPSGVPDRFSGSKSGNTASLTISGLQAEDEADYYCCSYAGTFWVFGGGTKLTVL

SEQ ID NO: 22611 - protein, 110 aa, Artificial Sequence; identical to SEQ ID NO: 2545
  Synthetic construct

SEQ ID NO: 22612 - protein, 108 aa, Artificial Sequence
  Synthetic construct
EILLTQSPATLSLSPGERATLSCRASQSISSFLAWYQQKPGQAPRLLIYDASNRATGIPARFSGSGSGTDFTLTISSLEPEDFAVYYCQQRSNWPPFTFGGGTKVEIK

SEQ ID NO: 22613 - protein, 106 aa, Artificial Sequence
  Synthetic construct
EIVMTQSPATLSVSPGERATLSCRASQSVSSNLAWYQQKLGQAPRLLIYGASTRATGIPARFFGSGSGTEFTLTISSLQSEDFAVYYCQQYNKWLTFGGGTKVEIK

SEQ ID NO: 22614 - protein, 107 aa, Artificial Sequence
  Synthetic construct
VIWMTQSPSLLSASTGDRVTINCRMSQGISSFLAWYQQKPGKAPELLIYAASTLQSGVPSRFSGSGSGTDFTLTISYLQSEDFATYYCQQYYSFPWTFGQGTKVEIK

SEQ ID NO: 22615 - protein, 110 aa, Artificial Sequence
  Synthetic construct
QSVLTQPPSVSAAPGQKVFISCSGSSSNIGKNDVSWYQQVPGTAPRLLIFDSNHRPSGIPDRFSGSKSGTSATLGIIGLQSGDEADYYCGTWDSSLSAALFGGGTRLTVL

SEQ ID NO: 22616 - protein, 110 aa, Artificial Sequence
  Synthetic construct
QSVLTQPPSVSAAPGQKVTISCSKSSSDIGDIYVSWYQQLPGAAPKLLIYGNNERPSGIPDRFSGSKSGTSATLGITGLQTGDEADYYCGTWDNSLNVVLFGGGTKLTVL

SEQ ID NO: 22617 - protein, 107 aa, Artificial Sequence
  Synthetic construct
DIQLTQSPSFLSASVGDRVIITCRASQGISNYLAWYQQKPGQAPKLLIYAASTLQSGVPSRFSGSGSGTEFTLTISSLQPEDFATYYCQQLNSYQYTFGQGTKLEIK

SEQ ID NO: 22618 - protein, 106 aa, Artificial Sequence
  Synthetic construct
DIQMTQSPSSLSASVGDRVTITCQASQDISNYLNWFQQKPGKAPRLLIYDASNLETGVPSRFRGTGSGTDFTFTITGLQPEDIATYYCQHSDLFAAFGQGTNLEIK

SEQ ID NO: 22619 - protein, 106 aa, Artificial Sequence
  Synthetic construct
GIVMTQSPATLSVSPGQRATLSCRASQSVSSNLAWYQQKPGQAPSLLIYAASTRATGIPGRFSGSGSGTEFTLTISSLQSEDFAVYYCQQYNKWWTFGQGTKVEIK

SEQ ID NO: 22620 - protein, 110 aa, Artificial Sequence
  Synthetic construct
QSALTQPASVSGSPGQSITISCTGTSSDVGGYNYVSWYQQHPGKAPKVIIYDVGDRPSGVSDRFSASKSGNTASLTISGLQAEDEADYYCSSYTSGSTYVFGTGTKVTVL

SEQ ID NO: 22621 - protein, 108 aa, Artificial Sequence
  Synthetic construct
SYELTQPPSVSVSPGQTARITCSADALPKQYASWYQQKPGQAPVLVIFKDIERPSGIPERFSASSSGTTVTLTISGVQAEDEADYYCQSADSSGTYPVFGGGTKLTVL

SEQ ID NO: 22622 - protein, 111 aa, Artificial Sequence
  Synthetic construct
QSVLTQPPSVSGAPGQRVTISCTGSSSNIGAGYDVHWYQQLPGTAPKLLIYRNNNRPSGVPDRFSGSKSGTSASLAISGLQAEDEADYFCQSYDSSLSGYVFGSGTRVTVL

SEQ ID NO: 22623 - protein, 113 aa, Artificial Sequence
  Synthetic construct
DIVMTQSPDSLAVSLGERATINCKSSQSVLYSSNNKNYLAWYQQKPGQPPKLLIYWASTRESGVPDRFSGSGSGTDFTLTISSLQAEDVAIYYCQQYYSTPYPFGQGTKLEIK

SEQ ID NO: 22624 - protein, 106 aa, Artificial Sequence
  Synthetic construct
EIVLTQSPATLSLSPGERATLSCRASQSISNYLAWYQQKPGQAPRLLIYDASNRATGIPARFSGSGSGTDFTLTISSLEPEDFAVYYCQQRTSWLTFGGGTKVEIK

SEQ ID NO: 22625 - protein, 106 aa, Artificial Sequence
  Synthetic construct
EIVMTQSPVTLSVSPGERASLSCRASQSVGSNLAWYQQKPGQAPRLLIYGASTRATGVPARFSGSGSGTEFTLTISSLQSEDFAVYYCQHYSNWWTFGQGTKVEIK

SEQ ID NO: 22626 - protein, 110 aa, Artificial Sequence
  Synthetic construct
QSVLTQPPSVSGTPGQRVTISCSGNSSNVGTYYVHWYQQSAGAAPKLLMYKNGQRPSGVPDRFSGSKSGTSVSLAISGLRSEDEADYYCASWDDSLRAGVFGTGTTVTVL

SEQ ID NO: 22627 - protein, 109 aa, Artificial Sequence
  Synthetic construct
EIVLTQSPATVSLSPGEGATLSCRASHIVSNYLAWYQQKPGQAPRLLIYGTSKRASGIPARFSGSGSGTDFSLTISSLEPEDFAVYYCQQRSLRPPTWTFGQGTKVEIK

SEQ ID NO: 22628 - protein, 106 aa, Artificial Sequence
  Synthetic construct
SYELTQPPSVSVSPGQTARITCSGDALPKQYAYWYQQKPGQAPVLLIYRDHERPSGIPEQFSGSSSGTTVTLTISGVQAEDEADYYCQSADGSTWVFGGGTKLTVL

SEQ ID NO: 22629 - protein, 107 aa, Artificial Sequence
  Synthetic construct
EIVLTQSPATLSLSPGERATLSCRASQSVSAYLAWYQQKPGQAPRLLIYDASNRATGIPARFSGSGSGTDFTLTISSLEPEDFAVYYCQQRSISALTFGGGTKVEIK

SEQ ID NO: 22630 - protein, 106 aa, Artificial Sequence
  Synthetic construct
SYELTQPPSVSVSPGQTASVTCSGDKLGDKDTCWYQQKPGQSPVLVIYQDNKRPSGIPERFSGSNSGNTATLTISGTQAMDEANYYCQTWDNSTYVFGTGTKVTVL

SEQ ID NO: 22631 - protein, 108 aa, Artificial Sequence
  Synthetic construct
SYELTQTPSVSVSPGQTARITCSGDALPKKYAYWYQQKSGQAPVLVIYEDSRRPSGIPERFSGSSSGTMATLSISAAQVEDEADYYCSSTDNSGNHWVFGGGTKLTVL

SEQ ID NO: 22632 - protein, 110 aa, Artificial Sequence
  Synthetic construct
QSVLTQPPSVSAAPGQKVTISCSGSSSNVGYNYLSWYQQLPGAAPKLLIYENDRRPSGITDRFSGSKSGTSATLGITGLQTGDEADYYCGTWDSSLSAYVFGTGTRVTVL

SEQ ID NO: 22633 - protein, 109 aa, Artificial Sequence
  Synthetic construct
EIVLTQSPGTLSLSPGEGATLSCRASQTLSSSYLAWYQQKPGQAPRLLIYGASSRATGIPDRFSGSGSGTDFTLSISRLEPEDFAVYYCQQYGSSPGYTFGQGTKLEIK

SEQ ID NO: 22634 - protein, 111 aa, Artificial Sequence
  Synthetic construct
QSALTQPASVSGSPGQSITISCTGTSSDVGGYNYVSWYQQHPGKAPKLMIYDVSNRPSGVSNRFSGSKSGNTASLTISGLQAEDEADYYCSSYTSSSTLDVFGTGTKVTVL

SEQ ID NO: 22635 - protein, 107 aa, Artificial Sequence
  Synthetic construct
EIVMTQSPATLSVSPGERATLSCRASQSVSSNLAWYQQKPGQAPRLLIYGASTRATGIPASFSGSGSGTEFTLTISSLRSEDFAVYYCQQYNNRPYTFGQGTKVEIK

SEQ ID NO: 22636 - protein, 109 aa, Artificial Sequence
  Synthetic construct
QIVLTQSPATLSLSPGERATLSCRASQSVSSYLAWYQQRPGQAPRLLISDASNRATGIPARFSGSGSGTDFTLTISSLEPEDFAVYYCQQRSNWPPSITFGQGTRLEIK

SEQ ID NO: 22637 - protein, 108 aa, Artificial Sequence
  Synthetic construct
EIVLTQSPGTLSLSPGERATLSCRASQSVSSSYLAWYQQKPGQAPRLLIYGASSRATGIPDRFSGSGSGTDFTLTISRLEPEDFAVYYCQQYGRSRLTFGPGTKVDIK

SEQ ID NO: 22638 - protein, 105 aa, Artificial Sequence
  Synthetic construct
DIQMTQSPSTLSASVGDRVTITCRASQSISTWLAWYQQKPGKAPKVLIYKASNLESGVPSRFSGSGSGTDFTLTISSLQPDDFATYYCQQYNTWTFGQGTKVEIK

SEQ ID NO: 22639 - protein, 110 aa, Artificial Sequence
  Synthetic construct
QSVLTQPPSVSAAPGQKVSISCSGSSTNIGNNYVSWYQQLPGTAPKLLMYENNRRPSGIPDRFSGSKSDTSATLGIIGLQTGDEADYYCGTWDSSLSSWVFGGGTKLTVL

SEQ ID NO: 22640 - protein, 110 aa, Artificial Sequence
  Synthetic construct
QSVLTQPPSVSAAPGQRVTISCSGSNSNIGKNYVSWYRHLPGAVPKVLIYKNNQRPSGIPDRFSGSKSGTSATLGITGLQTGDEADYYCGTWDNSLSAWVFGGGTKLTVL

SEQ ID NO: 22641 - protein, 114 aa, Artificial Sequence
  Synthetic construct
DIQMTQSPSSLSASVGDRVTISCQTSQDISIYLNWYQQKPGKAPKLLIYDASNLEAGAPSRFSGSGSGTDFAFTISGLQPEDIATYYCQHYDILPRQHYDNVPRFGPGTKVDVK

SEQ ID NO: 22642 - protein, 108 aa, Artificial Sequence
  Synthetic construct
SYVLTQPPSVSVAPGKTARIPCGVNNIGGNSVHWYQQKPGQAPVLVIHYDGVRPSGIPERFSGSNSGNTATLTISRVEAGDEADYYCQVWDGSSDHWVFGGGTKLTVL

SEQ ID NO: 22643 - protein, 108 aa, Artificial Sequence
  Synthetic construct
EIVLTQSPGTLSLSPGDRATLSCRASQSVSSTYLAWYQQKPGQAPRLLIYGASSRATGIPDRFSGSGSGTDFTLTISRLEPEDFAVYYCQQYGGSPLTFGGGTRVEIK

SEQ ID NO: 22644 - protein, 108 aa, Artificial Sequence
  Synthetic construct
QSALTQPASVSGSPGQSITISCTGPSSDVGSYNLVSWYQQHPGKAPKLMIYEGSKRPSGVSNRFSGSKSGNTASLTISGLQAEDEADYYCCSSASSWVFGGGTKLTVL

SEQ ID NO: 22645 - protein, 108 aa, Artificial Sequence
  Synthetic construct
EIVLTQSPATLSLSPGERATLSCRASQSVSSFLAWYQQKPGQAPRLLIYDASNRATGIPARFSGSGSGTDFTLTISSLEPEDFAVYYCQRRSNWPPFTFGGGTKVEIK

SEQ ID NO: 22646 - protein, 106 aa, Artificial Sequence
  Synthetic construct
DIQMTQSPSTLSASVGDRVTITCRASQSISSRLAWYQQKPGKAPKVLIYKASSLESGVPSRFSGSGSGTEFTLTISSLQPDDFATYYCQQYNSYWTFGQGTKVEIK

SEQ ID NO: 22647 - protein, 108 aa, Artificial Sequence
  Synthetic construct
EIVLTQSPGTLSLSPGERATLSCRASQSVRSSSLAWHQQKPGQAPRLLIYGASSRATGIPDRFSGSGSGTDFTLTISRLEPEDFAVYYCQQYGSSQGTFGQGTKLEIK

SEQ ID NO: 22648 - protein, 108 aa, Artificial Sequence
  Synthetic construct
SSELTQDPAVSVALGQTVRITCQGDSLRGYYATWYQQKPGQVPVFVFYGKNIRPSGIPDRFSGSSSGNTASLTITGAQAEDEADYYCKSRDRSGDHLMFGGGTKLTVL

SEQ ID NO: 22649 - protein, 110 aa, Artificial Sequence
  Synthetic construct
QSALTQPRSVSGSPGQSVTISCTGTSNDVGGYYYVSWYHQHPGKAPKLMIYDVSKRPSGVPDRFSGSKSGNTASLTISGLQAEDEADYYCCSYAGSYTVVFGGGTKLTVL

SEQ ID NO: 22650 - protein, 110 aa, Artificial Sequence
  Synthetic construct
QSALTQPASVSGSPGQSITISCTGASSDVGGYNYVSWYQQHPGKAPKLMIFDVSNRPSGVSNRFSGSKSGNTASLTISGLQAEDEADYFCSSYTSSSTWVFGGGTKLTVL

SEQ ID NO: 22651 - protein, 108 aa, Artificial Sequence
  Synthetic construct
DIVLTQSPATLSLSPGERATLSCRASPSVYSVYLAWYQHKPGQAPRLLIYGASNRATGVPDRFSGSGSGTDFTLTISRLEPEDFAVYYCQQYGTSPLTFGGGTKVDIR

SEQ ID NO: 22652 - protein, 109 aa, Artificial Sequence
  Synthetic construct
EIVLTQSPGTLSLSPGERATLSCRASQSVSSSYLAWYQQKPGQAPRLLIYGTSSRATGIPDRFSGSGSGTDFTLTISRLEPEDFAVYYCQQYGSSPGYTFGQGTKLEIK

SEQ ID NO: 22653 - protein, 113 aa, Artificial Sequence
  Synthetic construct
DIVMTQSPDSLAVSLGERATINCKSSQSVLYSSNNKNYLAWYQQKPGQPPKLLIYWASTRESGVPDRFSGSGSGTDFTLTISSLQAEDVAVYYCQQYYSTPLTFGGGTKVEIK

SEQ ID NO: 22654 - protein, 108 aa, Artificial Sequence
  Synthetic construct
EIVMTQSPATLSVSPGDRATLSCRASQGVSSSLAWFQQKPGQAPRLLIYDASTRATGIPARFSGSGSGTEFTLTISSLQSEDFAVYYCQQYNNWPPWTFGQGTKVEIK

SEQ ID NO: 22655 - protein, 107 aa, Artificial Sequence
  Synthetic construct
DIQMTQSPSSLSASVGDRVTITCRASQSISSYLNWYQQKPGKAPNVLIYAASSLQSGVPSRFSGSGSGTDFTLTIISLQPEDFATYYCQQSFSTPQTFGQGTKLEIK

SEQ ID NO: 22656 - protein, 106 aa, Artificial Sequence
  Synthetic construct
DIQMTQSPSSLSASIGDRVTISCQTSQDINIYLNWYQQKPGKAPKLLIYDASNLEAGAPSRFSGSGSRTYFTFTISSLQPEDVATYYCQHYDNVPRFGPGTKVDIK

SEQ ID NO: 22657 - protein, 107 aa, Artificial Sequence
  Synthetic construct
EIVLTQSPDFQSVTPKEKVTITCRASQSIGSSLHWYQQKPDQSPNLLIKYASQSFSGVPSRFSGSGSGTDFTLTINSLEAEDAATYYCHQSSSLPLTFGGGTKVEIK

SEQ ID NO: 22658 - protein, 112 aa, Artificial Sequence
  Synthetic construct
QLVLTQSPSASASLGASVKLTCTLSSGHSSYAIAWHQQHPGKGPRYLMKLNSDGAHFKGDGVPDRFSGSSSGAERYLTISSLQSEDEADYYCQTWDTDILRVFGGGTKVTVL

SEQ ID NO: 22659 - protein, 108 aa, Artificial Sequence
  Synthetic construct
EIVLTQSPGTLSLSPGGRANLSCRASQSVSSNYLAWYQHKPGQAPRLLIYGASSRATGIPDRFSGSGSGTDFTLTISRLEPEDFAVYYCQQYVSSPGTFGQGTKVEIK

SEQ ID NO: 22660 - protein, 106 aa, Artificial Sequence
  Synthetic construct
SYELTQPPSVSVSPGQTASITCSGDKLGDKDASWYQQKPGQSPVLVIYQDSKRPSGIPERFSGSNSGNTATLTISGTQAMDEADYYCQAWDSSTYVFGTGTKVTVL

SEQ ID NO: 22661 - protein, 107 aa, Artificial Sequence
  Synthetic construct
DIQMTQSPSSLSASVGDRVTITCRASQSISGYLSWYHQKPGKAPKLLIYAASRLQSGVPSRFSGSGSGTDFTLTLSSLQPEDFATYYCQQTYTTPQTFGQGTRVEIK

SEQ ID NO: 22662 - protein, 112 aa, Artificial Sequence; identical to SEQ ID NO: 10840
  Synthetic construct

SEQ ID NO: 22663 - protein, 111 aa, Artificial Sequence
  Synthetic construct
QSALTQPASVSGSPGQSITISCTGTSSDVVSWYQQHPGRAPKFIIYEVSKRPSGVSNRFSGSKSGNTASLTISGLQAEDEADYYCCSYAGSTSVVGSTSVVFGGGTRLTVL

SEQ ID NO: 22664 - protein, 105 aa, Artificial Sequence; identical to SEQ ID NO: 22638
  Synthetic construct

SEQ ID NO: 22665 - protein, 108 aa, Artificial Sequence
  Synthetic construct
EIVMTQSPATLSVSPGERATLSCRASQSVSSNLAWYQQKPGQAPRLLIYAASTRATAIPARFSGSGSGTEFTLTISSLQSEDFAVYYCQQYHDWPPWTFGPGTKVEIK

SEQ ID NO: 22666 - protein, 113 aa, Artificial Sequence
  Synthetic construct
DIVMTQSPDSLAVSLGERATINCKSSQRVLHSSINKNYLAWYQQKPGQPPKVLIYWASTRESGVPDRFSGSGSGTDFTLTISSLQAEDVAVYYCQQYYTTPYTFGQGTKLEIK

SEQ ID NO: 22667 - protein, 107 aa, Artificial Sequence; identical to SEQ ID NO: 3295
  Synthetic construct

SEQ ID NO: 22668 - protein, 113 aa, Artificial Sequence
  Synthetic construct
DTVMTQSPDSLAVSLGERATINCKSSQSLLYNVNNKNYLAWYQQKPGQPPRLLIYWASTRASGVPDRFSGSGSGTDFTLTISSLQAEDVAVYYCQQYYRSPGMFGQGTTVEIK

SEQ ID NO: 22669 - protein, 111 aa, Artificial Sequence
  Synthetic construct
RSVLTQPPSVSGAPGQRVTISCTGSSSNIGAGYDVHWYQQLPGTAPKLLMYGHNNRPSGVPDRFSGSKSGTSASLAISGLQAEDEADYYCQSYDSSLSGWVFGGGTKLTVL

SEQ ID NO: 22670 - protein, 107 aa, Artificial Sequence
  Synthetic construct
DIQMTQSPSSLSASVGDRVTITCRASQGIRNDLGWYQQKPGKAPKRLIYAASSLQSGVPSRFSGSGSGTDFTLTVSSLQPEDFATYYCLQHHTYPITFGQGTRLEIE

SEQ ID NO: 22671 - protein, 107 aa, Artificial Sequence
  Synthetic construct
DIQLTQSPSFLSASVGDRVTITCRASQGINSYLAWYQRKPGKAPKLLIYAASTLQSGVPSRFSGSGSGTEFTLTISSLQPEDFATYYCQQLNSYPITFGQGTRLEIK

SEQ ID NO: 22672 - protein, 108 aa, Artificial Sequence
  Synthetic construct
QSALTQPASVSGSPGQSITISCTGTSSDVGNYNLVSWYQQHPGKAPKLMIYEGSKRPSGVSNRFSGSTSGNTASLTISGLQAEDEADYYCCSYAHSWVFGGGTKLTVL

SEQ ID NO: 22673 - protein, 108 aa, Artificial Sequence
  Synthetic construct
EIVLTQSPGTLSLSPGERATLSCRASQSVSSSYLAWYQQKPGQAPRLLIYSASSRASGIPDRFSGGGSRTDFTLTISRLEPDDFAVYYCQQYGSSPLTFGGGTKVEIK

SEQ ID NO: 22674 - protein, 107 aa, Artificial Sequence
  Synthetic construct
EIVMTQSPATLSVSPGERVTLSCRASQSVSSNLAWYQQKPGQAPRLLIFGSSTRAADIPARFSGSGSGTEFTLTISSLQSEDFAVYYCQQYNNWPLTFGGGTKVEIK

SEQ ID NO: 22675 - protein, 108 aa, Artificial Sequence
  Synthetic construct
EIVLTQSPGTLSLSPGERATLSCRASQSVSSNYLAWYQHKPGQAPRLLIYGASSRATGIPDRFSGGGSGTDFTLTISRLEPEDFAVYYCQQYGSSPQTFGQGTKLEIK

SEQ ID NO: 22676 - protein, 107 aa, Artificial Sequence
  Synthetic construct
DIQMTQSPSSLSASVGDRVTITCRASQSIRSYLNWYQQRPEKAPKLLIYAASSLQSGVPSRFSGGGSGTEFTLTISNLQPEDFATYYCQQSYSTPGTFGQGTKVEIK

SEQ ID NO: 22677 - protein, 109 aa, Artificial Sequence
  Synthetic construct
EIVLTQSPATLSVSPGERATLSCRASQSVSSFLAWYQQKPGQAPRLLIYDASNRATGVPARFSGSGSGTDFTLTISSLEPEDFAVYYCHHRFNWPPRLTFGGGTKVEIK

SEQ ID NO: 22678 - protein, 107 aa, Artificial Sequence
  Synthetic construct
EIVMTQSPATLSVSPGERATLSCRASQSVSSDLAWYQQKPGQAPRLLIYGASTRATGIPARFSGSGSGTEFTLTISSLQSEDFAVYYCQQYNNWPRTFGQGTKVEIK

SEQ ID NO: 22679 - protein, 108 aa, Artificial Sequence
  Synthetic construct
EIVLTQSPGTLSLSPGERASLSCRTSQAITSNYVAWYQQKPGQAPRLLIYGASSRAAGIPDRFSGSGSGTDFTLTISRLEPEDFAVYYCQHYHTSPITFGGGTKVDIK

SEQ ID NO: 22680 - protein, 106 aa, Artificial Sequence; identical to SEQ ID NO: 2667
  Synthetic construct

SEQ ID NO: 22681 - protein, 108 aa, Artificial Sequence
  Synthetic construct
ERVMTQSPATLSVSPGERATLSCRASQSVHSNLAWYQQKPGQAPRLLIYGASTRATGIPARFSGSGSGTEFTLTISSLQSEDFAVYYCQHYNGWPPFTFGQGTKLEIK

SEQ ID NO: 22682 - protein, 106 aa, Artificial Sequence
  Synthetic construct
SYELTQPPSLSVSPGQTASITCSGDKLGDKYVCWYQQKPGQSPVVVIYQDNKRPSGIPERFSGSNSGNTATLTISGTQAMDEADYYCQAWDSSTGGFGTGTKVTVL

SEQ ID NO: 22683 - protein, 109 aa, Artificial Sequence
  Synthetic construct
EIVLTQSPATLSLSPGERATLSCRASQSITNFLAWYQQKPGQAPRLLIYDASNRATGIPARFSGSGSGTDFTLTISSLEPEDFAVYYCQHRSNWPPALTFGGGTKVEIK

SEQ ID NO: 22684 - protein, 109 aa, Artificial Sequence
  Synthetic construct
SYELTQPPSVSVSPGQTARITCSGDALPKKYVYWYQQKSGQAPVLVIYEDSKRPSGIPERFSGSSSGTMATLTISGAQVDDEADYYCHSTDNSGNHRGVFGTGTKVTVL

SEQ ID NO: 22685 - protein, 109 aa, Artificial Sequence
  Synthetic construct
EIVLTQSPSTLSLSPGERAALSCRASQSVSNNYLAWYQQKPGQAPRLLMYGASTRATGIPERFSGSGSGTDFTLIISRVEPEDLAVYYCHQYGYSLPNTFGQGTKLEIK

SEQ ID NO: 22686 - protein, 108 aa, Artificial Sequence
  Synthetic construct
EIVMTQSPATLSVSPGERATLSCRASQTVSSNLAWYQQKPGQAPRLLIYGASTRATGIPARFSGSGSGTEFTLTISSLQSEDFAVYYCQQYNNWPPWTFGQGTKVEIK

SEQ ID NO: 22687 - protein, 108 aa, Artificial Sequence; identical to SEQ ID NO: 10978
  Synthetic construct

SEQ ID NO: 22688 - protein, 106 aa, Artificial Sequence
  Synthetic construct
SYELTQPLSLSVALGQTARITCGGNNIGGKNVHWYQQRPGQAPVLVIYRDGNRPSGIPERFSGSNSGNTATLTISRAQAGDEADYYCQVWDSSTAIFGGGTKLTVL

SEQ ID NO: 22689 - protein, 106 aa, Artificial Sequence; identical to SEQ ID NO: 2992
  Synthetic construct

SEQ ID NO: 22690 - protein, 110 aa, Artificial Sequence; identical to SEQ ID NO: 2975
  Synthetic construct

SEQ ID NO: 22691 - protein, 113 aa, Artificial Sequence
  Synthetic construct
DVVMTQSPLSLPVTLGQPASISCRSSQSLVYSDGNTYLSWFQQRPGQSPRRLIYKVSNRDSGVPDRFSGSGSGTDFTLKISRVEAEDVGIYYCMQATHWPPWTFGQGTKVEIN

SEQ ID NO: 22692 - protein, 110 aa, Artificial Sequence
  Synthetic construct
QSALTQPASVSGSPGQSITISCTGTSSDVGSYNIVSWYQQHPGKAPKLMIYEGSKRPSGVSNRFSGSKSGNTASLTISGLQAEDEADYYCCSYAGSSTFVFGGGTTLTVL

SEQ ID NO: 22693 - protein, 110 aa, Artificial Sequence
  Synthetic construct
QSVLTQPPSASGTPGQRVTISCSGSSSNIGINYVYWYQQLPGTAPKLLIYRNNQRPSGVPDRFSGSKSGTSASLAISGLRSEDEAEYHCAAWDDTLSGEVFGGGTKLIVL

SEQ ID NO: 22694 - protein, 109 aa, Artificial Sequence
  Synthetic construct
EIVLTQSPATLSLSPGDRATLSCRASQSVTNFLAWYQQRPGQAPRLLIYDASNRATGIPARFSGSGSGTDFTLTISSLEPEDFAVYYCQQRSNWPPKLTFGGGTKVEIK

SEQ ID NO: 22695 - protein, 108 aa, Artificial Sequence
  Synthetic construct
SSELTQDPAVSVALGQTVRITCQGDSLRSYYASWNQQKPGQAPVVVIYGKNNRPSGIPDRFSGSSSGNTASLTITGAQAEDEADYYCNSRDSSGNLVVFGGGTKLTVL

SEQ ID NO: 22696 - protein, 111 aa, Artificial Sequence
  Synthetic construct
QSVLTQPPSVSGAPGQRVTISCTGSSSNIGAGYDVHWYQQLPGTAPKLLIYGNSNRPSGVPDRFSGSKSGTAASLAITGLQAEDEADYYCQSYDSSLSGYVFATGTKVTVL

SEQ ID NO: 22697 - protein, 111 aa, Artificial Sequence
  Synthetic construct
QSVLTQPPSVSGAPGQRVTISCTGSSSNIGVGYDVHWYQQLPGAAPKLLIYGNSNRPSGVPDRFSGSISGTSASLAISGLQAEDEADYYCQSYDSSESGNVFGTGTKVTVL

SEQ ID NO: 22698 - protein, 105 aa, Artificial Sequence
  Synthetic construct
EIVLTQSPGTLSLSPGERATLSCRASQSVNSSYLAWYQQKPGQAPRLLIYGASSRATGIPDRFSGSGSGPDFTLTISRLEPEDFAVYYCQQYYGTFGQGTKVEIK

SEQ ID NO: 22699 - protein, 111 aa, Artificial Sequence
  Synthetic construct
QSVLTQPPSASGTPGQRVTISCSGSSSNIGSHYVNWYQHLPGTAPKLLIYESIQRPSGVPDRFSGSKSGTSASLAISGLQSEDEADYFCAAWDDSLNGHLLFGGGTKLTVL

SEQ ID NO: 22700 - protein, 110 aa, Artificial Sequence
  Synthetic construct
QSALTQPASVSGSPGQSITISCTGTSSDVGSYNLVSWYQQHPGKAPKLMIYEGSKRPSGVSNRFSGSKSGNTASLTISGLQAEDEADYYCCSYAGFSTYVFGTGTKVTVL

SEQ ID NO: 22701 - protein, 107 aa, Artificial Sequence
  Synthetic construct
DIQMTQSPSSLSASVGDRVTITCRASQSISSYLNWYQQKPGKAPKLLIYAASSLQSGVPSRFSGSGSGTDFTLTISSLQPEDFATYYCQQSFSTPYTFGQGTKLEIK

SEQ ID NO: 22702 - protein, 108 aa, Artificial Sequence
  Synthetic construct
EIVLTQSPATLSLSPGERATLSCGASQSVSSSFLAWYQQKPGLAPRLLIYDASNRATGIPDRFSGSGSGTDFTLTISRLEPEDFAVYYCQQYGSSPFTFGPGTKVDIK

SEQ ID NO: 22703 - protein, 107 aa, Artificial Sequence
  Synthetic construct
DIQMTQSPSSLSASVGDSVTITCRASQSISTYLNWYQQKPGKAPKLLIYAASSLQSGVPSRFSGSGSGTDFTLTISSLQPEDFATYYCQQSYSSPRTFGQGTKVEIK

SEQ ID NO: 22704 - protein, 112 aa, Artificial Sequence
  Synthetic construct
DIVMTQTPLSLSVTPGQPASLSCKSSQSLLHGDGKTYLYWYLQKPGQPPQLLIYEVSNRFSGVPDRFSGSGSGTDFTLRISRVEADDIGIYYCMQTIHPPYTFGQGTKLEIK

SEQ ID NO: 22705 - protein, 108 aa, Artificial Sequence
  Synthetic construct
EIVLTQSPGTLSLSPGERATLSCRASQSVSSIYLAWYQQKPGQAPRLLIYGASSRATGIPDRFSGSGSGTDFTLTISRLEPEDFAVYYCQQYGNSPWTFGQGTKVEIK

SEQ ID NO: 22706 - protein, 106 aa, Artificial Sequence
  Synthetic construct
SYELTQPPSVSVSPGQTARITCSGDALPKQYTYWYQQKPGQAPVLVIYKDTERPSGIPERFSGSSSGTTVTLTINGVQAEDEADYHCQSADGSTWVFGGGTKLTVL

SEQ ID NO: 22707 - protein, 106 aa, Artificial Sequence
  Synthetic construct
EIVLTQSPAILSLSPGERGTVSCRASQNVGSYLAWYQQRPGQAPRLLIYHASNRASGIPARFSGSGAGTDFTLTITSLEPEDVAVYYCQQRTDSVTFGGGTKVEIK

SEQ ID NO: 22708 - protein, 109 aa, Artificial Sequence; identical to SEQ ID NO: 3181
  Synthetic construct

SEQ ID NO: 22709 - protein, 107 aa, Artificial Sequence
  Synthetic construct
DIQVTQSPSTLSASVGDRVTITCRASQSINNWLAWYQQKPGKAPKLLIYKASNLESGVPSRFSGSGSGTEFTLTISSLQPDDFATYYCQHYNSHSGAFGQGTKVEIK

SEQ ID NO: 22710 - protein, 109 aa, Artificial Sequence
  Synthetic construct
SYELTQPPSVSVSPGQTARITCSGDALPKKYSYWYQQKSGQAPVLVISEDSKRPSGIPERFSGSSSGTMATLTISGAQVEDEADYYCYSTDSSYNHGGVFGGGTKLTVL

SEQ ID NO: 22711 - protein, 107 aa, Artificial Sequence; identical to SEQ ID NO: 11152
  Synthetic construct

SEQ ID NO: 22712 - protein, 112 aa, Artificial Sequence
  Synthetic construct
QLVLTQSPSASASLGASVKLTCTLSSGHSSYAIAWHQQQPEKGPRYLMKVKSDGSHSKGDGIPDRFSGSSSGAERYLTISSLLSEDEADYYCQTWGTGIHVVFGGGTKLTVL

SEQ ID NO: 22713 - protein, 108 aa, Artificial Sequence
  Synthetic construct
SYVLTQPPSVSVAPGKTARITCGGNNIGSKSVHWYQQKPGQAPVLVIYYDSDRPSGIPERFSGSNSGNTATLTISRVEAGDEADYYCQVWDSSTDHRMFGGGTKLTVL

SEQ ID NO: 22714 - protein, 106 aa, Artificial Sequence
  Synthetic construct
SYELTQPPSVSVSPGQTARITCSGDALPKKYAYWYQQKSGQAPVLVIYEDSKRPSGIPERFSGSSSGTMATLTISGAQVEDEAKYYCYSTVSSGKRFGGGTKLTVL

SEQ ID NO: 22715 - protein, 106 aa, Artificial Sequence
  Synthetic construct
DIQMTQSPSTLSASVGDRVTITCRASQSISSWLAWYQQKPGKAPRLLIYKASSLQSGVPSRFSGSGSGTEFTLTISSLQPDDFATYYCQQYNSYYTFGQGTKLEIK

SEQ ID NO: 22716 - protein, 106 aa, Artificial Sequence; identical to SEQ ID NO: 2609
  Synthetic construct

SEQ ID NO: 22717 - protein, 108 aa, Artificial Sequence; identical to SEQ ID NO: 22363
  Synthetic construct

SEQ ID NO: 22718 - protein, 106 aa, Artificial Sequence
  Synthetic construct
DIQMTQSPSSLSASVGDRVTITCRASQYISNYLNWYQQKPEKAPRLLIYAASSLQSGVPSRFSGSGSGTDFTLTISSLQPEDFATYFCQQSTSGFTFGPGTKVDIK

SEQ ID NO: 22719 - protein, 107 aa, Artificial Sequence; identical to SEQ ID NO: 3295
  Synthetic construct

SEQ ID NO: 22720 - protein, 107 aa, Artificial Sequence
  Synthetic construct
DIQMTQSPSFLSASVGDRVTITCRASQSISNFLNWYQQRPGKAPNLLIYTASSLQSGVPSRFSGTGSGSDFTLTISSLQPEDFATYYCQQTYSIPRTFGQGTKVEIG

SEQ ID NO: 22721 - protein, 107 aa, Artificial Sequence
  Synthetic construct
DIQLTQSPSFLSASVGDRVTFTCRASQGFSDYLAWYQEKPGKAPKLLIYAASTLQSGVPSRFSGSGSGTEFTLTISSLQPEDFATYYCQQLSGYPYTFGQGTKLEIK

SEQ ID NO: 22722 - protein, 108 aa, Artificial Sequence
  Synthetic construct
SYVLTQPPSVSVAPGKTARITCGGNNFGSKSVHWYQQKPGQAPVLVIYYDSDRPSGIPERFSGSNSGNTATLTISRVEAGDEADYYCQVWAGSRDLVVFGGGTKLTVL

SEQ ID NO: 22723 - protein, 110 aa, Artificial Sequence
  Synthetic construct
QSVLTQPPSVSAAPGQKVTISCSGSSSNIGKNYVSWYQQFPGTAPKLLIYENNKRASGIPDRFSGSKSGTSATLGITGLQTGDEADYYCETWDSSLSGGVFGGGTKLTVL

SEQ ID NO: 22724 - protein, 106 aa, Artificial Sequence
  Synthetic construct
EIVMTQSPATLSVSPGERATLSCRASQSVSSNLAWYQQKPGQAPRLLIYGASTRATGIPARFSGSGSGTEFTLTISSLQSEDFAVYYCQQYNNWRTFGQGTKVEIK

SEQ ID NO: 22725 - protein, 108 aa, Artificial Sequence; identical to SEQ ID NO: 22358
  Synthetic construct

SEQ ID NO: 22726 - protein, 106 aa, Artificial Sequence
  Synthetic construct
SYELTQPPSVSVSPGQTASIPCSGDNLGDKYACWYQQRPGQSPVLVIYQDTKRPSGIPERFSGSNSGNTATLTISGTQAMDEADYYCQAWDSSTVVFGGGTKLTVL

SEQ ID NO: 22727 - protein, 110 aa, Artificial Sequence
  Synthetic construct
QSVLTQPPSASGTPGQRVTISCSGGSSNIGINPVNWYQQLPGTAPKLLIYSNDQRPSGVPDRFSGSKSGTSASLAISGLQSDDETDYYCAAWDDSLNGWVFGGGTKLTVL

SEQ ID NO: 22728 - protein, 113 aa, Artificial Sequence
  Synthetic construct
DIVMTQSPDSLAVSLGGRATINCKSSQSVFYSTKNQNYLAWYQQKPRQPPKLLIYWSSVRESGVPERFSGSGSATDFTLTISSLQPEDVAVYYCQQYISVPFTFGPGTKVEIK

SEQ ID NO: 22729 - protein, 114 aa, Artificial Sequence
  Synthetic construct
DIVMTQSPDSLAVSLGERATINCKSSQSVLYNSNNKNYLAWYQQKPGQPPKLLIYWASTRESGVPDRFSGSGSGTDFTLTISSLQAEDVAVYYCQQHYSTPGYTFGQGTKLEIK

SEQ ID NO: 22730 - protein, 107 aa, Artificial Sequence
  Synthetic construct
EIVLTQSPDFQSVTPKEKVTITCRASQSIGSSLHWYQQKPDQSPKLLIKYASQSFSGVPSRFSGSGSGTDFTLTINSLEAEDAATYYCHQSSSLPWTFGQGTKVEIK

SEQ ID NO: 22731 - protein, 113 aa, Artificial Sequence
  Synthetic construct
DIVMTQSPDSLAVSLGERATINCKSSQSVLYSSNNKNYLAWYQQKPGQPPKLLIYWASTRESGVPDRFSGSGSGTDFTLTISSLQAEDVAVYYCQQYYSIPPTFGQGTKVEIK

SEQ ID NO: 22732 - protein, 110 aa, Artificial Sequence
  Synthetic construct
QSALTQPASVSGSPGQSITISCTGTTSDVGSYNLVSWYQQYPGKAPSLMIYEASKRPSGVSNRFSASKSGNTASLTISGLQGEDEADYYCCSYAGSSTWVFGGGTRLTVL

SEQ ID NO: 22733 - protein, 110 aa, Artificial Sequence
  Synthetic construct
QSALTQPPSASGSPGQSVTISCTGTSSDVGGYKYVSWYQQHPGKAPKLMIYEVSKRPSGVPDRFSGSKSGNTASLTVSGLQPEDEADYYCSSYAGSNNLVFGGGTKLTVL

SEQ ID NO: 22734 - protein, 105 aa, Artificial Sequence
  Synthetic construct
SYELTQPPSESVSPGQTASITCSGDKLGDKYVCWYQQKPGQSPVLVMYQDSKRPSGIPERFSGSNSGNTATLTISGTQAMDEADYYCQAWDSSVVFGGGTKLTVL

SEQ ID NO: 22735 - protein, 112 aa, Artificial Sequence
  Synthetic construct
DIVMIQSPLSLPVTPGEPASISCRSSQSLLYSNGYTYLNWYLQKPGQSPQLLIYLGSNRASGVPDRFSVSGSGTDFTLIISRVEAEDVGVYYCMQALQTPWTFGQGTKVEIK

SEQ ID NO: 22736 - protein, 107 aa, Artificial Sequence; identical to SEQ ID NO: 10912
  Synthetic construct

SEQ ID NO: 22737 - protein, 105 aa, Artificial Sequence; identical to SEQ ID NO: 22537
  Synthetic construct

SEQ ID NO: 22738 - protein, 108 aa, Artificial Sequence
  Synthetic construct
SYELTQPPSVSVSPGQTARITCSGDALPKKYAYWYQQKSGRAPVLVIYEDIKRPSGIPERFSGSSSGTMATLTISGAQVEDEADYYCYSTGSSGNHRVFGGGTKLTVL

SEQ ID NO: 22739 - protein, 110 aa, Artificial Sequence
  Synthetic construct
QSALTQPPSASGSPGQSVTISCTGASSDVGSYNYVSWYQQHPGKAPKLMIYEVSKRPSGVPDRFSGSKSGNTASLTVSGLQADDEADYYCSSYAGSNPLVFGGGTKLTVL

SEQ ID NO: 22740 - protein, 106 aa, Artificial Sequence; identical to SEQ ID NO: 22706
  Synthetic construct

SEQ ID NO: 22741 - protein, 110 aa, Artificial Sequence
  Synthetic construct
QSVLTQPPSVSAAPGQKVTISCSGTSSNIAYNYISWYQHLPGAAPKLLIYDNNQRPSGIPDRFSGSKSVTSATLAITGLQTGDEADYYCGTWDGSLSLFAFGTGTKVTVL

SEQ ID NO: 22742 - protein, 106 aa, Artificial Sequence
  Synthetic construct
SYELTQPPSVSVSPGQTASITCSGDKLGDKYACWYQQKAGQSPVLVIYQDSKRPSGIPERFSGSNSGNTATLTISGTQALDEADYYCQAWDRSTVVFGGGTKLTVQ

SEQ ID NO: 22743 - protein, 112 aa, Artificial Sequence
  Synthetic construct
DIVMTQTPLSLSVTPGQPASISCKSSQSLLHGDGKTYFYWYLQKPGQPPQLLIYEVSNRFSGVPDRFSGSGSGTDFTLKISRVEAEDVGVYYCMQSIQLPLTFGGGTKVEIK

SEQ ID NO: 22744 - protein, 112 aa, Artificial Sequence
  Synthetic construct
DVVVTQSPVSLPATPGEPASISCRASQSLLHRNGKHYLHWYLQRPGQSPQLLIYLGSNRASGVPDRFSGSGSGTVFSLKISRVEAEDVGIYYCMQALHFPYTFGQGTKLDIK

SEQ ID NO: 22745 - protein, 107 aa, Artificial Sequence; identical to SEQ ID NO: 3295
  Synthetic construct

SEQ ID NO: 22746 - protein, 111 aa, Artificial Sequence
  Synthetic construct
QSVLTQPPSVSGAPGQRVTISCTGSNSNIGAGYDVHWYQQLPGTAPKLLISVNSNRPSGVPDRFSGSKSDTSASLAISGLQAEDEADYYCQSYDSTLSALVFGGGTKLTVL

SEQ ID NO: 22747 - protein, 113 aa, Artificial Sequence
  Synthetic construct
DIVMTQSPDSLAVSLGERATINCKSSQSVLYSSNNKNYLAWYQQKAGQPPNLLIYWASTRESGVPDRISGSGSGTDFTLTISSLQAEDVAVYYCQQYYSTPYTFGQGTKLEIK

SEQ ID NO: 22748 - protein, 107 aa, Artificial Sequence
  Synthetic construct
AIQMTQSPSSLSASVGDRVTITCQASQDISNSLNWYQQKAGKAPKRLIYDASNLETGVPSRFSGGGSGTDFTFTISSLQPEDIATYYCQQYDNLPITFGQGTRLDTK

SEQ ID NO: 22749 - protein, 110 aa, Artificial Sequence
  Synthetic construct
QSVLTQPPSASGTPGQRVSISCSGSNSNIETNAVNWYQQLPGTAPKLLIYRDNQRPSGVPDRFSGSKSGTSASLAISGLQSEDEADYYCAAWDDRLNGPVFGGGTKLTVL

SEQ ID NO: 22750 - protein, 112 aa, Artificial Sequence
  Synthetic construct
DIVMTQFPLSLPVTPGEPASISCRSSQSLLHSNGYNYLDWYLQKPGQSPQLLIYLGSNRASGVPDRFSGSGSGTDFTLKISRVEAEDVGVYYCMQALQTPITFGQGTRLESK

SEQ ID NO: 22751 - protein, 109 aa, Artificial Sequence
  Synthetic construct
EIVLTQSPATLSLSPGERATLSCRASQSVSNFLAWYQQKPGQAPRLLIYDSSNRAAGIPARFSGSGSGTDFTLTISTLEPEDFAVYYCQQRSNWPPRSTFGGGTKVEIK

SEQ ID NO: 22752 - protein, 112 aa, Artificial Sequence
  Synthetic construct
DIVMTQSPDSLAVSLGERATINCKSSQSVLYNSSNKNYLAWYQQKPGQPPKLLIYWSSTRESGVPDRFSGSGSGTDFTLTISSLQAEDVAVYFCQQYYSAPTFGHGTRLEIK

SEQ ID NO: 22753 - protein, 110 aa, Artificial Sequence
  Synthetic construct
QSALTQPPSVSGSPGQSVTISCTGTSSDVGTYNRVSWYQQSPGTAPKLIIYEVTHRPSGVPDRFSGSKSGNTASLTISGLQAEDEADYYCSSYSSSASYLFATGTKVTVL

SEQ ID NO: 22754 - protein, 110 aa, Artificial Sequence; identical to SEQ ID NO: 22741
  Synthetic construct

SEQ ID NO: 22755 - protein, 112 aa, Artificial Sequence
  Synthetic construct
DIVMTQTPLSLSVTSGQPASISCKSSQSLLHSDGKTYLYWYLQKAGQPPQLLIYELSDRFSGVPDRFSGSGSGTDFTLKISRVEAEDVGVYYCMQTIQLPYTFGQGTKLEIK

SEQ ID NO: 22756 - protein, 106 aa, Artificial Sequence
  Synthetic construct
SYELTQPPSVSVSPGQTASITCSGDKLGAKNACWYQRKPGQSPVVVIYQGTKRPAGIPERFSGSNSGNTATLTISGTQAVDEADYYCQAWDRSTVVFGGGTKLTVL

SEQ ID NO: 22757 - protein, 109 aa, Artificial Sequence
  Synthetic construct
AIVLTQSPATLSLSPGERATLSCRTSQSVRISLAWYQQKPGQAPRLLIYSTSNRATGIPVRFSGSGSGTDFTLTISSLEPEDFAVYYCQQRSNGPPTWTFGQGTKVEIK

SEQ ID NO: 22758 - protein, 110 aa, Artificial Sequence
  Synthetic construct
QSALTQPPSASGSPGQSVTISCTATSSDVGNYNYVSWYQHHPGKAPKLLIYEVSKRPSGVPDRFSGSKSGNTASLTVSGLQAEDEADYYCSSYAGSNPLVFGGGTKLTVL

SEQ ID NO: 22759 - protein, 109 aa, Artificial Sequence
  Synthetic construct
EIVLTQSPATLSLSPGERATLSCRASQSVSSFLAWYQQKPGQAPRLLIYDASNRATGIPARFSGSGSGTDFTLTISSLEPEDFAVYYCQQRSNWPPIFTFGPGTKVEIK

SEQ ID NO: 22760 - protein, 107 aa, Artificial Sequence
  Synthetic construct
DIQMTQSPSTLSASVGDRVTITCRASQNIGSWLAWYQQKPGKAPKLLIYKASSLESGVPSRFSGSGSGTEFTLTISSLQPDDFAAFYCQQYDSYPLTFGGGTKVEIK

SEQ ID NO: 22761 - protein, 110 aa, Artificial Sequence
  Synthetic construct
QSVLTQPPSVSGAPGQRVTISCTGSSSKIGAGYDVHWYQQLPGTAPILLIYGNSNRPSGVPDRFSASKSGTSASLAITGLQAEDEADYYCQSYDSSLSYVFGSGTKVTVL

SEQ ID NO: 22762 - protein, 109 aa, Artificial Sequence
  Synthetic construct
QTVVTQEPSLTVSPGGTVTLTCASSSGAVTSAAYPNWFQQKPGQPPKTLIYSINNRHSWTPARFSGSLLGGKAALTLANVQPEDEADYFCLLHYAGAWVFGGGTKLTVL

SEQ ID NO: 22763 - protein, 108 aa, Artificial Sequence
  Synthetic construct
EIVLTQSPGTLSLSPGERATLSCRASQSVSSSSLAWYQQKPGQAPRLLMYGASTRATGIPDKFSGSGSGTDFTLTISRLEPEDFAVYYCHQYGRSQGTFGQGTKLEIK

SEQ ID NO: 22764 - protein, 108 aa, Artificial Sequence
  Synthetic construct
EIVLTQSPATLSLSPGERATLSCRASQSVSSYLAWYQQKPGQAPRLLIYDASNRATGIPVRFSGSGAGTDFTLTISSLEPEDSAVYYCQQRSNWPPFTFGPGTIVDIK

SEQ ID NO: 22765 - protein, 110 aa, Artificial Sequence
  Synthetic construct
QSVLTQPPSVSAAPGQKVTISCSGSSSNFGNNYVSWYQQLPRAAPKLLIYDNNKRPSGIPDRFSGSKSGTSATLGITGLQTGDEADYYCGTWDTSLSLYVFGTGTKVTVL

SEQ ID NO: 22766 - protein, 108 aa, Artificial Sequence
  Synthetic construct
EKVMTQSPATLSVSPGERATLSCRASQSVSSNLAWYQQKPGQAPRLLIYGASTRATGIPARFSGSGSGTEFTLTISSLQSEDFAVYYCQQYNNWPPWTFGQGTKVEIK

SEQ ID NO: 22767 - protein, 107 aa, Artificial Sequence
  Synthetic construct
DIQMTQSPPSLSASVGDRVTITCRASQGIRNDLGWYQQKPGKAPKRLIYAASSLQSGVPSRFSGSGSGTEFTLTISSLQPEDFATYYCLQHNSYPLTFGGGTKVEIK

SEQ ID NO: 22768 - protein, 106 aa, Artificial Sequence
  Synthetic construct
SYELTQPPSVSVSPGQTASITCSGDKLGNEDTCWYQQRPGQSPVLVIYQNTKRPSGIPERFSGSNSGNTATLTISGTQAMDEADYYCQAWDSNTYVFGPGTKVTVL

SEQ ID NO: 22769 - protein, 112 aa, Artificial Sequence; identical to SEQ ID NO: 10888
  Synthetic construct

SEQ ID NO: 22770 - protein, 107 aa, Artificial Sequence
  Synthetic construct
DIQMTQSPSTLSASVGDRVTITCRASQSISSWLAWYQQKPGKAPKLLIYKASSLESGVPSRFSGSGSGTEFTLTISSLQPDDFATYYCQQYYSYSGTFGQGTKLEIK

SEQ ID NO: 22771 - protein, 106 aa, Artificial Sequence
  Synthetic construct
DIQMTQSPSSLSASVGDRVTITCRASQSINSYLNWYQQKPGKAPKLLIYAASSLQSGVPSRFTGSGSGTDFTLTISSLQPEDSATYYCQQNYSWYTFGQGTKLEIK

SEQ ID NO: 22772 - protein, 105 aa, Artificial Sequence
  Synthetic construct
SYELTQPPSVSVSPGQTASITCSGDKLGDKYACWYQQKPGQSPLMVIYQDNKRPSGIPERFSGSNSGNTATLTISGTQAMDEADYYCQAWDSSVVFGGGTKLTVL

SEQ ID NO: 22773 - protein, 107 aa, Artificial Sequence
  Synthetic construct
SYELTQPPSVSVSPGQTARITCSGDALPKKYAYWYQQKSGQAPVLVICEDSKRPSGIPERFSGSTSGTLATLTISGAQVEDEADYYCYSTDSSGKGVFGGGTKLTVL

SEQ ID NO: 22774 - protein, 108 aa, Artificial Sequence
  Synthetic construct
EMVMTQSPATLSVSPGERATLSCRASQSVGSNLAWYQQRPGQAPRLLIYAATTRATGIPARFSGSGSGTEFTLTISSLQSEDFALYYCQQYNYWPPITFGQGTRLEIK

SEQ ID NO: 22775 - protein, 108 aa, Artificial Sequence
  Synthetic construct
SYVLTQPPSVSVAPGKTARITCGGDNIGSKNVHWYQQKPGQAPVLVIFYDSDRPSGVPERFSGSNSGNTATLTISRVEAGDEADYYCQVWDNTSDQGVFGGGTKLTVL

SEQ ID NO: 22776 - protein, 109 aa, Artificial Sequence
  Synthetic construct
EIVLTQSPATLSLSPGERATLSCRASQSVSSYLAWYQQKPGQAPRLLIYDASNRATGIPARFSGSGSGTDFTLTISSLEPEDFAVYYCQQRSNWPPRITFGPGTKVDIK

SEQ ID NO: 22777 - protein, 108 aa, Artificial Sequence
  Synthetic construct
EIVMTQSPATLSVSPGDRATLSCRASQSVSSNLAWYQQKPGQAPRLLIYGASTRATGIPARFSGSGSGTDFTLTISSLQSEDFAVYYCQQYNNWPPYTFGQGTKLEIK

SEQ ID NO: 22778 - protein, 109 aa, Artificial Sequence
  Synthetic construct
QSALTQPASVSGSPGQSITISCTAASSDVGAYNYVSWFQQHPGKAPKLMIYDVSNRPSGVSSRFSGSKSGNTASLTISGLQAEDEAAYYCSSYTTSSVVFGGGTKLTVL

SEQ ID NO: 22779 - protein, 113 aa, Artificial Sequence
  Synthetic construct
DIVMTQSPDSLAVSLGERATINCKSSQSVLYSSNNKNYLAWYQQKPGQPPKLLIYWASTRESGVPDRFSGSGSGTDFTLTITSLQAEDVAVYYCQQYYSTPNTFGQGTKLEIK

SEQ ID NO: 22780 - protein, 107 aa, Artificial Sequence
  Synthetic construct
DIQMTQSPSSLSASVGDRVTITCRASQGIENDLGWYQQKPGKAPKRLIYAASSLQSGVPSRFSGSGSGTEFTLTISRLQPEDFATYYCLQHNSYPLTFGGGTKVEIK

SEQ ID NO: 22781 - protein, 105 aa, Artificial Sequence
  Synthetic construct
SYELTQPLSVSVALGQTARISCGGNNFGGKNVHWYQRKPGQAPVLVIYRNNNRPSGIPERFSGSNSGNTATLTISRAQAGDEADYYCQVWDSSVVFGGGTKLTVL

SEQ ID NO: 22782 - protein, 108 aa, Artificial Sequence
  Synthetic construct
SYELTQPPSVSVSPGQTARITCSGDALPKKYSYWYQQKSGQAPVLVIYEDSKRPSGIPERFSGSSSGTMATLTISGAQVEDEADYYCFSTDSSGNHWVFGGGTKLTVL

SEQ ID NO: 22783 - protein, 107 aa, Artificial Sequence
  Synthetic construct
DIQMTQSPSSLSASVGDRVTITCRASQGIRNDLGWYQQKPGKAPKRLIYAASSLQSGVPSRFSGSGSGTEFTLTISSLQPEDFATYYCLQYNSYPLTFGGGTKVEIK

SEQ ID NO: 22784 - protein, 108 aa, Artificial Sequence
  Synthetic construct
EIVLTQSPGTLSLSPGERATLSCRASQSVGSIYLAWFQQKPGQAPRLLIYAASSRATGIPDRFSGRGSGTDFTLTISRLEPEDFAVYYCQHYGSSPWTFGQGTKVEIK

SEQ ID NO: 22785 - protein, 108 aa, Artificial Sequence
  Synthetic construct
DIQMTQSPYSLSASVGDRVTITCRASQTISSFLNWYQKKPGKAPKLLIHAASSLQSGVPSRFSGSGSGTDFTLTISSLQPEDFATYYCQQSYSTPQLTFGGGTKVEIK

SEQ ID NO: 22786 - protein, 110 aa, Artificial Sequence
  Synthetic construct
QSALTQPASVSGSPGQSITISCTGTSSDVGGYNYVSWYQQHPGKAPKLMIYDVNNRPSGASNRFSGSKSDNTASLTISGLQAEDEADYYCSSFTSSSTYVFGTGTKVTVL

SEQ ID NO: 22787 - protein, 108 aa, Artificial Sequence
  Synthetic construct
DIQMTQSPSSLSAFVGDRVTITCRASQSIRSHLNWYQQKPGKAPKLLIYAASSLQSGVPSRFSGSGSGTDFTLTISSLQPEDFATYYCQQSYSTPLFTFGQGTKLEIK

SEQ ID NO: 22788 - protein, 113 aa, Artificial Sequence
  Synthetic construct
DIVMTQSPDSLAVSLGERATINCKSSQSVLHSSNNKNYLAWYQQKPGQPPKLLIYWASTRESGVPDRFSGSGSGTDFSLTISTLQAEDVAVYSCHQYYNSPPTFGQGTKVEIK

SEQ ID NO: 22789 - protein, 106 aa, Artificial Sequence
  Synthetic construct
EIVLTQSPATLSLSPGERATLSCRASQSVSSDLAWYQQKPGQAPRLLIYDASNRPTDIPARFSGSGSGTDFTLTISSLEPEDFAVYYCQQRSNWLTFGGGTKVEIK

SEQ ID NO: 22790 - protein, 110 aa, Artificial Sequence
  Synthetic construct
QSVLTQPPSVSAAPGQKVTISCSGSTSNIGNTYISWYQHLPGAAPKLLIYDNNQRPSGIPDRFSGSKSGTSATLAITGLQTGDEADYYCGTWDSSLSLFAFGTGTKVTVL

SEQ ID NO: 22791 - protein, 110 aa, Artificial Sequence; identical to SEQ ID NO: 22388
  Synthetic construct

SEQ ID NO: 22792 - protein, 107 aa, Artificial Sequence
  Synthetic construct
DIQMTQSPSSLSASVGDRVTITCRASQGIRNDLGWFHQKPGKAPRRLIYAASSLQSGVPSRFSGSGSGTEFTLTISSLQPEDFATYYCLQYNSYPLTFGGGTKVEIK

SEQ ID NO: 22793 - protein, 107 aa, Artificial Sequence
  Synthetic construct
AIMLTQSPGALSLSPGESATLTCRASQSVPGRNLAWYQQKPGQAPRLLISGASRRASGIPDRFSGRGSGTDFTLTISSLEPGDFAMYYCHQYGNSLSFGGGTKVDLK

SEQ ID NO: 22794 - protein, 107 aa, Artificial Sequence; identical to SEQ ID NO: 2588
  Synthetic construct

SEQ ID NO: 22795 - protein, 106 aa, Artificial Sequence
  Synthetic construct
SYELTQPPSVSVSPGQTASITCSGDKLGDKNPWWYQQKPGQSPVLVLYQDNKRPSGIPDRFSGSISGNTASLTIRGTHVIDEADYYCQAWVGSTWVFGGGTKLTVL

SEQ ID NO: 22796 - protein, 111 aa, Artificial Sequence
  Synthetic construct
QSVLTQPPSVSAAPGQKVTISCSGSSSNIGNNYVSWYQQLPGTAPKLLIYDNNKRPSGIPDRFSGTKSGTSATLAITGLQTGDEADYYCGTWHSSLSAGGVFGGGTKLTVL

SEQ ID NO: 22797 - protein, 107 aa, Artificial Sequence
  Synthetic construct
DIQMTQSPSSLSASVGDRVTITCRASQGISNYLAWYQQRPGKVPKLLIYAASTLQSGVPSRFSGSGSGTDFTLTISSLQPEDVATYYCQKYNSVPLTFGGGTKVEIK

SEQ ID NO: 22798 - protein, 111 aa, Artificial Sequence
  Synthetic construct
QSALTQPASVSGSPGQSITISCTGTSSDVGNYNLVSWYQQHPGKAPKFMIYDGSKRPSGVSNRFSGSKSGNTASLTISGLQAEDEADYYCCSYANSSTQWVFGGGTKLTVL

SEQ ID NO: 22799 - protein, 106 aa, Artificial Sequence
  Synthetic construct
SYELTQPPSVSVSPGQTARITCSGDALPKKYAYWYQQKSGQAPVLVIYEDTIRPSGIPERFSGSSSGTMATLTISGAQVEDEADYYCYSTDRSGNRFGGGTKLTVL

SEQ ID NO: 22800 - protein, 113 aa, Artificial Sequence
  Synthetic construct
DIVMTQSPDSLAVSLGERATINCKSSQSVLHSSNNRNCLAWYQQKPGQPPKLLIYWASTRESGVPDRFSGSGSGTDFTLAISSLQAEDVAVYFCQQYYSSPQTFGQGTKVEIK

SEQ ID NO: 22801 - protein, 108 aa, Artificial Sequence
  Synthetic construct
SYELTQPPSVSVSPGQTARITCSGDALPRKYAYWYQQKSGQAPVLVIYEDSKRPSGIPERFSGSSSGTMATLTISGAQVEDEADYYCYSTDSSGNRGVFGGGTRLTVL

SEQ ID NO: 22802 - protein, 108 aa, Artificial Sequence
  Synthetic construct
DIVLTQSPGTLSLSPGERATLSCRASQTFSSSYVAWYQQKTGQAPRLLIYRASSRATGIPDRFSGSASGTDFTLTISRLEPEDFAVYYCQQYDSSPYTFGQGTKLEIK

SEQ ID NO: 22803 - protein, 108 aa, Artificial Sequence
  Synthetic construct
SYVLTQPPSVSVAPGKTANISCEGANIGGKSVHWYQQKAGQAPIQVISYDADRPSGIPDRISGSNSGNTATLTISKVEAGDEADYYCQVWDSGRDHVVFGGGTKLSVL

SEQ ID NO: 22804 - protein, 110 aa, Artificial Sequence
  Synthetic construct
QSVLTQPPSASGTPGQRVTISCSGSSSNIGSSIVNWFQQLPGTAPKLLIYSNDQRPSGVPDRFSGSKSGTSASLAISGLQSEDEADYYCATWDDSLNGYVFGTGTKVTVL

SEQ ID NO: 22805 - protein, 107 aa, Artificial Sequence
  Synthetic construct
DIQMTQSPSSLSASVGDRVTITCRASQGISNYLAWFQQKPGKAPKSLIYAASSLQSGVPSKFSGSGSGTDFTLTISSLQPEDSATYYCQQYNSYPPTFGQGTRLEIK

SEQ ID NO: 22806 - protein, 106 aa, Artificial Sequence
  Synthetic construct
SYELTQPPSVSVSPGQTASITCSGNNLGDKYACWYQQKPGQSPVLVIYQDTKRPSGIPERFSGSNSGNTATLTISGTQAMDEADYYCQAWDSSTVVFGGGTKLTVL

SEQ ID NO: 22807 - protein, 110 aa, Artificial Sequence
  Synthetic construct
QSVLTQPPSVSGAPGQRVTISCTGTSSNLGAGSDVHWYQQLPRTAPKLLIYVNSNRPSGVPDRFSGSKSGTSASLAITGLQPEDEADYYCQSYDSSLRGVFGGGTKLTVL

SEQ ID NO: 22808 - protein, 111 aa, Artificial Sequence
  Synthetic construct
QSVLTQPPSVSGAPGQRVTISCTGSSSNIGAGYKVHWYQQLPGTAPKLLIYDNSDRPSGVPDRFSGSKSGTSASLAITGLQAEDEADYHCQTYDSSLRGYVFGTGTKVTVL

SEQ ID NO: 22809 - protein, 107 aa, Artificial Sequence
  Synthetic construct
SYELTQPPSVSVSPGQTASITCSGDKLGDKYACWYQQKPGQSPVLVIYEDSKRPSGISERFSGSNSGNTATLTISGTQAMDEADYYCQAWDISTGGVFGTGTKVTVL

SEQ ID NO: 22810 - protein, 107 aa, Artificial Sequence
  Synthetic construct
DIQMTQSPSSLSASVGDRVTITCRASQSISSYLNWYQQKPGKAPKLLIYAASSLQSGVPSRFSGSGSGTDFTLTISSLQPEDFATYYCQQSYSTPFTFGPGTKVDIK

SEQ ID NO: 22811 - protein, 109 aa, Artificial Sequence
  Synthetic construct
EIVLTQSPATLSLSPGDRATLSCRASQSISSYLVWYQQKPGQAPRLLIYDASNRATGIPARFSGSGSGTDFTLTISSLEPEDFAVYYCQQRSNWPPRYTFGQGTKLEIK

SEQ ID NO: 22812 - protein, 110 aa, Artificial Sequence
  Synthetic construct
QSVLTQPPSVSAAPGQKVTISCSGSSSNIGYNYVSWYQQLPGTAPKLLIYDNNKRPSGIPDRFSGSKSGTSATLGITGLQTGDEADYYCGTWDSSLSAVVFGGGTKLTVL

SEQ ID NO: 22813 - protein, 111 aa, Artificial Sequence
  Synthetic construct
QSVLTQPPAVSGAPGQRVTISCTGSGSNIGVGYDVHWYQQLPGTAPKLLIYGNSNRPSGVPDRFSGSKSGTSASLAISGLQAEDEADYYCQSYDSSLSGNVFGTGTKVTVL

SEQ ID NO: 22814 - protein, 111 aa, Artificial Sequence
  Synthetic construct
DIVVTQTPLSLSVTPGQPASISCKSSQSLLHGDGKTYLYWYLQKPGQPPQLLMYEVSNRFSGVPDRFSGSGSGTDFTLKISRVEAEDVGVYYCMGSTQFVTFGGGTKVEIK

SEQ ID NO: 22815 - protein, 109 aa, Artificial Sequence
  Synthetic construct
EIVLTQSPGTLSLSPGERATLSCRASQSVSSNYLAWYQQKPGQAPRLLIYGASSRATGIPDRFSGSGSGTDFTLTISRLEPEDFAVYYCQQYGSSPGATFGPGTKVDIK

SEQ ID NO: 22816 - protein, 110 aa, Artificial Sequence
  Synthetic construct
SSELTQDPAVSVALGQTVRITCQGDSLRTYSATWYQQKPGQAPLLVIYGKNNRPSGIPDRFSGSNSGNTASLTITGTQAEDEADYFCKSRDSSVSHLGWVFGGGTKLTVL

SEQ ID NO: 22817 - protein, 110 aa, Artificial Sequence
  Synthetic construct
QSALTQPASVSGSPGQSITISCTETSSDVGGYDYVSWYQQHPGKAPKLLIYDVSNRPSGVSYRFSGSKSGNTASLTISGLQAEDEADYYCSSYTSSSPFVFGTGTKVTVL

SEQ ID NO: 22818 - protein, 107 aa, Artificial Sequence
  Synthetic construct
SYELTQPPSVSVSPGQTARITCSGDALPKKYAYWYQQKSGQAPVVVIYEDNKRPSGIPERFSGSSSGTMATLTISGAQVEDEADYYCYSTDRSGKGVFGGGTKLTVL

SEQ ID NO: 22819 - protein, 111 aa, Artificial Sequence
  Synthetic construct
QSVLTQPPSVSGAPGQRVTISCTGTSSNIGAGYDVHWYQQLPGIAPKLLIYGNNNRPSGVPDRFSGSESGTSASLAISGLQAEDEADYYCQSYDSSLSGAVFGGGTKLTVL

SEQ ID NO: 22820 - protein, 109 aa, Artificial Sequence
  Synthetic construct
SYELTQPPSVSVSPGQTARITCSGDALPKKYAYWYQQKSGQAPVLVIYEDNRRPSGIPERFSGSSSGTLATLTISGARVDDEADYYCYSTDNSANPRGVFGGGTKLTVL

SEQ ID NO: 22821 - protein, 109 aa, Artificial Sequence
  Synthetic construct
QSVVTQEPSLTVSPGGTVTLTCGSSTGAVTSGHYPYWFQQKPGQAPRTLIYDTSNKHSRTPARFSGSLLGGKAALTLSGAQPEDEAEYYCLLFYSGARVFGGGTKLTVL

SEQ ID NO: 22822 - protein, 111 aa, Artificial Sequence
  Synthetic construct
DIVMTQTPLSLSVTPGQPASISCKSGQSLLHSDGKTYLYWYLQRPGQPPQLLIYEAYNRFSGVPDRFSGSGSGTDFTLKISRVEAEDVGVYYCMQSMQLLFFGQGTKLEIK

SEQ ID NO: 22823 - protein, 109 aa, Artificial Sequence
  Synthetic construct
EIVLTQSPATLSLSPGERATLSCRASQSVSSFLAWYQQKPGQAPRLLIYDASNRATGIPARFSGSGSGTDFTLTISSLEPEDFAVYYCQYRSNWPPRFTFGPGTKVDIK

SEQ ID NO: 22824 - protein, 107 aa, Artificial Sequence
  Synthetic construct
DIQMTQSPSSLSASVGDRVTITCRASQSISTYLHWYQQKPGKAPKLLIYAASTLQSGVPSRFSGSGSGTDFTLTISSLQPEDFATYYCQQSYSNPRTFGPGTKVDIK

SEQ ID NO: 22825 - protein, 109 aa, Artificial Sequence
  Synthetic construct
EIVLTQSPGTLSLSPGERATLSCRASQSVSSTYLAWYQQKPGQAPRLLIYGASSRATGIPDRFSGSGSGTDFTLTISRLEPEDFAVYFCQQYGSSPVYSFGQGTKLEIK

SEQ ID NO: 22826 - protein, 112 aa, Artificial Sequence
  Synthetic construct
DIVMTQTPLSLSVTRGQPASISCKSSQSLLHSDGKTYLYWYLQKPGQPPQLLIYELSDRFSGVPDRFSGSGSGTDFTLKISRVEAEDVGVYYCMQSIQPPYTFGQGTKLEIK

SEQ ID NO: 22827 - protein, 106 aa, Artificial Sequence
  Synthetic construct
DTQMTQSPSSLSASVGDRVTISCQTSHDISIYLNWYQQKPGKPPKLLIYDASNLQPGAPSRFSGSGSGTDFTFTISSLQPEDVATYYCQHYDDLPRFGPGTKVDIK

SEQ ID NO: 22828 - protein, 107 aa, Artificial Sequence
  Synthetic construct
EIVLTQSPATLSVSPGDRAALSCRASHSVRTNLAWYQQRPGQPPRLLVYGASTRATGVPGRFSGSGSGTEFTLAINGLQSEDFAAYYCQQFDDWPLTFGQGTKVEIQ

SEQ ID NO: 22829 - protein, 107 aa, Artificial Sequence
  Synthetic construct
DIQMTQSPSSLAASVGDRVTITCRASQSISSYINWYHQKPGKAPKLLIYAASTLQSGVPSRFSGSGSGTDFTLTISSLQPEDFATYYCQQSYSTPPTFGQGTKVEII

SEQ ID NO: 22830 - protein, 107 aa, Artificial Sequence
  Synthetic construct
DIQMTQSPSTLSASVGDRVTITCRASQSISSWLAWFQQKPGKAPKLLIYKASSLESGVPSRFSGSGSGTEFTLTISSLQPDDFATYYCQQYNSYSYTFGQGTKLEIK

SEQ ID NO: 22831 - protein, 107 aa, Artificial Sequence
  Synthetic construct
DIQMTQSPSSLSASVGDRVTITCRASQSISSYLNWYQQKPGKAPKLLIYAASSLQSGVPSRFSGSGSGTDFILTISSLQPEDFATYYCQESYSTPRTFGQGTKVEIK

SEQ ID NO: 22832 - protein, 110 aa, Artificial Sequence
  Synthetic construct
QSVLTQPPSVSAAPGQRVTISCSGSSSNIGNNYVAWYQQLPGTAPKLLIYENNKRPSGIPDRFSGSKSGTSATLGITGLQTGDEADYYCGTWDTSLDAGVLGGGTKLTVL

SEQ ID NO: 22833 - protein, 111 aa, Artificial Sequence
  Synthetic construct
QSVLTQPPSVSAAPGQKVTISCSGSSSNIGNNYVSWYQQLPGTAPKLLIYDNNKRPSGIPDRFSGTKSGTSATLGITGLQTGDEADYYCGTWHSSLSAGGVFGGGTKLTVL

SEQ ID NO: 22834 - protein, 110 aa, Artificial Sequence
  Synthetic construct
QSVLTQPPSVSGAPGQRVTISCTGSSSNIGAGYDVHWYQQLPGKAPKLLIYNNINRPSGVPDRFSGSKSGTSASLAITGLQAEDEADYYCQSYDNSLKVVFGGGTKLTVL

SEQ ID NO: 22835 - protein, 113 aa, Artificial Sequence
  Synthetic construct
DIVMTQSPDSLAVSLGERATINCKSSQSVLYSSINKDYLAWYQQKPGQPPKLLIYWASTRESGVPDRFSGSGSGTDFTLTISSLQAEDVAVYYCQQYYSTPRTFGQGTKVEIK

SEQ ID NO: 22836 - protein, 107 aa, Artificial Sequence; identical to SEQ ID NO: 11365
  Synthetic construct

SEQ ID NO: 22837 - protein, 108 aa, Artificial Sequence; identical to SEQ ID NO: 2515
  Synthetic construct

SEQ ID NO: 22838 - protein, 106 aa, Artificial Sequence
  Synthetic construct
DIQMTQSPSSLSASVGDRVTITCQASQDINKYLNWYQQKPGKAPKVLIYDASNLETGVPSRFSGSGSGTDFTLTISNLQPEDIATYYCQQYANLYTFGQGTKLEIK

SEQ ID NO: 22839 - protein, 108 aa, Artificial Sequence; identical to SEQ ID NO: 10882
  Synthetic construct

SEQ ID NO: 22840 - protein, 108 aa, Artificial Sequence
  Synthetic construct
SSELTQDPAVSVALGQTVRITCQGDSLRTYYANWYQQKPGQAPLLVIYGKSSRPSGIPDRFSGSTSGNAASLTITGAQAEDEADYYCNSRDSTGNHQVFGGGTKLTVL

SEQ ID NO: 22841 - protein, 112 aa, Artificial Sequence
  Synthetic construct
NFMLTQPHSVSESPGKTVTISCTGSSGNIASNYVQWYQQRPGSAPTTVIYEDNQRPSGVPDRFSGSIDSSSNSASLTISGLKTEDEADYYCQSFDSTNPHVIFGGGTKLTVL

SEQ ID NO: 22842 - protein, 107 aa, Artificial Sequence
  Synthetic construct
SYELTQPPSVSVSPGQTARITCSGDALPKKYAYWYHQKSGQAPVLVIYEDSKRPSGIPERFSGSSSGTMATLTISGAQVDDEADYYCYSTDSSGKGVFGGGTKLTVL

SEQ ID NO: 22843 - protein, 109 aa, Artificial Sequence
  Synthetic construct
SYELTQPPSVSVSPGQTARITCSGDALSKKYAYWYQQKSGQAPVLVIFEDNKRPSGIPERFSGSSSGTMATLTISGAQVEDEADFYCYSTDSSDNHKRVFGGGTKLTVL

SEQ ID NO: 22844 - protein, 109 aa, Artificial Sequence; identical to SEQ ID NO: 22652
  Synthetic construct

SEQ ID NO: 22845 - protein, 107 aa, Artificial Sequence
  Synthetic construct
EIVMTQSPATLSASPGERATLSCRASQSVSSNLGWYQQKPGQAPRLLIYGASTRVTGVPARFSGSGSGTEFTLTISSLQSEDFAVYYCQQYNNWPYTFGQGTMLEIK

SEQ ID NO: 22846 - protein, 110 aa, Artificial Sequence
  Synthetic construct
QSALTQPASVSGSPGQSITISCSGASSDLSGYNYVSWYQQHPGKAPKVMIYDVTNRPSGVSNRFSGSKSGDTASLTISGLQAEDEADYYCSSHTSSNIWVFGGGTKVTVL

SEQ ID NO: 22847 - protein, 115 aa, Artificial Sequence
  Synthetic construct
QGVLTQPPSLSASPGASASLTCTLRSDIDVGTFRIYWYQQKPGSPPQYLLRYLSDSNRHHGSGVPSRFSGSKDASANAGILLISGVQSEDEADYYCMTWHSGGLVFGGGTKVTVL

SEQ ID NO: 22848 - protein, 107 aa, Artificial Sequence
  Synthetic construct
DIQLTQSPSFLSASVGDRVTITCRASQGISSYLAWYQQKPGKAPKLLIYAASTLQSGVPSRFSGSGSGTEFTLTISSLQPEDFATYYCQQLNSYPRTFGQGTKVEIK

SEQ ID NO: 22849 - protein, 112 aa, Artificial Sequence
  Synthetic construct
DIVMTQSPLSLPVTPGEPASISCRSSQSLLHSNGYNYLDWYLQKPGQSPQLLIYLGSNRASGVPDRFSGSGSGTDFTLKITRVEDEDVGVYYCMQALETPWTFGQGTKVEIK

SEQ ID NO: 22850 - protein, 109 aa, Artificial Sequence
  Synthetic construct
QSALTQPASVSGSPGQSITISCTATSSDVGAYNYVSWYQQHPGKAPKLMIYDVSNRPSGVSNRFSGSKSGNTASLTISGLRAEDEADYYCGSYTSSSVVFGGGTKLTVL

SEQ ID NO: 22851 - protein, 108 aa, Artificial Sequence
  Synthetic construct
DIQMTQSPSSLSASVGDRITITCRASQSISSYLNWYQHKPGKAPKLLIYAASSLQSGVPSRFSGSGSGTDFTLTISGLQPEDFATYYCQQSYSTPPWTFGQGTKVEIK

SEQ ID NO: 22852 - protein, 110 aa, Artificial Sequence
  Synthetic construct
QAVLTQPPSASGTPGQRVTISCSGSSSNIGSNSVNWYQQLPGTAPKLLIYSNNQRPSGVPDRFSGSKSGSSASLAISGLQSEDEADYYCATWDDSLNGWVFGGGSKLTVL

SEQ ID NO: 22853 - protein, 110 aa, Artificial Sequence
  Synthetic construct
QSVMTQPPSVSAAPGQKVTISCSGSSSNIGNNYVSWYHQLPGTAPKLLIYDNNKRPSGIPDRFSGSKSGTSATLGITGLQTGDEADYYCGAWDSSLSAGVFGGGTKLTVL

SEQ ID NO: 22854 - protein, 108 aa, Artificial Sequence
  Synthetic construct
DIQMTQSPSSLSASVGDRVTITCRASQSISSYLNWYQQKPGKAPKLLIYAATSLQSGVPSRFSGSGSGTDFTLTISSLQPEDFATYYCQQSYSIPPLTFGGGTKVGIK

SEQ ID NO: 22855 - protein, 112 aa, Artificial Sequence
  Synthetic construct
QSVLTQPPSVSGAPGQRVTISCTGSSSNIGAGYAVHWYQQLPGTAPKLLIYGNNNRPSGVPDRFSGSKSGTSASLAITGLQAEDEADYYCQSYDSSLSGPYVFGTGTKVTVL

SEQ ID NO: 22856 - protein, 108 aa, Artificial Sequence
  Synthetic construct
SYVLTQPPSVSVAPGKTARIPCGVNNIGSNSVHWYQQKPGQAPVLVIHYDGVRPSGIPERFSGSNSGNTATLTISRVEAGDEADYYCQVWDGSSDHWVFGGGTKLTVL

SEQ ID NO: 22857 - protein, 107 aa, Artificial Sequence
  Synthetic construct
EIVMTQSPATLSVSPGERATLSCRASQSVRSNLAWYQQKPGQAPRLLIYAASTGATGVPARFSGSGSGTEFTLTISSLQSEDFAVYSCQQYNNWPYTFGQGTKLEIK

SEQ ID NO: 22858 - protein, 107 aa, Artificial Sequence
  Synthetic construct
EIVMTQSPATLSVSPGERATLSCRASQSVSSNLAWYQQKPGQAPRLLIYGASTRATGIPARFSGSGSGTEFSLTISSLQSEDFAVYYCQQYNNWPYTFGQGTKLEIK

SEQ ID NO: 22859 - protein, 108 aa, Artificial Sequence
  Synthetic construct
EIVLTQSPGTLSLSPGERATLSCRASQSLGSIYLAWYQQKPGQAPRLLIFGASSRATGIPGRFSGSGSGTDFTLTISRLEPEDFAVYYCQQYGTSPWTFGQGTKVEIK

SEQ ID NO: 22860 - protein, 112 aa, Artificial Sequence
  Synthetic construct
HSALTQPASVSGSPGQSITISCTGTSSDVGGYNYVSWYQQHPGKAPKVMIYDVSNRPSGVSNRFSGSKSGNTASLTISGLQAEDEADYYCSSYTSSSTPNWVFGGGTKLTVL

SEQ ID NO: 22861 - protein, 110 aa, Artificial Sequence
  Synthetic construct
QSALTQPASVSGSPGQSITISCTGASNDVGAYNYVSWYQQHPGKAPKLMIYDVTNRPSGVSNRFSGSKSGNTASLTISGLQAEDEADYYCSSYRSSSTWVFGGGTKLTVL

SEQ ID NO: 22862 - protein, 106 aa, Artificial Sequence
  Synthetic construct
SYELTQPPSMSVSPGQTASITCSGDKLGDKYVCWYQQRPGQSPVLVIYHDSQRPSGIPERFSGSNSANTATLTISGTQAMDEADYYCQTWDSSTVVFGGGTKLTVL

SEQ ID NO: 22863 - protein, 107 aa, Artificial Sequence; identical to SEQ ID NO: 11517
  Synthetic construct

SEQ ID NO: 22864 - protein, 110 aa, Artificial Sequence
  Synthetic construct
QSALTQPPSASGAPGQSVTISCTGMSSDVDGHNYVSWYQHHPGKAPKLMIYDVSKRPSGVPDRFSGSKSGNTASLTVSGLQAEDEADYYCSSNAGSAKLVFGGGTKVTVL

SEQ ID NO: 22865 - protein, 108 aa, Artificial Sequence
  Synthetic construct
SYELTQTPSVSVSPGQTARITCSGDALPKKYAYWYQQKSGQAPVLVIYEDSRRPSGIPERFSGSTSGTTATLTISGAQVEDEADYYCSSTDNSGHHWVFGGGSKLTVL

SEQ ID NO: 22866 - protein, 106 aa, Artificial Sequence
  Synthetic construct
SYELTQPPSVSVSPGQTASIICSGDKLGDKYACWYQQKPGQSPVVVIYQDSKRPSGIPERFSGSNSGNTATLTISGTQAMDEADYYCQAWDSSTVVFGGGTKLTVL

SEQ ID NO: 22867 - protein, 107 aa, Artificial Sequence
  Synthetic construct
DIQMTQSPSSLSASVGDRVTITCRASQSITSSLNWYQQKSGKAPKLLIYVASSLQSGVPSRFSGSGSGTHFTLTISSLQPEDFATYYCQQTYSSPLTFGGGTKVEIK

SEQ ID NO: 22868 - protein, 108 aa, Artificial Sequence
  Synthetic construct
SYELTQPPSVSVSPGQTARITCSGDALPKKYAYWCQQKSGQAPVVVIYEDSKRPSGIPERFSGSSSGTMATLTISGAQVEDEADYYCYSTDSSGNHRVFGGGTKLTVL

SEQ ID NO: 22869 - protein, 111 aa, Artificial Sequence
  Synthetic construct
QSALTQPASVSGSPGQSITISCTGTSSDVGVYNFVSWYQQHPGKAPKLMIYDVSDRPSGVSNRFSGSKSGNTASLTISGLQAEDEADYYCSSYTSSSTPYVFGTGTKVTVL

SEQ ID NO: 22870 - protein, 112 aa, Artificial Sequence
  Synthetic construct
DIVMTQTPLSLSVTPGQPASISCKSSQSLLHSDGKTYLFWYLQKPGQPPQLLMYEVSYRFSGVPDRFGGSGSGTDFTLKISRVEAEDVGVYYCMQSIQSPYTFGQGTKLEIK

SEQ ID NO: 22871 - protein, 112 aa, Artificial Sequence
  Synthetic construct
DIVMTQTPLSLSVTPGQPASISCKSSQSLLHSDGKTSLYWYLQKPGQPPQLLIYEVSDRFSGVPDRFSGSGSETDFTLKISRVEAEDVGLYYCMQSLQLPYTFGQGTKLEIK

SEQ ID NO: 22872 - protein, 110 aa, Artificial Sequence
  Synthetic construct
QAVVTQEPSLTVSPGGTVTLTCGSSTGAVTSGHYPYWFQQKPGQAPRTLIYDTSNKHSWTPARFSGSLLGGKAALTLSGAQPEDEAEYYCLLSYSGAFYVFGTGTKVTVL

SEQ ID NO: 22873 - protein, 109 aa, Artificial Sequence
  Synthetic construct
EIVLTQSPATLSVSPGERATLSCRANQSASNYLAWYQQKPGQAPRLLIYDASKRATGIPARFRGSGSGPDFTLIINSLEAEDFAVYYCQQRSNRPPTWTFGQGTKVEIK

SEQ ID NO: 22874 - protein, 107 aa, Artificial Sequence
  Synthetic construct
EIVMTQSPATLSVSPGERATLSCRASQSISSKVAWYQQKPGQAPRLLIYGASTRATGLPARFSGSGSGTEFTLTISSLQSEDFAVYYCQQYNNWPLTFGGGTKVEIK

SEQ ID NO: 22875 - protein, 107 aa, Artificial Sequence; identical to SEQ ID NO: 2682
  Synthetic construct

SEQ ID NO: 22876 - protein, 110 aa, Artificial Sequence
  Synthetic construct
QSALTQPPSASGSPGQSVTISCTGTGSDVGAYNSVSWYQHHPGKAPKLMIYDVSKRPSGVPDRFSGSKSGNTASLTVSGLQAEDEADYYCSSYAGSNNVLFGGGTKLTVL

SEQ ID NO: 22877 - protein, 107 aa, Artificial Sequence; identical to SEQ ID NO: 11166
  Synthetic construct

SEQ ID NO: 22878 - protein, 107 aa, Artificial Sequence
  Synthetic construct
DIQMTQFPSSLSVSVGDRVTITCRASQSISSYLHWYQQKPGKAPKFLIYAASTLQSGVPSRFSGSGSGTDFTLAISSLQPEDFATYYCQQSYTTPLTFGGGTKVEIN

SEQ ID NO: 22879 - protein, 107 aa, Artificial Sequence
  Synthetic construct
EIVLTQSPDFQSVTPKEKVTITCRASQSIGTSLHWYQQKPDQSPKLLIKYASQSFSGVPSRFSGSGSGTDFTLTINSLEAEDAAAYYCHQSGSLPLTFGGGTKVEIK

SEQ ID NO: 22880 - protein, 106 aa, Artificial Sequence
  Synthetic construct
SYELTQPPSVSVSPGQTASITCSGDKLGDENSWWYQQKPGQSPVLVLYQDNKRPSGIPERFSGSNSGNTATLTIRGTQVIDEADYYCQAWDSSTWVFGGGTKLTVL

SEQ ID NO: 22881 - protein, 108 aa, Artificial Sequence
  Synthetic construct
SYVLTQPPSVSVAPGKTARITCGGNNIGSKSVHWYQQKPGQAPVLVIYYDSDRPSGIPERFSGSNSGNTATLTISRVEAGDEADYYCQVLDSNNDHWVFGGGTKLTVL

SEQ ID NO: 22882 - protein, 72 aa, Artificial Sequence
  Synthetic construct
FLQKPGNAPKSLIYAASSLQNGVPSKFSGSGSGTDFTLTISSLQPEDFATYYCQQYNTYPPTFGQGTRLEIK

SEQ ID NO: 22883 - protein, 110 aa, Artificial Sequence
  Synthetic construct
QSALTQPPSASGSPGQSVTISCTGTSRDVGYYNYVSWYQQHPGKAPKLMIYDVSQRPSGVPDRFSGSKSGNTASLTVSGLQAEDEAEYFCSSYAGNNNLVFGGGTKLTVL

SEQ ID NO: 22884 - protein, 108 aa, Artificial Sequence
  Synthetic construct
SYVLTQPPSVSVAPGKTARITCGGNNIGSKSVHWYQQKPGQAPVLVIYYDSDRPSGIPERFSGSNSGNTATLTISRVEAGDEADYYCQVWDSSSDHFVFGGGTKLTVL

SEQ ID NO: 22885 - protein, 112 aa, Artificial Sequence
  Synthetic construct
DIVMTQFPLSLPVTPGEPASISCRSSQSLLHSNGYNYLDWYLQKPGQSPQLLIYLGSNRASGVPDRFSGSGSGTDFTLKINRVEAEDVGVYYCMQALQTPITFGQGTRLEIK

SEQ ID NO: 22886 - protein, 110 aa, Artificial Sequence
  Synthetic construct
QSALTQPRSVSGSPGQSVTISCAGTSSDVGGYEYVSWYQHQPGKAPKLVIHDVSKRPSGVPDRFSGSKSGNTASLTISGLQAEDEADYYCCSYAGTYTWIFGGGTKLTVL

SEQ ID NO: 22887 - protein, 106 aa, Artificial Sequence; identical to SEQ ID NO: 22862
  Synthetic construct

SEQ ID NO: 22888 - protein, 108 aa, Artificial Sequence
  Synthetic construct
EIVLTQSPGTLSLSPGERATLSCRASQSVSSNYLAWYQQKPGQAPRLLIFGASSRATGIPDRFSGSGSGTDFALTISRLEPEDFAVYYCQQYGSSPRTFGQGTKVEIK

SEQ ID NO: 22889 - protein, 108 aa, Artificial Sequence
  Synthetic construct
DIQMTQSPSSLSASVGDRVTITCRASQSISRYLNWYQQRPGKAPKLLIYAASSLQSGVPSRFSGSGSETDFTLTISSLQPEDFATYYCQQTYSAPGGTFGPGTKVDIK

SEQ ID NO: 22890 - protein, 107 aa, Artificial Sequence
  Synthetic construct
DIQMTQSPSTLSASVGDRVTITCRASQSISSWLAWYQQKPGKPPKLLIYKASSLESGVPSRFSGSGSGTEFTLTISSLQPDDFATYYCQQYNSYSRTFGGGTKVEIK

SEQ ID NO: 22891 - protein, 107 aa, Artificial Sequence
  Synthetic construct
DIQMTQSPSSLSASVGDRVTISCRASQSISSYLNWYQQKPGKAPKVLIFAASSLESGVPSRFSGSGSGTDFTLTISSLQPEDFATYYCQQSYSTPLTFGGGTKVEIK

SEQ ID NO: 22892 - protein, 108 aa, Artificial Sequence
  Synthetic construct
EIVLTQSPATLSLSPGERATLSCRASQSVSSYLAWYQQKPGQAPRLLIYDASNRATGIPARFSGSGSGTDFTLTISSLEPEDFAVYYCQQRSNWPPFTFGGGTKVEIK

SEQ ID NO: 22893 - protein, 110 aa, Artificial Sequence
  Synthetic construct
QSALTQPASVSGSPGQSITISCTGTSSDVGGYNLVSWYQQYPGKAPKLMIYEVIKRPSGVSDRFSGSKSANTASLTISGLQAEDEADYYCYSFAGSSSWVFGGGTRLTVL

SEQ ID NO: 22894 - protein, 110 aa, Artificial Sequence
  Synthetic construct
QSVLTQPPSVSAAPGQKVTISCSGSSSNIGNDYVSWYQQLPGTAPKLLIYENTKRPSGIPDRFSGSKSGTSATLGITGLQTGDEADYYCAAWDTSLSAGVFGGGTTLTVL

SEQ ID NO: 22895 - protein, 110 aa, Artificial Sequence
  Synthetic construct
QSVLTQPPSVSAAPGQKVTISCSGSSSNIGNNYVSWYQQLPGTAPKLLIYDNNKRPSGIPDRFSGSKSGTSGTLGITGLQTGDEADYYCGTWDSSLSVYVFGTGTKVTVL

SEQ ID NO: 22896 - protein, 110 aa, Artificial Sequence
  Synthetic construct
QSALTQPASVSGSPGQSITISCTGTSTDVGSYNLVSWYQQHPGKAPKLMIYEGSKRPSGVSNRFSGSKSGNTASLTISGLQAEDEADYYCYSYAGSSTWVFGGGTKLAVL

SEQ ID NO: 22897 - protein, 110 aa, Artificial Sequence
  Synthetic construct
QSVLTQPPSVSGTPGQRVTISCSGNSSNVGTYYVHWYQQSSGAAPKLLMYNNGQRPSGVPDRFSGSKSGTSVSLAISGLRSEDEADYYCASWDDSLRAGVFGTGTTVTVL

SEQ ID NO: 22898 - protein, 110 aa, Artificial Sequence
  Synthetic construct
QSVLTQPPSASGTPGQRVTISCSGSSSNIGSSTVNWYQQLPGTAPKLLVYTNSQRPSGVPDRFSGSKSGTSASLAISGLQSEDEADYYCAAWDDSLNGWVFGGGTKLTVL

SEQ ID NO: 22899 - protein, 107 aa, Artificial Sequence; identical to SEQ ID NO: 11121
  Synthetic construct

SEQ ID NO: 22900 - protein, 109 aa, Artificial Sequence
  Synthetic construct
EIVLTQSPGTLSLSPGERATLSCRASQSVSSSYLAWYQQKPGQAPRLLIYGASSRATGIPDRFSGSGSGTDFTLTISRLEPEDFAVYYCQQYGSSPPLTFGGGTKVEIK

SEQ ID NO: 22901 - protein, 107 aa, Artificial Sequence
  Synthetic construct
DIQLTQSPSTLSASLGDRVTITCRASQTFSTSLAWYQQKPGMAPRLLIYKASTLVSGVPLRFSGSGSGTEFTLTISSLQPDDFATYYCQQYSSYSATFGQGTKLDIK

SEQ ID NO: 22902 - protein, 107 aa, Artificial Sequence
  Synthetic construct
DIQMTQSPSSLSASVGDRVTITCRASQGIRHDLGWYQQKPGKAPKCLIYAASSLQSGVPSRFSGSASGTEFTLTISSLQPEDFATYYCLQHNSYPLTFGQGTKVEIK

SEQ ID NO: 22903 - protein, 110 aa, Artificial Sequence; identical to SEQ ID NO: 22804
  Synthetic construct

SEQ ID NO: 22904 - protein, 107 aa, Artificial Sequence
  Synthetic construct
DIQMTQSPSSLSASVGDRVTITCRASQSINNYLNWYQQKPGIAPKLLIYAASSLRGGVPSRFSGSGSGTDFTLTISSLQPEDFATYYCQQSYSTPRTFGGGTKVEIK

SEQ ID NO: 22905 - protein, 108 aa, Artificial Sequence
  Synthetic construct
DIQMTQSPSSVSASVGDRVTITCRASQAINSWLAWYQQKPGKAPKLLIYAASTLQSGVPSRFSGSGSGTDFTLTISSLQPEDFATYYCQQGNSFPPYTFGQGTKLEIR

SEQ ID NO: 22906 - protein, 112 aa, Artificial Sequence
  Synthetic construct
QSALTQPRSVSGSPGQSVTISCTGTSSDVGGYKYVSWYQQHPGKAPKLMIYDVSKRPSGVPDRFSGSKSGNTASLTISGLQAEDEADYYCCSYAGSNTFIVVFGGGTKLTVL

SEQ ID NO: 22907 - protein, 108 aa, Artificial Sequence
  Synthetic construct
SYELTQPPSVSVSPGQTARITCSGDGLPKKYAYWFQQKSGQAPVLVIYEDTKRPSGIPERFSGSSSGTMATLTISGAQVEDEADYYCYSGDSSANHWVFGGGTKLTVL

SEQ ID NO: 22908 - protein, 116 aa, Artificial Sequence
  Synthetic construct
QPVLTQPPSASASLGASVTLTCTLSSGYSNYKVDWYQQRPGKGPRFVMRVGTGGIVGSKGDGIPDRFSVLGSGLNRYLTIKNIQEEDESDYHCGADHGSGSNFVYVFGTGTKVTVL

SEQ ID NO: 22909 - protein, 110 aa, Artificial Sequence; identical to SEQ ID NO: 22616
  Synthetic construct

SEQ ID NO: 22910 - protein, 108 aa, Artificial Sequence
  Synthetic construct
SYELTQPPSVSVSPGQTARITCSGDALPKKYAYWYQQKSGQAPVLVIYEDSKRPSGIPERFSGSSSGTMATLTISGAQVEDDSDYYCFSTDISGNQRVFGGGTKLTVL

SEQ ID NO: 22911 - protein, 107 aa, Artificial Sequence
  Synthetic construct
DIQLSQSPSSLSASVGDRVTITCRASQTISTYLNWYQHKPGKAPKLLIYGASSLQSGVPSRFSGGGSGTDFTLTISSLQPEDFATYYCQQSYISPWTFGQGTKVEIK

SEQ ID NO: 22912 - protein, 112 aa, Artificial Sequence
  Synthetic construct
EIVMTQSPLSLPVTPGEPASISCRSSQSLLHSNGHNYLNWYLQKPGQSPQLLIYLGSNRASGVPARFSGSGSGTDFTLKISRVEAEDVGLYYCMQVVQAPRTFGGGTKVEIK

SEQ ID NO: 22913 - protein, 108 aa, Artificial Sequence
  Synthetic construct
EIVLTQSPATLSLSPGERATLSCRASQSVSSYLAWYQQKPGQAPRLLIYDASNRATGIPARFSGSGSGTDFTLTISSLEPEDFAIYYCQQRSNWPPFTFGPGTKVDIK

SEQ ID NO: 22914 - protein, 112 aa, Artificial Sequence
  Synthetic construct
QSALTQPPSASGSPGQSVTISCTGTSSDVGAYNYVSWYQQHPGKAPKLMIYEVSKRPSGVPDRFSGSKSGNTASLTVSGLQAEDEADYYCSSYAGSNNFYVVFGGGTKLTVL

SEQ ID NO: 22915 - protein, 108 aa, Artificial Sequence
  Synthetic construct
SYELTQPPSVSVSPGQTARITCSADALPKQYAYWYQQKPGQAPVVVIYKDSERPSGIPGRFSGSSSGTTVTLTISGVQAEDEAEYYCQSADSSGTYPVFGGGTKLTVL

SEQ ID NO: 22916 - protein, 108 aa, Artificial Sequence
  Synthetic construct
SYELTQPPSVSVSPGQTARITCSGDALPKKYAYWYQQKSGQAPVLVIYEDSKRPSGIPERFSGSSSGTMATLTISGAQVEDEADYYCYSTDSSGNHWVFGGGTKLTVL

SEQ ID NO: 22917 - protein, 108 aa, Artificial Sequence; identical to SEQ ID NO: 10777
  Synthetic construct

SEQ ID NO: 22918 - protein, 109 aa, Artificial Sequence
  Synthetic construct
SYELTQPPSVSVSPGQTARITCSGDALPKKYAYWYQQKSGQAPVLVISEDTKRPSGIPERFSGSSSGTVATLTISGVQVEDEGDYYCYSTDDSANHRGIFGGGTKLTVL

SEQ ID NO: 22919 - protein, 107 aa, Artificial Sequence
  Synthetic construct
EIVLTQSPDFQSVTPKQKVTITCRASQSIANALHWYQQKPDQSPKLLIKYASQSFSGVPSRFSGSGSGTDFTLTINSLEAEDAATYYCHQSSTVPYTFGRGTKLEIK

SEQ ID NO: 22920 - protein, 107 aa, Artificial Sequence
  Synthetic construct
DIQMTQSPSSLSASVGDRVTITCQASQDISKYLNWYQQKPGKAPKLLIYDASNLETGVPSRFSGSGSGTDFTFTISSLQPEDIATYYCHQYDNLPRTFGQGTKLEIK

SEQ ID NO: 22921 - protein, 107 aa, Artificial Sequence; identical to SEQ ID NO: 22468
  Synthetic construct

SEQ ID NO: 22922 - protein, 109 aa, Artificial Sequence
  Synthetic construct
SYELTQPPSVSVSPGQTARITCSGDALPRKYAYWYQQRSGQAPVLVIYEDNKRPSGIPERFSGSSSGTTATLSISGVQVEDEGNYYCYSTDSTDNHKGVFGGGTKLTVL

SEQ ID NO: 22923 - protein, 110 aa, Artificial Sequence
  Synthetic construct
QSFLTQPPSVSGAPGQRVTISCTGSSSNIGAGYDVHWYQQLPGTVPKLLIYGNTNRPSGVPDRFSGSRSGTSASLAITGLQAEDEADYYCQSYDSSLSYVFGTGTKVTVL

SEQ ID NO: 22924 - protein, 108 aa, Artificial Sequence
  Synthetic construct
EIVLTQSPGTLSLSPGERATLSCRASQSVSGTYLAWYQHKPGQAPRLLMYGASSRATGIPDRFSGSGAGTDFTLTISRLEPEDFAVYYCQQYASSPRTFGQGTKLEIR

SEQ ID NO: 22925 - protein, 106 aa, Artificial Sequence
  Synthetic construct
DIQMTQSPSTLSASVGDRVTITCRASQSISSWLAWYQQKPGKAPKLLIYKASSLESGVPSRFSGSGSGTEFTLTISSLQPDDFATYFCQQYDTFWTFGQGTEVEIK

SEQ ID NO: 22926 - protein, 112 aa, Artificial Sequence; identical to SEQ ID NO: 10847
  Synthetic construct

SEQ ID NO: 22927 - protein, 113 aa, Artificial Sequence
  Synthetic construct
QSVLTQPPSVSGAPGQRVTISCTGTSSNIGAGYDVHWYQQLPGTAPKLLIYANSNRPSGVPDRFSGSKSGTSASLAISGLQAEDEADYYCQSYDSSLSGSGWVFGGGTKLTVL

SEQ ID NO: 22928 - protein, 107 aa, Artificial Sequence
  Synthetic construct
DIQMTQSPSSLSASIGDRVTITCQASQDIRNYLNWFQQKPGKAPKLLIYDASNLETGVPSRFSGSGSGADFTFTISSLQPEDIATYYCQQYDNLPWTFGRGTKVEIK

SEQ ID NO: 22929 - protein, 108 aa, Artificial Sequence
  Synthetic construct
EIVLTQSPDILPLSPGERATLSCRASQSVSSSYLAWYQQKPGQAPRLIIFGASSRATGIPDRFSGSGSGTDFTLTISRLEPEDFAVYYCQQYGSPPDTFGQGTKLEIK

SEQ ID NO: 22930 - protein, 108 aa, Artificial Sequence
  Synthetic construct
EIVLTQSPGTLSLSPGERATLLCRASQSVSSNYLAWYQQKPGQAPRLLIFGASSRATGIPDRFSGSGSGTDFTLTISRLEPEDFAVYYCQQYGYSPWTFGQGTKVEIK

SEQ ID NO: 22931 - protein, 107 aa, Artificial Sequence
  Synthetic construct
EDVLTQSPDTLSLSPGERATLSCRVSLSVTGSDLAWYQQKPGQAPRLLIYGSSTRATGIPDRFSGTGSGTDFTLTISRLEPEDFAVYYCHQYGSSYTFGRGTKLEIK

SEQ ID NO: 22932 - protein, 110 aa, Artificial Sequence
  Synthetic construct
QSVLTQPPSASATPGQRVTISCSGSSSNIGSNYVYWYQQLPGTAPKLLIYRNNQRPSGVPDRFSGSKSGTSASLAISGLRSEDEADYYCAAWDDSLSGEVFGGGTKLTVL

SEQ ID NO: 22933 - protein, 106 aa, Artificial Sequence
  Synthetic construct
DIQMTQSPSSLSASVGDRVTITCRASQSITSYLNWYQQRPGKAPQLLIYDASNLQSGVPSRFSGSGSGTDFTLTISSLRPEDFATYYCHQSYSTPTFGQGTKVEFK

SEQ ID NO: 22934 - protein, 108 aa, Artificial Sequence
  Synthetic construct
SSELTQPPSVSVSPGQTARITCSGDALPKKYAYWYQQKSGQAPVLVIYEDSKRPSGIPERVSGSSSGTVATLTISGAQVEDESDYYCYSTDSSGNQRVFGGGTRLTVL

SEQ ID NO: 22935 - protein, 111 aa, Artificial Sequence
  Synthetic construct
DIVMTQTPLSLSVTPGQPASISCKSSQSLLHSDGKTYLYWYLQRPGQPPQVLIYEVSNRFSGVPDRFSGSGSGTDFTLKISRVEAEDVGLYYCMQSVHLLTFGQGTKVEIT

SEQ ID NO: 22936 - protein, 107 aa, Artificial Sequence
  Synthetic construct
EIVLTQSPGTLSLSPGERATLSCRASQTVSSNFLAWYQQKPGQAPRLLIYGASIRATGIPDRFSGSGSATDFTLTISRLEPEDFAVYYCQQYGSSRTFGQGTKLEIK

SEQ ID NO: 22937 - protein, 107 aa, Artificial Sequence
  Synthetic construct
DIQMTQSPSSVSASVGDRVTITCRASQGISSWLAWYQQKPGKAPKLLIHGASSLQSGVPSRFSGSGSGTDFTLTISSLQPEDFATYYCQQANSFPLTFGGGTKVEIK

SEQ ID NO: 22938 - protein, 108 aa, Artificial Sequence
  Synthetic construct
EIVLTQSPATLSLSPGERATLSCNTSQSVSSYLAWYQQKPGQAPRLLIYDASNRAAGIPARFSGSGSGTDFTLAISSLEPEDFAVYYCQQRSDWPPLTFGGGTKVEIK

SEQ ID NO: 22939 - protein, 108 aa, Artificial Sequence
  Synthetic construct
EIVLTQSPATLSLSPGERATLSCRASQSVSSFLAWYQQKPGQAPRLLIYDASNRATDIPARFSGSGSGTDFTLTISSLEPEDFAVYYCQRRSNWPPFTFGGGTKVEIK

SEQ ID NO: 22940 - protein, 107 aa, Artificial Sequence
  Synthetic construct
EIVLTQSPAVLSLSPGERATLSCTASQSASTFLAWYQQRPGQAPRLLIYDASHRAAGIPGRFSGSGSGTDFTLTISSLEPEDFAVYYCQQRQSWPPSFGGGTKVEIK

SEQ ID NO: 22941 - protein, 107 aa, Artificial Sequence
  Synthetic construct
DIQMTQSPSTLSASVGDRVTITCRASQSITTWLAWYQQKPGKAPKLLIYKASSSESGVPSRFSGSGSGTEFTLTISSLQPDDFATYYCQQYDTYPITFGQGTRLEIK

SEQ ID NO: 22942 - protein, 107 aa, Artificial Sequence
  Synthetic construct
DIQMTQSPASLSASVGDRVTITCRASQSISSYLNWYQQKPGKAPKLLIYAASSLQSGVPSSFSGSGSGTDFTLTISSLQPEDFATYYCQQSYYTPPTFGQGTKVEVK

SEQ ID NO: 22943 - protein, 108 aa, Artificial Sequence
  Synthetic construct
QSALTQPRSVSGSPGQSVTISCTGTSSDVGGNDYVSWYQQHPGKAPKLLIYIVDRRPSGVPDRFSGSKSGSTASLTISGLQAEDEADYYCCSYVGASLFGGGTKLTVL

SEQ ID NO: 22944 - protein, 109 aa, Artificial Sequence
  Synthetic construct
EIVLTQSPGTLSLSPGERATLSCRASQSVSSSHLAWYQQKPGQAPRLLIYGASSRATGIPARISGSGSGTDFTLTISRLEPEDFAMYYCQQYGNSPKLTFGGGTKVEIK

SEQ ID NO: 22945 - protein, 112 aa, Artificial Sequence
  Synthetic construct
QSVLTQPPSVSGAPGQRVTISCTGSSSNIGAGFDVHWYQHLPGTAPKLLIYGSSNRPSGVPDRFSGSKSGTSASLAITGLQAEDEADYYCQSYDNTLSGPYVFGTGTKVTVL

SEQ ID NO: 22946 - protein, 110 aa, Artificial Sequence
  Synthetic construct
QSALTQPASVSGSPGQSITISCTGTSSDVGSYNLVSWYQQHPGKAPKLMIYEGSKRPSGVSNRFSGSKSGNTDSLTISGLQAEDEADYYCCSYADTNTLVFGGGTKVTVL

SEQ ID NO: 22947 - protein, 109 aa, Artificial Sequence
  Synthetic construct
EIVLTQSPGTLSLSPGERATLSCRASQSVTSNYLAWYQQKPGQAPRLLIYGASSRATGIPDRFSGSGSGTDFTLTISRLEPEDFAVYYCQQYGNSPPYTFGQGTKVEIK

SEQ ID NO: 22948 - protein, 106 aa, Artificial Sequence
  Synthetic construct
SYELTQPPSVSVSPGQTASITCSGDKLGDKYGCWYQQKPGQSPVVVIYQDRKRPSGIPERFSGSNSGNTATLTISGTQAMDEADYYCQAWDSSTVVFGGGTKLTVL

SEQ ID NO: 22949 - protein, 110 aa, Artificial Sequence
  Synthetic construct
QSVLTQPPSVSAAPGQKVSISCSGSSSNIGYHYVSWYQQLPGTAPKLLIYENNKRPSGIPDRFSGSKSGTSATLGITGLQTGDEADYYCGTWDSSLSAWVFGGGTKVTVL

SEQ ID NO: 22950 - protein, 106 aa, Artificial Sequence
  Synthetic construct
SYDLTQPPSVSVSPGQTASITCSGDKLGDKYACWYQQKPGQSPVLVIYQDNKRPSGIPERFSGSNSGNTATLTISGTQAMDEADYFCQAWDSSTAVFGTGTKVTVL

SEQ ID NO: 22951 - protein, 108 aa, Artificial Sequence
  Synthetic construct
SSELTQDPAVSVALGQTVRITCQGDSLRNYYASWYQQKPGQAPVLVIYGENNRPSGIPDRFSGSSSGKTASLTIAGAQAEDEADYFCNSRDSSANHLVFGGGTKLTVL

SEQ ID NO: 22952 - protein, 108 aa, Artificial Sequence
  Synthetic construct
SYELTQPPSVSVSPGHTARITCSGDALPKKYAYWYQQKSGQAPVLVIYEDSKRPSGIPERFSGSSSGTMATLTISGAQVEDEADYYCYSTDSSGNHRVFGGGTKLTVL

SEQ ID NO: 22953 - protein, 112 aa, Artificial Sequence
  Synthetic construct
QSVLTQPPSVSGAPGQRVTISCTGSSSNIGAGYDVHWYRQLPGTAPKLLIYGNSNRPSGVPDRFSGSKSGTSASLAITGLQAEDEADYYCQSYDSSLSGSKVFGGGTKVTVL

SEQ ID NO: 22954 - protein, 107 aa, Artificial Sequence
  Synthetic construct
DIQMTQSPSSLSASVGDRVTITCQASQAITNSLNWYLQKPEKAPKLLIYDASNLETGVPSRFSGSGSGTDFTFTISSLQPEDIATYYCQQYDNLPWSFGQGTKVEIK

SEQ ID NO: 22955 - protein, 109 aa, Artificial Sequence
  Synthetic construct
DIVLTQSPATLSLSPGERATLSCRASQSVSNFLAWYQQKPGQAPRLLIYDASNRAPGIPARFSGSGSGTDFTLTISSLEPEDFAVYYCHRRSNWPPGLTFGGGTRVEIK

SEQ ID NO: 22956 - protein, 110 aa, Artificial Sequence
  Synthetic construct
QSALTQPRSVSGSPGQSVTISCTGTSSDVGGYNYVSWYQQHPGKAPKLMIYDVSKRPSGVPDRFSGSKSGNTASLTISGLQGEDEADYCCCSYAGSYTAVFGGGTKLTVV

SEQ ID NO: 22957 - protein, 112 aa, Artificial Sequence
  Synthetic construct
DVVVTQSPVSLPATPGKPASISCRASQSLLHSNGNHYLHWYLQRPGQSPQLLIYLGSNRASGVPDRFSGSGSGTVFSLKISRVEAEDVGIYYCMQALHFPYTFGQGTKLEIK

SEQ ID NO: 22958 - protein, 113 aa, Artificial Sequence; identical to SEQ ID NO: 22800
  Synthetic construct

SEQ ID NO: 22959 - protein, 107 aa, Artificial Sequence
  Synthetic construct
EIVMTQSPATLSVSPGERATLSCRASQSVGSSLAWYQQKPGQAPRLLIYGASIRATGVPARFSGSGSGTEFTLTISSLQSEDFAVYYCQKYDDWPPTFGQGTKLEIK

SEQ ID NO: 22960 - protein, 111 aa, Artificial Sequence
  Synthetic construct
QSVLTQPPSASGAPGQRVTISCSGSNSNIGSNTVNWYQQLPGTAPKLLIYSDIQRPSGVPDRFSGSKSGTSASLAISGLQSEDEADYYCAAWDDSLNGLWVFGGGTKLTVL

SEQ ID NO: 22961 - protein, 109 aa, Artificial Sequence
  Synthetic construct
EIVLTQSPATLSLSPGERATLSCRASQSVSSYLAWYQQRPGQAPRLLIYDASNRATGIPARFSGSGSGTDFTLTISSLEPEDFAVYYCQQRSNWPPRYTFGQGTKLEIR

SEQ ID NO: 22962 - protein, 113 aa, Artificial Sequence
  Synthetic construct
DIVMTQSPDSLAVSLGERATIDCKSSQSVLSSSNNKNSLVWYQQKPGQPPKLIIYWASTRESGVPDRFSGSGSGTDFTLTISSLQPEDVALYYCQQHYSTPYTFGQGTKLEIK

SEQ ID NO: 22963 - protein, 110 aa, Artificial Sequence; identical to SEQ ID NO: 2906
  Synthetic construct

SEQ ID NO: 22964 - protein, 106 aa, Artificial Sequence
  Synthetic construct
DIQMTQSPSTLSASVGDRVTITCRASQSISSWLAWYQQKPGKVPKLLIYKASSLESGVPSRFSGSGSGTEFTLTISSLQPDDFATYYCQQYNSYWTFGQGTKVEIK

SEQ ID NO: 22965 - protein, 110 aa, Artificial Sequence
  Synthetic construct
QSALTQPASVSGSPGQSITISCTGTSSDIGRYSYVSWYQQHPGKAPKLMIYDVSNRPSGVSNRFSGSKSGNTASLTISGLQAEDEADYYCTSYTSRTTVVFGGGTKLTVL

SEQ ID NO: 22966 - protein, 110 aa, Artificial Sequence
  Synthetic construct
QSALTQPASVSGSPGQSITISCTGTSSDVGSYNYVSWYQQHPGKAPKLMIYGVSNRPSGVSNRFSGSKSGNTASLTISGLQAEDEADYYCSSYTSSSTLVFGPGTKVTVL

SEQ ID NO: 22967 - protein, 109 aa, Artificial Sequence
  Synthetic construct
QSALTQPASVSGSPGQSITISCTATSGDFGAYNYVSWYQQHPARAPKLMIYDVSNRPSGVSDRFSGSKSGNTASLTISGLQAEDEADYYCSSYTSSSVIFGGGTKLTVL

SEQ ID NO: 22968 - protein, 110 aa, Artificial Sequence; identical to SEQ ID NO: 2975
  Synthetic construct

SEQ ID NO: 22969 - protein, 111 aa, Artificial Sequence
  Synthetic construct
QSVLTQPPSVSGAPGQRVTISCTGSSSNIGAGYDAHWYQQFPGTAPKLLIYANNNRPSGVPDRFSGSKSGTSASLAISGLQAEDEADYYCQSYDSGLSALVFGGGTSLTVL

SEQ ID NO: 22970 - protein, 108 aa, Artificial Sequence
  Synthetic construct
EIVMTQSPATLSVSPGERATLSCRASQSVSSNLAWYQQKPGQAPRLLIYGASTRATSIPARFSGSGSETEFTLTISSLQSEDFAVYYCQQYNDWPFWTFGQGTKLEIK

SEQ ID NO: 22971 - protein, 106 aa, Artificial Sequence
  Synthetic construct
SYELTQPPSVSVSPGQTASITCSGDKLGETDVCWYQQKPGQPPVLVIYQDTKRPSGIPERFSGSNSGNTATLTISGTQAMDEADYYCQAWDSSTYVFGTGTKVTVL

SEQ ID NO: 22972 - protein, 112 aa, Artificial Sequence
  Synthetic construct
DVVMTQSPLSLPVTLGQPASISCRSSQSLVYSDGNTYLHWFQQRPGQSPRRLIYKVSNRDSGVPDRVSGSGSGTDFTLKISRVEAEDVGVYYCMQGTHWPRTFGQGTKVEIK

SEQ ID NO: 22973 - protein, 107 aa, Artificial Sequence
  Synthetic construct
DIQMTQSPSSLSASVGDRVTITCRASQSISSYLNWYQQKPGKAPKVLIYAASSLQSGVPSRFSGSGSGTDFTLTISSLQPEDFATYYCQQSHTTPHTLGQGTKLEIK

SEQ ID NO: 22974 - protein, 110 aa, Artificial Sequence
  Synthetic construct
QSALTQPASVSGSPGQSITISCTGSSSDVGAYNYVSWYQQHPGQAPKLIIYDVSDRPSGVSNRFSGSKSGNTASLTISGLQSDDEADYSCSSYSRSGTLVFGGGTRLTVL

SEQ ID NO: 22975 - protein, 107 aa, Artificial Sequence
  Synthetic construct
SYELTQPPSVSVSPGQTARITCSGDALPKKYAYWYQQKSGQAPVLVIYEDSKRPSGIPERFSGSSSGTMATLTISGAQVEDEADYYCYSIDSSGNPPFGGGTKLTVL

SEQ ID NO: 22976 - protein, 111 aa, Artificial Sequence
  Synthetic construct
QSVMTQPPSASGTPGQRVTISCSGGSSNIGRNYVYWYQQLPGTAPKLLIYNNDQRPSGVPDRFSGSKSGTSASLAISGLRSEDEADYYCSAWDDSLSGEWVFGGGTKVTVL

SEQ ID NO: 22977 - protein, 110 aa, Artificial Sequence
  Synthetic construct
QSVLTQPPSASGTPGQRVTISCSGSSSNIGSSIVNWYQKLPGTAPKLLIYSDDQRPSGVPDRFSGSKSGTSASLAISGLQSEDEADYYCAAWDDSLNGYVFGTGTKVTVL

SEQ ID NO: 22978 - protein, 109 aa, Artificial Sequence
  Synthetic construct
EIVLTQSPATLSLSPGERATLSCRASQSVSSFLAWYQQKPGQAPRLLIYDASNRATGIPARFSGSGSGTDFTLTISSLEPEDFALYYCQHRNNWPPALTFGGGTKVEIR

SEQ ID NO: 22979 - protein, 111 aa, Artificial Sequence; identical to SEQ ID NO: 11102
  Synthetic construct

SEQ ID NO: 22980 - protein, 106 aa, Artificial Sequence
  Synthetic construct
SYELTQPPSVSVSPGQTATITCSGDKLGDKYVCWYQQKPGQSPVLVIYQDSQRPSGIPERFSGSNSGNTATLTISGTQATDEADYYCQAWDSSTVVFGGGTKLTVL

SEQ ID NO: 22981 - protein, 112 aa, Artificial Sequence
  Synthetic construct
DIVMTQTPLSLSVTPGQPASISCKSGQSLLHGDGKTYLYWYLQKPGQPPQLLIYEFSNRFSGVPDRFSGSGSGTDFTLKISRVEAEDVGIYYCMQSIQLPYTFGQGTKLEIK

SEQ ID NO: 22982 - protein, 109 aa, Artificial Sequence
  Synthetic construct
QSALTQPASVSGSPGQSITISCTGTSSDIGSYNLVSWYQQHPGKAPKLMIFEGSQRPSGVSNRFSGSKSGNTASLTISGLQAEDEADYYCCSYAGSSPVFGGGTKLTVL

SEQ ID NO: 22983 - protein, 112 aa, Artificial Sequence
  Synthetic construct
DIVMTQTPLSLSVTPGQPASISCKSSQSLLHSDGKTYLYWYLQKPGQPPQLLIYEVSDRFSGVPDRFSGSGSGTDFTLKISRVEAEDVGVYYCMQSIQPPLTFGGGTKVEIK

SEQ ID NO: 22984 - protein, 111 aa, Artificial Sequence
  Synthetic construct
QSALTQPASVSGSPGQSITISCTGTSSDVGSSNLVSWYQQHPGKAPKLMIYEGSKRPSGVSNRFSGSKSGNTASLTISGLQAEDEADYYCCSYTGSRTFYVFGTGTKVTVL

SEQ ID NO: 22985 - protein, 109 aa, Artificial Sequence
  Synthetic construct
SYELTQPPSVSVSPGQTARITCSGDALPKKYAYWYQQKSGQAPVLVIYEDSKRPSGIPERFSGSSSGTMATLTISGAQVEDEADYYCYSTDSSGNHRGVFGTGTKVTVL

SEQ ID NO: 22986 - protein, 108 aa, Artificial Sequence
  Synthetic construct
QSALTQPASVSGSPGQSITISCTGTSSYVGSFDLVSWYQQHPGKAPKLMIYEVSKRPSGVSNRFSGSKSGNTASLTISGLQAEDEADYYCCPYADTWVFGGGTKLTVL

SEQ ID NO: 22987 - protein, 109 aa, Artificial Sequence
  Synthetic construct
EIVLTQSPGTLSLSPGERATLSCRATQSVSSNYLAWYQQKPGQAPRLLIYGASSRATGIPDRFSGSGSGTDFTLIISRLEPEDFAVYYCQQYGSSPLYTFGQGTKLEIK

SEQ ID NO: 22988 - protein, 113 aa, Artificial Sequence; identical to SEQ ID NO: 3067
  Synthetic construct

SEQ ID NO: 22989 - protein, 112 aa, Artificial Sequence
  Synthetic construct
DIVMTQSPLSLPVTPGEPASISCRSSQSLLHSNGYNYLDWYLQKPGQSPQLLIYLGSNRASGVPDRFSGSGSGTDFTLKISRVEAEDVGVYYCMQALQTPPTFGQGTKVEIK

SEQ ID NO: 22990 - protein, 107 aa, Artificial Sequence
  Synthetic construct
EIVLTQSPDFQSVTPKEKVTITCRASQSIGSSLHWFQQKPDQSPKLLIKYASQSFSGVPSRFSGSGSGTDFTLTIYSLEAEDAATYYCHQSSTLPLTFGGGTKVEIK

SEQ ID NO: 22991 - protein, 107 aa, Artificial Sequence
  Synthetic construct
DIQMTQSPSSLSASVGDRVTITCRASQGISSSLAWFQLKPGKAPKSLIYAASTLQSGVPSNFSGSGSGTDFTLTINSLQPEDFATYYCQQYNSYPITFGQGTRLEIK

SEQ ID NO: 22992 - protein, 110 aa, Artificial Sequence
  Synthetic construct
QSVLTQPPSASGTPGQRVSISCSGSSSNIGSNTVNWYQHLPGTAPKLLVYTNNQRPSGVPDRFSGSKSGTSASLAISGLQSEDEADYYCAAWDDSLNGYVFGAGTKVTVL

SEQ ID NO: 22993 - protein, 110 aa, Artificial Sequence
  Synthetic construct
QSVLTQPPSVSAAPGRTVTISCSGNSSNIGNNHVSWYQQLPGTAPKLLIYDNNKRPSGIPDRFSGSKSGTSATLGITGLQTGDEADYYCETWDTSLSVVLFGGRTKLTVL

SEQ ID NO: 22994 - protein, 109 aa, Artificial Sequence
  Synthetic construct
EIVLTQSPATLSLSPGERATLSCRASQSVSTFLAWYQQKPGQAPRLLIYDASNRATGIPARFSGSGSGTDFTLTISSLEPEDFAVYYCQQRSNWPPIFTFGPGTKVDIK

SEQ ID NO: 22995 - protein, 113 aa, Artificial Sequence
  Synthetic construct
DIVMTQSPDSLAVSLGERATINCKSSQNVFYSSDNKNYLAWYQQKPGQPPKLLIYWASTRESGVPDRFSGSGSGTDFTLTISSLQAEDVAVYYCQQYYKTPLTFGPGTKVDIK

SEQ ID NO: 22996 - protein, 108 aa, Artificial Sequence
  Synthetic construct
SYELTQPPSVSVSPGQTARITCSGDALPKKDAYWYQQKSGQAPVLVIYEDSKRPSGIPERISGSSSGTMATLTISGAQTEDEADYYCYSTDSSGNHRVFGGGTKLTVL

SEQ ID NO: 22997 - protein, 108 aa, Artificial Sequence
  Synthetic construct
EIVLTQSPGTLSLSPGERATLSCRASQSVSSTYLAWYQQKPGQAPRLLIYGASSRATGIPDRFSGSGSGTDFTLTISRLEPEDFAVYYCQQYGSSPGTFGQGTKVEIK

SEQ ID NO: 22998 - protein, 106 aa, Artificial Sequence
  Synthetic construct
DIQLTQSPSFLSASVGDRVTITCRASQDISSFLAWYQQKPGKAPKLLIYGASILQSGVPSRFSGSGSGTEFTLTISSLQPEDFATYYCQHLNTYPLFGPGTKVDIK

SEQ ID NO: 22999 - protein, 108 aa, Artificial Sequence; identical to SEQ ID NO: 11584
  Synthetic construct

SEQ ID NO: 23000 - protein, 107 aa, Artificial Sequence
  Synthetic construct
DIQMTQSPSSLSASVGDRVTITCRASQGIRNDLGWYQQKPGKVPKRLIYDASSLQSGVPSRFSGSGSGTEFTLTISSLQPEDFATYYCLQHNSYPLTFGGGTKVEIK

SEQ ID NO: 23001 - protein, 113 aa, Artificial Sequence
  Synthetic construct
DIVMTQTPLSLPVTPGEPASISCRSSQSLLASDDGNTYLDWYLQKPGQSPQLLIYTLSYRASGVPDRFSGSGSGTDFTLKISRVEAEDVGVYYCMQRLEFPFTFGPGTKVDIK

SEQ ID NO: 23002 - protein, 107 aa, Artificial Sequence
  Synthetic construct
DIQMTQSPSSLSASVGDRVTITCRASQSISSYLNWYQQKPGKAPKLLIYDASSLRSGVPSRFSGSGSGTDFILTISSLQPEDFATYFCQQSYSTRITFGQGTRLEIK

SEQ ID NO: 23003 - protein, 109 aa, Artificial Sequence
  Synthetic construct
SYELTQPPSVSVSPGQTARITCSGDALPKKYAYWYQQKSGQAPVMVIYEDSKRPSGIPERFSGSSSGTVATLTISGAQVEDEADYYCYSTDSSYDHGGVFGGGTKVTVL

SEQ ID NO: 23004 - protein, 108 aa, Artificial Sequence
  Synthetic construct
DIQLTQSPSFLSASVGDRVTITCRASQDISNYLAWYQQKPGEAPKLLIFAASTLQSGVPSRFSGSGSGTDFTLTISSLQPEDFATYFCQQVNSFFRVTFGGGTKVEVK

SEQ ID NO: 23005 - protein, 106 aa, Artificial Sequence
  Synthetic construct
EIVLTQSPATLSLSPGERATLSCRASQSISSYLAWYQQRPGQAPRLLIYDASNRATGIPARFSGSGSGTDFTLTISSLEPEDFAVYYCQQRSTALTFGGGTKVEIK

SEQ ID NO: 23006 - protein, 108 aa, Artificial Sequence
  Synthetic construct
EIVLTQSPGTLSLSPGERATLSCRASQSVSGTYLAWYQHKPGQAPRLLMYGASSRATGIPDRFSGSGAGTDFTLTIRRLEPEDFAVYYCQQYAFSPRTFGQGTKLEIR

SEQ ID NO: 23007 - protein, 109 aa, Artificial Sequence
  Synthetic construct
EIVLTQSPATLSLSPGERATLSCRASQSVSSYLAWYQQKPGQAPRLLIYDASNRATGIPARFSGSGSGTDFTLTISSLEPEDFAVYYCHQRSNWPPRFTFGPGTKVDIK

SEQ ID NO: 23008 - protein, 112 aa, Artificial Sequence
  Synthetic construct
DIVMTQSPLSLPVTPGEPASISCKSSQSLLHSNGYKYLDWYLQKPGQSPQLLIFLGSNRASGVPDRFSGSGSGTDFTLKISRVEAEDVGVYYCMQALQTPYTFGQGTKVEIK

SEQ ID NO: 23009 - protein, 108 aa, Artificial Sequence
  Synthetic construct
EIVLTQSPGTLSLSPGERATLSCRASQSISSGYLAWYQQKPGQAPRLIIYGASSRATGIPDRFSGSGSGTDFTLTISRLEPEDFAVYYCQQYGTSPWTFGQGTKVDIK

SEQ ID NO: 23010 - protein, 114 aa, Artificial Sequence
  Synthetic construct
DIVMTQSPDSLAVSLGERATINCKSSQSVLYSSNNKNYLAWYQQKPGQPPKLLIYWASTRESGVPDRFSGSGSGTDFTLTISSLQAEDVAVYYCQQYYSSPPYSFGQGTKLEIK

SEQ ID NO: 23011 - protein, 108 aa, Artificial Sequence
  Synthetic construct
EIVLTQSPGTLSLSPGERATLSCRASQSVSRNYLAWYQQKPGQAPRILIYGASSRATGIPDRFSGSGSGSDFTLTISRLEPEDFAVYYCHQYGSSPFTFGPGTKVDIK

SEQ ID NO: 23012 - protein, 109 aa, Artificial Sequence; identical to SEQ ID NO: 3297
  Synthetic construct

SEQ ID NO: 23013 - protein, 106 aa, Artificial Sequence
  Synthetic construct
DIQMTQSPSSLSASVGDRITISCQTSQDISIYLNWYQQKPGKAPKLLIYDASNLQAGAPSRFSGSGSGTDFTFTISSLQPEDIATYYCQHYNNLPRFGPGTKVDIK

SEQ ID NO: 23014 - protein, 108 aa, Artificial Sequence
  Synthetic construct
EIVLTQSPATLSLSPGERATLSCRASQSISSFLAWYQQKPGQAPRLLVYDASNRVIGIPARFSGSGSGTDFTLTISSLEPEDFAVYYCQRRSNWPPFTFGGGTKVEIK

SEQ ID NO: 23015 - protein, 109 aa, Artificial Sequence
  Synthetic construct
EIVLTQSPATLSLSPGDRATLSCRASQSVSSFLAWYRQKPGQAPSLLIFDASNRATGIPARFSGSGSGTDFTLTISSLEPEDFAIYYCQQRSSWPPKLSFGGGTKVEMK

SEQ ID NO: 23016 - protein, 108 aa, Artificial Sequence; identical to SEQ ID NO: 10837
  Synthetic construct

SEQ ID NO: 23017 - protein, 109 aa, Artificial Sequence
  Synthetic construct
EIVLTQSPATLSLSPGERATLSCRASQSVSNYLAWYQQKPGQAPRLLIYDASKRAPGVPARFRGSGSGPDFTLTISSLEPADFAVYYCQQRSSRPPTWTFGQGTKVEIK

SEQ ID NO: 23018 - protein, 110 aa, Artificial Sequence
  Synthetic construct
QSVLTQPPSVSAASGQKVTISCSGSNSNIGNNYVSWYQQFPGTAPKLLIYENNKRSSGIPDRFSGSKSGTSATLGITGLQTGDEADYYCGTWDSSLSAVVFGGGTKLTVL

SEQ ID NO: 23019 - protein, 110 aa, Artificial Sequence
  Synthetic construct
QSALTQPASVSGSPGQSITISCTGTSSDVGGYNYVSWYQQHPGKAPKLMIYDVSNRPSGVSNRFSGSKSGDTASLTISGLQAEDEADYYCSSYTSSSTLVFGGGTKLTVL

SEQ ID NO: 23020 - protein, 109 aa, Artificial Sequence
  Synthetic construct
SYELTQPPSVSVSPGQTARITCSGDALPKKYAYWYQQKSGQAPVLVIYEDSKRPSGIPERFSGSSSGTMATLTISGAQVEDEADYSCSSTDISGNHMGVFGGGTKLTVL

SEQ ID NO: 23021 - protein, 107 aa, Artificial Sequence
  Synthetic construct
DIQMTQSPSSLSASVGDRVTITCRASQSISSYLNWYQQKPGKAPKLLIYGASSLQSGVPSRFSGSGSGTDFTLTISSLQAEDFATYYCQQSYSTPHTFGQGTKLEIK

SEQ ID NO: 23022 - protein, 107 aa, Artificial Sequence
  Synthetic construct
DIQMTQSPSSLSASVGDRVTITCRASQSISSYLNWYQQKPGKAPKNLIYAASSLQSGVPSRFSGSGSGTDFTLTISSLQPEDFATYYCQQSYSAPPTFGQGTRLEIK

SEQ ID NO: 23023 - protein, 111 aa, Artificial Sequence
  Synthetic construct
QSVLTQPPSVSGAPGQRVTISCTGNNSNIGAGYDVHWYHQLPGTAPKLLIYGNSNRPSGVPDRFSGSKSGTSASLAISGLQAEDEADYYCQSYDSSLSSLVFGGGTKLTVL

SEQ ID NO: 23024 - protein, 107 aa, Artificial Sequence; identical to SEQ ID NO: 3295
  Synthetic construct

SEQ ID NO: 23025 - protein, 108 aa, Artificial Sequence
  Synthetic construct
EIVMTQSPATLSVSPGERATLSCRASQSVSNNLAWYQQKAGQAPRLLIYGASTRATGIPARFSGSGSGTEFTLTISSLQSEDFAVYYCQHYYNWPPWTFGQGTKVEIR

SEQ ID NO: 23026 - protein, 107 aa, Artificial Sequence
  Synthetic construct
DIQLTQSPSFLSASVGDRVTITCRASQGISRFLAWYQQKPGKAPKLLIYAASTFQSGVPSRFSDSGSGTEFTLTISSLQPEDFATYYCQQLNSYPRTFGQGTKVEIK

SEQ ID NO: 23027 - protein, 108 aa, Artificial Sequence; identical to SEQ ID NO: 2787
  Synthetic construct

SEQ ID NO: 23028 - protein, 110 aa, Artificial Sequence
  Synthetic construct
QSALTQPASVSGSPGQSITISCTGTSSDVGSYNLVSWYQQHPGKAPKLMIYEGSKRPSGVSDRFSGSKSGNTASLTISGLQAEDEADYYCCSFAGRTTLVFGGGTKLTVL

SEQ ID NO: 23029 - protein, 111 aa, Artificial Sequence
  Synthetic construct
QSVLTQPPSVSGAPGQRVTISCTGSSSNIGAGFDVHWYQQLPGTAPRLLIYGESNRPSGVPDRFSGSKSGTSASLAITGLQAEDEADYYCQSYDTSLSGSVFGGGTKLTVL

SEQ ID NO: 23030 - protein, 107 aa, Artificial Sequence; identical to SEQ ID NO: 22783
  Synthetic construct

SEQ ID NO: 23031 - protein, 111 aa, Artificial Sequence
  Synthetic construct
QSVLTQPPSVSAAPGQKVTISCSGSSSDIGNNYVSWYQQLPGTAPKLLIYDNNRRPSGIPDRFSGSKSGTSATLAITGLQTGDEADYYCGTWDSSLSPRYVFGTGTKVTVL

SEQ ID NO: 23032 - protein, 109 aa, Artificial Sequence
  Synthetic construct
EIVLTQSPGTLSLSPGERATLSCRASQSVSSSNLAWYQQKPGQAPRLLIYGASSRATAIPDRFSGSGSGTDFTLSISRLEPEDFAVYYCQQYGTSPGYTFGQGTILEIK

SEQ ID NO: 23033 - protein, 107 aa, Artificial Sequence
  Synthetic construct
DVQMTQSPSSLSAYVGDRVTISCRASQSISTYLNWYQHKPGKAPKLLIYAASSLQSGVPSRFRGSGSWTDFTLTISSLQPEDCATYYCQQTYSHPFTFGPGTKVDIK

SEQ ID NO: 23034 - protein, 108 aa, Artificial Sequence
  Synthetic construct
DIQMTQSPSSLSASVGDRVTITCRASQSISNYLNWYQQKPGKAPELLIYAASSLQTGVPSRFSGSGSETDFTLTISSLQPEDFATYYCQQTYSTHLNTFGQGTKLEIK

SEQ ID NO: 23035 - protein, 112 aa, Artificial Sequence
  Synthetic construct
DVVMTQSPLSLPVTLGQPASISCRSSQSLVYSDGNTYLSWFHQRPGQSPRRLIYMVSNRDAGVPDRFSGSGSATDFSLKISRVEADDVGVYYCMQGTHWPFTFGPGTRVDIK

SEQ ID NO: 23036 - protein, 110 aa, Artificial Sequence
  Synthetic construct
QSVLTQPPSVSGTPGQRVTISCSGSSSNIGSNTVNWYQQVPGTAPKVLIYTNNQRPSGVPDRFSGSKSGTSASLAISGLQSEDEADYYCGAWDDSLNGWVFGGGTKVTGL

SEQ ID NO: 23037 - protein, 111 aa, Artificial Sequence
  Synthetic construct
DIVMTQSPLSLPVTPGEPASISCRSSQSLLHSNGYNYLDWYLQKPGQSPQLLIYLGSNRASGVPDRFSGSGSGTDFTLKISRVEAEDVGVYYCMQALQTRTFGQGTKLEIK

SEQ ID NO: 23038 - protein, 113 aa, Artificial Sequence
  Synthetic construct
DIVMTQSPDSLAVSLGERATINCKSSQSVLFSSNNKNYLAWYQQKPGQPPKLLIYWASTRESGVPDRFSGSGSGTDFTLTISSLQAEDVAVYYCQQYYGTPYTFGQGTKLEIN

SEQ ID NO: 23039 - protein, 110 aa, Artificial Sequence; identical to SEQ ID NO: 3070
  Synthetic construct

SEQ ID NO: 23040 - protein, 108 aa, Artificial Sequence
  Synthetic construct
SYELTQPPSVSVSPGQTARITCSGDALPKKYAYWYQQKSGQAPVLVIYEDTKRPSGIPERFSGSSSGTMATLTISGAQVVDEADYYCYSTDSSGNHWVFGGGTKLTVL

SEQ ID NO: 23041 - protein, 103 aa, Artificial Sequence
  Synthetic construct
SYELTQPPSVSVSPGQTASITCSGDKLGDKYACWYQQKPGQSPVLVIYQNSQRPSGIPERFSGSNSGNTATLTISGTQAMDEADYYCQAWDYVFGTGTKVTVL

SEQ ID NO: 23042 - protein, 112 aa, Artificial Sequence
  Synthetic construct
DIVMTQTPLSLSVTPGQPASISCKSSQSLLHGDGKTYLYWYLQKAGQPPQLLIYEVSTRFSAVPDRFSGSGSGTEFTLRISRVEAEDVGVYYCMQSIQIPLTFGGGTKVEIK

SEQ ID NO: 23043 - protein, 108 aa, Artificial Sequence
  Synthetic construct
EIVLTQSPATLSLSPGERATLSCRASQSVSSYLAWYQQKPGQTPRLLIYDASNRATGIPARFSGSGSGTDFTLTISSLEPEDFAVYYCQQRSDWPPLTFGGGTKVEIK

SEQ ID NO: 23044 - protein, 108 aa, Artificial Sequence
  Synthetic construct
DIQLTQSPSFLSASVGDRVTITCRASQGISSYLAWYQQKPGKAPKLLIYGASTLQSGVPSRFSGSGSGTEFTLTISSLQPEDFATYYCQQLNSYPEITFGPGTKVDIK

SEQ ID NO: 23045 - protein, 110 aa, Artificial Sequence
  Synthetic construct
QSVLTQPPSASGTPGQRVTISCSGSTSNIGSNYVYWYQQLPGTAPKLLIYRNNQRPSGVPDRFSGSKSGTSASLAISGLRSEDEADYYCAAWDDSLSGYVFGTGTEVTVL

SEQ ID NO: 23046 - protein, 108 aa, Artificial Sequence
  Synthetic construct
SYVLTQPPSVSVAPGKTARITCGGNNIGSKSVHWYQQKPGQAPVLVIYYDSDRPSGIPERFSGSNSGNTATLTITRVEAGDEADYYCQVWDSSGENCVFGTGTKVAVL

SEQ ID NO: 23047 - protein, 108 aa, Artificial Sequence
  Synthetic construct
EIVLTQSPATLSLSPGERATLSCRASQSVGSYLAWYQQKPGQAPRLLIYDASNRATGIPARFSGSGSGTDFTLTISSLEPEDFAVYYCQQRFNWPPLTFGGGTKVEIK

SEQ ID NO: 23048 - protein, 107 aa, Artificial Sequence
  Synthetic construct
DIQMTQSPSSLSASVGDRVAITCRASQNISNYLNWYQQKPGKAPKLLIYAASSLQSGVPSKFSGSGSGTDFTLTINSLQPEDFATYYCQQSSTTPETFGQGTKVEIK

SEQ ID NO: 23049 - protein, 114 aa, Artificial Sequence
  Synthetic construct
DIVMTQSPDSLAVSLGERATINCKSSQSVLYSSNNKNYLAWYQQKPGQPPKLLIYWASTRESGVPDRFSGSGSGTDFTLTISSLQAEDVAVYYCQQYYSTSRYTFGQGTKLEIK

SEQ ID NO: 23050 - protein, 108 aa, Artificial Sequence
  Synthetic construct
EIVLTQSPGTVSLSPGERATLSCRASQSVGSSYLAWYQQKPGQAPRLLIYAASSRAIGIPDRFSGGGSGTDFTLTISRLEPEDFAVYYCHQYGSPTWTFGQGTKVEIK

SEQ ID NO: 23051 - protein, 106 aa, Artificial Sequence
  Synthetic construct
DIQMTQSPSSLSASVGDRVTITCRASQSISNYLNWYQQKPGKAPKLLIYAASSLQSGVPSRFSGSGSGTDFTLTISSLQPEDFATYFCQQSYSPYTFGQGTKLEIK

SEQ ID NO: 23052 - protein, 108 aa, Artificial Sequence
  Synthetic construct
SYVLTQSPSVSVAPGKTARITCGGNNFGSKSVHWYQQKPGQAPLLVIYYDTDRPSGIPERFSGSNSGNTATLTISRVEAGDEADYYCQVWDSSIDHYVFGTGTKVTVL

SEQ ID NO: 23053 - protein, 107 aa, Artificial Sequence
  Synthetic construct
DIQMTQSPSTLSASVGDRVTITCRASESISRWLAWHQQKPGKAPKLLIYKASSLESGVPSRFSGSGSGTEFTLTISSLQPDDFATYYCQQYNSYPYTFGQGTKLEIK

SEQ ID NO: 23054 - protein, 107 aa, Artificial Sequence
  Synthetic construct
DIQMTQSPSSLSASVGDRVTITCRASQSISSYLNWYQQKPGKAPKLLIYAASSLQSGVPSRFSGSGSGTDFTLTISSLQPEDFATYYCQQSYSILWTFGQGTKVEIK

SEQ ID NO: 23055 - protein, 108 aa, Artificial Sequence
  Synthetic construct
SFALTQPPSVSVAPGQTARITCGGNNIGSKSVHWYQQKPGRAPVLVIYYDTARPSGIPERFSGSNSGNTAALTIRGVEVEDEADYSCQVWGGSVEHPVFGGGTKLTVL

SEQ ID NO: 23056 - protein, 107 aa, Artificial Sequence; identical to SEQ ID NO: 22518
  Synthetic construct

SEQ ID NO: 23057 - protein, 106 aa, Artificial Sequence
  Synthetic construct
SYELTQPPSVSVSPGQTASITCSGDKLGDKYACWYQQKPGQSPVLVIYQDNKRPSGIPERFSGSNSGNTATLTISGTQAMDEADYYCQAWDSSTFVFGTGTKVTVL

SEQ ID NO: 23058 - protein, 107 aa, Artificial Sequence [sequence omitted]

SEQ ID NO: 23059 - protein, 108 aa, Artificial Sequence
  Synthetic construct
DIQMTQSPSSLSASVGDRVTITCRASQSISSYLNWYQQKPGKAPKLLIYAASSLQSGVPSRFSGSGSGTDFTLTISSLHPEDFATYYCQQSSSTLMYTFGQGTKLEIK

SEQ ID NO: 23060 - protein, 107 aa, Artificial Sequence
  Synthetic construct
DIQMTQSPSSVSASVGDRVTITCRASQDIASWLAWYQQQPGKAPNLLIYAASSLQSGVTSRFSGSGSGTDFTLTINNLQPEDFATYYCQQANTFPLTFGGGTKVEIK

SEQ ID NO: 23061 - protein, 110 aa, Artificial Sequence
  Synthetic construct
QAVVTQEPSLTVSPGGTVTLTCGSSTGAVTSGHYPYWFQQKPGQAPRTLIYDTSNKHSWTPARFSGSLLGGKAALTLSGAQPEDEAEYYCLLSYSGAPVVFGGGTKLTVL

SEQ ID NO: 23062 - protein, 107 aa, Artificial Sequence
  Synthetic construct
EIVMTQSPATLSVSPGQRATLSCRASQSVSSNLAWYQQKPGQAPRLLIYGASTRATGIPARFSGSGSGTEFTLTISSLQSEDFAVYYCQQYNNWPWTFGQGTKVEIK

SEQ ID NO: 23063 - protein, 110 aa, Artificial Sequence
  Synthetic construct
QSALTQPASVSGSPGQSITISCTGTNSDVGSYDHVSWFQQHAGRAPKLMIYDVTNRPSGVSNRFSGSKSGNTASLTISGLQAEDEADYYCASYTNISTRVFGTGTTVTVL

SEQ ID NO: 23064 - protein, 107 aa, Artificial Sequence; identical to SEQ ID NO: 22783
  Synthetic construct

SEQ ID NO: 23065 - protein, 113 aa, Artificial Sequence; identical to SEQ ID NO: 2944
  Synthetic construct

SEQ ID NO: 23066 - protein, 110 aa, Artificial Sequence
  Synthetic construct
QSALTQPASVSGSPGQSITISCTGTSSDVGSYNIVSWYQQHPGKAPKLMIYEGSKRPSGVSNRFSGSKSGNTASLTISGLQAEDEADYYCCSYAGSSTFVFGGGTKLTVL

SEQ ID NO: 23067 - protein, 107 aa, Artificial Sequence
  Synthetic construct
DIQMTQSPPSLYVSVGDRVTITCRASQDISNYLNWYQQRPGKAPKVVIYDASVLETGVPSRFSGRGSGTTFTFTINSLQPEDFGTYFCQQYDGTPYTFGQGTKLQIK

SEQ ID NO: 23068 - protein, 106 aa, Artificial Sequence; identical to SEQ ID NO: 22485
  Synthetic construct

SEQ ID NO: 23069 - protein, 109 aa, Artificial Sequence; identical to SEQ ID NO: 22399
  Synthetic construct

SEQ ID NO: 23070 - protein, 110 aa, Artificial Sequence
  Synthetic construct
QSALTQPASVSGSPGQSITISCTGTSSDVGGYNYVSWYQQHPGKAPKVMIYDVTNRPSGVSNRFSGSKSGNTASLTISGLQAEDEADYFCSSYTSSSTLLFGTGTKVIVL

SEQ ID NO: 23071 - protein, 105 aa, Artificial Sequence
  Synthetic construct
SYVLTQPPSVSVAPGKTARISCGGNSIGSKSVHWYQQKPGQAPVLVIYYDSDRPSGIPERFSGSNSGNTATLTISRVEAGDEADYYCQVWDSTVVFGGGTKLTVL

SEQ ID NO: 23072 - protein, 107 aa, Artificial Sequence
  Synthetic construct
EIVLTQSPEFQSVTPKEKVTITCRASQSIGSTLHWYQQKPDQSPKLLIKYASQSFSGVPSRFSGSGSGTDFTLTINSLEAEDAATYYCHQSSSLPLTFGGGTKVEIK

SEQ ID NO: 23073 - protein, 107 aa, Artificial Sequence
  Synthetic construct
DIQMTQSPSSLSASVGDRVTITCRASQGISNYLAWYQQRPGKVPKLLIYAASTLQSGVPSRFSGSGSGTDFTLTIRSLQPEDVATYYCQKYNSVPLTFGGGTKVEIK

SEQ ID NO: 23074 - protein, 107 aa, Artificial Sequence
  Synthetic construct
SYELTQPPSVSVSPGQTASITCSGDKLGDKYACWYQQKPGQSPVLVVSQDTKRPSGIPERFSGSNSGNTATLTISGTLAMDEADYYCQTWDSSTAGVFGGGTKLTVL

SEQ ID NO: 23075 - protein, 107 aa, Artificial Sequence
  Synthetic construct
EIVMTQSPATLSMSPGEGATLSCRASQSVGSNLAWYQQKPGQAPRLLIHGVSTRATGVPARFSGSGSGTEFTLTISGLQSEDFAGYYCQQYNNWPWTFGQGTKVEIK

SEQ ID NO: 23076 - protein, 108 aa, Artificial Sequence
  Synthetic construct
SYELTQPPSVSVSPGQTARITCSADALPKQYASWYQQKPGQAPVLVIYKDNERPSGTPERFSGSSSGTTVTLTISGVQAEDEADYYCQSADRSGSYWVFGTGTKVTVL

SEQ ID NO: 23077 - protein, 106 aa, Artificial Sequence
  Synthetic construct
EIVMTQSPATLSVSPGERATLSCRASQSVSSYLAWYQQRPGQAPRLLIYGASTRATGIPARFSGSGSGTEFTLTISSLQSEDFAVYYCQQYNNWWTFGQGTKVEIK

SEQ ID NO: 23078 - protein, 109 aa, Artificial Sequence
  Synthetic construct
QAVVTQEPSLTVSPGGTVTLTCGSSTGAVTSGHYPYWFQQKPGQAPRTLIYDTSNKYSWTPARFSGSLLGGKAALTLSGAQPEDEAEYYCLLSYNGAAVFGGGTQLTVL

SEQ ID NO: 23079 - protein, 109 aa, Artificial Sequence
  Synthetic construct
DIVLTQSPGTLSLSPGERATLSCRASQSVSSSYLAWYQQKPGQPPRLLIYGASIRATGIPDRFSGSGSGTDFTLTISRLEPEDFAVYYCQQYGSSPMYTFGQGTKLEIK

SEQ ID NO: 23080 - protein, 107 aa, Artificial Sequence
  Synthetic construct
EIVLTQSPATLSLSPGERATLSCRASQSVSSYLAWYQQKPGQAPRLLIYDASNRATGIPARFSGSGSGTDFTLTINSLEPEDFAVYYCQQRNNWPPTFGQGTKLEIK

SEQ ID NO: 23081 - protein, 110 aa, Artificial Sequence
  Synthetic construct
QSALTQPASVSGSPGQSITISCTGTSSDVGSYNLVSWYQHHPGKAPQLMIYEGSKRPSGVSNRFSGSKSGNTASLTISGLQAEDEADYYCCSYAGSSIVVFGGGTKLTVL

SEQ ID NO: 23082 - protein, 105 aa, Artificial Sequence
  Synthetic construct
SYELTQPPSVSVSPGQTASITCSGDKLGDKYTCWYQQKPGQSPVLVIYQDNKRPSGIPERFSGSNSGNTATLTISGTQAMDEADYYCQAWDSSVVFGGGTKLTVL

SEQ ID NO: 23083 - protein, 108 aa, Artificial Sequence
  Synthetic construct
EIVMTQSPATLSVSPGDTATLSCRASQSFTSNLAWYQQKPGQAPRLLIYGASTRATGIPARFSGSGSGTEFTLTISSLQSEDFAVYYCQQYNNWPSWTFGQGTKVEIK

SEQ ID NO: 23084 - protein, 112 aa, Artificial Sequence
  Synthetic construct
QSALTQPPSASGSPGQSVTISCTGTSSDVGGYSYVSWYQHHPGKAPKLMIYEVSKRPSGVPDRFSGSKSGNTASLTVSGLQAEDEADYYCSSYGGSNNFYVLFGGGTSLTVL

SEQ ID NO: 23085 - protein, 109 aa, Artificial Sequence
  Synthetic construct
QSALTQPPSASGSPGQSVTISCTGTSSDVGGDNYVSWYQQRPGKAPKLMIYEVSKRPSGVPDRFSGSKSGNTASLTVSGLQAEDDADYYCSSYAGSSFVFGTGTKVTVL

SEQ ID NO: 23086 - protein, 107 aa, Artificial Sequence
  Synthetic construct
DIQMTQSPSSVSASVGDRVTITCRASLGISNWLGWYQQKPGKAPKLLIYAASTLQSGVPSRFSGSGSGTDFTLTISSLQPEDFASYYCQQGNSFPYTFGQGTKLEIK

SEQ ID NO: 23087 - protein, 110 aa, Artificial Sequence
  Synthetic construct
QSALTQPASVSGSPGQSITISCTGTSSDVGSYNLVSWYQQHPGKAPKLMIFEGSKRPSGVSNRFSGSKSGNTASLTISGLQAEDEADYYCCSYAGFSTWVFGGGTKLTVL

SEQ ID NO: 23088 - protein, 111 aa, Artificial Sequence
  Synthetic construct
QSVLTQPPSVSGAPGQRVTISCTGSGSNIGVGYDVHWYQQLPGTAPKLLIYGNSNRPSGVPDRFSGSKSGTSASLAISGLQAEDEADYYCQSYDSSLSGNVFGTGTKVTVL

SEQ ID NO: 23089 - protein, 106 aa, Artificial Sequence
  Synthetic construct
EIVLTQSPATLSLSPGERATLSCRASQSVSNYLAWYQQKPGQAPRLLIYDASNRATGIPARFNGSGSGTDFTLTISSLEPEDFAVYYCQQRNNRWTFGQGTKVEIK

SEQ ID NO: 23090 - protein, 107 aa, Artificial Sequence
  Synthetic construct
DIQMTQSPSSVSASVGDRVTITCRASQGISSWLAWYQQKPGKAPKLLIYAASSLQSGVPSRFSGSGSGTDFTLTISSLQPEDFATYYCQQAYSFPVTFGPGTKVHLK

SEQ ID NO: 23091 - protein, 109 aa, Artificial Sequence
  Synthetic construct
DLVLTQSPGVLSLSPGDGATLSCRASQSVGSSYIAWYQQRPAQAPRLLIYGASNRATGIPERFRGSGSGTDFTLSINRVEPGDVAVYFCQHFGSSPPFTFGQGTKLEIK

SEQ ID NO: 23092 - protein, 108 aa, Artificial Sequence
  Synthetic construct
SYVLTQPPSLSVAPGKTARIPCGVNNIGSNTVHWYQQKPGQAPVLVIHYDGVRPSGIPERFSGSNSGNTATLTISRVAAGDEADYYCQVWDGSGDHWVFGGGTKLTVL

SEQ ID NO: 23093 - protein, 108 aa, Artificial Sequence
  Synthetic construct
DIVLTQSPATLSLSPGERATLSCRASQSVGSSYLAWYQLKPGQAPRLLIYAASSRATGIPDRFSGSVSGTDFTLTISRLEPEDFAVYFCQQYGNSRLTFGPGTTVDLK

SEQ ID NO: 23094 - protein, 107 aa, Artificial Sequence; identical to SEQ ID NO: 3295
  Synthetic construct

SEQ ID NO: 23095 - protein, 108 aa, Artificial Sequence
  Synthetic construct
EIVLTQSPGTLSLSPGERATLSCRASQSVGSLYLGWFQQKPGQAPRLLIYAASSRATGIPDRFSGSGSGTDFTLTISRLEPEDFAVYYCQQYGGSPWTFGLGTKVEIK

SEQ ID NO: 23096 - protein, 108 aa, Artificial Sequence
  Synthetic construct
SYVLTQPPSVSVAPGKTARITCGGNNIGSKSVHWYQQKPGQAPVLVIYYDSDRPSGIPERFSGFNSGNTATLTISRVEAGDEADYYCQVWDSGSVFVLFGGGTKLTVL

SEQ ID NO: 23097 - protein, 113 aa, Artificial Sequence; identical to SEQ ID NO: 22927
  Synthetic construct

SEQ ID NO: 23098 - protein, 108 aa, Artificial Sequence
  Synthetic construct
DIQMTQSPSSLSASVGDRVTITCRASQNINIYLNWYQQKPGKAPKLLIYAASSLQSGVPSRFSGSGSGTEFTLTISSLQPEDFAAYYCQQSYSTLMYTFGQGTKVEIK

SEQ ID NO: 23099 - protein, 110 aa, Artificial Sequence
  Synthetic construct
QSALTQPASVSGSPGQAITITCTGTSSDVGYYNHVSWYQQHPGKAPKLIIFDVSDRPSGVSDRFSGSKSGNTASLTISGLQTEDEADYYCNSFISSSTLVFGGGTKLTVL

SEQ ID NO: 23100 - protein, 107 aa, Artificial Sequence
  Synthetic construct
DIQMTQSPSSLSASVGDRVTITCRASQGIRNDLGWFQQKPGKAPKRLIYGASNLQRGVPSRFSGSGSGTEFTLTISSLQPEDFATYYCLQHNSYPRTFGQGTKVEIK

SEQ ID NO: 23101 - protein, 109 aa, Artificial Sequence
  Synthetic construct
EIVLTQSPATLSLSPGERATLSCGASQSVSNYLAWYQQKPGQAPRLLIYAASKRAPGVPARFRGSGSGPDFTLTISSLEPEDFAVYYCQQRSNRPPTWTFGQGTKVEMK

SEQ ID NO: 23102 - protein, 107 aa, Artificial Sequence
  Synthetic construct
DIQMTQSPSSVSASVGDRVTITCRASQGISSWLAWYQQKPGKAPKLLIYGASSLQNGVTSRFSGSGSGTDFTLTITSLQPEDFATYYCQQANSFPLTFGQGTKLEIK

SEQ ID NO: 23103 - protein, 108 aa, Artificial Sequence
  Synthetic construct
SYVLTQPPSVSVAPGKTARITCGGNDIGSKSVHWYQQKPGQAPVLVIYYDSDRPSGIPERFSGSNSGNTATLTISRVEAGDEADYYCQVWDSSSDLWVFGGGTKLTVL

SEQ ID NO: 23104 - protein, 108 aa, Artificial Sequence
  Synthetic construct
SYELTQPPSVSVSPGQTARITCSGDALPKKYAYWYQQKSGRAPVLVIYEDSKRPSGIPERFSGSSSGTMVTLTISGAQVEDEADYYCYSADSSGNLWVFGGGTKVTVL

SEQ ID NO: 23105 - protein, 111 aa, Artificial Sequence; identical to SEQ ID NO: 23088
  Synthetic construct

SEQ ID NO: 23106 - protein, 107 aa, Artificial Sequence
  Synthetic construct
EIVLTQSPGTLSLSPGERATLSCRASQSVTSSYLAWYQQKPGQAPRLLIYGASSRATGIPDRFSGSGSGTDFTLTISRLEPEDFAVYYCQQYGSSPTFGQGTRLEIK

SEQ ID NO: 23107 - protein, 107 aa, Artificial Sequence; identical to SEQ ID NO: 2962
  Synthetic construct

SEQ ID NO: 23108 - protein, 112 aa, Artificial Sequence
  Synthetic construct
QSVLTQPPSVSGAPGQRVTISCTGFSSHIGAGYGVHWYQQLPGTAPKLLIYGNTNRPSGVPDRFSGSKSGTAASLAISGLQAEDEADYHCQSYDSSLSGSWVFGTGTKVTVL

SEQ ID NO: 23109 - protein, 110 aa, Artificial Sequence
  Synthetic construct
QSVLTQSPSASGTPGQRVTISCSGSSSNVGSNAVNWFQQLPGTAPRLLIYSNSQRPSGVPDRFSGSKSGTSASLAISGLQSEDEADYYCASWDDSLNGVVFGGGTKLTVL

SEQ ID NO: 23110 - protein, 108 aa, Artificial Sequence
  Synthetic construct
EIVLTQSPGTLSLSPGERATLSCRASQSVSSSQLAWYQQKPGQAPRLLIYGASSRATGIPDRFSGSGSGTDFTLTISRLEPEDFALYYCQQYGRSQGTFGQGTKLEIK

SEQ ID NO: 23111 - protein, 107 aa, Artificial Sequence
  Synthetic construct
EIVLTQSPDFQSVTPKEKVTITCRASQSIGSSLHWYQQKPDQSPKLLIKYASQSISGVPSRFSGSGSGTDFTLTINSLEAEDAAAYYCHQSSSLPLTFGGGTKVEIK

SEQ ID NO: 23112 - protein, 113 aa, Artificial Sequence
  Synthetic construct
DIVMTQSPDSLAVSLGEGATINCKSSQSVLSSSNNKNYLAWYQQKPGQPPKLLIYWASTRASGVPDRFSGSGSGTDFTLNISSLQADDVAVYYCQQYSTTPWTFGQGTKVEIK

SEQ ID NO: 23113 - protein, 115 aa, Artificial Sequence; identical to SEQ ID NO: 11530
  Synthetic construct

SEQ ID NO: 23114 - protein, 108 aa, Artificial Sequence; identical to SEQ ID NO: 22551
  Synthetic construct

SEQ ID NO: 23115 - protein, 112 aa, Artificial Sequence
  Synthetic construct
QSVLTQPPSVSGAPGQRVTISCTGSSSNIGAGYDVHWYQQLPGTAPKLLIYSNNNRPSGVPDRFSGSKSGTSASLAITGLQAEDEADYYCQSYDSSLSGLYVFGTGTKVTVL

SEQ ID NO: 23116 - protein, 110 aa, Artificial Sequence
  Synthetic construct
QSVLTQPPSMSAAPGQKVTISCSGSSSNIGNHYVSWYQQLPGTAPKLLIYDNNKRPSGIPDRFSGSKSGTSVFLAISGLQAEDEADYYCQSYDSSLIGSVFGGGTKLTVL

SEQ ID NO: 23117 - protein, 108 aa, Artificial Sequence
  Synthetic construct
SSELTQDPAVSVALGQTVRITCQGDSLRSYYASWYQQKPGQAPVLVIYGKNNRPSGIPDRFSGSNSGNTASLTITGAQAEDEADYYCNSRDSSGNPSVFGGGTKLTVL

SEQ ID NO: 23118 - protein, 108 aa, Artificial Sequence
  Synthetic construct
EIVLTQSPGTLSLSPGERATLSCRASQSVSSSSLAWYQHKPGQAPRLLIYSASSRATGIPDRFSGSGSGTDFTLTISRLEPEDFAVYYCQQYGSSQGTFGQGTKLEIK

SEQ ID NO: 23119 - protein, 109 aa, Artificial Sequence
  Synthetic construct
EIVLTQSPATLSLSPGERATLSCRASQSVSNYLAWYQQKPGQAPRLLIYAASKRAPGVPPRFRGSGSGPDFTLTISSLEPEDFALYYCQQRSNRPPTWTFGQGTKVEIK

SEQ ID NO: 23120 - protein, 108 aa, Artificial Sequence
  Synthetic construct
EIVMTQSPATLSVSPGERATLSCRASQSLGSNLAWYQQKPGQAPRLFFYGASTRANGIPARFSGSGSGTEFTLTISSLQSEDFAVYYCQQYNNWPLITFGQGTRLEIK

SEQ ID NO: 23121 - protein, 110 aa, Artificial Sequence
  Synthetic construct
QSALTQPASVSGSPGQSITISCTGTSSDVGSYNLVSWYQQHQGKAPKLIIYEGSKRPSGVSNRFSGSKSGNTASLTISGLQAEDEADYYCYSYAGFSTFVFGGGTKLTVL

SEQ ID NO: 23122 - protein, 110 aa, Artificial Sequence
  Synthetic construct
QSVLTQPPSASGTPGQRVTISCSGSSSNIGSSIVNWYQQLPGTAPKLLIYSDNQRPSGVPDRFSGSKSGTSASLAISGLQSEDEADYYCGAWDDSLNGYVFGTGTKVTVL

SEQ ID NO: 23123 - protein, 111 aa, Artificial Sequence; identical to SEQ ID NO: 3109
  Synthetic construct

SEQ ID NO: 23124 - protein, 115 aa, Artificial Sequence; identical to SEQ ID NO: 11530
  Synthetic construct

SEQ ID NO: 23125 - protein, 105 aa, Artificial Sequence
  Synthetic construct
DIQMTQSPSTLSASVGDRVTITCRASQSISSWLAWYQQKPGKAPKLLIYKASNLKSGVPSRFSGSGSGTDFTLTISSLQPDDFATYYCQQYNTWTFGQGTKVEVK

SEQ ID NO: 23126 - protein, 110 aa, Artificial Sequence
  Synthetic construct
QSVLTQPPSVSAAPGQKVTISCSGSSSNIGNNYVSWYQQLPGAAPRLFIYENNKRPSGIPDRFSGSKSGTSATLGITGLQTGDEADYYCGTWDNSLSAVVFGGGTKLTVL

SEQ ID NO: 23127 - protein, 110 aa, Artificial Sequence
  Synthetic construct
QSALTQPASVSGSPGQSITISCTGTSSDVGGYNYVSWYQHHPGKAPKLMIYDVSNRPSGVSNRFSGSKSGNTASLTISGLQAEDEADYYCSSYTRSSTWVFGGGTKLTVL

SEQ ID NO: 23128 - protein, 109 aa, Artificial Sequence
  Synthetic construct
SYELTQPPSVSVSPGQTARITCSGDALPKQYAYWYQQKPGQAPVLVIYKDSERPSGIPARFSGSSSGTTVTLTISGVQAEDEADYYCQSSDNSGTYNYVFGTGTKVTVL

SEQ ID NO: 23129 - protein, 114 aa, Artificial Sequence
  Synthetic construct
DIVMTQSPDSLAVSLGERATINCKSSQSVLDSSNNKNYLAWYQQTPGQTPKLLIYWASTRESGVPDRFSGSGSGTDFTLTISSLQAEDVAVYYCQQYYGTPLWTFGQGTKVEIK

SEQ ID NO: 23130 - protein, 108 aa, Artificial Sequence
  Synthetic construct
EIVLTQSPGTLSLSPGERATLSCRASQGVSSNYLAWYQQKPGQAPRVLIYGASSRAAGIPDRFSGSGSGTDFTLTISRLEPEDFAVYYCQQYGSSPWTFGQGTKVEIK

SEQ ID NO: 23131 - protein, 108 aa, Artificial Sequence
  Synthetic construct
QSALTQPASVSGSPGQSITISCTGTSSDVGSNGLVSWYQQHPGKAPKLMIYEGSKRPSGVSNRFSASKSGNTASLTISGLQAEDEADYYCCSHTGTWVFGGGTKLTVL

SEQ ID NO: 23132 - protein, 108 aa, Artificial Sequence
  Synthetic construct
EIVLTQSPGTLSLSPGEGATLSCRSSQSVGSSYLAWYQQKPGQAPRLLIYSVSSRATGIPDRFSGSGSGTDFTLTISRLEPEDFAVYYCQQYGSSPWTFGQGTKVEIK

SEQ ID NO: 23133 - protein, 110 aa, Artificial Sequence
  Synthetic construct
QSALTQPASVSGSPGQSITISCTGTSSDIGSYNLVSWYQHHPGKAPKLMIYGGSKRPSGVSNRFSGSKSGNTASLTISGIQAEDEADYYCCSYAGSSTYVFGTGTKVIVP

SEQ ID NO: 23134 - protein, 108 aa, Artificial Sequence
  Synthetic construct
EIVLTQSPGTLSLSPGERATLSCRASQSVGSIYLAWYQQKPGQAPRLLIYGSSSRAIGIPDRFSGSGSGTDFTLTISGLEPEDFAVYYCHQYGSSPWTFGQGTKVEIT

SEQ ID NO: 23135 - protein, 112 aa, Artificial Sequence
  Synthetic construct
QSVLTQPPSASGTPGQRVTISCSGSSSNIGSNYVNWYQQLPGTAPSLLIYRNDQRPSGVPDRFSGSKSGTSASLAISGLRSDDEADYYCAAWDDSLSGPYWVFGGGTKLTVL

SEQ ID NO: 23136 - protein, 107 aa, Artificial Sequence
  Synthetic construct
DIQMTQSPSSVSASVGDRVTITCRASQGISRWLAWYQQKPGKAPKLLISAASSLQSGVPSRFSGSGSGTEFTLTISSLQPEDFATYYCQQAHSFPPTFGGGTKVEIK

SEQ ID NO: 23137 - protein, 106 aa, Artificial Sequence
  Synthetic construct
DIQMTQSPSTLSASVGDRVTITCRASQSISSRLAWYQQKPGKAPKLLIYKASSLESGVPLRFSGSGSGTEFTLTISSLQPDDFATYYCQQYNSYWTFGQGTKVEIK

SEQ ID NO: 23138 - protein, 107 aa, Artificial Sequence
  Synthetic construct
EIVLTQSPDFQSVTPKQKVTITCRASQSIANSLHWYQQKPDQSPKLLIKYASQSFSGVPSRFSGGGSGTDFTLTINSLEAEDAATYYCHQSSTVPYTFGQGTKLEIK

SEQ ID NO: 23139 - protein, 105 aa, Artificial Sequence
  Synthetic construct
SYDVTQPLSVSVALGQTARITCGGNNIGSKNVHWYQQKPGQAPVLVIYRGSNRPSGIPERFSGSNSGNTATLTVSRAQAGDEADYYCQVWDSSVVFGGGTKLTVL

SEQ ID NO: 23140 - protein, 107 aa, Artificial Sequence; identical to SEQ ID NO: 11030
  Synthetic construct

SEQ ID NO: 23141 - protein, 105 aa, Artificial Sequence
  Synthetic construct
DIQLTQSPSFLSASVGDRVTITCRASQGISSYLAWYQQKPGKAPKLLIYAASTLQSGVPSRFSGSGSGTEFTLTVSSLQPEDFATYYCQQLNSYIFGGGTKVEIK

SEQ ID NO: 23142 - protein, 113 aa, Artificial Sequence; identical to SEQ ID NO: 2944
  Synthetic construct

SEQ ID NO: 23143 - protein, 107 aa, Artificial Sequence
  Synthetic construct
SYELTQPPSVSVSPGQTARITCSADALPKQYAYWYQQKPGQAPVVVIYKDSERPSGIPERFSGTSSGTTVTLTISGVQAEDEADYYCQSADSSGTVVFGGGTKLTVL

SEQ ID NO: 23144 - protein, 108 aa, Artificial Sequence
  Synthetic construct
SYELTQPPSVSVSPGQTARITCSADALPNQYAYWYQQKPGQAPVLVIYKDIERPSGIPERFSGSSSGTTVTLTISGVQAEDEADYYCQSIDSSGPYWVFGTGTKVTVL

SEQ ID NO: 23145 - protein, 110 aa, Artificial Sequence
  Synthetic construct
QSALTQPASVSGSPGQSITISCTGTSSDVGSYDHVSWFQQHAGKGPKLVIFDVNSRPSGVSNRFSGSKSGNTASLTISGLQAEDEADYYCFSYTSRGTRVFGTGTTVTVV

SEQ ID NO: 23146 - protein, 106 aa, Artificial Sequence; identical to SEQ ID NO: 11293
  Synthetic construct

SEQ ID NO: 23147 - protein, 108 aa, Artificial Sequence
  Synthetic construct
EVVLTQSPGTLSLSPGEGATLSCRASQSVSSTYLAWYQQKPGQAPRLLIYGAFSRATGIPDRFSGSGSGTDFTLTITRLEPEDFAVYFCQHYGSSPITFGQGTRLEIK

SEQ ID NO: 23148 - protein, 105 aa, Artificial Sequence
  Synthetic construct
EIVLTQSPGTLSLSPGERATLSCRASQSIHNNYLVWYHQKPGQPPRLLIYGTSNRATGTPDRFSGSGSGTDFTLTISRLEPEDFAVYYCQYYGRTFGQGTKVEVR

SEQ ID NO: 23149 - protein, 112 aa, Artificial Sequence
  Synthetic construct
DIVMTQSPLSLPVTPGEPASISCRSSQSLLHSNGYNYLDWYLQKPGQSPQLLIYLGSNRASGVPDRFSGSGSGTDFTLKISRVEAEDVGVYYCMQALESPLTFGPGTKVDIK

SEQ ID NO: 23150 - protein, 108 aa, Artificial Sequence
  Synthetic construct
SYELTQPPSVSVSPGQTARITCSADALPKQYAYWYQQKPGQAPVLLIYKDSERPSGIPDRFSGSSSGTTVTLTISGVQAEDEADYYCQSADSSGPYWVFGAGTKVTVL

SEQ ID NO: 23151 - protein, 111 aa, Artificial Sequence
  Synthetic construct
QSVLTQPPSVSAAPGQKVTISCSGSSSNIGNNYVSWYQHLPGTAPKLLIYENNKRPSGIPDRFSGSKSGTSATLGITGLQTGDEADYYCGTWDTSLSAPWVFGGGTKLTVL

SEQ ID NO: 23152 - protein, 107 aa, Artificial Sequence
  Synthetic construct
DIQMTQSPSSLSASVGDRVTITCRASQSISSYLNWYQQKPGKAPKVLIYVASSLQSGVPSRFSGSGSGTDFTLTISSLQPEDFATYYCQQSFSTPPTFGQGTKLEIK

SEQ ID NO: 23153 - protein, 112 aa, Artificial Sequence
  Synthetic construct
DIVMTQSPLSLPVTPGEPASISCRSSQSLLYSNGYTYLNWYLQKPGQSPQLLIYLGSNRASGVPDRFSVSGSGTDFTLIISRVEAEDVGVYFCMQALQTPWTFGQGTKVEIK

SEQ ID NO: 23154 - protein, 107 aa, Artificial Sequence
  Synthetic construct
DIQMTQSPSSLSASVGDRVTITCRASQSISTYLNWYQKKPGKAPKLLIYAASSLQSGVTSRFSGSGSGTDFTLTISSLQPEDYATYYCQQSYSAPYTFGQGTKLEIK

SEQ ID NO: 23155 - protein, 106 aa, Artificial Sequence
  Synthetic construct
DIQMTQSPSSLSASVGDRVTISCQTSQDITIYLNWYQQKPGKAPKLLIYDASNLEAGAPSRFSGSGSGTDFTFTISSLQPEDIATYYCQHYDDLPRFGPGTTVDIK

SEQ ID NO: 23156 - protein, 104 aa, Artificial Sequence
  Synthetic construct
EIVLTQSPATLSLSPGERATLSCRASQSVGSYLAWYQQKPGQAPRLLIYDASNRATGIPARFSGSGSGTDFTLTISSLEPEDFAVYYCQQRSSSFGPGTKVDIK

SEQ ID NO: 23157 - protein, 111 aa, Artificial Sequence
  Synthetic construct
QSVLTQPPSVSAAPGQKVTISCSGSSSNIGNNYVSWYQQLPGTAPKLLIYENDKRPSGIPDRFSGSKSGTSATLGITGLQTGDEADYYCGTWDSSLSAAWVFGGGTKLTVL

SEQ ID NO: 23158 - protein, 106 aa, Artificial Sequence
  Synthetic construct
SYELTQPPSVSVSPGQTASITCSGDKLGDKFVCWYQQKPGQSPVLVIYQDTERPSGIPERFSGSNSGNTATLTISGTQAMDEADYYCQAWASSTGVFGGGTKLTVL

SEQ ID NO: 23159 - protein, 112 aa, Artificial Sequence
  Synthetic construct
DIVLTQTPLSLSVTPGQPASISCKSSQSLLHSDGKTYLYWYLQRPGQPPQLLIYEVSNRFSGVPDRFSGSGSGTDFTLRISRVEAEDVGVYYCMQSLQFPLTFGGGTKVEIK

SEQ ID NO: 23160 - protein, 110 aa, Artificial Sequence
  Synthetic construct
QSALTQPASVSGSPGQSVTISCTGTSHDVGGYNYVSWYQQHPGKAPKLVIYDVVNRPSGVSSRFSGSKSGNTASLTISGLQAEDEADFYCTSYTDLSTAIFGGGTKLTVL

SEQ ID NO: 23161 - protein, 107 aa, Artificial Sequence
  Synthetic construct
DIRLTQSPSSLSASVGDRVTITCRASQSINRSLNWYLQKVGKPPKLLIYAASSLQSGVPARFSGSGSVTDFTLTISSLQPEDFATYYCQQSYSIPYTFGQGTKVEIK

SEQ ID NO: 23162 - protein, 113 aa, Artificial Sequence; identical to SEQ ID NO: 11094
  Synthetic construct

SEQ ID NO: 23163 - protein, 108 aa, Artificial Sequence; identical to SEQ ID NO: 3192
  Synthetic construct

SEQ ID NO: 23164 - protein, 107 aa, Artificial Sequence
  Synthetic construct
DIQMTQSPSSLSASVGDRVTITCQASQDITKYLNWYQQKPGKPPKLLIYDASNLETGAPSRFSGSGSGTDFTFTISSLQPEDIATYFCQHYDNLRWTFGPGTKVEIK

SEQ ID NO: 23165 - protein, 109 aa, Artificial Sequence
  Synthetic construct
QSALTQPASVSGSPGQSITISCTATSADVGAYNYVSWYQQHPGKAPKLMIYDVSHRPSGVSNRFSGSKSGYTASLTISGLQADDEADYYCSSYTSSSVVFGGGTKLTVL

SEQ ID NO: 23166 - protein, 108 aa, Artificial Sequence
  Synthetic construct
SYVLTQSPSVSVAPGKTARITCGGNNFGSKSVHWYQQKPGQAPLLVIYYDTDRPSGIPERFSGSNSGNTATLTISRVEAGDEADYYCQVWDSSSDHYVFGTGTKVTVL

SEQ ID NO: 23167 - protein, 107 aa, Artificial Sequence
  Synthetic construct
DIQMTQSPSSVSASVGDRVTITCRASQGISTWLAWYQQKPGKAPKLLIYAASSLQSGVPSRFSGSGSGTDFTLTISSLQPEDVATYYCQQAHSFPYTFGQGTKLQIK

SEQ ID NO: 23168 - protein, 112 aa, Artificial Sequence; identical to SEQ ID NO: 22735
  Synthetic construct

SEQ ID NO: 23169 - protein, 106 aa, Artificial Sequence; identical to SEQ ID NO: 11374
  Synthetic construct

SEQ ID NO: 23170 - protein, 110 aa, Artificial Sequence
  Synthetic construct
QSALTQPASVSGSPGQSITISCTGTSSDVGGYNYVSWYQQHPGKAPKLMIYDVTDRPSGVSDRFSGSKSGNTASLTISGLRAEDEADYYCSSYTISSTLVFGGGTKLTVL

SEQ ID NO: 23171 - protein, 109 aa, Artificial Sequence
  Synthetic construct
EIVLTQSPATLSLSPGERATLSCRASQSVSNFLAWYQQKPGQAPRLLIYDASNRATGIPARFSGSGSGTDFTLTISSLEPEDFAVYYCHHRSNWPPLLTFGGGTKVEIK

SEQ ID NO: 23172 - protein, 106 aa, Artificial Sequence
  Synthetic construct
DIQMTQSPSSLSASVGDRVTISCQTSQDINIYLNWYQQQPGKAPRLLIYDASNLEAGAPSRFSGSGSGTDFTFTISSLQPEDIATYYCQHYDNLPRFGPGTKVDIK

SEQ ID NO: 23173 - protein, 110 aa, Artificial Sequence
  Synthetic construct
QSALTQPASVSGSPGQSITISCTGTSSDIGGYKYVSWYQQHPGKAPKLMIYDVSNRPSGVSNRFSGSKSGNTASLTISGLQADDEADYYCSSYTSSSTWVFGGGTRLTVL

SEQ ID NO: 23174 - protein, 111 aa, Artificial Sequence
  Synthetic construct
QSVLTQPPSVSGAPGQRVTISCTGGTSNIGALYDVHWYQQIPGTAPKLLIYGNTNRPSGVPDRFSGSKSGTSASLAITGLRPEDEADYYCQSYDNSLSASVFGGGTKLTVL

SEQ ID NO: 23175 - protein, 108 aa, Artificial Sequence
  Synthetic construct
EIVLTQSPGTLSLSPGERATLSCRASQSVSSSYFAWYQQKPGQAPRLLIYAAASRAIGIPDRFSGSGSGTDFTLTISRLEPEDFAVYYCQQYGGPTWTFGQGTKVEIK

SEQ ID NO: 23176 - protein, 110 aa, Artificial Sequence
  Synthetic construct
QSALTQPASVSGSPGQSITISCTGTSSDIATYNYVSWYQQHPGKAPKLMIYHVNYRPSGVSNRFSGSKSGNTASLTISGLQAEDEADYYCNSYTSSSTWVFGGGTRLTVL

SEQ ID NO: 23177 - protein, 106 aa, Artificial Sequence
  Synthetic construct
SYELTQPPSVSVSPGQTASITCSGQKLGDKYVCWYQQKPGQSPGLVIYQDTKRPSGIPERFSGSNSGNTATLTISGTQAMDEADYYCQAWDSSNVVFGGGTKLTVL

SEQ ID NO: 23178 - protein, 107 aa, Artificial Sequence
  Synthetic construct
DIQLTQSPSSLSASVGDRVTITCQASQDINNYLNWYQQKPGEAPKLVIHDASNLEIGVPSRFSGSGSGTDLTLTISTLQPEDVATYYCQQFHSLPLTFGGGTKVEIK

SEQ ID NO: 23179 - protein, 107 aa, Artificial Sequence
  Synthetic construct
DIQMTQSPSSLSASVGDRVTITCRASQNISSDLNWYQQKPRKAPKLLIYAASSLQSGVPSRFSGSGSGTDFTLTISSLQAEDFSTYYCQQTYYTFFTFGPGTRVDIK

SEQ ID NO: 23180 - protein, 110 aa, Artificial Sequence
  Synthetic construct
QSALTQPRSVSGSPGQSVTISCTGTSSDVGGYNYVSWYQQHPGKAPKFMIYDVTKRPSGVPDRFSGSKSGNTASLTISGLQVEDEADYYCCSYAGTYSVVFGGGTKLTVL

SEQ ID NO: 23181 - protein, 109 aa, Artificial Sequence
  Synthetic construct
EIVLTQSPAILSLSPGERATLSCRASQSVSSYLAWYQQKPGQAPRLLIYDASNRATGIPARFSGSGSGTDFTLTISSLEPEDFAVYYCQQRRNWPPRYTFGQGTKLEIK

SEQ ID NO: 23182 - protein, 108 aa, Artificial Sequence
  Synthetic construct
DIQMTQSPSSLSTSVGDRVTITCRASQSISSYLNWYQQRPGKAPKLLIYAASTLQSGVPSRFSGSGSGTDFTLTISSLQPEDFATYYCQQTYIAPGWTFGQGTKVEIK

SEQ ID NO: 23183 - protein, 110 aa, Artificial Sequence
  Synthetic construct
QSVLTQPPSASGTPGQRVTISCSGSSSNIGSSIVNWYQQLPGTAPKLLIYSNNQRPSGVPDRFSGSKSGTSASLAISGLQSEDEADYYCAAWDDSLNGYVFGTGTKVTVL

SEQ ID NO: 23184 - protein, 108 aa, Artificial Sequence
  Synthetic construct
DIQMTQSPSSLSASVGDRVTITCRASQGIRNDLGWYQQKPGKAPKRLIYAASTLQSGVPSRFSGSGSGTEFSLTISSLQPEDFATYYCLQYNFYPLVTFGQGTRLEIR

SEQ ID NO: 23185 - protein, 107 aa, Artificial Sequence
  Synthetic construct
DIQMTQSPSSLSASVGDRVTITCRASQGISIYLAWFQQKPGKAPKSLIYAASRLQSGVPSKFSGNGSGTDFTLTISSLQPEDFATYYCQQYNTYPITFGQGTRLEIK

SEQ ID NO: 23186 - protein, 107 aa, Artificial Sequence
  Synthetic construct
DIQLTQSPSFLSASVGDRVTITCRASQGISSYLAWYQQKPGKAPKLLIYAASTLQSGVPSRFSGSGSGTEFTLTISSLQPEDFATYYCQQLNSYPQTFGQGTKVEIK

SEQ ID NO: 23187 - protein, 109 aa, Artificial Sequence
  Synthetic construct
SYELTQPPSVSVSPGQTARITCSGDALPKKYAYWYQQKSGQAPVLVIYEDSNRPSGIPERFSGSSSGTMATLTISGAQVEDEADYYCYSTDSSDNHKGVFGGGTKLTVL

SEQ ID NO: 23188 - protein, 112 aa, Artificial Sequence
  Synthetic construct
DIVMAQTPLSLSVTPGQPASISCKSSQSLLHSDGKTYLYWYLQKPGQPPQLLIYELSDRFSGVPERFTGSGSGTDFTLKISRVEAEDVGVYYCMQSIQLPLTFGQGTRLEIR

SEQ ID NO: 23189 - protein, 107 aa, Artificial Sequence
  Synthetic construct
EIVMTQSPATLSVSPGERATLSCRASQTVSSNLAWYQQKPGQAPRLLIYGASTRATGLPARFSGSGSGTEFTLTISSLQSEDFAVYYCQQYNNWPYTFGQGTKLDIK

SEQ ID NO: 23190 - protein, 108 aa, Artificial Sequence
  Synthetic construct
EIVLTQSPGTLSLSPGERATLSCRASQSVSTSYLAWYQQRPGQAPRLLILGASSRAAGIPDRFSGSGSGTDFTLTISRLEPEDFAVYYCQHYGSSPYTFGQGTKLDIK

SEQ ID NO: 23191 - protein, 108 aa, Artificial Sequence
  Synthetic construct
SSELTQPPSVSVSPGQTARITCSGDALPKKYVCWYQQKSGQAPVVVIYEDSKRPSGIPERFSGSSSGTMATLTISGAQVEDEADYYCYSTGSSGNHRVFGGGTKLTVL

SEQ ID NO: 23192 - protein, 108 aa, Artificial Sequence
  Synthetic construct
EIVLTQSPATLSLSPGERATLSCRASQSISSFLAWYQQKPGQAPRLLIYDASNRATGIPVRFSGSGSGTDFTLTISSLEPEDFAVYYCQRRSNWPPFTFGGGTKVEIK

SEQ ID NO: 23193 - protein, 109 aa, Artificial Sequence
  Synthetic construct
QSVLTQPPSASGTPGQRVTISCSGSSSNIGSNTVNWYQQLPGTAPKLLIYSNNQRPSGVPDRFSGSKSGTSASLAISGLQSEDEADYYCAAWDDSLNKVFGGGTKLTVL

SEQ ID NO: 23194 - protein, 108 aa, Artificial Sequence
  Synthetic construct
EIVLTQSPGTLSLSPGERATLSCRASQSVSSSYLAWYQQKPGQAPRLLIYGASSRATGIPDRFSGSGSGTDFTLTISRLEPEDFAVYYCQQYGSSPLTFGPGTKVDIK

SEQ ID NO: 23195 - protein, 110 aa, Artificial Sequence
  Synthetic construct
SYVLTQPPSVSVAPGKTARITCGGNNNGSKSVHWYQQKPGQAPVLVIYYDSDRPSGIPERFSGSNSGNTATLTISRVEAGDEADYYCQVWDSSSDHAGVVFAGGTKLTVL

SEQ ID NO: 23196 - protein, 108 aa, Artificial Sequence
  Synthetic construct
SSELTQDPAVSVALGQTVRITCQGDSLRRYYASWYQQKPGQAPVLVIYGENNRPSGIPDRFSGSSSGNTASLTITGAQAEDEADYYCKSRDSSGNHLVFGGGTKLTVL

SEQ ID NO: 23197 - protein, 106 aa, Artificial Sequence
  Synthetic construct
EIVMTQSPATLSVSPGERATLSCRASQSVSSNLAWYQQIPGQAPRLLIYGASTRATGIPARFSGSGSGTEFTLTISSLQSEDFAVYYCQQYNNWLTFGGGTKVEIK

SEQ ID NO: 23198 - protein, 107 aa, Artificial Sequence
  Synthetic construct
DIQMTQSPSTLSASVGDRVTITCRASQSISSWLAWYQQKPGKAPKLLIYKASSLESGVPSRFSGSGSGTEFTLTISSLQPDDFATYYCQQYNSYSRTFGQGTKVEIK

SEQ ID NO: 23199 - protein, 108 aa, Artificial Sequence
  Synthetic construct
SYELTQPPSVSVSPGQTARITCSGDALPKKYAFWYQQKSGQAPVLVIYEDSKRPSGIPERFSGSSSGTMATLTISGAQVEDEADYYCYSTGSSGNHRVFGGGTKLTVL

SEQ ID NO: 23200 - protein, 107 aa, Artificial Sequence
  Synthetic construct
DIQMTQSPSSLSASVGDRVIITCRASQSISTYLNWYQQKPGKAPKLLIYTASSLQSGVPSRFSGSGSGTDFTLTISSLQPEDFATYYCQQSYSTPLTFGGGTKVEIK

SEQ ID NO: 23201 - protein, 109 aa, Artificial Sequence
  Synthetic construct
EIVLTQSPATLSLSPGERATLSCRASQSVSSFLAWYQQKPGQAPRLLIYDASNRATGIPARFSGSGSGTDFTLTISSLEPEDFALYYCQQRNNWPPRITFGQGTRLEIK

SEQ ID NO: 23202 - protein, 109 aa, Artificial Sequence
  Synthetic construct
EIVLTQSPGTLSLSPGERATLSCRASQSVSSSYLAWYQQKPGQAPRLLIYGASSRAPGFPDRFSGSGSGTDFTLTISRLEPEDFAVYYCQQYGSSPMYTFGQGTKLEIK

SEQ ID NO: 23203 - protein, 107 aa, Artificial Sequence
  Synthetic construct
EIVLTQSPDFQSVTPKEKVTITCRASQSIGSRLHWYQQKPDQSPKLLIKYASQSISGVPSRFSGSGSGTDFTLTINSLEAEDAAAYYCHQSSSLPLTFGQGTRLEIK

SEQ ID NO: 23204 - protein, 107 aa, Artificial Sequence
  Synthetic construct
SYELTQPPSVSVSPGQTARITCSGDALPKKYAYWYQQKSGQAPVLVIYEDNKRPSGIPERFSGSSSGTMATLTITGAQVEDEADYYCHSRDSSGNPLFGGGTKLTVL

SEQ ID NO: 23205 - protein, 111 aa, Artificial Sequence
  Synthetic construct
DIVMTQTPLSLSVTPGQPASISCKSSQSLLHSDGKTYLYWYLQKPGQPPQLLIYEVSDRFSGVPDRFSGSGSGTYFTLKISRVEAEDVGVYYCMQSIQLITFGQGTRLEIK

SEQ ID NO: 23206 - protein, 106 aa, Artificial Sequence
  Synthetic construct
SYELTQPPSVSVSPGQTARITCSGDELPKKYAYWYQQKSGQAPVLVIYEDSKRPSGIPERFSGSSSGTMATLTISGAQVEDEADYYCYSTDRSGRVFGGGTKVTVL

SEQ ID NO: 23207 - protein, 112 aa, Artificial Sequence
  Synthetic construct
DIVMTQSPDSLAVSLGERATINCKSSQSVLYSSNNKNHLAWYQQKPGQPPKVLIYWASTRESGVPDRFSGSGSGTDFTLTISSLQAEDVAVYYCQQYYSTPTFGQGTKVEIK

SEQ ID NO: 23208 - protein, 112 aa, Artificial Sequence
  Synthetic construct
DVVVTQSPVSLPATPGEPASISCRASQSLLHSNGKHYLHWYLQRPGQSPQLLIYLGSNRASGVPDRFSGSGSGTVFSLKISRVEAEDVGIYYCMQALHFPYTFGQGTKLEIK

SEQ ID NO: 23209 - protein, 109 aa, Artificial Sequence
  Synthetic construct
EIVLTQSPATLSLSPGERATLSCRASQSVSSFLAWYQQKPGQAPRLLIYDASNRATGIPARFSGSGSGTDFTLTIGSLEPEDFAVYYCQYRSNWPPRYTFGQGTKLEIK

SEQ ID NO: 23210 - protein, 110 aa, Artificial Sequence
  Synthetic construct
QSALTQPASVSGSPGQSITISCTGTSSDVGSYNLVSWYQQHPGKAPKLMIYEGNKRPSGVSNRFSGSKSGNTASLTISGLQAEDEADYYCFSYAGSSTYVFGTGTKVTVL

SEQ ID NO: 23211 - protein, 107 aa, Artificial Sequence; identical to SEQ ID NO: 22730
  Synthetic construct

SEQ ID NO: 23212 - protein, 110 aa, Artificial Sequence
  Synthetic construct
QSALTQPASVSGSPGQSITISCTGTSSDVGGYNYVSWYQQHPGKAPKLMIYDVSNRPSGVSNRFSGSKSGNTASLTISGLQAEDEADYYCSSYTSSSTYVFGTGTKVTVL

SEQ ID NO: 23213 - protein, 108 aa, Artificial Sequence
  Synthetic construct
SYVLTQPPAVSVAPGKTARITCGGNNIGSNSVHWYQQRPGQAPVLVIYYDGDRPSGIPERFSGSNSGNTATLIISRVEAGDEADYYCQVWDSSSDHRVFGGGTKLTVL

SEQ ID NO: 23214 - protein, 110 aa, Artificial Sequence
  Synthetic construct
SYVLTQPPSVSVGPGKTARITCGGNDIGSKNVHWYQQKAGQAPVLVISYDTDRPSGIPDRFSGSNSGNTATLTISRVEVGDEADYYCQVWDSSSDHSHVVFGGGTKLTVL

SEQ ID NO: 23215 - protein, 106 aa, Artificial Sequence; identical to SEQ ID NO: 11374
  Synthetic construct

SEQ ID NO: 23216 - protein, 105 aa, Artificial Sequence
  Synthetic construct
SYDLTQPLSMSVALGQTARITCGGDNIGSKNVHWYQQKPGQAPVLVIYRDSNRPSGIPERISGSKSGNTATLTISRAQAGDEADYYCQVWDSSVVFGGGTKLTVL

SEQ ID NO: 23217 - protein, 107 aa, Artificial Sequence
  Synthetic construct
DIQMTQSPSSLPASVGDRVTITCRASQDIRNDLGWFQQKPGRAPKRLIYGASILESGVPSRFSGSGSKTEFTLTISSLQPEDFATYYCVQQNSFPYSFGQGTKLQIK

SEQ ID NO: 23218 - protein, 105 aa, Artificial Sequence
  Synthetic construct
SYVLTQPPSVSVAPGKTARITCGENNIGSKSVHWYQQEPGQAPVLVIYYDTDRPSGIPERFSGSNSGNTATLTISRVEAGDEADYYCQVWDSGWVFGGGTKLTVL

SEQ ID NO: 23219 - protein, 106 aa, Artificial Sequence
  Synthetic construct
DIQMTQSPSTLSASVGDRVTITCRASQSISSWLAWYQQKPGKAPKLLIYKASSLESGVPSRFSGSGSGTEFTLTISSLQPDDFATYYCQQYNSYSAFGQGTKVEIK

SEQ ID NO: 23220 - protein, 109 aa, Artificial Sequence
  Synthetic construct
SYELTQPPSVSVSPGQTARITCSGDALPKEYVFWYQQKPGQAPVLVIYKDNKRPSGISERFSGSSSGTTATLTITGAQTEDEADYFCQSADSSGPYPYVFGTVTKVTVL

SEQ ID NO: 23221 - protein, 114 aa, Artificial Sequence
  Synthetic construct
QSAVTQPASVSGSPGQSITISCTGTSSDIGRYNLVSWYQHHPGKAPKFLIYEVSKRPSGVSDRFSGSKSGDTASLTISGLQAEDEADYYCYSYAGAGSGGSSWVFGGGTKLTVL

SEQ ID NO: 23222 - protein, 107 aa, Artificial Sequence
  Synthetic construct
DFQMTQSPSSLSASVGDRVTITCQASQDINNYLNWYQQKPGKAPKLLIYDASNLETGVPSRFSGSGSGTDFTFTISSLQPEDIATYYCQQYDNPLFTFGPGTKVDIK

SEQ ID NO: 23223 - protein, 109 aa, Artificial Sequence
  Synthetic construct
EIVLTQSPGTLSLSPGDTATLSCRASQSVSNFLVWYQHKPGQAPRLLIYDASNRATGIPARFSGSGSGTDFTLTISSLEPEDFAVYFCQHRSNWPPALTFGGGTKVEIK

SEQ ID NO: 23224 - protein, 108 aa, Artificial Sequence
  Synthetic construct
SYELTQPPSVSVSPGQTARITCSGDALPKKYAYWYQQKSGQAPVLVIYEDSKRPSGIPERFSGSSSGTMATLTINGAQVEDEADFYCYSTDTSGNRRVFGGGTTLTVL

SEQ ID NO: 23225 - protein, 107 aa, Artificial Sequence
  Synthetic construct
DIQMTQSPSSLSASVGDRVTITCRASQSINKYLNWYQLKPGKAPKLLIYAASSLQSGVPSRFSGSGSGIDFTLTISSLQPEDFATFYCQQSYSTPFTFGGGTKVEIK

SEQ ID NO: 23226 - protein, 111 aa, Artificial Sequence
  Synthetic construct
QSVLTQPPSASGTPGQRVTISCSGSSSNIGSNYVYWYQQLPGTAPKLLIYRNNQRPSGVPDRFSGSKSGTSASLAISGLRSEDEADYYCAAWDDSLSGSWVFGGGAKLTVL

SEQ ID NO: 23227 - protein, 108 aa, Artificial Sequence
  Synthetic construct
EIVLTQSPATLSLSPGERATLSCRASQNINTYLAWYQQKPGQAPRLLIYDASNRATGIPARFSGSGSGTDFTLTINSLEPEDFAVYYCQQRSNWPPFTFGPGTKVDIK

SEQ ID NO: 23228 - protein, 108 aa, Artificial Sequence
  Synthetic construct
EIVLTQSPGTLSLSPGERATLSCRASQRVTSTSLTWYQQKPGQAPRLLIYDTSNRATGVPDRFSGSGSGTDFTLTISRLAPEDFAVYYCQQYDRSSYTFGQGTKLEIK

SEQ ID NO: 23229 - protein, 108 aa, Artificial Sequence
  Synthetic construct
SYELTQPPSVSVSPGQTARITCSGDALSKKYGYWYQQKSGQAPVLVIYDDSKRPSGIPERFSGSSSGTMATLTISGAQVDDEADYYCYSTDSSGNHWVFGGGTKLTVL

SEQ ID NO: 23230 - protein, 107 aa, Artificial Sequence
  Synthetic construct
DIQLSQSPSSLSASIGDGVTFTCRASQTINIYLNWYQHRPGKAPKLLIYAASSLQSGVPSRFSGSGSGTDFTLTISSLQPEDFATYYCQQSYSSPWTFGQGTKVEIK

SEQ ID NO: 23231 - protein, 113 aa, Artificial Sequence
  Synthetic construct
QSALTQPASVSGSPGQSITISCSGTSSDVGGYNYVSWYQQHPGKAPKLMIYDVSNRPSGVSNRFSGSKSGNTASLTISGLQAEDEADYYCSSYTSSSTLDFYVFGTGTKVTVL

SEQ ID NO: 23232 - protein, 112 aa, Artificial Sequence
  Synthetic construct
DIVMTQTPLSLSATPGQPASISCKSSQSLLHGDGKTYLYWYLQKPGQPPQLLIYEVFNRFSGVPDRFSGSGSGTDFTLKISRVEAEDVGVYYCMQSIELPYTFGQGTKLEIK

SEQ ID NO: 23233 - protein, 107 aa, Artificial Sequence
  Synthetic construct
DIQMTQSPSSLSASVGDRVTITCQASQDINKYLNWYQQKPGKAPKLLIYDASNLETGVPSRFSGSGSGTDFTFTISSLQPQDIATYFCQQYDNLPPAFGQGTKVEIK

SEQ ID NO: 23234 - protein, 113 aa, Artificial Sequence
  Synthetic construct
DIVMTQSPDSLAVSLGERATINCKSSQSVLYSSNNKNYLAWYQQKAGQPPKLLIYWASTRESGVPDRFRGSGSETDFTLTISSLQAEDVAVYYCQQYYSTPLTFGPGTKVDIK

SEQ ID NO: 23235 - protein, 112 aa, Artificial Sequence
  Synthetic construct
DIVMTQSPLSLPVTPGEPASISCRSSQSLVHRNGYNYLDWYLQKPGQSPQLLIYLGSNRASGVPDRFSGSISGTDFTLKISRVEAEDVGVYYCMEALQTPFTFGPGTKVDIK

SEQ ID NO: 23236 - protein, 106 aa, Artificial Sequence
  Synthetic construct
DIQLTQSPSFLSASVRDRVTITCRASQDISSFLAWYQQEPGKAPKLLIYGASTLQSGVPSRFSGSGSGTEFTLTISSLQPEDFATYYCQHLNSYPLFGPGTKVDIK

SEQ ID NO: 23237 - protein, 110 aa, Artificial Sequence
  Synthetic construct
QSALTQPPSASGSPGQSVTISCTGTSSDVGGYNYVSWYQQHPGKAPKLMIYEVSKRPSGVPDRFSGSKSGNTASLTVSGLQAEDEADYYCSSYAGSNNLRFGGGTKLTVL

SEQ ID NO: 23238 - protein, 111 aa, Artificial Sequence; identical to SEQ ID NO: 11102
  Synthetic construct

SEQ ID NO: 23239 - protein, 113 aa, Artificial Sequence
  Synthetic construct
DIVMTQSPDSLAVSLGERATINCKSSQSVLYSSSNKNYLAWFQQKPGQPPKLLIHWASIREFGVPDRFSGSGSGTDFTLTISSLQAEDVAVYYCQQYYHTAWTFGQGTQVEIK

SEQ ID NO: 23240 - protein, 107 aa, Artificial Sequence
  Synthetic construct
DIQMTQSPSTLSASVGDRVTITCRASQSISSWLAWYQQKPGKAPKLLIYKASSLERGVPSRFSGSGSGTEFTLTISSLQSDDFATYYCHQYHTYSCTFGQGTKVEIK

SEQ ID NO: 23241 - protein, 110 aa, Artificial Sequence; identical to SEQ ID NO: 10895
  Synthetic construct

SEQ ID NO: 23242 - protein, 110 aa, Artificial Sequence
  Synthetic construct
QSALTQPASVSGSLGQSITISCTGSISDIGSYDHVSWFQQHAGRAPKLMIYDVNDRPSGISTRFSGSKSGNTASLTISGLQAEDEADYYCNSYTTGGTRLFGSGTAVTVL

SEQ ID NO: 23243 - protein, 107 aa, Artificial Sequence
  Synthetic construct
DIQMTQSPSSVSASVGDRVTITCRASQGISSWLAWYQQKPGKAPKVLIYAASSLQSGVPSRFSGSGSGTDFTLTISSLQPEDFAIYYCQQANSFPFTFGGGTKVEIK

SEQ ID NO: 23244 - protein, 114 aa, Artificial Sequence
  Synthetic construct
QSALTQPASVSGSPGQSITISCTGTSSDLGGYNFVSWYQQHPGKAPKLMIYDVNNRSSGVSNRFSGSKSGNTASLTISGLQAEDEADYYCSSYTSNNTLEGGYVFGTGTKVTVL

SEQ ID NO: 23245 - protein, 106 aa, Artificial Sequence
  Synthetic construct
DIQMTQSPSSLSASVGDRVTITCRASQGIRNDLGWYQQKPGKAPKRLIYAASSLQSGVPSRFSGSGSGTEFTLTISSLQPEDFATYYCLQHNSYLTFGQGTKVEIK

SEQ ID NO: 23246 - protein, 107 aa, Artificial Sequence
  Synthetic construct
EIVLTQSPGTLSLSPGERATLSCRASQSVSSSYLAWYQQKRGQAPRLLIYGASSRATGIPDRFSGSGSGTDFTLTISRLEPEDFAVYYCQQYGSSFTFGPGTKVDIK

SEQ ID NO: 23247 - protein, 106 aa, Artificial Sequence; identical to SEQ ID NO: 23077
  Synthetic construct

SEQ ID NO: 23248 - protein, 108 aa, Artificial Sequence
  Synthetic construct
SYELTQPPSVSVSPGQTARITCSGDALPKKYAYWYQQKSGQAPVLVIYEDSKRPSGIPERFSGSSSGTMATLTISGAQVEDEGDYYCYSTDSSGHQGVFGGGTKLTVL

SEQ ID NO: 23249 - protein, 110 aa, Artificial Sequence; identical to SEQ ID NO: 22616
  Synthetic construct

SEQ ID NO: 23250 - protein, 109 aa, Artificial Sequence
  Synthetic construct
QTVVTQEPSLTVSPGGTVTLTCASSTGAVTSGYFPNWFQQKPGQAPRALIYSTSNKHSWTPARFSGSLLGGKAALTLSGVQPEDEAEYYCLLYYVGTPVFGGGTQLTVL

SEQ ID NO: 23251 - protein, 108 aa, Artificial Sequence
  Synthetic construct
SYELTQPPSVSVAPGRTARITCGGSNIGDKSVHWYQLKPGQAPVMVMYYDSDRPSGIPERFSGSNSGITATLTISRVEAGDEADYYCQVWDSTTKHYVFGPGTEVTVL

SEQ ID NO: 23252 - protein, 108 aa, Artificial Sequence
  Synthetic construct
QSALTQPRSVSGSPGQSVTISCTGTSSDVGDSDYVSWYQQYAAKAPKLLIYLVDRRPSGVPDRFSGSKSGNTASLTISGLQAEDEADYYCCAYVGASLFGGGTKLTVL

SEQ ID NO: 23253 - protein, 108 aa, Artificial Sequence
  Synthetic construct
ETVMTQSPATLSVSPGERATLSCRASQSVSSNLAWYQQKPGQAPRLLLYGASTRATGIPARFSGSGSGTEFTLSISSLQSEDFAVYYCQQYNNWPFWTFGQGTTLEIK

SEQ ID NO: 23254 - protein, 103 aa, Artificial Sequence
  Synthetic construct
DIQMTQSPSSLSASVGDRVTITCRASQSSGNYLNWYQQKPGKAPNLLIYAASSLQSGVPSRFRGSGSGTDFTLTISSLQPEDFATYYCQQRYAFGQGTKLEIK

SEQ ID NO: 23255 - protein, 112 aa, Artificial Sequence
  Synthetic construct
DTVMTQSPLSLPVTPGEPASISCRSSQSLLHRNGYNYLDWYLQKPGQSPQLLIYLGSTRASGVPDRFSGSGSGTDFTLKINRVEAEDVGVYYCMQALQTPRTFGQGTKVEIK

SEQ ID NO: 23256 - protein, 118 aa, Artificial Sequence
  Synthetic construct
QSALTQPASVSGSPGQSITISCTGTNNDVGSYNLVSWYQQYPGQAPKLVIYEATKRPSGISNRFSGSKSGNTASLTISGLLAEDEADYYCSSFAAITSSSATVTTSVIFGGGTKLTVL

SEQ ID NO: 23257 - protein, 114 aa, Artificial Sequence
  Synthetic construct
NIVMTQSPDSLTVSLGERATINCKSSQSVLYSSNNKNYLAWYQQKPGQPPKLLIYWASTRESGVPDRFSGSGSGTDFTLTISSLQAEDVAVYYCQQYYSTPMYTFGQGTKLEIK

SEQ ID NO: 23258 - protein, 108 aa, Artificial Sequence
  Synthetic construct
EIVMTQSPVTLSVSPGERATLSCRASQSLSNNLAWYQQKPGQAPRLLIYAASTRATGIPARFSGSGSGTEFTLTISSLQSEDFAVYFCQQYNNWPPLTFGGGTKVEIK

SEQ ID NO: 23259 - protein, 110 aa, Artificial Sequence; identical to SEQ ID NO: 10895
  Synthetic construct

SEQ ID NO: 23260 - protein, 111 aa, Artificial Sequence; identical to SEQ ID NO: 22696
  Synthetic construct

SEQ ID NO: 23261 - protein, 106 aa, Artificial Sequence; identical to SEQ ID NO: 2667
  Synthetic construct

SEQ ID NO: 23262 - protein, 107 aa, Artificial Sequence
  Synthetic construct
DIQMTQSPSSLSASVGDRVTITCRASQNISSYLNWFQLKPGKAPKLLISAASTLHTAVPSRFSGSGSGTDFTLTISGLQPEDFATYYCQQSYRTPPTFGQGTKVEIK

SEQ ID NO: 23263 - protein, 110 aa, Artificial Sequence
  Synthetic construct
QSVLTQPPSVSEAPGQRVTISCSGSSSNIRYNAVNWYQQLPGKAPKLLIYSDDLLPSGVSDRFSGSRSGTSASLAISGLQSEDEADYYCEAWDDSLNGPVFGGGTKLTVL

SEQ ID NO: 23264 - protein, 107 aa, Artificial Sequence
  Synthetic construct
SYELTQPPSVSVSPGQTARITCSADALPNQYAYWYQQKPGQAPVMVIYKDIERPSGIPERFSGSSSGTTVTLTISGVQAEDEADYYCQSADSSGTWVFGGGTKLTVL

SEQ ID NO: 23265 - protein, 108 aa, Artificial Sequence
  Synthetic construct
EIVLTQSPATLSLSPGERATLSCRASHSVSTYLAWYQQKPGQAPRLLIYDASNRATGIPARFSGSGSGTDFTLTISSLEPEDFAVYYCQQRSNWPPWTFGQGTKVEIK

SEQ ID NO: 23266 - protein, 115 aa, Artificial Sequence
  Synthetic construct
QAILTQPSSLSASPGASASLTCALRSGLYVDTYTIYWYQQNPGSPPQFLLRYKSDSDKQQGSGVPSRFSAFKNTSANAAILLISGLQSEDEAAYYCMIWHITAAVFGGGTKLTVL

SEQ ID NO: 23267 - protein, 107 aa, Artificial Sequence
  Synthetic construct
EIVMTQSPATLSVSPGERVTLSCRASHSVSTRLAWHQQKPGQAPRLLIYGASTRATGIPARFSGSGSGTEFTLAISSLQSEDFAVYYCQQYNSWPYTFGQGTKLEIK

SEQ ID NO: 23268 - protein, 107 aa, Artificial Sequence
  Synthetic construct
EIVLTQSPDFQSVTPKEKVTITCRASQSIGSSLHWYQQKPDQSPKLLIKYASQSFSGVPSRFSGSGSGTDFTLTINSLEAEDAATYYCHQSSTLPLTFGGGTKVEIK

SEQ ID NO: 23269 - protein, 112 aa, Artificial Sequence
  Synthetic construct
DIVMTQTPHSLSVTPGQPASISCKSSQSLLHSDGKTYLYWYLQKPGQPPQLLIYEVSNRFSGVPDRFSGSGSGTDFTLKISRVESEDVGIYYCIQSIQLPLTFGGGTKVEIK

SEQ ID NO: 23270 - protein, 6 aa, Artificial Sequence
  Synthetic construct
ALPKQY

SEQ ID NO: 23271 - protein, 6 aa, Artificial Sequence
  Synthetic construct
QSVSSN

SEQ ID NO: 23272 - protein, 6 aa, Artificial Sequence
  Synthetic construct
KLGDKF

SEQ ID NO: 23273 - protein, 9 aa, Artificial Sequence
  Synthetic construct
SSDVGSYNL

SEQ ID NO: 23274 - protein, 6 aa, Artificial Sequence
  Synthetic construct
KLGDKY

SEQ ID NO: 23275 - protein, 6 aa, Artificial Sequence
  Synthetic construct
QSVSTY

SEQ ID NO: 23276 - protein, 8 aa, Artificial Sequence
  Synthetic construct
TSNIGYNY

SEQ ID NO: 23277 - protein, 9 aa, Artificial Sequence
  Synthetic construct
SSDVGSYNR

SEQ ID NO: 23278 - protein, 9 aa, Artificial Sequence
  Synthetic construct
SSDVGGYNR

SEQ ID NO: 23279 - protein, 6 aa, Artificial Sequence
  Synthetic construct
NIGSKS

SEQ ID NO: 23280 - protein, 11 aa, Artificial Sequence
  Synthetic construct
ESLLHGDGKTY

SEQ ID NO: 23281 - protein, 6 aa, Artificial Sequence
  Synthetic construct
QSVSSY

SEQ ID NO: 23282 - protein, 6 aa, Artificial Sequence
  Synthetic construct
QSISSW

SEQ ID NO: 23283 - protein, 6 aa, Artificial Sequence
  Synthetic construct
QSISTY

SEQ ID NO: 23284 - protein, 6 aa, Artificial Sequence
  Synthetic construct
QSVSSF

SEQ ID NO: 23285 - protein, 6 aa, Artificial Sequence
  Synthetic construct
QSVSSY

SEQ ID NO: 23286 - protein, 9 aa, Artificial Sequence
  Synthetic construct
SSDVRNYNL

SEQ ID NO: 23287 - protein, 6 aa, Artificial Sequence
  Synthetic construct
QGISSW

SEQ ID NO: 23288 - protein, 6 aa, Artificial Sequence
  Synthetic construct
QDISNY

SEQ ID NO: 23289 - protein, 9 aa, Artificial Sequence
  Synthetic construct
SSDVGSYNL

SEQ ID NO: 23290 - protein, 12 aa, Artificial Sequence
  Synthetic construct
QSVLYSSNNKNF

SEQ ID NO: 23291 - protein, 6 aa, Artificial Sequence
  Synthetic construct
ALPKTY

SEQ ID NO: 23292 - protein, 6 aa, Artificial Sequence
  Synthetic construct
QGISSY

SEQ ID NO: 23293 - protein, 7 aa, Artificial Sequence
  Synthetic construct
QSVSSSY

SEQ ID NO: 23294 - protein, 8 aa, Artificial Sequence
  Synthetic construct
SSNIGLNY

SEQ ID NO: 23295 - protein, 9 aa, Artificial Sequence
  Synthetic construct
TGAVTSGYH

SEQ ID NO: 23296 - protein, 9 aa, Artificial Sequence
  Synthetic construct
SSNIGAGYD

SEQ ID NO: 23297 - protein, 4 aa, Artificial Sequence
  Synthetic construct
SSGY

SEQ ID NO: 23298 - protein, 6 aa, Artificial Sequence
  Synthetic construct
QSVSNN

SEQ ID NO: 23299 - protein, 6 aa, Artificial Sequence
  Synthetic construct
QSISGY

SEQ ID NO: 23300 - protein, 9 aa, Artificial Sequence
  Synthetic construct
SSDVGDYNY

SEQ ID NO: 23301 - protein, 6 aa, Artificial Sequence
  Synthetic construct
QGIRND

SEQ ID NO: 23302 - protein, 8 aa, Artificial Sequence
  Synthetic construct
SSNIGNNY

SEQ ID NO: 23303 - protein, 6 aa, Artificial Sequence
  Synthetic construct
QSISSW

SEQ ID NO: 23304 - protein, 8 aa, Artificial Sequence
  Synthetic construct
SSNIGGNT

SEQ ID NO: 23305 - protein, 6 aa, Artificial Sequence
  Synthetic construct
QGIANY

SEQ ID NO: 23306 - protein, 7 aa, Artificial Sequence
  Synthetic construct
QSVSSSY

SEQ ID NO: 23307 - protein, 6 aa, Artificial Sequence
  Synthetic construct
ALPKKY

SEQ ID NO: 23308 - protein, 8 aa, Artificial Sequence
  Synthetic construct
SSNIETNF

SEQ ID NO: 23309 - protein, 6 aa, Artificial Sequence
  Synthetic construct
ALPKKY

SEQ ID NO: 23310 - protein, 6 aa, Artificial Sequence
  Synthetic construct
QSISSY

SEQ ID NO: 23311 - protein, 6 aa, Artificial Sequence
  Synthetic construct
QSISTW

SEQ ID NO: 23312 - protein, 6 aa, Artificial Sequence
  Synthetic construct
QGISSY

SEQ ID NO: 23313 - protein, 7 aa, Artificial Sequence
  Synthetic construct
QSISSYY

SEQ ID NO: 23314 - protein, 9 aa, Artificial Sequence
  Synthetic construct
SSDVGSYDH

SEQ ID NO: 23315 - protein, 9 aa, Artificial Sequence
  Synthetic construct
SSDVGSYDL

SEQ ID NO: 23316 - protein, 7 aa, Artificial Sequence
  Synthetic construct
QSVNSSY

SEQ ID NO: 23317 - protein, 6 aa, Artificial Sequence
  Synthetic construct
QSVSSY

SEQ ID NO: 23318 - protein, 8 aa, Artificial Sequence
  Synthetic construct
SSNIGTNY

SEQ ID NO: 23319 - protein, 11 aa, Artificial Sequence
  Synthetic construct
QSLLHINGYNY

SEQ ID NO: 23320 - protein, 7 aa, Artificial Sequence
  Synthetic construct
QSVSSSY

SEQ ID NO: 23321 - protein, 11 aa, Artificial Sequence
  Synthetic construct
QSLLHSDGKTY

SEQ ID NO: 23322 - protein, 9 aa, Artificial Sequence
  Synthetic construct
SSDVGGYNY

SEQ ID NO: 23323 - protein, 6 aa, Artificial Sequence
  Synthetic construct
ALPKQY

SEQ ID NO: 23324 - protein, 6 aa, Artificial Sequence
  Synthetic construct
ALPKQY

SEQ ID NO: 23325 - protein, 9 aa, Artificial Sequence
  Synthetic construct
SSDVGAYNY

SEQ ID NO: 23326 - protein, 9 aa, Artificial Sequence
  Synthetic construct
SSDVGNYNL

SEQ ID NO: 23327 - protein, 9 aa, Artificial Sequence
  Synthetic construct
SSNIGAGYD

SEQ ID NO: 23328 - protein, 11 aa, Artificial Sequence
  Synthetic construct
QSLLHGDGKTY

SEQ ID NO: 23329 - protein, 8 aa, Artificial Sequence
  Synthetic construct
SSNIGNHY

SEQ ID NO: 23330 - protein, 9 aa, Artificial Sequence
  Synthetic construct
SSDVGSYDL

SEQ ID NO: 23331 - protein, 9 aa, Artificial Sequence
  Synthetic construct
SSNIGAGFD

SEQ ID NO: 23332 - protein, 6 aa, Artificial Sequence
  Synthetic construct
ALPKQY

SEQ ID NO: 23333 - protein, 11 aa, Artificial Sequence
  Synthetic construct
QSLLFSNGYTY

SEQ ID NO: 23334 - protein, 6 aa, Artificial Sequence
  Synthetic construct
QSVSNY

SEQ ID NO: 23335 - protein, 6 aa, Artificial Sequence
  Synthetic construct
ALPKKY

SEQ ID NO: 23336 - protein, 7 aa, Artificial Sequence
  Synthetic construct
QSVSSSY

SEQ ID NO: 23337 - protein, 6 aa, Artificial Sequence
  Synthetic construct
QSVSSY

SEQ ID NO: 23338 - protein, 6 aa, Artificial Sequence
  Synthetic construct
QSINNY

SEQ ID NO: 23339 - protein, 7 aa, Artificial Sequence
  Synthetic construct
QSVSSTY

SEQ ID NO: 23340 - protein, 6 aa, Artificial Sequence
  Synthetic construct
QSVSSY

SEQ ID NO: 23341 - protein, 12 aa, Artificial Sequence
  Synthetic construct
QSVLYSSNNKNY

SEQ ID NO: 23342 - protein, 7 aa, Artificial Sequence
  Synthetic construct
QSVSSTY

SEQ ID NO: 23343 - protein, 6 aa, Artificial Sequence
  Synthetic construct
NIGSKN

SEQ ID NO: 23344 - protein, 9 aa, Artificial Sequence
  Synthetic construct
SSDVGGYNY

SEQ ID NO: 23345 - protein, 8 aa, Artificial Sequence
  Synthetic construct
SSNIGSNH

SEQ ID NO: 23346 - protein, 12 aa, Artificial Sequence
  Synthetic construct
QSVLYSSNHKNY

SEQ ID NO: 23347 - protein, 6 aa, Artificial Sequence
  Synthetic construct
QSISSF

SEQ ID NO: 23348 - protein, 9 aa, Artificial Sequence
  Synthetic construct
SSDVGYYNY

SEQ ID NO: 23349 - protein, 7 aa, Artificial Sequence
  Synthetic construct
QSVKNTS

SEQ ID NO: 23350 - protein, 6 aa, Artificial Sequence
  Synthetic construct
QGISSW

SEQ ID NO: 23351 - protein, 6 aa, Artificial Sequence
  Synthetic construct
QSISTF

SEQ ID NO: 23352 - protein, 6 aa, Artificial Sequence
  Synthetic construct
ALPKKY

SEQ ID NO: 23353 - protein, 9 aa, Artificial Sequence
  Synthetic construct
SSDIGGYNY

SEQ ID NO: 23354 - protein, 9 aa, Artificial Sequence
  Synthetic construct
NSDIGSYDH

SEQ ID NO: 23355 - protein, 6 aa, Artificial Sequence
  Synthetic construct
QGISSF

SEQ ID NO: 23356 - protein, 7 aa, Artificial Sequence
  Synthetic construct
QSVSSSY

SEQ ID NO: 23357 - protein, 7 aa, Artificial Sequence
  Synthetic construct
SGHSSYA

SEQ ID NO: 23358 - protein, 9 aa, Artificial Sequence
  Synthetic construct
SSDVGGYNF

SEQ ID NO: 23359 - protein, 6 aa, Artificial Sequence
  Synthetic construct
ALPNKY

SEQ ID NO: 23360 - protein, 9 aa, Artificial Sequence
  Synthetic construct
SSDIGGYNY

SEQ ID NO: 23361 - protein, 8 aa, Artificial Sequence
  Synthetic construct
SSNIGNNY

SEQ ID NO: 23362 - protein, 6 aa, Artificial Sequence
  Synthetic construct
QNVRSN

SEQ ID NO: 23363 - protein, 6 aa, Artificial Sequence
  Synthetic construct
QSVSSF

SEQ ID NO: 23364 - protein, 6 aa, Artificial Sequence
  Synthetic construct
QGISDY

SEQ ID NO: 23365 - protein, 7 aa, Artificial Sequence
  Synthetic construct
QSVSSSY

SEQ ID NO: 23366 - protein, 6 aa, Artificial Sequence
  Synthetic construct
ALPKKY

SEQ ID NO: 23367 - protein, 6 aa, Artificial Sequence
  Synthetic construct
QSVSNF

SEQ ID NO: 23368 - protein, 8 aa, Artificial Sequence
  Synthetic construct
SSNIGNNY

SEQ ID NO: 23369 - protein, 6 aa, Artificial Sequence
  Synthetic construct
QSVSSN

SEQ ID NO: 23370 - protein, 6 aa, Artificial Sequence
  Synthetic construct
SIGSKS

SEQ ID NO: 23371 - protein, 11 aa, Artificial Sequence
  Synthetic construct
QSLLHSDGKTY

SEQ ID NO: 23372 - protein, 12 aa, Artificial Sequence
  Synthetic construct
QNVLYSSNNKNY

SEQ ID NO: 23373 - protein, 8 aa, Artificial Sequence
  Synthetic construct
SSNIGSNH

SEQ ID NO: 23374 - protein, 8 aa, Artificial Sequence
  Synthetic construct
SSNIGNNY

SEQ ID NO: 23375 - protein, 6 aa, Artificial Sequence
  Synthetic construct
QSISDY

SEQ ID NO: 23376 - protein, 9 aa, Artificial Sequence
  Synthetic construct
SSDVGSYNL

SEQ ID NO: 23377 - protein, 7 aa, Artificial Sequence
  Synthetic construct
QSVSNNY

SEQ ID NO: 23378 - protein, 6 aa, Artificial Sequence
  Synthetic construct
QSISNW

SEQ ID NO: 23379 - protein, 7 aa, Artificial Sequence
  Synthetic construct
QSVRNNY

SEQ ID NO: 23380 - protein, 6 aa, Artificial Sequence
  Synthetic construct
QDISIY

SEQ ID NO: 23381 - protein, 6 aa, Artificial Sequence
  Synthetic construct
QSISSN

SEQ ID NO: 23382 - protein, 8 aa, Artificial Sequence
  Synthetic construct
TSNIGNNY

SEQ ID NO: 23383 - protein, 7 aa, Artificial Sequence
  Synthetic construct
QSVSSNY

SEQ ID NO: 23384 - protein, 12 aa, Artificial Sequence
  Synthetic construct
QSVLYSSNNKNF

SEQ ID NO: 23385 - protein, 6 aa, Artificial Sequence
  Synthetic construct
QSVSSD

SEQ ID NO: 23386 - protein, 8 aa, Artificial Sequence
  Synthetic construct
TFNIGSNY

SEQ ID NO: 23387 - protein, 7 aa, Artificial Sequence
  Synthetic construct
QSVSSSC

SEQ ID NO: 23388 - protein, 12 aa, Artificial Sequence
  Synthetic construct
QSVLYSSSNNNY

SEQ ID NO: 23389 - protein, 12 aa, Artificial Sequence
  Synthetic construct
QSVLYSSNNKNF

SEQ ID NO: 23390 - protein, 9 aa, Artificial Sequence
  Synthetic construct
SSDVGGNDF

SEQ ID NO: 23391 - protein, 6 aa, Artificial Sequence
  Synthetic construct
NLGSQS

SEQ ID NO: 23392 - protein, 7 aa, Artificial Sequence
  Synthetic construct
QSVSSSY

SEQ ID NO: 23393 - protein, 9 aa, Artificial Sequence
  Synthetic construct
SSDVGGYNY

SEQ ID NO: 23394 - protein, 9 aa, Artificial Sequence
  Synthetic construct
SSDIGRYNL

SEQ ID NO: 23395 - protein, 6 aa, Artificial Sequence
  Synthetic construct
QGFSSW

SEQ ID NO: 23396 - protein, 6 aa, Artificial Sequence
  Synthetic construct
QSVSSY

SEQ ID NO: 23397 - protein, 8 aa, Artificial Sequence
  Synthetic construct
SGSIASNY

SEQ ID NO: 23398 - protein, 11 aa, Artificial Sequence
  Synthetic construct
QSLLDSDGKTY

SEQ ID NO: 23399 - protein, 6 aa, Artificial Sequence
  Synthetic construct
QGISSY

SEQ ID NO: 23400 - protein, 7 aa, Artificial Sequence
  Synthetic construct
QSVGGTY

SEQ ID NO: 23401 - protein, 6 aa, Artificial Sequence
  Synthetic construct
QSVSTY

SEQ ID NO: 23402 - protein, 8 aa, Artificial Sequence
  Synthetic construct
NSNIGSNA

SEQ ID NO: 23403 - protein, 6 aa, Artificial Sequence
  Synthetic construct
QSVSSY

SEQ ID NO: 23404 - protein, 6 aa, Artificial Sequence
  Synthetic construct
QGISRY

SEQ ID NO: 23405 - protein, 9 aa, Artificial Sequence
  Synthetic construct
RSDVGGYNY

SEQ ID NO: 23406 - protein, 6 aa, Artificial Sequence
  Synthetic construct
ALPKKY

SEQ ID NO: 23407 - protein, 8 aa, Artificial Sequence
  Synthetic construct
SSNIESNF

SEQ ID NO: 23408 - protein, 7 aa, Artificial Sequence
  Synthetic construct
QIISSSY

SEQ ID NO: 23409 - protein, 11 aa, Artificial Sequence
  Synthetic construct
QSLLHSDGRTY

SEQ ID NO: 23410 - protein, 9 aa, Artificial Sequence
  Synthetic construct
SSSIGAGYD

SEQ ID NO: 23411 - protein, 6 aa, Artificial Sequence
  Synthetic construct
KLGDKF

SEQ ID NO: 23412 - protein, 6 aa, Artificial Sequence
  Synthetic construct
QSIATY

SEQ ID NO: 23413 - protein, 6 aa, Artificial Sequence
  Synthetic construct
ALPKKY

SEQ ID NO: 23414 - protein, 9 aa, Artificial Sequence
  Synthetic construct
SSDVGGYNY

SEQ ID NO: 23415 - protein, 6 aa, Artificial Sequence
  Synthetic construct
ALPKTY

SEQ ID NO: 23416 - protein, 6 aa, Artificial Sequence
  Synthetic construct
QSVSSN

SEQ ID NO: 23417 - protein, 6 aa, Artificial Sequence
  Synthetic construct
QGIRND

SEQ ID NO: 23418 - protein, 6 aa, Artificial Sequence
  Synthetic construct
QSVSSN

SEQ ID NO: 23419 - protein, 12 aa, Artificial Sequence
  Synthetic construct
QSILYSPNNKSY

SEQ ID NO: 23420 - protein, 6 aa, Artificial Sequence
  Synthetic construct
ALPKKY

SEQ ID NO: 23421 - protein, 7 aa, Artificial Sequence
  Synthetic construct
QSVSSSF

SEQ ID NO: 23422 - protein, 8 aa, Artificial Sequence
  Synthetic construct
SSNIGNNY

SEQ ID NO: 23423 - protein, 6 aa, Artificial Sequence
  Synthetic construct
QSISSY

SEQ ID NO: 23424 - protein, 7 aa, Artificial Sequence
  Synthetic construct
QSVSSSY

SEQ ID NO: 23425 - protein, 6 aa, Artificial Sequence
  Synthetic construct
QGIRND

SEQ ID NO: 23426 - protein, 6 aa, Artificial Sequence
  Synthetic construct
QSIGNY

SEQ ID NO: 23427 - protein, 6 aa, Artificial Sequence
  Synthetic construct
ALPKKY

SEQ ID NO: 23428 - protein, 9 aa, Artificial Sequence
  Synthetic construct
SSDVGAYDY

SEQ ID NO: 23429 - protein, 6 aa, Artificial Sequence
  Synthetic construct
QSVSSY

SEQ ID NO: 23430 - protein, 7 aa, Artificial Sequence
  Synthetic construct
QSVSSSY

SEQ ID NO: 23431 - protein, 9 aa, Artificial Sequence
  Synthetic construct
NSNIGAGYD

SEQ ID NO: 23432 - protein, 9 aa, Artificial Sequence
  Synthetic construct
SSNIGAGYD

SEQ ID NO: 23433 - protein, 6 aa, Artificial Sequence
  Synthetic construct
KLGDKS

SEQ ID NO: 23434 - protein, 6 aa, Artificial Sequence
  Synthetic construct
QSISSY

SEQ ID NO: 23435 - protein, 12 aa, Artificial Sequence
  Synthetic construct
QSVLYSSNNKNY

SEQ ID NO: 23436 - protein, 9 aa, Artificial Sequence
  Synthetic construct
SSDVGSYDH

SEQ ID NO: 23437 - protein, 6 aa, Artificial Sequence
  Synthetic construct
QSISMW

SEQ ID NO: 23438 - protein, 6 aa, Artificial Sequence
  Synthetic construct
KLGEKY

SEQ ID NO: 23439 - protein, 9 aa, Artificial Sequence
  Synthetic construct
TGTVTSGHY

SEQ ID NO: 23440 - protein, 6 aa, Artificial Sequence
  Synthetic construct
KLGDKY

SEQ ID NO: 23441 - protein, 7 aa, Artificial Sequence
  Synthetic construct
QSVGSIY

SEQ ID NO: 23442 - protein, 6 aa, Artificial Sequence
  Synthetic construct
QDISVS

SEQ ID NO: 23443 - protein, 9 aa, Artificial Sequence
  Synthetic construct
TGAVTSGYY

SEQ ID NO: 23444 - protein, 6 aa, Artificial Sequence
  Synthetic construct
QSVSSY

SEQ ID NO: 23445 - protein, 11 aa, Artificial Sequence
  Synthetic construct
QSLLHSNGYNY

SEQ ID NO: 23446 - protein, 8 aa, Artificial Sequence
  Synthetic construct
SSNIGNNY

SEQ ID NO: 23447 - protein, 6 aa, Artificial Sequence
  Synthetic construct
QSVSSN

SEQ ID NO: 23448 - protein, 6 aa, Artificial Sequence
  Synthetic construct
SLRSFY

SEQ ID NO: 23449 - protein, 6 aa, Artificial Sequence
  Synthetic construct
QSVSSN

SEQ ID NO: 23450 - protein, 9 aa, Artificial Sequence
  Synthetic construct
SSDVGGYNY

SEQ ID NO: 23451 - protein, 7 aa, Artificial Sequence
  Synthetic construct
QSVSSTY

SEQ ID NO: 23452 - protein, 9 aa, Artificial Sequence
  Synthetic construct
SSDVGGYNY

SEQ ID NO: 23453 - protein, 6 aa, Artificial Sequence
  Synthetic construct
QGINRW

SEQ ID NO: 23454 - protein, 9 aa, Artificial Sequence
  Synthetic construct
SSNIGAGYH

SEQ ID NO: 23455 - protein, 12 aa, Artificial Sequence
  Synthetic construct
QSVLYSSKNRNY

SEQ ID NO: 23456 - protein, 6 aa, Artificial Sequence
  Synthetic construct
QSISSW

SEQ ID NO: 23457 - protein, 8 aa, Artificial Sequence
  Synthetic construct
SSNIGSNN

SEQ ID NO: 23458 - protein, 9 aa, Artificial Sequence
  Synthetic construct
SSDVGGYNY

SEQ ID NO: 23459 - protein, 7 aa, Artificial Sequence
  Synthetic construct
QSVSSSY

(The sequence listing continues in the following parts.)
